United States Patent Application Publication US 2015/0141320 A1 - sequence listing, part 28

SEQ ID NO: 1010876 - DNA, 15 bp, Homo sapiens
aatataatatgtatg

SEQ ID NO: 1010877 - DNA, 15 bp, Homo sapiens
atataatatgtatga

SEQ ID NO: 1010878 - DNA, 15 bp, Homo sapiens
tataatatgtatgag

SEQ ID NO: 1010879 - DNA, 15 bp, Homo sapiens
ataatatgtatgagt

SEQ ID NO: 1010880 - DNA, 15 bp, Homo sapiens
taatatgtatgagtt

SEQ ID NO: 1010881 - DNA, 15 bp, Homo sapiens
aatatgtatgagtta

SEQ ID NO: 1010882 - DNA, 15 bp, Homo sapiens
atatgtatgagttag

SEQ ID NO: 1010883 - DNA, 15 bp, Homo sapiens
tatgtatgagttagt

SEQ ID NO: 1010884 - DNA, 15 bp, Homo sapiens
atgtatgagttagtg

SEQ ID NO: 1010885 - DNA, 15 bp, Homo sapiens
tgtatgagttagtgt

SEQ ID NO: 1010886 - DNA, 15 bp, Homo sapiens
gtatgagttagtgtt

SEQ ID NO: 1010887 - DNA, 15 bp, Homo sapiens
tatgagttagtgttt

SEQ ID NO: 1010888 - DNA, 15 bp, Homo sapiens
atgagttagtgtttg

SEQ ID NO: 1010889 - DNA, 15 bp, Homo sapiens
tgagttagtgtttga

SEQ ID NO: 1010890 - DNA, 15 bp, Homo sapiens
gagttagtgtttgaa

SEQ ID NO: 1010891 - DNA, 15 bp, Homo sapiens
agttagtgtttgaat

SEQ ID NO: 1010892 - DNA, 15 bp, Homo sapiens
gttagtgtttgaatt

SEQ ID NO: 1010893 - DNA, 15 bp, Homo sapiens
ttagtgtttgaatta

SEQ ID NO: 1010894 - DNA, 15 bp, Homo sapiens
tagtgtttgaattaa

SEQ ID NO: 1010895 - DNA, 15 bp, Homo sapiens
agtgtttgaattaaa

SEQ ID NO: 1010896 - DNA, 15 bp, Homo sapiens
gtgtttgaattaaag

SEQ ID NO: 1010897 - DNA, 15 bp, Homo sapiens
tgtttgaattaaaga

SEQ ID NO: 1010898 - DNA, 15 bp, Homo sapiens
gtttgaattaaagac

SEQ ID NO: 1010899 - DNA, 15 bp, Homo sapiens
tttgaattaaagacg

SEQ ID NO: 1010900 - DNA, 15 bp, Homo sapiens
ttgaattaaagacgt

SEQ ID NO: 1010901 - DNA, 15 bp, Homo sapiens
tgaattaaagacgtt

SEQ ID NO: 1010902 - DNA, 15 bp, Homo sapiens
gaattaaagacgttg

SEQ ID NO: 1010903 - DNA, 15 bp, Homo sapiens
aattaaagacgttgt

SEQ ID NO: 1010904 - DNA, 15 bp, Homo sapiens
attaaagacgttgtt

SEQ ID NO: 1010905 - DNA, 15 bp, Homo sapiens
ttaaagacgttgttt

SEQ ID NO: 1010906 - DNA, 15 bp, Homo sapiens
taaagacgttgtttg

SEQ ID NO: 1010907 - DNA, 15 bp, Homo sapiens
aaagacgttgtttga

SEQ ID NO: 1010908 - DNA, 15 bp, Homo sapiens
aagacgttgtttgaa

SEQ ID NO: 1010909 - DNA, 15 bp, Homo sapiens
agacgttgtttgaag

SEQ ID NO: 1010910 - DNA, 15 bp, Homo sapiens
gacgttgtttgaaga

SEQ ID NO: 1010911 - DNA, 15 bp, Homo sapiens
acgttgtttgaagac

SEQ ID NO: 1010912 - DNA, 15 bp, Homo sapiens
cgttgtttgaagact

SEQ ID NO: 1010913 - DNA, 15 bp, Homo sapiens
gttgtttgaagactt

SEQ ID NO: 1010914 - DNA, 15 bp, Homo sapiens
ttgtttgaagacttt

SEQ ID NO: 1010915 - DNA, 15 bp, Homo sapiens
tgtttgaagactttg

SEQ ID NO: 1010916 - DNA, 15 bp, Homo sapiens
gtttgaagactttgg

SEQ ID NO: 1010917 - DNA, 15 bp, Homo sapiens
tttgaagactttgga

SEQ ID NO: 1010918 - DNA, 15 bp, Homo sapiens
ttgaagactttggaa

SEQ ID NO: 1010919 - DNA, 15 bp, Homo sapiens
tgaagactttggaaa

SEQ ID NO: 1010920 - DNA, 15 bp, Homo sapiens
gaagactttggaaat

SEQ ID NO: 1010921 - DNA, 15 bp, Homo sapiens
aagactttggaaatc

SEQ ID NO: 1010922 - DNA, 15 bp, Homo sapiens
agactttggaaatca

SEQ ID NO: 1010923 - DNA, 15 bp, Homo sapiens
gactttggaaatcat

SEQ ID NO: 1010924 - DNA, 15 bp, Homo sapiens
actttggaaatcatg

SEQ ID NO: 1010925 - DNA, 15 bp, Homo sapiens
ctttggaaatcatgg

SEQ ID NO: 1010926 - DNA, 15 bp, Homo sapiens
tttggaaatcatggt

SEQ ID NO: 1010927 - DNA, 15 bp, Homo sapiens
ttggaaatcatggtg

SEQ ID NO: 1010928 - DNA, 15 bp, Homo sapiens
tggaaatcatggtgt

SEQ ID NO: 1010929 - DNA, 15 bp, Homo sapiens
ggaaatcatggtgtg

SEQ ID NO: 1010930 - DNA, 15 bp, Homo sapiens
gaaatcatggtgtgt

SEQ ID NO: 1010931 - DNA, 15 bp, Homo sapiens
aaatcatggtgtgtg

SEQ ID NO: 1010932 - DNA, 15 bp, Homo sapiens
aatcatggtgtgtgt

SEQ ID NO: 1010933 - DNA, 15 bp, Homo sapiens
atcatggtgtgtgtt

SEQ ID NO: 1010934 - DNA, 15 bp, Homo sapiens
tcatggtgtgtgttt

SEQ ID NO: 1010935 - DNA, 15 bp, Homo sapiens
catggtgtgtgtttg

SEQ ID NO: 1010936 - DNA, 15 bp, Homo sapiens
atggtgtgtgtttgc

SEQ ID NO: 1010937 - DNA, 15 bp, Homo sapiens
tggtgtgtgtttgca

SEQ ID NO: 1010938 - DNA, 15 bp, Homo sapiens
ggtgtgtgtttgcat

SEQ ID NO: 1010939 - DNA, 15 bp, Homo sapiens
gtgtgtgtttgcatg

SEQ ID NO: 1010940 - DNA, 15 bp, Homo sapiens
tgtgtgtttgcatgg

SEQ ID NO: 1010941 - DNA, 15 bp, Homo sapiens
gtgtgtttgcatggt

SEQ ID NO: 1010942 - DNA, 15 bp, Homo sapiens
tgtgtttgcatggtc

SEQ ID NO: 1010943 - DNA, 15 bp, Homo sapiens
gtgtttgcatggtct

SEQ ID NO: 1010944 - DNA, 15 bp, Homo sapiens
tgtttgcatggtctt

SEQ ID NO: 1010945 - DNA, 15 bp, Homo sapiens
gtttgcatggtctta

SEQ ID NO: 1010946 - DNA, 15 bp, Homo sapiens
tttgcatggtcttag

SEQ ID NO: 1010947 - DNA, 15 bp, Homo sapiens
ttgcatggtcttaga

SEQ ID NO: 1010948 - DNA, 15 bp, Homo sapiens
tgcatggtcttagaa

SEQ ID NO: 1010949 - DNA, 15 bp, Homo sapiens
gcatggtcttagaaa

SEQ ID NO: 1010950 - DNA, 15 bp, Homo sapiens
catggtcttagaaag

SEQ ID NO: 1010951 - DNA, 15 bp, Homo sapiens
atggtcttagaaagt

SEQ ID NO: 1010952 - DNA, 15 bp, Homo sapiens
tggtcttagaaagtt

SEQ ID NO: 1010953 - DNA, 15 bp, Homo sapiens
ggtcttagaaagttc

SEQ ID NO: 1010954 - DNA, 15 bp, Homo sapiens
gtcttagaaagttcc

SEQ ID NO: 1010955 - DNA, 15 bp, Homo sapiens
tcttagaaagttccc

SEQ ID NO: 1010956 - DNA, 15 bp, Homo sapiens
cttagaaagttcccg

SEQ ID NO: 1010957 - DNA, 15 bp, Homo sapiens
ttagaaagttcccga

SEQ ID NO: 1010958 - DNA, 15 bp, Homo sapiens
tagaaagttcccgac

SEQ ID NO: 1010959 - DNA, 15 bp, Homo sapiens
agaaagttcccgaca

SEQ ID NO: 1010960 - DNA, 15 bp, Homo sapiens
gaaagttcccgacaa

SEQ ID NO: 1010961 - DNA, 15 bp, Homo sapiens
aaagttcccgacaaa

SEQ ID NO: 1010962 - DNA, 15 bp, Homo sapiens
aagttcccgacaaaa

SEQ ID NO: 1010963 - DNA, 15 bp, Homo sapiens
agttcccgacaaaag

SEQ ID NO: 1010964 - DNA, 15 bp, Homo sapiens
gttcccgacaaaagg

SEQ ID NO: 1010965 - DNA, 15 bp, Homo sapiens
ttcccgacaaaagga

SEQ ID NO: 1010966 - DNA, 15 bp, Homo sapiens
tcccgacaaaaggat

SEQ ID NO: 1010967 - DNA, 15 bp, Homo sapiens
cccgacaaaaggata

SEQ ID NO: 1010968 - DNA, 15 bp, Homo sapiens
ccgacaaaaggataa

SEQ ID NO: 1010969 - DNA, 15 bp, Homo sapiens
cgacaaaaggataaa

SEQ ID NO: 1010970 - DNA, 15 bp, Homo sapiens
gacaaaaggataaaa

SEQ ID NO: 1010971 - DNA, 15 bp, Homo sapiens
acaaaaggataaaac

SEQ ID NO: 1010972 - DNA, 15 bp, Homo sapiens
caaaaggataaaact

SEQ ID NO: 1010973 - DNA, 15 bp, Homo sapiens
aaaaggataaaactt

SEQ ID NO: 1010974 - DNA, 15 bp, Homo sapiens
aaaggataaaactta

SEQ ID NO: 1010975 - DNA, 15 bp, Homo sapiens
aaggataaaacttaa

SEQ ID NO: 1010976 - DNA, 15 bp, Homo sapiens
aggataaaacttaaa

SEQ ID NO: 1010977 - DNA, 15 bp, Homo sapiens
ggataaaacttaaaa

SEQ ID NO: 1010978 - DNA, 15 bp, Homo sapiens
gataaaacttaaaac

SEQ ID NO: 1010979 - DNA, 15 bp, Homo sapiens
ataaaacttaaaact

SEQ ID NO: 1010980 - DNA, 15 bp, Homo sapiens
taaaacttaaaacta

SEQ ID NO: 1010981 - DNA, 15 bp, Homo sapiens
aaaacttaaaactac

SEQ ID NO: 1010982 - DNA, 15 bp, Homo sapiens
aaacttaaaactaca

SEQ ID NO: 1010983 - DNA, 15 bp, Homo sapiens
aacttaaaactacag

SEQ ID NO: 1010984 - DNA, 15 bp, Homo sapiens
acttaaaactacagt

SEQ ID NO: 1010985 - DNA, 15 bp, Homo sapiens
cttaaaactacagtg

SEQ ID NO: 1010986 - DNA, 15 bp, Homo sapiens
ttaaaactacagtga

SEQ ID NO: 1010987 - DNA, 15 bp, Homo sapiens
taaaactacagtgat

SEQ ID NO: 1010988 - DNA, 15 bp, Homo sapiens
aaaactacagtgata

SEQ ID NO: 1010989 - DNA, 15 bp, Homo sapiens
aaactacagtgataa

SEQ ID NO: 1010990 - DNA, 15 bp, Homo sapiens
aactacagtgataaa

SEQ ID NO: 1010991 - DNA, 15 bp, Homo sapiens
actacagtgataaac

SEQ ID NO: 1010992 - DNA, 15 bp, Homo sapiens
ctacagtgataaaca

SEQ ID NO: 1010993 - DNA, 15 bp, Homo sapiens
tacagtgataaacag

SEQ ID NO: 1010994 - DNA, 15 bp, Homo sapiens
acagtgataaacaga

SEQ ID NO: 1010995 - DNA, 15 bp, Homo sapiens
cagtgataaacagag

SEQ ID NO: 1010996 - DNA, 15 bp, Homo sapiens
agtgataaacagagc

SEQ ID NO: 1010997 - DNA, 15 bp, Homo sapiens
gtgataaacagagca

SEQ ID NO: 1010998 - DNA, 15 bp, Homo sapiens
tgataaacagagcat

SEQ ID NO: 1010999 - DNA, 15 bp, Homo sapiens
gataaacagagcata

SEQ ID NO: 1011000 - DNA, 15 bp, Homo sapiens
ataaacagagcatac

SEQ ID NO: 1011001 - DNA, 15 bp, Homo sapiens
taaacagagcataca

SEQ ID NO: 1011002 - DNA, 15 bp, Homo sapiens
aaacagagcatacaa

SEQ ID NO: 1011003 - DNA, 15 bp, Homo sapiens
aacagagcatacaac

SEQ ID NO: 1011004 - DNA, 15 bp, Homo sapiens
acagagcatacaact

SEQ ID NO: 1011005 - DNA, 15 bp, Homo sapiens
cagagcatacaactc

SEQ ID NO: 1011006 - DNA, 15 bp, Homo sapiens
agagcatacaactca

SEQ ID NO: 1011007 - DNA, 15 bp, Homo sapiens
gagcatacaactcac

SEQ ID NO: 1011008 - DNA, 15 bp, Homo sapiens
agcatacaactcacg

SEQ ID NO: 1011009 - DNA, 15 bp, Homo sapiens
gcatacaactcacgt

SEQ ID NO: 1011010 - DNA, 15 bp, Homo sapiens
catacaactcacgta

SEQ ID NO: 1011011 - DNA, 15 bp, Homo sapiens
atacaactcacgtaa

SEQ ID NO: 1011012 - DNA, 15 bp, Homo sapiens
tacaactcacgtaat

SEQ ID NO: 1011013 - DNA, 15 bp, Homo sapiens
acaactcacgtaatt

SEQ ID NO: 1011014 - DNA, 15 bp, Homo sapiens
caactcacgtaattt

SEQ ID NO: 1011015 - DNA, 15 bp, Homo sapiens
aactcacgtaatttt

SEQ ID NO: 1011016 - DNA, 15 bp, Homo sapiens
actcacgtaattttg

SEQ ID NO: 1011017 - DNA, 15 bp, Homo sapiens
ctcacgtaattttgt

SEQ ID NO: 1011018 - DNA, 15 bp, Homo sapiens
tcacgtaattttgta

SEQ ID NO: 1011019 - DNA, 15 bp, Homo sapiens
cacgtaattttgtac

SEQ ID NO: 1011020 - DNA, 15 bp, Homo sapiens
acgtaattttgtact

SEQ ID NO: 1011021 - DNA, 15 bp, Homo sapiens
cgtaattttgtactt

SEQ ID NO: 1011022 - DNA, 15 bp, Homo sapiens
gtaattttgtacttt

SEQ ID NO: 1011023 - DNA, 15 bp, Homo sapiens
taattttgtactttt

SEQ ID NO: 1011024 - DNA, 15 bp, Homo sapiens
aattttgtacttttt

SEQ ID NO: 1011025 - DNA, 15 bp, Homo sapiens
attttgtactttttc

SEQ ID NO: 1011026 - DNA, 15 bp, Homo sapiens
ttttgtactttttct

SEQ ID NO: 1011027 - DNA, 15 bp, Homo sapiens
tttgtactttttctt

SEQ ID NO: 1011028 - DNA, 15 bp, Homo sapiens
ttgtactttttcttc

SEQ ID NO: 1011029 - DNA, 15 bp, Homo sapiens
tgtactttttcttcc

SEQ ID NO: 1011030 - DNA, 15 bp, Homo sapiens
gtactttttcttcct

SEQ ID NO: 1011031 - DNA, 15 bp, Homo sapiens
tactttttcttccta

SEQ ID NO: 1011032 - DNA, 15 bp, Homo sapiens
actttttcttcctat

SEQ ID NO: 1011033 - DNA, 15 bp, Homo sapiens
ctttttcttcctatt

SEQ ID NO: 1011034 - DNA, 15 bp, Homo sapiens
tttttcttcctattg

SEQ ID NO: 1011035 - DNA, 15 bp, Homo sapiens
ttttcttcctattgg

SEQ ID NO: 1011036 - DNA, 15 bp, Homo sapiens
tttcttcctattggt

SEQ ID NO: 1011037 - DNA, 15 bp, Homo sapiens
ttcttcctattggtc

SEQ ID NO: 1011038 - DNA, 15 bp, Homo sapiens
tcttcctattggtct

SEQ ID NO: 1011039 - DNA, 15 bp, Homo sapiens
cttcctattggtctt

SEQ ID NO: 1011040 - DNA, 15 bp, Homo sapiens
ttcctattggtcttt

SEQ ID NO: 1011041 - DNA, 15 bp, Homo sapiens
tcctattggtctttg

SEQ ID NO: 1011042 - DNA, 15 bp, Homo sapiens
cctattggtctttgt

SEQ ID NO: 1011043 - DNA, 15 bp, Homo sapiens
ctattggtctttgtt

SEQ ID NO: 1011044 - DNA, 15 bp, Homo sapiens
tattggtctttgttt

SEQ ID NO: 1011045 - DNA, 15 bp, Homo sapiens
attggtctttgtttt

SEQ ID NO: 1011046 - DNA, 15 bp, Homo sapiens
ttggtctttgttttt

SEQ ID NO: 1011047 - DNA, 15 bp, Homo sapiens
tggtctttgtttttc

SEQ ID NO: 1011048 - DNA, 15 bp, Homo sapiens
ggtctttgtttttct

SEQ ID NO: 1011049 - DNA, 15 bp, Homo sapiens
gtctttgtttttctc

SEQ ID NO: 1011050 - DNA, 15 bp, Homo sapiens
tctttgtttttctct

SEQ ID NO: 1011051 - DNA, 15 bp, Homo sapiens
ctttgtttttctcta

SEQ ID NO: 1011052 - DNA, 15 bp, Homo sapiens
tttgtttttctctag

SEQ ID NO: 1011053 - DNA, 15 bp, Homo sapiens
ttgtttttctctagt

SEQ ID NO: 1011054 - DNA, 15 bp, Homo sapiens
tgtttttctctagtc

SEQ ID NO: 1011055 - DNA, 15 bp, Homo sapiens
gtttttctctagtcc

SEQ ID NO: 1011056 - DNA, 15 bp, Homo sapiens
tttttctctagtccg

SEQ ID NO: 1011057 - DNA, 15 bp, Homo sapiens
ttttctctagtccgc

SEQ ID NO: 1011058 - DNA, 15 bp, Homo sapiens
tttctctagtccgca

SEQ ID NO: 1011059 - DNA, 15 bp, Homo sapiens
ttctctagtccgcat

SEQ ID NO: 1011060 - DNA, 15 bp, Homo sapiens
tctctagtccgcatt

SEQ ID NO: 1011061 - DNA, 15 bp, Homo sapiens
ctctagtccgcattg

SEQ ID NO: 1011062 - DNA, 15 bp, Homo sapiens
tctagtccgcattgg

SEQ ID NO: 1011063 - DNA, 15 bp, Homo sapiens
ctagtccgcattgga

SEQ ID NO: 1011064 - DNA, 15 bp, Homo sapiens
tagtccgcattggat

SEQ ID NO: 1011065 - DNA, 15 bp, Homo sapiens
agtccgcattggatt

SEQ ID NO: 1011066 - DNA, 15 bp, Homo sapiens
gtccgcattggattg

SEQ ID NO: 1011067 - DNA, 15 bp, Homo sapiens
tccgcattggattgg

SEQ ID NO: 1011068 - DNA, 15 bp, Homo sapiens
ccgcattggattggt

SEQ ID NO: 1011069 - DNA, 15 bp, Homo sapiens
cgcattggattggtg

SEQ ID NO: 1011070 - DNA, 15 bp, Homo sapiens
gcattggattggtgg

SEQ ID NO: 1011071 - DNA, 15 bp, Homo sapiens
cattggattggtggc

SEQ ID NO: 1011072 - DNA, 15 bp, Homo sapiens
attggattggtggcc

SEQ ID NO: 1011073 - DNA, 15 bp, Homo sapiens
ttggattggtggcct

SEQ ID NO: 1011074 - DNA, 15 bp, Homo sapiens
tggattggtggccta

SEQ ID NO: 1011075 - DNA, 15 bp, Homo sapiens
ggattggtggcctaa

SEQ ID NO: 1011076 - DNA, 15 bp, Homo sapiens
gattggtggcctaag

SEQ ID NO: 1011077 - DNA, 15 bp, Homo sapiens
attggtggcctaaga

SEQ ID NO: 1011078 - DNA, 15 bp, Homo sapiens
ttggtggcctaagat

SEQ ID NO: 1011079 - DNA, 15 bp, Homo sapiens
tggtggcctaagatt

SEQ ID NO: 1011080 - DNA, 15 bp, Homo sapiens
ggtggcctaagattg

SEQ ID NO: 1011081 - DNA, 15 bp, Homo sapiens
gtggcctaagattga

SEQ ID NO: 1011082 - DNA, 15 bp, Homo sapiens
tggcctaagattgat

SEQ ID NO: 1011083 - DNA, 15 bp, Homo sapiens
ggcctaagattgatg

SEQ ID NO: 1011084 - DNA, 15 bp, Homo sapiens
gcctaagattgatgc

SEQ ID NO: 1011085 - DNA, 15 bp, Homo sapiens
cctaagattgatgct

SEQ ID NO: 1011086 - DNA, 15 bp, Homo sapiens
ctaagattgatgctg

SEQ ID NO: 1011087 - DNA, 15 bp, Homo sapiens
taagattgatgctgt

SEQ ID NO: 1011088 - DNA, 15 bp, Homo sapiens
aagattgatgctgtg

SEQ ID NO: 1011089 - DNA, 15 bp, Homo sapiens
agattgatgctgtgt

SEQ ID NO: 1011090 - DNA, 15 bp, Homo sapiens
gattgatgctgtgta

SEQ ID NO: 1011091 - DNA, 15 bp, Homo sapiens
attgatgctgtgtat

SEQ ID NO: 1011092 - DNA, 15 bp, Homo sapiens
ttgatgctgtgtatt

SEQ ID NO: 1011093 - DNA, 15 bp, Homo sapiens
tgatgctgtgtattg

SEQ ID NO: 1011094 - DNA, 15 bp, Homo sapiens
gatgctgtgtattgt

SEQ ID NO: 1011095 - DNA, 15 bp, Homo sapiens
atgctgtgtattgtc

SEQ ID NO: 1011096 - DNA, 15 bp, Homo sapiens
tgctgtgtattgtca

SEQ ID NO: 1011097 - DNA, 15 bp, Homo sapiens
gctgtgtattgtcac

SEQ ID NO: 1011098 - DNA, 15 bp, Homo sapiens
ctgtgtattgtcact

SEQ ID NO: 1011099 - DNA, 15 bp, Homo sapiens
tgtgtattgtcactc

SEQ ID NO: 1011100 - DNA, 15 bp, Homo sapiens
gtgtattgtcactcg

SEQ ID NO: 1011101 - DNA, 15 bp, Homo sapiens
tgtattgtcactcgg

SEQ ID NO: 1011102 - DNA, 15 bp, Homo sapiens
gtattgtcactcggt

SEQ ID NO: 1011103 - DNA, 15 bp, Homo sapiens
tattgtcactcggtt

SEQ ID NO: 1011104 - DNA, 15 bp, Homo sapiens
attgtcactcggttg

SEQ ID NO: 1011105 - DNA, 15 bp, Homo sapiens
ttgtcactcggttga

SEQ ID NO: 1011106 - DNA, 15 bp, Homo sapiens
tgtcactcggttgaa

SEQ ID NO: 1011107 - DNA, 15 bp, Homo sapiens
gtcactcggttgaac

SEQ ID NO: 1011108 - DNA, 15 bp, Homo sapiens
tcactcggttgaact

SEQ ID NO: 1011109 - DNA, 15 bp, Homo sapiens
cactcggttgaactt

SEQ ID NO: 1011110 - DNA, 15 bp, Homo sapiens
actcggttgaacttc

SEQ ID NO: 1011111 - DNA, 15 bp, Homo sapiens
ctcggttgaacttcg

SEQ ID NO: 1011112 - DNA, 15 bp, Homo sapiens
tcggttgaacttcga

SEQ ID NO: 1011113 - DNA, 15 bp, Homo sapiens
cggttgaacttcgaa

SEQ ID NO: 1011114 - DNA, 15 bp, Homo sapiens
ggttgaacttcgaaa

SEQ ID NO: 1011115 - DNA, 15 bp, Homo sapiens
gttgaacttcgaaat

SEQ ID NO: 1011116 - DNA, 15 bp, Homo sapiens
ttgaacttcgaaata

SEQ ID NO: 1011117 - DNA, 15 bp, Homo sapiens
tgaacttcgaaatat

SEQ ID NO: 1011118 - DNA, 15 bp, Homo sapiens
gaacttcgaaatatg

SEQ ID NO: 1011119 - DNA, 15 bp, Homo sapiens
aacttcgaaatatgt

SEQ ID NO: 1011120 - DNA, 15 bp, Homo sapiens
acttcgaaatatgtt

SEQ ID NO: 1011121 - DNA, 15 bp, Homo sapiens
cttcgaaatatgttt

SEQ ID NO: 1011122 - DNA, 15 bp, Homo sapiens
ttcgaaatatgtttg

SEQ ID NO: 1011123 - DNA, 15 bp, Homo sapiens
tcgaaatatgtttgg

SEQ ID NO: 1011124 - DNA, 15 bp, Homo sapiens
cgaaatatgtttggt

SEQ ID NO: 1011125 - DNA, 15 bp, Homo sapiens
gaaatatgtttggtg

SEQ ID NO: 1011126 - DNA, 15 bp, Homo sapiens
aaatatgtttggtga

SEQ ID NO: 1011127 - DNA, 15 bp, Homo sapiens
aatatgtttggtgaa

SEQ ID NO: 1011128 - DNA, 15 bp, Homo sapiens
atatgtttggtgaaa

SEQ ID NO: 1011129 - DNA, 15 bp, Homo sapiens
tatgtttggtgaaac

SEQ ID NO: 1011130 - DNA, 15 bp, Homo sapiens
atgtttggtgaaaca

SEQ ID NO: 1011131 - DNA, 15 bp, Homo sapiens
tgtttggtgaaacac

SEQ ID NO: 1011132 - DNA, 15 bp, Homo sapiens
gtttggtgaaacact

SEQ ID NO: 1011133 - DNA, 15 bp, Homo sapiens
tttggtgaaacactt

SEQ ID NO: 1011134 - DNA, 15 bp, Homo sapiens
ttggtgaaacacttc

SEQ ID NO: 1011135 - DNA, 15 bp, Homo sapiens
tggtgaaacacttca

SEQ ID NO: 1011136 - DNA, 15 bp, Homo sapiens
ggtgaaacacttcat

SEQ ID NO: 1011137 - DNA, 15 bp, Homo sapiens
gtgaaacacttcata

SEQ ID NO: 1011138 - DNA, 15 bp, Homo sapiens
tgaaacacttcataa

SEQ ID NO: 1011139 - DNA, 15 bp, Homo sapiens
gaaacacttcataaa

SEQ ID NO: 1011140 - DNA, 15 bp, Homo sapiens
aaacacttcataaag

SEQ ID NO: 1011141 - DNA, 15 bp, Homo sapiens
aacacttcataaagc

SEQ ID NO: 1011142 - DNA, 15 bp, Homo sapiens
acacttcataaagca

SEQ ID NO: 1011143 - DNA, 15 bp, Homo sapiens
cacttcataaagcag

SEQ ID NO: 1011144 - DNA, 15 bp, Homo sapiens
acttcataaagcagt

SEQ ID NO: 1011145 - DNA, 15 bp, Homo sapiens
cttcataaagcagtg

SEQ ID NO: 1011146 - DNA, 15 bp, Homo sapiens
ttcataaagcagtgc

SEQ ID NO: 1011147 - DNA, 15 bp, Homo sapiens
tcataaagcagtgca

SEQ ID NO: 1011148 - DNA, 15 bp, Homo sapiens
cataaagcagtgcaa

SEQ ID NO: 1011149 - DNA, 15 bp, Homo sapiens
ataaagcagtgcaag

SEQ ID NO: 1011150 - DNA, 15 bp, Homo sapiens
taaagcagtgcaagg

SEQ ID NO: 1011151 - DNA, 15 bp, Homo sapiens
aaagcagtgcaaggt

SEQ ID NO: 1011152 - DNA, 15 bp, Homo sapiens
aagcagtgcaaggtt

SEQ ID NO: 1011153 - DNA, 15 bp, Homo sapiens
agcagtgcaaggttg

SEQ ID NO: 1011154 - DNA, 15 bp, Homo sapiens
gcagtgcaaggttgt

SEQ ID NO: 1011155 - DNA, 15 bp, Homo sapiens
cagtgcaaggttgtg

SEQ ID NO: 1011156 - DNA, 15 bp, Homo sapiens
agtgcaaggttgtgg

SEQ ID NO: 1011157 - DNA, 15 bp, Homo sapiens
gtgcaaggttgtgga

SEQ ID NO: 1011158 - DNA, 15 bp, Homo sapiens
tgcaaggttgtggag

SEQ ID NO: 1011159 - DNA, 15 bp, Homo sapiens
gcaaggttgtggagc

SEQ ID NO: 1011160 - DNA, 15 bp, Homo sapiens
caaggttgtggagca

SEQ ID NO: 1011161 - DNA, 15 bp, Homo sapiens
aaggttgtggagcac

SEQ ID NO: 1011162 - DNA, 15 bp, Homo sapiens
aggttgtggagcaca

SEQ ID NO: 1011163 - DNA, 15 bp, Homo sapiens
ggttgtggagcacac

SEQ ID NO: 1011164 - DNA, 15 bp, Homo sapiens
gttgtggagcacacc

SEQ ID NO: 1011165 - DNA, 15 bp, Homo sapiens
ttgtggagcacaccc

SEQ ID NO: 1011166 - DNA, 15 bp, Homo sapiens
tgtggagcacaccca

SEQ ID NO: 1011167 - DNA, 15 bp, Homo sapiens
gtggagcacacccag

SEQ ID NO: 1011168 - DNA, 15 bp, Homo sapiens
tggagcacacccagc

SEQ ID NO: 1011169 - DNA, 15 bp, Homo sapiens
ggagcacacccagca

SEQ ID NO: 1011170 - DNA, 15 bp, Homo sapiens
gagcacacccagcaa

SEQ ID NO: 1011171 - DNA, 15 bp, Homo sapiens
agcacacccagcaat

SEQ ID NO: 1011172 - DNA, 15 bp, Homo sapiens
gcacacccagcaata

SEQ ID NO: 1011173 - DNA, 15 bp, Homo sapiens
cacacccagcaatac

SEQ ID NO: 1011174 - DNA, 15 bp, Homo sapiens
acacccagcaatacg

SEQ ID NO: 1011175 - DNA, 15 bp, Homo sapiens
cacccagcaatacga

SEQ ID NO: 1011176 - DNA, 15 bp, Homo sapiens
acccagcaatacgaa

SEQ ID NO: 1011177 - DNA, 15 bp, Homo sapiens
cccagcaatacgaat

SEQ ID NO: 1011178 - DNA, 15 bp, Homo sapiens
ccagcaatacgaatg

SEQ ID NO: 1011179 - DNA, 15 bp, Homo sapiens
cagcaatacgaatgg

SEQ ID NO: 1011180 - DNA, 15 bp, Homo sapiens
agcaatacgaatggc

SEQ ID NO: 1011181 - DNA, 15 bp, Homo sapiens
gcaatacgaatggca

SEQ ID NO: 1011182 - DNA, 15 bp, Homo sapiens
caatacgaatggcac

SEQ ID NO: 1011183 - DNA, 15 bp, Homo sapiens
aatacgaatggcacc

SEQ ID NO: 1011184 - DNA, 15 bp, Homo sapiens
atacgaatggcaccg

SEQ ID NO: 1011185 - DNA, 15 bp, Homo sapiens
tacgaatggcaccgg

SEQ ID NO: 1011186 - DNA, 15 bp, Homo sapiens
acgaatggcaccggt

SEQ ID NO: 1011187 - DNA, 15 bp, Homo sapiens
cgaatggcaccggta

SEQ ID NO: 1011188 - DNA, 15 bp, Homo sapiens
gaatggcaccggtaa

SEQ ID NO: 1011189 - DNA, 15 bp, Homo sapiens
aatggcaccggtaag

SEQ ID NO: 1011190 - DNA, 15 bp, Homo sapiens
atggcaccggtaaga

SEQ ID NO: 1011191 - DNA, 15 bp, Homo sapiens
tggcaccggtaagat

SEQ ID NO: 1011192 - DNA, 15 bp, Homo sapiens
ggcaccggtaagata

SEQ ID NO: 1011193 - DNA, 15 bp, Homo sapiens
gcaccggtaagataa

SEQ ID NO: 1011194 - DNA, 15 bp, Homo sapiens
caccggtaagataaa

SEQ ID NO: 1011195 - DNA, 15 bp, Homo sapiens
accggtaagataaat

SEQ ID NO: 1011196 - DNA, 15 bp, Homo sapiens
ccggtaagataaatc

SEQ ID NO: 1011197 - DNA, 15 bp, Homo sapiens
cggtaagataaatca

SEQ ID NO: 1011198 - DNA, 15 bp, Homo sapiens
ggtaagataaatcac

SEQ ID NO: 1011199 - DNA, 15 bp, Homo sapiens
gtaagataaatcacg

SEQ ID NO: 1011200 - DNA, 15 bp, Homo sapiens
taagataaatcacga

SEQ ID NO: 1011201 - DNA, 15 bp, Homo sapiens
aagataaatcacgaa

SEQ ID NO: 1011202 - DNA, 15 bp, Homo sapiens
agataaatcacgaat

SEQ ID NO: 1011203 - DNA, 15 bp, Homo sapiens
gataaatcacgaatt

SEQ ID NO: 1011204 - DNA, 15 bp, Homo sapiens
ataaatcacgaattt

SEQ ID NO: 1011205 - DNA, 15 bp, Homo sapiens
taaatcacgaatttt

SEQ ID NO: 1011206 - DNA, 15 bp, Homo sapiens
aaatcacgaattttg

SEQ ID NO: 1011207 - DNA, 15 bp, Homo sapiens
aatcacgaattttga

SEQ ID NO: 1011208 - DNA, 15 bp, Homo sapiens
atcacgaattttgaa

SEQ ID NO: 1011209 - DNA, 15 bp, Homo sapiens
tcacgaattttgaat

SEQ ID NO: 1011210 - DNA, 15 bp, Homo sapiens
cacgaattttgaatc

SEQ ID NO: 1011211 - DNA, 15 bp, Homo sapiens
acgaattttgaatct

SEQ ID NO: 1011212 - DNA, 15 bp, Homo sapiens
cgaattttgaatctc

SEQ ID NO: 1011213 - DNA, 15 bp, Homo sapiens
gaattttgaatctca

SEQ ID NO: 1011214 - DNA, 15 bp, Homo sapiens
aattttgaatctcac

SEQ ID NO: 1011215 - DNA, 15 bp, Homo sapiens
attttgaatctcacc

SEQ ID NO: 1011216 - DNA, 15 bp, Homo sapiens
ttttgaatctcacct

SEQ ID NO: 1011217 - DNA, 15 bp, Homo sapiens
tttgaatctcacctc

SEQ ID NO: 1011218 - DNA, 15 bp, Homo sapiens
ttgaatctcacctcc

SEQ ID NO: 1011219 - DNA, 15 bp, Homo sapiens
tgaatctcacctcct

SEQ ID NO: 1011220 - DNA, 15 bp, Homo sapiens
gaatctcacctcctt

SEQ ID NO: 1011221 - DNA, 15 bp, Homo sapiens
aatctcacctccttt

SEQ ID NO: 1011222 - DNA, 15 bp, Homo sapiens
atctcacctcctttc

SEQ ID NO: 1011223 - DNA, 15 bp, Homo sapiens
tctcacctcctttct

SEQ ID NO: 1011224 - DNA, 15 bp, Homo sapiens
ctcacctcctttcta

SEQ ID NO: 1011225 - DNA, 15 bp, Homo sapiens
tcacctcctttctat

SEQ ID NO: 1011226 - DNA, 15 bp, Homo sapiens
cacctcctttctatt

SEQ ID NO: 1011227 - DNA, 15 bp, Homo sapiens
acctcctttctattg

SEQ ID NO: 1011228 - DNA, 15 bp, Homo sapiens
cctcctttctattgc

SEQ ID NO: 1011229 - DNA, 15 bp, Homo sapiens
ctcctttctattgca

SEQ ID NO: 1011230 - DNA, 15 bp, Homo sapiens
tcctttctattgcat

SEQ ID NO: 1011231 - DNA, 15 bp, Homo sapiens
cctttctattgcatt

SEQ ID NO: 1011232 - DNA, 15 bp, Homo sapiens
ctttctattgcattt

SEQ ID NO: 1011233 - DNA, 15 bp, Homo sapiens
tttctattgcatttt

SEQ ID NO: 1011234 - DNA, 15 bp, Homo sapiens
ttctattgcattttt

SEQ ID NO: 1011235 - DNA, 15 bp, Homo sapiens
tctattgcatttttt

SEQ ID NO: 1011236 - DNA, 15 bp, Homo sapiens
ctattgcattttttt

SEQ ID NO: 1011237 - DNA, 15 bp, Homo sapiens
tattgcatttttttt

SEQ ID NO: 1011238 - DNA, 15 bp, Homo sapiens
attgcatttttttta

SEQ ID NO: 1011239 - DNA, 15 bp, Homo sapiens
ttgcattttttttag

SEQ ID NO: 1011240 - DNA, 15 bp, Homo sapiens
tgcattttttttagt

SEQ ID NO: 1011241 - DNA, 15 bp, Homo sapiens
gcattttttttagtg

SEQ ID NO: 1011242 - DNA, 15 bp, Homo sapiens
cattttttttagtgt

SEQ ID NO: 1011243 - DNA, 15 bp, Homo sapiens
attttttttagtgtc

SEQ ID NO: 1011244 - DNA, 15 bp, Homo sapiens
tttttttagtgtctt

SEQ ID NO: 1011245 - DNA, 15 bp, Homo sapiens
ttttttagtgtcttt

SEQ ID NO: 1011246 - DNA, 15 bp, Homo sapiens
tttttagtgtcttta

SEQ ID NO: 1011247 - DNA, 15 bp, Homo sapiens
ttttagtgtctttat

SEQ ID NO: 1011248 - DNA, 15 bp, Homo sapiens
tttagtgtctttatc

SEQ ID NO: 1011249 - DNA, 15 bp, Homo sapiens
ttagtgtctttatcc

SEQ ID NO: 1011250 - DNA, 15 bp, Homo sapiens
tagtgtctttatcct

SEQ ID NO: 1011251 - DNA, 15 bp, Homo sapiens
agtgtctttatccta

SEQ ID NO: 1011252 - DNA, 15 bp, Homo sapiens
gtgtctttatcctat

SEQ ID NO: 1011253 - DNA, 15 bp, Homo sapiens
tgtctttatcctatt

SEQ ID NO: 1011254 - DNA, 15 bp, Homo sapiens
gtctttatcctattc

SEQ ID NO: 1011255 - DNA, 15 bp, Homo sapiens
tctttatcctattcc

SEQ ID NO: 1011256 - DNA, 15 bp, Homo sapiens
ctttatcctattcct

SEQ ID NO: 1011257 - DNA, 15 bp, Homo sapiens
tttatcctattcctg

SEQ ID NO: 1011258 - DNA, 15 bp, Homo sapiens
ttatcctattcctgc

SEQ ID NO: 1011259 - DNA, 15 bp, Homo sapiens
tatcctattcctgct

SEQ ID NO: 1011260 - DNA, 15 bp, Homo sapiens
atcctattcctgctg

SEQ ID NO: 1011261 - DNA, 15 bp, Homo sapiens
tcctattcctgctgc

SEQ ID NO: 1011262 - DNA, 15 bp, Homo sapiens
cctattcctgctgct

SEQ ID NO: 1011263 - DNA, 15 bp, Homo sapiens
ctattcctgctgctt

SEQ ID NO: 1011264 - DNA, 15 bp, Homo sapiens
tattcctgctgcttt

SEQ ID NO: 1011265 - DNA, 15 bp, Homo sapiens
attcctgctgctttg

SEQ ID NO: 1011266 - DNA, 15 bp, Homo sapiens
ttcctgctgctttgg

SEQ ID NO: 1011267 - DNA, 15 bp, Homo sapiens
tcctgctgctttggt

SEQ ID NO: 1011268 - DNA, 15 bp, Homo sapiens
cctgctgctttggtt

SEQ ID NO: 1011269 - DNA, 15 bp, Homo sapiens
ctgctgctttggtta

SEQ ID NO: 1011270 - DNA, 15 bp, Homo sapiens
tgctgctttggttat

SEQ ID NO: 1011271 - DNA, 15 bp, Homo sapiens
gctgctttggttatt

SEQ ID NO: 1011272 - DNA, 15 bp, Homo sapiens
ctgctttggttattt

SEQ ID NO: 1011273 - DNA, 15 bp, Homo sapiens
tgctttggttatttt

SEQ ID NO: 1011274 - DNA, 15 bp, Homo sapiens
gctttggttatttta

SEQ ID NO: 1011275 - DNA, 15 bp, Homo sapiens
ctttggttattttag

SEQ ID NO: 1011276 - DNA, 15 bp, Homo sapiens
tttggttattttaga

SEQ ID NO: 1011277 - DNA, 15 bp, Homo sapiens
ttggttattttagag

SEQ ID NO: 1011278 - DNA, 15 bp, Homo sapiens
tggttattttagaga

SEQ ID NO: 1011279 - DNA, 15 bp, Homo sapiens
ggttattttagagaa

SEQ ID NO: 1011280 - DNA, 15 bp, Homo sapiens
gttattttagagaat

SEQ ID NO: 1011281 - DNA, 15 bp, Homo sapiens
ttattttagagaatt

SEQ ID NO: 1011282 - DNA, 15 bp, Homo sapiens
tattttagagaattg

SEQ ID NO: 1011283 - DNA, 15 bp, Homo sapiens
attttagagaattga

SEQ ID NO: 1011284 - DNA, 15 bp, Homo sapiens
ttttagagaattgaa

SEQ ID NO: 1011285 - DNA, 15 bp, Homo sapiens
tttagagaattgaat

SEQ ID NO: 1011286 - DNA, 15 bp, Homo sapiens
ttagagaattgaatg

SEQ ID NO: 1011287 - DNA, 15 bp, Homo sapiens
tagagaattgaatgg

SEQ ID NO: 1011288 - DNA, 15 bp, Homo sapiens
agagaattgaatggg

SEQ ID NO: 1011289 - DNA, 15 bp, Homo sapiens
gagaattgaatgggt

SEQ ID NO: 1011290 - DNA, 15 bp, Homo sapiens
agaattgaatgggtc

SEQ ID NO: 1011291 - DNA, 15 bp, Homo sapiens
gaattgaatgggtcc

SEQ ID NO: 1011292 - DNA, 15 bp, Homo sapiens
aattgaatgggtcct

SEQ ID NO: 1011293 - DNA, 15 bp, Homo sapiens
attgaatgggtcctt

SEQ ID NO: 1011294 - DNA, 15 bp, Homo sapiens
ttgaatgggtccttc

SEQ ID NO: 1011295 - DNA, 15 bp, Homo sapiens
tgaatgggtccttca

SEQ ID NO: 1011296 - DNA, 15 bp, Homo sapiens
gaatgggtccttcat

SEQ ID NO: 1011297 - DNA, 15 bp, Homo sapiens
aatgggtccttcatt

SEQ ID NO: 1011298 - DNA, 15 bp, Homo sapiens
atgggtccttcattt

SEQ ID NO: 1011299 - DNA, 15 bp, Homo sapiens
tgggtccttcatttc

SEQ ID NO: 1011300 - DNA, 15 bp, Homo sapiens
gggtccttcatttcc

SEQ ID NO: 1011301 - DNA, 15 bp, Homo sapiens
ggtccttcatttcct

SEQ ID NO: 1011302 - DNA, 15 bp, Homo sapiens
gtccttcatttcctc

SEQ ID NO: 1011303 - DNA, 15 bp, Homo sapiens
tccttcatttcctct

SEQ ID NO: 1011304 - DNA, 15 bp, Homo sapiens
ccttcatttcctcta

SEQ ID NO: 1011305 - DNA, 15 bp, Homo sapiens
cttcatttcctctaa

SEQ ID NO: 1011306 - DNA, 15 bp, Homo sapiens
ttcatttcctctaaa

SEQ ID NO: 1011307 - DNA, 15 bp, Homo sapiens
tcatttcctctaaat

SEQ ID NO: 1011308 - DNA, 15 bp, Homo sapiens
catttcctctaaatg

SEQ ID NO: 1011309 - DNA, 15 bp, Homo sapiens
atttcctctaaatgt

SEQ ID NO: 1011310 - DNA, 15 bp, Homo sapiens
tttcctctaaatgtt

SEQ ID NO: 1011311 - DNA, 15 bp, Homo sapiens
ttcctctaaatgttg

SEQ ID NO: 1011312 - DNA, 15 bp, Homo sapiens
tcctctaaatgttgt

SEQ ID NO: 1011313 - DNA, 15 bp, Homo sapiens
cctctaaatgttgtg

SEQ ID NO: 1011314 - DNA, 15 bp, Homo sapiens
ctctaaatgttgtgg

SEQ ID NO: 1011315 - DNA, 15 bp, Homo sapiens
tctaaatgttgtggt

SEQ ID NO: 1011316 - DNA, 15 bp, Homo sapiens
ctaaatgttgtggta

SEQ ID NO: 1011317 - DNA, 15 bp, Homo sapiens
taaatgttgtggtat

SEQ ID NO: 1011318 - DNA, 15 bp, Homo sapiens
aaatgttgtggtatg

SEQ ID NO: 1011319 - DNA, 15 bp, Homo sapiens
aatgttgtggtatgt

SEQ ID NO: 1011320 - DNA, 15 bp, Homo sapiens
atgttgtggtatgtt

SEQ ID NO: 1011321 - DNA, 15 bp, Homo sapiens
tgttgtggtatgttg

SEQ ID NO: 1011322 - DNA, 15 bp, Homo sapiens
gttgtggtatgttgt

SEQ ID NO: 1011323 - DNA, 15 bp, Homo sapiens
ttgtggtatgttgta

SEQ ID NO: 1011324 - DNA, 15 bp, Homo sapiens
tgtggtatgttgtat

SEQ ID NO: 1011325 - DNA, 15 bp, Homo sapiens
gtggtatgttgtatc

SEQ ID NO: 1011326 - DNA, 15 bp, Homo sapiens
tggtatgttgtatct

SEQ ID NO: 1011327 - DNA, 15 bp, Homo sapiens
ggtatgttgtatcta

SEQ ID NO: 1011328 - DNA, 15 bp, Homo sapiens
gtatgttgtatctag

SEQ ID NO: 1011329 - DNA, 15 bp, Homo sapiens
tatgttgtatctaga

SEQ ID NO: 1011330 - DNA, 15 bp, Homo sapiens
atgttgtatctagaa

SEQ ID NO: 1011331 - DNA, 15 bp, Homo sapiens
tgttgtatctagaat

SEQ ID NO: 1011332 - DNA, 15 bp, Homo sapiens
gttgtatctagaata

SEQ ID NO: 1011333 - DNA, 15 bp, Homo sapiens
ttgtatctagaatat

SEQ ID NO: 1011334 - DNA, 15 bp, Homo sapiens
tgtatctagaatatt

SEQ ID NO: 1011335 - DNA, 15 bp, Homo sapiens
gtatctagaatattg

SEQ ID NO: 1011336 - DNA, 15 bp, Homo sapiens
tatctagaatattgt

SEQ ID NO: 1011337 - DNA, 15 bp, Homo sapiens
atctagaatattgtt

SEQ ID NO: 1011338 - DNA, 15 bp, Homo sapiens
tctagaatattgttg

SEQ ID NO: 1011339 - DNA, 15 bp, Homo sapiens
ctagaatattgttga

SEQ ID NO: 1011340 - DNA, 15 bp, Homo sapiens
tagaatattgttgaa

SEQ ID NO: 1011341 - DNA, 15 bp, Homo sapiens
agaatattgttgaat

SEQ ID NO: 1011342 - DNA, 15 bp, Homo sapiens
gaatattgttgaata

SEQ ID NO: 1011343 - DNA, 15 bp, Homo sapiens
aatattgttgaatac

SEQ ID NO: 1011344 - DNA, 15 bp, Homo sapiens
atattgttgaatact

SEQ ID NO: 1011345 - DNA, 15 bp, Homo sapiens
tattgttgaatacta

SEQ ID NO: 1011346 - DNA, 15 bp, Homo sapiens
attgttgaatactag

SEQ ID NO: 1011347 - DNA, 15 bp, Homo sapiens
ttgttgaatactaga

SEQ ID NO: 1011348 - DNA, 15 bp, Homo sapiens
tgttgaatactagat

SEQ ID NO: 1011349 - DNA, 15 bp, Homo sapiens
gttgaatactagatt

SEQ ID NO: 1011350 - DNA, 15 bp, Homo sapiens
ttgaatactagatta

SEQ ID NO: 1011351 - DNA, 15 bp, Homo sapiens
tgaatactagattat

SEQ ID NO: 1011352 - DNA, 15 bp, Homo sapiens
gaatactagattatg

SEQ ID NO: 1011353 - DNA, 15 bp, Homo sapiens
aatactagattatgt

SEQ ID NO: 1011354 - DNA, 15 bp, Homo sapiens
atactagattatgtt

SEQ ID NO: 1011355 - DNA, 15 bp, Homo sapiens
tactagattatgttt

SEQ ID NO: 1011356 - DNA, 15 bp, Homo sapiens
actagattatgtttg

SEQ ID NO: 1011357 - DNA, 15 bp, Homo sapiens
ctagattatgtttgt

SEQ ID NO: 1011358 - DNA, 15 bp, Homo sapiens
tagattatgtttgtt

SEQ ID NO: 1011359 - DNA, 15 bp, Homo sapiens
agattatgtttgttt

SEQ ID NO: 1011360 - DNA, 15 bp, Homo sapiens
gattatgtttgtttt

SEQ ID NO: 1011361 - DNA, 15 bp, Homo sapiens
attatgtttgttttc

SEQ ID NO: 1011362 - DNA, 15 bp, Homo sapiens
ttatgtttgttttcc

SEQ ID NO: 1011363 - DNA, 15 bp, Homo sapiens
tatgtttgttttcca

SEQ ID NO: 1011364 - DNA, 15 bp, Homo sapiens
atgtttgttttccac

SEQ ID NO: 1011365 - DNA, 15 bp, Homo sapiens
tgtttgttttccact

SEQ ID NO: 1011366 - DNA, 15 bp, Homo sapiens
gtttgttttccactg

SEQ ID NO: 1011367 - DNA, 15 bp, Homo sapiens
tttgttttccactgt

SEQ ID NO: 1011368 - DNA, 15 bp, Homo sapiens
ttgttttccactgtt

SEQ ID NO: 1011369 - DNA, 15 bp, Homo sapiens
tgttttccactgttt

SEQ ID NO: 1011370 - DNA, 15 bp, Homo sapiens
gttttccactgtttc

SEQ ID NO: 1011371 - DNA, 15 bp, Homo sapiens
ttttccactgtttcc

SEQ ID NO: 1011372 - DNA, 15 bp, Homo sapiens
tttccactgtttcca

SEQ ID NO: 1011373 - DNA, 15 bp, Homo sapiens
ttccactgtttccat

SEQ ID NO: 1011374 - DNA, 15 bp, Homo sapiens
tccactgtttccatg

SEQ ID NO: 1011375 - DNA, 15 bp, Homo sapiens
ccactgtttccatga

SEQ ID NO: 1011376 - DNA, 15 bp, Homo sapiens
cactgtttccatgag

SEQ ID NO: 1011377 - DNA, 15 bp, Homo sapiens
actgtttccatgagt

SEQ ID NO: 1011378 - DNA, 15 bp, Homo sapiens
ctgtttccatgagtt

SEQ ID NO: 1011379 - DNA, 15 bp, Homo sapiens
tgtttccatgagttg

SEQ ID NO: 1011380 - DNA, 15 bp, Homo sapiens
gtttccatgagttga

SEQ ID NO: 1011381 - DNA, 15 bp, Homo sapiens
tttccatgagttgaa

SEQ ID NO: 1011382 - DNA, 15 bp, Homo sapiens
ttccatgagttgaac

SEQ ID NO: 1011383 - DNA, 15 bp, Homo sapiens
tccatgagttgaact

SEQ ID NO: 1011384 - DNA, 15 bp, Homo sapiens
ccatgagttgaactt

SEQ ID NO: 1011385 - DNA, 15 bp, Homo sapiens
catgagttgaactta

SEQ ID NO: 1011386 - DNA, 15 bp, Homo sapiens
atgagttgaacttaa

SEQ ID NO: 1011387 - DNA, 15 bp, Homo sapiens
tgagttgaacttaac

SEQ ID NO: 1011388 - DNA, 15 bp, Homo sapiens
gagttgaacttaact

SEQ ID NO: 1011389 - DNA, 15 bp, Homo sapiens
agttgaacttaactt

SEQ ID NO: 1011390 - DNA, 15 bp, Homo sapiens
gttgaacttaacttt

SEQ ID NO: 1011391 - DNA, 15 bp, Homo sapiens
ttgaacttaactttt

SEQ ID NO: 1011392 - DNA, 15 bp, Homo sapiens
tgaacttaacttttc

SEQ ID NO: 1011393 - DNA, 15 bp, Homo sapiens
gaacttaacttttct

SEQ ID NO: 1011394 - DNA, 15 bp, Homo sapiens
aacttaacttttctt

SEQ ID NO: 1011395 - DNA, 15 bp, Homo sapiens
acttaacttttctta

SEQ ID NO: 1011396 - DNA, 15 bp, Homo sapiens
cttaacttttcttag

SEQ ID NO: 1011397 - DNA, 15 bp, Homo sapiens
ttaacttttcttaga

SEQ ID NO: 1011398 - DNA, 15 bp, Homo sapiens
taacttttcttagat

SEQ ID NO: 1011399 - DNA, 15 bp, Homo sapiens
aacttttcttagata

SEQ ID NO: 1011400 - DNA, 15 bp, Homo sapiens
acttttcttagataa

SEQ ID NO: 1011401 - DNA, 15 bp, Homo sapiens
cttttcttagataaa

SEQ ID NO: 1011402 - DNA, 15 bp, Homo sapiens
ttttcttagataaat

SEQ ID NO: 1011403 - DNA, 15 bp, Homo sapiens
tttcttagataaatt

SEQ ID NO: 1011404 - DNA, 15 bp, Homo sapiens
ttcttagataaattt

SEQ ID NO: 1011405 - DNA, 15 bp, Homo sapiens
tcttagataaatttt

SEQ ID NO: 1011406 - DNA, 15 bp, Homo sapiens
cttagataaattttc

SEQ ID NO: 1011407 - DNA, 15 bp, Homo sapiens
ttagataaattttct

SEQ ID NO: 1011408 - DNA, 15 bp, Homo sapiens
tagataaattttctc

SEQ ID NO: 1011409 - DNA, 15 bp, Homo sapiens
agataaattttctca

SEQ ID NO: 1011410 - DNA, 15 bp, Homo sapiens
gataaattttctcac

SEQ ID NO: 1011411 - DNA, 15 bp, Homo sapiens
ataaattttctcaca

SEQ ID NO: 1011412 - DNA, 15 bp, Homo sapiens
taaattttctcacaa

SEQ ID NO: 1011413 - DNA, 15 bp, Homo sapiens
aaattttctcacaaa

SEQ ID NO: 1011414 - DNA, 15 bp, Homo sapiens
aattttctcacaaaa

SEQ ID NO: 1011415 - DNA, 15 bp, Homo sapiens
attttctcacaaaac

SEQ ID NO: 1011416 - DNA, 15 bp, Homo sapiens
ttttctcacaaaaca

SEQ ID NO: 1011417 - DNA, 15 bp, Homo sapiens
tttctcacaaaacac

SEQ ID NO: 1011418 - DNA, 15 bp, Homo sapiens
ttctcacaaaacact

SEQ ID NO: 1011419 - DNA, 15 bp, Homo sapiens
tctcacaaaacactg

SEQ ID NO: 1011420 - DNA, 15 bp, Homo sapiens
ctcacaaaacactga

SEQ ID NO: 1011421 - DNA, 15 bp, Homo sapiens
tcacaaaacactgaa

SEQ ID NO: 1011422 - DNA, 15 bp, Homo sapiens
cacaaaacactgaaa

SEQ ID NO: 1011423 - DNA, 15 bp, Homo sapiens
acaaaacactgaaag

SEQ ID NO: 1011424 - DNA, 15 bp, Homo sapiens
caaaacactgaaagt

SEQ ID NO: 1011425 - DNA, 15 bp, Homo sapiens
aaaacactgaaagtc

SEQ ID NO: 1011426 - DNA, 15 bp, Homo sapiens
aaacactgaaagtct

SEQ ID NO: 1011427 - DNA, 15 bp, Homo sapiens
aacactgaaagtctt

SEQ ID NO: 1011428 - DNA, 15 bp, Homo sapiens
acactgaaagtctta

SEQ ID NO: 1011429 - DNA, 15 bp, Homo sapiens
cactgaaagtcttaa

SEQ ID NO: 1011430 - DNA, 15 bp, Homo sapiens
actgaaagtcttaat

SEQ ID NO: 1011431 - DNA, 15 bp, Homo sapiens
ctgaaagtcttaatg

SEQ ID NO: 1011432 - DNA, 15 bp, Homo sapiens
tgaaagtcttaatga

SEQ ID NO: 1011433 - DNA, 15 bp, Homo sapiens
gaaagtcttaatgaa

SEQ ID NO: 1011434 - DNA, 15 bp, Homo sapiens
aaagtcttaatgaat

SEQ ID NO: 1011435 - DNA, 15 bp, Homo sapiens
aagtcttaatgaatg

SEQ ID NO: 1011436 - DNA, 15 bp, Homo sapiens
agtcttaatgaatgt

SEQ ID NO: 1011437 - DNA, 15 bp, Homo sapiens
gtcttaatgaatgtc

SEQ ID NO: 1011438 - DNA, 15 bp, Homo sapiens
tcttaatgaatgtca

SEQ ID NO: 1011439 - DNA, 15 bp, Homo sapiens
cttaatgaatgtcac

SEQ ID NO: 1011440 - DNA, 15 bp, Homo sapiens
ttaatgaatgtcacc

SEQ ID NO: 1011441 - DNA, 15 bp, Homo sapiens
taatgaatgtcacct

SEQ ID NO: 1011442 - DNA, 15 bp, Homo sapiens
aatgaatgtcacctt

SEQ ID NO: 1011443 - DNA, 15 bp, Homo sapiens
atgaatgtcaccttt

SEQ ID NO: 1011444 - DNA, 15 bp, Homo sapiens
tgaatgtcacctttt

SEQ ID NO: 1011445 - DNA, 15 bp, Homo sapiens
gaatgtcaccttttt

SEQ ID NO: 1011446 - DNA, 15 bp, Homo sapiens
aatgtcacctttttt

SEQ ID NO: 1011447 - DNA, 15 bp, Homo sapiens
atgtcaccttttttt

SEQ ID NO: 1011448 - DNA, 15 bp, Homo sapiens
tgtcacctttttttt

SEQ ID NO: 1011449 - DNA, 15 bp, Homo sapiens
gtcaccttttttttc

SEQ ID NO: 1011450 - DNA, 15 bp, Homo sapiens
tcaccttttttttct

SEQ ID NO: 1011451 - DNA, 15 bp, Homo sapiens
caccttttttttctg

SEQ ID NO: 1011452 - DNA, 15 bp, Homo sapiens
accttttttttctgt

SEQ ID NO: 1011453 - DNA, 15 bp, Homo sapiens
ccttttttttctgtt

SEQ ID NO: 1011454 - DNA, 15 bp, Homo sapiens
cttttttttctgttt

SEQ ID NO: 1011455 - DNA, 15 bp, Homo sapiens
ttttttttctgtttt

SEQ ID NO: 1011456 - DNA, 15 bp, Homo sapiens
tttttttctgttttt

SEQ ID NO: 1011457 - DNA, 15 bp, Homo sapiens
ttttttctgttttta

SEQ ID NO: 1011458 - DNA, 15 bp, Homo sapiens
tttttctgtttttaa

SEQ ID NO: 1011459 - DNA, 15 bp, Homo sapiens
ttttctgtttttaaa

SEQ ID NO: 1011460 - DNA, 15 bp, Homo sapiens
tttctgtttttaaag

SEQ ID NO: 1011461 - DNA, 15 bp, Homo sapiens
ttctgtttttaaagt

SEQ ID NO: 1011462 - DNA, 15 bp, Homo sapiens
tctgtttttaaagtt

SEQ ID NO: 1011463 - DNA, 15 bp, Homo sapiens
ctgtttttaaagttt

SEQ ID NO: 1011464 - DNA, 15 bp, Homo sapiens
tgtttttaaagtttt

SEQ ID NO: 1011465 - DNA, 15 bp, Homo sapiens
gtttttaaagttttt

SEQ ID NO: 1011466 - DNA, 15 bp, Homo sapiens
tttttaaagtttttt

SEQ ID NO: 1011467 - DNA, 15 bp, Homo sapiens
ttttaaagttttttt

SEQ ID NO: 1011468 - DNA, 15 bp, Homo sapiens
tttaaagtttttttt

SEQ ID NO: 1011469 - DNA, 15 bp, Homo sapiens
ttaaagttttttttc

SEQ ID NO: 1011470 - DNA, 15 bp, Homo sapiens
taaagttttttttct

SEQ ID NO: 1011471 - DNA, 15 bp, Homo sapiens
aaagttttttttctc

SEQ ID NO: 1011472 - DNA, 15 bp, Homo sapiens
aagttttttttctcc

SEQ ID NO: 1011473 - DNA, 15 bp, Homo sapiens
agttttttttctcct

SEQ ID NO: 1011474 - DNA, 15 bp, Homo sapiens
gttttttttctcctt

SEQ ID NO: 1011475 - DNA, 15 bp, Homo sapiens
ttttttttctcctta

SEQ ID NO: 1011476 - DNA, 15 bp, Homo sapiens
tttttttctccttaa

SEQ ID NO: 1011477 - DNA, 15 bp, Homo sapiens
ttttttctccttaaa

SEQ ID NO: 1011478 - DNA, 15 bp, Homo sapiens
tttttctccttaaaa

SEQ ID NO: 1011479 - DNA, 15 bp, Homo sapiens
ttttctccttaaaac

SEQ ID NO: 1011480 - DNA, 15 bp, Homo sapiens
tttctccttaaaact

SEQ ID NO: 1011481 - DNA, 15 bp, Homo sapiens
ttctccttaaaactt

SEQ ID NO: 1011482 - DNA, 15 bp, Homo sapiens
tctccttaaaacttt

SEQ ID NO: 1011483 - DNA, 15 bp, Homo sapiens
ctccttaaaactttt

SEQ ID NO: 1011484 - DNA, 15 bp, Homo sapiens
tccttaaaacttttg

SEQ ID NO: 1011485 - DNA, 15 bp, Homo sapiens
ccttaaaacttttga

SEQ ID NO: 1011486 - DNA, 15 bp, Homo sapiens
cttaaaacttttgaa

SEQ ID NO: 1011487 - DNA, 15 bp, Homo sapiens
ttaaaacttttgaac

SEQ ID NO: 1011488 - DNA, 15 bp, Homo sapiens
taaaacttttgaaca

SEQ ID NO: 1011489 - DNA, 15 bp, Homo sapiens
aaaacttttgaacaa

SEQ ID NO: 1011490 - DNA, 15 bp, Homo sapiens
aaacttttgaacaaa

SEQ ID NO: 1011491 - DNA, 15 bp, Homo sapiens
aacttttgaacaaaa

SEQ ID NO: 1011492 - DNA, 15 bp, Homo sapiens
acttttgaacaaaaa

SEQ ID NO: 1011493 - DNA, 15 bp, Homo sapiens
cttttgaacaaaaat

SEQ ID NO: 1011494 - DNA, 15 bp, Homo sapiens
ttttgaacaaaaata

SEQ ID NO: 1011495 - DNA, 15 bp, Homo sapiens
tttgaacaaaaatat

SEQ ID NO: 1011496 - DNA, 15 bp, Homo sapiens
ttgaacaaaaatatt

SEQ ID NO: 1011497 - DNA, 15 bp, Homo sapiens
tgaacaaaaatattt

SEQ ID NO: 1011498 - DNA, 15 bp, Homo sapiens
gaacaaaaatatttt

SEQ ID NO: 1011499 - DNA, 15 bp, Homo sapiens
aacaaaaatattttg

SEQ ID NO: 1011500 - DNA, 15 bp, Homo sapiens
acaaaaatattttga

SEQ ID NO: 1011501 - DNA, 15 bp, Homo sapiens
caaaaatattttgat

SEQ ID NO: 1011502 - DNA, 15 bp, Homo sapiens
aaaaatattttgatt

SEQ ID NO: 1011503 - DNA, 15 bp, Homo sapiens
aaaatattttgatta

SEQ ID NO: 1011504 - DNA, 15 bp, Homo sapiens
aaatattttgattag

SEQ ID NO: 1011505 - DNA, 15 bp, Homo sapiens
aatattttgattagc

SEQ ID NO: 1011506 - DNA, 15 bp, Homo sapiens
atattttgattagcc

SEQ ID NO: 1011507 - DNA, 15 bp, Homo sapiens
tattttgattagcct

SEQ ID NO: 1011508 - DNA, 15 bp, Homo sapiens
attttgattagcctc

SEQ ID NO: 1011509 - DNA, 15 bp, Homo sapiens
ttttgattagcctct

SEQ ID NO: 1011510 - DNA, 15 bp, Homo sapiens
tttgattagcctctc

SEQ ID NO: 1011511 - DNA, 15 bp, Homo sapiens
ttgattagcctctca

SEQ ID NO: 1011512 - DNA, 15 bp, Homo sapiens
tgattagcctctcac

SEQ ID NO: 1011513 - DNA, 15 bp, Homo sapiens
gattagcctctcacg

SEQ ID NO: 1011514 - DNA, 15 bp, Homo sapiens
attagcctctcacgt

SEQ ID NO: 1011515 - DNA, 15 bp, Homo sapiens
ttagcctctcacgtt

SEQ ID NO: 1011516 - DNA, 15 bp, Homo sapiens
tagcctctcacgttt

SEQ ID NO: 1011517 - DNA, 15 bp, Homo sapiens
agcctctcacgtttt

SEQ ID NO: 1011518 - DNA, 15 bp, Homo sapiens
gcctctcacgttttg

SEQ ID NO: 1011519 - DNA, 15 bp, Homo sapiens
cctctcacgttttgg

SEQ ID NO: 1011520 - DNA, 15 bp, Homo sapiens
ctctcacgttttggg

SEQ ID NO: 1011521 - DNA, 15 bp, Homo sapiens
tctcacgttttgggg

SEQ ID NO: 1011522 - DNA, 15 bp, Homo sapiens
ctcacgttttgggga

SEQ ID NO: 1011523 - DNA, 15 bp, Homo sapiens
tcacgttttggggat

SEQ ID NO: 1011524 - DNA, 15 bp, Homo sapiens
cacgttttggggatg

SEQ ID NO: 1011525 - DNA, 15 bp, Homo sapiens
acgttttggggatga

SEQ ID NO: 1011526 - DNA, 15 bp, Homo sapiens
cgttttggggatgag

SEQ ID NO: 1011527 - DNA, 15 bp, Homo sapiens
gttttggggatgagt

SEQ ID NO: 1011528 - DNA, 15 bp, Homo sapiens
ttttggggatgagta

SEQ ID NO: 1011529 - DNA, 15 bp, Homo sapiens
tttggggatgagtaa

SEQ ID NO: 1011530 - DNA, 15 bp, Homo sapiens
ttggggatgagtaag

SEQ ID NO: 1011531 - DNA, 15 bp, Homo sapiens
tggggatgagtaagg

SEQ ID NO: 1011532 - DNA, 15 bp, Homo sapiens
ggggatgagtaaggg

SEQ ID NO: 1011533 - DNA, 15 bp, Homo sapiens
gggatgagtaaggga

SEQ ID NO: 1011534 - DNA, 15 bp, Homo sapiens
ggatgagtaagggaa

SEQ ID NO: 1011535 - DNA, 15 bp, Homo sapiens
gatgagtaagggaag

SEQ ID NO: 1011536 - DNA, 15 bp, Homo sapiens
atgagtaagggaagc

SEQ ID NO: 1011537 - DNA, 15 bp, Homo sapiens
tgagtaagggaagct

SEQ ID NO: 1011538 - DNA, 15 bp, Homo sapiens
gagtaagggaagctg

SEQ ID NO: 1011539 - DNA, 15 bp, Homo sapiens
agtaagggaagctga

SEQ ID NO: 1011540 - DNA, 15 bp, Homo sapiens
gtaagggaagctgac

SEQ ID NO: 1011541 - DNA, 15 bp, Homo sapiens
taagggaagctgact

SEQ ID NO: 1011542 - DNA, 15 bp, Homo sapiens
aagggaagctgactc

SEQ ID NO: 1011543 - DNA, 15 bp, Homo sapiens
agggaagctgactcc

SEQ ID NO: 1011544 - DNA, 15 bp, Homo sapiens
gggaagctgactcct

SEQ ID NO: 1011545 - DNA, 15 bp, Homo sapiens
ggaagctgactcctg

SEQ ID NO: 1011546 - DNA, 15 bp, Homo sapiens
gaagctgactcctgg

SEQ ID NO: 1011547 - DNA, 15 bp, Homo sapiens
aagctgactcctggg

SEQ ID NO: 1011548 - DNA, 15 bp, Homo sapiens
agctgactcctgggt

SEQ ID NO: 1011549 - DNA, 15 bp, Homo sapiens
gctgactcctgggtt

SEQ ID NO: 1011550 - DNA, 15 bp, Homo sapiens
ctgactcctgggtta

SEQ ID NO: 1011551 - DNA, 15 bp, Homo sapiens
tgactcctgggttag

SEQ ID NO: 1011552 - DNA, 15 bp, Homo sapiens
gactcctgggttaga

SEQ ID NO: 1011553 - DNA, 15 bp, Homo sapiens
actcctgggttagag

SEQ ID NO: 1011554 - DNA, 15 bp, Homo sapiens
ctcctgggttagagt

SEQ ID NO: 1011555 - DNA, 15 bp, Homo sapiens
tcctgggttagagtg

SEQ ID NO: 1011556 - DNA, 15 bp, Homo sapiens
cctgggttagagtga

SEQ ID NO: 1011557 - DNA, 15 bp, Homo sapiens
ctgggttagagtgaa

SEQ ID NO: 1011558 - DNA, 15 bp, Homo sapiens
tgggttagagtgaat

SEQ ID NO: 1011559 - DNA, 15 bp, Homo sapiens
gggttagagtgaatg

SEQ ID NO: 1011560 - DNA, 15 bp, Homo sapiens
ggttagagtgaatgt

SEQ ID NO: 1011561 - DNA, 15 bp, Homo sapiens
gttagagtgaatgtt

SEQ ID NO: 1011562 - DNA, 15 bp, Homo sapiens
ttagagtgaatgttg

SEQ ID NO: 1011563 - DNA, 15 bp, Homo sapiens
tagagtgaatgttgc

SEQ ID NO: 1011564 - DNA, 15 bp, Homo sapiens
agagtgaatgttgct

SEQ ID NO: 1011565 - DNA, 15 bp, Homo sapiens
gagtgaatgttgctg

SEQ ID NO: 1011566 - DNA, 15 bp, Homo sapiens
agtgaatgttgctgc

SEQ ID NO: 1011567 - DNA, 15 bp, Homo sapiens
gtgaatgttgctgcc

SEQ ID NO: 1011568 - DNA, 15 bp, Homo sapiens
tgaatgttgctgcca

SEQ ID NO: 1011569 - DNA, 15 bp, Homo sapiens
gaatgttgctgccaa

SEQ ID NO: 1011570 - DNA, 15 bp, Homo sapiens
aatgttgctgccaat

SEQ ID NO: 1011571 - DNA, 15 bp, Homo sapiens
atgttgctgccaatg

SEQ ID NO: 1011572 - DNA, 15 bp, Homo sapiens
tgttgctgccaatgc

SEQ ID NO: 1011573 - DNA, 15 bp, Homo sapiens
gttgctgccaatgca

SEQ ID NO: 1011574 - DNA, 15 bp, Homo sapiens
ttgctgccaatgcac

SEQ ID NO: 1011575 - DNA, 15 bp, Homo sapiens
tgctgccaatgcaca

SEQ ID NO: 1011576 - DNA, 15 bp, Homo sapiens
gctgccaatgcacat

SEQ ID NO: 1011577 - DNA, 15 bp, Homo sapiens
ctgccaatgcacatt

SEQ ID NO: 1011578 - DNA, 15 bp, Homo sapiens
tgccaatgcacattt

SEQ ID NO: 1011579 - DNA, 15 bp, Homo sapiens
gccaatgcacatttt

SEQ ID NO: 1011580 - DNA, 15 bp, Homo sapiens
ccaatgcacatttta

SEQ ID NO: 1011581 - DNA, 15 bp, Homo sapiens
caatgcacattttag

SEQ ID NO: 1011582 - DNA, 15 bp, Homo sapiens
aatgcacattttagc

SEQ ID NO: 1011583 - DNA, 15 bp, Homo sapiens
atgcacattttagct

SEQ ID NO: 1011584 - DNA, 15 bp, Homo sapiens
tgcacattttagcta

SEQ ID NO: 1011585 - DNA, 15 bp, Homo sapiens
gcacattttagctaa

SEQ ID NO: 1011586 - DNA, 15 bp, Homo sapiens
cacattttagctaat

SEQ ID NO: 1011587 - DNA, 15 bp, Homo sapiens
acattttagctaatt

SEQ ID NO: 1011588 - DNA, 15 bp, Homo sapiens
cattttagctaattg

SEQ ID NO: 1011589 - DNA, 15 bp, Homo sapiens
attttagctaattga

SEQ ID NO: 1011590 - DNA, 15 bp, Homo sapiens
ttttagctaattgaa

SEQ ID NO: 1011591 - DNA, 15 bp, Homo sapiens
tttagctaattgaat

SEQ ID NO: 1011592 - DNA, 15 bp, Homo sapiens
ttagctaattgaatg

SEQ ID NO: 1011593 - DNA, 15 bp, Homo sapiens
tagctaattgaatgg

SEQ ID NO: 1011594 - DNA, 15 bp, Homo sapiens
agctaattgaatggt

SEQ ID NO: 1011595 - DNA, 15 bp, Homo sapiens
gctaattgaatggtg

SEQ ID NO: 1011596 - DNA, 15 bp, Homo sapiens
ctaattgaatggtga

SEQ ID NO: 1011597 - DNA, 15 bp, Homo sapiens
taattgaatggtgac

SEQ ID NO: 1011598 - DNA, 15 bp, Homo sapiens
aattgaatggtgact

SEQ ID NO: 1011599 - DNA, 15 bp, Homo sapiens
attgaatggtgacta

SEQ ID NO: 1011600 - DNA, 15 bp, Homo sapiens
ttgaatggtgactat

SEQ ID NO: 1011601 - DNA, 15 bp, Homo sapiens
tgaatggtgactatt

SEQ ID NO: 1011602 - DNA, 15 bp, Homo sapiens
gaatggtgactatta

SEQ ID NO: 1011603 - DNA, 15 bp, Homo sapiens
aatggtgactattaa

SEQ ID NO: 1011604 - DNA, 15 bp, Homo sapiens
atggtgactattaaa

SEQ ID NO: 1011605 - DNA, 15 bp, Homo sapiens
tggtgactattaaac

SEQ ID NO: 1011606 - DNA, 15 bp, Homo sapiens
ggtgactattaaaca

SEQ ID NO: 1011607 - DNA, 15 bp, Homo sapiens
gtgactattaaacat

SEQ ID NO: 1011608 - DNA, 15 bp, Homo sapiens
tgactattaaacata

SEQ ID NO: 1011609 - DNA, 15 bp, Homo sapiens
gactattaaacatag

SEQ ID NO: 1011610 - DNA, 15 bp, Homo sapiens
actattaaacatagg

SEQ ID NO: 1011611 - DNA, 15 bp, Homo sapiens
ctattaaacatagga

SEQ ID NO: 1011612 - DNA, 15 bp, Homo sapiens
tattaaacataggaa

SEQ ID NO: 1011613 - DNA, 15 bp, Homo sapiens
attaaacataggaaa

SEQ ID NO: 1011614 - DNA, 15 bp, Homo sapiens
ttaaacataggaaat

SEQ ID NO: 1011615 - DNA, 15 bp, Homo sapiens
taaacataggaaatg

SEQ ID NO: 1011616 - DNA, 15 bp, Homo sapiens
aaacataggaaatga

SEQ ID NO: 1011617 - DNA, 15 bp, Homo sapiens
aacataggaaatgaa

SEQ ID NO: 1011618 - DNA, 15 bp, Homo sapiens
acataggaaatgaat

SEQ ID NO: 1011619 - DNA, 15 bp, Homo sapiens
cataggaaatgaata

SEQ ID NO: 1011620 - DNA, 15 bp, Homo sapiens
ataggaaatgaataa

SEQ ID NO: 1011621 - DNA, 15 bp, Homo sapiens
taggaaatgaataaa

SEQ ID NO: 1011622 - DNA, 15 bp, Homo sapiens
aggaaatgaataaaa

SEQ ID NO: 1011623 - DNA, 15 bp, Homo sapiens
ggaaatgaataaaat

SEQ ID NO: 1011624 - DNA, 15 bp, Homo sapiens
gaaatgaataaaatt

SEQ ID NO: 1011625 - DNA, 15 bp, Homo sapiens
aaatgaataaaattt

SEQ ID NO: 1011626 - DNA, 15 bp, Homo sapiens
aatgaataaaattta

SEQ ID NO: 1011627 - DNA, 15 bp, Homo sapiens
atgaataaaatttag

SEQ ID NO: 1011628 - DNA, 15 bp, Homo sapiens
tgaataaaatttaga

SEQ ID NO: 1011629 - DNA, 15 bp, Homo sapiens
gaataaaatttagag

SEQ ID NO: 1011630 - DNA, 15 bp, Homo sapiens
aataaaatttagagt

SEQ ID NO: 1011631 - DNA, 15 bp, Homo sapiens
ataaaatttagagtt

SEQ ID NO: 1011632 - DNA, 15 bp, Homo sapiens
taaaatttagagttt

SEQ ID NO: 1011633 - DNA, 15 bp, Homo sapiens
aaaatttagagtttt

SEQ ID NO: 1011634 - DNA, 15 bp, Homo sapiens
aaatttagagttttt

SEQ ID NO: 1011635 - DNA, 15 bp, Homo sapiens
aatttagagtttttg

SEQ ID NO: 1011636 - DNA, 15 bp, Homo sapiens
atttagagtttttgt

SEQ ID NO: 1011637 - DNA, 15 bp, Homo sapiens
tttagagtttttgta

SEQ ID NO: 1011638 - DNA, 15 bp, Homo sapiens
ttagagtttttgtat

SEQ ID NO: 1011639 - DNA, 15 bp, Homo sapiens
tagagtttttgtatt

SEQ ID NO: 1011640 - DNA, 15 bp, Homo sapiens
agagtttttgtattt

SEQ ID NO: 1011641 - DNA, 15 bp, Homo sapiens
gagtttttgtattta

SEQ ID NO: 1011642 - DNA, 15 bp, Homo sapiens
agtttttgtatttaa

SEQ ID NO: 1011643 - DNA, 15 bp, Homo sapiens
gtttttgtatttaaa

SEQ ID NO: 1011644 - DNA, 15 bp, Homo sapiens
tttttgtatttaaaa

SEQ ID NO: 1011645 - DNA, 15 bp, Homo sapiens
ttttgtatttaaaat

SEQ ID NO: 1011646 - DNA, 15 bp, Homo sapiens
tttgtatttaaaata

SEQ ID NO: 1011647 - DNA, 15 bp, Homo sapiens
ttgtatttaaaataa

SEQ ID NO: 1011648 - DNA, 15 bp, Homo sapiens
tgtatttaaaataaa

SEQ ID NO: 1011649 - DNA, 15 bp, Homo sapiens
gtatttaaaataaaa

SEQ ID NO: 1011650 - DNA, 15 bp, Homo sapiens
tatttaaaataaaaa

SEQ ID NO: 1011651 - DNA, 15 bp, Homo sapiens
atttaaaataaaaat

SEQ ID NO: 1011652 - DNA, 15 bp, Homo sapiens
tttaaaataaaaata

SEQ ID NO: 1011653 - DNA, 15 bp, Homo sapiens
ttaaaataaaaatat

SEQ ID NO: 1011654 - DNA, 15 bp, Homo sapiens
taaaataaaaatatt

SEQ ID NO: 1011655 - DNA, 15 bp, Homo sapiens
aaaataaaaatattt

SEQ ID NO: 1011656 - DNA, 15 bp, Homo sapiens
aaataaaaatatttt

SEQ ID NO: 1011657 - DNA, 15 bp, Homo sapiens
aataaaaatattttg

SEQ ID NO: 1011658 - DNA, 15 bp, Homo sapiens
ataaaaatattttgt

SEQ ID NO: 1011659 - DNA, 15 bp, Homo sapiens
taaaaatattttgta

SEQ ID NO: 1011660 - DNA, 15 bp, Homo sapiens
aaaaatattttgtat

SEQ ID NO: 1011661 - DNA, 15 bp, Homo sapiens
aaaatattttgtatt

SEQ ID NO: 1011662 - DNA, 15 bp, Homo sapiens
aaatattttgtattt

SEQ ID NO: 1011663 - DNA, 15 bp, Homo sapiens
aatattttgtatttc

SEQ ID NO: 1011664 - DNA, 15 bp, Homo sapiens
atattttgtatttca

SEQ ID NO: 1011665 - DNA, 15 bp, Homo sapiens
tattttgtatttcaa

SEQ ID NO: 1011666 - DNA, 15 bp, Homo sapiens
attttgtatttcaac

SEQ ID NO: 1011667 - DNA, 15 bp, Homo sapiens
ttttgtatttcaaca

SEQ ID NO: 1011668 - DNA, 15 bp, Homo sapiens
tttgtatttcaacaa

SEQ ID NO: 1011669 - DNA, 15 bp, Homo sapiens
ttgtatttcaacaaa

SEQ ID NO: 1011670 - DNA, 15 bp, Homo sapiens
tgtatttcaacaaat

SEQ ID NO: 1011671 - DNA, 15 bp, Homo sapiens
gtatttcaacaaata

SEQ ID NO: 1011672 - DNA, 15 bp, Homo sapiens
tatttcaacaaatat

SEQ ID NO: 1011673 - DNA, 15 bp, Homo sapiens
atttcaacaaatatg

SEQ ID NO: 1011674 - DNA, 15 bp, Homo sapiens
tttcaacaaatatgc

SEQ ID NO: 1011675 - DNA, 15 bp, Homo sapiens
ttcaacaaatatgcc

SEQ ID NO: 1011676 - DNA, 15 bp, Homo sapiens
tcaacaaatatgcct

SEQ ID NO: 1011677 - DNA, 15 bp, Homo sapiens
caacaaatatgcctt

SEQ ID NO: 1011678 - DNA, 15 bp, Homo sapiens
aacaaatatgccttg

SEQ ID NO: 1011679 - DNA, 15 bp, Homo sapiens
acaaatatgccttga

SEQ ID NO: 1011680 - DNA, 15 bp, Homo sapiens
caaatatgccttgag

SEQ ID NO: 1011681 - DNA, 15 bp, Homo sapiens
aaatatgccttgagg

SEQ ID NO: 1011682 - DNA, 15 bp, Homo sapiens
aatatgccttgaggt

SEQ ID NO: 1011683 - DNA, 15 bp, Homo sapiens
atatgccttgaggtt

SEQ ID NO: 1011684 - DNA, 15 bp, Homo sapiens
tatgccttgaggttt

SEQ ID NO: 1011685 - DNA, 15 bp, Homo sapiens
atgccttgaggtttt

SEQ ID NO: 1011686 - DNA, 15 bp, Homo sapiens
tgccttgaggtttta

SEQ ID NO: 1011687 - DNA, 15 bp, Homo sapiens
gccttgaggttttac

SEQ ID NO: 1011688 - DNA, 15 bp, Homo sapiens
ccttgaggttttaca

SEQ ID NO: 1011689 - DNA, 15 bp, Homo sapiens
cttgaggttttacaa

SEQ ID NO: 1011690 - DNA, 15 bp, Homo sapiens
ttgaggttttacaac

SEQ ID NO: 1011691 - DNA, 15 bp, Homo sapiens
tgaggttttacaact

SEQ ID NO: 1011692 - DNA, 15 bp, Homo sapiens
gaggttttacaactg

SEQ ID NO: 1011693 - DNA, 15 bp, Homo sapiens
aggttttacaactga

SEQ ID NO: 1011694 - DNA, 15 bp, Homo sapiens
ggttttacaactgat

SEQ ID NO: 1011695 - DNA, 15 bp, Homo sapiens
gttttacaactgata

SEQ ID NO: 1011696 - DNA, 15 bp, Homo sapiens
ttttacaactgatag

SEQ ID NO: 1011697 - DNA, 15 bp, Homo sapiens
tttacaactgatagg

SEQ ID NO: 1011698 - DNA, 15 bp, Homo sapiens
ttacaactgatagga

SEQ ID NO: 1011699 - DNA, 15 bp, Homo sapiens
tacaactgataggaa

SEQ ID NO: 1011700 - DNA, 15 bp, Homo sapiens
acaactgataggaac

SEQ ID NO: 1011701 - DNA, 15 bp, Homo sapiens
caactgataggaact

SEQ ID NO: 1011702 - DNA, 15 bp, Homo sapiens
aactgataggaactt

SEQ ID NO: 1011703 - DNA, 15 bp, Homo sapiens
actgataggaacttt

SEQ ID NO: 1011704 - DNA, 15 bp, Homo sapiens
ctgataggaactttg

SEQ ID NO: 1011705 - DNA, 15 bp, Homo sapiens
tgataggaactttga

SEQ ID NO: 1011706 - DNA, 15 bp, Homo sapiens
gataggaactttgat

SEQ ID NO: 1011707 - DNA, 15 bp, Homo sapiens
ataggaactttgata

SEQ ID NO: 1011708 - DNA, 15 bp, Homo sapiens
taggaactttgatac

SEQ ID NO: 1011709 - DNA, 15 bp, Homo sapiens
aggaactttgatact

SEQ ID NO: 1011710 - DNA, 15 bp, Homo sapiens
ggaactttgatactg

SEQ ID NO: 1011711 - DNA, 15 bp, Homo sapiens
gaactttgatactga

SEQ ID NO: 1011712 - DNA, 15 bp, Homo sapiens
aactttgatactgac

SEQ ID NO: 1011713 - DNA, 15 bp, Homo sapiens
actttgatactgaca

SEQ ID NO: 1011714 - DNA, 15 bp, Homo sapiens
ctttgatactgacat

SEQ ID NO: 1011715 - DNA, 15 bp, Homo sapiens
tttgatactgacatt

SEQ ID NO: 1011716 - DNA, 15 bp, Homo sapiens
ttgatactgacattt

SEQ ID NO: 1011717 - DNA, 15 bp, Homo sapiens
tgatactgacatttg

SEQ ID NO: 1011718 - DNA, 15 bp, Homo sapiens
gatactgacatttga

SEQ ID NO: 1011719 - DNA, 15 bp, Homo sapiens
atactgacatttgac

SEQ ID NO: 1011720 - DNA, 15 bp, Homo sapiens
tactgacatttgact

SEQ ID NO: 1011721 - DNA, 15 bp, Homo sapiens
actgacatttgactc

SEQ ID NO: 1011722 - DNA, 15 bp, Homo sapiens
ctgacatttgactct

SEQ ID NO: 1011723 - DNA, 15 bp, Homo sapiens
tgacatttgactcta

SEQ ID NO: 1011724 - DNA, 15 bp, Homo sapiens
gacatttgactctaa

SEQ ID NO: 1011725 - DNA, 15 bp, Homo sapiens
acatttgactctaaa

SEQ ID NO: 1011726 - DNA, 15 bp, Homo sapiens
catttgactctaaac

SEQ ID NO: 1011727 - DNA, 15 bp, Homo sapiens
atttgactctaaact

SEQ ID NO: 1011728 - DNA, 15 bp, Homo sapiens
tttgactctaaactt

SEQ ID NO: 1011729 - DNA, 15 bp, Homo sapiens
ttgactctaaactta

SEQ ID NO: 1011730 - DNA, 15 bp, Homo sapiens
tgactctaaacttaa

SEQ ID NO: 1011731 - DNA, 15 bp, Homo sapiens
gactctaaacttaat

SEQ ID NO: 1011732 - DNA, 15 bp, Homo sapiens
actctaaacttaata

SEQ ID NO: 1011733 - DNA, 15 bp, Homo sapiens
ctctaaacttaataa

SEQ ID NO: 1011734 - DNA, 15 bp, Homo sapiens
tctaaacttaataaa

SEQ ID NO: 1011735 - DNA, 15 bp, Homo sapiens
ctaaacttaataaaa

SEQ ID NO: 1011736 - DNA, 15 bp, Homo sapiens
taaacttaataaaaa

SEQ ID NO: 1011737 - DNA, 15 bp, Homo sapiens
aaacttaataaaaag

SEQ ID NO: 1011738 - DNA, 15 bp, Homo sapiens
aacttaataaaaagc

SEQ ID NO: 1011739 - DNA, 15 bp, Homo sapiens
acttaataaaaagca

SEQ ID NO: 1011740 - DNA, 15 bp, Homo sapiens
cttaataaaaagcag

SEQ ID NO: 1011741 - DNA, 15 bp, Homo sapiens
ttaataaaaagcaga

SEQ ID NO: 1011742 - DNA, 15 bp, Homo sapiens
taataaaaagcagac

SEQ ID NO: 1011743 - DNA, 15 bp, Homo sapiens
aataaaaagcagact

SEQ ID NO: 1011744 - DNA, 15 bp, Homo sapiens
ataaaaagcagactt

SEQ ID NO: 1011745 - DNA, 15 bp, Homo sapiens
taaaaagcagactta

SEQ ID NO: 1011746 - DNA, 15 bp, Homo sapiens
aaaaagcagacttaa

SEQ ID NO: 1011747 - DNA, 15 bp, Homo sapiens
aaaagcagacttaaa

SEQ ID NO: 1011748 - DNA, 15 bp, Homo sapiens
aaagcagacttaaaa

SEQ ID NO: 1011749 - DNA, 15 bp, Homo sapiens
aagcagacttaaaat

SEQ ID NO: 1011750 - DNA, 15 bp, Homo sapiens
agcagacttaaaatt

SEQ ID NO: 1011751 - DNA, 15 bp, Homo sapiens
gcagacttaaaattg

SEQ ID NO: 1011752 - DNA, 15 bp, Homo sapiens
cagacttaaaattgg

SEQ ID NO: 1011753 - DNA, 15 bp, Homo sapiens
agacttaaaattggg

SEQ ID NO: 1011754 - DNA, 15 bp, Homo sapiens
gacttaaaattgggt

SEQ ID NO: 1011755 - DNA, 15 bp, Homo sapiens
acttaaaattgggta

SEQ ID NO: 1011756 - DNA, 15 bp, Homo sapiens
cttaaaattgggtat

SEQ ID NO: 1011757 - DNA, 15 bp, Homo sapiens
ttaaaattgggtatt

SEQ ID NO: 1011758 - DNA, 15 bp, Homo sapiens
taaaattgggtattc

SEQ ID NO: 1011759 - DNA, 15 bp, Homo sapiens
aaaattgggtattct

SEQ ID NO: 1011760 - DNA, 15 bp, Homo sapiens
aaattgggtattctc

SEQ ID NO: 1011761 - DNA, 15 bp, Homo sapiens
aattgggtattctca

SEQ ID NO: 1011762 - DNA, 15 bp, Homo sapiens
attgggtattctcac

SEQ ID NO: 1011763 - DNA, 15 bp, Homo sapiens
ttgggtattctcaca

SEQ ID NO: 1011764 - DNA, 15 bp, Homo sapiens
tgggtattctcacag

SEQ ID NO: 1011765 - DNA, 15 bp, Homo sapiens
gggtattctcacaga

SEQ ID NO: 1011766 - DNA, 15 bp, Homo sapiens
ggtattctcacagat

SEQ ID NO: 1011767 - DNA, 15 bp, Homo sapiens
gtattctcacagatt

SEQ ID NO: 1011768 - DNA, 15 bp, Homo sapiens
tattctcacagatta

SEQ ID NO: 1011769 - DNA, 15 bp, Homo sapiens
attctcacagattat

SEQ ID NO: 1011770 - DNA, 15 bp, Homo sapiens
ttctcacagattatt

SEQ ID NO: 1011771 - DNA, 15 bp, Homo sapiens
tctcacagattatta

SEQ ID NO: 1011772 - DNA, 15 bp, Homo sapiens
ctcacagattattac

SEQ ID NO: 1011773 - DNA, 15 bp, Homo sapiens
tcacagattattact

SEQ ID NO: 1011774 - DNA, 15 bp, Homo sapiens
cacagattattactc

SEQ ID NO: 1011775 - DNA, 15 bp, Homo sapiens
acagattattactct

SEQ ID NO: 1011776 - DNA, 15 bp, Homo sapiens
cagattattactctt

SEQ ID NO: 1011777 - DNA, 15 bp, Homo sapiens
agattattactctta

SEQ ID NO: 1011778 - DNA, 15 bp, Homo sapiens
gattattactcttaa

SEQ ID NO: 1011779 - DNA, 15 bp, Homo sapiens
attattactcttaat

SEQ ID NO: 1011780 - DNA, 15 bp, Homo sapiens
ttattactcttaata

SEQ ID NO: 1011781 - DNA, 15 bp, Homo sapiens
tattactcttaatat

SEQ ID NO: 1011782 - DNA, 15 bp, Homo sapiens
attactcttaatatg

SEQ ID NO: 1011783 - DNA, 15 bp, Homo sapiens
ttactcttaatatgg

SEQ ID NO: 1011784 - DNA, 15 bp, Homo sapiens
tactcttaatatgga

SEQ ID NO: 1011785 - DNA, 15 bp, Homo sapiens
actcttaatatggaa

SEQ ID NO: 1011786 - DNA, 15 bp, Homo sapiens
ctcttaatatggaat

SEQ ID NO: 1011787 - DNA, 15 bp, Homo sapiens
tcttaatatggaatt

SEQ ID NO: 1011788 - DNA, 15 bp, Homo sapiens
cttaatatggaattt

SEQ ID NO: 1011789 - DNA, 15 bp, Homo sapiens
ttaatatggaatttt

SEQ ID NO: 1011790 - DNA, 15 bp, Homo sapiens
taatatggaatttta

SEQ ID NO: 1011791 - DNA, 15 bp, Homo sapiens
aatatggaattttaa

SEQ ID NO: 1011792 - DNA, 15 bp, Homo sapiens
atatggaattttaaa

SEQ ID NO: 1011793 - DNA, 15 bp, Homo sapiens
tatggaattttaaaa

SEQ ID NO: 1011794 - DNA, 15 bp, Homo sapiens
atggaattttaaaac

SEQ ID NO: 1011795 - DNA, 15 bp, Homo sapiens
tggaattttaaaact

SEQ ID NO: 1011796 - DNA, 15 bp, Homo sapiens
ggaattttaaaactc

SEQ ID NO: 1011797 - DNA, 15 bp, Homo sapiens
gaattttaaaactcc

SEQ ID NO: 1011798 - DNA, 15 bp, Homo sapiens
aattttaaaactcct

SEQ ID NO: 1011799 - DNA, 15 bp, Homo sapiens
attttaaaactccta

SEQ ID NO: 1011800 - DNA, 15 bp, Homo sapiens
ttttaaaactcctat

SEQ ID NO: 1011801 - DNA, 15 bp, Homo sapiens
tttaaaactcctatg

SEQ ID NO: 1011802 - DNA, 15 bp, Homo sapiens
ttaaaactcctatgg

SEQ ID NO: 1011803 - DNA, 15 bp, Homo sapiens
taaaactcctatgga

SEQ ID NO: 1011804 - DNA, 15 bp, Homo sapiens
aaaactcctatggaa

SEQ ID NO: 1011805 - DNA, 15 bp, Homo sapiens
aaactcctatggaat

SEQ ID NO: 1011806 - DNA, 15 bp, Homo sapiens
aactcctatggaatc

SEQ ID NO: 1011807 - DNA, 15 bp, Homo sapiens
actcctatggaatca

SEQ ID NO: 1011808 - DNA, 15 bp, Homo sapiens
ctcctatggaatcaa

SEQ ID NO: 1011809 - DNA, 15 bp, Homo sapiens
tcctatggaatcaat

SEQ ID NO: 1011810 - DNA, 15 bp, Homo sapiens
cctatggaatcaatt

SEQ ID NO: 1011811 - DNA, 15 bp, Homo sapiens
ctatggaatcaattt

SEQ ID NO: 1011812 - DNA, 15 bp, Homo sapiens
tatggaatcaattta

SEQ ID NO: 1011813 - DNA, 15 bp, Homo sapiens
atggaatcaatttaa

SEQ ID NO: 1011814 - DNA, 15 bp, Homo sapiens
tggaatcaatttaaa

SEQ ID NO: 1011815 - DNA, 15 bp, Homo sapiens
ggaatcaatttaaaa

SEQ ID NO: 1011816 - DNA, 15 bp, Homo sapiens
gaatcaatttaaaaa

SEQ ID NO: 1011817 - DNA, 15 bp, Homo sapiens
aatcaatttaaaaag

SEQ ID NO: 1011818 - DNA, 15 bp, Homo sapiens
atcaatttaaaaaga

SEQ ID NO: 1011819 - DNA, 15 bp, Homo sapiens
tcaatttaaaaagat

SEQ ID NO: 1011820 - DNA, 15 bp, Homo sapiens
caatttaaaaagata

SEQ ID NO: 1011821 - DNA, 15 bp, Homo sapiens
aatttaaaaagataa

SEQ ID NO: 1011822 - DNA, 15 bp, Homo sapiens
atttaaaaagataat

SEQ ID NO: 1011823 - DNA, 15 bp, Homo sapiens
tttaaaaagataatt

SEQ ID NO: 1011824 - DNA, 15 bp, Homo sapiens
ttaaaaagataatta

SEQ ID NO: 1011825 - DNA, 15 bp, Homo sapiens
taaaaagataattat

SEQ ID NO: 1011826 - DNA, 15 bp, Homo sapiens
aaaaagataattata

SEQ ID NO: 1011827 - DNA, 15 bp, Homo sapiens
aaaagataattataa

SEQ ID NO: 1011828 - DNA, 15 bp, Homo sapiens
aaagataattataag

SEQ ID NO: 1011829 - DNA, 15 bp, Homo sapiens
aagataattataaga

SEQ ID NO: 1011830 - DNA, 15 bp, Homo sapiens
agataattataagat

SEQ ID NO: 1011831 - DNA, 15 bp, Homo sapiens
gataattataagatt

SEQ ID NO: 1011832 - DNA, 15 bp, Homo sapiens
ataattataagattg

SEQ ID NO: 1011833 - DNA, 15 bp, Homo sapiens
taattataagattgt

SEQ ID NO: 1011834 - DNA, 15 bp, Homo sapiens
aattataagattgtg

SEQ ID NO: 1011835 - DNA, 15 bp, Homo sapiens
attataagattgtgg

SEQ ID NO: 1011836 - DNA, 15 bp, Homo sapiens
ttataagattgtgga

SEQ ID NO: 1011837 - DNA, 15 bp, Homo sapiens
tataagattgtggaa

SEQ ID NO: 1011838 - DNA, 15 bp, Homo sapiens
ataagattgtggaag

SEQ ID NO: 1011839 - DNA, 15 bp, Homo sapiens
taagattgtggaagt

SEQ ID NO: 1011840 - DNA, 15 bp, Homo sapiens
aagattgtggaagtc

SEQ ID NO: 1011841 - DNA, 15 bp, Homo sapiens
agattgtggaagtca

SEQ ID NO: 1011842 - DNA, 15 bp, Homo sapiens
gattgtggaagtcat

SEQ ID NO: 1011843 - DNA, 15 bp, Homo sapiens
attgtggaagtcatt

SEQ ID NO: 1011844 - DNA, 15 bp, Homo sapiens
ttgtggaagtcattt

SEQ ID NO: 1011845 - DNA, 15 bp, Homo sapiens
tgtggaagtcatttt

SEQ ID NO: 1011846 - DNA, 15 bp, Homo sapiens
gtggaagtcattttt

SEQ ID NO: 1011847 - DNA, 15 bp, Homo sapiens
tggaagtcatttttt

SEQ ID NO: 1011848 - DNA, 15 bp, Homo sapiens
ggaagtcattttttt

SEQ ID NO: 1011849 - DNA, 15 bp, Homo sapiens
gaagtcatttttttg

SEQ ID NO: 1011850 - DNA, 15 bp, Homo sapiens
aagtcatttttttgg

SEQ ID NO: 1011851 - DNA, 15 bp, Homo sapiens
agtcatttttttggt

SEQ ID NO: 1011852 - DNA, 15 bp, Homo sapiens
gtcatttttttggtg

SEQ ID NO: 1011853 - DNA, 15 bp, Homo sapiens
tcatttttttggtgt

SEQ ID NO: 1011854 - DNA, 15 bp, Homo sapiens
catttttttggtgtt

SEQ ID NO: 1011855 - DNA, 15 bp, Homo sapiens
atttttttggtgttt

SEQ ID NO: 1011856 - DNA, 15 bp, Homo sapiens
tttttttggtgttta

SEQ ID NO: 1011857 - DNA, 15 bp, Homo sapiens
ttttttggtgtttat

SEQ ID NO: 1011858 - DNA, 15 bp, Homo sapiens
tttttggtgtttatg

SEQ ID NO: 1011859 - DNA, 15 bp, Homo sapiens
ttttggtgtttatgt

SEQ ID NO: 1011860 - DNA, 15 bp, Homo sapiens
tttggtgtttatgta

SEQ ID NO: 1011861 - DNA, 15 bp, Homo sapiens
ttggtgtttatgtat

SEQ ID NO: 1011862 - DNA, 15 bp, Homo sapiens
tggtgtttatgtata

SEQ ID NO: 1011863 - DNA, 15 bp, Homo sapiens
ggtgtttatgtatag

SEQ ID NO: 1011864 - DNA, 15 bp, Homo sapiens
gtgtttatgtatagc

SEQ ID NO: 1011865 - DNA, 15 bp, Homo sapiens
tgtttatgtatagca

SEQ ID NO: 1011866 - DNA, 15 bp, Homo sapiens
gtttatgtatagcaa

SEQ ID NO: 1011867 - DNA, 15 bp, Homo sapiens
tttatgtatagcaag

SEQ ID NO: 1011868 - DNA, 15 bp, Homo sapiens
ttatgtatagcaaga

SEQ ID NO: 1011869 - DNA, 15 bp, Homo sapiens
tatgtatagcaagag

SEQ ID NO: 1011870 - DNA, 15 bp, Homo sapiens
atgtatagcaagagt

SEQ ID NO: 1011871 - DNA, 15 bp, Homo sapiens
tgtatagcaagagta

SEQ ID NO: 1011872 - DNA, 15 bp, Homo sapiens
gtatagcaagagtat

SEQ ID NO: 1011873 - DNA, 15 bp, Homo sapiens
tatagcaagagtatt

SEQ ID NO: 1011874 - DNA, 15 bp, Homo sapiens
atagcaagagtatta

SEQ ID NO: 1011875 - DNA, 15 bp, Homo sapiens
tagcaagagtattat

SEQ ID NO: 1011876 - DNA, 15 bp, Homo sapiens
agcaagagtattata

SEQ ID NO: 1011877 - DNA, 15 bp, Homo sapiens
gcaagagtattatac

SEQ ID NO: 1011878 - DNA, 15 bp, Homo sapiens
caagagtattataca

SEQ ID NO: 1011879 - DNA, 15 bp, Homo sapiens
aagagtattatacaa

SEQ ID NO: 1011880 - DNA, 15 bp, Homo sapiens
agagtattatacaag

SEQ ID NO: 1011881 - DNA, 15 bp, Homo sapiens
gagtattatacaaga

SEQ ID NO: 1011882 - DNA, 15 bp, Homo sapiens
agtattatacaagag

SEQ ID NO: 1011883 - DNA, 15 bp, Homo sapiens
gtattatacaagagc

SEQ ID NO: 1011884 - DNA, 15 bp, Homo sapiens
tattatacaagagca

SEQ ID NO: 1011885 - DNA, 15 bp, Homo sapiens
attatacaagagcaa

SEQ ID NO: 1011886 - DNA, 15 bp, Homo sapiens
ttatacaagagcaac

SEQ ID NO: 1011887 - DNA, 15 bp, Homo sapiens
tatacaagagcaact

SEQ ID NO: 1011888 - DNA, 15 bp, Homo sapiens
atacaagagcaactc

SEQ ID NO: 1011889 - DNA, 15 bp, Homo sapiens
tacaagagcaactct

SEQ ID NO: 1011890 - DNA, 15 bp, Homo sapiens
acaagagcaactctt

SEQ ID NO: 1011891 - DNA, 15 bp, Homo sapiens
caagagcaactcttg

SEQ ID NO: 1011892 - DNA, 15 bp, Homo sapiens
aagagcaactcttga

SEQ ID NO: 1011893 - DNA, 15 bp, Homo sapiens
agagcaactcttgac

SEQ ID NO: 1011894 - DNA, 15 bp, Homo sapiens
gagcaactcttgaca

SEQ ID NO: 1011895 - DNA, 15 bp, Homo sapiens
agcaactcttgacat

SEQ ID NO: 1011896 - DNA, 15 bp, Homo sapiens
gcaactcttgacatt

SEQ ID NO: 1011897 - DNA, 15 bp, Homo sapiens
caactcttgacattg

SEQ ID NO: 1011898 - DNA, 15 bp, Homo sapiens
aactcttgacattga

SEQ ID NO: 1011899 - DNA, 15 bp, Homo sapiens
actcttgacattgat

SEQ ID NO: 1011900 - DNA, 15 bp, Homo sapiens
ctcttgacattgatt

SEQ ID NO: 1011901 - DNA, 15 bp, Homo sapiens
tcttgacattgattg

SEQ ID NO: 1011902 - DNA, 15 bp, Homo sapiens
cttgacattgattgg

SEQ ID NO: 1011903 - DNA, 15 bp, Homo sapiens
ttgacattgattggt

SEQ ID NO: 1011904 - DNA, 15 bp, Homo sapiens
tgacattgattggtg

SEQ ID NO: 1011905 - DNA, 15 bp, Homo sapiens
gacattgattggtgg

SEQ ID NO: 1011906 - DNA, 15 bp, Homo sapiens
acattgattggtggt

SEQ ID NO: 1011907 - DNA, 15 bp, Homo sapiens
cattgattggtggtg

SEQ ID NO: 1011908 - DNA, 15 bp, Homo sapiens
attgattggtggtgc

SEQ ID NO: 1011909 - DNA, 15 bp, Homo sapiens
ttgattggtggtgct

SEQ ID NO: 1011910 - DNA, 15 bp, Homo sapiens
tgattggtggtgctt

SEQ ID NO: 1011911 - DNA, 15 bp, Homo sapiens
gattggtggtgcttt

SEQ ID NO: 1011912 - DNA, 15 bp, Homo sapiens
attggtggtgctttg

SEQ ID NO: 1011913 - DNA, 15 bp, Homo sapiens
ttggtggtgctttgt

SEQ ID NO: 1011914 - DNA, 15 bp, Homo sapiens
tggtggtgctttgtc

SEQ ID NO: 1011915 - DNA, 15 bp, Homo sapiens
ggtggtgctttgtct

SEQ ID NO: 1011916 - DNA, 15 bp, Homo sapiens
gtggtgctttgtctt

SEQ ID NO: 1011917 - DNA, 15 bp, Homo sapiens
tggtgctttgtcttc

SEQ ID NO: 1011918 - DNA, 15 bp, Homo sapiens
ggtgctttgtcttct

SEQ ID NO: 1011919 - DNA, 15 bp, Homo sapiens
gtgctttgtcttctg

SEQ ID NO: 1011920 - DNA, 15 bp, Homo sapiens
tgctttgtcttctgc

SEQ ID NO: 1011921 - DNA, 15 bp, Homo sapiens
gctttgtcttctgct

SEQ ID NO: 1011922 - DNA, 15 bp, Homo sapiens
ctttgtcttctgctt

SEQ ID NO: 1011923 - DNA, 15 bp, Homo sapiens
tttgtcttctgcttc

SEQ ID NO: 1011924 - DNA, 15 bp, Homo sapiens
ttgtcttctgcttct

SEQ ID NO: 1011925 - DNA, 15 bp, Homo sapiens
tgtcttctgcttctt

SEQ ID NO: 1011926 - DNA, 15 bp, Homo sapiens
gtcttctgcttctta

SEQ ID NO: 1011927 - DNA, 15 bp, Homo sapiens
tcttctgcttcttat

SEQ ID NO: 1011928 - DNA, 15 bp, Homo sapiens
cttctgcttcttatt

SEQ ID NO: 1011929 - DNA, 15 bp, Homo sapiens
ttctgcttcttattt

SEQ ID NO: 1011930 - DNA, 15 bp, Homo sapiens
tctgcttcttatttt

SEQ ID NO: 1011931 - DNA, 15 bp, Homo sapiens
ctgcttcttattttc

SEQ ID NO: 1011932 - DNA, 15 bp, Homo sapiens
tgcttcttattttct

SEQ ID NO: 1011933 - DNA, 15 bp, Homo sapiens
gcttcttattttcta

SEQ ID NO: 1011934 - DNA, 15 bp, Homo sapiens
cttcttattttctat

SEQ ID NO: 1011935 - DNA, 15 bp, Homo sapiens
ttcttattttctatt

SEQ ID NO: 1011936 - DNA, 15 bp, Homo sapiens
tcttattttctatta

SEQ ID NO: 1011937 - DNA, 15 bp, Homo sapiens
cttattttctattat

SEQ ID NO: 1011938 - DNA, 15 bp, Homo sapiens
ttattttctattatt

SEQ ID NO: 1011939 - DNA, 15 bp, Homo sapiens
tattttctattattg

SEQ ID NO: 1011940 - DNA, 15 bp, Homo sapiens
attttctattattgg

SEQ ID NO: 1011941 - DNA, 15 bp, Homo sapiens
ttttctattattggc

SEQ ID NO: 1011942 - DNA, 15 bp, Homo sapiens
tttctattattggct

SEQ ID NO: 1011943 - DNA, 15 bp, Homo sapiens
ttctattattggctg

SEQ ID NO: 1011944 - DNA, 15 bp, Homo sapiens
tctattattggctgc

SEQ ID NO: 1011945 - DNA, 15 bp, Homo sapiens
ctattattggctgct

SEQ ID NO: 1011946 - DNA, 15 bp, Homo sapiens
tattattggctgctg

SEQ ID NO: 1011947 - DNA, 15 bp, Homo sapiens
attattggctgctgt

SEQ ID NO: 1011948 - DNA, 15 bp, Homo sapiens
ttattggctgctgtc

SEQ ID NO: 1011949 - DNA, 15 bp, Homo sapiens
tattggctgctgtcg

SEQ ID NO: 1011950 - DNA, 15 bp, Homo sapiens
attggctgctgtcgc

SEQ ID NO: 1011951 - DNA, 15 bp, Homo sapiens
ttggctgctgtcgct

SEQ ID NO: 1011952 - DNA, 15 bp, Homo sapiens
tggctgctgtcgctc

SEQ ID NO: 1011953 - DNA, 15 bp, Homo sapiens
ggctgctgtcgctca

SEQ ID NO: 1011954 - DNA, 15 bp, Homo sapiens
gctgctgtcgctcac

SEQ ID NO: 1011955 - DNA, 15 bp, Homo sapiens
ctgctgtcgctcaca

SEQ ID NO: 1011956 - DNA, 15 bp, Homo sapiens
tgctgtcgctcacat

SEQ ID NO: 1011957 - DNA, 15 bp, Homo sapiens
gctgtcgctcacatg

SEQ ID NO: 1011958 - DNA, 15 bp, Homo sapiens
ctgtcgctcacatga

SEQ ID NO: 1011959 - DNA, 15 bp, Homo sapiens
tgtcgctcacatgat

SEQ ID NO: 1011960 - DNA, 15 bp, Homo sapiens
gtcgctcacatgatc

SEQ ID NO: 1011961 - DNA, 15 bp, Homo sapiens
tcgctcacatgatca

SEQ ID NO: 1011962 - DNA, 15 bp, Homo sapiens
cgctcacatgatcag

SEQ ID NO: 1011963 - DNA, 15 bp, Homo sapiens
gctcacatgatcaga

SEQ ID NO: 1011964 - DNA, 15 bp, Homo sapiens
ctcacatgatcagat

SEQ ID NO: 1011965 - DNA, 15 bp, Homo sapiens
tcacatgatcagatg

SEQ ID NO: 1011966 - DNA, 15 bp, Homo sapiens
cacatgatcagatgc

SEQ ID NO: 1011967 - DNA, 15 bp, Homo sapiens
acatgatcagatgcc

SEQ ID NO: 1011968 - DNA, 15 bp, Homo sapiens
catgatcagatgcca

SEQ ID NO: 1011969 - DNA, 15 bp, Homo sapiens
atgatcagatgccaa

SEQ ID NO: 1011970 - DNA, 15 bp, Homo sapiens
tgatcagatgccaac

SEQ ID NO: 1011971 - DNA, 15 bp, Homo sapiens
gatcagatgccaacc

SEQ ID NO: 1011972 - DNA, 15 bp, Homo sapiens
atcagatgccaacca

SEQ ID NO: 1011973 - DNA, 15 bp, Homo sapiens
tcagatgccaaccag

SEQ ID NO: 1011974 - DNA, 15 bp, Homo sapiens
cagatgccaaccagt

SEQ ID NO: 1011975 - DNA, 15 bp, Homo sapiens
agatgccaaccagtc

SEQ ID NO: 1011976 - DNA, 15 bp, Homo sapiens
gatgccaaccagtca

SEQ ID NO: 1011977 - DNA, 15 bp, Homo sapiens
atgccaaccagtcac

SEQ ID NO: 1011978 - DNA, 15 bp, Homo sapiens
tgccaaccagtcact

SEQ ID NO: 1011979 - DNA, 15 bp, Homo sapiens
gccaaccagtcactg

SEQ ID NO: 1011980 - DNA, 15 bp, Homo sapiens
ccaaccagtcactgt

SEQ ID NO: 1011981 - DNA, 15 bp, Homo sapiens
caaccagtcactgtt

SEQ ID NO: 1011982 - DNA, 15 bp, Homo sapiens
aaccagtcactgttt

SEQ ID NO: 1011983 - DNA, 15 bp, Homo sapiens
accagtcactgtttt

SEQ ID NO: 1011984 - DNA, 15 bp, Homo sapiens
ccagtcactgttttg

SEQ ID NO: 1011985 - DNA, 15 bp, Homo sapiens
cagtcactgttttgc

SEQ ID NO: 1011986 - DNA, 15 bp, Homo sapiens
agtcactgttttgca

SEQ ID NO: 1011987 - DNA, 15 bp, Homo sapiens
gtcactgttttgcat

SEQ ID NO: 1011988 - DNA, 15 bp, Homo sapiens
tcactgttttgcatg

SEQ ID NO: 1011989 - DNA, 15 bp, Homo sapiens
cactgttttgcatgg

SEQ ID NO: 1011990 - DNA, 15 bp, Homo sapiens
actgttttgcatggc

SEQ ID NO: 1011991 - DNA, 15 bp, Homo sapiens
ctgttttgcatggca

SEQ ID NO: 1011992 - DNA, 15 bp, Homo sapiens
tgttttgcatggcag

SEQ ID NO: 1011993 - DNA, 15 bp, Homo sapiens
gttttgcatggcagt

SEQ ID NO: 1011994 - DNA, 15 bp, Homo sapiens
ttttgcatggcagtg

SEQ ID NO: 1011995 - DNA, 15 bp, Homo sapiens
tttgcatggcagtgg

SEQ ID NO: 1011996 - DNA, 15 bp, Homo sapiens
ttgcatggcagtggg

SEQ ID NO: 1011997 - DNA, 15 bp, Homo sapiens
tgcatggcagtgggc

SEQ ID NO: 1011998 - DNA, 15 bp, Homo sapiens
gcatggcagtgggct

SEQ ID NO: 1011999 - DNA, 15 bp, Homo sapiens
catggcagtgggctt

SEQ ID NO: 1012000 - DNA, 15 bp, Homo sapiens
atggcagtgggcttc

SEQ ID NO: 1012001 - DNA, 15 bp, Homo sapiens
tggcagtgggcttct

SEQ ID NO: 1012002 - DNA, 15 bp, Homo sapiens
ggcagtgggcttctg

SEQ ID NO: 1012003 - DNA, 15 bp, Homo sapiens
gcagtgggcttctgt

SEQ ID NO: 1012004 - DNA, 15 bp, Homo sapiens
cagtgggcttctgtg

SEQ ID NO: 1012005 - DNA, 15 bp, Homo sapiens
agtgggcttctgtgg

SEQ ID NO: 1012006 - DNA, 15 bp, Homo sapiens
gtgggcttctgtggc

SEQ ID NO: 1012007 - DNA, 15 bp, Homo sapiens
tgggcttctgtggct

SEQ ID NO: 1012008 - DNA, 15 bp, Homo sapiens
gggcttctgtggctg

SEQ ID NO: 1012009 - DNA, 15 bp, Homo sapiens
ggcttctgtggctgt

SEQ ID NO: 1012010 - DNA, 15 bp, Homo sapiens
gcttctgtggctgta

SEQ ID NO: 1012011 - DNA, 15 bp, Homo sapiens
cttctgtggctgtaa

SEQ ID NO: 1012012 - DNA, 15 bp, Homo sapiens
ttctgtggctgtaag

SEQ ID NO: 1012013 - DNA, 15 bp, Homo sapiens
tctgtggctgtaagt

SEQ ID NO: 1012014 - DNA, 15 bp, Homo sapiens
ctgtggctgtaagta

SEQ ID NO: 1012015 - DNA, 15 bp, Homo sapiens
tgtggctgtaagtat

SEQ ID NO: 1012016 - DNA, 15 bp, Homo sapiens
gtggctgtaagtatg

SEQ ID NO: 1012017 - DNA, 15 bp, Homo sapiens
tggctgtaagtatga

SEQ ID NO: 1012018 - DNA, 15 bp, Homo sapiens
ggctgtaagtatgac

SEQ ID NO: 1012019 - DNA, 15 bp, Homo sapiens
gctgtaagtatgacc

SEQ ID NO: 1012020 - DNA, 15 bp, Homo sapiens
ctgtaagtatgaccc

SEQ ID NO: 1012021 - DNA, 15 bp, Homo sapiens
tgtaagtatgaccca

SEQ ID NO: 1012022 - DNA, 15 bp, Homo sapiens
gtaagtatgacccat

SEQ ID NO: 1012023 - DNA, 15 bp, Homo sapiens
taagtatgacccatt

SEQ ID NO: 1012024 - DNA, 15 bp, Homo sapiens
aagtatgacccattg

SEQ ID NO: 1012025 - DNA, 15 bp, Homo sapiens
agtatgacccattgt

SEQ ID NO: 1012026 - DNA, 15 bp, Homo sapiens
gtatgacccattgta

SEQ ID NO: 1012027 - DNA, 15 bp, Homo sapiens
tatgacccattgtaa

SEQ ID NO: 1012028 - DNA, 15 bp, Homo sapiens
atgacccattgtaac

SEQ ID NO: 1012029 - DNA, 15 bp, Homo sapiens
tgacccattgtaact

SEQ ID NO: 1012030 - DNA, 15 bp, Homo sapiens
gacccattgtaacta

SEQ ID NO: 1012031 - DNA, 15 bp, Homo sapiens
acccattgtaactac

SEQ ID NO: 1012032 - DNA, 15 bp, Homo sapiens
cccattgtaactaca

SEQ ID NO: 1012033 - DNA, 15 bp, Homo sapiens
ccattgtaactacat

SEQ ID NO: 1012034 - DNA, 15 bp, Homo sapiens
cattgtaactacatc

SEQ ID NO: 1012035 - DNA, 15 bp, Homo sapiens
attgtaactacatca

SEQ ID NO: 1012036 - DNA, 15 bp, Homo sapiens
ttgtaactacatcag

SEQ ID NO: 1012037 - DNA, 15 bp, Homo sapiens
tgtaactacatcaga

SEQ ID NO: 1012038 - DNA, 15 bp, Homo sapiens
gtaactacatcagaa

SEQ ID NO: 1012039 - DNA, 15 bp, Homo sapiens
taactacatcagaaa

SEQ ID NO: 1012040 - DNA, 15 bp, Homo sapiens
aactacatcagaaaa

SEQ ID NO: 1012041 - DNA, 15 bp, Homo sapiens
actacatcagaaaag

SEQ ID NO: 1012042 - DNA, 15 bp, Homo sapiens
ctacatcagaaaagt

SEQ ID NO: 1012043 - DNA, 15 bp, Homo sapiens
tacatcagaaaagtc

SEQ ID NO: 1012044 - DNA, 15 bp, Homo sapiens
acatcagaaaagtcc

SEQ ID NO: 1012045 - DNA, 15 bp, Homo sapiens
catcagaaaagtcct

SEQ ID NO: 1012046 - DNA, 15 bp, Homo sapiens
atcagaaaagtcctt

SEQ ID NO: 1012047 - DNA, 15 bp, Homo sapiens
tcagaaaagtccttg

SEQ ID NO: 1012048 - DNA, 15 bp, Homo sapiens
cagaaaagtccttgg

SEQ ID NO: 1012049 - DNA, 15 bp, Homo sapiens
agaaaagtccttggt

SEQ ID NO: 1012050 - DNA, 15 bp, Homo sapiens
gaaaagtccttggtt

SEQ ID NO: 1012051 - DNA, 15 bp, Homo sapiens
aaaagtccttggttt

SEQ ID NO: 1012052 - DNA, 15 bp, Homo sapiens
aaagtccttggtttc

SEQ ID NO: 1012053 - DNA, 15 bp, Homo sapiens
aagtccttggtttct

SEQ ID NO: 1012054 - DNA, 15 bp, Homo sapiens
agtccttggtttctt

SEQ ID NO: 1012055 - DNA, 15 bp, Homo sapiens
gtccttggtttcttt

SEQ ID NO: 1012056 - DNA, 15 bp, Homo sapiens
tccttggtttctttg

SEQ ID NO: 1012057 - DNA, 15 bp, Homo sapiens
ccttggtttctttga

SEQ ID NO: 1012058 - DNA, 15 bp, Homo sapiens
cttggtttctttgac

SEQ ID NO: 1012059 - DNA, 15 bp, Homo sapiens
ttggtttctttgact

SEQ ID NO: 1012060 - DNA, 15 bp, Homo sapiens
tggtttctttgactt

SEQ ID NO: 1012061 - DNA, 15 bp, Homo sapiens
ggtttctttgacttt

SEQ ID NO: 1012062 - DNA, 15 bp, Homo sapiens
gtttctttgactttt

SEQ ID NO: 1012063 - DNA, 15 bp, Homo sapiens
tttctttgacttttc

SEQ ID NO: 1012064 - DNA, 15 bp, Homo sapiens
ttctttgacttttct

SEQ ID NO: 1012065 - DNA, 15 bp, Homo sapiens
tctttgacttttctg

SEQ ID NO: 1012066 - DNA, 15 bp, Homo sapiens
ctttgacttttctgt

SEQ ID NO: 1012067 - DNA, 15 bp, Homo sapiens
tttgacttttctgtg

SEQ ID NO: 1012068 - DNA, 15 bp, Homo sapiens
ttgacttttctgtgt

SEQ ID NO: 1012069 - DNA, 15 bp, Homo sapiens
tgacttttctgtgta

SEQ ID NO: 1012070 - DNA, 15 bp, Homo sapiens
gacttttctgtgtat

SEQ ID NO: 1012071 - DNA, 15 bp, Homo sapiens
acttttctgtgtata

SEQ ID NO: 1012072 - DNA, 15 bp, Homo sapiens
cttttctgtgtatag

SEQ ID NO: 1012073 - DNA, 15 bp, Homo sapiens
ttttctgtgtatagt

SEQ ID NO: 1012074 - DNA, 15 bp, Homo sapiens
tttctgtgtatagtt

SEQ ID NO: 1012075 - DNA, 15 bp, Homo sapiens
ttctgtgtatagtta

SEQ ID NO: 1012076 - DNA, 15 bp, Homo sapiens
tctgtgtatagttac

SEQ ID NO: 1012077 - DNA, 15 bp, Homo sapiens
ctgtgtatagttacc

SEQ ID NO: 1012078 - DNA, 15 bp, Homo sapiens
tgtgtatagttacca

SEQ ID NO: 1012079 - DNA, 15 bp, Homo sapiens
gtgtatagttaccat

SEQ ID NO: 1012080 - DNA, 15 bp, Homo sapiens
tgtatagttaccatt

SEQ ID NO: 1012081 - DNA, 15 bp, Homo sapiens
gtatagttaccatta

SEQ ID NO: 1012082 - DNA, 15 bp, Homo sapiens
tatagttaccattat

SEQ ID NO: 1012083 - DNA, 15 bp, Homo sapiens
atagttaccattata

SEQ ID NO: 1012084 - DNA, 15 bp, Homo sapiens
tagttaccattatag

SEQ ID NO: 1012085 - DNA, 15 bp, Homo sapiens
agttaccattatagt

SEQ ID NO: 1012086 - DNA, 15 bp, Homo sapiens
gttaccattatagtc

SEQ ID NO: 1012087 - DNA, 15 bp, Homo sapiens
ttaccattatagtca

SEQ ID NO: 1012088 - DNA, 15 bp, Homo sapiens
taccattatagtcac

SEQ ID NO: 1012089 - DNA, 15 bp, Homo sapiens
accattatagtcaca

SEQ ID NO: 1012090 - DNA, 15 bp, Homo sapiens
ccattatagtcacat

SEQ ID NO: 1012091 - DNA, 15 bp, Homo sapiens
cattatagtcacatc

SEQ ID NO: 1012092 - DNA, 15 bp, Homo sapiens
attatagtcacatct

SEQ ID NO: 1012093 - DNA, 15 bp, Homo sapiens
ttatagtcacatctt

SEQ ID NO: 1012094 - DNA, 15 bp, Homo sapiens
tatagtcacatcttg

SEQ ID NO: 1012095 - DNA, 15 bp, Homo sapiens
atagtcacatcttgt

SEQ ID NO: 1012096 - DNA, 15 bp, Homo sapiens
tagtcacatcttgtc

SEQ ID NO: 1012097 - DNA, 15 bp, Homo sapiens
agtcacatcttgtca

SEQ ID NO: 1012098 - DNA, 15 bp, Homo sapiens
gtcacatcttgtcat

SEQ ID NO: 1012099 - DNA, 15 bp, Homo sapiens
tcacatcttgtcatt

SEQ ID NO: 1012100 - DNA, 15 bp, Homo sapiens
cacatcttgtcattt

SEQ ID NO: 1012101 - DNA, 15 bp, Homo sapiens
acatcttgtcatttc

SEQ ID NO: 1012102 - DNA, 15 bp, Homo sapiens
catcttgtcatttca

SEQ ID NO: 1012103 - DNA, 15 bp, Homo sapiens
atcttgtcatttcaa

SEQ ID NO: 1012104 - DNA, 15 bp, Homo sapiens
tcttgtcatttcaac

SEQ ID NO: 1012105 - DNA, 15 bp, Homo sapiens
cttgtcatttcaact

SEQ ID NO: 1012106 - DNA, 15 bp, Homo sapiens
ttgtcatttcaactg

SEQ ID NO: 1012107 - DNA, 15 bp, Homo sapiens
tgtcatttcaactga

SEQ ID NO: 1012108 - DNA, 15 bp, Homo sapiens
gtcatttcaactgaa

SEQ ID NO: 1012109 - DNA, 15 bp, Homo sapiens
tcatttcaactgaaa

SEQ ID NO: 1012110 - DNA, 15 bp, Homo sapiens
catttcaactgaaaa

SEQ ID NO: 1012111 - DNA, 15 bp, Homo sapiens
atttcaactgaaaat

SEQ ID NO: 1012112 - DNA, 15 bp, Homo sapiens
tttcaactgaaaata

SEQ ID NO: 1012113 - DNA, 15 bp, Homo sapiens
ttcaactgaaaatat

SEQ ID NO: 1012114 - DNA, 15 bp, Homo sapiens
tcaactgaaaatata

SEQ ID NO: 1012115 - DNA, 15 bp, Homo sapiens
caactgaaaatatag

SEQ ID NO: 1012116 - DNA, 15 bp, Homo sapiens
aactgaaaatatagc

SEQ ID NO: 1012117 - DNA, 15 bp, Homo sapiens
actgaaaatatagca

SEQ ID NO: 1012118 - DNA, 15 bp, Homo sapiens
ctgaaaatatagcat

SEQ ID NO: 1012119 - DNA, 15 bp, Homo sapiens
tgaaaatatagcatg

SEQ ID NO: 1012120 - DNA, 15 bp, Homo sapiens
gaaaatatagcatgt

SEQ ID NO: 1012121 - DNA, 15 bp, Homo sapiens
aaaatatagcatgtc

SEQ ID NO: 1012122 - DNA, 15 bp, Homo sapiens
aaatatagcatgtct

SEQ ID NO: 1012123 - DNA, 15 bp, Homo sapiens
aatatagcatgtctt

SEQ ID NO: 1012124 - DNA, 15 bp, Homo sapiens
atatagcatgtcttc

SEQ ID NO: 1012125 - DNA, 15 bp, Homo sapiens
tatagcatgtcttca

SEQ ID NO: 1012126 - DNA, 15 bp, Homo sapiens
atagcatgtcttcac

SEQ ID NO: 1012127 - DNA, 15 bp, Homo sapiens
tagcatgtcttcacc

SEQ ID NO: 1012128 - DNA, 15 bp, Homo sapiens
agcatgtcttcacct

SEQ ID NO: 1012129 - DNA, 15 bp, Homo sapiens
gcatgtcttcacctg

SEQ ID NO: 1012130 - DNA, 15 bp, Homo sapiens
catgtcttcacctgt

SEQ ID NO: 1012131 - DNA, 15 bp, Homo sapiens
atgtcttcacctgtt

SEQ ID NO: 1012132 - DNA, 15 bp, Homo sapiens
tgtcttcacctgttg

SEQ ID NO: 1012133 - DNA, 15 bp, Homo sapiens
gtcttcacctgttgg

SEQ ID NO: 1012134 - DNA, 15 bp, Homo sapiens
tcttcacctgttggt

SEQ ID NO: 1012135 - DNA, 15 bp, Homo sapiens
cttcacctgttggtt

SEQ ID NO: 1012136 - DNA, 15 bp, Homo sapiens
ttcacctgttggttt

SEQ ID NO: 1012137 - DNA, 15 bp, Homo sapiens
tcacctgttggtttt

SEQ ID NO: 1012138 - DNA, 15 bp, Homo sapiens
cacctgttggtttta

SEQ ID NO: 1012139 - DNA, 15 bp, Homo sapiens
acctgttggttttat

SEQ ID NO: 1012140 - DNA, 15 bp, Homo sapiens
cctgttggttttatc

SEQ ID NO: 1012141 - DNA, 15 bp, Homo sapiens
ctgttggttttatct

SEQ ID NO: 1012142 - DNA, 15 bp, Homo sapiens
tgttggttttatcta

SEQ ID NO: 1012143 - DNA, 15 bp, Homo sapiens
gttggttttatctag

SEQ ID NO: 1012144 - DNA, 15 bp, Homo sapiens
ttggttttatctagt

SEQ ID NO: 1012145 - DNA, 15 bp, Homo sapiens
tggttttatctagta

SEQ ID NO: 1012146 - DNA, 15 bp, Homo sapiens
ggttttatctagtaa

SEQ ID NO: 1012147 - DNA, 15 bp, Homo sapiens
gttttatctagtaag

SEQ ID NO: 1012148 - DNA, 15 bp, Homo sapiens
ttttatctagtaagt

SEQ ID NO: 1012149 - DNA, 15 bp, Homo sapiens
tttatctagtaagtt

SEQ ID NO: 1012150 - DNA, 15 bp, Homo sapiens
ttatctagtaagtta

SEQ ID NO: 1012151 - DNA, 15 bp, Homo sapiens
tatctagtaagttag

SEQ ID NO: 1012152 - DNA, 15 bp, Homo sapiens
atctagtaagttagt

SEQ ID NO: 1012153 - DNA, 15 bp, Homo sapiens
tctagtaagttagtc

SEQ ID NO: 1012154 - DNA, 15 bp, Homo sapiens
ctagtaagttagtca

SEQ ID NO: 1012155 - DNA, 15 bp, Homo sapiens
tagtaagttagtcat

SEQ ID NO: 1012156 - DNA, 15 bp, Homo sapiens
agtaagttagtcatt

SEQ ID NO: 1012157 - DNA, 15 bp, Homo sapiens
gtaagttagtcattt

SEQ ID NO: 1012158 - DNA, 15 bp, Homo sapiens
taagttagtcatttc

SEQ ID NO: 1012159 - DNA, 15 bp, Homo sapiens
aagttagtcatttca

SEQ ID NO: 1012160 - DNA, 15 bp, Homo sapiens
agttagtcatttcac

SEQ ID NO: 1012161 - DNA, 15 bp, Homo sapiens
gttagtcatttcaca

SEQ ID NO: 1012162 - DNA, 15 bp, Homo sapiens
ttagtcatttcacag

SEQ ID NO: 1012163 - DNA, 15 bp, Homo sapiens
tagtcatttcacagt

SEQ ID NO: 1012164 - DNA, 15 bp, Homo sapiens
agtcatttcacagtt

SEQ ID NO: 1012165 - DNA, 15 bp, Homo sapiens
gtcatttcacagtta

SEQ ID NO: 1012166 - DNA, 15 bp, Homo sapiens
tcatttcacagttag

SEQ ID NO: 1012167 - DNA, 15 bp, Homo sapiens
catttcacagttagg

SEQ ID NO: 1012168 - DNA, 15 bp, Homo sapiens
atttcacagttagga

SEQ ID NO: 1012169 - DNA, 15 bp, Homo sapiens
tttcacagttaggag

SEQ ID NO: 1012170 - DNA, 15 bp, Homo sapiens
ttcacagttaggaga

SEQ ID NO: 1012171 - DNA, 15 bp, Homo sapiens
tcacagttaggagat

SEQ ID NO: 1012172 - DNA, 15 bp, Homo sapiens
cacagttaggagata

SEQ ID NO: 1012173 - DNA, 15 bp, Homo sapiens
acagttaggagataa

SEQ ID NO: 1012174 - DNA, 15 bp, Homo sapiens
cagttaggagataat

SEQ ID NO: 1012175 - DNA, 15 bp, Homo sapiens
agttaggagataatt

SEQ ID NO: 1012176 - DNA, 15 bp, Homo sapiens
gttaggagataattt

SEQ ID NO: 1012177 - DNA, 15 bp, Homo sapiens
ttaggagataattta

SEQ ID NO: 1012178 - DNA, 15 bp, Homo sapiens
taggagataatttaa

SEQ ID NO: 1012179 - DNA, 15 bp, Homo sapiens
aggagataatttaaa

SEQ ID NO: 1012180 - DNA, 15 bp, Homo sapiens
ggagataatttaaac

SEQ ID NO: 1012181 - DNA, 15 bp, Homo sapiens
gagataatttaaaca

SEQ ID NO: 1012182 - DNA, 15 bp, Homo sapiens
agataatttaaacag

SEQ ID NO: 1012183 - DNA, 15 bp, Homo sapiens
gataatttaaacagc

SEQ ID NO: 1012184 - DNA, 15 bp, Homo sapiens
ataatttaaacagct

SEQ ID NO: 1012185 - DNA, 15 bp, Homo sapiens
taatttaaacagctt

SEQ ID NO: 1012186 - DNA, 15 bp, Homo sapiens
aatttaaacagcttt

SEQ ID NO: 1012187 - DNA, 15 bp, Homo sapiens
atttaaacagctttc

SEQ ID NO: 1012188 - DNA, 15 bp, Homo sapiens
tttaaacagctttct

SEQ ID NO: 1012189 - DNA, 15 bp, Homo sapiens
ttaaacagctttctc

SEQ ID NO: 1012190 - DNA, 15 bp, Homo sapiens
taaacagctttctcc

SEQ ID NO: 1012191 - DNA, 15 bp, Homo sapiens
aaacagctttctccc

SEQ ID NO: 1012192 - DNA, 15 bp, Homo sapiens
aacagctttctccct

SEQ ID NO: 1012193 - DNA, 15 bp, Homo sapiens
acagctttctccctg

SEQ ID NO: 1012194 - DNA, 15 bp, Homo sapiens
cagctttctccctgg

SEQ ID NO: 1012195 - DNA, 15 bp, Homo sapiens
agctttctccctggc

SEQ ID NO: 1012196 - DNA, 15 bp, Homo sapiens
gctttctccctggca

SEQ ID NO: 1012197 - DNA, 15 bp, Homo sapiens
ctttctccctggcat

SEQ ID NO: 1012198 - DNA, 15 bp, Homo sapiens
tttctccctggcatg

SEQ ID NO: 1012199 - DNA, 15 bp, Homo sapiens
ttctccctggcatgc

SEQ ID NO: 1012200 - DNA, 15 bp, Homo sapiens
tctccctggcatgct

SEQ ID NO: 1012201 - DNA, 15 bp, Homo sapiens
ctccctggcatgctt

SEQ ID NO: 1012202 - DNA, 15 bp, Homo sapiens
tccctggcatgcttc

SEQ ID NO: 1012203 - DNA, 15 bp, Homo sapiens
ccctggcatgcttct

SEQ ID NO: 1012204 - DNA, 15 bp, Homo sapiens
cctggcatgcttctc

SEQ ID NO: 1012205 - DNA, 15 bp, Homo sapiens
ctggcatgcttctct

SEQ ID NO: 1012206 - DNA, 15 bp, Homo sapiens
tggcatgcttctctt

SEQ ID NO: 1012207 - DNA, 15 bp, Homo sapiens
ggcatgcttctcttt

SEQ ID NO: 1012208 - DNA, 15 bp, Homo sapiens
gcatgcttctctttt

SEQ ID NO: 1012209 - DNA, 15 bp, Homo sapiens
catgcttctcttttt

SEQ ID NO: 1012210 - DNA, 15 bp, Homo sapiens
atgcttctctttttc

SEQ ID NO: 1012211 - DNA, 15 bp, Homo sapiens
tgcttctctttttcc

SEQ ID NO: 1012212 - DNA, 15 bp, Homo sapiens
gcttctctttttcca

SEQ ID NO: 1012213 - DNA, 15 bp, Homo sapiens
cttctctttttccaa

SEQ ID NO: 1012214 - DNA, 15 bp, Homo sapiens
ttctctttttccaag

SEQ ID NO: 1012215 - DNA, 15 bp, Homo sapiens
tctctttttccaagt

SEQ ID NO: 1012216 - DNA, 15 bp, Homo sapiens
ctctttttccaagtc

SEQ ID NO: 1012217 - DNA, 15 bp, Homo sapiens
tctttttccaagtcc

SEQ ID NO: 1012218 - DNA, 15 bp, Homo sapiens
ctttttccaagtccc

SEQ ID NO: 1012219 - DNA, 15 bp, Homo sapiens
tttttccaagtcccc

SEQ ID NO: 1012220 - DNA, 15 bp, Homo sapiens
ttttccaagtcccct

SEQ ID NO: 1012221 - DNA, 15 bp, Homo sapiens
tttccaagtcccctt

SEQ ID NO: 1012222 - DNA, 15 bp, Homo sapiens
ttccaagtcccctta

SEQ ID NO: 1012223 - DNA, 15 bp, Homo sapiens
tccaagtccccttag

SEQ ID NO: 1012224 - DNA, 15 bp, Homo sapiens
ccaagtccccttagt

SEQ ID NO: 1012225 - DNA, 15 bp, Homo sapiens
caagtccccttagtc

SEQ ID NO: 1012226 - DNA, 15 bp, Homo sapiens
aagtccccttagtca

SEQ ID NO: 1012227 - DNA, 15 bp, Homo sapiens
agtccccttagtcag

SEQ ID NO: 1012228 - DNA, 15 bp, Homo sapiens
gtccccttagtcagt

SEQ ID NO: 1012229 - DNA, 15 bp, Homo sapiens
tccccttagtcagtg

SEQ ID NO: 1012230 - DNA, 15 bp, Homo sapiens
ccccttagtcagtga

SEQ ID NO: 1012231 - DNA, 15 bp, Homo sapiens
cccttagtcagtgaa

SEQ ID NO: 1012232 - DNA, 15 bp, Homo sapiens
ccttagtcagtgaaa

SEQ ID NO: 1012233 - DNA, 15 bp, Homo sapiens
cttagtcagtgaaat

SEQ ID NO: 1012234 - DNA, 15 bp, Homo sapiens
ttagtcagtgaaata

SEQ ID NO: 1012235 - DNA, 15 bp, Homo sapiens
tagtcagtgaaatat

SEQ ID NO: 1012236 - DNA, 15 bp, Homo sapiens
agtcagtgaaatatt

SEQ ID NO: 1012237 - DNA, 15 bp, Homo sapiens
gtcagtgaaatattt

SEQ ID NO: 1012238 - DNA, 15 bp, Homo sapiens
tcagtgaaatatttt

SEQ ID NO: 1012239 - DNA, 15 bp, Homo sapiens
cagtgaaatattttg

SEQ ID NO: 1012240 - DNA, 15 bp, Homo sapiens
agtgaaatattttgg

SEQ ID NO: 1012241 - DNA, 15 bp, Homo sapiens
gtgaaatattttggt

SEQ ID NO: 1012242 - DNA, 15 bp, Homo sapiens
tgaaatattttggtt

SEQ ID NO: 1012243 - DNA, 15 bp, Homo sapiens
gaaatattttggttt

SEQ ID NO: 1012244 - DNA, 15 bp, Homo sapiens
aaatattttggtttt

SEQ ID NO: 1012245 - DNA, 15 bp, Homo sapiens
aatattttggtttta

SEQ ID NO: 1012246 - DNA, 15 bp, Homo sapiens
atattttggttttat

SEQ ID NO: 1012247 - DNA, 15 bp, Homo sapiens
tattttggttttata

SEQ ID NO: 1012248 - DNA, 15 bp, Homo sapiens
attttggttttatac

SEQ ID NO: 1012249 - DNA, 15 bp, Homo sapiens
ttttggttttataca

SEQ ID NO: 1012250 - DNA, 15 bp, Homo sapiens
tttggttttatacag

SEQ ID NO: 1012251 - DNA, 15 bp, Homo sapiens
ttggttttatacagt

SEQ ID NO: 1012252 - DNA, 15 bp, Homo sapiens
tggttttatacagtt

SEQ ID NO: 1012253 - DNA, 15 bp, Homo sapiens
ggttttatacagttg

SEQ ID NO: 1012254 - DNA, 15 bp, Homo sapiens
gttttatacagttgt

SEQ ID NO: 1012255 - DNA, 15 bp, Homo sapiens
ttttatacagttgtg

SEQ ID NO: 1012256 - DNA, 15 bp, Homo sapiens
tttatacagttgtgg

SEQ ID NO: 1012257 - DNA, 15 bp, Homo sapiens
ttatacagttgtggt

SEQ ID NO: 1012258 - DNA, 15 bp, Homo sapiens
tatacagttgtggtt

SEQ ID NO: 1012259 - DNA, 15 bp, Homo sapiens
atacagttgtggttc

SEQ ID NO: 1012260 - DNA, 15 bp, Homo sapiens
tacagttgtggttca

SEQ ID NO: 1012261 - DNA, 15 bp, Homo sapiens
acagttgtggttcac

SEQ ID NO: 1012262 - DNA, 15 bp, Homo sapiens
cagttgtggttcact

SEQ ID NO: 1012263 - DNA, 15 bp, Homo sapiens
agttgtggttcactc

SEQ ID NO: 1012264 - DNA, 15 bp, Homo sapiens
gttgtggttcactct

SEQ ID NO: 1012265 - DNA, 15 bp, Homo sapiens
ttgtggttcactctt

SEQ ID NO: 1012266 - DNA, 15 bp, Homo sapiens
tgtggttcactctta

SEQ ID NO: 1012267 - DNA, 15 bp, Homo sapiens
gtggttcactcttat

SEQ ID NO: 1012268 - DNA, 15 bp, Homo sapiens
tggttcactcttatc

SEQ ID NO: 1012269 - DNA, 15 bp, Homo sapiens
ggttcactcttatcc

SEQ ID NO: 1012270 - DNA, 15 bp, Homo sapiens
gttcactcttatcca

SEQ ID NO: 1012271 - DNA, 15 bp, Homo sapiens
ttcactcttatccag

SEQ ID NO: 1012272 - DNA, 15 bp, Homo sapiens
tcactcttatccagt

SEQ ID NO: 1012273 - DNA, 15 bp, Homo sapiens
cactcttatccagtt

SEQ ID NO: 1012274 - DNA, 15 bp, Homo sapiens
actcttatccagttg

SEQ ID NO: 1012275 - DNA, 15 bp, Homo sapiens
ctcttatccagttgt

SEQ ID NO: 1012276 - DNA, 15 bp, Homo sapiens
tcttatccagttgtc

SEQ ID NO: 1012277 - DNA, 15 bp, Homo sapiens
cttatccagttgtca

SEQ ID NO: 1012278 - DNA, 15 bp, Homo sapiens
ttatccagttgtcag

SEQ ID NO: 1012279 - DNA, 15 bp, Homo sapiens
tatccagttgtcagt

SEQ ID NO: 1012280 - DNA, 15 bp, Homo sapiens
atccagttgtcagta

SEQ ID NO: 1012281 - DNA, 15 bp, Homo sapiens
tccagttgtcagtaa

SEQ ID NO: 1012282 - DNA, 15 bp, Homo sapiens
ccagttgtcagtaat

SEQ ID NO: 1012283 - DNA, 15 bp, Homo sapiens
cagttgtcagtaatt

SEQ ID NO: 1012284 - DNA, 15 bp, Homo sapiens
agttgtcagtaatta

SEQ ID NO: 1012285 - DNA, 15 bp, Homo sapiens
gttgtcagtaattat

SEQ ID NO: 1012286 - DNA, 15 bp, Homo sapiens
ttgtcagtaattatt

SEQ ID NO: 1012287 - DNA, 15 bp, Homo sapiens
tgtcagtaattattt

SEQ ID NO: 1012288 - DNA, 15 bp, Homo sapiens
gtcagtaattatttc

SEQ ID NO: 1012289 - DNA, 15 bp, Homo sapiens
tcagtaattatttct

SEQ ID NO: 1012290 - DNA, 15 bp, Homo sapiens
cagtaattatttctg

SEQ ID NO: 1012291 - DNA, 15 bp, Homo sapiens
agtaattatttctga

SEQ ID NO: 1012292 - DNA, 15 bp, Homo sapiens
gtaattatttctgag

SEQ ID NO: 1012293 - DNA, 15 bp, Homo sapiens
taattatttctgagg

SEQ ID NO: 1012294 - DNA, 15 bp, Homo sapiens
aattatttctgagga

SEQ ID NO: 1012295 - DNA, 15 bp, Homo sapiens
attatttctgaggat

SEQ ID NO: 1012296 - DNA, 15 bp, Homo sapiens
ttatttctgaggatt

SEQ ID NO: 1012297 - DNA, 15 bp, Homo sapiens
tatttctgaggattg

SEQ ID NO: 1012298 - DNA, 15 bp, Homo sapiens
atttctgaggattgt

SEQ ID NO: 1012299 - DNA, 15 bp, Homo sapiens
tttctgaggattgtt

SEQ ID NO: 1012300 - DNA, 15 bp, Homo sapiens
ttctgaggattgttt

SEQ ID NO: 1012301 - DNA, 15 bp, Homo sapiens
tctgaggattgttta

SEQ ID NO: 1012302 - DNA, 15 bp, Homo sapiens
ctgaggattgtttat

SEQ ID NO: 1012303 - DNA, 15 bp, Homo sapiens
tgaggattgtttatc

SEQ ID NO: 1012304 - DNA, 15 bp, Homo sapiens
gaggattgtttatct

SEQ ID NO: 1012305 - DNA, 15 bp, Homo sapiens
aggattgtttatctt

SEQ ID NO: 1012306 - DNA, 15 bp, Homo sapiens
ggattgtttatctta

SEQ ID NO: 1012307 - DNA, 15 bp, Homo sapiens
gattgtttatcttag

SEQ ID NO: 1012308 - DNA, 15 bp, Homo sapiens
attgtttatcttaga

SEQ ID NO: 1012309 - DNA, 15 bp, Homo sapiens
ttgtttatcttagat

SEQ ID NO: 1012310 - DNA, 15 bp, Homo sapiens
tgtttatcttagatg

SEQ ID NO: 1012311 - DNA, 15 bp, Homo sapiens
gtttatcttagatgt

SEQ ID NO: 1012312 - DNA, 15 bp, Homo sapiens
tttatcttagatgtt

SEQ ID NO: 1012313 - DNA, 15 bp, Homo sapiens
ttatcttagatgttc

SEQ ID NO: 1012314 - DNA, 15 bp, Homo sapiens
tatcttagatgttca

SEQ ID NO: 1012315 - DNA, 15 bp, Homo sapiens
atcttagatgttcaa

SEQ ID NO: 1012316 - DNA, 15 bp, Homo sapiens
tcttagatgttcaaa

SEQ ID NO: 1012317 - DNA, 15 bp, Homo sapiens
cttagatgttcaaat

SEQ ID NO: 1012318 - DNA, 15 bp, Homo sapiens
ttagatgttcaaata

SEQ ID NO: 1012319 - DNA, 15 bp, Homo sapiens
tagatgttcaaatag

SEQ ID NO: 1012320 - DNA, 15 bp, Homo sapiens
agatgttcaaataga

SEQ ID NO: 1012321 - DNA, 15 bp, Homo sapiens
gatgttcaaatagag

SEQ ID NO: 1012322 - DNA, 15 bp, Homo sapiens
atgttcaaatagaga

SEQ ID NO: 1012323 - DNA, 15 bp, Homo sapiens
tgttcaaatagagaa

SEQ ID NO: 1012324 - DNA, 15 bp, Homo sapiens
gttcaaatagagaag

SEQ ID NO: 1012325 - DNA, 15 bp, Homo sapiens
ttcaaatagagaagt

SEQ ID NO: 1012326 - DNA, 15 bp, Homo sapiens
tcaaatagagaagtt

SEQ ID NO: 1012327 - DNA, 15 bp, Homo sapiens
caaatagagaagttt

SEQ ID NO: 1012328 - DNA, 15 bp, Homo sapiens
aaatagagaagtttt

SEQ ID NO: 1012329 - DNA, 15 bp, Homo sapiens
aatagagaagttttt

SEQ ID NO: 1012330 - DNA, 15 bp, Homo sapiens
atagagaagtttttt

SEQ ID NO: 1012331 - DNA, 15 bp, Homo sapiens
tagagaagtttttta

SEQ ID NO: 1012332 - DNA, 15 bp, Homo sapiens
agagaagttttttat

SEQ ID NO: 1012333 - DNA, 15 bp, Homo sapiens
gagaagttttttatg

SEQ ID NO: 1012334 - DNA, 15 bp, Homo sapiens
agaagttttttatgt

SEQ ID NO: 1012335 - DNA, 15 bp, Homo sapiens
gaagttttttatgtc

SEQ ID NO: 1012336 - DNA, 15 bp, Homo sapiens
aagttttttatgtca

SEQ ID NO: 1012337 - DNA, 15 bp, Homo sapiens
agttttttatgtcat

SEQ ID NO: 1012338 - DNA, 15 bp, Homo sapiens
gttttttatgtcata

SEQ ID NO: 1012339 - DNA, 15 bp, Homo sapiens
ttttttatgtcatat

SEQ ID NO: 1012340 - DNA, 15 bp, Homo sapiens
tttttatgtcatata

SEQ ID NO: 1012341 - DNA, 15 bp, Homo sapiens
ttttatgtcatatat

SEQ ID NO: 1012342 - DNA, 15 bp, Homo sapiens
tttatgtcatatatt

SEQ ID NO: 1012343 - DNA, 15 bp, Homo sapiens
ttatgtcatatattt

SEQ ID NO: 1012344 - DNA, 15 bp, Homo sapiens
tatgtcatatatttt

SEQ ID NO: 1012345 - DNA, 15 bp, Homo sapiens
atgtcatatattttg

SEQ ID NO: 1012346 - DNA, 15 bp, Homo sapiens
tgtcatatattttgg

SEQ ID NO: 1012347 - DNA, 15 bp, Homo sapiens
gtcatatattttggg

SEQ ID NO: 1012348 - DNA, 15 bp, Homo sapiens
tcatatattttggga

SEQ ID NO: 1012349 - DNA, 15 bp, Homo sapiens
catatattttgggat

SEQ ID NO: 1012350 - DNA, 15 bp, Homo sapiens
atatattttgggatt

SEQ ID NO: 1012351 - DNA, 15 bp, Homo sapiens
tatattttgggatta

SEQ ID NO: 1012352 - DNA, 15 bp, Homo sapiens
atattttgggattat

SEQ ID NO: 1012353 - DNA, 15 bp, Homo sapiens
tattttgggattatt

SEQ ID NO: 1012354 - DNA, 15 bp, Homo sapiens
attttgggattattg

SEQ ID NO: 1012355 - DNA, 15 bp, Homo sapiens
ttttgggattattga

SEQ ID NO: 1012356 - DNA, 15 bp, Homo sapiens
tttgggattattgag

SEQ ID NO: 1012357 - DNA, 15 bp, Homo sapiens
ttgggattattgagc

SEQ ID NO: 1012358 - DNA, 15 bp, Homo sapiens
tgggattattgagcc

SEQ ID NO: 1012359 - DNA, 15 bp, Homo sapiens
gggattattgagcct

SEQ ID NO: 1012360 - DNA, 15 bp, Homo sapiens
ggattattgagccta

SEQ ID NO: 1012361 - DNA, 15 bp, Homo sapiens
gattattgagcctaa

SEQ ID NO: 1012362 - DNA, 15 bp, Homo sapiens
attattgagcctaaa

SEQ ID NO: 1012363 - DNA, 15 bp, Homo sapiens
ttattgagcctaaaa

SEQ ID NO: 1012364 - DNA, 15 bp, Homo sapiens
tattgagcctaaaaa

SEQ ID NO: 1012365 - DNA, 15 bp, Homo sapiens
attgagcctaaaaaa

SEQ ID NO: 1012366 - DNA, 15 bp, Homo sapiens
ttgagcctaaaaaat

SEQ ID NO: 1012367 - DNA, 15 bp, Homo sapiens
tgagcctaaaaaata

SEQ ID NO: 1012368 - DNA, 15 bp, Homo sapiens
gagcctaaaaaatat

SEQ ID NO: 1012369 - DNA, 15 bp, Homo sapiens
agcctaaaaaatata

SEQ ID NO: 1012370 - DNA, 15 bp, Homo sapiens
gcctaaaaaatatag

SEQ ID NO: 1012371 - DNA, 15 bp, Homo sapiens
cctaaaaaatatagc

SEQ ID NO: 1012372 - DNA, 15 bp, Homo sapiens
ctaaaaaatatagcc

SEQ ID NO: 1012373 - DNA, 15 bp, Homo sapiens
taaaaaatatagcca

SEQ ID NO: 1012374 - DNA, 15 bp, Homo sapiens
aaaaaatatagccaa

SEQ ID NO: 1012375 - DNA, 15 bp, Homo sapiens
aaaaatatagccaaa

SEQ ID NO: 1012376 - DNA, 15 bp, Homo sapiens
aaaatatagccaaaa

SEQ ID NO: 1012377 - DNA, 15 bp, Homo sapiens
aaatatagccaaaag

SEQ ID NO: 1012378 - DNA, 15 bp, Homo sapiens
aatatagccaaaaga

SEQ ID NO: 1012379 - DNA, 15 bp, Homo sapiens
atatagccaaaagat

SEQ ID NO: 1012380 - DNA, 15 bp, Homo sapiens
tatagccaaaagatc

SEQ ID NO: 1012381 - DNA, 15 bp, Homo sapiens
atagccaaaagatca

SEQ ID NO: 1012382 - DNA, 15 bp, Homo sapiens
tagccaaaagatcat

SEQ ID NO: 1012383 - DNA, 15 bp, Homo sapiens
agccaaaagatcatg

SEQ ID NO: 1012384 - DNA, 15 bp, Homo sapiens
gccaaaagatcatgg

SEQ ID NO: 1012385 - DNA, 15 bp, Homo sapiens
ccaaaagatcatggc

SEQ ID NO: 1012386 - DNA, 15 bp, Homo sapiens
caaaagatcatggca

SEQ ID NO: 1012387 - DNA, 15 bp, Homo sapiens
aaaagatcatggcaa

SEQ ID NO: 1012388 - DNA, 15 bp, Homo sapiens
aaagatcatggcaat

SEQ ID NO: 1012389 - DNA, 15 bp, Homo sapiens
aagatcatggcaatg

SEQ ID NO: 1012390 - DNA, 15 bp, Homo sapiens
agatcatggcaatga

SEQ ID NO: 1012391 - DNA, 15 bp, Homo sapiens
gatcatggcaatgat

SEQ ID NO: 1012392 - DNA, 15 bp, Homo sapiens
atcatggcaatgatg

SEQ ID NO: 1012393 - DNA, 15 bp, Homo sapiens
tcatggcaatgatgt

SEQ ID NO: 1012394 - DNA, 15 bp, Homo sapiens
catggcaatgatgtt

SEQ ID NO: 1012395 - DNA, 15 bp, Homo sapiens
atggcaatgatgttt

SEQ ID NO: 1012396 - DNA, 15 bp, Homo sapiens
tggcaatgatgtttc

SEQ ID NO: 1012397 - DNA, 15 bp, Homo sapiens
ggcaatgatgtttcc

SEQ ID NO: 1012398 - DNA, 15 bp, Homo sapiens
gcaatgatgtttcct

SEQ ID NO: 1012399 - DNA, 15 bp, Homo sapiens
caatgatgtttcctt

SEQ ID NO: 1012400 - DNA, 15 bp, Homo sapiens
aatgatgtttcctta

SEQ ID NO: 1012401 - DNA, 15 bp, Homo sapiens
atgatgtttccttaa

SEQ ID NO: 1012402 - DNA, 15 bp, Homo sapiens
tgatgtttccttaag

SEQ ID NO: 1012403 - DNA, 15 bp, Homo sapiens
gatgtttccttaagt

SEQ ID NO: 1012404 - DNA, 15 bp, Homo sapiens
atgtttccttaagta

SEQ ID NO: 1012405 - DNA, 15 bp, Homo sapiens
tgtttccttaagtaa

SEQ ID NO: 1012406 - DNA, 15 bp, Homo sapiens
gtttccttaagtaaa

SEQ ID NO: 1012407 - DNA, 15 bp, Homo sapiens
tttccttaagtaaac

SEQ ID NO: 1012408 - DNA, 15 bp, Homo sapiens
ttccttaagtaaact

SEQ ID NO: 1012409 - DNA, 15 bp, Homo sapiens
tccttaagtaaactt

SEQ ID NO: 1012410 - DNA, 15 bp, Homo sapiens
ccttaagtaaacttt

SEQ ID NO: 1012411 - DNA, 15 bp, Homo sapiens
cttaagtaaacttta

SEQ ID NO: 1012412 - DNA, 15 bp, Homo sapiens
ttaagtaaactttaa

SEQ ID NO: 1012413 - DNA, 15 bp, Homo sapiens
taagtaaactttaaa

SEQ ID NO: 1012414 - DNA, 15 bp, Homo sapiens
aagtaaactttaaaa

SEQ ID NO: 1012415 - DNA, 15 bp, Homo sapiens
agtaaactttaaaat

SEQ ID NO: 1012416 - DNA, 15 bp, Homo sapiens
gtaaactttaaaatg

SEQ ID NO: 1012417 - DNA, 15 bp, Homo sapiens
taaactttaaaatgc

SEQ ID NO: 1012418 - DNA, 15 bp, Homo sapiens
aaactttaaaatgca

SEQ ID NO: 1012419 - DNA, 15 bp, Homo sapiens
aactttaaaatgcaa

SEQ ID NO: 1012420 - DNA, 15 bp, Homo sapiens
actttaaaatgcaag

SEQ ID NO: 1012421 - DNA, 15 bp, Homo sapiens
ctttaaaatgcaagg

SEQ ID NO: 1012422 - DNA, 15 bp, Homo sapiens
tttaaaatgcaaggt

SEQ ID NO: 1012423 - DNA, 15 bp, Homo sapiens
ttaaaatgcaaggtt

SEQ ID NO: 1012424 - DNA, 15 bp, Homo sapiens
taaaatgcaaggtta

SEQ ID NO: 1012425 - DNA, 15 bp, Homo sapiens
aaaatgcaaggttac

SEQ ID NO: 1012426 - DNA, 15 bp, Homo sapiens
aaatgcaaggttacc

SEQ ID NO: 1012427 - DNA, 15 bp, Homo sapiens
aatgcaaggttacct

SEQ ID NO: 1012428 - DNA, 15 bp, Homo sapiens
atgcaaggttacctt

SEQ ID NO: 1012429 - DNA, 15 bp, Homo sapiens
tgcaaggttaccttt

SEQ ID NO: 1012430 - DNA, 15 bp, Homo sapiens
gcaaggttacctttt

SEQ ID NO: 1012431 - DNA, 15 bp, Homo sapiens
caaggttacctttta

SEQ ID NO: 1012432 - DNA, 15 bp, Homo sapiens
aaggttaccttttag

SEQ ID NO: 1012433 - DNA, 15 bp, Homo sapiens
aggttaccttttagt

SEQ ID NO: 1012434 - DNA, 15 bp, Homo sapiens
ggttaccttttagtt

SEQ ID NO: 1012435 - DNA, 15 bp, Homo sapiens
gttaccttttagttg

SEQ ID NO: 1012436 - DNA, 15 bp, Homo sapiens
ttaccttttagttga

SEQ ID NO: 1012437 - DNA, 15 bp, Homo sapiens
taccttttagttgac

SEQ ID NO: 1012438 - DNA, 15 bp, Homo sapiens
accttttagttgact

SEQ ID NO: 1012439 - DNA, 15 bp, Homo sapiens
ccttttagttgactt

SEQ ID NO: 1012440 - DNA, 15 bp, Homo sapiens
cttttagttgacttt

SEQ ID NO: 1012441 - DNA, 15 bp, Homo sapiens
ttttagttgactttt

SEQ ID NO: 1012442 - DNA, 15 bp, Homo sapiens
tttagttgacttttt

SEQ ID NO: 1012443 - DNA, 15 bp, Homo sapiens
ttagttgactttttg

SEQ ID NO: 1012444 - DNA, 15 bp, Homo sapiens
tagttgactttttgt

SEQ ID NO: 1012445 - DNA, 15 bp, Homo sapiens
agttgactttttgta

SEQ ID NO: 1012446 - DNA, 15 bp, Homo sapiens
gttgactttttgtaa

SEQ ID NO: 1012447 - DNA, 15 bp, Homo sapiens
ttgactttttgtaat

SEQ ID NO: 1012448 - DNA, 15 bp, Homo sapiens
tgactttttgtaatg

SEQ ID NO: 1012449 - DNA, 15 bp, Homo sapiens
gactttttgtaatgc

SEQ ID NO: 1012450 - DNA, 15 bp, Homo sapiens
actttttgtaatgcc

SEQ ID NO: 1012451 - DNA, 15 bp, Homo sapiens
ctttttgtaatgcca

SEQ ID NO: 1012452 - DNA, 15 bp, Homo sapiens
tttttgtaatgccaa

SEQ ID NO: 1012453 - DNA, 15 bp, Homo sapiens
ttttgtaatgccaag

SEQ ID NO: 1012454 - DNA, 15 bp, Homo sapiens
tttgtaatgccaagt

SEQ ID NO: 1012455 - DNA, 15 bp, Homo sapiens
ttgtaatgccaagta

SEQ ID NO: 1012456 - DNA, 15 bp, Homo sapiens
tgtaatgccaagtac

SEQ ID NO: 1012457 - DNA, 15 bp, Homo sapiens
gtaatgccaagtact

SEQ ID NO: 1012458 - DNA, 15 bp, Homo sapiens
taatgccaagtactt

SEQ ID NO: 1012459 - DNA, 15 bp, Homo sapiens
aatgccaagtacttc

SEQ ID NO: 1012460 - DNA, 15 bp, Homo sapiens
atgccaagtacttca

SEQ ID NO: 1012461 - DNA, 15 bp, Homo sapiens
tgccaagtacttcac

SEQ ID NO: 1012462 - DNA, 15 bp, Homo sapiens
gccaagtacttcact

SEQ ID NO: 1012463 - DNA, 15 bp, Homo sapiens
ccaagtacttcactt

SEQ ID NO: 1012464 - DNA, 15 bp, Homo sapiens
caagtacttcacttt

SEQ ID NO: 1012465 - DNA, 15 bp, Homo sapiens
aagtacttcactttt

SEQ ID NO: 1012466 - DNA, 15 bp, Homo sapiens
agtacttcacttttt

SEQ ID NO: 1012467 - DNA, 15 bp, Homo sapiens
gtacttcactttttt

SEQ ID NO: 1012468 - DNA, 15 bp, Homo sapiens
tacttcacttttttt

SEQ ID NO: 1012469 - DNA, 15 bp, Homo sapiens
acttcactttttttt

SEQ ID NO: 1012470 - DNA, 15 bp, Homo sapiens
cttcactttttttta

SEQ ID NO: 1012471 - DNA, 15 bp, Homo sapiens
ttcacttttttttaa

SEQ ID NO: 1012472 - DNA, 15 bp, Homo sapiens
tcacttttttttaag

SEQ ID NO: 1012473 - DNA, 15 bp, Homo sapiens
cacttttttttaagt

SEQ ID NO: 1012474 - DNA, 15 bp, Homo sapiens
acttttttttaagtt

SEQ ID NO: 1012475 - DNA, 15 bp, Homo sapiens
cttttttttaagttg

SEQ ID NO: 1012476 - DNA, 15 bp, Homo sapiens
ttttttttaagttga

SEQ ID NO: 1012477 - DNA, 15 bp, Homo sapiens
tttttttaagttgaa

SEQ ID NO: 1012478 - DNA, 15 bp, Homo sapiens
ttttttaagttgaag

SEQ ID NO: 1012479 - DNA, 15 bp, Homo sapiens
tttttaagttgaaga

SEQ ID NO: 1012480 - DNA, 15 bp, Homo sapiens
ttttaagttgaagaa

SEQ ID NO: 1012481 - DNA, 15 bp, Homo sapiens
tttaagttgaagaaa

SEQ ID NO: 1012482 - DNA, 15 bp, Homo sapiens
ttaagttgaagaaat

SEQ ID NO: 1012483 - DNA, 15 bp, Homo sapiens
taagttgaagaaatt

SEQ ID NO: 1012484 - DNA, 15 bp, Homo sapiens
aagttgaagaaattt

SEQ ID NO: 1012485 - DNA, 15 bp, Homo sapiens
agttgaagaaatttt

SEQ ID NO: 1012486 - DNA, 15 bp, Homo sapiens
gttgaagaaattttc

SEQ ID NO: 1012487 - DNA, 15 bp, Homo sapiens
ttgaagaaattttca

SEQ ID NO: 1012488 - DNA, 15 bp, Homo sapiens
tgaagaaattttcag

SEQ ID NO: 1012489 - DNA, 15 bp, Homo sapiens
gaagaaattttcagt

SEQ ID NO: 1012490 - DNA, 15 bp, Homo sapiens
aagaaattttcagta

SEQ ID NO: 1012491 - DNA, 15 bp, Homo sapiens
agaaattttcagtac

SEQ ID NO: 1012492 - DNA, 15 bp, Homo sapiens
gaaattttcagtaca

SEQ ID NO: 1012493 - DNA, 15 bp, Homo sapiens
aaattttcagtacag

SEQ ID NO: 1012494 - DNA, 15 bp, Homo sapiens
aattttcagtacagg

SEQ ID NO: 1012495 - DNA, 15 bp, Homo sapiens
attttcagtacaggt

SEQ ID NO: 1012496 - DNA, 15 bp, Homo sapiens
ttttcagtacaggta

SEQ ID NO: 1012497 - DNA, 15 bp, Homo sapiens
tttcagtacaggtat

SEQ ID NO: 1012498 - DNA, 15 bp, Homo sapiens
ttcagtacaggtata

SEQ ID NO: 1012499 - DNA, 15 bp, Homo sapiens
tcagtacaggtataa

SEQ ID NO: 1012500 - DNA, 15 bp, Homo sapiens
cagtacaggtataag

SEQ ID NO: 1012501 - DNA, 15 bp, Homo sapiens
agtacaggtataagt

SEQ ID NO: 1012502 - DNA, 15 bp, Homo sapiens
gtacaggtataagtt

SEQ ID NO: 1012503 - DNA, 15 bp, Homo sapiens
tacaggtataagtta

SEQ ID NO: 1012504 - DNA, 15 bp, Homo sapiens
acaggtataagttaa

SEQ ID NO: 1012505 - DNA, 15 bp, Homo sapiens
caggtataagttaat

SEQ ID NO: 1012506 - DNA, 15 bp, Homo sapiens
aggtataagttaatt

SEQ ID NO: 1012507 - DNA, 15 bp, Homo sapiens
ggtataagttaattg

SEQ ID NO: 1012508 - DNA, 15 bp, Homo sapiens
gtataagttaattgg

SEQ ID NO: 1012509 - DNA, 15 bp, Homo sapiens
tataagttaattgga

SEQ ID NO: 1012510 - DNA, 15 bp, Homo sapiens
ataagttaattggag

SEQ ID NO: 1012511 - DNA, 15 bp, Homo sapiens
taagttaattggagg

SEQ ID NO: 1012512 - DNA, 15 bp, Homo sapiens
aagttaattggaggt

SEQ ID NO: 1012513 - DNA, 15 bp, Homo sapiens
agttaattggaggta

SEQ ID NO: 1012514 - DNA, 15 bp, Homo sapiens
gttaattggaggtaa

SEQ ID NO: 1012515 - DNA, 15 bp, Homo sapiens
ttaattggaggtaag

SEQ ID NO: 1012516 - DNA, 15 bp, Homo sapiens
taattggaggtaagc

SEQ ID NO: 1012517 - DNA, 15 bp, Homo sapiens
aattggaggtaagca

SEQ ID NO: 1012518 - DNA, 15 bp, Homo sapiens
attggaggtaagcat

SEQ ID NO: 1012519 - DNA, 15 bp, Homo sapiens
ttggaggtaagcata

SEQ ID NO: 1012520 - DNA, 15 bp, Homo sapiens
tggaggtaagcataa

SEQ ID NO: 1012521 - DNA, 15 bp, Homo sapiens
ggaggtaagcataaa

SEQ ID NO: 1012522 - DNA, 15 bp, Homo sapiens
gaggtaagcataaat

SEQ ID NO: 1012523 - DNA, 15 bp, Homo sapiens
aggtaagcataaata

SEQ ID NO: 1012524 - DNA, 15 bp, Homo sapiens
ggtaagcataaataa

SEQ ID NO: 1012525 - DNA, 15 bp, Homo sapiens
gtaagcataaataat

SEQ ID NO: 1012526 - DNA, 15 bp, Homo sapiens
taagcataaataata

SEQ ID NO: 1012527 - DNA, 15 bp, Homo sapiens
aagcataaataatag

SEQ ID NO: 1012528 - DNA, 15 bp, Homo sapiens
agcataaataatagc

SEQ ID NO: 1012529 - DNA, 15 bp, Homo sapiens
gcataaataatagct

SEQ ID NO: 1012530 - DNA, 15 bp, Homo sapiens
cataaataatagctg

SEQ ID NO: 1012531 - DNA, 15 bp, Homo sapiens
ataaataatagctgt

SEQ ID NO: 1012532 - DNA, 15 bp, Homo sapiens
taaataatagctgtt

SEQ ID NO: 1012533 - DNA, 15 bp, Homo sapiens
aaataatagctgttt

SEQ ID NO: 1012534 - DNA, 15 bp, Homo sapiens
aataatagctgttta

SEQ ID NO: 1012535 - DNA, 15 bp, Homo sapiens
ataatagctgtttaa

SEQ ID NO: 1012536 - DNA, 15 bp, Homo sapiens
taatagctgtttaaa

SEQ ID NO: 1012537 - DNA, 15 bp, Homo sapiens
aatagctgtttaaat

SEQ ID NO: 1012538 - DNA, 15 bp, Homo sapiens
atagctgtttaaatg

SEQ ID NO: 1012539 - DNA, 15 bp, Homo sapiens
tagctgtttaaatgt

SEQ ID NO: 1012540 - DNA, 15 bp, Homo sapiens
agctgtttaaatgtc

SEQ ID NO: 1012541 - DNA, 15 bp, Homo sapiens
gctgtttaaatgtca

SEQ ID NO: 1012542 - DNA, 15 bp, Homo sapiens
ctgtttaaatgtcat

SEQ ID NO: 1012543 - DNA, 15 bp, Homo sapiens
tgtttaaatgtcatt

SEQ ID NO: 1012544 - DNA, 15 bp, Homo sapiens
gtttaaatgtcattt

SEQ ID NO: 1012545 - DNA, 15 bp, Homo sapiens
tttaaatgtcattta

SEQ ID NO: 1012546 - DNA, 15 bp, Homo sapiens
ttaaatgtcatttaa

SEQ ID NO: 1012547 - DNA, 15 bp, Homo sapiens
taaatgtcatttaat

SEQ ID NO: 1012548 - DNA, 15 bp, Homo sapiens
aaatgtcatttaata

SEQ ID NO: 1012549 - DNA, 15 bp, Homo sapiens
aatgtcatttaataa

SEQ ID NO: 1012550 - DNA, 15 bp, Homo sapiens
atgtcatttaataag

SEQ ID NO: 1012551 - DNA, 15 bp, Homo sapiens
tgtcatttaataaga

SEQ ID NO: 1012552 - DNA, 15 bp, Homo sapiens
gtcatttaataagat

SEQ ID NO: 1012553 - DNA, 15 bp, Homo sapiens
tcatttaataagata

SEQ ID NO: 1012554 - DNA, 15 bp, Homo sapiens
catttaataagatat

SEQ ID NO: 1012555 - DNA, 15 bp, Homo sapiens
atttaataagatatt

SEQ ID NO: 1012556 - DNA, 15 bp, Homo sapiens
tttaataagatattt

SEQ ID NO: 1012557 - DNA, 15 bp, Homo sapiens
ttaataagatatttt

SEQ ID NO: 1012558 - DNA, 15 bp, Homo sapiens
taataagatattttt

SEQ ID NO: 1012559 - DNA, 15 bp, Homo sapiens
aataagatattttta

SEQ ID NO: 1012560 - DNA, 15 bp, Homo sapiens
ataagatatttttaa

SEQ ID NO: 1012561 - DNA, 15 bp, Homo sapiens
taagatatttttaaa

SEQ ID NO: 1012562 - DNA, 15 bp, Homo sapiens
aagatatttttaaaa

SEQ ID NO: 1012563 - DNA, 15 bp, Homo sapiens
agatatttttaaaaa

SEQ ID NO: 1012564 - DNA, 15 bp, Homo sapiens
gatatttttaaaaaa

SEQ ID NO: 1012565 - DNA, 15 bp, Homo sapiens
atatttttaaaaaat

SEQ ID NO: 1012566 - DNA, 15 bp, Homo sapiens
tatttttaaaaaatc

SEQ ID NO: 1012567 - DNA, 15 bp, Homo sapiens
atttttaaaaaatct

SEQ ID NO: 1012568 - DNA, 15 bp, Homo sapiens
tttttaaaaaatctt

SEQ ID NO: 1012569 - DNA, 15 bp, Homo sapiens
ttttaaaaaatcttt

SEQ ID NO: 1012570 - DNA, 15 bp, Homo sapiens
tttaaaaaatctttt

SEQ ID NO: 1012571 - DNA, 15 bp, Homo sapiens
ttaaaaaatctttta

SEQ ID NO: 1012572 - DNA, 15 bp, Homo sapiens
taaaaaatcttttaa

SEQ ID NO: 1012573 - DNA, 15 bp, Homo sapiens
aaaaaatcttttaaa

SEQ ID NO: 1012574 - DNA, 15 bp, Homo sapiens
aaaaatcttttaaaa

SEQ ID NO: 1012575 - DNA, 15 bp, Homo sapiens
aaaatcttttaaaac

SEQ ID NO: 1012576 - DNA, 15 bp, Homo sapiens
aaatcttttaaaact

SEQ ID NO: 1012577 - DNA, 15 bp, Homo sapiens
aatcttttaaaacta

SEQ ID NO: 1012578 - DNA, 15 bp, Homo sapiens
atcttttaaaactac

SEQ ID NO: 1012579 - DNA, 15 bp, Homo sapiens
tcttttaaaactact

SEQ ID NO: 1012580 - DNA, 15 bp, Homo sapiens
cttttaaaactactt

SEQ ID NO: 1012581 - DNA, 15 bp, Homo sapiens
ttttaaaactacttg

SEQ ID NO: 1012582 - DNA, 15 bp, Homo sapiens
tttaaaactacttga

SEQ ID NO: 1012583 - DNA, 15 bp, Homo sapiens
ttaaaactacttgaa

SEQ ID NO: 1012584 - DNA, 15 bp, Homo sapiens
taaaactacttgaaa

SEQ ID NO: 1012585 - DNA, 15 bp, Homo sapiens
aaaactacttgaaat

SEQ ID NO: 1012586 - DNA, 15 bp, Homo sapiens
aaactacttgaaata

SEQ ID NO: 1012587 - DNA, 15 bp, Homo sapiens
aactacttgaaataa

SEQ ID NO: 1012588 - DNA, 15 bp, Homo sapiens
actacttgaaataag

SEQ ID NO: 1012589 - DNA, 15 bp, Homo sapiens
ctacttgaaataagt

SEQ ID NO: 1012590 - DNA, 15 bp, Homo sapiens
tacttgaaataagtt

SEQ ID NO: 1012591 - DNA, 15 bp, Homo sapiens
acttgaaataagttg

SEQ ID NO: 1012592 - DNA, 15 bp, Homo sapiens
cttgaaataagttgt

SEQ ID NO: 1012593 - DNA, 15 bp, Homo sapiens
ttgaaataagttgtt

SEQ ID NO: 1012594 - DNA, 15 bp, Homo sapiens
tgaaataagttgttt

SEQ ID NO: 1012595 - DNA, 15 bp, Homo sapiens
gaaataagttgttta

SEQ ID NO: 1012596 - DNA, 15 bp, Homo sapiens
aaataagttgtttaa

SEQ ID NO: 1012597 - DNA, 15 bp, Homo sapiens
aataagttgtttaaa

SEQ ID NO: 1012598 - DNA, 15 bp, Homo sapiens
ataagttgtttaaaa

SEQ ID NO: 1012599 - DNA, 15 bp, Homo sapiens
taagttgtttaaaag

SEQ ID NO: 1012600 - DNA, 15 bp, Homo sapiens
aagttgtttaaaagt

SEQ ID NO: 1012601 - DNA, 15 bp, Homo sapiens
agttgtttaaaagtt

SEQ ID NO: 1012602 - DNA, 15 bp, Homo sapiens
gttgtttaaaagtta

SEQ ID NO: 1012603 - DNA, 15 bp, Homo sapiens
ttgtttaaaagttat

SEQ ID NO: 1012604 - DNA, 15 bp, Homo sapiens
tgtttaaaagttatt

SEQ ID NO: 1012605 - DNA, 15 bp, Homo sapiens
gtttaaaagttattt

SEQ ID NO: 1012606 - DNA, 15 bp, Homo sapiens
tttaaaagttattta

SEQ ID NO: 1012607 - DNA, 15 bp, Homo sapiens
ttaaaagttatttat

SEQ ID NO: 1012608 - DNA, 15 bp, Homo sapiens
taaaagttatttatt

SEQ ID NO: 1012609 - DNA, 15 bp, Homo sapiens
aaaagttatttattg

SEQ ID NO: 1012610 - DNA, 15 bp, Homo sapiens
aaagttatttattga

SEQ ID NO: 1012611 - DNA, 15 bp, Homo sapiens
aagttatttattgac

SEQ ID NO: 1012612 - DNA, 15 bp, Homo sapiens
agttatttattgacc

SEQ ID NO: 1012613 - DNA, 15 bp, Homo sapiens
gttatttattgacct

SEQ ID NO: 1012614 - DNA, 15 bp, Homo sapiens
ttatttattgacctg

SEQ ID NO: 1012615 - DNA, 15 bp, Homo sapiens
tatttattgacctgt

SEQ ID NO: 1012616 - DNA, 15 bp, Homo sapiens
atttattgacctgtt

SEQ ID NO: 1012617 - DNA, 15 bp, Homo sapiens
tttattgacctgttt

SEQ ID NO: 1012618 - DNA, 15 bp, Homo sapiens
ttattgacctgttta

SEQ ID NO: 1012619 - DNA, 15 bp, Homo sapiens
tattgacctgtttat

SEQ ID NO: 1012620 - DNA, 15 bp, Homo sapiens
attgacctgtttatt

SEQ ID NO: 1012621 - DNA, 15 bp, Homo sapiens
ttgacctgtttattc

SEQ ID NO: 1012622 - DNA, 15 bp, Homo sapiens
tgacctgtttattcc

SEQ ID NO: 1012623 - DNA, 15 bp, Homo sapiens
gacctgtttattcca

SEQ ID NO: 1012624 - DNA, 15 bp, Homo sapiens
acctgtttattccag

SEQ ID NO: 1012625 - DNA, 15 bp, Homo sapiens
cctgtttattccaga

SEQ ID NO: 1012626 - DNA, 15 bp, Homo sapiens
ctgtttattccagag

SEQ ID NO: 1012627 - DNA, 15 bp, Homo sapiens
tgtttattccagaga

SEQ ID NO: 1012628 - DNA, 15 bp, Homo sapiens
gtttattccagagat

SEQ ID NO: 1012629 - DNA, 15 bp, Homo sapiens
tttattccagagatc

SEQ ID NO: 1012630 - DNA, 15 bp, Homo sapiens
ttattccagagatct

SEQ ID NO: 1012631 - DNA, 15 bp, Homo sapiens
tattccagagatctg

SEQ ID NO: 1012632 - DNA, 15 bp, Homo sapiens
attccagagatctgg

SEQ ID NO: 1012633 - DNA, 15 bp, Homo sapiens
ttccagagatctggg

SEQ ID NO: 1012634 - DNA, 15 bp, Homo sapiens
tccagagatctggga

SEQ ID NO: 1012635 - DNA, 15 bp, Homo sapiens
ccagagatctgggaa

SEQ ID NO: 1012636 - DNA, 15 bp, Homo sapiens
cagagatctgggaaa

SEQ ID NO: 1012637 - DNA, 15 bp, Homo sapiens
agagatctgggaaat

SEQ ID NO: 1012638 - DNA, 15 bp, Homo sapiens
gagatctgggaaatc

SEQ ID NO: 1012639 - DNA, 15 bp, Homo sapiens
agatctgggaaatca

SEQ ID NO: 1012640 - DNA, 15 bp, Homo sapiens
gatctgggaaatcag

SEQ ID NO: 1012641 - DNA, 15 bp, Homo sapiens
atctgggaaatcaga

SEQ ID NO: 1012642 - DNA, 15 bp, Homo sapiens
tctgggaaatcagaa

SEQ ID NO: 1012643 - DNA, 15 bp, Homo sapiens
ctgggaaatcagaag

SEQ ID NO: 1012644 - DNA, 15 bp, Homo sapiens
tgggaaatcagaagt

SEQ ID NO: 1012645 - DNA, 15 bp, Homo sapiens
gggaaatcagaagtt

SEQ ID NO: 1012646 - DNA, 15 bp, Homo sapiens
ggaaatcagaagttt

SEQ ID NO: 1012647 - DNA, 15 bp, Homo sapiens
gaaatcagaagttta

SEQ ID NO: 1012648 - DNA, 15 bp, Homo sapiens
aaatcagaagtttat

SEQ ID NO: 1012649 - DNA, 15 bp, Homo sapiens
aatcagaagtttatt

SEQ ID NO: 1012650 - DNA, 15 bp, Homo sapiens
atcagaagtttattt

SEQ ID NO: 1012651 - DNA, 15 bp, Homo sapiens
tcagaagtttatttg

SEQ ID NO: 1012652 - DNA, 15 bp, Homo sapiens
cagaagtttatttga

SEQ ID NO: 1012653 - DNA, 15 bp, Homo sapiens
agaagtttatttgac

SEQ ID NO: 1012654 - DNA, 15 bp, Homo sapiens
gaagtttatttgact

SEQ ID NO: 1012655 - DNA, 15 bp, Homo sapiens
aagtttatttgactt

SEQ ID NO: 1012656 - DNA, 15 bp, Homo sapiens
agtttatttgacttt

SEQ ID NO: 1012657 - DNA, 15 bp, Homo sapiens
gtttatttgactttt

SEQ ID NO: 1012658 - DNA, 15 bp, Homo sapiens
ttatttgactttttt

SEQ ID NO: 1012659 - DNA, 15 bp, Homo sapiens
tatttgacttttttg

SEQ ID NO: 1012660 - DNA, 15 bp, Homo sapiens
atttgacttttttgc

SEQ ID NO: 1012661 - DNA, 15 bp, Homo sapiens
tttgacttttttgct

SEQ ID NO: 1012662 - DNA, 15 bp, Homo sapiens
ttgacttttttgctt

SEQ ID NO: 1012663 - DNA, 15 bp, Homo sapiens
tgacttttttgcttt

SEQ ID NO: 1012664 - DNA, 15 bp, Homo sapiens
gacttttttgcttta

SEQ ID NO: 1012665 - DNA, 15 bp, Homo sapiens
acttttttgctttaa

SEQ ID NO: 1012666 - DNA, 15 bp, Homo sapiens
cttttttgctttaag

SEQ ID NO: 1012667 - DNA, 15 bp, Homo sapiens
ttttttgctttaagt

SEQ ID NO: 1012668 - DNA, 15 bp, Homo sapiens
tttttgctttaagtt

SEQ ID NO: 1012669 - DNA, 15 bp, Homo sapiens
ttttgctttaagttt

SEQ ID NO: 1012670 - DNA, 15 bp, Homo sapiens
tttgctttaagttta

SEQ ID NO: 1012671 - DNA, 15 bp, Homo sapiens
ttgctttaagtttac

SEQ ID NO: 1012672 - DNA, 15 bp, Homo sapiens
tgctttaagtttact

SEQ ID NO: 1012673 - DNA, 15 bp, Homo sapiens
gctttaagtttacta

SEQ ID NO: 1012674 - DNA, 15 bp, Homo sapiens
ctttaagtttactac

SEQ ID NO: 1012675 - DNA, 15 bp, Homo sapiens
tttaagtttactacc

SEQ ID NO: 1012676 - DNA, 15 bp, Homo sapiens
ttaagtttactacct

SEQ ID NO: 1012677 - DNA, 15 bp, Homo sapiens
taagtttactacctt

SEQ ID NO: 1012678 - DNA, 15 bp, Homo sapiens
aagtttactaccttt

SEQ ID NO: 1012679 - DNA, 15 bp, Homo sapiens
agtttactacctttt

SEQ ID NO: 1012680 - DNA, 15 bp, Homo sapiens
gtttactaccttttc

SEQ ID NO: 1012681 - DNA, 15 bp, Homo sapiens
tttactaccttttct

SEQ ID NO: 1012682 - DNA, 15 bp, Homo sapiens
ttactaccttttctg

SEQ ID NO: 1012683 - DNA, 15 bp, Homo sapiens
tactaccttttctgg

SEQ ID NO: 1012684 - DNA, 15 bp, Homo sapiens
actaccttttctggt

SEQ ID NO: 1012685 - DNA, 15 bp, Homo sapiens
ctaccttttctggta

SEQ ID NO: 1012686 - DNA, 15 bp, Homo sapiens
taccttttctggtag

SEQ ID NO: 1012687 - DNA, 15 bp, Homo sapiens
accttttctggtaga

SEQ ID NO: 1012688 - DNA, 15 bp, Homo sapiens
ccttttctggtagaa

SEQ ID NO: 1012689 - DNA, 15 bp, Homo sapiens
cttttctggtagaaa

SEQ ID NO: 1012690 - DNA, 15 bp, Homo sapiens
ttttctggtagaaag

SEQ ID NO: 1012691 - DNA, 15 bp, Homo sapiens
tttctggtagaaagt

SEQ ID NO: 1012692 - DNA, 15 bp, Homo sapiens
ttctggtagaaagtt

SEQ ID NO: 1012693 - DNA, 15 bp, Homo sapiens
tctggtagaaagtta

SEQ ID NO: 1012694 - DNA, 15 bp, Homo sapiens
ctggtagaaagttaa

SEQ ID NO: 1012695 - DNA, 15 bp, Homo sapiens
tggtagaaagttaat

SEQ ID NO: 1012696 - DNA, 15 bp, Homo sapiens
ggtagaaagttaatg

SEQ ID NO: 1012697 - DNA, 15 bp, Homo sapiens
gtagaaagttaatga

SEQ ID NO: 1012698 - DNA, 15 bp, Homo sapiens
tagaaagttaatgac

SEQ ID NO: 1012699 - DNA, 15 bp, Homo sapiens
agaaagttaatgacc

SEQ ID NO: 1012700 - DNA, 15 bp, Homo sapiens
gaaagttaatgacct

SEQ ID NO: 1012701 - DNA, 15 bp, Homo sapiens
aaagttaatgacctc

SEQ ID NO: 1012702 - DNA, 15 bp, Homo sapiens
aagttaatgacctcc

SEQ ID NO: 1012703 - DNA, 15 bp, Homo sapiens
agttaatgacctcca

SEQ ID NO: 1012704 - DNA, 15 bp, Homo sapiens
gttaatgacctccaa

SEQ ID NO: 1012705 - DNA, 15 bp, Homo sapiens
ttaatgacctccaat

SEQ ID NO: 1012706 - DNA, 15 bp, Homo sapiens
taatgacctccaata

SEQ ID NO: 1012707 - DNA, 15 bp, Homo sapiens
aatgacctccaataa

SEQ ID NO: 1012708 - DNA, 15 bp, Homo sapiens
atgacctccaataat

SEQ ID NO: 1012709 - DNA, 15 bp, Homo sapiens
tgacctccaataata

SEQ ID NO: 1012710 - DNA, 15 bp, Homo sapiens
gacctccaataatag

SEQ ID NO: 1012711 - DNA, 15 bp, Homo sapiens
acctccaataatagg

SEQ ID NO: 1012712 - DNA, 15 bp, Homo sapiens
cctccaataatagga

SEQ ID NO: 1012713 - DNA, 15 bp, Homo sapiens
ctccaataataggac

SEQ ID NO: 1012714 - DNA, 15 bp, Homo sapiens
tccaataataggact

SEQ ID NO: 1012715 - DNA, 15 bp, Homo sapiens
ccaataataggactt

SEQ ID NO: 1012716 - DNA, 15 bp, Homo sapiens
caataataggacttg

SEQ ID NO: 1012717 - DNA, 15 bp, Homo sapiens
aataataggacttgt

SEQ ID NO: 1012718 - DNA, 15 bp, Homo sapiens
ataataggacttgtt

SEQ ID NO: 1012719 - DNA, 15 bp, Homo sapiens
taataggacttgttg

SEQ ID NO: 1012720 - DNA, 15 bp, Homo sapiens
aataggacttgttgg

SEQ ID NO: 1012721 - DNA, 15 bp, Homo sapiens
ataggacttgttggg

SEQ ID NO: 1012722 - DNA, 15 bp, Homo sapiens
taggacttgttgggg

SEQ ID NO: 1012723 - DNA, 15 bp, Homo sapiens
aggacttgttggggg

SEQ ID NO: 1012724 - DNA, 15 bp, Homo sapiens
ggacttgttgggggg

SEQ ID NO: 1012725 - DNA, 15 bp, Homo sapiens
gacttgttggggggt

SEQ ID NO: 1012726 - DNA, 15 bp, Homo sapiens
acttgttggggggtt

SEQ ID NO: 1012727 - DNA, 15 bp, Homo sapiens
cttgttggggggtta

SEQ ID NO: 1012728 - DNA, 15 bp, Homo sapiens
ttgttggggggttaa

SEQ ID NO: 1012729 - DNA, 15 bp, Homo sapiens
tgttggggggttaat

SEQ ID NO: 1012730 - DNA, 15 bp, Homo sapiens
gttggggggttaata

SEQ ID NO: 1012731 - DNA, 15 bp, Homo sapiens
ttggggggttaatat

SEQ ID NO: 1012732 - DNA, 15 bp, Homo sapiens
tggggggttaatatt

SEQ ID NO: 1012733 - DNA, 15 bp, Homo sapiens
ggggggttaatattc

SEQ ID NO: 1012734 - DNA, 15 bp, Homo sapiens
gggggttaatattca

SEQ ID NO: 1012735 - DNA, 15 bp, Homo sapiens
ggggttaatattcac

SEQ ID NO: 1012736 - DNA, 15 bp, Homo sapiens
gggttaatattcact

SEQ ID NO: 1012737 - DNA, 15 bp, Homo sapiens
ggttaatattcactt

SEQ ID NO: 1012738 - DNA, 15 bp, Homo sapiens
gttaatattcacttc

SEQ ID NO: 1012739 - DNA, 15 bp, Homo sapiens
ttaatattcacttcc

SEQ ID NO: 1012740 - DNA, 15 bp, Homo sapiens
taatattcacttcct

SEQ ID NO: 1012741 - DNA, 15 bp, Homo sapiens
aatattcacttccta

SEQ ID NO: 1012742 - DNA, 15 bp, Homo sapiens
atattcacttcctat

SEQ ID NO: 1012743 - DNA, 15 bp, Homo sapiens
tattcacttcctatt

SEQ ID NO: 1012744 - DNA, 15 bp, Homo sapiens
attcacttcctattt

SEQ ID NO: 1012745 - DNA, 15 bp, Homo sapiens
ttcacttcctattta

SEQ ID NO: 1012746 - DNA, 15 bp, Homo sapiens
tcacttcctatttaa

SEQ ID NO: 1012747 - DNA, 15 bp, Homo sapiens
cacttcctatttaac

SEQ ID NO: 1012748 - DNA, 15 bp, Homo sapiens
acttcctatttaact

SEQ ID NO: 1012749 - DNA, 15 bp, Homo sapiens
cttcctatttaactt

SEQ ID NO: 1012750 - DNA, 15 bp, Homo sapiens
ttcctatttaacttc

SEQ ID NO: 1012751 - DNA, 15 bp, Homo sapiens
tcctatttaacttca

SEQ ID NO: 1012752 - DNA, 15 bp, Homo sapiens
cctatttaacttcaa

SEQ ID NO: 1012753 - DNA, 15 bp, Homo sapiens
ctatttaacttcaat

SEQ ID NO: 1012754 - DNA, 15 bp, Homo sapiens
tatttaacttcaata

SEQ ID NO: 1012755 - DNA, 15 bp, Homo sapiens
atttaacttcaatat

SEQ ID NO: 1012756 - DNA, 15 bp, Homo sapiens
tttaacttcaatatc

SEQ ID NO: 1012757 - DNA, 15 bp, Homo sapiens
ttaacttcaatatcc

SEQ ID NO: 1012758 - DNA, 15 bp, Homo sapiens
taacttcaatatcca

SEQ ID NO: 1012759 - DNA, 15 bp, Homo sapiens
aacttcaatatccac

SEQ ID NO: 1012760 - DNA, 15 bp, Homo sapiens
acttcaatatccact

SEQ ID NO: 1012761 - DNA, 15 bp, Homo sapiens
cttcaatatccactt

SEQ ID NO: 1012762 - DNA, 15 bp, Homo sapiens
ttcaatatccacttt

SEQ ID NO: 1012763 - DNA, 15 bp, Homo sapiens
tcaatatccacttta

SEQ ID NO: 1012764 - DNA, 15 bp, Homo sapiens
caatatccactttac

SEQ ID NO: 1012765 - DNA, 15 bp, Homo sapiens
aatatccactttacc

SEQ ID NO: 1012766 - DNA, 15 bp, Homo sapiens
atatccactttacca

SEQ ID NO: 1012767 - DNA, 15 bp, Homo sapiens
tatccactttaccag

SEQ ID NO: 1012768 - DNA, 15 bp, Homo sapiens
atccactttaccagc

SEQ ID NO: 1012769 - DNA, 15 bp, Homo sapiens
tccactttaccagct

SEQ ID NO: 1012770 - DNA, 15 bp, Homo sapiens
ccactttaccagctg

SEQ ID NO: 1012771 - DNA, 15 bp, Homo sapiens
cactttaccagctgc

SEQ ID NO: 1012772 - DNA, 15 bp, Homo sapiens
actttaccagctgcc

SEQ ID NO: 1012773 - DNA, 15 bp, Homo sapiens
ctttaccagctgccc

SEQ ID NO: 1012774 - DNA, 15 bp, Homo sapiens
tttaccagctgccca

SEQ ID NO: 1012775 - DNA, 15 bp, Homo sapiens
ttaccagctgcccat

SEQ ID NO: 1012776 - DNA, 15 bp, Homo sapiens
taccagctgcccata

SEQ ID NO: 1012777 - DNA, 15 bp, Homo sapiens
accagctgcccataa

SEQ ID NO: 1012778 - DNA, 15 bp, Homo sapiens
ccagctgcccataat

SEQ ID NO: 1012779 - DNA, 15 bp, Homo sapiens
cagctgcccataatt

SEQ ID NO: 1012780 - DNA, 15 bp, Homo sapiens
agctgcccataattt

SEQ ID NO: 1012781 - DNA, 15 bp, Homo sapiens
gctgcccataatttt

SEQ ID NO: 1012782 - DNA, 15 bp, Homo sapiens
ctgcccataattttc

SEQ ID NO: 1012783 - DNA, 15 bp, Homo sapiens
tgcccataattttct

SEQ ID NO: 1012784 - DNA, 15 bp, Homo sapiens
gcccataattttctg

SEQ ID NO: 1012785 - DNA, 15 bp, Homo sapiens
cccataattttctgt

SEQ ID NO: 1012786 - DNA, 15 bp, Homo sapiens
ccataattttctgtg

SEQ ID NO: 1012787 - DNA, 15 bp, Homo sapiens
cataattttctgtga

SEQ ID NO: 1012788 - DNA, 15 bp, Homo sapiens
ataattttctgtgaa

SEQ ID NO: 1012789 - DNA, 15 bp, Homo sapiens
taattttctgtgaat

SEQ ID NO: 1012790 - DNA, 15 bp, Homo sapiens
aattttctgtgaata

SEQ ID NO: 1012791 - DNA, 15 bp, Homo sapiens
attttctgtgaataa

SEQ ID NO: 1012792 - DNA, 15 bp, Homo sapiens
ttttctgtgaataag

SEQ ID NO: 1012793 - DNA, 15 bp, Homo sapiens
tttctgtgaataagg

SEQ ID NO: 1012794 - DNA, 15 bp, Homo sapiens
ttctgtgaataagga

SEQ ID NO: 1012795 - DNA, 15 bp, Homo sapiens
tctgtgaataaggac

SEQ ID NO: 1012796 - DNA, 15 bp, Homo sapiens
ctgtgaataaggact

SEQ ID NO: 1012797 - DNA, 15 bp, Homo sapiens
tgtgaataaggacta

SEQ ID NO: 1012798 - DNA, 15 bp, Homo sapiens
gtgaataaggactaa

SEQ ID NO: 1012799 - DNA, 15 bp, Homo sapiens
tgaataaggactaaa

SEQ ID NO: 1012800 - DNA, 15 bp, Homo sapiens
gaataaggactaaaa

SEQ ID NO: 1012801 - DNA, 15 bp, Homo sapiens
aataaggactaaaaa

SEQ ID NO: 1012802 - DNA, 15 bp, Homo sapiens
ataaggactaaaaat

SEQ ID NO: 1012803 - DNA, 15 bp, Homo sapiens
taaggactaaaaatg

SEQ ID NO: 1012804 - DNA, 15 bp, Homo sapiens
aaggactaaaaatga

SEQ ID NO: 1012805 - DNA, 15 bp, Homo sapiens
aggactaaaaatgaa

SEQ ID NO: 1012806 - DNA, 15 bp, Homo sapiens
ggactaaaaatgaaa

SEQ ID NO: 1012807 - DNA, 15 bp, Homo sapiens
gactaaaaatgaaac

SEQ ID NO: 1012808 - DNA, 15 bp, Homo sapiens
actaaaaatgaaact

SEQ ID NO: 1012809 - DNA, 15 bp, Homo sapiens
ctaaaaatgaaacta

SEQ ID NO: 1012810 - DNA, 15 bp, Homo sapiens
taaaaatgaaactaa

SEQ ID NO: 1012811 - DNA, 15 bp, Homo sapiens
aaaaatgaaactaaa

SEQ ID NO: 1012812 - DNA, 15 bp, Homo sapiens
aaaatgaaactaaat

SEQ ID NO: 1012813 - DNA, 15 bp, Homo sapiens
aaatgaaactaaatg

SEQ ID NO: 1012814 - DNA, 15 bp, Homo sapiens
aatgaaactaaatga

SEQ ID NO: 1012815 - DNA, 15 bp, Homo sapiens
atgaaactaaatgat

SEQ ID NO: 1012816 - DNA, 15 bp, Homo sapiens
tgaaactaaatgatt

SEQ ID NO: 1012817 - DNA, 15 bp, Homo sapiens
gaaactaaatgatta

SEQ ID NO: 1012818 - DNA, 15 bp, Homo sapiens
aaactaaatgattat

SEQ ID NO: 1012819 - DNA, 15 bp, Homo sapiens
aactaaatgattatt

SEQ ID NO: 1012820 - DNA, 15 bp, Homo sapiens
actaaatgattattt

SEQ ID NO: 1012821 - DNA, 15 bp, Homo sapiens
ctaaatgattatttt

SEQ ID NO: 1012822 - DNA, 15 bp, Homo sapiens
taaatgattattttg

SEQ ID NO: 1012823 - DNA, 15 bp, Homo sapiens
aaatgattattttga

SEQ ID NO: 1012824 - DNA, 15 bp, Homo sapiens
aatgattattttgaa

SEQ ID NO: 1012825 - DNA, 15 bp, Homo sapiens
atgattattttgaac

SEQ ID NO: 1012826 - DNA, 15 bp, Homo sapiens
tgattattttgaaca

SEQ ID NO: 1012827 - DNA, 15 bp, Homo sapiens
gattattttgaacag

SEQ ID NO: 1012828 - DNA, 15 bp, Homo sapiens
attattttgaacaga

SEQ ID NO: 1012829 - DNA, 15 bp, Homo sapiens
ttattttgaacagag

SEQ ID NO: 1012830 - DNA, 15 bp, Homo sapiens
tattttgaacagagg

SEQ ID NO: 1012831 - DNA, 15 bp, Homo sapiens
attttgaacagaggt

SEQ ID NO: 1012832 - DNA, 15 bp, Homo sapiens
ttttgaacagaggta

SEQ ID NO: 1012833 - DNA, 15 bp, Homo sapiens
tttgaacagaggtaa

SEQ ID NO: 1012834 - DNA, 15 bp, Homo sapiens
ttgaacagaggtaaa

SEQ ID NO: 1012835 - DNA, 15 bp, Homo sapiens
tgaacagaggtaaaa

SEQ ID NO: 1012836 - DNA, 15 bp, Homo sapiens
gaacagaggtaaaat

SEQ ID NO: 1012837 - DNA, 15 bp, Homo sapiens
aacagaggtaaaatt

SEQ ID NO: 1012838 - DNA, 15 bp, Homo sapiens
acagaggtaaaattt

SEQ ID NO: 1012839 - DNA, 15 bp, Homo sapiens
cagaggtaaaatttg

SEQ ID NO: 1012840 - DNA, 15 bp, Homo sapiens
agaggtaaaatttga

SEQ ID NO: 1012841 - DNA, 15 bp, Homo sapiens
gaggtaaaatttgat

SEQ ID NO: 1012842 - DNA, 15 bp, Homo sapiens
aggtaaaatttgatt

SEQ ID NO: 1012843 - DNA, 15 bp, Homo sapiens
ggtaaaatttgattg

SEQ ID NO: 1012844 - DNA, 15 bp, Homo sapiens
gtaaaatttgattgg

SEQ ID NO: 1012845 - DNA, 15 bp, Homo sapiens
taaaatttgattggt

SEQ ID NO: 1012846 - DNA, 15 bp, Homo sapiens
aaaatttgattggta

SEQ ID NO: 1012847 - DNA, 15 bp, Homo sapiens
aaatttgattggtag

SEQ ID NO: 1012848 - DNA, 15 bp, Homo sapiens
aatttgattggtagt

SEQ ID NO: 1012849 - DNA, 15 bp, Homo sapiens
atttgattggtagtc

SEQ ID NO: 1012850 - DNA, 15 bp, Homo sapiens
tttgattggtagtct

SEQ ID NO: 1012851 - DNA, 15 bp, Homo sapiens
ttgattggtagtcta

SEQ ID NO: 1012852 - DNA, 15 bp, Homo sapiens
tgattggtagtctaa

SEQ ID NO: 1012853 - DNA, 15 bp, Homo sapiens
gattggtagtctaaa

SEQ ID NO: 1012854 - DNA, 15 bp, Homo sapiens
attggtagtctaaat

SEQ ID NO: 1012855 - DNA, 15 bp, Homo sapiens
ttggtagtctaaata

SEQ ID NO: 1012856 - DNA, 15 bp, Homo sapiens
tggtagtctaaatat

SEQ ID NO: 1012857 - DNA, 15 bp, Homo sapiens
ggtagtctaaatatg

SEQ ID NO: 1012858 - DNA, 15 bp, Homo sapiens
gtagtctaaatatgt

SEQ ID NO: 1012859 - DNA, 15 bp, Homo sapiens
tagtctaaatatgtt

SEQ ID NO: 1012860 - DNA, 15 bp, Homo sapiens
agtctaaatatgttc

SEQ ID NO: 1012861 - DNA, 15 bp, Homo sapiens
gtctaaatatgttct

SEQ ID NO: 1012862 - DNA, 15 bp, Homo sapiens
tctaaatatgttctc

SEQ ID NO: 1012863 - DNA, 15 bp, Homo sapiens
ctaaatatgttctct

SEQ ID NO: 1012864 - DNA, 15 bp, Homo sapiens
taaatatgttctcta

SEQ ID NO: 1012865 - DNA, 15 bp, Homo sapiens
aaatatgttctctac

SEQ ID NO: 1012866 - DNA, 15 bp, Homo sapiens
aatatgttctctaca

SEQ ID NO: 1012867 - DNA, 15 bp, Homo sapiens
atatgttctctacac

SEQ ID NO: 1012868 - DNA, 15 bp, Homo sapiens
tatgttctctacact

SEQ ID NO: 1012869 - DNA, 15 bp, Homo sapiens
atgttctctacactt

SEQ ID NO: 1012870 - DNA, 15 bp, Homo sapiens
tgttctctacactta

SEQ ID NO: 1012871 - DNA, 15 bp, Homo sapiens
gttctctacacttag

SEQ ID NO: 1012872 - DNA, 15 bp, Homo sapiens
ttctctacacttaga

SEQ ID NO: 1012873 - DNA, 15 bp, Homo sapiens
tctctacacttagaa

SEQ ID NO: 1012874 - DNA, 15 bp, Homo sapiens
ctctacacttagaag

SEQ ID NO: 1012875 - DNA, 15 bp, Homo sapiens
tctacacttagaagt

SEQ ID NO: 1012876 - DNA, 15 bp, Homo sapiens
ctacacttagaagtt

SEQ ID NO: 1012877 - DNA, 15 bp, Homo sapiens
tacacttagaagtta

SEQ ID NO: 1012878 - DNA, 15 bp, Homo sapiens
acacttagaagttat

SEQ ID NO: 1012879 - DNA, 15 bp, Homo sapiens
cacttagaagttatt

SEQ ID NO: 1012880 - DNA, 15 bp, Homo sapiens
acttagaagttattt

SEQ ID NO: 1012881 - DNA, 15 bp, Homo sapiens
cttagaagttatttt

SEQ ID NO: 1012882 - DNA, 15 bp, Homo sapiens
ttagaagttatttta

SEQ ID NO: 1012883 - DNA, 15 bp, Homo sapiens
tagaagttattttac

SEQ ID NO: 1012884 - DNA, 15 bp, Homo sapiens
agaagttattttact

SEQ ID NO: 1012885 - DNA, 15 bp, Homo sapiens
gaagttattttactt

SEQ ID NO: 1012886 - DNA, 15 bp, Homo sapiens
aagttattttacttc

SEQ ID NO: 1012887 - DNA, 15 bp, Homo sapiens
agttattttacttct

SEQ ID NO: 1012888 - DNA, 15 bp, Homo sapiens
gttattttacttctt

SEQ ID NO: 1012889 - DNA, 15 bp, Homo sapiens
ttattttacttctta

SEQ ID NO: 1012890 - DNA, 15 bp, Homo sapiens
tattttacttcttag

SEQ ID NO: 1012891 - DNA, 15 bp, Homo sapiens
attttacttcttagc

SEQ ID NO: 1012892 - DNA, 15 bp, Homo sapiens
ttttacttcttagcc

SEQ ID NO: 1012893 - DNA, 15 bp, Homo sapiens
tttacttcttagccc

SEQ ID NO: 1012894 - DNA, 15 bp, Homo sapiens
ttacttcttagccct

SEQ ID NO: 1012895 - DNA, 15 bp, Homo sapiens
tacttcttagcccta

SEQ ID NO: 1012896 - DNA, 15 bp, Homo sapiens
acttcttagccctag

SEQ ID NO: 1012897 - DNA, 15 bp, Homo sapiens
cttcttagccctagt

SEQ ID NO: 1012898 - DNA, 15 bp, Homo sapiens
ttcttagccctagtt

SEQ ID NO: 1012899 - DNA, 15 bp, Homo sapiens
tcttagccctagtta

SEQ ID NO: 1012900 - DNA, 15 bp, Homo sapiens
cttagccctagttat

SEQ ID NO: 1012901 - DNA, 15 bp, Homo sapiens
ttagccctagttata

SEQ ID NO: 1012902 - DNA, 15 bp, Homo sapiens
tagccctagttataa

SEQ ID NO: 1012903 - DNA, 15 bp, Homo sapiens
agccctagttataag

SEQ ID NO: 1012904 - DNA, 15 bp, Homo sapiens
gccctagttataagc

SEQ ID NO: 1012905 - DNA, 15 bp, Homo sapiens
ccctagttataagct

SEQ ID NO: 1012906 - DNA, 15 bp, Homo sapiens
cctagttataagctg

SEQ ID NO: 1012907 - DNA, 15 bp, Homo sapiens
ctagttataagctga

SEQ ID NO: 1012908 - DNA, 15 bp, Homo sapiens
tagttataagctgat

SEQ ID NO: 1012909 - DNA, 15 bp, Homo sapiens
agttataagctgatt

SEQ ID NO: 1012910 - DNA, 15 bp, Homo sapiens
gttataagctgattc

SEQ ID NO: 1012911 - DNA, 15 bp, Homo sapiens
ttataagctgattct

SEQ ID NO: 1012912 - DNA, 15 bp, Homo sapiens
tataagctgattctc

SEQ ID NO: 1012913 - DNA, 15 bp, Homo sapiens
ataagctgattctca

SEQ ID NO: 1012914 - DNA, 15 bp, Homo sapiens
taagctgattctcag

SEQ ID NO: 1012915 - DNA, 15 bp, Homo sapiens
aagctgattctcaga

SEQ ID NO: 1012916 - DNA, 15 bp, Homo sapiens
agctgattctcagag

SEQ ID NO: 1012917 - DNA, 15 bp, Homo sapiens
gctgattctcagagc

SEQ ID NO: 1012918 - DNA, 15 bp, Homo sapiens
ctgattctcagagct

SEQ ID NO: 1012919 - DNA, 15 bp, Homo sapiens
tgattctcagagcta

SEQ ID NO: 1012920 - DNA, 15 bp, Homo sapiens
gattctcagagctac

SEQ ID NO: 1012921 - DNA, 15 bp, Homo sapiens
attctcagagctaca

SEQ ID NO: 1012922 - DNA, 15 bp, Homo sapiens
ttctcagagctacat

SEQ ID NO: 1012923 - DNA, 15 bp, Homo sapiens
tctcagagctacata

SEQ ID NO: 1012924 - DNA, 15 bp, Homo sapiens
ctcagagctacatat

SEQ ID NO: 1012925 - DNA, 15 bp, Homo sapiens
tcagagctacatatt

SEQ ID NO: 1012926 - DNA, 15 bp, Homo sapiens
cagagctacatatta

SEQ ID NO: 1012927 - DNA, 15 bp, Homo sapiens
agagctacatattat

SEQ ID NO: 1012928 - DNA, 15 bp, Homo sapiens
gagctacatattatt

SEQ ID NO: 1012929 - DNA, 15 bp, Homo sapiens
agctacatattattt

SEQ ID NO: 1012930 - DNA, 15 bp, Homo sapiens
gctacatattatttt

SEQ ID NO: 1012931 - DNA, 15 bp, Homo sapiens
ctacatattatttta

SEQ ID NO: 1012932 - DNA, 15 bp, Homo sapiens
tacatattattttac

SEQ ID NO: 1012933 - DNA, 15 bp, Homo sapiens
acatattattttacc

SEQ ID NO: 1012934 - DNA, 15 bp, Homo sapiens
catattattttaccg

SEQ ID NO: 1012935 - DNA, 15 bp, Homo sapiens
atattattttaccga

SEQ ID NO: 1012936 - DNA, 15 bp, Homo sapiens
tattattttaccgaa

SEQ ID NO: 1012937 - DNA, 15 bp, Homo sapiens
attattttaccgaaa

SEQ ID NO: 1012938 - DNA, 15 bp, Homo sapiens
ttattttaccgaaaa

SEQ ID NO: 1012939 - DNA, 15 bp, Homo sapiens
tattttaccgaaaag

SEQ ID NO: 1012940 - DNA, 15 bp, Homo sapiens
attttaccgaaaagc

SEQ ID NO: 1012941 - DNA, 15 bp, Homo sapiens
ttttaccgaaaagcc

SEQ ID NO: 1012942 - DNA, 15 bp, Homo sapiens
tttaccgaaaagcca

SEQ ID NO: 1012943 - DNA, 15 bp, Homo sapiens
ttaccgaaaagccat

SEQ ID NO: 1012944 - DNA, 15 bp, Homo sapiens
taccgaaaagccata

SEQ ID NO: 1012945 - DNA, 15 bp, Homo sapiens
accgaaaagccataa

SEQ ID NO: 1012946 - DNA, 15 bp, Homo sapiens
ccgaaaagccataac

SEQ ID NO: 1012947 - DNA, 15 bp, Homo sapiens
cgaaaagccataact

SEQ ID NO: 1012948 - DNA, 15 bp, Homo sapiens
gaaaagccataacta

SEQ ID NO: 1012949 - DNA, 15 bp, Homo sapiens
aaaagccataactag

SEQ ID NO: 1012950 - DNA, 15 bp, Homo sapiens
aaagccataactaga

SEQ ID NO: 1012951 - DNA, 15 bp, Homo sapiens
aagccataactagag

SEQ ID NO: 1012952 - DNA, 15 bp, Homo sapiens
agccataactagaga

SEQ ID NO: 1012953 - DNA, 15 bp, Homo sapiens
gccataactagagag

SEQ ID NO: 1012954 - DNA, 15 bp, Homo sapiens
ccataactagagagg

SEQ ID NO: 1012955 - DNA, 15 bp, Homo sapiens
cataactagagagga

SEQ ID NO: 1012956 - DNA, 15 bp, Homo sapiens
ataactagagaggat

SEQ ID NO: 1012957 - DNA, 15 bp, Homo sapiens
taactagagaggatt

SEQ ID NO: 1012958 - DNA, 15 bp, Homo sapiens
aactagagaggattt

SEQ ID NO: 1012959 - DNA, 15 bp, Homo sapiens
actagagaggatttc

SEQ ID NO: 1012960 - DNA, 15 bp, Homo sapiens
ctagagaggatttcc

SEQ ID NO: 1012961 - DNA, 15 bp, Homo sapiens
tagagaggatttcct

SEQ ID NO: 1012962 - DNA, 15 bp, Homo sapiens
agagaggatttcctc

SEQ ID NO: 1012963 - DNA, 15 bp, Homo sapiens
gagaggatttcctct

SEQ ID NO: 1012964 - DNA, 15 bp, Homo sapiens
agaggatttcctctt

SEQ ID NO: 1012965 - DNA, 15 bp, Homo sapiens
gaggatttcctcttt

SEQ ID NO: 1012966 - DNA, 15 bp, Homo sapiens
aggatttcctctttt

SEQ ID NO: 1012967 - DNA, 15 bp, Homo sapiens
ggatttcctcttttg

SEQ ID NO: 1012968 - DNA, 15 bp, Homo sapiens
gatttcctcttttgg

SEQ ID NO: 1012969 - DNA, 15 bp, Homo sapiens
atttcctcttttggc

SEQ ID NO: 1012970 - DNA, 15 bp, Homo sapiens
tttcctcttttggct

SEQ ID NO: 1012971 - DNA, 15 bp, Homo sapiens
ttcctcttttggctc

SEQ ID NO: 1012972 - DNA, 15 bp, Homo sapiens
tcctcttttggctca

SEQ ID NO: 1012973 - DNA, 15 bp, Homo sapiens
cctcttttggctcaa

SEQ ID NO: 1012974 - DNA, 15 bp, Homo sapiens
ctcttttggctcaag

SEQ ID NO: 1012975 - DNA, 15 bp, Homo sapiens
tcttttggctcaagg

SEQ ID NO: 1012976 - DNA, 15 bp, Homo sapiens
cttttggctcaagga

SEQ ID NO: 1012977 - DNA, 15 bp, Homo sapiens
ttttggctcaaggac

SEQ ID NO: 1012978 - DNA, 15 bp, Homo sapiens
tttggctcaaggaca

SEQ ID NO: 1012979 - DNA, 15 bp, Homo sapiens
ttggctcaaggacac

SEQ ID NO: 1012980 - DNA, 15 bp, Homo sapiens
tggctcaaggacacc

SEQ ID NO: 1012981 - DNA, 15 bp, Homo sapiens
ggctcaaggacacct

SEQ ID NO: 1012982 - DNA, 15 bp, Homo sapiens
gctcaaggacacctg

SEQ ID NO: 1012983 - DNA, 15 bp, Homo sapiens
ctcaaggacacctgt

SEQ ID NO: 1012984 - DNA, 15 bp, Homo sapiens
tcaaggacacctgta

SEQ ID NO: 1012985 - DNA, 15 bp, Homo sapiens
caaggacacctgtaa

SEQ ID NO: 1012986 - DNA, 15 bp, Homo sapiens
aaggacacctgtaat

SEQ ID NO: 1012987 - DNA, 15 bp, Homo sapiens
aggacacctgtaata

SEQ ID NO: 1012988 - DNA, 15 bp, Homo sapiens
ggacacctgtaataa

SEQ ID NO: 1012989 - DNA, 15 bp, Homo sapiens
gacacctgtaataag

SEQ ID NO: 1012990 - DNA, 15 bp, Homo sapiens
acacctgtaataaga

SEQ ID NO: 1012991 - DNA, 15 bp, Homo sapiens
cacctgtaataagaa

SEQ ID NO: 1012992 - DNA, 15 bp, Homo sapiens
acctgtaataagaat

SEQ ID NO: 1012993 - DNA, 15 bp, Homo sapiens
cctgtaataagaatt

SEQ ID NO: 1012994 - DNA, 15 bp, Homo sapiens
ctgtaataagaattt

SEQ ID NO: 1012995 - DNA, 15 bp, Homo sapiens
tgtaataagaattta

SEQ ID NO: 1012996 - DNA, 15 bp, Homo sapiens
gtaataagaatttag

SEQ ID NO: 1012997 - DNA, 15 bp, Homo sapiens
taataagaatttagt

SEQ ID NO: 1012998 - DNA, 15 bp, Homo sapiens
aataagaatttagtt

SEQ ID NO: 1012999 - DNA, 15 bp, Homo sapiens
ataagaatttagttt

SEQ ID NO: 1013000 - DNA, 15 bp, Homo sapiens
taagaatttagtttt

SEQ ID NO: 1013001 - DNA, 15 bp, Homo sapiens
aagaatttagttttt

SEQ ID NO: 1013002 - DNA, 15 bp, Homo sapiens
agaatttagttttta

SEQ ID NO: 1013003 - DNA, 15 bp, Homo sapiens
gaatttagtttttat

SEQ ID NO: 1013004 - DNA, 15 bp, Homo sapiens
aatttagtttttatt

SEQ ID NO: 1013005 - DNA, 15 bp, Homo sapiens
atttagtttttattt

SEQ ID NO: 1013006 - DNA, 15 bp, Homo sapiens
tttagtttttatttc

SEQ ID NO: 1013007 - DNA, 15 bp, Homo sapiens
ttagtttttatttct

SEQ ID NO: 1013008 - DNA, 15 bp, Homo sapiens
tagtttttatttcta

SEQ ID NO: 1013009 - DNA, 15 bp, Homo sapiens
agtttttatttctaa

SEQ ID NO: 1013010 - DNA, 15 bp, Homo sapiens
gtttttatttctaat

SEQ ID NO: 1013011 - DNA, 15 bp, Homo sapiens
tttttatttctaatt

SEQ ID NO: 1013012 - DNA, 15 bp, Homo sapiens
ttttatttctaatta

SEQ ID NO: 1013013 - DNA, 15 bp, Homo sapiens
tttatttctaattat

SEQ ID NO: 1013014 - DNA, 15 bp, Homo sapiens
ttatttctaattatt

SEQ ID NO: 1013015 - DNA, 15 bp, Homo sapiens
tatttctaattattt

SEQ ID NO: 1013016 - DNA, 15 bp, Homo sapiens
atttctaattatttt

SEQ ID NO: 1013017 - DNA, 15 bp, Homo sapiens
tttctaattattttc

SEQ ID NO: 1013018 - DNA, 15 bp, Homo sapiens
ttctaattattttct

SEQ ID NO: 1013019 - DNA, 15 bp, Homo sapiens
tctaattattttctg

SEQ ID NO: 1013020 - DNA, 15 bp, Homo sapiens
ctaattattttctga

SEQ ID NO: 1013021 - DNA, 15 bp, Homo sapiens
taattattttctgaa

SEQ ID NO: 1013022 - DNA, 15 bp, Homo sapiens
aattattttctgaaa

SEQ ID NO: 1013023 - DNA, 15 bp, Homo sapiens
attattttctgaaaa

SEQ ID NO: 1013024 - DNA, 15 bp, Homo sapiens
ttattttctgaaaat

SEQ ID NO: 1013025 - DNA, 15 bp, Homo sapiens
tattttctgaaaata

SEQ ID NO: 1013026 - DNA, 15 bp, Homo sapiens
attttctgaaaatat

SEQ ID NO: 1013027 - DNA, 15 bp, Homo sapiens
ttttctgaaaatatc

SEQ ID NO: 1013028 - DNA, 15 bp, Homo sapiens
tttctgaaaatatca

SEQ ID NO: 1013029 - DNA, 15 bp, Homo sapiens
ttctgaaaatatcaa

SEQ ID NO: 1013030 - DNA, 15 bp, Homo sapiens
tctgaaaatatcaat

SEQ ID NO: 1013031 - DNA, 15 bp, Homo sapiens
ctgaaaatatcaata

SEQ ID NO: 1013032 - DNA, 15 bp, Homo sapiens
tgaaaatatcaatat

SEQ ID NO: 1013033 - DNA, 15 bp, Homo sapiens
gaaaatatcaatata

SEQ ID NO: 1013034 - DNA, 15 bp, Homo sapiens
aaaatatcaatatac

SEQ ID NO: 1013035 - DNA, 15 bp, Homo sapiens
aaatatcaatataca

SEQ ID NO: 1013036 - DNA, 15 bp, Homo sapiens
aatatcaatatacat

SEQ ID NO: 1013037 - DNA, 15 bp, Homo sapiens
atatcaatatacatt

SEQ ID NO: 1013038 - DNA, 15 bp, Homo sapiens
tatcaatatacattt

SEQ ID NO: 1013039 - DNA, 15 bp, Homo sapiens
atcaatatacattta

SEQ ID NO: 1013040 - DNA, 15 bp, Homo sapiens
tcaatatacatttaa

SEQ ID NO: 1013041 - DNA, 15 bp, Homo sapiens
caatatacatttaat

SEQ ID NO: 1013042 - DNA, 15 bp, Homo sapiens
aatatacatttaatt

SEQ ID NO: 1013043 - DNA, 15 bp, Homo sapiens
atatacatttaattt

SEQ ID NO: 1013044 - DNA, 15 bp, Homo sapiens
tatacatttaatttt

SEQ ID NO: 1013045 - DNA, 15 bp, Homo sapiens
atacatttaattttc

SEQ ID NO: 1013046 - DNA, 15 bp, Homo sapiens
tacatttaattttca

SEQ ID NO: 1013047 - DNA, 15 bp, Homo sapiens
acatttaattttcaa

SEQ ID NO: 1013048 - DNA, 15 bp, Homo sapiens
catttaattttcaaa

SEQ ID NO: 1013049 - DNA, 15 bp, Homo sapiens
atttaattttcaaaa

SEQ ID NO: 1013050 - DNA, 15 bp, Homo sapiens
tttaattttcaaaat

SEQ ID NO: 1013051 - DNA, 15 bp, Homo sapiens
ttaattttcaaaatc

SEQ ID NO: 1013052 - DNA, 15 bp, Homo sapiens
taattttcaaaatca

SEQ ID NO: 1013053 - DNA, 15 bp, Homo sapiens
aattttcaaaatcat

SEQ ID NO: 1013054 - DNA, 15 bp, Homo sapiens
attttcaaaatcatt

SEQ ID NO: 1013055 - DNA, 15 bp, Homo sapiens
ttttcaaaatcattc

SEQ ID NO: 1013056 - DNA, 15 bp, Homo sapiens
tttcaaaatcattcc

SEQ ID NO: 1013057 - DNA, 15 bp, Homo sapiens
ttcaaaatcattcct

SEQ ID NO: 1013058 - DNA, 15 bp, Homo sapiens
tcaaaatcattccta

SEQ ID NO: 1013059 - DNA, 15 bp, Homo sapiens
caaaatcattcctaa

SEQ ID NO: 1013060 - DNA, 15 bp, Homo sapiens
aaaatcattcctaag

SEQ ID NO: 1013061 - DNA, 15 bp, Homo sapiens
aaatcattcctaagc

SEQ ID NO: 1013062 - DNA, 15 bp, Homo sapiens
aatcattcctaagct

SEQ ID NO: 1013063 - DNA, 15 bp, Homo sapiens
atcattcctaagctg

SEQ ID NO: 1013064 - DNA, 15 bp, Homo sapiens
tcattcctaagctgt

SEQ ID NO: 1013065 - DNA, 15 bp, Homo sapiens
cattcctaagctgtt

SEQ ID NO: 1013066 - DNA, 15 bp, Homo sapiens
attcctaagctgttt

SEQ ID NO: 1013067 - DNA, 15 bp, Homo sapiens
ttcctaagctgttta

SEQ ID NO: 1013068 - DNA, 15 bp, Homo sapiens
tcctaagctgtttat

SEQ ID NO: 1013069 - DNA, 15 bp, Homo sapiens
cctaagctgtttatg

SEQ ID NO: 1013070 - DNA, 15 bp, Homo sapiens
ctaagctgtttatgt

SEQ ID NO: 1013071 - DNA, 15 bp, Homo sapiens
taagctgtttatgtt

SEQ ID NO: 1013072 - DNA, 15 bp, Homo sapiens
aagctgtttatgttt

SEQ ID NO: 1013073 - DNA, 15 bp, Homo sapiens
agctgtttatgtttt

SEQ ID NO: 1013074 - DNA, 15 bp, Homo sapiens
gctgtttatgttttt

SEQ ID NO: 1013075 - DNA, 15 bp, Homo sapiens
ctgtttatgtttttg

SEQ ID NO: 1013076 - DNA, 15 bp, Homo sapiens
tgtttatgtttttga

SEQ ID NO: 1013077 - DNA, 15 bp, Homo sapiens
gtttatgtttttgaa

SEQ ID NO: 1013078 - DNA, 15 bp, Homo sapiens
tttatgtttttgaaa

SEQ ID NO: 1013079 - DNA, 15 bp, Homo sapiens
ttatgtttttgaaat

SEQ ID NO: 1013080 - DNA, 15 bp, Homo sapiens
tatgtttttgaaatg

SEQ ID NO: 1013081 - DNA, 15 bp, Homo sapiens
atgtttttgaaatgt

SEQ ID NO: 1013082 - DNA, 15 bp, Homo sapiens
tgtttttgaaatgtt

SEQ ID NO: 1013083 - DNA, 15 bp, Homo sapiens
gtttttgaaatgtta

SEQ ID NO: 1013084 - DNA, 15 bp, Homo sapiens
tttttgaaatgttat

SEQ ID NO: 1013085 - DNA, 15 bp, Homo sapiens
ttttgaaatgttata

SEQ ID NO: 1013086 - DNA, 15 bp, Homo sapiens
tttgaaatgttatat

SEQ ID NO: 1013087 - DNA, 15 bp, Homo sapiens
ttgaaatgttatatg

SEQ ID NO: 1013088 - DNA, 15 bp, Homo sapiens
tgaaatgttatatgt

SEQ ID NO: 1013089 - DNA, 15 bp, Homo sapiens
gaaatgttatatgta

SEQ ID NO: 1013090 - DNA, 15 bp, Homo sapiens
aaatgttatatgtat

SEQ ID NO: 1013091 - DNA, 15 bp, Homo sapiens
aatgttatatgtatg

SEQ ID NO: 1013092 - DNA, 15 bp, Homo sapiens
atgttatatgtatgt

SEQ ID NO: 1013093 - DNA, 15 bp, Homo sapiens
tgttatatgtatgta

SEQ ID NO: 1013094 - DNA, 15 bp, Homo sapiens
gttatatgtatgtat

SEQ ID NO: 1013095 - DNA, 15 bp, Homo sapiens
ttatatgtatgtata

SEQ ID NO: 1013096 - DNA, 15 bp, Homo sapiens
tatatgtatgtatat

SEQ ID NO: 1013097 - DNA, 15 bp, Homo sapiens
atatgtatgtatatt

SEQ ID NO: 1013098 - DNA, 15 bp, Homo sapiens
tatgtatgtatattt

SEQ ID NO: 1013099 - DNA, 15 bp, Homo sapiens
atgtatgtatatttg

SEQ ID NO: 1013100 - DNA, 15 bp, Homo sapiens
tgtatgtatatttgt

SEQ ID NO: 1013101 - DNA, 15 bp, Homo sapiens
gtatgtatatttgta

SEQ ID NO: 1013102 - DNA, 15 bp, Homo sapiens
tatgtatatttgtac

SEQ ID NO: 1013103 - DNA, 15 bp, Homo sapiens
atgtatatttgtaca

SEQ ID NO: 1013104 - DNA, 15 bp, Homo sapiens
tgtatatttgtacat

SEQ ID NO: 1013105 - DNA, 15 bp, Homo sapiens
gtatatttgtacata

SEQ ID NO: 1013106 - DNA, 15 bp, Homo sapiens
tatatttgtacataa

SEQ ID NO: 1013107 - DNA, 15 bp, Homo sapiens
atatttgtacataat

SEQ ID NO: 1013108 - DNA, 15 bp, Homo sapiens
tatttgtacataatg

SEQ ID NO: 1013109 - DNA, 15 bp, Homo sapiens
atttgtacataatga

SEQ ID NO: 1013110 - DNA, 15 bp, Homo sapiens
tttgtacataatgac

SEQ ID NO: 1013111 - DNA, 15 bp, Homo sapiens
ttgtacataatgact

SEQ ID NO: 1013112 - DNA, 15 bp, Homo sapiens
tgtacataatgacta

SEQ ID NO: 1013113 - DNA, 15 bp, Homo sapiens
gtacataatgactaa

SEQ ID NO: 1013114 - DNA, 15 bp, Homo sapiens
tacataatgactaaa

SEQ ID NO: 1013115 - DNA, 15 bp, Homo sapiens
acataatgactaaag

SEQ ID NO: 1013116 - DNA, 15 bp, Homo sapiens
cataatgactaaagg

SEQ ID NO: 1013117 - DNA, 15 bp, Homo sapiens
ataatgactaaagga

SEQ ID NO: 1013118 - DNA, 15 bp, Homo sapiens
taatgactaaaggac

SEQ ID NO: 1013119 - DNA, 15 bp, Homo sapiens
aatgactaaaggaca

SEQ ID NO: 1013120 - DNA, 15 bp, Homo sapiens
atgactaaaggacag

SEQ ID NO: 1013121 - DNA, 15 bp, Homo sapiens
tgactaaaggacagc

SEQ ID NO: 1013122 - DNA, 15 bp, Homo sapiens
gactaaaggacagct

SEQ ID NO: 1013123 - DNA, 15 bp, Homo sapiens
actaaaggacagctt

SEQ ID NO: 1013124 - DNA, 15 bp, Homo sapiens
ctaaaggacagcttt

SEQ ID NO: 1013125 - DNA, 15 bp, Homo sapiens
taaaggacagctttt

SEQ ID NO: 1013126 - DNA, 15 bp, Homo sapiens
aaaggacagcttttg

SEQ ID NO: 1013127 - DNA, 15 bp, Homo sapiens
aaggacagcttttgg

SEQ ID NO: 1013128 - DNA, 15 bp, Homo sapiens
aggacagcttttggg

SEQ ID NO: 1013129 - DNA, 15 bp, Homo sapiens
ggacagcttttgggc

SEQ ID NO: 1013130 - DNA, 15 bp, Homo sapiens
gacagcttttgggct

SEQ ID NO: 1013131 - DNA, 15 bp, Homo sapiens
acagcttttgggctg

SEQ ID NO: 1013132 - DNA, 15 bp, Homo sapiens
cagcttttgggctga

SEQ ID NO: 1013133 - DNA, 15 bp, Homo sapiens
agcttttgggctgat

SEQ ID NO: 1013134 - DNA, 15 bp, Homo sapiens
gcttttgggctgata

SEQ ID NO: 1013135 - DNA, 15 bp, Homo sapiens
cttttgggctgatat

SEQ ID NO: 1013136 - DNA, 15 bp, Homo sapiens
ttttgggctgatatt

SEQ ID NO: 1013137 - DNA, 15 bp, Homo sapiens
tttgggctgatatta

SEQ ID NO: 1013138 - DNA, 15 bp, Homo sapiens
ttgggctgatattac

SEQ ID NO: 1013139 - DNA, 15 bp, Homo sapiens
tgggctgatattacc

SEQ ID NO: 1013140 - DNA, 15 bp, Homo sapiens
gggctgatattacca

SEQ ID NO: 1013141 - DNA, 15 bp, Homo sapiens
ggctgatattaccag

SEQ ID NO: 1013142 - DNA, 15 bp, Homo sapiens
gctgatattaccagg

SEQ ID NO: 1013143 - DNA, 15 bp, Homo sapiens
ctgatattaccagga

SEQ ID NO: 1013144 - DNA, 15 bp, Homo sapiens
tgatattaccaggag

SEQ ID NO: 1013145 - DNA, 15 bp, Homo sapiens
gatattaccaggaga

SEQ ID NO: 1013146 - DNA, 15 bp, Homo sapiens
atattaccaggagag

SEQ ID NO: 1013147 - DNA, 15 bp, Homo sapiens
tattaccaggagaga

SEQ ID NO: 1013148 - DNA, 15 bp, Homo sapiens
attaccaggagagaa

SEQ ID NO: 1013149 - DNA, 15 bp, Homo sapiens
ttaccaggagagaaa

SEQ ID NO: 1013150 - DNA, 15 bp, Homo sapiens
taccaggagagaaaa

SEQ ID NO: 1013151 - DNA, 15 bp, Homo sapiens
accaggagagaaaat

SEQ ID NO: 1013152 - DNA, 15 bp, Homo sapiens
ccaggagagaaaata

SEQ ID NO: 1013153 - DNA, 15 bp, Homo sapiens
caggagagaaaataa

SEQ ID NO: 1013154 - DNA, 15 bp, Homo sapiens
aggagagaaaataaa

SEQ ID NO: 1013155 - DNA, 15 bp, Homo sapiens
ggagagaaaataaat

SEQ ID NO: 1013156 - DNA, 15 bp, Homo sapiens
gagagaaaataaata

SEQ ID NO: 1013157 - DNA, 15 bp, Homo sapiens
agagaaaataaatag

SEQ ID NO: 1013158 - DNA, 15 bp, Homo sapiens
gagaaaataaatagc

SEQ ID NO: 1013159 - DNA, 15 bp, Homo sapiens
agaaaataaatagca

SEQ ID NO: 1013160 - DNA, 15 bp, Homo sapiens
gaaaataaatagcaa

SEQ ID NO: 1013161 - DNA, 15 bp, Homo sapiens
aaaataaatagcaaa

SEQ ID NO: 1013162 - DNA, 15 bp, Homo sapiens
aaataaatagcaaat

SEQ ID NO: 1013163 - DNA, 15 bp, Homo sapiens
aataaatagcaaatg

SEQ ID NO: 1013164 - DNA, 15 bp, Homo sapiens
ataaatagcaaatgt

SEQ ID NO: 1013165 - DNA, 15 bp, Homo sapiens
taaatagcaaatgta

SEQ ID NO: 1013166 - DNA, 15 bp, Homo sapiens
aaatagcaaatgtaa

SEQ ID NO: 1013167 - DNA, 15 bp, Homo sapiens
aatagcaaatgtaat

SEQ ID NO: 1013168 - DNA, 15 bp, Homo sapiens
atagcaaatgtaata

SEQ ID NO: 1013169 - DNA, 15 bp, Homo sapiens
tagcaaatgtaatat

SEQ ID NO: 1013170 - DNA, 15 bp, Homo sapiens
agcaaatgtaatatg

SEQ ID NO: 1013171 - DNA, 15 bp, Homo sapiens
gcaaatgtaatatga

SEQ ID NO: 1013172 - DNA, 15 bp, Homo sapiens
caaatgtaatatgaa

SEQ ID NO: 1013173 - DNA, 15 bp, Homo sapiens
aaatgtaatatgaaa

SEQ ID NO: 1013174 - DNA, 15 bp, Homo sapiens
aatgtaatatgaaac

SEQ ID NO: 1013175 - DNA, 15 bp, Homo sapiens
atgtaatatgaaaca

SEQ ID NO: 1013176 - DNA, 15 bp, Homo sapiens
tgtaatatgaaacaa

SEQ ID NO: 1013177 - DNA, 15 bp, Homo sapiens
gtaatatgaaacaat

SEQ ID NO: 1013178 - DNA, 15 bp, Homo sapiens
taatatgaaacaatt

SEQ ID NO: 1013179 - DNA, 15 bp, Homo sapiens
aatatgaaacaattt

SEQ ID NO: 1013180 - DNA, 15 bp, Homo sapiens
atatgaaacaatttt

SEQ ID NO: 1013181 - DNA, 15 bp, Homo sapiens
tatgaaacaattttt

SEQ ID NO: 1013182 - DNA, 15 bp, Homo sapiens
atgaaacaattttta

SEQ ID NO: 1013183 - DNA, 15 bp, Homo sapiens
tgaaacaatttttag

SEQ ID NO: 1013184 - DNA, 15 bp, Homo sapiens
gaaacaatttttaga

SEQ ID NO: 1013185 - DNA, 15 bp, Homo sapiens
aaacaatttttagaa

SEQ ID NO: 1013186 - DNA, 15 bp, Homo sapiens
aacaatttttagaat

SEQ ID NO: 1013187 - DNA, 15 bp, Homo sapiens
acaatttttagaata

SEQ ID NO: 1013188 - DNA, 15 bp, Homo sapiens
caatttttagaataa

SEQ ID NO: 1013189 - DNA, 15 bp, Homo sapiens
aatttttagaataag

SEQ ID NO: 1013190 - DNA, 15 bp, Homo sapiens
atttttagaataaga

SEQ ID NO: 1013191 - DNA, 15 bp, Homo sapiens
tttttagaataagaa

SEQ ID NO: 1013192 - DNA, 15 bp, Homo sapiens
ttttagaataagaaa

SEQ ID NO: 1013193 - DNA, 15 bp, Homo sapiens
tttagaataagaaaa

SEQ ID NO: 1013194 - DNA, 15 bp, Homo sapiens
ttagaataagaaaat

SEQ ID NO: 1013195 - DNA, 15 bp, Homo sapiens
tagaataagaaaatt

SEQ ID NO: 1013196 - DNA, 15 bp, Homo sapiens
agaataagaaaattt

SEQ ID NO: 1013197 - DNA, 15 bp, Homo sapiens
gaataagaaaatttt

SEQ ID NO: 1013198 - DNA, 15 bp, Homo sapiens
aataagaaaatttta

SEQ ID NO: 1013199 - DNA, 15 bp, Homo sapiens
ataagaaaattttag

SEQ ID NO: 1013200 - DNA, 15 bp, Homo sapiens
taagaaaattttagg

SEQ ID NO: 1013201 - DNA, 15 bp, Homo sapiens
aagaaaattttaggt

SEQ ID NO: 1013202 - DNA, 15 bp, Homo sapiens
agaaaattttaggtt

SEQ ID NO: 1013203 - DNA, 15 bp, Homo sapiens
gaaaattttaggttt

SEQ ID NO: 1013204 - DNA, 15 bp, Homo sapiens
aaaattttaggtttt

SEQ ID NO: 1013205 - DNA, 15 bp, Homo sapiens
aaattttaggttttg

SEQ ID NO: 1013206 - DNA, 15 bp, Homo sapiens
aattttaggttttga

SEQ ID NO: 1013207 - DNA, 15 bp, Homo sapiens
attttaggttttgaa

SEQ ID NO: 1013208 - DNA, 15 bp, Homo sapiens
ttttaggttttgaat

SEQ ID NO: 1013209 - DNA, 15 bp, Homo sapiens
tttaggttttgaatg

SEQ ID NO: 1013210 - DNA, 15 bp, Homo sapiens
ttaggttttgaatgg

SEQ ID NO: 1013211 - DNA, 15 bp, Homo sapiens
taggttttgaatggc

SEQ ID NO: 1013212 - DNA, 15 bp, Homo sapiens
aggttttgaatggct

SEQ ID NO: 1013213 - DNA, 15 bp, Homo sapiens
ggttttgaatggctg

SEQ ID NO: 1013214 - DNA, 15 bp, Homo sapiens
gttttgaatggctgt

SEQ ID NO: 1013215 - DNA, 15 bp, Homo sapiens
ttttgaatggctgtt

SEQ ID NO: 1013216 - DNA, 15 bp, Homo sapiens
tttgaatggctgtta

SEQ ID NO: 1013217 - DNA, 15 bp, Homo sapiens
ttgaatggctgttag

SEQ ID NO: 1013218 - DNA, 15 bp, Homo sapiens
tgaatggctgttagg

SEQ ID NO: 1013219 - DNA, 15 bp, Homo sapiens
gaatggctgttaggg

SEQ ID NO: 1013220 - DNA, 15 bp, Homo sapiens
aatggctgttagggt

SEQ ID NO: 1013221 - DNA, 15 bp, Homo sapiens
atggctgttagggta

SEQ ID NO: 1013222 - DNA, 15 bp, Homo sapiens
tggctgttagggtaa

SEQ ID NO: 1013223 - DNA, 15 bp, Homo sapiens
ggctgttagggtaaa

SEQ ID NO: 1013224 - DNA, 15 bp, Homo sapiens
gctgttagggtaaaa

SEQ ID NO: 1013225 - DNA, 15 bp, Homo sapiens
ctgttagggtaaaat

SEQ ID NO: 1013226 - DNA, 15 bp, Homo sapiens
tgttagggtaaaatc

SEQ ID NO: 1013227 - DNA, 15 bp, Homo sapiens
gttagggtaaaatct

SEQ ID NO: 1013228 - DNA, 15 bp, Homo sapiens
ttagggtaaaatctc

SEQ ID NO: 1013229 - DNA, 15 bp, Homo sapiens
tagggtaaaatctca

SEQ ID NO: 1013230 - DNA, 15 bp, Homo sapiens
agggtaaaatctcac

SEQ ID NO: 1013231 - DNA, 15 bp, Homo sapiens
gggtaaaatctcacc

SEQ ID NO: 1013232 - DNA, 15 bp, Homo sapiens
ggtaaaatctcaccc

SEQ ID NO: 1013233 - DNA, 15 bp, Homo sapiens
gtaaaatctcaccct

SEQ ID NO: 1013234 - DNA, 15 bp, Homo sapiens
taaaatctcaccctt

SEQ ID NO: 1013235 - DNA, 15 bp, Homo sapiens
aaaatctcacccttc

SEQ ID NO: 1013236 - DNA, 15 bp, Homo sapiens
aaatctcacccttca

SEQ ID NO: 1013237 - DNA, 15 bp, Homo sapiens
aatctcacccttcat

SEQ ID NO: 1013238 - DNA, 15 bp, Homo sapiens
atctcacccttcata

SEQ ID NO: 1013239 - DNA, 15 bp, Homo sapiens
tctcacccttcataa

SEQ ID NO: 1013240 - DNA, 15 bp, Homo sapiens
ctcacccttcataaa

SEQ ID NO: 1013241 - DNA, 15 bp, Homo sapiens
tcacccttcataaac

SEQ ID NO: 1013242 - DNA, 15 bp, Homo sapiens
cacccttcataaact

SEQ ID NO: 1013243 - DNA, 15 bp, Homo sapiens
acccttcataaactt

SEQ ID NO: 1013244 - DNA, 15 bp, Homo sapiens
cccttcataaacttg

SEQ ID NO: 1013245 - DNA, 15 bp, Homo sapiens
ccttcataaacttgg

SEQ ID NO: 1013246 - DNA, 15 bp, Homo sapiens
cttcataaacttggt

SEQ ID NO: 1013247 - DNA, 15 bp, Homo sapiens
ttcataaacttggtg

SEQ ID NO: 1013248 - DNA, 15 bp, Homo sapiens
tcataaacttggtga

SEQ ID NO: 1013249 - DNA, 15 bp, Homo sapiens
cataaacttggtgag

SEQ ID NO: 1013250 - DNA, 15 bp, Homo sapiens
ataaacttggtgagt

SEQ ID NO: 1013251 - DNA, 15 bp, Homo sapiens
taaacttggtgagtt

SEQ ID NO: 1013252 - DNA, 15 bp, Homo sapiens
aaacttggtgagtta

SEQ ID NO: 1013253 - DNA, 15 bp, Homo sapiens
aacttggtgagttaa

SEQ ID NO: 1013254 - DNA, 15 bp, Homo sapiens
acttggtgagttaac

SEQ ID NO: 1013255 - DNA, 15 bp, Homo sapiens
cttggtgagttaaca

SEQ ID NO: 1013256 - DNA, 15 bp, Homo sapiens
ttggtgagttaacag

SEQ ID NO: 1013257 - DNA, 15 bp, Homo sapiens
tggtgagttaacagt

SEQ ID NO: 1013258 - DNA, 15 bp, Homo sapiens
ggtgagttaacagtc

SEQ ID NO: 1013259 - DNA, 15 bp, Homo sapiens
gtgagttaacagtca

SEQ ID NO: 1013260 - DNA, 15 bp, Homo sapiens
tgagttaacagtcag

SEQ ID NO: 1013261 - DNA, 15 bp, Homo sapiens
gagttaacagtcaga

SEQ ID NO: 1013262 - DNA, 15 bp, Homo sapiens
agttaacagtcagat

SEQ ID NO: 1013263 - DNA, 15 bp, Homo sapiens
gttaacagtcagata

SEQ ID NO: 1013264 - DNA, 15 bp, Homo sapiens
ttaacagtcagataa

SEQ ID NO: 1013265 - DNA, 15 bp, Homo sapiens
taacagtcagataac

SEQ ID NO: 1013266 - DNA, 15 bp, Homo sapiens
aacagtcagataacc

SEQ ID NO: 1013267 - DNA, 15 bp, Homo sapiens
acagtcagataacca

SEQ ID NO: 1013268 - DNA, 15 bp, Homo sapiens
cagtcagataaccag

SEQ ID NO: 1013269 - DNA, 15 bp, Homo sapiens
agtcagataaccagt

SEQ ID NO: 1013270 - DNA, 15 bp, Homo sapiens
gtcagataaccagta

SEQ ID NO: 1013271 - DNA, 15 bp, Homo sapiens
tcagataaccagtat

SEQ ID NO: 1013272 - DNA, 15 bp, Homo sapiens
cagataaccagtatg

SEQ ID NO: 1013273 - DNA, 15 bp, Homo sapiens
agataaccagtatgg

SEQ ID NO: 1013274 - DNA, 15 bp, Homo sapiens
gataaccagtatgga

SEQ ID NO: 1013275 - DNA, 15 bp, Homo sapiens
ataaccagtatggaa

SEQ ID NO: 1013276 - DNA, 15 bp, Homo sapiens
taaccagtatggaag

SEQ ID NO: 1013277 - DNA, 15 bp, Homo sapiens
aaccagtatggaagt

SEQ ID NO: 1013278 - DNA, 15 bp, Homo sapiens
accagtatggaagta

SEQ ID NO: 1013279 - DNA, 15 bp, Homo sapiens
ccagtatggaagtat

SEQ ID NO: 1013280 - DNA, 15 bp, Homo sapiens
cagtatggaagtatt

SEQ ID NO: 1013281 - DNA, 15 bp, Homo sapiens
agtatggaagtattg

SEQ ID NO: 1013282 - DNA, 15 bp, Homo sapiens
gtatggaagtattga

SEQ ID NO: 1013283 - DNA, 15 bp, Homo sapiens
tatggaagtattgac

SEQ ID NO: 1013284 - DNA, 15 bp, Homo sapiens
atggaagtattgacc

SEQ ID NO: 1013285 - DNA, 15 bp, Homo sapiens
tggaagtattgacct

SEQ ID NO: 1013286 - DNA, 15 bp, Homo sapiens
ggaagtattgacctt

SEQ ID NO: 1013287 - DNA, 15 bp, Homo sapiens
gaagtattgaccttc

SEQ ID NO: 1013288 - DNA, 15 bp, Homo sapiens
aagtattgaccttct

SEQ ID NO: 1013289 - DNA, 15 bp, Homo sapiens
agtattgaccttcta

SEQ ID NO: 1013290 - DNA, 15 bp, Homo sapiens
gtattgaccttctac

SEQ ID NO: 1013291 - DNA, 15 bp, Homo sapiens
tattgaccttctact

SEQ ID NO: 1013292 - DNA, 15 bp, Homo sapiens
attgaccttctactc

SEQ ID NO: 1013293 - DNA, 15 bp, Homo sapiens
ttgaccttctactct

SEQ ID NO: 1013294 - DNA, 15 bp, Homo sapiens
tgaccttctactctt

SEQ ID NO: 1013295 - DNA, 15 bp, Homo sapiens
gaccttctactcttt

SEQ ID NO: 1013296 - DNA, 15 bp, Homo sapiens
accttctactctttg

SEQ ID NO: 1013297 - DNA, 15 bp, Homo sapiens
ccttctactctttgc

SEQ ID NO: 1013298 - DNA, 15 bp, Homo sapiens
cttctactctttgcc

SEQ ID NO: 1013299 - DNA, 15 bp, Homo sapiens
ttctactctttgcca

SEQ ID NO: 1013300 - DNA, 15 bp, Homo sapiens
tctactctttgccag

SEQ ID NO: 1013301 - DNA, 15 bp, Homo sapiens
ctactctttgccagg

SEQ ID NO: 1013302 - DNA, 15 bp, Homo sapiens
tactctttgccaggc

SEQ ID NO: 1013303 - DNA, 15 bp, Homo sapiens
actctttgccaggca

SEQ ID NO: 1013304 - DNA, 15 bp, Homo sapiens
ctctttgccaggcaa

SEQ ID NO: 1013305 - DNA, 15 bp, Homo sapiens
tctttgccaggcaaa

SEQ ID NO: 1013306 - DNA, 15 bp, Homo sapiens
ctttgccaggcaaag

SEQ ID NO: 1013307 - DNA, 15 bp, Homo sapiens
tttgccaggcaaagg

SEQ ID NO: 1013308 - DNA, 15 bp, Homo sapiens
ttgccaggcaaaggt

SEQ ID NO: 1013309 - DNA, 15 bp, Homo sapiens
tgccaggcaaaggtg

SEQ ID NO: 1013310 - DNA, 15 bp, Homo sapiens
gccaggcaaaggtgc

SEQ ID NO: 1013311 - DNA, 15 bp, Homo sapiens
ccaggcaaaggtgct

SEQ ID NO: 1013312 - DNA, 15 bp, Homo sapiens
caggcaaaggtgcta

SEQ ID NO: 1013313 - DNA, 15 bp, Homo sapiens
aggcaaaggtgctaa

SEQ ID NO: 1013314 - DNA, 15 bp, Homo sapiens
ggcaaaggtgctaat

SEQ ID NO: 1013315 - DNA, 15 bp, Homo sapiens
gcaaaggtgctaatg

SEQ ID NO: 1013316 - DNA, 15 bp, Homo sapiens
caaaggtgctaatgc

SEQ ID NO: 1013317 - DNA, 15 bp, Homo sapiens
aaaggtgctaatgcc

SEQ ID NO: 1013318 - DNA, 15 bp, Homo sapiens
aaggtgctaatgcca

SEQ ID NO: 1013319 - DNA, 15 bp, Homo sapiens
aggtgctaatgccag

SEQ ID NO: 1013320 - DNA, 15 bp, Homo sapiens
ggtgctaatgccagg

SEQ ID NO: 1013321 - DNA, 15 bp, Homo sapiens
gtgctaatgccaggg

SEQ ID NO: 1013322 - DNA, 15 bp, Homo sapiens
tgctaatgccaggga

SEQ ID NO: 1013323 - DNA, 15 bp, Homo sapiens
gctaatgccagggaa

SEQ ID NO: 1013324 - DNA, 15 bp, Homo sapiens
ctaatgccagggaag

SEQ ID NO: 1013325 - DNA, 15 bp, Homo sapiens
taatgccagggaagc

SEQ ID NO: 1013326 - DNA, 15 bp, Homo sapiens
aatgccagggaagca

SEQ ID NO: 1013327 - DNA, 15 bp, Homo sapiens
atgccagggaagcat

SEQ ID NO: 1013328 - DNA, 15 bp, Homo sapiens
tgccagggaagcatg

SEQ ID NO: 1013329 - DNA, 15 bp, Homo sapiens
gccagggaagcatgg

SEQ ID NO: 1013330 - DNA, 15 bp, Homo sapiens
ccagggaagcatggt

SEQ ID NO: 1013331 - DNA, 15 bp, Homo sapiens
cagggaagcatggtg

SEQ ID NO: 1013332 - DNA, 15 bp, Homo sapiens
agggaagcatggtga

SEQ ID NO: 1013333 - DNA, 15 bp, Homo sapiens
gggaagcatggtgaa

SEQ ID NO: 1013334 - DNA, 15 bp, Homo sapiens
ggaagcatggtgaac

SEQ ID NO: 1013335 - DNA, 15 bp, Homo sapiens
gaagcatggtgaact

SEQ ID NO: 1013336 - DNA, 15 bp, Homo sapiens
aagcatggtgaacta

SEQ ID NO: 1013337 - DNA, 15 bp, Homo sapiens
agcatggtgaactaa

SEQ ID NO: 1013338 - DNA, 15 bp, Homo sapiens
gcatggtgaactaaa

SEQ ID NO: 1013339 - DNA, 15 bp, Homo sapiens
catggtgaactaaac

SEQ ID NO: 1013340 - DNA, 15 bp, Homo sapiens
atggtgaactaaaca

SEQ ID NO: 1013341 - DNA, 15 bp, Homo sapiens
tggtgaactaaacat

SEQ ID NO: 1013342 - DNA, 15 bp, Homo sapiens
ggtgaactaaacata

SEQ ID NO: 1013343 - DNA, 15 bp, Homo sapiens
gtgaactaaacatac

SEQ ID NO: 1013344 - DNA, 15 bp, Homo sapiens
tgaactaaacataca

SEQ ID NO: 1013345 - DNA, 15 bp, Homo sapiens
gaactaaacatacac

SEQ ID NO: 1013346 - DNA, 15 bp, Homo sapiens
aactaaacatacaca

SEQ ID NO: 1013347 - DNA, 15 bp, Homo sapiens
actaaacatacacag

SEQ ID NO: 1013348 - DNA, 15 bp, Homo sapiens
ctaaacatacacagc

SEQ ID NO: 1013349 - DNA, 15 bp, Homo sapiens
taaacatacacagca

SEQ ID NO: 1013350 - DNA, 15 bp, Homo sapiens
aaacatacacagcac

SEQ ID NO: 1013351 - DNA, 15 bp, Homo sapiens
aacatacacagcact

SEQ ID NO: 1013352 - DNA, 15 bp, Homo sapiens
acatacacagcactt

SEQ ID NO: 1013353 - DNA, 15 bp, Homo sapiens
catacacagcacttc

SEQ ID NO: 1013354 - DNA, 15 bp, Homo sapiens
atacacagcacttcc

SEQ ID NO: 1013355 - DNA, 15 bp, Homo sapiens
tacacagcacttccc

SEQ ID NO: 1013356 - DNA, 15 bp, Homo sapiens
acacagcacttcccc

SEQ ID NO: 1013357 - DNA, 15 bp, Homo sapiens
cacagcacttcccct

SEQ ID NO: 1013358 - DNA, 15 bp, Homo sapiens
acagcacttcccctc

SEQ ID NO: 1013359 - DNA, 15 bp, Homo sapiens
cagcacttcccctca

SEQ ID NO: 1013360 - DNA, 15 bp, Homo sapiens
agcacttcccctcac

SEQ ID NO: 1013361 - DNA, 15 bp, Homo sapiens
gcacttcccctcacc

SEQ ID NO: 1013362 - DNA, 15 bp, Homo sapiens
cacttcccctcaccg

SEQ ID NO: 1013363 - DNA, 15 bp, Homo sapiens
acactccttaaggta

SEQ ID NO: 1013364 - DNA, 15 bp, Homo sapiens
cactccttaaggtaa

SEQ ID NO: 1013365 - DNA, 15 bp, Homo sapiens
actccttaaggtaaa

SEQ ID NO: 1013366 - DNA, 15 bp, Homo sapiens
ctccttaaggtaaaa

SEQ ID NO: 1013367 - DNA, 15 bp, Homo sapiens
tccttaaggtaaaat

SEQ ID NO: 1013368 - DNA, 15 bp, Homo sapiens
ccttaaggtaaaatt

SEQ ID NO: 1013369 - DNA, 15 bp, Homo sapiens
cttaaggtaaaattt

SEQ ID NO: 1013370 - DNA, 15 bp, Homo sapiens
ttaaggtaaaattta

SEQ ID NO: 1013371 - DNA, 15 bp, Homo sapiens
taaggtaaaatttaa

SEQ ID NO: 1013372 - DNA, 15 bp, Homo sapiens
aaggtaaaatttaat

SEQ ID NO: 1013373 - DNA, 15 bp, Homo sapiens
aggtaaaatttaata

SEQ ID NO: 1013374 - DNA, 15 bp, Homo sapiens
ggtaaaatttaataa

SEQ ID NO: 1013375 - DNA, 15 bp, Homo sapiens
gtaaaatttaataat

SEQ ID NO: 1013376 - DNA, 15 bp, Homo sapiens
taaaatttaataata

SEQ ID NO: 1013377 - DNA, 15 bp, Homo sapiens
aaaatttaataatac

SEQ ID NO: 1013378 - DNA, 15 bp, Homo sapiens
aaatttaataatacc

SEQ ID NO: 1013379 - DNA, 15 bp, Homo sapiens
aatttaataatacca

SEQ ID NO: 1013380 - DNA, 15 bp, Homo sapiens
atttaataataccaa

SEQ ID NO: 1013381 - DNA, 15 bp, Homo sapiens
tttaataataccaaa

SEQ ID NO: 1013382 - DNA, 15 bp, Homo sapiens
ttaataataccaaaa

SEQ ID NO: 1013383 - DNA, 15 bp, Homo sapiens
taataataccaaaag

SEQ ID NO: 1013384 - DNA, 15 bp, Homo sapiens
aataataccaaaagt

SEQ ID NO: 1013385 - DNA, 15 bp, Homo sapiens
ataataccaaaagta

SEQ ID NO: 1013386 - DNA, 15 bp, Homo sapiens
taataccaaaagtac

SEQ ID NO: 1013387 - DNA, 15 bp, Homo sapiens
aataccaaaagtacc

SEQ ID NO: 1013388 - DNA, 15 bp, Homo sapiens
ataccaaaagtaccc

SEQ ID NO: 1013389 - DNA, 15 bp, Homo sapiens
taccaaaagtaccct

SEQ ID NO: 1013390 - DNA, 15 bp, Homo sapiens
accaaaagtacccta

SEQ ID NO: 1013391 - DNA, 15 bp, Homo sapiens
ccaaaagtaccctag

SEQ ID NO: 1013392 - DNA, 15 bp, Homo sapiens
caaaagtaccctaga

SEQ ID NO: 1013393 - DNA, 15 bp, Homo sapiens
aaaagtaccctagaa

SEQ ID NO: 1013394 - DNA, 15 bp, Homo sapiens
aaagtaccctagaaa

SEQ ID NO: 1013395 - DNA, 15 bp, Homo sapiens
aagtaccctagaaaa

SEQ ID NO: 1013396 - DNA, 15 bp, Homo sapiens
agtaccctagaaaac

SEQ ID NO: 1013397 - DNA, 15 bp, Homo sapiens
gtaccctagaaaact

SEQ ID NO: 1013398 - DNA, 15 bp, Homo sapiens
taccctagaaaactg

SEQ ID NO: 1013399 - DNA, 15 bp, Homo sapiens
accctagaaaactga

SEQ ID NO: 1013400 - DNA, 15 bp, Homo sapiens
ccctagaaaactgat

SEQ ID NO: 1013401 - DNA, 15 bp, Homo sapiens
cctagaaaactgatg

SEQ ID NO: 1013402 - DNA, 15 bp, Homo sapiens
ctagaaaactgatga

SEQ ID NO: 1013403 - DNA, 15 bp, Homo sapiens
tagaaaactgatgaa

SEQ ID NO: 1013404 - DNA, 15 bp, Homo sapiens
agaaaactgatgaaa

SEQ ID NO: 1013405 - DNA, 15 bp, Homo sapiens
gaaaactgatgaaat

SEQ ID NO: 1013406 - DNA, 15 bp, Homo sapiens
aaaactgatgaaatg

SEQ ID NO: 1013407 - DNA, 15 bp, Homo sapiens
aaactgatgaaatgg

SEQ ID NO: 1013408 - DNA, 15 bp, Homo sapiens
aactgatgaaatggt

SEQ ID NO: 1013409 - DNA, 15 bp, Homo sapiens
actgatgaaatggta

SEQ ID NO: 1013410 - DNA, 15 bp, Homo sapiens
ctgatgaaatggtaa

SEQ ID NO: 1013411 - DNA, 15 bp, Homo sapiens
tgatgaaatggtaac

SEQ ID NO: 1013412 - DNA, 15 bp, Homo sapiens
gatgaaatggtaaca

SEQ ID NO: 1013413 - DNA, 15 bp, Homo sapiens
atgaaatggtaacaa

SEQ ID NO: 1013414 - DNA, 15 bp, Homo sapiens
tgaaatggtaacaaa

SEQ ID NO: 1013415 - DNA, 15 bp, Homo sapiens
gaaatggtaacaaaa

SEQ ID NO: 1013416 - DNA, 15 bp, Homo sapiens
aaatggtaacaaaat

SEQ ID NO: 1013417 - DNA, 15 bp, Homo sapiens
aatggtaacaaaatt

SEQ ID NO: 1013418 - DNA, 15 bp, Homo sapiens
atggtaacaaaattt

SEQ ID NO: 1013419 - DNA, 15 bp, Homo sapiens
tggtaacaaaatttg

SEQ ID NO: 1013420 - DNA, 15 bp, Homo sapiens
ggtaacaaaatttga

SEQ ID NO: 1013421 - DNA, 15 bp, Homo sapiens
gtaacaaaatttgag

SEQ ID NO: 1013422 - DNA, 15 bp, Homo sapiens
taacaaaatttgaga

SEQ ID NO: 1013423 - DNA, 15 bp, Homo sapiens
aacaaaatttgagat

SEQ ID NO: 1013424 - DNA, 15 bp, Homo sapiens
acaaaatttgagatt

SEQ ID NO: 1013425 - DNA, 15 bp, Homo sapiens
caaaatttgagatta

SEQ ID NO: 1013426 - DNA, 15 bp, Homo sapiens
aaaatttgagattat

SEQ ID NO: 1013427 - DNA, 15 bp, Homo sapiens
aaatttgagattata

SEQ ID NO: 1013428 - DNA, 15 bp, Homo sapiens
aatttgagattatac

SEQ ID NO: 1013429 - DNA, 15 bp, Homo sapiens
atttgagattatact

SEQ ID NO: 1013430 - DNA, 15 bp, Homo sapiens
tttgagattatactt

SEQ ID NO: 1013431 - DNA, 15 bp, Homo sapiens
ttgagattatacttt

SEQ ID NO: 1013432 - DNA, 15 bp, Homo sapiens
tgagattatactttg

SEQ ID NO: 1013433 - DNA, 15 bp, Homo sapiens
gagattatactttga

SEQ ID NO: 1013434 - DNA, 15 bp, Homo sapiens
agattatactttgat

SEQ ID NO: 1013435 - DNA, 15 bp, Homo sapiens
gattatactttgata

SEQ ID NO: 1013436 - DNA, 15 bp, Homo sapiens
attatactttgatag

SEQ ID NO: 1013437 - DNA, 15 bp, Homo sapiens
ttatactttgataga

SEQ ID NO: 1013438 - DNA, 15 bp, Homo sapiens
tatactttgatagaa

SEQ ID NO: 1013439 - DNA, 15 bp, Homo sapiens
atactttgatagaat

SEQ ID NO: 1013440 - DNA, 15 bp, Homo sapiens
tactttgatagaata

SEQ ID NO: 1013441 - DNA, 15 bp, Homo sapiens
actttgatagaataa

SEQ ID NO: 1013442 - DNA, 15 bp, Homo sapiens
ctttgatagaataat

SEQ ID NO: 1013443 - DNA, 15 bp, Homo sapiens
tttgatagaataatt

SEQ ID NO: 1013444 - DNA, 15 bp, Homo sapiens
ttgatagaataattt

SEQ ID NO: 1013445 - DNA, 15 bp, Homo sapiens
tgatagaataatttt

SEQ ID NO: 1013446 - DNA, 15 bp, Homo sapiens
gatagaataattttt

SEQ ID NO: 1013447 - DNA, 15 bp, Homo sapiens
atagaataatttttg

SEQ ID NO: 1013448 - DNA, 15 bp, Homo sapiens
tagaataatttttgt

SEQ ID NO: 1013449 - DNA, 15 bp, Homo sapiens
agaataatttttgtc

SEQ ID NO: 1013450 - DNA, 15 bp, Homo sapiens
gaataatttttgtcc

SEQ ID NO: 1013451 - DNA, 15 bp, Homo sapiens
aataatttttgtcca

SEQ ID NO: 1013452 - DNA, 15 bp, Homo sapiens
ataatttttgtccac

SEQ ID NO: 1013453 - DNA, 15 bp, Homo sapiens
taatttttgtccaca

SEQ ID NO: 1013454 - DNA, 15 bp, Homo sapiens
aatttttgtccacat

SEQ ID NO: 1013455 - DNA, 15 bp, Homo sapiens
atttttgtccacatt

SEQ ID NO: 1013456 - DNA, 15 bp, Homo sapiens
tttttgtccacatta

SEQ ID NO: 1013457 - DNA, 15 bp, Homo sapiens
ttttgtccacattaa

SEQ ID NO: 1013458 - DNA, 15 bp, Homo sapiens
tttgtccacattaaa

SEQ ID NO: 1013459 - DNA, 15 bp, Homo sapiens
ttgtccacattaaag

SEQ ID NO: 1013460 - DNA, 15 bp, Homo sapiens
tgtccacattaaagt

SEQ ID NO: 1013461 - DNA, 15 bp, Homo sapiens
gtccacattaaagtt

SEQ ID NO: 1013462 - DNA, 15 bp, Homo sapiens
tccacattaaagttt

SEQ ID NO: 1013463 - DNA, 15 bp, Homo sapiens
ccacattaaagtttg

SEQ ID NO: 1013464 - DNA, 15 bp, Homo sapiens
cacattaaagtttga

SEQ ID NO: 1013465 - DNA, 15 bp, Homo sapiens
acattaaagtttgac

SEQ ID NO: 1013466 - DNA, 15 bp, Homo sapiens
cattaaagtttgaca

SEQ ID NO: 1013467 - DNA, 15 bp, Homo sapiens
attaaagtttgacat

SEQ ID NO: 1013468 - DNA, 15 bp, Homo sapiens
ttaaagtttgacatc

SEQ ID NO: 1013469 - DNA, 15 bp, Homo sapiens
taaagtttgacatct

SEQ ID NO: 1013470 - DNA, 15 bp, Homo sapiens
aaagtttgacatcta

SEQ ID NO: 1013471 - DNA, 15 bp, Homo sapiens
aagtttgacatctac

SEQ ID NO: 1013472 - DNA, 15 bp, Homo sapiens
agtttgacatctacg

SEQ ID NO: 1013473 - DNA, 15 bp, Homo sapiens
gtttgacatctacgg

SEQ ID NO: 1013474 - DNA, 15 bp, Homo sapiens
tttgacatctacgga

SEQ ID NO: 1013475 - DNA, 15 bp, Homo sapiens
ttgacatctacggag

SEQ ID NO: 1013476 - DNA, 15 bp, Homo sapiens
tgacatctacggagc

SEQ ID NO: 1013477 - DNA, 15 bp, Homo sapiens
gacatctacggagct

SEQ ID NO: 1013478 - DNA, 15 bp, Homo sapiens
acatctacggagcta

SEQ ID NO: 1013479 - DNA, 15 bp, Homo sapiens
catctacggagctag

SEQ ID NO: 1013480 - DNA, 15 bp, Homo sapiens
atctacggagctaga

SEQ ID NO: 1013481 - DNA, 15 bp, Homo sapiens
tctacggagctagac

SEQ ID NO: 1013482 - DNA, 15 bp, Homo sapiens
ctacggagctagaca

SEQ ID NO: 1013483 - DNA, 15 bp, Homo sapiens
tacggagctagacaa

SEQ ID NO: 1013484 - DNA, 15 bp, Homo sapiens
acggagctagacaag

SEQ ID NO: 1013485 - DNA, 15 bp, Homo sapiens
cggagctagacaagg

SEQ ID NO: 1013486 - DNA, 15 bp, Homo sapiens
ggagctagacaaggg

SEQ ID NO: 1013487 - DNA, 15 bp, Homo sapiens
gagctagacaaggga

SEQ ID NO: 1013488 - DNA, 15 bp, Homo sapiens
agctagacaagggag

SEQ ID NO: 1013489 - DNA, 15 bp, Homo sapiens
gctagacaagggagt

SEQ ID NO: 1013490 - DNA, 15 bp, Homo sapiens
ctagacaagggagta

SEQ ID NO: 1013491 - DNA, 15 bp, Homo sapiens
tagacaagggagtaa

SEQ ID NO: 1013492 - DNA, 15 bp, Homo sapiens
agacaagggagtaat

SEQ ID NO: 1013493 - DNA, 15 bp, Homo sapiens
gacaagggagtaata

SEQ ID NO: 1013494 - DNA, 15 bp, Homo sapiens
acaagggagtaatac

SEQ ID NO: 1013495 - DNA, 15 bp, Homo sapiens
caagggagtaataca

SEQ ID NO: 1013496 - DNA, 15 bp, Homo sapiens
aagggagtaatacaa

SEQ ID NO: 1013497 - DNA, 15 bp, Homo sapiens
agggagtaatacaaa

SEQ ID NO: 1013498 - DNA, 15 bp, Homo sapiens
gggagtaatacaaag

SEQ ID NO: 1013499 - DNA, 15 bp, Homo sapiens
ggagtaatacaaaga

SEQ ID NO: 1013500 - DNA, 15 bp, Homo sapiens
gagtaatacaaagaa

SEQ ID NO: 1013501 - DNA, 15 bp, Homo sapiens
agtaatacaaagaaa

SEQ ID NO: 1013502 - DNA, 15 bp, Homo sapiens
gtaatacaaagaaac

SEQ ID NO: 1013503 - DNA, 15 bp, Homo sapiens
taatacaaagaaact

SEQ ID NO: 1013504 - DNA, 15 bp, Homo sapiens
aatacaaagaaactc

SEQ ID NO: 1013505 - DNA, 15 bp, Homo sapiens
atacaaagaaactcc

SEQ ID NO: 1013506 - DNA, 15 bp, Homo sapiens
tacaaagaaactccc

SEQ ID NO: 1013507 - DNA, 15 bp, Homo sapiens
acaaagaaactcccc

SEQ ID NO: 1013508 - DNA, 15 bp, Homo sapiens
caaagaaactcccca

SEQ ID NO: 1013509 - DNA, 15 bp, Homo sapiens
aaagaaactccccaa

SEQ ID NO: 1013510 - DNA, 15 bp, Homo sapiens
aagaaactccccaag

SEQ ID NO: 1013511 - DNA, 15 bp, Homo sapiens
agaaactccccaagc

SEQ ID NO: 1013512 - DNA, 15 bp, Homo sapiens
gaaactccccaagca

SEQ ID NO: 1013513 - DNA, 15 bp, Homo sapiens
aaactccccaagcag

SEQ ID NO: 1013514 - DNA, 15 bp, Homo sapiens
aactccccaagcaga

SEQ ID NO: 1013515 - DNA, 15 bp, Homo sapiens
actccccaagcagat

SEQ ID NO: 1013516 - DNA, 15 bp, Homo sapiens
ctccccaagcagatg

SEQ ID NO: 1013517 - DNA, 15 bp, Homo sapiens
tccccaagcagatga

SEQ ID NO: 1013518 - DNA, 15 bp, Homo sapiens
ccccaagcagatgag

SEQ ID NO: 1013519 - DNA, 15 bp, Homo sapiens
cccaagcagatgagt

SEQ ID NO: 1013520 - DNA, 15 bp, Homo sapiens
ccaagcagatgagta

SEQ ID NO: 1013521 - DNA, 15 bp, Homo sapiens
caagcagatgagtag

SEQ ID NO: 1013522 - DNA, 15 bp, Homo sapiens
aagcagatgagtaga

SEQ ID NO: 1013523 - DNA, 15 bp, Homo sapiens
agcagatgagtagat

SEQ ID NO: 1013524 - DNA, 15 bp, Homo sapiens
gcagatgagtagata

SEQ ID NO: 1013525 - DNA, 15 bp, Homo sapiens
cagatgagtagatat

SEQ ID NO: 1013526 - DNA, 15 bp, Homo sapiens
agatgagtagatatt

SEQ ID NO: 1013527 - DNA, 15 bp, Homo sapiens
gatgagtagatattt

SEQ ID NO: 1013528 - DNA, 15 bp, Homo sapiens
atgagtagatatttg

SEQ ID NO: 1013529 - DNA, 15 bp, Homo sapiens
tgagtagatatttga

SEQ ID NO: 1013530 - DNA, 15 bp, Homo sapiens
gagtagatatttgaa

SEQ ID NO: 1013531 - DNA, 15 bp, Homo sapiens
agtagatatttgaac

SEQ ID NO: 1013532 - DNA, 15 bp, Homo sapiens
gtagatatttgaact

SEQ ID NO: 1013533 - DNA, 15 bp, Homo sapiens
tagatatttgaacta

SEQ ID NO: 1013534 - DNA, 15 bp, Homo sapiens
agatatttgaactat

SEQ ID NO: 1013535 - DNA, 15 bp, Homo sapiens
gatatttgaactatc

SEQ ID NO: 1013536 - DNA, 15 bp, Homo sapiens
atatttgaactatct

SEQ ID NO: 1013537 - DNA, 15 bp, Homo sapiens
tatttgaactatctt

SEQ ID NO: 1013538 - DNA, 15 bp, Homo sapiens
atttgaactatcttg

SEQ ID NO: 1013539 - DNA, 15 bp, Homo sapiens
tttgaactatcttgc

SEQ ID NO: 1013540 - DNA, 15 bp, Homo sapiens
ttgaactatcttgct

SEQ ID NO: 1013541 - DNA, 15 bp, Homo sapiens
tgaactatcttgctg

SEQ ID NO: 1013542 - DNA, 15 bp, Homo sapiens
gaactatcttgctgt

SEQ ID NO: 1013543 - DNA, 15 bp, Homo sapiens
aactatcttgctgtc

SEQ ID NO: 1013544 - DNA, 15 bp, Homo sapiens
actatcttgctgtca

SEQ ID NO: 1013545 - DNA, 15 bp, Homo sapiens
ctatcttgctgtcaa

SEQ ID NO: 1013546 - DNA, 15 bp, Homo sapiens
tatcttgctgtcaaa

SEQ ID NO: 1013547 - DNA, 15 bp, Homo sapiens
atcttgctgtcaaaa

SEQ ID NO: 1013548 - DNA, 15 bp, Homo sapiens
tcttgctgtcaaaat

SEQ ID NO: 1013549 - DNA, 15 bp, Homo sapiens
cttgctgtcaaaata

SEQ ID NO: 1013550 - DNA, 15 bp, Homo sapiens
ttgctgtcaaaataa

SEQ ID NO: 1013551 - DNA, 15 bp, Homo sapiens
tgctgtcaaaataac

SEQ ID NO: 1013552 - DNA, 15 bp, Homo sapiens
gctgtcaaaataact

SEQ ID NO: 1013553 - DNA, 15 bp, Homo sapiens
ctgtcaaaataacta

SEQ ID NO: 1013554 - DNA, 15 bp, Homo sapiens
tgtcaaaataactat

SEQ ID NO: 1013555 - DNA, 15 bp, Homo sapiens
gtcaaaataactata

SEQ ID NO: 1013556 - DNA, 15 bp, Homo sapiens
tcaaaataactataa

SEQ ID NO: 1013557 - DNA, 15 bp, Homo sapiens
caaaataactataaa

SEQ ID NO: 1013558 - DNA, 15 bp, Homo sapiens
aaaataactataaaa

SEQ ID NO: 1013559 - DNA, 15 bp, Homo sapiens
aaataactataaaat

SEQ ID NO: 1013560 - DNA, 15 bp, Homo sapiens
aataactataaaatt

SEQ ID NO: 1013561 - DNA, 15 bp, Homo sapiens
ataactataaaattt

SEQ ID NO: 1013562 - DNA, 15 bp, Homo sapiens
taactataaaatttc

SEQ ID NO: 1013563 - DNA, 15 bp, Homo sapiens
aactataaaatttca

SEQ ID NO: 1013564 - DNA, 15 bp, Homo sapiens
actataaaatttcaa

SEQ ID NO: 1013565 - DNA, 15 bp, Homo sapiens
ctataaaatttcaag

SEQ ID NO: 1013566 - DNA, 15 bp, Homo sapiens
tataaaatttcaaga

SEQ ID NO: 1013567 - DNA, 15 bp, Homo sapiens
ataaaatttcaagat

SEQ ID NO: 1013568 - DNA, 15 bp, Homo sapiens
taaaatttcaagatg

SEQ ID NO: 1013569 - DNA, 15 bp, Homo sapiens
aaaatttcaagatgt

SEQ ID NO: 1013570 - DNA, 15 bp, Homo sapiens
aaatttcaagatgtt

SEQ ID NO: 1013571 - DNA, 15 bp, Homo sapiens
aatttcaagatgttg

SEQ ID NO: 1013572 - DNA, 15 bp, Homo sapiens
atttcaagatgttga

SEQ ID NO: 1013573 - DNA, 15 bp, Homo sapiens
tttcaagatgttgaa

SEQ ID NO: 1013574 - DNA, 15 bp, Homo sapiens
ttcaagatgttgaat

SEQ ID NO: 1013575 - DNA, 15 bp, Homo sapiens
tcaagatgttgaatg

SEQ ID NO: 1013576 - DNA, 15 bp, Homo sapiens
caagatgttgaatgg

SEQ ID NO: 1013577 - DNA, 15 bp, Homo sapiens
aagatgttgaatggg

SEQ ID NO: 1013578 - DNA, 15 bp, Homo sapiens
agatgttgaatgggg

SEQ ID NO: 1013579 - DNA, 15 bp, Homo sapiens
gatgttgaatggggg

SEQ ID NO: 1013580 - DNA, 15 bp, Homo sapiens
atgttgaatggggga

SEQ ID NO: 1013581 - DNA, 15 bp, Homo sapiens
tgttgaatgggggat

SEQ ID NO: 1013582 - DNA, 15 bp, Homo sapiens
gttgaatgggggata

SEQ ID NO: 1013583 - DNA, 15 bp, Homo sapiens
ttgaatgggggatag

SEQ ID NO: 1013584 - DNA, 15 bp, Homo sapiens
tgaatgggggatagg

SEQ ID NO: 1013585 - DNA, 15 bp, Homo sapiens
gaatgggggataggt

SEQ ID NO: 1013586 - DNA, 15 bp, Homo sapiens
aatgggggataggta

SEQ ID NO: 1013587 - DNA, 15 bp, Homo sapiens
atgggggataggtag

SEQ ID NO: 1013588 - DNA, 15 bp, Homo sapiens
tgggggataggtaga

SEQ ID NO: 1013589 - DNA, 15 bp, Homo sapiens
gggggataggtagac

SEQ ID NO: 1013590 - DNA, 15 bp, Homo sapiens
ggggataggtagaca

SEQ ID NO: 1013591 - DNA, 15 bp, Homo sapiens
gggataggtagacaa

SEQ ID NO: 1013592 - DNA, 15 bp, Homo sapiens
ggataggtagacaat

SEQ ID NO: 1013593 - DNA, 15 bp, Homo sapiens
gataggtagacaatt

SEQ ID NO: 1013594 - DNA, 15 bp, Homo sapiens
ataggtagacaattc

SEQ ID NO: 1013595 - DNA, 15 bp, Homo sapiens
taggtagacaattct

SEQ ID NO: 1013596 - DNA, 15 bp, Homo sapiens
aggtagacaattctt

SEQ ID NO: 1013597 - DNA, 15 bp, Homo sapiens
ggtagacaattcttt

SEQ ID NO: 1013598 - DNA, 15 bp, Homo sapiens
gtagacaattcttta

SEQ ID NO: 1013599 - DNA, 15 bp, Homo sapiens
tagacaattctttaa

SEQ ID NO: 1013600 - DNA, 15 bp, Homo sapiens
agacaattctttaaa

SEQ ID NO: 1013601 - DNA, 15 bp, Homo sapiens
gacaattctttaaag

SEQ ID NO: 1013602 - DNA, 15 bp, Homo sapiens
acaattctttaaagg

SEQ ID NO: 1013603 - DNA, 15 bp, Homo sapiens
caattctttaaaggt

SEQ ID NO: 1013604 - DNA, 15 bp, Homo sapiens
aattctttaaaggtc

SEQ ID NO: 1013605 - DNA, 15 bp, Homo sapiens
attctttaaaggtct

SEQ ID NO: 1013606 - DNA, 15 bp, Homo sapiens
ttctttaaaggtctg

SEQ ID NO: 1013607 - DNA, 15 bp, Homo sapiens
tctttaaaggtctga

SEQ ID NO: 1013608 - DNA, 15 bp, Homo sapiens
ctttaaaggtctgat

SEQ ID NO: 1013609 - DNA, 15 bp, Homo sapiens
tttaaaggtctgatt

SEQ ID NO: 1013610 - DNA, 15 bp, Homo sapiens
ttaaaggtctgatta

SEQ ID NO: 1013611 - DNA, 15 bp, Homo sapiens
taaaggtctgattat

SEQ ID NO: 1013612 - DNA, 15 bp, Homo sapiens
aaaggtctgattatt

SEQ ID NO: 1013613 - DNA, 15 bp, Homo sapiens
aaggtctgattattt

SEQ ID NO: 1013614 - DNA, 15 bp, Homo sapiens
aggtctgattattta

SEQ ID NO: 1013615 - DNA, 15 bp, Homo sapiens
ggtctgattatttag

SEQ ID NO: 1013616 - DNA, 15 bp, Homo sapiens
gtctgattatttagg

SEQ ID NO: 1013617 - DNA, 15 bp, Homo sapiens
tctgattatttaggc

SEQ ID NO: 1013618 - DNA, 15 bp, Homo sapiens
ctgattatttaggca

SEQ ID NO: 1013619 - DNA, 15 bp, Homo sapiens
tgattatttaggcaa

SEQ ID NO: 1013620 - DNA, 15 bp, Homo sapiens
gattatttaggcaat

SEQ ID NO: 1013621 - DNA, 15 bp, Homo sapiens
attatttaggcaatg

SEQ ID NO: 1013622 - DNA, 15 bp, Homo sapiens
ttatttaggcaatga

SEQ ID NO: 1013623 - DNA, 15 bp, Homo sapiens
tatttaggcaatgac

SEQ ID NO: 1013624 - DNA, 15 bp, Homo sapiens
atttaggcaatgact

SEQ ID NO: 1013625 - DNA, 15 bp, Homo sapiens
tttaggcaatgactc

SEQ ID NO: 1013626 - DNA, 15 bp, Homo sapiens
ttaggcaatgactcc

SEQ ID NO: 1013627 - DNA, 15 bp, Homo sapiens
taggcaatgactcct

SEQ ID NO: 1013628 - DNA, 15 bp, Homo sapiens
aggcaatgactcctc

SEQ ID NO: 1013629 - DNA, 15 bp, Homo sapiens
ggcaatgactcctct

SEQ ID NO: 1013630 - DNA, 15 bp, Homo sapiens
gcaatgactcctctt

SEQ ID NO: 1013631 - DNA, 15 bp, Homo sapiens
caatgactcctcttg

SEQ ID NO: 1013632 - DNA, 15 bp, Homo sapiens
aatgactcctcttgt

SEQ ID NO: 1013633 - DNA, 15 bp, Homo sapiens
atgactcctcttgtg

SEQ ID NO: 1013634 - DNA, 15 bp, Homo sapiens
tgactcctcttgtgg

SEQ ID NO: 1013635 - DNA, 15 bp, Homo sapiens
gactcctcttgtggt

SEQ ID NO: 1013636 - DNA, 15 bp, Homo sapiens
actcctcttgtggtt

SEQ ID NO: 1013637 - DNA, 15 bp, Homo sapiens
ctcctcttgtggttt

SEQ ID NO: 1013638 - DNA, 15 bp, Homo sapiens
tcctcttgtggtttg

SEQ ID NO: 1013639 - DNA, 15 bp, Homo sapiens
cctcttgtggtttgg

SEQ ID NO: 1013640 - DNA, 15 bp, Homo sapiens
ctcttgtggtttgga

SEQ ID NO: 1013641 - DNA, 15 bp, Homo sapiens
tcttgtggtttggaa

SEQ ID NO: 1013642 - DNA, 15 bp, Homo sapiens
cttgtggtttggaat

SEQ ID NO: 1013643 - DNA, 15 bp, Homo sapiens
ttgtggtttggaata

SEQ ID NO: 1013644 - DNA, 15 bp, Homo sapiens
tgtggtttggaatat

SEQ ID NO: 1013645 - DNA, 15 bp, Homo sapiens
gtggtttggaatatg

SEQ ID NO: 1013646 - DNA, 15 bp, Homo sapiens
tggtttggaatatga

SEQ ID NO: 1013647 - DNA, 15 bp, Homo sapiens
ggtttggaatatgac

SEQ ID NO: 1013648 - DNA, 15 bp, Homo sapiens
gtttggaatatgaca

SEQ ID NO: 1013649 - DNA, 15 bp, Homo sapiens
tttggaatatgacat

SEQ ID NO: 1013650 - DNA, 15 bp, Homo sapiens
ttggaatatgacatg

SEQ ID NO: 1013651 - DNA, 15 bp, Homo sapiens
tggaatatgacatgt

SEQ ID NO: 1013652 - DNA, 15 bp, Homo sapiens
ggaatatgacatgtt

SEQ ID NO: 1013653 - DNA, 15 bp, Homo sapiens
gaatatgacatgttg

SEQ ID NO: 1013654 - DNA, 15 bp, Homo sapiens
aatatgacatgttga

SEQ ID NO: 1013655 - DNA, 15 bp, Homo sapiens
atatgacatgttgac

SEQ ID NO: 1013656 - DNA, 15 bp, Homo sapiens
tatgacatgttgaca

SEQ ID NO: 1013657 - DNA, 15 bp, Homo sapiens
atgacatgttgacaa

SEQ ID NO: 1013658 - DNA, 15 bp, Homo sapiens
tgacatgttgacaat

SEQ ID NO: 1013659 - DNA, 15 bp, Homo sapiens
gacatgttgacaatc

SEQ ID NO: 1013660 - DNA, 15 bp, Homo sapiens
acatgttgacaatca

SEQ ID NO: 1013661 - DNA, 15 bp, Homo sapiens
catgttgacaatcaa

SEQ ID NO: 1013662 - DNA, 15 bp, Homo sapiens
atgttgacaatcaaa

SEQ ID NO: 1013663 - DNA, 15 bp, Homo sapiens
tgttgacaatcaaaa

SEQ ID NO: 1013664 - DNA, 15 bp, Homo sapiens
gttgacaatcaaaac

SEQ ID NO: 1013665 - DNA, 15 bp, Homo sapiens
ttgacaatcaaaact

SEQ ID NO: 1013666 - DNA, 15 bp, Homo sapiens
tgacaatcaaaactt

SEQ ID NO: 1013667 - DNA, 15 bp, Homo sapiens
gacaatcaaaactta

SEQ ID NO: 1013668 - DNA, 15 bp, Homo sapiens
acaatcaaaacttag

SEQ ID NO: 1013669 - DNA, 15 bp, Homo sapiens
caatcaaaacttagt

SEQ ID NO: 1013670 - DNA, 15 bp, Homo sapiens
aatcaaaacttagtt

SEQ ID NO: 1013671 - DNA, 15 bp, Homo sapiens
atcaaaacttagttc

SEQ ID NO: 1013672 - DNA, 15 bp, Homo sapiens
tcaaaacttagttct

SEQ ID NO: 1013673 - DNA, 15 bp, Homo sapiens
caaaacttagttcta

SEQ ID NO: 1013674 - DNA, 15 bp, Homo sapiens
aaaacttagttctac

SEQ ID NO: 1013675 - DNA, 15 bp, Homo sapiens
aaacttagttctact

SEQ ID NO: 1013676 - DNA, 15 bp, Homo sapiens
aacttagttctacta

SEQ ID NO: 1013677 - DNA, 15 bp, Homo sapiens
acttagttctactac

SEQ ID NO: 1013678 - DNA, 15 bp, Homo sapiens
cttagttctactact

SEQ ID NO: 1013679 - DNA, 15 bp, Homo sapiens
ttagttctactactt

SEQ ID NO: 1013680 - DNA, 15 bp, Homo sapiens
tagttctactactta

SEQ ID NO: 1013681 - DNA, 15 bp, Homo sapiens
agttctactacttac

SEQ ID NO: 1013682 - DNA, 15 bp, Homo sapiens
gttctactacttact

SEQ ID NO: 1013683 - DNA, 15 bp, Homo sapiens
ttctactacttacta

SEQ ID NO: 1013684 - DNA, 15 bp, Homo sapiens
tctactacttactag

SEQ ID NO: 1013685 - DNA, 15 bp, Homo sapiens
ctactacttactagc

SEQ ID NO: 1013686 - DNA, 15 bp, Homo sapiens
tactacttactagcc

SEQ ID NO: 1013687 - DNA, 15 bp, Homo sapiens
actacttactagcca

SEQ ID NO: 1013688 - DNA, 15 bp, Homo sapiens
ctacttactagccat

SEQ ID NO: 1013689 - DNA, 15 bp, Homo sapiens
tacttactagccatg

SEQ ID NO: 1013690 - DNA, 15 bp, Homo sapiens
acttactagccatgt

SEQ ID NO: 1013691 - DNA, 15 bp, Homo sapiens
cttactagccatgtg

SEQ ID NO: 1013692 - DNA, 15 bp, Homo sapiens
ttactagccatgtga

SEQ ID NO: 1013693 - DNA, 15 bp, Homo sapiens
tactagccatgtgat

SEQ ID NO: 1013694 - DNA, 15 bp, Homo sapiens
actagccatgtgatc

SEQ ID NO: 1013695 - DNA, 15 bp, Homo sapiens
ctagccatgtgatct

SEQ ID NO: 1013696 - DNA, 15 bp, Homo sapiens
tagccatgtgatctt

SEQ ID NO: 1013697 - DNA, 15 bp, Homo sapiens
agccatgtgatcttc

SEQ ID NO: 1013698 - DNA, 15 bp, Homo sapiens
gccatgtgatcttca

SEQ ID NO: 1013699 - DNA, 15 bp, Homo sapiens
ccatgtgatcttcag

SEQ ID NO: 1013700 - DNA, 15 bp, Homo sapiens
catgtgatcttcagc

SEQ ID NO: 1013701 - DNA, 15 bp, Homo sapiens
atgtgatcttcagca

SEQ ID NO: 1013702 - DNA, 15 bp, Homo sapiens
tgtgatcttcagcaa

SEQ ID NO: 1013703 - DNA, 15 bp, Homo sapiens
gtgatcttcagcaat

SEQ ID NO: 1013704 - DNA, 15 bp, Homo sapiens
tgatcttcagcaatt

SEQ ID NO: 1013705 - DNA, 15 bp, Homo sapiens
gatcttcagcaattt

SEQ ID NO: 1013706 - DNA, 15 bp, Homo sapiens
atcttcagcaattta

SEQ ID NO: 1013707 - DNA, 15 bp, Homo sapiens
tcttcagcaatttac

SEQ ID NO: 1013708 - DNA, 15 bp, Homo sapiens
cttcagcaatttact

SEQ ID NO: 1013709 - DNA, 15 bp, Homo sapiens
ttcagcaatttactt

SEQ ID NO: 1013710 - DNA, 15 bp, Homo sapiens
tcagcaatttactta

SEQ ID NO: 1013711 - DNA, 15 bp, Homo sapiens
cagcaatttacttaa

SEQ ID NO: 1013712 - DNA, 15 bp, Homo sapiens
agcaatttacttaac

SEQ ID NO: 1013713 - DNA, 15 bp, Homo sapiens
gcaatttacttaacc

SEQ ID NO: 1013714 - DNA, 15 bp, Homo sapiens
caatttacttaacct

SEQ ID NO: 1013715 - DNA, 15 bp, Homo sapiens
aatttacttaacctt

SEQ ID NO: 1013716 - DNA, 15 bp, Homo sapiens
atttacttaaccttt

SEQ ID NO: 1013717 - DNA, 15 bp, Homo sapiens
tttacttaacctttc

SEQ ID NO: 1013718 - DNA, 15 bp, Homo sapiens
ttacttaacctttct

SEQ ID NO: 1013719 - DNA, 15 bp, Homo sapiens
tacttaacctttctg

SEQ ID NO: 1013720 - DNA, 15 bp, Homo sapiens
acttaacctttctgg

SEQ ID NO: 1013721 - DNA, 15 bp, Homo sapiens
cttaacctttctggg

SEQ ID NO: 1013722 - DNA, 15 bp, Homo sapiens
ttaacctttctgggc

SEQ ID NO: 1013723 - DNA, 15 bp, Homo sapiens
taacctttctgggct

SEQ ID NO: 1013724 - DNA, 15 bp, Homo sapiens
aacctttctgggctt

SEQ ID NO: 1013725 - DNA, 15 bp, Homo sapiens
acctttctgggcttc

SEQ ID NO: 1013726 - DNA, 15 bp, Homo sapiens
cctttctgggcttcg

SEQ ID NO: 1013727 - DNA, 15 bp, Homo sapiens
ctttctgggcttcgg

SEQ ID NO: 1013728 - DNA, 15 bp, Homo sapiens
tttctgggcttcggt

SEQ ID NO: 1013729 - DNA, 15 bp, Homo sapiens
ttctgggcttcggtt

SEQ ID NO: 1013730 - DNA, 15 bp, Homo sapiens
tctgggcttcggttt

SEQ ID NO: 1013731 - DNA, 15 bp, Homo sapiens
ctgggcttcggtttc

SEQ ID NO: 1013732 - DNA, 15 bp, Homo sapiens
tgggcttcggtttcc

SEQ ID NO: 1013733 - DNA, 15 bp, Homo sapiens
gggcttcggtttcct

SEQ ID NO: 1013734 - DNA, 15 bp, Homo sapiens
ggcttcggtttcctc

SEQ ID NO: 1013735 - DNA, 15 bp, Homo sapiens
gcttcggtttcctca

SEQ ID NO: 1013736 - DNA, 15 bp, Homo sapiens
cttcggtttcctcat

SEQ ID NO: 1013737 - DNA, 15 bp, Homo sapiens
ttcggtttcctcatc

SEQ ID NO: 1013738 - DNA, 15 bp, Homo sapiens
tcggtttcctcatct

SEQ ID NO: 1013739 - DNA, 15 bp, Homo sapiens
cggtttcctcatcta

SEQ ID NO: 1013740 - DNA, 15 bp, Homo sapiens
ggtttcctcatctat

SEQ ID NO: 1013741 - DNA, 15 bp, Homo sapiens
gtttcctcatctata

SEQ ID NO: 1013742 - DNA, 15 bp, Homo sapiens
tttcctcatctataa

SEQ ID NO: 1013743 - DNA, 15 bp, Homo sapiens
ttcctcatctataaa

SEQ ID NO: 1013744 - DNA, 15 bp, Homo sapiens
tcctcatctataaaa

SEQ ID NO: 1013745 - DNA, 15 bp, Homo sapiens
cctcatctataaaaa

SEQ ID NO: 1013746 - DNA, 15 bp, Homo sapiens
ctcatctataaaaat

SEQ ID NO: 1013747 - DNA, 15 bp, Homo sapiens
tcatctataaaaata

SEQ ID NO: 1013748 - DNA, 15 bp, Homo sapiens
catctataaaaatag

SEQ ID NO: 1013749 - DNA, 15 bp, Homo sapiens
atctataaaaatagg

SEQ ID NO: 1013750 - DNA, 15 bp, Homo sapiens
tctataaaaataggg

SEQ ID NO: 1013751 - DNA, 15 bp, Homo sapiens
ctataaaaataggga

SEQ ID NO: 1013752 - DNA, 15 bp, Homo sapiens
tataaaaatagggaa

SEQ ID NO: 1013753 - DNA, 15 bp, Homo sapiens
ataaaaatagggaat

SEQ ID NO: 1013754 - DNA, 15 bp, Homo sapiens
taaaaatagggaata

SEQ ID NO: 1013755 - DNA, 15 bp, Homo sapiens
aaaaatagggaatat

SEQ ID NO: 1013756 - DNA, 15 bp, Homo sapiens
aaaatagggaatata

SEQ ID NO: 1013757 - DNA, 15 bp, Homo sapiens
aaatagggaatatat

SEQ ID NO: 1013758 - DNA, 15 bp, Homo sapiens
aatagggaatatatt

SEQ ID NO: 1013759 - DNA, 15 bp, Homo sapiens
atagggaatatatta

SEQ ID NO: 1013760 - DNA, 15 bp, Homo sapiens
tagggaatatattac

SEQ ID NO: 1013761 - DNA, 15 bp, Homo sapiens
agggaatatattacc

SEQ ID NO: 1013762 - DNA, 15 bp, Homo sapiens
gggaatatattacct

SEQ ID NO: 1013763 - DNA, 15 bp, Homo sapiens
ggaatatattacctt

SEQ ID NO: 1013764 - DNA, 15 bp, Homo sapiens
gaatatattaccttt

SEQ ID NO: 1013765 - DNA, 15 bp, Homo sapiens
aatatattacctttc

SEQ ID NO: 1013766 - DNA, 15 bp, Homo sapiens
atatattacctttct

SEQ ID NO: 1013767 - DNA, 15 bp, Homo sapiens
tatattacctttctc

SEQ ID NO: 1013768 - DNA, 15 bp, Homo sapiens
atattacctttctct

SEQ ID NO: 1013769 - DNA, 15 bp, Homo sapiens
tattacctttctctt

SEQ ID NO: 1013770 - DNA, 15 bp, Homo sapiens
attacctttctcttg

SEQ ID NO: 1013771 - DNA, 15 bp, Homo sapiens
ttacctttctcttgt

SEQ ID NO: 1013772 - DNA, 15 bp, Homo sapiens
tacctttctcttgta

SEQ ID NO: 1013773 - DNA, 15 bp, Homo sapiens
acctttctcttgtaa

SEQ ID NO: 1013774 - DNA, 15 bp, Homo sapiens
cctttctcttgtaat

SEQ ID NO: 1013775 - DNA, 15 bp, Homo sapiens
ctttctcttgtaata

SEQ ID NO: 1013776 - DNA, 15 bp, Homo sapiens
tttctcttgtaatat

SEQ ID NO: 1013777 - DNA, 15 bp, Homo sapiens
ttctcttgtaatatg

SEQ ID NO: 1013778 - DNA, 15 bp, Homo sapiens
tctcttgtaatatga

SEQ ID NO: 1013779 - DNA, 15 bp, Homo sapiens
ctcttgtaatatgaa

SEQ ID NO: 1013780 - DNA, 15 bp, Homo sapiens
tcttgtaatatgaat

SEQ ID NO: 1013781 - DNA, 15 bp, Homo sapiens
cttgtaatatgaatg

SEQ ID NO: 1013782 - DNA, 15 bp, Homo sapiens
ttgtaatatgaatgc

SEQ ID NO: 1013783 - DNA, 15 bp, Homo sapiens
tgtaatatgaatgcc

SEQ ID NO: 1013784 - DNA, 15 bp, Homo sapiens
gtaatatgaatgcca

SEQ ID NO: 1013785 - DNA, 15 bp, Homo sapiens
taatatgaatgccaa

SEQ ID NO: 1013786 - DNA, 15 bp, Homo sapiens
aatatgaatgccaaa

SEQ ID NO: 1013787 - DNA, 15 bp, Homo sapiens
atatgaatgccaaaa

SEQ ID NO: 1013788 - DNA, 15 bp, Homo sapiens
tatgaatgccaaaat

SEQ ID NO: 1013789 - DNA, 15 bp, Homo sapiens
atgaatgccaaaatg

SEQ ID NO: 1013790 - DNA, 15 bp, Homo sapiens
tgaatgccaaaatgc

SEQ ID NO: 1013791 - DNA, 15 bp, Homo sapiens
gaatgccaaaatgcc

SEQ ID NO: 1013792 - DNA, 15 bp, Homo sapiens
aatgccaaaatgcct

SEQ ID NO: 1013793 - DNA, 15 bp, Homo sapiens
atgccaaaatgcctg

SEQ ID NO: 1013794 - DNA, 15 bp, Homo sapiens
tgccaaaatgcctgg

SEQ ID NO: 1013795 - DNA, 15 bp, Homo sapiens
gccaaaatgcctgga

SEQ ID NO: 1013796 - DNA, 15 bp, Homo sapiens
ccaaaatgcctggaa

SEQ ID NO: 1013797 - DNA, 15 bp, Homo sapiens
caaaatgcctggaat

SEQ ID NO: 1013798 - DNA, 15 bp, Homo sapiens
aaaatgcctggaatg

SEQ ID NO: 1013799 - DNA, 15 bp, Homo sapiens
aaatgcctggaatgt

SEQ ID NO: 1013800 - DNA, 15 bp, Homo sapiens
aatgcctggaatgta

SEQ ID NO: 1013801 - DNA, 15 bp, Homo sapiens
atgcctggaatgtat

SEQ ID NO: 1013802 - DNA, 15 bp, Homo sapiens
tgcctggaatgtatc

SEQ ID NO: 1013803 - DNA, 15 bp, Homo sapiens
gcctggaatgtatct

SEQ ID NO: 1013804 - DNA, 15 bp, Homo sapiens
cctggaatgtatctt

SEQ ID NO: 1013805 - DNA, 15 bp, Homo sapiens
ctggaatgtatcttg

SEQ ID NO: 1013806 - DNA, 15 bp, Homo sapiens
tggaatgtatcttgc

SEQ ID NO: 1013807 - DNA, 15 bp, Homo sapiens
ggaatgtatcttgcc

SEQ ID NO: 1013808 - DNA, 15 bp, Homo sapiens
gaatgtatcttgcca

SEQ ID NO: 1013809 - DNA, 15 bp, Homo sapiens
aatgtatcttgccag

SEQ ID NO: 1013810 - DNA, 15 bp, Homo sapiens
atgtatcttgccaga

SEQ ID NO: 1013811 - DNA, 15 bp, Homo sapiens
tgtatcttgccagaa

SEQ ID NO: 1013812 - DNA, 15 bp, Homo sapiens
gtatcttgccagaag

SEQ ID NO: 1013813 - DNA, 15 bp, Homo sapiens
tatcttgccagaagg

SEQ ID NO: 1013814 - DNA, 15 bp, Homo sapiens
atcttgccagaagga

SEQ ID NO: 1013815 - DNA, 15 bp, Homo sapiens
tcttgccagaaggaa

SEQ ID NO: 1013816 - DNA, 15 bp, Homo sapiens
cttgccagaaggaag

SEQ ID NO: 1013817 - DNA, 15 bp, Homo sapiens
ttgccagaaggaagg

SEQ ID NO: 1013818 - DNA, 15 bp, Homo sapiens
tgccagaaggaaggg

SEQ ID NO: 1013819 - DNA, 15 bp, Homo sapiens
gccagaaggaagggt

SEQ ID NO: 1013820 - DNA, 15 bp, Homo sapiens
ccagaaggaagggtc

SEQ ID NO: 1013821 - DNA, 15 bp, Homo sapiens
cagaaggaagggtcc

SEQ ID NO: 1013822 - DNA, 15 bp, Homo sapiens
agaaggaagggtcca

SEQ ID NO: 1013823 - DNA, 15 bp, Homo sapiens
gaaggaagggtccag

SEQ ID NO: 1013824 - DNA, 15 bp, Homo sapiens
aaggaagggtccagc

SEQ ID NO: 1013825 - DNA, 15 bp, Homo sapiens
aggaagggtccagcc

SEQ ID NO: 1013826 - DNA, 15 bp, Homo sapiens
ggaagggtccagcca

SEQ ID NO: 1013827 - DNA, 15 bp, Homo sapiens
gaagggtccagccaa

SEQ ID NO: 1013828 - DNA, 15 bp, Homo sapiens
aagggtccagccaag

SEQ ID NO: 1013829 - DNA, 15 bp, Homo sapiens
agggtccagccaaga

SEQ ID NO: 1013830 - DNA, 15 bp, Homo sapiens
gggtccagccaagac

SEQ ID NO: 1013831 - DNA, 15 bp, Homo sapiens
ggtccagccaagact

SEQ ID NO: 1013832 - DNA, 15 bp, Homo sapiens
gtccagccaagacta

SEQ ID NO: 1013833 - DNA, 15 bp, Homo sapiens
tccagccaagactat

SEQ ID NO: 1013834 - DNA, 15 bp, Homo sapiens
ccagccaagactatt

SEQ ID NO: 1013835 - DNA, 15 bp, Homo sapiens
cagccaagactattc

SEQ ID NO: 1013836 - DNA, 15 bp, Homo sapiens
agccaagactattcc

SEQ ID NO: 1013837 - DNA, 15 bp, Homo sapiens
gccaagactattcct

SEQ ID NO: 1013838 - DNA, 15 bp, Homo sapiens
ccaagactattcctt

SEQ ID NO: 1013839 - DNA, 15 bp, Homo sapiens
caagactattccttt

SEQ ID NO: 1013840 - DNA, 15 bp, Homo sapiens
aagactattccttta

SEQ ID NO: 1013841 - DNA, 15 bp, Homo sapiens
agactattcctttat

SEQ ID NO: 1013842 - DNA, 15 bp, Homo sapiens
gactattcctttatc

SEQ ID NO: 1013843 - DNA, 15 bp, Homo sapiens
actattcctttatct

SEQ ID NO: 1013844 - DNA, 15 bp, Homo sapiens
ctattcctttatcta

SEQ ID NO: 1013845 - DNA, 15 bp, Homo sapiens
tattcctttatctaa

SEQ ID NO: 1013846 - DNA, 15 bp, Homo sapiens
attcctttatctaag

SEQ ID NO: 1013847 - DNA, 15 bp, Homo sapiens
ttcctttatctaaga

SEQ ID NO: 1013848 - DNA, 15 bp, Homo sapiens
tcctttatctaagag

SEQ ID NO: 1013849 - DNA, 15 bp, Homo sapiens
cctttatctaagagt

SEQ ID NO: 1013850 - DNA, 15 bp, Homo sapiens
ctttatctaagagtg

SEQ ID NO: 1013851 - DNA, 15 bp, Homo sapiens
tttatctaagagtgt

SEQ ID NO: 1013852 - DNA, 15 bp, Homo sapiens
ttatctaagagtgtt

SEQ ID NO: 1013853 - DNA, 15 bp, Homo sapiens
tatctaagagtgttc

SEQ ID NO: 1013854 - DNA, 15 bp, Homo sapiens
atctaagagtgttcc

SEQ ID NO: 1013855 - DNA, 15 bp, Homo sapiens
tctaagagtgttccc

SEQ ID NO: 1013856 - DNA, 15 bp, Homo sapiens
ctaagagtgttcccc

SEQ ID NO: 1013857 - DNA, 15 bp, Homo sapiens
taagagtgttcccca

SEQ ID NO: 1013858 - DNA, 15 bp, Homo sapiens
aagagtgttccccaa

SEQ ID NO: 1013859 - DNA, 15 bp, Homo sapiens
agagtgttccccaag

SEQ ID NO: 1013860 - DNA, 15 bp, Homo sapiens
gagtgttccccaagc

SEQ ID NO: 1013861 - DNA, 15 bp, Homo sapiens
agtgttccccaagct

SEQ ID NO: 1013862 - DNA, 15 bp, Homo sapiens
gtgttccccaagctt

SEQ ID NO: 1013863 - DNA, 15 bp, Homo sapiens
tgttccccaagcttt

SEQ ID NO: 1013864 - DNA, 15 bp, Homo sapiens
gttccccaagctttg

SEQ ID NO: 1013865 - DNA, 15 bp, Homo sapiens
ttccccaagctttgg

SEQ ID NO: 1013866 - DNA, 15 bp, Homo sapiens
tccccaagctttggt

SEQ ID NO: 1013867 - DNA, 15 bp, Homo sapiens
ccccaagctttggtc

SEQ ID NO: 1013868 - DNA, 15 bp, Homo sapiens
cccaagctttggtct

SEQ ID NO: 1013869 - DNA, 15 bp, Homo sapiens
ccaagctttggtctc

SEQ ID NO: 1013870 - DNA, 15 bp, Homo sapiens
caagctttggtctca

SEQ ID NO: 1013871 - DNA, 15 bp, Homo sapiens
aagctttggtctcaa

SEQ ID NO: 1013872 - DNA, 15 bp, Homo sapiens
agctttggtctcaaa

SEQ ID NO: 1013873 - DNA, 15 bp, Homo sapiens
gctttggtctcaaaa

SEQ ID NO: 1013874 - DNA, 15 bp, Homo sapiens
ctttggtctcaaaag

SEQ ID NO: 1013875 - DNA, 15 bp, Homo sapiens
tttggtctcaaaagg

SEQ ID NO: 1013876 - DNA, 15 bp, Homo sapiens
ttggtctcaaaaggc

SEQ ID NO: 1013877 - DNA, 15 bp, Homo sapiens
tggtctcaaaaggcc

SEQ ID NO: 1013878 - DNA, 15 bp, Homo sapiens
ggtctcaaaaggccc

SEQ ID NO: 1013879 - DNA, 15 bp, Homo sapiens
gtctcaaaaggccca

SEQ ID NO: 1013880 - DNA, 15 bp, Homo sapiens
tctcaaaaggcccag

SEQ ID NO: 1013881 - DNA, 15 bp, Homo sapiens
ctcaaaaggcccagg

SEQ ID NO: 1013882 - DNA, 15 bp, Homo sapiens
tcaaaaggcccaggc

SEQ ID NO: 1013883 - DNA, 15 bp, Homo sapiens
caaaaggcccaggct

SEQ ID NO: 1013884 - DNA, 15 bp, Homo sapiens
aaaaggcccaggcta

SEQ ID NO: 1013885 - DNA, 15 bp, Homo sapiens
aaaggcccaggctaa

SEQ ID NO: 1013886 - DNA, 15 bp, Homo sapiens
aaggcccaggctaat

SEQ ID NO: 1013887 - DNA, 15 bp, Homo sapiens
aggcccaggctaatg

SEQ ID NO: 1013888 - DNA, 15 bp, Homo sapiens
ggcccaggctaatgc

SEQ ID NO: 1013889 - DNA, 15 bp, Homo sapiens
gcccaggctaatgca

SEQ ID NO: 1013890 - DNA, 15 bp, Homo sapiens
cccaggctaatgcat

SEQ ID NO: 1013891 - DNA, 15 bp, Homo sapiens
ccaggctaatgcatt

SEQ ID NO: 1013892 - DNA, 15 bp, Homo sapiens
caggctaatgcattt

SEQ ID NO: 1013893 - DNA, 15 bp, Homo sapiens
aggctaatgcatttc

SEQ ID NO: 1013894 - DNA, 15 bp, Homo sapiens
ggctaatgcatttct

SEQ ID NO: 1013895 - DNA, 15 bp, Homo sapiens
gctaatgcatttctt

SEQ ID NO: 1013896 - DNA, 15 bp, Homo sapiens
ctaatgcatttctta

SEQ ID NO: 1013897 - DNA, 15 bp, Homo sapiens
taatgcatttcttac

SEQ ID NO: 1013898 - DNA, 15 bp, Homo sapiens
aatgcatttcttact

SEQ ID NO: 1013899 - DNA, 15 bp, Homo sapiens
atgcatttcttacta

SEQ ID NO: 1013900 - DNA, 15 bp, Homo sapiens
tgcatttcttactat

SEQ ID NO: 1013901 - DNA, 15 bp, Homo sapiens
gcatttcttactatt

SEQ ID NO: 1013902 - DNA, 15 bp, Homo sapiens
catttcttactattg

SEQ ID NO: 1013903 - DNA, 15 bp, Homo sapiens
atttcttactattgg

SEQ ID NO: 1013904 - DNA, 15 bp, Homo sapiens
tttcttactattggt

SEQ ID NO: 1013905 - DNA, 15 bp, Homo sapiens
ttcttactattggtc

SEQ ID NO: 1013906 - DNA, 15 bp, Homo sapiens
tcttactattggtct

SEQ ID NO: 1013907 - DNA, 15 bp, Homo sapiens
cttactattggtctg

SEQ ID NO: 1013908 - DNA, 15 bp, Homo sapiens
ttactattggtctga

SEQ ID NO: 1013909 - DNA, 15 bp, Homo sapiens
tactattggtctgaa

SEQ ID NO: 1013910 - DNA, 15 bp, Homo sapiens
actattggtctgaaa

SEQ ID NO: 1013911 - DNA, 15 bp, Homo sapiens
ctattggtctgaaat

SEQ ID NO: 1013912 - DNA, 15 bp, Homo sapiens
tattggtctgaaatt

SEQ ID NO: 1013913 - DNA, 15 bp, Homo sapiens
attggtctgaaattc

SEQ ID NO: 1013914 - DNA, 15 bp, Homo sapiens
ttggtctgaaattct

SEQ ID NO: 1013915 - DNA, 15 bp, Homo sapiens
tggtctgaaattcta

SEQ ID NO: 1013916 - DNA, 15 bp, Homo sapiens
ggtctgaaattctat

SEQ ID NO: 1013917 - DNA, 15 bp, Homo sapiens
gtctgaaattctatg

SEQ ID NO: 1013918 - DNA, 15 bp, Homo sapiens
tctgaaattctatgt

SEQ ID NO: 1013919 - DNA, 15 bp, Homo sapiens
ctgaaattctatgtt

SEQ ID NO: 1013920 - DNA, 15 bp, Homo sapiens
tgaaattctatgttc

SEQ ID NO: 1013921 - DNA, 15 bp, Homo sapiens
gaaattctatgttct

SEQ ID NO: 1013922 - DNA, 15 bp, Homo sapiens
aaattctatgttctc

SEQ ID NO: 1013923 - DNA, 15 bp, Homo sapiens
aattctatgttctcc

SEQ ID NO: 1013924 - DNA, 15 bp, Homo sapiens
attctatgttctcct

SEQ ID NO: 1013925 - DNA, 15 bp, Homo sapiens
ttctatgttctccta

SEQ ID NO: 1013926 - DNA, 15 bp, Homo sapiens
tctatgttctcctaa

SEQ ID NO: 1013927 - DNA, 15 bp, Homo sapiens
ctatgttctcctaag

SEQ ID NO: 1013928 - DNA, 15 bp, Homo sapiens
tatgttctcctaaga

SEQ ID NO: 1013929 - DNA, 15 bp, Homo sapiens
atgttctcctaagac

SEQ ID NO: 1013930 - DNA, 15 bp, Homo sapiens
tgttctcctaagaca

SEQ ID NO: 1013931 - DNA, 15 bp, Homo sapiens
gttctcctaagacat

SEQ ID NO: 1013932 - DNA, 15 bp, Homo sapiens
ttctcctaagacata

SEQ ID NO: 1013933 - DNA, 15 bp, Homo sapiens
tctcctaagacatag

SEQ ID NO: 1013934 - DNA, 15 bp, Homo sapiens
ctcctaagacatagt

SEQ ID NO: 1013935 - DNA, 15 bp, Homo sapiens
tcctaagacatagtt

SEQ ID NO: 1013936 - DNA, 15 bp, Homo sapiens
cctaagacatagttt

SEQ ID NO: 1013937 - DNA, 15 bp, Homo sapiens
ctaagacatagtttg

SEQ ID NO: 1013938 - DNA, 15 bp, Homo sapiens
taagacatagtttgt

SEQ ID NO: 1013939 - DNA, 15 bp, Homo sapiens
aagacatagtttgta

SEQ ID NO: 1013940 - DNA, 15 bp, Homo sapiens
agacatagtttgtaa

SEQ ID NO: 1013941 - DNA, 15 bp, Homo sapiens
gacatagtttgtaag

SEQ ID NO: 1013942 - DNA, 15 bp, Homo sapiens
acatagtttgtaaga

SEQ ID NO: 1013943 - DNA, 15 bp, Homo sapiens
catagtttgtaagac

SEQ ID NO: 1013944 - DNA, 15 bp, Homo sapiens
atagtttgtaagact

SEQ ID NO: 1013945 - DNA, 15 bp, Homo sapiens
tagtttgtaagactt

SEQ ID NO: 1013946 - DNA, 15 bp, Homo sapiens
agtttgtaagacttt

SEQ ID NO: 1013947 - DNA, 15 bp, Homo sapiens
gtttgtaagacttta

SEQ ID NO: 1013948 - DNA, 15 bp, Homo sapiens
tttgtaagactttaa

SEQ ID NO: 1013949 - DNA, 15 bp, Homo sapiens
ttgtaagactttaat

SEQ ID NO: 1013950 - DNA, 15 bp, Homo sapiens
tgtaagactttaatg

SEQ ID NO: 1013951 - DNA, 15 bp, Homo sapiens
gtaagactttaatga

SEQ ID NO: 1013952 - DNA, 15 bp, Homo sapiens
taagactttaatgaa

SEQ ID NO: 1013953 - DNA, 15 bp, Homo sapiens
aagactttaatgaat

SEQ ID NO: 1013954 - DNA, 15 bp, Homo sapiens
agactttaatgaata

SEQ ID NO: 1013955 - DNA, 15 bp, Homo sapiens
gactttaatgaataa

SEQ ID NO: 1013956 - DNA, 15 bp, Homo sapiens
actttaatgaataac

SEQ ID NO: 1013957 - DNA, 15 bp, Homo sapiens
ctttaatgaataact

SEQ ID NO: 1013958 - DNA, 15 bp, Homo sapiens
tttaatgaataactt

SEQ ID NO: 1013959 - DNA, 15 bp, Homo sapiens
ttaatgaataacttc

SEQ ID NO: 1013960 - DNA, 15 bp, Homo sapiens
taatgaataacttca

SEQ ID NO: 1013961 - DNA, 15 bp, Homo sapiens
aatgaataacttcaa

SEQ ID NO: 1013962 - DNA, 15 bp, Homo sapiens
atgaataacttcaat

SEQ ID NO: 1013963 - DNA, 15 bp, Homo sapiens
tgaataacttcaatt

SEQ ID NO: 1013964 - DNA, 15 bp, Homo sapiens
gaataacttcaatta

SEQ ID NO: 1013965 - DNA, 15 bp, Homo sapiens
aataacttcaattaa

SEQ ID NO: 1013966 - DNA, 15 bp, Homo sapiens
ataacttcaattaag

SEQ ID NO: 1013967 - DNA, 15 bp, Homo sapiens
taacttcaattaagc

SEQ ID NO: 1013968 - DNA, 15 bp, Homo sapiens
aacttcaattaagca

SEQ ID NO: 1013969 - DNA, 15 bp, Homo sapiens
acttcaattaagcac

SEQ ID NO: 1013970 - DNA, 15 bp, Homo sapiens
cttcaattaagcaca

SEQ ID NO: 1013971 - DNA, 15 bp, Homo sapiens
ttcaattaagcacaa

SEQ ID NO: 1013972 - DNA, 15 bp, Homo sapiens
tcaattaagcacaag

SEQ ID NO: 1013973 - DNA, 15 bp, Homo sapiens
caattaagcacaagg

SEQ ID NO: 1013974 - DNA, 15 bp, Homo sapiens
aattaagcacaaggt

SEQ ID NO: 1013975 - DNA, 15 bp, Homo sapiens
attaagcacaaggta

SEQ ID NO: 1013976 - DNA, 15 bp, Homo sapiens
ttaagcacaaggtaa

SEQ ID NO: 1013977 - DNA, 15 bp, Homo sapiens
taagcacaaggtaac

SEQ ID NO: 1013978 - DNA, 15 bp, Homo sapiens
aagcacaaggtaacc

SEQ ID NO: 1013979 - DNA, 15 bp, Homo sapiens
agcacaaggtaacct

SEQ ID NO: 1013980 - DNA, 15 bp, Homo sapiens
gcacaaggtaacctc

SEQ ID NO: 1013981 - DNA, 15 bp, Homo sapiens
cacaaggtaacctct

SEQ ID NO: 1013982 - DNA, 15 bp, Homo sapiens
acaaggtaacctctt

SEQ ID NO: 1013983 - DNA, 15 bp, Homo sapiens
caaggtaacctctta

SEQ ID NO: 1013984 - DNA, 15 bp, Homo sapiens
aaggtaacctcttaa

SEQ ID NO: 1013985 - DNA, 15 bp, Homo sapiens
aggtaacctcttaaa

SEQ ID NO: 1013986 - DNA, 15 bp, Homo sapiens
ggtaacctcttaaaa

SEQ ID NO: 1013987 - DNA, 15 bp, Homo sapiens
gtaacctcttaaaaa

SEQ ID NO: 1013988 - DNA, 15 bp, Homo sapiens
taacctcttaaaaac

SEQ ID NO: 1013989 - DNA, 15 bp, Homo sapiens
aacctcttaaaaaca

SEQ ID NO: 1013990 - DNA, 15 bp, Homo sapiens
acctcttaaaaacat

SEQ ID NO: 1013991 - DNA, 15 bp, Homo sapiens
cctcttaaaaacata

SEQ ID NO: 1013992 - DNA, 15 bp, Homo sapiens
ctcttaaaaacatat

SEQ ID NO: 1013993 - DNA, 15 bp, Homo sapiens
tcttaaaaacatatg

SEQ ID NO: 1013994 - DNA, 15 bp, Homo sapiens
cttaaaaacatatgc

SEQ ID NO: 1013995 - DNA, 15 bp, Homo sapiens
ttaaaaacatatgct

SEQ ID NO: 1013996 - DNA, 15 bp, Homo sapiens
taaaaacatatgctg

SEQ ID NO: 1013997 - DNA, 15 bp, Homo sapiens
aaaaacatatgctgt

SEQ ID NO: 1013998 - DNA, 15 bp, Homo sapiens
aaaacatatgctgta

SEQ ID NO: 1013999 - DNA, 15 bp, Homo sapiens
aaacatatgctgtaa

SEQ ID NO: 1014000 - DNA, 15 bp, Homo sapiens
aacatatgctgtaat

SEQ ID NO: 1014001 - DNA, 15 bp, Homo sapiens
acatatgctgtaatt

SEQ ID NO: 1014002 - DNA, 15 bp, Homo sapiens
catatgctgtaattc

SEQ ID NO: 1014003 - DNA, 15 bp, Homo sapiens
atatgctgtaattct

SEQ ID NO: 1014004 - DNA, 15 bp, Homo sapiens
tatgctgtaattctc

SEQ ID NO: 1014005 - DNA, 15 bp, Homo sapiens
atgctgtaattctct

SEQ ID NO: 1014006 - DNA, 15 bp, Homo sapiens
tgctgtaattctctc

SEQ ID NO: 1014007 - DNA, 15 bp, Homo sapiens
gctgtaattctctcc

SEQ ID NO: 1014008 - DNA, 15 bp, Homo sapiens
ctgtaattctctcct

SEQ ID NO: 1014009 - DNA, 15 bp, Homo sapiens
tgtaattctctcctt

SEQ ID NO: 1014010 - DNA, 15 bp, Homo sapiens
gtaattctctccttg

SEQ ID NO: 1014011 - DNA, 15 bp, Homo sapiens
taattctctccttgc

SEQ ID NO: 1014012 - DNA, 15 bp, Homo sapiens
aattctctccttgca

SEQ ID NO: 1014013 - DNA, 15 bp, Homo sapiens
attctctccttgcat

SEQ ID NO: 1014014 - DNA, 15 bp, Homo sapiens
ttctctccttgcatc

SEQ ID NO: 1014015 - DNA, 15 bp, Homo sapiens
tctctccttgcatcc

SEQ ID NO: 1014016 - DNA, 15 bp, Homo sapiens
ctctccttgcatcct

SEQ ID NO: 1014017 - DNA, 15 bp, Homo sapiens
tctccttgcatcctc

SEQ ID NO: 1014018 - DNA, 15 bp, Homo sapiens
ctccttgcatcctca

SEQ ID NO: 1014019 - DNA, 15 bp, Homo sapiens
tccttgcatcctcaa

SEQ ID NO: 1014020 - DNA, 15 bp, Homo sapiens
ccttgcatcctcaaa

SEQ ID NO: 1014021 - DNA, 15 bp, Homo sapiens
cttgcatcctcaaaa

SEQ ID NO: 1014022 - DNA, 15 bp, Homo sapiens
ttgcatcctcaaaag

SEQ ID NO: 1014023 - DNA, 15 bp, Homo sapiens
tgcatcctcaaaaga

SEQ ID NO: 1014024 - DNA, 15 bp, Homo sapiens
gcatcctcaaaagag

SEQ ID NO: 1014025 - DNA, 15 bp, Homo sapiens
catcctcaaaagagt

SEQ ID NO: 1014026 - DNA, 15 bp, Homo sapiens
atcctcaaaagagta

SEQ ID NO: 1014027 - DNA, 15 bp, Homo sapiens
tcctcaaaagagtac

SEQ ID NO: 1014028 - DNA, 15 bp, Homo sapiens
cctcaaaagagtaca

SEQ ID NO: 1014029 - DNA, 15 bp, Homo sapiens
ctcaaaagagtacat

SEQ ID NO: 1014030 - DNA, 15 bp, Homo sapiens
tcaaaagagtacatc

SEQ ID NO: 1014031 - DNA, 15 bp, Homo sapiens
caaaagagtacatct

SEQ ID NO: 1014032 - DNA, 15 bp, Homo sapiens
aaaagagtacatctt

SEQ ID NO: 1014033 - DNA, 15 bp, Homo sapiens
aaagagtacatcttc

SEQ ID NO: 1014034 - DNA, 15 bp, Homo sapiens
aagagtacatcttca

SEQ ID NO: 1014035 - DNA, 15 bp, Homo sapiens
agagtacatcttcat

SEQ ID NO: 1014036 - DNA, 15 bp, Homo sapiens
gagtacatcttcatg

SEQ ID NO: 1014037 - DNA, 15 bp, Homo sapiens
agtacatcttcatgg

SEQ ID NO: 1014038 - DNA, 15 bp, Homo sapiens
gtacatcttcatgga

SEQ ID NO: 1014039 - DNA, 15 bp, Homo sapiens
tacatcttcatggat

SEQ ID NO: 1014040 - DNA, 15 bp, Homo sapiens
acatcttcatggatc

SEQ ID NO: 1014041 - DNA, 15 bp, Homo sapiens
catcttcatggatca

SEQ ID NO: 1014042 - DNA, 15 bp, Homo sapiens
atcttcatggatcat

SEQ ID NO: 1014043 - DNA, 15 bp, Homo sapiens
tcttcatggatcatt

SEQ ID NO: 1014044 - DNA, 15 bp, Homo sapiens
cttcatggatcattt

SEQ ID NO: 1014045 - DNA, 15 bp, Homo sapiens
ttcatggatcatttt

SEQ ID NO: 1014046 - DNA, 15 bp, Homo sapiens
tcatggatcatttta

SEQ ID NO: 1014047 - DNA, 15 bp, Homo sapiens
catggatcattttaa

SEQ ID NO: 1014048 - DNA, 15 bp, Homo sapiens
atggatcattttaaa

SEQ ID NO: 1014049 - DNA, 15 bp, Homo sapiens
tggatcattttaaaa

SEQ ID NO: 1014050 - DNA, 15 bp, Homo sapiens
ggatcattttaaaaa

SEQ ID NO: 1014051 - DNA, 15 bp, Homo sapiens
gatcattttaaaaag

SEQ ID NO: 1014052 - DNA, 15 bp, Homo sapiens
atcattttaaaaagt

SEQ ID NO: 1014053 - DNA, 15 bp, Homo sapiens
tcattttaaaaagtc

SEQ ID NO: 1014054 - DNA, 15 bp, Homo sapiens
cattttaaaaagtct

SEQ ID NO: 1014055 - DNA, 15 bp, Homo sapiens
attttaaaaagtctt

SEQ ID NO: 1014056 - DNA, 15 bp, Homo sapiens
ttttaaaaagtctta

SEQ ID NO: 1014057 - DNA, 15 bp, Homo sapiens
tttaaaaagtcttag

SEQ ID NO: 1014058 - DNA, 15 bp, Homo sapiens
ttaaaaagtcttagg

SEQ ID NO: 1014059 - DNA, 15 bp, Homo sapiens
taaaaagtcttaggt

SEQ ID NO: 1014060 - DNA, 15 bp, Homo sapiens
aaaaagtcttaggta

SEQ ID NO: 1014061 - DNA, 15 bp, Homo sapiens
aaaagtcttaggtaa

SEQ ID NO: 1014062 - DNA, 15 bp, Homo sapiens
aaagtcttaggtaag

SEQ ID NO: 1014063 - DNA, 15 bp, Homo sapiens
aagtcttaggtaaga

SEQ ID NO: 1014064 - DNA, 15 bp, Homo sapiens
agtcttaggtaagaa

SEQ ID NO: 1014065 - DNA, 15 bp, Homo sapiens
gtcttaggtaagaaa

SEQ ID NO: 1014066 - DNA, 15 bp, Homo sapiens
tcttaggtaagaaaa

SEQ ID NO: 1014067 - DNA, 15 bp, Homo sapiens
cttaggtaagaaaaa

SEQ ID NO: 1014068 - DNA, 15 bp, Homo sapiens
ttaggtaagaaaaaa

SEQ ID NO: 1014069 - DNA, 15 bp, Homo sapiens
taggtaagaaaaaat

SEQ ID NO: 1014070 - DNA, 15 bp, Homo sapiens
aggtaagaaaaaata

SEQ ID NO: 1014071 - DNA, 15 bp, Homo sapiens
ggtaagaaaaaataa

SEQ ID NO: 1014072 - DNA, 15 bp, Homo sapiens
gtaagaaaaaataac

SEQ ID NO: 1014073 - DNA, 15 bp, Homo sapiens
taagaaaaaataacc

SEQ ID NO: 1014074 - DNA, 15 bp, Homo sapiens
aagaaaaaataacca

SEQ ID NO: 1014075 - DNA, 15 bp, Homo sapiens
agaaaaaataaccat

SEQ ID NO: 1014076 - DNA, 15 bp, Homo sapiens
gaaaaaataaccatt

SEQ ID NO: 1014077 - DNA, 15 bp, Homo sapiens
aaaaaataaccattt

SEQ ID NO: 1014078 - DNA, 15 bp, Homo sapiens
aaaaataaccattta

SEQ ID NO: 1014079 - DNA, 15 bp, Homo sapiens
aaaataaccatttaa

SEQ ID NO: 1014080 - DNA, 15 bp, Homo sapiens
aaataaccatttaat

SEQ ID NO: 1014081 - DNA, 15 bp, Homo sapiens
aataaccatttaata

SEQ ID NO: 1014082 - DNA, 15 bp, Homo sapiens
ataaccatttaataa

SEQ ID NO: 1014083 - DNA, 15 bp, Homo sapiens
taaccatttaataat

SEQ ID NO: 1014084 - DNA, 15 bp, Homo sapiens
aaccatttaataatg

SEQ ID NO: 1014085 - DNA, 15 bp, Homo sapiens
accatttaataatgg

SEQ ID NO: 1014086 - DNA, 15 bp, Homo sapiens
ccatttaataatggc

SEQ ID NO: 1014087 - DNA, 15 bp, Homo sapiens
catttaataatggca

SEQ ID NO: 1014088 - DNA, 15 bp, Homo sapiens
atttaataatggcag

SEQ ID NO: 1014089 - DNA, 15 bp, Homo sapiens
tttaataatggcagt

SEQ ID NO: 1014090 - DNA, 15 bp, Homo sapiens
ttaataatggcagtt

SEQ ID NO: 1014091 - DNA, 15 bp, Homo sapiens
taataatggcagtta

SEQ ID NO: 1014092 - DNA, 15 bp, Homo sapiens
aataatggcagttat

SEQ ID NO: 1014093 - DNA, 15 bp, Homo sapiens
ataatggcagttata

SEQ ID NO: 1014094 - DNA, 15 bp, Homo sapiens
taatggcagttatat

SEQ ID NO: 1014095 - DNA, 15 bp, Homo sapiens
aatggcagttatatc

SEQ ID NO: 1014096 - DNA, 15 bp, Homo sapiens
atggcagttatatcc

SEQ ID NO: 1014097 - DNA, 15 bp, Homo sapiens
tggcagttatatcct

SEQ ID NO: 1014098 - DNA, 15 bp, Homo sapiens
ggcagttatatcctg

SEQ ID NO: 1014099 - DNA, 15 bp, Homo sapiens
gcagttatatcctgg

SEQ ID NO: 1014100 - DNA, 15 bp, Homo sapiens
cagttatatcctgga

SEQ ID NO: 1014101 - DNA, 15 bp, Homo sapiens
agttatatcctggaa

SEQ ID NO: 1014102 - DNA, 15 bp, Homo sapiens
gttatatcctggaaa

SEQ ID NO: 1014103 - DNA, 15 bp, Homo sapiens
ttatatcctggaaag

SEQ ID NO: 1014104 - DNA, 15 bp, Homo sapiens
tatatcctggaaagg

SEQ ID NO: 1014105 - DNA, 15 bp, Homo sapiens
atatcctggaaaggg

SEQ ID NO: 1014106 - DNA, 15 bp, Homo sapiens
tatcctggaaagggc

SEQ ID NO: 1014107 - DNA, 15 bp, Homo sapiens
atcctggaaagggct

SEQ ID NO: 1014108 - DNA, 15 bp, Homo sapiens
tcctggaaagggctc

SEQ ID NO: 1014109 - DNA, 15 bp, Homo sapiens
cctggaaagggctca

SEQ ID NO: 1014110 - DNA, 15 bp, Homo sapiens
ctggaaagggctcaa

SEQ ID NO: 1014111 - DNA, 15 bp, Homo sapiens
tggaaagggctcaaa

SEQ ID NO: 1014112 - DNA, 15 bp, Homo sapiens
ggaaagggctcaaaa

SEQ ID NO: 1014113 - DNA, 15 bp, Homo sapiens
gaaagggctcaaaat

SEQ ID NO: 1014114 - DNA, 15 bp, Homo sapiens
aaagggctcaaaatt

SEQ ID NO: 1014115 - DNA, 15 bp, Homo sapiens
aagggctcaaaattg

SEQ ID NO: 1014116 - DNA, 15 bp, Homo sapiens
agggctcaaaattgg

SEQ ID NO: 1014117 - DNA, 15 bp, Homo sapiens
gggctcaaaattggg

SEQ ID NO: 1014118 - DNA, 15 bp, Homo sapiens
ggctcaaaattggga

SEQ ID NO: 1014119 - DNA, 15 bp, Homo sapiens
gctcaaaattgggat

SEQ ID NO: 1014120 - DNA, 15 bp, Homo sapiens
ctcaaaattgggatg

SEQ ID NO: 1014121 - DNA, 15 bp, Homo sapiens
tcaaaattgggatga

SEQ ID NO: 1014122 - DNA, 15 bp, Homo sapiens
caaaattgggatgat

SEQ ID NO: 1014123 - DNA, 15 bp, Homo sapiens
aaaattgggatgata

SEQ ID NO: 1014124 - DNA, 15 bp, Homo sapiens
aaattgggatgatag

SEQ ID NO: 1014125 - DNA, 15 bp, Homo sapiens
aattgggatgataga

SEQ ID NO: 1014126 - DNA, 15 bp, Homo sapiens
attgggatgatagaa

SEQ ID NO: 1014127 - DNA, 15 bp, Homo sapiens
ttgggatgatagaat

SEQ ID NO: 1014128 - DNA, 15 bp, Homo sapiens
tgggatgatagaatg

SEQ ID NO: 1014129 - DNA, 15 bp, Homo sapiens
gggatgatagaatgt

SEQ ID NO: 1014130 - DNA, 15 bp, Homo sapiens
ggatgatagaatgtc

SEQ ID NO: 1014131 - DNA, 15 bp, Homo sapiens
gatgatagaatgtct

SEQ ID NO: 1014132 - DNA, 15 bp, Homo sapiens
atgatagaatgtcta

SEQ ID NO: 1014133 - DNA, 15 bp, Homo sapiens
tgatagaatgtctaa

SEQ ID NO: 1014134 - DNA, 15 bp, Homo sapiens
gatagaatgtctaac

SEQ ID NO: 1014135 - DNA, 15 bp, Homo sapiens
atagaatgtctaact

SEQ ID NO: 1014136 - DNA, 15 bp, Homo sapiens
tagaatgtctaactc

SEQ ID NO: 1014137 - DNA, 15 bp, Homo sapiens
agaatgtctaactct

SEQ ID NO: 1014138 - DNA, 15 bp, Homo sapiens
gaatgtctaactctg

SEQ ID NO: 1014139 - DNA, 15 bp, Homo sapiens
aatgtctaactctga

SEQ ID NO: 1014140 - DNA, 15 bp, Homo sapiens
atgtctaactctgac

SEQ ID NO: 1014141 - DNA, 15 bp, Homo sapiens
tgtctaactctgaca

SEQ ID NO: 1014142 - DNA, 15 bp, Homo sapiens
gtctaactctgacat

SEQ ID NO: 1014143 - DNA, 15 bp, Homo sapiens
tctaactctgacatg

SEQ ID NO: 1014144 - DNA, 15 bp, Homo sapiens
ctaactctgacatgt

SEQ ID NO: 1014145 - DNA, 15 bp, Homo sapiens
taactctgacatgtg

SEQ ID NO: 1014146 - DNA, 15 bp, Homo sapiens
aactctgacatgtgc

SEQ ID NO: 1014147 - DNA, 15 bp, Homo sapiens
actctgacatgtgcc

SEQ ID NO: 1014148 - DNA, 15 bp, Homo sapiens
ctctgacatgtgccg

SEQ ID NO: 1014149 - DNA, 15 bp, Homo sapiens
tctgacatgtgccgc

SEQ ID NO: 1014150 - DNA, 15 bp, Homo sapiens
ctgacatgtgccgct

SEQ ID NO: 1014151 - DNA, 15 bp, Homo sapiens
tgacatgtgccgctg

SEQ ID NO: 1014152 - DNA, 15 bp, Homo sapiens
gacatgtgccgctgc

SEQ ID NO: 1014153 - DNA, 15 bp, Homo sapiens
acatgtgccgctgct

SEQ ID NO: 1014154 - DNA, 15 bp, Homo sapiens
catgtgccgctgctc

SEQ ID NO: 1014155 - DNA, 15 bp, Homo sapiens
atgtgccgctgctct

SEQ ID NO: 1014156 - DNA, 15 bp, Homo sapiens
tgtgccgctgctctg

SEQ ID NO: 1014157 - DNA, 15 bp, Homo sapiens
gtgccgctgctctgg

SEQ ID NO: 1014158 - DNA, 15 bp, Homo sapiens
tgccgctgctctgga

SEQ ID NO: 1014159 - DNA, 15 bp, Homo sapiens
gccgctgctctggaa

SEQ ID NO: 1014160 - DNA, 15 bp, Homo sapiens
ccgctgctctggaag

SEQ ID NO: 1014161 - DNA, 15 bp, Homo sapiens
cgctgctctggaagc

SEQ ID NO: 1014162 - DNA, 15 bp, Homo sapiens
gctgctctggaagca

SEQ ID NO: 1014163 - DNA, 15 bp, Homo sapiens
ctgctctggaagcaa

SEQ ID NO: 1014164 - DNA, 15 bp, Homo sapiens
tgctctggaagcaat

SEQ ID NO: 1014165 - DNA, 15 bp, Homo sapiens
gctctggaagcaatt

SEQ ID NO: 1014166 - DNA, 15 bp, Homo sapiens
ctctggaagcaattg

SEQ ID NO: 1014167 - DNA, 15 bp, Homo sapiens
tctggaagcaattgg

SEQ ID NO: 1014168 - DNA, 15 bp, Homo sapiens
ctggaagcaattggt

SEQ ID NO: 1014169 - DNA, 15 bp, Homo sapiens
tggaagcaattggtg

SEQ ID NO: 1014170 - DNA, 15 bp, Homo sapiens
ggaagcaattggtgg

SEQ ID NO: 1014171 - DNA, 15 bp, Homo sapiens
gaagcaattggtggg

SEQ ID NO: 1014172 - DNA, 15 bp, Homo sapiens
aagcaattggtggga

SEQ ID NO: 1014173 - DNA, 15 bp, Homo sapiens
agcaattggtgggag

SEQ ID NO: 1014174 - DNA, 15 bp, Homo sapiens
gcaattggtgggagt

SEQ ID NO: 1014175 - DNA, 15 bp, Homo sapiens
caattggtgggagtt

SEQ ID NO: 1014176 - DNA, 15 bp, Homo sapiens
aattggtgggagttc

SEQ ID NO: 1014177 - DNA, 15 bp, Homo sapiens
attggtgggagttcc

SEQ ID NO: 1014178 - DNA, 15 bp, Homo sapiens
ttggtgggagttcca

SEQ ID NO: 1014179 - DNA, 15 bp, Homo sapiens
tggtgggagttccag

SEQ ID NO: 1014180 - DNA, 15 bp, Homo sapiens
ggtgggagttccaga

SEQ ID NO: 1014181 - DNA, 15 bp, Homo sapiens
gtgggagttccagaa

SEQ ID NO: 1014182 - DNA, 15 bp, Homo sapiens
tgggagttccagaat

SEQ ID NO: 1014183 - DNA, 15 bp, Homo sapiens
gggagttccagaatt

SEQ ID NO: 1014184 - DNA, 15 bp, Homo sapiens
ggagttccagaattt

SEQ ID NO: 1014185 - DNA, 15 bp, Homo sapiens
gagttccagaatttc

SEQ ID NO: 1014186 - DNA, 15 bp, Homo sapiens
agttccagaatttcc

SEQ ID NO: 1014187 - DNA, 15 bp, Homo sapiens
gttccagaatttcca

SEQ ID NO: 1014188 - DNA, 15 bp, Homo sapiens
ttccagaatttccat

SEQ ID NO: 1014189 - DNA, 15 bp, Homo sapiens
tccagaatttccatg

SEQ ID NO: 1014190 - DNA, 15 bp, Homo sapiens
ccagaatttccatgt

SEQ ID NO: 1014191 - DNA, 15 bp, Homo sapiens
cagaatttccatgta

SEQ ID NO: 1014192 - DNA, 15 bp, Homo sapiens
agaatttccatgtac

SEQ ID NO: 1014193 - DNA, 15 bp, Homo sapiens
gaatttccatgtaca

SEQ ID NO: 1014194 - DNA, 15 bp, Homo sapiens
aatttccatgtacag

SEQ ID NO: 1014195 - DNA, 15 bp, Homo sapiens
atttccatgtacagt

SEQ ID NO: 1014196 - DNA, 15 bp, Homo sapiens
tttccatgtacagtg

SEQ ID NO: 1014197 - DNA, 15 bp, Homo sapiens
ttccatgtacagtga

SEQ ID NO: 1014198 - DNA, 15 bp, Homo sapiens
tccatgtacagtgag

SEQ ID NO: 1014199 - DNA, 15 bp, Homo sapiens
ccatgtacagtgagg

SEQ ID NO: 1014200 - DNA, 15 bp, Homo sapiens
catgtacagtgagga

SEQ ID NO: 1014201 - DNA, 15 bp, Homo sapiens
atgtacagtgaggat

SEQ ID NO: 1014202 - DNA, 15 bp, Homo sapiens
tgtacagtgaggata

SEQ ID NO: 1014203 - DNA, 15 bp, Homo sapiens
gtacagtgaggatat

SEQ ID NO: 1014204 - DNA, 15 bp, Homo sapiens
tacagtgaggatatg

SEQ ID NO: 1014205 - DNA, 15 bp, Homo sapiens
acagtgaggatatgg

SEQ ID NO: 1014206 - DNA, 15 bp, Homo sapiens
cagtgaggatatggc

SEQ ID NO: 1014207 - DNA, 15 bp, Homo sapiens
agtgaggatatggcg

SEQ ID NO: 1014208 - DNA, 15 bp, Homo sapiens
gtgaggatatggcga

SEQ ID NO: 1014209 - DNA, 15 bp, Homo sapiens
tgaggatatggcgat

SEQ ID NO: 1014210 - DNA, 15 bp, Homo sapiens
gaggatatggcgatg

SEQ ID NO: 1014211 - DNA, 15 bp, Homo sapiens
aggatatggcgatgg

SEQ ID NO: 1014212 - DNA, 15 bp, Homo sapiens
ggatatggcgatgga

SEQ ID NO: 1014213 - DNA, 15 bp, Homo sapiens
gatatggcgatggaa

SEQ ID NO: 1014214 - DNA, 15 bp, Homo sapiens
atatggcgatggaaa

SEQ ID NO: 1014215 - DNA, 15 bp, Homo sapiens
tatggcgatggaaaa

SEQ ID NO: 1014216 - DNA, 15 bp, Homo sapiens
atggcgatggaaaac

SEQ ID NO: 1014217 - DNA, 15 bp, Homo sapiens
tggcgatggaaaaca

SEQ ID NO: 1014218 - DNA, 15 bp, Homo sapiens
ggcgatggaaaacaa

SEQ ID NO: 1014219 - DNA, 15 bp, Homo sapiens
gcgatggaaaacaat

SEQ ID NO: 1014220 - DNA, 15 bp, Homo sapiens
cgatggaaaacaatc

SEQ ID NO: 1014221 - DNA, 15 bp, Homo sapiens
gatggaaaacaatct

SEQ ID NO: 1014222 - DNA, 15 bp, Homo sapiens
atggaaaacaatctt

SEQ ID NO: 1014223 - DNA, 15 bp, Homo sapiens
tggaaaacaatcttg

SEQ ID NO: 1014224 - DNA, 15 bp, Homo sapiens
ggaaaacaatcttgt

SEQ ID NO: 1014225 - DNA, 15 bp, Homo sapiens
gaaaacaatcttgtg

SEQ ID NO: 1014226 - DNA, 15 bp, Homo sapiens
aaaacaatcttgtgt

SEQ ID NO: 1014227 - DNA, 15 bp, Homo sapiens
aaacaatcttgtgtg

SEQ ID NO: 1014228 - DNA, 15 bp, Homo sapiens
aacaatcttgtgtgc

SEQ ID NO: 1014229 - DNA, 15 bp, Homo sapiens
acaatcttgtgtgcc

SEQ ID NO: 1014230 - DNA, 15 bp, Homo sapiens
caatcttgtgtgcca

SEQ ID NO: 1014231 - DNA, 15 bp, Homo sapiens
aatcttgtgtgccat

SEQ ID NO: 1014232 - DNA, 15 bp, Homo sapiens
atcttgtgtgccatt

SEQ ID NO: 1014233 - DNA, 15 bp, Homo sapiens
tcttgtgtgccattt

SEQ ID NO: 1014234 - DNA, 15 bp, Homo sapiens
cttgtgtgccattta

SEQ ID NO: 1014235 - DNA, 15 bp, Homo sapiens
ttgtgtgccatttag

SEQ ID NO: 1014236 - DNA, 15 bp, Homo sapiens
tgtgtgccatttagg

SEQ ID NO: 1014237 - DNA, 15 bp, Homo sapiens
gtgtgccatttaggc

SEQ ID NO: 1014238 - DNA, 15 bp, Homo sapiens
tgtgccatttaggca

SEQ ID NO: 1014239 - DNA, 15 bp, Homo sapiens
gtgccatttaggcag

SEQ ID NO: 1014240 - DNA, 15 bp, Homo sapiens
tgccatttaggcaga

SEQ ID NO: 1014241 - DNA, 15 bp, Homo sapiens
gccatttaggcagat

SEQ ID NO: 1014242 - DNA, 15 bp, Homo sapiens
ccatttaggcagatg

SEQ ID NO: 1014243 - DNA, 15 bp, Homo sapiens
catttaggcagatgg

SEQ ID NO: 1014244 - DNA, 15 bp, Homo sapiens
atttaggcagatggg

SEQ ID NO: 1014245 - DNA, 15 bp, Homo sapiens
tttaggcagatggga

SEQ ID NO: 1014246 - DNA, 15 bp, Homo sapiens
ttaggcagatgggaa

SEQ ID NO: 1014247 - DNA, 15 bp, Homo sapiens
taggcagatgggaag

SEQ ID NO: 1014248 - DNA, 15 bp, Homo sapiens
aggcagatgggaagc

SEQ ID NO: 1014249 - DNA, 15 bp, Homo sapiens
ggcagatgggaagca

SEQ ID NO: 1014250 - DNA, 15 bp, Homo sapiens
gcagatgggaagcag

SEQ ID NO: 1014251 - DNA, 15 bp, Homo sapiens
cagatgggaagcagg

SEQ ID NO: 1014252 - DNA, 15 bp, Homo sapiens
agatgggaagcaggg

SEQ ID NO: 1014253 - DNA, 15 bp, Homo sapiens
gatgggaagcagggc

SEQ ID NO: 1014254 - DNA, 15 bp, Homo sapiens
atgggaagcagggct

SEQ ID NO: 1014255 - DNA, 15 bp, Homo sapiens
tgggaagcagggcta

SEQ ID NO: 1014256 - DNA, 15 bp, Homo sapiens
gggaagcagggctat

SEQ ID NO: 1014257 - DNA, 15 bp, Homo sapiens
ggaagcagggctata

SEQ ID NO: 1014258 - DNA, 15 bp, Homo sapiens
gaagcagggctataa

SEQ ID NO: 1014259 - DNA, 15 bp, Homo sapiens
aagcagggctataaa

SEQ ID NO: 1014260 - DNA, 15 bp, Homo sapiens
agcagggctataaaa

SEQ ID NO: 1014261 - DNA, 15 bp, Homo sapiens
gcagggctataaaac

SEQ ID NO: 1014262 - DNA, 15 bp, Homo sapiens
cagggctataaaact

SEQ ID NO: 1014263 - DNA, 15 bp, Homo sapiens
agggctataaaactt

SEQ ID NO: 1014264 - DNA, 15 bp, Homo sapiens
gggctataaaacttc

SEQ ID NO: 1014265 - DNA, 15 bp, Homo sapiens
ggctataaaacttca

SEQ ID NO: 1014266 - DNA, 15 bp, Homo sapiens
gctataaaacttcac

SEQ ID NO: 1014267 - DNA, 15 bp, Homo sapiens
ctataaaacttcact

SEQ ID NO: 1014268 - DNA, 15 bp, Homo sapiens
tataaaacttcactt

SEQ ID NO: 1014269 - DNA, 15 bp, Homo sapiens
ataaaacttcactta

SEQ ID NO: 1014270 - DNA, 15 bp, Homo sapiens
taaaacttcacttac

SEQ ID NO: 1014271 - DNA, 15 bp, Homo sapiens
aaaacttcacttaca

SEQ ID NO: 1014272 - DNA, 15 bp, Homo sapiens
aaacttcacttacac

SEQ ID NO: 1014273 - DNA, 15 bp, Homo sapiens
aacttcacttacaca

SEQ ID NO: 1014274 - DNA, 15 bp, Homo sapiens
acttcacttacacaa

SEQ ID NO: 1014275 - DNA, 15 bp, Homo sapiens
cttcacttacacaac

SEQ ID NO: 1014276 - DNA, 15 bp, Homo sapiens
ttcacttacacaacc

SEQ ID NO: 1014277 - DNA, 15 bp, Homo sapiens
tcacttacacaacct

SEQ ID NO: 1014278 - DNA, 15 bp, Homo sapiens
cacttacacaaccta

SEQ ID NO: 1014279 - DNA, 15 bp, Homo sapiens
acttacacaacctac

SEQ ID NO: 1014280 - DNA, 15 bp, Homo sapiens
cttacacaacctact

SEQ ID NO: 1014281 - DNA, 15 bp, Homo sapiens
ttacacaacctacta

SEQ ID NO: 1014282 - DNA, 15 bp, Homo sapiens
tacacaacctactaa

SEQ ID NO: 1014283 - DNA, 15 bp, Homo sapiens
acacaacctactaaa

SEQ ID NO: 1014284 - DNA, 15 bp, Homo sapiens
cacaacctactaaaa

SEQ ID NO: 1014285 - DNA, 15 bp, Homo sapiens
acaacctactaaaaa

SEQ ID NO: 1014286 - DNA, 15 bp, Homo sapiens
caacctactaaaaat

SEQ ID NO: 1014287 - DNA, 15 bp, Homo sapiens
aacctactaaaaatt

SEQ ID NO: 1014288 - DNA, 15 bp, Homo sapiens
acctactaaaaatta

SEQ ID NO: 1014289 - DNA, 15 bp, Homo sapiens
cctactaaaaattaa

SEQ ID NO: 1014290 - DNA, 15 bp, Homo sapiens
ctactaaaaattaat

SEQ ID NO: 1014291 - DNA, 15 bp, Homo sapiens
tactaaaaattaatt

SEQ ID NO: 1014292 - DNA, 15 bp, Homo sapiens
actaaaaattaattt

SEQ ID NO: 1014293 - DNA, 15 bp, Homo sapiens
ctaaaaattaatttt

SEQ ID NO: 1014294 - DNA, 15 bp, Homo sapiens
taaaaattaattttc

SEQ ID NO: 1014295 - DNA, 15 bp, Homo sapiens
aaaaattaattttcc

SEQ ID NO: 1014296 - DNA, 15 bp, Homo sapiens
aaaattaattttcca

SEQ ID NO: 1014297 - DNA, 15 bp, Homo sapiens
aaattaattttccat

SEQ ID NO: 1014298 - DNA, 15 bp, Homo sapiens
aattaattttccata

SEQ ID NO: 1014299 - DNA, 15 bp, Homo sapiens
attaattttccatat

SEQ ID NO: 1014300 - DNA, 15 bp, Homo sapiens
ttaattttccatatc

SEQ ID NO: 1014301 - DNA, 15 bp, Homo sapiens
taattttccatatca

SEQ ID NO: 1014302 - DNA, 15 bp, Homo sapiens
aattttccatatcag

SEQ ID NO: 1014303 - DNA, 15 bp, Homo sapiens
attttccatatcaga

SEQ ID NO: 1014304 - DNA, 15 bp, Homo sapiens
ttttccatatcagag

SEQ ID NO: 1014305 - DNA, 15 bp, Homo sapiens
tttccatatcagaga

SEQ ID NO: 1014306 - DNA, 15 bp, Homo sapiens
ttccatatcagagat

SEQ ID NO: 1014307 - DNA, 15 bp, Homo sapiens
tccatatcagagatt

SEQ ID NO: 1014308 - DNA, 15 bp, Homo sapiens
ccatatcagagatta

SEQ ID NO: 1014309 - DNA, 15 bp, Homo sapiens
catatcagagattag

SEQ ID NO: 1014310 - DNA, 15 bp, Homo sapiens
atatcagagattaga

SEQ ID NO: 1014311 - DNA, 15 bp, Homo sapiens
tatcagagattagag

SEQ ID NO: 1014312 - DNA, 15 bp, Homo sapiens
atcagagattagaga

SEQ ID NO: 1014313 - DNA, 15 bp, Homo sapiens
tcagagattagagag

SEQ ID NO: 1014314 - DNA, 15 bp, Homo sapiens
cagagattagagaga

SEQ ID NO: 1014315 - DNA, 15 bp, Homo sapiens
agagattagagagag

SEQ ID NO: 1014316 - DNA, 15 bp, Homo sapiens
gagattagagagagt

SEQ ID NO: 1014317 - DNA, 15 bp, Homo sapiens
agattagagagagtt

SEQ ID NO: 1014318 - DNA, 15 bp, Homo sapiens
gattagagagagttt

SEQ ID NO: 1014319 - DNA, 15 bp, Homo sapiens
attagagagagtttg

SEQ ID NO: 1014320 - DNA, 15 bp, Homo sapiens
ttagagagagtttgt

SEQ ID NO: 1014321 - DNA, 15 bp, Homo sapiens
tagagagagtttgtg

SEQ ID NO: 1014322 - DNA, 15 bp, Homo sapiens
agagagagtttgtga

SEQ ID NO: 1014323 - DNA, 15 bp, Homo sapiens
gagagagtttgtgaa

SEQ ID NO: 1014324 - DNA, 15 bp, Homo sapiens
agagagtttgtgaag

SEQ ID NO: 1014325 - DNA, 15 bp, Homo sapiens
gagagtttgtgaaga

SEQ ID NO: 1014326 - DNA, 15 bp, Homo sapiens
agagtttgtgaagac

SEQ ID NO: 1014327 - DNA, 15 bp, Homo sapiens
gagtttgtgaagact

SEQ ID NO: 1014328 - DNA, 15 bp, Homo sapiens
agtttgtgaagactg

SEQ ID NO: 1014329 - DNA, 15 bp, Homo sapiens
gtttgtgaagactgt

SEQ ID NO: 1014330 - DNA, 15 bp, Homo sapiens
tttgtgaagactgtt

SEQ ID NO: 1014331 - DNA, 15 bp, Homo sapiens
ttgtgaagactgttg

SEQ ID NO: 1014332 - DNA, 15 bp, Homo sapiens
tgtgaagactgttga

SEQ ID NO: 1014333 - DNA, 15 bp, Homo sapiens
gtgaagactgttgag

SEQ ID NO: 1014334 - DNA, 15 bp, Homo sapiens
tgaagactgttgagg

SEQ ID NO: 1014335 - DNA, 15 bp, Homo sapiens
gaagactgttgaggt

SEQ ID NO: 1014336 - DNA, 15 bp, Homo sapiens
aagactgttgaggta

SEQ ID NO: 1014337 - DNA, 15 bp, Homo sapiens
agactgttgaggtag

SEQ ID NO: 1014338 - DNA, 15 bp, Homo sapiens
gactgttgaggtaga

SEQ ID NO: 1014339 - DNA, 15 bp, Homo sapiens
actgttgaggtagag

SEQ ID NO: 1014340 - DNA, 15 bp, Homo sapiens
ctgttgaggtagagg

SEQ ID NO: 1014341 - DNA, 15 bp, Homo sapiens
tgttgaggtagaggt

SEQ ID NO: 1014342 - DNA, 15 bp, Homo sapiens
gttgaggtagaggtg

SEQ ID NO: 1014343 - DNA, 15 bp, Homo sapiens
ttgaggtagaggtga

SEQ ID NO: 1014344 - DNA, 15 bp, Homo sapiens
tgaggtagaggtgaa

SEQ ID NO: 1014345 - DNA, 15 bp, Homo sapiens
gaggtagaggtgaag

SEQ ID NO: 1014346 - DNA, 15 bp, Homo sapiens
aggtagaggtgaagc

SEQ ID NO: 1014347 - DNA, 15 bp, Homo sapiens
ggtagaggtgaagcc

SEQ ID NO: 1014348 - DNA, 15 bp, Homo sapiens
gtagaggtgaagccc

SEQ ID NO: 1014349 - DNA, 15 bp, Homo sapiens
tagaggtgaagccct

SEQ ID NO: 1014350 - DNA, 15 bp, Homo sapiens
agaggtgaagccctc

SEQ ID NO: 1014351 - DNA, 15 bp, Homo sapiens
gaggtgaagccctcc

SEQ ID NO: 1014352 - DNA, 15 bp, Homo sapiens
aggtgaagccctccc

SEQ ID NO: 1014353 - DNA, 15 bp, Homo sapiens
ggtgaagccctccca

SEQ ID NO: 1014354 - DNA, 15 bp, Homo sapiens
gtgaagccctcccag

SEQ ID NO: 1014355 - DNA, 15 bp, Homo sapiens
tgaagccctcccagt

SEQ ID NO: 1014356 - DNA, 15 bp, Homo sapiens
gaagccctcccagtg

SEQ ID NO: 1014357 - DNA, 15 bp, Homo sapiens
aagccctcccagtgc

SEQ ID NO: 1014358 - DNA, 15 bp, Homo sapiens
agccctcccagtgct

SEQ ID NO: 1014359 - DNA, 15 bp, Homo sapiens
gccctcccagtgctc

SEQ ID NO: 1014360 - DNA, 15 bp, Homo sapiens
ccctcccagtgctcc

SEQ ID NO: 1014361 - DNA, 15 bp, Homo sapiens
cctcccagtgctcca

SEQ ID NO: 1014362 - DNA, 15 bp, Homo sapiens
ctcccagtgctccac

SEQ ID NO: 1014363 - DNA, 15 bp, Homo sapiens
tcccagtgctccaca

SEQ ID NO: 1014364 - DNA, 15 bp, Homo sapiens
cccagtgctccacac

SEQ ID NO: 1014365 - DNA, 15 bp, Homo sapiens
ccagtgctccacact

SEQ ID NO: 1014366 - DNA, 15 bp, Homo sapiens
cagtgctccacactt

SEQ ID NO: 1014367 - DNA, 15 bp, Homo sapiens
agtgctccacacttt

SEQ ID NO: 1014368 - DNA, 15 bp, Homo sapiens
gtgctccacactttt

SEQ ID NO: 1014369 - DNA, 15 bp, Homo sapiens
tgctccacacttttg

SEQ ID NO: 1014370 - DNA, 15 bp, Homo sapiens
gctccacacttttgt

SEQ ID NO: 1014371 - DNA, 15 bp, Homo sapiens
ctccacacttttgtg

SEQ ID NO: 1014372 - DNA, 15 bp, Homo sapiens
tccacacttttgtgc

SEQ ID NO: 1014373 - DNA, 15 bp, Homo sapiens
ccacacttttgtgct

SEQ ID NO: 1014374 - DNA, 15 bp, Homo sapiens
cacacttttgtgctg

SEQ ID NO: 1014375 - DNA, 15 bp, Homo sapiens
acacttttgtgctgt

SEQ ID NO: 1014376 - DNA, 15 bp, Homo sapiens
cacttttgtgctgtc

SEQ ID NO: 1014377 - DNA, 15 bp, Homo sapiens
acttttgtgctgtcc

SEQ ID NO: 1014378 - DNA, 15 bp, Homo sapiens
cttttgtgctgtccc

SEQ ID NO: 1014379 - DNA, 15 bp, Homo sapiens
ttttgtgctgtccct

SEQ ID NO: 1014380 - DNA, 15 bp, Homo sapiens
tttgtgctgtccctg

SEQ ID NO: 1014381 - DNA, 15 bp, Homo sapiens
ttgtgctgtccctgg

SEQ ID NO: 1014382 - DNA, 15 bp, Homo sapiens
tgtgctgtccctgga

SEQ ID NO: 1014383 - DNA, 15 bp, Homo sapiens
gtgctgtccctggaa

SEQ ID NO: 1014384 - DNA, 15 bp, Homo sapiens
tgctgtccctggaaa

SEQ ID NO: 1014385 - DNA, 15 bp, Homo sapiens
gctgtccctggaaac

SEQ ID NO: 1014386 - DNA, 15 bp, Homo sapiens
ctgtccctggaaaca

SEQ ID NO: 1014387 - DNA, 15 bp, Homo sapiens
tgtccctggaaacaa

SEQ ID NO: 1014388 - DNA, 15 bp, Homo sapiens
gtccctggaaacaat

SEQ ID NO: 1014389 - DNA, 15 bp, Homo sapiens
tccctggaaacaatt

SEQ ID NO: 1014390 - DNA, 15 bp, Homo sapiens
ccctggaaacaattt

SEQ ID NO: 1014391 - DNA, 15 bp, Homo sapiens
cctggaaacaatttc

SEQ ID NO: 1014392 - DNA, 15 bp, Homo sapiens
ctggaaacaatttca

SEQ ID NO: 1014393 - DNA, 15 bp, Homo sapiens
tggaaacaatttcag

SEQ ID NO: 1014394 - DNA, 15 bp, Homo sapiens
ggaaacaatttcagc

SEQ ID NO: 1014395 - DNA, 15 bp, Homo sapiens
gaaacaatttcagcc

SEQ ID NO: 1014396 - DNA, 15 bp, Homo sapiens
aaacaatttcagcca

SEQ ID NO: 1014397 - DNA, 15 bp, Homo sapiens
aacaatttcagccag

SEQ ID NO: 1014398 - DNA, 15 bp, Homo sapiens
acaatttcagccaga

SEQ ID NO: 1014399 - DNA, 15 bp, Homo sapiens
caatttcagccagaa

SEQ ID NO: 1014400 - DNA, 15 bp, Homo sapiens
aatttcagccagaaa

SEQ ID NO: 1014401 - DNA, 15 bp, Homo sapiens
atttcagccagaaaa

SEQ ID NO: 1014402 - DNA, 15 bp, Homo sapiens
tttcagccagaaaac

SEQ ID NO: 1014403 - DNA, 15 bp, Homo sapiens
ttcagccagaaaaca

SEQ ID NO: 1014404 - DNA, 15 bp, Homo sapiens
tcagccagaaaacac

SEQ ID NO: 1014405 - DNA, 15 bp, Homo sapiens
cagccagaaaacact

SEQ ID NO: 1014406 - DNA, 15 bp, Homo sapiens
agccagaaaacactg

SEQ ID NO: 1014407 - DNA, 15 bp, Homo sapiens
gccagaaaacactgg

SEQ ID NO: 1014408 - DNA, 15 bp, Homo sapiens
ccagaaaacactggg

SEQ ID NO: 1014409 - DNA, 15 bp, Homo sapiens
cagaaaacactggga

SEQ ID NO: 1014410 - DNA, 15 bp, Homo sapiens
agaaaacactgggac

SEQ ID NO: 1014411 - DNA, 15 bp, Homo sapiens
gaaaacactgggaca

SEQ ID NO: 1014412 - DNA, 15 bp, Homo sapiens
aaaacactgggacaa

SEQ ID NO: 1014413 - DNA, 15 bp, Homo sapiens
aaacactgggacaac

SEQ ID NO: 1014414 - DNA, 15 bp, Homo sapiens
aacactgggacaaca

SEQ ID NO: 1014415 - DNA, 15 bp, Homo sapiens
acactgggacaacat

SEQ ID NO: 1014416 - DNA, 15 bp, Homo sapiens
cactgggacaacatc

SEQ ID NO: 1014417 - DNA, 15 bp, Homo sapiens
actgggacaacatct

SEQ ID NO: 1014418 - DNA, 15 bp, Homo sapiens
ctgggacaacatctt

SEQ ID NO: 1014419 - DNA, 15 bp, Homo sapiens
tgggacaacatcttc

SEQ ID NO: 1014420 - DNA, 15 bp, Homo sapiens
gggacaacatcttca

SEQ ID NO: 1014421 - DNA, 15 bp, Homo sapiens
ggacaacatcttcaa

SEQ ID NO: 1014422 - DNA, 15 bp, Homo sapiens
gacaacatcttcaaa

SEQ ID NO: 1014423 - DNA, 15 bp, Homo sapiens
acaacatcttcaaag

SEQ ID NO: 1014424 - DNA, 15 bp, Homo sapiens
caacatcttcaaagt

SEQ ID NO: 1014425 - DNA, 15 bp, Homo sapiens
aacatcttcaaagtg

SEQ ID NO: 1014426 - DNA, 15 bp, Homo sapiens
acatcttcaaagtgc

SEQ ID NO: 1014427 - DNA, 15 bp, Homo sapiens
catcttcaaagtgct

SEQ ID NO: 1014428 - DNA, 15 bp, Homo sapiens
atcttcaaagtgctg

SEQ ID NO: 1014429 - DNA, 15 bp, Homo sapiens
tcttcaaagtgctgg

SEQ ID NO: 1014430 - DNA, 15 bp, Homo sapiens
cttcaaagtgctggg

SEQ ID NO: 1014431 - DNA, 15 bp, Homo sapiens
ttcaaagtgctgggg

SEQ ID NO: 1014432 - DNA, 15 bp, Homo sapiens
tcaaagtgctggggg

SEQ ID NO: 1014433 - DNA, 15 bp, Homo sapiens
caaagtgctgggggt

SEQ ID NO: 1014434 - DNA, 15 bp, Homo sapiens
aaagtgctgggggta

SEQ ID NO: 1014435 - DNA, 15 bp, Homo sapiens
aagtgctgggggtag

SEQ ID NO: 1014436 - DNA, 15 bp, Homo sapiens
agtgctgggggtaga

SEQ ID NO: 1014437 - DNA, 15 bp, Homo sapiens
gtgctgggggtagaa

SEQ ID NO: 1014438 - DNA, 15 bp, Homo sapiens
tgctgggggtagaaa

SEQ ID NO: 1014439 - DNA, 15 bp, Homo sapiens
gctgggggtagaaaa

SEQ ID NO: 1014440 - DNA, 15 bp, Homo sapiens
ctgggggtagaaaac

SEQ ID NO: 1014441 - DNA, 15 bp, Homo sapiens
tgggggtagaaaacc

SEQ ID NO: 1014442 - DNA, 15 bp, Homo sapiens
gggggtagaaaaccc

SEQ ID NO: 1014443 - DNA, 15 bp, Homo sapiens
ggggtagaaaaccca

SEQ ID NO: 1014444 - DNA, 15 bp, Homo sapiens
gggtagaaaacccag

SEQ ID NO: 1014445 - DNA, 15 bp, Homo sapiens
ggtagaaaacccaga

SEQ ID NO: 1014446 - DNA, 15 bp, Homo sapiens
gtagaaaacccagaa

SEQ ID NO: 1014447 - DNA, 15 bp, Homo sapiens
tagaaaacccagaaa

SEQ ID NO: 1014448 - DNA, 15 bp, Homo sapiens
agaaaacccagaaac

SEQ ID NO: 1014449 - DNA, 15 bp, Homo sapiens
gaaaacccagaaaca

SEQ ID NO: 1014450 - DNA, 15 bp, Homo sapiens
aaaacccagaaacat

SEQ ID NO: 1014451 - DNA, 15 bp, Homo sapiens
aaacccagaaacatt

SEQ ID NO: 1014452 - DNA, 15 bp, Homo sapiens
aacccagaaacattg

SEQ ID NO: 1014453 - DNA, 15 bp, Homo sapiens
acccagaaacattgt

SEQ ID NO: 1014454 - DNA, 15 bp, Homo sapiens
cccagaaacattgtg

SEQ ID NO: 1014455 - DNA, 15 bp, Homo sapiens
ccagaaacattgtga

SEQ ID NO: 1014456 - DNA, 15 bp, Homo sapiens
cagaaacattgtgaa

SEQ ID NO: 1014457 - DNA, 15 bp, Homo sapiens
agaaacattgtgaac

SEQ ID NO: 1014458 - DNA, 15 bp, Homo sapiens
gaaacattgtgaacc

SEQ ID NO: 1014459 - DNA, 15 bp, Homo sapiens
aaacattgtgaacct

SEQ ID NO: 1014460 - DNA, 15 bp, Homo sapiens
aacattgtgaaccta

SEQ ID NO: 1014461 - DNA, 15 bp, Homo sapiens
acattgtgaacctat

SEQ ID NO: 1014462 - DNA, 15 bp, Homo sapiens
cattgtgaacctata

SEQ ID NO: 1014463 - DNA, 15 bp, Homo sapiens
attgtgaacctataa

SEQ ID NO: 1014464 - DNA, 15 bp, Homo sapiens
ttgtgaacctataat

SEQ ID NO: 1014465 - DNA, 15 bp, Homo sapiens
tgtgaacctataatt

SEQ ID NO: 1014466 - DNA, 15 bp, Homo sapiens
gtgaacctataattc

SEQ ID NO: 1014467 - DNA, 15 bp, Homo sapiens
tgaacctataattct

SEQ ID NO: 1014468 - DNA, 15 bp, Homo sapiens
gaacctataattcta

SEQ ID NO: 1014469 - DNA, 15 bp, Homo sapiens
aacctataattctat

SEQ ID NO: 1014470 - DNA, 15 bp, Homo sapiens
acctataattctata

SEQ ID NO: 1014471 - DNA, 15 bp, Homo sapiens
cctataattctatac

SEQ ID NO: 1014472 - DNA, 15 bp, Homo sapiens
ctataattctatacc

SEQ ID NO: 1014473 - DNA, 15 bp, Homo sapiens
tataattctatacct

SEQ ID NO: 1014474 - DNA, 15 bp, Homo sapiens
ataattctataccta

SEQ ID NO: 1014475 - DNA, 15 bp, Homo sapiens
taattctatacctaa

SEQ ID NO: 1014476 - DNA, 15 bp, Homo sapiens
aattctatacctaat

SEQ ID NO: 1014477 - DNA, 15 bp, Homo sapiens
attctatacctaatg

SEQ ID NO: 1014478 - DNA, 15 bp, Homo sapiens
ttctatacctaatga

SEQ ID NO: 1014479 - DNA, 15 bp, Homo sapiens
tctatacctaatgaa

SEQ ID NO: 1014480 - DNA, 15 bp, Homo sapiens
ctatacctaatgaaa

SEQ ID NO: 1014481 - DNA, 15 bp, Homo sapiens
tatacctaatgaaaa

SEQ ID NO: 1014482 - DNA, 15 bp, Homo sapiens
atacctaatgaaaat

SEQ ID NO: 1014483 - DNA, 15 bp, Homo sapiens
tacctaatgaaaata

SEQ ID NO: 1014484 - DNA, 15 bp, Homo sapiens
acctaatgaaaatat

SEQ ID NO: 1014485 - DNA, 15 bp, Homo sapiens
cctaatgaaaatatc

SEQ ID NO: 1014486 - DNA, 15 bp, Homo sapiens
ctaatgaaaatatct

SEQ ID NO: 1014487 - DNA, 15 bp, Homo sapiens
taatgaaaatatctt

SEQ ID NO: 1014488 - DNA, 15 bp, Homo sapiens
aatgaaaatatcttt

SEQ ID NO: 1014489 - DNA, 15 bp, Homo sapiens
atgaaaatatctttg

SEQ ID NO: 1014490 - DNA, 15 bp, Homo sapiens
tgaaaatatctttgc

SEQ ID NO: 1014491 - DNA, 15 bp, Homo sapiens
gaaaatatctttgca

SEQ ID NO: 1014492 - DNA, 15 bp, Homo sapiens
aaaatatctttgcaa

SEQ ID NO: 1014493 - DNA, 15 bp, Homo sapiens
aaatatctttgcaaa

SEQ ID NO: 1014494 - DNA, 15 bp, Homo sapiens
aatatctttgcaaaa

SEQ ID NO: 1014495 - DNA, 15 bp, Homo sapiens
atatctttgcaaaat

SEQ ID NO: 1014496 - DNA, 15 bp, Homo sapiens
tatctttgcaaaatg

SEQ ID NO: 1014497 - DNA, 15 bp, Homo sapiens
atctttgcaaaatga

SEQ ID NO: 1014498 - DNA, 15 bp, Homo sapiens
tctttgcaaaatgag

SEQ ID NO: 1014499 - DNA, 15 bp, Homo sapiens
ctttgcaaaatgagg

SEQ ID NO: 1014500 - DNA, 15 bp, Homo sapiens
tttgcaaaatgagga

SEQ ID NO: 1014501 - DNA, 15 bp, Homo sapiens
ttgcaaaatgaggat

SEQ ID NO: 1014502 - DNA, 15 bp, Homo sapiens
tgcaaaatgaggatg

SEQ ID NO: 1014503 - DNA, 15 bp, Homo sapiens
gcaaaatgaggatga

SEQ ID NO: 1014504 - DNA, 15 bp, Homo sapiens
caaaatgaggatgaa

SEQ ID NO: 1014505 - DNA, 15 bp, Homo sapiens
aaaatgaggatgaaa

SEQ ID NO: 1014506 - DNA, 15 bp, Homo sapiens
aaatgaggatgaaat

SEQ ID NO: 1014507 - DNA, 15 bp, Homo sapiens
aatgaggatgaaata

SEQ ID NO: 1014508 - DNA, 15 bp, Homo sapiens
atgaggatgaaataa

SEQ ID NO: 1014509 - DNA, 15 bp, Homo sapiens
tgaggatgaaataaa

SEQ ID NO: 1014510 - DNA, 15 bp, Homo sapiens
gaggatgaaataaag

SEQ ID NO: 1014511 - DNA, 15 bp, Homo sapiens
aggatgaaataaaga

SEQ ID NO: 1014512 - DNA, 15 bp, Homo sapiens
ggatgaaataaagac

SEQ ID NO: 1014513 - DNA, 15 bp, Homo sapiens
gatgaaataaagaca

SEQ ID NO: 1014514 - DNA, 15 bp, Homo sapiens
atgaaataaagacag

SEQ ID NO: 1014515 - DNA, 15 bp, Homo sapiens
tgaaataaagacagg

SEQ ID NO: 1014516 - DNA, 15 bp, Homo sapiens
gaaataaagacaggc

SEQ ID NO: 1014517 - DNA, 15 bp, Homo sapiens
aaataaagacaggca

SEQ ID NO: 1014518 - DNA, 15 bp, Homo sapiens
aataaagacaggcaa

SEQ ID NO: 1014519 - DNA, 15 bp, Homo sapiens
ataaagacaggcaaa

SEQ ID NO: 1014520 - DNA, 15 bp, Homo sapiens
taaagacaggcaaag

SEQ ID NO: 1014521 - DNA, 15 bp, Homo sapiens
aaagacaggcaaagc

SEQ ID NO: 1014522 - DNA, 15 bp, Homo sapiens
aagacaggcaaagct

SEQ ID NO: 1014523 - DNA, 15 bp, Homo sapiens
agacaggcaaagctg

SEQ ID NO: 1014524 - DNA, 15 bp, Homo sapiens
gacaggcaaagctga

SEQ ID NO: 1014525 - DNA, 15 bp, Homo sapiens
acaggcaaagctgaa

SEQ ID NO: 1014526 - DNA, 15 bp, Homo sapiens
caggcaaagctgaaa

SEQ ID NO: 1014527 - DNA, 15 bp, Homo sapiens
aggcaaagctgaaag

SEQ ID NO: 1014528 - DNA, 15 bp, Homo sapiens
ggcaaagctgaaaga

SEQ ID NO: 1014529 - DNA, 15 bp, Homo sapiens
gcaaagctgaaagaa

SEQ ID NO: 1014530 - DNA, 15 bp, Homo sapiens
caaagctgaaagaat

SEQ ID NO: 1014531 - DNA, 15 bp, Homo sapiens
aaagctgaaagaatt

SEQ ID NO: 1014532 - DNA, 15 bp, Homo sapiens
aagctgaaagaatta

SEQ ID NO: 1014533 - DNA, 15 bp, Homo sapiens
agctgaaagaattaa

SEQ ID NO: 1014534 - DNA, 15 bp, Homo sapiens
gctgaaagaattaat

SEQ ID NO: 1014535 - DNA, 15 bp, Homo sapiens
ctgaaagaattaatc

SEQ ID NO: 1014536 - DNA, 15 bp, Homo sapiens
tgaaagaattaatca

SEQ ID NO: 1014537 - DNA, 15 bp, Homo sapiens
gaaagaattaatcaa

SEQ ID NO: 1014538 - DNA, 15 bp, Homo sapiens
aaagaattaatcaac

SEQ ID NO: 1014539 - DNA, 15 bp, Homo sapiens
aagaattaatcaaca

SEQ ID NO: 1014540 - DNA, 15 bp, Homo sapiens
agaattaatcaacat

SEQ ID NO: 1014541 - DNA, 15 bp, Homo sapiens
gaattaatcaacatc

SEQ ID NO: 1014542 - DNA, 15 bp, Homo sapiens
aattaatcaacatca

SEQ ID NO: 1014543 - DNA, 15 bp, Homo sapiens
attaatcaacatcac

SEQ ID NO: 1014544 - DNA, 15 bp, Homo sapiens
ttaatcaacatcaca

SEQ ID NO: 1014545 - DNA, 15 bp, Homo sapiens
taatcaacatcacac

SEQ ID NO: 1014546 - DNA, 15 bp, Homo sapiens
aatcaacatcacacc

SEQ ID NO: 1014547 - DNA, 15 bp, Homo sapiens
atcaacatcacacca

SEQ ID NO: 1014548 - DNA, 15 bp, Homo sapiens
tcaacatcacaccag

SEQ ID NO: 1014549 - DNA, 15 bp, Homo sapiens
caacatcacaccagt

SEQ ID NO: 1014550 - DNA, 15 bp, Homo sapiens
aacatcacaccagta

SEQ ID NO: 1014551 - DNA, 15 bp, Homo sapiens
acatcacaccagtac

SEQ ID NO: 1014552 - DNA, 15 bp, Homo sapiens
catcacaccagtact

SEQ ID NO: 1014553 - DNA, 15 bp, Homo sapiens
atcacaccagtacta

SEQ ID NO: 1014554 - DNA, 15 bp, Homo sapiens
tcacaccagtactat

SEQ ID NO: 1014555 - DNA, 15 bp, Homo sapiens
cacaccagtactata

SEQ ID NO: 1014556 - DNA, 15 bp, Homo sapiens
acaccagtactataa

SEQ ID NO: 1014557 - DNA, 15 bp, Homo sapiens
caccagtactataag

SEQ ID NO: 1014558 - DNA, 15 bp, Homo sapiens
accagtactataaga

SEQ ID NO: 1014559 - DNA, 15 bp, Homo sapiens
ccagtactataagaa

SEQ ID NO: 1014560 - DNA, 15 bp, Homo sapiens
cagtactataagaaa

SEQ ID NO: 1014561 - DNA, 15 bp, Homo sapiens
agtactataagaaat

SEQ ID NO: 1014562 - DNA, 15 bp, Homo sapiens
gtactataagaaatg

SEQ ID NO: 1014563 - DNA, 15 bp, Homo sapiens
tactataagaaatgt

SEQ ID NO: 1014564 - DNA, 15 bp, Homo sapiens
actataagaaatgtt

SEQ ID NO: 1014565 - DNA, 15 bp, Homo sapiens
ctataagaaatgttg

SEQ ID NO: 1014566 - DNA, 15 bp, Homo sapiens
tataagaaatgttga

SEQ ID NO: 1014567 - DNA, 15 bp, Homo sapiens
ataagaaatgttgaa

SEQ ID NO: 1014568 - DNA, 15 bp, Homo sapiens
taagaaatgttgaaa

SEQ ID NO: 1014569 - DNA, 15 bp, Homo sapiens
aagaaatgttgaaaa

SEQ ID NO: 1014570 - DNA, 15 bp, Homo sapiens
agaaatgttgaaaag

SEQ ID NO: 1014571 - DNA, 15 bp, Homo sapiens
gaaatgttgaaaaga

SEQ ID NO: 1014572 - DNA, 15 bp, Homo sapiens
aaatgttgaaaagaa

SEQ ID NO: 1014573 - DNA, 15 bp, Homo sapiens
aatgttgaaaagaaa

SEQ ID NO: 1014574 - DNA, 15 bp, Homo sapiens
atgttgaaaagaaat

SEQ ID NO: 1014575 - DNA, 15 bp, Homo sapiens
tgttgaaaagaaatt

SEQ ID NO: 1014576 - DNA, 15 bp, Homo sapiens
gttgaaaagaaattc

SEQ ID NO: 1014577 - DNA, 15 bp, Homo sapiens
ttgaaaagaaattct

SEQ ID NO: 1014578 - DNA, 15 bp, Homo sapiens
tgaaaagaaattctt

SEQ ID NO: 1014579 - DNA, 15 bp, Homo sapiens
gaaaagaaattcttt

SEQ ID NO: 1014580 - DNA, 15 bp, Homo sapiens
aaaagaaattctttg

SEQ ID NO: 1014581 - DNA, 15 bp, Homo sapiens
aaagaaattctttgt

SEQ ID NO: 1014582 - DNA, 15 bp, Homo sapiens
aagaaattctttgta

SEQ ID NO: 1014583 - DNA, 15 bp, Homo sapiens
agaaattctttgtaa

SEQ ID NO: 1014584 - DNA, 15 bp, Homo sapiens
gaaattctttgtaag

SEQ ID NO: 1014585 - DNA, 15 bp, Homo sapiens
aaattctttgtaaga

SEQ ID NO: 1014586 - DNA, 15 bp, Homo sapiens
aattctttgtaagaa

SEQ ID NO: 1014587 - DNA, 15 bp, Homo sapiens
attctttgtaagaaa

SEQ ID NO: 1014588 - DNA, 15 bp, Homo sapiens
ttctttgtaagaaaa

SEQ ID NO: 1014589 - DNA, 15 bp, Homo sapiens
tctttgtaagaaaat

SEQ ID NO: 1014590 - DNA, 15 bp, Homo sapiens
ctttgtaagaaaata

SEQ ID NO: 1014591 - DNA, 15 bp, Homo sapiens
tttgtaagaaaataa

SEQ ID NO: 1014592 - DNA, 15 bp, Homo sapiens
ttgtaagaaaataat

SEQ ID NO: 1014593 - DNA, 15 bp, Homo sapiens
tgtaagaaaataata

SEQ ID NO: 1014594 - DNA, 15 bp, Homo sapiens
gtaagaaaataatac

SEQ ID NO: 1014595 - DNA, 15 bp, Homo sapiens
taagaaaataatact

SEQ ID NO: 1014596 - DNA, 15 bp, Homo sapiens
aagaaaataatacta

SEQ ID NO: 1014597 - DNA, 15 bp, Homo sapiens
agaaaataatactag

SEQ ID NO: 1014598 - DNA, 15 bp, Homo sapiens
gaaaataatactaga

SEQ ID NO: 1014599 - DNA, 15 bp, Homo sapiens
aaaataatactagat

SEQ ID NO: 1014600 - DNA, 15 bp, Homo sapiens
aaataatactagatg

SEQ ID NO: 1014601 - DNA, 15 bp, Homo sapiens
aataatactagatgg

SEQ ID NO: 1014602 - DNA, 15 bp, Homo sapiens
ataatactagatgga

SEQ ID NO: 1014603 - DNA, 15 bp, Homo sapiens
taatactagatggaa

SEQ ID NO: 1014604 - DNA, 15 bp, Homo sapiens
aatactagatggaaa

SEQ ID NO: 1014605 - DNA, 15 bp, Homo sapiens
atactagatggaaat

SEQ ID NO: 1014606 - DNA, 15 bp, Homo sapiens
tactagatggaaata

SEQ ID NO: 1014607 - DNA, 15 bp, Homo sapiens
actagatggaaatat

SEQ ID NO: 1014608 - DNA, 15 bp, Homo sapiens
ctagatggaaatatg

SEQ ID NO: 1014609 - DNA, 15 bp, Homo sapiens
tagatggaaatatga

SEQ ID NO: 1014610 - DNA, 15 bp, Homo sapiens
agatggaaatatgaa

SEQ ID NO: 1014611 - DNA, 15 bp, Homo sapiens
gatggaaatatgaac

SEQ ID NO: 1014612 - DNA, 15 bp, Homo sapiens
atggaaatatgaacc

SEQ ID NO: 1014613 - DNA, 15 bp, Homo sapiens
tggaaatatgaacct

SEQ ID NO: 1014614 - DNA, 15 bp, Homo sapiens
ggaaatatgaaccta

SEQ ID NO: 1014615 - DNA, 15 bp, Homo sapiens
gaaatatgaacctac

SEQ ID NO: 1014616 - DNA, 15 bp, Homo sapiens
aaatatgaacctaca

SEQ ID NO: 1014617 - DNA, 15 bp, Homo sapiens
aatatgaacctacac

SEQ ID NO: 1014618 - DNA, 15 bp, Homo sapiens
atatgaacctacaca

SEQ ID NO: 1014619 - DNA, 15 bp, Homo sapiens
tatgaacctacacaa

SEQ ID NO: 1014620 - DNA, 15 bp, Homo sapiens
atgaacctacacaaa

SEQ ID NO: 1014621 - DNA, 15 bp, Homo sapiens
tgaacctacacaaag

SEQ ID NO: 1014622 - DNA, 15 bp, Homo sapiens
gaacctacacaaagg

SEQ ID NO: 1014623 - DNA, 15 bp, Homo sapiens
aacctacacaaagga

SEQ ID NO: 1014624 - DNA, 15 bp, Homo sapiens
acctacacaaaggag

SEQ ID NO: 1014625 - DNA, 15 bp, Homo sapiens
cctacacaaaggagt

SEQ ID NO: 1014626 - DNA, 15 bp, Homo sapiens
ctacacaaaggagtg

SEQ ID NO: 1014627 - DNA, 15 bp, Homo sapiens
tacacaaaggagtga

SEQ ID NO: 1014628 - DNA, 15 bp, Homo sapiens
acacaaaggagtgaa

SEQ ID NO: 1014629 - DNA, 15 bp, Homo sapiens
cacaaaggagtgaag

SEQ ID NO: 1014630 - DNA, 15 bp, Homo sapiens
acaaaggagtgaaga

SEQ ID NO: 1014631 - DNA, 15 bp, Homo sapiens
caaaggagtgaagag

SEQ ID NO: 1014632 - DNA, 15 bp, Homo sapiens
aaaggagtgaagagc

SEQ ID NO: 1014633 - DNA, 15 bp, Homo sapiens
aaggagtgaagagca

SEQ ID NO: 1014634 - DNA, 15 bp, Homo sapiens
aggagtgaagagcac

SEQ ID NO: 1014635 - DNA, 15 bp, Homo sapiens
ggagtgaagagcacc

SEQ ID NO: 1014636 - DNA, 15 bp, Homo sapiens
gagtgaagagcacca

SEQ ID NO: 1014637 - DNA, 15 bp, Homo sapiens
agtgaagagcaccag

SEQ ID NO: 1014638 - DNA, 15 bp, Homo sapiens
gtgaagagcaccaga

SEQ ID NO: 1014639 - DNA, 15 bp, Homo sapiens
tgaagagcaccagaa

SEQ ID NO: 1014640 - DNA, 15 bp, Homo sapiens
gaagagcaccagaaa

SEQ ID NO: 1014641 - DNA, 15 bp, Homo sapiens
aagagcaccagaaat

SEQ ID NO: 1014642 - DNA, 15 bp, Homo sapiens
agagcaccagaaata

SEQ ID NO: 1014643 - DNA, 15 bp, Homo sapiens
gagcaccagaaatag

SEQ ID NO: 1014644 - DNA, 15 bp, Homo sapiens
agcaccagaaatagt

SEQ ID NO: 1014645 - DNA, 15 bp, Homo sapiens
gcaccagaaatagta

SEQ ID NO: 1014646 - DNA, 15 bp, Homo sapiens
caccagaaatagtaa

SEQ ID NO: 1014647 - DNA, 15 bp, Homo sapiens
accagaaatagtaac

SEQ ID NO: 1014648 - DNA, 15 bp, Homo sapiens
ccagaaatagtaact

SEQ ID NO: 1014649 - DNA, 15 bp, Homo sapiens
cagaaatagtaacta

SEQ ID NO: 1014650 - DNA, 15 bp, Homo sapiens
agaaatagtaactat

SEQ ID NO: 1014651 - DNA, 15 bp, Homo sapiens
gaaatagtaactatg

SEQ ID NO: 1014652 - DNA, 15 bp, Homo sapiens
aaatagtaactatgt

SEQ ID NO: 1014653 - DNA, 15 bp, Homo sapiens
aatagtaactatgtg

SEQ ID NO: 1014654 - DNA, 15 bp, Homo sapiens
atagtaactatgtgt

SEQ ID NO: 1014655 - DNA, 15 bp, Homo sapiens
tagtaactatgtgtg

SEQ ID NO: 1014656 - DNA, 15 bp, Homo sapiens
agtaactatgtgtga

SEQ ID NO: 1014657 - DNA, 15 bp, Homo sapiens
gtaactatgtgtgaa

SEQ ID NO: 1014658 - DNA, 15 bp, Homo sapiens
taactatgtgtgaaa

SEQ ID NO: 1014659 - DNA, 15 bp, Homo sapiens
aactatgtgtgaaat

SEQ ID NO: 1014660 - DNA, 15 bp, Homo sapiens
actatgtgtgaaata

SEQ ID NO: 1014661 - DNA, 15 bp, Homo sapiens
ctatgtgtgaaatat

SEQ ID NO: 1014662 - DNA, 15 bp, Homo sapiens
tatgtgtgaaatata

SEQ ID NO: 1014663 - DNA, 15 bp, Homo sapiens
atgtgtgaaatataa

SEQ ID NO: 1014664 - DNA, 15 bp, Homo sapiens
tgtgtgaaatataaa

SEQ ID NO: 1014665 - DNA, 15 bp, Homo sapiens
gtgtgaaatataaaa

SEQ ID NO: 1014666 - DNA, 15 bp, Homo sapiens
tgtgaaatataaaag

SEQ ID NO: 1014667 - DNA, 15 bp, Homo sapiens
gtgaaatataaaaga

SEQ ID NO: 1014668 - DNA, 15 bp, Homo sapiens
tgaaatataaaagaa

SEQ ID NO: 1014669 - DNA, 15 bp, Homo sapiens
gaaatataaaagaat

SEQ ID NO: 1014670 - DNA, 15 bp, Homo sapiens
aaatataaaagaatt

SEQ ID NO: 1014671 - DNA, 15 bp, Homo sapiens
aatataaaagaattt

SEQ ID NO: 1014672 - DNA, 15 bp, Homo sapiens
atataaaagaatttt

SEQ ID NO: 1014673 - DNA, 15 bp, Homo sapiens
tataaaagaattttt

SEQ ID NO: 1014674 - DNA, 15 bp, Homo sapiens
ataaaagaatttttt

SEQ ID NO: 1014675 - DNA, 15 bp, Homo sapiens
taaaagaattttttt

SEQ ID NO: 1014676 - DNA, 15 bp, Homo sapiens
aaaagaatttttttt

SEQ ID NO: 1014677 - DNA, 15 bp, Homo sapiens
aaagaatttttttta

SEQ ID NO: 1014678 - DNA, 15 bp, Homo sapiens
aagaattttttttac

SEQ ID NO: 1014679 - DNA, 15 bp, Homo sapiens
agaattttttttact

SEQ ID NO: 1014680 - DNA, 15 bp, Homo sapiens
gaattttttttacta

SEQ ID NO: 1014681 - DNA, 15 bp, Homo sapiens
aattttttttactat

SEQ ID NO: 1014682 - DNA, 15 bp, Homo sapiens
attttttttactatt

SEQ ID NO: 1014683 - DNA, 15 bp, Homo sapiens
ttttttttactattt

SEQ ID NO: 1014684 - DNA, 15 bp, Homo sapiens
tttttttactattta

SEQ ID NO: 1014685 - DNA, 15 bp, Homo sapiens
ttttttactatttac

SEQ ID NO: 1014686 - DNA, 15 bp, Homo sapiens
tttttactatttaca

SEQ ID NO: 1014687 - DNA, 15 bp, Homo sapiens
ttttactatttacat

SEQ ID NO: 1014688 - DNA, 15 bp, Homo sapiens
tttactatttacatc

SEQ ID NO: 1014689 - DNA, 15 bp, Homo sapiens
ttactatttacatct

SEQ ID NO: 1014690 - DNA, 15 bp, Homo sapiens
tactatttacatctc

SEQ ID NO: 1014691 - DNA, 15 bp, Homo sapiens
actatttacatctct

SEQ ID NO: 1014692 - DNA, 15 bp, Homo sapiens
ctatttacatctctt

SEQ ID NO: 1014693 - DNA, 15 bp, Homo sapiens
tatttacatctcttt

SEQ ID NO: 1014694 - DNA, 15 bp, Homo sapiens
atttacatctcttta

SEQ ID NO: 1014695 - DNA, 15 bp, Homo sapiens
tttacatctctttaa

SEQ ID NO: 1014696 - DNA, 15 bp, Homo sapiens
ttacatctctttaaa

SEQ ID NO: 1014697 - DNA, 15 bp, Homo sapiens
tacatctctttaaaa

SEQ ID NO: 1014698 - DNA, 15 bp, Homo sapiens
acatctctttaaaag

SEQ ID NO: 1014699 - DNA, 15 bp, Homo sapiens
catctctttaaaaga

SEQ ID NO: 1014700 - DNA, 15 bp, Homo sapiens
atctctttaaaagat

SEQ ID NO: 1014701 - DNA, 15 bp, Homo sapiens
tctctttaaaagatt

SEQ ID NO: 1014702 - DNA, 15 bp, Homo sapiens
ctctttaaaagatta

SEQ ID NO: 1014703 - DNA, 15 bp, Homo sapiens
tctttaaaagattac

SEQ ID NO: 1014704 - DNA, 15 bp, Homo sapiens
ctttaaaagattact

SEQ ID NO: 1014705 - DNA, 15 bp, Homo sapiens
tttaaaagattactg

SEQ ID NO: 1014706 - DNA, 15 bp, Homo sapiens
ttaaaagattactga

SEQ ID NO: 1014707 - DNA, 15 bp, Homo sapiens
taaaagattactgac

SEQ ID NO: 1014708 - DNA, 15 bp, Homo sapiens
aaaagattactgact

SEQ ID NO: 1014709 - DNA, 15 bp, Homo sapiens
aaagattactgactg

SEQ ID NO: 1014710 - DNA, 15 bp, Homo sapiens
aagattactgactgt

SEQ ID NO: 1014711 - DNA, 15 bp, Homo sapiens
agattactgactgtg

SEQ ID NO: 1014712 - DNA, 15 bp, Homo sapiens
gattactgactgtgt

SEQ ID NO: 1014713 - DNA, 15 bp, Homo sapiens
attactgactgtgta

SEQ ID NO: 1014714 - DNA, 15 bp, Homo sapiens
ttactgactgtgtaa

SEQ ID NO: 1014715 - DNA, 15 bp, Homo sapiens
tactgactgtgtaag

SEQ ID NO: 1014716 - DNA, 15 bp, Homo sapiens
actgactgtgtaaga

SEQ ID NO: 1014717 - DNA, 15 bp, Homo sapiens
ctgactgtgtaagac

SEQ ID NO: 1014718 - DNA, 15 bp, Homo sapiens
tgactgtgtaagaca

SEQ ID NO: 1014719 - DNA, 15 bp, Homo sapiens
gactgtgtaagacaa

SEQ ID NO: 1014720 - DNA, 15 bp, Homo sapiens
actgtgtaagacaaa

SEQ ID NO: 1014721 - DNA, 15 bp, Homo sapiens
ctgtgtaagacaaaa

SEQ ID NO: 1014722 - DNA, 15 bp, Homo sapiens
tgtgtaagacaaaaa

SEQ ID NO: 1014723 - DNA, 15 bp, Homo sapiens
gtgtaagacaaaaat

SEQ ID NO: 1014724 - DNA, 15 bp, Homo sapiens
tgtaagacaaaaata

SEQ ID NO: 1014725 - DNA, 15 bp, Homo sapiens
gtaagacaaaaataa

SEQ ID NO: 1014726 - DNA, 15 bp, Homo sapiens
taagacaaaaataat

SEQ ID NO: 1014727 - DNA, 15 bp, Homo sapiens
aagacaaaaataata

SEQ ID NO: 1014728 - DNA, 15 bp, Homo sapiens
agacaaaaataataa

SEQ ID NO: 1014729 - DNA, 15 bp, Homo sapiens
gacaaaaataataaa

SEQ ID NO: 1014730 - DNA, 15 bp, Homo sapiens
acaaaaataataaac

SEQ ID NO: 1014731 - DNA, 15 bp, Homo sapiens
caaaaataataaaca

SEQ ID NO: 1014732 - DNA, 15 bp, Homo sapiens
aaaaataataaacat

SEQ ID NO: 1014733 - DNA, 15 bp, Homo sapiens
aaaataataaacatt

SEQ ID NO: 1014734 - DNA, 15 bp, Homo sapiens
aaataataaacattt

SEQ ID NO: 1014735 - DNA, 15 bp, Homo sapiens
aataataaacattta

SEQ ID NO: 1014736 - DNA, 15 bp, Homo sapiens
ataataaacatttat

SEQ ID NO: 1014737 - DNA, 15 bp, Homo sapiens
taataaacatttatt

SEQ ID NO: 1014738 - DNA, 15 bp, Homo sapiens
aataaacatttattg

SEQ ID NO: 1014739 - DNA, 15 bp, Homo sapiens
ataaacatttattgt

SEQ ID NO: 1014740 - DNA, 15 bp, Homo sapiens
taaacatttattgtg

SEQ ID NO: 1014741 - DNA, 15 bp, Homo sapiens
aaacatttattgtgg

SEQ ID NO: 1014742 - DNA, 15 bp, Homo sapiens
aacatttattgtgga

SEQ ID NO: 1014743 - DNA, 15 bp, Homo sapiens
acatttattgtggat

SEQ ID NO: 1014744 - DNA, 15 bp, Homo sapiens
catttattgtggata

SEQ ID NO: 1014745 - DNA, 15 bp, Homo sapiens
atttattgtggatat

SEQ ID NO: 1014746 - DNA, 15 bp, Homo sapiens
tttattgtggatata

SEQ ID NO: 1014747 - DNA, 15 bp, Homo sapiens
ttattgtggatatat

SEQ ID NO: 1014748 - DNA, 15 bp, Homo sapiens
tattgtggatatatt

SEQ ID NO: 1014749 - DNA, 15 bp, Homo sapiens
attgtggatatattt

SEQ ID NO: 1014750 - DNA, 15 bp, Homo sapiens
ttgtggatatattta

SEQ ID NO: 1014751 - DNA, 15 bp, Homo sapiens
tgtggatatatttag

SEQ ID NO: 1014752 - DNA, 15 bp, Homo sapiens
gtggatatatttaga

SEQ ID NO: 1014753 - DNA, 15 bp, Homo sapiens
tggatatatttagaa

SEQ ID NO: 1014754 - DNA, 15 bp, Homo sapiens
ggatatatttagaag

SEQ ID NO: 1014755 - DNA, 15 bp, Homo sapiens
gatatatttagaagt

SEQ ID NO: 1014756 - DNA, 15 bp, Homo sapiens
atatatttagaagta

SEQ ID NO: 1014757 - DNA, 15 bp, Homo sapiens
tatatttagaagtaa

SEQ ID NO: 1014758 - DNA, 15 bp, Homo sapiens
atatttagaagtaaa

SEQ ID NO: 1014759 - DNA, 15 bp, Homo sapiens
tatttagaagtaaaa

SEQ ID NO: 1014760 - DNA, 15 bp, Homo sapiens
atttagaagtaaaat

SEQ ID NO: 1014761 - DNA, 15 bp, Homo sapiens
tttagaagtaaaata

SEQ ID NO: 1014762 - DNA, 15 bp, Homo sapiens
ttagaagtaaaatat

SEQ ID NO: 1014763 - DNA, 15 bp, Homo sapiens
tagaagtaaaatata

SEQ ID NO: 1014764 - DNA, 15 bp, Homo sapiens
agaagtaaaatataa

SEQ ID NO: 1014765 - DNA, 15 bp, Homo sapiens
gaagtaaaatataag

SEQ ID NO: 1014766 - DNA, 15 bp, Homo sapiens
aagtaaaatataaga

SEQ ID NO: 1014767 - DNA, 15 bp, Homo sapiens
agtaaaatataagac

SEQ ID NO: 1014768 - DNA, 15 bp, Homo sapiens
gtaaaatataagaca

SEQ ID NO: 1014769 - DNA, 15 bp, Homo sapiens
taaaatataagacaa

SEQ ID NO: 1014770 - DNA, 15 bp, Homo sapiens
aaaatataagacaat

SEQ ID NO: 1014771 - DNA, 15 bp, Homo sapiens
aaatataagacaata

SEQ ID NO: 1014772 - DNA, 15 bp, Homo sapiens
aatataagacaatag

SEQ ID NO: 1014773 - DNA, 15 bp, Homo sapiens
atataagacaatagc

SEQ ID NO: 1014774 - DNA, 15 bp, Homo sapiens
tataagacaatagca

SEQ ID NO: 1014775 - DNA, 15 bp, Homo sapiens
ataagacaatagcac

SEQ ID NO: 1014776 - DNA, 15 bp, Homo sapiens
taagacaatagcaca

SEQ ID NO: 1014777 - DNA, 15 bp, Homo sapiens
aagacaatagcacaa

SEQ ID NO: 1014778 - DNA, 15 bp, Homo sapiens
agacaatagcacaaa

SEQ ID NO: 1014779 - DNA, 15 bp, Homo sapiens
gacaatagcacaaaa

SEQ ID NO: 1014780 - DNA, 15 bp, Homo sapiens
acaatagcacaaaaa

SEQ ID NO: 1014781 - DNA, 15 bp, Homo sapiens
caatagcacaaaaac

SEQ ID NO: 1014782 - DNA, 15 bp, Homo sapiens
aatagcacaaaaacc

SEQ ID NO: 1014783 - DNA, 15 bp, Homo sapiens
atagcacaaaaacca

SEQ ID NO: 1014784 - DNA, 15 bp, Homo sapiens
tagcacaaaaaccag

SEQ ID NO: 1014785 - DNA, 15 bp, Homo sapiens
agcacaaaaaccaga

SEQ ID NO: 1014786 - DNA, 15 bp, Homo sapiens
gcacaaaaaccagaa

SEQ ID NO: 1014787 - DNA, 15 bp, Homo sapiens
cacaaaaaccagaag

SEQ ID NO: 1014788 - DNA, 15 bp, Homo sapiens
acaaaaaccagaaga

SEQ ID NO: 1014789 - DNA, 15 bp, Homo sapiens
caaaaaccagaagag

SEQ ID NO: 1014790 - DNA, 15 bp, Homo sapiens
aaaaaccagaagaga

SEQ ID NO: 1014791 - DNA, 15 bp, Homo sapiens
aaaaccagaagagaa

SEQ ID NO: 1014792 - DNA, 15 bp, Homo sapiens
aaaccagaagagaaa

SEQ ID NO: 1014793 - DNA, 15 bp, Homo sapiens
aaccagaagagaaaa

SEQ ID NO: 1014794 - DNA, 15 bp, Homo sapiens
accagaagagaaaat

SEQ ID NO: 1014795 - DNA, 15 bp, Homo sapiens
ccagaagagaaaata

SEQ ID NO: 1014796 - DNA, 15 bp, Homo sapiens
cagaagagaaaataa

SEQ ID NO: 1014797 - DNA, 15 bp, Homo sapiens
agaagagaaaataat

SEQ ID NO: 1014798 - DNA, 15 bp, Homo sapiens
gaagagaaaataata

SEQ ID NO: 1014799 - DNA, 15 bp, Homo sapiens
aagagaaaataataa

SEQ ID NO: 1014800 - DNA, 15 bp, Homo sapiens
agagaaaataataaa

SEQ ID NO: 1014801 - DNA, 15 bp, Homo sapiens
gagaaaataataaaa

SEQ ID NO: 1014802 - DNA, 15 bp, Homo sapiens
agaaaataataaaag

SEQ ID NO: 1014803 - DNA, 15 bp, Homo sapiens
gaaaataataaaagt

SEQ ID NO: 1014804 - DNA, 15 bp, Homo sapiens
aaaataataaaagtg

SEQ ID NO: 1014805 - DNA, 15 bp, Homo sapiens
aaataataaaagtgt

SEQ ID NO: 1014806 - DNA, 15 bp, Homo sapiens
aataataaaagtgtg

SEQ ID NO: 1014807 - DNA, 15 bp, Homo sapiens
ataataaaagtgtgc

SEQ ID NO: 1014808 - DNA, 15 bp, Homo sapiens
taataaaagtgtgca

SEQ ID NO: 1014809 - DNA, 15 bp, Homo sapiens
aataaaagtgtgcag

SEQ ID NO: 1014810 - DNA, 15 bp, Homo sapiens
ataaaagtgtgcagt

SEQ ID NO: 1014811 - DNA, 15 bp, Homo sapiens
taaaagtgtgcagtt

SEQ ID NO: 1014812 - DNA, 15 bp, Homo sapiens
aaaagtgtgcagttg

SEQ ID NO: 1014813 - DNA, 15 bp, Homo sapiens
aaagtgtgcagttgt

SEQ ID NO: 1014814 - DNA, 15 bp, Homo sapiens
aagtgtgcagttgta

SEQ ID NO: 1014815 - DNA, 15 bp, Homo sapiens
agtgtgcagttgtaa

SEQ ID NO: 1014816 - DNA, 15 bp, Homo sapiens
gtgtgcagttgtaag

SEQ ID NO: 1014817 - DNA, 15 bp, Homo sapiens
tgtgcagttgtaagg

SEQ ID NO: 1014818 - DNA, 15 bp, Homo sapiens
gtgcagttgtaagga

SEQ ID NO: 1014819 - DNA, 15 bp, Homo sapiens
tgcagttgtaaggat

SEQ ID NO: 1014820 - DNA, 15 bp, Homo sapiens
gcagttgtaaggatc

SEQ ID NO: 1014821 - DNA, 15 bp, Homo sapiens
cagttgtaaggatct

SEQ ID NO: 1014822 - DNA, 15 bp, Homo sapiens
agttgtaaggatctt

SEQ ID NO: 1014823 - DNA, 15 bp, Homo sapiens
gttgtaaggatcttc

SEQ ID NO: 1014824 - DNA, 15 bp, Homo sapiens
ttgtaaggatcttct

SEQ ID NO: 1014825 - DNA, 15 bp, Homo sapiens
tgtaaggatcttcta

SEQ ID NO: 1014826 - DNA, 15 bp, Homo sapiens
gtaaggatcttctat

SEQ ID NO: 1014827 - DNA, 15 bp, Homo sapiens
taaggatcttctatt

SEQ ID NO: 1014828 - DNA, 15 bp, Homo sapiens
aaggatcttctatta

SEQ ID NO: 1014829 - DNA, 15 bp, Homo sapiens
aggatcttctattat

SEQ ID NO: 1014830 - DNA, 15 bp, Homo sapiens
ggatcttctattata

SEQ ID NO: 1014831 - DNA, 15 bp, Homo sapiens
gatcttctattatac

SEQ ID NO: 1014832 - DNA, 15 bp, Homo sapiens
atcttctattataca

SEQ ID NO: 1014833 - DNA, 15 bp, Homo sapiens
tcttctattatacat

SEQ ID NO: 1014834 - DNA, 15 bp, Homo sapiens
cttctattatacatg

SEQ ID NO: 1014835 - DNA, 15 bp, Homo sapiens
ttctattatacatga

SEQ ID NO: 1014836 - DNA, 15 bp, Homo sapiens
tctattatacatgag

SEQ ID NO: 1014837 - DNA, 15 bp, Homo sapiens
ctattatacatgagg

SEQ ID NO: 1014838 - DNA, 15 bp, Homo sapiens
tattatacatgaggt

SEQ ID NO: 1014839 - DNA, 15 bp, Homo sapiens
attatacatgaggtg

SEQ ID NO: 1014840 - DNA, 15 bp, Homo sapiens
ttatacatgaggtgg

SEQ ID NO: 1014841 - DNA, 15 bp, Homo sapiens
tatacatgaggtggt

SEQ ID NO: 1014842 - DNA, 15 bp, Homo sapiens
atacatgaggtggta

SEQ ID NO: 1014843 - DNA, 15 bp, Homo sapiens
tacatgaggtggtat

SEQ ID NO: 1014844 - DNA, 15 bp, Homo sapiens
acatgaggtggtata

SEQ ID NO: 1014845 - DNA, 15 bp, Homo sapiens
catgaggtggtatag

SEQ ID NO: 1014846 - DNA, 15 bp, Homo sapiens
atgaggtggtatagt

SEQ ID NO: 1014847 - DNA, 15 bp, Homo sapiens
tgaggtggtatagta

SEQ ID NO: 1014848 - DNA, 15 bp, Homo sapiens
gaggtggtatagtat

SEQ ID NO: 1014849 - DNA, 15 bp, Homo sapiens
aggtggtatagtata

SEQ ID NO: 1014850 - DNA, 15 bp, Homo sapiens
ggtggtatagtataa

SEQ ID NO: 1014851 - DNA, 15 bp, Homo sapiens
gtggtatagtataat

SEQ ID NO: 1014852 - DNA, 15 bp, Homo sapiens
tggtatagtataatt

SEQ ID NO: 1014853 - DNA, 15 bp, Homo sapiens
ggtatagtataattt

SEQ ID NO: 1014854 - DNA, 15 bp, Homo sapiens
gtatagtataatttg

SEQ ID NO: 1014855 - DNA, 15 bp, Homo sapiens
tatagtataatttga

SEQ ID NO: 1014856 - DNA, 15 bp, Homo sapiens
atagtataatttgaa

SEQ ID NO: 1014857 - DNA, 15 bp, Homo sapiens
tagtataatttgaaa

SEQ ID NO: 1014858 - DNA, 15 bp, Homo sapiens
agtataatttgaaag

SEQ ID NO: 1014859 - DNA, 15 bp, Homo sapiens
gtataatttgaaagt

SEQ ID NO: 1014860 - DNA, 15 bp, Homo sapiens
tataatttgaaagta

SEQ ID NO: 1014861 - DNA, 15 bp, Homo sapiens
ataatttgaaagtag

SEQ ID NO: 1014862 - DNA, 15 bp, Homo sapiens
taatttgaaagtaga

SEQ ID NO: 1014863 - DNA, 15 bp, Homo sapiens
aatttgaaagtagac

SEQ ID NO: 1014864 - DNA, 15 bp, Homo sapiens
atttgaaagtagact

SEQ ID NO: 1014865 - DNA, 15 bp, Homo sapiens
tttgaaagtagactg

SEQ ID NO: 1014866 - DNA, 15 bp, Homo sapiens
ttgaaagtagactgt

SEQ ID NO: 1014867 - DNA, 15 bp, Homo sapiens
tgaaagtagactgtg

SEQ ID NO: 1014868 - DNA, 15 bp, Homo sapiens
gaaagtagactgtga

SEQ ID NO: 1014869 - DNA, 15 bp, Homo sapiens
aaagtagactgtgat

SEQ ID NO: 1014870 - DNA, 15 bp, Homo sapiens
aagtagactgtgatg

SEQ ID NO: 1014871 - DNA, 15 bp, Homo sapiens
agtagactgtgatgc

SEQ ID NO: 1014872 - DNA, 15 bp, Homo sapiens
gtagactgtgatgct

SEQ ID NO: 1014873 - DNA, 15 bp, Homo sapiens
tagactgtgatgcta

SEQ ID NO: 1014874 - DNA, 15 bp, Homo sapiens
agactgtgatgctaa

SEQ ID NO: 1014875 - DNA, 15 bp, Homo sapiens
gactgtgatgctaaa

SEQ ID NO: 1014876 - DNA, 15 bp, Homo sapiens
actgtgatgctaaat

SEQ ID NO: 1014877 - DNA, 15 bp, Homo sapiens
ctgtgatgctaaatt

SEQ ID NO: 1014878 - DNA, 15 bp, Homo sapiens
tgtgatgctaaatta

SEQ ID NO: 1014879 - DNA, 15 bp, Homo sapiens
gtgatgctaaattaa

SEQ ID NO: 1014880 - DNA, 15 bp, Homo sapiens
tgatgctaaattaaa

SEQ ID NO: 1014881 - DNA, 15 bp, Homo sapiens
gatgctaaattaaat

SEQ ID NO: 1014882 - DNA, 15 bp, Homo sapiens
atgctaaattaaatc

SEQ ID NO: 1014883 - DNA, 15 bp, Homo sapiens
tgctaaattaaatct

SEQ ID NO: 1014884 - DNA, 15 bp, Homo sapiens
gctaaattaaatctc

SEQ ID NO: 1014885 - DNA, 15 bp, Homo sapiens
ctaaattaaatctca

SEQ ID NO: 1014886 - DNA, 15 bp, Homo sapiens
taaattaaatctcaa

SEQ ID NO: 1014887 - DNA, 15 bp, Homo sapiens
aaattaaatctcaaa

SEQ ID NO: 1014888 - DNA, 15 bp, Homo sapiens
aattaaatctcaaag

SEQ ID NO: 1014889 - DNA, 15 bp, Homo sapiens
attaaatctcaaagc

SEQ ID NO: 1014890 - DNA, 15 bp, Homo sapiens
ttaaatctcaaagca

SEQ ID NO: 1014891 - DNA, 15 bp, Homo sapiens
taaatctcaaagcaa

SEQ ID NO: 1014892 - DNA, 15 bp, Homo sapiens
aaatctcaaagcaac

SEQ ID NO: 1014893 - DNA, 15 bp, Homo sapiens
aatctcaaagcaacc

SEQ ID NO: 1014894 - DNA, 15 bp, Homo sapiens
atctcaaagcaacca

SEQ ID NO: 1014895 - DNA, 15 bp, Homo sapiens
tctcaaagcaaccac

SEQ ID NO: 1014896 - DNA, 15 bp, Homo sapiens
ctcaaagcaaccact

SEQ ID NO: 1014897 - DNA, 15 bp, Homo sapiens
tcaaagcaaccacta

SEQ ID NO: 1014898 - DNA, 15 bp, Homo sapiens
caaagcaaccactaa

SEQ ID NO: 1014899 - DNA, 15 bp, Homo sapiens
aaagcaaccactaaa

SEQ ID NO: 1014900 - DNA, 15 bp, Homo sapiens
aagcaaccactaaaa

SEQ ID NO: 1014901 - DNA, 15 bp, Homo sapiens
agcaaccactaaaac

SEQ ID NO: 1014902 - DNA, 15 bp, Homo sapiens
gcaaccactaaaaca

SEQ ID NO: 1014903 - DNA, 15 bp, Homo sapiens
caaccactaaaacaa

SEQ ID NO: 1014904 - DNA, 15 bp, Homo sapiens
aaccactaaaacaac

SEQ ID NO: 1014905 - DNA, 15 bp, Homo sapiens
accactaaaacaaca

SEQ ID NO: 1014906 - DNA, 15 bp, Homo sapiens
ccactaaaacaacac

SEQ ID NO: 1014907 - DNA, 15 bp, Homo sapiens
cactaaaacaacaca

SEQ ID NO: 1014908 - DNA, 15 bp, Homo sapiens
actaaaacaacacat

SEQ ID NO: 1014909 - DNA, 15 bp, Homo sapiens
ctaaaacaacacatg

SEQ ID NO: 1014910 - DNA, 15 bp, Homo sapiens
taaaacaacacatga

SEQ ID NO: 1014911 - DNA, 15 bp, Homo sapiens
aaaacaacacatgaa

SEQ ID NO: 1014912 - DNA, 15 bp, Homo sapiens
aaacaacacatgaaa

SEQ ID NO: 1014913 - DNA, 15 bp, Homo sapiens
aacaacacatgaaaa

SEQ ID NO: 1014914 - DNA, 15 bp, Homo sapiens
acaacacatgaaaat

SEQ ID NO: 1014915 - DNA, 15 bp, Homo sapiens
caacacatgaaaatg

SEQ ID NO: 1014916 - DNA, 15 bp, Homo sapiens
aacacatgaaaatgt

SEQ ID NO: 1014917 - DNA, 15 bp, Homo sapiens
acacatgaaaatgtt

SEQ ID NO: 1014918 - DNA, 15 bp, Homo sapiens
cacatgaaaatgttt

SEQ ID NO: 1014919 - DNA, 15 bp, Homo sapiens
acatgaaaatgtttt

SEQ ID NO: 1014920 - DNA, 15 bp, Homo sapiens
catgaaaatgttttg

SEQ ID NO: 1014921 - DNA, 15 bp, Homo sapiens
atgaaaatgttttgc

SEQ ID NO: 1014922 - DNA, 15 bp, Homo sapiens
tgaaaatgttttgct

SEQ ID NO: 1014923 - DNA, 15 bp, Homo sapiens
gaaaatgttttgcta

SEQ ID NO: 1014924 - DNA, 15 bp, Homo sapiens
aaaatgttttgctaa

SEQ ID NO: 1014925 - DNA, 15 bp, Homo sapiens
aaatgttttgctaat

SEQ ID NO: 1014926 - DNA, 15 bp, Homo sapiens
aatgttttgctaata

SEQ ID NO: 1014927 - DNA, 15 bp, Homo sapiens
atgttttgctaatat

SEQ ID NO: 1014928 - DNA, 15 bp, Homo sapiens
tgttttgctaatatg

SEQ ID NO: 1014929 - DNA, 15 bp, Homo sapiens
gttttgctaatatgc

SEQ ID NO: 1014930 - DNA, 15 bp, Homo sapiens
ttttgctaatatgca

SEQ ID NO: 1014931 - DNA, 15 bp, Homo sapiens
tttgctaatatgcaa

SEQ ID NO: 1014932 - DNA, 15 bp, Homo sapiens
ttgctaatatgcaaa

SEQ ID NO: 1014933 - DNA, 15 bp, Homo sapiens
tgctaatatgcaaaa

SEQ ID NO: 1014934 - DNA, 15 bp, Homo sapiens
gctaatatgcaaaaa

SEQ ID NO: 1014935 - DNA, 15 bp, Homo sapiens
ctaatatgcaaaaaa

SEQ ID NO: 1014936 - DNA, 15 bp, Homo sapiens
taatatgcaaaaaag

SEQ ID NO: 1014937 - DNA, 15 bp, Homo sapiens
aatatgcaaaaaagg

SEQ ID NO: 1014938 - DNA, 15 bp, Homo sapiens
atatgcaaaaaagga

SEQ ID NO: 1014939 - DNA, 15 bp, Homo sapiens
tatgcaaaaaaggag

SEQ ID NO: 1014940 - DNA, 15 bp, Homo sapiens
atgcaaaaaaggaga

SEQ ID NO: 1014941 - DNA, 15 bp, Homo sapiens
tgcaaaaaaggagat

SEQ ID NO: 1014942 - DNA, 15 bp, Homo sapiens
gcaaaaaaggagata

SEQ ID NO: 1014943 - DNA, 15 bp, Homo sapiens
caaaaaaggagatat

SEQ ID NO: 1014944 - DNA, 15 bp, Homo sapiens
aaaaaaggagatata

SEQ ID NO: 1014945 - DNA, 15 bp, Homo sapiens
aaaaaggagatataa

SEQ ID NO: 1014946 - DNA, 15 bp, Homo sapiens
aaaaggagatataat

SEQ ID NO: 1014947 - DNA, 15 bp, Homo sapiens
aaaggagatataatg

SEQ ID NO: 1014948 - DNA, 15 bp, Homo sapiens
aaggagatataatga

SEQ ID NO: 1014949 - DNA, 15 bp, Homo sapiens
aggagatataatgaa

SEQ ID NO: 1014950 - DNA, 15 bp, Homo sapiens
ggagatataatgaaa

SEQ ID NO: 1014951 - DNA, 15 bp, Homo sapiens
gagatataatgaaat

SEQ ID NO: 1014952 - DNA, 15 bp, Homo sapiens
agatataatgaaatt

SEQ ID NO: 1014953 - DNA, 15 bp, Homo sapiens
gatataatgaaattg

SEQ ID NO: 1014954 - DNA, 15 bp, Homo sapiens
atataatgaaattgt

SEQ ID NO: 1014955 - DNA, 15 bp, Homo sapiens
tataatgaaattgta

SEQ ID NO: 1014956 - DNA, 15 bp, Homo sapiens
ataatgaaattgtag

SEQ ID NO: 1014957 - DNA, 15 bp, Homo sapiens
taatgaaattgtaga

SEQ ID NO: 1014958 - DNA, 15 bp, Homo sapiens
aatgaaattgtagaa

SEQ ID NO: 1014959 - DNA, 15 bp, Homo sapiens
atgaaattgtagaaa

SEQ ID NO: 1014960 - DNA, 15 bp, Homo sapiens
tgaaattgtagaaaa

SEQ ID NO: 1014961 - DNA, 15 bp, Homo sapiens
gaaattgtagaaaac

SEQ ID NO: 1014962 - DNA, 15 bp, Homo sapiens
aaattgtagaaaaca

SEQ ID NO: 1014963 - DNA, 15 bp, Homo sapiens
aattgtagaaaacac

SEQ ID NO: 1014964 - DNA, 15 bp, Homo sapiens
attgtagaaaacact

SEQ ID NO: 1014965 - DNA, 15 bp, Homo sapiens
ttgtagaaaacactc

SEQ ID NO: 1014966 - DNA, 15 bp, Homo sapiens
tgtagaaaacactca

SEQ ID NO: 1014967 - DNA, 15 bp, Homo sapiens
gtagaaaacactcaa

SEQ ID NO: 1014968 - DNA, 15 bp, Homo sapiens
tagaaaacactcaat

SEQ ID NO: 1014969 - DNA, 15 bp, Homo sapiens
agaaaacactcaata

SEQ ID NO: 1014970 - DNA, 15 bp, Homo sapiens
gaaaacactcaatac

SEQ ID NO: 1014971 - DNA, 15 bp, Homo sapiens
aaaacactcaatacc

SEQ ID NO: 1014972 - DNA, 15 bp, Homo sapiens
aaacactcaataccc

SEQ ID NO: 1014973 - DNA, 15 bp, Homo sapiens
aacactcaatacccc

SEQ ID NO: 1014974 - DNA, 15 bp, Homo sapiens
acactcaatacccca

SEQ ID NO: 1014975 - DNA, 15 bp, Homo sapiens
cactcaataccccaa

SEQ ID NO: 1014976 - DNA, 15 bp, Homo sapiens
actcaataccccaaa

SEQ ID NO: 1014977 - DNA, 15 bp, Homo sapiens
ctcaataccccaaaa

SEQ ID NO: 1014978 - DNA, 15 bp, Homo sapiens
tcaataccccaaaaa

SEQ ID NO: 1014979 - DNA, 15 bp, Homo sapiens
caataccccaaaaaa

SEQ ID NO: 1014980 - DNA, 15 bp, Homo sapiens
aataccccaaaaaaa

SEQ ID NO: 1014981 - DNA, 15 bp, Homo sapiens
ataccccaaaaaaag

SEQ ID NO: 1014982 - DNA, 15 bp, Homo sapiens
taccccaaaaaaagg

SEQ ID NO: 1014983 - DNA, 15 bp, Homo sapiens
accccaaaaaaaggc

SEQ ID NO: 1014984 - DNA, 15 bp, Homo sapiens
ccccaaaaaaaggca

SEQ ID NO: 1014985 - DNA, 15 bp, Homo sapiens
cccaaaaaaaggcat

SEQ ID NO: 1014986 - DNA, 15 bp, Homo sapiens
ccaaaaaaaggcata

SEQ ID NO: 1014987 - DNA, 15 bp, Homo sapiens
caaaaaaaggcataa

SEQ ID NO: 1014988 - DNA, 15 bp, Homo sapiens
aaaaaaaggcataaa

SEQ ID NO: 1014989 - DNA, 15 bp, Homo sapiens
aaaaaaggcataaaa

SEQ ID NO: 1014990 - DNA, 15 bp, Homo sapiens
aaaaaggcataaaaa

SEQ ID NO: 1014991 - DNA, 15 bp, Homo sapiens
aaaaggcataaaaag

SEQ ID NO: 1014992 - DNA, 15 bp, Homo sapiens
aaaggcataaaaaga

SEQ ID NO: 1014993 - DNA, 15 bp, Homo sapiens
aaggcataaaaagag

SEQ ID NO: 1014994 - DNA, 15 bp, Homo sapiens
aggcataaaaagagg

SEQ ID NO: 1014995 - DNA, 15 bp, Homo sapiens
ggcataaaaagagga

SEQ ID NO: 1014996 - DNA, 15 bp, Homo sapiens
gcataaaaagaggaa

SEQ ID NO: 1014997 - DNA, 15 bp, Homo sapiens
cataaaaagaggaaa

SEQ ID NO: 1014998 - DNA, 15 bp, Homo sapiens
ataaaaagaggaaaa

SEQ ID NO: 1014999 - DNA, 15 bp, Homo sapiens
taaaaagaggaaaag

SEQ ID NO: 1015000 - DNA, 15 bp, Homo sapiens
aaaaagaggaaaagg

SEQ ID NO: 1015001 - DNA, 15 bp, Homo sapiens
aaaagaggaaaagga

SEQ ID NO: 1015002 - DNA, 15 bp, Homo sapiens
aaagaggaaaaggaa

SEQ ID NO: 1015003 - DNA, 15 bp, Homo sapiens
aagaggaaaaggaag

SEQ ID NO: 1015004 - DNA, 15 bp, Homo sapiens
agaggaaaaggaaga

SEQ ID NO: 1015005 - DNA, 15 bp, Homo sapiens
gaggaaaaggaagac

SEQ ID NO: 1015006 - DNA, 15 bp, Homo sapiens
aggaaaaggaagaca

SEQ ID NO: 1015007 - DNA, 15 bp, Homo sapiens
ggaaaaggaagacat

SEQ ID NO: 1015008 - DNA, 15 bp, Homo sapiens
gaaaaggaagacata

SEQ ID NO: 1015009 - DNA, 15 bp, Homo sapiens
aaaaggaagacatag

SEQ ID NO: 1015010 - DNA, 15 bp, Homo sapiens
aaaggaagacatagt

SEQ ID NO: 1015011 - DNA, 15 bp, Homo sapiens
aaggaagacatagtt

SEQ ID NO: 1015012 - DNA, 15 bp, Homo sapiens
aggaagacatagttg

SEQ ID NO: 1015013 - DNA, 15 bp, Homo sapiens
ggaagacatagttga

SEQ ID NO: 1015014 - DNA, 15 bp, Homo sapiens
gaagacatagttgaa

SEQ ID NO: 1015015 - DNA, 15 bp, Homo sapiens
aagacatagttgaag

SEQ ID NO: 1015016 - DNA, 15 bp, Homo sapiens
agacatagttgaagt

SEQ ID NO: 1015017 - DNA, 15 bp, Homo sapiens
gacatagttgaagtc

SEQ ID NO: 1015018 - DNA, 15 bp, Homo sapiens
acatagttgaagtct

SEQ ID NO: 1015019 - DNA, 15 bp, Homo sapiens
catagttgaagtctc

SEQ ID NO: 1015020 - DNA, 15 bp, Homo sapiens
atagttgaagtctca

SEQ ID NO: 1015021 - DNA, 15 bp, Homo sapiens
tagttgaagtctcaa

SEQ ID NO: 1015022 - DNA, 15 bp, Homo sapiens
agttgaagtctcaaa

SEQ ID NO: 1015023 - DNA, 15 bp, Homo sapiens
gttgaagtctcaaat

SEQ ID NO: 1015024 - DNA, 15 bp, Homo sapiens
ttgaagtctcaaata

SEQ ID NO: 1015025 - DNA, 15 bp, Homo sapiens
tgaagtctcaaatag

SEQ ID NO: 1015026 - DNA, 15 bp, Homo sapiens
gaagtctcaaataga

SEQ ID NO: 1015027 - DNA, 15 bp, Homo sapiens
aagtctcaaatagaa

SEQ ID NO: 1015028 - DNA, 15 bp, Homo sapiens
agtctcaaatagaac

SEQ ID NO: 1015029 - DNA, 15 bp, Homo sapiens
gtctcaaatagaaca

SEQ ID NO: 1015030 - DNA, 15 bp, Homo sapiens
tctcaaatagaacac

SEQ ID NO: 1015031 - DNA, 15 bp, Homo sapiens
ctcaaatagaacaca

SEQ ID NO: 1015032 - DNA, 15 bp, Homo sapiens
tcaaatagaacacaa

SEQ ID NO: 1015033 - DNA, 15 bp, Homo sapiens
caaatagaacacaaa

SEQ ID NO: 1015034 - DNA, 15 bp, Homo sapiens
aaatagaacacaaac

SEQ ID NO: 1015035 - DNA, 15 bp, Homo sapiens
aatagaacacaaaca

SEQ ID NO: 1015036 - DNA, 15 bp, Homo sapiens
atagaacacaaacag

SEQ ID NO: 1015037 - DNA, 15 bp, Homo sapiens
tagaacacaaacagc

SEQ ID NO: 1015038 - DNA, 15 bp, Homo sapiens
agaacacaaacagca

SEQ ID NO: 1015039 - DNA, 15 bp, Homo sapiens
gaacacaaacagcaa

SEQ ID NO: 1015040 - DNA, 15 bp, Homo sapiens
aacacaaacagcaag

SEQ ID NO: 1015041 - DNA, 15 bp, Homo sapiens
acacaaacagcaaga

SEQ ID NO: 1015042 - DNA, 15 bp, Homo sapiens
cacaaacagcaagat

SEQ ID NO: 1015043 - DNA, 15 bp, Homo sapiens
acaaacagcaagata

SEQ ID NO: 1015044 - DNA, 15 bp, Homo sapiens
caaacagcaagatag

SEQ ID NO: 1015045 - DNA, 15 bp, Homo sapiens
aaacagcaagatagt

SEQ ID NO: 1015046 - DNA, 15 bp, Homo sapiens
aacagcaagatagta

SEQ ID NO: 1015047 - DNA, 15 bp, Homo sapiens
acagcaagatagtat

SEQ ID NO: 1015048 - DNA, 15 bp, Homo sapiens
cagcaagatagtata

SEQ ID NO: 1015049 - DNA, 15 bp, Homo sapiens
agcaagatagtatat

SEQ ID NO: 1015050 - DNA, 15 bp, Homo sapiens
gcaagatagtatatt

SEQ ID NO: 1015051 - DNA, 15 bp, Homo sapiens
caagatagtatattt

SEQ ID NO: 1015052 - DNA, 15 bp, Homo sapiens
aagatagtatattta

SEQ ID NO: 1015053 - DNA, 15 bp, Homo sapiens
agatagtatatttaa

SEQ ID NO: 1015054 - DNA, 15 bp, Homo sapiens
gatagtatatttaaa

SEQ ID NO: 1015055 - DNA, 15 bp, Homo sapiens
atagtatatttaaac

SEQ ID NO: 1015056 - DNA, 15 bp, Homo sapiens
tagtatatttaaact

SEQ ID NO: 1015057 - DNA, 15 bp, Homo sapiens
agtatatttaaactc

SEQ ID NO: 1015058 - DNA, 15 bp, Homo sapiens
gtatatttaaactca

SEQ ID NO: 1015059 - DNA, 15 bp, Homo sapiens
tatatttaaactcaa

SEQ ID NO: 1015060 - DNA, 15 bp, Homo sapiens
atatttaaactcaac

SEQ ID NO: 1015061 - DNA, 15 bp, Homo sapiens
tatttaaactcaaca

SEQ ID NO: 1015062 - DNA, 15 bp, Homo sapiens
atttaaactcaacat

SEQ ID NO: 1015063 - DNA, 15 bp, Homo sapiens
tttaaactcaacata

SEQ ID NO: 1015064 - DNA, 15 bp, Homo sapiens
ttaaactcaacatat

SEQ ID NO: 1015065 - DNA, 15 bp, Homo sapiens
taaactcaacatatc

SEQ ID NO: 1015066 - DNA, 15 bp, Homo sapiens
aaactcaacatatca

SEQ ID NO: 1015067 - DNA, 15 bp, Homo sapiens
aactcaacatatcaa

SEQ ID NO: 1015068 - DNA, 15 bp, Homo sapiens
actcaacatatcaat

SEQ ID NO: 1015069 - DNA, 15 bp, Homo sapiens
ctcaacatatcaata

SEQ ID NO: 1015070 - DNA, 15 bp, Homo sapiens
tcaacatatcaataa

SEQ ID NO: 1015071 - DNA, 15 bp, Homo sapiens
caacatatcaataac

SEQ ID NO: 1015072 - DNA, 15 bp, Homo sapiens
aacatatcaataacc

SEQ ID NO: 1015073 - DNA, 15 bp, Homo sapiens
acatatcaataacca

SEQ ID NO: 1015074 - DNA, 15 bp, Homo sapiens
catatcaataaccat

SEQ ID NO: 1015075 - DNA, 15 bp, Homo sapiens
atatcaataaccata

SEQ ID NO: 1015076 - DNA, 15 bp, Homo sapiens
tatcaataaccatat

SEQ ID NO: 1015077 - DNA, 15 bp, Homo sapiens
atcaataaccatatt

SEQ ID NO: 1015078 - DNA, 15 bp, Homo sapiens
tcaataaccatatta

SEQ ID NO: 1015079 - DNA, 15 bp, Homo sapiens
caataaccatattaa

SEQ ID NO: 1015080 - DNA, 15 bp, Homo sapiens
aataaccatattaaa

SEQ ID NO: 1015081 - DNA, 15 bp, Homo sapiens
ataaccatattaaat

SEQ ID NO: 1015082 - DNA, 15 bp, Homo sapiens
taaccatattaaatg

SEQ ID NO: 1015083 - DNA, 15 bp, Homo sapiens
aaccatattaaatga

SEQ ID NO: 1015084 - DNA, 15 bp, Homo sapiens
accatattaaatgaa

SEQ ID NO: 1015085 - DNA, 15 bp, Homo sapiens
ccatattaaatgaaa

SEQ ID NO: 1015086 - DNA, 15 bp, Homo sapiens
catattaaatgaaac

SEQ ID NO: 1015087 - DNA, 15 bp, Homo sapiens
atattaaatgaaact

SEQ ID NO: 1015088 - DNA, 15 bp, Homo sapiens
tattaaatgaaactg

SEQ ID NO: 1015089 - DNA, 15 bp, Homo sapiens
attaaatgaaactgg

SEQ ID NO: 1015090 - DNA, 15 bp, Homo sapiens
ttaaatgaaactggt

SEQ ID NO: 1015091 - DNA, 15 bp, Homo sapiens
taaatgaaactggtc

SEQ ID NO: 1015092 - DNA, 15 bp, Homo sapiens
aaatgaaactggtct

SEQ ID NO: 1015093 - DNA, 15 bp, Homo sapiens
aatgaaactggtcta

SEQ ID NO: 1015094 - DNA, 15 bp, Homo sapiens
atgaaactggtctaa

SEQ ID NO: 1015095 - DNA, 15 bp, Homo sapiens
tgaaactggtctaaa

SEQ ID NO: 1015096 - DNA, 15 bp, Homo sapiens
gaaactggtctaaat

SEQ ID NO: 1015097 - DNA, 15 bp, Homo sapiens
aaactggtctaaata

SEQ ID NO: 1015098 - DNA, 15 bp, Homo sapiens
aactggtctaaataa

SEQ ID NO: 1015099 - DNA, 15 bp, Homo sapiens
actggtctaaataat

SEQ ID NO: 1015100 - DNA, 15 bp, Homo sapiens
ctggtctaaataatc

SEQ ID NO: 1015101 - DNA, 15 bp, Homo sapiens
tggtctaaataatca

SEQ ID NO: 1015102 - DNA, 15 bp, Homo sapiens
ggtctaaataatcag

SEQ ID NO: 1015103 - DNA, 15 bp, Homo sapiens
gtctaaataatcaga

SEQ ID NO: 1015104 - DNA, 15 bp, Homo sapiens
tctaaataatcagaa

SEQ ID NO: 1015105 - DNA, 15 bp, Homo sapiens
ctaaataatcagaaa

SEQ ID NO: 1015106 - DNA, 15 bp, Homo sapiens
taaataatcagaaaa

SEQ ID NO: 1015107 - DNA, 15 bp, Homo sapiens
aaataatcagaaaaa

SEQ ID NO: 1015108 - DNA, 15 bp, Homo sapiens
aataatcagaaaaag

SEQ ID NO: 1015109 - DNA, 15 bp, Homo sapiens
ataatcagaaaaaga

SEQ ID NO: 1015110 - DNA, 15 bp, Homo sapiens
taatcagaaaaagac

SEQ ID NO: 1015111 - DNA, 15 bp, Homo sapiens
aatcagaaaaagact

SEQ ID NO: 1015112 - DNA, 15 bp, Homo sapiens
atcagaaaaagactt

SEQ ID NO: 1015113 - DNA, 15 bp, Homo sapiens
tcagaaaaagacttc

SEQ ID NO: 1015114 - DNA, 15 bp, Homo sapiens
cagaaaaagacttca

SEQ ID NO: 1015115 - DNA, 15 bp, Homo sapiens
agaaaaagacttcag

SEQ ID NO: 1015116 - DNA, 15 bp, Homo sapiens
gaaaaagacttcaga

SEQ ID NO: 1015117 - DNA, 15 bp, Homo sapiens
aaaaagacttcagaa

SEQ ID NO: 1015118 - DNA, 15 bp, Homo sapiens
aaaagacttcagaac

SEQ ID NO: 1015119 - DNA, 15 bp, Homo sapiens
aaagacttcagaaca

SEQ ID NO: 1015120 - DNA, 15 bp, Homo sapiens
aagacttcagaacat

SEQ ID NO: 1015121 - DNA, 15 bp, Homo sapiens
agacttcagaacatg

SEQ ID NO: 1015122 - DNA, 15 bp, Homo sapiens
gacttcagaacatgg

SEQ ID NO: 1015123 - DNA, 15 bp, Homo sapiens
acttcagaacatgga

SEQ ID NO: 1015124 - DNA, 15 bp, Homo sapiens
cttcagaacatggaa

SEQ ID NO: 1015125 - DNA, 15 bp, Homo sapiens
ttcagaacatggaat

SEQ ID NO: 1015126 - DNA, 15 bp, Homo sapiens
tcagaacatggaata

SEQ ID NO: 1015127 - DNA, 15 bp, Homo sapiens
cagaacatggaatat

SEQ ID NO: 1015128 - DNA, 15 bp, Homo sapiens
agaacatggaatatt

SEQ ID NO: 1015129 - DNA, 15 bp, Homo sapiens
gaacatggaatatta

SEQ ID NO: 1015130 - DNA, 15 bp, Homo sapiens
aacatggaatattag

SEQ ID NO: 1015131 - DNA, 15 bp, Homo sapiens
acatggaatattagc

SEQ ID NO: 1015132 - DNA, 15 bp, Homo sapiens
catggaatattagca

SEQ ID NO: 1015133 - DNA, 15 bp, Homo sapiens
atggaatattagcag

SEQ ID NO: 1015134 - DNA, 15 bp, Homo sapiens
tggaatattagcaga

SEQ ID NO: 1015135 - DNA, 15 bp, Homo sapiens
ggaatattagcagag

SEQ ID NO: 1015136 - DNA, 15 bp, Homo sapiens
gaatattagcagaga

SEQ ID NO: 1015137 - DNA, 15 bp, Homo sapiens
aatattagcagagat

SEQ ID NO: 1015138 - DNA, 15 bp, Homo sapiens
atattagcagagata

SEQ ID NO: 1015139 - DNA, 15 bp, Homo sapiens
tattagcagagataa

SEQ ID NO: 1015140 - DNA, 15 bp, Homo sapiens
attagcagagataaa

SEQ ID NO: 1015141 - DNA, 15 bp, Homo sapiens
ttagcagagataaaa

SEQ ID NO: 1015142 - DNA, 15 bp, Homo sapiens
tagcagagataaaaa

SEQ ID NO: 1015143 - DNA, 15 bp, Homo sapiens
agcagagataaaaaa

SEQ ID NO: 1015144 - DNA, 15 bp, Homo sapiens
gcagagataaaaaag

SEQ ID NO: 1015145 - DNA, 15 bp, Homo sapiens
cagagataaaaaaga

SEQ ID NO: 1015146 - DNA, 15 bp, Homo sapiens
agagataaaaaagag

SEQ ID NO: 1015147 - DNA, 15 bp, Homo sapiens
gagataaaaaagaga

SEQ ID NO: 1015148 - DNA, 15 bp, Homo sapiens
agataaaaaagagat

SEQ ID NO: 1015149 - DNA, 15 bp, Homo sapiens
gataaaaaagagatc

SEQ ID NO: 1015150 - DNA, 15 bp, Homo sapiens
ataaaaaagagatca

SEQ ID NO: 1015151 - DNA, 15 bp, Homo sapiens
taaaaaagagatcat

SEQ ID NO: 1015152 - DNA, 15 bp, Homo sapiens
aaaaaagagatcatt

SEQ ID NO: 1015153 - DNA, 15 bp, Homo sapiens
aaaaagagatcattt

SEQ ID NO: 1015154 - DNA, 15 bp, Homo sapiens
aaaagagatcatttc

SEQ ID NO: 1015155 - DNA, 15 bp, Homo sapiens
aaagagatcatttca

SEQ ID NO: 1015156 - DNA, 15 bp, Homo sapiens
aagagatcatttcat

SEQ ID NO: 1015157 - DNA, 15 bp, Homo sapiens
agagatcatttcata

SEQ ID NO: 1015158 - DNA, 15 bp, Homo sapiens
gagatcatttcataa

SEQ ID NO: 1015159 - DNA, 15 bp, Homo sapiens
agatcatttcataat

SEQ ID NO: 1015160 - DNA, 15 bp, Homo sapiens
gatcatttcataatg

SEQ ID NO: 1015161 - DNA, 15 bp, Homo sapiens
atcatttcataatga

SEQ ID NO: 1015162 - DNA, 15 bp, Homo sapiens
tcatttcataatgat

SEQ ID NO: 1015163 - DNA, 15 bp, Homo sapiens
catttcataatgata

SEQ ID NO: 1015164 - DNA, 15 bp, Homo sapiens
atttcataatgataa

SEQ ID NO: 1015165 - DNA, 15 bp, Homo sapiens
tttcataatgataaa

SEQ ID NO: 1015166 - DNA, 15 bp, Homo sapiens
ttcataatgataaaa

SEQ ID NO: 1015167 - DNA, 15 bp, Homo sapiens
tcataatgataaaat

SEQ ID NO: 1015168 - DNA, 15 bp, Homo sapiens
cataatgataaaata

SEQ ID NO: 1015169 - DNA, 15 bp, Homo sapiens
ataatgataaaatat

SEQ ID NO: 1015170 - DNA, 15 bp, Homo sapiens
taatgataaaatatt

SEQ ID NO: 1015171 - DNA, 15 bp, Homo sapiens
aatgataaaatattg

SEQ ID NO: 1015172 - DNA, 15 bp, Homo sapiens
atgataaaatattga

SEQ ID NO: 1015173 - DNA, 15 bp, Homo sapiens
tgataaaatattgaa

SEQ ID NO: 1015174 - DNA, 15 bp, Homo sapiens
gataaaatattgaat

SEQ ID NO: 1015175 - DNA, 15 bp, Homo sapiens
ataaaatattgaatt

SEQ ID NO: 1015176 - DNA, 15 bp, Homo sapiens
taaaatattgaattc

SEQ ID NO: 1015177 - DNA, 15 bp, Homo sapiens
aaaatattgaattca

SEQ ID NO: 1015178 - DNA, 15 bp, Homo sapiens
aaatattgaattcaa

SEQ ID NO: 1015179 - DNA, 15 bp, Homo sapiens
aatattgaattcaag

SEQ ID NO: 1015180 - DNA, 15 bp, Homo sapiens
atattgaattcaaga

SEQ ID NO: 1015181 - DNA, 15 bp, Homo sapiens
tattgaattcaagag

SEQ ID NO: 1015182 - DNA, 15 bp, Homo sapiens
attgaattcaagagg

SEQ ID NO: 1015183 - DNA, 15 bp, Homo sapiens
ttgaattcaagagga

SEQ ID NO: 1015184 - DNA, 15 bp, Homo sapiens
tgaattcaagaggac

SEQ ID NO: 1015185 - DNA, 15 bp, Homo sapiens
gaattcaagaggaca

SEQ ID NO: 1015186 - DNA, 15 bp, Homo sapiens
aattcaagaggacat

SEQ ID NO: 1015187 - DNA, 15 bp, Homo sapiens
attcaagaggacata

SEQ ID NO: 1015188 - DNA, 15 bp, Homo sapiens
ttcaagaggacataa

SEQ ID NO: 1015189 - DNA, 15 bp, Homo sapiens
tcaagaggacataac

SEQ ID NO: 1015190 - DNA, 15 bp, Homo sapiens
caagaggacataaca

SEQ ID NO: 1015191 - DNA, 15 bp, Homo sapiens
aagaggacataacaa

SEQ ID NO: 1015192 - DNA, 15 bp, Homo sapiens
agaggacataacaat

SEQ ID NO: 1015193 - DNA, 15 bp, Homo sapiens
gaggacataacaatc

SEQ ID NO: 1015194 - DNA, 15 bp, Homo sapiens
aggacataacaatcc

SEQ ID NO: 1015195 - DNA, 15 bp, Homo sapiens
ggacataacaatcct

SEQ ID NO: 1015196 - DNA, 15 bp, Homo sapiens
gacataacaatccta

SEQ ID NO: 1015197 - DNA, 15 bp, Homo sapiens
acataacaatcctaa

SEQ ID NO: 1015198 - DNA, 15 bp, Homo sapiens
cataacaatcctaag

SEQ ID NO: 1015199 - DNA, 15 bp, Homo sapiens
ataacaatcctaagt

SEQ ID NO: 1015200 - DNA, 15 bp, Homo sapiens
taacaatcctaagtg

SEQ ID NO: 1015201 - DNA, 15 bp, Homo sapiens
aacaatcctaagtgt

SEQ ID NO: 1015202 - DNA, 15 bp, Homo sapiens
acaatcctaagtgtt

SEQ ID NO: 1015203 - DNA, 15 bp, Homo sapiens
caatcctaagtgttt

SEQ ID NO: 1015204 - DNA, 15 bp, Homo sapiens
aatcctaagtgttta

SEQ ID NO: 1015205 - DNA, 15 bp, Homo sapiens
atcctaagtgtttat

SEQ ID NO: 1015206 - DNA, 15 bp, Homo sapiens
tcctaagtgtttatg

SEQ ID NO: 1015207 - DNA, 15 bp, Homo sapiens
cctaagtgtttatga

SEQ ID NO: 1015208 - DNA, 15 bp, Homo sapiens
ctaagtgtttatgaa

SEQ ID NO: 1015209 - DNA, 15 bp, Homo sapiens
taagtgtttatgaac

SEQ ID NO: 1015210 - DNA, 15 bp, Homo sapiens
aagtgtttatgaacc

SEQ ID NO: 1015211 - DNA, 15 bp, Homo sapiens
agtgtttatgaacct

SEQ ID NO: 1015212 - DNA, 15 bp, Homo sapiens
gtgtttatgaaccta

SEQ ID NO: 1015213 - DNA, 15 bp, Homo sapiens
tgtttatgaacctag

SEQ ID NO: 1015214 - DNA, 15 bp, Homo sapiens
gtttatgaacctagt

SEQ ID NO: 1015215 - DNA, 15 bp, Homo sapiens
tttatgaacctagta

SEQ ID NO: 1015216 - DNA, 15 bp, Homo sapiens
ttatgaacctagtaa

SEQ ID NO: 1015217 - DNA, 15 bp, Homo sapiens
tatgaacctagtaac

SEQ ID NO: 1015218 - DNA, 15 bp, Homo sapiens
atgaacctagtaaca

SEQ ID NO: 1015219 - DNA, 15 bp, Homo sapiens
tgaacctagtaacag

SEQ ID NO: 1015220 - DNA, 15 bp, Homo sapiens
gaacctagtaacaga

SEQ ID NO: 1015221 - DNA, 15 bp, Homo sapiens
aacctagtaacagat

SEQ ID NO: 1015222 - DNA, 15 bp, Homo sapiens
acctagtaacagatc

SEQ ID NO: 1015223 - DNA, 15 bp, Homo sapiens
cctagtaacagatct

SEQ ID NO: 1015224 - DNA, 15 bp, Homo sapiens
ctagtaacagatctt

SEQ ID NO: 1015225 - DNA, 15 bp, Homo sapiens
tagtaacagatcttc

SEQ ID NO: 1015226 - DNA, 15 bp, Homo sapiens
agtaacagatcttca

SEQ ID NO: 1015227 - DNA, 15 bp, Homo sapiens
gtaacagatcttcaa

SEQ ID NO: 1015228 - DNA, 15 bp, Homo sapiens
taacagatcttcaaa

SEQ ID NO: 1015229 - DNA, 15 bp, Homo sapiens
aacagatcttcaaaa

SEQ ID NO: 1015230 - DNA, 15 bp, Homo sapiens
acagatcttcaaaat

SEQ ID NO: 1015231 - DNA, 15 bp, Homo sapiens
cagatcttcaaaata

SEQ ID NO: 1015232 - DNA, 15 bp, Homo sapiens
agatcttcaaaatac

SEQ ID NO: 1015233 - DNA, 15 bp, Homo sapiens
gatcttcaaaataca

SEQ ID NO: 1015234 - DNA, 15 bp, Homo sapiens
atcttcaaaatacat

SEQ ID NO: 1015235 - DNA, 15 bp, Homo sapiens
tcttcaaaatacatg

SEQ ID NO: 1015236 - DNA, 15 bp, Homo sapiens
cttcaaaatacatga

SEQ ID NO: 1015237 - DNA, 15 bp, Homo sapiens
ttcaaaatacatgaa

SEQ ID NO: 1015238 - DNA, 15 bp, Homo sapiens
tcaaaatacatgaag

SEQ ID NO: 1015239 - DNA, 15 bp, Homo sapiens
caaaatacatgaagc

SEQ ID NO: 1015240 - DNA, 15 bp, Homo sapiens
aaaatacatgaagca

SEQ ID NO: 1015241 - DNA, 15 bp, Homo sapiens
aaatacatgaagcaa

SEQ ID NO: 1015242 - DNA, 15 bp, Homo sapiens
aatacatgaagcaaa

SEQ ID NO: 1015243 - DNA, 15 bp, Homo sapiens
atacatgaagcaaaa

SEQ ID NO: 1015244 - DNA, 15 bp, Homo sapiens
tacatgaagcaaaag

SEQ ID NO: 1015245 - DNA, 15 bp, Homo sapiens
acatgaagcaaaagc

SEQ ID NO: 1015246 - DNA, 15 bp, Homo sapiens
catgaagcaaaagct

SEQ ID NO: 1015247 - DNA, 15 bp, Homo sapiens
atgaagcaaaagctg

SEQ ID NO: 1015248 - DNA, 15 bp, Homo sapiens
tgaagcaaaagctga

SEQ ID NO: 1015249 - DNA, 15 bp, Homo sapiens
gaagcaaaagctgat

SEQ ID NO: 1015250 - DNA, 15 bp, Homo sapiens
aagcaaaagctgata

SEQ ID NO: 1015251 - DNA, 15 bp, Homo sapiens
agcaaaagctgatag

SEQ ID NO: 1015252 - DNA, 15 bp, Homo sapiens
gcaaaagctgataga

SEQ ID NO: 1015253 - DNA, 15 bp, Homo sapiens
caaaagctgatagaa

SEQ ID NO: 1015254 - DNA, 15 bp, Homo sapiens
aaaagctgatagaac

SEQ ID NO: 1015255 - DNA, 15 bp, Homo sapiens
aaagctgatagaact

SEQ ID NO: 1015256 - DNA, 15 bp, Homo sapiens
aagctgatagaacta

SEQ ID NO: 1015257 - DNA, 15 bp, Homo sapiens
agctgatagaactat

SEQ ID NO: 1015258 - DNA, 15 bp, Homo sapiens
gctgatagaactata

SEQ ID NO: 1015259 - DNA, 15 bp, Homo sapiens
ctgatagaactataa

SEQ ID NO: 1015260 - DNA, 15 bp, Homo sapiens
tgatagaactataag

SEQ ID NO: 1015261 - DNA, 15 bp, Homo sapiens
gatagaactataagg

SEQ ID NO: 1015262 - DNA, 15 bp, Homo sapiens
atagaactataagga

SEQ ID NO: 1015263 - DNA, 15 bp, Homo sapiens
tagaactataaggag

SEQ ID NO: 1015264 - DNA, 15 bp, Homo sapiens
agaactataaggaga

SEQ ID NO: 1015265 - DNA, 15 bp, Homo sapiens
gaactataaggagaa

SEQ ID NO: 1015266 - DNA, 15 bp, Homo sapiens
aactataaggagaat

SEQ ID NO: 1015267 - DNA, 15 bp, Homo sapiens
actataaggagaata

SEQ ID NO: 1015268 - DNA, 15 bp, Homo sapiens
ctataaggagaatag

SEQ ID NO: 1015269 - DNA, 15 bp, Homo sapiens
tataaggagaatagt

SEQ ID NO: 1015270 - DNA, 15 bp, Homo sapiens
ataaggagaatagtg

SEQ ID NO: 1015271 - DNA, 15 bp, Homo sapiens
taaggagaatagtga

SEQ ID NO: 1015272 - DNA, 15 bp, Homo sapiens
aaggagaatagtgaa

SEQ ID NO: 1015273 - DNA, 15 bp, Homo sapiens
aggagaatagtgaaa

SEQ ID NO: 1015274 - DNA, 15 bp, Homo sapiens
ggagaatagtgaaac

SEQ ID NO: 1015275 - DNA, 15 bp, Homo sapiens
gagaatagtgaaact

SEQ ID NO: 1015276 - DNA, 15 bp, Homo sapiens
agaatagtgaaactc

SEQ ID NO: 1015277 - DNA, 15 bp, Homo sapiens
gaatagtgaaactca

SEQ ID NO: 1015278 - DNA, 15 bp, Homo sapiens
aatagtgaaactcac

SEQ ID NO: 1015279 - DNA, 15 bp, Homo sapiens
atagtgaaactcaca

SEQ ID NO: 1015280 - DNA, 15 bp, Homo sapiens
tagtgaaactcacaa

SEQ ID NO: 1015281 - DNA, 15 bp, Homo sapiens
agtgaaactcacaat

SEQ ID NO: 1015282 - DNA, 15 bp, Homo sapiens
gtgaaactcacaatt

SEQ ID NO: 1015283 - DNA, 15 bp, Homo sapiens
tgaaactcacaatta

SEQ ID NO: 1015284 - DNA, 15 bp, Homo sapiens
gaaactcacaattat

SEQ ID NO: 1015285 - DNA, 15 bp, Homo sapiens
aaactcacaattata

SEQ ID NO: 1015286 - DNA, 15 bp, Homo sapiens
aactcacaattatag

SEQ ID NO: 1015287 - DNA, 15 bp, Homo sapiens
actcacaattataga

SEQ ID NO: 1015288 - DNA, 15 bp, Homo sapiens
ctcacaattatagat

SEQ ID NO: 1015289 - DNA, 15 bp, Homo sapiens
tcacaattatagatg

SEQ ID NO: 1015290 - DNA, 15 bp, Homo sapiens
cacaattatagatga

SEQ ID NO: 1015291 - DNA, 15 bp, Homo sapiens
acaattatagatgaa

SEQ ID NO: 1015292 - DNA, 15 bp, Homo sapiens
caattatagatgaag

SEQ ID NO: 1015293 - DNA, 15 bp, Homo sapiens
aattatagatgaaga

SEQ ID NO: 1015294 - DNA, 15 bp, Homo sapiens
attatagatgaagat

SEQ ID NO: 1015295 - DNA, 15 bp, Homo sapiens
ttatagatgaagatt

SEQ ID NO: 1015296 - DNA, 15 bp, Homo sapiens
tatagatgaagattt

SEQ ID NO: 1015297 - DNA, 15 bp, Homo sapiens
atagatgaagatttc

SEQ ID NO: 1015298 - DNA, 15 bp, Homo sapiens
tagatgaagatttca

SEQ ID NO: 1015299 - DNA, 15 bp, Homo sapiens
agatgaagatttcaa

SEQ ID NO: 1015300 - DNA, 15 bp, Homo sapiens
gatgaagatttcaac

SEQ ID NO: 1015301 - DNA, 15 bp, Homo sapiens
atgaagatttcaaca

SEQ ID NO: 1015302 - DNA, 15 bp, Homo sapiens
tgaagatttcaacat

SEQ ID NO: 1015303 - DNA, 15 bp, Homo sapiens
gaagatttcaacatg

SEQ ID NO: 1015304 - DNA, 15 bp, Homo sapiens
aagatttcaacatgt

SEQ ID NO: 1015305 - DNA, 15 bp, Homo sapiens
agatttcaacatgtc

SEQ ID NO: 1015306 - DNA, 15 bp, Homo sapiens
gatttcaacatgtct

SEQ ID NO: 1015307 - DNA, 15 bp, Homo sapiens
atttcaacatgtctc

SEQ ID NO: 1015308 - DNA, 15 bp, Homo sapiens
tttcaacatgtctct

SEQ ID NO: 1015309 - DNA, 15 bp, Homo sapiens
ttcaacatgtctctc

SEQ ID NO: 1015310 - DNA, 15 bp, Homo sapiens
tcaacatgtctctct

SEQ ID NO: 1015311 - DNA, 15 bp, Homo sapiens
caacatgtctctctc

SEQ ID NO: 1015312 - DNA, 15 bp, Homo sapiens
aacatgtctctctca

SEQ ID NO: 1015313 - DNA, 15 bp, Homo sapiens
acatgtctctctcaa

SEQ ID NO: 1015314 - DNA, 15 bp, Homo sapiens
catgtctctctcaat

SEQ ID NO: 1015315 - DNA, 15 bp, Homo sapiens
atgtctctctcaata

SEQ ID NO: 1015316 - DNA, 15 bp, Homo sapiens
tgtctctctcaataa

SEQ ID NO: 1015317 - DNA, 15 bp, Homo sapiens
gtctctctcaataag

SEQ ID NO: 1015318 - DNA, 15 bp, Homo sapiens
tctctctcaataagt

SEQ ID NO: 1015319 - DNA, 15 bp, Homo sapiens
ctctctcaataagta

SEQ ID NO: 1015320 - DNA, 15 bp, Homo sapiens
tctctcaataagtag

SEQ ID NO: 1015321 - DNA, 15 bp, Homo sapiens
ctctcaataagtaga

SEQ ID NO: 1015322 - DNA, 15 bp, Homo sapiens
tctcaataagtagac

SEQ ID NO: 1015323 - DNA, 15 bp, Homo sapiens
ctcaataagtagaca

SEQ ID NO: 1015324 - DNA, 15 bp, Homo sapiens
tcaataagtagacag

SEQ ID NO: 1015325 - DNA, 15 bp, Homo sapiens
caataagtagacaga

SEQ ID NO: 1015326 - DNA, 15 bp, Homo sapiens
aataagtagacagaa

SEQ ID NO: 1015327 - DNA, 15 bp, Homo sapiens
ataagtagacagaat

SEQ ID NO: 1015328 - DNA, 15 bp, Homo sapiens
taagtagacagaata

SEQ ID NO: 1015329 - DNA, 15 bp, Homo sapiens
aagtagacagaataa

SEQ ID NO: 1015330 - DNA, 15 bp, Homo sapiens
agtagacagaataac

SEQ ID NO: 1015331 - DNA, 15 bp, Homo sapiens
gtagacagaataaca

SEQ ID NO: 1015332 - DNA, 15 bp, Homo sapiens
tagacagaataacaa

SEQ ID NO: 1015333 - DNA, 15 bp, Homo sapiens
agacagaataacaag

SEQ ID NO: 1015334 - DNA, 15 bp, Homo sapiens
gacagaataacaaga

SEQ ID NO: 1015335 - DNA, 15 bp, Homo sapiens
acagaataacaagaa

SEQ ID NO: 1015336 - DNA, 15 bp, Homo sapiens
cagaataacaagaag

SEQ ID NO: 1015337 - DNA, 15 bp, Homo sapiens
agaataacaagaagg

SEQ ID NO: 1015338 - DNA, 15 bp, Homo sapiens
gaataacaagaaggg

SEQ ID NO: 1015339 - DNA, 15 bp, Homo sapiens
aataacaagaagggc

SEQ ID NO: 1015340 - DNA, 15 bp, Homo sapiens
ataacaagaagggca

SEQ ID NO: 1015341 - DNA, 15 bp, Homo sapiens
taacaagaagggcat

SEQ ID NO: 1015342 - DNA, 15 bp, Homo sapiens
aacaagaagggcatg

SEQ ID NO: 1015343 - DNA, 15 bp, Homo sapiens
acaagaagggcatgg

SEQ ID NO: 1015344 - DNA, 15 bp, Homo sapiens
caagaagggcatgga

SEQ ID NO: 1015345 - DNA, 15 bp, Homo sapiens
aagaagggcatggaa

SEQ ID NO: 1015346 - DNA, 15 bp, Homo sapiens
agaagggcatggaag

SEQ ID NO: 1015347 - DNA, 15 bp, Homo sapiens
gaagggcatggaaga

SEQ ID NO: 1015348 - DNA, 15 bp, Homo sapiens
aagggcatggaagac

SEQ ID NO: 1015349 - DNA, 15 bp, Homo sapiens
agggcatggaagact

SEQ ID NO: 1015350 - DNA, 15 bp, Homo sapiens
gggcatggaagactt

SEQ ID NO: 1015351 - DNA, 15 bp, Homo sapiens
ggcatggaagacttg

SEQ ID NO: 1015352 - DNA, 15 bp, Homo sapiens
gcatggaagacttga

SEQ ID NO: 1015353 - DNA, 15 bp, Homo sapiens
catggaagacttgaa

SEQ ID NO: 1015354 - DNA, 15 bp, Homo sapiens
atggaagacttgaat

SEQ ID NO: 1015355 - DNA, 15 bp, Homo sapiens
tggaagacttgaata

SEQ ID NO: 1015356 - DNA, 15 bp, Homo sapiens
ggaagacttgaataa

SEQ ID NO: 1015357 - DNA, 15 bp, Homo sapiens
gaagacttgaataac

SEQ ID NO: 1015358 - DNA, 15 bp, Homo sapiens
aagacttgaataaca

SEQ ID NO: 1015359 - DNA, 15 bp, Homo sapiens
agacttgaataacac

SEQ ID NO: 1015360 - DNA, 15 bp, Homo sapiens
gacttgaataacact

SEQ ID NO: 1015361 - DNA, 15 bp, Homo sapiens
acttgaataacacta

SEQ ID NO: 1015362 - DNA, 15 bp, Homo sapiens
cttgaataacactat

SEQ ID NO: 1015363 - DNA, 15 bp, Homo sapiens
ttgaataacactatg

SEQ ID NO: 1015364 - DNA, 15 bp, Homo sapiens
tgaataacactatgg

SEQ ID NO: 1015365 - DNA, 15 bp, Homo sapiens
gaataacactatgga

SEQ ID NO: 1015366 - DNA, 15 bp, Homo sapiens
aataacactatggaa

SEQ ID NO: 1015367 - DNA, 15 bp, Homo sapiens
ataacactatggaac

SEQ ID NO: 1015368 - DNA, 15 bp, Homo sapiens
taacactatggaaca

SEQ ID NO: 1015369 - DNA, 15 bp, Homo sapiens
aacactatggaacaa

SEQ ID NO: 1015370 - DNA, 15 bp, Homo sapiens
acactatggaacaag

SEQ ID NO: 1015371 - DNA, 15 bp, Homo sapiens
cactatggaacaagt

SEQ ID NO: 1015372 - DNA, 15 bp, Homo sapiens
actatggaacaagtt

SEQ ID NO: 1015373 - DNA, 15 bp, Homo sapiens
ctatggaacaagttg

SEQ ID NO: 1015374 - DNA, 15 bp, Homo sapiens
tatggaacaagttga

SEQ ID NO: 1015375 - DNA, 15 bp, Homo sapiens
atggaacaagttgac

SEQ ID NO: 1015376 - DNA, 15 bp, Homo sapiens
tggaacaagttgacc

SEQ ID NO: 1015377 - DNA, 15 bp, Homo sapiens
ggaacaagttgaccg

SEQ ID NO: 1015378 - DNA, 15 bp, Homo sapiens
gaacaagttgaccga

SEQ ID NO: 1015379 - DNA, 15 bp, Homo sapiens
aacaagttgaccgaa

SEQ ID NO: 1015380 - DNA, 15 bp, Homo sapiens
acaagttgaccgaat

SEQ ID NO: 1015381 - DNA, 15 bp, Homo sapiens
caagttgaccgaatt

SEQ ID NO: 1015382 - DNA, 15 bp, Homo sapiens
aagttgaccgaattg

SEQ ID NO: 1015383 - DNA, 15 bp, Homo sapiens
agttgaccgaattga

SEQ ID NO: 1015384 - DNA, 15 bp, Homo sapiens
gttgaccgaattgac

SEQ ID NO: 1015385 - DNA, 15 bp, Homo sapiens
ttgaccgaattgaca

SEQ ID NO: 1015386 - DNA, 15 bp, Homo sapiens
tgaccgaattgacat

SEQ ID NO: 1015387 - DNA, 15 bp, Homo sapiens
gaccgaattgacatt

SEQ ID NO: 1015388 - DNA, 15 bp, Homo sapiens
accgaattgacattt

SEQ ID NO: 1015389 - DNA, 15 bp, Homo sapiens
ccgaattgacattta

SEQ ID NO: 1015390 - DNA, 15 bp, Homo sapiens
cgaattgacatttat

SEQ ID NO: 1015391 - DNA, 15 bp, Homo sapiens
gaattgacatttata

SEQ ID NO: 1015392 - DNA, 15 bp, Homo sapiens
aattgacatttatac

SEQ ID NO: 1015393 - DNA, 15 bp, Homo sapiens
attgacatttataca

SEQ ID NO: 1015394 - DNA, 15 bp, Homo sapiens
ttgacatttatacac

SEQ ID NO: 1015395 - DNA, 15 bp, Homo sapiens
tgacatttatacaca

SEQ ID NO: 1015396 - DNA, 15 bp, Homo sapiens
gacatttatacacac

SEQ ID NO: 1015397 - DNA, 15 bp, Homo sapiens
acatttatacacact

SEQ ID NO: 1015398 - DNA, 15 bp, Homo sapiens
catttatacacactc

SEQ ID NO: 1015399 - DNA, 15 bp, Homo sapiens
atttatacacactcc

SEQ ID NO: 1015400 - DNA, 15 bp, Homo sapiens
tttatacacactcca

SEQ ID NO: 1015401 - DNA, 15 bp, Homo sapiens
ttatacacactccac

SEQ ID NO: 1015402 - DNA, 15 bp, Homo sapiens
tatacacactccact

SEQ ID NO: 1015403 - DNA, 15 bp, Homo sapiens
atacacactccactc

SEQ ID NO: 1015404 - DNA, 15 bp, Homo sapiens
tacacactccactca

SEQ ID NO: 1015405 - DNA, 15 bp, Homo sapiens
acacactccactcaa

SEQ ID NO: 1015406 - DNA, 15 bp, Homo sapiens
cacactccactcaac

SEQ ID NO: 1015407 - DNA, 15 bp, Homo sapiens
acactccactcaaca

SEQ ID NO: 1015408 - DNA, 15 bp, Homo sapiens
cactccactcaacaa

SEQ ID NO: 1015409 - DNA, 15 bp, Homo sapiens
actccactcaacaac

SEQ ID NO: 1015410 - DNA, 15 bp, Homo sapiens
ctccactcaacaaca

SEQ ID NO: 1015411 - DNA, 15 bp, Homo sapiens
tccactcaacaacag

SEQ ID NO: 1015412 - DNA, 15 bp, Homo sapiens
ccactcaacaacagc

SEQ ID NO: 1015413 - DNA, 15 bp, Homo sapiens
cactcaacaacagca

SEQ ID NO: 1015414 - DNA, 15 bp, Homo sapiens
actcaacaacagcag

SEQ ID NO: 1015415 - DNA, 15 bp, Homo sapiens
ctcaacaacagcaga

SEQ ID NO: 1015416 - DNA, 15 bp, Homo sapiens
tcaacaacagcagag

SEQ ID NO: 1015417 - DNA, 15 bp, Homo sapiens
caacaacagcagagc

SEQ ID NO: 1015418 - DNA, 15 bp, Homo sapiens
aacaacagcagagca

SEQ ID NO: 1015419 - DNA, 15 bp, Homo sapiens
acaacagcagagcaa

SEQ ID NO: 1015420 - DNA, 15 bp, Homo sapiens
caacagcagagcaag

SEQ ID NO: 1015421 - DNA, 15 bp, Homo sapiens
aacagcagagcaagc

SEQ ID NO: 1015422 - DNA, 15 bp, Homo sapiens
acagcagagcaagca

SEQ ID NO: 1015423 - DNA, 15 bp, Homo sapiens
cagcagagcaagcat

SEQ ID NO: 1015424 - DNA, 15 bp, Homo sapiens
agcagagcaagcatt

SEQ ID NO: 1015425 - DNA, 15 bp, Homo sapiens
gcagagcaagcattc

SEQ ID NO: 1015426 - DNA, 15 bp, Homo sapiens
cagagcaagcattcc

SEQ ID NO: 1015427 - DNA, 15 bp, Homo sapiens
agagcaagcattcct

SEQ ID NO: 1015428 - DNA, 15 bp, Homo sapiens
gagcaagcattcctt

SEQ ID NO: 1015429 - DNA, 15 bp, Homo sapiens
agcaagcattccttt

SEQ ID NO: 1015430 - DNA, 15 bp, Homo sapiens
gcaagcattcctttc

SEQ ID NO: 1015431 - DNA, 15 bp, Homo sapiens
caagcattcctttca

SEQ ID NO: 1015432 - DNA, 15 bp, Homo sapiens
aagcattcctttcaa

SEQ ID NO: 1015433 - DNA, 15 bp, Homo sapiens
agcattcctttcaaa

SEQ ID NO: 1015434 - DNA, 15 bp, Homo sapiens
gcattcctttcaaat

SEQ ID NO: 1015435 - DNA, 15 bp, Homo sapiens
cattcctttcaaatg

SEQ ID NO: 1015436 - DNA, 15 bp, Homo sapiens
attcctttcaaatgt

SEQ ID NO: 1015437 - DNA, 15 bp, Homo sapiens
ttcctttcaaatgtg

SEQ ID NO: 1015438 - DNA, 15 bp, Homo sapiens
tcctttcaaatgtgc

SEQ ID NO: 1015439 - DNA, 15 bp, Homo sapiens
cctttcaaatgtgca

SEQ ID NO: 1015440 - DNA, 15 bp, Homo sapiens
ctttcaaatgtgcat

SEQ ID NO: 1015441 - DNA, 15 bp, Homo sapiens
tttcaaatgtgcata

SEQ ID NO: 1015442 - DNA, 15 bp, Homo sapiens
ttcaaatgtgcatat

SEQ ID NO: 1015443 - DNA, 15 bp, Homo sapiens
tcaaatgtgcatata

SEQ ID NO: 1015444 - DNA, 15 bp, Homo sapiens
caaatgtgcatatac

SEQ ID NO: 1015445 - DNA, 15 bp, Homo sapiens
aaatgtgcatataca

SEQ ID NO: 1015446 - DNA, 15 bp, Homo sapiens
aatgtgcatatacat

SEQ ID NO: 1015447 - DNA, 15 bp, Homo sapiens
atgtgcatatacatc

SEQ ID NO: 1015448 - DNA, 15 bp, Homo sapiens
tgtgcatatacatcc

SEQ ID NO: 1015449 - DNA, 15 bp, Homo sapiens
gtgcatatacatcca

SEQ ID NO: 1015450 - DNA, 15 bp, Homo sapiens
tgcatatacatccac

SEQ ID NO: 1015451 - DNA, 15 bp, Homo sapiens
gcatatacatccacc

SEQ ID NO: 1015452 - DNA, 15 bp, Homo sapiens
catatacatccacca

SEQ ID NO: 1015453 - DNA, 15 bp, Homo sapiens
atatacatccaccaa

SEQ ID NO: 1015454 - DNA, 15 bp, Homo sapiens
tatacatccaccaag

SEQ ID NO: 1015455 - DNA, 15 bp, Homo sapiens
atacatccaccaaga

SEQ ID NO: 1015456 - DNA, 15 bp, Homo sapiens
tacatccaccaagac

SEQ ID NO: 1015457 - DNA, 15 bp, Homo sapiens
acatccaccaagaca

SEQ ID NO: 1015458 - DNA, 15 bp, Homo sapiens
catccaccaagacag

SEQ ID NO: 1015459 - DNA, 15 bp, Homo sapiens
atccaccaagacaga

SEQ ID NO: 1015460 - DNA, 15 bp, Homo sapiens
tccaccaagacagat

SEQ ID NO: 1015461 - DNA, 15 bp, Homo sapiens
ccaccaagacagatc

SEQ ID NO: 1015462 - DNA, 15 bp, Homo sapiens
caccaagacagatca

SEQ ID NO: 1015463 - DNA, 15 bp, Homo sapiens
accaagacagatcat

SEQ ID NO: 1015464 - DNA, 15 bp, Homo sapiens
ccaagacagatcatt

SEQ ID NO: 1015465 - DNA, 15 bp, Homo sapiens
caagacagatcattt

SEQ ID NO: 1015466 - DNA, 15 bp, Homo sapiens
aagacagatcatttt

SEQ ID NO: 1015467 - DNA, 15 bp, Homo sapiens
agacagatcattttc

SEQ ID NO: 1015468 - DNA, 15 bp, Homo sapiens
gacagatcattttct

SEQ ID NO: 1015469 - DNA, 15 bp, Homo sapiens
acagatcattttctg

SEQ ID NO: 1015470 - DNA, 15 bp, Homo sapiens
cagatcattttctgg

SEQ ID NO: 1015471 - DNA, 15 bp, Homo sapiens
agatcattttctggg

SEQ ID NO: 1015472 - DNA, 15 bp, Homo sapiens
gatcattttctgggc

SEQ ID NO: 1015473 - DNA, 15 bp, Homo sapiens
atcattttctgggcc

SEQ ID NO: 1015474 - DNA, 15 bp, Homo sapiens
tcattttctgggcca

SEQ ID NO: 1015475 - DNA, 15 bp, Homo sapiens
cattttctgggccat

SEQ ID NO: 1015476 - DNA, 15 bp, Homo sapiens
attttctgggccatt

SEQ ID NO: 1015477 - DNA, 15 bp, Homo sapiens
ttttctgggccatta

SEQ ID NO: 1015478 - DNA, 15 bp, Homo sapiens
tttctgggccattaa

SEQ ID NO: 1015479 - DNA, 15 bp, Homo sapiens
ttctgggccattaaa

SEQ ID NO: 1015480 - DNA, 15 bp, Homo sapiens
tctgggccattaaac

SEQ ID NO: 1015481 - DNA, 15 bp, Homo sapiens
ctgggccattaaaca

SEQ ID NO: 1015482 - DNA, 15 bp, Homo sapiens
tgggccattaaacaa

SEQ ID NO: 1015483 - DNA, 15 bp, Homo sapiens
gggccattaaacaag

SEQ ID NO: 1015484 - DNA, 15 bp, Homo sapiens
ggccattaaacaagc

SEQ ID NO: 1015485 - DNA, 15 bp, Homo sapiens
gccattaaacaagcc

SEQ ID NO: 1015486 - DNA, 15 bp, Homo sapiens
ccattaaacaagcct

SEQ ID NO: 1015487 - DNA, 15 bp, Homo sapiens
cattaaacaagcctc

SEQ ID NO: 1015488 - DNA, 15 bp, Homo sapiens
attaaacaagcctca

SEQ ID NO: 1015489 - DNA, 15 bp, Homo sapiens
ttaaacaagcctcaa

SEQ ID NO: 1015490 - DNA, 15 bp, Homo sapiens
taaacaagcctcaat

SEQ ID NO: 1015491 - DNA, 15 bp, Homo sapiens
aaacaagcctcaata

SEQ ID NO: 1015492 - DNA, 15 bp, Homo sapiens
aacaagcctcaataa

SEQ ID NO: 1015493 - DNA, 15 bp, Homo sapiens
acaagcctcaataaa

SEQ ID NO: 1015494 - DNA, 15 bp, Homo sapiens
caagcctcaataaat

SEQ ID NO: 1015495 - DNA, 15 bp, Homo sapiens
aagcctcaataaatt

SEQ ID NO: 1015496 - DNA, 15 bp, Homo sapiens
agcctcaataaattt

SEQ ID NO: 1015497 - DNA, 15 bp, Homo sapiens
gcctcaataaatttg

SEQ ID NO: 1015498 - DNA, 15 bp, Homo sapiens
cctcaataaatttga

SEQ ID NO: 1015499 - DNA, 15 bp, Homo sapiens
ctcaataaatttgaa

SEQ ID NO: 1015500 - DNA, 15 bp, Homo sapiens
tcaataaatttgaaa

SEQ ID NO: 1015501 - DNA, 15 bp, Homo sapiens
caataaatttgaaag

SEQ ID NO: 1015502 - DNA, 15 bp, Homo sapiens
aataaatttgaaagg

SEQ ID NO: 1015503 - DNA, 15 bp, Homo sapiens
ataaatttgaaagga

SEQ ID NO: 1015504 - DNA, 15 bp, Homo sapiens
taaatttgaaaggat

SEQ ID NO: 1015505 - DNA, 15 bp, Homo sapiens
aaatttgaaaggatt

SEQ ID NO: 1015506 - DNA, 15 bp, Homo sapiens
aatttgaaaggattc

SEQ ID NO: 1015507 - DNA, 15 bp, Homo sapiens
atttgaaaggattcc

SEQ ID NO: 1015508 - DNA, 15 bp, Homo sapiens
tttgaaaggattcct

SEQ ID NO: 1015509 - DNA, 15 bp, Homo sapiens
ttgaaaggattcctg

SEQ ID NO: 1015510 - DNA, 15 bp, Homo sapiens
tgaaaggattcctgt

SEQ ID NO: 1015511 - DNA, 15 bp, Homo sapiens
gaaaggattcctgtc

SEQ ID NO: 1015512 - DNA, 15 bp, Homo sapiens
aaaggattcctgtca

SEQ ID NO: 1015513 - DNA, 15 bp, Homo sapiens
aaggattcctgtcat

SEQ ID NO: 1015514 - DNA, 15 bp, Homo sapiens
aggattcctgtcata

SEQ ID NO: 1015515 - DNA, 15 bp, Homo sapiens
ggattcctgtcatac

SEQ ID NO: 1015516 - DNA, 15 bp, Homo sapiens
gattcctgtcatacc

SEQ ID NO: 1015517 - DNA, 15 bp, Homo sapiens
attcctgtcatacca

SEQ ID NO: 1015518 - DNA, 15 bp, Homo sapiens
ttcctgtcataccaa

SEQ ID NO: 1015519 - DNA, 15 bp, Homo sapiens
tcctgtcataccaag

SEQ ID NO: 1015520 - DNA, 15 bp, Homo sapiens
cctgtcataccaagt

SEQ ID NO: 1015521 - DNA, 15 bp, Homo sapiens
ctgtcataccaagta

SEQ ID NO: 1015522 - DNA, 15 bp, Homo sapiens
tgtcataccaagtac

SEQ ID NO: 1015523 - DNA, 15 bp, Homo sapiens
gtcataccaagtacc

SEQ ID NO: 1015524 - DNA, 15 bp, Homo sapiens
tcataccaagtacct

SEQ ID NO: 1015525 - DNA, 15 bp, Homo sapiens
cataccaagtacctt

SEQ ID NO: 1015526 - DNA, 15 bp, Homo sapiens
ataccaagtaccttg

SEQ ID NO: 1015527 - DNA, 15 bp, Homo sapiens
taccaagtaccttga

SEQ ID NO: 1015528 - DNA, 15 bp, Homo sapiens
accaagtaccttgat

SEQ ID NO: 1015529 - DNA, 15 bp, Homo sapiens
ccaagtaccttgatc

SEQ ID NO: 1015530 - DNA, 15 bp, Homo sapiens
caagtaccttgatca

SEQ ID NO: 1015531 - DNA, 15 bp, Homo sapiens
aagtaccttgatcac

SEQ ID NO: 1015532 - DNA, 15 bp, Homo sapiens
agtaccttgatcaca

SEQ ID NO: 1015533 - DNA, 15 bp, Homo sapiens
gtaccttgatcacaa

SEQ ID NO: 1015534 - DNA, 15 bp, Homo sapiens
taccttgatcacaac

SEQ ID NO: 1015535 - DNA, 15 bp, Homo sapiens
accttgatcacaaca

SEQ ID NO: 1015536 - DNA, 15 bp, Homo sapiens
ccttgatcacaacag

SEQ ID NO: 1015537 - DNA, 15 bp, Homo sapiens
cttgatcacaacaga

SEQ ID NO: 1015538 - DNA, 15 bp, Homo sapiens
ttgatcacaacagaa

SEQ ID NO: 1015539 - DNA, 15 bp, Homo sapiens
tgatcacaacagaat

SEQ ID NO: 1015540 - DNA, 15 bp, Homo sapiens
gatcacaacagaatc

SEQ ID NO: 1015541 - DNA, 15 bp, Homo sapiens
atcacaacagaatca

SEQ ID NO: 1015542 - DNA, 15 bp, Homo sapiens
tcacaacagaatcaa

SEQ ID NO: 1015543 - DNA, 15 bp, Homo sapiens
cacaacagaatcaaa

SEQ ID NO: 1015544 - DNA, 15 bp, Homo sapiens
acaacagaatcaaat

SEQ ID NO: 1015545 - DNA, 15 bp, Homo sapiens
caacagaatcaaatt

SEQ ID NO: 1015546 - DNA, 15 bp, Homo sapiens
aacagaatcaaatta

SEQ ID NO: 1015547 - DNA, 15 bp, Homo sapiens
acagaatcaaattag

SEQ ID NO: 1015548 - DNA, 15 bp, Homo sapiens
cagaatcaaattagc

SEQ ID NO: 1015549 - DNA, 15 bp, Homo sapiens
agaatcaaattagca

SEQ ID NO: 1015550 - DNA, 15 bp, Homo sapiens
gaatcaaattagcaa

SEQ ID NO: 1015551 - DNA, 15 bp, Homo sapiens
aatcaaattagcaac

SEQ ID NO: 1015552 - DNA, 15 bp, Homo sapiens
atcaaattagcaacc

SEQ ID NO: 1015553 - DNA, 15 bp, Homo sapiens
tcaaattagcaacca

SEQ ID NO: 1015554 - DNA, 15 bp, Homo sapiens
caaattagcaaccaa

SEQ ID NO: 1015555 - DNA, 15 bp, Homo sapiens
aaattagcaaccaat

SEQ ID NO: 1015556 - DNA, 15 bp, Homo sapiens
aattagcaaccaata

SEQ ID NO: 1015557 - DNA, 15 bp, Homo sapiens
attagcaaccaatag

SEQ ID NO: 1015558 - DNA, 15 bp, Homo sapiens
ttagcaaccaatagc

SEQ ID NO: 1015559 - DNA, 15 bp, Homo sapiens
tagcaaccaatagca

SEQ ID NO: 1015560 - DNA, 15 bp, Homo sapiens
agcaaccaatagcag

SEQ ID NO: 1015561 - DNA, 15 bp, Homo sapiens
gcaaccaatagcagc

SEQ ID NO: 1015562 - DNA, 15 bp, Homo sapiens
caaccaatagcagca

SEQ ID NO: 1015563 - DNA, 15 bp, Homo sapiens
aaccaatagcagcaa

SEQ ID NO: 1015564 - DNA, 15 bp, Homo sapiens
accaatagcagcaag

SEQ ID NO: 1015565 - DNA, 15 bp, Homo sapiens
ccaatagcagcaaga

SEQ ID NO: 1015566 - DNA, 15 bp, Homo sapiens
caatagcagcaagat

SEQ ID NO: 1015567 - DNA, 15 bp, Homo sapiens
aatagcagcaagatc

SEQ ID NO: 1015568 - DNA, 15 bp, Homo sapiens
atagcagcaagatct

SEQ ID NO: 1015569 - DNA, 15 bp, Homo sapiens
tagcagcaagatctc

SEQ ID NO: 1015570 - DNA, 15 bp, Homo sapiens
agcagcaagatctct

SEQ ID NO: 1015571 - DNA, 15 bp, Homo sapiens
gcagcaagatctcta

SEQ ID NO: 1015572 - DNA, 15 bp, Homo sapiens
cagcaagatctctag

SEQ ID NO: 1015573 - DNA, 15 bp, Homo sapiens
agcaagatctctaga

SEQ ID NO: 1015574 - DNA, 15 bp, Homo sapiens
gcaagatctctagaa

SEQ ID NO: 1015575 - DNA, 15 bp, Homo sapiens
caagatctctagaaa

SEQ ID NO: 1015576 - DNA, 15 bp, Homo sapiens
aagatctctagaaaa

SEQ ID NO: 1015577 - DNA, 15 bp, Homo sapiens
agatctctagaaaac

SEQ ID NO: 1015578 - DNA, 15 bp, Homo sapiens
gatctctagaaaacc

SEQ ID NO: 1015579 - DNA, 15 bp, Homo sapiens
atctctagaaaacca

SEQ ID NO: 1015580 - DNA, 15 bp, Homo sapiens
tctctagaaaaccac

SEQ ID NO: 1015581 - DNA, 15 bp, Homo sapiens
ctctagaaaaccacc

SEQ ID NO: 1015582 - DNA, 15 bp, Homo sapiens
tctagaaaaccacca

SEQ ID NO: 1015583 - DNA, 15 bp, Homo sapiens
ctagaaaaccaccat

SEQ ID NO: 1015584 - DNA, 15 bp, Homo sapiens
tagaaaaccaccatt

SEQ ID NO: 1015585 - DNA, 15 bp, Homo sapiens
agaaaaccaccattt

SEQ ID NO: 1015586 - DNA, 15 bp, Homo sapiens
gaaaaccaccattta

SEQ ID NO: 1015587 - DNA, 15 bp, Homo sapiens
aaaaccaccatttag

SEQ ID NO: 1015588 - DNA, 15 bp, Homo sapiens
aaaccaccatttaga

SEQ ID NO: 1015589 - DNA, 15 bp, Homo sapiens
aaccaccatttagaa

SEQ ID NO: 1015590 - DNA, 15 bp, Homo sapiens
accaccatttagaaa

SEQ ID NO: 1015591 - DNA, 15 bp, Homo sapiens
ccaccatttagaaat

SEQ ID NO: 1015592 - DNA, 15 bp, Homo sapiens
caccatttagaaatt

SEQ ID NO: 1015593 - DNA, 15 bp, Homo sapiens
accatttagaaatta

SEQ ID NO: 1015594 - DNA, 15 bp, Homo sapiens
ccatttagaaattaa

SEQ ID NO: 1015595 - DNA, 15 bp, Homo sapiens
catttagaaattaaa

SEQ ID NO: 1015596 - DNA, 15 bp, Homo sapiens
atttagaaattaaag

SEQ ID NO: 1015597 - DNA, 15 bp, Homo sapiens
tttagaaattaaaga

SEQ ID NO: 1015598 - DNA, 15 bp, Homo sapiens
ttagaaattaaagaa

SEQ ID NO: 1015599 - DNA, 15 bp, Homo sapiens
tagaaattaaagaac

SEQ ID NO: 1015600 - DNA, 15 bp, Homo sapiens
agaaattaaagaaca

SEQ ID NO: 1015601 - DNA, 15 bp, Homo sapiens
gaaattaaagaacat

SEQ ID NO: 1015602 - DNA, 15 bp, Homo sapiens
aaattaaagaacata

SEQ ID NO: 1015603 - DNA, 15 bp, Homo sapiens
aattaaagaacataa

SEQ ID NO: 1015604 - DNA, 15 bp, Homo sapiens
attaaagaacataag

SEQ ID NO: 1015605 - DNA, 15 bp, Homo sapiens
ttaaagaacataagt

SEQ ID NO: 1015606 - DNA, 15 bp, Homo sapiens
taaagaacataagtc

SEQ ID NO: 1015607 - DNA, 15 bp, Homo sapiens
aaagaacataagtct

SEQ ID NO: 1015608 - DNA, 15 bp, Homo sapiens
aagaacataagtctc

SEQ ID NO: 1015609 - DNA, 15 bp, Homo sapiens
agaacataagtctct

SEQ ID NO: 1015610 - DNA, 15 bp, Homo sapiens
gaacataagtctcta

SEQ ID NO: 1015611 - DNA, 15 bp, Homo sapiens
aacataagtctctat

SEQ ID NO: 1015612 - DNA, 15 bp, Homo sapiens
acataagtctctata

SEQ ID NO: 1015613 - DNA, 15 bp, Homo sapiens
cataagtctctataa

SEQ ID NO: 1015614 - DNA, 15 bp, Homo sapiens
ataagtctctataac

SEQ ID NO: 1015615 - DNA, 15 bp, Homo sapiens
taagtctctataact

SEQ ID NO: 1015616 - DNA, 15 bp, Homo sapiens
aagtctctataactc

SEQ ID NO: 1015617 - DNA, 15 bp, Homo sapiens
agtctctataactca

SEQ ID NO: 1015618 - DNA, 15 bp, Homo sapiens
gtctctataactcaa

SEQ ID NO: 1015619 - DNA, 15 bp, Homo sapiens
tctctataactcaag

SEQ ID NO: 1015620 - DNA, 15 bp, Homo sapiens
ctctataactcaaga

SEQ ID NO: 1015621 - DNA, 15 bp, Homo sapiens
tctataactcaagag

SEQ ID NO: 1015622 - DNA, 15 bp, Homo sapiens
ctataactcaagagt

SEQ ID NO: 1015623 - DNA, 15 bp, Homo sapiens
tataactcaagagtc

SEQ ID NO: 1015624 - DNA, 15 bp, Homo sapiens
ataactcaagagtca

SEQ ID NO: 1015625 - DNA, 15 bp, Homo sapiens
taactcaagagtcaa

SEQ ID NO: 1015626 - DNA, 15 bp, Homo sapiens
aactcaagagtcaaa

SEQ ID NO: 1015627 - DNA, 15 bp, Homo sapiens
actcaagagtcaaag

SEQ ID NO: 1015628 - DNA, 15 bp, Homo sapiens
ctcaagagtcaaaga

SEQ ID NO: 1015629 - DNA, 15 bp, Homo sapiens
tcaagagtcaaagaa

SEQ ID NO: 1015630 - DNA, 15 bp, Homo sapiens
caagagtcaaagaag

SEQ ID NO: 1015631 - DNA, 15 bp, Homo sapiens
aagagtcaaagaagg

SEQ ID NO: 1015632 - DNA, 15 bp, Homo sapiens
agagtcaaagaaggc

SEQ ID NO: 1015633 - DNA, 15 bp, Homo sapiens
gagtcaaagaaggca

SEQ ID NO: 1015634 - DNA, 15 bp, Homo sapiens
agtcaaagaaggcat

SEQ ID NO: 1015635 - DNA, 15 bp, Homo sapiens
gtcaaagaaggcatc

SEQ ID NO: 1015636 - DNA, 15 bp, Homo sapiens
tcaaagaaggcatca

SEQ ID NO: 1015637 - DNA, 15 bp, Homo sapiens
caaagaaggcatcaa

SEQ ID NO: 1015638 - DNA, 15 bp, Homo sapiens
aaagaaggcatcaaa

SEQ ID NO: 1015639 - DNA, 15 bp, Homo sapiens
aagaaggcatcaaaa

SEQ ID NO: 1015640 - DNA, 15 bp, Homo sapiens
agaaggcatcaaaag

SEQ ID NO: 1015641 - DNA, 15 bp, Homo sapiens
gaaggcatcaaaagg

SEQ ID NO: 1015642 - DNA, 15 bp, Homo sapiens
aaggcatcaaaaggg

SEQ ID NO: 1015643 - DNA, 15 bp, Homo sapiens
aggcatcaaaagggg

SEQ ID NO: 1015644 - DNA, 15 bp, Homo sapiens
ggcatcaaaagggga

SEQ ID NO: 1015645 - DNA, 15 bp, Homo sapiens
gcatcaaaaggggaa

SEQ ID NO: 1015646 - DNA, 15 bp, Homo sapiens
catcaaaaggggaat

SEQ ID NO: 1015647 - DNA, 15 bp, Homo sapiens
atcaaaaggggaatt

SEQ ID NO: 1015648 - DNA, 15 bp, Homo sapiens
tcaaaaggggaattt

SEQ ID NO: 1015649 - DNA, 15 bp, Homo sapiens
caaaaggggaatttg

SEQ ID NO: 1015650 - DNA, 15 bp, Homo sapiens
aaaaggggaatttga

SEQ ID NO: 1015651 - DNA, 15 bp, Homo sapiens
aaaggggaatttgaa

SEQ ID NO: 1015652 - DNA, 15 bp, Homo sapiens
aaggggaatttgaac

SEQ ID NO: 1015653 - DNA, 15 bp, Homo sapiens
aggggaatttgaaca

SEQ ID NO: 1015654 - DNA, 15 bp, Homo sapiens
ggggaatttgaacat

SEQ ID NO: 1015655 - DNA, 15 bp, Homo sapiens
gggaatttgaacatg

SEQ ID NO: 1015656 - DNA, 15 bp, Homo sapiens
ggaatttgaacatgt

SEQ ID NO: 1015657 - DNA, 15 bp, Homo sapiens
gaatttgaacatgtt

SEQ ID NO: 1015658 - DNA, 15 bp, Homo sapiens
aatttgaacatgttt

SEQ ID NO: 1015659 - DNA, 15 bp, Homo sapiens
atttgaacatgtttt

SEQ ID NO: 1015660 - DNA, 15 bp, Homo sapiens
tttgaacatgttttc

SEQ ID NO: 1015661 - DNA, 15 bp, Homo sapiens
ttgaacatgttttca

SEQ ID NO: 1015662 - DNA, 15 bp, Homo sapiens
tgaacatgttttcac

SEQ ID NO: 1015663 - DNA, 15 bp, Homo sapiens
gaacatgttttcact

SEQ ID NO: 1015664 - DNA, 15 bp, Homo sapiens
aacatgttttcactg

SEQ ID NO: 1015665 - DNA, 15 bp, Homo sapiens
acatgttttcactga

SEQ ID NO: 1015666 - DNA, 15 bp, Homo sapiens
catgttttcactgac

SEQ ID NO: 1015667 - DNA, 15 bp, Homo sapiens
atgttttcactgact

SEQ ID NO: 1015668 - DNA, 15 bp, Homo sapiens
tgttttcactgactt

SEQ ID NO: 1015669 - DNA, 15 bp, Homo sapiens
gttttcactgacttg

SEQ ID NO: 1015670 - DNA, 15 bp, Homo sapiens
ttttcactgacttga

SEQ ID NO: 1015671 - DNA, 15 bp, Homo sapiens
tttcactgacttgaa

SEQ ID NO: 1015672 - DNA, 15 bp, Homo sapiens
ttcactgacttgaaa

SEQ ID NO: 1015673 - DNA, 15 bp, Homo sapiens
tcactgacttgaaaa

SEQ ID NO: 1015674 - DNA, 15 bp, Homo sapiens
cactgacttgaaaat

SEQ ID NO: 1015675 - DNA, 15 bp, Homo sapiens
actgacttgaaaatg

SEQ ID NO: 1015676 - DNA, 15 bp, Homo sapiens
ctgacttgaaaatga

SEQ ID NO: 1015677 - DNA, 15 bp, Homo sapiens
tgacttgaaaatgaa

SEQ ID NO: 1015678 - DNA, 15 bp, Homo sapiens
gacttgaaaatgaaa

SEQ ID NO: 1015679 - DNA, 15 bp, Homo sapiens
acttgaaaatgaaac

SEQ ID NO: 1015680 - DNA, 15 bp, Homo sapiens
cttgaaaatgaaact

SEQ ID NO: 1015681 - DNA, 15 bp, Homo sapiens
ttgaaaatgaaactg

SEQ ID NO: 1015682 - DNA, 15 bp, Homo sapiens
tgaaaatgaaactga

SEQ ID NO: 1015683 - DNA, 15 bp, Homo sapiens
gaaaatgaaactgaa

SEQ ID NO: 1015684 - DNA, 15 bp, Homo sapiens
aaaatgaaactgaaa

SEQ ID NO: 1015685 - DNA, 15 bp, Homo sapiens
aaatgaaactgaaaa

SEQ ID NO: 1015686 - DNA, 15 bp, Homo sapiens
aatgaaactgaaaac

SEQ ID NO: 1015687 - DNA, 15 bp, Homo sapiens
atgaaactgaaaaca

SEQ ID NO: 1015688 - DNA, 15 bp, Homo sapiens
tgaaactgaaaacat

SEQ ID NO: 1015689 - DNA, 15 bp, Homo sapiens
gaaactgaaaacata

SEQ ID NO: 1015690 - DNA, 15 bp, Homo sapiens
aaactgaaaacataa

SEQ ID NO: 1015691 - DNA, 15 bp, Homo sapiens
aactgaaaacataac

SEQ ID NO: 1015692 - DNA, 15 bp, Homo sapiens
actgaaaacataacc

SEQ ID NO: 1015693 - DNA, 15 bp, Homo sapiens
ctgaaaacataacct

SEQ ID NO: 1015694 - DNA, 15 bp, Homo sapiens
tgaaaacataaccta

SEQ ID NO: 1015695 - DNA, 15 bp, Homo sapiens
gaaaacataacctat

SEQ ID NO: 1015696 - DNA, 15 bp, Homo sapiens
aaaacataacctata

SEQ ID NO: 1015697 - DNA, 15 bp, Homo sapiens
aaacataacctataa

SEQ ID NO: 1015698 - DNA, 15 bp, Homo sapiens
aacataacctataaa

SEQ ID NO: 1015699 - DNA, 15 bp, Homo sapiens
acataacctataaaa

SEQ ID NO: 1015700 - DNA, 15 bp, Homo sapiens
cataacctataaaaa

SEQ ID NO: 1015701 - DNA, 15 bp, Homo sapiens
ataacctataaaaat

SEQ ID NO: 1015702 - DNA, 15 bp, Homo sapiens
taacctataaaaatg

SEQ ID NO: 1015703 - DNA, 15 bp, Homo sapiens
aacctataaaaatgt

SEQ ID NO: 1015704 - DNA, 15 bp, Homo sapiens
acctataaaaatgtg

SEQ ID NO: 1015705 - DNA, 15 bp, Homo sapiens
cctataaaaatgtgt

SEQ ID NO: 1015706 - DNA, 15 bp, Homo sapiens
ctataaaaatgtgtg

SEQ ID NO: 1015707 - DNA, 15 bp, Homo sapiens
tataaaaatgtgtgg

SEQ ID NO: 1015708 - DNA, 15 bp, Homo sapiens
ataaaaatgtgtggg

SEQ ID NO: 1015709 - DNA, 15 bp, Homo sapiens
taaaaatgtgtggga

SEQ ID NO: 1015710 - DNA, 15 bp, Homo sapiens
aaaaatgtgtgggat

SEQ ID NO: 1015711 - DNA, 15 bp, Homo sapiens
aaaatgtgtgggatg

SEQ ID NO: 1015712 - DNA, 15 bp, Homo sapiens
aaatgtgtgggatgc

SEQ ID NO: 1015713 - DNA, 15 bp, Homo sapiens
aatgtgtgggatgca

SEQ ID NO: 1015714 - DNA, 15 bp, Homo sapiens
atgtgtgggatgcag

SEQ ID NO: 1015715 - DNA, 15 bp, Homo sapiens
tgtgtgggatgcagc

SEQ ID NO: 1015716 - DNA, 15 bp, Homo sapiens
gtgtgggatgcagct

SEQ ID NO: 1015717 - DNA, 15 bp, Homo sapiens
tgtgggatgcagcta

SEQ ID NO: 1015718 - DNA, 15 bp, Homo sapiens
gtgggatgcagctaa

SEQ ID NO: 1015719 - DNA, 15 bp, Homo sapiens
tgggatgcagctaaa

SEQ ID NO: 1015720 - DNA, 15 bp, Homo sapiens
gggatgcagctaaag

SEQ ID NO: 1015721 - DNA, 15 bp, Homo sapiens
ggatgcagctaaagt

SEQ ID NO: 1015722 - DNA, 15 bp, Homo sapiens
gatgcagctaaagta

SEQ ID NO: 1015723 - DNA, 15 bp, Homo sapiens
atgcagctaaagtag

SEQ ID NO: 1015724 - DNA, 15 bp, Homo sapiens
tgcagctaaagtagt

SEQ ID NO: 1015725 - DNA, 15 bp, Homo sapiens
gcagctaaagtagtg

SEQ ID NO: 1015726 - DNA, 15 bp, Homo sapiens
cagctaaagtagtgc

SEQ ID NO: 1015727 - DNA, 15 bp, Homo sapiens
agctaaagtagtgct

SEQ ID NO: 1015728 - DNA, 15 bp, Homo sapiens
gctaaagtagtgctt

SEQ ID NO: 1015729 - DNA, 15 bp, Homo sapiens
ctaaagtagtgctta

SEQ ID NO: 1015730 - DNA, 15 bp, Homo sapiens
taaagtagtgcttag

SEQ ID NO: 1015731 - DNA, 15 bp, Homo sapiens
aaagtagtgcttaga

SEQ ID NO: 1015732 - DNA, 15 bp, Homo sapiens
aagtagtgcttagag

SEQ ID NO: 1015733 - DNA, 15 bp, Homo sapiens
agtagtgcttagagg

SEQ ID NO: 1015734 - DNA, 15 bp, Homo sapiens
gtagtgcttagaggg

SEQ ID NO: 1015735 - DNA, 15 bp, Homo sapiens
tagtgcttagaggga

SEQ ID NO: 1015736 - DNA, 15 bp, Homo sapiens
agtgcttagagggaa

SEQ ID NO: 1015737 - DNA, 15 bp, Homo sapiens
gtgcttagagggaaa

SEQ ID NO: 1015738 - DNA, 15 bp, Homo sapiens
tgcttagagggaaat

SEQ ID NO: 1015739 - DNA, 15 bp, Homo sapiens
gcttagagggaaatt

SEQ ID NO: 1015740 - DNA, 15 bp, Homo sapiens
cttagagggaaattc

SEQ ID NO: 1015741 - DNA, 15 bp, Homo sapiens
ttagagggaaattct

SEQ ID NO: 1015742 - DNA, 15 bp, Homo sapiens
tagagggaaattctg

SEQ ID NO: 1015743 - DNA, 15 bp, Homo sapiens
agagggaaattctga

SEQ ID NO: 1015744 - DNA, 15 bp, Homo sapiens
gagggaaattctgag

SEQ ID NO: 1015745 - DNA, 15 bp, Homo sapiens
agggaaattctgagt

SEQ ID NO: 1015746 - DNA, 15 bp, Homo sapiens
gggaaattctgagta

SEQ ID NO: 1015747 - DNA, 15 bp, Homo sapiens
ggaaattctgagtag

SEQ ID NO: 1015748 - DNA, 15 bp, Homo sapiens
gaaattctgagtagt

SEQ ID NO: 1015749 - DNA, 15 bp, Homo sapiens
aaattctgagtagta

SEQ ID NO: 1015750 - DNA, 15 bp, Homo sapiens
aattctgagtagtaa

SEQ ID NO: 1015751 - DNA, 15 bp, Homo sapiens
attctgagtagtaaa

SEQ ID NO: 1015752 - DNA, 15 bp, Homo sapiens
ttctgagtagtaaat

SEQ ID NO: 1015753 - DNA, 15 bp, Homo sapiens
tctgagtagtaaatg

SEQ ID NO: 1015754 - DNA, 15 bp, Homo sapiens
ctgagtagtaaatgc

SEQ ID NO: 1015755 - DNA, 15 bp, Homo sapiens
tgagtagtaaatgcc

SEQ ID NO: 1015756 - DNA, 15 bp, Homo sapiens
gagtagtaaatgcct

SEQ ID NO: 1015757 - DNA, 15 bp, Homo sapiens
agtagtaaatgcctg

SEQ ID NO: 1015758 - DNA, 15 bp, Homo sapiens
gtagtaaatgcctgt

SEQ ID NO: 1015759 - DNA, 15 bp, Homo sapiens
tagtaaatgcctgtt

SEQ ID NO: 1015760 - DNA, 15 bp, Homo sapiens
agtaaatgcctgttt

SEQ ID NO: 1015761 - DNA, 15 bp, Homo sapiens
gtaaatgcctgttta

SEQ ID NO: 1015762 - DNA, 15 bp, Homo sapiens
taaatgcctgtttag

SEQ ID NO: 1015763 - DNA, 15 bp, Homo sapiens
aaatgcctgtttaga

SEQ ID NO: 1015764 - DNA, 15 bp, Homo sapiens
aatgcctgtttagaa

SEQ ID NO: 1015765 - DNA, 15 bp, Homo sapiens
atgcctgtttagaaa

SEQ ID NO: 1015766 - DNA, 15 bp, Homo sapiens
tgcctgtttagaaaa

SEQ ID NO: 1015767 - DNA, 15 bp, Homo sapiens
gcctgtttagaaaag

SEQ ID NO: 1015768 - DNA, 15 bp, Homo sapiens
cctgtttagaaaaga

SEQ ID NO: 1015769 - DNA, 15 bp, Homo sapiens
ctgtttagaaaagaa

SEQ ID NO: 1015770 - DNA, 15 bp, Homo sapiens
tgtttagaaaagaag

SEQ ID NO: 1015771 - DNA, 15 bp, Homo sapiens
gtttagaaaagaaga

SEQ ID NO: 1015772 - DNA, 15 bp, Homo sapiens
tttagaaaagaagaa

SEQ ID NO: 1015773 - DNA, 15 bp, Homo sapiens
ttagaaaagaagaaa

SEQ ID NO: 1015774 - DNA, 15 bp, Homo sapiens
tagaaaagaagaaag

SEQ ID NO: 1015775 - DNA, 15 bp, Homo sapiens
agaaaagaagaaagg

SEQ ID NO: 1015776 - DNA, 15 bp, Homo sapiens
gaaaagaagaaaggt

SEQ ID NO: 1015777 - DNA, 15 bp, Homo sapiens
aaaagaagaaaggtc

SEQ ID NO: 1015778 - DNA, 15 bp, Homo sapiens
aaagaagaaaggtct

SEQ ID NO: 1015779 - DNA, 15 bp, Homo sapiens
aagaagaaaggtctc

SEQ ID NO: 1015780 - DNA, 15 bp, Homo sapiens
agaagaaaggtctct

SEQ ID NO: 1015781 - DNA, 15 bp, Homo sapiens
gaagaaaggtctctg

SEQ ID NO: 1015782 - DNA, 15 bp, Homo sapiens
aagaaaggtctctgt

SEQ ID NO: 1015783 - DNA, 15 bp, Homo sapiens
agaaaggtctctgtg

SEQ ID NO: 1015784 - DNA, 15 bp, Homo sapiens
gaaaggtctctgtgt

SEQ ID NO: 1015785 - DNA, 15 bp, Homo sapiens
aaaggtctctgtgtg

SEQ ID NO: 1015786 - DNA, 15 bp, Homo sapiens
aaggtctctgtgtgg

SEQ ID NO: 1015787 - DNA, 15 bp, Homo sapiens
aggtctctgtgtgga

SEQ ID NO: 1015788 - DNA, 15 bp, Homo sapiens
ggtctctgtgtggac

SEQ ID NO: 1015789 - DNA, 15 bp, Homo sapiens
gtctctgtgtggact

SEQ ID NO: 1015790 - DNA, 15 bp, Homo sapiens
tctctgtgtggactg

SEQ ID NO: 1015791 - DNA, 15 bp, Homo sapiens
ctctgtgtggactga

SEQ ID NO: 1015792 - DNA, 15 bp, Homo sapiens
tctgtgtggactgaa

SEQ ID NO: 1015793 - DNA, 15 bp, Homo sapiens
ctgtgtggactgaat

SEQ ID NO: 1015794 - DNA, 15 bp, Homo sapiens
tgtgtggactgaatt

SEQ ID NO: 1015795 - DNA, 15 bp, Homo sapiens
gtgtggactgaattg

SEQ ID NO: 1015796 - DNA, 15 bp, Homo sapiens
tgtggactgaattgt

SEQ ID NO: 1015797 - DNA, 15 bp, Homo sapiens
gtggactgaattgtg

SEQ ID NO: 1015798 - DNA, 15 bp, Homo sapiens
tggactgaattgtgg

SEQ ID NO: 1015799 - DNA, 15 bp, Homo sapiens
ggactgaattgtggc

SEQ ID NO: 1015800 - DNA, 15 bp, Homo sapiens
gactgaattgtggct

SEQ ID NO: 1015801 - DNA, 15 bp, Homo sapiens
actgaattgtggctt

SEQ ID NO: 1015802 - DNA, 15 bp, Homo sapiens
ctgaattgtggcttc

SEQ ID NO: 1015803 - DNA, 15 bp, Homo sapiens
tgaattgtggcttct

SEQ ID NO: 1015804 - DNA, 15 bp, Homo sapiens
gaattgtggcttctg

SEQ ID NO: 1015805 - DNA, 15 bp, Homo sapiens
aattgtggcttctgg

SEQ ID NO: 1015806 - DNA, 15 bp, Homo sapiens
attgtggcttctgga

SEQ ID NO: 1015807 - DNA, 15 bp, Homo sapiens
ttgtggcttctggaa

SEQ ID NO: 1015808 - DNA, 15 bp, Homo sapiens
tgtggcttctggaaa

SEQ ID NO: 1015809 - DNA, 15 bp, Homo sapiens
gtggcttctggaaag

SEQ ID NO: 1015810 - DNA, 15 bp, Homo sapiens
tggcttctggaaaga

SEQ ID NO: 1015811 - DNA, 15 bp, Homo sapiens
ggcttctggaaagat

SEQ ID NO: 1015812 - DNA, 15 bp, Homo sapiens
gcttctggaaagata

SEQ ID NO: 1015813 - DNA, 15 bp, Homo sapiens
cttctggaaagataa

SEQ ID NO: 1015814 - DNA, 15 bp, Homo sapiens
ttctggaaagataag

SEQ ID NO: 1015815 - DNA, 15 bp, Homo sapiens
tctggaaagataagt

SEQ ID NO: 1015816 - DNA, 15 bp, Homo sapiens
ctggaaagataagtc

SEQ ID NO: 1015817 - DNA, 15 bp, Homo sapiens
tggaaagataagtcc

SEQ ID NO: 1015818 - DNA, 15 bp, Homo sapiens
ggaaagataagtcca

SEQ ID NO: 1015819 - DNA, 15 bp, Homo sapiens
gaaagataagtccac

SEQ ID NO: 1015820 - DNA, 15 bp, Homo sapiens
aaagataagtccaca

SEQ ID NO: 1015821 - DNA, 15 bp, Homo sapiens
aagataagtccacat

SEQ ID NO: 1015822 - DNA, 15 bp, Homo sapiens
agataagtccacatc

SEQ ID NO: 1015823 - DNA, 15 bp, Homo sapiens
gataagtccacatcc

SEQ ID NO: 1015824 - DNA, 15 bp, Homo sapiens
ataagtccacatcct

SEQ ID NO: 1015825 - DNA, 15 bp, Homo sapiens
taagtccacatccta

SEQ ID NO: 1015826 - DNA, 15 bp, Homo sapiens
aagtccacatcctaa

SEQ ID NO: 1015827 - DNA, 15 bp, Homo sapiens
agtccacatcctaat

SEQ ID NO: 1015828 - DNA, 15 bp, Homo sapiens
gtccacatcctaatc

SEQ ID NO: 1015829 - DNA, 15 bp, Homo sapiens
tccacatcctaatca

SEQ ID NO: 1015830 - DNA, 15 bp, Homo sapiens
ccacatcctaatcac

SEQ ID NO: 1015831 - DNA, 15 bp, Homo sapiens
cacatcctaatcact

SEQ ID NO: 1015832 - DNA, 15 bp, Homo sapiens
acatcctaatcacta

SEQ ID NO: 1015833 - DNA, 15 bp, Homo sapiens
catcctaatcactag

SEQ ID NO: 1015834 - DNA, 15 bp, Homo sapiens
atcctaatcactaga

SEQ ID NO: 1015835 - DNA, 15 bp, Homo sapiens
tcctaatcactagaa

SEQ ID NO: 1015836 - DNA, 15 bp, Homo sapiens
cctaatcactagaac

SEQ ID NO: 1015837 - DNA, 15 bp, Homo sapiens
ctaatcactagaacc

SEQ ID NO: 1015838 - DNA, 15 bp, Homo sapiens
taatcactagaacct

SEQ ID NO: 1015839 - DNA, 15 bp, Homo sapiens
aatcactagaacctt

SEQ ID NO: 1015840 - DNA, 15 bp, Homo sapiens
atcactagaaccttt

SEQ ID NO: 1015841 - DNA, 15 bp, Homo sapiens
tcactagaacctttg

SEQ ID NO: 1015842 - DNA, 15 bp, Homo sapiens
cactagaacctttga

SEQ ID NO: 1015843 - DNA, 15 bp, Homo sapiens
actagaacctttgaa

SEQ ID NO: 1015844 - DNA, 15 bp, Homo sapiens
ctagaacctttgaat

SEQ ID NO: 1015845 - DNA, 15 bp, Homo sapiens
tagaacctttgaatg

SEQ ID NO: 1015846 - DNA, 15 bp, Homo sapiens
agaacctttgaatgt

SEQ ID NO: 1015847 - DNA, 15 bp, Homo sapiens
gaacctttgaatgtt

SEQ ID NO: 1015848 - DNA, 15 bp, Homo sapiens
aacctttgaatgtta

SEQ ID NO: 1015849 - DNA, 15 bp, Homo sapiens
acctttgaatgttac

SEQ ID NO: 1015850 - DNA, 15 bp, Homo sapiens
cctttgaatgttacc

SEQ ID NO: 1015851 - DNA, 15 bp, Homo sapiens
ctttgaatgttacct

SEQ ID NO: 1015852 - DNA, 15 bp, Homo sapiens
tttgaatgttacctt

SEQ ID NO: 1015853 - DNA, 15 bp, Homo sapiens
ttgaatgttacctta

SEQ ID NO: 1015854 - DNA, 15 bp, Homo sapiens
tgaatgttaccttat

SEQ ID NO: 1015855 - DNA, 15 bp, Homo sapiens
gaatgttaccttatt

SEQ ID NO: 1015856 - DNA, 15 bp, Homo sapiens
aatgttaccttattt

SEQ ID NO: 1015857 - DNA, 15 bp, Homo sapiens
atgttaccttatttg

SEQ ID NO: 1015858 - DNA, 15 bp, Homo sapiens
tgttaccttatttgg

SEQ ID NO: 1015859 - DNA, 15 bp, Homo sapiens
gttaccttatttgga

SEQ ID NO: 1015860 - DNA, 15 bp, Homo sapiens
ttaccttatttggaa

SEQ ID NO: 1015861 - DNA, 15 bp, Homo sapiens
taccttatttggaaa

SEQ ID NO: 1015862 - DNA, 15 bp, Homo sapiens
accttatttggaaaa

SEQ ID NO: 1015863 - DNA, 15 bp, Homo sapiens
ccttatttggaaaaa

SEQ ID NO: 1015864 - DNA, 15 bp, Homo sapiens
cttatttggaaaaag

SEQ ID NO: 1015865 - DNA, 15 bp, Homo sapiens
ttatttggaaaaaga

SEQ ID NO: 1015866 - DNA, 15 bp, Homo sapiens
tatttggaaaaagag

SEQ ID NO: 1015867 - DNA, 15 bp, Homo sapiens
atttggaaaaagagt

SEQ ID NO: 1015868 - DNA, 15 bp, Homo sapiens
tttggaaaaagagtc

SEQ ID NO: 1015869 - DNA, 15 bp, Homo sapiens
ttggaaaaagagtct

SEQ ID NO: 1015870 - DNA, 15 bp, Homo sapiens
tggaaaaagagtctt

SEQ ID NO: 1015871 - DNA, 15 bp, Homo sapiens
ggaaaaagagtcttt

SEQ ID NO: 1015872 - DNA, 15 bp, Homo sapiens
gaaaaagagtctttg

SEQ ID NO: 1015873 - DNA, 15 bp, Homo sapiens
aaaaagagtctttgc

SEQ ID NO: 1015874 - DNA, 15 bp, Homo sapiens
aaaagagtctttgca

SEQ ID NO: 1015875 - DNA, 15 bp, Homo sapiens
aaagagtctttgcag

SEQ ID NO: 1015876 - DNA, 15 bp, Homo sapiens
aagagtctttgcaga

SEQ ID NO: 1015877 - DNA, 15 bp, Homo sapiens
agagtctttgcagat

SEQ ID NO: 1015878 - DNA, 15 bp, Homo sapiens
gagtctttgcagata

SEQ ID NO: 1015879 - DNA, 15 bp, Homo sapiens
agtctttgcagatat

SEQ ID NO: 1015880 - DNA, 15 bp, Homo sapiens
gtctttgcagatata

SEQ ID NO: 1015881 - DNA, 15 bp, Homo sapiens
tctttgcagatataa

SEQ ID NO: 1015882 - DNA, 15 bp, Homo sapiens
ctttgcagatataat

SEQ ID NO: 1015883 - DNA, 15 bp, Homo sapiens
tttgcagatataatt

SEQ ID NO: 1015884 - DNA, 15 bp, Homo sapiens
ttgcagatataattg

SEQ ID NO: 1015885 - DNA, 15 bp, Homo sapiens
tgcagatataattga

SEQ ID NO: 1015886 - DNA, 15 bp, Homo sapiens
gcagatataattgag

SEQ ID NO: 1015887 - DNA, 15 bp, Homo sapiens
cagatataattgaga

SEQ ID NO: 1015888 - DNA, 15 bp, Homo sapiens
agatataattgagaa

SEQ ID NO: 1015889 - DNA, 15 bp, Homo sapiens
gatataattgagaat

SEQ ID NO: 1015890 - DNA, 15 bp, Homo sapiens
atataattgagaatc

SEQ ID NO: 1015891 - DNA, 15 bp, Homo sapiens
tataattgagaatct

SEQ ID NO: 1015892 - DNA, 15 bp, Homo sapiens
ataattgagaatctt

SEQ ID NO: 1015893 - DNA, 15 bp, Homo sapiens
taattgagaatcttg

SEQ ID NO: 1015894 - DNA, 15 bp, Homo sapiens
aattgagaatcttga

SEQ ID NO: 1015895 - DNA, 15 bp, Homo sapiens
attgagaatcttgag

SEQ ID NO: 1015896 - DNA, 15 bp, Homo sapiens
ttgagaatcttgaga

SEQ ID NO: 1015897 - DNA, 15 bp, Homo sapiens
tgagaatcttgagat

SEQ ID NO: 1015898 - DNA, 15 bp, Homo sapiens
gagaatcttgagatg

SEQ ID NO: 1015899 - DNA, 15 bp, Homo sapiens
agaatcttgagatga

SEQ ID NO: 1015900 - DNA, 15 bp, Homo sapiens
gaatcttgagatgag

SEQ ID NO: 1015901 - DNA, 15 bp, Homo sapiens
aatcttgagatgaga

SEQ ID NO: 1015902 - DNA, 15 bp, Homo sapiens
atcttgagatgagat

SEQ ID NO: 1015903 - DNA, 15 bp, Homo sapiens
tcttgagatgagatc

SEQ ID NO: 1015904 - DNA, 15 bp, Homo sapiens
cttgagatgagatca

SEQ ID NO: 1015905 - DNA, 15 bp, Homo sapiens
ttgagatgagatcac

SEQ ID NO: 1015906 - DNA, 15 bp, Homo sapiens
tgagatgagatcacc

SEQ ID NO: 1015907 - DNA, 15 bp, Homo sapiens
gagatgagatcaccc

SEQ ID NO: 1015908 - DNA, 15 bp, Homo sapiens
agatgagatcaccct

SEQ ID NO: 1015909 - DNA, 15 bp, Homo sapiens
gatgagatcaccctg

SEQ ID NO: 1015910 - DNA, 15 bp, Homo sapiens
atgagatcaccctgg

SEQ ID NO: 1015911 - DNA, 15 bp, Homo sapiens
tgagatcaccctgga

SEQ ID NO: 1015912 - DNA, 15 bp, Homo sapiens
gagatcaccctggat

SEQ ID NO: 1015913 - DNA, 15 bp, Homo sapiens
agatcaccctggatt

SEQ ID NO: 1015914 - DNA, 15 bp, Homo sapiens
gatcaccctggatta

SEQ ID NO: 1015915 - DNA, 15 bp, Homo sapiens
atcaccctggattat

SEQ ID NO: 1015916 - DNA, 15 bp, Homo sapiens
tcaccctggattatc

SEQ ID NO: 1015917 - DNA, 15 bp, Homo sapiens
caccctggattatct

SEQ ID NO: 1015918 - DNA, 15 bp, Homo sapiens
accctggattatctg

SEQ ID NO: 1015919 - DNA, 15 bp, Homo sapiens
ccctggattatctga

SEQ ID NO: 1015920 - DNA, 15 bp, Homo sapiens
cctggattatctgag

SEQ ID NO: 1015921 - DNA, 15 bp, Homo sapiens
ctggattatctgagt

SEQ ID NO: 1015922 - DNA, 15 bp, Homo sapiens
tggattatctgagtg

SEQ ID NO: 1015923 - DNA, 15 bp, Homo sapiens
ggattatctgagtgg

SEQ ID NO: 1015924 - DNA, 15 bp, Homo sapiens
gattatctgagtgga

SEQ ID NO: 1015925 - DNA, 15 bp, Homo sapiens
attatctgagtggaa

SEQ ID NO: 1015926 - DNA, 15 bp, Homo sapiens
ttatctgagtggaac

SEQ ID NO: 1015927 - DNA, 15 bp, Homo sapiens
tatctgagtggaact

SEQ ID NO: 1015928 - DNA, 15 bp, Homo sapiens
atctgagtggaactt

SEQ ID NO: 1015929 - DNA, 15 bp, Homo sapiens
tctgagtggaacttc

SEQ ID NO: 1015930 - DNA, 15 bp, Homo sapiens
ctgagtggaacttca

SEQ ID NO: 1015931 - DNA, 15 bp, Homo sapiens
tgagtggaacttcag

SEQ ID NO: 1015932 - DNA, 15 bp, Homo sapiens
gagtggaacttcagt

SEQ ID NO: 1015933 - DNA, 15 bp, Homo sapiens
agtggaacttcagtg

SEQ ID NO: 1015934 - DNA, 15 bp, Homo sapiens
gtggaacttcagtgt

SEQ ID NO: 1015935 - DNA, 15 bp, Homo sapiens
tggaacttcagtgtc

SEQ ID NO: 1015936 - DNA, 15 bp, Homo sapiens
ggaacttcagtgtca

SEQ ID NO: 1015937 - DNA, 15 bp, Homo sapiens
gaacttcagtgtcat

SEQ ID NO: 1015938 - DNA, 15 bp, Homo sapiens
aacttcagtgtcatc

SEQ ID NO: 1015939 - DNA, 15 bp, Homo sapiens
acttcagtgtcatca

SEQ ID NO: 1015940 - DNA, 15 bp, Homo sapiens
cttcagtgtcatcac

SEQ ID NO: 1015941 - DNA, 15 bp, Homo sapiens
ttcagtgtcatcaca

SEQ ID NO: 1015942 - DNA, 15 bp, Homo sapiens
tcagtgtcatcacag

SEQ ID NO: 1015943 - DNA, 15 bp, Homo sapiens
cagtgtcatcacagc

SEQ ID NO: 1015944 - DNA, 15 bp, Homo sapiens
agtgtcatcacagca

SEQ ID NO: 1015945 - DNA, 15 bp, Homo sapiens
gtgtcatcacagcat

SEQ ID NO: 1015946 - DNA, 15 bp, Homo sapiens
tgtcatcacagcatc

SEQ ID NO: 1015947 - DNA, 15 bp, Homo sapiens
gtcatcacagcatct

SEQ ID NO: 1015948 - DNA, 15 bp, Homo sapiens
tcatcacagcatctt

SEQ ID NO: 1015949 - DNA, 15 bp, Homo sapiens
catcacagcatcttt

SEQ ID NO: 1015950 - DNA, 15 bp, Homo sapiens
atcacagcatcttta

SEQ ID NO: 1015951 - DNA, 15 bp, Homo sapiens
tcacagcatctttat

SEQ ID NO: 1015952 - DNA, 15 bp, Homo sapiens
cacagcatctttata

SEQ ID NO: 1015953 - DNA, 15 bp, Homo sapiens
acagcatctttataa

SEQ ID NO: 1015954 - DNA, 15 bp, Homo sapiens
cagcatctttataag

SEQ ID NO: 1015955 - DNA, 15 bp, Homo sapiens
agcatctttataaga

SEQ ID NO: 1015956 - DNA, 15 bp, Homo sapiens
gcatctttataagag

SEQ ID NO: 1015957 - DNA, 15 bp, Homo sapiens
catctttataagaga

SEQ ID NO: 1015958 - DNA, 15 bp, Homo sapiens
atctttataagagac

SEQ ID NO: 1015959 - DNA, 15 bp, Homo sapiens
tctttataagagaca

SEQ ID NO: 1015960 - DNA, 15 bp, Homo sapiens
ctttataagagacaa

SEQ ID NO: 1015961 - DNA, 15 bp, Homo sapiens
tttataagagacaaa

SEQ ID NO: 1015962 - DNA, 15 bp, Homo sapiens
ttataagagacaaag

SEQ ID NO: 1015963 - DNA, 15 bp, Homo sapiens
tataagagacaaaga

SEQ ID NO: 1015964 - DNA, 15 bp, Homo sapiens
ataagagacaaagag

SEQ ID NO: 1015965 - DNA, 15 bp, Homo sapiens
taagagacaaagaga

SEQ ID NO: 1015966 - DNA, 15 bp, Homo sapiens
aagagacaaagagaa

SEQ ID NO: 1015967 - DNA, 15 bp, Homo sapiens
agagacaaagagaaa

SEQ ID NO: 1015968 - DNA, 15 bp, Homo sapiens
gagacaaagagaaac

SEQ ID NO: 1015969 - DNA, 15 bp, Homo sapiens
agacaaagagaaaca

SEQ ID NO: 1015970 - DNA, 15 bp, Homo sapiens
gacaaagagaaacac

SEQ ID NO: 1015971 - DNA, 15 bp, Homo sapiens
acaaagagaaacaca

SEQ ID NO: 1015972 - DNA, 15 bp, Homo sapiens
caaagagaaacacat

SEQ ID NO: 1015973 - DNA, 15 bp, Homo sapiens
aaagagaaacacata

SEQ ID NO: 1015974 - DNA, 15 bp, Homo sapiens
aagagaaacacatac

SEQ ID NO: 1015975 - DNA, 15 bp, Homo sapiens
agagaaacacataca

SEQ ID NO: 1015976 - DNA, 15 bp, Homo sapiens
gagaaacacatacaa

SEQ ID NO: 1015977 - DNA, 15 bp, Homo sapiens
agaaacacatacaaa

SEQ ID NO: 1015978 - DNA, 15 bp, Homo sapiens
gaaacacatacaaag

SEQ ID NO: 1015979 - DNA, 15 bp, Homo sapiens
aaacacatacaaaga

SEQ ID NO: 1015980 - DNA, 15 bp, Homo sapiens
aacacatacaaagaa

SEQ ID NO: 1015981 - DNA, 15 bp, Homo sapiens
acacatacaaagaag

SEQ ID NO: 1015982 - DNA, 15 bp, Homo sapiens
cacatacaaagaagg

SEQ ID NO: 1015983 - DNA, 15 bp, Homo sapiens
acatacaaagaaggc

SEQ ID NO: 1015984 - DNA, 15 bp, Homo sapiens
catacaaagaaggcc

SEQ ID NO: 1015985 - DNA, 15 bp, Homo sapiens
atacaaagaaggcca

SEQ ID NO: 1015986 - DNA, 15 bp, Homo sapiens
tacaaagaaggccat

SEQ ID NO: 1015987 - DNA, 15 bp, Homo sapiens
acaaagaaggccatg

SEQ ID NO: 1015988 - DNA, 15 bp, Homo sapiens
caaagaaggccatgt

SEQ ID NO: 1015989 - DNA, 15 bp, Homo sapiens
aaagaaggccatgtg

SEQ ID NO: 1015990 - DNA, 15 bp, Homo sapiens
aagaaggccatgtgg

SEQ ID NO: 1015991 - DNA, 15 bp, Homo sapiens
agaaggccatgtgga

SEQ ID NO: 1015992 - DNA, 15 bp, Homo sapiens
gaaggccatgtggaa

SEQ ID NO: 1015993 - DNA, 15 bp, Homo sapiens
aaggccatgtggaaa

SEQ ID NO: 1015994 - DNA, 15 bp, Homo sapiens
aggccatgtggaaat

SEQ ID NO: 1015995 - DNA, 15 bp, Homo sapiens
ggccatgtggaaatg

SEQ ID NO: 1015996 - DNA, 15 bp, Homo sapiens
gccatgtggaaatgg

SEQ ID NO: 1015997 - DNA, 15 bp, Homo sapiens
ccatgtggaaatgga

SEQ ID NO: 1015998 - DNA, 15 bp, Homo sapiens
catgtggaaatggag

SEQ ID NO: 1015999 - DNA, 15 bp, Homo sapiens
atgtggaaatggaga

SEQ ID NO: 1016000 - DNA, 15 bp, Homo sapiens
tgtggaaatggagac

SEQ ID NO: 1016001 - DNA, 15 bp, Homo sapiens
gtggaaatggagaca

SEQ ID NO: 1016002 - DNA, 15 bp, Homo sapiens
tggaaatggagacag

SEQ ID NO: 1016003 - DNA, 15 bp, Homo sapiens
ggaaatggagacaga

SEQ ID NO: 1016004 - DNA, 15 bp, Homo sapiens
gaaatggagacagat

SEQ ID NO: 1016005 - DNA, 15 bp, Homo sapiens
aaatggagacagatt

SEQ ID NO: 1016006 - DNA, 15 bp, Homo sapiens
aatggagacagattg

SEQ ID NO: 1016007 - DNA, 15 bp, Homo sapiens
atggagacagattgg

SEQ ID NO: 1016008 - DNA, 15 bp, Homo sapiens
tggagacagattgga

SEQ ID NO: 1016009 - DNA, 15 bp, Homo sapiens
ggagacagattggag

SEQ ID NO: 1016010 - DNA, 15 bp, Homo sapiens
gagacagattggaga

SEQ ID NO: 1016011 - DNA, 15 bp, Homo sapiens
agacagattggagaa

SEQ ID NO: 1016012 - DNA, 15 bp, Homo sapiens
gacagattggagaaa

SEQ ID NO: 1016013 - DNA, 15 bp, Homo sapiens
acagattggagaaat

SEQ ID NO: 1016014 - DNA, 15 bp, Homo sapiens
cagattggagaaatg

SEQ ID NO: 1016015 - DNA, 15 bp, Homo sapiens
agattggagaaatgt

SEQ ID NO: 1016016 - DNA, 15 bp, Homo sapiens
gattggagaaatgtg

SEQ ID NO: 1016017 - DNA, 15 bp, Homo sapiens
attggagaaatgtgt

SEQ ID NO: 1016018 - DNA, 15 bp, Homo sapiens
ttggagaaatgtgtc

SEQ ID NO: 1016019 - DNA, 15 bp, Homo sapiens
tggagaaatgtgtca

SEQ ID NO: 1016020 - DNA, 15 bp, Homo sapiens
ggagaaatgtgtcac

SEQ ID NO: 1016021 - DNA, 15 bp, Homo sapiens
gagaaatgtgtcaca

SEQ ID NO: 1016022 - DNA, 15 bp, Homo sapiens
agaaatgtgtcacaa

SEQ ID NO: 1016023 - DNA, 15 bp, Homo sapiens
gaaatgtgtcacaag

SEQ ID NO: 1016024 - DNA, 15 bp, Homo sapiens
aaatgtgtcacaagc

SEQ ID NO: 1016025 - DNA, 15 bp, Homo sapiens
aatgtgtcacaagcc

SEQ ID NO: 1016026 - DNA, 15 bp, Homo sapiens
atgtgtcacaagcca

SEQ ID NO: 1016027 - DNA, 15 bp, Homo sapiens
tgtgtcacaagccaa

SEQ ID NO: 1016028 - DNA, 15 bp, Homo sapiens
gtgtcacaagccaat

SEQ ID NO: 1016029 - DNA, 15 bp, Homo sapiens
tgtcacaagccaatg

SEQ ID NO: 1016030 - DNA, 15 bp, Homo sapiens
gtcacaagccaatga

SEQ ID NO: 1016031 - DNA, 15 bp, Homo sapiens
tcacaagccaatgaa

SEQ ID NO: 1016032 - DNA, 15 bp, Homo sapiens
cacaagccaatgaat

SEQ ID NO: 1016033 - DNA, 15 bp, Homo sapiens
acaagccaatgaatg

SEQ ID NO: 1016034 - DNA, 15 bp, Homo sapiens
caagccaatgaatgc

SEQ ID NO: 1016035 - DNA, 15 bp, Homo sapiens
aagccaatgaatgcc

SEQ ID NO: 1016036 - DNA, 15 bp, Homo sapiens
agccaatgaatgcca

SEQ ID NO: 1016037 - DNA, 15 bp, Homo sapiens
gccaatgaatgccaa

SEQ ID NO: 1016038 - DNA, 15 bp, Homo sapiens
ccaatgaatgccaaa

SEQ ID NO: 1016039 - DNA, 15 bp, Homo sapiens
caatgaatgccaaaa

SEQ ID NO: 1016040 - DNA, 15 bp, Homo sapiens
aatgaatgccaaaag

SEQ ID NO: 1016041 - DNA, 15 bp, Homo sapiens
atgaatgccaaaagc

SEQ ID NO: 1016042 - DNA, 15 bp, Homo sapiens
tgaatgccaaaagcc

SEQ ID NO: 1016043 - DNA, 15 bp, Homo sapiens
gaatgccaaaagcct

SEQ ID NO: 1016044 - DNA, 15 bp, Homo sapiens
aatgccaaaagcctc

SEQ ID NO: 1016045 - DNA, 15 bp, Homo sapiens
atgccaaaagcctcc

SEQ ID NO: 1016046 - DNA, 15 bp, Homo sapiens
tgccaaaagcctcca

SEQ ID NO: 1016047 - DNA, 15 bp, Homo sapiens
gccaaaagcctccag

SEQ ID NO: 1016048 - DNA, 15 bp, Homo sapiens
ccaaaagcctccaga

SEQ ID NO: 1016049 - DNA, 15 bp, Homo sapiens
caaaagcctccagaa

SEQ ID NO: 1016050 - DNA, 15 bp, Homo sapiens
aaaagcctccagaag

SEQ ID NO: 1016051 - DNA, 15 bp, Homo sapiens
aaagcctccagaagc

SEQ ID NO: 1016052 - DNA, 15 bp, Homo sapiens
aagcctccagaagct

SEQ ID NO: 1016053 - DNA, 15 bp, Homo sapiens
agcctccagaagctg

SEQ ID NO: 1016054 - DNA, 15 bp, Homo sapiens
gcctccagaagctgg

SEQ ID NO: 1016055 - DNA, 15 bp, Homo sapiens
cctccagaagctgga

SEQ ID NO: 1016056 - DNA, 15 bp, Homo sapiens
ctccagaagctggaa

SEQ ID NO: 1016057 - DNA, 15 bp, Homo sapiens
tccagaagctggaag

SEQ ID NO: 1016058 - DNA, 15 bp, Homo sapiens
ccagaagctggaaga

SEQ ID NO: 1016059 - DNA, 15 bp, Homo sapiens
cagaagctggaagaa

SEQ ID NO: 1016060 - DNA, 15 bp, Homo sapiens
agaagctggaagaag

SEQ ID NO: 1016061 - DNA, 15 bp, Homo sapiens
gaagctggaagaagc

SEQ ID NO: 1016062 - DNA, 15 bp, Homo sapiens
aagctggaagaagca

SEQ ID NO: 1016063 - DNA, 15 bp, Homo sapiens
agctggaagaagcaa

SEQ ID NO: 1016064 - DNA, 15 bp, Homo sapiens
gctggaagaagcaag

SEQ ID NO: 1016065 - DNA, 15 bp, Homo sapiens
ctggaagaagcaagg

SEQ ID NO: 1016066 - DNA, 15 bp, Homo sapiens
tggaagaagcaagga

SEQ ID NO: 1016067 - DNA, 15 bp, Homo sapiens
ggaagaagcaaggaa

SEQ ID NO: 1016068 - DNA, 15 bp, Homo sapiens
gaagaagcaaggaac

SEQ ID NO: 1016069 - DNA, 15 bp, Homo sapiens
aagaagcaaggaaca

SEQ ID NO: 1016070 - DNA, 15 bp, Homo sapiens
agaagcaaggaacag

SEQ ID NO: 1016071 - DNA, 15 bp, Homo sapiens
gaagcaaggaacaga

SEQ ID NO: 1016072 - DNA, 15 bp, Homo sapiens
aagcaaggaacagaa

SEQ ID NO: 1016073 - DNA, 15 bp, Homo sapiens
agcaaggaacagaat

SEQ ID NO: 1016074 - DNA, 15 bp, Homo sapiens
gcaaggaacagaatc

SEQ ID NO: 1016075 - DNA, 15 bp, Homo sapiens
caaggaacagaatct

SEQ ID NO: 1016076 - DNA, 15 bp, Homo sapiens
aaggaacagaatctc

SEQ ID NO: 1016077 - DNA, 15 bp, Homo sapiens
aggaacagaatctcc

SEQ ID NO: 1016078 - DNA, 15 bp, Homo sapiens
ggaacagaatctccc

SEQ ID NO: 1016079 - DNA, 15 bp, Homo sapiens
gaacagaatctcccc

SEQ ID NO: 1016080 - DNA, 15 bp, Homo sapiens
aacagaatctcccca

SEQ ID NO: 1016081 - DNA, 15 bp, Homo sapiens
acagaatctccccag

SEQ ID NO: 1016082 - DNA, 15 bp, Homo sapiens
cagaatctccccaga

SEQ ID NO: 1016083 - DNA, 15 bp, Homo sapiens
agaatctccccagag

SEQ ID NO: 1016084 - DNA, 15 bp, Homo sapiens
gaatctccccagagc

SEQ ID NO: 1016085 - DNA, 15 bp, Homo sapiens
aatctccccagagcc

SEQ ID NO: 1016086 - DNA, 15 bp, Homo sapiens
atctccccagagcct

SEQ ID NO: 1016087 - DNA, 15 bp, Homo sapiens
tctccccagagcctc

SEQ ID NO: 1016088 - DNA, 15 bp, Homo sapiens
ctccccagagcctct

SEQ ID NO: 1016089 - DNA, 15 bp, Homo sapiens
tccccagagcctctg

SEQ ID NO: 1016090 - DNA, 15 bp, Homo sapiens
ccccagagcctctgg

SEQ ID NO: 1016091 - DNA, 15 bp, Homo sapiens
cccagagcctctgga

SEQ ID NO: 1016092 - DNA, 15 bp, Homo sapiens
ccagagcctctggag

SEQ ID NO: 1016093 - DNA, 15 bp, Homo sapiens
cagagcctctggaga

SEQ ID NO: 1016094 - DNA, 15 bp, Homo sapiens
agagcctctggagag

SEQ ID NO: 1016095 - DNA, 15 bp, Homo sapiens
gagcctctggagaga

SEQ ID NO: 1016096 - DNA, 15 bp, Homo sapiens
agcctctggagagag

SEQ ID NO: 1016097 - DNA, 15 bp, Homo sapiens
gcctctggagagagt

SEQ ID NO: 1016098 - DNA, 15 bp, Homo sapiens
cctctggagagagta

SEQ ID NO: 1016099 - DNA, 15 bp, Homo sapiens
ctctggagagagtac

SEQ ID NO: 1016100 - DNA, 15 bp, Homo sapiens
tctggagagagtaca

SEQ ID NO: 1016101 - DNA, 15 bp, Homo sapiens
ctggagagagtacaa

SEQ ID NO: 1016102 - DNA, 15 bp, Homo sapiens
tggagagagtacaat

SEQ ID NO: 1016103 - DNA, 15 bp, Homo sapiens
ggagagagtacaatc

SEQ ID NO: 1016104 - DNA, 15 bp, Homo sapiens
gagagagtacaatct

SEQ ID NO: 1016105 - DNA, 15 bp, Homo sapiens
agagagtacaatctg

SEQ ID NO: 1016106 - DNA, 15 bp, Homo sapiens
gagagtacaatctgc

SEQ ID NO: 1016107 - DNA, 15 bp, Homo sapiens
agagtacaatctgcg

SEQ ID NO: 1016108 - DNA, 15 bp, Homo sapiens
gagtacaatctgcgg

SEQ ID NO: 1016109 - DNA, 15 bp, Homo sapiens
agtacaatctgcgga

SEQ ID NO: 1016110 - DNA, 15 bp, Homo sapiens
gtacaatctgcggac

SEQ ID NO: 1016111 - DNA, 15 bp, Homo sapiens
tacaatctgcggaca

SEQ ID NO: 1016112 - DNA, 15 bp, Homo sapiens
acaatctgcggacac

SEQ ID NO: 1016113 - DNA, 15 bp, Homo sapiens
caatctgcggacacc

SEQ ID NO: 1016114 - DNA, 15 bp, Homo sapiens
aatctgcggacacct

SEQ ID NO: 1016115 - DNA, 15 bp, Homo sapiens
atctgcggacacctt

SEQ ID NO: 1016116 - DNA, 15 bp, Homo sapiens
tctgcggacaccttg

SEQ ID NO: 1016117 - DNA, 15 bp, Homo sapiens
ctgcggacaccttga

SEQ ID NO: 1016118 - DNA, 15 bp, Homo sapiens
tgcggacaccttgat

SEQ ID NO: 1016119 - DNA, 15 bp, Homo sapiens
gcggacaccttgatt

SEQ ID NO: 1016120 - DNA, 15 bp, Homo sapiens
cggacaccttgattt

SEQ ID NO: 1016121 - DNA, 15 bp, Homo sapiens
ggacaccttgatttc

SEQ ID NO: 1016122 - DNA, 15 bp, Homo sapiens
gacaccttgatttca

SEQ ID NO: 1016123 - DNA, 15 bp, Homo sapiens
acaccttgatttcag

SEQ ID NO: 1016124 - DNA, 15 bp, Homo sapiens
caccttgatttcaga

SEQ ID NO: 1016125 - DNA, 15 bp, Homo sapiens
accttgatttcagac

SEQ ID NO: 1016126 - DNA, 15 bp, Homo sapiens
ccttgatttcagact

SEQ ID NO: 1016127 - DNA, 15 bp, Homo sapiens
cttgatttcagactt

SEQ ID NO: 1016128 - DNA, 15 bp, Homo sapiens
ttgatttcagacttc

SEQ ID NO: 1016129 - DNA, 15 bp, Homo sapiens
tgatttcagacttct

SEQ ID NO: 1016130 - DNA, 15 bp, Homo sapiens
gatttcagacttcta

SEQ ID NO: 1016131 - DNA, 15 bp, Homo sapiens
atttcagacttctag

SEQ ID NO: 1016132 - DNA, 15 bp, Homo sapiens
tttcagacttctagc

SEQ ID NO: 1016133 - DNA, 15 bp, Homo sapiens
ttcagacttctagct

SEQ ID NO: 1016134 - DNA, 15 bp, Homo sapiens
tcagacttctagctc

SEQ ID NO: 1016135 - DNA, 15 bp, Homo sapiens
cagacttctagctcc

SEQ ID NO: 1016136 - DNA, 15 bp, Homo sapiens
agacttctagctccc

SEQ ID NO: 1016137 - DNA, 15 bp, Homo sapiens
gacttctagctccca

SEQ ID NO: 1016138 - DNA, 15 bp, Homo sapiens
acttctagctcccat

SEQ ID NO: 1016139 - DNA, 15 bp, Homo sapiens
cttctagctcccata

SEQ ID NO: 1016140 - DNA, 15 bp, Homo sapiens
ttctagctcccataa

SEQ ID NO: 1016141 - DNA, 15 bp, Homo sapiens
tctagctcccataac

SEQ ID NO: 1016142 - DNA, 15 bp, Homo sapiens
ctagctcccataact

SEQ ID NO: 1016143 - DNA, 15 bp, Homo sapiens
tagctcccataactg

SEQ ID NO: 1016144 - DNA, 15 bp, Homo sapiens
agctcccataactgt

SEQ ID NO: 1016145 - DNA, 15 bp, Homo sapiens
gctcccataactgtg

SEQ ID NO: 1016146 - DNA, 15 bp, Homo sapiens
ctcccataactgtga

SEQ ID NO: 1016147 - DNA, 15 bp, Homo sapiens
tcccataactgtgag

SEQ ID NO: 1016148 - DNA, 15 bp, Homo sapiens
cccataactgtgaga

SEQ ID NO: 1016149 - DNA, 15 bp, Homo sapiens
ccataactgtgagag

SEQ ID NO: 1016150 - DNA, 15 bp, Homo sapiens
cataactgtgagaga

SEQ ID NO: 1016151 - DNA, 15 bp, Homo sapiens
ataactgtgagagaa

SEQ ID NO: 1016152 - DNA, 15 bp, Homo sapiens
taactgtgagagaat

SEQ ID NO: 1016153 - DNA, 15 bp, Homo sapiens
aactgtgagagaata

SEQ ID NO: 1016154 - DNA, 15 bp, Homo sapiens
actgtgagagaatac

SEQ ID NO: 1016155 - DNA, 15 bp, Homo sapiens
ctgtgagagaataca

SEQ ID NO: 1016156 - DNA, 15 bp, Homo sapiens
tgtgagagaatacat

SEQ ID NO: 1016157 - DNA, 15 bp, Homo sapiens
gtgagagaatacatt

SEQ ID NO: 1016158 - DNA, 15 bp, Homo sapiens
tgagagaatacattc

SEQ ID NO: 1016159 - DNA, 15 bp, Homo sapiens
gagagaatacattcc

SEQ ID NO: 1016160 - DNA, 15 bp, Homo sapiens
agagaatacattcct

SEQ ID NO: 1016161 - DNA, 15 bp, Homo sapiens
gagaatacattcctg

SEQ ID NO: 1016162 - DNA, 15 bp, Homo sapiens
agaatacattcctga

SEQ ID NO: 1016163 - DNA, 15 bp, Homo sapiens
gaatacattcctgat

SEQ ID NO: 1016164 - DNA, 15 bp, Homo sapiens
aatacattcctgatc

SEQ ID NO: 1016165 - DNA, 15 bp, Homo sapiens
atacattcctgatct

SEQ ID NO: 1016166 - DNA, 15 bp, Homo sapiens
tacattcctgatctt

SEQ ID NO: 1016167 - DNA, 15 bp, Homo sapiens
acattcctgatcttt

SEQ ID NO: 1016168 - DNA, 15 bp, Homo sapiens
cattcctgatcttta

SEQ ID NO: 1016169 - DNA, 15 bp, Homo sapiens
attcctgatctttaa

SEQ ID NO: 1016170 - DNA, 15 bp, Homo sapiens
ttcctgatctttaag

SEQ ID NO: 1016171 - DNA, 15 bp, Homo sapiens
tcctgatctttaagc

SEQ ID NO: 1016172 - DNA, 15 bp, Homo sapiens
cctgatctttaagcc

SEQ ID NO: 1016173 - DNA, 15 bp, Homo sapiens
ctgatctttaagcct

SEQ ID NO: 1016174 - DNA, 15 bp, Homo sapiens
tgatctttaagcctc

SEQ ID NO: 1016175 - DNA, 15 bp, Homo sapiens
gatctttaagcctct

SEQ ID NO: 1016176 - DNA, 15 bp, Homo sapiens
atctttaagcctctg

SEQ ID NO: 1016177 - DNA, 15 bp, Homo sapiens
tctttaagcctctga

SEQ ID NO: 1016178 - DNA, 15 bp, Homo sapiens
ctttaagcctctgag

SEQ ID NO: 1016179 - DNA, 15 bp, Homo sapiens
tttaagcctctgagt

SEQ ID NO: 1016180 - DNA, 15 bp, Homo sapiens
ttaagcctctgagtt

SEQ ID NO: 1016181 - DNA, 15 bp, Homo sapiens
taagcctctgagttt

SEQ ID NO: 1016182 - DNA, 15 bp, Homo sapiens
aagcctctgagtttg

SEQ ID NO: 1016183 - DNA, 15 bp, Homo sapiens
agcctctgagtttgt

SEQ ID NO: 1016184 - DNA, 15 bp, Homo sapiens
gcctctgagtttgtg

SEQ ID NO: 1016185 - DNA, 15 bp, Homo sapiens
cctctgagtttgtgg

SEQ ID NO: 1016186 - DNA, 15 bp, Homo sapiens
ctctgagtttgtggt

SEQ ID NO: 1016187 - DNA, 15 bp, Homo sapiens
tctgagtttgtggta

SEQ ID NO: 1016188 - DNA, 15 bp, Homo sapiens
ctgagtttgtggtaa

SEQ ID NO: 1016189 - DNA, 15 bp, Homo sapiens
tgagtttgtggtaat

SEQ ID NO: 1016190 - DNA, 15 bp, Homo sapiens
gagtttgtggtaatt

SEQ ID NO: 1016191 - DNA, 15 bp, Homo sapiens
agtttgtggtaattt

SEQ ID NO: 1016192 - DNA, 15 bp, Homo sapiens
gtttgtggtaatttg

SEQ ID NO: 1016193 - DNA, 15 bp, Homo sapiens
tttgtggtaatttgt

SEQ ID NO: 1016194 - DNA, 15 bp, Homo sapiens
ttgtggtaatttgtt

SEQ ID NO: 1016195 - DNA, 15 bp, Homo sapiens
tgtggtaatttgtta

SEQ ID NO: 1016196 - DNA, 15 bp, Homo sapiens
gtggtaatttgttac

SEQ ID NO: 1016197 - DNA, 15 bp, Homo sapiens
tggtaatttgttaca

SEQ ID NO: 1016198 - DNA, 15 bp, Homo sapiens
ggtaatttgttacaa

SEQ ID NO: 1016199 - DNA, 15 bp, Homo sapiens
gtaatttgttacaac

SEQ ID NO: 1016200 - DNA, 15 bp, Homo sapiens
taatttgttacaaca

SEQ ID NO: 1016201 - DNA, 15 bp, Homo sapiens
aatttgttacaacag

SEQ ID NO: 1016202 - DNA, 15 bp, Homo sapiens
atttgttacaacagc

SEQ ID NO: 1016203 - DNA, 15 bp, Homo sapiens
tttgttacaacagcc

SEQ ID NO: 1016204 - DNA, 15 bp, Homo sapiens
ttgttacaacagcca

SEQ ID NO: 1016205 - DNA, 15 bp, Homo sapiens
tgttacaacagccat

SEQ ID NO: 1016206 - DNA, 15 bp, Homo sapiens
gttacaacagccata

SEQ ID NO: 1016207 - DNA, 15 bp, Homo sapiens
ttacaacagccatag

SEQ ID NO: 1016208 - DNA, 15 bp, Homo sapiens
tacaacagccatagg

SEQ ID NO: 1016209 - DNA, 15 bp, Homo sapiens
acaacagccatagga

SEQ ID NO: 1016210 - DNA, 15 bp, Homo sapiens
caacagccataggaa

SEQ ID NO: 1016211 - DNA, 15 bp, Homo sapiens
aacagccataggaag

SEQ ID NO: 1016212 - DNA, 15 bp, Homo sapiens
acagccataggaagc

SEQ ID NO: 1016213 - DNA, 15 bp, Homo sapiens
cagccataggaagct

SEQ ID NO: 1016214 - DNA, 15 bp, Homo sapiens
agccataggaagcta

SEQ ID NO: 1016215 - DNA, 15 bp, Homo sapiens
gccataggaagctag

SEQ ID NO: 1016216 - DNA, 15 bp, Homo sapiens
ccataggaagctagt

SEQ ID NO: 1016217 - DNA, 15 bp, Homo sapiens
cataggaagctagtg

SEQ ID NO: 1016218 - DNA, 15 bp, Homo sapiens
ataggaagctagtgt

SEQ ID NO: 1016219 - DNA, 15 bp, Homo sapiens
taggaagctagtgta

SEQ ID NO: 1016220 - DNA, 15 bp, Homo sapiens
aggaagctagtgtag

SEQ ID NO: 1016221 - DNA, 15 bp, Homo sapiens
ggaagctagtgtagc

SEQ ID NO: 1016222 - DNA, 15 bp, Homo sapiens
gaagctagtgtagcc

SEQ ID NO: 1016223 - DNA, 15 bp, Homo sapiens
aagctagtgtagcct

SEQ ID NO: 1016224 - DNA, 15 bp, Homo sapiens
agctagtgtagcctc

SEQ ID NO: 1016225 - DNA, 15 bp, Homo sapiens
gctagtgtagcctca

SEQ ID NO: 1016226 - DNA, 15 bp, Homo sapiens
ctagtgtagcctcaa

SEQ ID NO: 1016227 - DNA, 15 bp, Homo sapiens
tagtgtagcctcaaa

SEQ ID NO: 1016228 - DNA, 15 bp, Homo sapiens
agtgtagcctcaaat

SEQ ID NO: 1016229 - DNA, 15 bp, Homo sapiens
gtgtagcctcaaatc

SEQ ID NO: 1016230 - DNA, 15 bp, Homo sapiens
tgtagcctcaaatca

SEQ ID NO: 1016231 - DNA, 15 bp, Homo sapiens
gtagcctcaaatcaa

SEQ ID NO: 1016232 - DNA, 15 bp, Homo sapiens
tagcctcaaatcaat

SEQ ID NO: 1016233 - DNA, 15 bp, Homo sapiens
agcctcaaatcaatg

SEQ ID NO: 1016234 - DNA, 15 bp, Homo sapiens
gcctcaaatcaatga

SEQ ID NO: 1016235 - DNA, 15 bp, Homo sapiens
cctcaaatcaatgac

SEQ ID NO: 1016236 - DNA, 15 bp, Homo sapiens
ctcaaatcaatgacc

SEQ ID NO: 1016237 - DNA, 15 bp, Homo sapiens
tcaaatcaatgacct

SEQ ID NO: 1016238 - DNA, 15 bp, Homo sapiens
caaatcaatgacctc

SEQ ID NO: 1016239 - DNA, 15 bp, Homo sapiens
aaatcaatgacctca

SEQ ID NO: 1016240 - DNA, 15 bp, Homo sapiens
aatcaatgacctcag

SEQ ID NO: 1016241 - DNA, 15 bp, Homo sapiens
atcaatgacctcagc

SEQ ID NO: 1016242 - DNA, 15 bp, Homo sapiens
tcaatgacctcagct

SEQ ID NO: 1016243 - DNA, 15 bp, Homo sapiens
caatgacctcagctt

SEQ ID NO: 1016244 - DNA, 15 bp, Homo sapiens
aatgacctcagctta

SEQ ID NO: 1016245 - DNA, 15 bp, Homo sapiens
atgacctcagcttat

SEQ ID NO: 1016246 - DNA, 15 bp, Homo sapiens
tgacctcagcttata

SEQ ID NO: 1016247 - DNA, 15 bp, Homo sapiens
gacctcagcttatat

SEQ ID NO: 1016248 - DNA, 15 bp, Homo sapiens
acctcagcttatatg

SEQ ID NO: 1016249 - DNA, 15 bp, Homo sapiens
cctcagcttatatgt

SEQ ID NO: 1016250 - DNA, 15 bp, Homo sapiens
ctcagcttatatgtt

SEQ ID NO: 1016251 - DNA, 15 bp, Homo sapiens
tcagcttatatgtta

SEQ ID NO: 1016252 - DNA, 15 bp, Homo sapiens
cagcttatatgttaa

SEQ ID NO: 1016253 - DNA, 15 bp, Homo sapiens
agcttatatgttaag

SEQ ID NO: 1016254 - DNA, 15 bp, Homo sapiens
gcttatatgttaaga

SEQ ID NO: 1016255 - DNA, 15 bp, Homo sapiens
cttatatgttaagaa

SEQ ID NO: 1016256 - DNA, 15 bp, Homo sapiens
ttatatgttaagaaa

SEQ ID NO: 1016257 - DNA, 15 bp, Homo sapiens
tatatgttaagaaac

SEQ ID NO: 1016258 - DNA, 15 bp, Homo sapiens
atatgttaagaaact

SEQ ID NO: 1016259 - DNA, 15 bp, Homo sapiens
tatgttaagaaacta

SEQ ID NO: 1016260 - DNA, 15 bp, Homo sapiens
atgttaagaaactag

SEQ ID NO: 1016261 - DNA, 15 bp, Homo sapiens
tgttaagaaactaga

SEQ ID NO: 1016262 - DNA, 15 bp, Homo sapiens
gttaagaaactagaa

SEQ ID NO: 1016263 - DNA, 15 bp, Homo sapiens
ttaagaaactagaaa

SEQ ID NO: 1016264 - DNA, 15 bp, Homo sapiens
taagaaactagaaaa

SEQ ID NO: 1016265 - DNA, 15 bp, Homo sapiens
aagaaactagaaaaa

SEQ ID NO: 1016266 - DNA, 15 bp, Homo sapiens
agaaactagaaaaag

SEQ ID NO: 1016267 - DNA, 15 bp, Homo sapiens
gaaactagaaaaaga

SEQ ID NO: 1016268 - DNA, 15 bp, Homo sapiens
aaactagaaaaagaa

SEQ ID NO: 1016269 - DNA, 15 bp, Homo sapiens
aactagaaaaagaag

SEQ ID NO: 1016270 - DNA, 15 bp, Homo sapiens
actagaaaaagaaga

SEQ ID NO: 1016271 - DNA, 15 bp, Homo sapiens
ctagaaaaagaagag

SEQ ID NO: 1016272 - DNA, 15 bp, Homo sapiens
tagaaaaagaagagc

SEQ ID NO: 1016273 - DNA, 15 bp, Homo sapiens
agaaaaagaagagca

SEQ ID NO: 1016274 - DNA, 15 bp, Homo sapiens
gaaaaagaagagcaa

SEQ ID NO: 1016275 - DNA, 15 bp, Homo sapiens
aaaaagaagagcaaa

SEQ ID NO: 1016276 - DNA, 15 bp, Homo sapiens
aaaagaagagcaaat

SEQ ID NO: 1016277 - DNA, 15 bp, Homo sapiens
aaagaagagcaaatt

SEQ ID NO: 1016278 - DNA, 15 bp, Homo sapiens
aagaagagcaaatta

SEQ ID NO: 1016279 - DNA, 15 bp, Homo sapiens
agaagagcaaattaa

SEQ ID NO: 1016280 - DNA, 15 bp, Homo sapiens
gaagagcaaattaaa

SEQ ID NO: 1016281 - DNA, 15 bp, Homo sapiens
aagagcaaattaaac

SEQ ID NO: 1016282 - DNA, 15 bp, Homo sapiens
agagcaaattaaaca

SEQ ID NO: 1016283 - DNA, 15 bp, Homo sapiens
gagcaaattaaacac

SEQ ID NO: 1016284 - DNA, 15 bp, Homo sapiens
agcaaattaaacaca

SEQ ID NO: 1016285 - DNA, 15 bp, Homo sapiens
gcaaattaaacacaa

SEQ ID NO: 1016286 - DNA, 15 bp, Homo sapiens
caaattaaacacaat

SEQ ID NO: 1016287 - DNA, 15 bp, Homo sapiens
aaattaaacacaatg

SEQ ID NO: 1016288 - DNA, 15 bp, Homo sapiens
aattaaacacaatgt

SEQ ID NO: 1016289 - DNA, 15 bp, Homo sapiens
attaaacacaatgtt

SEQ ID NO: 1016290 - DNA, 15 bp, Homo sapiens
ttaaacacaatgtta

SEQ ID NO: 1016291 - DNA, 15 bp, Homo sapiens
taaacacaatgttag

SEQ ID NO: 1016292 - DNA, 15 bp, Homo sapiens
aaacacaatgttagt

SEQ ID NO: 1016293 - DNA, 15 bp, Homo sapiens
aacacaatgttagta

SEQ ID NO: 1016294 - DNA, 15 bp, Homo sapiens
acacaatgttagtag

SEQ ID NO: 1016295 - DNA, 15 bp, Homo sapiens
cacaatgttagtaga

SEQ ID NO: 1016296 - DNA, 15 bp, Homo sapiens
acaatgttagtagaa

SEQ ID NO: 1016297 - DNA, 15 bp, Homo sapiens
caatgttagtagaat

SEQ ID NO: 1016298 - DNA, 15 bp, Homo sapiens
aatgttagtagaata

SEQ ID NO: 1016299 - DNA, 15 bp, Homo sapiens
atgttagtagaataa

SEQ ID NO: 1016300 - DNA, 15 bp, Homo sapiens
tgttagtagaataaa

SEQ ID NO: 1016301 - DNA, 15 bp, Homo sapiens
gttagtagaataaaa

SEQ ID NO: 1016302 - DNA, 15 bp, Homo sapiens
ttagtagaataaaag

SEQ ID NO: 1016303 - DNA, 15 bp, Homo sapiens
tagtagaataaaaga

SEQ ID NO: 1016304 - DNA, 15 bp, Homo sapiens
agtagaataaaagaa

SEQ ID NO: 1016305 - DNA, 15 bp, Homo sapiens
gtagaataaaagaaa

SEQ ID NO: 1016306 - DNA, 15 bp, Homo sapiens
tagaataaaagaaac

SEQ ID NO: 1016307 - DNA, 15 bp, Homo sapiens
agaataaaagaaaca

SEQ ID NO: 1016308 - DNA, 15 bp, Homo sapiens
tctcgcaaagtgaca

SEQ ID NO: 1016309 - DNA, 15 bp, Homo sapiens
ctcgcaaagtgacac

SEQ ID NO: 1016310 - DNA, 15 bp, Homo sapiens
tcgcaaagtgacact

SEQ ID NO: 1016311 - DNA, 15 bp, Homo sapiens
cgcaaagtgacactg

SEQ ID NO: 1016312 - DNA, 15 bp, Homo sapiens
gcaaagtgacactgg

SEQ ID NO: 1016313 - DNA, 15 bp, Homo sapiens
caaagtgacactgga

SEQ ID NO: 1016314 - DNA, 15 bp, Homo sapiens
aaagtgacactggag

SEQ ID NO: 1016315 - DNA, 15 bp, Homo sapiens
aagtgacactggagg

SEQ ID NO: 1016316 - DNA, 15 bp, Homo sapiens
agtgacactggaggg

SEQ ID NO: 1016317 - DNA, 15 bp, Homo sapiens
gtgacactggaggga

SEQ ID NO: 1016318 - DNA, 15 bp, Homo sapiens
tgacactggagggag

SEQ ID NO: 1016319 - DNA, 15 bp, Homo sapiens
gacactggagggaga

SEQ ID NO: 1016320 - DNA, 15 bp, Homo sapiens
acactggagggagag

SEQ ID NO: 1016321 - DNA, 15 bp, Homo sapiens
cactggagggagaga

SEQ ID NO: 1016322 - DNA, 15 bp, Homo sapiens
actggagggagagaa

SEQ ID NO: 1016323 - DNA, 15 bp, Homo sapiens
ctggagggagagaaa

SEQ ID NO: 1016324 - DNA, 15 bp, Homo sapiens
tggagggagagaaag

SEQ ID NO: 1016325 - DNA, 15 bp, Homo sapiens
ggagggagagaaagg

SEQ ID NO: 1016326 - DNA, 15 bp, Homo sapiens
gagggagagaaagga

SEQ ID NO: 1016327 - DNA, 15 bp, Homo sapiens
agggagagaaaggag

SEQ ID NO: 1016328 - DNA, 15 bp, Homo sapiens
gggagagaaaggagt

SEQ ID NO: 1016329 - DNA, 15 bp, Homo sapiens
ggagagaaaggagtt

SEQ ID NO: 1016330 - DNA, 15 bp, Homo sapiens
gagagaaaggagttt

SEQ ID NO: 1016331 - DNA, 15 bp, Homo sapiens
agagaaaggagtttc

SEQ ID NO: 1016332 - DNA, 15 bp, Homo sapiens
gagaaaggagtttcc

SEQ ID NO: 1016333 - DNA, 15 bp, Homo sapiens
agaaaggagtttccc

SEQ ID NO: 1016334 - DNA, 15 bp, Homo sapiens
gaaaggagtttccct

SEQ ID NO: 1016335 - DNA, 15 bp, Homo sapiens
aaaggagtttccctg

SEQ ID NO: 1016336 - DNA, 15 bp, Homo sapiens
aaggagtttccctgc

SEQ ID NO: 1016337 - DNA, 15 bp, Homo sapiens
aggagtttccctgcg

SEQ ID NO: 1016338 - DNA, 15 bp, Homo sapiens
ggagtttccctgcgg

SEQ ID NO: 1016339 - DNA, 15 bp, Homo sapiens
gagtttccctgcggc

SEQ ID NO: 1016340 - DNA, 15 bp, Homo sapiens
agtttccctgcggcc

SEQ ID NO: 1016341 - DNA, 15 bp, Homo sapiens
gtttccctgcggcca

SEQ ID NO: 1016342 - DNA, 15 bp, Homo sapiens
tttccctgcggccac

SEQ ID NO: 1016343 - DNA, 15 bp, Homo sapiens
ttccctgcggccacg

SEQ ID NO: 1016344 - DNA, 15 bp, Homo sapiens
tccctgcggccacgc

SEQ ID NO: 1016345 - DNA, 15 bp, Homo sapiens
ccctgcggccacgct

SEQ ID NO: 1016346 - DNA, 15 bp, Homo sapiens
cctgcggccacgctg

SEQ ID NO: 1016347 - DNA, 15 bp, Homo sapiens
ctgcggccacgctgg

SEQ ID NO: 1016348 - DNA, 15 bp, Homo sapiens
tgcggccacgctggt

SEQ ID NO: 1016349 - DNA, 15 bp, Homo sapiens
gcggccacgctggtg

SEQ ID NO: 1016350 - DNA, 15 bp, Homo sapiens
cggccacgctggtgt

SEQ ID NO: 1016351 - DNA, 15 bp, Homo sapiens
ggccacgctggtgta

SEQ ID NO: 1016352 - DNA, 15 bp, Homo sapiens
gccacgctggtgtaa

SEQ ID NO: 1016353 - DNA, 15 bp, Homo sapiens
ccacgctggtgtaag

SEQ ID NO: 1016354 - DNA, 15 bp, Homo sapiens
cacgctggtgtaagc

SEQ ID NO: 1016355 - DNA, 15 bp, Homo sapiens
acgctggtgtaagca

SEQ ID NO: 1016356 - DNA, 15 bp, Homo sapiens
cgctggtgtaagcaa

SEQ ID NO: 1016357 - DNA, 15 bp, Homo sapiens
gctggtgtaagcaaa

SEQ ID NO: 1016358 - DNA, 15 bp, Homo sapiens
ctggtgtaagcaaag

SEQ ID NO: 1016359 - DNA, 15 bp, Homo sapiens
tggtgtaagcaaagg

SEQ ID NO: 1016360 - DNA, 15 bp, Homo sapiens
ggtgtaagcaaaggc

SEQ ID NO: 1016361 - DNA, 15 bp, Homo sapiens
gtgtaagcaaaggct

SEQ ID NO: 1016362 - DNA, 15 bp, Homo sapiens
tgtaagcaaaggctg

SEQ ID NO: 1016363 - DNA, 15 bp, Homo sapiens
gtaagcaaaggctga

SEQ ID NO: 1016364 - DNA, 15 bp, Homo sapiens
taagcaaaggctgat

SEQ ID NO: 1016365 - DNA, 15 bp, Homo sapiens
aagcaaaggctgatg

SEQ ID NO: 1016366 - DNA, 15 bp, Homo sapiens
agcaaaggctgatgg

SEQ ID NO: 1016367 - DNA, 15 bp, Homo sapiens
gcaaaggctgatggc

SEQ ID NO: 1016368 - DNA, 15 bp, Homo sapiens
caaaggctgatggcg

SEQ ID NO: 1016369 - DNA, 15 bp, Homo sapiens
aaaggctgatggcga

SEQ ID NO: 1016370 - DNA, 15 bp, Homo sapiens
aaggctgatggcgat

SEQ ID NO: 1016371 - DNA, 15 bp, Homo sapiens
aggctgatggcgatt

SEQ ID NO: 1016372 - DNA, 15 bp, Homo sapiens
ggctgatggcgattc

SEQ ID NO: 1016373 - DNA, 15 bp, Homo sapiens
gctgatggcgattcc

SEQ ID NO: 1016374 - DNA, 15 bp, Homo sapiens
ctgatggcgattccg

SEQ ID NO: 1016375 - DNA, 15 bp, Homo sapiens
tgatggcgattccgc

SEQ ID NO: 1016376 - DNA, 15 bp, Homo sapiens
gatggcgattccgcg

SEQ ID NO: 1016377 - DNA, 15 bp, Homo sapiens
atggcgattccgcgc

SEQ ID NO: 1016378 - DNA, 15 bp, Homo sapiens
tggcgattccgcgca

SEQ ID NO: 1016379 - DNA, 15 bp, Homo sapiens
ggcgattccgcgcat

SEQ ID NO: 1016380 - DNA, 15 bp, Homo sapiens
gcgattccgcgcatc

SEQ ID NO: 1016381 - DNA, 15 bp, Homo sapiens
cgattccgcgcatct

SEQ ID NO: 1016382 - DNA, 15 bp, Homo sapiens
gattccgcgcatcta

SEQ ID NO: 1016383 - DNA, 15 bp, Homo sapiens
attccgcgcatctag

SEQ ID NO: 1016384 - DNA, 15 bp, Homo sapiens
ttccgcgcatctagg

SEQ ID NO: 1016385 - DNA, 15 bp, Homo sapiens
tccgcgcatctaggg

SEQ ID NO: 1016386 - DNA, 15 bp, Homo sapiens
ccgcgcatctagggc

SEQ ID NO: 1016387 - DNA, 15 bp, Homo sapiens
cgcgcatctagggcc

SEQ ID NO: 1016388 - DNA, 15 bp, Homo sapiens
gcgcatctagggccg

SEQ ID NO: 1016389 - DNA, 15 bp, Homo sapiens
cgcatctagggccga

SEQ ID NO: 1016390 - DNA, 15 bp, Homo sapiens
gcatctagggccgag

SEQ ID NO: 1016391 - DNA, 15 bp, Homo sapiens
catctagggccgagc

SEQ ID NO: 1016392 - DNA, 15 bp, Homo sapiens
atctagggccgagcc

SEQ ID NO: 1016393 - DNA, 15 bp, Homo sapiens
tctagggccgagcct

SEQ ID NO: 1016394 - DNA, 15 bp, Homo sapiens
ctagggccgagcctg

SEQ ID NO: 1016395 - DNA, 15 bp, Homo sapiens
tagggccgagcctgg

SEQ ID NO: 1016396 - DNA, 15 bp, Homo sapiens
agggccgagcctggg

SEQ ID NO: 1016397 - DNA, 15 bp, Homo sapiens
gggccgagcctgggc

SEQ ID NO: 1016398 - DNA, 15 bp, Homo sapiens
ggccgagcctgggcc

SEQ ID NO: 1016399 - DNA, 15 bp, Homo sapiens
gccgagcctgggcct

SEQ ID NO: 1016400 - DNA, 15 bp, Homo sapiens
ccgagcctgggcctg

SEQ ID NO: 1016401 - DNA, 15 bp, Homo sapiens
cgagcctgggcctgc

SEQ ID NO: 1016402 - DNA, 15 bp, Homo sapiens
gagcctgggcctgcg

SEQ ID NO: 1016403 - DNA, 15 bp, Homo sapiens
agcctgggcctgcgc

SEQ ID NO: 1016404 - DNA, 15 bp, Homo sapiens
gcctgggcctgcgcc

SEQ ID NO: 1016405 - DNA, 15 bp, Homo sapiens
cctgggcctgcgccc

SEQ ID NO: 1016406 - DNA, 15 bp, Homo sapiens
ctgggcctgcgcccc

SEQ ID NO: 1016407 - DNA, 15 bp, Homo sapiens
tgggcctgcgccccc

SEQ ID NO: 1016408 - DNA, 15 bp, Homo sapiens
gggcctgcgccccct

SEQ ID NO: 1016409 - DNA, 15 bp, Homo sapiens
ggcctgcgccccctc

SEQ ID NO: 1016410 - DNA, 15 bp, Homo sapiens
gcctgcgccccctcg

SEQ ID NO: 1016411 - DNA, 15 bp, Homo sapiens
cctgcgccccctcgg

SEQ ID NO: 1016412 - DNA, 15 bp, Homo sapiens
ctgcgccccctcgga

SEQ ID NO: 1016413 - DNA, 15 bp, Homo sapiens
tgcgccccctcggat

SEQ ID NO: 1016414 - DNA, 15 bp, Homo sapiens
gcgccccctcggatt

SEQ ID NO: 1016415 - DNA, 15 bp, Homo sapiens
cgccccctcggattc

SEQ ID NO: 1016416 - DNA, 15 bp, Homo sapiens
gccccctcggattcc

SEQ ID NO: 1016417 - DNA, 15 bp, Homo sapiens
ccccctcggattcct

SEQ ID NO: 1016418 - DNA, 15 bp, Homo sapiens
cccctcggattcctg

SEQ ID NO: 1016419 - DNA, 15 bp, Homo sapiens
ccctcggattcctgg

SEQ ID NO: 1016420 - DNA, 15 bp, Homo sapiens
cctcggattcctggc

SEQ ID NO: 1016421 - DNA, 15 bp, Homo sapiens
ctcggattcctggcg

SEQ ID NO: 1016422 - DNA, 15 bp, Homo sapiens
tcggattcctggcgg

SEQ ID NO: 1016423 - DNA, 15 bp, Homo sapiens
cggattcctggcgga

SEQ ID NO: 1016424 - DNA, 15 bp, Homo sapiens
ggattcctggcggag

SEQ ID NO: 1016425 - DNA, 15 bp, Homo sapiens
gattcctggcggagc

SEQ ID NO: 1016426 - DNA, 15 bp, Homo sapiens
attcctggcggagcc

SEQ ID NO: 1016427 - DNA, 15 bp, Homo sapiens
ttcctggcggagccg

SEQ ID NO: 1016428 - DNA, 15 bp, Homo sapiens
tcctggcggagccgc

SEQ ID NO: 1016429 - DNA, 15 bp, Homo sapiens
cctggcggagccgca

SEQ ID NO: 1016430 - DNA, 15 bp, Homo sapiens
ctggcggagccgcag

SEQ ID NO: 1016431 - DNA, 15 bp, Homo sapiens
tggcggagccgcagc

SEQ ID NO: 1016432 - DNA, 15 bp, Homo sapiens
ggcggagccgcagcc

SEQ ID NO: 1016433 - DNA, 15 bp, Homo sapiens
gcggagccgcagcca

SEQ ID NO: 1016434 - DNA, 15 bp, Homo sapiens
cggagccgcagccag

SEQ ID NO: 1016435 - DNA, 15 bp, Homo sapiens
ggagccgcagccagc

SEQ ID NO: 1016436 - DNA, 15 bp, Homo sapiens
gagccgcagccagcg

SEQ ID NO: 1016437 - DNA, 15 bp, Homo sapiens
agccgcagccagcga

SEQ ID NO: 1016438 - DNA, 15 bp, Homo sapiens
gccgcagccagcgaa

SEQ ID NO: 1016439 - DNA, 15 bp, Homo sapiens
ccgcagccagcgaag

SEQ ID NO: 1016440 - DNA, 15 bp, Homo sapiens
cgcagccagcgaagc

SEQ ID NO: 1016441 - DNA, 15 bp, Homo sapiens
gcagccagcgaagca

SEQ ID NO: 1016442 - DNA, 15 bp, Homo sapiens
cagccagcgaagcag

SEQ ID NO: 1016443 - DNA, 15 bp, Homo sapiens
agccagcgaagcaga

SEQ ID NO: 1016444 - DNA, 15 bp, Homo sapiens
gccagcgaagcagag

SEQ ID NO: 1016445 - DNA, 15 bp, Homo sapiens
ccagcgaagcagagc

SEQ ID NO: 1016446 - DNA, 15 bp, Homo sapiens
cagcgaagcagagcg

SEQ ID NO: 1016447 - DNA, 15 bp, Homo sapiens
agcgaagcagagcgt

SEQ ID NO: 1016448 - DNA, 15 bp, Homo sapiens
gcgaagcagagcgtg

SEQ ID NO: 1016449 - DNA, 15 bp, Homo sapiens
cgaagcagagcgtgg

SEQ ID NO: 1016450 - DNA, 15 bp, Homo sapiens
gaagcagagcgtggt

SEQ ID NO: 1016451 - DNA, 15 bp, Homo sapiens
aagcagagcgtggtc

SEQ ID NO: 1016452 - DNA, 15 bp, Homo sapiens
agcagagcgtggtcg

SEQ ID NO: 1016453 - DNA, 15 bp, Homo sapiens
gcagagcgtggtcgg

SEQ ID NO: 1016454 - DNA, 15 bp, Homo sapiens
cagagcgtggtcgga

SEQ ID NO: 1016455 - DNA, 15 bp, Homo sapiens
agagcgtggtcggaa

SEQ ID NO: 1016456 - DNA, 15 bp, Homo sapiens
gagcgtggtcggaat

SEQ ID NO: 1016457 - DNA, 15 bp, Homo sapiens
agcgtggtcggaata

SEQ ID NO: 1016458 - DNA, 15 bp, Homo sapiens
gcgtggtcggaatag

SEQ ID NO: 1016459 - DNA, 15 bp, Homo sapiens
cgtggtcggaataga

SEQ ID NO: 1016460 - DNA, 15 bp, Homo sapiens
gtggtcggaatagag

SEQ ID NO: 1016461 - DNA, 15 bp, Homo sapiens
tggtcggaatagagg

SEQ ID NO: 1016462 - DNA, 15 bp, Homo sapiens
ggtcggaatagaggc

SEQ ID NO: 1016463 - DNA, 15 bp, Homo sapiens
gtcggaatagaggca

SEQ ID NO: 1016464 - DNA, 15 bp, Homo sapiens
tcggaatagaggcag

SEQ ID NO: 1016465 - DNA, 15 bp, Homo sapiens
cggaatagaggcagc

SEQ ID NO: 1016466 - DNA, 15 bp, Homo sapiens
ggaatagaggcagcg

SEQ ID NO: 1016467 - DNA, 15 bp, Homo sapiens
gaatagaggcagcga

SEQ ID NO: 1016468 - DNA, 15 bp, Homo sapiens
aatagaggcagcgac

SEQ ID NO: 1016469 - DNA, 15 bp, Homo sapiens
atagaggcagcgacc

SEQ ID NO: 1016470 - DNA, 15 bp, Homo sapiens
tagaggcagcgaccg

SEQ ID NO: 1016471 - DNA, 15 bp, Homo sapiens
agaggcagcgaccgt

SEQ ID NO: 1016472 - DNA, 15 bp, Homo sapiens
gaggcagcgaccgtg

SEQ ID NO: 1016473 - DNA, 15 bp, Homo sapiens
aggcagcgaccgtgt

SEQ ID NO: 1016474 - DNA, 15 bp, Homo sapiens
ggcagcgaccgtgtg

SEQ ID NO: 1016475 - DNA, 15 bp, Homo sapiens
gcagcgaccgtgtga

SEQ ID NO: 1016476 - DNA, 15 bp, Homo sapiens
cagcgaccgtgtgag

SEQ ID NO: 1016477 - DNA, 15 bp, Homo sapiens
agcgaccgtgtgagg

SEQ ID NO: 1016478 - DNA, 15 bp, Homo sapiens
gcgaccgtgtgaggt

SEQ ID NO: 1016479 - DNA, 15 bp, Homo sapiens
cgaccgtgtgaggtc

SEQ ID NO: 1016480 - DNA, 15 bp, Homo sapiens
gaccgtgtgaggtcg

SEQ ID NO: 1016481 - DNA, 15 bp, Homo sapiens
accgtgtgaggtcgc

SEQ ID NO: 1016482 - DNA, 15 bp, Homo sapiens
ccgtgtgaggtcgcg

SEQ ID NO: 1016483 - DNA, 15 bp, Homo sapiens
cgtgtgaggtcgcgc

SEQ ID NO: 1016484 - DNA, 15 bp, Homo sapiens
gtgtgaggtcgcgcc

SEQ ID NO: 1016485 - DNA, 15 bp, Homo sapiens
tgtgaggtcgcgcca

SEQ ID NO: 1016486 - DNA, 15 bp, Homo sapiens
gtgaggtcgcgccag

SEQ ID NO: 1016487 - DNA, 15 bp, Homo sapiens
tgaggtcgcgccagg

SEQ ID NO: 1016488 - DNA, 15 bp, Homo sapiens
gaggtcgcgccaggg

SEQ ID NO: 1016489 - DNA, 15 bp, Homo sapiens
aggtcgcgccaggga

SEQ ID NO: 1016490 - DNA, 15 bp, Homo sapiens
ggtcgcgccagggaa

SEQ ID NO: 1016491 - DNA, 15 bp, Homo sapiens
gtcgcgccagggaaa

SEQ ID NO: 1016492 - DNA, 15 bp, Homo sapiens
tcgcgccagggaaag

SEQ ID NO: 1016493 - DNA, 15 bp, Homo sapiens
cgcgccagggaaagc

SEQ ID NO: 1016494 - DNA, 15 bp, Homo sapiens
gcgccagggaaagct

SEQ ID NO: 1016495 - DNA, 15 bp, Homo sapiens
cgccagggaaagctc

SEQ ID NO: 1016496 - DNA, 15 bp, Homo sapiens
gccagggaaagctcc

SEQ ID NO: 1016497 - DNA, 15 bp, Homo sapiens
ccagggaaagctccg

SEQ ID NO: 1016498 - DNA, 15 bp, Homo sapiens
cagggaaagctccgc

SEQ ID NO: 1016499 - DNA, 15 bp, Homo sapiens
agggaaagctccgcg

SEQ ID NO: 1016500 - DNA, 15 bp, Homo sapiens
gggaaagctccgcga

SEQ ID NO: 1016501 - DNA, 15 bp, Homo sapiens
ggaaagctccgcgag

SEQ ID NO: 1016502 - DNA, 15 bp, Homo sapiens
gaaagctccgcgagg

SEQ ID NO: 1016503 - DNA, 15 bp, Homo sapiens
aaagctccgcgaggg

SEQ ID NO: 1016504 - DNA, 15 bp, Homo sapiens
aagctccgcgagggg

SEQ ID NO: 1016505 - DNA, 15 bp, Homo sapiens
agctccgcgaggggc

SEQ ID NO: 1016506 - DNA, 15 bp, Homo sapiens
gctccgcgaggggcc

SEQ ID NO: 1016507 - DNA, 15 bp, Homo sapiens
ctccgcgaggggcca

SEQ ID NO: 1016508 - DNA, 15 bp, Homo sapiens
tccgcgaggggccag

SEQ ID NO: 1016509 - DNA, 15 bp, Homo sapiens
ccgcgaggggccagc

SEQ ID NO: 1016510 - DNA, 15 bp, Homo sapiens
cgcgaggggccagcg

SEQ ID NO: 1016511 - DNA, 15 bp, Homo sapiens
gcgaggggccagcgt

SEQ ID NO: 1016512 - DNA, 15 bp, Homo sapiens
cgaggggccagcgtt

SEQ ID NO: 1016513 - DNA, 15 bp, Homo sapiens
gaggggccagcgttg

SEQ ID NO: 1016514 - DNA, 15 bp, Homo sapiens
aggggccagcgttgg

SEQ ID NO: 1016515 - DNA, 15 bp, Homo sapiens
ggggccagcgttggg

SEQ ID NO: 1016516 - DNA, 15 bp, Homo sapiens
gggccagcgttgggc

SEQ ID NO: 1016517 - DNA, 15 bp, Homo sapiens
ggccagcgttgggcc

SEQ ID NO: 1016518 - DNA, 15 bp, Homo sapiens
gccagcgttgggccc

SEQ ID NO: 1016519 - DNA, 15 bp, Homo sapiens
ccagcgttgggccct

SEQ ID NO: 1016520 - DNA, 15 bp, Homo sapiens
cagcgttgggccctg

SEQ ID NO: 1016521 - DNA, 15 bp, Homo sapiens
agcgttgggccctgc

SEQ ID NO: 1016522 - DNA, 15 bp, Homo sapiens
gcgttgggccctgcc

SEQ ID NO: 1016523 - DNA, 15 bp, Homo sapiens
cgttgggccctgccc

SEQ ID NO: 1016524 - DNA, 15 bp, Homo sapiens
gttgggccctgccct

SEQ ID NO: 1016525 - DNA, 15 bp, Homo sapiens
ttgggccctgccctg

SEQ ID NO: 1016526 - DNA, 15 bp, Homo sapiens
tgggccctgccctgc

SEQ ID NO: 1016527 - DNA, 15 bp, Homo sapiens
gggccctgccctgcc

SEQ ID NO: 1016528 - DNA, 15 bp, Homo sapiens
ggccctgccctgccc

SEQ ID NO: 1016529 - DNA, 15 bp, Homo sapiens
gccctgccctgccct

SEQ ID NO: 1016530 - DNA, 15 bp, Homo sapiens
ccctgccctgccctg

SEQ ID NO: 1016531 - DNA, 15 bp, Homo sapiens
cctgccctgccctga

SEQ ID NO: 1016532 - DNA, 15 bp, Homo sapiens
ctgccctgccctgac

SEQ ID NO: 1016533 - DNA, 15 bp, Homo sapiens
tgccctgccctgacc

SEQ ID NO: 1016534 - DNA, 15 bp, Homo sapiens
gccctgccctgaccg

SEQ ID NO: 1016535 - DNA, 15 bp, Homo sapiens
ccctgccctgaccgc

SEQ ID NO: 1016536 - DNA, 15 bp, Homo sapiens
cctgccctgaccgct

SEQ ID NO: 1016537 - DNA, 15 bp, Homo sapiens
ctgccctgaccgctc

SEQ ID NO: 1016538 - DNA, 15 bp, Homo sapiens
tgccctgaccgctcc

SEQ ID NO: 1016539 - DNA, 15 bp, Homo sapiens
gccctgaccgctccc

SEQ ID NO: 1016540 - DNA, 15 bp, Homo sapiens
ccctgaccgctcccc

SEQ ID NO: 1016541 - DNA, 15 bp, Homo sapiens
cctgaccgctcccca

SEQ ID NO: 1016542 - DNA, 15 bp, Homo sapiens
ctgaccgctccccac

SEQ ID NO: 1016543 - DNA, 15 bp, Homo sapiens
tgaccgctccccact

SEQ ID NO: 1016544 - DNA, 15 bp, Homo sapiens
gaccgctccccactg

SEQ ID NO: 1016545 - DNA, 15 bp, Homo sapiens
accgctccccactgt

SEQ ID NO: 1016546 - DNA, 15 bp, Homo sapiens
ccgctccccactgtg

SEQ ID NO: 1016547 - DNA, 15 bp, Homo sapiens
cgctccccactgtgc

SEQ ID NO: 1016548 - DNA, 15 bp, Homo sapiens
gctccccactgtgcc

SEQ ID NO: 1016549 - DNA, 15 bp, Homo sapiens
ctccccactgtgccc

SEQ ID NO: 1016550 - DNA, 15 bp, Homo sapiens
tccccactgtgccca

SEQ ID NO: 1016551 - DNA, 15 bp, Homo sapiens
ccccactgtgcccac

SEQ ID NO: 1016552 - DNA, 15 bp, Homo sapiens
cccactgtgcccact

SEQ ID NO: 1016553 - DNA, 15 bp, Homo sapiens
ccactgtgcccactc

SEQ ID NO: 1016554 - DNA, 15 bp, Homo sapiens
cactgtgcccactcc

SEQ ID NO: 1016555 - DNA, 15 bp, Homo sapiens
actgtgcccactcca

SEQ ID NO: 1016556 - DNA, 15 bp, Homo sapiens
ctgtgcccactccac

SEQ ID NO: 1016557 - DNA, 15 bp, Homo sapiens
tgtgcccactccacc

SEQ ID NO: 1016558 - DNA, 15 bp, Homo sapiens
gtgcccactccaccc

SEQ ID NO: 1016559 - DNA, 15 bp, Homo sapiens
tgcccactccacccg

SEQ ID NO: 1016560 - DNA, 15 bp, Homo sapiens
gcccactccacccgg

SEQ ID NO: 1016561 - DNA, 15 bp, Homo sapiens
cccactccacccggg

SEQ ID NO: 1016562 - DNA, 15 bp, Homo sapiens
ccactccacccggga

SEQ ID NO: 1016563 - DNA, 15 bp, Homo sapiens
cactccacccgggag

SEQ ID NO: 1016564 - DNA, 15 bp, Homo sapiens
actccacccgggagc

SEQ ID NO: 1016565 - DNA, 15 bp, Homo sapiens
ctccacccgggagca

SEQ ID NO: 1016566 - DNA, 15 bp, Homo sapiens
tccacccgggagcaa

SEQ ID NO: 1016567 - DNA, 15 bp, Homo sapiens
ccacccgggagcaag

SEQ ID NO: 1016568 - DNA, 15 bp, Homo sapiens
cacccgggagcaagc

SEQ ID NO: 1016569 - DNA, 15 bp, Homo sapiens
acccgggagcaagct

SEQ ID NO: 1016570 - DNA, 15 bp, Homo sapiens
cccgggagcaagcta

SEQ ID NO: 1016571 - DNA, 15 bp, Homo sapiens
ccgggagcaagctag

SEQ ID NO: 1016572 - DNA, 15 bp, Homo sapiens
cgggagcaagctagt

SEQ ID NO: 1016573 - DNA, 15 bp, Homo sapiens
gggagcaagctagtt

SEQ ID NO: 1016574 - DNA, 15 bp, Homo sapiens
ggagcaagctagttg

SEQ ID NO: 1016575 - DNA, 15 bp, Homo sapiens
gagcaagctagttgc

SEQ ID NO: 1016576 - DNA, 15 bp, Homo sapiens
agcaagctagttgcg

SEQ ID NO: 1016577 - DNA, 15 bp, Homo sapiens
gcaagctagttgcgg

SEQ ID NO: 1016578 - DNA, 15 bp, Homo sapiens
caagctagttgcggg

SEQ ID NO: 1016579 - DNA, 15 bp, Homo sapiens
aagctagttgcggga

SEQ ID NO: 1016580 - DNA, 15 bp, Homo sapiens
agctagttgcgggat

SEQ ID NO: 1016581 - DNA, 15 bp, Homo sapiens
gctagttgcgggata

SEQ ID NO: 1016582 - DNA, 15 bp, Homo sapiens
ctagttgcgggataa

SEQ ID NO: 1016583 - DNA, 15 bp, Homo sapiens
tagttgcgggataaa

SEQ ID NO: 1016584 - DNA, 15 bp, Homo sapiens
agttgcgggataaag

SEQ ID NO: 1016585 - DNA, 15 bp, Homo sapiens
gttgcgggataaagg

SEQ ID NO: 1016586 - DNA, 15 bp, Homo sapiens
ttgcgggataaagga

SEQ ID NO: 1016587 - DNA, 15 bp, Homo sapiens
tgcgggataaaggaa

SEQ ID NO: 1016588 - DNA, 15 bp, Homo sapiens
gcgggataaaggaat

SEQ ID NO: 1016589 - DNA, 15 bp, Homo sapiens
cgggataaaggaata

SEQ ID NO: 1016590 - DNA, 15 bp, Homo sapiens
gggataaaggaatac

SEQ ID NO: 1016591 - DNA, 15 bp, Homo sapiens
ggataaaggaatacg

SEQ ID NO: 1016592 - DNA, 15 bp, Homo sapiens
gataaaggaatacgc

SEQ ID NO: 1016593 - DNA, 15 bp, Homo sapiens
ataaaggaatacgcg

SEQ ID NO: 1016594 - DNA, 15 bp, Homo sapiens
taaaggaatacgcgc

SEQ ID NO: 1016595 - DNA, 15 bp, Homo sapiens
aaaggaatacgcgca

SEQ ID NO: 1016596 - DNA, 15 bp, Homo sapiens
aaggaatacgcgcag

SEQ ID NO: 1016597 - DNA, 15 bp, Homo sapiens
aggaatacgcgcaga

SEQ ID NO: 1016598 - DNA, 15 bp, Homo sapiens
ggaatacgcgcagac

SEQ ID NO: 1016599 - DNA, 15 bp, Homo sapiens
gaatacgcgcagact

SEQ ID NO: 1016600 - DNA, 15 bp, Homo sapiens
aatacgcgcagactt

SEQ ID NO: 1016601 - DNA, 15 bp, Homo sapiens
atacgcgcagacttc

SEQ ID NO: 1016602 - DNA, 15 bp, Homo sapiens
tacgcgcagacttcg

SEQ ID NO: 1016603 - DNA, 15 bp, Homo sapiens
acgcgcagacttcgc

SEQ ID NO: 1016604 - DNA, 15 bp, Homo sapiens
cgcgcagacttcgca

SEQ ID NO: 1016605 - DNA, 15 bp, Homo sapiens
gcgcagacttcgcaa

SEQ ID NO: 1016606 - DNA, 15 bp, Homo sapiens
cgcagacttcgcaaa

SEQ ID NO: 1016607 - DNA, 15 bp, Homo sapiens
gcagacttcgcaaag

SEQ ID NO: 1016608 - DNA, 15 bp, Homo sapiens
cagacttcgcaaagt

SEQ ID NO: 1016609 - DNA, 15 bp, Homo sapiens
agacttcgcaaagtg

SEQ ID NO: 1016610 - DNA, 15 bp, Homo sapiens
gacttcgcaaagtgc

SEQ ID NO: 1016611 - DNA, 15 bp, Homo sapiens
acttcgcaaagtgca

SEQ ID NO: 1016612 - DNA, 15 bp, Homo sapiens
cttcgcaaagtgcaa

SEQ ID NO: 1016613 - DNA, 15 bp, Homo sapiens
ttcgcaaagtgcaat

SEQ ID NO: 1016614 - DNA, 15 bp, Homo sapiens
tcgcaaagtgcaatc

SEQ ID NO: 1016615 - DNA, 15 bp, Homo sapiens
cgcaaagtgcaatcg

SEQ ID NO: 1016616 - DNA, 15 bp, Homo sapiens
gcaaagtgcaatcgg

SEQ ID NO: 1016617 - DNA, 15 bp, Homo sapiens
caaagtgcaatcggg

SEQ ID NO: 1016618 - DNA, 15 bp, Homo sapiens
aaagtgcaatcgggg

SEQ ID NO: 1016619 - DNA, 15 bp, Homo sapiens
aagtgcaatcggggt

SEQ ID NO: 1016620 - DNA, 15 bp, Homo sapiens
agtgcaatcggggtt

SEQ ID NO: 1016621 - DNA, 15 bp, Homo sapiens
gtgcaatcggggttc

SEQ ID NO: 1016622 - DNA, 15 bp, Homo sapiens
tgcaatcggggttct

SEQ ID NO: 1016623 - DNA, 15 bp, Homo sapiens
gcaatcggggttctt

SEQ ID NO: 1016624 - DNA, 15 bp, Homo sapiens
caatcggggttcttc

SEQ ID NO: 1016625 - DNA, 15 bp, Homo sapiens
aatcggggttcttcg

SEQ ID NO: 1016626 - DNA, 15 bp, Homo sapiens
atcggggttcttcgt

SEQ ID NO: 1016627 - DNA, 15 bp, Homo sapiens
tcggggttcttcgta

SEQ ID NO: 1016628 - DNA, 15 bp, Homo sapiens
cggggttcttcgtat

SEQ ID NO: 1016629 - DNA, 15 bp, Homo sapiens
ggggttcttcgtatt

SEQ ID NO: 1016630 - DNA, 15 bp, Homo sapiens
gggttcttcgtattc

SEQ ID NO: 1016631 - DNA, 15 bp, Homo sapiens
ggttcttcgtattca

SEQ ID NO: 1016632 - DNA, 15 bp, Homo sapiens
gttcttcgtattcat

SEQ ID NO: 1016633 - DNA, 15 bp, Homo sapiens
ttcttcgtattcatg

SEQ ID NO: 1016634 - DNA, 15 bp, Homo sapiens
tcttcgtattcatgg

SEQ ID NO: 1016635 - DNA, 15 bp, Homo sapiens
cttcgtattcatgga

SEQ ID NO: 1016636 - DNA, 15 bp, Homo sapiens
ttcgtattcatggaa

SEQ ID NO: 1016637 - DNA, 15 bp, Homo sapiens
tcgtattcatggaaa

SEQ ID NO: 1016638 - DNA, 15 bp, Homo sapiens
cgtattcatggaaaa

SEQ ID NO: 1016639 - DNA, 15 bp, Homo sapiens
gtattcatggaaaaa

SEQ ID NO: 1016640 - DNA, 15 bp, Homo sapiens
tattcatggaaaaaa

SEQ ID NO: 1016641 - DNA, 15 bp, Homo sapiens
attcatggaaaaaaa

SEQ ID NO: 1016642 - DNA, 15 bp, Homo sapiens
ttcatggaaaaaaaa

SEQ ID NO: 1016643 - DNA, 15 bp, Homo sapiens
tcatggaaaaaaaaa

SEQ ID NO: 1016644 - DNA, 15 bp, Homo sapiens
catggaaaaaaaaat

SEQ ID NO: 1016645 - DNA, 15 bp, Homo sapiens
atggaaaaaaaaatc

SEQ ID NO: 1016646 - DNA, 15 bp, Homo sapiens
tggaaaaaaaaatca

SEQ ID NO: 1016647 - DNA, 15 bp, Homo sapiens
ggaaaaaaaaatcac

SEQ ID NO: 1016648 - DNA, 15 bp, Homo sapiens
gaaaaaaaaatcact

SEQ ID NO: 1016649 - DNA, 15 bp, Homo sapiens
aaaaaaaaatcactg

SEQ ID NO: 1016650 - DNA, 15 bp, Homo sapiens
aaaaaaaatcactgg

SEQ ID NO: 1016651 - DNA, 15 bp, Homo sapiens
aaaaaaatcactggt

SEQ ID NO: 1016652 - DNA, 15 bp, Homo sapiens
aaaaaatcactggtt

SEQ ID NO: 1016653 - DNA, 15 bp, Homo sapiens
aaaaatcactggttt

SEQ ID NO: 1016654 - DNA, 15 bp, Homo sapiens
aaaatcactggttta

SEQ ID NO: 1016655 - DNA, 15 bp, Homo sapiens
aaatcactggtttag

SEQ ID NO: 1016656 - DNA, 15 bp, Homo sapiens
aatcactggtttagc

SEQ ID NO: 1016657 - DNA, 15 bp, Homo sapiens
atcactggtttagcc

SEQ ID NO: 1016658 - DNA, 15 bp, Homo sapiens
tcactggtttagccc

SEQ ID NO: 1016659 - DNA, 15 bp, Homo sapiens
cactggtttagcccg

SEQ ID NO: 1016660 - DNA, 15 bp, Homo sapiens
actggtttagcccgg

SEQ ID NO: 1016661 - DNA, 15 bp, Homo sapiens
ctggtttagcccggg

SEQ ID NO: 1016662 - DNA, 15 bp, Homo sapiens
tggtttagcccgggt

SEQ ID NO: 1016663 - DNA, 15 bp, Homo sapiens
ggtttagcccgggtc

SEQ ID NO: 1016664 - DNA, 15 bp, Homo sapiens
gtttagcccgggtct

SEQ ID NO: 1016665 - DNA, 15 bp, Homo sapiens
tttagcccgggtctg

SEQ ID NO: 1016666 - DNA, 15 bp, Homo sapiens
ttagcccgggtctgc

SEQ ID NO: 1016667 - DNA, 15 bp, Homo sapiens
tagcccgggtctgcc

SEQ ID NO: 1016668 - DNA, 15 bp, Homo sapiens
agcccgggtctgccc

SEQ ID NO: 1016669 - DNA, 15 bp, Homo sapiens
gcccgggtctgccct

SEQ ID NO: 1016670 - DNA, 15 bp, Homo sapiens
cccgggtctgcccta

SEQ ID NO: 1016671 - DNA, 15 bp, Homo sapiens
ccgggtctgccctat

SEQ ID NO: 1016672 - DNA, 15 bp, Homo sapiens
cgggtctgccctatt

SEQ ID NO: 1016673 - DNA, 15 bp, Homo sapiens
gggtctgccctattt

SEQ ID NO: 1016674 - DNA, 15 bp, Homo sapiens
ggtctgccctattta

SEQ ID NO: 1016675 - DNA, 15 bp, Homo sapiens
gtctgccctatttag

SEQ ID NO: 1016676 - DNA, 15 bp, Homo sapiens
tctgccctatttagg

SEQ ID NO: 1016677 - DNA, 15 bp, Homo sapiens
ctgccctatttagga

SEQ ID NO: 1016678 - DNA, 15 bp, Homo sapiens
tgccctatttaggat

SEQ ID NO: 1016679 - DNA, 15 bp, Homo sapiens
gccctatttaggatg

SEQ ID NO: 1016680 - DNA, 15 bp, Homo sapiens
ccctatttaggatga

SEQ ID NO: 1016681 - DNA, 15 bp, Homo sapiens
cctatttaggatgag

SEQ ID NO: 1016682 - DNA, 15 bp, Homo sapiens
ctatttaggatgagt

SEQ ID NO: 1016683 - DNA, 15 bp, Homo sapiens
tatttaggatgagtc

SEQ ID NO: 1016684 - DNA, 15 bp, Homo sapiens
atttaggatgagtcc

SEQ ID NO: 1016685 - DNA, 15 bp, Homo sapiens
tttaggatgagtcca

SEQ ID NO: 1016686 - DNA, 15 bp, Homo sapiens
ttaggatgagtccag

SEQ ID NO: 1016687 - DNA, 15 bp, Homo sapiens
taggatgagtccagg

SEQ ID NO: 1016688 - DNA, 15 bp, Homo sapiens
aggatgagtccagga

SEQ ID NO: 1016689 - DNA, 15 bp, Homo sapiens
ggatgagtccaggag

SEQ ID NO: 1016690 - DNA, 15 bp, Homo sapiens
gatgagtccaggagg

SEQ ID NO: 1016691 - DNA, 15 bp, Homo sapiens
atgagtccaggaggc

SEQ ID NO: 1016692 - DNA, 15 bp, Homo sapiens
tgagtccaggaggcg

SEQ ID NO: 1016693 - DNA, 15 bp, Homo sapiens
gagtccaggaggcgg

SEQ ID NO: 1016694 - DNA, 15 bp, Homo sapiens
agtccaggaggcggc

SEQ ID NO: 1016695 - DNA, 15 bp, Homo sapiens
gtccaggaggcggcg

SEQ ID NO: 1016696 - DNA, 15 bp, Homo sapiens
tccaggaggcggcgg

SEQ ID NO: 1016697 - DNA, 15 bp, Homo sapiens
ccaggaggcggcgga

SEQ ID NO: 1016698 - DNA, 15 bp, Homo sapiens
caggaggcggcggaa

SEQ ID NO: 1016699 - DNA, 15 bp, Homo sapiens
aggaggcggcggaaa

SEQ ID NO: 1016700 - DNA, 15 bp, Homo sapiens
ggaggcggcggaaag

SEQ ID NO: 1016701 - DNA, 15 bp, Homo sapiens
gaggcggcggaaaga

SEQ ID NO: 1016702 - DNA, 15 bp, Homo sapiens
aggcggcggaaagaa

SEQ ID NO: 1016703 - DNA, 15 bp, Homo sapiens
ggcggcggaaagaaa

SEQ ID NO: 1016704 - DNA, 15 bp, Homo sapiens
gcggcggaaagaaag

SEQ ID NO: 1016705 - DNA, 15 bp, Homo sapiens
cggcggaaagaaagg

SEQ ID NO: 1016706 - DNA, 15 bp, Homo sapiens
ggcggaaagaaagga

SEQ ID NO: 1016707 - DNA, 15 bp, Homo sapiens
gcggaaagaaaggac

SEQ ID NO: 1016708 - DNA, 15 bp, Homo sapiens
cggaaagaaaggacg

SEQ ID NO: 1016709 - DNA, 15 bp, Homo sapiens
ggaaagaaaggacgc

SEQ ID NO: 1016710 - DNA, 15 bp, Homo sapiens
gaaagaaaggacgct

SEQ ID NO: 1016711 - DNA, 15 bp, Homo sapiens
aaagaaaggacgctc

SEQ ID NO: 1016712 - DNA, 15 bp, Homo sapiens
aagaaaggacgctct

SEQ ID NO: 1016713 - DNA, 15 bp, Homo sapiens
agaaaggacgctctt

SEQ ID NO: 1016714 - DNA, 15 bp, Homo sapiens
gaaaggacgctcttc

SEQ ID NO: 1016715 - DNA, 15 bp, Homo sapiens
aaaggacgctcttcg

SEQ ID NO: 1016716 - DNA, 15 bp, Homo sapiens
aaggacgctcttcgg

SEQ ID NO: 1016717 - DNA, 15 bp, Homo sapiens
aggacgctcttcggt

SEQ ID NO: 1016718 - DNA, 15 bp, Homo sapiens
ggacgctcttcggtc

SEQ ID NO: 1016719 - DNA, 15 bp, Homo sapiens
gacgctcttcggtca

SEQ ID NO: 1016720 - DNA, 15 bp, Homo sapiens
acgctcttcggtcag

SEQ ID NO: 1016721 - DNA, 15 bp, Homo sapiens
cgctcttcggtcaga

SEQ ID NO: 1016722 - DNA, 15 bp, Homo sapiens
gctcttcggtcagag

SEQ ID NO: 1016723 - DNA, 15 bp, Homo sapiens
ctcttcggtcagagg

SEQ ID NO: 1016724 - DNA, 15 bp, Homo sapiens
tcttcggtcagaggg

SEQ ID NO: 1016725 - DNA, 15 bp, Homo sapiens
cttcggtcagaggga

SEQ ID NO: 1016726 - DNA, 15 bp, Homo sapiens
ttcggtcagagggag

SEQ ID NO: 1016727 - DNA, 15 bp, Homo sapiens
tcggtcagagggagg

SEQ ID NO: 1016728 - DNA, 15 bp, Homo sapiens
cggtcagagggaggt

SEQ ID NO: 1016729 - DNA, 15 bp, Homo sapiens
ggtcagagggaggtg

SEQ ID NO: 1016730 - DNA, 15 bp, Homo sapiens
gtcagagggaggtgt

SEQ ID NO: 1016731 - DNA, 15 bp, Homo sapiens
tcagagggaggtgtt

SEQ ID NO: 1016732 - DNA, 15 bp, Homo sapiens
cagagggaggtgttt

SEQ ID NO: 1016733 - DNA, 15 bp, Homo sapiens
agagggaggtgtttc

SEQ ID NO: 1016734 - DNA, 15 bp, Homo sapiens
gagggaggtgtttcg

SEQ ID NO: 1016735 - DNA, 15 bp, Homo sapiens
agggaggtgtttcgg

SEQ ID NO: 1016736 - DNA, 15 bp, Homo sapiens
gggaggtgtttcggg

SEQ ID NO: 1016737 - DNA, 15 bp, Homo sapiens
ggaggtgtttcgggc

SEQ ID NO: 1016738 - DNA, 15 bp, Homo sapiens
gaggtgtttcgggcc

SEQ ID NO: 1016739 - DNA, 15 bp, Homo sapiens
aggtgtttcgggcca

SEQ ID NO: 1016740 - DNA, 15 bp, Homo sapiens
ggtgtttcgggccat

SEQ ID NO: 1016741 - DNA, 15 bp, Homo sapiens
gtgtttcgggccatg

SEQ ID NO: 1016742 - DNA, 15 bp, Homo sapiens
tgtttcgggccatgg

SEQ ID NO: 1016743 - DNA, 15 bp, Homo sapiens
gtttcgggccatggg

SEQ ID NO: 1016744 - DNA, 15 bp, Homo sapiens
tttcgggccatggga

SEQ ID NO: 1016745 - DNA, 15 bp, Homo sapiens
ttcgggccatgggag

SEQ ID NO: 1016746 - DNA, 15 bp, Homo sapiens
tcgggccatgggagg

SEQ ID NO: 1016747 - DNA, 15 bp, Homo sapiens
cgggccatgggaggg

SEQ ID NO: 1016748 - DNA, 15 bp, Homo sapiens
gggccatgggaggga

SEQ ID NO: 1016749 - DNA, 15 bp, Homo sapiens
ggccatgggagggac

SEQ ID NO: 1016750 - DNA, 15 bp, Homo sapiens
gccatgggagggact

SEQ ID NO: 1016751 - DNA, 15 bp, Homo sapiens
ccatgggagggactc

SEQ ID NO: 1016752 - DNA, 15 bp, Homo sapiens
catgggagggactct

SEQ ID NO: 1016753 - DNA, 15 bp, Homo sapiens
atgggagggactctg

SEQ ID NO: 1016754 - DNA, 15 bp, Homo sapiens
tgggagggactctgg

SEQ ID NO: 1016755 - DNA, 15 bp, Homo sapiens
gggagggactctgga

SEQ ID NO: 1016756 - DNA, 15 bp, Homo sapiens
ggagggactctggag

SEQ ID NO: 1016757 - DNA, 15 bp, Homo sapiens
gagggactctggagg

SEQ ID NO: 1016758 - DNA, 15 bp, Homo sapiens
agggactctggaggc

SEQ ID NO: 1016759 - DNA, 15 bp, Homo sapiens
gggactctggaggcc

SEQ ID NO: 1016760 - DNA, 15 bp, Homo sapiens
ggactctggaggcct

SEQ ID NO: 1016761 - DNA, 15 bp, Homo sapiens
gactctggaggcctt

SEQ ID NO: 1016762 - DNA, 15 bp, Homo sapiens
actctggaggccttt

SEQ ID NO: 1016763 - DNA, 15 bp, Homo sapiens
ctctggaggcctttg

SEQ ID NO: 1016764 - DNA, 15 bp, Homo sapiens
tctggaggcctttgc

SEQ ID NO: 1016765 - DNA, 15 bp, Homo sapiens
ctggaggcctttgct

SEQ ID NO: 1016766 - DNA, 15 bp, Homo sapiens
tggaggcctttgctt

SEQ ID NO: 1016767 - DNA, 15 bp, Homo sapiens
ggaggcctttgcttg

SEQ ID NO: 1016768 - DNA, 15 bp, Homo sapiens
gaggcctttgcttgg

SEQ ID NO: 1016769 - DNA, 15 bp, Homo sapiens
aggcctttgcttgga

SEQ ID NO: 1016770 - DNA, 15 bp, Homo sapiens
ggcctttgcttggat

SEQ ID NO: 1016771 - DNA, 15 bp, Homo sapiens
gcctttgcttggata

SEQ ID NO: 1016772 - DNA, 15 bp, Homo sapiens
cctttgcttggataa

SEQ ID NO: 1016773 - DNA, 15 bp, Homo sapiens
ctttgcttggataag

SEQ ID NO: 1016774 - DNA, 15 bp, Homo sapiens
tttgcttggataagc

SEQ ID NO: 1016775 - DNA, 15 bp, Homo sapiens
ttgcttggataagct

SEQ ID NO: 1016776 - DNA, 15 bp, Homo sapiens
tgcttggataagctt

SEQ ID NO: 1016777 - DNA, 15 bp, Homo sapiens
gcttggataagcttg

SEQ ID NO: 1016778 - DNA, 15 bp, Homo sapiens
cttggataagcttgg

SEQ ID NO: 1016779 - DNA, 15 bp, Homo sapiens
ttggataagcttgga

SEQ ID NO: 1016780 - DNA, 15 bp, Homo sapiens
tggataagcttggag

SEQ ID NO: 1016781 - DNA, 15 bp, Homo sapiens
ggataagcttggaga

SEQ ID NO: 1016782 - DNA, 15 bp, Homo sapiens
gataagcttggagat

SEQ ID NO: 1016783 - DNA, 15 bp, Homo sapiens
ataagcttggagata

SEQ ID NO: 1016784 - DNA, 15 bp, Homo sapiens
taagcttggagatac

SEQ ID NO: 1016785 - DNA, 15 bp, Homo sapiens
aagcttggagataca

SEQ ID NO: 1016786 - DNA, 15 bp, Homo sapiens
agcttggagatacag

SEQ ID NO: 1016787 - DNA, 15 bp, Homo sapiens
gcttggagatacaga

SEQ ID NO: 1016788 - DNA, 15 bp, Homo sapiens
cttggagatacagat

SEQ ID NO: 1016789 - DNA, 15 bp, Homo sapiens
ttggagatacagatg

SEQ ID NO: 1016790 - DNA, 15 bp, Homo sapiens
tggagatacagatgt

SEQ ID NO: 1016791 - DNA, 15 bp, Homo sapiens
ggagatacagatgtc

SEQ ID NO: 1016792 - DNA, 15 bp, Homo sapiens
gagatacagatgtcc

SEQ ID NO: 1016793 - DNA, 15 bp, Homo sapiens
agatacagatgtcct

SEQ ID NO: 1016794 - DNA, 15 bp, Homo sapiens
gatacagatgtcctt

SEQ ID NO: 1016795 - DNA, 15 bp, Homo sapiens
atacagatgtccttc

SEQ ID NO: 1016796 - DNA, 15 bp, Homo sapiens
tacagatgtccttct

SEQ ID NO: 1016797 - DNA, 15 bp, Homo sapiens
acagatgtccttctc

SEQ ID NO: 1016798 - DNA, 15 bp, Homo sapiens
cagatgtccttctct

SEQ ID NO: 1016799 - DNA, 15 bp, Homo sapiens
agatgtccttctctt

SEQ ID NO: 1016800 - DNA, 15 bp, Homo sapiens
gatgtccttctcttc

SEQ ID NO: 1016801 - DNA, 15 bp, Homo sapiens
atgtccttctcttcc

SEQ ID NO: 1016802 - DNA, 15 bp, Homo sapiens
tgtccttctcttccc

SEQ ID NO: 1016803 - DNA, 15 bp, Homo sapiens
gtccttctcttccct

SEQ ID NO: 1016804 - DNA, 15 bp, Homo sapiens
tccttctcttcccta

SEQ ID NO: 1016805 - DNA, 15 bp, Homo sapiens
ccttctcttccctac

SEQ ID NO: 1016806 - DNA, 15 bp, Homo sapiens
cttctcttccctaca

SEQ ID NO: 1016807 - DNA, 15 bp, Homo sapiens
ttctcttccctacaa

SEQ ID NO: 1016808 - DNA, 15 bp, Homo sapiens
tctcttccctacaag

SEQ ID NO: 1016809 - DNA, 15 bp, Homo sapiens
ctcttccctacaagg

SEQ ID NO: 1016810 - DNA, 15 bp, Homo sapiens
tcttccctacaaggt

SEQ ID NO: 1016811 - DNA, 15 bp, Homo sapiens
cttccctacaaggtg

SEQ ID NO: 1016812 - DNA, 15 bp, Homo sapiens
ttccctacaaggtgc

SEQ ID NO: 1016813 - DNA, 15 bp, Homo sapiens
tccctacaaggtgcg

SEQ ID NO: 1016814 - DNA, 15 bp, Homo sapiens
ccctacaaggtgcgt

SEQ ID NO: 1016815 - DNA, 15 bp, Homo sapiens
cctacaaggtgcgtt

SEQ ID NO: 1016816 - DNA, 15 bp, Homo sapiens
ctacaaggtgcgtta

SEQ ID NO: 1016817 - DNA, 15 bp, Homo sapiens
tacaaggtgcgttag

SEQ ID NO: 1016818 - DNA, 15 bp, Homo sapiens
acaaggtgcgttagt

SEQ ID NO: 1016819 - DNA, 15 bp, Homo sapiens
caaggtgcgttagtc

SEQ ID NO: 1016820 - DNA, 15 bp, Homo sapiens
aaggtgcgttagtct

SEQ ID NO: 1016821 - DNA, 15 bp, Homo sapiens
aggtgcgttagtctc

SEQ ID NO: 1016822 - DNA, 15 bp, Homo sapiens
ggtgcgttagtctcc

SEQ ID NO: 1016823 - DNA, 15 bp, Homo sapiens
gtgcgttagtctccg

SEQ ID NO: 1016824 - DNA, 15 bp, Homo sapiens
tgcgttagtctccgg

SEQ ID NO: 1016825 - DNA, 15 bp, Homo sapiens
gcgttagtctccggg

SEQ ID NO: 1016826 - DNA, 15 bp, Homo sapiens
cgttagtctccgggc

SEQ ID NO: 1016827 - DNA, 15 bp, Homo sapiens
gttagtctccgggct

SEQ ID NO: 1016828 - DNA, 15 bp, Homo sapiens
ttagtctccgggctt

SEQ ID NO: 1016829 - DNA, 15 bp, Homo sapiens
tagtctccgggctta

SEQ ID NO: 1016830 - DNA, 15 bp, Homo sapiens
agtctccgggcttat

SEQ ID NO: 1016831 - DNA, 15 bp, Homo sapiens
gtctccgggcttatt

SEQ ID NO: 1016832 - DNA, 15 bp, Homo sapiens
tctccgggcttattt

SEQ ID NO: 1016833 - DNA, 15 bp, Homo sapiens
ctccgggcttatttt

SEQ ID NO: 1016834 - DNA, 15 bp, Homo sapiens
tccgggcttattttc

SEQ ID NO: 1016835 - DNA, 15 bp, Homo sapiens
ccgggcttattttcg

SEQ ID NO: 1016836 - DNA, 15 bp, Homo sapiens
cgggcttattttcgg

SEQ ID NO: 1016837 - DNA, 15 bp, Homo sapiens
gggcttattttcggc

SEQ ID NO: 1016838 - DNA, 15 bp, Homo sapiens
ggcttattttcggca

SEQ ID NO: 1016839 - DNA, 15 bp, Homo sapiens
gcttattttcggcag

SEQ ID NO: 1016840 - DNA, 15 bp, Homo sapiens
cttattttcggcagt

SEQ ID NO: 1016841 - DNA, 15 bp, Homo sapiens
ttattttcggcagtg

SEQ ID NO: 1016842 - DNA, 15 bp, Homo sapiens
tattttcggcagtgc

SEQ ID NO: 1016843 - DNA, 15 bp, Homo sapiens
attttcggcagtgca

SEQ ID NO: 1016844 - DNA, 15 bp, Homo sapiens
ttttcggcagtgcag

SEQ ID NO: 1016845 - DNA, 15 bp, Homo sapiens
tttcggcagtgcagt

SEQ ID NO: 1016846 - DNA, 15 bp, Homo sapiens
ttcggcagtgcagtg

SEQ ID NO: 1016847 - DNA, 15 bp, Homo sapiens
tcggcagtgcagtgg

SEQ ID NO: 1016848 - DNA, 15 bp, Homo sapiens
cggcagtgcagtggt

SEQ ID NO: 1016849 - DNA, 15 bp, Homo sapiens
ggcagtgcagtggta

SEQ ID NO: 1016850 - DNA, 15 bp, Homo sapiens
gcagtgcagtggtac

SEQ ID NO: 1016851 - DNA, 15 bp, Homo sapiens
cagtgcagtggtact

SEQ ID NO: 1016852 - DNA, 15 bp, Homo sapiens
agtgcagtggtactg

SEQ ID NO: 1016853 - DNA, 15 bp, Homo sapiens
gtgcagtggtactgg

SEQ ID NO: 1016854 - DNA, 15 bp, Homo sapiens
tgcagtggtactggg

SEQ ID NO: 1016855 - DNA, 15 bp, Homo sapiens
gcagtggtactgggg

SEQ ID NO: 1016856 - DNA, 15 bp, Homo sapiens
cagtggtactgggga

SEQ ID NO: 1016857 - DNA, 15 bp, Homo sapiens
agtggtactggggaa

SEQ ID NO: 1016858 - DNA, 15 bp, Homo sapiens
gtggtactggggaag

SEQ ID NO: 1016859 - DNA, 15 bp, Homo sapiens
tggtactggggaaga

SEQ ID NO: 1016860 - DNA, 15 bp, Homo sapiens
ggtactggggaagaa

SEQ ID NO: 1016861 - DNA, 15 bp, Homo sapiens
gtactggggaagaag

SEQ ID NO: 1016862 - DNA, 15 bp, Homo sapiens
tactggggaagaagg

SEQ ID NO: 1016863 - DNA, 15 bp, Homo sapiens
actggggaagaaggc

SEQ ID NO: 1016864 - DNA, 15 bp, Homo sapiens
ctggggaagaaggca

SEQ ID NO: 1016865 - DNA, 15 bp, Homo sapiens
tggggaagaaggcag

SEQ ID NO: 1016866 - DNA, 15 bp, Homo sapiens
ggggaagaaggcaga

SEQ ID NO: 1016867 - DNA, 15 bp, Homo sapiens
gggaagaaggcagag

SEQ ID NO: 1016868 - DNA, 15 bp, Homo sapiens
ggaagaaggcagagc

SEQ ID NO: 1016869 - DNA, 15 bp, Homo sapiens
gaagaaggcagagcc

SEQ ID NO: 1016870 - DNA, 15 bp, Homo sapiens
aagaaggcagagccg

SEQ ID NO: 1016871 - DNA, 15 bp, Homo sapiens
agaaggcagagccgc

SEQ ID NO: 1016872 - DNA, 15 bp, Homo sapiens
gaaggcagagccgcg

SEQ ID NO: 1016873 - DNA, 15 bp, Homo sapiens
aaggcagagccgcgt

SEQ ID NO: 1016874 - DNA, 15 bp, Homo sapiens
aggcagagccgcgtg

SEQ ID NO: 1016875 - DNA, 15 bp, Homo sapiens
ggcagagccgcgtgt

SEQ ID NO: 1016876 - DNA, 15 bp, Homo sapiens
gcagagccgcgtgtt

SEQ ID NO: 1016877 - DNA, 15 bp, Homo sapiens
cagagccgcgtgttg

SEQ ID NO: 1016878 - DNA, 15 bp, Homo sapiens
agagccgcgtgttga

SEQ ID NO: 1016879 - DNA, 15 bp, Homo sapiens
gagccgcgtgttgag

SEQ ID NO: 1016880 - DNA, 15 bp, Homo sapiens
agccgcgtgttgaga

SEQ ID NO: 1016881 - DNA, 15 bp, Homo sapiens
gccgcgtgttgagaa

SEQ ID NO: 1016882 - DNA, 15 bp, Homo sapiens
ccgcgtgttgagaag

SEQ ID NO: 1016883 - DNA, 15 bp, Homo sapiens
cgcgtgttgagaagg

SEQ ID NO: 1016884 - DNA, 15 bp, Homo sapiens
gcgtgttgagaaggg

SEQ ID NO: 1016885 - DNA, 15 bp, Homo sapiens
cgtgttgagaagggg

SEQ ID NO: 1016886 - DNA, 15 bp, Homo sapiens
gtgttgagaaggggc

SEQ ID NO: 1016887 - DNA, 15 bp, Homo sapiens
tgttgagaaggggct

SEQ ID NO: 1016888 - DNA, 15 bp, Homo sapiens
gttgagaaggggcta

SEQ ID NO: 1016889 - DNA, 15 bp, Homo sapiens
ttgagaaggggctag

SEQ ID NO: 1016890 - DNA, 15 bp, Homo sapiens
tgagaaggggctagg

SEQ ID NO: 1016891 - DNA, 15 bp, Homo sapiens
gagaaggggctaggg

SEQ ID NO: 1016892 - DNA, 15 bp, Homo sapiens
agaaggggctagggt

SEQ ID NO: 1016893 - DNA, 15 bp, Homo sapiens
gaaggggctagggta

SEQ ID NO: 1016894 - DNA, 15 bp, Homo sapiens
aaggggctagggtag

SEQ ID NO: 1016895 - DNA, 15 bp, Homo sapiens
aggggctagggtagt

SEQ ID NO: 1016896 - DNA, 15 bp, Homo sapiens
ggggctagggtagta

SEQ ID NO: 1016897 - DNA, 15 bp, Homo sapiens
gggctagggtagtag

SEQ ID NO: 1016898 - DNA, 15 bp, Homo sapiens
ggctagggtagtaga

SEQ ID NO: 1016899 - DNA, 15 bp, Homo sapiens
gctagggtagtagag

SEQ ID NO: 1016900 - DNA, 15 bp, Homo sapiens
ctagggtagtagagg

SEQ ID NO: 1016901 - DNA, 15 bp, Homo sapiens
tagggtagtagaggc

SEQ ID NO: 1016902 - DNA, 15 bp, Homo sapiens
agggtagtagaggcg

SEQ ID NO: 1016903 - DNA, 15 bp, Homo sapiens
gggtagtagaggcgc

SEQ ID NO: 1016904 - DNA, 15 bp, Homo sapiens
ggtagtagaggcgct

SEQ ID NO: 1016905 - DNA, 15 bp, Homo sapiens
gtagtagaggcgctg

SEQ ID NO: 1016906 - DNA, 15 bp, Homo sapiens
tagtagaggcgctgg

SEQ ID NO: 1016907 - DNA, 15 bp, Homo sapiens
agtagaggcgctgga

SEQ ID NO: 1016908 - DNA, 15 bp, Homo sapiens
gtagaggcgctggag

SEQ ID NO: 1016909 - DNA, 15 bp, Homo sapiens
tagaggcgctggagc

SEQ ID NO: 1016910 - DNA, 15 bp, Homo sapiens
agaggcgctggagcc

SEQ ID NO: 1016911 - DNA, 15 bp, Homo sapiens
gaggcgctggagcct

SEQ ID NO: 1016912 - DNA, 15 bp, Homo sapiens
aggcgctggagcctg

SEQ ID NO: 1016913 - DNA, 15 bp, Homo sapiens
ggcgctggagcctgg

SEQ ID NO: 1016914 - DNA, 15 bp, Homo sapiens
gcgctggagcctggg

SEQ ID NO: 1016915 - DNA, 15 bp, Homo sapiens
cgctggagcctgggc

SEQ ID NO: 1016916 - DNA, 15 bp, Homo sapiens
gctggagcctgggcg

SEQ ID NO: 1016917 - DNA, 15 bp, Homo sapiens
ctggagcctgggcgg

SEQ ID NO: 1016918 - DNA, 15 bp, Homo sapiens
tggagcctgggcggc

SEQ ID NO: 1016919 - DNA, 15 bp, Homo sapiens
ggagcctgggcggca

SEQ ID NO: 1016920 - DNA, 15 bp, Homo sapiens
gagcctgggcggcag

SEQ ID NO: 1016921 - DNA, 15 bp, Homo sapiens
agcctgggcggcagg

SEQ ID NO: 1016922 - DNA, 15 bp, Homo sapiens
gcctgggcggcaggg

SEQ ID NO: 1016923 - DNA, 15 bp, Homo sapiens
cctgggcggcagggc

SEQ ID NO: 1016924 - DNA, 15 bp, Homo sapiens
ctgggcggcagggcg

SEQ ID NO: 1016925 - DNA, 15 bp, Homo sapiens
tgggcggcagggcgc

SEQ ID NO: 1016926 - DNA, 15 bp, Homo sapiens
gggcggcagggcgct

SEQ ID NO: 1016927 - DNA, 15 bp, Homo sapiens
ggcggcagggcgctg

SEQ ID NO: 1016928 - DNA, 15 bp, Homo sapiens
gcggcagggcgctgc

SEQ ID NO: 1016929 - DNA, 15 bp, Homo sapiens
cggcagggcgctgca

SEQ ID NO: 1016930 - DNA, 15 bp, Homo sapiens
ggcagggcgctgcaa

SEQ ID NO: 1016931 - DNA, 15 bp, Homo sapiens
gcagggcgctgcaaa

SEQ ID NO: 1016932 - DNA, 15 bp, Homo sapiens
cagggcgctgcaaag

SEQ ID NO: 1016933 - DNA, 15 bp, Homo sapiens
agggcgctgcaaagg

SEQ ID NO: 1016934 - DNA, 15 bp, Homo sapiens
gggcgctgcaaaggc

SEQ ID NO: 1016935 - DNA, 15 bp, Homo sapiens
ggcgctgcaaaggcc

SEQ ID NO: 1016936 - DNA, 15 bp, Homo sapiens
gcgctgcaaaggccc

SEQ ID NO: 1016937 - DNA, 15 bp, Homo sapiens
cgctgcaaaggccca

SEQ ID NO: 1016938 - DNA, 15 bp, Homo sapiens
gctgcaaaggcccag

SEQ ID NO: 1016939 - DNA, 15 bp, Homo sapiens
ctgcaaaggcccagg

SEQ ID NO: 1016940 - DNA, 15 bp, Homo sapiens
tgcaaaggcccaggc

SEQ ID NO: 1016941 - DNA, 15 bp, Homo sapiens
gcaaaggcccaggcg

SEQ ID NO: 1016942 - DNA, 15 bp, Homo sapiens
caaaggcccaggcga

SEQ ID NO: 1016943 - DNA, 15 bp, Homo sapiens
aaaggcccaggcgag

SEQ ID NO: 1016944 - DNA, 15 bp, Homo sapiens
aaggcccaggcgagg

SEQ ID NO: 1016945 - DNA, 15 bp, Homo sapiens
aggcccaggcgaggt

SEQ ID NO: 1016946 - DNA, 15 bp, Homo sapiens
ggcccaggcgaggtg

SEQ ID NO: 1016947 - DNA, 15 bp, Homo sapiens
gcccaggcgaggtgg

SEQ ID NO: 1016948 - DNA, 15 bp, Homo sapiens
cccaggcgaggtgga

SEQ ID NO: 1016949 - DNA, 15 bp, Homo sapiens
ccaggcgaggtggat

SEQ ID NO: 1016950 - DNA, 15 bp, Homo sapiens
caggcgaggtggata

SEQ ID NO: 1016951 - DNA, 15 bp, Homo sapiens
aggcgaggtggatag

SEQ ID NO: 1016952 - DNA, 15 bp, Homo sapiens
ggcgaggtggataga

SEQ ID NO: 1016953 - DNA, 15 bp, Homo sapiens
gcgaggtggatagag

SEQ ID NO: 1016954 - DNA, 15 bp, Homo sapiens
cgaggtggatagaga

SEQ ID NO: 1016955 - DNA, 15 bp, Homo sapiens
gaggtggatagagag

SEQ ID NO: 1016956 - DNA, 15 bp, Homo sapiens
aggtggatagagagc

SEQ ID NO: 1016957 - DNA, 15 bp, Homo sapiens
ggtggatagagagct

SEQ ID NO: 1016958 - DNA, 15 bp, Homo sapiens
gtggatagagagctt

SEQ ID NO: 1016959 - DNA, 15 bp, Homo sapiens
tggatagagagcttg

SEQ ID NO: 1016960 - DNA, 15 bp, Homo sapiens
ggatagagagcttgc

SEQ ID NO: 1016961 - DNA, 15 bp, Homo sapiens
gatagagagcttgct

SEQ ID NO: 1016962 - DNA, 15 bp, Homo sapiens
atagagagcttgctg

SEQ ID NO: 1016963 - DNA, 15 bp, Homo sapiens
tagagagcttgctgg

SEQ ID NO: 1016964 - DNA, 15 bp, Homo sapiens
agagagcttgctggt

SEQ ID NO: 1016965 - DNA, 15 bp, Homo sapiens
gagagcttgctggtg

SEQ ID NO: 1016966 - DNA, 15 bp, Homo sapiens
agagcttgctggtgc

SEQ ID NO: 1016967 - DNA, 15 bp, Homo sapiens
gagcttgctggtgcg

SEQ ID NO: 1016968 - DNA, 15 bp, Homo sapiens
agcttgctggtgcgc

SEQ ID NO: 1016969 - DNA, 15 bp, Homo sapiens
gcttgctggtgcgcg

SEQ ID NO: 1016970 - DNA, 15 bp, Homo sapiens
cttgctggtgcgcgc

SEQ ID NO: 1016971 - DNA, 15 bp, Homo sapiens
ttgctggtgcgcgcg

SEQ ID NO: 1016972 - DNA, 15 bp, Homo sapiens
tgctggtgcgcgcga

SEQ ID NO: 1016973 - DNA, 15 bp, Homo sapiens
gctggtgcgcgcgag

SEQ ID NO: 1016974 - DNA, 15 bp, Homo sapiens
ctggtgcgcgcgaga

SEQ ID NO: 1016975 - DNA, 15 bp, Homo sapiens
tggtgcgcgcgagaa

SEQ ID NO: 1016976 - DNA, 15 bp, Homo sapiens
ggtgcgcgcgagaag

SEQ ID NO: 1016977 - DNA, 15 bp, Homo sapiens
gtgcgcgcgagaagc

SEQ ID NO: 1016978 - DNA, 15 bp, Homo sapiens
tgcgcgcgagaagca

SEQ ID NO: 1016979 - DNA, 15 bp, Homo sapiens
gcgcgcgagaagcac

SEQ ID NO: 1016980 - DNA, 15 bp, Homo sapiens
cgcgcgagaagcacg

SEQ ID NO: 1016981 - DNA, 15 bp, Homo sapiens
gcgcgagaagcacgc

SEQ ID NO: 1016982 - DNA, 15 bp, Homo sapiens
cgcgagaagcacgcc

SEQ ID NO: 1016983 - DNA, 15 bp, Homo sapiens
gcgagaagcacgcct

SEQ ID NO: 1016984 - DNA, 15 bp, Homo sapiens
cgagaagcacgcctg

SEQ ID NO: 1016985 - DNA, 15 bp, Homo sapiens
gagaagcacgcctgc

SEQ ID NO: 1016986 - DNA, 15 bp, Homo sapiens
agaagcacgcctgca

SEQ ID NO: 1016987 - DNA, 15 bp, Homo sapiens
gaagcacgcctgcag

SEQ ID NO: 1016988 - DNA, 15 bp, Homo sapiens
aagcacgcctgcagg

SEQ ID NO: 1016989 - DNA, 15 bp, Homo sapiens
agcacgcctgcaggc

SEQ ID NO: 1016990 - DNA, 15 bp, Homo sapiens
gcacgcctgcaggca

SEQ ID NO: 1016991 - DNA, 15 bp, Homo sapiens
cacgcctgcaggcag

SEQ ID NO: 1016992 - DNA, 15 bp, Homo sapiens
acgcctgcaggcaga

SEQ ID NO: 1016993 - DNA, 15 bp, Homo sapiens
cgcctgcaggcagag

SEQ ID NO: 1016994 - DNA, 15 bp, Homo sapiens
gcctgcaggcagagg

SEQ ID NO: 1016995 - DNA, 15 bp, Homo sapiens
cctgcaggcagaggt

SEQ ID NO: 1016996 - DNA, 15 bp, Homo sapiens
ctgcaggcagaggtt

SEQ ID NO: 1016997 - DNA, 15 bp, Homo sapiens
tgcaggcagaggttg

SEQ ID NO: 1016998 - DNA, 15 bp, Homo sapiens
gcaggcagaggttga

SEQ ID NO: 1016999 - DNA, 15 bp, Homo sapiens
caggcagaggttgaa

SEQ ID NO: 1017000 - DNA, 15 bp, Homo sapiens
aggcagaggttgaag

SEQ ID NO: 1017001 - DNA, 15 bp, Homo sapiens
ggcagaggttgaagc

SEQ ID NO: 1017002 - DNA, 15 bp, Homo sapiens
gcagaggttgaagcg

SEQ ID NO: 1017003 - DNA, 15 bp, Homo sapiens
cagaggttgaagcgc

SEQ ID NO: 1017004 - DNA, 15 bp, Homo sapiens
agaggttgaagcgcc

SEQ ID NO: 1017005 - DNA, 15 bp, Homo sapiens
gaggttgaagcgccg

SEQ ID NO: 1017006 - DNA, 15 bp, Homo sapiens
aggttgaagcgccgt

SEQ ID NO: 1017007 - DNA, 15 bp, Homo sapiens
ggttgaagcgccgtc

SEQ ID NO: 1017008 - DNA, 15 bp, Homo sapiens
gttgaagcgccgtcc

SEQ ID NO: 1017009 - DNA, 15 bp, Homo sapiens
ttgaagcgccgtccc

SEQ ID NO: 1017010 - DNA, 15 bp, Homo sapiens
tgaagcgccgtccca

SEQ ID NO: 1017011 - DNA, 15 bp, Homo sapiens
gaagcgccgtcccag

SEQ ID NO: 1017012 - DNA, 15 bp, Homo sapiens
aagcgccgtcccagt

SEQ ID NO: 1017013 - DNA, 15 bp, Homo sapiens
agcgccgtcccagtt

SEQ ID NO: 1017014 - DNA, 15 bp, Homo sapiens
gcgccgtcccagttg

SEQ ID NO: 1017015 - DNA, 15 bp, Homo sapiens
cgccgtcccagttgt

SEQ ID NO: 1017016 - DNA, 15 bp, Homo sapiens
gccgtcccagttgtg

SEQ ID NO: 1017017 - DNA, 15 bp, Homo sapiens
ccgtcccagttgtgt

SEQ ID NO: 1017018 - DNA, 15 bp, Homo sapiens
cgtcccagttgtgtc

SEQ ID NO: 1017019 - DNA, 15 bp, Homo sapiens
gtcccagttgtgtcc

SEQ ID NO: 1017020 - DNA, 15 bp, Homo sapiens
tcccagttgtgtccc

SEQ ID NO: 1017021 - DNA, 15 bp, Homo sapiens
cccagttgtgtccca

SEQ ID NO: 1017022 - DNA, 15 bp, Homo sapiens
ccagttgtgtcccag

SEQ ID NO: 1017023 - DNA, 15 bp, Homo sapiens
cagttgtgtcccaga

SEQ ID NO: 1017024 - DNA, 15 bp, Homo sapiens
agttgtgtcccagag

SEQ ID NO: 1017025 - DNA, 15 bp, Homo sapiens
gttgtgtcccagagt

SEQ ID NO: 1017026 - DNA, 15 bp, Homo sapiens
ttgtgtcccagagtg

SEQ ID NO: 1017027 - DNA, 15 bp, Homo sapiens
tgtgtcccagagtga

SEQ ID NO: 1017028 - DNA, 15 bp, Homo sapiens
gtgtcccagagtgaa

SEQ ID NO: 1017029 - DNA, 15 bp, Homo sapiens
tgtcccagagtgaag

SEQ ID NO: 1017030 - DNA, 15 bp, Homo sapiens
gtcccagagtgaagc

SEQ ID NO: 1017031 - DNA, 15 bp, Homo sapiens
tcccagagtgaagcg

SEQ ID NO: 1017032 - DNA, 15 bp, Homo sapiens
cccagagtgaagcgg

SEQ ID NO: 1017033 - DNA, 15 bp, Homo sapiens
ccagagtgaagcggg

SEQ ID NO: 1017034 - DNA, 15 bp, Homo sapiens
cagagtgaagcggga

SEQ ID NO: 1017035 - DNA, 15 bp, Homo sapiens
agagtgaagcgggag

SEQ ID NO: 1017036 - DNA, 15 bp, Homo sapiens
gagtgaagcgggagt

SEQ ID NO: 1017037 - DNA, 15 bp, Homo sapiens
agtgaagcgggagtc

SEQ ID NO: 1017038 - DNA, 15 bp, Homo sapiens
gtgaagcgggagtct

SEQ ID NO: 1017039 - DNA, 15 bp, Homo sapiens
tgaagcgggagtctt

SEQ ID NO: 1017040 - DNA, 15 bp, Homo sapiens
gaagcgggagtcttt

SEQ ID NO: 1017041 - DNA, 15 bp, Homo sapiens
aagcgggagtctttg

SEQ ID NO: 1017042 - DNA, 15 bp, Homo sapiens
agcgggagtctttgc

SEQ ID NO: 1017043 - DNA, 15 bp, Homo sapiens
gcgggagtctttgcc

SEQ ID NO: 1017044 - DNA, 15 bp, Homo sapiens
cgggagtctttgccc

SEQ ID NO: 1017045 - DNA, 15 bp, Homo sapiens
gggagtctttgcccg

SEQ ID NO: 1017046 - DNA, 15 bp, Homo sapiens
ggagtctttgcccgc

SEQ ID NO: 1017047 - DNA, 15 bp, Homo sapiens
gagtctttgcccgcc

SEQ ID NO: 1017048 - DNA, 15 bp, Homo sapiens
agtctttgcccgccc

SEQ ID NO: 1017049 - DNA, 15 bp, Homo sapiens
gtctttgcccgcccc

SEQ ID NO: 1017050 - DNA, 15 bp, Homo sapiens
tctttgcccgcccca

SEQ ID NO: 1017051 - DNA, 15 bp, Homo sapiens
ctttgcccgccccag

SEQ ID NO: 1017052 - DNA, 15 bp, Homo sapiens
tttgcccgccccagc

SEQ ID NO: 1017053 - DNA, 15 bp, Homo sapiens
ttgcccgccccagcc

SEQ ID NO: 1017054 - DNA, 15 bp, Homo sapiens
tgcccgccccagcca

SEQ ID NO: 1017055 - DNA, 15 bp, Homo sapiens
gcccgccccagccac

SEQ ID NO: 1017056 - DNA, 15 bp, Homo sapiens
cccgccccagccact

SEQ ID NO: 1017057 - DNA, 15 bp, Homo sapiens
ccgccccagccactt

SEQ ID NO: 1017058 - DNA, 15 bp, Homo sapiens
cgccccagccacttc

SEQ ID NO: 1017059 - DNA, 15 bp, Homo sapiens
gccccagccacttcg

SEQ ID NO: 1017060 - DNA, 15 bp, Homo sapiens
ccccagccacttcga

SEQ ID NO: 1017061 - DNA, 15 bp, Homo sapiens
cccagccacttcgag

SEQ ID NO: 1017062 - DNA, 15 bp, Homo sapiens
ccagccacttcgagc

SEQ ID NO: 1017063 - DNA, 15 bp, Homo sapiens
cagccacttcgagct

SEQ ID NO: 1017064 - DNA, 15 bp, Homo sapiens
agccacttcgagctc

SEQ ID NO: 1017065 - DNA, 15 bp, Homo sapiens
gccacttcgagctcc

SEQ ID NO: 1017066 - DNA, 15 bp, Homo sapiens
ccacttcgagctcca

SEQ ID NO: 1017067 - DNA, 15 bp, Homo sapiens
cacttcgagctccac

SEQ ID NO: 1017068 - DNA, 15 bp, Homo sapiens
acttcgagctccact

SEQ ID NO: 1017069 - DNA, 15 bp, Homo sapiens
cttcgagctccactc

SEQ ID NO: 1017070 - DNA, 15 bp, Homo sapiens
ttcgagctccactcc

SEQ ID NO: 1017071 - DNA, 15 bp, Homo sapiens
tcgagctccactcca

SEQ ID NO: 1017072 - DNA, 15 bp, Homo sapiens
cgagctccactccag

SEQ ID NO: 1017073 - DNA, 15 bp, Homo sapiens
gagctccactccagt

SEQ ID NO: 1017074 - DNA, 15 bp, Homo sapiens
agctccactccagtt

SEQ ID NO: 1017075 - DNA, 15 bp, Homo sapiens
gctccactccagttc

SEQ ID NO: 1017076 - DNA, 15 bp, Homo sapiens
ctccactccagttca

SEQ ID NO: 1017077 - DNA, 15 bp, Homo sapiens
tccactccagttcag

SEQ ID NO: 1017078 - DNA, 15 bp, Homo sapiens
ccactccagttcagc

SEQ ID NO: 1017079 - DNA, 15 bp, Homo sapiens
cactccagttcagct

SEQ ID NO: 1017080 - DNA, 15 bp, Homo sapiens
actccagttcagctc

SEQ ID NO: 1017081 - DNA, 15 bp, Homo sapiens
ctccagttcagctcc

SEQ ID NO: 1017082 - DNA, 15 bp, Homo sapiens
tccagttcagctccc

SEQ ID NO: 1017083 - DNA, 15 bp, Homo sapiens
ccagttcagctccca

SEQ ID NO: 1017084 - DNA, 15 bp, Homo sapiens
cagttcagctcccag

SEQ ID NO: 1017085 - DNA, 15 bp, Homo sapiens
agttcagctcccaga

SEQ ID NO: 1017086 - DNA, 15 bp, Homo sapiens
gttcagctcccagag

SEQ ID NO: 1017087 - DNA, 15 bp, Homo sapiens
ttcagctcccagagt

SEQ ID NO: 1017088 - DNA, 15 bp, Homo sapiens
tcagctcccagagtc

SEQ ID NO: 1017089 - DNA, 15 bp, Homo sapiens
cagctcccagagtcg

SEQ ID NO: 1017090 - DNA, 15 bp, Homo sapiens
agctcccagagtcgc

SEQ ID NO: 1017091 - DNA, 15 bp, Homo sapiens
gctcccagagtcgcc

SEQ ID NO: 1017092 - DNA, 15 bp, Homo sapiens
ctcccagagtcgcca

SEQ ID NO: 1017093 - DNA, 15 bp, Homo sapiens
tcccagagtcgccac

SEQ ID NO: 1017094 - DNA, 15 bp, Homo sapiens
cccagagtcgccact

SEQ ID NO: 1017095 - DNA, 15 bp, Homo sapiens
ccagagtcgccactt

SEQ ID NO: 1017096 - DNA, 15 bp, Homo sapiens
cagagtcgccacttg

SEQ ID NO: 1017097 - DNA, 15 bp, Homo sapiens
agagtcgccacttgc

SEQ ID NO: 1017098 - DNA, 15 bp, Homo sapiens
gagtcgccacttgct

SEQ ID NO: 1017099 - DNA, 15 bp, Homo sapiens
agtcgccacttgctg

SEQ ID NO: 1017100 - DNA, 15 bp, Homo sapiens
gtcgccacttgctgc

SEQ ID NO: 1017101 - DNA, 15 bp, Homo sapiens
tcgccacttgctgcg

SEQ ID NO: 1017102 - DNA, 15 bp, Homo sapiens
cgccacttgctgcgc

SEQ ID NO: 1017103 - DNA, 15 bp, Homo sapiens
gccacttgctgcgcg

SEQ ID NO: 1017104 - DNA, 15 bp, Homo sapiens
ccacttgctgcgcgg

SEQ ID NO: 1017105 - DNA, 15 bp, Homo sapiens
cacttgctgcgcggt

SEQ ID NO: 1017106 - DNA, 15 bp, Homo sapiens
acttgctgcgcggtt

SEQ ID NO: 1017107 - DNA, 15 bp, Homo sapiens
cttgctgcgcggttg

SEQ ID NO: 1017108 - DNA, 15 bp, Homo sapiens
ttgctgcgcggttgt

SEQ ID NO: 1017109 - DNA, 15 bp, Homo sapiens
tgctgcgcggttgtt

SEQ ID NO: 1017110 - DNA, 15 bp, Homo sapiens
gctgcgcggttgttg

SEQ ID NO: 1017111 - DNA, 15 bp, Homo sapiens
ctgcgcggttgttgg

SEQ ID NO: 1017112 - DNA, 15 bp, Homo sapiens
tgcgcggttgttggg

SEQ ID NO: 1017113 - DNA, 15 bp, Homo sapiens
gcgcggttgttgggg

SEQ ID NO: 1017114 - DNA, 15 bp, Homo sapiens
cgcggttgttgggga

SEQ ID NO: 1017115 - DNA, 15 bp, Homo sapiens
gcggttgttggggag

SEQ ID NO: 1017116 - DNA, 15 bp, Homo sapiens
cggttgttggggagg

SEQ ID NO: 1017117 - DNA, 15 bp, Homo sapiens
ggttgttggggaggg

SEQ ID NO: 1017118 - DNA, 15 bp, Homo sapiens
gttgttggggagggg

SEQ ID NO: 1017119 - DNA, 15 bp, Homo sapiens
ttgttggggaggggg

SEQ ID NO: 1017120 - DNA, 15 bp, Homo sapiens
tgttggggagggggt

SEQ ID NO: 1017121 - DNA, 15 bp, Homo sapiens
gttggggagggggtt

SEQ ID NO: 1017122 - DNA, 15 bp, Homo sapiens
ttggggagggggttc

SEQ ID NO: 1017123 - DNA, 15 bp, Homo sapiens
tggggagggggttcc

SEQ ID NO: 1017124 - DNA, 15 bp, Homo sapiens
ggggagggggttcct

SEQ ID NO: 1017125 - DNA, 15 bp, Homo sapiens
gggagggggttcctg

SEQ ID NO: 1017126 - DNA, 15 bp, Homo sapiens
ggagggggttcctgg

SEQ ID NO: 1017127 - DNA, 15 bp, Homo sapiens
gagggggttcctggt

SEQ ID NO: 1017128 - DNA, 15 bp, Homo sapiens
agggggttcctggtc

SEQ ID NO: 1017129 - DNA, 15 bp, Homo sapiens
gggggttcctggtcc

SEQ ID NO: 1017130 - DNA, 15 bp, Homo sapiens
ggggttcctggtcca

SEQ ID NO: 1017131 - DNA, 15 bp, Homo sapiens
gggttcctggtccag

SEQ ID NO: 1017132 - DNA, 15 bp, Homo sapiens
ggttcctggtccaga

SEQ ID NO: 1017133 - DNA, 15 bp, Homo sapiens
gttcctggtccagaa

SEQ ID NO: 1017134 - DNA, 15 bp, Homo sapiens
ttcctggtccagaac

SEQ ID NO: 1017135 - DNA, 15 bp, Homo sapiens
tcctggtccagaacg

SEQ ID NO: 1017136 - DNA, 15 bp, Homo sapiens
cctggtccagaacga

SEQ ID NO: 1017137 - DNA, 15 bp, Homo sapiens
ctggtccagaacgag

SEQ ID NO: 1017138 - DNA, 15 bp, Homo sapiens
tggtccagaacgaga

SEQ ID NO: 1017139 - DNA, 15 bp, Homo sapiens
ggtccagaacgagac

SEQ ID NO: 1017140 - DNA, 15 bp, Homo sapiens
gtccagaacgagacg

SEQ ID NO: 1017141 - DNA, 15 bp, Homo sapiens
tccagaacgagacgt

SEQ ID NO: 1017142 - DNA, 15 bp, Homo sapiens
ccagaacgagacgtg

SEQ ID NO: 1017143 - DNA, 15 bp, Homo sapiens
cagaacgagacgtgg

SEQ ID NO: 1017144 - DNA, 15 bp, Homo sapiens
agaacgagacgtggg

SEQ ID NO: 1017145 - DNA, 15 bp, Homo sapiens
gaacgagacgtgggg

SEQ ID NO: 1017146 - DNA, 15 bp, Homo sapiens
aacgagacgtggggg

SEQ ID NO: 1017147 - DNA, 15 bp, Homo sapiens
acgagacgtgggggg

SEQ ID NO: 1017148 - DNA, 15 bp, Homo sapiens
cgagacgtggggggc

SEQ ID NO: 1017149 - DNA, 15 bp, Homo sapiens
gagacgtggggggct

SEQ ID NO: 1017150 - DNA, 15 bp, Homo sapiens
agacgtggggggctg

SEQ ID NO: 1017151 - DNA, 15 bp, Homo sapiens
gacgtggggggctgg

SEQ ID NO: 1017152 - DNA, 15 bp, Homo sapiens
acgtggggggctggg

SEQ ID NO: 1017153 - DNA, 15 bp, Homo sapiens
cgtggggggctgggg

SEQ ID NO: 1017154 - DNA, 15 bp, Homo sapiens
gtggggggctggggg

SEQ ID NO: 1017155 - DNA, 15 bp, Homo sapiens
tggggggctgggggt

SEQ ID NO: 1017156 - DNA, 15 bp, Homo sapiens
ggggggctgggggtt

SEQ ID NO: 1017157 - DNA, 15 bp, Homo sapiens
gggggctgggggttt

SEQ ID NO: 1017158 - DNA, 15 bp, Homo sapiens
ggggctgggggtttc

SEQ ID NO: 1017159 - DNA, 15 bp, Homo sapiens
gggctgggggtttcc

SEQ ID NO: 1017160 - DNA, 15 bp, Homo sapiens
ggctgggggtttcct

SEQ ID NO: 1017161 - DNA, 15 bp, Homo sapiens
gctgggggtttcctc

SEQ ID NO: 1017162 - DNA, 15 bp, Homo sapiens
ctgggggtttcctcg

SEQ ID NO: 1017163 - DNA, 15 bp, Homo sapiens
tgggggtttcctcga

SEQ ID NO: 1017164 - DNA, 15 bp, Homo sapiens
gggggtttcctcgag

SEQ ID NO: 1017165 - DNA, 15 bp, Homo sapiens
ggggtttcctcgaga

SEQ ID NO: 1017166 - DNA, 15 bp, Homo sapiens
gggtttcctcgagaa

SEQ ID NO: 1017167 - DNA, 15 bp, Homo sapiens
ggtttcctcgagaac

SEQ ID NO: 1017168 - DNA, 15 bp, Homo sapiens
gtttcctcgagaact

SEQ ID NO: 1017169 - DNA, 15 bp, Homo sapiens
tttcctcgagaactg

SEQ ID NO: 1017170 - DNA, 15 bp, Homo sapiens
ttcctcgagaactgc

SEQ ID NO: 1017171 - DNA, 15 bp, Homo sapiens
tcctcgagaactgca

SEQ ID NO: 1017172 - DNA, 15 bp, Homo sapiens
cctcgagaactgcag

SEQ ID NO: 1017173 - DNA, 15 bp, Homo sapiens
ctcgagaactgcagg

SEQ ID NO: 1017174 - DNA, 15 bp, Homo sapiens
tcgagaactgcaggc

SEQ ID NO: 1017175 - DNA, 15 bp, Homo sapiens
cgagaactgcaggcc

SEQ ID NO: 1017176 - DNA, 15 bp, Homo sapiens
gagaactgcaggcct

SEQ ID NO: 1017177 - DNA, 15 bp, Homo sapiens
agaactgcaggcctg

SEQ ID NO: 1017178 - DNA, 15 bp, Homo sapiens
gaactgcaggcctgg

SEQ ID NO: 1017179 - DNA, 15 bp, Homo sapiens
aactgcaggcctggt

SEQ ID NO: 1017180 - DNA, 15 bp, Homo sapiens
actgcaggcctggtt

SEQ ID NO: 1017181 - DNA, 15 bp, Homo sapiens
ctgcaggcctggttg

SEQ ID NO: 1017182 - DNA, 15 bp, Homo sapiens
tgcaggcctggttgc

SEQ ID NO: 1017183 - DNA, 15 bp, Homo sapiens
gcaggcctggttgcc

SEQ ID NO: 1017184 - DNA, 15 bp, Homo sapiens
caggcctggttgccc

SEQ ID NO: 1017185 - DNA, 15 bp, Homo sapiens
aggcctggttgcccc

SEQ ID NO: 1017186 - DNA, 15 bp, Homo sapiens
ggcctggttgccccc

SEQ ID NO: 1017187 - DNA, 15 bp, Homo sapiens
gcctggttgcccccg

SEQ ID NO: 1017188 - DNA, 15 bp, Homo sapiens
cctggttgcccccgg

SEQ ID NO: 1017189 - DNA, 15 bp, Homo sapiens
ctggttgcccccgga

SEQ ID NO: 1017190 - DNA, 15 bp, Homo sapiens
tggttgcccccggac

SEQ ID NO: 1017191 - DNA, 15 bp, Homo sapiens
ggttgcccccggact

SEQ ID NO: 1017192 - DNA, 15 bp, Homo sapiens
gttgcccccggactg

SEQ ID NO: 1017193 - DNA, 15 bp, Homo sapiens
ttgcccccggactgt

SEQ ID NO: 1017194 - DNA, 15 bp, Homo sapiens
tgcccccggactgtc

SEQ ID NO: 1017195 - DNA, 15 bp, Homo sapiens
gcccccggactgtca

SEQ ID NO: 1017196 - DNA, 15 bp, Homo sapiens
cccccggactgtcag

SEQ ID NO: 1017197 - DNA, 15 bp, Homo sapiens
ccccggactgtcaga

SEQ ID NO: 1017198 - DNA, 15 bp, Homo sapiens
cccggactgtcagag

SEQ ID NO: 1017199 - DNA, 15 bp, Homo sapiens
ccggactgtcagagc

SEQ ID NO: 1017200 - DNA, 15 bp, Homo sapiens
cggactgtcagagcc

SEQ ID NO: 1017201 - DNA, 15 bp, Homo sapiens
ggactgtcagagccg

SEQ ID NO: 1017202 - DNA, 15 bp, Homo sapiens
gactgtcagagccgg

SEQ ID NO: 1017203 - DNA, 15 bp, Homo sapiens
actgtcagagccgga

SEQ ID NO: 1017204 - DNA, 15 bp, Homo sapiens
ctgtcagagccggag

SEQ ID NO: 1017205 - DNA, 15 bp, Homo sapiens
tgtcagagccggagg

SEQ ID NO: 1017206 - DNA, 15 bp, Homo sapiens
gtcagagccggaggc

SEQ ID NO: 1017207 - DNA, 15 bp, Homo sapiens
tcagagccggaggcc

SEQ ID NO: 1017208 - DNA, 15 bp, Homo sapiens
cagagccggaggccg

SEQ ID NO: 1017209 - DNA, 15 bp, Homo sapiens
agagccggaggccgg

SEQ ID NO: 1017210 - DNA, 15 bp, Homo sapiens
gagccggaggccggg

SEQ ID NO: 1017211 - DNA, 15 bp, Homo sapiens
agccggaggccgggg

SEQ ID NO: 1017212 - DNA, 15 bp, Homo sapiens
gccggaggccgggga

SEQ ID NO: 1017213 - DNA, 15 bp, Homo sapiens
ccggaggccggggag

SEQ ID NO: 1017214 - DNA, 15 bp, Homo sapiens
cggaggccggggagc

SEQ ID NO: 1017215 - DNA, 15 bp, Homo sapiens
ggaggccggggagct

SEQ ID NO: 1017216 - DNA, 15 bp, Homo sapiens
gaggccggggagctg

SEQ ID NO: 1017217 - DNA, 15 bp, Homo sapiens
aggccggggagctgc

SEQ ID NO: 1017218 - DNA, 15 bp, Homo sapiens
ggccggggagctgcc

SEQ ID NO: 1017219 - DNA, 15 bp, Homo sapiens
gccggggagctgcca

SEQ ID NO: 1017220 - DNA, 15 bp, Homo sapiens
ccggggagctgccag

SEQ ID NO: 1017221 - DNA, 15 bp, Homo sapiens
cggggagctgccagc

SEQ ID NO: 1017222 - DNA, 15 bp, Homo sapiens
ggggagctgccagcc

SEQ ID NO: 1017223 - DNA, 15 bp, Homo sapiens
gggagctgccagcca

SEQ ID NO: 1017224 - DNA, 15 bp, Homo sapiens
ggagctgccagccac

SEQ ID NO: 1017225 - DNA, 15 bp, Homo sapiens
gagctgccagccacg

SEQ ID NO: 1017226 - DNA, 15 bp, Homo sapiens
agctgccagccacgt

SEQ ID NO: 1017227 - DNA, 15 bp, Homo sapiens
gctgccagccacgtg

SEQ ID NO: 1017228 - DNA, 15 bp, Homo sapiens
ctgccagccacgtgc

SEQ ID NO: 1017229 - DNA, 15 bp, Homo sapiens
tgccagccacgtgcg

SEQ ID NO: 1017230 - DNA, 15 bp, Homo sapiens
gccagccacgtgcgc

SEQ ID NO: 1017231 - DNA, 15 bp, Homo sapiens
ccagccacgtgcgcc

SEQ ID NO: 1017232 - DNA, 15 bp, Homo sapiens
cagccacgtgcgcct

SEQ ID NO: 1017233 - DNA, 15 bp, Homo sapiens
agccacgtgcgcctg

SEQ ID NO: 1017234 - DNA, 15 bp, Homo sapiens
gccacgtgcgcctgt

SEQ ID NO: 1017235 - DNA, 15 bp, Homo sapiens
ccacgtgcgcctgtg

SEQ ID NO: 1017236 - DNA, 15 bp, Homo sapiens
cacgtgcgcctgtgg

SEQ ID NO: 1017237 - DNA, 15 bp, Homo sapiens
acgtgcgcctgtggc

SEQ ID NO: 1017238 - DNA, 15 bp, Homo sapiens
cgtgcgcctgtggcc

SEQ ID NO: 1017239 - DNA, 15 bp, Homo sapiens
gtgcgcctgtggcct

SEQ ID NO: 1017240 - DNA, 15 bp, Homo sapiens
tgcgcctgtggcctg

SEQ ID NO: 1017241 - DNA, 15 bp, Homo sapiens
gcgcctgtggcctgc

SEQ ID NO: 1017242 - DNA, 15 bp, Homo sapiens
cgcctgtggcctgct

SEQ ID NO: 1017243 - DNA, 15 bp, Homo sapiens
gcctgtggcctgctg

SEQ ID NO: 1017244 - DNA, 15 bp, Homo sapiens
cctgtggcctgctga

SEQ ID NO: 1017245 - DNA, 15 bp, Homo sapiens
ctgtggcctgctgag

SEQ ID NO: 1017246 - DNA, 15 bp, Homo sapiens
tgtggcctgctgaga

SEQ ID NO: 1017247 - DNA, 15 bp, Homo sapiens
gtggcctgctgagag

SEQ ID NO: 1017248 - DNA, 15 bp, Homo sapiens
tggcctgctgagagg

SEQ ID NO: 1017249 - DNA, 15 bp, Homo sapiens
ggcctgctgagaggt

SEQ ID NO: 1017250 - DNA, 15 bp, Homo sapiens
gcctgctgagaggtt

SEQ ID NO: 1017251 - DNA, 15 bp, Homo sapiens
cctgctgagaggttg

SEQ ID NO: 1017252 - DNA, 15 bp, Homo sapiens
ctgctgagaggttga

SEQ ID NO: 1017253 - DNA, 15 bp, Homo sapiens
tgctgagaggttgaa

SEQ ID NO: 1017254 - DNA, 15 bp, Homo sapiens
gctgagaggttgaaa

SEQ ID NO: 1017255 - DNA, 15 bp, Homo sapiens
ctgagaggttgaaaa

SEQ ID NO: 1017256 - DNA, 15 bp, Homo sapiens
tgagaggttgaaaag

SEQ ID NO: 1017257 - DNA, 15 bp, Homo sapiens
gagaggttgaaaagc

SEQ ID NO: 1017258 - DNA, 15 bp, Homo sapiens
agaggttgaaaagct

SEQ ID NO: 1017259 - DNA, 15 bp, Homo sapiens
gaggttgaaaagctg

SEQ ID NO: 1017260 - DNA, 15 bp, Homo sapiens
aggttgaaaagctgc

SEQ ID NO: 1017261 - DNA, 15 bp, Homo sapiens
ggttgaaaagctgcc

SEQ ID NO: 1017262 - DNA, 15 bp, Homo sapiens
gttgaaaagctgcca

SEQ ID NO: 1017263 - DNA, 15 bp, Homo sapiens
ttgaaaagctgccaa

SEQ ID NO: 1017264 - DNA, 15 bp, Homo sapiens
tgaaaagctgccaag

SEQ ID NO: 1017265 - DNA, 15 bp, Homo sapiens
gaaaagctgccaagg

SEQ ID NO: 1017266 - DNA, 15 bp, Homo sapiens
aaaagctgccaaggg

SEQ ID NO: 1017267 - DNA, 15 bp, Homo sapiens
aaagctgccaaggga

SEQ ID NO: 1017268 - DNA, 15 bp, Homo sapiens
aagctgccaagggac

SEQ ID NO: 1017269 - DNA, 15 bp, Homo sapiens
agctgccaagggacg

SEQ ID NO: 1017270 - DNA, 15 bp, Homo sapiens
gctgccaagggacga

SEQ ID NO: 1017271 - DNA, 15 bp, Homo sapiens
ctgccaagggacgaa

SEQ ID NO: 1017272 - DNA, 15 bp, Homo sapiens
tgccaagggacgaag

SEQ ID NO: 1017273 - DNA, 15 bp, Homo sapiens
gccaagggacgaagg

SEQ ID NO: 1017274 - DNA, 15 bp, Homo sapiens
ccaagggacgaaggc

SEQ ID NO: 1017275 - DNA, 15 bp, Homo sapiens
caagggacgaaggcc

SEQ ID NO: 1017276 - DNA, 15 bp, Homo sapiens
aagggacgaaggccg

SEQ ID NO: 1017277 - DNA, 15 bp, Homo sapiens
agggacgaaggccga

SEQ ID NO: 1017278 - DNA, 15 bp, Homo sapiens
gggacgaaggccgag

SEQ ID NO: 1017279 - DNA, 15 bp, Homo sapiens
ggacgaaggccgaga

SEQ ID NO: 1017280 - DNA, 15 bp, Homo sapiens
gacgaaggccgagaa

SEQ ID NO: 1017281 - DNA, 15 bp, Homo sapiens
acgaaggccgagaag

SEQ ID NO: 1017282 - DNA, 15 bp, Homo sapiens
cgaaggccgagaaga

SEQ ID NO: 1017283 - DNA, 15 bp, Homo sapiens
gaaggccgagaagac

SEQ ID NO: 1017284 - DNA, 15 bp, Homo sapiens
aaggccgagaagaca

SEQ ID NO: 1017285 - DNA, 15 bp, Homo sapiens
aggccgagaagacag

SEQ ID NO: 1017286 - DNA, 15 bp, Homo sapiens
ggccgagaagacagg

SEQ ID NO: 1017287 - DNA, 15 bp, Homo sapiens
gccgagaagacagga

SEQ ID NO: 1017288 - DNA, 15 bp, Homo sapiens
ccgagaagacaggac

SEQ ID NO: 1017289 - DNA, 15 bp, Homo sapiens
cgagaagacaggacc

SEQ ID NO: 1017290 - DNA, 15 bp, Homo sapiens
gagaagacaggacct

SEQ ID NO: 1017291 - DNA, 15 bp, Homo sapiens
agaagacaggaccta

SEQ ID NO: 1017292 - DNA, 15 bp, Homo sapiens
gaagacaggacctag

SEQ ID NO: 1017293 - DNA, 15 bp, Homo sapiens
aagacaggacctagg

SEQ ID NO: 1017294 - DNA, 15 bp, Homo sapiens
agacaggacctaggg

SEQ ID NO: 1017295 - DNA, 15 bp, Homo sapiens
gacaggacctagggg

SEQ ID NO: 1017296 - DNA, 15 bp, Homo sapiens
acaggacctaggggc

SEQ ID NO: 1017297 - DNA, 15 bp, Homo sapiens
caggacctaggggct

SEQ ID NO: 1017298 - DNA, 15 bp, Homo sapiens
aggacctaggggctg

SEQ ID NO: 1017299 - DNA, 15 bp, Homo sapiens
ggacctaggggctgt

SEQ ID NO: 1017300 - DNA, 15 bp, Homo sapiens
gacctaggggctgtg

SEQ ID NO: 1017301 - DNA, 15 bp, Homo sapiens
acctaggggctgtgg

SEQ ID NO: 1017302 - DNA, 15 bp, Homo sapiens
cctaggggctgtgga

SEQ ID NO: 1017303 - DNA, 15 bp, Homo sapiens
ctaggggctgtggaa

SEQ ID NO: 1017304 - DNA, 15 bp, Homo sapiens
taggggctgtggaag

SEQ ID NO: 1017305 - DNA, 15 bp, Homo sapiens
aggggctgtggaaga

SEQ ID NO: 1017306 - DNA, 15 bp, Homo sapiens
ggggctgtggaagat

SEQ ID NO: 1017307 - DNA, 15 bp, Homo sapiens
gggctgtggaagatt

SEQ ID NO: 1017308 - DNA, 15 bp, Homo sapiens
ggctgtggaagattc

SEQ ID NO: 1017309 - DNA, 15 bp, Homo sapiens
gctgtggaagattca

SEQ ID NO: 1017310 - DNA, 15 bp, Homo sapiens
ctgtggaagattcac

SEQ ID NO: 1017311 - DNA, 15 bp, Homo sapiens
tgtggaagattcacc

SEQ ID NO: 1017312 - DNA, 15 bp, Homo sapiens
gtggaagattcaccc

SEQ ID NO: 1017313 - DNA, 15 bp, Homo sapiens
tggaagattcaccca

SEQ ID NO: 1017314 - DNA, 15 bp, Homo sapiens
ggaagattcacccaa

SEQ ID NO: 1017315 - DNA, 15 bp, Homo sapiens
gaagattcacccaac

SEQ ID NO: 1017316 - DNA, 15 bp, Homo sapiens
aagattcacccaact

SEQ ID NO: 1017317 - DNA, 15 bp, Homo sapiens
agattcacccaactc

SEQ ID NO: 1017318 - DNA, 15 bp, Homo sapiens
gattcacccaactct

SEQ ID NO: 1017319 - DNA, 15 bp, Homo sapiens
attcacccaactctt

SEQ ID NO: 1017320 - DNA, 15 bp, Homo sapiens
ttcacccaactcttc

SEQ ID NO: 1017321 - DNA, 15 bp, Homo sapiens
tcacccaactcttcc

SEQ ID NO: 1017322 - DNA, 15 bp, Homo sapiens
cacccaactcttcct

SEQ ID NO: 1017323 - DNA, 15 bp, Homo sapiens
acccaactcttcctt

SEQ ID NO: 1017324 - DNA, 15 bp, Homo sapiens
cccaactcttccttt

SEQ ID NO: 1017325 - DNA, 15 bp, Homo sapiens
ccaactcttcctttt

SEQ ID NO: 1017326 - DNA, 15 bp, Homo sapiens
caactcttcctttta

SEQ ID NO: 1017327 - DNA, 15 bp, Homo sapiens
aactcttccttttac

SEQ ID NO: 1017328 - DNA, 15 bp, Homo sapiens
actcttccttttact

SEQ ID NO: 1017329 - DNA, 15 bp, Homo sapiens
ctcttccttttactc

SEQ ID NO: 1017330 - DNA, 15 bp, Homo sapiens
tcttccttttactca

SEQ ID NO: 1017331 - DNA, 15 bp, Homo sapiens
cttccttttactcag

SEQ ID NO: 1017332 - DNA, 15 bp, Homo sapiens
ttccttttactcagg

SEQ ID NO: 1017333 - DNA, 15 bp, Homo sapiens
tccttttactcaggt

SEQ ID NO: 1017334 - DNA, 15 bp, Homo sapiens
ccttttactcaggtc

SEQ ID NO: 1017335 - DNA, 15 bp, Homo sapiens
cttttactcaggtct

SEQ ID NO: 1017336 - DNA, 15 bp, Homo sapiens
ttttactcaggtctt

SEQ ID NO: 1017337 - DNA, 15 bp, Homo sapiens
tttactcaggtcttg

SEQ ID NO: 1017338 - DNA, 15 bp, Homo sapiens
ttactcaggtcttgg

SEQ ID NO: 1017339 - DNA, 15 bp, Homo sapiens
tactcaggtcttggg

SEQ ID NO: 1017340 - DNA, 15 bp, Homo sapiens
actcaggtcttggga

SEQ ID NO: 1017341 - DNA, 15 bp, Homo sapiens
ctcaggtcttgggac

SEQ ID NO: 1017342 - DNA, 15 bp, Homo sapiens
tcaggtcttgggacc

SEQ ID NO: 1017343 - DNA, 15 bp, Homo sapiens
caggtcttgggacct

SEQ ID NO: 1017344 - DNA, 15 bp, Homo sapiens
aggtcttgggaccta

SEQ ID NO: 1017345 - DNA, 15 bp, Homo sapiens
ggtcttgggacctaa

SEQ ID NO: 1017346 - DNA, 15 bp, Homo sapiens
gtcttgggacctaag

SEQ ID NO: 1017347 - DNA, 15 bp, Homo sapiens
tcttgggacctaaga

SEQ ID NO: 1017348 - DNA, 15 bp, Homo sapiens
cttgggacctaagag

SEQ ID NO: 1017349 - DNA, 15 bp, Homo sapiens
ttgggacctaagagg

SEQ ID NO: 1017350 - DNA, 15 bp, Homo sapiens
tgggacctaagaggg

SEQ ID NO: 1017351 - DNA, 15 bp, Homo sapiens
gggacctaagagggg

SEQ ID NO: 1017352 - DNA, 15 bp, Homo sapiens
ggacctaagaggggg

SEQ ID NO: 1017353 - DNA, 15 bp, Homo sapiens
gacctaagagggggt

SEQ ID NO: 1017354 - DNA, 15 bp, Homo sapiens
acctaagagggggtg

SEQ ID NO: 1017355 - DNA, 15 bp, Homo sapiens
cctaagagggggtgg

SEQ ID NO: 1017356 - DNA, 15 bp, Homo sapiens
ctaagagggggtggg

SEQ ID NO: 1017357 - DNA, 15 bp, Homo sapiens
taagagggggtgggg

SEQ ID NO: 1017358 - DNA, 15 bp, Homo sapiens
aagagggggtgggga

SEQ ID NO: 1017359 - DNA, 15 bp, Homo sapiens
agagggggtggggat

SEQ ID NO: 1017360 - DNA, 15 bp, Homo sapiens
gagggggtggggata

SEQ ID NO: 1017361 - DNA, 15 bp, Homo sapiens
agggggtggggatag

SEQ ID NO: 1017362 - DNA, 15 bp, Homo sapiens
gggggtggggatagt

SEQ ID NO: 1017363 - DNA, 15 bp, Homo sapiens
ggggtggggatagtc

SEQ ID NO: 1017364 - DNA, 15 bp, Homo sapiens
gggtggggatagtca

SEQ ID NO: 1017365 - DNA, 15 bp, Homo sapiens
ggtggggatagtcat

SEQ ID NO: 1017366 - DNA, 15 bp, Homo sapiens
gtggggatagtcatg

SEQ ID NO: 1017367 - DNA, 15 bp, Homo sapiens
tggggatagtcatga

SEQ ID NO: 1017368 - DNA, 15 bp, Homo sapiens
ggggatagtcatgat

SEQ ID NO: 1017369 - DNA, 15 bp, Homo sapiens
gggatagtcatgata

SEQ ID NO: 1017370 - DNA, 15 bp, Homo sapiens
ggatagtcatgataa

SEQ ID NO: 1017371 - DNA, 15 bp, Homo sapiens
gatagtcatgataat

SEQ ID NO: 1017372 - DNA, 15 bp, Homo sapiens
atagtcatgataata

SEQ ID NO: 1017373 - DNA, 15 bp, Homo sapiens
tagtcatgataataa

SEQ ID NO: 1017374 - DNA, 15 bp, Homo sapiens
agtcatgataataac

SEQ ID NO: 1017375 - DNA, 15 bp, Homo sapiens
gtcatgataataact

SEQ ID NO: 1017376 - DNA, 15 bp, Homo sapiens
tcatgataataacta

SEQ ID NO: 1017377 - DNA, 15 bp, Homo sapiens
catgataataactac

SEQ ID NO: 1017378 - DNA, 15 bp, Homo sapiens
atgataataactacc

SEQ ID NO: 1017379 - DNA, 15 bp, Homo sapiens
tgataataactaccg

SEQ ID NO: 1017380 - DNA, 15 bp, Homo sapiens
gataataactaccgc

SEQ ID NO: 1017381 - DNA, 15 bp, Homo sapiens
ataataactaccgca

SEQ ID NO: 1017382 - DNA, 15 bp, Homo sapiens
taataactaccgcaa

SEQ ID NO: 1017383 - DNA, 15 bp, Homo sapiens
aataactaccgcaat

SEQ ID NO: 1017384 - DNA, 15 bp, Homo sapiens
ataactaccgcaatc

SEQ ID NO: 1017385 - DNA, 15 bp, Homo sapiens
taactaccgcaatct

SEQ ID NO: 1017386 - DNA, 15 bp, Homo sapiens
aactaccgcaatctc

SEQ ID NO: 1017387 - DNA, 15 bp, Homo sapiens
actaccgcaatctcc

SEQ ID NO: 1017388 - DNA, 15 bp, Homo sapiens
ctaccgcaatctcca

SEQ ID NO: 1017389 - DNA, 15 bp, Homo sapiens
taccgcaatctccag

SEQ ID NO: 1017390 - DNA, 15 bp, Homo sapiens
accgcaatctccagt

SEQ ID NO: 1017391 - DNA, 15 bp, Homo sapiens
ccgcaatctccagtg

SEQ ID NO: 1017392 - DNA, 15 bp, Homo sapiens
cgcaatctccagtgc

SEQ ID NO: 1017393 - DNA, 15 bp, Homo sapiens
gcaatctccagtgct

SEQ ID NO: 1017394 - DNA, 15 bp, Homo sapiens
caatctccagtgctg

SEQ ID NO: 1017395 - DNA, 15 bp, Homo sapiens
aatctccagtgctgg

SEQ ID NO: 1017396 - DNA, 15 bp, Homo sapiens
atctccagtgctggc

SEQ ID NO: 1017397 - DNA, 15 bp, Homo sapiens
tctccagtgctggca

SEQ ID NO: 1017398 - DNA, 15 bp, Homo sapiens
ctccagtgctggcac

SEQ ID NO: 1017399 - DNA, 15 bp, Homo sapiens
tccagtgctggcact

SEQ ID NO: 1017400 - DNA, 15 bp, Homo sapiens
ccagtgctggcactg

SEQ ID NO: 1017401 - DNA, 15 bp, Homo sapiens
cagtgctggcactga

SEQ ID NO: 1017402 - DNA, 15 bp, Homo sapiens
agtgctggcactgag

SEQ ID NO: 1017403 - DNA, 15 bp, Homo sapiens
gtgctggcactgagc

SEQ ID NO: 1017404 - DNA, 15 bp, Homo sapiens
tgctggcactgagct

SEQ ID NO: 1017405 - DNA, 15 bp, Homo sapiens
gctggcactgagctg

SEQ ID NO: 1017406 - DNA, 15 bp, Homo sapiens
ctggcactgagctga

SEQ ID NO: 1017407 - DNA, 15 bp, Homo sapiens
tggcactgagctgaa

SEQ ID NO: 1017408 - DNA, 15 bp, Homo sapiens
ggcactgagctgaaa

SEQ ID NO: 1017409 - DNA, 15 bp, Homo sapiens
gcactgagctgaaaa

SEQ ID NO: 1017410 - DNA, 15 bp, Homo sapiens
cactgagctgaaaaa

SEQ ID NO: 1017411 - DNA, 15 bp, Homo sapiens
actgagctgaaaaac

SEQ ID NO: 1017412 - DNA, 15 bp, Homo sapiens
ctgagctgaaaaaca

SEQ ID NO: 1017413 - DNA, 15 bp, Homo sapiens
tgagctgaaaaacat

SEQ ID NO: 1017414 - DNA, 15 bp, Homo sapiens
gagctgaaaaacatt

SEQ ID NO: 1017415 - DNA, 15 bp, Homo sapiens
agctgaaaaacattc

SEQ ID NO: 1017416 - DNA, 15 bp, Homo sapiens
gctgaaaaacattca

SEQ ID NO: 1017417 - DNA, 15 bp, Homo sapiens
ctgaaaaacattcaa

SEQ ID NO: 1017418 - DNA, 15 bp, Homo sapiens
tgaaaaacattcaaa

SEQ ID NO: 1017419 - DNA, 15 bp, Homo sapiens
gaaaaacattcaaag

SEQ ID NO: 1017420 - DNA, 15 bp, Homo sapiens
aaaaacattcaaagc

SEQ ID NO: 1017421 - DNA, 15 bp, Homo sapiens
aaaacattcaaagct

SEQ ID NO: 1017422 - DNA, 15 bp, Homo sapiens
aaacattcaaagctt

SEQ ID NO: 1017423 - DNA, 15 bp, Homo sapiens
aacattcaaagcttt

SEQ ID NO: 1017424 - DNA, 15 bp, Homo sapiens
acattcaaagctttc

SEQ ID NO: 1017425 - DNA, 15 bp, Homo sapiens
cattcaaagctttca

SEQ ID NO: 1017426 - DNA, 15 bp, Homo sapiens
attcaaagctttcaa

SEQ ID NO: 1017427 - DNA, 15 bp, Homo sapiens
ttcaaagctttcaaa

SEQ ID NO: 1017428 - DNA, 15 bp, Homo sapiens
tcaaagctttcaaag

SEQ ID NO: 1017429 - DNA, 15 bp, Homo sapiens
caaagctttcaaagc

SEQ ID NO: 1017430 - DNA, 15 bp, Homo sapiens
aaagctttcaaagca

SEQ ID NO: 1017431 - DNA, 15 bp, Homo sapiens
aagctttcaaagcat

SEQ ID NO: 1017432 - DNA, 15 bp, Homo sapiens
agctttcaaagcatt

SEQ ID NO: 1017433 - DNA, 15 bp, Homo sapiens
gctttcaaagcattt

SEQ ID NO: 1017434 - DNA, 15 bp, Homo sapiens
ctttcaaagcatttt

SEQ ID NO: 1017435 - DNA, 15 bp, Homo sapiens
tttcaaagcattttg

SEQ ID NO: 1017436 - DNA, 15 bp, Homo sapiens
ttcaaagcattttga

SEQ ID NO: 1017437 - DNA, 15 bp, Homo sapiens
tcaaagcattttgat

SEQ ID NO: 1017438 - DNA, 15 bp, Homo sapiens
caaagcattttgatg

SEQ ID NO: 1017439 - DNA, 15 bp, Homo sapiens
aaagcattttgatgt

SEQ ID NO: 1017440 - DNA, 15 bp, Homo sapiens
aagcattttgatgtg

SEQ ID NO: 1017441 - DNA, 15 bp, Homo sapiens
agcattttgatgtgc

SEQ ID NO: 1017442 - DNA, 15 bp, Homo sapiens
gcattttgatgtgct

SEQ ID NO: 1017443 - DNA, 15 bp, Homo sapiens
cattttgatgtgctt

SEQ ID NO: 1017444 - DNA, 15 bp, Homo sapiens
attttgatgtgcttc

SEQ ID NO: 1017445 - DNA, 15 bp, Homo sapiens
ttttgatgtgcttca

SEQ ID NO: 1017446 - DNA, 15 bp, Homo sapiens
tttgatgtgcttcat

SEQ ID NO: 1017447 - DNA, 15 bp, Homo sapiens
ttgatgtgcttcatc

SEQ ID NO: 1017448 - DNA, 15 bp, Homo sapiens
tgatgtgcttcatct

SEQ ID NO: 1017449 - DNA, 15 bp, Homo sapiens
gatgtgcttcatctt

SEQ ID NO: 1017450 - DNA, 15 bp, Homo sapiens
atgtgcttcatctta

SEQ ID NO: 1017451 - DNA, 15 bp, Homo sapiens
tgtgcttcatcttac

SEQ ID NO: 1017452 - DNA, 15 bp, Homo sapiens
gtgcttcatcttact

SEQ ID NO: 1017453 - DNA, 15 bp, Homo sapiens
tgcttcatcttactt

SEQ ID NO: 1017454 - DNA, 15 bp, Homo sapiens
gcttcatcttacttg

SEQ ID NO: 1017455 - DNA, 15 bp, Homo sapiens
cttcatcttacttga

SEQ ID NO: 1017456 - DNA, 15 bp, Homo sapiens
ttcatcttacttgaa

SEQ ID NO: 1017457 - DNA, 15 bp, Homo sapiens
tcatcttacttgaat

SEQ ID NO: 1017458 - DNA, 15 bp, Homo sapiens
catcttacttgaatc

SEQ ID NO: 1017459 - DNA, 15 bp, Homo sapiens
atcttacttgaatct

SEQ ID NO: 1017460 - DNA, 15 bp, Homo sapiens
tcttacttgaatctc

SEQ ID NO: 1017461 - DNA, 15 bp, Homo sapiens
cttacttgaatctca

SEQ ID NO: 1017462 - DNA, 15 bp, Homo sapiens
ttacttgaatctcac

SEQ ID NO: 1017463 - DNA, 15 bp, Homo sapiens
tacttgaatctcaca

SEQ ID NO: 1017464 - DNA, 15 bp, Homo sapiens
acttgaatctcacaa

SEQ ID NO: 1017465 - DNA, 15 bp, Homo sapiens
cttgaatctcacaaa

SEQ ID NO: 1017466 - DNA, 15 bp, Homo sapiens
ttgaatctcacaaaa

SEQ ID NO: 1017467 - DNA, 15 bp, Homo sapiens
tgaatctcacaaaaa

SEQ ID NO: 1017468 - DNA, 15 bp, Homo sapiens
gaatctcacaaaaac

SEQ ID NO: 1017469 - DNA, 15 bp, Homo sapiens
aatctcacaaaaacc

SEQ ID NO: 1017470 - DNA, 15 bp, Homo sapiens
atctcacaaaaacct

SEQ ID NO: 1017471 - DNA, 15 bp, Homo sapiens
tctcacaaaaacctt

SEQ ID NO: 1017472 - DNA, 15 bp, Homo sapiens
ctcacaaaaaccttg

SEQ ID NO: 1017473 - DNA, 15 bp, Homo sapiens
tcacaaaaaccttgt

SEQ ID NO: 1017474 - DNA, 15 bp, Homo sapiens
cacaaaaaccttgtg

SEQ ID NO: 1017475 - DNA, 15 bp, Homo sapiens
acaaaaaccttgtga

SEQ ID NO: 1017476 - DNA, 15 bp, Homo sapiens
caaaaaccttgtgaa

SEQ ID NO: 1017477 - DNA, 15 bp, Homo sapiens
aaaaaccttgtgaag

SEQ ID NO: 1017478 - DNA, 15 bp, Homo sapiens
aaaaccttgtgaaga

SEQ ID NO: 1017479 - DNA, 15 bp, Homo sapiens
aaaccttgtgaagat

SEQ ID NO: 1017480 - DNA, 15 bp, Homo sapiens
aaccttgtgaagatt

SEQ ID NO: 1017481 - DNA, 15 bp, Homo sapiens
accttgtgaagattg

SEQ ID NO: 1017482 - DNA, 15 bp, Homo sapiens
ccttgtgaagattga

SEQ ID NO: 1017483 - DNA, 15 bp, Homo sapiens
cttgtgaagattgat

SEQ ID NO: 1017484 - DNA, 15 bp, Homo sapiens
ttgtgaagattgatc

SEQ ID NO: 1017485 - DNA, 15 bp, Homo sapiens
tgtgaagattgatct

SEQ ID NO: 1017486 - DNA, 15 bp, Homo sapiens
gtgaagattgatctc

SEQ ID NO: 1017487 - DNA, 15 bp, Homo sapiens
tgaagattgatctcc

SEQ ID NO: 1017488 - DNA, 15 bp, Homo sapiens
gaagattgatctcca

SEQ ID NO: 1017489 - DNA, 15 bp, Homo sapiens
aagattgatctccat

SEQ ID NO: 1017490 - DNA, 15 bp, Homo sapiens
agattgatctccatt

SEQ ID NO: 1017491 - DNA, 15 bp, Homo sapiens
gattgatctccattt

SEQ ID NO: 1017492 - DNA, 15 bp, Homo sapiens
attgatctccatttc

SEQ ID NO: 1017493 - DNA, 15 bp, Homo sapiens
ttgatctccatttct

SEQ ID NO: 1017494 - DNA, 15 bp, Homo sapiens
tgatctccatttcta

SEQ ID NO: 1017495 - DNA, 15 bp, Homo sapiens
gatctccatttctaa

SEQ ID NO: 1017496 - DNA, 15 bp, Homo sapiens
atctccatttctaaa

SEQ ID NO: 1017497 - DNA, 15 bp, Homo sapiens
tctccatttctaaat

SEQ ID NO: 1017498 - DNA, 15 bp, Homo sapiens
ctccatttctaaatg

SEQ ID NO: 1017499 - DNA, 15 bp, Homo sapiens
tccatttctaaatgg

SEQ ID NO: 1017500 - DNA, 15 bp, Homo sapiens
ccatttctaaatggc

SEQ ID NO: 1017501 - DNA, 15 bp, Homo sapiens
catttctaaatggcg

SEQ ID NO: 1017502 - DNA, 15 bp, Homo sapiens
atttctaaatggcgt

SEQ ID NO: 1017503 - DNA, 15 bp, Homo sapiens
tttctaaatggcgtt

SEQ ID NO: 1017504 - DNA, 15 bp, Homo sapiens
ttctaaatggcgttg

SEQ ID NO: 1017505 - DNA, 15 bp, Homo sapiens
tctaaatggcgttga

SEQ ID NO: 1017506 - DNA, 15 bp, Homo sapiens
ctaaatggcgttgag

SEQ ID NO: 1017507 - DNA, 15 bp, Homo sapiens
taaatggcgttgaga

SEQ ID NO: 1017508 - DNA, 15 bp, Homo sapiens
aaatggcgttgagac

SEQ ID NO: 1017509 - DNA, 15 bp, Homo sapiens
aatggcgttgagact

SEQ ID NO: 1017510 - DNA, 15 bp, Homo sapiens
atggcgttgagactg

SEQ ID NO: 1017511 - DNA, 15 bp, Homo sapiens
tggcgttgagactgg

SEQ ID NO: 1017512 - DNA, 15 bp, Homo sapiens
ggcgttgagactgga

SEQ ID NO: 1017513 - DNA, 15 bp, Homo sapiens
gcgttgagactggaa

SEQ ID NO: 1017514 - DNA, 15 bp, Homo sapiens
cgttgagactggaag

SEQ ID NO: 1017515 - DNA, 15 bp, Homo sapiens
gttgagactggaaga

SEQ ID NO: 1017516 - DNA, 15 bp, Homo sapiens
ttgagactggaagag

SEQ ID NO: 1017517 - DNA, 15 bp, Homo sapiens
tgagactggaagaga

SEQ ID NO: 1017518 - DNA, 15 bp, Homo sapiens
gagactggaagagat

SEQ ID NO: 1017519 - DNA, 15 bp, Homo sapiens
agactggaagagatg

SEQ ID NO: 1017520 - DNA, 15 bp, Homo sapiens
gactggaagagatgt

SEQ ID NO: 1017521 - DNA, 15 bp, Homo sapiens
actggaagagatgta

SEQ ID NO: 1017522 - DNA, 15 bp, Homo sapiens
ctggaagagatgtac

SEQ ID NO: 1017523 - DNA, 15 bp, Homo sapiens
tggaagagatgtaca

SEQ ID NO: 1017524 - DNA, 15 bp, Homo sapiens
ggaagagatgtacaa

SEQ ID NO: 1017525 - DNA, 15 bp, Homo sapiens
gaagagatgtacaac

SEQ ID NO: 1017526 - DNA, 15 bp, Homo sapiens
aagagatgtacaaca

SEQ ID NO: 1017527 - DNA, 15 bp, Homo sapiens
agagatgtacaacat

SEQ ID NO: 1017528 - DNA, 15 bp, Homo sapiens
gagatgtacaacatt

SEQ ID NO: 1017529 - DNA, 15 bp, Homo sapiens
agatgtacaacattc

SEQ ID NO: 1017530 - DNA, 15 bp, Homo sapiens
gatgtacaacattct

SEQ ID NO: 1017531 - DNA, 15 bp, Homo sapiens
atgtacaacattcta

SEQ ID NO: 1017532 - DNA, 15 bp, Homo sapiens
tgtacaacattctac

SEQ ID NO: 1017533 - DNA, 15 bp, Homo sapiens
gtacaacattctaca

SEQ ID NO: 1017534 - DNA, 15 bp, Homo sapiens
tacaacattctacac

SEQ ID NO: 1017535 - DNA, 15 bp, Homo sapiens
acaacattctacact

SEQ ID NO: 1017536 - DNA, 15 bp, Homo sapiens
caacattctacactt

SEQ ID NO: 1017537 - DNA, 15 bp, Homo sapiens
aacattctacacttg

SEQ ID NO: 1017538 - DNA, 15 bp, Homo sapiens
acattctacacttgg

SEQ ID NO: 1017539 - DNA, 15 bp, Homo sapiens
cattctacacttggt

SEQ ID NO: 1017540 - DNA, 15 bp, Homo sapiens
attctacacttggtg

SEQ ID NO: 1017541 - DNA, 15 bp, Homo sapiens
ttctacacttggtgt

SEQ ID NO: 1017542 - DNA, 15 bp, Homo sapiens
tctacacttggtgtt

SEQ ID NO: 1017543 - DNA, 15 bp, Homo sapiens
ctacacttggtgttc

SEQ ID NO: 1017544 - DNA, 15 bp, Homo sapiens
tacacttggtgttcc

SEQ ID NO: 1017545 - DNA, 15 bp, Homo sapiens
acacttggtgttcct

SEQ ID NO: 1017546 - DNA, 15 bp, Homo sapiens
cacttggtgttcctt

SEQ ID NO: 1017547 - DNA, 15 bp, Homo sapiens
acttggtgttcctta

SEQ ID NO: 1017548 - DNA, 15 bp, Homo sapiens
cttggtgttccttaa

SEQ ID NO: 1017549 - DNA, 15 bp, Homo sapiens
ttggtgttccttaaa

SEQ ID NO: 1017550 - DNA, 15 bp, Homo sapiens
tggtgttccttaaac

SEQ ID NO: 1017551 - DNA, 15 bp, Homo sapiens
ggtgttccttaaact

SEQ ID NO: 1017552 - DNA, 15 bp, Homo sapiens
gtgttccttaaactt

SEQ ID NO: 1017553 - DNA, 15 bp, Homo sapiens
tgttccttaaactta

SEQ ID NO: 1017554 - DNA, 15 bp, Homo sapiens
gttccttaaacttac

SEQ ID NO: 1017555 - DNA, 15 bp, Homo sapiens
ttccttaaacttaca

SEQ ID NO: 1017556 - DNA, 15 bp, Homo sapiens
tccttaaacttacaa

SEQ ID NO: 1017557 - DNA, 15 bp, Homo sapiens
ccttaaacttacaaa

SEQ ID NO: 1017558 - DNA, 15 bp, Homo sapiens
cttaaacttacaaac

SEQ ID NO: 1017559 - DNA, 15 bp, Homo sapiens
ttaaacttacaaaca

SEQ ID NO: 1017560 - DNA, 15 bp, Homo sapiens
taaacttacaaacaa

SEQ ID NO: 1017561 - DNA, 15 bp, Homo sapiens
aaacttacaaacaac

SEQ ID NO: 1017562 - DNA, 15 bp, Homo sapiens
aacttacaaacaact

SEQ ID NO: 1017563 - DNA, 15 bp, Homo sapiens
acttacaaacaacta

SEQ ID NO: 1017564 - DNA, 15 bp, Homo sapiens
cttacaaacaactat

SEQ ID NO: 1017565 - DNA, 15 bp, Homo sapiens
ttacaaacaactatg

SEQ ID NO: 1017566 - DNA, 15 bp, Homo sapiens
tacaaacaactatga

SEQ ID NO: 1017567 - DNA, 15 bp, Homo sapiens
acaaacaactatgaa

SEQ ID NO: 1017568 - DNA, 15 bp, Homo sapiens
caaacaactatgaaa

SEQ ID NO: 1017569 - DNA, 15 bp, Homo sapiens
aaacaactatgaaat

SEQ ID NO: 1017570 - DNA, 15 bp, Homo sapiens
aacaactatgaaata

SEQ ID NO: 1017571 - DNA, 15 bp, Homo sapiens
acaactatgaaataa

SEQ ID NO: 1017572 - DNA, 15 bp, Homo sapiens
caactatgaaataat

SEQ ID NO: 1017573 - DNA, 15 bp, Homo sapiens
aactatgaaataatg

SEQ ID NO: 1017574 - DNA, 15 bp, Homo sapiens
actatgaaataatgg

SEQ ID NO: 1017575 - DNA, 15 bp, Homo sapiens
ctatgaaataatggc

SEQ ID NO: 1017576 - DNA, 15 bp, Homo sapiens
tatgaaataatggcg

SEQ ID NO: 1017577 - DNA, 15 bp, Homo sapiens
atgaaataatggcga

SEQ ID NO: 1017578 - DNA, 15 bp, Homo sapiens
tgaaataatggcgag

SEQ ID NO: 1017579 - DNA, 15 bp, Homo sapiens
gaaataatggcgagt

SEQ ID NO: 1017580 - DNA, 15 bp, Homo sapiens
aaataatggcgagtg

SEQ ID NO: 1017581 - DNA, 15 bp, Homo sapiens
aataatggcgagtga

SEQ ID NO: 1017582 - DNA, 15 bp, Homo sapiens
ataatggcgagtgag

SEQ ID NO: 1017583 - DNA, 15 bp, Homo sapiens
taatggcgagtgaga

SEQ ID NO: 1017584 - DNA, 15 bp, Homo sapiens
aatggcgagtgagag

SEQ ID NO: 1017585 - DNA, 15 bp, Homo sapiens
atggcgagtgagaga

SEQ ID NO: 1017586 - DNA, 15 bp, Homo sapiens
tggcgagtgagagaa

SEQ ID NO: 1017587 - DNA, 15 bp, Homo sapiens
ggcgagtgagagaaa

SEQ ID NO: 1017588 - DNA, 15 bp, Homo sapiens
gcgagtgagagaaag

SEQ ID NO: 1017589 - DNA, 15 bp, Homo sapiens
cgagtgagagaaaga

SEQ ID NO: 1017590 - DNA, 15 bp, Homo sapiens
gagtgagagaaagaa

SEQ ID NO: 1017591 - DNA, 15 bp, Homo sapiens
agtgagagaaagaag

SEQ ID NO: 1017592 - DNA, 15 bp, Homo sapiens
gtgagagaaagaagc

SEQ ID NO: 1017593 - DNA, 15 bp, Homo sapiens
tgagagaaagaagct

SEQ ID NO: 1017594 - DNA, 15 bp, Homo sapiens
gagagaaagaagctg

SEQ ID NO: 1017595 - DNA, 15 bp, Homo sapiens
agagaaagaagctgg

SEQ ID NO: 1017596 - DNA, 15 bp, Homo sapiens
gagaaagaagctggg

SEQ ID NO: 1017597 - DNA, 15 bp, Homo sapiens
agaaagaagctgggt

SEQ ID NO: 1017598 - DNA, 15 bp, Homo sapiens
gaaagaagctgggtg

SEQ ID NO: 1017599 - DNA, 15 bp, Homo sapiens
aaagaagctgggtga

SEQ ID NO: 1017600 - DNA, 15 bp, Homo sapiens
aagaagctgggtgac

SEQ ID NO: 1017601 - DNA, 15 bp, Homo sapiens
agaagctgggtgact

SEQ ID NO: 1017602 - DNA, 15 bp, Homo sapiens
gaagctgggtgactg

SEQ ID NO: 1017603 - DNA, 15 bp, Homo sapiens
aagctgggtgactgg

SEQ ID NO: 1017604 - DNA, 15 bp, Homo sapiens
agctgggtgactggg

SEQ ID NO: 1017605 - DNA, 15 bp, Homo sapiens
gctgggtgactggga

SEQ ID NO: 1017606 - DNA, 15 bp, Homo sapiens
ctgggtgactgggaa

SEQ ID NO: 1017607 - DNA, 15 bp, Homo sapiens
tgggtgactgggaaa

SEQ ID NO: 1017608 - DNA, 15 bp, Homo sapiens
gggtgactgggaaac

SEQ ID NO: 1017609 - DNA, 15 bp, Homo sapiens
ggtgactgggaaacc

SEQ ID NO: 1017610 - DNA, 15 bp, Homo sapiens
gtgactgggaaaccc

SEQ ID NO: 1017611 - DNA, 15 bp, Homo sapiens
tgactgggaaaccca

SEQ ID NO: 1017612 - DNA, 15 bp, Homo sapiens
gactgggaaacccac

SEQ ID NO: 1017613 - DNA, 15 bp, Homo sapiens
actgggaaacccacc

SEQ ID NO: 1017614 - DNA, 15 bp, Homo sapiens
ctgggaaacccaccc

SEQ ID NO: 1017615 - DNA, 15 bp, Homo sapiens
tgggaaacccacccc

SEQ ID NO: 1017616 - DNA, 15 bp, Homo sapiens
gggaaacccaccccg

SEQ ID NO: 1017617 - DNA, 15 bp, Homo sapiens
ggaaacccaccccgc

SEQ ID NO: 1017618 - DNA, 15 bp, Homo sapiens
gaaacccaccccgcc

SEQ ID NO: 1017619 - DNA, 15 bp, Homo sapiens
aaacccaccccgcct

SEQ ID NO: 1017620 - DNA, 15 bp, Homo sapiens
aacccaccccgcctt

SEQ ID NO: 1017621 - DNA, 15 bp, Homo sapiens
acccaccccgccttc

SEQ ID NO: 1017622 - DNA, 15 bp, Homo sapiens
cccaccccgccttcg

SEQ ID NO: 1017623 - DNA, 15 bp, Homo sapiens
ccaccccgccttcgc

SEQ ID NO: 1017624 - DNA, 15 bp, Homo sapiens
caccccgccttcgca

SEQ ID NO: 1017625 - DNA, 15 bp, Homo sapiens
accccgccttcgcaa

SEQ ID NO: 1017626 - DNA, 15 bp, Homo sapiens
ccccgccttcgcaat

SEQ ID NO: 1017627 - DNA, 15 bp, Homo sapiens
cccgccttcgcaatt

SEQ ID NO: 1017628 - DNA, 15 bp, Homo sapiens
ccgccttcgcaatta

SEQ ID NO: 1017629 - DNA, 15 bp, Homo sapiens
cgccttcgcaattag

SEQ ID NO: 1017630 - DNA, 15 bp, Homo sapiens
gccttcgcaattaga

SEQ ID NO: 1017631 - DNA, 15 bp, Homo sapiens
ccttcgcaattagac

SEQ ID NO: 1017632 - DNA, 15 bp, Homo sapiens
cttcgcaattagacc

SEQ ID NO: 1017633 - DNA, 15 bp, Homo sapiens
ttcgcaattagaccc

SEQ ID NO: 1017634 - DNA, 15 bp, Homo sapiens
tcgcaattagacccc

SEQ ID NO: 1017635 - DNA, 15 bp, Homo sapiens
cgcaattagacccca

SEQ ID NO: 1017636 - DNA, 15 bp, Homo sapiens
gcaattagaccccat

SEQ ID NO: 1017637 - DNA, 15 bp, Homo sapiens
caattagaccccatt

SEQ ID NO: 1017638 - DNA, 15 bp, Homo sapiens
aattagaccccattc

SEQ ID NO: 1017639 - DNA, 15 bp, Homo sapiens
attagaccccattcg

SEQ ID NO: 1017640 - DNA, 15 bp, Homo sapiens
ttagaccccattcgg

SEQ ID NO: 1017641 - DNA, 15 bp, Homo sapiens
tagaccccattcggg

SEQ ID NO: 1017642 - DNA, 15 bp, Homo sapiens
agaccccattcggga

SEQ ID NO: 1017643 - DNA, 15 bp, Homo sapiens
gaccccattcgggac

SEQ ID NO: 1017644 - DNA, 15 bp, Homo sapiens
accccattcgggact

SEQ ID NO: 1017645 - DNA, 15 bp, Homo sapiens
ccccattcgggactc

SEQ ID NO: 1017646 - DNA, 15 bp, Homo sapiens
cccattcgggactca

SEQ ID NO: 1017647 - DNA, 15 bp, Homo sapiens
ccattcgggactcag

SEQ ID NO: 1017648 - DNA, 15 bp, Homo sapiens
cattcgggactcagg

SEQ ID NO: 1017649 - DNA, 15 bp, Homo sapiens
attcgggactcaggc

SEQ ID NO: 1017650 - DNA, 15 bp, Homo sapiens
ttcgggactcaggcc

SEQ ID NO: 1017651 - DNA, 15 bp, Homo sapiens
tcgggactcaggccc

SEQ ID NO: 1017652 - DNA, 15 bp, Homo sapiens
cgggactcaggcccg

SEQ ID NO: 1017653 - DNA, 15 bp, Homo sapiens
gggactcaggcccgg

SEQ ID NO: 1017654 - DNA, 15 bp, Homo sapiens
ggactcaggcccggc

SEQ ID NO: 1017655 - DNA, 15 bp, Homo sapiens
gactcaggcccggcc

SEQ ID NO: 1017656 - DNA, 15 bp, Homo sapiens
actcaggcccggcca

SEQ ID NO: 1017657 - DNA, 15 bp, Homo sapiens
ctcaggcccggccag

SEQ ID NO: 1017658 - DNA, 15 bp, Homo sapiens
tcaggcccggccagg

SEQ ID NO: 1017659 - DNA, 15 bp, Homo sapiens
caggcccggccaggt

SEQ ID NO: 1017660 - DNA, 15 bp, Homo sapiens
aggcccggccaggtc

SEQ ID NO: 1017661 - DNA, 15 bp, Homo sapiens
ggcccggccaggtcg

SEQ ID NO: 1017662 - DNA, 15 bp, Homo sapiens
gcccggccaggtcgc

SEQ ID NO: 1017663 - DNA, 15 bp, Homo sapiens
cccggccaggtcgcg

SEQ ID NO: 1017664 - DNA, 15 bp, Homo sapiens
ccggccaggtcgcgc

SEQ ID NO: 1017665 - DNA, 15 bp, Homo sapiens
cggccaggtcgcgcc

SEQ ID NO: 1017666 - DNA, 15 bp, Homo sapiens
ggccaggtcgcgcct

SEQ ID NO: 1017667 - DNA, 15 bp, Homo sapiens
gccaggtcgcgcctg

SEQ ID NO: 1017668 - DNA, 15 bp, Homo sapiens
ccaggtcgcgcctgc

SEQ ID NO: 1017669 - DNA, 15 bp, Homo sapiens
caggtcgcgcctgca

SEQ ID NO: 1017670 - DNA, 15 bp, Homo sapiens
aggtcgcgcctgcag

SEQ ID NO: 1017671 - DNA, 15 bp, Homo sapiens
ggtcgcgcctgcaga

SEQ ID NO: 1017672 - DNA, 15 bp, Homo sapiens
gtcgcgcctgcagac

SEQ ID NO: 1017673 - DNA, 15 bp, Homo sapiens
tcgcgcctgcagaca

SEQ ID NO: 1017674 - DNA, 15 bp, Homo sapiens
cgcgcctgcagacaa

SEQ ID NO: 1017675 - DNA, 15 bp, Homo sapiens
gcgcctgcagacaag

SEQ ID NO: 1017676 - DNA, 15 bp, Homo sapiens
cgcctgcagacaagg

SEQ ID NO: 1017677 - DNA, 15 bp, Homo sapiens
gcctgcagacaaggt

SEQ ID NO: 1017678 - DNA, 15 bp, Homo sapiens
cctgcagacaaggtc

SEQ ID NO: 1017679 - DNA, 15 bp, Homo sapiens
ctgcagacaaggtct

SEQ ID NO: 1017680 - DNA, 15 bp, Homo sapiens
tgcagacaaggtctg

SEQ ID NO: 1017681 - DNA, 15 bp, Homo sapiens
gcagacaaggtctgt

SEQ ID NO: 1017682 - DNA, 15 bp, Homo sapiens
cagacaaggtctgta

SEQ ID NO: 1017683 - DNA, 15 bp, Homo sapiens
agacaaggtctgtat

SEQ ID NO: 1017684 - DNA, 15 bp, Homo sapiens
gacaaggtctgtatt

SEQ ID NO: 1017685 - DNA, 15 bp, Homo sapiens
acaaggtctgtattc

SEQ ID NO: 1017686 - DNA, 15 bp, Homo sapiens
caaggtctgtattca

SEQ ID NO: 1017687 - DNA, 15 bp, Homo sapiens
aaggtctgtattcag

SEQ ID NO: 1017688 - DNA, 15 bp, Homo sapiens
aggtctgtattcagc

SEQ ID NO: 1017689 - DNA, 15 bp, Homo sapiens
ggtctgtattcagcg

SEQ ID NO: 1017690 - DNA, 15 bp, Homo sapiens
gtctgtattcagcgt

SEQ ID NO: 1017691 - DNA, 15 bp, Homo sapiens
tctgtattcagcgtt

SEQ ID NO: 1017692 - DNA, 15 bp, Homo sapiens
ctgtattcagcgttg

SEQ ID NO: 1017693 - DNA, 15 bp, Homo sapiens
tgtattcagcgttgc

SEQ ID NO: 1017694 - DNA, 15 bp, Homo sapiens
gtattcagcgttgcc

SEQ ID NO: 1017695 - DNA, 15 bp, Homo sapiens
tattcagcgttgcca

SEQ ID NO: 1017696 - DNA, 15 bp, Homo sapiens
attcagcgttgccag

SEQ ID NO: 1017697 - DNA, 15 bp, Homo sapiens
ttcagcgttgccagt

SEQ ID NO: 1017698 - DNA, 15 bp, Homo sapiens
tcagcgttgccagtt

SEQ ID NO: 1017699 - DNA, 15 bp, Homo sapiens
cagcgttgccagttc

SEQ ID NO: 1017700 - DNA, 15 bp, Homo sapiens
agcgttgccagttct

SEQ ID NO: 1017701 - DNA, 15 bp, Homo sapiens
gcgttgccagttctc

SEQ ID NO: 1017702 - DNA, 15 bp, Homo sapiens
cgttgccagttctcc

SEQ ID NO: 1017703 - DNA, 15 bp, Homo sapiens
gttgccagttctcct

SEQ ID NO: 1017704 - DNA, 15 bp, Homo sapiens
ttgccagttctcctc

SEQ ID NO: 1017705 - DNA, 15 bp, Homo sapiens
tgccagttctcctct

SEQ ID NO: 1017706 - DNA, 15 bp, Homo sapiens
gccagttctcctctg

SEQ ID NO: 1017707 - DNA, 15 bp, Homo sapiens
ccagttctcctctgt

SEQ ID NO: 1017708 - DNA, 15 bp, Homo sapiens
cagttctcctctgtg

SEQ ID NO: 1017709 - DNA, 15 bp, Homo sapiens
agttctcctctgtgg

SEQ ID NO: 1017710 - DNA, 15 bp, Homo sapiens
gttctcctctgtggt

SEQ ID NO: 1017711 - DNA, 15 bp, Homo sapiens
ttctcctctgtggtt

SEQ ID NO: 1017712 - DNA, 15 bp, Homo sapiens
tctcctctgtggttc

SEQ ID NO: 1017713 - DNA, 15 bp, Homo sapiens
ctcctctgtggttcg

SEQ ID NO: 1017714 - DNA, 15 bp, Homo sapiens
tcctctgtggttcgc

SEQ ID NO: 1017715 - DNA, 15 bp, Homo sapiens
cctctgtggttcgct

SEQ ID NO: 1017716 - DNA, 15 bp, Homo sapiens
ctctgtggttcgctt

SEQ ID NO: 1017717 - DNA, 15 bp, Homo sapiens
tctgtggttcgctta

SEQ ID NO: 1017718 - DNA, 15 bp, Homo sapiens
ctgtggttcgcttaa

SEQ ID NO: 1017719 - DNA, 15 bp, Homo sapiens
tgtggttcgcttaag

SEQ ID NO: 1017720 - DNA, 15 bp, Homo sapiens
gtggttcgcttaagc

SEQ ID NO: 1017721 - DNA, 15 bp, Homo sapiens
tggttcgcttaagcc

SEQ ID NO: 1017722 - DNA, 15 bp, Homo sapiens
ggttcgcttaagccc

SEQ ID NO: 1017723 - DNA, 15 bp, Homo sapiens
gttcgcttaagcccg

SEQ ID NO: 1017724 - DNA, 15 bp, Homo sapiens
ttcgcttaagcccgg

SEQ ID NO: 1017725 - DNA, 15 bp, Homo sapiens
tcgcttaagcccggc

SEQ ID NO: 1017726 - DNA, 15 bp, Homo sapiens
cgcttaagcccggcg

SEQ ID NO: 1017727 - DNA, 15 bp, Homo sapiens
gcttaagcccggcgt

SEQ ID NO: 1017728 - DNA, 15 bp, Homo sapiens
cttaagcccggcgtc

SEQ ID NO: 1017729 - DNA, 15 bp, Homo sapiens
ttaagcccggcgtcg

SEQ ID NO: 1017730 - DNA, 15 bp, Homo sapiens
taagcccggcgtcgc

SEQ ID NO: 1017731 - DNA, 15 bp, Homo sapiens
aagcccggcgtcgcc

SEQ ID NO: 1017732 - DNA, 15 bp, Homo sapiens
agcccggcgtcgcct

SEQ ID NO: 1017733 - DNA, 15 bp, Homo sapiens
gcccggcgtcgcctc

SEQ ID NO: 1017734 - DNA, 15 bp, Homo sapiens
cccggcgtcgcctcc

SEQ ID NO: 1017735 - DNA, 15 bp, Homo sapiens
ccggcgtcgcctccc

SEQ ID NO: 1017736 - DNA, 15 bp, Homo sapiens
cggcgtcgcctcccc

SEQ ID NO: 1017737 - DNA, 15 bp, Homo sapiens
ggcgtcgcctcccct

SEQ ID NO: 1017738 - DNA, 15 bp, Homo sapiens
gcgtcgcctcccctc

SEQ ID NO: 1017739 - DNA, 15 bp, Homo sapiens
cgtcgcctcccctcc

SEQ ID NO: 1017740 - DNA, 15 bp, Homo sapiens
gtcgcctcccctcct

SEQ ID NO: 1017741 - DNA, 15 bp, Homo sapiens
tcgcctcccctcctt

SEQ ID NO: 1017742 - DNA, 15 bp, Homo sapiens
cgcctcccctccttg

SEQ ID NO: 1017743 - DNA, 15 bp, Homo sapiens
gcctcccctccttgc

SEQ ID NO: 1017744 - DNA, 15 bp, Homo sapiens
cctcccctccttgct

SEQ ID NO: 1017745 - DNA, 15 bp, Homo sapiens
ctcccctccttgctt

SEQ ID NO: 1017746 - DNA, 15 bp, Homo sapiens
tcccctccttgctta

SEQ ID NO: 1017747 - DNA, 15 bp, Homo sapiens
cccctccttgcttag

SEQ ID NO: 1017748 - DNA, 15 bp, Homo sapiens
ccctccttgcttagc

SEQ ID NO: 1017749 - DNA, 15 bp, Homo sapiens
cctccttgcttagcc

SEQ ID NO: 1017750 - DNA, 15 bp, Homo sapiens
ctccttgcttagcca

SEQ ID NO: 1017751 - DNA, 15 bp, Homo sapiens
tccttgcttagccac

SEQ ID NO: 1017752 - DNA, 15 bp, Homo sapiens
ccttgcttagccacc

SEQ ID NO: 1017753 - DNA, 15 bp, Homo sapiens
cttgcttagccacca

SEQ ID NO: 1017754 - DNA, 15 bp, Homo sapiens
ttgcttagccaccac

SEQ ID NO: 1017755 - DNA, 15 bp, Homo sapiens
tgcttagccaccaca

SEQ ID NO: 1017756 - DNA, 15 bp, Homo sapiens
gcttagccaccacag

SEQ ID NO: 1017757 - DNA, 15 bp, Homo sapiens
cttagccaccacagt

SEQ ID NO: 1017758 - DNA, 15 bp, Homo sapiens
ttagccaccacagtg

SEQ ID NO: 1017759 - DNA, 15 bp, Homo sapiens
tagccaccacagtga

SEQ ID NO: 1017760 - DNA, 15 bp, Homo sapiens
agccaccacagtgat

SEQ ID NO: 1017761 - DNA, 15 bp, Homo sapiens
gccaccacagtgatc

SEQ ID NO: 1017762 - DNA, 15 bp, Homo sapiens
ccaccacagtgatca

SEQ ID NO: 1017763 - DNA, 15 bp, Homo sapiens
caccacagtgatcaa

SEQ ID NO: 1017764 - DNA, 15 bp, Homo sapiens
accacagtgatcaat

SEQ ID NO: 1017765 - DNA, 15 bp, Homo sapiens
ccacagtgatcaatg

SEQ ID NO: 1017766 - DNA, 15 bp, Homo sapiens
cacagtgatcaatgc

SEQ ID NO: 1017767 - DNA, 15 bp, Homo sapiens
acagtgatcaatgct

SEQ ID NO: 1017768 - DNA, 15 bp, Homo sapiens
cagtgatcaatgctc

SEQ ID NO: 1017769 - DNA, 15 bp, Homo sapiens
agtgatcaatgctca

SEQ ID NO: 1017770 - DNA, 15 bp, Homo sapiens
gtgatcaatgctcag

SEQ ID NO: 1017771 - DNA, 15 bp, Homo sapiens
tgatcaatgctcagt

SEQ ID NO: 1017772 - DNA, 15 bp, Homo sapiens
gatcaatgctcagtt

SEQ ID NO: 1017773 - DNA, 15 bp, Homo sapiens
atcaatgctcagttc

SEQ ID NO: 1017774 - DNA, 15 bp, Homo sapiens
tcaatgctcagttcg

SEQ ID NO: 1017775 - DNA, 15 bp, Homo sapiens
caatgctcagttcgt

SEQ ID NO: 1017776 - DNA, 15 bp, Homo sapiens
aatgctcagttcgtc

SEQ ID NO: 1017777 - DNA, 15 bp, Homo sapiens
atgctcagttcgtcg

SEQ ID NO: 1017778 - DNA, 15 bp, Homo sapiens
tgctcagttcgtcgg

SEQ ID NO: 1017779 - DNA, 15 bp, Homo sapiens
gctcagttcgtcggg

SEQ ID NO: 1017780 - DNA, 15 bp, Homo sapiens
ctcagttcgtcgggg

SEQ ID NO: 1017781 - DNA, 15 bp, Homo sapiens
tcagttcgtcggggc

SEQ ID NO: 1017782 - DNA, 15 bp, Homo sapiens
cagttcgtcggggcc

SEQ ID NO: 1017783 - DNA, 15 bp, Homo sapiens
agttcgtcggggcct

SEQ ID NO: 1017784 - DNA, 15 bp, Homo sapiens
gttcgtcggggcctg

SEQ ID NO: 1017785 - DNA, 15 bp, Homo sapiens
ttcgtcggggcctga

SEQ ID NO: 1017786 - DNA, 15 bp, Homo sapiens
tcgtcggggcctgag

SEQ ID NO: 1017787 - DNA, 15 bp, Homo sapiens
cgtcggggcctgaga

SEQ ID NO: 1017788 - DNA, 15 bp, Homo sapiens
gtcggggcctgagag

SEQ ID NO: 1017789 - DNA, 15 bp, Homo sapiens
tcggggcctgagagc

SEQ ID NO: 1017790 - DNA, 15 bp, Homo sapiens
cggggcctgagagcg

SEQ ID NO: 1017791 - DNA, 15 bp, Homo sapiens
ggggcctgagagcgc

SEQ ID NO: 1017792 - DNA, 15 bp, Homo sapiens
gggcctgagagcgcc

SEQ ID NO: 1017793 - DNA, 15 bp, Homo sapiens
ggcctgagagcgccc

SEQ ID NO: 1017794 - DNA, 15 bp, Homo sapiens
gcctgagagcgcccc

SEQ ID NO: 1017795 - DNA, 15 bp, Homo sapiens
cctgagagcgccccc

SEQ ID NO: 1017796 - DNA, 15 bp, Homo sapiens
ctgagagcgcccccc

SEQ ID NO: 1017797 - DNA, 15 bp, Homo sapiens
tgagagcgcccccca

SEQ ID NO: 1017798 - DNA, 15 bp, Homo sapiens
gagagcgccccccag

SEQ ID NO: 1017799 - DNA, 15 bp, Homo sapiens
agagcgccccccaga

SEQ ID NO: 1017800 - DNA, 15 bp, Homo sapiens
gagcgccccccagag

SEQ ID NO: 1017801 - DNA, 15 bp, Homo sapiens
agcgccccccagaga

SEQ ID NO: 1017802 - DNA, 15 bp, Homo sapiens
gcgccccccagagaa

SEQ ID NO: 1017803 - DNA, 15 bp, Homo sapiens
cgccccccagagaag

SEQ ID NO: 1017804 - DNA, 15 bp, Homo sapiens
gccccccagagaagc

SEQ ID NO: 1017805 - DNA, 15 bp, Homo sapiens
ccccccagagaagcc

SEQ ID NO: 1017806 - DNA, 15 bp, Homo sapiens
cccccagagaagccc

SEQ ID NO: 1017807 - DNA, 15 bp, Homo sapiens
ccccagagaagcccc

SEQ ID NO: 1017808 - DNA, 15 bp, Homo sapiens
cccagagaagcccct

SEQ ID NO: 1017809 - DNA, 15 bp, Homo sapiens
ccagagaagcccctg

SEQ ID NO: 1017810 - DNA, 15 bp, Homo sapiens
cagagaagcccctgg

SEQ ID NO: 1017811 - DNA, 15 bp, Homo sapiens
agagaagcccctggg

SEQ ID NO: 1017812 - DNA, 15 bp, Homo sapiens
gagaagcccctggga

SEQ ID NO: 1017813 - DNA, 15 bp, Homo sapiens
agaagcccctgggaa

SEQ ID NO: 1017814 - DNA, 15 bp, Homo sapiens
gaagcccctgggaag

SEQ ID NO: 1017815 - DNA, 15 bp, Homo sapiens
aagcccctgggaagg

SEQ ID NO: 1017816 - DNA, 15 bp, Homo sapiens
agcccctgggaagga

SEQ ID NO: 1017817 - DNA, 15 bp, Homo sapiens
gcccctgggaaggaa

SEQ ID NO: 1017818 - DNA, 15 bp, Homo sapiens
cccctgggaaggaag

SEQ ID NO: 1017819 - DNA, 15 bp, Homo sapiens
ccctgggaaggaagg

SEQ ID NO: 1017820 - DNA, 15 bp, Homo sapiens
cctgggaaggaaggg

SEQ ID NO: 1017821 - DNA, 15 bp, Homo sapiens
ctgggaaggaagggc

SEQ ID NO: 1017822 - DNA, 15 bp, Homo sapiens
tgggaaggaagggca

SEQ ID NO: 1017823 - DNA, 15 bp, Homo sapiens
gggaaggaagggcaa

SEQ ID NO: 1017824 - DNA, 15 bp, Homo sapiens
ggaaggaagggcaag

SEQ ID NO: 1017825 - DNA, 15 bp, Homo sapiens
gaaggaagggcaagg

SEQ ID NO: 1017826 - DNA, 15 bp, Homo sapiens
aaggaagggcaagga

SEQ ID NO: 1017827 - DNA, 15 bp, Homo sapiens
aggaagggcaaggag

SEQ ID NO: 1017828 - DNA, 15 bp, Homo sapiens
ggaagggcaaggagc

SEQ ID NO: 1017829 - DNA, 15 bp, Homo sapiens
gaagggcaaggagcc

SEQ ID NO: 1017830 - DNA, 15 bp, Homo sapiens
aagggcaaggagccg

SEQ ID NO: 1017831 - DNA, 15 bp, Homo sapiens
agggcaaggagccgg

SEQ ID NO: 1017832 - DNA, 15 bp, Homo sapiens
gggcaaggagccggg

SEQ ID NO: 1017833 - DNA, 15 bp, Homo sapiens
ggcaaggagccgggc

SEQ ID NO: 1017834 - DNA, 15 bp, Homo sapiens
gcaaggagccgggct

SEQ ID NO: 1017835 - DNA, 15 bp, Homo sapiens
caaggagccgggctt

SEQ ID NO: 1017836 - DNA, 15 bp, Homo sapiens
aaggagccgggcttc

SEQ ID NO: 1017837 - DNA, 15 bp, Homo sapiens
aggagccgggcttcg

SEQ ID NO: 1017838 - DNA, 15 bp, Homo sapiens
ggagccgggcttcgc

SEQ ID NO: 1017839 - DNA, 15 bp, Homo sapiens
gagccgggcttcgct

SEQ ID NO: 1017840 - DNA, 15 bp, Homo sapiens
agccgggcttcgctc

SEQ ID NO: 1017841 - DNA, 15 bp, Homo sapiens
gccgggcttcgctct

SEQ ID NO: 1017842 - DNA, 15 bp, Homo sapiens
ccgggcttcgctctg

SEQ ID NO: 1017843 - DNA, 15 bp, Homo sapiens
cgggcttcgctctgg

SEQ ID NO: 1017844 - DNA, 15 bp, Homo sapiens
gggcttcgctctggt

SEQ ID NO: 1017845 - DNA, 15 bp, Homo sapiens
ggcttcgctctggtc

SEQ ID NO: 1017846 - DNA, 15 bp, Homo sapiens
gcttcgctctggtct

SEQ ID NO: 1017847 - DNA, 15 bp, Homo sapiens
cttcgctctggtctt

SEQ ID NO: 1017848 - DNA, 15 bp, Homo sapiens
ttcgctctggtcttt

SEQ ID NO: 1017849 - DNA, 15 bp, Homo sapiens
tcgctctggtctttc

SEQ ID NO: 1017850 - DNA, 15 bp, Homo sapiens
cgctctggtctttcg

SEQ ID NO: 1017851 - DNA, 15 bp, Homo sapiens
gctctggtctttcgc

SEQ ID NO: 1017852 - DNA, 15 bp, Homo sapiens
ctctggtctttcgca

SEQ ID NO: 1017853 - DNA, 15 bp, Homo sapiens
tctggtctttcgcaa

SEQ ID NO: 1017854 - DNA, 15 bp, Homo sapiens
ctggtctttcgcaac

SEQ ID NO: 1017855 - DNA, 15 bp, Homo sapiens
tggtctttcgcaaca

SEQ ID NO: 1017856 - DNA, 15 bp, Homo sapiens
ggtctttcgcaacac

SEQ ID NO: 1017857 - DNA, 15 bp, Homo sapiens
gtctttcgcaacacc

SEQ ID NO: 1017858 - DNA, 15 bp, Homo sapiens
tctttcgcaacacca

SEQ ID NO: 1017859 - DNA, 15 bp, Homo sapiens
ctttcgcaacaccag

SEQ ID NO: 1017860 - DNA, 15 bp, Homo sapiens
tttcgcaacaccagc

SEQ ID NO: 1017861 - DNA, 15 bp, Homo sapiens
ttcgcaacaccagcg

SEQ ID NO: 1017862 - DNA, 15 bp, Homo sapiens
tcgcaacaccagcgg

SEQ ID NO: 1017863 - DNA, 15 bp, Homo sapiens
cgcaacaccagcggc

SEQ ID NO: 1017864 - DNA, 15 bp, Homo sapiens
gcaacaccagcggcg

SEQ ID NO: 1017865 - DNA, 15 bp, Homo sapiens
caacaccagcggcga

SEQ ID NO: 1017866 - DNA, 15 bp, Homo sapiens
aacaccagcggcgag

SEQ ID NO: 1017867 - DNA, 15 bp, Homo sapiens
acaccagcggcgagc

SEQ ID NO: 1017868 - DNA, 15 bp, Homo sapiens
caccagcggcgagcg

SEQ ID NO: 1017869 - DNA, 15 bp, Homo sapiens
accagcggcgagcgc

SEQ ID NO: 1017870 - DNA, 15 bp, Homo sapiens
ccagcggcgagcgcg

SEQ ID NO: 1017871 - DNA, 15 bp, Homo sapiens
cagcggcgagcgcgt

SEQ ID NO: 1017872 - DNA, 15 bp, Homo sapiens
agcggcgagcgcgtc

SEQ ID NO: 1017873 - DNA, 15 bp, Homo sapiens
gcggcgagcgcgtct

SEQ ID NO: 1017874 - DNA, 15 bp, Homo sapiens
cggcgagcgcgtctc

SEQ ID NO: 1017875 - DNA, 15 bp, Homo sapiens
ggcgagcgcgtctcc

SEQ ID NO: 1017876 - DNA, 15 bp, Homo sapiens
gcgagcgcgtctccc

SEQ ID NO: 1017877 - DNA, 15 bp, Homo sapiens
cgagcgcgtctccct

SEQ ID NO: 1017878 - DNA, 15 bp, Homo sapiens
gagcgcgtctccctg

SEQ ID NO: 1017879 - DNA, 15 bp, Homo sapiens
agcgcgtctccctgc

SEQ ID NO: 1017880 - DNA, 15 bp, Homo sapiens
gcgcgtctccctgcg

SEQ ID NO: 1017881 - DNA, 15 bp, Homo sapiens
cgcgtctccctgcgc

SEQ ID NO: 1017882 - DNA, 15 bp, Homo sapiens
gcgtctccctgcgca

SEQ ID NO: 1017883 - DNA, 15 bp, Homo sapiens
cgtctccctgcgcaa

SEQ ID NO: 1017884 - DNA, 15 bp, Homo sapiens
gtctccctgcgcaaa

SEQ ID NO: 1017885 - DNA, 15 bp, Homo sapiens
tctccctgcgcaaac

SEQ ID NO: 1017886 - DNA, 15 bp, Homo sapiens
ctccctgcgcaaacg

SEQ ID NO: 1017887 - DNA, 15 bp, Homo sapiens
tccctgcgcaaacgt

SEQ ID NO: 1017888 - DNA, 15 bp, Homo sapiens
ccctgcgcaaacgta

SEQ ID NO: 1017889 - DNA, 15 bp, Homo sapiens
cctgcgcaaacgtag

SEQ ID NO: 1017890 - DNA, 15 bp, Homo sapiens
ctgcgcaaacgtagg

SEQ ID NO: 1017891 - DNA, 15 bp, Homo sapiens
tgcgcaaacgtaggg

SEQ ID NO: 1017892 - DNA, 15 bp, Homo sapiens
gcgcaaacgtagggt

SEQ ID NO: 1017893 - DNA, 15 bp, Homo sapiens
cgcaaacgtagggtg

SEQ ID NO: 1017894 - DNA, 15 bp, Homo sapiens
gcaaacgtagggtgg

SEQ ID NO: 1017895 - DNA, 15 bp, Homo sapiens
caaacgtagggtggc

SEQ ID NO: 1017896 - DNA, 15 bp, Homo sapiens
aaacgtagggtggcc

SEQ ID NO: 1017897 - DNA, 15 bp, Homo sapiens
aacgtagggtggcct

SEQ ID NO: 1017898 - DNA, 15 bp, Homo sapiens
acgtagggtggcctc

SEQ ID NO: 1017899 - DNA, 15 bp, Homo sapiens
cgtagggtggcctcc

SEQ ID NO: 1017900 - DNA, 15 bp, Homo sapiens
gtagggtggcctccc

SEQ ID NO: 1017901 - DNA, 15 bp, Homo sapiens
tagggtggcctcccc

SEQ ID NO: 1017902 - DNA, 15 bp, Homo sapiens
agggtggcctcccca

SEQ ID NO: 1017903 - DNA, 15 bp, Homo sapiens
gggtggcctccccag

SEQ ID NO: 1017904 - DNA, 15 bp, Homo sapiens
ggtggcctccccagc

SEQ ID NO: 1017905 - DNA, 15 bp, Homo sapiens
gtggcctccccagct

SEQ ID NO: 1017906 - DNA, 15 bp, Homo sapiens
tggcctccccagctc

SEQ ID NO: 1017907 - DNA, 15 bp, Homo sapiens
ggcctccccagctct

SEQ ID NO: 1017908 - DNA, 15 bp, Homo sapiens
gcctccccagctctg

SEQ ID NO: 1017909 - DNA, 15 bp, Homo sapiens
cctccccagctctgc

SEQ ID NO: 1017910 - DNA, 15 bp, Homo sapiens
ctccccagctctgcc

SEQ ID NO: 1017911 - DNA, 15 bp, Homo sapiens
tccccagctctgccg

SEQ ID NO: 1017912 - DNA, 15 bp, Homo sapiens
ccccagctctgccgt

SEQ ID NO: 1017913 - DNA, 15 bp, Homo sapiens
cccagctctgccgtg

SEQ ID NO: 1017914 - DNA, 15 bp, Homo sapiens
ccagctctgccgtgg

SEQ ID NO: 1017915 - DNA, 15 bp, Homo sapiens
cagctctgccgtggg

SEQ ID NO: 1017916 - DNA, 15 bp, Homo sapiens
agctctgccgtgggg

SEQ ID NO: 1017917 - DNA, 15 bp, Homo sapiens
gctctgccgtgggga

SEQ ID NO: 1017918 - DNA, 15 bp, Homo sapiens
ctctgccgtggggac

SEQ ID NO: 1017919 - DNA, 15 bp, Homo sapiens
tctgccgtggggacc

SEQ ID NO: 1017920 - DNA, 15 bp, Homo sapiens
ctgccgtggggaccg

SEQ ID NO: 1017921 - DNA, 15 bp, Homo sapiens
tgccgtggggaccgc

SEQ ID NO: 1017922 - DNA, 15 bp, Homo sapiens
gccgtggggaccgca

SEQ ID NO: 1017923 - DNA, 15 bp, Homo sapiens
ccgtggggaccgcac

SEQ ID NO: 1017924 - DNA, 15 bp, Homo sapiens
cgtggggaccgcaca

SEQ ID NO: 1017925 - DNA, 15 bp, Homo sapiens
gtggggaccgcacaa

SEQ ID NO: 1017926 - DNA, 15 bp, Homo sapiens
tggggaccgcacaaa

SEQ ID NO: 1017927 - DNA, 15 bp, Homo sapiens
ggggaccgcacaaaa

SEQ ID NO: 1017928 - DNA, 15 bp, Homo sapiens
gggaccgcacaaaaa

SEQ ID NO: 1017929 - DNA, 15 bp, Homo sapiens
ggaccgcacaaaaac

SEQ ID NO: 1017930 - DNA, 15 bp, Homo sapiens
gaccgcacaaaaacg

SEQ ID NO: 1017931 - DNA, 15 bp, Homo sapiens
accgcacaaaaacgc

SEQ ID NO: 1017932 - DNA, 15 bp, Homo sapiens
ccgcacaaaaacgcg

SEQ ID NO: 1017933 - DNA, 15 bp, Homo sapiens
cgcacaaaaacgcgg

SEQ ID NO: 1017934 - DNA, 15 bp, Homo sapiens
gcacaaaaacgcggg

SEQ ID NO: 1017935 - DNA, 15 bp, Homo sapiens
cacaaaaacgcgggc

SEQ ID NO: 1017936 - DNA, 15 bp, Homo sapiens
acaaaaacgcgggcg

SEQ ID NO: 1017937 - DNA, 15 bp, Homo sapiens
caaaaacgcgggcgc

SEQ ID NO: 1017938 - DNA, 15 bp, Homo sapiens
aaaaacgcgggcgca

SEQ ID NO: 1017939 - DNA, 15 bp, Homo sapiens
aaaacgcgggcgcag

SEQ ID NO: 1017940 - DNA, 15 bp, Homo sapiens
aaacgcgggcgcagg

SEQ ID NO: 1017941 - DNA, 15 bp, Homo sapiens
aacgcgggcgcaggt

SEQ ID NO: 1017942 - DNA, 15 bp, Homo sapiens
acgcgggcgcaggtg

SEQ ID NO: 1017943 - DNA, 15 bp, Homo sapiens
cgcgggcgcaggtgg

SEQ ID NO: 1017944 - DNA, 15 bp, Homo sapiens
gcgggcgcaggtggg

SEQ ID NO: 1017945 - DNA, 15 bp, Homo sapiens
cgggcgcaggtggga

SEQ ID NO: 1017946 - DNA, 15 bp, Homo sapiens
gggcgcaggtgggag

SEQ ID NO: 1017947 - DNA, 15 bp, Homo sapiens
ggcgcaggtgggagg

SEQ ID NO: 1017948 - DNA, 15 bp, Homo sapiens
gcgcaggtgggaggg

SEQ ID NO: 1017949 - DNA, 15 bp, Homo sapiens
cgcaggtgggagggc

SEQ ID NO: 1017950 - DNA, 15 bp, Homo sapiens
gcaggtgggagggcg

SEQ ID NO: 1017951 - DNA, 15 bp, Homo sapiens
caggtgggagggcgg

SEQ ID NO: 1017952 - DNA, 15 bp, Homo sapiens
aggtgggagggcgga

SEQ ID NO: 1017953 - DNA, 15 bp, Homo sapiens
ggtgggagggcggag

SEQ ID NO: 1017954 - DNA, 15 bp, Homo sapiens
gtgggagggcggagg

SEQ ID NO: 1017955 - DNA, 15 bp, Homo sapiens
tgggagggcggaggg

SEQ ID NO: 1017956 - DNA, 15 bp, Homo sapiens
gggagggcggagggt

SEQ ID NO: 1017957 - DNA, 15 bp, Homo sapiens
ggagggcggagggtg

SEQ ID NO: 1017958 - DNA, 15 bp, Homo sapiens
gagggcggagggtgt

SEQ ID NO: 1017959 - DNA, 15 bp, Homo sapiens
agggcggagggtgtc

SEQ ID NO: 1017960 - DNA, 15 bp, Homo sapiens
gggcggagggtgtcc

SEQ ID NO: 1017961 - DNA, 15 bp, Homo sapiens
ggcggagggtgtcct

SEQ ID NO: 1017962 - DNA, 15 bp, Homo sapiens
gcggagggtgtcctg

SEQ ID NO: 1017963 - DNA, 15 bp, Homo sapiens
cggagggtgtcctga

SEQ ID NO: 1017964 - DNA, 15 bp, Homo sapiens
ggagggtgtcctgag

SEQ ID NO: 1017965 - DNA, 15 bp, Homo sapiens
gagggtgtcctgagc

SEQ ID NO: 1017966 - DNA, 15 bp, Homo sapiens
agggtgtcctgagct

SEQ ID NO: 1017967 - DNA, 15 bp, Homo sapiens
gggtgtcctgagctt

SEQ ID NO: 1017968 - DNA, 15 bp, Homo sapiens
ggtgtcctgagcttt

SEQ ID NO: 1017969 - DNA, 15 bp, Homo sapiens
gtgtcctgagctttc

SEQ ID NO: 1017970 - DNA, 15 bp, Homo sapiens
tgtcctgagctttct

SEQ ID NO: 1017971 - DNA, 15 bp, Homo sapiens
gtcctgagctttctt

SEQ ID NO: 1017972 - DNA, 15 bp, Homo sapiens
tcctgagctttcttt

SEQ ID NO: 1017973 - DNA, 15 bp, Homo sapiens
cctgagctttcttta

SEQ ID NO: 1017974 - DNA, 15 bp, Homo sapiens
ctgagctttctttac

SEQ ID NO: 1017975 - DNA, 15 bp, Homo sapiens
tgagctttctttacc

SEQ ID NO: 1017976 - DNA, 15 bp, Homo sapiens
gagctttctttaccc

SEQ ID NO: 1017977 - DNA, 15 bp, Homo sapiens
agctttctttaccct

SEQ ID NO: 1017978 - DNA, 15 bp, Homo sapiens
gctttctttaccctg

SEQ ID NO: 1017979 - DNA, 15 bp, Homo sapiens
ctttctttaccctgg

SEQ ID NO: 1017980 - DNA, 15 bp, Homo sapiens
tttctttaccctggt

SEQ ID NO: 1017981 - DNA, 15 bp, Homo sapiens
ttctttaccctggta

SEQ ID NO: 1017982 - DNA, 15 bp, Homo sapiens
tctttaccctggtaa

SEQ ID NO: 1017983 - DNA, 15 bp, Homo sapiens
ctttaccctggtaaa

SEQ ID NO: 1017984 - DNA, 15 bp, Homo sapiens
tttaccctggtaaag

SEQ ID NO: 1017985 - DNA, 15 bp, Homo sapiens
ttaccctggtaaaga

SEQ ID NO: 1017986 - DNA, 15 bp, Homo sapiens
taccctggtaaagaa

SEQ ID NO: 1017987 - DNA, 15 bp, Homo sapiens
accctggtaaagaag

SEQ ID NO: 1017988 - DNA, 15 bp, Homo sapiens
ccctggtaaagaagg

SEQ ID NO: 1017989 - DNA, 15 bp, Homo sapiens
cctggtaaagaaggt

SEQ ID NO: 1017990 - DNA, 15 bp, Homo sapiens
ctggtaaagaaggta

SEQ ID NO: 1017991 - DNA, 15 bp, Homo sapiens
tggtaaagaaggtag

SEQ ID NO: 1017992 - DNA, 15 bp, Homo sapiens
ggtaaagaaggtagg

SEQ ID NO: 1017993 - DNA, 15 bp, Homo sapiens
gtaaagaaggtaggc

SEQ ID NO: 1017994 - DNA, 15 bp, Homo sapiens
taaagaaggtaggcg

SEQ ID NO: 1017995 - DNA, 15 bp, Homo sapiens
aaagaaggtaggcgg

SEQ ID NO: 1017996 - DNA, 15 bp, Homo sapiens
aagaaggtaggcggt

SEQ ID NO: 1017997 - DNA, 15 bp, Homo sapiens
agaaggtaggcggtg

SEQ ID NO: 1017998 - DNA, 15 bp, Homo sapiens
gaaggtaggcggtga

SEQ ID NO: 1017999 - DNA, 15 bp, Homo sapiens
aaggtaggcggtgag

SEQ ID NO: 1018000 - DNA, 15 bp, Homo sapiens
aggtaggcggtgaga

SEQ ID NO: 1018001 - DNA, 15 bp, Homo sapiens
ggtaggcggtgagaa

SEQ ID NO: 1018002 - DNA, 15 bp, Homo sapiens
gtaggcggtgagaaa

SEQ ID NO: 1018003 - DNA, 15 bp, Homo sapiens
taggcggtgagaaaa

SEQ ID NO: 1018004 - DNA, 15 bp, Homo sapiens
aggcggtgagaaaag

SEQ ID NO: 1018005 - DNA, 15 bp, Homo sapiens
ggcggtgagaaaagc

SEQ ID NO: 1018006 - DNA, 15 bp, Homo sapiens
gcggtgagaaaagcg

SEQ ID NO: 1018007 - DNA, 15 bp, Homo sapiens
cggtgagaaaagcga

SEQ ID NO: 1018008 - DNA, 15 bp, Homo sapiens
ggtgagaaaagcgaa

SEQ ID NO: 1018009 - DNA, 15 bp, Homo sapiens
gtgagaaaagcgaat

SEQ ID NO: 1018010 - DNA, 15 bp, Homo sapiens
tgagaaaagcgaatg

SEQ ID NO: 1018011 - DNA, 15 bp, Homo sapiens
gagaaaagcgaatgt

SEQ ID NO: 1018012 - DNA, 15 bp, Homo sapiens
agaaaagcgaatgtt

SEQ ID NO: 1018013 - DNA, 15 bp, Homo sapiens
gaaaagcgaatgtta

SEQ ID NO: 1018014 - DNA, 15 bp, Homo sapiens
aaaagcgaatgttat

SEQ ID NO: 1018015 - DNA, 15 bp, Homo sapiens
aaagcgaatgttatt

SEQ ID NO: 1018016 - DNA, 15 bp, Homo sapiens
aagcgaatgttatta

SEQ ID NO: 1018017 - DNA, 15 bp, Homo sapiens
agcgaatgttattat

SEQ ID NO: 1018018 - DNA, 15 bp, Homo sapiens
gcgaatgttattata

SEQ ID NO: 1018019 - DNA, 15 bp, Homo sapiens
cgaatgttattatag

SEQ ID NO: 1018020 - DNA, 15 bp, Homo sapiens
gaatgttattataga

SEQ ID NO: 1018021 - DNA, 15 bp, Homo sapiens
aatgttattatagaa

SEQ ID NO: 1018022 - DNA, 15 bp, Homo sapiens
atgttattatagaag

SEQ ID NO: 1018023 - DNA, 15 bp, Homo sapiens
tgttattatagaagt

SEQ ID NO: 1018024 - DNA, 15 bp, Homo sapiens
gttattatagaagtt

SEQ ID NO: 1018025 - DNA, 15 bp, Homo sapiens
ttattatagaagttg

SEQ ID NO: 1018026 - DNA, 15 bp, Homo sapiens
tattatagaagttgg

SEQ ID NO: 1018027 - DNA, 15 bp, Homo sapiens
attatagaagttggc

SEQ ID NO: 1018028 - DNA, 15 bp, Homo sapiens
ttatagaagttggct

SEQ ID NO: 1018029 - DNA, 15 bp, Homo sapiens
tatagaagttggctt

SEQ ID NO: 1018030 - DNA, 15 bp, Homo sapiens
atagaagttggcttt

SEQ ID NO: 1018031 - DNA, 15 bp, Homo sapiens
tagaagttggctttg

SEQ ID NO: 1018032 - DNA, 15 bp, Homo sapiens
agaagttggctttgt

SEQ ID NO: 1018033 - DNA, 15 bp, Homo sapiens
gaagttggctttgta

SEQ ID NO: 1018034 - DNA, 15 bp, Homo sapiens
aagttggctttgtat

SEQ ID NO: 1018035 - DNA, 15 bp, Homo sapiens
agttggctttgtatt

SEQ ID NO: 1018036 - DNA, 15 bp, Homo sapiens
gttggctttgtattg

SEQ ID NO: 1018037 - DNA, 15 bp, Homo sapiens
ttggctttgtattga

SEQ ID NO: 1018038 - DNA, 15 bp, Homo sapiens
tggctttgtattgag

SEQ ID NO: 1018039 - DNA, 15 bp, Homo sapiens
ggctttgtattgagg

SEQ ID NO: 1018040 - DNA, 15 bp, Homo sapiens
gctttgtattgaggg

SEQ ID NO: 1018041 - DNA, 15 bp, Homo sapiens
ctttgtattgaggga

SEQ ID NO: 1018042 - DNA, 15 bp, Homo sapiens
tttgtattgagggag

SEQ ID NO: 1018043 - DNA, 15 bp, Homo sapiens
ttgtattgagggagt

SEQ ID NO: 1018044 - DNA, 15 bp, Homo sapiens
tgtattgagggagta

SEQ ID NO: 1018045 - DNA, 15 bp, Homo sapiens
gtattgagggagtaa

SEQ ID NO: 1018046 - DNA, 15 bp, Homo sapiens
tattgagggagtaag

SEQ ID NO: 1018047 - DNA, 15 bp, Homo sapiens
attgagggagtaaga

SEQ ID NO: 1018048 - DNA, 15 bp, Homo sapiens
ttgagggagtaagag

SEQ ID NO: 1018049 - DNA, 15 bp, Homo sapiens
tgagggagtaagagc

SEQ ID NO: 1018050 - DNA, 15 bp, Homo sapiens
gagggagtaagagct

SEQ ID NO: 1018051 - DNA, 15 bp, Homo sapiens
agggagtaagagctc

SEQ ID NO: 1018052 - DNA, 15 bp, Homo sapiens
gggagtaagagctct

SEQ ID NO: 1018053 - DNA, 15 bp, Homo sapiens
ggagtaagagctctc

SEQ ID NO: 1018054 - DNA, 15 bp, Homo sapiens
gagtaagagctctct

SEQ ID NO: 1018055 - DNA, 15 bp, Homo sapiens
agtaagagctctctt

SEQ ID NO: 1018056 - DNA, 15 bp, Homo sapiens
gtaagagctctcttc

SEQ ID NO: 1018057 - DNA, 15 bp, Homo sapiens
taagagctctcttca

SEQ ID NO: 1018058 - DNA, 15 bp, Homo sapiens
aagagctctcttcaa

SEQ ID NO: 1018059 - DNA, 15 bp, Homo sapiens
agagctctcttcaag

SEQ ID NO: 1018060 - DNA, 15 bp, Homo sapiens
gagctctcttcaagg

SEQ ID NO: 1018061 - DNA, 15 bp, Homo sapiens
agctctcttcaagga

SEQ ID NO: 1018062 - DNA, 15 bp, Homo sapiens
gctctcttcaaggag

SEQ ID NO: 1018063 - DNA, 15 bp, Homo sapiens
ctctcttcaaggaga

SEQ ID NO: 1018064 - DNA, 15 bp, Homo sapiens
tctcttcaaggagag

SEQ ID NO: 1018065 - DNA, 15 bp, Homo sapiens
ctcttcaaggagagg

SEQ ID NO: 1018066 - DNA, 15 bp, Homo sapiens
tcttcaaggagaggg

SEQ ID NO: 1018067 - DNA, 15 bp, Homo sapiens
cttcaaggagagggc

SEQ ID NO: 1018068 - DNA, 15 bp, Homo sapiens
ttcaaggagagggct

SEQ ID NO: 1018069 - DNA, 15 bp, Homo sapiens
tcaaggagagggctg

SEQ ID NO: 1018070 - DNA, 15 bp, Homo sapiens
caaggagagggctga

SEQ ID NO: 1018071 - DNA, 15 bp, Homo sapiens
aaggagagggctgaa

SEQ ID NO: 1018072 - DNA, 15 bp, Homo sapiens
aggagagggctgaaa

SEQ ID NO: 1018073 - DNA, 15 bp, Homo sapiens
ggagagggctgaaat

SEQ ID NO: 1018074 - DNA, 15 bp, Homo sapiens
gagagggctgaaatc

SEQ ID NO: 1018075 - DNA, 15 bp, Homo sapiens
agagggctgaaatct

SEQ ID NO: 1018076 - DNA, 15 bp, Homo sapiens
gagggctgaaatctt

SEQ ID NO: 1018077 - DNA, 15 bp, Homo sapiens
agggctgaaatcttt

SEQ ID NO: 1018078 - DNA, 15 bp, Homo sapiens
gggctgaaatcttta

SEQ ID NO: 1018079 - DNA, 15 bp, Homo sapiens
ggctgaaatctttaa

SEQ ID NO: 1018080 - DNA, 15 bp, Homo sapiens
gctgaaatctttaaa

SEQ ID NO: 1018081 - DNA, 15 bp, Homo sapiens
ctgaaatctttaaaa

SEQ ID NO: 1018082 - DNA, 15 bp, Homo sapiens
tgaaatctttaaaaa

SEQ ID NO: 1018083 - DNA, 15 bp, Homo sapiens
gaaatctttaaaaat

SEQ ID NO: 1018084 - DNA, 15 bp, Homo sapiens
aaatctttaaaaata

SEQ ID NO: 1018085 - DNA, 15 bp, Homo sapiens
aatctttaaaaataa

SEQ ID NO: 1018086 - DNA, 15 bp, Homo sapiens
atctttaaaaataaa

SEQ ID NO: 1018087 - DNA, 15 bp, Homo sapiens
tctttaaaaataaat

SEQ ID NO: 1018088 - DNA, 15 bp, Homo sapiens
ctttaaaaataaata

SEQ ID NO: 1018089 - DNA, 15 bp, Homo sapiens
tttaaaaataaataa

SEQ ID NO: 1018090 - DNA, 15 bp, Homo sapiens
ttaaaaataaataaa

SEQ ID NO: 1018091 - DNA, 15 bp, Homo sapiens
taaaaataaataaaa

SEQ ID NO: 1018092 - DNA, 15 bp, Homo sapiens
aaaaataaataaaac

SEQ ID NO: 1018093 - DNA, 15 bp, Homo sapiens
aaaataaataaaact

SEQ ID NO: 1018094 - DNA, 15 bp, Homo sapiens
aaataaataaaactt

SEQ ID NO: 1018095 - DNA, 15 bp, Homo sapiens
aataaataaaacttt

SEQ ID NO: 1018096 - DNA, 15 bp, Homo sapiens
ataaataaaactttc

SEQ ID NO: 1018097 - DNA, 15 bp, Homo sapiens
taaataaaactttct

SEQ ID NO: 1018098 - DNA, 15 bp, Homo sapiens
aaataaaactttctc

SEQ ID NO: 1018099 - DNA, 15 bp, Homo sapiens
aataaaactttctct

SEQ ID NO: 1018100 - DNA, 15 bp, Homo sapiens
ataaaactttctcta

SEQ ID NO: 1018101 - DNA, 15 bp, Homo sapiens
taaaactttctctac

SEQ ID NO: 1018102 - DNA, 15 bp, Homo sapiens
aaaactttctctact

SEQ ID NO: 1018103 - DNA, 15 bp, Homo sapiens
aaactttctctactg

SEQ ID NO: 1018104 - DNA, 15 bp, Homo sapiens
aactttctctactgt

SEQ ID NO: 1018105 - DNA, 15 bp, Homo sapiens
actttctctactgta

SEQ ID NO: 1018106 - DNA, 15 bp, Homo sapiens
ctttctctactgtaa

SEQ ID NO: 1018107 - DNA, 15 bp, Homo sapiens
tttctctactgtaat

SEQ ID NO: 1018108 - DNA, 15 bp, Homo sapiens
ttctctactgtaatt

SEQ ID NO: 1018109 - DNA, 15 bp, Homo sapiens
tctctactgtaattg

SEQ ID NO: 1018110 - DNA, 15 bp, Homo sapiens
ctctactgtaattgc

SEQ ID NO: 1018111 - DNA, 15 bp, Homo sapiens
tctactgtaattgct

SEQ ID NO: 1018112 - DNA, 15 bp, Homo sapiens
ctactgtaattgcta

SEQ ID NO: 1018113 - DNA, 15 bp, Homo sapiens
tactgtaattgctat

SEQ ID NO: 1018114 - DNA, 15 bp, Homo sapiens
actgtaattgctatt

SEQ ID NO: 1018115 - DNA, 15 bp, Homo sapiens
ctgtaattgctatta

SEQ ID NO: 1018116 - DNA, 15 bp, Homo sapiens
tgtaattgctattaa

SEQ ID NO: 1018117 - DNA, 15 bp, Homo sapiens
gtaattgctattaat

SEQ ID NO: 1018118 - DNA, 15 bp, Homo sapiens
taattgctattaata

SEQ ID NO: 1018119 - DNA, 15 bp, Homo sapiens
aattgctattaataa

SEQ ID NO: 1018120 - DNA, 15 bp, Homo sapiens
attgctattaataaa

SEQ ID NO: 1018121 - DNA, 15 bp, Homo sapiens
ttgctattaataaaa

SEQ ID NO: 1018122 - DNA, 15 bp, Homo sapiens
tgctattaataaaaa

SEQ ID NO: 1018123 - DNA, 15 bp, Homo sapiens
gctattaataaaaaa

SEQ ID NO: 1018124 - DNA, 15 bp, Homo sapiens
ctattaataaaaaaa

SEQ ID NO: 1018125 - DNA, 15 bp, Homo sapiens
tattaataaaaaaag

SEQ ID NO: 1018126 - DNA, 15 bp, Homo sapiens
attaataaaaaaagg

SEQ ID NO: 1018127 - DNA, 15 bp, Homo sapiens
ttaataaaaaaaggg

SEQ ID NO: 1018128 - DNA, 15 bp, Homo sapiens
taataaaaaaaggga

SEQ ID NO: 1018129 - DNA, 15 bp, Homo sapiens
aataaaaaaagggag

SEQ ID NO: 1018130 - DNA, 15 bp, Homo sapiens
ataaaaaaagggagc

SEQ ID NO: 1018131 - DNA, 15 bp, Homo sapiens
taaaaaaagggagcc

SEQ ID NO: 1018132 - DNA, 15 bp, Homo sapiens
aaaaaaagggagccc

SEQ ID NO: 1018133 - DNA, 15 bp, Homo sapiens
aaaaaagggagcccg

SEQ ID NO: 1018134 - DNA, 15 bp, Homo sapiens
aaaaagggagcccgg

SEQ ID NO: 1018135 - DNA, 15 bp, Homo sapiens
aaaagggagcccgga

SEQ ID NO: 1018136 - DNA, 15 bp, Homo sapiens
aaagggagcccggat

SEQ ID NO: 1018137 - DNA, 15 bp, Homo sapiens
aagggagcccggatg

SEQ ID NO: 1018138 - DNA, 15 bp, Homo sapiens
agggagcccggatga

SEQ ID NO: 1018139 - DNA, 15 bp, Homo sapiens
gggagcccggatgaa

SEQ ID NO: 1018140 - DNA, 15 bp, Homo sapiens
ggagcccggatgaat

SEQ ID NO: 1018141 - DNA, 15 bp, Homo sapiens
gagcccggatgaatt

SEQ ID NO: 1018142 - DNA, 15 bp, Homo sapiens
agcccggatgaatta

SEQ ID NO: 1018143 - DNA, 15 bp, Homo sapiens
gcccggatgaattaa

SEQ ID NO: 1018144 - DNA, 15 bp, Homo sapiens
cccggatgaattaag

SEQ ID NO: 1018145 - DNA, 15 bp, Homo sapiens
ccggatgaattaagt

SEQ ID NO: 1018146 - DNA, 15 bp, Homo sapiens
cggatgaattaagta

SEQ ID NO: 1018147 - DNA, 15 bp, Homo sapiens
ggatgaattaagtag

SEQ ID NO: 1018148 - DNA, 15 bp, Homo sapiens
gatgaattaagtagc

SEQ ID NO: 1018149 - DNA, 15 bp, Homo sapiens
atgaattaagtagct

SEQ ID NO: 1018150 - DNA, 15 bp, Homo sapiens
tgaattaagtagctc

SEQ ID NO: 1018151 - DNA, 15 bp, Homo sapiens
gaattaagtagctca

SEQ ID NO: 1018152 - DNA, 15 bp, Homo sapiens
aattaagtagctcaa

SEQ ID NO: 1018153 - DNA, 15 bp, Homo sapiens
attaagtagctcaaa

SEQ ID NO: 1018154 - DNA, 15 bp, Homo sapiens
ttaagtagctcaaaa

SEQ ID NO: 1018155 - DNA, 15 bp, Homo sapiens
taagtagctcaaaac

SEQ ID NO: 1018156 - DNA, 15 bp, Homo sapiens
aagtagctcaaaact

SEQ ID NO: 1018157 - DNA, 15 bp, Homo sapiens
agtagctcaaaactg

SEQ ID NO: 1018158 - DNA, 15 bp, Homo sapiens
gtagctcaaaactgc

SEQ ID NO: 1018159 - DNA, 15 bp, Homo sapiens
tagctcaaaactgcc

SEQ ID NO: 1018160 - DNA, 15 bp, Homo sapiens
agctcaaaactgcct

SEQ ID NO: 1018161 - DNA, 15 bp, Homo sapiens
gctcaaaactgcctg

SEQ ID NO: 1018162 - DNA, 15 bp, Homo sapiens
ctcaaaactgcctgt

SEQ ID NO: 1018163 - DNA, 15 bp, Homo sapiens
tcaaaactgcctgtt

SEQ ID NO: 1018164 - DNA, 15 bp, Homo sapiens
caaaactgcctgttc

SEQ ID NO: 1018165 - DNA, 15 bp, Homo sapiens
aaaactgcctgttcg

SEQ ID NO: 1018166 - DNA, 15 bp, Homo sapiens
aaactgcctgttcgt

SEQ ID NO: 1018167 - DNA, 15 bp, Homo sapiens
aactgcctgttcgtc

SEQ ID NO: 1018168 - DNA, 15 bp, Homo sapiens
actgcctgttcgtca

SEQ ID NO: 1018169 - DNA, 15 bp, Homo sapiens
ctgcctgttcgtcat

SEQ ID NO: 1018170 - DNA, 15 bp, Homo sapiens
tgcctgttcgtcatg

SEQ ID NO: 1018171 - DNA, 15 bp, Homo sapiens
gcctgttcgtcatga

SEQ ID NO: 1018172 - DNA, 15 bp, Homo sapiens
cctgttcgtcatgat

SEQ ID NO: 1018173 - DNA, 15 bp, Homo sapiens
ctgttcgtcatgatc

SEQ ID NO: 1018174 - DNA, 15 bp, Homo sapiens
tgttcgtcatgatca

SEQ ID NO: 1018175 - DNA, 15 bp, Homo sapiens
gttcgtcatgatcag

SEQ ID NO: 1018176 - DNA, 15 bp, Homo sapiens
ttcgtcatgatcagg

SEQ ID NO: 1018177 - DNA, 15 bp, Homo sapiens
tcgtcatgatcagga

SEQ ID NO: 1018178 - DNA, 15 bp, Homo sapiens
cgtcatgatcaggag

SEQ ID NO: 1018179 - DNA, 15 bp, Homo sapiens
gtcatgatcaggagc

SEQ ID NO: 1018180 - DNA, 15 bp, Homo sapiens
tcatgatcaggagct

SEQ ID NO: 1018181 - DNA, 15 bp, Homo sapiens
catgatcaggagctc

SEQ ID NO: 1018182 - DNA, 15 bp, Homo sapiens
atgatcaggagctcc

SEQ ID NO: 1018183 - DNA, 15 bp, Homo sapiens
tgatcaggagctcct

SEQ ID NO: 1018184 - DNA, 15 bp, Homo sapiens
gatcaggagctcctt

SEQ ID NO: 1018185 - DNA, 15 bp, Homo sapiens
atcaggagctccttc

SEQ ID NO: 1018186 - DNA, 15 bp, Homo sapiens
tcaggagctccttct

SEQ ID NO: 1018187 - DNA, 15 bp, Homo sapiens
caggagctccttctc

SEQ ID NO: 1018188 - DNA, 15 bp, Homo sapiens
aggagctccttctct

SEQ ID NO: 1018189 - DNA, 15 bp, Homo sapiens
ggagctccttctcta

SEQ ID NO: 1018190 - DNA, 15 bp, Homo sapiens
gagctccttctctac

SEQ ID NO: 1018191 - DNA, 15 bp, Homo sapiens
agctccttctctaca

SEQ ID NO: 1018192 - DNA, 15 bp, Homo sapiens
gctccttctctacaa

SEQ ID NO: 1018193 - DNA, 15 bp, Homo sapiens
ctccttctctacaag

SEQ ID NO: 1018194 - DNA, 15 bp, Homo sapiens
tccttctctacaagg

SEQ ID NO: 1018195 - DNA, 15 bp, Homo sapiens
ccttctctacaagga

SEQ ID NO: 1018196 - DNA, 15 bp, Homo sapiens
cttctctacaaggag

SEQ ID NO: 1018197 - DNA, 15 bp, Homo sapiens
ttctctacaaggagg

SEQ ID NO: 1018198 - DNA, 15 bp, Homo sapiens
tctctacaaggaggg

SEQ ID NO: 1018199 - DNA, 15 bp, Homo sapiens
ctctacaaggagggg

SEQ ID NO: 1018200 - DNA, 15 bp, Homo sapiens
tctacaaggagggga

SEQ ID NO: 1018201 - DNA, 15 bp, Homo sapiens
ctacaaggaggggaa

SEQ ID NO: 1018202 - DNA, 15 bp, Homo sapiens
tacaaggaggggaaa

SEQ ID NO: 1018203 - DNA, 15 bp, Homo sapiens
acaaggaggggaaag

SEQ ID NO: 1018204 - DNA, 15 bp, Homo sapiens
caaggaggggaaaga

SEQ ID NO: 1018205 - DNA, 15 bp, Homo sapiens
aaggaggggaaagaa

SEQ ID NO: 1018206 - DNA, 15 bp, Homo sapiens
aggaggggaaagaaa

SEQ ID NO: 1018207 - DNA, 15 bp, Homo sapiens
ggaggggaaagaaaa

SEQ ID NO: 1018208 - DNA, 15 bp, Homo sapiens
gaggggaaagaaaat

SEQ ID NO: 1018209 - DNA, 15 bp, Homo sapiens
aggggaaagaaaatg

SEQ ID NO: 1018210 - DNA, 15 bp, Homo sapiens
ggggaaagaaaatgt

SEQ ID NO: 1018211 - DNA, 15 bp, Homo sapiens
gggaaagaaaatgtg

SEQ ID NO: 1018212 - DNA, 15 bp, Homo sapiens
ggaaagaaaatgtga

SEQ ID NO: 1018213 - DNA, 15 bp, Homo sapiens
gaaagaaaatgtgaa

SEQ ID NO: 1018214 - DNA, 15 bp, Homo sapiens
aaagaaaatgtgaaa

SEQ ID NO: 1018215 - DNA, 15 bp, Homo sapiens
aagaaaatgtgaaaa

SEQ ID NO: 1018216 - DNA, 15 bp, Homo sapiens
agaaaatgtgaaaac

SEQ ID NO: 1018217 - DNA, 15 bp, Homo sapiens
gaaaatgtgaaaaca

SEQ ID NO: 1018218 - DNA, 15 bp, Homo sapiens
aaaatgtgaaaacaa

SEQ ID NO: 1018219 - DNA, 15 bp, Homo sapiens
aaatgtgaaaacaaa

SEQ ID NO: 1018220 - DNA, 15 bp, Homo sapiens
aatgtgaaaacaaaa

SEQ ID NO: 1018221 - DNA, 15 bp, Homo sapiens
atgtgaaaacaaaaa

SEQ ID NO: 1018222 - DNA, 15 bp, Homo sapiens
tgtgaaaacaaaaac

SEQ ID NO: 1018223 - DNA, 15 bp, Homo sapiens
gtgaaaacaaaaact

SEQ ID NO: 1018224 - DNA, 15 bp, Homo sapiens
tgaaaacaaaaacta

SEQ ID NO: 1018225 - DNA, 15 bp, Homo sapiens
gaaaacaaaaactaa

SEQ ID NO: 1018226 - DNA, 15 bp, Homo sapiens
aaaacaaaaactaaa

SEQ ID NO: 1018227 - DNA, 15 bp, Homo sapiens
aaacaaaaactaaat

SEQ ID NO: 1018228 - DNA, 15 bp, Homo sapiens
aacaaaaactaaatt

SEQ ID NO: 1018229 - DNA, 15 bp, Homo sapiens
acaaaaactaaattc

SEQ ID NO: 1018230 - DNA, 15 bp, Homo sapiens
caaaaactaaattca

SEQ ID NO: 1018231 - DNA, 15 bp, Homo sapiens
aaaaactaaattcaa

SEQ ID NO: 1018232 - DNA, 15 bp, Homo sapiens
aaaactaaattcaag

SEQ ID NO: 1018233 - DNA, 15 bp, Homo sapiens
aaactaaattcaaga

SEQ ID NO: 1018234 - DNA, 15 bp, Homo sapiens
aactaaattcaagaa

SEQ ID NO: 1018235 - DNA, 15 bp, Homo sapiens
actaaattcaagaag

SEQ ID NO: 1018236 - DNA, 15 bp, Homo sapiens
ctaaattcaagaagc

SEQ ID NO: 1018237 - DNA, 15 bp, Homo sapiens
taaattcaagaagct

SEQ ID NO: 1018238 - DNA, 15 bp, Homo sapiens
aaattcaagaagctc

SEQ ID NO: 1018239 - DNA, 15 bp, Homo sapiens
aattcaagaagctcc

SEQ ID NO: 1018240 - DNA, 15 bp, Homo sapiens
attcaagaagctcct

SEQ ID NO: 1018241 - DNA, 15 bp, Homo sapiens
ttcaagaagctcctt

SEQ ID NO: 1018242 - DNA, 15 bp, Homo sapiens
tcaagaagctccttg

SEQ ID NO: 1018243 - DNA, 15 bp, Homo sapiens
caagaagctccttga

SEQ ID NO: 1018244 - DNA, 15 bp, Homo sapiens
aagaagctccttgac

SEQ ID NO: 1018245 - DNA, 15 bp, Homo sapiens
agaagctccttgacc

SEQ ID NO: 1018246 - DNA, 15 bp, Homo sapiens
gaagctccttgacca

SEQ ID NO: 1018247 - DNA, 15 bp, Homo sapiens
aagctccttgaccag

SEQ ID NO: 1018248 - DNA, 15 bp, Homo sapiens
agctccttgaccagc

SEQ ID NO: 1018249 - DNA, 15 bp, Homo sapiens
gctccttgaccagcg

SEQ ID NO: 1018250 - DNA, 15 bp, Homo sapiens
ctccttgaccagcgc

SEQ ID NO: 1018251 - DNA, 15 bp, Homo sapiens
tccttgaccagcgcg

SEQ ID NO: 1018252 - DNA, 15 bp, Homo sapiens
ccttgaccagcgcgg

SEQ ID NO: 1018253 - DNA, 15 bp, Homo sapiens
cttgaccagcgcggg

SEQ ID NO: 1018254 - DNA, 15 bp, Homo sapiens
ttgaccagcgcgggt

SEQ ID NO: 1018255 - DNA, 15 bp, Homo sapiens
tgaccagcgcgggtg

SEQ ID NO: 1018256 - DNA, 15 bp, Homo sapiens
gaccagcgcgggtgt

SEQ ID NO: 1018257 - DNA, 15 bp, Homo sapiens
accagcgcgggtgtc

SEQ ID NO: 1018258 - DNA, 15 bp, Homo sapiens
ccagcgcgggtgtct

SEQ ID NO: 1018259 - DNA, 15 bp, Homo sapiens
cagcgcgggtgtctt

SEQ ID NO: 1018260 - DNA, 15 bp, Homo sapiens
agcgcgggtgtcttg

SEQ ID NO: 1018261 - DNA, 15 bp, Homo sapiens
gcgcgggtgtcttgg

SEQ ID NO: 1018262 - DNA, 15 bp, Homo sapiens
cgcgggtgtcttgga

SEQ ID NO: 1018263 - DNA, 15 bp, Homo sapiens
gcgggtgtcttggag

SEQ ID NO: 1018264 - DNA, 15 bp, Homo sapiens
cgggtgtcttggagg

SEQ ID NO: 1018265 - DNA, 15 bp, Homo sapiens
gggtgtcttggaggc

SEQ ID NO: 1018266 - DNA, 15 bp, Homo sapiens
ggtgtcttggaggca

SEQ ID NO: 1018267 - DNA, 15 bp, Homo sapiens
gtgtcttggaggcac

SEQ ID NO: 1018268 - DNA, 15 bp, Homo sapiens
tgtcttggaggcacc

SEQ ID NO: 1018269 - DNA, 15 bp, Homo sapiens
gtcttggaggcacct

SEQ ID NO: 1018270 - DNA, 15 bp, Homo sapiens
tcttggaggcacctg

SEQ ID NO: 1018271 - DNA, 15 bp, Homo sapiens
cttggaggcacctgc

SEQ ID NO: 1018272 - DNA, 15 bp, Homo sapiens
ttggaggcacctgcc

SEQ ID NO: 1018273 - DNA, 15 bp, Homo sapiens
tggaggcacctgccg

SEQ ID NO: 1018274 - DNA, 15 bp, Homo sapiens
ggaggcacctgccgg

SEQ ID NO: 1018275 - DNA, 15 bp, Homo sapiens
gaggcacctgccggg

SEQ ID NO: 1018276 - DNA, 15 bp, Homo sapiens
aggcacctgccgggg

SEQ ID NO: 1018277 - DNA, 15 bp, Homo sapiens
ggcacctgccggggc

SEQ ID NO: 1018278 - DNA, 15 bp, Homo sapiens
gcacctgccggggcc

SEQ ID NO: 1018279 - DNA, 15 bp, Homo sapiens
cacctgccggggccg

SEQ ID NO: 1018280 - DNA, 15 bp, Homo sapiens
acctgccggggccgg

SEQ ID NO: 1018281 - DNA, 15 bp, Homo sapiens
cctgccggggccggc

SEQ ID NO: 1018282 - DNA, 15 bp, Homo sapiens
ctgccggggccggcc

SEQ ID NO: 1018283 - DNA, 15 bp, Homo sapiens
tgccggggccggccg

SEQ ID NO: 1018284 - DNA, 15 bp, Homo sapiens
gccggggccggccgg

SEQ ID NO: 1018285 - DNA, 15 bp, Homo sapiens
ccggggccggccggg

SEQ ID NO: 1018286 - DNA, 15 bp, Homo sapiens
cggggccggccgggg

SEQ ID NO: 1018287 - DNA, 15 bp, Homo sapiens
ggggccggccgggga

SEQ ID NO: 1018288 - DNA, 15 bp, Homo sapiens
gggccggccggggag

SEQ ID NO: 1018289 - DNA, 15 bp, Homo sapiens
ggccggccggggagc

SEQ ID NO: 1018290 - DNA, 15 bp, Homo sapiens
gccggccggggagcg

SEQ ID NO: 1018291 - DNA, 15 bp, Homo sapiens
ccggccggggagcgc

SEQ ID NO: 1018292 - DNA, 15 bp, Homo sapiens
cggccggggagcgct

SEQ ID NO: 1018293 - DNA, 15 bp, Homo sapiens
ggccggggagcgctc

SEQ ID NO: 1018294 - DNA, 15 bp, Homo sapiens
gccggggagcgctcc

SEQ ID NO: 1018295 - DNA, 15 bp, Homo sapiens
ccggggagcgctccg

SEQ ID NO: 1018296 - DNA, 15 bp, Homo sapiens
cggggagcgctccgc

SEQ ID NO: 1018297 - DNA, 15 bp, Homo sapiens
ggggagcgctccgcc

SEQ ID NO: 1018298 - DNA, 15 bp, Homo sapiens
gggagcgctccgccc

SEQ ID NO: 1018299 - DNA, 15 bp, Homo sapiens
ggagcgctccgccct

SEQ ID NO: 1018300 - DNA, 15 bp, Homo sapiens
gagcgctccgccctc

SEQ ID NO: 1018301 - DNA, 15 bp, Homo sapiens
agcgctccgccctcc

SEQ ID NO: 1018302 - DNA, 15 bp, Homo sapiens
gcgctccgccctccc

SEQ ID NO: 1018303 - DNA, 15 bp, Homo sapiens
cgctccgccctccca

SEQ ID NO: 1018304 - DNA, 15 bp, Homo sapiens
gctccgccctcccag

SEQ ID NO: 1018305 - DNA, 15 bp, Homo sapiens
ctccgccctcccagc

SEQ ID NO: 1018306 - DNA, 15 bp, Homo sapiens
tccgccctcccagcc

SEQ ID NO: 1018307 - DNA, 15 bp, Homo sapiens
ccgccctcccagccc

SEQ ID NO: 1018308 - DNA, 15 bp, Homo sapiens
cgccctcccagcccc

SEQ ID NO: 1018309 - DNA, 15 bp, Homo sapiens
gccctcccagcccct

SEQ ID NO: 1018310 - DNA, 15 bp, Homo sapiens
ccctcccagcccctg

SEQ ID NO: 1018311 - DNA, 15 bp, Homo sapiens
cctcccagcccctgg

SEQ ID NO: 1018312 - DNA, 15 bp, Homo sapiens
ctcccagcccctggc

SEQ ID NO: 1018313 - DNA, 15 bp, Homo sapiens
tcccagcccctggcg

SEQ ID NO: 1018314 - DNA, 15 bp, Homo sapiens
cccagcccctggcgc

SEQ ID NO: 1018315 - DNA, 15 bp, Homo sapiens
ccagcccctggcgcg

SEQ ID NO: 1018316 - DNA, 15 bp, Homo sapiens
cagcccctggcgcgc

SEQ ID NO: 1018317 - DNA, 15 bp, Homo sapiens
agcccctggcgcgca

SEQ ID NO: 1018318 - DNA, 15 bp, Homo sapiens
gcccctggcgcgcag

SEQ ID NO: 1018319 - DNA, 15 bp, Homo sapiens
cccctggcgcgcaga

SEQ ID NO: 1018320 - DNA, 15 bp, Homo sapiens
ccctggcgcgcagag

SEQ ID NO: 1018321 - DNA, 15 bp, Homo sapiens
cctggcgcgcagagg

SEQ ID NO: 1018322 - DNA, 15 bp, Homo sapiens
ctggcgcgcagagga

SEQ ID NO: 1018323 - DNA, 15 bp, Homo sapiens
tggcgcgcagaggag

SEQ ID NO: 1018324 - DNA, 15 bp, Homo sapiens
ggcgcgcagaggaga

SEQ ID NO: 1018325 - DNA, 15 bp, Homo sapiens
gcgcgcagaggagac

SEQ ID NO: 1018326 - DNA, 15 bp, Homo sapiens
cgcgcagaggagact

SEQ ID NO: 1018327 - DNA, 15 bp, Homo sapiens
gcgcagaggagacta

SEQ ID NO: 1018328 - DNA, 15 bp, Homo sapiens
cgcagaggagactaa

SEQ ID NO: 1018329 - DNA, 15 bp, Homo sapiens
gcagaggagactaaa

SEQ ID NO: 1018330 - DNA, 15 bp, Homo sapiens
cagaggagactaaaa

SEQ ID NO: 1018331 - DNA, 15 bp, Homo sapiens
agaggagactaaaac

SEQ ID NO: 1018332 - DNA, 15 bp, Homo sapiens
gaggagactaaaaca

SEQ ID NO: 1018333 - DNA, 15 bp, Homo sapiens
aggagactaaaacag

SEQ ID NO: 1018334 - DNA, 15 bp, Homo sapiens
ggagactaaaacagc

SEQ ID NO: 1018335 - DNA, 15 bp, Homo sapiens
gagactaaaacagct

SEQ ID NO: 1018336 - DNA, 15 bp, Homo sapiens
agactaaaacagcta

SEQ ID NO: 1018337 - DNA, 15 bp, Homo sapiens
gactaaaacagctaa

SEQ ID NO: 1018338 - DNA, 15 bp, Homo sapiens
actaaaacagctaag

SEQ ID NO: 1018339 - DNA, 15 bp, Homo sapiens
ctaaaacagctaagg

SEQ ID NO: 1018340 - DNA, 15 bp, Homo sapiens
taaaacagctaagga

SEQ ID NO: 1018341 - DNA, 15 bp, Homo sapiens
aaaacagctaaggag

SEQ ID NO: 1018342 - DNA, 15 bp, Homo sapiens
aaacagctaaggaga

SEQ ID NO: 1018343 - DNA, 15 bp, Homo sapiens
aacagctaaggagaa

SEQ ID NO: 1018344 - DNA, 15 bp, Homo sapiens
acagctaaggagaaa

SEQ ID NO: 1018345 - DNA, 15 bp, Homo sapiens
cagctaaggagaaag

SEQ ID NO: 1018346 - DNA, 15 bp, Homo sapiens
agctaaggagaaagc

SEQ ID NO: 1018347 - DNA, 15 bp, Homo sapiens
gctaaggagaaagca

SEQ ID NO: 1018348 - DNA, 15 bp, Homo sapiens
ctaaggagaaagcaa

SEQ ID NO: 1018349 - DNA, 15 bp, Homo sapiens
taaggagaaagcaaa

SEQ ID NO: 1018350 - DNA, 15 bp, Homo sapiens
aaggagaaagcaaaa

SEQ ID NO: 1018351 - DNA, 15 bp, Homo sapiens
aggagaaagcaaaac

SEQ ID NO: 1018352 - DNA, 15 bp, Homo sapiens
ggagaaagcaaaaca

SEQ ID NO: 1018353 - DNA, 15 bp, Homo sapiens
gagaaagcaaaacaa

SEQ ID NO: 1018354 - DNA, 15 bp, Homo sapiens
agaaagcaaaacaaa

SEQ ID NO: 1018355 - DNA, 15 bp, Homo sapiens
gaaagcaaaacaaaa

SEQ ID NO: 1018356 - DNA, 15 bp, Homo sapiens
aaagcaaaacaaaaa

SEQ ID NO: 1018357 - DNA, 15 bp, Homo sapiens
aagcaaaacaaaaac

SEQ ID NO: 1018358 - DNA, 15 bp, Homo sapiens
agcaaaacaaaaaca

SEQ ID NO: 1018359 - DNA, 15 bp, Homo sapiens
gcaaaacaaaaacaa

SEQ ID NO: 1018360 - DNA, 15 bp, Homo sapiens
caaaacaaaaacaat

SEQ ID NO: 1018361 - DNA, 15 bp, Homo sapiens
aaaacaaaaacaatg

SEQ ID NO: 1018362 - DNA, 15 bp, Homo sapiens
aaacaaaaacaatga

SEQ ID NO: 1018363 - DNA, 15 bp, Homo sapiens
aacaaaaacaatgat

SEQ ID NO: 1018364 - DNA, 15 bp, Homo sapiens
acaaaaacaatgata

SEQ ID NO: 1018365 - DNA, 15 bp, Homo sapiens
caaaaacaatgataa

SEQ ID NO: 1018366 - DNA, 15 bp, Homo sapiens
aaaaacaatgataaa

SEQ ID NO: 1018367 - DNA, 15 bp, Homo sapiens
aaaacaatgataaaa

SEQ ID NO: 1018368 - DNA, 15 bp, Homo sapiens
aaacaatgataaaaa

SEQ ID NO: 1018369 - DNA, 15 bp, Homo sapiens
aacaatgataaaaac

SEQ ID NO: 1018370 - DNA, 15 bp, Homo sapiens
acaatgataaaaacg

SEQ ID NO: 1018371 - DNA, 15 bp, Homo sapiens
caatgataaaaacgt

SEQ ID NO: 1018372 - DNA, 15 bp, Homo sapiens
aatgataaaaacgtt

SEQ ID NO: 1018373 - DNA, 15 bp, Homo sapiens
atgataaaaacgttt

SEQ ID NO: 1018374 - DNA, 15 bp, Homo sapiens
tgataaaaacgttta

SEQ ID NO: 1018375 - DNA, 15 bp, Homo sapiens
gataaaaacgtttaa

SEQ ID NO: 1018376 - DNA, 15 bp, Homo sapiens
ataaaaacgtttaaa

SEQ ID NO: 1018377 - DNA, 15 bp, Homo sapiens
taaaaacgtttaaaa

SEQ ID NO: 1018378 - DNA, 15 bp, Homo sapiens
aaaaacgtttaaaat

SEQ ID NO: 1018379 - DNA, 15 bp, Homo sapiens
aaaacgtttaaaatc

SEQ ID NO: 1018380 - DNA, 15 bp, Homo sapiens
aaacgtttaaaatcc

SEQ ID NO: 1018381 - DNA, 15 bp, Homo sapiens
aacgtttaaaatcca

SEQ ID NO: 1018382 - DNA, 15 bp, Homo sapiens
acgtttaaaatccaa

SEQ ID NO: 1018383 - DNA, 15 bp, Homo sapiens
cgtttaaaatccaag

SEQ ID NO: 1018384 - DNA, 15 bp, Homo sapiens
gtttaaaatccaagg

SEQ ID NO: 1018385 - DNA, 15 bp, Homo sapiens
tttaaaatccaagga

SEQ ID NO: 1018386 - DNA, 15 bp, Homo sapiens
ttaaaatccaaggac

SEQ ID NO: 1018387 - DNA, 15 bp, Homo sapiens
taaaatccaaggaca

SEQ ID NO: 1018388 - DNA, 15 bp, Homo sapiens
aaaatccaaggacaa

SEQ ID NO: 1018389 - DNA, 15 bp, Homo sapiens
aaatccaaggacaaa

SEQ ID NO: 1018390 - DNA, 15 bp, Homo sapiens
aatccaaggacaaaa

SEQ ID NO: 1018391 - DNA, 15 bp, Homo sapiens
atccaaggacaaaaa

SEQ ID NO: 1018392 - DNA, 15 bp, Homo sapiens
tccaaggacaaaaac

SEQ ID NO: 1018393 - DNA, 15 bp, Homo sapiens
ccaaggacaaaaacc

SEQ ID NO: 1018394 - DNA, 15 bp, Homo sapiens
caaggacaaaaaccg

SEQ ID NO: 1018395 - DNA, 15 bp, Homo sapiens
aaggacaaaaaccgg

SEQ ID NO: 1018396 - DNA, 15 bp, Homo sapiens
aggacaaaaaccgga

SEQ ID NO: 1018397 - DNA, 15 bp, Homo sapiens
ggacaaaaaccggag

SEQ ID NO: 1018398 - DNA, 15 bp, Homo sapiens
gacaaaaaccggagt

SEQ ID NO: 1018399 - DNA, 15 bp, Homo sapiens
acaaaaaccggagtc

SEQ ID NO: 1018400 - DNA, 15 bp, Homo sapiens
caaaaaccggagtcg

SEQ ID NO: 1018401 - DNA, 15 bp, Homo sapiens
aaaaaccggagtcgg

SEQ ID NO: 1018402 - DNA, 15 bp, Homo sapiens
aaaaccggagtcggt

SEQ ID NO: 1018403 - DNA, 15 bp, Homo sapiens
aaaccggagtcggtc

SEQ ID NO: 1018404 - DNA, 15 bp, Homo sapiens
aaccggagtcggtct

SEQ ID NO: 1018405 - DNA, 15 bp, Homo sapiens
accggagtcggtctc

SEQ ID NO: 1018406 - DNA, 15 bp, Homo sapiens
ccggagtcggtctca

SEQ ID NO: 1018407 - DNA, 15 bp, Homo sapiens
cggagtcggtctcaa

SEQ ID NO: 1018408 - DNA, 15 bp, Homo sapiens
ggagtcggtctcaaa

SEQ ID NO: 1018409 - DNA, 15 bp, Homo sapiens
gagtcggtctcaaaa

SEQ ID NO: 1018410 - DNA, 15 bp, Homo sapiens
agtcggtctcaaaat

SEQ ID NO: 1018411 - DNA, 15 bp, Homo sapiens
gtcggtctcaaaatc

SEQ ID NO: 1018412 - DNA, 15 bp, Homo sapiens
tcggtctcaaaatcc

SEQ ID NO: 1018413 - DNA, 15 bp, Homo sapiens
cggtctcaaaatccg

SEQ ID NO: 1018414 - DNA, 15 bp, Homo sapiens
ggtctcaaaatccgc

SEQ ID NO: 1018415 - DNA, 15 bp, Homo sapiens
gtctcaaaatccgcg

SEQ ID NO: 1018416 - DNA, 15 bp, Homo sapiens
tctcaaaatccgcgc

SEQ ID NO: 1018417 - DNA, 15 bp, Homo sapiens
ctcaaaatccgcgcc

SEQ ID NO: 1018418 - DNA, 15 bp, Homo sapiens
tcaaaatccgcgccg

SEQ ID NO: 1018419 - DNA, 15 bp, Homo sapiens
caaaatccgcgccgt

SEQ ID NO: 1018420 - DNA, 15 bp, Homo sapiens
aaaatccgcgccgtt

SEQ ID NO: 1018421 - DNA, 15 bp, Homo sapiens
aaatccgcgccgttc

SEQ ID NO: 1018422 - DNA, 15 bp, Homo sapiens
aatccgcgccgttca

SEQ ID NO: 1018423 - DNA, 15 bp, Homo sapiens
atccgcgccgttcag

SEQ ID NO: 1018424 - DNA, 15 bp, Homo sapiens
tccgcgccgttcagt

SEQ ID NO: 1018425 - DNA, 15 bp, Homo sapiens
ccgcgccgttcagtg

SEQ ID NO: 1018426 - DNA, 15 bp, Homo sapiens
cgcgccgttcagtgc

SEQ ID NO: 1018427 - DNA, 15 bp, Homo sapiens
gcgccgttcagtgct

SEQ ID NO: 1018428 - DNA, 15 bp, Homo sapiens
cgccgttcagtgctc

SEQ ID NO: 1018429 - DNA, 15 bp, Homo sapiens
gccgttcagtgctcc

SEQ ID NO: 1018430 - DNA, 15 bp, Homo sapiens
ccgttcagtgctcca

SEQ ID NO: 1018431 - DNA, 15 bp, Homo sapiens
cgttcagtgctccac

SEQ ID NO: 1018432 - DNA, 15 bp, Homo sapiens
gttcagtgctccact

SEQ ID NO: 1018433 - DNA, 15 bp, Homo sapiens
ttcagtgctccactc

SEQ ID NO: 1018434 - DNA, 15 bp, Homo sapiens
tcagtgctccactcg

SEQ ID NO: 1018435 - DNA, 15 bp, Homo sapiens
cagtgctccactcgg

SEQ ID NO: 1018436 - DNA, 15 bp, Homo sapiens
agtgctccactcggt

SEQ ID NO: 1018437 - DNA, 15 bp, Homo sapiens
gtgctccactcggta

SEQ ID NO: 1018438 - DNA, 15 bp, Homo sapiens
tgctccactcggtag

SEQ ID NO: 1018439 - DNA, 15 bp, Homo sapiens
gctccactcggtagt

SEQ ID NO: 1018440 - DNA, 15 bp, Homo sapiens
ctccactcggtagtc

SEQ ID NO: 1018441 - DNA, 15 bp, Homo sapiens
tccactcggtagtcg

SEQ ID NO: 1018442 - DNA, 15 bp, Homo sapiens
ccactcggtagtcga

SEQ ID NO: 1018443 - DNA, 15 bp, Homo sapiens
cactcggtagtcgac

SEQ ID NO: 1018444 - DNA, 15 bp, Homo sapiens
actcggtagtcgact

SEQ ID NO: 1018445 - DNA, 15 bp, Homo sapiens
ctcggtagtcgactc

SEQ ID NO: 1018446 - DNA, 15 bp, Homo sapiens
tcggtagtcgactcg

SEQ ID NO: 1018447 - DNA, 15 bp, Homo sapiens
cggtagtcgactcgg

SEQ ID NO: 1018448 - DNA, 15 bp, Homo sapiens
ggtagtcgactcggc

SEQ ID NO: 1018449 - DNA, 15 bp, Homo sapiens
gtagtcgactcggct

SEQ ID NO: 1018450 - DNA, 15 bp, Homo sapiens
tagtcgactcggctg

SEQ ID NO: 1018451 - DNA, 15 bp, Homo sapiens
agtcgactcggctgc

SEQ ID NO: 1018452 - DNA, 15 bp, Homo sapiens
gtcgactcggctgca

SEQ ID NO: 1018453 - DNA, 15 bp, Homo sapiens
tcgactcggctgcag

SEQ ID NO: 1018454 - DNA, 15 bp, Homo sapiens
cgactcggctgcagg

SEQ ID NO: 1018455 - DNA, 15 bp, Homo sapiens
gactcggctgcaggc

SEQ ID NO: 1018456 - DNA, 15 bp, Homo sapiens
actcggctgcaggcc

SEQ ID NO: 1018457 - DNA, 15 bp, Homo sapiens
ctcggctgcaggccc

SEQ ID NO: 1018458 - DNA, 15 bp, Homo sapiens
tcggctgcaggcccc

SEQ ID NO: 1018459 - DNA, 15 bp, Homo sapiens
cggctgcaggccccg

SEQ ID NO: 1018460 - DNA, 15 bp, Homo sapiens
ggctgcaggccccgg

SEQ ID NO: 1018461 - DNA, 15 bp, Homo sapiens
gctgcaggccccggc

SEQ ID NO: 1018462 - DNA, 15 bp, Homo sapiens
ctgcaggccccggcc

SEQ ID NO: 1018463 - DNA, 15 bp, Homo sapiens
tgcaggccccggcct

SEQ ID NO: 1018464 - DNA, 15 bp, Homo sapiens
gcaggccccggcctg

SEQ ID NO: 1018465 - DNA, 15 bp, Homo sapiens
caggccccggcctgg

SEQ ID NO: 1018466 - DNA, 15 bp, Homo sapiens
aggccccggcctggc

SEQ ID NO: 1018467 - DNA, 15 bp, Homo sapiens
ggccccggcctggcc

SEQ ID NO: 1018468 - DNA, 15 bp, Homo sapiens
gccccggcctggccg

SEQ ID NO: 1018469 - DNA, 15 bp, Homo sapiens
ccccggcctggccgg

SEQ ID NO: 1018470 - DNA, 15 bp, Homo sapiens
cccggcctggccgga

SEQ ID NO: 1018471 - DNA, 15 bp, Homo sapiens
ccggcctggccggag

SEQ ID NO: 1018472 - DNA, 15 bp, Homo sapiens
cggcctggccggagc

SEQ ID NO: 1018473 - DNA, 15 bp, Homo sapiens
ggcctggccggagca

SEQ ID NO: 1018474 - DNA, 15 bp, Homo sapiens
gcctggccggagcaa

SEQ ID NO: 1018475 - DNA, 15 bp, Homo sapiens
cctggccggagcaac

SEQ ID NO: 1018476 - DNA, 15 bp, Homo sapiens
ctggccggagcaacg

SEQ ID NO: 1018477 - DNA, 15 bp, Homo sapiens
tggccggagcaacgc

SEQ ID NO: 1018478 - DNA, 15 bp, Homo sapiens
ggccggagcaacgcg

SEQ ID NO: 1018479 - DNA, 15 bp, Homo sapiens
gccggagcaacgcgg

SEQ ID NO: 1018480 - DNA, 15 bp, Homo sapiens
ccggagcaacgcggg

SEQ ID NO: 1018481 - DNA, 15 bp, Homo sapiens
cggagcaacgcgggg

SEQ ID NO: 1018482 - DNA, 15 bp, Homo sapiens
ggagcaacgcggggg

SEQ ID NO: 1018483 - DNA, 15 bp, Homo sapiens
gagcaacgcggggga

SEQ ID NO: 1018484 - DNA, 15 bp, Homo sapiens
agcaacgcgggggac

SEQ ID NO: 1018485 - DNA, 15 bp, Homo sapiens
gcaacgcgggggaca

SEQ ID NO: 1018486 - DNA, 15 bp, Homo sapiens
caacgcgggggacac

SEQ ID NO: 1018487 - DNA, 15 bp, Homo sapiens
aacgcgggggacacc

SEQ ID NO: 1018488 - DNA, 15 bp, Homo sapiens
acgcgggggacaccc

SEQ ID NO: 1018489 - DNA, 15 bp, Homo sapiens
cgcgggggacacccc

SEQ ID NO: 1018490 - DNA, 15 bp, Homo sapiens
gcgggggacaccccc

SEQ ID NO: 1018491 - DNA, 15 bp, Homo sapiens
cgggggacacccccg

SEQ ID NO: 1018492 - DNA, 15 bp, Homo sapiens
gggggacacccccga

SEQ ID NO: 1018493 - DNA, 15 bp, Homo sapiens
ggggacacccccgat

SEQ ID NO: 1018494 - DNA, 15 bp, Homo sapiens
gggacacccccgatt

SEQ ID NO: 1018495 - DNA, 15 bp, Homo sapiens
ggacacccccgattc

SEQ ID NO: 1018496 - DNA, 15 bp, Homo sapiens
gacacccccgattcc

SEQ ID NO: 1018497 - DNA, 15 bp, Homo sapiens
acacccccgattccg

SEQ ID NO: 1018498 - DNA, 15 bp, Homo sapiens
cacccccgattccgc

SEQ ID NO: 1018499 - DNA, 15 bp, Homo sapiens
acccccgattccgct

SEQ ID NO: 1018500 - DNA, 15 bp, Homo sapiens
cccccgattccgctg

SEQ ID NO: 1018501 - DNA, 15 bp, Homo sapiens
ccccgattccgctgg

SEQ ID NO: 1018502 - DNA, 15 bp, Homo sapiens
cccgattccgctggg

SEQ ID NO: 1018503 - DNA, 15 bp, Homo sapiens
ccgattccgctgggg

SEQ ID NO: 1018504 - DNA, 15 bp, Homo sapiens
cgattccgctgggga

SEQ ID NO: 1018505 - DNA, 15 bp, Homo sapiens
gattccgctggggag

SEQ ID NO: 1018506 - DNA, 15 bp, Homo sapiens
attccgctggggagc

SEQ ID NO: 1018507 - DNA, 15 bp, Homo sapiens
ttccgctggggagcg

SEQ ID NO: 1018508 - DNA, 15 bp, Homo sapiens
tccgctggggagcgc

SEQ ID NO: 1018509 - DNA, 15 bp, Homo sapiens
ccgctggggagcgca

SEQ ID NO: 1018510 - DNA, 15 bp, Homo sapiens
cgctggggagcgcag

SEQ ID NO: 1018511 - DNA, 15 bp, Homo sapiens
gctggggagcgcagc

SEQ ID NO: 1018512 - DNA, 15 bp, Homo sapiens
ctggggagcgcagcc

SEQ ID NO: 1018513 - DNA, 15 bp, Homo sapiens
tggggagcgcagccc

SEQ ID NO: 1018514 - DNA, 15 bp, Homo sapiens
ggggagcgcagccca

SEQ ID NO: 1018515 - DNA, 15 bp, Homo sapiens
gggagcgcagcccac

SEQ ID NO: 1018516 - DNA, 15 bp, Homo sapiens
ggagcgcagcccaca

SEQ ID NO: 1018517 - DNA, 15 bp, Homo sapiens
gagcgcagcccacag

SEQ ID NO: 1018518 - DNA, 15 bp, Homo sapiens
agcgcagcccacagc

SEQ ID NO: 1018519 - DNA, 15 bp, Homo sapiens
gcgcagcccacagct

SEQ ID NO: 1018520 - DNA, 15 bp, Homo sapiens
cgcagcccacagctc

SEQ ID NO: 1018521 - DNA, 15 bp, Homo sapiens
gcagcccacagctcc

SEQ ID NO: 1018522 - DNA, 15 bp, Homo sapiens
cagcccacagctccc

SEQ ID NO: 1018523 - DNA, 15 bp, Homo sapiens
agcccacagctcccc

SEQ ID NO: 1018524 - DNA, 15 bp, Homo sapiens
gcccacagctccccc

SEQ ID NO: 1018525 - DNA, 15 bp, Homo sapiens
cccacagctccccct

SEQ ID NO: 1018526 - DNA, 15 bp, Homo sapiens
ccacagctccccctc

SEQ ID NO: 1018527 - DNA, 15 bp, Homo sapiens
cacagctccccctcg

SEQ ID NO: 1018528 - DNA, 15 bp, Homo sapiens
acagctccccctcgc

SEQ ID NO: 1018529 - DNA, 15 bp, Homo sapiens
cagctccccctcgcc

SEQ ID NO: 1018530 - DNA, 15 bp, Homo sapiens
agctccccctcgcca

SEQ ID NO: 1018531 - DNA, 15 bp, Homo sapiens
gctccccctcgccag

SEQ ID NO: 1018532 - DNA, 15 bp, Homo sapiens
ctccccctcgccagg

SEQ ID NO: 1018533 - DNA, 15 bp, Homo sapiens
tccccctcgccaggc

SEQ ID NO: 1018534 - DNA, 15 bp, Homo sapiens
ccccctcgccaggcg

SEQ ID NO: 1018535 - DNA, 15 bp, Homo sapiens
cccctcgccaggcgc

SEQ ID NO: 1018536 - DNA, 15 bp, Homo sapiens
ccctcgccaggcgcc

SEQ ID NO: 1018537 - DNA, 15 bp, Homo sapiens
cctcgccaggcgccc

SEQ ID NO: 1018538 - DNA, 15 bp, Homo sapiens
ctcgccaggcgccca

SEQ ID NO: 1018539 - DNA, 15 bp, Homo sapiens
tcgccaggcgcccaa

SEQ ID NO: 1018540 - DNA, 15 bp, Homo sapiens
cgccaggcgcccaag

SEQ ID NO: 1018541 - DNA, 15 bp, Homo sapiens
gccaggcgcccaagg

SEQ ID NO: 1018542 - DNA, 15 bp, Homo sapiens
ccaggcgcccaagga

SEQ ID NO: 1018543 - DNA, 15 bp, Homo sapiens
caggcgcccaaggac

SEQ ID NO: 1018544 - DNA, 15 bp, Homo sapiens
aggcgcccaaggacc

SEQ ID NO: 1018545 - DNA, 15 bp, Homo sapiens
ggcgcccaaggaccc

SEQ ID NO: 1018546 - DNA, 15 bp, Homo sapiens
gcgcccaaggaccct

SEQ ID NO: 1018547 - DNA, 15 bp, Homo sapiens
cgcccaaggaccctc

SEQ ID NO: 1018548 - DNA, 15 bp, Homo sapiens
gcccaaggaccctca

SEQ ID NO: 1018549 - DNA, 15 bp, Homo sapiens
cccaaggaccctcaa

SEQ ID NO: 1018550 - DNA, 15 bp, Homo sapiens
ccaaggaccctcaag

SEQ ID NO: 1018551 - DNA, 15 bp, Homo sapiens
caaggaccctcaagg

SEQ ID NO: 1018552 - DNA, 15 bp, Homo sapiens
aaggaccctcaaggc

SEQ ID NO: 1018553 - DNA, 15 bp, Homo sapiens
aggaccctcaaggcg

SEQ ID NO: 1018554 - DNA, 15 bp, Homo sapiens
ggaccctcaaggcgc

SEQ ID NO: 1018555 - DNA, 15 bp, Homo sapiens
gaccctcaaggcgcg

SEQ ID NO: 1018556 - DNA, 15 bp, Homo sapiens
accctcaaggcgcgg

SEQ ID NO: 1018557 - DNA, 15 bp, Homo sapiens
ccctcaaggcgcggg

SEQ ID NO: 1018558 - DNA, 15 bp, Homo sapiens
cctcaaggcgcgggg

SEQ ID NO: 1018559 - DNA, 15 bp, Homo sapiens
ctcaaggcgcggggc

SEQ ID NO: 1018560 - DNA, 15 bp, Homo sapiens
tcaaggcgcggggcc

SEQ ID NO: 1018561 - DNA, 15 bp, Homo sapiens
caaggcgcggggccc

SEQ ID NO: 1018562 - DNA, 15 bp, Homo sapiens
aaggcgcggggccca

SEQ ID NO: 1018563 - DNA, 15 bp, Homo sapiens
aggcgcggggcccac

SEQ ID NO: 1018564 - DNA, 15 bp, Homo sapiens
ggcgcggggcccaca

SEQ ID NO: 1018565 - DNA, 15 bp, Homo sapiens
gcgcggggcccacac

SEQ ID NO: 1018566 - DNA, 15 bp, Homo sapiens
cgcggggcccacact

SEQ ID NO: 1018567 - DNA, 15 bp, Homo sapiens
gcggggcccacactt

SEQ ID NO: 1018568 - DNA, 15 bp, Homo sapiens
cggggcccacacttg

SEQ ID NO: 1018569 - DNA, 15 bp, Homo sapiens
ggggcccacacttga

SEQ ID NO: 1018570 - DNA, 15 bp, Homo sapiens
gggcccacacttgaa

SEQ ID NO: 1018571 - DNA, 15 bp, Homo sapiens
ggcccacacttgaag

SEQ ID NO: 1018572 - DNA, 15 bp, Homo sapiens
gcccacacttgaagc

SEQ ID NO: 1018573 - DNA, 15 bp, Homo sapiens
cccacacttgaagcc

SEQ ID NO: 1018574 - DNA, 15 bp, Homo sapiens
ccacacttgaagcct

SEQ ID NO: 1018575 - DNA, 15 bp, Homo sapiens
cacacttgaagcctg

SEQ ID NO: 1018576 - DNA, 15 bp, Homo sapiens
acacttgaagcctgg

SEQ ID NO: 1018577 - DNA, 15 bp, Homo sapiens
cacttgaagcctggg

SEQ ID NO: 1018578 - DNA, 15 bp, Homo sapiens
acttgaagcctggga

SEQ ID NO: 1018579 - DNA, 15 bp, Homo sapiens
cttgaagcctgggaa

SEQ ID NO: 1018580 - DNA, 15 bp, Homo sapiens
ttgaagcctgggaac

SEQ ID NO: 1018581 - DNA, 15 bp, Homo sapiens
tgaagcctgggaacg

SEQ ID NO: 1018582 - DNA, 15 bp, Homo sapiens
gaagcctgggaacgc

SEQ ID NO: 1018583 - DNA, 15 bp, Homo sapiens
aagcctgggaacgcg

SEQ ID NO: 1018584 - DNA, 15 bp, Homo sapiens
agcctgggaacgcgc

SEQ ID NO: 1018585 - DNA, 15 bp, Homo sapiens
gcctgggaacgcgca

SEQ ID NO: 1018586 - DNA, 15 bp, Homo sapiens
cctgggaacgcgcag

SEQ ID NO: 1018587 - DNA, 15 bp, Homo sapiens
ctgggaacgcgcaga

SEQ ID NO: 1018588 - DNA, 15 bp, Homo sapiens
tgggaacgcgcagac

SEQ ID NO: 1018589 - DNA, 15 bp, Homo sapiens
gggaacgcgcagaca

SEQ ID NO: 1018590 - DNA, 15 bp, Homo sapiens
ggaacgcgcagacag

SEQ ID NO: 1018591 - DNA, 15 bp, Homo sapiens
gaacgcgcagacagg

SEQ ID NO: 1018592 - DNA, 15 bp, Homo sapiens
aacgcgcagacagga

SEQ ID NO: 1018593 - DNA, 15 bp, Homo sapiens
acgcgcagacaggaa

SEQ ID NO: 1018594 - DNA, 15 bp, Homo sapiens
cgcgcagacaggaaa

SEQ ID NO: 1018595 - DNA, 15 bp, Homo sapiens
gcgcagacaggaaac

SEQ ID NO: 1018596 - DNA, 15 bp, Homo sapiens
cgcagacaggaaacc

SEQ ID NO: 1018597 - DNA, 15 bp, Homo sapiens
gcagacaggaaaccc

SEQ ID NO: 1018598 - DNA, 15 bp, Homo sapiens
cagacaggaaaccct

SEQ ID NO: 1018599 - DNA, 15 bp, Homo sapiens
agacaggaaaccctc

SEQ ID NO: 1018600 - DNA, 15 bp, Homo sapiens
gacaggaaaccctct

SEQ ID NO: 1018601 - DNA, 15 bp, Homo sapiens
acaggaaaccctctt

SEQ ID NO: 1018602 - DNA, 15 bp, Homo sapiens
caggaaaccctcttc

SEQ ID NO: 1018603 - DNA, 15 bp, Homo sapiens
aggaaaccctcttcc

SEQ ID NO: 1018604 - DNA, 15 bp, Homo sapiens
ggaaaccctcttcct

SEQ ID NO: 1018605 - DNA, 15 bp, Homo sapiens
gaaaccctcttcctc

SEQ ID NO: 1018606 - DNA, 15 bp, Homo sapiens
aaaccctcttcctcc

SEQ ID NO: 1018607 - DNA, 15 bp, Homo sapiens
aaccctcttcctcct

SEQ ID NO: 1018608 - DNA, 15 bp, Homo sapiens
accctcttcctccta

SEQ ID NO: 1018609 - DNA, 15 bp, Homo sapiens
ccctcttcctcctaa

SEQ ID NO: 1018610 - DNA, 15 bp, Homo sapiens
cctcttcctcctaag

SEQ ID NO: 1018611 - DNA, 15 bp, Homo sapiens
ctcttcctcctaagc

SEQ ID NO: 1018612 - DNA, 15 bp, Homo sapiens
tcttcctcctaagca

SEQ ID NO: 1018613 - DNA, 15 bp, Homo sapiens
cttcctcctaagcag

SEQ ID NO: 1018614 - DNA, 15 bp, Homo sapiens
ttcctcctaagcagt

SEQ ID NO: 1018615 - DNA, 15 bp, Homo sapiens
tcctcctaagcagtt

SEQ ID NO: 1018616 - DNA, 15 bp, Homo sapiens
cctcctaagcagttt

SEQ ID NO: 1018617 - DNA, 15 bp, Homo sapiens
ctcctaagcagtttc

SEQ ID NO: 1018618 - DNA, 15 bp, Homo sapiens
tcctaagcagtttct

SEQ ID NO: 1018619 - DNA, 15 bp, Homo sapiens
cctaagcagtttctt

SEQ ID NO: 1018620 - DNA, 15 bp, Homo sapiens
ctaagcagtttcttg

SEQ ID NO: 1018621 - DNA, 15 bp, Homo sapiens
taagcagtttcttgc

SEQ ID NO: 1018622 - DNA, 15 bp, Homo sapiens
aagcagtttcttgct

SEQ ID NO: 1018623 - DNA, 15 bp, Homo sapiens
agcagtttcttgctc

SEQ ID NO: 1018624 - DNA, 15 bp, Homo sapiens
gcagtttcttgctcg

SEQ ID NO: 1018625 - DNA, 15 bp, Homo sapiens
cagtttcttgctcgt

SEQ ID NO: 1018626 - DNA, 15 bp, Homo sapiens
agtttcttgctcgtc

SEQ ID NO: 1018627 - DNA, 15 bp, Homo sapiens
gtttcttgctcgtcg

SEQ ID NO: 1018628 - DNA, 15 bp, Homo sapiens
tttcttgctcgtcgg

SEQ ID NO: 1018629 - DNA, 15 bp, Homo sapiens
ttcttgctcgtcgga

SEQ ID NO: 1018630 - DNA, 15 bp, Homo sapiens
tcttgctcgtcggat

SEQ ID NO: 1018631 - DNA, 15 bp, Homo sapiens
cttgctcgtcggatg

SEQ ID NO: 1018632 - DNA, 15 bp, Homo sapiens
ttgctcgtcggatga

SEQ ID NO: 1018633 - DNA, 15 bp, Homo sapiens
tgctcgtcggatgag

SEQ ID NO: 1018634 - DNA, 15 bp, Homo sapiens
gctcgtcggatgaga

SEQ ID NO: 1018635 - DNA, 15 bp, Homo sapiens
ctcgtcggatgagag

SEQ ID NO: 1018636 - DNA, 15 bp, Homo sapiens
tcgtcggatgagagg

SEQ ID NO: 1018637 - DNA, 15 bp, Homo sapiens
cgtcggatgagaggc

SEQ ID NO: 1018638 - DNA, 15 bp, Homo sapiens
gtcggatgagaggcg

SEQ ID NO: 1018639 - DNA, 15 bp, Homo sapiens
tcggatgagaggcgc

SEQ ID NO: 1018640 - DNA, 15 bp, Homo sapiens
cggatgagaggcgcc

SEQ ID NO: 1018641 - DNA, 15 bp, Homo sapiens
ggatgagaggcgccc

SEQ ID NO: 1018642 - DNA, 15 bp, Homo sapiens
gatgagaggcgccca

SEQ ID NO: 1018643 - DNA, 15 bp, Homo sapiens
atgagaggcgcccaa

SEQ ID NO: 1018644 - DNA, 15 bp, Homo sapiens
tgagaggcgcccaat

SEQ ID NO: 1018645 - DNA, 15 bp, Homo sapiens
gagaggcgcccaatt

SEQ ID NO: 1018646 - DNA, 15 bp, Homo sapiens
agaggcgcccaattg

SEQ ID NO: 1018647 - DNA, 15 bp, Homo sapiens
gaggcgcccaattga

SEQ ID NO: 1018648 - DNA, 15 bp, Homo sapiens
aggcgcccaattgaa

SEQ ID NO: 1018649 - DNA, 15 bp, Homo sapiens
ggcgcccaattgaag

SEQ ID NO: 1018650 - DNA, 15 bp, Homo sapiens
gcgcccaattgaagc

SEQ ID NO: 1018651 - DNA, 15 bp, Homo sapiens
cgcccaattgaagca

SEQ ID NO: 1018652 - DNA, 15 bp, Homo sapiens
gcccaattgaagcag

SEQ ID NO: 1018653 - DNA, 15 bp, Homo sapiens
cccaattgaagcaga

SEQ ID NO: 1018654 - DNA, 15 bp, Homo sapiens
ccaattgaagcagaa

SEQ ID NO: 1018655 - DNA, 15 bp, Homo sapiens
caattgaagcagaat

SEQ ID NO: 1018656 - DNA, 15 bp, Homo sapiens
aattgaagcagaatg

SEQ ID NO: 1018657 - DNA, 15 bp, Homo sapiens
attgaagcagaatga

SEQ ID NO: 1018658 - DNA, 15 bp, Homo sapiens
ttgaagcagaatgat

SEQ ID NO: 1018659 - DNA, 15 bp, Homo sapiens
tgaagcagaatgatc

SEQ ID NO: 1018660 - DNA, 15 bp, Homo sapiens
gaagcagaatgatcc

SEQ ID NO: 1018661 - DNA, 15 bp, Homo sapiens
aagcagaatgatcct

SEQ ID NO: 1018662 - DNA, 15 bp, Homo sapiens
agcagaatgatcctc

SEQ ID NO: 1018663 - DNA, 15 bp, Homo sapiens
gcagaatgatcctca

SEQ ID NO: 1018664 - DNA, 15 bp, Homo sapiens
cagaatgatcctcat

SEQ ID NO: 1018665 - DNA, 15 bp, Homo sapiens
agaatgatcctcatc

SEQ ID NO: 1018666 - DNA, 15 bp, Homo sapiens
gaatgatcctcatct

SEQ ID NO: 1018667 - DNA, 15 bp, Homo sapiens
aatgatcctcatcta

SEQ ID NO: 1018668 - DNA, 15 bp, Homo sapiens
atgatcctcatctac

SEQ ID NO: 1018669 - DNA, 15 bp, Homo sapiens
tgatcctcatctact

SEQ ID NO: 1018670 - DNA, 15 bp, Homo sapiens
gatcctcatctacta

SEQ ID NO: 1018671 - DNA, 15 bp, Homo sapiens
atcctcatctactaa

SEQ ID NO: 1018672 - DNA, 15 bp, Homo sapiens
tcctcatctactaat

SEQ ID NO: 1018673 - DNA, 15 bp, Homo sapiens
cctcatctactaata

SEQ ID NO: 1018674 - DNA, 15 bp, Homo sapiens
ctcatctactaatat

SEQ ID NO: 1018675 - DNA, 15 bp, Homo sapiens
tcatctactaatatc

SEQ ID NO: 1018676 - DNA, 15 bp, Homo sapiens
catctactaatatcc

SEQ ID NO: 1018677 - DNA, 15 bp, Homo sapiens
atctactaatatcca

SEQ ID NO: 1018678 - DNA, 15 bp, Homo sapiens
tctactaatatccag

SEQ ID NO: 1018679 - DNA, 15 bp, Homo sapiens
ctactaatatccagc

SEQ ID NO: 1018680 - DNA, 15 bp, Homo sapiens
tactaatatccagcg

SEQ ID NO: 1018681 - DNA, 15 bp, Homo sapiens
actaatatccagcgt

SEQ ID NO: 1018682 - DNA, 15 bp, Homo sapiens
ctaatatccagcgtg

SEQ ID NO: 1018683 - DNA, 15 bp, Homo sapiens
taatatccagcgtgg

SEQ ID NO: 1018684 - DNA, 15 bp, Homo sapiens
aatatccagcgtggc

SEQ ID NO: 1018685 - DNA, 15 bp, Homo sapiens
atatccagcgtggcc

SEQ ID NO: 1018686 - DNA, 15 bp, Homo sapiens
tatccagcgtggcca

SEQ ID NO: 1018687 - DNA, 15 bp, Homo sapiens
atccagcgtggccac

SEQ ID NO: 1018688 - DNA, 15 bp, Homo sapiens
tccagcgtggccaca

SEQ ID NO: 1018689 - DNA, 15 bp, Homo sapiens
ccagcgtggccacaa

SEQ ID NO: 1018690 - DNA, 15 bp, Homo sapiens
cagcgtggccacaaa

SEQ ID NO: 1018691 - DNA, 15 bp, Homo sapiens
agcgtggccacaaag

SEQ ID NO: 1018692 - DNA, 15 bp, Homo sapiens
gcgtggccacaaagc

SEQ ID NO: 1018693 - DNA, 15 bp, Homo sapiens
cgtggccacaaagcg

SEQ ID NO: 1018694 - DNA, 15 bp, Homo sapiens
gtggccacaaagcga

SEQ ID NO: 1018695 - DNA, 15 bp, Homo sapiens
tggccacaaagcgac

SEQ ID NO: 1018696 - DNA, 15 bp, Homo sapiens
ggccacaaagcgact

SEQ ID NO: 1018697 - DNA, 15 bp, Homo sapiens
gccacaaagcgactg

SEQ ID NO: 1018698 - DNA, 15 bp, Homo sapiens
ccacaaagcgactgg

SEQ ID NO: 1018699 - DNA, 15 bp, Homo sapiens
cacaaagcgactggc

SEQ ID NO: 1018700 - DNA, 15 bp, Homo sapiens
acaaagcgactggcc

SEQ ID NO: 1018701 - DNA, 15 bp, Homo sapiens
caaagcgactggcca

SEQ ID NO: 1018702 - DNA, 15 bp, Homo sapiens
aaagcgactggccat

SEQ ID NO: 1018703 - DNA, 15 bp, Homo sapiens
aagcgactggccatt

SEQ ID NO: 1018704 - DNA, 15 bp, Homo sapiens
agcgactggccattt

SEQ ID NO: 1018705 - DNA, 15 bp, Homo sapiens
gcgactggccattta

SEQ ID NO: 1018706 - DNA, 15 bp, Homo sapiens
cgactggccatttac

SEQ ID NO: 1018707 - DNA, 15 bp, Homo sapiens
gactggccatttacg

SEQ ID NO: 1018708 - DNA, 15 bp, Homo sapiens
actggccatttacgc

SEQ ID NO: 1018709 - DNA, 15 bp, Homo sapiens
ctggccatttacgcc

SEQ ID NO: 1018710 - DNA, 15 bp, Homo sapiens
tggccatttacgcca

SEQ ID NO: 1018711 - DNA, 15 bp, Homo sapiens
ggccatttacgccac

SEQ ID NO: 1018712 - DNA, 15 bp, Homo sapiens
gccatttacgccacc

SEQ ID NO: 1018713 - DNA, 15 bp, Homo sapiens
ccatttacgccacca

SEQ ID NO: 1018714 - DNA, 15 bp, Homo sapiens
catttacgccaccac

SEQ ID NO: 1018715 - DNA, 15 bp, Homo sapiens
atttacgccaccact

SEQ ID NO: 1018716 - DNA, 15 bp, Homo sapiens
tttacgccaccactt

SEQ ID NO: 1018717 - DNA, 15 bp, Homo sapiens
ttacgccaccacttt

SEQ ID NO: 1018718 - DNA, 15 bp, Homo sapiens
tacgccaccacttta

SEQ ID NO: 1018719 - DNA, 15 bp, Homo sapiens
acgccaccactttaa

SEQ ID NO: 1018720 - DNA, 15 bp, Homo sapiens
cgccaccactttaaa

SEQ ID NO: 1018721 - DNA, 15 bp, Homo sapiens
gccaccactttaaac

SEQ ID NO: 1018722 - DNA, 15 bp, Homo sapiens
ccaccactttaaaca

SEQ ID NO: 1018723 - DNA, 15 bp, Homo sapiens
caccactttaaacaa

SEQ ID NO: 1018724 - DNA, 15 bp, Homo sapiens
accactttaaacaaa

SEQ ID NO: 1018725 - DNA, 15 bp, Homo sapiens
ccactttaaacaaag

SEQ ID NO: 1018726 - DNA, 15 bp, Homo sapiens
cactttaaacaaaga

SEQ ID NO: 1018727 - DNA, 15 bp, Homo sapiens
actttaaacaaagat

SEQ ID NO: 1018728 - DNA, 15 bp, Homo sapiens
ctttaaacaaagata

SEQ ID NO: 1018729 - DNA, 15 bp, Homo sapiens
tttaaacaaagatat

SEQ ID NO: 1018730 - DNA, 15 bp, Homo sapiens
ttaaacaaagatatt

SEQ ID NO: 1018731 - DNA, 15 bp, Homo sapiens
taaacaaagatattt

SEQ ID NO: 1018732 - DNA, 15 bp, Homo sapiens
aaacaaagatatttg

SEQ ID NO: 1018733 - DNA, 15 bp, Homo sapiens
aacaaagatatttgg

SEQ ID NO: 1018734 - DNA, 15 bp, Homo sapiens
acaaagatatttggt

SEQ ID NO: 1018735 - DNA, 15 bp, Homo sapiens
caaagatatttggtt

SEQ ID NO: 1018736 - DNA, 15 bp, Homo sapiens
aaagatatttggtta

SEQ ID NO: 1018737 - DNA, 15 bp, Homo sapiens
aagatatttggttat

SEQ ID NO: 1018738 - DNA, 15 bp, Homo sapiens
agatatttggttatt

SEQ ID NO: 1018739 - DNA, 15 bp, Homo sapiens
gatatttggttattc

SEQ ID NO: 1018740 - DNA, 15 bp, Homo sapiens
atatttggttattcc

SEQ ID NO: 1018741 - DNA, 15 bp, Homo sapiens
tatttggttattccc

SEQ ID NO: 1018742 - DNA, 15 bp, Homo sapiens
atttggttattcccg

SEQ ID NO: 1018743 - DNA, 15 bp, Homo sapiens
tttggttattcccgg

SEQ ID NO: 1018744 - DNA, 15 bp, Homo sapiens
ttggttattcccggg

SEQ ID NO: 1018745 - DNA, 15 bp, Homo sapiens
tggttattcccggga

SEQ ID NO: 1018746 - DNA, 15 bp, Homo sapiens
ggttattcccgggaa

SEQ ID NO: 1018747 - DNA, 15 bp, Homo sapiens
gttattcccgggaag

SEQ ID NO: 1018748 - DNA, 15 bp, Homo sapiens
ttattcccgggaagc

SEQ ID NO: 1018749 - DNA, 15 bp, Homo sapiens
tattcccgggaagca

SEQ ID NO: 1018750 - DNA, 15 bp, Homo sapiens
attcccgggaagcaa

SEQ ID NO: 1018751 - DNA, 15 bp, Homo sapiens
ttcccgggaagcaag

SEQ ID NO: 1018752 - DNA, 15 bp, Homo sapiens
tcccgggaagcaaga

SEQ ID NO: 1018753 - DNA, 15 bp, Homo sapiens
cccgggaagcaagag

SEQ ID NO: 1018754 - DNA, 15 bp, Homo sapiens
ccgggaagcaagagc

SEQ ID NO: 1018755 - DNA, 15 bp, Homo sapiens
cgggaagcaagagca

SEQ ID NO: 1018756 - DNA, 15 bp, Homo sapiens
gggaagcaagagcac

SEQ ID NO: 1018757 - DNA, 15 bp, Homo sapiens
ggaagcaagagcact

SEQ ID NO: 1018758 - DNA, 15 bp, Homo sapiens
gaagcaagagcactt

SEQ ID NO: 1018759 - DNA, 15 bp, Homo sapiens
aagcaagagcacttt

SEQ ID NO: 1018760 - DNA, 15 bp, Homo sapiens
agcaagagcactttt

SEQ ID NO: 1018761 - DNA, 15 bp, Homo sapiens
gcaagagcacttttg

SEQ ID NO: 1018762 - DNA, 15 bp, Homo sapiens
caagagcacttttgc

SEQ ID NO: 1018763 - DNA, 15 bp, Homo sapiens
aagagcacttttgca

SEQ ID NO: 1018764 - DNA, 15 bp, Homo sapiens
agagcacttttgcat

SEQ ID NO: 1018765 - DNA, 15 bp, Homo sapiens
gagcacttttgcatg

SEQ ID NO: 1018766 - DNA, 15 bp, Homo sapiens
agcacttttgcatgg

SEQ ID NO: 1018767 - DNA, 15 bp, Homo sapiens
gcacttttgcatggc

SEQ ID NO: 1018768 - DNA, 15 bp, Homo sapiens
cacttttgcatggct

SEQ ID NO: 1018769 - DNA, 15 bp, Homo sapiens
acttttgcatggctg

SEQ ID NO: 1018770 - DNA, 15 bp, Homo sapiens
cttttgcatggctga

SEQ ID NO: 1018771 - DNA, 15 bp, Homo sapiens
ttttgcatggctgag

SEQ ID NO: 1018772 - DNA, 15 bp, Homo sapiens
tttgcatggctgagc

SEQ ID NO: 1018773 - DNA, 15 bp, Homo sapiens
ttgcatggctgagct

SEQ ID NO: 1018774 - DNA, 15 bp, Homo sapiens
tgcatggctgagctg

SEQ ID NO: 1018775 - DNA, 15 bp, Homo sapiens
gcatggctgagctgc

SEQ ID NO: 1018776 - DNA, 15 bp, Homo sapiens
catggctgagctgcg

SEQ ID NO: 1018777 - DNA, 15 bp, Homo sapiens
atggctgagctgcgg

SEQ ID NO: 1018778 - DNA, 15 bp, Homo sapiens
tggctgagctgcggg

SEQ ID NO: 1018779 - DNA, 15 bp, Homo sapiens
ggctgagctgcgggc

SEQ ID NO: 1018780 - DNA, 15 bp, Homo sapiens
gctgagctgcgggcg

SEQ ID NO: 1018781 - DNA, 15 bp, Homo sapiens
ctgagctgcgggcgg

SEQ ID NO: 1018782 - DNA, 15 bp, Homo sapiens
tgagctgcgggcgga

SEQ ID NO: 1018783 - DNA, 15 bp, Homo sapiens
gagctgcgggcggag

SEQ ID NO: 1018784 - DNA, 15 bp, Homo sapiens
agctgcgggcggagg

SEQ ID NO: 1018785 - DNA, 15 bp, Homo sapiens
gctgcgggcggaggc

SEQ ID NO: 1018786 - DNA, 15 bp, Homo sapiens
ctgcgggcggaggcg

SEQ ID NO: 1018787 - DNA, 15 bp, Homo sapiens
tgcgggcggaggcga

SEQ ID NO: 1018788 - DNA, 15 bp, Homo sapiens
gcgggcggaggcgag

SEQ ID NO: 1018789 - DNA, 15 bp, Homo sapiens
cgggcggaggcgagc

SEQ ID NO: 1018790 - DNA, 15 bp, Homo sapiens
gggcggaggcgagcc

SEQ ID NO: 1018791 - DNA, 15 bp, Homo sapiens
ggcggaggcgagcct

SEQ ID NO: 1018792 - DNA, 15 bp, Homo sapiens
gcggaggcgagcctc

SEQ ID NO: 1018793 - DNA, 15 bp, Homo sapiens
cggaggcgagcctcg

SEQ ID NO: 1018794 - DNA, 15 bp, Homo sapiens
ggaggcgagcctcgg

SEQ ID NO: 1018795 - DNA, 15 bp, Homo sapiens
gaggcgagcctcggc

SEQ ID NO: 1018796 - DNA, 15 bp, Homo sapiens
aggcgagcctcggcc

SEQ ID NO: 1018797 - DNA, 15 bp, Homo sapiens
ggcgagcctcggccc

SEQ ID NO: 1018798 - DNA, 15 bp, Homo sapiens
gcgagcctcggccca

SEQ ID NO: 1018799 - DNA, 15 bp, Homo sapiens
cgagcctcggcccag

SEQ ID NO: 1018800 - DNA, 15 bp, Homo sapiens
gagcctcggcccagc

SEQ ID NO: 1018801 - DNA, 15 bp, Homo sapiens
agcctcggcccagcc

SEQ ID NO: 1018802 - DNA, 15 bp, Homo sapiens
gcctcggcccagcct

SEQ ID NO: 1018803 - DNA, 15 bp, Homo sapiens
cctcggcccagcctc

SEQ ID NO: 1018804 - DNA, 15 bp, Homo sapiens
ctcggcccagcctcc

SEQ ID NO: 1018805 - DNA, 15 bp, Homo sapiens
tcggcccagcctccc

SEQ ID NO: 1018806 - DNA, 15 bp, Homo sapiens
cggcccagcctcccg

SEQ ID NO: 1018807 - DNA, 15 bp, Homo sapiens
ggcccagcctcccgc

SEQ ID NO: 1018808 - DNA, 15 bp, Homo sapiens
gcccagcctcccgcc

SEQ ID NO: 1018809 - DNA, 15 bp, Homo sapiens
cccagcctcccgccc

SEQ ID NO: 1018810 - DNA, 15 bp, Homo sapiens
ccagcctcccgcccg

SEQ ID NO: 1018811 - DNA, 15 bp, Homo sapiens
cagcctcccgcccgc

SEQ ID NO: 1018812 - DNA, 15 bp, Homo sapiens
agcctcccgcccgct

SEQ ID NO: 1018813 - DNA, 15 bp, Homo sapiens
gcctcccgcccgctg

SEQ ID NO: 1018814 - DNA, 15 bp, Homo sapiens
cctcccgcccgctga

SEQ ID NO: 1018815 - DNA, 15 bp, Homo sapiens
ctcccgcccgctgag

SEQ ID NO: 1018816 - DNA, 15 bp, Homo sapiens
tcccgcccgctgagc

SEQ ID NO: 1018817 - DNA, 15 bp, Homo sapiens
cccgcccgctgagct

SEQ ID NO: 1018818 - DNA, 15 bp, Homo sapiens
ccgcccgctgagctg

SEQ ID NO: 1018819 - DNA, 15 bp, Homo sapiens
cgcccgctgagctgc

SEQ ID NO: 1018820 - DNA, 15 bp, Homo sapiens
gcccgctgagctgcc

SEQ ID NO: 1018821 - DNA, 15 bp, Homo sapiens
cccgctgagctgccc

SEQ ID NO: 1018822 - DNA, 15 bp, Homo sapiens
ccgctgagctgcccg

SEQ ID NO: 1018823 - DNA, 15 bp, Homo sapiens
cgctgagctgcccgc

SEQ ID NO: 1018824 - DNA, 15 bp, Homo sapiens
gctgagctgcccgca

SEQ ID NO: 1018825 - DNA, 15 bp, Homo sapiens
ctgagctgcccgcac

SEQ ID NO: 1018826 - DNA, 15 bp, Homo sapiens
tgagctgcccgcacc

SEQ ID NO: 1018827 - DNA, 15 bp, Homo sapiens
gagctgcccgcacct

SEQ ID NO: 1018828 - DNA, 15 bp, Homo sapiens
agctgcccgcacctc

SEQ ID NO: 1018829 - DNA, 15 bp, Homo sapiens
gctgcccgcacctcg

SEQ ID NO: 1018830 - DNA, 15 bp, Homo sapiens
ctgcccgcacctcgg

SEQ ID NO: 1018831 - DNA, 15 bp, Homo sapiens
tgcccgcacctcggc

SEQ ID NO: 1018832 - DNA, 15 bp, Homo sapiens
gcccgcacctcggca

SEQ ID NO: 1018833 - DNA, 15 bp, Homo sapiens
cccgcacctcggcat

SEQ ID NO: 1018834 - DNA, 15 bp, Homo sapiens
ccgcacctcggcatt

SEQ ID NO: 1018835 - DNA, 15 bp, Homo sapiens
cgcacctcggcattc

SEQ ID NO: 1018836 - DNA, 15 bp, Homo sapiens
gcacctcggcattcg

SEQ ID NO: 1018837 - DNA, 15 bp, Homo sapiens
cacctcggcattcgc

SEQ ID NO: 1018838 - DNA, 15 bp, Homo sapiens
acctcggcattcgcc

SEQ ID NO: 1018839 - DNA, 15 bp, Homo sapiens
cctcggcattcgccc

SEQ ID NO: 1018840 - DNA, 15 bp, Homo sapiens
ctcggcattcgcccc

SEQ ID NO: 1018841 - DNA, 15 bp, Homo sapiens
tcggcattcgccccc

SEQ ID NO: 1018842 - DNA, 15 bp, Homo sapiens
cggcattcgccccct

SEQ ID NO: 1018843 - DNA, 15 bp, Homo sapiens
ggcattcgccccctc

SEQ ID NO: 1018844 - DNA, 15 bp, Homo sapiens
gcattcgccccctcc

SEQ ID NO: 1018845 - DNA, 15 bp, Homo sapiens
cattcgccccctcct

SEQ ID NO: 1018846 - DNA, 15 bp, Homo sapiens
attcgccccctcctg

SEQ ID NO: 1018847 - DNA, 15 bp, Homo sapiens
ttcgccccctcctgg

SEQ ID NO: 1018848 - DNA, 15 bp, Homo sapiens
tcgccccctcctggc

SEQ ID NO: 1018849 - DNA, 15 bp, Homo sapiens
cgccccctcctggcc

SEQ ID NO: 1018850 - DNA, 15 bp, Homo sapiens
gccccctcctggcca

SEQ ID NO: 1018851 - DNA, 15 bp, Homo sapiens
ccccctcctggccag

SEQ ID NO: 1018852 - DNA, 15 bp, Homo sapiens
cccctcctggccagc

SEQ ID NO: 1018853 - DNA, 15 bp, Homo sapiens
ccctcctggccagcg

SEQ ID NO: 1018854 - DNA, 15 bp, Homo sapiens
cctcctggccagcgc

SEQ ID NO: 1018855 - DNA, 15 bp, Homo sapiens
ctcctggccagcgct

SEQ ID NO: 1018856 - DNA, 15 bp, Homo sapiens
tcctggccagcgctc

SEQ ID NO: 1018857 - DNA, 15 bp, Homo sapiens
cctggccagcgctcc

SEQ ID NO: 1018858 - DNA, 15 bp, Homo sapiens
ctggccagcgctcca

SEQ ID NO: 1018859 - DNA, 15 bp, Homo sapiens
tggccagcgctccag

SEQ ID NO: 1018860 - DNA, 15 bp, Homo sapiens
ggccagcgctccagc

SEQ ID NO: 1018861 - DNA, 15 bp, Homo sapiens
gccagcgctccagcc

SEQ ID NO: 1018862 - DNA, 15 bp, Homo sapiens
ccagcgctccagccg

SEQ ID NO: 1018863 - DNA, 15 bp, Homo sapiens
cagcgctccagccgc

SEQ ID NO: 1018864 - DNA, 15 bp, Homo sapiens
agcgctccagccgcc

SEQ ID NO: 1018865 - DNA, 15 bp, Homo sapiens
gcgctccagccgccg

SEQ ID NO: 1018866 - DNA, 15 bp, Homo sapiens
cgctccagccgccgg

SEQ ID NO: 1018867 - DNA, 15 bp, Homo sapiens
gctccagccgccggg

SEQ ID NO: 1018868 - DNA, 15 bp, Homo sapiens
ctccagccgccgggg

SEQ ID NO: 1018869 - DNA, 15 bp, Homo sapiens
tccagccgccggggt

SEQ ID NO: 1018870 - DNA, 15 bp, Homo sapiens
ccagccgccggggtt

SEQ ID NO: 1018871 - DNA, 15 bp, Homo sapiens
cagccgccggggttc

SEQ ID NO: 1018872 - DNA, 15 bp, Homo sapiens
agccgccggggttca

SEQ ID NO: 1018873 - DNA, 15 bp, Homo sapiens
gccgccggggttcag

SEQ ID NO: 1018874 - DNA, 15 bp, Homo sapiens
ccgccggggttcagg

SEQ ID NO: 1018875 - DNA, 15 bp, Homo sapiens
cgccggggttcaggc

SEQ ID NO: 1018876 - DNA, 15 bp, Homo sapiens
gccggggttcaggct

SEQ ID NO: 1018877 - DNA, 15 bp, Homo sapiens
ccggggttcaggctc

SEQ ID NO: 1018878 - DNA, 15 bp, Homo sapiens
cggggttcaggctca

SEQ ID NO: 1018879 - DNA, 15 bp, Homo sapiens
ggggttcaggctcag

SEQ ID NO: 1018880 - DNA, 15 bp, Homo sapiens
gggttcaggctcagt

SEQ ID NO: 1018881 - DNA, 15 bp, Homo sapiens
ggttcaggctcagtt

SEQ ID NO: 1018882 - DNA, 15 bp, Homo sapiens
gttcaggctcagttc

SEQ ID NO: 1018883 - DNA, 15 bp, Homo sapiens
ttcaggctcagttcc

SEQ ID NO: 1018884 - DNA, 15 bp, Homo sapiens
tcaggctcagttccg

SEQ ID NO: 1018885 - DNA, 15 bp, Homo sapiens
caggctcagttccgc

SEQ ID NO: 1018886 - DNA, 15 bp, Homo sapiens
aggctcagttccgcc

SEQ ID NO: 1018887 - DNA, 15 bp, Homo sapiens
ggctcagttccgccc

SEQ ID NO: 1018888 - DNA, 15 bp, Homo sapiens
gctcagttccgcccg

SEQ ID NO: 1018889 - DNA, 15 bp, Homo sapiens
ctcagttccgcccgg

SEQ ID NO: 1018890 - DNA, 15 bp, Homo sapiens
tcagttccgcccggc

SEQ ID NO: 1018891 - DNA, 15 bp, Homo sapiens
cagttccgcccggca

SEQ ID NO: 1018892 - DNA, 15 bp, Homo sapiens
agttccgcccggcaa

SEQ ID NO: 1018893 - DNA, 15 bp, Homo sapiens
gttccgcccggcaac

SEQ ID NO: 1018894 - DNA, 15 bp, Homo sapiens
ttccgcccggcaaca

SEQ ID NO: 1018895 - DNA, 15 bp, Homo sapiens
tccgcccggcaacag

SEQ ID NO: 1018896 - DNA, 15 bp, Homo sapiens
ccgcccggcaacaga

SEQ ID NO: 1018897 - DNA, 15 bp, Homo sapiens
cgcccggcaacagac

SEQ ID NO: 1018898 - DNA, 15 bp, Homo sapiens
gcccggcaacagaca

SEQ ID NO: 1018899 - DNA, 15 bp, Homo sapiens
cccggcaacagacag

SEQ ID NO: 1018900 - DNA, 15 bp, Homo sapiens
ccggcaacagacaga

SEQ ID NO: 1018901 - DNA, 15 bp, Homo sapiens
cggcaacagacagac

SEQ ID NO: 1018902 - DNA, 15 bp, Homo sapiens
ggcaacagacagacg

SEQ ID NO: 1018903 - DNA, 15 bp, Homo sapiens
gcaacagacagacgg

SEQ ID NO: 1018904 - DNA, 15 bp, Homo sapiens
caacagacagacggg

SEQ ID NO: 1018905 - DNA, 15 bp, Homo sapiens
aacagacagacgggc

SEQ ID NO: 1018906 - DNA, 15 bp, Homo sapiens
acagacagacgggca

SEQ ID NO: 1018907 - DNA, 15 bp, Homo sapiens
cagacagacgggcac

SEQ ID NO: 1018908 - DNA, 15 bp, Homo sapiens
agacagacgggcact

SEQ ID NO: 1018909 - DNA, 15 bp, Homo sapiens
gacagacgggcactc

SEQ ID NO: 1018910 - DNA, 15 bp, Homo sapiens
acagacgggcactca

SEQ ID NO: 1018911 - DNA, 15 bp, Homo sapiens
cagacgggcactcac

SEQ ID NO: 1018912 - DNA, 15 bp, Homo sapiens
agacgggcactcacg

SEQ ID NO: 1018913 - DNA, 15 bp, Homo sapiens
gacgggcactcacgc

SEQ ID NO: 1018914 - DNA, 15 bp, Homo sapiens
acgggcactcacgcc

SEQ ID NO: 1018915 - DNA, 15 bp, Homo sapiens
cgggcactcacgccg

SEQ ID NO: 1018916 - DNA, 15 bp, Homo sapiens
gggcactcacgccgc

SEQ ID NO: 1018917 - DNA, 15 bp, Homo sapiens
ggcactcacgccgct

SEQ ID NO: 1018918 - DNA, 15 bp, Homo sapiens
gcactcacgccgctc

SEQ ID NO: 1018919 - DNA, 15 bp, Homo sapiens
cactcacgccgctcc

SEQ ID NO: 1018920 - DNA, 15 bp, Homo sapiens
actcacgccgctccc

SEQ ID NO: 1018921 - DNA, 15 bp, Homo sapiens
ctcacgccgctccct

SEQ ID NO: 1018922 - DNA, 15 bp, Homo sapiens
tcacgccgctccctg

SEQ ID NO: 1018923 - DNA, 15 bp, Homo sapiens
cacgccgctccctgc

SEQ ID NO: 1018924 - DNA, 15 bp, Homo sapiens
acgccgctccctgct

SEQ ID NO: 1018925 - DNA, 15 bp, Homo sapiens
cgccgctccctgctc

SEQ ID NO: 1018926 - DNA, 15 bp, Homo sapiens
gccgctccctgctcg

SEQ ID NO: 1018927 - DNA, 15 bp, Homo sapiens
ccgctccctgctcgc

SEQ ID NO: 1018928 - DNA, 15 bp, Homo sapiens
cgctccctgctcgcg

SEQ ID NO: 1018929 - DNA, 15 bp, Homo sapiens
gctccctgctcgcgc

SEQ ID NO: 1018930 - DNA, 15 bp, Homo sapiens
ctccctgctcgcgcg

SEQ ID NO: 1018931 - DNA, 15 bp, Homo sapiens
tccctgctcgcgcgc

SEQ ID NO: 1018932 - DNA, 15 bp, Homo sapiens
ccctgctcgcgcgct

SEQ ID NO: 1018933 - DNA, 15 bp, Homo sapiens
cctgctcgcgcgctc

SEQ ID NO: 1018934 - DNA, 15 bp, Homo sapiens
ctgctcgcgcgctcc

SEQ ID NO: 1018935 - DNA, 15 bp, Homo sapiens
tgctcgcgcgctccc

SEQ ID NO: 1018936 - DNA, 15 bp, Homo sapiens
gctcgcgcgctccct

SEQ ID NO: 1018937 - DNA, 15 bp, Homo sapiens
ctcgcgcgctccctg

SEQ ID NO: 1018938 - DNA, 15 bp, Homo sapiens
tcgcgcgctccctga

SEQ ID NO: 1018939 - DNA, 15 bp, Homo sapiens
cgcgcgctccctgaa

SEQ ID NO: 1018940 - DNA, 15 bp, Homo sapiens
gcgcgctccctgaag

SEQ ID NO: 1018941 - DNA, 15 bp, Homo sapiens
cgcgctccctgaagc

SEQ ID NO: 1018942 - DNA, 15 bp, Homo sapiens
gcgctccctgaagca

SEQ ID NO: 1018943 - DNA, 15 bp, Homo sapiens
cgctccctgaagcat

SEQ ID NO: 1018944 - DNA, 15 bp, Homo sapiens
gctccctgaagcatc

SEQ ID NO: 1018945 - DNA, 15 bp, Homo sapiens
ctccctgaagcatca

SEQ ID NO: 1018946 - DNA, 15 bp, Homo sapiens
tccctgaagcatcag

SEQ ID NO: 1018947 - DNA, 15 bp, Homo sapiens
ccctgaagcatcaga

SEQ ID NO: 1018948 - DNA, 15 bp, Homo sapiens
cctgaagcatcagag

SEQ ID NO: 1018949 - DNA, 15 bp, Homo sapiens
ctgaagcatcagagg

SEQ ID NO: 1018950 - DNA, 15 bp, Homo sapiens
tgaagcatcagaggg

SEQ ID NO: 1018951 - DNA, 15 bp, Homo sapiens
gaagcatcagagggg

SEQ ID NO: 1018952 - DNA, 15 bp, Homo sapiens
aagcatcagagggga

SEQ ID NO: 1018953 - DNA, 15 bp, Homo sapiens
agcatcagaggggaa

SEQ ID NO: 1018954 - DNA, 15 bp, Homo sapiens
gcatcagaggggaaa

SEQ ID NO: 1018955 - DNA, 15 bp, Homo sapiens
catcagaggggaaaa

SEQ ID NO: 1018956 - DNA, 15 bp, Homo sapiens
atcagaggggaaaac

SEQ ID NO: 1018957 - DNA, 15 bp, Homo sapiens
tcagaggggaaaaca

SEQ ID NO: 1018958 - DNA, 15 bp, Homo sapiens
cagaggggaaaacag

SEQ ID NO: 1018959 - DNA, 15 bp, Homo sapiens
agaggggaaaacagc

SEQ ID NO: 1018960 - DNA, 15 bp, Homo sapiens
gaggggaaaacagcg

SEQ ID NO: 1018961 - DNA, 15 bp, Homo sapiens
aggggaaaacagcgt

SEQ ID NO: 1018962 - DNA, 15 bp, Homo sapiens
ggggaaaacagcgtg

SEQ ID NO: 1018963 - DNA, 15 bp, Homo sapiens
gggaaaacagcgtgg

SEQ ID NO: 1018964 - DNA, 15 bp, Homo sapiens
ggaaaacagcgtggc

SEQ ID NO: 1018965 - DNA, 15 bp, Homo sapiens
gaaaacagcgtggct

SEQ ID NO: 1018966 - DNA, 15 bp, Homo sapiens
aaaacagcgtggctc

SEQ ID NO: 1018967 - DNA, 15 bp, Homo sapiens
aaacagcgtggctct

SEQ ID NO: 1018968 - DNA, 15 bp, Homo sapiens
aacagcgtggctctg

SEQ ID NO: 1018969 - DNA, 15 bp, Homo sapiens
acagcgtggctctgg

SEQ ID NO: 1018970 - DNA, 15 bp, Homo sapiens
cagcgtggctctggg

SEQ ID NO: 1018971 - DNA, 15 bp, Homo sapiens
agcgtggctctgggc

SEQ ID NO: 1018972 - DNA, 15 bp, Homo sapiens
gcgtggctctgggct

SEQ ID NO: 1018973 - DNA, 15 bp, Homo sapiens
cgtggctctgggctc

SEQ ID NO: 1018974 - DNA, 15 bp, Homo sapiens
gtggctctgggctcg

SEQ ID NO: 1018975 - DNA, 15 bp, Homo sapiens
tggctctgggctcgg

SEQ ID NO: 1018976 - DNA, 15 bp, Homo sapiens
ggctctgggctcggg

SEQ ID NO: 1018977 - DNA, 15 bp, Homo sapiens
gctctgggctcgggt

SEQ ID NO: 1018978 - DNA, 15 bp, Homo sapiens
ctctgggctcgggtg

SEQ ID NO: 1018979 - DNA, 15 bp, Homo sapiens
tctgggctcgggtgc

SEQ ID NO: 1018980 - DNA, 15 bp, Homo sapiens
ctgggctcgggtgct

SEQ ID NO: 1018981 - DNA, 15 bp, Homo sapiens
tgggctcgggtgctg

SEQ ID NO: 1018982 - DNA, 15 bp, Homo sapiens
gggctcgggtgctgg

SEQ ID NO: 1018983 - DNA, 15 bp, Homo sapiens
ggctcgggtgctggg

SEQ ID NO: 1018984 - DNA, 15 bp, Homo sapiens
gctcgggtgctgggg

SEQ ID NO: 1018985 - DNA, 15 bp, Homo sapiens
ctcgggtgctggggc

SEQ ID NO: 1018986 - DNA, 15 bp, Homo sapiens
tcgggtgctggggct

SEQ ID NO: 1018987 - DNA, 15 bp, Homo sapiens
cgggtgctggggctg

SEQ ID NO: 1018988 - DNA, 15 bp, Homo sapiens
gggtgctggggctgt

SEQ ID NO: 1018989 - DNA, 15 bp, Homo sapiens
ggtgctggggctgtg

SEQ ID NO: 1018990 - DNA, 15 bp, Homo sapiens
gtgctggggctgtga

SEQ ID NO: 1018991 - DNA, 15 bp, Homo sapiens
tgctggggctgtgat

SEQ ID NO: 1018992 - DNA, 15 bp, Homo sapiens
gctggggctgtgatg

SEQ ID NO: 1018993 - DNA, 15 bp, Homo sapiens
ctggggctgtgatgt

SEQ ID NO: 1018994 - DNA, 15 bp, Homo sapiens
tggggctgtgatgtc

SEQ ID NO: 1018995 - DNA, 15 bp, Homo sapiens
ggggctgtgatgtcc

SEQ ID NO: 1018996 - DNA, 15 bp, Homo sapiens
gggctgtgatgtcct

SEQ ID NO: 1018997 - DNA, 15 bp, Homo sapiens
ggctgtgatgtcctc

SEQ ID NO: 1018998 - DNA, 15 bp, Homo sapiens
gctgtgatgtcctcg

SEQ ID NO: 1018999 - DNA, 15 bp, Homo sapiens
ctgtgatgtcctcgg

SEQ ID NO: 1019000 - DNA, 15 bp, Homo sapiens
tgtgatgtcctcgga

SEQ ID NO: 1019001 - DNA, 15 bp, Homo sapiens
gtgatgtcctcggaa

SEQ ID NO: 1019002 - DNA, 15 bp, Homo sapiens
tgatgtcctcggaaa

SEQ ID NO: 1019003 - DNA, 15 bp, Homo sapiens
gatgtcctcggaaag

SEQ ID NO: 1019004 - DNA, 15 bp, Homo sapiens
atgtcctcggaaagt

SEQ ID NO: 1019005 - DNA, 15 bp, Homo sapiens
tgtcctcggaaagtc

SEQ ID NO: 1019006 - DNA, 15 bp, Homo sapiens
gtcctcggaaagtca

SEQ ID NO: 1019007 - DNA, 15 bp, Homo sapiens
tcctcggaaagtcag

SEQ ID NO: 1019008 - DNA, 15 bp, Homo sapiens
cctcggaaagtcagc

SEQ ID NO: 1019009 - DNA, 15 bp, Homo sapiens
ctcggaaagtcagct

SEQ ID NO: 1019010 - DNA, 15 bp, Homo sapiens
tcggaaagtcagctc

SEQ ID NO: 1019011 - DNA, 15 bp, Homo sapiens
cggaaagtcagctcc

SEQ ID NO: 1019012 - DNA, 15 bp, Homo sapiens
ggaaagtcagctcca

SEQ ID NO: 1019013 - DNA, 15 bp, Homo sapiens
gaaagtcagctccag

SEQ ID NO: 1019014 - DNA, 15 bp, Homo sapiens
aaagtcagctccagc

SEQ ID NO: 1019015 - DNA, 15 bp, Homo sapiens
aagtcagctccagcc

SEQ ID NO: 1019016 - DNA, 15 bp, Homo sapiens
agtcagctccagccc

SEQ ID NO: 1019017 - DNA, 15 bp, Homo sapiens
gtcagctccagcccc

SEQ ID NO: 1019018 - DNA, 15 bp, Homo sapiens
tcagctccagcccca

SEQ ID NO: 1019019 - DNA, 15 bp, Homo sapiens
cagctccagccccag

SEQ ID NO: 1019020 - DNA, 15 bp, Homo sapiens
agctccagccccaga

SEQ ID NO: 1019021 - DNA, 15 bp, Homo sapiens
gctccagccccagat

SEQ ID NO: 1019022 - DNA, 15 bp, Homo sapiens
ctccagccccagatc

SEQ ID NO: 1019023 - DNA, 15 bp, Homo sapiens
tccagccccagatcc

SEQ ID NO: 1019024 - DNA, 15 bp, Homo sapiens
ccagccccagatccc

SEQ ID NO: 1019025 - DNA, 15 bp, Homo sapiens
cagccccagatcccc

SEQ ID NO: 1019026 - DNA, 15 bp, Homo sapiens
agccccagatccccg

SEQ ID NO: 1019027 - DNA, 15 bp, Homo sapiens
gccccagatccccgc

SEQ ID NO: 1019028 - DNA, 15 bp, Homo sapiens
ccccagatccccgcg

SEQ ID NO: 1019029 - DNA, 15 bp, Homo sapiens
cccagatccccgcgt

SEQ ID NO: 1019030 - DNA, 15 bp, Homo sapiens
ccagatccccgcgtg

SEQ ID NO: 1019031 - DNA, 15 bp, Homo sapiens
cagatccccgcgtgt

SEQ ID NO: 1019032 - DNA, 15 bp, Homo sapiens
agatccccgcgtgtc

SEQ ID NO: 1019033 - DNA, 15 bp, Homo sapiens
gatccccgcgtgtct

SEQ ID NO: 1019034 - DNA, 15 bp, Homo sapiens
atccccgcgtgtctg

SEQ ID NO: 1019035 - DNA, 15 bp, Homo sapiens
tccccgcgtgtctgg

SEQ ID NO: 1019036 - DNA, 15 bp, Homo sapiens
ccccgcgtgtctggg

SEQ ID NO: 1019037 - DNA, 15 bp, Homo sapiens
cccgcgtgtctggga

SEQ ID NO: 1019038 - DNA, 15 bp, Homo sapiens
ccgcgtgtctgggag

SEQ ID NO: 1019039 - DNA, 15 bp, Homo sapiens
cgcgtgtctgggaga

SEQ ID NO: 1019040 - DNA, 15 bp, Homo sapiens
gcgtgtctgggagat

SEQ ID NO: 1019041 - DNA, 15 bp, Homo sapiens
cgtgtctgggagatg

SEQ ID NO: 1019042 - DNA, 15 bp, Homo sapiens
gtgtctgggagatgg

SEQ ID NO: 1019043 - DNA, 15 bp, Homo sapiens
tgtctgggagatggg

SEQ ID NO: 1019044 - DNA, 15 bp, Homo sapiens
gtctgggagatgggc

SEQ ID NO: 1019045 - DNA, 15 bp, Homo sapiens
tctgggagatgggcg

SEQ ID NO: 1019046 - DNA, 15 bp, Homo sapiens
ctgggagatgggcga

SEQ ID NO: 1019047 - DNA, 15 bp, Homo sapiens
tgggagatgggcgag

SEQ ID NO: 1019048 - DNA, 15 bp, Homo sapiens
gggagatgggcgagg

SEQ ID NO: 1019049 - DNA, 15 bp, Homo sapiens
ggagatgggcgaggg

SEQ ID NO: 1019050 - DNA, 15 bp, Homo sapiens
gagatgggcgagggt

SEQ ID NO: 1019051 - DNA, 15 bp, Homo sapiens
agatgggcgagggtc

SEQ ID NO: 1019052 - DNA, 15 bp, Homo sapiens
gatgggcgagggtca

SEQ ID NO: 1019053 - DNA, 15 bp, Homo sapiens
atgggcgagggtcag

SEQ ID NO: 1019054 - DNA, 15 bp, Homo sapiens
tgggcgagggtcagg

SEQ ID NO: 1019055 - DNA, 15 bp, Homo sapiens
gggcgagggtcaggg

SEQ ID NO: 1019056 - DNA, 15 bp, Homo sapiens
ggcgagggtcaggga

SEQ ID NO: 1019057 - DNA, 15 bp, Homo sapiens
gcgagggtcagggac

SEQ ID NO: 1019058 - DNA, 15 bp, Homo sapiens
cgagggtcagggaca

SEQ ID NO: 1019059 - DNA, 15 bp, Homo sapiens
gagggtcagggacac

SEQ ID NO: 1019060 - DNA, 15 bp, Homo sapiens
agggtcagggacacc

SEQ ID NO: 1019061 - DNA, 15 bp, Homo sapiens
gggtcagggacacca

SEQ ID NO: 1019062 - DNA, 15 bp, Homo sapiens
ggtcagggacaccag

SEQ ID NO: 1019063 - DNA, 15 bp, Homo sapiens
gtcagggacaccagg

SEQ ID NO: 1019064 - DNA, 15 bp, Homo sapiens
tcagggacaccaggt

SEQ ID NO: 1019065 - DNA, 15 bp, Homo sapiens
cagggacaccaggtt

SEQ ID NO: 1019066 - DNA, 15 bp, Homo sapiens
agggacaccaggttt

SEQ ID NO: 1019067 - DNA, 15 bp, Homo sapiens
gggacaccaggtttg

SEQ ID NO: 1019068 - DNA, 15 bp, Homo sapiens
ggacaccaggtttgt

SEQ ID NO: 1019069 - DNA, 15 bp, Homo sapiens
gacaccaggtttgtt

SEQ ID NO: 1019070 - DNA, 15 bp, Homo sapiens
acaccaggtttgttc

SEQ ID NO: 1019071 - DNA, 15 bp, Homo sapiens
caccaggtttgttcg

SEQ ID NO: 1019072 - DNA, 15 bp, Homo sapiens
accaggtttgttcga

SEQ ID NO: 1019073 - DNA, 15 bp, Homo sapiens
ccaggtttgttcgag

SEQ ID NO: 1019074 - DNA, 15 bp, Homo sapiens
caggtttgttcgagg

SEQ ID NO: 1019075 - DNA, 15 bp, Homo sapiens
aggtttgttcgaggt

SEQ ID NO: 1019076 - DNA, 15 bp, Homo sapiens
ggtttgttcgaggtg

SEQ ID NO: 1019077 - DNA, 15 bp, Homo sapiens
gtttgttcgaggtgg

SEQ ID NO: 1019078 - DNA, 15 bp, Homo sapiens
tttgttcgaggtggg

SEQ ID NO: 1019079 - DNA, 15 bp, Homo sapiens
ttgttcgaggtgggg

SEQ ID NO: 1019080 - DNA, 15 bp, Homo sapiens
tgttcgaggtggggc

SEQ ID NO: 1019081 - DNA, 15 bp, Homo sapiens
gttcgaggtggggca

SEQ ID NO: 1019082 - DNA, 15 bp, Homo sapiens
ttcgaggtggggcaa

SEQ ID NO: 1019083 - DNA, 15 bp, Homo sapiens
tcgaggtggggcaac

SEQ ID NO: 1019084 - DNA, 15 bp, Homo sapiens
cgaggtggggcaact

SEQ ID NO: 1019085 - DNA, 15 bp, Homo sapiens
gaggtggggcaactt

SEQ ID NO: 1019086 - DNA, 15 bp, Homo sapiens
aggtggggcaacttc

SEQ ID NO: 1019087 - DNA, 15 bp, Homo sapiens
ggtggggcaacttca

SEQ ID NO: 1019088 - DNA, 15 bp, Homo sapiens
gtggggcaacttcag

SEQ ID NO: 1019089 - DNA, 15 bp, Homo sapiens
tggggcaacttcagt

SEQ ID NO: 1019090 - DNA, 15 bp, Homo sapiens
ggggcaacttcagtg

SEQ ID NO: 1019091 - DNA, 15 bp, Homo sapiens
gggcaacttcagtga

SEQ ID NO: 1019092 - DNA, 15 bp, Homo sapiens
ggcaacttcagtgac

SEQ ID NO: 1019093 - DNA, 15 bp, Homo sapiens
gcaacttcagtgacg

SEQ ID NO: 1019094 - DNA, 15 bp, Homo sapiens
caacttcagtgacgg

SEQ ID NO: 1019095 - DNA, 15 bp, Homo sapiens
aacttcagtgacgga

SEQ ID NO: 1019096 - DNA, 15 bp, Homo sapiens
acttcagtgacggac

SEQ ID NO: 1019097 - DNA, 15 bp, Homo sapiens
cttcagtgacggacc

SEQ ID NO: 1019098 - DNA, 15 bp, Homo sapiens
ttcagtgacggaccc

SEQ ID NO: 1019099 - DNA, 15 bp, Homo sapiens
tcagtgacggaccct

SEQ ID NO: 1019100 - DNA, 15 bp, Homo sapiens
cagtgacggaccctc

SEQ ID NO: 1019101 - DNA, 15 bp, Homo sapiens
agtgacggaccctcc

SEQ ID NO: 1019102 - DNA, 15 bp, Homo sapiens
gtgacggaccctccc

SEQ ID NO: 1019103 - DNA, 15 bp, Homo sapiens
tgacggaccctcccg

SEQ ID NO: 1019104 - DNA, 15 bp, Homo sapiens
gacggaccctcccgt

SEQ ID NO: 1019105 - DNA, 15 bp, Homo sapiens
acggaccctcccgtg

SEQ ID NO: 1019106 - DNA, 15 bp, Homo sapiens
cggaccctcccgtga

SEQ ID NO: 1019107 - DNA, 15 bp, Homo sapiens
ggaccctcccgtgag

SEQ ID NO: 1019108 - DNA, 15 bp, Homo sapiens
gaccctcccgtgaga

SEQ ID NO: 1019109 - DNA, 15 bp, Homo sapiens
accctcccgtgagac

SEQ ID NO: 1019110 - DNA, 15 bp, Homo sapiens
ccctcccgtgagacc

SEQ ID NO: 1019111 - DNA, 15 bp, Homo sapiens
cctcccgtgagaccc

SEQ ID NO: 1019112 - DNA, 15 bp, Homo sapiens
ctcccgtgagacccc

SEQ ID NO: 1019113 - DNA, 15 bp, Homo sapiens
tcccgtgagacccct

SEQ ID NO: 1019114 - DNA, 15 bp, Homo sapiens
cccgtgagacccctt

SEQ ID NO: 1019115 - DNA, 15 bp, Homo sapiens
ccgtgagaccccttc

SEQ ID NO: 1019116 - DNA, 15 bp, Homo sapiens
cgtgagaccccttcc

SEQ ID NO: 1019117 - DNA, 15 bp, Homo sapiens
gtgagaccccttccc

SEQ ID NO: 1019118 - DNA, 15 bp, Homo sapiens
tgagaccccttccca

SEQ ID NO: 1019119 - DNA, 15 bp, Homo sapiens
gagaccccttcccat

SEQ ID NO: 1019120 - DNA, 15 bp, Homo sapiens
agaccccttcccatc

SEQ ID NO: 1019121 - DNA, 15 bp, Homo sapiens
gaccccttcccatcc

SEQ ID NO: 1019122 - DNA, 15 bp, Homo sapiens
accccttcccatcct

SEQ ID NO: 1019123 - DNA, 15 bp, Homo sapiens
ccccttcccatcctc

SEQ ID NO: 1019124 - DNA, 15 bp, Homo sapiens
cccttcccatcctcc

SEQ ID NO: 1019125 - DNA, 15 bp, Homo sapiens
ccttcccatcctccc

SEQ ID NO: 1019126 - DNA, 15 bp, Homo sapiens
cttcccatcctccca

SEQ ID NO: 1019127 - DNA, 15 bp, Homo sapiens
ttcccatcctcccag

SEQ ID NO: 1019128 - DNA, 15 bp, Homo sapiens
tcccatcctcccagc

SEQ ID NO: 1019129 - DNA, 15 bp, Homo sapiens
cccatcctcccagct

SEQ ID NO: 1019130 - DNA, 15 bp, Homo sapiens
ccatcctcccagctc

SEQ ID NO: 1019131 - DNA, 15 bp, Homo sapiens
catcctcccagctct

SEQ ID NO: 1019132 - DNA, 15 bp, Homo sapiens
atcctcccagctctg

SEQ ID NO: 1019133 - DNA, 15 bp, Homo sapiens
tcctcccagctctgg

SEQ ID NO: 1019134 - DNA, 15 bp, Homo sapiens
cctcccagctctggg

SEQ ID NO: 1019135 - DNA, 15 bp, Homo sapiens
ctcccagctctgggg

SEQ ID NO: 1019136 - DNA, 15 bp, Homo sapiens
tcccagctctggggg

SEQ ID NO: 1019137 - DNA, 15 bp, Homo sapiens
cccagctctgggggc

SEQ ID NO: 1019138 - DNA, 15 bp, Homo sapiens
ccagctctgggggcc

SEQ ID NO: 1019139 - DNA, 15 bp, Homo sapiens
cagctctgggggcca

SEQ ID NO: 1019140 - DNA, 15 bp, Homo sapiens
agctctgggggccag

SEQ ID NO: 1019141 - DNA, 15 bp, Homo sapiens
gctctgggggccagt

SEQ ID NO: 1019142 - DNA, 15 bp, Homo sapiens
ctctgggggccagtg

SEQ ID NO: 1019143 - DNA, 15 bp, Homo sapiens
tctgggggccagtgc

SEQ ID NO: 1019144 - DNA, 15 bp, Homo sapiens
ctgggggccagtgct

SEQ ID NO: 1019145 - DNA, 15 bp, Homo sapiens
tgggggccagtgctg

SEQ ID NO: 1019146 - DNA, 15 bp, Homo sapiens
gggggccagtgctgt

SEQ ID NO: 1019147 - DNA, 15 bp, Homo sapiens
ggggccagtgctgtg

SEQ ID NO: 1019148 - DNA, 15 bp, Homo sapiens
gggccagtgctgtgt

SEQ ID NO: 1019149 - DNA, 15 bp, Homo sapiens
ggccagtgctgtgtt

SEQ ID NO: 1019150 - DNA, 15 bp, Homo sapiens
gccagtgctgtgttt

SEQ ID NO: 1019151 - DNA, 15 bp, Homo sapiens
ccagtgctgtgtttg

SEQ ID NO: 1019152 - DNA, 15 bp, Homo sapiens
cagtgctgtgtttgc

SEQ ID NO: 1019153 - DNA, 15 bp, Homo sapiens
agtgctgtgtttgct

SEQ ID NO: 1019154 - DNA, 15 bp, Homo sapiens
gtgctgtgtttgctc

SEQ ID NO: 1019155 - DNA, 15 bp, Homo sapiens
tgctgtgtttgctcg

SEQ ID NO: 1019156 - DNA, 15 bp, Homo sapiens
gctgtgtttgctcgg

SEQ ID NO: 1019157 - DNA, 15 bp, Homo sapiens
ctgtgtttgctcggc

SEQ ID NO: 1019158 - DNA, 15 bp, Homo sapiens
tgtgtttgctcggcc

SEQ ID NO: 1019159 - DNA, 15 bp, Homo sapiens
gtgtttgctcggccg

SEQ ID NO: 1019160 - DNA, 15 bp, Homo sapiens
tgtttgctcggccgg

SEQ ID NO: 1019161 - DNA, 15 bp, Homo sapiens
gtttgctcggccggg

SEQ ID NO: 1019162 - DNA, 15 bp, Homo sapiens
tttgctcggccgggg

SEQ ID NO: 1019163 - DNA, 15 bp, Homo sapiens
ttgctcggccggggg

SEQ ID NO: 1019164 - DNA, 15 bp, Homo sapiens
tgctcggccgggggt

SEQ ID NO: 1019165 - DNA, 15 bp, Homo sapiens
gctcggccgggggtg

SEQ ID NO: 1019166 - DNA, 15 bp, Homo sapiens
ctcggccgggggtgg

SEQ ID NO: 1019167 - DNA, 15 bp, Homo sapiens
tcggccgggggtggg

SEQ ID NO: 1019168 - DNA, 15 bp, Homo sapiens
cggccgggggtgggg

SEQ ID NO: 1019169 - DNA, 15 bp, Homo sapiens
ggccgggggtggggg

SEQ ID NO: 1019170 - DNA, 15 bp, Homo sapiens
gccgggggtgggggg

SEQ ID NO: 1019171 - DNA, 15 bp, Homo sapiens
ccgggggtggggggg

SEQ ID NO: 1019172 - DNA, 15 bp, Homo sapiens
cgggggtgggggggg

SEQ ID NO: 1019173 - DNA, 15 bp, Homo sapiens
gggggtggggggggg

SEQ ID NO: 1019174 - DNA, 15 bp, Homo sapiens
ggggtgggggggggg

SEQ ID NO: 1019175 - DNA, 15 bp, Homo sapiens
gggtggggggggggg

SEQ ID NO: 1019176 - DNA, 15 bp, Homo sapiens
ggtgggggggggggg

SEQ ID NO: 1019177 - DNA, 15 bp, Homo sapiens
gtggggggggggggg

SEQ ID NO: 1019178 - DNA, 15 bp, Homo sapiens
tgggggggggggggg

SEQ ID NO: 1019179 - DNA, 15 bp, Homo sapiens
gggggggggggggga

SEQ ID NO: 1019180 - DNA, 15 bp, Homo sapiens
gggggggggggggaa

SEQ ID NO: 1019181 - DNA, 15 bp, Homo sapiens
ggggggggggggaag

SEQ ID NO: 1019182 - DNA, 15 bp, Homo sapiens
gggggggggggaaga

SEQ ID NO: 1019183 - DNA, 15 bp, Homo sapiens
ggggggggggaagac

SEQ ID NO: 1019184 - DNA, 15 bp, Homo sapiens
gggggggggaagacc

SEQ ID NO: 1019185 - DNA, 15 bp, Homo sapiens
ggggggggaagacct

SEQ ID NO: 1019186 - DNA, 15 bp, Homo sapiens
gggggggaagacctt

SEQ ID NO: 1019187 - DNA, 15 bp, Homo sapiens
ggggggaagaccttg

SEQ ID NO: 1019188 - DNA, 15 bp, Homo sapiens
gggggaagaccttgg

SEQ ID NO: 1019189 - DNA, 15 bp, Homo sapiens
ggggaagaccttggg

SEQ ID NO: 1019190 - DNA, 15 bp, Homo sapiens
gggaagaccttgggg

SEQ ID NO: 1019191 - DNA, 15 bp, Homo sapiens
ggaagaccttggggg

SEQ ID NO: 1019192 - DNA, 15 bp, Homo sapiens
gaagaccttggggga

SEQ ID NO: 1019193 - DNA, 15 bp, Homo sapiens
aagaccttgggggag

SEQ ID NO: 1019194 - DNA, 15 bp, Homo sapiens
agaccttgggggagg

SEQ ID NO: 1019195 - DNA, 15 bp, Homo sapiens
gaccttgggggaggc

SEQ ID NO: 1019196 - DNA, 15 bp, Homo sapiens
accttgggggaggcg

SEQ ID NO: 1019197 - DNA, 15 bp, Homo sapiens
ccttgggggaggcgt

SEQ ID NO: 1019198 - DNA, 15 bp, Homo sapiens
cttgggggaggcgtg

SEQ ID NO: 1019199 - DNA, 15 bp, Homo sapiens
ttgggggaggcgtgt

SEQ ID NO: 1019200 - DNA, 15 bp, Homo sapiens
tgggggaggcgtgtt

SEQ ID NO: 1019201 - DNA, 15 bp, Homo sapiens
gggggaggcgtgtta

SEQ ID NO: 1019202 - DNA, 15 bp, Homo sapiens
ggggaggcgtgttag

SEQ ID NO: 1019203 - DNA, 15 bp, Homo sapiens
gggaggcgtgttagc

SEQ ID NO: 1019204 - DNA, 15 bp, Homo sapiens
ggaggcgtgttagcg

SEQ ID NO: 1019205 - DNA, 15 bp, Homo sapiens
gaggcgtgttagcgg

SEQ ID NO: 1019206 - DNA, 15 bp, Homo sapiens
aggcgtgttagcggg

SEQ ID NO: 1019207 - DNA, 15 bp, Homo sapiens
ggcgtgttagcgggg

SEQ ID NO: 1019208 - DNA, 15 bp, Homo sapiens
gcgtgttagcggggg

SEQ ID NO: 1019209 - DNA, 15 bp, Homo sapiens
cgtgttagcgggggt

SEQ ID NO: 1019210 - DNA, 15 bp, Homo sapiens
gtgttagcgggggtg

SEQ ID NO: 1019211 - DNA, 15 bp, Homo sapiens
tgttagcgggggtgg

SEQ ID NO: 1019212 - DNA, 15 bp, Homo sapiens
gttagcgggggtggc

SEQ ID NO: 1019213 - DNA, 15 bp, Homo sapiens
ttagcgggggtggcc

SEQ ID NO: 1019214 - DNA, 15 bp, Homo sapiens
tagcgggggtggccc

SEQ ID NO: 1019215 - DNA, 15 bp, Homo sapiens
agcgggggtggccca

SEQ ID NO: 1019216 - DNA, 15 bp, Homo sapiens
gcgggggtggcccac

SEQ ID NO: 1019217 - DNA, 15 bp, Homo sapiens
cgggggtggcccact

SEQ ID NO: 1019218 - DNA, 15 bp, Homo sapiens
gggggtggcccactg

SEQ ID NO: 1019219 - DNA, 15 bp, Homo sapiens
ggggtggcccactga

SEQ ID NO: 1019220 - DNA, 15 bp, Homo sapiens
gggtggcccactgaa

SEQ ID NO: 1019221 - DNA, 15 bp, Homo sapiens
ggtggcccactgaaa

SEQ ID NO: 1019222 - DNA, 15 bp, Homo sapiens
gtggcccactgaaaa

SEQ ID NO: 1019223 - DNA, 15 bp, Homo sapiens
tggcccactgaaaaa

SEQ ID NO: 1019224 - DNA, 15 bp, Homo sapiens
ggcccactgaaaaac

SEQ ID NO: 1019225 - DNA, 15 bp, Homo sapiens
gcccactgaaaaacc

SEQ ID NO: 1019226 - DNA, 15 bp, Homo sapiens
cccactgaaaaaccc

SEQ ID NO: 1019227 - DNA, 15 bp, Homo sapiens
ccactgaaaaacccc

SEQ ID NO: 1019228 - DNA, 15 bp, Homo sapiens
cactgaaaaacccct

SEQ ID NO: 1019229 - DNA, 15 bp, Homo sapiens
actgaaaaacccctg

SEQ ID NO: 1019230 - DNA, 15 bp, Homo sapiens
ctgaaaaacccctga

SEQ ID NO: 1019231 - DNA, 15 bp, Homo sapiens
tgaaaaacccctgag

SEQ ID NO: 1019232 - DNA, 15 bp, Homo sapiens
gaaaaacccctgagc

SEQ ID NO: 1019233 - DNA, 15 bp, Homo sapiens
aaaaacccctgagct

SEQ ID NO: 1019234 - DNA, 15 bp, Homo sapiens
aaaacccctgagctg

SEQ ID NO: 1019235 - DNA, 15 bp, Homo sapiens
aaacccctgagctgc

SEQ ID NO: 1019236 - DNA, 15 bp, Homo sapiens
aacccctgagctgcg

SEQ ID NO: 1019237 - DNA, 15 bp, Homo sapiens
acccctgagctgcgg

SEQ ID NO: 1019238 - DNA, 15 bp, Homo sapiens
cccctgagctgcggg

SEQ ID NO: 1019239 - DNA, 15 bp, Homo sapiens
ccctgagctgcgggg

SEQ ID NO: 1019240 - DNA, 15 bp, Homo sapiens
cctgagctgcggggg

SEQ ID NO: 1019241 - DNA, 15 bp, Homo sapiens
ctgagctgcgggggc

SEQ ID NO: 1019242 - DNA, 15 bp, Homo sapiens
tgagctgcgggggcg

SEQ ID NO: 1019243 - DNA, 15 bp, Homo sapiens
gagctgcgggggcgg

SEQ ID NO: 1019244 - DNA, 15 bp, Homo sapiens
agctgcgggggcggg

SEQ ID NO: 1019245 - DNA, 15 bp, Homo sapiens
gctgcgggggcgggt

SEQ ID NO: 1019246 - DNA, 15 bp, Homo sapiens
ctgcgggggcgggtt

SEQ ID NO: 1019247 - DNA, 15 bp, Homo sapiens
tgcgggggcgggttg

SEQ ID NO: 1019248 - DNA, 15 bp, Homo sapiens
gcgggggcgggttgt

SEQ ID NO: 1019249 - DNA, 15 bp, Homo sapiens
cgggggcgggttgtg

SEQ ID NO: 1019250 - DNA, 15 bp, Homo sapiens
gggggcgggttgtgg

SEQ ID NO: 1019251 - DNA, 15 bp, Homo sapiens
ggggcgggttgtggc

SEQ ID NO: 1019252 - DNA, 15 bp, Homo sapiens
gggcgggttgtggct

SEQ ID NO: 1019253 - DNA, 15 bp, Homo sapiens
ggcgggttgtggctc

SEQ ID NO: 1019254 - DNA, 15 bp, Homo sapiens
gcgggttgtggctcg

SEQ ID NO: 1019255 - DNA, 15 bp, Homo sapiens
cgggttgtggctcgg

SEQ ID NO: 1019256 - DNA, 15 bp, Homo sapiens
gggttgtggctcggg

SEQ ID NO: 1019257 - DNA, 15 bp, Homo sapiens
ggttgtggctcgggg

SEQ ID NO: 1019258 - DNA, 15 bp, Homo sapiens
gttgtggctcgggga

SEQ ID NO: 1019259 - DNA, 15 bp, Homo sapiens
ttgtggctcggggat

SEQ ID NO: 1019260 - DNA, 15 bp, Homo sapiens
tgtggctcggggatc

SEQ ID NO: 1019261 - DNA, 15 bp, Homo sapiens
gtggctcggggatcc

SEQ ID NO: 1019262 - DNA, 15 bp, Homo sapiens
tggctcggggatccg

SEQ ID NO: 1019263 - DNA, 15 bp, Homo sapiens
ggctcggggatccgg

SEQ ID NO: 1019264 - DNA, 15 bp, Homo sapiens
gctcggggatccggg

SEQ ID NO: 1019265 - DNA, 15 bp, Homo sapiens
ctcggggatccggga

SEQ ID NO: 1019266 - DNA, 15 bp, Homo sapiens
tcggggatccgggac

SEQ ID NO: 1019267 - DNA, 15 bp, Homo sapiens
cggggatccgggaca

SEQ ID NO: 1019268 - DNA, 15 bp, Homo sapiens
ggggatccgggacag

SEQ ID NO: 1019269 - DNA, 15 bp, Homo sapiens
gggatccgggacagc

SEQ ID NO: 1019270 - DNA, 15 bp, Homo sapiens
ggatccgggacagcc

SEQ ID NO: 1019271 - DNA, 15 bp, Homo sapiens
gatccgggacagcct

SEQ ID NO: 1019272 - DNA, 15 bp, Homo sapiens
atccgggacagcctc

SEQ ID NO: 1019273 - DNA, 15 bp, Homo sapiens
tccgggacagcctcc

SEQ ID NO: 1019274 - DNA, 15 bp, Homo sapiens
ccgggacagcctccg

SEQ ID NO: 1019275 - DNA, 15 bp, Homo sapiens
cgggacagcctccgg

SEQ ID NO: 1019276 - DNA, 15 bp, Homo sapiens
gggacagcctccggg

SEQ ID NO: 1019277 - DNA, 15 bp, Homo sapiens
ggacagcctccggga

SEQ ID NO: 1019278 - DNA, 15 bp, Homo sapiens
gacagcctccgggag

SEQ ID NO: 1019279 - DNA, 15 bp, Homo sapiens
acagcctccgggagg

SEQ ID NO: 1019280 - DNA, 15 bp, Homo sapiens
cagcctccgggaggc

SEQ ID NO: 1019281 - DNA, 15 bp, Homo sapiens
agcctccgggaggca

SEQ ID NO: 1019282 - DNA, 15 bp, Homo sapiens
gcctccgggaggcag

SEQ ID NO: 1019283 - DNA, 15 bp, Homo sapiens
cctccgggaggcagt

SEQ ID NO: 1019284 - DNA, 15 bp, Homo sapiens
ctccgggaggcagtc

SEQ ID NO: 1019285 - DNA, 15 bp, Homo sapiens
tccgggaggcagtcg

SEQ ID NO: 1019286 - DNA, 15 bp, Homo sapiens
ccgggaggcagtcga

SEQ ID NO: 1019287 - DNA, 15 bp, Homo sapiens
cgggaggcagtcgat

SEQ ID NO: 1019288 - DNA, 15 bp, Homo sapiens
gggaggcagtcgatc

SEQ ID NO: 1019289 - DNA, 15 bp, Homo sapiens
ggaggcagtcgatcc

SEQ ID NO: 1019290 - DNA, 15 bp, Homo sapiens
gaggcagtcgatccc

SEQ ID NO: 1019291 - DNA, 15 bp, Homo sapiens
aggcagtcgatcccc

SEQ ID NO: 1019292 - DNA, 15 bp, Homo sapiens
ggcagtcgatcccct

SEQ ID NO: 1019293 - DNA, 15 bp, Homo sapiens
gcagtcgatccccta

SEQ ID NO: 1019294 - DNA, 15 bp, Homo sapiens
cagtcgatcccctac

SEQ ID NO: 1019295 - DNA, 15 bp, Homo sapiens
agtcgatcccctact

SEQ ID NO: 1019296 - DNA, 15 bp, Homo sapiens
gtcgatcccctactc

SEQ ID NO: 1019297 - DNA, 15 bp, Homo sapiens
tcgatcccctactca

SEQ ID NO: 1019298 - DNA, 15 bp, Homo sapiens
cgatcccctactcag

SEQ ID NO: 1019299 - DNA, 15 bp, Homo sapiens
gatcccctactcagc

SEQ ID NO: 1019300 - DNA, 15 bp, Homo sapiens
atcccctactcagcg

SEQ ID NO: 1019301 - DNA, 15 bp, Homo sapiens
tcccctactcagcgc

SEQ ID NO: 1019302 - DNA, 15 bp, Homo sapiens
cccctactcagcgcc

SEQ ID NO: 1019303 - DNA, 15 bp, Homo sapiens
ccctactcagcgccc

SEQ ID NO: 1019304 - DNA, 15 bp, Homo sapiens
cctactcagcgcccc

SEQ ID NO: 1019305 - DNA, 15 bp, Homo sapiens
ctactcagcgccccc

SEQ ID NO: 1019306 - DNA, 15 bp, Homo sapiens
tactcagcgccccct

SEQ ID NO: 1019307 - DNA, 15 bp, Homo sapiens
actcagcgccccctc

SEQ ID NO: 1019308 - DNA, 15 bp, Homo sapiens
ctcagcgccccctcc

SEQ ID NO: 1019309 - DNA, 15 bp, Homo sapiens
tcagcgccccctccg

SEQ ID NO: 1019310 - DNA, 15 bp, Homo sapiens
cagcgccccctccgc

SEQ ID NO: 1019311 - DNA, 15 bp, Homo sapiens
agcgccccctccgcc

SEQ ID NO: 1019312 - DNA, 15 bp, Homo sapiens
gcgccccctccgccc

SEQ ID NO: 1019313 - DNA, 15 bp, Homo sapiens
cgccccctccgcccg

SEQ ID NO: 1019314 - DNA, 15 bp, Homo sapiens
gccccctccgcccgc

SEQ ID NO: 1019315 - DNA, 15 bp, Homo sapiens
ccccctccgcccgct

SEQ ID NO: 1019316 - DNA, 15 bp, Homo sapiens
cccctccgcccgctc

SEQ ID NO: 1019317 - DNA, 15 bp, Homo sapiens
ccctccgcccgctcg

SEQ ID NO: 1019318 - DNA, 15 bp, Homo sapiens
cctccgcccgctcgg

SEQ ID NO: 1019319 - DNA, 15 bp, Homo sapiens
ctccgcccgctcgga

SEQ ID NO: 1019320 - DNA, 15 bp, Homo sapiens
tccgcccgctcggat

SEQ ID NO: 1019321 - DNA, 15 bp, Homo sapiens
ccgcccgctcggatt

SEQ ID NO: 1019322 - DNA, 15 bp, Homo sapiens
cgcccgctcggattc

SEQ ID NO: 1019323 - DNA, 15 bp, Homo sapiens
gcccgctcggattct

SEQ ID NO: 1019324 - DNA, 15 bp, Homo sapiens
cccgctcggattctc

SEQ ID NO: 1019325 - DNA, 15 bp, Homo sapiens
ccgctcggattctct

SEQ ID NO: 1019326 - DNA, 15 bp, Homo sapiens
cgctcggattctctc

SEQ ID NO: 1019327 - DNA, 15 bp, Homo sapiens
gctcggattctctcc

SEQ ID NO: 1019328 - DNA, 15 bp, Homo sapiens
ctcggattctctccg

SEQ ID NO: 1019329 - DNA, 15 bp, Homo sapiens
tcggattctctccgg

SEQ ID NO: 1019330 - DNA, 15 bp, Homo sapiens
cggattctctccggt

SEQ ID NO: 1019331 - DNA, 15 bp, Homo sapiens
ggattctctccggta

SEQ ID NO: 1019332 - DNA, 15 bp, Homo sapiens
gattctctccggtag

SEQ ID NO: 1019333 - DNA, 15 bp, Homo sapiens
attctctccggtagg

SEQ ID NO: 1019334 - DNA, 15 bp, Homo sapiens
ttctctccggtaggg

SEQ ID NO: 1019335 - DNA, 15 bp, Homo sapiens
tctctccggtagggg

SEQ ID NO: 1019336 - DNA, 15 bp, Homo sapiens
ctctccggtaggggg

SEQ ID NO: 1019337 - DNA, 15 bp, Homo sapiens
tctccggtaggggga

SEQ ID NO: 1019338 - DNA, 15 bp, Homo sapiens
ctccggtagggggaa

SEQ ID NO: 1019339 - DNA, 15 bp, Homo sapiens
tccggtagggggaaa

SEQ ID NO: 1019340 - DNA, 15 bp, Homo sapiens
ccggtagggggaaag

SEQ ID NO: 1019341 - DNA, 15 bp, Homo sapiens
cggtagggggaaagg

SEQ ID NO: 1019342 - DNA, 15 bp, Homo sapiens
ggtagggggaaaggg

SEQ ID NO: 1019343 - DNA, 15 bp, Homo sapiens
gtagggggaaagggg

SEQ ID NO: 1019344 - DNA, 15 bp, Homo sapiens
tagggggaaaggggg

SEQ ID NO: 1019345 - DNA, 15 bp, Homo sapiens
agggggaaagggggc

SEQ ID NO: 1019346 - DNA, 15 bp, Homo sapiens
gggggaaagggggcg

SEQ ID NO: 1019347 - DNA, 15 bp, Homo sapiens
ggggaaagggggcgg

SEQ ID NO: 1019348 - DNA, 15 bp, Homo sapiens
gggaaagggggcggg

SEQ ID NO: 1019349 - DNA, 15 bp, Homo sapiens
ggaaagggggcgggg

SEQ ID NO: 1019350 - DNA, 15 bp, Homo sapiens
gaaagggggcgggga

SEQ ID NO: 1019351 - DNA, 15 bp, Homo sapiens
aaagggggcggggag

SEQ ID NO: 1019352 - DNA, 15 bp, Homo sapiens
aagggggcggggagc

SEQ ID NO: 1019353 - DNA, 15 bp, Homo sapiens
agggggcggggagca

SEQ ID NO: 1019354 - DNA, 15 bp, Homo sapiens
gggggcggggagcag

SEQ ID NO: 1019355 - DNA, 15 bp, Homo sapiens
ggggcggggagcaga

SEQ ID NO: 1019356 - DNA, 15 bp, Homo sapiens
gggcggggagcagag

SEQ ID NO: 1019357 - DNA, 15 bp, Homo sapiens
ggcggggagcagagg

SEQ ID NO: 1019358 - DNA, 15 bp, Homo sapiens
gcggggagcagaggt

SEQ ID NO: 1019359 - DNA, 15 bp, Homo sapiens
cggggagcagaggtg

SEQ ID NO: 1019360 - DNA, 15 bp, Homo sapiens
ggggagcagaggtgt

SEQ ID NO: 1019361 - DNA, 15 bp, Homo sapiens
gggagcagaggtgtc

SEQ ID NO: 1019362 - DNA, 15 bp, Homo sapiens
ggagcagaggtgtcc

SEQ ID NO: 1019363 - DNA, 15 bp, Homo sapiens
gagcagaggtgtccc

SEQ ID NO: 1019364 - DNA, 15 bp, Homo sapiens
agcagaggtgtccct

SEQ ID NO: 1019365 - DNA, 15 bp, Homo sapiens
gcagaggtgtccctc

SEQ ID NO: 1019366 - DNA, 15 bp, Homo sapiens
cagaggtgtccctct

SEQ ID NO: 1019367 - DNA, 15 bp, Homo sapiens
agaggtgtccctctg

SEQ ID NO: 1019368 - DNA, 15 bp, Homo sapiens
gaggtgtccctctga

SEQ ID NO: 1019369 - DNA, 15 bp, Homo sapiens
aggtgtccctctgac

SEQ ID NO: 1019370 - DNA, 15 bp, Homo sapiens
ggtgtccctctgacg

SEQ ID NO: 1019371 - DNA, 15 bp, Homo sapiens
gtgtccctctgacgg

SEQ ID NO: 1019372 - DNA, 15 bp, Homo sapiens
tgtccctctgacggc

SEQ ID NO: 1019373 - DNA, 15 bp, Homo sapiens
gtccctctgacggcg

SEQ ID NO: 1019374 - DNA, 15 bp, Homo sapiens
tccctctgacggcgg

SEQ ID NO: 1019375 - DNA, 15 bp, Homo sapiens
ccctctgacggcggc

SEQ ID NO: 1019376 - DNA, 15 bp, Homo sapiens
cctctgacggcggca

SEQ ID NO: 1019377 - DNA, 15 bp, Homo sapiens
ctctgacggcggcag

SEQ ID NO: 1019378 - DNA, 15 bp, Homo sapiens
tctgacggcggcaga

SEQ ID NO: 1019379 - DNA, 15 bp, Homo sapiens
ctgacggcggcagaa

SEQ ID NO: 1019380 - DNA, 15 bp, Homo sapiens
tgacggcggcagaag

SEQ ID NO: 1019381 - DNA, 15 bp, Homo sapiens
gacggcggcagaaga

SEQ ID NO: 1019382 - DNA, 15 bp, Homo sapiens
acggcggcagaagag

SEQ ID NO: 1019383 - DNA, 15 bp, Homo sapiens
cggcggcagaagaga

SEQ ID NO: 1019384 - DNA, 15 bp, Homo sapiens
ggcggcagaagagag

SEQ ID NO: 1019385 - DNA, 15 bp, Homo sapiens
gcggcagaagagagg

SEQ ID NO: 1019386 - DNA, 15 bp, Homo sapiens
cggcagaagagaggc

SEQ ID NO: 1019387 - DNA, 15 bp, Homo sapiens
ggcagaagagaggca

SEQ ID NO: 1019388 - DNA, 15 bp, Homo sapiens
gcagaagagaggcag

SEQ ID NO: 1019389 - DNA, 15 bp, Homo sapiens
cagaagagaggcaga

SEQ ID NO: 1019390 - DNA, 15 bp, Homo sapiens
agaagagaggcagac

SEQ ID NO: 1019391 - DNA, 15 bp, Homo sapiens
gaagagaggcagaca

SEQ ID NO: 1019392 - DNA, 15 bp, Homo sapiens
aagagaggcagacag

SEQ ID NO: 1019393 - DNA, 15 bp, Homo sapiens
agagaggcagacaga

SEQ ID NO: 1019394 - DNA, 15 bp, Homo sapiens
gagaggcagacagac

SEQ ID NO: 1019395 - DNA, 15 bp, Homo sapiens
agaggcagacagact

SEQ ID NO: 1019396 - DNA, 15 bp, Homo sapiens
gaggcagacagactg

SEQ ID NO: 1019397 - DNA, 15 bp, Homo sapiens
aggcagacagactga

SEQ ID NO: 1019398 - DNA, 15 bp, Homo sapiens
ggcagacagactgac

SEQ ID NO: 1019399 - DNA, 15 bp, Homo sapiens
gcagacagactgaca

SEQ ID NO: 1019400 - DNA, 15 bp, Homo sapiens
cagacagactgacag

SEQ ID NO: 1019401 - DNA, 15 bp, Homo sapiens
agacagactgacaga

SEQ ID NO: 1019402 - DNA, 15 bp, Homo sapiens
gacagactgacagac

SEQ ID NO: 1019403 - DNA, 15 bp, Homo sapiens
acagactgacagaca

SEQ ID NO: 1019404 - DNA, 15 bp, Homo sapiens
cagactgacagacac

SEQ ID NO: 1019405 - DNA, 15 bp, Homo sapiens
agactgacagacacg

SEQ ID NO: 1019406 - DNA, 15 bp, Homo sapiens
gactgacagacacgt

SEQ ID NO: 1019407 - DNA, 15 bp, Homo sapiens
actgacagacacgta

SEQ ID NO: 1019408 - DNA, 15 bp, Homo sapiens
ctgacagacacgtag

SEQ ID NO: 1019409 - DNA, 15 bp, Homo sapiens
tgacagacacgtaga

SEQ ID NO: 1019410 - DNA, 15 bp, Homo sapiens
gacagacacgtagac

SEQ ID NO: 1019411 - DNA, 15 bp, Homo sapiens
acagacacgtagacc

SEQ ID NO: 1019412 - DNA, 15 bp, Homo sapiens
cagacacgtagacca

SEQ ID NO: 1019413 - DNA, 15 bp, Homo sapiens
agacacgtagaccaa

SEQ ID NO: 1019414 - DNA, 15 bp, Homo sapiens
gacacgtagaccaac

SEQ ID NO: 1019415 - DNA, 15 bp, Homo sapiens
acacgtagaccaaca

SEQ ID NO: 1019416 - DNA, 15 bp, Homo sapiens
cacgtagaccaacag

SEQ ID NO: 1019417 - DNA, 15 bp, Homo sapiens
acgtagaccaacagt

SEQ ID NO: 1019418 - DNA, 15 bp, Homo sapiens
cgtagaccaacagtg

SEQ ID NO: 1019419 - DNA, 15 bp, Homo sapiens
gtagaccaacagtgc

SEQ ID NO: 1019420 - DNA, 15 bp, Homo sapiens
tagaccaacagtgcg

SEQ ID NO: 1019421 - DNA, 15 bp, Homo sapiens
agaccaacagtgcgg

SEQ ID NO: 1019422 - DNA, 15 bp, Homo sapiens
gaccaacagtgcggc

SEQ ID NO: 1019423 - DNA, 15 bp, Homo sapiens
accaacagtgcggcc

SEQ ID NO: 1019424 - DNA, 15 bp, Homo sapiens
ccaacagtgcggccc

SEQ ID NO: 1019425 - DNA, 15 bp, Homo sapiens
caacagtgcggcccc

SEQ ID NO: 1019426 - DNA, 15 bp, Homo sapiens
aacagtgcggcccca

SEQ ID NO: 1019427 - DNA, 15 bp, Homo sapiens
acagtgcggccccag

SEQ ID NO: 1019428 - DNA, 15 bp, Homo sapiens
cagtgcggccccagg

SEQ ID NO: 1019429 - DNA, 15 bp, Homo sapiens
agtgcggccccaggg

SEQ ID NO: 1019430 - DNA, 15 bp, Homo sapiens
gtgcggccccagggt

SEQ ID NO: 1019431 - DNA, 15 bp, Homo sapiens
tgcggccccagggtt

SEQ ID NO: 1019432 - DNA, 15 bp, Homo sapiens
gcggccccagggttc

SEQ ID NO: 1019433 - DNA, 15 bp, Homo sapiens
cggccccagggttcg

SEQ ID NO: 1019434 - DNA, 15 bp, Homo sapiens
ggccccagggttcgt

SEQ ID NO: 1019435 - DNA, 15 bp, Homo sapiens
gccccagggttcgtc

SEQ ID NO: 1019436 - DNA, 15 bp, Homo sapiens
ccccagggttcgtcc

SEQ ID NO: 1019437 - DNA, 15 bp, Homo sapiens
cccagggttcgtccc

SEQ ID NO: 1019438 - DNA, 15 bp, Homo sapiens
ccagggttcgtcccc

SEQ ID NO: 1019439 - DNA, 15 bp, Homo sapiens
cagggttcgtcccca

SEQ ID NO: 1019440 - DNA, 15 bp, Homo sapiens
agggttcgtccccag

SEQ ID NO: 1019441 - DNA, 15 bp, Homo sapiens
gggttcgtccccaga

SEQ ID NO: 1019442 - DNA, 15 bp, Homo sapiens
ggttcgtccccagac

SEQ ID NO: 1019443 - DNA, 15 bp, Homo sapiens
gttcgtccccagact

SEQ ID NO: 1019444 - DNA, 15 bp, Homo sapiens
ttcgtccccagactc

SEQ ID NO: 1019445 - DNA, 15 bp, Homo sapiens
tcgtccccagactcg

SEQ ID NO: 1019446 - DNA, 15 bp, Homo sapiens
cgtccccagactcgc

SEQ ID NO: 1019447 - DNA, 15 bp, Homo sapiens
gtccccagactcgct

SEQ ID NO: 1019448 - DNA, 15 bp, Homo sapiens
tccccagactcgctc

SEQ ID NO: 1019449 - DNA, 15 bp, Homo sapiens
ccccagactcgctcg

SEQ ID NO: 1019450 - DNA, 15 bp, Homo sapiens
cccagactcgctcgc

SEQ ID NO: 1019451 - DNA, 15 bp, Homo sapiens
ccagactcgctcgct

SEQ ID NO: 1019452 - DNA, 15 bp, Homo sapiens
cagactcgctcgctc

SEQ ID NO: 1019453 - DNA, 15 bp, Homo sapiens
agactcgctcgctca

SEQ ID NO: 1019454 - DNA, 15 bp, Homo sapiens
gactcgctcgctcat

SEQ ID NO: 1019455 - DNA, 15 bp, Homo sapiens
actcgctcgctcatt

SEQ ID NO: 1019456 - DNA, 15 bp, Homo sapiens
ctcgctcgctcattt

SEQ ID NO: 1019457 - DNA, 15 bp, Homo sapiens
tcgctcgctcatttg

SEQ ID NO: 1019458 - DNA, 15 bp, Homo sapiens
cgctcgctcatttgt

SEQ ID NO: 1019459 - DNA, 15 bp, Homo sapiens
gctcgctcatttgtt

SEQ ID NO: 1019460 - DNA, 15 bp, Homo sapiens
ctcgctcatttgttg

SEQ ID NO: 1019461 - DNA, 15 bp, Homo sapiens
tcgctcatttgttgg

SEQ ID NO: 1019462 - DNA, 15 bp, Homo sapiens
cgctcatttgttggc

SEQ ID NO: 1019463 - DNA, 15 bp, Homo sapiens
gctcatttgttggcg

SEQ ID NO: 1019464 - DNA, 15 bp, Homo sapiens
ctcatttgttggcga

SEQ ID NO: 1019465 - DNA, 15 bp, Homo sapiens
tcatttgttggcgac

SEQ ID NO: 1019466 - DNA, 15 bp, Homo sapiens
catttgttggcgact

SEQ ID NO: 1019467 - DNA, 15 bp, Homo sapiens
atttgttggcgactg

SEQ ID NO: 1019468 - DNA, 15 bp, Homo sapiens
tttgttggcgactgg

SEQ ID NO: 1019469 - DNA, 15 bp, Homo sapiens
ttgttggcgactggg

SEQ ID NO: 1019470 - DNA, 15 bp, Homo sapiens
tgttggcgactgggg

SEQ ID NO: 1019471 - DNA, 15 bp, Homo sapiens
gttggcgactggggc

SEQ ID NO: 1019472 - DNA, 15 bp, Homo sapiens
ttggcgactggggct

SEQ ID NO: 1019473 - DNA, 15 bp, Homo sapiens
tggcgactggggctc

SEQ ID NO: 1019474 - DNA, 15 bp, Homo sapiens
ggcgactggggctca

SEQ ID NO: 1019475 - DNA, 15 bp, Homo sapiens
gcgactggggctcag

SEQ ID NO: 1019476 - DNA, 15 bp, Homo sapiens
cgactggggctcagc

SEQ ID NO: 1019477 - DNA, 15 bp, Homo sapiens
gactggggctcagcg

SEQ ID NO: 1019478 - DNA, 15 bp, Homo sapiens
actggggctcagcgc

SEQ ID NO: 1019479 - DNA, 15 bp, Homo sapiens
ctggggctcagcgca

SEQ ID NO: 1019480 - DNA, 15 bp, Homo sapiens
tggggctcagcgcag

SEQ ID NO: 1019481 - DNA, 15 bp, Homo sapiens
ggggctcagcgcagc

SEQ ID NO: 1019482 - DNA, 15 bp, Homo sapiens
gggctcagcgcagcg

SEQ ID NO: 1019483 - DNA, 15 bp, Homo sapiens
ggctcagcgcagcga

SEQ ID NO: 1019484 - DNA, 15 bp, Homo sapiens
gctcagcgcagcgaa

SEQ ID NO: 1019485 - DNA, 15 bp, Homo sapiens
ctcagcgcagcgaag

SEQ ID NO: 1019486 - DNA, 15 bp, Homo sapiens
tcagcgcagcgaagc

SEQ ID NO: 1019487 - DNA, 15 bp, Homo sapiens
cagcgcagcgaagcc

SEQ ID NO: 1019488 - DNA, 15 bp, Homo sapiens
agcgcagcgaagccc

SEQ ID NO: 1019489 - DNA, 15 bp, Homo sapiens
gcgcagcgaagcccg

SEQ ID NO: 1019490 - DNA, 15 bp, Homo sapiens
cgcagcgaagcccga

SEQ ID NO: 1019491 - DNA, 15 bp, Homo sapiens
gcagcgaagcccgat

SEQ ID NO: 1019492 - DNA, 15 bp, Homo sapiens
cagcgaagcccgatg

SEQ ID NO: 1019493 - DNA, 15 bp, Homo sapiens
agcgaagcccgatgt

SEQ ID NO: 1019494 - DNA, 15 bp, Homo sapiens
gcgaagcccgatgtg

SEQ ID NO: 1019495 - DNA, 15 bp, Homo sapiens
cgaagcccgatgtgg

SEQ ID NO: 1019496 - DNA, 15 bp, Homo sapiens
gaagcccgatgtggt

SEQ ID NO: 1019497 - DNA, 15 bp, Homo sapiens
aagcccgatgtggtc

SEQ ID NO: 1019498 - DNA, 15 bp, Homo sapiens
agcccgatgtggtcc

SEQ ID NO: 1019499 - DNA, 15 bp, Homo sapiens
gcccgatgtggtccg

SEQ ID NO: 1019500 - DNA, 15 bp, Homo sapiens
cccgatgtggtccgg

SEQ ID NO: 1019501 - DNA, 15 bp, Homo sapiens
ccgatgtggtccgga

SEQ ID NO: 1019502 - DNA, 15 bp, Homo sapiens
cgatgtggtccggag

SEQ ID NO: 1019503 - DNA, 15 bp, Homo sapiens
gatgtggtccggagg

SEQ ID NO: 1019504 - DNA, 15 bp, Homo sapiens
atgtggtccggaggc

SEQ ID NO: 1019505 - DNA, 15 bp, Homo sapiens
tgtggtccggaggca

SEQ ID NO: 1019506 - DNA, 15 bp, Homo sapiens
gtggtccggaggcag

SEQ ID NO: 1019507 - DNA, 15 bp, Homo sapiens
tggtccggaggcagt

SEQ ID NO: 1019508 - DNA, 15 bp, Homo sapiens
ggtccggaggcagtg

SEQ ID NO: 1019509 - DNA, 15 bp, Homo sapiens
gtccggaggcagtgg

SEQ ID NO: 1019510 - DNA, 15 bp, Homo sapiens
tccggaggcagtggg

SEQ ID NO: 1019511 - DNA, 15 bp, Homo sapiens
ccggaggcagtggga

SEQ ID NO: 1019512 - DNA, 15 bp, Homo sapiens
cggaggcagtgggaa

SEQ ID NO: 1019513 - DNA, 15 bp, Homo sapiens
ggaggcagtgggaag

SEQ ID NO: 1019514 - DNA, 15 bp, Homo sapiens
gaggcagtgggaagg

SEQ ID NO: 1019515 - DNA, 15 bp, Homo sapiens
aggcagtgggaaggc

SEQ ID NO: 1019516 - DNA, 15 bp, Homo sapiens
ggcagtgggaaggcg

SEQ ID NO: 1019517 - DNA, 15 bp, Homo sapiens
gcagtgggaaggcgc

SEQ ID NO: 1019518 - DNA, 15 bp, Homo sapiens
cagtgggaaggcgcg

SEQ ID NO: 1019519 - DNA, 15 bp, Homo sapiens
agtgggaaggcgcgg

SEQ ID NO: 1019520 - DNA, 15 bp, Homo sapiens
gtgggaaggcgcggg

SEQ ID NO: 1019521 - DNA, 15 bp, Homo sapiens
tgggaaggcgcgggg

SEQ ID NO: 1019522 - DNA, 15 bp, Homo sapiens
gggaaggcgcggggc

SEQ ID NO: 1019523 - DNA, 15 bp, Homo sapiens
ggaaggcgcggggct

SEQ ID NO: 1019524 - DNA, 15 bp, Homo sapiens
gaaggcgcggggctg

SEQ ID NO: 1019525 - DNA, 15 bp, Homo sapiens
aaggcgcggggctgg

SEQ ID NO: 1019526 - DNA, 15 bp, Homo sapiens
aggcgcggggctggg

SEQ ID NO: 1019527 - DNA, 15 bp, Homo sapiens
ggcgcggggctggga

SEQ ID NO: 1019528 - DNA, 15 bp, Homo sapiens
gcgcggggctgggag

SEQ ID NO: 1019529 - DNA, 15 bp, Homo sapiens
cgcggggctgggagg

SEQ ID NO: 1019530 - DNA, 15 bp, Homo sapiens
gcggggctgggaggc

SEQ ID NO: 1019531 - DNA, 15 bp, Homo sapiens
cggggctgggaggcc

SEQ ID NO: 1019532 - DNA, 15 bp, Homo sapiens
ggggctgggaggccg

SEQ ID NO: 1019533 - DNA, 15 bp, Homo sapiens
gggctgggaggccgc

SEQ ID NO: 1019534 - DNA, 15 bp, Homo sapiens
ggctgggaggccgcg

SEQ ID NO: 1019535 - DNA, 15 bp, Homo sapiens
gctgggaggccgcgg

SEQ ID NO: 1019536 - DNA, 15 bp, Homo sapiens
ctgggaggccgcggc

SEQ ID NO: 1019537 - DNA, 15 bp, Homo sapiens
tgggaggccgcggcg

SEQ ID NO: 1019538 - DNA, 15 bp, Homo sapiens
gggaggccgcggcgg

SEQ ID NO: 1019539 - DNA, 15 bp, Homo sapiens
ggaggccgcggcggg

SEQ ID NO: 1019540 - DNA, 15 bp, Homo sapiens
gaggccgcggcggga

SEQ ID NO: 1019541 - DNA, 15 bp, Homo sapiens
aggccgcggcgggag

SEQ ID NO: 1019542 - DNA, 15 bp, Homo sapiens
ggccgcggcgggagg

SEQ ID NO: 1019543 - DNA, 15 bp, Homo sapiens
gccgcggcgggaggg

SEQ ID NO: 1019544 - DNA, 15 bp, Homo sapiens
ccgcggcgggaggga

SEQ ID NO: 1019545 - DNA, 15 bp, Homo sapiens
cgcggcgggagggag

SEQ ID NO: 1019546 - DNA, 15 bp, Homo sapiens
gcggcgggagggagg

SEQ ID NO: 1019547 - DNA, 15 bp, Homo sapiens
cggcgggagggagga

SEQ ID NO: 1019548 - DNA, 15 bp, Homo sapiens
ggcgggagggaggag

SEQ ID NO: 1019549 - DNA, 15 bp, Homo sapiens
gcgggagggaggagc

SEQ ID NO: 1019550 - DNA, 15 bp, Homo sapiens
cgggagggaggagca

SEQ ID NO: 1019551 - DNA, 15 bp, Homo sapiens
gggagggaggagcag

SEQ ID NO: 1019552 - DNA, 15 bp, Homo sapiens
ggagggaggagcagc

SEQ ID NO: 1019553 - DNA, 15 bp, Homo sapiens
gagggaggagcagcc

SEQ ID NO: 1019554 - DNA, 15 bp, Homo sapiens
agggaggagcagccc

SEQ ID NO: 1019555 - DNA, 15 bp, Homo sapiens
gggaggagcagcccc

SEQ ID NO: 1019556 - DNA, 15 bp, Homo sapiens
ggaggagcagccccg

SEQ ID NO: 1019557 - DNA, 15 bp, Homo sapiens
gaggagcagccccgg

SEQ ID NO: 1019558 - DNA, 15 bp, Homo sapiens
aggagcagccccggc

SEQ ID NO: 1019559 - DNA, 15 bp, Homo sapiens
ggagcagccccggca

SEQ ID NO: 1019560 - DNA, 15 bp, Homo sapiens
gagcagccccggcag

SEQ ID NO: 1019561 - DNA, 15 bp, Homo sapiens
agcagccccggcagg

SEQ ID NO: 1019562 - DNA, 15 bp, Homo sapiens
gcagccccggcaggc

SEQ ID NO: 1019563 - DNA, 15 bp, Homo sapiens
cagccccggcaggct

SEQ ID NO: 1019564 - DNA, 15 bp, Homo sapiens
agccccggcaggctc

SEQ ID NO: 1019565 - DNA, 15 bp, Homo sapiens
gccccggcaggctca

SEQ ID NO: 1019566 - DNA, 15 bp, Homo sapiens
ccccggcaggctcag

SEQ ID NO: 1019567 - DNA, 15 bp, Homo sapiens
cccggcaggctcagg

SEQ ID NO: 1019568 - DNA, 15 bp, Homo sapiens
ccggcaggctcaggt

SEQ ID NO: 1019569 - DNA, 15 bp, Homo sapiens
cggcaggctcaggtg

SEQ ID NO: 1019570 - DNA, 15 bp, Homo sapiens
ggcaggctcaggtga

SEQ ID NO: 1019571 - DNA, 15 bp, Homo sapiens
gcaggctcaggtgaa

SEQ ID NO: 1019572 - DNA, 15 bp, Homo sapiens
caggctcaggtgaaa

SEQ ID NO: 1019573 - DNA, 15 bp, Homo sapiens
aggctcaggtgaaac

SEQ ID NO: 1019574 - DNA, 15 bp, Homo sapiens
ggctcaggtgaaacc

SEQ ID NO: 1019575 - DNA, 15 bp, Homo sapiens
gctcaggtgaaaccc

SEQ ID NO: 1019576 - DNA, 15 bp, Homo sapiens
ctcaggtgaaacccc

SEQ ID NO: 1019577 - DNA, 15 bp, Homo sapiens
tcaggtgaaaccccc

SEQ ID NO: 1019578 - DNA, 15 bp, Homo sapiens
caggtgaaaccccca

SEQ ID NO: 1019579 - DNA, 15 bp, Homo sapiens
aggtgaaacccccac

SEQ ID NO: 1019580 - DNA, 15 bp, Homo sapiens
ggtgaaacccccacc

SEQ ID NO: 1019581 - DNA, 15 bp, Homo sapiens
gtgaaacccccaccc

SEQ ID NO: 1019582 - DNA, 15 bp, Homo sapiens
tgaaacccccaccct

SEQ ID NO: 1019583 - DNA, 15 bp, Homo sapiens
gaaacccccaccctg

SEQ ID NO: 1019584 - DNA, 15 bp, Homo sapiens
aaacccccaccctgt

SEQ ID NO: 1019585 - DNA, 15 bp, Homo sapiens
aacccccaccctgtc

SEQ ID NO: 1019586 - DNA, 15 bp, Homo sapiens
acccccaccctgtcc

SEQ ID NO: 1019587 - DNA, 15 bp, Homo sapiens
cccccaccctgtccc

SEQ ID NO: 1019588 - DNA, 15 bp, Homo sapiens
ccccaccctgtccct

SEQ ID NO: 1019589 - DNA, 15 bp, Homo sapiens
cccaccctgtccctc

SEQ ID NO: 1019590 - DNA, 15 bp, Homo sapiens
ccaccctgtccctca

SEQ ID NO: 1019591 - DNA, 15 bp, Homo sapiens
caccctgtccctcag

SEQ ID NO: 1019592 - DNA, 15 bp, Homo sapiens
accctgtccctcagc

SEQ ID NO: 1019593 - DNA, 15 bp, Homo sapiens
ccctgtccctcagcc

SEQ ID NO: 1019594 - DNA, 15 bp, Homo sapiens
cctgtccctcagccc

SEQ ID NO: 1019595 - DNA, 15 bp, Homo sapiens
ctgtccctcagcccc

SEQ ID NO: 1019596 - DNA, 15 bp, Homo sapiens
tgtccctcagccccc

SEQ ID NO: 1019597 - DNA, 15 bp, Homo sapiens
gtccctcagccccct

SEQ ID NO: 1019598 - DNA, 15 bp, Homo sapiens
tccctcagccccctc

SEQ ID NO: 1019599 - DNA, 15 bp, Homo sapiens
ccctcagccccctcc

SEQ ID NO: 1019600 - DNA, 15 bp, Homo sapiens
cctcagccccctcct

SEQ ID NO: 1019601 - DNA, 15 bp, Homo sapiens
ctcagccccctcctc

SEQ ID NO: 1019602 - DNA, 15 bp, Homo sapiens
tcagccccctcctcc

SEQ ID NO: 1019603 - DNA, 15 bp, Homo sapiens
cagccccctcctcct

SEQ ID NO: 1019604 - DNA, 15 bp, Homo sapiens
agccccctcctccta

SEQ ID NO: 1019605 - DNA, 15 bp, Homo sapiens
gccccctcctcctaa

SEQ ID NO: 1019606 - DNA, 15 bp, Homo sapiens
ccccctcctcctaaa

SEQ ID NO: 1019607 - DNA, 15 bp, Homo sapiens
cccctcctcctaaag

SEQ ID NO: 1019608 - DNA, 15 bp, Homo sapiens
ccctcctcctaaaga

SEQ ID NO: 1019609 - DNA, 15 bp, Homo sapiens
cctcctcctaaagac

SEQ ID NO: 1019610 - DNA, 15 bp, Homo sapiens
ctcctcctaaagacc

SEQ ID NO: 1019611 - DNA, 15 bp, Homo sapiens
tcctcctaaagacct

SEQ ID NO: 1019612 - DNA, 15 bp, Homo sapiens
cctcctaaagacctg

SEQ ID NO: 1019613 - DNA, 15 bp, Homo sapiens
ctcctaaagacctgt

SEQ ID NO: 1019614 - DNA, 15 bp, Homo sapiens
tcctaaagacctgtc

SEQ ID NO: 1019615 - DNA, 15 bp, Homo sapiens
cctaaagacctgtcc

SEQ ID NO: 1019616 - DNA, 15 bp, Homo sapiens
ctaaagacctgtccg

SEQ ID NO: 1019617 - DNA, 15 bp, Homo sapiens
taaagacctgtccgt

SEQ ID NO: 1019618 - DNA, 15 bp, Homo sapiens
aaagacctgtccgtg

SEQ ID NO: 1019619 - DNA, 15 bp, Homo sapiens
aagacctgtccgtgc

SEQ ID NO: 1019620 - DNA, 15 bp, Homo sapiens
agacctgtccgtgcc

SEQ ID NO: 1019621 - DNA, 15 bp, Homo sapiens
gacctgtccgtgccc

SEQ ID NO: 1019622 - DNA, 15 bp, Homo sapiens
acctgtccgtgcccg

SEQ ID NO: 1019623 - DNA, 15 bp, Homo sapiens
cctgtccgtgcccgg

SEQ ID NO: 1019624 - DNA, 15 bp, Homo sapiens
ctgtccgtgcccggg

SEQ ID NO: 1019625 - DNA, 15 bp, Homo sapiens
tgtccgtgcccgggg

SEQ ID NO: 1019626 - DNA, 15 bp, Homo sapiens
gtccgtgcccgggga

SEQ ID NO: 1019627 - DNA, 15 bp, Homo sapiens
tccgtgcccggggaa

SEQ ID NO: 1019628 - DNA, 15 bp, Homo sapiens
ccgtgcccggggaac

SEQ ID NO: 1019629 - DNA, 15 bp, Homo sapiens
cgtgcccggggaacc

SEQ ID NO: 1019630 - DNA, 15 bp, Homo sapiens
gtgcccggggaaccc

SEQ ID NO: 1019631 - DNA, 15 bp, Homo sapiens
tgcccggggaacccc

SEQ ID NO: 1019632 - DNA, 15 bp, Homo sapiens
gcccggggaaccccg

SEQ ID NO: 1019633 - DNA, 15 bp, Homo sapiens
cccggggaaccccga

SEQ ID NO: 1019634 - DNA, 15 bp, Homo sapiens
ccggggaaccccgac

SEQ ID NO: 1019635 - DNA, 15 bp, Homo sapiens
cggggaaccccgacc

SEQ ID NO: 1019636 - DNA, 15 bp, Homo sapiens
ggggaaccccgaccg

SEQ ID NO: 1019637 - DNA, 15 bp, Homo sapiens
gggaaccccgaccga

SEQ ID NO: 1019638 - DNA, 15 bp, Homo sapiens
ggaaccccgaccgaa

SEQ ID NO: 1019639 - DNA, 15 bp, Homo sapiens
gaaccccgaccgaat

SEQ ID NO: 1019640 - DNA, 15 bp, Homo sapiens
aaccccgaccgaatt

SEQ ID NO: 1019641 - DNA, 15 bp, Homo sapiens
accccgaccgaattg

SEQ ID NO: 1019642 - DNA, 15 bp, Homo sapiens
ccccgaccgaattgg

SEQ ID NO: 1019643 - DNA, 15 bp, Homo sapiens
cccgaccgaattgga

SEQ ID NO: 1019644 - DNA, 15 bp, Homo sapiens
ccgaccgaattggaa

SEQ ID NO: 1019645 - DNA, 15 bp, Homo sapiens
cgaccgaattggaaa

SEQ ID NO: 1019646 - DNA, 15 bp, Homo sapiens
gaccgaattggaaag

SEQ ID NO: 1019647 - DNA, 15 bp, Homo sapiens
accgaattggaaagt

SEQ ID NO: 1019648 - DNA, 15 bp, Homo sapiens
ccgaattggaaagtg

SEQ ID NO: 1019649 - DNA, 15 bp, Homo sapiens
cgaattggaaagtgg

SEQ ID NO: 1019650 - DNA, 15 bp, Homo sapiens
gaattggaaagtggt

SEQ ID NO: 1019651 - DNA, 15 bp, Homo sapiens
aattggaaagtggtt

SEQ ID NO: 1019652 - DNA, 15 bp, Homo sapiens
attggaaagtggttc

SEQ ID NO: 1019653 - DNA, 15 bp, Homo sapiens
ttggaaagtggttcc

SEQ ID NO: 1019654 - DNA, 15 bp, Homo sapiens
tggaaagtggttcca

SEQ ID NO: 1019655 - DNA, 15 bp, Homo sapiens
ggaaagtggttccac

SEQ ID NO: 1019656 - DNA, 15 bp, Homo sapiens
gaaagtggttccact

SEQ ID NO: 1019657 - DNA, 15 bp, Homo sapiens
aaagtggttccactt

SEQ ID NO: 1019658 - DNA, 15 bp, Homo sapiens
aagtggttccacttt

SEQ ID NO: 1019659 - DNA, 15 bp, Homo sapiens
agtggttccactttg

SEQ ID NO: 1019660 - DNA, 15 bp, Homo sapiens
gtggttccactttgt

SEQ ID NO: 1019661 - DNA, 15 bp, Homo sapiens
tggttccactttgta

SEQ ID NO: 1019662 - DNA, 15 bp, Homo sapiens
ggttccactttgtaa

SEQ ID NO: 1019663 - DNA, 15 bp, Homo sapiens
gttccactttgtaac

SEQ ID NO: 1019664 - DNA, 15 bp, Homo sapiens
ttccactttgtaact

SEQ ID NO: 1019665 - DNA, 15 bp, Homo sapiens
tccactttgtaactc

SEQ ID NO: 1019666 - DNA, 15 bp, Homo sapiens
ccactttgtaactcc

SEQ ID NO: 1019667 - DNA, 15 bp, Homo sapiens
cactttgtaactccg

SEQ ID NO: 1019668 - DNA, 15 bp, Homo sapiens
actttgtaactccgc

SEQ ID NO: 1019669 - DNA, 15 bp, Homo sapiens
ctttgtaactccgca

SEQ ID NO: 1019670 - DNA, 15 bp, Homo sapiens
tttgtaactccgcaa

SEQ ID NO: 1019671 - DNA, 15 bp, Homo sapiens
ttgtaactccgcaag

SEQ ID NO: 1019672 - DNA, 15 bp, Homo sapiens
tgtaactccgcaagt

SEQ ID NO: 1019673 - DNA, 15 bp, Homo sapiens
gtaactccgcaagtt

SEQ ID NO: 1019674 - DNA, 15 bp, Homo sapiens
taactccgcaagttg

SEQ ID NO: 1019675 - DNA, 15 bp, Homo sapiens
aactccgcaagttgg

SEQ ID NO: 1019676 - DNA, 15 bp, Homo sapiens
actccgcaagttggt

SEQ ID NO: 1019677 - DNA, 15 bp, Homo sapiens
ctccgcaagttggtt

SEQ ID NO: 1019678 - DNA, 15 bp, Homo sapiens
tccgcaagttggttg

SEQ ID NO: 1019679 - DNA, 15 bp, Homo sapiens
ccgcaagttggttgc

SEQ ID NO: 1019680 - DNA, 15 bp, Homo sapiens
cgcaagttggttgca

SEQ ID NO: 1019681 - DNA, 15 bp, Homo sapiens
gcaagttggttgcaa

SEQ ID NO: 1019682 - DNA, 15 bp, Homo sapiens
caagttggttgcaaa

SEQ ID NO: 1019683 - DNA, 15 bp, Homo sapiens
aagttggttgcaaag

SEQ ID NO: 1019684 - DNA, 15 bp, Homo sapiens
agttggttgcaaagc

SEQ ID NO: 1019685 - DNA, 15 bp, Homo sapiens
gttggttgcaaagca

SEQ ID NO: 1019686 - DNA, 15 bp, Homo sapiens
ttggttgcaaagcag

SEQ ID NO: 1019687 - DNA, 15 bp, Homo sapiens
tggttgcaaagcagc

SEQ ID NO: 1019688 - DNA, 15 bp, Homo sapiens
ggttgcaaagcagca

SEQ ID NO: 1019689 - DNA, 15 bp, Homo sapiens
gttgcaaagcagcat

SEQ ID NO: 1019690 - DNA, 15 bp, Homo sapiens
ttgcaaagcagcatt

SEQ ID NO: 1019691 - DNA, 15 bp, Homo sapiens
tgcaaagcagcattc

SEQ ID NO: 1019692 - DNA, 15 bp, Homo sapiens
gcaaagcagcattca

SEQ ID NO: 1019693 - DNA, 15 bp, Homo sapiens
caaagcagcattcac

SEQ ID NO: 1019694 - DNA, 15 bp, Homo sapiens
aaagcagcattcacc

SEQ ID NO: 1019695 - DNA, 15 bp, Homo sapiens
aagcagcattcacct

SEQ ID NO: 1019696 - DNA, 15 bp, Homo sapiens
agcagcattcacctt

SEQ ID NO: 1019697 - DNA, 15 bp, Homo sapiens
gcagcattcaccttc

SEQ ID NO: 1019698 - DNA, 15 bp, Homo sapiens
cagcattcaccttcc

SEQ ID NO: 1019699 - DNA, 15 bp, Homo sapiens
agcattcaccttcct

SEQ ID NO: 1019700 - DNA, 15 bp, Homo sapiens
gcattcaccttcctt

SEQ ID NO: 1019701 - DNA, 15 bp, Homo sapiens
cattcaccttccttc

SEQ ID NO: 1019702 - DNA, 15 bp, Homo sapiens
attcaccttccttcc

SEQ ID NO: 1019703 - DNA, 15 bp, Homo sapiens
ttcaccttccttcct

SEQ ID NO: 1019704 - DNA, 15 bp, Homo sapiens
tcaccttccttcctc

SEQ ID NO: 1019705 - DNA, 15 bp, Homo sapiens
caccttccttcctct

SEQ ID NO: 1019706 - DNA, 15 bp, Homo sapiens
accttccttcctctc

SEQ ID NO: 1019707 - DNA, 15 bp, Homo sapiens
ccttccttcctctca

SEQ ID NO: 1019708 - DNA, 15 bp, Homo sapiens
cttccttcctctcaa

SEQ ID NO: 1019709 - DNA, 15 bp, Homo sapiens
ttccttcctctcaac

SEQ ID NO: 1019710 - DNA, 15 bp, Homo sapiens
tccttcctctcaacc

SEQ ID NO: 1019711 - DNA, 15 bp, Homo sapiens
ccttcctctcaacca

SEQ ID NO: 1019712 - DNA, 15 bp, Homo sapiens
cttcctctcaaccat

SEQ ID NO: 1019713 - DNA, 15 bp, Homo sapiens
ttcctctcaaccatc

SEQ ID NO: 1019714 - DNA, 15 bp, Homo sapiens
tcctctcaaccatct

SEQ ID NO: 1019715 - DNA, 15 bp, Homo sapiens
cctctcaaccatctc

SEQ ID NO: 1019716 - DNA, 15 bp, Homo sapiens
ctctcaaccatctct

SEQ ID NO: 1019717 - DNA, 15 bp, Homo sapiens
tctcaaccatctctc

SEQ ID NO: 1019718 - DNA, 15 bp, Homo sapiens
ctcaaccatctctcc

SEQ ID NO: 1019719 - DNA, 15 bp, Homo sapiens
tcaaccatctctcct

SEQ ID NO: 1019720 - DNA, 15 bp, Homo sapiens
caaccatctctcctc

SEQ ID NO: 1019721 - DNA, 15 bp, Homo sapiens
aaccatctctcctcc

SEQ ID NO: 1019722 - DNA, 15 bp, Homo sapiens
accatctctcctcct

SEQ ID NO: 1019723 - DNA, 15 bp, Homo sapiens
ccatctctcctcctc

SEQ ID NO: 1019724 - DNA, 15 bp, Homo sapiens
catctctcctcctct

SEQ ID NO: 1019725 - DNA, 15 bp, Homo sapiens
atctctcctcctctg

SEQ ID NO: 1019726 - DNA, 15 bp, Homo sapiens
tctctcctcctctgt

SEQ ID NO: 1019727 - DNA, 15 bp, Homo sapiens
ctctcctcctctgtt

SEQ ID NO: 1019728 - DNA, 15 bp, Homo sapiens
tctcctcctctgtta

SEQ ID NO: 1019729 - DNA, 15 bp, Homo sapiens
ctcctcctctgttac

SEQ ID NO: 1019730 - DNA, 15 bp, Homo sapiens
tcctcctctgttact

SEQ ID NO: 1019731 - DNA, 15 bp, Homo sapiens
cctcctctgttactc

SEQ ID NO: 1019732 - DNA, 15 bp, Homo sapiens
ctcctctgttactcc

SEQ ID NO: 1019733 - DNA, 15 bp, Homo sapiens
tcctctgttactccc

SEQ ID NO: 1019734 - DNA, 15 bp, Homo sapiens
cctctgttactcccc

SEQ ID NO: 1019735 - DNA, 15 bp, Homo sapiens
ctctgttactccccc

SEQ ID NO: 1019736 - DNA, 15 bp, Homo sapiens
tctgttactccccca

SEQ ID NO: 1019737 - DNA, 15 bp, Homo sapiens
ctgttactcccccac

SEQ ID NO: 1019738 - DNA, 15 bp, Homo sapiens
tgttactcccccacc

SEQ ID NO: 1019739 - DNA, 15 bp, Homo sapiens
gttactcccccaccc

SEQ ID NO: 1019740 - DNA, 15 bp, Homo sapiens
ttactcccccacccc

SEQ ID NO: 1019741 - DNA, 15 bp, Homo sapiens
tactcccccacccca

SEQ ID NO: 1019742 - DNA, 15 bp, Homo sapiens
actcccccaccccac

SEQ ID NO: 1019743 - DNA, 15 bp, Homo sapiens
ctcccccaccccacc

SEQ ID NO: 1019744 - DNA, 15 bp, Homo sapiens
tcccccaccccacct

SEQ ID NO: 1019745 - DNA, 15 bp, Homo sapiens
cccccaccccacctc

SEQ ID NO: 1019746 - DNA, 15 bp, Homo sapiens
ccccaccccacctcc

SEQ ID NO: 1019747 - DNA, 15 bp, Homo sapiens
cccaccccacctcct

SEQ ID NO: 1019748 - DNA, 15 bp, Homo sapiens
ccaccccacctcctg

SEQ ID NO: 1019749 - DNA, 15 bp, Homo sapiens
caccccacctcctgc

SEQ ID NO: 1019750 - DNA, 15 bp, Homo sapiens
accccacctcctgcc

SEQ ID NO: 1019751 - DNA, 15 bp, Homo sapiens
ccccacctcctgccc

SEQ ID NO: 1019752 - DNA, 15 bp, Homo sapiens
cccacctcctgccct

SEQ ID NO: 1019753 - DNA, 15 bp, Homo sapiens
ccacctcctgccctc

SEQ ID NO: 1019754 - DNA, 15 bp, Homo sapiens
cacctcctgccctcc

SEQ ID NO: 1019755 - DNA, 15 bp, Homo sapiens
acctcctgccctccc

SEQ ID NO: 1019756 - DNA, 15 bp, Homo sapiens
cctcctgccctcccc

SEQ ID NO: 1019757 - DNA, 15 bp, Homo sapiens
ctcctgccctccccg

SEQ ID NO: 1019758 - DNA, 15 bp, Homo sapiens
tcctgccctccccgc

SEQ ID NO: 1019759 - DNA, 15 bp, Homo sapiens
cctgccctccccgct

SEQ ID NO: 1019760 - DNA, 15 bp, Homo sapiens
ctgccctccccgctc

SEQ ID NO: 1019761 - DNA, 15 bp, Homo sapiens
tgccctccccgctct

SEQ ID NO: 1019762 - DNA, 15 bp, Homo sapiens
gccctccccgctctc

SEQ ID NO: 1019763 - DNA, 15 bp, Homo sapiens
ccctccccgctctcg

SEQ ID NO: 1019764 - DNA, 15 bp, Homo sapiens
cctccccgctctcgg

SEQ ID NO: 1019765 - DNA, 15 bp, Homo sapiens
ctccccgctctcggt

SEQ ID NO: 1019766 - DNA, 15 bp, Homo sapiens
tccccgctctcggtt

SEQ ID NO: 1019767 - DNA, 15 bp, Homo sapiens
ccccgctctcggttc

SEQ ID NO: 1019768 - DNA, 15 bp, Homo sapiens
cccgctctcggttcc

SEQ ID NO: 1019769 - DNA, 15 bp, Homo sapiens
ccgctctcggttccc

SEQ ID NO: 1019770 - DNA, 15 bp, Homo sapiens
cgctctcggttccct

SEQ ID NO: 1019771 - DNA, 15 bp, Homo sapiens
gctctcggttccctc

SEQ ID NO: 1019772 - DNA, 15 bp, Homo sapiens
ctctcggttccctcc

SEQ ID NO: 1019773 - DNA, 15 bp, Homo sapiens
tctcggttccctcct

SEQ ID NO: 1019774 - DNA, 15 bp, Homo sapiens
ctcggttccctcctc

SEQ ID NO: 1019775 - DNA, 15 bp, Homo sapiens
tcggttccctcctcc

SEQ ID NO: 1019776 - DNA, 15 bp, Homo sapiens
cggttccctcctcct

SEQ ID NO: 1019777 - DNA, 15 bp, Homo sapiens
ggttccctcctcctt

SEQ ID NO: 1019778 - DNA, 15 bp, Homo sapiens
gttccctcctccttc

SEQ ID NO: 1019779 - DNA, 15 bp, Homo sapiens
ttccctcctccttcc

SEQ ID NO: 1019780 - DNA, 15 bp, Homo sapiens
tccctcctccttccc

SEQ ID NO: 1019781 - DNA, 15 bp, Homo sapiens
ccctcctccttcccc

SEQ ID NO: 1019782 - DNA, 15 bp, Homo sapiens
cctcctccttcccct

SEQ ID NO: 1019783 - DNA, 15 bp, Homo sapiens
ctcctccttcccctc

SEQ ID NO: 1019784 - DNA, 15 bp, Homo sapiens
tcctccttcccctcc

SEQ ID NO: 1019785 - DNA, 15 bp, Homo sapiens
cctccttcccctccc

SEQ ID NO: 1019786 - DNA, 15 bp, Homo sapiens
ctccttcccctcccc

SEQ ID NO: 1019787 - DNA, 15 bp, Homo sapiens
tccttcccctcccct

SEQ ID NO: 1019788 - DNA, 15 bp, Homo sapiens
ccttcccctcccctc

SEQ ID NO: 1019789 - DNA, 15 bp, Homo sapiens
cttcccctcccctcc

SEQ ID NO: 1019790 - DNA, 15 bp, Homo sapiens
ttcccctcccctcca

SEQ ID NO: 1019791 - DNA, 15 bp, Homo sapiens
tcccctcccctccac

SEQ ID NO: 1019792 - DNA, 15 bp, Homo sapiens
cccctcccctccacc

SEQ ID NO: 1019793 - DNA, 15 bp, Homo sapiens
ccctcccctccacct

SEQ ID NO: 1019794 - DNA, 15 bp, Homo sapiens
cctcccctccacctc

SEQ ID NO: 1019795 - DNA, 15 bp, Homo sapiens
ctcccctccacctcc

SEQ ID NO: 1019796 - DNA, 15 bp, Homo sapiens
tcccctccacctcct

SEQ ID NO: 1019797 - DNA, 15 bp, Homo sapiens
cccctccacctcctc

SEQ ID NO: 1019798 - DNA, 15 bp, Homo sapiens
ccctccacctcctcc

SEQ ID NO: 1019799 - DNA, 15 bp, Homo sapiens
cctccacctcctccc

SEQ ID NO: 1019800 - DNA, 15 bp, Homo sapiens
ctccacctcctcccc

SEQ ID NO: 1019801 - DNA, 15 bp, Homo sapiens
tccacctcctccccg

SEQ ID NO: 1019802 - DNA, 15 bp, Homo sapiens
ccacctcctccccgc

SEQ ID NO: 1019803 - DNA, 15 bp, Homo sapiens
cacctcctccccgcg

SEQ ID NO: 1019804 - DNA, 15 bp, Homo sapiens
acctcctccccgcgc

SEQ ID NO: 1019805 - DNA, 15 bp, Homo sapiens
cctcctccccgcgct

SEQ ID NO: 1019806 - DNA, 15 bp, Homo sapiens
ctcctccccgcgctc

SEQ ID NO: 1019807 - DNA, 15 bp, Homo sapiens
tcctccccgcgctcc

SEQ ID NO: 1019808 - DNA, 15 bp, Homo sapiens
cctccccgcgctccg

SEQ ID NO: 1019809 - DNA, 15 bp, Homo sapiens
ctccccgcgctccgc

SEQ ID NO: 1019810 - DNA, 15 bp, Homo sapiens
tccccgcgctccgct

SEQ ID NO: 1019811 - DNA, 15 bp, Homo sapiens
ccccgcgctccgctg

SEQ ID NO: 1019812 - DNA, 15 bp, Homo sapiens
cccgcgctccgctgg

SEQ ID NO: 1019813 - DNA, 15 bp, Homo sapiens
ccgcgctccgctggt

SEQ ID NO: 1019814 - DNA, 15 bp, Homo sapiens
cgcgctccgctggta

SEQ ID NO: 1019815 - DNA, 15 bp, Homo sapiens
gcgctccgctggtac

SEQ ID NO: 1019816 - DNA, 15 bp, Homo sapiens
cgctccgctggtacc

SEQ ID NO: 1019817 - DNA, 15 bp, Homo sapiens
gctccgctggtaccc

SEQ ID NO: 1019818 - DNA, 15 bp, Homo sapiens
ctccgctggtacccc

SEQ ID NO: 1019819 - DNA, 15 bp, Homo sapiens
tccgctggtacccca

SEQ ID NO: 1019820 - DNA, 15 bp, Homo sapiens
ccgctggtaccccac

SEQ ID NO: 1019821 - DNA, 15 bp, Homo sapiens
cgctggtaccccaca

SEQ ID NO: 1019822 - DNA, 15 bp, Homo sapiens
gctggtaccccacaa

SEQ ID NO: 1019823 - DNA, 15 bp, Homo sapiens
ctggtaccccacaaa

SEQ ID NO: 1019824 - DNA, 15 bp, Homo sapiens
tggtaccccacaaaa

SEQ ID NO: 1019825 - DNA, 15 bp, Homo sapiens
ggtaccccacaaaaa

SEQ ID NO: 1019826 - DNA, 15 bp, Homo sapiens
gtaccccacaaaaaa

SEQ ID NO: 1019827 - DNA, 15 bp, Homo sapiens
taccccacaaaaaat

SEQ ID NO: 1019828 - DNA, 15 bp, Homo sapiens
accccacaaaaaatg

SEQ ID NO: 1019829 - DNA, 15 bp, Homo sapiens
ccccacaaaaaatgg

SEQ ID NO: 1019830 - DNA, 15 bp, Homo sapiens
cccacaaaaaatggg

SEQ ID NO: 1019831 - DNA, 15 bp, Homo sapiens
ccacaaaaaatgggg

SEQ ID NO: 1019832 - DNA, 15 bp, Homo sapiens
cacaaaaaatggggg

SEQ ID NO: 1019833 - DNA, 15 bp, Homo sapiens
acaaaaaatgggggt

SEQ ID NO: 1019834 - DNA, 15 bp, Homo sapiens
caaaaaatgggggtg

SEQ ID NO: 1019835 - DNA, 15 bp, Homo sapiens
aaaaaatgggggtgg

SEQ ID NO: 1019836 - DNA, 15 bp, Homo sapiens
aaaaatgggggtggg

SEQ ID NO: 1019837 - DNA, 15 bp, Homo sapiens
aaaatgggggtgggg

SEQ ID NO: 1019838 - DNA, 15 bp, Homo sapiens
aaatgggggtggggg

SEQ ID NO: 1019839 - DNA, 15 bp, Homo sapiens
aatgggggtgggggt

SEQ ID NO: 1019840 - DNA, 15 bp, Homo sapiens
atgggggtgggggtg

SEQ ID NO: 1019841 - DNA, 15 bp, Homo sapiens
tgggggtgggggtgt

SEQ ID NO: 1019842 - DNA, 15 bp, Homo sapiens
gggggtgggggtgtc

SEQ ID NO: 1019843 - DNA, 15 bp, Homo sapiens
ggggtgggggtgtcc

SEQ ID NO: 1019844 - DNA, 15 bp, Homo sapiens
gggtgggggtgtcca

SEQ ID NO: 1019845 - DNA, 15 bp, Homo sapiens
ggtgggggtgtccaa

SEQ ID NO: 1019846 - DNA, 15 bp, Homo sapiens
gtgggggtgtccaag

SEQ ID NO: 1019847 - DNA, 15 bp, Homo sapiens
tgggggtgtccaagg

SEQ ID NO: 1019848 - DNA, 15 bp, Homo sapiens
gggggtgtccaaggg

SEQ ID NO: 1019849 - DNA, 15 bp, Homo sapiens
ggggtgtccaaggga

SEQ ID NO: 1019850 - DNA, 15 bp, Homo sapiens
gggtgtccaagggag

SEQ ID NO: 1019851 - DNA, 15 bp, Homo sapiens
ggtgtccaagggagg

SEQ ID NO: 1019852 - DNA, 15 bp, Homo sapiens
gtgtccaagggaggg

SEQ ID NO: 1019853 - DNA, 15 bp, Homo sapiens
tgtccaagggagggg

SEQ ID NO: 1019854 - DNA, 15 bp, Homo sapiens
gtccaagggaggggg

SEQ ID NO: 1019855 - DNA, 15 bp, Homo sapiens
tccaagggagggggg

SEQ ID NO: 1019856 - DNA, 15 bp, Homo sapiens
ccaagggagggggga

SEQ ID NO: 1019857 - DNA, 15 bp, Homo sapiens
caagggaggggggaa

SEQ ID NO: 1019858 - DNA, 15 bp, Homo sapiens
aagggaggggggaaa

SEQ ID NO: 1019859 - DNA, 15 bp, Homo sapiens
agggaggggggaaat

SEQ ID NO: 1019860 - DNA, 15 bp, Homo sapiens
gggaggggggaaatg

SEQ ID NO: 1019861 - DNA, 15 bp, Homo sapiens
ggaggggggaaatgc

SEQ ID NO: 1019862 - DNA, 15 bp, Homo sapiens
gaggggggaaatgct

SEQ ID NO: 1019863 - DNA, 15 bp, Homo sapiens
aggggggaaatgctt

SEQ ID NO: 1019864 - DNA, 15 bp, Homo sapiens
ggggggaaatgcttt

SEQ ID NO: 1019865 - DNA, 15 bp, Homo sapiens
gggggaaatgctttg

SEQ ID NO: 1019866 - DNA, 15 bp, Homo sapiens
ggggaaatgctttgg

SEQ ID NO: 1019867 - DNA, 15 bp, Homo sapiens
gggaaatgctttggg

SEQ ID NO: 1019868 - DNA, 15 bp, Homo sapiens
ggaaatgctttgggt

SEQ ID NO: 1019869 - DNA, 15 bp, Homo sapiens
gaaatgctttgggtc

SEQ ID NO: 1019870 - DNA, 15 bp, Homo sapiens
aaatgctttgggtct

SEQ ID NO: 1019871 - DNA, 15 bp, Homo sapiens
aatgctttgggtctc

SEQ ID NO: 1019872 - DNA, 15 bp, Homo sapiens
atgctttgggtctcg

SEQ ID NO: 1019873 - DNA, 15 bp, Homo sapiens
tgctttgggtctcgt

SEQ ID NO: 1019874 - DNA, 15 bp, Homo sapiens
gctttgggtctcgtc

SEQ ID NO: 1019875 - DNA, 15 bp, Homo sapiens
ctttgggtctcgtct

SEQ ID NO: 1019876 - DNA, 15 bp, Homo sapiens
tttgggtctcgtctc

SEQ ID NO: 1019877 - DNA, 15 bp, Homo sapiens
ttgggtctcgtctct

SEQ ID NO: 1019878 - DNA, 15 bp, Homo sapiens
tgggtctcgtctctg

SEQ ID NO: 1019879 - DNA, 15 bp, Homo sapiens
gggtctcgtctctgc

SEQ ID NO: 1019880 - DNA, 15 bp, Homo sapiens
ggtctcgtctctgcc

SEQ ID NO: 1019881 - DNA, 15 bp, Homo sapiens
gtctcgtctctgcct

SEQ ID NO: 1019882 - DNA, 15 bp, Homo sapiens
tctcgtctctgcctc

SEQ ID NO: 1019883 - DNA, 15 bp, Homo sapiens
ctcgtctctgcctct

SEQ ID NO: 1019884 - DNA, 15 bp, Homo sapiens
tcgtctctgcctctc

SEQ ID NO: 1019885 - DNA, 15 bp, Homo sapiens
cgtctctgcctctct

SEQ ID NO: 1019886 - DNA, 15 bp, Homo sapiens
gtctctgcctctctc

SEQ ID NO: 1019887 - DNA, 15 bp, Homo sapiens
tctctgcctctctct

SEQ ID NO: 1019888 - DNA, 15 bp, Homo sapiens
ctctgcctctctctc

SEQ ID NO: 1019889 - DNA, 15 bp, Homo sapiens
tctgcctctctctct

SEQ ID NO: 1019890 - DNA, 15 bp, Homo sapiens
ctgcctctctctctc

SEQ ID NO: 1019891 - DNA, 15 bp, Homo sapiens
tgcctctctctctct

SEQ ID NO: 1019892 - DNA, 15 bp, Homo sapiens
gcctctctctctctc

SEQ ID NO: 1019893 - DNA, 15 bp, Homo sapiens
cctctctctctctct

SEQ ID NO: 1019894 - DNA, 15 bp, Homo sapiens
ctctctctctctctc

SEQ ID NO: 1019895 - DNA, 15 bp, Homo sapiens
tctctctctctctct

SEQ ID NO: 1019896 - DNA, 15 bp, Homo sapiens
ctctctctctctctt

SEQ ID NO: 1019897 - DNA, 15 bp, Homo sapiens
tctctctctctcttt

SEQ ID NO: 1019898 - DNA, 15 bp, Homo sapiens
ctctctctctctttg

SEQ ID NO: 1019899 - DNA, 15 bp, Homo sapiens
tctctctctctttga

SEQ ID NO: 1019900 - DNA, 15 bp, Homo sapiens
ctctctctctttgag

SEQ ID NO: 1019901 - DNA, 15 bp, Homo sapiens
tctctctctttgaga

SEQ ID NO: 1019902 - DNA, 15 bp, Homo sapiens
ctctctctttgagac

SEQ ID NO: 1019903 - DNA, 15 bp, Homo sapiens
tctctctttgagacc

SEQ ID NO: 1019904 - DNA, 15 bp, Homo sapiens
ctctctttgagacct

SEQ ID NO: 1019905 - DNA, 15 bp, Homo sapiens
tctctttgagaccta

SEQ ID NO: 1019906 - DNA, 15 bp, Homo sapiens
ctctttgagacctaa

SEQ ID NO: 1019907 - DNA, 15 bp, Homo sapiens
tctttgagacctaaa

SEQ ID NO: 1019908 - DNA, 15 bp, Homo sapiens
ctttgagacctaaaa

SEQ ID NO: 1019909 - DNA, 15 bp, Homo sapiens
tttgagacctaaaaa

SEQ ID NO: 1019910 - DNA, 15 bp, Homo sapiens
ttgagacctaaaaat

SEQ ID NO: 1019911 - DNA, 15 bp, Homo sapiens
tgagacctaaaaatc

SEQ ID NO: 1019912 - DNA, 15 bp, Homo sapiens
gagacctaaaaatcc

SEQ ID NO: 1019913 - DNA, 15 bp, Homo sapiens
agacctaaaaatcct

SEQ ID NO: 1019914 - DNA, 15 bp, Homo sapiens
gacctaaaaatcctg

SEQ ID NO: 1019915 - DNA, 15 bp, Homo sapiens
acctaaaaatcctga

SEQ ID NO: 1019916 - DNA, 15 bp, Homo sapiens
cctaaaaatcctgac

SEQ ID NO: 1019917 - DNA, 15 bp, Homo sapiens
ctaaaaatcctgaca

SEQ ID NO: 1019918 - DNA, 15 bp, Homo sapiens
taaaaatcctgacaa

SEQ ID NO: 1019919 - DNA, 15 bp, Homo sapiens
aaaaatcctgacaag

SEQ ID NO: 1019920 - DNA, 15 bp, Homo sapiens
aaaatcctgacaagt

SEQ ID NO: 1019921 - DNA, 15 bp, Homo sapiens
aaatcctgacaagtg

SEQ ID NO: 1019922 - DNA, 15 bp, Homo sapiens
aatcctgacaagtga

SEQ ID NO: 1019923 - DNA, 15 bp, Homo sapiens
atcctgacaagtgaa

SEQ ID NO: 1019924 - DNA, 15 bp, Homo sapiens
tcctgacaagtgaaa

SEQ ID NO: 1019925 - DNA, 15 bp, Homo sapiens
cctgacaagtgaaac

SEQ ID NO: 1019926 - DNA, 15 bp, Homo sapiens
ctgacaagtgaaact

SEQ ID NO: 1019927 - DNA, 15 bp, Homo sapiens
tgacaagtgaaactt

SEQ ID NO: 1019928 - DNA, 15 bp, Homo sapiens
gacaagtgaaactta

SEQ ID NO: 1019929 - DNA, 15 bp, Homo sapiens
acaagtgaaacttaa

SEQ ID NO: 1019930 - DNA, 15 bp, Homo sapiens
caagtgaaacttaaa

SEQ ID NO: 1019931 - DNA, 15 bp, Homo sapiens
aagtgaaacttaaag

SEQ ID NO: 1019932 - DNA, 15 bp, Homo sapiens
agtgaaacttaaagg

SEQ ID NO: 1019933 - DNA, 15 bp, Homo sapiens
gtgaaacttaaaggt

SEQ ID NO: 1019934 - DNA, 15 bp, Homo sapiens
tgaaacttaaaggtg

SEQ ID NO: 1019935 - DNA, 15 bp, Homo sapiens
gaaacttaaaggtgt

SEQ ID NO: 1019936 - DNA, 15 bp, Homo sapiens
aaacttaaaggtgtt

SEQ ID NO: 1019937 - DNA, 15 bp, Homo sapiens
aacttaaaggtgttt

SEQ ID NO: 1019938 - DNA, 15 bp, Homo sapiens
acttaaaggtgttta

SEQ ID NO: 1019939 - DNA, 15 bp, Homo sapiens
cttaaaggtgtttac

SEQ ID NO: 1019940 - DNA, 15 bp, Homo sapiens
ttaaaggtgtttacc

SEQ ID NO: 1019941 - DNA, 15 bp, Homo sapiens
taaaggtgtttacct

SEQ ID NO: 1019942 - DNA, 15 bp, Homo sapiens
aaaggtgtttacctt

SEQ ID NO: 1019943 - DNA, 15 bp, Homo sapiens
aaggtgtttaccttg

SEQ ID NO: 1019944 - DNA, 15 bp, Homo sapiens
aggtgtttaccttgt

SEQ ID NO: 1019945 - DNA, 15 bp, Homo sapiens
ggtgtttaccttgtc

SEQ ID NO: 1019946 - DNA, 15 bp, Homo sapiens
gtgtttaccttgtca

SEQ ID NO: 1019947 - DNA, 15 bp, Homo sapiens
tgtttaccttgtcat

SEQ ID NO: 1019948 - DNA, 15 bp, Homo sapiens
gtttaccttgtcatc

SEQ ID NO: 1019949 - DNA, 15 bp, Homo sapiens
tttaccttgtcatca

SEQ ID NO: 1019950 - DNA, 15 bp, Homo sapiens
ttaccttgtcatcag

SEQ ID NO: 1019951 - DNA, 15 bp, Homo sapiens
taccttgtcatcagc

SEQ ID NO: 1019952 - DNA, 15 bp, Homo sapiens
accttgtcatcagca

SEQ ID NO: 1019953 - DNA, 15 bp, Homo sapiens
ccttgtcatcagcat

SEQ ID NO: 1019954 - DNA, 15 bp, Homo sapiens
cttgtcatcagcatg

SEQ ID NO: 1019955 - DNA, 15 bp, Homo sapiens
ttgtcatcagcatgt

SEQ ID NO: 1019956 - DNA, 15 bp, Homo sapiens
tgtcatcagcatgta

SEQ ID NO: 1019957 - DNA, 15 bp, Homo sapiens
gtcatcagcatgtaa

SEQ ID NO: 1019958 - DNA, 15 bp, Homo sapiens
tcatcagcatgtaag

SEQ ID NO: 1019959 - DNA, 15 bp, Homo sapiens
catcagcatgtaagc

SEQ ID NO: 1019960 - DNA, 15 bp, Homo sapiens
atcagcatgtaagct

SEQ ID NO: 1019961 - DNA, 15 bp, Homo sapiens
tcagcatgtaagcta

SEQ ID NO: 1019962 - DNA, 15 bp, Homo sapiens
cagcatgtaagctaa

SEQ ID NO: 1019963 - DNA, 15 bp, Homo sapiens
agcatgtaagctaat

SEQ ID NO: 1019964 - DNA, 15 bp, Homo sapiens
gcatgtaagctaatt

SEQ ID NO: 1019965 - DNA, 15 bp, Homo sapiens
catgtaagctaatta

SEQ ID NO: 1019966 - DNA, 15 bp, Homo sapiens
atgtaagctaattat

SEQ ID NO: 1019967 - DNA, 15 bp, Homo sapiens
tgtaagctaattatc

SEQ ID NO: 1019968 - DNA, 15 bp, Homo sapiens
gtaagctaattatct

SEQ ID NO: 1019969 - DNA, 15 bp, Homo sapiens
taagctaattatctc

SEQ ID NO: 1019970 - DNA, 15 bp, Homo sapiens
aagctaattatctcg

SEQ ID NO: 1019971 - DNA, 15 bp, Homo sapiens
agctaattatctcgg

SEQ ID NO: 1019972 - DNA, 15 bp, Homo sapiens
gctaattatctcggg

SEQ ID NO: 1019973 - DNA, 15 bp, Homo sapiens
ctaattatctcgggc

SEQ ID NO: 1019974 - DNA, 15 bp, Homo sapiens
taattatctcgggca

SEQ ID NO: 1019975 - DNA, 15 bp, Homo sapiens
aattatctcgggcaa

SEQ ID NO: 1019976 - DNA, 15 bp, Homo sapiens
attatctcgggcaag

SEQ ID NO: 1019977 - DNA, 15 bp, Homo sapiens
ttatctcgggcaaga

SEQ ID NO: 1019978 - DNA, 15 bp, Homo sapiens
tatctcgggcaagat

SEQ ID NO: 1019979 - DNA, 15 bp, Homo sapiens
atctcgggcaagatg

SEQ ID NO: 1019980 - DNA, 15 bp, Homo sapiens
tctcgggcaagatgt

SEQ ID NO: 1019981 - DNA, 15 bp, Homo sapiens
ctcgggcaagatgta

SEQ ID NO: 1019982 - DNA, 15 bp, Homo sapiens
tcgggcaagatgtag

SEQ ID NO: 1019983 - DNA, 15 bp, Homo sapiens
cgggcaagatgtagg

SEQ ID NO: 1019984 - DNA, 15 bp, Homo sapiens
gggcaagatgtaggc

SEQ ID NO: 1019985 - DNA, 15 bp, Homo sapiens
ggcaagatgtaggct

SEQ ID NO: 1019986 - DNA, 15 bp, Homo sapiens
gcaagatgtaggctt

SEQ ID NO: 1019987 - DNA, 15 bp, Homo sapiens
caagatgtaggcttc

SEQ ID NO: 1019988 - DNA, 15 bp, Homo sapiens
aagatgtaggcttct

SEQ ID NO: 1019989 - DNA, 15 bp, Homo sapiens
agatgtaggcttcta

SEQ ID NO: 1019990 - DNA, 15 bp, Homo sapiens
gatgtaggcttctat

SEQ ID NO: 1019991 - DNA, 15 bp, Homo sapiens
atgtaggcttctatt

SEQ ID NO: 1019992 - DNA, 15 bp, Homo sapiens
tgtaggcttctattg

SEQ ID NO: 1019993 - DNA, 15 bp, Homo sapiens
gtaggcttctattgt

SEQ ID NO: 1019994 - DNA, 15 bp, Homo sapiens
taggcttctattgtc

SEQ ID NO: 1019995 - DNA, 15 bp, Homo sapiens
aggcttctattgtct

SEQ ID NO: 1019996 - DNA, 15 bp, Homo sapiens
ggcttctattgtctt

SEQ ID NO: 1019997 - DNA, 15 bp, Homo sapiens
gcttctattgtcttg

SEQ ID NO: 1019998 - DNA, 15 bp, Homo sapiens
cttctattgtcttgt

SEQ ID NO: 1019999 - DNA, 15 bp, Homo sapiens
ttctattgtcttgtt

SEQ ID NO: 1020000 - DNA, 15 bp, Homo sapiens
tctattgtcttgttg

SEQ ID NO: 1020001 - DNA, 15 bp, Homo sapiens
ctattgtcttgttgc

SEQ ID NO: 1020002 - DNA, 15 bp, Homo sapiens
tattgtcttgttgct

SEQ ID NO: 1020003 - DNA, 15 bp, Homo sapiens
attgtcttgttgctt

SEQ ID NO: 1020004 - DNA, 15 bp, Homo sapiens
ttgtcttgttgcttt

SEQ ID NO: 1020005 - DNA, 15 bp, Homo sapiens
tgtcttgttgcttta

SEQ ID NO: 1020006 - DNA, 15 bp, Homo sapiens
gtcttgttgctttag

SEQ ID NO: 1020007 - DNA, 15 bp, Homo sapiens
tcttgttgctttagc

SEQ ID NO: 1020008 - DNA, 15 bp, Homo sapiens
cttgttgctttagcg

SEQ ID NO: 1020009 - DNA, 15 bp, Homo sapiens
ttgttgctttagcgc

SEQ ID NO: 1020010 - DNA, 15 bp, Homo sapiens
tgttgctttagcgct

SEQ ID NO: 1020011 - DNA, 15 bp, Homo sapiens
gttgctttagcgctt

SEQ ID NO: 1020012 - DNA, 15 bp, Homo sapiens
ttgctttagcgctta

SEQ ID NO: 1020013 - DNA, 15 bp, Homo sapiens
tgctttagcgcttac

SEQ ID NO: 1020014 - DNA, 15 bp, Homo sapiens
gctttagcgcttacg

SEQ ID NO: 1020015 - DNA, 15 bp, Homo sapiens
ctttagcgcttacgc

SEQ ID NO: 1020016 - DNA, 15 bp, Homo sapiens
tttagcgcttacgcc

SEQ ID NO: 1020017 - DNA, 15 bp, Homo sapiens
ttagcgcttacgccc

SEQ ID NO: 1020018 - DNA, 15 bp, Homo sapiens
tagcgcttacgcccc

SEQ ID NO: 1020019 - DNA, 15 bp, Homo sapiens
agcgcttacgccccg

SEQ ID NO: 1020020 - DNA, 15 bp, Homo sapiens
gcgcttacgccccgc

SEQ ID NO: 1020021 - DNA, 15 bp, Homo sapiens
cgcttacgccccgcc

SEQ ID NO: 1020022 - DNA, 15 bp, Homo sapiens
gcttacgccccgcct

SEQ ID NO: 1020023 - DNA, 15 bp, Homo sapiens
cttacgccccgcctc

SEQ ID NO: 1020024 - DNA, 15 bp, Homo sapiens
ttacgccccgcctct

SEQ ID NO: 1020025 - DNA, 15 bp, Homo sapiens
tacgccccgcctctg

SEQ ID NO: 1020026 - DNA, 15 bp, Homo sapiens
acgccccgcctctgg

SEQ ID NO: 1020027 - DNA, 15 bp, Homo sapiens
cgccccgcctctggt

SEQ ID NO: 1020028 - DNA, 15 bp, Homo sapiens
gccccgcctctggtg

SEQ ID NO: 1020029 - DNA, 15 bp, Homo sapiens
ccccgcctctggtgg

SEQ ID NO: 1020030 - DNA, 15 bp, Homo sapiens
cccgcctctggtggc

SEQ ID NO: 1020031 - DNA, 15 bp, Homo sapiens
ccgcctctggtggct

SEQ ID NO: 1020032 - DNA, 15 bp, Homo sapiens
cgcctctggtggctg

SEQ ID NO: 1020033 - DNA, 15 bp, Homo sapiens
gcctctggtggctgc

SEQ ID NO: 1020034 - DNA, 15 bp, Homo sapiens
cctctggtggctgcc

SEQ ID NO: 1020035 - DNA, 15 bp, Homo sapiens
ctctggtggctgcct

SEQ ID NO: 1020036 - DNA, 15 bp, Homo sapiens
tctggtggctgccta

SEQ ID NO: 1020037 - DNA, 15 bp, Homo sapiens
ctggtggctgcctaa

SEQ ID NO: 1020038 - DNA, 15 bp, Homo sapiens
tggtggctgcctaaa

SEQ ID NO: 1020039 - DNA, 15 bp, Homo sapiens
ggtggctgcctaaaa

SEQ ID NO: 1020040 - DNA, 15 bp, Homo sapiens
gtggctgcctaaaac

SEQ ID NO: 1020041 - DNA, 15 bp, Homo sapiens
tggctgcctaaaacc

SEQ ID NO: 1020042 - DNA, 15 bp, Homo sapiens
ggctgcctaaaacct

SEQ ID NO: 1020043 - DNA, 15 bp, Homo sapiens
gctgcctaaaacctg

SEQ ID NO: 1020044 - DNA, 15 bp, Homo sapiens
ctgcctaaaacctgg

SEQ ID NO: 1020045 - DNA, 15 bp, Homo sapiens
tgcctaaaacctggc

SEQ ID NO: 1020046 - DNA, 15 bp, Homo sapiens
gcctaaaacctggcg

SEQ ID NO: 1020047 - DNA, 15 bp, Homo sapiens
cctaaaacctggcgc

SEQ ID NO: 1020048 - DNA, 15 bp, Homo sapiens
ctaaaacctggcgcc

SEQ ID NO: 1020049 - DNA, 15 bp, Homo sapiens
taaaacctggcgccg

SEQ ID NO: 1020050 - DNA, 15 bp, Homo sapiens
aaaacctggcgccgg

SEQ ID NO: 1020051 - DNA, 15 bp, Homo sapiens
aaacctggcgccggg

SEQ ID NO: 1020052 - DNA, 15 bp, Homo sapiens
aacctggcgccgggc

SEQ ID NO: 1020053 - DNA, 15 bp, Homo sapiens
acctggcgccgggct

SEQ ID NO: 1020054 - DNA, 15 bp, Homo sapiens
cctggcgccgggcta

SEQ ID NO: 1020055 - DNA, 15 bp, Homo sapiens
ctggcgccgggctaa

SEQ ID NO: 1020056 - DNA, 15 bp, Homo sapiens
tggcgccgggctaaa

SEQ ID NO: 1020057 - DNA, 15 bp, Homo sapiens
ggcgccgggctaaaa

SEQ ID NO: 1020058 - DNA, 15 bp, Homo sapiens
gcgccgggctaaaac

SEQ ID NO: 1020059 - DNA, 15 bp, Homo sapiens
cgccgggctaaaaca

SEQ ID NO: 1020060 - DNA, 15 bp, Homo sapiens
gccgggctaaaacaa

SEQ ID NO: 1020061 - DNA, 15 bp, Homo sapiens
ccgggctaaaacaaa

SEQ ID NO: 1020062 - DNA, 15 bp, Homo sapiens
cgggctaaaacaaac

SEQ ID NO: 1020063 - DNA, 15 bp, Homo sapiens
gggctaaaacaaacg

SEQ ID NO: 1020064 - DNA, 15 bp, Homo sapiens
ggctaaaacaaacgc

SEQ ID NO: 1020065 - DNA, 15 bp, Homo sapiens
gctaaaacaaacgcg

SEQ ID NO: 1020066 - DNA, 15 bp, Homo sapiens
ctaaaacaaacgcga

SEQ ID NO: 1020067 - DNA, 15 bp, Homo sapiens
taaaacaaacgcgag

SEQ ID NO: 1020068 - DNA, 15 bp, Homo sapiens
aaaacaaacgcgagg

SEQ ID NO: 1020069 - DNA, 15 bp, Homo sapiens
aaacaaacgcgaggc

SEQ ID NO: 1020070 - DNA, 15 bp, Homo sapiens
aacaaacgcgaggca

SEQ ID NO: 1020071 - DNA, 15 bp, Homo sapiens
acaaacgcgaggcag

SEQ ID NO: 1020072 - DNA, 15 bp, Homo sapiens
caaacgcgaggcagc

SEQ ID NO: 1020073 - DNA, 15 bp, Homo sapiens
aaacgcgaggcagcc

SEQ ID NO: 1020074 - DNA, 15 bp, Homo sapiens
aacgcgaggcagccc

SEQ ID NO: 1020075 - DNA, 15 bp, Homo sapiens
acgcgaggcagcccc

SEQ ID NO: 1020076 - DNA, 15 bp, Homo sapiens
cgcgaggcagccccc

SEQ ID NO: 1020077 - DNA, 15 bp, Homo sapiens
gcgaggcagcccccg

SEQ ID NO: 1020078 - DNA, 15 bp, Homo sapiens
cgaggcagcccccga

SEQ ID NO: 1020079 - DNA, 15 bp, Homo sapiens
gaggcagcccccgag

SEQ ID NO: 1020080 - DNA, 15 bp, Homo sapiens
aggcagcccccgagc

SEQ ID NO: 1020081 - DNA, 15 bp, Homo sapiens
ggcagcccccgagcc

SEQ ID NO: 1020082 - DNA, 15 bp, Homo sapiens
gcagcccccgagcct

SEQ ID NO: 1020083 - DNA, 15 bp, Homo sapiens
cagcccccgagcctc

SEQ ID NO: 1020084 - DNA, 15 bp, Homo sapiens
agcccccgagcctcc

SEQ ID NO: 1020085 - DNA, 15 bp, Homo sapiens
gcccccgagcctcca

SEQ ID NO: 1020086 - DNA, 15 bp, Homo sapiens
cccccgagcctccac

SEQ ID NO: 1020087 - DNA, 15 bp, Homo sapiens
ccccgagcctccact

SEQ ID NO: 1020088 - DNA, 15 bp, Homo sapiens
cccgagcctccactc

SEQ ID NO: 1020089 - DNA, 15 bp, Homo sapiens
ccgagcctccactca

SEQ ID NO: 1020090 - DNA, 15 bp, Homo sapiens
cgagcctccactcaa

SEQ ID NO: 1020091 - DNA, 15 bp, Homo sapiens
gagcctccactcaag

SEQ ID NO: 1020092 - DNA, 15 bp, Homo sapiens
agcctccactcaagc

SEQ ID NO: 1020093 - DNA, 15 bp, Homo sapiens
gcctccactcaagcc

SEQ ID NO: 1020094 - DNA, 15 bp, Homo sapiens
cctccactcaagcca

SEQ ID NO: 1020095 - DNA, 15 bp, Homo sapiens
ctccactcaagccaa

SEQ ID NO: 1020096 - DNA, 15 bp, Homo sapiens
tccactcaagccaat

SEQ ID NO: 1020097 - DNA, 15 bp, Homo sapiens
ccactcaagccaatt

SEQ ID NO: 1020098 - DNA, 15 bp, Homo sapiens
cactcaagccaatta

SEQ ID NO: 1020099 - DNA, 15 bp, Homo sapiens
actcaagccaattaa

SEQ ID NO: 1020100 - DNA, 15 bp, Homo sapiens
ctcaagccaattaag

SEQ ID NO: 1020101 - DNA, 15 bp, Homo sapiens
tcaagccaattaagg

SEQ ID NO: 1020102 - DNA, 15 bp, Homo sapiens
caagccaattaagga

SEQ ID NO: 1020103 - DNA, 15 bp, Homo sapiens
aagccaattaaggag

SEQ ID NO: 1020104 - DNA, 15 bp, Homo sapiens
agccaattaaggagg

SEQ ID NO: 1020105 - DNA, 15 bp, Homo sapiens
gccaattaaggagga

SEQ ID NO: 1020106 - DNA, 15 bp, Homo sapiens
ccaattaaggaggac

SEQ ID NO: 1020107 - DNA, 15 bp, Homo sapiens
caattaaggaggact

SEQ ID NO: 1020108 - DNA, 15 bp, Homo sapiens
aattaaggaggactc

SEQ ID NO: 1020109 - DNA, 15 bp, Homo sapiens
attaaggaggactcg

SEQ ID NO: 1020110 - DNA, 15 bp, Homo sapiens
ttaaggaggactcgg

SEQ ID NO: 1020111 - DNA, 15 bp, Homo sapiens
taaggaggactcggt

SEQ ID NO: 1020112 - DNA, 15 bp, Homo sapiens
aaggaggactcggtc

SEQ ID NO: 1020113 - DNA, 15 bp, Homo sapiens
aggaggactcggtcc

SEQ ID NO: 1020114 - DNA, 15 bp, Homo sapiens
ggaggactcggtcca

SEQ ID NO: 1020115 - DNA, 15 bp, Homo sapiens
gaggactcggtccac

SEQ ID NO: 1020116 - DNA, 15 bp, Homo sapiens
aggactcggtccact

SEQ ID NO: 1020117 - DNA, 15 bp, Homo sapiens
ggactcggtccactc

SEQ ID NO: 1020118 - DNA, 15 bp, Homo sapiens
gactcggtccactcc

SEQ ID NO: 1020119 - DNA, 15 bp, Homo sapiens
actcggtccactccg

SEQ ID NO: 1020120 - DNA, 15 bp, Homo sapiens
ctcggtccactccgt

SEQ ID NO: 1020121 - DNA, 15 bp, Homo sapiens
tcggtccactccgtt

SEQ ID NO: 1020122 - DNA, 15 bp, Homo sapiens
cggtccactccgtta

SEQ ID NO: 1020123 - DNA, 15 bp, Homo sapiens
ggtccactccgttac

SEQ ID NO: 1020124 - DNA, 15 bp, Homo sapiens
gtccactccgttacg

SEQ ID NO: 1020125 - DNA, 15 bp, Homo sapiens
tccactccgttacgt

SEQ ID NO: 1020126 - DNA, 15 bp, Homo sapiens
ccactccgttacgtg

SEQ ID NO: 1020127 - DNA, 15 bp, Homo sapiens
cactccgttacgtgt

SEQ ID NO: 1020128 - DNA, 15 bp, Homo sapiens
actccgttacgtgta

SEQ ID NO: 1020129 - DNA, 15 bp, Homo sapiens
ctccgttacgtgtac

SEQ ID NO: 1020130 - DNA, 15 bp, Homo sapiens
tccgttacgtgtaca

SEQ ID NO: 1020131 - DNA, 15 bp, Homo sapiens
ccgttacgtgtacat

SEQ ID NO: 1020132 - DNA, 15 bp, Homo sapiens
cgttacgtgtacatc

SEQ ID NO: 1020133 - DNA, 15 bp, Homo sapiens
gttacgtgtacatcc

SEQ ID NO: 1020134 - DNA, 15 bp, Homo sapiens
ttacgtgtacatcca

SEQ ID NO: 1020135 - DNA, 15 bp, Homo sapiens
tacgtgtacatccaa

SEQ ID NO: 1020136 - DNA, 15 bp, Homo sapiens
acgtgtacatccaac

SEQ ID NO: 1020137 - DNA, 15 bp, Homo sapiens
cgtgtacatccaaca

SEQ ID NO: 1020138 - DNA, 15 bp, Homo sapiens
gtgtacatccaacaa

SEQ ID NO: 1020139 - DNA, 15 bp, Homo sapiens
tgtacatccaacaag

SEQ ID NO: 1020140 - DNA, 15 bp, Homo sapiens
gtacatccaacaaga

SEQ ID NO: 1020141 - DNA, 15 bp, Homo sapiens
tacatccaacaagat

SEQ ID NO: 1020142 - DNA, 15 bp, Homo sapiens
acatccaacaagatc

SEQ ID NO: 1020143 - DNA, 15 bp, Homo sapiens
catccaacaagatcg

SEQ ID NO: 1020144 - DNA, 15 bp, Homo sapiens
atccaacaagatcgg

SEQ ID NO: 1020145 - DNA, 15 bp, Homo sapiens
tccaacaagatcggc

SEQ ID NO: 1020146 - DNA, 15 bp, Homo sapiens
ccaacaagatcggcg

SEQ ID NO: 1020147 - DNA, 15 bp, Homo sapiens
caacaagatcggcgt

SEQ ID NO: 1020148 - DNA, 15 bp, Homo sapiens
aacaagatcggcgtt

SEQ ID NO: 1020149 - DNA, 15 bp, Homo sapiens
acaagatcggcgtta

SEQ ID NO: 1020150 - DNA, 15 bp, Homo sapiens
caagatcggcgttaa

SEQ ID NO: 1020151 - DNA, 15 bp, Homo sapiens
aagatcggcgttaag

SEQ ID NO: 1020152 - DNA, 15 bp, Homo sapiens
agatcggcgttaagg

SEQ ID NO: 1020153 - DNA, 15 bp, Homo sapiens
gatcggcgttaaggt

SEQ ID NO: 1020154 - DNA, 15 bp, Homo sapiens
atcggcgttaaggta

SEQ ID NO: 1020155 - DNA, 15 bp, Homo sapiens
tcggcgttaaggtaa

SEQ ID NO: 1020156 - DNA, 15 bp, Homo sapiens
cggcgttaaggtaac

SEQ ID NO: 1020157 - DNA, 15 bp, Homo sapiens
ggcgttaaggtaaca

SEQ ID NO: 1020158 - DNA, 15 bp, Homo sapiens
gcgttaaggtaacac

SEQ ID NO: 1020159 - DNA, 15 bp, Homo sapiens
cgttaaggtaacacc

SEQ ID NO: 1020160 - DNA, 15 bp, Homo sapiens
gttaaggtaacacca

SEQ ID NO: 1020161 - DNA, 15 bp, Homo sapiens
ttaaggtaacaccag

SEQ ID NO: 1020162 - DNA, 15 bp, Homo sapiens
taaggtaacaccaga

SEQ ID NO: 1020163 - DNA, 15 bp, Homo sapiens
aaggtaacaccagaa

SEQ ID NO: 1020164 - DNA, 15 bp, Homo sapiens
aggtaacaccagaat

SEQ ID NO: 1020165 - DNA, 15 bp, Homo sapiens
ggtaacaccagaata

SEQ ID NO: 1020166 - DNA, 15 bp, Homo sapiens
gtaacaccagaatat

SEQ ID NO: 1020167 - DNA, 15 bp, Homo sapiens
taacaccagaatatt

SEQ ID NO: 1020168 - DNA, 15 bp, Homo sapiens
aacaccagaatattt

SEQ ID NO: 1020169 - DNA, 15 bp, Homo sapiens
acaccagaatatttg

SEQ ID NO: 1020170 - DNA, 15 bp, Homo sapiens
caccagaatatttgg

SEQ ID NO: 1020171 - DNA, 15 bp, Homo sapiens
accagaatatttggc

SEQ ID NO: 1020172 - DNA, 15 bp, Homo sapiens
ccagaatatttggca

SEQ ID NO: 1020173 - DNA, 15 bp, Homo sapiens
cagaatatttggcaa

SEQ ID NO: 1020174 - DNA, 15 bp, Homo sapiens
agaatatttggcaaa

SEQ ID NO: 1020175 - DNA, 15 bp, Homo sapiens
gaatatttggcaaag

SEQ ID NO: 1020176 - DNA, 15 bp, Homo sapiens
aatatttggcaaagg

SEQ ID NO: 1020177 - DNA, 15 bp, Homo sapiens
atatttggcaaaggg

SEQ ID NO: 1020178 - DNA, 15 bp, Homo sapiens
tatttggcaaaggga

SEQ ID NO: 1020179 - DNA, 15 bp, Homo sapiens
atttggcaaagggag

SEQ ID NO: 1020180 - DNA, 15 bp, Homo sapiens
tttggcaaagggaga

SEQ ID NO: 1020181 - DNA, 15 bp, Homo sapiens
ttggcaaagggagaa

SEQ ID NO: 1020182 - DNA, 15 bp, Homo sapiens
tggcaaagggagaaa

SEQ ID NO: 1020183 - DNA, 15 bp, Homo sapiens
ggcaaagggagaaaa

SEQ ID NO: 1020184 - DNA, 15 bp, Homo sapiens
gcaaagggagaaaaa

SEQ ID NO: 1020185 - DNA, 15 bp, Homo sapiens
caaagggagaaaaaa

SEQ ID NO: 1020186 - DNA, 15 bp, Homo sapiens
aaagggagaaaaaaa

SEQ ID NO: 1020187 - DNA, 15 bp, Homo sapiens
aagggagaaaaaaaa

SEQ ID NO: 1020188 - DNA, 15 bp, Homo sapiens
agggagaaaaaaaaa

SEQ ID NO: 1020189 - DNA, 15 bp, Homo sapiens
gggagaaaaaaaaag

SEQ ID NO: 1020190 - DNA, 15 bp, Homo sapiens
ggagaaaaaaaaagc

SEQ ID NO: 1020191 - DNA, 15 bp, Homo sapiens
gagaaaaaaaaagca

SEQ ID NO: 1020192 - DNA, 15 bp, Homo sapiens
agaaaaaaaaagcag

SEQ ID NO: 1020193 - DNA, 15 bp, Homo sapiens
gaaaaaaaaagcagc

SEQ ID NO: 1020194 - DNA, 15 bp, Homo sapiens
aaaaaaaaagcagcg

SEQ ID NO: 1020195 - DNA, 15 bp, Homo sapiens
aaaaaaaagcagcga

SEQ ID NO: 1020196 - DNA, 15 bp, Homo sapiens
aaaaaaagcagcgag

SEQ ID NO: 1020197 - DNA, 15 bp, Homo sapiens
aaaaaagcagcgagg

SEQ ID NO: 1020198 - DNA, 15 bp, Homo sapiens
aaaaagcagcgaggc

SEQ ID NO: 1020199 - DNA, 15 bp, Homo sapiens
aaaagcagcgaggct

SEQ ID NO: 1020200 - DNA, 15 bp, Homo sapiens
aaagcagcgaggctt

SEQ ID NO: 1020201 - DNA, 15 bp, Homo sapiens
aagcagcgaggcttc

SEQ ID NO: 1020202 - DNA, 15 bp, Homo sapiens
agcagcgaggcttcg

SEQ ID NO: 1020203 - DNA, 15 bp, Homo sapiens
gcagcgaggcttcgc

SEQ ID NO: 1020204 - DNA, 15 bp, Homo sapiens
cagcgaggcttcgcc

SEQ ID NO: 1020205 - DNA, 15 bp, Homo sapiens
agcgaggcttcgcct

SEQ ID NO: 1020206 - DNA, 15 bp, Homo sapiens
gcgaggcttcgcctt

SEQ ID NO: 1020207 - DNA, 15 bp, Homo sapiens
cgaggcttcgccttc

SEQ ID NO: 1020208 - DNA, 15 bp, Homo sapiens
gaggcttcgccttcc

SEQ ID NO: 1020209 - DNA, 15 bp, Homo sapiens
aggcttcgccttccc

SEQ ID NO: 1020210 - DNA, 15 bp, Homo sapiens
ggcttcgccttcccc

SEQ ID NO: 1020211 - DNA, 15 bp, Homo sapiens
gcttcgccttccccc

SEQ ID NO: 1020212 - DNA, 15 bp, Homo sapiens
cttcgccttccccct

SEQ ID NO: 1020213 - DNA, 15 bp, Homo sapiens
ttcgccttccccctc

SEQ ID NO: 1020214 - DNA, 15 bp, Homo sapiens
tcgccttccccctct

SEQ ID NO: 1020215 - DNA, 15 bp, Homo sapiens
cgccttccccctctc

SEQ ID NO: 1020216 - DNA, 15 bp, Homo sapiens
gccttccccctctcc

SEQ ID NO: 1020217 - DNA, 15 bp, Homo sapiens
ccttccccctctccc

SEQ ID NO: 1020218 - DNA, 15 bp, Homo sapiens
cttccccctctccct

SEQ ID NO: 1020219 - DNA, 15 bp, Homo sapiens
ttccccctctccctt

SEQ ID NO: 1020220 - DNA, 15 bp, Homo sapiens
tccccctctcccttt

SEQ ID NO: 1020221 - DNA, 15 bp, Homo sapiens
ccccctctccctttt

SEQ ID NO: 1020222 - DNA, 15 bp, Homo sapiens
cccctctcccttttt

SEQ ID NO: 1020223 - DNA, 15 bp, Homo sapiens
ccctctccctttttt

SEQ ID NO: 1020224 - DNA, 15 bp, Homo sapiens
cctctcccttttttt

SEQ ID NO: 1020225 - DNA, 15 bp, Homo sapiens
ctctccctttttttt

SEQ ID NO: 1020226 - DNA, 15 bp, Homo sapiens
tctcccttttttttc

SEQ ID NO: 1020227 - DNA, 15 bp, Homo sapiens
ctcccttttttttcc

SEQ ID NO: 1020228 - DNA, 15 bp, Homo sapiens
tcccttttttttcct

SEQ ID NO: 1020229 - DNA, 15 bp, Homo sapiens
cccttttttttcctc

SEQ ID NO: 1020230 - DNA, 15 bp, Homo sapiens
ccttttttttcctcc

SEQ ID NO: 1020231 - DNA, 15 bp, Homo sapiens
cttttttttcctcct

SEQ ID NO: 1020232 - DNA, 15 bp, Homo sapiens
ttttttttcctcctc

SEQ ID NO: 1020233 - DNA, 15 bp, Homo sapiens
tttttttcctcctct

SEQ ID NO: 1020234 - DNA, 15 bp, Homo sapiens
ttttttcctcctctt

SEQ ID NO: 1020235 - DNA, 15 bp, Homo sapiens
tttttcctcctcttc

SEQ ID NO: 1020236 - DNA, 15 bp, Homo sapiens
ttttcctcctcttcc

SEQ ID NO: 1020237 - DNA, 15 bp, Homo sapiens
tttcctcctcttcct

SEQ ID NO: 1020238 - DNA, 15 bp, Homo sapiens
ttcctcctcttcctt

SEQ ID NO: 1020239 - DNA, 15 bp, Homo sapiens
tcctcctcttccttc

SEQ ID NO: 1020240 - DNA, 15 bp, Homo sapiens
cctcctcttccttcc

SEQ ID NO: 1020241 - DNA, 15 bp, Homo sapiens
ctcctcttccttcct

SEQ ID NO: 1020242 - DNA, 15 bp, Homo sapiens
tcctcttccttcctc

SEQ ID NO: 1020243 - DNA, 15 bp, Homo sapiens
cctcttccttcctcc

SEQ ID NO: 1020244 - DNA, 15 bp, Homo sapiens
ctcttccttcctcct

SEQ ID NO: 1020245 - DNA, 15 bp, Homo sapiens
tcttccttcctcctc

SEQ ID NO: 1020246 - DNA, 15 bp, Homo sapiens
cttccttcctcctcc

SEQ ID NO: 1020247 - DNA, 15 bp, Homo sapiens
ttccttcctcctcca

SEQ ID NO: 1020248 - DNA, 15 bp, Homo sapiens
tccttcctcctccag

SEQ ID NO: 1020249 - DNA, 15 bp, Homo sapiens
ccttcctcctccagc

SEQ ID NO: 1020250 - DNA, 15 bp, Homo sapiens
cttcctcctccagcc

SEQ ID NO: 1020251 - DNA, 15 bp, Homo sapiens
ttcctcctccagccg

SEQ ID NO: 1020252 - DNA, 15 bp, Homo sapiens
tcctcctccagccgc

SEQ ID NO: 1020253 - DNA, 15 bp, Homo sapiens
cctcctccagccgcc

SEQ ID NO: 1020254 - DNA, 15 bp, Homo sapiens
ctcctccagccgccg

SEQ ID NO: 1020255 - DNA, 15 bp, Homo sapiens
tcctccagccgccgc

SEQ ID NO: 1020256 - DNA, 15 bp, Homo sapiens
cctccagccgccgcc

SEQ ID NO: 1020257 - DNA, 15 bp, Homo sapiens
ctccagccgccgccg

SEQ ID NO: 1020258 - DNA, 15 bp, Homo sapiens
tccagccgccgccga

SEQ ID NO: 1020259 - DNA, 15 bp, Homo sapiens
ccagccgccgccgaa

SEQ ID NO: 1020260 - DNA, 15 bp, Homo sapiens
cagccgccgccgaat

SEQ ID NO: 1020261 - DNA, 15 bp, Homo sapiens
agccgccgccgaatc

SEQ ID NO: 1020262 - DNA, 15 bp, Homo sapiens
gccgccgccgaatca

SEQ ID NO: 1020263 - DNA, 15 bp, Homo sapiens
ccgccgccgaatcat

SEQ ID NO: 1020264 - DNA, 15 bp, Homo sapiens
cgccgccgaatcatg

SEQ ID NO: 1020265 - DNA, 15 bp, Homo sapiens
gccgccgaatcatgt

SEQ ID NO: 1020266 - DNA, 15 bp, Homo sapiens
ccgccgaatcatgtc

SEQ ID NO: 1020267 - DNA, 15 bp, Homo sapiens
cgccgaatcatgtcg

SEQ ID NO: 1020268 - DNA, 15 bp, Homo sapiens
gccgaatcatgtcga

SEQ ID NO: 1020269 - DNA, 15 bp, Homo sapiens
ccgaatcatgtcgat

SEQ ID NO: 1020270 - DNA, 15 bp, Homo sapiens
cgaatcatgtcgatg

SEQ ID NO: 1020271 - DNA, 15 bp, Homo sapiens
gaatcatgtcgatga

SEQ ID NO: 1020272 - DNA, 15 bp, Homo sapiens
aatcatgtcgatgag

SEQ ID NO: 1020273 - DNA, 15 bp, Homo sapiens
atcatgtcgatgagt

SEQ ID NO: 1020274 - DNA, 15 bp, Homo sapiens
tcatgtcgatgagtc

SEQ ID NO: 1020275 - DNA, 15 bp, Homo sapiens
catgtcgatgagtcc

SEQ ID NO: 1020276 - DNA, 15 bp, Homo sapiens
atgtcgatgagtcca

SEQ ID NO: 1020277 - DNA, 15 bp, Homo sapiens
tgtcgatgagtccaa

SEQ ID NO: 1020278 - DNA, 15 bp, Homo sapiens
gtcgatgagtccaaa

SEQ ID NO: 1020279 - DNA, 15 bp, Homo sapiens
tcgatgagtccaaag

SEQ ID NO: 1020280 - DNA, 15 bp, Homo sapiens
cgatgagtccaaagc

SEQ ID NO: 1020281 - DNA, 15 bp, Homo sapiens
gatgagtccaaagca

SEQ ID NO: 1020282 - DNA, 15 bp, Homo sapiens
atgagtccaaagcac

SEQ ID NO: 1020283 - DNA, 15 bp, Homo sapiens
tgagtccaaagcaca

SEQ ID NO: 1020284 - DNA, 15 bp, Homo sapiens
gagtccaaagcacac

SEQ ID NO: 1020285 - DNA, 15 bp, Homo sapiens
agtccaaagcacacg

SEQ ID NO: 1020286 - DNA, 15 bp, Homo sapiens
gtccaaagcacacga

SEQ ID NO: 1020287 - DNA, 15 bp, Homo sapiens
tccaaagcacacgac

SEQ ID NO: 1020288 - DNA, 15 bp, Homo sapiens
ccaaagcacacgact

SEQ ID NO: 1020289 - DNA, 15 bp, Homo sapiens
caaagcacacgactc

SEQ ID NO: 1020290 - DNA, 15 bp, Homo sapiens
aaagcacacgactcc

SEQ ID NO: 1020291 - DNA, 15 bp, Homo sapiens
aagcacacgactccg

SEQ ID NO: 1020292 - DNA, 15 bp, Homo sapiens
agcacacgactccgt

SEQ ID NO: 1020293 - DNA, 15 bp, Homo sapiens
gcacacgactccgtt

SEQ ID NO: 1020294 - DNA, 15 bp, Homo sapiens
cacacgactccgttc

SEQ ID NO: 1020295 - DNA, 15 bp, Homo sapiens
acacgactccgttct

SEQ ID NO: 1020296 - DNA, 15 bp, Homo sapiens
cacgactccgttctc

SEQ ID NO: 1020297 - DNA, 15 bp, Homo sapiens
acgactccgttctca

SEQ ID NO: 1020298 - DNA, 15 bp, Homo sapiens
cgactccgttctcag

SEQ ID NO: 1020299 - DNA, 15 bp, Homo sapiens
gactccgttctcagt

SEQ ID NO: 1020300 - DNA, 15 bp, Homo sapiens
actccgttctcagtg

SEQ ID NO: 1020301 - DNA, 15 bp, Homo sapiens
ctccgttctcagtgt

SEQ ID NO: 1020302 - DNA, 15 bp, Homo sapiens
tccgttctcagtgtc

SEQ ID NO: 1020303 - DNA, 15 bp, Homo sapiens
ccgttctcagtgtct

SEQ ID NO: 1020304 - DNA, 15 bp, Homo sapiens
cgttctcagtgtctg

SEQ ID NO: 1020305 - DNA, 15 bp, Homo sapiens
gttctcagtgtctga

SEQ ID NO: 1020306 - DNA, 15 bp, Homo sapiens
ttctcagtgtctgac

SEQ ID NO: 1020307 - DNA, 15 bp, Homo sapiens
tctcagtgtctgaca

SEQ ID NO: 1020308 - DNA, 15 bp, Homo sapiens
ctcagtgtctgacat

SEQ ID NO: 1020309 - DNA, 15 bp, Homo sapiens
tcagtgtctgacatc

SEQ ID NO: 1020310 - DNA, 15 bp, Homo sapiens
cagtgtctgacatct

SEQ ID NO: 1020311 - DNA, 15 bp, Homo sapiens
agtgtctgacatctt

SEQ ID NO: 1020312 - DNA, 15 bp, Homo sapiens
gtgtctgacatcttg

SEQ ID NO: 1020313 - DNA, 15 bp, Homo sapiens
tgtctgacatcttga

SEQ ID NO: 1020314 - DNA, 15 bp, Homo sapiens
gtctgacatcttgag

SEQ ID NO: 1020315 - DNA, 15 bp, Homo sapiens
tctgacatcttgagt

SEQ ID NO: 1020316 - DNA, 15 bp, Homo sapiens
ctgacatcttgagtc

SEQ ID NO: 1020317 - DNA, 15 bp, Homo sapiens
tgacatcttgagtcc

SEQ ID NO: 1020318 - DNA, 15 bp, Homo sapiens
gacatcttgagtccc

SEQ ID NO: 1020319 - DNA, 15 bp, Homo sapiens
acatcttgagtcccc

SEQ ID NO: 1020320 - DNA, 15 bp, Homo sapiens
catcttgagtcccct

SEQ ID NO: 1020321 - DNA, 15 bp, Homo sapiens
atcttgagtcccctg

SEQ ID NO: 1020322 - DNA, 15 bp, Homo sapiens
tcttgagtcccctgg

SEQ ID NO: 1020323 - DNA, 15 bp, Homo sapiens
cttgagtcccctgga

SEQ ID NO: 1020324 - DNA, 15 bp, Homo sapiens
ttgagtcccctggag

SEQ ID NO: 1020325 - DNA, 15 bp, Homo sapiens
tgagtcccctggagg

SEQ ID NO: 1020326 - DNA, 15 bp, Homo sapiens
gagtcccctggagga

SEQ ID NO: 1020327 - DNA, 15 bp, Homo sapiens
agtcccctggaggaa

SEQ ID NO: 1020328 - DNA, 15 bp, Homo sapiens
gtcccctggaggaaa

SEQ ID NO: 1020329 - DNA, 15 bp, Homo sapiens
tcccctggaggaaag

SEQ ID NO: 1020330 - DNA, 15 bp, Homo sapiens
cccctggaggaaagc

SEQ ID NO: 1020331 - DNA, 15 bp, Homo sapiens
ccctggaggaaagct

SEQ ID NO: 1020332 - DNA, 15 bp, Homo sapiens
cctggaggaaagcta

SEQ ID NO: 1020333 - DNA, 15 bp, Homo sapiens
ctggaggaaagctac

SEQ ID NO: 1020334 - DNA, 15 bp, Homo sapiens
tggaggaaagctaca

SEQ ID NO: 1020335 - DNA, 15 bp, Homo sapiens
ggaggaaagctacaa

SEQ ID NO: 1020336 - DNA, 15 bp, Homo sapiens
gaggaaagctacaag

SEQ ID NO: 1020337 - DNA, 15 bp, Homo sapiens
aggaaagctacaaga

SEQ ID NO: 1020338 - DNA, 15 bp, Homo sapiens
ggaaagctacaagaa

SEQ ID NO: 1020339 - DNA, 15 bp, Homo sapiens
gaaagctacaagaaa

SEQ ID NO: 1020340 - DNA, 15 bp, Homo sapiens
aaagctacaagaaag

SEQ ID NO: 1020341 - DNA, 15 bp, Homo sapiens
aagctacaagaaagt

SEQ ID NO: 1020342 - DNA, 15 bp, Homo sapiens
agctacaagaaagtg

SEQ ID NO: 1020343 - DNA, 15 bp, Homo sapiens
gctacaagaaagtgg

SEQ ID NO: 1020344 - DNA, 15 bp, Homo sapiens
ctacaagaaagtggg

SEQ ID NO: 1020345 - DNA, 15 bp, Homo sapiens
tacaagaaagtgggc

SEQ ID NO: 1020346 - DNA, 15 bp, Homo sapiens
acaagaaagtgggca

SEQ ID NO: 1020347 - DNA, 15 bp, Homo sapiens
caagaaagtgggcat

SEQ ID NO: 1020348 - DNA, 15 bp, Homo sapiens
aagaaagtgggcatg

SEQ ID NO: 1020349 - DNA, 15 bp, Homo sapiens
agaaagtgggcatgg

SEQ ID NO: 1020350 - DNA, 15 bp, Homo sapiens
gaaagtgggcatgga

SEQ ID NO: 1020351 - DNA, 15 bp, Homo sapiens
aaagtgggcatggag

SEQ ID NO: 1020352 - DNA, 15 bp, Homo sapiens
aagtgggcatggagg

SEQ ID NO: 1020353 - DNA, 15 bp, Homo sapiens
agtgggcatggaggg

SEQ ID NO: 1020354 - DNA, 15 bp, Homo sapiens
gtgggcatggagggc

SEQ ID NO: 1020355 - DNA, 15 bp, Homo sapiens
tgggcatggagggcg

SEQ ID NO: 1020356 - DNA, 15 bp, Homo sapiens
gggcatggagggcgg

SEQ ID NO: 1020357 - DNA, 15 bp, Homo sapiens
ggcatggagggcggc

SEQ ID NO: 1020358 - DNA, 15 bp, Homo sapiens
gcatggagggcggcg

SEQ ID NO: 1020359 - DNA, 15 bp, Homo sapiens
catggagggcggcgg

SEQ ID NO: 1020360 - DNA, 15 bp, Homo sapiens
atggagggcggcggc

SEQ ID NO: 1020361 - DNA, 15 bp, Homo sapiens
tggagggcggcggcc

SEQ ID NO: 1020362 - DNA, 15 bp, Homo sapiens
ggagggcggcggcct

SEQ ID NO: 1020363 - DNA, 15 bp, Homo sapiens
gagggcggcggcctc

SEQ ID NO: 1020364 - DNA, 15 bp, Homo sapiens
agggcggcggcctcg

SEQ ID NO: 1020365 - DNA, 15 bp, Homo sapiens
gggcggcggcctcgg

SEQ ID NO: 1020366 - DNA, 15 bp, Homo sapiens
ggcggcggcctcggg

SEQ ID NO: 1020367 - DNA, 15 bp, Homo sapiens
gcggcggcctcgggg

SEQ ID NO: 1020368 - DNA, 15 bp, Homo sapiens
cggcggcctcggggc

SEQ ID NO: 1020369 - DNA, 15 bp, Homo sapiens
ggcggcctcggggct

SEQ ID NO: 1020370 - DNA, 15 bp, Homo sapiens
gcggcctcggggctc

SEQ ID NO: 1020371 - DNA, 15 bp, Homo sapiens
cggcctcggggctcc

SEQ ID NO: 1020372 - DNA, 15 bp, Homo sapiens
ggcctcggggctccg

SEQ ID NO: 1020373 - DNA, 15 bp, Homo sapiens
gcctcggggctccgc

SEQ ID NO: 1020374 - DNA, 15 bp, Homo sapiens
cctcggggctccgct

SEQ ID NO: 1020375 - DNA, 15 bp, Homo sapiens
ctcggggctccgctg

SEQ ID NO: 1020376 - DNA, 15 bp, Homo sapiens
tcggggctccgctgg

SEQ ID NO: 1020377 - DNA, 15 bp, Homo sapiens
cggggctccgctggc

SEQ ID NO: 1020378 - DNA, 15 bp, Homo sapiens
ggggctccgctggcg

SEQ ID NO: 1020379 - DNA, 15 bp, Homo sapiens
gggctccgctggcgg

SEQ ID NO: 1020380 - DNA, 15 bp, Homo sapiens
ggctccgctggcggc

SEQ ID NO: 1020381 - DNA, 15 bp, Homo sapiens
gctccgctggcggcg

SEQ ID NO: 1020382 - DNA, 15 bp, Homo sapiens
ctccgctggcggcgt

SEQ ID NO: 1020383 - DNA, 15 bp, Homo sapiens
tccgctggcggcgta

SEQ ID NO: 1020384 - DNA, 15 bp, Homo sapiens
ccgctggcggcgtac

SEQ ID NO: 1020385 - DNA, 15 bp, Homo sapiens
cgctggcggcgtaca

SEQ ID NO: 1020386 - DNA, 15 bp, Homo sapiens
gctggcggcgtacag

SEQ ID NO: 1020387 - DNA, 15 bp, Homo sapiens
ctggcggcgtacagg

SEQ ID NO: 1020388 - DNA, 15 bp, Homo sapiens
tggcggcgtacaggc

SEQ ID NO: 1020389 - DNA, 15 bp, Homo sapiens
ggcggcgtacaggca

SEQ ID NO: 1020390 - DNA, 15 bp, Homo sapiens
gcggcgtacaggcag

SEQ ID NO: 1020391 - DNA, 15 bp, Homo sapiens
cggcgtacaggcagg

SEQ ID NO: 1020392 - DNA, 15 bp, Homo sapiens
ggcgtacaggcaggg

SEQ ID NO: 1020393 - DNA, 15 bp, Homo sapiens
gcgtacaggcagggc

SEQ ID NO: 1020394 - DNA, 15 bp, Homo sapiens
cgtacaggcagggcc

SEQ ID NO: 1020395 - DNA, 15 bp, Homo sapiens
gtacaggcagggcca

SEQ ID NO: 1020396 - DNA, 15 bp, Homo sapiens
tacaggcagggccag

SEQ ID NO: 1020397 - DNA, 15 bp, Homo sapiens
acaggcagggccagg

SEQ ID NO: 1020398 - DNA, 15 bp, Homo sapiens
caggcagggccaggc

SEQ ID NO: 1020399 - DNA, 15 bp, Homo sapiens
aggcagggccaggcg

SEQ ID NO: 1020400 - DNA, 15 bp, Homo sapiens
ggcagggccaggcgg

SEQ ID NO: 1020401 - DNA, 15 bp, Homo sapiens
gcagggccaggcggc

SEQ ID NO: 1020402 - DNA, 15 bp, Homo sapiens
cagggccaggcggca

SEQ ID NO: 1020403 - DNA, 15 bp, Homo sapiens
agggccaggcggcac

SEQ ID NO: 1020404 - DNA, 15 bp, Homo sapiens
gggccaggcggcacc

SEQ ID NO: 1020405 - DNA, 15 bp, Homo sapiens
ggccaggcggcaccg

SEQ ID NO: 1020406 - DNA, 15 bp, Homo sapiens
gccaggcggcaccgc

SEQ ID NO: 1020407 - DNA, 15 bp, Homo sapiens
ccaggcggcaccgcc

SEQ ID NO: 1020408 - DNA, 15 bp, Homo sapiens
caggcggcaccgcca

SEQ ID NO: 1020409 - DNA, 15 bp, Homo sapiens
aggcggcaccgccaa

SEQ ID NO: 1020410 - DNA, 15 bp, Homo sapiens
ggcggcaccgccaac

SEQ ID NO: 1020411 - DNA, 15 bp, Homo sapiens
gcggcaccgccaaca

SEQ ID NO: 1020412 - DNA, 15 bp, Homo sapiens
cggcaccgccaacag

SEQ ID NO: 1020413 - DNA, 15 bp, Homo sapiens
ggcaccgccaacagc

SEQ ID NO: 1020414 - DNA, 15 bp, Homo sapiens
gcaccgccaacagcg

SEQ ID NO: 1020415 - DNA, 15 bp, Homo sapiens
caccgccaacagcgg

SEQ ID NO: 1020416 - DNA, 15 bp, Homo sapiens
accgccaacagcggc

SEQ ID NO: 1020417 - DNA, 15 bp, Homo sapiens
ccgccaacagcggcc

SEQ ID NO: 1020418 - DNA, 15 bp, Homo sapiens
cgccaacagcggcca

SEQ ID NO: 1020419 - DNA, 15 bp, Homo sapiens
gccaacagcggccat

SEQ ID NO: 1020420 - DNA, 15 bp, Homo sapiens
ccaacagcggccatg

SEQ ID NO: 1020421 - DNA, 15 bp, Homo sapiens
caacagcggccatgc

SEQ ID NO: 1020422 - DNA, 15 bp, Homo sapiens
aacagcggccatgca

SEQ ID NO: 1020423 - DNA, 15 bp, Homo sapiens
acagcggccatgcag

SEQ ID NO: 1020424 - DNA, 15 bp, Homo sapiens
cagcggccatgcagc

SEQ ID NO: 1020425 - DNA, 15 bp, Homo sapiens
agcggccatgcagca

SEQ ID NO: 1020426 - DNA, 15 bp, Homo sapiens
gcggccatgcagcag

SEQ ID NO: 1020427 - DNA, 15 bp, Homo sapiens
cggccatgcagcagc

SEQ ID NO: 1020428 - DNA, 15 bp, Homo sapiens
ggccatgcagcagca

SEQ ID NO: 1020429 - DNA, 15 bp, Homo sapiens
gccatgcagcagcac

SEQ ID NO: 1020430 - DNA, 15 bp, Homo sapiens
ccatgcagcagcacg

SEQ ID NO: 1020431 - DNA, 15 bp, Homo sapiens
catgcagcagcacgc

SEQ ID NO: 1020432 - DNA, 15 bp, Homo sapiens
atgcagcagcacgcc

SEQ ID NO: 1020433 - DNA, 15 bp, Homo sapiens
tgcagcagcacgccg

SEQ ID NO: 1020434 - DNA, 15 bp, Homo sapiens
gcagcagcacgccgt

SEQ ID NO: 1020435 - DNA, 15 bp, Homo sapiens
cagcagcacgccgtg

SEQ ID NO: 1020436 - DNA, 15 bp, Homo sapiens
agcagcacgccgtgg

SEQ ID NO: 1020437 - DNA, 15 bp, Homo sapiens
gcagcacgccgtggg

SEQ ID NO: 1020438 - DNA, 15 bp, Homo sapiens
cagcacgccgtgggg

SEQ ID NO: 1020439 - DNA, 15 bp, Homo sapiens
agcacgccgtggggc

SEQ ID NO: 1020440 - DNA, 15 bp, Homo sapiens
gcacgccgtggggca

SEQ ID NO: 1020441 - DNA, 15 bp, Homo sapiens
cacgccgtggggcac

SEQ ID NO: 1020442 - DNA, 15 bp, Homo sapiens
acgccgtggggcacc

SEQ ID NO: 1020443 - DNA, 15 bp, Homo sapiens
cgccgtggggcacca

SEQ ID NO: 1020444 - DNA, 15 bp, Homo sapiens
gccgtggggcaccac

SEQ ID NO: 1020445 - DNA, 15 bp, Homo sapiens
ccgtggggcaccacg

SEQ ID NO: 1020446 - DNA, 15 bp, Homo sapiens
cgtggggcaccacgg

SEQ ID NO: 1020447 - DNA, 15 bp, Homo sapiens
gtggggcaccacggc

SEQ ID NO: 1020448 - DNA, 15 bp, Homo sapiens
tggggcaccacggcg

SEQ ID NO: 1020449 - DNA, 15 bp, Homo sapiens
ggggcaccacggcgc

SEQ ID NO: 1020450 - DNA, 15 bp, Homo sapiens
gggcaccacggcgcc

SEQ ID NO: 1020451 - DNA, 15 bp, Homo sapiens
ggcaccacggcgccg

SEQ ID NO: 1020452 - DNA, 15 bp, Homo sapiens
gcaccacggcgccgt

SEQ ID NO: 1020453 - DNA, 15 bp, Homo sapiens
caccacggcgccgtc

SEQ ID NO: 1020454 - DNA, 15 bp, Homo sapiens
accacggcgccgtca

SEQ ID NO: 1020455 - DNA, 15 bp, Homo sapiens
ccacggcgccgtcac

SEQ ID NO: 1020456 - DNA, 15 bp, Homo sapiens
cacggcgccgtcacc

SEQ ID NO: 1020457 - DNA, 15 bp, Homo sapiens
acggcgccgtcaccg

SEQ ID NO: 1020458 - DNA, 15 bp, Homo sapiens
cggcgccgtcaccgc

SEQ ID NO: 1020459 - DNA, 15 bp, Homo sapiens
ggcgccgtcaccgcc

SEQ ID NO: 1020460 - DNA, 15 bp, Homo sapiens
gcgccgtcaccgccg

SEQ ID NO: 1020461 - DNA, 15 bp, Homo sapiens
cgccgtcaccgccgc

SEQ ID NO: 1020462 - DNA, 15 bp, Homo sapiens
gccgtcaccgccgcc

SEQ ID NO: 1020463 - DNA, 15 bp, Homo sapiens
ccgtcaccgccgcct

SEQ ID NO: 1020464 - DNA, 15 bp, Homo sapiens
cgtcaccgccgccta

SEQ ID NO: 1020465 - DNA, 15 bp, Homo sapiens
gtcaccgccgcctac

SEQ ID NO: 1020466 - DNA, 15 bp, Homo sapiens
tcaccgccgcctacc

SEQ ID NO: 1020467 - DNA, 15 bp, Homo sapiens
caccgccgcctacca

SEQ ID NO: 1020468 - DNA, 15 bp, Homo sapiens
accgccgcctaccac

SEQ ID NO: 1020469 - DNA, 15 bp, Homo sapiens
ccgccgcctaccaca

SEQ ID NO: 1020470 - DNA, 15 bp, Homo sapiens
cgccgcctaccacat

SEQ ID NO: 1020471 - DNA, 15 bp, Homo sapiens
gccgcctaccacatg

SEQ ID NO: 1020472 - DNA, 15 bp, Homo sapiens
ccgcctaccacatga

SEQ ID NO: 1020473 - DNA, 15 bp, Homo sapiens
cgcctaccacatgac

SEQ ID NO: 1020474 - DNA, 15 bp, Homo sapiens
gcctaccacatgacg

SEQ ID NO: 1020475 - DNA, 15 bp, Homo sapiens
cctaccacatgacgg

SEQ ID NO: 1020476 - DNA, 15 bp, Homo sapiens
ctaccacatgacggc

SEQ ID NO: 1020477 - DNA, 15 bp, Homo sapiens
taccacatgacggcg

SEQ ID NO: 1020478 - DNA, 15 bp, Homo sapiens
accacatgacggcgg

SEQ ID NO: 1020479 - DNA, 15 bp, Homo sapiens
ccacatgacggcggc

SEQ ID NO: 1020480 - DNA, 15 bp, Homo sapiens
cacatgacggcggcg

SEQ ID NO: 1020481 - DNA, 15 bp, Homo sapiens
acatgacggcggcgg

SEQ ID NO: 1020482 - DNA, 15 bp, Homo sapiens
catgacggcggcggg

SEQ ID NO: 1020483 - DNA, 15 bp, Homo sapiens
atgacggcggcgggg

SEQ ID NO: 1020484 - DNA, 15 bp, Homo sapiens
tgacggcggcggggg

SEQ ID NO: 1020485 - DNA, 15 bp, Homo sapiens
gacggcggcgggggt

SEQ ID NO: 1020486 - DNA, 15 bp, Homo sapiens
acggcggcgggggtg

SEQ ID NO: 1020487 - DNA, 15 bp, Homo sapiens
cggcggcgggggtgc

SEQ ID NO: 1020488 - DNA, 15 bp, Homo sapiens
ggcggcgggggtgcc

SEQ ID NO: 1020489 - DNA, 15 bp, Homo sapiens
gcggcgggggtgccc

SEQ ID NO: 1020490 - DNA, 15 bp, Homo sapiens
cggcgggggtgcccc

SEQ ID NO: 1020491 - DNA, 15 bp, Homo sapiens
ggcgggggtgcccca

SEQ ID NO: 1020492 - DNA, 15 bp, Homo sapiens
gcgggggtgccccag

SEQ ID NO: 1020493 - DNA, 15 bp, Homo sapiens
cgggggtgccccagc

SEQ ID NO: 1020494 - DNA, 15 bp, Homo sapiens
gggggtgccccagct

SEQ ID NO: 1020495 - DNA, 15 bp, Homo sapiens
ggggtgccccagctc

SEQ ID NO: 1020496 - DNA, 15 bp, Homo sapiens
gggtgccccagctct

SEQ ID NO: 1020497 - DNA, 15 bp, Homo sapiens
ggtgccccagctctc

SEQ ID NO: 1020498 - DNA, 15 bp, Homo sapiens
gtgccccagctctcg

SEQ ID NO: 1020499 - DNA, 15 bp, Homo sapiens
tgccccagctctcgc

SEQ ID NO: 1020500 - DNA, 15 bp, Homo sapiens
gccccagctctcgca

SEQ ID NO: 1020501 - DNA, 15 bp, Homo sapiens
ccccagctctcgcac

SEQ ID NO: 1020502 - DNA, 15 bp, Homo sapiens
cccagctctcgcact

SEQ ID NO: 1020503 - DNA, 15 bp, Homo sapiens
ccagctctcgcactc

SEQ ID NO: 1020504 - DNA, 15 bp, Homo sapiens
cagctctcgcactcc

SEQ ID NO: 1020505 - DNA, 15 bp, Homo sapiens
agctctcgcactccg

SEQ ID NO: 1020506 - DNA, 15 bp, Homo sapiens
gctctcgcactccgc

SEQ ID NO: 1020507 - DNA, 15 bp, Homo sapiens
ctctcgcactccgcc

SEQ ID NO: 1020508 - DNA, 15 bp, Homo sapiens
tctcgcactccgccg

SEQ ID NO: 1020509 - DNA, 15 bp, Homo sapiens
ctcgcactccgccgt

SEQ ID NO: 1020510 - DNA, 15 bp, Homo sapiens
tcgcactccgccgtg

SEQ ID NO: 1020511 - DNA, 15 bp, Homo sapiens
cgcactccgccgtgg

SEQ ID NO: 1020512 - DNA, 15 bp, Homo sapiens
gcactccgccgtggg

SEQ ID NO: 1020513 - DNA, 15 bp, Homo sapiens
cactccgccgtgggg

SEQ ID NO: 1020514 - DNA, 15 bp, Homo sapiens
actccgccgtggggg

SEQ ID NO: 1020515 - DNA, 15 bp, Homo sapiens
ctccgccgtgggggg

SEQ ID NO: 1020516 - DNA, 15 bp, Homo sapiens
tccgccgtggggggc

SEQ ID NO: 1020517 - DNA, 15 bp, Homo sapiens
ccgccgtggggggct

SEQ ID NO: 1020518 - DNA, 15 bp, Homo sapiens
cgccgtggggggcta

SEQ ID NO: 1020519 - DNA, 15 bp, Homo sapiens
gccgtggggggctac

SEQ ID NO: 1020520 - DNA, 15 bp, Homo sapiens
ccgtggggggctact

SEQ ID NO: 1020521 - DNA, 15 bp, Homo sapiens
cgtggggggctactg

SEQ ID NO: 1020522 - DNA, 15 bp, Homo sapiens
gtggggggctactgc

SEQ ID NO: 1020523 - DNA, 15 bp, Homo sapiens
tggggggctactgca

SEQ ID NO: 1020524 - DNA, 15 bp, Homo sapiens
ggggggctactgcaa

SEQ ID NO: 1020525 - DNA, 15 bp, Homo sapiens
gggggctactgcaac

SEQ ID NO: 1020526 - DNA, 15 bp, Homo sapiens
ggggctactgcaacg

SEQ ID NO: 1020527 - DNA, 15 bp, Homo sapiens
gggctactgcaacgg

SEQ ID NO: 1020528 - DNA, 15 bp, Homo sapiens
ggctactgcaacggc

SEQ ID NO: 1020529 - DNA, 15 bp, Homo sapiens
gctactgcaacggca

SEQ ID NO: 1020530 - DNA, 15 bp, Homo sapiens
ctactgcaacggcaa

SEQ ID NO: 1020531 - DNA, 15 bp, Homo sapiens
tactgcaacggcaac

SEQ ID NO: 1020532 - DNA, 15 bp, Homo sapiens
actgcaacggcaacc

SEQ ID NO: 1020533 - DNA, 15 bp, Homo sapiens
ctgcaacggcaacct

SEQ ID NO: 1020534 - DNA, 15 bp, Homo sapiens
tgcaacggcaacctg

SEQ ID NO: 1020535 - DNA, 15 bp, Homo sapiens
gcaacggcaacctgg

SEQ ID NO: 1020536 - DNA, 15 bp, Homo sapiens
caacggcaacctggg

SEQ ID NO: 1020537 - DNA, 15 bp, Homo sapiens
aacggcaacctgggc

SEQ ID NO: 1020538 - DNA, 15 bp, Homo sapiens
acggcaacctgggca

SEQ ID NO: 1020539 - DNA, 15 bp, Homo sapiens
cggcaacctgggcaa

SEQ ID NO: 1020540 - DNA, 15 bp, Homo sapiens
ggcaacctgggcaac

SEQ ID NO: 1020541 - DNA, 15 bp, Homo sapiens
gcaacctgggcaaca

SEQ ID NO: 1020542 - DNA, 15 bp, Homo sapiens
caacctgggcaacat

SEQ ID NO: 1020543 - DNA, 15 bp, Homo sapiens
aacctgggcaacatg

SEQ ID NO: 1020544 - DNA, 15 bp, Homo sapiens
acctgggcaacatga

SEQ ID NO: 1020545 - DNA, 15 bp, Homo sapiens
cctgggcaacatgag

SEQ ID NO: 1020546 - DNA, 15 bp, Homo sapiens
ctgggcaacatgagc

SEQ ID NO: 1020547 - DNA, 15 bp, Homo sapiens
tgggcaacatgagcg

SEQ ID NO: 1020548 - DNA, 15 bp, Homo sapiens
gggcaacatgagcga

SEQ ID NO: 1020549 - DNA, 15 bp, Homo sapiens
ggcaacatgagcgag

SEQ ID NO: 1020550 - DNA, 15 bp, Homo sapiens
gcaacatgagcgagc

SEQ ID NO: 1020551 - DNA, 15 bp, Homo sapiens
caacatgagcgagct

SEQ ID NO: 1020552 - DNA, 15 bp, Homo sapiens
aacatgagcgagctg

SEQ ID NO: 1020553 - DNA, 15 bp, Homo sapiens
acatgagcgagctgc

SEQ ID NO: 1020554 - DNA, 15 bp, Homo sapiens
catgagcgagctgcc

SEQ ID NO: 1020555 - DNA, 15 bp, Homo sapiens
atgagcgagctgccg

SEQ ID NO: 1020556 - DNA, 15 bp, Homo sapiens
tgagcgagctgccgc

SEQ ID NO: 1020557 - DNA, 15 bp, Homo sapiens
gagcgagctgccgcc

SEQ ID NO: 1020558 - DNA, 15 bp, Homo sapiens
agcgagctgccgccg

SEQ ID NO: 1020559 - DNA, 15 bp, Homo sapiens
gcgagctgccgccgt

SEQ ID NO: 1020560 - DNA, 15 bp, Homo sapiens
cgagctgccgccgta

SEQ ID NO: 1020561 - DNA, 15 bp, Homo sapiens
gagctgccgccgtac

SEQ ID NO: 1020562 - DNA, 15 bp, Homo sapiens
agctgccgccgtacc

SEQ ID NO: 1020563 - DNA, 15 bp, Homo sapiens
gctgccgccgtacca

SEQ ID NO: 1020564 - DNA, 15 bp, Homo sapiens
ctgccgccgtaccag

SEQ ID NO: 1020565 - DNA, 15 bp, Homo sapiens
tgccgccgtaccagg

SEQ ID NO: 1020566 - DNA, 15 bp, Homo sapiens
gccgccgtaccagga

SEQ ID NO: 1020567 - DNA, 15 bp, Homo sapiens
ccgccgtaccaggac

SEQ ID NO: 1020568 - DNA, 15 bp, Homo sapiens
cgccgtaccaggaca

SEQ ID NO: 1020569 - DNA, 15 bp, Homo sapiens
gccgtaccaggacac

SEQ ID NO: 1020570 - DNA, 15 bp, Homo sapiens
ccgtaccaggacacc

SEQ ID NO: 1020571 - DNA, 15 bp, Homo sapiens
cgtaccaggacacca

SEQ ID NO: 1020572 - DNA, 15 bp, Homo sapiens
gtaccaggacaccat

SEQ ID NO: 1020573 - DNA, 15 bp, Homo sapiens
taccaggacaccatg

SEQ ID NO: 1020574 - DNA, 15 bp, Homo sapiens
accaggacaccatga

SEQ ID NO: 1020575 - DNA, 15 bp, Homo sapiens
ccaggacaccatgag

SEQ ID NO: 1020576 - DNA, 15 bp, Homo sapiens
caggacaccatgagg

SEQ ID NO: 1020577 - DNA, 15 bp, Homo sapiens
aggacaccatgagga

SEQ ID NO: 1020578 - DNA, 15 bp, Homo sapiens
ggacaccatgaggaa

SEQ ID NO: 1020579 - DNA, 15 bp, Homo sapiens
gacaccatgaggaac

SEQ ID NO: 1020580 - DNA, 15 bp, Homo sapiens
acaccatgaggaaca

SEQ ID NO: 1020581 - DNA, 15 bp, Homo sapiens
caccatgaggaacag

SEQ ID NO: 1020582 - DNA, 15 bp, Homo sapiens
accatgaggaacagc

SEQ ID NO: 1020583 - DNA, 15 bp, Homo sapiens
ccatgaggaacagcg

SEQ ID NO: 1020584 - DNA, 15 bp, Homo sapiens
catgaggaacagcgc

SEQ ID NO: 1020585 - DNA, 15 bp, Homo sapiens
atgaggaacagcgcc

SEQ ID NO: 1020586 - DNA, 15 bp, Homo sapiens
tgaggaacagcgcct

SEQ ID NO: 1020587 - DNA, 15 bp, Homo sapiens
gaggaacagcgcctc

SEQ ID NO: 1020588 - DNA, 15 bp, Homo sapiens
aggaacagcgcctct

SEQ ID NO: 1020589 - DNA, 15 bp, Homo sapiens
ggaacagcgcctctg

SEQ ID NO: 1020590 - DNA, 15 bp, Homo sapiens
gaacagcgcctctgg

SEQ ID NO: 1020591 - DNA, 15 bp, Homo sapiens
aacagcgcctctggc

SEQ ID NO: 1020592 - DNA, 15 bp, Homo sapiens
acagcgcctctggcc

SEQ ID NO: 1020593 - DNA, 15 bp, Homo sapiens
cagcgcctctggccc

SEQ ID NO: 1020594 - DNA, 15 bp, Homo sapiens
agcgcctctggcccc

SEQ ID NO: 1020595 - DNA, 15 bp, Homo sapiens
gcgcctctggccccg

SEQ ID NO: 1020596 - DNA, 15 bp, Homo sapiens
cgcctctggccccgg

SEQ ID NO: 1020597 - DNA, 15 bp, Homo sapiens
gcctctggccccgga

SEQ ID NO: 1020598 - DNA, 15 bp, Homo sapiens
cctctggccccggat

SEQ ID NO: 1020599 - DNA, 15 bp, Homo sapiens
ctctggccccggatg

SEQ ID NO: 1020600 - DNA, 15 bp, Homo sapiens
tctggccccggatgg

SEQ ID NO: 1020601 - DNA, 15 bp, Homo sapiens
ctggccccggatggt

SEQ ID NO: 1020602 - DNA, 15 bp, Homo sapiens
tggccccggatggta

SEQ ID NO: 1020603 - DNA, 15 bp, Homo sapiens
ggccccggatggtac

SEQ ID NO: 1020604 - DNA, 15 bp, Homo sapiens
gccccggatggtacg

SEQ ID NO: 1020605 - DNA, 15 bp, Homo sapiens
ccccggatggtacgg

SEQ ID NO: 1020606 - DNA, 15 bp, Homo sapiens
cccggatggtacggc

SEQ ID NO: 1020607 - DNA, 15 bp, Homo sapiens
ccggatggtacggcg

SEQ ID NO: 1020608 - DNA, 15 bp, Homo sapiens
cggatggtacggcgc

SEQ ID NO: 1020609 - DNA, 15 bp, Homo sapiens
ggatggtacggcgcc

SEQ ID NO: 1020610 - DNA, 15 bp, Homo sapiens
gatggtacggcgcca

SEQ ID NO: 1020611 - DNA, 15 bp, Homo sapiens
atggtacggcgccaa

SEQ ID NO: 1020612 - DNA, 15 bp, Homo sapiens
tggtacggcgccaac

SEQ ID NO: 1020613 - DNA, 15 bp, Homo sapiens
ggtacggcgccaacc

SEQ ID NO: 1020614 - DNA, 15 bp, Homo sapiens
gtacggcgccaaccc

SEQ ID NO: 1020615 - DNA, 15 bp, Homo sapiens
tacggcgccaaccca

SEQ ID NO: 1020616 - DNA, 15 bp, Homo sapiens
acggcgccaacccag

SEQ ID NO: 1020617 - DNA, 15 bp, Homo sapiens
cggcgccaacccaga

SEQ ID NO: 1020618 - DNA, 15 bp, Homo sapiens
ggcgccaacccagac

SEQ ID NO: 1020619 - DNA, 15 bp, Homo sapiens
gcgccaacccagacc

SEQ ID NO: 1020620 - DNA, 15 bp, Homo sapiens
cgccaacccagaccc

SEQ ID NO: 1020621 - DNA, 15 bp, Homo sapiens
gccaacccagacccg

SEQ ID NO: 1020622 - DNA, 15 bp, Homo sapiens
ccaacccagacccgc

SEQ ID NO: 1020623 - DNA, 15 bp, Homo sapiens
caacccagacccgcg

SEQ ID NO: 1020624 - DNA, 15 bp, Homo sapiens
aacccagacccgcgc

SEQ ID NO: 1020625 - DNA, 15 bp, Homo sapiens
acccagacccgcgct

SEQ ID NO: 1020626 - DNA, 15 bp, Homo sapiens
cccagacccgcgctt

SEQ ID NO: 1020627 - DNA, 15 bp, Homo sapiens
ccagacccgcgcttc

SEQ ID NO: 1020628 - DNA, 15 bp, Homo sapiens
cagacccgcgcttcc

SEQ ID NO: 1020629 - DNA, 15 bp, Homo sapiens
agacccgcgcttccc

SEQ ID NO: 1020630 - DNA, 15 bp, Homo sapiens
gacccgcgcttcccc

SEQ ID NO: 1020631 - DNA, 15 bp, Homo sapiens
acccgcgcttccccg

SEQ ID NO: 1020632 - DNA, 15 bp, Homo sapiens
cccgcgcttccccgc

SEQ ID NO: 1020633 - DNA, 15 bp, Homo sapiens
ccgcgcttccccgcc

SEQ ID NO: 1020634 - DNA, 15 bp, Homo sapiens
cgcgcttccccgcca

SEQ ID NO: 1020635 - DNA, 15 bp, Homo sapiens
gcgcttccccgccag

SEQ ID NO: 1020636 - DNA, 15 bp, Homo sapiens
cgcttccccgccagt

SEQ ID NO: 1020637 - DNA, 15 bp, Homo sapiens
gcttccccgccagta

SEQ ID NO: 1020638 - DNA, 15 bp, Homo sapiens
cttccccgccagtaa

SEQ ID NO: 1020639 - DNA, 15 bp, Homo sapiens
ttccccgccagtaag

SEQ ID NO: 1020640 - DNA, 15 bp, Homo sapiens
tccccgccagtaagt

SEQ ID NO: 1020641 - DNA, 15 bp, Homo sapiens
ccccgccagtaagtg

SEQ ID NO: 1020642 - DNA, 15 bp, Homo sapiens
cccgccagtaagtga

SEQ ID NO: 1020643 - DNA, 15 bp, Homo sapiens
ccgccagtaagtgag

SEQ ID NO: 1020644 - DNA, 15 bp, Homo sapiens
cgccagtaagtgagg

SEQ ID NO: 1020645 - DNA, 15 bp, Homo sapiens
gccagtaagtgaggc

SEQ ID NO: 1020646 - DNA, 15 bp, Homo sapiens
ccagtaagtgaggcc

SEQ ID NO: 1020647 - DNA, 15 bp, Homo sapiens
cagtaagtgaggccg

SEQ ID NO: 1020648 - DNA, 15 bp, Homo sapiens
agtaagtgaggccgc

SEQ ID NO: 1020649 - DNA, 15 bp, Homo sapiens
gtaagtgaggccgcc

SEQ ID NO: 1020650 - DNA, 15 bp, Homo sapiens
taagtgaggccgccc

SEQ ID NO: 1020651 - DNA, 15 bp, Homo sapiens
aagtgaggccgcccc

SEQ ID NO: 1020652 - DNA, 15 bp, Homo sapiens
agtgaggccgcccca

SEQ ID NO: 1020653 - DNA, 15 bp, Homo sapiens
gtgaggccgccccac

SEQ ID NO: 1020654 - DNA, 15 bp, Homo sapiens
tgaggccgccccact

SEQ ID NO: 1020655 - DNA, 15 bp, Homo sapiens
gaggccgccccactg

SEQ ID NO: 1020656 - DNA, 15 bp, Homo sapiens
aggccgccccactgc

SEQ ID NO: 1020657 - DNA, 15 bp, Homo sapiens
ggccgccccactgcg

SEQ ID NO: 1020658 - DNA, 15 bp, Homo sapiens
gccgccccactgcgg

SEQ ID NO: 1020659 - DNA, 15 bp, Homo sapiens
ccgccccactgcggg

SEQ ID NO: 1020660 - DNA, 15 bp, Homo sapiens
cgccccactgcgggg

SEQ ID NO: 1020661 - DNA, 15 bp, Homo sapiens
gccccactgcggggc

SEQ ID NO: 1020662 - DNA, 15 bp, Homo sapiens
ccccactgcggggcc

SEQ ID NO: 1020663 - DNA, 15 bp, Homo sapiens
cccactgcggggccg

SEQ ID NO: 1020664 - DNA, 15 bp, Homo sapiens
ccactgcggggccgc

SEQ ID NO: 1020665 - DNA, 15 bp, Homo sapiens
cactgcggggccgcg

SEQ ID NO: 1020666 - DNA, 15 bp, Homo sapiens
actgcggggccgcgg

SEQ ID NO: 1020667 - DNA, 15 bp, Homo sapiens
ctgcggggccgcggg

SEQ ID NO: 1020668 - DNA, 15 bp, Homo sapiens
tgcggggccgcgggc

SEQ ID NO: 1020669 - DNA, 15 bp, Homo sapiens
gcggggccgcgggct

SEQ ID NO: 1020670 - DNA, 15 bp, Homo sapiens
cggggccgcgggctg

SEQ ID NO: 1020671 - DNA, 15 bp, Homo sapiens
ggggccgcgggctga

SEQ ID NO: 1020672 - DNA, 15 bp, Homo sapiens
gggccgcgggctgag

SEQ ID NO: 1020673 - DNA, 15 bp, Homo sapiens
ggccgcgggctgagc

SEQ ID NO: 1020674 - DNA, 15 bp, Homo sapiens
gccgcgggctgagct

SEQ ID NO: 1020675 - DNA, 15 bp, Homo sapiens
ccgcgggctgagctc

SEQ ID NO: 1020676 - DNA, 15 bp, Homo sapiens
cgcgggctgagctca

SEQ ID NO: 1020677 - DNA, 15 bp, Homo sapiens
gcgggctgagctcag

SEQ ID NO: 1020678 - DNA, 15 bp, Homo sapiens
cgggctgagctcagg

SEQ ID NO: 1020679 - DNA, 15 bp, Homo sapiens
gggctgagctcagga

SEQ ID NO: 1020680 - DNA, 15 bp, Homo sapiens
ggctgagctcaggag

SEQ ID NO: 1020681 - DNA, 15 bp, Homo sapiens
gctgagctcaggagg

SEQ ID NO: 1020682 - DNA, 15 bp, Homo sapiens
ctgagctcaggaggt

SEQ ID NO: 1020683 - DNA, 15 bp, Homo sapiens
tgagctcaggaggtg

SEQ ID NO: 1020684 - DNA, 15 bp, Homo sapiens
gagctcaggaggtgc

SEQ ID NO: 1020685 - DNA, 15 bp, Homo sapiens
agctcaggaggtgcg

SEQ ID NO: 1020686 - DNA, 15 bp, Homo sapiens
gctcaggaggtgcgg

SEQ ID NO: 1020687 - DNA, 15 bp, Homo sapiens
ctcaggaggtgcggc

SEQ ID NO: 1020688 - DNA, 15 bp, Homo sapiens
tcaggaggtgcggcg

SEQ ID NO: 1020689 - DNA, 15 bp, Homo sapiens
caggaggtgcggcga

SEQ ID NO: 1020690 - DNA, 15 bp, Homo sapiens
aggaggtgcggcgag

SEQ ID NO: 1020691 - DNA, 15 bp, Homo sapiens
ggaggtgcggcgaga

SEQ ID NO: 1020692 - DNA, 15 bp, Homo sapiens
gaggtgcggcgagag

SEQ ID NO: 1020693 - DNA, 15 bp, Homo sapiens
aggtgcggcgagagc

SEQ ID NO: 1020694 - DNA, 15 bp, Homo sapiens
ggtgcggcgagagcc

SEQ ID NO: 1020695 - DNA, 15 bp, Homo sapiens
gtgcggcgagagccg

SEQ ID NO: 1020696 - DNA, 15 bp, Homo sapiens
tgcggcgagagccgt

SEQ ID NO: 1020697 - DNA, 15 bp, Homo sapiens
gcggcgagagccgtc

SEQ ID NO: 1020698 - DNA, 15 bp, Homo sapiens
cggcgagagccgtcc

SEQ ID NO: 1020699 - DNA, 15 bp, Homo sapiens
ggcgagagccgtcca

SEQ ID NO: 1020700 - DNA, 15 bp, Homo sapiens
gcgagagccgtccag

SEQ ID NO: 1020701 - DNA, 15 bp, Homo sapiens
cgagagccgtccaga

SEQ ID NO: 1020702 - DNA, 15 bp, Homo sapiens
gagagccgtccagaa

SEQ ID NO: 1020703 - DNA, 15 bp, Homo sapiens
agagccgtccagaag

SEQ ID NO: 1020704 - DNA, 15 bp, Homo sapiens
gagccgtccagaagg

SEQ ID NO: 1020705 - DNA, 15 bp, Homo sapiens
agccgtccagaaggc

SEQ ID NO: 1020706 - DNA, 15 bp, Homo sapiens
gccgtccagaaggcg

SEQ ID NO: 1020707 - DNA, 15 bp, Homo sapiens
ccgtccagaaggcgc

SEQ ID NO: 1020708 - DNA, 15 bp, Homo sapiens
cgtccagaaggcgcg

SEQ ID NO: 1020709 - DNA, 15 bp, Homo sapiens
gtccagaaggcgcgg

SEQ ID NO: 1020710 - DNA, 15 bp, Homo sapiens
tccagaaggcgcggc

SEQ ID NO: 1020711 - DNA, 15 bp, Homo sapiens
ccagaaggcgcggcg

SEQ ID NO: 1020712 - DNA, 15 bp, Homo sapiens
cagaaggcgcggcgc

SEQ ID NO: 1020713 - DNA, 15 bp, Homo sapiens
agaaggcgcggcgcc

SEQ ID NO: 1020714 - DNA, 15 bp, Homo sapiens
gaaggcgcggcgccg

SEQ ID NO: 1020715 - DNA, 15 bp, Homo sapiens
aaggcgcggcgccgg

SEQ ID NO: 1020716 - DNA, 15 bp, Homo sapiens
aggcgcggcgccggc

SEQ ID NO: 1020717 - DNA, 15 bp, Homo sapiens
ggcgcggcgccggca

SEQ ID NO: 1020718 - DNA, 15 bp, Homo sapiens
gcgcggcgccggcag

SEQ ID NO: 1020719 - DNA, 15 bp, Homo sapiens
cgcggcgccggcagg

SEQ ID NO: 1020720 - DNA, 15 bp, Homo sapiens
gcggcgccggcaggc

SEQ ID NO: 1020721 - DNA, 15 bp, Homo sapiens
cggcgccggcaggct

SEQ ID NO: 1020722 - DNA, 15 bp, Homo sapiens
ggcgccggcaggctg

SEQ ID NO: 1020723 - DNA, 15 bp, Homo sapiens
gcgccggcaggctgc

SEQ ID NO: 1020724 - DNA, 15 bp, Homo sapiens
cgccggcaggctgcg

SEQ ID NO: 1020725 - DNA, 15 bp, Homo sapiens
gccggcaggctgcgc

SEQ ID NO: 1020726 - DNA, 15 bp, Homo sapiens
ccggcaggctgcgcg

SEQ ID NO: 1020727 - DNA, 15 bp, Homo sapiens
cggcaggctgcgcgc

SEQ ID NO: 1020728 - DNA, 15 bp, Homo sapiens
ggcaggctgcgcgct

SEQ ID NO: 1020729 - DNA, 15 bp, Homo sapiens
gcaggctgcgcgctg

SEQ ID NO: 1020730 - DNA, 15 bp, Homo sapiens
caggctgcgcgctgg

SEQ ID NO: 1020731 - DNA, 15 bp, Homo sapiens
aggctgcgcgctggg

SEQ ID NO: 1020732 - DNA, 15 bp, Homo sapiens
ggctgcgcgctgggc

SEQ ID NO: 1020733 - DNA, 15 bp, Homo sapiens
gctgcgcgctgggca

SEQ ID NO: 1020734 - DNA, 15 bp, Homo sapiens
ctgcgcgctgggcat

SEQ ID NO: 1020735 - DNA, 15 bp, Homo sapiens
tgcgcgctgggcatc

SEQ ID NO: 1020736 - DNA, 15 bp, Homo sapiens
gcgcgctgggcatca

SEQ ID NO: 1020737 - DNA, 15 bp, Homo sapiens
cgcgctgggcatcag

SEQ ID NO: 1020738 - DNA, 15 bp, Homo sapiens
gcgctgggcatcagg

SEQ ID NO: 1020739 - DNA, 15 bp, Homo sapiens
cgctgggcatcaggg

SEQ ID NO: 1020740 - DNA, 15 bp, Homo sapiens
gctgggcatcaggga

SEQ ID NO: 1020741 - DNA, 15 bp, Homo sapiens
ctgggcatcagggag

SEQ ID NO: 1020742 - DNA, 15 bp, Homo sapiens
tgggcatcagggagg

SEQ ID NO: 1020743 - DNA, 15 bp, Homo sapiens
gggcatcagggaggg

SEQ ID NO: 1020744 - DNA, 15 bp, Homo sapiens
ggcatcagggagggc

SEQ ID NO: 1020745 - DNA, 15 bp, Homo sapiens
gcatcagggagggcg

SEQ ID NO: 1020746 - DNA, 15 bp, Homo sapiens
catcagggagggcgg

SEQ ID NO: 1020747 - DNA, 15 bp, Homo sapiens
atcagggagggcggc

SEQ ID NO: 1020748 - DNA, 15 bp, Homo sapiens
tcagggagggcggcc

SEQ ID NO: 1020749 - DNA, 15 bp, Homo sapiens
cagggagggcggccc

SEQ ID NO: 1020750 - DNA, 15 bp, Homo sapiens
agggagggcggcccg

SEQ ID NO: 1020751 - DNA, 15 bp, Homo sapiens
gggagggcggcccgg

SEQ ID NO: 1020752 - DNA, 15 bp, Homo sapiens
ggagggcggcccggc

SEQ ID NO: 1020753 - DNA, 15 bp, Homo sapiens
gagggcggcccggca

SEQ ID NO: 1020754 - DNA, 15 bp, Homo sapiens
agggcggcccggcag

SEQ ID NO: 1020755 - DNA, 15 bp, Homo sapiens
gggcggcccggcagc

SEQ ID NO: 1020756 - DNA, 15 bp, Homo sapiens
ggcggcccggcagcg

SEQ ID NO: 1020757 - DNA, 15 bp, Homo sapiens
gcggcccggcagcgg

SEQ ID NO: 1020758 - DNA, 15 bp, Homo sapiens
cggcccggcagcggc

SEQ ID NO: 1020759 - DNA, 15 bp, Homo sapiens
ggcccggcagcggcg

SEQ ID NO: 1020760 - DNA, 15 bp, Homo sapiens
gcccggcagcggcgc

SEQ ID NO: 1020761 - DNA, 15 bp, Homo sapiens
cccggcagcggcgcc

SEQ ID NO: 1020762 - DNA, 15 bp, Homo sapiens
ccggcagcggcgcca

SEQ ID NO: 1020763 - DNA, 15 bp, Homo sapiens
cggcagcggcgccag

SEQ ID NO: 1020764 - DNA, 15 bp, Homo sapiens
ggcagcggcgccagg

SEQ ID NO: 1020765 - DNA, 15 bp, Homo sapiens
gcagcggcgccaggg

SEQ ID NO: 1020766 - DNA, 15 bp, Homo sapiens
cagcggcgccaggga

SEQ ID NO: 1020767 - DNA, 15 bp, Homo sapiens
agcggcgccagggac

SEQ ID NO: 1020768 - DNA, 15 bp, Homo sapiens
gcggcgccagggact

SEQ ID NO: 1020769 - DNA, 15 bp, Homo sapiens
cggcgccagggactt

SEQ ID NO: 1020770 - DNA, 15 bp, Homo sapiens
ggcgccagggacttg

SEQ ID NO: 1020771 - DNA, 15 bp, Homo sapiens
gcgccagggacttgg

SEQ ID NO: 1020772 - DNA, 15 bp, Homo sapiens
cgccagggacttggg

SEQ ID NO: 1020773 - DNA, 15 bp, Homo sapiens
gccagggacttgggt

SEQ ID NO: 1020774 - DNA, 15 bp, Homo sapiens
ccagggacttgggtg

SEQ ID NO: 1020775 - DNA, 15 bp, Homo sapiens
cagggacttgggtgc

SEQ ID NO: 1020776 - DNA, 15 bp, Homo sapiens
agggacttgggtgcg

SEQ ID NO: 1020777 - DNA, 15 bp, Homo sapiens
gggacttgggtgcgg

SEQ ID NO: 1020778 - DNA, 15 bp, Homo sapiens
ggacttgggtgcggg

SEQ ID NO: 1020779 - DNA, 15 bp, Homo sapiens
gacttgggtgcggga

SEQ ID NO: 1020780 - DNA, 15 bp, Homo sapiens
acttgggtgcgggag

SEQ ID NO: 1020781 - DNA, 15 bp, Homo sapiens
cttgggtgcgggagc

SEQ ID NO: 1020782 - DNA, 15 bp, Homo sapiens
ttgggtgcgggagct

SEQ ID NO: 1020783 - DNA, 15 bp, Homo sapiens
tgggtgcgggagctg

SEQ ID NO: 1020784 - DNA, 15 bp, Homo sapiens
gggtgcgggagctgg

SEQ ID NO: 1020785 - DNA, 15 bp, Homo sapiens
ggtgcgggagctggg

SEQ ID NO: 1020786 - DNA, 15 bp, Homo sapiens
gtgcgggagctgggg

SEQ ID NO: 1020787 - DNA, 15 bp, Homo sapiens
tgcgggagctgggga

SEQ ID NO: 1020788 - DNA, 15 bp, Homo sapiens
gcgggagctggggat

SEQ ID NO: 1020789 - DNA, 15 bp, Homo sapiens
cgggagctggggatg

SEQ ID NO: 1020790 - DNA, 15 bp, Homo sapiens
gggagctggggatgc

SEQ ID NO: 1020791 - DNA, 15 bp, Homo sapiens
ggagctggggatgct

SEQ ID NO: 1020792 - DNA, 15 bp, Homo sapiens
gagctggggatgctt

SEQ ID NO: 1020793 - DNA, 15 bp, Homo sapiens
agctggggatgcttc

SEQ ID NO: 1020794 - DNA, 15 bp, Homo sapiens
gctggggatgcttcc

SEQ ID NO: 1020795 - DNA, 15 bp, Homo sapiens
ctggggatgcttccc

SEQ ID NO: 1020796 - DNA, 15 bp, Homo sapiens
tggggatgcttcccc

SEQ ID NO: 1020797 - DNA, 15 bp, Homo sapiens
ggggatgcttccccc

SEQ ID NO: 1020798 - DNA, 15 bp, Homo sapiens
gggatgcttccccct

SEQ ID NO: 1020799 - DNA, 15 bp, Homo sapiens
ggatgcttccccctg

SEQ ID NO: 1020800 - DNA, 15 bp, Homo sapiens
gatgcttccccctgc

SEQ ID NO: 1020801 - DNA, 15 bp, Homo sapiens
atgcttccccctgct

SEQ ID NO: 1020802 - DNA, 15 bp, Homo sapiens
tgcttccccctgctc

SEQ ID NO: 1020803 - DNA, 15 bp, Homo sapiens
gcttccccctgctcg

SEQ ID NO: 1020804 - DNA, 15 bp, Homo sapiens
cttccccctgctcgg

SEQ ID NO: 1020805 - DNA, 15 bp, Homo sapiens
ttccccctgctcggc

SEQ ID NO: 1020806 - DNA, 15 bp, Homo sapiens
tccccctgctcggct

SEQ ID NO: 1020807 - DNA, 15 bp, Homo sapiens
ccccctgctcggctg

SEQ ID NO: 1020808 - DNA, 15 bp, Homo sapiens
cccctgctcggctgg

SEQ ID NO: 1020809 - DNA, 15 bp, Homo sapiens
ccctgctcggctggg

SEQ ID NO: 1020810 - DNA, 15 bp, Homo sapiens
cctgctcggctgggg

SEQ ID NO: 1020811 - DNA, 15 bp, Homo sapiens
ctgctcggctggggg

SEQ ID NO: 1020812 - DNA, 15 bp, Homo sapiens
tgctcggctgggggt

SEQ ID NO: 1020813 - DNA, 15 bp, Homo sapiens
gctcggctgggggtc

SEQ ID NO: 1020814 - DNA, 15 bp, Homo sapiens
ctcggctgggggtcc

SEQ ID NO: 1020815 - DNA, 15 bp, Homo sapiens
tcggctgggggtcca

SEQ ID NO: 1020816 - DNA, 15 bp, Homo sapiens
cggctgggggtccaa

SEQ ID NO: 1020817 - DNA, 15 bp, Homo sapiens
ggctgggggtccaag

SEQ ID NO: 1020818 - DNA, 15 bp, Homo sapiens
gctgggggtccaaga

SEQ ID NO: 1020819 - DNA, 15 bp, Homo sapiens
ctgggggtccaagaa

SEQ ID NO: 1020820 - DNA, 15 bp, Homo sapiens
tgggggtccaagaac

SEQ ID NO: 1020821 - DNA, 15 bp, Homo sapiens
gggggtccaagaaca

SEQ ID NO: 1020822 - DNA, 15 bp, Homo sapiens
ggggtccaagaacag

SEQ ID NO: 1020823 - DNA, 15 bp, Homo sapiens
gggtccaagaacagg

SEQ ID NO: 1020824 - DNA, 15 bp, Homo sapiens
ggtccaagaacaggc

SEQ ID NO: 1020825 - DNA, 15 bp, Homo sapiens
gtccaagaacaggca

SEQ ID NO: 1020826 - DNA, 15 bp, Homo sapiens
tccaagaacaggcac

SEQ ID NO: 1020827 - DNA, 15 bp, Homo sapiens
ccaagaacaggcact

SEQ ID NO: 1020828 - DNA, 15 bp, Homo sapiens
caagaacaggcactt

SEQ ID NO: 1020829 - DNA, 15 bp, Homo sapiens
aagaacaggcacttg

SEQ ID NO: 1020830 - DNA, 15 bp, Homo sapiens
agaacaggcacttgg

SEQ ID NO: 1020831 - DNA, 15 bp, Homo sapiens
gaacaggcacttggt

SEQ ID NO: 1020832 - DNA, 15 bp, Homo sapiens
aacaggcacttggta

SEQ ID NO: 1020833 - DNA, 15 bp, Homo sapiens
acaggcacttggtag

SEQ ID NO: 1020834 - DNA, 15 bp, Homo sapiens
caggcacttggtagc

SEQ ID NO: 1020835 - DNA, 15 bp, Homo sapiens
aggcacttggtagcg

SEQ ID NO: 1020836 - DNA, 15 bp, Homo sapiens
ggcacttggtagcgc

SEQ ID NO: 1020837 - DNA, 15 bp, Homo sapiens
gcacttggtagcgct

SEQ ID NO: 1020838 - DNA, 15 bp, Homo sapiens
cacttggtagcgctg

SEQ ID NO: 1020839 - DNA, 15 bp, Homo sapiens
acttggtagcgctgg

SEQ ID NO: 1020840 - DNA, 15 bp, Homo sapiens
cttggtagcgctggg

SEQ ID NO: 1020841 - DNA, 15 bp, Homo sapiens
ttggtagcgctgggg

SEQ ID NO: 1020842 - DNA, 15 bp, Homo sapiens
tggtagcgctggggt

SEQ ID NO: 1020843 - DNA, 15 bp, Homo sapiens
ggtagcgctggggtc

SEQ ID NO: 1020844 - DNA, 15 bp, Homo sapiens
gtagcgctggggtcc

SEQ ID NO: 1020845 - DNA, 15 bp, Homo sapiens
tagcgctggggtcct

SEQ ID NO: 1020846 - DNA, 15 bp, Homo sapiens
agcgctggggtcctg

SEQ ID NO: 1020847 - DNA, 15 bp, Homo sapiens
gcgctggggtcctgc

SEQ ID NO: 1020848 - DNA, 15 bp, Homo sapiens
cgctggggtcctgcg

SEQ ID NO: 1020849 - DNA, 15 bp, Homo sapiens
gctggggtcctgcgg

SEQ ID NO: 1020850 - DNA, 15 bp, Homo sapiens
ctggggtcctgcggt

SEQ ID NO: 1020851 - DNA, 15 bp, Homo sapiens
tggggtcctgcggtc

SEQ ID NO: 1020852 - DNA, 15 bp, Homo sapiens
ggggtcctgcggtca

SEQ ID NO: 1020853 - DNA, 15 bp, Homo sapiens
gggtcctgcggtcag

SEQ ID NO: 1020854 - DNA, 15 bp, Homo sapiens
ggtcctgcggtcaga

SEQ ID NO: 1020855 - DNA, 15 bp, Homo sapiens
gtcctgcggtcagat

SEQ ID NO: 1020856 - DNA, 15 bp, Homo sapiens
tcctgcggtcagatg

SEQ ID NO: 1020857 - DNA, 15 bp, Homo sapiens
cctgcggtcagatgc

SEQ ID NO: 1020858 - DNA, 15 bp, Homo sapiens
ctgcggtcagatgcg

SEQ ID NO: 1020859 - DNA, 15 bp, Homo sapiens
tgcggtcagatgcgg

SEQ ID NO: 1020860 - DNA, 15 bp, Homo sapiens
gcggtcagatgcggg

SEQ ID NO: 1020861 - DNA, 15 bp, Homo sapiens
cggtcagatgcgggt

SEQ ID NO: 1020862 - DNA, 15 bp, Homo sapiens
ggtcagatgcgggta

SEQ ID NO: 1020863 - DNA, 15 bp, Homo sapiens
gtcagatgcgggtac

SEQ ID NO: 1020864 - DNA, 15 bp, Homo sapiens
tcagatgcgggtact

SEQ ID NO: 1020865 - DNA, 15 bp, Homo sapiens
cagatgcgggtactc

SEQ ID NO: 1020866 - DNA, 15 bp, Homo sapiens
agatgcgggtactcg

SEQ ID NO: 1020867 - DNA, 15 bp, Homo sapiens
gatgcgggtactcgg

SEQ ID NO: 1020868 - DNA, 15 bp, Homo sapiens
atgcgggtactcggc

SEQ ID NO: 1020869 - DNA, 15 bp, Homo sapiens
tgcgggtactcggcg

SEQ ID NO: 1020870 - DNA, 15 bp, Homo sapiens
gcgggtactcggcgt

SEQ ID NO: 1020871 - DNA, 15 bp, Homo sapiens
cgggtactcggcgtc

SEQ ID NO: 1020872 - DNA, 15 bp, Homo sapiens
gggtactcggcgtct

SEQ ID NO: 1020873 - DNA, 15 bp, Homo sapiens
ggtactcggcgtctc

SEQ ID NO: 1020874 - DNA, 15 bp, Homo sapiens
gtactcggcgtctcc

SEQ ID NO: 1020875 - DNA, 15 bp, Homo sapiens
tactcggcgtctcct

SEQ ID NO: 1020876 - DNA, 15 bp, Homo sapiens
actcggcgtctccta

SEQ ID NO: 1020877 - DNA, 15 bp, Homo sapiens
ctcggcgtctcctag

SEQ ID NO: 1020878 - DNA, 15 bp, Homo sapiens
tcggcgtctcctagg

SEQ ID NO: 1020879 - DNA, 15 bp, Homo sapiens
cggcgtctcctaggc

SEQ ID NO: 1020880 - DNA, 15 bp, Homo sapiens
ggcgtctcctaggcg

SEQ ID NO: 1020881 - DNA, 15 bp, Homo sapiens
gcgtctcctaggcgc

SEQ ID NO: 1020882 - DNA, 15 bp, Homo sapiens
cgtctcctaggcgcg

SEQ ID NO: 1020883 - DNA, 15 bp, Homo sapiens
gtctcctaggcgcgg

SEQ ID NO: 1020884 - DNA, 15 bp, Homo sapiens
tctcctaggcgcggt

SEQ ID NO: 1020885 - DNA, 15 bp, Homo sapiens
ctcctaggcgcggtg

SEQ ID NO: 1020886 - DNA, 15 bp, Homo sapiens
tcctaggcgcggtgg

SEQ ID NO: 1020887 - DNA, 15 bp, Homo sapiens
cctaggcgcggtgga

SEQ ID NO: 1020888 - DNA, 15 bp, Homo sapiens
ctaggcgcggtggac

SEQ ID NO: 1020889 - DNA, 15 bp, Homo sapiens
taggcgcggtggact

SEQ ID NO: 1020890 - DNA, 15 bp, Homo sapiens
aggcgcggtggactg

SEQ ID NO: 1020891 - DNA, 15 bp, Homo sapiens
ggcgcggtggactgg

SEQ ID NO: 1020892 - DNA, 15 bp, Homo sapiens
gcgcggtggactggc

SEQ ID NO: 1020893 - DNA, 15 bp, Homo sapiens
cgcggtggactggca

SEQ ID NO: 1020894 - DNA, 15 bp, Homo sapiens
gcggtggactggcag

SEQ ID NO: 1020895 - DNA, 15 bp, Homo sapiens
cggtggactggcagc

SEQ ID NO: 1020896 - DNA, 15 bp, Homo sapiens
ggtggactggcagct

SEQ ID NO: 1020897 - DNA, 15 bp, Homo sapiens
gtggactggcagctc

SEQ ID NO: 1020898 - DNA, 15 bp, Homo sapiens
tggactggcagctct

SEQ ID NO: 1020899 - DNA, 15 bp, Homo sapiens
ggactggcagctctg

SEQ ID NO: 1020900 - DNA, 15 bp, Homo sapiens
gactggcagctctgc

SEQ ID NO: 1020901 - DNA, 15 bp, Homo sapiens
actggcagctctgct

SEQ ID NO: 1020902 - DNA, 15 bp, Homo sapiens
ctggcagctctgctc

SEQ ID NO: 1020903 - DNA, 15 bp, Homo sapiens
tggcagctctgctcg

SEQ ID NO: 1020904 - DNA, 15 bp, Homo sapiens
ggcagctctgctcgg

SEQ ID NO: 1020905 - DNA, 15 bp, Homo sapiens
gcagctctgctcggc

SEQ ID NO: 1020906 - DNA, 15 bp, Homo sapiens
cagctctgctcggcg

SEQ ID NO: 1020907 - DNA, 15 bp, Homo sapiens
agctctgctcggcgc

SEQ ID NO: 1020908 - DNA, 15 bp, Homo sapiens
gctctgctcggcgca

SEQ ID NO: 1020909 - DNA, 15 bp, Homo sapiens
ctctgctcggcgcag

SEQ ID NO: 1020910 - DNA, 15 bp, Homo sapiens
tctgctcggcgcaga

SEQ ID NO: 1020911 - DNA, 15 bp, Homo sapiens
ctgctcggcgcagaa

SEQ ID NO: 1020912 - DNA, 15 bp, Homo sapiens
tgctcggcgcagaag

SEQ ID NO: 1020913 - DNA, 15 bp, Homo sapiens
gctcggcgcagaaga

SEQ ID NO: 1020914 - DNA, 15 bp, Homo sapiens
ctcggcgcagaagac

SEQ ID NO: 1020915 - DNA, 15 bp, Homo sapiens
tcggcgcagaagacc

SEQ ID NO: 1020916 - DNA, 15 bp, Homo sapiens
cggcgcagaagacct

SEQ ID NO: 1020917 - DNA, 15 bp, Homo sapiens
ggcgcagaagacctc

SEQ ID NO: 1020918 - DNA, 15 bp, Homo sapiens
gcgcagaagacctcg

SEQ ID NO: 1020919 - DNA, 15 bp, Homo sapiens
cgcagaagacctcgg

SEQ ID NO: 1020920 - DNA, 15 bp, Homo sapiens
gcagaagacctcggg

SEQ ID NO: 1020921 - DNA, 15 bp, Homo sapiens
cagaagacctcgggg

SEQ ID NO: 1020922 - DNA, 15 bp, Homo sapiens
agaagacctcgggga

SEQ ID NO: 1020923 - DNA, 15 bp, Homo sapiens
gaagacctcggggag

SEQ ID NO: 1020924 - DNA, 15 bp, Homo sapiens
aagacctcggggagc

SEQ ID NO: 1020925 - DNA, 15 bp, Homo sapiens
agacctcggggagcc

SEQ ID NO: 1020926 - DNA, 15 bp, Homo sapiens
gacctcggggagcca

SEQ ID NO: 1020927 - DNA, 15 bp, Homo sapiens
acctcggggagccaa

SEQ ID NO: 1020928 - DNA, 15 bp, Homo sapiens
cctcggggagccaag

SEQ ID NO: 1020929 - DNA, 15 bp, Homo sapiens
ctcggggagccaagg

SEQ ID NO: 1020930 - DNA, 15 bp, Homo sapiens
tcggggagccaaggg

SEQ ID NO: 1020931 - DNA, 15 bp, Homo sapiens
cggggagccaaggga

SEQ ID NO: 1020932 - DNA, 15 bp, Homo sapiens
ggggagccaagggaa

SEQ ID NO: 1020933 - DNA, 15 bp, Homo sapiens
gggagccaagggaag

SEQ ID NO: 1020934 - DNA, 15 bp, Homo sapiens
ggagccaagggaagc

SEQ ID NO: 1020935 - DNA, 15 bp, Homo sapiens
gagccaagggaagcg

SEQ ID NO: 1020936 - DNA, 15 bp, Homo sapiens
agccaagggaagcga

SEQ ID NO: 1020937 - DNA, 15 bp, Homo sapiens
gccaagggaagcgac

SEQ ID NO: 1020938 - DNA, 15 bp, Homo sapiens
ccaagggaagcgacc

SEQ ID NO: 1020939 - DNA, 15 bp, Homo sapiens
caagggaagcgaccc

SEQ ID NO: 1020940 - DNA, 15 bp, Homo sapiens
aagggaagcgacccc

SEQ ID NO: 1020941 - DNA, 15 bp, Homo sapiens
agggaagcgaccccg

SEQ ID NO: 1020942 - DNA, 15 bp, Homo sapiens
gggaagcgaccccga

SEQ ID NO: 1020943 - DNA, 15 bp, Homo sapiens
ggaagcgaccccgag

SEQ ID NO: 1020944 - DNA, 15 bp, Homo sapiens
gaagcgaccccgagc

SEQ ID NO: 1020945 - DNA, 15 bp, Homo sapiens
aagcgaccccgagct

SEQ ID NO: 1020946 - DNA, 15 bp, Homo sapiens
agcgaccccgagctc

SEQ ID NO: 1020947 - DNA, 15 bp, Homo sapiens
gcgaccccgagctca

SEQ ID NO: 1020948 - DNA, 15 bp, Homo sapiens
cgaccccgagctcaa

SEQ ID NO: 1020949 - DNA, 15 bp, Homo sapiens
gaccccgagctcaag

SEQ ID NO: 1020950 - DNA, 15 bp, Homo sapiens
accccgagctcaagg

SEQ ID NO: 1020951 - DNA, 15 bp, Homo sapiens
ccccgagctcaagga

SEQ ID NO: 1020952 - DNA, 15 bp, Homo sapiens
cccgagctcaaggag

SEQ ID NO: 1020953 - DNA, 15 bp, Homo sapiens
ccgagctcaaggagc

SEQ ID NO: 1020954 - DNA, 15 bp, Homo sapiens
cgagctcaaggagca

SEQ ID NO: 1020955 - DNA, 15 bp, Homo sapiens
gagctcaaggagcag

SEQ ID NO: 1020956 - DNA, 15 bp, Homo sapiens
agctcaaggagcagg

SEQ ID NO: 1020957 - DNA, 15 bp, Homo sapiens
gctcaaggagcaggg

SEQ ID NO: 1020958 - DNA, 15 bp, Homo sapiens
ctcaaggagcagggg

SEQ ID NO: 1020959 - DNA, 15 bp, Homo sapiens
tcaaggagcaggggc

SEQ ID NO: 1020960 - DNA, 15 bp, Homo sapiens
caaggagcaggggcg

SEQ ID NO: 1020961 - DNA, 15 bp, Homo sapiens
aaggagcaggggcga

SEQ ID NO: 1020962 - DNA, 15 bp, Homo sapiens
aggagcaggggcgag

SEQ ID NO: 1020963 - DNA, 15 bp, Homo sapiens
ggagcaggggcgagc

SEQ ID NO: 1020964 - DNA, 15 bp, Homo sapiens
gagcaggggcgagca

SEQ ID NO: 1020965 - DNA, 15 bp, Homo sapiens
agcaggggcgagcag

SEQ ID NO: 1020966 - DNA, 15 bp, Homo sapiens
gcaggggcgagcaga

SEQ ID NO: 1020967 - DNA, 15 bp, Homo sapiens
caggggcgagcagag

SEQ ID NO: 1020968 - DNA, 15 bp, Homo sapiens
aggggcgagcagagc

SEQ ID NO: 1020969 - DNA, 15 bp, Homo sapiens
ggggcgagcagagcg

SEQ ID NO: 1020970 - DNA, 15 bp, Homo sapiens
gggcgagcagagcgc

SEQ ID NO: 1020971 - DNA, 15 bp, Homo sapiens
ggcgagcagagcgcg

SEQ ID NO: 1020972 - DNA, 15 bp, Homo sapiens
gcgagcagagcgcgg

SEQ ID NO: 1020973 - DNA, 15 bp, Homo sapiens
cgagcagagcgcgga

SEQ ID NO: 1020974 - DNA, 15 bp, Homo sapiens
gagcagagcgcggag

SEQ ID NO: 1020975 - DNA, 15 bp, Homo sapiens
agcagagcgcggaga

SEQ ID NO: 1020976 - DNA, 15 bp, Homo sapiens
gcagagcgcggagag

SEQ ID NO: 1020977 - DNA, 15 bp, Homo sapiens
cagagcgcggagagg

SEQ ID NO: 1020978 - DNA, 15 bp, Homo sapiens
agagcgcggagaggc

SEQ ID NO: 1020979 - DNA, 15 bp, Homo sapiens
gagcgcggagaggct

SEQ ID NO: 1020980 - DNA, 15 bp, Homo sapiens
agcgcggagaggcta

SEQ ID NO: 1020981 - DNA, 15 bp, Homo sapiens
gcgcggagaggctag

SEQ ID NO: 1020982 - DNA, 15 bp, Homo sapiens
cgcggagaggctaga

SEQ ID NO: 1020983 - DNA, 15 bp, Homo sapiens
gcggagaggctagac

SEQ ID NO: 1020984 - DNA, 15 bp, Homo sapiens
cggagaggctagacc

SEQ ID NO: 1020985 - DNA, 15 bp, Homo sapiens
ggagaggctagaccg

SEQ ID NO: 1020986 - DNA, 15 bp, Homo sapiens
gagaggctagaccgg

SEQ ID NO: 1020987 - DNA, 15 bp, Homo sapiens
agaggctagaccggg

SEQ ID NO: 1020988 - DNA, 15 bp, Homo sapiens
gaggctagaccgggc

SEQ ID NO: 1020989 - DNA, 15 bp, Homo sapiens
aggctagaccgggcc

SEQ ID NO: 1020990 - DNA, 15 bp, Homo sapiens
ggctagaccgggcca

SEQ ID NO: 1020991 - DNA, 15 bp, Homo sapiens
gctagaccgggccag

SEQ ID NO: 1020992 - DNA, 15 bp, Homo sapiens
ctagaccgggccagg

SEQ ID NO: 1020993 - DNA, 15 bp, Homo sapiens
tagaccgggccagga

SEQ ID NO: 1020994 - DNA, 15 bp, Homo sapiens
agaccgggccaggag

SEQ ID NO: 1020995 - DNA, 15 bp, Homo sapiens
gaccgggccaggagg

SEQ ID NO: 1020996 - DNA, 15 bp, Homo sapiens
accgggccaggaggg

SEQ ID NO: 1020997 - DNA, 15 bp, Homo sapiens
ccgggccaggaggga

SEQ ID NO: 1020998 - DNA, 15 bp, Homo sapiens
cgggccaggagggag

SEQ ID NO: 1020999 - DNA, 15 bp, Homo sapiens
gggccaggagggagg

SEQ ID NO: 1021000 - DNA, 15 bp, Homo sapiens
ggccaggagggaggc

SEQ ID NO: 1021001 - DNA, 15 bp, Homo sapiens
gccaggagggaggct

SEQ ID NO: 1021002 - DNA, 15 bp, Homo sapiens
ccaggagggaggctg

SEQ ID NO: 1021003 - DNA, 15 bp, Homo sapiens
caggagggaggctgc

SEQ ID NO: 1021004 - DNA, 15 bp, Homo sapiens
aggagggaggctgcc

SEQ ID NO: 1021005 - DNA, 15 bp, Homo sapiens
ggagggaggctgccc

SEQ ID NO: 1021006 - DNA, 15 bp, Homo sapiens
gagggaggctgccct

SEQ ID NO: 1021007 - DNA, 15 bp, Homo sapiens
agggaggctgccctg

SEQ ID NO: 1021008 - DNA, 15 bp, Homo sapiens
gggaggctgccctgt

SEQ ID NO: 1021009 - DNA, 15 bp, Homo sapiens
ggaggctgccctgtt

SEQ ID NO: 1021010 - DNA, 15 bp, Homo sapiens
gaggctgccctgttg

SEQ ID NO: 1021011 - DNA, 15 bp, Homo sapiens
aggctgccctgttgg

SEQ ID NO: 1021012 - DNA, 15 bp, Homo sapiens
ggctgccctgttggg

SEQ ID NO: 1021013 - DNA, 15 bp, Homo sapiens
gctgccctgttggga

SEQ ID NO: 1021014 - DNA, 15 bp, Homo sapiens
ctgccctgttgggag

SEQ ID NO: 1021015 - DNA, 15 bp, Homo sapiens
tgccctgttgggagg

SEQ ID NO: 1021016 - DNA, 15 bp, Homo sapiens
gccctgttgggaggc

SEQ ID NO: 1021017 - DNA, 15 bp, Homo sapiens
ccctgttgggaggca

SEQ ID NO: 1021018 - DNA, 15 bp, Homo sapiens
cctgttgggaggcac

SEQ ID NO: 1021019 - DNA, 15 bp, Homo sapiens
ctgttgggaggcact

SEQ ID NO: 1021020 - DNA, 15 bp, Homo sapiens
tgttgggaggcactc

SEQ ID NO: 1021021 - DNA, 15 bp, Homo sapiens
gttgggaggcactcg

SEQ ID NO: 1021022 - DNA, 15 bp, Homo sapiens
ttgggaggcactcga

SEQ ID NO: 1021023 - DNA, 15 bp, Homo sapiens
tgggaggcactcgag

SEQ ID NO: 1021024 - DNA, 15 bp, Homo sapiens
gggaggcactcgagc

SEQ ID NO: 1021025 - DNA, 15 bp, Homo sapiens
ggaggcactcgagcg

SEQ ID NO: 1021026 - DNA, 15 bp, Homo sapiens
gaggcactcgagcgc

SEQ ID NO: 1021027 - DNA, 15 bp, Homo sapiens
aggcactcgagcgcc

SEQ ID NO: 1021028 - DNA, 15 bp, Homo sapiens
ggcactcgagcgccc

SEQ ID NO: 1021029 - DNA, 15 bp, Homo sapiens
gcactcgagcgcccg

SEQ ID NO: 1021030 - DNA, 15 bp, Homo sapiens
cactcgagcgcccgg

SEQ ID NO: 1021031 - DNA, 15 bp, Homo sapiens
actcgagcgcccggc

SEQ ID NO: 1021032 - DNA, 15 bp, Homo sapiens
ctcgagcgcccggcc

SEQ ID NO: 1021033 - DNA, 15 bp, Homo sapiens
tcgagcgcccggccc

SEQ ID NO: 1021034 - DNA, 15 bp, Homo sapiens
cgagcgcccggcccg

SEQ ID NO: 1021035 - DNA, 15 bp, Homo sapiens
gagcgcccggcccgg

SEQ ID NO: 1021036 - DNA, 15 bp, Homo sapiens
agcgcccggcccggc

SEQ ID NO: 1021037 - DNA, 15 bp, Homo sapiens
gcgcccggcccggcc

SEQ ID NO: 1021038 - DNA, 15 bp, Homo sapiens
cgcccggcccggccc

SEQ ID NO: 1021039 - DNA, 15 bp, Homo sapiens
gcccggcccggccct

SEQ ID NO: 1021040 - DNA, 15 bp, Homo sapiens
cccggcccggccctc

SEQ ID NO: 1021041 - DNA, 15 bp, Homo sapiens
ccggcccggccctct

SEQ ID NO: 1021042 - DNA, 15 bp, Homo sapiens
cggcccggccctctc

SEQ ID NO: 1021043 - DNA, 15 bp, Homo sapiens
ggcccggccctctct

SEQ ID NO: 1021044 - DNA, 15 bp, Homo sapiens
gcccggccctctctc

SEQ ID NO: 1021045 - DNA, 15 bp, Homo sapiens
cccggccctctctcc

SEQ ID NO: 1021046 - DNA, 15 bp, Homo sapiens
ccggccctctctcca

SEQ ID NO: 1021047 - DNA, 15 bp, Homo sapiens
cggccctctctccag

SEQ ID NO: 1021048 - DNA, 15 bp, Homo sapiens
ggccctctctccagc

SEQ ID NO: 1021049 - DNA, 15 bp, Homo sapiens
gccctctctccagcg

SEQ ID NO: 1021050 - DNA, 15 bp, Homo sapiens
ccctctctccagcgg

SEQ ID NO: 1021051 - DNA, 15 bp, Homo sapiens
cctctctccagcgga

SEQ ID NO: 1021052 - DNA, 15 bp, Homo sapiens
ctctctccagcggag

SEQ ID NO: 1021053 - DNA, 15 bp, Homo sapiens
tctctccagcggagt

SEQ ID NO: 1021054 - DNA, 15 bp, Homo sapiens
ctctccagcggagtc

SEQ ID NO: 1021055 - DNA, 15 bp, Homo sapiens
tctccagcggagtct

SEQ ID NO: 1021056 - DNA, 15 bp, Homo sapiens
ctccagcggagtctg

SEQ ID NO: 1021057 - DNA, 15 bp, Homo sapiens
tccagcggagtctgg

SEQ ID NO: 1021058 - DNA, 15 bp, Homo sapiens
ccagcggagtctggg

SEQ ID NO: 1021059 - DNA, 15 bp, Homo sapiens
cagcggagtctgggc

SEQ ID NO: 1021060 - DNA, 15 bp, Homo sapiens
agcggagtctgggca

SEQ ID NO: 1021061 - DNA, 15 bp, Homo sapiens
gcggagtctgggcag

SEQ ID NO: 1021062 - DNA, 15 bp, Homo sapiens
cggagtctgggcagg

SEQ ID NO: 1021063 - DNA, 15 bp, Homo sapiens
ggagtctgggcaggt

SEQ ID NO: 1021064 - DNA, 15 bp, Homo sapiens
gagtctgggcaggtg

SEQ ID NO: 1021065 - DNA, 15 bp, Homo sapiens
agtctgggcaggtgg

SEQ ID NO: 1021066 - DNA, 15 bp, Homo sapiens
gtctgggcaggtggg

SEQ ID NO: 1021067 - DNA, 15 bp, Homo sapiens
tctgggcaggtggga

SEQ ID NO: 1021068 - DNA, 15 bp, Homo sapiens
ctgggcaggtgggag

SEQ ID NO: 1021069 - DNA, 15 bp, Homo sapiens
tgggcaggtgggagg

SEQ ID NO: 1021070 - DNA, 15 bp, Homo sapiens
gggcaggtgggagga

SEQ ID NO: 1021071 - DNA, 15 bp, Homo sapiens
ggcaggtgggaggac

SEQ ID NO: 1021072 - DNA, 15 bp, Homo sapiens
gcaggtgggaggact

SEQ ID NO: 1021073 - DNA, 15 bp, Homo sapiens
caggtgggaggactc

SEQ ID NO: 1021074 - DNA, 15 bp, Homo sapiens
aggtgggaggactcg

SEQ ID NO: 1021075 - DNA, 15 bp, Homo sapiens
ggtgggaggactcgc

SEQ ID NO: 1021076 - DNA, 15 bp, Homo sapiens
gtgggaggactcgca

SEQ ID NO: 1021077 - DNA, 15 bp, Homo sapiens
tgggaggactcgcag

SEQ ID NO: 1021078 - DNA, 15 bp, Homo sapiens
gggaggactcgcagt

SEQ ID NO: 1021079 - DNA, 15 bp, Homo sapiens
ggaggactcgcagtt

SEQ ID NO: 1021080 - DNA, 15 bp, Homo sapiens
gaggactcgcagttc

SEQ ID NO: 1021081 - DNA, 15 bp, Homo sapiens
aggactcgcagttcc

SEQ ID NO: 1021082 - DNA, 15 bp, Homo sapiens
ggactcgcagttcca

SEQ ID NO: 1021083 - DNA, 15 bp, Homo sapiens
gactcgcagttccag

SEQ ID NO: 1021084 - DNA, 15 bp, Homo sapiens
actcgcagttccaga

SEQ ID NO: 1021085 - DNA, 15 bp, Homo sapiens
ctcgcagttccagag

SEQ ID NO: 1021086 - DNA, 15 bp, Homo sapiens
tcgcagttccagagg

SEQ ID NO: 1021087 - DNA, 15 bp, Homo sapiens
cgcagttccagaggg

SEQ ID NO: 1021088 - DNA, 15 bp, Homo sapiens
gcagttccagagggg

SEQ ID NO: 1021089 - DNA, 15 bp, Homo sapiens
cagttccagagggga

SEQ ID NO: 1021090 - DNA, 15 bp, Homo sapiens
agttccagaggggac

SEQ ID NO: 1021091 - DNA, 15 bp, Homo sapiens
gttccagaggggact

SEQ ID NO: 1021092 - DNA, 15 bp, Homo sapiens
ttccagaggggactc

SEQ ID NO: 1021093 - DNA, 15 bp, Homo sapiens
tccagaggggactct

SEQ ID NO: 1021094 - DNA, 15 bp, Homo sapiens
ccagaggggactcta

SEQ ID NO: 1021095 - DNA, 15 bp, Homo sapiens
cagaggggactctaa

SEQ ID NO: 1021096 - DNA, 15 bp, Homo sapiens
agaggggactctaag

SEQ ID NO: 1021097 - DNA, 15 bp, Homo sapiens
gaggggactctaagg

SEQ ID NO: 1021098 - DNA, 15 bp, Homo sapiens
aggggactctaaggg

SEQ ID NO: 1021099 - DNA, 15 bp, Homo sapiens
ggggactctaagggt

SEQ ID NO: 1021100 - DNA, 15 bp, Homo sapiens
gggactctaagggtc

SEQ ID NO: 1021101 - DNA, 15 bp, Homo sapiens
ggactctaagggtcc

SEQ ID NO: 1021102 - DNA, 15 bp, Homo sapiens
gactctaagggtccg

SEQ ID NO: 1021103 - DNA, 15 bp, Homo sapiens
actctaagggtccga

SEQ ID NO: 1021104 - DNA, 15 bp, Homo sapiens
ctctaagggtccgag

SEQ ID NO: 1021105 - DNA, 15 bp, Homo sapiens
tctaagggtccgagc

SEQ ID NO: 1021106 - DNA, 15 bp, Homo sapiens
ctaagggtccgagca

SEQ ID NO: 1021107 - DNA, 15 bp, Homo sapiens
taagggtccgagcag

SEQ ID NO: 1021108 - DNA, 15 bp, Homo sapiens
aagggtccgagcagg

SEQ ID NO: 1021109 - DNA, 15 bp, Homo sapiens
agggtccgagcaggt

SEQ ID NO: 1021110 - DNA, 15 bp, Homo sapiens
gggtccgagcaggtg

SEQ ID NO: 1021111 - DNA, 15 bp, Homo sapiens
ggtccgagcaggtgc

SEQ ID NO: 1021112 - DNA, 15 bp, Homo sapiens
gtccgagcaggtgcc

SEQ ID NO: 1021113 - DNA, 15 bp, Homo sapiens
tccgagcaggtgccc

SEQ ID NO: 1021114 - DNA, 15 bp, Homo sapiens
ccgagcaggtgccct

SEQ ID NO: 1021115 - DNA, 15 bp, Homo sapiens
cgagcaggtgccctc

SEQ ID NO: 1021116 - DNA, 15 bp, Homo sapiens
gagcaggtgccctca

SEQ ID NO: 1021117 - DNA, 15 bp, Homo sapiens
agcaggtgccctcac

SEQ ID NO: 1021118 - DNA, 15 bp, Homo sapiens
gcaggtgccctcact

SEQ ID NO: 1021119 - DNA, 15 bp, Homo sapiens
caggtgccctcactg

SEQ ID NO: 1021120 - DNA, 15 bp, Homo sapiens
aggtgccctcactgg

SEQ ID NO: 1021121 - DNA, 15 bp, Homo sapiens
ggtgccctcactggg

SEQ ID NO: 1021122 - DNA, 15 bp, Homo sapiens
gtgccctcactgggg

SEQ ID NO: 1021123 - DNA, 15 bp, Homo sapiens
aactggatatgccta

SEQ ID NO: 1021124 - DNA, 15 bp, Homo sapiens
actggatatgcctat

SEQ ID NO: 1021125 - DNA, 15 bp, Homo sapiens
ctggatatgcctatg

SEQ ID NO: 1021126 - DNA, 15 bp, Homo sapiens
tggatatgcctatgt

SEQ ID NO: 1021127 - DNA, 15 bp, Homo sapiens
ggatatgcctatgtg

SEQ ID NO: 1021128 - DNA, 15 bp, Homo sapiens
gatatgcctatgtgt

SEQ ID NO: 1021129 - DNA, 15 bp, Homo sapiens
atatgcctatgtgta

SEQ ID NO: 1021130 - DNA, 15 bp, Homo sapiens
tatgcctatgtgtaa

SEQ ID NO: 1021131 - DNA, 15 bp, Homo sapiens
atgcctatgtgtaaa

SEQ ID NO: 1021132 - DNA, 15 bp, Homo sapiens
tgcctatgtgtaaag

SEQ ID NO: 1021133 - DNA, 15 bp, Homo sapiens
gcctatgtgtaaagc

SEQ ID NO: 1021134 - DNA, 15 bp, Homo sapiens
cctatgtgtaaagcg

SEQ ID NO: 1021135 - DNA, 15 bp, Homo sapiens
ctatgtgtaaagcga

SEQ ID NO: 1021136 - DNA, 15 bp, Homo sapiens
tatgtgtaaagcgaa

SEQ ID NO: 1021137 - DNA, 15 bp, Homo sapiens
atgtgtaaagcgaac

SEQ ID NO: 1021138 - DNA, 15 bp, Homo sapiens
tgtgtaaagcgaacc

SEQ ID NO: 1021139 - DNA, 15 bp, Homo sapiens
gtgtaaagcgaacct

SEQ ID NO: 1021140 - DNA, 15 bp, Homo sapiens
tgtaaagcgaacctc

SEQ ID NO: 1021141 - DNA, 15 bp, Homo sapiens
gtaaagcgaacctcg

SEQ ID NO: 1021142 - DNA, 15 bp, Homo sapiens
taaagcgaacctcgc

SEQ ID NO: 1021143 - DNA, 15 bp, Homo sapiens
aaagcgaacctcgca

SEQ ID NO: 1021144 - DNA, 15 bp, Homo sapiens
aagcgaacctcgcaa

SEQ ID NO: 1021145 - DNA, 15 bp, Homo sapiens
agcgaacctcgcaaa

SEQ ID NO: 1021146 - DNA, 15 bp, Homo sapiens
gcgaacctcgcaaag

SEQ ID NO: 1021147 - DNA, 15 bp, Homo sapiens
cgaacctcgcaaagt

SEQ ID NO: 1021148 - DNA, 15 bp, Homo sapiens
gaacctcgcaaagtt

SEQ ID NO: 1021149 - DNA, 15 bp, Homo sapiens
aacctcgcaaagtta

SEQ ID NO: 1021150 - DNA, 15 bp, Homo sapiens
acctcgcaaagttat

SEQ ID NO: 1021151 - DNA, 15 bp, Homo sapiens
cctcgcaaagttatg

SEQ ID NO: 1021152 - DNA, 15 bp, Homo sapiens
ctcgcaaagttatgg

SEQ ID NO: 1021153 - DNA, 15 bp, Homo sapiens
tcgcaaagttatggt

SEQ ID NO: 1021154 - DNA, 15 bp, Homo sapiens
cgcaaagttatggtc

SEQ ID NO: 1021155 - DNA, 15 bp, Homo sapiens
gcaaagttatggtcc

SEQ ID NO: 1021156 - DNA, 15 bp, Homo sapiens
caaagttatggtccc

SEQ ID NO: 1021157 - DNA, 15 bp, Homo sapiens
aaagttatggtccca

SEQ ID NO: 1021158 - DNA, 15 bp, Homo sapiens
aagttatggtcccaa

SEQ ID NO: 1021159 - DNA, 15 bp, Homo sapiens
agttatggtcccaac

SEQ ID NO: 1021160 - DNA, 15 bp, Homo sapiens
gttatggtcccaaca

SEQ ID NO: 1021161 - DNA, 15 bp, Homo sapiens
ttatggtcccaacag

SEQ ID NO: 1021162 - DNA, 15 bp, Homo sapiens
tatggtcccaacaga

SEQ ID NO: 1021163 - DNA, 15 bp, Homo sapiens
atggtcccaacagac

SEQ ID NO: 1021164 - DNA, 15 bp, Homo sapiens
tggtcccaacagacg

SEQ ID NO: 1021165 - DNA, 15 bp, Homo sapiens
ggtcccaacagacgc

SEQ ID NO: 1021166 - DNA, 15 bp, Homo sapiens
gtcccaacagacgct

SEQ ID NO: 1021167 - DNA, 15 bp, Homo sapiens
tcccaacagacgctt

SEQ ID NO: 1021168 - DNA, 15 bp, Homo sapiens
cccaacagacgcttc

SEQ ID NO: 1021169 - DNA, 15 bp, Homo sapiens
ccaacagacgcttcc

SEQ ID NO: 1021170 - DNA, 15 bp, Homo sapiens
caacagacgcttcca

SEQ ID NO: 1021171 - DNA, 15 bp, Homo sapiens
aacagacgcttccag

SEQ ID NO: 1021172 - DNA, 15 bp, Homo sapiens
acagacgcttccaga

SEQ ID NO: 1021173 - DNA, 15 bp, Homo sapiens
cagacgcttccagag

SEQ ID NO: 1021174 - DNA, 15 bp, Homo sapiens
agacgcttccagagc

SEQ ID NO: 1021175 - DNA, 15 bp, Homo sapiens
gacgcttccagagca

SEQ ID NO: 1021176 - DNA, 15 bp, Homo sapiens
acgcttccagagcat

SEQ ID NO: 1021177 - DNA, 15 bp, Homo sapiens
cgcttccagagcatt

SEQ ID NO: 1021178 - DNA, 15 bp, Homo sapiens
gcttccagagcatta

SEQ ID NO: 1021179 - DNA, 15 bp, Homo sapiens
cttccagagcattag

SEQ ID NO: 1021180 - DNA, 15 bp, Homo sapiens
ttccagagcattagg

SEQ ID NO: 1021181 - DNA, 15 bp, Homo sapiens
tccagagcattaggt

SEQ ID NO: 1021182 - DNA, 15 bp, Homo sapiens
ccagagcattaggtc

SEQ ID NO: 1021183 - DNA, 15 bp, Homo sapiens
cagagcattaggtct

SEQ ID NO: 1021184 - DNA, 15 bp, Homo sapiens
agagcattaggtctc

SEQ ID NO: 1021185 - DNA, 15 bp, Homo sapiens
gagcattaggtctct

SEQ ID NO: 1021186 - DNA, 15 bp, Homo sapiens
agcattaggtctcta

SEQ ID NO: 1021187 - DNA, 15 bp, Homo sapiens
gcattaggtctctaa

SEQ ID NO: 1021188 - DNA, 15 bp, Homo sapiens
cattaggtctctaaa

SEQ ID NO: 1021189 - DNA, 15 bp, Homo sapiens
attaggtctctaaac

SEQ ID NO: 1021190 - DNA, 15 bp, Homo sapiens
ttaggtctctaaaca

SEQ ID NO: 1021191 - DNA, 15 bp, Homo sapiens
taggtctctaaacag

SEQ ID NO: 1021192 - DNA, 15 bp, Homo sapiens
aggtctctaaacaga

SEQ ID NO: 1021193 - DNA, 15 bp, Homo sapiens
ggtctctaaacagac

SEQ ID NO: 1021194 - DNA, 15 bp, Homo sapiens
gtctctaaacagact

SEQ ID NO: 1021195 - DNA, 15 bp, Homo sapiens
tctctaaacagactt

SEQ ID NO: 1021196 - DNA, 15 bp, Homo sapiens
ctctaaacagacttg

SEQ ID NO: 1021197 - DNA, 15 bp, Homo sapiens
tctaaacagacttgc

SEQ ID NO: 1021198 - DNA, 15 bp, Homo sapiens
ctaaacagacttgca

SEQ ID NO: 1021199 - DNA, 15 bp, Homo sapiens
taaacagacttgcag

SEQ ID NO: 1021200 - DNA, 15 bp, Homo sapiens
aaacagacttgcagc

SEQ ID NO: 1021201 - DNA, 15 bp, Homo sapiens
aacagacttgcagcg

SEQ ID NO: 1021202 - DNA, 15 bp, Homo sapiens
acagacttgcagcga

SEQ ID NO: 1021203 - DNA, 15 bp, Homo sapiens
cagacttgcagcgac

SEQ ID NO: 1021204 - DNA, 15 bp, Homo sapiens
agacttgcagcgaca

SEQ ID NO: 1021205 - DNA, 15 bp, Homo sapiens
gacttgcagcgacag

SEQ ID NO: 1021206 - DNA, 15 bp, Homo sapiens
acttgcagcgacaga

SEQ ID NO: 1021207 - DNA, 15 bp, Homo sapiens
cttgcagcgacagac

SEQ ID NO: 1021208 - DNA, 15 bp, Homo sapiens
ttgcagcgacagact

SEQ ID NO: 1021209 - DNA, 15 bp, Homo sapiens
tgcagcgacagactt

SEQ ID NO: 1021210 - DNA, 15 bp, Homo sapiens
gcagcgacagacttc

SEQ ID NO: 1021211 - DNA, 15 bp, Homo sapiens
cagcgacagacttct

SEQ ID NO: 1021212 - DNA, 15 bp, Homo sapiens
agcgacagacttcta

SEQ ID NO: 1021213 - DNA, 15 bp, Homo sapiens
gcgacagacttctag

SEQ ID NO: 1021214 - DNA, 15 bp, Homo sapiens
cgacagacttctaga

SEQ ID NO: 1021215 - DNA, 15 bp, Homo sapiens
gacagacttctagag

SEQ ID NO: 1021216 - DNA, 15 bp, Homo sapiens
acagacttctagagg

SEQ ID NO: 1021217 - DNA, 15 bp, Homo sapiens
cagacttctagagga

SEQ ID NO: 1021218 - DNA, 15 bp, Homo sapiens
agacttctagaggag

SEQ ID NO: 1021219 - DNA, 15 bp, Homo sapiens
gacttctagaggaga

SEQ ID NO: 1021220 - DNA, 15 bp, Homo sapiens
acttctagaggagac

SEQ ID NO: 1021221 - DNA, 15 bp, Homo sapiens
cttctagaggagact

SEQ ID NO: 1021222 - DNA, 15 bp, Homo sapiens
ttctagaggagactc

SEQ ID NO: 1021223 - DNA, 15 bp, Homo sapiens
tctagaggagactca

SEQ ID NO: 1021224 - DNA, 15 bp, Homo sapiens
ctagaggagactcaa

SEQ ID NO: 1021225 - DNA, 15 bp, Homo sapiens
tagaggagactcaag

SEQ ID NO: 1021226 - DNA, 15 bp, Homo sapiens
agaggagactcaagc

SEQ ID NO: 1021227 - DNA, 15 bp, Homo sapiens
gaggagactcaagcc

SEQ ID NO: 1021228 - DNA, 15 bp, Homo sapiens
aggagactcaagccg

SEQ ID NO: 1021229 - DNA, 15 bp, Homo sapiens
ggagactcaagccgc

SEQ ID NO: 1021230 - DNA, 15 bp, Homo sapiens
gagactcaagccgca

SEQ ID NO: 1021231 - DNA, 15 bp, Homo sapiens
agactcaagccgcag

SEQ ID NO: 1021232 - DNA, 15 bp, Homo sapiens
gactcaagccgcaga

SEQ ID NO: 1021233 - DNA, 15 bp, Homo sapiens
actcaagccgcagag

SEQ ID NO: 1021234 - DNA, 15 bp, Homo sapiens
ctcaagccgcagagg

SEQ ID NO: 1021235 - DNA, 15 bp, Homo sapiens
tcaagccgcagagga

SEQ ID NO: 1021236 - DNA, 15 bp, Homo sapiens
caagccgcagaggat

SEQ ID NO: 1021237 - DNA, 15 bp, Homo sapiens
aagccgcagaggatt

SEQ ID NO: 1021238 - DNA, 15 bp, Homo sapiens
agccgcagaggatta

SEQ ID NO: 1021239 - DNA, 15 bp, Homo sapiens
gccgcagaggattaa

SEQ ID NO: 1021240 - DNA, 15 bp, Homo sapiens
ccgcagaggattaaa

SEQ ID NO: 1021241 - DNA, 15 bp, Homo sapiens
cgcagaggattaaat

SEQ ID NO: 1021242 - DNA, 15 bp, Homo sapiens
gcagaggattaaatc

SEQ ID NO: 1021243 - DNA, 15 bp, Homo sapiens
cagaggattaaatct

SEQ ID NO: 1021244 - DNA, 15 bp, Homo sapiens
agaggattaaatctc

SEQ ID NO: 1021245 - DNA, 15 bp, Homo sapiens
gaggattaaatctct

SEQ ID NO: 1021246 - DNA, 15 bp, Homo sapiens
aggattaaatctctc

SEQ ID NO: 1021247 - DNA, 15 bp, Homo sapiens
ggattaaatctctct

SEQ ID NO: 1021248 - DNA, 15 bp, Homo sapiens
gattaaatctctctc

SEQ ID NO: 1021249 - DNA, 15 bp, Homo sapiens
attaaatctctctct

SEQ ID NO: 1021250 - DNA, 15 bp, Homo sapiens
ttaaatctctctctc

SEQ ID NO: 1021251 - DNA, 15 bp, Homo sapiens
taaatctctctctct

SEQ ID NO: 1021252 - DNA, 15 bp, Homo sapiens
aaatctctctctctg

SEQ ID NO: 1021253 - DNA, 15 bp, Homo sapiens
aatctctctctctgc

SEQ ID NO: 1021254 - DNA, 15 bp, Homo sapiens
atctctctctctgcc

SEQ ID NO: 1021255 - DNA, 15 bp, Homo sapiens
tctctctctctgcct

SEQ ID NO: 1021256 - DNA, 15 bp, Homo sapiens
ctctctctctgcctg

SEQ ID NO: 1021257 - DNA, 15 bp, Homo sapiens
tctctctctgcctgg

SEQ ID NO: 1021258 - DNA, 15 bp, Homo sapiens
ctctctctgcctggc

SEQ ID NO: 1021259 - DNA, 15 bp, Homo sapiens
tctctctgcctggcc

SEQ ID NO: 1021260 - DNA, 15 bp, Homo sapiens
ctctctgcctggcca

SEQ ID NO: 1021261 - DNA, 15 bp, Homo sapiens
tctctgcctggccac

SEQ ID NO: 1021262 - DNA, 15 bp, Homo sapiens
ctctgcctggccact

SEQ ID NO: 1021263 - DNA, 15 bp, Homo sapiens
tctgcctggccactt

SEQ ID NO: 1021264 - DNA, 15 bp, Homo sapiens
ctgcctggccacttg

SEQ ID NO: 1021265 - DNA, 15 bp, Homo sapiens
tgcctggccacttga

SEQ ID NO: 1021266 - DNA, 15 bp, Homo sapiens
gcctggccacttgat

SEQ ID NO: 1021267 - DNA, 15 bp, Homo sapiens
cctggccacttgatg

SEQ ID NO: 1021268 - DNA, 15 bp, Homo sapiens
ctggccacttgatgg

SEQ ID NO: 1021269 - DNA, 15 bp, Homo sapiens
tggccacttgatggt

SEQ ID NO: 1021270 - DNA, 15 bp, Homo sapiens
ggccacttgatggtg

SEQ ID NO: 1021271 - DNA, 15 bp, Homo sapiens
gccacttgatggtgc

SEQ ID NO: 1021272 - DNA, 15 bp, Homo sapiens
ccacttgatggtgcc

SEQ ID NO: 1021273 - DNA, 15 bp, Homo sapiens
cacttgatggtgcct

SEQ ID NO: 1021274 - DNA, 15 bp, Homo sapiens
acttgatggtgcctc

SEQ ID NO: 1021275 - DNA, 15 bp, Homo sapiens
cttgatggtgcctca

SEQ ID NO: 1021276 - DNA, 15 bp, Homo sapiens
ttgatggtgcctcaa

SEQ ID NO: 1021277 - DNA, 15 bp, Homo sapiens
tgatggtgcctcaag

SEQ ID NO: 1021278 - DNA, 15 bp, Homo sapiens
gatggtgcctcaagg

SEQ ID NO: 1021279 - DNA, 15 bp, Homo sapiens
atggtgcctcaaggt

SEQ ID NO: 1021280 - DNA, 15 bp, Homo sapiens
tggtgcctcaaggtc

SEQ ID NO: 1021281 - DNA, 15 bp, Homo sapiens
ggtgcctcaaggtct

SEQ ID NO: 1021282 - DNA, 15 bp, Homo sapiens
gtgcctcaaggtctg

SEQ ID NO: 1021283 - DNA, 15 bp, Homo sapiens
tgcctcaaggtctgc

SEQ ID NO: 1021284 - DNA, 15 bp, Homo sapiens
gcctcaaggtctgca

SEQ ID NO: 1021285 - DNA, 15 bp, Homo sapiens
cctcaaggtctgcaa

SEQ ID NO: 1021286 - DNA, 15 bp, Homo sapiens
ctcaaggtctgcaag

SEQ ID NO: 1021287 - DNA, 15 bp, Homo sapiens
tcaaggtctgcaagg

SEQ ID NO: 1021288 - DNA, 15 bp, Homo sapiens
caaggtctgcaaggc

SEQ ID NO: 1021289 - DNA, 15 bp, Homo sapiens
aaggtctgcaaggcc

SEQ ID NO: 1021290 - DNA, 15 bp, Homo sapiens
aggtctgcaaggcct

SEQ ID NO: 1021291 - DNA, 15 bp, Homo sapiens
ggtctgcaaggcctg

SEQ ID NO: 1021292 - DNA, 15 bp, Homo sapiens
gtctgcaaggcctgg

SEQ ID NO: 1021293 - DNA, 15 bp, Homo sapiens
tctgcaaggcctggg

SEQ ID NO: 1021294 - DNA, 15 bp, Homo sapiens
ctgcaaggcctgggg

SEQ ID NO: 1021295 - DNA, 15 bp, Homo sapiens
tgcaaggcctggggt

SEQ ID NO: 1021296 - DNA, 15 bp, Homo sapiens
gcaaggcctggggtg

SEQ ID NO: 1021297 - DNA, 15 bp, Homo sapiens
caaggcctggggtgg

SEQ ID NO: 1021298 - DNA, 15 bp, Homo sapiens
aaggcctggggtggg

SEQ ID NO: 1021299 - DNA, 15 bp, Homo sapiens
aggcctggggtggga

SEQ ID NO: 1021300 - DNA, 15 bp, Homo sapiens
ggcctggggtgggac

SEQ ID NO: 1021301 - DNA, 15 bp, Homo sapiens
gcctggggtgggact

SEQ ID NO: 1021302 - DNA, 15 bp, Homo sapiens
cctggggtgggacta

SEQ ID NO: 1021303 - DNA, 15 bp, Homo sapiens
ctggggtgggactaa

SEQ ID NO: 1021304 - DNA, 15 bp, Homo sapiens
tggggtgggactaag

SEQ ID NO: 1021305 - DNA, 15 bp, Homo sapiens
ggggtgggactaagg

SEQ ID NO: 1021306 - DNA, 15 bp, Homo sapiens
gggtgggactaaggg

SEQ ID NO: 1021307 - DNA, 15 bp, Homo sapiens
ggtgggactaagggc

SEQ ID NO: 1021308 - DNA, 15 bp, Homo sapiens
gtgggactaagggcc

SEQ ID NO: 1021309 - DNA, 15 bp, Homo sapiens
tgggactaagggcct

SEQ ID NO: 1021310 - DNA, 15 bp, Homo sapiens
gggactaagggcctg

SEQ ID NO: 1021311 - DNA, 15 bp, Homo sapiens
ggactaagggcctgg

SEQ ID NO: 1021312 - DNA, 15 bp, Homo sapiens
gactaagggcctggg

SEQ ID NO: 1021313 - DNA, 15 bp, Homo sapiens
actaagggcctgggg

SEQ ID NO: 1021314 - DNA, 15 bp, Homo sapiens
ctaagggcctggggg

SEQ ID NO: 1021315 - DNA, 15 bp, Homo sapiens
taagggcctgggggg

SEQ ID NO: 1021316 - DNA, 15 bp, Homo sapiens
aagggcctggggggc

SEQ ID NO: 1021317 - DNA, 15 bp, Homo sapiens
agggcctggggggct

SEQ ID NO: 1021318 - DNA, 15 bp, Homo sapiens
gggcctggggggctg

SEQ ID NO: 1021319 - DNA, 15 bp, Homo sapiens
ggcctggggggctgg

SEQ ID NO: 1021320 - DNA, 15 bp, Homo sapiens
gcctggggggctggg

SEQ ID NO: 1021321 - DNA, 15 bp, Homo sapiens
cctggggggctgggc

SEQ ID NO: 1021322 - DNA, 15 bp, Homo sapiens
ctggggggctgggca

SEQ ID NO: 1021323 - DNA, 15 bp, Homo sapiens
tggggggctgggcag

SEQ ID NO: 1021324 - DNA, 15 bp, Homo sapiens
ggggggctgggcagt

SEQ ID NO: 1021325 - DNA, 15 bp, Homo sapiens
gggggctgggcagtg

SEQ ID NO: 1021326 - DNA, 15 bp, Homo sapiens
ggggctgggcagtgg

SEQ ID NO: 1021327 - DNA, 15 bp, Homo sapiens
gggctgggcagtggc

SEQ ID NO: 1021328 - DNA, 15 bp, Homo sapiens
ggctgggcagtggca

SEQ ID NO: 1021329 - DNA, 15 bp, Homo sapiens
gctgggcagtggcag

SEQ ID NO: 1021330 - DNA, 15 bp, Homo sapiens
ctgggcagtggcagc

SEQ ID NO: 1021331 - DNA, 15 bp, Homo sapiens
tgggcagtggcagct

SEQ ID NO: 1021332 - DNA, 15 bp, Homo sapiens
gggcagtggcagctt

SEQ ID NO: 1021333 - DNA, 15 bp, Homo sapiens
ggcagtggcagcttc

SEQ ID NO: 1021334 - DNA, 15 bp, Homo sapiens
gcagtggcagcttct

SEQ ID NO: 1021335 - DNA, 15 bp, Homo sapiens
cagtggcagcttctt

SEQ ID NO: 1021336 - DNA, 15 bp, Homo sapiens
agtggcagcttcttc

SEQ ID NO: 1021337 - DNA, 15 bp, Homo sapiens
gtggcagcttcttcc

SEQ ID NO: 1021338 - DNA, 15 bp, Homo sapiens
tggcagcttcttcct

SEQ ID NO: 1021339 - DNA, 15 bp, Homo sapiens
ggcagcttcttcctt

SEQ ID NO: 1021340 - DNA, 15 bp, Homo sapiens
gcagcttcttccttc

SEQ ID NO: 1021341 - DNA, 15 bp, Homo sapiens
cagcttcttccttcc

SEQ ID NO: 1021342 - DNA, 15 bp, Homo sapiens
agcttcttccttccc

SEQ ID NO: 1021343 - DNA, 15 bp, Homo sapiens
gcttcttccttccct

SEQ ID NO: 1021344 - DNA, 15 bp, Homo sapiens
cttcttccttccctt

SEQ ID NO: 1021345 - DNA, 15 bp, Homo sapiens
ttcttccttcccttc

SEQ ID NO: 1021346 - DNA, 15 bp, Homo sapiens
tcttccttcccttct

SEQ ID NO: 1021347 - DNA, 15 bp, Homo sapiens
cttccttcccttctg

SEQ ID NO: 1021348 - DNA, 15 bp, Homo sapiens
ttccttcccttctga

SEQ ID NO: 1021349 - DNA, 15 bp, Homo sapiens
tccttcccttctgat

SEQ ID NO: 1021350 - DNA, 15 bp, Homo sapiens
ccttcccttctgatt

SEQ ID NO: 1021351 - DNA, 15 bp, Homo sapiens
cttcccttctgattc

SEQ ID NO: 1021352 - DNA, 15 bp, Homo sapiens
ttcccttctgattct

SEQ ID NO: 1021353 - DNA, 15 bp, Homo sapiens
tcccttctgattcta

SEQ ID NO: 1021354 - DNA, 15 bp, Homo sapiens
cccttctgattctac

SEQ ID NO: 1021355 - DNA, 15 bp, Homo sapiens
ccttctgattctact

SEQ ID NO: 1021356 - DNA, 15 bp, Homo sapiens
cttctgattctactt

SEQ ID NO: 1021357 - DNA, 15 bp, Homo sapiens
ttctgattctacttc

SEQ ID NO: 1021358 - DNA, 15 bp, Homo sapiens
tctgattctacttca

SEQ ID NO: 1021359 - DNA, 15 bp, Homo sapiens
ctgattctacttcag

SEQ ID NO: 1021360 - DNA, 15 bp, Homo sapiens
tgattctacttcaga

SEQ ID NO: 1021361 - DNA, 15 bp, Homo sapiens
gattctacttcagaa

SEQ ID NO: 1021362 - DNA, 15 bp, Homo sapiens
attctacttcagaaa

SEQ ID NO: 1021363 - DNA, 15 bp, Homo sapiens
ttctacttcagaaag

SEQ ID NO: 1021364 - DNA, 15 bp, Homo sapiens
tctacttcagaaaga

SEQ ID NO: 1021365 - DNA, 15 bp, Homo sapiens
ctacttcagaaagaa

SEQ ID NO: 1021366 - DNA, 15 bp, Homo sapiens
tacttcagaaagaat

SEQ ID NO: 1021367 - DNA, 15 bp, Homo sapiens
acttcagaaagaatt

SEQ ID NO: 1021368 - DNA, 15 bp, Homo sapiens
cttcagaaagaattg

SEQ ID NO: 1021369 - DNA, 15 bp, Homo sapiens
ttcagaaagaattgc

SEQ ID NO: 1021370 - DNA, 15 bp, Homo sapiens
tcagaaagaattgca

SEQ ID NO: 1021371 - DNA, 15 bp, Homo sapiens
cagaaagaattgcaa

SEQ ID NO: 1021372 - DNA, 15 bp, Homo sapiens
agaaagaattgcaac

SEQ ID NO: 1021373 - DNA, 15 bp, Homo sapiens
gaaagaattgcaact

SEQ ID NO: 1021374 - DNA, 15 bp, Homo sapiens
aaagaattgcaactg

SEQ ID NO: 1021375 - DNA, 15 bp, Homo sapiens
aagaattgcaactgt

SEQ ID NO: 1021376 - DNA, 15 bp, Homo sapiens
agaattgcaactgtc

SEQ ID NO: 1021377 - DNA, 15 bp, Homo sapiens
gaattgcaactgtca

SEQ ID NO: 1021378 - DNA, 15 bp, Homo sapiens
aattgcaactgtcaa

SEQ ID NO: 1021379 - DNA, 15 bp, Homo sapiens
attgcaactgtcaaa

SEQ ID NO: 1021380 - DNA, 15 bp, Homo sapiens
ttgcaactgtcaaac

SEQ ID NO: 1021381 - DNA, 15 bp, Homo sapiens
tgcaactgtcaaacc

SEQ ID NO: 1021382 - DNA, 15 bp, Homo sapiens
gcaactgtcaaacca

SEQ ID NO: 1021383 - DNA, 15 bp, Homo sapiens
caactgtcaaaccac

SEQ ID NO: 1021384 - DNA, 15 bp, Homo sapiens
aactgtcaaaccacc

SEQ ID NO: 1021385 - DNA, 15 bp, Homo sapiens
actgtcaaaccaccg

SEQ ID NO: 1021386 - DNA, 15 bp, Homo sapiens
ctgtcaaaccaccgt

SEQ ID NO: 1021387 - DNA, 15 bp, Homo sapiens
tgtcaaaccaccgtg

SEQ ID NO: 1021388 - DNA, 15 bp, Homo sapiens
gtcaaaccaccgtgg

SEQ ID NO: 1021389 - DNA, 15 bp, Homo sapiens
tcaaaccaccgtggt

SEQ ID NO: 1021390 - DNA, 15 bp, Homo sapiens
caaaccaccgtggtg

SEQ ID NO: 1021391 - DNA, 15 bp, Homo sapiens
aaaccaccgtggtgc

SEQ ID NO: 1021392 - DNA, 15 bp, Homo sapiens
aaccaccgtggtgca

SEQ ID NO: 1021393 - DNA, 15 bp, Homo sapiens
accaccgtggtgcac

SEQ ID NO: 1021394 - DNA, 15 bp, Homo sapiens
ccaccgtggtgcaca

SEQ ID NO: 1021395 - DNA, 15 bp, Homo sapiens
caccgtggtgcacac

SEQ ID NO: 1021396 - DNA, 15 bp, Homo sapiens
accgtggtgcacaca

SEQ ID NO: 1021397 - DNA, 15 bp, Homo sapiens
ccgtggtgcacacag

SEQ ID NO: 1021398 - DNA, 15 bp, Homo sapiens
cgtggtgcacacagc

SEQ ID NO: 1021399 - DNA, 15 bp, Homo sapiens
gtggtgcacacagca

SEQ ID NO: 1021400 - DNA, 15 bp, Homo sapiens
tggtgcacacagcac

SEQ ID NO: 1021401 - DNA, 15 bp, Homo sapiens
ggtgcacacagcaca

SEQ ID NO: 1021402 - DNA, 15 bp, Homo sapiens
gtgcacacagcacac

SEQ ID NO: 1021403 - DNA, 15 bp, Homo sapiens
tgcacacagcacaca

SEQ ID NO: 1021404 - DNA, 15 bp, Homo sapiens
gcacacagcacacat

SEQ ID NO: 1021405 - DNA, 15 bp, Homo sapiens
cacacagcacacatt

SEQ ID NO: 1021406 - DNA, 15 bp, Homo sapiens
acacagcacacattc

SEQ ID NO: 1021407 - DNA, 15 bp, Homo sapiens
cacagcacacattcc

SEQ ID NO: 1021408 - DNA, 15 bp, Homo sapiens
acagcacacattcct

SEQ ID NO: 1021409 - DNA, 15 bp, Homo sapiens
cagcacacattccta

SEQ ID NO: 1021410 - DNA, 15 bp, Homo sapiens
agcacacattcctac

SEQ ID NO: 1021411 - DNA, 15 bp, Homo sapiens
gcacacattcctacc

SEQ ID NO: 1021412 - DNA, 15 bp, Homo sapiens
cacacattcctacct

SEQ ID NO: 1021413 - DNA, 15 bp, Homo sapiens
acacattcctacctc

SEQ ID NO: 1021414 - DNA, 15 bp, Homo sapiens
cacattcctacctca

SEQ ID NO: 1021415 - DNA, 15 bp, Homo sapiens
acattcctacctcaa

SEQ ID NO: 1021416 - DNA, 15 bp, Homo sapiens
cattcctacctcaag

SEQ ID NO: 1021417 - DNA, 15 bp, Homo sapiens
attcctacctcaagc

SEQ ID NO: 1021418 - DNA, 15 bp, Homo sapiens
ttcctacctcaagcc

SEQ ID NO: 1021419 - DNA, 15 bp, Homo sapiens
tcctacctcaagcca

SEQ ID NO: 1021420 - DNA, 15 bp, Homo sapiens
cctacctcaagccac

SEQ ID NO: 1021421 - DNA, 15 bp, Homo sapiens
ctacctcaagccaca

SEQ ID NO: 1021422 - DNA, 15 bp, Homo sapiens
tacctcaagccacag

SEQ ID NO: 1021423 - DNA, 15 bp, Homo sapiens
acctcaagccacagc

SEQ ID NO: 1021424 - DNA, 15 bp, Homo sapiens
cctcaagccacagca

SEQ ID NO: 1021425 - DNA, 15 bp, Homo sapiens
ctcaagccacagcag

SEQ ID NO: 1021426 - DNA, 15 bp, Homo sapiens
tcaagccacagcaga

SEQ ID NO: 1021427 - DNA, 15 bp, Homo sapiens
caagccacagcagac

SEQ ID NO: 1021428 - DNA, 15 bp, Homo sapiens
aagccacagcagaca

SEQ ID NO: 1021429 - DNA, 15 bp, Homo sapiens
agccacagcagacag

SEQ ID NO: 1021430 - DNA, 15 bp, Homo sapiens
gccacagcagacaga

SEQ ID NO: 1021431 - DNA, 15 bp, Homo sapiens
ccacagcagacagaa

SEQ ID NO: 1021432 - DNA, 15 bp, Homo sapiens
cacagcagacagaaa

SEQ ID NO: 1021433 - DNA, 15 bp, Homo sapiens
acagcagacagaaat

SEQ ID NO: 1021434 - DNA, 15 bp, Homo sapiens
cagcagacagaaatt

SEQ ID NO: 1021435 - DNA, 15 bp, Homo sapiens
agcagacagaaattg

SEQ ID NO: 1021436 - DNA, 15 bp, Homo sapiens
gcagacagaaattgt

SEQ ID NO: 1021437 - DNA, 15 bp, Homo sapiens
cagacagaaattgta

SEQ ID NO: 1021438 - DNA, 15 bp, Homo sapiens
agacagaaattgtag

SEQ ID NO: 1021439 - DNA, 15 bp, Homo sapiens
gacagaaattgtagc

SEQ ID NO: 1021440 - DNA, 15 bp, Homo sapiens
acagaaattgtagct

SEQ ID NO: 1021441 - DNA, 15 bp, Homo sapiens
cagaaattgtagcta

SEQ ID NO: 1021442 - DNA, 15 bp, Homo sapiens
agaaattgtagctag

SEQ ID NO: 1021443 - DNA, 15 bp, Homo sapiens
gaaattgtagctagt

SEQ ID NO: 1021444 - DNA, 15 bp, Homo sapiens
aaattgtagctagtt

SEQ ID NO: 1021445 - DNA, 15 bp, Homo sapiens
aattgtagctagttc

SEQ ID NO: 1021446 - DNA, 15 bp, Homo sapiens
attgtagctagttcg

SEQ ID NO: 1021447 - DNA, 15 bp, Homo sapiens
ttgtagctagttcgt

SEQ ID NO: 1021448 - DNA, 15 bp, Homo sapiens
tgtagctagttcgtt

SEQ ID NO: 1021449 - DNA, 15 bp, Homo sapiens
gtagctagttcgtta

SEQ ID NO: 1021450 - DNA, 15 bp, Homo sapiens
tagctagttcgttac

SEQ ID NO: 1021451 - DNA, 15 bp, Homo sapiens
agctagttcgttact

SEQ ID NO: 1021452 - DNA, 15 bp, Homo sapiens
gctagttcgttactg

SEQ ID NO: 1021453 - DNA, 15 bp, Homo sapiens
ctagttcgttactgc

SEQ ID NO: 1021454 - DNA, 15 bp, Homo sapiens
tagttcgttactgcc

SEQ ID NO: 1021455 - DNA, 15 bp, Homo sapiens
agttcgttactgccc

SEQ ID NO: 1021456 - DNA, 15 bp, Homo sapiens
gttcgttactgccct

SEQ ID NO: 1021457 - DNA, 15 bp, Homo sapiens
ttcgttactgccctg

SEQ ID NO: 1021458 - DNA, 15 bp, Homo sapiens
tcgttactgccctgt

SEQ ID NO: 1021459 - DNA, 15 bp, Homo sapiens
cgttactgccctgtg

SEQ ID NO: 1021460 - DNA, 15 bp, Homo sapiens
gttactgccctgtga

SEQ ID NO: 1021461 - DNA, 15 bp, Homo sapiens
ttactgccctgtgac

SEQ ID NO: 1021462 - DNA, 15 bp, Homo sapiens
tactgccctgtgacc

SEQ ID NO: 1021463 - DNA, 15 bp, Homo sapiens
actgccctgtgacct

SEQ ID NO: 1021464 - DNA, 15 bp, Homo sapiens
ctgccctgtgacctg

SEQ ID NO: 1021465 - DNA, 15 bp, Homo sapiens
tgccctgtgacctgg

SEQ ID NO: 1021466 - DNA, 15 bp, Homo sapiens
gccctgtgacctggc

SEQ ID NO: 1021467 - DNA, 15 bp, Homo sapiens
ccctgtgacctggca

SEQ ID NO: 1021468 - DNA, 15 bp, Homo sapiens
cctgtgacctggcag

SEQ ID NO: 1021469 - DNA, 15 bp, Homo sapiens
ctgtgacctggcagt

SEQ ID NO: 1021470 - DNA, 15 bp, Homo sapiens
tgtgacctggcagta

SEQ ID NO: 1021471 - DNA, 15 bp, Homo sapiens
gtgacctggcagtat

SEQ ID NO: 1021472 - DNA, 15 bp, Homo sapiens
tgacctggcagtatt

SEQ ID NO: 1021473 - DNA, 15 bp, Homo sapiens
gacctggcagtatta

SEQ ID NO: 1021474 - DNA, 15 bp, Homo sapiens
acctggcagtattaa

SEQ ID NO: 1021475 - DNA, 15 bp, Homo sapiens
cctggcagtattaac

SEQ ID NO: 1021476 - DNA, 15 bp, Homo sapiens
ctggcagtattaact

SEQ ID NO: 1021477 - DNA, 15 bp, Homo sapiens
tggcagtattaactg

SEQ ID NO: 1021478 - DNA, 15 bp, Homo sapiens
ggcagtattaactga

SEQ ID NO: 1021479 - DNA, 15 bp, Homo sapiens
gcagtattaactgaa

SEQ ID NO: 1021480 - DNA, 15 bp, Homo sapiens
cagtattaactgaaa

SEQ ID NO: 1021481 - DNA, 15 bp, Homo sapiens
agtattaactgaaat

SEQ ID NO: 1021482 - DNA, 15 bp, Homo sapiens
gtattaactgaaatg

SEQ ID NO: 1021483 - DNA, 15 bp, Homo sapiens
tattaactgaaatgt

SEQ ID NO: 1021484 - DNA, 15 bp, Homo sapiens
attaactgaaatgtc

SEQ ID NO: 1021485 - DNA, 15 bp, Homo sapiens
ttaactgaaatgtcg

SEQ ID NO: 1021486 - DNA, 15 bp, Homo sapiens
taactgaaatgtcga

SEQ ID NO: 1021487 - DNA, 15 bp, Homo sapiens
aactgaaatgtcgat

SEQ ID NO: 1021488 - DNA, 15 bp, Homo sapiens
actgaaatgtcgatt

SEQ ID NO: 1021489 - DNA, 15 bp, Homo sapiens
ctgaaatgtcgatta

SEQ ID NO: 1021490 - DNA, 15 bp, Homo sapiens
tgaaatgtcgattac

SEQ ID NO: 1021491 - DNA, 15 bp, Homo sapiens
gaaatgtcgattact

SEQ ID NO: 1021492 - DNA, 15 bp, Homo sapiens
aaatgtcgattacta

SEQ ID NO: 1021493 - DNA, 15 bp, Homo sapiens
aatgtcgattactac

SEQ ID NO: 1021494 - DNA, 15 bp, Homo sapiens
atgtcgattactact

SEQ ID NO: 1021495 - DNA, 15 bp, Homo sapiens
tgtcgattactactc

SEQ ID NO: 1021496 - DNA, 15 bp, Homo sapiens
gtcgattactactcc

SEQ ID NO: 1021497 - DNA, 15 bp, Homo sapiens
tcgattactactccc

SEQ ID NO: 1021498 - DNA, 15 bp, Homo sapiens
cgattactactccct

SEQ ID NO: 1021499 - DNA, 15 bp, Homo sapiens
gattactactccctg

SEQ ID NO: 1021500 - DNA, 15 bp, Homo sapiens
attactactccctgg

SEQ ID NO: 1021501 - DNA, 15 bp, Homo sapiens
ttactactccctggc

SEQ ID NO: 1021502 - DNA, 15 bp, Homo sapiens
tactactccctggca

SEQ ID NO: 1021503 - DNA, 15 bp, Homo sapiens
actactccctggcag

SEQ ID NO: 1021504 - DNA, 15 bp, Homo sapiens
ctactccctggcagc

SEQ ID NO: 1021505 - DNA, 15 bp, Homo sapiens
tactccctggcagca

SEQ ID NO: 1021506 - DNA, 15 bp, Homo sapiens
actccctggcagcac

SEQ ID NO: 1021507 - DNA, 15 bp, Homo sapiens
ctccctggcagcact

SEQ ID NO: 1021508 - DNA, 15 bp, Homo sapiens
tccctggcagcactg

SEQ ID NO: 1021509 - DNA, 15 bp, Homo sapiens
ccctggcagcactgt

SEQ ID NO: 1021510 - DNA, 15 bp, Homo sapiens
cctggcagcactgtt

SEQ ID NO: 1021511 - DNA, 15 bp, Homo sapiens
ctggcagcactgttc

SEQ ID NO: 1021512 - DNA, 15 bp, Homo sapiens
tggcagcactgttcc

SEQ ID NO: 1021513 - DNA, 15 bp, Homo sapiens
ggcagcactgttccc

SEQ ID NO: 1021514 - DNA, 15 bp, Homo sapiens
gcagcactgttccct

SEQ ID NO: 1021515 - DNA, 15 bp, Homo sapiens
cagcactgttccctg

SEQ ID NO: 1021516 - DNA, 15 bp, Homo sapiens
agcactgttccctga

SEQ ID NO: 1021517 - DNA, 15 bp, Homo sapiens
gcactgttccctgac

SEQ ID NO: 1021518 - DNA, 15 bp, Homo sapiens
cactgttccctgaca

SEQ ID NO: 1021519 - DNA, 15 bp, Homo sapiens
actgttccctgacag

SEQ ID NO: 1021520 - DNA, 15 bp, Homo sapiens
ctgttccctgacagg

SEQ ID NO: 1021521 - DNA, 15 bp, Homo sapiens
tgttccctgacagga

SEQ ID NO: 1021522 - DNA, 15 bp, Homo sapiens
gttccctgacaggac

SEQ ID NO: 1021523 - DNA, 15 bp, Homo sapiens
ttccctgacaggact

SEQ ID NO: 1021524 - DNA, 15 bp, Homo sapiens
tccctgacaggactc

SEQ ID NO: 1021525 - DNA, 15 bp, Homo sapiens
ccctgacaggactcc

SEQ ID NO: 1021526 - DNA, 15 bp, Homo sapiens
cctgacaggactcct

SEQ ID NO: 1021527 - DNA, 15 bp, Homo sapiens
ctgacaggactcctg

SEQ ID NO: 1021528 - DNA, 15 bp, Homo sapiens
tgacaggactcctga

SEQ ID NO: 1021529 - DNA, 15 bp, Homo sapiens
gacaggactcctgag

SEQ ID NO: 1021530 - DNA, 15 bp, Homo sapiens
acaggactcctgagc

SEQ ID NO: 1021531 - DNA, 15 bp, Homo sapiens
caggactcctgagcc

SEQ ID NO: 1021532 - DNA, 15 bp, Homo sapiens
aggactcctgagcct

SEQ ID NO: 1021533 - DNA, 15 bp, Homo sapiens
ggactcctgagcctc

SEQ ID NO: 1021534 - DNA, 15 bp, Homo sapiens
gactcctgagcctcg

SEQ ID NO: 1021535 - DNA, 15 bp, Homo sapiens
actcctgagcctcga

SEQ ID NO: 1021536 - DNA, 15 bp, Homo sapiens
ctcctgagcctcgac

SEQ ID NO: 1021537 - DNA, 15 bp, Homo sapiens
tcctgagcctcgacc

SEQ ID NO: 1021538 - DNA, 15 bp, Homo sapiens
cctgagcctcgacct

SEQ ID NO: 1021539 - DNA, 15 bp, Homo sapiens
ctgagcctcgacctg

SEQ ID NO: 1021540 - DNA, 15 bp, Homo sapiens
tgagcctcgacctgg

SEQ ID NO: 1021541 - DNA, 15 bp, Homo sapiens
gagcctcgacctggg

SEQ ID NO: 1021542 - DNA, 15 bp, Homo sapiens
agcctcgacctgggt

SEQ ID NO: 1021543 - DNA, 15 bp, Homo sapiens
gcctcgacctgggtg

SEQ ID NO: 1021544 - DNA, 15 bp, Homo sapiens
cctcgacctgggtgc

SEQ ID NO: 1021545 - DNA, 15 bp, Homo sapiens
ctcgacctgggtgca

SEQ ID NO: 1021546 - DNA, 15 bp, Homo sapiens
tcgacctgggtgcag

SEQ ID NO: 1021547 - DNA, 15 bp, Homo sapiens
cgacctgggtgcagt

SEQ ID NO: 1021548 - DNA, 15 bp, Homo sapiens
gacctgggtgcagta

SEQ ID NO: 1021549 - DNA, 15 bp, Homo sapiens
acctgggtgcagtaa

SEQ ID NO: 1021550 - DNA, 15 bp, Homo sapiens
cctgggtgcagtaaa

SEQ ID NO: 1021551 - DNA, 15 bp, Homo sapiens
ctgggtgcagtaaac

SEQ ID NO: 1021552 - DNA, 15 bp, Homo sapiens
tgggtgcagtaaact

SEQ ID NO: 1021553 - DNA, 15 bp, Homo sapiens
gggtgcagtaaactt

SEQ ID NO: 1021554 - DNA, 15 bp, Homo sapiens
ggtgcagtaaacttt

SEQ ID NO: 1021555 - DNA, 15 bp, Homo sapiens
gtgcagtaaactttg

SEQ ID NO: 1021556 - DNA, 15 bp, Homo sapiens
tgcagtaaactttgg

SEQ ID NO: 1021557 - DNA, 15 bp, Homo sapiens
gcagtaaactttgga

SEQ ID NO: 1021558 - DNA, 15 bp, Homo sapiens
cagtaaactttggaa

SEQ ID NO: 1021559 - DNA, 15 bp, Homo sapiens
agtaaactttggaag

SEQ ID NO: 1021560 - DNA, 15 bp, Homo sapiens
gtaaactttggaagt

SEQ ID NO: 1021561 - DNA, 15 bp, Homo sapiens
taaactttggaagtg

SEQ ID NO: 1021562 - DNA, 15 bp, Homo sapiens
aaactttggaagtgc

SEQ ID NO: 1021563 - DNA, 15 bp, Homo sapiens
aactttggaagtgct

SEQ ID NO: 1021564 - DNA, 15 bp, Homo sapiens
actttggaagtgctg

SEQ ID NO: 1021565 - DNA, 15 bp, Homo sapiens
ctttggaagtgctgc

SEQ ID NO: 1021566 - DNA, 15 bp, Homo sapiens
tttggaagtgctgca

SEQ ID NO: 1021567 - DNA, 15 bp, Homo sapiens
ttggaagtgctgcat

SEQ ID NO: 1021568 - DNA, 15 bp, Homo sapiens
tggaagtgctgcatt

SEQ ID NO: 1021569 - DNA, 15 bp, Homo sapiens
ggaagtgctgcattg

SEQ ID NO: 1021570 - DNA, 15 bp, Homo sapiens
gaagtgctgcattgt

SEQ ID NO: 1021571 - DNA, 15 bp, Homo sapiens
aagtgctgcattgta

SEQ ID NO: 1021572 - DNA, 15 bp, Homo sapiens
agtgctgcattgtat

SEQ ID NO: 1021573 - DNA, 15 bp, Homo sapiens
gtgctgcattgtatc

SEQ ID NO: 1021574 - DNA, 15 bp, Homo sapiens
tgctgcattgtatca

SEQ ID NO: 1021575 - DNA, 15 bp, Homo sapiens
gctgcattgtatcat

SEQ ID NO: 1021576 - DNA, 15 bp, Homo sapiens
ctgcattgtatcata

SEQ ID NO: 1021577 - DNA, 15 bp, Homo sapiens
tgcattgtatcatac

SEQ ID NO: 1021578 - DNA, 15 bp, Homo sapiens
gcattgtatcatacc

SEQ ID NO: 1021579 - DNA, 15 bp, Homo sapiens
cattgtatcatacct

SEQ ID NO: 1021580 - DNA, 15 bp, Homo sapiens
attgtatcataccta

SEQ ID NO: 1021581 - DNA, 15 bp, Homo sapiens
ttgtatcatacctac

SEQ ID NO: 1021582 - DNA, 15 bp, Homo sapiens
tgtatcatacctaca

SEQ ID NO: 1021583 - DNA, 15 bp, Homo sapiens
gtatcatacctacaa

SEQ ID NO: 1021584 - DNA, 15 bp, Homo sapiens
tatcatacctacaac

SEQ ID NO: 1021585 - DNA, 15 bp, Homo sapiens
atcatacctacaact

SEQ ID NO: 1021586 - DNA, 15 bp, Homo sapiens
tcatacctacaactc

SEQ ID NO: 1021587 - DNA, 15 bp, Homo sapiens
catacctacaactca

SEQ ID NO: 1021588 - DNA, 15 bp, Homo sapiens
atacctacaactcac

SEQ ID NO: 1021589 - DNA, 15 bp, Homo sapiens
tacctacaactcacg

SEQ ID NO: 1021590 - DNA, 15 bp, Homo sapiens
acctacaactcacgc

SEQ ID NO: 1021591 - DNA, 15 bp, Homo sapiens
cctacaactcacgca

SEQ ID NO: 1021592 - DNA, 15 bp, Homo sapiens
ctacaactcacgcaa

SEQ ID NO: 1021593 - DNA, 15 bp, Homo sapiens
tacaactcacgcaat

SEQ ID NO: 1021594 - DNA, 15 bp, Homo sapiens
acaactcacgcaata

SEQ ID NO: 1021595 - DNA, 15 bp, Homo sapiens
caactcacgcaatag

SEQ ID NO: 1021596 - DNA, 15 bp, Homo sapiens
aactcacgcaataga

SEQ ID NO: 1021597 - DNA, 15 bp, Homo sapiens
actcacgcaatagat

SEQ ID NO: 1021598 - DNA, 15 bp, Homo sapiens
ctcacgcaatagata

SEQ ID NO: 1021599 - DNA, 15 bp, Homo sapiens
tcacgcaatagataa

SEQ ID NO: 1021600 - DNA, 15 bp, Homo sapiens
cacgcaatagataaa

SEQ ID NO: 1021601 - DNA, 15 bp, Homo sapiens
acgcaatagataaaa

SEQ ID NO: 1021602 - DNA, 15 bp, Homo sapiens
cgcaatagataaaac

SEQ ID NO: 1021603 - DNA, 15 bp, Homo sapiens
gcaatagataaaact

SEQ ID NO: 1021604 - DNA, 15 bp, Homo sapiens
caatagataaaactc

SEQ ID NO: 1021605 - DNA, 15 bp, Homo sapiens
aatagataaaactca

SEQ ID NO: 1021606 - DNA, 15 bp, Homo sapiens
atagataaaactcag

SEQ ID NO: 1021607 - DNA, 15 bp, Homo sapiens
tagataaaactcaga

SEQ ID NO: 1021608 - DNA, 15 bp, Homo sapiens
agataaaactcagac

SEQ ID NO: 1021609 - DNA, 15 bp, Homo sapiens
gataaaactcagaca

SEQ ID NO: 1021610 - DNA, 15 bp, Homo sapiens
ataaaactcagacat

SEQ ID NO: 1021611 - DNA, 15 bp, Homo sapiens
taaaactcagacatc

SEQ ID NO: 1021612 - DNA, 15 bp, Homo sapiens
aaaactcagacatct

SEQ ID NO: 1021613 - DNA, 15 bp, Homo sapiens
aaactcagacatctc

SEQ ID NO: 1021614 - DNA, 15 bp, Homo sapiens
aactcagacatctct

SEQ ID NO: 1021615 - DNA, 15 bp, Homo sapiens
actcagacatctctc

SEQ ID NO: 1021616 - DNA, 15 bp, Homo sapiens
ctcagacatctctct

SEQ ID NO: 1021617 - DNA, 15 bp, Homo sapiens
tcagacatctctcta

SEQ ID NO: 1021618 - DNA, 15 bp, Homo sapiens
cagacatctctctac

SEQ ID NO: 1021619 - DNA, 15 bp, Homo sapiens
agacatctctctaca

SEQ ID NO: 1021620 - DNA, 15 bp, Homo sapiens
gacatctctctacac

SEQ ID NO: 1021621 - DNA, 15 bp, Homo sapiens
acatctctctacaca

SEQ ID NO: 1021622 - DNA, 15 bp, Homo sapiens
catctctctacacat

SEQ ID NO: 1021623 - DNA, 15 bp, Homo sapiens
atctctctacacatc

SEQ ID NO: 1021624 - DNA, 15 bp, Homo sapiens
tctctctacacatct

SEQ ID NO: 1021625 - DNA, 15 bp, Homo sapiens
ctctctacacatcta

SEQ ID NO: 1021626 - DNA, 15 bp, Homo sapiens
tctctacacatctac

SEQ ID NO: 1021627 - DNA, 15 bp, Homo sapiens
ctctacacatctaca

SEQ ID NO: 1021628 - DNA, 15 bp, Homo sapiens
tctacacatctacat

SEQ ID NO: 1021629 - DNA, 15 bp, Homo sapiens
ctacacatctacata

SEQ ID NO: 1021630 - DNA, 15 bp, Homo sapiens
tacacatctacatag

SEQ ID NO: 1021631 - DNA, 15 bp, Homo sapiens
acacatctacatagt

SEQ ID NO: 1021632 - DNA, 15 bp, Homo sapiens
cacatctacatagtc

SEQ ID NO: 1021633 - DNA, 15 bp, Homo sapiens
acatctacatagtcc

SEQ ID NO: 1021634 - DNA, 15 bp, Homo sapiens
catctacatagtcca

SEQ ID NO: 1021635 - DNA, 15 bp, Homo sapiens
atctacatagtccat

SEQ ID NO: 1021636 - DNA, 15 bp, Homo sapiens
tctacatagtccatt

SEQ ID NO: 1021637 - DNA, 15 bp, Homo sapiens
ctacatagtccattg

SEQ ID NO: 1021638 - DNA, 15 bp, Homo sapiens
tacatagtccattgg

SEQ ID NO: 1021639 - DNA, 15 bp, Homo sapiens
acatagtccattggc

SEQ ID NO: 1021640 - DNA, 15 bp, Homo sapiens
catagtccattggct

SEQ ID NO: 1021641 - DNA, 15 bp, Homo sapiens
atagtccattggctt

SEQ ID NO: 1021642 - DNA, 15 bp, Homo sapiens
tagtccattggcttc

SEQ ID NO: 1021643 - DNA, 15 bp, Homo sapiens
agtccattggcttcg

SEQ ID NO: 1021644 - DNA, 15 bp, Homo sapiens
gtccattggcttcgt

SEQ ID NO: 1021645 - DNA, 15 bp, Homo sapiens
tccattggcttcgta

SEQ ID NO: 1021646 - DNA, 15 bp, Homo sapiens
ccattggcttcgtac

SEQ ID NO: 1021647 - DNA, 15 bp, Homo sapiens
cattggcttcgtact

SEQ ID NO: 1021648 - DNA, 15 bp, Homo sapiens
attggcttcgtactg

SEQ ID NO: 1021649 - DNA, 15 bp, Homo sapiens
ttggcttcgtactga

SEQ ID NO: 1021650 - DNA, 15 bp, Homo sapiens
tggcttcgtactgaa

SEQ ID NO: 1021651 - DNA, 15 bp, Homo sapiens
ggcttcgtactgaaa

SEQ ID NO: 1021652 - DNA, 15 bp, Homo sapiens
gcttcgtactgaaat

SEQ ID NO: 1021653 - DNA, 15 bp, Homo sapiens
cttcgtactgaaatc

SEQ ID NO: 1021654 - DNA, 15 bp, Homo sapiens
ttcgtactgaaatca

SEQ ID NO: 1021655 - DNA, 15 bp, Homo sapiens
tcgtactgaaatcaa

SEQ ID NO: 1021656 - DNA, 15 bp, Homo sapiens
cgtactgaaatcaaa

SEQ ID NO: 1021657 - DNA, 15 bp, Homo sapiens
gtactgaaatcaaac

SEQ ID NO: 1021658 - DNA, 15 bp, Homo sapiens
tactgaaatcaaaca

SEQ ID NO: 1021659 - DNA, 15 bp, Homo sapiens
actgaaatcaaacag

SEQ ID NO: 1021660 - DNA, 15 bp, Homo sapiens
ctgaaatcaaacaga

SEQ ID NO: 1021661 - DNA, 15 bp, Homo sapiens
tgaaatcaaacagaa

SEQ ID NO: 1021662 - DNA, 15 bp, Homo sapiens
gaaatcaaacagaaa

SEQ ID NO: 1021663 - DNA, 15 bp, Homo sapiens
aaatcaaacagaaaa

SEQ ID NO: 1021664 - DNA, 15 bp, Homo sapiens
aatcaaacagaaaaa

SEQ ID NO: 1021665 - DNA, 15 bp, Homo sapiens
atcaaacagaaaaag

SEQ ID NO: 1021666 - DNA, 15 bp, Homo sapiens
tcaaacagaaaaagt

SEQ ID NO: 1021667 - DNA, 15 bp, Homo sapiens
caaacagaaaaagtt

SEQ ID NO: 1021668 - DNA, 15 bp, Homo sapiens
aaacagaaaaagttt

SEQ ID NO: 1021669 - DNA, 15 bp, Homo sapiens
aacagaaaaagtttt

SEQ ID NO: 1021670 - DNA, 15 bp, Homo sapiens
acagaaaaagttttt

SEQ ID NO: 1021671 - DNA, 15 bp, Homo sapiens
cagaaaaagtttttg

SEQ ID NO: 1021672 - DNA, 15 bp, Homo sapiens
agaaaaagtttttgg

SEQ ID NO: 1021673 - DNA, 15 bp, Homo sapiens
gaaaaagtttttgga

SEQ ID NO: 1021674 - DNA, 15 bp, Homo sapiens
aaaaagtttttggaa

SEQ ID NO: 1021675 - DNA, 15 bp, Homo sapiens
aaaagtttttggaaa

SEQ ID NO: 1021676 - DNA, 15 bp, Homo sapiens
aaagtttttggaaat

SEQ ID NO: 1021677 - DNA, 15 bp, Homo sapiens
aagtttttggaaata

SEQ ID NO: 1021678 - DNA, 15 bp, Homo sapiens
agtttttggaaatat

SEQ ID NO: 1021679 - DNA, 15 bp, Homo sapiens
gtttttggaaatatt

SEQ ID NO: 1021680 - DNA, 15 bp, Homo sapiens
tttttggaaatattt

SEQ ID NO: 1021681 - DNA, 15 bp, Homo sapiens
ttttggaaatattta

SEQ ID NO: 1021682 - DNA, 15 bp, Homo sapiens
tttggaaatatttaa

SEQ ID NO: 1021683 - DNA, 15 bp, Homo sapiens
ttggaaatatttaac

SEQ ID NO: 1021684 - DNA, 15 bp, Homo sapiens
tggaaatatttaaca

SEQ ID NO: 1021685 - DNA, 15 bp, Homo sapiens
ggaaatatttaacaa

SEQ ID NO: 1021686 - DNA, 15 bp, Homo sapiens
gaaatatttaacaaa

SEQ ID NO: 1021687 - DNA, 15 bp, Homo sapiens
aaatatttaacaaaa

SEQ ID NO: 1021688 - DNA, 15 bp, Homo sapiens
aatatttaacaaaaa

SEQ ID NO: 1021689 - DNA, 15 bp, Homo sapiens
atatttaacaaaaag

SEQ ID NO: 1021690 - DNA, 15 bp, Homo sapiens
tatttaacaaaaagc

SEQ ID NO: 1021691 - DNA, 15 bp, Homo sapiens
atttaacaaaaagcc

SEQ ID NO: 1021692 - DNA, 15 bp, Homo sapiens
tttaacaaaaagcca

SEQ ID NO: 1021693 - DNA, 15 bp, Homo sapiens
ttaacaaaaagccaa

SEQ ID NO: 1021694 - DNA, 15 bp, Homo sapiens
taacaaaaagccaac

SEQ ID NO: 1021695 - DNA, 15 bp, Homo sapiens
aacaaaaagccaacc

SEQ ID NO: 1021696 - DNA, 15 bp, Homo sapiens
acaaaaagccaaccc

SEQ ID NO: 1021697 - DNA, 15 bp, Homo sapiens
caaaaagccaaccca

SEQ ID NO: 1021698 - DNA, 15 bp, Homo sapiens
aaaaagccaacccac

SEQ ID NO: 1021699 - DNA, 15 bp, Homo sapiens
aaaagccaacccact

SEQ ID NO: 1021700 - DNA, 15 bp, Homo sapiens
aaagccaacccactc

SEQ ID NO: 1021701 - DNA, 15 bp, Homo sapiens
aagccaacccactca

SEQ ID NO: 1021702 - DNA, 15 bp, Homo sapiens
agccaacccactcat

SEQ ID NO: 1021703 - DNA, 15 bp, Homo sapiens
gccaacccactcatg

SEQ ID NO: 1021704 - DNA, 15 bp, Homo sapiens
ccaacccactcatgg

SEQ ID NO: 1021705 - DNA, 15 bp, Homo sapiens
caacccactcatggc

SEQ ID NO: 1021706 - DNA, 15 bp, Homo sapiens
aacccactcatggcc

SEQ ID NO: 1021707 - DNA, 15 bp, Homo sapiens
acccactcatggcca

SEQ ID NO: 1021708 - DNA, 15 bp, Homo sapiens
cccactcatggccat

SEQ ID NO: 1021709 - DNA, 15 bp, Homo sapiens
ccactcatggccatc

SEQ ID NO: 1021710 - DNA, 15 bp, Homo sapiens
cactcatggccatca

SEQ ID NO: 1021711 - DNA, 15 bp, Homo sapiens
actcatggccatcat

SEQ ID NO: 1021712 - DNA, 15 bp, Homo sapiens
ctcatggccatcatt

SEQ ID NO: 1021713 - DNA, 15 bp, Homo sapiens
tcatggccatcattt

SEQ ID NO: 1021714 - DNA, 15 bp, Homo sapiens
catggccatcattta

SEQ ID NO: 1021715 - DNA, 15 bp, Homo sapiens
atggccatcatttag

SEQ ID NO: 1021716 - DNA, 15 bp, Homo sapiens
tggccatcatttagc

SEQ ID NO: 1021717 - DNA, 15 bp, Homo sapiens
ggccatcatttagca

SEQ ID NO: 1021718 - DNA, 15 bp, Homo sapiens
gccatcatttagcac

SEQ ID NO: 1021719 - DNA, 15 bp, Homo sapiens
ccatcatttagcact

SEQ ID NO: 1021720 - DNA, 15 bp, Homo sapiens
catcatttagcactg

SEQ ID NO: 1021721 - DNA, 15 bp, Homo sapiens
atcatttagcactgg

SEQ ID NO: 1021722 - DNA, 15 bp, Homo sapiens
tcatttagcactggg

SEQ ID NO: 1021723 - DNA, 15 bp, Homo sapiens
catttagcactgggt

SEQ ID NO: 1021724 - DNA, 15 bp, Homo sapiens
atttagcactgggta

SEQ ID NO: 1021725 - DNA, 15 bp, Homo sapiens
tttagcactgggtag

SEQ ID NO: 1021726 - DNA, 15 bp, Homo sapiens
ttagcactgggtagg

SEQ ID NO: 1021727 - DNA, 15 bp, Homo sapiens
tagcactgggtaggg

SEQ ID NO: 1021728 - DNA, 15 bp, Homo sapiens
agcactgggtagggg

SEQ ID NO: 1021729 - DNA, 15 bp, Homo sapiens
gcactgggtaggggt

SEQ ID NO: 1021730 - DNA, 15 bp, Homo sapiens
cactgggtaggggta

SEQ ID NO: 1021731 - DNA, 15 bp, Homo sapiens
actgggtaggggtaa

SEQ ID NO: 1021732 - DNA, 15 bp, Homo sapiens
ctgggtaggggtaaa

SEQ ID NO: 1021733 - DNA, 15 bp, Homo sapiens
tgggtaggggtaaag

SEQ ID NO: 1021734 - DNA, 15 bp, Homo sapiens
gggtaggggtaaaga

SEQ ID NO: 1021735 - DNA, 15 bp, Homo sapiens
ggtaggggtaaagag

SEQ ID NO: 1021736 - DNA, 15 bp, Homo sapiens
gtaggggtaaagaga

SEQ ID NO: 1021737 - DNA, 15 bp, Homo sapiens
taggggtaaagagaa

SEQ ID NO: 1021738 - DNA, 15 bp, Homo sapiens
aggggtaaagagaaa

SEQ ID NO: 1021739 - DNA, 15 bp, Homo sapiens
ggggtaaagagaaag

SEQ ID NO: 1021740 - DNA, 15 bp, Homo sapiens
gggtaaagagaaaga

SEQ ID NO: 1021741 - DNA, 15 bp, Homo sapiens
ggtaaagagaaagag

SEQ ID NO: 1021742 - DNA, 15 bp, Homo sapiens
gtaaagagaaagaga

SEQ ID NO: 1021743 - DNA, 15 bp, Homo sapiens
taaagagaaagagaa

SEQ ID NO: 1021744 - DNA, 15 bp, Homo sapiens
aaagagaaagagaaa

SEQ ID NO: 1021745 - DNA, 15 bp, Homo sapiens
aagagaaagagaaac

SEQ ID NO: 1021746 - DNA, 15 bp, Homo sapiens
agagaaagagaaacc

SEQ ID NO: 1021747 - DNA, 15 bp, Homo sapiens
gagaaagagaaaccc

SEQ ID NO: 1021748 - DNA, 15 bp, Homo sapiens
agaaagagaaaccct

SEQ ID NO: 1021749 - DNA, 15 bp, Homo sapiens
gaaagagaaaccctt

SEQ ID NO: 1021750 - DNA, 15 bp, Homo sapiens
aaagagaaacccttt

SEQ ID NO: 1021751 - DNA, 15 bp, Homo sapiens
aagagaaaccctttg

SEQ ID NO: 1021752 - DNA, 15 bp, Homo sapiens
agagaaaccctttga

SEQ ID NO: 1021753 - DNA, 15 bp, Homo sapiens
gagaaaccctttgag

SEQ ID NO: 1021754 - DNA, 15 bp, Homo sapiens
agaaaccctttgagg

SEQ ID NO: 1021755 - DNA, 15 bp, Homo sapiens
gaaaccctttgaggt

SEQ ID NO: 1021756 - DNA, 15 bp, Homo sapiens
aaaccctttgaggta

SEQ ID NO: 1021757 - DNA, 15 bp, Homo sapiens
aaccctttgaggtat

SEQ ID NO: 1021758 - DNA, 15 bp, Homo sapiens
accctttgaggtatg

SEQ ID NO: 1021759 - DNA, 15 bp, Homo sapiens
ccctttgaggtatgt

SEQ ID NO: 1021760 - DNA, 15 bp, Homo sapiens
cctttgaggtatgtg

SEQ ID NO: 1021761 - DNA, 15 bp, Homo sapiens
ctttgaggtatgtgg

SEQ ID NO: 1021762 - DNA, 15 bp, Homo sapiens
tttgaggtatgtggt

SEQ ID NO: 1021763 - DNA, 15 bp, Homo sapiens
ttgaggtatgtggta

SEQ ID NO: 1021764 - DNA, 15 bp, Homo sapiens
tgaggtatgtggtag

SEQ ID NO: 1021765 - DNA, 15 bp, Homo sapiens
gaggtatgtggtagc

SEQ ID NO: 1021766 - DNA, 15 bp, Homo sapiens
aggtatgtggtagca

SEQ ID NO: 1021767 - DNA, 15 bp, Homo sapiens
ggtatgtggtagcat

SEQ ID NO: 1021768 - DNA, 15 bp, Homo sapiens
gtatgtggtagcata

SEQ ID NO: 1021769 - DNA, 15 bp, Homo sapiens
tatgtggtagcatac

SEQ ID NO: 1021770 - DNA, 15 bp, Homo sapiens
atgtggtagcataca

SEQ ID NO: 1021771 - DNA, 15 bp, Homo sapiens
tgtggtagcatacaa

SEQ ID NO: 1021772 - DNA, 15 bp, Homo sapiens
gtggtagcatacaaa

SEQ ID NO: 1021773 - DNA, 15 bp, Homo sapiens
tggtagcatacaaac

SEQ ID NO: 1021774 - DNA, 15 bp, Homo sapiens
ggtagcatacaaaca

SEQ ID NO: 1021775 - DNA, 15 bp, Homo sapiens
gtagcatacaaacat

SEQ ID NO: 1021776 - DNA, 15 bp, Homo sapiens
tagcatacaaacatg

SEQ ID NO: 1021777 - DNA, 15 bp, Homo sapiens
agcatacaaacatgt

SEQ ID NO: 1021778 - DNA, 15 bp, Homo sapiens
gcatacaaacatgtt

SEQ ID NO: 1021779 - DNA, 15 bp, Homo sapiens
catacaaacatgttc

SEQ ID NO: 1021780 - DNA, 15 bp, Homo sapiens
atacaaacatgttca

SEQ ID NO: 1021781 - DNA, 15 bp, Homo sapiens
tacaaacatgttcac

SEQ ID NO: 1021782 - DNA, 15 bp, Homo sapiens
acaaacatgttcaca

SEQ ID NO: 1021783 - DNA, 15 bp, Homo sapiens
caaacatgttcacag

SEQ ID NO: 1021784 - DNA, 15 bp, Homo sapiens
aaacatgttcacagt

SEQ ID NO: 1021785 - DNA, 15 bp, Homo sapiens
aacatgttcacagta

SEQ ID NO: 1021786 - DNA, 15 bp, Homo sapiens
acatgttcacagtaa

SEQ ID NO: 1021787 - DNA, 15 bp, Homo sapiens
catgttcacagtaac

SEQ ID NO: 1021788 - DNA, 15 bp, Homo sapiens
atgttcacagtaacc

SEQ ID NO: 1021789 - DNA, 15 bp, Homo sapiens
tgttcacagtaacct

SEQ ID NO: 1021790 - DNA, 15 bp, Homo sapiens
gttcacagtaacctt

SEQ ID NO: 1021791 - DNA, 15 bp, Homo sapiens
ttcacagtaaccttc

SEQ ID NO: 1021792 - DNA, 15 bp, Homo sapiens
tcacagtaaccttcc

SEQ ID NO: 1021793 - DNA, 15 bp, Homo sapiens
cacagtaaccttcct

SEQ ID NO: 1021794 - DNA, 15 bp, Homo sapiens
acagtaaccttcctg

SEQ ID NO: 1021795 - DNA, 15 bp, Homo sapiens
cagtaaccttcctgt

SEQ ID NO: 1021796 - DNA, 15 bp, Homo sapiens
agtaaccttcctgta

SEQ ID NO: 1021797 - DNA, 15 bp, Homo sapiens
gtaaccttcctgtat

SEQ ID NO: 1021798 - DNA, 15 bp, Homo sapiens
taaccttcctgtatt

SEQ ID NO: 1021799 - DNA, 15 bp, Homo sapiens
aaccttcctgtatta

SEQ ID NO: 1021800 - DNA, 15 bp, Homo sapiens
accttcctgtattaa

SEQ ID NO: 1021801 - DNA, 15 bp, Homo sapiens
ccttcctgtattaac

SEQ ID NO: 1021802 - DNA, 15 bp, Homo sapiens
cttcctgtattaacc

SEQ ID NO: 1021803 - DNA, 15 bp, Homo sapiens
ttcctgtattaacca

SEQ ID NO: 1021804 - DNA, 15 bp, Homo sapiens
tcctgtattaaccat

SEQ ID NO: 1021805 - DNA, 15 bp, Homo sapiens
cctgtattaaccatt

SEQ ID NO: 1021806 - DNA, 15 bp, Homo sapiens
ctgtattaaccattt

SEQ ID NO: 1021807 - DNA, 15 bp, Homo sapiens
tgtattaaccatttt

SEQ ID NO: 1021808 - DNA, 15 bp, Homo sapiens
gtattaaccattttc

SEQ ID NO: 1021809 - DNA, 15 bp, Homo sapiens
tattaaccattttct

SEQ ID NO: 1021810 - DNA, 15 bp, Homo sapiens
attaaccattttcta

SEQ ID NO: 1021811 - DNA, 15 bp, Homo sapiens
ttaaccattttctaa

SEQ ID NO: 1021812 - DNA, 15 bp, Homo sapiens
taaccattttctaac

SEQ ID NO: 1021813 - DNA, 15 bp, Homo sapiens
aaccattttctaaca

SEQ ID NO: 1021814 - DNA, 15 bp, Homo sapiens
accattttctaacaa

SEQ ID NO: 1021815 - DNA, 15 bp, Homo sapiens
ccattttctaacaat

SEQ ID NO: 1021816 - DNA, 15 bp, Homo sapiens
cattttctaacaatt

SEQ ID NO: 1021817 - DNA, 15 bp, Homo sapiens
attttctaacaatta

SEQ ID NO: 1021818 - DNA, 15 bp, Homo sapiens
ttttctaacaattac

SEQ ID NO: 1021819 - DNA, 15 bp, Homo sapiens
tttctaacaattaca

SEQ ID NO: 1021820 - DNA, 15 bp, Homo sapiens
ttctaacaattacaa

SEQ ID NO: 1021821 - DNA, 15 bp, Homo sapiens
tctaacaattacaat

SEQ ID NO: 1021822 - DNA, 15 bp, Homo sapiens
ctaacaattacaatg

SEQ ID NO: 1021823 - DNA, 15 bp, Homo sapiens
taacaattacaatgc

SEQ ID NO: 1021824 - DNA, 15 bp, Homo sapiens
aacaattacaatgcc

SEQ ID NO: 1021825 - DNA, 15 bp, Homo sapiens
acaattacaatgcca

SEQ ID NO: 1021826 - DNA, 15 bp, Homo sapiens
caattacaatgccac

SEQ ID NO: 1021827 - DNA, 15 bp, Homo sapiens
aattacaatgccaca

SEQ ID NO: 1021828 - DNA, 15 bp, Homo sapiens
attacaatgccacat

SEQ ID NO: 1021829 - DNA, 15 bp, Homo sapiens
ttacaatgccacatc

SEQ ID NO: 1021830 - DNA, 15 bp, Homo sapiens
tacaatgccacatca

SEQ ID NO: 1021831 - DNA, 15 bp, Homo sapiens
acaatgccacatcaa

SEQ ID NO: 1021832 - DNA, 15 bp, Homo sapiens
caatgccacatcaac

SEQ ID NO: 1021833 - DNA, 15 bp, Homo sapiens
aatgccacatcaaca

SEQ ID NO: 1021834 - DNA, 15 bp, Homo sapiens
atgccacatcaacac

SEQ ID NO: 1021835 - DNA, 15 bp, Homo sapiens
tgccacatcaacaca

SEQ ID NO: 1021836 - DNA, 15 bp, Homo sapiens
gccacatcaacacag

SEQ ID NO: 1021837 - DNA, 15 bp, Homo sapiens
ccacatcaacacagt

SEQ ID NO: 1021838 - DNA, 15 bp, Homo sapiens
cacatcaacacagtt

SEQ ID NO: 1021839 - DNA, 15 bp, Homo sapiens
acatcaacacagtta

SEQ ID NO: 1021840 - DNA, 15 bp, Homo sapiens
catcaacacagttag

SEQ ID NO: 1021841 - DNA, 15 bp, Homo sapiens
atcaacacagttagt

SEQ ID NO: 1021842 - DNA, 15 bp, Homo sapiens
tcaacacagttagtt

SEQ ID NO: 1021843 - DNA, 15 bp, Homo sapiens
caacacagttagttg

SEQ ID NO: 1021844 - DNA, 15 bp, Homo sapiens
aacacagttagttgt

SEQ ID NO: 1021845 - DNA, 15 bp, Homo sapiens
acacagttagttgtt

SEQ ID NO: 1021846 - DNA, 15 bp, Homo sapiens
cacagttagttgttg

SEQ ID NO: 1021847 - DNA, 15 bp, Homo sapiens
acagttagttgttga

SEQ ID NO: 1021848 - DNA, 15 bp, Homo sapiens
cagttagttgttgaa

SEQ ID NO: 1021849 - DNA, 15 bp, Homo sapiens
agttagttgttgaaa

SEQ ID NO: 1021850 - DNA, 15 bp, Homo sapiens
gttagttgttgaaaa

SEQ ID NO: 1021851 - DNA, 15 bp, Homo sapiens
ttagttgttgaaaat

SEQ ID NO: 1021852 - DNA, 15 bp, Homo sapiens
tagttgttgaaaatt

SEQ ID NO: 1021853 - DNA, 15 bp, Homo sapiens
agttgttgaaaattc

SEQ ID NO: 1021854 - DNA, 15 bp, Homo sapiens
gttgttgaaaattct

SEQ ID NO: 1021855 - DNA, 15 bp, Homo sapiens
ttgttgaaaattctc

SEQ ID NO: 1021856 - DNA, 15 bp, Homo sapiens
tgttgaaaattctca

SEQ ID NO: 1021857 - DNA, 15 bp, Homo sapiens
gttgaaaattctcaa

SEQ ID NO: 1021858 - DNA, 15 bp, Homo sapiens
ttgaaaattctcaac

SEQ ID NO: 1021859 - DNA, 15 bp, Homo sapiens
tgaaaattctcaaca

SEQ ID NO: 1021860 - DNA, 15 bp, Homo sapiens
gaaaattctcaacat

SEQ ID NO: 1021861 - DNA, 15 bp, Homo sapiens
aaaattctcaacatg

SEQ ID NO: 1021862 - DNA, 15 bp, Homo sapiens
aaattctcaacatgg

SEQ ID NO: 1021863 - DNA, 15 bp, Homo sapiens
aattctcaacatggc

SEQ ID NO: 1021864 - DNA, 15 bp, Homo sapiens
attctcaacatggct

SEQ ID NO: 1021865 - DNA, 15 bp, Homo sapiens
ttctcaacatggcta

SEQ ID NO: 1021866 - DNA, 15 bp, Homo sapiens
tctcaacatggctaa

SEQ ID NO: 1021867 - DNA, 15 bp, Homo sapiens
ctcaacatggctaaa

SEQ ID NO: 1021868 - DNA, 15 bp, Homo sapiens
tcaacatggctaaat

SEQ ID NO: 1021869 - DNA, 15 bp, Homo sapiens
caacatggctaaata

SEQ ID NO: 1021870 - DNA, 15 bp, Homo sapiens
aacatggctaaatac

SEQ ID NO: 1021871 - DNA, 15 bp, Homo sapiens
acatggctaaatact

SEQ ID NO: 1021872 - DNA, 15 bp, Homo sapiens
catggctaaatactt

SEQ ID NO: 1021873 - DNA, 15 bp, Homo sapiens
atggctaaatactta

SEQ ID NO: 1021874 - DNA, 15 bp, Homo sapiens
tggctaaatacttag

SEQ ID NO: 1021875 - DNA, 15 bp, Homo sapiens
ggctaaatacttaga

SEQ ID NO: 1021876 - DNA, 15 bp, Homo sapiens
gctaaatacttagat

SEQ ID NO: 1021877 - DNA, 15 bp, Homo sapiens
ctaaatacttagatt

SEQ ID NO: 1021878 - DNA, 15 bp, Homo sapiens
taaatacttagattg

SEQ ID NO: 1021879 - DNA, 15 bp, Homo sapiens
aaatacttagattgc

SEQ ID NO: 1021880 - DNA, 15 bp, Homo sapiens
aatacttagattgca

SEQ ID NO: 1021881 - DNA, 15 bp, Homo sapiens
atacttagattgcat

SEQ ID NO: 1021882 - DNA, 15 bp, Homo sapiens
tacttagattgcatt

SEQ ID NO: 1021883 - DNA, 15 bp, Homo sapiens
acttagattgcattg

SEQ ID NO: 1021884 - DNA, 15 bp, Homo sapiens
cttagattgcattgg

SEQ ID NO: 1021885 - DNA, 15 bp, Homo sapiens
ttagattgcattggt

SEQ ID NO: 1021886 - DNA, 15 bp, Homo sapiens
tagattgcattggtg

SEQ ID NO: 1021887 - DNA, 15 bp, Homo sapiens
agattgcattggtgg

SEQ ID NO: 1021888 - DNA, 15 bp, Homo sapiens
gattgcattggtggt

SEQ ID NO: 1021889 - DNA, 15 bp, Homo sapiens
attgcattggtggtg

SEQ ID NO: 1021890 - DNA, 15 bp, Homo sapiens
ttgcattggtggtgt

SEQ ID NO: 1021891 - DNA, 15 bp, Homo sapiens
tgcattggtggtgtg

SEQ ID NO: 1021892 - DNA, 15 bp, Homo sapiens
gcattggtggtgtgc

SEQ ID NO: 1021893 - DNA, 15 bp, Homo sapiens
cattggtggtgtgcc

SEQ ID NO: 1021894 - DNA, 15 bp, Homo sapiens
attggtggtgtgcct

SEQ ID NO: 1021895 - DNA, 15 bp, Homo sapiens
ttggtggtgtgcctg

SEQ ID NO: 1021896 - DNA, 15 bp, Homo sapiens
tggtggtgtgcctgt

SEQ ID NO: 1021897 - DNA, 15 bp, Homo sapiens
ggtggtgtgcctgtg

SEQ ID NO: 1021898 - DNA, 15 bp, Homo sapiens
gtggtgtgcctgtga

SEQ ID NO: 1021899 - DNA, 15 bp, Homo sapiens
tggtgtgcctgtgaa

SEQ ID NO: 1021900 - DNA, 15 bp, Homo sapiens
ggtgtgcctgtgaaa

SEQ ID NO: 1021901 - DNA, 15 bp, Homo sapiens
gtgtgcctgtgaaag

SEQ ID NO: 1021902 - DNA, 15 bp, Homo sapiens
tgtgcctgtgaaagc

SEQ ID NO: 1021903 - DNA, 15 bp, Homo sapiens
gtgcctgtgaaagct

SEQ ID NO: 1021904 - DNA, 15 bp, Homo sapiens
tgcctgtgaaagcta

SEQ ID NO: 1021905 - DNA, 15 bp, Homo sapiens
gcctgtgaaagctat

SEQ ID NO: 1021906 - DNA, 15 bp, Homo sapiens
cctgtgaaagctatt

SEQ ID NO: 1021907 - DNA, 15 bp, Homo sapiens
ctgtgaaagctattt

SEQ ID NO: 1021908 - DNA, 15 bp, Homo sapiens
tgtgaaagctatttg

SEQ ID NO: 1021909 - DNA, 15 bp, Homo sapiens
gtgaaagctatttgg

SEQ ID NO: 1021910 - DNA, 15 bp, Homo sapiens
tgaaagctatttggg

SEQ ID NO: 1021911 - DNA, 15 bp, Homo sapiens
gaaagctatttgggg

SEQ ID NO: 1021912 - DNA, 15 bp, Homo sapiens
aaagctatttggggg

SEQ ID NO: 1021913 - DNA, 15 bp, Homo sapiens
aagctatttgggggt

SEQ ID NO: 1021914 - DNA, 15 bp, Homo sapiens
agctatttgggggtt

SEQ ID NO: 1021915 - DNA, 15 bp, Homo sapiens
gctatttgggggttg

SEQ ID NO: 1021916 - DNA, 15 bp, Homo sapiens
ctatttgggggttgt

SEQ ID NO: 1021917 - DNA, 15 bp, Homo sapiens
tatttgggggttgtg

SEQ ID NO: 1021918 - DNA, 15 bp, Homo sapiens
atttgggggttgtgt

SEQ ID NO: 1021919 - DNA, 15 bp, Homo sapiens
tttgggggttgtgta

SEQ ID NO: 1021920 - DNA, 15 bp, Homo sapiens
ttgggggttgtgtat

SEQ ID NO: 1021921 - DNA, 15 bp, Homo sapiens
tgggggttgtgtatg

SEQ ID NO: 1021922 - DNA, 15 bp, Homo sapiens
gggggttgtgtatgt

SEQ ID NO: 1021923 - DNA, 15 bp, Homo sapiens
ggggttgtgtatgtg

SEQ ID NO: 1021924 - DNA, 15 bp, Homo sapiens
gggttgtgtatgtgg

SEQ ID NO: 1021925 - DNA, 15 bp, Homo sapiens
ggttgtgtatgtggt

SEQ ID NO: 1021926 - DNA, 15 bp, Homo sapiens
gttgtgtatgtggtt

SEQ ID NO: 1021927 - DNA, 15 bp, Homo sapiens
ttgtgtatgtggttc

SEQ ID NO: 1021928 - DNA, 15 bp, Homo sapiens
tgtgtatgtggttct

SEQ ID NO: 1021929 - DNA, 15 bp, Homo sapiens
gtgtatgtggttctg

SEQ ID NO: 1021930 - DNA, 15 bp, Homo sapiens
tgtatgtggttctgc

SEQ ID NO: 1021931 - DNA, 15 bp, Homo sapiens
gtatgtggttctgct

SEQ ID NO: 1021932 - DNA, 15 bp, Homo sapiens
tatgtggttctgctc

SEQ ID NO: 1021933 - DNA, 15 bp, Homo sapiens
atgtggttctgctca

SEQ ID NO: 1021934 - DNA, 15 bp, Homo sapiens
tgtggttctgctcat

SEQ ID NO: 1021935 - DNA, 15 bp, Homo sapiens
gtggttctgctcatt

SEQ ID NO: 1021936 - DNA, 15 bp, Homo sapiens
tggttctgctcattg

SEQ ID NO: 1021937 - DNA, 15 bp, Homo sapiens
ggttctgctcattgg

SEQ ID NO: 1021938 - DNA, 15 bp, Homo sapiens
gttctgctcattgga

SEQ ID NO: 1021939 - DNA, 15 bp, Homo sapiens
ttctgctcattggaa

SEQ ID NO: 1021940 - DNA, 15 bp, Homo sapiens
tctgctcattggaaa

SEQ ID NO: 1021941 - DNA, 15 bp, Homo sapiens
ctgctcattggaaag

SEQ ID NO: 1021942 - DNA, 15 bp, Homo sapiens
tgctcattggaaaga

SEQ ID NO: 1021943 - DNA, 15 bp, Homo sapiens
gctcattggaaagac

SEQ ID NO: 1021944 - DNA, 15 bp, Homo sapiens
ctcattggaaagaca

SEQ ID NO: 1021945 - DNA, 15 bp, Homo sapiens
tcattggaaagacag

SEQ ID NO: 1021946 - DNA, 15 bp, Homo sapiens
cattggaaagacaga

SEQ ID NO: 1021947 - DNA, 15 bp, Homo sapiens
attggaaagacagaa

SEQ ID NO: 1021948 - DNA, 15 bp, Homo sapiens
ttggaaagacagaag

SEQ ID NO: 1021949 - DNA, 15 bp, Homo sapiens
tggaaagacagaaga

SEQ ID NO: 1021950 - DNA, 15 bp, Homo sapiens
ggaaagacagaagag

SEQ ID NO: 1021951 - DNA, 15 bp, Homo sapiens
gaaagacagaagaga

SEQ ID NO: 1021952 - DNA, 15 bp, Homo sapiens
aaagacagaagagag

SEQ ID NO: 1021953 - DNA, 15 bp, Homo sapiens
aagacagaagagaga

SEQ ID NO: 1021954 - DNA, 15 bp, Homo sapiens
agacagaagagagaa

SEQ ID NO: 1021955 - DNA, 15 bp, Homo sapiens
gacagaagagagaaa

SEQ ID NO: 1021956 - DNA, 15 bp, Homo sapiens
acagaagagagaaag

SEQ ID NO: 1021957 - DNA, 15 bp, Homo sapiens
cagaagagagaaagg

SEQ ID NO: 1021958 - DNA, 15 bp, Homo sapiens
agaagagagaaaggg

SEQ ID NO: 1021959 - DNA, 15 bp, Homo sapiens
gaagagagaaagggg

SEQ ID NO: 1021960 - DNA, 15 bp, Homo sapiens
aagagagaaaggggg

SEQ ID NO: 1021961 - DNA, 15 bp, Homo sapiens
agagagaaagggggc

SEQ ID NO: 1021962 - DNA, 15 bp, Homo sapiens
gagagaaagggggcc

SEQ ID NO: 1021963 - DNA, 15 bp, Homo sapiens
agagaaagggggccg

SEQ ID NO: 1021964 - DNA, 15 bp, Homo sapiens
gagaaagggggccgg

SEQ ID NO: 1021965 - DNA, 15 bp, Homo sapiens
agaaagggggccgga

SEQ ID NO: 1021966 - DNA, 15 bp, Homo sapiens
gaaagggggccggaa

SEQ ID NO: 1021967 - DNA, 15 bp, Homo sapiens
aaagggggccggaaa

SEQ ID NO: 1021968 - DNA, 15 bp, Homo sapiens
aagggggccggaaag

SEQ ID NO: 1021969 - DNA, 15 bp, Homo sapiens
agggggccggaaagg

SEQ ID NO: 1021970 - DNA, 15 bp, Homo sapiens
gggggccggaaagga

SEQ ID NO: 1021971 - DNA, 15 bp, Homo sapiens
ggggccggaaaggat

SEQ ID NO: 1021972 - DNA, 15 bp, Homo sapiens
gggccggaaaggata

SEQ ID NO: 1021973 - DNA, 15 bp, Homo sapiens
ggccggaaaggatac

SEQ ID NO: 1021974 - DNA, 15 bp, Homo sapiens
gccggaaaggatact

SEQ ID NO: 1021975 - DNA, 15 bp, Homo sapiens
ccggaaaggatactg

SEQ ID NO: 1021976 - DNA, 15 bp, Homo sapiens
cggaaaggatactgg

SEQ ID NO: 1021977 - DNA, 15 bp, Homo sapiens
ggaaaggatactggg

SEQ ID NO: 1021978 - DNA, 15 bp, Homo sapiens
gaaaggatactggga

SEQ ID NO: 1021979 - DNA, 15 bp, Homo sapiens
aaaggatactgggag

SEQ ID NO: 1021980 - DNA, 15 bp, Homo sapiens
aaggatactgggaga

SEQ ID NO: 1021981 - DNA, 15 bp, Homo sapiens
aggatactgggagaa

SEQ ID NO: 1021982 - DNA, 15 bp, Homo sapiens
ggatactgggagaaa

SEQ ID NO: 1021983 - DNA, 15 bp, Homo sapiens
gatactgggagaaaa

SEQ ID NO: 1021984 - DNA, 15 bp, Homo sapiens
atactgggagaaaac

SEQ ID NO: 1021985 - DNA, 15 bp, Homo sapiens
tactgggagaaaaca

SEQ ID NO: 1021986 - DNA, 15 bp, Homo sapiens
actgggagaaaacag

SEQ ID NO: 1021987 - DNA, 15 bp, Homo sapiens
ctgggagaaaacaga

SEQ ID NO: 1021988 - DNA, 15 bp, Homo sapiens
tgggagaaaacagaa

SEQ ID NO: 1021989 - DNA, 15 bp, Homo sapiens
gggagaaaacagaaa

SEQ ID NO: 1021990 - DNA, 15 bp, Homo sapiens
ggagaaaacagaaac

SEQ ID NO: 1021991 - DNA, 15 bp, Homo sapiens
gagaaaacagaaaca

SEQ ID NO: 1021992 - DNA, 15 bp, Homo sapiens
agaaaacagaaacaa

SEQ ID NO: 1021993 - DNA, 15 bp, Homo sapiens
gaaaacagaaacaac

SEQ ID NO: 1021994 - DNA, 15 bp, Homo sapiens
aaaacagaaacaact

SEQ ID NO: 1021995 - DNA, 15 bp, Homo sapiens
aaacagaaacaacta

SEQ ID NO: 1021996 - DNA, 15 bp, Homo sapiens
aacagaaacaactat

SEQ ID NO: 1021997 - DNA, 15 bp, Homo sapiens
acagaaacaactatt

SEQ ID NO: 1021998 - DNA, 15 bp, Homo sapiens
cagaaacaactattc

SEQ ID NO: 1021999 - DNA, 15 bp, Homo sapiens
agaaacaactattcc

SEQ ID NO: 1022000 - DNA, 15 bp, Homo sapiens
gaaacaactattcct

SEQ ID NO: 1022001 - DNA, 15 bp, Homo sapiens
aaacaactattcctg

SEQ ID NO: 1022002 - DNA, 15 bp, Homo sapiens
aacaactattcctgg

SEQ ID NO: 1022003 - DNA, 15 bp, Homo sapiens
acaactattcctggt

SEQ ID NO: 1022004 - DNA, 15 bp, Homo sapiens
caactattcctggtg

SEQ ID NO: 1022005 - DNA, 15 bp, Homo sapiens
aactattcctggtga

SEQ ID NO: 1022006 - DNA, 15 bp, Homo sapiens
actattcctggtgaa

SEQ ID NO: 1022007 - DNA, 15 bp, Homo sapiens
ctattcctggtgaaa

SEQ ID NO: 1022008 - DNA, 15 bp, Homo sapiens
tattcctggtgaaag

SEQ ID NO: 1022009 - DNA, 15 bp, Homo sapiens
attcctggtgaaagt

SEQ ID NO: 1022010 - DNA, 15 bp, Homo sapiens
ttcctggtgaaagtg

SEQ ID NO: 1022011 - DNA, 15 bp, Homo sapiens
tcctggtgaaagtgt

SEQ ID NO: 1022012 - DNA, 15 bp, Homo sapiens
cctggtgaaagtgtg

SEQ ID NO: 1022013 - DNA, 15 bp, Homo sapiens
ctggtgaaagtgtgt

SEQ ID NO: 1022014 - DNA, 15 bp, Homo sapiens
tggtgaaagtgtgtg

SEQ ID NO: 1022015 - DNA, 15 bp, Homo sapiens
ggtgaaagtgtgtgg

SEQ ID NO: 1022016 - DNA, 15 bp, Homo sapiens
gtgaaagtgtgtggg

SEQ ID NO: 1022017 - DNA, 15 bp, Homo sapiens
tgaaagtgtgtgggc

SEQ ID NO: 1022018 - DNA, 15 bp, Homo sapiens
gaaagtgtgtgggct

SEQ ID NO: 1022019 - DNA, 15 bp, Homo sapiens
aaagtgtgtgggctt

SEQ ID NO: 1022020 - DNA, 15 bp, Homo sapiens
aagtgtgtgggcttc

SEQ ID NO: 1022021 - DNA, 15 bp, Homo sapiens
agtgtgtgggcttct

SEQ ID NO: 1022022 - DNA, 15 bp, Homo sapiens
gtgtgtgggcttctg

SEQ ID NO: 1022023 - DNA, 15 bp, Homo sapiens
tgtgtgggcttctga

SEQ ID NO: 1022024 - DNA, 15 bp, Homo sapiens
gtgtgggcttctgag

SEQ ID NO: 1022025 - DNA, 15 bp, Homo sapiens
tgtgggcttctgagg

SEQ ID NO: 1022026 - DNA, 15 bp, Homo sapiens
gtgggcttctgaggg

SEQ ID NO: 1022027 - DNA, 15 bp, Homo sapiens
tgggcttctgagggc

SEQ ID NO: 1022028 - DNA, 15 bp, Homo sapiens
gggcttctgagggcg

SEQ ID NO: 1022029 - DNA, 15 bp, Homo sapiens
ggcttctgagggcgg

SEQ ID NO: 1022030 - DNA, 15 bp, Homo sapiens
gcttctgagggcggt

SEQ ID NO: 1022031 - DNA, 15 bp, Homo sapiens
cttctgagggcggtt

SEQ ID NO: 1022032 - DNA, 15 bp, Homo sapiens
ttctgagggcggttg

SEQ ID NO: 1022033 - DNA, 15 bp, Homo sapiens
tctgagggcggttgt

SEQ ID NO: 1022034 - DNA, 15 bp, Homo sapiens
ctgagggcggttgtg

SEQ ID NO: 1022035 - DNA, 15 bp, Homo sapiens
tgagggcggttgtgg

SEQ ID NO: 1022036 - DNA, 15 bp, Homo sapiens
gagggcggttgtggc

SEQ ID NO: 1022037 - DNA, 15 bp, Homo sapiens
agggcggttgtggca

SEQ ID NO: 1022038 - DNA, 15 bp, Homo sapiens
gggcggttgtggcag

SEQ ID NO: 1022039 - DNA, 15 bp, Homo sapiens
ggcggttgtggcagc

SEQ ID NO: 1022040 - DNA, 15 bp, Homo sapiens
gcggttgtggcagct

SEQ ID NO: 1022041 - DNA, 15 bp, Homo sapiens
cggttgtggcagctg

SEQ ID NO: 1022042 - DNA, 15 bp, Homo sapiens
ggttgtggcagctga

SEQ ID NO: 1022043 - DNA, 15 bp, Homo sapiens
gttgtggcagctgag

SEQ ID NO: 1022044 - DNA, 15 bp, Homo sapiens
ttgtggcagctgaga

SEQ ID NO: 1022045 - DNA, 15 bp, Homo sapiens
tgtggcagctgagaa

SEQ ID NO: 1022046 - DNA, 15 bp, Homo sapiens
gtggcagctgagaag

SEQ ID NO: 1022047 - DNA, 15 bp, Homo sapiens
tggcagctgagaagt

SEQ ID NO: 1022048 - DNA, 15 bp, Homo sapiens
ggcagctgagaagtg

SEQ ID NO: 1022049 - DNA, 15 bp, Homo sapiens
gcagctgagaagtgc

SEQ ID NO: 1022050 - DNA, 15 bp, Homo sapiens
cagctgagaagtgct

SEQ ID NO: 1022051 - DNA, 15 bp, Homo sapiens
agctgagaagtgctg

SEQ ID NO: 1022052 - DNA, 15 bp, Homo sapiens
gctgagaagtgctgg

SEQ ID NO: 1022053 - DNA, 15 bp, Homo sapiens
ctgagaagtgctggt

SEQ ID NO: 1022054 - DNA, 15 bp, Homo sapiens
tgagaagtgctggtt

SEQ ID NO: 1022055 - DNA, 15 bp, Homo sapiens
gagaagtgctggtta

SEQ ID NO: 1022056 - DNA, 15 bp, Homo sapiens
agaagtgctggttat

SEQ ID NO: 1022057 - DNA, 15 bp, Homo sapiens
gaagtgctggttata

SEQ ID NO: 1022058 - DNA, 15 bp, Homo sapiens
aagtgctggttatat

SEQ ID NO: 1022059 - DNA, 15 bp, Homo sapiens
agtgctggttatata

SEQ ID NO: 1022060 - DNA, 15 bp, Homo sapiens
gtgctggttatatat

SEQ ID NO: 1022061 - DNA, 15 bp, Homo sapiens
tgctggttatatata

SEQ ID NO: 1022062 - DNA, 15 bp, Homo sapiens
gctggttatatatag

SEQ ID NO: 1022063 - DNA, 15 bp, Homo sapiens
ctggttatatatagc

SEQ ID NO: 1022064 - DNA, 15 bp, Homo sapiens
tggttatatatagct

SEQ ID NO: 1022065 - DNA, 15 bp, Homo sapiens
ggttatatatagctg

SEQ ID NO: 1022066 - DNA, 15 bp, Homo sapiens
gttatatatagctgg

SEQ ID NO: 1022067 - DNA, 15 bp, Homo sapiens
ttatatatagctggg

SEQ ID NO: 1022068 - DNA, 15 bp, Homo sapiens
tatatatagctgggt

SEQ ID NO: 1022069 - DNA, 15 bp, Homo sapiens
atatatagctgggtc

SEQ ID NO: 1022070 - DNA, 15 bp, Homo sapiens
tatatagctgggtca

SEQ ID NO: 1022071 - DNA, 15 bp, Homo sapiens
atatagctgggtcac

SEQ ID NO: 1022072 - DNA, 15 bp, Homo sapiens
tatagctgggtcaca

SEQ ID NO: 1022073 - DNA, 15 bp, Homo sapiens
atagctgggtcacag

SEQ ID NO: 1022074 - DNA, 15 bp, Homo sapiens
tagctgggtcacagt

SEQ ID NO: 1022075 - DNA, 15 bp, Homo sapiens
agctgggtcacagtg

SEQ ID NO: 1022076 - DNA, 15 bp, Homo sapiens
gctgggtcacagtga

SEQ ID NO: 1022077 - DNA, 15 bp, Homo sapiens
ctgggtcacagtgat

SEQ ID NO: 1022078 - DNA, 15 bp, Homo sapiens
tgggtcacagtgatg

SEQ ID NO: 1022079 - DNA, 15 bp, Homo sapiens
gggtcacagtgatgg

SEQ ID NO: 1022080 - DNA, 15 bp, Homo sapiens
ggtcacagtgatggg

SEQ ID NO: 1022081 - DNA, 15 bp, Homo sapiens
gtcacagtgatgggg

SEQ ID NO: 1022082 - DNA, 15 bp, Homo sapiens
tcacagtgatgggga

SEQ ID NO: 1022083 - DNA, 15 bp, Homo sapiens
cacagtgatggggag

SEQ ID NO: 1022084 - DNA, 15 bp, Homo sapiens
acagtgatggggagg

SEQ ID NO: 1022085 - DNA, 15 bp, Homo sapiens
cagtgatggggaggt

SEQ ID NO: 1022086 - DNA, 15 bp, Homo sapiens
agtgatggggaggtg

SEQ ID NO: 1022087 - DNA, 15 bp, Homo sapiens
gtgatggggaggtgg

SEQ ID NO: 1022088 - DNA, 15 bp, Homo sapiens
tgatggggaggtggg

SEQ ID NO: 1022089 - DNA, 15 bp, Homo sapiens
gatggggaggtgggg

SEQ ID NO: 1022090 - DNA, 15 bp, Homo sapiens
atggggaggtgggga

SEQ ID NO: 1022091 - DNA, 15 bp, Homo sapiens
tggggaggtggggat

SEQ ID NO: 1022092 - DNA, 15 bp, Homo sapiens
ggggaggtggggatg

SEQ ID NO: 1022093 - DNA, 15 bp, Homo sapiens
gggaggtggggatgg

SEQ ID NO: 1022094 - DNA, 15 bp, Homo sapiens
ggaggtggggatggt

SEQ ID NO: 1022095 - DNA, 15 bp, Homo sapiens
gaggtggggatggtg

SEQ ID NO: 1022096 - DNA, 15 bp, Homo sapiens
aggtggggatggtgg

SEQ ID NO: 1022097 - DNA, 15 bp, Homo sapiens
ggtggggatggtggt

SEQ ID NO: 1022098 - DNA, 15 bp, Homo sapiens
gtggggatggtggtg

SEQ ID NO: 1022099 - DNA, 15 bp, Homo sapiens
tggggatggtggtgg

SEQ ID NO: 1022100 - DNA, 15 bp, Homo sapiens
ggggatggtggtgga

SEQ ID NO: 1022101 - DNA, 15 bp, Homo sapiens
gggatggtggtggat

SEQ ID NO: 1022102 - DNA, 15 bp, Homo sapiens
ggatggtggtggatg

SEQ ID NO: 1022103 - DNA, 15 bp, Homo sapiens
gatggtggtggatga

SEQ ID NO: 1022104 - DNA, 15 bp, Homo sapiens
atggtggtggatgac

SEQ ID NO: 1022105 - DNA, 15 bp, Homo sapiens
tggtggtggatgact

SEQ ID NO: 1022106 - DNA, 15 bp, Homo sapiens
ggtggtggatgactg

SEQ ID NO: 1022107 - DNA, 15 bp, Homo sapiens
gtggtggatgactgt

SEQ ID NO: 1022108 - DNA, 15 bp, Homo sapiens
tggtggatgactgtg

SEQ ID NO: 1022109 - DNA, 15 bp, Homo sapiens
ggtggatgactgtgt

SEQ ID NO: 1022110 - DNA, 15 bp, Homo sapiens
gtggatgactgtgtc

SEQ ID NO: 1022111 - DNA, 15 bp, Homo sapiens
tggatgactgtgtca

SEQ ID NO: 1022112 - DNA, 15 bp, Homo sapiens
ggatgactgtgtcat

SEQ ID NO: 1022113 - DNA, 15 bp, Homo sapiens
gatgactgtgtcatg

SEQ ID NO: 1022114 - DNA, 15 bp, Homo sapiens
atgactgtgtcatgt

SEQ ID NO: 1022115 - DNA, 15 bp, Homo sapiens
tgactgtgtcatgtg

SEQ ID NO: 1022116 - DNA, 15 bp, Homo sapiens
gactgtgtcatgtgc

SEQ ID NO: 1022117 - DNA, 15 bp, Homo sapiens
actgtgtcatgtgcc

SEQ ID NO: 1022118 - DNA, 15 bp, Homo sapiens
ctgtgtcatgtgcct

SEQ ID NO: 1022119 - DNA, 15 bp, Homo sapiens
tgtgtcatgtgcctg

SEQ ID NO: 1022120 - DNA, 15 bp, Homo sapiens
gtgtcatgtgcctgt

SEQ ID NO: 1022121 - DNA, 15 bp, Homo sapiens
tgtcatgtgcctgtg

SEQ ID NO: 1022122 - DNA, 15 bp, Homo sapiens
gtcatgtgcctgtgg

SEQ ID NO: 1022123 - DNA, 15 bp, Homo sapiens
tcatgtgcctgtggt

SEQ ID NO: 1022124 - DNA, 15 bp, Homo sapiens
catgtgcctgtggtg

SEQ ID NO: 1022125 - DNA, 15 bp, Homo sapiens
atgtgcctgtggtgt

SEQ ID NO: 1022126 - DNA, 15 bp, Homo sapiens
tgtgcctgtggtgtt

SEQ ID NO: 1022127 - DNA, 15 bp, Homo sapiens
gtgcctgtggtgttt

SEQ ID NO: 1022128 - DNA, 15 bp, Homo sapiens
tgcctgtggtgttta

SEQ ID NO: 1022129 - DNA, 15 bp, Homo sapiens
gcctgtggtgtttag

SEQ ID NO: 1022130 - DNA, 15 bp, Homo sapiens
cctgtggtgtttagg

SEQ ID NO: 1022131 - DNA, 15 bp, Homo sapiens
ctgtggtgtttaggg

SEQ ID NO: 1022132 - DNA, 15 bp, Homo sapiens
tgtggtgtttagggg

SEQ ID NO: 1022133 - DNA, 15 bp, Homo sapiens
gtggtgtttaggggg

SEQ ID NO: 1022134 - DNA, 15 bp, Homo sapiens
tggtgtttagggggt

SEQ ID NO: 1022135 - DNA, 15 bp, Homo sapiens
ggtgtttagggggtg

SEQ ID NO: 1022136 - DNA, 15 bp, Homo sapiens
gtgtttagggggtga

SEQ ID NO: 1022137 - DNA, 15 bp, Homo sapiens
tgtttagggggtgat

SEQ ID NO: 1022138 - DNA, 15 bp, Homo sapiens
gtttagggggtgatc

SEQ ID NO: 1022139 - DNA, 15 bp, Homo sapiens
tttagggggtgatcc

SEQ ID NO: 1022140 - DNA, 15 bp, Homo sapiens
ttagggggtgatcct

SEQ ID NO: 1022141 - DNA, 15 bp, Homo sapiens
tagggggtgatccta

SEQ ID NO: 1022142 - DNA, 15 bp, Homo sapiens
agggggtgatcctag

SEQ ID NO: 1022143 - DNA, 15 bp, Homo sapiens
gggggtgatcctagt

SEQ ID NO: 1022144 - DNA, 15 bp, Homo sapiens
ggggtgatcctagtg

SEQ ID NO: 1022145 - DNA, 15 bp, Homo sapiens
gggtgatcctagtgg

SEQ ID NO: 1022146 - DNA, 15 bp, Homo sapiens
ggtgatcctagtggg

SEQ ID NO: 1022147 - DNA, 15 bp, Homo sapiens
gtgatcctagtgggg

SEQ ID NO: 1022148 - DNA, 15 bp, Homo sapiens
tgatcctagtgggga

SEQ ID NO: 1022149 - DNA, 15 bp, Homo sapiens
gatcctagtggggag

SEQ ID NO: 1022150 - DNA, 15 bp, Homo sapiens
atcctagtggggagg

SEQ ID NO: 1022151 - DNA, 15 bp, Homo sapiens
tcctagtggggaggg

SEQ ID NO: 1022152 - DNA, 15 bp, Homo sapiens
cctagtggggagggc

SEQ ID NO: 1022153 - DNA, 15 bp, Homo sapiens
ctagtggggagggcc

SEQ ID NO: 1022154 - DNA, 15 bp, Homo sapiens
tagtggggagggcct

SEQ ID NO: 1022155 - DNA, 15 bp, Homo sapiens
agtggggagggcctg

SEQ ID NO: 1022156 - DNA, 15 bp, Homo sapiens
gtggggagggcctgg

SEQ ID NO: 1022157 - DNA, 15 bp, Homo sapiens
tggggagggcctggg

SEQ ID NO: 1022158 - DNA, 15 bp, Homo sapiens
ggggagggcctggga

SEQ ID NO: 1022159 - DNA, 15 bp, Homo sapiens
gggagggcctgggag

SEQ ID NO: 1022160 - DNA, 15 bp, Homo sapiens
ggagggcctgggaga

SEQ ID NO: 1022161 - DNA, 15 bp, Homo sapiens
gagggcctgggagac

SEQ ID NO: 1022162 - DNA, 15 bp, Homo sapiens
agggcctgggagacg

SEQ ID NO: 1022163 - DNA, 15 bp, Homo sapiens
gggcctgggagacgg

SEQ ID NO: 1022164 - DNA, 15 bp, Homo sapiens
ggcctgggagacggc

SEQ ID NO: 1022165 - DNA, 15 bp, Homo sapiens
gcctgggagacggct

SEQ ID NO: 1022166 - DNA, 15 bp, Homo sapiens
cctgggagacggctg

SEQ ID NO: 1022167 - DNA, 15 bp, Homo sapiens
ctgggagacggctgg

SEQ ID NO: 1022168 - DNA, 15 bp, Homo sapiens
tgggagacggctggg

SEQ ID NO: 1022169 - DNA, 15 bp, Homo sapiens
gggagacggctgggt

SEQ ID NO: 1022170 - DNA, 15 bp, Homo sapiens
ggagacggctgggtg

SEQ ID NO: 1022171 - DNA, 15 bp, Homo sapiens
gagacggctgggtgg

SEQ ID NO: 1022172 - DNA, 15 bp, Homo sapiens
agacggctgggtggt

SEQ ID NO: 1022173 - DNA, 15 bp, Homo sapiens
gacggctgggtggtg

SEQ ID NO: 1022174 - DNA, 15 bp, Homo sapiens
acggctgggtggtgg

SEQ ID NO: 1022175 - DNA, 15 bp, Homo sapiens
cggctgggtggtggt

SEQ ID NO: 1022176 - DNA, 15 bp, Homo sapiens
ggctgggtggtggtg

SEQ ID NO: 1022177 - DNA, 15 bp, Homo sapiens
gctgggtggtggtgt

SEQ ID NO: 1022178 - DNA, 15 bp, Homo sapiens
ctgggtggtggtgtg

SEQ ID NO: 1022179 - DNA, 15 bp, Homo sapiens
tgggtggtggtgtgt

SEQ ID NO: 1022180 - DNA, 15 bp, Homo sapiens
gggtggtggtgtgtg

SEQ ID NO: 1022181 - DNA, 15 bp, Homo sapiens
ggtggtggtgtgtgt

SEQ ID NO: 1022182 - DNA, 15 bp, Homo sapiens
gtggtggtgtgtgta

SEQ ID NO: 1022183 - DNA, 15 bp, Homo sapiens
tggtggtgtgtgtac

SEQ ID NO: 1022184 - DNA, 15 bp, Homo sapiens
ggtggtgtgtgtacc

SEQ ID NO: 1022185 - DNA, 15 bp, Homo sapiens
gtggtgtgtgtaccc

SEQ ID NO: 1022186 - DNA, 15 bp, Homo sapiens
tggtgtgtgtaccct

SEQ ID NO: 1022187 - DNA, 15 bp, Homo sapiens
ggtgtgtgtaccctg

SEQ ID NO: 1022188 - DNA, 15 bp, Homo sapiens
gtgtgtgtaccctgt

SEQ ID NO: 1022189 - DNA, 15 bp, Homo sapiens
tgtgtgtaccctgtc

SEQ ID NO: 1022190 - DNA, 15 bp, Homo sapiens
gtgtgtaccctgtct

SEQ ID NO: 1022191 - DNA, 15 bp, Homo sapiens
tgtgtaccctgtctg

SEQ ID NO: 1022192 - DNA, 15 bp, Homo sapiens
gtgtaccctgtctga

SEQ ID NO: 1022193 - DNA, 15 bp, Homo sapiens
tgtaccctgtctgag

SEQ ID NO: 1022194 - DNA, 15 bp, Homo sapiens
gtaccctgtctgagc

SEQ ID NO: 1022195 - DNA, 15 bp, Homo sapiens
taccctgtctgagct

SEQ ID NO: 1022196 - DNA, 15 bp, Homo sapiens
accctgtctgagctt

SEQ ID NO: 1022197 - DNA, 15 bp, Homo sapiens
ccctgtctgagcttt

SEQ ID NO: 1022198 - DNA, 15 bp, Homo sapiens
cctgtctgagctttg

SEQ ID NO: 1022199 - DNA, 15 bp, Homo sapiens
ctgtctgagctttgg

SEQ ID NO: 1022200 - DNA, 15 bp, Homo sapiens
tgtctgagctttggg

SEQ ID NO: 1022201 - DNA, 15 bp, Homo sapiens
gtctgagctttgggc

SEQ ID NO: 1022202 - DNA, 15 bp, Homo sapiens
tctgagctttgggcc

SEQ ID NO: 1022203 - DNA, 15 bp, Homo sapiens
ctgagctttgggccg

SEQ ID NO: 1022204 - DNA, 15 bp, Homo sapiens
tgagctttgggccgg

SEQ ID NO: 1022205 - DNA, 15 bp, Homo sapiens
gagctttgggccggt

SEQ ID NO: 1022206 - DNA, 15 bp, Homo sapiens
agctttgggccggta

SEQ ID NO: 1022207 - DNA, 15 bp, Homo sapiens
gctttgggccggtaa

SEQ ID NO: 1022208 - DNA, 15 bp, Homo sapiens
ctttgggccggtaac

SEQ ID NO: 1022209 - DNA, 15 bp, Homo sapiens
tttgggccggtaaca

SEQ ID NO: 1022210 - DNA, 15 bp, Homo sapiens
ttgggccggtaacac

SEQ ID NO: 1022211 - DNA, 15 bp, Homo sapiens
tgggccggtaacaca

SEQ ID NO: 1022212 - DNA, 15 bp, Homo sapiens
gggccggtaacacaa

SEQ ID NO: 1022213 - DNA, 15 bp, Homo sapiens
ggccggtaacacaat

SEQ ID NO: 1022214 - DNA, 15 bp, Homo sapiens
gccggtaacacaatg

SEQ ID NO: 1022215 - DNA, 15 bp, Homo sapiens
ccggtaacacaatgg

SEQ ID NO: 1022216 - DNA, 15 bp, Homo sapiens
cggtaacacaatggc

SEQ ID NO: 1022217 - DNA, 15 bp, Homo sapiens
ggtaacacaatggca

SEQ ID NO: 1022218 - DNA, 15 bp, Homo sapiens
gtaacacaatggcaa

SEQ ID NO: 1022219 - DNA, 15 bp, Homo sapiens
taacacaatggcaac

SEQ ID NO: 1022220 - DNA, 15 bp, Homo sapiens
aacacaatggcaacg

SEQ ID NO: 1022221 - DNA, 15 bp, Homo sapiens
acacaatggcaacgt

SEQ ID NO: 1022222 - DNA, 15 bp, Homo sapiens
cacaatggcaacgta

SEQ ID NO: 1022223 - DNA, 15 bp, Homo sapiens
acaatggcaacgtaa

SEQ ID NO: 1022224 - DNA, 15 bp, Homo sapiens
caatggcaacgtaat

SEQ ID NO: 1022225 - DNA, 15 bp, Homo sapiens
aatggcaacgtaatt

SEQ ID NO: 1022226 - DNA, 15 bp, Homo sapiens
atggcaacgtaatta

SEQ ID NO: 1022227 - DNA, 15 bp, Homo sapiens
tggcaacgtaattat

SEQ ID NO: 1022228 - DNA, 15 bp, Homo sapiens
ggcaacgtaattatc

SEQ ID NO: 1022229 - DNA, 15 bp, Homo sapiens
gcaacgtaattatct

SEQ ID NO: 1022230 - DNA, 15 bp, Homo sapiens
caacgtaattatctg

SEQ ID NO: 1022231 - DNA, 15 bp, Homo sapiens
aacgtaattatctgg

SEQ ID NO: 1022232 - DNA, 15 bp, Homo sapiens
acgtaattatctggc

SEQ ID NO: 1022233 - DNA, 15 bp, Homo sapiens
cgtaattatctggct

SEQ ID NO: 1022234 - DNA, 15 bp, Homo sapiens
gtaattatctggctg

SEQ ID NO: 1022235 - DNA, 15 bp, Homo sapiens
taattatctggctga

SEQ ID NO: 1022236 - DNA, 15 bp, Homo sapiens
aattatctggctgaa

SEQ ID NO: 1022237 - DNA, 15 bp, Homo sapiens
attatctggctgaaa

SEQ ID NO: 1022238 - DNA, 15 bp, Homo sapiens
ttatctggctgaaac

SEQ ID NO: 1022239 - DNA, 15 bp, Homo sapiens
tatctggctgaaaca

SEQ ID NO: 1022240 - DNA, 15 bp, Homo sapiens
atctggctgaaacac

SEQ ID NO: 1022241 - DNA, 15 bp, Homo sapiens
tctggctgaaacacg

SEQ ID NO: 1022242 - DNA, 15 bp, Homo sapiens
ctggctgaaacacgc

SEQ ID NO: 1022243 - DNA, 15 bp, Homo sapiens
tggctgaaacacgct

SEQ ID NO: 1022244 - DNA, 15 bp, Homo sapiens
ggctgaaacacgctc

SEQ ID NO: 1022245 - DNA, 15 bp, Homo sapiens
gctgaaacacgctca

SEQ ID NO: 1022246 - DNA, 15 bp, Homo sapiens
ctgaaacacgctcaa

SEQ ID NO: 1022247 - DNA, 15 bp, Homo sapiens
tgaaacacgctcaaa

SEQ ID NO: 1022248 - DNA, 15 bp, Homo sapiens
gaaacacgctcaaat

SEQ ID NO: 1022249 - DNA, 15 bp, Homo sapiens
aaacacgctcaaatg

SEQ ID NO: 1022250 - DNA, 15 bp, Homo sapiens
aacacgctcaaatgg

SEQ ID NO: 1022251 - DNA, 15 bp, Homo sapiens
acacgctcaaatggc

SEQ ID NO: 1022252 - DNA, 15 bp, Homo sapiens
cacgctcaaatggca

SEQ ID NO: 1022253 - DNA, 15 bp, Homo sapiens
acgctcaaatggcaa

SEQ ID NO: 1022254 - DNA, 15 bp, Homo sapiens
cgctcaaatggcaaa

SEQ ID NO: 1022255 - DNA, 15 bp, Homo sapiens
gctcaaatggcaaaa

SEQ ID NO: 1022256 - DNA, 15 bp, Homo sapiens
ctcaaatggcaaaaa

SEQ ID NO: 1022257 - DNA, 15 bp, Homo sapiens
tcaaatggcaaaaag

SEQ ID NO: 1022258 - DNA, 15 bp, Homo sapiens
caaatggcaaaaagt

SEQ ID NO: 1022259 - DNA, 15 bp, Homo sapiens
aaatggcaaaaagtt

SEQ ID NO: 1022260 - DNA, 15 bp, Homo sapiens
aatggcaaaaagttg

SEQ ID NO: 1022261 - DNA, 15 bp, Homo sapiens
atggcaaaaagttgc

SEQ ID NO: 1022262 - DNA, 15 bp, Homo sapiens
tggcaaaaagttgca

SEQ ID NO: 1022263 - DNA, 15 bp, Homo sapiens
ggcaaaaagttgcaa

SEQ ID NO: 1022264 - DNA, 15 bp, Homo sapiens
gcaaaaagttgcaaa

SEQ ID NO: 1022265 - DNA, 15 bp, Homo sapiens
caaaaagttgcaaaa

SEQ ID NO: 1022266 - DNA, 15 bp, Homo sapiens
aaaaagttgcaaaat

SEQ ID NO: 1022267 - DNA, 15 bp, Homo sapiens
aaaagttgcaaaata

SEQ ID NO: 1022268 - DNA, 15 bp, Homo sapiens
aaagttgcaaaatag

SEQ ID NO: 1022269 - DNA, 15 bp, Homo sapiens
aagttgcaaaataga

SEQ ID NO: 1022270 - DNA, 15 bp, Homo sapiens
agttgcaaaatagat

SEQ ID NO: 1022271 - DNA, 15 bp, Homo sapiens
gttgcaaaatagatc

SEQ ID NO: 1022272 - DNA, 15 bp, Homo sapiens
ttgcaaaatagatcg

SEQ ID NO: 1022273 - DNA, 15 bp, Homo sapiens
tgcaaaatagatcga

SEQ ID NO: 1022274 - DNA, 15 bp, Homo sapiens
gcaaaatagatcgac

SEQ ID NO: 1022275 - DNA, 15 bp, Homo sapiens
caaaatagatcgacc

SEQ ID NO: 1022276 - DNA, 15 bp, Homo sapiens
aaaatagatcgacct

SEQ ID NO: 1022277 - DNA, 15 bp, Homo sapiens
aaatagatcgacctc

SEQ ID NO: 1022278 - DNA, 15 bp, Homo sapiens
aatagatcgacctcc

SEQ ID NO: 1022279 - DNA, 15 bp, Homo sapiens
atagatcgacctccc

SEQ ID NO: 1022280 - DNA, 15 bp, Homo sapiens
tagatcgacctccca

SEQ ID NO: 1022281 - DNA, 15 bp, Homo sapiens
agatcgacctcccag

SEQ ID NO: 1022282 - DNA, 15 bp, Homo sapiens
gatcgacctcccaga

SEQ ID NO: 1022283 - DNA, 15 bp, Homo sapiens
atcgacctcccagag

SEQ ID NO: 1022284 - DNA, 15 bp, Homo sapiens
tcgacctcccagaga

SEQ ID NO: 1022285 - DNA, 15 bp, Homo sapiens
cgacctcccagagaa

SEQ ID NO: 1022286 - DNA, 15 bp, Homo sapiens
gacctcccagagaag

SEQ ID NO: 1022287 - DNA, 15 bp, Homo sapiens
acctcccagagaaga

SEQ ID NO: 1022288 - DNA, 15 bp, Homo sapiens
cctcccagagaagag

SEQ ID NO: 1022289 - DNA, 15 bp, Homo sapiens
ctcccagagaagaga

SEQ ID NO: 1022290 - DNA, 15 bp, Homo sapiens
tcccagagaagagac

SEQ ID NO: 1022291 - DNA, 15 bp, Homo sapiens
cccagagaagagaca

SEQ ID NO: 1022292 - DNA, 15 bp, Homo sapiens
ccagagaagagacag

SEQ ID NO: 1022293 - DNA, 15 bp, Homo sapiens
cagagaagagacaga

SEQ ID NO: 1022294 - DNA, 15 bp, Homo sapiens
agagaagagacagag

SEQ ID NO: 1022295 - DNA, 15 bp, Homo sapiens
gagaagagacagagc

SEQ ID NO: 1022296 - DNA, 15 bp, Homo sapiens
agaagagacagagct

SEQ ID NO: 1022297 - DNA, 15 bp, Homo sapiens
gaagagacagagctg

SEQ ID NO: 1022298 - DNA, 15 bp, Homo sapiens
aagagacagagctgg

SEQ ID NO: 1022299 - DNA, 15 bp, Homo sapiens
agagacagagctggt

SEQ ID NO: 1022300 - DNA, 15 bp, Homo sapiens
gagacagagctggtt

SEQ ID NO: 1022301 - DNA, 15 bp, Homo sapiens
agacagagctggtta

SEQ ID NO: 1022302 - DNA, 15 bp, Homo sapiens
gacagagctggttac

SEQ ID NO: 1022303 - DNA, 15 bp, Homo sapiens
acagagctggttaca

SEQ ID NO: 1022304 - DNA, 15 bp, Homo sapiens
cagagctggttacag

SEQ ID NO: 1022305 - DNA, 15 bp, Homo sapiens
agagctggttacaga

SEQ ID NO: 1022306 - DNA, 15 bp, Homo sapiens
gagctggttacagag

SEQ ID NO: 1022307 - DNA, 15 bp, Homo sapiens
agctggttacagagg

SEQ ID NO: 1022308 - DNA, 15 bp, Homo sapiens
gctggttacagaggt

SEQ ID NO: 1022309 - DNA, 15 bp, Homo sapiens
ctggttacagaggtc

SEQ ID NO: 1022310 - DNA, 15 bp, Homo sapiens
tggttacagaggtct

SEQ ID NO: 1022311 - DNA, 15 bp, Homo sapiens
ggttacagaggtctg

SEQ ID NO: 1022312 - DNA, 15 bp, Homo sapiens
gttacagaggtctgc

SEQ ID NO: 1022313 - DNA, 15 bp, Homo sapiens
ttacagaggtctgca

SEQ ID NO: 1022314 - DNA, 15 bp, Homo sapiens
tacagaggtctgcac

SEQ ID NO: 1022315 - DNA, 15 bp, Homo sapiens
acagaggtctgcacc

SEQ ID NO: 1022316 - DNA, 15 bp, Homo sapiens
cagaggtctgcaccc

SEQ ID NO: 1022317 - DNA, 15 bp, Homo sapiens
agaggtctgcaccca

SEQ ID NO: 1022318 - DNA, 15 bp, Homo sapiens
gaggtctgcacccat

SEQ ID NO: 1022319 - DNA, 15 bp, Homo sapiens
aggtctgcacccatc

SEQ ID NO: 1022320 - DNA, 15 bp, Homo sapiens
ggtctgcacccatca

SEQ ID NO: 1022321 - DNA, 15 bp, Homo sapiens
gtctgcacccatcat

SEQ ID NO: 1022322 - DNA, 15 bp, Homo sapiens
tctgcacccatcatc

SEQ ID NO: 1022323 - DNA, 15 bp, Homo sapiens
ctgcacccatcatcc

SEQ ID NO: 1022324 - DNA, 15 bp, Homo sapiens
tgcacccatcatcct

SEQ ID NO: 1022325 - DNA, 15 bp, Homo sapiens
gcacccatcatcctt

SEQ ID NO: 1022326 - DNA, 15 bp, Homo sapiens
cacccatcatccttt

SEQ ID NO: 1022327 - DNA, 15 bp, Homo sapiens
acccatcatcctttt

SEQ ID NO: 1022328 - DNA, 15 bp, Homo sapiens
cccatcatccttttt

SEQ ID NO: 1022329 - DNA, 15 bp, Homo sapiens
ccatcatcctttttt

SEQ ID NO: 1022330 - DNA, 15 bp, Homo sapiens
catcatccttttttc

SEQ ID NO: 1022331 - DNA, 15 bp, Homo sapiens
atcatccttttttca

SEQ ID NO: 1022332 - DNA, 15 bp, Homo sapiens
tcatccttttttcaa

SEQ ID NO: 1022333 - DNA, 15 bp, Homo sapiens
catccttttttcaat

SEQ ID NO: 1022334 - DNA, 15 bp, Homo sapiens
atccttttttcaata

SEQ ID NO: 1022335 - DNA, 15 bp, Homo sapiens
tccttttttcaatac

SEQ ID NO: 1022336 - DNA, 15 bp, Homo sapiens
ccttttttcaataca

SEQ ID NO: 1022337 - DNA, 15 bp, Homo sapiens
cttttttcaatacat

SEQ ID NO: 1022338 - DNA, 15 bp, Homo sapiens
ttttttcaatacatt

SEQ ID NO: 1022339 - DNA, 15 bp, Homo sapiens
tttttcaatacattt

SEQ ID NO: 1022340 - DNA, 15 bp, Homo sapiens
ttttcaatacatttt

SEQ ID NO: 1022341 - DNA, 15 bp, Homo sapiens
tttcaatacatttta

SEQ ID NO: 1022342 - DNA, 15 bp, Homo sapiens
ttcaatacattttaa

SEQ ID NO: 1022343 - DNA, 15 bp, Homo sapiens
tcaatacattttaaa

SEQ ID NO: 1022344 - DNA, 15 bp, Homo sapiens
caatacattttaaac

SEQ ID NO: 1022345 - DNA, 15 bp, Homo sapiens
aatacattttaaaca

SEQ ID NO: 1022346 - DNA, 15 bp, Homo sapiens
atacattttaaacaa

SEQ ID NO: 1022347 - DNA, 15 bp, Homo sapiens
tacattttaaacaag

SEQ ID NO: 1022348 - DNA, 15 bp, Homo sapiens
acattttaaacaaga

SEQ ID NO: 1022349 - DNA, 15 bp, Homo sapiens
cattttaaacaagag

SEQ ID NO: 1022350 - DNA, 15 bp, Homo sapiens
attttaaacaagagg

SEQ ID NO: 1022351 - DNA, 15 bp, Homo sapiens
ttttaaacaagagga

SEQ ID NO: 1022352 - DNA, 15 bp, Homo sapiens
tttaaacaagaggat

SEQ ID NO: 1022353 - DNA, 15 bp, Homo sapiens
ttaaacaagaggatc

SEQ ID NO: 1022354 - DNA, 15 bp, Homo sapiens
taaacaagaggatct

SEQ ID NO: 1022355 - DNA, 15 bp, Homo sapiens
aaacaagaggatcta

SEQ ID NO: 1022356 - DNA, 15 bp, Homo sapiens
aacaagaggatctag

SEQ ID NO: 1022357 - DNA, 15 bp, Homo sapiens
acaagaggatctagc

SEQ ID NO: 1022358 - DNA, 15 bp, Homo sapiens
caagaggatctagcg

SEQ ID NO: 1022359 - DNA, 15 bp, Homo sapiens
aagaggatctagcga

SEQ ID NO: 1022360 - DNA, 15 bp, Homo sapiens
agaggatctagcgag

SEQ ID NO: 1022361 - DNA, 15 bp, Homo sapiens
gaggatctagcgagt

SEQ ID NO: 1022362 - DNA, 15 bp, Homo sapiens
aggatctagcgagtg

SEQ ID NO: 1022363 - DNA, 15 bp, Homo sapiens
ggatctagcgagtga

SEQ ID NO: 1022364 - DNA, 15 bp, Homo sapiens
gatctagcgagtgat

SEQ ID NO: 1022365 - DNA, 15 bp, Homo sapiens
atctagcgagtgatt

SEQ ID NO: 1022366 - DNA, 15 bp, Homo sapiens
tctagcgagtgattc

SEQ ID NO: 1022367 - DNA, 15 bp, Homo sapiens
ctagcgagtgattct

SEQ ID NO: 1022368 - DNA, 15 bp, Homo sapiens
tagcgagtgattctg

SEQ ID NO: 1022369 - DNA, 15 bp, Homo sapiens
agcgagtgattctga

SEQ ID NO: 1022370 - DNA, 15 bp, Homo sapiens
gcgagtgattctgat

SEQ ID NO: 1022371 - DNA, 15 bp, Homo sapiens
cgagtgattctgatt

SEQ ID NO: 1022372 - DNA, 15 bp, Homo sapiens
gagtgattctgattc

SEQ ID NO: 1022373 - DNA, 15 bp, Homo sapiens
agtgattctgattca

SEQ ID NO: 1022374 - DNA, 15 bp, Homo sapiens
gtgattctgattcaa

SEQ ID NO: 1022375 - DNA, 15 bp, Homo sapiens
tgattctgattcaat

SEQ ID NO: 1022376 - DNA, 15 bp, Homo sapiens
gattctgattcaata

SEQ ID NO: 1022377 - DNA, 15 bp, Homo sapiens
attctgattcaatac

SEQ ID NO: 1022378 - DNA, 15 bp, Homo sapiens
ttctgattcaataca

SEQ ID NO: 1022379 - DNA, 15 bp, Homo sapiens
tctgattcaatacac

SEQ ID NO: 1022380 - DNA, 15 bp, Homo sapiens
ctgattcaatacaca

SEQ ID NO: 1022381 - DNA, 15 bp, Homo sapiens
tgattcaatacacat

SEQ ID NO: 1022382 - DNA, 15 bp, Homo sapiens
gattcaatacacata

SEQ ID NO: 1022383 - DNA, 15 bp, Homo sapiens
attcaatacacataa

SEQ ID NO: 1022384 - DNA, 15 bp, Homo sapiens
ttcaatacacataat

SEQ ID NO: 1022385 - DNA, 15 bp, Homo sapiens
tcaatacacataatc

SEQ ID NO: 1022386 - DNA, 15 bp, Homo sapiens
caatacacataatca

SEQ ID NO: 1022387 - DNA, 15 bp, Homo sapiens
aatacacataatcag

SEQ ID NO: 1022388 - DNA, 15 bp, Homo sapiens
atacacataatcagt

SEQ ID NO: 1022389 - DNA, 15 bp, Homo sapiens
tacacataatcagtt

SEQ ID NO: 1022390 - DNA, 15 bp, Homo sapiens
acacataatcagttt

SEQ ID NO: 1022391 - DNA, 15 bp, Homo sapiens
cacataatcagtttg

SEQ ID NO: 1022392 - DNA, 15 bp, Homo sapiens
acataatcagtttgc

SEQ ID NO: 1022393 - DNA, 15 bp, Homo sapiens
cataatcagtttgca

SEQ ID NO: 1022394 - DNA, 15 bp, Homo sapiens
ataatcagtttgcaa

SEQ ID NO: 1022395 - DNA, 15 bp, Homo sapiens
taatcagtttgcaag

SEQ ID NO: 1022396 - DNA, 15 bp, Homo sapiens
aatcagtttgcaagt

SEQ ID NO: 1022397 - DNA, 15 bp, Homo sapiens
atcagtttgcaagtc

SEQ ID NO: 1022398 - DNA, 15 bp, Homo sapiens
tcagtttgcaagtct

SEQ ID NO: 1022399 - DNA, 15 bp, Homo sapiens
cagtttgcaagtctt

SEQ ID NO: 1022400 - DNA, 15 bp, Homo sapiens
agtttgcaagtctta

SEQ ID NO: 1022401 - DNA, 15 bp, Homo sapiens
gtttgcaagtcttat

SEQ ID NO: 1022402 - DNA, 15 bp, Homo sapiens
tttgcaagtcttatt

SEQ ID NO: 1022403 - DNA, 15 bp, Homo sapiens
ttgcaagtcttattt

SEQ ID NO: 1022404 - DNA, 15 bp, Homo sapiens
tgcaagtcttatttc

SEQ ID NO: 1022405 - DNA, 15 bp, Homo sapiens
gcaagtcttatttcc

SEQ ID NO: 1022406 - DNA, 15 bp, Homo sapiens
caagtcttatttcca

SEQ ID NO: 1022407 - DNA, 15 bp, Homo sapiens
aagtcttatttccat

SEQ ID NO: 1022408 - DNA, 15 bp, Homo sapiens
agtcttatttccatt

SEQ ID NO: 1022409 - DNA, 15 bp, Homo sapiens
gtcttatttccattt

SEQ ID NO: 1022410 - DNA, 15 bp, Homo sapiens
tcttatttccatttg

SEQ ID NO: 1022411 - DNA, 15 bp, Homo sapiens
cttatttccatttga

SEQ ID NO: 1022412 - DNA, 15 bp, Homo sapiens
ttatttccatttgaa

SEQ ID NO: 1022413 - DNA, 15 bp, Homo sapiens
tatttccatttgaaa

SEQ ID NO: 1022414 - DNA, 15 bp, Homo sapiens
atttccatttgaaaa

SEQ ID NO: 1022415 - DNA, 15 bp, Homo sapiens
tttccatttgaaaac

SEQ ID NO: 1022416 - DNA, 15 bp, Homo sapiens
ttccatttgaaaaca

SEQ ID NO: 1022417 - DNA, 15 bp, Homo sapiens
tccatttgaaaacag

SEQ ID NO: 1022418 - DNA, 15 bp, Homo sapiens
ccatttgaaaacagg

SEQ ID NO: 1022419 - DNA, 15 bp, Homo sapiens
catttgaaaacaggg

SEQ ID NO: 1022420 - DNA, 15 bp, Homo sapiens
atttgaaaacagggc

SEQ ID NO: 1022421 - DNA, 15 bp, Homo sapiens
tttgaaaacagggcc

SEQ ID NO: 1022422 - DNA, 15 bp, Homo sapiens
ttgaaaacagggcca

SEQ ID NO: 1022423 - DNA, 15 bp, Homo sapiens
tgaaaacagggccat

SEQ ID NO: 1022424 - DNA, 15 bp, Homo sapiens
gaaaacagggccatt

SEQ ID NO: 1022425 - DNA, 15 bp, Homo sapiens
aaaacagggccattt

SEQ ID NO: 1022426 - DNA, 15 bp, Homo sapiens
aaacagggccatttg

SEQ ID NO: 1022427 - DNA, 15 bp, Homo sapiens
aacagggccatttgc

SEQ ID NO: 1022428 - DNA, 15 bp, Homo sapiens
acagggccatttgca

SEQ ID NO: 1022429 - DNA, 15 bp, Homo sapiens
cagggccatttgcaa

SEQ ID NO: 1022430 - DNA, 15 bp, Homo sapiens
agggccatttgcaat

SEQ ID NO: 1022431 - DNA, 15 bp, Homo sapiens
gggccatttgcaatc

SEQ ID NO: 1022432 - DNA, 15 bp, Homo sapiens
ggccatttgcaatca

SEQ ID NO: 1022433 - DNA, 15 bp, Homo sapiens
gccatttgcaatcat

SEQ ID NO: 1022434 - DNA, 15 bp, Homo sapiens
ccatttgcaatcata

SEQ ID NO: 1022435 - DNA, 15 bp, Homo sapiens
catttgcaatcataa

SEQ ID NO: 1022436 - DNA, 15 bp, Homo sapiens
atttgcaatcataag

SEQ ID NO: 1022437 - DNA, 15 bp, Homo sapiens
tttgcaatcataaga

SEQ ID NO: 1022438 - DNA, 15 bp, Homo sapiens
ttgcaatcataagag

SEQ ID NO: 1022439 - DNA, 15 bp, Homo sapiens
tgcaatcataagagc

SEQ ID NO: 1022440 - DNA, 15 bp, Homo sapiens
gcaatcataagagcc

SEQ ID NO: 1022441 - DNA, 15 bp, Homo sapiens
caatcataagagccg

SEQ ID NO: 1022442 - DNA, 15 bp, Homo sapiens
aatcataagagccgg

SEQ ID NO: 1022443 - DNA, 15 bp, Homo sapiens
atcataagagccgga

SEQ ID NO: 1022444 - DNA, 15 bp, Homo sapiens
tcataagagccggac

SEQ ID NO: 1022445 - DNA, 15 bp, Homo sapiens
cataagagccggaca

SEQ ID NO: 1022446 - DNA, 15 bp, Homo sapiens
ataagagccggacac

SEQ ID NO: 1022447 - DNA, 15 bp, Homo sapiens
taagagccggacacg

SEQ ID NO: 1022448 - DNA, 15 bp, Homo sapiens
aagagccggacacgc

SEQ ID NO: 1022449 - DNA, 15 bp, Homo sapiens
agagccggacacgct

SEQ ID NO: 1022450 - DNA, 15 bp, Homo sapiens
gagccggacacgctg

SEQ ID NO: 1022451 - DNA, 15 bp, Homo sapiens
agccggacacgctga

SEQ ID NO: 1022452 - DNA, 15 bp, Homo sapiens
gccggacacgctgaa

SEQ ID NO: 1022453 - DNA, 15 bp, Homo sapiens
ccggacacgctgaaa

SEQ ID NO: 1022454 - DNA, 15 bp, Homo sapiens
cggacacgctgaaag

SEQ ID NO: 1022455 - DNA, 15 bp, Homo sapiens
ggacacgctgaaaga

SEQ ID NO: 1022456 - DNA, 15 bp, Homo sapiens
gacacgctgaaagat

SEQ ID NO: 1022457 - DNA, 15 bp, Homo sapiens
acacgctgaaagata

SEQ ID NO: 1022458 - DNA, 15 bp, Homo sapiens
cacgctgaaagatac

SEQ ID NO: 1022459 - DNA, 15 bp, Homo sapiens
acgctgaaagatacg

SEQ ID NO: 1022460 - DNA, 15 bp, Homo sapiens
cgctgaaagatacgg

SEQ ID NO: 1022461 - DNA, 15 bp, Homo sapiens
gctgaaagatacgga

SEQ ID NO: 1022462 - DNA, 15 bp, Homo sapiens
ctgaaagatacggag

SEQ ID NO: 1022463 - DNA, 15 bp, Homo sapiens
tgaaagatacggagc

SEQ ID NO: 1022464 - DNA, 15 bp, Homo sapiens
gaaagatacggagcg

SEQ ID NO: 1022465 - DNA, 15 bp, Homo sapiens
aaagatacggagcgc

SEQ ID NO: 1022466 - DNA, 15 bp, Homo sapiens
aagatacggagcgca

SEQ ID NO: 1022467 - DNA, 15 bp, Homo sapiens
agatacggagcgcat

SEQ ID NO: 1022468 - DNA, 15 bp, Homo sapiens
gatacggagcgcatt

SEQ ID NO: 1022469 - DNA, 15 bp, Homo sapiens
atacggagcgcattc

SEQ ID NO: 1022470 - DNA, 15 bp, Homo sapiens
tacggagcgcattcc

SEQ ID NO: 1022471 - DNA, 15 bp, Homo sapiens
acggagcgcattccg

SEQ ID NO: 1022472 - DNA, 15 bp, Homo sapiens
cggagcgcattccga

SEQ ID NO: 1022473 - DNA, 15 bp, Homo sapiens
ggagcgcattccgag

SEQ ID NO: 1022474 - DNA, 15 bp, Homo sapiens
gagcgcattccgagc

SEQ ID NO: 1022475 - DNA, 15 bp, Homo sapiens
agcgcattccgagca

SEQ ID NO: 1022476 - DNA, 15 bp, Homo sapiens
gcgcattccgagcag

SEQ ID NO: 1022477 - DNA, 15 bp, Homo sapiens
cgcattccgagcaga

SEQ ID NO: 1022478 - DNA, 15 bp, Homo sapiens
gcattccgagcagat

SEQ ID NO: 1022479 - DNA, 15 bp, Homo sapiens
cattccgagcagatg

SEQ ID NO: 1022480 - DNA, 15 bp, Homo sapiens
attccgagcagatga

SEQ ID NO: 1022481 - DNA, 15 bp, Homo sapiens
ttccgagcagatgat

SEQ ID NO: 1022482 - DNA, 15 bp, Homo sapiens
tccgagcagatgatg

SEQ ID NO: 1022483 - DNA, 15 bp, Homo sapiens
ccgagcagatgatgg

SEQ ID NO: 1022484 - DNA, 15 bp, Homo sapiens
cgagcagatgatggg

SEQ ID NO: 1022485 - DNA, 15 bp, Homo sapiens
gagcagatgatgggt

SEQ ID NO: 1022486 - DNA, 15 bp, Homo sapiens
agcagatgatgggtg

SEQ ID NO: 1022487 - DNA, 15 bp, Homo sapiens
gcagatgatgggtga

SEQ ID NO: 1022488 - DNA, 15 bp, Homo sapiens
cagatgatgggtgac

SEQ ID NO: 1022489 - DNA, 15 bp, Homo sapiens
agatgatgggtgaca

SEQ ID NO: 1022490 - DNA, 15 bp, Homo sapiens
gatgatgggtgacag

SEQ ID NO: 1022491 - DNA, 15 bp, Homo sapiens
atgatgggtgacaga

SEQ ID NO: 1022492 - DNA, 15 bp, Homo sapiens
tgatgggtgacagaa

SEQ ID NO: 1022493 - DNA, 15 bp, Homo sapiens
gatgggtgacagaat

SEQ ID NO: 1022494 - DNA, 15 bp, Homo sapiens
atgggtgacagaatc

SEQ ID NO: 1022495 - DNA, 15 bp, Homo sapiens
tgggtgacagaatct

SEQ ID NO: 1022496 - DNA, 15 bp, Homo sapiens
gggtgacagaatctg

SEQ ID NO: 1022497 - DNA, 15 bp, Homo sapiens
ggtgacagaatctgt

SEQ ID NO: 1022498 - DNA, 15 bp, Homo sapiens
gtgacagaatctgta

SEQ ID NO: 1022499 - DNA, 15 bp, Homo sapiens
tgacagaatctgtag

SEQ ID NO: 1022500 - DNA, 15 bp, Homo sapiens
gacagaatctgtagg

SEQ ID NO: 1022501 - DNA, 15 bp, Homo sapiens
acagaatctgtaggc

SEQ ID NO: 1022502 - DNA, 15 bp, Homo sapiens
cagaatctgtaggca

SEQ ID NO: 1022503 - DNA, 15 bp, Homo sapiens
agaatctgtaggcaa

SEQ ID NO: 1022504 - DNA, 15 bp, Homo sapiens
gaatctgtaggcaag

SEQ ID NO: 1022505 - DNA, 15 bp, Homo sapiens
aatctgtaggcaagc

SEQ ID NO: 1022506 - DNA, 15 bp, Homo sapiens
atctgtaggcaagca

SEQ ID NO: 1022507 - DNA, 15 bp, Homo sapiens
tctgtaggcaagcac

SEQ ID NO: 1022508 - DNA, 15 bp, Homo sapiens
ctgtaggcaagcact

SEQ ID NO: 1022509 - DNA, 15 bp, Homo sapiens
tgtaggcaagcacta

SEQ ID NO: 1022510 - DNA, 15 bp, Homo sapiens
gtaggcaagcactaa

SEQ ID NO: 1022511 - DNA, 15 bp, Homo sapiens
taggcaagcactaaa

SEQ ID NO: 1022512 - DNA, 15 bp, Homo sapiens
aggcaagcactaaat

SEQ ID NO: 1022513 - DNA, 15 bp, Homo sapiens
ggcaagcactaaata

SEQ ID NO: 1022514 - DNA, 15 bp, Homo sapiens
gcaagcactaaatat

SEQ ID NO: 1022515 - DNA, 15 bp, Homo sapiens
caagcactaaatatt

SEQ ID NO: 1022516 - DNA, 15 bp, Homo sapiens
aagcactaaatattt

SEQ ID NO: 1022517 - DNA, 15 bp, Homo sapiens
agcactaaatatttt

SEQ ID NO: 1022518 - DNA, 15 bp, Homo sapiens
gcactaaatattttc

SEQ ID NO: 1022519 - DNA, 15 bp, Homo sapiens
cactaaatattttct

SEQ ID NO: 1022520 - DNA, 15 bp, Homo sapiens
actaaatattttctt

SEQ ID NO: 1022521 - DNA, 15 bp, Homo sapiens
ctaaatattttcttc

SEQ ID NO: 1022522 - DNA, 15 bp, Homo sapiens
taaatattttcttcc

SEQ ID NO: 1022523 - DNA, 15 bp, Homo sapiens
aaatattttcttcca

SEQ ID NO: 1022524 - DNA, 15 bp, Homo sapiens
aatattttcttccag

SEQ ID NO: 1022525 - DNA, 15 bp, Homo sapiens
atattttcttccagc

SEQ ID NO: 1022526 - DNA, 15 bp, Homo sapiens
tattttcttccagct

SEQ ID NO: 1022527 - DNA, 15 bp, Homo sapiens
attttcttccagctt

SEQ ID NO: 1022528 - DNA, 15 bp, Homo sapiens
ttttcttccagcttc

SEQ ID NO: 1022529 - DNA, 15 bp, Homo sapiens
tttcttccagcttca

SEQ ID NO: 1022530 - DNA, 15 bp, Homo sapiens
ttcttccagcttcag

SEQ ID NO: 1022531 - DNA, 15 bp, Homo sapiens
tcttccagcttcaga

SEQ ID NO: 1022532 - DNA, 15 bp, Homo sapiens
cttccagcttcagac

SEQ ID NO: 1022533 - DNA, 15 bp, Homo sapiens
ttccagcttcagacc

SEQ ID NO: 1022534 - DNA, 15 bp, Homo sapiens
tccagcttcagacct

SEQ ID NO: 1022535 - DNA, 15 bp, Homo sapiens
ccagcttcagacctt

SEQ ID NO: 1022536 - DNA, 15 bp, Homo sapiens
cagcttcagaccttg

SEQ ID NO: 1022537 - DNA, 15 bp, Homo sapiens
agcttcagaccttgt

SEQ ID NO: 1022538 - DNA, 15 bp, Homo sapiens
gcttcagaccttgtg

SEQ ID NO: 1022539 - DNA, 15 bp, Homo sapiens
cttcagaccttgtgc

SEQ ID NO: 1022540 - DNA, 15 bp, Homo sapiens
ttcagaccttgtgca

SEQ ID NO: 1022541 - DNA, 15 bp, Homo sapiens
tcagaccttgtgcat

SEQ ID NO: 1022542 - DNA, 15 bp, Homo sapiens
cagaccttgtgcatc

SEQ ID NO: 1022543 - DNA, 15 bp, Homo sapiens
agaccttgtgcatca

SEQ ID NO: 1022544 - DNA, 15 bp, Homo sapiens
gaccttgtgcatcag

SEQ ID NO: 1022545 - DNA, 15 bp, Homo sapiens
accttgtgcatcagt

SEQ ID NO: 1022546 - DNA, 15 bp, Homo sapiens
ccttgtgcatcagtc

SEQ ID NO: 1022547 - DNA, 15 bp, Homo sapiens
cttgtgcatcagtct

SEQ ID NO: 1022548 - DNA, 15 bp, Homo sapiens
ttgtgcatcagtctt

SEQ ID NO: 1022549 - DNA, 15 bp, Homo sapiens
tgtgcatcagtcttc

SEQ ID NO: 1022550 - DNA, 15 bp, Homo sapiens
gtgcatcagtcttct

SEQ ID NO: 1022551 - DNA, 15 bp, Homo sapiens
tgcatcagtcttctg

SEQ ID NO: 1022552 - DNA, 15 bp, Homo sapiens
gcatcagtcttctgt

SEQ ID NO: 1022553 - DNA, 15 bp, Homo sapiens
catcagtcttctgtc

SEQ ID NO: 1022554 - DNA, 15 bp, Homo sapiens
atcagtcttctgtcc

SEQ ID NO: 1022555 - DNA, 15 bp, Homo sapiens
tcagtcttctgtccc

SEQ ID NO: 1022556 - DNA, 15 bp, Homo sapiens
cagtcttctgtcccg

SEQ ID NO: 1022557 - DNA, 15 bp, Homo sapiens
agtcttctgtcccga

SEQ ID NO: 1022558 - DNA, 15 bp, Homo sapiens
gtcttctgtcccgaa

SEQ ID NO: 1022559 - DNA, 15 bp, Homo sapiens
tcttctgtcccgaac

SEQ ID NO: 1022560 - DNA, 15 bp, Homo sapiens
cttctgtcccgaacc

SEQ ID NO: 1022561 - DNA, 15 bp, Homo sapiens
ttctgtcccgaacca

SEQ ID NO: 1022562 - DNA, 15 bp, Homo sapiens
tctgtcccgaaccat

SEQ ID NO: 1022563 - DNA, 15 bp, Homo sapiens
ctgtcccgaaccatt

SEQ ID NO: 1022564 - DNA, 15 bp, Homo sapiens
tgtcccgaaccattt

SEQ ID NO: 1022565 - DNA, 15 bp, Homo sapiens
gtcccgaaccatttt

SEQ ID NO: 1022566 - DNA, 15 bp, Homo sapiens
tcccgaaccatttta

SEQ ID NO: 1022567 - DNA, 15 bp, Homo sapiens
cccgaaccattttaa

SEQ ID NO: 1022568 - DNA, 15 bp, Homo sapiens
ccgaaccattttaaa

SEQ ID NO: 1022569 - DNA, 15 bp, Homo sapiens
cgaaccattttaaat

SEQ ID NO: 1022570 - DNA, 15 bp, Homo sapiens
gaaccattttaaatg

SEQ ID NO: 1022571 - DNA, 15 bp, Homo sapiens
aaccattttaaatgg

SEQ ID NO: 1022572 - DNA, 15 bp, Homo sapiens
accattttaaatgga

SEQ ID NO: 1022573 - DNA, 15 bp, Homo sapiens
ccattttaaatggaa

SEQ ID NO: 1022574 - DNA, 15 bp, Homo sapiens
cattttaaatggaat

SEQ ID NO: 1022575 - DNA, 15 bp, Homo sapiens
attttaaatggaatg

SEQ ID NO: 1022576 - DNA, 15 bp, Homo sapiens
ttttaaatggaatgt

SEQ ID NO: 1022577 - DNA, 15 bp, Homo sapiens
tttaaatggaatgtt

SEQ ID NO: 1022578 - DNA, 15 bp, Homo sapiens
ttaaatggaatgttc

SEQ ID NO: 1022579 - DNA, 15 bp, Homo sapiens
taaatggaatgttcc

SEQ ID NO: 1022580 - DNA, 15 bp, Homo sapiens
aaatggaatgttcct

SEQ ID NO: 1022581 - DNA, 15 bp, Homo sapiens
aatggaatgttcctg

SEQ ID NO: 1022582 - DNA, 15 bp, Homo sapiens
atggaatgttcctgt

SEQ ID NO: 1022583 - DNA, 15 bp, Homo sapiens
tggaatgttcctgtt

SEQ ID NO: 1022584 - DNA, 15 bp, Homo sapiens
ggaatgttcctgttg

SEQ ID NO: 1022585 - DNA, 15 bp, Homo sapiens
gaatgttcctgttga

SEQ ID NO: 1022586 - DNA, 15 bp, Homo sapiens
aatgttcctgttgaa

SEQ ID NO: 1022587 - DNA, 15 bp, Homo sapiens
atgttcctgttgaat

SEQ ID NO: 1022588 - DNA, 15 bp, Homo sapiens
tgttcctgttgaata

SEQ ID NO: 1022589 - DNA, 15 bp, Homo sapiens
gttcctgttgaatat

SEQ ID NO: 1022590 - DNA, 15 bp, Homo sapiens
ttcctgttgaatata

SEQ ID NO: 1022591 - DNA, 15 bp, Homo sapiens
tcctgttgaatatat

SEQ ID NO: 1022592 - DNA, 15 bp, Homo sapiens
cctgttgaatatata

SEQ ID NO: 1022593 - DNA, 15 bp, Homo sapiens
ctgttgaatatataa

SEQ ID NO: 1022594 - DNA, 15 bp, Homo sapiens
tgttgaatatataat

SEQ ID NO: 1022595 - DNA, 15 bp, Homo sapiens
gttgaatatataatt

SEQ ID NO: 1022596 - DNA, 15 bp, Homo sapiens
ttgaatatataattt

SEQ ID NO: 1022597 - DNA, 15 bp, Homo sapiens
tgaatatataattta

SEQ ID NO: 1022598 - DNA, 15 bp, Homo sapiens
gaatatataatttaa

SEQ ID NO: 1022599 - DNA, 15 bp, Homo sapiens
aatatataatttaat

SEQ ID NO: 1022600 - DNA, 15 bp, Homo sapiens
atatataatttaatt

SEQ ID NO: 1022601 - DNA, 15 bp, Homo sapiens
tatataatttaattg

SEQ ID NO: 1022602 - DNA, 15 bp, Homo sapiens
atataatttaattgc

SEQ ID NO: 1022603 - DNA, 15 bp, Homo sapiens
tataatttaattgct

SEQ ID NO: 1022604 - DNA, 15 bp, Homo sapiens
ataatttaattgctt

SEQ ID NO: 1022605 - DNA, 15 bp, Homo sapiens
taatttaattgctta

SEQ ID NO: 1022606 - DNA, 15 bp, Homo sapiens
aatttaattgcttag

SEQ ID NO: 1022607 - DNA, 15 bp, Homo sapiens
atttaattgcttaga

SEQ ID NO: 1022608 - DNA, 15 bp, Homo sapiens
tttaattgcttagaa

SEQ ID NO: 1022609 - DNA, 15 bp, Homo sapiens
ttaattgcttagaaa

SEQ ID NO: 1022610 - DNA, 15 bp, Homo sapiens
taattgcttagaaaa

SEQ ID NO: 1022611 - DNA, 15 bp, Homo sapiens
aattgcttagaaaat

SEQ ID NO: 1022612 - DNA, 15 bp, Homo sapiens
attgcttagaaaatg

SEQ ID NO: 1022613 - DNA, 15 bp, Homo sapiens
ttgcttagaaaatgg

SEQ ID NO: 1022614 - DNA, 15 bp, Homo sapiens
tgcttagaaaatgga

SEQ ID NO: 1022615 - DNA, 15 bp, Homo sapiens
gcttagaaaatggag

SEQ ID NO: 1022616 - DNA, 15 bp, Homo sapiens
cttagaaaatggaga

SEQ ID NO: 1022617 - DNA, 15 bp, Homo sapiens
ttagaaaatggagac

SEQ ID NO: 1022618 - DNA, 15 bp, Homo sapiens
tagaaaatggagact

SEQ ID NO: 1022619 - DNA, 15 bp, Homo sapiens
agaaaatggagactc

SEQ ID NO: 1022620 - DNA, 15 bp, Homo sapiens
gaaaatggagactcc

SEQ ID NO: 1022621 - DNA, 15 bp, Homo sapiens
aaaatggagactcca

SEQ ID NO: 1022622 - DNA, 15 bp, Homo sapiens
aaatggagactccat

SEQ ID NO: 1022623 - DNA, 15 bp, Homo sapiens
aatggagactccatg

SEQ ID NO: 1022624 - DNA, 15 bp, Homo sapiens
atggagactccatgg

SEQ ID NO: 1022625 - DNA, 15 bp, Homo sapiens
tggagactccatggt

SEQ ID NO: 1022626 - DNA, 15 bp, Homo sapiens
ggagactccatggtt

SEQ ID NO: 1022627 - DNA, 15 bp, Homo sapiens
gagactccatggttg

SEQ ID NO: 1022628 - DNA, 15 bp, Homo sapiens
agactccatggttgg

SEQ ID NO: 1022629 - DNA, 15 bp, Homo sapiens
gactccatggttggg

SEQ ID NO: 1022630 - DNA, 15 bp, Homo sapiens
actccatggttggga

SEQ ID NO: 1022631 - DNA, 15 bp, Homo sapiens
ctccatggttgggag

SEQ ID NO: 1022632 - DNA, 15 bp, Homo sapiens
tccatggttgggagg

SEQ ID NO: 1022633 - DNA, 15 bp, Homo sapiens
ccatggttgggagga

SEQ ID NO: 1022634 - DNA, 15 bp, Homo sapiens
catggttgggaggaa

SEQ ID NO: 1022635 - DNA, 15 bp, Homo sapiens
atggttgggaggaaa

SEQ ID NO: 1022636 - DNA, 15 bp, Homo sapiens
tggttgggaggaaaa

SEQ ID NO: 1022637 - DNA, 15 bp, Homo sapiens
ggttgggaggaaaaa

SEQ ID NO: 1022638 - DNA, 15 bp, Homo sapiens
gttgggaggaaaaaa

SEQ ID NO: 1022639 - DNA, 15 bp, Homo sapiens
ttgggaggaaaaaac

SEQ ID NO: 1022640 - DNA, 15 bp, Homo sapiens
tgggaggaaaaaacc

SEQ ID NO: 1022641 - DNA, 15 bp, Homo sapiens
gggaggaaaaaaccg

SEQ ID NO: 1022642 - DNA, 15 bp, Homo sapiens
ggaggaaaaaaccgg

SEQ ID NO: 1022643 - DNA, 15 bp, Homo sapiens
gaggaaaaaaccggc

SEQ ID NO: 1022644 - DNA, 15 bp, Homo sapiens
aggaaaaaaccggca

SEQ ID NO: 1022645 - DNA, 15 bp, Homo sapiens
ggaaaaaaccggcaa

SEQ ID NO: 1022646 - DNA, 15 bp, Homo sapiens
gaaaaaaccggcaag

SEQ ID NO: 1022647 - DNA, 15 bp, Homo sapiens
aaaaaaccggcaaga

SEQ ID NO: 1022648 - DNA, 15 bp, Homo sapiens
aaaaaccggcaagaa

SEQ ID NO: 1022649 - DNA, 15 bp, Homo sapiens
aaaaccggcaagaaa

SEQ ID NO: 1022650 - DNA, 15 bp, Homo sapiens
aaaccggcaagaaag

SEQ ID NO: 1022651 - DNA, 15 bp, Homo sapiens
aaccggcaagaaagg

SEQ ID NO: 1022652 - DNA, 15 bp, Homo sapiens
accggcaagaaaggt

SEQ ID NO: 1022653 - DNA, 15 bp, Homo sapiens
ccggcaagaaaggtg

SEQ ID NO: 1022654 - DNA, 15 bp, Homo sapiens
cggcaagaaaggtga

SEQ ID NO: 1022655 - DNA, 15 bp, Homo sapiens
ggcaagaaaggtgac

SEQ ID NO: 1022656 - DNA, 15 bp, Homo sapiens
gcaagaaaggtgaca

SEQ ID NO: 1022657 - DNA, 15 bp, Homo sapiens
caagaaaggtgacag

SEQ ID NO: 1022658 - DNA, 15 bp, Homo sapiens
aagaaaggtgacaga

SEQ ID NO: 1022659 - DNA, 15 bp, Homo sapiens
agaaaggtgacagag

SEQ ID NO: 1022660 - DNA, 15 bp, Homo sapiens
gaaaggtgacagaga

SEQ ID NO: 1022661 - DNA, 15 bp, Homo sapiens
aaaggtgacagagaa

SEQ ID NO: 1022662 - DNA, 15 bp, Homo sapiens
aaggtgacagagaaa

SEQ ID NO: 1022663 - DNA, 15 bp, Homo sapiens
aggtgacagagaaac

SEQ ID NO: 1022664 - DNA, 15 bp, Homo sapiens
ggtgacagagaaact

SEQ ID NO: 1022665 - DNA, 15 bp, Homo sapiens
gtgacagagaaacta

SEQ ID NO: 1022666 - DNA, 15 bp, Homo sapiens
tgacagagaaactat

SEQ ID NO: 1022667 - DNA, 15 bp, Homo sapiens
gacagagaaactatg

SEQ ID NO: 1022668 - DNA, 15 bp, Homo sapiens
acagagaaactatgt

SEQ ID NO: 1022669 - DNA, 15 bp, Homo sapiens
cagagaaactatgtt

SEQ ID NO: 1022670 - DNA, 15 bp, Homo sapiens
agagaaactatgttg

SEQ ID NO: 1022671 - DNA, 15 bp, Homo sapiens
gagaaactatgttga

SEQ ID NO: 1022672 - DNA, 15 bp, Homo sapiens
agaaactatgttgat

SEQ ID NO: 1022673 - DNA, 15 bp, Homo sapiens
gaaactatgttgatt

SEQ ID NO: 1022674 - DNA, 15 bp, Homo sapiens
aaactatgttgattg

SEQ ID NO: 1022675 - DNA, 15 bp, Homo sapiens
aactatgttgattgt

SEQ ID NO: 1022676 - DNA, 15 bp, Homo sapiens
actatgttgattgtg

SEQ ID NO: 1022677 - DNA, 15 bp, Homo sapiens
ctatgttgattgtgc

SEQ ID NO: 1022678 - DNA, 15 bp, Homo sapiens
tatgttgattgtgct

SEQ ID NO: 1022679 - DNA, 15 bp, Homo sapiens
atgttgattgtgctt

SEQ ID NO: 1022680 - DNA, 15 bp, Homo sapiens
tgttgattgtgcttc

SEQ ID NO: 1022681 - DNA, 15 bp, Homo sapiens
gttgattgtgcttct

SEQ ID NO: 1022682 - DNA, 15 bp, Homo sapiens
ttgattgtgcttctc

SEQ ID NO: 1022683 - DNA, 15 bp, Homo sapiens
tgattgtgcttctcc

SEQ ID NO: 1022684 - DNA, 15 bp, Homo sapiens
gattgtgcttctcct

SEQ ID NO: 1022685 - DNA, 15 bp, Homo sapiens
attgtgcttctcctc

SEQ ID NO: 1022686 - DNA, 15 bp, Homo sapiens
ttgtgcttctcctca

SEQ ID NO: 1022687 - DNA, 15 bp, Homo sapiens
tgtgcttctcctcag

SEQ ID NO: 1022688 - DNA, 15 bp, Homo sapiens
gtgcttctcctcagt

SEQ ID NO: 1022689 - DNA, 15 bp, Homo sapiens
tgcttctcctcagta

SEQ ID NO: 1022690 - DNA, 15 bp, Homo sapiens
gcttctcctcagtac

SEQ ID NO: 1022691 - DNA, 15 bp, Homo sapiens
cttctcctcagtact

SEQ ID NO: 1022692 - DNA, 15 bp, Homo sapiens
ttctcctcagtactg

SEQ ID NO: 1022693 - DNA, 15 bp, Homo sapiens
tctcctcagtactgg

SEQ ID NO: 1022694 - DNA, 15 bp, Homo sapiens
ctcctcagtactggt

SEQ ID NO: 1022695 - DNA, 15 bp, Homo sapiens
tcctcagtactggtt

SEQ ID NO: 1022696 - DNA, 15 bp, Homo sapiens
cctcagtactggtta

SEQ ID NO: 1022697 - DNA, 15 bp, Homo sapiens
ctcagtactggttaa

SEQ ID NO: 1022698 - DNA, 15 bp, Homo sapiens
tcagtactggttaac

SEQ ID NO: 1022699 - DNA, 15 bp, Homo sapiens
cagtactggttaaca

SEQ ID NO: 1022700 - DNA, 15 bp, Homo sapiens
agtactggttaacag

SEQ ID NO: 1022701 - DNA, 15 bp, Homo sapiens
gtactggttaacagt

SEQ ID NO: 1022702 - DNA, 15 bp, Homo sapiens
tactggttaacagtc

SEQ ID NO: 1022703 - DNA, 15 bp, Homo sapiens
actggttaacagtca

SEQ ID NO: 1022704 - DNA, 15 bp, Homo sapiens
ctggttaacagtcat

SEQ ID NO: 1022705 - DNA, 15 bp, Homo sapiens
tggttaacagtcatt

SEQ ID NO: 1022706 - DNA, 15 bp, Homo sapiens
ggttaacagtcattt

SEQ ID NO: 1022707 - DNA, 15 bp, Homo sapiens
gttaacagtcattta

SEQ ID NO: 1022708 - DNA, 15 bp, Homo sapiens
ttaacagtcatttaa

SEQ ID NO: 1022709 - DNA, 15 bp, Homo sapiens
taacagtcatttaac

SEQ ID NO: 1022710 - DNA, 15 bp, Homo sapiens
aacagtcatttaacg

SEQ ID NO: 1022711 - DNA, 15 bp, Homo sapiens
acagtcatttaacga

SEQ ID NO: 1022712 - DNA, 15 bp, Homo sapiens
cagtcatttaacgaa

SEQ ID NO: 1022713 - DNA, 15 bp, Homo sapiens
agtcatttaacgaag

SEQ ID NO: 1022714 - DNA, 15 bp, Homo sapiens
gtcatttaacgaaga

SEQ ID NO: 1022715 - DNA, 15 bp, Homo sapiens
tcatttaacgaagag

SEQ ID NO: 1022716 - DNA, 15 bp, Homo sapiens
catttaacgaagagt

SEQ ID NO: 1022717 - DNA, 15 bp, Homo sapiens
atttaacgaagagtc

SEQ ID NO: 1022718 - DNA, 15 bp, Homo sapiens
tttaacgaagagtct

SEQ ID NO: 1022719 - DNA, 15 bp, Homo sapiens
ttaacgaagagtcta

SEQ ID NO: 1022720 - DNA, 15 bp, Homo sapiens
taacgaagagtctac

SEQ ID NO: 1022721 - DNA, 15 bp, Homo sapiens
aacgaagagtctacc

SEQ ID NO: 1022722 - DNA, 15 bp, Homo sapiens
acgaagagtctaccc

SEQ ID NO: 1022723 - DNA, 15 bp, Homo sapiens
cgaagagtctaccca

SEQ ID NO: 1022724 - DNA, 15 bp, Homo sapiens
gaagagtctacccat

SEQ ID NO: 1022725 - DNA, 15 bp, Homo sapiens
aagagtctacccatt

SEQ ID NO: 1022726 - DNA, 15 bp, Homo sapiens
agagtctacccattg

SEQ ID NO: 1022727 - DNA, 15 bp, Homo sapiens
gagtctacccattgg

SEQ ID NO: 1022728 - DNA, 15 bp, Homo sapiens
agtctacccattggg

SEQ ID NO: 1022729 - DNA, 15 bp, Homo sapiens
gtctacccattgggt

SEQ ID NO: 1022730 - DNA, 15 bp, Homo sapiens
tctacccattgggta

SEQ ID NO: 1022731 - DNA, 15 bp, Homo sapiens
ctacccattgggtag

SEQ ID NO: 1022732 - DNA, 15 bp, Homo sapiens
tacccattgggtaga

SEQ ID NO: 1022733 - DNA, 15 bp, Homo sapiens
acccattgggtagaa

SEQ ID NO: 1022734 - DNA, 15 bp, Homo sapiens
cccattgggtagaag

SEQ ID NO: 1022735 - DNA, 15 bp, Homo sapiens
ccattgggtagaaga

SEQ ID NO: 1022736 - DNA, 15 bp, Homo sapiens
cattgggtagaagac

SEQ ID NO: 1022737 - DNA, 15 bp, Homo sapiens
attgggtagaagact

SEQ ID NO: 1022738 - DNA, 15 bp, Homo sapiens
ttgggtagaagactt

SEQ ID NO: 1022739 - DNA, 15 bp, Homo sapiens
tgggtagaagacttg

SEQ ID NO: 1022740 - DNA, 15 bp, Homo sapiens
gggtagaagacttga

SEQ ID NO: 1022741 - DNA, 15 bp, Homo sapiens
ggtagaagacttgat

SEQ ID NO: 1022742 - DNA, 15 bp, Homo sapiens
gtagaagacttgatg

SEQ ID NO: 1022743 - DNA, 15 bp, Homo sapiens
tagaagacttgatgg

SEQ ID NO: 1022744 - DNA, 15 bp, Homo sapiens
agaagacttgatgga

SEQ ID NO: 1022745 - DNA, 15 bp, Homo sapiens
gaagacttgatggaa

SEQ ID NO: 1022746 - DNA, 15 bp, Homo sapiens
aagacttgatggaaa

SEQ ID NO: 1022747 - DNA, 15 bp, Homo sapiens
agacttgatggaaaa

SEQ ID NO: 1022748 - DNA, 15 bp, Homo sapiens
gacttgatggaaaaa

SEQ ID NO: 1022749 - DNA, 15 bp, Homo sapiens
acttgatggaaaaaa

SEQ ID NO: 1022750 - DNA, 15 bp, Homo sapiens
cttgatggaaaaaat

SEQ ID NO: 1022751 - DNA, 15 bp, Homo sapiens
ttgatggaaaaaatg

SEQ ID NO: 1022752 - DNA, 15 bp, Homo sapiens
tgatggaaaaaatga

SEQ ID NO: 1022753 - DNA, 15 bp, Homo sapiens
gatggaaaaaatgaa

SEQ ID NO: 1022754 - DNA, 15 bp, Homo sapiens
atggaaaaaatgaat

SEQ ID NO: 1022755 - DNA, 15 bp, Homo sapiens
tggaaaaaatgaatt

SEQ ID NO: 1022756 - DNA, 15 bp, Homo sapiens
ggaaaaaatgaattg

SEQ ID NO: 1022757 - DNA, 15 bp, Homo sapiens
gaaaaaatgaattgg

SEQ ID NO: 1022758 - DNA, 15 bp, Homo sapiens
aaaaaatgaattggt

SEQ ID NO: 1022759 - DNA, 15 bp, Homo sapiens
aaaaatgaattggtt

SEQ ID NO: 1022760 - DNA, 15 bp, Homo sapiens
aaaatgaattggttt

SEQ ID NO: 1022761 - DNA, 15 bp, Homo sapiens
aaatgaattggtttt

SEQ ID NO: 1022762 - DNA, 15 bp, Homo sapiens
aatgaattggttttt

SEQ ID NO: 1022763 - DNA, 15 bp, Homo sapiens
atgaattggttttta

SEQ ID NO: 1022764 - DNA, 15 bp, Homo sapiens
tgaattggtttttaa

SEQ ID NO: 1022765 - DNA, 15 bp, Homo sapiens
gaattggtttttaaa

SEQ ID NO: 1022766 - DNA, 15 bp, Homo sapiens
aattggtttttaaag

SEQ ID NO: 1022767 - DNA, 15 bp, Homo sapiens
attggtttttaaagg

SEQ ID NO: 1022768 - DNA, 15 bp, Homo sapiens
ttggtttttaaagga

SEQ ID NO: 1022769 - DNA, 15 bp, Homo sapiens
tggtttttaaaggaa

SEQ ID NO: 1022770 - DNA, 15 bp, Homo sapiens
ggtttttaaaggaac

SEQ ID NO: 1022771 - DNA, 15 bp, Homo sapiens
gtttttaaaggaaca

SEQ ID NO: 1022772 - DNA, 15 bp, Homo sapiens
tttttaaaggaacaa

SEQ ID NO: 1022773 - DNA, 15 bp, Homo sapiens
ttttaaaggaacaac

SEQ ID NO: 1022774 - DNA, 15 bp, Homo sapiens
tttaaaggaacaacc

SEQ ID NO: 1022775 - DNA, 15 bp, Homo sapiens
ttaaaggaacaaccg

SEQ ID NO: 1022776 - DNA, 15 bp, Homo sapiens
taaaggaacaaccgc

SEQ ID NO: 1022777 - DNA, 15 bp, Homo sapiens
aaaggaacaaccgcc

SEQ ID NO: 1022778 - DNA, 15 bp, Homo sapiens
aaggaacaaccgcca

SEQ ID NO: 1022779 - DNA, 15 bp, Homo sapiens
aggaacaaccgccag

SEQ ID NO: 1022780 - DNA, 15 bp, Homo sapiens
ggaacaaccgccaga

SEQ ID NO: 1022781 - DNA, 15 bp, Homo sapiens
gaacaaccgccagaa

SEQ ID NO: 1022782 - DNA, 15 bp, Homo sapiens
aacaaccgccagaag

SEQ ID NO: 1022783 - DNA, 15 bp, Homo sapiens
acaaccgccagaagg

SEQ ID NO: 1022784 - DNA, 15 bp, Homo sapiens
caaccgccagaaggg

SEQ ID NO: 1022785 - DNA, 15 bp, Homo sapiens
aaccgccagaagggg

SEQ ID NO: 1022786 - DNA, 15 bp, Homo sapiens
accgccagaaggggt

SEQ ID NO: 1022787 - DNA, 15 bp, Homo sapiens
ccgccagaaggggtt

SEQ ID NO: 1022788 - DNA, 15 bp, Homo sapiens
cgccagaaggggttg

SEQ ID NO: 1022789 - DNA, 15 bp, Homo sapiens
gccagaaggggttgc

SEQ ID NO: 1022790 - DNA, 15 bp, Homo sapiens
ccagaaggggttgcc

SEQ ID NO: 1022791 - DNA, 15 bp, Homo sapiens
cagaaggggttgccg

SEQ ID NO: 1022792 - DNA, 15 bp, Homo sapiens
agaaggggttgccgg

SEQ ID NO: 1022793 - DNA, 15 bp, Homo sapiens
gaaggggttgccggg

SEQ ID NO: 1022794 - DNA, 15 bp, Homo sapiens
aaggggttgccgggg

SEQ ID NO: 1022795 - DNA, 15 bp, Homo sapiens
aggggttgccggggc

SEQ ID NO: 1022796 - DNA, 15 bp, Homo sapiens
ggggttgccggggct

SEQ ID NO: 1022797 - DNA, 15 bp, Homo sapiens
gggttgccggggcta

SEQ ID NO: 1022798 - DNA, 15 bp, Homo sapiens
ggttgccggggctaa

SEQ ID NO: 1022799 - DNA, 15 bp, Homo sapiens
gttgccggggctaac

SEQ ID NO: 1022800 - DNA, 15 bp, Homo sapiens
ttgccggggctaaca

SEQ ID NO: 1022801 - DNA, 15 bp, Homo sapiens
tgccggggctaacat

SEQ ID NO: 1022802 - DNA, 15 bp, Homo sapiens
gccggggctaacatt

SEQ ID NO: 1022803 - DNA, 15 bp, Homo sapiens
ccggggctaacattc

SEQ ID NO: 1022804 - DNA, 15 bp, Homo sapiens
cggggctaacattct

SEQ ID NO: 1022805 - DNA, 15 bp, Homo sapiens
ggggctaacattctc

SEQ ID NO: 1022806 - DNA, 15 bp, Homo sapiens
gggctaacattctca

SEQ ID NO: 1022807 - DNA, 15 bp, Homo sapiens
ggctaacattctcag

SEQ ID NO: 1022808 - DNA, 15 bp, Homo sapiens
gctaacattctcagg

SEQ ID NO: 1022809 - DNA, 15 bp, Homo sapiens
ctaacattctcaggc

SEQ ID NO: 1022810 - DNA, 15 bp, Homo sapiens
taacattctcaggct

SEQ ID NO: 1022811 - DNA, 15 bp, Homo sapiens
aacattctcaggctg

SEQ ID NO: 1022812 - DNA, 15 bp, Homo sapiens
acattctcaggctgg

SEQ ID NO: 1022813 - DNA, 15 bp, Homo sapiens
cattctcaggctgga

SEQ ID NO: 1022814 - DNA, 15 bp, Homo sapiens
attctcaggctggag

SEQ ID NO: 1022815 - DNA, 15 bp, Homo sapiens
ttctcaggctggagc

SEQ ID NO: 1022816 - DNA, 15 bp, Homo sapiens
tctcaggctggagct

SEQ ID NO: 1022817 - DNA, 15 bp, Homo sapiens
ctcaggctggagctg

SEQ ID NO: 1022818 - DNA, 15 bp, Homo sapiens
tcaggctggagctgc

SEQ ID NO: 1022819 - DNA, 15 bp, Homo sapiens
caggctggagctgca

SEQ ID NO: 1022820 - DNA, 15 bp, Homo sapiens
aggctggagctgcaa

SEQ ID NO: 1022821 - DNA, 15 bp, Homo sapiens
ggctggagctgcaaa

SEQ ID NO: 1022822 - DNA, 15 bp, Homo sapiens
gctggagctgcaaag

SEQ ID NO: 1022823 - DNA, 15 bp, Homo sapiens
ctggagctgcaaagc

SEQ ID NO: 1022824 - DNA, 15 bp, Homo sapiens
tggagctgcaaagcc

SEQ ID NO: 1022825 - DNA, 15 bp, Homo sapiens
ggagctgcaaagccc

SEQ ID NO: 1022826 - DNA, 15 bp, Homo sapiens
gagctgcaaagccct

SEQ ID NO: 1022827 - DNA, 15 bp, Homo sapiens
agctgcaaagccctg

SEQ ID NO: 1022828 - DNA, 15 bp, Homo sapiens
gctgcaaagccctgg

SEQ ID NO: 1022829 - DNA, 15 bp, Homo sapiens
ctgcaaagccctggc

SEQ ID NO: 1022830 - DNA, 15 bp, Homo sapiens
tgcaaagccctggct

SEQ ID NO: 1022831 - DNA, 15 bp, Homo sapiens
gcaaagccctggctg

SEQ ID NO: 1022832 - DNA, 15 bp, Homo sapiens
caaagccctggctgg

SEQ ID NO: 1022833 - DNA, 15 bp, Homo sapiens
aaagccctggctggg

SEQ ID NO: 1022834 - DNA, 15 bp, Homo sapiens
aagccctggctgggt

SEQ ID NO: 1022835 - DNA, 15 bp, Homo sapiens
agccctggctgggtg

SEQ ID NO: 1022836 - DNA, 15 bp, Homo sapiens
gccctggctgggtgt

SEQ ID NO: 1022837 - DNA, 15 bp, Homo sapiens
ccctggctgggtgtg

SEQ ID NO: 1022838 - DNA, 15 bp, Homo sapiens
cctggctgggtgtgg

SEQ ID NO: 1022839 - DNA, 15 bp, Homo sapiens
ctggctgggtgtggc

SEQ ID NO: 1022840 - DNA, 15 bp, Homo sapiens
tggctgggtgtggcc

SEQ ID NO: 1022841 - DNA, 15 bp, Homo sapiens
ggctgggtgtggccg

SEQ ID NO: 1022842 - DNA, 15 bp, Homo sapiens
gctgggtgtggccgg

SEQ ID NO: 1022843 - DNA, 15 bp, Homo sapiens
ctgggtgtggccggg

SEQ ID NO: 1022844 - DNA, 15 bp, Homo sapiens
tgggtgtggccggga

SEQ ID NO: 1022845 - DNA, 15 bp, Homo sapiens
gggtgtggccgggac

SEQ ID NO: 1022846 - DNA, 15 bp, Homo sapiens
ggtgtggccgggact

SEQ ID NO: 1022847 - DNA, 15 bp, Homo sapiens
gtgtggccgggactg

SEQ ID NO: 1022848 - DNA, 15 bp, Homo sapiens
tgtggccgggactgg

SEQ ID NO: 1022849 - DNA, 15 bp, Homo sapiens
gtggccgggactggc

SEQ ID NO: 1022850 - DNA, 15 bp, Homo sapiens
tggccgggactggcg

SEQ ID NO: 1022851 - DNA, 15 bp, Homo sapiens
ggccgggactggcgg

SEQ ID NO: 1022852 - DNA, 15 bp, Homo sapiens
gccgggactggcggg

SEQ ID NO: 1022853 - DNA, 15 bp, Homo sapiens
ccgggactggcgggg

SEQ ID NO: 1022854 - DNA, 15 bp, Homo sapiens
cgggactggcgggga

SEQ ID NO: 1022855 - DNA, 15 bp, Homo sapiens
gggactggcggggag

SEQ ID NO: 1022856 - DNA, 15 bp, Homo sapiens
ggactggcggggagt

SEQ ID NO: 1022857 - DNA, 15 bp, Homo sapiens
gactggcggggagtc

SEQ ID NO: 1022858 - DNA, 15 bp, Homo sapiens
actggcggggagtct

SEQ ID NO: 1022859 - DNA, 15 bp, Homo sapiens
ctggcggggagtctg

SEQ ID NO: 1022860 - DNA, 15 bp, Homo sapiens
tggcggggagtctgc

SEQ ID NO: 1022861 - DNA, 15 bp, Homo sapiens
ggcggggagtctgcg

SEQ ID NO: 1022862 - DNA, 15 bp, Homo sapiens
gcggggagtctgcgg

SEQ ID NO: 1022863 - DNA, 15 bp, Homo sapiens
cggggagtctgcggg

SEQ ID NO: 1022864 - DNA, 15 bp, Homo sapiens
ggggagtctgcgggg

SEQ ID NO: 1022865 - DNA, 15 bp, Homo sapiens
gggagtctgcggggc

SEQ ID NO: 1022866 - DNA, 15 bp, Homo sapiens
ggagtctgcggggcc

SEQ ID NO: 1022867 - DNA, 15 bp, Homo sapiens
gagtctgcggggcct

SEQ ID NO: 1022868 - DNA, 15 bp, Homo sapiens
agtctgcggggcctt

SEQ ID NO: 1022869 - DNA, 15 bp, Homo sapiens
gtctgcggggccttc

SEQ ID NO: 1022870 - DNA, 15 bp, Homo sapiens
tctgcggggccttca

SEQ ID NO: 1022871 - DNA, 15 bp, Homo sapiens
ctgcggggccttcag

SEQ ID NO: 1022872 - DNA, 15 bp, Homo sapiens
tgcggggccttcagg

SEQ ID NO: 1022873 - DNA, 15 bp, Homo sapiens
gcggggccttcaggg

SEQ ID NO: 1022874 - DNA, 15 bp, Homo sapiens
cggggccttcaggga

SEQ ID NO: 1022875 - DNA, 15 bp, Homo sapiens
ggggccttcagggaa

SEQ ID NO: 1022876 - DNA, 15 bp, Homo sapiens
gggccttcagggaag

SEQ ID NO: 1022877 - DNA, 15 bp, Homo sapiens
ggccttcagggaagc

SEQ ID NO: 1022878 - DNA, 15 bp, Homo sapiens
gccttcagggaagcc

SEQ ID NO: 1022879 - DNA, 15 bp, Homo sapiens
ccttcagggaagccc

SEQ ID NO: 1022880 - DNA, 15 bp, Homo sapiens
cttcagggaagccca

SEQ ID NO: 1022881 - DNA, 15 bp, Homo sapiens
ttcagggaagcccag

SEQ ID NO: 1022882 - DNA, 15 bp, Homo sapiens
tcagggaagcccagg

SEQ ID NO: 1022883 - DNA, 15 bp, Homo sapiens
cagggaagcccaggg

SEQ ID NO: 1022884 - DNA, 15 bp, Homo sapiens
agggaagcccaggga

SEQ ID NO: 1022885 - DNA, 15 bp, Homo sapiens
gggaagcccagggac

SEQ ID NO: 1022886 - DNA, 15 bp, Homo sapiens
ggaagcccagggaca

SEQ ID NO: 1022887 - DNA, 15 bp, Homo sapiens
gaagcccagggacaa

SEQ ID NO: 1022888 - DNA, 15 bp, Homo sapiens
aagcccagggacaac

SEQ ID NO: 1022889 - DNA, 15 bp, Homo sapiens
agcccagggacaact

SEQ ID NO: 1022890 - DNA, 15 bp, Homo sapiens
gcccagggacaactc

SEQ ID NO: 1022891 - DNA, 15 bp, Homo sapiens
cccagggacaactcc

SEQ ID NO: 1022892 - DNA, 15 bp, Homo sapiens
ccagggacaactccg

SEQ ID NO: 1022893 - DNA, 15 bp, Homo sapiens
cagggacaactccgc

SEQ ID NO: 1022894 - DNA, 15 bp, Homo sapiens
agggacaactccgcg

SEQ ID NO: 1022895 - DNA, 15 bp, Homo sapiens
gggacaactccgcgg

SEQ ID NO: 1022896 - DNA, 15 bp, Homo sapiens
ggacaactccgcggc

SEQ ID NO: 1022897 - DNA, 15 bp, Homo sapiens
gacaactccgcggcc

SEQ ID NO: 1022898 - DNA, 15 bp, Homo sapiens
acaactccgcggcct

SEQ ID NO: 1022899 - DNA, 15 bp, Homo sapiens
caactccgcggcctc

SEQ ID NO: 1022900 - DNA, 15 bp, Homo sapiens
aactccgcggcctcc

SEQ ID NO: 1022901 - DNA, 15 bp, Homo sapiens
actccgcggcctccc

SEQ ID NO: 1022902 - DNA, 15 bp, Homo sapiens
ctccgcggcctccca

SEQ ID NO: 1022903 - DNA, 15 bp, Homo sapiens
tccgcggcctcccaa

SEQ ID NO: 1022904 - DNA, 15 bp, Homo sapiens
ccgcggcctcccaac

SEQ ID NO: 1022905 - DNA, 15 bp, Homo sapiens
cgcggcctcccaacg

SEQ ID NO: 1022906 - DNA, 15 bp, Homo sapiens
gcggcctcccaacga

SEQ ID NO: 1022907 - DNA, 15 bp, Homo sapiens
cggcctcccaacgac

SEQ ID NO: 1022908 - DNA, 15 bp, Homo sapiens
ggcctcccaacgacg

SEQ ID NO: 1022909 - DNA, 15 bp, Homo sapiens
gcctcccaacgacgc

SEQ ID NO: 1022910 - DNA, 15 bp, Homo sapiens
cctcccaacgacgcc

SEQ ID NO: 1022911 - DNA, 15 bp, Homo sapiens
ctcccaacgacgccg

SEQ ID NO: 1022912 - DNA, 15 bp, Homo sapiens
tcccaacgacgccgc

SEQ ID NO: 1022913 - DNA, 15 bp, Homo sapiens
cccaacgacgccgcc

SEQ ID NO: 1022914 - DNA, 15 bp, Homo sapiens
ccaacgacgccgcca

SEQ ID NO: 1022915 - DNA, 15 bp, Homo sapiens
caacgacgccgccaa

SEQ ID NO: 1022916 - DNA, 15 bp, Homo sapiens
aacgacgccgccaaa

SEQ ID NO: 1022917 - DNA, 15 bp, Homo sapiens
acgacgccgccaaag

SEQ ID NO: 1022918 - DNA, 15 bp, Homo sapiens
cgacgccgccaaaga

SEQ ID NO: 1022919 - DNA, 15 bp, Homo sapiens
gacgccgccaaagac

SEQ ID NO: 1022920 - DNA, 15 bp, Homo sapiens
acgccgccaaagacc

SEQ ID NO: 1022921 - DNA, 15 bp, Homo sapiens
cgccgccaaagacct

SEQ ID NO: 1022922 - DNA, 15 bp, Homo sapiens
gccgccaaagacctg

SEQ ID NO: 1022923 - DNA, 15 bp, Homo sapiens
ccgccaaagacctgg

SEQ ID NO: 1022924 - DNA, 15 bp, Homo sapiens
cgccaaagacctggg

SEQ ID NO: 1022925 - DNA, 15 bp, Homo sapiens
gccaaagacctgggg

SEQ ID NO: 1022926 - DNA, 15 bp, Homo sapiens
ccaaagacctggggg

SEQ ID NO: 1022927 - DNA, 15 bp, Homo sapiens
caaagacctgggggc

SEQ ID NO: 1022928 - DNA, 15 bp, Homo sapiens
aaagacctgggggcc

SEQ ID NO: 1022929 - DNA, 15 bp, Homo sapiens
aagacctgggggccc

SEQ ID NO: 1022930 - DNA, 15 bp, Homo sapiens
agacctgggggcccc

SEQ ID NO: 1022931 - DNA, 15 bp, Homo sapiens
gacctgggggcccct

SEQ ID NO: 1022932 - DNA, 15 bp, Homo sapiens
acctgggggcccctc

SEQ ID NO: 1022933 - DNA, 15 bp, Homo sapiens
cctgggggcccctcg

SEQ ID NO: 1022934 - DNA, 15 bp, Homo sapiens
ctgggggcccctcgc

SEQ ID NO: 1022935 - DNA, 15 bp, Homo sapiens
tgggggcccctcgcg

SEQ ID NO: 1022936 - DNA, 15 bp, Homo sapiens
gggggcccctcgcgg

SEQ ID NO: 1022937 - DNA, 15 bp, Homo sapiens
ggggcccctcgcggc

SEQ ID NO: 1022938 - DNA, 15 bp, Homo sapiens
gggcccctcgcggcc

SEQ ID NO: 1022939 - DNA, 15 bp, Homo sapiens
ggcccctcgcggccc

SEQ ID NO: 1022940 - DNA, 15 bp, Homo sapiens
gcccctcgcggcccg

SEQ ID NO: 1022941 - DNA, 15 bp, Homo sapiens
cccctcgcggcccgg

SEQ ID NO: 1022942 - DNA, 15 bp, Homo sapiens
ccctcgcggcccggc

SEQ ID NO: 1022943 - DNA, 15 bp, Homo sapiens
cctcgcggcccggct

SEQ ID NO: 1022944 - DNA, 15 bp, Homo sapiens
ctcgcggcccggctg

SEQ ID NO: 1022945 - DNA, 15 bp, Homo sapiens
tcgcggcccggctgt

SEQ ID NO: 1022946 - DNA, 15 bp, Homo sapiens
cgcggcccggctgtt

SEQ ID NO: 1022947 - DNA, 15 bp, Homo sapiens
gcggcccggctgttc

SEQ ID NO: 1022948 - DNA, 15 bp, Homo sapiens
cggcccggctgttcc

SEQ ID NO: 1022949 - DNA, 15 bp, Homo sapiens
ggcccggctgttccg

SEQ ID NO: 1022950 - DNA, 15 bp, Homo sapiens
gcccggctgttccga

SEQ ID NO: 1022951 - DNA, 15 bp, Homo sapiens
cccggctgttccgaa

SEQ ID NO: 1022952 - DNA, 15 bp, Homo sapiens
ccggctgttccgaat

SEQ ID NO: 1022953 - DNA, 15 bp, Homo sapiens
cggctgttccgaatt

SEQ ID NO: 1022954 - DNA, 15 bp, Homo sapiens
ggctgttccgaattg

SEQ ID NO: 1022955 - DNA, 15 bp, Homo sapiens
gctgttccgaattgg

SEQ ID NO: 1022956 - DNA, 15 bp, Homo sapiens
ctgttccgaattggt

SEQ ID NO: 1022957 - DNA, 15 bp, Homo sapiens
tgttccgaattggtt

SEQ ID NO: 1022958 - DNA, 15 bp, Homo sapiens
gttccgaattggttg

SEQ ID NO: 1022959 - DNA, 15 bp, Homo sapiens
ttccgaattggttgc

SEQ ID NO: 1022960 - DNA, 15 bp, Homo sapiens
tccgaattggttgcc

SEQ ID NO: 1022961 - DNA, 15 bp, Homo sapiens
ccgaattggttgcca

SEQ ID NO: 1022962 - DNA, 15 bp, Homo sapiens
cgaattggttgccaa

SEQ ID NO: 1022963 - DNA, 15 bp, Homo sapiens
gaattggttgccaaa

SEQ ID NO: 1022964 - DNA, 15 bp, Homo sapiens
aattggttgccaaat

SEQ ID NO: 1022965 - DNA, 15 bp, Homo sapiens
attggttgccaaatg

SEQ ID NO: 1022966 - DNA, 15 bp, Homo sapiens
ttggttgccaaatgt

SEQ ID NO: 1022967 - DNA, 15 bp, Homo sapiens
tggttgccaaatgtc

SEQ ID NO: 1022968 - DNA, 15 bp, Homo sapiens
ggttgccaaatgtct

SEQ ID NO: 1022969 - DNA, 15 bp, Homo sapiens
gttgccaaatgtcta

SEQ ID NO: 1022970 - DNA, 15 bp, Homo sapiens
ttgccaaatgtctaa

SEQ ID NO: 1022971 - DNA, 15 bp, Homo sapiens
tgccaaatgtctaaa

SEQ ID NO: 1022972 - DNA, 15 bp, Homo sapiens
gccaaatgtctaaac

SEQ ID NO: 1022973 - DNA, 15 bp, Homo sapiens
ccaaatgtctaaact

SEQ ID NO: 1022974 - DNA, 15 bp, Homo sapiens
caaatgtctaaacta

SEQ ID NO: 1022975 - DNA, 15 bp, Homo sapiens
aaatgtctaaactag

SEQ ID NO: 1022976 - DNA, 15 bp, Homo sapiens
aatgtctaaactaga

SEQ ID NO: 1022977 - DNA, 15 bp, Homo sapiens
atgtctaaactagaa

SEQ ID NO: 1022978 - DNA, 15 bp, Homo sapiens
tgtctaaactagaag

SEQ ID NO: 1022979 - DNA, 15 bp, Homo sapiens
gtctaaactagaagt

SEQ ID NO: 1022980 - DNA, 15 bp, Homo sapiens
tctaaactagaagtg

SEQ ID NO: 1022981 - DNA, 15 bp, Homo sapiens
ctaaactagaagtgt

SEQ ID NO: 1022982 - DNA, 15 bp, Homo sapiens
taaactagaagtgtg

SEQ ID NO: 1022983 - DNA, 15 bp, Homo sapiens
aaactagaagtgtgg

SEQ ID NO: 1022984 - DNA, 15 bp, Homo sapiens
aactagaagtgtgga

SEQ ID NO: 1022985 - DNA, 15 bp, Homo sapiens
actagaagtgtggac

SEQ ID NO: 1022986 - DNA, 15 bp, Homo sapiens
ctagaagtgtggaca

SEQ ID NO: 1022987 - DNA, 15 bp, Homo sapiens
tagaagtgtggacac

SEQ ID NO: 1022988 - DNA, 15 bp, Homo sapiens
agaagtgtggacact

SEQ ID NO: 1022989 - DNA, 15 bp, Homo sapiens
gaagtgtggacactt

SEQ ID NO: 1022990 - DNA, 15 bp, Homo sapiens
aagtgtggacacttg

SEQ ID NO: 1022991 - DNA, 15 bp, Homo sapiens
agtgtggacacttga

SEQ ID NO: 1022992 - DNA, 15 bp, Homo sapiens
gtgtggacacttgaa

SEQ ID NO: 1022993 - DNA, 15 bp, Homo sapiens
tgtggacacttgaaa

SEQ ID NO: 1022994 - DNA, 15 bp, Homo sapiens
gtggacacttgaaat

SEQ ID NO: 1022995 - DNA, 15 bp, Homo sapiens
tggacacttgaaatc

SEQ ID NO: 1022996 - DNA, 15 bp, Homo sapiens
ggacacttgaaatct

SEQ ID NO: 1022997 - DNA, 15 bp, Homo sapiens
gacacttgaaatctc

SEQ ID NO: 1022998 - DNA, 15 bp, Homo sapiens
acacttgaaatctcg

SEQ ID NO: 1022999 - DNA, 15 bp, Homo sapiens
cacttgaaatctcga

SEQ ID NO: 1023000 - DNA, 15 bp, Homo sapiens
acttgaaatctcgag

SEQ ID NO: 1023001 - DNA, 15 bp, Homo sapiens
cttgaaatctcgagc

SEQ ID NO: 1023002 - DNA, 15 bp, Homo sapiens
ttgaaatctcgagct

SEQ ID NO: 1023003 - DNA, 15 bp, Homo sapiens
tgaaatctcgagctg

SEQ ID NO: 1023004 - DNA, 15 bp, Homo sapiens
gaaatctcgagctgt

SEQ ID NO: 1023005 - DNA, 15 bp, Homo sapiens
aaatctcgagctgtc

SEQ ID NO: 1023006 - DNA, 15 bp, Homo sapiens
aatctcgagctgtct

SEQ ID NO: 1023007 - DNA, 15 bp, Homo sapiens
atctcgagctgtctt

SEQ ID NO: 1023008 - DNA, 15 bp, Homo sapiens
tctcgagctgtctta

SEQ ID NO: 1023009 - DNA, 15 bp, Homo sapiens
ctcgagctgtcttag

SEQ ID NO: 1023010 - DNA, 15 bp, Homo sapiens
tcgagctgtcttagg

SEQ ID NO: 1023011 - DNA, 15 bp, Homo sapiens
cgagctgtcttaggg

SEQ ID NO: 1023012 - DNA, 15 bp, Homo sapiens
gagctgtcttagggt

SEQ ID NO: 1023013 - DNA, 15 bp, Homo sapiens
agctgtcttagggtc

SEQ ID NO: 1023014 - DNA, 15 bp, Homo sapiens
gctgtcttagggtct

SEQ ID NO: 1023015 - DNA, 15 bp, Homo sapiens
ctgtcttagggtctc

SEQ ID NO: 1023016 - DNA, 15 bp, Homo sapiens
tgtcttagggtctct

SEQ ID NO: 1023017 - DNA, 15 bp, Homo sapiens
gtcttagggtctctc

SEQ ID NO: 1023018 - DNA, 15 bp, Homo sapiens
tcttagggtctctcg

SEQ ID NO: 1023019 - DNA, 15 bp, Homo sapiens
cttagggtctctcgc

SEQ ID NO: 1023020 - DNA, 15 bp, Homo sapiens
ttagggtctctcgct

SEQ ID NO: 1023021 - DNA, 15 bp, Homo sapiens
tagggtctctcgcta

SEQ ID NO: 1023022 - DNA, 15 bp, Homo sapiens
agggtctctcgctac

SEQ ID NO: 1023023 - DNA, 15 bp, Homo sapiens
gggtctctcgctacg

SEQ ID NO: 1023024 - DNA, 15 bp, Homo sapiens
ggtctctcgctacga

SEQ ID NO: 1023025 - DNA, 15 bp, Homo sapiens
gtctctcgctacgaa

SEQ ID NO: 1023026 - DNA, 15 bp, Homo sapiens
tctctcgctacgaaa

SEQ ID NO: 1023027 - DNA, 15 bp, Homo sapiens
ctctcgctacgaaag

SEQ ID NO: 1023028 - DNA, 15 bp, Homo sapiens
tctcgctacgaaagt

SEQ ID NO: 1023029 - DNA, 15 bp, Homo sapiens
ctcgctacgaaagtt

SEQ ID NO: 1023030 - DNA, 15 bp, Homo sapiens
tcgctacgaaagttt

SEQ ID NO: 1023031 - DNA, 15 bp, Homo sapiens
cgctacgaaagtttg

SEQ ID NO: 1023032 - DNA, 15 bp, Homo sapiens
gctacgaaagtttgg

SEQ ID NO: 1023033 - DNA, 15 bp, Homo sapiens
ctacgaaagtttggt

SEQ ID NO: 1023034 - DNA, 15 bp, Homo sapiens
tacgaaagtttggtt

SEQ ID NO: 1023035 - DNA, 15 bp, Homo sapiens
acgaaagtttggttt

SEQ ID NO: 1023036 - DNA, 15 bp, Homo sapiens
cgaaagtttggtttc

SEQ ID NO: 1023037 - DNA, 15 bp, Homo sapiens
gaaagtttggtttct

SEQ ID NO: 1023038 - DNA, 15 bp, Homo sapiens
aaagtttggtttcta

SEQ ID NO: 1023039 - DNA, 15 bp, Homo sapiens
aagtttggtttctag

SEQ ID NO: 1023040 - DNA, 15 bp, Homo sapiens
agtttggtttctagg

SEQ ID NO: 1023041 - DNA, 15 bp, Homo sapiens
gtttggtttctagga

SEQ ID NO: 1023042 - DNA, 15 bp, Homo sapiens
tttggtttctaggac

SEQ ID NO: 1023043 - DNA, 15 bp, Homo sapiens
ttggtttctaggacc

SEQ ID NO: 1023044 - DNA, 15 bp, Homo sapiens
tggtttctaggacca

SEQ ID NO: 1023045 - DNA, 15 bp, Homo sapiens
ggtttctaggaccaa

SEQ ID NO: 1023046 - DNA, 15 bp, Homo sapiens
gtttctaggaccaag

SEQ ID NO: 1023047 - DNA, 15 bp, Homo sapiens
tttctaggaccaaga

SEQ ID NO: 1023048 - DNA, 15 bp, Homo sapiens
ttctaggaccaagag

SEQ ID NO: 1023049 - DNA, 15 bp, Homo sapiens
tctaggaccaagaga

SEQ ID NO: 1023050 - DNA, 15 bp, Homo sapiens
ctaggaccaagagaa

SEQ ID NO: 1023051 - DNA, 15 bp, Homo sapiens
taggaccaagagaag

SEQ ID NO: 1023052 - DNA, 15 bp, Homo sapiens
aggaccaagagaagc

SEQ ID NO: 1023053 - DNA, 15 bp, Homo sapiens
ggaccaagagaagca

SEQ ID NO: 1023054 - DNA, 15 bp, Homo sapiens
gaccaagagaagcag

SEQ ID NO: 1023055 - DNA, 15 bp, Homo sapiens
accaagagaagcagc

SEQ ID NO: 1023056 - DNA, 15 bp, Homo sapiens
ccaagagaagcagct

SEQ ID NO: 1023057 - DNA, 15 bp, Homo sapiens
caagagaagcagctg

SEQ ID NO: 1023058 - DNA, 15 bp, Homo sapiens
aagagaagcagctgt

SEQ ID NO: 1023059 - DNA, 15 bp, Homo sapiens
agagaagcagctgtc

SEQ ID NO: 1023060 - DNA, 15 bp, Homo sapiens
gagaagcagctgtcc

SEQ ID NO: 1023061 - DNA, 15 bp, Homo sapiens
agaagcagctgtccc

SEQ ID NO: 1023062 - DNA, 15 bp, Homo sapiens
gaagcagctgtccca

SEQ ID NO: 1023063 - DNA, 15 bp, Homo sapiens
aagcagctgtcccag

SEQ ID NO: 1023064 - DNA, 15 bp, Homo sapiens
agcagctgtcccagg

SEQ ID NO: 1023065 - DNA, 15 bp, Homo sapiens
gcagctgtcccaggc

SEQ ID NO: 1023066 - DNA, 15 bp, Homo sapiens
cagctgtcccaggcc

SEQ ID NO: 1023067 - DNA, 15 bp, Homo sapiens
agctgtcccaggccc

SEQ ID NO: 1023068 - DNA, 15 bp, Homo sapiens
gctgtcccaggccct

SEQ ID NO: 1023069 - DNA, 15 bp, Homo sapiens
ctgtcccaggccctt

SEQ ID NO: 1023070 - DNA, 15 bp, Homo sapiens
tgtcccaggcccttc

SEQ ID NO: 1023071 - DNA, 15 bp, Homo sapiens
gtcccaggcccttcg

SEQ ID NO: 1023072 - DNA, 15 bp, Homo sapiens
tcccaggcccttcgt

SEQ ID NO: 1023073 - DNA, 15 bp, Homo sapiens
cccaggcccttcgtt

SEQ ID NO: 1023074 - DNA, 15 bp, Homo sapiens
ccaggcccttcgttt

SEQ ID NO: 1023075 - DNA, 15 bp, Homo sapiens
caggcccttcgtttc

SEQ ID NO: 1023076 - DNA, 15 bp, Homo sapiens
aggcccttcgtttcc

SEQ ID NO: 1023077 - DNA, 15 bp, Homo sapiens
ggcccttcgtttcct

SEQ ID NO: 1023078 - DNA, 15 bp, Homo sapiens
gcccttcgtttcctg

SEQ ID NO: 1023079 - DNA, 15 bp, Homo sapiens
cccttcgtttcctgt

SEQ ID NO: 1023080 - DNA, 15 bp, Homo sapiens
ccttcgtttcctgtc

SEQ ID NO: 1023081 - DNA, 15 bp, Homo sapiens
cttcgtttcctgtcc

SEQ ID NO: 1023082 - DNA, 15 bp, Homo sapiens
ttcgtttcctgtccg

SEQ ID NO: 1023083 - DNA, 15 bp, Homo sapiens
tcgtttcctgtccgc

SEQ ID NO: 1023084 - DNA, 15 bp, Homo sapiens
cgtttcctgtccgca

SEQ ID NO: 1023085 - DNA, 15 bp, Homo sapiens
gtttcctgtccgcag

SEQ ID NO: 1023086 - DNA, 15 bp, Homo sapiens
tttcctgtccgcagc

SEQ ID NO: 1023087 - DNA, 15 bp, Homo sapiens
ttcctgtccgcagcc

SEQ ID NO: 1023088 - DNA, 15 bp, Homo sapiens
tcctgtccgcagcct

SEQ ID NO: 1023089 - DNA, 15 bp, Homo sapiens
cctgtccgcagcctc

SEQ ID NO: 1023090 - DNA, 15 bp, Homo sapiens
ctgtccgcagcctca

SEQ ID NO: 1023091 - DNA, 15 bp, Homo sapiens
tgtccgcagcctcat

SEQ ID NO: 1023092 - DNA, 15 bp, Homo sapiens
gtccgcagcctcatc

SEQ ID NO: 1023093 - DNA, 15 bp, Homo sapiens
tccgcagcctcatcc

SEQ ID NO: 1023094 - DNA, 15 bp, Homo sapiens
ccgcagcctcatcct

SEQ ID NO: 1023095 - DNA, 15 bp, Homo sapiens
cgcagcctcatcctc

SEQ ID NO: 1023096 - DNA, 15 bp, Homo sapiens
gcagcctcatcctcc

SEQ ID NO: 1023097 - DNA, 15 bp, Homo sapiens
cagcctcatcctccc

SEQ ID NO: 1023098 - DNA, 15 bp, Homo sapiens
agcctcatcctcccc

SEQ ID NO: 1023099 - DNA, 15 bp, Homo sapiens
gcctcatcctccccg

SEQ ID NO: 1023100 - DNA, 15 bp, Homo sapiens
cctcatcctccccgc

SEQ ID NO: 1023101 - DNA, 15 bp, Homo sapiens
ctcatcctccccgca

SEQ ID NO: 1023102 - DNA, 15 bp, Homo sapiens
tcatcctccccgcac

SEQ ID NO: 1023103 - DNA, 15 bp, Homo sapiens
catcctccccgcacc

SEQ ID NO: 1023104 - DNA, 15 bp, Homo sapiens
atcctccccgcaccc

SEQ ID NO: 1023105 - DNA, 15 bp, Homo sapiens
tcctccccgcacccc

SEQ ID NO: 1023106 - DNA, 15 bp, Homo sapiens
cctccccgcaccccc

SEQ ID NO: 1023107 - DNA, 15 bp, Homo sapiens
ctccccgcacccccc

SEQ ID NO: 1023108 - DNA, 15 bp, Homo sapiens
tccccgcacccccca

SEQ ID NO: 1023109 - DNA, 15 bp, Homo sapiens
ccccgcaccccccag

SEQ ID NO: 1023110 - DNA, 15 bp, Homo sapiens
cccgcaccccccagc

SEQ ID NO: 1023111 - DNA, 15 bp, Homo sapiens
ccgcaccccccagct

SEQ ID NO: 1023112 - DNA, 15 bp, Homo sapiens
cgcaccccccagctc

SEQ ID NO: 1023113 - DNA, 15 bp, Homo sapiens
gcaccccccagctct

SEQ ID NO: 1023114 - DNA, 15 bp, Homo sapiens
caccccccagctctc

SEQ ID NO: 1023115 - DNA, 15 bp, Homo sapiens
accccccagctctca

SEQ ID NO: 1023116 - DNA, 15 bp, Homo sapiens
ccccccagctctcag

SEQ ID NO: 1023117 - DNA, 15 bp, Homo sapiens
cccccagctctcagt

SEQ ID NO: 1023118 - DNA, 15 bp, Homo sapiens
ccccagctctcagtc

SEQ ID NO: 1023119 - DNA, 15 bp, Homo sapiens
cccagctctcagtct

SEQ ID NO: 1023120 - DNA, 15 bp, Homo sapiens
ccagctctcagtctc

SEQ ID NO: 1023121 - DNA, 15 bp, Homo sapiens
cagctctcagtctcc

SEQ ID NO: 1023122 - DNA, 15 bp, Homo sapiens
agctctcagtctccc

SEQ ID NO: 1023123 - DNA, 15 bp, Homo sapiens
gctctcagtctcccc

SEQ ID NO: 1023124 - DNA, 15 bp, Homo sapiens
ctctcagtctcccca

SEQ ID NO: 1023125 - DNA, 15 bp, Homo sapiens
tctcagtctccccag

SEQ ID NO: 1023126 - DNA, 15 bp, Homo sapiens
ctcagtctccccagt

SEQ ID NO: 1023127 - DNA, 15 bp, Homo sapiens
tcagtctccccagtc

SEQ ID NO: 1023128 - DNA, 15 bp, Homo sapiens
cagtctccccagtcc

SEQ ID NO: 1023129 - DNA, 15 bp, Homo sapiens
agtctccccagtccc

SEQ ID NO: 1023130 - DNA, 15 bp, Homo sapiens
gtctccccagtccca

SEQ ID NO: 1023131 - DNA, 15 bp, Homo sapiens
tctccccagtcccag

SEQ ID NO: 1023132 - DNA, 15 bp, Homo sapiens
ctccccagtcccagt

SEQ ID NO: 1023133 - DNA, 15 bp, Homo sapiens
tccccagtcccagtc

SEQ ID NO: 1023134 - DNA, 15 bp, Homo sapiens
ccccagtcccagtcc

SEQ ID NO: 1023135 - DNA, 15 bp, Homo sapiens
cccagtcccagtcct

SEQ ID NO: 1023136 - DNA, 15 bp, Homo sapiens
ccagtcccagtcctt

SEQ ID NO: 1023137 - DNA, 15 bp, Homo sapiens
cagtcccagtcctta

SEQ ID NO: 1023138 - DNA, 15 bp, Homo sapiens
agtcccagtccttac

SEQ ID NO: 1023139 - DNA, 15 bp, Homo sapiens
gtcccagtccttacc

SEQ ID NO: 1023140 - DNA, 15 bp, Homo sapiens
tcccagtccttaccc

SEQ ID NO: 1023141 - DNA, 15 bp, Homo sapiens
cccagtccttacccc

SEQ ID NO: 1023142 - DNA, 15 bp, Homo sapiens
ccagtccttaccccg

SEQ ID NO: 1023143 - DNA, 15 bp, Homo sapiens
cagtccttaccccgt

SEQ ID NO: 1023144 - DNA, 15 bp, Homo sapiens
agtccttaccccgtc

SEQ ID NO: 1023145 - DNA, 15 bp, Homo sapiens
gtccttaccccgtcc

SEQ ID NO: 1023146 - DNA, 15 bp, Homo sapiens
tccttaccccgtcca

SEQ ID NO: 1023147 - DNA, 15 bp, Homo sapiens
ccttaccccgtccac

SEQ ID NO: 1023148 - DNA, 15 bp, Homo sapiens
cttaccccgtccacc

SEQ ID NO: 1023149 - DNA, 15 bp, Homo sapiens
ttaccccgtccaccc

SEQ ID NO: 1023150 - DNA, 15 bp, Homo sapiens
taccccgtccacccg

SEQ ID NO: 1023151 - DNA, 15 bp, Homo sapiens
accccgtccacccgc

SEQ ID NO: 1023152 - DNA, 15 bp, Homo sapiens
ccccgtccacccgcg

SEQ ID NO: 1023153 - DNA, 15 bp, Homo sapiens
cccgtccacccgcgg

SEQ ID NO: 1023154 - DNA, 15 bp, Homo sapiens
ccgtccacccgcggc

SEQ ID NO: 1023155 - DNA, 15 bp, Homo sapiens
cgtccacccgcggcc

SEQ ID NO: 1023156 - DNA, 15 bp, Homo sapiens
gtccacccgcggcct

SEQ ID NO: 1023157 - DNA, 15 bp, Homo sapiens
tccacccgcggcctc

SEQ ID NO: 1023158 - DNA, 15 bp, Homo sapiens
ccacccgcggcctct

SEQ ID NO: 1023159 - DNA, 15 bp, Homo sapiens
cacccgcggcctctc

SEQ ID NO: 1023160 - DNA, 15 bp, Homo sapiens
acccgcggcctctct

SEQ ID NO: 1023161 - DNA, 15 bp, Homo sapiens
cccgcggcctctctc

SEQ ID NO: 1023162 - DNA, 15 bp, Homo sapiens
ccgcggcctctctcc

SEQ ID NO: 1023163 - DNA, 15 bp, Homo sapiens
cgcggcctctctccc

SEQ ID NO: 1023164 - DNA, 15 bp, Homo sapiens
gcggcctctctccca

SEQ ID NO: 1023165 - DNA, 15 bp, Homo sapiens
cggcctctctcccaa

SEQ ID NO: 1023166 - DNA, 15 bp, Homo sapiens
ggcctctctcccaac

SEQ ID NO: 1023167 - DNA, 15 bp, Homo sapiens
gcctctctcccaaca

SEQ ID NO: 1023168 - DNA, 15 bp, Homo sapiens
cctctctcccaacac

SEQ ID NO: 1023169 - DNA, 15 bp, Homo sapiens
ctctctcccaacacc

SEQ ID NO: 1023170 - DNA, 15 bp, Homo sapiens
tctctcccaacaccc

SEQ ID NO: 1023171 - DNA, 15 bp, Homo sapiens
ctctcccaacaccca

SEQ ID NO: 1023172 - DNA, 15 bp, Homo sapiens
tctcccaacacccag

SEQ ID NO: 1023173 - DNA, 15 bp, Homo sapiens
ctcccaacacccagc

SEQ ID NO: 1023174 - DNA, 15 bp, Homo sapiens
tcccaacacccagcc

SEQ ID NO: 1023175 - DNA, 15 bp, Homo sapiens
cccaacacccagccg

SEQ ID NO: 1023176 - DNA, 15 bp, Homo sapiens
ccaacacccagccgg

SEQ ID NO: 1023177 - DNA, 15 bp, Homo sapiens
caacacccagccggc

SEQ ID NO: 1023178 - DNA, 15 bp, Homo sapiens
aacacccagccggca

SEQ ID NO: 1023179 - DNA, 15 bp, Homo sapiens
acacccagccggcag

SEQ ID NO: 1023180 - DNA, 15 bp, Homo sapiens
cacccagccggcagc

SEQ ID NO: 1023181 - DNA, 15 bp, Homo sapiens
acccagccggcagcc

SEQ ID NO: 1023182 - DNA, 15 bp, Homo sapiens
cccagccggcagcct

SEQ ID NO: 1023183 - DNA, 15 bp, Homo sapiens
ccagccggcagcctc

SEQ ID NO: 1023184 - DNA, 15 bp, Homo sapiens
cagccggcagcctcg

SEQ ID NO: 1023185 - DNA, 15 bp, Homo sapiens
agccggcagcctcgc

SEQ ID NO: 1023186 - DNA, 15 bp, Homo sapiens
gccggcagcctcgct

SEQ ID NO: 1023187 - DNA, 15 bp, Homo sapiens
ccggcagcctcgctc

SEQ ID NO: 1023188 - DNA, 15 bp, Homo sapiens
cggcagcctcgctct

SEQ ID NO: 1023189 - DNA, 15 bp, Homo sapiens
ggcagcctcgctctc

SEQ ID NO: 1023190 - DNA, 15 bp, Homo sapiens
gcagcctcgctctcg

SEQ ID NO: 1023191 - DNA, 15 bp, Homo sapiens
cagcctcgctctcgg

SEQ ID NO: 1023192 - DNA, 15 bp, Homo sapiens
agcctcgctctcggc

SEQ ID NO: 1023193 - DNA, 15 bp, Homo sapiens
gcctcgctctcggcc

SEQ ID NO: 1023194 - DNA, 15 bp, Homo sapiens
cctcgctctcggccc

SEQ ID NO: 1023195 - DNA, 15 bp, Homo sapiens
ctcgctctcggcccc

SEQ ID NO: 1023196 - DNA, 15 bp, Homo sapiens
tcgctctcggccccc

SEQ ID NO: 1023197 - DNA, 15 bp, Homo sapiens
cgctctcggcccccg

SEQ ID NO: 1023198 - DNA, 15 bp, Homo sapiens
gctctcggcccccgc

SEQ ID NO: 1023199 - DNA, 15 bp, Homo sapiens
ctctcggcccccgcc

SEQ ID NO: 1023200 - DNA, 15 bp, Homo sapiens
tctcggcccccgccc

SEQ ID NO: 1023201 - DNA, 15 bp, Homo sapiens
ctcggcccccgcccg

SEQ ID NO: 1023202 - DNA, 15 bp, Homo sapiens
tcggcccccgcccgc

SEQ ID NO: 1023203 - DNA, 15 bp, Homo sapiens
cggcccccgcccgcc

SEQ ID NO: 1023204 - DNA, 15 bp, Homo sapiens
ggcccccgcccgccc

SEQ ID NO: 1023205 - DNA, 15 bp, Homo sapiens
gcccccgcccgcccc

SEQ ID NO: 1023206 - DNA, 15 bp, Homo sapiens
cccccgcccgccccg

SEQ ID NO: 1023207 - DNA, 15 bp, Homo sapiens
ccccgcccgccccgc

SEQ ID NO: 1023208 - DNA, 15 bp, Homo sapiens
cccgcccgccccgcg

SEQ ID NO: 1023209 - DNA, 15 bp, Homo sapiens
ccgcccgccccgcgt

SEQ ID NO: 1023210 - DNA, 15 bp, Homo sapiens
cgcccgccccgcgtc

SEQ ID NO: 1023211 - DNA, 15 bp, Homo sapiens
gcccgccccgcgtct

SEQ ID NO: 1023212 - DNA, 15 bp, Homo sapiens
cccgccccgcgtctc

SEQ ID NO: 1023213 - DNA, 15 bp, Homo sapiens
ccgccccgcgtctcc

SEQ ID NO: 1023214 - DNA, 15 bp, Homo sapiens
cgccccgcgtctccg

SEQ ID NO: 1023215 - DNA, 15 bp, Homo sapiens
gccccgcgtctccgc

SEQ ID NO: 1023216 - DNA, 15 bp, Homo sapiens
ccccgcgtctccgcg

SEQ ID NO: 1023217 - DNA, 15 bp, Homo sapiens
cccgcgtctccgcgt

SEQ ID NO: 1023218 - DNA, 15 bp, Homo sapiens
ccgcgtctccgcgta

SEQ ID NO: 1023219 - DNA, 15 bp, Homo sapiens
cgcgtctccgcgtac

SEQ ID NO: 1023220 - DNA, 15 bp, Homo sapiens
gcgtctccgcgtacc

SEQ ID NO: 1023221 - DNA, 15 bp, Homo sapiens
cgtctccgcgtaccc

SEQ ID NO: 1023222 - DNA, 15 bp, Homo sapiens
gtctccgcgtaccca

SEQ ID NO: 1023223 - DNA, 15 bp, Homo sapiens
tctccgcgtacccag

SEQ ID NO: 1023224 - DNA, 15 bp, Homo sapiens
ctccgcgtacccagg

SEQ ID NO: 1023225 - DNA, 15 bp, Homo sapiens
tccgcgtacccaggt

SEQ ID NO: 1023226 - DNA, 15 bp, Homo sapiens
ccgcgtacccaggtc

SEQ ID NO: 1023227 - DNA, 15 bp, Homo sapiens
cgcgtacccaggtcc

SEQ ID NO: 1023228 - DNA, 15 bp, Homo sapiens
gcgtacccaggtccc

SEQ ID NO: 1023229 - DNA, 15 bp, Homo sapiens
cgtacccaggtcccc

SEQ ID NO: 1023230 - DNA, 15 bp, Homo sapiens
gtacccaggtccccg

SEQ ID NO: 1023231 - DNA, 15 bp, Homo sapiens
tacccaggtccccgc

SEQ ID NO: 1023232 - DNA, 15 bp, Homo sapiens
acccaggtccccgcg

SEQ ID NO: 1023233 - DNA, 15 bp, Homo sapiens
cccaggtccccgcgc

SEQ ID NO: 1023234 - DNA, 15 bp, Homo sapiens
ccaggtccccgcgcc

SEQ ID NO: 1023235 - DNA, 15 bp, Homo sapiens
caggtccccgcgccc

SEQ ID NO: 1023236 - DNA, 15 bp, Homo sapiens
aggtccccgcgcccc

SEQ ID NO: 1023237 - DNA, 15 bp, Homo sapiens
ggtccccgcgccccg

SEQ ID NO: 1023238 - DNA, 15 bp, Homo sapiens
gtccccgcgccccgc

SEQ ID NO: 1023239 - DNA, 15 bp, Homo sapiens
tccccgcgccccgcc

SEQ ID NO: 1023240 - DNA, 15 bp, Homo sapiens
ccccgcgccccgccc

SEQ ID NO: 1023241 - DNA, 15 bp, Homo sapiens
cccgcgccccgcccc

SEQ ID NO: 1023242 - DNA, 15 bp, Homo sapiens
ccgcgccccgccccg

SEQ ID NO: 1023243 - DNA, 15 bp, Homo sapiens
cgcgccccgccccgc

SEQ ID NO: 1023244 - DNA, 15 bp, Homo sapiens
gcgccccgccccgcc

SEQ ID NO: 1023245 - DNA, 15 bp, Homo sapiens
cgccccgccccgccc

SEQ ID NO: 1023246 - DNA, 15 bp, Homo sapiens
gccccgccccgcccc

SEQ ID NO: 1023247 - DNA, 15 bp, Homo sapiens
ccccgccccgccccg

SEQ ID NO: 1023248 - DNA, 15 bp, Homo sapiens
cccgccccgccccgc

SEQ ID NO: 1023249 - DNA, 15 bp, Homo sapiens
ccgccccgccccgcc

SEQ ID NO: 1023250 - DNA, 15 bp, Homo sapiens
ccccgccccgcccct

SEQ ID NO: 1023251 - DNA, 15 bp, Homo sapiens
cccgccccgcccctg

SEQ ID NO: 1023252 - DNA, 15 bp, Homo sapiens
ccgccccgcccctgc

SEQ ID NO: 1023253 - DNA, 15 bp, Homo sapiens
cgccccgcccctgcc

SEQ ID NO: 1023254 - DNA, 15 bp, Homo sapiens
gccccgcccctgccc

SEQ ID NO: 1023255 - DNA, 15 bp, Homo sapiens
ccccgcccctgccca

SEQ ID NO: 1023256 - DNA, 15 bp, Homo sapiens
cccgcccctgcccag

SEQ ID NO: 1023257 - DNA, 15 bp, Homo sapiens
ccgcccctgcccagg

SEQ ID NO: 1023258 - DNA, 15 bp, Homo sapiens
cgcccctgcccaggt

SEQ ID NO: 1023259 - DNA, 15 bp, Homo sapiens
gcccctgcccaggtt

SEQ ID NO: 1023260 - DNA, 15 bp, Homo sapiens
cccctgcccaggttc

SEQ ID NO: 1023261 - DNA, 15 bp, Homo sapiens
ccctgcccaggttct

SEQ ID NO: 1023262 - DNA, 15 bp, Homo sapiens
cctgcccaggttctc

SEQ ID NO: 1023263 - DNA, 15 bp, Homo sapiens
ctgcccaggttctcc

SEQ ID NO: 1023264 - DNA, 15 bp, Homo sapiens
tgcccaggttctccc

SEQ ID NO: 1023265 - DNA, 15 bp, Homo sapiens
gcccaggttctccct

SEQ ID NO: 1023266 - DNA, 15 bp, Homo sapiens
cccaggttctccctc

SEQ ID NO: 1023267 - DNA, 15 bp, Homo sapiens
ccaggttctccctcc

SEQ ID NO: 1023268 - DNA, 15 bp, Homo sapiens
caggttctccctccc

SEQ ID NO: 1023269 - DNA, 15 bp, Homo sapiens
aggttctccctcccg

SEQ ID NO: 1023270 - DNA, 15 bp, Homo sapiens
ggttctccctcccgt

SEQ ID NO: 1023271 - DNA, 15 bp, Homo sapiens
gttctccctcccgtt

SEQ ID NO: 1023272 - DNA, 15 bp, Homo sapiens
ttctccctcccgttc

SEQ ID NO: 1023273 - DNA, 15 bp, Homo sapiens
tctccctcccgttcc

SEQ ID NO: 1023274 - DNA, 15 bp, Homo sapiens
ctccctcccgttccc

SEQ ID NO: 1023275 - DNA, 15 bp, Homo sapiens
tccctcccgttcccg

SEQ ID NO: 1023276 - DNA, 15 bp, Homo sapiens
ccctcccgttcccgc

SEQ ID NO: 1023277 - DNA, 15 bp, Homo sapiens
cctcccgttcccgcg

SEQ ID NO: 1023278 - DNA, 15 bp, Homo sapiens
ctcccgttcccgcgc

SEQ ID NO: 1023279 - DNA, 15 bp, Homo sapiens
tcccgttcccgcgct

SEQ ID NO: 1023280 - DNA, 15 bp, Homo sapiens
cccgttcccgcgctg

SEQ ID NO: 1023281 - DNA, 15 bp, Homo sapiens
ccgttcccgcgctgg

SEQ ID NO: 1023282 - DNA, 15 bp, Homo sapiens
cgttcccgcgctggg

SEQ ID NO: 1023283 - DNA, 15 bp, Homo sapiens
gttcccgcgctggga

SEQ ID NO: 1023284 - DNA, 15 bp, Homo sapiens
ttcccgcgctgggaa

SEQ ID NO: 1023285 - DNA, 15 bp, Homo sapiens
tcccgcgctgggaac

SEQ ID NO: 1023286 - DNA, 15 bp, Homo sapiens
cccgcgctgggaaca

SEQ ID NO: 1023287 - DNA, 15 bp, Homo sapiens
ccgcgctgggaacag

SEQ ID NO: 1023288 - DNA, 15 bp, Homo sapiens
cgcgctgggaacagc

SEQ ID NO: 1023289 - DNA, 15 bp, Homo sapiens
gcgctgggaacagcc

SEQ ID NO: 1023290 - DNA, 15 bp, Homo sapiens
cgctgggaacagcct

SEQ ID NO: 1023291 - DNA, 15 bp, Homo sapiens
gctgggaacagcctc

SEQ ID NO: 1023292 - DNA, 15 bp, Homo sapiens
ctgggaacagcctcg

SEQ ID NO: 1023293 - DNA, 15 bp, Homo sapiens
tgggaacagcctcgg

SEQ ID NO: 1023294 - DNA, 15 bp, Homo sapiens
gggaacagcctcggc

SEQ ID NO: 1023295 - DNA, 15 bp, Homo sapiens
ggaacagcctcggcc

SEQ ID NO: 1023296 - DNA, 15 bp, Homo sapiens
gaacagcctcggccg

SEQ ID NO: 1023297 - DNA, 15 bp, Homo sapiens
aacagcctcggccgc

SEQ ID NO: 1023298 - DNA, 15 bp, Homo sapiens
acagcctcggccgcg

SEQ ID NO: 1023299 - DNA, 15 bp, Homo sapiens
cagcctcggccgcgc

SEQ ID NO: 1023300 - DNA, 15 bp, Homo sapiens
agcctcggccgcgcg

SEQ ID NO: 1023301 - DNA, 15 bp, Homo sapiens
gcctcggccgcgcgc

SEQ ID NO: 1023302 - DNA, 15 bp, Homo sapiens
cctcggccgcgcgcc

SEQ ID NO: 1023303 - DNA, 15 bp, Homo sapiens
ctcggccgcgcgccc

SEQ ID NO: 1023304 - DNA, 15 bp, Homo sapiens
tcggccgcgcgcccc

SEQ ID NO: 1023305 - DNA, 15 bp, Homo sapiens
cggccgcgcgccccc

SEQ ID NO: 1023306 - DNA, 15 bp, Homo sapiens
ggccgcgcgccccct

SEQ ID NO: 1023307 - DNA, 15 bp, Homo sapiens
gccgcgcgccccctg

SEQ ID NO: 1023308 - DNA, 15 bp, Homo sapiens
ccgcgcgccccctga

SEQ ID NO: 1023309 - DNA, 15 bp, Homo sapiens
cgcgcgccccctgag

SEQ ID NO: 1023310 - DNA, 15 bp, Homo sapiens
gcgcgccccctgagg

SEQ ID NO: 1023311 - DNA, 15 bp, Homo sapiens
cgcgccccctgagga

SEQ ID NO: 1023312 - DNA, 15 bp, Homo sapiens
gcgccccctgaggac

SEQ ID NO: 1023313 - DNA, 15 bp, Homo sapiens
cgccccctgaggacg

SEQ ID NO: 1023314 - DNA, 15 bp, Homo sapiens
gccccctgaggacgc

SEQ ID NO: 1023315 - DNA, 15 bp, Homo sapiens
ccccctgaggacgcg

SEQ ID NO: 1023316 - DNA, 15 bp, Homo sapiens
cccctgaggacgcgg

SEQ ID NO: 1023317 - DNA, 15 bp, Homo sapiens
ccctgaggacgcggc

SEQ ID NO: 1023318 - DNA, 15 bp, Homo sapiens
cctgaggacgcggcc

SEQ ID NO: 1023319 - DNA, 15 bp, Homo sapiens
ctgaggacgcggccc

SEQ ID NO: 1023320 - DNA, 15 bp, Homo sapiens
tgaggacgcggcccc

SEQ ID NO: 1023321 - DNA, 15 bp, Homo sapiens
gaggacgcggccccc

SEQ ID NO: 1023322 - DNA, 15 bp, Homo sapiens
aggacgcggccccca

SEQ ID NO: 1023323 - DNA, 15 bp, Homo sapiens
ggacgcggcccccaa

SEQ ID NO: 1023324 - DNA, 15 bp, Homo sapiens
gacgcggcccccaac

SEQ ID NO: 1023325 - DNA, 15 bp, Homo sapiens
acgcggcccccaacc

SEQ ID NO: 1023326 - DNA, 15 bp, Homo sapiens
cgcggcccccaaccc

SEQ ID NO: 1023327 - DNA, 15 bp, Homo sapiens
gcggcccccaacccc

SEQ ID NO: 1023328 - DNA, 15 bp, Homo sapiens
cggcccccaacccct

SEQ ID NO: 1023329 - DNA, 15 bp, Homo sapiens
ggcccccaacccctc

SEQ ID NO: 1023330 - DNA, 15 bp, Homo sapiens
gcccccaacccctcc

SEQ ID NO: 1023331 - DNA, 15 bp, Homo sapiens
cccccaacccctcct

SEQ ID NO: 1023332 - DNA, 15 bp, Homo sapiens
ccccaacccctcctg

SEQ ID NO: 1023333 - DNA, 15 bp, Homo sapiens
cccaacccctcctgg

SEQ ID NO: 1023334 - DNA, 15 bp, Homo sapiens
ccaacccctcctgga

SEQ ID NO: 1023335 - DNA, 15 bp, Homo sapiens
caacccctcctggag

SEQ ID NO: 1023336 - DNA, 15 bp, Homo sapiens
aacccctcctggaga

SEQ ID NO: 1023337 - DNA, 15 bp, Homo sapiens
acccctcctggagac

SEQ ID NO: 1023338 - DNA, 15 bp, Homo sapiens
cccctcctggagacc

SEQ ID NO: 1023339 - DNA, 15 bp, Homo sapiens
ccctcctggagacca

SEQ ID NO: 1023340 - DNA, 15 bp, Homo sapiens
cctcctggagaccac

SEQ ID NO: 1023341 - DNA, 15 bp, Homo sapiens
ctcctggagaccaca

SEQ ID NO: 1023342 - DNA, 15 bp, Homo sapiens
tcctggagaccacac

SEQ ID NO: 1023343 - DNA, 15 bp, Homo sapiens
cctggagaccacacc

SEQ ID NO: 1023344 - DNA, 15 bp, Homo sapiens
ctggagaccacaccg

SEQ ID NO: 1023345 - DNA, 15 bp, Homo sapiens
tggagaccacaccgg

SEQ ID NO: 1023346 - DNA, 15 bp, Homo sapiens
ggagaccacaccggc

SEQ ID NO: 1023347 - DNA, 15 bp, Homo sapiens
gagaccacaccggca

SEQ ID NO: 1023348 - DNA, 15 bp, Homo sapiens
agaccacaccggcaa

SEQ ID NO: 1023349 - DNA, 15 bp, Homo sapiens
gaccacaccggcaag

SEQ ID NO: 1023350 - DNA, 15 bp, Homo sapiens
accacaccggcaagt

SEQ ID NO: 1023351 - DNA, 15 bp, Homo sapiens
ccacaccggcaagtc

SEQ ID NO: 1023352 - DNA, 15 bp, Homo sapiens
cacaccggcaagtct

SEQ ID NO: 1023353 - DNA, 15 bp, Homo sapiens
acaccggcaagtctg

SEQ ID NO: 1023354 - DNA, 15 bp, Homo sapiens
caccggcaagtctgg

SEQ ID NO: 1023355 - DNA, 15 bp, Homo sapiens
accggcaagtctggt

SEQ ID NO: 1023356 - DNA, 15 bp, Homo sapiens
ccggcaagtctggtg

SEQ ID NO: 1023357 - DNA, 15 bp, Homo sapiens
cggcaagtctggtgt

SEQ ID NO: 1023358 - DNA, 15 bp, Homo sapiens
ggcaagtctggtgtg

SEQ ID NO: 1023359 - DNA, 15 bp, Homo sapiens
gcaagtctggtgtgc

SEQ ID NO: 1023360 - DNA, 15 bp, Homo sapiens
caagtctggtgtgcg

SEQ ID NO: 1023361 - DNA, 15 bp, Homo sapiens
aagtctggtgtgcgg

SEQ ID NO: 1023362 - DNA, 15 bp, Homo sapiens
agtctggtgtgcgga

SEQ ID NO: 1023363 - DNA, 15 bp, Homo sapiens
gtctggtgtgcggaa

SEQ ID NO: 1023364 - DNA, 15 bp, Homo sapiens
tctggtgtgcggaag

SEQ ID NO: 1023365 - DNA, 15 bp, Homo sapiens
ctggtgtgcggaaga

SEQ ID NO: 1023366 - DNA, 15 bp, Homo sapiens
tggtgtgcggaagag

SEQ ID NO: 1023367 - DNA, 15 bp, Homo sapiens
ggtgtgcggaagagc

SEQ ID NO: 1023368 - DNA, 15 bp, Homo sapiens
gtgtgcggaagagca

SEQ ID NO: 1023369 - DNA, 15 bp, Homo sapiens
tgtgcggaagagcag

SEQ ID NO: 1023370 - DNA, 15 bp, Homo sapiens
gtgcggaagagcaga

SEQ ID NO: 1023371 - DNA, 15 bp, Homo sapiens
tgcggaagagcagaa

SEQ ID NO: 1023372 - DNA, 15 bp, Homo sapiens
gcggaagagcagaaa

SEQ ID NO: 1023373 - DNA, 15 bp, Homo sapiens
cggaagagcagaaac

SEQ ID NO: 1023374 - DNA, 15 bp, Homo sapiens
ggaagagcagaaact

SEQ ID NO: 1023375 - DNA, 15 bp, Homo sapiens
gaagagcagaaactt

SEQ ID NO: 1023376 - DNA, 15 bp, Homo sapiens
aagagcagaaacttc

SEQ ID NO: 1023377 - DNA, 15 bp, Homo sapiens
agagcagaaacttcc

SEQ ID NO: 1023378 - DNA, 15 bp, Homo sapiens
gagcagaaacttcct

SEQ ID NO: 1023379 - DNA, 15 bp, Homo sapiens
agcagaaacttcctc

SEQ ID NO: 1023380 - DNA, 15 bp, Homo sapiens
gcagaaacttcctcg

SEQ ID NO: 1023381 - DNA, 15 bp, Homo sapiens
cagaaacttcctcgg

SEQ ID NO: 1023382 - DNA, 15 bp, Homo sapiens
agaaacttcctcgga

SEQ ID NO: 1023383 - DNA, 15 bp, Homo sapiens
gaaacttcctcggaa

SEQ ID NO: 1023384 - DNA, 15 bp, Homo sapiens
aaacttcctcggaat

SEQ ID NO: 1023385 - DNA, 15 bp, Homo sapiens
aacttcctcggaatt

SEQ ID NO: 1023386 - DNA, 15 bp, Homo sapiens
acttcctcggaattt

SEQ ID NO: 1023387 - DNA, 15 bp, Homo sapiens
cttcctcggaatttc

SEQ ID NO: 1023388 - DNA, 15 bp, Homo sapiens
ttcctcggaatttcg

SEQ ID NO: 1023389 - DNA, 15 bp, Homo sapiens
tcctcggaatttcga

SEQ ID NO: 1023390 - DNA, 15 bp, Homo sapiens
cctcggaatttcgat

SEQ ID NO: 1023391 - DNA, 15 bp, Homo sapiens
ctcggaatttcgatc

SEQ ID NO: 1023392 - DNA, 15 bp, Homo sapiens
tcggaatttcgatcc

SEQ ID NO: 1023393 - DNA, 15 bp, Homo sapiens
cggaatttcgatccc

SEQ ID NO: 1023394 - DNA, 15 bp, Homo sapiens
ggaatttcgatccca

SEQ ID NO: 1023395 - DNA, 15 bp, Homo sapiens
gaatttcgatcccag

SEQ ID NO: 1023396 - DNA, 15 bp, Homo sapiens
aatttcgatcccaga

SEQ ID NO: 1023397 - DNA, 15 bp, Homo sapiens
atttcgatcccagaa

SEQ ID NO: 1023398 - DNA, 15 bp, Homo sapiens
tttcgatcccagaat

SEQ ID NO: 1023399 - DNA, 15 bp, Homo sapiens
ttcgatcccagaata

SEQ ID NO: 1023400 - DNA, 15 bp, Homo sapiens
tcgatcccagaatat

SEQ ID NO: 1023401 - DNA, 15 bp, Homo sapiens
cgatcccagaatata

SEQ ID NO: 1023402 - DNA, 15 bp, Homo sapiens
gatcccagaatatac

SEQ ID NO: 1023403 - DNA, 15 bp, Homo sapiens
atcccagaatataca

SEQ ID NO: 1023404 - DNA, 15 bp, Homo sapiens
tcccagaatatacaa

SEQ ID NO: 1023405 - DNA, 15 bp, Homo sapiens
cccagaatatacaaa

SEQ ID NO: 1023406 - DNA, 15 bp, Homo sapiens
ccagaatatacaaat

SEQ ID NO: 1023407 - DNA, 15 bp, Homo sapiens
cagaatatacaaata

SEQ ID NO: 1023408 - DNA, 15 bp, Homo sapiens
agaatatacaaatat

SEQ ID NO: 1023409 - DNA, 15 bp, Homo sapiens
gaatatacaaatatt

SEQ ID NO: 1023410 - DNA, 15 bp, Homo sapiens
aatatacaaatatta

SEQ ID NO: 1023411 - DNA, 15 bp, Homo sapiens
atatacaaatattag

SEQ ID NO: 1023412 - DNA, 15 bp, Homo sapiens
tatacaaatattagt

SEQ ID NO: 1023413 - DNA, 15 bp, Homo sapiens
atacaaatattagtt

SEQ ID NO: 1023414 - DNA, 15 bp, Homo sapiens
tacaaatattagttc

SEQ ID NO: 1023415 - DNA, 15 bp, Homo sapiens
acaaatattagttca

SEQ ID NO: 1023416 - DNA, 15 bp, Homo sapiens
caaatattagttcac

SEQ ID NO: 1023417 - DNA, 15 bp, Homo sapiens
aaatattagttcact

SEQ ID NO: 1023418 - DNA, 15 bp, Homo sapiens
aatattagttcacta

SEQ ID NO: 1023419 - DNA, 15 bp, Homo sapiens
atattagttcactag

SEQ ID NO: 1023420 - DNA, 15 bp, Homo sapiens
tagaaatagtcatgt

SEQ ID NO: 1023421 - DNA, 15 bp, Homo sapiens
agaaatagtcatgtg

SEQ ID NO: 1023422 - DNA, 15 bp, Homo sapiens
gaaatagtcatgtgg

SEQ ID NO: 1023423 - DNA, 15 bp, Homo sapiens
aaatagtcatgtggg

SEQ ID NO: 1023424 - DNA, 15 bp, Homo sapiens
aatagtcatgtgggc

SEQ ID NO: 1023425 - DNA, 15 bp, Homo sapiens
atagtcatgtgggca

SEQ ID NO: 1023426 - DNA, 15 bp, Homo sapiens
tagtcatgtgggcaa

SEQ ID NO: 1023427 - DNA, 15 bp, Homo sapiens
agtcatgtgggcaat

SEQ ID NO: 1023428 - DNA, 15 bp, Homo sapiens
gtcatgtgggcaata

SEQ ID NO: 1023429 - DNA, 15 bp, Homo sapiens
tcatgtgggcaatat

SEQ ID NO: 1023430 - DNA, 15 bp, Homo sapiens
catgtgggcaatata

SEQ ID NO: 1023431 - DNA, 15 bp, Homo sapiens
atgtgggcaatatat

SEQ ID NO: 1023432 - DNA, 15 bp, Homo sapiens
tgtgggcaatatatc

SEQ ID NO: 1023433 - DNA, 15 bp, Homo sapiens
gtgggcaatatatct

SEQ ID NO: 1023434 - DNA, 15 bp, Homo sapiens
tgggcaatatatctc

SEQ ID NO: 1023435 - DNA, 15 bp, Homo sapiens
gggcaatatatctct

SEQ ID NO: 1023436 - DNA, 15 bp, Homo sapiens
ggcaatatatctcta

SEQ ID NO: 1023437 - DNA, 15 bp, Homo sapiens
gcaatatatctctat

SEQ ID NO: 1023438 - DNA, 15 bp, Homo sapiens
caatatatctctatg

SEQ ID NO: 1023439 - DNA, 15 bp, Homo sapiens
aatatatctctatgg

SEQ ID NO: 1023440 - DNA, 15 bp, Homo sapiens
atatatctctatggg

SEQ ID NO: 1023441 - DNA, 15 bp, Homo sapiens
tatatctctatgggg

SEQ ID NO: 1023442 - DNA, 15 bp, Homo sapiens
atatctctatggggt

SEQ ID NO: 1023443 - DNA, 15 bp, Homo sapiens
tatctctatggggtt

SEQ ID NO: 1023444 - DNA, 15 bp, Homo sapiens
atctctatggggttt

SEQ ID NO: 1023445 - DNA, 15 bp, Homo sapiens
tctctatggggtttt

SEQ ID NO: 1023446 - DNA, 15 bp, Homo sapiens
ctctatggggttttc

SEQ ID NO: 1023447 - DNA, 15 bp, Homo sapiens
tctatggggttttca

SEQ ID NO: 1023448 - DNA, 15 bp, Homo sapiens
ctatggggttttcag

SEQ ID NO: 1023449 - DNA, 15 bp, Homo sapiens
tatggggttttcaga

SEQ ID NO: 1023450 - DNA, 15 bp, Homo sapiens
atggggttttcagat

SEQ ID NO: 1023451 - DNA, 15 bp, Homo sapiens
tggggttttcagatg

SEQ ID NO: 1023452 - DNA, 15 bp, Homo sapiens
ggggttttcagatgg

SEQ ID NO: 1023453 - DNA, 15 bp, Homo sapiens
gggttttcagatggc

SEQ ID NO: 1023454 - DNA, 15 bp, Homo sapiens
ggttttcagatggct

SEQ ID NO: 1023455 - DNA, 15 bp, Homo sapiens
gttttcagatggctg

SEQ ID NO: 1023456 - DNA, 15 bp, Homo sapiens
ttttcagatggctgc

SEQ ID NO: 1023457 - DNA, 15 bp, Homo sapiens
tttcagatggctgca

SEQ ID NO: 1023458 - DNA, 15 bp, Homo sapiens
ttcagatggctgcaa

SEQ ID NO: 1023459 - DNA, 15 bp, Homo sapiens
tcagatggctgcaac

SEQ ID NO: 1023460 - DNA, 15 bp, Homo sapiens
cagatggctgcaact

SEQ ID NO: 1023461 - DNA, 15 bp, Homo sapiens
agatggctgcaactt

SEQ ID NO: 1023462 - DNA, 15 bp, Homo sapiens
gatggctgcaacttc

SEQ ID NO: 1023463 - DNA, 15 bp, Homo sapiens
atggctgcaacttcc

SEQ ID NO: 1023464 - DNA, 15 bp, Homo sapiens
tggctgcaacttcct

SEQ ID NO: 1023465 - DNA, 15 bp, Homo sapiens
ggctgcaacttccta

SEQ ID NO: 1023466 - DNA, 15 bp, Homo sapiens
gctgcaacttcctac

SEQ ID NO: 1023467 - DNA, 15 bp, Homo sapiens
ctgcaacttcctacc

SEQ ID NO: 1023468 - DNA, 15 bp, Homo sapiens
tgcaacttcctaccc

SEQ ID NO: 1023469 - DNA, 15 bp, Homo sapiens
gcaacttcctaccct

SEQ ID NO: 1023470 - DNA, 15 bp, Homo sapiens
caacttcctaccctg

SEQ ID NO: 1023471 - DNA, 15 bp, Homo sapiens
aacttcctaccctgg

SEQ ID NO: 1023472 - DNA, 15 bp, Homo sapiens
acttcctaccctgga

SEQ ID NO: 1023473 - DNA, 15 bp, Homo sapiens
cttcctaccctggat

SEQ ID NO: 1023474 - DNA, 15 bp, Homo sapiens
ttcctaccctggatc

SEQ ID NO: 1023475 - DNA, 15 bp, Homo sapiens
tcctaccctggatct

SEQ ID NO: 1023476 - DNA, 15 bp, Homo sapiens
cctaccctggatctc

SEQ ID NO: 1023477 - DNA, 15 bp, Homo sapiens
ctaccctggatctct

SEQ ID NO: 1023478 - DNA, 15 bp, Homo sapiens
taccctggatctctg

SEQ ID NO: 1023479 - DNA, 15 bp, Homo sapiens
accctggatctctgc

SEQ ID NO: 1023480 - DNA, 15 bp, Homo sapiens
ccctggatctctgct

SEQ ID NO: 1023481 - DNA, 15 bp, Homo sapiens
cctggatctctgctg

SEQ ID NO: 1023482 - DNA, 15 bp, Homo sapiens
ctggatctctgctgc

SEQ ID NO: 1023483 - DNA, 15 bp, Homo sapiens
tggatctctgctgct

SEQ ID NO: 1023484 - DNA, 15 bp, Homo sapiens
ggatctctgctgctc

SEQ ID NO: 1023485 - DNA, 15 bp, Homo sapiens
gatctctgctgctct

SEQ ID NO: 1023486 - DNA, 15 bp, Homo sapiens
atctctgctgctctt

SEQ ID NO: 1023487 - DNA, 15 bp, Homo sapiens
tctctgctgctcttg

SEQ ID NO: 1023488 - DNA, 15 bp, Homo sapiens
ctctgctgctcttgg

SEQ ID NO: 1023489 - DNA, 15 bp, Homo sapiens
tctgctgctcttggg

SEQ ID NO: 1023490 - DNA, 15 bp, Homo sapiens
ctgctgctcttgggc

SEQ ID NO: 1023491 - DNA, 15 bp, Homo sapiens
tgctgctcttgggca

SEQ ID NO: 1023492 - DNA, 15 bp, Homo sapiens
gctgctcttgggcac

SEQ ID NO: 1023493 - DNA, 15 bp, Homo sapiens
ctgctcttgggcacc

SEQ ID NO: 1023494 - DNA, 15 bp, Homo sapiens
tgctcttgggcacca

SEQ ID NO: 1023495 - DNA, 15 bp, Homo sapiens
gctcttgggcaccac

SEQ ID NO: 1023496 - DNA, 15 bp, Homo sapiens
ctcttgggcaccaca

SEQ ID NO: 1023497 - DNA, 15 bp, Homo sapiens
tcttgggcaccacat

SEQ ID NO: 1023498 - DNA, 15 bp, Homo sapiens
cttgggcaccacatt

SEQ ID NO: 1023499 - DNA, 15 bp, Homo sapiens
ttgggcaccacattc

SEQ ID NO: 1023500 - DNA, 15 bp, Homo sapiens
tgggcaccacattcc

SEQ ID NO: 1023501 - DNA, 15 bp, Homo sapiens
gggcaccacattcct

SEQ ID NO: 1023502 - DNA, 15 bp, Homo sapiens
ggcaccacattcctg

SEQ ID NO: 1023503 - DNA, 15 bp, Homo sapiens
gcaccacattcctgt

SEQ ID NO: 1023504 - DNA, 15 bp, Homo sapiens
caccacattcctgtc

SEQ ID NO: 1023505 - DNA, 15 bp, Homo sapiens
accacattcctgtcc

SEQ ID NO: 1023506 - DNA, 15 bp, Homo sapiens
ccacattcctgtcca

SEQ ID NO: 1023507 - DNA, 15 bp, Homo sapiens
cacattcctgtccac

SEQ ID NO: 1023508 - DNA, 15 bp, Homo sapiens
acattcctgtccacc

SEQ ID NO: 1023509 - DNA, 15 bp, Homo sapiens
cattcctgtccaccc

SEQ ID NO: 1023510 - DNA, 15 bp, Homo sapiens
attcctgtccaccca

SEQ ID NO: 1023511 - DNA, 15 bp, Homo sapiens
ttcctgtccacccag

SEQ ID NO: 1023512 - DNA, 15 bp, Homo sapiens
tcctgtccacccagc

SEQ ID NO: 1023513 - DNA, 15 bp, Homo sapiens
cctgtccacccagcc

SEQ ID NO: 1023514 - DNA, 15 bp, Homo sapiens
ctgtccacccagcca

SEQ ID NO: 1023515 - DNA, 15 bp, Homo sapiens
tgtccacccagccaa

SEQ ID NO: 1023516 - DNA, 15 bp, Homo sapiens
gtccacccagccaag

SEQ ID NO: 1023517 - DNA, 15 bp, Homo sapiens
tccacccagccaagc

SEQ ID NO: 1023518 - DNA, 15 bp, Homo sapiens
ccacccagccaagcc

SEQ ID NO: 1023519 - DNA, 15 bp, Homo sapiens
cacccagccaagcct

SEQ ID NO: 1023520 - DNA, 15 bp, Homo sapiens
acccagccaagcctg

SEQ ID NO: 1023521 - DNA, 15 bp, Homo sapiens
cccagccaagcctgg

SEQ ID NO: 1023522 - DNA, 15 bp, Homo sapiens
ccagccaagcctggt

SEQ ID NO: 1023523 - DNA, 15 bp, Homo sapiens
cagccaagcctggtc

SEQ ID NO: 1023524 - DNA, 15 bp, Homo sapiens
agccaagcctggtct

SEQ ID NO: 1023525 - DNA, 15 bp, Homo sapiens
gccaagcctggtctg

SEQ ID NO: 1023526 - DNA, 15 bp, Homo sapiens
ccaagcctggtctga

SEQ ID NO: 1023527 - DNA, 15 bp, Homo sapiens
caagcctggtctgag

SEQ ID NO: 1023528 - DNA, 15 bp, Homo sapiens
aagcctggtctgagg

SEQ ID NO: 1023529 - DNA, 15 bp, Homo sapiens
agcctggtctgaggc

SEQ ID NO: 1023530 - DNA, 15 bp, Homo sapiens
gcctggtctgaggct

SEQ ID NO: 1023531 - DNA, 15 bp, Homo sapiens
cctggtctgaggctg

SEQ ID NO: 1023532 - DNA, 15 bp, Homo sapiens
ctggtctgaggctgt

SEQ ID NO: 1023533 - DNA, 15 bp, Homo sapiens
tggtctgaggctgtg

SEQ ID NO: 1023534 - DNA, 15 bp, Homo sapiens
ggtctgaggctgtgt

SEQ ID NO: 1023535 - DNA, 15 bp, Homo sapiens
gtctgaggctgtgtc

SEQ ID NO: 1023536 - DNA, 15 bp, Homo sapiens
tctgaggctgtgtcc

SEQ ID NO: 1023537 - DNA, 15 bp, Homo sapiens
ctgaggctgtgtcct

SEQ ID NO: 1023538 - DNA, 15 bp, Homo sapiens
tgaggctgtgtcctt

SEQ ID NO: 1023539 - DNA, 15 bp, Homo sapiens
gaggctgtgtcctta

SEQ ID NO: 1023540 - DNA, 15 bp, Homo sapiens
aggctgtgtccttag

SEQ ID NO: 1023541 - DNA, 15 bp, Homo sapiens
ggctgtgtccttagt

SEQ ID NO: 1023542 - DNA, 15 bp, Homo sapiens
gctgtgtccttagtc

SEQ ID NO: 1023543 - DNA, 15 bp, Homo sapiens
ctgtgtccttagtca

SEQ ID NO: 1023544 - DNA, 15 bp, Homo sapiens
tgtgtccttagtcag

SEQ ID NO: 1023545 - DNA, 15 bp, Homo sapiens
gtgtccttagtcagg

SEQ ID NO: 1023546 - DNA, 15 bp, Homo sapiens
tgtccttagtcaggg

SEQ ID NO: 1023547 - DNA, 15 bp, Homo sapiens
gtccttagtcagggg

SEQ ID NO: 1023548 - DNA, 15 bp, Homo sapiens
tccttagtcagggga

SEQ ID NO: 1023549 - DNA, 15 bp, Homo sapiens
ccttagtcaggggag

SEQ ID NO: 1023550 - DNA, 15 bp, Homo sapiens
cttagtcaggggagc

SEQ ID NO: 1023551 - DNA, 15 bp, Homo sapiens
ttagtcaggggagcc

SEQ ID NO: 1023552 - DNA, 15 bp, Homo sapiens
tagtcaggggagcct

SEQ ID NO: 1023553 - DNA, 15 bp, Homo sapiens
agtcaggggagcctg

SEQ ID NO: 1023554 - DNA, 15 bp, Homo sapiens
gtcaggggagcctgt

SEQ ID NO: 1023555 - DNA, 15 bp, Homo sapiens
tcaggggagcctgtt

SEQ ID NO: 1023556 - DNA, 15 bp, Homo sapiens
caggggagcctgttt

SEQ ID NO: 1023557 - DNA, 15 bp, Homo sapiens
aggggagcctgtttc

SEQ ID NO: 1023558 - DNA, 15 bp, Homo sapiens
ggggagcctgtttcc

SEQ ID NO: 1023559 - DNA, 15 bp, Homo sapiens
gggagcctgtttccc

SEQ ID NO: 1023560 - DNA, 15 bp, Homo sapiens
ggagcctgtttccct

SEQ ID NO: 1023561 - DNA, 15 bp, Homo sapiens
gagcctgtttccctt

SEQ ID NO: 1023562 - DNA, 15 bp, Homo sapiens
agcctgtttcccttt

SEQ ID NO: 1023563 - DNA, 15 bp, Homo sapiens
gcctgtttccctttc

SEQ ID NO: 1023564 - DNA, 15 bp, Homo sapiens
cctgtttccctttcc

SEQ ID NO: 1023565 - DNA, 15 bp, Homo sapiens
ctgtttccctttccc

SEQ ID NO: 1023566 - DNA, 15 bp, Homo sapiens
tgtttccctttcccc

SEQ ID NO: 1023567 - DNA, 15 bp, Homo sapiens
gtttccctttcccct

SEQ ID NO: 1023568 - DNA, 15 bp, Homo sapiens
tttccctttcccctg

SEQ ID NO: 1023569 - DNA, 15 bp, Homo sapiens
ttccctttcccctgg

SEQ ID NO: 1023570 - DNA, 15 bp, Homo sapiens
tccctttcccctggc

SEQ ID NO: 1023571 - DNA, 15 bp, Homo sapiens
ccctttcccctggca

SEQ ID NO: 1023572 - DNA, 15 bp, Homo sapiens
cctttcccctggcag

SEQ ID NO: 1023573 - DNA, 15 bp, Homo sapiens
ctttcccctggcaga

SEQ ID NO: 1023574 - DNA, 15 bp, Homo sapiens
tttcccctggcagac

SEQ ID NO: 1023575 - DNA, 15 bp, Homo sapiens
ttcccctggcagact

SEQ ID NO: 1023576 - DNA, 15 bp, Homo sapiens
tcccctggcagacta

SEQ ID NO: 1023577 - DNA, 15 bp, Homo sapiens
cccctggcagactag

SEQ ID NO: 1023578 - DNA, 15 bp, Homo sapiens
ccctggcagactagg

SEQ ID NO: 1023579 - DNA, 15 bp, Homo sapiens
cctggcagactaggt

SEQ ID NO: 1023580 - DNA, 15 bp, Homo sapiens
ctggcagactaggtc

SEQ ID NO: 1023581 - DNA, 15 bp, Homo sapiens
tggcagactaggtcc

SEQ ID NO: 1023582 - DNA, 15 bp, Homo sapiens
ggcagactaggtcct

SEQ ID NO: 1023583 - DNA, 15 bp, Homo sapiens
gcagactaggtcctg

SEQ ID NO: 1023584 - DNA, 15 bp, Homo sapiens
cagactaggtcctgt

SEQ ID NO: 1023585 - DNA, 15 bp, Homo sapiens
agactaggtcctgtg

SEQ ID NO: 1023586 - DNA, 15 bp, Homo sapiens
gactaggtcctgtgg

SEQ ID NO: 1023587 - DNA, 15 bp, Homo sapiens
actaggtcctgtggg

SEQ ID NO: 1023588 - DNA, 15 bp, Homo sapiens
ctaggtcctgtgggt

SEQ ID NO: 1023589 - DNA, 15 bp, Homo sapiens
taggtcctgtgggtc

SEQ ID NO: 1023590 - DNA, 15 bp, Homo sapiens
aggtcctgtgggtcc

SEQ ID NO: 1023591 - DNA, 15 bp, Homo sapiens
ggtcctgtgggtccc

SEQ ID NO: 1023592 - DNA, 15 bp, Homo sapiens
gtcctgtgggtccca

SEQ ID NO: 1023593 - DNA, 15 bp, Homo sapiens
tcctgtgggtcccag

SEQ ID NO: 1023594 - DNA, 15 bp, Homo sapiens
cctgtgggtcccagc

SEQ ID NO: 1023595 - DNA, 15 bp, Homo sapiens
ctgtgggtcccagcg

SEQ ID NO: 1023596 - DNA, 15 bp, Homo sapiens
tgtgggtcccagcgt

SEQ ID NO: 1023597 - DNA, 15 bp, Homo sapiens
gtgggtcccagcgtc

SEQ ID NO: 1023598 - DNA, 15 bp, Homo sapiens
tgggtcccagcgtcc

SEQ ID NO: 1023599 - DNA, 15 bp, Homo sapiens
gggtcccagcgtcct

SEQ ID NO: 1023600 - DNA, 15 bp, Homo sapiens
ggtcccagcgtcctc

SEQ ID NO: 1023601 - DNA, 15 bp, Homo sapiens
gtcccagcgtcctct

SEQ ID NO: 1023602 - DNA, 15 bp, Homo sapiens
tcccagcgtcctctt

SEQ ID NO: 1023603 - DNA, 15 bp, Homo sapiens
cccagcgtcctcttc

SEQ ID NO: 1023604 - DNA, 15 bp, Homo sapiens
ccagcgtcctcttca

SEQ ID NO: 1023605 - DNA, 15 bp, Homo sapiens
cagcgtcctcttcac

SEQ ID NO: 1023606 - DNA, 15 bp, Homo sapiens
agcgtcctcttcacc

SEQ ID NO: 1023607 - DNA, 15 bp, Homo sapiens
gcgtcctcttcacct

SEQ ID NO: 1023608 - DNA, 15 bp, Homo sapiens
cgtcctcttcacctc

SEQ ID NO: 1023609 - DNA, 15 bp, Homo sapiens
gtcctcttcacctcc

SEQ ID NO: 1023610 - DNA, 15 bp, Homo sapiens
tcctcttcacctcct

SEQ ID NO: 1023611 - DNA, 15 bp, Homo sapiens
cctcttcacctcctg

SEQ ID NO: 1023612 - DNA, 15 bp, Homo sapiens
ctcttcacctcctgc

SEQ ID NO: 1023613 - DNA, 15 bp, Homo sapiens
tcttcacctcctgcc

SEQ ID NO: 1023614 - DNA, 15 bp, Homo sapiens
cttcacctcctgcca

SEQ ID NO: 1023615 - DNA, 15 bp, Homo sapiens
ttcacctcctgccag

SEQ ID NO: 1023616 - DNA, 15 bp, Homo sapiens
tcacctcctgccagt

SEQ ID NO: 1023617 - DNA, 15 bp, Homo sapiens
cacctcctgccagtt

SEQ ID NO: 1023618 - DNA, 15 bp, Homo sapiens
acctcctgccagttg

SEQ ID NO: 1023619 - DNA, 15 bp, Homo sapiens
cctcctgccagttgt

SEQ ID NO: 1023620 - DNA, 15 bp, Homo sapiens
ctcctgccagttgta

SEQ ID NO: 1023621 - DNA, 15 bp, Homo sapiens
tcctgccagttgtag

SEQ ID NO: 1023622 - DNA, 15 bp, Homo sapiens
cctgccagttgtagg

SEQ ID NO: 1023623 - DNA, 15 bp, Homo sapiens
ctgccagttgtagga

SEQ ID NO: 1023624 - DNA, 15 bp, Homo sapiens
tgccagttgtaggag

SEQ ID NO: 1023625 - DNA, 15 bp, Homo sapiens
gccagttgtaggagt

SEQ ID NO: 1023626 - DNA, 15 bp, Homo sapiens
ccagttgtaggagtt

SEQ ID NO: 1023627 - DNA, 15 bp, Homo sapiens
cagttgtaggagttc

SEQ ID NO: 1023628 - DNA, 15 bp, Homo sapiens
agttgtaggagttct

SEQ ID NO: 1023629 - DNA, 15 bp, Homo sapiens
gttgtaggagttctg

SEQ ID NO: 1023630 - DNA, 15 bp, Homo sapiens
ttgtaggagttctgt

SEQ ID NO: 1023631 - DNA, 15 bp, Homo sapiens
tgtaggagttctgtc

SEQ ID NO: 1023632 - DNA, 15 bp, Homo sapiens
gtaggagttctgtcc

SEQ ID NO: 1023633 - DNA, 15 bp, Homo sapiens
taggagttctgtcct

SEQ ID NO: 1023634 - DNA, 15 bp, Homo sapiens
aggagttctgtcctc

SEQ ID NO: 1023635 - DNA, 15 bp, Homo sapiens
ggagttctgtcctcc

SEQ ID NO: 1023636 - DNA, 15 bp, Homo sapiens
gagttctgtcctccc

SEQ ID NO: 1023637 - DNA, 15 bp, Homo sapiens
agttctgtcctccca

SEQ ID NO: 1023638 - DNA, 15 bp, Homo sapiens
gttctgtcctcccat

SEQ ID NO: 1023639 - DNA, 15 bp, Homo sapiens
ttctgtcctcccatt

SEQ ID NO: 1023640 - DNA, 15 bp, Homo sapiens
tctgtcctcccattt

SEQ ID NO: 1023641 - DNA, 15 bp, Homo sapiens
ctgtcctcccatttt

SEQ ID NO: 1023642 - DNA, 15 bp, Homo sapiens
tgtcctcccattttg

SEQ ID NO: 1023643 - DNA, 15 bp, Homo sapiens
gtcctcccattttgc

SEQ ID NO: 1023644 - DNA, 15 bp, Homo sapiens
tcctcccattttgcg

SEQ ID NO: 1023645 - DNA, 15 bp, Homo sapiens
cctcccattttgcgg

SEQ ID NO: 1023646 - DNA, 15 bp, Homo sapiens
ctcccattttgcgga

SEQ ID NO: 1023647 - DNA, 15 bp, Homo sapiens
tcccattttgcggaa

SEQ ID NO: 1023648 - DNA, 15 bp, Homo sapiens
cccattttgcggaac

SEQ ID NO: 1023649 - DNA, 15 bp, Homo sapiens
ccattttgcggaacc

SEQ ID NO: 1023650 - DNA, 15 bp, Homo sapiens
cattttgcggaacca

SEQ ID NO: 1023651 - DNA, 15 bp, Homo sapiens
attttgcggaaccag

SEQ ID NO: 1023652 - DNA, 15 bp, Homo sapiens
ttttgcggaaccagg

SEQ ID NO: 1023653 - DNA, 15 bp, Homo sapiens
tttgcggaaccaggg

SEQ ID NO: 1023654 - DNA, 15 bp, Homo sapiens
ttgcggaaccaggga

SEQ ID NO: 1023655 - DNA, 15 bp, Homo sapiens
tgcggaaccagggag

SEQ ID NO: 1023656 - DNA, 15 bp, Homo sapiens
gcggaaccagggagc

SEQ ID NO: 1023657 - DNA, 15 bp, Homo sapiens
cggaaccagggagcc

SEQ ID NO: 1023658 - DNA, 15 bp, Homo sapiens
ggaaccagggagcct

SEQ ID NO: 1023659 - DNA, 15 bp, Homo sapiens
gaaccagggagcctg

SEQ ID NO: 1023660 - DNA, 15 bp, Homo sapiens
aaccagggagcctgt

SEQ ID NO: 1023661 - DNA, 15 bp, Homo sapiens
accagggagcctgtg

SEQ ID NO: 1023662 - DNA, 15 bp, Homo sapiens
ccagggagcctgtgg

SEQ ID NO: 1023663 - DNA, 15 bp, Homo sapiens
cagggagcctgtggg

SEQ ID NO: 1023664 - DNA, 15 bp, Homo sapiens
agggagcctgtggga

SEQ ID NO: 1023665 - DNA, 15 bp, Homo sapiens
gggagcctgtgggag

SEQ ID NO: 1023666 - DNA, 15 bp, Homo sapiens
ggagcctgtgggagg

SEQ ID NO: 1023667 - DNA, 15 bp, Homo sapiens
gagcctgtgggaggc

SEQ ID NO: 1023668 - DNA, 15 bp, Homo sapiens
agcctgtgggaggcc

SEQ ID NO: 1023669 - DNA, 15 bp, Homo sapiens
gcctgtgggaggcct

SEQ ID NO: 1023670 - DNA, 15 bp, Homo sapiens
cctgtgggaggcctt

SEQ ID NO: 1023671 - DNA, 15 bp, Homo sapiens
ctgtgggaggcctta

SEQ ID NO: 1023672 - DNA, 15 bp, Homo sapiens
tgtgggaggccttac

SEQ ID NO: 1023673 - DNA, 15 bp, Homo sapiens
gtgggaggccttacc

SEQ ID NO: 1023674 - DNA, 15 bp, Homo sapiens
tgggaggccttacct

SEQ ID NO: 1023675 - DNA, 15 bp, Homo sapiens
gggaggccttacctc

SEQ ID NO: 1023676 - DNA, 15 bp, Homo sapiens
ggaggccttacctcc

SEQ ID NO: 1023677 - DNA, 15 bp, Homo sapiens
gaggccttacctcca

SEQ ID NO: 1023678 - DNA, 15 bp, Homo sapiens
aggccttacctccac

SEQ ID NO: 1023679 - DNA, 15 bp, Homo sapiens
ggccttacctccact

SEQ ID NO: 1023680 - DNA, 15 bp, Homo sapiens
gccttacctccactg

SEQ ID NO: 1023681 - DNA, 15 bp, Homo sapiens
ccttacctccactgc

SEQ ID NO: 1023682 - DNA, 15 bp, Homo sapiens
cttacctccactgcc

SEQ ID NO: 1023683 - DNA, 15 bp, Homo sapiens
ttacctccactgcca

SEQ ID NO: 1023684 - DNA, 15 bp, Homo sapiens
tacctccactgccag

SEQ ID NO: 1023685 - DNA, 15 bp, Homo sapiens
acctccactgccagc

SEQ ID NO: 1023686 - DNA, 15 bp, Homo sapiens
cctccactgccagcc

SEQ ID NO: 1023687 - DNA, 15 bp, Homo sapiens
ctccactgccagccc

SEQ ID NO: 1023688 - DNA, 15 bp, Homo sapiens
tccactgccagcccc

SEQ ID NO: 1023689 - DNA, 15 bp, Homo sapiens
ccactgccagcccca

SEQ ID NO: 1023690 - DNA, 15 bp, Homo sapiens
cactgccagccccac

SEQ ID NO: 1023691 - DNA, 15 bp, Homo sapiens
actgccagccccacc

SEQ ID NO: 1023692 - DNA, 15 bp, Homo sapiens
ctgccagccccacct

SEQ ID NO: 1023693 - DNA, 15 bp, Homo sapiens
tgccagccccacctc

SEQ ID NO: 1023694 - DNA, 15 bp, Homo sapiens
gccagccccacctca

SEQ ID NO: 1023695 - DNA, 15 bp, Homo sapiens
ccagccccacctcac

SEQ ID NO: 1023696 - DNA, 15 bp, Homo sapiens
cagccccacctcacc

SEQ ID NO: 1023697 - DNA, 15 bp, Homo sapiens
agccccacctcaccc

SEQ ID NO: 1023698 - DNA, 15 bp, Homo sapiens
gccccacctcacccc

SEQ ID NO: 1023699 - DNA, 15 bp, Homo sapiens
ccccacctcacccca

SEQ ID NO: 1023700 - DNA, 15 bp, Homo sapiens
cccacctcaccccag

SEQ ID NO: 1023701 - DNA, 15 bp, Homo sapiens
ccacctcaccccagg

SEQ ID NO: 1023702 - DNA, 15 bp, Homo sapiens
cacctcaccccaggg

SEQ ID NO: 1023703 - DNA, 15 bp, Homo sapiens
acctcaccccagggc

SEQ ID NO: 1023704 - DNA, 15 bp, Homo sapiens
cctcaccccagggca

SEQ ID NO: 1023705 - DNA, 15 bp, Homo sapiens
ctcaccccagggcag

SEQ ID NO: 1023706 - DNA, 15 bp, Homo sapiens
tcaccccagggcaga

SEQ ID NO: 1023707 - DNA, 15 bp, Homo sapiens
caccccagggcagat

SEQ ID NO: 1023708 - DNA, 15 bp, Homo sapiens
accccagggcagatt

SEQ ID NO: 1023709 - DNA, 15 bp, Homo sapiens
ccccagggcagatta

SEQ ID NO: 1023710 - DNA, 15 bp, Homo sapiens
cccagggcagattag

SEQ ID NO: 1023711 - DNA, 15 bp, Homo sapiens
ccagggcagattagt

SEQ ID NO: 1023712 - DNA, 15 bp, Homo sapiens
cagggcagattagtg

SEQ ID NO: 1023713 - DNA, 15 bp, Homo sapiens
agggcagattagtgc

SEQ ID NO: 1023714 - DNA, 15 bp, Homo sapiens
gggcagattagtgcc

SEQ ID NO: 1023715 - DNA, 15 bp, Homo sapiens
ggcagattagtgcct

SEQ ID NO: 1023716 - DNA, 15 bp, Homo sapiens
gcagattagtgcctc

SEQ ID NO: 1023717 - DNA, 15 bp, Homo sapiens
cagattagtgcctct

SEQ ID NO: 1023718 - DNA, 15 bp, Homo sapiens
agattagtgcctctg

SEQ ID NO: 1023719 - DNA, 15 bp, Homo sapiens
gattagtgcctctga

SEQ ID NO: 1023720 - DNA, 15 bp, Homo sapiens
attagtgcctctgag

SEQ ID NO: 1023721 - DNA, 15 bp, Homo sapiens
ttagtgcctctgagc

SEQ ID NO: 1023722 - DNA, 15 bp, Homo sapiens
tagtgcctctgagcc

SEQ ID NO: 1023723 - DNA, 15 bp, Homo sapiens
agtgcctctgagcca

SEQ ID NO: 1023724 - DNA, 15 bp, Homo sapiens
gtgcctctgagccac

SEQ ID NO: 1023725 - DNA, 15 bp, Homo sapiens
tgcctctgagccact

SEQ ID NO: 1023726 - DNA, 15 bp, Homo sapiens
gcctctgagccactc

SEQ ID NO: 1023727 - DNA, 15 bp, Homo sapiens
cctctgagccactca

SEQ ID NO: 1023728 - DNA, 15 bp, Homo sapiens
ctctgagccactcaa

SEQ ID NO: 1023729 - DNA, 15 bp, Homo sapiens
tctgagccactcaat

SEQ ID NO: 1023730 - DNA, 15 bp, Homo sapiens
ctgagccactcaatt

SEQ ID NO: 1023731 - DNA, 15 bp, Homo sapiens
tgagccactcaatta

SEQ ID NO: 1023732 - DNA, 15 bp, Homo sapiens
gagccactcaattat

SEQ ID NO: 1023733 - DNA, 15 bp, Homo sapiens
agccactcaattatc

SEQ ID NO: 1023734 - DNA, 15 bp, Homo sapiens
gccactcaattatcc

SEQ ID NO: 1023735 - DNA, 15 bp, Homo sapiens
ccactcaattatccg

SEQ ID NO: 1023736 - DNA, 15 bp, Homo sapiens
cactcaattatccgc

SEQ ID NO: 1023737 - DNA, 15 bp, Homo sapiens
actcaattatccgca

SEQ ID NO: 1023738 - DNA, 15 bp, Homo sapiens
ctcaattatccgcag

SEQ ID NO: 1023739 - DNA, 15 bp, Homo sapiens
tcaattatccgcagg

SEQ ID NO: 1023740 - DNA, 15 bp, Homo sapiens
caattatccgcagga

SEQ ID NO: 1023741 - DNA, 15 bp, Homo sapiens
aattatccgcaggat

SEQ ID NO: 1023742 - DNA, 15 bp, Homo sapiens
attatccgcaggatg

SEQ ID NO: 1023743 - DNA, 15 bp, Homo sapiens
ttatccgcaggatgg

SEQ ID NO: 1023744 - DNA, 15 bp, Homo sapiens
tatccgcaggatggg

SEQ ID NO: 1023745 - DNA, 15 bp, Homo sapiens
atccgcaggatgggt

SEQ ID NO: 1023746 - DNA, 15 bp, Homo sapiens
tccgcaggatgggtg

SEQ ID NO: 1023747 - DNA, 15 bp, Homo sapiens
ccgcaggatgggtgg

SEQ ID NO: 1023748 - DNA, 15 bp, Homo sapiens
cgcaggatgggtggg

SEQ ID NO: 1023749 - DNA, 15 bp, Homo sapiens
gcaggatgggtgggg

SEQ ID NO: 1023750 - DNA, 15 bp, Homo sapiens
caggatgggtggggg

SEQ ID NO: 1023751 - DNA, 15 bp, Homo sapiens
aggatgggtgggggg

SEQ ID NO: 1023752 - DNA, 15 bp, Homo sapiens
ggatgggtggggggg

SEQ ID NO: 1023753 - DNA, 15 bp, Homo sapiens
gatgggtgggggggg

SEQ ID NO: 1023754 - DNA, 15 bp, Homo sapiens
atgggtggggggggg

SEQ ID NO: 1023755 - DNA, 15 bp, Homo sapiens
tgggtgggggggggg

SEQ ID NO: 1023756 - DNA, 15 bp, Homo sapiens
gggtggggggggggc

SEQ ID NO: 1023757 - DNA, 15 bp, Homo sapiens
ggtggggggggggcg

SEQ ID NO: 1023758 - DNA, 15 bp, Homo sapiens
gtggggggggggcgg

SEQ ID NO: 1023759 - DNA, 15 bp, Homo sapiens
tggggggggggcggg

SEQ ID NO: 1023760 - DNA, 15 bp, Homo sapiens
ggggggggggcgggg

SEQ ID NO: 1023761 - DNA, 15 bp, Homo sapiens
gggggggggcgggga

SEQ ID NO: 1023762 - DNA, 15 bp, Homo sapiens
ggggggggcggggag

SEQ ID NO: 1023763 - DNA, 15 bp, Homo sapiens
gggggggcggggagg

SEQ ID NO: 1023764 - DNA, 15 bp, Homo sapiens
ggggggcggggaggg

SEQ ID NO: 1023765 - DNA, 15 bp, Homo sapiens
gggggcggggagggg

SEQ ID NO: 1023766 - DNA, 15 bp, Homo sapiens
ggggcggggagggga

SEQ ID NO: 1023767 - DNA, 15 bp, Homo sapiens
gggcggggaggggaa

SEQ ID NO: 1023768 - DNA, 15 bp, Homo sapiens
ggcggggaggggaat

SEQ ID NO: 1023769 - DNA, 15 bp, Homo sapiens
gcggggaggggaatc

SEQ ID NO: 1023770 - DNA, 15 bp, Homo sapiens
cggggaggggaatct

SEQ ID NO: 1023771 - DNA, 15 bp, Homo sapiens
ggggaggggaatcta

SEQ ID NO: 1023772 - DNA, 15 bp, Homo sapiens
gggaggggaatctag

SEQ ID NO: 1023773 - DNA, 15 bp, Homo sapiens
ggaggggaatctaga

SEQ ID NO: 1023774 - DNA, 15 bp, Homo sapiens
gaggggaatctagaa

SEQ ID NO: 1023775 - DNA, 15 bp, Homo sapiens
aggggaatctagaat

SEQ ID NO: 1023776 - DNA, 15 bp, Homo sapiens
ggggaatctagaatt

SEQ ID NO: 1023777 - DNA, 15 bp, Homo sapiens
gggaatctagaattt

SEQ ID NO: 1023778 - DNA, 15 bp, Homo sapiens
ggaatctagaattta

SEQ ID NO: 1023779 - DNA, 15 bp, Homo sapiens
gaatctagaatttat

SEQ ID NO: 1023780 - DNA, 15 bp, Homo sapiens
aatctagaatttata

SEQ ID NO: 1023781 - DNA, 15 bp, Homo sapiens
atctagaatttatag

SEQ ID NO: 1023782 - DNA, 15 bp, Homo sapiens
tctagaatttatagc

SEQ ID NO: 1023783 - DNA, 15 bp, Homo sapiens
ctagaatttatagct

SEQ ID NO: 1023784 - DNA, 15 bp, Homo sapiens
tagaatttatagctg

SEQ ID NO: 1023785 - DNA, 15 bp, Homo sapiens
agaatttatagctgg

SEQ ID NO: 1023786 - DNA, 15 bp, Homo sapiens
gaatttatagctggg

SEQ ID NO: 1023787 - DNA, 15 bp, Homo sapiens
aatttatagctgggg

SEQ ID NO: 1023788 - DNA, 15 bp, Homo sapiens
atttatagctggggg

SEQ ID NO: 1023789 - DNA, 15 bp, Homo sapiens
tttatagctgggggt

SEQ ID NO: 1023790 - DNA, 15 bp, Homo sapiens
ttatagctgggggtg

SEQ ID NO: 1023791 - DNA, 15 bp, Homo sapiens
tatagctgggggtgg

SEQ ID NO: 1023792 - DNA, 15 bp, Homo sapiens
atagctgggggtgga

SEQ ID NO: 1023793 - DNA, 15 bp, Homo sapiens
tagctgggggtggaa

SEQ ID NO: 1023794 - DNA, 15 bp, Homo sapiens
agctgggggtggaag

SEQ ID NO: 1023795 - DNA, 15 bp, Homo sapiens
gctgggggtggaagg

SEQ ID NO: 1023796 - DNA, 15 bp, Homo sapiens
ctgggggtggaaggc

SEQ ID NO: 1023797 - DNA, 15 bp, Homo sapiens
tgggggtggaaggcg

SEQ ID NO: 1023798 - DNA, 15 bp, Homo sapiens
gggggtggaaggcgc

SEQ ID NO: 1023799 - DNA, 15 bp, Homo sapiens
ggggtggaaggcgca

SEQ ID NO: 1023800 - DNA, 15 bp, Homo sapiens
gggtggaaggcgcag

SEQ ID NO: 1023801 - DNA, 15 bp, Homo sapiens
ggtggaaggcgcagt

SEQ ID NO: 1023802 - DNA, 15 bp, Homo sapiens
gtggaaggcgcagtg

SEQ ID NO: 1023803 - DNA, 15 bp, Homo sapiens
tggaaggcgcagtga

SEQ ID NO: 1023804 - DNA, 15 bp, Homo sapiens
ggaaggcgcagtgag

SEQ ID NO: 1023805 - DNA, 15 bp, Homo sapiens
gaaggcgcagtgagg

SEQ ID NO: 1023806 - DNA, 15 bp, Homo sapiens
aaggcgcagtgaggg

SEQ ID NO: 1023807 - DNA, 15 bp, Homo sapiens
aggcgcagtgaggga

SEQ ID NO: 1023808 - DNA, 15 bp, Homo sapiens
ggcgcagtgagggag

SEQ ID NO: 1023809 - DNA, 15 bp, Homo sapiens
gcgcagtgagggagg

SEQ ID NO: 1023810 - DNA, 15 bp, Homo sapiens
cgcagtgagggaggt

SEQ ID NO: 1023811 - DNA, 15 bp, Homo sapiens
gcagtgagggaggta

SEQ ID NO: 1023812 - DNA, 15 bp, Homo sapiens
cagtgagggaggtac

SEQ ID NO: 1023813 - DNA, 15 bp, Homo sapiens
agtgagggaggtaca

SEQ ID NO: 1023814 - DNA, 15 bp, Homo sapiens
gtgagggaggtacag

SEQ ID NO: 1023815 - DNA, 15 bp, Homo sapiens
tgagggaggtacagg

SEQ ID NO: 1023816 - DNA, 15 bp, Homo sapiens
gagggaggtacaggg

SEQ ID NO: 1023817 - DNA, 15 bp, Homo sapiens
agggaggtacaggga

SEQ ID NO: 1023818 - DNA, 15 bp, Homo sapiens
gggaggtacagggag

SEQ ID NO: 1023819 - DNA, 15 bp, Homo sapiens
ggaggtacagggagg

SEQ ID NO: 1023820 - DNA, 15 bp, Homo sapiens
gaggtacagggagga

SEQ ID NO: 1023821 - DNA, 15 bp, Homo sapiens
aggtacagggaggaa

SEQ ID NO: 1023822 - DNA, 15 bp, Homo sapiens
ggtacagggaggaag

SEQ ID NO: 1023823 - DNA, 15 bp, Homo sapiens
gtacagggaggaaga

SEQ ID NO: 1023824 - DNA, 15 bp, Homo sapiens
tacagggaggaagag

SEQ ID NO: 1023825 - DNA, 15 bp, Homo sapiens
acagggaggaagagt

SEQ ID NO: 1023826 - DNA, 15 bp, Homo sapiens
cagggaggaagagtg

SEQ ID NO: 1023827 - DNA, 15 bp, Homo sapiens
agggaggaagagtga

SEQ ID NO: 1023828 - DNA, 15 bp, Homo sapiens
gggaggaagagtgaa

SEQ ID NO: 1023829 - DNA, 15 bp, Homo sapiens
ggaggaagagtgaaa

SEQ ID NO: 1023830 - DNA, 15 bp, Homo sapiens
gaggaagagtgaaat

SEQ ID NO: 1023831 - DNA, 15 bp, Homo sapiens
aggaagagtgaaata

SEQ ID NO: 1023832 - DNA, 15 bp, Homo sapiens
ggaagagtgaaatat

SEQ ID NO: 1023833 - DNA, 15 bp, Homo sapiens
gaagagtgaaatatt

SEQ ID NO: 1023834 - DNA, 15 bp, Homo sapiens
aagagtgaaatattt

SEQ ID NO: 1023835 - DNA, 15 bp, Homo sapiens
agagtgaaatattta

SEQ ID NO: 1023836 - DNA, 15 bp, Homo sapiens
gagtgaaatatttag

SEQ ID NO: 1023837 - DNA, 15 bp, Homo sapiens
agtgaaatatttaga

SEQ ID NO: 1023838 - DNA, 15 bp, Homo sapiens
gtgaaatatttagat

SEQ ID NO: 1023839 - DNA, 15 bp, Homo sapiens
tgaaatatttagatc

SEQ ID NO: 1023840 - DNA, 15 bp, Homo sapiens
gaaatatttagatct

SEQ ID NO: 1023841 - DNA, 15 bp, Homo sapiens
aaatatttagatctt

SEQ ID NO: 1023842 - DNA, 15 bp, Homo sapiens
aatatttagatcttt

SEQ ID NO: 1023843 - DNA, 15 bp, Homo sapiens
atatttagatctttg

SEQ ID NO: 1023844 - DNA, 15 bp, Homo sapiens
tatttagatctttgg

SEQ ID NO: 1023845 - DNA, 15 bp, Homo sapiens
atttagatctttggg

SEQ ID NO: 1023846 - DNA, 15 bp, Homo sapiens
tttagatctttgggg

SEQ ID NO: 1023847 - DNA, 15 bp, Homo sapiens
ttagatctttggggt

SEQ ID NO: 1023848 - DNA, 15 bp, Homo sapiens
tagatctttggggtt

SEQ ID NO: 1023849 - DNA, 15 bp, Homo sapiens
agatctttggggttc

SEQ ID NO: 1023850 - DNA, 15 bp, Homo sapiens
gatctttggggttcc

SEQ ID NO: 1023851 - DNA, 15 bp, Homo sapiens
atctttggggttcct

SEQ ID NO: 1023852 - DNA, 15 bp, Homo sapiens
tctttggggttcctg

SEQ ID NO: 1023853 - DNA, 15 bp, Homo sapiens
ctttggggttcctgc

SEQ ID NO: 1023854 - DNA, 15 bp, Homo sapiens
tttggggttcctgcc

SEQ ID NO: 1023855 - DNA, 15 bp, Homo sapiens
ttggggttcctgcca

SEQ ID NO: 1023856 - DNA, 15 bp, Homo sapiens
tggggttcctgccat

SEQ ID NO: 1023857 - DNA, 15 bp, Homo sapiens
ggggttcctgccatt

SEQ ID NO: 1023858 - DNA, 15 bp, Homo sapiens
gggttcctgccattt

SEQ ID NO: 1023859 - DNA, 15 bp, Homo sapiens
ggttcctgccatttg

SEQ ID NO: 1023860 - DNA, 15 bp, Homo sapiens
gttcctgccatttgg

SEQ ID NO: 1023861 - DNA, 15 bp, Homo sapiens
ttcctgccatttggc

SEQ ID NO: 1023862 - DNA, 15 bp, Homo sapiens
tcctgccatttggcc

SEQ ID NO: 1023863 - DNA, 15 bp, Homo sapiens
cctgccatttggccc

SEQ ID NO: 1023864 - DNA, 15 bp, Homo sapiens
ctgccatttggcccc

SEQ ID NO: 1023865 - DNA, 15 bp, Homo sapiens
tgccatttggcccct

SEQ ID NO: 1023866 - DNA, 15 bp, Homo sapiens
gccatttggccccta

SEQ ID NO: 1023867 - DNA, 15 bp, Homo sapiens
ccatttggcccctat

SEQ ID NO: 1023868 - DNA, 15 bp, Homo sapiens
catttggcccctatt

SEQ ID NO: 1023869 - DNA, 15 bp, Homo sapiens
atttggcccctatta

SEQ ID NO: 1023870 - DNA, 15 bp, Homo sapiens
tttggcccctattaa

SEQ ID NO: 1023871 - DNA, 15 bp, Homo sapiens
ttggcccctattaaa

SEQ ID NO: 1023872 - DNA, 15 bp, Homo sapiens
tggcccctattaaag

SEQ ID NO: 1023873 - DNA, 15 bp, Homo sapiens
ggcccctattaaaga

SEQ ID NO: 1023874 - DNA, 15 bp, Homo sapiens
gcccctattaaagag

SEQ ID NO: 1023875 - DNA, 15 bp, Homo sapiens
cccctattaaagaga

SEQ ID NO: 1023876 - DNA, 15 bp, Homo sapiens
ccctattaaagagaa

SEQ ID NO: 1023877 - DNA, 15 bp, Homo sapiens
cctattaaagagaac

SEQ ID NO: 1023878 - DNA, 15 bp, Homo sapiens
ctattaaagagaacc

SEQ ID NO: 1023879 - DNA, 15 bp, Homo sapiens
tattaaagagaaccc

SEQ ID NO: 1023880 - DNA, 15 bp, Homo sapiens
attaaagagaaccct

SEQ ID NO: 1023881 - DNA, 15 bp, Homo sapiens
ttaaagagaaccctg

SEQ ID NO: 1023882 - DNA, 15 bp, Homo sapiens
taaagagaaccctgg

SEQ ID NO: 1023883 - DNA, 15 bp, Homo sapiens
aaagagaaccctggg

SEQ ID NO: 1023884 - DNA, 15 bp, Homo sapiens
aagagaaccctgggg

SEQ ID NO: 1023885 - DNA, 15 bp, Homo sapiens
agagaaccctggggc

SEQ ID NO: 1023886 - DNA, 15 bp, Homo sapiens
gagaaccctggggct

SEQ ID NO: 1023887 - DNA, 15 bp, Homo sapiens
agaaccctggggctt

SEQ ID NO: 1023888 - DNA, 15 bp, Homo sapiens
gaaccctggggcttt

SEQ ID NO: 1023889 - DNA, 15 bp, Homo sapiens
aaccctggggctttt

SEQ ID NO: 1023890 - DNA, 15 bp, Homo sapiens
accctggggctttta

SEQ ID NO: 1023891 - DNA, 15 bp, Homo sapiens
ccctggggcttttag

SEQ ID NO: 1023892 - DNA, 15 bp, Homo sapiens
cctggggcttttaga

SEQ ID NO: 1023893 - DNA, 15 bp, Homo sapiens
ctggggcttttagaa

SEQ ID NO: 1023894 - DNA, 15 bp, Homo sapiens
tggggcttttagaat

SEQ ID NO: 1023895 - DNA, 15 bp, Homo sapiens
ggggcttttagaatg

SEQ ID NO: 1023896 - DNA, 15 bp, Homo sapiens
gggcttttagaatga

SEQ ID NO: 1023897 - DNA, 15 bp, Homo sapiens
ggcttttagaatgag

SEQ ID NO: 1023898 - DNA, 15 bp, Homo sapiens
gcttttagaatgagt

SEQ ID NO: 1023899 - DNA, 15 bp, Homo sapiens
cttttagaatgagtt

SEQ ID NO: 1023900 - DNA, 15 bp, Homo sapiens
ttttagaatgagttt

SEQ ID NO: 1023901 - DNA, 15 bp, Homo sapiens
tttagaatgagtttt

SEQ ID NO: 1023902 - DNA, 15 bp, Homo sapiens
ttagaatgagttttg

SEQ ID NO: 1023903 - DNA, 15 bp, Homo sapiens
tagaatgagttttgc

SEQ ID NO: 1023904 - DNA, 15 bp, Homo sapiens
agaatgagttttgca

SEQ ID NO: 1023905 - DNA, 15 bp, Homo sapiens
gaatgagttttgcat

SEQ ID NO: 1023906 - DNA, 15 bp, Homo sapiens
aatgagttttgcatg

SEQ ID NO: 1023907 - DNA, 15 bp, Homo sapiens
atgagttttgcatga

SEQ ID NO: 1023908 - DNA, 15 bp, Homo sapiens
tgagttttgcatgaa

SEQ ID NO: 1023909 - DNA, 15 bp, Homo sapiens
gagttttgcatgaaa

SEQ ID NO: 1023910 - DNA, 15 bp, Homo sapiens
agttttgcatgaaat

SEQ ID NO: 1023911 - DNA, 15 bp, Homo sapiens
gttttgcatgaaatt

SEQ ID NO: 1023912 - DNA, 15 bp, Homo sapiens
ttttgcatgaaattg

SEQ ID NO: 1023913 - DNA, 15 bp, Homo sapiens
tttgcatgaaattga

SEQ ID NO: 1023914 - DNA, 15 bp, Homo sapiens
ttgcatgaaattgaa

SEQ ID NO: 1023915 - DNA, 15 bp, Homo sapiens
tgcatgaaattgaac

SEQ ID NO: 1023916 - DNA, 15 bp, Homo sapiens
gcatgaaattgaaca

SEQ ID NO: 1023917 - DNA, 15 bp, Homo sapiens
catgaaattgaacaa

SEQ ID NO: 1023918 - DNA, 15 bp, Homo sapiens
atgaaattgaacaag

SEQ ID NO: 1023919 - DNA, 15 bp, Homo sapiens
tgaaattgaacaagc

SEQ ID NO: 1023920 - DNA, 15 bp, Homo sapiens
gaaattgaacaagca

SEQ ID NO: 1023921 - DNA, 15 bp, Homo sapiens
aaattgaacaagcag

SEQ ID NO: 1023922 - DNA, 15 bp, Homo sapiens
aattgaacaagcagg

SEQ ID NO: 1023923 - DNA, 15 bp, Homo sapiens
attgaacaagcaggg

SEQ ID NO: 1023924 - DNA, 15 bp, Homo sapiens
ttgaacaagcagggc

SEQ ID NO: 1023925 - DNA, 15 bp, Homo sapiens
tgaacaagcagggcc

SEQ ID NO: 1023926 - DNA, 15 bp, Homo sapiens
gaacaagcagggcca

SEQ ID NO: 1023927 - DNA, 15 bp, Homo sapiens
aacaagcagggccat

SEQ ID NO: 1023928 - DNA, 15 bp, Homo sapiens
acaagcagggccatg

SEQ ID NO: 1023929 - DNA, 15 bp, Homo sapiens
caagcagggccatga

SEQ ID NO: 1023930 - DNA, 15 bp, Homo sapiens
aagcagggccatgag

SEQ ID NO: 1023931 - DNA, 15 bp, Homo sapiens
agcagggccatgagc

SEQ ID NO: 1023932 - DNA, 15 bp, Homo sapiens
gcagggccatgagct

SEQ ID NO: 1023933 - DNA, 15 bp, Homo sapiens
cagggccatgagctg

SEQ ID NO: 1023934 - DNA, 15 bp, Homo sapiens
agggccatgagctgt

SEQ ID NO: 1023935 - DNA, 15 bp, Homo sapiens
gggccatgagctgta

SEQ ID NO: 1023936 - DNA, 15 bp, Homo sapiens
ggccatgagctgtac

SEQ ID NO: 1023937 - DNA, 15 bp, Homo sapiens
gccatgagctgtaca

SEQ ID NO: 1023938 - DNA, 15 bp, Homo sapiens
ccatgagctgtacag

SEQ ID NO: 1023939 - DNA, 15 bp, Homo sapiens
catgagctgtacaga

SEQ ID NO: 1023940 - DNA, 15 bp, Homo sapiens
atgagctgtacagaa

SEQ ID NO: 1023941 - DNA, 15 bp, Homo sapiens
tgagctgtacagaat

SEQ ID NO: 1023942 - DNA, 15 bp, Homo sapiens
gagctgtacagaatc

SEQ ID NO: 1023943 - DNA, 15 bp, Homo sapiens
agctgtacagaatcc

SEQ ID NO: 1023944 - DNA, 15 bp, Homo sapiens
gctgtacagaatccc

SEQ ID NO: 1023945 - DNA, 15 bp, Homo sapiens
ctgtacagaatccca

SEQ ID NO: 1023946 - DNA, 15 bp, Homo sapiens
tgtacagaatcccac

SEQ ID NO: 1023947 - DNA, 15 bp, Homo sapiens
gtacagaatcccacc

SEQ ID NO: 1023948 - DNA, 15 bp, Homo sapiens
tacagaatcccacct

SEQ ID NO: 1023949 - DNA, 15 bp, Homo sapiens
acagaatcccacctc

SEQ ID NO: 1023950 - DNA, 15 bp, Homo sapiens
cagaatcccacctcc

SEQ ID NO: 1023951 - DNA, 15 bp, Homo sapiens
agaatcccacctcca

SEQ ID NO: 1023952 - DNA, 15 bp, Homo sapiens
gaatcccacctccac

SEQ ID NO: 1023953 - DNA, 15 bp, Homo sapiens
aatcccacctccacc

SEQ ID NO: 1023954 - DNA, 15 bp, Homo sapiens
atcccacctccaccc

SEQ ID NO: 1023955 - DNA, 15 bp, Homo sapiens
tcccacctccacccc

SEQ ID NO: 1023956 - DNA, 15 bp, Homo sapiens
cccacctccaccccc

SEQ ID NO: 1023957 - DNA, 15 bp, Homo sapiens
ccacctccacccccc

SEQ ID NO: 1023958 - DNA, 15 bp, Homo sapiens
cacctccacccccca

SEQ ID NO: 1023959 - DNA, 15 bp, Homo sapiens
acctccaccccccaa

SEQ ID NO: 1023960 - DNA, 15 bp, Homo sapiens
cctccaccccccaac

SEQ ID NO: 1023961 - DNA, 15 bp, Homo sapiens
ctccaccccccaaca

SEQ ID NO: 1023962 - DNA, 15 bp, Homo sapiens
tccaccccccaacat

SEQ ID NO: 1023963 - DNA, 15 bp, Homo sapiens
ccaccccccaacata

SEQ ID NO: 1023964 - DNA, 15 bp, Homo sapiens
caccccccaacatac

SEQ ID NO: 1023965 - DNA, 15 bp, Homo sapiens
accccccaacataca

SEQ ID NO: 1023966 - DNA, 15 bp, Homo sapiens
ccccccaacatacac

SEQ ID NO: 1023967 - DNA, 15 bp, Homo sapiens
cccccaacatacaca

SEQ ID NO: 1023968 - DNA, 15 bp, Homo sapiens
ccccaacatacacac

SEQ ID NO: 1023969 - DNA, 15 bp, Homo sapiens
cccaacatacacaca

SEQ ID NO: 1023970 - DNA, 15 bp, Homo sapiens
ccaacatacacacac

SEQ ID NO: 1023971 - DNA, 15 bp, Homo sapiens
caacatacacacacc

SEQ ID NO: 1023972 - DNA, 15 bp, Homo sapiens
aacatacacacacct

SEQ ID NO: 1023973 - DNA, 15 bp, Homo sapiens
acatacacacacctt

SEQ ID NO: 1023974 - DNA, 15 bp, Homo sapiens
catacacacacctta

SEQ ID NO: 1023975 - DNA, 15 bp, Homo sapiens
atacacacaccttat

SEQ ID NO: 1023976 - DNA, 15 bp, Homo sapiens
tacacacaccttatt

SEQ ID NO: 1023977 - DNA, 15 bp, Homo sapiens
acacacaccttattt

SEQ ID NO: 1023978 - DNA, 15 bp, Homo sapiens
cacacaccttattta

SEQ ID NO: 1023979 - DNA, 15 bp, Homo sapiens
acacaccttatttat

SEQ ID NO: 1023980 - DNA, 15 bp, Homo sapiens
cacaccttatttatt

SEQ ID NO: 1023981 - DNA, 15 bp, Homo sapiens
acaccttatttattg

SEQ ID NO: 1023982 - DNA, 15 bp, Homo sapiens
caccttatttattgg

SEQ ID NO: 1023983 - DNA, 15 bp, Homo sapiens
accttatttattggt

SEQ ID NO: 1023984 - DNA, 15 bp, Homo sapiens
ccttatttattggtt

SEQ ID NO: 1023985 - DNA, 15 bp, Homo sapiens
cttatttattggttc

SEQ ID NO: 1023986 - DNA, 15 bp, Homo sapiens
ttatttattggttct

SEQ ID NO: 1023987 - DNA, 15 bp, Homo sapiens
tatttattggttctt

SEQ ID NO: 1023988 - DNA, 15 bp, Homo sapiens
atttattggttcttc

SEQ ID NO: 1023989 - DNA, 15 bp, Homo sapiens
tttattggttcttct

SEQ ID NO: 1023990 - DNA, 15 bp, Homo sapiens
ttattggttcttctg

SEQ ID NO: 1023991 - DNA, 15 bp, Homo sapiens
tattggttcttctga

SEQ ID NO: 1023992 - DNA, 15 bp, Homo sapiens
attggttcttctgag

SEQ ID NO: 1023993 - DNA, 15 bp, Homo sapiens
ttggttcttctgaga

SEQ ID NO: 1023994 - DNA, 15 bp, Homo sapiens
tggttcttctgagat

SEQ ID NO: 1023995 - DNA, 15 bp, Homo sapiens
ggttcttctgagatc

SEQ ID NO: 1023996 - DNA, 15 bp, Homo sapiens
gttcttctgagatct

SEQ ID NO: 1023997 - DNA, 15 bp, Homo sapiens
ttcttctgagatctt

SEQ ID NO: 1023998 - DNA, 15 bp, Homo sapiens
tcttctgagatcttc

SEQ ID NO: 1023999 - DNA, 15 bp, Homo sapiens
cttctgagatcttcc

SEQ ID NO: 1024000 - DNA, 15 bp, Homo sapiens
ttctgagatcttccc

SEQ ID NO: 1024001 - DNA, 15 bp, Homo sapiens
tctgagatcttccca

SEQ ID NO: 1024002 - DNA, 15 bp, Homo sapiens
ctgagatcttcccag

SEQ ID NO: 1024003 - DNA, 15 bp, Homo sapiens
tgagatcttcccaga

SEQ ID NO: 1024004 - DNA, 15 bp, Homo sapiens
gagatcttcccagac

SEQ ID NO: 1024005 - DNA, 15 bp, Homo sapiens
agatcttcccagacg

SEQ ID NO: 1024006 - DNA, 15 bp, Homo sapiens
gatcttcccagacgc

SEQ ID NO: 1024007 - DNA, 15 bp, Homo sapiens
atcttcccagacgca

SEQ ID NO: 1024008 - DNA, 15 bp, Homo sapiens
tcttcccagacgcaa

SEQ ID NO: 1024009 - DNA, 15 bp, Homo sapiens
cttcccagacgcaaa

SEQ ID NO: 1024010 - DNA, 15 bp, Homo sapiens
ttcccagacgcaaaa

SEQ ID NO: 1024011 - DNA, 15 bp, Homo sapiens
tcccagacgcaaaaa

SEQ ID NO: 1024012 - DNA, 15 bp, Homo sapiens
cccagacgcaaaaac

SEQ ID NO: 1024013 - DNA, 15 bp, Homo sapiens
ccagacgcaaaaact

SEQ ID NO: 1024014 - DNA, 15 bp, Homo sapiens
cagacgcaaaaactc

SEQ ID NO: 1024015 - DNA, 15 bp, Homo sapiens
agacgcaaaaactct

SEQ ID NO: 1024016 - DNA, 15 bp, Homo sapiens
gacgcaaaaactctt

SEQ ID NO: 1024017 - DNA, 15 bp, Homo sapiens
acgcaaaaactcttt

SEQ ID NO: 1024018 - DNA, 15 bp, Homo sapiens
cgcaaaaactcttta

SEQ ID NO: 1024019 - DNA, 15 bp, Homo sapiens
gcaaaaactctttac

SEQ ID NO: 1024020 - DNA, 15 bp, Homo sapiens
caaaaactctttaca

SEQ ID NO: 1024021 - DNA, 15 bp, Homo sapiens
aaaaactctttacaa

SEQ ID NO: 1024022 - DNA, 15 bp, Homo sapiens
aaaactctttacaag

SEQ ID NO: 1024023 - DNA, 15 bp, Homo sapiens
aaactctttacaagg

SEQ ID NO: 1024024 - DNA, 15 bp, Homo sapiens
aactctttacaagga

SEQ ID NO: 1024025 - DNA, 15 bp, Homo sapiens
actctttacaaggat

SEQ ID NO: 1024026 - DNA, 15 bp, Homo sapiens
ctctttacaaggata

SEQ ID NO: 1024027 - DNA, 15 bp, Homo sapiens
tctttacaaggatat

SEQ ID NO: 1024028 - DNA, 15 bp, Homo sapiens
ctttacaaggatatc

SEQ ID NO: 1024029 - DNA, 15 bp, Homo sapiens
tttacaaggatatca

SEQ ID NO: 1024030 - DNA, 15 bp, Homo sapiens
ttacaaggatatcaa

SEQ ID NO: 1024031 - DNA, 15 bp, Homo sapiens
tacaaggatatcaaa

SEQ ID NO: 1024032 - DNA, 15 bp, Homo sapiens
acaaggatatcaaaa

SEQ ID NO: 1024033 - DNA, 15 bp, Homo sapiens
caaggatatcaaaaa

SEQ ID NO: 1024034 - DNA, 15 bp, Homo sapiens
aaggatatcaaaaaa

SEQ ID NO: 1024035 - DNA, 15 bp, Homo sapiens
aggatatcaaaaaat

SEQ ID NO: 1024036 - DNA, 15 bp, Homo sapiens
ggatatcaaaaaata

SEQ ID NO: 1024037 - DNA, 15 bp, Homo sapiens
gatatcaaaaaatac

SEQ ID NO: 1024038 - DNA, 15 bp, Homo sapiens
atatcaaaaaataca

SEQ ID NO: 1024039 - DNA, 15 bp, Homo sapiens
tatcaaaaaatacaa

SEQ ID NO: 1024040 - DNA, 15 bp, Homo sapiens
atcaaaaaatacaac

SEQ ID NO: 1024041 - DNA, 15 bp, Homo sapiens
tcaaaaaatacaaca

SEQ ID NO: 1024042 - DNA, 15 bp, Homo sapiens
caaaaaatacaacac

SEQ ID NO: 1024043 - DNA, 15 bp, Homo sapiens
aaaaaatacaacacc

SEQ ID NO: 1024044 - DNA, 15 bp, Homo sapiens
aaaaatacaacacct

SEQ ID NO: 1024045 - DNA, 15 bp, Homo sapiens
aaaatacaacacctg

SEQ ID NO: 1024046 - DNA, 15 bp, Homo sapiens
aaatacaacacctgc

SEQ ID NO: 1024047 - DNA, 15 bp, Homo sapiens
aatacaacacctgcc

SEQ ID NO: 1024048 - DNA, 15 bp, Homo sapiens
atacaacacctgcct

SEQ ID NO: 1024049 - DNA, 15 bp, Homo sapiens
tacaacacctgccta

SEQ ID NO: 1024050 - DNA, 15 bp, Homo sapiens
acaacacctgcctac

SEQ ID NO: 1024051 - DNA, 15 bp, Homo sapiens
caacacctgcctacg

SEQ ID NO: 1024052 - DNA, 15 bp, Homo sapiens
aacacctgcctacga

SEQ ID NO: 1024053 - DNA, 15 bp, Homo sapiens
acacctgcctacgag

SEQ ID NO: 1024054 - DNA, 15 bp, Homo sapiens
cacctgcctacgagg

SEQ ID NO: 1024055 - DNA, 15 bp, Homo sapiens
acctgcctacgaggc

SEQ ID NO: 1024056 - DNA, 15 bp, Homo sapiens
cctgcctacgaggca

SEQ ID NO: 1024057 - DNA, 15 bp, Homo sapiens
ctgcctacgaggcac

SEQ ID NO: 1024058 - DNA, 15 bp, Homo sapiens
tgcctacgaggcacc

SEQ ID NO: 1024059 - DNA, 15 bp, Homo sapiens
gcctacgaggcacca

SEQ ID NO: 1024060 - DNA, 15 bp, Homo sapiens
cctacgaggcaccac

SEQ ID NO: 1024061 - DNA, 15 bp, Homo sapiens
ctacgaggcaccact

SEQ ID NO: 1024062 - DNA, 15 bp, Homo sapiens
tacgaggcaccactt

SEQ ID NO: 1024063 - DNA, 15 bp, Homo sapiens
acgaggcaccacttt

SEQ ID NO: 1024064 - DNA, 15 bp, Homo sapiens
cgaggcaccactttg

SEQ ID NO: 1024065 - DNA, 15 bp, Homo sapiens
gaggcaccactttga

SEQ ID NO: 1024066 - DNA, 15 bp, Homo sapiens
aggcaccactttgag

SEQ ID NO: 1024067 - DNA, 15 bp, Homo sapiens
ggcaccactttgagg

SEQ ID NO: 1024068 - DNA, 15 bp, Homo sapiens
gcaccactttgagga

SEQ ID NO: 1024069 - DNA, 15 bp, Homo sapiens
caccactttgaggaa

SEQ ID NO: 1024070 - DNA, 15 bp, Homo sapiens
accactttgaggaag

SEQ ID NO: 1024071 - DNA, 15 bp, Homo sapiens
ccactttgaggaagc

SEQ ID NO: 1024072 - DNA, 15 bp, Homo sapiens
cactttgaggaagct

SEQ ID NO: 1024073 - DNA, 15 bp, Homo sapiens
actttgaggaagcta

SEQ ID NO: 1024074 - DNA, 15 bp, Homo sapiens
ctttgaggaagctaa

SEQ ID NO: 1024075 - DNA, 15 bp, Homo sapiens
tttgaggaagctaat

SEQ ID NO: 1024076 - DNA, 15 bp, Homo sapiens
ttgaggaagctaata

SEQ ID NO: 1024077 - DNA, 15 bp, Homo sapiens
tgaggaagctaataa

SEQ ID NO: 1024078 - DNA, 15 bp, Homo sapiens
gaggaagctaataaa

SEQ ID NO: 1024079 - DNA, 15 bp, Homo sapiens
aggaagctaataaat

SEQ ID NO: 1024080 - DNA, 15 bp, Homo sapiens
ggaagctaataaatt

SEQ ID NO: 1024081 - DNA, 15 bp, Homo sapiens
gaagctaataaatta

SEQ ID NO: 1024082 - DNA, 15 bp, Homo sapiens
aagctaataaattac

SEQ ID NO: 1024083 - DNA, 15 bp, Homo sapiens
agctaataaattacc

SEQ ID NO: 1024084 - DNA, 15 bp, Homo sapiens
gctaataaattaccc

SEQ ID NO: 1024085 - DNA, 15 bp, Homo sapiens
ctaataaattacccc

SEQ ID NO: 1024086 - DNA, 15 bp, Homo sapiens
taataaattaccccc

SEQ ID NO: 1024087 - DNA, 15 bp, Homo sapiens
aataaattacccccc

SEQ ID NO: 1024088 - DNA, 15 bp, Homo sapiens
ataaattacccccct

SEQ ID NO: 1024089 - DNA, 15 bp, Homo sapiens
taaattacccccctt

SEQ ID NO: 1024090 - DNA, 15 bp, Homo sapiens
aaattaccccccttt

SEQ ID NO: 1024091 - DNA, 15 bp, Homo sapiens
aattacccccctttg

SEQ ID NO: 1024092 - DNA, 15 bp, Homo sapiens
attacccccctttga

SEQ ID NO: 1024093 - DNA, 15 bp, Homo sapiens
ttacccccctttgaa

SEQ ID NO: 1024094 - DNA, 15 bp, Homo sapiens
tacccccctttgaaa

SEQ ID NO: 1024095 - DNA, 15 bp, Homo sapiens
acccccctttgaaac

SEQ ID NO: 1024096 - DNA, 15 bp, Homo sapiens
cccccctttgaaaca

SEQ ID NO: 1024097 - DNA, 15 bp, Homo sapiens
ccccctttgaaacaa

SEQ ID NO: 1024098 - DNA, 15 bp, Homo sapiens
cccctttgaaacaaa

SEQ ID NO: 1024099 - DNA, 15 bp, Homo sapiens
ccctttgaaacaaaa

SEQ ID NO: 1024100 - DNA, 15 bp, Homo sapiens
cctttgaaacaaaaa

SEQ ID NO: 1024101 - DNA, 15 bp, Homo sapiens
ctttgaaacaaaaat

SEQ ID NO: 1024102 - DNA, 15 bp, Homo sapiens
tttgaaacaaaaatg

SEQ ID NO: 1024103 - DNA, 15 bp, Homo sapiens
ttgaaacaaaaatgg

SEQ ID NO: 1024104 - DNA, 15 bp, Homo sapiens
tgaaacaaaaatgga

SEQ ID NO: 1024105 - DNA, 15 bp, Homo sapiens
gaaacaaaaatggaa

SEQ ID NO: 1024106 - DNA, 15 bp, Homo sapiens
aaacaaaaatggaat

SEQ ID NO: 1024107 - DNA, 15 bp, Homo sapiens
aacaaaaatggaatc

SEQ ID NO: 1024108 - DNA, 15 bp, Homo sapiens
acaaaaatggaatca

SEQ ID NO: 1024109 - DNA, 15 bp, Homo sapiens
caaaaatggaatcag

SEQ ID NO: 1024110 - DNA, 15 bp, Homo sapiens
aaaaatggaatcagc

SEQ ID NO: 1024111 - DNA, 15 bp, Homo sapiens
aaaatggaatcagca

SEQ ID NO: 1024112 - DNA, 15 bp, Homo sapiens
aaatggaatcagcat

SEQ ID NO: 1024113 - DNA, 15 bp, Homo sapiens
aatggaatcagcatt

SEQ ID NO: 1024114 - DNA, 15 bp, Homo sapiens
atggaatcagcatta

SEQ ID NO: 1024115 - DNA, 15 bp, Homo sapiens
tggaatcagcattaa

SEQ ID NO: 1024116 - DNA, 15 bp, Homo sapiens
ggaatcagcattaag

SEQ ID NO: 1024117 - DNA, 15 bp, Homo sapiens
gaatcagcattaagc

SEQ ID NO: 1024118 - DNA, 15 bp, Homo sapiens
aatcagcattaagca

SEQ ID NO: 1024119 - DNA, 15 bp, Homo sapiens
atcagcattaagcac

SEQ ID NO: 1024120 - DNA, 15 bp, Homo sapiens
tcagcattaagcaca

SEQ ID NO: 1024121 - DNA, 15 bp, Homo sapiens
cagcattaagcacat

SEQ ID NO: 1024122 - DNA, 15 bp, Homo sapiens
agcattaagcacata

SEQ ID NO: 1024123 - DNA, 15 bp, Homo sapiens
gcattaagcacatac

SEQ ID NO: 1024124 - DNA, 15 bp, Homo sapiens
cattaagcacatact

SEQ ID NO: 1024125 - DNA, 15 bp, Homo sapiens
attaagcacatacta

SEQ ID NO: 1024126 - DNA, 15 bp, Homo sapiens
ttaagcacatactat

SEQ ID NO: 1024127 - DNA, 15 bp, Homo sapiens
taagcacatactatt

SEQ ID NO: 1024128 - DNA, 15 bp, Homo sapiens
aagcacatactatta

SEQ ID NO: 1024129 - DNA, 15 bp, Homo sapiens
agcacatactattat

SEQ ID NO: 1024130 - DNA, 15 bp, Homo sapiens
gcacatactattatt

SEQ ID NO: 1024131 - DNA, 15 bp, Homo sapiens
cacatactattatta

SEQ ID NO: 1024132 - DNA, 15 bp, Homo sapiens
acatactattattag

SEQ ID NO: 1024133 - DNA, 15 bp, Homo sapiens
catactattattagg

SEQ ID NO: 1024134 - DNA, 15 bp, Homo sapiens
atactattattaggt

SEQ ID NO: 1024135 - DNA, 15 bp, Homo sapiens
tactattattaggtt

SEQ ID NO: 1024136 - DNA, 15 bp, Homo sapiens
actattattaggttg

SEQ ID NO: 1024137 - DNA, 15 bp, Homo sapiens
ctattattaggttga

SEQ ID NO: 1024138 - DNA, 15 bp, Homo sapiens
tattattaggttgag

SEQ ID NO: 1024139 - DNA, 15 bp, Homo sapiens
attattaggttgagt

SEQ ID NO: 1024140 - DNA, 15 bp, Homo sapiens
ttattaggttgagtt

SEQ ID NO: 1024141 - DNA, 15 bp, Homo sapiens
tattaggttgagttt

SEQ ID NO: 1024142 - DNA, 15 bp, Homo sapiens
attaggttgagtttc

SEQ ID NO: 1024143 - DNA, 15 bp, Homo sapiens
ttaggttgagtttca

SEQ ID NO: 1024144 - DNA, 15 bp, Homo sapiens
taggttgagtttcag

SEQ ID NO: 1024145 - DNA, 15 bp, Homo sapiens
aggttgagtttcagt

SEQ ID NO: 1024146 - DNA, 15 bp, Homo sapiens
ggttgagtttcagtc

SEQ ID NO: 1024147 - DNA, 15 bp, Homo sapiens
gttgagtttcagtct

SEQ ID NO: 1024148 - DNA, 15 bp, Homo sapiens
ttgagtttcagtctc

SEQ ID NO: 1024149 - DNA, 15 bp, Homo sapiens
tgagtttcagtctcc

SEQ ID NO: 1024150 - DNA, 15 bp, Homo sapiens
gagtttcagtctcct

SEQ ID NO: 1024151 - DNA, 15 bp, Homo sapiens
agtttcagtctccta

SEQ ID NO: 1024152 - DNA, 15 bp, Homo sapiens
gtttcagtctcctag

SEQ ID NO: 1024153 - DNA, 15 bp, Homo sapiens
tttcagtctcctaga

SEQ ID NO: 1024154 - DNA, 15 bp, Homo sapiens
ttcagtctcctagaa

SEQ ID NO: 1024155 - DNA, 15 bp, Homo sapiens
tcagtctcctagaaa

SEQ ID NO: 1024156 - DNA, 15 bp, Homo sapiens
cagtctcctagaaaa

SEQ ID NO: 1024157 - DNA, 15 bp, Homo sapiens
agtctcctagaaaat

SEQ ID NO: 1024158 - DNA, 15 bp, Homo sapiens
gtctcctagaaaatt

SEQ ID NO: 1024159 - DNA, 15 bp, Homo sapiens
tctcctagaaaattc

SEQ ID NO: 1024160 - DNA, 15 bp, Homo sapiens
ctcctagaaaattcg

SEQ ID NO: 1024161 - DNA, 15 bp, Homo sapiens
tcctagaaaattcgt

SEQ ID NO: 1024162 - DNA, 15 bp, Homo sapiens
cctagaaaattcgtt

SEQ ID NO: 1024163 - DNA, 15 bp, Homo sapiens
ctagaaaattcgtta

SEQ ID NO: 1024164 - DNA, 15 bp, Homo sapiens
tagaaaattcgttag

SEQ ID NO: 1024165 - DNA, 15 bp, Homo sapiens
agaaaattcgttaga

SEQ ID NO: 1024166 - DNA, 15 bp, Homo sapiens
gaaaattcgttagat

SEQ ID NO: 1024167 - DNA, 15 bp, Homo sapiens
aaaattcgttagatg

SEQ ID NO: 1024168 - DNA, 15 bp, Homo sapiens
aaattcgttagatgt

SEQ ID NO: 1024169 - DNA, 15 bp, Homo sapiens
aattcgttagatgtt

SEQ ID NO: 1024170 - DNA, 15 bp, Homo sapiens
attcgttagatgttg

SEQ ID NO: 1024171 - DNA, 15 bp, Homo sapiens
ttcgttagatgttga

SEQ ID NO: 1024172 - DNA, 15 bp, Homo sapiens
tcgttagatgttgat

SEQ ID NO: 1024173 - DNA, 15 bp, Homo sapiens
cgttagatgttgata

SEQ ID NO: 1024174 - DNA, 15 bp, Homo sapiens
gttagatgttgatat

SEQ ID NO: 1024175 - DNA, 15 bp, Homo sapiens
ttagatgttgatatc

SEQ ID NO: 1024176 - DNA, 15 bp, Homo sapiens
tagatgttgatatct

SEQ ID NO: 1024177 - DNA, 15 bp, Homo sapiens
agatgttgatatctg

SEQ ID NO: 1024178 - DNA, 15 bp, Homo sapiens
gatgttgatatctgg

SEQ ID NO: 1024179 - DNA, 15 bp, Homo sapiens
atgttgatatctggg

SEQ ID NO: 1024180 - DNA, 15 bp, Homo sapiens
tgttgatatctgggg

SEQ ID NO: 1024181 - DNA, 15 bp, Homo sapiens
gttgatatctgggga

SEQ ID NO: 1024182 - DNA, 15 bp, Homo sapiens
ttgatatctggggag

SEQ ID NO: 1024183 - DNA, 15 bp, Homo sapiens
tgatatctggggaga

SEQ ID NO: 1024184 - DNA, 15 bp, Homo sapiens
gatatctggggagag

SEQ ID NO: 1024185 - DNA, 15 bp, Homo sapiens
atatctggggagaga

SEQ ID NO: 1024186 - DNA, 15 bp, Homo sapiens
tatctggggagagaa

SEQ ID NO: 1024187 - DNA, 15 bp, Homo sapiens
atctggggagagaag

SEQ ID NO: 1024188 - DNA, 15 bp, Homo sapiens
tctggggagagaagg

SEQ ID NO: 1024189 - DNA, 15 bp, Homo sapiens
ctggggagagaagga

SEQ ID NO: 1024190 - DNA, 15 bp, Homo sapiens
tggggagagaaggaa

SEQ ID NO: 1024191 - DNA, 15 bp, Homo sapiens
ggggagagaaggaat

SEQ ID NO: 1024192 - DNA, 15 bp, Homo sapiens
gggagagaaggaatc

SEQ ID NO: 1024193 - DNA, 15 bp, Homo sapiens
ggagagaaggaatct

SEQ ID NO: 1024194 - DNA, 15 bp, Homo sapiens
gagagaaggaatctc

SEQ ID NO: 1024195 - DNA, 15 bp, Homo sapiens
agagaaggaatctct

SEQ ID NO: 1024196 - DNA, 15 bp, Homo sapiens
gagaaggaatctctc

SEQ ID NO: 1024197 - DNA, 15 bp, Homo sapiens
agaaggaatctctct

SEQ ID NO: 1024198 - DNA, 15 bp, Homo sapiens
gaaggaatctctctt

SEQ ID NO: 1024199 - DNA, 15 bp, Homo sapiens
aaggaatctctcttt

SEQ ID NO: 1024200 - DNA, 15 bp, Homo sapiens
aggaatctctctttt

SEQ ID NO: 1024201 - DNA, 15 bp, Homo sapiens
ggaatctctcttttc

SEQ ID NO: 1024202 - DNA, 15 bp, Homo sapiens
gaatctctcttttcc

SEQ ID NO: 1024203 - DNA, 15 bp, Homo sapiens
aatctctcttttcct

SEQ ID NO: 1024204 - DNA, 15 bp, Homo sapiens
atctctcttttcctt

SEQ ID NO: 1024205 - DNA, 15 bp, Homo sapiens
tctctcttttcctta

SEQ ID NO: 1024206 - DNA, 15 bp, Homo sapiens
ctctcttttccttaa

SEQ ID NO: 1024207 - DNA, 15 bp, Homo sapiens
tctcttttccttaag

SEQ ID NO: 1024208 - DNA, 15 bp, Homo sapiens
ctcttttccttaaga

SEQ ID NO: 1024209 - DNA, 15 bp, Homo sapiens
tcttttccttaagaa

SEQ ID NO: 1024210 - DNA, 15 bp, Homo sapiens
cttttccttaagaaa

SEQ ID NO: 1024211 - DNA, 15 bp, Homo sapiens
ttttccttaagaaaa

SEQ ID NO: 1024212 - DNA, 15 bp, Homo sapiens
tttccttaagaaaat

SEQ ID NO: 1024213 - DNA, 15 bp, Homo sapiens
ttccttaagaaaatt

SEQ ID NO: 1024214 - DNA, 15 bp, Homo sapiens
tccttaagaaaattc

SEQ ID NO: 1024215 - DNA, 15 bp, Homo sapiens
ccttaagaaaattca

SEQ ID NO: 1024216 - DNA, 15 bp, Homo sapiens
cttaagaaaattcac

SEQ ID NO: 1024217 - DNA, 15 bp, Homo sapiens
ttaagaaaattcacg

SEQ ID NO: 1024218 - DNA, 15 bp, Homo sapiens
taagaaaattcacga

SEQ ID NO: 1024219 - DNA, 15 bp, Homo sapiens
aagaaaattcacgag

SEQ ID NO: 1024220 - DNA, 15 bp, Homo sapiens
agaaaattcacgagg

SEQ ID NO: 1024221 - DNA, 15 bp, Homo sapiens
gaaaattcacgaggg

SEQ ID NO: 1024222 - DNA, 15 bp, Homo sapiens
aaaattcacgaggga

SEQ ID NO: 1024223 - DNA, 15 bp, Homo sapiens
aaattcacgagggaa

SEQ ID NO: 1024224 - DNA, 15 bp, Homo sapiens
aattcacgagggaaa

SEQ ID NO: 1024225 - DNA, 15 bp, Homo sapiens
attcacgagggaaac

SEQ ID NO: 1024226 - DNA, 15 bp, Homo sapiens
ttcacgagggaaaca

SEQ ID NO: 1024227 - DNA, 15 bp, Homo sapiens
tcacgagggaaacag

SEQ ID NO: 1024228 - DNA, 15 bp, Homo sapiens
cacgagggaaacagc

SEQ ID NO: 1024229 - DNA, 15 bp, Homo sapiens
acgagggaaacagca

SEQ ID NO: 1024230 - DNA, 15 bp, Homo sapiens
cgagggaaacagcag

SEQ ID NO: 1024231 - DNA, 15 bp, Homo sapiens
gagggaaacagcagt

SEQ ID NO: 1024232 - DNA, 15 bp, Homo sapiens
agggaaacagcagta

SEQ ID NO: 1024233 - DNA, 15 bp, Homo sapiens
gggaaacagcagtag

SEQ ID NO: 1024234 - DNA, 15 bp, Homo sapiens
ggaaacagcagtagt

SEQ ID NO: 1024235 - DNA, 15 bp, Homo sapiens
gaaacagcagtagtt

SEQ ID NO: 1024236 - DNA, 15 bp, Homo sapiens
aaacagcagtagttc

SEQ ID NO: 1024237 - DNA, 15 bp, Homo sapiens
aacagcagtagttcg

SEQ ID NO: 1024238 - DNA, 15 bp, Homo sapiens
acagcagtagttcgc

SEQ ID NO: 1024239 - DNA, 15 bp, Homo sapiens
cagcagtagttcgct

SEQ ID NO: 1024240 - DNA, 15 bp, Homo sapiens
agcagtagttcgctg

SEQ ID NO: 1024241 - DNA, 15 bp, Homo sapiens
gcagtagttcgctgg

SEQ ID NO: 1024242 - DNA, 15 bp, Homo sapiens
cagtagttcgctggc

SEQ ID NO: 1024243 - DNA, 15 bp, Homo sapiens
agtagttcgctggct

SEQ ID NO: 1024244 - DNA, 15 bp, Homo sapiens
gtagttcgctggctt

SEQ ID NO: 1024245 - DNA, 15 bp, Homo sapiens
tagttcgctggcttt

SEQ ID NO: 1024246 - DNA, 15 bp, Homo sapiens
agttcgctggctttg

SEQ ID NO: 1024247 - DNA, 15 bp, Homo sapiens
gttcgctggctttgt

SEQ ID NO: 1024248 - DNA, 15 bp, Homo sapiens
ttcgctggctttgtt

SEQ ID NO: 1024249 - DNA, 15 bp, Homo sapiens
tcgctggctttgttt

SEQ ID NO: 1024250 - DNA, 15 bp, Homo sapiens
cgctggctttgtttg

SEQ ID NO: 1024251 - DNA, 15 bp, Homo sapiens
gctggctttgtttgg

SEQ ID NO: 1024252 - DNA, 15 bp, Homo sapiens
ctggctttgtttggt

SEQ ID NO: 1024253 - DNA, 15 bp, Homo sapiens
tggctttgtttggtt

SEQ ID NO: 1024254 - DNA, 15 bp, Homo sapiens
ggctttgtttggttt

SEQ ID NO: 1024255 - DNA, 15 bp, Homo sapiens
gctttgtttggtttc

SEQ ID NO: 1024256 - DNA, 15 bp, Homo sapiens
ctttgtttggtttcg

SEQ ID NO: 1024257 - DNA, 15 bp, Homo sapiens
tttgtttggtttcgt

SEQ ID NO: 1024258 - DNA, 15 bp, Homo sapiens
ttgtttggtttcgtt

SEQ ID NO: 1024259 - DNA, 15 bp, Homo sapiens
tgtttggtttcgttt

SEQ ID NO: 1024260 - DNA, 15 bp, Homo sapiens
gtttggtttcgttta

SEQ ID NO: 1024261 - DNA, 15 bp, Homo sapiens
tttggtttcgtttat

SEQ ID NO: 1024262 - DNA, 15 bp, Homo sapiens
ttggtttcgtttatt

SEQ ID NO: 1024263 - DNA, 15 bp, Homo sapiens
tggtttcgtttattt

SEQ ID NO: 1024264 - DNA, 15 bp, Homo sapiens
ggtttcgtttatttg

SEQ ID NO: 1024265 - DNA, 15 bp, Homo sapiens
gtttcgtttatttgt

SEQ ID NO: 1024266 - DNA, 15 bp, Homo sapiens
tttcgtttatttgta

SEQ ID NO: 1024267 - DNA, 15 bp, Homo sapiens
ttcgtttatttgtac

SEQ ID NO: 1024268 - DNA, 15 bp, Homo sapiens
tcgtttatttgtaca

SEQ ID NO: 1024269 - DNA, 15 bp, Homo sapiens
cgtttatttgtacaa

SEQ ID NO: 1024270 - DNA, 15 bp, Homo sapiens
gtttatttgtacaaa

SEQ ID NO: 1024271 - DNA, 15 bp, Homo sapiens
tttatttgtacaaag

SEQ ID NO: 1024272 - DNA, 15 bp, Homo sapiens
ttatttgtacaaaga

SEQ ID NO: 1024273 - DNA, 15 bp, Homo sapiens
tatttgtacaaagaa

SEQ ID NO: 1024274 - DNA, 15 bp, Homo sapiens
atttgtacaaagaaa

SEQ ID NO: 1024275 - DNA, 15 bp, Homo sapiens
tttgtacaaagaaag

SEQ ID NO: 1024276 - DNA, 15 bp, Homo sapiens
ttgtacaaagaaaga

SEQ ID NO: 1024277 - DNA, 15 bp, Homo sapiens
tgtacaaagaaagat

SEQ ID NO: 1024278 - DNA, 15 bp, Homo sapiens
gtacaaagaaagatt

SEQ ID NO: 1024279 - DNA, 15 bp, Homo sapiens
tacaaagaaagattg

SEQ ID NO: 1024280 - DNA, 15 bp, Homo sapiens
acaaagaaagattgt

SEQ ID NO: 1024281 - DNA, 15 bp, Homo sapiens
caaagaaagattgtg

SEQ ID NO: 1024282 - DNA, 15 bp, Homo sapiens
aaagaaagattgtgc

SEQ ID NO: 1024283 - DNA, 15 bp, Homo sapiens
aagaaagattgtgcg

SEQ ID NO: 1024284 - DNA, 15 bp, Homo sapiens
agaaagattgtgcgt

SEQ ID NO: 1024285 - DNA, 15 bp, Homo sapiens
gaaagattgtgcgtt

SEQ ID NO: 1024286 - DNA, 15 bp, Homo sapiens
aaagattgtgcgtta

SEQ ID NO: 1024287 - DNA, 15 bp, Homo sapiens
aagattgtgcgttaa

SEQ ID NO: 1024288 - DNA, 15 bp, Homo sapiens
agattgtgcgttaag

SEQ ID NO: 1024289 - DNA, 15 bp, Homo sapiens
gattgtgcgttaaga

SEQ ID NO: 1024290 - DNA, 15 bp, Homo sapiens
attgtgcgttaagat

SEQ ID NO: 1024291 - DNA, 15 bp, Homo sapiens
ttgtgcgttaagatc

SEQ ID NO: 1024292 - DNA, 15 bp, Homo sapiens
tgtgcgttaagatct

SEQ ID NO: 1024293 - DNA, 15 bp, Homo sapiens
gtgcgttaagatctt

SEQ ID NO: 1024294 - DNA, 15 bp, Homo sapiens
tgcgttaagatcttt

SEQ ID NO: 1024295 - DNA, 15 bp, Homo sapiens
gcgttaagatctttt

SEQ ID NO: 1024296 - DNA, 15 bp, Homo sapiens
cgttaagatcttttt

SEQ ID NO: 1024297 - DNA, 15 bp, Homo sapiens
gttaagatctttttt

SEQ ID NO: 1024298 - DNA, 15 bp, Homo sapiens
ttaagatctttttta

SEQ ID NO: 1024299 - DNA, 15 bp, Homo sapiens
taagatcttttttaa

SEQ ID NO: 1024300 - DNA, 15 bp, Homo sapiens
aagatcttttttaaa

SEQ ID NO: 1024301 - DNA, 15 bp, Homo sapiens
agatcttttttaaaa

SEQ ID NO: 1024302 - DNA, 15 bp, Homo sapiens
gatcttttttaaaaa

SEQ ID NO: 1024303 - DNA, 15 bp, Homo sapiens
atcttttttaaaaat

SEQ ID NO: 1024304 - DNA, 15 bp, Homo sapiens
tcttttttaaaaatc

SEQ ID NO: 1024305 - DNA, 15 bp, Homo sapiens
cttttttaaaaatcc

SEQ ID NO: 1024306 - DNA, 15 bp, Homo sapiens
ttttttaaaaatccc

SEQ ID NO: 1024307 - DNA, 15 bp, Homo sapiens
tttttaaaaatccct

SEQ ID NO: 1024308 - DNA, 15 bp, Homo sapiens
ttttaaaaatccctg

SEQ ID NO: 1024309 - DNA, 15 bp, Homo sapiens
tttaaaaatccctgc

SEQ ID NO: 1024310 - DNA, 15 bp, Homo sapiens
ttaaaaatccctgca

SEQ ID NO: 1024311 - DNA, 15 bp, Homo sapiens
taaaaatccctgcaa

SEQ ID NO: 1024312 - DNA, 15 bp, Homo sapiens
aaaaatccctgcaag

SEQ ID NO: 1024313 - DNA, 15 bp, Homo sapiens
aaaatccctgcaagt

SEQ ID NO: 1024314 - DNA, 15 bp, Homo sapiens
aaatccctgcaagtt

SEQ ID NO: 1024315 - DNA, 15 bp, Homo sapiens
aatccctgcaagtta

SEQ ID NO: 1024316 - DNA, 15 bp, Homo sapiens
atccctgcaagttag

SEQ ID NO: 1024317 - DNA, 15 bp, Homo sapiens
tccctgcaagttaga

SEQ ID NO: 1024318 - DNA, 15 bp, Homo sapiens
ccctgcaagttagag

SEQ ID NO: 1024319 - DNA, 15 bp, Homo sapiens
cctgcaagttagagt

SEQ ID NO: 1024320 - DNA, 15 bp, Homo sapiens
ctgcaagttagagtt

SEQ ID NO: 1024321 - DNA, 15 bp, Homo sapiens
tgcaagttagagttt

SEQ ID NO: 1024322 - DNA, 15 bp, Homo sapiens
gcaagttagagtttg

SEQ ID NO: 1024323 - DNA, 15 bp, Homo sapiens
caagttagagtttgc

SEQ ID NO: 1024324 - DNA, 15 bp, Homo sapiens
aagttagagtttgca

SEQ ID NO: 1024325 - DNA, 15 bp, Homo sapiens
agttagagtttgcat

SEQ ID NO: 1024326 - DNA, 15 bp, Homo sapiens
gttagagtttgcatc

SEQ ID NO: 1024327 - DNA, 15 bp, Homo sapiens
ttagagtttgcatca

SEQ ID NO: 1024328 - DNA, 15 bp, Homo sapiens
tagagtttgcatcat

SEQ ID NO: 1024329 - DNA, 15 bp, Homo sapiens
agagtttgcatcatc

SEQ ID NO: 1024330 - DNA, 15 bp, Homo sapiens
gagtttgcatcatcg

SEQ ID NO: 1024331 - DNA, 15 bp, Homo sapiens
agtttgcatcatcgt

SEQ ID NO: 1024332 - DNA, 15 bp, Homo sapiens
gtttgcatcatcgtc

SEQ ID NO: 1024333 - DNA, 15 bp, Homo sapiens
tttgcatcatcgtcg

SEQ ID NO: 1024334 - DNA, 15 bp, Homo sapiens
ttgcatcatcgtcgt

SEQ ID NO: 1024335 - DNA, 15 bp, Homo sapiens
tgcatcatcgtcgtg

SEQ ID NO: 1024336 - DNA, 15 bp, Homo sapiens
gcatcatcgtcgtga

SEQ ID NO: 1024337 - DNA, 15 bp, Homo sapiens
catcatcgtcgtgac

SEQ ID NO: 1024338 - DNA, 15 bp, Homo sapiens
atcatcgtcgtgacc

SEQ ID NO: 1024339 - DNA, 15 bp, Homo sapiens
tcatcgtcgtgacct

SEQ ID NO: 1024340 - DNA, 15 bp, Homo sapiens
catcgtcgtgaccta

SEQ ID NO: 1024341 - DNA, 15 bp, Homo sapiens
atcgtcgtgacctag

SEQ ID NO: 1024342 - DNA, 15 bp, Homo sapiens
tcgtcgtgacctagt

SEQ ID NO: 1024343 - DNA, 15 bp, Homo sapiens
cgtcgtgacctagtg

SEQ ID NO: 1024344 - DNA, 15 bp, Homo sapiens
gtcgtgacctagtga

SEQ ID NO: 1024345 - DNA, 15 bp, Homo sapiens
tcgtgacctagtgaa

SEQ ID NO: 1024346 - DNA, 15 bp, Homo sapiens
cgtgacctagtgaac

SEQ ID NO: 1024347 - DNA, 15 bp, Homo sapiens
gtgacctagtgaact

SEQ ID NO: 1024348 - DNA, 15 bp, Homo sapiens
tgacctagtgaacta

SEQ ID NO: 1024349 - DNA, 15 bp, Homo sapiens
gacctagtgaactaa

SEQ ID NO: 1024350 - DNA, 15 bp, Homo sapiens
acctagtgaactaat

SEQ ID NO: 1024351 - DNA, 15 bp, Homo sapiens
cctagtgaactaata

SEQ ID NO: 1024352 - DNA, 15 bp, Homo sapiens
atttaggatcccaga

SEQ ID NO: 1024353 - DNA, 15 bp, Homo sapiens
tttaggatcccagag

SEQ ID NO: 1024354 - DNA, 15 bp, Homo sapiens
ttaggatcccagaga

SEQ ID NO: 1024355 - DNA, 15 bp, Homo sapiens
taggatcccagagat

SEQ ID NO: 1024356 - DNA, 15 bp, Homo sapiens
aggatcccagagata

SEQ ID NO: 1024357 - DNA, 15 bp, Homo sapiens
ggatcccagagataa

SEQ ID NO: 1024358 - DNA, 15 bp, Homo sapiens
gatcccagagataaa

SEQ ID NO: 1024359 - DNA, 15 bp, Homo sapiens
atcccagagataaaa

SEQ ID NO: 1024360 - DNA, 15 bp, Homo sapiens
tcccagagataaaac

SEQ ID NO: 1024361 - DNA, 15 bp, Homo sapiens
cccagagataaaacc

SEQ ID NO: 1024362 - DNA, 15 bp, Homo sapiens
ccagagataaaaccc

SEQ ID NO: 1024363 - DNA, 15 bp, Homo sapiens
cagagataaaaccca

SEQ ID NO: 1024364 - DNA, 15 bp, Homo sapiens
agagataaaacccag

SEQ ID NO: 1024365 - DNA, 15 bp, Homo sapiens
gagataaaacccagt

SEQ ID NO: 1024366 - DNA, 15 bp, Homo sapiens
agataaaacccagta

SEQ ID NO: 1024367 - DNA, 15 bp, Homo sapiens
gataaaacccagtac

SEQ ID NO: 1024368 - DNA, 15 bp, Homo sapiens
ataaaacccagtaca

SEQ ID NO: 1024369 - DNA, 15 bp, Homo sapiens
taaaacccagtacaa

SEQ ID NO: 1024370 - DNA, 15 bp, Homo sapiens
aaaacccagtacaac

SEQ ID NO: 1024371 - DNA, 15 bp, Homo sapiens
aaacccagtacaaca

SEQ ID NO: 1024372 - DNA, 15 bp, Homo sapiens
aacccagtacaacaa

SEQ ID NO: 1024373 - DNA, 15 bp, Homo sapiens
acccagtacaacaaa

SEQ ID NO: 1024374 - DNA, 15 bp, Homo sapiens
cccagtacaacaaag

SEQ ID NO: 1024375 - DNA, 15 bp, Homo sapiens
ccagtacaacaaaga

SEQ ID NO: 1024376 - DNA, 15 bp, Homo sapiens
cagtacaacaaagag

SEQ ID NO: 1024377 - DNA, 15 bp, Homo sapiens
agtacaacaaagagt

SEQ ID NO: 1024378 - DNA, 15 bp, Homo sapiens
gtacaacaaagagtg

SEQ ID NO: 1024379 - DNA, 15 bp, Homo sapiens
tacaacaaagagtga

SEQ ID NO: 1024380 - DNA, 15 bp, Homo sapiens
acaacaaagagtgaa

SEQ ID NO: 1024381 - DNA, 15 bp, Homo sapiens
caacaaagagtgaaa

SEQ ID NO: 1024382 - DNA, 15 bp, Homo sapiens
aacaaagagtgaaat

SEQ ID NO: 1024383 - DNA, 15 bp, Homo sapiens
acaaagagtgaaatc

SEQ ID NO: 1024384 - DNA, 15 bp, Homo sapiens
caaagagtgaaatct

SEQ ID NO: 1024385 - DNA, 15 bp, Homo sapiens
aaagagtgaaatctc

SEQ ID NO: 1024386 - DNA, 15 bp, Homo sapiens
aagagtgaaatctca

SEQ ID NO: 1024387 - DNA, 15 bp, Homo sapiens
agagtgaaatctcag

SEQ ID NO: 1024388 - DNA, 15 bp, Homo sapiens
gagtgaaatctcagc

SEQ ID NO: 1024389 - DNA, 15 bp, Homo sapiens
agtgaaatctcagct

SEQ ID NO: 1024390 - DNA, 15 bp, Homo sapiens
gtgaaatctcagctc

SEQ ID NO: 1024391 - DNA, 15 bp, Homo sapiens
tgaaatctcagctcc

SEQ ID NO: 1024392 - DNA, 15 bp, Homo sapiens
gaaatctcagctccc

SEQ ID NO: 1024393 - DNA, 15 bp, Homo sapiens
aaatctcagctccca

SEQ ID NO: 1024394 - DNA, 15 bp, Homo sapiens
aatctcagctcccaa

SEQ ID NO: 1024395 - DNA, 15 bp, Homo sapiens
atctcagctcccaaa

SEQ ID NO: 1024396 - DNA, 15 bp, Homo sapiens
tctcagctcccaaag

SEQ ID NO: 1024397 - DNA, 15 bp, Homo sapiens
ctcagctcccaaagt

SEQ ID NO: 1024398 - DNA, 15 bp, Homo sapiens
tcagctcccaaagtc

SEQ ID NO: 1024399 - DNA, 15 bp, Homo sapiens
cagctcccaaagtcc

SEQ ID NO: 1024400 - DNA, 15 bp, Homo sapiens
agctcccaaagtcct

SEQ ID NO: 1024401 - DNA, 15 bp, Homo sapiens
gctcccaaagtcctt

SEQ ID NO: 1024402 - DNA, 15 bp, Homo sapiens
ctcccaaagtccttc

SEQ ID NO: 1024403 - DNA, 15 bp, Homo sapiens
tcccaaagtccttcc

SEQ ID NO: 1024404 - DNA, 15 bp, Homo sapiens
cccaaagtccttcct

SEQ ID NO: 1024405 - DNA, 15 bp, Homo sapiens
ccaaagtccttcctg

SEQ ID NO: 1024406 - DNA, 15 bp, Homo sapiens
caaagtccttcctgg

SEQ ID NO: 1024407 - DNA, 15 bp, Homo sapiens
aaagtccttcctggg

SEQ ID NO: 1024408 - DNA, 15 bp, Homo sapiens
aagtccttcctggga

SEQ ID NO: 1024409 - DNA, 15 bp, Homo sapiens
agtccttcctgggat

SEQ ID NO: 1024410 - DNA, 15 bp, Homo sapiens
gtccttcctgggatg

SEQ ID NO: 1024411 - DNA, 15 bp, Homo sapiens
tccttcctgggatgt

SEQ ID NO: 1024412 - DNA, 15 bp, Homo sapiens
ccttcctgggatgtc

SEQ ID NO: 1024413 - DNA, 15 bp, Homo sapiens
cttcctgggatgtcc

SEQ ID NO: 1024414 - DNA, 15 bp, Homo sapiens
ttcctgggatgtcct

SEQ ID NO: 1024415 - DNA, 15 bp, Homo sapiens
tcctgggatgtcctc

SEQ ID NO: 1024416 - DNA, 15 bp, Homo sapiens
cctgggatgtcctca

SEQ ID NO: 1024417 - DNA, 15 bp, Homo sapiens
ctgggatgtcctcag

SEQ ID NO: 1024418 - DNA, 15 bp, Homo sapiens
tgggatgtcctcagg

SEQ ID NO: 1024419 - DNA, 15 bp, Homo sapiens
gggatgtcctcaggc

SEQ ID NO: 1024420 - DNA, 15 bp, Homo sapiens
ggatgtcctcaggcc

SEQ ID NO: 1024421 - DNA, 15 bp, Homo sapiens
gatgtcctcaggcct

SEQ ID NO: 1024422 - DNA, 15 bp, Homo sapiens
atgtcctcaggcctg

SEQ ID NO: 1024423 - DNA, 15 bp, Homo sapiens
tgtcctcaggcctgt

SEQ ID NO: 1024424 - DNA, 15 bp, Homo sapiens
gtcctcaggcctgtc

SEQ ID NO: 1024425 - DNA, 15 bp, Homo sapiens
tcctcaggcctgtca

SEQ ID NO: 1024426 - DNA, 15 bp, Homo sapiens
cctcaggcctgtcac

SEQ ID NO: 1024427 - DNA, 15 bp, Homo sapiens
ctcaggcctgtcacc

SEQ ID NO: 1024428 - DNA, 15 bp, Homo sapiens
tcaggcctgtcaccc

SEQ ID NO: 1024429 - DNA, 15 bp, Homo sapiens
caggcctgtcaccca

SEQ ID NO: 1024430 - DNA, 15 bp, Homo sapiens
aggcctgtcacccag

SEQ ID NO: 1024431 - DNA, 15 bp, Homo sapiens
ggcctgtcacccagt

SEQ ID NO: 1024432 - DNA, 15 bp, Homo sapiens
gcctgtcacccagtg

SEQ ID NO: 1024433 - DNA, 15 bp, Homo sapiens
cctgtcacccagtgt

SEQ ID NO: 1024434 - DNA, 15 bp, Homo sapiens
ctgtcacccagtgtt

SEQ ID NO: 1024435 - DNA, 15 bp, Homo sapiens
tgtcacccagtgtta

SEQ ID NO: 1024436 - DNA, 15 bp, Homo sapiens
gtcacccagtgttac

SEQ ID NO: 1024437 - DNA, 15 bp, Homo sapiens
tcacccagtgttacc

SEQ ID NO: 1024438 - DNA, 15 bp, Homo sapiens
cacccagtgttaccc

SEQ ID NO: 1024439 - DNA, 15 bp, Homo sapiens
acccagtgttacccc

SEQ ID NO: 1024440 - DNA, 15 bp, Homo sapiens
cccagtgttaccccg

SEQ ID NO: 1024441 - DNA, 15 bp, Homo sapiens
ccagtgttaccccgt

SEQ ID NO: 1024442 - DNA, 15 bp, Homo sapiens
cagtgttaccccgtt

SEQ ID NO: 1024443 - DNA, 15 bp, Homo sapiens
agtgttaccccgttg

SEQ ID NO: 1024444 - DNA, 15 bp, Homo sapiens
gtgttaccccgttgg

SEQ ID NO: 1024445 - DNA, 15 bp, Homo sapiens
tgttaccccgttgga

SEQ ID NO: 1024446 - DNA, 15 bp, Homo sapiens
gttaccccgttggag

SEQ ID NO: 1024447 - DNA, 15 bp, Homo sapiens
ttaccccgttggagg

SEQ ID NO: 1024448 - DNA, 15 bp, Homo sapiens
taccccgttggaggc

SEQ ID NO: 1024449 - DNA, 15 bp, Homo sapiens
accccgttggaggcc

SEQ ID NO: 1024450 - DNA, 15 bp, Homo sapiens
ccccgttggaggcca

SEQ ID NO: 1024451 - DNA, 15 bp, Homo sapiens
cccgttggaggccaa

SEQ ID NO: 1024452 - DNA, 15 bp, Homo sapiens
ccgttggaggccaaa

SEQ ID NO: 1024453 - DNA, 15 bp, Homo sapiens
cgttggaggccaaag

SEQ ID NO: 1024454 - DNA, 15 bp, Homo sapiens
gttggaggccaaagg

SEQ ID NO: 1024455 - DNA, 15 bp, Homo sapiens
ttggaggccaaagga

SEQ ID NO: 1024456 - DNA, 15 bp, Homo sapiens
tggaggccaaaggag

SEQ ID NO: 1024457 - DNA, 15 bp, Homo sapiens
ggaggccaaaggagc

SEQ ID NO: 1024458 - DNA, 15 bp, Homo sapiens
gaggccaaaggagcc

SEQ ID NO: 1024459 - DNA, 15 bp, Homo sapiens
aggccaaaggagcca

SEQ ID NO: 1024460 - DNA, 15 bp, Homo sapiens
ggccaaaggagccaa

SEQ ID NO: 1024461 - DNA, 15 bp, Homo sapiens
gccaaaggagccaaa

SEQ ID NO: 1024462 - DNA, 15 bp, Homo sapiens
ccaaaggagccaaaa

SEQ ID NO: 1024463 - DNA, 15 bp, Homo sapiens
caaaggagccaaaag

SEQ ID NO: 1024464 - DNA, 15 bp, Homo sapiens
aaaggagccaaaagc

SEQ ID NO: 1024465 - DNA, 15 bp, Homo sapiens
aaggagccaaaagca

SEQ ID NO: 1024466 - DNA, 15 bp, Homo sapiens
aggagccaaaagcag

SEQ ID NO: 1024467 - DNA, 15 bp, Homo sapiens
ggagccaaaagcagc

SEQ ID NO: 1024468 - DNA, 15 bp, Homo sapiens
gagccaaaagcagca

SEQ ID NO: 1024469 - DNA, 15 bp, Homo sapiens
agccaaaagcagcag

SEQ ID NO: 1024470 - DNA, 15 bp, Homo sapiens
gccaaaagcagcagg

SEQ ID NO: 1024471 - DNA, 15 bp, Homo sapiens
ccaaaagcagcaggg

SEQ ID NO: 1024472 - DNA, 15 bp, Homo sapiens
caaaagcagcagggg

SEQ ID NO: 1024473 - DNA, 15 bp, Homo sapiens
aaaagcagcaggggc

SEQ ID NO: 1024474 - DNA, 15 bp, Homo sapiens
aaagcagcaggggct

SEQ ID NO: 1024475 - DNA, 15 bp, Homo sapiens
aagcagcaggggctg

SEQ ID NO: 1024476 - DNA, 15 bp, Homo sapiens
agcagcaggggctga

SEQ ID NO: 1024477 - DNA, 15 bp, Homo sapiens
gcagcaggggctgaa

SEQ ID NO: 1024478 - DNA, 15 bp, Homo sapiens
cagcaggggctgaag

SEQ ID NO: 1024479 - DNA, 15 bp, Homo sapiens
agcaggggctgaagg

SEQ ID NO: 1024480 - DNA, 15 bp, Homo sapiens
gcaggggctgaaggc

SEQ ID NO: 1024481 - DNA, 15 bp, Homo sapiens
caggggctgaaggcg

SEQ ID NO: 1024482 - DNA, 15 bp, Homo sapiens
aggggctgaaggcgt

SEQ ID NO: 1024483 - DNA, 15 bp, Homo sapiens
ggggctgaaggcgtc

SEQ ID NO: 1024484 - DNA, 15 bp, Homo sapiens
gggctgaaggcgtct

SEQ ID NO: 1024485 - DNA, 15 bp, Homo sapiens
ggctgaaggcgtctg

SEQ ID NO: 1024486 - DNA, 15 bp, Homo sapiens
gctgaaggcgtctgc

SEQ ID NO: 1024487 - DNA, 15 bp, Homo sapiens
ctgaaggcgtctgct

SEQ ID NO: 1024488 - DNA, 15 bp, Homo sapiens
tgaaggcgtctgctg

SEQ ID NO: 1024489 - DNA, 15 bp, Homo sapiens
gaaggcgtctgctgc

SEQ ID NO: 1024490 - DNA, 15 bp, Homo sapiens
aaggcgtctgctgct

SEQ ID NO: 1024491 - DNA, 15 bp, Homo sapiens
aggcgtctgctgctg

SEQ ID NO: 1024492 - DNA, 15 bp, Homo sapiens
ggcgtctgctgctgg

SEQ ID NO: 1024493 - DNA, 15 bp, Homo sapiens
gcgtctgctgctggt

SEQ ID NO: 1024494 - DNA, 15 bp, Homo sapiens
cgtctgctgctggtc

SEQ ID NO: 1024495 - DNA, 15 bp, Homo sapiens
gtctgctgctggtcc

SEQ ID NO: 1024496 - DNA, 15 bp, Homo sapiens
tctgctgctggtccc

SEQ ID NO: 1024497 - DNA, 15 bp, Homo sapiens
ctgctgctggtcccc

SEQ ID NO: 1024498 - DNA, 15 bp, Homo sapiens
tgctgctggtcccct

SEQ ID NO: 1024499 - DNA, 15 bp, Homo sapiens
gctgctggtccccta

SEQ ID NO: 1024500 - DNA, 15 bp, Homo sapiens
ctgctggtcccctag

SEQ ID NO: 1024501 - DNA, 15 bp, Homo sapiens
tgctggtcccctaga

SEQ ID NO: 1024502 - DNA, 15 bp, Homo sapiens
gctggtcccctagag

SEQ ID NO: 1024503 - DNA, 15 bp, Homo sapiens
ctggtcccctagagg

SEQ ID NO: 1024504 - DNA, 15 bp, Homo sapiens
tggtcccctagaggg

SEQ ID NO: 1024505 - DNA, 15 bp, Homo sapiens
ggtcccctagagggg

SEQ ID NO: 1024506 - DNA, 15 bp, Homo sapiens
gtcccctagaggggt

SEQ ID NO: 1024507 - DNA, 15 bp, Homo sapiens
tcccctagaggggtc

SEQ ID NO: 1024508 - DNA, 15 bp, Homo sapiens
cccctagaggggtcc

SEQ ID NO: 1024509 - DNA, 15 bp, Homo sapiens
ccctagaggggtccc

SEQ ID NO: 1024510 - DNA, 15 bp, Homo sapiens
cctagaggggtccct

SEQ ID NO: 1024511 - DNA, 15 bp, Homo sapiens
ctagaggggtccctg

SEQ ID NO: 1024512 - DNA, 15 bp, Homo sapiens
tagaggggtccctgt

SEQ ID NO: 1024513 - DNA, 15 bp, Homo sapiens
agaggggtccctgtt

SEQ ID NO: 1024514 - DNA, 15 bp, Homo sapiens
gaggggtccctgttt

SEQ ID NO: 1024515 - DNA, 15 bp, Homo sapiens
aggggtccctgtttt

SEQ ID NO: 1024516 - DNA, 15 bp, Homo sapiens
ggggtccctgtttta

SEQ ID NO: 1024517 - DNA, 15 bp, Homo sapiens
gggtccctgttttag

SEQ ID NO: 1024518 - DNA, 15 bp, Homo sapiens
ggtccctgttttagg

SEQ ID NO: 1024519 - DNA, 15 bp, Homo sapiens
gtccctgttttagga

SEQ ID NO: 1024520 - DNA, 15 bp, Homo sapiens
tccctgttttaggac

SEQ ID NO: 1024521 - DNA, 15 bp, Homo sapiens
ccctgttttaggaca

SEQ ID NO: 1024522 - DNA, 15 bp, Homo sapiens
cctgttttaggacag

SEQ ID NO: 1024523 - DNA, 15 bp, Homo sapiens
ctgttttaggacaga

SEQ ID NO: 1024524 - DNA, 15 bp, Homo sapiens
tgttttaggacagaa

SEQ ID NO: 1024525 - DNA, 15 bp, Homo sapiens
gttttaggacagaaa

SEQ ID NO: 1024526 - DNA, 15 bp, Homo sapiens
ttttaggacagaaac

SEQ ID NO: 1024527 - DNA, 15 bp, Homo sapiens
tttaggacagaaaca

SEQ ID NO: 1024528 - DNA, 15 bp, Homo sapiens
ttaggacagaaacaa

SEQ ID NO: 1024529 - DNA, 15 bp, Homo sapiens
taggacagaaacaaa

SEQ ID NO: 1024530 - DNA, 15 bp, Homo sapiens
aggacagaaacaaaa

SEQ ID NO: 1024531 - DNA, 15 bp, Homo sapiens
ggacagaaacaaaac

SEQ ID NO: 1024532 - DNA, 15 bp, Homo sapiens
gacagaaacaaaacc

SEQ ID NO: 1024533 - DNA, 15 bp, Homo sapiens
acagaaacaaaaccc

SEQ ID NO: 1024534 - DNA, 15 bp, Homo sapiens
cagaaacaaaacccc

SEQ ID NO: 1024535 - DNA, 15 bp, Homo sapiens
agaaacaaaacccct

SEQ ID NO: 1024536 - DNA, 15 bp, Homo sapiens
gaaacaaaacccctg

SEQ ID NO: 1024537 - DNA, 15 bp, Homo sapiens
aaacaaaacccctga

SEQ ID NO: 1024538 - DNA, 15 bp, Homo sapiens
aacaaaacccctgaa

SEQ ID NO: 1024539 - DNA, 15 bp, Homo sapiens
acaaaacccctgaat

SEQ ID NO: 1024540 - DNA, 15 bp, Homo sapiens
caaaacccctgaatg

SEQ ID NO: 1024541 - DNA, 15 bp, Homo sapiens
aaaacccctgaatga

SEQ ID NO: 1024542 - DNA, 15 bp, Homo sapiens
aaacccctgaatgac

SEQ ID NO: 1024543 - DNA, 15 bp, Homo sapiens
aacccctgaatgact

SEQ ID NO: 1024544 - DNA, 15 bp, Homo sapiens
acccctgaatgactt

SEQ ID NO: 1024545 - DNA, 15 bp, Homo sapiens
cccctgaatgacttc

SEQ ID NO: 1024546 - DNA, 15 bp, Homo sapiens
ccctgaatgacttcc

SEQ ID NO: 1024547 - DNA, 15 bp, Homo sapiens
cctgaatgacttcct

SEQ ID NO: 1024548 - DNA, 15 bp, Homo sapiens
ctgaatgacttcctt

SEQ ID NO: 1024549 - DNA, 15 bp, Homo sapiens
tgaatgacttcctta

SEQ ID NO: 1024550 - DNA, 15 bp, Homo sapiens
gaatgacttccttac

SEQ ID NO: 1024551 - DNA, 15 bp, Homo sapiens
aatgacttccttact

SEQ ID NO: 1024552 - DNA, 15 bp, Homo sapiens
atgacttccttactt

SEQ ID NO: 1024553 - DNA, 15 bp, Homo sapiens
tgacttccttacttt

SEQ ID NO: 1024554 - DNA, 15 bp, Homo sapiens
gacttccttactttc

SEQ ID NO: 1024555 - DNA, 15 bp, Homo sapiens
acttccttactttcg

SEQ ID NO: 1024556 - DNA, 15 bp, Homo sapiens
cttccttactttcga

SEQ ID NO: 1024557 - DNA, 15 bp, Homo sapiens
ttccttactttcgaa

SEQ ID NO: 1024558 - DNA, 15 bp, Homo sapiens
tccttactttcgaaa

SEQ ID NO: 1024559 - DNA, 15 bp, Homo sapiens
ccttactttcgaaaa

SEQ ID NO: 1024560 - DNA, 15 bp, Homo sapiens
cttactttcgaaaac

SEQ ID NO: 1024561 - DNA, 15 bp, Homo sapiens
ttactttcgaaaaca

SEQ ID NO: 1024562 - DNA, 15 bp, Homo sapiens
tactttcgaaaacag

SEQ ID NO: 1024563 - DNA, 15 bp, Homo sapiens
actttcgaaaacagc

SEQ ID NO: 1024564 - DNA, 15 bp, Homo sapiens
ctttcgaaaacagcc

SEQ ID NO: 1024565 - DNA, 15 bp, Homo sapiens
tttcgaaaacagcct

SEQ ID NO: 1024566 - DNA, 15 bp, Homo sapiens
ttcgaaaacagcctc

SEQ ID NO: 1024567 - DNA, 15 bp, Homo sapiens
tcgaaaacagcctcc

SEQ ID NO: 1024568 - DNA, 15 bp, Homo sapiens
cgaaaacagcctccc

SEQ ID NO: 1024569 - DNA, 15 bp, Homo sapiens
gaaaacagcctccca

SEQ ID NO: 1024570 - DNA, 15 bp, Homo sapiens
aaaacagcctcccat

SEQ ID NO: 1024571 - DNA, 15 bp, Homo sapiens
aaacagcctcccatc

SEQ ID NO: 1024572 - DNA, 15 bp, Homo sapiens
aacagcctcccatcg

SEQ ID NO: 1024573 - DNA, 15 bp, Homo sapiens
acagcctcccatcga

SEQ ID NO: 1024574 - DNA, 15 bp, Homo sapiens
cagcctcccatcgaa

SEQ ID NO: 1024575 - DNA, 15 bp, Homo sapiens
agcctcccatcgaat

SEQ ID NO: 1024576 - DNA, 15 bp, Homo sapiens
gcctcccatcgaatt

SEQ ID NO: 1024577 - DNA, 15 bp, Homo sapiens
cctcccatcgaattc

SEQ ID NO: 1024578 - DNA, 15 bp, Homo sapiens
ctcccatcgaattct

SEQ ID NO: 1024579 - DNA, 15 bp, Homo sapiens
tcccatcgaattctg

SEQ ID NO: 1024580 - DNA, 15 bp, Homo sapiens
cccatcgaattctgt

SEQ ID NO: 1024581 - DNA, 15 bp, Homo sapiens
ccatcgaattctgtg

SEQ ID NO: 1024582 - DNA, 15 bp, Homo sapiens
catcgaattctgtga

SEQ ID NO: 1024583 - DNA, 15 bp, Homo sapiens
atcgaattctgtgaa

SEQ ID NO: 1024584 - DNA, 15 bp, Homo sapiens
tcgaattctgtgaag

SEQ ID NO: 1024585 - DNA, 15 bp, Homo sapiens
cgaattctgtgaagg

SEQ ID NO: 1024586 - DNA, 15 bp, Homo sapiens
gaattctgtgaagga

SEQ ID NO: 1024587 - DNA, 15 bp, Homo sapiens
aattctgtgaaggag

SEQ ID NO: 1024588 - DNA, 15 bp, Homo sapiens
attctgtgaaggagc

SEQ ID NO: 1024589 - DNA, 15 bp, Homo sapiens
ttctgtgaaggagct

SEQ ID NO: 1024590 - DNA, 15 bp, Homo sapiens
tctgtgaaggagctc

SEQ ID NO: 1024591 - DNA, 15 bp, Homo sapiens
ctgtgaaggagctca

SEQ ID NO: 1024592 - DNA, 15 bp, Homo sapiens
tgtgaaggagctcag

SEQ ID NO: 1024593 - DNA, 15 bp, Homo sapiens
gtgaaggagctcagc

SEQ ID NO: 1024594 - DNA, 15 bp, Homo sapiens
tgaaggagctcagcc

SEQ ID NO: 1024595 - DNA, 15 bp, Homo sapiens
gaaggagctcagcca

SEQ ID NO: 1024596 - DNA, 15 bp, Homo sapiens
aaggagctcagccac

SEQ ID NO: 1024597 - DNA, 15 bp, Homo sapiens
aggagctcagccact

SEQ ID NO: 1024598 - DNA, 15 bp, Homo sapiens
ggagctcagccactg

SEQ ID NO: 1024599 - DNA, 15 bp, Homo sapiens
gagctcagccactga

SEQ ID NO: 1024600 - DNA, 15 bp, Homo sapiens
agctcagccactgat

SEQ ID NO: 1024601 - DNA, 15 bp, Homo sapiens
gctcagccactgatt

SEQ ID NO: 1024602 - DNA, 15 bp, Homo sapiens
ctcagccactgatta

SEQ ID NO: 1024603 - DNA, 15 bp, Homo sapiens
tcagccactgattag

SEQ ID NO: 1024604 - DNA, 15 bp, Homo sapiens
cagccactgattaga

SEQ ID NO: 1024605 - DNA, 15 bp, Homo sapiens
agccactgattagaa

SEQ ID NO: 1024606 - DNA, 15 bp, Homo sapiens
gccactgattagaaa

SEQ ID NO: 1024607 - DNA, 15 bp, Homo sapiens
ccactgattagaaat

SEQ ID NO: 1024608 - DNA, 15 bp, Homo sapiens
cactgattagaaata

SEQ ID NO: 1024609 - DNA, 15 bp, Homo sapiens
actgattagaaataa

SEQ ID NO: 1024610 - DNA, 15 bp, Homo sapiens
ctgattagaaataaa

SEQ ID NO: 1024611 - DNA, 15 bp, Homo sapiens
tgattagaaataaag

SEQ ID NO: 1024612 - DNA, 15 bp, Homo sapiens
gattagaaataaagg

SEQ ID NO: 1024613 - DNA, 15 bp, Homo sapiens
attagaaataaaggt

SEQ ID NO: 1024614 - DNA, 15 bp, Homo sapiens
ttagaaataaaggtt

SEQ ID NO: 1024615 - DNA, 15 bp, Homo sapiens
tagaaataaaggttt

SEQ ID NO: 1024616 - DNA, 15 bp, Homo sapiens
agaaataaaggtttg

SEQ ID NO: 1024617 - DNA, 15 bp, Homo sapiens
gaaataaaggtttga

SEQ ID NO: 1024618 - DNA, 15 bp, Homo sapiens
aaataaaggtttgat

SEQ ID NO: 1024619 - DNA, 15 bp, Homo sapiens
aataaaggtttgatg

SEQ ID NO: 1024620 - DNA, 15 bp, Homo sapiens
ataaaggtttgatgt

SEQ ID NO: 1024621 - DNA, 15 bp, Homo sapiens
taaaggtttgatgtt

SEQ ID NO: 1024622 - DNA, 15 bp, Homo sapiens
aaaggtttgatgttc

SEQ ID NO: 1024623 - DNA, 15 bp, Homo sapiens
aaggtttgatgttca

SEQ ID NO: 1024624 - DNA, 15 bp, Homo sapiens
aggtttgatgttcaa

SEQ ID NO: 1024625 - DNA, 15 bp, Homo sapiens
ggtttgatgttcaaa

SEQ ID NO: 1024626 - DNA, 15 bp, Homo sapiens
gtttgatgttcaaat

SEQ ID NO: 1024627 - DNA, 15 bp, Homo sapiens
tttgatgttcaaatc

SEQ ID NO: 1024628 - DNA, 15 bp, Homo sapiens
ttgatgttcaaatct

SEQ ID NO: 1024629 - DNA, 15 bp, Homo sapiens
tgatgttcaaatcta

SEQ ID NO: 1024630 - DNA, 15 bp, Homo sapiens
gatgttcaaatctac

SEQ ID NO: 1024631 - DNA, 15 bp, Homo sapiens
atgttcaaatctaca

SEQ ID NO: 1024632 - DNA, 15 bp, Homo sapiens
tgttcaaatctacag

SEQ ID NO: 1024633 - DNA, 15 bp, Homo sapiens
gttcaaatctacaga

SEQ ID NO: 1024634 - DNA, 15 bp, Homo sapiens
ttcaaatctacagag

SEQ ID NO: 1024635 - DNA, 15 bp, Homo sapiens
tcaaatctacagagg

SEQ ID NO: 1024636 - DNA, 15 bp, Homo sapiens
caaatctacagaggt

SEQ ID NO: 1024637 - DNA, 15 bp, Homo sapiens
aaatctacagaggtg

SEQ ID NO: 1024638 - DNA, 15 bp, Homo sapiens
aatctacagaggtga

SEQ ID NO: 1024639 - DNA, 15 bp, Homo sapiens
atctacagaggtgat

SEQ ID NO: 1024640 - DNA, 15 bp, Homo sapiens
tctacagaggtgatc

SEQ ID NO: 1024641 - DNA, 15 bp, Homo sapiens
ctacagaggtgatcc

SEQ ID NO: 1024642 - DNA, 15 bp, Homo sapiens
tacagaggtgatcca

SEQ ID NO: 1024643 - DNA, 15 bp, Homo sapiens
acagaggtgatccat

SEQ ID NO: 1024644 - DNA, 15 bp, Homo sapiens
cagaggtgatccatt

SEQ ID NO: 1024645 - DNA, 15 bp, Homo sapiens
agaggtgatccattc

SEQ ID NO: 1024646 - DNA, 15 bp, Homo sapiens
gaggtgatccattca

SEQ ID NO: 1024647 - DNA, 15 bp, Homo sapiens
aggtgatccattcac

SEQ ID NO: 1024648 - DNA, 15 bp, Homo sapiens
ggtgatccattcact

SEQ ID NO: 1024649 - DNA, 15 bp, Homo sapiens
gtgatccattcactg

SEQ ID NO: 1024650 - DNA, 15 bp, Homo sapiens
tgatccattcactga

SEQ ID NO: 1024651 - DNA, 15 bp, Homo sapiens
gatccattcactgaa

SEQ ID NO: 1024652 - DNA, 15 bp, Homo sapiens
atccattcactgaaa

SEQ ID NO: 1024653 - DNA, 15 bp, Homo sapiens
tccattcactgaaaa

SEQ ID NO: 1024654 - DNA, 15 bp, Homo sapiens
ccattcactgaaaac

SEQ ID NO: 1024655 - DNA, 15 bp, Homo sapiens
cattcactgaaaacc

SEQ ID NO: 1024656 - DNA, 15 bp, Homo sapiens
attcactgaaaacca

SEQ ID NO: 1024657 - DNA, 15 bp, Homo sapiens
ttcactgaaaaccat

SEQ ID NO: 1024658 - DNA, 15 bp, Homo sapiens
tcactgaaaaccata

SEQ ID NO: 1024659 - DNA, 15 bp, Homo sapiens
cactgaaaaccataa

SEQ ID NO: 1024660 - DNA, 15 bp, Homo sapiens
actgaaaaccataac

SEQ ID NO: 1024661 - DNA, 15 bp, Homo sapiens
ctgaaaaccataact

SEQ ID NO: 1024662 - DNA, 15 bp, Homo sapiens
tgaaaaccataactc

SEQ ID NO: 1024663 - DNA, 15 bp, Homo sapiens
gaaaaccataactca

SEQ ID NO: 1024664 - DNA, 15 bp, Homo sapiens
aaaaccataactcac

SEQ ID NO: 1024665 - DNA, 15 bp, Homo sapiens
aaaccataactcact

SEQ ID NO: 1024666 - DNA, 15 bp, Homo sapiens
aaccataactcactc

SEQ ID NO: 1024667 - DNA, 15 bp, Homo sapiens
accataactcactca

SEQ ID NO: 1024668 - DNA, 15 bp, Homo sapiens
ccataactcactcag

SEQ ID NO: 1024669 - DNA, 15 bp, Homo sapiens
cataactcactcaga

SEQ ID NO: 1024670 - DNA, 15 bp, Homo sapiens
ataactcactcagac

SEQ ID NO: 1024671 - DNA, 15 bp, Homo sapiens
taactcactcagact

SEQ ID NO: 1024672 - DNA, 15 bp, Homo sapiens
aactcactcagactg

SEQ ID NO: 1024673 - DNA, 15 bp, Homo sapiens
actcactcagactga

SEQ ID NO: 1024674 - DNA, 15 bp, Homo sapiens
ctcactcagactgat

SEQ ID NO: 1024675 - DNA, 15 bp, Homo sapiens
tcactcagactgatt

SEQ ID NO: 1024676 - DNA, 15 bp, Homo sapiens
cactcagactgattt

SEQ ID NO: 1024677 - DNA, 15 bp, Homo sapiens
actcagactgattta

SEQ ID NO: 1024678 - DNA, 15 bp, Homo sapiens
ctcagactgatttaa

SEQ ID NO: 1024679 - DNA, 15 bp, Homo sapiens
tcagactgatttaaa

SEQ ID NO: 1024680 - DNA, 15 bp, Homo sapiens
cagactgatttaaaa

SEQ ID NO: 1024681 - DNA, 15 bp, Homo sapiens
agactgatttaaaat

SEQ ID NO: 1024682 - DNA, 15 bp, Homo sapiens
gactgatttaaaatg

SEQ ID NO: 1024683 - DNA, 15 bp, Homo sapiens
actgatttaaaatgg

SEQ ID NO: 1024684 - DNA, 15 bp, Homo sapiens
ctgatttaaaatggg

SEQ ID NO: 1024685 - DNA, 15 bp, Homo sapiens
tgatttaaaatgggt

SEQ ID NO: 1024686 - DNA, 15 bp, Homo sapiens
gatttaaaatgggtg

SEQ ID NO: 1024687 - DNA, 15 bp, Homo sapiens
atttaaaatgggtgt

SEQ ID NO: 1024688 - DNA, 15 bp, Homo sapiens
tttaaaatgggtgtc

SEQ ID NO: 1024689 - DNA, 15 bp, Homo sapiens
ttaaaatgggtgtcc

SEQ ID NO: 1024690 - DNA, 15 bp, Homo sapiens
taaaatgggtgtcct

SEQ ID NO: 1024691 - DNA, 15 bp, Homo sapiens
aaaatgggtgtcctc

SEQ ID NO: 1024692 - DNA, 15 bp, Homo sapiens
aaatgggtgtcctct

SEQ ID NO: 1024693 - DNA, 15 bp, Homo sapiens
aatgggtgtcctctc

SEQ ID NO: 1024694 - DNA, 15 bp, Homo sapiens
atgggtgtcctctct

SEQ ID NO: 1024695 - DNA, 15 bp, Homo sapiens
tgggtgtcctctctc

SEQ ID NO: 1024696 - DNA, 15 bp, Homo sapiens
gggtgtcctctctca

SEQ ID NO: 1024697 - DNA, 15 bp, Homo sapiens
ggtgtcctctctcac

SEQ ID NO: 1024698 - DNA, 15 bp, Homo sapiens
gtgtcctctctcact

SEQ ID NO: 1024699 - DNA, 15 bp, Homo sapiens
tgtcctctctcactg

SEQ ID NO: 1024700 - DNA, 15 bp, Homo sapiens
gtcctctctcactgt

SEQ ID NO: 1024701 - DNA, 15 bp, Homo sapiens
tcctctctcactgtt

SEQ ID NO: 1024702 - DNA, 15 bp, Homo sapiens
cctctctcactgttt

SEQ ID NO: 1024703 - DNA, 15 bp, Homo sapiens
ctctctcactgtttt

SEQ ID NO: 1024704 - DNA, 15 bp, Homo sapiens
tctctcactgtttta

SEQ ID NO: 1024705 - DNA, 15 bp, Homo sapiens
ctctcactgttttaa

SEQ ID NO: 1024706 - DNA, 15 bp, Homo sapiens
tctcactgttttaaa

SEQ ID NO: 1024707 - DNA, 15 bp, Homo sapiens
ctcactgttttaaaa

SEQ ID NO: 1024708 - DNA, 15 bp, Homo sapiens
tcactgttttaaaac

SEQ ID NO: 1024709 - DNA, 15 bp, Homo sapiens
cactgttttaaaact

SEQ ID NO: 1024710 - DNA, 15 bp, Homo sapiens
actgttttaaaactt

SEQ ID NO: 1024711 - DNA, 15 bp, Homo sapiens
ctgttttaaaacttt

SEQ ID NO: 1024712 - DNA, 15 bp, Homo sapiens
tgttttaaaactttg

SEQ ID NO: 1024713 - DNA, 15 bp, Homo sapiens
gttttaaaactttgg

SEQ ID NO: 1024714 - DNA, 15 bp, Homo sapiens
ttttaaaactttggc

SEQ ID NO: 1024715 - DNA, 15 bp, Homo sapiens
tttaaaactttggct

SEQ ID NO: 1024716 - DNA, 15 bp, Homo sapiens
ttaaaactttggctc

SEQ ID NO: 1024717 - DNA, 15 bp, Homo sapiens
taaaactttggctca

SEQ ID NO: 1024718 - DNA, 15 bp, Homo sapiens
aaaactttggctcag

SEQ ID NO: 1024719 - DNA, 15 bp, Homo sapiens
aaactttggctcagc

SEQ ID NO: 1024720 - DNA, 15 bp, Homo sapiens
aactttggctcagct

SEQ ID NO: 1024721 - DNA, 15 bp, Homo sapiens
actttggctcagctt

SEQ ID NO: 1024722 - DNA, 15 bp, Homo sapiens
ctttggctcagcttt

SEQ ID NO: 1024723 - DNA, 15 bp, Homo sapiens
tttggctcagctttg

SEQ ID NO: 1024724 - DNA, 15 bp, Homo sapiens
ttggctcagctttgt

SEQ ID NO: 1024725 - DNA, 15 bp, Homo sapiens
tggctcagctttgtg

SEQ ID NO: 1024726 - DNA, 15 bp, Homo sapiens
ggctcagctttgtga

SEQ ID NO: 1024727 - DNA, 15 bp, Homo sapiens
gctcagctttgtgag

SEQ ID NO: 1024728 - DNA, 15 bp, Homo sapiens
ctcagctttgtgaga

SEQ ID NO: 1024729 - DNA, 15 bp, Homo sapiens
tcagctttgtgagac

SEQ ID NO: 1024730 - DNA, 15 bp, Homo sapiens
cagctttgtgagacc

SEQ ID NO: 1024731 - DNA, 15 bp, Homo sapiens
agctttgtgagacca

SEQ ID NO: 1024732 - DNA, 15 bp, Homo sapiens
gctttgtgagaccac

SEQ ID NO: 1024733 - DNA, 15 bp, Homo sapiens
ctttgtgagaccaca

SEQ ID NO: 1024734 - DNA, 15 bp, Homo sapiens
tttgtgagaccacag

SEQ ID NO: 1024735 - DNA, 15 bp, Homo sapiens
ttgtgagaccacagt

SEQ ID NO: 1024736 - DNA, 15 bp, Homo sapiens
tgtgagaccacagta

SEQ ID NO: 1024737 - DNA, 15 bp, Homo sapiens
gtgagaccacagtag

SEQ ID NO: 1024738 - DNA, 15 bp, Homo sapiens
tgagaccacagtaga

SEQ ID NO: 1024739 - DNA, 15 bp, Homo sapiens
gagaccacagtagac

SEQ ID NO: 1024740 - DNA, 15 bp, Homo sapiens
agaccacagtagaca

SEQ ID NO: 1024741 - DNA, 15 bp, Homo sapiens
gaccacagtagacag

SEQ ID NO: 1024742 - DNA, 15 bp, Homo sapiens
accacagtagacagt

SEQ ID NO: 1024743 - DNA, 15 bp, Homo sapiens
ccacagtagacagtt

SEQ ID NO: 1024744 - DNA, 15 bp, Homo sapiens
cacagtagacagttc

SEQ ID NO: 1024745 - DNA, 15 bp, Homo sapiens
acagtagacagttct

SEQ ID NO: 1024746 - DNA, 15 bp, Homo sapiens
cagtagacagttctg

SEQ ID NO: 1024747 - DNA, 15 bp, Homo sapiens
agtagacagttctga

SEQ ID NO: 1024748 - DNA, 15 bp, Homo sapiens
gtagacagttctgag

SEQ ID NO: 1024749 - DNA, 15 bp, Homo sapiens
tagacagttctgaga

SEQ ID NO: 1024750 - DNA, 15 bp, Homo sapiens
agacagttctgagac

SEQ ID NO: 1024751 - DNA, 15 bp, Homo sapiens
gacagttctgagact

SEQ ID NO: 1024752 - DNA, 15 bp, Homo sapiens
acagttctgagactc

SEQ ID NO: 1024753 - DNA, 15 bp, Homo sapiens
cagttctgagactcc

SEQ ID NO: 1024754 - DNA, 15 bp, Homo sapiens
agttctgagactcct

SEQ ID NO: 1024755 - DNA, 15 bp, Homo sapiens
gttctgagactccta

SEQ ID NO: 1024756 - DNA, 15 bp, Homo sapiens
ttctgagactcctat

SEQ ID NO: 1024757 - DNA, 15 bp, Homo sapiens
tctgagactcctatc

SEQ ID NO: 1024758 - DNA, 15 bp, Homo sapiens
ctgagactcctatca

SEQ ID NO: 1024759 - DNA, 15 bp, Homo sapiens
tgagactcctatcaa

SEQ ID NO: 1024760 - DNA, 15 bp, Homo sapiens
gagactcctatcaac

SEQ ID NO: 1024761 - DNA, 15 bp, Homo sapiens
agactcctatcaaca

SEQ ID NO: 1024762 - DNA, 15 bp, Homo sapiens
gactcctatcaacag

SEQ ID NO: 1024763 - DNA, 15 bp, Homo sapiens
actcctatcaacaga

SEQ ID NO: 1024764 - DNA, 15 bp, Homo sapiens
ctcctatcaacagaa

SEQ ID NO: 1024765 - DNA, 15 bp, Homo sapiens
tcctatcaacagaag

SEQ ID NO: 1024766 - DNA, 15 bp, Homo sapiens
cctatcaacagaagt

SEQ ID NO: 1024767 - DNA, 15 bp, Homo sapiens
ctatcaacagaagtc

SEQ ID NO: 1024768 - DNA, 15 bp, Homo sapiens
tatcaacagaagtct

SEQ ID NO: 1024769 - DNA, 15 bp, Homo sapiens
atcaacagaagtctg

SEQ ID NO: 1024770 - DNA, 15 bp, Homo sapiens
tcaacagaagtctga

SEQ ID NO: 1024771 - DNA, 15 bp, Homo sapiens
caacagaagtctgac

SEQ ID NO: 1024772 - DNA, 15 bp, Homo sapiens
aacagaagtctgact

SEQ ID NO: 1024773 - DNA, 15 bp, Homo sapiens
acagaagtctgactc

SEQ ID NO: 1024774 - DNA, 15 bp, Homo sapiens
cagaagtctgactca

SEQ ID NO: 1024775 - DNA, 15 bp, Homo sapiens
agaagtctgactcag

SEQ ID NO: 1024776 - DNA, 15 bp, Homo sapiens
gaagtctgactcaga

SEQ ID NO: 1024777 - DNA, 15 bp, Homo sapiens
aagtctgactcagaa

SEQ ID NO: 1024778 - DNA, 15 bp, Homo sapiens
agtctgactcagaaa

SEQ ID NO: 1024779 - DNA, 15 bp, Homo sapiens
gtctgactcagaaaa

SEQ ID NO: 1024780 - DNA, 15 bp, Homo sapiens
tctgactcagaaaat

SEQ ID NO: 1024781 - DNA, 15 bp, Homo sapiens
ctgactcagaaaatg

SEQ ID NO: 1024782 - DNA, 15 bp, Homo sapiens
tgactcagaaaatga

SEQ ID NO: 1024783 - DNA, 15 bp, Homo sapiens
gactcagaaaatgaa

SEQ ID NO: 1024784 - DNA, 15 bp, Homo sapiens
actcagaaaatgaat

SEQ ID NO: 1024785 - DNA, 15 bp, Homo sapiens
ctcagaaaatgaatt

SEQ ID NO: 1024786 - DNA, 15 bp, Homo sapiens
tcagaaaatgaatta

SEQ ID NO: 1024787 - DNA, 15 bp, Homo sapiens
cagaaaatgaattat

SEQ ID NO: 1024788 - DNA, 15 bp, Homo sapiens
agaaaatgaattatt

SEQ ID NO: 1024789 - DNA, 15 bp, Homo sapiens
gaaaatgaattattt

SEQ ID NO: 1024790 - DNA, 15 bp, Homo sapiens
aaaatgaattatttg

SEQ ID NO: 1024791 - DNA, 15 bp, Homo sapiens
aaatgaattatttgg

SEQ ID NO: 1024792 - DNA, 15 bp, Homo sapiens
aatgaattatttggt

SEQ ID NO: 1024793 - DNA, 15 bp, Homo sapiens
atgaattatttggtc

SEQ ID NO: 1024794 - DNA, 15 bp, Homo sapiens
tgaattatttggtct

SEQ ID NO: 1024795 - DNA, 15 bp, Homo sapiens
gaattatttggtctc

SEQ ID NO: 1024796 - DNA, 15 bp, Homo sapiens
aattatttggtctct

SEQ ID NO: 1024797 - DNA, 15 bp, Homo sapiens
attatttggtctctt

SEQ ID NO: 1024798 - DNA, 15 bp, Homo sapiens
ttatttggtctcttt

SEQ ID NO: 1024799 - DNA, 15 bp, Homo sapiens
tatttggtctctttc

SEQ ID NO: 1024800 - DNA, 15 bp, Homo sapiens
atttggtctctttct

SEQ ID NO: 1024801 - DNA, 15 bp, Homo sapiens
tttggtctctttctc

SEQ ID NO: 1024802 - DNA, 15 bp, Homo sapiens
ttggtctctttctct

SEQ ID NO: 1024803 - DNA, 15 bp, Homo sapiens
tggtctctttctctt

SEQ ID NO: 1024804 - DNA, 15 bp, Homo sapiens
ggtctctttctcttc

SEQ ID NO: 1024805 - DNA, 15 bp, Homo sapiens
gtctctttctcttcc

SEQ ID NO: 1024806 - DNA, 15 bp, Homo sapiens
tctctttctcttcct

SEQ ID NO: 1024807 - DNA, 15 bp, Homo sapiens
ctctttctcttcctc

SEQ ID NO: 1024808 - DNA, 15 bp, Homo sapiens
tctttctcttcctct

SEQ ID NO: 1024809 - DNA, 15 bp, Homo sapiens
ctttctcttcctctc

SEQ ID NO: 1024810 - DNA, 15 bp, Homo sapiens
tttctcttcctctct

SEQ ID NO: 1024811 - DNA, 15 bp, Homo sapiens
ttctcttcctctctc

SEQ ID NO: 1024812 - DNA, 15 bp, Homo sapiens
tctcttcctctctcc

SEQ ID NO: 1024813 - DNA, 15 bp, Homo sapiens
ctcttcctctctccc

SEQ ID NO: 1024814 - DNA, 15 bp, Homo sapiens
tcttcctctctccct

SEQ ID NO: 1024815 - DNA, 15 bp, Homo sapiens
cttcctctctccctc

SEQ ID NO: 1024816 - DNA, 15 bp, Homo sapiens
ttcctctctccctct

SEQ ID NO: 1024817 - DNA, 15 bp, Homo sapiens
tcctctctccctctc

SEQ ID NO: 1024818 - DNA, 15 bp, Homo sapiens
cctctctccctctcc

SEQ ID NO: 1024819 - DNA, 15 bp, Homo sapiens
ctctctccctctccc

SEQ ID NO: 1024820 - DNA, 15 bp, Homo sapiens
tctctccctctccct

SEQ ID NO: 1024821 - DNA, 15 bp, Homo sapiens
ctctccctctccctc

SEQ ID NO: 1024822 - DNA, 15 bp, Homo sapiens
tctccctctccctct

SEQ ID NO: 1024823 - DNA, 15 bp, Homo sapiens
ctccctctccctctt

SEQ ID NO: 1024824 - DNA, 15 bp, Homo sapiens
tccctctccctcttg

SEQ ID NO: 1024825 - DNA, 15 bp, Homo sapiens
ccctctccctcttgg

SEQ ID NO: 1024826 - DNA, 15 bp, Homo sapiens
cctctccctcttggt

SEQ ID NO: 1024827 - DNA, 15 bp, Homo sapiens
ctctccctcttggtg

SEQ ID NO: 1024828 - DNA, 15 bp, Homo sapiens
tctccctcttggtgg

SEQ ID NO: 1024829 - DNA, 15 bp, Homo sapiens
ctccctcttggtgga

SEQ ID NO: 1024830 - DNA, 15 bp, Homo sapiens
tccctcttggtggaa

SEQ ID NO: 1024831 - DNA, 15 bp, Homo sapiens
ccctcttggtggaag

SEQ ID NO: 1024832 - DNA, 15 bp, Homo sapiens
cctcttggtggaagt

SEQ ID NO: 1024833 - DNA, 15 bp, Homo sapiens
ctcttggtggaagta

SEQ ID NO: 1024834 - DNA, 15 bp, Homo sapiens
tcttggtggaagtag

SEQ ID NO: 1024835 - DNA, 15 bp, Homo sapiens
cttggtggaagtagt

SEQ ID NO: 1024836 - DNA, 15 bp, Homo sapiens
ttggtggaagtagtt

SEQ ID NO: 1024837 - DNA, 15 bp, Homo sapiens
tggtggaagtagttt

SEQ ID NO: 1024838 - DNA, 15 bp, Homo sapiens
ggtggaagtagtttg

SEQ ID NO: 1024839 - DNA, 15 bp, Homo sapiens
gtggaagtagtttgg

SEQ ID NO: 1024840 - DNA, 15 bp, Homo sapiens
tggaagtagtttggt

SEQ ID NO: 1024841 - DNA, 15 bp, Homo sapiens
ggaagtagtttggta

SEQ ID NO: 1024842 - DNA, 15 bp, Homo sapiens
gaagtagtttggtat

SEQ ID NO: 1024843 - DNA, 15 bp, Homo sapiens
aagtagtttggtatt

SEQ ID NO: 1024844 - DNA, 15 bp, Homo sapiens
agtagtttggtattt

SEQ ID NO: 1024845 - DNA, 15 bp, Homo sapiens
gtagtttggtatttc

SEQ ID NO: 1024846 - DNA, 15 bp, Homo sapiens
tagtttggtatttcg

SEQ ID NO: 1024847 - DNA, 15 bp, Homo sapiens
agtttggtatttcgg

SEQ ID NO: 1024848 - DNA, 15 bp, Homo sapiens
gtttggtatttcggt

SEQ ID NO: 1024849 - DNA, 15 bp, Homo sapiens
tttggtatttcggtc

SEQ ID NO: 1024850 - DNA, 15 bp, Homo sapiens
ttggtatttcggtcc

SEQ ID NO: 1024851 - DNA, 15 bp, Homo sapiens
tggtatttcggtcct

SEQ ID NO: 1024852 - DNA, 15 bp, Homo sapiens
ggtatttcggtcctc

SEQ ID NO: 1024853 - DNA, 15 bp, Homo sapiens
gtatttcggtcctcc

SEQ ID NO: 1024854 - DNA, 15 bp, Homo sapiens
tatttcggtcctcca

SEQ ID NO: 1024855 - DNA, 15 bp, Homo sapiens
atttcggtcctccac

SEQ ID NO: 1024856 - DNA, 15 bp, Homo sapiens
tttcggtcctccact

SEQ ID NO: 1024857 - DNA, 15 bp, Homo sapiens
ttcggtcctccactg

SEQ ID NO: 1024858 - DNA, 15 bp, Homo sapiens
tcggtcctccactgc

SEQ ID NO: 1024859 - DNA, 15 bp, Homo sapiens
cggtcctccactgca

SEQ ID NO: 1024860 - DNA, 15 bp, Homo sapiens
ggtcctccactgcag

SEQ ID NO: 1024861 - DNA, 15 bp, Homo sapiens
gtcctccactgcagt

SEQ ID NO: 1024862 - DNA, 15 bp, Homo sapiens
tcctccactgcagtc

SEQ ID NO: 1024863 - DNA, 15 bp, Homo sapiens
cctccactgcagtct

SEQ ID NO: 1024864 - DNA, 15 bp, Homo sapiens
ctccactgcagtctc

SEQ ID NO: 1024865 - DNA, 15 bp, Homo sapiens
tccactgcagtctca

SEQ ID NO: 1024866 - DNA, 15 bp, Homo sapiens
ccactgcagtctcag

SEQ ID NO: 1024867 - DNA, 15 bp, Homo sapiens
cactgcagtctcagg

SEQ ID NO: 1024868 - DNA, 15 bp, Homo sapiens
actgcagtctcagga

SEQ ID NO: 1024869 - DNA, 15 bp, Homo sapiens
ctgcagtctcaggac

SEQ ID NO: 1024870 - DNA, 15 bp, Homo sapiens
tgcagtctcaggact

SEQ ID NO: 1024871 - DNA, 15 bp, Homo sapiens
gcagtctcaggactg

SEQ ID NO: 1024872 - DNA, 15 bp, Homo sapiens
cagtctcaggactgc

SEQ ID NO: 1024873 - DNA, 15 bp, Homo sapiens
agtctcaggactgct

SEQ ID NO: 1024874 - DNA, 15 bp, Homo sapiens
gtctcaggactgctc

SEQ ID NO: 1024875 - DNA, 15 bp, Homo sapiens
tctcaggactgctca

SEQ ID NO: 1024876 - DNA, 15 bp, Homo sapiens
ctcaggactgctcaa

SEQ ID NO: 1024877 - DNA, 15 bp, Homo sapiens
tcaggactgctcaag

SEQ ID NO: 1024878 - DNA, 15 bp, Homo sapiens
caggactgctcaaga

SEQ ID NO: 1024879 - DNA, 15 bp, Homo sapiens
aggactgctcaagat

SEQ ID NO: 1024880 - DNA, 15 bp, Homo sapiens
ggactgctcaagatt

SEQ ID NO: 1024881 - DNA, 15 bp, Homo sapiens
gactgctcaagattt

SEQ ID NO: 1024882 - DNA, 15 bp, Homo sapiens
actgctcaagatttg

SEQ ID NO: 1024883 - DNA, 15 bp, Homo sapiens
ctgctcaagatttgt

SEQ ID NO: 1024884 - DNA, 15 bp, Homo sapiens
tgctcaagatttgtt

SEQ ID NO: 1024885 - DNA, 15 bp, Homo sapiens
gctcaagatttgttt

SEQ ID NO: 1024886 - DNA, 15 bp, Homo sapiens
ctcaagatttgtttc

SEQ ID NO: 1024887 - DNA, 15 bp, Homo sapiens
tcaagatttgtttcc

SEQ ID NO: 1024888 - DNA, 15 bp, Homo sapiens
caagatttgtttcca

SEQ ID NO: 1024889 - DNA, 15 bp, Homo sapiens
aagatttgtttccac

SEQ ID NO: 1024890 - DNA, 15 bp, Homo sapiens
agatttgtttccaca

SEQ ID NO: 1024891 - DNA, 15 bp, Homo sapiens
gatttgtttccacac

SEQ ID NO: 1024892 - DNA, 15 bp, Homo sapiens
atttgtttccacaca

SEQ ID NO: 1024893 - DNA, 15 bp, Homo sapiens
tttgtttccacacaa

SEQ ID NO: 1024894 - DNA, 15 bp, Homo sapiens
ttgtttccacacaat

SEQ ID NO: 1024895 - DNA, 15 bp, Homo sapiens
tgtttccacacaatt

SEQ ID NO: 1024896 - DNA, 15 bp, Homo sapiens
gtttccacacaattt

SEQ ID NO: 1024897 - DNA, 15 bp, Homo sapiens
tttccacacaatttc

SEQ ID NO: 1024898 - DNA, 15 bp, Homo sapiens
ttccacacaatttct

SEQ ID NO: 1024899 - DNA, 15 bp, Homo sapiens
tccacacaatttctg

SEQ ID NO: 1024900 - DNA, 15 bp, Homo sapiens
ccacacaatttctga

SEQ ID NO: 1024901 - DNA, 15 bp, Homo sapiens
cacacaatttctgag

SEQ ID NO: 1024902 - DNA, 15 bp, Homo sapiens
acacaatttctgagg

SEQ ID NO: 1024903 - DNA, 15 bp, Homo sapiens
cacaatttctgaggc

SEQ ID NO: 1024904 - DNA, 15 bp, Homo sapiens
acaatttctgaggca

SEQ ID NO: 1024905 - DNA, 15 bp, Homo sapiens
caatttctgaggcag

SEQ ID NO: 1024906 - DNA, 15 bp, Homo sapiens
aatttctgaggcaga

SEQ ID NO: 1024907 - DNA, 15 bp, Homo sapiens
atttctgaggcagaa

SEQ ID NO: 1024908 - DNA, 15 bp, Homo sapiens
tttctgaggcagaac

SEQ ID NO: 1024909 - DNA, 15 bp, Homo sapiens
ttctgaggcagaaca

SEQ ID NO: 1024910 - DNA, 15 bp, Homo sapiens
tctgaggcagaacaa

SEQ ID NO: 1024911 - DNA, 15 bp, Homo sapiens
ctgaggcagaacaaa

SEQ ID NO: 1024912 - DNA, 15 bp, Homo sapiens
tgaggcagaacaaaa

SEQ ID NO: 1024913 - DNA, 15 bp, Homo sapiens
gaggcagaacaaaac

SEQ ID NO: 1024914 - DNA, 15 bp, Homo sapiens
aggcagaacaaaact

SEQ ID NO: 1024915 - DNA, 15 bp, Homo sapiens
ggcagaacaaaactc

SEQ ID NO: 1024916 - DNA, 15 bp, Homo sapiens
gcagaacaaaactcc

SEQ ID NO: 1024917 - DNA, 15 bp, Homo sapiens
cagaacaaaactccc

SEQ ID NO: 1024918 - DNA, 15 bp, Homo sapiens
agaacaaaactccct

SEQ ID NO: 1024919 - DNA, 15 bp, Homo sapiens
gaacaaaactccctc

SEQ ID NO: 1024920 - DNA, 15 bp, Homo sapiens
aacaaaactccctct

SEQ ID NO: 1024921 - DNA, 15 bp, Homo sapiens
acaaaactccctctt

SEQ ID NO: 1024922 - DNA, 15 bp, Homo sapiens
caaaactccctcttc

SEQ ID NO: 1024923 - DNA, 15 bp, Homo sapiens
aaaactccctcttcc

SEQ ID NO: 1024924 - DNA, 15 bp, Homo sapiens
aaactccctcttcct

SEQ ID NO: 1024925 - DNA, 15 bp, Homo sapiens
aactccctcttcctg

SEQ ID NO: 1024926 - DNA, 15 bp, Homo sapiens
actccctcttcctgt

SEQ ID NO: 1024927 - DNA, 15 bp, Homo sapiens
ctccctcttcctgtg

SEQ ID NO: 1024928 - DNA, 15 bp, Homo sapiens
tccctcttcctgtgg

SEQ ID NO: 1024929 - DNA, 15 bp, Homo sapiens
ccctcttcctgtggg

SEQ ID NO: 1024930 - DNA, 15 bp, Homo sapiens
cctcttcctgtgggg

SEQ ID NO: 1024931 - DNA, 15 bp, Homo sapiens
ctcttcctgtggggc

SEQ ID NO: 1024932 - DNA, 15 bp, Homo sapiens
tcttcctgtggggca

SEQ ID NO: 1024933 - DNA, 15 bp, Homo sapiens
cttcctgtggggcaa

SEQ ID NO: 1024934 - DNA, 15 bp, Homo sapiens
ttcctgtggggcaag

SEQ ID NO: 1024935 - DNA, 15 bp, Homo sapiens
tcctgtggggcaagg

SEQ ID NO: 1024936 - DNA, 15 bp, Homo sapiens
cctgtggggcaagga

SEQ ID NO: 1024937 - DNA, 15 bp, Homo sapiens
ctgtggggcaaggac

SEQ ID NO: 1024938 - DNA, 15 bp, Homo sapiens
tgtggggcaaggact

SEQ ID NO: 1024939 - DNA, 15 bp, Homo sapiens
gtggggcaaggactc

SEQ ID NO: 1024940 - DNA, 15 bp, Homo sapiens
tggggcaaggactct

SEQ ID NO: 1024941 - DNA, 15 bp, Homo sapiens
ggggcaaggactctg

SEQ ID NO: 1024942 - DNA, 15 bp, Homo sapiens
gggcaaggactctgg

SEQ ID NO: 1024943 - DNA, 15 bp, Homo sapiens
ggcaaggactctggg

SEQ ID NO: 1024944 - DNA, 15 bp, Homo sapiens
gcaaggactctgggc

SEQ ID NO: 1024945 - DNA, 15 bp, Homo sapiens
caaggactctgggcc

SEQ ID NO: 1024946 - DNA, 15 bp, Homo sapiens
aaggactctgggcct

SEQ ID NO: 1024947 - DNA, 15 bp, Homo sapiens
aggactctgggcctg

SEQ ID NO: 1024948 - DNA, 15 bp, Homo sapiens
ggactctgggcctgg

SEQ ID NO: 1024949 - DNA, 15 bp, Homo sapiens
gactctgggcctggc

SEQ ID NO: 1024950 - DNA, 15 bp, Homo sapiens
actctgggcctggcc

SEQ ID NO: 1024951 - DNA, 15 bp, Homo sapiens
ctctgggcctggcct

SEQ ID NO: 1024952 - DNA, 15 bp, Homo sapiens
tctgggcctggcctc

SEQ ID NO: 1024953 - DNA, 15 bp, Homo sapiens
ctgggcctggcctcc

SEQ ID NO: 1024954 - DNA, 15 bp, Homo sapiens
tgggcctggcctcct

SEQ ID NO: 1024955 - DNA, 15 bp, Homo sapiens
gggcctggcctcctt

SEQ ID NO: 1024956 - DNA, 15 bp, Homo sapiens
ggcctggcctcctta

SEQ ID NO: 1024957 - DNA, 15 bp, Homo sapiens
gcctggcctccttac

SEQ ID NO: 1024958 - DNA, 15 bp, Homo sapiens
cctggcctccttacc

SEQ ID NO: 1024959 - DNA, 15 bp, Homo sapiens
ctggcctccttacct

SEQ ID NO: 1024960 - DNA, 15 bp, Homo sapiens
tggcctccttacctc

SEQ ID NO: 1024961 - DNA, 15 bp, Homo sapiens
ggcctccttacctcc

SEQ ID NO: 1024962 - DNA, 15 bp, Homo sapiens
gcctccttacctcct

SEQ ID NO: 1024963 - DNA, 15 bp, Homo sapiens
cctccttacctcctt

SEQ ID NO: 1024964 - DNA, 15 bp, Homo sapiens
ctccttacctcctta

SEQ ID NO: 1024965 - DNA, 15 bp, Homo sapiens
tccttacctccttaa

SEQ ID NO: 1024966 - DNA, 15 bp, Homo sapiens
ccttacctccttaac

SEQ ID NO: 1024967 - DNA, 15 bp, Homo sapiens
cttacctccttaacc

SEQ ID NO: 1024968 - DNA, 15 bp, Homo sapiens
ttacctccttaaccg

SEQ ID NO: 1024969 - DNA, 15 bp, Homo sapiens
tacctccttaaccgg

SEQ ID NO: 1024970 - DNA, 15 bp, Homo sapiens
acctccttaaccggt

SEQ ID NO: 1024971 - DNA, 15 bp, Homo sapiens
cctccttaaccggtt

SEQ ID NO: 1024972 - DNA, 15 bp, Homo sapiens
ctccttaaccggttc

SEQ ID NO: 1024973 - DNA, 15 bp, Homo sapiens
tccttaaccggttca

SEQ ID NO: 1024974 - DNA, 15 bp, Homo sapiens
ccttaaccggttcag

SEQ ID NO: 1024975 - DNA, 15 bp, Homo sapiens
cttaaccggttcaga

SEQ ID NO: 1024976 - DNA, 15 bp, Homo sapiens
ttaaccggttcagaa

SEQ ID NO: 1024977 - DNA, 15 bp, Homo sapiens
taaccggttcagaat

SEQ ID NO: 1024978 - DNA, 15 bp, Homo sapiens
aaccggttcagaatc

SEQ ID NO: 1024979 - DNA, 15 bp, Homo sapiens
accggttcagaatcc

SEQ ID NO: 1024980 - DNA, 15 bp, Homo sapiens
ccggttcagaatcct

SEQ ID NO: 1024981 - DNA, 15 bp, Homo sapiens
cggttcagaatcctt

SEQ ID NO: 1024982 - DNA, 15 bp, Homo sapiens
ggttcagaatccttt

SEQ ID NO: 1024983 - DNA, 15 bp, Homo sapiens
gttcagaatcctttg

SEQ ID NO: 1024984 - DNA, 15 bp, Homo sapiens
ttcagaatcctttga

SEQ ID NO: 1024985 - DNA, 15 bp, Homo sapiens
tcagaatcctttgag

SEQ ID NO: 1024986 - DNA, 15 bp, Homo sapiens
cagaatcctttgagc

SEQ ID NO: 1024987 - DNA, 15 bp, Homo sapiens
agaatcctttgagct

SEQ ID NO: 1024988 - DNA, 15 bp, Homo sapiens
gaatcctttgagctc

SEQ ID NO: 1024989 - DNA, 15 bp, Homo sapiens
aatcctttgagctca

SEQ ID NO: 1024990 - DNA, 15 bp, Homo sapiens
atcctttgagctcaa

SEQ ID NO: 1024991 - DNA, 15 bp, Homo sapiens
tcctttgagctcaaa

SEQ ID NO: 1024992 - DNA, 15 bp, Homo sapiens
cctttgagctcaaac

SEQ ID NO: 1024993 - DNA, 15 bp, Homo sapiens
ctttgagctcaaacc

SEQ ID NO: 1024994 - DNA, 15 bp, Homo sapiens
tttgagctcaaaccc

SEQ ID NO: 1024995 - DNA, 15 bp, Homo sapiens
ttgagctcaaaccca

SEQ ID NO: 1024996 - DNA, 15 bp, Homo sapiens
tgagctcaaacccaa

SEQ ID NO: 1024997 - DNA, 15 bp, Homo sapiens
gagctcaaacccaaa

SEQ ID NO: 1024998 - DNA, 15 bp, Homo sapiens
agctcaaacccaaac

SEQ ID NO: 1024999 - DNA, 15 bp, Homo sapiens
gctcaaacccaaaca

SEQ ID NO: 1025000 - DNA, 15 bp, Homo sapiens
ctcaaacccaaacaa

SEQ ID NO: 1025001 - DNA, 15 bp, Homo sapiens
tcaaacccaaacaat

SEQ ID NO: 1025002 - DNA, 15 bp, Homo sapiens
caaacccaaacaatt

SEQ ID NO: 1025003 - DNA, 15 bp, Homo sapiens
aaacccaaacaattt

SEQ ID NO: 1025004 - DNA, 15 bp, Homo sapiens
aacccaaacaatttg

SEQ ID NO: 1025005 - DNA, 15 bp, Homo sapiens
acccaaacaatttga

SEQ ID NO: 1025006 - DNA, 15 bp, Homo sapiens
cccaaacaatttgaa

SEQ ID NO: 1025007 - DNA, 15 bp, Homo sapiens
ccaaacaatttgaat

SEQ ID NO: 1025008 - DNA, 15 bp, Homo sapiens
caaacaatttgaatc

SEQ ID NO: 1025009 - DNA, 15 bp, Homo sapiens
aaacaatttgaatct

SEQ ID NO: 1025010 - DNA, 15 bp, Homo sapiens
aacaatttgaatctc

SEQ ID NO: 1025011 - DNA, 15 bp, Homo sapiens
acaatttgaatctca

SEQ ID NO: 1025012 - DNA, 15 bp, Homo sapiens
caatttgaatctcat

SEQ ID NO: 1025013 - DNA, 15 bp, Homo sapiens
aatttgaatctcatc

SEQ ID NO: 1025014 - DNA, 15 bp, Homo sapiens
atttgaatctcatca

SEQ ID NO: 1025015 - DNA, 15 bp, Homo sapiens
tttgaatctcatcag

SEQ ID NO: 1025016 - DNA, 15 bp, Homo sapiens
ttgaatctcatcaga

SEQ ID NO: 1025017 - DNA, 15 bp, Homo sapiens
tgaatctcatcagac

SEQ ID NO: 1025018 - DNA, 15 bp, Homo sapiens
gaatctcatcagacc

SEQ ID NO: 1025019 - DNA, 15 bp, Homo sapiens
aatctcatcagacca

SEQ ID NO: 1025020 - DNA, 15 bp, Homo sapiens
atctcatcagaccaa

SEQ ID NO: 1025021 - DNA, 15 bp, Homo sapiens
tctcatcagaccaaa

SEQ ID NO: 1025022 - DNA, 15 bp, Homo sapiens
ctcatcagaccaaag

SEQ ID NO: 1025023 - DNA, 15 bp, Homo sapiens
tcatcagaccaaaga

SEQ ID NO: 1025024 - DNA, 15 bp, Homo sapiens
catcagaccaaagac

SEQ ID NO: 1025025 - DNA, 15 bp, Homo sapiens
atcagaccaaagaca

SEQ ID NO: 1025026 - DNA, 15 bp, Homo sapiens
tcagaccaaagacaa

SEQ ID NO: 1025027 - DNA, 15 bp, Homo sapiens
cagaccaaagacaag

SEQ ID NO: 1025028 - DNA, 15 bp, Homo sapiens
agaccaaagacaaga

SEQ ID NO: 1025029 - DNA, 15 bp, Homo sapiens
gaccaaagacaagat

SEQ ID NO: 1025030 - DNA, 15 bp, Homo sapiens
accaaagacaagatc

SEQ ID NO: 1025031 - DNA, 15 bp, Homo sapiens
ccaaagacaagatcc

SEQ ID NO: 1025032 - DNA, 15 bp, Homo sapiens
caaagacaagatcct

SEQ ID NO: 1025033 - DNA, 15 bp, Homo sapiens
aaagacaagatcctc

SEQ ID NO: 1025034 - DNA, 15 bp, Homo sapiens
aagacaagatcctcc

SEQ ID NO: 1025035 - DNA, 15 bp, Homo sapiens
agacaagatcctccc

SEQ ID NO: 1025036 - DNA, 15 bp, Homo sapiens
gacaagatcctccca

SEQ ID NO: 1025037 - DNA, 15 bp, Homo sapiens
acaagatcctcccaa

SEQ ID NO: 1025038 - DNA, 15 bp, Homo sapiens
caagatcctcccaag

SEQ ID NO: 1025039 - DNA, 15 bp, Homo sapiens
aagatcctcccaagc

SEQ ID NO: 1025040 - DNA, 15 bp, Homo sapiens
agatcctcccaagcc

SEQ ID NO: 1025041 - DNA, 15 bp, Homo sapiens
gatcctcccaagccc

SEQ ID NO: 1025042 - DNA, 15 bp, Homo sapiens
atcctcccaagcccc

SEQ ID NO: 1025043 - DNA, 15 bp, Homo sapiens
tcctcccaagccccc

SEQ ID NO: 1025044 - DNA, 15 bp, Homo sapiens
cctcccaagcccccg

SEQ ID NO: 1025045 - DNA, 15 bp, Homo sapiens
ctcccaagcccccgc

SEQ ID NO: 1025046 - DNA, 15 bp, Homo sapiens
tcccaagcccccgcc

SEQ ID NO: 1025047 - DNA, 15 bp, Homo sapiens
cccaagcccccgccc

SEQ ID NO: 1025048 - DNA, 15 bp, Homo sapiens
ccaagcccccgcccc

SEQ ID NO: 1025049 - DNA, 15 bp, Homo sapiens
caagcccccgcccct

SEQ ID NO: 1025050 - DNA, 15 bp, Homo sapiens
aagcccccgcccctc

SEQ ID NO: 1025051 - DNA, 15 bp, Homo sapiens
agcccccgcccctca

SEQ ID NO: 1025052 - DNA, 15 bp, Homo sapiens
gcccccgcccctcaa

SEQ ID NO: 1025053 - DNA, 15 bp, Homo sapiens
cccccgcccctcaaa

SEQ ID NO: 1025054 - DNA, 15 bp, Homo sapiens
ccccgcccctcaaag

SEQ ID NO: 1025055 - DNA, 15 bp, Homo sapiens
cccgcccctcaaagc

SEQ ID NO: 1025056 - DNA, 15 bp, Homo sapiens
ccgcccctcaaagcc

SEQ ID NO: 1025057 - DNA, 15 bp, Homo sapiens
cgcccctcaaagcca

SEQ ID NO: 1025058 - DNA, 15 bp, Homo sapiens
gcccctcaaagccat

SEQ ID NO: 1025059 - DNA, 15 bp, Homo sapiens
cccctcaaagccatt

SEQ ID NO: 1025060 - DNA, 15 bp, Homo sapiens
ccctcaaagccattt

SEQ ID NO: 1025061 - DNA, 15 bp, Homo sapiens
cctcaaagccattta

SEQ ID NO: 1025062 - DNA, 15 bp, Homo sapiens
ctcaaagccatttaa

SEQ ID NO: 1025063 - DNA, 15 bp, Homo sapiens
tcaaagccatttaaa

SEQ ID NO: 1025064 - DNA, 15 bp, Homo sapiens
caaagccatttaaag

SEQ ID NO: 1025065 - DNA, 15 bp, Homo sapiens
aaagccatttaaagc

SEQ ID NO: 1025066 - DNA, 15 bp, Homo sapiens
aagccatttaaagcc

SEQ ID NO: 1025067 - DNA, 15 bp, Homo sapiens
agccatttaaagcca

SEQ ID NO: 1025068 - DNA, 15 bp, Homo sapiens
gccatttaaagccaa

SEQ ID NO: 1025069 - DNA, 15 bp, Homo sapiens
ccatttaaagccaaa

SEQ ID NO: 1025070 - DNA, 15 bp, Homo sapiens
catttaaagccaaat

SEQ ID NO: 1025071 - DNA, 15 bp, Homo sapiens
atttaaagccaaatc

SEQ ID NO: 1025072 - DNA, 15 bp, Homo sapiens
tttaaagccaaatca

SEQ ID NO: 1025073 - DNA, 15 bp, Homo sapiens
ttaaagccaaatcaa

SEQ ID NO: 1025074 - DNA, 15 bp, Homo sapiens
taaagccaaatcaaa

SEQ ID NO: 1025075 - DNA, 15 bp, Homo sapiens
aaagccaaatcaaaa

SEQ ID NO: 1025076 - DNA, 15 bp, Homo sapiens
aagccaaatcaaaac

SEQ ID NO: 1025077 - DNA, 15 bp, Homo sapiens
agccaaatcaaaaca

SEQ ID NO: 1025078 - DNA, 15 bp, Homo sapiens
gccaaatcaaaacaa

SEQ ID NO: 1025079 - DNA, 15 bp, Homo sapiens
ccaaatcaaaacaaa

SEQ ID NO: 1025080 - DNA, 15 bp, Homo sapiens
caaatcaaaacaaaa

SEQ ID NO: 1025081 - DNA, 15 bp, Homo sapiens
aaatcaaaacaaaac

SEQ ID NO: 1025082 - DNA, 15 bp, Homo sapiens
aatcaaaacaaaaca

SEQ ID NO: 1025083 - DNA, 15 bp, Homo sapiens
atcaaaacaaaacaa

SEQ ID NO: 1025084 - DNA, 15 bp, Homo sapiens
tcaaaacaaaacaaa

SEQ ID NO: 1025085 - DNA, 15 bp, Homo sapiens
caaaacaaaacaaaa

SEQ ID NO: 1025086 - DNA, 15 bp, Homo sapiens
aaaacaaaacaaaaa

SEQ ID NO: 1025087 - DNA, 15 bp, Homo sapiens
aaacaaaacaaaaag

SEQ ID NO: 1025088 - DNA, 15 bp, Homo sapiens
aacaaaacaaaaagg

SEQ ID NO: 1025089 - DNA, 15 bp, Homo sapiens
acaaaacaaaaagga

SEQ ID NO: 1025090 - DNA, 15 bp, Homo sapiens
caaaacaaaaaggag

SEQ ID NO: 1025091 - DNA, 15 bp, Homo sapiens
aaaacaaaaaggagg

SEQ ID NO: 1025092 - DNA, 15 bp, Homo sapiens
aaacaaaaaggaggg

SEQ ID NO: 1025093 - DNA, 15 bp, Homo sapiens
aacaaaaaggagggt

SEQ ID NO: 1025094 - DNA, 15 bp, Homo sapiens
acaaaaaggagggtt

SEQ ID NO: 1025095 - DNA, 15 bp, Homo sapiens
caaaaaggagggttt

SEQ ID NO: 1025096 - DNA, 15 bp, Homo sapiens
aaaaaggagggtttt

SEQ ID NO: 1025097 - DNA, 15 bp, Homo sapiens
aaaaggagggtttta

SEQ ID NO: 1025098 - DNA, 15 bp, Homo sapiens
aaaggagggttttaa

SEQ ID NO: 1025099 - DNA, 15 bp, Homo sapiens
aaggagggttttaat

SEQ ID NO: 1025100 - DNA, 15 bp, Homo sapiens
aggagggttttaatc

SEQ ID NO: 1025101 - DNA, 15 bp, Homo sapiens
ggagggttttaatca

SEQ ID NO: 1025102 - DNA, 15 bp, Homo sapiens
gagggttttaatcag

SEQ ID NO: 1025103 - DNA, 15 bp, Homo sapiens
agggttttaatcaga

SEQ ID NO: 1025104 - DNA, 15 bp, Homo sapiens
gggttttaatcagaa

SEQ ID NO: 1025105 - DNA, 15 bp, Homo sapiens
ggttttaatcagaaa

SEQ ID NO: 1025106 - DNA, 15 bp, Homo sapiens
gttttaatcagaaaa

SEQ ID NO: 1025107 - DNA, 15 bp, Homo sapiens
ttttaatcagaaaaa

SEQ ID NO: 1025108 - DNA, 15 bp, Homo sapiens
tttaatcagaaaaag

SEQ ID NO: 1025109 - DNA, 15 bp, Homo sapiens
ttaatcagaaaaaga

SEQ ID NO: 1025110 - DNA, 15 bp, Homo sapiens
taatcagaaaaagaa

SEQ ID NO: 1025111 - DNA, 15 bp, Homo sapiens
aatcagaaaaagaat

SEQ ID NO: 1025112 - DNA, 15 bp, Homo sapiens
atcagaaaaagaatc

SEQ ID NO: 1025113 - DNA, 15 bp, Homo sapiens
tcagaaaaagaatct

SEQ ID NO: 1025114 - DNA, 15 bp, Homo sapiens
cagaaaaagaatctt

SEQ ID NO: 1025115 - DNA, 15 bp, Homo sapiens
agaaaaagaatcttt

SEQ ID NO: 1025116 - DNA, 15 bp, Homo sapiens
gaaaaagaatctttt

SEQ ID NO: 1025117 - DNA, 15 bp, Homo sapiens
aaaaagaatcttttt

SEQ ID NO: 1025118 - DNA, 15 bp, Homo sapiens
aaaagaatcttttta

SEQ ID NO: 1025119 - DNA, 15 bp, Homo sapiens
aaagaatctttttaa

SEQ ID NO: 1025120 - DNA, 15 bp, Homo sapiens
aagaatctttttaat

SEQ ID NO: 1025121 - DNA, 15 bp, Homo sapiens
agaatctttttaatt

SEQ ID NO: 1025122 - DNA, 15 bp, Homo sapiens
gaatctttttaattt

SEQ ID NO: 1025123 - DNA, 15 bp, Homo sapiens
aatctttttaatttg

SEQ ID NO: 1025124 - DNA, 15 bp, Homo sapiens
atctttttaatttgt

SEQ ID NO: 1025125 - DNA, 15 bp, Homo sapiens
tctttttaatttgta

SEQ ID NO: 1025126 - DNA, 15 bp, Homo sapiens
ctttttaatttgtat

SEQ ID NO: 1025127 - DNA, 15 bp, Homo sapiens
tttttaatttgtata

SEQ ID NO: 1025128 - DNA, 15 bp, Homo sapiens
ttttaatttgtataa

SEQ ID NO: 1025129 - DNA, 15 bp, Homo sapiens
tttaatttgtataat

SEQ ID NO: 1025130 - DNA, 15 bp, Homo sapiens
ttaatttgtataatt

SEQ ID NO: 1025131 - DNA, 15 bp, Homo sapiens
taatttgtataattt

SEQ ID NO: 1025132 - DNA, 15 bp, Homo sapiens
aatttgtataattta

SEQ ID NO: 1025133 - DNA, 15 bp, Homo sapiens
atttgtataatttat

SEQ ID NO: 1025134 - DNA, 15 bp, Homo sapiens
tttgtataatttatt

SEQ ID NO: 1025135 - DNA, 15 bp, Homo sapiens
ttgtataatttatta

SEQ ID NO: 1025136 - DNA, 15 bp, Homo sapiens
tgtataatttattag

SEQ ID NO: 1025137 - DNA, 15 bp, Homo sapiens
gtataatttattaga

SEQ ID NO: 1025138 - DNA, 15 bp, Homo sapiens
tataatttattagaa

SEQ ID NO: 1025139 - DNA, 15 bp, Homo sapiens
ataatttattagaag

SEQ ID NO: 1025140 - DNA, 15 bp, Homo sapiens
taatttattagaagc

SEQ ID NO: 1025141 - DNA, 15 bp, Homo sapiens
aatttattagaagct

SEQ ID NO: 1025142 - DNA, 15 bp, Homo sapiens
atttattagaagctt

SEQ ID NO: 1025143 - DNA, 15 bp, Homo sapiens
tttattagaagcttc

SEQ ID NO: 1025144 - DNA, 15 bp, Homo sapiens
ttattagaagcttct

SEQ ID NO: 1025145 - DNA, 15 bp, Homo sapiens
tattagaagcttctt

SEQ ID NO: 1025146 - DNA, 15 bp, Homo sapiens
attagaagcttctta

SEQ ID NO: 1025147 - DNA, 15 bp, Homo sapiens
ttagaagcttcttag

SEQ ID NO: 1025148 - DNA, 15 bp, Homo sapiens
tagaagcttcttagg

SEQ ID NO: 1025149 - DNA, 15 bp, Homo sapiens
agaagcttcttagga

SEQ ID NO: 1025150 - DNA, 15 bp, Homo sapiens
gaagcttcttaggaa

SEQ ID NO: 1025151 - DNA, 15 bp, Homo sapiens
aagcttcttaggaac

SEQ ID NO: 1025152 - DNA, 15 bp, Homo sapiens
agcttcttaggaact

SEQ ID NO: 1025153 - DNA, 15 bp, Homo sapiens
gcttcttaggaacta

SEQ ID NO: 1025154 - DNA, 15 bp, Homo sapiens
cttcttaggaactat

SEQ ID NO: 1025155 - DNA, 15 bp, Homo sapiens
ttcttaggaactata

SEQ ID NO: 1025156 - DNA, 15 bp, Homo sapiens
tcttaggaactatat

SEQ ID NO: 1025157 - DNA, 15 bp, Homo sapiens
cttaggaactatatt

SEQ ID NO: 1025158 - DNA, 15 bp, Homo sapiens
ttaggaactatattt

SEQ ID NO: 1025159 - DNA, 15 bp, Homo sapiens
taggaactatattta

SEQ ID NO: 1025160 - DNA, 15 bp, Homo sapiens
aggaactatatttaa

SEQ ID NO: 1025161 - DNA, 15 bp, Homo sapiens
ggaactatatttaag

SEQ ID NO: 1025162 - DNA, 15 bp, Homo sapiens
gaactatatttaagc

SEQ ID NO: 1025163 - DNA, 15 bp, Homo sapiens
aactatatttaagcc

SEQ ID NO: 1025164 - DNA, 15 bp, Homo sapiens
actatatttaagcca

SEQ ID NO: 1025165 - DNA, 15 bp, Homo sapiens
ctatatttaagccaa

SEQ ID NO: 1025166 - DNA, 15 bp, Homo sapiens
tatatttaagccaaa

SEQ ID NO: 1025167 - DNA, 15 bp, Homo sapiens
atatttaagccaaat

SEQ ID NO: 1025168 - DNA, 15 bp, Homo sapiens
tatttaagccaaata

SEQ ID NO: 1025169 - DNA, 15 bp, Homo sapiens
atttaagccaaatat

SEQ ID NO: 1025170 - DNA, 15 bp, Homo sapiens
tttaagccaaatatc

SEQ ID NO: 1025171 - DNA, 15 bp, Homo sapiens
ttaagccaaatatct

SEQ ID NO: 1025172 - DNA, 15 bp, Homo sapiens
taagccaaatatcta

SEQ ID NO: 1025173 - DNA, 15 bp, Homo sapiens
aagccaaatatctac

SEQ ID NO: 1025174 - DNA, 15 bp, Homo sapiens
agccaaatatctaca

SEQ ID NO: 1025175 - DNA, 15 bp, Homo sapiens
gccaaatatctacat

SEQ ID NO: 1025176 - DNA, 15 bp, Homo sapiens
ccaaatatctacata

SEQ ID NO: 1025177 - DNA, 15 bp, Homo sapiens
caaatatctacataa

SEQ ID NO: 1025178 - DNA, 15 bp, Homo sapiens
aaatatctacataag

SEQ ID NO: 1025179 - DNA, 15 bp, Homo sapiens
aatatctacataagt

SEQ ID NO: 1025180 - DNA, 15 bp, Homo sapiens
atatctacataagtt

SEQ ID NO: 1025181 - DNA, 15 bp, Homo sapiens
tatctacataagtta

SEQ ID NO: 1025182 - DNA, 15 bp, Homo sapiens
atctacataagttac

SEQ ID NO: 1025183 - DNA, 15 bp, Homo sapiens
tctacataagttaca

SEQ ID NO: 1025184 - DNA, 15 bp, Homo sapiens
ctacataagttacaa

SEQ ID NO: 1025185 - DNA, 15 bp, Homo sapiens
tacataagttacaac

SEQ ID NO: 1025186 - DNA, 15 bp, Homo sapiens
acataagttacaaca

SEQ ID NO: 1025187 - DNA, 15 bp, Homo sapiens
cataagttacaacag

SEQ ID NO: 1025188 - DNA, 15 bp, Homo sapiens
ataagttacaacaga

SEQ ID NO: 1025189 - DNA, 15 bp, Homo sapiens
taagttacaacagaa

SEQ ID NO: 1025190 - DNA, 15 bp, Homo sapiens
aagttacaacagaaa

SEQ ID NO: 1025191 - DNA, 15 bp, Homo sapiens
agttacaacagaaaa

SEQ ID NO: 1025192 - DNA, 15 bp, Homo sapiens
gttacaacagaaaaa

SEQ ID NO: 1025193 - DNA, 15 bp, Homo sapiens
ttacaacagaaaaag

SEQ ID NO: 1025194 - DNA, 15 bp, Homo sapiens
tacaacagaaaaaga

SEQ ID NO: 1025195 - DNA, 15 bp, Homo sapiens
acaacagaaaaagac

SEQ ID NO: 1025196 - DNA, 15 bp, Homo sapiens
caacagaaaaagact

SEQ ID NO: 1025197 - DNA, 15 bp, Homo sapiens
aacagaaaaagactg

SEQ ID NO: 1025198 - DNA, 15 bp, Homo sapiens
acagaaaaagactga

SEQ ID NO: 1025199 - DNA, 15 bp, Homo sapiens
cagaaaaagactgac

SEQ ID NO: 1025200 - DNA, 15 bp, Homo sapiens
agaaaaagactgacg

SEQ ID NO: 1025201 - DNA, 15 bp, Homo sapiens
gaaaaagactgacgc

SEQ ID NO: 1025202 - DNA, 15 bp, Homo sapiens
aaaaagactgacgcc

SEQ ID NO: 1025203 - DNA, 15 bp, Homo sapiens
aaaagactgacgccg

SEQ ID NO: 1025204 - DNA, 15 bp, Homo sapiens
aaagactgacgccgc

SEQ ID NO: 1025205 - DNA, 15 bp, Homo sapiens
aagactgacgccgca

SEQ ID NO: 1025206 - DNA, 15 bp, Homo sapiens
agactgacgccgcaa

SEQ ID NO: 1025207 - DNA, 15 bp, Homo sapiens
gactgacgccgcaaa

SEQ ID NO: 1025208 - DNA, 15 bp, Homo sapiens
actgacgccgcaaat

SEQ ID NO: 1025209 - DNA, 15 bp, Homo sapiens
ctgacgccgcaaata

SEQ ID NO: 1025210 - DNA, 15 bp, Homo sapiens
tgacgccgcaaatac

SEQ ID NO: 1025211 - DNA, 15 bp, Homo sapiens
gacgccgcaaatacc

SEQ ID NO: 1025212 - DNA, 15 bp, Homo sapiens
acgccgcaaatacca

SEQ ID NO: 1025213 - DNA, 15 bp, Homo sapiens
cgccgcaaataccaa

SEQ ID NO: 1025214 - DNA, 15 bp, Homo sapiens
gccgcaaataccaaa

SEQ ID NO: 1025215 - DNA, 15 bp, Homo sapiens
ccgcaaataccaaac

SEQ ID NO: 1025216 - DNA, 15 bp, Homo sapiens
cgcaaataccaaact

SEQ ID NO: 1025217 - DNA, 15 bp, Homo sapiens
gcaaataccaaactg

SEQ ID NO: 1025218 - DNA, 15 bp, Homo sapiens
caaataccaaactgc

SEQ ID NO: 1025219 - DNA, 15 bp, Homo sapiens
aaataccaaactgcc

SEQ ID NO: 1025220 - DNA, 15 bp, Homo sapiens
aataccaaactgcca

SEQ ID NO: 1025221 - DNA, 15 bp, Homo sapiens
ataccaaactgccaa

SEQ ID NO: 1025222 - DNA, 15 bp, Homo sapiens
taccaaactgccaaa

SEQ ID NO: 1025223 - DNA, 15 bp, Homo sapiens
accaaactgccaaat

SEQ ID NO: 1025224 - DNA, 15 bp, Homo sapiens
ccaaactgccaaata

SEQ ID NO: 1025225 - DNA, 15 bp, Homo sapiens
caaactgccaaataa

SEQ ID NO: 1025226 - DNA, 15 bp, Homo sapiens
aaactgccaaataat

SEQ ID NO: 1025227 - DNA, 15 bp, Homo sapiens
aactgccaaataata

SEQ ID NO: 1025228 - DNA, 15 bp, Homo sapiens
actgccaaataatat

SEQ ID NO: 1025229 - DNA, 15 bp, Homo sapiens
ctgccaaataatata

SEQ ID NO: 1025230 - DNA, 15 bp, Homo sapiens
tgccaaataatatac

SEQ ID NO: 1025231 - DNA, 15 bp, Homo sapiens
gccaaataatataca

SEQ ID NO: 1025232 - DNA, 15 bp, Homo sapiens
ccaaataatatacac

SEQ ID NO: 1025233 - DNA, 15 bp, Homo sapiens
caaataatatacaca

SEQ ID NO: 1025234 - DNA, 15 bp, Homo sapiens
aaataatatacacag

SEQ ID NO: 1025235 - DNA, 15 bp, Homo sapiens
aataatatacacaga

SEQ ID NO: 1025236 - DNA, 15 bp, Homo sapiens
ataatatacacagat

SEQ ID NO: 1025237 - DNA, 15 bp, Homo sapiens
taatatacacagatt

SEQ ID NO: 1025238 - DNA, 15 bp, Homo sapiens
aatatacacagattt

SEQ ID NO: 1025239 - DNA, 15 bp, Homo sapiens
atatacacagatttg

SEQ ID NO: 1025240 - DNA, 15 bp, Homo sapiens
tatacacagatttgt

SEQ ID NO: 1025241 - DNA, 15 bp, Homo sapiens
atacacagatttgtc

SEQ ID NO: 1025242 - DNA, 15 bp, Homo sapiens
tacacagatttgtca

SEQ ID NO: 1025243 - DNA, 15 bp, Homo sapiens
acacagatttgtcaa

SEQ ID NO: 1025244 - DNA, 15 bp, Homo sapiens
cacagatttgtcaat

SEQ ID NO: 1025245 - DNA, 15 bp, Homo sapiens
acagatttgtcaatg

SEQ ID NO: 1025246 - DNA, 15 bp, Homo sapiens
cagatttgtcaatgc

SEQ ID NO: 1025247 - DNA, 15 bp, Homo sapiens
agatttgtcaatgcc

SEQ ID NO: 1025248 - DNA, 15 bp, Homo sapiens
gatttgtcaatgccc

SEQ ID NO: 1025249 - DNA, 15 bp, Homo sapiens
atttgtcaatgccca

SEQ ID NO: 1025250 - DNA, 15 bp, Homo sapiens
tttgtcaatgcccat

SEQ ID NO: 1025251 - DNA, 15 bp, Homo sapiens
ttgtcaatgcccata

SEQ ID NO: 1025252 - DNA, 15 bp, Homo sapiens
tgtcaatgcccataa

SEQ ID NO: 1025253 - DNA, 15 bp, Homo sapiens
gtcaatgcccataaa

SEQ ID NO: 1025254 - DNA, 15 bp, Homo sapiens
tcaatgcccataaaa

SEQ ID NO: 1025255 - DNA, 15 bp, Homo sapiens
caatgcccataaaaa

SEQ ID NO: 1025256 - DNA, 15 bp, Homo sapiens
aatgcccataaaaaa

SEQ ID NO: 1025257 - DNA, 15 bp, Homo sapiens
atgcccataaaaaat

SEQ ID NO: 1025258 - DNA, 15 bp, Homo sapiens
tgcccataaaaaatg

SEQ ID NO: 1025259 - DNA, 15 bp, Homo sapiens
gcccataaaaaatgt

SEQ ID NO: 1025260 - DNA, 15 bp, Homo sapiens
cccataaaaaatgtg

SEQ ID NO: 1025261 - DNA, 15 bp, Homo sapiens
ccataaaaaatgtga

SEQ ID NO: 1025262 - DNA, 15 bp, Homo sapiens
cataaaaaatgtgaa

SEQ ID NO: 1025263 - DNA, 15 bp, Homo sapiens
ataaaaaatgtgaag

SEQ ID NO: 1025264 - DNA, 15 bp, Homo sapiens
taaaaaatgtgaagg

SEQ ID NO: 1025265 - DNA, 15 bp, Homo sapiens
aaaaaatgtgaaggg

SEQ ID NO: 1025266 - DNA, 15 bp, Homo sapiens
aaaaatgtgaagggc

SEQ ID NO: 1025267 - DNA, 15 bp, Homo sapiens
aaaatgtgaagggct

SEQ ID NO: 1025268 - DNA, 15 bp, Homo sapiens
aaatgtgaagggctg

SEQ ID NO: 1025269 - DNA, 15 bp, Homo sapiens
aatgtgaagggctgg

SEQ ID NO: 1025270 - DNA, 15 bp, Homo sapiens
atgtgaagggctggg

SEQ ID NO: 1025271 - DNA, 15 bp, Homo sapiens
tgtgaagggctgggg

SEQ ID NO: 1025272 - DNA, 15 bp, Homo sapiens
gtgaagggctgggga

SEQ ID NO: 1025273 - DNA, 15 bp, Homo sapiens
tgaagggctggggac

SEQ ID NO: 1025274 - DNA, 15 bp, Homo sapiens
gaagggctggggact

SEQ ID NO: 1025275 - DNA, 15 bp, Homo sapiens
aagggctggggactg

SEQ ID NO: 1025276 - DNA, 15 bp, Homo sapiens
agggctggggactgg

SEQ ID NO: 1025277 - DNA, 15 bp, Homo sapiens
gggctggggactggg

SEQ ID NO: 1025278 - DNA, 15 bp, Homo sapiens
ggctggggactggga

SEQ ID NO: 1025279 - DNA, 15 bp, Homo sapiens
gctggggactgggag

SEQ ID NO: 1025280 - DNA, 15 bp, Homo sapiens
ctggggactgggagt

SEQ ID NO: 1025281 - DNA, 15 bp, Homo sapiens
tggggactgggagtg

SEQ ID NO: 1025282 - DNA, 15 bp, Homo sapiens
ggggactgggagtgg

SEQ ID NO: 1025283 - DNA, 15 bp, Homo sapiens
gggactgggagtggt

SEQ ID NO: 1025284 - DNA, 15 bp, Homo sapiens
ggactgggagtggtt

SEQ ID NO: 1025285 - DNA, 15 bp, Homo sapiens
gactgggagtggttt

SEQ ID NO: 1025286 - DNA, 15 bp, Homo sapiens
actgggagtggtttt

SEQ ID NO: 1025287 - DNA, 15 bp, Homo sapiens
ctgggagtggttttt

SEQ ID NO: 1025288 - DNA, 15 bp, Homo sapiens
tgggagtggtttttc

SEQ ID NO: 1025289 - DNA, 15 bp, Homo sapiens
gggagtggtttttct

SEQ ID NO: 1025290 - DNA, 15 bp, Homo sapiens
ggagtggtttttctt

SEQ ID NO: 1025291 - DNA, 15 bp, Homo sapiens
gagtggtttttcttt

SEQ ID NO: 1025292 - DNA, 15 bp, Homo sapiens
agtggtttttctttt

SEQ ID NO: 1025293 - DNA, 15 bp, Homo sapiens
gtggtttttcttttt

SEQ ID NO: 1025294 - DNA, 15 bp, Homo sapiens
tggtttttcttttta

SEQ ID NO: 1025295 - DNA, 15 bp, Homo sapiens
ggtttttctttttac

SEQ ID NO: 1025296 - DNA, 15 bp, Homo sapiens
gtttttctttttaca

SEQ ID NO: 1025297 - DNA, 15 bp, Homo sapiens
tttttctttttacaa

SEQ ID NO: 1025298 - DNA, 15 bp, Homo sapiens
ttttctttttacaac

SEQ ID NO: 1025299 - DNA, 15 bp, Homo sapiens
tttctttttacaaca

SEQ ID NO: 1025300 - DNA, 15 bp, Homo sapiens
ttctttttacaacaa

SEQ ID NO: 1025301 - DNA, 15 bp, Homo sapiens
tctttttacaacaaa

SEQ ID NO: 1025302 - DNA, 15 bp, Homo sapiens
ctttttacaacaaaa

SEQ ID NO: 1025303 - DNA, 15 bp, Homo sapiens
tttttacaacaaaat

SEQ ID NO: 1025304 - DNA, 15 bp, Homo sapiens
ttttacaacaaaatg

SEQ ID NO: 1025305 - DNA, 15 bp, Homo sapiens
tttacaacaaaatgt

SEQ ID NO: 1025306 - DNA, 15 bp, Homo sapiens
ttacaacaaaatgta

SEQ ID NO: 1025307 - DNA, 15 bp, Homo sapiens
tacaacaaaatgtac

SEQ ID NO: 1025308 - DNA, 15 bp, Homo sapiens
acaacaaaatgtaca

SEQ ID NO: 1025309 - DNA, 15 bp, Homo sapiens
caacaaaatgtacag

SEQ ID NO: 1025310 - DNA, 15 bp, Homo sapiens
aacaaaatgtacaga

SEQ ID NO: 1025311 - DNA, 15 bp, Homo sapiens
acaaaatgtacagat

SEQ ID NO: 1025312 - DNA, 15 bp, Homo sapiens
caaaatgtacagatt

SEQ ID NO: 1025313 - DNA, 15 bp, Homo sapiens
aaaatgtacagatta

SEQ ID NO: 1025314 - DNA, 15 bp, Homo sapiens
aaatgtacagattac

SEQ ID NO: 1025315 - DNA, 15 bp, Homo sapiens
aatgtacagattact

SEQ ID NO: 1025316 - DNA, 15 bp, Homo sapiens
atgtacagattacta

SEQ ID NO: 1025317 - DNA, 15 bp, Homo sapiens
tgtacagattactaa

SEQ ID NO: 1025318 - DNA, 15 bp, Homo sapiens
gtacagattactaaa

SEQ ID NO: 1025319 - DNA, 15 bp, Homo sapiens
tacagattactaaaa

SEQ ID NO: 1025320 - DNA, 15 bp, Homo sapiens
acagattactaaaaa

SEQ ID NO: 1025321 - DNA, 15 bp, Homo sapiens
cagattactaaaaac

SEQ ID NO: 1025322 - DNA, 15 bp, Homo sapiens
agattactaaaaact

SEQ ID NO: 1025323 - DNA, 15 bp, Homo sapiens
gattactaaaaacta

SEQ ID NO: 1025324 - DNA, 15 bp, Homo sapiens
attactaaaaactag

SEQ ID NO: 1025325 - DNA, 15 bp, Homo sapiens
ttactaaaaactagg

SEQ ID NO: 1025326 - DNA, 15 bp, Homo sapiens
tactaaaaactaggc

SEQ ID NO: 1025327 - DNA, 15 bp, Homo sapiens
actaaaaactaggca

SEQ ID NO: 1025328 - DNA, 15 bp, Homo sapiens
ctaaaaactaggcat

SEQ ID NO: 1025329 - DNA, 15 bp, Homo sapiens
taaaaactaggcatt

SEQ ID NO: 1025330 - DNA, 15 bp, Homo sapiens
aaaaactaggcattt

SEQ ID NO: 1025331 - DNA, 15 bp, Homo sapiens
aaaactaggcattta

SEQ ID NO: 1025332 - DNA, 15 bp, Homo sapiens
aaactaggcatttag

SEQ ID NO: 1025333 - DNA, 15 bp, Homo sapiens
aactaggcatttagt

SEQ ID NO: 1025334 - DNA, 15 bp, Homo sapiens
actaggcatttagtc

SEQ ID NO: 1025335 - DNA, 15 bp, Homo sapiens
ctaggcatttagtcc

SEQ ID NO: 1025336 - DNA, 15 bp, Homo sapiens
taggcatttagtcca

SEQ ID NO: 1025337 - DNA, 15 bp, Homo sapiens
aggcatttagtccaa

SEQ ID NO: 1025338 - DNA, 15 bp, Homo sapiens
ggcatttagtccaac

SEQ ID NO: 1025339 - DNA, 15 bp, Homo sapiens
gcatttagtccaact

SEQ ID NO: 1025340 - DNA, 15 bp, Homo sapiens
catttagtccaactt

SEQ ID NO: 1025341 - DNA, 15 bp, Homo sapiens
atttagtccaacttt

SEQ ID NO: 1025342 - DNA, 15 bp, Homo sapiens
tttagtccaactttt

SEQ ID NO: 1025343 - DNA, 15 bp, Homo sapiens
ttagtccaacttttg

SEQ ID NO: 1025344 - DNA, 15 bp, Homo sapiens
tagtccaacttttga

SEQ ID NO: 1025345 - DNA, 15 bp, Homo sapiens
agtccaacttttgac

SEQ ID NO: 1025346 - DNA, 15 bp, Homo sapiens
gtccaacttttgaca

SEQ ID NO: 1025347 - DNA, 15 bp, Homo sapiens
tccaacttttgacag

SEQ ID NO: 1025348 - DNA, 15 bp, Homo sapiens
ccaacttttgacagc

SEQ ID NO: 1025349 - DNA, 15 bp, Homo sapiens
caacttttgacagcg

SEQ ID NO: 1025350 - DNA, 15 bp, Homo sapiens
aacttttgacagcgt

SEQ ID NO: 1025351 - DNA, 15 bp, Homo sapiens
acttttgacagcgtt

SEQ ID NO: 1025352 - DNA, 15 bp, Homo sapiens
cttttgacagcgttt

SEQ ID NO: 1025353 - DNA, 15 bp, Homo sapiens
ttttgacagcgtttt

SEQ ID NO: 1025354 - DNA, 15 bp, Homo sapiens
tttgacagcgtttta

SEQ ID NO: 1025355 - DNA, 15 bp, Homo sapiens
ttgacagcgttttac

SEQ ID NO: 1025356 - DNA, 15 bp, Homo sapiens
tgacagcgttttaca

SEQ ID NO: 1025357 - DNA, 15 bp, Homo sapiens
gacagcgttttacag

SEQ ID NO: 1025358 - DNA, 15 bp, Homo sapiens
acagcgttttacagc

SEQ ID NO: 1025359 - DNA, 15 bp, Homo sapiens
cagcgttttacagct

SEQ ID NO: 1025360 - DNA, 15 bp, Homo sapiens
agcgttttacagcta

SEQ ID NO: 1025361 - DNA, 15 bp, Homo sapiens
gcgttttacagctac

SEQ ID NO: 1025362 - DNA, 15 bp, Homo sapiens
cgttttacagctaca

SEQ ID NO: 1025363 - DNA, 15 bp, Homo sapiens
gttttacagctacaa

SEQ ID NO: 1025364 - DNA, 15 bp, Homo sapiens
ttttacagctacaag

SEQ ID NO: 1025365 - DNA, 15 bp, Homo sapiens
tttacagctacaagt

SEQ ID NO: 1025366 - DNA, 15 bp, Homo sapiens
ttacagctacaagtt

SEQ ID NO: 1025367 - DNA, 15 bp, Homo sapiens
tacagctacaagttc

SEQ ID NO: 1025368 - DNA, 15 bp, Homo sapiens
acagctacaagttca

SEQ ID NO: 1025369 - DNA, 15 bp, Homo sapiens
cagctacaagttcac

SEQ ID NO: 1025370 - DNA, 15 bp, Homo sapiens
agctacaagttcaca

SEQ ID NO: 1025371 - DNA, 15 bp, Homo sapiens
gctacaagttcacat

SEQ ID NO: 1025372 - DNA, 15 bp, Homo sapiens
ctacaagttcacatt

SEQ ID NO: 1025373 - DNA, 15 bp, Homo sapiens
tacaagttcacatta

SEQ ID NO: 1025374 - DNA, 15 bp, Homo sapiens
acaagttcacattaa

SEQ ID NO: 1025375 - DNA, 15 bp, Homo sapiens
caagttcacattaaa

SEQ ID NO: 1025376 - DNA, 15 bp, Homo sapiens
aagttcacattaaac

SEQ ID NO: 1025377 - DNA, 15 bp, Homo sapiens
agttcacattaaaca

SEQ ID NO: 1025378 - DNA, 15 bp, Homo sapiens
gttcacattaaacaa

SEQ ID NO: 1025379 - DNA, 15 bp, Homo sapiens
ttcacattaaacaaa

SEQ ID NO: 1025380 - DNA, 15 bp, Homo sapiens
tcacattaaacaaac

SEQ ID NO: 1025381 - DNA, 15 bp, Homo sapiens
cacattaaacaaact

SEQ ID NO: 1025382 - DNA, 15 bp, Homo sapiens
acattaaacaaacta

SEQ ID NO: 1025383 - DNA, 15 bp, Homo sapiens
cattaaacaaactat

SEQ ID NO: 1025384 - DNA, 15 bp, Homo sapiens
attaaacaaactatt

SEQ ID NO: 1025385 - DNA, 15 bp, Homo sapiens
ttaaacaaactattt

SEQ ID NO: 1025386 - DNA, 15 bp, Homo sapiens
taaacaaactatttt

SEQ ID NO: 1025387 - DNA, 15 bp, Homo sapiens
aaacaaactattttc

SEQ ID NO: 1025388 - DNA, 15 bp, Homo sapiens
aacaaactattttcg

SEQ ID NO: 1025389 - DNA, 15 bp, Homo sapiens
acaaactattttcgc

SEQ ID NO: 1025390 - DNA, 15 bp, Homo sapiens
caaactattttcgcg

SEQ ID NO: 1025391 - DNA, 15 bp, Homo sapiens
aaactattttcgcgg

SEQ ID NO: 1025392 - DNA, 15 bp, Homo sapiens
aactattttcgcgga

SEQ ID NO: 1025393 - DNA, 15 bp, Homo sapiens
actattttcgcggag

SEQ ID NO: 1025394 - DNA, 15 bp, Homo sapiens
ctattttcgcggagg

SEQ ID NO: 1025395 - DNA, 15 bp, Homo sapiens
tattttcgcggaggg

SEQ ID NO: 1025396 - DNA, 15 bp, Homo sapiens
attttcgcggagggc

SEQ ID NO: 1025397 - DNA, 15 bp, Homo sapiens
ttttcgcggagggcg

SEQ ID NO: 1025398 - DNA, 15 bp, Homo sapiens
tttcgcggagggcgg

SEQ ID NO: 1025399 - DNA, 15 bp, Homo sapiens
ttcgcggagggcggt

SEQ ID NO: 1025400 - DNA, 15 bp, Homo sapiens
tcgcggagggcggtc

SEQ ID NO: 1025401 - DNA, 15 bp, Homo sapiens
cgcggagggcggtcg

SEQ ID NO: 1025402 - DNA, 15 bp, Homo sapiens
gcggagggcggtcgc

SEQ ID NO: 1025403 - DNA, 15 bp, Homo sapiens
cggagggcggtcgcc

SEQ ID NO: 1025404 - DNA, 15 bp, Homo sapiens
ggagggcggtcgccg

SEQ ID NO: 1025405 - DNA, 15 bp, Homo sapiens
gagggcggtcgccgc

SEQ ID NO: 1025406 - DNA, 15 bp, Homo sapiens
agggcggtcgccgct

SEQ ID NO: 1025407 - DNA, 15 bp, Homo sapiens
gggcggtcgccgctg

SEQ ID NO: 1025408 - DNA, 15 bp, Homo sapiens
ggcggtcgccgctga

SEQ ID NO: 1025409 - DNA, 15 bp, Homo sapiens
gcggtcgccgctgag

SEQ ID NO: 1025410 - DNA, 15 bp, Homo sapiens
cggtcgccgctgagc

SEQ ID NO: 1025411 - DNA, 15 bp, Homo sapiens
ggtcgccgctgagcc

SEQ ID NO: 1025412 - DNA, 15 bp, Homo sapiens
gtcgccgctgagcct

SEQ ID NO: 1025413 - DNA, 15 bp, Homo sapiens
tcgccgctgagccta

SEQ ID NO: 1025414 - DNA, 15 bp, Homo sapiens
cgccgctgagcctag

SEQ ID NO: 1025415 - DNA, 15 bp, Homo sapiens
gccgctgagcctagg

SEQ ID NO: 1025416 - DNA, 15 bp, Homo sapiens
ccgctgagcctaggc

SEQ ID NO: 1025417 - DNA, 15 bp, Homo sapiens
cgctgagcctaggcg

SEQ ID NO: 1025418 - DNA, 15 bp, Homo sapiens
gctgagcctaggcgg

SEQ ID NO: 1025419 - DNA, 15 bp, Homo sapiens
ctgagcctaggcggc

SEQ ID NO: 1025420 - DNA, 15 bp, Homo sapiens
tgagcctaggcggcc

SEQ ID NO: 1025421 - DNA, 15 bp, Homo sapiens
gagcctaggcggcca

SEQ ID NO: 1025422 - DNA, 15 bp, Homo sapiens
agcctaggcggccag

SEQ ID NO: 1025423 - DNA, 15 bp, Homo sapiens
gcctaggcggccaga

SEQ ID NO: 1025424 - DNA, 15 bp, Homo sapiens
cctaggcggccagag

SEQ ID NO: 1025425 - DNA, 15 bp, Homo sapiens
ctaggcggccagagg

SEQ ID NO: 1025426 - DNA, 15 bp, Homo sapiens
taggcggccagaggg

SEQ ID NO: 1025427 - DNA, 15 bp, Homo sapiens
aggcggccagagggt

SEQ ID NO: 1025428 - DNA, 15 bp, Homo sapiens
ggcggccagagggtg

SEQ ID NO: 1025429 - DNA, 15 bp, Homo sapiens
gcggccagagggtgc

SEQ ID NO: 1025430 - DNA, 15 bp, Homo sapiens
cggccagagggtgcc

SEQ ID NO: 1025431 - DNA, 15 bp, Homo sapiens
ggccagagggtgccg

SEQ ID NO: 1025432 - DNA, 15 bp, Homo sapiens
gccagagggtgccgg

SEQ ID NO: 1025433 - DNA, 15 bp, Homo sapiens
ccagagggtgccggg

SEQ ID NO: 1025434 - DNA, 15 bp, Homo sapiens
cagagggtgccgggg

SEQ ID NO: 1025435 - DNA, 15 bp, Homo sapiens
agagggtgccgggga

SEQ ID NO: 1025436 - DNA, 15 bp, Homo sapiens
gagggtgccggggag

SEQ ID NO: 1025437 - DNA, 15 bp, Homo sapiens
agggtgccggggagg

SEQ ID NO: 1025438 - DNA, 15 bp, Homo sapiens
gggtgccggggaggg

SEQ ID NO: 1025439 - DNA, 15 bp, Homo sapiens
ggtgccggggagggg

SEQ ID NO: 1025440 - DNA, 15 bp, Homo sapiens
gtgccggggaggggg

SEQ ID NO: 1025441 - DNA, 15 bp, Homo sapiens
tgccggggagggggc

SEQ ID NO: 1025442 - DNA, 15 bp, Homo sapiens
gccggggagggggca

SEQ ID NO: 1025443 - DNA, 15 bp, Homo sapiens
ccggggagggggcac

SEQ ID NO: 1025444 - DNA, 15 bp, Homo sapiens
cggggagggggcact

SEQ ID NO: 1025445 - DNA, 15 bp, Homo sapiens
ggggagggggcactt

SEQ ID NO: 1025446 - DNA, 15 bp, Homo sapiens
gggagggggcacttc

SEQ ID NO: 1025447 - DNA, 15 bp, Homo sapiens
ggagggggcacttcc

SEQ ID NO: 1025448 - DNA, 15 bp, Homo sapiens
gagggggcacttcct

SEQ ID NO: 1025449 - DNA, 15 bp, Homo sapiens
agggggcacttcctt

SEQ ID NO: 1025450 - DNA, 15 bp, Homo sapiens
gggggcacttccttt

SEQ ID NO: 1025451 - DNA, 15 bp, Homo sapiens
ggggcacttcctttg

SEQ ID NO: 1025452 - DNA, 15 bp, Homo sapiens
gggcacttcctttgt

SEQ ID NO: 1025453 - DNA, 15 bp, Homo sapiens
ggcacttcctttgtg

SEQ ID NO: 1025454 - DNA, 15 bp, Homo sapiens
gcacttcctttgtgt

SEQ ID NO: 1025455 - DNA, 15 bp, Homo sapiens
cacttcctttgtgtc

SEQ ID NO: 1025456 - DNA, 15 bp, Homo sapiens
acttcctttgtgtca

SEQ ID NO: 1025457 - DNA, 15 bp, Homo sapiens
cttcctttgtgtcag

SEQ ID NO: 1025458 - DNA, 15 bp, Homo sapiens
ttcctttgtgtcagt

SEQ ID NO: 1025459 - DNA, 15 bp, Homo sapiens
tcctttgtgtcagtg

SEQ ID NO: 1025460 - DNA, 15 bp, Homo sapiens
cctttgtgtcagtga

SEQ ID NO: 1025461 - DNA, 15 bp, Homo sapiens
ctttgtgtcagtgac

SEQ ID NO: 1025462 - DNA, 15 bp, Homo sapiens
tttgtgtcagtgaca

SEQ ID NO: 1025463 - DNA, 15 bp, Homo sapiens
ttgtgtcagtgacaa

SEQ ID NO: 1025464 - DNA, 15 bp, Homo sapiens
tgtgtcagtgacaag

SEQ ID NO: 1025465 - DNA, 15 bp, Homo sapiens
gtgtcagtgacaagt

SEQ ID NO: 1025466 - DNA, 15 bp, Homo sapiens
tgtcagtgacaagtg

SEQ ID NO: 1025467 - DNA, 15 bp, Homo sapiens
gtcagtgacaagtgg

SEQ ID NO: 1025468 - DNA, 15 bp, Homo sapiens
tcagtgacaagtggg

SEQ ID NO: 1025469 - DNA, 15 bp, Homo sapiens
cagtgacaagtgggt

SEQ ID NO: 1025470 - DNA, 15 bp, Homo sapiens
agtgacaagtgggtt

SEQ ID NO: 1025471 - DNA, 15 bp, Homo sapiens
gtgacaagtgggtta

SEQ ID NO: 1025472 - DNA, 15 bp, Homo sapiens
tgacaagtgggttat

SEQ ID NO: 1025473 - DNA, 15 bp, Homo sapiens
gacaagtgggttatg

SEQ ID NO: 1025474 - DNA, 15 bp, Homo sapiens
acaagtgggttatgt

SEQ ID NO: 1025475 - DNA, 15 bp, Homo sapiens
caagtgggttatgtt

SEQ ID NO: 1025476 - DNA, 15 bp, Homo sapiens
aagtgggttatgttg

SEQ ID NO: 1025477 - DNA, 15 bp, Homo sapiens
agtgggttatgttga

SEQ ID NO: 1025478 - DNA, 15 bp, Homo sapiens
gtgggttatgttgaa

SEQ ID NO: 1025479 - DNA, 15 bp, Homo sapiens
tgggttatgttgaag

SEQ ID NO: 1025480 - DNA, 15 bp, Homo sapiens
gggttatgttgaaga

SEQ ID NO: 1025481 - DNA, 15 bp, Homo sapiens
ggttatgttgaagac

SEQ ID NO: 1025482 - DNA, 15 bp, Homo sapiens
gttatgttgaagact

SEQ ID NO: 1025483 - DNA, 15 bp, Homo sapiens
ttatgttgaagactc

SEQ ID NO: 1025484 - DNA, 15 bp, Homo sapiens
tatgttgaagactct

SEQ ID NO: 1025485 - DNA, 15 bp, Homo sapiens
atgttgaagactctt

SEQ ID NO: 1025486 - DNA, 15 bp, Homo sapiens
tgttgaagactcttt

SEQ ID NO: 1025487 - DNA, 15 bp, Homo sapiens
gttgaagactctttc

SEQ ID NO: 1025488 - DNA, 15 bp, Homo sapiens
ttgaagactctttcc

SEQ ID NO: 1025489 - DNA, 15 bp, Homo sapiens
tgaagactctttcct

SEQ ID NO: 1025490 - DNA, 15 bp, Homo sapiens
gaagactctttcctc

SEQ ID NO: 1025491 - DNA, 15 bp, Homo sapiens
aagactctttcctct

SEQ ID NO: 1025492 - DNA, 15 bp, Homo sapiens
agactctttcctctc

SEQ ID NO: 1025493 - DNA, 15 bp, Homo sapiens
gactctttcctctcc

SEQ ID NO: 1025494 - DNA, 15 bp, Homo sapiens
actctttcctctccc

SEQ ID NO: 1025495 - DNA, 15 bp, Homo sapiens
ctctttcctctcccc

SEQ ID NO: 1025496 - DNA, 15 bp, Homo sapiens
tctttcctctcccca

SEQ ID NO: 1025497 - DNA, 15 bp, Homo sapiens
ctttcctctccccag

SEQ ID NO: 1025498 - DNA, 15 bp, Homo sapiens
tttcctctccccagc

SEQ ID NO: 1025499 - DNA, 15 bp, Homo sapiens
ttcctctccccagct

SEQ ID NO: 1025500 - DNA, 15 bp, Homo sapiens
tcctctccccagctc

SEQ ID NO: 1025501 - DNA, 15 bp, Homo sapiens
cctctccccagctcc

SEQ ID NO: 1025502 - DNA, 15 bp, Homo sapiens
ctctccccagctccc

SEQ ID NO: 1025503 - DNA, 15 bp, Homo sapiens
tctccccagctcccg

SEQ ID NO: 1025504 - DNA, 15 bp, Homo sapiens
ctccccagctcccgt

SEQ ID NO: 1025505 - DNA, 15 bp, Homo sapiens
tccccagctcccgtc

SEQ ID NO: 1025506 - DNA, 15 bp, Homo sapiens
ccccagctcccgtcc

SEQ ID NO: 1025507 - DNA, 15 bp, Homo sapiens
cccagctcccgtcct

SEQ ID NO: 1025508 - DNA, 15 bp, Homo sapiens
ccagctcccgtcctc

SEQ ID NO: 1025509 - DNA, 15 bp, Homo sapiens
cagctcccgtcctcc

SEQ ID NO: 1025510 - DNA, 15 bp, Homo sapiens
agctcccgtcctccc

SEQ ID NO: 1025511 - DNA, 15 bp, Homo sapiens
gctcccgtcctccct

SEQ ID NO: 1025512 - DNA, 15 bp, Homo sapiens
ctcccgtcctccctt

SEQ ID NO: 1025513 - DNA, 15 bp, Homo sapiens
tcccgtcctcccttc

SEQ ID NO: 1025514 - DNA, 15 bp, Homo sapiens
cccgtcctcccttca

SEQ ID NO: 1025515 - DNA, 15 bp, Homo sapiens
ccgtcctcccttcaa

SEQ ID NO: 1025516 - DNA, 15 bp, Homo sapiens
cgtcctcccttcaaa

SEQ ID NO: 1025517 - DNA, 15 bp, Homo sapiens
gtcctcccttcaaaa

SEQ ID NO: 1025518 - DNA, 15 bp, Homo sapiens
tcctcccttcaaaaa

SEQ ID NO: 1025519 - DNA, 15 bp, Homo sapiens
cctcccttcaaaaaa

SEQ ID NO: 1025520 - DNA, 15 bp, Homo sapiens
ctcccttcaaaaaaa

SEQ ID NO: 1025521 - DNA, 15 bp, Homo sapiens
tcccttcaaaaaaaa

SEQ ID NO: 1025522 - DNA, 15 bp, Homo sapiens
cccttcaaaaaaaaa

SEQ ID NO: 1025523 - DNA, 15 bp, Homo sapiens
ccttcaaaaaaaaaa

SEQ ID NO: 1025524 - DNA, 15 bp, Homo sapiens
cttcaaaaaaaaaaa

SEQ ID NO: 1025525 - DNA, 15 bp, Homo sapiens
ttcaaaaaaaaaaaa

SEQ ID NO: 1025526 - DNA, 15 bp, Homo sapiens
tcaaaaaaaaaaaaa

SEQ ID NO: 1025527 - DNA, 15 bp, Homo sapiens
caaaaaaaaaaaaaa

SEQ ID NO: 1025528 - DNA, 15 bp, Homo sapiens
aaaaaaaaaaaaaaa

SEQ ID NO: 1025529 - DNA, 15 bp, Homo sapiens
aaaaaaaaaaaaaat

SEQ ID NO: 1025530 - DNA, 15 bp, Homo sapiens
aaaaaaaaaaaaatc

SEQ ID NO: 1025531 - DNA, 15 bp, Homo sapiens
aaaaaaaaaaaatcc

SEQ ID NO: 1025532 - DNA, 15 bp, Homo sapiens
aaaaaaaaaaatcct

SEQ ID NO: 1025533 - DNA, 15 bp, Homo sapiens
aaaaaaaaaatcctg

SEQ ID NO: 1025534 - DNA, 15 bp, Homo sapiens
aaaaaaaaatcctgg

SEQ ID NO: 1025535 - DNA, 15 bp, Homo sapiens
aaaaaaaatcctggt

SEQ ID NO: 1025536 - DNA, 15 bp, Homo sapiens
aaaaaaatcctggta

SEQ ID NO: 1025537 - DNA, 15 bp, Homo sapiens
aaaaaatcctggtat

SEQ ID NO: 1025538 - DNA, 15 bp, Homo sapiens
aaaaatcctggtatt

SEQ ID NO: 1025539 - DNA, 15 bp, Homo sapiens
aaaatcctggtattt

SEQ ID NO: 1025540 - DNA, 15 bp, Homo sapiens
aaatcctggtattta

SEQ ID NO: 1025541 - DNA, 15 bp, Homo sapiens
aatcctggtatttac

SEQ ID NO: 1025542 - DNA, 15 bp, Homo sapiens
atcctggtatttaca

SEQ ID NO: 1025543 - DNA, 15 bp, Homo sapiens
tcctggtatttacaa

SEQ ID NO: 1025544 - DNA, 15 bp, Homo sapiens
cctggtatttacaag

SEQ ID NO: 1025545 - DNA, 15 bp, Homo sapiens
ctggtatttacaagc

SEQ ID NO: 1025546 - DNA, 15 bp, Homo sapiens
tggtatttacaagcg

SEQ ID NO: 1025547 - DNA, 15 bp, Homo sapiens
ggtatttacaagcga

SEQ ID NO: 1025548 - DNA, 15 bp, Homo sapiens
gtatttacaagcgag

SEQ ID NO: 1025549 - DNA, 15 bp, Homo sapiens
tatttacaagcgagt

SEQ ID NO: 1025550 - DNA, 15 bp, Homo sapiens
atttacaagcgagtc

SEQ ID NO: 1025551 - DNA, 15 bp, Homo sapiens
tttacaagcgagtcc

SEQ ID NO: 1025552 - DNA, 15 bp, Homo sapiens
ttacaagcgagtcct

SEQ ID NO: 1025553 - DNA, 15 bp, Homo sapiens
tacaagcgagtcctc

SEQ ID NO: 1025554 - DNA, 15 bp, Homo sapiens
acaagcgagtcctct

SEQ ID NO: 1025555 - DNA, 15 bp, Homo sapiens
caagcgagtcctctt

SEQ ID NO: 1025556 - DNA, 15 bp, Homo sapiens
aagcgagtcctcttt

SEQ ID NO: 1025557 - DNA, 15 bp, Homo sapiens
agcgagtcctctttg

SEQ ID NO: 1025558 - DNA, 15 bp, Homo sapiens
gcgagtcctctttgc

SEQ ID NO: 1025559 - DNA, 15 bp, Homo sapiens
cgagtcctctttgct

SEQ ID NO: 1025560 - DNA, 15 bp, Homo sapiens
gagtcctctttgctg

SEQ ID NO: 1025561 - DNA, 15 bp, Homo sapiens
agtcctctttgctgg

SEQ ID NO: 1025562 - DNA, 15 bp, Homo sapiens
gtcctctttgctggc

SEQ ID NO: 1025563 - DNA, 15 bp, Homo sapiens
tcctctttgctggca

SEQ ID NO: 1025564 - DNA, 15 bp, Homo sapiens
cctctttgctggcag

SEQ ID NO: 1025565 - DNA, 15 bp, Homo sapiens
ctctttgctggcaga

SEQ ID NO: 1025566 - DNA, 15 bp, Homo sapiens
tctttgctggcagag

SEQ ID NO: 1025567 - DNA, 15 bp, Homo sapiens
ctttgctggcagagt

SEQ ID NO: 1025568 - DNA, 15 bp, Homo sapiens
tttgctggcagagtg

SEQ ID NO: 1025569 - DNA, 15 bp, Homo sapiens
ttgctggcagagtgt

SEQ ID NO: 1025570 - DNA, 15 bp, Homo sapiens
tgctggcagagtgtg

SEQ ID NO: 1025571 - DNA, 15 bp, Homo sapiens
gctggcagagtgtgc

SEQ ID NO: 1025572 - DNA, 15 bp, Homo sapiens
ctggcagagtgtgcc

SEQ ID NO: 1025573 - DNA, 15 bp, Homo sapiens
tggcagagtgtgccc

SEQ ID NO: 1025574 - DNA, 15 bp, Homo sapiens
ggcagagtgtgccca

SEQ ID NO: 1025575 - DNA, 15 bp, Homo sapiens
gcagagtgtgcccag

SEQ ID NO: 1025576 - DNA, 15 bp, Homo sapiens
cagagtgtgcccaga

SEQ ID NO: 1025577 - DNA, 15 bp, Homo sapiens
agagtgtgcccagag

SEQ ID NO: 1025578 - DNA, 15 bp, Homo sapiens
gagtgtgcccagagt

SEQ ID NO: 1025579 - DNA, 15 bp, Homo sapiens
agtgtgcccagagtg

SEQ ID NO: 1025580 - DNA, 15 bp, Homo sapiens
gtgtgcccagagtga

SEQ ID NO: 1025581 - DNA, 15 bp, Homo sapiens
tgtgcccagagtgaa

SEQ ID NO: 1025582 - DNA, 15 bp, Homo sapiens
gtgcccagagtgaag

SEQ ID NO: 1025583 - DNA, 15 bp, Homo sapiens
tgcccagagtgaagt

SEQ ID NO: 1025584 - DNA, 15 bp, Homo sapiens
gcccagagtgaagtt

SEQ ID NO: 1025585 - DNA, 15 bp, Homo sapiens
cccagagtgaagttt

SEQ ID NO: 1025586 - DNA, 15 bp, Homo sapiens
ccagagtgaagtttg

SEQ ID NO: 1025587 - DNA, 15 bp, Homo sapiens
cagagtgaagtttgg

SEQ ID NO: 1025588 - DNA, 15 bp, Homo sapiens
agagtgaagtttggt

SEQ ID NO: 1025589 - DNA, 15 bp, Homo sapiens
gagtgaagtttggtc

SEQ ID NO: 1025590 - DNA, 15 bp, Homo sapiens
agtgaagtttggtct

SEQ ID NO: 1025591 - DNA, 15 bp, Homo sapiens
gtgaagtttggtctt

SEQ ID NO: 1025592 - DNA, 15 bp, Homo sapiens
tgaagtttggtcttt

SEQ ID NO: 1025593 - DNA, 15 bp, Homo sapiens
gaagtttggtcttta

SEQ ID NO: 1025594 - DNA, 15 bp, Homo sapiens
aagtttggtctttag

SEQ ID NO: 1025595 - DNA, 15 bp, Homo sapiens
agtttggtctttaga

SEQ ID NO: 1025596 - DNA, 15 bp, Homo sapiens
gtttggtctttagag

SEQ ID NO: 1025597 - DNA, 15 bp, Homo sapiens
tttggtctttagagt

SEQ ID NO: 1025598 - DNA, 15 bp, Homo sapiens
ttggtctttagagtc

SEQ ID NO: 1025599 - DNA, 15 bp, Homo sapiens
tggtctttagagtcc

SEQ ID NO: 1025600 - DNA, 15 bp, Homo sapiens
ggtctttagagtcca

SEQ ID NO: 1025601 - DNA, 15 bp, Homo sapiens
gtctttagagtccag

SEQ ID NO: 1025602 - DNA, 15 bp, Homo sapiens
tctttagagtccaga

SEQ ID NO: 1025603 - DNA, 15 bp, Homo sapiens
ctttagagtccagag

SEQ ID NO: 1025604 - DNA, 15 bp, Homo sapiens
tttagagtccagagc

SEQ ID NO: 1025605 - DNA, 15 bp, Homo sapiens
ttagagtccagagcc

SEQ ID NO: 1025606 - DNA, 15 bp, Homo sapiens
tagagtccagagcca

SEQ ID NO: 1025607 - DNA, 15 bp, Homo sapiens
agagtccagagccat

SEQ ID NO: 1025608 - DNA, 15 bp, Homo sapiens
gagtccagagccatg

SEQ ID NO: 1025609 - DNA, 15 bp, Homo sapiens
agtccagagccatgt

SEQ ID NO: 1025610 - DNA, 15 bp, Homo sapiens
gtccagagccatgtc

SEQ ID NO: 1025611 - DNA, 15 bp, Homo sapiens
tccagagccatgtca

SEQ ID NO: 1025612 - DNA, 15 bp, Homo sapiens
ccagagccatgtcag

SEQ ID NO: 1025613 - DNA, 15 bp, Homo sapiens
cagagccatgtcagc

SEQ ID NO: 1025614 - DNA, 15 bp, Homo sapiens
agagccatgtcagca

SEQ ID NO: 1025615 - DNA, 15 bp, Homo sapiens
gagccatgtcagcac

SEQ ID NO: 1025616 - DNA, 15 bp, Homo sapiens
agccatgtcagcaca

SEQ ID NO: 1025617 - DNA, 15 bp, Homo sapiens
gccatgtcagcacag

SEQ ID NO: 1025618 - DNA, 15 bp, Homo sapiens
ccatgtcagcacaga

SEQ ID NO: 1025619 - DNA, 15 bp, Homo sapiens
catgtcagcacagag

SEQ ID NO: 1025620 - DNA, 15 bp, Homo sapiens
atgtcagcacagagc

SEQ ID NO: 1025621 - DNA, 15 bp, Homo sapiens
tgtcagcacagagcc

SEQ ID NO: 1025622 - DNA, 15 bp, Homo sapiens
gtcagcacagagccc

SEQ ID NO: 1025623 - DNA, 15 bp, Homo sapiens
tcagcacagagccct

SEQ ID NO: 1025624 - DNA, 15 bp, Homo sapiens
cagcacagagccctc

SEQ ID NO: 1025625 - DNA, 15 bp, Homo sapiens
agcacagagccctct

SEQ ID NO: 1025626 - DNA, 15 bp, Homo sapiens
gcacagagccctctc

SEQ ID NO: 1025627 - DNA, 15 bp, Homo sapiens
cacagagccctctcc

SEQ ID NO: 1025628 - DNA, 15 bp, Homo sapiens
acagagccctctcca

SEQ ID NO: 1025629 - DNA, 15 bp, Homo sapiens
cagagccctctccaa

SEQ ID NO: 1025630 - DNA, 15 bp, Homo sapiens
agagccctctccaat

SEQ ID NO: 1025631 - DNA, 15 bp, Homo sapiens
gagccctctccaatc

SEQ ID NO: 1025632 - DNA, 15 bp, Homo sapiens
agccctctccaatct

SEQ ID NO: 1025633 - DNA, 15 bp, Homo sapiens
gccctctccaatctg

SEQ ID NO: 1025634 - DNA, 15 bp, Homo sapiens
ccctctccaatctgt

SEQ ID NO: 1025635 - DNA, 15 bp, Homo sapiens
cctctccaatctgtg

SEQ ID NO: 1025636 - DNA, 15 bp, Homo sapiens
ctctccaatctgtgc

SEQ ID NO: 1025637 - DNA, 15 bp, Homo sapiens
tctccaatctgtgcc

SEQ ID NO: 1025638 - DNA, 15 bp, Homo sapiens
ctccaatctgtgccc

SEQ ID NO: 1025639 - DNA, 15 bp, Homo sapiens
tccaatctgtgcccc

SEQ ID NO: 1025640 - DNA, 15 bp, Homo sapiens
ccaatctgtgccccg

SEQ ID NO: 1025641 - DNA, 15 bp, Homo sapiens
caatctgtgccccgc

SEQ ID NO: 1025642 - DNA, 15 bp, Homo sapiens
aatctgtgccccgcc

SEQ ID NO: 1025643 - DNA, 15 bp, Homo sapiens
atctgtgccccgccc

SEQ ID NO: 1025644 - DNA, 15 bp, Homo sapiens
tctgtgccccgccct

SEQ ID NO: 1025645 - DNA, 15 bp, Homo sapiens
ctgtgccccgcccta

SEQ ID NO: 1025646 - DNA, 15 bp, Homo sapiens
tgtgccccgccctag

SEQ ID NO: 1025647 - DNA, 15 bp, Homo sapiens
gtgccccgccctagc

SEQ ID NO: 1025648 - DNA, 15 bp, Homo sapiens
tgccccgccctagcg

SEQ ID NO: 1025649 - DNA, 15 bp, Homo sapiens
gccccgccctagcgt

SEQ ID NO: 1025650 - DNA, 15 bp, Homo sapiens
ccccgccctagcgtg

SEQ ID NO: 1025651 - DNA, 15 bp, Homo sapiens
cccgccctagcgtgg

SEQ ID NO: 1025652 - DNA, 15 bp, Homo sapiens
ccgccctagcgtgga

SEQ ID NO: 1025653 - DNA, 15 bp, Homo sapiens
cgccctagcgtggaa

SEQ ID NO: 1025654 - DNA, 15 bp, Homo sapiens
gccctagcgtggaaa

SEQ ID NO: 1025655 - DNA, 15 bp, Homo sapiens
ccctagcgtggaaaa

SEQ ID NO: 1025656 - DNA, 15 bp, Homo sapiens
cctagcgtggaaaac

SEQ ID NO: 1025657 - DNA, 15 bp, Homo sapiens
ctagcgtggaaaacc

SEQ ID NO: 1025658 - DNA, 15 bp, Homo sapiens
tagcgtggaaaaccc

SEQ ID NO: 1025659 - DNA, 15 bp, Homo sapiens
agcgtggaaaaccca

SEQ ID NO: 1025660 - DNA, 15 bp, Homo sapiens
gcgtggaaaacccat

SEQ ID NO: 1025661 - DNA, 15 bp, Homo sapiens
cgtggaaaacccatt

SEQ ID NO: 1025662 - DNA, 15 bp, Homo sapiens
gtggaaaacccattt

SEQ ID NO: 1025663 - DNA, 15 bp, Homo sapiens
tggaaaacccatttg

SEQ ID NO: 1025664 - DNA, 15 bp, Homo sapiens
ggaaaacccatttga

SEQ ID NO: 1025665 - DNA, 15 bp, Homo sapiens
gaaaacccatttgaa

SEQ ID NO: 1025666 - DNA, 15 bp, Homo sapiens
aaaacccatttgaat

SEQ ID NO: 1025667 - DNA, 15 bp, Homo sapiens
aaacccatttgaatc

SEQ ID NO: 1025668 - DNA, 15 bp, Homo sapiens
aacccatttgaatca

SEQ ID NO: 1025669 - DNA, 15 bp, Homo sapiens
acccatttgaatcac

SEQ ID NO: 1025670 - DNA, 15 bp, Homo sapiens
cccatttgaatcacc

SEQ ID NO: 1025671 - DNA, 15 bp, Homo sapiens
ccatttgaatcacca

SEQ ID NO: 1025672 - DNA, 15 bp, Homo sapiens
catttgaatcaccaa

SEQ ID NO: 1025673 - DNA, 15 bp, Homo sapiens
atttgaatcaccaaa

SEQ ID NO: 1025674 - DNA, 15 bp, Homo sapiens
tttgaatcaccaaaa

SEQ ID NO: 1025675 - DNA, 15 bp, Homo sapiens
ttgaatcaccaaaaa

SEQ ID NO: 1025676 - DNA, 15 bp, Homo sapiens
tgaatcaccaaaaaa

SEQ ID NO: 1025677 - DNA, 15 bp, Homo sapiens
gaatcaccaaaaaaa

SEQ ID NO: 1025678 - DNA, 15 bp, Homo sapiens
aatcaccaaaaaaag

SEQ ID NO: 1025679 - DNA, 15 bp, Homo sapiens
atcaccaaaaaaaga

SEQ ID NO: 1025680 - DNA, 15 bp, Homo sapiens
tcaccaaaaaaagac

SEQ ID NO: 1025681 - DNA, 15 bp, Homo sapiens
caccaaaaaaagaca

SEQ ID NO: 1025682 - DNA, 15 bp, Homo sapiens
accaaaaaaagacac

SEQ ID NO: 1025683 - DNA, 15 bp, Homo sapiens
ccaaaaaaagacacc

SEQ ID NO: 1025684 - DNA, 15 bp, Homo sapiens
caaaaaaagacaccc

SEQ ID NO: 1025685 - DNA, 15 bp, Homo sapiens
aaaaaaagacacccc

SEQ ID NO: 1025686 - DNA, 15 bp, Homo sapiens
aaaaaagacacccca

SEQ ID NO: 1025687 - DNA, 15 bp, Homo sapiens
aaaaagacaccccaa

SEQ ID NO: 1025688 - DNA, 15 bp, Homo sapiens
aaaagacaccccaaa

SEQ ID NO: 1025689 - DNA, 15 bp, Homo sapiens
aaagacaccccaaag

SEQ ID NO: 1025690 - DNA, 15 bp, Homo sapiens
aagacaccccaaagc

SEQ ID NO: 1025691 - DNA, 15 bp, Homo sapiens
agacaccccaaagct

SEQ ID NO: 1025692 - DNA, 15 bp, Homo sapiens
gacaccccaaagctg

SEQ ID NO: 1025693 - DNA, 15 bp, Homo sapiens
acaccccaaagctgt

SEQ ID NO: 1025694 - DNA, 15 bp, Homo sapiens
caccccaaagctgtt

SEQ ID NO: 1025695 - DNA, 15 bp, Homo sapiens
accccaaagctgttt

SEQ ID NO: 1025696 - DNA, 15 bp, Homo sapiens
ccccaaagctgtttt

SEQ ID NO: 1025697 - DNA, 15 bp, Homo sapiens
cccaaagctgtttta

SEQ ID NO: 1025698 - DNA, 15 bp, Homo sapiens
ccaaagctgttttat

SEQ ID NO: 1025699 - DNA, 15 bp, Homo sapiens
caaagctgttttatg

SEQ ID NO: 1025700 - DNA, 15 bp, Homo sapiens
aaagctgttttatgc

SEQ ID NO: 1025701 - DNA, 15 bp, Homo sapiens
aagctgttttatgcc

SEQ ID NO: 1025702 - DNA, 15 bp, Homo sapiens
agctgttttatgccc

SEQ ID NO: 1025703 - DNA, 15 bp, Homo sapiens
gctgttttatgccct

SEQ ID NO: 1025704 - DNA, 15 bp, Homo sapiens
ctgttttatgccctt

SEQ ID NO: 1025705 - DNA, 15 bp, Homo sapiens
tgttttatgcccttc

SEQ ID NO: 1025706 - DNA, 15 bp, Homo sapiens
gttttatgcccttct

SEQ ID NO: 1025707 - DNA, 15 bp, Homo sapiens
ttttatgcccttctc

SEQ ID NO: 1025708 - DNA, 15 bp, Homo sapiens
tttatgcccttctct

SEQ ID NO: 1025709 - DNA, 15 bp, Homo sapiens
ttatgcccttctctg

SEQ ID NO: 1025710 - DNA, 15 bp, Homo sapiens
tatgcccttctctgc

SEQ ID NO: 1025711 - DNA, 15 bp, Homo sapiens
atgcccttctctgct

SEQ ID NO: 1025712 - DNA, 15 bp, Homo sapiens
tgcccttctctgctt

SEQ ID NO: 1025713 - DNA, 15 bp, Homo sapiens
gcccttctctgctta

SEQ ID NO: 1025714 - DNA, 15 bp, Homo sapiens
cccttctctgcttaa

SEQ ID NO: 1025715 - DNA, 15 bp, Homo sapiens
ccttctctgcttaaa

SEQ ID NO: 1025716 - DNA, 15 bp, Homo sapiens
cttctctgcttaaag

SEQ ID NO: 1025717 - DNA, 15 bp, Homo sapiens
ttctctgcttaaaga

SEQ ID NO: 1025718 - DNA, 15 bp, Homo sapiens
tctctgcttaaagat

SEQ ID NO: 1025719 - DNA, 15 bp, Homo sapiens
ctctgcttaaagatt

SEQ ID NO: 1025720 - DNA, 15 bp, Homo sapiens
tctgcttaaagattc

SEQ ID NO: 1025721 - DNA, 15 bp, Homo sapiens
ctgcttaaagattcc

SEQ ID NO: 1025722 - DNA, 15 bp, Homo sapiens
tgcttaaagattcct

SEQ ID NO: 1025723 - DNA, 15 bp, Homo sapiens
gcttaaagattcctt

SEQ ID NO: 1025724 - DNA, 15 bp, Homo sapiens
cttaaagattccttg

SEQ ID NO: 1025725 - DNA, 15 bp, Homo sapiens
ttaaagattccttga

SEQ ID NO: 1025726 - DNA, 15 bp, Homo sapiens
taaagattccttgag

SEQ ID NO: 1025727 - DNA, 15 bp, Homo sapiens
aaagattccttgaga

SEQ ID NO: 1025728 - DNA, 15 bp, Homo sapiens
aagattccttgagat

SEQ ID NO: 1025729 - DNA, 15 bp, Homo sapiens
agattccttgagatt

SEQ ID NO: 1025730 - DNA, 15 bp, Homo sapiens
gattccttgagattg

SEQ ID NO: 1025731 - DNA, 15 bp, Homo sapiens
attccttgagattgg

SEQ ID NO: 1025732 - DNA, 15 bp, Homo sapiens
ttccttgagattgga

SEQ ID NO: 1025733 - DNA, 15 bp, Homo sapiens
tccttgagattggat

SEQ ID NO: 1025734 - DNA, 15 bp, Homo sapiens
ccttgagattggatg

SEQ ID NO: 1025735 - DNA, 15 bp, Homo sapiens
cttgagattggatgc

SEQ ID NO: 1025736 - DNA, 15 bp, Homo sapiens
ttgagattggatgcg

SEQ ID NO: 1025737 - DNA, 15 bp, Homo sapiens
tgagattggatgcgc

SEQ ID NO: 1025738 - DNA, 15 bp, Homo sapiens
gagattggatgcgct

SEQ ID NO: 1025739 - DNA, 15 bp, Homo sapiens
agattggatgcgctt

SEQ ID NO: 1025740 - DNA, 15 bp, Homo sapiens
gattggatgcgcttg

SEQ ID NO: 1025741 - DNA, 15 bp, Homo sapiens
attggatgcgcttgg

SEQ ID NO: 1025742 - DNA, 15 bp, Homo sapiens
ttggatgcgcttggt

SEQ ID NO: 1025743 - DNA, 15 bp, Homo sapiens
tggatgcgcttggtt

SEQ ID NO: 1025744 - DNA, 15 bp, Homo sapiens
ggatgcgcttggttg

SEQ ID NO: 1025745 - DNA, 15 bp, Homo sapiens
gatgcgcttggttgt

SEQ ID NO: 1025746 - DNA, 15 bp, Homo sapiens
atgcgcttggttgtt

SEQ ID NO: 1025747 - DNA, 15 bp, Homo sapiens
tgcgcttggttgttt

SEQ ID NO: 1025748 - DNA, 15 bp, Homo sapiens
gcgcttggttgtttt

SEQ ID NO: 1025749 - DNA, 15 bp, Homo sapiens
cgcttggttgttttt

SEQ ID NO: 1025750 - DNA, 15 bp, Homo sapiens
gcttggttgtttttc

SEQ ID NO: 1025751 - DNA, 15 bp, Homo sapiens
cttggttgtttttca

SEQ ID NO: 1025752 - DNA, 15 bp, Homo sapiens
ttggttgtttttcat

SEQ ID NO: 1025753 - DNA, 15 bp, Homo sapiens
tggttgtttttcatt

SEQ ID NO: 1025754 - DNA, 15 bp, Homo sapiens
ggttgtttttcattt

SEQ ID NO: 1025755 - DNA, 15 bp, Homo sapiens
gttgtttttcatttt

SEQ ID NO: 1025756 - DNA, 15 bp, Homo sapiens
ttgtttttcattttc

SEQ ID NO: 1025757 - DNA, 15 bp, Homo sapiens
tgtttttcattttct

SEQ ID NO: 1025758 - DNA, 15 bp, Homo sapiens
gtttttcattttctt

SEQ ID NO: 1025759 - DNA, 15 bp, Homo sapiens
tttttcattttcttt

SEQ ID NO: 1025760 - DNA, 15 bp, Homo sapiens
ttttcattttctttt

SEQ ID NO: 1025761 - DNA, 15 bp, Homo sapiens
tttcattttcttttt

SEQ ID NO: 1025762 - DNA, 15 bp, Homo sapiens
ttcattttctttttt

SEQ ID NO: 1025763 - DNA, 15 bp, Homo sapiens
tcattttcttttttt

SEQ ID NO: 1025764 - DNA, 15 bp, Homo sapiens
cattttcttttttta

SEQ ID NO: 1025765 - DNA, 15 bp, Homo sapiens
attttctttttttaa

SEQ ID NO: 1025766 - DNA, 15 bp, Homo sapiens
ttttctttttttaaa

SEQ ID NO: 1025767 - DNA, 15 bp, Homo sapiens
tttctttttttaaaa

SEQ ID NO: 1025768 - DNA, 15 bp, Homo sapiens
ttctttttttaaaaa

SEQ ID NO: 1025769 - DNA, 15 bp, Homo sapiens
tctttttttaaaaaa

SEQ ID NO: 1025770 - DNA, 15 bp, Homo sapiens
ctttttttaaaaaaa

SEQ ID NO: 1025771 - DNA, 15 bp, Homo sapiens
tttttttaaaaaaaa

SEQ ID NO: 1025772 - DNA, 15 bp, Homo sapiens
ttttttaaaaaaaaa

SEQ ID NO: 1025773 - DNA, 15 bp, Homo sapiens
tttttaaaaaaaaaa

SEQ ID NO: 1025774 - DNA, 15 bp, Homo sapiens
ttttaaaaaaaaaaa

SEQ ID NO: 1025775 - DNA, 15 bp, Homo sapiens
tttaaaaaaaaaaac

SEQ ID NO: 1025776 - DNA, 15 bp, Homo sapiens
ttaaaaaaaaaaacc

SEQ ID NO: 1025777 - DNA, 15 bp, Homo sapiens
taaaaaaaaaaaccc

SEQ ID NO: 1025778 - DNA, 15 bp, Homo sapiens
aaaaaaaaaaaccca

SEQ ID NO: 1025779 - DNA, 15 bp, Homo sapiens
aaaaaaaaaacccac

SEQ ID NO: 1025780 - DNA, 15 bp, Homo sapiens
aaaaaaaaacccaca

SEQ ID NO: 1025781 - DNA, 15 bp, Homo sapiens
aaaaaaaacccacaa

SEQ ID NO: 1025782 - DNA, 15 bp, Homo sapiens
aaaaaaacccacaaa

SEQ ID NO: 1025783 - DNA, 15 bp, Homo sapiens
aaaaaacccacaaat

SEQ ID NO: 1025784 - DNA, 15 bp, Homo sapiens
aaaaacccacaaatt

SEQ ID NO: 1025785 - DNA, 15 bp, Homo sapiens
aaaacccacaaattt

SEQ ID NO: 1025786 - DNA, 15 bp, Homo sapiens
aaacccacaaatttt

SEQ ID NO: 1025787 - DNA, 15 bp, Homo sapiens
aacccacaaatttta

SEQ ID NO: 1025788 - DNA, 15 bp, Homo sapiens
acccacaaattttag

SEQ ID NO: 1025789 - DNA, 15 bp, Homo sapiens
cccacaaattttagg

SEQ ID NO: 1025790 - DNA, 15 bp, Homo sapiens
ccacaaattttaggg

SEQ ID NO: 1025791 - DNA, 15 bp, Homo sapiens
cacaaattttagggg

SEQ ID NO: 1025792 - DNA, 15 bp, Homo sapiens
acaaattttaggggg

SEQ ID NO: 1025793 - DNA, 15 bp, Homo sapiens
caaattttagggggg

SEQ ID NO: 1025794 - DNA, 15 bp, Homo sapiens
aaattttaggggggg

SEQ ID NO: 1025795 - DNA, 15 bp, Homo sapiens
aattttaggggggga

SEQ ID NO: 1025796 - DNA, 15 bp, Homo sapiens
attttagggggggaa

SEQ ID NO: 1025797 - DNA, 15 bp, Homo sapiens
ttttagggggggaaa

SEQ ID NO: 1025798 - DNA, 15 bp, Homo sapiens
tttagggggggaaaa

SEQ ID NO: 1025799 - DNA, 15 bp, Homo sapiens
ttagggggggaaaaa

SEQ ID NO: 1025800 - DNA, 15 bp, Homo sapiens
tagggggggaaaaaa

SEQ ID NO: 1025801 - DNA, 15 bp, Homo sapiens
agggggggaaaaaaa

SEQ ID NO: 1025802 - DNA, 15 bp, Homo sapiens
gggggggaaaaaaag

SEQ ID NO: 1025803 - DNA, 15 bp, Homo sapiens
ggggggaaaaaaaga

SEQ ID NO: 1025804 - DNA, 15 bp, Homo sapiens
gggggaaaaaaagaa

SEQ ID NO: 1025805 - DNA, 15 bp, Homo sapiens
ggggaaaaaaagaaa

SEQ ID NO: 1025806 - DNA, 15 bp, Homo sapiens
gggaaaaaaagaaag

SEQ ID NO: 1025807 - DNA, 15 bp, Homo sapiens
ggaaaaaaagaaaga

SEQ ID NO: 1025808 - DNA, 15 bp, Homo sapiens
gaaaaaaagaaagac

SEQ ID NO: 1025809 - DNA, 15 bp, Homo sapiens
aaaaaaagaaagacg

SEQ ID NO: 1025810 - DNA, 15 bp, Homo sapiens
aaaaaagaaagacgt

SEQ ID NO: 1025811 - DNA, 15 bp, Homo sapiens
aaaaagaaagacgtc

SEQ ID NO: 1025812 - DNA, 15 bp, Homo sapiens
aaaagaaagacgtcc

SEQ ID NO: 1025813 - DNA, 15 bp, Homo sapiens
aaagaaagacgtcca

SEQ ID NO: 1025814 - DNA, 15 bp, Homo sapiens
aagaaagacgtccag

SEQ ID NO: 1025815 - DNA, 15 bp, Homo sapiens
agaaagacgtccagc

SEQ ID NO: 1025816 - DNA, 15 bp, Homo sapiens
gaaagacgtccagca

SEQ ID NO: 1025817 - DNA, 15 bp, Homo sapiens
aaagacgtccagcag

SEQ ID NO: 1025818 - DNA, 15 bp, Homo sapiens
aagacgtccagcagt

SEQ ID NO: 1025819 - DNA, 15 bp, Homo sapiens
agacgtccagcagtt

SEQ ID NO: 1025820 - DNA, 15 bp, Homo sapiens
gacgtccagcagttt

SEQ ID NO: 1025821 - DNA, 15 bp, Homo sapiens
acgtccagcagtttg

SEQ ID NO: 1025822 - DNA, 15 bp, Homo sapiens
cgtccagcagtttgg

SEQ ID NO: 1025823 - DNA, 15 bp, Homo sapiens
gtccagcagtttggc

SEQ ID NO: 1025824 - DNA, 15 bp, Homo sapiens
tccagcagtttggcc

SEQ ID NO: 1025825 - DNA, 15 bp, Homo sapiens
ccagcagtttggcct

SEQ ID NO: 1025826 - DNA, 15 bp, Homo sapiens
cagcagtttggcctt

SEQ ID NO: 1025827 - DNA, 15 bp, Homo sapiens
agcagtttggccttt

SEQ ID NO: 1025828 - DNA, 15 bp, Homo sapiens
gcagtttggcctttg

SEQ ID NO: 1025829 - DNA, 15 bp, Homo sapiens
cagtttggcctttgt

SEQ ID NO: 1025830 - DNA, 15 bp, Homo sapiens
agtttggcctttgtg

SEQ ID NO: 1025831 - DNA, 15 bp, Homo sapiens
gtttggcctttgtgg

SEQ ID NO: 1025832 - DNA, 15 bp, Homo sapiens
tttggcctttgtggt

SEQ ID NO: 1025833 - DNA, 15 bp, Homo sapiens
ttggcctttgtggtt

SEQ ID NO: 1025834 - DNA, 15 bp, Homo sapiens
tggcctttgtggttt

SEQ ID NO: 1025835 - DNA, 15 bp, Homo sapiens
ggcctttgtggtttt

SEQ ID NO: 1025836 - DNA, 15 bp, Homo sapiens
gcctttgtggttttt

SEQ ID NO: 1025837 - DNA, 15 bp, Homo sapiens
cctttgtggtttttt

SEQ ID NO: 1025838 - DNA, 15 bp, Homo sapiens
ctttgtggttttttt

SEQ ID NO: 1025839 - DNA, 15 bp, Homo sapiens
tttgtggtttttttg

SEQ ID NO: 1025840 - DNA, 15 bp, Homo sapiens
ttgtggtttttttgt

SEQ ID NO: 1025841 - DNA, 15 bp, Homo sapiens
tgtggtttttttgtt

SEQ ID NO: 1025842 - DNA, 15 bp, Homo sapiens
gtggtttttttgttc

SEQ ID NO: 1025843 - DNA, 15 bp, Homo sapiens
tggtttttttgttcc

SEQ ID NO: 1025844 - DNA, 15 bp, Homo sapiens
ggtttttttgttcct

SEQ ID NO: 1025845 - DNA, 15 bp, Homo sapiens
gtttttttgttcctt

SEQ ID NO: 1025846 - DNA, 15 bp, Homo sapiens
tttttttgttccttg

SEQ ID NO: 1025847 - DNA, 15 bp, Homo sapiens
ttttttgttccttgg

SEQ ID NO: 1025848 - DNA, 15 bp, Homo sapiens
tttttgttccttggt

SEQ ID NO: 1025849 - DNA, 15 bp, Homo sapiens
ttttgttccttggtc

SEQ ID NO: 1025850 - DNA, 15 bp, Homo sapiens
tttgttccttggtct

SEQ ID NO: 1025851 - DNA, 15 bp, Homo sapiens
ttgttccttggtcta

SEQ ID NO: 1025852 - DNA, 15 bp, Homo sapiens
tgttccttggtctaa

SEQ ID NO: 1025853 - DNA, 15 bp, Homo sapiens
gttccttggtctaaa

SEQ ID NO: 1025854 - DNA, 15 bp, Homo sapiens
ttccttggtctaaac

SEQ ID NO: 1025855 - DNA, 15 bp, Homo sapiens
tccttggtctaaacg

SEQ ID NO: 1025856 - DNA, 15 bp, Homo sapiens
ccttggtctaaacgc

SEQ ID NO: 1025857 - DNA, 15 bp, Homo sapiens
cttggtctaaacgcg

SEQ ID NO: 1025858 - DNA, 15 bp, Homo sapiens
ttggtctaaacgcgg

SEQ ID NO: 1025859 - DNA, 15 bp, Homo sapiens
tggtctaaacgcggc

SEQ ID NO: 1025860 - DNA, 15 bp, Homo sapiens
ggtctaaacgcggcc

SEQ ID NO: 1025861 - DNA, 15 bp, Homo sapiens
gtctaaacgcggcca

SEQ ID NO: 1025862 - DNA, 15 bp, Homo sapiens
tctaaacgcggccag

SEQ ID NO: 1025863 - DNA, 15 bp, Homo sapiens
ctaaacgcggccagg

SEQ ID NO: 1025864 - DNA, 15 bp, Homo sapiens
taaacgcggccaggt

SEQ ID NO: 1025865 - DNA, 15 bp, Homo sapiens
aaacgcggccaggtt

SEQ ID NO: 1025866 - DNA, 15 bp, Homo sapiens
aacgcggccaggttg

SEQ ID NO: 1025867 - DNA, 15 bp, Homo sapiens
acgcggccaggttgt

SEQ ID NO: 1025868 - DNA, 15 bp, Homo sapiens
cgcggccaggttgtt

SEQ ID NO: 1025869 - DNA, 15 bp, Homo sapiens
gcggccaggttgtta

SEQ ID NO: 1025870 - DNA, 15 bp, Homo sapiens
cggccaggttgttaa

SEQ ID NO: 1025871 - DNA, 15 bp, Homo sapiens
ggccaggttgttaag

SEQ ID NO: 1025872 - DNA, 15 bp, Homo sapiens
gccaggttgttaaga

SEQ ID NO: 1025873 - DNA, 15 bp, Homo sapiens
ccaggttgttaagaa

SEQ ID NO: 1025874 - DNA, 15 bp, Homo sapiens
caggttgttaagaaa

SEQ ID NO: 1025875 - DNA, 15 bp, Homo sapiens
aggttgttaagaaaa

SEQ ID NO: 1025876 - DNA, 15 bp, Homo sapiens
ggttgttaagaaaag

SEQ ID NO: 1025877 - DNA, 15 bp, Homo sapiens
gttgttaagaaaagt

SEQ ID NO: 1025878 - DNA, 15 bp, Homo sapiens
ttgttaagaaaagtc

SEQ ID NO: 1025879 - DNA, 15 bp, Homo sapiens
tgttaagaaaagtcg

SEQ ID NO: 1025880 - DNA, 15 bp, Homo sapiens
gttaagaaaagtcga

SEQ ID NO: 1025881 - DNA, 15 bp, Homo sapiens
ttaagaaaagtcgaa

SEQ ID NO: 1025882 - DNA, 15 bp, Homo sapiens
taagaaaagtcgaag

SEQ ID NO: 1025883 - DNA, 15 bp, Homo sapiens
aagaaaagtcgaagc

SEQ ID NO: 1025884 - DNA, 15 bp, Homo sapiens
agaaaagtcgaagcg

SEQ ID NO: 1025885 - DNA, 15 bp, Homo sapiens
gaaaagtcgaagcgc

SEQ ID NO: 1025886 - DNA, 15 bp, Homo sapiens
aaaagtcgaagcgcg

SEQ ID NO: 1025887 - DNA, 15 bp, Homo sapiens
aaagtcgaagcgcgt

SEQ ID NO: 1025888 - DNA, 15 bp, Homo sapiens
aagtcgaagcgcgtg

SEQ ID NO: 1025889 - DNA, 15 bp, Homo sapiens
agtcgaagcgcgtgg

SEQ ID NO: 1025890 - DNA, 15 bp, Homo sapiens
gtcgaagcgcgtgga

SEQ ID NO: 1025891 - DNA, 15 bp, Homo sapiens
tcgaagcgcgtggag

SEQ ID NO: 1025892 - DNA, 15 bp, Homo sapiens
cgaagcgcgtggagc

SEQ ID NO: 1025893 - DNA, 15 bp, Homo sapiens
gaagcgcgtggagca

SEQ ID NO: 1025894 - DNA, 15 bp, Homo sapiens
aagcgcgtggagcag

SEQ ID NO: 1025895 - DNA, 15 bp, Homo sapiens
agcgcgtggagcagc

SEQ ID NO: 1025896 - DNA, 15 bp, Homo sapiens
gcgcgtggagcagcg

SEQ ID NO: 1025897 - DNA, 15 bp, Homo sapiens
cgcgtggagcagcgg

SEQ ID NO: 1025898 - DNA, 15 bp, Homo sapiens
gcgtggagcagcggt

SEQ ID NO: 1025899 - DNA, 15 bp, Homo sapiens
cgtggagcagcggtg

SEQ ID NO: 1025900 - DNA, 15 bp, Homo sapiens
gtggagcagcggtgg

SEQ ID NO: 1025901 - DNA, 15 bp, Homo sapiens
tggagcagcggtgga

SEQ ID NO: 1025902 - DNA, 15 bp, Homo sapiens
ggagcagcggtggat

SEQ ID NO: 1025903 - DNA, 15 bp, Homo sapiens
gagcagcggtggatg

SEQ ID NO: 1025904 - DNA, 15 bp, Homo sapiens
agcagcggtggatgg

SEQ ID NO: 1025905 - DNA, 15 bp, Homo sapiens
gcagcggtggatggt

SEQ ID NO: 1025906 - DNA, 15 bp, Homo sapiens
cagcggtggatggtg

SEQ ID NO: 1025907 - DNA, 15 bp, Homo sapiens
agcggtggatggtgg

SEQ ID NO: 1025908 - DNA, 15 bp, Homo sapiens
gcggtggatggtggt

SEQ ID NO: 1025909 - DNA, 15 bp, Homo sapiens
cggtggatggtggtc

SEQ ID NO: 1025910 - DNA, 15 bp, Homo sapiens
ggtggatggtggtct

SEQ ID NO: 1025911 - DNA, 15 bp, Homo sapiens
gtggatggtggtctg

SEQ ID NO: 1025912 - DNA, 15 bp, Homo sapiens
tggatggtggtctgt

SEQ ID NO: 1025913 - DNA, 15 bp, Homo sapiens
ggatggtggtctgtg

SEQ ID NO: 1025914 - DNA, 15 bp, Homo sapiens
gatggtggtctgtgt

SEQ ID NO: 1025915 - DNA, 15 bp, Homo sapiens
atggtggtctgtgtg

SEQ ID NO: 1025916 - DNA, 15 bp, Homo sapiens
tggtggtctgtgtgg

SEQ ID NO: 1025917 - DNA, 15 bp, Homo sapiens
ggtggtctgtgtggc

SEQ ID NO: 1025918 - DNA, 15 bp, Homo sapiens
gtggtctgtgtggcg

SEQ ID NO: 1025919 - DNA, 15 bp, Homo sapiens
tggtctgtgtggcgg

SEQ ID NO: 1025920 - DNA, 15 bp, Homo sapiens
ggtctgtgtggcggg

SEQ ID NO: 1025921 - DNA, 15 bp, Homo sapiens
gtctgtgtggcgggc

SEQ ID NO: 1025922 - DNA, 15 bp, Homo sapiens
tctgtgtggcgggca

SEQ ID NO: 1025923 - DNA, 15 bp, Homo sapiens
ctgtgtggcgggcag

SEQ ID NO: 1025924 - DNA, 15 bp, Homo sapiens
tgtgtggcgggcagg

SEQ ID NO: 1025925 - DNA, 15 bp, Homo sapiens
gtgtggcgggcagga

SEQ ID NO: 1025926 - DNA, 15 bp, Homo sapiens
tgtggcgggcaggag

SEQ ID NO: 1025927 - DNA, 15 bp, Homo sapiens
gtggcgggcaggagg

SEQ ID NO: 1025928 - DNA, 15 bp, Homo sapiens
tggcgggcaggaggg

SEQ ID NO: 1025929 - DNA, 15 bp, Homo sapiens
ggcgggcaggaggga

SEQ ID NO: 1025930 - DNA, 15 bp, Homo sapiens
gcgggcaggagggaa

SEQ ID NO: 1025931 - DNA, 15 bp, Homo sapiens
cgggcaggagggaag

SEQ ID NO: 1025932 - DNA, 15 bp, Homo sapiens
gggcaggagggaagc

SEQ ID NO: 1025933 - DNA, 15 bp, Homo sapiens
ggcaggagggaagcg

SEQ ID NO: 1025934 - DNA, 15 bp, Homo sapiens
gcaggagggaagcgg

SEQ ID NO: 1025935 - DNA, 15 bp, Homo sapiens
caggagggaagcggt

SEQ ID NO: 1025936 - DNA, 15 bp, Homo sapiens
aggagggaagcggtg

SEQ ID NO: 1025937 - DNA, 15 bp, Homo sapiens
ggagggaagcggtga

SEQ ID NO: 1025938 - DNA, 15 bp, Homo sapiens
gagggaagcggtgag

SEQ ID NO: 1025939 - DNA, 15 bp, Homo sapiens
agggaagcggtgagg

SEQ ID NO: 1025940 - DNA, 15 bp, Homo sapiens
gggaagcggtgaggc

SEQ ID NO: 1025941 - DNA, 15 bp, Homo sapiens
ggaagcggtgaggca

SEQ ID NO: 1025942 - DNA, 15 bp, Homo sapiens
gaagcggtgaggcag

SEQ ID NO: 1025943 - DNA, 15 bp, Homo sapiens
aagcggtgaggcaga

SEQ ID NO: 1025944 - DNA, 15 bp, Homo sapiens
agcggtgaggcagag

SEQ ID NO: 1025945 - DNA, 15 bp, Homo sapiens
gcggtgaggcagagc

SEQ ID NO: 1025946 - DNA, 15 bp, Homo sapiens
cggtgaggcagagcg

SEQ ID NO: 1025947 - DNA, 15 bp, Homo sapiens
ggtgaggcagagcgc

SEQ ID NO: 1025948 - DNA, 15 bp, Homo sapiens
gtgaggcagagcgct

SEQ ID NO: 1025949 - DNA, 15 bp, Homo sapiens
tgaggcagagcgctg

SEQ ID NO: 1025950 - DNA, 15 bp, Homo sapiens
gaggcagagcgctgg

SEQ ID NO: 1025951 - DNA, 15 bp, Homo sapiens
aggcagagcgctggg

SEQ ID NO: 1025952 - DNA, 15 bp, Homo sapiens
ggcagagcgctgggc

SEQ ID NO: 1025953 - DNA, 15 bp, Homo sapiens
gcagagcgctgggct

SEQ ID NO: 1025954 - DNA, 15 bp, Homo sapiens
cagagcgctgggcta

SEQ ID NO: 1025955 - DNA, 15 bp, Homo sapiens
agagcgctgggctag

SEQ ID NO: 1025956 - DNA, 15 bp, Homo sapiens
gagcgctgggctagg

SEQ ID NO: 1025957 - DNA, 15 bp, Homo sapiens
agcgctgggctaggg

SEQ ID NO: 1025958 - DNA, 15 bp, Homo sapiens
gcgctgggctagggc

SEQ ID NO: 1025959 - DNA, 15 bp, Homo sapiens
cgctgggctagggcc

SEQ ID NO: 1025960 - DNA, 15 bp, Homo sapiens
gctgggctagggccg

SEQ ID NO: 1025961 - DNA, 15 bp, Homo sapiens
ctgggctagggccgg

SEQ ID NO: 1025962 - DNA, 15 bp, Homo sapiens
tgggctagggccggc

SEQ ID NO: 1025963 - DNA, 15 bp, Homo sapiens
gggctagggccggcc

SEQ ID NO: 1025964 - DNA, 15 bp, Homo sapiens
ggctagggccggccc

SEQ ID NO: 1025965 - DNA, 15 bp, Homo sapiens
gctagggccggcccg

SEQ ID NO: 1025966 - DNA, 15 bp, Homo sapiens
ctagggccggcccgg

SEQ ID NO: 1025967 - DNA, 15 bp, Homo sapiens
tagggccggcccggc

SEQ ID NO: 1025968 - DNA, 15 bp, Homo sapiens
agggccggcccggcg

SEQ ID NO: 1025969 - DNA, 15 bp, Homo sapiens
gggccggcccggcgt

SEQ ID NO: 1025970 - DNA, 15 bp, Homo sapiens
ggccggcccggcgtc

SEQ ID NO: 1025971 - DNA, 15 bp, Homo sapiens
gccggcccggcgtcc

SEQ ID NO: 1025972 - DNA, 15 bp, Homo sapiens
ccggcccggcgtcct

SEQ ID NO: 1025973 - DNA, 15 bp, Homo sapiens
cggcccggcgtcctc

SEQ ID NO: 1025974 - DNA, 15 bp, Homo sapiens
ggcccggcgtcctct

SEQ ID NO: 1025975 - DNA, 15 bp, Homo sapiens
gcccggcgtcctctc

SEQ ID NO: 1025976 - DNA, 15 bp, Homo sapiens
cccggcgtcctctca

SEQ ID NO: 1025977 - DNA, 15 bp, Homo sapiens
ccggcgtcctctcac

SEQ ID NO: 1025978 - DNA, 15 bp, Homo sapiens
cggcgtcctctcacc

SEQ ID NO: 1025979 - DNA, 15 bp, Homo sapiens
ggcgtcctctcacca

SEQ ID NO: 1025980 - DNA, 15 bp, Homo sapiens
gcgtcctctcaccag

SEQ ID NO: 1025981 - DNA, 15 bp, Homo sapiens
cgtcctctcaccagg

SEQ ID NO: 1025982 - DNA, 15 bp, Homo sapiens
gtcctctcaccaggt

SEQ ID NO: 1025983 - DNA, 15 bp, Homo sapiens
tcctctcaccaggtc

SEQ ID NO: 1025984 - DNA, 15 bp, Homo sapiens
cctctcaccaggtcc

SEQ ID NO: 1025985 - DNA, 15 bp, Homo sapiens
ctctcaccaggtccg

SEQ ID NO: 1025986 - DNA, 15 bp, Homo sapiens
tctcaccaggtccga

SEQ ID NO: 1025987 - DNA, 15 bp, Homo sapiens
ctcaccaggtccgac

SEQ ID NO: 1025988 - DNA, 15 bp, Homo sapiens
tcaccaggtccgacc

SEQ ID NO: 1025989 - DNA, 15 bp, Homo sapiens
caccaggtccgaccg

SEQ ID NO: 1025990 - DNA, 15 bp, Homo sapiens
accaggtccgaccgt

SEQ ID NO: 1025991 - DNA, 15 bp, Homo sapiens
ccaggtccgaccgta

SEQ ID NO: 1025992 - DNA, 15 bp, Homo sapiens
caggtccgaccgtat

SEQ ID NO: 1025993 - DNA, 15 bp, Homo sapiens
aggtccgaccgtata

SEQ ID NO: 1025994 - DNA, 15 bp, Homo sapiens
ggtccgaccgtatag

SEQ ID NO: 1025995 - DNA, 15 bp, Homo sapiens
gtccgaccgtatagc

SEQ ID NO: 1025996 - DNA, 15 bp, Homo sapiens
tccgaccgtatagca

SEQ ID NO: 1025997 - DNA, 15 bp, Homo sapiens
ccgaccgtatagcaa

SEQ ID NO: 1025998 - DNA, 15 bp, Homo sapiens
cgaccgtatagcaag

SEQ ID NO: 1025999 - DNA, 15 bp, Homo sapiens
gaccgtatagcaagg

SEQ ID NO: 1026000 - DNA, 15 bp, Homo sapiens
accgtatagcaaggt

SEQ ID NO: 1026001 - DNA, 15 bp, Homo sapiens
ccgtatagcaaggtg

SEQ ID NO: 1026002 - DNA, 15 bp, Homo sapiens
cgtatagcaaggtgg

SEQ ID NO: 1026003 - DNA, 15 bp, Homo sapiens
gtatagcaaggtgga

SEQ ID NO: 1026004 - DNA, 15 bp, Homo sapiens
tatagcaaggtggag

SEQ ID NO: 1026005 - DNA, 15 bp, Homo sapiens
atagcaaggtggagc

SEQ ID NO: 1026006 - DNA, 15 bp, Homo sapiens
tagcaaggtggagca

SEQ ID NO: 1026007 - DNA, 15 bp, Homo sapiens
agcaaggtggagcag

SEQ ID NO: 1026008 - DNA, 15 bp, Homo sapiens
gcaaggtggagcagg

SEQ ID NO: 1026009 - DNA, 15 bp, Homo sapiens
caaggtggagcagga

SEQ ID NO: 1026010 - DNA, 15 bp, Homo sapiens
aaggtggagcaggac

SEQ ID NO: 1026011 - DNA, 15 bp, Homo sapiens
aggtggagcaggaca

SEQ ID NO: 1026012 - DNA, 15 bp, Homo sapiens
ggtggagcaggacat

SEQ ID NO: 1026013 - DNA, 15 bp, Homo sapiens
gtggagcaggacatg

SEQ ID NO: 1026014 - DNA, 15 bp, Homo sapiens
tggagcaggacatgg

SEQ ID NO: 1026015 - DNA, 15 bp, Homo sapiens
ggagcaggacatggt

SEQ ID NO: 1026016 - DNA, 15 bp, Homo sapiens
gagcaggacatggtg

SEQ ID NO: 1026017 - DNA, 15 bp, Homo sapiens
agcaggacatggtgc

SEQ ID NO: 1026018 - DNA, 15 bp, Homo sapiens
gcaggacatggtgcc

SEQ ID NO: 1026019 - DNA, 15 bp, Homo sapiens
caggacatggtgccg

SEQ ID NO: 1026020 - DNA, 15 bp, Homo sapiens
aggacatggtgccgt

SEQ ID NO: 1026021 - DNA, 15 bp, Homo sapiens
ggacatggtgccgta

SEQ ID NO: 1026022 - DNA, 15 bp, Homo sapiens
gacatggtgccgtag

SEQ ID NO: 1026023 - DNA, 15 bp, Homo sapiens
acatggtgccgtagt

SEQ ID NO: 1026024 - DNA, 15 bp, Homo sapiens
catggtgccgtagtc

SEQ ID NO: 1026025 - DNA, 15 bp, Homo sapiens
atggtgccgtagtcc

SEQ ID NO: 1026026 - DNA, 15 bp, Homo sapiens
tggtgccgtagtccg

SEQ ID NO: 1026027 - DNA, 15 bp, Homo sapiens
ggtgccgtagtccga

SEQ ID NO: 1026028 - DNA, 15 bp, Homo sapiens
gtgccgtagtccgag

SEQ ID NO: 1026029 - DNA, 15 bp, Homo sapiens
tgccgtagtccgagc

SEQ ID NO: 1026030 - DNA, 15 bp, Homo sapiens
gccgtagtccgagcc

SEQ ID NO: 1026031 - DNA, 15 bp, Homo sapiens
ccgtagtccgagccc

SEQ ID NO: 1026032 - DNA, 15 bp, Homo sapiens
cgtagtccgagcccg

SEQ ID NO: 1026033 - DNA, 15 bp, Homo sapiens
gtagtccgagcccga

SEQ ID NO: 1026034 - DNA, 15 bp, Homo sapiens
tagtccgagcccgag

SEQ ID NO: 1026035 - DNA, 15 bp, Homo sapiens
agtccgagcccgagg

SEQ ID NO: 1026036 - DNA, 15 bp, Homo sapiens
gtccgagcccgagga

SEQ ID NO: 1026037 - DNA, 15 bp, Homo sapiens
tccgagcccgaggag

SEQ ID NO: 1026038 - DNA, 15 bp, Homo sapiens
ccgagcccgaggagt

SEQ ID NO: 1026039 - DNA, 15 bp, Homo sapiens
cgagcccgaggagtt

SEQ ID NO: 1026040 - DNA, 15 bp, Homo sapiens
gagcccgaggagttc

SEQ ID NO: 1026041 - DNA, 15 bp, Homo sapiens
agcccgaggagttca

SEQ ID NO: 1026042 - DNA, 15 bp, Homo sapiens
gcccgaggagttcag

SEQ ID NO: 1026043 - DNA, 15 bp, Homo sapiens
cccgaggagttcagg

SEQ ID NO: 1026044 - DNA, 15 bp, Homo sapiens
ccgaggagttcaggt

SEQ ID NO: 1026045 - DNA, 15 bp, Homo sapiens
cgaggagttcaggtg

SEQ ID NO: 1026046 - DNA, 15 bp, Homo sapiens
gaggagttcaggtgg

SEQ ID NO: 1026047 - DNA, 15 bp, Homo sapiens
aggagttcaggtggg

SEQ ID NO: 1026048 - DNA, 15 bp, Homo sapiens
ggagttcaggtggga

SEQ ID NO: 1026049 - DNA, 15 bp, Homo sapiens
gagttcaggtgggac

SEQ ID NO: 1026050 - DNA, 15 bp, Homo sapiens
agttcaggtgggaca

SEQ ID NO: 1026051 - DNA, 15 bp, Homo sapiens
gttcaggtgggacag

SEQ ID NO: 1026052 - DNA, 15 bp, Homo sapiens
ttcaggtgggacagg

SEQ ID NO: 1026053 - DNA, 15 bp, Homo sapiens
tcaggtgggacaggc

SEQ ID NO: 1026054 - DNA, 15 bp, Homo sapiens
caggtgggacaggct

SEQ ID NO: 1026055 - DNA, 15 bp, Homo sapiens
aggtgggacaggctg

SEQ ID NO: 1026056 - DNA, 15 bp, Homo sapiens
ggtgggacaggctgg

SEQ ID NO: 1026057 - DNA, 15 bp, Homo sapiens
gtgggacaggctgga

SEQ ID NO: 1026058 - DNA, 15 bp, Homo sapiens
tgggacaggctggat

SEQ ID NO: 1026059 - DNA, 15 bp, Homo sapiens
gggacaggctggata

SEQ ID NO: 1026060 - DNA, 15 bp, Homo sapiens
ggacaggctggatac

SEQ ID NO: 1026061 - DNA, 15 bp, Homo sapiens
gacaggctggatacc

SEQ ID NO: 1026062 - DNA, 15 bp, Homo sapiens
acaggctggatacct

SEQ ID NO: 1026063 - DNA, 15 bp, Homo sapiens
caggctggatacctg

SEQ ID NO: 1026064 - DNA, 15 bp, Homo sapiens
aggctggatacctgg

SEQ ID NO: 1026065 - DNA, 15 bp, Homo sapiens
ggctggatacctggc

SEQ ID NO: 1026066 - DNA, 15 bp, Homo sapiens
gctggatacctggcc

SEQ ID NO: 1026067 - DNA, 15 bp, Homo sapiens
ctggatacctggccc

SEQ ID NO: 1026068 - DNA, 15 bp, Homo sapiens
tggatacctggccct

SEQ ID NO: 1026069 - DNA, 15 bp, Homo sapiens
ggatacctggccctg

SEQ ID NO: 1026070 - DNA, 15 bp, Homo sapiens
gatacctggccctgc

SEQ ID NO: 1026071 - DNA, 15 bp, Homo sapiens
atacctggccctgca

SEQ ID NO: 1026072 - DNA, 15 bp, Homo sapiens
tacctggccctgcag

SEQ ID NO: 1026073 - DNA, 15 bp, Homo sapiens
acctggccctgcagc

SEQ ID NO: 1026074 - DNA, 15 bp, Homo sapiens
cctggccctgcagcg

SEQ ID NO: 1026075 - DNA, 15 bp, Homo sapiens
ctggccctgcagcgc

SEQ ID NO: 1026076 - DNA, 15 bp, Homo sapiens
tggccctgcagcgcc

SEQ ID NO: 1026077 - DNA, 15 bp, Homo sapiens
ggccctgcagcgccg

SEQ ID NO: 1026078 - DNA, 15 bp, Homo sapiens
gccctgcagcgccgc

SEQ ID NO: 1026079 - DNA, 15 bp, Homo sapiens
ccctgcagcgccgcg

SEQ ID NO: 1026080 - DNA, 15 bp, Homo sapiens
cctgcagcgccgcgg

SEQ ID NO: 1026081 - DNA, 15 bp, Homo sapiens
ctgcagcgccgcggg

SEQ ID NO: 1026082 - DNA, 15 bp, Homo sapiens
tgcagcgccgcgggg

SEQ ID NO: 1026083 - DNA, 15 bp, Homo sapiens
gcagcgccgcggggc

SEQ ID NO: 1026084 - DNA, 15 bp, Homo sapiens
cagcgccgcggggct

SEQ ID NO: 1026085 - DNA, 15 bp, Homo sapiens
agcgccgcggggctg

SEQ ID NO: 1026086 - DNA, 15 bp, Homo sapiens
gcgccgcggggctgg

SEQ ID NO: 1026087 - DNA, 15 bp, Homo sapiens
cgccgcggggctggc

SEQ ID NO: 1026088 - DNA, 15 bp, Homo sapiens
gccgcggggctggcg

SEQ ID NO: 1026089 - DNA, 15 bp, Homo sapiens
ccgcggggctggcgg

SEQ ID NO: 1026090 - DNA, 15 bp, Homo sapiens
cgcggggctggcggc

SEQ ID NO: 1026091 - DNA, 15 bp, Homo sapiens
gcggggctggcggcg

SEQ ID NO: 1026092 - DNA, 15 bp, Homo sapiens
cggggctggcggcgt

SEQ ID NO: 1026093 - DNA, 15 bp, Homo sapiens
ggggctggcggcgtg

SEQ ID NO: 1026094 - DNA, 15 bp, Homo sapiens
gggctggcggcgtgg

SEQ ID NO: 1026095 - DNA, 15 bp, Homo sapiens
ggctggcggcgtggt

SEQ ID NO: 1026096 - DNA, 15 bp, Homo sapiens
gctggcggcgtggtg

SEQ ID NO: 1026097 - DNA, 15 bp, Homo sapiens
ctggcggcgtggtgc

SEQ ID NO: 1026098 - DNA, 15 bp, Homo sapiens
tggcggcgtggtgcg

SEQ ID NO: 1026099 - DNA, 15 bp, Homo sapiens
ggcggcgtggtgcgc

SEQ ID NO: 1026100 - DNA, 15 bp, Homo sapiens
gcggcgtggtgcgcc

SEQ ID NO: 1026101 - DNA, 15 bp, Homo sapiens
cggcgtggtgcgcca

SEQ ID NO: 1026102 - DNA, 15 bp, Homo sapiens
ggcgtggtgcgccag

SEQ ID NO: 1026103 - DNA, 15 bp, Homo sapiens
gcgtggtgcgccagg

SEQ ID NO: 1026104 - DNA, 15 bp, Homo sapiens
cgtggtgcgccaggt

SEQ ID NO: 1026105 - DNA, 15 bp, Homo sapiens
gtggtgcgccaggtc

SEQ ID NO: 1026106 - DNA, 15 bp, Homo sapiens
tggtgcgccaggtcc

SEQ ID NO: 1026107 - DNA, 15 bp, Homo sapiens
ggtgcgccaggtccg

SEQ ID NO: 1026108 - DNA, 15 bp, Homo sapiens
gtgcgccaggtccgg

SEQ ID NO: 1026109 - DNA, 15 bp, Homo sapiens
tgcgccaggtccgga

SEQ ID NO: 1026110 - DNA, 15 bp, Homo sapiens
gcgccaggtccggag

SEQ ID NO: 1026111 - DNA, 15 bp, Homo sapiens
cgccaggtccggaga

SEQ ID NO: 1026112 - DNA, 15 bp, Homo sapiens
gccaggtccggagac

SEQ ID NO: 1026113 - DNA, 15 bp, Homo sapiens
ccaggtccggagact

SEQ ID NO: 1026114 - DNA, 15 bp, Homo sapiens
caggtccggagactg

SEQ ID NO: 1026115 - DNA, 15 bp, Homo sapiens
aggtccggagactgg

SEQ ID NO: 1026116 - DNA, 15 bp, Homo sapiens
ggtccggagactggc

SEQ ID NO: 1026117 - DNA, 15 bp, Homo sapiens
gtccggagactggcc

SEQ ID NO: 1026118 - DNA, 15 bp, Homo sapiens
tccggagactggcct

SEQ ID NO: 1026119 - DNA, 15 bp, Homo sapiens
ccggagactggcctg

SEQ ID NO: 1026120 - DNA, 15 bp, Homo sapiens
cggagactggcctgc

SEQ ID NO: 1026121 - DNA, 15 bp, Homo sapiens
ggagactggcctgcg

SEQ ID NO: 1026122 - DNA, 15 bp, Homo sapiens
gagactggcctgcgc

SEQ ID NO: 1026123 - DNA, 15 bp, Homo sapiens
agactggcctgcgct

SEQ ID NO: 1026124 - DNA, 15 bp, Homo sapiens
gactggcctgcgctg

SEQ ID NO: 1026125 - DNA, 15 bp, Homo sapiens
actggcctgcgctgc

SEQ ID NO: 1026126 - DNA, 15 bp, Homo sapiens
ctggcctgcgctgcc

SEQ ID NO: 1026127 - DNA, 15 bp, Homo sapiens
tggcctgcgctgcct

SEQ ID NO: 1026128 - DNA, 15 bp, Homo sapiens
ggcctgcgctgcctg

SEQ ID NO: 1026129 - DNA, 15 bp, Homo sapiens
gcctgcgctgcctgg

SEQ ID NO: 1026130 - DNA, 15 bp, Homo sapiens
cctgcgctgcctggc

SEQ ID NO: 1026131 - DNA, 15 bp, Homo sapiens
ctgcgctgcctggct

SEQ ID NO: 1026132 - DNA, 15 bp, Homo sapiens
tgcgctgcctggctg

SEQ ID NO: 1026133 - DNA, 15 bp, Homo sapiens
gcgctgcctggctgg

SEQ ID NO: 1026134 - DNA, 15 bp, Homo sapiens
cgctgcctggctggt

SEQ ID NO: 1026135 - DNA, 15 bp, Homo sapiens
gctgcctggctggtg

SEQ ID NO: 1026136 - DNA, 15 bp, Homo sapiens
ctgcctggctggtgg

SEQ ID NO: 1026137 - DNA, 15 bp, Homo sapiens
tgcctggctggtggc

SEQ ID NO: 1026138 - DNA, 15 bp, Homo sapiens
gcctggctggtggcc

SEQ ID NO: 1026139 - DNA, 15 bp, Homo sapiens
cctggctggtggccc

SEQ ID NO: 1026140 - DNA, 15 bp, Homo sapiens
ctggctggtggcccg

SEQ ID NO: 1026141 - DNA, 15 bp, Homo sapiens
tggctggtggcccgg

SEQ ID NO: 1026142 - DNA, 15 bp, Homo sapiens
ggctggtggcccggg

SEQ ID NO: 1026143 - DNA, 15 bp, Homo sapiens
gctggtggcccgggt

SEQ ID NO: 1026144 - DNA, 15 bp, Homo sapiens
ctggtggcccgggtg

SEQ ID NO: 1026145 - DNA, 15 bp, Homo sapiens
tggtggcccgggtgt

SEQ ID NO: 1026146 - DNA, 15 bp, Homo sapiens
ggtggcccgggtgtg

SEQ ID NO: 1026147 - DNA, 15 bp, Homo sapiens
gtggcccgggtgtgc

SEQ ID NO: 1026148 - DNA, 15 bp, Homo sapiens
tggcccgggtgtgcg

SEQ ID NO: 1026149 - DNA, 15 bp, Homo sapiens
ggcccgggtgtgcgc

SEQ ID NO: 1026150 - DNA, 15 bp, Homo sapiens
gcccgggtgtgcgcc

SEQ ID NO: 1026151 - DNA, 15 bp, Homo sapiens
cccgggtgtgcgcca

SEQ ID NO: 1026152 - DNA, 15 bp, Homo sapiens
ccgggtgtgcgccaa

SEQ ID NO: 1026153 - DNA, 15 bp, Homo sapiens
cgggtgtgcgccaag

SEQ ID NO: 1026154 - DNA, 15 bp, Homo sapiens
gggtgtgcgccaagg

SEQ ID NO: 1026155 - DNA, 15 bp, Homo sapiens
ggtgtgcgccaaggc

SEQ ID NO: 1026156 - DNA, 15 bp, Homo sapiens
gtgtgcgccaaggcc

SEQ ID NO: 1026157 - DNA, 15 bp, Homo sapiens
tgtgcgccaaggccg

SEQ ID NO: 1026158 - DNA, 15 bp, Homo sapiens
gtgcgccaaggccgg

SEQ ID NO: 1026159 - DNA, 15 bp, Homo sapiens
tgcgccaaggccggc

SEQ ID NO: 1026160 - DNA, 15 bp, Homo sapiens
gcgccaaggccggcg

SEQ ID NO: 1026161 - DNA, 15 bp, Homo sapiens
cgccaaggccggcgc

SEQ ID NO: 1026162 - DNA, 15 bp, Homo sapiens
gccaaggccggcgcc

SEQ ID NO: 1026163 - DNA, 15 bp, Homo sapiens
ccaaggccggcgcca

SEQ ID NO: 1026164 - DNA, 15 bp, Homo sapiens
caaggccggcgccac

SEQ ID NO: 1026165 - DNA, 15 bp, Homo sapiens
aaggccggcgccacc

SEQ ID NO: 1026166 - DNA, 15 bp, Homo sapiens
aggccggcgccaccg

SEQ ID NO: 1026167 - DNA, 15 bp, Homo sapiens
ggccggcgccaccgc

SEQ ID NO: 1026168 - DNA, 15 bp, Homo sapiens
gccggcgccaccgct

SEQ ID NO: 1026169 - DNA, 15 bp, Homo sapiens
ccggcgccaccgctg

SEQ ID NO: 1026170 - DNA, 15 bp, Homo sapiens
cggcgccaccgctgc

SEQ ID NO: 1026171 - DNA, 15 bp, Homo sapiens
ggcgccaccgctgcc

SEQ ID NO: 1026172 - DNA, 15 bp, Homo sapiens
gcgccaccgctgccc

SEQ ID NO: 1026173 - DNA, 15 bp, Homo sapiens
cgccaccgctgccca

SEQ ID NO: 1026174 - DNA, 15 bp, Homo sapiens
gccaccgctgcccac

SEQ ID NO: 1026175 - DNA, 15 bp, Homo sapiens
ccaccgctgcccacg

SEQ ID NO: 1026176 - DNA, 15 bp, Homo sapiens
caccgctgcccacgg

SEQ ID NO: 1026177 - DNA, 15 bp, Homo sapiens
accgctgcccacgga

SEQ ID NO: 1026178 - DNA, 15 bp, Homo sapiens
ccgctgcccacggag

SEQ ID NO: 1026179 - DNA, 15 bp, Homo sapiens
cgctgcccacggaga

SEQ ID NO: 1026180 - DNA, 15 bp, Homo sapiens
gctgcccacggagat

SEQ ID NO: 1026181 - DNA, 15 bp, Homo sapiens
ctgcccacggagatg

SEQ ID NO: 1026182 - DNA, 15 bp, Homo sapiens
tgcccacggagatgg

SEQ ID NO: 1026183 - DNA, 15 bp, Homo sapiens
gcccacggagatggc

SEQ ID NO: 1026184 - DNA, 15 bp, Homo sapiens
cccacggagatggcc

SEQ ID NO: 1026185 - DNA, 15 bp, Homo sapiens
ccacggagatggccg

SEQ ID NO: 1026186 - DNA, 15 bp, Homo sapiens
cacggagatggccgc

SEQ ID NO: 1026187 - DNA, 15 bp, Homo sapiens
acggagatggccgct

SEQ ID NO: 1026188 - DNA, 15 bp, Homo sapiens
cggagatggccgctg

SEQ ID NO: 1026189 - DNA, 15 bp, Homo sapiens
ggagatggccgctgc

SEQ ID NO: 1026190 - DNA, 15 bp, Homo sapiens
gagatggccgctgcc

SEQ ID NO: 1026191 - DNA, 15 bp, Homo sapiens
agatggccgctgccg

SEQ ID NO: 1026192 - DNA, 15 bp, Homo sapiens
gatggccgctgccgc

SEQ ID NO: 1026193 - DNA, 15 bp, Homo sapiens
atggccgctgccgcc

SEQ ID NO: 1026194 - DNA, 15 bp, Homo sapiens
tggccgctgccgccg

SEQ ID NO: 1026195 - DNA, 15 bp, Homo sapiens
ggccgctgccgccgc

SEQ ID NO: 1026196 - DNA, 15 bp, Homo sapiens
gccgctgccgccgcc

SEQ ID NO: 1026197 - DNA, 15 bp, Homo sapiens
ccgctgccgccgcct

SEQ ID NO: 1026198 - DNA, 15 bp, Homo sapiens
cgctgccgccgcctg

SEQ ID NO: 1026199 - DNA, 15 bp, Homo sapiens
gctgccgccgcctgc

SEQ ID NO: 1026200 - DNA, 15 bp, Homo sapiens
ctgccgccgcctgcg

SEQ ID NO: 1026201 - DNA, 15 bp, Homo sapiens
tgccgccgcctgcgc

SEQ ID NO: 1026202 - DNA, 15 bp, Homo sapiens
gccgccgcctgcgcg

SEQ ID NO: 1026203 - DNA, 15 bp, Homo sapiens
ccgccgcctgcgcgg

SEQ ID NO: 1026204 - DNA, 15 bp, Homo sapiens
cgccgcctgcgcggc

SEQ ID NO: 1026205 - DNA, 15 bp, Homo sapiens
gccgcctgcgcggcc

SEQ ID NO: 1026206 - DNA, 15 bp, Homo sapiens
ccgcctgcgcggcct

SEQ ID NO: 1026207 - DNA, 15 bp, Homo sapiens
cgcctgcgcggcctg

SEQ ID NO: 1026208 - DNA, 15 bp, Homo sapiens
gcctgcgcggcctgc

SEQ ID NO: 1026209 - DNA, 15 bp, Homo sapiens
cctgcgcggcctgcg

SEQ ID NO: 1026210 - DNA, 15 bp, Homo sapiens
ctgcgcggcctgcgc

SEQ ID NO: 1026211 - DNA, 15 bp, Homo sapiens
tgcgcggcctgcgcc

SEQ ID NO: 1026212 - DNA, 15 bp, Homo sapiens
gcgcggcctgcgcct

SEQ ID NO: 1026213 - DNA, 15 bp, Homo sapiens
cgcggcctgcgcctg

SEQ ID NO: 1026214 - DNA, 15 bp, Homo sapiens
gcggcctgcgcctgg

SEQ ID NO: 1026215 - DNA, 15 bp, Homo sapiens
cggcctgcgcctggt

SEQ ID NO: 1026216 - DNA, 15 bp, Homo sapiens
ggcctgcgcctggtg

SEQ ID NO: 1026217 - DNA, 15 bp, Homo sapiens
gcctgcgcctggtgc

SEQ ID NO: 1026218 - DNA, 15 bp, Homo sapiens
cctgcgcctggtgct

SEQ ID NO: 1026219 - DNA, 15 bp, Homo sapiens
ctgcgcctggtgctg

SEQ ID NO: 1026220 - DNA, 15 bp, Homo sapiens
tgcgcctggtgctgc

SEQ ID NO: 1026221 - DNA, 15 bp, Homo sapiens
gcgcctggtgctgcg

SEQ ID NO: 1026222 - DNA, 15 bp, Homo sapiens
cgcctggtgctgcgc

SEQ ID NO: 1026223 - DNA, 15 bp, Homo sapiens
gcctggtgctgcgcc

SEQ ID NO: 1026224 - DNA, 15 bp, Homo sapiens
cctggtgctgcgcct

SEQ ID NO: 1026225 - DNA, 15 bp, Homo sapiens
ctggtgctgcgcctg

SEQ ID NO: 1026226 - DNA, 15 bp, Homo sapiens
tggtgctgcgcctgc

SEQ ID NO: 1026227 - DNA, 15 bp, Homo sapiens
ggtgctgcgcctgct

SEQ ID NO: 1026228 - DNA, 15 bp, Homo sapiens
gtgctgcgcctgctg

SEQ ID NO: 1026229 - DNA, 15 bp, Homo sapiens
tgctgcgcctgctgc

SEQ ID NO: 1026230 - DNA, 15 bp, Homo sapiens
gctgcgcctgctgct

SEQ ID NO: 1026231 - DNA, 15 bp, Homo sapiens
ctgcgcctgctgctg

SEQ ID NO: 1026232 - DNA, 15 bp, Homo sapiens
tgcgcctgctgctgc

SEQ ID NO: 1026233 - DNA, 15 bp, Homo sapiens
gcgcctgctgctgcg

SEQ ID NO: 1026234 - DNA, 15 bp, Homo sapiens
cgcctgctgctgcgc

SEQ ID NO: 1026235 - DNA, 15 bp, Homo sapiens
gcctgctgctgcgcg

SEQ ID NO: 1026236 - DNA, 15 bp, Homo sapiens
cctgctgctgcgcgt

SEQ ID NO: 1026237 - DNA, 15 bp, Homo sapiens
ctgctgctgcgcgtg

SEQ ID NO: 1026238 - DNA, 15 bp, Homo sapiens
tgctgctgcgcgtgg

SEQ ID NO: 1026239 - DNA, 15 bp, Homo sapiens
gctgctgcgcgtggc

SEQ ID NO: 1026240 - DNA, 15 bp, Homo sapiens
ctgctgcgcgtggcc

SEQ ID NO: 1026241 - DNA, 15 bp, Homo sapiens
tgctgcgcgtggcct

SEQ ID NO: 1026242 - DNA, 15 bp, Homo sapiens
gctgcgcgtggcctt

SEQ ID NO: 1026243 - DNA, 15 bp, Homo sapiens
ctgcgcgtggccttg

SEQ ID NO: 1026244 - DNA, 15 bp, Homo sapiens
tgcgcgtggccttgt

SEQ ID NO: 1026245 - DNA, 15 bp, Homo sapiens
gcgcgtggccttgta

SEQ ID NO: 1026246 - DNA, 15 bp, Homo sapiens
cgcgtggccttgtag

SEQ ID NO: 1026247 - DNA, 15 bp, Homo sapiens
gcgtggccttgtagg

SEQ ID NO: 1026248 - DNA, 15 bp, Homo sapiens
cgtggccttgtaggc

SEQ ID NO: 1026249 - DNA, 15 bp, Homo sapiens
gtggccttgtaggct

SEQ ID NO: 1026250 - DNA, 15 bp, Homo sapiens
tggccttgtaggctg

SEQ ID NO: 1026251 - DNA, 15 bp, Homo sapiens
ggccttgtaggctgg

SEQ ID NO: 1026252 - DNA, 15 bp, Homo sapiens
gccttgtaggctggc

SEQ ID NO: 1026253 - DNA, 15 bp, Homo sapiens
ccttgtaggctggcg

SEQ ID NO: 1026254 - DNA, 15 bp, Homo sapiens
cttgtaggctggcgg

SEQ ID NO: 1026255 - DNA, 15 bp, Homo sapiens
ttgtaggctggcggc

SEQ ID NO: 1026256 - DNA, 15 bp, Homo sapiens
tgtaggctggcggcg

SEQ ID NO: 1026257 - DNA, 15 bp, Homo sapiens
gtaggctggcggcgc

SEQ ID NO: 1026258 - DNA, 15 bp, Homo sapiens
taggctggcggcgcc

SEQ ID NO: 1026259 - DNA, 15 bp, Homo sapiens
aggctggcggcgccc

SEQ ID NO: 1026260 - DNA, 15 bp, Homo sapiens
ggctggcggcgcccg

SEQ ID NO: 1026261 - DNA, 15 bp, Homo sapiens
gctggcggcgcccgg

SEQ ID NO: 1026262 - DNA, 15 bp, Homo sapiens
ctggcggcgcccggc

SEQ ID NO: 1026263 - DNA, 15 bp, Homo sapiens
tggcggcgcccggcg

SEQ ID NO: 1026264 - DNA, 15 bp, Homo sapiens
ggcggcgcccggcgc

SEQ ID NO: 1026265 - DNA, 15 bp, Homo sapiens
gcggcgcccggcgcg

SEQ ID NO: 1026266 - DNA, 15 bp, Homo sapiens
cggcgcccggcgcgg

SEQ ID NO: 1026267 - DNA, 15 bp, Homo sapiens
ggcgcccggcgcggg

SEQ ID NO: 1026268 - DNA, 15 bp, Homo sapiens
gcgcccggcgcgggg

SEQ ID NO: 1026269 - DNA, 15 bp, Homo sapiens
cgcccggcgcggggg

SEQ ID NO: 1026270 - DNA, 15 bp, Homo sapiens
gcccggcgcgggggc

SEQ ID NO: 1026271 - DNA, 15 bp, Homo sapiens
cccggcgcgggggca

SEQ ID NO: 1026272 - DNA, 15 bp, Homo sapiens
ccggcgcgggggcac

SEQ ID NO: 1026273 - DNA, 15 bp, Homo sapiens
cggcgcgggggcacc

SEQ ID NO: 1026274 - DNA, 15 bp, Homo sapiens
ggcgcgggggcaccc

SEQ ID NO: 1026275 - DNA, 15 bp, Homo sapiens
gcgcgggggcacccg

SEQ ID NO: 1026276 - DNA, 15 bp, Homo sapiens
cgcgggggcacccgc

SEQ ID NO: 1026277 - DNA, 15 bp, Homo sapiens
gcgggggcacccgcc

SEQ ID NO: 1026278 - DNA, 15 bp, Homo sapiens
cgggggcacccgcct

SEQ ID NO: 1026279 - DNA, 15 bp, Homo sapiens
gggggcacccgcctg

SEQ ID NO: 1026280 - DNA, 15 bp, Homo sapiens
ggggcacccgcctgg

SEQ ID NO: 1026281 - DNA, 15 bp, Homo sapiens
gggcacccgcctggc

SEQ ID NO: 1026282 - DNA, 15 bp, Homo sapiens
ggcacccgcctggca

SEQ ID NO: 1026283 - DNA, 15 bp, Homo sapiens
gcacccgcctggcac

SEQ ID NO: 1026284 - DNA, 15 bp, Homo sapiens
cacccgcctggcacg

SEQ ID NO: 1026285 - DNA, 15 bp, Homo sapiens
acccgcctggcacgg

SEQ ID NO: 1026286 - DNA, 15 bp, Homo sapiens
cccgcctggcacggt

SEQ ID NO: 1026287 - DNA, 15 bp, Homo sapiens
ccgcctggcacggtt

SEQ ID NO: 1026288 - DNA, 15 bp, Homo sapiens
cgcctggcacggttt

SEQ ID NO: 1026289 - DNA, 15 bp, Homo sapiens
gcctggcacggtttg

SEQ ID NO: 1026290 - DNA, 15 bp, Homo sapiens
cctggcacggtttgc

SEQ ID NO: 1026291 - DNA, 15 bp, Homo sapiens
ctggcacggtttgcc

SEQ ID NO: 1026292 - DNA, 15 bp, Homo sapiens
tggcacggtttgccg

SEQ ID NO: 1026293 - DNA, 15 bp, Homo sapiens
ggcacggtttgccgt

SEQ ID NO: 1026294 - DNA, 15 bp, Homo sapiens
gcacggtttgccgtc

SEQ ID NO: 1026295 - DNA, 15 bp, Homo sapiens
cacggtttgccgtct

SEQ ID NO: 1026296 - DNA, 15 bp, Homo sapiens
acggtttgccgtctt

SEQ ID NO: 1026297 - DNA, 15 bp, Homo sapiens
cggtttgccgtcttt

SEQ ID NO: 1026298 - DNA, 15 bp, Homo sapiens
ggtttgccgtctttc

SEQ ID NO: 1026299 - DNA, 15 bp, Homo sapiens
gtttgccgtctttca

SEQ ID NO: 1026300 - DNA, 15 bp, Homo sapiens
tttgccgtctttcac

SEQ ID NO: 1026301 - DNA, 15 bp, Homo sapiens
ttgccgtctttcacc

SEQ ID NO: 1026302 - DNA, 15 bp, Homo sapiens
tgccgtctttcacca

SEQ ID NO: 1026303 - DNA, 15 bp, Homo sapiens
gccgtctttcaccag

SEQ ID NO: 1026304 - DNA, 15 bp, Homo sapiens
ccgtctttcaccagg

SEQ ID NO: 1026305 - DNA, 15 bp, Homo sapiens
cgtctttcaccagga

SEQ ID NO: 1026306 - DNA, 15 bp, Homo sapiens
gtctttcaccaggac

SEQ ID NO: 1026307 - DNA, 15 bp, Homo sapiens
tctttcaccaggacc

SEQ ID NO: 1026308 - DNA, 15 bp, Homo sapiens
ctttcaccaggaccg

SEQ ID NO: 1026309 - DNA, 15 bp, Homo sapiens
tttcaccaggaccgg

SEQ ID NO: 1026310 - DNA, 15 bp, Homo sapiens
ttcaccaggaccggc

SEQ ID NO: 1026311 - DNA, 15 bp, Homo sapiens
tcaccaggaccggca

SEQ ID NO: 1026312 - DNA, 15 bp, Homo sapiens
caccaggaccggcac

SEQ ID NO: 1026313 - DNA, 15 bp, Homo sapiens
accaggaccggcacc

SEQ ID NO: 1026314 - DNA, 15 bp, Homo sapiens
ccaggaccggcaccg

SEQ ID NO: 1026315 - DNA, 15 bp, Homo sapiens
caggaccggcaccgc

SEQ ID NO: 1026316 - DNA, 15 bp, Homo sapiens
aggaccggcaccgcc

SEQ ID NO: 1026317 - DNA, 15 bp, Homo sapiens
ggaccggcaccgcca

SEQ ID NO: 1026318 - DNA, 15 bp, Homo sapiens
gaccggcaccgccac

SEQ ID NO: 1026319 - DNA, 15 bp, Homo sapiens
accggcaccgccacg

SEQ ID NO: 1026320 - DNA, 15 bp, Homo sapiens
ccggcaccgccacgc

SEQ ID NO: 1026321 - DNA, 15 bp, Homo sapiens
cggcaccgccacgcg

SEQ ID NO: 1026322 - DNA, 15 bp, Homo sapiens
ggcaccgccacgcgt

SEQ ID NO: 1026323 - DNA, 15 bp, Homo sapiens
gcaccgccacgcgtc

SEQ ID NO: 1026324 - DNA, 15 bp, Homo sapiens
caccgccacgcgtcg

SEQ ID NO: 1026325 - DNA, 15 bp, Homo sapiens
accgccacgcgtcgc

SEQ ID NO: 1026326 - DNA, 15 bp, Homo sapiens
ccgccacgcgtcgcg

SEQ ID NO: 1026327 - DNA, 15 bp, Homo sapiens
cgccacgcgtcgcgg

SEQ ID NO: 1026328 - DNA, 15 bp, Homo sapiens
gccacgcgtcgcggc

SEQ ID NO: 1026329 - DNA, 15 bp, Homo sapiens
ccacgcgtcgcggcg

SEQ ID NO: 1026330 - DNA, 15 bp, Homo sapiens
cacgcgtcgcggcga

SEQ ID NO: 1026331 - DNA, 15 bp, Homo sapiens
acgcgtcgcggcgac

SEQ ID NO: 1026332 - DNA, 15 bp, Homo sapiens
cgcgtcgcggcgact

SEQ ID NO: 1026333 - DNA, 15 bp, Homo sapiens
gcgtcgcggcgactg

SEQ ID NO: 1026334 - DNA, 15 bp, Homo sapiens
cgtcgcggcgactgc

SEQ ID NO: 1026335 - DNA, 15 bp, Homo sapiens
gtcgcggcgactgct

SEQ ID NO: 1026336 - DNA, 15 bp, Homo sapiens
tcgcggcgactgctg

SEQ ID NO: 1026337 - DNA, 15 bp, Homo sapiens
cgcggcgactgctgc

SEQ ID NO: 1026338 - DNA, 15 bp, Homo sapiens
gcggcgactgctgct

SEQ ID NO: 1026339 - DNA, 15 bp, Homo sapiens
cggcgactgctgctg

SEQ ID NO: 1026340 - DNA, 15 bp, Homo sapiens
ggcgactgctgctga

SEQ ID NO: 1026341 - DNA, 15 bp, Homo sapiens
gcgactgctgctgag

SEQ ID NO: 1026342 - DNA, 15 bp, Homo sapiens
cgactgctgctgagc

SEQ ID NO: 1026343 - DNA, 15 bp, Homo sapiens
gactgctgctgagcc

SEQ ID NO: 1026344 - DNA, 15 bp, Homo sapiens
actgctgctgagcct

SEQ ID NO: 1026345 - DNA, 15 bp, Homo sapiens
ctgctgctgagcctg

SEQ ID NO: 1026346 - DNA, 15 bp, Homo sapiens
tgctgctgagcctgt

SEQ ID NO: 1026347 - DNA, 15 bp, Homo sapiens
gctgctgagcctgtt

SEQ ID NO: 1026348 - DNA, 15 bp, Homo sapiens
ctgctgagcctgttg

SEQ ID NO: 1026349 - DNA, 15 bp, Homo sapiens
tgctgagcctgttgc

SEQ ID NO: 1026350 - DNA, 15 bp, Homo sapiens
gctgagcctgttgct

SEQ ID NO: 1026351 - DNA, 15 bp, Homo sapiens
ctgagcctgttgctg

SEQ ID NO: 1026352 - DNA, 15 bp, Homo sapiens
tgagcctgttgctgc

SEQ ID NO: 1026353 - DNA, 15 bp, Homo sapiens
gagcctgttgctgct

SEQ ID NO: 1026354 - DNA, 15 bp, Homo sapiens
agcctgttgctgctg

SEQ ID NO: 1026355 - DNA, 15 bp, Homo sapiens
gcctgttgctgctgc

SEQ ID NO: 1026356 - DNA, 15 bp, Homo sapiens
cctgttgctgctgcg

SEQ ID NO: 1026357 - DNA, 15 bp, Homo sapiens
ctgttgctgctgcgg

SEQ ID NO: 1026358 - DNA, 15 bp, Homo sapiens
tgttgctgctgcggg

SEQ ID NO: 1026359 - DNA, 15 bp, Homo sapiens
gttgctgctgcgggc

SEQ ID NO: 1026360 - DNA, 15 bp, Homo sapiens
ttgctgctgcgggca

SEQ ID NO: 1026361 - DNA, 15 bp, Homo sapiens
tgctgctgcgggcac

SEQ ID NO: 1026362 - DNA, 15 bp, Homo sapiens
gctgctgcgggcacc

SEQ ID NO: 1026363 - DNA, 15 bp, Homo sapiens
ctgctgcgggcaccc

SEQ ID NO: 1026364 - DNA, 15 bp, Homo sapiens
tgctgcgggcacccg

SEQ ID NO: 1026365 - DNA, 15 bp, Homo sapiens
gctgcgggcacccgg

SEQ ID NO: 1026366 - DNA, 15 bp, Homo sapiens
ctgcgggcacccggt

SEQ ID NO: 1026367 - DNA, 15 bp, Homo sapiens
tgcgggcacccggtg

SEQ ID NO: 1026368 - DNA, 15 bp, Homo sapiens
gcgggcacccggtgc

SEQ ID NO: 1026369 - DNA, 15 bp, Homo sapiens
cgggcacccggtgcc

SEQ ID NO: 1026370 - DNA, 15 bp, Homo sapiens
gggcacccggtgccc

SEQ ID NO: 1026371 - DNA, 15 bp, Homo sapiens
ggcacccggtgcccc

SEQ ID NO: 1026372 - DNA, 15 bp, Homo sapiens
gcacccggtgccccc

SEQ ID NO: 1026373 - DNA, 15 bp, Homo sapiens
cacccggtgcccccg

SEQ ID NO: 1026374 - DNA, 15 bp, Homo sapiens
acccggtgcccccgc

SEQ ID NO: 1026375 - DNA, 15 bp, Homo sapiens
cccggtgcccccgcc

SEQ ID NO: 1026376 - DNA, 15 bp, Homo sapiens
ccggtgcccccgccg

SEQ ID NO: 1026377 - DNA, 15 bp, Homo sapiens
cggtgcccccgccgc

SEQ ID NO: 1026378 - DNA, 15 bp, Homo sapiens
ggtgcccccgccgcc

SEQ ID NO: 1026379 - DNA, 15 bp, Homo sapiens
gtgcccccgccgccc

SEQ ID NO: 1026380 - DNA, 15 bp, Homo sapiens
tgcccccgccgcccc

SEQ ID NO: 1026381 - DNA, 15 bp, Homo sapiens
gcccccgccgccccc

SEQ ID NO: 1026382 - DNA, 15 bp, Homo sapiens
cccccgccgcccccg

SEQ ID NO: 1026383 - DNA, 15 bp, Homo sapiens
ccccgccgcccccgc

SEQ ID NO: 1026384 - DNA, 15 bp, Homo sapiens
cccgccgcccccgcc

SEQ ID NO: 1026385 - DNA, 15 bp, Homo sapiens
ccgccgcccccgccg

SEQ ID NO: 1026386 - DNA, 15 bp, Homo sapiens
cgccgcccccgccgc

SEQ ID NO: 1026387 - DNA, 15 bp, Homo sapiens
gccgcccccgccgcc

SEQ ID NO: 1026388 - DNA, 15 bp, Homo sapiens
ccgcccccgccgccg

SEQ ID NO: 1026389 - DNA, 15 bp, Homo sapiens
cgcccccgccgccgc

SEQ ID NO: 1026390 - DNA, 15 bp, Homo sapiens
gcccccgccgccgcc

SEQ ID NO: 1026391 - DNA, 15 bp, Homo sapiens
cccccgccgccgccg

SEQ ID NO: 1026392 - DNA, 15 bp, Homo sapiens
ccccgccgccgccgc

SEQ ID NO: 1026393 - DNA, 15 bp, Homo sapiens
cccgccgccgccgct

SEQ ID NO: 1026394 - DNA, 15 bp, Homo sapiens
ccgccgccgccgctg

SEQ ID NO: 1026395 - DNA, 15 bp, Homo sapiens
cgccgccgccgctgt

SEQ ID NO: 1026396 - DNA, 15 bp, Homo sapiens
gccgccgccgctgtc

SEQ ID NO: 1026397 - DNA, 15 bp, Homo sapiens
ccgccgccgctgtcc

SEQ ID NO: 1026398 - DNA, 15 bp, Homo sapiens
cgccgccgctgtcct

SEQ ID NO: 1026399 - DNA, 15 bp, Homo sapiens
gccgccgctgtcctg

SEQ ID NO: 1026400 - DNA, 15 bp, Homo sapiens
ccgccgctgtcctgc

SEQ ID NO: 1026401 - DNA, 15 bp, Homo sapiens
cgccgctgtcctgct

SEQ ID NO: 1026402 - DNA, 15 bp, Homo sapiens
gccgctgtcctgctg

SEQ ID NO: 1026403 - DNA, 15 bp, Homo sapiens
ccgctgtcctgctgc

SEQ ID NO: 1026404 - DNA, 15 bp, Homo sapiens
cgctgtcctgctgca

SEQ ID NO: 1026405 - DNA, 15 bp, Homo sapiens
gctgtcctgctgcag

SEQ ID NO: 1026406 - DNA, 15 bp, Homo sapiens
ctgtcctgctgcagt

SEQ ID NO: 1026407 - DNA, 15 bp, Homo sapiens
tgtcctgctgcagtt

SEQ ID NO: 1026408 - DNA, 15 bp, Homo sapiens
gtcctgctgcagttg

SEQ ID NO: 1026409 - DNA, 15 bp, Homo sapiens
tcctgctgcagttgc

SEQ ID NO: 1026410 - DNA, 15 bp, Homo sapiens
cctgctgcagttgct

SEQ ID NO: 1026411 - DNA, 15 bp, Homo sapiens
ctgctgcagttgctg

SEQ ID NO: 1026412 - DNA, 15 bp, Homo sapiens
tgctgcagttgctgc

SEQ ID NO: 1026413 - DNA, 15 bp, Homo sapiens
gctgcagttgctgct

SEQ ID NO: 1026414 - DNA, 15 bp, Homo sapiens
ctgcagttgctgctg

SEQ ID NO: 1026415 - DNA, 15 bp, Homo sapiens
tgcagttgctgctgc

SEQ ID NO: 1026416 - DNA, 15 bp, Homo sapiens
gcagttgctgctgcg

SEQ ID NO: 1026417 - DNA, 15 bp, Homo sapiens
cagttgctgctgcgc

SEQ ID NO: 1026418 - DNA, 15 bp, Homo sapiens
agttgctgctgcgcc

SEQ ID NO: 1026419 - DNA, 15 bp, Homo sapiens
gttgctgctgcgccg

SEQ ID NO: 1026420 - DNA, 15 bp, Homo sapiens
ttgctgctgcgccgc

SEQ ID NO: 1026421 - DNA, 15 bp, Homo sapiens
tgctgctgcgccgcc

SEQ ID NO: 1026422 - DNA, 15 bp, Homo sapiens
gctgctgcgccgcct

SEQ ID NO: 1026423 - DNA, 15 bp, Homo sapiens
ctgctgcgccgcctt

SEQ ID NO: 1026424 - DNA, 15 bp, Homo sapiens
tgctgcgccgccttg

SEQ ID NO: 1026425 - DNA, 15 bp, Homo sapiens
gctgcgccgccttgt

SEQ ID NO: 1026426 - DNA, 15 bp, Homo sapiens
ctgcgccgccttgtc

SEQ ID NO: 1026427 - DNA, 15 bp, Homo sapiens
tgcgccgccttgtcc

SEQ ID NO: 1026428 - DNA, 15 bp, Homo sapiens
gcgccgccttgtcct

SEQ ID NO: 1026429 - DNA, 15 bp, Homo sapiens
cgccgccttgtcctt

SEQ ID NO: 1026430 - DNA, 15 bp, Homo sapiens
gccgccttgtccttg

SEQ ID NO: 1026431 - DNA, 15 bp, Homo sapiens
ccgccttgtccttgg

SEQ ID NO: 1026432 - DNA, 15 bp, Homo sapiens
cgccttgtccttggc

SEQ ID NO: 1026433 - DNA, 15 bp, Homo sapiens
gccttgtccttggcc

SEQ ID NO: 1026434 - DNA, 15 bp, Homo sapiens
ccttgtccttggcct

SEQ ID NO: 1026435 - DNA, 15 bp, Homo sapiens
cttgtccttggcctg

SEQ ID NO: 1026436 - DNA, 15 bp, Homo sapiens
ttgtccttggcctgg

SEQ ID NO: 1026437 - DNA, 15 bp, Homo sapiens
tgtccttggcctggc

SEQ ID NO: 1026438 - DNA, 15 bp, Homo sapiens
gtccttggcctggcg

SEQ ID NO: 1026439 - DNA, 15 bp, Homo sapiens
tccttggcctggcgc

SEQ ID NO: 1026440 - DNA, 15 bp, Homo sapiens
ccttggcctggcgct

SEQ ID NO: 1026441 - DNA, 15 bp, Homo sapiens
cttggcctggcgctt

SEQ ID NO: 1026442 - DNA, 15 bp, Homo sapiens
ttggcctggcgcttc

SEQ ID NO: 1026443 - DNA, 15 bp, Homo sapiens
tggcctggcgcttca

SEQ ID NO: 1026444 - DNA, 15 bp, Homo sapiens
ggcctggcgcttcat

SEQ ID NO: 1026445 - DNA, 15 bp, Homo sapiens
gcctggcgcttcatt

SEQ ID NO: 1026446 - DNA, 15 bp, Homo sapiens
cctggcgcttcattt

SEQ ID NO: 1026447 - DNA, 15 bp, Homo sapiens
ctggcgcttcatttt

SEQ ID NO: 1026448 - DNA, 15 bp, Homo sapiens
tggcgcttcattttg

SEQ ID NO: 1026449 - DNA, 15 bp, Homo sapiens
ggcgcttcattttgt

SEQ ID NO: 1026450 - DNA, 15 bp, Homo sapiens
gcgcttcattttgta

SEQ ID NO: 1026451 - DNA, 15 bp, Homo sapiens
cgcttcattttgtag

SEQ ID NO: 1026452 - DNA, 15 bp, Homo sapiens
gcttcattttgtagc

SEQ ID NO: 1026453 - DNA, 15 bp, Homo sapiens
cttcattttgtagcg

SEQ ID NO: 1026454 - DNA, 15 bp, Homo sapiens
ttcattttgtagcgg

SEQ ID NO: 1026455 - DNA, 15 bp, Homo sapiens
tcattttgtagcggt

SEQ ID NO: 1026456 - DNA, 15 bp, Homo sapiens
cattttgtagcggtg

SEQ ID NO: 1026457 - DNA, 15 bp, Homo sapiens
attttgtagcggtgg

SEQ ID NO: 1026458 - DNA, 15 bp, Homo sapiens
ttttgtagcggtggt

SEQ ID NO: 1026459 - DNA, 15 bp, Homo sapiens
tttgtagcggtggtt

SEQ ID NO: 1026460 - DNA, 15 bp, Homo sapiens
ttgtagcggtggttc

SEQ ID NO: 1026461 - DNA, 15 bp, Homo sapiens
tgtagcggtggttct

SEQ ID NO: 1026462 - DNA, 15 bp, Homo sapiens
gtagcggtggttctg

SEQ ID NO: 1026463 - DNA, 15 bp, Homo sapiens
tagcggtggttctgg

SEQ ID NO: 1026464 - DNA, 15 bp, Homo sapiens
agcggtggttctgga

SEQ ID NO: 1026465 - DNA, 15 bp, Homo sapiens
gcggtggttctggaa

SEQ ID NO: 1026466 - DNA, 15 bp, Homo sapiens
cggtggttctggaac

SEQ ID NO: 1026467 - DNA, 15 bp, Homo sapiens
ggtggttctggaacc

SEQ ID NO: 1026468 - DNA, 15 bp, Homo sapiens
gtggttctggaacca

SEQ ID NO: 1026469 - DNA, 15 bp, Homo sapiens
tggttctggaaccag

SEQ ID NO: 1026470 - DNA, 15 bp, Homo sapiens
ggttctggaaccaga

SEQ ID NO: 1026471 - DNA, 15 bp, Homo sapiens
gttctggaaccagat

SEQ ID NO: 1026472 - DNA, 15 bp, Homo sapiens
ttctggaaccagatc

SEQ ID NO: 1026473 - DNA, 15 bp, Homo sapiens
tctggaaccagatct

SEQ ID NO: 1026474 - DNA, 15 bp, Homo sapiens
ctggaaccagatctt

SEQ ID NO: 1026475 - DNA, 15 bp, Homo sapiens
tggaaccagatcttg

SEQ ID NO: 1026476 - DNA, 15 bp, Homo sapiens
ggaaccagatcttga

SEQ ID NO: 1026477 - DNA, 15 bp, Homo sapiens
gaaccagatcttgac

SEQ ID NO: 1026478 - DNA, 15 bp, Homo sapiens
aaccagatcttgacc

SEQ ID NO: 1026479 - DNA, 15 bp, Homo sapiens
accagatcttgacct

SEQ ID NO: 1026480 - DNA, 15 bp, Homo sapiens
ccagatcttgacctg

SEQ ID NO: 1026481 - DNA, 15 bp, Homo sapiens
cagatcttgacctgc

SEQ ID NO: 1026482 - DNA, 15 bp, Homo sapiens
agatcttgacctgcg

SEQ ID NO: 1026483 - DNA, 15 bp, Homo sapiens
gatcttgacctgcgt

SEQ ID NO: 1026484 - DNA, 15 bp, Homo sapiens
atcttgacctgcgtg

SEQ ID NO: 1026485 - DNA, 15 bp, Homo sapiens
tcttgacctgcgtgg

SEQ ID NO: 1026486 - DNA, 15 bp, Homo sapiens
cttgacctgcgtggg

SEQ ID NO: 1026487 - DNA, 15 bp, Homo sapiens
ttgacctgcgtgggc

SEQ ID NO: 1026488 - DNA, 15 bp, Homo sapiens
tgacctgcgtgggcg

SEQ ID NO: 1026489 - DNA, 15 bp, Homo sapiens
gacctgcgtgggcgt

SEQ ID NO: 1026490 - DNA, 15 bp, Homo sapiens
acctgcgtgggcgtc

SEQ ID NO: 1026491 - DNA, 15 bp, Homo sapiens
cctgcgtgggcgtca

SEQ ID NO: 1026492 - DNA, 15 bp, Homo sapiens
ctgcgtgggcgtcag

SEQ ID NO: 1026493 - DNA, 15 bp, Homo sapiens
tgcgtgggcgtcagg

SEQ ID NO: 1026494 - DNA, 15 bp, Homo sapiens
gcgtgggcgtcaggt

SEQ ID NO: 1026495 - DNA, 15 bp, Homo sapiens
cgtgggcgtcaggtg

SEQ ID NO: 1026496 - DNA, 15 bp, Homo sapiens
gtgggcgtcaggtgg

SEQ ID NO: 1026497 - DNA, 15 bp, Homo sapiens
tgggcgtcaggtgga

SEQ ID NO: 1026498 - DNA, 15 bp, Homo sapiens
gggcgtcaggtggat

SEQ ID NO: 1026499 - DNA, 15 bp, Homo sapiens
ggcgtcaggtggatc

SEQ ID NO: 1026500 - DNA, 15 bp, Homo sapiens
gcgtcaggtggatca

SEQ ID NO: 1026501 - DNA, 15 bp, Homo sapiens
cgtcaggtggatcat

SEQ ID NO: 1026502 - DNA, 15 bp, Homo sapiens
gtcaggtggatcatg

SEQ ID NO: 1026503 - DNA, 15 bp, Homo sapiens
tcaggtggatcatgc

SEQ ID NO: 1026504 - DNA, 15 bp, Homo sapiens
caggtggatcatgct

SEQ ID NO: 1026505 - DNA, 15 bp, Homo sapiens
aggtggatcatgctg

SEQ ID NO: 1026506 - DNA, 15 bp, Homo sapiens
ggtggatcatgctgg

SEQ ID NO: 1026507 - DNA, 15 bp, Homo sapiens
gtggatcatgctggc

SEQ ID NO: 1026508 - DNA, 15 bp, Homo sapiens
tggatcatgctggcc

SEQ ID NO: 1026509 - DNA, 15 bp, Homo sapiens
ggatcatgctggcca

SEQ ID NO: 1026510 - DNA, 15 bp, Homo sapiens
gatcatgctggccag

SEQ ID NO: 1026511 - DNA, 15 bp, Homo sapiens
atcatgctggccagg

SEQ ID NO: 1026512 - DNA, 15 bp, Homo sapiens
tcatgctggccaggt

SEQ ID NO: 1026513 - DNA, 15 bp, Homo sapiens
catgctggccaggtg

SEQ ID NO: 1026514 - DNA, 15 bp, Homo sapiens
atgctggccaggtgc

SEQ ID NO: 1026515 - DNA, 15 bp, Homo sapiens
tgctggccaggtgct

SEQ ID NO: 1026516 - DNA, 15 bp, Homo sapiens
gctggccaggtgctc

SEQ ID NO: 1026517 - DNA, 15 bp, Homo sapiens
ctggccaggtgctcg

SEQ ID NO: 1026518 - DNA, 15 bp, Homo sapiens
tggccaggtgctcgc

SEQ ID NO: 1026519 - DNA, 15 bp, Homo sapiens
ggccaggtgctcgcg

SEQ ID NO: 1026520 - DNA, 15 bp, Homo sapiens
gccaggtgctcgcgc

SEQ ID NO: 1026521 - DNA, 15 bp, Homo sapiens
ccaggtgctcgcgct

SEQ ID NO: 1026522 - DNA, 15 bp, Homo sapiens
caggtgctcgcgctc

SEQ ID NO: 1026523 - DNA, 15 bp, Homo sapiens
aggtgctcgcgctcc

SEQ ID NO: 1026524 - DNA, 15 bp, Homo sapiens
ggtgctcgcgctccg

SEQ ID NO: 1026525 - DNA, 15 bp, Homo sapiens
gtgctcgcgctccgg

SEQ ID NO: 1026526 - DNA, 15 bp, Homo sapiens
tgctcgcgctccggc

SEQ ID NO: 1026527 - DNA, 15 bp, Homo sapiens
gctcgcgctccggcg

SEQ ID NO: 1026528 - DNA, 15 bp, Homo sapiens
ctcgcgctccggcgc

SEQ ID NO: 1026529 - DNA, 15 bp, Homo sapiens
tcgcgctccggcgcc

SEQ ID NO: 1026530 - DNA, 15 bp, Homo sapiens
cgcgctccggcgccg

SEQ ID NO: 1026531 - DNA, 15 bp, Homo sapiens
gcgctccggcgccga

SEQ ID NO: 1026532 - DNA, 15 bp, Homo sapiens
cgctccggcgccgac

SEQ ID NO: 1026533 - DNA, 15 bp, Homo sapiens
gctccggcgccgaca

SEQ ID NO: 1026534 - DNA, 15 bp, Homo sapiens
ctccggcgccgacag

SEQ ID NO: 1026535 - DNA, 15 bp, Homo sapiens
tccggcgccgacagg

SEQ ID NO: 1026536 - DNA, 15 bp, Homo sapiens
ccggcgccgacaggt

SEQ ID NO: 1026537 - DNA, 15 bp, Homo sapiens
cggcgccgacaggta

SEQ ID NO: 1026538 - DNA, 15 bp, Homo sapiens
ggcgccgacaggtac

SEQ ID NO: 1026539 - DNA, 15 bp, Homo sapiens
gcgccgacaggtact

SEQ ID NO: 1026540 - DNA, 15 bp, Homo sapiens
cgccgacaggtactt

SEQ ID NO: 1026541 - DNA, 15 bp, Homo sapiens
gccgacaggtacttc

SEQ ID NO: 1026542 - DNA, 15 bp, Homo sapiens
ccgacaggtacttct

SEQ ID NO: 1026543 - DNA, 15 bp, Homo sapiens
cgacaggtacttctg

SEQ ID NO: 1026544 - DNA, 15 bp, Homo sapiens
gacaggtacttctgt

SEQ ID NO: 1026545 - DNA, 15 bp, Homo sapiens
acaggtacttctgtt

SEQ ID NO: 1026546 - DNA, 15 bp, Homo sapiens
caggtacttctgttg

SEQ ID NO: 1026547 - DNA, 15 bp, Homo sapiens
aggtacttctgttgc

SEQ ID NO: 1026548 - DNA, 15 bp, Homo sapiens
ggtacttctgttgct

SEQ ID NO: 1026549 - DNA, 15 bp, Homo sapiens
gtacttctgttgctt

SEQ ID NO: 1026550 - DNA, 15 bp, Homo sapiens
tacttctgttgcttg

SEQ ID NO: 1026551 - DNA, 15 bp, Homo sapiens
acttctgttgcttga

SEQ ID NO: 1026552 - DNA, 15 bp, Homo sapiens
cttctgttgcttgaa

SEQ ID NO: 1026553 - DNA, 15 bp, Homo sapiens
ttctgttgcttgaag

SEQ ID NO: 1026554 - DNA, 15 bp, Homo sapiens
tctgttgcttgaagc

SEQ ID NO: 1026555 - DNA, 15 bp, Homo sapiens
ctgttgcttgaagcg

SEQ ID NO: 1026556 - DNA, 15 bp, Homo sapiens
tgttgcttgaagcgt

SEQ ID NO: 1026557 - DNA, 15 bp, Homo sapiens
gttgcttgaagcgtc

SEQ ID NO: 1026558 - DNA, 15 bp, Homo sapiens
ttgcttgaagcgtcg

SEQ ID NO: 1026559 - DNA, 15 bp, Homo sapiens
tgcttgaagcgtcgc

SEQ ID NO: 1026560 - DNA, 15 bp, Homo sapiens
gcttgaagcgtcgct

SEQ ID NO: 1026561 - DNA, 15 bp, Homo sapiens
cttgaagcgtcgctc

SEQ ID NO: 1026562 - DNA, 15 bp, Homo sapiens
ttgaagcgtcgctcc

SEQ ID NO: 1026563 - DNA, 15 bp, Homo sapiens
tgaagcgtcgctcca

SEQ ID NO: 1026564 - DNA, 15 bp, Homo sapiens
gaagcgtcgctccag

SEQ ID NO: 1026565 - DNA, 15 bp, Homo sapiens
aagcgtcgctccagc

SEQ ID NO: 1026566 - DNA, 15 bp, Homo sapiens
agcgtcgctccagct

SEQ ID NO: 1026567 - DNA, 15 bp, Homo sapiens
gcgtcgctccagctc

SEQ ID NO: 1026568 - DNA, 15 bp, Homo sapiens
cgtcgctccagctcg

SEQ ID NO: 1026569 - DNA, 15 bp, Homo sapiens
gtcgctccagctcgt

SEQ ID NO: 1026570 - DNA, 15 bp, Homo sapiens
tcgctccagctcgta

SEQ ID NO: 1026571 - DNA, 15 bp, Homo sapiens
cgctccagctcgtac

SEQ ID NO: 1026572 - DNA, 15 bp, Homo sapiens
gctccagctcgtaca

SEQ ID NO: 1026573 - DNA, 15 bp, Homo sapiens
ctccagctcgtacac

SEQ ID NO: 1026574 - DNA, 15 bp, Homo sapiens
tccagctcgtacacc

SEQ ID NO: 1026575 - DNA, 15 bp, Homo sapiens
ccagctcgtacacct

SEQ ID NO: 1026576 - DNA, 15 bp, Homo sapiens
cagctcgtacacctg

SEQ ID NO: 1026577 - DNA, 15 bp, Homo sapiens
agctcgtacacctgc

SEQ ID NO: 1026578 - DNA, 15 bp, Homo sapiens
gctcgtacacctgcg

SEQ ID NO: 1026579 - DNA, 15 bp, Homo sapiens
ctcgtacacctgcgc

SEQ ID NO: 1026580 - DNA, 15 bp, Homo sapiens
tcgtacacctgcgcc

SEQ ID NO: 1026581 - DNA, 15 bp, Homo sapiens
cgtacacctgcgcct

SEQ ID NO: 1026582 - DNA, 15 bp, Homo sapiens
gtacacctgcgcctg

SEQ ID NO: 1026583 - DNA, 15 bp, Homo sapiens
tacacctgcgcctgc

SEQ ID NO: 1026584 - DNA, 15 bp, Homo sapiens
acacctgcgcctgcg

SEQ ID NO: 1026585 - DNA, 15 bp, Homo sapiens
cacctgcgcctgcga

SEQ ID NO: 1026586 - DNA, 15 bp, Homo sapiens
acctgcgcctgcgag

SEQ ID NO: 1026587 - DNA, 15 bp, Homo sapiens
cctgcgcctgcgaga

SEQ ID NO: 1026588 - DNA, 15 bp, Homo sapiens
ctgcgcctgcgagaa

SEQ ID NO: 1026589 - DNA, 15 bp, Homo sapiens
tgcgcctgcgagaag

SEQ ID NO: 1026590 - DNA, 15 bp, Homo sapiens
gcgcctgcgagaaga

SEQ ID NO: 1026591 - DNA, 15 bp, Homo sapiens
cgcctgcgagaagag

SEQ ID NO: 1026592 - DNA, 15 bp, Homo sapiens
gcctgcgagaagagc

SEQ ID NO: 1026593 - DNA, 15 bp, Homo sapiens
cctgcgagaagagca

SEQ ID NO: 1026594 - DNA, 15 bp, Homo sapiens
ctgcgagaagagcac

SEQ ID NO: 1026595 - DNA, 15 bp, Homo sapiens
tgcgagaagagcacc

SEQ ID NO: 1026596 - DNA, 15 bp, Homo sapiens
gcgagaagagcaccc

SEQ ID NO: 1026597 - DNA, 15 bp, Homo sapiens
cgagaagagcacccg

SEQ ID NO: 1026598 - DNA, 15 bp, Homo sapiens
gagaagagcacccgg

SEQ ID NO: 1026599 - DNA, 15 bp, Homo sapiens
agaagagcacccggc

SEQ ID NO: 1026600 - DNA, 15 bp, Homo sapiens
gaagagcacccggcg

SEQ ID NO: 1026601 - DNA, 15 bp, Homo sapiens
aagagcacccggcgc

SEQ ID NO: 1026602 - DNA, 15 bp, Homo sapiens
agagcacccggcgct

SEQ ID NO: 1026603 - DNA, 15 bp, Homo sapiens
gagcacccggcgctt

SEQ ID NO: 1026604 - DNA, 15 bp, Homo sapiens
agcacccggcgcttc

SEQ ID NO: 1026605 - DNA, 15 bp, Homo sapiens
gcacccggcgcttcc

SEQ ID NO: 1026606 - DNA, 15 bp, Homo sapiens
cacccggcgcttcct

SEQ ID NO: 1026607 - DNA, 15 bp, Homo sapiens
acccggcgcttcctg

SEQ ID NO: 1026608 - DNA, 15 bp, Homo sapiens
cccggcgcttcctgc

SEQ ID NO: 1026609 - DNA, 15 bp, Homo sapiens
ccggcgcttcctgcg

SEQ ID NO: 1026610 - DNA, 15 bp, Homo sapiens
cggcgcttcctgcgc

SEQ ID NO: 1026611 - DNA, 15 bp, Homo sapiens
ggcgcttcctgcgcg

SEQ ID NO: 1026612 - DNA, 15 bp, Homo sapiens
gcgcttcctgcgcgg

SEQ ID NO: 1026613 - DNA, 15 bp, Homo sapiens
cgcttcctgcgcggc

SEQ ID NO: 1026614 - DNA, 15 bp, Homo sapiens
gcttcctgcgcggcg

SEQ ID NO: 1026615 - DNA, 15 bp, Homo sapiens
cttcctgcgcggcgc

SEQ ID NO: 1026616 - DNA, 15 bp, Homo sapiens
ttcctgcgcggcgcg

SEQ ID NO: 1026617 - DNA, 15 bp, Homo sapiens
tcctgcgcggcgcgc

SEQ ID NO: 1026618 - DNA, 15 bp, Homo sapiens
cctgcgcggcgcgct

SEQ ID NO: 1026619 - DNA, 15 bp, Homo sapiens
ctgcgcggcgcgctt

SEQ ID NO: 1026620 - DNA, 15 bp, Homo sapiens
tgcgcggcgcgcttg

SEQ ID NO: 1026621 - DNA, 15 bp, Homo sapiens
gcgcggcgcgcttgg

SEQ ID NO: 1026622 - DNA, 15 bp, Homo sapiens
cgcggcgcgcttggc

SEQ ID NO: 1026623 - DNA, 15 bp, Homo sapiens
gcggcgcgcttggca

SEQ ID NO: 1026624 - DNA, 15 bp, Homo sapiens
cggcgcgcttggcag

SEQ ID NO: 1026625 - DNA, 15 bp, Homo sapiens
ggcgcgcttggcagc

SEQ ID NO: 1026626 - DNA, 15 bp, Homo sapiens
gcgcgcttggcagcg

SEQ ID NO: 1026627 - DNA, 15 bp, Homo sapiens
cgcgcttggcagcgg

SEQ ID NO: 1026628 - DNA, 15 bp, Homo sapiens
gcgcttggcagcggg

SEQ ID NO: 1026629 - DNA, 15 bp, Homo sapiens
cgcttggcagcgggg

SEQ ID NO: 1026630 - DNA, 15 bp, Homo sapiens
gcttggcagcggggc

SEQ ID NO: 1026631 - DNA, 15 bp, Homo sapiens
cttggcagcggggcc

SEQ ID NO: 1026632 - DNA, 15 bp, Homo sapiens
ttggcagcggggcca

SEQ ID NO: 1026633 - DNA, 15 bp, Homo sapiens
tggcagcggggccat

SEQ ID NO: 1026634 - DNA, 15 bp, Homo sapiens
ggcagcggggccatg

SEQ ID NO: 1026635 - DNA, 15 bp, Homo sapiens
gcagcggggccatgt

SEQ ID NO: 1026636 - DNA, 15 bp, Homo sapiens
cagcggggccatgtt

SEQ ID NO: 1026637 - DNA, 15 bp, Homo sapiens
agcggggccatgttc

SEQ ID NO: 1026638 - DNA, 15 bp, Homo sapiens
gcggggccatgttct

SEQ ID NO: 1026639 - DNA, 15 bp, Homo sapiens
cggggccatgttctt

SEQ ID NO: 1026640 - DNA, 15 bp, Homo sapiens
ggggccatgttcttg

SEQ ID NO: 1026641 - DNA, 15 bp, Homo sapiens
gggccatgttcttgc

SEQ ID NO: 1026642 - DNA, 15 bp, Homo sapiens
ggccatgttcttgct

SEQ ID NO: 1026643 - DNA, 15 bp, Homo sapiens
gccatgttcttgctc

SEQ ID NO: 1026644 - DNA, 15 bp, Homo sapiens
ccatgttcttgctca

SEQ ID NO: 1026645 - DNA, 15 bp, Homo sapiens
catgttcttgctcac

SEQ ID NO: 1026646 - DNA, 15 bp, Homo sapiens
atgttcttgctcacg

SEQ ID NO: 1026647 - DNA, 15 bp, Homo sapiens
tgttcttgctcacgt

SEQ ID NO: 1026648 - DNA, 15 bp, Homo sapiens
gttcttgctcacgtc

SEQ ID NO: 1026649 - DNA, 15 bp, Homo sapiens
ttcttgctcacgtcc

SEQ ID NO: 1026650 - DNA, 15 bp, Homo sapiens
tcttgctcacgtccc

SEQ ID NO: 1026651 - DNA, 15 bp, Homo sapiens
cttgctcacgtcccc

SEQ ID NO: 1026652 - DNA, 15 bp, Homo sapiens
ttgctcacgtccccc

SEQ ID NO: 1026653 - DNA, 15 bp, Homo sapiens
tgctcacgtccccca

SEQ ID NO: 1026654 - DNA, 15 bp, Homo sapiens
gctcacgtcccccag

SEQ ID NO: 1026655 - DNA, 15 bp, Homo sapiens
ctcacgtcccccagc

SEQ ID NO: 1026656 - DNA, 15 bp, Homo sapiens
tcacgtcccccagcg

SEQ ID NO: 1026657 - DNA, 15 bp, Homo sapiens
cacgtcccccagcga

SEQ ID NO: 1026658 - DNA, 15 bp, Homo sapiens
acgtcccccagcgag

SEQ ID NO: 1026659 - DNA, 15 bp, Homo sapiens
cgtcccccagcgagc

SEQ ID NO: 1026660 - DNA, 15 bp, Homo sapiens
gtcccccagcgagcc

SEQ ID NO: 1026661 - DNA, 15 bp, Homo sapiens
tcccccagcgagccc

SEQ ID NO: 1026662 - DNA, 15 bp, Homo sapiens
cccccagcgagccca

SEQ ID NO: 1026663 - DNA, 15 bp, Homo sapiens
ccccagcgagcccag

SEQ ID NO: 1026664 - DNA, 15 bp, Homo sapiens
cccagcgagcccagg

SEQ ID NO: 1026665 - DNA, 15 bp, Homo sapiens
ccagcgagcccaggc

SEQ ID NO: 1026666 - DNA, 15 bp, Homo sapiens
cagcgagcccaggcc

SEQ ID NO: 1026667 - DNA, 15 bp, Homo sapiens
agcgagcccaggccg

SEQ ID NO: 1026668 - DNA, 15 bp, Homo sapiens
gcgagcccaggccgc

SEQ ID NO: 1026669 - DNA, 15 bp, Homo sapiens
cgagcccaggccgcc

SEQ ID NO: 1026670 - DNA, 15 bp, Homo sapiens
gagcccaggccgccc

SEQ ID NO: 1026671 - DNA, 15 bp, Homo sapiens
agcccaggccgccca

SEQ ID NO: 1026672 - DNA, 15 bp, Homo sapiens
gcccaggccgcccat

SEQ ID NO: 1026673 - DNA, 15 bp, Homo sapiens
cccaggccgcccatg

SEQ ID NO: 1026674 - DNA, 15 bp, Homo sapiens
ccaggccgcccatgc

SEQ ID NO: 1026675 - DNA, 15 bp, Homo sapiens
caggccgcccatgcc

SEQ ID NO: 1026676 - DNA, 15 bp, Homo sapiens
aggccgcccatgccg

SEQ ID NO: 1026677 - DNA, 15 bp, Homo sapiens
ggccgcccatgccgc

SEQ ID NO: 1026678 - DNA, 15 bp, Homo sapiens
gccgcccatgccgct

SEQ ID NO: 1026679 - DNA, 15 bp, Homo sapiens
ccgcccatgccgctc

SEQ ID NO: 1026680 - DNA, 15 bp, Homo sapiens
cgcccatgccgctca

SEQ ID NO: 1026681 - DNA, 15 bp, Homo sapiens
gcccatgccgctcat

SEQ ID NO: 1026682 - DNA, 15 bp, Homo sapiens
cccatgccgctcatg

SEQ ID NO: 1026683 - DNA, 15 bp, Homo sapiens
ccatgccgctcatgt

SEQ ID NO: 1026684 - DNA, 15 bp, Homo sapiens
catgccgctcatgtt

SEQ ID NO: 1026685 - DNA, 15 bp, Homo sapiens
atgccgctcatgttc

SEQ ID NO: 1026686 - DNA, 15 bp, Homo sapiens
tgccgctcatgttca

SEQ ID NO: 1026687 - DNA, 15 bp, Homo sapiens
gccgctcatgttcat

SEQ ID NO: 1026688 - DNA, 15 bp, Homo sapiens
ccgctcatgttcatg

SEQ ID NO: 1026689 - DNA, 15 bp, Homo sapiens
cgctcatgttcatgc

SEQ ID NO: 1026690 - DNA, 15 bp, Homo sapiens
gctcatgttcatgcc

SEQ ID NO: 1026691 - DNA, 15 bp, Homo sapiens
ctcatgttcatgccg

SEQ ID NO: 1026692 - DNA, 15 bp, Homo sapiens
tcatgttcatgccgc

SEQ ID NO: 1026693 - DNA, 15 bp, Homo sapiens
catgttcatgccgct

SEQ ID NO: 1026694 - DNA, 15 bp, Homo sapiens
atgttcatgccgctc

SEQ ID NO: 1026695 - DNA, 15 bp, Homo sapiens
tgttcatgccgctcg

SEQ ID NO: 1026696 - DNA, 15 bp, Homo sapiens
gttcatgccgctcgc

SEQ ID NO: 1026697 - DNA, 15 bp, Homo sapiens
ttcatgccgctcgcc

SEQ ID NO: 1026698 - DNA, 15 bp, Homo sapiens
tcatgccgctcgccg

SEQ ID NO: 1026699 - DNA, 15 bp, Homo sapiens
catgccgctcgccgg

SEQ ID NO: 1026700 - DNA, 15 bp, Homo sapiens
atgccgctcgccggg

SEQ ID NO: 1026701 - DNA, 15 bp, Homo sapiens
tgccgctcgccgggc

SEQ ID NO: 1026702 - DNA, 15 bp, Homo sapiens
gccgctcgccgggcc

SEQ ID NO: 1026703 - DNA, 15 bp, Homo sapiens
ccgctcgccgggccc

SEQ ID NO: 1026704 - DNA, 15 bp, Homo sapiens
cgctcgccgggccca

SEQ ID NO: 1026705 - DNA, 15 bp, Homo sapiens
gctcgccgggcccat

SEQ ID NO: 1026706 - DNA, 15 bp, Homo sapiens
ctcgccgggcccatg

SEQ ID NO: 1026707 - DNA, 15 bp, Homo sapiens
tcgccgggcccatga

SEQ ID NO: 1026708 - DNA, 15 bp, Homo sapiens
cgccgggcccatgaa

SEQ ID NO: 1026709 - DNA, 15 bp, Homo sapiens
gccgggcccatgaag

SEQ ID NO: 1026710 - DNA, 15 bp, Homo sapiens
ccgggcccatgaagc

SEQ ID NO: 1026711 - DNA, 15 bp, Homo sapiens
cgggcccatgaagcg

SEQ ID NO: 1026712 - DNA, 15 bp, Homo sapiens
gggcccatgaagcgg

SEQ ID NO: 1026713 - DNA, 15 bp, Homo sapiens
ggcccatgaagcggg

SEQ ID NO: 1026714 - DNA, 15 bp, Homo sapiens
gcccatgaagcggga

SEQ ID NO: 1026715 - DNA, 15 bp, Homo sapiens
cccatgaagcgggag

SEQ ID NO: 1026716 - DNA, 15 bp, Homo sapiens
ccatgaagcgggaga

SEQ ID NO: 1026717 - DNA, 15 bp, Homo sapiens
catgaagcgggagac

SEQ ID NO: 1026718 - DNA, 15 bp, Homo sapiens
atgaagcgggagact

SEQ ID NO: 1026719 - DNA, 15 bp, Homo sapiens
tgaagcgggagactg

SEQ ID NO: 1026720 - DNA, 15 bp, Homo sapiens
gaagcgggagactgt

SEQ ID NO: 1026721 - DNA, 15 bp, Homo sapiens
aagcgggagactgta

SEQ ID NO: 1026722 - DNA, 15 bp, Homo sapiens
agcgggagactgtaa

SEQ ID NO: 1026723 - DNA, 15 bp, Homo sapiens
gcgggagactgtaag

SEQ ID NO: 1026724 - DNA, 15 bp, Homo sapiens
cgggagactgtaagc

SEQ ID NO: 1026725 - DNA, 15 bp, Homo sapiens
gggagactgtaagcg

SEQ ID NO: 1026726 - DNA, 15 bp, Homo sapiens
ggagactgtaagcga

SEQ ID NO: 1026727 - DNA, 15 bp, Homo sapiens
gagactgtaagcgac

SEQ ID NO: 1026728 - DNA, 15 bp, Homo sapiens
agactgtaagcgaca

SEQ ID NO: 1026729 - DNA, 15 bp, Homo sapiens
gactgtaagcgacaa

SEQ ID NO: 1026730 - DNA, 15 bp, Homo sapiens
actgtaagcgacaaa

SEQ ID NO: 1026731 - DNA, 15 bp, Homo sapiens
ctgtaagcgacaaac

SEQ ID NO: 1026732 - DNA, 15 bp, Homo sapiens
tgtaagcgacaaacg

SEQ ID NO: 1026733 - DNA, 15 bp, Homo sapiens
gtaagcgacaaacgc

SEQ ID NO: 1026734 - DNA, 15 bp, Homo sapiens
taagcgacaaacgca

SEQ ID NO: 1026735 - DNA, 15 bp, Homo sapiens
aagcgacaaacgcac

SEQ ID NO: 1026736 - DNA, 15 bp, Homo sapiens
agcgacaaacgcaca

SEQ ID NO: 1026737 - DNA, 15 bp, Homo sapiens
gcgacaaacgcacag

SEQ ID NO: 1026738 - DNA, 15 bp, Homo sapiens
cgacaaacgcacagc

SEQ ID NO: 1026739 - DNA, 15 bp, Homo sapiens
gacaaacgcacagcg

SEQ ID NO: 1026740 - DNA, 15 bp, Homo sapiens
acaaacgcacagcgt

SEQ ID NO: 1026741 - DNA, 15 bp, Homo sapiens
caaacgcacagcgtc

SEQ ID NO: 1026742 - DNA, 15 bp, Homo sapiens
aaacgcacagcgtcg

SEQ ID NO: 1026743 - DNA, 15 bp, Homo sapiens
aacgcacagcgtcgg

SEQ ID NO: 1026744 - DNA, 15 bp, Homo sapiens
acgcacagcgtcggc

SEQ ID NO: 1026745 - DNA, 15 bp, Homo sapiens
cgcacagcgtcggcc

SEQ ID NO: 1026746 - DNA, 15 bp, Homo sapiens
gcacagcgtcggccg

SEQ ID NO: 1026747 - DNA, 15 bp, Homo sapiens
cacagcgtcggccgg

SEQ ID NO: 1026748 - DNA, 15 bp, Homo sapiens
acagcgtcggccggg

SEQ ID NO: 1026749 - DNA, 15 bp, Homo sapiens
cagcgtcggccgggg

SEQ ID NO: 1026750 - DNA, 15 bp, Homo sapiens
agcgtcggccggggc

SEQ ID NO: 1026751 - DNA, 15 bp, Homo sapiens
gcgtcggccggggcc

SEQ ID NO: 1026752 - DNA, 15 bp, Homo sapiens
cgtcggccggggcca

SEQ ID NO: 1026753 - DNA, 15 bp, Homo sapiens
gtcggccggggccag

SEQ ID NO: 1026754 - DNA, 15 bp, Homo sapiens
tcggccggggccagg

SEQ ID NO: 1026755 - DNA, 15 bp, Homo sapiens
cggccggggccaggc

SEQ ID NO: 1026756 - DNA, 15 bp, Homo sapiens
ggccggggccaggcc

SEQ ID NO: 1026757 - DNA, 15 bp, Homo sapiens
gccggggccaggccg

SEQ ID NO: 1026758 - DNA, 15 bp, Homo sapiens
ccggggccaggccga

SEQ ID NO: 1026759 - DNA, 15 bp, Homo sapiens
cggggccaggccgag

SEQ ID NO: 1026760 - DNA, 15 bp, Homo sapiens
ggggccaggccgagc

SEQ ID NO: 1026761 - DNA, 15 bp, Homo sapiens
gggccaggccgagcc

SEQ ID NO: 1026762 - DNA, 15 bp, Homo sapiens
ggccaggccgagcca

SEQ ID NO: 1026763 - DNA, 15 bp, Homo sapiens
gccaggccgagccag

SEQ ID NO: 1026764 - DNA, 15 bp, Homo sapiens
ccaggccgagccagg

SEQ ID NO: 1026765 - DNA, 15 bp, Homo sapiens
caggccgagccaggc

SEQ ID NO: 1026766 - DNA, 15 bp, Homo sapiens
aggccgagccaggcc

SEQ ID NO: 1026767 - DNA, 15 bp, Homo sapiens
ggccgagccaggcca

SEQ ID NO: 1026768 - DNA, 15 bp, Homo sapiens
gccgagccaggccac

SEQ ID NO: 1026769 - DNA, 15 bp, Homo sapiens
ccgagccaggccacc

SEQ ID NO: 1026770 - DNA, 15 bp, Homo sapiens
cgagccaggccaccc

SEQ ID NO: 1026771 - DNA, 15 bp, Homo sapiens
gagccaggccacccc

SEQ ID NO: 1026772 - DNA, 15 bp, Homo sapiens
agccaggccacccct

SEQ ID NO: 1026773 - DNA, 15 bp, Homo sapiens
gccaggccacccctg

SEQ ID NO: 1026774 - DNA, 15 bp, Homo sapiens
ccaggccacccctgt

SEQ ID NO: 1026775 - DNA, 15 bp, Homo sapiens
caggccacccctgtt

SEQ ID NO: 1026776 - DNA, 15 bp, Homo sapiens
aggccacccctgttt

SEQ ID NO: 1026777 - DNA, 15 bp, Homo sapiens
ggccacccctgtttt

SEQ ID NO: 1026778 - DNA, 15 bp, Homo sapiens
gccacccctgttttc

SEQ ID NO: 1026779 - DNA, 15 bp, Homo sapiens
ccacccctgttttcc

SEQ ID NO: 1026780 - DNA, 15 bp, Homo sapiens
cacccctgttttccg

SEQ ID NO: 1026781 - DNA, 15 bp, Homo sapiens
acccctgttttccgc

SEQ ID NO: 1026782 - DNA, 15 bp, Homo sapiens
cccctgttttccgcg

SEQ ID NO: 1026783 - DNA, 15 bp, Homo sapiens
ccctgttttccgcgc

SEQ ID NO: 1026784 - DNA, 15 bp, Homo sapiens
cctgttttccgcgcc

SEQ ID NO: 1026785 - DNA, 15 bp, Homo sapiens
ctgttttccgcgcca

SEQ ID NO: 1026786 - DNA, 15 bp, Homo sapiens
tgttttccgcgccat

SEQ ID NO: 1026787 - DNA, 15 bp, Homo sapiens
gttttccgcgccatt

SEQ ID NO: 1026788 - DNA, 15 bp, Homo sapiens
ttttccgcgccattg

SEQ ID NO: 1026789 - DNA, 15 bp, Homo sapiens
tttccgcgccattgg

SEQ ID NO: 1026790 - DNA, 15 bp, Homo sapiens
ttccgcgccattggc

SEQ ID NO: 1026791 - DNA, 15 bp, Homo sapiens
tccgcgccattggcc

SEQ ID NO: 1026792 - DNA, 15 bp, Homo sapiens
ccgcgccattggccc

SEQ ID NO: 1026793 - DNA, 15 bp, Homo sapiens
cgcgccattggcccg

SEQ ID NO: 1026794 - DNA, 15 bp, Homo sapiens
gcgccattggcccgc

SEQ ID NO: 1026795 - DNA, 15 bp, Homo sapiens
cgccattggcccgcc

SEQ ID NO: 1026796 - DNA, 15 bp, Homo sapiens
gccattggcccgccc

SEQ ID NO: 1026797 - DNA, 15 bp, Homo sapiens
ccattggcccgcccg

SEQ ID NO: 1026798 - DNA, 15 bp, Homo sapiens
cattggcccgcccgg

SEQ ID NO: 1026799 - DNA, 15 bp, Homo sapiens
attggcccgcccggc

SEQ ID NO: 1026800 - DNA, 15 bp, Homo sapiens
ttggcccgcccggcc

SEQ ID NO: 1026801 - DNA, 15 bp, Homo sapiens
tggcccgcccggccc

SEQ ID NO: 1026802 - DNA, 15 bp, Homo sapiens
ggcccgcccggcccg

SEQ ID NO: 1026803 - DNA, 15 bp, Homo sapiens
gcccgcccggcccgc

SEQ ID NO: 1026804 - DNA, 15 bp, Homo sapiens
cccgcccggcccgcc

SEQ ID NO: 1026805 - DNA, 15 bp, Homo sapiens
ccgcccggcccgccc

SEQ ID NO: 1026806 - DNA, 15 bp, Homo sapiens
cgcccggcccgcccc

SEQ ID NO: 1026807 - DNA, 15 bp, Homo sapiens
gcccggcccgcccca

SEQ ID NO: 1026808 - DNA, 15 bp, Homo sapiens
cccggcccgccccaa

SEQ ID NO: 1026809 - DNA, 15 bp, Homo sapiens
ccggcccgccccaac

SEQ ID NO: 1026810 - DNA, 15 bp, Homo sapiens
cggcccgccccaacc

SEQ ID NO: 1026811 - DNA, 15 bp, Homo sapiens
ggcccgccccaaccg

SEQ ID NO: 1026812 - DNA, 15 bp, Homo sapiens
gcccgccccaaccga

SEQ ID NO: 1026813 - DNA, 15 bp, Homo sapiens
cccgccccaaccgac

SEQ ID NO: 1026814 - DNA, 15 bp, Homo sapiens
ccgccccaaccgacg

SEQ ID NO: 1026815 - DNA, 15 bp, Homo sapiens
cgccccaaccgacgg

SEQ ID NO: 1026816 - DNA, 15 bp, Homo sapiens
gccccaaccgacggc

SEQ ID NO: 1026817 - DNA, 15 bp, Homo sapiens
ccccaaccgacggcg

SEQ ID NO: 1026818 - DNA, 15 bp, Homo sapiens
cccaaccgacggcgc

SEQ ID NO: 1026819 - DNA, 15 bp, Homo sapiens
ccaaccgacggcgcc

SEQ ID NO: 1026820 - DNA, 15 bp, Homo sapiens
caaccgacggcgccc

SEQ ID NO: 1026821 - DNA, 15 bp, Homo sapiens
aaccgacggcgccct

SEQ ID NO: 1026822 - DNA, 15 bp, Homo sapiens
accgacggcgccctc

SEQ ID NO: 1026823 - DNA, 15 bp, Homo sapiens
ccgacggcgccctcc

SEQ ID NO: 1026824 - DNA, 15 bp, Homo sapiens
cgacggcgccctcct

SEQ ID NO: 1026825 - DNA, 15 bp, Homo sapiens
gacggcgccctcctg

SEQ ID NO: 1026826 - DNA, 15 bp, Homo sapiens
acggcgccctcctga

SEQ ID NO: 1026827 - DNA, 15 bp, Homo sapiens
cggcgccctcctgac

SEQ ID NO: 1026828 - DNA, 15 bp, Homo sapiens
ggcgccctcctgacc

SEQ ID NO: 1026829 - DNA, 15 bp, Homo sapiens
gcgccctcctgaccc

SEQ ID NO: 1026830 - DNA, 15 bp, Homo sapiens
cgccctcctgaccca

SEQ ID NO: 1026831 - DNA, 15 bp, Homo sapiens
gccctcctgacccag

SEQ ID NO: 1026832 - DNA, 15 bp, Homo sapiens
ccctcctgacccagg

SEQ ID NO: 1026833 - DNA, 15 bp, Homo sapiens
cctcctgacccaggc

SEQ ID NO: 1026834 - DNA, 15 bp, Homo sapiens
ctcctgacccaggca

SEQ ID NO: 1026835 - DNA, 15 bp, Homo sapiens
tcctgacccaggcag

SEQ ID NO: 1026836 - DNA, 15 bp, Homo sapiens
cctgacccaggcagc

SEQ ID NO: 1026837 - DNA, 15 bp, Homo sapiens
ctgacccaggcagcc

SEQ ID NO: 1026838 - DNA, 15 bp, Homo sapiens
tgacccaggcagcct

SEQ ID NO: 1026839 - DNA, 15 bp, Homo sapiens
gacccaggcagccta

SEQ ID NO: 1026840 - DNA, 15 bp, Homo sapiens
acccaggcagcctag

SEQ ID NO: 1026841 - DNA, 15 bp, Homo sapiens
cccaggcagcctagc

SEQ ID NO: 1026842 - DNA, 15 bp, Homo sapiens
ccaggcagcctagcg

SEQ ID NO: 1026843 - DNA, 15 bp, Homo sapiens
caggcagcctagcgc

SEQ ID NO: 1026844 - DNA, 15 bp, Homo sapiens
aggcagcctagcgct

SEQ ID NO: 1026845 - DNA, 15 bp, Homo sapiens
ggcagcctagcgctg

SEQ ID NO: 1026846 - DNA, 15 bp, Homo sapiens
gcagcctagcgctgg

SEQ ID NO: 1026847 - DNA, 15 bp, Homo sapiens
cagcctagcgctggg

SEQ ID NO: 1026848 - DNA, 15 bp, Homo sapiens
agcctagcgctgggg

SEQ ID NO: 1026849 - DNA, 15 bp, Homo sapiens
gcctagcgctggggc

SEQ ID NO: 1026850 - DNA, 15 bp, Homo sapiens
cctagcgctggggcc

SEQ ID NO: 1026851 - DNA, 15 bp, Homo sapiens
ctagcgctggggccc

SEQ ID NO: 1026852 - DNA, 15 bp, Homo sapiens
tagcgctggggccca

SEQ ID NO: 1026853 - DNA, 15 bp, Homo sapiens
agcgctggggcccaa

SEQ ID NO: 1026854 - DNA, 15 bp, Homo sapiens
gcgctggggcccaag

SEQ ID NO: 1026855 - DNA, 15 bp, Homo sapiens
cgctggggcccaaga

SEQ ID NO: 1026856 - DNA, 15 bp, Homo sapiens
gctggggcccaagag

SEQ ID NO: 1026857 - DNA, 15 bp, Homo sapiens
ctggggcccaagagg

SEQ ID NO: 1026858 - DNA, 15 bp, Homo sapiens
tggggcccaagaggc

SEQ ID NO: 1026859 - DNA, 15 bp, Homo sapiens
ggggcccaagaggcc

SEQ ID NO: 1026860 - DNA, 15 bp, Homo sapiens
gggcccaagaggccc

SEQ ID NO: 1026861 - DNA, 15 bp, Homo sapiens
ggcccaagaggccca

SEQ ID NO: 1026862 - DNA, 15 bp, Homo sapiens
gcccaagaggcccat

SEQ ID NO: 1026863 - DNA, 15 bp, Homo sapiens
cccaagaggcccatc

SEQ ID NO: 1026864 - DNA, 15 bp, Homo sapiens
ccaagaggcccatcc

SEQ ID NO: 1026865 - DNA, 15 bp, Homo sapiens
caagaggcccatccg

SEQ ID NO: 1026866 - DNA, 15 bp, Homo sapiens
aagaggcccatccgc

SEQ ID NO: 1026867 - DNA, 15 bp, Homo sapiens
agaggcccatccgcg

SEQ ID NO: 1026868 - DNA, 15 bp, Homo sapiens
gaggcccatccgcgg

SEQ ID NO: 1026869 - DNA, 15 bp, Homo sapiens
aggcccatccgcggg

SEQ ID NO: 1026870 - DNA, 15 bp, Homo sapiens
ggcccatccgcgggg

SEQ ID NO: 1026871 - DNA, 15 bp, Homo sapiens
gcccatccgcgggga

SEQ ID NO: 1026872 - DNA, 15 bp, Homo sapiens
cccatccgcggggaa

SEQ ID NO: 1026873 - DNA, 15 bp, Homo sapiens
ccatccgcggggaac

SEQ ID NO: 1026874 - DNA, 15 bp, Homo sapiens
catccgcggggaact

SEQ ID NO: 1026875 - DNA, 15 bp, Homo sapiens
atccgcggggaactg

SEQ ID NO: 1026876 - DNA, 15 bp, Homo sapiens
tccgcggggaactgc

SEQ ID NO: 1026877 - DNA, 15 bp, Homo sapiens
ccgcggggaactgcc

SEQ ID NO: 1026878 - DNA, 15 bp, Homo sapiens
cgcggggaactgcca

SEQ ID NO: 1026879 - DNA, 15 bp, Homo sapiens
gcggggaactgccag

SEQ ID NO: 1026880 - DNA, 15 bp, Homo sapiens
cggggaactgccagc

SEQ ID NO: 1026881 - DNA, 15 bp, Homo sapiens
ggggaactgccagcg

SEQ ID NO: 1026882 - DNA, 15 bp, Homo sapiens
gggaactgccagcgc

SEQ ID NO: 1026883 - DNA, 15 bp, Homo sapiens
ggaactgccagcgcc

SEQ ID NO: 1026884 - DNA, 15 bp, Homo sapiens
gaactgccagcgcct

SEQ ID NO: 1026885 - DNA, 15 bp, Homo sapiens
aactgccagcgcctg

SEQ ID NO: 1026886 - DNA, 15 bp, Homo sapiens
actgccagcgcctgc

SEQ ID NO: 1026887 - DNA, 15 bp, Homo sapiens
ctgccagcgcctgcc

SEQ ID NO: 1026888 - DNA, 15 bp, Homo sapiens
tgccagcgcctgccc

SEQ ID NO: 1026889 - DNA, 15 bp, Homo sapiens
gccagcgcctgcccc

SEQ ID NO: 1026890 - DNA, 15 bp, Homo sapiens
ccagcgcctgcccca

SEQ ID NO: 1026891 - DNA, 15 bp, Homo sapiens
cagcgcctgccccag

SEQ ID NO: 1026892 - DNA, 15 bp, Homo sapiens
agcgcctgccccagg

SEQ ID NO: 1026893 - DNA, 15 bp, Homo sapiens
gcgcctgccccaggc

SEQ ID NO: 1026894 - DNA, 15 bp, Homo sapiens
cgcctgccccaggcc

SEQ ID NO: 1026895 - DNA, 15 bp, Homo sapiens
gcctgccccaggccg

SEQ ID NO: 1026896 - DNA, 15 bp, Homo sapiens
cctgccccaggccgt

SEQ ID NO: 1026897 - DNA, 15 bp, Homo sapiens
ctgccccaggccgta

SEQ ID NO: 1026898 - DNA, 15 bp, Homo sapiens
tgccccaggccgtac

SEQ ID NO: 1026899 - DNA, 15 bp, Homo sapiens
gccccaggccgtacc

SEQ ID NO: 1026900 - DNA, 15 bp, Homo sapiens
ccccaggccgtaccg

SEQ ID NO: 1026901 - DNA, 15 bp, Homo sapiens
cccaggccgtaccgt

SEQ ID NO: 1026902 - DNA, 15 bp, Homo sapiens
ccaggccgtaccgtc

SEQ ID NO: 1026903 - DNA, 15 bp, Homo sapiens
caggccgtaccgtcg

SEQ ID NO: 1026904 - DNA, 15 bp, Homo sapiens
aggccgtaccgtcga

SEQ ID NO: 1026905 - DNA, 15 bp, Homo sapiens
ggccgtaccgtcgag

SEQ ID NO: 1026906 - DNA, 15 bp, Homo sapiens
gccgtaccgtcgagg

SEQ ID NO: 1026907 - DNA, 15 bp, Homo sapiens
ccgtaccgtcgaggg

SEQ ID NO: 1026908 - DNA, 15 bp, Homo sapiens
cgtaccgtcgagggg

SEQ ID NO: 1026909 - DNA, 15 bp, Homo sapiens
gtaccgtcgaggggg

SEQ ID NO: 1026910 - DNA, 15 bp, Homo sapiens
taccgtcgagggggc

SEQ ID NO: 1026911 - DNA, 15 bp, Homo sapiens
accgtcgagggggct

SEQ ID NO: 1026912 - DNA, 15 bp, Homo sapiens
ccgtcgagggggctg

SEQ ID NO: 1026913 - DNA, 15 bp, Homo sapiens
cgtcgagggggctgt

SEQ ID NO: 1026914 - DNA, 15 bp, Homo sapiens
gtcgagggggctgta

SEQ ID NO: 1026915 - DNA, 15 bp, Homo sapiens
tcgagggggctgtac

SEQ ID NO: 1026916 - DNA, 15 bp, Homo sapiens
cgagggggctgtact

SEQ ID NO: 1026917 - DNA, 15 bp, Homo sapiens
gagggggctgtactg

SEQ ID NO: 1026918 - DNA, 15 bp, Homo sapiens
agggggctgtactgg

SEQ ID NO: 1026919 - DNA, 15 bp, Homo sapiens
gggggctgtactgga

SEQ ID NO: 1026920 - DNA, 15 bp, Homo sapiens
ggggctgtactggag

SEQ ID NO: 1026921 - DNA, 15 bp, Homo sapiens
gggctgtactggagc

SEQ ID NO: 1026922 - DNA, 15 bp, Homo sapiens
ggctgtactggagcg

SEQ ID NO: 1026923 - DNA, 15 bp, Homo sapiens
gctgtactggagcgc

SEQ ID NO: 1026924 - DNA, 15 bp, Homo sapiens
ctgtactggagcgct

SEQ ID NO: 1026925 - DNA, 15 bp, Homo sapiens
tgtactggagcgctc

SEQ ID NO: 1026926 - DNA, 15 bp, Homo sapiens
gtactggagcgctca

SEQ ID NO: 1026927 - DNA, 15 bp, Homo sapiens
tactggagcgctcac

SEQ ID NO: 1026928 - DNA, 15 bp, Homo sapiens
actggagcgctcaca

SEQ ID NO: 1026929 - DNA, 15 bp, Homo sapiens
ctggagcgctcacag

SEQ ID NO: 1026930 - DNA, 15 bp, Homo sapiens
tggagcgctcacagc

SEQ ID NO: 1026931 - DNA, 15 bp, Homo sapiens
ggagcgctcacagcc

SEQ ID NO: 1026932 - DNA, 15 bp, Homo sapiens
gagcgctcacagccc

SEQ ID NO: 1026933 - DNA, 15 bp, Homo sapiens
agcgctcacagcccc

SEQ ID NO: 1026934 - DNA, 15 bp, Homo sapiens
gcgctcacagcccca

SEQ ID NO: 1026935 - DNA, 15 bp, Homo sapiens
cgctcacagccccaa

SEQ ID NO: 1026936 - DNA, 15 bp, Homo sapiens
gctcacagccccaac

SEQ ID NO: 1026937 - DNA, 15 bp, Homo sapiens
ctcacagccccaacc

SEQ ID NO: 1026938 - DNA, 15 bp, Homo sapiens
tcacagccccaaccc

SEQ ID NO: 1026939 - DNA, 15 bp, Homo sapiens
cacagccccaaccct

SEQ ID NO: 1026940 - DNA, 15 bp, Homo sapiens
acagccccaaccctg

SEQ ID NO: 1026941 - DNA, 15 bp, Homo sapiens
cagccccaaccctgg

SEQ ID NO: 1026942 - DNA, 15 bp, Homo sapiens
agccccaaccctggc

SEQ ID NO: 1026943 - DNA, 15 bp, Homo sapiens
gccccaaccctggct

SEQ ID NO: 1026944 - DNA, 15 bp, Homo sapiens
ccccaaccctggctg

SEQ ID NO: 1026945 - DNA, 15 bp, Homo sapiens
cccaaccctggctgc

SEQ ID NO: 1026946 - DNA, 15 bp, Homo sapiens
ccaaccctggctgcc

SEQ ID NO: 1026947 - DNA, 15 bp, Homo sapiens
caaccctggctgccc

SEQ ID NO: 1026948 - DNA, 15 bp, Homo sapiens
aaccctggctgccct

SEQ ID NO: 1026949 - DNA, 15 bp, Homo sapiens
accctggctgccctc

SEQ ID NO: 1026950 - DNA, 15 bp, Homo sapiens
ccctggctgccctcc

SEQ ID NO: 1026951 - DNA, 15 bp, Homo sapiens
cctggctgccctccc

SEQ ID NO: 1026952 - DNA, 15 bp, Homo sapiens
ctggctgccctccct

SEQ ID NO: 1026953 - DNA, 15 bp, Homo sapiens
tggctgccctccctc

SEQ ID NO: 1026954 - DNA, 15 bp, Homo sapiens
ggctgccctccctca

SEQ ID NO: 1026955 - DNA, 15 bp, Homo sapiens
gctgccctccctcag

SEQ ID NO: 1026956 - DNA, 15 bp, Homo sapiens
ctgccctccctcagt

SEQ ID NO: 1026957 - DNA, 15 bp, Homo sapiens
tgccctccctcagtc

SEQ ID NO: 1026958 - DNA, 15 bp, Homo sapiens
gccctccctcagtct

SEQ ID NO: 1026959 - DNA, 15 bp, Homo sapiens
ccctccctcagtctc

SEQ ID NO: 1026960 - DNA, 15 bp, Homo sapiens
cctccctcagtctca

SEQ ID NO: 1026961 - DNA, 15 bp, Homo sapiens
ctccctcagtctcag

SEQ ID NO: 1026962 - DNA, 15 bp, Homo sapiens
tccctcagtctcagt

SEQ ID NO: 1026963 - DNA, 15 bp, Homo sapiens
ccctcagtctcagtt

SEQ ID NO: 1026964 - DNA, 15 bp, Homo sapiens
cctcagtctcagttc

SEQ ID NO: 1026965 - DNA, 15 bp, Homo sapiens
ctcagtctcagttcc

SEQ ID NO: 1026966 - DNA, 15 bp, Homo sapiens
tcagtctcagttccc

SEQ ID NO: 1026967 - DNA, 15 bp, Homo sapiens
cagtctcagttccct

SEQ ID NO: 1026968 - DNA, 15 bp, Homo sapiens
agtctcagttccctc

SEQ ID NO: 1026969 - DNA, 15 bp, Homo sapiens
gtctcagttccctct

SEQ ID NO: 1026970 - DNA, 15 bp, Homo sapiens
tctcagttccctctt

SEQ ID NO: 1026971 - DNA, 15 bp, Homo sapiens
ctcagttccctcttt

SEQ ID NO: 1026972 - DNA, 15 bp, Homo sapiens
tcagttccctctttc

SEQ ID NO: 1026973 - DNA, 15 bp, Homo sapiens
cagttccctctttcg

SEQ ID NO: 1026974 - DNA, 15 bp, Homo sapiens
agttccctctttcga

SEQ ID NO: 1026975 - DNA, 15 bp, Homo sapiens
gttccctctttcgaa

SEQ ID NO: 1026976 - DNA, 15 bp, Homo sapiens
ttccctctttcgaac

SEQ ID NO: 1026977 - DNA, 15 bp, Homo sapiens
tccctctttcgaacc

SEQ ID NO: 1026978 - DNA, 15 bp, Homo sapiens
ccctctttcgaacca

SEQ ID NO: 1026979 - DNA, 15 bp, Homo sapiens
cctctttcgaaccaa

SEQ ID NO: 1026980 - DNA, 15 bp, Homo sapiens
ctctttcgaaccaaa

SEQ ID NO: 1026981 - DNA, 15 bp, Homo sapiens
tctttcgaaccaaaa

SEQ ID NO: 1026982 - DNA, 15 bp, Homo sapiens
ctttcgaaccaaaag

SEQ ID NO: 1026983 - DNA, 15 bp, Homo sapiens
tttcgaaccaaaaga

SEQ ID NO: 1026984 - DNA, 15 bp, Homo sapiens
ttcgaaccaaaagac

SEQ ID NO: 1026985 - DNA, 15 bp, Homo sapiens
tcgaaccaaaagacg

SEQ ID NO: 1026986 - DNA, 15 bp, Homo sapiens
cgaaccaaaagacgc

SEQ ID NO: 1026987 - DNA, 15 bp, Homo sapiens
gaaccaaaagacgca

SEQ ID NO: 1026988 - DNA, 15 bp, Homo sapiens
aaccaaaagacgcag

SEQ ID NO: 1026989 - DNA, 15 bp, Homo sapiens
accaaaagacgcagt

SEQ ID NO: 1026990 - DNA, 15 bp, Homo sapiens
ccaaaagacgcagtg

SEQ ID NO: 1026991 - DNA, 15 bp, Homo sapiens
caaaagacgcagtgg

SEQ ID NO: 1026992 - DNA, 15 bp, Homo sapiens
aaaagacgcagtggg

SEQ ID NO: 1026993 - DNA, 15 bp, Homo sapiens
aaagacgcagtgggg

SEQ ID NO: 1026994 - DNA, 15 bp, Homo sapiens
aagacgcagtggggg

SEQ ID NO: 1026995 - DNA, 15 bp, Homo sapiens
agacgcagtggggga

SEQ ID NO: 1026996 - DNA, 15 bp, Homo sapiens
gacgcagtgggggaa

SEQ ID NO: 1026997 - DNA, 15 bp, Homo sapiens
acgcagtgggggaaa

SEQ ID NO: 1026998 - DNA, 15 bp, Homo sapiens
cgcagtgggggaaag

SEQ ID NO: 1026999 - DNA, 15 bp, Homo sapiens
gcagtgggggaaagg

SEQ ID NO: 1027000 - DNA, 15 bp, Homo sapiens
cagtgggggaaaggc

SEQ ID NO: 1027001 - DNA, 15 bp, Homo sapiens
agtgggggaaaggcc

SEQ ID NO: 1027002 - DNA, 15 bp, Homo sapiens
gtgggggaaaggccg

SEQ ID NO: 1027003 - DNA, 15 bp, Homo sapiens
tgggggaaaggccgc

SEQ ID NO: 1027004 - DNA, 15 bp, Homo sapiens
gggggaaaggccgct

SEQ ID NO: 1027005 - DNA, 15 bp, Homo sapiens
ggggaaaggccgctt

SEQ ID NO: 1027006 - DNA, 15 bp, Homo sapiens
gggaaaggccgcttc

SEQ ID NO: 1027007 - DNA, 15 bp, Homo sapiens
ggaaaggccgcttct

SEQ ID NO: 1027008 - DNA, 15 bp, Homo sapiens
gaaaggccgcttctg

SEQ ID NO: 1027009 - DNA, 15 bp, Homo sapiens
aaaggccgcttctgc

SEQ ID NO: 1027010 - DNA, 15 bp, Homo sapiens
aaggccgcttctgct

SEQ ID NO: 1027011 - DNA, 15 bp, Homo sapiens
aggccgcttctgctc

SEQ ID NO: 1027012 - DNA, 15 bp, Homo sapiens
ggccgcttctgctcc

SEQ ID NO: 1027013 - DNA, 15 bp, Homo sapiens
gccgcttctgctcct

SEQ ID NO: 1027014 - DNA, 15 bp, Homo sapiens
ccgcttctgctcctt

SEQ ID NO: 1027015 - DNA, 15 bp, Homo sapiens
cgcttctgctccttt

SEQ ID NO: 1027016 - DNA, 15 bp, Homo sapiens
gcttctgctcctttc

SEQ ID NO: 1027017 - DNA, 15 bp, Homo sapiens
cttctgctcctttcg

SEQ ID NO: 1027018 - DNA, 15 bp, Homo sapiens
ttctgctcctttcgt

SEQ ID NO: 1027019 - DNA, 15 bp, Homo sapiens
tctgctcctttcgtg

SEQ ID NO: 1027020 - DNA, 15 bp, Homo sapiens
ctgctcctttcgtgc

SEQ ID NO: 1027021 - DNA, 15 bp, Homo sapiens
tgctcctttcgtgcc

SEQ ID NO: 1027022 - DNA, 15 bp, Homo sapiens
gctcctttcgtgccc

SEQ ID NO: 1027023 - DNA, 15 bp, Homo sapiens
ctcctttcgtgccca

SEQ ID NO: 1027024 - DNA, 15 bp, Homo sapiens
tcctttcgtgcccag

SEQ ID NO: 1027025 - DNA, 15 bp, Homo sapiens
cctttcgtgcccagc

SEQ ID NO: 1027026 - DNA, 15 bp, Homo sapiens
ctttcgtgcccagcc

SEQ ID NO: 1027027 - DNA, 15 bp, Homo sapiens
tttcgtgcccagccc

SEQ ID NO: 1027028 - DNA, 15 bp, Homo sapiens
ttcgtgcccagcccg

SEQ ID NO: 1027029 - DNA, 15 bp, Homo sapiens
tcgtgcccagcccgg

SEQ ID NO: 1027030 - DNA, 15 bp, Homo sapiens
cgtgcccagcccggg

SEQ ID NO: 1027031 - DNA, 15 bp, Homo sapiens
gtgcccagcccgggt

SEQ ID NO: 1027032 - DNA, 15 bp, Homo sapiens
tgcccagcccgggtc

SEQ ID NO: 1027033 - DNA, 15 bp, Homo sapiens
gcccagcccgggtca

SEQ ID NO: 1027034 - DNA, 15 bp, Homo sapiens
cccagcccgggtcag

SEQ ID NO: 1027035 - DNA, 15 bp, Homo sapiens
ccagcccgggtcaga

SEQ ID NO: 1027036 - DNA, 15 bp, Homo sapiens
cagcccgggtcagag

SEQ ID NO: 1027037 - DNA, 15 bp, Homo sapiens
agcccgggtcagagc

SEQ ID NO: 1027038 - DNA, 15 bp, Homo sapiens
gcccgggtcagagca

SEQ ID NO: 1027039 - DNA, 15 bp, Homo sapiens
cccgggtcagagcat

SEQ ID NO: 1027040 - DNA, 15 bp, Homo sapiens
ccgggtcagagcatt

SEQ ID NO: 1027041 - DNA, 15 bp, Homo sapiens
cgggtcagagcatta

SEQ ID NO: 1027042 - DNA, 15 bp, Homo sapiens
gggtcagagcattag

SEQ ID NO: 1027043 - DNA, 15 bp, Homo sapiens
ggtcagagcattagg

SEQ ID NO: 1027044 - DNA, 15 bp, Homo sapiens
gtcagagcattagga

SEQ ID NO: 1027045 - DNA, 15 bp, Homo sapiens
tcagagcattaggat

SEQ ID NO: 1027046 - DNA, 15 bp, Homo sapiens
cagagcattaggatt

SEQ ID NO: 1027047 - DNA, 15 bp, Homo sapiens
agagcattaggatta

SEQ ID NO: 1027048 - DNA, 15 bp, Homo sapiens
gagcattaggattag

SEQ ID NO: 1027049 - DNA, 15 bp, Homo sapiens
agcattaggattagc

SEQ ID NO: 1027050 - DNA, 15 bp, Homo sapiens
gcattaggattagct

SEQ ID NO: 1027051 - DNA, 15 bp, Homo sapiens
cattaggattagctg

SEQ ID NO: 1027052 - DNA, 15 bp, Homo sapiens
attaggattagctgg

SEQ ID NO: 1027053 - DNA, 15 bp, Homo sapiens
ttaggattagctggc

SEQ ID NO: 1027054 - DNA, 15 bp, Homo sapiens
taggattagctggcc

SEQ ID NO: 1027055 - DNA, 15 bp, Homo sapiens
aggattagctggcca

SEQ ID NO: 1027056 - DNA, 15 bp, Homo sapiens
ggattagctggccac

SEQ ID NO: 1027057 - DNA, 15 bp, Homo sapiens
gattagctggccaca

SEQ ID NO: 1027058 - DNA, 15 bp, Homo sapiens
attagctggccacag

SEQ ID NO: 1027059 - DNA, 15 bp, Homo sapiens
ttagctggccacagg

SEQ ID NO: 1027060 - DNA, 15 bp, Homo sapiens
tagctggccacaggc

SEQ ID NO: 1027061 - DNA, 15 bp, Homo sapiens
agctggccacaggcg

SEQ ID NO: 1027062 - DNA, 15 bp, Homo sapiens
gctggccacaggcgg

SEQ ID NO: 1027063 - DNA, 15 bp, Homo sapiens
ctggccacaggcggc

SEQ ID NO: 1027064 - DNA, 15 bp, Homo sapiens
tggccacaggcggcg

SEQ ID NO: 1027065 - DNA, 15 bp, Homo sapiens
ggccacaggcggcga

SEQ ID NO: 1027066 - DNA, 15 bp, Homo sapiens
gccacaggcggcgaa

SEQ ID NO: 1027067 - DNA, 15 bp, Homo sapiens
ccacaggcggcgaac

SEQ ID NO: 1027068 - DNA, 15 bp, Homo sapiens
cacaggcggcgaact

SEQ ID NO: 1027069 - DNA, 15 bp, Homo sapiens
acaggcggcgaactg

SEQ ID NO: 1027070 - DNA, 15 bp, Homo sapiens
caggcggcgaactgg

SEQ ID NO: 1027071 - DNA, 15 bp, Homo sapiens
aggcggcgaactggg

SEQ ID NO: 1027072 - DNA, 15 bp, Homo sapiens
ggcggcgaactgggc

SEQ ID NO: 1027073 - DNA, 15 bp, Homo sapiens
gcggcgaactgggct

SEQ ID NO: 1027074 - DNA, 15 bp, Homo sapiens
cggcgaactgggctc

SEQ ID NO: 1027075 - DNA, 15 bp, Homo sapiens
ggcgaactgggctca

SEQ ID NO: 1027076 - DNA, 15 bp, Homo sapiens
gcgaactgggctcag

SEQ ID NO: 1027077 - DNA, 15 bp, Homo sapiens
cgaactgggctcagg

SEQ ID NO: 1027078 - DNA, 15 bp, Homo sapiens
gaactgggctcaggc

SEQ ID NO: 1027079 - DNA, 15 bp, Homo sapiens
aactgggctcaggcc

SEQ ID NO: 1027080 - DNA, 15 bp, Homo sapiens
actgggctcaggccg

SEQ ID NO: 1027081 - DNA, 15 bp, Homo sapiens
ctgggctcaggccgg

SEQ ID NO: 1027082 - DNA, 15 bp, Homo sapiens
tgggctcaggccggg

SEQ ID NO: 1027083 - DNA, 15 bp, Homo sapiens
gggctcaggccggga

SEQ ID NO: 1027084 - DNA, 15 bp, Homo sapiens
ggctcaggccgggag

SEQ ID NO: 1027085 - DNA, 15 bp, Homo sapiens
gctcaggccgggagc

SEQ ID NO: 1027086 - DNA, 15 bp, Homo sapiens
ctcaggccgggagct

SEQ ID NO: 1027087 - DNA, 15 bp, Homo sapiens
tcaggccgggagctg

SEQ ID NO: 1027088 - DNA, 15 bp, Homo sapiens
caggccgggagctgg

SEQ ID NO: 1027089 - DNA, 15 bp, Homo sapiens
aggccgggagctggg

SEQ ID NO: 1027090 - DNA, 15 bp, Homo sapiens
ggccgggagctgggg

SEQ ID NO: 1027091 - DNA, 15 bp, Homo sapiens
gccgggagctggggt

SEQ ID NO: 1027092 - DNA, 15 bp, Homo sapiens
ccgggagctggggtc

SEQ ID NO: 1027093 - DNA, 15 bp, Homo sapiens
cgggagctggggtcc

SEQ ID NO: 1027094 - DNA, 15 bp, Homo sapiens
gggagctggggtcct

SEQ ID NO: 1027095 - DNA, 15 bp, Homo sapiens
ggagctggggtccta

SEQ ID NO: 1027096 - DNA, 15 bp, Homo sapiens
gagctggggtcctac

SEQ ID NO: 1027097 - DNA, 15 bp, Homo sapiens
agctggggtcctacg

SEQ ID NO: 1027098 - DNA, 15 bp, Homo sapiens
gctggggtcctacgg

SEQ ID NO: 1027099 - DNA, 15 bp, Homo sapiens
ctggggtcctacggt

SEQ ID NO: 1027100 - DNA, 15 bp, Homo sapiens
tggggtcctacggta

SEQ ID NO: 1027101 - DNA, 15 bp, Homo sapiens
ggggtcctacggtag

SEQ ID NO: 1027102 - DNA, 15 bp, Homo sapiens
gggtcctacggtaga

SEQ ID NO: 1027103 - DNA, 15 bp, Homo sapiens
ggtcctacggtagac

SEQ ID NO: 1027104 - DNA, 15 bp, Homo sapiens
gtcctacggtagacc

SEQ ID NO: 1027105 - DNA, 15 bp, Homo sapiens
tcctacggtagaccc

SEQ ID NO: 1027106 - DNA, 15 bp, Homo sapiens
cctacggtagacccc

SEQ ID NO: 1027107 - DNA, 15 bp, Homo sapiens
ctacggtagacccca

SEQ ID NO: 1027108 - DNA, 15 bp, Homo sapiens
tacggtagaccccag

SEQ ID NO: 1027109 - DNA, 15 bp, Homo sapiens
acggtagaccccagt

SEQ ID NO: 1027110 - DNA, 15 bp, Homo sapiens
cggtagaccccagtt

SEQ ID NO: 1027111 - DNA, 15 bp, Homo sapiens
ggtagaccccagttt

SEQ ID NO: 1027112 - DNA, 15 bp, Homo sapiens
gtagaccccagtttg

SEQ ID NO: 1027113 - DNA, 15 bp, Homo sapiens
tagaccccagtttgg

SEQ ID NO: 1027114 - DNA, 15 bp, Homo sapiens
agaccccagtttgga

SEQ ID NO: 1027115 - DNA, 15 bp, Homo sapiens
gaccccagtttggag

SEQ ID NO: 1027116 - DNA, 15 bp, Homo sapiens
accccagtttggaga

SEQ ID NO: 1027117 - DNA, 15 bp, Homo sapiens
ccccagtttggagag

SEQ ID NO: 1027118 - DNA, 15 bp, Homo sapiens
cccagtttggagagg

SEQ ID NO: 1027119 - DNA, 15 bp, Homo sapiens
ccagtttggagaggt

SEQ ID NO: 1027120 - DNA, 15 bp, Homo sapiens
cagtttggagaggtt

SEQ ID NO: 1027121 - DNA, 15 bp, Homo sapiens
agtttggagaggtta

SEQ ID NO: 1027122 - DNA, 15 bp, Homo sapiens
gtttggagaggttag

SEQ ID NO: 1027123 - DNA, 15 bp, Homo sapiens
tttggagaggttagg

SEQ ID NO: 1027124 - DNA, 15 bp, Homo sapiens
ttggagaggttagga

SEQ ID NO: 1027125 - DNA, 15 bp, Homo sapiens
tggagaggttaggag

SEQ ID NO: 1027126 - DNA, 15 bp, Homo sapiens
ggagaggttaggaga

SEQ ID NO: 1027127 - DNA, 15 bp, Homo sapiens
gagaggttaggagag

SEQ ID NO: 1027128 - DNA, 15 bp, Homo sapiens
agaggttaggagagg

SEQ ID NO: 1027129 - DNA, 15 bp, Homo sapiens
gaggttaggagaggg

SEQ ID NO: 1027130 - DNA, 15 bp, Homo sapiens
aggttaggagagggg

SEQ ID NO: 1027131 - DNA, 15 bp, Homo sapiens
ggttaggagaggggg

SEQ ID NO: 1027132 - DNA, 15 bp, Homo sapiens
gttaggagagggggt

SEQ ID NO: 1027133 - DNA, 15 bp, Homo sapiens
ttaggagagggggtg

SEQ ID NO: 1027134 - DNA, 15 bp, Homo sapiens
taggagagggggtgt

SEQ ID NO: 1027135 - DNA, 15 bp, Homo sapiens
aggagagggggtgtt

SEQ ID NO: 1027136 - DNA, 15 bp, Homo sapiens
ggagagggggtgttg

SEQ ID NO: 1027137 - DNA, 15 bp, Homo sapiens
gagagggggtgttga

SEQ ID NO: 1027138 - DNA, 15 bp, Homo sapiens
agagggggtgttgac

SEQ ID NO: 1027139 - DNA, 15 bp, Homo sapiens
gagggggtgttgact

SEQ ID NO: 1027140 - DNA, 15 bp, Homo sapiens
agggggtgttgactt

SEQ ID NO: 1027141 - DNA, 15 bp, Homo sapiens
gggggtgttgacttc

SEQ ID NO: 1027142 - DNA, 15 bp, Homo sapiens
ggggtgttgacttcc

SEQ ID NO: 1027143 - DNA, 15 bp, Homo sapiens
gggtgttgacttcca

SEQ ID NO: 1027144 - DNA, 15 bp, Homo sapiens
ggtgttgacttccaa

SEQ ID NO: 1027145 - DNA, 15 bp, Homo sapiens
gtgttgacttccaaa

SEQ ID NO: 1027146 - DNA, 15 bp, Homo sapiens
tgttgacttccaaaa

SEQ ID NO: 1027147 - DNA, 15 bp, Homo sapiens
gttgacttccaaaag

SEQ ID NO: 1027148 - DNA, 15 bp, Homo sapiens
ttgacttccaaaagc

SEQ ID NO: 1027149 - DNA, 15 bp, Homo sapiens
tgacttccaaaagct

SEQ ID NO: 1027150 - DNA, 15 bp, Homo sapiens
gacttccaaaagctg

SEQ ID NO: 1027151 - DNA, 15 bp, Homo sapiens
acttccaaaagctgg

SEQ ID NO: 1027152 - DNA, 15 bp, Homo sapiens
cttccaaaagctgga

SEQ ID NO: 1027153 - DNA, 15 bp, Homo sapiens
ttccaaaagctggag

SEQ ID NO: 1027154 - DNA, 15 bp, Homo sapiens
tccaaaagctggagc

SEQ ID NO: 1027155 - DNA, 15 bp, Homo sapiens
ccaaaagctggagcc

SEQ ID NO: 1027156 - DNA, 15 bp, Homo sapiens
caaaagctggagccc

SEQ ID NO: 1027157 - DNA, 15 bp, Homo sapiens
aaaagctggagcccc

SEQ ID NO: 1027158 - DNA, 15 bp, Homo sapiens
aaagctggagccccc

SEQ ID NO: 1027159 - DNA, 15 bp, Homo sapiens
aagctggagccccca

SEQ ID NO: 1027160 - DNA, 15 bp, Homo sapiens
agctggagcccccag

SEQ ID NO: 1027161 - DNA, 15 bp, Homo sapiens
gctggagcccccaga

SEQ ID NO: 1027162 - DNA, 15 bp, Homo sapiens
ctggagcccccagac

SEQ ID NO: 1027163 - DNA, 15 bp, Homo sapiens
tggagcccccagacg

SEQ ID NO: 1027164 - DNA, 15 bp, Homo sapiens
ggagcccccagacgc

SEQ ID NO: 1027165 - DNA, 15 bp, Homo sapiens
gagcccccagacgct

SEQ ID NO: 1027166 - DNA, 15 bp, Homo sapiens
agcccccagacgctt

SEQ ID NO: 1027167 - DNA, 15 bp, Homo sapiens
gcccccagacgcttt

SEQ ID NO: 1027168 - DNA, 15 bp, Homo sapiens
cccccagacgctttg

SEQ ID NO: 1027169 - DNA, 15 bp, Homo sapiens
ccccagacgctttgc

SEQ ID NO: 1027170 - DNA, 15 bp, Homo sapiens
cccagacgctttgcc

SEQ ID NO: 1027171 - DNA, 15 bp, Homo sapiens
ccagacgctttgcct

SEQ ID NO: 1027172 - DNA, 15 bp, Homo sapiens
cagacgctttgcctc

SEQ ID NO: 1027173 - DNA, 15 bp, Homo sapiens
agacgctttgcctct

SEQ ID NO: 1027174 - DNA, 15 bp, Homo sapiens
gacgctttgcctctt

SEQ ID NO: 1027175 - DNA, 15 bp, Homo sapiens
acgctttgcctcttg

SEQ ID NO: 1027176 - DNA, 15 bp, Homo sapiens
cgctttgcctcttgg

SEQ ID NO: 1027177 - DNA, 15 bp, Homo sapiens
gctttgcctcttggc

SEQ ID NO: 1027178 - DNA, 15 bp, Homo sapiens
ctttgcctcttggct

SEQ ID NO: 1027179 - DNA, 15 bp, Homo sapiens
tttgcctcttggctt

SEQ ID NO: 1027180 - DNA, 15 bp, Homo sapiens
ttgcctcttggcttc

SEQ ID NO: 1027181 - DNA, 15 bp, Homo sapiens
tgcctcttggcttct

SEQ ID NO: 1027182 - DNA, 15 bp, Homo sapiens
gcctcttggcttctc

SEQ ID NO: 1027183 - DNA, 15 bp, Homo sapiens
cctcttggcttctct

SEQ ID NO: 1027184 - DNA, 15 bp, Homo sapiens
ctcttggcttctctc

SEQ ID NO: 1027185 - DNA, 15 bp, Homo sapiens
tcttggcttctctcc

SEQ ID NO: 1027186 - DNA, 15 bp, Homo sapiens
cttggcttctctcct

SEQ ID NO: 1027187 - DNA, 15 bp, Homo sapiens
ttggcttctctcctg

SEQ ID NO: 1027188 - DNA, 15 bp, Homo sapiens
tggcttctctcctgt

SEQ ID NO: 1027189 - DNA, 15 bp, Homo sapiens
ggcttctctcctgtc

SEQ ID NO: 1027190 - DNA, 15 bp, Homo sapiens
gcttctctcctgtca

SEQ ID NO: 1027191 - DNA, 15 bp, Homo sapiens
cttctctcctgtcag

SEQ ID NO: 1027192 - DNA, 15 bp, Homo sapiens
ttctctcctgtcagg

SEQ ID NO: 1027193 - DNA, 15 bp, Homo sapiens
tctctcctgtcaggc

SEQ ID NO: 1027194 - DNA, 15 bp, Homo sapiens
ctctcctgtcaggcc

SEQ ID NO: 1027195 - DNA, 15 bp, Homo sapiens
tctcctgtcaggccc

SEQ ID NO: 1027196 - DNA, 15 bp, Homo sapiens
ctcctgtcaggcccc

SEQ ID NO: 1027197 - DNA, 15 bp, Homo sapiens
tcctgtcaggcccca

SEQ ID NO: 1027198 - DNA, 15 bp, Homo sapiens
cctgtcaggccccag

SEQ ID NO: 1027199 - DNA, 15 bp, Homo sapiens
ctgtcaggccccagt

SEQ ID NO: 1027200 - DNA, 15 bp, Homo sapiens
tgtcaggccccagtg

SEQ ID NO: 1027201 - DNA, 15 bp, Homo sapiens
gtcaggccccagtga

SEQ ID NO: 1027202 - DNA, 15 bp, Homo sapiens
tcaggccccagtgag

SEQ ID NO: 1027203 - DNA, 15 bp, Homo sapiens
caggccccagtgagg

SEQ ID NO: 1027204 - DNA, 15 bp, Homo sapiens
aggccccagtgaggg

SEQ ID NO: 1027205 - DNA, 15 bp, Homo sapiens
ggccccagtgagggc

SEQ ID NO: 1027206 - DNA, 15 bp, Homo sapiens
gccccagtgagggca

SEQ ID NO: 1027207 - DNA, 15 bp, Homo sapiens
ggatgtggcccagag

SEQ ID NO: 1027208 - DNA, 15 bp, Homo sapiens
gatgtggcccagagg

SEQ ID NO: 1027209 - DNA, 15 bp, Homo sapiens
atgtggcccagaggt

SEQ ID NO: 1027210 - DNA, 15 bp, Homo sapiens
tgtggcccagaggtg

SEQ ID NO: 1027211 - DNA, 15 bp, Homo sapiens
gtggcccagaggtgc

SEQ ID NO: 1027212 - DNA, 15 bp, Homo sapiens
tggcccagaggtgca

SEQ ID NO: 1027213 - DNA, 15 bp, Homo sapiens
ggcccagaggtgcaa

SEQ ID NO: 1027214 - DNA, 15 bp, Homo sapiens
gcccagaggtgcaag

SEQ ID NO: 1027215 - DNA, 15 bp, Homo sapiens
cccagaggtgcaagg

SEQ ID NO: 1027216 - DNA, 15 bp, Homo sapiens
ccagaggtgcaagga

SEQ ID NO: 1027217 - DNA, 15 bp, Homo sapiens
cagaggtgcaaggag

SEQ ID NO: 1027218 - DNA, 15 bp, Homo sapiens
agaggtgcaaggagc

SEQ ID NO: 1027219 - DNA, 15 bp, Homo sapiens
gaggtgcaaggagct

SEQ ID NO: 1027220 - DNA, 15 bp, Homo sapiens
aggtgcaaggagctg

SEQ ID NO: 1027221 - DNA, 15 bp, Homo sapiens
ggtgcaaggagctgg

SEQ ID NO: 1027222 - DNA, 15 bp, Homo sapiens
gtgcaaggagctggg

SEQ ID NO: 1027223 - DNA, 15 bp, Homo sapiens
tgcaaggagctgggt

SEQ ID NO: 1027224 - DNA, 15 bp, Homo sapiens
gcaaggagctgggta

SEQ ID NO: 1027225 - DNA, 15 bp, Homo sapiens
caaggagctgggtat

SEQ ID NO: 1027226 - DNA, 15 bp, Homo sapiens
aaggagctgggtatc

SEQ ID NO: 1027227 - DNA, 15 bp, Homo sapiens
aggagctgggtatca

SEQ ID NO: 1027228 - DNA, 15 bp, Homo sapiens
ggagctgggtatcac

SEQ ID NO: 1027229 - DNA, 15 bp, Homo sapiens
gagctgggtatcacc

SEQ ID NO: 1027230 - DNA, 15 bp, Homo sapiens
agctgggtatcaccg

SEQ ID NO: 1027231 - DNA, 15 bp, Homo sapiens
gctgggtatcaccgc

SEQ ID NO: 1027232 - DNA, 15 bp, Homo sapiens
ctgggtatcaccgcc

SEQ ID NO: 1027233 - DNA, 15 bp, Homo sapiens
tgggtatcaccgccc

SEQ ID NO: 1027234 - DNA, 15 bp, Homo sapiens
gggtatcaccgccct

SEQ ID NO: 1027235 - DNA, 15 bp, Homo sapiens
ggtatcaccgcccta

SEQ ID NO: 1027236 - DNA, 15 bp, Homo sapiens
gtatcaccgccctac

SEQ ID NO: 1027237 - DNA, 15 bp, Homo sapiens
tatcaccgccctaca

SEQ ID NO: 1027238 - DNA, 15 bp, Homo sapiens
atcaccgccctacac

SEQ ID NO: 1027239 - DNA, 15 bp, Homo sapiens
tcaccgccctacaca

SEQ ID NO: 1027240 - DNA, 15 bp, Homo sapiens
caccgccctacacat

SEQ ID NO: 1027241 - DNA, 15 bp, Homo sapiens
accgccctacacatc

SEQ ID NO: 1027242 - DNA, 15 bp, Homo sapiens
ccgccctacacatca

SEQ ID NO: 1027243 - DNA, 15 bp, Homo sapiens
cgccctacacatcaa

SEQ ID NO: 1027244 - DNA, 15 bp, Homo sapiens
gccctacacatcaaa

SEQ ID NO: 1027245 - DNA, 15 bp, Homo sapiens
ccctacacatcaaac

SEQ ID NO: 1027246 - DNA, 15 bp, Homo sapiens
cctacacatcaaact

SEQ ID NO: 1027247 - DNA, 15 bp, Homo sapiens
ctacacatcaaactc

SEQ ID NO: 1027248 - DNA, 15 bp, Homo sapiens
tacacatcaaactcc

SEQ ID NO: 1027249 - DNA, 15 bp, Homo sapiens
acacatcaaactccg

SEQ ID NO: 1027250 - DNA, 15 bp, Homo sapiens
cacatcaaactccgg

SEQ ID NO: 1027251 - DNA, 15 bp, Homo sapiens
acatcaaactccggg

SEQ ID NO: 1027252 - DNA, 15 bp, Homo sapiens
catcaaactccgggc

SEQ ID NO: 1027253 - DNA, 15 bp, Homo sapiens
atcaaactccgggcc

SEQ ID NO: 1027254 - DNA, 15 bp, Homo sapiens
tcaaactccgggcca

SEQ ID NO: 1027255 - DNA, 15 bp, Homo sapiens
caaactccgggccac

SEQ ID NO: 1027256 - DNA, 15 bp, Homo sapiens
aaactccgggccaca

SEQ ID NO: 1027257 - DNA, 15 bp, Homo sapiens
aactccgggccacag

SEQ ID NO: 1027258 - DNA, 15 bp, Homo sapiens
actccgggccacagg

SEQ ID NO: 1027259 - DNA, 15 bp, Homo sapiens
ctccgggccacagga

SEQ ID NO: 1027260 - DNA, 15 bp, Homo sapiens
tccgggccacaggag

SEQ ID NO: 1027261 - DNA, 15 bp, Homo sapiens
ccgggccacaggagg

SEQ ID NO: 1027262 - DNA, 15 bp, Homo sapiens
cgggccacaggagga

SEQ ID NO: 1027263 - DNA, 15 bp, Homo sapiens
gggccacaggaggaa

SEQ ID NO: 1027264 - DNA, 15 bp, Homo sapiens
ggccacaggaggaaa

SEQ ID NO: 1027265 - DNA, 15 bp, Homo sapiens
gccacaggaggaaat

SEQ ID NO: 1027266 - DNA, 15 bp, Homo sapiens
ccacaggaggaaata

SEQ ID NO: 1027267 - DNA, 15 bp, Homo sapiens
cacaggaggaaatag

SEQ ID NO: 1027268 - DNA, 15 bp, Homo sapiens
acaggaggaaatagg

SEQ ID NO: 1027269 - DNA, 15 bp, Homo sapiens
caggaggaaataggt

SEQ ID NO: 1027270 - DNA, 15 bp, Homo sapiens
aggaggaaataggta

SEQ ID NO: 1027271 - DNA, 15 bp, Homo sapiens
ggaggaaataggtac

SEQ ID NO: 1027272 - DNA, 15 bp, Homo sapiens
gaggaaataggtacg

SEQ ID NO: 1027273 - DNA, 15 bp, Homo sapiens
aggaaataggtacga

SEQ ID NO: 1027274 - DNA, 15 bp, Homo sapiens
ggaaataggtacgag

SEQ ID NO: 1027275 - DNA, 15 bp, Homo sapiens
gaaataggtacgagt

SEQ ID NO: 1027276 - DNA, 15 bp, Homo sapiens
aaataggtacgagtc

SEQ ID NO: 1027277 - DNA, 15 bp, Homo sapiens
aataggtacgagtcg

SEQ ID NO: 1027278 - DNA, 15 bp, Homo sapiens
ataggtacgagtcgc

SEQ ID NO: 1027279 - DNA, 15 bp, Homo sapiens
taggtacgagtcgca

SEQ ID NO: 1027280 - DNA, 15 bp, Homo sapiens
aggtacgagtcgcag

SEQ ID NO: 1027281 - DNA, 15 bp, Homo sapiens
ggtacgagtcgcaga

SEQ ID NO: 1027282 - DNA, 15 bp, Homo sapiens
gtacgagtcgcagag

SEQ ID NO: 1027283 - DNA, 15 bp, Homo sapiens
tacgagtcgcagagg

SEQ ID NO: 1027284 - DNA, 15 bp, Homo sapiens
acgagtcgcagaggg

SEQ ID NO: 1027285 - DNA, 15 bp, Homo sapiens
cgagtcgcagagggg

SEQ ID NO: 1027286 - DNA, 15 bp, Homo sapiens
gagtcgcagagggga

SEQ ID NO: 1027287 - DNA, 15 bp, Homo sapiens
agtcgcagaggggat

SEQ ID NO: 1027288 - DNA, 15 bp, Homo sapiens
gtcgcagaggggatg

SEQ ID NO: 1027289 - DNA, 15 bp, Homo sapiens
tcgcagaggggatgg

SEQ ID NO: 1027290 - DNA, 15 bp, Homo sapiens
cgcagaggggatggc

SEQ ID NO: 1027291 - DNA, 15 bp, Homo sapiens
gcagaggggatggct

SEQ ID NO: 1027292 - DNA, 15 bp, Homo sapiens
cagaggggatggctg

SEQ ID NO: 1027293 - DNA, 15 bp, Homo sapiens
agaggggatggctgg

SEQ ID NO: 1027294 - DNA, 15 bp, Homo sapiens
gaggggatggctggg

SEQ ID NO: 1027295 - DNA, 15 bp, Homo sapiens
aggggatggctgggt

SEQ ID NO: 1027296 - DNA, 15 bp, Homo sapiens
ggggatggctgggtg

SEQ ID NO: 1027297 - DNA, 15 bp, Homo sapiens
gggatggctgggtgg

SEQ ID NO: 1027298 - DNA, 15 bp, Homo sapiens
ggatggctgggtggt

SEQ ID NO: 1027299 - DNA, 15 bp, Homo sapiens
gatggctgggtggta

SEQ ID NO: 1027300 - DNA, 15 bp, Homo sapiens
atggctgggtggtag

SEQ ID NO: 1027301 - DNA, 15 bp, Homo sapiens
tggctgggtggtaga

SEQ ID NO: 1027302 - DNA, 15 bp, Homo sapiens
ggctgggtggtagaa

SEQ ID NO: 1027303 - DNA, 15 bp, Homo sapiens
gctgggtggtagaaa

SEQ ID NO: 1027304 - DNA, 15 bp, Homo sapiens
ctgggtggtagaaaa

SEQ ID NO: 1027305 - DNA, 15 bp, Homo sapiens
tgggtggtagaaaac

SEQ ID NO: 1027306 - DNA, 15 bp, Homo sapiens
gggtggtagaaaacc

SEQ ID NO: 1027307 - DNA, 15 bp, Homo sapiens
ggtggtagaaaacct

SEQ ID NO: 1027308 - DNA, 15 bp, Homo sapiens
gtggtagaaaacctg

SEQ ID NO: 1027309 - DNA, 15 bp, Homo sapiens
tggtagaaaacctgc

SEQ ID NO: 1027310 - DNA, 15 bp, Homo sapiens
ggtagaaaacctgct

SEQ ID NO: 1027311 - DNA, 15 bp, Homo sapiens
gtagaaaacctgctg

SEQ ID NO: 1027312 - DNA, 15 bp, Homo sapiens
tagaaaacctgctgg

SEQ ID NO: 1027313 - DNA, 15 bp, Homo sapiens
agaaaacctgctggg

SEQ ID NO: 1027314 - DNA, 15 bp, Homo sapiens
gaaaacctgctgggc

SEQ ID NO: 1027315 - DNA, 15 bp, Homo sapiens
aaaacctgctgggct

SEQ ID NO: 1027316 - DNA, 15 bp, Homo sapiens
aaacctgctgggctt

SEQ ID NO: 1027317 - DNA, 15 bp, Homo sapiens
aacctgctgggcttg

SEQ ID NO: 1027318 - DNA, 15 bp, Homo sapiens
acctgctgggcttgg

SEQ ID NO: 1027319 - DNA, 15 bp, Homo sapiens
cctgctgggcttggg

SEQ ID NO: 1027320 - DNA, 15 bp, Homo sapiens
ctgctgggcttgggt

SEQ ID NO: 1027321 - DNA, 15 bp, Homo sapiens
tgctgggcttgggtg

SEQ ID NO: 1027322 - DNA, 15 bp, Homo sapiens
gctgggcttgggtgc

SEQ ID NO: 1027323 - DNA, 15 bp, Homo sapiens
ctgggcttgggtgct

SEQ ID NO: 1027324 - DNA, 15 bp, Homo sapiens
tgggcttgggtgctg

SEQ ID NO: 1027325 - DNA, 15 bp, Homo sapiens
gggcttgggtgctgg

SEQ ID NO: 1027326 - DNA, 15 bp, Homo sapiens
ggcttgggtgctgga

SEQ ID NO: 1027327 - DNA, 15 bp, Homo sapiens
gcttgggtgctggag

SEQ ID NO: 1027328 - DNA, 15 bp, Homo sapiens
cttgggtgctggagc

SEQ ID NO: 1027329 - DNA, 15 bp, Homo sapiens
ttgggtgctggagca

SEQ ID NO: 1027330 - DNA, 15 bp, Homo sapiens
tgggtgctggagcac

SEQ ID NO: 1027331 - DNA, 15 bp, Homo sapiens
gggtgctggagcacc

SEQ ID NO: 1027332 - DNA, 15 bp, Homo sapiens
ggtgctggagcacct

SEQ ID NO: 1027333 - DNA, 15 bp, Homo sapiens
gtgctggagcacctg

SEQ ID NO: 1027334 - DNA, 15 bp, Homo sapiens
tgctggagcacctgg

SEQ ID NO: 1027335 - DNA, 15 bp, Homo sapiens
gctggagcacctgga

SEQ ID NO: 1027336 - DNA, 15 bp, Homo sapiens
ctggagcacctggat

SEQ ID NO: 1027337 - DNA, 15 bp, Homo sapiens
tggagcacctggatt

SEQ ID NO: 1027338 - DNA, 15 bp, Homo sapiens
ggagcacctggattt

SEQ ID NO: 1027339 - DNA, 15 bp, Homo sapiens
gagcacctggatttg

SEQ ID NO: 1027340 - DNA, 15 bp, Homo sapiens
agcacctggatttga

SEQ ID NO: 1027341 - DNA, 15 bp, Homo sapiens
gcacctggatttgag

SEQ ID NO: 1027342 - DNA, 15 bp, Homo sapiens
cacctggatttgagg

SEQ ID NO: 1027343 - DNA, 15 bp, Homo sapiens
acctggatttgaggt

SEQ ID NO: 1027344 - DNA, 15 bp, Homo sapiens
cctggatttgaggtt

SEQ ID NO: 1027345 - DNA, 15 bp, Homo sapiens
ctggatttgaggttt

SEQ ID NO: 1027346 - DNA, 15 bp, Homo sapiens
tggatttgaggtttg

SEQ ID NO: 1027347 - DNA, 15 bp, Homo sapiens
ggatttgaggtttgg

SEQ ID NO: 1027348 - DNA, 15 bp, Homo sapiens
gatttgaggtttggg

SEQ ID NO: 1027349 - DNA, 15 bp, Homo sapiens
atttgaggtttgggt

SEQ ID NO: 1027350 - DNA, 15 bp, Homo sapiens
tttgaggtttgggtt

SEQ ID NO: 1027351 - DNA, 15 bp, Homo sapiens
ttgaggtttgggttt

SEQ ID NO: 1027352 - DNA, 15 bp, Homo sapiens
tgaggtttgggtttt

SEQ ID NO: 1027353 - DNA, 15 bp, Homo sapiens
gaggtttgggttttt

SEQ ID NO: 1027354 - DNA, 15 bp, Homo sapiens
aggtttgggtttttt

SEQ ID NO: 1027355 - DNA, 15 bp, Homo sapiens
ggtttgggttttttg

SEQ ID NO: 1027356 - DNA, 15 bp, Homo sapiens
gtttgggttttttgt

SEQ ID NO: 1027357 - DNA, 15 bp, Homo sapiens
tttgggttttttgtt

SEQ ID NO: 1027358 - DNA, 15 bp, Homo sapiens
ttgggttttttgttg

SEQ ID NO: 1027359 - DNA, 15 bp, Homo sapiens
tgggttttttgttgt

SEQ ID NO: 1027360 - DNA, 15 bp, Homo sapiens
gggttttttgttgtg

SEQ ID NO: 1027361 - DNA, 15 bp, Homo sapiens
ggttttttgttgtga

SEQ ID NO: 1027362 - DNA, 15 bp, Homo sapiens
gttttttgttgtgac

SEQ ID NO: 1027363 - DNA, 15 bp, Homo sapiens
ttttttgttgtgacc

SEQ ID NO: 1027364 - DNA, 15 bp, Homo sapiens
tttttgttgtgacct

SEQ ID NO: 1027365 - DNA, 15 bp, Homo sapiens
ttttgttgtgacctt

SEQ ID NO: 1027366 - DNA, 15 bp, Homo sapiens
tttgttgtgaccttg

SEQ ID NO: 1027367 - DNA, 15 bp, Homo sapiens
ttgttgtgaccttga

SEQ ID NO: 1027368 - DNA, 15 bp, Homo sapiens
tgttgtgaccttgaa

SEQ ID NO: 1027369 - DNA, 15 bp, Homo sapiens
gttgtgaccttgaac

SEQ ID NO: 1027370 - DNA, 15 bp, Homo sapiens
ttgtgaccttgaaca

SEQ ID NO: 1027371 - DNA, 15 bp, Homo sapiens
tgtgaccttgaacaa

SEQ ID NO: 1027372 - DNA, 15 bp, Homo sapiens
gtgaccttgaacaag

SEQ ID NO: 1027373 - DNA, 15 bp, Homo sapiens
tgaccttgaacaaga

SEQ ID NO: 1027374 - DNA, 15 bp, Homo sapiens
gaccttgaacaagat

SEQ ID NO: 1027375 - DNA, 15 bp, Homo sapiens
accttgaacaagata

SEQ ID NO: 1027376 - DNA, 15 bp, Homo sapiens
ccttgaacaagatat

SEQ ID NO: 1027377 - DNA, 15 bp, Homo sapiens
cttgaacaagatatt

SEQ ID NO: 1027378 - DNA, 15 bp, Homo sapiens
ttgaacaagatattt

SEQ ID NO: 1027379 - DNA, 15 bp, Homo sapiens
tgaacaagatatttt

SEQ ID NO: 1027380 - DNA, 15 bp, Homo sapiens
gaacaagatatttta

SEQ ID NO: 1027381 - DNA, 15 bp, Homo sapiens
aacaagatattttag

SEQ ID NO: 1027382 - DNA, 15 bp, Homo sapiens
acaagatattttagg

SEQ ID NO: 1027383 - DNA, 15 bp, Homo sapiens
caagatattttaggc

SEQ ID NO: 1027384 - DNA, 15 bp, Homo sapiens
aagatattttaggca

SEQ ID NO: 1027385 - DNA, 15 bp, Homo sapiens
agatattttaggcat

SEQ ID NO: 1027386 - DNA, 15 bp, Homo sapiens
gatattttaggcata

SEQ ID NO: 1027387 - DNA, 15 bp, Homo sapiens
atattttaggcatat

SEQ ID NO: 1027388 - DNA, 15 bp, Homo sapiens
tattttaggcatata

SEQ ID NO: 1027389 - DNA, 15 bp, Homo sapiens
taaggagaggctggg

SEQ ID NO: 1027390 - DNA, 15 bp, Homo sapiens
aaggagaggctgggg

SEQ ID NO: 1027391 - DNA, 15 bp, Homo sapiens
aggagaggctggggc

SEQ ID NO: 1027392 - DNA, 15 bp, Homo sapiens
ggagaggctggggcc

SEQ ID NO: 1027393 - DNA, 15 bp, Homo sapiens
gagaggctggggcct

SEQ ID NO: 1027394 - DNA, 15 bp, Homo sapiens
agaggctggggcctg

SEQ ID NO: 1027395 - DNA, 15 bp, Homo sapiens
gaggctggggcctga

SEQ ID NO: 1027396 - DNA, 15 bp, Homo sapiens
aggctggggcctgag

SEQ ID NO: 1027397 - DNA, 15 bp, Homo sapiens
ggctggggcctgaga

SEQ ID NO: 1027398 - DNA, 15 bp, Homo sapiens
gctggggcctgagaa

SEQ ID NO: 1027399 - DNA, 15 bp, Homo sapiens
ctggggcctgagaaa

SEQ ID NO: 1027400 - DNA, 15 bp, Homo sapiens
tggggcctgagaaag

SEQ ID NO: 1027401 - DNA, 15 bp, Homo sapiens
ggggcctgagaaagt

SEQ ID NO: 1027402 - DNA, 15 bp, Homo sapiens
gggcctgagaaagtg

SEQ ID NO: 1027403 - DNA, 15 bp, Homo sapiens
ggcctgagaaagtgt

SEQ ID NO: 1027404 - DNA, 15 bp, Homo sapiens
gcctgagaaagtgtc

SEQ ID NO: 1027405 - DNA, 15 bp, Homo sapiens
cctgagaaagtgtcc

SEQ ID NO: 1027406 - DNA, 15 bp, Homo sapiens
ctgagaaagtgtccc

SEQ ID NO: 1027407 - DNA, 15 bp, Homo sapiens
tgagaaagtgtcccc

SEQ ID NO: 1027408 - DNA, 15 bp, Homo sapiens
gagaaagtgtccccc

SEQ ID NO: 1027409 - DNA, 15 bp, Homo sapiens
agaaagtgtccccca

SEQ ID NO: 1027410 - DNA, 15 bp, Homo sapiens
gaaagtgtcccccac

SEQ ID NO: 1027411 - DNA, 15 bp, Homo sapiens
aaagtgtcccccacc

SEQ ID NO: 1027412 - DNA, 15 bp, Homo sapiens
aagtgtcccccaccc

SEQ ID NO: 1027413 - DNA, 15 bp, Homo sapiens
agtgtcccccaccct

SEQ ID NO: 1027414 - DNA, 15 bp, Homo sapiens
gtgtcccccacccta

SEQ ID NO: 1027415 - DNA, 15 bp, Homo sapiens
tgtcccccaccctag

SEQ ID NO: 1027416 - DNA, 15 bp, Homo sapiens
gtcccccaccctagt

SEQ ID NO: 1027417 - DNA, 15 bp, Homo sapiens
tcccccaccctagtt

SEQ ID NO: 1027418 - DNA, 15 bp, Homo sapiens
cccccaccctagttc

SEQ ID NO: 1027419 - DNA, 15 bp, Homo sapiens
ccccaccctagttcc

SEQ ID NO: 1027420 - DNA, 15 bp, Homo sapiens
cccaccctagttcct

SEQ ID NO: 1027421 - DNA, 15 bp, Homo sapiens
ccaccctagttccta

SEQ ID NO: 1027422 - DNA, 15 bp, Homo sapiens
caccctagttcctac

SEQ ID NO: 1027423 - DNA, 15 bp, Homo sapiens
accctagttcctacc

SEQ ID NO: 1027424 - DNA, 15 bp, Homo sapiens
ccctagttcctaccc

SEQ ID NO: 1027425 - DNA, 15 bp, Homo sapiens
cctagttcctaccca

SEQ ID NO: 1027426 - DNA, 15 bp, Homo sapiens
ctagttcctacccag

SEQ ID NO: 1027427 - DNA, 15 bp, Homo sapiens
tagttcctacccaga

SEQ ID NO: 1027428 - DNA, 15 bp, Homo sapiens
agttcctacccagac

SEQ ID NO: 1027429 - DNA, 15 bp, Homo sapiens
gttcctacccagacc

SEQ ID NO: 1027430 - DNA, 15 bp, Homo sapiens
ttcctacccagaccc

SEQ ID NO: 1027431 - DNA, 15 bp, Homo sapiens
tcctacccagaccct

SEQ ID NO: 1027432 - DNA, 15 bp, Homo sapiens
cctacccagaccctt

SEQ ID NO: 1027433 - DNA, 15 bp, Homo sapiens
ctacccagacccttt

SEQ ID NO: 1027434 - DNA, 15 bp, Homo sapiens
tacccagaccctttc

SEQ ID NO: 1027435 - DNA, 15 bp, Homo sapiens
acccagaccctttct

SEQ ID NO: 1027436 - DNA, 15 bp, Homo sapiens
cccagaccctttctt

SEQ ID NO: 1027437 - DNA, 15 bp, Homo sapiens
ccagaccctttcttc

SEQ ID NO: 1027438 - DNA, 15 bp, Homo sapiens
cagaccctttcttct

SEQ ID NO: 1027439 - DNA, 15 bp, Homo sapiens
agaccctttcttctg

SEQ ID NO: 1027440 - DNA, 15 bp, Homo sapiens
gaccctttcttctgt

SEQ ID NO: 1027441 - DNA, 15 bp, Homo sapiens
accctttcttctgtg

SEQ ID NO: 1027442 - DNA, 15 bp, Homo sapiens
ccctttcttctgtgc

SEQ ID NO: 1027443 - DNA, 15 bp, Homo sapiens
cctttcttctgtgcc

SEQ ID NO: 1027444 - DNA, 15 bp, Homo sapiens
ctttcttctgtgccc

SEQ ID NO: 1027445 - DNA, 15 bp, Homo sapiens
tttcttctgtgccct

SEQ ID NO: 1027446 - DNA, 15 bp, Homo sapiens
ttcttctgtgccctc

SEQ ID NO: 1027447 - DNA, 15 bp, Homo sapiens
tcttctgtgccctca

SEQ ID NO: 1027448 - DNA, 15 bp, Homo sapiens
cttctgtgccctcaa

SEQ ID NO: 1027449 - DNA, 15 bp, Homo sapiens
ttctgtgccctcaac

SEQ ID NO: 1027450 - DNA, 15 bp, Homo sapiens
tctgtgccctcaaca

SEQ ID NO: 1027451 - DNA, 15 bp, Homo sapiens
ctgtgccctcaacac

SEQ ID NO: 1027452 - DNA, 15 bp, Homo sapiens
tgtgccctcaacacc

SEQ ID NO: 1027453 - DNA, 15 bp, Homo sapiens
gtgccctcaacacct

SEQ ID NO: 1027454 - DNA, 15 bp, Homo sapiens
tgccctcaacacctg

SEQ ID NO: 1027455 - DNA, 15 bp, Homo sapiens
gccctcaacacctgg

SEQ ID NO: 1027456 - DNA, 15 bp, Homo sapiens
ccctcaacacctggg

SEQ ID NO: 1027457 - DNA, 15 bp, Homo sapiens
cctcaacacctgggt

SEQ ID NO: 1027458 - DNA, 15 bp, Homo sapiens
ctcaacacctgggtt

SEQ ID NO: 1027459 - DNA, 15 bp, Homo sapiens
tcaacacctgggttc

SEQ ID NO: 1027460 - DNA, 15 bp, Homo sapiens
caacacctgggttct

SEQ ID NO: 1027461 - DNA, 15 bp, Homo sapiens
aacacctgggttcta

SEQ ID NO: 1027462 - DNA, 15 bp, Homo sapiens
acacctgggttctag

SEQ ID NO: 1027463 - DNA, 15 bp, Homo sapiens
cacctgggttctagc

SEQ ID NO: 1027464 - DNA, 15 bp, Homo sapiens
acctgggttctagcc

SEQ ID NO: 1027465 - DNA, 15 bp, Homo sapiens
cctgggttctagccc

SEQ ID NO: 1027466 - DNA, 15 bp, Homo sapiens
ctgggttctagcccc

SEQ ID NO: 1027467 - DNA, 15 bp, Homo sapiens
tgggttctagcccca

SEQ ID NO: 1027468 - DNA, 15 bp, Homo sapiens
gggttctagccccag

SEQ ID NO: 1027469 - DNA, 15 bp, Homo sapiens
ggttctagccccagc

SEQ ID NO: 1027470 - DNA, 15 bp, Homo sapiens
gttctagccccagcc

SEQ ID NO: 1027471 - DNA, 15 bp, Homo sapiens
ttctagccccagccc

SEQ ID NO: 1027472 - DNA, 15 bp, Homo sapiens
tctagccccagccct

SEQ ID NO: 1027473 - DNA, 15 bp, Homo sapiens
ctagccccagccctg

SEQ ID NO: 1027474 - DNA, 15 bp, Homo sapiens
tagccccagccctgg

SEQ ID NO: 1027475 - DNA, 15 bp, Homo sapiens
agccccagccctggt

SEQ ID NO: 1027476 - DNA, 15 bp, Homo sapiens
gccccagccctggtt

SEQ ID NO: 1027477 - DNA, 15 bp, Homo sapiens
ccccagccctggttt

SEQ ID NO: 1027478 - DNA, 15 bp, Homo sapiens
cccagccctggtttg

SEQ ID NO: 1027479 - DNA, 15 bp, Homo sapiens
ccagccctggtttgc

SEQ ID NO: 1027480 - DNA, 15 bp, Homo sapiens
cagccctggtttgct

SEQ ID NO: 1027481 - DNA, 15 bp, Homo sapiens
agccctggtttgcta

SEQ ID NO: 1027482 - DNA, 15 bp, Homo sapiens
gccctggtttgctat

SEQ ID NO: 1027483 - DNA, 15 bp, Homo sapiens
ccctggtttgctatg

SEQ ID NO: 1027484 - DNA, 15 bp, Homo sapiens
cctggtttgctatgt

SEQ ID NO: 1027485 - DNA, 15 bp, Homo sapiens
ctggtttgctatgta

SEQ ID NO: 1027486 - DNA, 15 bp, Homo sapiens
tggtttgctatgtaa

SEQ ID NO: 1027487 - DNA, 15 bp, Homo sapiens
ggtttgctatgtaat

SEQ ID NO: 1027488 - DNA, 15 bp, Homo sapiens
gtttgctatgtaatc

SEQ ID NO: 1027489 - DNA, 15 bp, Homo sapiens
tttgctatgtaatct

SEQ ID NO: 1027490 - DNA, 15 bp, Homo sapiens
ttgctatgtaatcta

SEQ ID NO: 1027491 - DNA, 15 bp, Homo sapiens
tgctatgtaatctag

SEQ ID NO: 1027492 - DNA, 15 bp, Homo sapiens
gctatgtaatctagt

SEQ ID NO: 1027493 - DNA, 15 bp, Homo sapiens
ctatgtaatctagtc

SEQ ID NO: 1027494 - DNA, 15 bp, Homo sapiens
tatgtaatctagtca

SEQ ID NO: 1027495 - DNA, 15 bp, Homo sapiens
atgtaatctagtcaa

SEQ ID NO: 1027496 - DNA, 15 bp, Homo sapiens
tgtaatctagtcaaa

SEQ ID NO: 1027497 - DNA, 15 bp, Homo sapiens
gtaatctagtcaaat

SEQ ID NO: 1027498 - DNA, 15 bp, Homo sapiens
taatctagtcaaatc

SEQ ID NO: 1027499 - DNA, 15 bp, Homo sapiens
aatctagtcaaatca

SEQ ID NO: 1027500 - DNA, 15 bp, Homo sapiens
atctagtcaaatcac

SEQ ID NO: 1027501 - DNA, 15 bp, Homo sapiens
tctagtcaaatcact

SEQ ID NO: 1027502 - DNA, 15 bp, Homo sapiens
ctagtcaaatcactg

SEQ ID NO: 1027503 - DNA, 15 bp, Homo sapiens
tagtcaaatcactgc

SEQ ID NO: 1027504 - DNA, 15 bp, Homo sapiens
agtcaaatcactgct

SEQ ID NO: 1027505 - DNA, 15 bp, Homo sapiens
gtcaaatcactgctc

SEQ ID NO: 1027506 - DNA, 15 bp, Homo sapiens
tcaaatcactgctct

SEQ ID NO: 1027507 - DNA, 15 bp, Homo sapiens
caaatcactgctctt

SEQ ID NO: 1027508 - DNA, 15 bp, Homo sapiens
aaatcactgctcttc

SEQ ID NO: 1027509 - DNA, 15 bp, Homo sapiens
aatcactgctcttct

SEQ ID NO: 1027510 - DNA, 15 bp, Homo sapiens
atcactgctcttctc

SEQ ID NO: 1027511 - DNA, 15 bp, Homo sapiens
tcactgctcttctct

SEQ ID NO: 1027512 - DNA, 15 bp, Homo sapiens
cactgctcttctcta

SEQ ID NO: 1027513 - DNA, 15 bp, Homo sapiens
actgctcttctctag

SEQ ID NO: 1027514 - DNA, 15 bp, Homo sapiens
ctgctcttctctagg

SEQ ID NO: 1027515 - DNA, 15 bp, Homo sapiens
tgctcttctctaggc

SEQ ID NO: 1027516 - DNA, 15 bp, Homo sapiens
gctcttctctaggca

SEQ ID NO: 1027517 - DNA, 15 bp, Homo sapiens
ctcttctctaggcaa

SEQ ID NO: 1027518 - DNA, 15 bp, Homo sapiens
tcttctctaggcaaa

SEQ ID NO: 1027519 - DNA, 15 bp, Homo sapiens
cttctctaggcaaaa

SEQ ID NO: 1027520 - DNA, 15 bp, Homo sapiens
ttctctaggcaaaat

SEQ ID NO: 1027521 - DNA, 15 bp, Homo sapiens
tctctaggcaaaatg

SEQ ID NO: 1027522 - DNA, 15 bp, Homo sapiens
ctctaggcaaaatga

SEQ ID NO: 1027523 - DNA, 15 bp, Homo sapiens
tctaggcaaaatgag

SEQ ID NO: 1027524 - DNA, 15 bp, Homo sapiens
ctaggcaaaatgagg

SEQ ID NO: 1027525 - DNA, 15 bp, Homo sapiens
taggcaaaatgaggg

SEQ ID NO: 1027526 - DNA, 15 bp, Homo sapiens
aggcaaaatgagggg

SEQ ID NO: 1027527 - DNA, 15 bp, Homo sapiens
ggcaaaatgagggga

SEQ ID NO: 1027528 - DNA, 15 bp, Homo sapiens
gcaaaatgaggggaa

SEQ ID NO: 1027529 - DNA, 15 bp, Homo sapiens
caaaatgaggggaaa

SEQ ID NO: 1027530 - DNA, 15 bp, Homo sapiens
aaaatgaggggaaaa

SEQ ID NO: 1027531 - DNA, 15 bp, Homo sapiens
aaatgaggggaaaac

SEQ ID NO: 1027532 - DNA, 15 bp, Homo sapiens
aatgaggggaaaacg

SEQ ID NO: 1027533 - DNA, 15 bp, Homo sapiens
atgaggggaaaacga

SEQ ID NO: 1027534 - DNA, 15 bp, Homo sapiens
tgaggggaaaacgag

SEQ ID NO: 1027535 - DNA, 15 bp, Homo sapiens
gaggggaaaacgagg

SEQ ID NO: 1027536 - DNA, 15 bp, Homo sapiens
aggggaaaacgaggg

SEQ ID NO: 1027537 - DNA, 15 bp, Homo sapiens
ggggaaaacgagggc

SEQ ID NO: 1027538 - DNA, 15 bp, Homo sapiens
gggaaaacgagggcc

SEQ ID NO: 1027539 - DNA, 15 bp, Homo sapiens
ggaaaacgagggcct

SEQ ID NO: 1027540 - DNA, 15 bp, Homo sapiens
gaaaacgagggcctc

SEQ ID NO: 1027541 - DNA, 15 bp, Homo sapiens
aaaacgagggcctcc

SEQ ID NO: 1027542 - DNA, 15 bp, Homo sapiens
aaacgagggcctccc

SEQ ID NO: 1027543 - DNA, 15 bp, Homo sapiens
aacgagggcctccca

SEQ ID NO: 1027544 - DNA, 15 bp, Homo sapiens
acgagggcctcccag

SEQ ID NO: 1027545 - DNA, 15 bp, Homo sapiens
cgagggcctcccagc

SEQ ID NO: 1027546 - DNA, 15 bp, Homo sapiens
gagggcctcccagcc

SEQ ID NO: 1027547 - DNA, 15 bp, Homo sapiens
agggcctcccagccc

SEQ ID NO: 1027548 - DNA, 15 bp, Homo sapiens
gggcctcccagcccc

SEQ ID NO: 1027549 - DNA, 15 bp, Homo sapiens
ggcctcccagcccca

SEQ ID NO: 1027550 - DNA, 15 bp, Homo sapiens
gcctcccagccccaa

SEQ ID NO: 1027551 - DNA, 15 bp, Homo sapiens
cctcccagccccaaa

SEQ ID NO: 1027552 - DNA, 15 bp, Homo sapiens
ctcccagccccaaag

SEQ ID NO: 1027553 - DNA, 15 bp, Homo sapiens
tcccagccccaaagt

SEQ ID NO: 1027554 - DNA, 15 bp, Homo sapiens
cccagccccaaagtt

SEQ ID NO: 1027555 - DNA, 15 bp, Homo sapiens
ccagccccaaagttt

SEQ ID NO: 1027556 - DNA, 15 bp, Homo sapiens
cagccccaaagtttt

SEQ ID NO: 1027557 - DNA, 15 bp, Homo sapiens
agccccaaagttttg

SEQ ID NO: 1027558 - DNA, 15 bp, Homo sapiens
gccccaaagttttgg

SEQ ID NO: 1027559 - DNA, 15 bp, Homo sapiens
ccccaaagttttggg

SEQ ID NO: 1027560 - DNA, 15 bp, Homo sapiens
cccaaagttttgggg

SEQ ID NO: 1027561 - DNA, 15 bp, Homo sapiens
ccaaagttttggggt

SEQ ID NO: 1027562 - DNA, 15 bp, Homo sapiens
caaagttttggggtt

SEQ ID NO: 1027563 - DNA, 15 bp, Homo sapiens
aaagttttggggttc

SEQ ID NO: 1027564 - DNA, 15 bp, Homo sapiens
aagttttggggttct

SEQ ID NO: 1027565 - DNA, 15 bp, Homo sapiens
agttttggggttctg

SEQ ID NO: 1027566 - DNA, 15 bp, Homo sapiens
gttttggggttctgc

SEQ ID NO: 1027567 - DNA, 15 bp, Homo sapiens
ttttggggttctgcc

SEQ ID NO: 1027568 - DNA, 15 bp, Homo sapiens
tttggggttctgccc

SEQ ID NO: 1027569 - DNA, 15 bp, Homo sapiens
ttggggttctgcccg

SEQ ID NO: 1027570 - DNA, 15 bp, Homo sapiens
tggggttctgcccgt

SEQ ID NO: 1027571 - DNA, 15 bp, Homo sapiens
ggggttctgcccgta

SEQ ID NO: 1027572 - DNA, 15 bp, Homo sapiens
gggttctgcccgtat

SEQ ID NO: 1027573 - DNA, 15 bp, Homo sapiens
ggttctgcccgtatc

SEQ ID NO: 1027574 - DNA, 15 bp, Homo sapiens
gttctgcccgtatcc

SEQ ID NO: 1027575 - DNA, 15 bp, Homo sapiens
ttctgcccgtatccc

SEQ ID NO: 1027576 - DNA, 15 bp, Homo sapiens
tctgcccgtatccca

SEQ ID NO: 1027577 - DNA, 15 bp, Homo sapiens
ctgcccgtatcccag

SEQ ID NO: 1027578 - DNA, 15 bp, Homo sapiens
tgcccgtatcccaga

SEQ ID NO: 1027579 - DNA, 15 bp, Homo sapiens
gcccgtatcccagaa

SEQ ID NO: 1027580 - DNA, 15 bp, Homo sapiens
cccgtatcccagaat

SEQ ID NO: 1027581 - DNA, 15 bp, Homo sapiens
ccgtatcccagaata

SEQ ID NO: 1027582 - DNA, 15 bp, Homo sapiens
cgtatcccagaatac

SEQ ID NO: 1027583 - DNA, 15 bp, Homo sapiens
gtatcccagaataca

SEQ ID NO: 1027584 - DNA, 15 bp, Homo sapiens
tatcccagaatacac

SEQ ID NO: 1027585 - DNA, 15 bp, Homo sapiens
atcccagaatacact

SEQ ID NO: 1027586 - DNA, 15 bp, Homo sapiens
tcccagaatacactc

SEQ ID NO: 1027587 - DNA, 15 bp, Homo sapiens
cccagaatacactca

SEQ ID NO: 1027588 - DNA, 15 bp, Homo sapiens
ccagaatacactcaa

SEQ ID NO: 1027589 - DNA, 15 bp, Homo sapiens
cagaatacactcaat

SEQ ID NO: 1027590 - DNA, 15 bp, Homo sapiens
agaatacactcaatc

SEQ ID NO: 1027591 - DNA, 15 bp, Homo sapiens
gaatacactcaatcc

SEQ ID NO: 1027592 - DNA, 15 bp, Homo sapiens
aatacactcaatcct

SEQ ID NO: 1027593 - DNA, 15 bp, Homo sapiens
atacactcaatcctt

SEQ ID NO: 1027594 - DNA, 15 bp, Homo sapiens
tacactcaatccttt

SEQ ID NO: 1027595 - DNA, 15 bp, Homo sapiens
acactcaatcctttt

SEQ ID NO: 1027596 - DNA, 15 bp, Homo sapiens
cactcaatccttttc

SEQ ID NO: 1027597 - DNA, 15 bp, Homo sapiens
actcaatccttttcc

SEQ ID NO: 1027598 - DNA, 15 bp, Homo sapiens
ctcaatccttttcca

SEQ ID NO: 1027599 - DNA, 15 bp, Homo sapiens
tcaatccttttccag

SEQ ID NO: 1027600 - DNA, 15 bp, Homo sapiens
caatccttttccagc

SEQ ID NO: 1027601 - DNA, 15 bp, Homo sapiens
aatccttttccagcc

SEQ ID NO: 1027602 - DNA, 15 bp, Homo sapiens
atccttttccagcct

SEQ ID NO: 1027603 - DNA, 15 bp, Homo sapiens
tccttttccagcctt

SEQ ID NO: 1027604 - DNA, 15 bp, Homo sapiens
ccttttccagccttg

SEQ ID NO: 1027605 - DNA, 15 bp, Homo sapiens
cttttccagccttgt

SEQ ID NO: 1027606 - DNA, 15 bp, Homo sapiens
ttttccagccttgta

SEQ ID NO: 1027607 - DNA, 15 bp, Homo sapiens
tttccagccttgtac

SEQ ID NO: 1027608 - DNA, 15 bp, Homo sapiens
ttccagccttgtacc

SEQ ID NO: 1027609 - DNA, 15 bp, Homo sapiens
tccagccttgtaccc

SEQ ID NO: 1027610 - DNA, 15 bp, Homo sapiens
ccagccttgtaccca

SEQ ID NO: 1027611 - DNA, 15 bp, Homo sapiens
cagccttgtacccaa

SEQ ID NO: 1027612 - DNA, 15 bp, Homo sapiens
agccttgtacccaac

SEQ ID NO: 1027613 - DNA, 15 bp, Homo sapiens
gccttgtacccaact

SEQ ID NO: 1027614 - DNA, 15 bp, Homo sapiens
ccttgtacccaactc

SEQ ID NO: 1027615 - DNA, 15 bp, Homo sapiens
cttgtacccaactcc

SEQ ID NO: 1027616 - DNA, 15 bp, Homo sapiens
ttgtacccaactcca

SEQ ID NO: 1027617 - DNA, 15 bp, Homo sapiens
tgtacccaactccag

SEQ ID NO: 1027618 - DNA, 15 bp, Homo sapiens
gtacccaactccagc

SEQ ID NO: 1027619 - DNA, 15 bp, Homo sapiens
tacccaactccagcc

SEQ ID NO: 1027620 - DNA, 15 bp, Homo sapiens
acccaactccagcct

SEQ ID NO: 1027621 - DNA, 15 bp, Homo sapiens
cccaactccagcctg

SEQ ID NO: 1027622 - DNA, 15 bp, Homo sapiens
ccaactccagcctgt

SEQ ID NO: 1027623 - DNA, 15 bp, Homo sapiens
caactccagcctgtg

SEQ ID NO: 1027624 - DNA, 15 bp, Homo sapiens
aactccagcctgtgc

SEQ ID NO: 1027625 - DNA, 15 bp, Homo sapiens
actccagcctgtgcc

SEQ ID NO: 1027626 - DNA, 15 bp, Homo sapiens
ctccagcctgtgccc

SEQ ID NO: 1027627 - DNA, 15 bp, Homo sapiens
tccagcctgtgccct

SEQ ID NO: 1027628 - DNA, 15 bp, Homo sapiens
ccagcctgtgccctc

SEQ ID NO: 1027629 - DNA, 15 bp, Homo sapiens
cagcctgtgccctct

SEQ ID NO: 1027630 - DNA, 15 bp, Homo sapiens
agcctgtgccctctg

SEQ ID NO: 1027631 - DNA, 15 bp, Homo sapiens
gcctgtgccctctgc

SEQ ID NO: 1027632 - DNA, 15 bp, Homo sapiens
cctgtgccctctgcc

SEQ ID NO: 1027633 - DNA, 15 bp, Homo sapiens
ctgtgccctctgccc

SEQ ID NO: 1027634 - DNA, 15 bp, Homo sapiens
tgtgccctctgcccc

SEQ ID NO: 1027635 - DNA, 15 bp, Homo sapiens
gtgccctctgcccct

SEQ ID NO: 1027636 - DNA, 15 bp, Homo sapiens
tgccctctgcccctg

SEQ ID NO: 1027637 - DNA, 15 bp, Homo sapiens
gccctctgcccctgc

SEQ ID NO: 1027638 - DNA, 15 bp, Homo sapiens
ccctctgcccctgca

SEQ ID NO: 1027639 - DNA, 15 bp, Homo sapiens
cctctgcccctgcag

SEQ ID NO: 1027640 - DNA, 15 bp, Homo sapiens
ctctgcccctgcaga

SEQ ID NO: 1027641 - DNA, 15 bp, Homo sapiens
tctgcccctgcagaa

SEQ ID NO: 1027642 - DNA, 15 bp, Homo sapiens
ctgcccctgcagaac

SEQ ID NO: 1027643 - DNA, 15 bp, Homo sapiens
tgcccctgcagaact

SEQ ID NO: 1027644 - DNA, 15 bp, Homo sapiens
gcccctgcagaactc

SEQ ID NO: 1027645 - DNA, 15 bp, Homo sapiens
cccctgcagaactcc

SEQ ID NO: 1027646 - DNA, 15 bp, Homo sapiens
ccctgcagaactcct

SEQ ID NO: 1027647 - DNA, 15 bp, Homo sapiens
cctgcagaactcctg

SEQ ID NO: 1027648 - DNA, 15 bp, Homo sapiens
ctgcagaactcctgt

SEQ ID NO: 1027649 - DNA, 15 bp, Homo sapiens
tgcagaactcctgtg

SEQ ID NO: 1027650 - DNA, 15 bp, Homo sapiens
gcagaactcctgtgg

SEQ ID NO: 1027651 - DNA, 15 bp, Homo sapiens
cagaactcctgtggg

SEQ ID NO: 1027652 - DNA, 15 bp, Homo sapiens
agaactcctgtgggc

SEQ ID NO: 1027653 - DNA, 15 bp, Homo sapiens
gaactcctgtgggcc

SEQ ID NO: 1027654 - DNA, 15 bp, Homo sapiens
aactcctgtgggcct

SEQ ID NO: 1027655 - DNA, 15 bp, Homo sapiens
actcctgtgggcctc

SEQ ID NO: 1027656 - DNA, 15 bp, Homo sapiens
ctcctgtgggcctct

SEQ ID NO: 1027657 - DNA, 15 bp, Homo sapiens
tcctgtgggcctctg

SEQ ID NO: 1027658 - DNA, 15 bp, Homo sapiens
cctgtgggcctctgc

SEQ ID NO: 1027659 - DNA, 15 bp, Homo sapiens
ctgtgggcctctgct

SEQ ID NO: 1027660 - DNA, 15 bp, Homo sapiens
tgtgggcctctgctg

SEQ ID NO: 1027661 - DNA, 15 bp, Homo sapiens
gtgggcctctgctgc

SEQ ID NO: 1027662 - DNA, 15 bp, Homo sapiens
tgggcctctgctgct

SEQ ID NO: 1027663 - DNA, 15 bp, Homo sapiens
gggcctctgctgctc

SEQ ID NO: 1027664 - DNA, 15 bp, Homo sapiens
ggcctctgctgctca

SEQ ID NO: 1027665 - DNA, 15 bp, Homo sapiens
gcctctgctgctcag

SEQ ID NO: 1027666 - DNA, 15 bp, Homo sapiens
cctctgctgctcagc

SEQ ID NO: 1027667 - DNA, 15 bp, Homo sapiens
ctctgctgctcagcc

SEQ ID NO: 1027668 - DNA, 15 bp, Homo sapiens
tctgctgctcagcca

SEQ ID NO: 1027669 - DNA, 15 bp, Homo sapiens
ctgctgctcagccat

SEQ ID NO: 1027670 - DNA, 15 bp, Homo sapiens
tgctgctcagccatc

SEQ ID NO: 1027671 - DNA, 15 bp, Homo sapiens
gctgctcagccatcc

SEQ ID NO: 1027672 - DNA, 15 bp, Homo sapiens
ctgctcagccatccc

SEQ ID NO: 1027673 - DNA, 15 bp, Homo sapiens
tgctcagccatcccc

SEQ ID NO: 1027674 - DNA, 15 bp, Homo sapiens
gctcagccatccccc

SEQ ID NO: 1027675 - DNA, 15 bp, Homo sapiens
ctcagccatcccccg

SEQ ID NO: 1027676 - DNA, 15 bp, Homo sapiens
tcagccatcccccgg

SEQ ID NO: 1027677 - DNA, 15 bp, Homo sapiens
cagccatcccccgga

SEQ ID NO: 1027678 - DNA, 15 bp, Homo sapiens
agccatcccccggaa

SEQ ID NO: 1027679 - DNA, 15 bp, Homo sapiens
gccatcccccggaag

SEQ ID NO: 1027680 - DNA, 15 bp, Homo sapiens
ccatcccccggaagc

SEQ ID NO: 1027681 - DNA, 15 bp, Homo sapiens
catcccccggaagcc

SEQ ID NO: 1027682 - DNA, 15 bp, Homo sapiens
atcccccggaagcct

SEQ ID NO: 1027683 - DNA, 15 bp, Homo sapiens
tcccccggaagcctc

SEQ ID NO: 1027684 - DNA, 15 bp, Homo sapiens
cccccggaagcctcg

SEQ ID NO: 1027685 - DNA, 15 bp, Homo sapiens
ccccggaagcctcgc

SEQ ID NO: 1027686 - DNA, 15 bp, Homo sapiens
cccggaagcctcgcc

SEQ ID NO: 1027687 - DNA, 15 bp, Homo sapiens
ccggaagcctcgccc

SEQ ID NO: 1027688 - DNA, 15 bp, Homo sapiens
cggaagcctcgccct

SEQ ID NO: 1027689 - DNA, 15 bp, Homo sapiens
ggaagcctcgccctt

SEQ ID NO: 1027690 - DNA, 15 bp, Homo sapiens
gaagcctcgcccttg

SEQ ID NO: 1027691 - DNA, 15 bp, Homo sapiens
aagcctcgcccttgt

SEQ ID NO: 1027692 - DNA, 15 bp, Homo sapiens
agcctcgcccttgtc

SEQ ID NO: 1027693 - DNA, 15 bp, Homo sapiens
gcctcgcccttgtcc

SEQ ID NO: 1027694 - DNA, 15 bp, Homo sapiens
cctcgcccttgtcct

SEQ ID NO: 1027695 - DNA, 15 bp, Homo sapiens
ctcgcccttgtcctg

SEQ ID NO: 1027696 - DNA, 15 bp, Homo sapiens
tcgcccttgtcctgg

SEQ ID NO: 1027697 - DNA, 15 bp, Homo sapiens
cgcccttgtcctgga

SEQ ID NO: 1027698 - DNA, 15 bp, Homo sapiens
gcccttgtcctggac

SEQ ID NO: 1027699 - DNA, 15 bp, Homo sapiens
cccttgtcctggact

SEQ ID NO: 1027700 - DNA, 15 bp, Homo sapiens
ccttgtcctggactc

SEQ ID NO: 1027701 - DNA, 15 bp, Homo sapiens
cttgtcctggactcc

SEQ ID NO: 1027702 - DNA, 15 bp, Homo sapiens
ttgtcctggactccg

SEQ ID NO: 1027703 - DNA, 15 bp, Homo sapiens
tgtcctggactccgg

SEQ ID NO: 1027704 - DNA, 15 bp, Homo sapiens
gtcctggactccggt

SEQ ID NO: 1027705 - DNA, 15 bp, Homo sapiens
tcctggactccggtg

SEQ ID NO: 1027706 - DNA, 15 bp, Homo sapiens
cctggactccggtgc

SEQ ID NO: 1027707 - DNA, 15 bp, Homo sapiens
ctggactccggtgcc

SEQ ID NO: 1027708 - DNA, 15 bp, Homo sapiens
tggactccggtgcct

SEQ ID NO: 1027709 - DNA, 15 bp, Homo sapiens
ggactccggtgcctc

SEQ ID NO: 1027710 - DNA, 15 bp, Homo sapiens
gactccggtgcctcc

SEQ ID NO: 1027711 - DNA, 15 bp, Homo sapiens
actccggtgcctcct

SEQ ID NO: 1027712 - DNA, 15 bp, Homo sapiens
ctccggtgcctcctg

SEQ ID NO: 1027713 - DNA, 15 bp, Homo sapiens
tccggtgcctcctgg

SEQ ID NO: 1027714 - DNA, 15 bp, Homo sapiens
ccggtgcctcctggc

SEQ ID NO: 1027715 - DNA, 15 bp, Homo sapiens
cggtgcctcctggcc

SEQ ID NO: 1027716 - DNA, 15 bp, Homo sapiens
ggtgcctcctggccc

SEQ ID NO: 1027717 - DNA, 15 bp, Homo sapiens
gtgcctcctggccct

SEQ ID NO: 1027718 - DNA, 15 bp, Homo sapiens
tgcctcctggccctt

SEQ ID NO: 1027719 - DNA, 15 bp, Homo sapiens
gcctcctggcccttg

SEQ ID NO: 1027720 - DNA, 15 bp, Homo sapiens
cctcctggcccttgg

SEQ ID NO: 1027721 - DNA, 15 bp, Homo sapiens
ctcctggcccttggg

SEQ ID NO: 1027722 - DNA, 15 bp, Homo sapiens
tcctggcccttgggt

SEQ ID NO: 1027723 - DNA, 15 bp, Homo sapiens
cctggcccttgggtc

SEQ ID NO: 1027724 - DNA, 15 bp, Homo sapiens
ctggcccttgggtcc

SEQ ID NO: 1027725 - DNA, 15 bp, Homo sapiens
tggcccttgggtccc

SEQ ID NO: 1027726 - DNA, 15 bp, Homo sapiens
ggcccttgggtccct

SEQ ID NO: 1027727 - DNA, 15 bp, Homo sapiens
gcccttgggtccctg

SEQ ID NO: 1027728 - DNA, 15 bp, Homo sapiens
cccttgggtccctgg

SEQ ID NO: 1027729 - DNA, 15 bp, Homo sapiens
ccttgggtccctgga

SEQ ID NO: 1027730 - DNA, 15 bp, Homo sapiens
cttgggtccctggac

SEQ ID NO: 1027731 - DNA, 15 bp, Homo sapiens
ttgggtccctggaca

SEQ ID NO: 1027732 - DNA, 15 bp, Homo sapiens
tgggtccctggacac

SEQ ID NO: 1027733 - DNA, 15 bp, Homo sapiens
gggtccctggacact

SEQ ID NO: 1027734 - DNA, 15 bp, Homo sapiens
ggtccctggacactg

SEQ ID NO: 1027735 - DNA, 15 bp, Homo sapiens
gtccctggacactgg

SEQ ID NO: 1027736 - DNA, 15 bp, Homo sapiens
tccctggacactggc

SEQ ID NO: 1027737 - DNA, 15 bp, Homo sapiens
ccctggacactggct

SEQ ID NO: 1027738 - DNA, 15 bp, Homo sapiens
cctggacactggctg

SEQ ID NO: 1027739 - DNA, 15 bp, Homo sapiens
ctggacactggctgc

SEQ ID NO: 1027740 - DNA, 15 bp, Homo sapiens
tggacactggctgcc

SEQ ID NO: 1027741 - DNA, 15 bp, Homo sapiens
ggacactggctgcct

SEQ ID NO: 1027742 - DNA, 15 bp, Homo sapiens
gacactggctgcctc

SEQ ID NO: 1027743 - DNA, 15 bp, Homo sapiens
acactggctgcctcc

SEQ ID NO: 1027744 - DNA, 15 bp, Homo sapiens
cactggctgcctcca

SEQ ID NO: 1027745 - DNA, 15 bp, Homo sapiens
actggctgcctccag

SEQ ID NO: 1027746 - DNA, 15 bp, Homo sapiens
ctggctgcctccagg

SEQ ID NO: 1027747 - DNA, 15 bp, Homo sapiens
tggctgcctccaggc

SEQ ID NO: 1027748 - DNA, 15 bp, Homo sapiens
ggctgcctccaggct

SEQ ID NO: 1027749 - DNA, 15 bp, Homo sapiens
gctgcctccaggctt

SEQ ID NO: 1027750 - DNA, 15 bp, Homo sapiens
ctgcctccaggcttc

SEQ ID NO: 1027751 - DNA, 15 bp, Homo sapiens
tgcctccaggcttct

SEQ ID NO: 1027752 - DNA, 15 bp, Homo sapiens
gcctccaggcttctc

SEQ ID NO: 1027753 - DNA, 15 bp, Homo sapiens
cctccaggcttctcc

SEQ ID NO: 1027754 - DNA, 15 bp, Homo sapiens
ctccaggcttctcca

SEQ ID NO: 1027755 - DNA, 15 bp, Homo sapiens
tccaggcttctccat

SEQ ID NO: 1027756 - DNA, 15 bp, Homo sapiens
ccaggcttctccatg

SEQ ID NO: 1027757 - DNA, 15 bp, Homo sapiens
caggcttctccatgc

SEQ ID NO: 1027758 - DNA, 15 bp, Homo sapiens
aggcttctccatgcc

SEQ ID NO: 1027759 - DNA, 15 bp, Homo sapiens
ggcttctccatgcca

SEQ ID NO: 1027760 - DNA, 15 bp, Homo sapiens
gcttctccatgccac

SEQ ID NO: 1027761 - DNA, 15 bp, Homo sapiens
cttctccatgccacc

SEQ ID NO: 1027762 - DNA, 15 bp, Homo sapiens
ttctccatgccacca

SEQ ID NO: 1027763 - DNA, 15 bp, Homo sapiens
tctccatgccaccac

SEQ ID NO: 1027764 - DNA, 15 bp, Homo sapiens
ctccatgccaccacc

SEQ ID NO: 1027765 - DNA, 15 bp, Homo sapiens
tccatgccaccacca

SEQ ID NO: 1027766 - DNA, 15 bp, Homo sapiens
ccatgccaccaccag

SEQ ID NO: 1027767 - DNA, 15 bp, Homo sapiens
catgccaccaccagt

SEQ ID NO: 1027768 - DNA, 15 bp, Homo sapiens
atgccaccaccagtg

SEQ ID NO: 1027769 - DNA, 15 bp, Homo sapiens
tgccaccaccagtgg

SEQ ID NO: 1027770 - DNA, 15 bp, Homo sapiens
gccaccaccagtggt

SEQ ID NO: 1027771 - DNA, 15 bp, Homo sapiens
ccaccaccagtggtg

SEQ ID NO: 1027772 - DNA, 15 bp, Homo sapiens
caccaccagtggtgt

SEQ ID NO: 1027773 - DNA, 15 bp, Homo sapiens
accaccagtggtgtg

SEQ ID NO: 1027774 - DNA, 15 bp, Homo sapiens
ccaccagtggtgtgc

SEQ ID NO: 1027775 - DNA, 15 bp, Homo sapiens
caccagtggtgtgcc

SEQ ID NO: 1027776 - DNA, 15 bp, Homo sapiens
accagtggtgtgccg

SEQ ID NO: 1027777 - DNA, 15 bp, Homo sapiens
ccagtggtgtgccgc

SEQ ID NO: 1027778 - DNA, 15 bp, Homo sapiens
cagtggtgtgccgcc

SEQ ID NO: 1027779 - DNA, 15 bp, Homo sapiens
agtggtgtgccgcct

SEQ ID NO: 1027780 - DNA, 15 bp, Homo sapiens
gtggtgtgccgcctg

SEQ ID NO: 1027781 - DNA, 15 bp, Homo sapiens
tggtgtgccgcctgc

SEQ ID NO: 1027782 - DNA, 15 bp, Homo sapiens
ggtgtgccgcctgct

SEQ ID NO: 1027783 - DNA, 15 bp, Homo sapiens
gtgtgccgcctgctg

SEQ ID NO: 1027784 - DNA, 15 bp, Homo sapiens
tgtgccgcctgctgt

SEQ ID NO: 1027785 - DNA, 15 bp, Homo sapiens
gtgccgcctgctgta

SEQ ID NO: 1027786 - DNA, 15 bp, Homo sapiens
tgccgcctgctgtac

SEQ ID NO: 1027787 - DNA, 15 bp, Homo sapiens
gccgcctgctgtacc

SEQ ID NO: 1027788 - DNA, 15 bp, Homo sapiens
ccgcctgctgtacca

SEQ ID NO: 1027789 - DNA, 15 bp, Homo sapiens
cgcctgctgtaccaa

SEQ ID NO: 1027790 - DNA, 15 bp, Homo sapiens
gcctgctgtaccaag

SEQ ID NO: 1027791 - DNA, 15 bp, Homo sapiens
cctgctgtaccaaga

SEQ ID NO: 1027792 - DNA, 15 bp, Homo sapiens
ctgctgtaccaagaa

SEQ ID NO: 1027793 - DNA, 15 bp, Homo sapiens
tgctgtaccaagaac

SEQ ID NO: 1027794 - DNA, 15 bp, Homo sapiens
gctgtaccaagaacc

SEQ ID NO: 1027795 - DNA, 15 bp, Homo sapiens
ctgtaccaagaacct

SEQ ID NO: 1027796 - DNA, 15 bp, Homo sapiens
tgtaccaagaacctg

SEQ ID NO: 1027797 - DNA, 15 bp, Homo sapiens
gtaccaagaacctgc

SEQ ID NO: 1027798 - DNA, 15 bp, Homo sapiens
taccaagaacctgct

SEQ ID NO: 1027799 - DNA, 15 bp, Homo sapiens
accaagaacctgctg

SEQ ID NO: 1027800 - DNA, 15 bp, Homo sapiens
ccaagaacctgctgt

SEQ ID NO: 1027801 - DNA, 15 bp, Homo sapiens
caagaacctgctgtc

SEQ ID NO: 1027802 - DNA, 15 bp, Homo sapiens
aagaacctgctgtct

SEQ ID NO: 1027803 - DNA, 15 bp, Homo sapiens
agaacctgctgtctc

SEQ ID NO: 1027804 - DNA, 15 bp, Homo sapiens
gaacctgctgtctct

SEQ ID NO: 1027805 - DNA, 15 bp, Homo sapiens
aacctgctgtctctc

SEQ ID NO: 1027806 - DNA, 15 bp, Homo sapiens
acctgctgtctctct

SEQ ID NO: 1027807 - DNA, 15 bp, Homo sapiens
cctgctgtctctctg

SEQ ID NO: 1027808 - DNA, 15 bp, Homo sapiens
ctgctgtctctctgc

SEQ ID NO: 1027809 - DNA, 15 bp, Homo sapiens
tgctgtctctctgcc

SEQ ID NO: 1027810 - DNA, 15 bp, Homo sapiens
gctgtctctctgcct

SEQ ID NO: 1027811 - DNA, 15 bp, Homo sapiens
ctgtctctctgcctc

SEQ ID NO: 1027812 - DNA, 15 bp, Homo sapiens
tgtctctctgcctcc

SEQ ID NO: 1027813 - DNA, 15 bp, Homo sapiens
gtctctctgcctccc

SEQ ID NO: 1027814 - DNA, 15 bp, Homo sapiens
tctctctgcctccct

SEQ ID NO: 1027815 - DNA, 15 bp, Homo sapiens
ctctctgcctccctt

SEQ ID NO: 1027816 - DNA, 15 bp, Homo sapiens
tctctgcctcccttc

SEQ ID NO: 1027817 - DNA, 15 bp, Homo sapiens
ctctgcctcccttcc

SEQ ID NO: 1027818 - DNA, 15 bp, Homo sapiens
tctgcctcccttccc

SEQ ID NO: 1027819 - DNA, 15 bp, Homo sapiens
ctgcctcccttccct

SEQ ID NO: 1027820 - DNA, 15 bp, Homo sapiens
tgcctcccttccctg

SEQ ID NO: 1027821 - DNA, 15 bp, Homo sapiens
gcctcccttccctgg

SEQ ID NO: 1027822 - DNA, 15 bp, Homo sapiens
cctcccttccctggt

SEQ ID NO: 1027823 - DNA, 15 bp, Homo sapiens
ctcccttccctggta

SEQ ID NO: 1027824 - DNA, 15 bp, Homo sapiens
tcccttccctggtaa

SEQ ID NO: 1027825 - DNA, 15 bp, Homo sapiens
cccttccctggtaag

SEQ ID NO: 1027826 - DNA, 15 bp, Homo sapiens
ccttccctggtaaga

SEQ ID NO: 1027827 - DNA, 15 bp, Homo sapiens
cttccctggtaagat

SEQ ID NO: 1027828 - DNA, 15 bp, Homo sapiens
ttccctggtaagatg

SEQ ID NO: 1027829 - DNA, 15 bp, Homo sapiens
tccctggtaagatga

SEQ ID NO: 1027830 - DNA, 15 bp, Homo sapiens
ccctggtaagatgat

SEQ ID NO: 1027831 - DNA, 15 bp, Homo sapiens
cctggtaagatgata

SEQ ID NO: 1027832 - DNA, 15 bp, Homo sapiens
ctggtaagatgataa

SEQ ID NO: 1027833 - DNA, 15 bp, Homo sapiens
tggtaagatgataat

SEQ ID NO: 1027834 - DNA, 15 bp, Homo sapiens
ggtaagatgataatt

SEQ ID NO: 1027835 - DNA, 15 bp, Homo sapiens
gtaagatgataattc

SEQ ID NO: 1027836 - DNA, 15 bp, Homo sapiens
taagatgataattca

SEQ ID NO: 1027837 - DNA, 15 bp, Homo sapiens
aagatgataattcaa

SEQ ID NO: 1027838 - DNA, 15 bp, Homo sapiens
agatgataattcaac

SEQ ID NO: 1027839 - DNA, 15 bp, Homo sapiens
gatgataattcaaca

SEQ ID NO: 1027840 - DNA, 15 bp, Homo sapiens
atgataattcaacat

SEQ ID NO: 1027841 - DNA, 15 bp, Homo sapiens
tgataattcaacatt

SEQ ID NO: 1027842 - DNA, 15 bp, Homo sapiens
gataattcaacattc

SEQ ID NO: 1027843 - DNA, 15 bp, Homo sapiens
ataattcaacattca

SEQ ID NO: 1027844 - DNA, 15 bp, Homo sapiens
taattcaacattcat

SEQ ID NO: 1027845 - DNA, 15 bp, Homo sapiens
aattcaacattcatt

SEQ ID NO: 1027846 - DNA, 15 bp, Homo sapiens
attcaacattcattc

SEQ ID NO: 1027847 - DNA, 15 bp, Homo sapiens
ttcaacattcattca

SEQ ID NO: 1027848 - DNA, 15 bp, Homo sapiens
tcaacattcattcaa

SEQ ID NO: 1027849 - DNA, 15 bp, Homo sapiens
caacattcattcaac

SEQ ID NO: 1027850 - DNA, 15 bp, Homo sapiens
aacattcattcaaca

SEQ ID NO: 1027851 - DNA, 15 bp, Homo sapiens
acattcattcaacat

SEQ ID NO: 1027852 - DNA, 15 bp, Homo sapiens
cattcattcaacata

SEQ ID NO: 1027853 - DNA, 15 bp, Homo sapiens
attcattcaacatat

SEQ ID NO: 1027854 - DNA, 15 bp, Homo sapiens
ttcattcaacatata

SEQ ID NO: 1027855 - DNA, 15 bp, Homo sapiens
tcattcaacatatat

SEQ ID NO: 1027856 - DNA, 15 bp, Homo sapiens
cattcaacatatatt

SEQ ID NO: 1027857 - DNA, 15 bp, Homo sapiens
attcaacatatattt

SEQ ID NO: 1027858 - DNA, 15 bp, Homo sapiens
ttcaacatatatttg

SEQ ID NO: 1027859 - DNA, 15 bp, Homo sapiens
tcaacatatatttga

SEQ ID NO: 1027860 - DNA, 15 bp, Homo sapiens
caacatatatttgag

SEQ ID NO: 1027861 - DNA, 15 bp, Homo sapiens
aacatatatttgagt

SEQ ID NO: 1027862 - DNA, 15 bp, Homo sapiens
acatatatttgagtg

SEQ ID NO: 1027863 - DNA, 15 bp, Homo sapiens
catatatttgagtgc

SEQ ID NO: 1027864 - DNA, 15 bp, Homo sapiens
atatatttgagtgcc

SEQ ID NO: 1027865 - DNA, 15 bp, Homo sapiens
tatatttgagtgcca

SEQ ID NO: 1027866 - DNA, 15 bp, Homo sapiens
atatttgagtgccaa

SEQ ID NO: 1027867 - DNA, 15 bp, Homo sapiens
tatttgagtgccaat

SEQ ID NO: 1027868 - DNA, 15 bp, Homo sapiens
atttgagtgccaatc

SEQ ID NO: 1027869 - DNA, 15 bp, Homo sapiens
tttgagtgccaatct

SEQ ID NO: 1027870 - DNA, 15 bp, Homo sapiens
ttgagtgccaatctg

SEQ ID NO: 1027871 - DNA, 15 bp, Homo sapiens
tgagtgccaatctgc

SEQ ID NO: 1027872 - DNA, 15 bp, Homo sapiens
gagtgccaatctgcc

SEQ ID NO: 1027873 - DNA, 15 bp, Homo sapiens
agtgccaatctgcca

SEQ ID NO: 1027874 - DNA, 15 bp, Homo sapiens
gtgccaatctgccac

SEQ ID NO: 1027875 - DNA, 15 bp, Homo sapiens
tgccaatctgccaca

SEQ ID NO: 1027876 - DNA, 15 bp, Homo sapiens
gccaatctgccacat

SEQ ID NO: 1027877 - DNA, 15 bp, Homo sapiens
ccaatctgccacata

SEQ ID NO: 1027878 - DNA, 15 bp, Homo sapiens
caatctgccacatat

SEQ ID NO: 1027879 - DNA, 15 bp, Homo sapiens
aatctgccacatatt

SEQ ID NO: 1027880 - DNA, 15 bp, Homo sapiens
atctgccacatattg

SEQ ID NO: 1027881 - DNA, 15 bp, Homo sapiens
tctgccacatattgg

SEQ ID NO: 1027882 - DNA, 15 bp, Homo sapiens
ctgccacatattgga

SEQ ID NO: 1027883 - DNA, 15 bp, Homo sapiens
tgccacatattggag

SEQ ID NO: 1027884 - DNA, 15 bp, Homo sapiens
gccacatattggaga

SEQ ID NO: 1027885 - DNA, 15 bp, Homo sapiens
ccacatattggagag

SEQ ID NO: 1027886 - DNA, 15 bp, Homo sapiens
cacatattggagagg

SEQ ID NO: 1027887 - DNA, 15 bp, Homo sapiens
acatattggagaggg

SEQ ID NO: 1027888 - DNA, 15 bp, Homo sapiens
catattggagaggga

SEQ ID NO: 1027889 - DNA, 15 bp, Homo sapiens
atattggagagggaa

SEQ ID NO: 1027890 - DNA, 15 bp, Homo sapiens
tattggagagggaag

SEQ ID NO: 1027891 - DNA, 15 bp, Homo sapiens
attggagagggaaga

SEQ ID NO: 1027892 - DNA, 15 bp, Homo sapiens
ttggagagggaagag

SEQ ID NO: 1027893 - DNA, 15 bp, Homo sapiens
tggagagggaagagg

SEQ ID NO: 1027894 - DNA, 15 bp, Homo sapiens
ggagagggaagagga

SEQ ID NO: 1027895 - DNA, 15 bp, Homo sapiens
gagagggaagaggaa

SEQ ID NO: 1027896 - DNA, 15 bp, Homo sapiens
agagggaagaggaag

SEQ ID NO: 1027897 - DNA, 15 bp, Homo sapiens
gagggaagaggaaga

SEQ ID NO: 1027898 - DNA, 15 bp, Homo sapiens
agggaagaggaagaa

SEQ ID NO: 1027899 - DNA, 15 bp, Homo sapiens
gggaagaggaagaaa

SEQ ID NO: 1027900 - DNA, 15 bp, Homo sapiens
ggaagaggaagaaag

SEQ ID NO: 1027901 - DNA, 15 bp, Homo sapiens
gaagaggaagaaagc

SEQ ID NO: 1027902 - DNA, 15 bp, Homo sapiens
aagaggaagaaagca

SEQ ID NO: 1027903 - DNA, 15 bp, Homo sapiens
agaggaagaaagcat

SEQ ID NO: 1027904 - DNA, 15 bp, Homo sapiens
gaggaagaaagcata

SEQ ID NO: 1027905 - DNA, 15 bp, Homo sapiens
aggaagaaagcatag

SEQ ID NO: 1027906 - DNA, 15 bp, Homo sapiens
ggaagaaagcatagg

SEQ ID NO: 1027907 - DNA, 15 bp, Homo sapiens
gaagaaagcataggt

SEQ ID NO: 1027908 - DNA, 15 bp, Homo sapiens
aagaaagcataggtg

SEQ ID NO: 1027909 - DNA, 15 bp, Homo sapiens
agaaagcataggtgg

SEQ ID NO: 1027910 - DNA, 15 bp, Homo sapiens
gaaagcataggtggg

SEQ ID NO: 1027911 - DNA, 15 bp, Homo sapiens
aaagcataggtgggg

SEQ ID NO: 1027912 - DNA, 15 bp, Homo sapiens
aagcataggtgggga

SEQ ID NO: 1027913 - DNA, 15 bp, Homo sapiens
agcataggtggggag

SEQ ID NO: 1027914 - DNA, 15 bp, Homo sapiens
gcataggtggggaga

SEQ ID NO: 1027915 - DNA, 15 bp, Homo sapiens
cataggtggggagag

SEQ ID NO: 1027916 - DNA, 15 bp, Homo sapiens
ataggtggggagagg

SEQ ID NO: 1027917 - DNA, 15 bp, Homo sapiens
taggtggggagaggg

SEQ ID NO: 1027918 - DNA, 15 bp, Homo sapiens
aggtggggagaggga

SEQ ID NO: 1027919 - DNA, 15 bp, Homo sapiens
ggtggggagagggag

SEQ ID NO: 1027920 - DNA, 15 bp, Homo sapiens
gtggggagagggagg

SEQ ID NO: 1027921 - DNA, 15 bp, Homo sapiens
tggggagagggagga

SEQ ID NO: 1027922 - DNA, 15 bp, Homo sapiens
ggggagagggaggaa

SEQ ID NO: 1027923 - DNA, 15 bp, Homo sapiens
gggagagggaggaaa

SEQ ID NO: 1027924 - DNA, 15 bp, Homo sapiens
ggagagggaggaaag

SEQ ID NO: 1027925 - DNA, 15 bp, Homo sapiens
gagagggaggaaaga

SEQ ID NO: 1027926 - DNA, 15 bp, Homo sapiens
agagggaggaaagaa

SEQ ID NO: 1027927 - DNA, 15 bp, Homo sapiens
gagggaggaaagaaa

SEQ ID NO: 1027928 - DNA, 15 bp, Homo sapiens
agggaggaaagaaac

SEQ ID NO: 1027929 - DNA, 15 bp, Homo sapiens
gggaggaaagaaact

SEQ ID NO: 1027930 - DNA, 15 bp, Homo sapiens
ggaggaaagaaacta

SEQ ID NO: 1027931 - DNA, 15 bp, Homo sapiens
gaggaaagaaactat

SEQ ID NO: 1027932 - DNA, 15 bp, Homo sapiens
aggaaagaaactatg

SEQ ID NO: 1027933 - DNA, 15 bp, Homo sapiens
ggaaagaaactatga

SEQ ID NO: 1027934 - DNA, 15 bp, Homo sapiens
gaaagaaactatgac

SEQ ID NO: 1027935 - DNA, 15 bp, Homo sapiens
aaagaaactatgacc

SEQ ID NO: 1027936 - DNA, 15 bp, Homo sapiens
aagaaactatgacct

SEQ ID NO: 1027937 - DNA, 15 bp, Homo sapiens
agaaactatgacctt

SEQ ID NO: 1027938 - DNA, 15 bp, Homo sapiens
gaaactatgaccttg

SEQ ID NO: 1027939 - DNA, 15 bp, Homo sapiens
aaactatgaccttgg

SEQ ID NO: 1027940 - DNA, 15 bp, Homo sapiens
aactatgaccttggc

SEQ ID NO: 1027941 - DNA, 15 bp, Homo sapiens
actatgaccttggcc

SEQ ID NO: 1027942 - DNA, 15 bp, Homo sapiens
ctatgaccttggccc

SEQ ID NO: 1027943 - DNA, 15 bp, Homo sapiens
tatgaccttggcccc

SEQ ID NO: 1027944 - DNA, 15 bp, Homo sapiens
atgaccttggcccct

SEQ ID NO: 1027945 - DNA, 15 bp, Homo sapiens
tgaccttggccccta

SEQ ID NO: 1027946 - DNA, 15 bp, Homo sapiens
gaccttggcccctat

SEQ ID NO: 1027947 - DNA, 15 bp, Homo sapiens
accttggcccctata

SEQ ID NO: 1027948 - DNA, 15 bp, Homo sapiens
ccttggcccctatac

SEQ ID NO: 1027949 - DNA, 15 bp, Homo sapiens
cttggcccctataca

SEQ ID NO: 1027950 - DNA, 15 bp, Homo sapiens
ttggcccctatacac

SEQ ID NO: 1027951 - DNA, 15 bp, Homo sapiens
tggcccctatacact

SEQ ID NO: 1027952 - DNA, 15 bp, Homo sapiens
ggcccctatacactc

SEQ ID NO: 1027953 - DNA, 15 bp, Homo sapiens
gcccctatacactct

SEQ ID NO: 1027954 - DNA, 15 bp, Homo sapiens
cccctatacactctg

SEQ ID NO: 1027955 - DNA, 15 bp, Homo sapiens
ccctatacactctgc

SEQ ID NO: 1027956 - DNA, 15 bp, Homo sapiens
cctatacactctgca

SEQ ID NO: 1027957 - DNA, 15 bp, Homo sapiens
ctatacactctgcat

SEQ ID NO: 1027958 - DNA, 15 bp, Homo sapiens
tatacactctgcatt

SEQ ID NO: 1027959 - DNA, 15 bp, Homo sapiens
atacactctgcattc

SEQ ID NO: 1027960 - DNA, 15 bp, Homo sapiens
tacactctgcattct

SEQ ID NO: 1027961 - DNA, 15 bp, Homo sapiens
acactctgcattctt

SEQ ID NO: 1027962 - DNA, 15 bp, Homo sapiens
cactctgcattcttt

SEQ ID NO: 1027963 - DNA, 15 bp, Homo sapiens
actctgcattctttt

SEQ ID NO: 1027964 - DNA, 15 bp, Homo sapiens
ctctgcattctttta

SEQ ID NO: 1027965 - DNA, 15 bp, Homo sapiens
tctgcattcttttat

SEQ ID NO: 1027966 - DNA, 15 bp, Homo sapiens
ctgcattcttttatt

SEQ ID NO: 1027967 - DNA, 15 bp, Homo sapiens
tgcattcttttattc

SEQ ID NO: 1027968 - DNA, 15 bp, Homo sapiens
gcattcttttattct

SEQ ID NO: 1027969 - DNA, 15 bp, Homo sapiens
cattcttttattctt

SEQ ID NO: 1027970 - DNA, 15 bp, Homo sapiens
attcttttattctta

SEQ ID NO: 1027971 - DNA, 15 bp, Homo sapiens
ttcttttattcttat

SEQ ID NO: 1027972 - DNA, 15 bp, Homo sapiens
tcttttattcttatt

SEQ ID NO: 1027973 - DNA, 15 bp, Homo sapiens
cttttattcttatta

SEQ ID NO: 1027974 - DNA, 15 bp, Homo sapiens
ttttattcttattag

SEQ ID NO: 1027975 - DNA, 15 bp, Homo sapiens
tttattcttattagg

SEQ ID NO: 1027976 - DNA, 15 bp, Homo sapiens
ttattcttattaggc

SEQ ID NO: 1027977 - DNA, 15 bp, Homo sapiens
tattcttattaggct

SEQ ID NO: 1027978 - DNA, 15 bp, Homo sapiens
attcttattaggctt

SEQ ID NO: 1027979 - DNA, 15 bp, Homo sapiens
ttcttattaggcttt

SEQ ID NO: 1027980 - DNA, 15 bp, Homo sapiens
tcttattaggctttg

SEQ ID NO: 1027981 - DNA, 15 bp, Homo sapiens
cttattaggctttga

SEQ ID NO: 1027982 - DNA, 15 bp, Homo sapiens
ttattaggctttgac

SEQ ID NO: 1027983 - DNA, 15 bp, Homo sapiens
tattaggctttgacc

SEQ ID NO: 1027984 - DNA, 15 bp, Homo sapiens
attaggctttgaccc

SEQ ID NO: 1027985 - DNA, 15 bp, Homo sapiens
ttaggctttgaccct

SEQ ID NO: 1027986 - DNA, 15 bp, Homo sapiens
taggctttgaccctg

SEQ ID NO: 1027987 - DNA, 15 bp, Homo sapiens
aggctttgaccctgg

SEQ ID NO: 1027988 - DNA, 15 bp, Homo sapiens
ggctttgaccctggc

SEQ ID NO: 1027989 - DNA, 15 bp, Homo sapiens
gctttgaccctggca

SEQ ID NO: 1027990 - DNA, 15 bp, Homo sapiens
ctttgaccctggcac

SEQ ID NO: 1027991 - DNA, 15 bp, Homo sapiens
tttgaccctggcacc

SEQ ID NO: 1027992 - DNA, 15 bp, Homo sapiens
ttgaccctggcacct

SEQ ID NO: 1027993 - DNA, 15 bp, Homo sapiens
tgaccctggcacctc

SEQ ID NO: 1027994 - DNA, 15 bp, Homo sapiens
gaccctggcacctcc

SEQ ID NO: 1027995 - DNA, 15 bp, Homo sapiens
accctggcacctccc

SEQ ID NO: 1027996 - DNA, 15 bp, Homo sapiens
ccctggcacctccct

SEQ ID NO: 1027997 - DNA, 15 bp, Homo sapiens
cctggcacctccctc

SEQ ID NO: 1027998 - DNA, 15 bp, Homo sapiens
ctggcacctccctcc

SEQ ID NO: 1027999 - DNA, 15 bp, Homo sapiens
tggcacctccctcca

SEQ ID NO: 1028000 - DNA, 15 bp, Homo sapiens
ggcacctccctccag

SEQ ID NO: 1028001 - DNA, 15 bp, Homo sapiens
gcacctccctccagc

SEQ ID NO: 1028002 - DNA, 15 bp, Homo sapiens
cacctccctccagct

SEQ ID NO: 1028003 - DNA, 15 bp, Homo sapiens
acctccctccagctg

SEQ ID NO: 1028004 - DNA, 15 bp, Homo sapiens
cctccctccagctgc

SEQ ID NO: 1028005 - DNA, 15 bp, Homo sapiens
ctccctccagctgcc

SEQ ID NO: 1028006 - DNA, 15 bp, Homo sapiens
tccctccagctgccc

SEQ ID NO: 1028007 - DNA, 15 bp, Homo sapiens
ccctccagctgccca

SEQ ID NO: 1028008 - DNA, 15 bp, Homo sapiens
cctccagctgcccac

SEQ ID NO: 1028009 - DNA, 15 bp, Homo sapiens
ctccagctgcccact

SEQ ID NO: 1028010 - DNA, 15 bp, Homo sapiens
tccagctgcccactc

SEQ ID NO: 1028011 - DNA, 15 bp, Homo sapiens
ccagctgcccactca

SEQ ID NO: 1028012 - DNA, 15 bp, Homo sapiens
cagctgcccactcat

SEQ ID NO: 1028013 - DNA, 15 bp, Homo sapiens
agctgcccactcatg

SEQ ID NO: 1028014 - DNA, 15 bp, Homo sapiens
gctgcccactcatgg

SEQ ID NO: 1028015 - DNA, 15 bp, Homo sapiens
ctgcccactcatggg

SEQ ID NO: 1028016 - DNA, 15 bp, Homo sapiens
tgcccactcatgggc

SEQ ID NO: 1028017 - DNA, 15 bp, Homo sapiens
gcccactcatgggcc

SEQ ID NO: 1028018 - DNA, 15 bp, Homo sapiens
cccactcatgggccc

SEQ ID NO: 1028019 - DNA, 15 bp, Homo sapiens
ccactcatgggccct

SEQ ID NO: 1028020 - DNA, 15 bp, Homo sapiens
cactcatgggccctt

SEQ ID NO: 1028021 - DNA, 15 bp, Homo sapiens
actcatgggcccttc

SEQ ID NO: 1028022 - DNA, 15 bp, Homo sapiens
ctcatgggcccttca

SEQ ID NO: 1028023 - DNA, 15 bp, Homo sapiens
tcatgggcccttcac

SEQ ID NO: 1028024 - DNA, 15 bp, Homo sapiens
catgggcccttcacc

SEQ ID NO: 1028025 - DNA, 15 bp, Homo sapiens
atgggcccttcacca

SEQ ID NO: 1028026 - DNA, 15 bp, Homo sapiens
tgggcccttcaccac

SEQ ID NO: 1028027 - DNA, 15 bp, Homo sapiens
gggcccttcaccacc

SEQ ID NO: 1028028 - DNA, 15 bp, Homo sapiens
ggcccttcaccacct

SEQ ID NO: 1028029 - DNA, 15 bp, Homo sapiens
gcccttcaccacctg

SEQ ID NO: 1028030 - DNA, 15 bp, Homo sapiens
cccttcaccacctgc

SEQ ID NO: 1028031 - DNA, 15 bp, Homo sapiens
ccttcaccacctgcc

SEQ ID NO: 1028032 - DNA, 15 bp, Homo sapiens
cttcaccacctgccc

SEQ ID NO: 1028033 - DNA, 15 bp, Homo sapiens
ttcaccacctgccca

SEQ ID NO: 1028034 - DNA, 15 bp, Homo sapiens
tcaccacctgcccag

SEQ ID NO: 1028035 - DNA, 15 bp, Homo sapiens
caccacctgcccagg

SEQ ID NO: 1028036 - DNA, 15 bp, Homo sapiens
accacctgcccagga

SEQ ID NO: 1028037 - DNA, 15 bp, Homo sapiens
ccacctgcccaggat

SEQ ID NO: 1028038 - DNA, 15 bp, Homo sapiens
cacctgcccaggatc

SEQ ID NO: 1028039 - DNA, 15 bp, Homo sapiens
acctgcccaggatct

SEQ ID NO: 1028040 - DNA, 15 bp, Homo sapiens
cctgcccaggatctc

SEQ ID NO: 1028041 - DNA, 15 bp, Homo sapiens
ctgcccaggatctca

SEQ ID NO: 1028042 - DNA, 15 bp, Homo sapiens
tgcccaggatctcac

SEQ ID NO: 1028043 - DNA, 15 bp, Homo sapiens
gcccaggatctcacc

SEQ ID NO: 1028044 - DNA, 15 bp, Homo sapiens
cccaggatctcaccc

SEQ ID NO: 1028045 - DNA, 15 bp, Homo sapiens
ccaggatctcaccca

SEQ ID NO: 1028046 - DNA, 15 bp, Homo sapiens
caggatctcacccag

SEQ ID NO: 1028047 - DNA, 15 bp, Homo sapiens
aggatctcacccagt

SEQ ID NO: 1028048 - DNA, 15 bp, Homo sapiens
ggatctcacccagta

SEQ ID NO: 1028049 - DNA, 15 bp, Homo sapiens
gatctcacccagtac

SEQ ID NO: 1028050 - DNA, 15 bp, Homo sapiens
atctcacccagtact

SEQ ID NO: 1028051 - DNA, 15 bp, Homo sapiens
tctcacccagtactg

SEQ ID NO: 1028052 - DNA, 15 bp, Homo sapiens
ctcacccagtactga

SEQ ID NO: 1028053 - DNA, 15 bp, Homo sapiens
tcacccagtactgac

SEQ ID NO: 1028054 - DNA, 15 bp, Homo sapiens
cacccagtactgaca

SEQ ID NO: 1028055 - DNA, 15 bp, Homo sapiens
acccagtactgacag

SEQ ID NO: 1028056 - DNA, 15 bp, Homo sapiens
cccagtactgacagc

SEQ ID NO: 1028057 - DNA, 15 bp, Homo sapiens
ccagtactgacagct

SEQ ID NO: 1028058 - DNA, 15 bp, Homo sapiens
cagtactgacagctc

SEQ ID NO: 1028059 - DNA, 15 bp, Homo sapiens
agtactgacagctcc

SEQ ID NO: 1028060 - DNA, 15 bp, Homo sapiens
gtactgacagctcct

SEQ ID NO: 1028061 - DNA, 15 bp, Homo sapiens
tactgacagctcctc

SEQ ID NO: 1028062 - DNA, 15 bp, Homo sapiens
actgacagctcctct

SEQ ID NO: 1028063 - DNA, 15 bp, Homo sapiens
ctgacagctcctctt

SEQ ID NO: 1028064 - DNA, 15 bp, Homo sapiens
tgacagctcctcttt

SEQ ID NO: 1028065 - DNA, 15 bp, Homo sapiens
gacagctcctctttc

SEQ ID NO: 1028066 - DNA, 15 bp, Homo sapiens
acagctcctctttct

SEQ ID NO: 1028067 - DNA, 15 bp, Homo sapiens
cagctcctctttctg

SEQ ID NO: 1028068 - DNA, 15 bp, Homo sapiens
agctcctctttctgg

SEQ ID NO: 1028069 - DNA, 15 bp, Homo sapiens
gctcctctttctgga

SEQ ID NO: 1028070 - DNA, 15 bp, Homo sapiens
ctcctctttctggag

SEQ ID NO: 1028071 - DNA, 15 bp, Homo sapiens
tcctctttctggaga

SEQ ID NO: 1028072 - DNA, 15 bp, Homo sapiens
cctctttctggagag

SEQ ID NO: 1028073 - DNA, 15 bp, Homo sapiens
ctctttctggagagc

SEQ ID NO: 1028074 - DNA, 15 bp, Homo sapiens
tctttctggagagcc

SEQ ID NO: 1028075 - DNA, 15 bp, Homo sapiens
ctttctggagagccc

SEQ ID NO: 1028076 - DNA, 15 bp, Homo sapiens
tttctggagagcccc

SEQ ID NO: 1028077 - DNA, 15 bp, Homo sapiens
ttctggagagcccca

SEQ ID NO: 1028078 - DNA, 15 bp, Homo sapiens
tctggagagccccaa

SEQ ID NO: 1028079 - DNA, 15 bp, Homo sapiens
ctggagagccccaag

SEQ ID NO: 1028080 - DNA, 15 bp, Homo sapiens
tggagagccccaagg

SEQ ID NO: 1028081 - DNA, 15 bp, Homo sapiens
ggagagccccaaggg

SEQ ID NO: 1028082 - DNA, 15 bp, Homo sapiens
gagagccccaagggc

SEQ ID NO: 1028083 - DNA, 15 bp, Homo sapiens
agagccccaagggcc

SEQ ID NO: 1028084 - DNA, 15 bp, Homo sapiens
gagccccaagggccc

SEQ ID NO: 1028085 - DNA, 15 bp, Homo sapiens
agccccaagggcccc

SEQ ID NO: 1028086 - DNA, 15 bp, Homo sapiens
gccccaagggccccc

SEQ ID NO: 1028087 - DNA, 15 bp, Homo sapiens
ccccaagggccccct

SEQ ID NO: 1028088 - DNA, 15 bp, Homo sapiens
cccaagggcccccta

SEQ ID NO: 1028089 - DNA, 15 bp, Homo sapiens
ccaagggccccctag

SEQ ID NO: 1028090 - DNA, 15 bp, Homo sapiens
caagggccccctagc

SEQ ID NO: 1028091 - DNA, 15 bp, Homo sapiens
aagggccccctagcc

SEQ ID NO: 1028092 - DNA, 15 bp, Homo sapiens
agggccccctagcca

SEQ ID NO: 1028093 - DNA, 15 bp, Homo sapiens
gggccccctagccag

SEQ ID NO: 1028094 - DNA, 15 bp, Homo sapiens
ggccccctagccagc

SEQ ID NO: 1028095 - DNA, 15 bp, Homo sapiens
gccccctagccagcc

SEQ ID NO: 1028096 - DNA, 15 bp, Homo sapiens
ccccctagccagccc

SEQ ID NO: 1028097 - DNA, 15 bp, Homo sapiens
cccctagccagcccc

SEQ ID NO: 1028098 - DNA, 15 bp, Homo sapiens
ccctagccagccccg

SEQ ID NO: 1028099 - DNA, 15 bp, Homo sapiens
cctagccagccccgc

SEQ ID NO: 1028100 - DNA, 15 bp, Homo sapiens
ctagccagccccgca

SEQ ID NO: 1028101 - DNA, 15 bp, Homo sapiens
tagccagccccgcac

SEQ ID NO: 1028102 - DNA, 15 bp, Homo sapiens
agccagccccgcacg

SEQ ID NO: 1028103 - DNA, 15 bp, Homo sapiens
gccagccccgcacgt

SEQ ID NO: 1028104 - DNA, 15 bp, Homo sapiens
ccagccccgcacgtg

SEQ ID NO: 1028105 - DNA, 15 bp, Homo sapiens
cagccccgcacgtga

SEQ ID NO: 1028106 - DNA, 15 bp, Homo sapiens
agccccgcacgtgag

SEQ ID NO: 1028107 - DNA, 15 bp, Homo sapiens
gccccgcacgtgagt

SEQ ID NO: 1028108 - DNA, 15 bp, Homo sapiens
ccccgcacgtgagta

SEQ ID NO: 1028109 - DNA, 15 bp, Homo sapiens
cccgcacgtgagtag

SEQ ID NO: 1028110 - DNA, 15 bp, Homo sapiens
ccgcacgtgagtagg

SEQ ID NO: 1028111 - DNA, 15 bp, Homo sapiens
cgcacgtgagtaggg

SEQ ID NO: 1028112 - DNA, 15 bp, Homo sapiens
gcacgtgagtaggga

SEQ ID NO: 1028113 - DNA, 15 bp, Homo sapiens
cacgtgagtagggag

SEQ ID NO: 1028114 - DNA, 15 bp, Homo sapiens
acgtgagtagggaga

SEQ ID NO: 1028115 - DNA, 15 bp, Homo sapiens
cgtgagtagggagag

SEQ ID NO: 1028116 - DNA, 15 bp, Homo sapiens
gtgagtagggagaga

SEQ ID NO: 1028117 - DNA, 15 bp, Homo sapiens
tgagtagggagagaa

SEQ ID NO: 1028118 - DNA, 15 bp, Homo sapiens
gagtagggagagaag

SEQ ID NO: 1028119 - DNA, 15 bp, Homo sapiens
agtagggagagaagg

SEQ ID NO: 1028120 - DNA, 15 bp, Homo sapiens
gtagggagagaagga

SEQ ID NO: 1028121 - DNA, 15 bp, Homo sapiens
tagggagagaaggat

SEQ ID NO: 1028122 - DNA, 15 bp, Homo sapiens
agggagagaaggatg

SEQ ID NO: 1028123 - DNA, 15 bp, Homo sapiens
gggagagaaggatgt

SEQ ID NO: 1028124 - DNA, 15 bp, Homo sapiens
ggagagaaggatgtg

SEQ ID NO: 1028125 - DNA, 15 bp, Homo sapiens
gagagaaggatgtgt

SEQ ID NO: 1028126 - DNA, 15 bp, Homo sapiens
agagaaggatgtgta

SEQ ID NO: 1028127 - DNA, 15 bp, Homo sapiens
gagaaggatgtgtat

SEQ ID NO: 1028128 - DNA, 15 bp, Homo sapiens
agaaggatgtgtatc

SEQ ID NO: 1028129 - DNA, 15 bp, Homo sapiens
gaaggatgtgtatca

SEQ ID NO: 1028130 - DNA, 15 bp, Homo sapiens
aaggatgtgtatcat

SEQ ID NO: 1028131 - DNA, 15 bp, Homo sapiens
aggatgtgtatcata

SEQ ID NO: 1028132 - DNA, 15 bp, Homo sapiens
ggatgtgtatcataa

SEQ ID NO: 1028133 - DNA, 15 bp, Homo sapiens
gatgtgtatcataag

SEQ ID NO: 1028134 - DNA, 15 bp, Homo sapiens
atgtgtatcataagc

SEQ ID NO: 1028135 - DNA, 15 bp, Homo sapiens
tgtgtatcataagcc

SEQ ID NO: 1028136 - DNA, 15 bp, Homo sapiens
gtgtatcataagcct

SEQ ID NO: 1028137 - DNA, 15 bp, Homo sapiens
tgtatcataagccta

SEQ ID NO: 1028138 - DNA, 15 bp, Homo sapiens
gtatcataagcctaa

SEQ ID NO: 1028139 - DNA, 15 bp, Homo sapiens
tatcataagcctaag

SEQ ID NO: 1028140 - DNA, 15 bp, Homo sapiens
atcataagcctaagc

SEQ ID NO: 1028141 - DNA, 15 bp, Homo sapiens
tcataagcctaagcc

SEQ ID NO: 1028142 - DNA, 15 bp, Homo sapiens
cataagcctaagcct

SEQ ID NO: 1028143 - DNA, 15 bp, Homo sapiens
ataagcctaagcctg

SEQ ID NO: 1028144 - DNA, 15 bp, Homo sapiens
taagcctaagcctgt

SEQ ID NO: 1028145 - DNA, 15 bp, Homo sapiens
aagcctaagcctgtg

SEQ ID NO: 1028146 - DNA, 15 bp, Homo sapiens
agcctaagcctgtgc

SEQ ID NO: 1028147 - DNA, 15 bp, Homo sapiens
gcctaagcctgtgct

SEQ ID NO: 1028148 - DNA, 15 bp, Homo sapiens
cctaagcctgtgctg

SEQ ID NO: 1028149 - DNA, 15 bp, Homo sapiens
ctaagcctgtgctgt

SEQ ID NO: 1028150 - DNA, 15 bp, Homo sapiens
taagcctgtgctgtg

SEQ ID NO: 1028151 - DNA, 15 bp, Homo sapiens
aagcctgtgctgtgt

SEQ ID NO: 1028152 - DNA, 15 bp, Homo sapiens
agcctgtgctgtgtc

SEQ ID NO: 1028153 - DNA, 15 bp, Homo sapiens
gcctgtgctgtgtcc

SEQ ID NO: 1028154 - DNA, 15 bp, Homo sapiens
cctgtgctgtgtcca

SEQ ID NO: 1028155 - DNA, 15 bp, Homo sapiens
ctgtgctgtgtccaa

SEQ ID NO: 1028156 - DNA, 15 bp, Homo sapiens
tgtgctgtgtccaac

SEQ ID NO: 1028157 - DNA, 15 bp, Homo sapiens
gtgctgtgtccaacc

SEQ ID NO: 1028158 - DNA, 15 bp, Homo sapiens
tgctgtgtccaacca

SEQ ID NO: 1028159 - DNA, 15 bp, Homo sapiens
gctgtgtccaaccac

SEQ ID NO: 1028160 - DNA, 15 bp, Homo sapiens
ctgtgtccaaccaca

SEQ ID NO: 1028161 - DNA, 15 bp, Homo sapiens
tgtgtccaaccacag

SEQ ID NO: 1028162 - DNA, 15 bp, Homo sapiens
gtgtccaaccacagt

SEQ ID NO: 1028163 - DNA, 15 bp, Homo sapiens
tgtccaaccacagtg

SEQ ID NO: 1028164 - DNA, 15 bp, Homo sapiens
gtccaaccacagtgc

SEQ ID NO: 1028165 - DNA, 15 bp, Homo sapiens
tccaaccacagtgct

SEQ ID NO: 1028166 - DNA, 15 bp, Homo sapiens
ccaaccacagtgctg

SEQ ID NO: 1028167 - DNA, 15 bp, Homo sapiens
caaccacagtgctgg

SEQ ID NO: 1028168 - DNA, 15 bp, Homo sapiens
aaccacagtgctggt

SEQ ID NO: 1028169 - DNA, 15 bp, Homo sapiens
accacagtgctggtg

SEQ ID NO: 1028170 - DNA, 15 bp, Homo sapiens
ccacagtgctggtgt

SEQ ID NO: 1028171 - DNA, 15 bp, Homo sapiens
cacagtgctggtgtc

SEQ ID NO: 1028172 - DNA, 15 bp, Homo sapiens
acagtgctggtgtcc

SEQ ID NO: 1028173 - DNA, 15 bp, Homo sapiens
cagtgctggtgtcca

SEQ ID NO: 1028174 - DNA, 15 bp, Homo sapiens
agtgctggtgtccaa

SEQ ID NO: 1028175 - DNA, 15 bp, Homo sapiens
gtgctggtgtccaac

SEQ ID NO: 1028176 - DNA, 15 bp, Homo sapiens
tgctggtgtccaacc

SEQ ID NO: 1028177 - DNA, 15 bp, Homo sapiens
gctggtgtccaacca

SEQ ID NO: 1028178 - DNA, 15 bp, Homo sapiens
ctggtgtccaaccac

SEQ ID NO: 1028179 - DNA, 15 bp, Homo sapiens
tggtgtccaaccaca

SEQ ID NO: 1028180 - DNA, 15 bp, Homo sapiens
ggtgtccaaccacag

SEQ ID NO: 1028181 - DNA, 15 bp, Homo sapiens
gtccaaccacagtgg

SEQ ID NO: 1028182 - DNA, 15 bp, Homo sapiens
tccaaccacagtgga

SEQ ID NO: 1028183 - DNA, 15 bp, Homo sapiens
ccaaccacagtggat

SEQ ID NO: 1028184 - DNA, 15 bp, Homo sapiens
caaccacagtggata

SEQ ID NO: 1028185 - DNA, 15 bp, Homo sapiens
aaccacagtggataa

SEQ ID NO: 1028186 - DNA, 15 bp, Homo sapiens
accacagtggataat

SEQ ID NO: 1028187 - DNA, 15 bp, Homo sapiens
ccacagtggataatg

SEQ ID NO: 1028188 - DNA, 15 bp, Homo sapiens
cacagtggataatga

SEQ ID NO: 1028189 - DNA, 15 bp, Homo sapiens
acagtggataatgaa

SEQ ID NO: 1028190 - DNA, 15 bp, Homo sapiens
cagtggataatgaag

SEQ ID NO: 1028191 - DNA, 15 bp, Homo sapiens
agtggataatgaaga

SEQ ID NO: 1028192 - DNA, 15 bp, Homo sapiens
gtggataatgaagat

SEQ ID NO: 1028193 - DNA, 15 bp, Homo sapiens
tggataatgaagatg

SEQ ID NO: 1028194 - DNA, 15 bp, Homo sapiens
ggataatgaagatga

SEQ ID NO: 1028195 - DNA, 15 bp, Homo sapiens
gataatgaagatgaa

SEQ ID NO: 1028196 - DNA, 15 bp, Homo sapiens
ataatgaagatgaaa

SEQ ID NO: 1028197 - DNA, 15 bp, Homo sapiens
taatgaagatgaaaa

SEQ ID NO: 1028198 - DNA, 15 bp, Homo sapiens
aatgaagatgaaaag

SEQ ID NO: 1028199 - DNA, 15 bp, Homo sapiens
atgaagatgaaaagg

SEQ ID NO: 1028200 - DNA, 15 bp, Homo sapiens
tgaagatgaaaaggt

SEQ ID NO: 1028201 - DNA, 15 bp, Homo sapiens
gaagatgaaaaggtc

SEQ ID NO: 1028202 - DNA, 15 bp, Homo sapiens
aagatgaaaaggtct

SEQ ID NO: 1028203 - DNA, 15 bp, Homo sapiens
agatgaaaaggtctc

SEQ ID NO: 1028204 - DNA, 15 bp, Homo sapiens
gatgaaaaggtctct

SEQ ID NO: 1028205 - DNA, 15 bp, Homo sapiens
atgaaaaggtctctg

SEQ ID NO: 1028206 - DNA, 15 bp, Homo sapiens
tgaaaaggtctctga

SEQ ID NO: 1028207 - DNA, 15 bp, Homo sapiens
gaaaaggtctctgac

SEQ ID NO: 1028208 - DNA, 15 bp, Homo sapiens
aaaaggtctctgact

SEQ ID NO: 1028209 - DNA, 15 bp, Homo sapiens
aaaggtctctgacta

SEQ ID NO: 1028210 - DNA, 15 bp, Homo sapiens
aaggtctctgactaa

SEQ ID NO: 1028211 - DNA, 15 bp, Homo sapiens
aggtctctgactaat

SEQ ID NO: 1028212 - DNA, 15 bp, Homo sapiens
ggtctctgactaata

SEQ ID NO: 1028213 - DNA, 15 bp, Homo sapiens
gtctctgactaatag

SEQ ID NO: 1028214 - DNA, 15 bp, Homo sapiens
tctctgactaatagg

SEQ ID NO: 1028215 - DNA, 15 bp, Homo sapiens
ctctgactaataggc

SEQ ID NO: 1028216 - DNA, 15 bp, Homo sapiens
tctgactaataggca

SEQ ID NO: 1028217 - DNA, 15 bp, Homo sapiens
ctgactaataggcaa

SEQ ID NO: 1028218 - DNA, 15 bp, Homo sapiens
tgactaataggcaag

SEQ ID NO: 1028219 - DNA, 15 bp, Homo sapiens
gactaataggcaagg

SEQ ID NO: 1028220 - DNA, 15 bp, Homo sapiens
actaataggcaaggc

SEQ ID NO: 1028221 - DNA, 15 bp, Homo sapiens
ctaataggcaaggca

SEQ ID NO: 1028222 - DNA, 15 bp, Homo sapiens
taataggcaaggcag

SEQ ID NO: 1028223 - DNA, 15 bp, Homo sapiens
aataggcaaggcaga

SEQ ID NO: 1028224 - DNA, 15 bp, Homo sapiens
ataggcaaggcagag

SEQ ID NO: 1028225 - DNA, 15 bp, Homo sapiens
taggcaaggcagagc

SEQ ID NO: 1028226 - DNA, 15 bp, Homo sapiens
aggcaaggcagagct

SEQ ID NO: 1028227 - DNA, 15 bp, Homo sapiens
ggcaaggcagagctc

SEQ ID NO: 1028228 - DNA, 15 bp, Homo sapiens
gcaaggcagagctct

SEQ ID NO: 1028229 - DNA, 15 bp, Homo sapiens
caaggcagagctctc

SEQ ID NO: 1028230 - DNA, 15 bp, Homo sapiens
aaggcagagctctcc

SEQ ID NO: 1028231 - DNA, 15 bp, Homo sapiens
aggcagagctctcct

SEQ ID NO: 1028232 - DNA, 15 bp, Homo sapiens
ggcagagctctccta

SEQ ID NO: 1028233 - DNA, 15 bp, Homo sapiens
gcagagctctcctag

SEQ ID NO: 1028234 - DNA, 15 bp, Homo sapiens
cagagctctcctagt

SEQ ID NO: 1028235 - DNA, 15 bp, Homo sapiens
agagctctcctagta

SEQ ID NO: 1028236 - DNA, 15 bp, Homo sapiens
gagctctcctagtac

SEQ ID NO: 1028237 - DNA, 15 bp, Homo sapiens
agctctcctagtact

SEQ ID NO: 1028238 - DNA, 15 bp, Homo sapiens
gctctcctagtactg

SEQ ID NO: 1028239 - DNA, 15 bp, Homo sapiens
ctctcctagtactgc

SEQ ID NO: 1028240 - DNA, 15 bp, Homo sapiens
tctcctagtactgcc

SEQ ID NO: 1028241 - DNA, 15 bp, Homo sapiens
ctcctagtactgcca

SEQ ID NO: 1028242 - DNA, 15 bp, Homo sapiens
tcctagtactgccat

SEQ ID NO: 1028243 - DNA, 15 bp, Homo sapiens
cctagtactgccatt

SEQ ID NO: 1028244 - DNA, 15 bp, Homo sapiens
ctagtactgccattt

SEQ ID NO: 1028245 - DNA, 15 bp, Homo sapiens
tagtactgccatttc

SEQ ID NO: 1028246 - DNA, 15 bp, Homo sapiens
agtactgccatttcc

SEQ ID NO: 1028247 - DNA, 15 bp, Homo sapiens
gtactgccatttcct

SEQ ID NO: 1028248 - DNA, 15 bp, Homo sapiens
tactgccatttccta

SEQ ID NO: 1028249 - DNA, 15 bp, Homo sapiens
actgccatttcctag

SEQ ID NO: 1028250 - DNA, 15 bp, Homo sapiens
ctgccatttcctagc

SEQ ID NO: 1028251 - DNA, 15 bp, Homo sapiens
tgccatttcctagct

SEQ ID NO: 1028252 - DNA, 15 bp, Homo sapiens
gccatttcctagctg

SEQ ID NO: 1028253 - DNA, 15 bp, Homo sapiens
ccatttcctagctgt

SEQ ID NO: 1028254 - DNA, 15 bp, Homo sapiens
catttcctagctgtg

SEQ ID NO: 1028255 - DNA, 15 bp, Homo sapiens
atttcctagctgtga

SEQ ID NO: 1028256 - DNA, 15 bp, Homo sapiens
tttcctagctgtgat

SEQ ID NO: 1028257 - DNA, 15 bp, Homo sapiens
ttcctagctgtgatg

SEQ ID NO: 1028258 - DNA, 15 bp, Homo sapiens
tcctagctgtgatgc

SEQ ID NO: 1028259 - DNA, 15 bp, Homo sapiens
cctagctgtgatgct

SEQ ID NO: 1028260 - DNA, 15 bp, Homo sapiens
ctagctgtgatgctt

SEQ ID NO: 1028261 - DNA, 15 bp, Homo sapiens
tagctgtgatgcttt

SEQ ID NO: 1028262 - DNA, 15 bp, Homo sapiens
agctgtgatgctttg

SEQ ID NO: 1028263 - DNA, 15 bp, Homo sapiens
gctgtgatgctttgg

SEQ ID NO: 1028264 - DNA, 15 bp, Homo sapiens
ctgtgatgctttgga

SEQ ID NO: 1028265 - DNA, 15 bp, Homo sapiens
tgtgatgctttggac

SEQ ID NO: 1028266 - DNA, 15 bp, Homo sapiens
gtgatgctttggaca

SEQ ID NO: 1028267 - DNA, 15 bp, Homo sapiens
tgatgctttggacaa

SEQ ID NO: 1028268 - DNA, 15 bp, Homo sapiens
gatgctttggacaat

SEQ ID NO: 1028269 - DNA, 15 bp, Homo sapiens
atgctttggacaatt

SEQ ID NO: 1028270 - DNA, 15 bp, Homo sapiens
tgctttggacaatta

SEQ ID NO: 1028271 - DNA, 15 bp, Homo sapiens
gctttggacaattat

SEQ ID NO: 1028272 - DNA, 15 bp, Homo sapiens
ctttggacaattatc

SEQ ID NO: 1028273 - DNA, 15 bp, Homo sapiens
tttggacaattatct

SEQ ID NO: 1028274 - DNA, 15 bp, Homo sapiens
ttggacaattatctt

SEQ ID NO: 1028275 - DNA, 15 bp, Homo sapiens
tggacaattatcttt

SEQ ID NO: 1028276 - DNA, 15 bp, Homo sapiens
ggacaattatcttta

SEQ ID NO: 1028277 - DNA, 15 bp, Homo sapiens
gacaattatctttac

SEQ ID NO: 1028278 - DNA, 15 bp, Homo sapiens
acaattatctttacc

SEQ ID NO: 1028279 - DNA, 15 bp, Homo sapiens
caattatctttacct

SEQ ID NO: 1028280 - DNA, 15 bp, Homo sapiens
aattatctttacctc

SEQ ID NO: 1028281 - DNA, 15 bp, Homo sapiens
attatctttacctct

SEQ ID NO: 1028282 - DNA, 15 bp, Homo sapiens
ttatctttacctctc

SEQ ID NO: 1028283 - DNA, 15 bp, Homo sapiens
tatctttacctctct

SEQ ID NO: 1028284 - DNA, 15 bp, Homo sapiens
atctttacctctctg

SEQ ID NO: 1028285 - DNA, 15 bp, Homo sapiens
tctttacctctctga

SEQ ID NO: 1028286 - DNA, 15 bp, Homo sapiens
ctttacctctctgag

SEQ ID NO: 1028287 - DNA, 15 bp, Homo sapiens
tttacctctctgagc

SEQ ID NO: 1028288 - DNA, 15 bp, Homo sapiens
ttacctctctgagcc

SEQ ID NO: 1028289 - DNA, 15 bp, Homo sapiens
tacctctctgagcct

SEQ ID NO: 1028290 - DNA, 15 bp, Homo sapiens
acctctctgagcctg

SEQ ID NO: 1028291 - DNA, 15 bp, Homo sapiens
cctctctgagcctgt

SEQ ID NO: 1028292 - DNA, 15 bp, Homo sapiens
ctctctgagcctgtt

SEQ ID NO: 1028293 - DNA, 15 bp, Homo sapiens
tctctgagcctgttt

SEQ ID NO: 1028294 - DNA, 15 bp, Homo sapiens
ctctgagcctgtttt

SEQ ID NO: 1028295 - DNA, 15 bp, Homo sapiens
tctgagcctgttttt

SEQ ID NO: 1028296 - DNA, 15 bp, Homo sapiens
ctgagcctgtttttc

SEQ ID NO: 1028297 - DNA, 15 bp, Homo sapiens
tgagcctgtttttct

SEQ ID NO: 1028298 - DNA, 15 bp, Homo sapiens
gagcctgtttttcta

SEQ ID NO: 1028299 - DNA, 15 bp, Homo sapiens
agcctgtttttctat

SEQ ID NO: 1028300 - DNA, 15 bp, Homo sapiens
gcctgtttttctatc

SEQ ID NO: 1028301 - DNA, 15 bp, Homo sapiens
cctgtttttctatca

SEQ ID NO: 1028302 - DNA, 15 bp, Homo sapiens
ctgtttttctatcag

SEQ ID NO: 1028303 - DNA, 15 bp, Homo sapiens
tgtttttctatcagt

SEQ ID NO: 1028304 - DNA, 15 bp, Homo sapiens
gtttttctatcagta

SEQ ID NO: 1028305 - DNA, 15 bp, Homo sapiens
tttttctatcagtaa

SEQ ID NO: 1028306 - DNA, 15 bp, Homo sapiens
ttttctatcagtaaa

SEQ ID NO: 1028307 - DNA, 15 bp, Homo sapiens
tttctatcagtaaat

SEQ ID NO: 1028308 - DNA, 15 bp, Homo sapiens
ttctatcagtaaatt

SEQ ID NO: 1028309 - DNA, 15 bp, Homo sapiens
tctatcagtaaattg

SEQ ID NO: 1028310 - DNA, 15 bp, Homo sapiens
ctatcagtaaattgg

SEQ ID NO: 1028311 - DNA, 15 bp, Homo sapiens
tatcagtaaattgga

SEQ ID NO: 1028312 - DNA, 15 bp, Homo sapiens
atcagtaaattggag

SEQ ID NO: 1028313 - DNA, 15 bp, Homo sapiens
tcagtaaattggaga

SEQ ID NO: 1028314 - DNA, 15 bp, Homo sapiens
cagtaaattggagac

SEQ ID NO: 1028315 - DNA, 15 bp, Homo sapiens
agtaaattggagaca

SEQ ID NO: 1028316 - DNA, 15 bp, Homo sapiens
gtaaattggagacac

SEQ ID NO: 1028317 - DNA, 15 bp, Homo sapiens
taaattggagacact

SEQ ID NO: 1028318 - DNA, 15 bp, Homo sapiens
aaattggagacacta

SEQ ID NO: 1028319 - DNA, 15 bp, Homo sapiens
aattggagacactat

SEQ ID NO: 1028320 - DNA, 15 bp, Homo sapiens
attggagacactatt

SEQ ID NO: 1028321 - DNA, 15 bp, Homo sapiens
ttggagacactatta

SEQ ID NO: 1028322 - DNA, 15 bp, Homo sapiens
tggagacactattac

SEQ ID NO: 1028323 - DNA, 15 bp, Homo sapiens
ggagacactattact

SEQ ID NO: 1028324 - DNA, 15 bp, Homo sapiens
gagacactattactt

SEQ ID NO: 1028325 - DNA, 15 bp, Homo sapiens
agacactattactta

SEQ ID NO: 1028326 - DNA, 15 bp, Homo sapiens
gacactattacttac

SEQ ID NO: 1028327 - DNA, 15 bp, Homo sapiens
acactattacttacc

SEQ ID NO: 1028328 - DNA, 15 bp, Homo sapiens
cactattacttacct

SEQ ID NO: 1028329 - DNA, 15 bp, Homo sapiens
actattacttacctc

SEQ ID NO: 1028330 - DNA, 15 bp, Homo sapiens
ctattacttacctct

SEQ ID NO: 1028331 - DNA, 15 bp, Homo sapiens
tattacttacctctc

SEQ ID NO: 1028332 - DNA, 15 bp, Homo sapiens
attacttacctctct

SEQ ID NO: 1028333 - DNA, 15 bp, Homo sapiens
ttacttacctctctg

SEQ ID NO: 1028334 - DNA, 15 bp, Homo sapiens
tacttacctctctga

SEQ ID NO: 1028335 - DNA, 15 bp, Homo sapiens
acttacctctctgat

SEQ ID NO: 1028336 - DNA, 15 bp, Homo sapiens
cttacctctctgatt

SEQ ID NO: 1028337 - DNA, 15 bp, Homo sapiens
ttacctctctgattg

SEQ ID NO: 1028338 - DNA, 15 bp, Homo sapiens
tacctctctgattgt

SEQ ID NO: 1028339 - DNA, 15 bp, Homo sapiens
acctctctgattgtt

SEQ ID NO: 1028340 - DNA, 15 bp, Homo sapiens
cctctctgattgttg

SEQ ID NO: 1028341 - DNA, 15 bp, Homo sapiens
ctctctgattgttgt

SEQ ID NO: 1028342 - DNA, 15 bp, Homo sapiens
tctctgattgttgta

SEQ ID NO: 1028343 - DNA, 15 bp, Homo sapiens
ctctgattgttgtaa

SEQ ID NO: 1028344 - DNA, 15 bp, Homo sapiens
tctgattgttgtaag

SEQ ID NO: 1028345 - DNA, 15 bp, Homo sapiens
ctgattgttgtaaga

SEQ ID NO: 1028346 - DNA, 15 bp, Homo sapiens
tgattgttgtaagaa

SEQ ID NO: 1028347 - DNA, 15 bp, Homo sapiens
gattgttgtaagaat

SEQ ID NO: 1028348 - DNA, 15 bp, Homo sapiens
attgttgtaagaatt

SEQ ID NO: 1028349 - DNA, 15 bp, Homo sapiens
ttgttgtaagaatta

SEQ ID NO: 1028350 - DNA, 15 bp, Homo sapiens
tgttgtaagaattag

SEQ ID NO: 1028351 - DNA, 15 bp, Homo sapiens
gttgtaagaattagc

SEQ ID NO: 1028352 - DNA, 15 bp, Homo sapiens
ttgtaagaattagca

SEQ ID NO: 1028353 - DNA, 15 bp, Homo sapiens
tgtaagaattagcaa

SEQ ID NO: 1028354 - DNA, 15 bp, Homo sapiens
gtaagaattagcaat

SEQ ID NO: 1028355 - DNA, 15 bp, Homo sapiens
taagaattagcaata

SEQ ID NO: 1028356 - DNA, 15 bp, Homo sapiens
aagaattagcaataa

SEQ ID NO: 1028357 - DNA, 15 bp, Homo sapiens
agaattagcaataat

SEQ ID NO: 1028358 - DNA, 15 bp, Homo sapiens
gaattagcaataatg

SEQ ID NO: 1028359 - DNA, 15 bp, Homo sapiens
aattagcaataatgt

SEQ ID NO: 1028360 - DNA, 15 bp, Homo sapiens
attagcaataatgta

SEQ ID NO: 1028361 - DNA, 15 bp, Homo sapiens
ttagcaataatgtat

SEQ ID NO: 1028362 - DNA, 15 bp, Homo sapiens
tagcaataatgtatg

SEQ ID NO: 1028363 - DNA, 15 bp, Homo sapiens
agcaataatgtatgg

SEQ ID NO: 1028364 - DNA, 15 bp, Homo sapiens
gcaataatgtatgga

SEQ ID NO: 1028365 - DNA, 15 bp, Homo sapiens
caataatgtatggaa

SEQ ID NO: 1028366 - DNA, 15 bp, Homo sapiens
aataatgtatggaat

SEQ ID NO: 1028367 - DNA, 15 bp, Homo sapiens
ataatgtatggaata

SEQ ID NO: 1028368 - DNA, 15 bp, Homo sapiens
taatgtatggaatag

SEQ ID NO: 1028369 - DNA, 15 bp, Homo sapiens
aatgtatggaataga

SEQ ID NO: 1028370 - DNA, 15 bp, Homo sapiens
atgtatggaatagac

SEQ ID NO: 1028371 - DNA, 15 bp, Homo sapiens
tgtatggaatagacc

SEQ ID NO: 1028372 - DNA, 15 bp, Homo sapiens
gtatggaatagacct

SEQ ID NO: 1028373 - DNA, 15 bp, Homo sapiens
tatggaatagaccta

SEQ ID NO: 1028374 - DNA, 15 bp, Homo sapiens
atggaatagacctag

SEQ ID NO: 1028375 - DNA, 15 bp, Homo sapiens
tggaatagacctagc

SEQ ID NO: 1028376 - DNA, 15 bp, Homo sapiens
ggaatagacctagca

SEQ ID NO: 1028377 - DNA, 15 bp, Homo sapiens
gaatagacctagcac

SEQ ID NO: 1028378 - DNA, 15 bp, Homo sapiens
aatagacctagcaca

SEQ ID NO: 1028379 - DNA, 15 bp, Homo sapiens
atagacctagcacag

SEQ ID NO: 1028380 - DNA, 15 bp, Homo sapiens
tagacctagcacaga

SEQ ID NO: 1028381 - DNA, 15 bp, Homo sapiens
agacctagcacagac

SEQ ID NO: 1028382 - DNA, 15 bp, Homo sapiens
gacctagcacagact

SEQ ID NO: 1028383 - DNA, 15 bp, Homo sapiens
acctagcacagactc

SEQ ID NO: 1028384 - DNA, 15 bp, Homo sapiens
cctagcacagactct

SEQ ID NO: 1028385 - DNA, 15 bp, Homo sapiens
ctagcacagactctt

SEQ ID NO: 1028386 - DNA, 15 bp, Homo sapiens
tagcacagactcttt

SEQ ID NO: 1028387 - DNA, 15 bp, Homo sapiens
agcacagactcttta

SEQ ID NO: 1028388 - DNA, 15 bp, Homo sapiens
gcacagactctttaa

SEQ ID NO: 1028389 - DNA, 15 bp, Homo sapiens
cacagactctttaat

SEQ ID NO: 1028390 - DNA, 15 bp, Homo sapiens
acagactctttaatg

SEQ ID NO: 1028391 - DNA, 15 bp, Homo sapiens
cagactctttaatgg

SEQ ID NO: 1028392 - DNA, 15 bp, Homo sapiens
agactctttaatggt

SEQ ID NO: 1028393 - DNA, 15 bp, Homo sapiens
gactctttaatggta

SEQ ID NO: 1028394 - DNA, 15 bp, Homo sapiens
actctttaatggtag

SEQ ID NO: 1028395 - DNA, 15 bp, Homo sapiens
ctctttaatggtagc

SEQ ID NO: 1028396 - DNA, 15 bp, Homo sapiens
tctttaatggtagct

SEQ ID NO: 1028397 - DNA, 15 bp, Homo sapiens
ctttaatggtagctg

SEQ ID NO: 1028398 - DNA, 15 bp, Homo sapiens
tttaatggtagctgt

SEQ ID NO: 1028399 - DNA, 15 bp, Homo sapiens
ttaatggtagctgtt

SEQ ID NO: 1028400 - DNA, 15 bp, Homo sapiens
taatggtagctgtta

SEQ ID NO: 1028401 - DNA, 15 bp, Homo sapiens
aatggtagctgttat

SEQ ID NO: 1028402 - DNA, 15 bp, Homo sapiens
atggtagctgttata

SEQ ID NO: 1028403 - DNA, 15 bp, Homo sapiens
tggtagctgttatat

SEQ ID NO: 1028404 - DNA, 15 bp, Homo sapiens
ggtagctgttatatc

SEQ ID NO: 1028405 - DNA, 15 bp, Homo sapiens
gtagctgttatatct

SEQ ID NO: 1028406 - DNA, 15 bp, Homo sapiens
tagctgttatatctg

SEQ ID NO: 1028407 - DNA, 15 bp, Homo sapiens
agctgttatatctgc

SEQ ID NO: 1028408 - DNA, 15 bp, Homo sapiens
gctgttatatctgct

SEQ ID NO: 1028409 - DNA, 15 bp, Homo sapiens
ctgttatatctgctt

SEQ ID NO: 1028410 - DNA, 15 bp, Homo sapiens
tgttatatctgctta

SEQ ID NO: 1028411 - DNA, 15 bp, Homo sapiens
gttatatctgcttag

SEQ ID NO: 1028412 - DNA, 15 bp, Homo sapiens
ttatatctgcttaga

SEQ ID NO: 1028413 - DNA, 15 bp, Homo sapiens
tatatctgcttagac

SEQ ID NO: 1028414 - DNA, 15 bp, Homo sapiens
atatctgcttagaca

SEQ ID NO: 1028415 - DNA, 15 bp, Homo sapiens
tatctgcttagacag

SEQ ID NO: 1028416 - DNA, 15 bp, Homo sapiens
atctgcttagacaga

SEQ ID NO: 1028417 - DNA, 15 bp, Homo sapiens
tctgcttagacagat

SEQ ID NO: 1028418 - DNA, 15 bp, Homo sapiens
ctgcttagacagatt

SEQ ID NO: 1028419 - DNA, 15 bp, Homo sapiens
tgcttagacagattt

SEQ ID NO: 1028420 - DNA, 15 bp, Homo sapiens
gcttagacagatttg

SEQ ID NO: 1028421 - DNA, 15 bp, Homo sapiens
cttagacagatttga

SEQ ID NO: 1028422 - DNA, 15 bp, Homo sapiens
ttagacagatttgat

SEQ ID NO: 1028423 - DNA, 15 bp, Homo sapiens
tagacagatttgatg

SEQ ID NO: 1028424 - DNA, 15 bp, Homo sapiens
agacagatttgatgg

SEQ ID NO: 1028425 - DNA, 15 bp, Homo sapiens
gacagatttgatggg

SEQ ID NO: 1028426 - DNA, 15 bp, Homo sapiens
acagatttgatgggg

SEQ ID NO: 1028427 - DNA, 15 bp, Homo sapiens
cagatttgatggggt

SEQ ID NO: 1028428 - DNA, 15 bp, Homo sapiens
agatttgatggggta

SEQ ID NO: 1028429 - DNA, 15 bp, Homo sapiens
gatttgatggggtaa

SEQ ID NO: 1028430 - DNA, 15 bp, Homo sapiens
atttgatggggtaag

SEQ ID NO: 1028431 - DNA, 15 bp, Homo sapiens
tttgatggggtaaga

SEQ ID NO: 1028432 - DNA, 15 bp, Homo sapiens
ttgatggggtaagat

SEQ ID NO: 1028433 - DNA, 15 bp, Homo sapiens
tgatggggtaagatt

SEQ ID NO: 1028434 - DNA, 15 bp, Homo sapiens
gatggggtaagattg

SEQ ID NO: 1028435 - DNA, 15 bp, Homo sapiens
atggggtaagattgc

SEQ ID NO: 1028436 - DNA, 15 bp, Homo sapiens
tggggtaagattgcc

SEQ ID NO: 1028437 - DNA, 15 bp, Homo sapiens
ggggtaagattgcct

SEQ ID NO: 1028438 - DNA, 15 bp, Homo sapiens
gggtaagattgcctg

SEQ ID NO: 1028439 - DNA, 15 bp, Homo sapiens
ggtaagattgcctgc

SEQ ID NO: 1028440 - DNA, 15 bp, Homo sapiens
gtaagattgcctgct

SEQ ID NO: 1028441 - DNA, 15 bp, Homo sapiens
taagattgcctgctg

SEQ ID NO: 1028442 - DNA, 15 bp, Homo sapiens
aagattgcctgctga

SEQ ID NO: 1028443 - DNA, 15 bp, Homo sapiens
agattgcctgctgat

SEQ ID NO: 1028444 - DNA, 15 bp, Homo sapiens
gattgcctgctgata

SEQ ID NO: 1028445 - DNA, 15 bp, Homo sapiens
attgcctgctgatat

SEQ ID NO: 1028446 - DNA, 15 bp, Homo sapiens
ttgcctgctgatatg

SEQ ID NO: 1028447 - DNA, 15 bp, Homo sapiens
tgcctgctgatatgg

SEQ ID NO: 1028448 - DNA, 15 bp, Homo sapiens
gcctgctgatatggg

SEQ ID NO: 1028449 - DNA, 15 bp, Homo sapiens
cctgctgatatgggg

SEQ ID NO: 1028450 - DNA, 15 bp, Homo sapiens
ctgctgatatggggg

SEQ ID NO: 1028451 - DNA, 15 bp, Homo sapiens
tgctgatatgggggg

SEQ ID NO: 1028452 - DNA, 15 bp, Homo sapiens
gctgatatggggggc

SEQ ID NO: 1028453 - DNA, 15 bp, Homo sapiens
ctgatatggggggca

SEQ ID NO: 1028454 - DNA, 15 bp, Homo sapiens
tgatatggggggcag

SEQ ID NO: 1028455 - DNA, 15 bp, Homo sapiens
gatatggggggcaga

SEQ ID NO: 1028456 - DNA, 15 bp, Homo sapiens
atatggggggcagag

SEQ ID NO: 1028457 - DNA, 15 bp, Homo sapiens
tatggggggcagaga

SEQ ID NO: 1028458 - DNA, 15 bp, Homo sapiens
atggggggcagagat

SEQ ID NO: 1028459 - DNA, 15 bp, Homo sapiens
tggggggcagagatg

SEQ ID NO: 1028460 - DNA, 15 bp, Homo sapiens
ggggggcagagatga

SEQ ID NO: 1028461 - DNA, 15 bp, Homo sapiens
gggggcagagatgat

SEQ ID NO: 1028462 - DNA, 15 bp, Homo sapiens
ggggcagagatgatg

SEQ ID NO: 1028463 - DNA, 15 bp, Homo sapiens
gggcagagatgatga

SEQ ID NO: 1028464 - DNA, 15 bp, Homo sapiens
ggcagagatgatgag

SEQ ID NO: 1028465 - DNA, 15 bp, Homo sapiens
gcagagatgatgaga

SEQ ID NO: 1028466 - DNA, 15 bp, Homo sapiens
cagagatgatgagag

SEQ ID NO: 1028467 - DNA, 15 bp, Homo sapiens
agagatgatgagagc

SEQ ID NO: 1028468 - DNA, 15 bp, Homo sapiens
gagatgatgagagcc

SEQ ID NO: 1028469 - DNA, 15 bp, Homo sapiens
agatgatgagagcct

SEQ ID NO: 1028470 - DNA, 15 bp, Homo sapiens
gatgatgagagcctc

SEQ ID NO: 1028471 - DNA, 15 bp, Homo sapiens
atgatgagagcctca

SEQ ID NO: 1028472 - DNA, 15 bp, Homo sapiens
tgatgagagcctcag

SEQ ID NO: 1028473 - DNA, 15 bp, Homo sapiens
gatgagagcctcaga

SEQ ID NO: 1028474 - DNA, 15 bp, Homo sapiens
atgagagcctcagag

SEQ ID NO: 1028475 - DNA, 15 bp, Homo sapiens
tgagagcctcagaga

SEQ ID NO: 1028476 - DNA, 15 bp, Homo sapiens
gagagcctcagagac

SEQ ID NO: 1028477 - DNA, 15 bp, Homo sapiens
agagcctcagagacc

SEQ ID NO: 1028478 - DNA, 15 bp, Homo sapiens
gagcctcagagaccc

SEQ ID NO: 1028479 - DNA, 15 bp, Homo sapiens
agcctcagagaccca

SEQ ID NO: 1028480 - DNA, 15 bp, Homo sapiens
gcctcagagacccag

SEQ ID NO: 1028481 - DNA, 15 bp, Homo sapiens
cctcagagacccagg

SEQ ID NO: 1028482 - DNA, 15 bp, Homo sapiens
ctcagagacccagga

SEQ ID NO: 1028483 - DNA, 15 bp, Homo sapiens
tcagagacccaggag

SEQ ID NO: 1028484 - DNA, 15 bp, Homo sapiens
cagagacccaggaga

SEQ ID NO: 1028485 - DNA, 15 bp, Homo sapiens
agagacccaggagag

SEQ ID NO: 1028486 - DNA, 15 bp, Homo sapiens
gagacccaggagagg

SEQ ID NO: 1028487 - DNA, 15 bp, Homo sapiens
agacccaggagaggg

SEQ ID NO: 1028488 - DNA, 15 bp, Homo sapiens
gacccaggagagggg

SEQ ID NO: 1028489 - DNA, 15 bp, Homo sapiens
acccaggagaggggc

SEQ ID NO: 1028490 - DNA, 15 bp, Homo sapiens
cccaggagaggggcc

SEQ ID NO: 1028491 - DNA, 15 bp, Homo sapiens
ccaggagaggggcca

SEQ ID NO: 1028492 - DNA, 15 bp, Homo sapiens
caggagaggggccag

SEQ ID NO: 1028493 - DNA, 15 bp, Homo sapiens
aggagaggggccaga

SEQ ID NO: 1028494 - DNA, 15 bp, Homo sapiens
ggagaggggccagag

SEQ ID NO: 1028495 - DNA, 15 bp, Homo sapiens
gagaggggccagagg

SEQ ID NO: 1028496 - DNA, 15 bp, Homo sapiens
agaggggccagaggc

SEQ ID NO: 1028497 - DNA, 15 bp, Homo sapiens
gaggggccagaggcc

SEQ ID NO: 1028498 - DNA, 15 bp, Homo sapiens
aggggccagaggcca

SEQ ID NO: 1028499 - DNA, 15 bp, Homo sapiens
ggggccagaggccat

SEQ ID NO: 1028500 - DNA, 15 bp, Homo sapiens
gggccagaggccatt

SEQ ID NO: 1028501 - DNA, 15 bp, Homo sapiens
ggccagaggccatta

SEQ ID NO: 1028502 - DNA, 15 bp, Homo sapiens
gccagaggccattag

SEQ ID NO: 1028503 - DNA, 15 bp, Homo sapiens
ccagaggccattagg

SEQ ID NO: 1028504 - DNA, 15 bp, Homo sapiens
cagaggccattagga

SEQ ID NO: 1028505 - DNA, 15 bp, Homo sapiens
agaggccattaggaa

SEQ ID NO: 1028506 - DNA, 15 bp, Homo sapiens
gaggccattaggaaa

SEQ ID NO: 1028507 - DNA, 15 bp, Homo sapiens
aggccattaggaaaa

SEQ ID NO: 1028508 - DNA, 15 bp, Homo sapiens
ggccattaggaaaag

SEQ ID NO: 1028509 - DNA, 15 bp, Homo sapiens
gccattaggaaaagc

SEQ ID NO: 1028510 - DNA, 15 bp, Homo sapiens
ccattaggaaaagct

SEQ ID NO: 1028511 - DNA, 15 bp, Homo sapiens
cattaggaaaagctt

SEQ ID NO: 1028512 - DNA, 15 bp, Homo sapiens
attaggaaaagcttc

SEQ ID NO: 1028513 - DNA, 15 bp, Homo sapiens
ttaggaaaagcttcc

SEQ ID NO: 1028514 - DNA, 15 bp, Homo sapiens
taggaaaagcttccc

SEQ ID NO: 1028515 - DNA, 15 bp, Homo sapiens
aggaaaagcttccca

SEQ ID NO: 1028516 - DNA, 15 bp, Homo sapiens
ggaaaagcttcccaa

SEQ ID NO: 1028517 - DNA, 15 bp, Homo sapiens
gaaaagcttcccaaa

SEQ ID NO: 1028518 - DNA, 15 bp, Homo sapiens
aaaagcttcccaaag

SEQ ID NO: 1028519 - DNA, 15 bp, Homo sapiens
aaagcttcccaaagg

SEQ ID NO: 1028520 - DNA, 15 bp, Homo sapiens
aagcttcccaaaggt

SEQ ID NO: 1028521 - DNA, 15 bp, Homo sapiens
agcttcccaaaggtg

SEQ ID NO: 1028522 - DNA, 15 bp, Homo sapiens
gcttcccaaaggtga

SEQ ID NO: 1028523 - DNA, 15 bp, Homo sapiens
cttcccaaaggtgag

SEQ ID NO: 1028524 - DNA, 15 bp, Homo sapiens
ttcccaaaggtgagc

SEQ ID NO: 1028525 - DNA, 15 bp, Homo sapiens
tcccaaaggtgagcc

SEQ ID NO: 1028526 - DNA, 15 bp, Homo sapiens
cccaaaggtgagcca

SEQ ID NO: 1028527 - DNA, 15 bp, Homo sapiens
ccaaaggtgagccaa

SEQ ID NO: 1028528 - DNA, 15 bp, Homo sapiens
caaaggtgagccaag

SEQ ID NO: 1028529 - DNA, 15 bp, Homo sapiens
aaaggtgagccaagc

SEQ ID NO: 1028530 - DNA, 15 bp, Homo sapiens
aaggtgagccaagct

SEQ ID NO: 1028531 - DNA, 15 bp, Homo sapiens
aggtgagccaagctc

SEQ ID NO: 1028532 - DNA, 15 bp, Homo sapiens
ggtgagccaagctct

SEQ ID NO: 1028533 - DNA, 15 bp, Homo sapiens
gtgagccaagctctc

SEQ ID NO: 1028534 - DNA, 15 bp, Homo sapiens
tgagccaagctctcc

SEQ ID NO: 1028535 - DNA, 15 bp, Homo sapiens
gagccaagctctcct

SEQ ID NO: 1028536 - DNA, 15 bp, Homo sapiens
agccaagctctcctt

SEQ ID NO: 1028537 - DNA, 15 bp, Homo sapiens
gccaagctctccttc

SEQ ID NO: 1028538 - DNA, 15 bp, Homo sapiens
ccaagctctccttca

SEQ ID NO: 1028539 - DNA, 15 bp, Homo sapiens
caagctctccttcaa

SEQ ID NO: 1028540 - DNA, 15 bp, Homo sapiens
aagctctccttcaag

SEQ ID NO: 1028541 - DNA, 15 bp, Homo sapiens
agctctccttcaagt

SEQ ID NO: 1028542 - DNA, 15 bp, Homo sapiens
gctctccttcaagtt

SEQ ID NO: 1028543 - DNA, 15 bp, Homo sapiens
ctctccttcaagttc

SEQ ID NO: 1028544 - DNA, 15 bp, Homo sapiens
tctccttcaagttct

SEQ ID NO: 1028545 - DNA, 15 bp, Homo sapiens
ctccttcaagttcta

SEQ ID NO: 1028546 - DNA, 15 bp, Homo sapiens
tccttcaagttctat

SEQ ID NO: 1028547 - DNA, 15 bp, Homo sapiens
ccttcaagttctatg

SEQ ID NO: 1028548 - DNA, 15 bp, Homo sapiens
cttcaagttctatgg

SEQ ID NO: 1028549 - DNA, 15 bp, Homo sapiens
ttcaagttctatggt

SEQ ID NO: 1028550 - DNA, 15 bp, Homo sapiens
tcaagttctatggtg

SEQ ID NO: 1028551 - DNA, 15 bp, Homo sapiens
caagttctatggtga

SEQ ID NO: 1028552 - DNA, 15 bp, Homo sapiens
aagttctatggtgac

SEQ ID NO: 1028553 - DNA, 15 bp, Homo sapiens
agttctatggtgact

SEQ ID NO: 1028554 - DNA, 15 bp, Homo sapiens
gttctatggtgactg

SEQ ID NO: 1028555 - DNA, 15 bp, Homo sapiens
ttctatggtgactgg

SEQ ID NO: 1028556 - DNA, 15 bp, Homo sapiens
tctatggtgactggg

SEQ ID NO: 1028557 - DNA, 15 bp, Homo sapiens
ctatggtgactgggg

SEQ ID NO: 1028558 - DNA, 15 bp, Homo sapiens
tatggtgactgggga

SEQ ID NO: 1028559 - DNA, 15 bp, Homo sapiens
atggtgactggggaa

SEQ ID NO: 1028560 - DNA, 15 bp, Homo sapiens
tggtgactggggaac

SEQ ID NO: 1028561 - DNA, 15 bp, Homo sapiens
ggtgactggggaact

SEQ ID NO: 1028562 - DNA, 15 bp, Homo sapiens
gtgactggggaactg

SEQ ID NO: 1028563 - DNA, 15 bp, Homo sapiens
tgactggggaactgg

SEQ ID NO: 1028564 - DNA, 15 bp, Homo sapiens
gactggggaactggg

SEQ ID NO: 1028565 - DNA, 15 bp, Homo sapiens
actggggaactgggg

SEQ ID NO: 1028566 - DNA, 15 bp, Homo sapiens
ctggggaactggggg

SEQ ID NO: 1028567 - DNA, 15 bp, Homo sapiens
tggggaactggggga

SEQ ID NO: 1028568 - DNA, 15 bp, Homo sapiens
ggggaactgggggaa

SEQ ID NO: 1028569 - DNA, 15 bp, Homo sapiens
gggaactgggggaat

SEQ ID NO: 1028570 - DNA, 15 bp, Homo sapiens
ggaactgggggaatg

SEQ ID NO: 1028571 - DNA, 15 bp, Homo sapiens
gaactgggggaatgg

SEQ ID NO: 1028572 - DNA, 15 bp, Homo sapiens
aactgggggaatggg

SEQ ID NO: 1028573 - DNA, 15 bp, Homo sapiens
actgggggaatggga

SEQ ID NO: 1028574 - DNA, 15 bp, Homo sapiens
ctgggggaatgggac

SEQ ID NO: 1028575 - DNA, 15 bp, Homo sapiens
tgggggaatgggacc

SEQ ID NO: 1028576 - DNA, 15 bp, Homo sapiens
gggggaatgggaccc

SEQ ID NO: 1028577 - DNA, 15 bp, Homo sapiens
ggggaatgggaccca

SEQ ID NO: 1028578 - DNA, 15 bp, Homo sapiens
gggaatgggacccag

SEQ ID NO: 1028579 - DNA, 15 bp, Homo sapiens
ggaatgggacccaga

SEQ ID NO: 1028580 - DNA, 15 bp, Homo sapiens
gaatgggacccagac

SEQ ID NO: 1028581 - DNA, 15 bp, Homo sapiens
aatgggacccagact

SEQ ID NO: 1028582 - DNA, 15 bp, Homo sapiens
atgggacccagactc

SEQ ID NO: 1028583 - DNA, 15 bp, Homo sapiens
tgggacccagactct

SEQ ID NO: 1028584 - DNA, 15 bp, Homo sapiens
gggacccagactctg

SEQ ID NO: 1028585 - DNA, 15 bp, Homo sapiens
ggacccagactctga

SEQ ID NO: 1028586 - DNA, 15 bp, Homo sapiens
gacccagactctgat

SEQ ID NO: 1028587 - DNA, 15 bp, Homo sapiens
acccagactctgata

SEQ ID NO: 1028588 - DNA, 15 bp, Homo sapiens
cccagactctgatag

SEQ ID NO: 1028589 - DNA, 15 bp, Homo sapiens
ccagactctgatagg

SEQ ID NO: 1028590 - DNA, 15 bp, Homo sapiens
cagactctgataggt

SEQ ID NO: 1028591 - DNA, 15 bp, Homo sapiens
agactctgataggtc

SEQ ID NO: 1028592 - DNA, 15 bp, Homo sapiens
gactctgataggtca

SEQ ID NO: 1028593 - DNA, 15 bp, Homo sapiens
actctgataggtcag

SEQ ID NO: 1028594 - DNA, 15 bp, Homo sapiens
ctctgataggtcagg

SEQ ID NO: 1028595 - DNA, 15 bp, Homo sapiens
tctgataggtcaggg

SEQ ID NO: 1028596 - DNA, 15 bp, Homo sapiens
ctgataggtcaggga

SEQ ID NO: 1028597 - DNA, 15 bp, Homo sapiens
tgataggtcagggac

SEQ ID NO: 1028598 - DNA, 15 bp, Homo sapiens
gataggtcagggaca

SEQ ID NO: 1028599 - DNA, 15 bp, Homo sapiens
ataggtcagggacag

SEQ ID NO: 1028600 - DNA, 15 bp, Homo sapiens
taggtcagggacagt

SEQ ID NO: 1028601 - DNA, 15 bp, Homo sapiens
aggtcagggacagta

SEQ ID NO: 1028602 - DNA, 15 bp, Homo sapiens
ggtcagggacagtaa

SEQ ID NO: 1028603 - DNA, 15 bp, Homo sapiens
gtcagggacagtaat

SEQ ID NO: 1028604 - DNA, 15 bp, Homo sapiens
tcagggacagtaatc

SEQ ID NO: 1028605 - DNA, 15 bp, Homo sapiens
cagggacagtaatct

SEQ ID NO: 1028606 - DNA, 15 bp, Homo sapiens
agggacagtaatctc

SEQ ID NO: 1028607 - DNA, 15 bp, Homo sapiens
gggacagtaatctca

SEQ ID NO: 1028608 - DNA, 15 bp, Homo sapiens
ggacagtaatctcag

SEQ ID NO: 1028609 - DNA, 15 bp, Homo sapiens
gacagtaatctcagt

SEQ ID NO: 1028610 - DNA, 15 bp, Homo sapiens
acagtaatctcagtc

SEQ ID NO: 1028611 - DNA, 15 bp, Homo sapiens
cagtaatctcagtct

SEQ ID NO: 1028612 - DNA, 15 bp, Homo sapiens
agtaatctcagtctt

SEQ ID NO: 1028613 - DNA, 15 bp, Homo sapiens
gtaatctcagtcttc

SEQ ID NO: 1028614 - DNA, 15 bp, Homo sapiens
taatctcagtcttct

SEQ ID NO: 1028615 - DNA, 15 bp, Homo sapiens
aatctcagtcttcta

SEQ ID NO: 1028616 - DNA, 15 bp, Homo sapiens
atctcagtcttctag

SEQ ID NO: 1028617 - DNA, 15 bp, Homo sapiens
tctcagtcttctagg

SEQ ID NO: 1028618 - DNA, 15 bp, Homo sapiens
ctcagtcttctaggt

SEQ ID NO: 1028619 - DNA, 15 bp, Homo sapiens
tcagtcttctaggtg

SEQ ID NO: 1028620 - DNA, 15 bp, Homo sapiens
cagtcttctaggtgt

SEQ ID NO: 1028621 - DNA, 15 bp, Homo sapiens
agtcttctaggtgtt

SEQ ID NO: 1028622 - DNA, 15 bp, Homo sapiens
gtcttctaggtgttt

SEQ ID NO: 1028623 - DNA, 15 bp, Homo sapiens
tcttctaggtgtttt

SEQ ID NO: 1028624 - DNA, 15 bp, Homo sapiens
cttctaggtgttttt

SEQ ID NO: 1028625 - DNA, 15 bp, Homo sapiens
ttctaggtgtttttt

SEQ ID NO: 1028626 - DNA, 15 bp, Homo sapiens
tctaggtgttttttt

SEQ ID NO: 1028627 - DNA, 15 bp, Homo sapiens
ctaggtgttttttta

SEQ ID NO: 1028628 - DNA, 15 bp, Homo sapiens
taggtgtttttttaa

SEQ ID NO: 1028629 - DNA, 15 bp, Homo sapiens
aggtgtttttttaaa

SEQ ID NO: 1028630 - DNA, 15 bp, Homo sapiens
ggtgtttttttaaaa

SEQ ID NO: 1028631 - DNA, 15 bp, Homo sapiens
gtgtttttttaaaaa

SEQ ID NO: 1028632 - DNA, 15 bp, Homo sapiens
tgtttttttaaaaac

SEQ ID NO: 1028633 - DNA, 15 bp, Homo sapiens
gtttttttaaaaacc

SEQ ID NO: 1028634 - DNA, 15 bp, Homo sapiens
tttttttaaaaaccg

SEQ ID NO: 1028635 - DNA, 15 bp, Homo sapiens
ttttttaaaaaccgg

SEQ ID NO: 1028636 - DNA, 15 bp, Homo sapiens
tttttaaaaaccggc

SEQ ID NO: 1028637 - DNA, 15 bp, Homo sapiens
ttttaaaaaccggca

SEQ ID NO: 1028638 - DNA, 15 bp, Homo sapiens
tttaaaaaccggcat

SEQ ID NO: 1028639 - DNA, 15 bp, Homo sapiens
ttaaaaaccggcatc

SEQ ID NO: 1028640 - DNA, 15 bp, Homo sapiens
taaaaaccggcatca

SEQ ID NO: 1028641 - DNA, 15 bp, Homo sapiens
aaaaaccggcatcag

SEQ ID NO: 1028642 - DNA, 15 bp, Homo sapiens
aaaaccggcatcagg

SEQ ID NO: 1028643 - DNA, 15 bp, Homo sapiens
aaaccggcatcaggt

SEQ ID NO: 1028644 - DNA, 15 bp, Homo sapiens
aaccggcatcaggtg

SEQ ID NO: 1028645 - DNA, 15 bp, Homo sapiens
accggcatcaggtgg

SEQ ID NO: 1028646 - DNA, 15 bp, Homo sapiens
ccggcatcaggtggg

SEQ ID NO: 1028647 - DNA, 15 bp, Homo sapiens
cggcatcaggtgggg

SEQ ID NO: 1028648 - DNA, 15 bp, Homo sapiens
ggcatcaggtggggc

SEQ ID NO: 1028649 - DNA, 15 bp, Homo sapiens
gcatcaggtggggcc

SEQ ID NO: 1028650 - DNA, 15 bp, Homo sapiens
catcaggtggggcct

SEQ ID NO: 1028651 - DNA, 15 bp, Homo sapiens
atcaggtggggcctg

SEQ ID NO: 1028652 - DNA, 15 bp, Homo sapiens
tcaggtggggcctgg

SEQ ID NO: 1028653 - DNA, 15 bp, Homo sapiens
caggtggggcctggt

SEQ ID NO: 1028654 - DNA, 15 bp, Homo sapiens
aggtggggcctggtg

SEQ ID NO: 1028655 - DNA, 15 bp, Homo sapiens
ggtggggcctggtgg

SEQ ID NO: 1028656 - DNA, 15 bp, Homo sapiens
gtggggcctggtggc

SEQ ID NO: 1028657 - DNA, 15 bp, Homo sapiens
tggggcctggtggct

SEQ ID NO: 1028658 - DNA, 15 bp, Homo sapiens
ggggcctggtggctc

SEQ ID NO: 1028659 - DNA, 15 bp, Homo sapiens
gggcctggtggctca

SEQ ID NO: 1028660 - DNA, 15 bp, Homo sapiens
ggcctggtggctcac

SEQ ID NO: 1028661 - DNA, 15 bp, Homo sapiens
gcctggtggctcaca

SEQ ID NO: 1028662 - DNA, 15 bp, Homo sapiens
cctggtggctcacac

SEQ ID NO: 1028663 - DNA, 15 bp, Homo sapiens
ctggtggctcacacc

SEQ ID NO: 1028664 - DNA, 15 bp, Homo sapiens
tggtggctcacacct

SEQ ID NO: 1028665 - DNA, 15 bp, Homo sapiens
ggtggctcacacctg

SEQ ID NO: 1028666 - DNA, 15 bp, Homo sapiens
gtggctcacacctgt

SEQ ID NO: 1028667 - DNA, 15 bp, Homo sapiens
tggctcacacctgta

SEQ ID NO: 1028668 - DNA, 15 bp, Homo sapiens
ggctcacacctgtaa

SEQ ID NO: 1028669 - DNA, 15 bp, Homo sapiens
gctcacacctgtaat

SEQ ID NO: 1028670 - DNA, 15 bp, Homo sapiens
ctcacacctgtaatc

SEQ ID NO: 1028671 - DNA, 15 bp, Homo sapiens
tcacacctgtaatcc

SEQ ID NO: 1028672 - DNA, 15 bp, Homo sapiens
cacacctgtaatccc

SEQ ID NO: 1028673 - DNA, 15 bp, Homo sapiens
acacctgtaatccca

SEQ ID NO: 1028674 - DNA, 15 bp, Homo sapiens
cacctgtaatcccaa

SEQ ID NO: 1028675 - DNA, 15 bp, Homo sapiens
acctgtaatcccaac

SEQ ID NO: 1028676 - DNA, 15 bp, Homo sapiens
cctgtaatcccaaca

SEQ ID NO: 1028677 - DNA, 15 bp, Homo sapiens
ctgtaatcccaacac

SEQ ID NO: 1028678 - DNA, 15 bp, Homo sapiens
tgtaatcccaacact

SEQ ID NO: 1028679 - DNA, 15 bp, Homo sapiens
gtaatcccaacactt

SEQ ID NO: 1028680 - DNA, 15 bp, Homo sapiens
taatcccaacacttt

SEQ ID NO: 1028681 - DNA, 15 bp, Homo sapiens
aatcccaacactttg

SEQ ID NO: 1028682 - DNA, 15 bp, Homo sapiens
atcccaacactttgg

SEQ ID NO: 1028683 - DNA, 15 bp, Homo sapiens
tcccaacactttggg

SEQ ID NO: 1028684 - DNA, 15 bp, Homo sapiens
cccaacactttggga

SEQ ID NO: 1028685 - DNA, 15 bp, Homo sapiens
ccaacactttgggag

SEQ ID NO: 1028686 - DNA, 15 bp, Homo sapiens
caacactttgggagg

SEQ ID NO: 1028687 - DNA, 15 bp, Homo sapiens
aacactttgggaggc

SEQ ID NO: 1028688 - DNA, 15 bp, Homo sapiens
acactttgggaggct

SEQ ID NO: 1028689 - DNA, 15 bp, Homo sapiens
ttgggaggctgaggt

SEQ ID NO: 1028690 - DNA, 15 bp, Homo sapiens
tgggaggctgaggtg

SEQ ID NO: 1028691 - DNA, 15 bp, Homo sapiens
gggaggctgaggtgg

SEQ ID NO: 1028692 - DNA, 15 bp, Homo sapiens
ggaggctgaggtggg

SEQ ID NO: 1028693 - DNA, 15 bp, Homo sapiens
gaggctgaggtggga

SEQ ID NO: 1028694 - DNA, 15 bp, Homo sapiens
aggctgaggtgggag

SEQ ID NO: 1028695 - DNA, 15 bp, Homo sapiens
ggctgaggtgggagg

SEQ ID NO: 1028696 - DNA, 15 bp, Homo sapiens
gctgaggtgggagga

SEQ ID NO: 1028697 - DNA, 15 bp, Homo sapiens
ctgaggtgggaggat

SEQ ID NO: 1028698 - DNA, 15 bp, Homo sapiens
tgaggtgggaggatt

SEQ ID NO: 1028699 - DNA, 15 bp, Homo sapiens
gaggtgggaggatta

SEQ ID NO: 1028700 - DNA, 15 bp, Homo sapiens
aggtgggaggattac

SEQ ID NO: 1028701 - DNA, 15 bp, Homo sapiens
ggtgggaggattact

SEQ ID NO: 1028702 - DNA, 15 bp, Homo sapiens
gtgggaggattactt

SEQ ID NO: 1028703 - DNA, 15 bp, Homo sapiens
tgggaggattacttg

SEQ ID NO: 1028704 - DNA, 15 bp, Homo sapiens
gggaggattacttga

SEQ ID NO: 1028705 - DNA, 15 bp, Homo sapiens
ggaggattacttgag

SEQ ID NO: 1028706 - DNA, 15 bp, Homo sapiens
gaggattacttgagg

SEQ ID NO: 1028707 - DNA, 15 bp, Homo sapiens
aggattacttgaggc

SEQ ID NO: 1028708 - DNA, 15 bp, Homo sapiens
ggattacttgaggcc

SEQ ID NO: 1028709 - DNA, 15 bp, Homo sapiens
gattacttgaggcca

SEQ ID NO: 1028710 - DNA, 15 bp, Homo sapiens
attacttgaggccaa

SEQ ID NO: 1028711 - DNA, 15 bp, Homo sapiens
ttacttgaggccaag

SEQ ID NO: 1028712 - DNA, 15 bp, Homo sapiens
tacttgaggccaaga

SEQ ID NO: 1028713 - DNA, 15 bp, Homo sapiens
acttgaggccaagag

SEQ ID NO: 1028714 - DNA, 15 bp, Homo sapiens
cttgaggccaagagt

SEQ ID NO: 1028715 - DNA, 15 bp, Homo sapiens
ttgaggccaagagtt

SEQ ID NO: 1028716 - DNA, 15 bp, Homo sapiens
tgaggccaagagttt

SEQ ID NO: 1028717 - DNA, 15 bp, Homo sapiens
gaggccaagagtttg

SEQ ID NO: 1028718 - DNA, 15 bp, Homo sapiens
aggccaagagtttga

SEQ ID NO: 1028719 - DNA, 15 bp, Homo sapiens
ggccaagagtttgag

SEQ ID NO: 1028720 - DNA, 15 bp, Homo sapiens
gccaagagtttgaga

SEQ ID NO: 1028721 - DNA, 15 bp, Homo sapiens
ccaagagtttgagac

SEQ ID NO: 1028722 - DNA, 15 bp, Homo sapiens
caagagtttgagacc

SEQ ID NO: 1028723 - DNA, 15 bp, Homo sapiens
aagagtttgagacca

SEQ ID NO: 1028724 - DNA, 15 bp, Homo sapiens
agagtttgagaccac

SEQ ID NO: 1028725 - DNA, 15 bp, Homo sapiens
gagtttgagaccacc

SEQ ID NO: 1028726 - DNA, 15 bp, Homo sapiens
agtttgagaccacct

SEQ ID NO: 1028727 - DNA, 15 bp, Homo sapiens
gtttgagaccacctg

SEQ ID NO: 1028728 - DNA, 15 bp, Homo sapiens
tttgagaccacctga

SEQ ID NO: 1028729 - DNA, 15 bp, Homo sapiens
ttgagaccacctgag

SEQ ID NO: 1028730 - DNA, 15 bp, Homo sapiens
tgagaccacctgagt

SEQ ID NO: 1028731 - DNA, 15 bp, Homo sapiens
gagaccacctgagta

SEQ ID NO: 1028732 - DNA, 15 bp, Homo sapiens
agaccacctgagtaa

SEQ ID NO: 1028733 - DNA, 15 bp, Homo sapiens
gaccacctgagtaac

SEQ ID NO: 1028734 - DNA, 15 bp, Homo sapiens
accacctgagtaact

SEQ ID NO: 1028735 - DNA, 15 bp, Homo sapiens
ccacctgagtaactg

SEQ ID NO: 1028736 - DNA, 15 bp, Homo sapiens
cacctgagtaactga

SEQ ID NO: 1028737 - DNA, 15 bp, Homo sapiens
acctgagtaactgag

SEQ ID NO: 1028738 - DNA, 15 bp, Homo sapiens
cctgagtaactgagc

SEQ ID NO: 1028739 - DNA, 15 bp, Homo sapiens
ctgagtaactgagcg

SEQ ID NO: 1028740 - DNA, 15 bp, Homo sapiens
tgagtaactgagcga

SEQ ID NO: 1028741 - DNA, 15 bp, Homo sapiens
gagtaactgagcgag

SEQ ID NO: 1028742 - DNA, 15 bp, Homo sapiens
agtaactgagcgaga

SEQ ID NO: 1028743 - DNA, 15 bp, Homo sapiens
gtaactgagcgagac

SEQ ID NO: 1028744 - DNA, 15 bp, Homo sapiens
taactgagcgagact

SEQ ID NO: 1028745 - DNA, 15 bp, Homo sapiens
aactgagcgagactt

SEQ ID NO: 1028746 - DNA, 15 bp, Homo sapiens
actgagcgagacttc

SEQ ID NO: 1028747 - DNA, 15 bp, Homo sapiens
ctgagcgagacttcg

SEQ ID NO: 1028748 - DNA, 15 bp, Homo sapiens
tgagcgagacttcgt

SEQ ID NO: 1028749 - DNA, 15 bp, Homo sapiens
gagcgagacttcgtc

SEQ ID NO: 1028750 - DNA, 15 bp, Homo sapiens
agcgagacttcgtct

SEQ ID NO: 1028751 - DNA, 15 bp, Homo sapiens
gcgagacttcgtctc

SEQ ID NO: 1028752 - DNA, 15 bp, Homo sapiens
cgagacttcgtctct

SEQ ID NO: 1028753 - DNA, 15 bp, Homo sapiens
gagacttcgtctcta

SEQ ID NO: 1028754 - DNA, 15 bp, Homo sapiens
agacttcgtctctac

SEQ ID NO: 1028755 - DNA, 15 bp, Homo sapiens
gacttcgtctctaca

SEQ ID NO: 1028756 - DNA, 15 bp, Homo sapiens
acttcgtctctacaa

SEQ ID NO: 1028757 - DNA, 15 bp, Homo sapiens
cttcgtctctacaaa

SEQ ID NO: 1028758 - DNA, 15 bp, Homo sapiens
ttcgtctctacaaaa

SEQ ID NO: 1028759 - DNA, 15 bp, Homo sapiens
tcgtctctacaaaaa

SEQ ID NO: 1028760 - DNA, 15 bp, Homo sapiens
cgtctctacaaaaaa

SEQ ID NO: 1028761 - DNA, 15 bp, Homo sapiens
gtctctacaaaaaaa

SEQ ID NO: 1028762 - DNA, 15 bp, Homo sapiens
tctctacaaaaaaat

SEQ ID NO: 1028763 - DNA, 15 bp, Homo sapiens
ctctacaaaaaaatt

SEQ ID NO: 1028764 - DNA, 15 bp, Homo sapiens
tctacaaaaaaatta

SEQ ID NO: 1028765 - DNA, 15 bp, Homo sapiens
ctacaaaaaaattaa

SEQ ID NO: 1028766 - DNA, 15 bp, Homo sapiens
tacaaaaaaattaaa

SEQ ID NO: 1028767 - DNA, 15 bp, Homo sapiens
acaaaaaaattaaaa

SEQ ID NO: 1028768 - DNA, 15 bp, Homo sapiens
caaaaaaattaaaac

SEQ ID NO: 1028769 - DNA, 15 bp, Homo sapiens
aaaaaaattaaaaca

SEQ ID NO: 1028770 - DNA, 15 bp, Homo sapiens
aaaaaattaaaacag

SEQ ID NO: 1028771 - DNA, 15 bp, Homo sapiens
aaaaattaaaacagc

SEQ ID NO: 1028772 - DNA, 15 bp, Homo sapiens
aaaattaaaacagcc

SEQ ID NO: 1028773 - DNA, 15 bp, Homo sapiens
aaattaaaacagcca

SEQ ID NO: 1028774 - DNA, 15 bp, Homo sapiens
aattaaaacagccag

SEQ ID NO: 1028775 - DNA, 15 bp, Homo sapiens
attaaaacagccagg

SEQ ID NO: 1028776 - DNA, 15 bp, Homo sapiens
ttaaaacagccagga

SEQ ID NO: 1028777 - DNA, 15 bp, Homo sapiens
taaaacagccaggaa

SEQ ID NO: 1028778 - DNA, 15 bp, Homo sapiens
aaaacagccaggaat

SEQ ID NO: 1028779 - DNA, 15 bp, Homo sapiens
aaacagccaggaatg

SEQ ID NO: 1028780 - DNA, 15 bp, Homo sapiens
aacagccaggaatgg

SEQ ID NO: 1028781 - DNA, 15 bp, Homo sapiens
acagccaggaatggt

SEQ ID NO: 1028782 - DNA, 15 bp, Homo sapiens
cagccaggaatggtg

SEQ ID NO: 1028783 - DNA, 15 bp, Homo sapiens
agccaggaatggtgg

SEQ ID NO: 1028784 - DNA, 15 bp, Homo sapiens
gccaggaatggtggt

SEQ ID NO: 1028785 - DNA, 15 bp, Homo sapiens
ccaggaatggtggtg

SEQ ID NO: 1028786 - DNA, 15 bp, Homo sapiens
caggaatggtggtgc

SEQ ID NO: 1028787 - DNA, 15 bp, Homo sapiens
aggaatggtggtgca

SEQ ID NO: 1028788 - DNA, 15 bp, Homo sapiens
ggaatggtggtgcac

SEQ ID NO: 1028789 - DNA, 15 bp, Homo sapiens
gaatggtggtgcaca

SEQ ID NO: 1028790 - DNA, 15 bp, Homo sapiens
aatggtggtgcacac

SEQ ID NO: 1028791 - DNA, 15 bp, Homo sapiens
atggtggtgcacacc

SEQ ID NO: 1028792 - DNA, 15 bp, Homo sapiens
tggtggtgcacacct

SEQ ID NO: 1028793 - DNA, 15 bp, Homo sapiens
ggtggtgcacacctg

SEQ ID NO: 1028794 - DNA, 15 bp, Homo sapiens
gtggtgcacacctgt

SEQ ID NO: 1028795 - DNA, 15 bp, Homo sapiens
tggtgcacacctgtt

SEQ ID NO: 1028796 - DNA, 15 bp, Homo sapiens
ggtgcacacctgttt

SEQ ID NO: 1028797 - DNA, 15 bp, Homo sapiens
gtgcacacctgtttt

SEQ ID NO: 1028798 - DNA, 15 bp, Homo sapiens
tgcacacctgttttc

SEQ ID NO: 1028799 - DNA, 15 bp, Homo sapiens
gcacacctgttttcc

SEQ ID NO: 1028800 - DNA, 15 bp, Homo sapiens
cacacctgttttcct

SEQ ID NO: 1028801 - DNA, 15 bp, Homo sapiens
acacctgttttcctg

SEQ ID NO: 1028802 - DNA, 15 bp, Homo sapiens
cacctgttttcctgg

SEQ ID NO: 1028803 - DNA, 15 bp, Homo sapiens
acctgttttcctggc

SEQ ID NO: 1028804 - DNA, 15 bp, Homo sapiens
cctgttttcctggct

SEQ ID NO: 1028805 - DNA, 15 bp, Homo sapiens
ctgttttcctggcta

SEQ ID NO: 1028806 - DNA, 15 bp, Homo sapiens
tgttttcctggctac

SEQ ID NO: 1028807 - DNA, 15 bp, Homo sapiens
gttttcctggctact

SEQ ID NO: 1028808 - DNA, 15 bp, Homo sapiens
ttttcctggctactt

SEQ ID NO: 1028809 - DNA, 15 bp, Homo sapiens
tttcctggctactta

SEQ ID NO: 1028810 - DNA, 15 bp, Homo sapiens
ttcctggctacttag

SEQ ID NO: 1028811 - DNA, 15 bp, Homo sapiens
tcctggctacttagg

SEQ ID NO: 1028812 - DNA, 15 bp, Homo sapiens
cctggctacttagga

SEQ ID NO: 1028813 - DNA, 15 bp, Homo sapiens
ctggctacttaggag

SEQ ID NO: 1028814 - DNA, 15 bp, Homo sapiens
tggctacttaggagg

SEQ ID NO: 1028815 - DNA, 15 bp, Homo sapiens
ggctacttaggaggc

SEQ ID NO: 1028816 - DNA, 15 bp, Homo sapiens
gctacttaggaggct

SEQ ID NO: 1028817 - DNA, 15 bp, Homo sapiens
ctacttaggaggctg

SEQ ID NO: 1028818 - DNA, 15 bp, Homo sapiens
tacttaggaggctga

SEQ ID NO: 1028819 - DNA, 15 bp, Homo sapiens
acttaggaggctgag

SEQ ID NO: 1028820 - DNA, 15 bp, Homo sapiens
cttaggaggctgagg

SEQ ID NO: 1028821 - DNA, 15 bp, Homo sapiens
ttaggaggctgaggt

SEQ ID NO: 1028822 - DNA, 15 bp, Homo sapiens
taggaggctgaggtg

SEQ ID NO: 1028823 - DNA, 15 bp, Homo sapiens
aggaggctgaggtgg

SEQ ID NO: 1028824 - DNA, 15 bp, Homo sapiens
aggctgaggtgggaa

SEQ ID NO: 1028825 - DNA, 15 bp, Homo sapiens
ggctgaggtgggaag

SEQ ID NO: 1028826 - DNA, 15 bp, Homo sapiens
gctgaggtgggaaga

SEQ ID NO: 1028827 - DNA, 15 bp, Homo sapiens
ctgaggtgggaagat

SEQ ID NO: 1028828 - DNA, 15 bp, Homo sapiens
tgaggtgggaagatg

SEQ ID NO: 1028829 - DNA, 15 bp, Homo sapiens
gaggtgggaagatgg

SEQ ID NO: 1028830 - DNA, 15 bp, Homo sapiens
aggtgggaagatggt

SEQ ID NO: 1028831 - DNA, 15 bp, Homo sapiens
ggtgggaagatggtg

SEQ ID NO: 1028832 - DNA, 15 bp, Homo sapiens
gtgggaagatggtgt

SEQ ID NO: 1028833 - DNA, 15 bp, Homo sapiens
tgggaagatggtgta

SEQ ID NO: 1028834 - DNA, 15 bp, Homo sapiens
gggaagatggtgtag

SEQ ID NO: 1028835 - DNA, 15 bp, Homo sapiens
ggaagatggtgtagg

SEQ ID NO: 1028836 - DNA, 15 bp, Homo sapiens
gaagatggtgtaggc

SEQ ID NO: 1028837 - DNA, 15 bp, Homo sapiens
aagatggtgtaggcc

SEQ ID NO: 1028838 - DNA, 15 bp, Homo sapiens
agatggtgtaggccc

SEQ ID NO: 1028839 - DNA, 15 bp, Homo sapiens
gatggtgtaggccca

SEQ ID NO: 1028840 - DNA, 15 bp, Homo sapiens
atggtgtaggcccag

SEQ ID NO: 1028841 - DNA, 15 bp, Homo sapiens
tggtgtaggcccagg

SEQ ID NO: 1028842 - DNA, 15 bp, Homo sapiens
ggtgtaggcccagga

SEQ ID NO: 1028843 - DNA, 15 bp, Homo sapiens
gtgtaggcccaggag

SEQ ID NO: 1028844 - DNA, 15 bp, Homo sapiens
tgtaggcccaggagt

SEQ ID NO: 1028845 - DNA, 15 bp, Homo sapiens
gtaggcccaggagtt

SEQ ID NO: 1028846 - DNA, 15 bp, Homo sapiens
taggcccaggagttc

SEQ ID NO: 1028847 - DNA, 15 bp, Homo sapiens
aggcccaggagttca

SEQ ID NO: 1028848 - DNA, 15 bp, Homo sapiens
ggcccaggagttcaa

SEQ ID NO: 1028849 - DNA, 15 bp, Homo sapiens
gcccaggagttcaag

SEQ ID NO: 1028850 - DNA, 15 bp, Homo sapiens
cccaggagttcaagc

SEQ ID NO: 1028851 - DNA, 15 bp, Homo sapiens
ccaggagttcaagct

SEQ ID NO: 1028852 - DNA, 15 bp, Homo sapiens
caggagttcaagctt

SEQ ID NO: 1028853 - DNA, 15 bp, Homo sapiens
aggagttcaagctta

SEQ ID NO: 1028854 - DNA, 15 bp, Homo sapiens
ggagttcaagcttat

SEQ ID NO: 1028855 - DNA, 15 bp, Homo sapiens
gagttcaagcttatg

SEQ ID NO: 1028856 - DNA, 15 bp, Homo sapiens
agttcaagcttatgg

SEQ ID NO: 1028857 - DNA, 15 bp, Homo sapiens
gttcaagcttatggt

SEQ ID NO: 1028858 - DNA, 15 bp, Homo sapiens
ttcaagcttatggtg

SEQ ID NO: 1028859 - DNA, 15 bp, Homo sapiens
tcaagcttatggtga

SEQ ID NO: 1028860 - DNA, 15 bp, Homo sapiens
caagcttatggtgag

SEQ ID NO: 1028861 - DNA, 15 bp, Homo sapiens
aagcttatggtgagc

SEQ ID NO: 1028862 - DNA, 15 bp, Homo sapiens
agcttatggtgagcc

SEQ ID NO: 1028863 - DNA, 15 bp, Homo sapiens
gcttatggtgagcca

SEQ ID NO: 1028864 - DNA, 15 bp, Homo sapiens
cttatggtgagccat

SEQ ID NO: 1028865 - DNA, 15 bp, Homo sapiens
ttatggtgagccatg

SEQ ID NO: 1028866 - DNA, 15 bp, Homo sapiens
tatggtgagccatga

SEQ ID NO: 1028867 - DNA, 15 bp, Homo sapiens
atggtgagccatgat

SEQ ID NO: 1028868 - DNA, 15 bp, Homo sapiens
tggtgagccatgatc

SEQ ID NO: 1028869 - DNA, 15 bp, Homo sapiens
ggtgagccatgatca

SEQ ID NO: 1028870 - DNA, 15 bp, Homo sapiens
gtgagccatgatcac

SEQ ID NO: 1028871 - DNA, 15 bp, Homo sapiens
tgagccatgatcaca

SEQ ID NO: 1028872 - DNA, 15 bp, Homo sapiens
gagccatgatcacac

SEQ ID NO: 1028873 - DNA, 15 bp, Homo sapiens
agccatgatcacacc

SEQ ID NO: 1028874 - DNA, 15 bp, Homo sapiens
gccatgatcacaccg

SEQ ID NO: 1028875 - DNA, 15 bp, Homo sapiens
ccatgatcacaccgc

SEQ ID NO: 1028876 - DNA, 15 bp, Homo sapiens
catgatcacaccgcc

SEQ ID NO: 1028877 - DNA, 15 bp, Homo sapiens
atgatcacaccgcca

SEQ ID NO: 1028878 - DNA, 15 bp, Homo sapiens
tgatcacaccgccac

SEQ ID NO: 1028879 - DNA, 15 bp, Homo sapiens
gatcacaccgccact

SEQ ID NO: 1028880 - DNA, 15 bp, Homo sapiens
atcacaccgccactg

SEQ ID NO: 1028881 - DNA, 15 bp, Homo sapiens
tcacaccgccactgc

SEQ ID NO: 1028882 - DNA, 15 bp, Homo sapiens
cacaccgccactgca

SEQ ID NO: 1028883 - DNA, 15 bp, Homo sapiens
acaccgccactgcac

SEQ ID NO: 1028884 - DNA, 15 bp, Homo sapiens
caccgccactgcact

SEQ ID NO: 1028885 - DNA, 15 bp, Homo sapiens
accgccactgcactc

SEQ ID NO: 1028886 - DNA, 15 bp, Homo sapiens
ccgccactgcactcc

SEQ ID NO: 1028887 - DNA, 15 bp, Homo sapiens
ctgcactccagccta

SEQ ID NO: 1028888 - DNA, 15 bp, Homo sapiens
tgcactccagcctag

SEQ ID NO: 1028889 - DNA, 15 bp, Homo sapiens
gcactccagcctagg

SEQ ID NO: 1028890 - DNA, 15 bp, Homo sapiens
cactccagcctaggt

SEQ ID NO: 1028891 - DNA, 15 bp, Homo sapiens
actccagcctaggtg

SEQ ID NO: 1028892 - DNA, 15 bp, Homo sapiens
ctccagcctaggtga

SEQ ID NO: 1028893 - DNA, 15 bp, Homo sapiens
tccagcctaggtgac

SEQ ID NO: 1028894 - DNA, 15 bp, Homo sapiens
ccagcctaggtgaca

SEQ ID NO: 1028895 - DNA, 15 bp, Homo sapiens
cagcctaggtgacag

SEQ ID NO: 1028896 - DNA, 15 bp, Homo sapiens
agcctaggtgacaga

SEQ ID NO: 1028897 - DNA, 15 bp, Homo sapiens
gcctaggtgacagag

SEQ ID NO: 1028898 - DNA, 15 bp, Homo sapiens
cctaggtgacagagc

SEQ ID NO: 1028899 - DNA, 15 bp, Homo sapiens
ctaggtgacagagca

SEQ ID NO: 1028900 - DNA, 15 bp, Homo sapiens
taggtgacagagcaa

SEQ ID NO: 1028901 - DNA, 15 bp, Homo sapiens
aggtgacagagcaag

SEQ ID NO: 1028902 - DNA, 15 bp, Homo sapiens
ggtgacagagcaaga

SEQ ID NO: 1028903 - DNA, 15 bp, Homo sapiens
gtgacagagcaagag

SEQ ID NO: 1028904 - DNA, 15 bp, Homo sapiens
tgacagagcaagagc

SEQ ID NO: 1028905 - DNA, 15 bp, Homo sapiens
gacagagcaagagcc

SEQ ID NO: 1028906 - DNA, 15 bp, Homo sapiens
acagagcaagagcct

SEQ ID NO: 1028907 - DNA, 15 bp, Homo sapiens
cagagcaagagcctg

SEQ ID NO: 1028908 - DNA, 15 bp, Homo sapiens
agagcaagagcctgt

SEQ ID NO: 1028909 - DNA, 15 bp, Homo sapiens
gagcaagagcctgtc

SEQ ID NO: 1028910 - DNA, 15 bp, Homo sapiens
agcaagagcctgtct

SEQ ID NO: 1028911 - DNA, 15 bp, Homo sapiens
gcaagagcctgtctc

SEQ ID NO: 1028912 - DNA, 15 bp, Homo sapiens
caagagcctgtctca

SEQ ID NO: 1028913 - DNA, 15 bp, Homo sapiens
aagagcctgtctcaa

SEQ ID NO: 1028914 - DNA, 15 bp, Homo sapiens
agagcctgtctcaaa

SEQ ID NO: 1028915 - DNA, 15 bp, Homo sapiens
gagcctgtctcaaaa

SEQ ID NO: 1028916 - DNA, 15 bp, Homo sapiens
agcctgtctcaaaaa

SEQ ID NO: 1028917 - DNA, 15 bp, Homo sapiens
gcctgtctcaaaaaa

SEQ ID NO: 1028918 - DNA, 15 bp, Homo sapiens
cctgtctcaaaaaaa

SEQ ID NO: 1028919 - DNA, 15 bp, Homo sapiens
ctgtctcaaaaaaaa

SEQ ID NO: 1028920 - DNA, 15 bp, Homo sapiens
tgtctcaaaaaaaaa

SEQ ID NO: 1028921 - DNA, 15 bp, Homo sapiens
gtctcaaaaaaaaaa

SEQ ID NO: 1028922 - DNA, 15 bp, Homo sapiens
tcaaaaaaaaaaaag

SEQ ID NO: 1028923 - DNA, 15 bp, Homo sapiens
caaaaaaaaaaaaga

SEQ ID NO: 1028924 - DNA, 15 bp, Homo sapiens
aaaaaaaaaaaagac

SEQ ID NO: 1028925 - DNA, 15 bp, Homo sapiens
aaaaaaaaaaagaca

SEQ ID NO: 1028926 - DNA, 15 bp, Homo sapiens
aaaaaaaaaagacac

SEQ ID NO: 1028927 - DNA, 15 bp, Homo sapiens
aaaaaaaaagacact

SEQ ID NO: 1028928 - DNA, 15 bp, Homo sapiens
aaaaaaaagacacta

SEQ ID NO: 1028929 - DNA, 15 bp, Homo sapiens
aaaaaaagacactag

SEQ ID NO: 1028930 - DNA, 15 bp, Homo sapiens
aaaaaagacactagt

SEQ ID NO: 1028931 - DNA, 15 bp, Homo sapiens
aaaaagacactagtg

SEQ ID NO: 1028932 - DNA, 15 bp, Homo sapiens
aaaagacactagtga

SEQ ID NO: 1028933 - DNA, 15 bp, Homo sapiens
aaagacactagtgat

SEQ ID NO: 1028934 - DNA, 15 bp, Homo sapiens
aagacactagtgatt

SEQ ID NO: 1028935 - DNA, 15 bp, Homo sapiens
agacactagtgattt

SEQ ID NO: 1028936 - DNA, 15 bp, Homo sapiens
gacactagtgatttc

SEQ ID NO: 1028937 - DNA, 15 bp, Homo sapiens
acactagtgatttcc

SEQ ID NO: 1028938 - DNA, 15 bp, Homo sapiens
cactagtgatttccc

SEQ ID NO: 1028939 - DNA, 15 bp, Homo sapiens
actagtgatttccca

SEQ ID NO: 1028940 - DNA, 15 bp, Homo sapiens
ctagtgatttcccat

SEQ ID NO: 1028941 - DNA, 15 bp, Homo sapiens
tagtgatttcccata

SEQ ID NO: 1028942 - DNA, 15 bp, Homo sapiens
agtgatttcccataa

SEQ ID NO: 1028943 - DNA, 15 bp, Homo sapiens
gtgatttcccataat

SEQ ID NO: 1028944 - DNA, 15 bp, Homo sapiens
tgatttcccataatc

SEQ ID NO: 1028945 - DNA, 15 bp, Homo sapiens
gatttcccataatcc

SEQ ID NO: 1028946 - DNA, 15 bp, Homo sapiens
atttcccataatcct

SEQ ID NO: 1028947 - DNA, 15 bp, Homo sapiens
tttcccataatcctc

SEQ ID NO: 1028948 - DNA, 15 bp, Homo sapiens
ttcccataatcctca

SEQ ID NO: 1028949 - DNA, 15 bp, Homo sapiens
tcccataatcctcac

SEQ ID NO: 1028950 - DNA, 15 bp, Homo sapiens
cccataatcctcaca

SEQ ID NO: 1028951 - DNA, 15 bp, Homo sapiens
ccataatcctcacag

SEQ ID NO: 1028952 - DNA, 15 bp, Homo sapiens
cataatcctcacagt

SEQ ID NO: 1028953 - DNA, 15 bp, Homo sapiens
ataatcctcacagta

SEQ ID NO: 1028954 - DNA, 15 bp, Homo sapiens
taatcctcacagtag

SEQ ID NO: 1028955 - DNA, 15 bp, Homo sapiens
aatcctcacagtagc

SEQ ID NO: 1028956 - DNA, 15 bp, Homo sapiens
atcctcacagtagcc

SEQ ID NO: 1028957 - DNA, 15 bp, Homo sapiens
tcctcacagtagccc

SEQ ID NO: 1028958 - DNA, 15 bp, Homo sapiens
cctcacagtagccct

SEQ ID NO: 1028959 - DNA, 15 bp, Homo sapiens
ctcacagtagccctg

SEQ ID NO: 1028960 - DNA, 15 bp, Homo sapiens
tcacagtagccctgg

SEQ ID NO: 1028961 - DNA, 15 bp, Homo sapiens
cacagtagccctggg

SEQ ID NO: 1028962 - DNA, 15 bp, Homo sapiens
acagtagccctggga

SEQ ID NO: 1028963 - DNA, 15 bp, Homo sapiens
cagtagccctgggag

SEQ ID NO: 1028964 - DNA, 15 bp, Homo sapiens
agtagccctgggagg

SEQ ID NO: 1028965 - DNA, 15 bp, Homo sapiens
gtagccctgggagga

SEQ ID NO: 1028966 - DNA, 15 bp, Homo sapiens
tagccctgggaggaa

SEQ ID NO: 1028967 - DNA, 15 bp, Homo sapiens
agccctgggaggaaa

SEQ ID NO: 1028968 - DNA, 15 bp, Homo sapiens
gccctgggaggaaaa

SEQ ID NO: 1028969 - DNA, 15 bp, Homo sapiens
ccctgggaggaaaaa

SEQ ID NO: 1028970 - DNA, 15 bp, Homo sapiens
cctgggaggaaaaac

SEQ ID NO: 1028971 - DNA, 15 bp, Homo sapiens
ctgggaggaaaaact

SEQ ID NO: 1028972 - DNA, 15 bp, Homo sapiens
tgggaggaaaaactg

SEQ ID NO: 1028973 - DNA, 15 bp, Homo sapiens
gggaggaaaaactgg

SEQ ID NO: 1028974 - DNA, 15 bp, Homo sapiens
ggaggaaaaactggc

SEQ ID NO: 1028975 - DNA, 15 bp, Homo sapiens
gaggaaaaactggca

SEQ ID NO: 1028976 - DNA, 15 bp, Homo sapiens
aggaaaaactggcaa

SEQ ID NO: 1028977 - DNA, 15 bp, Homo sapiens
ggaaaaactggcaag

SEQ ID NO: 1028978 - DNA, 15 bp, Homo sapiens
gaaaaactggcaagg

SEQ ID NO: 1028979 - DNA, 15 bp, Homo sapiens
aaaaactggcaagga

SEQ ID NO: 1028980 - DNA, 15 bp, Homo sapiens
aaaactggcaaggat

SEQ ID NO: 1028981 - DNA, 15 bp, Homo sapiens
aaactggcaaggatt

SEQ ID NO: 1028982 - DNA, 15 bp, Homo sapiens
aactggcaaggattt

SEQ ID NO: 1028983 - DNA, 15 bp, Homo sapiens
actggcaaggatttt

SEQ ID NO: 1028984 - DNA, 15 bp, Homo sapiens
ctggcaaggattttt

SEQ ID NO: 1028985 - DNA, 15 bp, Homo sapiens
tggcaaggattttta

SEQ ID NO: 1028986 - DNA, 15 bp, Homo sapiens
ggcaaggatttttac

SEQ ID NO: 1028987 - DNA, 15 bp, Homo sapiens
gcaaggatttttact

SEQ ID NO: 1028988 - DNA, 15 bp, Homo sapiens
caaggatttttactt

SEQ ID NO: 1028989 - DNA, 15 bp, Homo sapiens
aaggatttttacttt

SEQ ID NO: 1028990 - DNA, 15 bp, Homo sapiens
aggatttttacttta

SEQ ID NO: 1028991 - DNA, 15 bp, Homo sapiens
ggatttttactttac

SEQ ID NO: 1028992 - DNA, 15 bp, Homo sapiens
gatttttactttact

SEQ ID NO: 1028993 - DNA, 15 bp, Homo sapiens
atttttactttactg

SEQ ID NO: 1028994 - DNA, 15 bp, Homo sapiens
tttttactttactga

SEQ ID NO: 1028995 - DNA, 15 bp, Homo sapiens
ttttactttactgaa

SEQ ID NO: 1028996 - DNA, 15 bp, Homo sapiens
tttactttactgaaa

SEQ ID NO: 1028997 - DNA, 15 bp, Homo sapiens
ttactttactgaaaa

SEQ ID NO: 1028998 - DNA, 15 bp, Homo sapiens
tactttactgaaaac

SEQ ID NO: 1028999 - DNA, 15 bp, Homo sapiens
actttactgaaaaca

SEQ ID NO: 1029000 - DNA, 15 bp, Homo sapiens
ctttactgaaaacaa

SEQ ID NO: 1029001 - DNA, 15 bp, Homo sapiens
tttactgaaaacaaa

SEQ ID NO: 1029002 - DNA, 15 bp, Homo sapiens
ttactgaaaacaaaa

SEQ ID NO: 1029003 - DNA, 15 bp, Homo sapiens
tactgaaaacaaaat

SEQ ID NO: 1029004 - DNA, 15 bp, Homo sapiens
actgaaaacaaaata

SEQ ID NO: 1029005 - DNA, 15 bp, Homo sapiens
ctgaaaacaaaataa

SEQ ID NO: 1029006 - DNA, 15 bp, Homo sapiens
tgaaaacaaaataag

SEQ ID NO: 1029007 - DNA, 15 bp, Homo sapiens
gaaaacaaaataagt

SEQ ID NO: 1029008 - DNA, 15 bp, Homo sapiens
aaaacaaaataagtc

SEQ ID NO: 1029009 - DNA, 15 bp, Homo sapiens
aaacaaaataagtca

SEQ ID NO: 1029010 - DNA, 15 bp, Homo sapiens
aacaaaataagtcaa

SEQ ID NO: 1029011 - DNA, 15 bp, Homo sapiens
acaaaataagtcaag

SEQ ID NO: 1029012 - DNA, 15 bp, Homo sapiens
caaaataagtcaaga

SEQ ID NO: 1029013 - DNA, 15 bp, Homo sapiens
aaaataagtcaagac

SEQ ID NO: 1029014 - DNA, 15 bp, Homo sapiens
aaataagtcaagaca

SEQ ID NO: 1029015 - DNA, 15 bp, Homo sapiens
aataagtcaagacac

SEQ ID NO: 1029016 - DNA, 15 bp, Homo sapiens
ataagtcaagacaca

SEQ ID NO: 1029017 - DNA, 15 bp, Homo sapiens
taagtcaagacacag

SEQ ID NO: 1029018 - DNA, 15 bp, Homo sapiens
aagtcaagacacagc

SEQ ID NO: 1029019 - DNA, 15 bp, Homo sapiens
agtcaagacacagct

SEQ ID NO: 1029020 - DNA, 15 bp, Homo sapiens
gtcaagacacagctt

SEQ ID NO: 1029021 - DNA, 15 bp, Homo sapiens
tcaagacacagctta

SEQ ID NO: 1029022 - DNA, 15 bp, Homo sapiens
caagacacagcttaa

SEQ ID NO: 1029023 - DNA, 15 bp, Homo sapiens
aagacacagcttaat

SEQ ID NO: 1029024 - DNA, 15 bp, Homo sapiens
agacacagcttaatg

SEQ ID NO: 1029025 - DNA, 15 bp, Homo sapiens
gacacagcttaatgg

SEQ ID NO: 1029026 - DNA, 15 bp, Homo sapiens
acacagcttaatggc

SEQ ID NO: 1029027 - DNA, 15 bp, Homo sapiens
cacagcttaatggcc

SEQ ID NO: 1029028 - DNA, 15 bp, Homo sapiens
acagcttaatggccc

SEQ ID NO: 1029029 - DNA, 15 bp, Homo sapiens
cagcttaatggccca

SEQ ID NO: 1029030 - DNA, 15 bp, Homo sapiens
agcttaatggcccag

SEQ ID NO: 1029031 - DNA, 15 bp, Homo sapiens
gcttaatggcccagc

SEQ ID NO: 1029032 - DNA, 15 bp, Homo sapiens
cttaatggcccagca

SEQ ID NO: 1029033 - DNA, 15 bp, Homo sapiens
ttaatggcccagcag

SEQ ID NO: 1029034 - DNA, 15 bp, Homo sapiens
taatggcccagcagg

SEQ ID NO: 1029035 - DNA, 15 bp, Homo sapiens
aatggcccagcaggc

SEQ ID NO: 1029036 - DNA, 15 bp, Homo sapiens
atggcccagcaggct

SEQ ID NO: 1029037 - DNA, 15 bp, Homo sapiens
tggcccagcaggctc

SEQ ID NO: 1029038 - DNA, 15 bp, Homo sapiens
ggcccagcaggctct

SEQ ID NO: 1029039 - DNA, 15 bp, Homo sapiens
gcccagcaggctctc

SEQ ID NO: 1029040 - DNA, 15 bp, Homo sapiens
cccagcaggctctca

SEQ ID NO: 1029041 - DNA, 15 bp, Homo sapiens
ccagcaggctctcag

SEQ ID NO: 1029042 - DNA, 15 bp, Homo sapiens
cagcaggctctcaga

SEQ ID NO: 1029043 - DNA, 15 bp, Homo sapiens
agcaggctctcagat

SEQ ID NO: 1029044 - DNA, 15 bp, Homo sapiens
gcaggctctcagatt

SEQ ID NO: 1029045 - DNA, 15 bp, Homo sapiens
caggctctcagattc

SEQ ID NO: 1029046 - DNA, 15 bp, Homo sapiens
aggctctcagattcc

SEQ ID NO: 1029047 - DNA, 15 bp, Homo sapiens
ggctctcagattccc

SEQ ID NO: 1029048 - DNA, 15 bp, Homo sapiens
gctctcagattccca

SEQ ID NO: 1029049 - DNA, 15 bp, Homo sapiens
ctctcagattcccag

SEQ ID NO: 1029050 - DNA, 15 bp, Homo sapiens
tctcagattcccaga

SEQ ID NO: 1029051 - DNA, 15 bp, Homo sapiens
ctcagattcccagat

SEQ ID NO: 1029052 - DNA, 15 bp, Homo sapiens
tcagattcccagatc

SEQ ID NO: 1029053 - DNA, 15 bp, Homo sapiens
cagattcccagatca

SEQ ID NO: 1029054 - DNA, 15 bp, Homo sapiens
agattcccagatcaa

SEQ ID NO: 1029055 - DNA, 15 bp, Homo sapiens
gattcccagatcaaa

SEQ ID NO: 1029056 - DNA, 15 bp, Homo sapiens
attcccagatcaaaa

SEQ ID NO: 1029057 - DNA, 15 bp, Homo sapiens
ttcccagatcaaaac

SEQ ID NO: 1029058 - DNA, 15 bp, Homo sapiens
tcccagatcaaaaca

SEQ ID NO: 1029059 - DNA, 15 bp, Homo sapiens
cccagatcaaaacat

SEQ ID NO: 1029060 - DNA, 15 bp, Homo sapiens
ccagatcaaaacatg

SEQ ID NO: 1029061 - DNA, 15 bp, Homo sapiens
cagatcaaaacatgg

SEQ ID NO: 1029062 - DNA, 15 bp, Homo sapiens
agatcaaaacatggc

SEQ ID NO: 1029063 - DNA, 15 bp, Homo sapiens
gatcaaaacatggca

SEQ ID NO: 1029064 - DNA, 15 bp, Homo sapiens
atcaaaacatggcaa

SEQ ID NO: 1029065 - DNA, 15 bp, Homo sapiens
tcaaaacatggcaaa

SEQ ID NO: 1029066 - DNA, 15 bp, Homo sapiens
caaaacatggcaaaa

SEQ ID NO: 1029067 - DNA, 15 bp, Homo sapiens
aaaacatggcaaaat

SEQ ID NO: 1029068 - DNA, 15 bp, Homo sapiens
aaacatggcaaaatc

SEQ ID NO: 1029069 - DNA, 15 bp, Homo sapiens
aacatggcaaaatcc

SEQ ID NO: 1029070 - DNA, 15 bp, Homo sapiens
acatggcaaaatcct

SEQ ID NO: 1029071 - DNA, 15 bp, Homo sapiens
catggcaaaatcctg

SEQ ID NO: 1029072 - DNA, 15 bp, Homo sapiens
atggcaaaatcctgc

SEQ ID NO: 1029073 - DNA, 15 bp, Homo sapiens
tggcaaaatcctgcc

SEQ ID NO: 1029074 - DNA, 15 bp, Homo sapiens
ggcaaaatcctgccc

SEQ ID NO: 1029075 - DNA, 15 bp, Homo sapiens
gcaaaatcctgcccc

SEQ ID NO: 1029076 - DNA, 15 bp, Homo sapiens
caaaatcctgcccct

SEQ ID NO: 1029077 - DNA, 15 bp, Homo sapiens
aaaatcctgcccctc

SEQ ID NO: 1029078 - DNA, 15 bp, Homo sapiens
aaatcctgcccctct

SEQ ID NO: 1029079 - DNA, 15 bp, Homo sapiens
aatcctgcccctctt

SEQ ID NO: 1029080 - DNA, 15 bp, Homo sapiens
atcctgcccctcttt

SEQ ID NO: 1029081 - DNA, 15 bp, Homo sapiens
tcctgcccctctttc

SEQ ID NO: 1029082 - DNA, 15 bp, Homo sapiens
cctgcccctctttca

SEQ ID NO: 1029083 - DNA, 15 bp, Homo sapiens
ctgcccctctttcaa

SEQ ID NO: 1029084 - DNA, 15 bp, Homo sapiens
tgcccctctttcaat

SEQ ID NO: 1029085 - DNA, 15 bp, Homo sapiens
gcccctctttcaatg

SEQ ID NO: 1029086 - DNA, 15 bp, Homo sapiens
cccctctttcaatgt

SEQ ID NO: 1029087 - DNA, 15 bp, Homo sapiens
ccctctttcaatgtg

SEQ ID NO: 1029088 - DNA, 15 bp, Homo sapiens
cctctttcaatgtgt

SEQ ID NO: 1029089 - DNA, 15 bp, Homo sapiens
ctctttcaatgtgtg

SEQ ID NO: 1029090 - DNA, 15 bp, Homo sapiens
tctttcaatgtgtgc

SEQ ID NO: 1029091 - DNA, 15 bp, Homo sapiens
ctttcaatgtgtgca

SEQ ID NO: 1029092 - DNA, 15 bp, Homo sapiens
tttcaatgtgtgcat

SEQ ID NO: 1029093 - DNA, 15 bp, Homo sapiens
ttcaatgtgtgcatg

SEQ ID NO: 1029094 - DNA, 15 bp, Homo sapiens
tcaatgtgtgcatgt

SEQ ID NO: 1029095 - DNA, 15 bp, Homo sapiens
caatgtgtgcatgtc

SEQ ID NO: 1029096 - DNA, 15 bp, Homo sapiens
aatgtgtgcatgtct

SEQ ID NO: 1029097 - DNA, 15 bp, Homo sapiens
atgtgtgcatgtctg

SEQ ID NO: 1029098 - DNA, 15 bp, Homo sapiens
tgtgtgcatgtctgt

SEQ ID NO: 1029099 - DNA, 15 bp, Homo sapiens
gtgtgcatgtctgtt

SEQ ID NO: 1029100 - DNA, 15 bp, Homo sapiens
tgtgcatgtctgttc

SEQ ID NO: 1029101 - DNA, 15 bp, Homo sapiens
gtgcatgtctgttca

SEQ ID NO: 1029102 - DNA, 15 bp, Homo sapiens
tgcatgtctgttcat

SEQ ID NO: 1029103 - DNA, 15 bp, Homo sapiens
gcatgtctgttcatc

SEQ ID NO: 1029104 - DNA, 15 bp, Homo sapiens
catgtctgttcatct

SEQ ID NO: 1029105 - DNA, 15 bp, Homo sapiens
atgtctgttcatctg

SEQ ID NO: 1029106 - DNA, 15 bp, Homo sapiens
tgtctgttcatctgt

SEQ ID NO: 1029107 - DNA, 15 bp, Homo sapiens
gtctgttcatctgtt

SEQ ID NO: 1029108 - DNA, 15 bp, Homo sapiens
tctgttcatctgttt

SEQ ID NO: 1029109 - DNA, 15 bp, Homo sapiens
ctgttcatctgttta

SEQ ID NO: 1029110 - DNA, 15 bp, Homo sapiens
tgttcatctgtttaa

SEQ ID NO: 1029111 - DNA, 15 bp, Homo sapiens
gttcatctgtttaac

SEQ ID NO: 1029112 - DNA, 15 bp, Homo sapiens
ttcatctgtttaacc

SEQ ID NO: 1029113 - DNA, 15 bp, Homo sapiens
tcatctgtttaacca

SEQ ID NO: 1029114 - DNA, 15 bp, Homo sapiens
catctgtttaaccac

SEQ ID NO: 1029115 - DNA, 15 bp, Homo sapiens
atctgtttaaccacc

SEQ ID NO: 1029116 - DNA, 15 bp, Homo sapiens
tctgtttaaccaccc

SEQ ID NO: 1029117 - DNA, 15 bp, Homo sapiens
ctgtttaaccaccct

SEQ ID NO: 1029118 - DNA, 15 bp, Homo sapiens
tgtttaaccaccctg

SEQ ID NO: 1029119 - DNA, 15 bp, Homo sapiens
gtttaaccaccctgg

SEQ ID NO: 1029120 - DNA, 15 bp, Homo sapiens
tttaaccaccctggc

SEQ ID NO: 1029121 - DNA, 15 bp, Homo sapiens
ttaaccaccctggca

SEQ ID NO: 1029122 - DNA, 15 bp, Homo sapiens
taaccaccctggcat

SEQ ID NO: 1029123 - DNA, 15 bp, Homo sapiens
aaccaccctggcatc

SEQ ID NO: 1029124 - DNA, 15 bp, Homo sapiens
accaccctggcatct

SEQ ID NO: 1029125 - DNA, 15 bp, Homo sapiens
ccaccctggcatctt

SEQ ID NO: 1029126 - DNA, 15 bp, Homo sapiens
caccctggcatcttc

SEQ ID NO: 1029127 - DNA, 15 bp, Homo sapiens
accctggcatcttct

SEQ ID NO: 1029128 - DNA, 15 bp, Homo sapiens
ccctggcatcttctc

SEQ ID NO: 1029129 - DNA, 15 bp, Homo sapiens
cctggcatcttctct

SEQ ID NO: 1029130 - DNA, 15 bp, Homo sapiens
ctggcatcttctctc

SEQ ID NO: 1029131 - DNA, 15 bp, Homo sapiens
tggcatcttctctcc

SEQ ID NO: 1029132 - DNA, 15 bp, Homo sapiens
ggcatcttctctcct

SEQ ID NO: 1029133 - DNA, 15 bp, Homo sapiens
gcatcttctctcctt

SEQ ID NO: 1029134 - DNA, 15 bp, Homo sapiens
catcttctctccttg

SEQ ID NO: 1029135 - DNA, 15 bp, Homo sapiens
atcttctctccttgt

SEQ ID NO: 1029136 - DNA, 15 bp, Homo sapiens
tcttctctccttgtt

SEQ ID NO: 1029137 - DNA, 15 bp, Homo sapiens
cttctctccttgttt

SEQ ID NO: 1029138 - DNA, 15 bp, Homo sapiens
ttctctccttgtttc

SEQ ID NO: 1029139 - DNA, 15 bp, Homo sapiens
tctctccttgtttct

SEQ ID NO: 1029140 - DNA, 15 bp, Homo sapiens
ctctccttgtttcta

SEQ ID NO: 1029141 - DNA, 15 bp, Homo sapiens
tctccttgtttctag

SEQ ID NO: 1029142 - DNA, 15 bp, Homo sapiens
ctccttgtttctaga

SEQ ID NO: 1029143 - DNA, 15 bp, Homo sapiens
tccttgtttctagac

SEQ ID NO: 1029144 - DNA, 15 bp, Homo sapiens
ccttgtttctagaca

SEQ ID NO: 1029145 - DNA, 15 bp, Homo sapiens
cttgtttctagacac

SEQ ID NO: 1029146 - DNA, 15 bp, Homo sapiens
ttgtttctagacact

SEQ ID NO: 1029147 - DNA, 15 bp, Homo sapiens
tgtttctagacactc

SEQ ID NO: 1029148 - DNA, 15 bp, Homo sapiens
gtttctagacactca

SEQ ID NO: 1029149 - DNA, 15 bp, Homo sapiens
tttctagacactcaa

SEQ ID NO: 1029150 - DNA, 15 bp, Homo sapiens
ttctagacactcaac

SEQ ID NO: 1029151 - DNA, 15 bp, Homo sapiens
tctagacactcaact

SEQ ID NO: 1029152 - DNA, 15 bp, Homo sapiens
ctagacactcaactc

SEQ ID NO: 1029153 - DNA, 15 bp, Homo sapiens
tagacactcaactct

SEQ ID NO: 1029154 - DNA, 15 bp, Homo sapiens
agacactcaactctg

SEQ ID NO: 1029155 - DNA, 15 bp, Homo sapiens
gacactcaactctga

SEQ ID NO: 1029156 - DNA, 15 bp, Homo sapiens
acactcaactctgat

SEQ ID NO: 1029157 - DNA, 15 bp, Homo sapiens
cactcaactctgata

SEQ ID NO: 1029158 - DNA, 15 bp, Homo sapiens
actcaactctgatac

SEQ ID NO: 1029159 - DNA, 15 bp, Homo sapiens
ctcaactctgatact

SEQ ID NO: 1029160 - DNA, 15 bp, Homo sapiens
tcaactctgatactc

SEQ ID NO: 1029161 - DNA, 15 bp, Homo sapiens
caactctgatactcc

SEQ ID NO: 1029162 - DNA, 15 bp, Homo sapiens
aactctgatactcca

SEQ ID NO: 1029163 - DNA, 15 bp, Homo sapiens
actctgatactccag

SEQ ID NO: 1029164 - DNA, 15 bp, Homo sapiens
ctctgatactccagc

SEQ ID NO: 1029165 - DNA, 15 bp, Homo sapiens
tctgatactccagcc

SEQ ID NO: 1029166 - DNA, 15 bp, Homo sapiens
ctgatactccagccc

SEQ ID NO: 1029167 - DNA, 15 bp, Homo sapiens
tgatactccagccct

SEQ ID NO: 1029168 - DNA, 15 bp, Homo sapiens
gatactccagccctg

SEQ ID NO: 1029169 - DNA, 15 bp, Homo sapiens
atactccagccctgt

SEQ ID NO: 1029170 - DNA, 15 bp, Homo sapiens
tactccagccctgtg

SEQ ID NO: 1029171 - DNA, 15 bp, Homo sapiens
actccagccctgtgg

SEQ ID NO: 1029172 - DNA, 15 bp, Homo sapiens
ctccagccctgtggc

SEQ ID NO: 1029173 - DNA, 15 bp, Homo sapiens
tccagccctgtggca

SEQ ID NO: 1029174 - DNA, 15 bp, Homo sapiens
ccagccctgtggcac

SEQ ID NO: 1029175 - DNA, 15 bp, Homo sapiens
cagccctgtggcacc

SEQ ID NO: 1029176 - DNA, 15 bp, Homo sapiens
agccctgtggcaccc

SEQ ID NO: 1029177 - DNA, 15 bp, Homo sapiens
gccctgtggcacccc

SEQ ID NO: 1029178 - DNA, 15 bp, Homo sapiens
ccctgtggcacccca

SEQ ID NO: 1029179 - DNA, 15 bp, Homo sapiens
cctgtggcaccccag

SEQ ID NO: 1029180 - DNA, 15 bp, Homo sapiens
ctgtggcaccccaga

SEQ ID NO: 1029181 - DNA, 15 bp, Homo sapiens
tgtggcaccccagac

SEQ ID NO: 1029182 - DNA, 15 bp, Homo sapiens
gtggcaccccagacc

SEQ ID NO: 1029183 - DNA, 15 bp, Homo sapiens
tggcaccccagaccc

SEQ ID NO: 1029184 - DNA, 15 bp, Homo sapiens
ggcaccccagaccct

SEQ ID NO: 1029185 - DNA, 15 bp, Homo sapiens
gcaccccagaccctc

SEQ ID NO: 1029186 - DNA, 15 bp, Homo sapiens
caccccagaccctct

SEQ ID NO: 1029187 - DNA, 15 bp, Homo sapiens
accccagaccctctt

SEQ ID NO: 1029188 - DNA, 15 bp, Homo sapiens
ccccagaccctcttc

SEQ ID NO: 1029189 - DNA, 15 bp, Homo sapiens
cccagaccctcttca

SEQ ID NO: 1029190 - DNA, 15 bp, Homo sapiens
ccagaccctcttcag

SEQ ID NO: 1029191 - DNA, 15 bp, Homo sapiens
cagaccctcttcagc

SEQ ID NO: 1029192 - DNA, 15 bp, Homo sapiens
agaccctcttcagct

SEQ ID NO: 1029193 - DNA, 15 bp, Homo sapiens
gaccctcttcagcta

SEQ ID NO: 1029194 - DNA, 15 bp, Homo sapiens
accctcttcagctac

SEQ ID NO: 1029195 - DNA, 15 bp, Homo sapiens
ccctcttcagctaca

SEQ ID NO: 1029196 - DNA, 15 bp, Homo sapiens
cctcttcagctacag

SEQ ID NO: 1029197 - DNA, 15 bp, Homo sapiens
ctcttcagctacagc

SEQ ID NO: 1029198 - DNA, 15 bp, Homo sapiens
tcttcagctacagcc

SEQ ID NO: 1029199 - DNA, 15 bp, Homo sapiens
cttcagctacagcca

SEQ ID NO: 1029200 - DNA, 15 bp, Homo sapiens
ttcagctacagccac

SEQ ID NO: 1029201 - DNA, 15 bp, Homo sapiens
tcagctacagccaca

SEQ ID NO: 1029202 - DNA, 15 bp, Homo sapiens
cagctacagccacag

SEQ ID NO: 1029203 - DNA, 15 bp, Homo sapiens
agctacagccacagg

SEQ ID NO: 1029204 - DNA, 15 bp, Homo sapiens
gctacagccacaggt

SEQ ID NO: 1029205 - DNA, 15 bp, Homo sapiens
ctacagccacaggtc

SEQ ID NO: 1029206 - DNA, 15 bp, Homo sapiens
tacagccacaggtcc

SEQ ID NO: 1029207 - DNA, 15 bp, Homo sapiens
acagccacaggtcct

SEQ ID NO: 1029208 - DNA, 15 bp, Homo sapiens
cagccacaggtcctg

SEQ ID NO: 1029209 - DNA, 15 bp, Homo sapiens
agccacaggtcctgg

SEQ ID NO: 1029210 - DNA, 15 bp, Homo sapiens
gccacaggtcctggg

SEQ ID NO: 1029211 - DNA, 15 bp, Homo sapiens
ccacaggtcctggga

SEQ ID NO: 1029212 - DNA, 15 bp, Homo sapiens
cacaggtcctgggaa

SEQ ID NO: 1029213 - DNA, 15 bp, Homo sapiens
acaggtcctgggaaa

SEQ ID NO: 1029214 - DNA, 15 bp, Homo sapiens
caggtcctgggaaag

SEQ ID NO: 1029215 - DNA, 15 bp, Homo sapiens
aggtcctgggaaaga

SEQ ID NO: 1029216 - DNA, 15 bp, Homo sapiens
ggtcctgggaaagaa

SEQ ID NO: 1029217 - DNA, 15 bp, Homo sapiens
gtcctgggaaagaag

SEQ ID NO: 1029218 - DNA, 15 bp, Homo sapiens
tcctgggaaagaagt

SEQ ID NO: 1029219 - DNA, 15 bp, Homo sapiens
cctgggaaagaagtg

SEQ ID NO: 1029220 - DNA, 15 bp, Homo sapiens
ctgggaaagaagtgg

SEQ ID NO: 1029221 - DNA, 15 bp, Homo sapiens
tgggaaagaagtggg

SEQ ID NO: 1029222 - DNA, 15 bp, Homo sapiens
gggaaagaagtggga

SEQ ID NO: 1029223 - DNA, 15 bp, Homo sapiens
ggaaagaagtgggat

SEQ ID NO: 1029224 - DNA, 15 bp, Homo sapiens
gaaagaagtgggatc

SEQ ID NO: 1029225 - DNA, 15 bp, Homo sapiens
aaagaagtgggatct

SEQ ID NO: 1029226 - DNA, 15 bp, Homo sapiens
aagaagtgggatcta

SEQ ID NO: 1029227 - DNA, 15 bp, Homo sapiens
agaagtgggatctag

SEQ ID NO: 1029228 - DNA, 15 bp, Homo sapiens
gaagtgggatctagg

SEQ ID NO: 1029229 - DNA, 15 bp, Homo sapiens
aagtgggatctaggg

SEQ ID NO: 1029230 - DNA, 15 bp, Homo sapiens
agtgggatctagggc

SEQ ID NO: 1029231 - DNA, 15 bp, Homo sapiens
gtgggatctagggcc

SEQ ID NO: 1029232 - DNA, 15 bp, Homo sapiens
tgggatctagggccc

SEQ ID NO: 1029233 - DNA, 15 bp, Homo sapiens
gggatctagggccct

SEQ ID NO: 1029234 - DNA, 15 bp, Homo sapiens
ggatctagggccctg

SEQ ID NO: 1029235 - DNA, 15 bp, Homo sapiens
gatctagggccctgg

SEQ ID NO: 1029236 - DNA, 15 bp, Homo sapiens
atctagggccctggg

SEQ ID NO: 1029237 - DNA, 15 bp, Homo sapiens
tctagggccctggga

SEQ ID NO: 1029238 - DNA, 15 bp, Homo sapiens
ctagggccctgggag

SEQ ID NO: 1029239 - DNA, 15 bp, Homo sapiens
tagggccctgggagg

SEQ ID NO: 1029240 - DNA, 15 bp, Homo sapiens
agggccctgggagga

SEQ ID NO: 1029241 - DNA, 15 bp, Homo sapiens
gggccctgggaggag

SEQ ID NO: 1029242 - DNA, 15 bp, Homo sapiens
ggccctgggaggagg

SEQ ID NO: 1029243 - DNA, 15 bp, Homo sapiens
gccctgggaggaggt

SEQ ID NO: 1029244 - DNA, 15 bp, Homo sapiens
ccctgggaggaggtt

SEQ ID NO: 1029245 - DNA, 15 bp, Homo sapiens
cctgggaggaggttg

SEQ ID NO: 1029246 - DNA, 15 bp, Homo sapiens
ctgggaggaggttga

SEQ ID NO: 1029247 - DNA, 15 bp, Homo sapiens
tgggaggaggttgag

SEQ ID NO: 1029248 - DNA, 15 bp, Homo sapiens
gggaggaggttgagc

SEQ ID NO: 1029249 - DNA, 15 bp, Homo sapiens
ggaggaggttgagcc

SEQ ID NO: 1029250 - DNA, 15 bp, Homo sapiens
gaggaggttgagcct

SEQ ID NO: 1029251 - DNA, 15 bp, Homo sapiens
aggaggttgagcctg

SEQ ID NO: 1029252 - DNA, 15 bp, Homo sapiens
ggaggttgagcctgg

SEQ ID NO: 1029253 - DNA, 15 bp, Homo sapiens
gaggttgagcctggg

SEQ ID NO: 1029254 - DNA, 15 bp, Homo sapiens
aggttgagcctgggg

SEQ ID NO: 1029255 - DNA, 15 bp, Homo sapiens
ggttgagcctgggga

SEQ ID NO: 1029256 - DNA, 15 bp, Homo sapiens
gttgagcctggggaa

SEQ ID NO: 1029257 - DNA, 15 bp, Homo sapiens
ttgagcctggggaag

SEQ ID NO: 1029258 - DNA, 15 bp, Homo sapiens
tgagcctggggaagg

SEQ ID NO: 1029259 - DNA, 15 bp, Homo sapiens
gagcctggggaagga

SEQ ID NO: 1029260 - DNA, 15 bp, Homo sapiens
agcctggggaaggaa

SEQ ID NO: 1029261 - DNA, 15 bp, Homo sapiens
gcctggggaaggaaa

SEQ ID NO: 1029262 - DNA, 15 bp, Homo sapiens
cctggggaaggaaaa

SEQ ID NO: 1029263 - DNA, 15 bp, Homo sapiens
ctggggaaggaaaaa

SEQ ID NO: 1029264 - DNA, 15 bp, Homo sapiens
tggggaaggaaaaag

SEQ ID NO: 1029265 - DNA, 15 bp, Homo sapiens
ggggaaggaaaaagc

SEQ ID NO: 1029266 - DNA, 15 bp, Homo sapiens
gggaaggaaaaagca

SEQ ID NO: 1029267 - DNA, 15 bp, Homo sapiens
ggaaggaaaaagcag

SEQ ID NO: 1029268 - DNA, 15 bp, Homo sapiens
gaaggaaaaagcagg

SEQ ID NO: 1029269 - DNA, 15 bp, Homo sapiens
aaggaaaaagcagga

SEQ ID NO: 1029270 - DNA, 15 bp, Homo sapiens
aggaaaaagcaggaa

SEQ ID NO: 1029271 - DNA, 15 bp, Homo sapiens
ggaaaaagcaggaaa

SEQ ID NO: 1029272 - DNA, 15 bp, Homo sapiens
gaaaaagcaggaaac

SEQ ID NO: 1029273 - DNA, 15 bp, Homo sapiens
aaaaagcaggaaact

SEQ ID NO: 1029274 - DNA, 15 bp, Homo sapiens
aaaagcaggaaactg

SEQ ID NO: 1029275 - DNA, 15 bp, Homo sapiens
aaagcaggaaactga

SEQ ID NO: 1029276 - DNA, 15 bp, Homo sapiens
aagcaggaaactgaa

SEQ ID NO: 1029277 - DNA, 15 bp, Homo sapiens
agcaggaaactgaag

SEQ ID NO: 1029278 - DNA, 15 bp, Homo sapiens
gcaggaaactgaagg

SEQ ID NO: 1029279 - DNA, 15 bp, Homo sapiens
caggaaactgaagga

SEQ ID NO: 1029280 - DNA, 15 bp, Homo sapiens
aggaaactgaaggaa

SEQ ID NO: 1029281 - DNA, 15 bp, Homo sapiens
ggaaactgaaggaag

SEQ ID NO: 1029282 - DNA, 15 bp, Homo sapiens
gaaactgaaggaagc

SEQ ID NO: 1029283 - DNA, 15 bp, Homo sapiens
aaactgaaggaagca

SEQ ID NO: 1029284 - DNA, 15 bp, Homo sapiens
aactgaaggaagcag

SEQ ID NO: 1029285 - DNA, 15 bp, Homo sapiens
actgaaggaagcagg

SEQ ID NO: 1029286 - DNA, 15 bp, Homo sapiens
ctgaaggaagcaggg

SEQ ID NO: 1029287 - DNA, 15 bp, Homo sapiens
tgaaggaagcagggg

SEQ ID NO: 1029288 - DNA, 15 bp, Homo sapiens
gaaggaagcaggggc

SEQ ID NO: 1029289 - DNA, 15 bp, Homo sapiens
aaggaagcaggggct

SEQ ID NO: 1029290 - DNA, 15 bp, Homo sapiens
aggaagcaggggctg

SEQ ID NO: 1029291 - DNA, 15 bp, Homo sapiens
ggaagcaggggctga

SEQ ID NO: 1029292 - DNA, 15 bp, Homo sapiens
gaagcaggggctgag

SEQ ID NO: 1029293 - DNA, 15 bp, Homo sapiens
aagcaggggctgagg

SEQ ID NO: 1029294 - DNA, 15 bp, Homo sapiens
agcaggggctgagga

SEQ ID NO: 1029295 - DNA, 15 bp, Homo sapiens
gcaggggctgaggaa

SEQ ID NO: 1029296 - DNA, 15 bp, Homo sapiens
caggggctgaggaac

SEQ ID NO: 1029297 - DNA, 15 bp, Homo sapiens
aggggctgaggaaca

SEQ ID NO: 1029298 - DNA, 15 bp, Homo sapiens
ggggctgaggaacac

SEQ ID NO: 1029299 - DNA, 15 bp, Homo sapiens
gggctgaggaacact

SEQ ID NO: 1029300 - DNA, 15 bp, Homo sapiens
ggctgaggaacactt

SEQ ID NO: 1029301 - DNA, 15 bp, Homo sapiens
gctgaggaacactta

SEQ ID NO: 1029302 - DNA, 15 bp, Homo sapiens
ctgaggaacacttag

SEQ ID NO: 1029303 - DNA, 15 bp, Homo sapiens
tgaggaacacttaga

SEQ ID NO: 1029304 - DNA, 15 bp, Homo sapiens
gaggaacacttagag

SEQ ID NO: 1029305 - DNA, 15 bp, Homo sapiens
aggaacacttagagg

SEQ ID NO: 1029306 - DNA, 15 bp, Homo sapiens
ggaacacttagaggg

SEQ ID NO: 1029307 - DNA, 15 bp, Homo sapiens
gaacacttagagggt

SEQ ID NO: 1029308 - DNA, 15 bp, Homo sapiens
aacacttagagggtg

SEQ ID NO: 1029309 - DNA, 15 bp, Homo sapiens
acacttagagggtgg

SEQ ID NO: 1029310 - DNA, 15 bp, Homo sapiens
cacttagagggtggg

SEQ ID NO: 1029311 - DNA, 15 bp, Homo sapiens
acttagagggtgggc

SEQ ID NO: 1029312 - DNA, 15 bp, Homo sapiens
cttagagggtgggca

SEQ ID NO: 1029313 - DNA, 15 bp, Homo sapiens
ttagagggtgggcag

SEQ ID NO: 1029314 - DNA, 15 bp, Homo sapiens
tagagggtgggcaga

SEQ ID NO: 1029315 - DNA, 15 bp, Homo sapiens
agagggtgggcagaa

SEQ ID NO: 1029316 - DNA, 15 bp, Homo sapiens
gagggtgggcagaag

SEQ ID NO: 1029317 - DNA, 15 bp, Homo sapiens
agggtgggcagaagc

SEQ ID NO: 1029318 - DNA, 15 bp, Homo sapiens
gggtgggcagaagcg

SEQ ID NO: 1029319 - DNA, 15 bp, Homo sapiens
ggtgggcagaagcgg

SEQ ID NO: 1029320 - DNA, 15 bp, Homo sapiens
gtgggcagaagcggg

SEQ ID NO: 1029321 - DNA, 15 bp, Homo sapiens
tgggcagaagcgggg

SEQ ID NO: 1029322 - DNA, 15 bp, Homo sapiens
gggcagaagcggggg

SEQ ID NO: 1029323 - DNA, 15 bp, Homo sapiens
ggcagaagcgggggt

SEQ ID NO: 1029324 - DNA, 15 bp, Homo sapiens
gcagaagcgggggtt

SEQ ID NO: 1029325 - DNA, 15 bp, Homo sapiens
cagaagcgggggttc

SEQ ID NO: 1029326 - DNA, 15 bp, Homo sapiens
agaagcgggggttcc

SEQ ID NO: 1029327 - DNA, 15 bp, Homo sapiens
gaagcgggggttccc

SEQ ID NO: 1029328 - DNA, 15 bp, Homo sapiens
aagcgggggttccca

SEQ ID NO: 1029329 - DNA, 15 bp, Homo sapiens
agcgggggttcccag

SEQ ID NO: 1029330 - DNA, 15 bp, Homo sapiens
gcgggggttcccagt

SEQ ID NO: 1029331 - DNA, 15 bp, Homo sapiens
cgggggttcccagtc

SEQ ID NO: 1029332 - DNA, 15 bp, Homo sapiens
gggggttcccagtct

SEQ ID NO: 1029333 - DNA, 15 bp, Homo sapiens
ggggttcccagtctg

SEQ ID NO: 1029334 - DNA, 15 bp, Homo sapiens
gggttcccagtctgc

SEQ ID NO: 1029335 - DNA, 15 bp, Homo sapiens
ggttcccagtctgct

SEQ ID NO: 1029336 - DNA, 15 bp, Homo sapiens
gttcccagtctgctt

SEQ ID NO: 1029337 - DNA, 15 bp, Homo sapiens
ttcccagtctgcttg

SEQ ID NO: 1029338 - DNA, 15 bp, Homo sapiens
tcccagtctgcttgt

SEQ ID NO: 1029339 - DNA, 15 bp, Homo sapiens
cccagtctgcttgtc

SEQ ID NO: 1029340 - DNA, 15 bp, Homo sapiens
ccagtctgcttgtct

SEQ ID NO: 1029341 - DNA, 15 bp, Homo sapiens
cagtctgcttgtctc

SEQ ID NO: 1029342 - DNA, 15 bp, Homo sapiens
agtctgcttgtctcc

SEQ ID NO: 1029343 - DNA, 15 bp, Homo sapiens
gtctgcttgtctccc

SEQ ID NO: 1029344 - DNA, 15 bp, Homo sapiens
tctgcttgtctccct

SEQ ID NO: 1029345 - DNA, 15 bp, Homo sapiens
ctgcttgtctccctt

SEQ ID NO: 1029346 - DNA, 15 bp, Homo sapiens
tgcttgtctcccttt

SEQ ID NO: 1029347 - DNA, 15 bp, Homo sapiens
gcttgtctccctttc

SEQ ID NO: 1029348 - DNA, 15 bp, Homo sapiens
cttgtctccctttcc

SEQ ID NO: 1029349 - DNA, 15 bp, Homo sapiens
ttgtctccctttccc

SEQ ID NO: 1029350 - DNA, 15 bp, Homo sapiens
tgtctccctttccct

SEQ ID NO: 1029351 - DNA, 15 bp, Homo sapiens
gtctccctttccctt

SEQ ID NO: 1029352 - DNA, 15 bp, Homo sapiens
tctccctttcccttg

SEQ ID NO: 1029353 - DNA, 15 bp, Homo sapiens
ctccctttcccttgc

SEQ ID NO: 1029354 - DNA, 15 bp, Homo sapiens
tccctttcccttgca

SEQ ID NO: 1029355 - DNA, 15 bp, Homo sapiens
ccctttcccttgcag

SEQ ID NO: 1029356 - DNA, 15 bp, Homo sapiens
cctttcccttgcagg

SEQ ID NO: 1029357 - DNA, 15 bp, Homo sapiens
ctttcccttgcaggc

SEQ ID NO: 1029358 - DNA, 15 bp, Homo sapiens
tttcccttgcaggcc

SEQ ID NO: 1029359 - DNA, 15 bp, Homo sapiens
ttcccttgcaggcct

SEQ ID NO: 1029360 - DNA, 15 bp, Homo sapiens
tcccttgcaggcctc

SEQ ID NO: 1029361 - DNA, 15 bp, Homo sapiens
cccttgcaggcctct

SEQ ID NO: 1029362 - DNA, 15 bp, Homo sapiens
ccttgcaggcctctg

SEQ ID NO: 1029363 - DNA, 15 bp, Homo sapiens
cttgcaggcctctgg

SEQ ID NO: 1029364 - DNA, 15 bp, Homo sapiens
ttgcaggcctctgga

SEQ ID NO: 1029365 - DNA, 15 bp, Homo sapiens
tgcaggcctctggag

SEQ ID NO: 1029366 - DNA, 15 bp, Homo sapiens
gcaggcctctggagc

SEQ ID NO: 1029367 - DNA, 15 bp, Homo sapiens
caggcctctggagcc

SEQ ID NO: 1029368 - DNA, 15 bp, Homo sapiens
aggcctctggagcct

SEQ ID NO: 1029369 - DNA, 15 bp, Homo sapiens
ggcctctggagcctc

SEQ ID NO: 1029370 - DNA, 15 bp, Homo sapiens
gcctctggagcctcg

SEQ ID NO: 1029371 - DNA, 15 bp, Homo sapiens
cctctggagcctcgt

SEQ ID NO: 1029372 - DNA, 15 bp, Homo sapiens
ctctggagcctcgtg

SEQ ID NO: 1029373 - DNA, 15 bp, Homo sapiens
tctggagcctcgtgc

SEQ ID NO: 1029374 - DNA, 15 bp, Homo sapiens
ctggagcctcgtgcc

SEQ ID NO: 1029375 - DNA, 15 bp, Homo sapiens
tggagcctcgtgcct

SEQ ID NO: 1029376 - DNA, 15 bp, Homo sapiens
ggagcctcgtgcctg

SEQ ID NO: 1029377 - DNA, 15 bp, Homo sapiens
gagcctcgtgcctgg

SEQ ID NO: 1029378 - DNA, 15 bp, Homo sapiens
agcctcgtgcctggc

SEQ ID NO: 1029379 - DNA, 15 bp, Homo sapiens
gcctcgtgcctggcc

SEQ ID NO: 1029380 - DNA, 15 bp, Homo sapiens
cctcgtgcctggccc

SEQ ID NO: 1029381 - DNA, 15 bp, Homo sapiens
ctcgtgcctggcccg

SEQ ID NO: 1029382 - DNA, 15 bp, Homo sapiens
tcgtgcctggcccgg

SEQ ID NO: 1029383 - DNA, 15 bp, Homo sapiens
cgtgcctggcccgga

SEQ ID NO: 1029384 - DNA, 15 bp, Homo sapiens
gtgcctggcccggac

SEQ ID NO: 1029385 - DNA, 15 bp, Homo sapiens
tgcctggcccggaca

SEQ ID NO: 1029386 - DNA, 15 bp, Homo sapiens
gcctggcccggacat

SEQ ID NO: 1029387 - DNA, 15 bp, Homo sapiens
cctggcccggacatc

SEQ ID NO: 1029388 - DNA, 15 bp, Homo sapiens
ctggcccggacatct

SEQ ID NO: 1029389 - DNA, 15 bp, Homo sapiens
tggcccggacatctg

SEQ ID NO: 1029390 - DNA, 15 bp, Homo sapiens
ggcccggacatctgg

SEQ ID NO: 1029391 - DNA, 15 bp, Homo sapiens
gcccggacatctggt

SEQ ID NO: 1029392 - DNA, 15 bp, Homo sapiens
cccggacatctggtc

SEQ ID NO: 1029393 - DNA, 15 bp, Homo sapiens
ccggacatctggtcc

SEQ ID NO: 1029394 - DNA, 15 bp, Homo sapiens
cggacatctggtccc

SEQ ID NO: 1029395 - DNA, 15 bp, Homo sapiens
ggacatctggtccct

SEQ ID NO: 1029396 - DNA, 15 bp, Homo sapiens
gacatctggtccctc

SEQ ID NO: 1029397 - DNA, 15 bp, Homo sapiens
acatctggtccctca

SEQ ID NO: 1029398 - DNA, 15 bp, Homo sapiens
catctggtccctcag

SEQ ID NO: 1029399 - DNA, 15 bp, Homo sapiens
atctggtccctcaga

SEQ ID NO: 1029400 - DNA, 15 bp, Homo sapiens
tctggtccctcagag

SEQ ID NO: 1029401 - DNA, 15 bp, Homo sapiens
ctggtccctcagagt

SEQ ID NO: 1029402 - DNA, 15 bp, Homo sapiens
tggtccctcagagtg

SEQ ID NO: 1029403 - DNA, 15 bp, Homo sapiens
ggtccctcagagtgg

SEQ ID NO: 1029404 - DNA, 15 bp, Homo sapiens
gtccctcagagtggc

SEQ ID NO: 1029405 - DNA, 15 bp, Homo sapiens
tccctcagagtggca

SEQ ID NO: 1029406 - DNA, 15 bp, Homo sapiens
ccctcagagtggcag

SEQ ID NO: 1029407 - DNA, 15 bp, Homo sapiens
cctcagagtggcagc

SEQ ID NO: 1029408 - DNA, 15 bp, Homo sapiens
ctcagagtggcagct

SEQ ID NO: 1029409 - DNA, 15 bp, Homo sapiens
tcagagtggcagctg

SEQ ID NO: 1029410 - DNA, 15 bp, Homo sapiens
cagagtggcagctgc

SEQ ID NO: 1029411 - DNA, 15 bp, Homo sapiens
agagtggcagctgca

SEQ ID NO: 1029412 - DNA, 15 bp, Homo sapiens
gagtggcagctgcag

SEQ ID NO: 1029413 - DNA, 15 bp, Homo sapiens
agtggcagctgcagc

SEQ ID NO: 1029414 - DNA, 15 bp, Homo sapiens
gtggcagctgcagca

SEQ ID NO: 1029415 - DNA, 15 bp, Homo sapiens
tggcagctgcagcaa

SEQ ID NO: 1029416 - DNA, 15 bp, Homo sapiens
ggcagctgcagcaag

SEQ ID NO: 1029417 - DNA, 15 bp, Homo sapiens
gcagctgcagcaaga

SEQ ID NO: 1029418 - DNA, 15 bp, Homo sapiens
cagctgcagcaagag

SEQ ID NO: 1029419 - DNA, 15 bp, Homo sapiens
agctgcagcaagagg

SEQ ID NO: 1029420 - DNA, 15 bp, Homo sapiens
gctgcagcaagaggc

SEQ ID NO: 1029421 - DNA, 15 bp, Homo sapiens
ctgcagcaagaggca

SEQ ID NO: 1029422 - DNA, 15 bp, Homo sapiens
tgcagcaagaggcag

SEQ ID NO: 1029423 - DNA, 15 bp, Homo sapiens
gcagcaagaggcagc

SEQ ID NO: 1029424 - DNA, 15 bp, Homo sapiens
cagcaagaggcagct

SEQ ID NO: 1029425 - DNA, 15 bp, Homo sapiens
agcaagaggcagctg

SEQ ID NO: 1029426 - DNA, 15 bp, Homo sapiens
gcaagaggcagctga

SEQ ID NO: 1029427 - DNA, 15 bp, Homo sapiens
caagaggcagctgaa

SEQ ID NO: 1029428 - DNA, 15 bp, Homo sapiens
aagaggcagctgaag

SEQ ID NO: 1029429 - DNA, 15 bp, Homo sapiens
agaggcagctgaagc

SEQ ID NO: 1029430 - DNA, 15 bp, Homo sapiens
gaggcagctgaagcc

SEQ ID NO: 1029431 - DNA, 15 bp, Homo sapiens
aggcagctgaagccc

SEQ ID NO: 1029432 - DNA, 15 bp, Homo sapiens
ggcagctgaagccct

SEQ ID NO: 1029433 - DNA, 15 bp, Homo sapiens
gcagctgaagccctc

SEQ ID NO: 1029434 - DNA, 15 bp, Homo sapiens
cagctgaagccctcg

SEQ ID NO: 1029435 - DNA, 15 bp, Homo sapiens
agctgaagccctcgt

SEQ ID NO: 1029436 - DNA, 15 bp, Homo sapiens
gctgaagccctcgtg

SEQ ID NO: 1029437 - DNA, 15 bp, Homo sapiens
ctgaagccctcgtgg

SEQ ID NO: 1029438 - DNA, 15 bp, Homo sapiens
tgaagccctcgtggg

SEQ ID NO: 1029439 - DNA, 15 bp, Homo sapiens
gaagccctcgtgggg

SEQ ID NO: 1029440 - DNA, 15 bp, Homo sapiens
aagccctcgtggggc

SEQ ID NO: 1029441 - DNA, 15 bp, Homo sapiens
agccctcgtggggct

SEQ ID NO: 1029442 - DNA, 15 bp, Homo sapiens
gccctcgtggggctg

SEQ ID NO: 1029443 - DNA, 15 bp, Homo sapiens
ccctcgtggggctga

SEQ ID NO: 1029444 - DNA, 15 bp, Homo sapiens
cctcgtggggctgaa

SEQ ID NO: 1029445 - DNA, 15 bp, Homo sapiens
ctcgtggggctgaaa

SEQ ID NO: 1029446 - DNA, 15 bp, Homo sapiens
tcgtggggctgaaag

SEQ ID NO: 1029447 - DNA, 15 bp, Homo sapiens
cgtggggctgaaaga

SEQ ID NO: 1029448 - DNA, 15 bp, Homo sapiens
gtggggctgaaagat

SEQ ID NO: 1029449 - DNA, 15 bp, Homo sapiens
tggggctgaaagatt

SEQ ID NO: 1029450 - DNA, 15 bp, Homo sapiens
aaaatcataacaata

SEQ ID NO: 1029451 - DNA, 15 bp, Homo sapiens
aaatcataacaatag

SEQ ID NO: 1029452 - DNA, 15 bp, Homo sapiens
aatcataacaatagt

SEQ ID NO: 1029453 - DNA, 15 bp, Homo sapiens
atcataacaatagtg

SEQ ID NO: 1029454 - DNA, 15 bp, Homo sapiens
tcataacaatagtga

SEQ ID NO: 1029455 - DNA, 15 bp, Homo sapiens
cataacaatagtgaa

SEQ ID NO: 1029456 - DNA, 15 bp, Homo sapiens
ataacaatagtgaaa

SEQ ID NO: 1029457 - DNA, 15 bp, Homo sapiens
taacaatagtgaaaa

SEQ ID NO: 1029458 - DNA, 15 bp, Homo sapiens
aacaatagtgaaaat

SEQ ID NO: 1029459 - DNA, 15 bp, Homo sapiens
acaatagtgaaaatg

SEQ ID NO: 1029460 - DNA, 15 bp, Homo sapiens
caatagtgaaaatgg

SEQ ID NO: 1029461 - DNA, 15 bp, Homo sapiens
aatagtgaaaatggg

SEQ ID NO: 1029462 - DNA, 15 bp, Homo sapiens
atagtgaaaatggga

SEQ ID NO: 1029463 - DNA, 15 bp, Homo sapiens
tagtgaaaatgggac

SEQ ID NO: 1029464 - DNA, 15 bp, Homo sapiens
agtgaaaatgggaca

SEQ ID NO: 1029465 - DNA, 15 bp, Homo sapiens
gtgaaaatgggacat

SEQ ID NO: 1029466 - DNA, 15 bp, Homo sapiens
tgaaaatgggacatc

SEQ ID NO: 1029467 - DNA, 15 bp, Homo sapiens
gaaaatgggacatct

SEQ ID NO: 1029468 - DNA, 15 bp, Homo sapiens
aaaatgggacatctc

SEQ ID NO: 1029469 - DNA, 15 bp, Homo sapiens
aaatgggacatctca

SEQ ID NO: 1029470 - DNA, 15 bp, Homo sapiens
aatgggacatctcat

SEQ ID NO: 1029471 - DNA, 15 bp, Homo sapiens
atgggacatctcatt

SEQ ID NO: 1029472 - DNA, 15 bp, Homo sapiens
tgggacatctcattc

SEQ ID NO: 1029473 - DNA, 15 bp, Homo sapiens
gggacatctcattct

SEQ ID NO: 1029474 - DNA, 15 bp, Homo sapiens
ggacatctcattctt

SEQ ID NO: 1029475 - DNA, 15 bp, Homo sapiens
gacatctcattctta

SEQ ID NO: 1029476 - DNA, 15 bp, Homo sapiens
acatctcattcttac

SEQ ID NO: 1029477 - DNA, 15 bp, Homo sapiens
catctcattcttacc

SEQ ID NO: 1029478 - DNA, 15 bp, Homo sapiens
atctcattcttacct

SEQ ID NO: 1029479 - DNA, 15 bp, Homo sapiens
tctcattcttacctg

SEQ ID NO: 1029480 - DNA, 15 bp, Homo sapiens
ctcattcttacctgg

SEQ ID NO: 1029481 - DNA, 15 bp, Homo sapiens
tcattcttacctgga

SEQ ID NO: 1029482 - DNA, 15 bp, Homo sapiens
cattcttacctggaa

SEQ ID NO: 1029483 - DNA, 15 bp, Homo sapiens
attcttacctggaaa

SEQ ID NO: 1029484 - DNA, 15 bp, Homo sapiens
ttcttacctggaaag

SEQ ID NO: 1029485 - DNA, 15 bp, Homo sapiens
tcttacctggaaagt

SEQ ID NO: 1029486 - DNA, 15 bp, Homo sapiens
cttacctggaaagtc

SEQ ID NO: 1029487 - DNA, 15 bp, Homo sapiens
ttacctggaaagtct

SEQ ID NO: 1029488 - DNA, 15 bp, Homo sapiens
tacctggaaagtcta

SEQ ID NO: 1029489 - DNA, 15 bp, Homo sapiens
acctggaaagtctaa

SEQ ID NO: 1029490 - DNA, 15 bp, Homo sapiens
cctggaaagtctaag

SEQ ID NO: 1029491 - DNA, 15 bp, Homo sapiens
ctggaaagtctaagt

SEQ ID NO: 1029492 - DNA, 15 bp, Homo sapiens
tggaaagtctaagtc

SEQ ID NO: 1029493 - DNA, 15 bp, Homo sapiens
ggaaagtctaagtca

SEQ ID NO: 1029494 - DNA, 15 bp, Homo sapiens
gaaagtctaagtcac

SEQ ID NO: 1029495 - DNA, 15 bp, Homo sapiens
aaagtctaagtcact

SEQ ID NO: 1029496 - DNA, 15 bp, Homo sapiens
aagtctaagtcactt

SEQ ID NO: 1029497 - DNA, 15 bp, Homo sapiens
agtctaagtcacttt

SEQ ID NO: 1029498 - DNA, 15 bp, Homo sapiens
gtctaagtcactttg

SEQ ID NO: 1029499 - DNA, 15 bp, Homo sapiens
tctaagtcactttga

SEQ ID NO: 1029500 - DNA, 15 bp, Homo sapiens
ctaagtcactttgac

SEQ ID NO: 1029501 - DNA, 15 bp, Homo sapiens
taagtcactttgaca

SEQ ID NO: 1029502 - DNA, 15 bp, Homo sapiens
aagtcactttgacac

SEQ ID NO: 1029503 - DNA, 15 bp, Homo sapiens
agtcactttgacaca

SEQ ID NO: 1029504 - DNA, 15 bp, Homo sapiens
gtcactttgacacag

SEQ ID NO: 1029505 - DNA, 15 bp, Homo sapiens
tcactttgacacaga

SEQ ID NO: 1029506 - DNA, 15 bp, Homo sapiens
cactttgacacagag

SEQ ID NO: 1029507 - DNA, 15 bp, Homo sapiens
actttgacacagaga

SEQ ID NO: 1029508 - DNA, 15 bp, Homo sapiens
ctttgacacagagaa

SEQ ID NO: 1029509 - DNA, 15 bp, Homo sapiens
tttgacacagagaag

SEQ ID NO: 1029510 - DNA, 15 bp, Homo sapiens
ttgacacagagaagc

SEQ ID NO: 1029511 - DNA, 15 bp, Homo sapiens
tgacacagagaagca

SEQ ID NO: 1029512 - DNA, 15 bp, Homo sapiens
gacacagagaagcag

SEQ ID NO: 1029513 - DNA, 15 bp, Homo sapiens
acacagagaagcagt

SEQ ID NO: 1029514 - DNA, 15 bp, Homo sapiens
cacagagaagcagtc

SEQ ID NO: 1029515 - DNA, 15 bp, Homo sapiens
acagagaagcagtca

SEQ ID NO: 1029516 - DNA, 15 bp, Homo sapiens
cagagaagcagtcat

SEQ ID NO: 1029517 - DNA, 15 bp, Homo sapiens
agagaagcagtcatg

SEQ ID NO: 1029518 - DNA, 15 bp, Homo sapiens
gagaagcagtcatga

SEQ ID NO: 1029519 - DNA, 15 bp, Homo sapiens
agaagcagtcatgat

SEQ ID NO: 1029520 - DNA, 15 bp, Homo sapiens
gaagcagtcatgatc

SEQ ID NO: 1029521 - DNA, 15 bp, Homo sapiens
aagcagtcatgatct

SEQ ID NO: 1029522 - DNA, 15 bp, Homo sapiens
agcagtcatgatctc

SEQ ID NO: 1029523 - DNA, 15 bp, Homo sapiens
gcagtcatgatctca

SEQ ID NO: 1029524 - DNA, 15 bp, Homo sapiens
cagtcatgatctcag

SEQ ID NO: 1029525 - DNA, 15 bp, Homo sapiens
agtcatgatctcaga

SEQ ID NO: 1029526 - DNA, 15 bp, Homo sapiens
gtcatgatctcagag

SEQ ID NO: 1029527 - DNA, 15 bp, Homo sapiens
tcatgatctcagaga

SEQ ID NO: 1029528 - DNA, 15 bp, Homo sapiens
catgatctcagagaa

SEQ ID NO: 1029529 - DNA, 15 bp, Homo sapiens
atgatctcagagaag

SEQ ID NO: 1029530 - DNA, 15 bp, Homo sapiens
tgatctcagagaagc

SEQ ID NO: 1029531 - DNA, 15 bp, Homo sapiens
gatctcagagaagcg

SEQ ID NO: 1029532 - DNA, 15 bp, Homo sapiens
atctcagagaagcgg

SEQ ID NO: 1029533 - DNA, 15 bp, Homo sapiens
tctcagagaagcggt

SEQ ID NO: 1029534 - DNA, 15 bp, Homo sapiens
ctcagagaagcggtt

SEQ ID NO: 1029535 - DNA, 15 bp, Homo sapiens
tcagagaagcggttt

SEQ ID NO: 1029536 - DNA, 15 bp, Homo sapiens
cagagaagcggtttt

SEQ ID NO: 1029537 - DNA, 15 bp, Homo sapiens
agagaagcggttttt

SEQ ID NO: 1029538 - DNA, 15 bp, Homo sapiens
gagaagcggttttta

SEQ ID NO: 1029539 - DNA, 15 bp, Homo sapiens
agaagcggtttttag

SEQ ID NO: 1029540 - DNA, 15 bp, Homo sapiens
gaagcggtttttaga

SEQ ID NO: 1029541 - DNA, 15 bp, Homo sapiens
aagcggtttttagag

SEQ ID NO: 1029542 - DNA, 15 bp, Homo sapiens
agcggtttttagaga

SEQ ID NO: 1029543 - DNA, 15 bp, Homo sapiens
gcggtttttagagac

SEQ ID NO: 1029544 - DNA, 15 bp, Homo sapiens
cggtttttagagaca

SEQ ID NO: 1029545 - DNA, 15 bp, Homo sapiens
ggtttttagagacaa

SEQ ID NO: 1029546 - DNA, 15 bp, Homo sapiens
gtttttagagacaac

SEQ ID NO: 1029547 - DNA, 15 bp, Homo sapiens
tttttagagacaaca

SEQ ID NO: 1029548 - DNA, 15 bp, Homo sapiens
ttttagagacaacat

SEQ ID NO: 1029549 - DNA, 15 bp, Homo sapiens
tttagagacaacatt

SEQ ID NO: 1029550 - DNA, 15 bp, Homo sapiens
ttagagacaacattg

SEQ ID NO: 1029551 - DNA, 15 bp, Homo sapiens
tagagacaacattgt

SEQ ID NO: 1029552 - DNA, 15 bp, Homo sapiens
agagacaacattgta

SEQ ID NO: 1029553 - DNA, 15 bp, Homo sapiens
gagacaacattgtac

SEQ ID NO: 1029554 - DNA, 15 bp, Homo sapiens
agacaacattgtaca

SEQ ID NO: 1029555 - DNA, 15 bp, Homo sapiens
gacaacattgtacat

SEQ ID NO: 1029556 - DNA, 15 bp, Homo sapiens
acaacattgtacatt

SEQ ID NO: 1029557 - DNA, 15 bp, Homo sapiens
caacattgtacattt

SEQ ID NO: 1029558 - DNA, 15 bp, Homo sapiens
aacattgtacattta

SEQ ID NO: 1029559 - DNA, 15 bp, Homo sapiens
acattgtacatttat

SEQ ID NO: 1029560 - DNA, 15 bp, Homo sapiens
cattgtacatttatc

SEQ ID NO: 1029561 - DNA, 15 bp, Homo sapiens
attgtacatttatct

SEQ ID NO: 1029562 - DNA, 15 bp, Homo sapiens
ttgtacatttatcta

SEQ ID NO: 1029563 - DNA, 15 bp, Homo sapiens
tgtacatttatctaa

SEQ ID NO: 1029564 - DNA, 15 bp, Homo sapiens
gtacatttatctaaa

SEQ ID NO: 1029565 - DNA, 15 bp, Homo sapiens
tacatttatctaaac

SEQ ID NO: 1029566 - DNA, 15 bp, Homo sapiens
acatttatctaaact

SEQ ID NO: 1029567 - DNA, 15 bp, Homo sapiens
catttatctaaactt

SEQ ID NO: 1029568 - DNA, 15 bp, Homo sapiens
atttatctaaacttt

SEQ ID NO: 1029569 - DNA, 15 bp, Homo sapiens
tttatctaaactttc

SEQ ID NO: 1029570 - DNA, 15 bp, Homo sapiens
ttatctaaactttct

SEQ ID NO: 1029571 - DNA, 15 bp, Homo sapiens
tatctaaactttcta

SEQ ID NO: 1029572 - DNA, 15 bp, Homo sapiens
atctaaactttctaa

SEQ ID NO: 1029573 - DNA, 15 bp, Homo sapiens
tctaaactttctaat

SEQ ID NO: 1029574 - DNA, 15 bp, Homo sapiens
ctaaactttctaatg

SEQ ID NO: 1029575 - DNA, 15 bp, Homo sapiens
taaactttctaatgt

SEQ ID NO: 1029576 - DNA, 15 bp, Homo sapiens
aaactttctaatgtc

SEQ ID NO: 1029577 - DNA, 15 bp, Homo sapiens
aactttctaatgtcc

SEQ ID NO: 1029578 - DNA, 15 bp, Homo sapiens
actttctaatgtcca

SEQ ID NO: 1029579 - DNA, 15 bp, Homo sapiens
ctttctaatgtccaa

SEQ ID NO: 1029580 - DNA, 15 bp, Homo sapiens
tttctaatgtccaag

SEQ ID NO: 1029581 - DNA, 15 bp, Homo sapiens
ttctaatgtccaagg

SEQ ID NO: 1029582 - DNA, 15 bp, Homo sapiens
tctaatgtccaagga

SEQ ID NO: 1029583 - DNA, 15 bp, Homo sapiens
ctaatgtccaaggaa

SEQ ID NO: 1029584 - DNA, 15 bp, Homo sapiens
taatgtccaaggaag

SEQ ID NO: 1029585 - DNA, 15 bp, Homo sapiens
aatgtccaaggaagc

SEQ ID NO: 1029586 - DNA, 15 bp, Homo sapiens
atgtccaaggaagca

SEQ ID NO: 1029587 - DNA, 15 bp, Homo sapiens
tgtccaaggaagcag

SEQ ID NO: 1029588 - DNA, 15 bp, Homo sapiens
gtccaaggaagcaga

SEQ ID NO: 1029589 - DNA, 15 bp, Homo sapiens
tccaaggaagcagaa

SEQ ID NO: 1029590 - DNA, 15 bp, Homo sapiens
ccaaggaagcagaat

SEQ ID NO: 1029591 - DNA, 15 bp, Homo sapiens
caaggaagcagaatc

SEQ ID NO: 1029592 - DNA, 15 bp, Homo sapiens
aaggaagcagaatcc

SEQ ID NO: 1029593 - DNA, 15 bp, Homo sapiens
aggaagcagaatcct

SEQ ID NO: 1029594 - DNA, 15 bp, Homo sapiens
ggaagcagaatcctg

SEQ ID NO: 1029595 - DNA, 15 bp, Homo sapiens
gaagcagaatcctgg

SEQ ID NO: 1029596 - DNA, 15 bp, Homo sapiens
aagcagaatcctggg

SEQ ID NO: 1029597 - DNA, 15 bp, Homo sapiens
agcagaatcctgggt

SEQ ID NO: 1029598 - DNA, 15 bp, Homo sapiens
gcagaatcctgggtc

SEQ ID NO: 1029599 - DNA, 15 bp, Homo sapiens
cagaatcctgggtct

SEQ ID NO: 1029600 - DNA, 15 bp, Homo sapiens
agaatcctgggtctg

SEQ ID NO: 1029601 - DNA, 15 bp, Homo sapiens
gaatcctgggtctgc

SEQ ID NO: 1029602 - DNA, 15 bp, Homo sapiens
aatcctgggtctgct

SEQ ID NO: 1029603 - DNA, 15 bp, Homo sapiens
atcctgggtctgctc

SEQ ID NO: 1029604 - DNA, 15 bp, Homo sapiens
tcctgggtctgctcc

SEQ ID NO: 1029605 - DNA, 15 bp, Homo sapiens
cctgggtctgctcct

SEQ ID NO: 1029606 - DNA, 15 bp, Homo sapiens
ctgggtctgctcctc

SEQ ID NO: 1029607 - DNA, 15 bp, Homo sapiens
tgggtctgctcctcg

SEQ ID NO: 1029608 - DNA, 15 bp, Homo sapiens
gggtctgctcctcgc

SEQ ID NO: 1029609 - DNA, 15 bp, Homo sapiens
ggtctgctcctcgcc

SEQ ID NO: 1029610 - DNA, 15 bp, Homo sapiens
gtctgctcctcgccc

SEQ ID NO: 1029611 - DNA, 15 bp, Homo sapiens
tctgctcctcgccca

SEQ ID NO: 1029612 - DNA, 15 bp, Homo sapiens
ctgctcctcgcccag

SEQ ID NO: 1029613 - DNA, 15 bp, Homo sapiens
tgctcctcgcccagg

SEQ ID NO: 1029614 - DNA, 15 bp, Homo sapiens
gctcctcgcccaggc

SEQ ID NO: 1029615 - DNA, 15 bp, Homo sapiens
ctcctcgcccaggca

SEQ ID NO: 1029616 - DNA, 15 bp, Homo sapiens
tcctcgcccaggcat

SEQ ID NO: 1029617 - DNA, 15 bp, Homo sapiens
cctcgcccaggcatg

SEQ ID NO: 1029618 - DNA, 15 bp, Homo sapiens
ctcgcccaggcatga

SEQ ID NO: 1029619 - DNA, 15 bp, Homo sapiens
tcgcccaggcatgat

SEQ ID NO: 1029620 - DNA, 15 bp, Homo sapiens
cgcccaggcatgatg

SEQ ID NO: 1029621 - DNA, 15 bp, Homo sapiens
gcccaggcatgatgt

SEQ ID NO: 1029622 - DNA, 15 bp, Homo sapiens
cccaggcatgatgtt

SEQ ID NO: 1029623 - DNA, 15 bp, Homo sapiens
ccaggcatgatgtta

SEQ ID NO: 1029624 - DNA, 15 bp, Homo sapiens
caggcatgatgttag

SEQ ID NO: 1029625 - DNA, 15 bp, Homo sapiens
aggcatgatgttagc

SEQ ID NO: 1029626 - DNA, 15 bp, Homo sapiens
ggcatgatgttagct

SEQ ID NO: 1029627 - DNA, 15 bp, Homo sapiens
gcatgatgttagctc

SEQ ID NO: 1029628 - DNA, 15 bp, Homo sapiens
catgatgttagctcc

SEQ ID NO: 1029629 - DNA, 15 bp, Homo sapiens
atgatgttagctccg

SEQ ID NO: 1029630 - DNA, 15 bp, Homo sapiens
tgatgttagctccgt

SEQ ID NO: 1029631 - DNA, 15 bp, Homo sapiens
gatgttagctccgtt

SEQ ID NO: 1029632 - DNA, 15 bp, Homo sapiens
atgttagctccgttg

SEQ ID NO: 1029633 - DNA, 15 bp, Homo sapiens
tgttagctccgttgc

SEQ ID NO: 1029634 - DNA, 15 bp, Homo sapiens
gttagctccgttgca

SEQ ID NO: 1029635 - DNA, 15 bp, Homo sapiens
ttagctccgttgcat

SEQ ID NO: 1029636 - DNA, 15 bp, Homo sapiens
tagctccgttgcata

SEQ ID NO: 1029637 - DNA, 15 bp, Homo sapiens
agctccgttgcataa

SEQ ID NO: 1029638 - DNA, 15 bp, Homo sapiens
gctccgttgcataaa

SEQ ID NO: 1029639 - DNA, 15 bp, Homo sapiens
ctccgttgcataaat

SEQ ID NO: 1029640 - DNA, 15 bp, Homo sapiens
tccgttgcataaata

SEQ ID NO: 1029641 - DNA, 15 bp, Homo sapiens
ccgttgcataaatac

SEQ ID NO: 1029642 - DNA, 15 bp, Homo sapiens
cgttgcataaataca

SEQ ID NO: 1029643 - DNA, 15 bp, Homo sapiens
gttgcataaatacat

SEQ ID NO: 1029644 - DNA, 15 bp, Homo sapiens
ttgcataaatacatg

SEQ ID NO: 1029645 - DNA, 15 bp, Homo sapiens
tgcataaatacatgc

SEQ ID NO: 1029646 - DNA, 15 bp, Homo sapiens
gcataaatacatgcc

SEQ ID NO: 1029647 - DNA, 15 bp, Homo sapiens
cataaatacatgcct

SEQ ID NO: 1029648 - DNA, 15 bp, Homo sapiens
ataaatacatgcctg

SEQ ID NO: 1029649 - DNA, 15 bp, Homo sapiens
taaatacatgcctgc

SEQ ID NO: 1029650 - DNA, 15 bp, Homo sapiens
aaatacatgcctgct

SEQ ID NO: 1029651 - DNA, 15 bp, Homo sapiens
aatacatgcctgctt

SEQ ID NO: 1029652 - DNA, 15 bp, Homo sapiens
atacatgcctgcttt

SEQ ID NO: 1029653 - DNA, 15 bp, Homo sapiens
tacatgcctgctttg

SEQ ID NO: 1029654 - DNA, 15 bp, Homo sapiens
acatgcctgctttgc

SEQ ID NO: 1029655 - DNA, 15 bp, Homo sapiens
catgcctgctttgcc

SEQ ID NO: 1029656 - DNA, 15 bp, Homo sapiens
atgcctgctttgcct

SEQ ID NO: 1029657 - DNA, 15 bp, Homo sapiens
tgcctgctttgcctt

SEQ ID NO: 1029658 - DNA, 15 bp, Homo sapiens
gcctgctttgcctta

SEQ ID NO: 1029659 - DNA, 15 bp, Homo sapiens
cctgctttgccttat

SEQ ID NO: 1029660 - DNA, 15 bp, Homo sapiens
ctgctttgccttatg

SEQ ID NO: 1029661 - DNA, 15 bp, Homo sapiens
tgctttgccttatgt

SEQ ID NO: 1029662 - DNA, 15 bp, Homo sapiens
gctttgccttatgtc

SEQ ID NO: 1029663 - DNA, 15 bp, Homo sapiens
ctttgccttatgtcc

SEQ ID NO: 1029664 - DNA, 15 bp, Homo sapiens
tttgccttatgtcca

SEQ ID NO: 1029665 - DNA, 15 bp, Homo sapiens
ttgccttatgtccat

SEQ ID NO: 1029666 - DNA, 15 bp, Homo sapiens
tgccttatgtccatc

SEQ ID NO: 1029667 - DNA, 15 bp, Homo sapiens
gccttatgtccatca

SEQ ID NO: 1029668 - DNA, 15 bp, Homo sapiens
ccttatgtccatcaa

SEQ ID NO: 1029669 - DNA, 15 bp, Homo sapiens
cttatgtccatcaaa

SEQ ID NO: 1029670 - DNA, 15 bp, Homo sapiens
ttatgtccatcaaaa

SEQ ID NO: 1029671 - DNA, 15 bp, Homo sapiens
tatgtccatcaaaac

SEQ ID NO: 1029672 - DNA, 15 bp, Homo sapiens
atgtccatcaaaact

SEQ ID NO: 1029673 - DNA, 15 bp, Homo sapiens
tgtccatcaaaactc

SEQ ID NO: 1029674 - DNA, 15 bp, Homo sapiens
gtccatcaaaactct

SEQ ID NO: 1029675 - DNA, 15 bp, Homo sapiens
tccatcaaaactctg

SEQ ID NO: 1029676 - DNA, 15 bp, Homo sapiens
ccatcaaaactctgc

SEQ ID NO: 1029677 - DNA, 15 bp, Homo sapiens
catcaaaactctgct

SEQ ID NO: 1029678 - DNA, 15 bp, Homo sapiens
atcaaaactctgctt

SEQ ID NO: 1029679 - DNA, 15 bp, Homo sapiens
tcaaaactctgcttt

SEQ ID NO: 1029680 - DNA, 15 bp, Homo sapiens
caaaactctgcttta

SEQ ID NO: 1029681 - DNA, 15 bp, Homo sapiens
aaaactctgctttat

SEQ ID NO: 1029682 - DNA, 15 bp, Homo sapiens
aaactctgctttata

SEQ ID NO: 1029683 - DNA, 15 bp, Homo sapiens
aactctgctttatat

SEQ ID NO: 1029684 - DNA, 15 bp, Homo sapiens
actctgctttatata

SEQ ID NO: 1029685 - DNA, 15 bp, Homo sapiens
ctctgctttatataa

SEQ ID NO: 1029686 - DNA, 15 bp, Homo sapiens
tctgctttatataaa

SEQ ID NO: 1029687 - DNA, 15 bp, Homo sapiens
ctgctttatataaat

SEQ ID NO: 1029688 - DNA, 15 bp, Homo sapiens
tgctttatataaatt

SEQ ID NO: 1029689 - DNA, 15 bp, Homo sapiens
gctttatataaattt

SEQ ID NO: 1029690 - DNA, 15 bp, Homo sapiens
ctttatataaatttt

SEQ ID NO: 1029691 - DNA, 15 bp, Homo sapiens
tttatataaatttta

SEQ ID NO: 1029692 - DNA, 15 bp, Homo sapiens
ttatataaattttac

SEQ ID NO: 1029693 - DNA, 15 bp, Homo sapiens
tatataaattttacc

SEQ ID NO: 1029694 - DNA, 15 bp, Homo sapiens
atataaattttacct

SEQ ID NO: 1029695 - DNA, 15 bp, Homo sapiens
tataaattttaccta

SEQ ID NO: 1029696 - DNA, 15 bp, Homo sapiens
ataaattttacctaa

SEQ ID NO: 1029697 - DNA, 15 bp, Homo sapiens
taaattttacctaag

SEQ ID NO: 1029698 - DNA, 15 bp, Homo sapiens
aaattttacctaagc

SEQ ID NO: 1029699 - DNA, 15 bp, Homo sapiens
aattttacctaagct

SEQ ID NO: 1029700 - DNA, 15 bp, Homo sapiens
attttacctaagctt

SEQ ID NO: 1029701 - DNA, 15 bp, Homo sapiens
ttttacctaagcttc

SEQ ID NO: 1029702 - DNA, 15 bp, Homo sapiens
tttacctaagcttca

SEQ ID NO: 1029703 - DNA, 15 bp, Homo sapiens
ttacctaagcttcac

SEQ ID NO: 1029704 - DNA, 15 bp, Homo sapiens
tacctaagcttcact

SEQ ID NO: 1029705 - DNA, 15 bp, Homo sapiens
acctaagcttcactc

SEQ ID NO: 1029706 - DNA, 15 bp, Homo sapiens
cctaagcttcactct

SEQ ID NO: 1029707 - DNA, 15 bp, Homo sapiens
ctaagcttcactctt

SEQ ID NO: 1029708 - DNA, 15 bp, Homo sapiens
taagcttcactcttc

SEQ ID NO: 1029709 - DNA, 15 bp, Homo sapiens
aagcttcactcttcc

SEQ ID NO: 1029710 - DNA, 15 bp, Homo sapiens
agcttcactcttccc

SEQ ID NO: 1029711 - DNA, 15 bp, Homo sapiens
gcttcactcttccca

SEQ ID NO: 1029712 - DNA, 15 bp, Homo sapiens
cttcactcttcccaa

SEQ ID NO: 1029713 - DNA, 15 bp, Homo sapiens
ttcactcttcccaaa

SEQ ID NO: 1029714 - DNA, 15 bp, Homo sapiens
tcactcttcccaaaa

SEQ ID NO: 1029715 - DNA, 15 bp, Homo sapiens
cactcttcccaaaat

SEQ ID NO: 1029716 - DNA, 15 bp, Homo sapiens
actcttcccaaaatc

SEQ ID NO: 1029717 - DNA, 15 bp, Homo sapiens
ctcttcccaaaatcc

SEQ ID NO: 1029718 - DNA, 15 bp, Homo sapiens
tcttcccaaaatcct

SEQ ID NO: 1029719 - DNA, 15 bp, Homo sapiens
cttcccaaaatccta

SEQ ID NO: 1029720 - DNA, 15 bp, Homo sapiens
ttcccaaaatcctat

SEQ ID NO: 1029721 - DNA, 15 bp, Homo sapiens
tcccaaaatcctata

SEQ ID NO: 1029722 - DNA, 15 bp, Homo sapiens
cccaaaatcctatat

SEQ ID NO: 1029723 - DNA, 15 bp, Homo sapiens
ccaaaatcctatatt

SEQ ID NO: 1029724 - DNA, 15 bp, Homo sapiens
caaaatcctatattc

SEQ ID NO: 1029725 - DNA, 15 bp, Homo sapiens
aaaatcctatattca

SEQ ID NO: 1029726 - DNA, 15 bp, Homo sapiens
aaatcctatattcac

SEQ ID NO: 1029727 - DNA, 15 bp, Homo sapiens
aatcctatattcacc

SEQ ID NO: 1029728 - DNA, 15 bp, Homo sapiens
atcctatattcaccc

SEQ ID NO: 1029729 - DNA, 15 bp, Homo sapiens
tcctatattcaccct

SEQ ID NO: 1029730 - DNA, 15 bp, Homo sapiens
cctatattcaccctg

SEQ ID NO: 1029731 - DNA, 15 bp, Homo sapiens
ctatattcaccctgt

SEQ ID NO: 1029732 - DNA, 15 bp, Homo sapiens
tatattcaccctgtc

SEQ ID NO: 1029733 - DNA, 15 bp, Homo sapiens
atattcaccctgtct

SEQ ID NO: 1029734 - DNA, 15 bp, Homo sapiens
tattcaccctgtctc

SEQ ID NO: 1029735 - DNA, 15 bp, Homo sapiens
attcaccctgtctct

SEQ ID NO: 1029736 - DNA, 15 bp, Homo sapiens
ttcaccctgtctctt

SEQ ID NO: 1029737 - DNA, 15 bp, Homo sapiens
tcaccctgtctcttc

SEQ ID NO: 1029738 - DNA, 15 bp, Homo sapiens
caccctgtctcttcc

SEQ ID NO: 1029739 - DNA, 15 bp, Homo sapiens
accctgtctcttcct

SEQ ID NO: 1029740 - DNA, 15 bp, Homo sapiens
ccctgtctcttcctt

SEQ ID NO: 1029741 - DNA, 15 bp, Homo sapiens
cctgtctcttccttt

SEQ ID NO: 1029742 - DNA, 15 bp, Homo sapiens
ctgtctcttcctttg

SEQ ID NO: 1029743 - DNA, 15 bp, Homo sapiens
tgtctcttcctttgg

SEQ ID NO: 1029744 - DNA, 15 bp, Homo sapiens
gtctcttcctttggt

SEQ ID NO: 1029745 - DNA, 15 bp, Homo sapiens
tctcttcctttggtc

SEQ ID NO: 1029746 - DNA, 15 bp, Homo sapiens
ctcttcctttggtca

SEQ ID NO: 1029747 - DNA, 15 bp, Homo sapiens
tcttcctttggtcag

SEQ ID NO: 1029748 - DNA, 15 bp, Homo sapiens
cttcctttggtcagg

SEQ ID NO: 1029749 - DNA, 15 bp, Homo sapiens
ttcctttggtcaggc

SEQ ID NO: 1029750 - DNA, 15 bp, Homo sapiens
tcctttggtcaggca

SEQ ID NO: 1029751 - DNA, 15 bp, Homo sapiens
cctttggtcaggcac

SEQ ID NO: 1029752 - DNA, 15 bp, Homo sapiens
ctttggtcaggcact

SEQ ID NO: 1029753 - DNA, 15 bp, Homo sapiens
tttggtcaggcactc

SEQ ID NO: 1029754 - DNA, 15 bp, Homo sapiens
ttggtcaggcactcc

SEQ ID NO: 1029755 - DNA, 15 bp, Homo sapiens
tggtcaggcactcca

SEQ ID NO: 1029756 - DNA, 15 bp, Homo sapiens
ggtcaggcactccag

SEQ ID NO: 1029757 - DNA, 15 bp, Homo sapiens
gtcaggcactccaga

SEQ ID NO: 1029758 - DNA, 15 bp, Homo sapiens
tcaggcactccagag

SEQ ID NO: 1029759 - DNA, 15 bp, Homo sapiens
caggcactccagagt

SEQ ID NO: 1029760 - DNA, 15 bp, Homo sapiens
aggcactccagagtt

SEQ ID NO: 1029761 - DNA, 15 bp, Homo sapiens
ggcactccagagttc

SEQ ID NO: 1029762 - DNA, 15 bp, Homo sapiens
gcactccagagttcc

SEQ ID NO: 1029763 - DNA, 15 bp, Homo sapiens
cactccagagttcct

SEQ ID NO: 1029764 - DNA, 15 bp, Homo sapiens
actccagagttcctc

SEQ ID NO: 1029765 - DNA, 15 bp, Homo sapiens
ctccagagttcctct

SEQ ID NO: 1029766 - DNA, 15 bp, Homo sapiens
tccagagttcctctg

SEQ ID NO: 1029767 - DNA, 15 bp, Homo sapiens
ccagagttcctctgg

SEQ ID NO: 1029768 - DNA, 15 bp, Homo sapiens
cagagttcctctgga

SEQ ID NO: 1029769 - DNA, 15 bp, Homo sapiens
agagttcctctggag

SEQ ID NO: 1029770 - DNA, 15 bp, Homo sapiens
gagttcctctggaga

SEQ ID NO: 1029771 - DNA, 15 bp, Homo sapiens
agttcctctggagag

SEQ ID NO: 1029772 - DNA, 15 bp, Homo sapiens
gttcctctggagagc

SEQ ID NO: 1029773 - DNA, 15 bp, Homo sapiens
ttcctctggagagct

SEQ ID NO: 1029774 - DNA, 15 bp, Homo sapiens
tcctctggagagctt

SEQ ID NO: 1029775 - DNA, 15 bp, Homo sapiens
cctctggagagcttt

SEQ ID NO: 1029776 - DNA, 15 bp, Homo sapiens
ctctggagagcttta

SEQ ID NO: 1029777 - DNA, 15 bp, Homo sapiens
tctggagagctttaa

SEQ ID NO: 1029778 - DNA, 15 bp, Homo sapiens
ctggagagctttaaa

SEQ ID NO: 1029779 - DNA, 15 bp, Homo sapiens
tggagagctttaaaa

SEQ ID NO: 1029780 - DNA, 15 bp, Homo sapiens
ggagagctttaaaaa

SEQ ID NO: 1029781 - DNA, 15 bp, Homo sapiens
gagagctttaaaaaa

SEQ ID NO: 1029782 - DNA, 15 bp, Homo sapiens
agagctttaaaaaaa

SEQ ID NO: 1029783 - DNA, 15 bp, Homo sapiens
gagctttaaaaaaaa

SEQ ID NO: 1029784 - DNA, 15 bp, Homo sapiens
agctttaaaaaaaaa

SEQ ID NO: 1029785 - DNA, 15 bp, Homo sapiens
gctttaaaaaaaaaa

SEQ ID NO: 1029786 - DNA, 15 bp, Homo sapiens
ctttaaaaaaaaaaa

SEQ ID NO: 1029787 - DNA, 15 bp, Homo sapiens
tttaaaaaaaaaaat

SEQ ID NO: 1029788 - DNA, 15 bp, Homo sapiens
ttaaaaaaaaaaatt

SEQ ID NO: 1029789 - DNA, 15 bp, Homo sapiens
taaaaaaaaaaatta

SEQ ID NO: 1029790 - DNA, 15 bp, Homo sapiens
aaaaaaaaaaattaa

SEQ ID NO: 1029791 - DNA, 15 bp, Homo sapiens
aaaaaaaaaattaaa

SEQ ID NO: 1029792 - DNA, 15 bp, Homo sapiens
aaaaaaaaattaaat

SEQ ID NO: 1029793 - DNA, 15 bp, Homo sapiens
aaaaaaaattaaatt

SEQ ID NO: 1029794 - DNA, 15 bp, Homo sapiens
aaaaaaattaaattc

SEQ ID NO: 1029795 - DNA, 15 bp, Homo sapiens
aaaaaattaaattca

SEQ ID NO: 1029796 - DNA, 15 bp, Homo sapiens
aaaaattaaattcaa

SEQ ID NO: 1029797 - DNA, 15 bp, Homo sapiens
aaaattaaattcaat

SEQ ID NO: 1029798 - DNA, 15 bp, Homo sapiens
aaattaaattcaatg

SEQ ID NO: 1029799 - DNA, 15 bp, Homo sapiens
aattaaattcaatga

SEQ ID NO: 1029800 - DNA, 15 bp, Homo sapiens
attaaattcaatgaa

SEQ ID NO: 1029801 - DNA, 15 bp, Homo sapiens
ttaaattcaatgaaa

SEQ ID NO: 1029802 - DNA, 15 bp, Homo sapiens
taaattcaatgaaat

SEQ ID NO: 1029803 - DNA, 15 bp, Homo sapiens
aaattcaatgaaatg

SEQ ID NO: 1029804 - DNA, 15 bp, Homo sapiens
aattcaatgaaatga

SEQ ID NO: 1029805 - DNA, 15 bp, Homo sapiens
attcaatgaaatgac

SEQ ID NO: 1029806 - DNA, 15 bp, Homo sapiens
ttcaatgaaatgact

SEQ ID NO: 1029807 - DNA, 15 bp, Homo sapiens
tcaatgaaatgactt

SEQ ID NO: 1029808 - DNA, 15 bp, Homo sapiens
caatgaaatgactta

SEQ ID NO: 1029809 - DNA, 15 bp, Homo sapiens
aatgaaatgacttaa

SEQ ID NO: 1029810 - DNA, 15 bp, Homo sapiens
atgaaatgacttaaa

SEQ ID NO: 1029811 - DNA, 15 bp, Homo sapiens
tgaaatgacttaaat

SEQ ID NO: 1029812 - DNA, 15 bp, Homo sapiens
gaaatgacttaaatg

SEQ ID NO: 1029813 - DNA, 15 bp, Homo sapiens
aaatgacttaaatga

SEQ ID NO: 1029814 - DNA, 15 bp, Homo sapiens
aatgacttaaatgaa

SEQ ID NO: 1029815 - DNA, 15 bp, Homo sapiens
atgacttaaatgaat

SEQ ID NO: 1029816 - DNA, 15 bp, Homo sapiens
tgacttaaatgaatt

SEQ ID NO: 1029817 - DNA, 15 bp, Homo sapiens
gacttaaatgaatta

SEQ ID NO: 1029818 - DNA, 15 bp, Homo sapiens
acttaaatgaattaa

SEQ ID NO: 1029819 - DNA, 15 bp, Homo sapiens
cttaaatgaattaag

SEQ ID NO: 1029820 - DNA, 15 bp, Homo sapiens
ttaaatgaattaagt

SEQ ID NO: 1029821 - DNA, 15 bp, Homo sapiens
taaatgaattaagtg

SEQ ID NO: 1029822 - DNA, 15 bp, Homo sapiens
aaatgaattaagtgt

SEQ ID NO: 1029823 - DNA, 15 bp, Homo sapiens
aatgaattaagtgta

SEQ ID NO: 1029824 - DNA, 15 bp, Homo sapiens
atgaattaagtgtaa

SEQ ID NO: 1029825 - DNA, 15 bp, Homo sapiens
tgaattaagtgtaaa

SEQ ID NO: 1029826 - DNA, 15 bp, Homo sapiens
gaattaagtgtaaat

SEQ ID NO: 1029827 - DNA, 15 bp, Homo sapiens
aattaagtgtaaatg

SEQ ID NO: 1029828 - DNA, 15 bp, Homo sapiens
attaagtgtaaatga

SEQ ID NO: 1029829 - DNA, 15 bp, Homo sapiens
ttaagtgtaaatgat

SEQ ID NO: 1029830 - DNA, 15 bp, Homo sapiens
taagtgtaaatgatt

SEQ ID NO: 1029831 - DNA, 15 bp, Homo sapiens
aagtgtaaatgattc

SEQ ID NO: 1029832 - DNA, 15 bp, Homo sapiens
agtgtaaatgattca

SEQ ID NO: 1029833 - DNA, 15 bp, Homo sapiens
gtgtaaatgattcag

SEQ ID NO: 1029834 - DNA, 15 bp, Homo sapiens
tgtaaatgattcaga

SEQ ID NO: 1029835 - DNA, 15 bp, Homo sapiens
gtaaatgattcagaa

SEQ ID NO: 1029836 - DNA, 15 bp, Homo sapiens
taaatgattcagaac

SEQ ID NO: 1029837 - DNA, 15 bp, Homo sapiens
aaatgattcagaact

SEQ ID NO: 1029838 - DNA, 15 bp, Homo sapiens
aatgattcagaactg

SEQ ID NO: 1029839 - DNA, 15 bp, Homo sapiens
atgattcagaactgg

SEQ ID NO: 1029840 - DNA, 15 bp, Homo sapiens
tgattcagaactggt

SEQ ID NO: 1029841 - DNA, 15 bp, Homo sapiens
gattcagaactggta

SEQ ID NO: 1029842 - DNA, 15 bp, Homo sapiens
attcagaactggtat

SEQ ID NO: 1029843 - DNA, 15 bp, Homo sapiens
ttcagaactggtatt

SEQ ID NO: 1029844 - DNA, 15 bp, Homo sapiens
tcagaactggtatta

SEQ ID NO: 1029845 - DNA, 15 bp, Homo sapiens
cagaactggtattag

SEQ ID NO: 1029846 - DNA, 15 bp, Homo sapiens
agaactggtattaga

SEQ ID NO: 1029847 - DNA, 15 bp, Homo sapiens
gaactggtattagaa

SEQ ID NO: 1029848 - DNA, 15 bp, Homo sapiens
aactggtattagaaa

SEQ ID NO: 1029849 - DNA, 15 bp, Homo sapiens
actggtattagaaat

SEQ ID NO: 1029850 - DNA, 15 bp, Homo sapiens
ctggtattagaaatt

SEQ ID NO: 1029851 - DNA, 15 bp, Homo sapiens
tggtattagaaatta

SEQ ID NO: 1029852 - DNA, 15 bp, Homo sapiens
ggtattagaaattat

SEQ ID NO: 1029853 - DNA, 15 bp, Homo sapiens
gtattagaaattatt

SEQ ID NO: 1029854 - DNA, 15 bp, Homo sapiens
tattagaaattatta

SEQ ID NO: 1029855 - DNA, 15 bp, Homo sapiens
attagaaattattaa

SEQ ID NO: 1029856 - DNA, 15 bp, Homo sapiens
ttagaaattattaaa

SEQ ID NO: 1029857 - DNA, 15 bp, Homo sapiens
tagaaattattaaaa

SEQ ID NO: 1029858 - DNA, 15 bp, Homo sapiens
agaaattattaaaag

SEQ ID NO: 1029859 - DNA, 15 bp, Homo sapiens
gaaattattaaaagt

SEQ ID NO: 1029860 - DNA, 15 bp, Homo sapiens
aaattattaaaagtg

SEQ ID NO: 1029861 - DNA, 15 bp, Homo sapiens
aattattaaaagtgg

SEQ ID NO: 1029862 - DNA, 15 bp, Homo sapiens
attattaaaagtggg

SEQ ID NO: 1029863 - DNA, 15 bp, Homo sapiens
ttattaaaagtgggg

SEQ ID NO: 1029864 - DNA, 15 bp, Homo sapiens
tattaaaagtggggg

SEQ ID NO: 1029865 - DNA, 15 bp, Homo sapiens
attaaaagtgggggc

SEQ ID NO: 1029866 - DNA, 15 bp, Homo sapiens
ttaaaagtgggggcc

SEQ ID NO: 1029867 - DNA, 15 bp, Homo sapiens
taaaagtgggggcca

SEQ ID NO: 1029868 - DNA, 15 bp, Homo sapiens
aaaagtgggggccag

SEQ ID NO: 1029869 - DNA, 15 bp, Homo sapiens
aaagtgggggccagg

SEQ ID NO: 1029870 - DNA, 15 bp, Homo sapiens
aagtgggggccaggc

SEQ ID NO: 1029871 - DNA, 15 bp, Homo sapiens
agtgggggccaggca

SEQ ID NO: 1029872 - DNA, 15 bp, Homo sapiens
gtgggggccaggcac

SEQ ID NO: 1029873 - DNA, 15 bp, Homo sapiens
tgggggccaggcacg

SEQ ID NO: 1029874 - DNA, 15 bp, Homo sapiens
gggggccaggcacgg

SEQ ID NO: 1029875 - DNA, 15 bp, Homo sapiens
ggggccaggcacggt

SEQ ID NO: 1029876 - DNA, 15 bp, Homo sapiens
gggccaggcacggtg

SEQ ID NO: 1029877 - DNA, 15 bp, Homo sapiens
ggccaggcacggtgg

SEQ ID NO: 1029878 - DNA, 15 bp, Homo sapiens
gccaggcacggtggc

SEQ ID NO: 1029879 - DNA, 15 bp, Homo sapiens
ccaggcacggtggct

SEQ ID NO: 1029880 - DNA, 15 bp, Homo sapiens
caggcacggtggctc

SEQ ID NO: 1029881 - DNA, 15 bp, Homo sapiens
aggcacggtggctca

SEQ ID NO: 1029882 - DNA, 15 bp, Homo sapiens
ggcacggtggctcac

SEQ ID NO: 1029883 - DNA, 15 bp, Homo sapiens
gcacggtggctcaca

SEQ ID NO: 1029884 - DNA, 15 bp, Homo sapiens
cacggtggctcacac

SEQ ID NO: 1029885 - DNA, 15 bp, Homo sapiens
acggtggctcacacc

SEQ ID NO: 1029886 - DNA, 15 bp, Homo sapiens
cggtggctcacacct

SEQ ID NO: 1029887 - DNA, 15 bp, Homo sapiens
ctgtaatcccagcat

SEQ ID NO: 1029888 - DNA, 15 bp, Homo sapiens
tgtaatcccagcatt

SEQ ID NO: 1029889 - DNA, 15 bp, Homo sapiens
gtaatcccagcattt

SEQ ID NO: 1029890 - DNA, 15 bp, Homo sapiens
taatcccagcatttt

SEQ ID NO: 1029891 - DNA, 15 bp, Homo sapiens
aatcccagcattttg

SEQ ID NO: 1029892 - DNA, 15 bp, Homo sapiens
atcccagcattttgg

SEQ ID NO: 1029893 - DNA, 15 bp, Homo sapiens
tcccagcattttggg

SEQ ID NO: 1029894 - DNA, 15 bp, Homo sapiens
cccagcattttggga

SEQ ID NO: 1029895 - DNA, 15 bp, Homo sapiens
ccagcattttgggag

SEQ ID NO: 1029896 - DNA, 15 bp, Homo sapiens
cagcattttgggagg

SEQ ID NO: 1029897 - DNA, 15 bp, Homo sapiens
agcattttgggaggc

SEQ ID NO: 1029898 - DNA, 15 bp, Homo sapiens
gcattttgggaggcc

SEQ ID NO: 1029899 - DNA, 15 bp, Homo sapiens
cattttgggaggcca

SEQ ID NO: 1029900 - DNA, 15 bp, Homo sapiens
attttgggaggccaa

SEQ ID NO: 1029901 - DNA, 15 bp, Homo sapiens
ttttgggaggccaac

SEQ ID NO: 1029902 - DNA, 15 bp, Homo sapiens
tttgggaggccaacg

SEQ ID NO: 1029903 - DNA, 15 bp, Homo sapiens
ttgggaggccaacgc

SEQ ID NO: 1029904 - DNA, 15 bp, Homo sapiens
tgggaggccaacgca

SEQ ID NO: 1029905 - DNA, 15 bp, Homo sapiens
gggaggccaacgcag

SEQ ID NO: 1029906 - DNA, 15 bp, Homo sapiens
ggaggccaacgcagg

SEQ ID NO: 1029907 - DNA, 15 bp, Homo sapiens
gaggccaacgcaggt

SEQ ID NO: 1029908 - DNA, 15 bp, Homo sapiens
aggccaacgcaggtg

SEQ ID NO: 1029909 - DNA, 15 bp, Homo sapiens
ggccaacgcaggtgg

SEQ ID NO: 1029910 - DNA, 15 bp, Homo sapiens
gccaacgcaggtgga

SEQ ID NO: 1029911 - DNA, 15 bp, Homo sapiens
ccaacgcaggtggat

SEQ ID NO: 1029912 - DNA, 15 bp, Homo sapiens
caacgcaggtggatc

SEQ ID NO: 1029913 - DNA, 15 bp, Homo sapiens
aacgcaggtggatca

SEQ ID NO: 1029914 - DNA, 15 bp, Homo sapiens
acgcaggtggatcac

SEQ ID NO: 1029915 - DNA, 15 bp, Homo sapiens
cgcaggtggatcacc

SEQ ID NO: 1029916 - DNA, 15 bp, Homo sapiens
gcaggtggatcacct

SEQ ID NO: 1029917 - DNA, 15 bp, Homo sapiens
caggtggatcacctg

SEQ ID NO: 1029918 - DNA, 15 bp, Homo sapiens
aggtggatcacctga

SEQ ID NO: 1029919 - DNA, 15 bp, Homo sapiens
ggtggatcacctgag

SEQ ID NO: 1029920 - DNA, 15 bp, Homo sapiens
gtggatcacctgagg

SEQ ID NO: 1029921 - DNA, 15 bp, Homo sapiens
tggatcacctgaggt

SEQ ID NO: 1029922 - DNA, 15 bp, Homo sapiens
ggatcacctgaggtc

SEQ ID NO: 1029923 - DNA, 15 bp, Homo sapiens
gatcacctgaggtca

SEQ ID NO: 1029924 - DNA, 15 bp, Homo sapiens
atcacctgaggtcag

SEQ ID NO: 1029925 - DNA, 15 bp, Homo sapiens
tcacctgaggtcagg

SEQ ID NO: 1029926 - DNA, 15 bp, Homo sapiens
cacctgaggtcagga

SEQ ID NO: 1029927 - DNA, 15 bp, Homo sapiens
acctgaggtcaggag

SEQ ID NO: 1029928 - DNA, 15 bp, Homo sapiens
cctgaggtcaggagt

SEQ ID NO: 1029929 - DNA, 15 bp, Homo sapiens
ctgaggtcaggagtt

SEQ ID NO: 1029930 - DNA, 15 bp, Homo sapiens
tgaggtcaggagttc

SEQ ID NO: 1029931 - DNA, 15 bp, Homo sapiens
gaggtcaggagttcg

SEQ ID NO: 1029932 - DNA, 15 bp, Homo sapiens
aggtcaggagttcga

SEQ ID NO: 1029933 - DNA, 15 bp, Homo sapiens
ggtcaggagttcgag

SEQ ID NO: 1029934 - DNA, 15 bp, Homo sapiens
gtcaggagttcgaga

SEQ ID NO: 1029935 - DNA, 15 bp, Homo sapiens
tcaggagttcgagac

SEQ ID NO: 1029936 - DNA, 15 bp, Homo sapiens
caggagttcgagacc

SEQ ID NO: 1029937 - DNA, 15 bp, Homo sapiens
aggagttcgagacca

SEQ ID NO: 1029938 - DNA, 15 bp, Homo sapiens
ggagttcgagaccag

SEQ ID NO: 1029939 - DNA, 15 bp, Homo sapiens
gagttcgagaccagc

SEQ ID NO: 1029940 - DNA, 15 bp, Homo sapiens
agttcgagaccagcc

SEQ ID NO: 1029941 - DNA, 15 bp, Homo sapiens
gttcgagaccagcct

SEQ ID NO: 1029942 - DNA, 15 bp, Homo sapiens
ttcgagaccagcctg

SEQ ID NO: 1029943 - DNA, 15 bp, Homo sapiens
tcgagaccagcctgg

SEQ ID NO: 1029944 - DNA, 15 bp, Homo sapiens
cgagaccagcctggc

SEQ ID NO: 1029945 - DNA, 15 bp, Homo sapiens
gagaccagcctggcc

SEQ ID NO: 1029946 - DNA, 15 bp, Homo sapiens
agaccagcctggcca

SEQ ID NO: 1029947 - DNA, 15 bp, Homo sapiens
gaccagcctggccaa

SEQ ID NO: 1029948 - DNA, 15 bp, Homo sapiens
accagcctggccaac

SEQ ID NO: 1029949 - DNA, 15 bp, Homo sapiens
ccagcctggccaacg

SEQ ID NO: 1029950 - DNA, 15 bp, Homo sapiens
cagcctggccaacgt

SEQ ID NO: 1029951 - DNA, 15 bp, Homo sapiens
agcctggccaacgtg

SEQ ID NO: 1029952 - DNA, 15 bp, Homo sapiens
gcctggccaacgtgg

SEQ ID NO: 1029953 - DNA, 15 bp, Homo sapiens
cctggccaacgtggt

SEQ ID NO: 1029954 - DNA, 15 bp, Homo sapiens
ctggccaacgtggtg

SEQ ID NO: 1029955 - DNA, 15 bp, Homo sapiens
tggccaacgtggtga

SEQ ID NO: 1029956 - DNA, 15 bp, Homo sapiens
ggccaacgtggtgaa

SEQ ID NO: 1029957 - DNA, 15 bp, Homo sapiens
gccaacgtggtgaaa

SEQ ID NO: 1029958 - DNA, 15 bp, Homo sapiens
ccaacgtggtgaaaa

SEQ ID NO: 1029959 - DNA, 15 bp, Homo sapiens
caacgtggtgaaaac

SEQ ID NO: 1029960 - DNA, 15 bp, Homo sapiens
aacgtggtgaaaacc

SEQ ID NO: 1029961 - DNA, 15 bp, Homo sapiens
acgtggtgaaaaccc

SEQ ID NO: 1029962 - DNA, 15 bp, Homo sapiens
cgtggtgaaaacccg

SEQ ID NO: 1029963 - DNA, 15 bp, Homo sapiens
gtggtgaaaacccgt

SEQ ID NO: 1029964 - DNA, 15 bp, Homo sapiens
tggtgaaaacccgtc

SEQ ID NO: 1029965 - DNA, 15 bp, Homo sapiens
ggtgaaaacccgtct

SEQ ID NO: 1029966 - DNA, 15 bp, Homo sapiens
gtgaaaacccgtctc

SEQ ID NO: 1029967 - DNA, 15 bp, Homo sapiens
tgaaaacccgtctct

SEQ ID NO: 1029968 - DNA, 15 bp, Homo sapiens
gaaaacccgtctcta

SEQ ID NO: 1029969 - DNA, 15 bp, Homo sapiens
aaaacccgtctctat

SEQ ID NO: 1029970 - DNA, 15 bp, Homo sapiens
aaacccgtctctata

SEQ ID NO: 1029971 - DNA, 15 bp, Homo sapiens
aacccgtctctataa

SEQ ID NO: 1029972 - DNA, 15 bp, Homo sapiens
acccgtctctataaa

SEQ ID NO: 1029973 - DNA, 15 bp, Homo sapiens
cccgtctctataaaa

SEQ ID NO: 1029974 - DNA, 15 bp, Homo sapiens
ccgtctctataaaaa

SEQ ID NO: 1029975 - DNA, 15 bp, Homo sapiens
cgtctctataaaaat

SEQ ID NO: 1029976 - DNA, 15 bp, Homo sapiens
gtctctataaaaata

SEQ ID NO: 1029977 - DNA, 15 bp, Homo sapiens
tctctataaaaatac

SEQ ID NO: 1029978 - DNA, 15 bp, Homo sapiens
ctctataaaaataca

SEQ ID NO: 1029979 - DNA, 15 bp, Homo sapiens
tctataaaaatacaa

SEQ ID NO: 1029980 - DNA, 15 bp, Homo sapiens
ctataaaaatacaaa

SEQ ID NO: 1029981 - DNA, 15 bp, Homo sapiens
tataaaaatacaaaa

SEQ ID NO: 1029982 - DNA, 15 bp, Homo sapiens
ataaaaatacaaaaa

SEQ ID NO: 1029983 - DNA, 15 bp, Homo sapiens
atacaaaaattagcc

SEQ ID NO: 1029984 - DNA, 15 bp, Homo sapiens
tacaaaaattagcca

SEQ ID NO: 1029985 - DNA, 15 bp, Homo sapiens
acaaaaattagccag

SEQ ID NO: 1029986 - DNA, 15 bp, Homo sapiens
caaaaattagccagg

SEQ ID NO: 1029987 - DNA, 15 bp, Homo sapiens
aaaaattagccaggt

SEQ ID NO: 1029988 - DNA, 15 bp, Homo sapiens
aaaattagccaggtg

SEQ ID NO: 1029989 - DNA, 15 bp, Homo sapiens
aaattagccaggtgt

SEQ ID NO: 1029990 - DNA, 15 bp, Homo sapiens
aattagccaggtgtg

SEQ ID NO: 1029991 - DNA, 15 bp, Homo sapiens
attagccaggtgtgg

SEQ ID NO: 1029992 - DNA, 15 bp, Homo sapiens
ttagccaggtgtggt

SEQ ID NO: 1029993 - DNA, 15 bp, Homo sapiens
tagccaggtgtggtg

SEQ ID NO: 1029994 - DNA, 15 bp, Homo sapiens
agccaggtgtggtgg

SEQ ID NO: 1029995 - DNA, 15 bp, Homo sapiens
gccaggtgtggtggc

SEQ ID NO: 1029996 - DNA, 15 bp, Homo sapiens
ccaggtgtggtggca

SEQ ID NO: 1029997 - DNA, 15 bp, Homo sapiens
caggtgtggtggcag

SEQ ID NO: 1029998 - DNA, 15 bp, Homo sapiens
aggtgtggtggcagg

SEQ ID NO: 1029999 - DNA, 15 bp, Homo sapiens
ggtgtggtggcaggc

SEQ ID NO: 1030000 - DNA, 15 bp, Homo sapiens
gtgtggtggcaggca

SEQ ID NO: 1030001 - DNA, 15 bp, Homo sapiens
tgtggtggcaggcac

SEQ ID NO: 1030002 - DNA, 15 bp, Homo sapiens
gtggtggcaggcacc

SEQ ID NO: 1030003 - DNA, 15 bp, Homo sapiens
tggtggcaggcacct

SEQ ID NO: 1030004 - DNA, 15 bp, Homo sapiens
ggtggcaggcacctg

SEQ ID NO: 1030005 - DNA, 15 bp, Homo sapiens
gtggcaggcacctgt

SEQ ID NO: 1030006 - DNA, 15 bp, Homo sapiens
tggcaggcacctgta

SEQ ID NO: 1030007 - DNA, 15 bp, Homo sapiens
ggcaggcacctgtaa

SEQ ID NO: 1030008 - DNA, 15 bp, Homo sapiens
gcaggcacctgtaat

SEQ ID NO: 1030009 - DNA, 15 bp, Homo sapiens
caggcacctgtaatc

SEQ ID NO: 1030010 - DNA, 15 bp, Homo sapiens
aggcacctgtaatcc

SEQ ID NO: 1030011 - DNA, 15 bp, Homo sapiens
ggcacctgtaatccc

SEQ ID NO: 1030012 - DNA, 15 bp, Homo sapiens
gcacctgtaatccca

SEQ ID NO: 1030013 - DNA, 15 bp, Homo sapiens
cctgtaatcccagct

SEQ ID NO: 1030014 - DNA, 15 bp, Homo sapiens
ctgtaatcccagcta

SEQ ID NO: 1030015 - DNA, 15 bp, Homo sapiens
tgtaatcccagctac

SEQ ID NO: 1030016 - DNA, 15 bp, Homo sapiens
gtaatcccagctacc

SEQ ID NO: 1030017 - DNA, 15 bp, Homo sapiens
taatcccagctacct

SEQ ID NO: 1030018 - DNA, 15 bp, Homo sapiens
aatcccagctacctg

SEQ ID NO: 1030019 - DNA, 15 bp, Homo sapiens
atcccagctacctgg

SEQ ID NO: 1030020 - DNA, 15 bp, Homo sapiens
tcccagctacctggg

SEQ ID NO: 1030021 - DNA, 15 bp, Homo sapiens
cccagctacctggga

SEQ ID NO: 1030022 - DNA, 15 bp, Homo sapiens
ccagctacctgggag

SEQ ID NO: 1030023 - DNA, 15 bp, Homo sapiens
cagctacctgggagc

SEQ ID NO: 1030024 - DNA, 15 bp, Homo sapiens
agctacctgggagcc

SEQ ID NO: 1030025 - DNA, 15 bp, Homo sapiens
gctacctgggagcct

SEQ ID NO: 1030026 - DNA, 15 bp, Homo sapiens
ctacctgggagcctg

SEQ ID NO: 1030027 - DNA, 15 bp, Homo sapiens
tacctgggagcctga

SEQ ID NO: 1030028 - DNA, 15 bp, Homo sapiens
acctgggagcctgag

SEQ ID NO: 1030029 - DNA, 15 bp, Homo sapiens
cctgggagcctgagg

SEQ ID NO: 1030030 - DNA, 15 bp, Homo sapiens
ctgggagcctgaggc

SEQ ID NO: 1030031 - DNA, 15 bp, Homo sapiens
tgggagcctgaggcc

SEQ ID NO: 1030032 - DNA, 15 bp, Homo sapiens
gggagcctgaggccg

SEQ ID NO: 1030033 - DNA, 15 bp, Homo sapiens
ggagcctgaggccgg

SEQ ID NO: 1030034 - DNA, 15 bp, Homo sapiens
gagcctgaggccgga

SEQ ID NO: 1030035 - DNA, 15 bp, Homo sapiens
agcctgaggccggag

SEQ ID NO: 1030036 - DNA, 15 bp, Homo sapiens
gcctgaggccggaga

SEQ ID NO: 1030037 - DNA, 15 bp, Homo sapiens
cctgaggccggagaa

SEQ ID NO: 1030038 - DNA, 15 bp, Homo sapiens
ctgaggccggagaat

SEQ ID NO: 1030039 - DNA, 15 bp, Homo sapiens
tgaggccggagaatc

SEQ ID NO: 1030040 - DNA, 15 bp, Homo sapiens
gaggccggagaatcg

SEQ ID NO: 1030041 - DNA, 15 bp, Homo sapiens
aggccggagaatcgc

SEQ ID NO: 1030042 - DNA, 15 bp, Homo sapiens
ggccggagaatcgct

SEQ ID NO: 1030043 - DNA, 15 bp, Homo sapiens
gccggagaatcgctt

SEQ ID NO: 1030044 - DNA, 15 bp, Homo sapiens
ccggagaatcgcttg

SEQ ID NO: 1030045 - DNA, 15 bp, Homo sapiens
cggagaatcgcttga

SEQ ID NO: 1030046 - DNA, 15 bp, Homo sapiens
ggagaatcgcttgaa

SEQ ID NO: 1030047 - DNA, 15 bp, Homo sapiens
gagaatcgcttgaac

SEQ ID NO: 1030048 - DNA, 15 bp, Homo sapiens
agaatcgcttgaacc

SEQ ID NO: 1030049 - DNA, 15 bp, Homo sapiens
gaatcgcttgaaccc

SEQ ID NO: 1030050 - DNA, 15 bp, Homo sapiens
aatcgcttgaacccg

SEQ ID NO: 1030051 - DNA, 15 bp, Homo sapiens
atcgcttgaacccgg

SEQ ID NO: 1030052 - DNA, 15 bp, Homo sapiens
tcgcttgaacccggg

SEQ ID NO: 1030053 - DNA, 15 bp, Homo sapiens
cgcttgaacccggga

SEQ ID NO: 1030054 - DNA, 15 bp, Homo sapiens
gcttgaacccgggag

SEQ ID NO: 1030055 - DNA, 15 bp, Homo sapiens
cttgaacccgggagg

SEQ ID NO: 1030056 - DNA, 15 bp, Homo sapiens
ttgaacccgggaggt

SEQ ID NO: 1030057 - DNA, 15 bp, Homo sapiens
cccgggaggtggagg

SEQ ID NO: 1030058 - DNA, 15 bp, Homo sapiens
ccgggaggtggaggt

SEQ ID NO: 1030059 - DNA, 15 bp, Homo sapiens
cgggaggtggaggtt

SEQ ID NO: 1030060 - DNA, 15 bp, Homo sapiens
gggaggtggaggttg

SEQ ID NO: 1030061 - DNA, 15 bp, Homo sapiens
ggaggtggaggttgc

SEQ ID NO: 1030062 - DNA, 15 bp, Homo sapiens
gaggtggaggttgca

SEQ ID NO: 1030063 - DNA, 15 bp, Homo sapiens
aggtggaggttgcag

SEQ ID NO: 1030064 - DNA, 15 bp, Homo sapiens
ggtggaggttgcagt

SEQ ID NO: 1030065 - DNA, 15 bp, Homo sapiens
gtggaggttgcagtg

SEQ ID NO: 1030066 - DNA, 15 bp, Homo sapiens
tggaggttgcagtga

SEQ ID NO: 1030067 - DNA, 15 bp, Homo sapiens
ggaggttgcagtgaa

SEQ ID NO: 1030068 - DNA, 15 bp, Homo sapiens
gaggttgcagtgaac

SEQ ID NO: 1030069 - DNA, 15 bp, Homo sapiens
aggttgcagtgaacc

SEQ ID NO: 1030070 - DNA, 15 bp, Homo sapiens
ggttgcagtgaacca

SEQ ID NO: 1030071 - DNA, 15 bp, Homo sapiens
gttgcagtgaaccaa

SEQ ID NO: 1030072 - DNA, 15 bp, Homo sapiens
ttgcagtgaaccaag

SEQ ID NO: 1030073 - DNA, 15 bp, Homo sapiens
tgcagtgaaccaaga

SEQ ID NO: 1030074 - DNA, 15 bp, Homo sapiens
gcagtgaaccaagat

SEQ ID NO: 1030075 - DNA, 15 bp, Homo sapiens
cagtgaaccaagatc

SEQ ID NO: 1030076 - DNA, 15 bp, Homo sapiens
agtgaaccaagatca

SEQ ID NO: 1030077 - DNA, 15 bp, Homo sapiens
gtgaaccaagatcac

SEQ ID NO: 1030078 - DNA, 15 bp, Homo sapiens
tgaaccaagatcaca

SEQ ID NO: 1030079 - DNA, 15 bp, Homo sapiens
gaaccaagatcacat

SEQ ID NO: 1030080 - DNA, 15 bp, Homo sapiens
aaccaagatcacatc

SEQ ID NO: 1030081 - DNA, 15 bp, Homo sapiens
accaagatcacatca

SEQ ID NO: 1030082 - DNA, 15 bp, Homo sapiens
ccaagatcacatcat

SEQ ID NO: 1030083 - DNA, 15 bp, Homo sapiens
caagatcacatcatt

SEQ ID NO: 1030084 - DNA, 15 bp, Homo sapiens
aagatcacatcattg

SEQ ID NO: 1030085 - DNA, 15 bp, Homo sapiens
agatcacatcattgc

SEQ ID NO: 1030086 - DNA, 15 bp, Homo sapiens
gatcacatcattgca

SEQ ID NO: 1030087 - DNA, 15 bp, Homo sapiens
atcacatcattgcac

SEQ ID NO: 1030088 - DNA, 15 bp, Homo sapiens
tcacatcattgcact

SEQ ID NO: 1030089 - DNA, 15 bp, Homo sapiens
cacatcattgcactc

SEQ ID NO: 1030090 - DNA, 15 bp, Homo sapiens
acatcattgcactcc

SEQ ID NO: 1030091 - DNA, 15 bp, Homo sapiens
catcattgcactccc

SEQ ID NO: 1030092 - DNA, 15 bp, Homo sapiens
atcattgcactcccg

SEQ ID NO: 1030093 - DNA, 15 bp, Homo sapiens
tcattgcactcccgc

SEQ ID NO: 1030094 - DNA, 15 bp, Homo sapiens
cattgcactcccgcc

SEQ ID NO: 1030095 - DNA, 15 bp, Homo sapiens
attgcactcccgcct

SEQ ID NO: 1030096 - DNA, 15 bp, Homo sapiens
ttgcactcccgcctg

SEQ ID NO: 1030097 - DNA, 15 bp, Homo sapiens
tgcactcccgcctgg

SEQ ID NO: 1030098 - DNA, 15 bp, Homo sapiens
gcactcccgcctggg

SEQ ID NO: 1030099 - DNA, 15 bp, Homo sapiens
cactcccgcctgggc

SEQ ID NO: 1030100 - DNA, 15 bp, Homo sapiens
actcccgcctgggcg

SEQ ID NO: 1030101 - DNA, 15 bp, Homo sapiens
ctcccgcctgggcga

SEQ ID NO: 1030102 - DNA, 15 bp, Homo sapiens
tcccgcctgggcgac

SEQ ID NO: 1030103 - DNA, 15 bp, Homo sapiens
cccgcctgggcgaca

SEQ ID NO: 1030104 - DNA, 15 bp, Homo sapiens
ccgcctgggcgacaa

SEQ ID NO: 1030105 - DNA, 15 bp, Homo sapiens
cgcctgggcgacaaa

SEQ ID NO: 1030106 - DNA, 15 bp, Homo sapiens
gcctgggcgacaaag

SEQ ID NO: 1030107 - DNA, 15 bp, Homo sapiens
cctgggcgacaaagc

SEQ ID NO: 1030108 - DNA, 15 bp, Homo sapiens
ctgggcgacaaagcg

SEQ ID NO: 1030109 - DNA, 15 bp, Homo sapiens
tgggcgacaaagcga

SEQ ID NO: 1030110 - DNA, 15 bp, Homo sapiens
gggcgacaaagcgag

SEQ ID NO: 1030111 - DNA, 15 bp, Homo sapiens
ggcgacaaagcgaga

SEQ ID NO: 1030112 - DNA, 15 bp, Homo sapiens
gcgacaaagcgagac

SEQ ID NO: 1030113 - DNA, 15 bp, Homo sapiens
cgacaaagcgagact

SEQ ID NO: 1030114 - DNA, 15 bp, Homo sapiens
gacaaagcgagactc

SEQ ID NO: 1030115 - DNA, 15 bp, Homo sapiens
acaaagcgagactcc

SEQ ID NO: 1030116 - DNA, 15 bp, Homo sapiens
caaagcgagactcca

SEQ ID NO: 1030117 - DNA, 15 bp, Homo sapiens
aaagcgagactccaa

SEQ ID NO: 1030118 - DNA, 15 bp, Homo sapiens
aagcgagactccaac

SEQ ID NO: 1030119 - DNA, 15 bp, Homo sapiens
agcgagactccaact

SEQ ID NO: 1030120 - DNA, 15 bp, Homo sapiens
gcgagactccaactc

SEQ ID NO: 1030121 - DNA, 15 bp, Homo sapiens
cgagactccaactca

SEQ ID NO: 1030122 - DNA, 15 bp, Homo sapiens
gagactccaactcaa

SEQ ID NO: 1030123 - DNA, 15 bp, Homo sapiens
agactccaactcaaa

SEQ ID NO: 1030124 - DNA, 15 bp, Homo sapiens
gactccaactcaaaa

SEQ ID NO: 1030125 - DNA, 15 bp, Homo sapiens
actccaactcaaaaa

SEQ ID NO: 1030126 - DNA, 15 bp, Homo sapiens
ctccaactcaaaaaa

SEQ ID NO: 1030127 - DNA, 15 bp, Homo sapiens
tccaactcaaaaaaa

SEQ ID NO: 1030128 - DNA, 15 bp, Homo sapiens
ccaactcaaaaaaaa

SEQ ID NO: 1030129 - DNA, 15 bp, Homo sapiens
caactcaaaaaaaat

SEQ ID NO: 1030130 - DNA, 15 bp, Homo sapiens
aactcaaaaaaaatt

SEQ ID NO: 1030131 - DNA, 15 bp, Homo sapiens
actcaaaaaaaatta

SEQ ID NO: 1030132 - DNA, 15 bp, Homo sapiens
ctcaaaaaaaattaa

SEQ ID NO: 1030133 - DNA, 15 bp, Homo sapiens
tcaaaaaaaattaaa

SEQ ID NO: 1030134 - DNA, 15 bp, Homo sapiens
caaaaaaaattaaat

SEQ ID NO: 1030135 - DNA, 15 bp, Homo sapiens
aaaaaaaattaaata

SEQ ID NO: 1030136 - DNA, 15 bp, Homo sapiens
aaaaaaattaaataa

SEQ ID NO: 1030137 - DNA, 15 bp, Homo sapiens
aaaaaattaaataat

SEQ ID NO: 1030138 - DNA, 15 bp, Homo sapiens
aaaaattaaataata

SEQ ID NO: 1030139 - DNA, 15 bp, Homo sapiens
aaaattaaataataa

SEQ ID NO: 1030140 - DNA, 15 bp, Homo sapiens
aaattaaataataat

SEQ ID NO: 1030141 - DNA, 15 bp, Homo sapiens
aattaaataataatt

SEQ ID NO: 1030142 - DNA, 15 bp, Homo sapiens
attaaataataatta

SEQ ID NO: 1030143 - DNA, 15 bp, Homo sapiens
ttaaataataattac

SEQ ID NO: 1030144 - DNA, 15 bp, Homo sapiens
taaataataattact

SEQ ID NO: 1030145 - DNA, 15 bp, Homo sapiens
aaataataattactt

SEQ ID NO: 1030146 - DNA, 15 bp, Homo sapiens
aataataattactta

SEQ ID NO: 1030147 - DNA, 15 bp, Homo sapiens
ataataattacttaa

SEQ ID NO: 1030148 - DNA, 15 bp, Homo sapiens
taataattacttaaa

SEQ ID NO: 1030149 - DNA, 15 bp, Homo sapiens
aataattacttaaat

SEQ ID NO: 1030150 - DNA, 15 bp, Homo sapiens
ataattacttaaatt

SEQ ID NO: 1030151 - DNA, 15 bp, Homo sapiens
taattacttaaatta

SEQ ID NO: 1030152 - DNA, 15 bp, Homo sapiens
aattacttaaattat

SEQ ID NO: 1030153 - DNA, 15 bp, Homo sapiens
attacttaaattata

SEQ ID NO: 1030154 - DNA, 15 bp, Homo sapiens
ttacttaaattataa

SEQ ID NO: 1030155 - DNA, 15 bp, Homo sapiens
tacttaaattataaa

SEQ ID NO: 1030156 - DNA, 15 bp, Homo sapiens
acttaaattataaaa

SEQ ID NO: 1030157 - DNA, 15 bp, Homo sapiens
cttaaattataaaaa

SEQ ID NO: 1030158 - DNA, 15 bp, Homo sapiens
ttaaattataaaaag

SEQ ID NO: 1030159 - DNA, 15 bp, Homo sapiens
taaattataaaaagt

SEQ ID NO: 1030160 - DNA, 15 bp, Homo sapiens
aaattataaaaagtg

SEQ ID NO: 1030161 - DNA, 15 bp, Homo sapiens
aattataaaaagtga

SEQ ID NO: 1030162 - DNA, 15 bp, Homo sapiens
attataaaaagtgaa

SEQ ID NO: 1030163 - DNA, 15 bp, Homo sapiens
ttataaaaagtgaat

SEQ ID NO: 1030164 - DNA, 15 bp, Homo sapiens
tataaaaagtgaata

SEQ ID NO: 1030165 - DNA, 15 bp, Homo sapiens
ataaaaagtgaatat

SEQ ID NO: 1030166 - DNA, 15 bp, Homo sapiens
taaaaagtgaatata

SEQ ID NO: 1030167 - DNA, 15 bp, Homo sapiens
aaaaagtgaatataa

SEQ ID NO: 1030168 - DNA, 15 bp, Homo sapiens
aaaagtgaatataaa

SEQ ID NO: 1030169 - DNA, 15 bp, Homo sapiens
aaagtgaatataaat

SEQ ID NO: 1030170 - DNA, 15 bp, Homo sapiens
aagtgaatataaatt

SEQ ID NO: 1030171 - DNA, 15 bp, Homo sapiens
agtgaatataaatta

SEQ ID NO: 1030172 - DNA, 15 bp, Homo sapiens
gtgaatataaattac

SEQ ID NO: 1030173 - DNA, 15 bp, Homo sapiens
tgaatataaattacc

SEQ ID NO: 1030174 - DNA, 15 bp, Homo sapiens
gaatataaattaccc

SEQ ID NO: 1030175 - DNA, 15 bp, Homo sapiens
aatataaattaccca

SEQ ID NO: 1030176 - DNA, 15 bp, Homo sapiens
atataaattacccaa

SEQ ID NO: 1030177 - DNA, 15 bp, Homo sapiens
tataaattacccaag

SEQ ID NO: 1030178 - DNA, 15 bp, Homo sapiens
ataaattacccaagt

SEQ ID NO: 1030179 - DNA, 15 bp, Homo sapiens
taaattacccaagta

SEQ ID NO: 1030180 - DNA, 15 bp, Homo sapiens
aaattacccaagtac

SEQ ID NO: 1030181 - DNA, 15 bp, Homo sapiens
aattacccaagtacc

SEQ ID NO: 1030182 - DNA, 15 bp, Homo sapiens
attacccaagtacct

SEQ ID NO: 1030183 - DNA, 15 bp, Homo sapiens
ttacccaagtacctg

SEQ ID NO: 1030184 - DNA, 15 bp, Homo sapiens
tacccaagtacctgg

SEQ ID NO: 1030185 - DNA, 15 bp, Homo sapiens
acccaagtacctgga

SEQ ID NO: 1030186 - DNA, 15 bp, Homo sapiens
cccaagtacctggag

SEQ ID NO: 1030187 - DNA, 15 bp, Homo sapiens
ccaagtacctggaga

SEQ ID NO: 1030188 - DNA, 15 bp, Homo sapiens
caagtacctggagat

SEQ ID NO: 1030189 - DNA, 15 bp, Homo sapiens
aagtacctggagatt

SEQ ID NO: 1030190 - DNA, 15 bp, Homo sapiens
agtacctggagattt

SEQ ID NO: 1030191 - DNA, 15 bp, Homo sapiens
gtacctggagatttc

SEQ ID NO: 1030192 - DNA, 15 bp, Homo sapiens
tacctggagatttcc

SEQ ID NO: 1030193 - DNA, 15 bp, Homo sapiens
acctggagatttcca

SEQ ID NO: 1030194 - DNA, 15 bp, Homo sapiens
cctggagatttccag

SEQ ID NO: 1030195 - DNA, 15 bp, Homo sapiens
ctggagatttccagt

SEQ ID NO: 1030196 - DNA, 15 bp, Homo sapiens
tggagatttccagtt

SEQ ID NO: 1030197 - DNA, 15 bp, Homo sapiens
ggagatttccagtta

SEQ ID NO: 1030198 - DNA, 15 bp, Homo sapiens
gagatttccagttag

SEQ ID NO: 1030199 - DNA, 15 bp, Homo sapiens
agatttccagttaga

SEQ ID NO: 1030200 - DNA, 15 bp, Homo sapiens
gatttccagttagac

SEQ ID NO: 1030201 - DNA, 15 bp, Homo sapiens
atttccagttagaca

SEQ ID NO: 1030202 - DNA, 15 bp, Homo sapiens
tttccagttagacat

SEQ ID NO: 1030203 - DNA, 15 bp, Homo sapiens
ttccagttagacatg

SEQ ID NO: 1030204 - DNA, 15 bp, Homo sapiens
tccagttagacatgc

SEQ ID NO: 1030205 - DNA, 15 bp, Homo sapiens
ccagttagacatgca

SEQ ID NO: 1030206 - DNA, 15 bp, Homo sapiens
cagttagacatgcat

SEQ ID NO: 1030207 - DNA, 15 bp, Homo sapiens
agttagacatgcata

SEQ ID NO: 1030208 - DNA, 15 bp, Homo sapiens
gttagacatgcatat

SEQ ID NO: 1030209 - DNA, 15 bp, Homo sapiens
ttagacatgcatata

SEQ ID NO: 1030210 - DNA, 15 bp, Homo sapiens
tagacatgcatatat

SEQ ID NO: 1030211 - DNA, 15 bp, Homo sapiens
agacatgcatatatt

SEQ ID NO: 1030212 - DNA, 15 bp, Homo sapiens
gacatgcatatatta

SEQ ID NO: 1030213 - DNA, 15 bp, Homo sapiens
acatgcatatattac

SEQ ID NO: 1030214 - DNA, 15 bp, Homo sapiens
catgcatatattacc

SEQ ID NO: 1030215 - DNA, 15 bp, Homo sapiens
atgcatatattaccc

SEQ ID NO: 1030216 - DNA, 15 bp, Homo sapiens
tgcatatattaccca

SEQ ID NO: 1030217 - DNA, 15 bp, Homo sapiens
gcatatattacccac

SEQ ID NO: 1030218 - DNA, 15 bp, Homo sapiens
catatattacccact

SEQ ID NO: 1030219 - DNA, 15 bp, Homo sapiens
atatattacccactt

SEQ ID NO: 1030220 - DNA, 15 bp, Homo sapiens
tatattacccacttt

SEQ ID NO: 1030221 - DNA, 15 bp, Homo sapiens
atattacccactttg

SEQ ID NO: 1030222 - DNA, 15 bp, Homo sapiens
tattacccactttga

SEQ ID NO: 1030223 - DNA, 15 bp, Homo sapiens
attacccactttgaa

SEQ ID NO: 1030224 - DNA, 15 bp, Homo sapiens
ttacccactttgaat

SEQ ID NO: 1030225 - DNA, 15 bp, Homo sapiens
tacccactttgaata

SEQ ID NO: 1030226 - DNA, 15 bp, Homo sapiens
acccactttgaatac

SEQ ID NO: 1030227 - DNA, 15 bp, Homo sapiens
cccactttgaataca

SEQ ID NO: 1030228 - DNA, 15 bp, Homo sapiens
ccactttgaatacat

SEQ ID NO: 1030229 - DNA, 15 bp, Homo sapiens
cactttgaatacata

SEQ ID NO: 1030230 - DNA, 15 bp, Homo sapiens
actttgaatacatat

SEQ ID NO: 1030231 - DNA, 15 bp, Homo sapiens
ctttgaatacatatg

SEQ ID NO: 1030232 - DNA, 15 bp, Homo sapiens
tttgaatacatatgg

SEQ ID NO: 1030233 - DNA, 15 bp, Homo sapiens
ttgaatacatatgga

SEQ ID NO: 1030234 - DNA, 15 bp, Homo sapiens
tgaatacatatggaa

SEQ ID NO: 1030235 - DNA, 15 bp, Homo sapiens
gaatacatatggaaa

SEQ ID NO: 1030236 - DNA, 15 bp, Homo sapiens
aatacatatggaaat

SEQ ID NO: 1030237 - DNA, 15 bp, Homo sapiens
atacatatggaaata

SEQ ID NO: 1030238 - DNA, 15 bp, Homo sapiens
tacatatggaaatat

SEQ ID NO: 1030239 - DNA, 15 bp, Homo sapiens
acatatggaaatatg

SEQ ID NO: 1030240 - DNA, 15 bp, Homo sapiens
catatggaaatatgt

SEQ ID NO: 1030241 - DNA, 15 bp, Homo sapiens
atatggaaatatgta

SEQ ID NO: 1030242 - DNA, 15 bp, Homo sapiens
tatggaaatatgtat

SEQ ID NO: 1030243 - DNA, 15 bp, Homo sapiens
atggaaatatgtatg

SEQ ID NO: 1030244 - DNA, 15 bp, Homo sapiens
tggaaatatgtatgt

SEQ ID NO: 1030245 - DNA, 15 bp, Homo sapiens
ggaaatatgtatgtg

SEQ ID NO: 1030246 - DNA, 15 bp, Homo sapiens
gaaatatgtatgtgt

SEQ ID NO: 1030247 - DNA, 15 bp, Homo sapiens
aaatatgtatgtgtt

SEQ ID NO: 1030248 - DNA, 15 bp, Homo sapiens
aatatgtatgtgttg

SEQ ID NO: 1030249 - DNA, 15 bp, Homo sapiens
atatgtatgtgttgg

SEQ ID NO: 1030250 - DNA, 15 bp, Homo sapiens
tatgtatgtgttggt

SEQ ID NO: 1030251 - DNA, 15 bp, Homo sapiens
atgtatgtgttggtt

SEQ ID NO: 1030252 - DNA, 15 bp, Homo sapiens
tgtatgtgttggttc

SEQ ID NO: 1030253 - DNA, 15 bp, Homo sapiens
gtatgtgttggttct

SEQ ID NO: 1030254 - DNA, 15 bp, Homo sapiens
tatgtgttggttctg

SEQ ID NO: 1030255 - DNA, 15 bp, Homo sapiens
atgtgttggttctgg

SEQ ID NO: 1030256 - DNA, 15 bp, Homo sapiens
tgtgttggttctgga

SEQ ID NO: 1030257 - DNA, 15 bp, Homo sapiens
gtgttggttctggaa

SEQ ID NO: 1030258 - DNA, 15 bp, Homo sapiens
tgttggttctggaaa

SEQ ID NO: 1030259 - DNA, 15 bp, Homo sapiens
gttggttctggaaaa

SEQ ID NO: 1030260 - DNA, 15 bp, Homo sapiens
ttggttctggaaaaa

SEQ ID NO: 1030261 - DNA, 15 bp, Homo sapiens
tggttctggaaaaac

SEQ ID NO: 1030262 - DNA, 15 bp, Homo sapiens
ggttctggaaaaaca

SEQ ID NO: 1030263 - DNA, 15 bp, Homo sapiens
gttctggaaaaacaa

SEQ ID NO: 1030264 - DNA, 15 bp, Homo sapiens
ttctggaaaaacaat

SEQ ID NO: 1030265 - DNA, 15 bp, Homo sapiens
tctggaaaaacaatt

SEQ ID NO: 1030266 - DNA, 15 bp, Homo sapiens
ctggaaaaacaattg

SEQ ID NO: 1030267 - DNA, 15 bp, Homo sapiens
tggaaaaacaattga

SEQ ID NO: 1030268 - DNA, 15 bp, Homo sapiens
ggaaaaacaattgag

SEQ ID NO: 1030269 - DNA, 15 bp, Homo sapiens
gaaaaacaattgaga

SEQ ID NO: 1030270 - DNA, 15 bp, Homo sapiens
aaaaacaattgagat

SEQ ID NO: 1030271 - DNA, 15 bp, Homo sapiens
aaaacaattgagata

SEQ ID NO: 1030272 - DNA, 15 bp, Homo sapiens
aaacaattgagataa

SEQ ID NO: 1030273 - DNA, 15 bp, Homo sapiens
aacaattgagataat

SEQ ID NO: 1030274 - DNA, 15 bp, Homo sapiens
acaattgagataatg

SEQ ID NO: 1030275 - DNA, 15 bp, Homo sapiens
caattgagataatga

SEQ ID NO: 1030276 - DNA, 15 bp, Homo sapiens
aattgagataatgaa

SEQ ID NO: 1030277 - DNA, 15 bp, Homo sapiens
attgagataatgaaa

SEQ ID NO: 1030278 - DNA, 15 bp, Homo sapiens
ttgagataatgaaaa

SEQ ID NO: 1030279 - DNA, 15 bp, Homo sapiens
tgagataatgaaaat

SEQ ID NO: 1030280 - DNA, 15 bp, Homo sapiens
gagataatgaaaata

SEQ ID NO: 1030281 - DNA, 15 bp, Homo sapiens
agataatgaaaatat

SEQ ID NO: 1030282 - DNA, 15 bp, Homo sapiens
gataatgaaaatatt

SEQ ID NO: 1030283 - DNA, 15 bp, Homo sapiens
ataatgaaaatattt

SEQ ID NO: 1030284 - DNA, 15 bp, Homo sapiens
taatgaaaatatttt

SEQ ID NO: 1030285 - DNA, 15 bp, Homo sapiens
aatgaaaatattttc

SEQ ID NO: 1030286 - DNA, 15 bp, Homo sapiens
atgaaaatattttct

SEQ ID NO: 1030287 - DNA, 15 bp, Homo sapiens
tgaaaatattttctc

SEQ ID NO: 1030288 - DNA, 15 bp, Homo sapiens
gaaaatattttctca

SEQ ID NO: 1030289 - DNA, 15 bp, Homo sapiens
aaaatattttctcaa

SEQ ID NO: 1030290 - DNA, 15 bp, Homo sapiens
aaatattttctcaag

SEQ ID NO: 1030291 - DNA, 15 bp, Homo sapiens
aatattttctcaagt

SEQ ID NO: 1030292 - DNA, 15 bp, Homo sapiens
atattttctcaagtt

SEQ ID NO: 1030293 - DNA, 15 bp, Homo sapiens
tattttctcaagttt

SEQ ID NO: 1030294 - DNA, 15 bp, Homo sapiens
attttctcaagtttt

SEQ ID NO: 1030295 - DNA, 15 bp, Homo sapiens
ttttctcaagtttta

SEQ ID NO: 1030296 - DNA, 15 bp, Homo sapiens
tttctcaagttttag

SEQ ID NO: 1030297 - DNA, 15 bp, Homo sapiens
ttctcaagttttaga

SEQ ID NO: 1030298 - DNA, 15 bp, Homo sapiens
tctcaagttttagaa

SEQ ID NO: 1030299 - DNA, 15 bp, Homo sapiens
ctcaagttttagaaa

SEQ ID NO: 1030300 - DNA, 15 bp, Homo sapiens
tcaagttttagaaac

SEQ ID NO: 1030301 - DNA, 15 bp, Homo sapiens
caagttttagaaaca

SEQ ID NO: 1030302 - DNA, 15 bp, Homo sapiens
aagttttagaaacag

SEQ ID NO: 1030303 - DNA, 15 bp, Homo sapiens
agttttagaaacagt

SEQ ID NO: 1030304 - DNA, 15 bp, Homo sapiens
gttttagaaacagta

SEQ ID NO: 1030305 - DNA, 15 bp, Homo sapiens
ttttagaaacagtat

SEQ ID NO: 1030306 - DNA, 15 bp, Homo sapiens
tttagaaacagtatg

SEQ ID NO: 1030307 - DNA, 15 bp, Homo sapiens
ttagaaacagtatga

SEQ ID NO: 1030308 - DNA, 15 bp, Homo sapiens
tagaaacagtatgag

SEQ ID NO: 1030309 - DNA, 15 bp, Homo sapiens
agaaacagtatgaga

SEQ ID NO: 1030310 - DNA, 15 bp, Homo sapiens
gaaacagtatgagat

SEQ ID NO: 1030311 - DNA, 15 bp, Homo sapiens
aaacagtatgagata

SEQ ID NO: 1030312 - DNA, 15 bp, Homo sapiens
aacagtatgagatag

SEQ ID NO: 1030313 - DNA, 15 bp, Homo sapiens
acagtatgagatagg

SEQ ID NO: 1030314 - DNA, 15 bp, Homo sapiens
cagtatgagataggt

SEQ ID NO: 1030315 - DNA, 15 bp, Homo sapiens
agtatgagataggtt

SEQ ID NO: 1030316 - DNA, 15 bp, Homo sapiens
gtatgagataggttt

SEQ ID NO: 1030317 - DNA, 15 bp, Homo sapiens
tatgagataggtttc

SEQ ID NO: 1030318 - DNA, 15 bp, Homo sapiens
atgagataggtttca

SEQ ID NO: 1030319 - DNA, 15 bp, Homo sapiens
tgagataggtttcaa

SEQ ID NO: 1030320 - DNA, 15 bp, Homo sapiens
gagataggtttcaac

SEQ ID NO: 1030321 - DNA, 15 bp, Homo sapiens
agataggtttcaaca

SEQ ID NO: 1030322 - DNA, 15 bp, Homo sapiens
gataggtttcaacaa

SEQ ID NO: 1030323 - DNA, 15 bp, Homo sapiens
ataggtttcaacaac

SEQ ID NO: 1030324 - DNA, 15 bp, Homo sapiens
taggtttcaacaaca

SEQ ID NO: 1030325 - DNA, 15 bp, Homo sapiens
aggtttcaacaacat

SEQ ID NO: 1030326 - DNA, 15 bp, Homo sapiens
ggtttcaacaacatt

SEQ ID NO: 1030327 - DNA, 15 bp, Homo sapiens
gtttcaacaacattc

SEQ ID NO: 1030328 - DNA, 15 bp, Homo sapiens
tttcaacaacattct

SEQ ID NO: 1030329 - DNA, 15 bp, Homo sapiens
ttcaacaacattcta

SEQ ID NO: 1030330 - DNA, 15 bp, Homo sapiens
tcaacaacattctac

SEQ ID NO: 1030331 - DNA, 15 bp, Homo sapiens
caacaacattctaca

SEQ ID NO: 1030332 - DNA, 15 bp, Homo sapiens
aacaacattctacat

SEQ ID NO: 1030333 - DNA, 15 bp, Homo sapiens
acaacattctacatg

SEQ ID NO: 1030334 - DNA, 15 bp, Homo sapiens
caacattctacatga

SEQ ID NO: 1030335 - DNA, 15 bp, Homo sapiens
aacattctacatgaa

SEQ ID NO: 1030336 - DNA, 15 bp, Homo sapiens
acattctacatgaat

SEQ ID NO: 1030337 - DNA, 15 bp, Homo sapiens
cattctacatgaatg

SEQ ID NO: 1030338 - DNA, 15 bp, Homo sapiens
attctacatgaatgt

SEQ ID NO: 1030339 - DNA, 15 bp, Homo sapiens
ttctacatgaatgta

SEQ ID NO: 1030340 - DNA, 15 bp, Homo sapiens
tctacatgaatgtaa

SEQ ID NO: 1030341 - DNA, 15 bp, Homo sapiens
ctacatgaatgtaaa

SEQ ID NO: 1030342 - DNA, 15 bp, Homo sapiens
tacatgaatgtaaaa

SEQ ID NO: 1030343 - DNA, 15 bp, Homo sapiens
acatgaatgtaaaac

SEQ ID NO: 1030344 - DNA, 15 bp, Homo sapiens
catgaatgtaaaacc

SEQ ID NO: 1030345 - DNA, 15 bp, Homo sapiens
atgaatgtaaaacct

SEQ ID NO: 1030346 - DNA, 15 bp, Homo sapiens
tgaatgtaaaacctt

SEQ ID NO: 1030347 - DNA, 15 bp, Homo sapiens
gaatgtaaaaccttg

SEQ ID NO: 1030348 - DNA, 15 bp, Homo sapiens
aatgtaaaaccttga

SEQ ID NO: 1030349 - DNA, 15 bp, Homo sapiens
atgtaaaaccttgat

SEQ ID NO: 1030350 - DNA, 15 bp, Homo sapiens
tgtaaaaccttgatt

SEQ ID NO: 1030351 - DNA, 15 bp, Homo sapiens
gtaaaaccttgattt

SEQ ID NO: 1030352 - DNA, 15 bp, Homo sapiens
taaaaccttgattta

SEQ ID NO: 1030353 - DNA, 15 bp, Homo sapiens
aaaaccttgatttaa

SEQ ID NO: 1030354 - DNA, 15 bp, Homo sapiens
aaaccttgatttaaa

SEQ ID NO: 1030355 - DNA, 15 bp, Homo sapiens
aaccttgatttaaat

SEQ ID NO: 1030356 - DNA, 15 bp, Homo sapiens
accttgatttaaata

SEQ ID NO: 1030357 - DNA, 15 bp, Homo sapiens
ccttgatttaaatat

SEQ ID NO: 1030358 - DNA, 15 bp, Homo sapiens
cttgatttaaatata

SEQ ID NO: 1030359 - DNA, 15 bp, Homo sapiens
ttgatttaaatatat

SEQ ID NO: 1030360 - DNA, 15 bp, Homo sapiens
tgatttaaatatatg

SEQ ID NO: 1030361 - DNA, 15 bp, Homo sapiens
gatttaaatatatga

SEQ ID NO: 1030362 - DNA, 15 bp, Homo sapiens
atttaaatatatgat

SEQ ID NO: 1030363 - DNA, 15 bp, Homo sapiens
tttaaatatatgatc

SEQ ID NO: 1030364 - DNA, 15 bp, Homo sapiens
ttaaatatatgatct

SEQ ID NO: 1030365 - DNA, 15 bp, Homo sapiens
taaatatatgatctt

SEQ ID NO: 1030366 - DNA, 15 bp, Homo sapiens
aaatatatgatctta

SEQ ID NO: 1030367 - DNA, 15 bp, Homo sapiens
aatatatgatcttat

SEQ ID NO: 1030368 - DNA, 15 bp, Homo sapiens
atatatgatcttatg

SEQ ID NO: 1030369 - DNA, 15 bp, Homo sapiens
tatatgatcttatgc

SEQ ID NO: 1030370 - DNA, 15 bp, Homo sapiens
atatgatcttatgct

SEQ ID NO: 1030371 - DNA, 15 bp, Homo sapiens
tatgatcttatgcta

SEQ ID NO: 1030372 - DNA, 15 bp, Homo sapiens
atgatcttatgctag

SEQ ID NO: 1030373 - DNA, 15 bp, Homo sapiens
tgatcttatgctaga

SEQ ID NO: 1030374 - DNA, 15 bp, Homo sapiens
gatcttatgctagaa

SEQ ID NO: 1030375 - DNA, 15 bp, Homo sapiens
atcttatgctagaag

SEQ ID NO: 1030376 - DNA, 15 bp, Homo sapiens
tcttatgctagaagc

SEQ ID NO: 1030377 - DNA, 15 bp, Homo sapiens
cttatgctagaagca

SEQ ID NO: 1030378 - DNA, 15 bp, Homo sapiens
ttatgctagaagcat

SEQ ID NO: 1030379 - DNA, 15 bp, Homo sapiens
tatgctagaagcatg

SEQ ID NO: 1030380 - DNA, 15 bp, Homo sapiens
atgctagaagcatgg

SEQ ID NO: 1030381 - DNA, 15 bp, Homo sapiens
tgctagaagcatggt

SEQ ID NO: 1030382 - DNA, 15 bp, Homo sapiens
gctagaagcatggtt

SEQ ID NO: 1030383 - DNA, 15 bp, Homo sapiens
ctagaagcatggttg

SEQ ID NO: 1030384 - DNA, 15 bp, Homo sapiens
tagaagcatggttgg

SEQ ID NO: 1030385 - DNA, 15 bp, Homo sapiens
agaagcatggttggt

SEQ ID NO: 1030386 - DNA, 15 bp, Homo sapiens
gaagcatggttggtt

SEQ ID NO: 1030387 - DNA, 15 bp, Homo sapiens
aagcatggttggttt

SEQ ID NO: 1030388 - DNA, 15 bp, Homo sapiens
agcatggttggtttt

SEQ ID NO: 1030389 - DNA, 15 bp, Homo sapiens
gcatggttggtttta

SEQ ID NO: 1030390 - DNA, 15 bp, Homo sapiens
catggttggttttaa

SEQ ID NO: 1030391 - DNA, 15 bp, Homo sapiens
atggttggttttaat

SEQ ID NO: 1030392 - DNA, 15 bp, Homo sapiens
tggttggttttaatt

SEQ ID NO: 1030393 - DNA, 15 bp, Homo sapiens
ggttggttttaattt

SEQ ID NO: 1030394 - DNA, 15 bp, Homo sapiens
gttggttttaatttt

SEQ ID NO: 1030395 - DNA, 15 bp, Homo sapiens
ttggttttaattttt

SEQ ID NO: 1030396 - DNA, 15 bp, Homo sapiens
tggttttaatttttc

SEQ ID NO: 1030397 - DNA, 15 bp, Homo sapiens
ggttttaatttttct

SEQ ID NO: 1030398 - DNA, 15 bp, Homo sapiens
gttttaatttttcta

SEQ ID NO: 1030399 - DNA, 15 bp, Homo sapiens
ttttaatttttctaa

SEQ ID NO: 1030400 - DNA, 15 bp, Homo sapiens
tttaatttttctaac

SEQ ID NO: 1030401 - DNA, 15 bp, Homo sapiens
ttaatttttctaaca

SEQ ID NO: 1030402 - DNA, 15 bp, Homo sapiens
taatttttctaacag

SEQ ID NO: 1030403 - DNA, 15 bp, Homo sapiens
aatttttctaacaga

SEQ ID NO: 1030404 - DNA, 15 bp, Homo sapiens
atttttctaacagat

SEQ ID NO: 1030405 - DNA, 15 bp, Homo sapiens
tttttctaacagata

SEQ ID NO: 1030406 - DNA, 15 bp, Homo sapiens
ttttctaacagatac

SEQ ID NO: 1030407 - DNA, 15 bp, Homo sapiens
tttctaacagatacg

SEQ ID NO: 1030408 - DNA, 15 bp, Homo sapiens
ttctaacagatacga

SEQ ID NO: 1030409 - DNA, 15 bp, Homo sapiens
tctaacagatacgag

SEQ ID NO: 1030410 - DNA, 15 bp, Homo sapiens
ctaacagatacgagt

SEQ ID NO: 1030411 - DNA, 15 bp, Homo sapiens
taacagatacgagtc

SEQ ID NO: 1030412 - DNA, 15 bp, Homo sapiens
aacagatacgagtct

SEQ ID NO: 1030413 - DNA, 15 bp, Homo sapiens
acagatacgagtctt

SEQ ID NO: 1030414 - DNA, 15 bp, Homo sapiens
cagatacgagtcttg

SEQ ID NO: 1030415 - DNA, 15 bp, Homo sapiens
agatacgagtcttgg

SEQ ID NO: 1030416 - DNA, 15 bp, Homo sapiens
gatacgagtcttggc

SEQ ID NO: 1030417 - DNA, 15 bp, Homo sapiens
atacgagtcttggct

SEQ ID NO: 1030418 - DNA, 15 bp, Homo sapiens
tacgagtcttggctt

SEQ ID NO: 1030419 - DNA, 15 bp, Homo sapiens
acgagtcttggctta

SEQ ID NO: 1030420 - DNA, 15 bp, Homo sapiens
cgagtcttggcttat

SEQ ID NO: 1030421 - DNA, 15 bp, Homo sapiens
gagtcttggcttatt

SEQ ID NO: 1030422 - DNA, 15 bp, Homo sapiens
agtcttggcttatta

SEQ ID NO: 1030423 - DNA, 15 bp, Homo sapiens
gtcttggcttattaa

SEQ ID NO: 1030424 - DNA, 15 bp, Homo sapiens
tcttggcttattaat

SEQ ID NO: 1030425 - DNA, 15 bp, Homo sapiens
cttggcttattaata

SEQ ID NO: 1030426 - DNA, 15 bp, Homo sapiens
ttggcttattaataa

SEQ ID NO: 1030427 - DNA, 15 bp, Homo sapiens
tggcttattaataat

SEQ ID NO: 1030428 - DNA, 15 bp, Homo sapiens
ggcttattaataatt

SEQ ID NO: 1030429 - DNA, 15 bp, Homo sapiens
gcttattaataatta

SEQ ID NO: 1030430 - DNA, 15 bp, Homo sapiens
cttattaataattaa

SEQ ID NO: 1030431 - DNA, 15 bp, Homo sapiens
ttattaataattaac

SEQ ID NO: 1030432 - DNA, 15 bp, Homo sapiens
tattaataattaaca

SEQ ID NO: 1030433 - DNA, 15 bp, Homo sapiens
attaataattaacac

SEQ ID NO: 1030434 - DNA, 15 bp, Homo sapiens
ttaataattaacaca

SEQ ID NO: 1030435 - DNA, 15 bp, Homo sapiens
taataattaacacat

SEQ ID NO: 1030436 - DNA, 15 bp, Homo sapiens
aataattaacacatt

SEQ ID NO: 1030437 - DNA, 15 bp, Homo sapiens
ataattaacacattt

SEQ ID NO: 1030438 - DNA, 15 bp, Homo sapiens
taattaacacatttt

SEQ ID NO: 1030439 - DNA, 15 bp, Homo sapiens
aattaacacattttg

SEQ ID NO: 1030440 - DNA, 15 bp, Homo sapiens
attaacacattttgc

SEQ ID NO: 1030441 - DNA, 15 bp, Homo sapiens
ttaacacattttgca

SEQ ID NO: 1030442 - DNA, 15 bp, Homo sapiens
taacacattttgcag

SEQ ID NO: 1030443 - DNA, 15 bp, Homo sapiens
aacacattttgcagc

SEQ ID NO: 1030444 - DNA, 15 bp, Homo sapiens
acacattttgcagcc

SEQ ID NO: 1030445 - DNA, 15 bp, Homo sapiens
cacattttgcagcca

SEQ ID NO: 1030446 - DNA, 15 bp, Homo sapiens
acattttgcagccac

SEQ ID NO: 1030447 - DNA, 15 bp, Homo sapiens
cattttgcagccaca

SEQ ID NO: 1030448 - DNA, 15 bp, Homo sapiens
attttgcagccacag

SEQ ID NO: 1030449 - DNA, 15 bp, Homo sapiens
ttttgcagccacagt

SEQ ID NO: 1030450 - DNA, 15 bp, Homo sapiens
tttgcagccacagta

SEQ ID NO: 1030451 - DNA, 15 bp, Homo sapiens
ttgcagccacagtat

SEQ ID NO: 1030452 - DNA, 15 bp, Homo sapiens
tgcagccacagtatc

SEQ ID NO: 1030453 - DNA, 15 bp, Homo sapiens
gcagccacagtatca

SEQ ID NO: 1030454 - DNA, 15 bp, Homo sapiens
cagccacagtatcag

SEQ ID NO: 1030455 - DNA, 15 bp, Homo sapiens
agccacagtatcagt

SEQ ID NO: 1030456 - DNA, 15 bp, Homo sapiens
gccacagtatcagtg

SEQ ID NO: 1030457 - DNA, 15 bp, Homo sapiens
ccacagtatcagtgt

SEQ ID NO: 1030458 - DNA, 15 bp, Homo sapiens
cacagtatcagtgtg

SEQ ID NO: 1030459 - DNA, 15 bp, Homo sapiens
acagtatcagtgtgg

SEQ ID NO: 1030460 - DNA, 15 bp, Homo sapiens
cagtatcagtgtggg

SEQ ID NO: 1030461 - DNA, 15 bp, Homo sapiens
agtatcagtgtgggg

SEQ ID NO: 1030462 - DNA, 15 bp, Homo sapiens
gtatcagtgtggggt

SEQ ID NO: 1030463 - DNA, 15 bp, Homo sapiens
tatcagtgtggggta

SEQ ID NO: 1030464 - DNA, 15 bp, Homo sapiens
atcagtgtggggtaa

SEQ ID NO: 1030465 - DNA, 15 bp, Homo sapiens
tcagtgtggggtaaa

SEQ ID NO: 1030466 - DNA, 15 bp, Homo sapiens
cagtgtggggtaaaa

SEQ ID NO: 1030467 - DNA, 15 bp, Homo sapiens
agtgtggggtaaaat

SEQ ID NO: 1030468 - DNA, 15 bp, Homo sapiens
gtgtggggtaaaatt

SEQ ID NO: 1030469 - DNA, 15 bp, Homo sapiens
tgtggggtaaaattc

SEQ ID NO: 1030470 - DNA, 15 bp, Homo sapiens
gtggggtaaaattct

SEQ ID NO: 1030471 - DNA, 15 bp, Homo sapiens
tggggtaaaattcta

SEQ ID NO: 1030472 - DNA, 15 bp, Homo sapiens
ggggtaaaattctaa

SEQ ID NO: 1030473 - DNA, 15 bp, Homo sapiens
gggtaaaattctaat

SEQ ID NO: 1030474 - DNA, 15 bp, Homo sapiens
ggtaaaattctaata

SEQ ID NO: 1030475 - DNA, 15 bp, Homo sapiens
gtaaaattctaatat

SEQ ID NO: 1030476 - DNA, 15 bp, Homo sapiens
taaaattctaatatt

SEQ ID NO: 1030477 - DNA, 15 bp, Homo sapiens
aaaattctaatattt

SEQ ID NO: 1030478 - DNA, 15 bp, Homo sapiens
aaattctaatatttg

SEQ ID NO: 1030479 - DNA, 15 bp, Homo sapiens
aattctaatatttgc

SEQ ID NO: 1030480 - DNA, 15 bp, Homo sapiens
attctaatatttgct

SEQ ID NO: 1030481 - DNA, 15 bp, Homo sapiens
ttctaatatttgctc

SEQ ID NO: 1030482 - DNA, 15 bp, Homo sapiens
tctaatatttgctct

SEQ ID NO: 1030483 - DNA, 15 bp, Homo sapiens
ctaatatttgctctt

SEQ ID NO: 1030484 - DNA, 15 bp, Homo sapiens
taatatttgctctta

SEQ ID NO: 1030485 - DNA, 15 bp, Homo sapiens
aatatttgctcttat

SEQ ID NO: 1030486 - DNA, 15 bp, Homo sapiens
atatttgctcttatg

SEQ ID NO: 1030487 - DNA, 15 bp, Homo sapiens
tatttgctcttatgt

SEQ ID NO: 1030488 - DNA, 15 bp, Homo sapiens
atttgctcttatgtt

SEQ ID NO: 1030489 - DNA, 15 bp, Homo sapiens
tttgctcttatgttt

SEQ ID NO: 1030490 - DNA, 15 bp, Homo sapiens
ttgctcttatgtttt

SEQ ID NO: 1030491 - DNA, 15 bp, Homo sapiens
tgctcttatgtttta

SEQ ID NO: 1030492 - DNA, 15 bp, Homo sapiens
gctcttatgttttaa

SEQ ID NO: 1030493 - DNA, 15 bp, Homo sapiens
ctcttatgttttaaa

SEQ ID NO: 1030494 - DNA, 15 bp, Homo sapiens
tcttatgttttaaat

SEQ ID NO: 1030495 - DNA, 15 bp, Homo sapiens
cttatgttttaaatt

SEQ ID NO: 1030496 - DNA, 15 bp, Homo sapiens
ttatgttttaaattc

SEQ ID NO: 1030497 - DNA, 15 bp, Homo sapiens
tatgttttaaattct

SEQ ID NO: 1030498 - DNA, 15 bp, Homo sapiens
atgttttaaattctc

SEQ ID NO: 1030499 - DNA, 15 bp, Homo sapiens
tgttttaaattctca

SEQ ID NO: 1030500 - DNA, 15 bp, Homo sapiens
gttttaaattctcag

SEQ ID NO: 1030501 - DNA, 15 bp, Homo sapiens
ttttaaattctcagt

SEQ ID NO: 1030502 - DNA, 15 bp, Homo sapiens
tttaaattctcagtc

SEQ ID NO: 1030503 - DNA, 15 bp, Homo sapiens
ttaaattctcagtct

SEQ ID NO: 1030504 - DNA, 15 bp, Homo sapiens
taaattctcagtctt

SEQ ID NO: 1030505 - DNA, 15 bp, Homo sapiens
aaattctcagtcttt

SEQ ID NO: 1030506 - DNA, 15 bp, Homo sapiens
aattctcagtctttc

SEQ ID NO: 1030507 - DNA, 15 bp, Homo sapiens
attctcagtctttcc

SEQ ID NO: 1030508 - DNA, 15 bp, Homo sapiens
ttctcagtctttcca

SEQ ID NO: 1030509 - DNA, 15 bp, Homo sapiens
tctcagtctttccaa

SEQ ID NO: 1030510 - DNA, 15 bp, Homo sapiens
ctcagtctttccaac

SEQ ID NO: 1030511 - DNA, 15 bp, Homo sapiens
tcagtctttccaaca

SEQ ID NO: 1030512 - DNA, 15 bp, Homo sapiens
cagtctttccaacat

SEQ ID NO: 1030513 - DNA, 15 bp, Homo sapiens
agtctttccaacata

SEQ ID NO: 1030514 - DNA, 15 bp, Homo sapiens
gtctttccaacataa

SEQ ID NO: 1030515 - DNA, 15 bp, Homo sapiens
tctttccaacataag

SEQ ID NO: 1030516 - DNA, 15 bp, Homo sapiens
ctttccaacataaga

SEQ ID NO: 1030517 - DNA, 15 bp, Homo sapiens
tttccaacataagaa

SEQ ID NO: 1030518 - DNA, 15 bp, Homo sapiens
ttccaacataagaaa

SEQ ID NO: 1030519 - DNA, 15 bp, Homo sapiens
tccaacataagaaaa

SEQ ID NO: 1030520 - DNA, 15 bp, Homo sapiens
ccaacataagaaaat

SEQ ID NO: 1030521 - DNA, 15 bp, Homo sapiens
caacataagaaaata

SEQ ID NO: 1030522 - DNA, 15 bp, Homo sapiens
aacataagaaaatag

SEQ ID NO: 1030523 - DNA, 15 bp, Homo sapiens
acataagaaaatagc

SEQ ID NO: 1030524 - DNA, 15 bp, Homo sapiens
cataagaaaatagct

SEQ ID NO: 1030525 - DNA, 15 bp, Homo sapiens
ataagaaaatagcta

SEQ ID NO: 1030526 - DNA, 15 bp, Homo sapiens
taagaaaatagctac

SEQ ID NO: 1030527 - DNA, 15 bp, Homo sapiens
aagaaaatagctaca

SEQ ID NO: 1030528 - DNA, 15 bp, Homo sapiens
agaaaatagctacac

SEQ ID NO: 1030529 - DNA, 15 bp, Homo sapiens
gaaaatagctacaca

SEQ ID NO: 1030530 - DNA, 15 bp, Homo sapiens
aaaatagctacacac

SEQ ID NO: 1030531 - DNA, 15 bp, Homo sapiens
aaatagctacacaca

SEQ ID NO: 1030532 - DNA, 15 bp, Homo sapiens
aatagctacacacat

SEQ ID NO: 1030533 - DNA, 15 bp, Homo sapiens
atagctacacacatt

SEQ ID NO: 1030534 - DNA, 15 bp, Homo sapiens
tagctacacacattt

SEQ ID NO: 1030535 - DNA, 15 bp, Homo sapiens
agctacacacatttc

SEQ ID NO: 1030536 - DNA, 15 bp, Homo sapiens
gctacacacatttca

SEQ ID NO: 1030537 - DNA, 15 bp, Homo sapiens
ctacacacatttcag

SEQ ID NO: 1030538 - DNA, 15 bp, Homo sapiens
tacacacatttcagt

SEQ ID NO: 1030539 - DNA, 15 bp, Homo sapiens
acacacatttcagtg

SEQ ID NO: 1030540 - DNA, 15 bp, Homo sapiens
cacacatttcagtgt

SEQ ID NO: 1030541 - DNA, 15 bp, Homo sapiens
acacatttcagtgtt

SEQ ID NO: 1030542 - DNA, 15 bp, Homo sapiens
cacatttcagtgttt

SEQ ID NO: 1030543 - DNA, 15 bp, Homo sapiens
acatttcagtgtttc

SEQ ID NO: 1030544 - DNA, 15 bp, Homo sapiens
catttcagtgtttcc

SEQ ID NO: 1030545 - DNA, 15 bp, Homo sapiens
atttcagtgtttcct

SEQ ID NO: 1030546 - DNA, 15 bp, Homo sapiens
tttcagtgtttcctt

SEQ ID NO: 1030547 - DNA, 15 bp, Homo sapiens
ttcagtgtttccttt

SEQ ID NO: 1030548 - DNA, 15 bp, Homo sapiens
tcagtgtttcctttt

SEQ ID NO: 1030549 - DNA, 15 bp, Homo sapiens
cagtgtttccttttt

SEQ ID NO: 1030550 - DNA, 15 bp, Homo sapiens
agtgtttcctttttg

SEQ ID NO: 1030551 - DNA, 15 bp, Homo sapiens
gtgtttcctttttgc

SEQ ID NO: 1030552 - DNA, 15 bp, Homo sapiens
tgtttcctttttgca

SEQ ID NO: 1030553 - DNA, 15 bp, Homo sapiens
gtttcctttttgcaa

SEQ ID NO: 1030554 - DNA, 15 bp, Homo sapiens
tttcctttttgcaac

SEQ ID NO: 1030555 - DNA, 15 bp, Homo sapiens
ttcctttttgcaaca

SEQ ID NO: 1030556 - DNA, 15 bp, Homo sapiens
tcctttttgcaacaa

SEQ ID NO: 1030557 - DNA, 15 bp, Homo sapiens
cctttttgcaacaag

SEQ ID NO: 1030558 - DNA, 15 bp, Homo sapiens
ctttttgcaacaagt

SEQ ID NO: 1030559 - DNA, 15 bp, Homo sapiens
tttttgcaacaagtt

SEQ ID NO: 1030560 - DNA, 15 bp, Homo sapiens
ttttgcaacaagtta

SEQ ID NO: 1030561 - DNA, 15 bp, Homo sapiens
tttgcaacaagttaa

SEQ ID NO: 1030562 - DNA, 15 bp, Homo sapiens
ttgcaacaagttaac

SEQ ID NO: 1030563 - DNA, 15 bp, Homo sapiens
tgcaacaagttaaca

SEQ ID NO: 1030564 - DNA, 15 bp, Homo sapiens
gcaacaagttaacat

SEQ ID NO: 1030565 - DNA, 15 bp, Homo sapiens
caacaagttaacata

SEQ ID NO: 1030566 - DNA, 15 bp, Homo sapiens
aacaagttaacataa

SEQ ID NO: 1030567 - DNA, 15 bp, Homo sapiens
acaagttaacataat

SEQ ID NO: 1030568 - DNA, 15 bp, Homo sapiens
caagttaacataatt

SEQ ID NO: 1030569 - DNA, 15 bp, Homo sapiens
aagttaacataattt

SEQ ID NO: 1030570 - DNA, 15 bp, Homo sapiens
agttaacataatttt

SEQ ID NO: 1030571 - DNA, 15 bp, Homo sapiens
gttaacataatttta

SEQ ID NO: 1030572 - DNA, 15 bp, Homo sapiens
ttaacataattttat

SEQ ID NO: 1030573 - DNA, 15 bp, Homo sapiens
taacataattttatt

SEQ ID NO: 1030574 - DNA, 15 bp, Homo sapiens
aacataattttattg

SEQ ID NO: 1030575 - DNA, 15 bp, Homo sapiens
acataattttattgg

SEQ ID NO: 1030576 - DNA, 15 bp, Homo sapiens
cataattttattgga

SEQ ID NO: 1030577 - DNA, 15 bp, Homo sapiens
ataattttattggac

SEQ ID NO: 1030578 - DNA, 15 bp, Homo sapiens
taattttattggacc

SEQ ID NO: 1030579 - DNA, 15 bp, Homo sapiens
aattttattggacca

SEQ ID NO: 1030580 - DNA, 15 bp, Homo sapiens
attttattggaccac

SEQ ID NO: 1030581 - DNA, 15 bp, Homo sapiens
ttttattggaccacg

SEQ ID NO: 1030582 - DNA, 15 bp, Homo sapiens
tttattggaccacgt

SEQ ID NO: 1030583 - DNA, 15 bp, Homo sapiens
ttattggaccacgtt

SEQ ID NO: 1030584 - DNA, 15 bp, Homo sapiens
tattggaccacgtta

SEQ ID NO: 1030585 - DNA, 15 bp, Homo sapiens
attggaccacgttat

SEQ ID NO: 1030586 - DNA, 15 bp, Homo sapiens
ttggaccacgttatt

SEQ ID NO: 1030587 - DNA, 15 bp, Homo sapiens
tggaccacgttattt

SEQ ID NO: 1030588 - DNA, 15 bp, Homo sapiens
ggaccacgttattta

SEQ ID NO: 1030589 - DNA, 15 bp, Homo sapiens
gaccacgttatttag

SEQ ID NO: 1030590 - DNA, 15 bp, Homo sapiens
accacgttatttagt

SEQ ID NO: 1030591 - DNA, 15 bp, Homo sapiens
ccacgttatttagtt

SEQ ID NO: 1030592 - DNA, 15 bp, Homo sapiens
cacgttatttagttg

SEQ ID NO: 1030593 - DNA, 15 bp, Homo sapiens
acgttatttagttgt

SEQ ID NO: 1030594 - DNA, 15 bp, Homo sapiens
cgttatttagttgtt

SEQ ID NO: 1030595 - DNA, 15 bp, Homo sapiens
gttatttagttgttg

SEQ ID NO: 1030596 - DNA, 15 bp, Homo sapiens
ttatttagttgttgg

SEQ ID NO: 1030597 - DNA, 15 bp, Homo sapiens
tatttagttgttggg

SEQ ID NO: 1030598 - DNA, 15 bp, Homo sapiens
atttagttgttgggc

SEQ ID NO: 1030599 - DNA, 15 bp, Homo sapiens
tttagttgttgggcc

SEQ ID NO: 1030600 - DNA, 15 bp, Homo sapiens
ttagttgttgggcct

SEQ ID NO: 1030601 - DNA, 15 bp, Homo sapiens
tagttgttgggcctt

SEQ ID NO: 1030602 - DNA, 15 bp, Homo sapiens
agttgttgggccttg

SEQ ID NO: 1030603 - DNA, 15 bp, Homo sapiens
gttgttgggccttgt

SEQ ID NO: 1030604 - DNA, 15 bp, Homo sapiens
ttgttgggccttgta

SEQ ID NO: 1030605 - DNA, 15 bp, Homo sapiens
tgttgggccttgtaa

SEQ ID NO: 1030606 - DNA, 15 bp, Homo sapiens
gttgggccttgtaag

SEQ ID NO: 1030607 - DNA, 15 bp, Homo sapiens
ttgggccttgtaagg

SEQ ID NO: 1030608 - DNA, 15 bp, Homo sapiens
tgggccttgtaagga

SEQ ID NO: 1030609 - DNA, 15 bp, Homo sapiens
gggccttgtaaggat

SEQ ID NO: 1030610 - DNA, 15 bp, Homo sapiens
ggccttgtaaggatt

SEQ ID NO: 1030611 - DNA, 15 bp, Homo sapiens
gccttgtaaggatta

SEQ ID NO: 1030612 - DNA, 15 bp, Homo sapiens
ccttgtaaggattaa

SEQ ID NO: 1030613 - DNA, 15 bp, Homo sapiens
cttgtaaggattaaa

SEQ ID NO: 1030614 - DNA, 15 bp, Homo sapiens
ttgtaaggattaaat

SEQ ID NO: 1030615 - DNA, 15 bp, Homo sapiens
tgtaaggattaaatg

SEQ ID NO: 1030616 - DNA, 15 bp, Homo sapiens
gtaaggattaaatga

SEQ ID NO: 1030617 - DNA, 15 bp, Homo sapiens
taaggattaaatgag

SEQ ID NO: 1030618 - DNA, 15 bp, Homo sapiens
aaggattaaatgaga

SEQ ID NO: 1030619 - DNA, 15 bp, Homo sapiens
aggattaaatgagat

SEQ ID NO: 1030620 - DNA, 15 bp, Homo sapiens
ggattaaatgagatc

SEQ ID NO: 1030621 - DNA, 15 bp, Homo sapiens
gattaaatgagatca

SEQ ID NO: 1030622 - DNA, 15 bp, Homo sapiens
attaaatgagatcat

SEQ ID NO: 1030623 - DNA, 15 bp, Homo sapiens
ttaaatgagatcatg

SEQ ID NO: 1030624 - DNA, 15 bp, Homo sapiens
taaatgagatcatgc

SEQ ID NO: 1030625 - DNA, 15 bp, Homo sapiens
aaatgagatcatgca

SEQ ID NO: 1030626 - DNA, 15 bp, Homo sapiens
aatgagatcatgcat

SEQ ID NO: 1030627 - DNA, 15 bp, Homo sapiens
atgagatcatgcatg

SEQ ID NO: 1030628 - DNA, 15 bp, Homo sapiens
tgagatcatgcatgt

SEQ ID NO: 1030629 - DNA, 15 bp, Homo sapiens
gagatcatgcatgta

SEQ ID NO: 1030630 - DNA, 15 bp, Homo sapiens
agatcatgcatgtaa

SEQ ID NO: 1030631 - DNA, 15 bp, Homo sapiens
gatcatgcatgtaac

SEQ ID NO: 1030632 - DNA, 15 bp, Homo sapiens
atcatgcatgtaaca

SEQ ID NO: 1030633 - DNA, 15 bp, Homo sapiens
tcatgcatgtaacac

SEQ ID NO: 1030634 - DNA, 15 bp, Homo sapiens
catgcatgtaacact

SEQ ID NO: 1030635 - DNA, 15 bp, Homo sapiens
atgcatgtaacacta

SEQ ID NO: 1030636 - DNA, 15 bp, Homo sapiens
tgcatgtaacactac

SEQ ID NO: 1030637 - DNA, 15 bp, Homo sapiens
gcatgtaacactaca

SEQ ID NO: 1030638 - DNA, 15 bp, Homo sapiens
catgtaacactacag

SEQ ID NO: 1030639 - DNA, 15 bp, Homo sapiens
atgtaacactacagt

SEQ ID NO: 1030640 - DNA, 15 bp, Homo sapiens
tgtaacactacagta

SEQ ID NO: 1030641 - DNA, 15 bp, Homo sapiens
gtaacactacagtaa

SEQ ID NO: 1030642 - DNA, 15 bp, Homo sapiens
taacactacagtaac

SEQ ID NO: 1030643 - DNA, 15 bp, Homo sapiens
aacactacagtaaca

SEQ ID NO: 1030644 - DNA, 15 bp, Homo sapiens
acactacagtaacag

SEQ ID NO: 1030645 - DNA, 15 bp, Homo sapiens
cactacagtaacagc

SEQ ID NO: 1030646 - DNA, 15 bp, Homo sapiens
actacagtaacagcc

SEQ ID NO: 1030647 - DNA, 15 bp, Homo sapiens
ctacagtaacagcca

SEQ ID NO: 1030648 - DNA, 15 bp, Homo sapiens
tacagtaacagccac

SEQ ID NO: 1030649 - DNA, 15 bp, Homo sapiens
acagtaacagccaca

SEQ ID NO: 1030650 - DNA, 15 bp, Homo sapiens
cagtaacagccacat

SEQ ID NO: 1030651 - DNA, 15 bp, Homo sapiens
agtaacagccacatg

SEQ ID NO: 1030652 - DNA, 15 bp, Homo sapiens
gtaacagccacatga

SEQ ID NO: 1030653 - DNA, 15 bp, Homo sapiens
taacagccacatgat

SEQ ID NO: 1030654 - DNA, 15 bp, Homo sapiens
aacagccacatgata

SEQ ID NO: 1030655 - DNA, 15 bp, Homo sapiens
acagccacatgataa

SEQ ID NO: 1030656 - DNA, 15 bp, Homo sapiens
cagccacatgataaa

SEQ ID NO: 1030657 - DNA, 15 bp, Homo sapiens
agccacatgataaat

SEQ ID NO: 1030658 - DNA, 15 bp, Homo sapiens
gccacatgataaatg

SEQ ID NO: 1030659 - DNA, 15 bp, Homo sapiens
ccacatgataaatgt

SEQ ID NO: 1030660 - DNA, 15 bp, Homo sapiens
cacatgataaatgtc

SEQ ID NO: 1030661 - DNA, 15 bp, Homo sapiens
acatgataaatgtcc

SEQ ID NO: 1030662 - DNA, 15 bp, Homo sapiens
catgataaatgtcca

SEQ ID NO: 1030663 - DNA, 15 bp, Homo sapiens
atgataaatgtccaa

SEQ ID NO: 1030664 - DNA, 15 bp, Homo sapiens
tgataaatgtccaaa

SEQ ID NO: 1030665 - DNA, 15 bp, Homo sapiens
gataaatgtccaaat

SEQ ID NO: 1030666 - DNA, 15 bp, Homo sapiens
ataaatgtccaaata

SEQ ID NO: 1030667 - DNA, 15 bp, Homo sapiens
taaatgtccaaataa

SEQ ID NO: 1030668 - DNA, 15 bp, Homo sapiens
aaatgtccaaataat

SEQ ID NO: 1030669 - DNA, 15 bp, Homo sapiens
aatgtccaaataata

SEQ ID NO: 1030670 - DNA, 15 bp, Homo sapiens
atgtccaaataatat

SEQ ID NO: 1030671 - DNA, 15 bp, Homo sapiens
tgtccaaataatatt

SEQ ID NO: 1030672 - DNA, 15 bp, Homo sapiens
gtccaaataatattt

SEQ ID NO: 1030673 - DNA, 15 bp, Homo sapiens
tccaaataatattta

SEQ ID NO: 1030674 - DNA, 15 bp, Homo sapiens
ccaaataatatttac

SEQ ID NO: 1030675 - DNA, 15 bp, Homo sapiens
caaataatatttacc

SEQ ID NO: 1030676 - DNA, 15 bp, Homo sapiens
aaataatatttacct

SEQ ID NO: 1030677 - DNA, 15 bp, Homo sapiens
aataatatttacctg

SEQ ID NO: 1030678 - DNA, 15 bp, Homo sapiens
ataatatttacctgt

SEQ ID NO: 1030679 - DNA, 15 bp, Homo sapiens
taatatttacctgtg

SEQ ID NO: 1030680 - DNA, 15 bp, Homo sapiens
aatatttacctgtgc

SEQ ID NO: 1030681 - DNA, 15 bp, Homo sapiens
atatttacctgtgcc

SEQ ID NO: 1030682 - DNA, 15 bp, Homo sapiens
tatttacctgtgcct

SEQ ID NO: 1030683 - DNA, 15 bp, Homo sapiens
atttacctgtgcctg

SEQ ID NO: 1030684 - DNA, 15 bp, Homo sapiens
tttacctgtgcctgg

SEQ ID NO: 1030685 - DNA, 15 bp, Homo sapiens
ttacctgtgcctggc

SEQ ID NO: 1030686 - DNA, 15 bp, Homo sapiens
tacctgtgcctggca

SEQ ID NO: 1030687 - DNA, 15 bp, Homo sapiens
acctgtgcctggcac

SEQ ID NO: 1030688 - DNA, 15 bp, Homo sapiens
cctgtgcctggcaca

SEQ ID NO: 1030689 - DNA, 15 bp, Homo sapiens
ctgtgcctggcacag

SEQ ID NO: 1030690 - DNA, 15 bp, Homo sapiens
tgtgcctggcacaga

SEQ ID NO: 1030691 - DNA, 15 bp, Homo sapiens
gtgcctggcacagag

SEQ ID NO: 1030692 - DNA, 15 bp, Homo sapiens
tgcctggcacagagc

SEQ ID NO: 1030693 - DNA, 15 bp, Homo sapiens
gcctggcacagagca

SEQ ID NO: 1030694 - DNA, 15 bp, Homo sapiens
cctggcacagagcag

SEQ ID NO: 1030695 - DNA, 15 bp, Homo sapiens
ctggcacagagcagg

SEQ ID NO: 1030696 - DNA, 15 bp, Homo sapiens
tggcacagagcaggc

SEQ ID NO: 1030697 - DNA, 15 bp, Homo sapiens
ggcacagagcaggca

SEQ ID NO: 1030698 - DNA, 15 bp, Homo sapiens
gcacagagcaggcac

SEQ ID NO: 1030699 - DNA, 15 bp, Homo sapiens
cacagagcaggcact

SEQ ID NO: 1030700 - DNA, 15 bp, Homo sapiens
acagagcaggcactc

SEQ ID NO: 1030701 - DNA, 15 bp, Homo sapiens
cagagcaggcactca

SEQ ID NO: 1030702 - DNA, 15 bp, Homo sapiens
agagcaggcactcaa

SEQ ID NO: 1030703 - DNA, 15 bp, Homo sapiens
gagcaggcactcaaa

SEQ ID NO: 1030704 - DNA, 15 bp, Homo sapiens
agcaggcactcaaaa

SEQ ID NO: 1030705 - DNA, 15 bp, Homo sapiens
gcaggcactcaaaaa

SEQ ID NO: 1030706 - DNA, 15 bp, Homo sapiens
caggcactcaaaaaa

SEQ ID NO: 1030707 - DNA, 15 bp, Homo sapiens
aggcactcaaaaaat

SEQ ID NO: 1030708 - DNA, 15 bp, Homo sapiens
ggcactcaaaaaata

SEQ ID NO: 1030709 - DNA, 15 bp, Homo sapiens
gcactcaaaaaatat

SEQ ID NO: 1030710 - DNA, 15 bp, Homo sapiens
cactcaaaaaatatt

SEQ ID NO: 1030711 - DNA, 15 bp, Homo sapiens
actcaaaaaatattt

SEQ ID NO: 1030712 - DNA, 15 bp, Homo sapiens
ctcaaaaaatatttt

SEQ ID NO: 1030713 - DNA, 15 bp, Homo sapiens
tcaaaaaatattttt

SEQ ID NO: 1030714 - DNA, 15 bp, Homo sapiens
caaaaaatatttttt

SEQ ID NO: 1030715 - DNA, 15 bp, Homo sapiens
aaaaaatatttttta

SEQ ID NO: 1030716 - DNA, 15 bp, Homo sapiens
aaaaatattttttag

SEQ ID NO: 1030717 - DNA, 15 bp, Homo sapiens
aaaatattttttaga

SEQ ID NO: 1030718 - DNA, 15 bp, Homo sapiens
aaatattttttagag

SEQ ID NO: 1030719 - DNA, 15 bp, Homo sapiens
aatattttttagagc

SEQ ID NO: 1030720 - DNA, 15 bp, Homo sapiens
atattttttagagca

SEQ ID NO: 1030721 - DNA, 15 bp, Homo sapiens
tattttttagagcat

SEQ ID NO: 1030722 - DNA, 15 bp, Homo sapiens
attttttagagcatg

SEQ ID NO: 1030723 - DNA, 15 bp, Homo sapiens
ttttttagagcatgt

SEQ ID NO: 1030724 - DNA, 15 bp, Homo sapiens
tttttagagcatgtg

SEQ ID NO: 1030725 - DNA, 15 bp, Homo sapiens
ttttagagcatgtga

SEQ ID NO: 1030726 - DNA, 15 bp, Homo sapiens
tttagagcatgtgac

SEQ ID NO: 1030727 - DNA, 15 bp, Homo sapiens
ttagagcatgtgacg

SEQ ID NO: 1030728 - DNA, 15 bp, Homo sapiens
tagagcatgtgacgc

SEQ ID NO: 1030729 - DNA, 15 bp, Homo sapiens
agagcatgtgacgcg

SEQ ID NO: 1030730 - DNA, 15 bp, Homo sapiens
gagcatgtgacgcgc

SEQ ID NO: 1030731 - DNA, 15 bp, Homo sapiens
agcatgtgacgcgcc

SEQ ID NO: 1030732 - DNA, 15 bp, Homo sapiens
gcatgtgacgcgcca

SEQ ID NO: 1030733 - DNA, 15 bp, Homo sapiens
catgtgacgcgccat

SEQ ID NO: 1030734 - DNA, 15 bp, Homo sapiens
atgtgacgcgccatg

SEQ ID NO: 1030735 - DNA, 15 bp, Homo sapiens
tgtgacgcgccatga

SEQ ID NO: 1030736 - DNA, 15 bp, Homo sapiens
gtgacgcgccatgaa

SEQ ID NO: 1030737 - DNA, 15 bp, Homo sapiens
tgacgcgccatgaac

SEQ ID NO: 1030738 - DNA, 15 bp, Homo sapiens
gacgcgccatgaacc

SEQ ID NO: 1030739 - DNA, 15 bp, Homo sapiens
acgcgccatgaacca

SEQ ID NO: 1030740 - DNA, 15 bp, Homo sapiens
cgcgccatgaaccag

SEQ ID NO: 1030741 - DNA, 15 bp, Homo sapiens
gcgccatgaaccaga

SEQ ID NO: 1030742 - DNA, 15 bp, Homo sapiens
cgccatgaaccagag

SEQ ID NO: 1030743 - DNA, 15 bp, Homo sapiens
gccatgaaccagagg

SEQ ID NO: 1030744 - DNA, 15 bp, Homo sapiens
ccatgaaccagagga

SEQ ID NO: 1030745 - DNA, 15 bp, Homo sapiens
catgaaccagaggag

SEQ ID NO: 1030746 - DNA, 15 bp, Homo sapiens
atgaaccagaggagc

SEQ ID NO: 1030747 - DNA, 15 bp, Homo sapiens
tgaaccagaggagcc

SEQ ID NO: 1030748 - DNA, 15 bp, Homo sapiens
gaaccagaggagcca

SEQ ID NO: 1030749 - DNA, 15 bp, Homo sapiens
aaccagaggagccac

SEQ ID NO: 1030750 - DNA, 15 bp, Homo sapiens
accagaggagccact

SEQ ID NO: 1030751 - DNA, 15 bp, Homo sapiens
ccagaggagccactt

SEQ ID NO: 1030752 - DNA, 15 bp, Homo sapiens
cagaggagccacttt

SEQ ID NO: 1030753 - DNA, 15 bp, Homo sapiens
agaggagccacttta

SEQ ID NO: 1030754 - DNA, 15 bp, Homo sapiens
gaggagccactttaa

SEQ ID NO: 1030755 - DNA, 15 bp, Homo sapiens
aggagccactttaaa

SEQ ID NO: 1030756 - DNA, 15 bp, Homo sapiens
ggagccactttaaat

SEQ ID NO: 1030757 - DNA, 15 bp, Homo sapiens
gagccactttaaatg

SEQ ID NO: 1030758 - DNA, 15 bp, Homo sapiens
agccactttaaatgg

SEQ ID NO: 1030759 - DNA, 15 bp, Homo sapiens
gccactttaaatgga

SEQ ID NO: 1030760 - DNA, 15 bp, Homo sapiens
ccactttaaatggac

SEQ ID NO: 1030761 - DNA, 15 bp, Homo sapiens
cactttaaatggaca

SEQ ID NO: 1030762 - DNA, 15 bp, Homo sapiens
actttaaatggacaa

SEQ ID NO: 1030763 - DNA, 15 bp, Homo sapiens
ctttaaatggacaaa

SEQ ID NO: 1030764 - DNA, 15 bp, Homo sapiens
tttaaatggacaaac

SEQ ID NO: 1030765 - DNA, 15 bp, Homo sapiens
ttaaatggacaaacg

SEQ ID NO: 1030766 - DNA, 15 bp, Homo sapiens
taaatggacaaacgg

SEQ ID NO: 1030767 - DNA, 15 bp, Homo sapiens
aaatggacaaacggg

SEQ ID NO: 1030768 - DNA, 15 bp, Homo sapiens
aatggacaaacgggg

SEQ ID NO: 1030769 - DNA, 15 bp, Homo sapiens
atggacaaacgggga

SEQ ID NO: 1030770 - DNA, 15 bp, Homo sapiens
tggacaaacggggat

SEQ ID NO: 1030771 - DNA, 15 bp, Homo sapiens
ggacaaacggggatc

SEQ ID NO: 1030772 - DNA, 15 bp, Homo sapiens
gacaaacggggatct

SEQ ID NO: 1030773 - DNA, 15 bp, Homo sapiens
acaaacggggatctc

SEQ ID NO: 1030774 - DNA, 15 bp, Homo sapiens
caaacggggatctca

SEQ ID NO: 1030775 - DNA, 15 bp, Homo sapiens
aaacggggatctcat

SEQ ID NO: 1030776 - DNA, 15 bp, Homo sapiens
aacggggatctcatt

SEQ ID NO: 1030777 - DNA, 15 bp, Homo sapiens
acggggatctcattt

SEQ ID NO: 1030778 - DNA, 15 bp, Homo sapiens
cggggatctcatttt

SEQ ID NO: 1030779 - DNA, 15 bp, Homo sapiens
ggggatctcattttt

SEQ ID NO: 1030780 - DNA, 15 bp, Homo sapiens
gggatctcatttttt

SEQ ID NO: 1030781 - DNA, 15 bp, Homo sapiens
ggatctcattttttt

SEQ ID NO: 1030782 - DNA, 15 bp, Homo sapiens
gatctcatttttttt

SEQ ID NO: 1030783 - DNA, 15 bp, Homo sapiens
atctcattttttttt

SEQ ID NO: 1030784 - DNA, 15 bp, Homo sapiens
tctcatttttttttt

SEQ ID NO: 1030785 - DNA, 15 bp, Homo sapiens
ctcattttttttttt

SEQ ID NO: 1030786 - DNA, 15 bp, Homo sapiens
tcatttttttttttt

SEQ ID NO: 1030787 - DNA, 15 bp, Homo sapiens
cattttttttttttt

SEQ ID NO: 1030788 - DNA, 15 bp, Homo sapiens
atttttttttttttt

SEQ ID NO: 1030789 - DNA, 15 bp, Homo sapiens
ttttttttttttttt

SEQ ID NO: 1030790 - DNA, 15 bp, Homo sapiens
tttttttttttttta

SEQ ID NO: 1030791 - DNA, 15 bp, Homo sapiens
tttttttttttttaa

SEQ ID NO: 1030792 - DNA, 15 bp, Homo sapiens
ttttttttttttaat

SEQ ID NO: 1030793 - DNA, 15 bp, Homo sapiens
tttttttttttaatg

SEQ ID NO: 1030794 - DNA, 15 bp, Homo sapiens
ttttttttttaatgg

SEQ ID NO: 1030795 - DNA, 15 bp, Homo sapiens
tttttttttaatggt

SEQ ID NO: 1030796 - DNA, 15 bp, Homo sapiens
ttttttttaatggtg

SEQ ID NO: 1030797 - DNA, 15 bp, Homo sapiens
tttttttaatggtga

SEQ ID NO: 1030798 - DNA, 15 bp, Homo sapiens
ttttttaatggtgag

SEQ ID NO: 1030799 - DNA, 15 bp, Homo sapiens
tttttaatggtgaga

SEQ ID NO: 1030800 - DNA, 15 bp, Homo sapiens
ttttaatggtgagac

SEQ ID NO: 1030801 - DNA, 15 bp, Homo sapiens
tttaatggtgagaca

SEQ ID NO: 1030802 - DNA, 15 bp, Homo sapiens
ttaatggtgagacaa

SEQ ID NO: 1030803 - DNA, 15 bp, Homo sapiens
taatggtgagacaag

SEQ ID NO: 1030804 - DNA, 15 bp, Homo sapiens
aatggtgagacaagc

SEQ ID NO: 1030805 - DNA, 15 bp, Homo sapiens
atggtgagacaagcc

SEQ ID NO: 1030806 - DNA, 15 bp, Homo sapiens
tggtgagacaagccc

SEQ ID NO: 1030807 - DNA, 15 bp, Homo sapiens
ggtgagacaagccct

SEQ ID NO: 1030808 - DNA, 15 bp, Homo sapiens
gtgagacaagccctg

SEQ ID NO: 1030809 - DNA, 15 bp, Homo sapiens
tgagacaagccctga

SEQ ID NO: 1030810 - DNA, 15 bp, Homo sapiens
gagacaagccctgag

SEQ ID NO: 1030811 - DNA, 15 bp, Homo sapiens
agacaagccctgaga

SEQ ID NO: 1030812 - DNA, 15 bp, Homo sapiens
gacaagccctgagaa

SEQ ID NO: 1030813 - DNA, 15 bp, Homo sapiens
acaagccctgagaag

SEQ ID NO: 1030814 - DNA, 15 bp, Homo sapiens
caagccctgagaagg

SEQ ID NO: 1030815 - DNA, 15 bp, Homo sapiens
aagccctgagaaggc

SEQ ID NO: 1030816 - DNA, 15 bp, Homo sapiens
agccctgagaaggca

SEQ ID NO: 1030817 - DNA, 15 bp, Homo sapiens
gccctgagaaggcaa

SEQ ID NO: 1030818 - DNA, 15 bp, Homo sapiens
ccctgagaaggcaaa

SEQ ID NO: 1030819 - DNA, 15 bp, Homo sapiens
cctgagaaggcaaat

SEQ ID NO: 1030820 - DNA, 15 bp, Homo sapiens
ctgagaaggcaaatg

SEQ ID NO: 1030821 - DNA, 15 bp, Homo sapiens
tgagaaggcaaatgg

SEQ ID NO: 1030822 - DNA, 15 bp, Homo sapiens
gagaaggcaaatgga

SEQ ID NO: 1030823 - DNA, 15 bp, Homo sapiens
agaaggcaaatggac

SEQ ID NO: 1030824 - DNA, 15 bp, Homo sapiens
gaaggcaaatggact

SEQ ID NO: 1030825 - DNA, 15 bp, Homo sapiens
aaggcaaatggactg

SEQ ID NO: 1030826 - DNA, 15 bp, Homo sapiens
aggcaaatggactgc

SEQ ID NO: 1030827 - DNA, 15 bp, Homo sapiens
ggcaaatggactgcc

SEQ ID NO: 1030828 - DNA, 15 bp, Homo sapiens
gcaaatggactgcct

SEQ ID NO: 1030829 - DNA, 15 bp, Homo sapiens
caaatggactgccta

SEQ ID NO: 1030830 - DNA, 15 bp, Homo sapiens
aaatggactgcctaa

SEQ ID NO: 1030831 - DNA, 15 bp, Homo sapiens
aatggactgcctaaa

SEQ ID NO: 1030832 - DNA, 15 bp, Homo sapiens
atggactgcctaaag

SEQ ID NO: 1030833 - DNA, 15 bp, Homo sapiens
tggactgcctaaagc

SEQ ID NO: 1030834 - DNA, 15 bp, Homo sapiens
ggactgcctaaagct

SEQ ID NO: 1030835 - DNA, 15 bp, Homo sapiens
gactgcctaaagcta

SEQ ID NO: 1030836 - DNA, 15 bp, Homo sapiens
actgcctaaagctac

SEQ ID NO: 1030837 - DNA, 15 bp, Homo sapiens
ctgcctaaagctaca

SEQ ID NO: 1030838 - DNA, 15 bp, Homo sapiens
tgcctaaagctacac

SEQ ID NO: 1030839 - DNA, 15 bp, Homo sapiens
gcctaaagctacaca

SEQ ID NO: 1030840 - DNA, 15 bp, Homo sapiens
cctaaagctacacag

SEQ ID NO: 1030841 - DNA, 15 bp, Homo sapiens
ctaaagctacacagg

SEQ ID NO: 1030842 - DNA, 15 bp, Homo sapiens
taaagctacacaggt

SEQ ID NO: 1030843 - DNA, 15 bp, Homo sapiens
aaagctacacaggtc

SEQ ID NO: 1030844 - DNA, 15 bp, Homo sapiens
aagctacacaggtca

SEQ ID NO: 1030845 - DNA, 15 bp, Homo sapiens
agctacacaggtcag

SEQ ID NO: 1030846 - DNA, 15 bp, Homo sapiens
gctacacaggtcagc

SEQ ID NO: 1030847 - DNA, 15 bp, Homo sapiens
ctacacaggtcagcg

SEQ ID NO: 1030848 - DNA, 15 bp, Homo sapiens
tacacaggtcagcgg

SEQ ID NO: 1030849 - DNA, 15 bp, Homo sapiens
acacaggtcagcggg

SEQ ID NO: 1030850 - DNA, 15 bp, Homo sapiens
cacaggtcagcgggg

SEQ ID NO: 1030851 - DNA, 15 bp, Homo sapiens
acaggtcagcggggc

SEQ ID NO: 1030852 - DNA, 15 bp, Homo sapiens
caggtcagcggggca

SEQ ID NO: 1030853 - DNA, 15 bp, Homo sapiens
aggtcagcggggcag

SEQ ID NO: 1030854 - DNA, 15 bp, Homo sapiens
ggtcagcggggcagg

SEQ ID NO: 1030855 - DNA, 15 bp, Homo sapiens
gtcagcggggcaggt

SEQ ID NO: 1030856 - DNA, 15 bp, Homo sapiens
tcagcggggcaggta

SEQ ID NO: 1030857 - DNA, 15 bp, Homo sapiens
cagcggggcaggtaa

SEQ ID NO: 1030858 - DNA, 15 bp, Homo sapiens
agcggggcaggtaaa

SEQ ID NO: 1030859 - DNA, 15 bp, Homo sapiens
gcggggcaggtaaat

SEQ ID NO: 1030860 - DNA, 15 bp, Homo sapiens
cggggcaggtaaatc

SEQ ID NO: 1030861 - DNA, 15 bp, Homo sapiens
ggggcaggtaaatct

SEQ ID NO: 1030862 - DNA, 15 bp, Homo sapiens
gggcaggtaaatcta

SEQ ID NO: 1030863 - DNA, 15 bp, Homo sapiens
ggcaggtaaatctaa

SEQ ID NO: 1030864 - DNA, 15 bp, Homo sapiens
gcaggtaaatctaaa

SEQ ID NO: 1030865 - DNA, 15 bp, Homo sapiens
caggtaaatctaaat

SEQ ID NO: 1030866 - DNA, 15 bp, Homo sapiens
aggtaaatctaaatt

SEQ ID NO: 1030867 - DNA, 15 bp, Homo sapiens
ggtaaatctaaattg

SEQ ID NO: 1030868 - DNA, 15 bp, Homo sapiens
gtaaatctaaattgg

SEQ ID NO: 1030869 - DNA, 15 bp, Homo sapiens
taaatctaaattggc

SEQ ID NO: 1030870 - DNA, 15 bp, Homo sapiens
aaatctaaattggca

SEQ ID NO: 1030871 - DNA, 15 bp, Homo sapiens
aatctaaattggcaa

SEQ ID NO: 1030872 - DNA, 15 bp, Homo sapiens
atctaaattggcaaa

SEQ ID NO: 1030873 - DNA, 15 bp, Homo sapiens
tctaaattggcaaag

SEQ ID NO: 1030874 - DNA, 15 bp, Homo sapiens
ctaaattggcaaagt

SEQ ID NO: 1030875 - DNA, 15 bp, Homo sapiens
taaattggcaaagta

SEQ ID NO: 1030876 - DNA, 15 bp, Homo sapiens
aaattggcaaagtaa

SEQ ID NO: 1030877 - DNA, 15 bp, Homo sapiens
aattggcaaagtaag

SEQ ID NO: 1030878 - DNA, 15 bp, Homo sapiens
attggcaaagtaagg

SEQ ID NO: 1030879 - DNA, 15 bp, Homo sapiens
ttggcaaagtaaggg

SEQ ID NO: 1030880 - DNA, 15 bp, Homo sapiens
tggcaaagtaagggc

SEQ ID NO: 1030881 - DNA, 15 bp, Homo sapiens
ggcaaagtaagggct

SEQ ID NO: 1030882 - DNA, 15 bp, Homo sapiens
gcaaagtaagggctg

SEQ ID NO: 1030883 - DNA, 15 bp, Homo sapiens
caaagtaagggctga

SEQ ID NO: 1030884 - DNA, 15 bp, Homo sapiens
aaagtaagggctgag

SEQ ID NO: 1030885 - DNA, 15 bp, Homo sapiens
aagtaagggctgagc

SEQ ID NO: 1030886 - DNA, 15 bp, Homo sapiens
agtaagggctgagcg

SEQ ID NO: 1030887 - DNA, 15 bp, Homo sapiens
gtaagggctgagcga

SEQ ID NO: 1030888 - DNA, 15 bp, Homo sapiens
taagggctgagcgaa

SEQ ID NO: 1030889 - DNA, 15 bp, Homo sapiens
aagggctgagcgaac

SEQ ID NO: 1030890 - DNA, 15 bp, Homo sapiens
agggctgagcgaaca

SEQ ID NO: 1030891 - DNA, 15 bp, Homo sapiens
gggctgagcgaacag

SEQ ID NO: 1030892 - DNA, 15 bp, Homo sapiens
ggctgagcgaacaga

SEQ ID NO: 1030893 - DNA, 15 bp, Homo sapiens
gctgagcgaacagac

SEQ ID NO: 1030894 - DNA, 15 bp, Homo sapiens
ctgagcgaacagact

SEQ ID NO: 1030895 - DNA, 15 bp, Homo sapiens
tgagcgaacagactc

SEQ ID NO: 1030896 - DNA, 15 bp, Homo sapiens
gagcgaacagactcc

SEQ ID NO: 1030897 - DNA, 15 bp, Homo sapiens
agcgaacagactccg

SEQ ID NO: 1030898 - DNA, 15 bp, Homo sapiens
gcgaacagactccga

SEQ ID NO: 1030899 - DNA, 15 bp, Homo sapiens
cgaacagactccgac

SEQ ID NO: 1030900 - DNA, 15 bp, Homo sapiens
gaacagactccgaca

SEQ ID NO: 1030901 - DNA, 15 bp, Homo sapiens
aacagactccgacac

SEQ ID NO: 1030902 - DNA, 15 bp, Homo sapiens
acagactccgacact

SEQ ID NO: 1030903 - DNA, 15 bp, Homo sapiens
cagactccgacacta

SEQ ID NO: 1030904 - DNA, 15 bp, Homo sapiens
agactccgacactag

SEQ ID NO: 1030905 - DNA, 15 bp, Homo sapiens
gactccgacactaga

SEQ ID NO: 1030906 - DNA, 15 bp, Homo sapiens
actccgacactagaa

SEQ ID NO: 1030907 - DNA, 15 bp, Homo sapiens
ctccgacactagaag

SEQ ID NO: 1030908 - DNA, 15 bp, Homo sapiens
tccgacactagaagg

SEQ ID NO: 1030909 - DNA, 15 bp, Homo sapiens
ccgacactagaaggc

SEQ ID NO: 1030910 - DNA, 15 bp, Homo sapiens
cgacactagaaggca

SEQ ID NO: 1030911 - DNA, 15 bp, Homo sapiens
gacactagaaggcag

SEQ ID NO: 1030912 - DNA, 15 bp, Homo sapiens
acactagaaggcaga

SEQ ID NO: 1030913 - DNA, 15 bp, Homo sapiens
cactagaaggcagag

SEQ ID NO: 1030914 - DNA, 15 bp, Homo sapiens
actagaaggcagagc

SEQ ID NO: 1030915 - DNA, 15 bp, Homo sapiens
ctagaaggcagagct

SEQ ID NO: 1030916 - DNA, 15 bp, Homo sapiens
tagaaggcagagctg

SEQ ID NO: 1030917 - DNA, 15 bp, Homo sapiens
agaaggcagagctga

SEQ ID NO: 1030918 - DNA, 15 bp, Homo sapiens
gaaggcagagctgaa

SEQ ID NO: 1030919 - DNA, 15 bp, Homo sapiens
aaggcagagctgaac

SEQ ID NO: 1030920 - DNA, 15 bp, Homo sapiens
aggcagagctgaact

SEQ ID NO: 1030921 - DNA, 15 bp, Homo sapiens
ggcagagctgaacta

SEQ ID NO: 1030922 - DNA, 15 bp, Homo sapiens
gcagagctgaactaa

SEQ ID NO: 1030923 - DNA, 15 bp, Homo sapiens
cagagctgaactaac

SEQ ID NO: 1030924 - DNA, 15 bp, Homo sapiens
agagctgaactaact

SEQ ID NO: 1030925 - DNA, 15 bp, Homo sapiens
gagctgaactaactt

SEQ ID NO: 1030926 - DNA, 15 bp, Homo sapiens
agctgaactaacttc

SEQ ID NO: 1030927 - DNA, 15 bp, Homo sapiens
gctgaactaacttct

SEQ ID NO: 1030928 - DNA, 15 bp, Homo sapiens
ctgaactaacttctg

SEQ ID NO: 1030929 - DNA, 15 bp, Homo sapiens
tgaactaacttctgc

SEQ ID NO: 1030930 - DNA, 15 bp, Homo sapiens
gaactaacttctgct

SEQ ID NO: 1030931 - DNA, 15 bp, Homo sapiens
aactaacttctgcta

SEQ ID NO: 1030932 - DNA, 15 bp, Homo sapiens
actaacttctgctaa

SEQ ID NO: 1030933 - DNA, 15 bp, Homo sapiens
ctaacttctgctaag

SEQ ID NO: 1030934 - DNA, 15 bp, Homo sapiens
taacttctgctaagg

SEQ ID NO: 1030935 - DNA, 15 bp, Homo sapiens
aacttctgctaaggt

SEQ ID NO: 1030936 - DNA, 15 bp, Homo sapiens
acttctgctaaggtc

SEQ ID NO: 1030937 - DNA, 15 bp, Homo sapiens
cttctgctaaggtcc

SEQ ID NO: 1030938 - DNA, 15 bp, Homo sapiens
ttctgctaaggtccc

SEQ ID NO: 1030939 - DNA, 15 bp, Homo sapiens
tctgctaaggtcccg

SEQ ID NO: 1030940 - DNA, 15 bp, Homo sapiens
ctgctaaggtcccgc

SEQ ID NO: 1030941 - DNA, 15 bp, Homo sapiens
tgctaaggtcccgcc

SEQ ID NO: 1030942 - DNA, 15 bp, Homo sapiens
gctaaggtcccgcct

SEQ ID NO: 1030943 - DNA, 15 bp, Homo sapiens
ctaaggtcccgcctc

SEQ ID NO: 1030944 - DNA, 15 bp, Homo sapiens
taaggtcccgcctct

SEQ ID NO: 1030945 - DNA, 15 bp, Homo sapiens
aaggtcccgcctctg

SEQ ID NO: 1030946 - DNA, 15 bp, Homo sapiens
aggtcccgcctctgc

SEQ ID NO: 1030947 - DNA, 15 bp, Homo sapiens
ggtcccgcctctgcc

SEQ ID NO: 1030948 - DNA, 15 bp, Homo sapiens
gtcccgcctctgccg

SEQ ID NO: 1030949 - DNA, 15 bp, Homo sapiens
tcccgcctctgccgc

SEQ ID NO: 1030950 - DNA, 15 bp, Homo sapiens
cccgcctctgccgct

SEQ ID NO: 1030951 - DNA, 15 bp, Homo sapiens
ccgcctctgccgctt

SEQ ID NO: 1030952 - DNA, 15 bp, Homo sapiens
cgcctctgccgcttt

SEQ ID NO: 1030953 - DNA, 15 bp, Homo sapiens
gcctctgccgctttg

SEQ ID NO: 1030954 - DNA, 15 bp, Homo sapiens
cctctgccgctttgt

SEQ ID NO: 1030955 - DNA, 15 bp, Homo sapiens
ctctgccgctttgtc

SEQ ID NO: 1030956 - DNA, 15 bp, Homo sapiens
tctgccgctttgtcc

SEQ ID NO: 1030957 - DNA, 15 bp, Homo sapiens
ctgccgctttgtccc

SEQ ID NO: 1030958 - DNA, 15 bp, Homo sapiens
tgccgctttgtcccg

SEQ ID NO: 1030959 - DNA, 15 bp, Homo sapiens
gccgctttgtcccgc

SEQ ID NO: 1030960 - DNA, 15 bp, Homo sapiens
ccgctttgtcccgcc

SEQ ID NO: 1030961 - DNA, 15 bp, Homo sapiens
cgctttgtcccgccc

SEQ ID NO: 1030962 - DNA, 15 bp, Homo sapiens
gctttgtcccgccct

SEQ ID NO: 1030963 - DNA, 15 bp, Homo sapiens
ctttgtcccgccctt

SEQ ID NO: 1030964 - DNA, 15 bp, Homo sapiens
tttgtcccgccctta

SEQ ID NO: 1030965 - DNA, 15 bp, Homo sapiens
ttgtcccgcccttat

SEQ ID NO: 1030966 - DNA, 15 bp, Homo sapiens
tgtcccgcccttatc

SEQ ID NO: 1030967 - DNA, 15 bp, Homo sapiens
gtcccgcccttatct

SEQ ID NO: 1030968 - DNA, 15 bp, Homo sapiens
tcccgcccttatctt

SEQ ID NO: 1030969 - DNA, 15 bp, Homo sapiens
cccgcccttatcttc

SEQ ID NO: 1030970 - DNA, 15 bp, Homo sapiens
ccgcccttatcttct

SEQ ID NO: 1030971 - DNA, 15 bp, Homo sapiens
cgcccttatcttctc

SEQ ID NO: 1030972 - DNA, 15 bp, Homo sapiens
gcccttatcttctcc

SEQ ID NO: 1030973 - DNA, 15 bp, Homo sapiens
cccttatcttctccc

SEQ ID NO: 1030974 - DNA, 15 bp, Homo sapiens
ccttatcttctcccc

SEQ ID NO: 1030975 - DNA, 15 bp, Homo sapiens
cttatcttctcccct

SEQ ID NO: 1030976 - DNA, 15 bp, Homo sapiens
ttatcttctcccctc

SEQ ID NO: 1030977 - DNA, 15 bp, Homo sapiens
tatcttctcccctcc

SEQ ID NO: 1030978 - DNA, 15 bp, Homo sapiens
atcttctcccctcct

SEQ ID NO: 1030979 - DNA, 15 bp, Homo sapiens
tcttctcccctcctc

SEQ ID NO: 1030980 - DNA, 15 bp, Homo sapiens
cttctcccctcctcc

SEQ ID NO: 1030981 - DNA, 15 bp, Homo sapiens
ttctcccctcctcca

SEQ ID NO: 1030982 - DNA, 15 bp, Homo sapiens
tctcccctcctccag

SEQ ID NO: 1030983 - DNA, 15 bp, Homo sapiens
ctcccctcctccagc

SEQ ID NO: 1030984 - DNA, 15 bp, Homo sapiens
tcccctcctccagcg

SEQ ID NO: 1030985 - DNA, 15 bp, Homo sapiens
cccctcctccagcgc

SEQ ID NO: 1030986 - DNA, 15 bp, Homo sapiens
ccctcctccagcgcc

SEQ ID NO: 1030987 - DNA, 15 bp, Homo sapiens
cctcctccagcgcct

SEQ ID NO: 1030988 - DNA, 15 bp, Homo sapiens
ctcctccagcgcctc

SEQ ID NO: 1030989 - DNA, 15 bp, Homo sapiens
tcctccagcgcctca

SEQ ID NO: 1030990 - DNA, 15 bp, Homo sapiens
cctccagcgcctcat

SEQ ID NO: 1030991 - DNA, 15 bp, Homo sapiens
ctccagcgcctcatt

SEQ ID NO: 1030992 - DNA, 15 bp, Homo sapiens
tccagcgcctcattc

SEQ ID NO: 1030993 - DNA, 15 bp, Homo sapiens
ccagcgcctcattcc

SEQ ID NO: 1030994 - DNA, 15 bp, Homo sapiens
cagcgcctcattccc

SEQ ID NO: 1030995 - DNA, 15 bp, Homo sapiens
agcgcctcattccct

SEQ ID NO: 1030996 - DNA, 15 bp, Homo sapiens
gcgcctcattccctt

SEQ ID NO: 1030997 - DNA, 15 bp, Homo sapiens
cgcctcattcccttt

SEQ ID NO: 1030998 - DNA, 15 bp, Homo sapiens
gcctcattccctttt

SEQ ID NO: 1030999 - DNA, 15 bp, Homo sapiens
cctcattcccttttc

SEQ ID NO: 1031000 - DNA, 15 bp, Homo sapiens
ctcattcccttttcg

SEQ ID NO: 1031001 - DNA, 15 bp, Homo sapiens
tcattcccttttcgc

SEQ ID NO: 1031002 - DNA, 15 bp, Homo sapiens
cattcccttttcgct

SEQ ID NO: 1031003 - DNA, 15 bp, Homo sapiens
attcccttttcgctc

SEQ ID NO: 1031004 - DNA, 15 bp, Homo sapiens
ttcccttttcgctcg

SEQ ID NO: 1031005 - DNA, 15 bp, Homo sapiens
tcccttttcgctcgc

SEQ ID NO: 1031006 - DNA, 15 bp, Homo sapiens
cccttttcgctcgcc

SEQ ID NO: 1031007 - DNA, 15 bp, Homo sapiens
ccttttcgctcgccc

SEQ ID NO: 1031008 - DNA, 15 bp, Homo sapiens
cttttcgctcgcccc

SEQ ID NO: 1031009 - DNA, 15 bp, Homo sapiens
ttttcgctcgccccg

SEQ ID NO: 1031010 - DNA, 15 bp, Homo sapiens
tttcgctcgccccgg

SEQ ID NO: 1031011 - DNA, 15 bp, Homo sapiens
ttcgctcgccccggc

SEQ ID NO: 1031012 - DNA, 15 bp, Homo sapiens
tcgctcgccccggcc

SEQ ID NO: 1031013 - DNA, 15 bp, Homo sapiens
cgctcgccccggccg

SEQ ID NO: 1031014 - DNA, 15 bp, Homo sapiens
gctcgccccggccgt

SEQ ID NO: 1031015 - DNA, 15 bp, Homo sapiens
ctcgccccggccgtg

SEQ ID NO: 1031016 - DNA, 15 bp, Homo sapiens
tcgccccggccgtgc

SEQ ID NO: 1031017 - DNA, 15 bp, Homo sapiens
cgccccggccgtgct

SEQ ID NO: 1031018 - DNA, 15 bp, Homo sapiens
gccccggccgtgctg

SEQ ID NO: 1031019 - DNA, 15 bp, Homo sapiens
ccccggccgtgctga

SEQ ID NO: 1031020 - DNA, 15 bp, Homo sapiens
cccggccgtgctgaa

SEQ ID NO: 1031021 - DNA, 15 bp, Homo sapiens
ccggccgtgctgaag

SEQ ID NO: 1031022 - DNA, 15 bp, Homo sapiens
cggccgtgctgaagc

SEQ ID NO: 1031023 - DNA, 15 bp, Homo sapiens
ggccgtgctgaagca

SEQ ID NO: 1031024 - DNA, 15 bp, Homo sapiens
gccgtgctgaagcaa

SEQ ID NO: 1031025 - DNA, 15 bp, Homo sapiens
ccgtgctgaagcaac

SEQ ID NO: 1031026 - DNA, 15 bp, Homo sapiens
cgtgctgaagcaact

SEQ ID NO: 1031027 - DNA, 15 bp, Homo sapiens
gtgctgaagcaactt

SEQ ID NO: 1031028 - DNA, 15 bp, Homo sapiens
tgctgaagcaacttc

SEQ ID NO: 1031029 - DNA, 15 bp, Homo sapiens
gctgaagcaacttcc

SEQ ID NO: 1031030 - DNA, 15 bp, Homo sapiens
ctgaagcaacttccg

SEQ ID NO: 1031031 - DNA, 15 bp, Homo sapiens
tgaagcaacttccgc

SEQ ID NO: 1031032 - DNA, 15 bp, Homo sapiens
gaagcaacttccgcc

SEQ ID NO: 1031033 - DNA, 15 bp, Homo sapiens
aagcaacttccgccc

SEQ ID NO: 1031034 - DNA, 15 bp, Homo sapiens
agcaacttccgccct

SEQ ID NO: 1031035 - DNA, 15 bp, Homo sapiens
gcaacttccgccctg

SEQ ID NO: 1031036 - DNA, 15 bp, Homo sapiens
caacttccgccctga

SEQ ID NO: 1031037 - DNA, 15 bp, Homo sapiens
aacttccgccctgag

SEQ ID NO: 1031038 - DNA, 15 bp, Homo sapiens
acttccgccctgaga

SEQ ID NO: 1031039 - DNA, 15 bp, Homo sapiens
cttccgccctgagaa

SEQ ID NO: 1031040 - DNA, 15 bp, Homo sapiens
ttccgccctgagaag

SEQ ID NO: 1031041 - DNA, 15 bp, Homo sapiens
tccgccctgagaagg

SEQ ID NO: 1031042 - DNA, 15 bp, Homo sapiens
ccgccctgagaaggg

SEQ ID NO: 1031043 - DNA, 15 bp, Homo sapiens
cgccctgagaagggt

SEQ ID NO: 1031044 - DNA, 15 bp, Homo sapiens
gccctgagaagggtg

SEQ ID NO: 1031045 - DNA, 15 bp, Homo sapiens
ccctgagaagggtgg

SEQ ID NO: 1031046 - DNA, 15 bp, Homo sapiens
cctgagaagggtggg

SEQ ID NO: 1031047 - DNA, 15 bp, Homo sapiens
ctgagaagggtgggg

SEQ ID NO: 1031048 - DNA, 15 bp, Homo sapiens
tgagaagggtggggc

SEQ ID NO: 1031049 - DNA, 15 bp, Homo sapiens
gagaagggtggggct

SEQ ID NO: 1031050 - DNA, 15 bp, Homo sapiens
agaagggtggggctt

SEQ ID NO: 1031051 - DNA, 15 bp, Homo sapiens
gaagggtggggcttc

SEQ ID NO: 1031052 - DNA, 15 bp, Homo sapiens
aagggtggggcttcc

SEQ ID NO: 1031053 - DNA, 15 bp, Homo sapiens
agggtggggcttccg

SEQ ID NO: 1031054 - DNA, 15 bp, Homo sapiens
gggtggggcttccgt

SEQ ID NO: 1031055 - DNA, 15 bp, Homo sapiens
ggtggggcttccgtc

SEQ ID NO: 1031056 - DNA, 15 bp, Homo sapiens
gtggggcttccgtct

SEQ ID NO: 1031057 - DNA, 15 bp, Homo sapiens
tggggcttccgtctc

SEQ ID NO: 1031058 - DNA, 15 bp, Homo sapiens
ggggcttccgtctcc

SEQ ID NO: 1031059 - DNA, 15 bp, Homo sapiens
gggcttccgtctccc

SEQ ID NO: 1031060 - DNA, 15 bp, Homo sapiens
ggcttccgtctcccg

SEQ ID NO: 1031061 - DNA, 15 bp, Homo sapiens
gcttccgtctcccgc

SEQ ID NO: 1031062 - DNA, 15 bp, Homo sapiens
cttccgtctcccgct

SEQ ID NO: 1031063 - DNA, 15 bp, Homo sapiens
ttccgtctcccgctc

SEQ ID NO: 1031064 - DNA, 15 bp, Homo sapiens
tccgtctcccgctct

SEQ ID NO: 1031065 - DNA, 15 bp, Homo sapiens
ccgtctcccgctctc

SEQ ID NO: 1031066 - DNA, 15 bp, Homo sapiens
cgtctcccgctctcg

SEQ ID NO: 1031067 - DNA, 15 bp, Homo sapiens
gtctcccgctctcgc

SEQ ID NO: 1031068 - DNA, 15 bp, Homo sapiens
tctcccgctctcgcg

SEQ ID NO: 1031069 - DNA, 15 bp, Homo sapiens
ctcccgctctcgcga

SEQ ID NO: 1031070 - DNA, 15 bp, Homo sapiens
tcccgctctcgcgac

SEQ ID NO: 1031071 - DNA, 15 bp, Homo sapiens
cccgctctcgcgact

SEQ ID NO: 1031072 - DNA, 15 bp, Homo sapiens
ccgctctcgcgactc

SEQ ID NO: 1031073 - DNA, 15 bp, Homo sapiens
cgctctcgcgactcc

SEQ ID NO: 1031074 - DNA, 15 bp, Homo sapiens
gctctcgcgactcct

SEQ ID NO: 1031075 - DNA, 15 bp, Homo sapiens
ctctcgcgactcctg

SEQ ID NO: 1031076 - DNA, 15 bp, Homo sapiens
tctcgcgactcctgg

SEQ ID NO: 1031077 - DNA, 15 bp, Homo sapiens
ctcgcgactcctggc

SEQ ID NO: 1031078 - DNA, 15 bp, Homo sapiens
tcgcgactcctggcg

SEQ ID NO: 1031079 - DNA, 15 bp, Homo sapiens
cgcgactcctggcgg

SEQ ID NO: 1031080 - DNA, 15 bp, Homo sapiens
gcgactcctggcggt

SEQ ID NO: 1031081 - DNA, 15 bp, Homo sapiens
cgactcctggcggtg

SEQ ID NO: 1031082 - DNA, 15 bp, Homo sapiens
gactcctggcggtga

SEQ ID NO: 1031083 - DNA, 15 bp, Homo sapiens
actcctggcggtgaa

SEQ ID NO: 1031084 - DNA, 15 bp, Homo sapiens
ctcctggcggtgaag

SEQ ID NO: 1031085 - DNA, 15 bp, Homo sapiens
tcctggcggtgaagg

SEQ ID NO: 1031086 - DNA, 15 bp, Homo sapiens
cctggcggtgaagga

SEQ ID NO: 1031087 - DNA, 15 bp, Homo sapiens
ctggcggtgaaggac

SEQ ID NO: 1031088 - DNA, 15 bp, Homo sapiens
tggcggtgaaggacg

SEQ ID NO: 1031089 - DNA, 15 bp, Homo sapiens
ggcggtgaaggacgg

SEQ ID NO: 1031090 - DNA, 15 bp, Homo sapiens
gcggtgaaggacgga

SEQ ID NO: 1031091 - DNA, 15 bp, Homo sapiens
cggtgaaggacggaa

SEQ ID NO: 1031092 - DNA, 15 bp, Homo sapiens
ggtgaaggacggaag

SEQ ID NO: 1031093 - DNA, 15 bp, Homo sapiens
gtgaaggacggaaga

SEQ ID NO: 1031094 - DNA, 15 bp, Homo sapiens
tgaaggacggaagat

SEQ ID NO: 1031095 - DNA, 15 bp, Homo sapiens
gaaggacggaagatg

SEQ ID NO: 1031096 - DNA, 15 bp, Homo sapiens
aaggacggaagatga

SEQ ID NO: 1031097 - DNA, 15 bp, Homo sapiens
aggacggaagatgat

SEQ ID NO: 1031098 - DNA, 15 bp, Homo sapiens
ggacggaagatgata

SEQ ID NO: 1031099 - DNA, 15 bp, Homo sapiens
gacggaagatgatag

SEQ ID NO: 1031100 - DNA, 15 bp, Homo sapiens
acggaagatgatagc

SEQ ID NO: 1031101 - DNA, 15 bp, Homo sapiens
cggaagatgatagcc

SEQ ID NO: 1031102 - DNA, 15 bp, Homo sapiens
ggaagatgatagcca

SEQ ID NO: 1031103 - DNA, 15 bp, Homo sapiens
gaagatgatagccac

SEQ ID NO: 1031104 - DNA, 15 bp, Homo sapiens
aagatgatagccaca

SEQ ID NO: 1031105 - DNA, 15 bp, Homo sapiens
agatgatagccacat

SEQ ID NO: 1031106 - DNA, 15 bp, Homo sapiens
gatgatagccacatt

SEQ ID NO: 1031107 - DNA, 15 bp, Homo sapiens
atgatagccacattt

SEQ ID NO: 1031108 - DNA, 15 bp, Homo sapiens
tgatagccacatttc

SEQ ID NO: 1031109 - DNA, 15 bp, Homo sapiens
gatagccacatttct

SEQ ID NO: 1031110 - DNA, 15 bp, Homo sapiens
atagccacatttctt

SEQ ID NO: 1031111 - DNA, 15 bp, Homo sapiens
tagccacatttcttc

SEQ ID NO: 1031112 - DNA, 15 bp, Homo sapiens
agccacatttcttcc

SEQ ID NO: 1031113 - DNA, 15 bp, Homo sapiens
gccacatttcttcct

SEQ ID NO: 1031114 - DNA, 15 bp, Homo sapiens
ccacatttcttcctc

SEQ ID NO: 1031115 - DNA, 15 bp, Homo sapiens
cacatttcttcctcg

SEQ ID NO: 1031116 - DNA, 15 bp, Homo sapiens
acatttcttcctcgc

SEQ ID NO: 1031117 - DNA, 15 bp, Homo sapiens
catttcttcctcgcc

SEQ ID NO: 1031118 - DNA, 15 bp, Homo sapiens
atttcttcctcgccc

SEQ ID NO: 1031119 - DNA, 15 bp, Homo sapiens
tttcttcctcgccct

SEQ ID NO: 1031120 - DNA, 15 bp, Homo sapiens
ttcttcctcgccctt

SEQ ID NO: 1031121 - DNA, 15 bp, Homo sapiens
tcttcctcgcccttc

SEQ ID NO: 1031122 - DNA, 15 bp, Homo sapiens
cttcctcgcccttcc

SEQ ID NO: 1031123 - DNA, 15 bp, Homo sapiens
ttcctcgcccttccc

SEQ ID NO: 1031124 - DNA, 15 bp, Homo sapiens
tcctcgcccttcccc

SEQ ID NO: 1031125 - DNA, 15 bp, Homo sapiens
cctcgcccttcccct

SEQ ID NO: 1031126 - DNA, 15 bp, Homo sapiens
ctcgcccttccccta

SEQ ID NO: 1031127 - DNA, 15 bp, Homo sapiens
tcgcccttcccctag

SEQ ID NO: 1031128 - DNA, 15 bp, Homo sapiens
cgcccttcccctagg

SEQ ID NO: 1031129 - DNA, 15 bp, Homo sapiens
gcccttcccctaggt

SEQ ID NO: 1031130 - DNA, 15 bp, Homo sapiens
cccttcccctaggtt

SEQ ID NO: 1031131 - DNA, 15 bp, Homo sapiens
ccttcccctaggttc

SEQ ID NO: 1031132 - DNA, 15 bp, Homo sapiens
cttcccctaggttcc

SEQ ID NO: 1031133 - DNA, 15 bp, Homo sapiens
ttcccctaggttccc

SEQ ID NO: 1031134 - DNA, 15 bp, Homo sapiens
tcccctaggttccct

SEQ ID NO: 1031135 - DNA, 15 bp, Homo sapiens
cccctaggttccctg

SEQ ID NO: 1031136 - DNA, 15 bp, Homo sapiens
ccctaggttccctgt

SEQ ID NO: 1031137 - DNA, 15 bp, Homo sapiens
cctaggttccctgtc

SEQ ID NO: 1031138 - DNA, 15 bp, Homo sapiens
ctaggttccctgtca

SEQ ID NO: 1031139 - DNA, 15 bp, Homo sapiens
taggttccctgtcac

SEQ ID NO: 1031140 - DNA, 15 bp, Homo sapiens
aggttccctgtcaca

SEQ ID NO: 1031141 - DNA, 15 bp, Homo sapiens
ggttccctgtcacag

SEQ ID NO: 1031142 - DNA, 15 bp, Homo sapiens
gttccctgtcacagt

SEQ ID NO: 1031143 - DNA, 15 bp, Homo sapiens
ttccctgtcacagtt

SEQ ID NO: 1031144 - DNA, 15 bp, Homo sapiens
tccctgtcacagttc

SEQ ID NO: 1031145 - DNA, 15 bp, Homo sapiens
ccctgtcacagttcc

SEQ ID NO: 1031146 - DNA, 15 bp, Homo sapiens
cctgtcacagttccg

SEQ ID NO: 1031147 - DNA, 15 bp, Homo sapiens
ctgtcacagttccgc

SEQ ID NO: 1031148 - DNA, 15 bp, Homo sapiens
tgtcacagttccgcc

SEQ ID NO: 1031149 - DNA, 15 bp, Homo sapiens
gtcacagttccgccc

SEQ ID NO: 1031150 - DNA, 15 bp, Homo sapiens
tcacagttccgccct

SEQ ID NO: 1031151 - DNA, 15 bp, Homo sapiens
cacagttccgccctt

SEQ ID NO: 1031152 - DNA, 15 bp, Homo sapiens
acagttccgccctta

SEQ ID NO: 1031153 - DNA, 15 bp, Homo sapiens
cagttccgcccttac

SEQ ID NO: 1031154 - DNA, 15 bp, Homo sapiens
agttccgcccttact

SEQ ID NO: 1031155 - DNA, 15 bp, Homo sapiens
gttccgcccttacta

SEQ ID NO: 1031156 - DNA, 15 bp, Homo sapiens
ttccgcccttactac

SEQ ID NO: 1031157 - DNA, 15 bp, Homo sapiens
tccgcccttactact

SEQ ID NO: 1031158 - DNA, 15 bp, Homo sapiens
ccgcccttactactc

SEQ ID NO: 1031159 - DNA, 15 bp, Homo sapiens
cgcccttactactcc

SEQ ID NO: 1031160 - DNA, 15 bp, Homo sapiens
gcccttactactccc

SEQ ID NO: 1031161 - DNA, 15 bp, Homo sapiens
cccttactactccca

SEQ ID NO: 1031162 - DNA, 15 bp, Homo sapiens
ccttactactcccac

SEQ ID NO: 1031163 - DNA, 15 bp, Homo sapiens
cttactactcccact

SEQ ID NO: 1031164 - DNA, 15 bp, Homo sapiens
ttactactcccactt

SEQ ID NO: 1031165 - DNA, 15 bp, Homo sapiens
tactactcccacttc

SEQ ID NO: 1031166 - DNA, 15 bp, Homo sapiens
actactcccacttcc

SEQ ID NO: 1031167 - DNA, 15 bp, Homo sapiens
ctactcccacttccg

SEQ ID NO: 1031168 - DNA, 15 bp, Homo sapiens
tactcccacttccgg

SEQ ID NO: 1031169 - DNA, 15 bp, Homo sapiens
actcccacttccggc

SEQ ID NO: 1031170 - DNA, 15 bp, Homo sapiens
ctcccacttccggcc

SEQ ID NO: 1031171 - DNA, 15 bp, Homo sapiens
tcccacttccggcca

SEQ ID NO: 1031172 - DNA, 15 bp, Homo sapiens
cccacttccggccag

SEQ ID NO: 1031173 - DNA, 15 bp, Homo sapiens
ccacttccggccagg

SEQ ID NO: 1031174 - DNA, 15 bp, Homo sapiens
cacttccggccaggg

SEQ ID NO: 1031175 - DNA, 15 bp, Homo sapiens
acttccggccaggga

SEQ ID NO: 1031176 - DNA, 15 bp, Homo sapiens
cttccggccagggaa

SEQ ID NO: 1031177 - DNA, 15 bp, Homo sapiens
ttccggccagggaac

SEQ ID NO: 1031178 - DNA, 15 bp, Homo sapiens
tccggccagggaaca

SEQ ID NO: 1031179 - DNA, 15 bp, Homo sapiens
ccggccagggaacag

SEQ ID NO: 1031180 - DNA, 15 bp, Homo sapiens
cggccagggaacagc

SEQ ID NO: 1031181 - DNA, 15 bp, Homo sapiens
ggccagggaacagcc

SEQ ID NO: 1031182 - DNA, 15 bp, Homo sapiens
gccagggaacagcca

SEQ ID NO: 1031183 - DNA, 15 bp, Homo sapiens
ccagggaacagccac

SEQ ID NO: 1031184 - DNA, 15 bp, Homo sapiens
cagggaacagccact

SEQ ID NO: 1031185 - DNA, 15 bp, Homo sapiens
agggaacagccactt

SEQ ID NO: 1031186 - DNA, 15 bp, Homo sapiens
gggaacagccacttc

SEQ ID NO: 1031187 - DNA, 15 bp, Homo sapiens
ggaacagccacttcc

SEQ ID NO: 1031188 - DNA, 15 bp, Homo sapiens
gaacagccacttcca

SEQ ID NO: 1031189 - DNA, 15 bp, Homo sapiens
aacagccacttccac

SEQ ID NO: 1031190 - DNA, 15 bp, Homo sapiens
acagccacttccacc

SEQ ID NO: 1031191 - DNA, 15 bp, Homo sapiens
cagccacttccaccc

SEQ ID NO: 1031192 - DNA, 15 bp, Homo sapiens
agccacttccacccg

SEQ ID NO: 1031193 - DNA, 15 bp, Homo sapiens
gccacttccacccgg

SEQ ID NO: 1031194 - DNA, 15 bp, Homo sapiens
ccacttccacccgga

SEQ ID NO: 1031195 - DNA, 15 bp, Homo sapiens
cacttccacccggaa

SEQ ID NO: 1031196 - DNA, 15 bp, Homo sapiens
acttccacccggaaa

SEQ ID NO: 1031197 - DNA, 15 bp, Homo sapiens
cttccacccggaaaa

SEQ ID NO: 1031198 - DNA, 15 bp, Homo sapiens
ttccacccggaaaag

SEQ ID NO: 1031199 - DNA, 15 bp, Homo sapiens
tccacccggaaaagg

SEQ ID NO: 1031200 - DNA, 15 bp, Homo sapiens
ccacccggaaaaggg

SEQ ID NO: 1031201 - DNA, 15 bp, Homo sapiens
cacccggaaaagggg

SEQ ID NO: 1031202 - DNA, 15 bp, Homo sapiens
acccggaaaaggggt

SEQ ID NO: 1031203 - DNA, 15 bp, Homo sapiens
cccggaaaaggggtt

SEQ ID NO: 1031204 - DNA, 15 bp, Homo sapiens
ccggaaaaggggttg

SEQ ID NO: 1031205 - DNA, 15 bp, Homo sapiens
cggaaaaggggttgt

SEQ ID NO: 1031206 - DNA, 15 bp, Homo sapiens
ggaaaaggggttgtt

SEQ ID NO: 1031207 - DNA, 15 bp, Homo sapiens
gaaaaggggttgttc

SEQ ID NO: 1031208 - DNA, 15 bp, Homo sapiens
aaaaggggttgttcc

SEQ ID NO: 1031209 - DNA, 15 bp, Homo sapiens
aaaggggttgttccg

SEQ ID NO: 1031210 - DNA, 15 bp, Homo sapiens
aaggggttgttccgc

SEQ ID NO: 1031211 - DNA, 15 bp, Homo sapiens
aggggttgttccgcc

SEQ ID NO: 1031212 - DNA, 15 bp, Homo sapiens
ggggttgttccgccg

SEQ ID NO: 1031213 - DNA, 15 bp, Homo sapiens
gggttgttccgccgt

SEQ ID NO: 1031214 - DNA, 15 bp, Homo sapiens
ggttgttccgccgtg

SEQ ID NO: 1031215 - DNA, 15 bp, Homo sapiens
gttgttccgccgtgg

SEQ ID NO: 1031216 - DNA, 15 bp, Homo sapiens
ttgttccgccgtggg

SEQ ID NO: 1031217 - DNA, 15 bp, Homo sapiens
tgttccgccgtgggg

SEQ ID NO: 1031218 - DNA, 15 bp, Homo sapiens
gttccgccgtggggc

SEQ ID NO: 1031219 - DNA, 15 bp, Homo sapiens
ttccgccgtggggcg

SEQ ID NO: 1031220 - DNA, 15 bp, Homo sapiens
tccgccgtggggcgc

SEQ ID NO: 1031221 - DNA, 15 bp, Homo sapiens
ccgccgtggggcgcc

SEQ ID NO: 1031222 - DNA, 15 bp, Homo sapiens
cgccgtggggcgcca

SEQ ID NO: 1031223 - DNA, 15 bp, Homo sapiens
gccgtggggcgccag

SEQ ID NO: 1031224 - DNA, 15 bp, Homo sapiens
ccgtggggcgccagc

SEQ ID NO: 1031225 - DNA, 15 bp, Homo sapiens
cgtggggcgccagct

SEQ ID NO: 1031226 - DNA, 15 bp, Homo sapiens
gtggggcgccagctg

SEQ ID NO: 1031227 - DNA, 15 bp, Homo sapiens
tggggcgccagctgt

SEQ ID NO: 1031228 - DNA, 15 bp, Homo sapiens
ggggcgccagctgtg

SEQ ID NO: 1031229 - DNA, 15 bp, Homo sapiens
gggcgccagctgtgg

SEQ ID NO: 1031230 - DNA, 15 bp, Homo sapiens
ggcgccagctgtggc

SEQ ID NO: 1031231 - DNA, 15 bp, Homo sapiens
gcgccagctgtggcc

SEQ ID NO: 1031232 - DNA, 15 bp, Homo sapiens
cgccagctgtggccc

SEQ ID NO: 1031233 - DNA, 15 bp, Homo sapiens
gccagctgtggccca

SEQ ID NO: 1031234 - DNA, 15 bp, Homo sapiens
ccagctgtggcccac

SEQ ID NO: 1031235 - DNA, 15 bp, Homo sapiens
cagctgtggcccacc

SEQ ID NO: 1031236 - DNA, 15 bp, Homo sapiens
agctgtggcccaccc

SEQ ID NO: 1031237 - DNA, 15 bp, Homo sapiens
gctgtggcccaccca

SEQ ID NO: 1031238 - DNA, 15 bp, Homo sapiens
ctgtggcccacccat

SEQ ID NO: 1031239 - DNA, 15 bp, Homo sapiens
tgtggcccacccatc

SEQ ID NO: 1031240 - DNA, 15 bp, Homo sapiens
gtggcccacccatcc

SEQ ID NO: 1031241 - DNA, 15 bp, Homo sapiens
tggcccacccatcct

SEQ ID NO: 1031242 - DNA, 15 bp, Homo sapiens
ggcccacccatcctg

SEQ ID NO: 1031243 - DNA, 15 bp, Homo sapiens
gcccacccatcctgc

SEQ ID NO: 1031244 - DNA, 15 bp, Homo sapiens
cccacccatcctgcc

SEQ ID NO: 1031245 - DNA, 15 bp, Homo sapiens
ccacccatcctgccc

SEQ ID NO: 1031246 - DNA, 15 bp, Homo sapiens
cacccatcctgcccc

SEQ ID NO: 1031247 - DNA, 15 bp, Homo sapiens
acccatcctgccccg

SEQ ID NO: 1031248 - DNA, 15 bp, Homo sapiens
cccatcctgccccgt

SEQ ID NO: 1031249 - DNA, 15 bp, Homo sapiens
ccatcctgccccgta

SEQ ID NO: 1031250 - DNA, 15 bp, Homo sapiens
catcctgccccgtac

SEQ ID NO: 1031251 - DNA, 15 bp, Homo sapiens
atcctgccccgtact

SEQ ID NO: 1031252 - DNA, 15 bp, Homo sapiens
tcctgccccgtactt

SEQ ID NO: 1031253 - DNA, 15 bp, Homo sapiens
cctgccccgtacttt

SEQ ID NO: 1031254 - DNA, 15 bp, Homo sapiens
ctgccccgtactttc

SEQ ID NO: 1031255 - DNA, 15 bp, Homo sapiens
tgccccgtactttcg

SEQ ID NO: 1031256 - DNA, 15 bp, Homo sapiens
gccccgtactttcgc

SEQ ID NO: 1031257 - DNA, 15 bp, Homo sapiens
ccccgtactttcgcc

SEQ ID NO: 1031258 - DNA, 15 bp, Homo sapiens
cccgtactttcgcca

SEQ ID NO: 1031259 - DNA, 15 bp, Homo sapiens
ccgtactttcgccat

SEQ ID NO: 1031260 - DNA, 15 bp, Homo sapiens
cgtactttcgccatc

SEQ ID NO: 1031261 - DNA, 15 bp, Homo sapiens
gtactttcgccatca

SEQ ID NO: 1031262 - DNA, 15 bp, Homo sapiens
tactttcgccatcat

SEQ ID NO: 1031263 - DNA, 15 bp, Homo sapiens
actttcgccatcata

SEQ ID NO: 1031264 - DNA, 15 bp, Homo sapiens
ctttcgccatcatag

SEQ ID NO: 1031265 - DNA, 15 bp, Homo sapiens
tttcgccatcatagt

SEQ ID NO: 1031266 - DNA, 15 bp, Homo sapiens
ttcgccatcatagta

SEQ ID NO: 1031267 - DNA, 15 bp, Homo sapiens
tcgccatcatagtat

SEQ ID NO: 1031268 - DNA, 15 bp, Homo sapiens
cgccatcatagtatt

SEQ ID NO: 1031269 - DNA, 15 bp, Homo sapiens
gccatcatagtattc

SEQ ID NO: 1031270 - DNA, 15 bp, Homo sapiens
ccatcatagtattct

SEQ ID NO: 1031271 - DNA, 15 bp, Homo sapiens
catcatagtattctc

SEQ ID NO: 1031272 - DNA, 15 bp, Homo sapiens
atcatagtattctcc

SEQ ID NO: 1031273 - DNA, 15 bp, Homo sapiens
tcatagtattctcca

SEQ ID NO: 1031274 - DNA, 15 bp, Homo sapiens
catagtattctccac

SEQ ID NO: 1031275 - DNA, 15 bp, Homo sapiens
atagtattctccacc

SEQ ID NO: 1031276 - DNA, 15 bp, Homo sapiens
tagtattctccacca

SEQ ID NO: 1031277 - DNA, 15 bp, Homo sapiens
agtattctccaccac

SEQ ID NO: 1031278 - DNA, 15 bp, Homo sapiens
gtattctccaccact

SEQ ID NO: 1031279 - DNA, 15 bp, Homo sapiens
tattctccaccactg

SEQ ID NO: 1031280 - DNA, 15 bp, Homo sapiens
attctccaccactgt

SEQ ID NO: 1031281 - DNA, 15 bp, Homo sapiens
ttctccaccactgtt

SEQ ID NO: 1031282 - DNA, 15 bp, Homo sapiens
tctccaccactgttc

SEQ ID NO: 1031283 - DNA, 15 bp, Homo sapiens
ctccaccactgttcc

SEQ ID NO: 1031284 - DNA, 15 bp, Homo sapiens
tccaccactgttcct

SEQ ID NO: 1031285 - DNA, 15 bp, Homo sapiens
ccaccactgttcctt

SEQ ID NO: 1031286 - DNA, 15 bp, Homo sapiens
caccactgttccttc

SEQ ID NO: 1031287 - DNA, 15 bp, Homo sapiens
accactgttccttcc

SEQ ID NO: 1031288 - DNA, 15 bp, Homo sapiens
ccactgttccttcca

SEQ ID NO: 1031289 - DNA, 15 bp, Homo sapiens
cactgttccttccag

SEQ ID NO: 1031290 - DNA, 15 bp, Homo sapiens
actgttccttccagc

SEQ ID NO: 1031291 - DNA, 15 bp, Homo sapiens
ctgttccttccagcc

SEQ ID NO: 1031292 - DNA, 15 bp, Homo sapiens
tgttccttccagcca

SEQ ID NO: 1031293 - DNA, 15 bp, Homo sapiens
gttccttccagccac

SEQ ID NO: 1031294 - DNA, 15 bp, Homo sapiens
ttccttccagccacg

SEQ ID NO: 1031295 - DNA, 15 bp, Homo sapiens
tccttccagccacga

SEQ ID NO: 1031296 - DNA, 15 bp, Homo sapiens
ccttccagccacgaa

SEQ ID NO: 1031297 - DNA, 15 bp, Homo sapiens
cttccagccacgaac

SEQ ID NO: 1031298 - DNA, 15 bp, Homo sapiens
ttccagccacgaacg

SEQ ID NO: 1031299 - DNA, 15 bp, Homo sapiens
tccagccacgaacga

SEQ ID NO: 1031300 - DNA, 15 bp, Homo sapiens
ccagccacgaacgac

SEQ ID NO: 1031301 - DNA, 15 bp, Homo sapiens
cagccacgaacgacg

SEQ ID NO: 1031302 - DNA, 15 bp, Homo sapiens
agccacgaacgacgc

SEQ ID NO: 1031303 - DNA, 15 bp, Homo sapiens
gccacgaacgacgca

SEQ ID NO: 1031304 - DNA, 15 bp, Homo sapiens
ccacgaacgacgcaa

SEQ ID NO: 1031305 - DNA, 15 bp, Homo sapiens
cacgaacgacgcaaa

SEQ ID NO: 1031306 - DNA, 15 bp, Homo sapiens
acgaacgacgcaaac

SEQ ID NO: 1031307 - DNA, 15 bp, Homo sapiens
cgaacgacgcaaacg

SEQ ID NO: 1031308 - DNA, 15 bp, Homo sapiens
gaacgacgcaaacga

SEQ ID NO: 1031309 - DNA, 15 bp, Homo sapiens
aacgacgcaaacgaa

SEQ ID NO: 1031310 - DNA, 15 bp, Homo sapiens
acgacgcaaacgaag

SEQ ID NO: 1031311 - DNA, 15 bp, Homo sapiens
cgacgcaaacgaagc

SEQ ID NO: 1031312 - DNA, 15 bp, Homo sapiens
gacgcaaacgaagcc

SEQ ID NO: 1031313 - DNA, 15 bp, Homo sapiens
acgcaaacgaagcca

SEQ ID NO: 1031314 - DNA, 15 bp, Homo sapiens
cgcaaacgaagccaa

SEQ ID NO: 1031315 - DNA, 15 bp, Homo sapiens
gcaaacgaagccaag

SEQ ID NO: 1031316 - DNA, 15 bp, Homo sapiens
caaacgaagccaagt

SEQ ID NO: 1031317 - DNA, 15 bp, Homo sapiens
aaacgaagccaagtt

SEQ ID NO: 1031318 - DNA, 15 bp, Homo sapiens
aacgaagccaagttc

SEQ ID NO: 1031319 - DNA, 15 bp, Homo sapiens
acgaagccaagttcc

SEQ ID NO: 1031320 - DNA, 15 bp, Homo sapiens
cgaagccaagttccc

SEQ ID NO: 1031321 - DNA, 15 bp, Homo sapiens
gaagccaagttcccc

SEQ ID NO: 1031322 - DNA, 15 bp, Homo sapiens
aagccaagttccccc

SEQ ID NO: 1031323 - DNA, 15 bp, Homo sapiens
agccaagttccccca

SEQ ID NO: 1031324 - DNA, 15 bp, Homo sapiens
gccaagttcccccag

SEQ ID NO: 1031325 - DNA, 15 bp, Homo sapiens
ccaagttcccccagc

SEQ ID NO: 1031326 - DNA, 15 bp, Homo sapiens
caagttcccccagct

SEQ ID NO: 1031327 - DNA, 15 bp, Homo sapiens
aagttcccccagctc

SEQ ID NO: 1031328 - DNA, 15 bp, Homo sapiens
agttcccccagctcc

SEQ ID NO: 1031329 - DNA, 15 bp, Homo sapiens
gttcccccagctccg

SEQ ID NO: 1031330 - DNA, 15 bp, Homo sapiens
ttcccccagctccga

SEQ ID NO: 1031331 - DNA, 15 bp, Homo sapiens
tcccccagctccgaa

SEQ ID NO: 1031332 - DNA, 15 bp, Homo sapiens
cccccagctccgaac

SEQ ID NO: 1031333 - DNA, 15 bp, Homo sapiens
ccccagctccgaaca

SEQ ID NO: 1031334 - DNA, 15 bp, Homo sapiens
cccagctccgaacag

SEQ ID NO: 1031335 - DNA, 15 bp, Homo sapiens
ccagctccgaacagg

SEQ ID NO: 1031336 - DNA, 15 bp, Homo sapiens
cagctccgaacagga

SEQ ID NO: 1031337 - DNA, 15 bp, Homo sapiens
agctccgaacaggag

SEQ ID NO: 1031338 - DNA, 15 bp, Homo sapiens
gctccgaacaggagc

SEQ ID NO: 1031339 - DNA, 15 bp, Homo sapiens
ctccgaacaggagct

SEQ ID NO: 1031340 - DNA, 15 bp, Homo sapiens
tccgaacaggagctc

SEQ ID NO: 1031341 - DNA, 15 bp, Homo sapiens
ccgaacaggagctct

SEQ ID NO: 1031342 - DNA, 15 bp, Homo sapiens
cgaacaggagctctc

SEQ ID NO: 1031343 - DNA, 15 bp, Homo sapiens
gaacaggagctctct

SEQ ID NO: 1031344 - DNA, 15 bp, Homo sapiens
aacaggagctctcta

SEQ ID NO: 1031345 - DNA, 15 bp, Homo sapiens
acaggagctctctat

SEQ ID NO: 1031346 - DNA, 15 bp, Homo sapiens
caggagctctctatc

SEQ ID NO: 1031347 - DNA, 15 bp, Homo sapiens
aggagctctctatcc

SEQ ID NO: 1031348 - DNA, 15 bp, Homo sapiens
ggagctctctatcct

SEQ ID NO: 1031349 - DNA, 15 bp, Homo sapiens
gagctctctatcctc

SEQ ID NO: 1031350 - DNA, 15 bp, Homo sapiens
agctctctatcctct

SEQ ID NO: 1031351 - DNA, 15 bp, Homo sapiens
gctctctatcctctc

SEQ ID NO: 1031352 - DNA, 15 bp, Homo sapiens
ctctctatcctctct

SEQ ID NO: 1031353 - DNA, 15 bp, Homo sapiens
tctctatcctctctc

SEQ ID NO: 1031354 - DNA, 15 bp, Homo sapiens
ctctatcctctctct

SEQ ID NO: 1031355 - DNA, 15 bp, Homo sapiens
tctatcctctctcta

SEQ ID NO: 1031356 - DNA, 15 bp, Homo sapiens
ctatcctctctctat

SEQ ID NO: 1031357 - DNA, 15 bp, Homo sapiens
tatcctctctctatt

SEQ ID NO: 1031358 - DNA, 15 bp, Homo sapiens
atcctctctctatta

SEQ ID NO: 1031359 - DNA, 15 bp, Homo sapiens
tcctctctctattac

SEQ ID NO: 1031360 - DNA, 15 bp, Homo sapiens
cctctctctattaca

SEQ ID NO: 1031361 - DNA, 15 bp, Homo sapiens
ctctctctattacac

SEQ ID NO: 1031362 - DNA, 15 bp, Homo sapiens
tctctctattacact

SEQ ID NO: 1031363 - DNA, 15 bp, Homo sapiens
ctctctattacactc

SEQ ID NO: 1031364 - DNA, 15 bp, Homo sapiens
tctctattacactcc

SEQ ID NO: 1031365 - DNA, 15 bp, Homo sapiens
ctctattacactccg

SEQ ID NO: 1031366 - DNA, 15 bp, Homo sapiens
tctattacactccgg

SEQ ID NO: 1031367 - DNA, 15 bp, Homo sapiens
ctattacactccggg

SEQ ID NO: 1031368 - DNA, 15 bp, Homo sapiens
tattacactccggga

SEQ ID NO: 1031369 - DNA, 15 bp, Homo sapiens
attacactccgggag

SEQ ID NO: 1031370 - DNA, 15 bp, Homo sapiens
ttacactccgggaga

SEQ ID NO: 1031371 - DNA, 15 bp, Homo sapiens
tacactccgggagaa

SEQ ID NO: 1031372 - DNA, 15 bp, Homo sapiens
acactccgggagaag

SEQ ID NO: 1031373 - DNA, 15 bp, Homo sapiens
cactccgggagaagg

SEQ ID NO: 1031374 - DNA, 15 bp, Homo sapiens
actccgggagaagga

SEQ ID NO: 1031375 - DNA, 15 bp, Homo sapiens
ctccgggagaaggaa

SEQ ID NO: 1031376 - DNA, 15 bp, Homo sapiens
tccgggagaaggaaa

SEQ ID NO: 1031377 - DNA, 15 bp, Homo sapiens
ccgggagaaggaaac

SEQ ID NO: 1031378 - DNA, 15 bp, Homo sapiens
cgggagaaggaaacg

SEQ ID NO: 1031379 - DNA, 15 bp, Homo sapiens
gggagaaggaaacgc

SEQ ID NO: 1031380 - DNA, 15 bp, Homo sapiens
ggagaaggaaacgcg

SEQ ID NO: 1031381 - DNA, 15 bp, Homo sapiens
gagaaggaaacgcgg

SEQ ID NO: 1031382 - DNA, 15 bp, Homo sapiens
agaaggaaacgcggg

SEQ ID NO: 1031383 - DNA, 15 bp, Homo sapiens
gaaggaaacgcggga

SEQ ID NO: 1031384 - DNA, 15 bp, Homo sapiens
aaggaaacgcgggag

SEQ ID NO: 1031385 - DNA, 15 bp, Homo sapiens
aggaaacgcgggagg

SEQ ID NO: 1031386 - DNA, 15 bp, Homo sapiens
ggaaacgcgggagga

SEQ ID NO: 1031387 - DNA, 15 bp, Homo sapiens
gaaacgcgggaggaa

SEQ ID NO: 1031388 - DNA, 15 bp, Homo sapiens
aaacgcgggaggaaa

SEQ ID NO: 1031389 - DNA, 15 bp, Homo sapiens
aacgcgggaggaaac

SEQ ID NO: 1031390 - DNA, 15 bp, Homo sapiens
acgcgggaggaaacc

SEQ ID NO: 1031391 - DNA, 15 bp, Homo sapiens
cgcgggaggaaaccc

SEQ ID NO: 1031392 - DNA, 15 bp, Homo sapiens
gcgggaggaaaccca

SEQ ID NO: 1031393 - DNA, 15 bp, Homo sapiens
cgggaggaaacccag

SEQ ID NO: 1031394 - DNA, 15 bp, Homo sapiens
gggaggaaacccagg

SEQ ID NO: 1031395 - DNA, 15 bp, Homo sapiens
ggaggaaacccaggc

SEQ ID NO: 1031396 - DNA, 15 bp, Homo sapiens
gaggaaacccaggcc

SEQ ID NO: 1031397 - DNA, 15 bp, Homo sapiens
aggaaacccaggcct

SEQ ID NO: 1031398 - DNA, 15 bp, Homo sapiens
ggaaacccaggcctc

SEQ ID NO: 1031399 - DNA, 15 bp, Homo sapiens
gaaacccaggcctcc

SEQ ID NO: 1031400 - DNA, 15 bp, Homo sapiens
aaacccaggcctcca

SEQ ID NO: 1031401 - DNA, 15 bp, Homo sapiens
aacccaggcctccac

SEQ ID NO: 1031402 - DNA, 15 bp, Homo sapiens
acccaggcctccacg

SEQ ID NO: 1031403 - DNA, 15 bp, Homo sapiens
cccaggcctccacgc

SEQ ID NO: 1031404 - DNA, 15 bp, Homo sapiens
ccaggcctccacgcg

SEQ ID NO: 1031405 - DNA, 15 bp, Homo sapiens
caggcctccacgcgc

SEQ ID NO: 1031406 - DNA, 15 bp, Homo sapiens
aggcctccacgcgcg

SEQ ID NO: 1031407 - DNA, 15 bp, Homo sapiens
ggcctccacgcgcga

SEQ ID NO: 1031408 - DNA, 15 bp, Homo sapiens
gcctccacgcgcgac

SEQ ID NO: 1031409 - DNA, 15 bp, Homo sapiens
cctccacgcgcgacc

SEQ ID NO: 1031410 - DNA, 15 bp, Homo sapiens
ctccacgcgcgaccc

SEQ ID NO: 1031411 - DNA, 15 bp, Homo sapiens
tccacgcgcgacccc

SEQ ID NO: 1031412 - DNA, 15 bp, Homo sapiens
ccacgcgcgacccct

SEQ ID NO: 1031413 - DNA, 15 bp, Homo sapiens
cacgcgcgacccctt

SEQ ID NO: 1031414 - DNA, 15 bp, Homo sapiens
acgcgcgaccccttg

SEQ ID NO: 1031415 - DNA, 15 bp, Homo sapiens
cgcgcgaccccttgg

SEQ ID NO: 1031416 - DNA, 15 bp, Homo sapiens
gcgcgaccccttggc

SEQ ID NO: 1031417 - DNA, 15 bp, Homo sapiens
cgcgaccccttggcc

SEQ ID NO: 1031418 - DNA, 15 bp, Homo sapiens
gcgaccccttggccc

SEQ ID NO: 1031419 - DNA, 15 bp, Homo sapiens
cgaccccttggccct

SEQ ID NO: 1031420 - DNA, 15 bp, Homo sapiens
gaccccttggccctc

SEQ ID NO: 1031421 - DNA, 15 bp, Homo sapiens
accccttggccctcc

SEQ ID NO: 1031422 - DNA, 15 bp, Homo sapiens
ccccttggccctccc

SEQ ID NO: 1031423 - DNA, 15 bp, Homo sapiens
cccttggccctcccc

SEQ ID NO: 1031424 - DNA, 15 bp, Homo sapiens
ccttggccctcccct

SEQ ID NO: 1031425 - DNA, 15 bp, Homo sapiens
cttggccctcccctt

SEQ ID NO: 1031426 - DNA, 15 bp, Homo sapiens
ttggccctccccttt

SEQ ID NO: 1031427 - DNA, 15 bp, Homo sapiens
tggccctccccttta

SEQ ID NO: 1031428 - DNA, 15 bp, Homo sapiens
ggccctcccctttac

SEQ ID NO: 1031429 - DNA, 15 bp, Homo sapiens
gccctcccctttacc

SEQ ID NO: 1031430 - DNA, 15 bp, Homo sapiens
ccctcccctttacct

SEQ ID NO: 1031431 - DNA, 15 bp, Homo sapiens
cctcccctttacctc

SEQ ID NO: 1031432 - DNA, 15 bp, Homo sapiens
ctcccctttacctct

SEQ ID NO: 1031433 - DNA, 15 bp, Homo sapiens
tcccctttacctctc

SEQ ID NO: 1031434 - DNA, 15 bp, Homo sapiens
cccctttacctctcc

SEQ ID NO: 1031435 - DNA, 15 bp, Homo sapiens
ccctttacctctcca

SEQ ID NO: 1031436 - DNA, 15 bp, Homo sapiens
cctttacctctccac

SEQ ID NO: 1031437 - DNA, 15 bp, Homo sapiens
ctttacctctccacc

SEQ ID NO: 1031438 - DNA, 15 bp, Homo sapiens
tttacctctccaccc

SEQ ID NO: 1031439 - DNA, 15 bp, Homo sapiens
ttacctctccacccc

SEQ ID NO: 1031440 - DNA, 15 bp, Homo sapiens
tacctctccacccct

SEQ ID NO: 1031441 - DNA, 15 bp, Homo sapiens
acctctccacccctc

SEQ ID NO: 1031442 - DNA, 15 bp, Homo sapiens
cctctccacccctca

SEQ ID NO: 1031443 - DNA, 15 bp, Homo sapiens
ctctccacccctcac

SEQ ID NO: 1031444 - DNA, 15 bp, Homo sapiens
tctccacccctcact

SEQ ID NO: 1031445 - DNA, 15 bp, Homo sapiens
ctccacccctcacta

SEQ ID NO: 1031446 - DNA, 15 bp, Homo sapiens
tccacccctcactag

SEQ ID NO: 1031447 - DNA, 15 bp, Homo sapiens
ccacccctcactaga

SEQ ID NO: 1031448 - DNA, 15 bp, Homo sapiens
cacccctcactagac

SEQ ID NO: 1031449 - DNA, 15 bp, Homo sapiens
acccctcactagaca

SEQ ID NO: 1031450 - DNA, 15 bp, Homo sapiens
cccctcactagacac

SEQ ID NO: 1031451 - DNA, 15 bp, Homo sapiens
ccctcactagacacc

SEQ ID NO: 1031452 - DNA, 15 bp, Homo sapiens
cctcactagacaccc

SEQ ID NO: 1031453 - DNA, 15 bp, Homo sapiens
ctcactagacaccct

SEQ ID NO: 1031454 - DNA, 15 bp, Homo sapiens
tcactagacaccctc

SEQ ID NO: 1031455 - DNA, 15 bp, Homo sapiens
cactagacaccctcc

SEQ ID NO: 1031456 - DNA, 15 bp, Homo sapiens
actagacaccctccc

SEQ ID NO: 1031457 - DNA, 15 bp, Homo sapiens
ctagacaccctcccc

SEQ ID NO: 1031458 - DNA, 15 bp, Homo sapiens
tagacaccctcccct

SEQ ID NO: 1031459 - DNA, 15 bp, Homo sapiens
agacaccctcccctc

SEQ ID NO: 1031460 - DNA, 15 bp, Homo sapiens
gacaccctcccctct

SEQ ID NO: 1031461 - DNA, 15 bp, Homo sapiens
acaccctcccctcta

SEQ ID NO: 1031462 - DNA, 15 bp, Homo sapiens
caccctcccctctag

SEQ ID NO: 1031463 - DNA, 15 bp, Homo sapiens
accctcccctctagg

SEQ ID NO: 1031464 - DNA, 15 bp, Homo sapiens
ccctcccctctaggc

SEQ ID NO: 1031465 - DNA, 15 bp, Homo sapiens
cctcccctctaggcg

SEQ ID NO: 1031466 - DNA, 15 bp, Homo sapiens
ctcccctctaggcgg

SEQ ID NO: 1031467 - DNA, 15 bp, Homo sapiens
tcccctctaggcggg

SEQ ID NO: 1031468 - DNA, 15 bp, Homo sapiens
cccctctaggcgggg

SEQ ID NO: 1031469 - DNA, 15 bp, Homo sapiens
ccctctaggcgggga

SEQ ID NO: 1031470 - DNA, 15 bp, Homo sapiens
cctctaggcggggac

SEQ ID NO: 1031471 - DNA, 15 bp, Homo sapiens
ctctaggcggggacg

SEQ ID NO: 1031472 - DNA, 15 bp, Homo sapiens
tctaggcggggacga

SEQ ID NO: 1031473 - DNA, 15 bp, Homo sapiens
ctaggcggggacgaa

SEQ ID NO: 1031474 - DNA, 15 bp, Homo sapiens
taggcggggacgaac

SEQ ID NO: 1031475 - DNA, 15 bp, Homo sapiens
aggcggggacgaact

SEQ ID NO: 1031476 - DNA, 15 bp, Homo sapiens
ggcggggacgaactt

SEQ ID NO: 1031477 - DNA, 15 bp, Homo sapiens
gcggggacgaacttt

SEQ ID NO: 1031478 - DNA, 15 bp, Homo sapiens
cggggacgaactttc

SEQ ID NO: 1031479 - DNA, 15 bp, Homo sapiens
ggggacgaactttcg

SEQ ID NO: 1031480 - DNA, 15 bp, Homo sapiens
gggacgaactttcgc

SEQ ID NO: 1031481 - DNA, 15 bp, Homo sapiens
ggacgaactttcgcc

SEQ ID NO: 1031482 - DNA, 15 bp, Homo sapiens
gacgaactttcgccc

SEQ ID NO: 1031483 - DNA, 15 bp, Homo sapiens
acgaactttcgccct

SEQ ID NO: 1031484 - DNA, 15 bp, Homo sapiens
cgaactttcgccctg

SEQ ID NO: 1031485 - DNA, 15 bp, Homo sapiens
gaactttcgccctga

SEQ ID NO: 1031486 - DNA, 15 bp, Homo sapiens
aactttcgccctgag

SEQ ID NO: 1031487 - DNA, 15 bp, Homo sapiens
actttcgccctgaga

SEQ ID NO: 1031488 - DNA, 15 bp, Homo sapiens
ctttcgccctgagag

SEQ ID NO: 1031489 - DNA, 15 bp, Homo sapiens
tttcgccctgagaga

SEQ ID NO: 1031490 - DNA, 15 bp, Homo sapiens
ttcgccctgagagag

SEQ ID NO: 1031491 - DNA, 15 bp, Homo sapiens
tcgccctgagagagg

SEQ ID NO: 1031492 - DNA, 15 bp, Homo sapiens
cgccctgagagaggc

SEQ ID NO: 1031493 - DNA, 15 bp, Homo sapiens
gccctgagagaggcg

SEQ ID NO: 1031494 - DNA, 15 bp, Homo sapiens
ccctgagagaggcgg

SEQ ID NO: 1031495 - DNA, 15 bp, Homo sapiens
cctgagagaggcgga

SEQ ID NO: 1031496 - DNA, 15 bp, Homo sapiens
ctgagagaggcggag

SEQ ID NO: 1031497 - DNA, 15 bp, Homo sapiens
tgagagaggcggagc

SEQ ID NO: 1031498 - DNA, 15 bp, Homo sapiens
gagagaggcggagcc

SEQ ID NO: 1031499 - DNA, 15 bp, Homo sapiens
agagaggcggagcct

SEQ ID NO: 1031500 - DNA, 15 bp, Homo sapiens
gagaggcggagcctc

SEQ ID NO: 1031501 - DNA, 15 bp, Homo sapiens
agaggcggagcctca

SEQ ID NO: 1031502 - DNA, 15 bp, Homo sapiens
gaggcggagcctcag

SEQ ID NO: 1031503 - DNA, 15 bp, Homo sapiens
aggcggagcctcagc

SEQ ID NO: 1031504 - DNA, 15 bp, Homo sapiens
ggcggagcctcagcg

SEQ ID NO: 1031505 - DNA, 15 bp, Homo sapiens
gcggagcctcagcgt

SEQ ID NO: 1031506 - DNA, 15 bp, Homo sapiens
cggagcctcagcgtc

SEQ ID NO: 1031507 - DNA, 15 bp, Homo sapiens
ggagcctcagcgtct

SEQ ID NO: 1031508 - DNA, 15 bp, Homo sapiens
gagcctcagcgtcta

SEQ ID NO: 1031509 - DNA, 15 bp, Homo sapiens
agcctcagcgtctac

SEQ ID NO: 1031510 - DNA, 15 bp, Homo sapiens
gcctcagcgtctacc

SEQ ID NO: 1031511 - DNA, 15 bp, Homo sapiens
cctcagcgtctaccc

SEQ ID NO: 1031512 - DNA, 15 bp, Homo sapiens
ctcagcgtctaccct

SEQ ID NO: 1031513 - DNA, 15 bp, Homo sapiens
tcagcgtctaccctc

SEQ ID NO: 1031514 - DNA, 15 bp, Homo sapiens
cagcgtctaccctcg

SEQ ID NO: 1031515 - DNA, 15 bp, Homo sapiens
agcgtctaccctcgc

SEQ ID NO: 1031516 - DNA, 15 bp, Homo sapiens
gcgtctaccctcgct

SEQ ID NO: 1031517 - DNA, 15 bp, Homo sapiens
cgtctaccctcgctc

SEQ ID NO: 1031518 - DNA, 15 bp, Homo sapiens
gtctaccctcgctct

SEQ ID NO: 1031519 - DNA, 15 bp, Homo sapiens
tctaccctcgctctc

SEQ ID NO: 1031520 - DNA, 15 bp, Homo sapiens
ctaccctcgctctcg

SEQ ID NO: 1031521 - DNA, 15 bp, Homo sapiens
taccctcgctctcgc

SEQ ID NO: 1031522 - DNA, 15 bp, Homo sapiens
accctcgctctcgcg

SEQ ID NO: 1031523 - DNA, 15 bp, Homo sapiens
ccctcgctctcgcga

SEQ ID NO: 1031524 - DNA, 15 bp, Homo sapiens
cctcgctctcgcgag

SEQ ID NO: 1031525 - DNA, 15 bp, Homo sapiens
ctcgctctcgcgagc

SEQ ID NO: 1031526 - DNA, 15 bp, Homo sapiens
tcgctctcgcgagct

SEQ ID NO: 1031527 - DNA, 15 bp, Homo sapiens
cgctctcgcgagctt

SEQ ID NO: 1031528 - DNA, 15 bp, Homo sapiens
gctctcgcgagcttt

SEQ ID NO: 1031529 - DNA, 15 bp, Homo sapiens
ctctcgcgagctttc

SEQ ID NO: 1031530 - DNA, 15 bp, Homo sapiens
tctcgcgagctttcg

SEQ ID NO: 1031531 - DNA, 15 bp, Homo sapiens
ctcgcgagctttcgg

SEQ ID NO: 1031532 - DNA, 15 bp, Homo sapiens
tcgcgagctttcgga

SEQ ID NO: 1031533 - DNA, 15 bp, Homo sapiens
cgcgagctttcggaa

SEQ ID NO: 1031534 - DNA, 15 bp, Homo sapiens
gcgagctttcggaac

SEQ ID NO: 1031535 - DNA, 15 bp, Homo sapiens
cgagctttcggaact

SEQ ID NO: 1031536 - DNA, 15 bp, Homo sapiens
gagctttcggaactc

SEQ ID NO: 1031537 - DNA, 15 bp, Homo sapiens
agctttcggaactct

SEQ ID NO: 1031538 - DNA, 15 bp, Homo sapiens
gctttcggaactctc

SEQ ID NO: 1031539 - DNA, 15 bp, Homo sapiens
ctttcggaactctcg

SEQ ID NO: 1031540 - DNA, 15 bp, Homo sapiens
tttcggaactctcgc

SEQ ID NO: 1031541 - DNA, 15 bp, Homo sapiens
ttcggaactctcgcg

SEQ ID NO: 1031542 - DNA, 15 bp, Homo sapiens
tcggaactctcgcga

SEQ ID NO: 1031543 - DNA, 15 bp, Homo sapiens
cggaactctcgcgag

SEQ ID NO: 1031544 - DNA, 15 bp, Homo sapiens
ggaactctcgcgaga

SEQ ID NO: 1031545 - DNA, 15 bp, Homo sapiens
gaactctcgcgagac

SEQ ID NO: 1031546 - DNA, 15 bp, Homo sapiens
aactctcgcgagacc

SEQ ID NO: 1031547 - DNA, 15 bp, Homo sapiens
actctcgcgagaccc

SEQ ID NO: 1031548 - DNA, 15 bp, Homo sapiens
ctctcgcgagaccct

SEQ ID NO: 1031549 - DNA, 15 bp, Homo sapiens
tctcgcgagacccta

SEQ ID NO: 1031550 - DNA, 15 bp, Homo sapiens
ctcgcgagaccctac

SEQ ID NO: 1031551 - DNA, 15 bp, Homo sapiens
tcgcgagaccctacg

SEQ ID NO: 1031552 - DNA, 15 bp, Homo sapiens
cgcgagaccctacgc

SEQ ID NO: 1031553 - DNA, 15 bp, Homo sapiens
gcgagaccctacgcc

SEQ ID NO: 1031554 - DNA, 15 bp, Homo sapiens
cgagaccctacgccc

SEQ ID NO: 1031555 - DNA, 15 bp, Homo sapiens
gagaccctacgcccg

SEQ ID NO: 1031556 - DNA, 15 bp, Homo sapiens
agaccctacgcccga

SEQ ID NO: 1031557 - DNA, 15 bp, Homo sapiens
gaccctacgcccgac

SEQ ID NO: 1031558 - DNA, 15 bp, Homo sapiens
accctacgcccgact

SEQ ID NO: 1031559 - DNA, 15 bp, Homo sapiens
ccctacgcccgactt

SEQ ID NO: 1031560 - DNA, 15 bp, Homo sapiens
cctacgcccgacttg

SEQ ID NO: 1031561 - DNA, 15 bp, Homo sapiens
ctacgcccgacttgt

SEQ ID NO: 1031562 - DNA, 15 bp, Homo sapiens
tacgcccgacttgtg

SEQ ID NO: 1031563 - DNA, 15 bp, Homo sapiens
acgcccgacttgtgc

SEQ ID NO: 1031564 - DNA, 15 bp, Homo sapiens
cgcccgacttgtgcg

SEQ ID NO: 1031565 - DNA, 15 bp, Homo sapiens
gcccgacttgtgcgc

SEQ ID NO: 1031566 - DNA, 15 bp, Homo sapiens
cccgacttgtgcgcc

SEQ ID NO: 1031567 - DNA, 15 bp, Homo sapiens
ccgacttgtgcgccc

SEQ ID NO: 1031568 - DNA, 15 bp, Homo sapiens
cgacttgtgcgcccg

SEQ ID NO: 1031569 - DNA, 15 bp, Homo sapiens
gacttgtgcgcccgg

SEQ ID NO: 1031570 - DNA, 15 bp, Homo sapiens
acttgtgcgcccggg

SEQ ID NO: 1031571 - DNA, 15 bp, Homo sapiens
cttgtgcgcccggga

SEQ ID NO: 1031572 - DNA, 15 bp, Homo sapiens
ttgtgcgcccgggaa

SEQ ID NO: 1031573 - DNA, 15 bp, Homo sapiens
tgtgcgcccgggaaa

SEQ ID NO: 1031574 - DNA, 15 bp, Homo sapiens
gtgcgcccgggaaac

SEQ ID NO: 1031575 - DNA, 15 bp, Homo sapiens
tgcgcccgggaaacc

SEQ ID NO: 1031576 - DNA, 15 bp, Homo sapiens
gcgcccgggaaaccc

SEQ ID NO: 1031577 - DNA, 15 bp, Homo sapiens
cgcccgggaaacccc

SEQ ID NO: 1031578 - DNA, 15 bp, Homo sapiens
gcccgggaaaccccg

SEQ ID NO: 1031579 - DNA, 15 bp, Homo sapiens
cccgggaaaccccgt

SEQ ID NO: 1031580 - DNA, 15 bp, Homo sapiens
ccgggaaaccccgtc

SEQ ID NO: 1031581 - DNA, 15 bp, Homo sapiens
cgggaaaccccgtcg

SEQ ID NO: 1031582 - DNA, 15 bp, Homo sapiens
gggaaaccccgtcgt

SEQ ID NO: 1031583 - DNA, 15 bp, Homo sapiens
ggaaaccccgtcgtt

SEQ ID NO: 1031584 - DNA, 15 bp, Homo sapiens
gaaaccccgtcgttc

SEQ ID NO: 1031585 - DNA, 15 bp, Homo sapiens
aaaccccgtcgttcc

SEQ ID NO: 1031586 - DNA, 15 bp, Homo sapiens
aaccccgtcgttccc

SEQ ID NO: 1031587 - DNA, 15 bp, Homo sapiens
accccgtcgttccct

SEQ ID NO: 1031588 - DNA, 15 bp, Homo sapiens
ccccgtcgttccctt

SEQ ID NO: 1031589 - DNA, 15 bp, Homo sapiens
cccgtcgttcccttt

SEQ ID NO: 1031590 - DNA, 15 bp, Homo sapiens
ccgtcgttccctttc

SEQ ID NO: 1031591 - DNA, 15 bp, Homo sapiens
cgtcgttccctttcc

SEQ ID NO: 1031592 - DNA, 15 bp, Homo sapiens
gtcgttccctttccc

SEQ ID NO: 1031593 - DNA, 15 bp, Homo sapiens
tcgttccctttcccc

SEQ ID NO: 1031594 - DNA, 15 bp, Homo sapiens
cgttccctttcccct

SEQ ID NO: 1031595 - DNA, 15 bp, Homo sapiens
gttccctttcccctg

SEQ ID NO: 1031596 - DNA, 15 bp, Homo sapiens
ttccctttcccctgg

SEQ ID NO: 1031597 - DNA, 15 bp, Homo sapiens
tccctttcccctggc

SEQ ID NO: 1031598 - DNA, 15 bp, Homo sapiens
ccctttcccctggct

SEQ ID NO: 1031599 - DNA, 15 bp, Homo sapiens
cctttcccctggctg

SEQ ID NO: 1031600 - DNA, 15 bp, Homo sapiens
ctttcccctggctgg

SEQ ID NO: 1031601 - DNA, 15 bp, Homo sapiens
tttcccctggctggc

SEQ ID NO: 1031602 - DNA, 15 bp, Homo sapiens
ttcccctggctggca

SEQ ID NO: 1031603 - DNA, 15 bp, Homo sapiens
tcccctggctggcag

SEQ ID NO: 1031604 - DNA, 15 bp, Homo sapiens
cccctggctggcagc

SEQ ID NO: 1031605 - DNA, 15 bp, Homo sapiens
ccctggctggcagcg

SEQ ID NO: 1031606 - DNA, 15 bp, Homo sapiens
cctggctggcagcgc

SEQ ID NO: 1031607 - DNA, 15 bp, Homo sapiens
ctggctggcagcgcg

SEQ ID NO: 1031608 - DNA, 15 bp, Homo sapiens
tggctggcagcgcgg

SEQ ID NO: 1031609 - DNA, 15 bp, Homo sapiens
ggctggcagcgcgga

SEQ ID NO: 1031610 - DNA, 15 bp, Homo sapiens
gctggcagcgcggag

SEQ ID NO: 1031611 - DNA, 15 bp, Homo sapiens
ctggcagcgcggagg

SEQ ID NO: 1031612 - DNA, 15 bp, Homo sapiens
tggcagcgcggaggc

SEQ ID NO: 1031613 - DNA, 15 bp, Homo sapiens
ggcagcgcggaggcc

SEQ ID NO: 1031614 - DNA, 15 bp, Homo sapiens
gcagcgcggaggccg

SEQ ID NO: 1031615 - DNA, 15 bp, Homo sapiens
cagcgcggaggccgc

SEQ ID NO: 1031616 - DNA, 15 bp, Homo sapiens
agcgcggaggccgca

SEQ ID NO: 1031617 - DNA, 15 bp, Homo sapiens
gcgcggaggccgcac

SEQ ID NO: 1031618 - DNA, 15 bp, Homo sapiens
cgcggaggccgcacg

SEQ ID NO: 1031619 - DNA, 15 bp, Homo sapiens
gcggaggccgcacgg

SEQ ID NO: 1031620 - DNA, 15 bp, Homo sapiens
cggaggccgcacggt

SEQ ID NO: 1031621 - DNA, 15 bp, Homo sapiens
ggaggccgcacggta

SEQ ID NO: 1031622 - DNA, 15 bp, Homo sapiens
gaggccgcacggtaa

SEQ ID NO: 1031623 - DNA, 15 bp, Homo sapiens
aggccgcacggtaag

SEQ ID NO: 1031624 - DNA, 15 bp, Homo sapiens
ggccgcacggtaagc

SEQ ID NO: 1031625 - DNA, 15 bp, Homo sapiens
gccgcacggtaagcg

SEQ ID NO: 1031626 - DNA, 15 bp, Homo sapiens
ccgcacggtaagcgg

SEQ ID NO: 1031627 - DNA, 15 bp, Homo sapiens
cgcacggtaagcggg

SEQ ID NO: 1031628 - DNA, 15 bp, Homo sapiens
gcacggtaagcgggg

SEQ ID NO: 1031629 - DNA, 15 bp, Homo sapiens
cacggtaagcggggg

SEQ ID NO: 1031630 - DNA, 15 bp, Homo sapiens
acggtaagcgggggc

SEQ ID NO: 1031631 - DNA, 15 bp, Homo sapiens
cggtaagcgggggct

SEQ ID NO: 1031632 - DNA, 15 bp, Homo sapiens
ggtaagcgggggctc

SEQ ID NO: 1031633 - DNA, 15 bp, Homo sapiens
gtaagcgggggctcc

SEQ ID NO: 1031634 - DNA, 15 bp, Homo sapiens
taagcgggggctccg

SEQ ID NO: 1031635 - DNA, 15 bp, Homo sapiens
aagcgggggctccga

SEQ ID NO: 1031636 - DNA, 15 bp, Homo sapiens
agcgggggctccgag

SEQ ID NO: 1031637 - DNA, 15 bp, Homo sapiens
gcgggggctccgagc

SEQ ID NO: 1031638 - DNA, 15 bp, Homo sapiens
cgggggctccgagct

SEQ ID NO: 1031639 - DNA, 15 bp, Homo sapiens
gggggctccgagctg

SEQ ID NO: 1031640 - DNA, 15 bp, Homo sapiens
ggggctccgagctgg

SEQ ID NO: 1031641 - DNA, 15 bp, Homo sapiens
gggctccgagctgga

SEQ ID NO: 1031642 - DNA, 15 bp, Homo sapiens
ggctccgagctggac

SEQ ID NO: 1031643 - DNA, 15 bp, Homo sapiens
gctccgagctggacc

SEQ ID NO: 1031644 - DNA, 15 bp, Homo sapiens
ctccgagctggaccg

SEQ ID NO: 1031645 - DNA, 15 bp, Homo sapiens
tccgagctggaccgg

SEQ ID NO: 1031646 - DNA, 15 bp, Homo sapiens
ccgagctggaccggg

SEQ ID NO: 1031647 - DNA, 15 bp, Homo sapiens
cgagctggaccgggc

SEQ ID NO: 1031648 - DNA, 15 bp, Homo sapiens
gagctggaccgggcg

SEQ ID NO: 1031649 - DNA, 15 bp, Homo sapiens
agctggaccgggcgc

SEQ ID NO: 1031650 - DNA, 15 bp, Homo sapiens
gctggaccgggcgcg

SEQ ID NO: 1031651 - DNA, 15 bp, Homo sapiens
ctggaccgggcgcga

SEQ ID NO: 1031652 - DNA, 15 bp, Homo sapiens
tggaccgggcgcgag

SEQ ID NO: 1031653 - DNA, 15 bp, Homo sapiens
ggaccgggcgcgagg

SEQ ID NO: 1031654 - DNA, 15 bp, Homo sapiens
gaccgggcgcgaggt

SEQ ID NO: 1031655 - DNA, 15 bp, Homo sapiens
accgggcgcgaggtg

SEQ ID NO: 1031656 - DNA, 15 bp, Homo sapiens
ccgggcgcgaggtgg

SEQ ID NO: 1031657 - DNA, 15 bp, Homo sapiens
cgggcgcgaggtggc

SEQ ID NO: 1031658 - DNA, 15 bp, Homo sapiens
gggcgcgaggtggca

SEQ ID NO: 1031659 - DNA, 15 bp, Homo sapiens
ggcgcgaggtggcag

SEQ ID NO: 1031660 - DNA, 15 bp, Homo sapiens
gcgcgaggtggcagg

SEQ ID NO: 1031661 - DNA, 15 bp, Homo sapiens
cgcgaggtggcaggg

SEQ ID NO: 1031662 - DNA, 15 bp, Homo sapiens
gcgaggtggcagggc

SEQ ID NO: 1031663 - DNA, 15 bp, Homo sapiens
cgaggtggcagggcc

SEQ ID NO: 1031664 - DNA, 15 bp, Homo sapiens
gaggtggcagggccg

SEQ ID NO: 1031665 - DNA, 15 bp, Homo sapiens
aggtggcagggccgg

SEQ ID NO: 1031666 - DNA, 15 bp, Homo sapiens
ggtggcagggccgga

SEQ ID NO: 1031667 - DNA, 15 bp, Homo sapiens
gtggcagggccggac

SEQ ID NO: 1031668 - DNA, 15 bp, Homo sapiens
tggcagggccggacg

SEQ ID NO: 1031669 - DNA, 15 bp, Homo sapiens
ggcagggccggacgc

SEQ ID NO: 1031670 - DNA, 15 bp, Homo sapiens
gcagggccggacgcc

SEQ ID NO: 1031671 - DNA, 15 bp, Homo sapiens
cagggccggacgccg

SEQ ID NO: 1031672 - DNA, 15 bp, Homo sapiens
agggccggacgccga

SEQ ID NO: 1031673 - DNA, 15 bp, Homo sapiens
gggccggacgccgaa

SEQ ID NO: 1031674 - DNA, 15 bp, Homo sapiens
ggccggacgccgaag

SEQ ID NO: 1031675 - DNA, 15 bp, Homo sapiens
gccggacgccgaagc

SEQ ID NO: 1031676 - DNA, 15 bp, Homo sapiens
ccggacgccgaagcc

SEQ ID NO: 1031677 - DNA, 15 bp, Homo sapiens
cggacgccgaagcct

SEQ ID NO: 1031678 - DNA, 15 bp, Homo sapiens
ggacgccgaagcctc

SEQ ID NO: 1031679 - DNA, 15 bp, Homo sapiens
gacgccgaagcctca

SEQ ID NO: 1031680 - DNA, 15 bp, Homo sapiens
acgccgaagcctcag

SEQ ID NO: 1031681 - DNA, 15 bp, Homo sapiens
cgccgaagcctcaga

SEQ ID NO: 1031682 - DNA, 15 bp, Homo sapiens
gccgaagcctcagag

SEQ ID NO: 1031683 - DNA, 15 bp, Homo sapiens
ccgaagcctcagagc

SEQ ID NO: 1031684 - DNA, 15 bp, Homo sapiens
cgaagcctcagagcg

SEQ ID NO: 1031685 - DNA, 15 bp, Homo sapiens
gaagcctcagagcgc

SEQ ID NO: 1031686 - DNA, 15 bp, Homo sapiens
aagcctcagagcgcg

SEQ ID NO: 1031687 - DNA, 15 bp, Homo sapiens
agcctcagagcgcgt

SEQ ID NO: 1031688 - DNA, 15 bp, Homo sapiens
gcctcagagcgcgtg

SEQ ID NO: 1031689 - DNA, 15 bp, Homo sapiens
cctcagagcgcgtgc

SEQ ID NO: 1031690 - DNA, 15 bp, Homo sapiens
ctcagagcgcgtgcc

SEQ ID NO: 1031691 - DNA, 15 bp, Homo sapiens
tcagagcgcgtgcct

SEQ ID NO: 1031692 - DNA, 15 bp, Homo sapiens
cagagcgcgtgcctg

SEQ ID NO: 1031693 - DNA, 15 bp, Homo sapiens
agagcgcgtgcctga

SEQ ID NO: 1031694 - DNA, 15 bp, Homo sapiens
gagcgcgtgcctgag

SEQ ID NO: 1031695 - DNA, 15 bp, Homo sapiens
agcgcgtgcctgagg

SEQ ID NO: 1031696 - DNA, 15 bp, Homo sapiens
gcgcgtgcctgaggg

SEQ ID NO: 1031697 - DNA, 15 bp, Homo sapiens
cgcgtgcctgagggc

SEQ ID NO: 1031698 - DNA, 15 bp, Homo sapiens
gcgtgcctgagggcc

SEQ ID NO: 1031699 - DNA, 15 bp, Homo sapiens
cgtgcctgagggccc

SEQ ID NO: 1031700 - DNA, 15 bp, Homo sapiens
gtgcctgagggcccc

SEQ ID NO: 1031701 - DNA, 15 bp, Homo sapiens
tgcctgagggccccg

SEQ ID NO: 1031702 - DNA, 15 bp, Homo sapiens
gcctgagggccccga

SEQ ID NO: 1031703 - DNA, 15 bp, Homo sapiens
cctgagggccccgag

SEQ ID NO: 1031704 - DNA, 15 bp, Homo sapiens
ctgagggccccgagg

SEQ ID NO: 1031705 - DNA, 15 bp, Homo sapiens
tgagggccccgaggc

SEQ ID NO: 1031706 - DNA, 15 bp, Homo sapiens
gagggccccgaggcg

SEQ ID NO: 1031707 - DNA, 15 bp, Homo sapiens
agggccccgaggcgc

SEQ ID NO: 1031708 - DNA, 15 bp, Homo sapiens
gggccccgaggcgcc

SEQ ID NO: 1031709 - DNA, 15 bp, Homo sapiens
ggccccgaggcgccc

SEQ ID NO: 1031710 - DNA, 15 bp, Homo sapiens
gccccgaggcgcccg

SEQ ID NO: 1031711 - DNA, 15 bp, Homo sapiens
ccccgaggcgcccgg

SEQ ID NO: 1031712 - DNA, 15 bp, Homo sapiens
cccgaggcgcccggc

SEQ ID NO: 1031713 - DNA, 15 bp, Homo sapiens
ccgaggcgcccggcg

SEQ ID NO: 1031714 - DNA, 15 bp, Homo sapiens
cgaggcgcccggcgc

SEQ ID NO: 1031715 - DNA, 15 bp, Homo sapiens
gaggcgcccggcgcg

SEQ ID NO: 1031716 - DNA, 15 bp, Homo sapiens
aggcgcccggcgcgg

SEQ ID NO: 1031717 - DNA, 15 bp, Homo sapiens
ggcgcccggcgcggg

SEQ ID NO: 1031718 - DNA, 15 bp, Homo sapiens
gcgcccggcgcgggc

SEQ ID NO: 1031719 - DNA, 15 bp, Homo sapiens
cgcccggcgcgggcc

SEQ ID NO: 1031720 - DNA, 15 bp, Homo sapiens
gcccggcgcgggccc

SEQ ID NO: 1031721 - DNA, 15 bp, Homo sapiens
cccggcgcgggcccg

SEQ ID NO: 1031722 - DNA, 15 bp, Homo sapiens
ccggcgcgggcccgt

SEQ ID NO: 1031723 - DNA, 15 bp, Homo sapiens
cggcgcgggcccgtc

SEQ ID NO: 1031724 - DNA, 15 bp, Homo sapiens
ggcgcgggcccgtcc

SEQ ID NO: 1031725 - DNA, 15 bp, Homo sapiens
gcgcgggcccgtccc

SEQ ID NO: 1031726 - DNA, 15 bp, Homo sapiens
cgcgggcccgtcccg

SEQ ID NO: 1031727 - DNA, 15 bp, Homo sapiens
gcgggcccgtcccgc

SEQ ID NO: 1031728 - DNA, 15 bp, Homo sapiens
cgggcccgtcccgcc

SEQ ID NO: 1031729 - DNA, 15 bp, Homo sapiens
gggcccgtcccgccc

SEQ ID NO: 1031730 - DNA, 15 bp, Homo sapiens
ggcccgtcccgcccc

SEQ ID NO: 1031731 - DNA, 15 bp, Homo sapiens
gcccgtcccgccccc

SEQ ID NO: 1031732 - DNA, 15 bp, Homo sapiens
cccgtcccgccccct

SEQ ID NO: 1031733 - DNA, 15 bp, Homo sapiens
ccgtcccgcccccta

SEQ ID NO: 1031734 - DNA, 15 bp, Homo sapiens
cgtcccgccccctag

SEQ ID NO: 1031735 - DNA, 15 bp, Homo sapiens
gtcccgccccctaga

SEQ ID NO: 1031736 - DNA, 15 bp, Homo sapiens
tcccgccccctagag

SEQ ID NO: 1031737 - DNA, 15 bp, Homo sapiens
cccgccccctagagc

SEQ ID NO: 1031738 - DNA, 15 bp, Homo sapiens
ccgccccctagagcc

SEQ ID NO: 1031739 - DNA, 15 bp, Homo sapiens
cgccccctagagccg

SEQ ID NO: 1031740 - DNA, 15 bp, Homo sapiens
gccccctagagccgc

SEQ ID NO: 1031741 - DNA, 15 bp, Homo sapiens
ccccctagagccgcg

SEQ ID NO: 1031742 - DNA, 15 bp, Homo sapiens
cccctagagccgcgg

SEQ ID NO: 1031743 - DNA, 15 bp, Homo sapiens
ccctagagccgcggc

SEQ ID NO: 1031744 - DNA, 15 bp, Homo sapiens
cctagagccgcggcc

SEQ ID NO: 1031745 - DNA, 15 bp, Homo sapiens
ctagagccgcggcca

SEQ ID NO: 1031746 - DNA, 15 bp, Homo sapiens
tagagccgcggccac

SEQ ID NO: 1031747 - DNA, 15 bp, Homo sapiens
agagccgcggccacg

SEQ ID NO: 1031748 - DNA, 15 bp, Homo sapiens
gagccgcggccacgt

SEQ ID NO: 1031749 - DNA, 15 bp, Homo sapiens
agccgcggccacgtg

SEQ ID NO: 1031750 - DNA, 15 bp, Homo sapiens
gccgcggccacgtgc

SEQ ID NO: 1031751 - DNA, 15 bp, Homo sapiens
ccgcggccacgtgcg

SEQ ID NO: 1031752 - DNA, 15 bp, Homo sapiens
cgcggccacgtgcga

SEQ ID NO: 1031753 - DNA, 15 bp, Homo sapiens
gcggccacgtgcgag

SEQ ID NO: 1031754 - DNA, 15 bp, Homo sapiens
cggccacgtgcgagc

SEQ ID NO: 1031755 - DNA, 15 bp, Homo sapiens
ggccacgtgcgagcg

SEQ ID NO: 1031756 - DNA, 15 bp, Homo sapiens
gccacgtgcgagcgg

SEQ ID NO: 1031757 - DNA, 15 bp, Homo sapiens
ccacgtgcgagcggc

SEQ ID NO: 1031758 - DNA, 15 bp, Homo sapiens
cacgtgcgagcggca

SEQ ID NO: 1031759 - DNA, 15 bp, Homo sapiens
acgtgcgagcggcag

SEQ ID NO: 1031760 - DNA, 15 bp, Homo sapiens
cgtgcgagcggcagg

SEQ ID NO: 1031761 - DNA, 15 bp, Homo sapiens
gtgcgagcggcaggc

SEQ ID NO: 1031762 - DNA, 15 bp, Homo sapiens
tgcgagcggcaggcc

SEQ ID NO: 1031763 - DNA, 15 bp, Homo sapiens
gcgagcggcaggccc

SEQ ID NO: 1031764 - DNA, 15 bp, Homo sapiens
cgagcggcaggcccg

SEQ ID NO: 1031765 - DNA, 15 bp, Homo sapiens
gagcggcaggcccgg

SEQ ID NO: 1031766 - DNA, 15 bp, Homo sapiens
agcggcaggcccgga

SEQ ID NO: 1031767 - DNA, 15 bp, Homo sapiens
gcggcaggcccggac

SEQ ID NO: 1031768 - DNA, 15 bp, Homo sapiens
cggcaggcccggaca

SEQ ID NO: 1031769 - DNA, 15 bp, Homo sapiens
ggcaggcccggacat

SEQ ID NO: 1031770 - DNA, 15 bp, Homo sapiens
gcaggcccggacatg

SEQ ID NO: 1031771 - DNA, 15 bp, Homo sapiens
caggcccggacatgc

SEQ ID NO: 1031772 - DNA, 15 bp, Homo sapiens
aggcccggacatgcc

SEQ ID NO: 1031773 - DNA, 15 bp, Homo sapiens
ggcccggacatgccc

SEQ ID NO: 1031774 - DNA, 15 bp, Homo sapiens
gcccggacatgcccg

SEQ ID NO: 1031775 - DNA, 15 bp, Homo sapiens
cccggacatgcccgg

SEQ ID NO: 1031776 - DNA, 15 bp, Homo sapiens
ccggacatgcccggt

SEQ ID NO: 1031777 - DNA, 15 bp, Homo sapiens
cggacatgcccggtc

SEQ ID NO: 1031778 - DNA, 15 bp, Homo sapiens
ggacatgcccggtca

SEQ ID NO: 1031779 - DNA, 15 bp, Homo sapiens
gacatgcccggtcag

SEQ ID NO: 1031780 - DNA, 15 bp, Homo sapiens
acatgcccggtcagc

SEQ ID NO: 1031781 - DNA, 15 bp, Homo sapiens
catgcccggtcagcg

SEQ ID NO: 1031782 - DNA, 15 bp, Homo sapiens
atgcccggtcagcgc

SEQ ID NO: 1031783 - DNA, 15 bp, Homo sapiens
tgcccggtcagcgcc

SEQ ID NO: 1031784 - DNA, 15 bp, Homo sapiens
gcccggtcagcgccg

SEQ ID NO: 1031785 - DNA, 15 bp, Homo sapiens
cccggtcagcgccgt

SEQ ID NO: 1031786 - DNA, 15 bp, Homo sapiens
ccggtcagcgccgtc

SEQ ID NO: 1031787 - DNA, 15 bp, Homo sapiens
cggtcagcgccgtcc

SEQ ID NO: 1031788 - DNA, 15 bp, Homo sapiens
ggtcagcgccgtccg

SEQ ID NO: 1031789 - DNA, 15 bp, Homo sapiens
gtcagcgccgtccgg

SEQ ID NO: 1031790 - DNA, 15 bp, Homo sapiens
tcagcgccgtccggg

SEQ ID NO: 1031791 - DNA, 15 bp, Homo sapiens
cagcgccgtccggga

SEQ ID NO: 1031792 - DNA, 15 bp, Homo sapiens
agcgccgtccgggaa

SEQ ID NO: 1031793 - DNA, 15 bp, Homo sapiens
gcgccgtccgggaac

SEQ ID NO: 1031794 - DNA, 15 bp, Homo sapiens
cgccgtccgggaacc

SEQ ID NO: 1031795 - DNA, 15 bp, Homo sapiens
gccgtccgggaaccg

SEQ ID NO: 1031796 - DNA, 15 bp, Homo sapiens
ccgtccgggaaccga

SEQ ID NO: 1031797 - DNA, 15 bp, Homo sapiens
cgtccgggaaccgag

SEQ ID NO: 1031798 - DNA, 15 bp, Homo sapiens
gtccgggaaccgagc

SEQ ID NO: 1031799 - DNA, 15 bp, Homo sapiens
tccgggaaccgagcg

SEQ ID NO: 1031800 - DNA, 15 bp, Homo sapiens
ccgggaaccgagcgt

SEQ ID NO: 1031801 - DNA, 15 bp, Homo sapiens
cgggaaccgagcgtg

SEQ ID NO: 1031802 - DNA, 15 bp, Homo sapiens
gggaaccgagcgtgg

SEQ ID NO: 1031803 - DNA, 15 bp, Homo sapiens
ggaaccgagcgtggg

SEQ ID NO: 1031804 - DNA, 15 bp, Homo sapiens
gaaccgagcgtgggc

SEQ ID NO: 1031805 - DNA, 15 bp, Homo sapiens
aaccgagcgtgggcc

SEQ ID NO: 1031806 - DNA, 15 bp, Homo sapiens
accgagcgtgggccc

SEQ ID NO: 1031807 - DNA, 15 bp, Homo sapiens
ccgagcgtgggcccc

SEQ ID NO: 1031808 - DNA, 15 bp, Homo sapiens
cgagcgtgggccccg

SEQ ID NO: 1031809 - DNA, 15 bp, Homo sapiens
gagcgtgggccccgg

SEQ ID NO: 1031810 - DNA, 15 bp, Homo sapiens
agcgtgggccccggg

SEQ ID NO: 1031811 - DNA, 15 bp, Homo sapiens
gcgtgggccccgggg

SEQ ID NO: 1031812 - DNA, 15 bp, Homo sapiens
cgtgggccccggggg

SEQ ID NO: 1031813 - DNA, 15 bp, Homo sapiens
gtgggccccgggggg

SEQ ID NO: 1031814 - DNA, 15 bp, Homo sapiens
tgggccccggggggc

SEQ ID NO: 1031815 - DNA, 15 bp, Homo sapiens
gggccccggggggca

SEQ ID NO: 1031816 - DNA, 15 bp, Homo sapiens
ggccccggggggcag

SEQ ID NO: 1031817 - DNA, 15 bp, Homo sapiens
gccccggggggcagc

SEQ ID NO: 1031818 - DNA, 15 bp, Homo sapiens
ccccggggggcagcg

SEQ ID NO: 1031819 - DNA, 15 bp, Homo sapiens
cccggggggcagcgg

SEQ ID NO: 1031820 - DNA, 15 bp, Homo sapiens
ccggggggcagcggc

SEQ ID NO: 1031821 - DNA, 15 bp, Homo sapiens
cggggggcagcggcg

SEQ ID NO: 1031822 - DNA, 15 bp, Homo sapiens
ggggggcagcggcgg

SEQ ID NO: 1031823 - DNA, 15 bp, Homo sapiens
gggggcagcggcggg

SEQ ID NO: 1031824 - DNA, 15 bp, Homo sapiens
ggggcagcggcgggg

SEQ ID NO: 1031825 - DNA, 15 bp, Homo sapiens
gggcagcggcggggt

SEQ ID NO: 1031826 - DNA, 15 bp, Homo sapiens
ggcagcggcggggtg

SEQ ID NO: 1031827 - DNA, 15 bp, Homo sapiens
gcagcggcggggtgc

SEQ ID NO: 1031828 - DNA, 15 bp, Homo sapiens
cagcggcggggtgcg

SEQ ID NO: 1031829 - DNA, 15 bp, Homo sapiens
agcggcggggtgcgt

SEQ ID NO: 1031830 - DNA, 15 bp, Homo sapiens
gcggcggggtgcgtg

SEQ ID NO: 1031831 - DNA, 15 bp, Homo sapiens
cggcggggtgcgtgg

SEQ ID NO: 1031832 - DNA, 15 bp, Homo sapiens
ggcggggtgcgtggg

SEQ ID NO: 1031833 - DNA, 15 bp, Homo sapiens
gcggggtgcgtgggg

SEQ ID NO: 1031834 - DNA, 15 bp, Homo sapiens
cggggtgcgtggggc

SEQ ID NO: 1031835 - DNA, 15 bp, Homo sapiens
ggggtgcgtggggcg

SEQ ID NO: 1031836 - DNA, 15 bp, Homo sapiens
gggtgcgtggggcgt

SEQ ID NO: 1031837 - DNA, 15 bp, Homo sapiens
ggtgcgtggggcgtc

SEQ ID NO: 1031838 - DNA, 15 bp, Homo sapiens
gtgcgtggggcgtcc

SEQ ID NO: 1031839 - DNA, 15 bp, Homo sapiens
tgcgtggggcgtccg

SEQ ID NO: 1031840 - DNA, 15 bp, Homo sapiens
gcgtggggcgtccgg

SEQ ID NO: 1031841 - DNA, 15 bp, Homo sapiens
cgtggggcgtccgga

SEQ ID NO: 1031842 - DNA, 15 bp, Homo sapiens
gtggggcgtccggag

SEQ ID NO: 1031843 - DNA, 15 bp, Homo sapiens
tggggcgtccggagt

SEQ ID NO: 1031844 - DNA, 15 bp, Homo sapiens
ggggcgtccggagtc

SEQ ID NO: 1031845 - DNA, 15 bp, Homo sapiens
gggcgtccggagtcc

SEQ ID NO: 1031846 - DNA, 15 bp, Homo sapiens
ggcgtccggagtccc

SEQ ID NO: 1031847 - DNA, 15 bp, Homo sapiens
gcgtccggagtcccg

SEQ ID NO: 1031848 - DNA, 15 bp, Homo sapiens
cgtccggagtcccgg

SEQ ID NO: 1031849 - DNA, 15 bp, Homo sapiens
gtccggagtcccggg

SEQ ID NO: 1031850 - DNA, 15 bp, Homo sapiens
tccggagtcccgggg

SEQ ID NO: 1031851 - DNA, 15 bp, Homo sapiens
ccggagtcccggggc

SEQ ID NO: 1031852 - DNA, 15 bp, Homo sapiens
cggagtcccggggct

SEQ ID NO: 1031853 - DNA, 15 bp, Homo sapiens
ggagtcccggggctg

SEQ ID NO: 1031854 - DNA, 15 bp, Homo sapiens
gagtcccggggctgg

SEQ ID NO: 1031855 - DNA, 15 bp, Homo sapiens
agtcccggggctggg

SEQ ID NO: 1031856 - DNA, 15 bp, Homo sapiens
gtcccggggctgggg

SEQ ID NO: 1031857 - DNA, 15 bp, Homo sapiens
tcccggggctgggga

SEQ ID NO: 1031858 - DNA, 15 bp, Homo sapiens
cccggggctggggag

SEQ ID NO: 1031859 - DNA, 15 bp, Homo sapiens
ccggggctggggagt

SEQ ID NO: 1031860 - DNA, 15 bp, Homo sapiens
cggggctggggagtg

SEQ ID NO: 1031861 - DNA, 15 bp, Homo sapiens
ggggctggggagtgg

SEQ ID NO: 1031862 - DNA, 15 bp, Homo sapiens
gggctggggagtggg

SEQ ID NO: 1031863 - DNA, 15 bp, Homo sapiens
ggctggggagtgggg

SEQ ID NO: 1031864 - DNA, 15 bp, Homo sapiens
gctggggagtggggt

SEQ ID NO: 1031865 - DNA, 15 bp, Homo sapiens
ctggggagtggggtc

SEQ ID NO: 1031866 - DNA, 15 bp, Homo sapiens
tggggagtggggtcg

SEQ ID NO: 1031867 - DNA, 15 bp, Homo sapiens
ggggagtggggtcgc

SEQ ID NO: 1031868 - DNA, 15 bp, Homo sapiens
gggagtggggtcgcg

SEQ ID NO: 1031869 - DNA, 15 bp, Homo sapiens
ggagtggggtcgcgc

SEQ ID NO: 1031870 - DNA, 15 bp, Homo sapiens
gagtggggtcgcgca

SEQ ID NO: 1031871 - DNA, 15 bp, Homo sapiens
agtggggtcgcgcag

SEQ ID NO: 1031872 - DNA, 15 bp, Homo sapiens
gtggggtcgcgcagg

SEQ ID NO: 1031873 - DNA, 15 bp, Homo sapiens
tggggtcgcgcagga

SEQ ID NO: 1031874 - DNA, 15 bp, Homo sapiens
ggggtcgcgcaggat

SEQ ID NO: 1031875 - DNA, 15 bp, Homo sapiens
gggtcgcgcaggatc

SEQ ID NO: 1031876 - DNA, 15 bp, Homo sapiens
ggtcgcgcaggatcc

SEQ ID NO: 1031877 - DNA, 15 bp, Homo sapiens
gtcgcgcaggatcct

SEQ ID NO: 1031878 - DNA, 15 bp, Homo sapiens
tcgcgcaggatcctc

SEQ ID NO: 1031879 - DNA, 15 bp, Homo sapiens
cgcgcaggatcctca

SEQ ID NO: 1031880 - DNA, 15 bp, Homo sapiens
gcgcaggatcctcac

SEQ ID NO: 1031881 - DNA, 15 bp, Homo sapiens
cgcaggatcctcaca

SEQ ID NO: 1031882 - DNA, 15 bp, Homo sapiens
gcaggatcctcacac

SEQ ID NO: 1031883 - DNA, 15 bp, Homo sapiens
caggatcctcacacg

SEQ ID NO: 1031884 - DNA, 15 bp, Homo sapiens
aggatcctcacacgc

SEQ ID NO: 1031885 - DNA, 15 bp, Homo sapiens
ggatcctcacacgca

SEQ ID NO: 1031886 - DNA, 15 bp, Homo sapiens
gatcctcacacgcag

SEQ ID NO: 1031887 - DNA, 15 bp, Homo sapiens
atcctcacacgcagg

SEQ ID NO: 1031888 - DNA, 15 bp, Homo sapiens
tcctcacacgcaggg

SEQ ID NO: 1031889 - DNA, 15 bp, Homo sapiens
cctcacacgcagggg

SEQ ID NO: 1031890 - DNA, 15 bp, Homo sapiens
ctcacacgcaggggc

SEQ ID NO: 1031891 - DNA, 15 bp, Homo sapiens
tcacacgcaggggcc

SEQ ID NO: 1031892 - DNA, 15 bp, Homo sapiens
cacacgcaggggccg

SEQ ID NO: 1031893 - DNA, 15 bp, Homo sapiens
acacgcaggggccgg

SEQ ID NO: 1031894 - DNA, 15 bp, Homo sapiens
cacgcaggggccggg

SEQ ID NO: 1031895 - DNA, 15 bp, Homo sapiens
acgcaggggccgggc

SEQ ID NO: 1031896 - DNA, 15 bp, Homo sapiens
cgcaggggccgggct

SEQ ID NO: 1031897 - DNA, 15 bp, Homo sapiens
gcaggggccgggctc

SEQ ID NO: 1031898 - DNA, 15 bp, Homo sapiens
caggggccgggctct

SEQ ID NO: 1031899 - DNA, 15 bp, Homo sapiens
aggggccgggctctg

SEQ ID NO: 1031900 - DNA, 15 bp, Homo sapiens
ggggccgggctctgt

SEQ ID NO: 1031901 - DNA, 15 bp, Homo sapiens
gggccgggctctgtt

SEQ ID NO: 1031902 - DNA, 15 bp, Homo sapiens
ggccgggctctgtta

SEQ ID NO: 1031903 - DNA, 15 bp, Homo sapiens
gccgggctctgttag

SEQ ID NO: 1031904 - DNA, 15 bp, Homo sapiens
ccgggctctgttagt

SEQ ID NO: 1031905 - DNA, 15 bp, Homo sapiens
cgggctctgttagtg

SEQ ID NO: 1031906 - DNA, 15 bp, Homo sapiens
gggctctgttagtgc

SEQ ID NO: 1031907 - DNA, 15 bp, Homo sapiens
ggctctgttagtgcg

SEQ ID NO: 1031908 - DNA, 15 bp, Homo sapiens
gctctgttagtgcga

SEQ ID NO: 1031909 - DNA, 15 bp, Homo sapiens
ctctgttagtgcgat

SEQ ID NO: 1031910 - DNA, 15 bp, Homo sapiens
tctgttagtgcgatc

SEQ ID NO: 1031911 - DNA, 15 bp, Homo sapiens
ctgttagtgcgatcc

SEQ ID NO: 1031912 - DNA, 15 bp, Homo sapiens
tgttagtgcgatcca

SEQ ID NO: 1031913 - DNA, 15 bp, Homo sapiens
gttagtgcgatccag

SEQ ID NO: 1031914 - DNA, 15 bp, Homo sapiens
ttagtgcgatccaga

SEQ ID NO: 1031915 - DNA, 15 bp, Homo sapiens
tagtgcgatccagag

SEQ ID NO: 1031916 - DNA, 15 bp, Homo sapiens
agtgcgatccagaga

SEQ ID NO: 1031917 - DNA, 15 bp, Homo sapiens
gtgcgatccagagag

SEQ ID NO: 1031918 - DNA, 15 bp, Homo sapiens
tgcgatccagagagg

SEQ ID NO: 1031919 - DNA, 15 bp, Homo sapiens
gcgatccagagaggc

SEQ ID NO: 1031920 - DNA, 15 bp, Homo sapiens
cgatccagagaggcc

SEQ ID NO: 1031921 - DNA, 15 bp, Homo sapiens
gatccagagaggccg

SEQ ID NO: 1031922 - DNA, 15 bp, Homo sapiens
atccagagaggccgt

SEQ ID NO: 1031923 - DNA, 15 bp, Homo sapiens
tccagagaggccgtg

SEQ ID NO: 1031924 - DNA, 15 bp, Homo sapiens
ccagagaggccgtgg

SEQ ID NO: 1031925 - DNA, 15 bp, Homo sapiens
cagagaggccgtggg

SEQ ID NO: 1031926 - DNA, 15 bp, Homo sapiens
agagaggccgtgggc

SEQ ID NO: 1031927 - DNA, 15 bp, Homo sapiens
gagaggccgtgggcg

SEQ ID NO: 1031928 - DNA, 15 bp, Homo sapiens
agaggccgtgggcgt

SEQ ID NO: 1031929 - DNA, 15 bp, Homo sapiens
gaggccgtgggcgtc

SEQ ID NO: 1031930 - DNA, 15 bp, Homo sapiens
aggccgtgggcgtcg

SEQ ID NO: 1031931 - DNA, 15 bp, Homo sapiens
ggccgtgggcgtcgg

SEQ ID NO: 1031932 - DNA, 15 bp, Homo sapiens
gccgtgggcgtcggt

SEQ ID NO: 1031933 - DNA, 15 bp, Homo sapiens
ccgtgggcgtcggtg

SEQ ID NO: 1031934 - DNA, 15 bp, Homo sapiens
cgtgggcgtcggtga

SEQ ID NO: 1031935 - DNA, 15 bp, Homo sapiens
gtgggcgtcggtgag

SEQ ID NO: 1031936 - DNA, 15 bp, Homo sapiens
tgggcgtcggtgagc

SEQ ID NO: 1031937 - DNA, 15 bp, Homo sapiens
gggcgtcggtgagct

SEQ ID NO: 1031938 - DNA, 15 bp, Homo sapiens
ggcgtcggtgagctc

SEQ ID NO: 1031939 - DNA, 15 bp, Homo sapiens
gcgtcggtgagctcc

SEQ ID NO: 1031940 - DNA, 15 bp, Homo sapiens
cgtcggtgagctcct

SEQ ID NO: 1031941 - DNA, 15 bp, Homo sapiens
gtcggtgagctcctt

SEQ ID NO: 1031942 - DNA, 15 bp, Homo sapiens
tcggtgagctccttc

SEQ ID NO: 1031943 - DNA, 15 bp, Homo sapiens
cggtgagctccttca

SEQ ID NO: 1031944 - DNA, 15 bp, Homo sapiens
ggtgagctccttcag

SEQ ID NO: 1031945 - DNA, 15 bp, Homo sapiens
gtgagctccttcaga

SEQ ID NO: 1031946 - DNA, 15 bp, Homo sapiens
tgagctccttcagac

SEQ ID NO: 1031947 - DNA, 15 bp, Homo sapiens
gagctccttcagacc

SEQ ID NO: 1031948 - DNA, 15 bp, Homo sapiens
agctccttcagaccc

SEQ ID NO: 1031949 - DNA, 15 bp, Homo sapiens
gctccttcagacccg

SEQ ID NO: 1031950 - DNA, 15 bp, Homo sapiens
ctccttcagacccgc

SEQ ID NO: 1031951 - DNA, 15 bp, Homo sapiens
tccttcagacccgca

SEQ ID NO: 1031952 - DNA, 15 bp, Homo sapiens
ccttcagacccgcag

SEQ ID NO: 1031953 - DNA, 15 bp, Homo sapiens
cttcagacccgcagg

SEQ ID NO: 1031954 - DNA, 15 bp, Homo sapiens
ttcagacccgcagga

SEQ ID NO: 1031955 - DNA, 15 bp, Homo sapiens
ctttcccgccccaag

SEQ ID NO: 1031956 - DNA, 15 bp, Homo sapiens
tttcccgccccaaga

SEQ ID NO: 1031957 - DNA, 15 bp, Homo sapiens
ttcccgccccaagag

SEQ ID NO: 1031958 - DNA, 15 bp, Homo sapiens
tcccgccccaagagg

SEQ ID NO: 1031959 - DNA, 15 bp, Homo sapiens
cccgccccaagaggg

SEQ ID NO: 1031960 - DNA, 15 bp, Homo sapiens
ccgccccaagaggga

SEQ ID NO: 1031961 - DNA, 15 bp, Homo sapiens
cgccccaagagggag

SEQ ID NO: 1031962 - DNA, 15 bp, Homo sapiens
gccccaagagggaga

SEQ ID NO: 1031963 - DNA, 15 bp, Homo sapiens
ccccaagagggagag

SEQ ID NO: 1031964 - DNA, 15 bp, Homo sapiens
cccaagagggagaga

SEQ ID NO: 1031965 - DNA, 15 bp, Homo sapiens
ccaagagggagagaa

SEQ ID NO: 1031966 - DNA, 15 bp, Homo sapiens
caagagggagagaaa

SEQ ID NO: 1031967 - DNA, 15 bp, Homo sapiens
aagagggagagaaac

SEQ ID NO: 1031968 - DNA, 15 bp, Homo sapiens
agagggagagaaacc

SEQ ID NO: 1031969 - DNA, 15 bp, Homo sapiens
gagggagagaaaccc

SEQ ID NO: 1031970 - DNA, 15 bp, Homo sapiens
agggagagaaaccct

SEQ ID NO: 1031971 - DNA, 15 bp, Homo sapiens
gggagagaaaccctt

SEQ ID NO: 1031972 - DNA, 15 bp, Homo sapiens
ggagagaaacccttg

SEQ ID NO: 1031973 - DNA, 15 bp, Homo sapiens
gagagaaacccttgg

SEQ ID NO: 1031974 - DNA, 15 bp, Homo sapiens
agagaaacccttggt

SEQ ID NO: 1031975 - DNA, 15 bp, Homo sapiens
gagaaacccttggtt

SEQ ID NO: 1031976 - DNA, 15 bp, Homo sapiens
agaaacccttggttg

SEQ ID NO: 1031977 - DNA, 15 bp, Homo sapiens
gaaacccttggttgt

SEQ ID NO: 1031978 - DNA, 15 bp, Homo sapiens
aaacccttggttgtg

SEQ ID NO: 1031979 - DNA, 15 bp, Homo sapiens
aacccttggttgtgt

SEQ ID NO: 1031980 - DNA, 15 bp, Homo sapiens
acccttggttgtgtc

SEQ ID NO: 1031981 - DNA, 15 bp, Homo sapiens
cccttggttgtgtca

SEQ ID NO: 1031982 - DNA, 15 bp, Homo sapiens
ccttggttgtgtcac

SEQ ID NO: 1031983 - DNA, 15 bp, Homo sapiens
cttggttgtgtcacc

SEQ ID NO: 1031984 - DNA, 15 bp, Homo sapiens
ttggttgtgtcacca

SEQ ID NO: 1031985 - DNA, 15 bp, Homo sapiens
tggttgtgtcaccac

SEQ ID NO: 1031986 - DNA, 15 bp, Homo sapiens
ggttgtgtcaccact

SEQ ID NO: 1031987 - DNA, 15 bp, Homo sapiens
gttgtgtcaccactt

SEQ ID NO: 1031988 - DNA, 15 bp, Homo sapiens
ttgtgtcaccacttg

SEQ ID NO: 1031989 - DNA, 15 bp, Homo sapiens
tgtgtcaccacttgc

SEQ ID NO: 1031990 - DNA, 15 bp, Homo sapiens
gtgtcaccacttgct

SEQ ID NO: 1031991 - DNA, 15 bp, Homo sapiens
tgtcaccacttgctt

SEQ ID NO: 1031992 - DNA, 15 bp, Homo sapiens
gtcaccacttgcttt

SEQ ID NO: 1031993 - DNA, 15 bp, Homo sapiens
tcaccacttgctttg

SEQ ID NO: 1031994 - DNA, 15 bp, Homo sapiens
caccacttgctttgt

SEQ ID NO: 1031995 - DNA, 15 bp, Homo sapiens
accacttgctttgtg

SEQ ID NO: 1031996 - DNA, 15 bp, Homo sapiens
ccacttgctttgtgt

SEQ ID NO: 1031997 - DNA, 15 bp, Homo sapiens
cacttgctttgtgtg

SEQ ID NO: 1031998 - DNA, 15 bp, Homo sapiens
acttgctttgtgtga

SEQ ID NO: 1031999 - DNA, 15 bp, Homo sapiens
cttgctttgtgtgat

SEQ ID NO: 1032000 - DNA, 15 bp, Homo sapiens
ttgctttgtgtgatg

SEQ ID NO: 1032001 - DNA, 15 bp, Homo sapiens
tgctttgtgtgatgt

SEQ ID NO: 1032002 - DNA, 15 bp, Homo sapiens
gctttgtgtgatgtg

SEQ ID NO: 1032003 - DNA, 15 bp, Homo sapiens
ctttgtgtgatgtga

SEQ ID NO: 1032004 - DNA, 15 bp, Homo sapiens
tttgtgtgatgtgac

SEQ ID NO: 1032005 - DNA, 15 bp, Homo sapiens
ttgtgtgatgtgaca

SEQ ID NO: 1032006 - DNA, 15 bp, Homo sapiens
tgtgtgatgtgacat

SEQ ID NO: 1032007 - DNA, 15 bp, Homo sapiens
gtgtgatgtgacatt

SEQ ID NO: 1032008 - DNA, 15 bp, Homo sapiens
tgtgatgtgacattc

SEQ ID NO: 1032009 - DNA, 15 bp, Homo sapiens
gtgatgtgacattcg

SEQ ID NO: 1032010 - DNA, 15 bp, Homo sapiens
tgatgtgacattcga

SEQ ID NO: 1032011 - DNA, 15 bp, Homo sapiens
gatgtgacattcgat

SEQ ID NO: 1032012 - DNA, 15 bp, Homo sapiens
atgtgacattcgata

SEQ ID NO: 1032013 - DNA, 15 bp, Homo sapiens
tgtgacattcgataa

SEQ ID NO: 1032014 - DNA, 15 bp, Homo sapiens
gtgacattcgataac

SEQ ID NO: 1032015 - DNA, 15 bp, Homo sapiens
tgacattcgataact

SEQ ID NO: 1032016 - DNA, 15 bp, Homo sapiens
gacattcgataactt

SEQ ID NO: 1032017 - DNA, 15 bp, Homo sapiens
acattcgataacttg

SEQ ID NO: 1032018 - DNA, 15 bp, Homo sapiens
cattcgataacttgg

SEQ ID NO: 1032019 - DNA, 15 bp, Homo sapiens
attcgataacttggt

SEQ ID NO: 1032020 - DNA, 15 bp, Homo sapiens
ttcgataacttggta

SEQ ID NO: 1032021 - DNA, 15 bp, Homo sapiens
tcgataacttggtac

SEQ ID NO: 1032022 - DNA, 15 bp, Homo sapiens
cgataacttggtact

SEQ ID NO: 1032023 - DNA, 15 bp, Homo sapiens
gataacttggtactc

SEQ ID NO: 1032024 - DNA, 15 bp, Homo sapiens
ataacttggtactcc

SEQ ID NO: 1032025 - DNA, 15 bp, Homo sapiens
taacttggtactcca

SEQ ID NO: 1032026 - DNA, 15 bp, Homo sapiens
aacttggtactccaa

SEQ ID NO: 1032027 - DNA, 15 bp, Homo sapiens
acttggtactccaag

SEQ ID NO: 1032028 - DNA, 15 bp, Homo sapiens
cttggtactccaagt

SEQ ID NO: 1032029 - DNA, 15 bp, Homo sapiens
ttggtactccaagtt

SEQ ID NO: 1032030 - DNA, 15 bp, Homo sapiens
tggtactccaagttt

SEQ ID NO: 1032031 - DNA, 15 bp, Homo sapiens
ggtactccaagtttt

SEQ ID NO: 1032032 - DNA, 15 bp, Homo sapiens
gtactccaagttttt

SEQ ID NO: 1032033 - DNA, 15 bp, Homo sapiens
tactccaagttttta

SEQ ID NO: 1032034 - DNA, 15 bp, Homo sapiens
actccaagtttttat

SEQ ID NO: 1032035 - DNA, 15 bp, Homo sapiens
ctccaagtttttatg

SEQ ID NO: 1032036 - DNA, 15 bp, Homo sapiens
tccaagtttttatga

SEQ ID NO: 1032037 - DNA, 15 bp, Homo sapiens
ccaagtttttatgac

SEQ ID NO: 1032038 - DNA, 15 bp, Homo sapiens
caagtttttatgaca

SEQ ID NO: 1032039 - DNA, 15 bp, Homo sapiens
aagtttttatgacat

SEQ ID NO: 1032040 - DNA, 15 bp, Homo sapiens
agtttttatgacatt

SEQ ID NO: 1032041 - DNA, 15 bp, Homo sapiens
gtttttatgacattc

SEQ ID NO: 1032042 - DNA, 15 bp, Homo sapiens
tttttatgacattct

SEQ ID NO: 1032043 - DNA, 15 bp, Homo sapiens
ttttatgacattcta

SEQ ID NO: 1032044 - DNA, 15 bp, Homo sapiens
tttatgacattctaa

SEQ ID NO: 1032045 - DNA, 15 bp, Homo sapiens
ttatgacattctaag

SEQ ID NO: 1032046 - DNA, 15 bp, Homo sapiens
tatgacattctaaga

SEQ ID NO: 1032047 - DNA, 15 bp, Homo sapiens
atgacattctaagag

SEQ ID NO: 1032048 - DNA, 15 bp, Homo sapiens
tgacattctaagagc

SEQ ID NO: 1032049 - DNA, 15 bp, Homo sapiens
gacattctaagagct

SEQ ID NO: 1032050 - DNA, 15 bp, Homo sapiens
acattctaagagctt

SEQ ID NO: 1032051 - DNA, 15 bp, Homo sapiens
cattctaagagcttt

SEQ ID NO: 1032052 - DNA, 15 bp, Homo sapiens
attctaagagctttg

SEQ ID NO: 1032053 - DNA, 15 bp, Homo sapiens
ttctaagagctttgt

SEQ ID NO: 1032054 - DNA, 15 bp, Homo sapiens
tctaagagctttgtg

SEQ ID NO: 1032055 - DNA, 15 bp, Homo sapiens
ctaagagctttgtga

SEQ ID NO: 1032056 - DNA, 15 bp, Homo sapiens
taagagctttgtgag

SEQ ID NO: 1032057 - DNA, 15 bp, Homo sapiens
aagagctttgtgaga

SEQ ID NO: 1032058 - DNA, 15 bp, Homo sapiens
agagctttgtgagag

SEQ ID NO: 1032059 - DNA, 15 bp, Homo sapiens
gagctttgtgagagg

SEQ ID NO: 1032060 - DNA, 15 bp, Homo sapiens
agctttgtgagagga

SEQ ID NO: 1032061 - DNA, 15 bp, Homo sapiens
gctttgtgagaggag

SEQ ID NO: 1032062 - DNA, 15 bp, Homo sapiens
ctttgtgagaggagg

SEQ ID NO: 1032063 - DNA, 15 bp, Homo sapiens
tttgtgagaggagga

SEQ ID NO: 1032064 - DNA, 15 bp, Homo sapiens
ttgtgagaggaggac

SEQ ID NO: 1032065 - DNA, 15 bp, Homo sapiens
tgtgagaggaggacc

SEQ ID NO: 1032066 - DNA, 15 bp, Homo sapiens
gtgagaggaggacct

SEQ ID NO: 1032067 - DNA, 15 bp, Homo sapiens
tgagaggaggacctg

SEQ ID NO: 1032068 - DNA, 15 bp, Homo sapiens
gagaggaggacctgt

SEQ ID NO: 1032069 - DNA, 15 bp, Homo sapiens
agaggaggacctgtg

SEQ ID NO: 1032070 - DNA, 15 bp, Homo sapiens
gaggaggacctgtgg

SEQ ID NO: 1032071 - DNA, 15 bp, Homo sapiens
aggaggacctgtggc

SEQ ID NO: 1032072 - DNA, 15 bp, Homo sapiens
ggaggacctgtggct

SEQ ID NO: 1032073 - DNA, 15 bp, Homo sapiens
gaggacctgtggctt

SEQ ID NO: 1032074 - DNA, 15 bp, Homo sapiens
aggacctgtggcttt

SEQ ID NO: 1032075 - DNA, 15 bp, Homo sapiens
ggacctgtggctttg

SEQ ID NO: 1032076 - DNA, 15 bp, Homo sapiens
gacctgtggctttga

SEQ ID NO: 1032077 - DNA, 15 bp, Homo sapiens
acctgtggctttgag

SEQ ID NO: 1032078 - DNA, 15 bp, Homo sapiens
cctgtggctttgagc

SEQ ID NO: 1032079 - DNA, 15 bp, Homo sapiens
ctgtggctttgagcc

SEQ ID NO: 1032080 - DNA, 15 bp, Homo sapiens
tgtggctttgagcct

SEQ ID NO: 1032081 - DNA, 15 bp, Homo sapiens
gtggctttgagcctc

SEQ ID NO: 1032082 - DNA, 15 bp, Homo sapiens
tggctttgagcctca

SEQ ID NO: 1032083 - DNA, 15 bp, Homo sapiens
ggctttgagcctcag

SEQ ID NO: 1032084 - DNA, 15 bp, Homo sapiens
gctttgagcctcagg

SEQ ID NO: 1032085 - DNA, 15 bp, Homo sapiens
ctttgagcctcaggg

SEQ ID NO: 1032086 - DNA, 15 bp, Homo sapiens
tttgagcctcagggg

SEQ ID NO: 1032087 - DNA, 15 bp, Homo sapiens
ttgagcctcagggga

SEQ ID NO: 1032088 - DNA, 15 bp, Homo sapiens
tgagcctcaggggaa

SEQ ID NO: 1032089 - DNA, 15 bp, Homo sapiens
gagcctcaggggaaa

SEQ ID NO: 1032090 - DNA, 15 bp, Homo sapiens
agcctcaggggaaac

SEQ ID NO: 1032091 - DNA, 15 bp, Homo sapiens
gcctcaggggaaacc

SEQ ID NO: 1032092 - DNA, 15 bp, Homo sapiens
cctcaggggaaacca

SEQ ID NO: 1032093 - DNA, 15 bp, Homo sapiens
ctcaggggaaaccag

SEQ ID NO: 1032094 - DNA, 15 bp, Homo sapiens
tcaggggaaaccaga

SEQ ID NO: 1032095 - DNA, 15 bp, Homo sapiens
caggggaaaccagag

SEQ ID NO: 1032096 - DNA, 15 bp, Homo sapiens
aggggaaaccagaga

SEQ ID NO: 1032097 - DNA, 15 bp, Homo sapiens
ggggaaaccagagac

SEQ ID NO: 1032098 - DNA, 15 bp, Homo sapiens
gggaaaccagagaca

SEQ ID NO: 1032099 - DNA, 15 bp, Homo sapiens
ggaaaccagagacag

SEQ ID NO: 1032100 - DNA, 15 bp, Homo sapiens
gaaaccagagacaga

SEQ ID NO: 1032101 - DNA, 15 bp, Homo sapiens
aaaccagagacagat

SEQ ID NO: 1032102 - DNA, 15 bp, Homo sapiens
aaccagagacagatg

SEQ ID NO: 1032103 - DNA, 15 bp, Homo sapiens
accagagacagatga

SEQ ID NO: 1032104 - DNA, 15 bp, Homo sapiens
ccagagacagatgaa

SEQ ID NO: 1032105 - DNA, 15 bp, Homo sapiens
cagagacagatgaat

SEQ ID NO: 1032106 - DNA, 15 bp, Homo sapiens
agagacagatgaatg

SEQ ID NO: 1032107 - DNA, 15 bp, Homo sapiens
gagacagatgaatgt

SEQ ID NO: 1032108 - DNA, 15 bp, Homo sapiens
agacagatgaatgtt

SEQ ID NO: 1032109 - DNA, 15 bp, Homo sapiens
gacagatgaatgttc

SEQ ID NO: 1032110 - DNA, 15 bp, Homo sapiens
acagatgaatgttca

SEQ ID NO: 1032111 - DNA, 15 bp, Homo sapiens
cagatgaatgttcat

SEQ ID NO: 1032112 - DNA, 15 bp, Homo sapiens
agatgaatgttcata

SEQ ID NO: 1032113 - DNA, 15 bp, Homo sapiens
gatgaatgttcatat

SEQ ID NO: 1032114 - DNA, 15 bp, Homo sapiens
atgaatgttcatatt

SEQ ID NO: 1032115 - DNA, 15 bp, Homo sapiens
tgaatgttcatattt

SEQ ID NO: 1032116 - DNA, 15 bp, Homo sapiens
gaatgttcatatttt

SEQ ID NO: 1032117 - DNA, 15 bp, Homo sapiens
aatgttcatattttg

SEQ ID NO: 1032118 - DNA, 15 bp, Homo sapiens
atgttcatattttgc

SEQ ID NO: 1032119 - DNA, 15 bp, Homo sapiens
tgttcatattttgct

SEQ ID NO: 1032120 - DNA, 15 bp, Homo sapiens
gttcatattttgctt

SEQ ID NO: 1032121 - DNA, 15 bp, Homo sapiens
ttcatattttgctta

SEQ ID NO: 1032122 - DNA, 15 bp, Homo sapiens
tcatattttgcttac

SEQ ID NO: 1032123 - DNA, 15 bp, Homo sapiens
catattttgcttaca

SEQ ID NO: 1032124 - DNA, 15 bp, Homo sapiens
atattttgcttacag

SEQ ID NO: 1032125 - DNA, 15 bp, Homo sapiens
tattttgcttacagg

SEQ ID NO: 1032126 - DNA, 15 bp, Homo sapiens
attttgcttacaggt

SEQ ID NO: 1032127 - DNA, 15 bp, Homo sapiens
ttttgcttacaggtg

SEQ ID NO: 1032128 - DNA, 15 bp, Homo sapiens
tttgcttacaggtgg

SEQ ID NO: 1032129 - DNA, 15 bp, Homo sapiens
ttgcttacaggtggt

SEQ ID NO: 1032130 - DNA, 15 bp, Homo sapiens
tgcttacaggtggtt

SEQ ID NO: 1032131 - DNA, 15 bp, Homo sapiens
gcttacaggtggttt

SEQ ID NO: 1032132 - DNA, 15 bp, Homo sapiens
cttacaggtggttta

SEQ ID NO: 1032133 - DNA, 15 bp, Homo sapiens
ttacaggtggtttaa

SEQ ID NO: 1032134 - DNA, 15 bp, Homo sapiens
tacaggtggtttaat

SEQ ID NO: 1032135 - DNA, 15 bp, Homo sapiens
acaggtggtttaatc

SEQ ID NO: 1032136 - DNA, 15 bp, Homo sapiens
caggtggtttaatcc

SEQ ID NO: 1032137 - DNA, 15 bp, Homo sapiens
aggtggtttaatcct

SEQ ID NO: 1032138 - DNA, 15 bp, Homo sapiens
ggtggtttaatcctt

SEQ ID NO: 1032139 - DNA, 15 bp, Homo sapiens
gtggtttaatccttt

SEQ ID NO: 1032140 - DNA, 15 bp, Homo sapiens
tggtttaatcctttc

SEQ ID NO: 1032141 - DNA, 15 bp, Homo sapiens
ggtttaatcctttct

SEQ ID NO: 1032142 - DNA, 15 bp, Homo sapiens
gtttaatcctttcta

SEQ ID NO: 1032143 - DNA, 15 bp, Homo sapiens
tttaatcctttctat

SEQ ID NO: 1032144 - DNA, 15 bp, Homo sapiens
ttaatcctttctata

SEQ ID NO: 1032145 - DNA, 15 bp, Homo sapiens
taatcctttctatat

SEQ ID NO: 1032146 - DNA, 15 bp, Homo sapiens
aatcctttctatata

SEQ ID NO: 1032147 - DNA, 15 bp, Homo sapiens
atcctttctatatac

SEQ ID NO: 1032148 - DNA, 15 bp, Homo sapiens
tcctttctatataca

SEQ ID NO: 1032149 - DNA, 15 bp, Homo sapiens
cctttctatatacac

SEQ ID NO: 1032150 - DNA, 15 bp, Homo sapiens
ctttctatatacacg

SEQ ID NO: 1032151 - DNA, 15 bp, Homo sapiens
tttctatatacacgg

SEQ ID NO: 1032152 - DNA, 15 bp, Homo sapiens
ttctatatacacgga

SEQ ID NO: 1032153 - DNA, 15 bp, Homo sapiens
tctatatacacggag

SEQ ID NO: 1032154 - DNA, 15 bp, Homo sapiens
ctatatacacggagg

SEQ ID NO: 1032155 - DNA, 15 bp, Homo sapiens
tatatacacggaggc

SEQ ID NO: 1032156 - DNA, 15 bp, Homo sapiens
atatacacggaggca

SEQ ID NO: 1032157 - DNA, 15 bp, Homo sapiens
tatacacggaggcag

SEQ ID NO: 1032158 - DNA, 15 bp, Homo sapiens
atacacggaggcaga

SEQ ID NO: 1032159 - DNA, 15 bp, Homo sapiens
tacacggaggcagac

SEQ ID NO: 1032160 - DNA, 15 bp, Homo sapiens
acacggaggcagact

SEQ ID NO: 1032161 - DNA, 15 bp, Homo sapiens
cacggaggcagactc

SEQ ID NO: 1032162 - DNA, 15 bp, Homo sapiens
acggaggcagactcc

SEQ ID NO: 1032163 - DNA, 15 bp, Homo sapiens
cggaggcagactccc

SEQ ID NO: 1032164 - DNA, 15 bp, Homo sapiens
ggaggcagactccct

SEQ ID NO: 1032165 - DNA, 15 bp, Homo sapiens
gaggcagactccctg

SEQ ID NO: 1032166 - DNA, 15 bp, Homo sapiens
aggcagactccctgg

SEQ ID NO: 1032167 - DNA, 15 bp, Homo sapiens
ggcagactccctggg

SEQ ID NO: 1032168 - DNA, 15 bp, Homo sapiens
gcagactccctgggt

SEQ ID NO: 1032169 - DNA, 15 bp, Homo sapiens
cagactccctgggtt

SEQ ID NO: 1032170 - DNA, 15 bp, Homo sapiens
agactccctgggttt

SEQ ID NO: 1032171 - DNA, 15 bp, Homo sapiens
gactccctgggtttg

SEQ ID NO: 1032172 - DNA, 15 bp, Homo sapiens
actccctgggtttgg

SEQ ID NO: 1032173 - DNA, 15 bp, Homo sapiens
ctccctgggtttgga

SEQ ID NO: 1032174 - DNA, 15 bp, Homo sapiens
tccctgggtttggat

SEQ ID NO: 1032175 - DNA, 15 bp, Homo sapiens
ccctgggtttggatc

SEQ ID NO: 1032176 - DNA, 15 bp, Homo sapiens
cctgggtttggatcc

SEQ ID NO: 1032177 - DNA, 15 bp, Homo sapiens
ctgggtttggatcca

SEQ ID NO: 1032178 - DNA, 15 bp, Homo sapiens
tgggtttggatccat

SEQ ID NO: 1032179 - DNA, 15 bp, Homo sapiens
gggtttggatccatc

SEQ ID NO: 1032180 - DNA, 15 bp, Homo sapiens
ggtttggatccatct

SEQ ID NO: 1032181 - DNA, 15 bp, Homo sapiens
gtttggatccatctt

SEQ ID NO: 1032182 - DNA, 15 bp, Homo sapiens
tttggatccatcttt

SEQ ID NO: 1032183 - DNA, 15 bp, Homo sapiens
ttggatccatctttt

SEQ ID NO: 1032184 - DNA, 15 bp, Homo sapiens
tggatccatctttta

SEQ ID NO: 1032185 - DNA, 15 bp, Homo sapiens
ggatccatcttttac

SEQ ID NO: 1032186 - DNA, 15 bp, Homo sapiens
gatccatcttttaca

SEQ ID NO: 1032187 - DNA, 15 bp, Homo sapiens
atccatcttttacat

SEQ ID NO: 1032188 - DNA, 15 bp, Homo sapiens
tccatcttttacatc

SEQ ID NO: 1032189 - DNA, 15 bp, Homo sapiens
ccatcttttacatct

SEQ ID NO: 1032190 - DNA, 15 bp, Homo sapiens
catcttttacatctg

SEQ ID NO: 1032191 - DNA, 15 bp, Homo sapiens
atcttttacatctgg

SEQ ID NO: 1032192 - DNA, 15 bp, Homo sapiens
tcttttacatctggc

SEQ ID NO: 1032193 - DNA, 15 bp, Homo sapiens
cttttacatctggct

SEQ ID NO: 1032194 - DNA, 15 bp, Homo sapiens
ttttacatctggctg

SEQ ID NO: 1032195 - DNA, 15 bp, Homo sapiens
tttacatctggctgt

SEQ ID NO: 1032196 - DNA, 15 bp, Homo sapiens
ttacatctggctgtg

SEQ ID NO: 1032197 - DNA, 15 bp, Homo sapiens
tacatctggctgtgt

SEQ ID NO: 1032198 - DNA, 15 bp, Homo sapiens
acatctggctgtgtg

SEQ ID NO: 1032199 - DNA, 15 bp, Homo sapiens
catctggctgtgtgt

SEQ ID NO: 1032200 - DNA, 15 bp, Homo sapiens
atctggctgtgtgtc

SEQ ID NO: 1032201 - DNA, 15 bp, Homo sapiens
tctggctgtgtgtcc

SEQ ID NO: 1032202 - DNA, 15 bp, Homo sapiens
ctggctgtgtgtcct

SEQ ID NO: 1032203 - DNA, 15 bp, Homo sapiens
tggctgtgtgtcctc

SEQ ID NO: 1032204 - DNA, 15 bp, Homo sapiens
ggctgtgtgtcctct

SEQ ID NO: 1032205 - DNA, 15 bp, Homo sapiens
gctgtgtgtcctctg

SEQ ID NO: 1032206 - DNA, 15 bp, Homo sapiens
ctgtgtgtcctctgg

SEQ ID NO: 1032207 - DNA, 15 bp, Homo sapiens
tgtgtgtcctctggc

SEQ ID NO: 1032208 - DNA, 15 bp, Homo sapiens
gtgtgtcctctggca

SEQ ID NO: 1032209 - DNA, 15 bp, Homo sapiens
tgtgtcctctggcaa

SEQ ID NO: 1032210 - DNA, 15 bp, Homo sapiens
gtgtcctctggcaag

SEQ ID NO: 1032211 - DNA, 15 bp, Homo sapiens
tgtcctctggcaagt

SEQ ID NO: 1032212 - DNA, 15 bp, Homo sapiens
gtcctctggcaagtt

SEQ ID NO: 1032213 - DNA, 15 bp, Homo sapiens
tcctctggcaagttg

SEQ ID NO: 1032214 - DNA, 15 bp, Homo sapiens
cctctggcaagttgg

SEQ ID NO: 1032215 - DNA, 15 bp, Homo sapiens
ctctggcaagttggt

SEQ ID NO: 1032216 - DNA, 15 bp, Homo sapiens
tctggcaagttggtt

SEQ ID NO: 1032217 - DNA, 15 bp, Homo sapiens
ctggcaagttggtta

SEQ ID NO: 1032218 - DNA, 15 bp, Homo sapiens
tggcaagttggttaa

SEQ ID NO: 1032219 - DNA, 15 bp, Homo sapiens
ggcaagttggttaac

SEQ ID NO: 1032220 - DNA, 15 bp, Homo sapiens
gcaagttggttaacc

SEQ ID NO: 1032221 - DNA, 15 bp, Homo sapiens
caagttggttaacct

SEQ ID NO: 1032222 - DNA, 15 bp, Homo sapiens
aagttggttaacctg

SEQ ID NO: 1032223 - DNA, 15 bp, Homo sapiens
agttggttaacctgc

SEQ ID NO: 1032224 - DNA, 15 bp, Homo sapiens
gttggttaacctgcc

SEQ ID NO: 1032225 - DNA, 15 bp, Homo sapiens
ttggttaacctgcct

SEQ ID NO: 1032226 - DNA, 15 bp, Homo sapiens
tggttaacctgcctg

SEQ ID NO: 1032227 - DNA, 15 bp, Homo sapiens
ggttaacctgcctgt

SEQ ID NO: 1032228 - DNA, 15 bp, Homo sapiens
gttaacctgcctgtg

SEQ ID NO: 1032229 - DNA, 15 bp, Homo sapiens
ttaacctgcctgtgc

SEQ ID NO: 1032230 - DNA, 15 bp, Homo sapiens
taacctgcctgtgca

SEQ ID NO: 1032231 - DNA, 15 bp, Homo sapiens
aacctgcctgtgcac

SEQ ID NO: 1032232 - DNA, 15 bp, Homo sapiens
acctgcctgtgcact

SEQ ID NO: 1032233 - DNA, 15 bp, Homo sapiens
cctgcctgtgcactc

SEQ ID NO: 1032234 - DNA, 15 bp, Homo sapiens
ctgcctgtgcactct

SEQ ID NO: 1032235 - DNA, 15 bp, Homo sapiens
tgcctgtgcactctc

SEQ ID NO: 1032236 - DNA, 15 bp, Homo sapiens
gcctgtgcactctct

SEQ ID NO: 1032237 - DNA, 15 bp, Homo sapiens
cctgtgcactctctc

SEQ ID NO: 1032238 - DNA, 15 bp, Homo sapiens
ctgtgcactctctca

SEQ ID NO: 1032239 - DNA, 15 bp, Homo sapiens
tgtgcactctctcat

SEQ ID NO: 1032240 - DNA, 15 bp, Homo sapiens
gtgcactctctcatc

SEQ ID NO: 1032241 - DNA, 15 bp, Homo sapiens
tgcactctctcatcc

SEQ ID NO: 1032242 - DNA, 15 bp, Homo sapiens
gcactctctcatccc

SEQ ID NO: 1032243 - DNA, 15 bp, Homo sapiens
cactctctcatcccc

SEQ ID NO: 1032244 - DNA, 15 bp, Homo sapiens
actctctcatcccca

SEQ ID NO: 1032245 - DNA, 15 bp, Homo sapiens
ctctctcatccccaa

SEQ ID NO: 1032246 - DNA, 15 bp, Homo sapiens
tctctcatccccaaa

SEQ ID NO: 1032247 - DNA, 15 bp, Homo sapiens
ctctcatccccaaaa

SEQ ID NO: 1032248 - DNA, 15 bp, Homo sapiens
tctcatccccaaaat

SEQ ID NO: 1032249 - DNA, 15 bp, Homo sapiens
ctcatccccaaaatg

SEQ ID NO: 1032250 - DNA, 15 bp, Homo sapiens
tcatccccaaaatgg

SEQ ID NO: 1032251 - DNA, 15 bp, Homo sapiens
catccccaaaatggg

SEQ ID NO: 1032252 - DNA, 15 bp, Homo sapiens
atccccaaaatggga

SEQ ID NO: 1032253 - DNA, 15 bp, Homo sapiens
tccccaaaatgggac

SEQ ID NO: 1032254 - DNA, 15 bp, Homo sapiens
ccccaaaatgggact

SEQ ID NO: 1032255 - DNA, 15 bp, Homo sapiens
cccaaaatgggacta

SEQ ID NO: 1032256 - DNA, 15 bp, Homo sapiens
ccaaaatgggactaa

SEQ ID NO: 1032257 - DNA, 15 bp, Homo sapiens
caaaatgggactaat

SEQ ID NO: 1032258 - DNA, 15 bp, Homo sapiens
aaaatgggactaatt

SEQ ID NO: 1032259 - DNA, 15 bp, Homo sapiens
aaatgggactaatta

SEQ ID NO: 1032260 - DNA, 15 bp, Homo sapiens
aatgggactaattat

SEQ ID NO: 1032261 - DNA, 15 bp, Homo sapiens
atgggactaattatt

SEQ ID NO: 1032262 - DNA, 15 bp, Homo sapiens
tgggactaattattg

SEQ ID NO: 1032263 - DNA, 15 bp, Homo sapiens
gggactaattattgt

SEQ ID NO: 1032264 - DNA, 15 bp, Homo sapiens
ggactaattattgta

SEQ ID NO: 1032265 - DNA, 15 bp, Homo sapiens
gactaattattgtac

SEQ ID NO: 1032266 - DNA, 15 bp, Homo sapiens
actaattattgtacc

SEQ ID NO: 1032267 - DNA, 15 bp, Homo sapiens
ctaattattgtacca

SEQ ID NO: 1032268 - DNA, 15 bp, Homo sapiens
taattattgtaccag

SEQ ID NO: 1032269 - DNA, 15 bp, Homo sapiens
aattattgtaccagt

SEQ ID NO: 1032270 - DNA, 15 bp, Homo sapiens
attattgtaccagta

SEQ ID NO: 1032271 - DNA, 15 bp, Homo sapiens
ttattgtaccagtac

SEQ ID NO: 1032272 - DNA, 15 bp, Homo sapiens
tattgtaccagtact

SEQ ID NO: 1032273 - DNA, 15 bp, Homo sapiens
attgtaccagtacta

SEQ ID NO: 1032274 - DNA, 15 bp, Homo sapiens
ttgtaccagtactag

SEQ ID NO: 1032275 - DNA, 15 bp, Homo sapiens
tgtaccagtactaga

SEQ ID NO: 1032276 - DNA, 15 bp, Homo sapiens
gtaccagtactagag

SEQ ID NO: 1032277 - DNA, 15 bp, Homo sapiens
taccagtactagagt

SEQ ID NO: 1032278 - DNA, 15 bp, Homo sapiens
accagtactagagta

SEQ ID NO: 1032279 - DNA, 15 bp, Homo sapiens
ccagtactagagtat

SEQ ID NO: 1032280 - DNA, 15 bp, Homo sapiens
cagtactagagtatt

SEQ ID NO: 1032281 - DNA, 15 bp, Homo sapiens
agtactagagtattg

SEQ ID NO: 1032282 - DNA, 15 bp, Homo sapiens
gtactagagtattgc

SEQ ID NO: 1032283 - DNA, 15 bp, Homo sapiens
tactagagtattgca

SEQ ID NO: 1032284 - DNA, 15 bp, Homo sapiens
actagagtattgcaa

SEQ ID NO: 1032285 - DNA, 15 bp, Homo sapiens
ctagagtattgcaag

SEQ ID NO: 1032286 - DNA, 15 bp, Homo sapiens
tagagtattgcaagg

SEQ ID NO: 1032287 - DNA, 15 bp, Homo sapiens
agagtattgcaagga

SEQ ID NO: 1032288 - DNA, 15 bp, Homo sapiens
gagtattgcaaggat

SEQ ID NO: 1032289 - DNA, 15 bp, Homo sapiens
agtattgcaaggatt

SEQ ID NO: 1032290 - DNA, 15 bp, Homo sapiens
gtattgcaaggattg

SEQ ID NO: 1032291 - DNA, 15 bp, Homo sapiens
tattgcaaggattga

SEQ ID NO: 1032292 - DNA, 15 bp, Homo sapiens
attgcaaggattgaa

SEQ ID NO: 1032293 - DNA, 15 bp, Homo sapiens
ttgcaaggattgaat

SEQ ID NO: 1032294 - DNA, 15 bp, Homo sapiens
tgcaaggattgaatg

SEQ ID NO: 1032295 - DNA, 15 bp, Homo sapiens
gcaaggattgaatga

SEQ ID NO: 1032296 - DNA, 15 bp, Homo sapiens
caaggattgaatgaa

SEQ ID NO: 1032297 - DNA, 15 bp, Homo sapiens
aaggattgaatgaat

SEQ ID NO: 1032298 - DNA, 15 bp, Homo sapiens
aggattgaatgaatt

SEQ ID NO: 1032299 - DNA, 15 bp, Homo sapiens
ggattgaatgaattt

SEQ ID NO: 1032300 - DNA, 15 bp, Homo sapiens
gattgaatgaattta

SEQ ID NO: 1032301 - DNA, 15 bp, Homo sapiens
attgaatgaatttaa

SEQ ID NO: 1032302 - DNA, 15 bp, Homo sapiens
ttgaatgaatttaaa

SEQ ID NO: 1032303 - DNA, 15 bp, Homo sapiens
tgaatgaatttaaag

SEQ ID NO: 1032304 - DNA, 15 bp, Homo sapiens
gaatgaatttaaagc

SEQ ID NO: 1032305 - DNA, 15 bp, Homo sapiens
aatgaatttaaagca

SEQ ID NO: 1032306 - DNA, 15 bp, Homo sapiens
atgaatttaaagcag

SEQ ID NO: 1032307 - DNA, 15 bp, Homo sapiens
tgaatttaaagcaga

SEQ ID NO: 1032308 - DNA, 15 bp, Homo sapiens
gaatttaaagcagag

SEQ ID NO: 1032309 - DNA, 15 bp, Homo sapiens
aatttaaagcagagt

SEQ ID NO: 1032310 - DNA, 15 bp, Homo sapiens
atttaaagcagagtg

SEQ ID NO: 1032311 - DNA, 15 bp, Homo sapiens
tttaaagcagagtgt

SEQ ID NO: 1032312 - DNA, 15 bp, Homo sapiens
ttaaagcagagtgtt

SEQ ID NO: 1032313 - DNA, 15 bp, Homo sapiens
taaagcagagtgttt

SEQ ID NO: 1032314 - DNA, 15 bp, Homo sapiens
aaagcagagtgttta

SEQ ID NO: 1032315 - DNA, 15 bp, Homo sapiens
aagcagagtgtttag

SEQ ID NO: 1032316 - DNA, 15 bp, Homo sapiens
agcagagtgtttaga

SEQ ID NO: 1032317 - DNA, 15 bp, Homo sapiens
gcagagtgtttagaa

SEQ ID NO: 1032318 - DNA, 15 bp, Homo sapiens
cagagtgtttagaac

SEQ ID NO: 1032319 - DNA, 15 bp, Homo sapiens
agagtgtttagaacg

SEQ ID NO: 1032320 - DNA, 15 bp, Homo sapiens
gagtgtttagaacgt

SEQ ID NO: 1032321 - DNA, 15 bp, Homo sapiens
agtgtttagaacgtg

SEQ ID NO: 1032322 - DNA, 15 bp, Homo sapiens
gtgtttagaacgtgt

SEQ ID NO: 1032323 - DNA, 15 bp, Homo sapiens
tgtttagaacgtgtc

SEQ ID NO: 1032324 - DNA, 15 bp, Homo sapiens
gtttagaacgtgtct

SEQ ID NO: 1032325 - DNA, 15 bp, Homo sapiens
tttagaacgtgtctg

SEQ ID NO: 1032326 - DNA, 15 bp, Homo sapiens
ttagaacgtgtctgt

SEQ ID NO: 1032327 - DNA, 15 bp, Homo sapiens
tagaacgtgtctgtt

SEQ ID NO: 1032328 - DNA, 15 bp, Homo sapiens
agaacgtgtctgttg

SEQ ID NO: 1032329 - DNA, 15 bp, Homo sapiens
gaacgtgtctgttgc

SEQ ID NO: 1032330 - DNA, 15 bp, Homo sapiens
aacgtgtctgttgca

SEQ ID NO: 1032331 - DNA, 15 bp, Homo sapiens
acgtgtctgttgcac

SEQ ID NO: 1032332 - DNA, 15 bp, Homo sapiens
cgtgtctgttgcaca

SEQ ID NO: 1032333 - DNA, 15 bp, Homo sapiens
gtgtctgttgcacag

SEQ ID NO: 1032334 - DNA, 15 bp, Homo sapiens
tgtctgttgcacagt

SEQ ID NO: 1032335 - DNA, 15 bp, Homo sapiens
gtctgttgcacagta

SEQ ID NO: 1032336 - DNA, 15 bp, Homo sapiens
tctgttgcacagtag

SEQ ID NO: 1032337 - DNA, 15 bp, Homo sapiens
ctgttgcacagtagt

SEQ ID NO: 1032338 - DNA, 15 bp, Homo sapiens
tgttgcacagtagtt

SEQ ID NO: 1032339 - DNA, 15 bp, Homo sapiens
gttgcacagtagtta

SEQ ID NO: 1032340 - DNA, 15 bp, Homo sapiens
ttgcacagtagttat

SEQ ID NO: 1032341 - DNA, 15 bp, Homo sapiens
tgcacagtagttatt

SEQ ID NO: 1032342 - DNA, 15 bp, Homo sapiens
gcacagtagttattc

SEQ ID NO: 1032343 - DNA, 15 bp, Homo sapiens
cacagtagttattca

SEQ ID NO: 1032344 - DNA, 15 bp, Homo sapiens
acagtagttattcag

SEQ ID NO: 1032345 - DNA, 15 bp, Homo sapiens
cagtagttattcagg

SEQ ID NO: 1032346 - DNA, 15 bp, Homo sapiens
agtagttattcagga

SEQ ID NO: 1032347 - DNA, 15 bp, Homo sapiens
gtagttattcaggaa

SEQ ID NO: 1032348 - DNA, 15 bp, Homo sapiens
tagttattcaggaaa

SEQ ID NO: 1032349 - DNA, 15 bp, Homo sapiens
agttattcaggaaaa

SEQ ID NO: 1032350 - DNA, 15 bp, Homo sapiens
gttattcaggaaaaa

SEQ ID NO: 1032351 - DNA, 15 bp, Homo sapiens
ttattcaggaaaaag

SEQ ID NO: 1032352 - DNA, 15 bp, Homo sapiens
tattcaggaaaaagc

SEQ ID NO: 1032353 - DNA, 15 bp, Homo sapiens
attcaggaaaaagcc

SEQ ID NO: 1032354 - DNA, 15 bp, Homo sapiens
ttcaggaaaaagcca

SEQ ID NO: 1032355 - DNA, 15 bp, Homo sapiens
tcaggaaaaagccag

SEQ ID NO: 1032356 - DNA, 15 bp, Homo sapiens
caggaaaaagccagt

SEQ ID NO: 1032357 - DNA, 15 bp, Homo sapiens
aggaaaaagccagtt

SEQ ID NO: 1032358 - DNA, 15 bp, Homo sapiens
ggaaaaagccagttg

SEQ ID NO: 1032359 - DNA, 15 bp, Homo sapiens
gaaaaagccagttgt

SEQ ID NO: 1032360 - DNA, 15 bp, Homo sapiens
aaaaagccagttgtc

SEQ ID NO: 1032361 - DNA, 15 bp, Homo sapiens
aaaagccagttgtct

SEQ ID NO: 1032362 - DNA, 15 bp, Homo sapiens
aaagccagttgtctt

SEQ ID NO: 1032363 - DNA, 15 bp, Homo sapiens
aagccagttgtcttt

SEQ ID NO: 1032364 - DNA, 15 bp, Homo sapiens
agccagttgtcttta

SEQ ID NO: 1032365 - DNA, 15 bp, Homo sapiens
gccagttgtctttac

SEQ ID NO: 1032366 - DNA, 15 bp, Homo sapiens
ccagttgtctttact

SEQ ID NO: 1032367 - DNA, 15 bp, Homo sapiens
cagttgtctttacta

SEQ ID NO: 1032368 - DNA, 15 bp, Homo sapiens
agttgtctttactat

SEQ ID NO: 1032369 - DNA, 15 bp, Homo sapiens
gttgtctttactatt

SEQ ID NO: 1032370 - DNA, 15 bp, Homo sapiens
ttgtctttactattg

SEQ ID NO: 1032371 - DNA, 15 bp, Homo sapiens
tgtctttactattgc

SEQ ID NO: 1032372 - DNA, 15 bp, Homo sapiens
gtctttactattgct

SEQ ID NO: 1032373 - DNA, 15 bp, Homo sapiens
tctttactattgctc

SEQ ID NO: 1032374 - DNA, 15 bp, Homo sapiens
ctttactattgctca

SEQ ID NO: 1032375 - DNA, 15 bp, Homo sapiens
tttactattgctcag

SEQ ID NO: 1032376 - DNA, 15 bp, Homo sapiens
ttactattgctcaga

SEQ ID NO: 1032377 - DNA, 15 bp, Homo sapiens
tactattgctcagat

SEQ ID NO: 1032378 - DNA, 15 bp, Homo sapiens
actattgctcagatc

SEQ ID NO: 1032379 - DNA, 15 bp, Homo sapiens
ctattgctcagatca

SEQ ID NO: 1032380 - DNA, 15 bp, Homo sapiens
tattgctcagatcat

SEQ ID NO: 1032381 - DNA, 15 bp, Homo sapiens
attgctcagatcatc

SEQ ID NO: 1032382 - DNA, 15 bp, Homo sapiens
ttgctcagatcatca

SEQ ID NO: 1032383 - DNA, 15 bp, Homo sapiens
tgctcagatcatcaa

SEQ ID NO: 1032384 - DNA, 15 bp, Homo sapiens
gctcagatcatcaag

SEQ ID NO: 1032385 - DNA, 15 bp, Homo sapiens
ctcagatcatcaagt

SEQ ID NO: 1032386 - DNA, 15 bp, Homo sapiens
tcagatcatcaagtt

SEQ ID NO: 1032387 - DNA, 15 bp, Homo sapiens
cagatcatcaagtta

SEQ ID NO: 1032388 - DNA, 15 bp, Homo sapiens
agatcatcaagttag

SEQ ID NO: 1032389 - DNA, 15 bp, Homo sapiens
gatcatcaagttagc

SEQ ID NO: 1032390 - DNA, 15 bp, Homo sapiens
atcatcaagttagcc

SEQ ID NO: 1032391 - DNA, 15 bp, Homo sapiens
tcatcaagttagcct

SEQ ID NO: 1032392 - DNA, 15 bp, Homo sapiens
catcaagttagcctt

SEQ ID NO: 1032393 - DNA, 15 bp, Homo sapiens
atcaagttagccttc

SEQ ID NO: 1032394 - DNA, 15 bp, Homo sapiens
tcaagttagccttct

SEQ ID NO: 1032395 - DNA, 15 bp, Homo sapiens
caagttagccttctc

SEQ ID NO: 1032396 - DNA, 15 bp, Homo sapiens
aagttagccttctcc

SEQ ID NO: 1032397 - DNA, 15 bp, Homo sapiens
agttagccttctcca

SEQ ID NO: 1032398 - DNA, 15 bp, Homo sapiens
gttagccttctccat

SEQ ID NO: 1032399 - DNA, 15 bp, Homo sapiens
ttagccttctccata

SEQ ID NO: 1032400 - DNA, 15 bp, Homo sapiens
tagccttctccatat

SEQ ID NO: 1032401 - DNA, 15 bp, Homo sapiens
agccttctccatatc

SEQ ID NO: 1032402 - DNA, 15 bp, Homo sapiens
gccttctccatatct

SEQ ID NO: 1032403 - DNA, 15 bp, Homo sapiens
ccttctccatatctc

SEQ ID NO: 1032404 - DNA, 15 bp, Homo sapiens
cttctccatatctct

SEQ ID NO: 1032405 - DNA, 15 bp, Homo sapiens
ttctccatatctcta

SEQ ID NO: 1032406 - DNA, 15 bp, Homo sapiens
tctccatatctctaa

SEQ ID NO: 1032407 - DNA, 15 bp, Homo sapiens
ctccatatctctaac

SEQ ID NO: 1032408 - DNA, 15 bp, Homo sapiens
tccatatctctaaca

SEQ ID NO: 1032409 - DNA, 15 bp, Homo sapiens
ccatatctctaacag

SEQ ID NO: 1032410 - DNA, 15 bp, Homo sapiens
catatctctaacagg

SEQ ID NO: 1032411 - DNA, 15 bp, Homo sapiens
atatctctaacaggc

SEQ ID NO: 1032412 - DNA, 15 bp, Homo sapiens
tatctctaacaggct

SEQ ID NO: 1032413 - DNA, 15 bp, Homo sapiens
atctctaacaggctg

SEQ ID NO: 1032414 - DNA, 15 bp, Homo sapiens
tctctaacaggctgt

SEQ ID NO: 1032415 - DNA, 15 bp, Homo sapiens
ctctaacaggctgtt

SEQ ID NO: 1032416 - DNA, 15 bp, Homo sapiens
tctaacaggctgttt

SEQ ID NO: 1032417 - DNA, 15 bp, Homo sapiens
ctaacaggctgtttc

SEQ ID NO: 1032418 - DNA, 15 bp, Homo sapiens
taacaggctgtttct

SEQ ID NO: 1032419 - DNA, 15 bp, Homo sapiens
aacaggctgtttcta

SEQ ID NO: 1032420 - DNA, 15 bp, Homo sapiens
acaggctgtttctaa

SEQ ID NO: 1032421 - DNA, 15 bp, Homo sapiens
caggctgtttctaac

SEQ ID NO: 1032422 - DNA, 15 bp, Homo sapiens
aggctgtttctaact

SEQ ID NO: 1032423 - DNA, 15 bp, Homo sapiens
ggctgtttctaacta

SEQ ID NO: 1032424 - DNA, 15 bp, Homo sapiens
gctgtttctaactaa

SEQ ID NO: 1032425 - DNA, 15 bp, Homo sapiens
ctgtttctaactaaa

SEQ ID NO: 1032426 - DNA, 15 bp, Homo sapiens
tgtttctaactaaat

SEQ ID NO: 1032427 - DNA, 15 bp, Homo sapiens
gtttctaactaaatg

SEQ ID NO: 1032428 - DNA, 15 bp, Homo sapiens
tttctaactaaatgg

SEQ ID NO: 1032429 - DNA, 15 bp, Homo sapiens
ttctaactaaatggt

SEQ ID NO: 1032430 - DNA, 15 bp, Homo sapiens
tctaactaaatggtt

SEQ ID NO: 1032431 - DNA, 15 bp, Homo sapiens
ctaactaaatggttg

SEQ ID NO: 1032432 - DNA, 15 bp, Homo sapiens
taactaaatggttgg

SEQ ID NO: 1032433 - DNA, 15 bp, Homo sapiens
aactaaatggttgga

SEQ ID NO: 1032434 - DNA, 15 bp, Homo sapiens
actaaatggttggag

SEQ ID NO: 1032435 - DNA, 15 bp, Homo sapiens
ctaaatggttggaga

SEQ ID NO: 1032436 - DNA, 15 bp, Homo sapiens
taaatggttggagat

SEQ ID NO: 1032437 - DNA, 15 bp, Homo sapiens
aaatggttggagatc

SEQ ID NO: 1032438 - DNA, 15 bp, Homo sapiens
aatggttggagatct

SEQ ID NO: 1032439 - DNA, 15 bp, Homo sapiens
atggttggagatctg

SEQ ID NO: 1032440 - DNA, 15 bp, Homo sapiens
tggttggagatctgg

SEQ ID NO: 1032441 - DNA, 15 bp, Homo sapiens
ggttggagatctggc

SEQ ID NO: 1032442 - DNA, 15 bp, Homo sapiens
gttggagatctggcc

SEQ ID NO: 1032443 - DNA, 15 bp, Homo sapiens
ttggagatctggcca

SEQ ID NO: 1032444 - DNA, 15 bp, Homo sapiens
tggagatctggccag

SEQ ID NO: 1032445 - DNA, 15 bp, Homo sapiens
ggagatctggccagg

SEQ ID NO: 1032446 - DNA, 15 bp, Homo sapiens
gagatctggccaggt

SEQ ID NO: 1032447 - DNA, 15 bp, Homo sapiens
agatctggccaggtc

SEQ ID NO: 1032448 - DNA, 15 bp, Homo sapiens
gatctggccaggtca

SEQ ID NO: 1032449 - DNA, 15 bp, Homo sapiens
atctggccaggtcag

SEQ ID NO: 1032450 - DNA, 15 bp, Homo sapiens
tctggccaggtcagt

SEQ ID NO: 1032451 - DNA, 15 bp, Homo sapiens
ctggccaggtcagtc

SEQ ID NO: 1032452 - DNA, 15 bp, Homo sapiens
tggccaggtcagtcc

SEQ ID NO: 1032453 - DNA, 15 bp, Homo sapiens
ggccaggtcagtccc

SEQ ID NO: 1032454 - DNA, 15 bp, Homo sapiens
gccaggtcagtccct

SEQ ID NO: 1032455 - DNA, 15 bp, Homo sapiens
ccaggtcagtccctg

SEQ ID NO: 1032456 - DNA, 15 bp, Homo sapiens
caggtcagtccctgc

SEQ ID NO: 1032457 - DNA, 15 bp, Homo sapiens
aggtcagtccctgct

SEQ ID NO: 1032458 - DNA, 15 bp, Homo sapiens
ggtcagtccctgctt

SEQ ID NO: 1032459 - DNA, 15 bp, Homo sapiens
gtcagtccctgcttt

SEQ ID NO: 1032460 - DNA, 15 bp, Homo sapiens
tcagtccctgcttta

SEQ ID NO: 1032461 - DNA, 15 bp, Homo sapiens
cagtccctgctttaa

SEQ ID NO: 1032462 - DNA, 15 bp, Homo sapiens
agtccctgctttaaa

SEQ ID NO: 1032463 - DNA, 15 bp, Homo sapiens
gtccctgctttaaat

SEQ ID NO: 1032464 - DNA, 15 bp, Homo sapiens
tccctgctttaaatc

SEQ ID NO: 1032465 - DNA, 15 bp, Homo sapiens
ccctgctttaaatct

SEQ ID NO: 1032466 - DNA, 15 bp, Homo sapiens
cctgctttaaatctt

SEQ ID NO: 1032467 - DNA, 15 bp, Homo sapiens
ctgctttaaatcttg

SEQ ID NO: 1032468 - DNA, 15 bp, Homo sapiens
tgctttaaatcttga

SEQ ID NO: 1032469 - DNA, 15 bp, Homo sapiens
gctttaaatcttgac

SEQ ID NO: 1032470 - DNA, 15 bp, Homo sapiens
ctttaaatcttgact

SEQ ID NO: 1032471 - DNA, 15 bp, Homo sapiens
tttaaatcttgactt

SEQ ID NO: 1032472 - DNA, 15 bp, Homo sapiens
ttaaatcttgacttc

SEQ ID NO: 1032473 - DNA, 15 bp, Homo sapiens
taaatcttgacttct

SEQ ID NO: 1032474 - DNA, 15 bp, Homo sapiens
aaatcttgacttctg

SEQ ID NO: 1032475 - DNA, 15 bp, Homo sapiens
aatcttgacttctga

SEQ ID NO: 1032476 - DNA, 15 bp, Homo sapiens
atcttgacttctgat

SEQ ID NO: 1032477 - DNA, 15 bp, Homo sapiens
tcttgacttctgatc

SEQ ID NO: 1032478 - DNA, 15 bp, Homo sapiens
cttgacttctgatct

SEQ ID NO: 1032479 - DNA, 15 bp, Homo sapiens
ttgacttctgatctt

SEQ ID NO: 1032480 - DNA, 15 bp, Homo sapiens
tgacttctgatctta

SEQ ID NO: 1032481 - DNA, 15 bp, Homo sapiens
gacttctgatcttat

SEQ ID NO: 1032482 - DNA, 15 bp, Homo sapiens
acttctgatcttatg

SEQ ID NO: 1032483 - DNA, 15 bp, Homo sapiens
cttctgatcttatgg

SEQ ID NO: 1032484 - DNA, 15 bp, Homo sapiens
ttctgatcttatgga

SEQ ID NO: 1032485 - DNA, 15 bp, Homo sapiens
tctgatcttatggac

SEQ ID NO: 1032486 - DNA, 15 bp, Homo sapiens
ctgatcttatggaca

SEQ ID NO: 1032487 - DNA, 15 bp, Homo sapiens
tgatcttatggacac

SEQ ID NO: 1032488 - DNA, 15 bp, Homo sapiens
gatcttatggacacc

SEQ ID NO: 1032489 - DNA, 15 bp, Homo sapiens
atcttatggacaccc

SEQ ID NO: 1032490 - DNA, 15 bp, Homo sapiens
tcttatggacaccct

SEQ ID NO: 1032491 - DNA, 15 bp, Homo sapiens
cttatggacaccctg

SEQ ID NO: 1032492 - DNA, 15 bp, Homo sapiens
ttatggacaccctgc

SEQ ID NO: 1032493 - DNA, 15 bp, Homo sapiens
tatggacaccctgca

SEQ ID NO: 1032494 - DNA, 15 bp, Homo sapiens
atggacaccctgcaa

SEQ ID NO: 1032495 - DNA, 15 bp, Homo sapiens
tggacaccctgcaac

SEQ ID NO: 1032496 - DNA, 15 bp, Homo sapiens
ggacaccctgcaacc

SEQ ID NO: 1032497 - DNA, 15 bp, Homo sapiens
gacaccctgcaacct

SEQ ID NO: 1032498 - DNA, 15 bp, Homo sapiens
acaccctgcaacctc

SEQ ID NO: 1032499 - DNA, 15 bp, Homo sapiens
caccctgcaacctcg

SEQ ID NO: 1032500 - DNA, 15 bp, Homo sapiens
accctgcaacctcgt

SEQ ID NO: 1032501 - DNA, 15 bp, Homo sapiens
ccctgcaacctcgtg

SEQ ID NO: 1032502 - DNA, 15 bp, Homo sapiens
cctgcaacctcgtgc

SEQ ID NO: 1032503 - DNA, 15 bp, Homo sapiens
ctgcaacctcgtgcc

SEQ ID NO: 1032504 - DNA, 15 bp, Homo sapiens
tgcaacctcgtgcca

SEQ ID NO: 1032505 - DNA, 15 bp, Homo sapiens
gcaacctcgtgccag

SEQ ID NO: 1032506 - DNA, 15 bp, Homo sapiens
caacctcgtgccagc

SEQ ID NO: 1032507 - DNA, 15 bp, Homo sapiens
aacctcgtgccagcc

SEQ ID NO: 1032508 - DNA, 15 bp, Homo sapiens
acctcgtgccagccc

SEQ ID NO: 1032509 - DNA, 15 bp, Homo sapiens
cctcgtgccagcccc

SEQ ID NO: 1032510 - DNA, 15 bp, Homo sapiens
ctcgtgccagccccg

SEQ ID NO: 1032511 - DNA, 15 bp, Homo sapiens
tcgtgccagccccgt

SEQ ID NO: 1032512 - DNA, 15 bp, Homo sapiens
cgtgccagccccgtc

SEQ ID NO: 1032513 - DNA, 15 bp, Homo sapiens
gtgccagccccgtct

SEQ ID NO: 1032514 - DNA, 15 bp, Homo sapiens
tgccagccccgtctc

SEQ ID NO: 1032515 - DNA, 15 bp, Homo sapiens
gccagccccgtctct

SEQ ID NO: 1032516 - DNA, 15 bp, Homo sapiens
ccagccccgtctctt

SEQ ID NO: 1032517 - DNA, 15 bp, Homo sapiens
cagccccgtctcttt

SEQ ID NO: 1032518 - DNA, 15 bp, Homo sapiens
agccccgtctctttt

SEQ ID NO: 1032519 - DNA, 15 bp, Homo sapiens
gccccgtctcttttc

SEQ ID NO: 1032520 - DNA, 15 bp, Homo sapiens
ccccgtctcttttcg

SEQ ID NO: 1032521 - DNA, 15 bp, Homo sapiens
cccgtctcttttcga

SEQ ID NO: 1032522 - DNA, 15 bp, Homo sapiens
ccgtctcttttcgat

SEQ ID NO: 1032523 - DNA, 15 bp, Homo sapiens
cgtctcttttcgatc

SEQ ID NO: 1032524 - DNA, 15 bp, Homo sapiens
gtctcttttcgatct

SEQ ID NO: 1032525 - DNA, 15 bp, Homo sapiens
tctcttttcgatctt

SEQ ID NO: 1032526 - DNA, 15 bp, Homo sapiens
ctcttttcgatcttc

SEQ ID NO: 1032527 - DNA, 15 bp, Homo sapiens
tcttttcgatcttcc

SEQ ID NO: 1032528 - DNA, 15 bp, Homo sapiens
cttttcgatcttcca

SEQ ID NO: 1032529 - DNA, 15 bp, Homo sapiens
ttttcgatcttccaa

SEQ ID NO: 1032530 - DNA, 15 bp, Homo sapiens
tttcgatcttccaat

SEQ ID NO: 1032531 - DNA, 15 bp, Homo sapiens
ttcgatcttccaata

SEQ ID NO: 1032532 - DNA, 15 bp, Homo sapiens
tcgatcttccaataa

SEQ ID NO: 1032533 - DNA, 15 bp, Homo sapiens
cgatcttccaataat

SEQ ID NO: 1032534 - DNA, 15 bp, Homo sapiens
gatcttccaataata

SEQ ID NO: 1032535 - DNA, 15 bp, Homo sapiens
atcttccaataataa

SEQ ID NO: 1032536 - DNA, 15 bp, Homo sapiens
tcttccaataataat

SEQ ID NO: 1032537 - DNA, 15 bp, Homo sapiens
cttccaataataatt

SEQ ID NO: 1032538 - DNA, 15 bp, Homo sapiens
ttccaataataattt

SEQ ID NO: 1032539 - DNA, 15 bp, Homo sapiens
tccaataataattta

SEQ ID NO: 1032540 - DNA, 15 bp, Homo sapiens
ccaataataatttac

SEQ ID NO: 1032541 - DNA, 15 bp, Homo sapiens
caataataatttacg

SEQ ID NO: 1032542 - DNA, 15 bp, Homo sapiens
aataataatttacgt

SEQ ID NO: 1032543 - DNA, 15 bp, Homo sapiens
ataataatttacgta

SEQ ID NO: 1032544 - DNA, 15 bp, Homo sapiens
taataatttacgtac

SEQ ID NO: 1032545 - DNA, 15 bp, Homo sapiens
aataatttacgtaca

SEQ ID NO: 1032546 - DNA, 15 bp, Homo sapiens
ataatttacgtacag

SEQ ID NO: 1032547 - DNA, 15 bp, Homo sapiens
taatttacgtacagt

SEQ ID NO: 1032548 - DNA, 15 bp, Homo sapiens
aatttacgtacagtc

SEQ ID NO: 1032549 - DNA, 15 bp, Homo sapiens
atttacgtacagtcc

SEQ ID NO: 1032550 - DNA, 15 bp, Homo sapiens
tttacgtacagtccc

SEQ ID NO: 1032551 - DNA, 15 bp, Homo sapiens
ttacgtacagtccct

SEQ ID NO: 1032552 - DNA, 15 bp, Homo sapiens
tacgtacagtccctg

SEQ ID NO: 1032553 - DNA, 15 bp, Homo sapiens
acgtacagtccctga

SEQ ID NO: 1032554 - DNA, 15 bp, Homo sapiens
cgtacagtccctgac

SEQ ID NO: 1032555 - DNA, 15 bp, Homo sapiens
gtacagtccctgact

SEQ ID NO: 1032556 - DNA, 15 bp, Homo sapiens
tacagtccctgacta

SEQ ID NO: 1032557 - DNA, 15 bp, Homo sapiens
acagtccctgactag

SEQ ID NO: 1032558 - DNA, 15 bp, Homo sapiens
cagtccctgactagt

SEQ ID NO: 1032559 - DNA, 15 bp, Homo sapiens
agtccctgactagtg

SEQ ID NO: 1032560 - DNA, 15 bp, Homo sapiens
gtccctgactagtgt

SEQ ID NO: 1032561 - DNA, 15 bp, Homo sapiens
tccctgactagtgtt

SEQ ID NO: 1032562 - DNA, 15 bp, Homo sapiens
ccctgactagtgtta

SEQ ID NO: 1032563 - DNA, 15 bp, Homo sapiens
cctgactagtgttag

SEQ ID NO: 1032564 - DNA, 15 bp, Homo sapiens
ctgactagtgttagt

SEQ ID NO: 1032565 - DNA, 15 bp, Homo sapiens
tgactagtgttagtt

SEQ ID NO: 1032566 - DNA, 15 bp, Homo sapiens
gactagtgttagttc

SEQ ID NO: 1032567 - DNA, 15 bp, Homo sapiens
actagtgttagttct

SEQ ID NO: 1032568 - DNA, 15 bp, Homo sapiens
ctagtgttagttctc

SEQ ID NO: 1032569 - DNA, 15 bp, Homo sapiens
tagtgttagttctca

SEQ ID NO: 1032570 - DNA, 15 bp, Homo sapiens
agtgttagttctcac

SEQ ID NO: 1032571 - DNA, 15 bp, Homo sapiens
gtgttagttctcacg

SEQ ID NO: 1032572 - DNA, 15 bp, Homo sapiens
tgttagttctcacgt

SEQ ID NO: 1032573 - DNA, 15 bp, Homo sapiens
gttagttctcacgtg

SEQ ID NO: 1032574 - DNA, 15 bp, Homo sapiens
ttagttctcacgtgt

SEQ ID NO: 1032575 - DNA, 15 bp, Homo sapiens
tagttctcacgtgtc

SEQ ID NO: 1032576 - DNA, 15 bp, Homo sapiens
agttctcacgtgtct

SEQ ID NO: 1032577 - DNA, 15 bp, Homo sapiens
gttctcacgtgtctt

SEQ ID NO: 1032578 - DNA, 15 bp, Homo sapiens
ttctcacgtgtctta

SEQ ID NO: 1032579 - DNA, 15 bp, Homo sapiens
tctcacgtgtcttaa

SEQ ID NO: 1032580 - DNA, 15 bp, Homo sapiens
ctcacgtgtcttaat

SEQ ID NO: 1032581 - DNA, 15 bp, Homo sapiens
tcacgtgtcttaata

SEQ ID NO: 1032582 - DNA, 15 bp, Homo sapiens
cacgtgtcttaatat

SEQ ID NO: 1032583 - DNA, 15 bp, Homo sapiens
acgtgtcttaatatt

SEQ ID NO: 1032584 - DNA, 15 bp, Homo sapiens
cgtgtcttaatattt

SEQ ID NO: 1032585 - DNA, 15 bp, Homo sapiens
gtgtcttaatatttc

SEQ ID NO: 1032586 - DNA, 15 bp, Homo sapiens
tgtcttaatatttca

SEQ ID NO: 1032587 - DNA, 15 bp, Homo sapiens
gtcttaatatttcag

SEQ ID NO: 1032588 - DNA, 15 bp, Homo sapiens
tcttaatatttcagt

SEQ ID NO: 1032589 - DNA, 15 bp, Homo sapiens
cttaatatttcagta

SEQ ID NO: 1032590 - DNA, 15 bp, Homo sapiens
ttaatatttcagtac

SEQ ID NO: 1032591 - DNA, 15 bp, Homo sapiens
taatatttcagtact

SEQ ID NO: 1032592 - DNA, 15 bp, Homo sapiens
aatatttcagtactc

SEQ ID NO: 1032593 - DNA, 15 bp, Homo sapiens
atatttcagtactca

SEQ ID NO: 1032594 - DNA, 15 bp, Homo sapiens
tatttcagtactcac

SEQ ID NO: 1032595 - DNA, 15 bp, Homo sapiens
atttcagtactcact

SEQ ID NO: 1032596 - DNA, 15 bp, Homo sapiens
tttcagtactcacta

SEQ ID NO: 1032597 - DNA, 15 bp, Homo sapiens
ttcagtactcactaa

SEQ ID NO: 1032598 - DNA, 15 bp, Homo sapiens
tcagtactcactaaa

SEQ ID NO: 1032599 - DNA, 15 bp, Homo sapiens
cagtactcactaaat

SEQ ID NO: 1032600 - DNA, 15 bp, Homo sapiens
agtactcactaaatc

SEQ ID NO: 1032601 - DNA, 15 bp, Homo sapiens
gtactcactaaatct

SEQ ID NO: 1032602 - DNA, 15 bp, Homo sapiens
tactcactaaatctt

SEQ ID NO: 1032603 - DNA, 15 bp, Homo sapiens
actcactaaatcttc

SEQ ID NO: 1032604 - DNA, 15 bp, Homo sapiens
ctcactaaatcttca

SEQ ID NO: 1032605 - DNA, 15 bp, Homo sapiens
tcactaaatcttcac

SEQ ID NO: 1032606 - DNA, 15 bp, Homo sapiens
cactaaatcttcact

SEQ ID NO: 1032607 - DNA, 15 bp, Homo sapiens
actaaatcttcactt

SEQ ID NO: 1032608 - DNA, 15 bp, Homo sapiens
ctaaatcttcacttt

SEQ ID NO: 1032609 - DNA, 15 bp, Homo sapiens
taaatcttcactttc

SEQ ID NO: 1032610 - DNA, 15 bp, Homo sapiens
aaatcttcactttca

SEQ ID NO: 1032611 - DNA, 15 bp, Homo sapiens
aatcttcactttcag

SEQ ID NO: 1032612 - DNA, 15 bp, Homo sapiens
atcttcactttcagg

SEQ ID NO: 1032613 - DNA, 15 bp, Homo sapiens
tcttcactttcagga

SEQ ID NO: 1032614 - DNA, 15 bp, Homo sapiens
cttcactttcaggaa

SEQ ID NO: 1032615 - DNA, 15 bp, Homo sapiens
ttcactttcaggaag

SEQ ID NO: 1032616 - DNA, 15 bp, Homo sapiens
tcactttcaggaaga

SEQ ID NO: 1032617 - DNA, 15 bp, Homo sapiens
cactttcaggaagat

SEQ ID NO: 1032618 - DNA, 15 bp, Homo sapiens
actttcaggaagatg

SEQ ID NO: 1032619 - DNA, 15 bp, Homo sapiens
ctttcaggaagatgt

SEQ ID NO: 1032620 - DNA, 15 bp, Homo sapiens
tttcaggaagatgta

SEQ ID NO: 1032621 - DNA, 15 bp, Homo sapiens
ttcaggaagatgtaa

SEQ ID NO: 1032622 - DNA, 15 bp, Homo sapiens
tcaggaagatgtaac

SEQ ID NO: 1032623 - DNA, 15 bp, Homo sapiens
caggaagatgtaaca

SEQ ID NO: 1032624 - DNA, 15 bp, Homo sapiens
aggaagatgtaacag

SEQ ID NO: 1032625 - DNA, 15 bp, Homo sapiens
ggaagatgtaacagg

SEQ ID NO: 1032626 - DNA, 15 bp, Homo sapiens
gaagatgtaacaggg

SEQ ID NO: 1032627 - DNA, 15 bp, Homo sapiens
aagatgtaacagggt

SEQ ID NO: 1032628 - DNA, 15 bp, Homo sapiens
agatgtaacagggtg

SEQ ID NO: 1032629 - DNA, 15 bp, Homo sapiens
gatgtaacagggtgg

SEQ ID NO: 1032630 - DNA, 15 bp, Homo sapiens
atgtaacagggtggg

SEQ ID NO: 1032631 - DNA, 15 bp, Homo sapiens
tgtaacagggtgggc

SEQ ID NO: 1032632 - DNA, 15 bp, Homo sapiens
gtaacagggtgggcg

SEQ ID NO: 1032633 - DNA, 15 bp, Homo sapiens
taacagggtgggcgg

SEQ ID NO: 1032634 - DNA, 15 bp, Homo sapiens
aacagggtgggcggt

SEQ ID NO: 1032635 - DNA, 15 bp, Homo sapiens
acagggtgggcggtg

SEQ ID NO: 1032636 - DNA, 15 bp, Homo sapiens
cagggtgggcggtgg

SEQ ID NO: 1032637 - DNA, 15 bp, Homo sapiens
agggtgggcggtggc

SEQ ID NO: 1032638 - DNA, 15 bp, Homo sapiens
gggtgggcggtggca

SEQ ID NO: 1032639 - DNA, 15 bp, Homo sapiens
ggtgggcggtggcag

SEQ ID NO: 1032640 - DNA, 15 bp, Homo sapiens
gtgggcggtggcagt

SEQ ID NO: 1032641 - DNA, 15 bp, Homo sapiens
tgggcggtggcagtg

SEQ ID NO: 1032642 - DNA, 15 bp, Homo sapiens
gggcggtggcagtgc

SEQ ID NO: 1032643 - DNA, 15 bp, Homo sapiens
ggcggtggcagtgcc

SEQ ID NO: 1032644 - DNA, 15 bp, Homo sapiens
gcggtggcagtgccg

SEQ ID NO: 1032645 - DNA, 15 bp, Homo sapiens
cggtggcagtgccgt

SEQ ID NO: 1032646 - DNA, 15 bp, Homo sapiens
ggtggcagtgccgtg

SEQ ID NO: 1032647 - DNA, 15 bp, Homo sapiens
gtggcagtgccgtgt

SEQ ID NO: 1032648 - DNA, 15 bp, Homo sapiens
tggcagtgccgtgtt

SEQ ID NO: 1032649 - DNA, 15 bp, Homo sapiens
ggcagtgccgtgtta

SEQ ID NO: 1032650 - DNA, 15 bp, Homo sapiens
gcagtgccgtgttat

SEQ ID NO: 1032651 - DNA, 15 bp, Homo sapiens
cagtgccgtgttatg

SEQ ID NO: 1032652 - DNA, 15 bp, Homo sapiens
agtgccgtgttatgt

SEQ ID NO: 1032653 - DNA, 15 bp, Homo sapiens
gtgccgtgttatgtc

SEQ ID NO: 1032654 - DNA, 15 bp, Homo sapiens
tgccgtgttatgtca

SEQ ID NO: 1032655 - DNA, 15 bp, Homo sapiens
gccgtgttatgtcaa

SEQ ID NO: 1032656 - DNA, 15 bp, Homo sapiens
ccgtgttatgtcaag

SEQ ID NO: 1032657 - DNA, 15 bp, Homo sapiens
cgtgttatgtcaagg

SEQ ID NO: 1032658 - DNA, 15 bp, Homo sapiens
gtgttatgtcaaggt

SEQ ID NO: 1032659 - DNA, 15 bp, Homo sapiens
tgttatgtcaaggtg

SEQ ID NO: 1032660 - DNA, 15 bp, Homo sapiens
gttatgtcaaggtga

SEQ ID NO: 1032661 - DNA, 15 bp, Homo sapiens
ttatgtcaaggtgac

SEQ ID NO: 1032662 - DNA, 15 bp, Homo sapiens
tatgtcaaggtgaca

SEQ ID NO: 1032663 - DNA, 15 bp, Homo sapiens
atgtcaaggtgacag

SEQ ID NO: 1032664 - DNA, 15 bp, Homo sapiens
tgtcaaggtgacagc

SEQ ID NO: 1032665 - DNA, 15 bp, Homo sapiens
gtcaaggtgacagcc

SEQ ID NO: 1032666 - DNA, 15 bp, Homo sapiens
tcaaggtgacagcct

SEQ ID NO: 1032667 - DNA, 15 bp, Homo sapiens
caaggtgacagcctt

SEQ ID NO: 1032668 - DNA, 15 bp, Homo sapiens
aaggtgacagcctta

SEQ ID NO: 1032669 - DNA, 15 bp, Homo sapiens
aggtgacagccttag

SEQ ID NO: 1032670 - DNA, 15 bp, Homo sapiens
ggtgacagccttagc

SEQ ID NO: 1032671 - DNA, 15 bp, Homo sapiens
gtgacagccttagca

SEQ ID NO: 1032672 - DNA, 15 bp, Homo sapiens
tgacagccttagcac

SEQ ID NO: 1032673 - DNA, 15 bp, Homo sapiens
gacagccttagcacc

SEQ ID NO: 1032674 - DNA, 15 bp, Homo sapiens
acagccttagcaccg

SEQ ID NO: 1032675 - DNA, 15 bp, Homo sapiens
cagccttagcaccga

SEQ ID NO: 1032676 - DNA, 15 bp, Homo sapiens
agccttagcaccgac

SEQ ID NO: 1032677 - DNA, 15 bp, Homo sapiens
gccttagcaccgacc

SEQ ID NO: 1032678 - DNA, 15 bp, Homo sapiens
ccttagcaccgacct

SEQ ID NO: 1032679 - DNA, 15 bp, Homo sapiens
cttagcaccgacctt

SEQ ID NO: 1032680 - DNA, 15 bp, Homo sapiens
ttagcaccgaccttc

SEQ ID NO: 1032681 - DNA, 15 bp, Homo sapiens
tagcaccgaccttca

SEQ ID NO: 1032682 - DNA, 15 bp, Homo sapiens
agcaccgaccttcac

SEQ ID NO: 1032683 - DNA, 15 bp, Homo sapiens
gcaccgaccttcact

SEQ ID NO: 1032684 - DNA, 15 bp, Homo sapiens
caccgaccttcacta

SEQ ID NO: 1032685 - DNA, 15 bp, Homo sapiens
accgaccttcactaa

SEQ ID NO: 1032686 - DNA, 15 bp, Homo sapiens
ccgaccttcactaac

SEQ ID NO: 1032687 - DNA, 15 bp, Homo sapiens
cgaccttcactaact

SEQ ID NO: 1032688 - DNA, 15 bp, Homo sapiens
gaccttcactaacta

SEQ ID NO: 1032689 - DNA, 15 bp, Homo sapiens
accttcactaactaa

SEQ ID NO: 1032690 - DNA, 15 bp, Homo sapiens
ccttcactaactaag

SEQ ID NO: 1032691 - DNA, 15 bp, Homo sapiens
cttcactaactaagg

SEQ ID NO: 1032692 - DNA, 15 bp, Homo sapiens
ttcactaactaaggg

SEQ ID NO: 1032693 - DNA, 15 bp, Homo sapiens
tcactaactaagggg

SEQ ID NO: 1032694 - DNA, 15 bp, Homo sapiens
cactaactaaggggc

SEQ ID NO: 1032695 - DNA, 15 bp, Homo sapiens
actaactaaggggcc

SEQ ID NO: 1032696 - DNA, 15 bp, Homo sapiens
ctaactaaggggcct

SEQ ID NO: 1032697 - DNA, 15 bp, Homo sapiens
taactaaggggcctc

SEQ ID NO: 1032698 - DNA, 15 bp, Homo sapiens
aactaaggggcctcg

SEQ ID NO: 1032699 - DNA, 15 bp, Homo sapiens
actaaggggcctcgg

SEQ ID NO: 1032700 - DNA, 15 bp, Homo sapiens
ctaaggggcctcggc

SEQ ID NO: 1032701 - DNA, 15 bp, Homo sapiens
taaggggcctcggcc

SEQ ID NO: 1032702 - DNA, 15 bp, Homo sapiens
aaggggcctcggcct

SEQ ID NO: 1032703 - DNA, 15 bp, Homo sapiens
aggggcctcggcctc

SEQ ID NO: 1032704 - DNA, 15 bp, Homo sapiens
ggggcctcggcctct

SEQ ID NO: 1032705 - DNA, 15 bp, Homo sapiens
gggcctcggcctctc

SEQ ID NO: 1032706 - DNA, 15 bp, Homo sapiens
ggcctcggcctctcc

SEQ ID NO: 1032707 - DNA, 15 bp, Homo sapiens
gcctcggcctctcca

SEQ ID NO: 1032708 - DNA, 15 bp, Homo sapiens
cctcggcctctccaa

SEQ ID NO: 1032709 - DNA, 15 bp, Homo sapiens
ctcggcctctccaat

SEQ ID NO: 1032710 - DNA, 15 bp, Homo sapiens
tcggcctctccaatc

SEQ ID NO: 1032711 - DNA, 15 bp, Homo sapiens
cggcctctccaatct

SEQ ID NO: 1032712 - DNA, 15 bp, Homo sapiens
ggcctctccaatctt

SEQ ID NO: 1032713 - DNA, 15 bp, Homo sapiens
gcctctccaatctta

SEQ ID NO: 1032714 - DNA, 15 bp, Homo sapiens
cctctccaatcttaa

SEQ ID NO: 1032715 - DNA, 15 bp, Homo sapiens
ctctccaatcttaaa

SEQ ID NO: 1032716 - DNA, 15 bp, Homo sapiens
tctccaatcttaaac

SEQ ID NO: 1032717 - DNA, 15 bp, Homo sapiens
ctccaatcttaaacc

SEQ ID NO: 1032718 - DNA, 15 bp, Homo sapiens
tccaatcttaaacct

SEQ ID NO: 1032719 - DNA, 15 bp, Homo sapiens
ccaatcttaaacctt

SEQ ID NO: 1032720 - DNA, 15 bp, Homo sapiens
caatcttaaaccttc

SEQ ID NO: 1032721 - DNA, 15 bp, Homo sapiens
aatcttaaaccttct

SEQ ID NO: 1032722 - DNA, 15 bp, Homo sapiens
atcttaaaccttctc

SEQ ID NO: 1032723 - DNA, 15 bp, Homo sapiens
tcttaaaccttctct

SEQ ID NO: 1032724 - DNA, 15 bp, Homo sapiens
cttaaaccttctctc

SEQ ID NO: 1032725 - DNA, 15 bp, Homo sapiens
ttaaaccttctctct

SEQ ID NO: 1032726 - DNA, 15 bp, Homo sapiens
taaaccttctctctc

SEQ ID NO: 1032727 - DNA, 15 bp, Homo sapiens
aaaccttctctctct

SEQ ID NO: 1032728 - DNA, 15 bp, Homo sapiens
aaccttctctctctg

SEQ ID NO: 1032729 - DNA, 15 bp, Homo sapiens
accttctctctctgt

SEQ ID NO: 1032730 - DNA, 15 bp, Homo sapiens
ccttctctctctgtg

SEQ ID NO: 1032731 - DNA, 15 bp, Homo sapiens
cttctctctctgtga

SEQ ID NO: 1032732 - DNA, 15 bp, Homo sapiens
ttctctctctgtgaa

SEQ ID NO: 1032733 - DNA, 15 bp, Homo sapiens
tctctctctgtgaag

SEQ ID NO: 1032734 - DNA, 15 bp, Homo sapiens
ctctctctgtgaagt

SEQ ID NO: 1032735 - DNA, 15 bp, Homo sapiens
tctctctgtgaagtg

SEQ ID NO: 1032736 - DNA, 15 bp, Homo sapiens
ctctctgtgaagtgg

SEQ ID NO: 1032737 - DNA, 15 bp, Homo sapiens
tctctgtgaagtggg

SEQ ID NO: 1032738 - DNA, 15 bp, Homo sapiens
ctctgtgaagtgggg

SEQ ID NO: 1032739 - DNA, 15 bp, Homo sapiens
tctgtgaagtgggga

SEQ ID NO: 1032740 - DNA, 15 bp, Homo sapiens
ctgtgaagtggggac

SEQ ID NO: 1032741 - DNA, 15 bp, Homo sapiens
tgtgaagtggggact

SEQ ID NO: 1032742 - DNA, 15 bp, Homo sapiens
gtgaagtggggactc

SEQ ID NO: 1032743 - DNA, 15 bp, Homo sapiens
tgaagtggggactcc

SEQ ID NO: 1032744 - DNA, 15 bp, Homo sapiens
gaagtggggactcca

SEQ ID NO: 1032745 - DNA, 15 bp, Homo sapiens
aagtggggactccat

SEQ ID NO: 1032746 - DNA, 15 bp, Homo sapiens
agtggggactccatc

SEQ ID NO: 1032747 - DNA, 15 bp, Homo sapiens
gtggggactccatcc

SEQ ID NO: 1032748 - DNA, 15 bp, Homo sapiens
tggggactccatcct

SEQ ID NO: 1032749 - DNA, 15 bp, Homo sapiens
ggggactccatcctg

SEQ ID NO: 1032750 - DNA, 15 bp, Homo sapiens
gggactccatcctga

SEQ ID NO: 1032751 - DNA, 15 bp, Homo sapiens
ggactccatcctgac

SEQ ID NO: 1032752 - DNA, 15 bp, Homo sapiens
gactccatcctgacc

SEQ ID NO: 1032753 - DNA, 15 bp, Homo sapiens
actccatcctgacca

SEQ ID NO: 1032754 - DNA, 15 bp, Homo sapiens
ctccatcctgaccac

SEQ ID NO: 1032755 - DNA, 15 bp, Homo sapiens
tccatcctgaccaca

SEQ ID NO: 1032756 - DNA, 15 bp, Homo sapiens
ccatcctgaccacaa

SEQ ID NO: 1032757 - DNA, 15 bp, Homo sapiens
catcctgaccacaac

SEQ ID NO: 1032758 - DNA, 15 bp, Homo sapiens
atcctgaccacaact

SEQ ID NO: 1032759 - DNA, 15 bp, Homo sapiens
tcctgaccacaactt

SEQ ID NO: 1032760 - DNA, 15 bp, Homo sapiens
cctgaccacaacttg

SEQ ID NO: 1032761 - DNA, 15 bp, Homo sapiens
ctgaccacaacttgt

SEQ ID NO: 1032762 - DNA, 15 bp, Homo sapiens
tgaccacaacttgtc

SEQ ID NO: 1032763 - DNA, 15 bp, Homo sapiens
gaccacaacttgtct

SEQ ID NO: 1032764 - DNA, 15 bp, Homo sapiens
accacaacttgtctc

SEQ ID NO: 1032765 - DNA, 15 bp, Homo sapiens
ccacaacttgtctcc

SEQ ID NO: 1032766 - DNA, 15 bp, Homo sapiens
cacaacttgtctcca

SEQ ID NO: 1032767 - DNA, 15 bp, Homo sapiens
acaacttgtctccag

SEQ ID NO: 1032768 - DNA, 15 bp, Homo sapiens
caacttgtctccaga

SEQ ID NO: 1032769 - DNA, 15 bp, Homo sapiens
aacttgtctccagat

SEQ ID NO: 1032770 - DNA, 15 bp, Homo sapiens
acttgtctccagata

SEQ ID NO: 1032771 - DNA, 15 bp, Homo sapiens
cttgtctccagataa

SEQ ID NO: 1032772 - DNA, 15 bp, Homo sapiens
ttgtctccagataag

SEQ ID NO: 1032773 - DNA, 15 bp, Homo sapiens
tgtctccagataaga

SEQ ID NO: 1032774 - DNA, 15 bp, Homo sapiens
gtctccagataagaa

SEQ ID NO: 1032775 - DNA, 15 bp, Homo sapiens
tctccagataagaag

SEQ ID NO: 1032776 - DNA, 15 bp, Homo sapiens
ctccagataagaagt

SEQ ID NO: 1032777 - DNA, 15 bp, Homo sapiens
tccagataagaagta

SEQ ID NO: 1032778 - DNA, 15 bp, Homo sapiens
ccagataagaagtag

SEQ ID NO: 1032779 - DNA, 15 bp, Homo sapiens
cagataagaagtagg

SEQ ID NO: 1032780 - DNA, 15 bp, Homo sapiens
agataagaagtaggt

SEQ ID NO: 1032781 - DNA, 15 bp, Homo sapiens
gataagaagtaggtg

SEQ ID NO: 1032782 - DNA, 15 bp, Homo sapiens
ataagaagtaggtgg

SEQ ID NO: 1032783 - DNA, 15 bp, Homo sapiens
taagaagtaggtggg

SEQ ID NO: 1032784 - DNA, 15 bp, Homo sapiens
aagaagtaggtggga

SEQ ID NO: 1032785 - DNA, 15 bp, Homo sapiens
agaagtaggtgggaa

SEQ ID NO: 1032786 - DNA, 15 bp, Homo sapiens
gaagtaggtgggaag

SEQ ID NO: 1032787 - DNA, 15 bp, Homo sapiens
aagtaggtgggaagc

SEQ ID NO: 1032788 - DNA, 15 bp, Homo sapiens
agtaggtgggaagca

SEQ ID NO: 1032789 - DNA, 15 bp, Homo sapiens
gtaggtgggaagcag

SEQ ID NO: 1032790 - DNA, 15 bp, Homo sapiens
taggtgggaagcagg

SEQ ID NO: 1032791 - DNA, 15 bp, Homo sapiens
aggtgggaagcaggg

SEQ ID NO: 1032792 - DNA, 15 bp, Homo sapiens
ggtgggaagcagggt

SEQ ID NO: 1032793 - DNA, 15 bp, Homo sapiens
gtgggaagcagggtt

SEQ ID NO: 1032794 - DNA, 15 bp, Homo sapiens
tgggaagcagggttt

SEQ ID NO: 1032795 - DNA, 15 bp, Homo sapiens
gggaagcagggtttg

SEQ ID NO: 1032796 - DNA, 15 bp, Homo sapiens
ggaagcagggtttgg

SEQ ID NO: 1032797 - DNA, 15 bp, Homo sapiens
gaagcagggtttgga

SEQ ID NO: 1032798 - DNA, 15 bp, Homo sapiens
aagcagggtttggaa

SEQ ID NO: 1032799 - DNA, 15 bp, Homo sapiens
agcagggtttggaaa

SEQ ID NO: 1032800 - DNA, 15 bp, Homo sapiens
gcagggtttggaaat

SEQ ID NO: 1032801 - DNA, 15 bp, Homo sapiens
cagggtttggaaatc

SEQ ID NO: 1032802 - DNA, 15 bp, Homo sapiens
agggtttggaaatcg

SEQ ID NO: 1032803 - DNA, 15 bp, Homo sapiens
gggtttggaaatcgg

SEQ ID NO: 1032804 - DNA, 15 bp, Homo sapiens
ggtttggaaatcggc

SEQ ID NO: 1032805 - DNA, 15 bp, Homo sapiens
gtttggaaatcggca

SEQ ID NO: 1032806 - DNA, 15 bp, Homo sapiens
tttggaaatcggcaa

SEQ ID NO: 1032807 - DNA, 15 bp, Homo sapiens
ttggaaatcggcaaa

SEQ ID NO: 1032808 - DNA, 15 bp, Homo sapiens
tggaaatcggcaaag

SEQ ID NO: 1032809 - DNA, 15 bp, Homo sapiens
ggaaatcggcaaagc

SEQ ID NO: 1032810 - DNA, 15 bp, Homo sapiens
gaaatcggcaaagct

SEQ ID NO: 1032811 - DNA, 15 bp, Homo sapiens
aaatcggcaaagctc

SEQ ID NO: 1032812 - DNA, 15 bp, Homo sapiens
aatcggcaaagctcc

SEQ ID NO: 1032813 - DNA, 15 bp, Homo sapiens
atcggcaaagctcct

SEQ ID NO: 1032814 - DNA, 15 bp, Homo sapiens
tcggcaaagctcctc

SEQ ID NO: 1032815 - DNA, 15 bp, Homo sapiens
cggcaaagctcctcc

SEQ ID NO: 1032816 - DNA, 15 bp, Homo sapiens
ggcaaagctcctcca

SEQ ID NO: 1032817 - DNA, 15 bp, Homo sapiens
gcaaagctcctccat

SEQ ID NO: 1032818 - DNA, 15 bp, Homo sapiens
caaagctcctccatg

SEQ ID NO: 1032819 - DNA, 15 bp, Homo sapiens
aaagctcctccatga

SEQ ID NO: 1032820 - DNA, 15 bp, Homo sapiens
aagctcctccatgac

SEQ ID NO: 1032821 - DNA, 15 bp, Homo sapiens
agctcctccatgacc

SEQ ID NO: 1032822 - DNA, 15 bp, Homo sapiens
gctcctccatgaccc

SEQ ID NO: 1032823 - DNA, 15 bp, Homo sapiens
ctcctccatgaccct

SEQ ID NO: 1032824 - DNA, 15 bp, Homo sapiens
tcctccatgaccctg

SEQ ID NO: 1032825 - DNA, 15 bp, Homo sapiens
cctccatgaccctga

SEQ ID NO: 1032826 - DNA, 15 bp, Homo sapiens
ctccatgaccctgaa

SEQ ID NO: 1032827 - DNA, 15 bp, Homo sapiens
tccatgaccctgaaa

SEQ ID NO: 1032828 - DNA, 15 bp, Homo sapiens
ccatgaccctgaaaa

SEQ ID NO: 1032829 - DNA, 15 bp, Homo sapiens
catgaccctgaaaag

SEQ ID NO: 1032830 - DNA, 15 bp, Homo sapiens
atgaccctgaaaaga

SEQ ID NO: 1032831 - DNA, 15 bp, Homo sapiens
tgaccctgaaaagag

SEQ ID NO: 1032832 - DNA, 15 bp, Homo sapiens
gaccctgaaaagagt

SEQ ID NO: 1032833 - DNA, 15 bp, Homo sapiens
accctgaaaagagtt

SEQ ID NO: 1032834 - DNA, 15 bp, Homo sapiens
ccctgaaaagagttg

SEQ ID NO: 1032835 - DNA, 15 bp, Homo sapiens
cctgaaaagagttgg

SEQ ID NO: 1032836 - DNA, 15 bp, Homo sapiens
ctgaaaagagttggc

SEQ ID NO: 1032837 - DNA, 15 bp, Homo sapiens
tgaaaagagttggcc

SEQ ID NO: 1032838 - DNA, 15 bp, Homo sapiens
gaaaagagttggcct

SEQ ID NO: 1032839 - DNA, 15 bp, Homo sapiens
aaaagagttggcctt

SEQ ID NO: 1032840 - DNA, 15 bp, Homo sapiens
aaagagttggccttg

SEQ ID NO: 1032841 - DNA, 15 bp, Homo sapiens
aagagttggccttgg

SEQ ID NO: 1032842 - DNA, 15 bp, Homo sapiens
agagttggccttggt

SEQ ID NO: 1032843 - DNA, 15 bp, Homo sapiens
gagttggccttggta

SEQ ID NO: 1032844 - DNA, 15 bp, Homo sapiens
agttggccttggtac

SEQ ID NO: 1032845 - DNA, 15 bp, Homo sapiens
gttggccttggtaca

SEQ ID NO: 1032846 - DNA, 15 bp, Homo sapiens
ttggccttggtacag

SEQ ID NO: 1032847 - DNA, 15 bp, Homo sapiens
tggccttggtacagg

SEQ ID NO: 1032848 - DNA, 15 bp, Homo sapiens
ggccttggtacaggt

SEQ ID NO: 1032849 - DNA, 15 bp, Homo sapiens
gccttggtacaggtt

SEQ ID NO: 1032850 - DNA, 15 bp, Homo sapiens
ccttggtacaggttg

SEQ ID NO: 1032851 - DNA, 15 bp, Homo sapiens
cttggtacaggttgc

SEQ ID NO: 1032852 - DNA, 15 bp, Homo sapiens
ttggtacaggttgct

SEQ ID NO: 1032853 - DNA, 15 bp, Homo sapiens
tggtacaggttgctt

SEQ ID NO: 1032854 - DNA, 15 bp, Homo sapiens
ggtacaggttgcttg

SEQ ID NO: 1032855 - DNA, 15 bp, Homo sapiens
gtacaggttgcttgg

SEQ ID NO: 1032856 - DNA, 15 bp, Homo sapiens
tacaggttgcttggc

SEQ ID NO: 1032857 - DNA, 15 bp, Homo sapiens
acaggttgcttggcc

SEQ ID NO: 1032858 - DNA, 15 bp, Homo sapiens
caggttgcttggccc

SEQ ID NO: 1032859 - DNA, 15 bp, Homo sapiens
aggttgcttggccct

SEQ ID NO: 1032860 - DNA, 15 bp, Homo sapiens
ggttgcttggccctt

SEQ ID NO: 1032861 - DNA, 15 bp, Homo sapiens
gttgcttggcccttc

SEQ ID NO: 1032862 - DNA, 15 bp, Homo sapiens
ttgcttggcccttca

SEQ ID NO: 1032863 - DNA, 15 bp, Homo sapiens
tgcttggcccttcag

SEQ ID NO: 1032864 - DNA, 15 bp, Homo sapiens
gcttggcccttcaga

SEQ ID NO: 1032865 - DNA, 15 bp, Homo sapiens
cttggcccttcagaa

SEQ ID NO: 1032866 - DNA, 15 bp, Homo sapiens
ttggcccttcagaat

SEQ ID NO: 1032867 - DNA, 15 bp, Homo sapiens
tggcccttcagaata

SEQ ID NO: 1032868 - DNA, 15 bp, Homo sapiens
ggcccttcagaatat

SEQ ID NO: 1032869 - DNA, 15 bp, Homo sapiens
gcccttcagaatatg

SEQ ID NO: 1032870 - DNA, 15 bp, Homo sapiens
cccttcagaatatga

SEQ ID NO: 1032871 - DNA, 15 bp, Homo sapiens
ccttcagaatatgaa

SEQ ID NO: 1032872 - DNA, 15 bp, Homo sapiens
cttcagaatatgaag

SEQ ID NO: 1032873 - DNA, 15 bp, Homo sapiens
ttcagaatatgaagc

SEQ ID NO: 1032874 - DNA, 15 bp, Homo sapiens
tcagaatatgaagca

SEQ ID NO: 1032875 - DNA, 15 bp, Homo sapiens
cagaatatgaagcat

SEQ ID NO: 1032876 - DNA, 15 bp, Homo sapiens
agaatatgaagcatt

SEQ ID NO: 1032877 - DNA, 15 bp, Homo sapiens
gaatatgaagcattt

SEQ ID NO: 1032878 - DNA, 15 bp, Homo sapiens
aatatgaagcatttt

SEQ ID NO: 1032879 - DNA, 15 bp, Homo sapiens
atatgaagcattttg

SEQ ID NO: 1032880 - DNA, 15 bp, Homo sapiens
tatgaagcattttgt

SEQ ID NO: 1032881 - DNA, 15 bp, Homo sapiens
atgaagcattttgta

SEQ ID NO: 1032882 - DNA, 15 bp, Homo sapiens
tgaagcattttgtag

SEQ ID NO: 1032883 - DNA, 15 bp, Homo sapiens
gaagcattttgtaga

SEQ ID NO: 1032884 - DNA, 15 bp, Homo sapiens
aagcattttgtagat

SEQ ID NO: 1032885 - DNA, 15 bp, Homo sapiens
agcattttgtagatt

SEQ ID NO: 1032886 - DNA, 15 bp, Homo sapiens
gcattttgtagattt

SEQ ID NO: 1032887 - DNA, 15 bp, Homo sapiens
cattttgtagatttg

SEQ ID NO: 1032888 - DNA, 15 bp, Homo sapiens
attttgtagatttgt

SEQ ID NO: 1032889 - DNA, 15 bp, Homo sapiens
ttttgtagatttgtg

SEQ ID NO: 1032890 - DNA, 15 bp, Homo sapiens
tttgtagatttgtgg

SEQ ID NO: 1032891 - DNA, 15 bp, Homo sapiens
ttgtagatttgtggt

SEQ ID NO: 1032892 - DNA, 15 bp, Homo sapiens
tgtagatttgtggta

SEQ ID NO: 1032893 - DNA, 15 bp, Homo sapiens
gtagatttgtggtac

SEQ ID NO: 1032894 - DNA, 15 bp, Homo sapiens
tagatttgtggtaca

SEQ ID NO: 1032895 - DNA, 15 bp, Homo sapiens
agatttgtggtacac

SEQ ID NO: 1032896 - DNA, 15 bp, Homo sapiens
gatttgtggtacact

SEQ ID NO: 1032897 - DNA, 15 bp, Homo sapiens
atttgtggtacactt

SEQ ID NO: 1032898 - DNA, 15 bp, Homo sapiens
tttgtggtacacttg

SEQ ID NO: 1032899 - DNA, 15 bp, Homo sapiens
ttgtggtacacttgt

SEQ ID NO: 1032900 - DNA, 15 bp, Homo sapiens
tgtggtacacttgtg

SEQ ID NO: 1032901 - DNA, 15 bp, Homo sapiens
gtggtacacttgtgc

SEQ ID NO: 1032902 - DNA, 15 bp, Homo sapiens
tggtacacttgtgcc

SEQ ID NO: 1032903 - DNA, 15 bp, Homo sapiens
ggtacacttgtgcct

SEQ ID NO: 1032904 - DNA, 15 bp, Homo sapiens
gtacacttgtgcctc

SEQ ID NO: 1032905 - DNA, 15 bp, Homo sapiens
tacacttgtgcctca

SEQ ID NO: 1032906 - DNA, 15 bp, Homo sapiens
acacttgtgcctcaa

SEQ ID NO: 1032907 - DNA, 15 bp, Homo sapiens
cacttgtgcctcaaa

SEQ ID NO: 1032908 - DNA, 15 bp, Homo sapiens
acttgtgcctcaaat

SEQ ID NO: 1032909 - DNA, 15 bp, Homo sapiens
cttgtgcctcaaatg

SEQ ID NO: 1032910 - DNA, 15 bp, Homo sapiens
ttgtgcctcaaatgt

SEQ ID NO: 1032911 - DNA, 15 bp, Homo sapiens
tgtgcctcaaatgtc

SEQ ID NO: 1032912 - DNA, 15 bp, Homo sapiens
gtgcctcaaatgtct

SEQ ID NO: 1032913 - DNA, 15 bp, Homo sapiens
tgcctcaaatgtcta

SEQ ID NO: 1032914 - DNA, 15 bp, Homo sapiens
gcctcaaatgtctat

SEQ ID NO: 1032915 - DNA, 15 bp, Homo sapiens
cctcaaatgtctatt

SEQ ID NO: 1032916 - DNA, 15 bp, Homo sapiens
ctcaaatgtctattg

SEQ ID NO: 1032917 - DNA, 15 bp, Homo sapiens
tcaaatgtctattgg

SEQ ID NO: 1032918 - DNA, 15 bp, Homo sapiens
caaatgtctattggg

SEQ ID NO: 1032919 - DNA, 15 bp, Homo sapiens
aaatgtctattgggg

SEQ ID NO: 1032920 - DNA, 15 bp, Homo sapiens
aatgtctattggggc

SEQ ID NO: 1032921 - DNA, 15 bp, Homo sapiens
atgtctattggggcc

SEQ ID NO: 1032922 - DNA, 15 bp, Homo sapiens
tgtctattggggccc

SEQ ID NO: 1032923 - DNA, 15 bp, Homo sapiens
gtctattggggccca

SEQ ID NO: 1032924 - DNA, 15 bp, Homo sapiens
tctattggggcccac

SEQ ID NO: 1032925 - DNA, 15 bp, Homo sapiens
ctattggggcccact

SEQ ID NO: 1032926 - DNA, 15 bp, Homo sapiens
tattggggcccactc

SEQ ID NO: 1032927 - DNA, 15 bp, Homo sapiens
attggggcccactct

SEQ ID NO: 1032928 - DNA, 15 bp, Homo sapiens
ttggggcccactctt

SEQ ID NO: 1032929 - DNA, 15 bp, Homo sapiens
tggggcccactcttt

SEQ ID NO: 1032930 - DNA, 15 bp, Homo sapiens
ggggcccactctttc

SEQ ID NO: 1032931 - DNA, 15 bp, Homo sapiens
gggcccactctttca

SEQ ID NO: 1032932 - DNA, 15 bp, Homo sapiens
ggcccactctttcag

SEQ ID NO: 1032933 - DNA, 15 bp, Homo sapiens
gcccactctttcagg

SEQ ID NO: 1032934 - DNA, 15 bp, Homo sapiens
cccactctttcaggc

SEQ ID NO: 1032935 - DNA, 15 bp, Homo sapiens
ccactctttcaggcc

SEQ ID NO: 1032936 - DNA, 15 bp, Homo sapiens
cactctttcaggcca

SEQ ID NO: 1032937 - DNA, 15 bp, Homo sapiens
actctttcaggccat

SEQ ID NO: 1032938 - DNA, 15 bp, Homo sapiens
ctctttcaggccatg

SEQ ID NO: 1032939 - DNA, 15 bp, Homo sapiens
tctttcaggccatgg

SEQ ID NO: 1032940 - DNA, 15 bp, Homo sapiens
ctttcaggccatgga

SEQ ID NO: 1032941 - DNA, 15 bp, Homo sapiens
tttcaggccatggag

SEQ ID NO: 1032942 - DNA, 15 bp, Homo sapiens
ttcaggccatggagt

SEQ ID NO: 1032943 - DNA, 15 bp, Homo sapiens
tcaggccatggagtg

SEQ ID NO: 1032944 - DNA, 15 bp, Homo sapiens
caggccatggagtga

SEQ ID NO: 1032945 - DNA, 15 bp, Homo sapiens
aggccatggagtgag

SEQ ID NO: 1032946 - DNA, 15 bp, Homo sapiens
ggccatggagtgagc

SEQ ID NO: 1032947 - DNA, 15 bp, Homo sapiens
gccatggagtgagca

SEQ ID NO: 1032948 - DNA, 15 bp, Homo sapiens
ccatggagtgagcac

SEQ ID NO: 1032949 - DNA, 15 bp, Homo sapiens
catggagtgagcaca

SEQ ID NO: 1032950 - DNA, 15 bp, Homo sapiens
atggagtgagcacag

SEQ ID NO: 1032951 - DNA, 15 bp, Homo sapiens
tggagtgagcacaga

SEQ ID NO: 1032952 - DNA, 15 bp, Homo sapiens
ggagtgagcacagag

SEQ ID NO: 1032953 - DNA, 15 bp, Homo sapiens
gagtgagcacagagg

SEQ ID NO: 1032954 - DNA, 15 bp, Homo sapiens
agtgagcacagagga

SEQ ID NO: 1032955 - DNA, 15 bp, Homo sapiens
gtgagcacagaggac

SEQ ID NO: 1032956 - DNA, 15 bp, Homo sapiens
tgagcacagaggacc

SEQ ID NO: 1032957 - DNA, 15 bp, Homo sapiens
gagcacagaggacca

SEQ ID NO: 1032958 - DNA, 15 bp, Homo sapiens
agcacagaggaccag

SEQ ID NO: 1032959 - DNA, 15 bp, Homo sapiens
gcacagaggaccagc

SEQ ID NO: 1032960 - DNA, 15 bp, Homo sapiens
cacagaggaccagca

SEQ ID NO: 1032961 - DNA, 15 bp, Homo sapiens
acagaggaccagcat

SEQ ID NO: 1032962 - DNA, 15 bp, Homo sapiens
cagaggaccagcata

SEQ ID NO: 1032963 - DNA, 15 bp, Homo sapiens
agaggaccagcataa

SEQ ID NO: 1032964 - DNA, 15 bp, Homo sapiens
gaggaccagcataac

SEQ ID NO: 1032965 - DNA, 15 bp, Homo sapiens
aggaccagcataact

SEQ ID NO: 1032966 - DNA, 15 bp, Homo sapiens
ggaccagcataactc

SEQ ID NO: 1032967 - DNA, 15 bp, Homo sapiens
gaccagcataactca

SEQ ID NO: 1032968 - DNA, 15 bp, Homo sapiens
accagcataactcag

SEQ ID NO: 1032969 - DNA, 15 bp, Homo sapiens
ccagcataactcagc

SEQ ID NO: 1032970 - DNA, 15 bp, Homo sapiens
cagcataactcagcc

SEQ ID NO: 1032971 - DNA, 15 bp, Homo sapiens
agcataactcagccg

SEQ ID NO: 1032972 - DNA, 15 bp, Homo sapiens
gcataactcagccgc

SEQ ID NO: 1032973 - DNA, 15 bp, Homo sapiens
cataactcagccgcg

SEQ ID NO: 1032974 - DNA, 15 bp, Homo sapiens
ataactcagccgcgg

SEQ ID NO: 1032975 - DNA, 15 bp, Homo sapiens
taactcagccgcggc

SEQ ID NO: 1032976 - DNA, 15 bp, Homo sapiens
aactcagccgcggcc

SEQ ID NO: 1032977 - DNA, 15 bp, Homo sapiens
actcagccgcggcct

SEQ ID NO: 1032978 - DNA, 15 bp, Homo sapiens
ctcagccgcggcctc

SEQ ID NO: 1032979 - DNA, 15 bp, Homo sapiens
tcagccgcggcctct

SEQ ID NO: 1032980 - DNA, 15 bp, Homo sapiens
cagccgcggcctctg

SEQ ID NO: 1032981 - DNA, 15 bp, Homo sapiens
agccgcggcctctga

SEQ ID NO: 1032982 - DNA, 15 bp, Homo sapiens
gccgcggcctctgag

SEQ ID NO: 1032983 - DNA, 15 bp, Homo sapiens
ccgcggcctctgagg

SEQ ID NO: 1032984 - DNA, 15 bp, Homo sapiens
cgcggcctctgagga

SEQ ID NO: 1032985 - DNA, 15 bp, Homo sapiens
gcggcctctgaggac

SEQ ID NO: 1032986 - DNA, 15 bp, Homo sapiens
cggcctctgaggact

SEQ ID NO: 1032987 - DNA, 15 bp, Homo sapiens
ggcctctgaggactg

SEQ ID NO: 1032988 - DNA, 15 bp, Homo sapiens
gcctctgaggactga

SEQ ID NO: 1032989 - DNA, 15 bp, Homo sapiens
cctctgaggactgaa

SEQ ID NO: 1032990 - DNA, 15 bp, Homo sapiens
ctctgaggactgaaa

SEQ ID NO: 1032991 - DNA, 15 bp, Homo sapiens
tctgaggactgaaag

SEQ ID NO: 1032992 - DNA, 15 bp, Homo sapiens
ctgaggactgaaaga

SEQ ID NO: 1032993 - DNA, 15 bp, Homo sapiens
tgaggactgaaagat

SEQ ID NO: 1032994 - DNA, 15 bp, Homo sapiens
gaggactgaaagatg

SEQ ID NO: 1032995 - DNA, 15 bp, Homo sapiens
aggactgaaagatga

SEQ ID NO: 1032996 - DNA, 15 bp, Homo sapiens
ggactgaaagatgaa

SEQ ID NO: 1032997 - DNA, 15 bp, Homo sapiens
gactgaaagatgaac

SEQ ID NO: 1032998 - DNA, 15 bp, Homo sapiens
actgaaagatgaact

SEQ ID NO: 1032999 - DNA, 15 bp, Homo sapiens
ctgaaagatgaactt

SEQ ID NO: 1033000 - DNA, 15 bp, Homo sapiens
tgaaagatgaacttg

SEQ ID NO: 1033001 - DNA, 15 bp, Homo sapiens
gaaagatgaacttgc

SEQ ID NO: 1033002 - DNA, 15 bp, Homo sapiens
aaagatgaacttgct

SEQ ID NO: 1033003 - DNA, 15 bp, Homo sapiens
aagatgaacttgctg

SEQ ID NO: 1033004 - DNA, 15 bp, Homo sapiens
agatgaacttgctga

SEQ ID NO: 1033005 - DNA, 15 bp, Homo sapiens
gatgaacttgctgag

SEQ ID NO: 1033006 - DNA, 15 bp, Homo sapiens
atgaacttgctgagg

SEQ ID NO: 1033007 - DNA, 15 bp, Homo sapiens
tgaacttgctgaggt

SEQ ID NO: 1033008 - DNA, 15 bp, Homo sapiens
gaacttgctgaggtg

SEQ ID NO: 1033009 - DNA, 15 bp, Homo sapiens
aacttgctgaggtgg

SEQ ID NO: 1033010 - DNA, 15 bp, Homo sapiens
acttgctgaggtggg

SEQ ID NO: 1033011 - DNA, 15 bp, Homo sapiens
cttgctgaggtgggt

SEQ ID NO: 1033012 - DNA, 15 bp, Homo sapiens
ttgctgaggtgggtc

SEQ ID NO: 1033013 - DNA, 15 bp, Homo sapiens
tgctgaggtgggtcg

SEQ ID NO: 1033014 - DNA, 15 bp, Homo sapiens
gctgaggtgggtcgg

SEQ ID NO: 1033015 - DNA, 15 bp, Homo sapiens
ctgaggtgggtcggg

SEQ ID NO: 1033016 - DNA, 15 bp, Homo sapiens
tgaggtgggtcgggt

SEQ ID NO: 1033017 - DNA, 15 bp, Homo sapiens
gaggtgggtcgggtt

SEQ ID NO: 1033018 - DNA, 15 bp, Homo sapiens
aggtgggtcgggttg

SEQ ID NO: 1033019 - DNA, 15 bp, Homo sapiens
ggtgggtcgggttgc

SEQ ID NO: 1033020 - DNA, 15 bp, Homo sapiens
gtgggtcgggttgct

SEQ ID NO: 1033021 - DNA, 15 bp, Homo sapiens
tgggtcgggttgctg

SEQ ID NO: 1033022 - DNA, 15 bp, Homo sapiens
gggtcgggttgctgg

SEQ ID NO: 1033023 - DNA, 15 bp, Homo sapiens
ggtcgggttgctggc

SEQ ID NO: 1033024 - DNA, 15 bp, Homo sapiens
gtcgggttgctggca

SEQ ID NO: 1033025 - DNA, 15 bp, Homo sapiens
tcgggttgctggcat

SEQ ID NO: 1033026 - DNA, 15 bp, Homo sapiens
cgggttgctggcata

SEQ ID NO: 1033027 - DNA, 15 bp, Homo sapiens
gggttgctggcatac

SEQ ID NO: 1033028 - DNA, 15 bp, Homo sapiens
ggttgctggcatacc

SEQ ID NO: 1033029 - DNA, 15 bp, Homo sapiens
gttgctggcatacca

SEQ ID NO: 1033030 - DNA, 15 bp, Homo sapiens
ttgctggcataccac

SEQ ID NO: 1033031 - DNA, 15 bp, Homo sapiens
tgctggcataccacc

SEQ ID NO: 1033032 - DNA, 15 bp, Homo sapiens
gctggcataccacct

SEQ ID NO: 1033033 - DNA, 15 bp, Homo sapiens
ctggcataccaccta

SEQ ID NO: 1033034 - DNA, 15 bp, Homo sapiens
tggcataccacctac

SEQ ID NO: 1033035 - DNA, 15 bp, Homo sapiens
ggcataccacctacc

SEQ ID NO: 1033036 - DNA, 15 bp, Homo sapiens
gcataccacctaccc

SEQ ID NO: 1033037 - DNA, 15 bp, Homo sapiens
cataccacctaccca

SEQ ID NO: 1033038 - DNA, 15 bp, Homo sapiens
ataccacctacccac

SEQ ID NO: 1033039 - DNA, 15 bp, Homo sapiens
taccacctacccacc

SEQ ID NO: 1033040 - DNA, 15 bp, Homo sapiens
accacctacccaccg

SEQ ID NO: 1033041 - DNA, 15 bp, Homo sapiens
ccacctacccaccgt

SEQ ID NO: 1033042 - DNA, 15 bp, Homo sapiens
cacctacccaccgtt

SEQ ID NO: 1033043 - DNA, 15 bp, Homo sapiens
acctacccaccgttt

SEQ ID NO: 1033044 - DNA, 15 bp, Homo sapiens
cctacccaccgtttg

SEQ ID NO: 1033045 - DNA, 15 bp, Homo sapiens
ctacccaccgtttgt

SEQ ID NO: 1033046 - DNA, 15 bp, Homo sapiens
tacccaccgtttgtt

SEQ ID NO: 1033047 - DNA, 15 bp, Homo sapiens
acccaccgtttgttt

SEQ ID NO: 1033048 - DNA, 15 bp, Homo sapiens
cccaccgtttgtttt

SEQ ID NO: 1033049 - DNA, 15 bp, Homo sapiens
ccaccgtttgtttta

SEQ ID NO: 1033050 - DNA, 15 bp, Homo sapiens
caccgtttgttttag

SEQ ID NO: 1033051 - DNA, 15 bp, Homo sapiens
accgtttgttttaga

SEQ ID NO: 1033052 - DNA, 15 bp, Homo sapiens
ccgtttgttttagac

SEQ ID NO: 1033053 - DNA, 15 bp, Homo sapiens
cgtttgttttagaca

SEQ ID NO: 1033054 - DNA, 15 bp, Homo sapiens
gtttgttttagacag

SEQ ID NO: 1033055 - DNA, 15 bp, Homo sapiens
tttgttttagacaga

SEQ ID NO: 1033056 - DNA, 15 bp, Homo sapiens
ttgttttagacagaa

SEQ ID NO: 1033057 - DNA, 15 bp, Homo sapiens
tgttttagacagaaa

SEQ ID NO: 1033058 - DNA, 15 bp, Homo sapiens
gttttagacagaaaa

SEQ ID NO: 1033059 - DNA, 15 bp, Homo sapiens
ttttagacagaaaat

SEQ ID NO: 1033060 - DNA, 15 bp, Homo sapiens
tttagacagaaaatg

SEQ ID NO: 1033061 - DNA, 15 bp, Homo sapiens
ttagacagaaaatgg

SEQ ID NO: 1033062 - DNA, 15 bp, Homo sapiens
tagacagaaaatggg

SEQ ID NO: 1033063 - DNA, 15 bp, Homo sapiens
agacagaaaatgggg

SEQ ID NO: 1033064 - DNA, 15 bp, Homo sapiens
gacagaaaatggggc

SEQ ID NO: 1033065 - DNA, 15 bp, Homo sapiens
acagaaaatggggcg

SEQ ID NO: 1033066 - DNA, 15 bp, Homo sapiens
cagaaaatggggcgg

SEQ ID NO: 1033067 - DNA, 15 bp, Homo sapiens
agaaaatggggcgga

SEQ ID NO: 1033068 - DNA, 15 bp, Homo sapiens
gaaaatggggcggat

SEQ ID NO: 1033069 - DNA, 15 bp, Homo sapiens
aaaatggggcggatg

SEQ ID NO: 1033070 - DNA, 15 bp, Homo sapiens
aaatggggcggatga

SEQ ID NO: 1033071 - DNA, 15 bp, Homo sapiens
aatggggcggatgaa

SEQ ID NO: 1033072 - DNA, 15 bp, Homo sapiens
atggggcggatgaag

SEQ ID NO: 1033073 - DNA, 15 bp, Homo sapiens
tggggcggatgaaga

SEQ ID NO: 1033074 - DNA, 15 bp, Homo sapiens
ggggcggatgaagag

SEQ ID NO: 1033075 - DNA, 15 bp, Homo sapiens
gggcggatgaagaga

SEQ ID NO: 1033076 - DNA, 15 bp, Homo sapiens
ggcggatgaagagaa

SEQ ID NO: 1033077 - DNA, 15 bp, Homo sapiens
gcggatgaagagaag

SEQ ID NO: 1033078 - DNA, 15 bp, Homo sapiens
cggatgaagagaagc

SEQ ID NO: 1033079 - DNA, 15 bp, Homo sapiens
ggatgaagagaagct

SEQ ID NO: 1033080 - DNA, 15 bp, Homo sapiens
gatgaagagaagctg

SEQ ID NO: 1033081 - DNA, 15 bp, Homo sapiens
atgaagagaagctga

SEQ ID NO: 1033082 - DNA, 15 bp, Homo sapiens
tgaagagaagctgac

SEQ ID NO: 1033083 - DNA, 15 bp, Homo sapiens
gaagagaagctgact

SEQ ID NO: 1033084 - DNA, 15 bp, Homo sapiens
aagagaagctgactt

SEQ ID NO: 1033085 - DNA, 15 bp, Homo sapiens
agagaagctgacttc

SEQ ID NO: 1033086 - DNA, 15 bp, Homo sapiens
gagaagctgacttcc

SEQ ID NO: 1033087 - DNA, 15 bp, Homo sapiens
agaagctgacttccc

SEQ ID NO: 1033088 - DNA, 15 bp, Homo sapiens
gaagctgacttccct

SEQ ID NO: 1033089 - DNA, 15 bp, Homo sapiens
aagctgacttccctg

SEQ ID NO: 1033090 - DNA, 15 bp, Homo sapiens
agctgacttccctgg

SEQ ID NO: 1033091 - DNA, 15 bp, Homo sapiens
gctgacttccctggg

SEQ ID NO: 1033092 - DNA, 15 bp, Homo sapiens
ctgacttccctgggc

SEQ ID NO: 1033093 - DNA, 15 bp, Homo sapiens
tgacttccctgggcg

SEQ ID NO: 1033094 - DNA, 15 bp, Homo sapiens
gacttccctgggcgc

SEQ ID NO: 1033095 - DNA, 15 bp, Homo sapiens
acttccctgggcgca

SEQ ID NO: 1033096 - DNA, 15 bp, Homo sapiens
cttccctgggcgcac

SEQ ID NO: 1033097 - DNA, 15 bp, Homo sapiens
ttccctgggcgcaca

SEQ ID NO: 1033098 - DNA, 15 bp, Homo sapiens
tccctgggcgcacag

SEQ ID NO: 1033099 - DNA, 15 bp, Homo sapiens
ccctgggcgcacagc

SEQ ID NO: 1033100 - DNA, 15 bp, Homo sapiens
cctgggcgcacagca

SEQ ID NO: 1033101 - DNA, 15 bp, Homo sapiens
ctgggcgcacagcag

SEQ ID NO: 1033102 - DNA, 15 bp, Homo sapiens
tgggcgcacagcagt

SEQ ID NO: 1033103 - DNA, 15 bp, Homo sapiens
gggcgcacagcagtg

SEQ ID NO: 1033104 - DNA, 15 bp, Homo sapiens
ggcgcacagcagtga

SEQ ID NO: 1033105 - DNA, 15 bp, Homo sapiens
gcgcacagcagtgac

SEQ ID NO: 1033106 - DNA, 15 bp, Homo sapiens
cgcacagcagtgaca

SEQ ID NO: 1033107 - DNA, 15 bp, Homo sapiens
gcacagcagtgacaa

SEQ ID NO: 1033108 - DNA, 15 bp, Homo sapiens
cacagcagtgacaag

SEQ ID NO: 1033109 - DNA, 15 bp, Homo sapiens
acagcagtgacaagc

SEQ ID NO: 1033110 - DNA, 15 bp, Homo sapiens
cagcagtgacaagcc

SEQ ID NO: 1033111 - DNA, 15 bp, Homo sapiens
agcagtgacaagccc

SEQ ID NO: 1033112 - DNA, 15 bp, Homo sapiens
gcagtgacaagccct

SEQ ID NO: 1033113 - DNA, 15 bp, Homo sapiens
cagtgacaagccctg

SEQ ID NO: 1033114 - DNA, 15 bp, Homo sapiens
agtgacaagccctgg

SEQ ID NO: 1033115 - DNA, 15 bp, Homo sapiens
gtgacaagccctgga

SEQ ID NO: 1033116 - DNA, 15 bp, Homo sapiens
tgacaagccctggaa

SEQ ID NO: 1033117 - DNA, 15 bp, Homo sapiens
gacaagccctggaag

SEQ ID NO: 1033118 - DNA, 15 bp, Homo sapiens
acaagccctggaagt

SEQ ID NO: 1033119 - DNA, 15 bp, Homo sapiens
caagccctggaagtt

SEQ ID NO: 1033120 - DNA, 15 bp, Homo sapiens
aagccctggaagtta

SEQ ID NO: 1033121 - DNA, 15 bp, Homo sapiens
agccctggaagttac

SEQ ID NO: 1033122 - DNA, 15 bp, Homo sapiens
gccctggaagttaca

SEQ ID NO: 1033123 - DNA, 15 bp, Homo sapiens
ccctggaagttacat

SEQ ID NO: 1033124 - DNA, 15 bp, Homo sapiens
cctggaagttacata

SEQ ID NO: 1033125 - DNA, 15 bp, Homo sapiens
ctggaagttacatat

SEQ ID NO: 1033126 - DNA, 15 bp, Homo sapiens
tggaagttacatatc

SEQ ID NO: 1033127 - DNA, 15 bp, Homo sapiens
ggaagttacatatct

SEQ ID NO: 1033128 - DNA, 15 bp, Homo sapiens
gaagttacatatctc

SEQ ID NO: 1033129 - DNA, 15 bp, Homo sapiens
aagttacatatctcc

SEQ ID NO: 1033130 - DNA, 15 bp, Homo sapiens
agttacatatctcct

SEQ ID NO: 1033131 - DNA, 15 bp, Homo sapiens
gttacatatctcctc

SEQ ID NO: 1033132 - DNA, 15 bp, Homo sapiens
ttacatatctcctcc

SEQ ID NO: 1033133 - DNA, 15 bp, Homo sapiens
tacatatctcctcca

SEQ ID NO: 1033134 - DNA, 15 bp, Homo sapiens
acatatctcctccac

SEQ ID NO: 1033135 - DNA, 15 bp, Homo sapiens
catatctcctccacc

SEQ ID NO: 1033136 - DNA, 15 bp, Homo sapiens
atatctcctccacct

SEQ ID NO: 1033137 - DNA, 15 bp, Homo sapiens
tatctcctccacctg

SEQ ID NO: 1033138 - DNA, 15 bp, Homo sapiens
atctcctccacctgt

SEQ ID NO: 1033139 - DNA, 15 bp, Homo sapiens
tctcctccacctgtc

SEQ ID NO: 1033140 - DNA, 15 bp, Homo sapiens
ctcctccacctgtcc

SEQ ID NO: 1033141 - DNA, 15 bp, Homo sapiens
tcctccacctgtccc

SEQ ID NO: 1033142 - DNA, 15 bp, Homo sapiens
cctccacctgtcccc

SEQ ID NO: 1033143 - DNA, 15 bp, Homo sapiens
ctccacctgtccccc

SEQ ID NO: 1033144 - DNA, 15 bp, Homo sapiens
tccacctgtcccccc

SEQ ID NO: 1033145 - DNA, 15 bp, Homo sapiens
ccacctgtcccccca

SEQ ID NO: 1033146 - DNA, 15 bp, Homo sapiens
cacctgtccccccat

SEQ ID NO: 1033147 - DNA, 15 bp, Homo sapiens
acctgtccccccatc

SEQ ID NO: 1033148 - DNA, 15 bp, Homo sapiens
cctgtccccccatct

SEQ ID NO: 1033149 - DNA, 15 bp, Homo sapiens
ctgtccccccatctt

SEQ ID NO: 1033150 - DNA, 15 bp, Homo sapiens
tgtccccccatcttg

SEQ ID NO: 1033151 - DNA, 15 bp, Homo sapiens
gtccccccatcttgc

SEQ ID NO: 1033152 - DNA, 15 bp, Homo sapiens
tccccccatcttgct

SEQ ID NO: 1033153 - DNA, 15 bp, Homo sapiens
ccccccatcttgctt

SEQ ID NO: 1033154 - DNA, 15 bp, Homo sapiens
cccccatcttgcttt

SEQ ID NO: 1033155 - DNA, 15 bp, Homo sapiens
ccccatcttgctttg

SEQ ID NO: 1033156 - DNA, 15 bp, Homo sapiens
cccatcttgctttgg

SEQ ID NO: 1033157 - DNA, 15 bp, Homo sapiens
ccatcttgctttggc

SEQ ID NO: 1033158 - DNA, 15 bp, Homo sapiens
catcttgctttggca

SEQ ID NO: 1033159 - DNA, 15 bp, Homo sapiens
atcttgctttggcag

SEQ ID NO: 1033160 - DNA, 15 bp, Homo sapiens
tcttgctttggcagt

SEQ ID NO: 1033161 - DNA, 15 bp, Homo sapiens
cttgctttggcagtg

SEQ ID NO: 1033162 - DNA, 15 bp, Homo sapiens
ttgctttggcagtgc

SEQ ID NO: 1033163 - DNA, 15 bp, Homo sapiens
tgctttggcagtgcc

SEQ ID NO: 1033164 - DNA, 15 bp, Homo sapiens
gctttggcagtgcct

SEQ ID NO: 1033165 - DNA, 15 bp, Homo sapiens
ctttggcagtgcctc

SEQ ID NO: 1033166 - DNA, 15 bp, Homo sapiens
tttggcagtgcctca

SEQ ID NO: 1033167 - DNA, 15 bp, Homo sapiens
ttggcagtgcctcaa

SEQ ID NO: 1033168 - DNA, 15 bp, Homo sapiens
tggcagtgcctcaag

SEQ ID NO: 1033169 - DNA, 15 bp, Homo sapiens
ggcagtgcctcaagg

SEQ ID NO: 1033170 - DNA, 15 bp, Homo sapiens
gcagtgcctcaaggg

SEQ ID NO: 1033171 - DNA, 15 bp, Homo sapiens
cagtgcctcaagggt

SEQ ID NO: 1033172 - DNA, 15 bp, Homo sapiens
agtgcctcaagggtc

SEQ ID NO: 1033173 - DNA, 15 bp, Homo sapiens
gtgcctcaagggtca

SEQ ID NO: 1033174 - DNA, 15 bp, Homo sapiens
tgcctcaagggtcag

SEQ ID NO: 1033175 - DNA, 15 bp, Homo sapiens
gcctcaagggtcagt

SEQ ID NO: 1033176 - DNA, 15 bp, Homo sapiens
cctcaagggtcagtt

SEQ ID NO: 1033177 - DNA, 15 bp, Homo sapiens
ctcaagggtcagttg

SEQ ID NO: 1033178 - DNA, 15 bp, Homo sapiens
tcaagggtcagttgg

SEQ ID NO: 1033179 - DNA, 15 bp, Homo sapiens
caagggtcagttggt

SEQ ID NO: 1033180 - DNA, 15 bp, Homo sapiens
aagggtcagttggtc

SEQ ID NO: 1033181 - DNA, 15 bp, Homo sapiens
agggtcagttggtca

SEQ ID NO: 1033182 - DNA, 15 bp, Homo sapiens
gggtcagttggtcag

SEQ ID NO: 1033183 - DNA, 15 bp, Homo sapiens
ggtcagttggtcaga

SEQ ID NO: 1033184 - DNA, 15 bp, Homo sapiens
gtcagttggtcagag

SEQ ID NO: 1033185 - DNA, 15 bp, Homo sapiens
tcagttggtcagagc

SEQ ID NO: 1033186 - DNA, 15 bp, Homo sapiens
cagttggtcagagca

SEQ ID NO: 1033187 - DNA, 15 bp, Homo sapiens
agttggtcagagcag

SEQ ID NO: 1033188 - DNA, 15 bp, Homo sapiens
gttggtcagagcagc

SEQ ID NO: 1033189 - DNA, 15 bp, Homo sapiens
ttggtcagagcagct

SEQ ID NO: 1033190 - DNA, 15 bp, Homo sapiens
tggtcagagcagctt

SEQ ID NO: 1033191 - DNA, 15 bp, Homo sapiens
ggtcagagcagcttt

SEQ ID NO: 1033192 - DNA, 15 bp, Homo sapiens
gtcagagcagctttg

SEQ ID NO: 1033193 - DNA, 15 bp, Homo sapiens
tcagagcagctttgg

SEQ ID NO: 1033194 - DNA, 15 bp, Homo sapiens
cagagcagctttgga

SEQ ID NO: 1033195 - DNA, 15 bp, Homo sapiens
agagcagctttggat

SEQ ID NO: 1033196 - DNA, 15 bp, Homo sapiens
gagcagctttggatc

SEQ ID NO: 1033197 - DNA, 15 bp, Homo sapiens
agcagctttggatct

SEQ ID NO: 1033198 - DNA, 15 bp, Homo sapiens
gcagctttggatctg

SEQ ID NO: 1033199 - DNA, 15 bp, Homo sapiens
cagctttggatctgg

SEQ ID NO: 1033200 - DNA, 15 bp, Homo sapiens
agctttggatctggg

SEQ ID NO: 1033201 - DNA, 15 bp, Homo sapiens
gctttggatctggga

SEQ ID NO: 1033202 - DNA, 15 bp, Homo sapiens
ctttggatctgggat

SEQ ID NO: 1033203 - DNA, 15 bp, Homo sapiens
tttggatctgggatt

SEQ ID NO: 1033204 - DNA, 15 bp, Homo sapiens
ttggatctgggatta

SEQ ID NO: 1033205 - DNA, 15 bp, Homo sapiens
tggatctgggattag

SEQ ID NO: 1033206 - DNA, 15 bp, Homo sapiens
ggatctgggattagc

SEQ ID NO: 1033207 - DNA, 15 bp, Homo sapiens
gatctgggattagcc

SEQ ID NO: 1033208 - DNA, 15 bp, Homo sapiens
atctgggattagcct

SEQ ID NO: 1033209 - DNA, 15 bp, Homo sapiens
tctgggattagcctt

SEQ ID NO: 1033210 - DNA, 15 bp, Homo sapiens
ctgggattagccttt

SEQ ID NO: 1033211 - DNA, 15 bp, Homo sapiens
tgggattagcctttc

SEQ ID NO: 1033212 - DNA, 15 bp, Homo sapiens
gggattagcctttct

SEQ ID NO: 1033213 - DNA, 15 bp, Homo sapiens
ggattagcctttctc

SEQ ID NO: 1033214 - DNA, 15 bp, Homo sapiens
gattagcctttctca

SEQ ID NO: 1033215 - DNA, 15 bp, Homo sapiens
attagcctttctcat

SEQ ID NO: 1033216 - DNA, 15 bp, Homo sapiens
ttagcctttctcatt

SEQ ID NO: 1033217 - DNA, 15 bp, Homo sapiens
tagcctttctcattt

SEQ ID NO: 1033218 - DNA, 15 bp, Homo sapiens
agcctttctcatttg

SEQ ID NO: 1033219 - DNA, 15 bp, Homo sapiens
gcctttctcatttgc

SEQ ID NO: 1033220 - DNA, 15 bp, Homo sapiens
cctttctcatttgct

SEQ ID NO: 1033221 - DNA, 15 bp, Homo sapiens
ctttctcatttgctg

SEQ ID NO: 1033222 - DNA, 15 bp, Homo sapiens
tttctcatttgctgg

SEQ ID NO: 1033223 - DNA, 15 bp, Homo sapiens
ttctcatttgctggg

SEQ ID NO: 1033224 - DNA, 15 bp, Homo sapiens
tctcatttgctgggg

SEQ ID NO: 1033225 - DNA, 15 bp, Homo sapiens
ctcatttgctggggt

SEQ ID NO: 1033226 - DNA, 15 bp, Homo sapiens
tcatttgctggggtg

SEQ ID NO: 1033227 - DNA, 15 bp, Homo sapiens
catttgctggggtga

SEQ ID NO: 1033228 - DNA, 15 bp, Homo sapiens
atttgctggggtgaa

SEQ ID NO: 1033229 - DNA, 15 bp, Homo sapiens
tttgctggggtgaag

SEQ ID NO: 1033230 - DNA, 15 bp, Homo sapiens
ttgctggggtgaaga

SEQ ID NO: 1033231 - DNA, 15 bp, Homo sapiens
tgctggggtgaagac

SEQ ID NO: 1033232 - DNA, 15 bp, Homo sapiens
gctggggtgaagaca

SEQ ID NO: 1033233 - DNA, 15 bp, Homo sapiens
ctggggtgaagacac

SEQ ID NO: 1033234 - DNA, 15 bp, Homo sapiens
tggggtgaagacacg

SEQ ID NO: 1033235 - DNA, 15 bp, Homo sapiens
ggggtgaagacacgt

SEQ ID NO: 1033236 - DNA, 15 bp, Homo sapiens
gggtgaagacacgtt

SEQ ID NO: 1033237 - DNA, 15 bp, Homo sapiens
ggtgaagacacgttc

SEQ ID NO: 1033238 - DNA, 15 bp, Homo sapiens
gtgaagacacgttct

SEQ ID NO: 1033239 - DNA, 15 bp, Homo sapiens
tgaagacacgttctg

SEQ ID NO: 1033240 - DNA, 15 bp, Homo sapiens
gaagacacgttctgc

SEQ ID NO: 1033241 - DNA, 15 bp, Homo sapiens
aagacacgttctgca

SEQ ID NO: 1033242 - DNA, 15 bp, Homo sapiens
agacacgttctgcac

SEQ ID NO: 1033243 - DNA, 15 bp, Homo sapiens
gacacgttctgcaca

SEQ ID NO: 1033244 - DNA, 15 bp, Homo sapiens
acacgttctgcacat

SEQ ID NO: 1033245 - DNA, 15 bp, Homo sapiens
cacgttctgcacata

SEQ ID NO: 1033246 - DNA, 15 bp, Homo sapiens
acgttctgcacatac

SEQ ID NO: 1033247 - DNA, 15 bp, Homo sapiens
cgttctgcacatacc

SEQ ID NO: 1033248 - DNA, 15 bp, Homo sapiens
gttctgcacatacca

SEQ ID NO: 1033249 - DNA, 15 bp, Homo sapiens
ttctgcacataccaa

SEQ ID NO: 1033250 - DNA, 15 bp, Homo sapiens
tctgcacataccaaa

SEQ ID NO: 1033251 - DNA, 15 bp, Homo sapiens
ctgcacataccaaat

SEQ ID NO: 1033252 - DNA, 15 bp, Homo sapiens
tgcacataccaaata

SEQ ID NO: 1033253 - DNA, 15 bp, Homo sapiens
gcacataccaaatac

SEQ ID NO: 1033254 - DNA, 15 bp, Homo sapiens
cacataccaaatacc

SEQ ID NO: 1033255 - DNA, 15 bp, Homo sapiens
acataccaaatacct

SEQ ID NO: 1033256 - DNA, 15 bp, Homo sapiens
cataccaaatacctc

SEQ ID NO: 1033257 - DNA, 15 bp, Homo sapiens
ataccaaatacctcc

SEQ ID NO: 1033258 - DNA, 15 bp, Homo sapiens
taccaaatacctcca

SEQ ID NO: 1033259 - DNA, 15 bp, Homo sapiens
accaaatacctccaa

SEQ ID NO: 1033260 - DNA, 15 bp, Homo sapiens
ccaaatacctccaaa

SEQ ID NO: 1033261 - DNA, 15 bp, Homo sapiens
caaatacctccaaag

SEQ ID NO: 1033262 - DNA, 15 bp, Homo sapiens
aaatacctccaaagt

SEQ ID NO: 1033263 - DNA, 15 bp, Homo sapiens
aatacctccaaagta

SEQ ID NO: 1033264 - DNA, 15 bp, Homo sapiens
atacctccaaagtag

SEQ ID NO: 1033265 - DNA, 15 bp, Homo sapiens
tacctccaaagtagg

SEQ ID NO: 1033266 - DNA, 15 bp, Homo sapiens
acctccaaagtagga

SEQ ID NO: 1033267 - DNA, 15 bp, Homo sapiens
cctccaaagtaggac

SEQ ID NO: 1033268 - DNA, 15 bp, Homo sapiens
ctccaaagtaggact

SEQ ID NO: 1033269 - DNA, 15 bp, Homo sapiens
tccaaagtaggactg

SEQ ID NO: 1033270 - DNA, 15 bp, Homo sapiens
ccaaagtaggactgt

SEQ ID NO: 1033271 - DNA, 15 bp, Homo sapiens
caaagtaggactgta

SEQ ID NO: 1033272 - DNA, 15 bp, Homo sapiens
aaagtaggactgtat

SEQ ID NO: 1033273 - DNA, 15 bp, Homo sapiens
aagtaggactgtatg

SEQ ID NO: 1033274 - DNA, 15 bp, Homo sapiens
agtaggactgtatgt

SEQ ID NO: 1033275 - DNA, 15 bp, Homo sapiens
gtaggactgtatgtg

SEQ ID NO: 1033276 - DNA, 15 bp, Homo sapiens
taggactgtatgtgt

SEQ ID NO: 1033277 - DNA, 15 bp, Homo sapiens
aggactgtatgtgtc

SEQ ID NO: 1033278 - DNA, 15 bp, Homo sapiens
ggactgtatgtgtct

SEQ ID NO: 1033279 - DNA, 15 bp, Homo sapiens
gactgtatgtgtctt

SEQ ID NO: 1033280 - DNA, 15 bp, Homo sapiens
actgtatgtgtcttg

SEQ ID NO: 1033281 - DNA, 15 bp, Homo sapiens
ctgtatgtgtcttgt

SEQ ID NO: 1033282 - DNA, 15 bp, Homo sapiens
tgtatgtgtcttgta

SEQ ID NO: 1033283 - DNA, 15 bp, Homo sapiens
gtatgtgtcttgtac

SEQ ID NO: 1033284 - DNA, 15 bp, Homo sapiens
tatgtgtcttgtaca

SEQ ID NO: 1033285 - DNA, 15 bp, Homo sapiens
atgtgtcttgtacat

SEQ ID NO: 1033286 - DNA, 15 bp, Homo sapiens
tgtgtcttgtacatt

SEQ ID NO: 1033287 - DNA, 15 bp, Homo sapiens
gtgtcttgtacattt

SEQ ID NO: 1033288 - DNA, 15 bp, Homo sapiens
tgtcttgtacatttt

SEQ ID NO: 1033289 - DNA, 15 bp, Homo sapiens
gtcttgtacattttt

SEQ ID NO: 1033290 - DNA, 15 bp, Homo sapiens
tcttgtacatttttt

SEQ ID NO: 1033291 - DNA, 15 bp, Homo sapiens
cttgtacattttttt

SEQ ID NO: 1033292 - DNA, 15 bp, Homo sapiens
ttgtacatttttttt

SEQ ID NO: 1033293 - DNA, 15 bp, Homo sapiens
tgtacattttttttt

SEQ ID NO: 1033294 - DNA, 15 bp, Homo sapiens
gtacatttttttttt

SEQ ID NO: 1033295 - DNA, 15 bp, Homo sapiens
tacattttttttttt

SEQ ID NO: 1033296 - DNA, 15 bp, Homo sapiens
acatttttttttttt

SEQ ID NO: 1033297 - DNA, 15 bp, Homo sapiens
ttttttttttttaac

SEQ ID NO: 1033298 - DNA, 15 bp, Homo sapiens
tttttttttttaaca

SEQ ID NO: 1033299 - DNA, 15 bp, Homo sapiens
ttttttttttaacat

SEQ ID NO: 1033300 - DNA, 15 bp, Homo sapiens
tttttttttaacatg

SEQ ID NO: 1033301 - DNA, 15 bp, Homo sapiens
ttttttttaacatgg

SEQ ID NO: 1033302 - DNA, 15 bp, Homo sapiens
tttttttaacatggg

SEQ ID NO: 1033303 - DNA, 15 bp, Homo sapiens
ttttttaacatgggg

SEQ ID NO: 1033304 - DNA, 15 bp, Homo sapiens
tttttaacatgggga

SEQ ID NO: 1033305 - DNA, 15 bp, Homo sapiens
ttttaacatggggag

SEQ ID NO: 1033306 - DNA, 15 bp, Homo sapiens
tttaacatggggagg

SEQ ID NO: 1033307 - DNA, 15 bp, Homo sapiens
ttaacatggggaggg

SEQ ID NO: 1033308 - DNA, 15 bp, Homo sapiens
taacatggggaggga

SEQ ID NO: 1033309 - DNA, 15 bp, Homo sapiens
aacatggggagggat

SEQ ID NO: 1033310 - DNA, 15 bp, Homo sapiens
acatggggagggatt

SEQ ID NO: 1033311 - DNA, 15 bp, Homo sapiens
catggggagggatta

SEQ ID NO: 1033312 - DNA, 15 bp, Homo sapiens
atggggagggattaa

SEQ ID NO: 1033313 - DNA, 15 bp, Homo sapiens
tggggagggattaac

SEQ ID NO: 1033314 - DNA, 15 bp, Homo sapiens
ggggagggattaaca

SEQ ID NO: 1033315 - DNA, 15 bp, Homo sapiens
gggagggattaacaa

SEQ ID NO: 1033316 - DNA, 15 bp, Homo sapiens
ggagggattaacaag

SEQ ID NO: 1033317 - DNA, 15 bp, Homo sapiens
gagggattaacaaga

SEQ ID NO: 1033318 - DNA, 15 bp, Homo sapiens
agggattaacaagag

SEQ ID NO: 1033319 - DNA, 15 bp, Homo sapiens
gggattaacaagaga

SEQ ID NO: 1033320 - DNA, 15 bp, Homo sapiens
ggattaacaagagat

SEQ ID NO: 1033321 - DNA, 15 bp, Homo sapiens
gattaacaagagatg

SEQ ID NO: 1033322 - DNA, 15 bp, Homo sapiens
attaacaagagatgg

SEQ ID NO: 1033323 - DNA, 15 bp, Homo sapiens
ttaacaagagatggc

SEQ ID NO: 1033324 - DNA, 15 bp, Homo sapiens
taacaagagatggca

SEQ ID NO: 1033325 - DNA, 15 bp, Homo sapiens
aacaagagatggcat

SEQ ID NO: 1033326 - DNA, 15 bp, Homo sapiens
acaagagatggcatt

SEQ ID NO: 1033327 - DNA, 15 bp, Homo sapiens
caagagatggcatta

SEQ ID NO: 1033328 - DNA, 15 bp, Homo sapiens
aagagatggcattaa

SEQ ID NO: 1033329 - DNA, 15 bp, Homo sapiens
agagatggcattaag

SEQ ID NO: 1033330 - DNA, 15 bp, Homo sapiens
gagatggcattaaga

SEQ ID NO: 1033331 - DNA, 15 bp, Homo sapiens
agatggcattaagac

SEQ ID NO: 1033332 - DNA, 15 bp, Homo sapiens
gatggcattaagacc

SEQ ID NO: 1033333 - DNA, 15 bp, Homo sapiens
atggcattaagacct

SEQ ID NO: 1033334 - DNA, 15 bp, Homo sapiens
tggcattaagacctt

SEQ ID NO: 1033335 - DNA, 15 bp, Homo sapiens
ggcattaagaccttg

SEQ ID NO: 1033336 - DNA, 15 bp, Homo sapiens
gcattaagaccttgg

SEQ ID NO: 1033337 - DNA, 15 bp, Homo sapiens
cattaagaccttgga

SEQ ID NO: 1033338 - DNA, 15 bp, Homo sapiens
attaagaccttggat

SEQ ID NO: 1033339 - DNA, 15 bp, Homo sapiens
ttaagaccttggata

SEQ ID NO: 1033340 - DNA, 15 bp, Homo sapiens
taagaccttggataa

SEQ ID NO: 1033341 - DNA, 15 bp, Homo sapiens
aagaccttggataat

SEQ ID NO: 1033342 - DNA, 15 bp, Homo sapiens
agaccttggataata

SEQ ID NO: 1033343 - DNA, 15 bp, Homo sapiens
gaccttggataataa

SEQ ID NO: 1033344 - DNA, 15 bp, Homo sapiens
accttggataataaa

SEQ ID NO: 1033345 - DNA, 15 bp, Homo sapiens
ccttggataataaac

SEQ ID NO: 1033346 - DNA, 15 bp, Homo sapiens
cttggataataaacc

SEQ ID NO: 1033347 - DNA, 15 bp, Homo sapiens
ttggataataaacct

SEQ ID NO: 1033348 - DNA, 15 bp, Homo sapiens
tggataataaaccta

SEQ ID NO: 1033349 - DNA, 15 bp, Homo sapiens
ggataataaacctag

SEQ ID NO: 1033350 - DNA, 15 bp, Homo sapiens
gataataaacctagt

SEQ ID NO: 1033351 - DNA, 15 bp, Homo sapiens
ataataaacctagtt

SEQ ID NO: 1033352 - DNA, 15 bp, Homo sapiens
taataaacctagttg

SEQ ID NO: 1033353 - DNA, 15 bp, Homo sapiens
aataaacctagttgc

SEQ ID NO: 1033354 - DNA, 15 bp, Homo sapiens
ataaacctagttgca

SEQ ID NO: 1033355 - DNA, 15 bp, Homo sapiens
taaacctagttgcat

SEQ ID NO: 1033356 - DNA, 15 bp, Homo sapiens
aaacctagttgcatc

SEQ ID NO: 1033357 - DNA, 15 bp, Homo sapiens
aacctagttgcatct

SEQ ID NO: 1033358 - DNA, 15 bp, Homo sapiens
acctagttgcatctg

SEQ ID NO: 1033359 - DNA, 15 bp, Homo sapiens
cctagttgcatctgc

SEQ ID NO: 1033360 - DNA, 15 bp, Homo sapiens
ctagttgcatctgct

SEQ ID NO: 1033361 - DNA, 15 bp, Homo sapiens
tagttgcatctgctg

SEQ ID NO: 1033362 - DNA, 15 bp, Homo sapiens
agttgcatctgctgg

SEQ ID NO: 1033363 - DNA, 15 bp, Homo sapiens
gttgcatctgctggt

SEQ ID NO: 1033364 - DNA, 15 bp, Homo sapiens
ttgcatctgctggtc

SEQ ID NO: 1033365 - DNA, 15 bp, Homo sapiens
tgcatctgctggtca

SEQ ID NO: 1033366 - DNA, 15 bp, Homo sapiens
gcatctgctggtcat

SEQ ID NO: 1033367 - DNA, 15 bp, Homo sapiens
catctgctggtcatg

SEQ ID NO: 1033368 - DNA, 15 bp, Homo sapiens
atctgctggtcatgg

SEQ ID NO: 1033369 - DNA, 15 bp, Homo sapiens
tctgctggtcatggt

SEQ ID NO: 1033370 - DNA, 15 bp, Homo sapiens
ctgctggtcatggta

SEQ ID NO: 1033371 - DNA, 15 bp, Homo sapiens
tgctggtcatggtag

SEQ ID NO: 1033372 - DNA, 15 bp, Homo sapiens
gctggtcatggtaga

SEQ ID NO: 1033373 - DNA, 15 bp, Homo sapiens
ctggtcatggtagag

SEQ ID NO: 1033374 - DNA, 15 bp, Homo sapiens
tggtcatggtagagc

SEQ ID NO: 1033375 - DNA, 15 bp, Homo sapiens
ggtcatggtagagct

SEQ ID NO: 1033376 - DNA, 15 bp, Homo sapiens
gtcatggtagagctg

SEQ ID NO: 1033377 - DNA, 15 bp, Homo sapiens
tcatggtagagctgc

SEQ ID NO: 1033378 - DNA, 15 bp, Homo sapiens
catggtagagctgct

SEQ ID NO: 1033379 - DNA, 15 bp, Homo sapiens
atggtagagctgctg

SEQ ID NO: 1033380 - DNA, 15 bp, Homo sapiens
tggtagagctgctgt

SEQ ID NO: 1033381 - DNA, 15 bp, Homo sapiens
ggtagagctgctgtg

SEQ ID NO: 1033382 - DNA, 15 bp, Homo sapiens
gtagagctgctgtgg

SEQ ID NO: 1033383 - DNA, 15 bp, Homo sapiens
tagagctgctgtggt

SEQ ID NO: 1033384 - DNA, 15 bp, Homo sapiens
agagctgctgtggtc

SEQ ID NO: 1033385 - DNA, 15 bp, Homo sapiens
gagctgctgtggtcc

SEQ ID NO: 1033386 - DNA, 15 bp, Homo sapiens
agctgctgtggtccc

SEQ ID NO: 1033387 - DNA, 15 bp, Homo sapiens
gctgctgtggtccct

SEQ ID NO: 1033388 - DNA, 15 bp, Homo sapiens
ctgctgtggtccctt

SEQ ID NO: 1033389 - DNA, 15 bp, Homo sapiens
tgctgtggtcccttg

SEQ ID NO: 1033390 - DNA, 15 bp, Homo sapiens
gctgtggtcccttgc

SEQ ID NO: 1033391 - DNA, 15 bp, Homo sapiens
ctgtggtcccttgca

SEQ ID NO: 1033392 - DNA, 15 bp, Homo sapiens
tgtggtcccttgcag

SEQ ID NO: 1033393 - DNA, 15 bp, Homo sapiens
gtggtcccttgcagc

SEQ ID NO: 1033394 - DNA, 15 bp, Homo sapiens
tggtcccttgcagcc

SEQ ID NO: 1033395 - DNA, 15 bp, Homo sapiens
ggtcccttgcagccc

SEQ ID NO: 1033396 - DNA, 15 bp, Homo sapiens
gtcccttgcagccca

SEQ ID NO: 1033397 - DNA, 15 bp, Homo sapiens
tcccttgcagcccac

SEQ ID NO: 1033398 - DNA, 15 bp, Homo sapiens
cccttgcagcccaca

SEQ ID NO: 1033399 - DNA, 15 bp, Homo sapiens
ccttgcagcccacag

SEQ ID NO: 1033400 - DNA, 15 bp, Homo sapiens
cttgcagcccacagt

SEQ ID NO: 1033401 - DNA, 15 bp, Homo sapiens
ttgcagcccacagtg

SEQ ID NO: 1033402 - DNA, 15 bp, Homo sapiens
tgcagcccacagtgg

SEQ ID NO: 1033403 - DNA, 15 bp, Homo sapiens
gcagcccacagtggc

SEQ ID NO: 1033404 - DNA, 15 bp, Homo sapiens
cagcccacagtggcc

SEQ ID NO: 1033405 - DNA, 15 bp, Homo sapiens
agcccacagtggccc

SEQ ID NO: 1033406 - DNA, 15 bp, Homo sapiens
gcccacagtggccct

SEQ ID NO: 1033407 - DNA, 15 bp, Homo sapiens
cccacagtggccctg

SEQ ID NO: 1033408 - DNA, 15 bp, Homo sapiens
ccacagtggccctgc

SEQ ID NO: 1033409 - DNA, 15 bp, Homo sapiens
cacagtggccctgcc

SEQ ID NO: 1033410 - DNA, 15 bp, Homo sapiens
acagtggccctgcct

SEQ ID NO: 1033411 - DNA, 15 bp, Homo sapiens
cagtggccctgcctg

SEQ ID NO: 1033412 - DNA, 15 bp, Homo sapiens
agtggccctgcctgg

SEQ ID NO: 1033413 - DNA, 15 bp, Homo sapiens
gtggccctgcctgga

SEQ ID NO: 1033414 - DNA, 15 bp, Homo sapiens
tggccctgcctggaa

SEQ ID NO: 1033415 - DNA, 15 bp, Homo sapiens
ggccctgcctggaaa

SEQ ID NO: 1033416 - DNA, 15 bp, Homo sapiens
gccctgcctggaaac

SEQ ID NO: 1033417 - DNA, 15 bp, Homo sapiens
ccctgcctggaaacc

SEQ ID NO: 1033418 - DNA, 15 bp, Homo sapiens
cctgcctggaaacct

SEQ ID NO: 1033419 - DNA, 15 bp, Homo sapiens
ctgcctggaaacctc

SEQ ID NO: 1033420 - DNA, 15 bp, Homo sapiens
tgcctggaaacctca

SEQ ID NO: 1033421 - DNA, 15 bp, Homo sapiens
gcctggaaacctcaa

SEQ ID NO: 1033422 - DNA, 15 bp, Homo sapiens
cctggaaacctcaag

SEQ ID NO: 1033423 - DNA, 15 bp, Homo sapiens
ctggaaacctcaagc

SEQ ID NO: 1033424 - DNA, 15 bp, Homo sapiens
tggaaacctcaagca

SEQ ID NO: 1033425 - DNA, 15 bp, Homo sapiens
ggaaacctcaagcag

SEQ ID NO: 1033426 - DNA, 15 bp, Homo sapiens
gaaacctcaagcagg

SEQ ID NO: 1033427 - DNA, 15 bp, Homo sapiens
aaacctcaagcagga

SEQ ID NO: 1033428 - DNA, 15 bp, Homo sapiens
aacctcaagcaggat

SEQ ID NO: 1033429 - DNA, 15 bp, Homo sapiens
acctcaagcaggatg

SEQ ID NO: 1033430 - DNA, 15 bp, Homo sapiens
cctcaagcaggatgt

SEQ ID NO: 1033431 - DNA, 15 bp, Homo sapiens
ctcaagcaggatgtg

SEQ ID NO: 1033432 - DNA, 15 bp, Homo sapiens
tcaagcaggatgtgc

SEQ ID NO: 1033433 - DNA, 15 bp, Homo sapiens
caagcaggatgtgca

SEQ ID NO: 1033434 - DNA, 15 bp, Homo sapiens
aagcaggatgtgcat

SEQ ID NO: 1033435 - DNA, 15 bp, Homo sapiens
agcaggatgtgcatc

SEQ ID NO: 1033436 - DNA, 15 bp, Homo sapiens
gcaggatgtgcatct

SEQ ID NO: 1033437 - DNA, 15 bp, Homo sapiens
caggatgtgcatctt

SEQ ID NO: 1033438 - DNA, 15 bp, Homo sapiens
aggatgtgcatcttc

SEQ ID NO: 1033439 - DNA, 15 bp, Homo sapiens
ggatgtgcatcttct

SEQ ID NO: 1033440 - DNA, 15 bp, Homo sapiens
gatgtgcatcttctg

SEQ ID NO: 1033441 - DNA, 15 bp, Homo sapiens
atgtgcatcttctgc

SEQ ID NO: 1033442 - DNA, 15 bp, Homo sapiens
tgtgcatcttctgcc

SEQ ID NO: 1033443 - DNA, 15 bp, Homo sapiens
gtgcatcttctgcct

SEQ ID NO: 1033444 - DNA, 15 bp, Homo sapiens
tgcatcttctgcctg

SEQ ID NO: 1033445 - DNA, 15 bp, Homo sapiens
gcatcttctgcctgc

SEQ ID NO: 1033446 - DNA, 15 bp, Homo sapiens
catcttctgcctgcc

SEQ ID NO: 1033447 - DNA, 15 bp, Homo sapiens
atcttctgcctgcct

SEQ ID NO: 1033448 - DNA, 15 bp, Homo sapiens
tcttctgcctgccta

SEQ ID NO: 1033449 - DNA, 15 bp, Homo sapiens
cttctgcctgcctac

SEQ ID NO: 1033450 - DNA, 15 bp, Homo sapiens
ttctgcctgcctact

SEQ ID NO: 1033451 - DNA, 15 bp, Homo sapiens
tctgcctgcctactg

SEQ ID NO: 1033452 - DNA, 15 bp, Homo sapiens
ctgcctgcctactga

SEQ ID NO: 1033453 - DNA, 15 bp, Homo sapiens
tgcctgcctactgat

SEQ ID NO: 1033454 - DNA, 15 bp, Homo sapiens
gcctgcctactgatc

SEQ ID NO: 1033455 - DNA, 15 bp, Homo sapiens
cctgcctactgatct

SEQ ID NO: 1033456 - DNA, 15 bp, Homo sapiens
ctgcctactgatctc

SEQ ID NO: 1033457 - DNA, 15 bp, Homo sapiens
tgcctactgatctcc

SEQ ID NO: 1033458 - DNA, 15 bp, Homo sapiens
gcctactgatctcca

SEQ ID NO: 1033459 - DNA, 15 bp, Homo sapiens
cctactgatctccat

SEQ ID NO: 1033460 - DNA, 15 bp, Homo sapiens
ctactgatctccatc

SEQ ID NO: 1033461 - DNA, 15 bp, Homo sapiens
tactgatctccatca

SEQ ID NO: 1033462 - DNA, 15 bp, Homo sapiens
actgatctccatcac

SEQ ID NO: 1033463 - DNA, 15 bp, Homo sapiens
ctgatctccatcact

SEQ ID NO: 1033464 - DNA, 15 bp, Homo sapiens
tgatctccatcactt

SEQ ID NO: 1033465 - DNA, 15 bp, Homo sapiens
gatctccatcacttg

SEQ ID NO: 1033466 - DNA, 15 bp, Homo sapiens
atctccatcacttgg

SEQ ID NO: 1033467 - DNA, 15 bp, Homo sapiens
tctccatcacttgga

SEQ ID NO: 1033468 - DNA, 15 bp, Homo sapiens
ctccatcacttggag

SEQ ID NO: 1033469 - DNA, 15 bp, Homo sapiens
tccatcacttggagt

SEQ ID NO: 1033470 - DNA, 15 bp, Homo sapiens
ccatcacttggagta

SEQ ID NO: 1033471 - DNA, 15 bp, Homo sapiens
catcacttggagtac

SEQ ID NO: 1033472 - DNA, 15 bp, Homo sapiens
atcacttggagtacc

SEQ ID NO: 1033473 - DNA, 15 bp, Homo sapiens
tcacttggagtaccc

SEQ ID NO: 1033474 - DNA, 15 bp, Homo sapiens
cacttggagtacccc

SEQ ID NO: 1033475 - DNA, 15 bp, Homo sapiens
acttggagtacccca

SEQ ID NO: 1033476 - DNA, 15 bp, Homo sapiens
cttggagtaccccaa

SEQ ID NO: 1033477 - DNA, 15 bp, Homo sapiens
ttggagtaccccaaa

SEQ ID NO: 1033478 - DNA, 15 bp, Homo sapiens
tggagtaccccaaag

SEQ ID NO: 1033479 - DNA, 15 bp, Homo sapiens
ggagtaccccaaagg

SEQ ID NO: 1033480 - DNA, 15 bp, Homo sapiens
gagtaccccaaaggc

SEQ ID NO: 1033481 - DNA, 15 bp, Homo sapiens
agtaccccaaaggcc

SEQ ID NO: 1033482 - DNA, 15 bp, Homo sapiens
gtaccccaaaggcct

SEQ ID NO: 1033483 - DNA, 15 bp, Homo sapiens
taccccaaaggcctc

SEQ ID NO: 1033484 - DNA, 15 bp, Homo sapiens
accccaaaggcctct

SEQ ID NO: 1033485 - DNA, 15 bp, Homo sapiens
ccccaaaggcctctt

SEQ ID NO: 1033486 - DNA, 15 bp, Homo sapiens
cccaaaggcctcttt

SEQ ID NO: 1033487 - DNA, 15 bp, Homo sapiens
ccaaaggcctctttt

SEQ ID NO: 1033488 - DNA, 15 bp, Homo sapiens
caaaggcctcttttt

SEQ ID NO: 1033489 - DNA, 15 bp, Homo sapiens
aaaggcctctttttc

SEQ ID NO: 1033490 - DNA, 15 bp, Homo sapiens
aaggcctctttttca

SEQ ID NO: 1033491 - DNA, 15 bp, Homo sapiens
aggcctctttttcac

SEQ ID NO: 1033492 - DNA, 15 bp, Homo sapiens
ggcctctttttcacc

SEQ ID NO: 1033493 - DNA, 15 bp, Homo sapiens
gcctctttttcacct

SEQ ID NO: 1033494 - DNA, 15 bp, Homo sapiens
cctctttttcacctc

SEQ ID NO: 1033495 - DNA, 15 bp, Homo sapiens
ctctttttcacctca

SEQ ID NO: 1033496 - DNA, 15 bp, Homo sapiens
tctttttcacctcac

SEQ ID NO: 1033497 - DNA, 15 bp, Homo sapiens
ctttttcacctcact

SEQ ID NO: 1033498 - DNA, 15 bp, Homo sapiens
tttttcacctcactt

SEQ ID NO: 1033499 - DNA, 15 bp, Homo sapiens
ttttcacctcacttg

SEQ ID NO: 1033500 - DNA, 15 bp, Homo sapiens
tttcacctcacttgc

SEQ ID NO: 1033501 - DNA, 15 bp, Homo sapiens
ttcacctcacttgcc

SEQ ID NO: 1033502 - DNA, 15 bp, Homo sapiens
tcacctcacttgccc

SEQ ID NO: 1033503 - DNA, 15 bp, Homo sapiens
cacctcacttgccca

SEQ ID NO: 1033504 - DNA, 15 bp, Homo sapiens
acctcacttgcccag

SEQ ID NO: 1033505 - DNA, 15 bp, Homo sapiens
cctcacttgcccagc

SEQ ID NO: 1033506 - DNA, 15 bp, Homo sapiens
ctcacttgcccagct

SEQ ID NO: 1033507 - DNA, 15 bp, Homo sapiens
tcacttgcccagctg

SEQ ID NO: 1033508 - DNA, 15 bp, Homo sapiens
cacttgcccagctgt

SEQ ID NO: 1033509 - DNA, 15 bp, Homo sapiens
acttgcccagctgtc

SEQ ID NO: 1033510 - DNA, 15 bp, Homo sapiens
cttgcccagctgtcc

SEQ ID NO: 1033511 - DNA, 15 bp, Homo sapiens
ttgcccagctgtcct

SEQ ID NO: 1033512 - DNA, 15 bp, Homo sapiens
tgcccagctgtccta

SEQ ID NO: 1033513 - DNA, 15 bp, Homo sapiens
gcccagctgtcctag

SEQ ID NO: 1033514 - DNA, 15 bp, Homo sapiens
cccagctgtcctagc

SEQ ID NO: 1033515 - DNA, 15 bp, Homo sapiens
ccagctgtcctagcg

SEQ ID NO: 1033516 - DNA, 15 bp, Homo sapiens
cagctgtcctagcgg

SEQ ID NO: 1033517 - DNA, 15 bp, Homo sapiens
agctgtcctagcggc

SEQ ID NO: 1033518 - DNA, 15 bp, Homo sapiens
gctgtcctagcggca

SEQ ID NO: 1033519 - DNA, 15 bp, Homo sapiens
ctgtcctagcggcat

SEQ ID NO: 1033520 - DNA, 15 bp, Homo sapiens
tgtcctagcggcata

SEQ ID NO: 1033521 - DNA, 15 bp, Homo sapiens
gtcctagcggcatag

SEQ ID NO: 1033522 - DNA, 15 bp, Homo sapiens
tcctagcggcatagg

SEQ ID NO: 1033523 - DNA, 15 bp, Homo sapiens
cctagcggcatagga

SEQ ID NO: 1033524 - DNA, 15 bp, Homo sapiens
ctagcggcataggat

SEQ ID NO: 1033525 - DNA, 15 bp, Homo sapiens
tagcggcataggatg

SEQ ID NO: 1033526 - DNA, 15 bp, Homo sapiens
agcggcataggatgg

SEQ ID NO: 1033527 - DNA, 15 bp, Homo sapiens
gcggcataggatggt

SEQ ID NO: 1033528 - DNA, 15 bp, Homo sapiens
cggcataggatggtt

SEQ ID NO: 1033529 - DNA, 15 bp, Homo sapiens
ggcataggatggttg

SEQ ID NO: 1033530 - DNA, 15 bp, Homo sapiens
gcataggatggttgt

SEQ ID NO: 1033531 - DNA, 15 bp, Homo sapiens
cataggatggttgtg

SEQ ID NO: 1033532 - DNA, 15 bp, Homo sapiens
ataggatggttgtgt

SEQ ID NO: 1033533 - DNA, 15 bp, Homo sapiens
taggatggttgtgtg

SEQ ID NO: 1033534 - DNA, 15 bp, Homo sapiens
aggatggttgtgtgg

SEQ ID NO: 1033535 - DNA, 15 bp, Homo sapiens
ggatggttgtgtggt

SEQ ID NO: 1033536 - DNA, 15 bp, Homo sapiens
gatggttgtgtggta

SEQ ID NO: 1033537 - DNA, 15 bp, Homo sapiens
atggttgtgtggtag

SEQ ID NO: 1033538 - DNA, 15 bp, Homo sapiens
tggttgtgtggtaga

SEQ ID NO: 1033539 - DNA, 15 bp, Homo sapiens
ggttgtgtggtagac

SEQ ID NO: 1033540 - DNA, 15 bp, Homo sapiens
gttgtgtggtagacc

SEQ ID NO: 1033541 - DNA, 15 bp, Homo sapiens
ttgtgtggtagacca

SEQ ID NO: 1033542 - DNA, 15 bp, Homo sapiens
tgtgtggtagaccag

SEQ ID NO: 1033543 - DNA, 15 bp, Homo sapiens
gtgtggtagaccaga

SEQ ID NO: 1033544 - DNA, 15 bp, Homo sapiens
tgtggtagaccagag

SEQ ID NO: 1033545 - DNA, 15 bp, Homo sapiens
gtggtagaccagagg

SEQ ID NO: 1033546 - DNA, 15 bp, Homo sapiens
tggtagaccagaggc

SEQ ID NO: 1033547 - DNA, 15 bp, Homo sapiens
ggtagaccagaggcc

SEQ ID NO: 1033548 - DNA, 15 bp, Homo sapiens
gtagaccagaggcct

SEQ ID NO: 1033549 - DNA, 15 bp, Homo sapiens
tagaccagaggcctg

SEQ ID NO: 1033550 - DNA, 15 bp, Homo sapiens
agaccagaggcctgt

SEQ ID NO: 1033551 - DNA, 15 bp, Homo sapiens
gaccagaggcctgtt

SEQ ID NO: 1033552 - DNA, 15 bp, Homo sapiens
accagaggcctgttg

SEQ ID NO: 1033553 - DNA, 15 bp, Homo sapiens
ccagaggcctgttgt

SEQ ID NO: 1033554 - DNA, 15 bp, Homo sapiens
cagaggcctgttgtg

SEQ ID NO: 1033555 - DNA, 15 bp, Homo sapiens
agaggcctgttgtgt

SEQ ID NO: 1033556 - DNA, 15 bp, Homo sapiens
gaggcctgttgtgta

SEQ ID NO: 1033557 - DNA, 15 bp, Homo sapiens
aggcctgttgtgtat

SEQ ID NO: 1033558 - DNA, 15 bp, Homo sapiens
ggcctgttgtgtata

SEQ ID NO: 1033559 - DNA, 15 bp, Homo sapiens
gcctgttgtgtatat

SEQ ID NO: 1033560 - DNA, 15 bp, Homo sapiens
cctgttgtgtatatt

SEQ ID NO: 1033561 - DNA, 15 bp, Homo sapiens
ctgttgtgtatattt

SEQ ID NO: 1033562 - DNA, 15 bp, Homo sapiens
tgttgtgtatatttt

SEQ ID NO: 1033563 - DNA, 15 bp, Homo sapiens
gttgtgtatattttt

SEQ ID NO: 1033564 - DNA, 15 bp, Homo sapiens
ttgtgtatatttttg

SEQ ID NO: 1033565 - DNA, 15 bp, Homo sapiens
tgtgtatatttttgt

SEQ ID NO: 1033566 - DNA, 15 bp, Homo sapiens
gtgtatatttttgtt

SEQ ID NO: 1033567 - DNA, 15 bp, Homo sapiens
tgtatatttttgttg

SEQ ID NO: 1033568 - DNA, 15 bp, Homo sapiens
gtatatttttgttgg

SEQ ID NO: 1033569 - DNA, 15 bp, Homo sapiens
tatatttttgttggg

SEQ ID NO: 1033570 - DNA, 15 bp, Homo sapiens
atatttttgttgggt

SEQ ID NO: 1033571 - DNA, 15 bp, Homo sapiens
tatttttgttgggtt

SEQ ID NO: 1033572 - DNA, 15 bp, Homo sapiens
atttttgttgggtta

SEQ ID NO: 1033573 - DNA, 15 bp, Homo sapiens
tttttgttgggttat

SEQ ID NO: 1033574 - DNA, 15 bp, Homo sapiens
ttttgttgggttata

SEQ ID NO: 1033575 - DNA, 15 bp, Homo sapiens
tttgttgggttatag

SEQ ID NO: 1033576 - DNA, 15 bp, Homo sapiens
ttgttgggttatagc

SEQ ID NO: 1033577 - DNA, 15 bp, Homo sapiens
tgttgggttatagcc

SEQ ID NO: 1033578 - DNA, 15 bp, Homo sapiens
gttgggttatagcca

SEQ ID NO: 1033579 - DNA, 15 bp, Homo sapiens
ttgggttatagccac

SEQ ID NO: 1033580 - DNA, 15 bp, Homo sapiens
tgggttatagccacc

SEQ ID NO: 1033581 - DNA, 15 bp, Homo sapiens
gggttatagccaccc

SEQ ID NO: 1033582 - DNA, 15 bp, Homo sapiens
ggttatagccacccc

SEQ ID NO: 1033583 - DNA, 15 bp, Homo sapiens
gttatagccacccct

SEQ ID NO: 1033584 - DNA, 15 bp, Homo sapiens
ttatagccacccctg

SEQ ID NO: 1033585 - DNA, 15 bp, Homo sapiens
tatagccacccctgt

SEQ ID NO: 1033586 - DNA, 15 bp, Homo sapiens
atagccacccctgtg

SEQ ID NO: 1033587 - DNA, 15 bp, Homo sapiens
tagccacccctgtgt

SEQ ID NO: 1033588 - DNA, 15 bp, Homo sapiens
agccacccctgtgta

SEQ ID NO: 1033589 - DNA, 15 bp, Homo sapiens
gccacccctgtgtat

SEQ ID NO: 1033590 - DNA, 15 bp, Homo sapiens
ccacccctgtgtatc

SEQ ID NO: 1033591 - DNA, 15 bp, Homo sapiens
cacccctgtgtatct

SEQ ID NO: 1033592 - DNA, 15 bp, Homo sapiens
acccctgtgtatcta

SEQ ID NO: 1033593 - DNA, 15 bp, Homo sapiens
cccctgtgtatctac

SEQ ID NO: 1033594 - DNA, 15 bp, Homo sapiens
ccctgtgtatctaca

SEQ ID NO: 1033595 - DNA, 15 bp, Homo sapiens
cctgtgtatctacat

SEQ ID NO: 1033596 - DNA, 15 bp, Homo sapiens
ctgtgtatctacatg

SEQ ID NO: 1033597 - DNA, 15 bp, Homo sapiens
tgtgtatctacatgc

SEQ ID NO: 1033598 - DNA, 15 bp, Homo sapiens
gtgtatctacatgca

SEQ ID NO: 1033599 - DNA, 15 bp, Homo sapiens
tgtatctacatgcac

SEQ ID NO: 1033600 - DNA, 15 bp, Homo sapiens
gtatctacatgcaca

SEQ ID NO: 1033601 - DNA, 15 bp, Homo sapiens
tatctacatgcacaa

SEQ ID NO: 1033602 - DNA, 15 bp, Homo sapiens
atctacatgcacaag

SEQ ID NO: 1033603 - DNA, 15 bp, Homo sapiens
tctacatgcacaagg

SEQ ID NO: 1033604 - DNA, 15 bp, Homo sapiens
ctacatgcacaaggg

SEQ ID NO: 1033605 - DNA, 15 bp, Homo sapiens
tacatgcacaagggc

SEQ ID NO: 1033606 - DNA, 15 bp, Homo sapiens
acatgcacaagggca

SEQ ID NO: 1033607 - DNA, 15 bp, Homo sapiens
catgcacaagggcag

SEQ ID NO: 1033608 - DNA, 15 bp, Homo sapiens
atgcacaagggcaga

SEQ ID NO: 1033609 - DNA, 15 bp, Homo sapiens
tgcacaagggcagag

SEQ ID NO: 1033610 - DNA, 15 bp, Homo sapiens
gcacaagggcagagt

SEQ ID NO: 1033611 - DNA, 15 bp, Homo sapiens
cacaagggcagagtt

SEQ ID NO: 1033612 - DNA, 15 bp, Homo sapiens
acaagggcagagttg

SEQ ID NO: 1033613 - DNA, 15 bp, Homo sapiens
caagggcagagttgt

SEQ ID NO: 1033614 - DNA, 15 bp, Homo sapiens
aagggcagagttgta

SEQ ID NO: 1033615 - DNA, 15 bp, Homo sapiens
agggcagagttgtag

SEQ ID NO: 1033616 - DNA, 15 bp, Homo sapiens
gggcagagttgtagt

SEQ ID NO: 1033617 - DNA, 15 bp, Homo sapiens
ggcagagttgtagtt

SEQ ID NO: 1033618 - DNA, 15 bp, Homo sapiens
gcagagttgtagttg

SEQ ID NO: 1033619 - DNA, 15 bp, Homo sapiens
cagagttgtagttgt

SEQ ID NO: 1033620 - DNA, 15 bp, Homo sapiens
agagttgtagttgtg

SEQ ID NO: 1033621 - DNA, 15 bp, Homo sapiens
gagttgtagttgtgg

SEQ ID NO: 1033622 - DNA, 15 bp, Homo sapiens
agttgtagttgtggc

SEQ ID NO: 1033623 - DNA, 15 bp, Homo sapiens
gttgtagttgtggca

SEQ ID NO: 1033624 - DNA, 15 bp, Homo sapiens
ttgtagttgtggcag

SEQ ID NO: 1033625 - DNA, 15 bp, Homo sapiens
tgtagttgtggcaga

SEQ ID NO: 1033626 - DNA, 15 bp, Homo sapiens
gtagttgtggcagaa

SEQ ID NO: 1033627 - DNA, 15 bp, Homo sapiens
tagttgtggcagaag

SEQ ID NO: 1033628 - DNA, 15 bp, Homo sapiens
agttgtggcagaagc

SEQ ID NO: 1033629 - DNA, 15 bp, Homo sapiens
gttgtggcagaagct

SEQ ID NO: 1033630 - DNA, 15 bp, Homo sapiens
ttgtggcagaagctg

SEQ ID NO: 1033631 - DNA, 15 bp, Homo sapiens
tgtggcagaagctgt

SEQ ID NO: 1033632 - DNA, 15 bp, Homo sapiens
gtggcagaagctgta

SEQ ID NO: 1033633 - DNA, 15 bp, Homo sapiens
tggcagaagctgtag

SEQ ID NO: 1033634 - DNA, 15 bp, Homo sapiens
ggcagaagctgtagc

SEQ ID NO: 1033635 - DNA, 15 bp, Homo sapiens
gcagaagctgtagcc

SEQ ID NO: 1033636 - DNA, 15 bp, Homo sapiens
cagaagctgtagcct

SEQ ID NO: 1033637 - DNA, 15 bp, Homo sapiens
agaagctgtagccta

SEQ ID NO: 1033638 - DNA, 15 bp, Homo sapiens
gaagctgtagcctac

SEQ ID NO: 1033639 - DNA, 15 bp, Homo sapiens
aagctgtagcctaca

SEQ ID NO: 1033640 - DNA, 15 bp, Homo sapiens
agctgtagcctacaa

SEQ ID NO: 1033641 - DNA, 15 bp, Homo sapiens
gctgtagcctacaaa

SEQ ID NO: 1033642 - DNA, 15 bp, Homo sapiens
ctgtagcctacaaag

SEQ ID NO: 1033643 - DNA, 15 bp, Homo sapiens
tgtagcctacaaagc

SEQ ID NO: 1033644 - DNA, 15 bp, Homo sapiens
gtagcctacaaagcc

SEQ ID NO: 1033645 - DNA, 15 bp, Homo sapiens
tagcctacaaagcct

SEQ ID NO: 1033646 - DNA, 15 bp, Homo sapiens
agcctacaaagcctg

SEQ ID NO: 1033647 - DNA, 15 bp, Homo sapiens
gcctacaaagcctga

SEQ ID NO: 1033648 - DNA, 15 bp, Homo sapiens
cctacaaagcctgaa

SEQ ID NO: 1033649 - DNA, 15 bp, Homo sapiens
ctacaaagcctgaaa

SEQ ID NO: 1033650 - DNA, 15 bp, Homo sapiens
tacaaagcctgaaat

SEQ ID NO: 1033651 - DNA, 15 bp, Homo sapiens
acaaagcctgaaata

SEQ ID NO: 1033652 - DNA, 15 bp, Homo sapiens
caaagcctgaaatat

SEQ ID NO: 1033653 - DNA, 15 bp, Homo sapiens
aaagcctgaaatatt

SEQ ID NO: 1033654 - DNA, 15 bp, Homo sapiens
aagcctgaaatattt

SEQ ID NO: 1033655 - DNA, 15 bp, Homo sapiens
agcctgaaatatttc

SEQ ID NO: 1033656 - DNA, 15 bp, Homo sapiens
gcctgaaatatttcc

SEQ ID NO: 1033657 - DNA, 15 bp, Homo sapiens
cctgaaatatttcct

SEQ ID NO: 1033658 - DNA, 15 bp, Homo sapiens
ctgaaatatttccta

SEQ ID NO: 1033659 - DNA, 15 bp, Homo sapiens
tgaaatatttcctac

SEQ ID NO: 1033660 - DNA, 15 bp, Homo sapiens
gaaatatttcctacc

SEQ ID NO: 1033661 - DNA, 15 bp, Homo sapiens
aaatatttcctacct

SEQ ID NO: 1033662 - DNA, 15 bp, Homo sapiens
aatatttcctacctg

SEQ ID NO: 1033663 - DNA, 15 bp, Homo sapiens
atatttcctacctga

SEQ ID NO: 1033664 - DNA, 15 bp, Homo sapiens
tatttcctacctgac

SEQ ID NO: 1033665 - DNA, 15 bp, Homo sapiens
atttcctacctgacc

SEQ ID NO: 1033666 - DNA, 15 bp, Homo sapiens
tttcctacctgaccc

SEQ ID NO: 1033667 - DNA, 15 bp, Homo sapiens
ttcctacctgaccct

SEQ ID NO: 1033668 - DNA, 15 bp, Homo sapiens
tcctacctgaccctt

SEQ ID NO: 1033669 - DNA, 15 bp, Homo sapiens
cctacctgacccttt

SEQ ID NO: 1033670 - DNA, 15 bp, Homo sapiens
ctacctgacccttta

SEQ ID NO: 1033671 - DNA, 15 bp, Homo sapiens
tacctgaccctttat

SEQ ID NO: 1033672 - DNA, 15 bp, Homo sapiens
acctgaccctttatt

SEQ ID NO: 1033673 - DNA, 15 bp, Homo sapiens
cctgaccctttatta

SEQ ID NO: 1033674 - DNA, 15 bp, Homo sapiens
ctgaccctttattat

SEQ ID NO: 1033675 - DNA, 15 bp, Homo sapiens
tgaccctttattatt

SEQ ID NO: 1033676 - DNA, 15 bp, Homo sapiens
gaccctttattattt

SEQ ID NO: 1033677 - DNA, 15 bp, Homo sapiens
accctttattattta

SEQ ID NO: 1033678 - DNA, 15 bp, Homo sapiens
ccctttattatttat

SEQ ID NO: 1033679 - DNA, 15 bp, Homo sapiens
cctttattatttatt

SEQ ID NO: 1033680 - DNA, 15 bp, Homo sapiens
ctttattatttattt

SEQ ID NO: 1033681 - DNA, 15 bp, Homo sapiens
tttattatttatttt

SEQ ID NO: 1033682 - DNA, 15 bp, Homo sapiens
ttattatttattttc

SEQ ID NO: 1033683 - DNA, 15 bp, Homo sapiens
tattatttattttca

SEQ ID NO: 1033684 - DNA, 15 bp, Homo sapiens
attatttattttcag

SEQ ID NO: 1033685 - DNA, 15 bp, Homo sapiens
ttatttattttcagg

SEQ ID NO: 1033686 - DNA, 15 bp, Homo sapiens
tatttattttcaggg

SEQ ID NO: 1033687 - DNA, 15 bp, Homo sapiens
atttattttcaggga

SEQ ID NO: 1033688 - DNA, 15 bp, Homo sapiens
tttattttcagggac

SEQ ID NO: 1033689 - DNA, 15 bp, Homo sapiens
ttattttcagggaca

SEQ ID NO: 1033690 - DNA, 15 bp, Homo sapiens
tattttcagggacag

SEQ ID NO: 1033691 - DNA, 15 bp, Homo sapiens
attttcagggacagg

SEQ ID NO: 1033692 - DNA, 15 bp, Homo sapiens
ttttcagggacaggg

SEQ ID NO: 1033693 - DNA, 15 bp, Homo sapiens
tttcagggacagggt

SEQ ID NO: 1033694 - DNA, 15 bp, Homo sapiens
ttcagggacagggtc

SEQ ID NO: 1033695 - DNA, 15 bp, Homo sapiens
tcagggacagggtct

SEQ ID NO: 1033696 - DNA, 15 bp, Homo sapiens
cagggacagggtcta

SEQ ID NO: 1033697 - DNA, 15 bp, Homo sapiens
agggacagggtctag

SEQ ID NO: 1033698 - DNA, 15 bp, Homo sapiens
gggacagggtctagg

SEQ ID NO: 1033699 - DNA, 15 bp, Homo sapiens
ggacagggtctaggc

SEQ ID NO: 1033700 - DNA, 15 bp, Homo sapiens
gacagggtctaggcc

SEQ ID NO: 1033701 - DNA, 15 bp, Homo sapiens
acagggtctaggcct

SEQ ID NO: 1033702 - DNA, 15 bp, Homo sapiens
cagggtctaggcctg

SEQ ID NO: 1033703 - DNA, 15 bp, Homo sapiens
agggtctaggcctgt

SEQ ID NO: 1033704 - DNA, 15 bp, Homo sapiens
gggtctaggcctgtc

SEQ ID NO: 1033705 - DNA, 15 bp, Homo sapiens
ggtctaggcctgtca

SEQ ID NO: 1033706 - DNA, 15 bp, Homo sapiens
gtctaggcctgtcac

SEQ ID NO: 1033707 - DNA, 15 bp, Homo sapiens
tctaggcctgtcacc

SEQ ID NO: 1033708 - DNA, 15 bp, Homo sapiens
ctaggcctgtcaccc

SEQ ID NO: 1033709 - DNA, 15 bp, Homo sapiens
taggcctgtcaccca

SEQ ID NO: 1033710 - DNA, 15 bp, Homo sapiens
aggcctgtcacccag

SEQ ID NO: 1033711 - DNA, 15 bp, Homo sapiens
ggcctgtcacccagg

SEQ ID NO: 1033712 - DNA, 15 bp, Homo sapiens
gcctgtcacccaggt

SEQ ID NO: 1033713 - DNA, 15 bp, Homo sapiens
cctgtcacccaggtt

SEQ ID NO: 1033714 - DNA, 15 bp, Homo sapiens
ctgtcacccaggttg

SEQ ID NO: 1033715 - DNA, 15 bp, Homo sapiens
tgtcacccaggttgg

SEQ ID NO: 1033716 - DNA, 15 bp, Homo sapiens
gtcacccaggttgga

SEQ ID NO: 1033717 - DNA, 15 bp, Homo sapiens
tcacccaggttggag

SEQ ID NO: 1033718 - DNA, 15 bp, Homo sapiens
cacccaggttggagt

SEQ ID NO: 1033719 - DNA, 15 bp, Homo sapiens
acccaggttggagtg

SEQ ID NO: 1033720 - DNA, 15 bp, Homo sapiens
cccaggttggagtgc

SEQ ID NO: 1033721 - DNA, 15 bp, Homo sapiens
ccaggttggagtgca

SEQ ID NO: 1033722 - DNA, 15 bp, Homo sapiens
caggttggagtgcag

SEQ ID NO: 1033723 - DNA, 15 bp, Homo sapiens
aggttggagtgcagt

SEQ ID NO: 1033724 - DNA, 15 bp, Homo sapiens
ggttggagtgcagtg

SEQ ID NO: 1033725 - DNA, 15 bp, Homo sapiens
gttggagtgcagtgg

SEQ ID NO: 1033726 - DNA, 15 bp, Homo sapiens
ttggagtgcagtggc

SEQ ID NO: 1033727 - DNA, 15 bp, Homo sapiens
tggagtgcagtggca

SEQ ID NO: 1033728 - DNA, 15 bp, Homo sapiens
ggagtgcagtggcac

SEQ ID NO: 1033729 - DNA, 15 bp, Homo sapiens
gagtgcagtggcaca

SEQ ID NO: 1033730 - DNA, 15 bp, Homo sapiens
agtgcagtggcacaa

SEQ ID NO: 1033731 - DNA, 15 bp, Homo sapiens
gtgcagtggcacaat

SEQ ID NO: 1033732 - DNA, 15 bp, Homo sapiens
tgcagtggcacaatt

SEQ ID NO: 1033733 - DNA, 15 bp, Homo sapiens
gcagtggcacaatta

SEQ ID NO: 1033734 - DNA, 15 bp, Homo sapiens
cagtggcacaattat

SEQ ID NO: 1033735 - DNA, 15 bp, Homo sapiens
agtggcacaattata

SEQ ID NO: 1033736 - DNA, 15 bp, Homo sapiens
gtggcacaattatag

SEQ ID NO: 1033737 - DNA, 15 bp, Homo sapiens
tggcacaattatagc

SEQ ID NO: 1033738 - DNA, 15 bp, Homo sapiens
ggcacaattatagct

SEQ ID NO: 1033739 - DNA, 15 bp, Homo sapiens
gcacaattatagctc

SEQ ID NO: 1033740 - DNA, 15 bp, Homo sapiens
cacaattatagctca

SEQ ID NO: 1033741 - DNA, 15 bp, Homo sapiens
acaattatagctcac

SEQ ID NO: 1033742 - DNA, 15 bp, Homo sapiens
caattatagctcact

SEQ ID NO: 1033743 - DNA, 15 bp, Homo sapiens
aattatagctcactg

SEQ ID NO: 1033744 - DNA, 15 bp, Homo sapiens
attatagctcactgc

SEQ ID NO: 1033745 - DNA, 15 bp, Homo sapiens
ttatagctcactgca

SEQ ID NO: 1033746 - DNA, 15 bp, Homo sapiens
tatagctcactgcag

SEQ ID NO: 1033747 - DNA, 15 bp, Homo sapiens
atagctcactgcagc

SEQ ID NO: 1033748 - DNA, 15 bp, Homo sapiens
tagctcactgcagct

SEQ ID NO: 1033749 - DNA, 15 bp, Homo sapiens
agctcactgcagctt

SEQ ID NO: 1033750 - DNA, 15 bp, Homo sapiens
gctcactgcagcttc

SEQ ID NO: 1033751 - DNA, 15 bp, Homo sapiens
ctcactgcagcttct

SEQ ID NO: 1033752 - DNA, 15 bp, Homo sapiens
tcactgcagcttctt

SEQ ID NO: 1033753 - DNA, 15 bp, Homo sapiens
cactgcagcttcttg

SEQ ID NO: 1033754 - DNA, 15 bp, Homo sapiens
actgcagcttcttgg

SEQ ID NO: 1033755 - DNA, 15 bp, Homo sapiens
ctgcagcttcttggg

SEQ ID NO: 1033756 - DNA, 15 bp, Homo sapiens
tgcagcttcttgggc

SEQ ID NO: 1033757 - DNA, 15 bp, Homo sapiens
gcagcttcttgggct

SEQ ID NO: 1033758 - DNA, 15 bp, Homo sapiens
cagcttcttgggctc

SEQ ID NO: 1033759 - DNA, 15 bp, Homo sapiens
agcttcttgggctca

SEQ ID NO: 1033760 - DNA, 15 bp, Homo sapiens
gcttcttgggctcaa

SEQ ID NO: 1033761 - DNA, 15 bp, Homo sapiens
cttcttgggctcaag

SEQ ID NO: 1033762 - DNA, 15 bp, Homo sapiens
ttcttgggctcaagt

SEQ ID NO: 1033763 - DNA, 15 bp, Homo sapiens
tcttgggctcaagtg

SEQ ID NO: 1033764 - DNA, 15 bp, Homo sapiens
cttgggctcaagtga

SEQ ID NO: 1033765 - DNA, 15 bp, Homo sapiens
ttgggctcaagtgat

SEQ ID NO: 1033766 - DNA, 15 bp, Homo sapiens
tgggctcaagtgatc

SEQ ID NO: 1033767 - DNA, 15 bp, Homo sapiens
gggctcaagtgatcc

SEQ ID NO: 1033768 - DNA, 15 bp, Homo sapiens
ggctcaagtgatcct

SEQ ID NO: 1033769 - DNA, 15 bp, Homo sapiens
gctcaagtgatcctc

SEQ ID NO: 1033770 - DNA, 15 bp, Homo sapiens
ctcaagtgatcctcc

SEQ ID NO: 1033771 - DNA, 15 bp, Homo sapiens
tcaagtgatcctcct

SEQ ID NO: 1033772 - DNA, 15 bp, Homo sapiens
caagtgatcctcctg

SEQ ID NO: 1033773 - DNA, 15 bp, Homo sapiens
aagtgatcctcctgc

SEQ ID NO: 1033774 - DNA, 15 bp, Homo sapiens
agtgatcctcctgcc

SEQ ID NO: 1033775 - DNA, 15 bp, Homo sapiens
gtgatcctcctgccc

SEQ ID NO: 1033776 - DNA, 15 bp, Homo sapiens
tgatcctcctgcccc

SEQ ID NO: 1033777 - DNA, 15 bp, Homo sapiens
gatcctcctgcccca

SEQ ID NO: 1033778 - DNA, 15 bp, Homo sapiens
atcctcctgccccac

SEQ ID NO: 1033779 - DNA, 15 bp, Homo sapiens
tcctcctgccccacc

SEQ ID NO: 1033780 - DNA, 15 bp, Homo sapiens
cctcctgccccaccc

SEQ ID NO: 1033781 - DNA, 15 bp, Homo sapiens
ctcctgccccaccct

SEQ ID NO: 1033782 - DNA, 15 bp, Homo sapiens
tcctgccccaccctc

SEQ ID NO: 1033783 - DNA, 15 bp, Homo sapiens
cctgccccaccctcc

SEQ ID NO: 1033784 - DNA, 15 bp, Homo sapiens
ctgccccaccctcct

SEQ ID NO: 1033785 - DNA, 15 bp, Homo sapiens
tgccccaccctccta

SEQ ID NO: 1033786 - DNA, 15 bp, Homo sapiens
gccccaccctcctaa

SEQ ID NO: 1033787 - DNA, 15 bp, Homo sapiens
ccccaccctcctaag

SEQ ID NO: 1033788 - DNA, 15 bp, Homo sapiens
cccaccctcctaagt

SEQ ID NO: 1033789 - DNA, 15 bp, Homo sapiens
ccaccctcctaagta

SEQ ID NO: 1033790 - DNA, 15 bp, Homo sapiens
caccctcctaagtag

SEQ ID NO: 1033791 - DNA, 15 bp, Homo sapiens
accctcctaagtagc

SEQ ID NO: 1033792 - DNA, 15 bp, Homo sapiens
ccctcctaagtagct

SEQ ID NO: 1033793 - DNA, 15 bp, Homo sapiens
cctcctaagtagctg

SEQ ID NO: 1033794 - DNA, 15 bp, Homo sapiens
ctcctaagtagctgg

SEQ ID NO: 1033795 - DNA, 15 bp, Homo sapiens
tcctaagtagctggg

SEQ ID NO: 1033796 - DNA, 15 bp, Homo sapiens
cctaagtagctggga

SEQ ID NO: 1033797 - DNA, 15 bp, Homo sapiens
ctaagtagctgggac

SEQ ID NO: 1033798 - DNA, 15 bp, Homo sapiens
taagtagctgggact

SEQ ID NO: 1033799 - DNA, 15 bp, Homo sapiens
aagtagctgggacta

SEQ ID NO: 1033800 - DNA, 15 bp, Homo sapiens
gctgggactacaggt

SEQ ID NO: 1033801 - DNA, 15 bp, Homo sapiens
ctgggactacaggtg

SEQ ID NO: 1033802 - DNA, 15 bp, Homo sapiens
tgggactacaggtgc

SEQ ID NO: 1033803 - DNA, 15 bp, Homo sapiens
gggactacaggtgcc

SEQ ID NO: 1033804 - DNA, 15 bp, Homo sapiens
ggactacaggtgcct

SEQ ID NO: 1033805 - DNA, 15 bp, Homo sapiens
gactacaggtgccta

SEQ ID NO: 1033806 - DNA, 15 bp, Homo sapiens
actacaggtgcctat

SEQ ID NO: 1033807 - DNA, 15 bp, Homo sapiens
ctacaggtgcctatc

SEQ ID NO: 1033808 - DNA, 15 bp, Homo sapiens
tacaggtgcctatca

SEQ ID NO: 1033809 - DNA, 15 bp, Homo sapiens
acaggtgcctatcag

SEQ ID NO: 1033810 - DNA, 15 bp, Homo sapiens
caggtgcctatcagt

SEQ ID NO: 1033811 - DNA, 15 bp, Homo sapiens
aggtgcctatcagtc

SEQ ID NO: 1033812 - DNA, 15 bp, Homo sapiens
ggtgcctatcagtca

SEQ ID NO: 1033813 - DNA, 15 bp, Homo sapiens
gtgcctatcagtcac

SEQ ID NO: 1033814 - DNA, 15 bp, Homo sapiens
tgcctatcagtcacc

SEQ ID NO: 1033815 - DNA, 15 bp, Homo sapiens
gcctatcagtcacca

SEQ ID NO: 1033816 - DNA, 15 bp, Homo sapiens
cctatcagtcaccat

SEQ ID NO: 1033817 - DNA, 15 bp, Homo sapiens
ctatcagtcaccatg

SEQ ID NO: 1033818 - DNA, 15 bp, Homo sapiens
tatcagtcaccatgc

SEQ ID NO: 1033819 - DNA, 15 bp, Homo sapiens
atcagtcaccatgcc

SEQ ID NO: 1033820 - DNA, 15 bp, Homo sapiens
tcagtcaccatgcct

SEQ ID NO: 1033821 - DNA, 15 bp, Homo sapiens
cagtcaccatgccta

SEQ ID NO: 1033822 - DNA, 15 bp, Homo sapiens
agtcaccatgcctag

SEQ ID NO: 1033823 - DNA, 15 bp, Homo sapiens
gtcaccatgcctagc

SEQ ID NO: 1033824 - DNA, 15 bp, Homo sapiens
tcaccatgcctagct

SEQ ID NO: 1033825 - DNA, 15 bp, Homo sapiens
caccatgcctagcta

SEQ ID NO: 1033826 - DNA, 15 bp, Homo sapiens
accatgcctagctaa

SEQ ID NO: 1033827 - DNA, 15 bp, Homo sapiens
ccatgcctagctaat

SEQ ID NO: 1033828 - DNA, 15 bp, Homo sapiens
catgcctagctaatt

SEQ ID NO: 1033829 - DNA, 15 bp, Homo sapiens
atgcctagctaattt

SEQ ID NO: 1033830 - DNA, 15 bp, Homo sapiens
tgcctagctaatttt

SEQ ID NO: 1033831 - DNA, 15 bp, Homo sapiens
gcctagctaattttt

SEQ ID NO: 1033832 - DNA, 15 bp, Homo sapiens
cctagctaatttttt

SEQ ID NO: 1033833 - DNA, 15 bp, Homo sapiens
ctagctaattttttt

SEQ ID NO: 1033834 - DNA, 15 bp, Homo sapiens
tagctaatttttttt

SEQ ID NO: 1033835 - DNA, 15 bp, Homo sapiens
agctaatttttttta

SEQ ID NO: 1033836 - DNA, 15 bp, Homo sapiens
gctaattttttttat

SEQ ID NO: 1033837 - DNA, 15 bp, Homo sapiens
ctaattttttttatt

SEQ ID NO: 1033838 - DNA, 15 bp, Homo sapiens
taattttttttattt

SEQ ID NO: 1033839 - DNA, 15 bp, Homo sapiens
aattttttttatttg

SEQ ID NO: 1033840 - DNA, 15 bp, Homo sapiens
attttttttatttgt

SEQ ID NO: 1033841 - DNA, 15 bp, Homo sapiens
ttttttttatttgta

SEQ ID NO: 1033842 - DNA, 15 bp, Homo sapiens
tttttttatttgtag

SEQ ID NO: 1033843 - DNA, 15 bp, Homo sapiens
ttttttatttgtaga

SEQ ID NO: 1033844 - DNA, 15 bp, Homo sapiens
tttttatttgtagag

SEQ ID NO: 1033845 - DNA, 15 bp, Homo sapiens
ttttatttgtagaga

SEQ ID NO: 1033846 - DNA, 15 bp, Homo sapiens
tttatttgtagagat

SEQ ID NO: 1033847 - DNA, 15 bp, Homo sapiens
ttatttgtagagatg

SEQ ID NO: 1033848 - DNA, 15 bp, Homo sapiens
tatttgtagagatgg

SEQ ID NO: 1033849 - DNA, 15 bp, Homo sapiens
atttgtagagatgga

SEQ ID NO: 1033850 - DNA, 15 bp, Homo sapiens
tttgtagagatggag

SEQ ID NO: 1033851 - DNA, 15 bp, Homo sapiens
ttgtagagatggagt

SEQ ID NO: 1033852 - DNA, 15 bp, Homo sapiens
tgtagagatggagtc

SEQ ID NO: 1033853 - DNA, 15 bp, Homo sapiens
gtagagatggagtct

SEQ ID NO: 1033854 - DNA, 15 bp, Homo sapiens
tagagatggagtctc

SEQ ID NO: 1033855 - DNA, 15 bp, Homo sapiens
agagatggagtctca

SEQ ID NO: 1033856 - DNA, 15 bp, Homo sapiens
gagatggagtctcac

SEQ ID NO: 1033857 - DNA, 15 bp, Homo sapiens
agatggagtctcact

SEQ ID NO: 1033858 - DNA, 15 bp, Homo sapiens
gatggagtctcacta

SEQ ID NO: 1033859 - DNA, 15 bp, Homo sapiens
atggagtctcactat

SEQ ID NO: 1033860 - DNA, 15 bp, Homo sapiens
tggagtctcactatg

SEQ ID NO: 1033861 - DNA, 15 bp, Homo sapiens
ggagtctcactatgt

SEQ ID NO: 1033862 - DNA, 15 bp, Homo sapiens
gagtctcactatgtt

SEQ ID NO: 1033863 - DNA, 15 bp, Homo sapiens
agtctcactatgttg

SEQ ID NO: 1033864 - DNA, 15 bp, Homo sapiens
gtctcactatgttga

SEQ ID NO: 1033865 - DNA, 15 bp, Homo sapiens
tctcactatgttgaa

SEQ ID NO: 1033866 - DNA, 15 bp, Homo sapiens
ctcactatgttgaac

SEQ ID NO: 1033867 - DNA, 15 bp, Homo sapiens
tcactatgttgaact

SEQ ID NO: 1033868 - DNA, 15 bp, Homo sapiens
cactatgttgaactc

SEQ ID NO: 1033869 - DNA, 15 bp, Homo sapiens
actatgttgaactcc

SEQ ID NO: 1033870 - DNA, 15 bp, Homo sapiens
ctatgttgaactccc

SEQ ID NO: 1033871 - DNA, 15 bp, Homo sapiens
tatgttgaactccca

SEQ ID NO: 1033872 - DNA, 15 bp, Homo sapiens
atgttgaactcccaa

SEQ ID NO: 1033873 - DNA, 15 bp, Homo sapiens
tgttgaactcccaag

SEQ ID NO: 1033874 - DNA, 15 bp, Homo sapiens
gttgaactcccaagc

SEQ ID NO: 1033875 - DNA, 15 bp, Homo sapiens
ttgaactcccaagct

SEQ ID NO: 1033876 - DNA, 15 bp, Homo sapiens
tgaactcccaagctc

SEQ ID NO: 1033877 - DNA, 15 bp, Homo sapiens
gaactcccaagctca

SEQ ID NO: 1033878 - DNA, 15 bp, Homo sapiens
aactcccaagctcaa

SEQ ID NO: 1033879 - DNA, 15 bp, Homo sapiens
actcccaagctcaag

SEQ ID NO: 1033880 - DNA, 15 bp, Homo sapiens
ctcccaagctcaagc

SEQ ID NO: 1033881 - DNA, 15 bp, Homo sapiens
tcccaagctcaagcg

SEQ ID NO: 1033882 - DNA, 15 bp, Homo sapiens
cccaagctcaagcgg

SEQ ID NO: 1033883 - DNA, 15 bp, Homo sapiens
ccaagctcaagcggt

SEQ ID NO: 1033884 - DNA, 15 bp, Homo sapiens
caagctcaagcggtc

SEQ ID NO: 1033885 - DNA, 15 bp, Homo sapiens
aagctcaagcggtcc

SEQ ID NO: 1033886 - DNA, 15 bp, Homo sapiens
agctcaagcggtcct

SEQ ID NO: 1033887 - DNA, 15 bp, Homo sapiens
gctcaagcggtcctc

SEQ ID NO: 1033888 - DNA, 15 bp, Homo sapiens
ctcaagcggtcctcc

SEQ ID NO: 1033889 - DNA, 15 bp, Homo sapiens
tcaagcggtcctccc

SEQ ID NO: 1033890 - DNA, 15 bp, Homo sapiens
caagcggtcctcccg

SEQ ID NO: 1033891 - DNA, 15 bp, Homo sapiens
aagcggtcctcccgc

SEQ ID NO: 1033892 - DNA, 15 bp, Homo sapiens
agcggtcctcccgcc

SEQ ID NO: 1033893 - DNA, 15 bp, Homo sapiens
gcggtcctcccgcct

SEQ ID NO: 1033894 - DNA, 15 bp, Homo sapiens
cggtcctcccgcctc

SEQ ID NO: 1033895 - DNA, 15 bp, Homo sapiens
ggtcctcccgcctca

SEQ ID NO: 1033896 - DNA, 15 bp, Homo sapiens
gtcctcccgcctcag

SEQ ID NO: 1033897 - DNA, 15 bp, Homo sapiens
tcctcccgcctcagc

SEQ ID NO: 1033898 - DNA, 15 bp, Homo sapiens
cctcccgcctcagcc

SEQ ID NO: 1033899 - DNA, 15 bp, Homo sapiens
ctcccgcctcagcct

SEQ ID NO: 1033900 - DNA, 15 bp, Homo sapiens
tcccgcctcagcctt

SEQ ID NO: 1033901 - DNA, 15 bp, Homo sapiens
cccgcctcagccttc

SEQ ID NO: 1033902 - DNA, 15 bp, Homo sapiens
ccgcctcagccttcc

SEQ ID NO: 1033903 - DNA, 15 bp, Homo sapiens
cgcctcagccttcca

SEQ ID NO: 1033904 - DNA, 15 bp, Homo sapiens
gcctcagccttccaa

SEQ ID NO: 1033905 - DNA, 15 bp, Homo sapiens
cctcagccttccaaa

SEQ ID NO: 1033906 - DNA, 15 bp, Homo sapiens
ctcagccttccaaag

SEQ ID NO: 1033907 - DNA, 15 bp, Homo sapiens
tcagccttccaaagc

SEQ ID NO: 1033908 - DNA, 15 bp, Homo sapiens
cagccttccaaagca

SEQ ID NO: 1033909 - DNA, 15 bp, Homo sapiens
agccttccaaagcac

SEQ ID NO: 1033910 - DNA, 15 bp, Homo sapiens
gccttccaaagcact

SEQ ID NO: 1033911 - DNA, 15 bp, Homo sapiens
ccttccaaagcactg

SEQ ID NO: 1033912 - DNA, 15 bp, Homo sapiens
cttccaaagcactgg

SEQ ID NO: 1033913 - DNA, 15 bp, Homo sapiens
ttccaaagcactggg

SEQ ID NO: 1033914 - DNA, 15 bp, Homo sapiens
tccaaagcactggga

SEQ ID NO: 1033915 - DNA, 15 bp, Homo sapiens
ccaaagcactgggat

SEQ ID NO: 1033916 - DNA, 15 bp, Homo sapiens
caaagcactgggatt

SEQ ID NO: 1033917 - DNA, 15 bp, Homo sapiens
aaagcactgggatta

SEQ ID NO: 1033918 - DNA, 15 bp, Homo sapiens
aagcactgggattac

SEQ ID NO: 1033919 - DNA, 15 bp, Homo sapiens
agcactgggattaca

SEQ ID NO: 1033920 - DNA, 15 bp, Homo sapiens
gcactgggattacag

SEQ ID NO: 1033921 - DNA, 15 bp, Homo sapiens
cactgggattacagg

SEQ ID NO: 1033922 - DNA, 15 bp, Homo sapiens
actgggattacaggc

SEQ ID NO: 1033923 - DNA, 15 bp, Homo sapiens
tgggattacaggcaa

SEQ ID NO: 1033924 - DNA, 15 bp, Homo sapiens
gggattacaggcaaa

SEQ ID NO: 1033925 - DNA, 15 bp, Homo sapiens
ggattacaggcaaag

SEQ ID NO: 1033926 - DNA, 15 bp, Homo sapiens
gattacaggcaaagt

SEQ ID NO: 1033927 - DNA, 15 bp, Homo sapiens
attacaggcaaagtt

SEQ ID NO: 1033928 - DNA, 15 bp, Homo sapiens
ttacaggcaaagttg

SEQ ID NO: 1033929 - DNA, 15 bp, Homo sapiens
tacaggcaaagttga

SEQ ID NO: 1033930 - DNA, 15 bp, Homo sapiens
acaggcaaagttgac

SEQ ID NO: 1033931 - DNA, 15 bp, Homo sapiens
caggcaaagttgacc

SEQ ID NO: 1033932 - DNA, 15 bp, Homo sapiens
aggcaaagttgacca

SEQ ID NO: 1033933 - DNA, 15 bp, Homo sapiens
ggcaaagttgaccag

SEQ ID NO: 1033934 - DNA, 15 bp, Homo sapiens
gcaaagttgaccagc

SEQ ID NO: 1033935 - DNA, 15 bp, Homo sapiens
caaagttgaccagcc

SEQ ID NO: 1033936 - DNA, 15 bp, Homo sapiens
aaagttgaccagcct

SEQ ID NO: 1033937 - DNA, 15 bp, Homo sapiens
aagttgaccagcctc

SEQ ID NO: 1033938 - DNA, 15 bp, Homo sapiens
agttgaccagcctct

SEQ ID NO: 1033939 - DNA, 15 bp, Homo sapiens
gttgaccagcctcta

SEQ ID NO: 1033940 - DNA, 15 bp, Homo sapiens
ttgaccagcctctat

SEQ ID NO: 1033941 - DNA, 15 bp, Homo sapiens
tgaccagcctctatt

SEQ ID NO: 1033942 - DNA, 15 bp, Homo sapiens
gaccagcctctattc

SEQ ID NO: 1033943 - DNA, 15 bp, Homo sapiens
accagcctctattct

SEQ ID NO: 1033944 - DNA, 15 bp, Homo sapiens
ccagcctctattcta

SEQ ID NO: 1033945 - DNA, 15 bp, Homo sapiens
cagcctctattctag

SEQ ID NO: 1033946 - DNA, 15 bp, Homo sapiens
agcctctattctaga

SEQ ID NO: 1033947 - DNA, 15 bp, Homo sapiens
gcctctattctagag

SEQ ID NO: 1033948 - DNA, 15 bp, Homo sapiens
cctctattctagagt

SEQ ID NO: 1033949 - DNA, 15 bp, Homo sapiens
ctctattctagagtt

SEQ ID NO: 1033950 - DNA, 15 bp, Homo sapiens
tctattctagagttt

SEQ ID NO: 1033951 - DNA, 15 bp, Homo sapiens
ctattctagagttta

SEQ ID NO: 1033952 - DNA, 15 bp, Homo sapiens
tattctagagtttaa

SEQ ID NO: 1033953 - DNA, 15 bp, Homo sapiens
attctagagtttaac

SEQ ID NO: 1033954 - DNA, 15 bp, Homo sapiens
ttctagagtttaaca

SEQ ID NO: 1033955 - DNA, 15 bp, Homo sapiens
tctagagtttaacat

SEQ ID NO: 1033956 - DNA, 15 bp, Homo sapiens
ctagagtttaacatg

SEQ ID NO: 1033957 - DNA, 15 bp, Homo sapiens
tagagtttaacatgt

SEQ ID NO: 1033958 - DNA, 15 bp, Homo sapiens
agagtttaacatgtt

SEQ ID NO: 1033959 - DNA, 15 bp, Homo sapiens
gagtttaacatgttc

SEQ ID NO: 1033960 - DNA, 15 bp, Homo sapiens
agtttaacatgttcc

SEQ ID NO: 1033961 - DNA, 15 bp, Homo sapiens
gtttaacatgttcca

SEQ ID NO: 1033962 - DNA, 15 bp, Homo sapiens
tttaacatgttccac

SEQ ID NO: 1033963 - DNA, 15 bp, Homo sapiens
ttaacatgttccacc

SEQ ID NO: 1033964 - DNA, 15 bp, Homo sapiens
taacatgttccaccc

SEQ ID NO: 1033965 - DNA, 15 bp, Homo sapiens
aacatgttccaccca

SEQ ID NO: 1033966 - DNA, 15 bp, Homo sapiens
acatgttccacccag

SEQ ID NO: 1033967 - DNA, 15 bp, Homo sapiens
catgttccacccagt

SEQ ID NO: 1033968 - DNA, 15 bp, Homo sapiens
atgttccacccagtt

SEQ ID NO: 1033969 - DNA, 15 bp, Homo sapiens
tgttccacccagttt

SEQ ID NO: 1033970 - DNA, 15 bp, Homo sapiens
gttccacccagtttg

SEQ ID NO: 1033971 - DNA, 15 bp, Homo sapiens
ttccacccagtttgg

SEQ ID NO: 1033972 - DNA, 15 bp, Homo sapiens
tccacccagtttggc

SEQ ID NO: 1033973 - DNA, 15 bp, Homo sapiens
ccacccagtttggca

SEQ ID NO: 1033974 - DNA, 15 bp, Homo sapiens
cacccagtttggcag

SEQ ID NO: 1033975 - DNA, 15 bp, Homo sapiens
acccagtttggcagt

SEQ ID NO: 1033976 - DNA, 15 bp, Homo sapiens
cccagtttggcagtc

SEQ ID NO: 1033977 - DNA, 15 bp, Homo sapiens
ccagtttggcagtca

SEQ ID NO: 1033978 - DNA, 15 bp, Homo sapiens
cagtttggcagtcag

SEQ ID NO: 1033979 - DNA, 15 bp, Homo sapiens
agtttggcagtcagc

SEQ ID NO: 1033980 - DNA, 15 bp, Homo sapiens
gtttggcagtcagct

SEQ ID NO: 1033981 - DNA, 15 bp, Homo sapiens
tttggcagtcagctt

SEQ ID NO: 1033982 - DNA, 15 bp, Homo sapiens
ttggcagtcagctta

SEQ ID NO: 1033983 - DNA, 15 bp, Homo sapiens
tggcagtcagcttat

SEQ ID NO: 1033984 - DNA, 15 bp, Homo sapiens
ggcagtcagcttata

SEQ ID NO: 1033985 - DNA, 15 bp, Homo sapiens
gcagtcagcttatac

SEQ ID NO: 1033986 - DNA, 15 bp, Homo sapiens
cagtcagcttatact

SEQ ID NO: 1033987 - DNA, 15 bp, Homo sapiens
agtcagcttatactg

SEQ ID NO: 1033988 - DNA, 15 bp, Homo sapiens
gtcagcttatactga

SEQ ID NO: 1033989 - DNA, 15 bp, Homo sapiens
tcagcttatactgat

SEQ ID NO: 1033990 - DNA, 15 bp, Homo sapiens
cagcttatactgatc

SEQ ID NO: 1033991 - DNA, 15 bp, Homo sapiens
agcttatactgatca

SEQ ID NO: 1033992 - DNA, 15 bp, Homo sapiens
gcttatactgatcat

SEQ ID NO: 1033993 - DNA, 15 bp, Homo sapiens
cttatactgatcatg

SEQ ID NO: 1033994 - DNA, 15 bp, Homo sapiens
ttatactgatcatgg

SEQ ID NO: 1033995 - DNA, 15 bp, Homo sapiens
tatactgatcatggg

SEQ ID NO: 1033996 - DNA, 15 bp, Homo sapiens
atactgatcatggga

SEQ ID NO: 1033997 - DNA, 15 bp, Homo sapiens
tactgatcatgggag

SEQ ID NO: 1033998 - DNA, 15 bp, Homo sapiens
actgatcatgggagt

SEQ ID NO: 1033999 - DNA, 15 bp, Homo sapiens
ctgatcatgggagtg

SEQ ID NO: 1034000 - DNA, 15 bp, Homo sapiens
tgatcatgggagtga

SEQ ID NO: 1034001 - DNA, 15 bp, Homo sapiens
gatcatgggagtgat

SEQ ID NO: 1034002 - DNA, 15 bp, Homo sapiens
atcatgggagtgatc

SEQ ID NO: 1034003 - DNA, 15 bp, Homo sapiens
tcatgggagtgatct

SEQ ID NO: 1034004 - DNA, 15 bp, Homo sapiens
catgggagtgatctt

SEQ ID NO: 1034005 - DNA, 15 bp, Homo sapiens
atgggagtgatcttg

SEQ ID NO: 1034006 - DNA, 15 bp, Homo sapiens
tgggagtgatcttgt

SEQ ID NO: 1034007 - DNA, 15 bp, Homo sapiens
gggagtgatcttgtt

SEQ ID NO: 1034008 - DNA, 15 bp, Homo sapiens
ggagtgatcttgttt

SEQ ID NO: 1034009 - DNA, 15 bp, Homo sapiens
gagtgatcttgtttt

SEQ ID NO: 1034010 - DNA, 15 bp, Homo sapiens
agtgatcttgtttta

SEQ ID NO: 1034011 - DNA, 15 bp, Homo sapiens
gtgatcttgttttac

SEQ ID NO: 1034012 - DNA, 15 bp, Homo sapiens
tgatcttgttttacc

SEQ ID NO: 1034013 - DNA, 15 bp, Homo sapiens
gatcttgttttacca

SEQ ID NO: 1034014 - DNA, 15 bp, Homo sapiens
atcttgttttaccaa

SEQ ID NO: 1034015 - DNA, 15 bp, Homo sapiens
tcttgttttaccaaa

SEQ ID NO: 1034016 - DNA, 15 bp, Homo sapiens
cttgttttaccaaag

SEQ ID NO: 1034017 - DNA, 15 bp, Homo sapiens
ttgttttaccaaaga

SEQ ID NO: 1034018 - DNA, 15 bp, Homo sapiens
tgttttaccaaagag

SEQ ID NO: 1034019 - DNA, 15 bp, Homo sapiens
gttttaccaaagagg

SEQ ID NO: 1034020 - DNA, 15 bp, Homo sapiens
ttttaccaaagagga

SEQ ID NO: 1034021 - DNA, 15 bp, Homo sapiens
tttaccaaagaggaa

SEQ ID NO: 1034022 - DNA, 15 bp, Homo sapiens
ttaccaaagaggaag

SEQ ID NO: 1034023 - DNA, 15 bp, Homo sapiens
taccaaagaggaagc

SEQ ID NO: 1034024 - DNA, 15 bp, Homo sapiens
accaaagaggaagct

SEQ ID NO: 1034025 - DNA, 15 bp, Homo sapiens
ccaaagaggaagctg

SEQ ID NO: 1034026 - DNA, 15 bp, Homo sapiens
caaagaggaagctgt

SEQ ID NO: 1034027 - DNA, 15 bp, Homo sapiens
aaagaggaagctgtg

SEQ ID NO: 1034028 - DNA, 15 bp, Homo sapiens
aagaggaagctgtgg

SEQ ID NO: 1034029 - DNA, 15 bp, Homo sapiens
agaggaagctgtggt

SEQ ID NO: 1034030 - DNA, 15 bp, Homo sapiens
gaggaagctgtggtg

SEQ ID NO: 1034031 - DNA, 15 bp, Homo sapiens
aggaagctgtggtgc

SEQ ID NO: 1034032 - DNA, 15 bp, Homo sapiens
ggaagctgtggtgca

SEQ ID NO: 1034033 - DNA, 15 bp, Homo sapiens
gaagctgtggtgcag

SEQ ID NO: 1034034 - DNA, 15 bp, Homo sapiens
aagctgtggtgcaga

SEQ ID NO: 1034035 - DNA, 15 bp, Homo sapiens
agctgtggtgcagac

SEQ ID NO: 1034036 - DNA, 15 bp, Homo sapiens
gctgtggtgcagacg

SEQ ID NO: 1034037 - DNA, 15 bp, Homo sapiens
ctgtggtgcagacgg

SEQ ID NO: 1034038 - DNA, 15 bp, Homo sapiens
tgtggtgcagacggg

SEQ ID NO: 1034039 - DNA, 15 bp, Homo sapiens
gtggtgcagacgggc

SEQ ID NO: 1034040 - DNA, 15 bp, Homo sapiens
tggtgcagacgggcg

SEQ ID NO: 1034041 - DNA, 15 bp, Homo sapiens
ggtgcagacgggcga

SEQ ID NO: 1034042 - DNA, 15 bp, Homo sapiens
gtgcagacgggcgaa

SEQ ID NO: 1034043 - DNA, 15 bp, Homo sapiens
tgcagacgggcgaag

SEQ ID NO: 1034044 - DNA, 15 bp, Homo sapiens
gcagacgggcgaagg

SEQ ID NO: 1034045 - DNA, 15 bp, Homo sapiens
cagacgggcgaaggg

SEQ ID NO: 1034046 - DNA, 15 bp, Homo sapiens
agacgggcgaaggga

SEQ ID NO: 1034047 - DNA, 15 bp, Homo sapiens
gacgggcgaagggac

SEQ ID NO: 1034048 - DNA, 15 bp, Homo sapiens
acgggcgaagggact

SEQ ID NO: 1034049 - DNA, 15 bp, Homo sapiens
cgggcgaagggactt

SEQ ID NO: 1034050 - DNA, 15 bp, Homo sapiens
gggcgaagggacttg

SEQ ID NO: 1034051 - DNA, 15 bp, Homo sapiens
ggcgaagggacttgc

SEQ ID NO: 1034052 - DNA, 15 bp, Homo sapiens
gcgaagggacttgct

SEQ ID NO: 1034053 - DNA, 15 bp, Homo sapiens
cgaagggacttgctg

SEQ ID NO: 1034054 - DNA, 15 bp, Homo sapiens
gaagggacttgctgc

SEQ ID NO: 1034055 - DNA, 15 bp, Homo sapiens
aagggacttgctgca

SEQ ID NO: 1034056 - DNA, 15 bp, Homo sapiens
agggacttgctgcaa

SEQ ID NO: 1034057 - DNA, 15 bp, Homo sapiens
gggacttgctgcaag

SEQ ID NO: 1034058 - DNA, 15 bp, Homo sapiens
ggacttgctgcaagt

SEQ ID NO: 1034059 - DNA, 15 bp, Homo sapiens
gacttgctgcaagtt

SEQ ID NO: 1034060 - DNA, 15 bp, Homo sapiens
acttgctgcaagtta

SEQ ID NO: 1034061 - DNA, 15 bp, Homo sapiens
cttgctgcaagttac

SEQ ID NO: 1034062 - DNA, 15 bp, Homo sapiens
ttgctgcaagttacc

SEQ ID NO: 1034063 - DNA, 15 bp, Homo sapiens
tgctgcaagttaccc

SEQ ID NO: 1034064 - DNA, 15 bp, Homo sapiens
gctgcaagttaccct

SEQ ID NO: 1034065 - DNA, 15 bp, Homo sapiens
ctgcaagttaccctg

SEQ ID NO: 1034066 - DNA, 15 bp, Homo sapiens
tgcaagttaccctgg

SEQ ID NO: 1034067 - DNA, 15 bp, Homo sapiens
gcaagttaccctggg

SEQ ID NO: 1034068 - DNA, 15 bp, Homo sapiens
caagttaccctggga

SEQ ID NO: 1034069 - DNA, 15 bp, Homo sapiens
aagttaccctgggag

SEQ ID NO: 1034070 - DNA, 15 bp, Homo sapiens
agttaccctgggagg

SEQ ID NO: 1034071 - DNA, 15 bp, Homo sapiens
gttaccctgggaggg

SEQ ID NO: 1034072 - DNA, 15 bp, Homo sapiens
ttaccctgggagggc

SEQ ID NO: 1034073 - DNA, 15 bp, Homo sapiens
taccctgggagggct

SEQ ID NO: 1034074 - DNA, 15 bp, Homo sapiens
accctgggagggctt

SEQ ID NO: 1034075 - DNA, 15 bp, Homo sapiens
ccctgggagggcttg

SEQ ID NO: 1034076 - DNA, 15 bp, Homo sapiens
cctgggagggcttgg

SEQ ID NO: 1034077 - DNA, 15 bp, Homo sapiens
ctgggagggcttggc

SEQ ID NO: 1034078 - DNA, 15 bp, Homo sapiens
tgggagggcttggca

SEQ ID NO: 1034079 - DNA, 15 bp, Homo sapiens
gggagggcttggcag

SEQ ID NO: 1034080 - DNA, 15 bp, Homo sapiens
ggagggcttggcagg

SEQ ID NO: 1034081 - DNA, 15 bp, Homo sapiens
gagggcttggcaggg

SEQ ID NO: 1034082 - DNA, 15 bp, Homo sapiens
agggcttggcagggt

SEQ ID NO: 1034083 - DNA, 15 bp, Homo sapiens
gggcttggcagggtg

SEQ ID NO: 1034084 - DNA, 15 bp, Homo sapiens
ggcttggcagggtgg

SEQ ID NO: 1034085 - DNA, 15 bp, Homo sapiens
gcttggcagggtggc

SEQ ID NO: 1034086 - DNA, 15 bp, Homo sapiens
cttggcagggtggct

SEQ ID NO: 1034087 - DNA, 15 bp, Homo sapiens
ttggcagggtggctc

SEQ ID NO: 1034088 - DNA, 15 bp, Homo sapiens
tggcagggtggctct

SEQ ID NO: 1034089 - DNA, 15 bp, Homo sapiens
ggcagggtggctctg

SEQ ID NO: 1034090 - DNA, 15 bp, Homo sapiens
gcagggtggctctgt

SEQ ID NO: 1034091 - DNA, 15 bp, Homo sapiens
cagggtggctctgtc

SEQ ID NO: 1034092 - DNA, 15 bp, Homo sapiens
agggtggctctgtcc

SEQ ID NO: 1034093 - DNA, 15 bp, Homo sapiens
gggtggctctgtcca

SEQ ID NO: 1034094 - DNA, 15 bp, Homo sapiens
ggtggctctgtccaa

SEQ ID NO: 1034095 - DNA, 15 bp, Homo sapiens
gtggctctgtccaaa

SEQ ID NO: 1034096 - DNA, 15 bp, Homo sapiens
tggctctgtccaaaa

SEQ ID NO: 1034097 - DNA, 15 bp, Homo sapiens
ggctctgtccaaaac

SEQ ID NO: 1034098 - DNA, 15 bp, Homo sapiens
gctctgtccaaaact

SEQ ID NO: 1034099 - DNA, 15 bp, Homo sapiens
ctctgtccaaaacta

SEQ ID NO: 1034100 - DNA, 15 bp, Homo sapiens
tctgtccaaaactag

SEQ ID NO: 1034101 - DNA, 15 bp, Homo sapiens
ctgtccaaaactagg

SEQ ID NO: 1034102 - DNA, 15 bp, Homo sapiens
tgtccaaaactaggt

SEQ ID NO: 1034103 - DNA, 15 bp, Homo sapiens
gtccaaaactaggtt

SEQ ID NO: 1034104 - DNA, 15 bp, Homo sapiens
tccaaaactaggttc

SEQ ID NO: 1034105 - DNA, 15 bp, Homo sapiens
ccaaaactaggttcc

SEQ ID NO: 1034106 - DNA, 15 bp, Homo sapiens
caaaactaggttccc

SEQ ID NO: 1034107 - DNA, 15 bp, Homo sapiens
aaaactaggttccct

SEQ ID NO: 1034108 - DNA, 15 bp, Homo sapiens
aaactaggttccctg

SEQ ID NO: 1034109 - DNA, 15 bp, Homo sapiens
aactaggttccctgc

SEQ ID NO: 1034110 - DNA, 15 bp, Homo sapiens
actaggttccctgct

SEQ ID NO: 1034111 - DNA, 15 bp, Homo sapiens
ctaggttccctgcta

SEQ ID NO: 1034112 - DNA, 15 bp, Homo sapiens
taggttccctgctat

SEQ ID NO: 1034113 - DNA, 15 bp, Homo sapiens
aggttccctgctata

SEQ ID NO: 1034114 - DNA, 15 bp, Homo sapiens
ggttccctgctatat

SEQ ID NO: 1034115 - DNA, 15 bp, Homo sapiens
gttccctgctatatt

SEQ ID NO: 1034116 - DNA, 15 bp, Homo sapiens
ttccctgctatattc

SEQ ID NO: 1034117 - DNA, 15 bp, Homo sapiens
tccctgctatattcc

SEQ ID NO: 1034118 - DNA, 15 bp, Homo sapiens
ccctgctatattccc

SEQ ID NO: 1034119 - DNA, 15 bp, Homo sapiens
cctgctatattccct

SEQ ID NO: 1034120 - DNA, 15 bp, Homo sapiens
ctgctatattccctt

SEQ ID NO: 1034121 - DNA, 15 bp, Homo sapiens
tgctatattcccttt

SEQ ID NO: 1034122 - DNA, 15 bp, Homo sapiens
gctatattccctttt

SEQ ID NO: 1034123 - DNA, 15 bp, Homo sapiens
ctatattcccttttt

SEQ ID NO: 1034124 - DNA, 15 bp, Homo sapiens
tatattccctttttt

SEQ ID NO: 1034125 - DNA, 15 bp, Homo sapiens
atattcccttttttc

SEQ ID NO: 1034126 - DNA, 15 bp, Homo sapiens
tattcccttttttct

SEQ ID NO: 1034127 - DNA, 15 bp, Homo sapiens
attcccttttttcta

SEQ ID NO: 1034128 - DNA, 15 bp, Homo sapiens
ttcccttttttctac

SEQ ID NO: 1034129 - DNA, 15 bp, Homo sapiens
tcccttttttctact

SEQ ID NO: 1034130 - DNA, 15 bp, Homo sapiens
cccttttttctactc

SEQ ID NO: 1034131 - DNA, 15 bp, Homo sapiens
ccttttttctactca

SEQ ID NO: 1034132 - DNA, 15 bp, Homo sapiens
cttttttctactcat

SEQ ID NO: 1034133 - DNA, 15 bp, Homo sapiens
ttttttctactcata

SEQ ID NO: 1034134 - DNA, 15 bp, Homo sapiens
tttttctactcataa

SEQ ID NO: 1034135 - DNA, 15 bp, Homo sapiens
tcttaagcccgtgac

SEQ ID NO: 1034136 - DNA, 15 bp, Homo sapiens
cttaagcccgtgacg

SEQ ID NO: 1034137 - DNA, 15 bp, Homo sapiens
ttaagcccgtgacga

SEQ ID NO: 1034138 - DNA, 15 bp, Homo sapiens
taagcccgtgacgat

SEQ ID NO: 1034139 - DNA, 15 bp, Homo sapiens
aagcccgtgacgatg

SEQ ID NO: 1034140 - DNA, 15 bp, Homo sapiens
agcccgtgacgatga

SEQ ID NO: 1034141 - DNA, 15 bp, Homo sapiens
gcccgtgacgatgag

SEQ ID NO: 1034142 - DNA, 15 bp, Homo sapiens
cccgtgacgatgagg

SEQ ID NO: 1034143 - DNA, 15 bp, Homo sapiens
ccgtgacgatgaggg

SEQ ID NO: 1034144 - DNA, 15 bp, Homo sapiens
cgtgacgatgagggt

SEQ ID NO: 1034145 - DNA, 15 bp, Homo sapiens
gtgacgatgagggtg

SEQ ID NO: 1034146 - DNA, 15 bp, Homo sapiens
tgacgatgagggtgc

SEQ ID NO: 1034147 - DNA, 15 bp, Homo sapiens
gacgatgagggtgct

SEQ ID NO: 1034148 - DNA, 15 bp, Homo sapiens
acgatgagggtgctc

SEQ ID NO: 1034149 - DNA, 15 bp, Homo sapiens
cgatgagggtgctcg

SEQ ID NO: 1034150 - DNA, 15 bp, Homo sapiens
gatgagggtgctcgg

SEQ ID NO: 1034151 - DNA, 15 bp, Homo sapiens
atgagggtgctcggc

SEQ ID NO: 1034152 - DNA, 15 bp, Homo sapiens
tgagggtgctcggcc

SEQ ID NO: 1034153 - DNA, 15 bp, Homo sapiens
gagggtgctcggccc

SEQ ID NO: 1034154 - DNA, 15 bp, Homo sapiens
agggtgctcggcccc

SEQ ID NO: 1034155 - DNA, 15 bp, Homo sapiens
gggtgctcggcccct

SEQ ID NO: 1034156 - DNA, 15 bp, Homo sapiens
ggtgctcggcccctc

SEQ ID NO: 1034157 - DNA, 15 bp, Homo sapiens
gtgctcggcccctct

SEQ ID NO: 1034158 - DNA, 15 bp, Homo sapiens
tgctcggcccctctc

SEQ ID NO: 1034159 - DNA, 15 bp, Homo sapiens
gctcggcccctctcc

SEQ ID NO: 1034160 - DNA, 15 bp, Homo sapiens
ctcggcccctctccc

SEQ ID NO: 1034161 - DNA, 15 bp, Homo sapiens
tcggcccctctcccc

SEQ ID NO: 1034162 - DNA, 15 bp, Homo sapiens
cggcccctctcccca

SEQ ID NO: 1034163 - DNA, 15 bp, Homo sapiens
ggcccctctccccat

SEQ ID NO: 1034164 - DNA, 15 bp, Homo sapiens
gcccctctccccatc

SEQ ID NO: 1034165 - DNA, 15 bp, Homo sapiens
cccctctccccatct

SEQ ID NO: 1034166 - DNA, 15 bp, Homo sapiens
ccctctccccatctc

SEQ ID NO: 1034167 - DNA, 15 bp, Homo sapiens
cctctccccatctct

SEQ ID NO: 1034168 - DNA, 15 bp, Homo sapiens
ctctccccatctctt

SEQ ID NO: 1034169 - DNA, 15 bp, Homo sapiens
tctccccatctcttc

SEQ ID NO: 1034170 - DNA, 15 bp, Homo sapiens
ctccccatctcttcc

SEQ ID NO: 1034171 - DNA, 15 bp, Homo sapiens
tccccatctcttcct

SEQ ID NO: 1034172 - DNA, 15 bp, Homo sapiens
ccccatctcttcctc

SEQ ID NO: 1034173 - DNA, 15 bp, Homo sapiens
cccatctcttcctcc

SEQ ID NO: 1034174 - DNA, 15 bp, Homo sapiens
ccatctcttcctcct

SEQ ID NO: 1034175 - DNA, 15 bp, Homo sapiens
catctcttcctcctt

SEQ ID NO: 1034176 - DNA, 15 bp, Homo sapiens
atctcttcctccttc

SEQ ID NO: 1034177 - DNA, 15 bp, Homo sapiens
tctcttcctccttct

SEQ ID NO: 1034178 - DNA, 15 bp, Homo sapiens
ctcttcctccttctc

SEQ ID NO: 1034179 - DNA, 15 bp, Homo sapiens
tcttcctccttctct

SEQ ID NO: 1034180 - DNA, 15 bp, Homo sapiens
cttcctccttctctc

SEQ ID NO: 1034181 - DNA, 15 bp, Homo sapiens
ttcctccttctctct

SEQ ID NO: 1034182 - DNA, 15 bp, Homo sapiens
tcctccttctctctt

SEQ ID NO: 1034183 - DNA, 15 bp, Homo sapiens
cctccttctctcttc

SEQ ID NO: 1034184 - DNA, 15 bp, Homo sapiens
ctccttctctcttcc

SEQ ID NO: 1034185 - DNA, 15 bp, Homo sapiens
tccttctctcttcct

SEQ ID NO: 1034186 - DNA, 15 bp, Homo sapiens
ccttctctcttcctc

SEQ ID NO: 1034187 - DNA, 15 bp, Homo sapiens
cttctctcttcctca

SEQ ID NO: 1034188 - DNA, 15 bp, Homo sapiens
ttctctcttcctcac

SEQ ID NO: 1034189 - DNA, 15 bp, Homo sapiens
tctctcttcctcacc

SEQ ID NO: 1034190 - DNA, 15 bp, Homo sapiens
ctctcttcctcacct

SEQ ID NO: 1034191 - DNA, 15 bp, Homo sapiens
tctcttcctcacctc

SEQ ID NO: 1034192 - DNA, 15 bp, Homo sapiens
ctcttcctcacctcc

SEQ ID NO: 1034193 - DNA, 15 bp, Homo sapiens
tcttcctcacctccc

SEQ ID NO: 1034194 - DNA, 15 bp, Homo sapiens
cttcctcacctccct

SEQ ID NO: 1034195 - DNA, 15 bp, Homo sapiens
ttcctcacctccctc

SEQ ID NO: 1034196 - DNA, 15 bp, Homo sapiens
tcctcacctccctcc

SEQ ID NO: 1034197 - DNA, 15 bp, Homo sapiens
cctcacctccctcct

SEQ ID NO: 1034198 - DNA, 15 bp, Homo sapiens
ctcacctccctcctc

SEQ ID NO: 1034199 - DNA, 15 bp, Homo sapiens
tcacctccctcctcc

SEQ ID NO: 1034200 - DNA, 15 bp, Homo sapiens
cacctccctcctcca

SEQ ID NO: 1034201 - DNA, 15 bp, Homo sapiens
acctccctcctccac

SEQ ID NO: 1034202 - DNA, 15 bp, Homo sapiens
cctccctcctccacc

SEQ ID NO: 1034203 - DNA, 15 bp, Homo sapiens
ctccctcctccacct

SEQ ID NO: 1034204 - DNA, 15 bp, Homo sapiens
tccctcctccaccta

SEQ ID NO: 1034205 - DNA, 15 bp, Homo sapiens
ccctcctccacctac

SEQ ID NO: 1034206 - DNA, 15 bp, Homo sapiens
cctcctccacctacc

SEQ ID NO: 1034207 - DNA, 15 bp, Homo sapiens
ctcctccacctacct

SEQ ID NO: 1034208 - DNA, 15 bp, Homo sapiens
tcctccacctacctc

SEQ ID NO: 1034209 - DNA, 15 bp, Homo sapiens
cctccacctacctcc

SEQ ID NO: 1034210 - DNA, 15 bp, Homo sapiens
ctccacctacctcca

SEQ ID NO: 1034211 - DNA, 15 bp, Homo sapiens
tccacctacctccag

SEQ ID NO: 1034212 - DNA, 15 bp, Homo sapiens
ccacctacctccaga

SEQ ID NO: 1034213 - DNA, 15 bp, Homo sapiens
cacctacctccagaa

SEQ ID NO: 1034214 - DNA, 15 bp, Homo sapiens
acctacctccagaag

SEQ ID NO: 1034215 - DNA, 15 bp, Homo sapiens
cctacctccagaaga

SEQ ID NO: 1034216 - DNA, 15 bp, Homo sapiens
ctacctccagaagag

SEQ ID NO: 1034217 - DNA, 15 bp, Homo sapiens
tacctccagaagagg

SEQ ID NO: 1034218 - DNA, 15 bp, Homo sapiens
acctccagaagaggg

SEQ ID NO: 1034219 - DNA, 15 bp, Homo sapiens
cctccagaagagggg

SEQ ID NO: 1034220 - DNA, 15 bp, Homo sapiens
ctccagaagagggga

SEQ ID NO: 1034221 - DNA, 15 bp, Homo sapiens
tccagaagaggggac

SEQ ID NO: 1034222 - DNA, 15 bp, Homo sapiens
ccagaagaggggact

SEQ ID NO: 1034223 - DNA, 15 bp, Homo sapiens
cagaagaggggactg

SEQ ID NO: 1034224 - DNA, 15 bp, Homo sapiens
agaagaggggactgg

SEQ ID NO: 1034225 - DNA, 15 bp, Homo sapiens
gaagaggggactggc

SEQ ID NO: 1034226 - DNA, 15 bp, Homo sapiens
aagaggggactggcc

SEQ ID NO: 1034227 - DNA, 15 bp, Homo sapiens
agaggggactggcca

SEQ ID NO: 1034228 - DNA, 15 bp, Homo sapiens
gaggggactggccat

SEQ ID NO: 1034229 - DNA, 15 bp, Homo sapiens
aggggactggccatg

SEQ ID NO: 1034230 - DNA, 15 bp, Homo sapiens
ggggactggccatgt

SEQ ID NO: 1034231 - DNA, 15 bp, Homo sapiens
gggactggccatgtg

SEQ ID NO: 1034232 - DNA, 15 bp, Homo sapiens
ggactggccatgtgg

SEQ ID NO: 1034233 - DNA, 15 bp, Homo sapiens
gactggccatgtggg

SEQ ID NO: 1034234 - DNA, 15 bp, Homo sapiens
actggccatgtggga

SEQ ID NO: 1034235 - DNA, 15 bp, Homo sapiens
ctggccatgtgggag

SEQ ID NO: 1034236 - DNA, 15 bp, Homo sapiens
tggccatgtgggagg

SEQ ID NO: 1034237 - DNA, 15 bp, Homo sapiens
ggccatgtgggaggc

SEQ ID NO: 1034238 - DNA, 15 bp, Homo sapiens
gccatgtgggaggcc

SEQ ID NO: 1034239 - DNA, 15 bp, Homo sapiens
ccatgtgggaggcct

SEQ ID NO: 1034240 - DNA, 15 bp, Homo sapiens
catgtgggaggcctg

SEQ ID NO: 1034241 - DNA, 15 bp, Homo sapiens
atgtgggaggcctgg

SEQ ID NO: 1034242 - DNA, 15 bp, Homo sapiens
tgtgggaggcctggc

SEQ ID NO: 1034243 - DNA, 15 bp, Homo sapiens
gtgggaggcctggct

SEQ ID NO: 1034244 - DNA, 15 bp, Homo sapiens
tgggaggcctggctg

SEQ ID NO: 1034245 - DNA, 15 bp, Homo sapiens
gggaggcctggctga

SEQ ID NO: 1034246 - DNA, 15 bp, Homo sapiens
ggaggcctggctgag

SEQ ID NO: 1034247 - DNA, 15 bp, Homo sapiens
gaggcctggctgaga

SEQ ID NO: 1034248 - DNA, 15 bp, Homo sapiens
aggcctggctgagag

SEQ ID NO: 1034249 - DNA, 15 bp, Homo sapiens
acgctgctgctgttc

SEQ ID NO: 1034250 - DNA, 15 bp, Homo sapiens
cgctgctgctgttca

SEQ ID NO: 1034251 - DNA, 15 bp, Homo sapiens
gctgctgctgttcag

SEQ ID NO: 1034252 - DNA, 15 bp, Homo sapiens
ctgctgctgttcagg

SEQ ID NO: 1034253 - DNA, 15 bp, Homo sapiens
tgctgctgttcaggg

SEQ ID NO: 1034254 - DNA, 15 bp, Homo sapiens
gctgctgttcagggt

SEQ ID NO: 1034255 - DNA, 15 bp, Homo sapiens
ctgctgttcagggtg

SEQ ID NO: 1034256 - DNA, 15 bp, Homo sapiens
tgctgttcagggtga

SEQ ID NO: 1034257 - DNA, 15 bp, Homo sapiens
gctgttcagggtgag

SEQ ID NO: 1034258 - DNA, 15 bp, Homo sapiens
ctgttcagggtgagc

SEQ ID NO: 1034259 - DNA, 15 bp, Homo sapiens
tgttcagggtgagcc

SEQ ID NO: 1034260 - DNA, 15 bp, Homo sapiens
gttcagggtgagccc

SEQ ID NO: 1034261 - DNA, 15 bp, Homo sapiens
ttcagggtgagcccc

SEQ ID NO: 1034262 - DNA, 15 bp, Homo sapiens
tcagggtgagccccc

SEQ ID NO: 1034263 - DNA, 15 bp, Homo sapiens
cagggtgagccccct

SEQ ID NO: 1034264 - DNA, 15 bp, Homo sapiens
agggtgagccccctc

SEQ ID NO: 1034265 - DNA, 15 bp, Homo sapiens
gggtgagccccctcg

SEQ ID NO: 1034266 - DNA, 15 bp, Homo sapiens
ggtgagccccctcgg

SEQ ID NO: 1034267 - DNA, 15 bp, Homo sapiens
gtgagccccctcgga

SEQ ID NO: 1034268 - DNA, 15 bp, Homo sapiens
tgagccccctcggac

SEQ ID NO: 1034269 - DNA, 15 bp, Homo sapiens
gagccccctcggacc

SEQ ID NO: 1034270 - DNA, 15 bp, Homo sapiens
agccccctcggacct

SEQ ID NO: 1034271 - DNA, 15 bp, Homo sapiens
gccccctcggacctc

SEQ ID NO: 1034272 - DNA, 15 bp, Homo sapiens
ccccctcggacctct

SEQ ID NO: 1034273 - DNA, 15 bp, Homo sapiens
cccctcggacctctg

SEQ ID NO: 1034274 - DNA, 15 bp, Homo sapiens
ccctcggacctctga

SEQ ID NO: 1034275 - DNA, 15 bp, Homo sapiens
cctcggacctctgag

SEQ ID NO: 1034276 - DNA, 15 bp, Homo sapiens
ctcggacctctgagt

SEQ ID NO: 1034277 - DNA, 15 bp, Homo sapiens
tcggacctctgagtc

SEQ ID NO: 1034278 - DNA, 15 bp, Homo sapiens
cggacctctgagtca

SEQ ID NO: 1034279 - DNA, 15 bp, Homo sapiens
ggacctctgagtcag

SEQ ID NO: 1034280 - DNA, 15 bp, Homo sapiens
gacctctgagtcagc

SEQ ID NO: 1034281 - DNA, 15 bp, Homo sapiens
acctctgagtcagcc

SEQ ID NO: 1034282 - DNA, 15 bp, Homo sapiens
cctctgagtcagccg

SEQ ID NO: 1034283 - DNA, 15 bp, Homo sapiens
ctctgagtcagccgg

SEQ ID NO: 1034284 - DNA, 15 bp, Homo sapiens
tctgagtcagccggg

SEQ ID NO: 1034285 - DNA, 15 bp, Homo sapiens
ctgagtcagccgggc

SEQ ID NO: 1034286 - DNA, 15 bp, Homo sapiens
tgagtcagccgggcg

SEQ ID NO: 1034287 - DNA, 15 bp, Homo sapiens
gagtcagccgggcga

SEQ ID NO: 1034288 - DNA, 15 bp, Homo sapiens
agtcagccgggcgag

SEQ ID NO: 1034289 - DNA, 15 bp, Homo sapiens
gtcagccgggcgagg

SEQ ID NO: 1034290 - DNA, 15 bp, Homo sapiens
tcagccgggcgaggg

SEQ ID NO: 1034291 - DNA, 15 bp, Homo sapiens
cagccgggcgagggc

SEQ ID NO: 1034292 - DNA, 15 bp, Homo sapiens
agccgggcgagggcc

SEQ ID NO: 1034293 - DNA, 15 bp, Homo sapiens
gccgggcgagggcct

SEQ ID NO: 1034294 - DNA, 15 bp, Homo sapiens
ccgggcgagggcctg

SEQ ID NO: 1034295 - DNA, 15 bp, Homo sapiens
cgggcgagggcctgg

SEQ ID NO: 1034296 - DNA, 15 bp, Homo sapiens
gggcgagggcctggg

SEQ ID NO: 1034297 - DNA, 15 bp, Homo sapiens
ggcgagggcctgggc

SEQ ID NO: 1034298 - DNA, 15 bp, Homo sapiens
gcgagggcctgggcc

SEQ ID NO: 1034299 - DNA, 15 bp, Homo sapiens
cgagggcctgggccg

SEQ ID NO: 1034300 - DNA, 15 bp, Homo sapiens
gagggcctgggccga

SEQ ID NO: 1034301 - DNA, 15 bp, Homo sapiens
agggcctgggccgag

SEQ ID NO: 1034302 - DNA, 15 bp, Homo sapiens
gggcctgggccgagg

SEQ ID NO: 1034303 - DNA, 15 bp, Homo sapiens
ggcctgggccgaggg

SEQ ID NO: 1034304 - DNA, 15 bp, Homo sapiens
gcctgggccgaggga

SEQ ID NO: 1034305 - DNA, 15 bp, Homo sapiens
cctgggccgagggac

SEQ ID NO: 1034306 - DNA, 15 bp, Homo sapiens
ctgggccgagggacc

SEQ ID NO: 1034307 - DNA, 15 bp, Homo sapiens
tgggccgagggaccc

SEQ ID NO: 1034308 - DNA, 15 bp, Homo sapiens
gggccgagggacccc

SEQ ID NO: 1034309 - DNA, 15 bp, Homo sapiens
ggccgagggaccccc

SEQ ID NO: 1034310 - DNA, 15 bp, Homo sapiens
gccgagggaccccca

SEQ ID NO: 1034311 - DNA, 15 bp, Homo sapiens
ccgagggacccccaa

SEQ ID NO: 1034312 - DNA, 15 bp, Homo sapiens
cgagggacccccaat

SEQ ID NO: 1034313 - DNA, 15 bp, Homo sapiens
gagggacccccaata

SEQ ID NO: 1034314 - DNA, 15 bp, Homo sapiens
agggacccccaatac

SEQ ID NO: 1034315 - DNA, 15 bp, Homo sapiens
gggacccccaatacc

SEQ ID NO: 1034316 - DNA, 15 bp, Homo sapiens
ggacccccaataccc

SEQ ID NO: 1034317 - DNA, 15 bp, Homo sapiens
gacccccaataccca

SEQ ID NO: 1034318 - DNA, 15 bp, Homo sapiens
acccccaatacccag

SEQ ID NO: 1034319 - DNA, 15 bp, Homo sapiens
cccccaatacccagg

SEQ ID NO: 1034320 - DNA, 15 bp, Homo sapiens
ccccaatacccaggt

SEQ ID NO: 1034321 - DNA, 15 bp, Homo sapiens
cccaatacccaggta

SEQ ID NO: 1034322 - DNA, 15 bp, Homo sapiens
ccaatacccaggtag

SEQ ID NO: 1034323 - DNA, 15 bp, Homo sapiens
caatacccaggtagc

SEQ ID NO: 1034324 - DNA, 15 bp, Homo sapiens
aatacccaggtagcc

SEQ ID NO: 1034325 - DNA, 15 bp, Homo sapiens
atacccaggtagccc

SEQ ID NO: 1034326 - DNA, 15 bp, Homo sapiens
tacccaggtagccct

SEQ ID NO: 1034327 - DNA, 15 bp, Homo sapiens
acccaggtagccctc

SEQ ID NO: 1034328 - DNA, 15 bp, Homo sapiens
cccaggtagccctct

SEQ ID NO: 1034329 - DNA, 15 bp, Homo sapiens
ccaggtagccctcta

SEQ ID NO: 1034330 - DNA, 15 bp, Homo sapiens
caggtagccctctag

SEQ ID NO: 1034331 - DNA, 15 bp, Homo sapiens
aggtagccctctaga

SEQ ID NO: 1034332 - DNA, 15 bp, Homo sapiens
ggtagccctctagag

SEQ ID NO: 1034333 - DNA, 15 bp, Homo sapiens
gtagccctctagagc

SEQ ID NO: 1034334 - DNA, 15 bp, Homo sapiens
tagccctctagagcc

SEQ ID NO: 1034335 - DNA, 15 bp, Homo sapiens
agccctctagagcct

SEQ ID NO: 1034336 - DNA, 15 bp, Homo sapiens
gccctctagagcctg

SEQ ID NO: 1034337 - DNA, 15 bp, Homo sapiens
ccctctagagcctga

SEQ ID NO: 1034338 - DNA, 15 bp, Homo sapiens
cctctagagcctgag

SEQ ID NO: 1034339 - DNA, 15 bp, Homo sapiens
ctctagagcctgagg

SEQ ID NO: 1034340 - DNA, 15 bp, Homo sapiens
tctagagcctgaggt

SEQ ID NO: 1034341 - DNA, 15 bp, Homo sapiens
ctagagcctgaggtt

SEQ ID NO: 1034342 - DNA, 15 bp, Homo sapiens
tagagcctgaggttc

SEQ ID NO: 1034343 - DNA, 15 bp, Homo sapiens
agagcctgaggttcc

SEQ ID NO: 1034344 - DNA, 15 bp, Homo sapiens
gagcctgaggttccc

SEQ ID NO: 1034345 - DNA, 15 bp, Homo sapiens
agcctgaggttcccc

SEQ ID NO: 1034346 - DNA, 15 bp, Homo sapiens
gcctgaggttcccca

SEQ ID NO: 1034347 - DNA, 15 bp, Homo sapiens
cctgaggttccccat

SEQ ID NO: 1034348 - DNA, 15 bp, Homo sapiens
ctgaggttccccatc

SEQ ID NO: 1034349 - DNA, 15 bp, Homo sapiens
tgaggttccccatcc

SEQ ID NO: 1034350 - DNA, 15 bp, Homo sapiens
gaggttccccatcca

SEQ ID NO: 1034351 - DNA, 15 bp, Homo sapiens
aggttccccatccaa

SEQ ID NO: 1034352 - DNA, 15 bp, Homo sapiens
ggttccccatccaaa

SEQ ID NO: 1034353 - DNA, 15 bp, Homo sapiens
gttccccatccaaaa

SEQ ID NO: 1034354 - DNA, 15 bp, Homo sapiens
ttccccatccaaaac

SEQ ID NO: 1034355 - DNA, 15 bp, Homo sapiens
tccccatccaaaact

SEQ ID NO: 1034356 - DNA, 15 bp, Homo sapiens
ccccatccaaaactt

SEQ ID NO: 1034357 - DNA, 15 bp, Homo sapiens
cccatccaaaacttg

SEQ ID NO: 1034358 - DNA, 15 bp, Homo sapiens
ccatccaaaacttgg

SEQ ID NO: 1034359 - DNA, 15 bp, Homo sapiens
catccaaaacttggg

SEQ ID NO: 1034360 - DNA, 15 bp, Homo sapiens
atccaaaacttggga

SEQ ID NO: 1034361 - DNA, 15 bp, Homo sapiens
tccaaaacttgggag

SEQ ID NO: 1034362 - DNA, 15 bp, Homo sapiens
ccaaaacttgggaga

SEQ ID NO: 1034363 - DNA, 15 bp, Homo sapiens
caaaacttgggagaa

SEQ ID NO: 1034364 - DNA, 15 bp, Homo sapiens
aaaacttgggagaat

SEQ ID NO: 1034365 - DNA, 15 bp, Homo sapiens
aaacttgggagaatg

SEQ ID NO: 1034366 - DNA, 15 bp, Homo sapiens
aacttgggagaatga

SEQ ID NO: 1034367 - DNA, 15 bp, Homo sapiens
acttgggagaatgaa

SEQ ID NO: 1034368 - DNA, 15 bp, Homo sapiens
cttgggagaatgaaa

SEQ ID NO: 1034369 - DNA, 15 bp, Homo sapiens
ttgggagaatgaaag

SEQ ID NO: 1034370 - DNA, 15 bp, Homo sapiens
tgggagaatgaaagc

SEQ ID NO: 1034371 - DNA, 15 bp, Homo sapiens
gggagaatgaaagca

SEQ ID NO: 1034372 - DNA, 15 bp, Homo sapiens
ggagaatgaaagcac

SEQ ID NO: 1034373 - DNA, 15 bp, Homo sapiens
gagaatgaaagcacc

SEQ ID NO: 1034374 - DNA, 15 bp, Homo sapiens
agaatgaaagcaccc

SEQ ID NO: 1034375 - DNA, 15 bp, Homo sapiens
gaatgaaagcaccca

SEQ ID NO: 1034376 - DNA, 15 bp, Homo sapiens
aatgaaagcacccac

SEQ ID NO: 1034377 - DNA, 15 bp, Homo sapiens
atgaaagcacccacc

SEQ ID NO: 1034378 - DNA, 15 bp, Homo sapiens
tgaaagcacccacca

SEQ ID NO: 1034379 - DNA, 15 bp, Homo sapiens
gaaagcacccaccat

SEQ ID NO: 1034380 - DNA, 15 bp, Homo sapiens
aaagcacccaccata

SEQ ID NO: 1034381 - DNA, 15 bp, Homo sapiens
aagcacccaccatat

SEQ ID NO: 1034382 - DNA, 15 bp, Homo sapiens
agcacccaccatata

SEQ ID NO: 1034383 - DNA, 15 bp, Homo sapiens
gcacccaccatatag

SEQ ID NO: 1034384 - DNA, 15 bp, Homo sapiens
cacccaccatatagg

SEQ ID NO: 1034385 - DNA, 15 bp, Homo sapiens
acccaccatataggg

SEQ ID NO: 1034386 - DNA, 15 bp, Homo sapiens
cccaccatatagggg

SEQ ID NO: 1034387 - DNA, 15 bp, Homo sapiens
ccaccatataggggc

SEQ ID NO: 1034388 - DNA, 15 bp, Homo sapiens
caccatataggggct

SEQ ID NO: 1034389 - DNA, 15 bp, Homo sapiens
accatataggggctg

SEQ ID NO: 1034390 - DNA, 15 bp, Homo sapiens
ccatataggggctgt

SEQ ID NO: 1034391 - DNA, 15 bp, Homo sapiens
catataggggctgtg

SEQ ID NO: 1034392 - DNA, 15 bp, Homo sapiens
atataggggctgtgg

SEQ ID NO: 1034393 - DNA, 15 bp, Homo sapiens
tataggggctgtggg

SEQ ID NO: 1034394 - DNA, 15 bp, Homo sapiens
ataggggctgtggga

SEQ ID NO: 1034395 - DNA, 15 bp, Homo sapiens
taggggctgtgggag

SEQ ID NO: 1034396 - DNA, 15 bp, Homo sapiens
aggggctgtgggagt

SEQ ID NO: 1034397 - DNA, 15 bp, Homo sapiens
ggggctgtgggagtt

SEQ ID NO: 1034398 - DNA, 15 bp, Homo sapiens
gggctgtgggagtta

SEQ ID NO: 1034399 - DNA, 15 bp, Homo sapiens
ggctgtgggagttaa

SEQ ID NO: 1034400 - DNA, 15 bp, Homo sapiens
gctgtgggagttaaa

SEQ ID NO: 1034401 - DNA, 15 bp, Homo sapiens
ctgtgggagttaaat

SEQ ID NO: 1034402 - DNA, 15 bp, Homo sapiens
tgtgggagttaaatg

SEQ ID NO: 1034403 - DNA, 15 bp, Homo sapiens
gtgggagttaaatga

SEQ ID NO: 1034404 - DNA, 15 bp, Homo sapiens
tgggagttaaatgaa

SEQ ID NO: 1034405 - DNA, 15 bp, Homo sapiens
gggagttaaatgaat

SEQ ID NO: 1034406 - DNA, 15 bp, Homo sapiens
ggagttaaatgaatg

SEQ ID NO: 1034407 - DNA, 15 bp, Homo sapiens
gagttaaatgaatga

SEQ ID NO: 1034408 - DNA, 15 bp, Homo sapiens
agttaaatgaatgaa

SEQ ID NO: 1034409 - DNA, 15 bp, Homo sapiens
gttaaatgaatgaat

SEQ ID NO: 1034410 - DNA, 15 bp, Homo sapiens
ttaaatgaatgaata

SEQ ID NO: 1034411 - DNA, 15 bp, Homo sapiens
taaatgaatgaatat

SEQ ID NO: 1034412 - DNA, 15 bp, Homo sapiens
aaatgaatgaatata

SEQ ID NO: 1034413 - DNA, 15 bp, Homo sapiens
aatgaatgaatataa

SEQ ID NO: 1034414 - DNA, 15 bp, Homo sapiens
atgaatgaatataaa

SEQ ID NO: 1034415 - DNA, 15 bp, Homo sapiens
tgaatgaatataaag

SEQ ID NO: 1034416 - DNA, 15 bp, Homo sapiens
gaatgaatataaaga

SEQ ID NO: 1034417 - DNA, 15 bp, Homo sapiens
aatgaatataaagaa

SEQ ID NO: 1034418 - DNA, 15 bp, Homo sapiens
atgaatataaagaag

SEQ ID NO: 1034419 - DNA, 15 bp, Homo sapiens
tgaatataaagaagg

SEQ ID NO: 1034420 - DNA, 15 bp, Homo sapiens
gaatataaagaaggg

SEQ ID NO: 1034421 - DNA, 15 bp, Homo sapiens
aatataaagaaggga

SEQ ID NO: 1034422 - DNA, 15 bp, Homo sapiens
atataaagaagggac

SEQ ID NO: 1034423 - DNA, 15 bp, Homo sapiens
tataaagaagggact

SEQ ID NO: 1034424 - DNA, 15 bp, Homo sapiens
ataaagaagggactt

SEQ ID NO: 1034425 - DNA, 15 bp, Homo sapiens
taaagaagggacttg

SEQ ID NO: 1034426 - DNA, 15 bp, Homo sapiens
aaagaagggacttga

SEQ ID NO: 1034427 - DNA, 15 bp, Homo sapiens
aagaagggacttgaa

SEQ ID NO: 1034428 - DNA, 15 bp, Homo sapiens
agaagggacttgaac

SEQ ID NO: 1034429 - DNA, 15 bp, Homo sapiens
gaagggacttgaact

SEQ ID NO: 1034430 - DNA, 15 bp, Homo sapiens
aagggacttgaactg

SEQ ID NO: 1034431 - DNA, 15 bp, Homo sapiens
agggacttgaactgg

SEQ ID NO: 1034432 - DNA, 15 bp, Homo sapiens
gggacttgaactggc

SEQ ID NO: 1034433 - DNA, 15 bp, Homo sapiens
ggacttgaactggcg

SEQ ID NO: 1034434 - DNA, 15 bp, Homo sapiens
gacttgaactggcgc

SEQ ID NO: 1034435 - DNA, 15 bp, Homo sapiens
acttgaactggcgct

SEQ ID NO: 1034436 - DNA, 15 bp, Homo sapiens
cttgaactggcgctg

SEQ ID NO: 1034437 - DNA, 15 bp, Homo sapiens
ttgaactggcgctga

SEQ ID NO: 1034438 - DNA, 15 bp, Homo sapiens
tgaactggcgctgag

SEQ ID NO: 1034439 - DNA, 15 bp, Homo sapiens
gaactggcgctgagc

SEQ ID NO: 1034440 - DNA, 15 bp, Homo sapiens
aactggcgctgagcc

SEQ ID NO: 1034441 - DNA, 15 bp, Homo sapiens
actggcgctgagccc

SEQ ID NO: 1034442 - DNA, 15 bp, Homo sapiens
ctggcgctgagccca

SEQ ID NO: 1034443 - DNA, 15 bp, Homo sapiens
tggcgctgagcccag

SEQ ID NO: 1034444 - DNA, 15 bp, Homo sapiens
ggcgctgagcccagg

SEQ ID NO: 1034445 - DNA, 15 bp, Homo sapiens
gcgctgagcccaggg

SEQ ID NO: 1034446 - DNA, 15 bp, Homo sapiens
cgctgagcccagggg

SEQ ID NO: 1034447 - DNA, 15 bp, Homo sapiens
gctgagcccaggggg

SEQ ID NO: 1034448 - DNA, 15 bp, Homo sapiens
ctgagcccagggggt

SEQ ID NO: 1034449 - DNA, 15 bp, Homo sapiens
tgagcccagggggtg

SEQ ID NO: 1034450 - DNA, 15 bp, Homo sapiens
gagcccagggggtgt

SEQ ID NO: 1034451 - DNA, 15 bp, Homo sapiens
agcccagggggtgtc

SEQ ID NO: 1034452 - DNA, 15 bp, Homo sapiens
gcccagggggtgtct

SEQ ID NO: 1034453 - DNA, 15 bp, Homo sapiens
cccagggggtgtctt

SEQ ID NO: 1034454 - DNA, 15 bp, Homo sapiens
ccagggggtgtcttc

SEQ ID NO: 1034455 - DNA, 15 bp, Homo sapiens
cagggggtgtcttca

SEQ ID NO: 1034456 - DNA, 15 bp, Homo sapiens
agggggtgtcttcaa

SEQ ID NO: 1034457 - DNA, 15 bp, Homo sapiens
gggggtgtcttcaat

SEQ ID NO: 1034458 - DNA, 15 bp, Homo sapiens
ggggtgtcttcaatt

SEQ ID NO: 1034459 - DNA, 15 bp, Homo sapiens
gggtgtcttcaattt

SEQ ID NO: 1034460 - DNA, 15 bp, Homo sapiens
ggtgtcttcaattta

SEQ ID NO: 1034461 - DNA, 15 bp, Homo sapiens
gtgtcttcaatttag

SEQ ID NO: 1034462 - DNA, 15 bp, Homo sapiens
tgtcttcaatttagt

SEQ ID NO: 1034463 - DNA, 15 bp, Homo sapiens
gtcttcaatttagtt

SEQ ID NO: 1034464 - DNA, 15 bp, Homo sapiens
tcttcaatttagttt

SEQ ID NO: 1034465 - DNA, 15 bp, Homo sapiens
cttcaatttagtttc

SEQ ID NO: 1034466 - DNA, 15 bp, Homo sapiens
ttcaatttagtttcc

SEQ ID NO: 1034467 - DNA, 15 bp, Homo sapiens
tcaatttagtttccc

SEQ ID NO: 1034468 - DNA, 15 bp, Homo sapiens
caatttagtttcccc

SEQ ID NO: 1034469 - DNA, 15 bp, Homo sapiens
aatttagtttcccct

SEQ ID NO: 1034470 - DNA, 15 bp, Homo sapiens
atttagtttcccctt

SEQ ID NO: 1034471 - DNA, 15 bp, Homo sapiens
tttagtttccccttc

SEQ ID NO: 1034472 - DNA, 15 bp, Homo sapiens
ttagtttccccttct

SEQ ID NO: 1034473 - DNA, 15 bp, Homo sapiens
tagtttccccttctg

SEQ ID NO: 1034474 - DNA, 15 bp, Homo sapiens
agtttccccttctgg

SEQ ID NO: 1034475 - DNA, 15 bp, Homo sapiens
gtttccccttctggg

SEQ ID NO: 1034476 - DNA, 15 bp, Homo sapiens
tttccccttctgggc

SEQ ID NO: 1034477 - DNA, 15 bp, Homo sapiens
ttccccttctgggct

SEQ ID NO: 1034478 - DNA, 15 bp, Homo sapiens
tccccttctgggctg

SEQ ID NO: 1034479 - DNA, 15 bp, Homo sapiens
ccccttctgggctgt

SEQ ID NO: 1034480 - DNA, 15 bp, Homo sapiens
cccttctgggctgtc

SEQ ID NO: 1034481 - DNA, 15 bp, Homo sapiens
ccttctgggctgtcc

SEQ ID NO: 1034482 - DNA, 15 bp, Homo sapiens
cttctgggctgtcct

SEQ ID NO: 1034483 - DNA, 15 bp, Homo sapiens
ttctgggctgtcctc

SEQ ID NO: 1034484 - DNA, 15 bp, Homo sapiens
tctgggctgtcctca

SEQ ID NO: 1034485 - DNA, 15 bp, Homo sapiens
ctgggctgtcctcac

SEQ ID NO: 1034486 - DNA, 15 bp, Homo sapiens
tgggctgtcctcacg

SEQ ID NO: 1034487 - DNA, 15 bp, Homo sapiens
gggctgtcctcacgt

SEQ ID NO: 1034488 - DNA, 15 bp, Homo sapiens
ggctgtcctcacgtc

SEQ ID NO: 1034489 - DNA, 15 bp, Homo sapiens
gctgtcctcacgtcc

SEQ ID NO: 1034490 - DNA, 15 bp, Homo sapiens
ctgtcctcacgtcca

SEQ ID NO: 1034491 - DNA, 15 bp, Homo sapiens
tgtcctcacgtccac

SEQ ID NO: 1034492 - DNA, 15 bp, Homo sapiens
gtcctcacgtccacc

SEQ ID NO: 1034493 - DNA, 15 bp, Homo sapiens
tcctcacgtccacct

SEQ ID NO: 1034494 - DNA, 15 bp, Homo sapiens
cctcacgtccacctc

SEQ ID NO: 1034495 - DNA, 15 bp, Homo sapiens
ctcacgtccacctcc

SEQ ID NO: 1034496 - DNA, 15 bp, Homo sapiens
tcacgtccacctccc

SEQ ID NO: 1034497 - DNA, 15 bp, Homo sapiens
cacgtccacctcccc

SEQ ID NO: 1034498 - DNA, 15 bp, Homo sapiens
acgtccacctccccc

SEQ ID NO: 1034499 - DNA, 15 bp, Homo sapiens
cgtccacctcccccc

SEQ ID NO: 1034500 - DNA, 15 bp, Homo sapiens
gtccacctcccccca

SEQ ID NO: 1034501 - DNA, 15 bp, Homo sapiens
tccacctccccccaa

SEQ ID NO: 1034502 - DNA, 15 bp, Homo sapiens
ccacctccccccaag

SEQ ID NO: 1034503 - DNA, 15 bp, Homo sapiens
cacctccccccaaga

SEQ ID NO: 1034504 - DNA, 15 bp, Homo sapiens
acctccccccaagaa

SEQ ID NO: 1034505 - DNA, 15 bp, Homo sapiens
cctccccccaagaag

SEQ ID NO: 1034506 - DNA, 15 bp, Homo sapiens
ctccccccaagaaga

SEQ ID NO: 1034507 - DNA, 15 bp, Homo sapiens
tccccccaagaagag

SEQ ID NO: 1034508 - DNA, 15 bp, Homo sapiens
ccccccaagaagagt

SEQ ID NO: 1034509 - DNA, 15 bp, Homo sapiens
cccccaagaagagtc

SEQ ID NO: 1034510 - DNA, 15 bp, Homo sapiens
ccccaagaagagtct

SEQ ID NO: 1034511 - DNA, 15 bp, Homo sapiens
cccaagaagagtctc

SEQ ID NO: 1034512 - DNA, 15 bp, Homo sapiens
ccaagaagagtctca

SEQ ID NO: 1034513 - DNA, 15 bp, Homo sapiens
caagaagagtctcat

SEQ ID NO: 1034514 - DNA, 15 bp, Homo sapiens
aagaagagtctcatt

SEQ ID NO: 1034515 - DNA, 15 bp, Homo sapiens
agaagagtctcattc

SEQ ID NO: 1034516 - DNA, 15 bp, Homo sapiens
gaagagtctcattct

SEQ ID NO: 1034517 - DNA, 15 bp, Homo sapiens
aagagtctcattctt

SEQ ID NO: 1034518 - DNA, 15 bp, Homo sapiens
agagtctcattcttc

SEQ ID NO: 1034519 - DNA, 15 bp, Homo sapiens
gagtctcattcttct

SEQ ID NO: 1034520 - DNA, 15 bp, Homo sapiens
agtctcattcttctc

SEQ ID NO: 1034521 - DNA, 15 bp, Homo sapiens
gtctcattcttctcc

SEQ ID NO: 1034522 - DNA, 15 bp, Homo sapiens
tctcattcttctccc

SEQ ID NO: 1034523 - DNA, 15 bp, Homo sapiens
ctcattcttctccct

SEQ ID NO: 1034524 - DNA, 15 bp, Homo sapiens
tcattcttctcccta

SEQ ID NO: 1034525 - DNA, 15 bp, Homo sapiens
cattcttctccctaa

SEQ ID NO: 1034526 - DNA, 15 bp, Homo sapiens
attcttctccctaag

SEQ ID NO: 1034527 - DNA, 15 bp, Homo sapiens
ttcttctccctaaga

SEQ ID NO: 1034528 - DNA, 15 bp, Homo sapiens
tcttctccctaagag

SEQ ID NO: 1034529 - DNA, 15 bp, Homo sapiens
cttctccctaagagt

SEQ ID NO: 1034530 - DNA, 15 bp, Homo sapiens
ttctccctaagagtg

SEQ ID NO: 1034531 - DNA, 15 bp, Homo sapiens
tctccctaagagtgt

SEQ ID NO: 1034532 - DNA, 15 bp, Homo sapiens
ctccctaagagtgtc

SEQ ID NO: 1034533 - DNA, 15 bp, Homo sapiens
tccctaagagtgtcc

SEQ ID NO: 1034534 - DNA, 15 bp, Homo sapiens
ccctaagagtgtcct

SEQ ID NO: 1034535 - DNA, 15 bp, Homo sapiens
cctaagagtgtcctc

SEQ ID NO: 1034536 - DNA, 15 bp, Homo sapiens
ctaagagtgtcctca

SEQ ID NO: 1034537 - DNA, 15 bp, Homo sapiens
taagagtgtcctcac

SEQ ID NO: 1034538 - DNA, 15 bp, Homo sapiens
aagagtgtcctcact

SEQ ID NO: 1034539 - DNA, 15 bp, Homo sapiens
agagtgtcctcactc

SEQ ID NO: 1034540 - DNA, 15 bp, Homo sapiens
gagtgtcctcactcc

SEQ ID NO: 1034541 - DNA, 15 bp, Homo sapiens
agtgtcctcactccc

SEQ ID NO: 1034542 - DNA, 15 bp, Homo sapiens
gtgtcctcactcccc

SEQ ID NO: 1034543 - DNA, 15 bp, Homo sapiens
tgtcctcactcccct

SEQ ID NO: 1034544 - DNA, 15 bp, Homo sapiens
gtcctcactcccctc

SEQ ID NO: 1034545 - DNA, 15 bp, Homo sapiens
tcctcactcccctcc

SEQ ID NO: 1034546 - DNA, 15 bp, Homo sapiens
cctcactcccctcct

SEQ ID NO: 1034547 - DNA, 15 bp, Homo sapiens
ctcactcccctcctg

SEQ ID NO: 1034548 - DNA, 15 bp, Homo sapiens
tcactcccctcctgc

SEQ ID NO: 1034549 - DNA, 15 bp, Homo sapiens
cactcccctcctgcc

SEQ ID NO: 1034550 - DNA, 15 bp, Homo sapiens
actcccctcctgccc

SEQ ID NO: 1034551 - DNA, 15 bp, Homo sapiens
ctcccctcctgccct

SEQ ID NO: 1034552 - DNA, 15 bp, Homo sapiens
tcccctcctgccctc

SEQ ID NO: 1034553 - DNA, 15 bp, Homo sapiens
cccctcctgccctca

SEQ ID NO: 1034554 - DNA, 15 bp, Homo sapiens
ccctcctgccctcac

SEQ ID NO: 1034555 - DNA, 15 bp, Homo sapiens
cctcctgccctcacc

SEQ ID NO: 1034556 - DNA, 15 bp, Homo sapiens
ctcctgccctcaccc

SEQ ID NO: 1034557 - DNA, 15 bp, Homo sapiens
tcctgccctcaccca

SEQ ID NO: 1034558 - DNA, 15 bp, Homo sapiens
cctgccctcacccag

SEQ ID NO: 1034559 - DNA, 15 bp, Homo sapiens
ctgccctcacccagg

SEQ ID NO: 1034560 - DNA, 15 bp, Homo sapiens
tgccctcacccagga

SEQ ID NO: 1034561 - DNA, 15 bp, Homo sapiens
gccctcacccaggag

SEQ ID NO: 1034562 - DNA, 15 bp, Homo sapiens
ccctcacccaggagt

SEQ ID NO: 1034563 - DNA, 15 bp, Homo sapiens
cctcacccaggagtg

SEQ ID NO: 1034564 - DNA, 15 bp, Homo sapiens
ctcacccaggagtgt

SEQ ID NO: 1034565 - DNA, 15 bp, Homo sapiens
tcacccaggagtgtg

SEQ ID NO: 1034566 - DNA, 15 bp, Homo sapiens
cacccaggagtgtgg

SEQ ID NO: 1034567 - DNA, 15 bp, Homo sapiens
acccaggagtgtggt

SEQ ID NO: 1034568 - DNA, 15 bp, Homo sapiens
cccaggagtgtggtt

SEQ ID NO: 1034569 - DNA, 15 bp, Homo sapiens
ccaggagtgtggtta

SEQ ID NO: 1034570 - DNA, 15 bp, Homo sapiens
caggagtgtggttac

SEQ ID NO: 1034571 - DNA, 15 bp, Homo sapiens
aggagtgtggttacc

SEQ ID NO: 1034572 - DNA, 15 bp, Homo sapiens
ggagtgtggttaccc

SEQ ID NO: 1034573 - DNA, 15 bp, Homo sapiens
gagtgtggttaccct

SEQ ID NO: 1034574 - DNA, 15 bp, Homo sapiens
agtgtggttaccctc

SEQ ID NO: 1034575 - DNA, 15 bp, Homo sapiens
gtgtggttaccctcc

SEQ ID NO: 1034576 - DNA, 15 bp, Homo sapiens
tgtggttaccctcca

SEQ ID NO: 1034577 - DNA, 15 bp, Homo sapiens
gtggttaccctccag

SEQ ID NO: 1034578 - DNA, 15 bp, Homo sapiens
tggttaccctccagg

SEQ ID NO: 1034579 - DNA, 15 bp, Homo sapiens
ggttaccctccaggt

SEQ ID NO: 1034580 - DNA, 15 bp, Homo sapiens
gttaccctccaggtg

SEQ ID NO: 1034581 - DNA, 15 bp, Homo sapiens
ttaccctccaggtgt

SEQ ID NO: 1034582 - DNA, 15 bp, Homo sapiens
taccctccaggtgta

SEQ ID NO: 1034583 - DNA, 15 bp, Homo sapiens
accctccaggtgtag

SEQ ID NO: 1034584 - DNA, 15 bp, Homo sapiens
ccctccaggtgtagc

SEQ ID NO: 1034585 - DNA, 15 bp, Homo sapiens
cctccaggtgtagcc

SEQ ID NO: 1034586 - DNA, 15 bp, Homo sapiens
ctccaggtgtagcca

SEQ ID NO: 1034587 - DNA, 15 bp, Homo sapiens
tccaggtgtagccaa

SEQ ID NO: 1034588 - DNA, 15 bp, Homo sapiens
ccaggtgtagccaag

SEQ ID NO: 1034589 - DNA, 15 bp, Homo sapiens
caggtgtagccaaga

SEQ ID NO: 1034590 - DNA, 15 bp, Homo sapiens
aggtgtagccaagac

SEQ ID NO: 1034591 - DNA, 15 bp, Homo sapiens
ggtgtagccaagacc

SEQ ID NO: 1034592 - DNA, 15 bp, Homo sapiens
gtgtagccaagacca

SEQ ID NO: 1034593 - DNA, 15 bp, Homo sapiens
tgtagccaagaccag

SEQ ID NO: 1034594 - DNA, 15 bp, Homo sapiens
gtagccaagaccagg

SEQ ID NO: 1034595 - DNA, 15 bp, Homo sapiens
tagccaagaccaggg

SEQ ID NO: 1034596 - DNA, 15 bp, Homo sapiens
agccaagaccaggga

SEQ ID NO: 1034597 - DNA, 15 bp, Homo sapiens
gccaagaccagggaa

SEQ ID NO: 1034598 - DNA, 15 bp, Homo sapiens
ccaagaccagggaag

SEQ ID NO: 1034599 - DNA, 15 bp, Homo sapiens
caagaccagggaagg

SEQ ID NO: 1034600 - DNA, 15 bp, Homo sapiens
aagaccagggaaggt

SEQ ID NO: 1034601 - DNA, 15 bp, Homo sapiens
agaccagggaaggtg

SEQ ID NO: 1034602 - DNA, 15 bp, Homo sapiens
gaccagggaaggtgg

SEQ ID NO: 1034603 - DNA, 15 bp, Homo sapiens
accagggaaggtggg

SEQ ID NO: 1034604 - DNA, 15 bp, Homo sapiens
ccagggaaggtgggg

SEQ ID NO: 1034605 - DNA, 15 bp, Homo sapiens
cagggaaggtggggc

SEQ ID NO: 1034606 - DNA, 15 bp, Homo sapiens
agggaaggtggggcc

SEQ ID NO: 1034607 - DNA, 15 bp, Homo sapiens
gggaaggtggggcct

SEQ ID NO: 1034608 - DNA, 15 bp, Homo sapiens
ggaaggtggggcctg

SEQ ID NO: 1034609 - DNA, 15 bp, Homo sapiens
gaaggtggggcctgg

SEQ ID NO: 1034610 - DNA, 15 bp, Homo sapiens
aaggtggggcctggt

SEQ ID NO: 1034611 - DNA, 15 bp, Homo sapiens
aggtggggcctggtc

SEQ ID NO: 1034612 - DNA, 15 bp, Homo sapiens
ggtggggcctggtcc

SEQ ID NO: 1034613 - DNA, 15 bp, Homo sapiens
gtggggcctggtcct

SEQ ID NO: 1034614 - DNA, 15 bp, Homo sapiens
tggggcctggtcctc

SEQ ID NO: 1034615 - DNA, 15 bp, Homo sapiens
ggggcctggtcctcc

SEQ ID NO: 1034616 - DNA, 15 bp, Homo sapiens
gggcctggtcctccc

SEQ ID NO: 1034617 - DNA, 15 bp, Homo sapiens
ggcctggtcctccca

SEQ ID NO: 1034618 - DNA, 15 bp, Homo sapiens
gcctggtcctcccag

SEQ ID NO: 1034619 - DNA, 15 bp, Homo sapiens
cctggtcctcccaga

SEQ ID NO: 1034620 - DNA, 15 bp, Homo sapiens
ctggtcctcccagaa

SEQ ID NO: 1034621 - DNA, 15 bp, Homo sapiens
tggtcctcccagaat

SEQ ID NO: 1034622 - DNA, 15 bp, Homo sapiens
ggtcctcccagaatc

SEQ ID NO: 1034623 - DNA, 15 bp, Homo sapiens
gtcctcccagaatct

SEQ ID NO: 1034624 - DNA, 15 bp, Homo sapiens
tcctcccagaatctc

SEQ ID NO: 1034625 - DNA, 15 bp, Homo sapiens
cctcccagaatctct

SEQ ID NO: 1034626 - DNA, 15 bp, Homo sapiens
ctcccagaatctctg

SEQ ID NO: 1034627 - DNA, 15 bp, Homo sapiens
tcccagaatctctga

SEQ ID NO: 1034628 - DNA, 15 bp, Homo sapiens
cccagaatctctgat

SEQ ID NO: 1034629 - DNA, 15 bp, Homo sapiens
ccagaatctctgatc

SEQ ID NO: 1034630 - DNA, 15 bp, Homo sapiens
cagaatctctgatct

SEQ ID NO: 1034631 - DNA, 15 bp, Homo sapiens
agaatctctgatctg

SEQ ID NO: 1034632 - DNA, 15 bp, Homo sapiens
gaatctctgatctgt

SEQ ID NO: 1034633 - DNA, 15 bp, Homo sapiens
aatctctgatctgta

SEQ ID NO: 1034634 - DNA, 15 bp, Homo sapiens
atctctgatctgtac

SEQ ID NO: 1034635 - DNA, 15 bp, Homo sapiens
tctctgatctgtacc

SEQ ID NO: 1034636 - DNA, 15 bp, Homo sapiens
ctctgatctgtacca

SEQ ID NO: 1034637 - DNA, 15 bp, Homo sapiens
tctgatctgtaccag

SEQ ID NO: 1034638 - DNA, 15 bp, Homo sapiens
ctgatctgtaccagc

SEQ ID NO: 1034639 - DNA, 15 bp, Homo sapiens
tgatctgtaccagcc

SEQ ID NO: 1034640 - DNA, 15 bp, Homo sapiens
gatctgtaccagcct

SEQ ID NO: 1034641 - DNA, 15 bp, Homo sapiens
atctgtaccagcctc

SEQ ID NO: 1034642 - DNA, 15 bp, Homo sapiens
tctgtaccagcctct

SEQ ID NO: 1034643 - DNA, 15 bp, Homo sapiens
ctgtaccagcctctc

SEQ ID NO: 1034644 - DNA, 15 bp, Homo sapiens
tgtaccagcctctcc

SEQ ID NO: 1034645 - DNA, 15 bp, Homo sapiens
gtaccagcctctcct

SEQ ID NO: 1034646 - DNA, 15 bp, Homo sapiens
taccagcctctcctt

SEQ ID NO: 1034647 - DNA, 15 bp, Homo sapiens
accagcctctcctta

SEQ ID NO: 1034648 - DNA, 15 bp, Homo sapiens
ccagcctctccttag

SEQ ID NO: 1034649 - DNA, 15 bp, Homo sapiens
cagcctctccttagg

SEQ ID NO: 1034650 - DNA, 15 bp, Homo sapiens
agcctctccttaggc

SEQ ID NO: 1034651 - DNA, 15 bp, Homo sapiens
gcctctccttaggca

SEQ ID NO: 1034652 - DNA, 15 bp, Homo sapiens
cctctccttaggcac

SEQ ID NO: 1034653 - DNA, 15 bp, Homo sapiens
ctctccttaggcact

SEQ ID NO: 1034654 - DNA, 15 bp, Homo sapiens
tctccttaggcacta

SEQ ID NO: 1034655 - DNA, 15 bp, Homo sapiens
ctccttaggcactac

SEQ ID NO: 1034656 - DNA, 15 bp, Homo sapiens
tccttaggcactaca

SEQ ID NO: 1034657 - DNA, 15 bp, Homo sapiens
ccttaggcactacag

SEQ ID NO: 1034658 - DNA, 15 bp, Homo sapiens
cttaggcactacaga

SEQ ID NO: 1034659 - DNA, 15 bp, Homo sapiens
ttaggcactacagaa

SEQ ID NO: 1034660 - DNA, 15 bp, Homo sapiens
taggcactacagaaa

SEQ ID NO: 1034661 - DNA, 15 bp, Homo sapiens
aggcactacagaaag

SEQ ID NO: 1034662 - DNA, 15 bp, Homo sapiens
ggcactacagaaagt

SEQ ID NO: 1034663 - DNA, 15 bp, Homo sapiens
gcactacagaaagtg

SEQ ID NO: 1034664 - DNA, 15 bp, Homo sapiens
cactacagaaagtgt

SEQ ID NO: 1034665 - DNA, 15 bp, Homo sapiens
actacagaaagtgtg

SEQ ID NO: 1034666 - DNA, 15 bp, Homo sapiens
ctacagaaagtgtga

SEQ ID NO: 1034667 - DNA, 15 bp, Homo sapiens
tacagaaagtgtgac

SEQ ID NO: 1034668 - DNA, 15 bp, Homo sapiens
acagaaagtgtgact

SEQ ID NO: 1034669 - DNA, 15 bp, Homo sapiens
cagaaagtgtgactg

SEQ ID NO: 1034670 - DNA, 15 bp, Homo sapiens
agaaagtgtgactgt

SEQ ID NO: 1034671 - DNA, 15 bp, Homo sapiens
gaaagtgtgactgtt

SEQ ID NO: 1034672 - DNA, 15 bp, Homo sapiens
aaagtgtgactgtta

SEQ ID NO: 1034673 - DNA, 15 bp, Homo sapiens
aagtgtgactgttat

SEQ ID NO: 1034674 - DNA, 15 bp, Homo sapiens
agtgtgactgttatt

SEQ ID NO: 1034675 - DNA, 15 bp, Homo sapiens
gtgtgactgttattg

SEQ ID NO: 1034676 - DNA, 15 bp, Homo sapiens
tgtgactgttattgt

SEQ ID NO: 1034677 - DNA, 15 bp, Homo sapiens
gtgactgttattgtt

SEQ ID NO: 1034678 - DNA, 15 bp, Homo sapiens
tgactgttattgtta

SEQ ID NO: 1034679 - DNA, 15 bp, Homo sapiens
gactgttattgttat

SEQ ID NO: 1034680 - DNA, 15 bp, Homo sapiens
actgttattgttatt

SEQ ID NO: 1034681 - DNA, 15 bp, Homo sapiens
ctgttattgttatta

SEQ ID NO: 1034682 - DNA, 15 bp, Homo sapiens
tgttattgttattat

SEQ ID NO: 1034683 - DNA, 15 bp, Homo sapiens
gttattgttattatt

SEQ ID NO: 1034684 - DNA, 15 bp, Homo sapiens
ttattgttattattc

SEQ ID NO: 1034685 - DNA, 15 bp, Homo sapiens
tattgttattattca

SEQ ID NO: 1034686 - DNA, 15 bp, Homo sapiens
attgttattattcat

SEQ ID NO: 1034687 - DNA, 15 bp, Homo sapiens
ttgttattattcatg

SEQ ID NO: 1034688 - DNA, 15 bp, Homo sapiens
tgttattattcatgg

SEQ ID NO: 1034689 - DNA, 15 bp, Homo sapiens
gttattattcatgga

SEQ ID NO: 1034690 - DNA, 15 bp, Homo sapiens
ttattattcatggag

SEQ ID NO: 1034691 - DNA, 15 bp, Homo sapiens
tattattcatggaga

SEQ ID NO: 1034692 - DNA, 15 bp, Homo sapiens
attattcatggagaa

SEQ ID NO: 1034693 - DNA, 15 bp, Homo sapiens
ttattcatggagaat

SEQ ID NO: 1034694 - DNA, 15 bp, Homo sapiens
tattcatggagaata

SEQ ID NO: 1034695 - DNA, 15 bp, Homo sapiens
attcatggagaatag

SEQ ID NO: 1034696 - DNA, 15 bp, Homo sapiens
ttcatggagaatagt

SEQ ID NO: 1034697 - DNA, 15 bp, Homo sapiens
tcatggagaatagta

SEQ ID NO: 1034698 - DNA, 15 bp, Homo sapiens
catggagaatagtaa

SEQ ID NO: 1034699 - DNA, 15 bp, Homo sapiens
atggagaatagtaag

SEQ ID NO: 1034700 - DNA, 15 bp, Homo sapiens
tggagaatagtaagg

SEQ ID NO: 1034701 - DNA, 15 bp, Homo sapiens
ggagaatagtaaggg

SEQ ID NO: 1034702 - DNA, 15 bp, Homo sapiens
gagaatagtaaggga

SEQ ID NO: 1034703 - DNA, 15 bp, Homo sapiens
agaatagtaagggag

SEQ ID NO: 1034704 - DNA, 15 bp, Homo sapiens
gaatagtaagggagt

SEQ ID NO: 1034705 - DNA, 15 bp, Homo sapiens
aatagtaagggagtg

SEQ ID NO: 1034706 - DNA, 15 bp, Homo sapiens
atagtaagggagtgg

SEQ ID NO: 1034707 - DNA, 15 bp, Homo sapiens
tagtaagggagtgga

SEQ ID NO: 1034708 - DNA, 15 bp, Homo sapiens
agtaagggagtggag

SEQ ID NO: 1034709 - DNA, 15 bp, Homo sapiens
gtaagggagtggaga

SEQ ID NO: 1034710 - DNA, 15 bp, Homo sapiens
taagggagtggagac

SEQ ID NO: 1034711 - DNA, 15 bp, Homo sapiens
aagggagtggagact

SEQ ID NO: 1034712 - DNA, 15 bp, Homo sapiens
agggagtggagactc

SEQ ID NO: 1034713 - DNA, 15 bp, Homo sapiens
gggagtggagactca

SEQ ID NO: 1034714 - DNA, 15 bp, Homo sapiens
ggagtggagactcaa

SEQ ID NO: 1034715 - DNA, 15 bp, Homo sapiens
gagtggagactcaag

SEQ ID NO: 1034716 - DNA, 15 bp, Homo sapiens
agtggagactcaaga

SEQ ID NO: 1034717 - DNA, 15 bp, Homo sapiens
gtggagactcaagaa

SEQ ID NO: 1034718 - DNA, 15 bp, Homo sapiens
tggagactcaagaag

SEQ ID NO: 1034719 - DNA, 15 bp, Homo sapiens
ggagactcaagaaga

SEQ ID NO: 1034720 - DNA, 15 bp, Homo sapiens
gagactcaagaagac

SEQ ID NO: 1034721 - DNA, 15 bp, Homo sapiens
agactcaagaagacg

SEQ ID NO: 1034722 - DNA, 15 bp, Homo sapiens
gactcaagaagacgc

SEQ ID NO: 1034723 - DNA, 15 bp, Homo sapiens
actcaagaagacgct

SEQ ID NO: 1034724 - DNA, 15 bp, Homo sapiens
ctcaagaagacgcta

SEQ ID NO: 1034725 - DNA, 15 bp, Homo sapiens
tcaagaagacgctag

SEQ ID NO: 1034726 - DNA, 15 bp, Homo sapiens
caagaagacgctagc

SEQ ID NO: 1034727 - DNA, 15 bp, Homo sapiens
aagaagacgctagct

SEQ ID NO: 1034728 - DNA, 15 bp, Homo sapiens
agaagacgctagctt

SEQ ID NO: 1034729 - DNA, 15 bp, Homo sapiens
gaagacgctagcttg

SEQ ID NO: 1034730 - DNA, 15 bp, Homo sapiens
aagacgctagcttgg

SEQ ID NO: 1034731 - DNA, 15 bp, Homo sapiens
agacgctagcttggg

SEQ ID NO: 1034732 - DNA, 15 bp, Homo sapiens
gacgctagcttggga

SEQ ID NO: 1034733 - DNA, 15 bp, Homo sapiens
acgctagcttgggag

SEQ ID NO: 1034734 - DNA, 15 bp, Homo sapiens
cgctagcttgggagg

SEQ ID NO: 1034735 - DNA, 15 bp, Homo sapiens
gctagcttgggaggc

SEQ ID NO: 1034736 - DNA, 15 bp, Homo sapiens
ctagcttgggaggcc

SEQ ID NO: 1034737 - DNA, 15 bp, Homo sapiens
tagcttgggaggccg

SEQ ID NO: 1034738 - DNA, 15 bp, Homo sapiens
agcttgggaggccga

SEQ ID NO: 1034739 - DNA, 15 bp, Homo sapiens
gcttgggaggccgag

SEQ ID NO: 1034740 - DNA, 15 bp, Homo sapiens
cttgggaggccgagg

SEQ ID NO: 1034741 - DNA, 15 bp, Homo sapiens
tgggaggccgaggca

SEQ ID NO: 1034742 - DNA, 15 bp, Homo sapiens
gggaggccgaggcaa

SEQ ID NO: 1034743 - DNA, 15 bp, Homo sapiens
ggaggccgaggcaag

SEQ ID NO: 1034744 - DNA, 15 bp, Homo sapiens
gaggccgaggcaaga

SEQ ID NO: 1034745 - DNA, 15 bp, Homo sapiens
aggccgaggcaagag

SEQ ID NO: 1034746 - DNA, 15 bp, Homo sapiens
ggccgaggcaagagg

SEQ ID NO: 1034747 - DNA, 15 bp, Homo sapiens
gccgaggcaagagga

SEQ ID NO: 1034748 - DNA, 15 bp, Homo sapiens
ccgaggcaagaggat

SEQ ID NO: 1034749 - DNA, 15 bp, Homo sapiens
cgaggcaagaggatc

SEQ ID NO: 1034750 - DNA, 15 bp, Homo sapiens
gaggcaagaggatca

SEQ ID NO: 1034751 - DNA, 15 bp, Homo sapiens
aggcaagaggatcac

SEQ ID NO: 1034752 - DNA, 15 bp, Homo sapiens
ggcaagaggatcact

SEQ ID NO: 1034753 - DNA, 15 bp, Homo sapiens
gcaagaggatcactt

SEQ ID NO: 1034754 - DNA, 15 bp, Homo sapiens
caagaggatcacttg

SEQ ID NO: 1034755 - DNA, 15 bp, Homo sapiens
aagaggatcacttga

SEQ ID NO: 1034756 - DNA, 15 bp, Homo sapiens
agaggatcacttgag

SEQ ID NO: 1034757 - DNA, 15 bp, Homo sapiens
gaggatcacttgagg

SEQ ID NO: 1034758 - DNA, 15 bp, Homo sapiens
aggatcacttgaggc

SEQ ID NO: 1034759 - DNA, 15 bp, Homo sapiens
ggatcacttgaggcc

SEQ ID NO: 1034760 - DNA, 15 bp, Homo sapiens
gatcacttgaggcca

SEQ ID NO: 1034761 - DNA, 15 bp, Homo sapiens
atcacttgaggccac

SEQ ID NO: 1034762 - DNA, 15 bp, Homo sapiens
tcacttgaggccaca

SEQ ID NO: 1034763 - DNA, 15 bp, Homo sapiens
cacttgaggccacaa

SEQ ID NO: 1034764 - DNA, 15 bp, Homo sapiens
acttgaggccacaag

SEQ ID NO: 1034765 - DNA, 15 bp, Homo sapiens
cttgaggccacaagt

SEQ ID NO: 1034766 - DNA, 15 bp, Homo sapiens
ttgaggccacaagtt

SEQ ID NO: 1034767 - DNA, 15 bp, Homo sapiens
tgaggccacaagttt

SEQ ID NO: 1034768 - DNA, 15 bp, Homo sapiens
gaggccacaagtttg

SEQ ID NO: 1034769 - DNA, 15 bp, Homo sapiens
aggccacaagtttga

SEQ ID NO: 1034770 - DNA, 15 bp, Homo sapiens
ggccacaagtttgag

SEQ ID NO: 1034771 - DNA, 15 bp, Homo sapiens
gccacaagtttgaga

SEQ ID NO: 1034772 - DNA, 15 bp, Homo sapiens
ccacaagtttgagac

SEQ ID NO: 1034773 - DNA, 15 bp, Homo sapiens
cacaagtttgagacc

SEQ ID NO: 1034774 - DNA, 15 bp, Homo sapiens
acaagtttgagacca

SEQ ID NO: 1034775 - DNA, 15 bp, Homo sapiens
caagtttgagaccag

SEQ ID NO: 1034776 - DNA, 15 bp, Homo sapiens
aagtttgagaccagc

SEQ ID NO: 1034777 - DNA, 15 bp, Homo sapiens
tgagaccagcctggg

SEQ ID NO: 1034778 - DNA, 15 bp, Homo sapiens
gagaccagcctgggc

SEQ ID NO: 1034779 - DNA, 15 bp, Homo sapiens
cctgggcaacacagc

SEQ ID NO: 1034780 - DNA, 15 bp, Homo sapiens
ctgggcaacacagca

SEQ ID NO: 1034781 - DNA, 15 bp, Homo sapiens
tgggcaacacagcaa

SEQ ID NO: 1034782 - DNA, 15 bp, Homo sapiens
gggcaacacagcaag

SEQ ID NO: 1034783 - DNA, 15 bp, Homo sapiens
ggcaacacagcaaga

SEQ ID NO: 1034784 - DNA, 15 bp, Homo sapiens
gcaacacagcaagac

SEQ ID NO: 1034785 - DNA, 15 bp, Homo sapiens
caacacagcaagacc

SEQ ID NO: 1034786 - DNA, 15 bp, Homo sapiens
aacacagcaagaccc

SEQ ID NO: 1034787 - DNA, 15 bp, Homo sapiens
acacagcaagaccct

SEQ ID NO: 1034788 - DNA, 15 bp, Homo sapiens
cacagcaagacccta

SEQ ID NO: 1034789 - DNA, 15 bp, Homo sapiens
acagcaagaccctat

SEQ ID NO: 1034790 - DNA, 15 bp, Homo sapiens
cagcaagaccctatc

SEQ ID NO: 1034791 - DNA, 15 bp, Homo sapiens
agcaagaccctatct

SEQ ID NO: 1034792 - DNA, 15 bp, Homo sapiens
gcaagaccctatctc

SEQ ID NO: 1034793 - DNA, 15 bp, Homo sapiens
caagaccctatctct

SEQ ID NO: 1034794 - DNA, 15 bp, Homo sapiens
aagaccctatctcta

SEQ ID NO: 1034795 - DNA, 15 bp, Homo sapiens
agaccctatctctac

SEQ ID NO: 1034796 - DNA, 15 bp, Homo sapiens
gaccctatctctaca

SEQ ID NO: 1034797 - DNA, 15 bp, Homo sapiens
accctatctctacac

SEQ ID NO: 1034798 - DNA, 15 bp, Homo sapiens
ccctatctctacaca

SEQ ID NO: 1034799 - DNA, 15 bp, Homo sapiens
cctatctctacacac

SEQ ID NO: 1034800 - DNA, 15 bp, Homo sapiens
ctatctctacacaca

SEQ ID NO: 1034801 - DNA, 15 bp, Homo sapiens
tatctctacacacac

SEQ ID NO: 1034802 - DNA, 15 bp, Homo sapiens
atctctacacacaca

SEQ ID NO: 1034803 - DNA, 15 bp, Homo sapiens
tctctacacacacaa

SEQ ID NO: 1034804 - DNA, 15 bp, Homo sapiens
ctctacacacacaaa

SEQ ID NO: 1034805 - DNA, 15 bp, Homo sapiens
tctacacacacaaag

SEQ ID NO: 1034806 - DNA, 15 bp, Homo sapiens
ctacacacacaaagt

SEQ ID NO: 1034807 - DNA, 15 bp, Homo sapiens
tacacacacaaagtc

SEQ ID NO: 1034808 - DNA, 15 bp, Homo sapiens
acacacacaaagtct

SEQ ID NO: 1034809 - DNA, 15 bp, Homo sapiens
cacacacaaagtctt

SEQ ID NO: 1034810 - DNA, 15 bp, Homo sapiens
acacacaaagtctta

SEQ ID NO: 1034811 - DNA, 15 bp, Homo sapiens
cacacaaagtcttaa

SEQ ID NO: 1034812 - DNA, 15 bp, Homo sapiens
acacaaagtcttaaa

SEQ ID NO: 1034813 - DNA, 15 bp, Homo sapiens
cacaaagtcttaaaa

SEQ ID NO: 1034814 - DNA, 15 bp, Homo sapiens
acaaagtcttaaaaa

SEQ ID NO: 1034815 - DNA, 15 bp, Homo sapiens
caaagtcttaaaaaa

SEQ ID NO: 1034816 - DNA, 15 bp, Homo sapiens
aaagtcttaaaaaaa

SEQ ID NO: 1034817 - DNA, 15 bp, Homo sapiens
aagtcttaaaaaaaa

SEQ ID NO: 1034818 - DNA, 15 bp, Homo sapiens
agtcttaaaaaaaaa

SEQ ID NO: 1034819 - DNA, 15 bp, Homo sapiens
gtcttaaaaaaaaat

SEQ ID NO: 1034820 - DNA, 15 bp, Homo sapiens
tcttaaaaaaaaatt

SEQ ID NO: 1034821 - DNA, 15 bp, Homo sapiens
cttaaaaaaaaatta

SEQ ID NO: 1034822 - DNA, 15 bp, Homo sapiens
ttaaaaaaaaattag

SEQ ID NO: 1034823 - DNA, 15 bp, Homo sapiens
taaaaaaaaattagc

SEQ ID NO: 1034824 - DNA, 15 bp, Homo sapiens
aaaaaaaaattagcc

SEQ ID NO: 1034825 - DNA, 15 bp, Homo sapiens
aaaaaaaattagcca

SEQ ID NO: 1034826 - DNA, 15 bp, Homo sapiens
aaaattagccaggca

SEQ ID NO: 1034827 - DNA, 15 bp, Homo sapiens
aaattagccaggcat

SEQ ID NO: 1034828 - DNA, 15 bp, Homo sapiens
aattagccaggcatg

SEQ ID NO: 1034829 - DNA, 15 bp, Homo sapiens
attagccaggcatgg

SEQ ID NO: 1034830 - DNA, 15 bp, Homo sapiens
ccaggcatggtggca

SEQ ID NO: 1034831 - DNA, 15 bp, Homo sapiens
caggcatggtggcac

SEQ ID NO: 1034832 - DNA, 15 bp, Homo sapiens
aggcatggtggcaca

SEQ ID NO: 1034833 - DNA, 15 bp, Homo sapiens
ggcatggtggcacac

SEQ ID NO: 1034834 - DNA, 15 bp, Homo sapiens
gcatggtggcacaca

SEQ ID NO: 1034835 - DNA, 15 bp, Homo sapiens
catggtggcacacac

SEQ ID NO: 1034836 - DNA, 15 bp, Homo sapiens
atggtggcacacacc

SEQ ID NO: 1034837 - DNA, 15 bp, Homo sapiens
tggtggcacacacct

SEQ ID NO: 1034838 - DNA, 15 bp, Homo sapiens
ggtggcacacaccta

SEQ ID NO: 1034839 - DNA, 15 bp, Homo sapiens
gtggcacacacctat

SEQ ID NO: 1034840 - DNA, 15 bp, Homo sapiens
tggcacacacctata

SEQ ID NO: 1034841 - DNA, 15 bp, Homo sapiens
ggcacacacctatag

SEQ ID NO: 1034842 - DNA, 15 bp, Homo sapiens
gcacacacctatagt

SEQ ID NO: 1034843 - DNA, 15 bp, Homo sapiens
cacacacctatagtc

SEQ ID NO: 1034844 - DNA, 15 bp, Homo sapiens
acacacctatagtcc

SEQ ID NO: 1034845 - DNA, 15 bp, Homo sapiens
cacacctatagtccc

SEQ ID NO: 1034846 - DNA, 15 bp, Homo sapiens
acacctatagtccca

SEQ ID NO: 1034847 - DNA, 15 bp, Homo sapiens
cacctatagtcccag

SEQ ID NO: 1034848 - DNA, 15 bp, Homo sapiens
acctatagtcccagc

SEQ ID NO: 1034849 - DNA, 15 bp, Homo sapiens
cctatagtcccagct

SEQ ID NO: 1034850 - DNA, 15 bp, Homo sapiens
ctatagtcccagcta

SEQ ID NO: 1034851 - DNA, 15 bp, Homo sapiens
gaggtgggaggattg

SEQ ID NO: 1034852 - DNA, 15 bp, Homo sapiens
aggattgcttgagcc

SEQ ID NO: 1034853 - DNA, 15 bp, Homo sapiens
ggattgcttgagccc

SEQ ID NO: 1034854 - DNA, 15 bp, Homo sapiens
gattgcttgagccca

SEQ ID NO: 1034855 - DNA, 15 bp, Homo sapiens
attgcttgagcccag

SEQ ID NO: 1034856 - DNA, 15 bp, Homo sapiens
ttgcttgagcccagg

SEQ ID NO: 1034857 - DNA, 15 bp, Homo sapiens
tgcttgagcccagga

SEQ ID NO: 1034858 - DNA, 15 bp, Homo sapiens
tgagcccaggagttc

SEQ ID NO: 1034859 - DNA, 15 bp, Homo sapiens
gagcccaggagttca

SEQ ID NO: 1034860 - DNA, 15 bp, Homo sapiens
agcccaggagttcaa

SEQ ID NO: 1034861 - DNA, 15 bp, Homo sapiens
cccaggagttcaagg

SEQ ID NO: 1034862 - DNA, 15 bp, Homo sapiens
ccaggagttcaaggc

SEQ ID NO: 1034863 - DNA, 15 bp, Homo sapiens
caggagttcaaggct

SEQ ID NO: 1034864 - DNA, 15 bp, Homo sapiens
aggagttcaaggctg

SEQ ID NO: 1034865 - DNA, 15 bp, Homo sapiens
ggagttcaaggctgc

SEQ ID NO: 1034866 - DNA, 15 bp, Homo sapiens
gagttcaaggctgca

SEQ ID NO: 1034867 - DNA, 15 bp, Homo sapiens
agttcaaggctgcag

SEQ ID NO: 1034868 - DNA, 15 bp, Homo sapiens
gttcaaggctgcagt

SEQ ID NO: 1034869 - DNA, 15 bp, Homo sapiens
ttcaaggctgcagtg

SEQ ID NO: 1034870 - DNA, 15 bp, Homo sapiens
caaggctgcagtgaa

SEQ ID NO: 1034871 - DNA, 15 bp, Homo sapiens
aaggctgcagtgaaa

SEQ ID NO: 1034872 - DNA, 15 bp, Homo sapiens
aggctgcagtgaaat

SEQ ID NO: 1034873 - DNA, 15 bp, Homo sapiens
ggctgcagtgaaata

SEQ ID NO: 1034874 - DNA, 15 bp, Homo sapiens
gctgcagtgaaatat

SEQ ID NO: 1034875 - DNA, 15 bp, Homo sapiens
ctgcagtgaaatatg

SEQ ID NO: 1034876 - DNA, 15 bp, Homo sapiens
tgcagtgaaatatga

SEQ ID NO: 1034877 - DNA, 15 bp, Homo sapiens
gcagtgaaatatgat

SEQ ID NO: 1034878 - DNA, 15 bp, Homo sapiens
cagtgaaatatgatg

SEQ ID NO: 1034879 - DNA, 15 bp, Homo sapiens
agtgaaatatgatgt

SEQ ID NO: 1034880 - DNA, 15 bp, Homo sapiens
gtgaaatatgatgtt

SEQ ID NO: 1034881 - DNA, 15 bp, Homo sapiens
tgaaatatgatgttg

SEQ ID NO: 1034882 - DNA, 15 bp, Homo sapiens
gaaatatgatgttgc

SEQ ID NO: 1034883 - DNA, 15 bp, Homo sapiens
aaatatgatgttgcc

SEQ ID NO: 1034884 - DNA, 15 bp, Homo sapiens
aatatgatgttgcca

SEQ ID NO: 1034885 - DNA, 15 bp, Homo sapiens
atatgatgttgccac

SEQ ID NO: 1034886 - DNA, 15 bp, Homo sapiens
tatgatgttgccaca

SEQ ID NO: 1034887 - DNA, 15 bp, Homo sapiens
atgatgttgccacag

SEQ ID NO: 1034888 - DNA, 15 bp, Homo sapiens
tgatgttgccacagc

SEQ ID NO: 1034889 - DNA, 15 bp, Homo sapiens
gatgttgccacagca

SEQ ID NO: 1034890 - DNA, 15 bp, Homo sapiens
atgttgccacagcac

SEQ ID NO: 1034891 - DNA, 15 bp, Homo sapiens
tgttgccacagcact

SEQ ID NO: 1034892 - DNA, 15 bp, Homo sapiens
gttgccacagcactt

SEQ ID NO: 1034893 - DNA, 15 bp, Homo sapiens
ttgccacagcacttc

SEQ ID NO: 1034894 - DNA, 15 bp, Homo sapiens
tgccacagcacttca

SEQ ID NO: 1034895 - DNA, 15 bp, Homo sapiens
gccacagcacttcag

SEQ ID NO: 1034896 - DNA, 15 bp, Homo sapiens
ccacagcacttcagc

SEQ ID NO: 1034897 - DNA, 15 bp, Homo sapiens
cacagcacttcagcc

SEQ ID NO: 1034898 - DNA, 15 bp, Homo sapiens
acagcacttcagcct

SEQ ID NO: 1034899 - DNA, 15 bp, Homo sapiens
cagcacttcagcctg

SEQ ID NO: 1034900 - DNA, 15 bp, Homo sapiens
agcacttcagcctgg

SEQ ID NO: 1034901 - DNA, 15 bp, Homo sapiens
tcagcctgggcaact

SEQ ID NO: 1034902 - DNA, 15 bp, Homo sapiens
cagcctgggcaactg

SEQ ID NO: 1034903 - DNA, 15 bp, Homo sapiens
agcctgggcaactga

SEQ ID NO: 1034904 - DNA, 15 bp, Homo sapiens
gcctgggcaactgag

SEQ ID NO: 1034905 - DNA, 15 bp, Homo sapiens
cctgggcaactgagg

SEQ ID NO: 1034906 - DNA, 15 bp, Homo sapiens
ctgggcaactgaggg

SEQ ID NO: 1034907 - DNA, 15 bp, Homo sapiens
tgggcaactgaggga

SEQ ID NO: 1034908 - DNA, 15 bp, Homo sapiens
gggcaactgagggag

SEQ ID NO: 1034909 - DNA, 15 bp, Homo sapiens
ggcaactgagggaga

SEQ ID NO: 1034910 - DNA, 15 bp, Homo sapiens
gcaactgagggagaa

SEQ ID NO: 1034911 - DNA, 15 bp, Homo sapiens
caactgagggagaag

SEQ ID NO: 1034912 - DNA, 15 bp, Homo sapiens
aactgagggagaaga

SEQ ID NO: 1034913 - DNA, 15 bp, Homo sapiens
actgagggagaagaa

SEQ ID NO: 1034914 - DNA, 15 bp, Homo sapiens
ctgagggagaagaaa

SEQ ID NO: 1034915 - DNA, 15 bp, Homo sapiens
tgagggagaagaaag

SEQ ID NO: 1034916 - DNA, 15 bp, Homo sapiens
gagggagaagaaaga

SEQ ID NO: 1034917 - DNA, 15 bp, Homo sapiens
agggagaagaaagag

SEQ ID NO: 1034918 - DNA, 15 bp, Homo sapiens
gggagaagaaagaga

SEQ ID NO: 1034919 - DNA, 15 bp, Homo sapiens
ggagaagaaagagag

SEQ ID NO: 1034920 - DNA, 15 bp, Homo sapiens
gagaagaaagagaga

SEQ ID NO: 1034921 - DNA, 15 bp, Homo sapiens
agaagaaagagagag

SEQ ID NO: 1034922 - DNA, 15 bp, Homo sapiens
gaagaaagagagaga

SEQ ID NO: 1034923 - DNA, 15 bp, Homo sapiens
aagaaagagagagag

SEQ ID NO: 1034924 - DNA, 15 bp, Homo sapiens
agaaagagagagaga

SEQ ID NO: 1034925 - DNA, 15 bp, Homo sapiens
gaaagagagagagag

SEQ ID NO: 1034926 - DNA, 15 bp, Homo sapiens
aaagagagagagaga

SEQ ID NO: 1034927 - DNA, 15 bp, Homo sapiens
aagagagagagagag

SEQ ID NO: 1034928 - DNA, 15 bp, Homo sapiens
agagagagagagaga

SEQ ID NO: 1034929 - DNA, 15 bp, Homo sapiens
gagagagagagagaa

SEQ ID NO: 1034930 - DNA, 15 bp, Homo sapiens
agagagagagagaaa

SEQ ID NO: 1034931 - DNA, 15 bp, Homo sapiens
gagagagagagaaag

SEQ ID NO: 1034932 - DNA, 15 bp, Homo sapiens
agagagagagaaaga

SEQ ID NO: 1034933 - DNA, 15 bp, Homo sapiens
gagagagagaaagag

SEQ ID NO: 1034934 - DNA, 15 bp, Homo sapiens
agagagagaaagaga

SEQ ID NO: 1034935 - DNA, 15 bp, Homo sapiens
gagagagaaagagag

SEQ ID NO: 1034936 - DNA, 15 bp, Homo sapiens
agagagaaagagaga

SEQ ID NO: 1034937 - DNA, 15 bp, Homo sapiens
gagagaaagagagag

SEQ ID NO: 1034938 - DNA, 15 bp, Homo sapiens
agagaaagagagaga

SEQ ID NO: 1034939 - DNA, 15 bp, Homo sapiens
gagaaagagagagag

SEQ ID NO: 1034940 - DNA, 15 bp, Homo sapiens
gagagagagagagag

SEQ ID NO: 1034941 - DNA, 15 bp, Homo sapiens
agagagagagagagg

SEQ ID NO: 1034942 - DNA, 15 bp, Homo sapiens
gagagagagagaggg

SEQ ID NO: 1034943 - DNA, 15 bp, Homo sapiens
agagagagagagggc

SEQ ID NO: 1034944 - DNA, 15 bp, Homo sapiens
gagagagagagggcg

SEQ ID NO: 1034945 - DNA, 15 bp, Homo sapiens
agagagagagggcga

SEQ ID NO: 1034946 - DNA, 15 bp, Homo sapiens
gagagagagggcgag

SEQ ID NO: 1034947 - DNA, 15 bp, Homo sapiens
agagagagggcgaga

SEQ ID NO: 1034948 - DNA, 15 bp, Homo sapiens
gagagagggcgagag

SEQ ID NO: 1034949 - DNA, 15 bp, Homo sapiens
agagagggcgagagg

SEQ ID NO: 1034950 - DNA, 15 bp, Homo sapiens
gagagggcgagaggg

SEQ ID NO: 1034951 - DNA, 15 bp, Homo sapiens
agagggcgagaggga

SEQ ID NO: 1034952 - DNA, 15 bp, Homo sapiens
gagggcgagagggag

SEQ ID NO: 1034953 - DNA, 15 bp, Homo sapiens
agggcgagagggagg

SEQ ID NO: 1034954 - DNA, 15 bp, Homo sapiens
gggcgagagggaggg

SEQ ID NO: 1034955 - DNA, 15 bp, Homo sapiens
ggcgagagggaggga

SEQ ID NO: 1034956 - DNA, 15 bp, Homo sapiens
gcgagagggagggag

SEQ ID NO: 1034957 - DNA, 15 bp, Homo sapiens
cgagagggagggagg

SEQ ID NO: 1034958 - DNA, 15 bp, Homo sapiens
gagagggagggaggg

SEQ ID NO: 1034959 - DNA, 15 bp, Homo sapiens
agagggagggaggga

SEQ ID NO: 1034960 - DNA, 15 bp, Homo sapiens
gagggagggagggaa

SEQ ID NO: 1034961 - DNA, 15 bp, Homo sapiens
agggagggagggaag

SEQ ID NO: 1034962 - DNA, 15 bp, Homo sapiens
gggagggagggaagg

SEQ ID NO: 1034963 - DNA, 15 bp, Homo sapiens
ggagggagggaagga

SEQ ID NO: 1034964 - DNA, 15 bp, Homo sapiens
gagggagggaaggaa

SEQ ID NO: 1034965 - DNA, 15 bp, Homo sapiens
agggagggaaggaag

SEQ ID NO: 1034966 - DNA, 15 bp, Homo sapiens
gggagggaaggaagg

SEQ ID NO: 1034967 - DNA, 15 bp, Homo sapiens
ggagggaaggaaggg

SEQ ID NO: 1034968 - DNA, 15 bp, Homo sapiens
gagggaaggaaggga

SEQ ID NO: 1034969 - DNA, 15 bp, Homo sapiens
agggaaggaagggaa

SEQ ID NO: 1034970 - DNA, 15 bp, Homo sapiens
gggaaggaagggaag

SEQ ID NO: 1034971 - DNA, 15 bp, Homo sapiens
ggaaggaagggaagg

SEQ ID NO: 1034972 - DNA, 15 bp, Homo sapiens
gaaggaagggaaggg

SEQ ID NO: 1034973 - DNA, 15 bp, Homo sapiens
aaggaagggaaggga

SEQ ID NO: 1034974 - DNA, 15 bp, Homo sapiens
aggaagggaagggaa

SEQ ID NO: 1034975 - DNA, 15 bp, Homo sapiens
ggaagggaagggaag

SEQ ID NO: 1034976 - DNA, 15 bp, Homo sapiens
gaagggaagggaagg

SEQ ID NO: 1034977 - DNA, 15 bp, Homo sapiens
aagggaagggaaggg

SEQ ID NO: 1034978 - DNA, 15 bp, Homo sapiens
agggaagggaaggga

SEQ ID NO: 1034979 - DNA, 15 bp, Homo sapiens
gggaagggaagggaa

SEQ ID NO: 1034980 - DNA, 15 bp, Homo sapiens
aagggaagggaagga

SEQ ID NO: 1034981 - DNA, 15 bp, Homo sapiens
agggaagggaaggaa

SEQ ID NO: 1034982 - DNA, 15 bp, Homo sapiens
gggaagggaaggaag

SEQ ID NO: 1034983 - DNA, 15 bp, Homo sapiens
ggaagggaaggaagg

SEQ ID NO: 1034984 - DNA, 15 bp, Homo sapiens
gaagggaaggaagga

SEQ ID NO: 1034985 - DNA, 15 bp, Homo sapiens
aagggaaggaaggaa

SEQ ID NO: 1034986 - DNA, 15 bp, Homo sapiens
agggaaggaaggaag

SEQ ID NO: 1034987 - DNA, 15 bp, Homo sapiens
gggaaggaaggaagg

SEQ ID NO: 1034988 - DNA, 15 bp, Homo sapiens
ggaaggaaggaagga

SEQ ID NO: 1034989 - DNA, 15 bp, Homo sapiens
gaaggaaggaaggaa

SEQ ID NO: 1034990 - DNA, 15 bp, Homo sapiens
aaggaaggaaggaag

SEQ ID NO: 1034991 - DNA, 15 bp, Homo sapiens
aggaaggaaggaagg

SEQ ID NO: 1034992 - DNA, 15 bp, Homo sapiens
gaaggaaggaaggag

SEQ ID NO: 1034993 - DNA, 15 bp, Homo sapiens
aaggaaggaaggaga

SEQ ID NO: 1034994 - DNA, 15 bp, Homo sapiens
aggaaggaaggagaa

SEQ ID NO: 1034995 - DNA, 15 bp, Homo sapiens
ggaaggaaggagaac

SEQ ID NO: 1034996 - DNA, 15 bp, Homo sapiens
gaaggaaggagaaca

SEQ ID NO: 1034997 - DNA, 15 bp, Homo sapiens
aaggaaggagaacac

SEQ ID NO: 1034998 - DNA, 15 bp, Homo sapiens
aggaaggagaacact

SEQ ID NO: 1034999 - DNA, 15 bp, Homo sapiens
ggaaggagaacactg

SEQ ID NO: 1035000 - DNA, 15 bp, Homo sapiens
gaaggagaacactgg

SEQ ID NO: 1035001 - DNA, 15 bp, Homo sapiens
aaggagaacactggt

SEQ ID NO: 1035002 - DNA, 15 bp, Homo sapiens
aggagaacactggtt

SEQ ID NO: 1035003 - DNA, 15 bp, Homo sapiens
ggagaacactggttg

SEQ ID NO: 1035004 - DNA, 15 bp, Homo sapiens
gagaacactggttgt

SEQ ID NO: 1035005 - DNA, 15 bp, Homo sapiens
agaacactggttgta

SEQ ID NO: 1035006 - DNA, 15 bp, Homo sapiens
gaacactggttgtag

SEQ ID NO: 1035007 - DNA, 15 bp, Homo sapiens
aacactggttgtaga

SEQ ID NO: 1035008 - DNA, 15 bp, Homo sapiens
acactggttgtagac

SEQ ID NO: 1035009 - DNA, 15 bp, Homo sapiens
cactggttgtagact

SEQ ID NO: 1035010 - DNA, 15 bp, Homo sapiens
actggttgtagactc

SEQ ID NO: 1035011 - DNA, 15 bp, Homo sapiens
ctggttgtagactca

SEQ ID NO: 1035012 - DNA, 15 bp, Homo sapiens
tggttgtagactcag

SEQ ID NO: 1035013 - DNA, 15 bp, Homo sapiens
ggttgtagactcaga

SEQ ID NO: 1035014 - DNA, 15 bp, Homo sapiens
gttgtagactcagag

SEQ ID NO: 1035015 - DNA, 15 bp, Homo sapiens
ttgtagactcagaga

SEQ ID NO: 1035016 - DNA, 15 bp, Homo sapiens
tgtagactcagagag

SEQ ID NO: 1035017 - DNA, 15 bp, Homo sapiens
gtagactcagagaga

SEQ ID NO: 1035018 - DNA, 15 bp, Homo sapiens
tagactcagagagaa

SEQ ID NO: 1035019 - DNA, 15 bp, Homo sapiens
agactcagagagaac

SEQ ID NO: 1035020 - DNA, 15 bp, Homo sapiens
gactcagagagaact

SEQ ID NO: 1035021 - DNA, 15 bp, Homo sapiens
actcagagagaactg

SEQ ID NO: 1035022 - DNA, 15 bp, Homo sapiens
ctcagagagaactgt

SEQ ID NO: 1035023 - DNA, 15 bp, Homo sapiens
tcagagagaactgtt

SEQ ID NO: 1035024 - DNA, 15 bp, Homo sapiens
cagagagaactgtta

SEQ ID NO: 1035025 - DNA, 15 bp, Homo sapiens
agagagaactgttac

SEQ ID NO: 1035026 - DNA, 15 bp, Homo sapiens
gagagaactgttaca

SEQ ID NO: 1035027 - DNA, 15 bp, Homo sapiens
agagaactgttacat

SEQ ID NO: 1035028 - DNA, 15 bp, Homo sapiens
gagaactgttacata

SEQ ID NO: 1035029 - DNA, 15 bp, Homo sapiens
agaactgttacataa

SEQ ID NO: 1035030 - DNA, 15 bp, Homo sapiens
gaactgttacataac

SEQ ID NO: 1035031 - DNA, 15 bp, Homo sapiens
aactgttacataacc

SEQ ID NO: 1035032 - DNA, 15 bp, Homo sapiens
actgttacataacca

SEQ ID NO: 1035033 - DNA, 15 bp, Homo sapiens
ctgttacataaccag

SEQ ID NO: 1035034 - DNA, 15 bp, Homo sapiens
tgttacataaccagt

SEQ ID NO: 1035035 - DNA, 15 bp, Homo sapiens
gttacataaccagta

SEQ ID NO: 1035036 - DNA, 15 bp, Homo sapiens
ttacataaccagtat

SEQ ID NO: 1035037 - DNA, 15 bp, Homo sapiens
tacataaccagtatg

SEQ ID NO: 1035038 - DNA, 15 bp, Homo sapiens
acataaccagtatgt

SEQ ID NO: 1035039 - DNA, 15 bp, Homo sapiens
cataaccagtatgtg

SEQ ID NO: 1035040 - DNA, 15 bp, Homo sapiens
ataaccagtatgtgg

SEQ ID NO: 1035041 - DNA, 15 bp, Homo sapiens
taaccagtatgtggc

SEQ ID NO: 1035042 - DNA, 15 bp, Homo sapiens
aaccagtatgtggcc

SEQ ID NO: 1035043 - DNA, 15 bp, Homo sapiens
accagtatgtggcct

SEQ ID NO: 1035044 - DNA, 15 bp, Homo sapiens
ccagtatgtggcctt

SEQ ID NO: 1035045 - DNA, 15 bp, Homo sapiens
cagtatgtggccttg

SEQ ID NO: 1035046 - DNA, 15 bp, Homo sapiens
agtatgtggccttgg

SEQ ID NO: 1035047 - DNA, 15 bp, Homo sapiens
gtatgtggccttggg

SEQ ID NO: 1035048 - DNA, 15 bp, Homo sapiens
tatgtggccttgggg

SEQ ID NO: 1035049 - DNA, 15 bp, Homo sapiens
atgtggccttgggga

SEQ ID NO: 1035050 - DNA, 15 bp, Homo sapiens
tgtggccttggggac

SEQ ID NO: 1035051 - DNA, 15 bp, Homo sapiens
gtggccttggggaca

SEQ ID NO: 1035052 - DNA, 15 bp, Homo sapiens
tggccttggggacat

SEQ ID NO: 1035053 - DNA, 15 bp, Homo sapiens
ggccttggggacatc

SEQ ID NO: 1035054 - DNA, 15 bp, Homo sapiens
gccttggggacatct

SEQ ID NO: 1035055 - DNA, 15 bp, Homo sapiens
ccttggggacatctc

SEQ ID NO: 1035056 - DNA, 15 bp, Homo sapiens
cttggggacatctct

SEQ ID NO: 1035057 - DNA, 15 bp, Homo sapiens
ttggggacatctctt

SEQ ID NO: 1035058 - DNA, 15 bp, Homo sapiens
tggggacatctctta

SEQ ID NO: 1035059 - DNA, 15 bp, Homo sapiens
ggggacatctcttac

SEQ ID NO: 1035060 - DNA, 15 bp, Homo sapiens
gggacatctcttacc

SEQ ID NO: 1035061 - DNA, 15 bp, Homo sapiens
ggacatctcttaccc

SEQ ID NO: 1035062 - DNA, 15 bp, Homo sapiens
gacatctcttaccct

SEQ ID NO: 1035063 - DNA, 15 bp, Homo sapiens
acatctcttaccctt

SEQ ID NO: 1035064 - DNA, 15 bp, Homo sapiens
catctcttacccttt

SEQ ID NO: 1035065 - DNA, 15 bp, Homo sapiens
atctcttaccctttc

SEQ ID NO: 1035066 - DNA, 15 bp, Homo sapiens
tctcttaccctttct

SEQ ID NO: 1035067 - DNA, 15 bp, Homo sapiens
ctcttaccctttctg

SEQ ID NO: 1035068 - DNA, 15 bp, Homo sapiens
tcttaccctttctgg

SEQ ID NO: 1035069 - DNA, 15 bp, Homo sapiens
cttaccctttctgga

SEQ ID NO: 1035070 - DNA, 15 bp, Homo sapiens
ttaccctttctggaa

SEQ ID NO: 1035071 - DNA, 15 bp, Homo sapiens
taccctttctggaaa

SEQ ID NO: 1035072 - DNA, 15 bp, Homo sapiens
accctttctggaaaa

SEQ ID NO: 1035073 - DNA, 15 bp, Homo sapiens
ccctttctggaaaag

SEQ ID NO: 1035074 - DNA, 15 bp, Homo sapiens
cctttctggaaaagt

SEQ ID NO: 1035075 - DNA, 15 bp, Homo sapiens
ctttctggaaaagta

SEQ ID NO: 1035076 - DNA, 15 bp, Homo sapiens
tttctggaaaagtac

SEQ ID NO: 1035077 - DNA, 15 bp, Homo sapiens
ttctggaaaagtact

SEQ ID NO: 1035078 - DNA, 15 bp, Homo sapiens
tctggaaaagtactt

SEQ ID NO: 1035079 - DNA, 15 bp, Homo sapiens
ctggaaaagtacttc

SEQ ID NO: 1035080 - DNA, 15 bp, Homo sapiens
tggaaaagtacttcc

SEQ ID NO: 1035081 - DNA, 15 bp, Homo sapiens
ggaaaagtacttcct

SEQ ID NO: 1035082 - DNA, 15 bp, Homo sapiens
gaaaagtacttcctg

SEQ ID NO: 1035083 - DNA, 15 bp, Homo sapiens
aaaagtacttcctgg

SEQ ID NO: 1035084 - DNA, 15 bp, Homo sapiens
aaagtacttcctggc

SEQ ID NO: 1035085 - DNA, 15 bp, Homo sapiens
aagtacttcctggca

SEQ ID NO: 1035086 - DNA, 15 bp, Homo sapiens
agtacttcctggcat

SEQ ID NO: 1035087 - DNA, 15 bp, Homo sapiens
gtacttcctggcatc

SEQ ID NO: 1035088 - DNA, 15 bp, Homo sapiens
tacttcctggcatcc

SEQ ID NO: 1035089 - DNA, 15 bp, Homo sapiens
acttcctggcatcca

SEQ ID NO: 1035090 - DNA, 15 bp, Homo sapiens
cttcctggcatccag

SEQ ID NO: 1035091 - DNA, 15 bp, Homo sapiens
ttcctggcatccagg

SEQ ID NO: 1035092 - DNA, 15 bp, Homo sapiens
tcctggcatccagga

SEQ ID NO: 1035093 - DNA, 15 bp, Homo sapiens
cctggcatccaggag

SEQ ID NO: 1035094 - DNA, 15 bp, Homo sapiens
ctggcatccaggagg

SEQ ID NO: 1035095 - DNA, 15 bp, Homo sapiens
tggcatccaggaggg

SEQ ID NO: 1035096 - DNA, 15 bp, Homo sapiens
ggcatccaggagggt

SEQ ID NO: 1035097 - DNA, 15 bp, Homo sapiens
gcatccaggagggtc

SEQ ID NO: 1035098 - DNA, 15 bp, Homo sapiens
catccaggagggtct

SEQ ID NO: 1035099 - DNA, 15 bp, Homo sapiens
atccaggagggtctg

SEQ ID NO: 1035100 - DNA, 15 bp, Homo sapiens
tccaggagggtctga

SEQ ID NO: 1035101 - DNA, 15 bp, Homo sapiens
ccaggagggtctgaa

SEQ ID NO: 1035102 - DNA, 15 bp, Homo sapiens
caggagggtctgaaa

SEQ ID NO: 1035103 - DNA, 15 bp, Homo sapiens
aggagggtctgaaag

SEQ ID NO: 1035104 - DNA, 15 bp, Homo sapiens
ggagggtctgaaaga

SEQ ID NO: 1035105 - DNA, 15 bp, Homo sapiens
gagggtctgaaagat

SEQ ID NO: 1035106 - DNA, 15 bp, Homo sapiens
agggtctgaaagata

SEQ ID NO: 1035107 - DNA, 15 bp, Homo sapiens
gggtctgaaagatat

SEQ ID NO: 1035108 - DNA, 15 bp, Homo sapiens
ggtctgaaagatatt

SEQ ID NO: 1035109 - DNA, 15 bp, Homo sapiens
gtctgaaagatattc

SEQ ID NO: 1035110 - DNA, 15 bp, Homo sapiens
tctgaaagatattca

SEQ ID NO: 1035111 - DNA, 15 bp, Homo sapiens
ctgaaagatattcac

SEQ ID NO: 1035112 - DNA, 15 bp, Homo sapiens
tgaaagatattcacc

SEQ ID NO: 1035113 - DNA, 15 bp, Homo sapiens
gaaagatattcacct

SEQ ID NO: 1035114 - DNA, 15 bp, Homo sapiens
aaagatattcacctc

SEQ ID NO: 1035115 - DNA, 15 bp, Homo sapiens
aagatattcacctcc

SEQ ID NO: 1035116 - DNA, 15 bp, Homo sapiens
agatattcacctccc

SEQ ID NO: 1035117 - DNA, 15 bp, Homo sapiens
gatattcacctcccc

SEQ ID NO: 1035118 - DNA, 15 bp, Homo sapiens
atattcacctccccc

SEQ ID NO: 1035119 - DNA, 15 bp, Homo sapiens
tattcacctccccct

SEQ ID NO: 1035120 - DNA, 15 bp, Homo sapiens
attcacctccccctg

SEQ ID NO: 1035121 - DNA, 15 bp, Homo sapiens
ttcacctccccctgc

SEQ ID NO: 1035122 - DNA, 15 bp, Homo sapiens
tcacctccccctgct

SEQ ID NO: 1035123 - DNA, 15 bp, Homo sapiens
cacctccccctgctc

SEQ ID NO: 1035124 - DNA, 15 bp, Homo sapiens
acctccccctgctca

SEQ ID NO: 1035125 - DNA, 15 bp, Homo sapiens
cctccccctgctcac

SEQ ID NO: 1035126 - DNA, 15 bp, Homo sapiens
ctccccctgctcact

SEQ ID NO: 1035127 - DNA, 15 bp, Homo sapiens
tccccctgctcactg

SEQ ID NO: 1035128 - DNA, 15 bp, Homo sapiens
ccccctgctcactga

SEQ ID NO: 1035129 - DNA, 15 bp, Homo sapiens
cccctgctcactgag

SEQ ID NO: 1035130 - DNA, 15 bp, Homo sapiens
ccctgctcactgagg

SEQ ID NO: 1035131 - DNA, 15 bp, Homo sapiens
cctgctcactgaggc

SEQ ID NO: 1035132 - DNA, 15 bp, Homo sapiens
ctgctcactgaggca

SEQ ID NO: 1035133 - DNA, 15 bp, Homo sapiens
tgctcactgaggcac

SEQ ID NO: 1035134 - DNA, 15 bp, Homo sapiens
gctcactgaggcacc

SEQ ID NO: 1035135 - DNA, 15 bp, Homo sapiens
ctcactgaggcaccc

SEQ ID NO: 1035136 - DNA, 15 bp, Homo sapiens
tcactgaggcaccca

SEQ ID NO: 1035137 - DNA, 15 bp, Homo sapiens
cactgaggcacccac

SEQ ID NO: 1035138 - DNA, 15 bp, Homo sapiens
actgaggcacccacc

SEQ ID NO: 1035139 - DNA, 15 bp, Homo sapiens
ctgaggcacccaccc

SEQ ID NO: 1035140 - DNA, 15 bp, Homo sapiens
tgaggcacccacccc

SEQ ID NO: 1035141 - DNA, 15 bp, Homo sapiens
gaggcacccacccca

SEQ ID NO: 1035142 - DNA, 15 bp, Homo sapiens
aggcacccaccccac

SEQ ID NO: 1035143 - DNA, 15 bp, Homo sapiens
ggcacccaccccacc

SEQ ID NO: 1035144 - DNA, 15 bp, Homo sapiens
gcacccaccccaccc

SEQ ID NO: 1035145 - DNA, 15 bp, Homo sapiens
cacccaccccaccca

SEQ ID NO: 1035146 - DNA, 15 bp, Homo sapiens
acccaccccacccac

SEQ ID NO: 1035147 - DNA, 15 bp, Homo sapiens
cccaccccacccacc

SEQ ID NO: 1035148 - DNA, 15 bp, Homo sapiens
ccaccccacccaccc

SEQ ID NO: 1035149 - DNA, 15 bp, Homo sapiens
caccccacccacccc

SEQ ID NO: 1035150 - DNA, 15 bp, Homo sapiens
accccacccacccct

SEQ ID NO: 1035151 - DNA, 15 bp, Homo sapiens
ccccacccaccccta

SEQ ID NO: 1035152 - DNA, 15 bp, Homo sapiens
cccacccacccctac

SEQ ID NO: 1035153 - DNA, 15 bp, Homo sapiens
ccacccacccctaca

SEQ ID NO: 1035154 - DNA, 15 bp, Homo sapiens
cacccacccctacag

SEQ ID NO: 1035155 - DNA, 15 bp, Homo sapiens
acccacccctacaga

SEQ ID NO: 1035156 - DNA, 15 bp, Homo sapiens
cccacccctacagaa

SEQ ID NO: 1035157 - DNA, 15 bp, Homo sapiens
ccacccctacagaaa

SEQ ID NO: 1035158 - DNA, 15 bp, Homo sapiens
cacccctacagaaac

SEQ ID NO: 1035159 - DNA, 15 bp, Homo sapiens
acccctacagaaacg

SEQ ID NO: 1035160 - DNA, 15 bp, Homo sapiens
cccctacagaaacga

SEQ ID NO: 1035161 - DNA, 15 bp, Homo sapiens
ccctacagaaacgat

SEQ ID NO: 1035162 - DNA, 15 bp, Homo sapiens
cctacagaaacgatg

SEQ ID NO: 1035163 - DNA, 15 bp, Homo sapiens
ctacagaaacgatgg

SEQ ID NO: 1035164 - DNA, 15 bp, Homo sapiens
tacagaaacgatggc

SEQ ID NO: 1035165 - DNA, 15 bp, Homo sapiens
acagaaacgatggca

SEQ ID NO: 1035166 - DNA, 15 bp, Homo sapiens
cagaaacgatggcag

SEQ ID NO: 1035167 - DNA, 15 bp, Homo sapiens
agaaacgatggcaga

SEQ ID NO: 1035168 - DNA, 15 bp, Homo sapiens
gaaacgatggcagaa

SEQ ID NO: 1035169 - DNA, 15 bp, Homo sapiens
aaacgatggcagaac

SEQ ID NO: 1035170 - DNA, 15 bp, Homo sapiens
aacgatggcagaacg

SEQ ID NO: 1035171 - DNA, 15 bp, Homo sapiens
acgatggcagaacga

SEQ ID NO: 1035172 - DNA, 15 bp, Homo sapiens
cgatggcagaacgag

SEQ ID NO: 1035173 - DNA, 15 bp, Homo sapiens
gatggcagaacgaga

SEQ ID NO: 1035174 - DNA, 15 bp, Homo sapiens
atggcagaacgagaa

SEQ ID NO: 1035175 - DNA, 15 bp, Homo sapiens
tggcagaacgagaag

SEQ ID NO: 1035176 - DNA, 15 bp, Homo sapiens
ggcagaacgagaagc

SEQ ID NO: 1035177 - DNA, 15 bp, Homo sapiens
gcagaacgagaagct

SEQ ID NO: 1035178 - DNA, 15 bp, Homo sapiens
cagaacgagaagctc

SEQ ID NO: 1035179 - DNA, 15 bp, Homo sapiens
agaacgagaagctcg

SEQ ID NO: 1035180 - DNA, 15 bp, Homo sapiens
gaacgagaagctcgg

SEQ ID NO: 1035181 - DNA, 15 bp, Homo sapiens
aacgagaagctcggg

SEQ ID NO: 1035182 - DNA, 15 bp, Homo sapiens
acgagaagctcgggt

SEQ ID NO: 1035183 - DNA, 15 bp, Homo sapiens
cgagaagctcgggtt

SEQ ID NO: 1035184 - DNA, 15 bp, Homo sapiens
gagaagctcgggttg

SEQ ID NO: 1035185 - DNA, 15 bp, Homo sapiens
agaagctcgggttgg

SEQ ID NO: 1035186 - DNA, 15 bp, Homo sapiens
gaagctcgggttgga

SEQ ID NO: 1035187 - DNA, 15 bp, Homo sapiens
aagctcgggttggat

SEQ ID NO: 1035188 - DNA, 15 bp, Homo sapiens
agctcgggttggatg

SEQ ID NO: 1035189 - DNA, 15 bp, Homo sapiens
gctcgggttggatgc

SEQ ID NO: 1035190 - DNA, 15 bp, Homo sapiens
ctcgggttggatgcc

SEQ ID NO: 1035191 - DNA, 15 bp, Homo sapiens
tcgggttggatgccg

SEQ ID NO: 1035192 - DNA, 15 bp, Homo sapiens
cgggttggatgccgg

SEQ ID NO: 1035193 - DNA, 15 bp, Homo sapiens
gggttggatgccggg

SEQ ID NO: 1035194 - DNA, 15 bp, Homo sapiens
ggttggatgccgggg

SEQ ID NO: 1035195 - DNA, 15 bp, Homo sapiens
gttggatgccgggga

SEQ ID NO: 1035196 - DNA, 15 bp, Homo sapiens
ttggatgccggggat

SEQ ID NO: 1035197 - DNA, 15 bp, Homo sapiens
tggatgccggggatg

SEQ ID NO: 1035198 - DNA, 15 bp, Homo sapiens
ggatgccggggatga

SEQ ID NO: 1035199 - DNA, 15 bp, Homo sapiens
gatgccggggatgaa

SEQ ID NO: 1035200 - DNA, 15 bp, Homo sapiens
atgccggggatgaat

SEQ ID NO: 1035201 - DNA, 15 bp, Homo sapiens
tgccggggatgaata

SEQ ID NO: 1035202 - DNA, 15 bp, Homo sapiens
gccggggatgaatat

SEQ ID NO: 1035203 - DNA, 15 bp, Homo sapiens
ccggggatgaatatg

SEQ ID NO: 1035204 - DNA, 15 bp, Homo sapiens
cggggatgaatatga

SEQ ID NO: 1035205 - DNA, 15 bp, Homo sapiens
ggggatgaatatgaa

SEQ ID NO: 1035206 - DNA, 15 bp, Homo sapiens
gggatgaatatgaag

SEQ ID NO: 1035207 - DNA, 15 bp, Homo sapiens
ggatgaatatgaaga

SEQ ID NO: 1035208 - DNA, 15 bp, Homo sapiens
gatgaatatgaagat

SEQ ID NO: 1035209 - DNA, 15 bp, Homo sapiens
atgaatatgaagatg

SEQ ID NO: 1035210 - DNA, 15 bp, Homo sapiens
tgaatatgaagatga

SEQ ID NO: 1035211 - DNA, 15 bp, Homo sapiens
gaatatgaagatgaa

SEQ ID NO: 1035212 - DNA, 15 bp, Homo sapiens
aatatgaagatgaaa

SEQ ID NO: 1035213 - DNA, 15 bp, Homo sapiens
atatgaagatgaaaa

SEQ ID NO: 1035214 - DNA, 15 bp, Homo sapiens
tatgaagatgaaaac

SEQ ID NO: 1035215 - DNA, 15 bp, Homo sapiens
atgaagatgaaaacc

SEQ ID NO: 1035216 - DNA, 15 bp, Homo sapiens
tgaagatgaaaacct

SEQ ID NO: 1035217 - DNA, 15 bp, Homo sapiens
gaagatgaaaacctt

SEQ ID NO: 1035218 - DNA, 15 bp, Homo sapiens
aagatgaaaaccttt

SEQ ID NO: 1035219 - DNA, 15 bp, Homo sapiens
agatgaaaaccttta

SEQ ID NO: 1035220 - DNA, 15 bp, Homo sapiens
gatgaaaacctttat

SEQ ID NO: 1035221 - DNA, 15 bp, Homo sapiens
atgaaaacctttatg

SEQ ID NO: 1035222 - DNA, 15 bp, Homo sapiens
tgaaaacctttatga

SEQ ID NO: 1035223 - DNA, 15 bp, Homo sapiens
gaaaacctttatgaa

SEQ ID NO: 1035224 - DNA, 15 bp, Homo sapiens
aaaacctttatgaag

SEQ ID NO: 1035225 - DNA, 15 bp, Homo sapiens
aaacctttatgaagt

SEQ ID NO: 1035226 - DNA, 15 bp, Homo sapiens
aacctttatgaagtg

SEQ ID NO: 1035227 - DNA, 15 bp, Homo sapiens
acctttatgaagtga

SEQ ID NO: 1035228 - DNA, 15 bp, Homo sapiens
cctttatgaagtgag

SEQ ID NO: 1035229 - DNA, 15 bp, Homo sapiens
ctttatgaagtgagt

SEQ ID NO: 1035230 - DNA, 15 bp, Homo sapiens
tttatgaagtgagtg

SEQ ID NO: 1035231 - DNA, 15 bp, Homo sapiens
ttatgaagtgagtga

SEQ ID NO: 1035232 - DNA, 15 bp, Homo sapiens
tatgaagtgagtgaa

SEQ ID NO: 1035233 - DNA, 15 bp, Homo sapiens
atgaagtgagtgaag

SEQ ID NO: 1035234 - DNA, 15 bp, Homo sapiens
tgaagtgagtgaagg

SEQ ID NO: 1035235 - DNA, 15 bp, Homo sapiens
gaagtgagtgaaggg

SEQ ID NO: 1035236 - DNA, 15 bp, Homo sapiens
aagtgagtgaagggt

SEQ ID NO: 1035237 - DNA, 15 bp, Homo sapiens
agtgagtgaagggtg

SEQ ID NO: 1035238 - DNA, 15 bp, Homo sapiens
gtgagtgaagggtgg

SEQ ID NO: 1035239 - DNA, 15 bp, Homo sapiens
tgagtgaagggtggg

SEQ ID NO: 1035240 - DNA, 15 bp, Homo sapiens
gagtgaagggtgggg

SEQ ID NO: 1035241 - DNA, 15 bp, Homo sapiens
agtgaagggtgggga

SEQ ID NO: 1035242 - DNA, 15 bp, Homo sapiens
gtgaagggtggggat

SEQ ID NO: 1035243 - DNA, 15 bp, Homo sapiens
tgaagggtggggatg

SEQ ID NO: 1035244 - DNA, 15 bp, Homo sapiens
gaagggtggggatgg

SEQ ID NO: 1035245 - DNA, 15 bp, Homo sapiens
aagggtggggatggg

SEQ ID NO: 1035246 - DNA, 15 bp, Homo sapiens
agggtggggatgggg

SEQ ID NO: 1035247 - DNA, 15 bp, Homo sapiens
gggtggggatggggt

SEQ ID NO: 1035248 - DNA, 15 bp, Homo sapiens
ggtggggatggggta

SEQ ID NO: 1035249 - DNA, 15 bp, Homo sapiens
gtggggatggggtag

SEQ ID NO: 1035250 - DNA, 15 bp, Homo sapiens
tggggatggggtagg

SEQ ID NO: 1035251 - DNA, 15 bp, Homo sapiens
ggggatggggtaggg

SEQ ID NO: 1035252 - DNA, 15 bp, Homo sapiens
gggatggggtagggg

SEQ ID NO: 1035253 - DNA, 15 bp, Homo sapiens
ggatggggtaggggc

SEQ ID NO: 1035254 - DNA, 15 bp, Homo sapiens
gatggggtaggggca

SEQ ID NO: 1035255 - DNA, 15 bp, Homo sapiens
atggggtaggggcag

SEQ ID NO: 1035256 - DNA, 15 bp, Homo sapiens
tggggtaggggcagt

SEQ ID NO: 1035257 - DNA, 15 bp, Homo sapiens
ggggtaggggcagtt

SEQ ID NO: 1035258 - DNA, 15 bp, Homo sapiens
gggtaggggcagttg

SEQ ID NO: 1035259 - DNA, 15 bp, Homo sapiens
ggtaggggcagttgt

SEQ ID NO: 1035260 - DNA, 15 bp, Homo sapiens
gtaggggcagttgtg

SEQ ID NO: 1035261 - DNA, 15 bp, Homo sapiens
taggggcagttgtgt

SEQ ID NO: 1035262 - DNA, 15 bp, Homo sapiens
aggggcagttgtgtt

SEQ ID NO: 1035263 - DNA, 15 bp, Homo sapiens
ggggcagttgtgtta

SEQ ID NO: 1035264 - DNA, 15 bp, Homo sapiens
gggcagttgtgttag

SEQ ID NO: 1035265 - DNA, 15 bp, Homo sapiens
ggcagttgtgttagg

SEQ ID NO: 1035266 - DNA, 15 bp, Homo sapiens
gcagttgtgttaggg

SEQ ID NO: 1035267 - DNA, 15 bp, Homo sapiens
cagttgtgttagggg

SEQ ID NO: 1035268 - DNA, 15 bp, Homo sapiens
agttgtgttaggggt

SEQ ID NO: 1035269 - DNA, 15 bp, Homo sapiens
gttgtgttaggggtg

SEQ ID NO: 1035270 - DNA, 15 bp, Homo sapiens
ttgtgttaggggtgg

SEQ ID NO: 1035271 - DNA, 15 bp, Homo sapiens
tgtgttaggggtggg

SEQ ID NO: 1035272 - DNA, 15 bp, Homo sapiens
gtgttaggggtgggg

SEQ ID NO: 1035273 - DNA, 15 bp, Homo sapiens
tgttaggggtggggg

SEQ ID NO: 1035274 - DNA, 15 bp, Homo sapiens
gttaggggtgggggt

SEQ ID NO: 1035275 - DNA, 15 bp, Homo sapiens
ttaggggtgggggtg

SEQ ID NO: 1035276 - DNA, 15 bp, Homo sapiens
taggggtgggggtgt

SEQ ID NO: 1035277 - DNA, 15 bp, Homo sapiens
aggggtgggggtgtt

SEQ ID NO: 1035278 - DNA, 15 bp, Homo sapiens
ggggtgggggtgttc

SEQ ID NO: 1035279 - DNA, 15 bp, Homo sapiens
gggtgggggtgttcc

SEQ ID NO: 1035280 - DNA, 15 bp, Homo sapiens
ggtgggggtgttccc

SEQ ID NO: 1035281 - DNA, 15 bp, Homo sapiens
gtgggggtgttccct

SEQ ID NO: 1035282 - DNA, 15 bp, Homo sapiens
tgggggtgttccctc

SEQ ID NO: 1035283 - DNA, 15 bp, Homo sapiens
gggggtgttccctct

SEQ ID NO: 1035284 - DNA, 15 bp, Homo sapiens
ggggtgttccctctg

SEQ ID NO: 1035285 - DNA, 15 bp, Homo sapiens
gggtgttccctctgg

SEQ ID NO: 1035286 - DNA, 15 bp, Homo sapiens
ggtgttccctctggg

SEQ ID NO: 1035287 - DNA, 15 bp, Homo sapiens
gtgttccctctgggg

SEQ ID NO: 1035288 - DNA, 15 bp, Homo sapiens
tgttccctctggggg

SEQ ID NO: 1035289 - DNA, 15 bp, Homo sapiens
gttccctctgggggt

SEQ ID NO: 1035290 - DNA, 15 bp, Homo sapiens
ttccctctgggggtg

SEQ ID NO: 1035291 - DNA, 15 bp, Homo sapiens
tccctctgggggtgg

SEQ ID NO: 1035292 - DNA, 15 bp, Homo sapiens
ccctctgggggtggc

SEQ ID NO: 1035293 - DNA, 15 bp, Homo sapiens
cctctgggggtggct

SEQ ID NO: 1035294 - DNA, 15 bp, Homo sapiens
ctctgggggtggctg

SEQ ID NO: 1035295 - DNA, 15 bp, Homo sapiens
tctgggggtggctgg

SEQ ID NO: 1035296 - DNA, 15 bp, Homo sapiens
ctgggggtggctggg

SEQ ID NO: 1035297 - DNA, 15 bp, Homo sapiens
tgggggtggctgggg

SEQ ID NO: 1035298 - DNA, 15 bp, Homo sapiens
gggggtggctggggg

SEQ ID NO: 1035299 - DNA, 15 bp, Homo sapiens
ggggtggctgggggc

SEQ ID NO: 1035300 - DNA, 15 bp, Homo sapiens
gggtggctgggggca

SEQ ID NO: 1035301 - DNA, 15 bp, Homo sapiens
ggtggctgggggcag

SEQ ID NO: 1035302 - DNA, 15 bp, Homo sapiens
gtggctgggggcagg

SEQ ID NO: 1035303 - DNA, 15 bp, Homo sapiens
tggctgggggcaggg

SEQ ID NO: 1035304 - DNA, 15 bp, Homo sapiens
ggctgggggcaggga

SEQ ID NO: 1035305 - DNA, 15 bp, Homo sapiens
gctgggggcagggac

SEQ ID NO: 1035306 - DNA, 15 bp, Homo sapiens
ctgggggcagggacc

SEQ ID NO: 1035307 - DNA, 15 bp, Homo sapiens
tgggggcagggaccc

SEQ ID NO: 1035308 - DNA, 15 bp, Homo sapiens
gggggcagggacccc

SEQ ID NO: 1035309 - DNA, 15 bp, Homo sapiens
ggggcagggacccca

SEQ ID NO: 1035310 - DNA, 15 bp, Homo sapiens
gggcagggaccccag

SEQ ID NO: 1035311 - DNA, 15 bp, Homo sapiens
ggcagggaccccagg

SEQ ID NO: 1035312 - DNA, 15 bp, Homo sapiens
gcagggaccccaggt

SEQ ID NO: 1035313 - DNA, 15 bp, Homo sapiens
cagggaccccaggtg

SEQ ID NO: 1035314 - DNA, 15 bp, Homo sapiens
agggaccccaggtgt

SEQ ID NO: 1035315 - DNA, 15 bp, Homo sapiens
gggaccccaggtgtc

SEQ ID NO: 1035316 - DNA, 15 bp, Homo sapiens
ggaccccaggtgtca

SEQ ID NO: 1035317 - DNA, 15 bp, Homo sapiens
gaccccaggtgtcag

SEQ ID NO: 1035318 - DNA, 15 bp, Homo sapiens
accccaggtgtcagg

SEQ ID NO: 1035319 - DNA, 15 bp, Homo sapiens
ccccaggtgtcaggg

SEQ ID NO: 1035320 - DNA, 15 bp, Homo sapiens
cccaggtgtcagggt

SEQ ID NO: 1035321 - DNA, 15 bp, Homo sapiens
ccaggtgtcagggtg

SEQ ID NO: 1035322 - DNA, 15 bp, Homo sapiens
caggtgtcagggtgc

SEQ ID NO: 1035323 - DNA, 15 bp, Homo sapiens
aggtgtcagggtgct

SEQ ID NO: 1035324 - DNA, 15 bp, Homo sapiens
ggtgtcagggtgctg

SEQ ID NO: 1035325 - DNA, 15 bp, Homo sapiens
gtgtcagggtgctga

SEQ ID NO: 1035326 - DNA, 15 bp, Homo sapiens
tgtcagggtgctgat

SEQ ID NO: 1035327 - DNA, 15 bp, Homo sapiens
gtcagggtgctgatg

SEQ ID NO: 1035328 - DNA, 15 bp, Homo sapiens
tcagggtgctgatgt

SEQ ID NO: 1035329 - DNA, 15 bp, Homo sapiens
cagggtgctgatgtt

SEQ ID NO: 1035330 - DNA, 15 bp, Homo sapiens
agggtgctgatgttc

SEQ ID NO: 1035331 - DNA, 15 bp, Homo sapiens
gggtgctgatgttcg

SEQ ID NO: 1035332 - DNA, 15 bp, Homo sapiens
ggtgctgatgttcgc

SEQ ID NO: 1035333 - DNA, 15 bp, Homo sapiens
gtgctgatgttcgct

SEQ ID NO: 1035334 - DNA, 15 bp, Homo sapiens
tgctgatgttcgctg

SEQ ID NO: 1035335 - DNA, 15 bp, Homo sapiens
gctgatgttcgctgc

SEQ ID NO: 1035336 - DNA, 15 bp, Homo sapiens
ctgatgttcgctgcc

SEQ ID NO: 1035337 - DNA, 15 bp, Homo sapiens
tgatgttcgctgcct

SEQ ID NO: 1035338 - DNA, 15 bp, Homo sapiens
gatgttcgctgcctc

SEQ ID NO: 1035339 - DNA, 15 bp, Homo sapiens
atgttcgctgcctca

SEQ ID NO: 1035340 - DNA, 15 bp, Homo sapiens
tgttcgctgcctcat

SEQ ID NO: 1035341 - DNA, 15 bp, Homo sapiens
gttcgctgcctcatt

SEQ ID NO: 1035342 - DNA, 15 bp, Homo sapiens
ttcgctgcctcattt

SEQ ID NO: 1035343 - DNA, 15 bp, Homo sapiens
tcgctgcctcatttc

SEQ ID NO: 1035344 - DNA, 15 bp, Homo sapiens
cgctgcctcatttcc

SEQ ID NO: 1035345 - DNA, 15 bp, Homo sapiens
gctgcctcatttcca

SEQ ID NO: 1035346 - DNA, 15 bp, Homo sapiens
ctgcctcatttccat

SEQ ID NO: 1035347 - DNA, 15 bp, Homo sapiens
tgcctcatttccatc

SEQ ID NO: 1035348 - DNA, 15 bp, Homo sapiens
gcctcatttccatcc

SEQ ID NO: 1035349 - DNA, 15 bp, Homo sapiens
cctcatttccatccc

SEQ ID NO: 1035350 - DNA, 15 bp, Homo sapiens
ctcatttccatccca

SEQ ID NO: 1035351 - DNA, 15 bp, Homo sapiens
tcatttccatcccag

SEQ ID NO: 1035352 - DNA, 15 bp, Homo sapiens
catttccatcccagg

SEQ ID NO: 1035353 - DNA, 15 bp, Homo sapiens
atttccatcccaggg

SEQ ID NO: 1035354 - DNA, 15 bp, Homo sapiens
tttccatcccagggc

SEQ ID NO: 1035355 - DNA, 15 bp, Homo sapiens
ttccatcccagggcc

SEQ ID NO: 1035356 - DNA, 15 bp, Homo sapiens
tccatcccagggcct

SEQ ID NO: 1035357 - DNA, 15 bp, Homo sapiens
ccatcccagggcctg

SEQ ID NO: 1035358 - DNA, 15 bp, Homo sapiens
catcccagggcctga

SEQ ID NO: 1035359 - DNA, 15 bp, Homo sapiens
atcccagggcctgaa

SEQ ID NO: 1035360 - DNA, 15 bp, Homo sapiens
tcccagggcctgaac

SEQ ID NO: 1035361 - DNA, 15 bp, Homo sapiens
cccagggcctgaacc

SEQ ID NO: 1035362 - DNA, 15 bp, Homo sapiens
ccagggcctgaacct

SEQ ID NO: 1035363 - DNA, 15 bp, Homo sapiens
cagggcctgaacctg

SEQ ID NO: 1035364 - DNA, 15 bp, Homo sapiens
agggcctgaacctgg

SEQ ID NO: 1035365 - DNA, 15 bp, Homo sapiens
gggcctgaacctgga

SEQ ID NO: 1035366 - DNA, 15 bp, Homo sapiens
ggcctgaacctggac

SEQ ID NO: 1035367 - DNA, 15 bp, Homo sapiens
gcctgaacctggacg

SEQ ID NO: 1035368 - DNA, 15 bp, Homo sapiens
cctgaacctggacga

SEQ ID NO: 1035369 - DNA, 15 bp, Homo sapiens
ctgaacctggacgac

SEQ ID NO: 1035370 - DNA, 15 bp, Homo sapiens
tgaacctggacgact

SEQ ID NO: 1035371 - DNA, 15 bp, Homo sapiens
gaacctggacgactg

SEQ ID NO: 1035372 - DNA, 15 bp, Homo sapiens
aacctggacgactgc

SEQ ID NO: 1035373 - DNA, 15 bp, Homo sapiens
acctggacgactgct

SEQ ID NO: 1035374 - DNA, 15 bp, Homo sapiens
cctggacgactgctc

SEQ ID NO: 1035375 - DNA, 15 bp, Homo sapiens
ctggacgactgctcc

SEQ ID NO: 1035376 - DNA, 15 bp, Homo sapiens
tggacgactgctcca

SEQ ID NO: 1035377 - DNA, 15 bp, Homo sapiens
ggacgactgctccat

SEQ ID NO: 1035378 - DNA, 15 bp, Homo sapiens
gacgactgctccatg

SEQ ID NO: 1035379 - DNA, 15 bp, Homo sapiens
acgactgctccatgt

SEQ ID NO: 1035380 - DNA, 15 bp, Homo sapiens
cgactgctccatgta

SEQ ID NO: 1035381 - DNA, 15 bp, Homo sapiens
gactgctccatgtat

SEQ ID NO: 1035382 - DNA, 15 bp, Homo sapiens
actgctccatgtatg

SEQ ID NO: 1035383 - DNA, 15 bp, Homo sapiens
ctgctccatgtatga

SEQ ID NO: 1035384 - DNA, 15 bp, Homo sapiens
tgctccatgtatgag

SEQ ID NO: 1035385 - DNA, 15 bp, Homo sapiens
gctccatgtatgagg

SEQ ID NO: 1035386 - DNA, 15 bp, Homo sapiens
ctccatgtatgagga

SEQ ID NO: 1035387 - DNA, 15 bp, Homo sapiens
tccatgtatgaggac

SEQ ID NO: 1035388 - DNA, 15 bp, Homo sapiens
ccatgtatgaggaca

SEQ ID NO: 1035389 - DNA, 15 bp, Homo sapiens
catgtatgaggacat

SEQ ID NO: 1035390 - DNA, 15 bp, Homo sapiens
atgtatgaggacatc

SEQ ID NO: 1035391 - DNA, 15 bp, Homo sapiens
tgtatgaggacatct

SEQ ID NO: 1035392 - DNA, 15 bp, Homo sapiens
gtatgaggacatctc

SEQ ID NO: 1035393 - DNA, 15 bp, Homo sapiens
tatgaggacatctcc

SEQ ID NO: 1035394 - DNA, 15 bp, Homo sapiens
atgaggacatctccc

SEQ ID NO: 1035395 - DNA, 15 bp, Homo sapiens
tgaggacatctcccg

SEQ ID NO: 1035396 - DNA, 15 bp, Homo sapiens
gaggacatctcccgg

SEQ ID NO: 1035397 - DNA, 15 bp, Homo sapiens
aggacatctcccggg

SEQ ID NO: 1035398 - DNA, 15 bp, Homo sapiens
ggacatctcccgggg

SEQ ID NO: 1035399 - DNA, 15 bp, Homo sapiens
gacatctcccggggc

SEQ ID NO: 1035400 - DNA, 15 bp, Homo sapiens
acatctcccggggcc

SEQ ID NO: 1035401 - DNA, 15 bp, Homo sapiens
catctcccggggcct

SEQ ID NO: 1035402 - DNA, 15 bp, Homo sapiens
atctcccggggcctc

SEQ ID NO: 1035403 - DNA, 15 bp, Homo sapiens
tctcccggggcctcc

SEQ ID NO: 1035404 - DNA, 15 bp, Homo sapiens
ctcccggggcctcca

SEQ ID NO: 1035405 - DNA, 15 bp, Homo sapiens
tcccggggcctccag

SEQ ID NO: 1035406 - DNA, 15 bp, Homo sapiens
cccggggcctccagg

SEQ ID NO: 1035407 - DNA, 15 bp, Homo sapiens
ccggggcctccaggg

SEQ ID NO: 1035408 - DNA, 15 bp, Homo sapiens
cggggcctccagggc

SEQ ID NO: 1035409 - DNA, 15 bp, Homo sapiens
ggggcctccagggca

SEQ ID NO: 1035410 - DNA, 15 bp, Homo sapiens
gggcctccagggcac

SEQ ID NO: 1035411 - DNA, 15 bp, Homo sapiens
ggcctccagggcacc

SEQ ID NO: 1035412 - DNA, 15 bp, Homo sapiens
gcctccagggcacct

SEQ ID NO: 1035413 - DNA, 15 bp, Homo sapiens
cctccagggcaccta

SEQ ID NO: 1035414 - DNA, 15 bp, Homo sapiens
ctccagggcacctac

SEQ ID NO: 1035415 - DNA, 15 bp, Homo sapiens
tccagggcacctacc

SEQ ID NO: 1035416 - DNA, 15 bp, Homo sapiens
ccagggcacctacca

SEQ ID NO: 1035417 - DNA, 15 bp, Homo sapiens
cagggcacctaccag

SEQ ID NO: 1035418 - DNA, 15 bp, Homo sapiens
agggcacctaccagg

SEQ ID NO: 1035419 - DNA, 15 bp, Homo sapiens
gggcacctaccagga

SEQ ID NO: 1035420 - DNA, 15 bp, Homo sapiens
ggcacctaccaggat

SEQ ID NO: 1035421 - DNA, 15 bp, Homo sapiens
gcacctaccaggatg

SEQ ID NO: 1035422 - DNA, 15 bp, Homo sapiens
cacctaccaggatgt

SEQ ID NO: 1035423 - DNA, 15 bp, Homo sapiens
acctaccaggatgtg

SEQ ID NO: 1035424 - DNA, 15 bp, Homo sapiens
cctaccaggatgtgg

SEQ ID NO: 1035425 - DNA, 15 bp, Homo sapiens
ctaccaggatgtggg

SEQ ID NO: 1035426 - DNA, 15 bp, Homo sapiens
taccaggatgtgggc

SEQ ID NO: 1035427 - DNA, 15 bp, Homo sapiens
accaggatgtgggca

SEQ ID NO: 1035428 - DNA, 15 bp, Homo sapiens
ccaggatgtgggcag

SEQ ID NO: 1035429 - DNA, 15 bp, Homo sapiens
caggatgtgggcagc

SEQ ID NO: 1035430 - DNA, 15 bp, Homo sapiens
aggatgtgggcagcc

SEQ ID NO: 1035431 - DNA, 15 bp, Homo sapiens
ggatgtgggcagcct

SEQ ID NO: 1035432 - DNA, 15 bp, Homo sapiens
gatgtgggcagcctc

SEQ ID NO: 1035433 - DNA, 15 bp, Homo sapiens
atgtgggcagcctca

SEQ ID NO: 1035434 - DNA, 15 bp, Homo sapiens
tgtgggcagcctcaa

SEQ ID NO: 1035435 - DNA, 15 bp, Homo sapiens
gtgggcagcctcaac

SEQ ID NO: 1035436 - DNA, 15 bp, Homo sapiens
tgggcagcctcaaca

SEQ ID NO: 1035437 - DNA, 15 bp, Homo sapiens
gggcagcctcaacat

SEQ ID NO: 1035438 - DNA, 15 bp, Homo sapiens
ggcagcctcaacata

SEQ ID NO: 1035439 - DNA, 15 bp, Homo sapiens
gcagcctcaacatag

SEQ ID NO: 1035440 - DNA, 15 bp, Homo sapiens
cagcctcaacatagg

SEQ ID NO: 1035441 - DNA, 15 bp, Homo sapiens
agcctcaacatagga

SEQ ID NO: 1035442 - DNA, 15 bp, Homo sapiens
gcctcaacataggag

SEQ ID NO: 1035443 - DNA, 15 bp, Homo sapiens
cctcaacataggaga

SEQ ID NO: 1035444 - DNA, 15 bp, Homo sapiens
ctcaacataggagat

SEQ ID NO: 1035445 - DNA, 15 bp, Homo sapiens
tcaacataggagatg

SEQ ID NO: 1035446 - DNA, 15 bp, Homo sapiens
caacataggagatgt

SEQ ID NO: 1035447 - DNA, 15 bp, Homo sapiens
aacataggagatgtc

SEQ ID NO: 1035448 - DNA, 15 bp, Homo sapiens
acataggagatgtcc

SEQ ID NO: 1035449 - DNA, 15 bp, Homo sapiens
cataggagatgtcca

SEQ ID NO: 1035450 - DNA, 15 bp, Homo sapiens
ataggagatgtccag

SEQ ID NO: 1035451 - DNA, 15 bp, Homo sapiens
taggagatgtccagc

SEQ ID NO: 1035452 - DNA, 15 bp, Homo sapiens
aggagatgtccagct

SEQ ID NO: 1035453 - DNA, 15 bp, Homo sapiens
ggagatgtccagctg

SEQ ID NO: 1035454 - DNA, 15 bp, Homo sapiens
gagatgtccagctgg

SEQ ID NO: 1035455 - DNA, 15 bp, Homo sapiens
agatgtccagctgga

SEQ ID NO: 1035456 - DNA, 15 bp, Homo sapiens
gatgtccagctggag

SEQ ID NO: 1035457 - DNA, 15 bp, Homo sapiens
atgtccagctggaga

SEQ ID NO: 1035458 - DNA, 15 bp, Homo sapiens
tgtccagctggagaa

SEQ ID NO: 1035459 - DNA, 15 bp, Homo sapiens
gtccagctggagaag

SEQ ID NO: 1035460 - DNA, 15 bp, Homo sapiens
tccagctggagaagc

SEQ ID NO: 1035461 - DNA, 15 bp, Homo sapiens
ccagctggagaagcc

SEQ ID NO: 1035462 - DNA, 15 bp, Homo sapiens
cagctggagaagccg

SEQ ID NO: 1035463 - DNA, 15 bp, Homo sapiens
agctggagaagccgt

SEQ ID NO: 1035464 - DNA, 15 bp, Homo sapiens
gctggagaagccgtg

SEQ ID NO: 1035465 - DNA, 15 bp, Homo sapiens
ctggagaagccgtga

SEQ ID NO: 1035466 - DNA, 15 bp, Homo sapiens
tggagaagccgtgac

SEQ ID NO: 1035467 - DNA, 15 bp, Homo sapiens
ggagaagccgtgaca

SEQ ID NO: 1035468 - DNA, 15 bp, Homo sapiens
gagaagccgtgacac

SEQ ID NO: 1035469 - DNA, 15 bp, Homo sapiens
agaagccgtgacacc

SEQ ID NO: 1035470 - DNA, 15 bp, Homo sapiens
gaagccgtgacaccc

SEQ ID NO: 1035471 - DNA, 15 bp, Homo sapiens
aagccgtgacacccc

SEQ ID NO: 1035472 - DNA, 15 bp, Homo sapiens
agccgtgacacccct

SEQ ID NO: 1035473 - DNA, 15 bp, Homo sapiens
gccgtgacaccccta

SEQ ID NO: 1035474 - DNA, 15 bp, Homo sapiens
ccgtgacacccctac

SEQ ID NO: 1035475 - DNA, 15 bp, Homo sapiens
cgtgacacccctact

SEQ ID NO: 1035476 - DNA, 15 bp, Homo sapiens
gtgacacccctactc

SEQ ID NO: 1035477 - DNA, 15 bp, Homo sapiens
tgacacccctactcc

SEQ ID NO: 1035478 - DNA, 15 bp, Homo sapiens
gacacccctactcct

SEQ ID NO: 1035479 - DNA, 15 bp, Homo sapiens
acacccctactcctg

SEQ ID NO: 1035480 - DNA, 15 bp, Homo sapiens
cacccctactcctgc

SEQ ID NO: 1035481 - DNA, 15 bp, Homo sapiens
acccctactcctgcc

SEQ ID NO: 1035482 - DNA, 15 bp, Homo sapiens
cccctactcctgcca

SEQ ID NO: 1035483 - DNA, 15 bp, Homo sapiens
ccctactcctgccag

SEQ ID NO: 1035484 - DNA, 15 bp, Homo sapiens
cctactcctgccagg

SEQ ID NO: 1035485 - DNA, 15 bp, Homo sapiens
ctactcctgccaggc

SEQ ID NO: 1035486 - DNA, 15 bp, Homo sapiens
tactcctgccaggct

SEQ ID NO: 1035487 - DNA, 15 bp, Homo sapiens
actcctgccaggctg

SEQ ID NO: 1035488 - DNA, 15 bp, Homo sapiens
ctcctgccaggctgc

SEQ ID NO: 1035489 - DNA, 15 bp, Homo sapiens
tcctgccaggctgcc

SEQ ID NO: 1035490 - DNA, 15 bp, Homo sapiens
cctgccaggctgccc

SEQ ID NO: 1035491 - DNA, 15 bp, Homo sapiens
ctgccaggctgcccc

SEQ ID NO: 1035492 - DNA, 15 bp, Homo sapiens
tgccaggctgccccc

SEQ ID NO: 1035493 - DNA, 15 bp, Homo sapiens
gccaggctgcccccg

SEQ ID NO: 1035494 - DNA, 15 bp, Homo sapiens
ccaggctgcccccgc

SEQ ID NO: 1035495 - DNA, 15 bp, Homo sapiens
caggctgcccccgcc

SEQ ID NO: 1035496 - DNA, 15 bp, Homo sapiens
aggctgcccccgcct

SEQ ID NO: 1035497 - DNA, 15 bp, Homo sapiens
ggctgcccccgcctg

SEQ ID NO: 1035498 - DNA, 15 bp, Homo sapiens
gctgcccccgcctgc

SEQ ID NO: 1035499 - DNA, 15 bp, Homo sapiens
ctgcccccgcctgct

SEQ ID NO: 1035500 - DNA, 15 bp, Homo sapiens
tgcccccgcctgctg

SEQ ID NO: 1035501 - DNA, 15 bp, Homo sapiens
gcccccgcctgctgt

SEQ ID NO: 1035502 - DNA, 15 bp, Homo sapiens
cccccgcctgctgtg

SEQ ID NO: 1035503 - DNA, 15 bp, Homo sapiens
ccccgcctgctgtgc

SEQ ID NO: 1035504 - DNA, 15 bp, Homo sapiens
cccgcctgctgtgca

SEQ ID NO: 1035505 - DNA, 15 bp, Homo sapiens
ccgcctgctgtgcac

SEQ ID NO: 1035506 - DNA, 15 bp, Homo sapiens
cgcctgctgtgcacc

SEQ ID NO: 1035507 - DNA, 15 bp, Homo sapiens
gcctgctgtgcaccc

SEQ ID NO: 1035508 - DNA, 15 bp, Homo sapiens
cctgctgtgcaccca

SEQ ID NO: 1035509 - DNA, 15 bp, Homo sapiens
ctgctgtgcacccag

SEQ ID NO: 1035510 - DNA, 15 bp, Homo sapiens
tgctgtgcacccagc

SEQ ID NO: 1035511 - DNA, 15 bp, Homo sapiens
gctgtgcacccagct

SEQ ID NO: 1035512 - DNA, 15 bp, Homo sapiens
ctgtgcacccagctc

SEQ ID NO: 1035513 - DNA, 15 bp, Homo sapiens
tgtgcacccagctcc

SEQ ID NO: 1035514 - DNA, 15 bp, Homo sapiens
gtgcacccagctcca

SEQ ID NO: 1035515 - DNA, 15 bp, Homo sapiens
tgcacccagctccag

SEQ ID NO: 1035516 - DNA, 15 bp, Homo sapiens
gcacccagctccagt

SEQ ID NO: 1035517 - DNA, 15 bp, Homo sapiens
cacccagctccagtg

SEQ ID NO: 1035518 - DNA, 15 bp, Homo sapiens
acccagctccagtgt

SEQ ID NO: 1035519 - DNA, 15 bp, Homo sapiens
cccagctccagtgtc

SEQ ID NO: 1035520 - DNA, 15 bp, Homo sapiens
ccagctccagtgtct

SEQ ID NO: 1035521 - DNA, 15 bp, Homo sapiens
cagctccagtgtctc

SEQ ID NO: 1035522 - DNA, 15 bp, Homo sapiens
agctccagtgtctca

SEQ ID NO: 1035523 - DNA, 15 bp, Homo sapiens
gctccagtgtctcag

SEQ ID NO: 1035524 - DNA, 15 bp, Homo sapiens
ctccagtgtctcagc

SEQ ID NO: 1035525 - DNA, 15 bp, Homo sapiens
tccagtgtctcagct

SEQ ID NO: 1035526 - DNA, 15 bp, Homo sapiens
ccagtgtctcagctc

SEQ ID NO: 1035527 - DNA, 15 bp, Homo sapiens
cagtgtctcagctca

SEQ ID NO: 1035528 - DNA, 15 bp, Homo sapiens
agtgtctcagctcac

SEQ ID NO: 1035529 - DNA, 15 bp, Homo sapiens
gtgtctcagctcact

SEQ ID NO: 1035530 - DNA, 15 bp, Homo sapiens
tgtctcagctcactt

SEQ ID NO: 1035531 - DNA, 15 bp, Homo sapiens
gtctcagctcacttc

SEQ ID NO: 1035532 - DNA, 15 bp, Homo sapiens
tctcagctcacttcc

SEQ ID NO: 1035533 - DNA, 15 bp, Homo sapiens
ctcagctcacttccc

SEQ ID NO: 1035534 - DNA, 15 bp, Homo sapiens
tcagctcacttccct

SEQ ID NO: 1035535 - DNA, 15 bp, Homo sapiens
cagctcacttccctg

SEQ ID NO: 1035536 - DNA, 15 bp, Homo sapiens
agctcacttccctgg

SEQ ID NO: 1035537 - DNA, 15 bp, Homo sapiens
gctcacttccctggg

SEQ ID NO: 1035538 - DNA, 15 bp, Homo sapiens
ctcacttccctggga

SEQ ID NO: 1035539 - DNA, 15 bp, Homo sapiens
tcacttccctgggac

SEQ ID NO: 1035540 - DNA, 15 bp, Homo sapiens
cacttccctgggaca

SEQ ID NO: 1035541 - DNA, 15 bp, Homo sapiens
acttccctgggacat

SEQ ID NO: 1035542 - DNA, 15 bp, Homo sapiens
cttccctgggacatt

SEQ ID NO: 1035543 - DNA, 15 bp, Homo sapiens
ttccctgggacattc

SEQ ID NO: 1035544 - DNA, 15 bp, Homo sapiens
tccctgggacattct

SEQ ID NO: 1035545 - DNA, 15 bp, Homo sapiens
ccctgggacattctc

SEQ ID NO: 1035546 - DNA, 15 bp, Homo sapiens
cctgggacattctcc

SEQ ID NO: 1035547 - DNA, 15 bp, Homo sapiens
ctgggacattctcct

SEQ ID NO: 1035548 - DNA, 15 bp, Homo sapiens
tgggacattctcctt

SEQ ID NO: 1035549 - DNA, 15 bp, Homo sapiens
gggacattctccttt

SEQ ID NO: 1035550 - DNA, 15 bp, Homo sapiens
ggacattctcctttc

SEQ ID NO: 1035551 - DNA, 15 bp, Homo sapiens
gacattctcctttca

SEQ ID NO: 1035552 - DNA, 15 bp, Homo sapiens
acattctcctttcag

SEQ ID NO: 1035553 - DNA, 15 bp, Homo sapiens
cattctcctttcagc

SEQ ID NO: 1035554 - DNA, 15 bp, Homo sapiens
attctcctttcagcc

SEQ ID NO: 1035555 - DNA, 15 bp, Homo sapiens
ttctcctttcagccc

SEQ ID NO: 1035556 - DNA, 15 bp, Homo sapiens
tctcctttcagccct

SEQ ID NO: 1035557 - DNA, 15 bp, Homo sapiens
ctcctttcagccctt

SEQ ID NO: 1035558 - DNA, 15 bp, Homo sapiens
tcctttcagcccttc

SEQ ID NO: 1035559 - DNA, 15 bp, Homo sapiens
cctttcagcccttct

SEQ ID NO: 1035560 - DNA, 15 bp, Homo sapiens
ctttcagcccttctg

SEQ ID NO: 1035561 - DNA, 15 bp, Homo sapiens
tttcagcccttctgg

SEQ ID NO: 1035562 - DNA, 15 bp, Homo sapiens
ttcagcccttctggg

SEQ ID NO: 1035563 - DNA, 15 bp, Homo sapiens
tcagcccttctgggg

SEQ ID NO: 1035564 - DNA, 15 bp, Homo sapiens
cagcccttctggggg

SEQ ID NO: 1035565 - DNA, 15 bp, Homo sapiens
agcccttctgggggc

SEQ ID NO: 1035566 - DNA, 15 bp, Homo sapiens
gcccttctgggggct

SEQ ID NO: 1035567 - DNA, 15 bp, Homo sapiens
cccttctgggggctt

SEQ ID NO: 1035568 - DNA, 15 bp, Homo sapiens
ccttctgggggcttc

SEQ ID NO: 1035569 - DNA, 15 bp, Homo sapiens
cttctgggggcttcc

SEQ ID NO: 1035570 - DNA, 15 bp, Homo sapiens
ttctgggggcttcct

SEQ ID NO: 1035571 - DNA, 15 bp, Homo sapiens
tctgggggcttcctt

SEQ ID NO: 1035572 - DNA, 15 bp, Homo sapiens
ctgggggcttcctta

SEQ ID NO: 1035573 - DNA, 15 bp, Homo sapiens
tgggggcttccttag

SEQ ID NO: 1035574 - DNA, 15 bp, Homo sapiens
gggggcttccttagt

SEQ ID NO: 1035575 - DNA, 15 bp, Homo sapiens
ggggcttccttagtc

SEQ ID NO: 1035576 - DNA, 15 bp, Homo sapiens
gggcttccttagtca

SEQ ID NO: 1035577 - DNA, 15 bp, Homo sapiens
ggcttccttagtcat

SEQ ID NO: 1035578 - DNA, 15 bp, Homo sapiens
gcttccttagtcata

SEQ ID NO: 1035579 - DNA, 15 bp, Homo sapiens
cttccttagtcatat

SEQ ID NO: 1035580 - DNA, 15 bp, Homo sapiens
ttccttagtcatatt

SEQ ID NO: 1035581 - DNA, 15 bp, Homo sapiens
tccttagtcatattc

SEQ ID NO: 1035582 - DNA, 15 bp, Homo sapiens
ccttagtcatattcc

SEQ ID NO: 1035583 - DNA, 15 bp, Homo sapiens
cttagtcatattccc

SEQ ID NO: 1035584 - DNA, 15 bp, Homo sapiens
ttagtcatattcccc

SEQ ID NO: 1035585 - DNA, 15 bp, Homo sapiens
tagtcatattccccc

SEQ ID NO: 1035586 - DNA, 15 bp, Homo sapiens
agtcatattccccca

SEQ ID NO: 1035587 - DNA, 15 bp, Homo sapiens
gtcatattcccccag

SEQ ID NO: 1035588 - DNA, 15 bp, Homo sapiens
tcatattcccccagt

SEQ ID NO: 1035589 - DNA, 15 bp, Homo sapiens
catattcccccagtg

SEQ ID NO: 1035590 - DNA, 15 bp, Homo sapiens
atattcccccagtgg

SEQ ID NO: 1035591 - DNA, 15 bp, Homo sapiens
tattcccccagtggg

SEQ ID NO: 1035592 - DNA, 15 bp, Homo sapiens
attcccccagtgggg

SEQ ID NO: 1035593 - DNA, 15 bp, Homo sapiens
ttcccccagtggggg

SEQ ID NO: 1035594 - DNA, 15 bp, Homo sapiens
tcccccagtgggggg

SEQ ID NO: 1035595 - DNA, 15 bp, Homo sapiens
cccccagtggggggt

SEQ ID NO: 1035596 - DNA, 15 bp, Homo sapiens
ccccagtggggggtg

SEQ ID NO: 1035597 - DNA, 15 bp, Homo sapiens
cccagtggggggtgg

SEQ ID NO: 1035598 - DNA, 15 bp, Homo sapiens
ccagtggggggtggg

SEQ ID NO: 1035599 - DNA, 15 bp, Homo sapiens
cagtggggggtggga

SEQ ID NO: 1035600 - DNA, 15 bp, Homo sapiens
agtggggggtgggag

SEQ ID NO: 1035601 - DNA, 15 bp, Homo sapiens
gtggggggtgggagg

SEQ ID NO: 1035602 - DNA, 15 bp, Homo sapiens
tggggggtgggaggg

SEQ ID NO: 1035603 - DNA, 15 bp, Homo sapiens
ggggggtgggagggt

SEQ ID NO: 1035604 - DNA, 15 bp, Homo sapiens
gggggtgggagggta

SEQ ID NO: 1035605 - DNA, 15 bp, Homo sapiens
ggggtgggagggtaa

SEQ ID NO: 1035606 - DNA, 15 bp, Homo sapiens
gggtgggagggtaac

SEQ ID NO: 1035607 - DNA, 15 bp, Homo sapiens
ggtgggagggtaacc

SEQ ID NO: 1035608 - DNA, 15 bp, Homo sapiens
gtgggagggtaacct

SEQ ID NO: 1035609 - DNA, 15 bp, Homo sapiens
tgggagggtaacctc

SEQ ID NO: 1035610 - DNA, 15 bp, Homo sapiens
gggagggtaacctca

SEQ ID NO: 1035611 - DNA, 15 bp, Homo sapiens
ggagggtaacctcac

SEQ ID NO: 1035612 - DNA, 15 bp, Homo sapiens
gagggtaacctcact

SEQ ID NO: 1035613 - DNA, 15 bp, Homo sapiens
agggtaacctcactc

SEQ ID NO: 1035614 - DNA, 15 bp, Homo sapiens
gggtaacctcactct

SEQ ID NO: 1035615 - DNA, 15 bp, Homo sapiens
ggtaacctcactctt

SEQ ID NO: 1035616 - DNA, 15 bp, Homo sapiens
gtaacctcactcttc

SEQ ID NO: 1035617 - DNA, 15 bp, Homo sapiens
taacctcactcttct

SEQ ID NO: 1035618 - DNA, 15 bp, Homo sapiens
aacctcactcttctc

SEQ ID NO: 1035619 - DNA, 15 bp, Homo sapiens
acctcactcttctcc

SEQ ID NO: 1035620 - DNA, 15 bp, Homo sapiens
cctcactcttctcca

SEQ ID NO: 1035621 - DNA, 15 bp, Homo sapiens
ctcactcttctccag

SEQ ID NO: 1035622 - DNA, 15 bp, Homo sapiens
tcactcttctccagg

SEQ ID NO: 1035623 - DNA, 15 bp, Homo sapiens
cactcttctccaggc

SEQ ID NO: 1035624 - DNA, 15 bp, Homo sapiens
actcttctccaggcc

SEQ ID NO: 1035625 - DNA, 15 bp, Homo sapiens
ctcttctccaggcca

SEQ ID NO: 1035626 - DNA, 15 bp, Homo sapiens
tcttctccaggccag

SEQ ID NO: 1035627 - DNA, 15 bp, Homo sapiens
cttctccaggccagg

SEQ ID NO: 1035628 - DNA, 15 bp, Homo sapiens
ttctccaggccaggc

SEQ ID NO: 1035629 - DNA, 15 bp, Homo sapiens
tctccaggccaggcc

SEQ ID NO: 1035630 - DNA, 15 bp, Homo sapiens
ctccaggccaggcct

SEQ ID NO: 1035631 - DNA, 15 bp, Homo sapiens
tccaggccaggcctc

SEQ ID NO: 1035632 - DNA, 15 bp, Homo sapiens
ccaggccaggcctcc

SEQ ID NO: 1035633 - DNA, 15 bp, Homo sapiens
caggccaggcctcct

SEQ ID NO: 1035634 - DNA, 15 bp, Homo sapiens
aggccaggcctcctt

SEQ ID NO: 1035635 - DNA, 15 bp, Homo sapiens
ggccaggcctccttg

SEQ ID NO: 1035636 - DNA, 15 bp, Homo sapiens
gccaggcctccttgg

SEQ ID NO: 1035637 - DNA, 15 bp, Homo sapiens
ccaggcctccttgga

SEQ ID NO: 1035638 - DNA, 15 bp, Homo sapiens
caggcctccttggac

SEQ ID NO: 1035639 - DNA, 15 bp, Homo sapiens
aggcctccttggact

SEQ ID NO: 1035640 - DNA, 15 bp, Homo sapiens
ggcctccttggactc

SEQ ID NO: 1035641 - DNA, 15 bp, Homo sapiens
gcctccttggactcc

SEQ ID NO: 1035642 - DNA, 15 bp, Homo sapiens
cctccttggactccc

SEQ ID NO: 1035643 - DNA, 15 bp, Homo sapiens
ctccttggactcccc

SEQ ID NO: 1035644 - DNA, 15 bp, Homo sapiens
tccttggactcccct

SEQ ID NO: 1035645 - DNA, 15 bp, Homo sapiens
ccttggactcccctg

SEQ ID NO: 1035646 - DNA, 15 bp, Homo sapiens
cttggactcccctgg

SEQ ID NO: 1035647 - DNA, 15 bp, Homo sapiens
ttggactcccctggg

SEQ ID NO: 1035648 - DNA, 15 bp, Homo sapiens
tggactcccctgggg

SEQ ID NO: 1035649 - DNA, 15 bp, Homo sapiens
ggactcccctggggg

SEQ ID NO: 1035650 - DNA, 15 bp, Homo sapiens
gactcccctgggggt

SEQ ID NO: 1035651 - DNA, 15 bp, Homo sapiens
actcccctgggggtg

SEQ ID NO: 1035652 - DNA, 15 bp, Homo sapiens
ctcccctgggggtgt

SEQ ID NO: 1035653 - DNA, 15 bp, Homo sapiens
tcccctgggggtgtc

SEQ ID NO: 1035654 - DNA, 15 bp, Homo sapiens
cccctgggggtgtcc

SEQ ID NO: 1035655 - DNA, 15 bp, Homo sapiens
ccctgggggtgtccc

SEQ ID NO: 1035656 - DNA, 15 bp, Homo sapiens
cctgggggtgtccca

SEQ ID NO: 1035657 - DNA, 15 bp, Homo sapiens
ctgggggtgtcccac

SEQ ID NO: 1035658 - DNA, 15 bp, Homo sapiens
tgggggtgtcccact

SEQ ID NO: 1035659 - DNA, 15 bp, Homo sapiens
gggggtgtcccactc

SEQ ID NO: 1035660 - DNA, 15 bp, Homo sapiens
ggggtgtcccactct

SEQ ID NO: 1035661 - DNA, 15 bp, Homo sapiens
gggtgtcccactctt

SEQ ID NO: 1035662 - DNA, 15 bp, Homo sapiens
ggtgtcccactcttc

SEQ ID NO: 1035663 - DNA, 15 bp, Homo sapiens
gtgtcccactcttct

SEQ ID NO: 1035664 - DNA, 15 bp, Homo sapiens
tgtcccactcttctt

SEQ ID NO: 1035665 - DNA, 15 bp, Homo sapiens
gtcccactcttcttc

SEQ ID NO: 1035666 - DNA, 15 bp, Homo sapiens
tcccactcttcttcc

SEQ ID NO: 1035667 - DNA, 15 bp, Homo sapiens
cccactcttcttccc

SEQ ID NO: 1035668 - DNA, 15 bp, Homo sapiens
ccactcttcttccct

SEQ ID NO: 1035669 - DNA, 15 bp, Homo sapiens
cactcttcttccctc

SEQ ID NO: 1035670 - DNA, 15 bp, Homo sapiens
actcttcttccctct

SEQ ID NO: 1035671 - DNA, 15 bp, Homo sapiens
ctcttcttccctcta

SEQ ID NO: 1035672 - DNA, 15 bp, Homo sapiens
tcttcttccctctaa

SEQ ID NO: 1035673 - DNA, 15 bp, Homo sapiens
cttcttccctctaaa

SEQ ID NO: 1035674 - DNA, 15 bp, Homo sapiens
ttcttccctctaaac

SEQ ID NO: 1035675 - DNA, 15 bp, Homo sapiens
tcttccctctaaact

SEQ ID NO: 1035676 - DNA, 15 bp, Homo sapiens
cttccctctaaactg

SEQ ID NO: 1035677 - DNA, 15 bp, Homo sapiens
ttccctctaaactgc

SEQ ID NO: 1035678 - DNA, 15 bp, Homo sapiens
tccctctaaactgcc

SEQ ID NO: 1035679 - DNA, 15 bp, Homo sapiens
ccctctaaactgccc

SEQ ID NO: 1035680 - DNA, 15 bp, Homo sapiens
cctctaaactgcccc

SEQ ID NO: 1035681 - DNA, 15 bp, Homo sapiens
ctctaaactgcccca

SEQ ID NO: 1035682 - DNA, 15 bp, Homo sapiens
tctaaactgccccac

SEQ ID NO: 1035683 - DNA, 15 bp, Homo sapiens
ctaaactgccccacc

SEQ ID NO: 1035684 - DNA, 15 bp, Homo sapiens
taaactgccccacct

SEQ ID NO: 1035685 - DNA, 15 bp, Homo sapiens
aaactgccccacctc

SEQ ID NO: 1035686 - DNA, 15 bp, Homo sapiens
aactgccccacctcc

SEQ ID NO: 1035687 - DNA, 15 bp, Homo sapiens
actgccccacctcct

SEQ ID NO: 1035688 - DNA, 15 bp, Homo sapiens
ctgccccacctccta

SEQ ID NO: 1035689 - DNA, 15 bp, Homo sapiens
tgccccacctcctaa

SEQ ID NO: 1035690 - DNA, 15 bp, Homo sapiens
gccccacctcctaac

SEQ ID NO: 1035691 - DNA, 15 bp, Homo sapiens
ccccacctcctaacc

SEQ ID NO: 1035692 - DNA, 15 bp, Homo sapiens
cccacctcctaacct

SEQ ID NO: 1035693 - DNA, 15 bp, Homo sapiens
ccacctcctaaccta

SEQ ID NO: 1035694 - DNA, 15 bp, Homo sapiens
cacctcctaacctaa

SEQ ID NO: 1035695 - DNA, 15 bp, Homo sapiens
acctcctaacctaat

SEQ ID NO: 1035696 - DNA, 15 bp, Homo sapiens
cctcctaacctaatc

SEQ ID NO: 1035697 - DNA, 15 bp, Homo sapiens
ctcctaacctaatcc

SEQ ID NO: 1035698 - DNA, 15 bp, Homo sapiens
tcctaacctaatccc

SEQ ID NO: 1035699 - DNA, 15 bp, Homo sapiens
cctaacctaatcccc

SEQ ID NO: 1035700 - DNA, 15 bp, Homo sapiens
ctaacctaatccccc

SEQ ID NO: 1035701 - DNA, 15 bp, Homo sapiens
taacctaatcccccc

SEQ ID NO: 1035702 - DNA, 15 bp, Homo sapiens
aacctaatccccccg

SEQ ID NO: 1035703 - DNA, 15 bp, Homo sapiens
acctaatccccccgc

SEQ ID NO: 1035704 - DNA, 15 bp, Homo sapiens
cctaatccccccgcc

SEQ ID NO: 1035705 - DNA, 15 bp, Homo sapiens
ctaatccccccgccc

SEQ ID NO: 1035706 - DNA, 15 bp, Homo sapiens
taatccccccgcccc

SEQ ID NO: 1035707 - DNA, 15 bp, Homo sapiens
aatccccccgccccg

SEQ ID NO: 1035708 - DNA, 15 bp, Homo sapiens
atccccccgccccgc

SEQ ID NO: 1035709 - DNA, 15 bp, Homo sapiens
tccccccgccccgct

SEQ ID NO: 1035710 - DNA, 15 bp, Homo sapiens
ccccccgccccgctg

SEQ ID NO: 1035711 - DNA, 15 bp, Homo sapiens
cccccgccccgctgc

SEQ ID NO: 1035712 - DNA, 15 bp, Homo sapiens
ccccgccccgctgcc

SEQ ID NO: 1035713 - DNA, 15 bp, Homo sapiens
cccgccccgctgcct

SEQ ID NO: 1035714 - DNA, 15 bp, Homo sapiens
ccgccccgctgcctt

SEQ ID NO: 1035715 - DNA, 15 bp, Homo sapiens
cgccccgctgccttt

SEQ ID NO: 1035716 - DNA, 15 bp, Homo sapiens
gccccgctgcctttc

SEQ ID NO: 1035717 - DNA, 15 bp, Homo sapiens
ccccgctgcctttcc

SEQ ID NO: 1035718 - DNA, 15 bp, Homo sapiens
cccgctgcctttccc

SEQ ID NO: 1035719 - DNA, 15 bp, Homo sapiens
ccgctgcctttccca

SEQ ID NO: 1035720 - DNA, 15 bp, Homo sapiens
cgctgcctttcccag

SEQ ID NO: 1035721 - DNA, 15 bp, Homo sapiens
gctgcctttcccagg

SEQ ID NO: 1035722 - DNA, 15 bp, Homo sapiens
ctgcctttcccaggc

SEQ ID NO: 1035723 - DNA, 15 bp, Homo sapiens
tgcctttcccaggct

SEQ ID NO: 1035724 - DNA, 15 bp, Homo sapiens
gcctttcccaggctc

SEQ ID NO: 1035725 - DNA, 15 bp, Homo sapiens
cctttcccaggctcc

SEQ ID NO: 1035726 - DNA, 15 bp, Homo sapiens
ctttcccaggctccc

SEQ ID NO: 1035727 - DNA, 15 bp, Homo sapiens
tttcccaggctcccc

SEQ ID NO: 1035728 - DNA, 15 bp, Homo sapiens
ttcccaggctcccct

SEQ ID NO: 1035729 - DNA, 15 bp, Homo sapiens
tcccaggctcccctc

SEQ ID NO: 1035730 - DNA, 15 bp, Homo sapiens
cccaggctcccctca

SEQ ID NO: 1035731 - DNA, 15 bp, Homo sapiens
ccaggctcccctcac

SEQ ID NO: 1035732 - DNA, 15 bp, Homo sapiens
caggctcccctcacc

SEQ ID NO: 1035733 - DNA, 15 bp, Homo sapiens
aggctcccctcaccc

SEQ ID NO: 1035734 - DNA, 15 bp, Homo sapiens
ggctcccctcacccc

SEQ ID NO: 1035735 - DNA, 15 bp, Homo sapiens
gctcccctcacccca

SEQ ID NO: 1035736 - DNA, 15 bp, Homo sapiens
ctcccctcaccccag

SEQ ID NO: 1035737 - DNA, 15 bp, Homo sapiens
tcccctcaccccagc

SEQ ID NO: 1035738 - DNA, 15 bp, Homo sapiens
cccctcaccccagcg

SEQ ID NO: 1035739 - DNA, 15 bp, Homo sapiens
ccctcaccccagcgg

SEQ ID NO: 1035740 - DNA, 15 bp, Homo sapiens
cctcaccccagcggg

SEQ ID NO: 1035741 - DNA, 15 bp, Homo sapiens
ctcaccccagcgggt

SEQ ID NO: 1035742 - DNA, 15 bp, Homo sapiens
tcaccccagcgggta

SEQ ID NO: 1035743 - DNA, 15 bp, Homo sapiens
caccccagcgggtaa

SEQ ID NO: 1035744 - DNA, 15 bp, Homo sapiens
accccagcgggtaat

SEQ ID NO: 1035745 - DNA, 15 bp, Homo sapiens
ccccagcgggtaatg

SEQ ID NO: 1035746 - DNA, 15 bp, Homo sapiens
cccagcgggtaatga

SEQ ID NO: 1035747 - DNA, 15 bp, Homo sapiens
ccagcgggtaatgag

SEQ ID NO: 1035748 - DNA, 15 bp, Homo sapiens
cagcgggtaatgagc

SEQ ID NO: 1035749 - DNA, 15 bp, Homo sapiens
agcgggtaatgagcc

SEQ ID NO: 1035750 - DNA, 15 bp, Homo sapiens
gcgggtaatgagccc

SEQ ID NO: 1035751 - DNA, 15 bp, Homo sapiens
cgggtaatgagccct

SEQ ID NO: 1035752 - DNA, 15 bp, Homo sapiens
gggtaatgagccctt

SEQ ID NO: 1035753 - DNA, 15 bp, Homo sapiens
ggtaatgagccctta

SEQ ID NO: 1035754 - DNA, 15 bp, Homo sapiens
gtaatgagcccttaa

SEQ ID NO: 1035755 - DNA, 15 bp, Homo sapiens
taatgagcccttaat

SEQ ID NO: 1035756 - DNA, 15 bp, Homo sapiens
aatgagcccttaatc

SEQ ID NO: 1035757 - DNA, 15 bp, Homo sapiens
atgagcccttaatcg

SEQ ID NO: 1035758 - DNA, 15 bp, Homo sapiens
tgagcccttaatcgc

SEQ ID NO: 1035759 - DNA, 15 bp, Homo sapiens
gagcccttaatcgct

SEQ ID NO: 1035760 - DNA, 15 bp, Homo sapiens
agcccttaatcgctg

SEQ ID NO: 1035761 - DNA, 15 bp, Homo sapiens
gcccttaatcgctgc

SEQ ID NO: 1035762 - DNA, 15 bp, Homo sapiens
cccttaatcgctgcc

SEQ ID NO: 1035763 - DNA, 15 bp, Homo sapiens
ccttaatcgctgcct

SEQ ID NO: 1035764 - DNA, 15 bp, Homo sapiens
cttaatcgctgcctc

SEQ ID NO: 1035765 - DNA, 15 bp, Homo sapiens
ttaatcgctgcctct

SEQ ID NO: 1035766 - DNA, 15 bp, Homo sapiens
taatcgctgcctcta

SEQ ID NO: 1035767 - DNA, 15 bp, Homo sapiens
aatcgctgcctctag

SEQ ID NO: 1035768 - DNA, 15 bp, Homo sapiens
atcgctgcctctagg

SEQ ID NO: 1035769 - DNA, 15 bp, Homo sapiens
tcgctgcctctaggg

SEQ ID NO: 1035770 - DNA, 15 bp, Homo sapiens
cgctgcctctagggg

SEQ ID NO: 1035771 - DNA, 15 bp, Homo sapiens
gctgcctctagggga

SEQ ID NO: 1035772 - DNA, 15 bp, Homo sapiens
ctgcctctaggggag

SEQ ID NO: 1035773 - DNA, 15 bp, Homo sapiens
tgcctctaggggagc

SEQ ID NO: 1035774 - DNA, 15 bp, Homo sapiens
gcctctaggggagct

SEQ ID NO: 1035775 - DNA, 15 bp, Homo sapiens
cctctaggggagctg

SEQ ID NO: 1035776 - DNA, 15 bp, Homo sapiens
ctctaggggagctga

SEQ ID NO: 1035777 - DNA, 15 bp, Homo sapiens
tctaggggagctgat

SEQ ID NO: 1035778 - DNA, 15 bp, Homo sapiens
ctaggggagctgatt

SEQ ID NO: 1035779 - DNA, 15 bp, Homo sapiens
taggggagctgattg

SEQ ID NO: 1035780 - DNA, 15 bp, Homo sapiens
aggggagctgattgt

SEQ ID NO: 1035781 - DNA, 15 bp, Homo sapiens
ggggagctgattgta

SEQ ID NO: 1035782 - DNA, 15 bp, Homo sapiens
gggagctgattgtag

SEQ ID NO: 1035783 - DNA, 15 bp, Homo sapiens
ggagctgattgtagc

SEQ ID NO: 1035784 - DNA, 15 bp, Homo sapiens
gagctgattgtagca

SEQ ID NO: 1035785 - DNA, 15 bp, Homo sapiens
agctgattgtagcag

SEQ ID NO: 1035786 - DNA, 15 bp, Homo sapiens
gctgattgtagcagc

SEQ ID NO: 1035787 - DNA, 15 bp, Homo sapiens
ctgattgtagcagcc

SEQ ID NO: 1035788 - DNA, 15 bp, Homo sapiens
tgattgtagcagcct

SEQ ID NO: 1035789 - DNA, 15 bp, Homo sapiens
gattgtagcagcctc

SEQ ID NO: 1035790 - DNA, 15 bp, Homo sapiens
attgtagcagcctcg

SEQ ID NO: 1035791 - DNA, 15 bp, Homo sapiens
ttgtagcagcctcgt

SEQ ID NO: 1035792 - DNA, 15 bp, Homo sapiens
tgtagcagcctcgtt

SEQ ID NO: 1035793 - DNA, 15 bp, Homo sapiens
gtagcagcctcgtta

SEQ ID NO: 1035794 - DNA, 15 bp, Homo sapiens
tagcagcctcgttag

SEQ ID NO: 1035795 - DNA, 15 bp, Homo sapiens
agcagcctcgttagt

SEQ ID NO: 1035796 - DNA, 15 bp, Homo sapiens
gcagcctcgttagtg

SEQ ID NO: 1035797 - DNA, 15 bp, Homo sapiens
cagcctcgttagtgt

SEQ ID NO: 1035798 - DNA, 15 bp, Homo sapiens
agcctcgttagtgtc

SEQ ID NO: 1035799 - DNA, 15 bp, Homo sapiens
gcctcgttagtgtca

SEQ ID NO: 1035800 - DNA, 15 bp, Homo sapiens
cctcgttagtgtcac

SEQ ID NO: 1035801 - DNA, 15 bp, Homo sapiens
ctcgttagtgtcacc

SEQ ID NO: 1035802 - DNA, 15 bp, Homo sapiens
tcgttagtgtcaccc

SEQ ID NO: 1035803 - DNA, 15 bp, Homo sapiens
cgttagtgtcacccc

SEQ ID NO: 1035804 - DNA, 15 bp, Homo sapiens
gttagtgtcaccccc

SEQ ID NO: 1035805 - DNA, 15 bp, Homo sapiens
ttagtgtcaccccct

SEQ ID NO: 1035806 - DNA, 15 bp, Homo sapiens
tagtgtcaccccctc

SEQ ID NO: 1035807 - DNA, 15 bp, Homo sapiens
agtgtcaccccctcc

SEQ ID NO: 1035808 - DNA, 15 bp, Homo sapiens
gtgtcaccccctcct

SEQ ID NO: 1035809 - DNA, 15 bp, Homo sapiens
tgtcaccccctcctc

SEQ ID NO: 1035810 - DNA, 15 bp, Homo sapiens
gtcaccccctcctcc

SEQ ID NO: 1035811 - DNA, 15 bp, Homo sapiens
tcaccccctcctccc

SEQ ID NO: 1035812 - DNA, 15 bp, Homo sapiens
caccccctcctccct

SEQ ID NO: 1035813 - DNA, 15 bp, Homo sapiens
accccctcctccctg

SEQ ID NO: 1035814 - DNA, 15 bp, Homo sapiens
ccccctcctccctga

SEQ ID NO: 1035815 - DNA, 15 bp, Homo sapiens
cccctcctccctgat

SEQ ID NO: 1035816 - DNA, 15 bp, Homo sapiens
ccctcctccctgatc

SEQ ID NO: 1035817 - DNA, 15 bp, Homo sapiens
cctcctccctgatct

SEQ ID NO: 1035818 - DNA, 15 bp, Homo sapiens
ctcctccctgatctg

SEQ ID NO: 1035819 - DNA, 15 bp, Homo sapiens
tcctccctgatctgt

SEQ ID NO: 1035820 - DNA, 15 bp, Homo sapiens
cctccctgatctgtc

SEQ ID NO: 1035821 - DNA, 15 bp, Homo sapiens
ctccctgatctgtca

SEQ ID NO: 1035822 - DNA, 15 bp, Homo sapiens
tccctgatctgtcag

SEQ ID NO: 1035823 - DNA, 15 bp, Homo sapiens
ccctgatctgtcagg

SEQ ID NO: 1035824 - DNA, 15 bp, Homo sapiens
cctgatctgtcaggg

SEQ ID NO: 1035825 - DNA, 15 bp, Homo sapiens
ctgatctgtcagggc

SEQ ID NO: 1035826 - DNA, 15 bp, Homo sapiens
tgatctgtcagggcc

SEQ ID NO: 1035827 - DNA, 15 bp, Homo sapiens
gatctgtcagggcca

SEQ ID NO: 1035828 - DNA, 15 bp, Homo sapiens
atctgtcagggccac

SEQ ID NO: 1035829 - DNA, 15 bp, Homo sapiens
tctgtcagggccact

SEQ ID NO: 1035830 - DNA, 15 bp, Homo sapiens
ctgtcagggccactt

SEQ ID NO: 1035831 - DNA, 15 bp, Homo sapiens
tgtcagggccactta

SEQ ID NO: 1035832 - DNA, 15 bp, Homo sapiens
gtcagggccacttag

SEQ ID NO: 1035833 - DNA, 15 bp, Homo sapiens
tcagggccacttagt

SEQ ID NO: 1035834 - DNA, 15 bp, Homo sapiens
cagggccacttagtg

SEQ ID NO: 1035835 - DNA, 15 bp, Homo sapiens
agggccacttagtga

SEQ ID NO: 1035836 - DNA, 15 bp, Homo sapiens
gggccacttagtgat

SEQ ID NO: 1035837 - DNA, 15 bp, Homo sapiens
ggccacttagtgata

SEQ ID NO: 1035838 - DNA, 15 bp, Homo sapiens
gccacttagtgataa

SEQ ID NO: 1035839 - DNA, 15 bp, Homo sapiens
ccacttagtgataat

SEQ ID NO: 1035840 - DNA, 15 bp, Homo sapiens
cacttagtgataata

SEQ ID NO: 1035841 - DNA, 15 bp, Homo sapiens
acttagtgataataa

SEQ ID NO: 1035842 - DNA, 15 bp, Homo sapiens
cttagtgataataaa

SEQ ID NO: 1035843 - DNA, 15 bp, Homo sapiens
ttagtgataataaat

SEQ ID NO: 1035844 - DNA, 15 bp, Homo sapiens
tagtgataataaatt

SEQ ID NO: 1035845 - DNA, 15 bp, Homo sapiens
agtgataataaattc

SEQ ID NO: 1035846 - DNA, 15 bp, Homo sapiens
gtgataataaattct

SEQ ID NO: 1035847 - DNA, 15 bp, Homo sapiens
tgataataaattctt

SEQ ID NO: 1035848 - DNA, 15 bp, Homo sapiens
gataataaattcttc

SEQ ID NO: 1035849 - DNA, 15 bp, Homo sapiens
ataataaattcttcc

SEQ ID NO: 1035850 - DNA, 15 bp, Homo sapiens
taataaattcttccc

SEQ ID NO: 1035851 - DNA, 15 bp, Homo sapiens
aataaattcttccca

SEQ ID NO: 1035852 - DNA, 15 bp, Homo sapiens
ataaattcttcccaa

SEQ ID NO: 1035853 - DNA, 15 bp, Homo sapiens
taaattcttcccaac

SEQ ID NO: 1035854 - DNA, 15 bp, Homo sapiens
aaattcttcccaact

SEQ ID NO: 1035855 - DNA, 15 bp, Homo sapiens
aattcttcccaactg

SEQ ID NO: 1035856 - DNA, 15 bp, Homo sapiens
attcttcccaactgc

SEQ ID NO: 1035857 - DNA, 15 bp, Homo sapiens
ttcttcccaactgca

SEQ ID NO: 1035858 - DNA, 15 bp, Homo sapiens
tcttcccaactgcag

SEQ ID NO: 1035859 - DNA, 15 bp, Homo sapiens
cttcccaactgcaga

SEQ ID NO: 1035860 - DNA, 15 bp, Homo sapiens
ttcccaactgcagac

SEQ ID NO: 1035861 - DNA, 15 bp, Homo sapiens
tcccaactgcagacc

SEQ ID NO: 1035862 - DNA, 15 bp, Homo sapiens
cccaactgcagacct

SEQ ID NO: 1035863 - DNA, 15 bp, Homo sapiens
ccaactgcagacctt

SEQ ID NO: 1035864 - DNA, 15 bp, Homo sapiens
caactgcagaccttg

SEQ ID NO: 1035865 - DNA, 15 bp, Homo sapiens
aactgcagaccttgg

SEQ ID NO: 1035866 - DNA, 15 bp, Homo sapiens
actgcagaccttggc

SEQ ID NO: 1035867 - DNA, 15 bp, Homo sapiens
ctgcagaccttggca

SEQ ID NO: 1035868 - DNA, 15 bp, Homo sapiens
tgcagaccttggcag

SEQ ID NO: 1035869 - DNA, 15 bp, Homo sapiens
gcagaccttggcagg

SEQ ID NO: 1035870 - DNA, 15 bp, Homo sapiens
cagaccttggcagga

SEQ ID NO: 1035871 - DNA, 15 bp, Homo sapiens
agaccttggcaggag

SEQ ID NO: 1035872 - DNA, 15 bp, Homo sapiens
gaccttggcaggagt

SEQ ID NO: 1035873 - DNA, 15 bp, Homo sapiens
accttggcaggagtc

SEQ ID NO: 1035874 - DNA, 15 bp, Homo sapiens
ccttggcaggagtcg

SEQ ID NO: 1035875 - DNA, 15 bp, Homo sapiens
cttggcaggagtcgt

SEQ ID NO: 1035876 - DNA, 15 bp, Homo sapiens
ttggcaggagtcgtg

SEQ ID NO: 1035877 - DNA, 15 bp, Homo sapiens
tggcaggagtcgtgg

SEQ ID NO: 1035878 - DNA, 15 bp, Homo sapiens
ggcaggagtcgtgga

SEQ ID NO: 1035879 - DNA, 15 bp, Homo sapiens
gcaggagtcgtggat

SEQ ID NO: 1035880 - DNA, 15 bp, Homo sapiens
caggagtcgtggatc

SEQ ID NO: 1035881 - DNA, 15 bp, Homo sapiens
aggagtcgtggatct

SEQ ID NO: 1035882 - DNA, 15 bp, Homo sapiens
ggagtcgtggatctt

SEQ ID NO: 1035883 - DNA, 15 bp, Homo sapiens
gagtcgtggatctta

SEQ ID NO: 1035884 - DNA, 15 bp, Homo sapiens
agtcgtggatcttac

SEQ ID NO: 1035885 - DNA, 15 bp, Homo sapiens
gtcgtggatcttacg

SEQ ID NO: 1035886 - DNA, 15 bp, Homo sapiens
tcgtggatcttacgg

SEQ ID NO: 1035887 - DNA, 15 bp, Homo sapiens
cgtggatcttacgga

SEQ ID NO: 1035888 - DNA, 15 bp, Homo sapiens
gtggatcttacggaa

SEQ ID NO: 1035889 - DNA, 15 bp, Homo sapiens
tggatcttacggaaa

SEQ ID NO: 1035890 - DNA, 15 bp, Homo sapiens
ggatcttacggaaac

SEQ ID NO: 1035891 - DNA, 15 bp, Homo sapiens
gatcttacggaaacc

SEQ ID NO: 1035892 - DNA, 15 bp, Homo sapiens
atcttacggaaaccg

SEQ ID NO: 1035893 - DNA, 15 bp, Homo sapiens
tcttacggaaaccgc

SEQ ID NO: 1035894 - DNA, 15 bp, Homo sapiens
cttacggaaaccgcc

SEQ ID NO: 1035895 - DNA, 15 bp, Homo sapiens
ttacggaaaccgcct

SEQ ID NO: 1035896 - DNA, 15 bp, Homo sapiens
tacggaaaccgcctc

SEQ ID NO: 1035897 - DNA, 15 bp, Homo sapiens
acggaaaccgcctct

SEQ ID NO: 1035898 - DNA, 15 bp, Homo sapiens
cggaaaccgcctctc

SEQ ID NO: 1035899 - DNA, 15 bp, Homo sapiens
ggaaaccgcctctcc

SEQ ID NO: 1035900 - DNA, 15 bp, Homo sapiens
gaaaccgcctctccc

SEQ ID NO: 1035901 - DNA, 15 bp, Homo sapiens
aaaccgcctctccca

SEQ ID NO: 1035902 - DNA, 15 bp, Homo sapiens
aaccgcctctcccac

SEQ ID NO: 1035903 - DNA, 15 bp, Homo sapiens
accgcctctcccaca

SEQ ID NO: 1035904 - DNA, 15 bp, Homo sapiens
ccgcctctcccacat

SEQ ID NO: 1035905 - DNA, 15 bp, Homo sapiens
cgcctctcccacatg

SEQ ID NO: 1035906 - DNA, 15 bp, Homo sapiens
gcctctcccacatgt

SEQ ID NO: 1035907 - DNA, 15 bp, Homo sapiens
cctctcccacatgtc

SEQ ID NO: 1035908 - DNA, 15 bp, Homo sapiens
ctctcccacatgtcc

SEQ ID NO: 1035909 - DNA, 15 bp, Homo sapiens
tctcccacatgtccc

SEQ ID NO: 1035910 - DNA, 15 bp, Homo sapiens
ctcccacatgtccct

SEQ ID NO: 1035911 - DNA, 15 bp, Homo sapiens
tcccacatgtccctc

SEQ ID NO: 1035912 - DNA, 15 bp, Homo sapiens
cccacatgtccctca

SEQ ID NO: 1035913 - DNA, 15 bp, Homo sapiens
ccacatgtccctcag

SEQ ID NO: 1035914 - DNA, 15 bp, Homo sapiens
cacatgtccctcaga

SEQ ID NO: 1035915 - DNA, 15 bp, Homo sapiens
acatgtccctcagac

SEQ ID NO: 1035916 - DNA, 15 bp, Homo sapiens
catgtccctcagacc

SEQ ID NO: 1035917 - DNA, 15 bp, Homo sapiens
atgtccctcagaccc

SEQ ID NO: 1035918 - DNA, 15 bp, Homo sapiens
tgtccctcagaccca

SEQ ID NO: 1035919 - DNA, 15 bp, Homo sapiens
gtccctcagacccag

SEQ ID NO: 1035920 - DNA, 15 bp, Homo sapiens
tccctcagacccagg

SEQ ID NO: 1035921 - DNA, 15 bp, Homo sapiens
ccctcagacccagga

SEQ ID NO: 1035922 - DNA, 15 bp, Homo sapiens
cctcagacccaggag

SEQ ID NO: 1035923 - DNA, 15 bp, Homo sapiens
ctcagacccaggagt

SEQ ID NO: 1035924 - DNA, 15 bp, Homo sapiens
tcagacccaggagtc

SEQ ID NO: 1035925 - DNA, 15 bp, Homo sapiens
cagacccaggagtcc

SEQ ID NO: 1035926 - DNA, 15 bp, Homo sapiens
agacccaggagtccc

SEQ ID NO: 1035927 - DNA, 15 bp, Homo sapiens
gacccaggagtccca

SEQ ID NO: 1035928 - DNA, 15 bp, Homo sapiens
acccaggagtcccag

SEQ ID NO: 1035929 - DNA, 15 bp, Homo sapiens
cccaggagtcccagc

SEQ ID NO: 1035930 - DNA, 15 bp, Homo sapiens
ccaggagtcccagcc

SEQ ID NO: 1035931 - DNA, 15 bp, Homo sapiens
caggagtcccagccc

SEQ ID NO: 1035932 - DNA, 15 bp, Homo sapiens
aggagtcccagccca

SEQ ID NO: 1035933 - DNA, 15 bp, Homo sapiens
ggagtcccagcccaa

SEQ ID NO: 1035934 - DNA, 15 bp, Homo sapiens
gagtcccagcccaag

SEQ ID NO: 1035935 - DNA, 15 bp, Homo sapiens
agtcccagcccaagc

SEQ ID NO: 1035936 - DNA, 15 bp, Homo sapiens
gtcccagcccaagcc

SEQ ID NO: 1035937 - DNA, 15 bp, Homo sapiens
tcccagcccaagcca

SEQ ID NO: 1035938 - DNA, 15 bp, Homo sapiens
cccagcccaagccac

SEQ ID NO: 1035939 - DNA, 15 bp, Homo sapiens
ccagcccaagccact

SEQ ID NO: 1035940 - DNA, 15 bp, Homo sapiens
cagcccaagccactc

SEQ ID NO: 1035941 - DNA, 15 bp, Homo sapiens
agcccaagccactcc

SEQ ID NO: 1035942 - DNA, 15 bp, Homo sapiens
gcccaagccactccc

SEQ ID NO: 1035943 - DNA, 15 bp, Homo sapiens
cccaagccactccct

SEQ ID NO: 1035944 - DNA, 15 bp, Homo sapiens
ccaagccactccctg

SEQ ID NO: 1035945 - DNA, 15 bp, Homo sapiens
caagccactccctgc

SEQ ID NO: 1035946 - DNA, 15 bp, Homo sapiens
aagccactccctgcc

SEQ ID NO: 1035947 - DNA, 15 bp, Homo sapiens
agccactccctgccc

SEQ ID NO: 1035948 - DNA, 15 bp, Homo sapiens
gccactccctgccca

SEQ ID NO: 1035949 - DNA, 15 bp, Homo sapiens
ccactccctgcccac

SEQ ID NO: 1035950 - DNA, 15 bp, Homo sapiens
cactccctgcccact

SEQ ID NO: 1035951 - DNA, 15 bp, Homo sapiens
actccctgcccactc

SEQ ID NO: 1035952 - DNA, 15 bp, Homo sapiens
ctccctgcccactcc

SEQ ID NO: 1035953 - DNA, 15 bp, Homo sapiens
tccctgcccactccc

SEQ ID NO: 1035954 - DNA, 15 bp, Homo sapiens
ccctgcccactcccc

SEQ ID NO: 1035955 - DNA, 15 bp, Homo sapiens
cctgcccactcccca

SEQ ID NO: 1035956 - DNA, 15 bp, Homo sapiens
ctgcccactccccac

SEQ ID NO: 1035957 - DNA, 15 bp, Homo sapiens
tgcccactccccaca

SEQ ID NO: 1035958 - DNA, 15 bp, Homo sapiens
gcccactccccacac

SEQ ID NO: 1035959 - DNA, 15 bp, Homo sapiens
cccactccccacacc

SEQ ID NO: 1035960 - DNA, 15 bp, Homo sapiens
ccactccccacacct

SEQ ID NO: 1035961 - DNA, 15 bp, Homo sapiens
cactccccacacctg

SEQ ID NO: 1035962 - DNA, 15 bp, Homo sapiens
actccccacacctgg

SEQ ID NO: 1035963 - DNA, 15 bp, Homo sapiens
ctccccacacctggg

SEQ ID NO: 1035964 - DNA, 15 bp, Homo sapiens
tccccacacctggga

SEQ ID NO: 1035965 - DNA, 15 bp, Homo sapiens
ccccacacctgggac

SEQ ID NO: 1035966 - DNA, 15 bp, Homo sapiens
cccacacctgggacc

SEQ ID NO: 1035967 - DNA, 15 bp, Homo sapiens
ccacacctgggacca

SEQ ID NO: 1035968 - DNA, 15 bp, Homo sapiens
cacacctgggaccag

SEQ ID NO: 1035969 - DNA, 15 bp, Homo sapiens
acacctgggaccagg

SEQ ID NO: 1035970 - DNA, 15 bp, Homo sapiens
cacctgggaccaggt

SEQ ID NO: 1035971 - DNA, 15 bp, Homo sapiens
acctgggaccaggta

SEQ ID NO: 1035972 - DNA, 15 bp, Homo sapiens
cctgggaccaggtag

SEQ ID NO: 1035973 - DNA, 15 bp, Homo sapiens
ctgggaccaggtagc

SEQ ID NO: 1035974 - DNA, 15 bp, Homo sapiens
tgggaccaggtagcc

SEQ ID NO: 1035975 - DNA, 15 bp, Homo sapiens
gggaccaggtagcca

SEQ ID NO: 1035976 - DNA, 15 bp, Homo sapiens
ggaccaggtagccag

SEQ ID NO: 1035977 - DNA, 15 bp, Homo sapiens
gaccaggtagccagt

SEQ ID NO: 1035978 - DNA, 15 bp, Homo sapiens
accaggtagccagtc

SEQ ID NO: 1035979 - DNA, 15 bp, Homo sapiens
ccaggtagccagtct

SEQ ID NO: 1035980 - DNA, 15 bp, Homo sapiens
caggtagccagtctg

SEQ ID NO: 1035981 - DNA, 15 bp, Homo sapiens
aggtagccagtctgg

SEQ ID NO: 1035982 - DNA, 15 bp, Homo sapiens
ggtagccagtctggg

SEQ ID NO: 1035983 - DNA, 15 bp, Homo sapiens
gtagccagtctgggc

SEQ ID NO: 1035984 - DNA, 15 bp, Homo sapiens
tagccagtctgggct

SEQ ID NO: 1035985 - DNA, 15 bp, Homo sapiens
agccagtctgggctg

SEQ ID NO: 1035986 - DNA, 15 bp, Homo sapiens
gccagtctgggctgc

SEQ ID NO: 1035987 - DNA, 15 bp, Homo sapiens
ccagtctgggctgcc

SEQ ID NO: 1035988 - DNA, 15 bp, Homo sapiens
cagtctgggctgccc

SEQ ID NO: 1035989 - DNA, 15 bp, Homo sapiens
agtctgggctgccct

SEQ ID NO: 1035990 - DNA, 15 bp, Homo sapiens
gtctgggctgccctc

SEQ ID NO: 1035991 - DNA, 15 bp, Homo sapiens
tctgggctgccctcc

SEQ ID NO: 1035992 - DNA, 15 bp, Homo sapiens
ctgggctgccctcct

SEQ ID NO: 1035993 - DNA, 15 bp, Homo sapiens
tgggctgccctcctg

SEQ ID NO: 1035994 - DNA, 15 bp, Homo sapiens
gggctgccctcctgg

SEQ ID NO: 1035995 - DNA, 15 bp, Homo sapiens
ggctgccctcctggg

SEQ ID NO: 1035996 - DNA, 15 bp, Homo sapiens
gctgccctcctggga

SEQ ID NO: 1035997 - DNA, 15 bp, Homo sapiens
ctgccctcctgggag

SEQ ID NO: 1035998 - DNA, 15 bp, Homo sapiens
tgccctcctgggaga

SEQ ID NO: 1035999 - DNA, 15 bp, Homo sapiens
gccctcctgggagaa

SEQ ID NO: 1036000 - DNA, 15 bp, Homo sapiens
ccctcctgggagaac

SEQ ID NO: 1036001 - DNA, 15 bp, Homo sapiens
cctcctgggagaaca

SEQ ID NO: 1036002 - DNA, 15 bp, Homo sapiens
ctcctgggagaacaa

SEQ ID NO: 1036003 - DNA, 15 bp, Homo sapiens
tcctgggagaacaag

SEQ ID NO: 1036004 - DNA, 15 bp, Homo sapiens
cctgggagaacaaga

SEQ ID NO: 1036005 - DNA, 15 bp, Homo sapiens
ctgggagaacaagat

SEQ ID NO: 1036006 - DNA, 15 bp, Homo sapiens
tgggagaacaagatg

SEQ ID NO: 1036007 - DNA, 15 bp, Homo sapiens
gggagaacaagatgt

SEQ ID NO: 1036008 - DNA, 15 bp, Homo sapiens
ggagaacaagatgtc

SEQ ID NO: 1036009 - DNA, 15 bp, Homo sapiens
gagaacaagatgtct

SEQ ID NO: 1036010 - DNA, 15 bp, Homo sapiens
agaacaagatgtctc

SEQ ID NO: 1036011 - DNA, 15 bp, Homo sapiens
gaacaagatgtctct

SEQ ID NO: 1036012 - DNA, 15 bp, Homo sapiens
aacaagatgtctctt

SEQ ID NO: 1036013 - DNA, 15 bp, Homo sapiens
acaagatgtctcttg

SEQ ID NO: 1036014 - DNA, 15 bp, Homo sapiens
caagatgtctcttgg

SEQ ID NO: 1036015 - DNA, 15 bp, Homo sapiens
aagatgtctcttggg

SEQ ID NO: 1036016 - DNA, 15 bp, Homo sapiens
agatgtctcttggga

SEQ ID NO: 1036017 - DNA, 15 bp, Homo sapiens
gatgtctcttgggaa

SEQ ID NO: 1036018 - DNA, 15 bp, Homo sapiens
atgtctcttgggaag

SEQ ID NO: 1036019 - DNA, 15 bp, Homo sapiens
tgtctcttgggaagg

SEQ ID NO: 1036020 - DNA, 15 bp, Homo sapiens
gtctcttgggaaggt

SEQ ID NO: 1036021 - DNA, 15 bp, Homo sapiens
tctcttgggaaggtc

SEQ ID NO: 1036022 - DNA, 15 bp, Homo sapiens
ctcttgggaaggtcc

SEQ ID NO: 1036023 - DNA, 15 bp, Homo sapiens
tcttgggaaggtccc

SEQ ID NO: 1036024 - DNA, 15 bp, Homo sapiens
cttgggaaggtcccc

SEQ ID NO: 1036025 - DNA, 15 bp, Homo sapiens
ttgggaaggtcccca

SEQ ID NO: 1036026 - DNA, 15 bp, Homo sapiens
tgggaaggtccccag

SEQ ID NO: 1036027 - DNA, 15 bp, Homo sapiens
gggaaggtccccaga

SEQ ID NO: 1036028 - DNA, 15 bp, Homo sapiens
ggaaggtccccagac

SEQ ID NO: 1036029 - DNA, 15 bp, Homo sapiens
gaaggtccccagacc

SEQ ID NO: 1036030 - DNA, 15 bp, Homo sapiens
aaggtccccagacca

SEQ ID NO: 1036031 - DNA, 15 bp, Homo sapiens
aggtccccagaccaa

SEQ ID NO: 1036032 - DNA, 15 bp, Homo sapiens
ggtccccagaccaac

SEQ ID NO: 1036033 - DNA, 15 bp, Homo sapiens
gtccccagaccaact

SEQ ID NO: 1036034 - DNA, 15 bp, Homo sapiens
tccccagaccaactg

SEQ ID NO: 1036035 - DNA, 15 bp, Homo sapiens
ccccagaccaactga

SEQ ID NO: 1036036 - DNA, 15 bp, Homo sapiens
cccagaccaactgaa

SEQ ID NO: 1036037 - DNA, 15 bp, Homo sapiens
ccagaccaactgaag

SEQ ID NO: 1036038 - DNA, 15 bp, Homo sapiens
cagaccaactgaagg

SEQ ID NO: 1036039 - DNA, 15 bp, Homo sapiens
agaccaactgaagga

SEQ ID NO: 1036040 - DNA, 15 bp, Homo sapiens
gaccaactgaaggac

SEQ ID NO: 1036041 - DNA, 15 bp, Homo sapiens
accaactgaaggact

SEQ ID NO: 1036042 - DNA, 15 bp, Homo sapiens
ccaactgaaggactg

SEQ ID NO: 1036043 - DNA, 15 bp, Homo sapiens
caactgaaggactgg

SEQ ID NO: 1036044 - DNA, 15 bp, Homo sapiens
aactgaaggactggt

SEQ ID NO: 1036045 - DNA, 15 bp, Homo sapiens
actgaaggactggtt

SEQ ID NO: 1036046 - DNA, 15 bp, Homo sapiens
ctgaaggactggttt

SEQ ID NO: 1036047 - DNA, 15 bp, Homo sapiens
tgaaggactggtttg

SEQ ID NO: 1036048 - DNA, 15 bp, Homo sapiens
gaaggactggtttgg

SEQ ID NO: 1036049 - DNA, 15 bp, Homo sapiens
aaggactggtttggc

SEQ ID NO: 1036050 - DNA, 15 bp, Homo sapiens
aggactggtttggcc

SEQ ID NO: 1036051 - DNA, 15 bp, Homo sapiens
ggactggtttggccc

SEQ ID NO: 1036052 - DNA, 15 bp, Homo sapiens
gactggtttggccct

SEQ ID NO: 1036053 - DNA, 15 bp, Homo sapiens
actggtttggccctc

SEQ ID NO: 1036054 - DNA, 15 bp, Homo sapiens
ctggtttggccctct

SEQ ID NO: 1036055 - DNA, 15 bp, Homo sapiens
tggtttggccctctt

SEQ ID NO: 1036056 - DNA, 15 bp, Homo sapiens
ggtttggccctcttt

SEQ ID NO: 1036057 - DNA, 15 bp, Homo sapiens
gtttggccctctttg

SEQ ID NO: 1036058 - DNA, 15 bp, Homo sapiens
tttggccctctttgc

SEQ ID NO: 1036059 - DNA, 15 bp, Homo sapiens
ttggccctctttgca

SEQ ID NO: 1036060 - DNA, 15 bp, Homo sapiens
tggccctctttgcag

SEQ ID NO: 1036061 - DNA, 15 bp, Homo sapiens
ggccctctttgcagg

SEQ ID NO: 1036062 - DNA, 15 bp, Homo sapiens
gccctctttgcaggg

SEQ ID NO: 1036063 - DNA, 15 bp, Homo sapiens
ccctctttgcagggc

SEQ ID NO: 1036064 - DNA, 15 bp, Homo sapiens
cctctttgcagggcc

SEQ ID NO: 1036065 - DNA, 15 bp, Homo sapiens
ctctttgcagggcct

SEQ ID NO: 1036066 - DNA, 15 bp, Homo sapiens
tctttgcagggcctc

SEQ ID NO: 1036067 - DNA, 15 bp, Homo sapiens
ctttgcagggcctca

SEQ ID NO: 1036068 - DNA, 15 bp, Homo sapiens
tttgcagggcctcac

SEQ ID NO: 1036069 - DNA, 15 bp, Homo sapiens
ttgcagggcctcacc

SEQ ID NO: 1036070 - DNA, 15 bp, Homo sapiens
tgcagggcctcaccc

SEQ ID NO: 1036071 - DNA, 15 bp, Homo sapiens
gcagggcctcaccct

SEQ ID NO: 1036072 - DNA, 15 bp, Homo sapiens
cagggcctcacccta

SEQ ID NO: 1036073 - DNA, 15 bp, Homo sapiens
agggcctcaccctag

SEQ ID NO: 1036074 - DNA, 15 bp, Homo sapiens
gggcctcaccctagg

SEQ ID NO: 1036075 - DNA, 15 bp, Homo sapiens
ggcctcaccctaggg

SEQ ID NO: 1036076 - DNA, 15 bp, Homo sapiens
gcctcaccctagggt

SEQ ID NO: 1036077 - DNA, 15 bp, Homo sapiens
cctcaccctagggtc

SEQ ID NO: 1036078 - DNA, 15 bp, Homo sapiens
ctcaccctagggtca

SEQ ID NO: 1036079 - DNA, 15 bp, Homo sapiens
tcaccctagggtcat

SEQ ID NO: 1036080 - DNA, 15 bp, Homo sapiens
caccctagggtcata

SEQ ID NO: 1036081 - DNA, 15 bp, Homo sapiens
accctagggtcatat

SEQ ID NO: 1036082 - DNA, 15 bp, Homo sapiens
ccctagggtcatatc

SEQ ID NO: 1036083 - DNA, 15 bp, Homo sapiens
cctagggtcatatcc

SEQ ID NO: 1036084 - DNA, 15 bp, Homo sapiens
ctagggtcatatcct

SEQ ID NO: 1036085 - DNA, 15 bp, Homo sapiens
tagggtcatatcctt

SEQ ID NO: 1036086 - DNA, 15 bp, Homo sapiens
agggtcatatcctta

SEQ ID NO: 1036087 - DNA, 15 bp, Homo sapiens
gggtcatatccttaa

SEQ ID NO: 1036088 - DNA, 15 bp, Homo sapiens
ggtcatatccttaag

SEQ ID NO: 1036089 - DNA, 15 bp, Homo sapiens
gtcatatccttaagc

SEQ ID NO: 1036090 - DNA, 15 bp, Homo sapiens
tcatatccttaagca

SEQ ID NO: 1036091 - DNA, 15 bp, Homo sapiens
catatccttaagcaa

SEQ ID NO: 1036092 - DNA, 15 bp, Homo sapiens
atatccttaagcaag

SEQ ID NO: 1036093 - DNA, 15 bp, Homo sapiens
tatccttaagcaaga

SEQ ID NO: 1036094 - DNA, 15 bp, Homo sapiens
atccttaagcaagaa

SEQ ID NO: 1036095 - DNA, 15 bp, Homo sapiens
tccttaagcaagaag

SEQ ID NO: 1036096 - DNA, 15 bp, Homo sapiens
ccttaagcaagaagg

SEQ ID NO: 1036097 - DNA, 15 bp, Homo sapiens
cttaagcaagaaggg

SEQ ID NO: 1036098 - DNA, 15 bp, Homo sapiens
ttaagcaagaagggg

SEQ ID NO: 1036099 - DNA, 15 bp, Homo sapiens
taagcaagaaggggg

SEQ ID NO: 1036100 - DNA, 15 bp, Homo sapiens
aagcaagaaggggga

SEQ ID NO: 1036101 - DNA, 15 bp, Homo sapiens
agcaagaagggggac

SEQ ID NO: 1036102 - DNA, 15 bp, Homo sapiens
gcaagaagggggaca

SEQ ID NO: 1036103 - DNA, 15 bp, Homo sapiens
caagaagggggacaa

SEQ ID NO: 1036104 - DNA, 15 bp, Homo sapiens
aagaagggggacaag

SEQ ID NO: 1036105 - DNA, 15 bp, Homo sapiens
agaagggggacaaga

SEQ ID NO: 1036106 - DNA, 15 bp, Homo sapiens
gaagggggacaagat

SEQ ID NO: 1036107 - DNA, 15 bp, Homo sapiens
aagggggacaagatc

SEQ ID NO: 1036108 - DNA, 15 bp, Homo sapiens
agggggacaagatca

SEQ ID NO: 1036109 - DNA, 15 bp, Homo sapiens
gggggacaagatcaa

SEQ ID NO: 1036110 - DNA, 15 bp, Homo sapiens
ggggacaagatcaag

SEQ ID NO: 1036111 - DNA, 15 bp, Homo sapiens
gggacaagatcaaga

SEQ ID NO: 1036112 - DNA, 15 bp, Homo sapiens
ggacaagatcaagat

SEQ ID NO: 1036113 - DNA, 15 bp, Homo sapiens
gacaagatcaagatg

SEQ ID NO: 1036114 - DNA, 15 bp, Homo sapiens
acaagatcaagatgg

SEQ ID NO: 1036115 - DNA, 15 bp, Homo sapiens
caagatcaagatggc

SEQ ID NO: 1036116 - DNA, 15 bp, Homo sapiens
aagatcaagatggct

SEQ ID NO: 1036117 - DNA, 15 bp, Homo sapiens
agatcaagatggctg

SEQ ID NO: 1036118 - DNA, 15 bp, Homo sapiens
gatcaagatggctgt

SEQ ID NO: 1036119 - DNA, 15 bp, Homo sapiens
atcaagatggctgtg

SEQ ID NO: 1036120 - DNA, 15 bp, Homo sapiens
tcaagatggctgtgg

SEQ ID NO: 1036121 - DNA, 15 bp, Homo sapiens
caagatggctgtggc

SEQ ID NO: 1036122 - DNA, 15 bp, Homo sapiens
aagatggctgtggct

SEQ ID NO: 1036123 - DNA, 15 bp, Homo sapiens
agatggctgtggcta

SEQ ID NO: 1036124 - DNA, 15 bp, Homo sapiens
gatggctgtggctac

SEQ ID NO: 1036125 - DNA, 15 bp, Homo sapiens
atggctgtggctacc

SEQ ID NO: 1036126 - DNA, 15 bp, Homo sapiens
tggctgtggctacca

SEQ ID NO: 1036127 - DNA, 15 bp, Homo sapiens
ggctgtggctaccaa

SEQ ID NO: 1036128 - DNA, 15 bp, Homo sapiens
gctgtggctaccaaa

SEQ ID NO: 1036129 - DNA, 15 bp, Homo sapiens
ctgtggctaccaaat

SEQ ID NO: 1036130 - DNA, 15 bp, Homo sapiens
tgtggctaccaaatt

SEQ ID NO: 1036131 - DNA, 15 bp, Homo sapiens
gtggctaccaaatta

SEQ ID NO: 1036132 - DNA, 15 bp, Homo sapiens
tggctaccaaattac

SEQ ID NO: 1036133 - DNA, 15 bp, Homo sapiens
ggctaccaaattact

SEQ ID NO: 1036134 - DNA, 15 bp, Homo sapiens
gctaccaaattactt

SEQ ID NO: 1036135 - DNA, 15 bp, Homo sapiens
ctaccaaattactta

SEQ ID NO: 1036136 - DNA, 15 bp, Homo sapiens
taccaaattacttac

SEQ ID NO: 1036137 - DNA, 15 bp, Homo sapiens
accaaattacttaca

SEQ ID NO: 1036138 - DNA, 15 bp, Homo sapiens
ccaaattacttacac

SEQ ID NO: 1036139 - DNA, 15 bp, Homo sapiens
caaattacttacact

SEQ ID NO: 1036140 - DNA, 15 bp, Homo sapiens
aaattacttacactt

SEQ ID NO: 1036141 - DNA, 15 bp, Homo sapiens
aattacttacacttt

SEQ ID NO: 1036142 - DNA, 15 bp, Homo sapiens
attacttacactttt

SEQ ID NO: 1036143 - DNA, 15 bp, Homo sapiens
ttacttacacttttt

SEQ ID NO: 1036144 - DNA, 15 bp, Homo sapiens
tacttacactttttt

SEQ ID NO: 1036145 - DNA, 15 bp, Homo sapiens
acttacacttttttt

SEQ ID NO: 1036146 - DNA, 15 bp, Homo sapiens
cttacactttttttt

SEQ ID NO: 1036147 - DNA, 15 bp, Homo sapiens
ttacacttttttttt

SEQ ID NO: 1036148 - DNA, 15 bp, Homo sapiens
tacactttttttttt

SEQ ID NO: 1036149 - DNA, 15 bp, Homo sapiens
acacttttttttttt

SEQ ID NO: 1036150 - DNA, 15 bp, Homo sapiens
cactttttttttttt

SEQ ID NO: 1036151 - DNA, 15 bp, Homo sapiens
acttttttttttttt

SEQ ID NO: 1036152 - DNA, 15 bp, Homo sapiens
gagtctcactctgtt

SEQ ID NO: 1036153 - DNA, 15 bp, Homo sapiens
agtctcactctgttg

SEQ ID NO: 1036154 - DNA, 15 bp, Homo sapiens
gtctcactctgttgc

SEQ ID NO: 1036155 - DNA, 15 bp, Homo sapiens
tctcactctgttgcc

SEQ ID NO: 1036156 - DNA, 15 bp, Homo sapiens
ctcactctgttgccc

SEQ ID NO: 1036157 - DNA, 15 bp, Homo sapiens
tcactctgttgccca

SEQ ID NO: 1036158 - DNA, 15 bp, Homo sapiens
cactctgttgcccag

SEQ ID NO: 1036159 - DNA, 15 bp, Homo sapiens
actctgttgcccagg

SEQ ID NO: 1036160 - DNA, 15 bp, Homo sapiens
ctctgttgcccaggt

SEQ ID NO: 1036161 - DNA, 15 bp, Homo sapiens
tctgttgcccaggtt

SEQ ID NO: 1036162 - DNA, 15 bp, Homo sapiens
ctgttgcccaggttg

SEQ ID NO: 1036163 - DNA, 15 bp, Homo sapiens
tgttgcccaggttgg

SEQ ID NO: 1036164 - DNA, 15 bp, Homo sapiens
gttgcccaggttgga

SEQ ID NO: 1036165 - DNA, 15 bp, Homo sapiens
ttgcccaggttggag

SEQ ID NO: 1036166 - DNA, 15 bp, Homo sapiens
tgcccaggttggagt

SEQ ID NO: 1036167 - DNA, 15 bp, Homo sapiens
gcccaggttggagtg

SEQ ID NO: 1036168 - DNA, 15 bp, Homo sapiens
ccaggttggagtgct

SEQ ID NO: 1036169 - DNA, 15 bp, Homo sapiens
caggttggagtgctc

SEQ ID NO: 1036170 - DNA, 15 bp, Homo sapiens
aggttggagtgctca

SEQ ID NO: 1036171 - DNA, 15 bp, Homo sapiens
ggttggagtgctcac

SEQ ID NO: 1036172 - DNA, 15 bp, Homo sapiens
gttggagtgctcact

SEQ ID NO: 1036173 - DNA, 15 bp, Homo sapiens
ttggagtgctcactg

SEQ ID NO: 1036174 - DNA, 15 bp, Homo sapiens
tggagtgctcactgc

SEQ ID NO: 1036175 - DNA, 15 bp, Homo sapiens
ggagtgctcactgca

SEQ ID NO: 1036176 - DNA, 15 bp, Homo sapiens
gagtgctcactgcaa

SEQ ID NO: 1036177 - DNA, 15 bp, Homo sapiens
agtgctcactgcaac

SEQ ID NO: 1036178 - DNA, 15 bp, Homo sapiens
gtgctcactgcaacc

SEQ ID NO: 1036179 - DNA, 15 bp, Homo sapiens
tgctcactgcaacct

SEQ ID NO: 1036180 - DNA, 15 bp, Homo sapiens
caacctctgcctcct

SEQ ID NO: 1036181 - DNA, 15 bp, Homo sapiens
aacctctgcctcctg

SEQ ID NO: 1036182 - DNA, 15 bp, Homo sapiens
acctctgcctcctgg

SEQ ID NO: 1036183 - DNA, 15 bp, Homo sapiens
cctctgcctcctggg

SEQ ID NO: 1036184 - DNA, 15 bp, Homo sapiens
ctctgcctcctgggt

SEQ ID NO: 1036185 - DNA, 15 bp, Homo sapiens
tctgcctcctgggtt

SEQ ID NO: 1036186 - DNA, 15 bp, Homo sapiens
ctgcctcctgggttc

SEQ ID NO: 1036187 - DNA, 15 bp, Homo sapiens
tgcctcctgggttca

SEQ ID NO: 1036188 - DNA, 15 bp, Homo sapiens
gcctcctgggttcaa

SEQ ID NO: 1036189 - DNA, 15 bp, Homo sapiens
cctcctgggttcaag

SEQ ID NO: 1036190 - DNA, 15 bp, Homo sapiens
ctcctgggttcaagc

SEQ ID NO: 1036191 - DNA, 15 bp, Homo sapiens
tcctgggttcaagcg

SEQ ID NO: 1036192 - DNA, 15 bp, Homo sapiens
cctgggttcaagcga

SEQ ID NO: 1036193 - DNA, 15 bp, Homo sapiens
ctgggttcaagcgat

SEQ ID NO: 1036194 - DNA, 15 bp, Homo sapiens
tgggttcaagcgatt

SEQ ID NO: 1036195 - DNA, 15 bp, Homo sapiens
caagcgattctcctg

SEQ ID NO: 1036196 - DNA, 15 bp, Homo sapiens
aagcgattctcctgc

SEQ ID NO: 1036197 - DNA, 15 bp, Homo sapiens
agcgattctcctgcc

SEQ ID NO: 1036198 - DNA, 15 bp, Homo sapiens
gcgattctcctgcct

SEQ ID NO: 1036199 - DNA, 15 bp, Homo sapiens
cgattctcctgcctc

SEQ ID NO: 1036200 - DNA, 15 bp, Homo sapiens
cagcctcccaagtag

SEQ ID NO: 1036201 - DNA, 15 bp, Homo sapiens
agcctcccaagtagc

SEQ ID NO: 1036202 - DNA, 15 bp, Homo sapiens
gcctcccaagtagct

SEQ ID NO: 1036203 - DNA, 15 bp, Homo sapiens
cctcccaagtagctg

SEQ ID NO: 1036204 - DNA, 15 bp, Homo sapiens
ctcccaagtagctgg

SEQ ID NO: 1036205 - DNA, 15 bp, Homo sapiens
tcccaagtagctggg

SEQ ID NO: 1036206 - DNA, 15 bp, Homo sapiens
cccaagtagctggga

SEQ ID NO: 1036207 - DNA, 15 bp, Homo sapiens
ccaagtagctgggat

SEQ ID NO: 1036208 - DNA, 15 bp, Homo sapiens
caagtagctgggatt

SEQ ID NO: 1036209 - DNA, 15 bp, Homo sapiens
aagtagctgggatta

SEQ ID NO: 1036210 - DNA, 15 bp, Homo sapiens
tgggattacaggcgc

SEQ ID NO: 1036211 - DNA, 15 bp, Homo sapiens
gggattacaggcgcc

SEQ ID NO: 1036212 - DNA, 15 bp, Homo sapiens
ggattacaggcgcct

SEQ ID NO: 1036213 - DNA, 15 bp, Homo sapiens
gattacaggcgcctg

SEQ ID NO: 1036214 - DNA, 15 bp, Homo sapiens
attacaggcgcctgc

SEQ ID NO: 1036215 - DNA, 15 bp, Homo sapiens
ttacaggcgcctgcc

SEQ ID NO: 1036216 - DNA, 15 bp, Homo sapiens
tacaggcgcctgcca

SEQ ID NO: 1036217 - DNA, 15 bp, Homo sapiens
acaggcgcctgccac

SEQ ID NO: 1036218 - DNA, 15 bp, Homo sapiens
caggcgcctgccacc

SEQ ID NO: 1036219 - DNA, 15 bp, Homo sapiens
aggcgcctgccacca

SEQ ID NO: 1036220 - DNA, 15 bp, Homo sapiens
ggcgcctgccaccat

SEQ ID NO: 1036221 - DNA, 15 bp, Homo sapiens
gcgcctgccaccatg

SEQ ID NO: 1036222 - DNA, 15 bp, Homo sapiens
cgcctgccaccatgc

SEQ ID NO: 1036223 - DNA, 15 bp, Homo sapiens
gcctgccaccatgcc

SEQ ID NO: 1036224 - DNA, 15 bp, Homo sapiens
cctgccaccatgccc

SEQ ID NO: 1036225 - DNA, 15 bp, Homo sapiens
ctgccaccatgccca

SEQ ID NO: 1036226 - DNA, 15 bp, Homo sapiens
tgccaccatgcccag

SEQ ID NO: 1036227 - DNA, 15 bp, Homo sapiens
gccaccatgcccagc

SEQ ID NO: 1036228 - DNA, 15 bp, Homo sapiens
ccaccatgcccagct

SEQ ID NO: 1036229 - DNA, 15 bp, Homo sapiens
caccatgcccagcta

SEQ ID NO: 1036230 - DNA, 15 bp, Homo sapiens
accatgcccagctaa

SEQ ID NO: 1036231 - DNA, 15 bp, Homo sapiens
ccatgcccagctaat

SEQ ID NO: 1036232 - DNA, 15 bp, Homo sapiens
catgcccagctaatt

SEQ ID NO: 1036233 - DNA, 15 bp, Homo sapiens
atgcccagctaattt

SEQ ID NO: 1036234 - DNA, 15 bp, Homo sapiens
tgcccagctaatttt

SEQ ID NO: 1036235 - DNA, 15 bp, Homo sapiens
cccagctaatttttg

SEQ ID NO: 1036236 - DNA, 15 bp, Homo sapiens
ccagctaatttttgt

SEQ ID NO: 1036237 - DNA, 15 bp, Homo sapiens
cagctaatttttgta

SEQ ID NO: 1036238 - DNA, 15 bp, Homo sapiens
tatttttagtagagg

SEQ ID NO: 1036239 - DNA, 15 bp, Homo sapiens
atttttagtagaggc

SEQ ID NO: 1036240 - DNA, 15 bp, Homo sapiens
tttttagtagaggcg

SEQ ID NO: 1036241 - DNA, 15 bp, Homo sapiens
ttttagtagaggcgg

SEQ ID NO: 1036242 - DNA, 15 bp, Homo sapiens
tttagtagaggcggg

SEQ ID NO: 1036243 - DNA, 15 bp, Homo sapiens
ttagtagaggcgggg

SEQ ID NO: 1036244 - DNA, 15 bp, Homo sapiens
tagtagaggcggggt

SEQ ID NO: 1036245 - DNA, 15 bp, Homo sapiens
agtagaggcggggtt

SEQ ID NO: 1036246 - DNA, 15 bp, Homo sapiens
gtagaggcggggttt

SEQ ID NO: 1036247 - DNA, 15 bp, Homo sapiens
tagaggcggggtttc

SEQ ID NO: 1036248 - DNA, 15 bp, Homo sapiens
agaggcggggtttca

SEQ ID NO: 1036249 - DNA, 15 bp, Homo sapiens
gaggcggggtttcac

SEQ ID NO: 1036250 - DNA, 15 bp, Homo sapiens
aggcggggtttcacc

SEQ ID NO: 1036251 - DNA, 15 bp, Homo sapiens
ggcggggtttcacca

SEQ ID NO: 1036252 - DNA, 15 bp, Homo sapiens
gcggggtttcaccat

SEQ ID NO: 1036253 - DNA, 15 bp, Homo sapiens
accatgttggccaga

SEQ ID NO: 1036254 - DNA, 15 bp, Homo sapiens
ccatgttggccagac

SEQ ID NO: 1036255 - DNA, 15 bp, Homo sapiens
catgttggccagact

SEQ ID NO: 1036256 - DNA, 15 bp, Homo sapiens
atgttggccagactg

SEQ ID NO: 1036257 - DNA, 15 bp, Homo sapiens
tgttggccagactgg

SEQ ID NO: 1036258 - DNA, 15 bp, Homo sapiens
gttggccagactggt

SEQ ID NO: 1036259 - DNA, 15 bp, Homo sapiens
ttggccagactggtc

SEQ ID NO: 1036260 - DNA, 15 bp, Homo sapiens
tggccagactggtct

SEQ ID NO: 1036261 - DNA, 15 bp, Homo sapiens
ggccagactggtctt

SEQ ID NO: 1036262 - DNA, 15 bp, Homo sapiens
gccagactggtcttg

SEQ ID NO: 1036263 - DNA, 15 bp, Homo sapiens
ccagactggtcttga

SEQ ID NO: 1036264 - DNA, 15 bp, Homo sapiens
cagactggtcttgaa

SEQ ID NO: 1036265 - DNA, 15 bp, Homo sapiens
agactggtcttgaac

SEQ ID NO: 1036266 - DNA, 15 bp, Homo sapiens
gactggtcttgaacc

SEQ ID NO: 1036267 - DNA, 15 bp, Homo sapiens
actggtcttgaacct

SEQ ID NO: 1036268 - DNA, 15 bp, Homo sapiens
ctggtcttgaacctc

SEQ ID NO: 1036269 - DNA, 15 bp, Homo sapiens
tggtcttgaacctct

SEQ ID NO: 1036270 - DNA, 15 bp, Homo sapiens
ggtcttgaacctctg

SEQ ID NO: 1036271 - DNA, 15 bp, Homo sapiens
gtcttgaacctctga

SEQ ID NO: 1036272 - DNA, 15 bp, Homo sapiens
tcttgaacctctgac

SEQ ID NO: 1036273 - DNA, 15 bp, Homo sapiens
cttgaacctctgacc

SEQ ID NO: 1036274 - DNA, 15 bp, Homo sapiens
ttgaacctctgacct

SEQ ID NO: 1036275 - DNA, 15 bp, Homo sapiens
tgaacctctgacctc

SEQ ID NO: 1036276 - DNA, 15 bp, Homo sapiens
gaacctctgacctca

SEQ ID NO: 1036277 - DNA, 15 bp, Homo sapiens
aacctctgacctcag

SEQ ID NO: 1036278 - DNA, 15 bp, Homo sapiens
acctctgacctcagg

SEQ ID NO: 1036279 - DNA, 15 bp, Homo sapiens
cctctgacctcaggt

SEQ ID NO: 1036280 - DNA, 15 bp, Homo sapiens
ctctgacctcaggtg

SEQ ID NO: 1036281 - DNA, 15 bp, Homo sapiens
tctgacctcaggtga

SEQ ID NO: 1036282 - DNA, 15 bp, Homo sapiens
caggtgatccaccta

SEQ ID NO: 1036283 - DNA, 15 bp, Homo sapiens
aggtgatccacctac

SEQ ID NO: 1036284 - DNA, 15 bp, Homo sapiens
ggtgatccacctacc

SEQ ID NO: 1036285 - DNA, 15 bp, Homo sapiens
gtgatccacctacct

SEQ ID NO: 1036286 - DNA, 15 bp, Homo sapiens
tgatccacctacctt

SEQ ID NO: 1036287 - DNA, 15 bp, Homo sapiens
gatccacctaccttg

SEQ ID NO: 1036288 - DNA, 15 bp, Homo sapiens
atccacctaccttgg

SEQ ID NO: 1036289 - DNA, 15 bp, Homo sapiens
tccacctaccttggc

SEQ ID NO: 1036290 - DNA, 15 bp, Homo sapiens
ccacctaccttggcc

SEQ ID NO: 1036291 - DNA, 15 bp, Homo sapiens
cacctaccttggcct

SEQ ID NO: 1036292 - DNA, 15 bp, Homo sapiens
acctaccttggcctc

SEQ ID NO: 1036293 - DNA, 15 bp, Homo sapiens
cctaccttggcctcc

SEQ ID NO: 1036294 - DNA, 15 bp, Homo sapiens
ctaccttggcctccc

SEQ ID NO: 1036295 - DNA, 15 bp, Homo sapiens
taccttggcctccca

SEQ ID NO: 1036296 - DNA, 15 bp, Homo sapiens
accttggcctcccaa

SEQ ID NO: 1036297 - DNA, 15 bp, Homo sapiens
ccttggcctcccaaa

SEQ ID NO: 1036298 - DNA, 15 bp, Homo sapiens
cttggcctcccaaag

SEQ ID NO: 1036299 - DNA, 15 bp, Homo sapiens
ttggcctcccaaagt

SEQ ID NO: 1036300 - DNA, 15 bp, Homo sapiens
tggcctcccaaagtg

SEQ ID NO: 1036301 - DNA, 15 bp, Homo sapiens
ggcgcctgccaccac

SEQ ID NO: 1036302 - DNA, 15 bp, Homo sapiens
gcgcctgccaccacg

SEQ ID NO: 1036303 - DNA, 15 bp, Homo sapiens
cgcctgccaccacgc

SEQ ID NO: 1036304 - DNA, 15 bp, Homo sapiens
gcctgccaccacgcc

SEQ ID NO: 1036305 - DNA, 15 bp, Homo sapiens
cctgccaccacgccc

SEQ ID NO: 1036306 - DNA, 15 bp, Homo sapiens
ctgccaccacgcccg

SEQ ID NO: 1036307 - DNA, 15 bp, Homo sapiens
tgccaccacgcccgg

SEQ ID NO: 1036308 - DNA, 15 bp, Homo sapiens
gccaccacgcccggc

SEQ ID NO: 1036309 - DNA, 15 bp, Homo sapiens
ccaccacgcccggcc

SEQ ID NO: 1036310 - DNA, 15 bp, Homo sapiens
caccacgcccggccg

SEQ ID NO: 1036311 - DNA, 15 bp, Homo sapiens
accacgcccggccgc

SEQ ID NO: 1036312 - DNA, 15 bp, Homo sapiens
ccacgcccggccgct

SEQ ID NO: 1036313 - DNA, 15 bp, Homo sapiens
cacgcccggccgctt

SEQ ID NO: 1036314 - DNA, 15 bp, Homo sapiens
acgcccggccgcttt

SEQ ID NO: 1036315 - DNA, 15 bp, Homo sapiens
cgcccggccgctttt

SEQ ID NO: 1036316 - DNA, 15 bp, Homo sapiens
gcccggccgcttttt

SEQ ID NO: 1036317 - DNA, 15 bp, Homo sapiens
cccggccgctttttt

SEQ ID NO: 1036318 - DNA, 15 bp, Homo sapiens
ccggccgcttttttt

SEQ ID NO: 1036319 - DNA, 15 bp, Homo sapiens
cggccgctttttttt

SEQ ID NO: 1036320 - DNA, 15 bp, Homo sapiens
ggccgcttttttttt

SEQ ID NO: 1036321 - DNA, 15 bp, Homo sapiens
gccgctttttttttt

SEQ ID NO: 1036322 - DNA, 15 bp, Homo sapiens
ccgcttttttttttt

SEQ ID NO: 1036323 - DNA, 15 bp, Homo sapiens
cgctttttttttttt

SEQ ID NO: 1036324 - DNA, 15 bp, Homo sapiens
tttttttttttgagg

SEQ ID NO: 1036325 - DNA, 15 bp, Homo sapiens
ttttttttttgaggc

SEQ ID NO: 1036326 - DNA, 15 bp, Homo sapiens
tttttttttgaggca

SEQ ID NO: 1036327 - DNA, 15 bp, Homo sapiens
ttttttttgaggcag

SEQ ID NO: 1036328 - DNA, 15 bp, Homo sapiens
tttttttgaggcaga

SEQ ID NO: 1036329 - DNA, 15 bp, Homo sapiens
ttttttgaggcagag

SEQ ID NO: 1036330 - DNA, 15 bp, Homo sapiens
tttttgaggcagagt

SEQ ID NO: 1036331 - DNA, 15 bp, Homo sapiens
ttttgaggcagagtc

SEQ ID NO: 1036332 - DNA, 15 bp, Homo sapiens
tttgaggcagagtct

SEQ ID NO: 1036333 - DNA, 15 bp, Homo sapiens
ttgaggcagagtctg

SEQ ID NO: 1036334 - DNA, 15 bp, Homo sapiens
tgaggcagagtctga

SEQ ID NO: 1036335 - DNA, 15 bp, Homo sapiens
gaggcagagtctgac

SEQ ID NO: 1036336 - DNA, 15 bp, Homo sapiens
aggcagagtctgact

SEQ ID NO: 1036337 - DNA, 15 bp, Homo sapiens
ggcagagtctgactc

SEQ ID NO: 1036338 - DNA, 15 bp, Homo sapiens
gcagagtctgactct

SEQ ID NO: 1036339 - DNA, 15 bp, Homo sapiens
cagagtctgactctg

SEQ ID NO: 1036340 - DNA, 15 bp, Homo sapiens
agagtctgactctgt

SEQ ID NO: 1036341 - DNA, 15 bp, Homo sapiens
gagtctgactctgtc

SEQ ID NO: 1036342 - DNA, 15 bp, Homo sapiens
agtctgactctgtcg

SEQ ID NO: 1036343 - DNA, 15 bp, Homo sapiens
gtctgactctgtcgc

SEQ ID NO: 1036344 - DNA, 15 bp, Homo sapiens
tctgactctgtcgcc

SEQ ID NO: 1036345 - DNA, 15 bp, Homo sapiens
ctgactctgtcgccc

SEQ ID NO: 1036346 - DNA, 15 bp, Homo sapiens
tgactctgtcgccca

SEQ ID NO: 1036347 - DNA, 15 bp, Homo sapiens
gactctgtcgcccag

SEQ ID NO: 1036348 - DNA, 15 bp, Homo sapiens
actctgtcgcccagg

SEQ ID NO: 1036349 - DNA, 15 bp, Homo sapiens
agtggcgcaatctca

SEQ ID NO: 1036350 - DNA, 15 bp, Homo sapiens
gtggcgcaatctcag

SEQ ID NO: 1036351 - DNA, 15 bp, Homo sapiens
tggcgcaatctcagc

SEQ ID NO: 1036352 - DNA, 15 bp, Homo sapiens
ggcgcaatctcagcc

SEQ ID NO: 1036353 - DNA, 15 bp, Homo sapiens
gcgcaatctcagccc

SEQ ID NO: 1036354 - DNA, 15 bp, Homo sapiens
cgcaatctcagccca

SEQ ID NO: 1036355 - DNA, 15 bp, Homo sapiens
gcaatctcagcccac

SEQ ID NO: 1036356 - DNA, 15 bp, Homo sapiens
caatctcagcccact

SEQ ID NO: 1036357 - DNA, 15 bp, Homo sapiens
aatctcagcccactt

SEQ ID NO: 1036358 - DNA, 15 bp, Homo sapiens
atctcagcccacttc

SEQ ID NO: 1036359 - DNA, 15 bp, Homo sapiens
tctcagcccacttca

SEQ ID NO: 1036360 - DNA, 15 bp, Homo sapiens
ctcagcccacttcaa

SEQ ID NO: 1036361 - DNA, 15 bp, Homo sapiens
tcagcccacttcaac

SEQ ID NO: 1036362 - DNA, 15 bp, Homo sapiens
cagcccacttcaacc

SEQ ID NO: 1036363 - DNA, 15 bp, Homo sapiens
agcccacttcaacct

SEQ ID NO: 1036364 - DNA, 15 bp, Homo sapiens
gcccacttcaacctc

SEQ ID NO: 1036365 - DNA, 15 bp, Homo sapiens
cccacttcaacctcc

SEQ ID NO: 1036366 - DNA, 15 bp, Homo sapiens
ccacttcaacctcca

SEQ ID NO: 1036367 - DNA, 15 bp, Homo sapiens
cacttcaacctccac

SEQ ID NO: 1036368 - DNA, 15 bp, Homo sapiens
acttcaacctccacc

SEQ ID NO: 1036369 - DNA, 15 bp, Homo sapiens
cttcaacctccacct

SEQ ID NO: 1036370 - DNA, 15 bp, Homo sapiens
ttcaacctccacctc

SEQ ID NO: 1036371 - DNA, 15 bp, Homo sapiens
tcaacctccacctca

SEQ ID NO: 1036372 - DNA, 15 bp, Homo sapiens
caacctccacctcaa

SEQ ID NO: 1036373 - DNA, 15 bp, Homo sapiens
aacctccacctcaag

SEQ ID NO: 1036374 - DNA, 15 bp, Homo sapiens
acctccacctcaagc

SEQ ID NO: 1036375 - DNA, 15 bp, Homo sapiens
cctccacctcaagcg

SEQ ID NO: 1036376 - DNA, 15 bp, Homo sapiens
ctccacctcaagcga

SEQ ID NO: 1036377 - DNA, 15 bp, Homo sapiens
tccacctcaagcgat

SEQ ID NO: 1036378 - DNA, 15 bp, Homo sapiens
ccacctcaagcgatt

SEQ ID NO: 1036379 - DNA, 15 bp, Homo sapiens
cacctcaagcgattc

SEQ ID NO: 1036380 - DNA, 15 bp, Homo sapiens
acctcaagcgattct

SEQ ID NO: 1036381 - DNA, 15 bp, Homo sapiens
cctcaagcgattctt

SEQ ID NO: 1036382 - DNA, 15 bp, Homo sapiens
ctcaagcgattcttg

SEQ ID NO: 1036383 - DNA, 15 bp, Homo sapiens
tcaagcgattcttgt

SEQ ID NO: 1036384 - DNA, 15 bp, Homo sapiens
caagcgattcttgta

SEQ ID NO: 1036385 - DNA, 15 bp, Homo sapiens
aagcgattcttgtac

SEQ ID NO: 1036386 - DNA, 15 bp, Homo sapiens
agcgattcttgtacc

SEQ ID NO: 1036387 - DNA, 15 bp, Homo sapiens
gcgattcttgtacct

SEQ ID NO: 1036388 - DNA, 15 bp, Homo sapiens
cgattcttgtacctc

SEQ ID NO: 1036389 - DNA, 15 bp, Homo sapiens
gattcttgtacctca

SEQ ID NO: 1036390 - DNA, 15 bp, Homo sapiens
attcttgtacctcag

SEQ ID NO: 1036391 - DNA, 15 bp, Homo sapiens
ttcttgtacctcagg

SEQ ID NO: 1036392 - DNA, 15 bp, Homo sapiens
tcttgtacctcaggc

SEQ ID NO: 1036393 - DNA, 15 bp, Homo sapiens
cttgtacctcaggct

SEQ ID NO: 1036394 - DNA, 15 bp, Homo sapiens
ttgtacctcaggctc

SEQ ID NO: 1036395 - DNA, 15 bp, Homo sapiens
tgtacctcaggctcc

SEQ ID NO: 1036396 - DNA, 15 bp, Homo sapiens
gtacctcaggctccc

SEQ ID NO: 1036397 - DNA, 15 bp, Homo sapiens
tacctcaggctcccg

SEQ ID NO: 1036398 - DNA, 15 bp, Homo sapiens
acctcaggctcccga

SEQ ID NO: 1036399 - DNA, 15 bp, Homo sapiens
cctcaggctcccgag

SEQ ID NO: 1036400 - DNA, 15 bp, Homo sapiens
ctcaggctcccgagt

SEQ ID NO: 1036401 - DNA, 15 bp, Homo sapiens
tcaggctcccgagta

SEQ ID NO: 1036402 - DNA, 15 bp, Homo sapiens
caggctcccgagtag

SEQ ID NO: 1036403 - DNA, 15 bp, Homo sapiens
aggctcccgagtagc

SEQ ID NO: 1036404 - DNA, 15 bp, Homo sapiens
ggctcccgagtagct

SEQ ID NO: 1036405 - DNA, 15 bp, Homo sapiens
gctcccgagtagctg

SEQ ID NO: 1036406 - DNA, 15 bp, Homo sapiens
ccgagtagctgggat

SEQ ID NO: 1036407 - DNA, 15 bp, Homo sapiens
cgagtagctgggatg

SEQ ID NO: 1036408 - DNA, 15 bp, Homo sapiens
gagtagctgggatga

SEQ ID NO: 1036409 - DNA, 15 bp, Homo sapiens
agtagctgggatgac

SEQ ID NO: 1036410 - DNA, 15 bp, Homo sapiens
gtagctgggatgaca

SEQ ID NO: 1036411 - DNA, 15 bp, Homo sapiens
tagctgggatgacag

SEQ ID NO: 1036412 - DNA, 15 bp, Homo sapiens
agctgggatgacagg

SEQ ID NO: 1036413 - DNA, 15 bp, Homo sapiens
gctgggatgacaggc

SEQ ID NO: 1036414 - DNA, 15 bp, Homo sapiens
ctgggatgacaggca

SEQ ID NO: 1036415 - DNA, 15 bp, Homo sapiens
tgggatgacaggcat

SEQ ID NO: 1036416 - DNA, 15 bp, Homo sapiens
gggatgacaggcatg

SEQ ID NO: 1036417 - DNA, 15 bp, Homo sapiens
ggatgacaggcatgt

SEQ ID NO: 1036418 - DNA, 15 bp, Homo sapiens
gatgacaggcatgtg

SEQ ID NO: 1036419 - DNA, 15 bp, Homo sapiens
atgacaggcatgtgc

SEQ ID NO: 1036420 - DNA, 15 bp, Homo sapiens
tgacaggcatgtgct

SEQ ID NO: 1036421 - DNA, 15 bp, Homo sapiens
gacaggcatgtgcta

SEQ ID NO: 1036422 - DNA, 15 bp, Homo sapiens
acaggcatgtgctac

SEQ ID NO: 1036423 - DNA, 15 bp, Homo sapiens
caggcatgtgctacc

SEQ ID NO: 1036424 - DNA, 15 bp, Homo sapiens
aggcatgtgctacca

SEQ ID NO: 1036425 - DNA, 15 bp, Homo sapiens
ggcatgtgctaccac

SEQ ID NO: 1036426 - DNA, 15 bp, Homo sapiens
gcatgtgctaccaca

SEQ ID NO: 1036427 - DNA, 15 bp, Homo sapiens
catgtgctaccacac

SEQ ID NO: 1036428 - DNA, 15 bp, Homo sapiens
atgtgctaccacacc

SEQ ID NO: 1036429 - DNA, 15 bp, Homo sapiens
tgtgctaccacaccc

SEQ ID NO: 1036430 - DNA, 15 bp, Homo sapiens
gtgctaccacaccca

SEQ ID NO: 1036431 - DNA, 15 bp, Homo sapiens
tgctaccacacccag

SEQ ID NO: 1036432 - DNA, 15 bp, Homo sapiens
gctaccacacccagc

SEQ ID NO: 1036433 - DNA, 15 bp, Homo sapiens
ctaccacacccagct

SEQ ID NO: 1036434 - DNA, 15 bp, Homo sapiens
taccacacccagcta

SEQ ID NO: 1036435 - DNA, 15 bp, Homo sapiens
accacacccagctaa

SEQ ID NO: 1036436 - DNA, 15 bp, Homo sapiens
ccacacccagctaat

SEQ ID NO: 1036437 - DNA, 15 bp, Homo sapiens
cacacccagctaatt

SEQ ID NO: 1036438 - DNA, 15 bp, Homo sapiens
acacccagctaattt

SEQ ID NO: 1036439 - DNA, 15 bp, Homo sapiens
cacccagctaatttt

SEQ ID NO: 1036440 - DNA, 15 bp, Homo sapiens
acccagctaattttt

SEQ ID NO: 1036441 - DNA, 15 bp, Homo sapiens
cagctaatttttgtt

SEQ ID NO: 1036442 - DNA, 15 bp, Homo sapiens
agctaatttttgttt

SEQ ID NO: 1036443 - DNA, 15 bp, Homo sapiens
gctaatttttgtttt

SEQ ID NO: 1036444 - DNA, 15 bp, Homo sapiens
ctaatttttgtttta

SEQ ID NO: 1036445 - DNA, 15 bp, Homo sapiens
taatttttgttttag

SEQ ID NO: 1036446 - DNA, 15 bp, Homo sapiens
aatttttgttttagt

SEQ ID NO: 1036447 - DNA, 15 bp, Homo sapiens
atttttgttttagta

SEQ ID NO: 1036448 - DNA, 15 bp, Homo sapiens
tttttgttttagtag

SEQ ID NO: 1036449 - DNA, 15 bp, Homo sapiens
ttttgttttagtaga

SEQ ID NO: 1036450 - DNA, 15 bp, Homo sapiens
tttgttttagtagag

SEQ ID NO: 1036451 - DNA, 15 bp, Homo sapiens
ttgttttagtagaga

SEQ ID NO: 1036452 - DNA, 15 bp, Homo sapiens
tgttttagtagagac

SEQ ID NO: 1036453 - DNA, 15 bp, Homo sapiens
gttttagtagagaca

SEQ ID NO: 1036454 - DNA, 15 bp, Homo sapiens
agagacagggtttcg

SEQ ID NO: 1036455 - DNA, 15 bp, Homo sapiens
gagacagggtttcgc

SEQ ID NO: 1036456 - DNA, 15 bp, Homo sapiens
agacagggtttcgcc

SEQ ID NO: 1036457 - DNA, 15 bp, Homo sapiens
gacagggtttcgcca

SEQ ID NO: 1036458 - DNA, 15 bp, Homo sapiens
acagggtttcgccat

SEQ ID NO: 1036459 - DNA, 15 bp, Homo sapiens
cagggtttcgccatg

SEQ ID NO: 1036460 - DNA, 15 bp, Homo sapiens
agggtttcgccatgt

SEQ ID NO: 1036461 - DNA, 15 bp, Homo sapiens
tcgccatgttggccg

SEQ ID NO: 1036462 - DNA, 15 bp, Homo sapiens
cgccatgttggccgg

SEQ ID NO: 1036463 - DNA, 15 bp, Homo sapiens
gccatgttggccggg

SEQ ID NO: 1036464 - DNA, 15 bp, Homo sapiens
ccatgttggccgggc

SEQ ID NO: 1036465 - DNA, 15 bp, Homo sapiens
catgttggccgggct

SEQ ID NO: 1036466 - DNA, 15 bp, Homo sapiens
atgttggccgggctg

SEQ ID NO: 1036467 - DNA, 15 bp, Homo sapiens
tgttggccgggctgg

SEQ ID NO: 1036468 - DNA, 15 bp, Homo sapiens
gttggccgggctggt

SEQ ID NO: 1036469 - DNA, 15 bp, Homo sapiens
ttggccgggctggtc

SEQ ID NO: 1036470 - DNA, 15 bp, Homo sapiens
tggccgggctggtct

SEQ ID NO: 1036471 - DNA, 15 bp, Homo sapiens
ggccgggctggtctc

SEQ ID NO: 1036472 - DNA, 15 bp, Homo sapiens
gccgggctggtctcg

SEQ ID NO: 1036473 - DNA, 15 bp, Homo sapiens
ccgggctggtctcga

SEQ ID NO: 1036474 - DNA, 15 bp, Homo sapiens
cgggctggtctcgaa

SEQ ID NO: 1036475 - DNA, 15 bp, Homo sapiens
gggctggtctcgaac

SEQ ID NO: 1036476 - DNA, 15 bp, Homo sapiens
ctggtctcgaactcc

SEQ ID NO: 1036477 - DNA, 15 bp, Homo sapiens
tggtctcgaactcct

SEQ ID NO: 1036478 - DNA, 15 bp, Homo sapiens
ggtctcgaactcctg

SEQ ID NO: 1036479 - DNA, 15 bp, Homo sapiens
gtctcgaactcctga

SEQ ID NO: 1036480 - DNA, 15 bp, Homo sapiens
tctcgaactcctgac

SEQ ID NO: 1036481 - DNA, 15 bp, Homo sapiens
ctcgaactcctgacc

SEQ ID NO: 1036482 - DNA, 15 bp, Homo sapiens
tcgaactcctgacct

SEQ ID NO: 1036483 - DNA, 15 bp, Homo sapiens
cgaactcctgacctc

SEQ ID NO: 1036484 - DNA, 15 bp, Homo sapiens
gaactcctgacctca

SEQ ID NO: 1036485 - DNA, 15 bp, Homo sapiens
aactcctgacctcaa

SEQ ID NO: 1036486 - DNA, 15 bp, Homo sapiens
actcctgacctcaag

SEQ ID NO: 1036487 - DNA, 15 bp, Homo sapiens
ctcctgacctcaagt

SEQ ID NO: 1036488 - DNA, 15 bp, Homo sapiens
tcctgacctcaagtg

SEQ ID NO: 1036489 - DNA, 15 bp, Homo sapiens
cctgacctcaagtga

SEQ ID NO: 1036490 - DNA, 15 bp, Homo sapiens
ctgacctcaagtgat

SEQ ID NO: 1036491 - DNA, 15 bp, Homo sapiens
tgacctcaagtgatc

SEQ ID NO: 1036492 - DNA, 15 bp, Homo sapiens
gacctcaagtgatcc

SEQ ID NO: 1036493 - DNA, 15 bp, Homo sapiens
acctcaagtgatcca

SEQ ID NO: 1036494 - DNA, 15 bp, Homo sapiens
cctcaagtgatccac

SEQ ID NO: 1036495 - DNA, 15 bp, Homo sapiens
ctcaagtgatccacc

SEQ ID NO: 1036496 - DNA, 15 bp, Homo sapiens
tcaagtgatccacca

SEQ ID NO: 1036497 - DNA, 15 bp, Homo sapiens
caagtgatccaccat

SEQ ID NO: 1036498 - DNA, 15 bp, Homo sapiens
aagtgatccaccatg

SEQ ID NO: 1036499 - DNA, 15 bp, Homo sapiens
agtgatccaccatgc

SEQ ID NO: 1036500 - DNA, 15 bp, Homo sapiens
gtgatccaccatgct

SEQ ID NO: 1036501 - DNA, 15 bp, Homo sapiens
tgatccaccatgctt

SEQ ID NO: 1036502 - DNA, 15 bp, Homo sapiens
gatccaccatgcttc

SEQ ID NO: 1036503 - DNA, 15 bp, Homo sapiens
atccaccatgcttcg

SEQ ID NO: 1036504 - DNA, 15 bp, Homo sapiens
tccaccatgcttcgg

SEQ ID NO: 1036505 - DNA, 15 bp, Homo sapiens
ccaccatgcttcggc

SEQ ID NO: 1036506 - DNA, 15 bp, Homo sapiens
caccatgcttcggcc

SEQ ID NO: 1036507 - DNA, 15 bp, Homo sapiens
accatgcttcggcct

SEQ ID NO: 1036508 - DNA, 15 bp, Homo sapiens
ccatgcttcggcctc

SEQ ID NO: 1036509 - DNA, 15 bp, Homo sapiens
catgcttcggcctcc

SEQ ID NO: 1036510 - DNA, 15 bp, Homo sapiens
atgcttcggcctccc

SEQ ID NO: 1036511 - DNA, 15 bp, Homo sapiens
tgcttcggcctccca

SEQ ID NO: 1036512 - DNA, 15 bp, Homo sapiens
gcttcggcctcccaa

SEQ ID NO: 1036513 - DNA, 15 bp, Homo sapiens
cttcggcctcccaaa

SEQ ID NO: 1036514 - DNA, 15 bp, Homo sapiens
ttcggcctcccaaag

SEQ ID NO: 1036515 - DNA, 15 bp, Homo sapiens
caggcatgagccact

SEQ ID NO: 1036516 - DNA, 15 bp, Homo sapiens
aggcatgagccactt

SEQ ID NO: 1036517 - DNA, 15 bp, Homo sapiens
ggcatgagccacttt

SEQ ID NO: 1036518 - DNA, 15 bp, Homo sapiens
gcatgagccacttta

SEQ ID NO: 1036519 - DNA, 15 bp, Homo sapiens
catgagccactttat

SEQ ID NO: 1036520 - DNA, 15 bp, Homo sapiens
atgagccactttatg

SEQ ID NO: 1036521 - DNA, 15 bp, Homo sapiens
tgagccactttatgc

SEQ ID NO: 1036522 - DNA, 15 bp, Homo sapiens
gagccactttatgcg

SEQ ID NO: 1036523 - DNA, 15 bp, Homo sapiens
agccactttatgcgt

SEQ ID NO: 1036524 - DNA, 15 bp, Homo sapiens
gccactttatgcgta

SEQ ID NO: 1036525 - DNA, 15 bp, Homo sapiens
ccactttatgcgtat

SEQ ID NO: 1036526 - DNA, 15 bp, Homo sapiens
cactttatgcgtatt

SEQ ID NO: 1036527 - DNA, 15 bp, Homo sapiens
actttatgcgtattt

SEQ ID NO: 1036528 - DNA, 15 bp, Homo sapiens
ctttatgcgtattta

SEQ ID NO: 1036529 - DNA, 15 bp, Homo sapiens
tttatgcgtatttaa

SEQ ID NO: 1036530 - DNA, 15 bp, Homo sapiens
ttatgcgtatttaag

SEQ ID NO: 1036531 - DNA, 15 bp, Homo sapiens
tatgcgtatttaagc

SEQ ID NO: 1036532 - DNA, 15 bp, Homo sapiens
atgcgtatttaagcc

SEQ ID NO: 1036533 - DNA, 15 bp, Homo sapiens
tgcgtatttaagcct

SEQ ID NO: 1036534 - DNA, 15 bp, Homo sapiens
gcgtatttaagcctt

SEQ ID NO: 1036535 - DNA, 15 bp, Homo sapiens
cgtatttaagccttg

SEQ ID NO: 1036536 - DNA, 15 bp, Homo sapiens
gtatttaagccttgg

SEQ ID NO: 1036537 - DNA, 15 bp, Homo sapiens
tatttaagccttgga

SEQ ID NO: 1036538 - DNA, 15 bp, Homo sapiens
atttaagccttggaa

SEQ ID NO: 1036539 - DNA, 15 bp, Homo sapiens
tttaagccttggaaa

SEQ ID NO: 1036540 - DNA, 15 bp, Homo sapiens
ttaagccttggaaac

SEQ ID NO: 1036541 - DNA, 15 bp, Homo sapiens
taagccttggaaaca

SEQ ID NO: 1036542 - DNA, 15 bp, Homo sapiens
aagccttggaaacac

SEQ ID NO: 1036543 - DNA, 15 bp, Homo sapiens
agccttggaaacaca

SEQ ID NO: 1036544 - DNA, 15 bp, Homo sapiens
gccttggaaacacag

SEQ ID NO: 1036545 - DNA, 15 bp, Homo sapiens
ccttggaaacacagg

SEQ ID NO: 1036546 - DNA, 15 bp, Homo sapiens
cttggaaacacaggg

SEQ ID NO: 1036547 - DNA, 15 bp, Homo sapiens
ttggaaacacaggga

SEQ ID NO: 1036548 - DNA, 15 bp, Homo sapiens
tggaaacacagggac

SEQ ID NO: 1036549 - DNA, 15 bp, Homo sapiens
ggaaacacagggact

SEQ ID NO: 1036550 - DNA, 15 bp, Homo sapiens
gaaacacagggacta

SEQ ID NO: 1036551 - DNA, 15 bp, Homo sapiens
aaacacagggactat

SEQ ID NO: 1036552 - DNA, 15 bp, Homo sapiens
aacacagggactatc

SEQ ID NO: 1036553 - DNA, 15 bp, Homo sapiens
acacagggactatct

SEQ ID NO: 1036554 - DNA, 15 bp, Homo sapiens
cacagggactatctt

SEQ ID NO: 1036555 - DNA, 15 bp, Homo sapiens
acagggactatcttg

SEQ ID NO: 1036556 - DNA, 15 bp, Homo sapiens
cagggactatcttgt

SEQ ID NO: 1036557 - DNA, 15 bp, Homo sapiens
agggactatcttgtg

SEQ ID NO: 1036558 - DNA, 15 bp, Homo sapiens
gggactatcttgtgg

SEQ ID NO: 1036559 - DNA, 15 bp, Homo sapiens
ggactatcttgtgga

SEQ ID NO: 1036560 - DNA, 15 bp, Homo sapiens
gactatcttgtggat

SEQ ID NO: 1036561 - DNA, 15 bp, Homo sapiens
actatcttgtggatt

SEQ ID NO: 1036562 - DNA, 15 bp, Homo sapiens
ctatcttgtggattg

SEQ ID NO: 1036563 - DNA, 15 bp, Homo sapiens
tatcttgtggattgg

SEQ ID NO: 1036564 - DNA, 15 bp, Homo sapiens
atcttgtggattggg

SEQ ID NO: 1036565 - DNA, 15 bp, Homo sapiens
tcttgtggattgggg

SEQ ID NO: 1036566 - DNA, 15 bp, Homo sapiens
cttgtggattggggc

SEQ ID NO: 1036567 - DNA, 15 bp, Homo sapiens
ttgtggattggggct

SEQ ID NO: 1036568 - DNA, 15 bp, Homo sapiens
tgtggattggggcta

SEQ ID NO: 1036569 - DNA, 15 bp, Homo sapiens
gtggattggggctag

SEQ ID NO: 1036570 - DNA, 15 bp, Homo sapiens
tggattggggctagt

SEQ ID NO: 1036571 - DNA, 15 bp, Homo sapiens
ggattggggctagta

SEQ ID NO: 1036572 - DNA, 15 bp, Homo sapiens
gattggggctagtac

SEQ ID NO: 1036573 - DNA, 15 bp, Homo sapiens
attggggctagtaca

SEQ ID NO: 1036574 - DNA, 15 bp, Homo sapiens
ttggggctagtacag

SEQ ID NO: 1036575 - DNA, 15 bp, Homo sapiens
tggggctagtacaga

SEQ ID NO: 1036576 - DNA, 15 bp, Homo sapiens
ggggctagtacagaa

SEQ ID NO: 1036577 - DNA, 15 bp, Homo sapiens
gggctagtacagaat

SEQ ID NO: 1036578 - DNA, 15 bp, Homo sapiens
ggctagtacagaatt

SEQ ID NO: 1036579 - DNA, 15 bp, Homo sapiens
gctagtacagaattc

SEQ ID NO: 1036580 - DNA, 15 bp, Homo sapiens
ctagtacagaattca

SEQ ID NO: 1036581 - DNA, 15 bp, Homo sapiens
tagtacagaattcag

SEQ ID NO: 1036582 - DNA, 15 bp, Homo sapiens
agtacagaattcaga

SEQ ID NO: 1036583 - DNA, 15 bp, Homo sapiens
gtacagaattcagac

SEQ ID NO: 1036584 - DNA, 15 bp, Homo sapiens
tacagaattcagact

SEQ ID NO: 1036585 - DNA, 15 bp, Homo sapiens
acagaattcagactg

SEQ ID NO: 1036586 - DNA, 15 bp, Homo sapiens
cagaattcagactgc

SEQ ID NO: 1036587 - DNA, 15 bp, Homo sapiens
agaattcagactgca

SEQ ID NO: 1036588 - DNA, 15 bp, Homo sapiens
gaattcagactgcag

SEQ ID NO: 1036589 - DNA, 15 bp, Homo sapiens
aattcagactgcagc

SEQ ID NO: 1036590 - DNA, 15 bp, Homo sapiens
attcagactgcagcc

SEQ ID NO: 1036591 - DNA, 15 bp, Homo sapiens
ttcagactgcagcct

SEQ ID NO: 1036592 - DNA, 15 bp, Homo sapiens
tcagactgcagcctt

SEQ ID NO: 1036593 - DNA, 15 bp, Homo sapiens
cagactgcagccttt

SEQ ID NO: 1036594 - DNA, 15 bp, Homo sapiens
agactgcagcctttt

SEQ ID NO: 1036595 - DNA, 15 bp, Homo sapiens
gactgcagccttttc

SEQ ID NO: 1036596 - DNA, 15 bp, Homo sapiens
actgcagccttttcc

SEQ ID NO: 1036597 - DNA, 15 bp, Homo sapiens
ctgcagccttttccc

SEQ ID NO: 1036598 - DNA, 15 bp, Homo sapiens
tgcagccttttcccg

SEQ ID NO: 1036599 - DNA, 15 bp, Homo sapiens
gcagccttttcccga

SEQ ID NO: 1036600 - DNA, 15 bp, Homo sapiens
cagccttttcccgat

SEQ ID NO: 1036601 - DNA, 15 bp, Homo sapiens
agccttttcccgatg

SEQ ID NO: 1036602 - DNA, 15 bp, Homo sapiens
gccttttcccgatgc

SEQ ID NO: 1036603 - DNA, 15 bp, Homo sapiens
ccttttcccgatgcg

SEQ ID NO: 1036604 - DNA, 15 bp, Homo sapiens
cttttcccgatgcgt

SEQ ID NO: 1036605 - DNA, 15 bp, Homo sapiens
ttttcccgatgcgtt

SEQ ID NO: 1036606 - DNA, 15 bp, Homo sapiens
tttcccgatgcgttg

SEQ ID NO: 1036607 - DNA, 15 bp, Homo sapiens
ttcccgatgcgttga

SEQ ID NO: 1036608 - DNA, 15 bp, Homo sapiens
tcccgatgcgttgac

SEQ ID NO: 1036609 - DNA, 15 bp, Homo sapiens
cccgatgcgttgact

SEQ ID NO: 1036610 - DNA, 15 bp, Homo sapiens
ccgatgcgttgactt

SEQ ID NO: 1036611 - DNA, 15 bp, Homo sapiens
cgatgcgttgactta

SEQ ID NO: 1036612 - DNA, 15 bp, Homo sapiens
gatgcgttgacttac

SEQ ID NO: 1036613 - DNA, 15 bp, Homo sapiens
atgcgttgacttaca

SEQ ID NO: 1036614 - DNA, 15 bp, Homo sapiens
tgcgttgacttacag

SEQ ID NO: 1036615 - DNA, 15 bp, Homo sapiens
gcgttgacttacaga

SEQ ID NO: 1036616 - DNA, 15 bp, Homo sapiens
cgttgacttacagaa

SEQ ID NO: 1036617 - DNA, 15 bp, Homo sapiens
gttgacttacagaag

SEQ ID NO: 1036618 - DNA, 15 bp, Homo sapiens
ttgacttacagaagg

SEQ ID NO: 1036619 - DNA, 15 bp, Homo sapiens
tgacttacagaaggg

SEQ ID NO: 1036620 - DNA, 15 bp, Homo sapiens
gacttacagaagggg

SEQ ID NO: 1036621 - DNA, 15 bp, Homo sapiens
acttacagaaggggc

SEQ ID NO: 1036622 - DNA, 15 bp, Homo sapiens
cttacagaaggggca

SEQ ID NO: 1036623 - DNA, 15 bp, Homo sapiens
ttacagaaggggcat

SEQ ID NO: 1036624 - DNA, 15 bp, Homo sapiens
tacagaaggggcatt

SEQ ID NO: 1036625 - DNA, 15 bp, Homo sapiens
acagaaggggcattt

SEQ ID NO: 1036626 - DNA, 15 bp, Homo sapiens
cagaaggggcatttt

SEQ ID NO: 1036627 - DNA, 15 bp, Homo sapiens
agaaggggcattttg

SEQ ID NO: 1036628 - DNA, 15 bp, Homo sapiens
gaaggggcattttgg

SEQ ID NO: 1036629 - DNA, 15 bp, Homo sapiens
aaggggcattttgga

SEQ ID NO: 1036630 - DNA, 15 bp, Homo sapiens
aggggcattttggag

SEQ ID NO: 1036631 - DNA, 15 bp, Homo sapiens
ggggcattttggagg

SEQ ID NO: 1036632 - DNA, 15 bp, Homo sapiens
gggcattttggaggg

SEQ ID NO: 1036633 - DNA, 15 bp, Homo sapiens
ggcattttggagggt

SEQ ID NO: 1036634 - DNA, 15 bp, Homo sapiens
gcattttggagggtc

SEQ ID NO: 1036635 - DNA, 15 bp, Homo sapiens
cattttggagggtct

SEQ ID NO: 1036636 - DNA, 15 bp, Homo sapiens
attttggagggtctg

SEQ ID NO: 1036637 - DNA, 15 bp, Homo sapiens
ttttggagggtctgt

SEQ ID NO: 1036638 - DNA, 15 bp, Homo sapiens
tttggagggtctgtg

SEQ ID NO: 1036639 - DNA, 15 bp, Homo sapiens
ttggagggtctgtgg

SEQ ID NO: 1036640 - DNA, 15 bp, Homo sapiens
tggagggtctgtggt

SEQ ID NO: 1036641 - DNA, 15 bp, Homo sapiens
ggagggtctgtggtc

SEQ ID NO: 1036642 - DNA, 15 bp, Homo sapiens
gagggtctgtggtcc

SEQ ID NO: 1036643 - DNA, 15 bp, Homo sapiens
agggtctgtggtcct

SEQ ID NO: 1036644 - DNA, 15 bp, Homo sapiens
gggtctgtggtccta

SEQ ID NO: 1036645 - DNA, 15 bp, Homo sapiens
ggtctgtggtcctaa

SEQ ID NO: 1036646 - DNA, 15 bp, Homo sapiens
gtctgtggtcctaac

SEQ ID NO: 1036647 - DNA, 15 bp, Homo sapiens
tctgtggtcctaacc

SEQ ID NO: 1036648 - DNA, 15 bp, Homo sapiens
ctgtggtcctaacct

SEQ ID NO: 1036649 - DNA, 15 bp, Homo sapiens
tgtggtcctaacctg

SEQ ID NO: 1036650 - DNA, 15 bp, Homo sapiens
gtggtcctaacctgg

SEQ ID NO: 1036651 - DNA, 15 bp, Homo sapiens
tggtcctaacctggg

SEQ ID NO: 1036652 - DNA, 15 bp, Homo sapiens
ggtcctaacctgggg

SEQ ID NO: 1036653 - DNA, 15 bp, Homo sapiens
gtcctaacctgggga

SEQ ID NO: 1036654 - DNA, 15 bp, Homo sapiens
tcctaacctggggat

SEQ ID NO: 1036655 - DNA, 15 bp, Homo sapiens
cctaacctggggata

SEQ ID NO: 1036656 - DNA, 15 bp, Homo sapiens
ctaacctggggatag

SEQ ID NO: 1036657 - DNA, 15 bp, Homo sapiens
taacctggggatagc

SEQ ID NO: 1036658 - DNA, 15 bp, Homo sapiens
aacctggggatagca

SEQ ID NO: 1036659 - DNA, 15 bp, Homo sapiens
acctggggatagcag

SEQ ID NO: 1036660 - DNA, 15 bp, Homo sapiens
cctggggatagcagg

SEQ ID NO: 1036661 - DNA, 15 bp, Homo sapiens
ctggggatagcaggg

SEQ ID NO: 1036662 - DNA, 15 bp, Homo sapiens
tggggatagcaggga

SEQ ID NO: 1036663 - DNA, 15 bp, Homo sapiens
ggggatagcagggag

SEQ ID NO: 1036664 - DNA, 15 bp, Homo sapiens
gggatagcagggaga

SEQ ID NO: 1036665 - DNA, 15 bp, Homo sapiens
ggatagcagggagat

SEQ ID NO: 1036666 - DNA, 15 bp, Homo sapiens
gatagcagggagatc

SEQ ID NO: 1036667 - DNA, 15 bp, Homo sapiens
atagcagggagatcc

SEQ ID NO: 1036668 - DNA, 15 bp, Homo sapiens
tagcagggagatccc

SEQ ID NO: 1036669 - DNA, 15 bp, Homo sapiens
agcagggagatcccg

SEQ ID NO: 1036670 - DNA, 15 bp, Homo sapiens
gcagggagatcccgg

SEQ ID NO: 1036671 - DNA, 15 bp, Homo sapiens
cagggagatcccggg

SEQ ID NO: 1036672 - DNA, 15 bp, Homo sapiens
agggagatcccgggg

SEQ ID NO: 1036673 - DNA, 15 bp, Homo sapiens
gggagatcccggggc

SEQ ID NO: 1036674 - DNA, 15 bp, Homo sapiens
ggagatcccggggca

SEQ ID NO: 1036675 - DNA, 15 bp, Homo sapiens
gagatcccggggcaa

SEQ ID NO: 1036676 - DNA, 15 bp, Homo sapiens
agatcccggggcaat

SEQ ID NO: 1036677 - DNA, 15 bp, Homo sapiens
gatcccggggcaatg

SEQ ID NO: 1036678 - DNA, 15 bp, Homo sapiens
atcccggggcaatga

SEQ ID NO: 1036679 - DNA, 15 bp, Homo sapiens
tcccggggcaatgac

SEQ ID NO: 1036680 - DNA, 15 bp, Homo sapiens
cccggggcaatgaca

SEQ ID NO: 1036681 - DNA, 15 bp, Homo sapiens
ccggggcaatgacag

SEQ ID NO: 1036682 - DNA, 15 bp, Homo sapiens
cggggcaatgacaga

SEQ ID NO: 1036683 - DNA, 15 bp, Homo sapiens
ggggcaatgacagag

SEQ ID NO: 1036684 - DNA, 15 bp, Homo sapiens
gggcaatgacagaga

SEQ ID NO: 1036685 - DNA, 15 bp, Homo sapiens
ggcaatgacagagag

SEQ ID NO: 1036686 - DNA, 15 bp, Homo sapiens
gcaatgacagagagg

SEQ ID NO: 1036687 - DNA, 15 bp, Homo sapiens
caatgacagagaggc

SEQ ID NO: 1036688 - DNA, 15 bp, Homo sapiens
aatgacagagaggca

SEQ ID NO: 1036689 - DNA, 15 bp, Homo sapiens
atgacagagaggcac

SEQ ID NO: 1036690 - DNA, 15 bp, Homo sapiens
tgacagagaggcaca

SEQ ID NO: 1036691 - DNA, 15 bp, Homo sapiens
gacagagaggcacag

SEQ ID NO: 1036692 - DNA, 15 bp, Homo sapiens
acagagaggcacaga

SEQ ID NO: 1036693 - DNA, 15 bp, Homo sapiens
cagagaggcacagag

SEQ ID NO: 1036694 - DNA, 15 bp, Homo sapiens
agagaggcacagaga

SEQ ID NO: 1036695 - DNA, 15 bp, Homo sapiens
gagaggcacagagac

SEQ ID NO: 1036696 - DNA, 15 bp, Homo sapiens
agaggcacagagaca

SEQ ID NO: 1036697 - DNA, 15 bp, Homo sapiens
gaggcacagagacac

SEQ ID NO: 1036698 - DNA, 15 bp, Homo sapiens
aggcacagagacacg

SEQ ID NO: 1036699 - DNA, 15 bp, Homo sapiens
ggcacagagacacgg

SEQ ID NO: 1036700 - DNA, 15 bp, Homo sapiens
gcacagagacacgga

SEQ ID NO: 1036701 - DNA, 15 bp, Homo sapiens
cacagagacacggat

SEQ ID NO: 1036702 - DNA, 15 bp, Homo sapiens
acagagacacggatt

SEQ ID NO: 1036703 - DNA, 15 bp, Homo sapiens
cagagacacggattt

SEQ ID NO: 1036704 - DNA, 15 bp, Homo sapiens
agagacacggatttc

SEQ ID NO: 1036705 - DNA, 15 bp, Homo sapiens
gagacacggatttcc

SEQ ID NO: 1036706 - DNA, 15 bp, Homo sapiens
agacacggatttcct

SEQ ID NO: 1036707 - DNA, 15 bp, Homo sapiens
gacacggatttcctg

SEQ ID NO: 1036708 - DNA, 15 bp, Homo sapiens
acacggatttcctga

SEQ ID NO: 1036709 - DNA, 15 bp, Homo sapiens
cacggatttcctgag

SEQ ID NO: 1036710 - DNA, 15 bp, Homo sapiens
acggatttcctgaga

SEQ ID NO: 1036711 - DNA, 15 bp, Homo sapiens
cggatttcctgagaa

SEQ ID NO: 1036712 - DNA, 15 bp, Homo sapiens
ggatttcctgagaaa

SEQ ID NO: 1036713 - DNA, 15 bp, Homo sapiens
gatttcctgagaaag

SEQ ID NO: 1036714 - DNA, 15 bp, Homo sapiens
atttcctgagaaagg

SEQ ID NO: 1036715 - DNA, 15 bp, Homo sapiens
tttcctgagaaaggg

SEQ ID NO: 1036716 - DNA, 15 bp, Homo sapiens
ttcctgagaaaggga

SEQ ID NO: 1036717 - DNA, 15 bp, Homo sapiens
tcctgagaaagggag

SEQ ID NO: 1036718 - DNA, 15 bp, Homo sapiens
cctgagaaagggaga

SEQ ID NO: 1036719 - DNA, 15 bp, Homo sapiens
ctgagaaagggagag

SEQ ID NO: 1036720 - DNA, 15 bp, Homo sapiens
tgagaaagggagagg

SEQ ID NO: 1036721 - DNA, 15 bp, Homo sapiens
gagaaagggagagga

SEQ ID NO: 1036722 - DNA, 15 bp, Homo sapiens
agaaagggagaggag

SEQ ID NO: 1036723 - DNA, 15 bp, Homo sapiens
gaaagggagaggaga

SEQ ID NO: 1036724 - DNA, 15 bp, Homo sapiens
aaagggagaggagag

SEQ ID NO: 1036725 - DNA, 15 bp, Homo sapiens
aagggagaggagaga

SEQ ID NO: 1036726 - DNA, 15 bp, Homo sapiens
agggagaggagagag

SEQ ID NO: 1036727 - DNA, 15 bp, Homo sapiens
gggagaggagagagg

SEQ ID NO: 1036728 - DNA, 15 bp, Homo sapiens
ggagaggagagaggc

SEQ ID NO: 1036729 - DNA, 15 bp, Homo sapiens
gagaggagagaggct

SEQ ID NO: 1036730 - DNA, 15 bp, Homo sapiens
agaggagagaggctg

SEQ ID NO: 1036731 - DNA, 15 bp, Homo sapiens
gaggagagaggctga

SEQ ID NO: 1036732 - DNA, 15 bp, Homo sapiens
aggagagaggctgag

SEQ ID NO: 1036733 - DNA, 15 bp, Homo sapiens
ggagagaggctgaga

SEQ ID NO: 1036734 - DNA, 15 bp, Homo sapiens
gagagaggctgagac

SEQ ID NO: 1036735 - DNA, 15 bp, Homo sapiens
agagaggctgagacc

SEQ ID NO: 1036736 - DNA, 15 bp, Homo sapiens
gagaggctgagaccc

SEQ ID NO: 1036737 - DNA, 15 bp, Homo sapiens
agaggctgagaccca

SEQ ID NO: 1036738 - DNA, 15 bp, Homo sapiens
gaggctgagacccag

SEQ ID NO: 1036739 - DNA, 15 bp, Homo sapiens
aggctgagacccagg

SEQ ID NO: 1036740 - DNA, 15 bp, Homo sapiens
ggctgagacccaggg

SEQ ID NO: 1036741 - DNA, 15 bp, Homo sapiens
gctgagacccaggga

SEQ ID NO: 1036742 - DNA, 15 bp, Homo sapiens
ctgagacccagggat

SEQ ID NO: 1036743 - DNA, 15 bp, Homo sapiens
tgagacccagggatc

SEQ ID NO: 1036744 - DNA, 15 bp, Homo sapiens
gagacccagggatca

SEQ ID NO: 1036745 - DNA, 15 bp, Homo sapiens
agacccagggatcat

SEQ ID NO: 1036746 - DNA, 15 bp, Homo sapiens
gacccagggatcatg

SEQ ID NO: 1036747 - DNA, 15 bp, Homo sapiens
acccagggatcatga

SEQ ID NO: 1036748 - DNA, 15 bp, Homo sapiens
cccagggatcatgaa

SEQ ID NO: 1036749 - DNA, 15 bp, Homo sapiens
ccagggatcatgaag

SEQ ID NO: 1036750 - DNA, 15 bp, Homo sapiens
cagggatcatgaagg

SEQ ID NO: 1036751 - DNA, 15 bp, Homo sapiens
agggatcatgaaggg

SEQ ID NO: 1036752 - DNA, 15 bp, Homo sapiens
gggatcatgaagggg

SEQ ID NO: 1036753 - DNA, 15 bp, Homo sapiens
ggatcatgaagggga

SEQ ID NO: 1036754 - DNA, 15 bp, Homo sapiens
gatcatgaaggggac

SEQ ID NO: 1036755 - DNA, 15 bp, Homo sapiens
atcatgaaggggacg

SEQ ID NO: 1036756 - DNA, 15 bp, Homo sapiens
tcatgaaggggacga

SEQ ID NO: 1036757 - DNA, 15 bp, Homo sapiens
catgaaggggacgag

SEQ ID NO: 1036758 - DNA, 15 bp, Homo sapiens
atgaaggggacgagc

SEQ ID NO: 1036759 - DNA, 15 bp, Homo sapiens
tgaaggggacgagca

SEQ ID NO: 1036760 - DNA, 15 bp, Homo sapiens
gaaggggacgagcaa

SEQ ID NO: 1036761 - DNA, 15 bp, Homo sapiens
aaggggacgagcaag

SEQ ID NO: 1036762 - DNA, 15 bp, Homo sapiens
aggggacgagcaagg

SEQ ID NO: 1036763 - DNA, 15 bp, Homo sapiens
ggggacgagcaaggg

SEQ ID NO: 1036764 - DNA, 15 bp, Homo sapiens
gggacgagcaaggga

SEQ ID NO: 1036765 - DNA, 15 bp, Homo sapiens
ggacgagcaagggaa

SEQ ID NO: 1036766 - DNA, 15 bp, Homo sapiens
gacgagcaagggaag

SEQ ID NO: 1036767 - DNA, 15 bp, Homo sapiens
acgagcaagggaagg

SEQ ID NO: 1036768 - DNA, 15 bp, Homo sapiens
cgagcaagggaagga

SEQ ID NO: 1036769 - DNA, 15 bp, Homo sapiens
gagcaagggaaggaa

SEQ ID NO: 1036770 - DNA, 15 bp, Homo sapiens
agcaagggaaggaag

SEQ ID NO: 1036771 - DNA, 15 bp, Homo sapiens
gcaagggaaggaaga

SEQ ID NO: 1036772 - DNA, 15 bp, Homo sapiens
caagggaaggaagag

SEQ ID NO: 1036773 - DNA, 15 bp, Homo sapiens
aagggaaggaagaga

SEQ ID NO: 1036774 - DNA, 15 bp, Homo sapiens
agggaaggaagagat

SEQ ID NO: 1036775 - DNA, 15 bp, Homo sapiens
gggaaggaagagatg

SEQ ID NO: 1036776 - DNA, 15 bp, Homo sapiens
ggaaggaagagatga

SEQ ID NO: 1036777 - DNA, 15 bp, Homo sapiens
gaaggaagagatgat

SEQ ID NO: 1036778 - DNA, 15 bp, Homo sapiens
aaggaagagatgatg

SEQ ID NO: 1036779 - DNA, 15 bp, Homo sapiens
aggaagagatgatga

SEQ ID NO: 1036780 - DNA, 15 bp, Homo sapiens
ggaagagatgatgag

SEQ ID NO: 1036781 - DNA, 15 bp, Homo sapiens
gaagagatgatgaga

SEQ ID NO: 1036782 - DNA, 15 bp, Homo sapiens
aagagatgatgagac

SEQ ID NO: 1036783 - DNA, 15 bp, Homo sapiens
agagatgatgagacc

SEQ ID NO: 1036784 - DNA, 15 bp, Homo sapiens
gagatgatgagaccc

SEQ ID NO: 1036785 - DNA, 15 bp, Homo sapiens
agatgatgagaccct

SEQ ID NO: 1036786 - DNA, 15 bp, Homo sapiens
gatgatgagaccctg

SEQ ID NO: 1036787 - DNA, 15 bp, Homo sapiens
atgatgagaccctgg

SEQ ID NO: 1036788 - DNA, 15 bp, Homo sapiens
tgatgagaccctggg

SEQ ID NO: 1036789 - DNA, 15 bp, Homo sapiens
gatgagaccctggga

SEQ ID NO: 1036790 - DNA, 15 bp, Homo sapiens
atgagaccctgggaa

SEQ ID NO: 1036791 - DNA, 15 bp, Homo sapiens
tgagaccctgggaat

SEQ ID NO: 1036792 - DNA, 15 bp, Homo sapiens
gagaccctgggaatc

SEQ ID NO: 1036793 - DNA, 15 bp, Homo sapiens
agaccctgggaatcc

SEQ ID NO: 1036794 - DNA, 15 bp, Homo sapiens
gaccctgggaatccg

SEQ ID NO: 1036795 - DNA, 15 bp, Homo sapiens
accctgggaatccgg

SEQ ID NO: 1036796 - DNA, 15 bp, Homo sapiens
ccctgggaatccggg

SEQ ID NO: 1036797 - DNA, 15 bp, Homo sapiens
cctgggaatccggga

SEQ ID NO: 1036798 - DNA, 15 bp, Homo sapiens
ctgggaatccgggag

SEQ ID NO: 1036799 - DNA, 15 bp, Homo sapiens
tgggaatccgggaga

SEQ ID NO: 1036800 - DNA, 15 bp, Homo sapiens
gggaatccgggagag

SEQ ID NO: 1036801 - DNA, 15 bp, Homo sapiens
ggaatccgggagaga

SEQ ID NO: 1036802 - DNA, 15 bp, Homo sapiens
gaatccgggagagag

SEQ ID NO: 1036803 - DNA, 15 bp, Homo sapiens
aatccgggagagaga

SEQ ID NO: 1036804 - DNA, 15 bp, Homo sapiens
atccgggagagagac

SEQ ID NO: 1036805 - DNA, 15 bp, Homo sapiens
tccgggagagagaca

SEQ ID NO: 1036806 - DNA, 15 bp, Homo sapiens
ccgggagagagacag

SEQ ID NO: 1036807 - DNA, 15 bp, Homo sapiens
cgggagagagacagg

SEQ ID NO: 1036808 - DNA, 15 bp, Homo sapiens
gggagagagacaggg

SEQ ID NO: 1036809 - DNA, 15 bp, Homo sapiens
ggagagagacaggga

SEQ ID NO: 1036810 - DNA, 15 bp, Homo sapiens
gagagagacagggac

SEQ ID NO: 1036811 - DNA, 15 bp, Homo sapiens
agagagacagggacg

SEQ ID NO: 1036812 - DNA, 15 bp, Homo sapiens
gagagacagggacgt

SEQ ID NO: 1036813 - DNA, 15 bp, Homo sapiens
agagacagggacgtg

SEQ ID NO: 1036814 - DNA, 15 bp, Homo sapiens
gagacagggacgtgg

SEQ ID NO: 1036815 - DNA, 15 bp, Homo sapiens
agacagggacgtgga

SEQ ID NO: 1036816 - DNA, 15 bp, Homo sapiens
gacagggacgtggag

SEQ ID NO: 1036817 - DNA, 15 bp, Homo sapiens
acagggacgtggaga

SEQ ID NO: 1036818 - DNA, 15 bp, Homo sapiens
cagggacgtggagag

SEQ ID NO: 1036819 - DNA, 15 bp, Homo sapiens
agggacgtggagaga

SEQ ID NO: 1036820 - DNA, 15 bp, Homo sapiens
gggacgtggagagaa

SEQ ID NO: 1036821 - DNA, 15 bp, Homo sapiens
ggacgtggagagaaa

SEQ ID NO: 1036822 - DNA, 15 bp, Homo sapiens
gacgtggagagaaag

SEQ ID NO: 1036823 - DNA, 15 bp, Homo sapiens
acgtggagagaaagg

SEQ ID NO: 1036824 - DNA, 15 bp, Homo sapiens
cgtggagagaaaggg

SEQ ID NO: 1036825 - DNA, 15 bp, Homo sapiens
gtggagagaaaggga

SEQ ID NO: 1036826 - DNA, 15 bp, Homo sapiens
tggagagaaagggac

SEQ ID NO: 1036827 - DNA, 15 bp, Homo sapiens
ggagagaaagggaca

SEQ ID NO: 1036828 - DNA, 15 bp, Homo sapiens
gagagaaagggacag

SEQ ID NO: 1036829 - DNA, 15 bp, Homo sapiens
agagaaagggacaga

SEQ ID NO: 1036830 - DNA, 15 bp, Homo sapiens
gagaaagggacagag

SEQ ID NO: 1036831 - DNA, 15 bp, Homo sapiens
agaaagggacagaga

SEQ ID NO: 1036832 - DNA, 15 bp, Homo sapiens
gaaagggacagagag

SEQ ID NO: 1036833 - DNA, 15 bp, Homo sapiens
aaagggacagagaga

SEQ ID NO: 1036834 - DNA, 15 bp, Homo sapiens
aagggacagagagag

SEQ ID NO: 1036835 - DNA, 15 bp, Homo sapiens
agggacagagagaga

SEQ ID NO: 1036836 - DNA, 15 bp, Homo sapiens
gggacagagagagag

SEQ ID NO: 1036837 - DNA, 15 bp, Homo sapiens
ggacagagagagagc

SEQ ID NO: 1036838 - DNA, 15 bp, Homo sapiens
gacagagagagagcg

SEQ ID NO: 1036839 - DNA, 15 bp, Homo sapiens
acagagagagagcga

SEQ ID NO: 1036840 - DNA, 15 bp, Homo sapiens
cagagagagagcgag

SEQ ID NO: 1036841 - DNA, 15 bp, Homo sapiens
agagagagagcgaga

SEQ ID NO: 1036842 - DNA, 15 bp, Homo sapiens
gagagagagcgagaa

SEQ ID NO: 1036843 - DNA, 15 bp, Homo sapiens
agagagagcgagaag

SEQ ID NO: 1036844 - DNA, 15 bp, Homo sapiens
gagagagcgagaagg

SEQ ID NO: 1036845 - DNA, 15 bp, Homo sapiens
agagagcgagaagga

SEQ ID NO: 1036846 - DNA, 15 bp, Homo sapiens
gagagcgagaaggaa

SEQ ID NO: 1036847 - DNA, 15 bp, Homo sapiens
agagcgagaaggaaa

SEQ ID NO: 1036848 - DNA, 15 bp, Homo sapiens
gagcgagaaggaaag

SEQ ID NO: 1036849 - DNA, 15 bp, Homo sapiens
agcgagaaggaaagg

SEQ ID NO: 1036850 - DNA, 15 bp, Homo sapiens
gcgagaaggaaagga

SEQ ID NO: 1036851 - DNA, 15 bp, Homo sapiens
cgagaaggaaaggaa

SEQ ID NO: 1036852 - DNA, 15 bp, Homo sapiens
gagaaggaaaggaag

SEQ ID NO: 1036853 - DNA, 15 bp, Homo sapiens
agaaggaaaggaaga

SEQ ID NO: 1036854 - DNA, 15 bp, Homo sapiens
gaaggaaaggaagag

SEQ ID NO: 1036855 - DNA, 15 bp, Homo sapiens
aaggaaaggaagaga

SEQ ID NO: 1036856 - DNA, 15 bp, Homo sapiens
aggaaaggaagagac

SEQ ID NO: 1036857 - DNA, 15 bp, Homo sapiens
ggaaaggaagagaca

SEQ ID NO: 1036858 - DNA, 15 bp, Homo sapiens
gaaaggaagagacag

SEQ ID NO: 1036859 - DNA, 15 bp, Homo sapiens
aaaggaagagacaga

SEQ ID NO: 1036860 - DNA, 15 bp, Homo sapiens
aaggaagagacagaa

SEQ ID NO: 1036861 - DNA, 15 bp, Homo sapiens
aggaagagacagaag

SEQ ID NO: 1036862 - DNA, 15 bp, Homo sapiens
ggaagagacagaagg

SEQ ID NO: 1036863 - DNA, 15 bp, Homo sapiens
gaagagacagaaggg

SEQ ID NO: 1036864 - DNA, 15 bp, Homo sapiens
aagagacagaaggga

SEQ ID NO: 1036865 - DNA, 15 bp, Homo sapiens
agagacagaagggag

SEQ ID NO: 1036866 - DNA, 15 bp, Homo sapiens
gagacagaagggaga

SEQ ID NO: 1036867 - DNA, 15 bp, Homo sapiens
agacagaagggagaa

SEQ ID NO: 1036868 - DNA, 15 bp, Homo sapiens
gacagaagggagaag

SEQ ID NO: 1036869 - DNA, 15 bp, Homo sapiens
acagaagggagaagg

SEQ ID NO: 1036870 - DNA, 15 bp, Homo sapiens
cagaagggagaaggg

SEQ ID NO: 1036871 - DNA, 15 bp, Homo sapiens
agaagggagaagggg

SEQ ID NO: 1036872 - DNA, 15 bp, Homo sapiens
gaagggagaaggggc

SEQ ID NO: 1036873 - DNA, 15 bp, Homo sapiens
aagggagaaggggca

SEQ ID NO: 1036874 - DNA, 15 bp, Homo sapiens
agggagaaggggcaa

SEQ ID NO: 1036875 - DNA, 15 bp, Homo sapiens
gggagaaggggcaac

SEQ ID NO: 1036876 - DNA, 15 bp, Homo sapiens
ggagaaggggcaacc

SEQ ID NO: 1036877 - DNA, 15 bp, Homo sapiens
gagaaggggcaaccg

SEQ ID NO: 1036878 - DNA, 15 bp, Homo sapiens
agaaggggcaaccga

SEQ ID NO: 1036879 - DNA, 15 bp, Homo sapiens
gaaggggcaaccgaa

SEQ ID NO: 1036880 - DNA, 15 bp, Homo sapiens
aaggggcaaccgaaa

SEQ ID NO: 1036881 - DNA, 15 bp, Homo sapiens
aggggcaaccgaaaa

SEQ ID NO: 1036882 - DNA, 15 bp, Homo sapiens
ggggcaaccgaaaat

SEQ ID NO: 1036883 - DNA, 15 bp, Homo sapiens
gggcaaccgaaaatg

SEQ ID NO: 1036884 - DNA, 15 bp, Homo sapiens
ggcaaccgaaaatgg

SEQ ID NO: 1036885 - DNA, 15 bp, Homo sapiens
gcaaccgaaaatggg

SEQ ID NO: 1036886 - DNA, 15 bp, Homo sapiens
caaccgaaaatgggc

SEQ ID NO: 1036887 - DNA, 15 bp, Homo sapiens
aaccgaaaatgggca

SEQ ID NO: 1036888 - DNA, 15 bp, Homo sapiens
accgaaaatgggcac

SEQ ID NO: 1036889 - DNA, 15 bp, Homo sapiens
ccgaaaatgggcacg

SEQ ID NO: 1036890 - DNA, 15 bp, Homo sapiens
cgaaaatgggcacga

SEQ ID NO: 1036891 - DNA, 15 bp, Homo sapiens
gaaaatgggcacgaa

SEQ ID NO: 1036892 - DNA, 15 bp, Homo sapiens
aaaatgggcacgaag

SEQ ID NO: 1036893 - DNA, 15 bp, Homo sapiens
aaatgggcacgaaga

SEQ ID NO: 1036894 - DNA, 15 bp, Homo sapiens
aatgggcacgaagag

SEQ ID NO: 1036895 - DNA, 15 bp, Homo sapiens
atgggcacgaagagg

SEQ ID NO: 1036896 - DNA, 15 bp, Homo sapiens
tgggcacgaagaggc

SEQ ID NO: 1036897 - DNA, 15 bp, Homo sapiens
gggcacgaagaggcc

SEQ ID NO: 1036898 - DNA, 15 bp, Homo sapiens
ggcacgaagaggccc

SEQ ID NO: 1036899 - DNA, 15 bp, Homo sapiens
gcacgaagaggccca

SEQ ID NO: 1036900 - DNA, 15 bp, Homo sapiens
cacgaagaggcccag

SEQ ID NO: 1036901 - DNA, 15 bp, Homo sapiens
acgaagaggcccagg

SEQ ID NO: 1036902 - DNA, 15 bp, Homo sapiens
cgaagaggcccaggc

SEQ ID NO: 1036903 - DNA, 15 bp, Homo sapiens
gaagaggcccaggca

SEQ ID NO: 1036904 - DNA, 15 bp, Homo sapiens
aagaggcccaggcac

SEQ ID NO: 1036905 - DNA, 15 bp, Homo sapiens
agaggcccaggcaca

SEQ ID NO: 1036906 - DNA, 15 bp, Homo sapiens
gaggcccaggcacag

SEQ ID NO: 1036907 - DNA, 15 bp, Homo sapiens
aggcccaggcacagc

SEQ ID NO: 1036908 - DNA, 15 bp, Homo sapiens
ggcccaggcacagca

SEQ ID NO: 1036909 - DNA, 15 bp, Homo sapiens
gcccaggcacagcaa

SEQ ID NO: 1036910 - DNA, 15 bp, Homo sapiens
cccaggcacagcaac

SEQ ID NO: 1036911 - DNA, 15 bp, Homo sapiens
ccaggcacagcaaca

SEQ ID NO: 1036912 - DNA, 15 bp, Homo sapiens
caggcacagcaacag

SEQ ID NO: 1036913 - DNA, 15 bp, Homo sapiens
aggcacagcaacagc

SEQ ID NO: 1036914 - DNA, 15 bp, Homo sapiens
ggcacagcaacagct

SEQ ID NO: 1036915 - DNA, 15 bp, Homo sapiens
gcacagcaacagctg

SEQ ID NO: 1036916 - DNA, 15 bp, Homo sapiens
cacagcaacagctgg

SEQ ID NO: 1036917 - DNA, 15 bp, Homo sapiens
acagcaacagctggg

SEQ ID NO: 1036918 - DNA, 15 bp, Homo sapiens
cagcaacagctgggg

SEQ ID NO: 1036919 - DNA, 15 bp, Homo sapiens
agcaacagctgggga

SEQ ID NO: 1036920 - DNA, 15 bp, Homo sapiens
gcaacagctggggaa

SEQ ID NO: 1036921 - DNA, 15 bp, Homo sapiens
caacagctggggaaa

SEQ ID NO: 1036922 - DNA, 15 bp, Homo sapiens
aacagctggggaaat

SEQ ID NO: 1036923 - DNA, 15 bp, Homo sapiens
acagctggggaaatg

SEQ ID NO: 1036924 - DNA, 15 bp, Homo sapiens
cagctggggaaatga

SEQ ID NO: 1036925 - DNA, 15 bp, Homo sapiens
agctggggaaatgac

SEQ ID NO: 1036926 - DNA, 15 bp, Homo sapiens
gctggggaaatgaca

SEQ ID NO: 1036927 - DNA, 15 bp, Homo sapiens
ctggggaaatgacag

SEQ ID NO: 1036928 - DNA, 15 bp, Homo sapiens
tggggaaatgacaga

SEQ ID NO: 1036929 - DNA, 15 bp, Homo sapiens
ggggaaatgacagag

SEQ ID NO: 1036930 - DNA, 15 bp, Homo sapiens
gggaaatgacagaga

SEQ ID NO: 1036931 - DNA, 15 bp, Homo sapiens
ggaaatgacagagac

SEQ ID NO: 1036932 - DNA, 15 bp, Homo sapiens
gaaatgacagagact

SEQ ID NO: 1036933 - DNA, 15 bp, Homo sapiens
aaatgacagagactg

SEQ ID NO: 1036934 - DNA, 15 bp, Homo sapiens
aatgacagagactga

SEQ ID NO: 1036935 - DNA, 15 bp, Homo sapiens
atgacagagactgag

SEQ ID NO: 1036936 - DNA, 15 bp, Homo sapiens
tgacagagactgaga

SEQ ID NO: 1036937 - DNA, 15 bp, Homo sapiens
gacagagactgagac

SEQ ID NO: 1036938 - DNA, 15 bp, Homo sapiens
acagagactgagacg

SEQ ID NO: 1036939 - DNA, 15 bp, Homo sapiens
cagagactgagacgg

SEQ ID NO: 1036940 - DNA, 15 bp, Homo sapiens
agagactgagacgga

SEQ ID NO: 1036941 - DNA, 15 bp, Homo sapiens
gagactgagacggag

SEQ ID NO: 1036942 - DNA, 15 bp, Homo sapiens
agactgagacggaga

SEQ ID NO: 1036943 - DNA, 15 bp, Homo sapiens
gactgagacggagat

SEQ ID NO: 1036944 - DNA, 15 bp, Homo sapiens
actgagacggagatg

SEQ ID NO: 1036945 - DNA, 15 bp, Homo sapiens
ctgagacggagatgc

SEQ ID NO: 1036946 - DNA, 15 bp, Homo sapiens
tgagacggagatgca

SEQ ID NO: 1036947 - DNA, 15 bp, Homo sapiens
gagacggagatgcag

SEQ ID NO: 1036948 - DNA, 15 bp, Homo sapiens
agacggagatgcaga

SEQ ID NO: 1036949 - DNA, 15 bp, Homo sapiens
gacggagatgcagaa

SEQ ID NO: 1036950 - DNA, 15 bp, Homo sapiens
acggagatgcagaaa

SEQ ID NO: 1036951 - DNA, 15 bp, Homo sapiens
cggagatgcagaaag

SEQ ID NO: 1036952 - DNA, 15 bp, Homo sapiens
ggagatgcagaaaga

SEQ ID NO: 1036953 - DNA, 15 bp, Homo sapiens
gagatgcagaaagat

SEQ ID NO: 1036954 - DNA, 15 bp, Homo sapiens
agatgcagaaagata

SEQ ID NO: 1036955 - DNA, 15 bp, Homo sapiens
gatgcagaaagatac

SEQ ID NO: 1036956 - DNA, 15 bp, Homo sapiens
atgcagaaagataca

SEQ ID NO: 1036957 - DNA, 15 bp, Homo sapiens
tgcagaaagatacag

SEQ ID NO: 1036958 - DNA, 15 bp, Homo sapiens
gcagaaagatacaga

SEQ ID NO: 1036959 - DNA, 15 bp, Homo sapiens
cagaaagatacagag

SEQ ID NO: 1036960 - DNA, 15 bp, Homo sapiens
agaaagatacagaga

SEQ ID NO: 1036961 - DNA, 15 bp, Homo sapiens
gaaagatacagagag

SEQ ID NO: 1036962 - DNA, 15 bp, Homo sapiens
aaagatacagagaga

SEQ ID NO: 1036963 - DNA, 15 bp, Homo sapiens
aagatacagagagag

SEQ ID NO: 1036964 - DNA, 15 bp, Homo sapiens
agatacagagagagc

SEQ ID NO: 1036965 - DNA, 15 bp, Homo sapiens
gatacagagagagct

SEQ ID NO: 1036966 - DNA, 15 bp, Homo sapiens
atacagagagagctg

SEQ ID NO: 1036967 - DNA, 15 bp, Homo sapiens
tacagagagagctgg

SEQ ID NO: 1036968 - DNA, 15 bp, Homo sapiens
acagagagagctgga

SEQ ID NO: 1036969 - DNA, 15 bp, Homo sapiens
cagagagagctggag

SEQ ID NO: 1036970 - DNA, 15 bp, Homo sapiens
agagagagctggaga

SEQ ID NO: 1036971 - DNA, 15 bp, Homo sapiens
gagagagctggagag

SEQ ID NO: 1036972 - DNA, 15 bp, Homo sapiens
agagagctggagagg

SEQ ID NO: 1036973 - DNA, 15 bp, Homo sapiens
gagagctggagaggg

SEQ ID NO: 1036974 - DNA, 15 bp, Homo sapiens
agagctggagagggt

SEQ ID NO: 1036975 - DNA, 15 bp, Homo sapiens
gagctggagagggta

SEQ ID NO: 1036976 - DNA, 15 bp, Homo sapiens
agctggagagggtag

SEQ ID NO: 1036977 - DNA, 15 bp, Homo sapiens
gctggagagggtaga

SEQ ID NO: 1036978 - DNA, 15 bp, Homo sapiens
ctggagagggtagag

SEQ ID NO: 1036979 - DNA, 15 bp, Homo sapiens
tggagagggtagaga

SEQ ID NO: 1036980 - DNA, 15 bp, Homo sapiens
ggagagggtagagaa

SEQ ID NO: 1036981 - DNA, 15 bp, Homo sapiens
gagagggtagagaag

SEQ ID NO: 1036982 - DNA, 15 bp, Homo sapiens
agagggtagagaagg

SEQ ID NO: 1036983 - DNA, 15 bp, Homo sapiens
gagggtagagaaggg

SEQ ID NO: 1036984 - DNA, 15 bp, Homo sapiens
agggtagagaagggc

SEQ ID NO: 1036985 - DNA, 15 bp, Homo sapiens
gggtagagaagggct

SEQ ID NO: 1036986 - DNA, 15 bp, Homo sapiens
ggtagagaagggctt

SEQ ID NO: 1036987 - DNA, 15 bp, Homo sapiens
gtagagaagggcttt

SEQ ID NO: 1036988 - DNA, 15 bp, Homo sapiens
tagagaagggctttc

SEQ ID NO: 1036989 - DNA, 15 bp, Homo sapiens
agagaagggctttcg

SEQ ID NO: 1036990 - DNA, 15 bp, Homo sapiens
gagaagggctttcgg

SEQ ID NO: 1036991 - DNA, 15 bp, Homo sapiens
agaagggctttcggg

SEQ ID NO: 1036992 - DNA, 15 bp, Homo sapiens
gaagggctttcgggg

SEQ ID NO: 1036993 - DNA, 15 bp, Homo sapiens
aagggctttcgggga

SEQ ID NO: 1036994 - DNA, 15 bp, Homo sapiens
agggctttcggggag

SEQ ID NO: 1036995 - DNA, 15 bp, Homo sapiens
gggctttcggggaga

SEQ ID NO: 1036996 - DNA, 15 bp, Homo sapiens
ggctttcggggagaa

SEQ ID NO: 1036997 - DNA, 15 bp, Homo sapiens
gctttcggggagaaa

SEQ ID NO: 1036998 - DNA, 15 bp, Homo sapiens
ctttcggggagaaag

SEQ ID NO: 1036999 - DNA, 15 bp, Homo sapiens
tttcggggagaaagt

SEQ ID NO: 1037000 - DNA, 15 bp, Homo sapiens
ttcggggagaaagtg

SEQ ID NO: 1037001 - DNA, 15 bp, Homo sapiens
tcggggagaaagtga

SEQ ID NO: 1037002 - DNA, 15 bp, Homo sapiens
cggggagaaagtgat

SEQ ID NO: 1037003 - DNA, 15 bp, Homo sapiens
ggggagaaagtgatg

SEQ ID NO: 1037004 - DNA, 15 bp, Homo sapiens
gggagaaagtgatgg

SEQ ID NO: 1037005 - DNA, 15 bp, Homo sapiens
ggagaaagtgatgga

SEQ ID NO: 1037006 - DNA, 15 bp, Homo sapiens
gagaaagtgatggag

SEQ ID NO: 1037007 - DNA, 15 bp, Homo sapiens
agaaagtgatggagg

SEQ ID NO: 1037008 - DNA, 15 bp, Homo sapiens
gaaagtgatggaggg

SEQ ID NO: 1037009 - DNA, 15 bp, Homo sapiens
aaagtgatggaggga

SEQ ID NO: 1037010 - DNA, 15 bp, Homo sapiens
aagtgatggagggac

SEQ ID NO: 1037011 - DNA, 15 bp, Homo sapiens
agtgatggagggaca

SEQ ID NO: 1037012 - DNA, 15 bp, Homo sapiens
gtgatggagggacag

SEQ ID NO: 1037013 - DNA, 15 bp, Homo sapiens
tgatggagggacaga

SEQ ID NO: 1037014 - DNA, 15 bp, Homo sapiens
gatggagggacagag

SEQ ID NO: 1037015 - DNA, 15 bp, Homo sapiens
atggagggacagaga

SEQ ID NO: 1037016 - DNA, 15 bp, Homo sapiens
tggagggacagagag

SEQ ID NO: 1037017 - DNA, 15 bp, Homo sapiens
ggagggacagagagg

SEQ ID NO: 1037018 - DNA, 15 bp, Homo sapiens
gagggacagagagga

SEQ ID NO: 1037019 - DNA, 15 bp, Homo sapiens
agggacagagaggag

SEQ ID NO: 1037020 - DNA, 15 bp, Homo sapiens
gggacagagaggaga

SEQ ID NO: 1037021 - DNA, 15 bp, Homo sapiens
ggacagagaggagag

SEQ ID NO: 1037022 - DNA, 15 bp, Homo sapiens
gacagagaggagagg

SEQ ID NO: 1037023 - DNA, 15 bp, Homo sapiens
acagagaggagaggt

SEQ ID NO: 1037024 - DNA, 15 bp, Homo sapiens
cagagaggagaggtg

SEQ ID NO: 1037025 - DNA, 15 bp, Homo sapiens
agagaggagaggtgg

SEQ ID NO: 1037026 - DNA, 15 bp, Homo sapiens
gagaggagaggtgga

SEQ ID NO: 1037027 - DNA, 15 bp, Homo sapiens
agaggagaggtggag

SEQ ID NO: 1037028 - DNA, 15 bp, Homo sapiens
gaggagaggtggagg

SEQ ID NO: 1037029 - DNA, 15 bp, Homo sapiens
aggagaggtggaggc

SEQ ID NO: 1037030 - DNA, 15 bp, Homo sapiens
ggagaggtggaggcc

SEQ ID NO: 1037031 - DNA, 15 bp, Homo sapiens
gagaggtggaggcca

SEQ ID NO: 1037032 - DNA, 15 bp, Homo sapiens
agaggtggaggccaa

SEQ ID NO: 1037033 - DNA, 15 bp, Homo sapiens
gaggtggaggccaag

SEQ ID NO: 1037034 - DNA, 15 bp, Homo sapiens
aggtggaggccaagg

SEQ ID NO: 1037035 - DNA, 15 bp, Homo sapiens
ggtggaggccaagga

SEQ ID NO: 1037036 - DNA, 15 bp, Homo sapiens
gtggaggccaaggag

SEQ ID NO: 1037037 - DNA, 15 bp, Homo sapiens
tggaggccaaggagg

SEQ ID NO: 1037038 - DNA, 15 bp, Homo sapiens
ggaggccaaggaggg

SEQ ID NO: 1037039 - DNA, 15 bp, Homo sapiens
gaggccaaggaggga

SEQ ID NO: 1037040 - DNA, 15 bp, Homo sapiens
aggccaaggagggaa

SEQ ID NO: 1037041 - DNA, 15 bp, Homo sapiens
ggccaaggagggaaa

SEQ ID NO: 1037042 - DNA, 15 bp, Homo sapiens
gccaaggagggaaag

SEQ ID NO: 1037043 - DNA, 15 bp, Homo sapiens
ccaaggagggaaaga

SEQ ID NO: 1037044 - DNA, 15 bp, Homo sapiens
caaggagggaaagac

SEQ ID NO: 1037045 - DNA, 15 bp, Homo sapiens
aaggagggaaagacc

SEQ ID NO: 1037046 - DNA, 15 bp, Homo sapiens
aggagggaaagaccc

SEQ ID NO: 1037047 - DNA, 15 bp, Homo sapiens
ggagggaaagacccc

SEQ ID NO: 1037048 - DNA, 15 bp, Homo sapiens
gagggaaagacccca

SEQ ID NO: 1037049 - DNA, 15 bp, Homo sapiens
agggaaagaccccag

SEQ ID NO: 1037050 - DNA, 15 bp, Homo sapiens
gggaaagaccccagt

SEQ ID NO: 1037051 - DNA, 15 bp, Homo sapiens
ggaaagaccccagta

SEQ ID NO: 1037052 - DNA, 15 bp, Homo sapiens
gaaagaccccagtag

SEQ ID NO: 1037053 - DNA, 15 bp, Homo sapiens
aaagaccccagtaga

SEQ ID NO: 1037054 - DNA, 15 bp, Homo sapiens
aagaccccagtagag

SEQ ID NO: 1037055 - DNA, 15 bp, Homo sapiens
agaccccagtagaga

SEQ ID NO: 1037056 - DNA, 15 bp, Homo sapiens
gaccccagtagagaa

SEQ ID NO: 1037057 - DNA, 15 bp, Homo sapiens
accccagtagagaaa

SEQ ID NO: 1037058 - DNA, 15 bp, Homo sapiens
ccccagtagagaaag

SEQ ID NO: 1037059 - DNA, 15 bp, Homo sapiens
cccagtagagaaaga

SEQ ID NO: 1037060 - DNA, 15 bp, Homo sapiens
ccagtagagaaagac

SEQ ID NO: 1037061 - DNA, 15 bp, Homo sapiens
cagtagagaaagaca

SEQ ID NO: 1037062 - DNA, 15 bp, Homo sapiens
agtagagaaagacag

SEQ ID NO: 1037063 - DNA, 15 bp, Homo sapiens
gtagagaaagacaga

SEQ ID NO: 1037064 - DNA, 15 bp, Homo sapiens
tagagaaagacagag

SEQ ID NO: 1037065 - DNA, 15 bp, Homo sapiens
agagaaagacagagg

SEQ ID NO: 1037066 - DNA, 15 bp, Homo sapiens
gagaaagacagaggg

SEQ ID NO: 1037067 - DNA, 15 bp, Homo sapiens
agaaagacagaggga

SEQ ID NO: 1037068 - DNA, 15 bp, Homo sapiens
gaaagacagagggac

SEQ ID NO: 1037069 - DNA, 15 bp, Homo sapiens
aaagacagagggaca

SEQ ID NO: 1037070 - DNA, 15 bp, Homo sapiens
aagacagagggacag

SEQ ID NO: 1037071 - DNA, 15 bp, Homo sapiens
agacagagggacaga

SEQ ID NO: 1037072 - DNA, 15 bp, Homo sapiens
gacagagggacagag

SEQ ID NO: 1037073 - DNA, 15 bp, Homo sapiens
acagagggacagaga

SEQ ID NO: 1037074 - DNA, 15 bp, Homo sapiens
cagagggacagagaa

SEQ ID NO: 1037075 - DNA, 15 bp, Homo sapiens
agagggacagagaag

SEQ ID NO: 1037076 - DNA, 15 bp, Homo sapiens
gagggacagagaagg

SEQ ID NO: 1037077 - DNA, 15 bp, Homo sapiens
agggacagagaaggg

SEQ ID NO: 1037078 - DNA, 15 bp, Homo sapiens
gggacagagaagggg

SEQ ID NO: 1037079 - DNA, 15 bp, Homo sapiens
ggacagagaagggga

SEQ ID NO: 1037080 - DNA, 15 bp, Homo sapiens
gacagagaaggggat

SEQ ID NO: 1037081 - DNA, 15 bp, Homo sapiens
acagagaaggggatg

SEQ ID NO: 1037082 - DNA, 15 bp, Homo sapiens
cagagaaggggatgc

SEQ ID NO: 1037083 - DNA, 15 bp, Homo sapiens
agagaaggggatgca

SEQ ID NO: 1037084 - DNA, 15 bp, Homo sapiens
gagaaggggatgcag

SEQ ID NO: 1037085 - DNA, 15 bp, Homo sapiens
agaaggggatgcaga

SEQ ID NO: 1037086 - DNA, 15 bp, Homo sapiens
gaaggggatgcagac

SEQ ID NO: 1037087 - DNA, 15 bp, Homo sapiens
aaggggatgcagacg

SEQ ID NO: 1037088 - DNA, 15 bp, Homo sapiens
aggggatgcagacgc

SEQ ID NO: 1037089 - DNA, 15 bp, Homo sapiens
ggggatgcagacgca

SEQ ID NO: 1037090 - DNA, 15 bp, Homo sapiens
gggatgcagacgcag

SEQ ID NO: 1037091 - DNA, 15 bp, Homo sapiens
ggatgcagacgcagg

SEQ ID NO: 1037092 - DNA, 15 bp, Homo sapiens
gatgcagacgcaggc

SEQ ID NO: 1037093 - DNA, 15 bp, Homo sapiens
atgcagacgcaggcg

SEQ ID NO: 1037094 - DNA, 15 bp, Homo sapiens
tgcagacgcaggcgg

SEQ ID NO: 1037095 - DNA, 15 bp, Homo sapiens
gcagacgcaggcggg

SEQ ID NO: 1037096 - DNA, 15 bp, Homo sapiens
cagacgcaggcggga

SEQ ID NO: 1037097 - DNA, 15 bp, Homo sapiens
agacgcaggcgggag

SEQ ID NO: 1037098 - DNA, 15 bp, Homo sapiens
gacgcaggcgggagc

SEQ ID NO: 1037099 - DNA, 15 bp, Homo sapiens
acgcaggcgggagca

SEQ ID NO: 1037100 - DNA, 15 bp, Homo sapiens
cgcaggcgggagcac

SEQ ID NO: 1037101 - DNA, 15 bp, Homo sapiens
gcaggcgggagcaca

SEQ ID NO: 1037102 - DNA, 15 bp, Homo sapiens
caggcgggagcacac

SEQ ID NO: 1037103 - DNA, 15 bp, Homo sapiens
aggcgggagcacacc

SEQ ID NO: 1037104 - DNA, 15 bp, Homo sapiens
ggcgggagcacaccc

SEQ ID NO: 1037105 - DNA, 15 bp, Homo sapiens
gcgggagcacaccca

SEQ ID NO: 1037106 - DNA, 15 bp, Homo sapiens
cgggagcacacccac

SEQ ID NO: 1037107 - DNA, 15 bp, Homo sapiens
gggagcacacccaca

SEQ ID NO: 1037108 - DNA, 15 bp, Homo sapiens
ggagcacacccacag

SEQ ID NO: 1037109 - DNA, 15 bp, Homo sapiens
gagcacacccacaga

SEQ ID NO: 1037110 - DNA, 15 bp, Homo sapiens
agcacacccacagag

SEQ ID NO: 1037111 - DNA, 15 bp, Homo sapiens
gcacacccacagagg

SEQ ID NO: 1037112 - DNA, 15 bp, Homo sapiens
cacacccacagaggc

SEQ ID NO: 1037113 - DNA, 15 bp, Homo sapiens
acacccacagaggcg

SEQ ID NO: 1037114 - DNA, 15 bp, Homo sapiens
cacccacagaggcga

SEQ ID NO: 1037115 - DNA, 15 bp, Homo sapiens
acccacagaggcgaa

SEQ ID NO: 1037116 - DNA, 15 bp, Homo sapiens
cccacagaggcgaag

SEQ ID NO: 1037117 - DNA, 15 bp, Homo sapiens
ccacagaggcgaagg

SEQ ID NO: 1037118 - DNA, 15 bp, Homo sapiens
cacagaggcgaagga

SEQ ID NO: 1037119 - DNA, 15 bp, Homo sapiens
acagaggcgaaggaa

SEQ ID NO: 1037120 - DNA, 15 bp, Homo sapiens
cagaggcgaaggaag

SEQ ID NO: 1037121 - DNA, 15 bp, Homo sapiens
agaggcgaaggaagg

SEQ ID NO: 1037122 - DNA, 15 bp, Homo sapiens
gaggcgaaggaaggg

SEQ ID NO: 1037123 - DNA, 15 bp, Homo sapiens
aggcgaaggaagggc

SEQ ID NO: 1037124 - DNA, 15 bp, Homo sapiens
ggcgaaggaagggcg

SEQ ID NO: 1037125 - DNA, 15 bp, Homo sapiens
gcgaaggaagggcgc

SEQ ID NO: 1037126 - DNA, 15 bp, Homo sapiens
cgaaggaagggcgca

SEQ ID NO: 1037127 - DNA, 15 bp, Homo sapiens
gaaggaagggcgcaa

SEQ ID NO: 1037128 - DNA, 15 bp, Homo sapiens
aaggaagggcgcaag

SEQ ID NO: 1037129 - DNA, 15 bp, Homo sapiens
aggaagggcgcaaga

SEQ ID NO: 1037130 - DNA, 15 bp, Homo sapiens
ggaagggcgcaagac

SEQ ID NO: 1037131 - DNA, 15 bp, Homo sapiens
gaagggcgcaagacc

SEQ ID NO: 1037132 - DNA, 15 bp, Homo sapiens
aagggcgcaagacca

SEQ ID NO: 1037133 - DNA, 15 bp, Homo sapiens
agggcgcaagaccat

SEQ ID NO: 1037134 - DNA, 15 bp, Homo sapiens
gggcgcaagaccatg

SEQ ID NO: 1037135 - DNA, 15 bp, Homo sapiens
ggcgcaagaccatga

SEQ ID NO: 1037136 - DNA, 15 bp, Homo sapiens
gcgcaagaccatgag

SEQ ID NO: 1037137 - DNA, 15 bp, Homo sapiens
cgcaagaccatgaga

SEQ ID NO: 1037138 - DNA, 15 bp, Homo sapiens
gcaagaccatgagaa

SEQ ID NO: 1037139 - DNA, 15 bp, Homo sapiens
caagaccatgagaac

SEQ ID NO: 1037140 - DNA, 15 bp, Homo sapiens
aagaccatgagaacc

SEQ ID NO: 1037141 - DNA, 15 bp, Homo sapiens
agaccatgagaacca

SEQ ID NO: 1037142 - DNA, 15 bp, Homo sapiens
gaccatgagaaccac

SEQ ID NO: 1037143 - DNA, 15 bp, Homo sapiens
accatgagaaccaca

SEQ ID NO: 1037144 - DNA, 15 bp, Homo sapiens
ccatgagaaccacag

SEQ ID NO: 1037145 - DNA, 15 bp, Homo sapiens
catgagaaccacaga

SEQ ID NO: 1037146 - DNA, 15 bp, Homo sapiens
atgagaaccacagac

SEQ ID NO: 1037147 - DNA, 15 bp, Homo sapiens
tgagaaccacagacg

SEQ ID NO: 1037148 - DNA, 15 bp, Homo sapiens
gagaaccacagacgc

SEQ ID NO: 1037149 - DNA, 15 bp, Homo sapiens
agaaccacagacgcg

SEQ ID NO: 1037150 - DNA, 15 bp, Homo sapiens
gaaccacagacgcgg

SEQ ID NO: 1037151 - DNA, 15 bp, Homo sapiens
aaccacagacgcgga

SEQ ID NO: 1037152 - DNA, 15 bp, Homo sapiens
accacagacgcggaa

SEQ ID NO: 1037153 - DNA, 15 bp, Homo sapiens
ccacagacgcggaaa

SEQ ID NO: 1037154 - DNA, 15 bp, Homo sapiens
cacagacgcggaaag

SEQ ID NO: 1037155 - DNA, 15 bp, Homo sapiens
acagacgcggaaagc

SEQ ID NO: 1037156 - DNA, 15 bp, Homo sapiens
cagacgcggaaagcc

SEQ ID NO: 1037157 - DNA, 15 bp, Homo sapiens
agacgcggaaagccg

SEQ ID NO: 1037158 - DNA, 15 bp, Homo sapiens
gacgcggaaagccgg

SEQ ID NO: 1037159 - DNA, 15 bp, Homo sapiens
acgcggaaagccggg

SEQ ID NO: 1037160 - DNA, 15 bp, Homo sapiens
cgcggaaagccgggg

SEQ ID NO: 1037161 - DNA, 15 bp, Homo sapiens
gcggaaagccgggga

SEQ ID NO: 1037162 - DNA, 15 bp, Homo sapiens
cggaaagccggggag

SEQ ID NO: 1037163 - DNA, 15 bp, Homo sapiens
ggaaagccggggagg

SEQ ID NO: 1037164 - DNA, 15 bp, Homo sapiens
gaaagccggggaggt

SEQ ID NO: 1037165 - DNA, 15 bp, Homo sapiens
aaagccggggaggtc

SEQ ID NO: 1037166 - DNA, 15 bp, Homo sapiens
aagccggggaggtcg

SEQ ID NO: 1037167 - DNA, 15 bp, Homo sapiens
agccggggaggtcgt

SEQ ID NO: 1037168 - DNA, 15 bp, Homo sapiens
gccggggaggtcgtg

SEQ ID NO: 1037169 - DNA, 15 bp, Homo sapiens
ccggggaggtcgtgg

SEQ ID NO: 1037170 - DNA, 15 bp, Homo sapiens
cggggaggtcgtggc

SEQ ID NO: 1037171 - DNA, 15 bp, Homo sapiens
ggggaggtcgtggct

SEQ ID NO: 1037172 - DNA, 15 bp, Homo sapiens
gggaggtcgtggctc

SEQ ID NO: 1037173 - DNA, 15 bp, Homo sapiens
ggaggtcgtggctcg

SEQ ID NO: 1037174 - DNA, 15 bp, Homo sapiens
gaggtcgtggctcgg

SEQ ID NO: 1037175 - DNA, 15 bp, Homo sapiens
aggtcgtggctcggt

SEQ ID NO: 1037176 - DNA, 15 bp, Homo sapiens
ggtcgtggctcggtc

SEQ ID NO: 1037177 - DNA, 15 bp, Homo sapiens
gtcgtggctcggtct

SEQ ID NO: 1037178 - DNA, 15 bp, Homo sapiens
tcgtggctcggtcta

SEQ ID NO: 1037179 - DNA, 15 bp, Homo sapiens
cgtggctcggtctag

SEQ ID NO: 1037180 - DNA, 15 bp, Homo sapiens
gtggctcggtctagg

SEQ ID NO: 1037181 - DNA, 15 bp, Homo sapiens
tggctcggtctaggg

SEQ ID NO: 1037182 - DNA, 15 bp, Homo sapiens
ggctcggtctagggc

SEQ ID NO: 1037183 - DNA, 15 bp, Homo sapiens
gctcggtctagggcg

SEQ ID NO: 1037184 - DNA, 15 bp, Homo sapiens
ctcggtctagggcgc

SEQ ID NO: 1037185 - DNA, 15 bp, Homo sapiens
tcggtctagggcgca

SEQ ID NO: 1037186 - DNA, 15 bp, Homo sapiens
cggtctagggcgcac

SEQ ID NO: 1037187 - DNA, 15 bp, Homo sapiens
ggtctagggcgcacg

SEQ ID NO: 1037188 - DNA, 15 bp, Homo sapiens
gtctagggcgcacgg

SEQ ID NO: 1037189 - DNA, 15 bp, Homo sapiens
tctagggcgcacggg

SEQ ID NO: 1037190 - DNA, 15 bp, Homo sapiens
ctagggcgcacgggg

SEQ ID NO: 1037191 - DNA, 15 bp, Homo sapiens
tagggcgcacgggga

SEQ ID NO: 1037192 - DNA, 15 bp, Homo sapiens
agggcgcacggggag

SEQ ID NO: 1037193 - DNA, 15 bp, Homo sapiens
gggcgcacggggagc

SEQ ID NO: 1037194 - DNA, 15 bp, Homo sapiens
ggcgcacggggagca

SEQ ID NO: 1037195 - DNA, 15 bp, Homo sapiens
gcgcacggggagcag

SEQ ID NO: 1037196 - DNA, 15 bp, Homo sapiens
cgcacggggagcagg

SEQ ID NO: 1037197 - DNA, 15 bp, Homo sapiens
gcacggggagcaggg

SEQ ID NO: 1037198 - DNA, 15 bp, Homo sapiens
cacggggagcagggc

SEQ ID NO: 1037199 - DNA, 15 bp, Homo sapiens
acggggagcagggct

SEQ ID NO: 1037200 - DNA, 15 bp, Homo sapiens
cggggagcagggctt

SEQ ID NO: 1037201 - DNA, 15 bp, Homo sapiens
ggggagcagggcttg

SEQ ID NO: 1037202 - DNA, 15 bp, Homo sapiens
gggagcagggcttgc

SEQ ID NO: 1037203 - DNA, 15 bp, Homo sapiens
ggagcagggcttgcc

SEQ ID NO: 1037204 - DNA, 15 bp, Homo sapiens
gagcagggcttgccc

SEQ ID NO: 1037205 - DNA, 15 bp, Homo sapiens
agcagggcttgcccc

SEQ ID NO: 1037206 - DNA, 15 bp, Homo sapiens
gcagggcttgccccc

SEQ ID NO: 1037207 - DNA, 15 bp, Homo sapiens
cagggcttgcccccc

SEQ ID NO: 1037208 - DNA, 15 bp, Homo sapiens
agggcttgcccccca

SEQ ID NO: 1037209 - DNA, 15 bp, Homo sapiens
gggcttgccccccag

SEQ ID NO: 1037210 - DNA, 15 bp, Homo sapiens
ggcttgccccccagc

SEQ ID NO: 1037211 - DNA, 15 bp, Homo sapiens
gcttgccccccagca

SEQ ID NO: 1037212 - DNA, 15 bp, Homo sapiens
cttgccccccagcac

SEQ ID NO: 1037213 - DNA, 15 bp, Homo sapiens
ttgccccccagcacc

SEQ ID NO: 1037214 - DNA, 15 bp, Homo sapiens
tgccccccagcacct

SEQ ID NO: 1037215 - DNA, 15 bp, Homo sapiens
gccccccagcacctc

SEQ ID NO: 1037216 - DNA, 15 bp, Homo sapiens
ccccccagcacctcc

SEQ ID NO: 1037217 - DNA, 15 bp, Homo sapiens
cccccagcacctccg

SEQ ID NO: 1037218 - DNA, 15 bp, Homo sapiens
ccccagcacctccgg

SEQ ID NO: 1037219 - DNA, 15 bp, Homo sapiens
cccagcacctccggg

SEQ ID NO: 1037220 - DNA, 15 bp, Homo sapiens
ccagcacctccgggg

SEQ ID NO: 1037221 - DNA, 15 bp, Homo sapiens
cagcacctccgggga

SEQ ID NO: 1037222 - DNA, 15 bp, Homo sapiens
agcacctccggggag

SEQ ID NO: 1037223 - DNA, 15 bp, Homo sapiens
gcacctccggggagg

SEQ ID NO: 1037224 - DNA, 15 bp, Homo sapiens
cacctccggggaggt

SEQ ID NO: 1037225 - DNA, 15 bp, Homo sapiens
acctccggggaggtg

SEQ ID NO: 1037226 - DNA, 15 bp, Homo sapiens
cctccggggaggtga

SEQ ID NO: 1037227 - DNA, 15 bp, Homo sapiens
ctccggggaggtgac

SEQ ID NO: 1037228 - DNA, 15 bp, Homo sapiens
tccggggaggtgacc

SEQ ID NO: 1037229 - DNA, 15 bp, Homo sapiens
ccggggaggtgaccc

SEQ ID NO: 1037230 - DNA, 15 bp, Homo sapiens
cggggaggtgacccc

SEQ ID NO: 1037231 - DNA, 15 bp, Homo sapiens
ggggaggtgacccca

SEQ ID NO: 1037232 - DNA, 15 bp, Homo sapiens
gggaggtgaccccag

SEQ ID NO: 1037233 - DNA, 15 bp, Homo sapiens
ggaggtgaccccagc

SEQ ID NO: 1037234 - DNA, 15 bp, Homo sapiens
gaggtgaccccagcc

SEQ ID NO: 1037235 - DNA, 15 bp, Homo sapiens
aggtgaccccagccg

SEQ ID NO: 1037236 - DNA, 15 bp, Homo sapiens
ggtgaccccagccgg

SEQ ID NO: 1037237 - DNA, 15 bp, Homo sapiens
gtgaccccagccggg

SEQ ID NO: 1037238 - DNA, 15 bp, Homo sapiens
tgaccccagccggga

SEQ ID NO: 1037239 - DNA, 15 bp, Homo sapiens
gaccccagccgggag

SEQ ID NO: 1037240 - DNA, 15 bp, Homo sapiens
accccagccgggaga

SEQ ID NO: 1037241 - DNA, 15 bp, Homo sapiens
ccccagccgggagat

SEQ ID NO: 1037242 - DNA, 15 bp, Homo sapiens
cccagccgggagatg

SEQ ID NO: 1037243 - DNA, 15 bp, Homo sapiens
ccagccgggagatgc

SEQ ID NO: 1037244 - DNA, 15 bp, Homo sapiens
cagccgggagatgcg

SEQ ID NO: 1037245 - DNA, 15 bp, Homo sapiens
agccgggagatgcga

SEQ ID NO: 1037246 - DNA, 15 bp, Homo sapiens
gccgggagatgcgag

SEQ ID NO: 1037247 - DNA, 15 bp, Homo sapiens
ccgggagatgcgagt

SEQ ID NO: 1037248 - DNA, 15 bp, Homo sapiens
cgggagatgcgagtc

SEQ ID NO: 1037249 - DNA, 15 bp, Homo sapiens
gggagatgcgagtcc

SEQ ID NO: 1037250 - DNA, 15 bp, Homo sapiens
ggagatgcgagtccc

SEQ ID NO: 1037251 - DNA, 15 bp, Homo sapiens
gagatgcgagtcccg

SEQ ID NO: 1037252 - DNA, 15 bp, Homo sapiens
agatgcgagtcccgc

SEQ ID NO: 1037253 - DNA, 15 bp, Homo sapiens
gatgcgagtcccgcg

SEQ ID NO: 1037254 - DNA, 15 bp, Homo sapiens
atgcgagtcccgcgg

SEQ ID NO: 1037255 - DNA, 15 bp, Homo sapiens
tgcgagtcccgcgga

SEQ ID NO: 1037256 - DNA, 15 bp, Homo sapiens
gcgagtcccgcggag

SEQ ID NO: 1037257 - DNA, 15 bp, Homo sapiens
cgagtcccgcggagc

SEQ ID NO: 1037258 - DNA, 15 bp, Homo sapiens
gagtcccgcggagcc

SEQ ID NO: 1037259 - DNA, 15 bp, Homo sapiens
agtcccgcggagccc

SEQ ID NO: 1037260 - DNA, 15 bp, Homo sapiens
gtcccgcggagcccg

SEQ ID NO: 1037261 - DNA, 15 bp, Homo sapiens
tcccgcggagcccgc

SEQ ID NO: 1037262 - DNA, 15 bp, Homo sapiens
cccgcggagcccgcg

SEQ ID NO: 1037263 - DNA, 15 bp, Homo sapiens
ccgcggagcccgcgc

SEQ ID NO: 1037264 - DNA, 15 bp, Homo sapiens
cgcggagcccgcgcc

SEQ ID NO: 1037265 - DNA, 15 bp, Homo sapiens
gcggagcccgcgccc

SEQ ID NO: 1037266 - DNA, 15 bp, Homo sapiens
cggagcccgcgcccg

SEQ ID NO: 1037267 - DNA, 15 bp, Homo sapiens
ggagcccgcgcccgg

SEQ ID NO: 1037268 - DNA, 15 bp, Homo sapiens
gagcccgcgcccggc

SEQ ID NO: 1037269 - DNA, 15 bp, Homo sapiens
agcccgcgcccggcg

SEQ ID NO: 1037270 - DNA, 15 bp, Homo sapiens
gcccgcgcccggcgg

SEQ ID NO: 1037271 - DNA, 15 bp, Homo sapiens
cccgcgcccggcgga

SEQ ID NO: 1037272 - DNA, 15 bp, Homo sapiens
ccgcgcccggcggac

SEQ ID NO: 1037273 - DNA, 15 bp, Homo sapiens
cgcgcccggcggacg

SEQ ID NO: 1037274 - DNA, 15 bp, Homo sapiens
gcgcccggcggacgg

SEQ ID NO: 1037275 - DNA, 15 bp, Homo sapiens
cgcccggcggacgga

SEQ ID NO: 1037276 - DNA, 15 bp, Homo sapiens
gcccggcggacggac

SEQ ID NO: 1037277 - DNA, 15 bp, Homo sapiens
cccggcggacggacc

SEQ ID NO: 1037278 - DNA, 15 bp, Homo sapiens
ccggcggacggaccg

SEQ ID NO: 1037279 - DNA, 15 bp, Homo sapiens
cggcggacggaccga

SEQ ID NO: 1037280 - DNA, 15 bp, Homo sapiens
ggcggacggaccgat

SEQ ID NO: 1037281 - DNA, 15 bp, Homo sapiens
gcggacggaccgatg

SEQ ID NO: 1037282 - DNA, 15 bp, Homo sapiens
cggacggaccgatgg

SEQ ID NO: 1037283 - DNA, 15 bp, Homo sapiens
ggacggaccgatgga

SEQ ID NO: 1037284 - DNA, 15 bp, Homo sapiens
gacggaccgatggac

SEQ ID NO: 1037285 - DNA, 15 bp, Homo sapiens
acggaccgatggaca

SEQ ID NO: 1037286 - DNA, 15 bp, Homo sapiens
cggaccgatggacaa

SEQ ID NO: 1037287 - DNA, 15 bp, Homo sapiens
ggaccgatggacaaa

SEQ ID NO: 1037288 - DNA, 15 bp, Homo sapiens
gaccgatggacaaag

SEQ ID NO: 1037289 - DNA, 15 bp, Homo sapiens
accgatggacaaagc

SEQ ID NO: 1037290 - DNA, 15 bp, Homo sapiens
ccgatggacaaagcc

SEQ ID NO: 1037291 - DNA, 15 bp, Homo sapiens
cgatggacaaagccg

SEQ ID NO: 1037292 - DNA, 15 bp, Homo sapiens
gatggacaaagccgg

SEQ ID NO: 1037293 - DNA, 15 bp, Homo sapiens
atggacaaagccggg

SEQ ID NO: 1037294 - DNA, 15 bp, Homo sapiens
tggacaaagccgggg

SEQ ID NO: 1037295 - DNA, 15 bp, Homo sapiens
ggacaaagccgggga

SEQ ID NO: 1037296 - DNA, 15 bp, Homo sapiens
gacaaagccggggag

SEQ ID NO: 1037297 - DNA, 15 bp, Homo sapiens
acaaagccggggaga

SEQ ID NO: 1037298 - DNA, 15 bp, Homo sapiens
caaagccggggagag

SEQ ID NO: 1037299 - DNA, 15 bp, Homo sapiens
aaagccggggagagc

SEQ ID NO: 1037300 - DNA, 15 bp, Homo sapiens
aagccggggagagct

SEQ ID NO: 1037301 - DNA, 15 bp, Homo sapiens
agccggggagagctc

SEQ ID NO: 1037302 - DNA, 15 bp, Homo sapiens
gccggggagagctcg

SEQ ID NO: 1037303 - DNA, 15 bp, Homo sapiens
ccggggagagctcgg

SEQ ID NO: 1037304 - DNA, 15 bp, Homo sapiens
cggggagagctcggg

SEQ ID NO: 1037305 - DNA, 15 bp, Homo sapiens
ggggagagctcgggc

SEQ ID NO: 1037306 - DNA, 15 bp, Homo sapiens
gggagagctcgggcg

SEQ ID NO: 1037307 - DNA, 15 bp, Homo sapiens
ggagagctcgggcgc

SEQ ID NO: 1037308 - DNA, 15 bp, Homo sapiens
gagagctcgggcgcg

SEQ ID NO: 1037309 - DNA, 15 bp, Homo sapiens
agagctcgggcgcgg

SEQ ID NO: 1037310 - DNA, 15 bp, Homo sapiens
gagctcgggcgcggc

SEQ ID NO: 1037311 - DNA, 15 bp, Homo sapiens
agctcgggcgcggcc

SEQ ID NO: 1037312 - DNA, 15 bp, Homo sapiens
gctcgggcgcggccg

SEQ ID NO: 1037313 - DNA, 15 bp, Homo sapiens
ctcgggcgcggccgg

SEQ ID NO: 1037314 - DNA, 15 bp, Homo sapiens
tcgggcgcggccggg

SEQ ID NO: 1037315 - DNA, 15 bp, Homo sapiens
cgggcgcggccgggg

SEQ ID NO: 1037316 - DNA, 15 bp, Homo sapiens
gggcgcggccggggc

SEQ ID NO: 1037317 - DNA, 15 bp, Homo sapiens
ggcgcggccggggcg

SEQ ID NO: 1037318 - DNA, 15 bp, Homo sapiens
gcgcggccggggcgg

SEQ ID NO: 1037319 - DNA, 15 bp, Homo sapiens
cgcggccggggcggg

SEQ ID NO: 1037320 - DNA, 15 bp, Homo sapiens
gcggccggggcgggg

SEQ ID NO: 1037321 - DNA, 15 bp, Homo sapiens
cggccggggcggggg

SEQ ID NO: 1037322 - DNA, 15 bp, Homo sapiens
ggccggggcgggggc

SEQ ID NO: 1037323 - DNA, 15 bp, Homo sapiens
gccggggcgggggcc

SEQ ID NO: 1037324 - DNA, 15 bp, Homo sapiens
ccggggcgggggccg

SEQ ID NO: 1037325 - DNA, 15 bp, Homo sapiens
cggggcgggggccgg

SEQ ID NO: 1037326 - DNA, 15 bp, Homo sapiens
ggggcgggggccggt

SEQ ID NO: 1037327 - DNA, 15 bp, Homo sapiens
gggcgggggccggtg

SEQ ID NO: 1037328 - DNA, 15 bp, Homo sapiens
ggcgggggccggtgc

SEQ ID NO: 1037329 - DNA, 15 bp, Homo sapiens
gcgggggccggtgcc

SEQ ID NO: 1037330 - DNA, 15 bp, Homo sapiens
cgggggccggtgccc

SEQ ID NO: 1037331 - DNA, 15 bp, Homo sapiens
gggggccggtgcccg

SEQ ID NO: 1037332 - DNA, 15 bp, Homo sapiens
ggggccggtgcccgc

SEQ ID NO: 1037333 - DNA, 15 bp, Homo sapiens
gggccggtgcccgca

SEQ ID NO: 1037334 - DNA, 15 bp, Homo sapiens
ggccggtgcccgcag

SEQ ID NO: 1037335 - DNA, 15 bp, Homo sapiens
gccggtgcccgcagg

SEQ ID NO: 1037336 - DNA, 15 bp, Homo sapiens
ccggtgcccgcaggg

SEQ ID NO: 1037337 - DNA, 15 bp, Homo sapiens
cggtgcccgcaggga

SEQ ID NO: 1037338 - DNA, 15 bp, Homo sapiens
ggtgcccgcagggac

SEQ ID NO: 1037339 - DNA, 15 bp, Homo sapiens
gtgcccgcagggacc

SEQ ID NO: 1037340 - DNA, 15 bp, Homo sapiens
tgcccgcagggaccc

SEQ ID NO: 1037341 - DNA, 15 bp, Homo sapiens
gcccgcagggacccg

SEQ ID NO: 1037342 - DNA, 15 bp, Homo sapiens
cccgcagggacccgg

SEQ ID NO: 1037343 - DNA, 15 bp, Homo sapiens
ccgcagggacccggg

SEQ ID NO: 1037344 - DNA, 15 bp, Homo sapiens
cgcagggacccgggc

SEQ ID NO: 1037345 - DNA, 15 bp, Homo sapiens
gcagggacccgggcg

SEQ ID NO: 1037346 - DNA, 15 bp, Homo sapiens
cagggacccgggcgc

SEQ ID NO: 1037347 - DNA, 15 bp, Homo sapiens
agggacccgggcgca

SEQ ID NO: 1037348 - DNA, 15 bp, Homo sapiens
gggacccgggcgcag

SEQ ID NO: 1037349 - DNA, 15 bp, Homo sapiens
ggacccgggcgcagc

SEQ ID NO: 1037350 - DNA, 15 bp, Homo sapiens
gacccgggcgcagcg

SEQ ID NO: 1037351 - DNA, 15 bp, Homo sapiens
acccgggcgcagcgg

SEQ ID NO: 1037352 - DNA, 15 bp, Homo sapiens
cccgggcgcagcggg

SEQ ID NO: 1037353 - DNA, 15 bp, Homo sapiens
ccgggcgcagcgggg

SEQ ID NO: 1037354 - DNA, 15 bp, Homo sapiens
cgggcgcagcgggga

SEQ ID NO: 1037355 - DNA, 15 bp, Homo sapiens
gggcgcagcggggaa

SEQ ID NO: 1037356 - DNA, 15 bp, Homo sapiens
ggcgcagcggggaaa

SEQ ID NO: 1037357 - DNA, 15 bp, Homo sapiens
gcgcagcggggaaag

SEQ ID NO: 1037358 - DNA, 15 bp, Homo sapiens
cgcagcggggaaagg

SEQ ID NO: 1037359 - DNA, 15 bp, Homo sapiens
gcagcggggaaagga

SEQ ID NO: 1037360 - DNA, 15 bp, Homo sapiens
cagcggggaaaggag

SEQ ID NO: 1037361 - DNA, 15 bp, Homo sapiens
agcggggaaaggagg

SEQ ID NO: 1037362 - DNA, 15 bp, Homo sapiens
gcggggaaaggaggg

SEQ ID NO: 1037363 - DNA, 15 bp, Homo sapiens
cggggaaaggagggg

SEQ ID NO: 1037364 - DNA, 15 bp, Homo sapiens
ggggaaaggaggggc

SEQ ID NO: 1037365 - DNA, 15 bp, Homo sapiens
gggaaaggaggggcg

SEQ ID NO: 1037366 - DNA, 15 bp, Homo sapiens
ggaaaggaggggcgg

SEQ ID NO: 1037367 - DNA, 15 bp, Homo sapiens
gaaaggaggggcggg

SEQ ID NO: 1037368 - DNA, 15 bp, Homo sapiens
aaaggaggggcgggc

SEQ ID NO: 1037369 - DNA, 15 bp, Homo sapiens
aaggaggggcgggca

SEQ ID NO: 1037370 - DNA, 15 bp, Homo sapiens
aggaggggcgggcaa

SEQ ID NO: 1037371 - DNA, 15 bp, Homo sapiens
ggaggggcgggcaag

SEQ ID NO: 1037372 - DNA, 15 bp, Homo sapiens
gaggggcgggcaagc

SEQ ID NO: 1037373 - DNA, 15 bp, Homo sapiens
aggggcgggcaagcg

SEQ ID NO: 1037374 - DNA, 15 bp, Homo sapiens
ggggcgggcaagcgg

SEQ ID NO: 1037375 - DNA, 15 bp, Homo sapiens
gggcgggcaagcggc

SEQ ID NO: 1037376 - DNA, 15 bp, Homo sapiens
ggcgggcaagcggcg

SEQ ID NO: 1037377 - DNA, 15 bp, Homo sapiens
gcgggcaagcggcga

SEQ ID NO: 1037378 - DNA, 15 bp, Homo sapiens
cgggcaagcggcgag

SEQ ID NO: 1037379 - DNA, 15 bp, Homo sapiens
gggcaagcggcgaga

SEQ ID NO: 1037380 - DNA, 15 bp, Homo sapiens
ggcaagcggcgagaa

SEQ ID NO: 1037381 - DNA, 15 bp, Homo sapiens
gcaagcggcgagaag

SEQ ID NO: 1037382 - DNA, 15 bp, Homo sapiens
caagcggcgagaagg

SEQ ID NO: 1037383 - DNA, 15 bp, Homo sapiens
aagcggcgagaaggg

SEQ ID NO: 1037384 - DNA, 15 bp, Homo sapiens
agcggcgagaagggg

SEQ ID NO: 1037385 - DNA, 15 bp, Homo sapiens
gcggcgagaagggga

SEQ ID NO: 1037386 - DNA, 15 bp, Homo sapiens
cggcgagaaggggaa

SEQ ID NO: 1037387 - DNA, 15 bp, Homo sapiens
ggcgagaaggggaag

SEQ ID NO: 1037388 - DNA, 15 bp, Homo sapiens
gcgagaaggggaagg

SEQ ID NO: 1037389 - DNA, 15 bp, Homo sapiens
cgagaaggggaagga

SEQ ID NO: 1037390 - DNA, 15 bp, Homo sapiens
gagaaggggaaggaa

SEQ ID NO: 1037391 - DNA, 15 bp, Homo sapiens
agaaggggaaggaag

SEQ ID NO: 1037392 - DNA, 15 bp, Homo sapiens
gaaggggaaggaagc

SEQ ID NO: 1037393 - DNA, 15 bp, Homo sapiens
aaggggaaggaagcg

SEQ ID NO: 1037394 - DNA, 15 bp, Homo sapiens
aggggaaggaagcgg

SEQ ID NO: 1037395 - DNA, 15 bp, Homo sapiens
ggggaaggaagcgga

SEQ ID NO: 1037396 - DNA, 15 bp, Homo sapiens
gggaaggaagcggag

SEQ ID NO: 1037397 - DNA, 15 bp, Homo sapiens
ggaaggaagcggagg

SEQ ID NO: 1037398 - DNA, 15 bp, Homo sapiens
gaaggaagcggaggt

SEQ ID NO: 1037399 - DNA, 15 bp, Homo sapiens
aaggaagcggaggtg

SEQ ID NO: 1037400 - DNA, 15 bp, Homo sapiens
aggaagcggaggtgc

SEQ ID NO: 1037401 - DNA, 15 bp, Homo sapiens
ggaagcggaggtgcc

SEQ ID NO: 1037402 - DNA, 15 bp, Homo sapiens
gaagcggaggtgccg

SEQ ID NO: 1037403 - DNA, 15 bp, Homo sapiens
aagcggaggtgccgg

SEQ ID NO: 1037404 - DNA, 15 bp, Homo sapiens
agcggaggtgccggg

SEQ ID NO: 1037405 - DNA, 15 bp, Homo sapiens
gcggaggtgccgggc

SEQ ID NO: 1037406 - DNA, 15 bp, Homo sapiens
cggaggtgccgggcg

SEQ ID NO: 1037407 - DNA, 15 bp, Homo sapiens
ggaggtgccgggcgg

SEQ ID NO: 1037408 - DNA, 15 bp, Homo sapiens
gaggtgccgggcggg

SEQ ID NO: 1037409 - DNA, 15 bp, Homo sapiens
aggtgccgggcgggc

SEQ ID NO: 1037410 - DNA, 15 bp, Homo sapiens
ggtgccgggcgggcg

SEQ ID NO: 1037411 - DNA, 15 bp, Homo sapiens
gtgccgggcgggcgc

SEQ ID NO: 1037412 - DNA, 15 bp, Homo sapiens
tgccgggcgggcgcg

SEQ ID NO: 1037413 - DNA, 15 bp, Homo sapiens
gccgggcgggcgcgg

SEQ ID NO: 1037414 - DNA, 15 bp, Homo sapiens
ccgggcgggcgcggg

SEQ ID NO: 1037415 - DNA, 15 bp, Homo sapiens
cgggcgggcgcgggg

SEQ ID NO: 1037416 - DNA, 15 bp, Homo sapiens
gggcgggcgcggggc

SEQ ID NO: 1037417 - DNA, 15 bp, Homo sapiens
ggcgggcgcggggcg

SEQ ID NO: 1037418 - DNA, 15 bp, Homo sapiens
gcgggcgcggggcgc

SEQ ID NO: 1037419 - DNA, 15 bp, Homo sapiens
cgggcgcggggcgcg

SEQ ID NO: 1037420 - DNA, 15 bp, Homo sapiens
gggcgcggggcgcgg

SEQ ID NO: 1037421 - DNA, 15 bp, Homo sapiens
ggcgcggggcgcggg

SEQ ID NO: 1037422 - DNA, 15 bp, Homo sapiens
gcgcggggcgcgggc

SEQ ID NO: 1037423 - DNA, 15 bp, Homo sapiens
cgcggggcgcgggca

SEQ ID NO: 1037424 - DNA, 15 bp, Homo sapiens
gcggggcgcgggcag

SEQ ID NO: 1037425 - DNA, 15 bp, Homo sapiens
cggggcgcgggcagg

SEQ ID NO: 1037426 - DNA, 15 bp, Homo sapiens
ggggcgcgggcagga

SEQ ID NO: 1037427 - DNA, 15 bp, Homo sapiens
gggcgcgggcaggaa

SEQ ID NO: 1037428 - DNA, 15 bp, Homo sapiens
ggcgcgggcaggaag

SEQ ID NO: 1037429 - DNA, 15 bp, Homo sapiens
gcgcgggcaggaagc

SEQ ID NO: 1037430 - DNA, 15 bp, Homo sapiens
cgcgggcaggaagcg

SEQ ID NO: 1037431 - DNA, 15 bp, Homo sapiens
gcgggcaggaagcgg

SEQ ID NO: 1037432 - DNA, 15 bp, Homo sapiens
cgggcaggaagcggg

SEQ ID NO: 1037433 - DNA, 15 bp, Homo sapiens
gggcaggaagcgggg

SEQ ID NO: 1037434 - DNA, 15 bp, Homo sapiens
ggcaggaagcgggga

SEQ ID NO: 1037435 - DNA, 15 bp, Homo sapiens
gcaggaagcggggag

SEQ ID NO: 1037436 - DNA, 15 bp, Homo sapiens
caggaagcggggagg

SEQ ID NO: 1037437 - DNA, 15 bp, Homo sapiens
aggaagcggggaggg

SEQ ID NO: 1037438 - DNA, 15 bp, Homo sapiens
ggaagcggggagggg

SEQ ID NO: 1037439 - DNA, 15 bp, Homo sapiens
gaagcggggaggggc

SEQ ID NO: 1037440 - DNA, 15 bp, Homo sapiens
aagcggggaggggcg

SEQ ID NO: 1037441 - DNA, 15 bp, Homo sapiens
agcggggaggggcgg

SEQ ID NO: 1037442 - DNA, 15 bp, Homo sapiens
gcggggaggggcggc

SEQ ID NO: 1037443 - DNA, 15 bp, Homo sapiens
cggggaggggcggcg

SEQ ID NO: 1037444 - DNA, 15 bp, Homo sapiens
ggggaggggcggcgg

SEQ ID NO: 1037445 - DNA, 15 bp, Homo sapiens
gggaggggcggcggg

SEQ ID NO: 1037446 - DNA, 15 bp, Homo sapiens
ggaggggcggcgggg

SEQ ID NO: 1037447 - DNA, 15 bp, Homo sapiens
gaggggcggcggggc

SEQ ID NO: 1037448 - DNA, 15 bp, Homo sapiens
aggggcggcggggcg

SEQ ID NO: 1037449 - DNA, 15 bp, Homo sapiens
ggggcggcggggcgg

SEQ ID NO: 1037450 - DNA, 15 bp, Homo sapiens
gggcggcggggcggg

SEQ ID NO: 1037451 - DNA, 15 bp, Homo sapiens
ggcggcggggcgggg

SEQ ID NO: 1037452 - DNA, 15 bp, Homo sapiens
gcggcggggcggggg

SEQ ID NO: 1037453 - DNA, 15 bp, Homo sapiens
cggcggggcgggggc

SEQ ID NO: 1037454 - DNA, 15 bp, Homo sapiens
ggcggggcgggggcc

SEQ ID NO: 1037455 - DNA, 15 bp, Homo sapiens
gcggggcgggggcct

SEQ ID NO: 1037456 - DNA, 15 bp, Homo sapiens
cggggcgggggcctc

SEQ ID NO: 1037457 - DNA, 15 bp, Homo sapiens
ggggcgggggcctcc

SEQ ID NO: 1037458 - DNA, 15 bp, Homo sapiens
gggcgggggcctccg

SEQ ID NO: 1037459 - DNA, 15 bp, Homo sapiens
ggcgggggcctccgg

SEQ ID NO: 1037460 - DNA, 15 bp, Homo sapiens
gcgggggcctccgga

SEQ ID NO: 1037461 - DNA, 15 bp, Homo sapiens
cgggggcctccggaa

SEQ ID NO: 1037462 - DNA, 15 bp, Homo sapiens
gggggcctccggaaa

SEQ ID NO: 1037463 - DNA, 15 bp, Homo sapiens
ggggcctccggaaaa

SEQ ID NO: 1037464 - DNA, 15 bp, Homo sapiens
gggcctccggaaaaa

SEQ ID NO: 1037465 - DNA, 15 bp, Homo sapiens
ggcctccggaaaaac

SEQ ID NO: 1037466 - DNA, 15 bp, Homo sapiens
gcctccggaaaaacg

SEQ ID NO: 1037467 - DNA, 15 bp, Homo sapiens
cctccggaaaaacgc

SEQ ID NO: 1037468 - DNA, 15 bp, Homo sapiens
ctccggaaaaacgcc

SEQ ID NO: 1037469 - DNA, 15 bp, Homo sapiens
tccggaaaaacgccc

SEQ ID NO: 1037470 - DNA, 15 bp, Homo sapiens
ccggaaaaacgcccc

SEQ ID NO: 1037471 - DNA, 15 bp, Homo sapiens
cggaaaaacgccccg

SEQ ID NO: 1037472 - DNA, 15 bp, Homo sapiens
ggaaaaacgccccga

SEQ ID NO: 1037473 - DNA, 15 bp, Homo sapiens
gaaaaacgccccgac

SEQ ID NO: 1037474 - DNA, 15 bp, Homo sapiens
aaaaacgccccgact

SEQ ID NO: 1037475 - DNA, 15 bp, Homo sapiens
aaaacgccccgactt

SEQ ID NO: 1037476 - DNA, 15 bp, Homo sapiens
aaacgccccgacttc

SEQ ID NO: 1037477 - DNA, 15 bp, Homo sapiens
aacgccccgacttcc

SEQ ID NO: 1037478 - DNA, 15 bp, Homo sapiens
acgccccgacttcct

SEQ ID NO: 1037479 - DNA, 15 bp, Homo sapiens
cgccccgacttcctg

SEQ ID NO: 1037480 - DNA, 15 bp, Homo sapiens
gccccgacttcctgc

SEQ ID NO: 1037481 - DNA, 15 bp, Homo sapiens
ccccgacttcctgcc

SEQ ID NO: 1037482 - DNA, 15 bp, Homo sapiens
cccgacttcctgccc

SEQ ID NO: 1037483 - DNA, 15 bp, Homo sapiens
ccgacttcctgcccc

SEQ ID NO: 1037484 - DNA, 15 bp, Homo sapiens
cgacttcctgccccg

SEQ ID NO: 1037485 - DNA, 15 bp, Homo sapiens
gacttcctgccccgc

SEQ ID NO: 1037486 - DNA, 15 bp, Homo sapiens
acttcctgccccgcc

SEQ ID NO: 1037487 - DNA, 15 bp, Homo sapiens
cttcctgccccgcca

SEQ ID NO: 1037488 - DNA, 15 bp, Homo sapiens
ttcctgccccgccag

SEQ ID NO: 1037489 - DNA, 15 bp, Homo sapiens
tcctgccccgccaga

SEQ ID NO: 1037490 - DNA, 15 bp, Homo sapiens
cctgccccgccagag

SEQ ID NO: 1037491 - DNA, 15 bp, Homo sapiens
ctgccccgccagagc

SEQ ID NO: 1037492 - DNA, 15 bp, Homo sapiens
tgccccgccagagcc

SEQ ID NO: 1037493 - DNA, 15 bp, Homo sapiens
gccccgccagagcca

SEQ ID NO: 1037494 - DNA, 15 bp, Homo sapiens
ccccgccagagccag

SEQ ID NO: 1037495 - DNA, 15 bp, Homo sapiens
cccgccagagccagg

SEQ ID NO: 1037496 - DNA, 15 bp, Homo sapiens
ccgccagagccagga

SEQ ID NO: 1037497 - DNA, 15 bp, Homo sapiens
cgccagagccaggaa

SEQ ID NO: 1037498 - DNA, 15 bp, Homo sapiens
gccagagccaggaag

SEQ ID NO: 1037499 - DNA, 15 bp, Homo sapiens
ccagagccaggaagc

SEQ ID NO: 1037500 - DNA, 15 bp, Homo sapiens
cagagccaggaagcg

SEQ ID NO: 1037501 - DNA, 15 bp, Homo sapiens
agagccaggaagcgg

SEQ ID NO: 1037502 - DNA, 15 bp, Homo sapiens
gagccaggaagcggg

SEQ ID NO: 1037503 - DNA, 15 bp, Homo sapiens
agccaggaagcggga

SEQ ID NO: 1037504 - DNA, 15 bp, Homo sapiens
gccaggaagcgggag

SEQ ID NO: 1037505 - DNA, 15 bp, Homo sapiens
ccaggaagcgggagc

SEQ ID NO: 1037506 - DNA, 15 bp, Homo sapiens
caggaagcgggagcc

SEQ ID NO: 1037507 - DNA, 15 bp, Homo sapiens
aggaagcgggagccg

SEQ ID NO: 1037508 - DNA, 15 bp, Homo sapiens
ggaagcgggagccgg

SEQ ID NO: 1037509 - DNA, 15 bp, Homo sapiens
gaagcgggagccggg

SEQ ID NO: 1037510 - DNA, 15 bp, Homo sapiens
aagcgggagccggga

SEQ ID NO: 1037511 - DNA, 15 bp, Homo sapiens
agcgggagccgggac

SEQ ID NO: 1037512 - DNA, 15 bp, Homo sapiens
gcgggagccgggacc

SEQ ID NO: 1037513 - DNA, 15 bp, Homo sapiens
cgggagccgggaccc

SEQ ID NO: 1037514 - DNA, 15 bp, Homo sapiens
gggagccgggaccca

SEQ ID NO: 1037515 - DNA, 15 bp, Homo sapiens
ggagccgggacccag

SEQ ID NO: 1037516 - DNA, 15 bp, Homo sapiens
gagccgggacccagg

SEQ ID NO: 1037517 - DNA, 15 bp, Homo sapiens
agccgggacccaggg

SEQ ID NO: 1037518 - DNA, 15 bp, Homo sapiens
gccgggacccagggc

SEQ ID NO: 1037519 - DNA, 15 bp, Homo sapiens
ccgggacccagggcc

SEQ ID NO: 1037520 - DNA, 15 bp, Homo sapiens
cgggacccagggccc

SEQ ID NO: 1037521 - DNA, 15 bp, Homo sapiens
gggacccagggcccg

SEQ ID NO: 1037522 - DNA, 15 bp, Homo sapiens
ggacccagggcccgg

SEQ ID NO: 1037523 - DNA, 15 bp, Homo sapiens
gacccagggcccggg

SEQ ID NO: 1037524 - DNA, 15 bp, Homo sapiens
acccagggcccggga

SEQ ID NO: 1037525 - DNA, 15 bp, Homo sapiens
cccagggcccgggat

SEQ ID NO: 1037526 - DNA, 15 bp, Homo sapiens
ccagggcccgggatc

SEQ ID NO: 1037527 - DNA, 15 bp, Homo sapiens
cagggcccgggatcg

SEQ ID NO: 1037528 - DNA, 15 bp, Homo sapiens
agggcccgggatcgc

SEQ ID NO: 1037529 - DNA, 15 bp, Homo sapiens
gggcccgggatcgcc

SEQ ID NO: 1037530 - DNA, 15 bp, Homo sapiens
ggcccgggatcgccg

SEQ ID NO: 1037531 - DNA, 15 bp, Homo sapiens
gcccgggatcgccga

SEQ ID NO: 1037532 - DNA, 15 bp, Homo sapiens
tagaaagcctccctc

SEQ ID NO: 1037533 - DNA, 15 bp, Homo sapiens
agaaagcctccctcg

SEQ ID NO: 1037534 - DNA, 15 bp, Homo sapiens
gaaagcctccctcgg

SEQ ID NO: 1037535 - DNA, 15 bp, Homo sapiens
aaagcctccctcgga

SEQ ID NO: 1037536 - DNA, 15 bp, Homo sapiens
aagcctccctcggag

SEQ ID NO: 1037537 - DNA, 15 bp, Homo sapiens
agcctccctcggagc

SEQ ID NO: 1037538 - DNA, 15 bp, Homo sapiens
gcctccctcggagca

SEQ ID NO: 1037539 - DNA, 15 bp, Homo sapiens
cctccctcggagcac

SEQ ID NO: 1037540 - DNA, 15 bp, Homo sapiens
ctccctcggagcact

SEQ ID NO: 1037541 - DNA, 15 bp, Homo sapiens
tccctcggagcactc

SEQ ID NO: 1037542 - DNA, 15 bp, Homo sapiens
ccctcggagcactca

SEQ ID NO: 1037543 - DNA, 15 bp, Homo sapiens
cctcggagcactcaa

SEQ ID NO: 1037544 - DNA, 15 bp, Homo sapiens
ctcggagcactcaag

SEQ ID NO: 1037545 - DNA, 15 bp, Homo sapiens
tcggagcactcaagg

SEQ ID NO: 1037546 - DNA, 15 bp, Homo sapiens
cggagcactcaagga

SEQ ID NO: 1037547 - DNA, 15 bp, Homo sapiens
ggagcactcaaggac

SEQ ID NO: 1037548 - DNA, 15 bp, Homo sapiens
gagcactcaaggact

SEQ ID NO: 1037549 - DNA, 15 bp, Homo sapiens
agcactcaaggactg

SEQ ID NO: 1037550 - DNA, 15 bp, Homo sapiens
gcactcaaggactga

SEQ ID NO: 1037551 - DNA, 15 bp, Homo sapiens
cactcaaggactgag

SEQ ID NO: 1037552 - DNA, 15 bp, Homo sapiens
actcaaggactgagc

SEQ ID NO: 1037553 - DNA, 15 bp, Homo sapiens
ctcaaggactgagcc

SEQ ID NO: 1037554 - DNA, 15 bp, Homo sapiens
tcaaggactgagcct

SEQ ID NO: 1037555 - DNA, 15 bp, Homo sapiens
caaggactgagcctg

SEQ ID NO: 1037556 - DNA, 15 bp, Homo sapiens
aaggactgagcctgc

SEQ ID NO: 1037557 - DNA, 15 bp, Homo sapiens
aggactgagcctgcc

SEQ ID NO: 1037558 - DNA, 15 bp, Homo sapiens
ggactgagcctgcct

SEQ ID NO: 1037559 - DNA, 15 bp, Homo sapiens
gactgagcctgcctt

SEQ ID NO: 1037560 - DNA, 15 bp, Homo sapiens
actgagcctgcctta

SEQ ID NO: 1037561 - DNA, 15 bp, Homo sapiens
ctgagcctgccttac

SEQ ID NO: 1037562 - DNA, 15 bp, Homo sapiens
tgagcctgccttacc

SEQ ID NO: 1037563 - DNA, 15 bp, Homo sapiens
gagcctgccttaccc

SEQ ID NO: 1037564 - DNA, 15 bp, Homo sapiens
agcctgccttaccca

SEQ ID NO: 1037565 - DNA, 15 bp, Homo sapiens
gcctgccttacccac

SEQ ID NO: 1037566 - DNA, 15 bp, Homo sapiens
cctgccttacccacg

SEQ ID NO: 1037567 - DNA, 15 bp, Homo sapiens
ctgccttacccacgt

SEQ ID NO: 1037568 - DNA, 15 bp, Homo sapiens
tgccttacccacgtg

SEQ ID NO: 1037569 - DNA, 15 bp, Homo sapiens
gccttacccacgtgc

SEQ ID NO: 1037570 - DNA, 15 bp, Homo sapiens
ccttacccacgtgct

SEQ ID NO: 1037571 - DNA, 15 bp, Homo sapiens
cttacccacgtgctg

SEQ ID NO: 1037572 - DNA, 15 bp, Homo sapiens
ttacccacgtgctgg

SEQ ID NO: 1037573 - DNA, 15 bp, Homo sapiens
tacccacgtgctggg

SEQ ID NO: 1037574 - DNA, 15 bp, Homo sapiens
acccacgtgctgggg

SEQ ID NO: 1037575 - DNA, 15 bp, Homo sapiens
cccacgtgctgggga

SEQ ID NO: 1037576 - DNA, 15 bp, Homo sapiens
ccacgtgctggggac

SEQ ID NO: 1037577 - DNA, 15 bp, Homo sapiens
cacgtgctggggaca

SEQ ID NO: 1037578 - DNA, 15 bp, Homo sapiens
acgtgctggggacac

SEQ ID NO: 1037579 - DNA, 15 bp, Homo sapiens
cgtgctggggacacc

SEQ ID NO: 1037580 - DNA, 15 bp, Homo sapiens
gtgctggggacacca

SEQ ID NO: 1037581 - DNA, 15 bp, Homo sapiens
tgctggggacaccac

SEQ ID NO: 1037582 - DNA, 15 bp, Homo sapiens
gctggggacaccacc

SEQ ID NO: 1037583 - DNA, 15 bp, Homo sapiens
ctggggacaccaccc

SEQ ID NO: 1037584 - DNA, 15 bp, Homo sapiens
tggggacaccaccct

SEQ ID NO: 1037585 - DNA, 15 bp, Homo sapiens
ggggacaccaccctc

SEQ ID NO: 1037586 - DNA, 15 bp, Homo sapiens
gggacaccaccctcc

SEQ ID NO: 1037587 - DNA, 15 bp, Homo sapiens
ggacaccaccctcct

SEQ ID NO: 1037588 - DNA, 15 bp, Homo sapiens
gacaccaccctcctg

SEQ ID NO: 1037589 - DNA, 15 bp, Homo sapiens
acaccaccctcctgt

SEQ ID NO: 1037590 - DNA, 15 bp, Homo sapiens
caccaccctcctgtc

SEQ ID NO: 1037591 - DNA, 15 bp, Homo sapiens
accaccctcctgtcc

SEQ ID NO: 1037592 - DNA, 15 bp, Homo sapiens
ccaccctcctgtccc

SEQ ID NO: 1037593 - DNA, 15 bp, Homo sapiens
caccctcctgtccct

SEQ ID NO: 1037594 - DNA, 15 bp, Homo sapiens
accctcctgtccctg

SEQ ID NO: 1037595 - DNA, 15 bp, Homo sapiens
ccctcctgtccctgt

SEQ ID NO: 1037596 - DNA, 15 bp, Homo sapiens
cctcctgtccctgtg

SEQ ID NO: 1037597 - DNA, 15 bp, Homo sapiens
ctcctgtccctgtgt

SEQ ID NO: 1037598 - DNA, 15 bp, Homo sapiens
tcctgtccctgtgta

SEQ ID NO: 1037599 - DNA, 15 bp, Homo sapiens
cctgtccctgtgtaa

SEQ ID NO: 1037600 - DNA, 15 bp, Homo sapiens
ctgtccctgtgtaac

SEQ ID NO: 1037601 - DNA, 15 bp, Homo sapiens
tgtccctgtgtaacc

SEQ ID NO: 1037602 - DNA, 15 bp, Homo sapiens
gtccctgtgtaaccc

SEQ ID NO: 1037603 - DNA, 15 bp, Homo sapiens
tccctgtgtaaccca

SEQ ID NO: 1037604 - DNA, 15 bp, Homo sapiens
ccctgtgtaacccag

SEQ ID NO: 1037605 - DNA, 15 bp, Homo sapiens
cctgtgtaacccagg

SEQ ID NO: 1037606 - DNA, 15 bp, Homo sapiens
ctgtgtaacccagga

SEQ ID NO: 1037607 - DNA, 15 bp, Homo sapiens
tgtgtaacccaggag

SEQ ID NO: 1037608 - DNA, 15 bp, Homo sapiens
gtgtaacccaggagt

SEQ ID NO: 1037609 - DNA, 15 bp, Homo sapiens
tgtaacccaggagtc

SEQ ID NO: 1037610 - DNA, 15 bp, Homo sapiens
gtaacccaggagtct

SEQ ID NO: 1037611 - DNA, 15 bp, Homo sapiens
taacccaggagtctc

SEQ ID NO: 1037612 - DNA, 15 bp, Homo sapiens
aacccaggagtctct

SEQ ID NO: 1037613 - DNA, 15 bp, Homo sapiens
acccaggagtctctt

SEQ ID NO: 1037614 - DNA, 15 bp, Homo sapiens
cccaggagtctcttc

SEQ ID NO: 1037615 - DNA, 15 bp, Homo sapiens
ccaggagtctcttct

SEQ ID NO: 1037616 - DNA, 15 bp, Homo sapiens
caggagtctcttctc

SEQ ID NO: 1037617 - DNA, 15 bp, Homo sapiens
aggagtctcttctca

SEQ ID NO: 1037618 - DNA, 15 bp, Homo sapiens
ggagtctcttctcag

SEQ ID NO: 1037619 - DNA, 15 bp, Homo sapiens
gagtctcttctcagt

SEQ ID NO: 1037620 - DNA, 15 bp, Homo sapiens
agtctcttctcagta

SEQ ID NO: 1037621 - DNA, 15 bp, Homo sapiens
gtctcttctcagtaa

SEQ ID NO: 1037622 - DNA, 15 bp, Homo sapiens
tctcttctcagtaac

SEQ ID NO: 1037623 - DNA, 15 bp, Homo sapiens
ctcttctcagtaact

SEQ ID NO: 1037624 - DNA, 15 bp, Homo sapiens
tcttctcagtaactt

SEQ ID NO: 1037625 - DNA, 15 bp, Homo sapiens
cttctcagtaacttc

SEQ ID NO: 1037626 - DNA, 15 bp, Homo sapiens
ttctcagtaacttca

SEQ ID NO: 1037627 - DNA, 15 bp, Homo sapiens
tctcagtaacttcat

SEQ ID NO: 1037628 - DNA, 15 bp, Homo sapiens
ctcagtaacttcatt

SEQ ID NO: 1037629 - DNA, 15 bp, Homo sapiens
tcagtaacttcattc

SEQ ID NO: 1037630 - DNA, 15 bp, Homo sapiens
cagtaacttcattca

SEQ ID NO: 1037631 - DNA, 15 bp, Homo sapiens
agtaacttcattcag

SEQ ID NO: 1037632 - DNA, 15 bp, Homo sapiens
gtaacttcattcaga

SEQ ID NO: 1037633 - DNA, 15 bp, Homo sapiens
taacttcattcagaa

SEQ ID NO: 1037634 - DNA, 15 bp, Homo sapiens
aacttcattcagaaa

SEQ ID NO: 1037635 - DNA, 15 bp, Homo sapiens
acttcattcagaaaa

SEQ ID NO: 1037636 - DNA, 15 bp, Homo sapiens
cttcattcagaaaat

SEQ ID NO: 1037637 - DNA, 15 bp, Homo sapiens
ttcattcagaaaatg

SEQ ID NO: 1037638 - DNA, 15 bp, Homo sapiens
tcattcagaaaatga

SEQ ID NO: 1037639 - DNA, 15 bp, Homo sapiens
cattcagaaaatgag

SEQ ID NO: 1037640 - DNA, 15 bp, Homo sapiens
attcagaaaatgagg

SEQ ID NO: 1037641 - DNA, 15 bp, Homo sapiens
ttcagaaaatgaggg

SEQ ID NO: 1037642 - DNA, 15 bp, Homo sapiens
tcagaaaatgagggg

SEQ ID NO: 1037643 - DNA, 15 bp, Homo sapiens
cagaaaatgagggga

SEQ ID NO: 1037644 - DNA, 15 bp, Homo sapiens
agaaaatgaggggac

SEQ ID NO: 1037645 - DNA, 15 bp, Homo sapiens
gaaaatgaggggact

SEQ ID NO: 1037646 - DNA, 15 bp, Homo sapiens
aaaatgaggggactg

SEQ ID NO: 1037647 - DNA, 15 bp, Homo sapiens
aaatgaggggactgg

SEQ ID NO: 1037648 - DNA, 15 bp, Homo sapiens
aatgaggggactggc

SEQ ID NO: 1037649 - DNA, 15 bp, Homo sapiens
atgaggggactggcc

SEQ ID NO: 1037650 - DNA, 15 bp, Homo sapiens
tgaggggactggcca

SEQ ID NO: 1037651 - DNA, 15 bp, Homo sapiens
gaggggactggccag

SEQ ID NO: 1037652 - DNA, 15 bp, Homo sapiens
aggggactggccagc

SEQ ID NO: 1037653 - DNA, 15 bp, Homo sapiens
ggggactggccagca

SEQ ID NO: 1037654 - DNA, 15 bp, Homo sapiens
gggactggccagcac

SEQ ID NO: 1037655 - DNA, 15 bp, Homo sapiens
ggactggccagcact

SEQ ID NO: 1037656 - DNA, 15 bp, Homo sapiens
gactggccagcactt

SEQ ID NO: 1037657 - DNA, 15 bp, Homo sapiens
actggccagcacttc

SEQ ID NO: 1037658 - DNA, 15 bp, Homo sapiens
ctggccagcacttca

SEQ ID NO: 1037659 - DNA, 15 bp, Homo sapiens
tggccagcacttcag

SEQ ID NO: 1037660 - DNA, 15 bp, Homo sapiens
ggccagcacttcagg

SEQ ID NO: 1037661 - DNA, 15 bp, Homo sapiens
gccagcacttcaggg

SEQ ID NO: 1037662 - DNA, 15 bp, Homo sapiens
ccagcacttcaggga

SEQ ID NO: 1037663 - DNA, 15 bp, Homo sapiens
cagcacttcagggac

SEQ ID NO: 1037664 - DNA, 15 bp, Homo sapiens
agcacttcagggacc

SEQ ID NO: 1037665 - DNA, 15 bp, Homo sapiens
gcacttcagggacca

SEQ ID NO: 1037666 - DNA, 15 bp, Homo sapiens
cacttcagggaccag

SEQ ID NO: 1037667 - DNA, 15 bp, Homo sapiens
acttcagggaccaga

SEQ ID NO: 1037668 - DNA, 15 bp, Homo sapiens
cttcagggaccagaa

SEQ ID NO: 1037669 - DNA, 15 bp, Homo sapiens
ttcagggaccagaag

SEQ ID NO: 1037670 - DNA, 15 bp, Homo sapiens
tcagggaccagaagg

SEQ ID NO: 1037671 - DNA, 15 bp, Homo sapiens
cagggaccagaaggc

SEQ ID NO: 1037672 - DNA, 15 bp, Homo sapiens
agggaccagaaggca

SEQ ID NO: 1037673 - DNA, 15 bp, Homo sapiens
gggaccagaaggcag

SEQ ID NO: 1037674 - DNA, 15 bp, Homo sapiens
ggaccagaaggcagg

SEQ ID NO: 1037675 - DNA, 15 bp, Homo sapiens
gaccagaaggcaggc

SEQ ID NO: 1037676 - DNA, 15 bp, Homo sapiens
accagaaggcaggcc

SEQ ID NO: 1037677 - DNA, 15 bp, Homo sapiens
ccagaaggcaggcca

SEQ ID NO: 1037678 - DNA, 15 bp, Homo sapiens
cagaaggcaggccag

SEQ ID NO: 1037679 - DNA, 15 bp, Homo sapiens
agaaggcaggccagg

SEQ ID NO: 1037680 - DNA, 15 bp, Homo sapiens
gaaggcaggccaggt

SEQ ID NO: 1037681 - DNA, 15 bp, Homo sapiens
aaggcaggccaggtg

SEQ ID NO: 1037682 - DNA, 15 bp, Homo sapiens
aggcaggccaggtgg

SEQ ID NO: 1037683 - DNA, 15 bp, Homo sapiens
ggcaggccaggtggg

SEQ ID NO: 1037684 - DNA, 15 bp, Homo sapiens
gcaggccaggtgggg

SEQ ID NO: 1037685 - DNA, 15 bp, Homo sapiens
caggccaggtggggt

SEQ ID NO: 1037686 - DNA, 15 bp, Homo sapiens
aggccaggtggggtg

SEQ ID NO: 1037687 - DNA, 15 bp, Homo sapiens
ggccaggtggggtgt

SEQ ID NO: 1037688 - DNA, 15 bp, Homo sapiens
gccaggtggggtgtg

SEQ ID NO: 1037689 - DNA, 15 bp, Homo sapiens
ccaggtggggtgtgg

SEQ ID NO: 1037690 - DNA, 15 bp, Homo sapiens
caggtggggtgtggt

SEQ ID NO: 1037691 - DNA, 15 bp, Homo sapiens
aggtggggtgtggtg

SEQ ID NO: 1037692 - DNA, 15 bp, Homo sapiens
ggtggggtgtggtgg

SEQ ID NO: 1037693 - DNA, 15 bp, Homo sapiens
gtggggtgtggtgga

SEQ ID NO: 1037694 - DNA, 15 bp, Homo sapiens
tggggtgtggtggag

SEQ ID NO: 1037695 - DNA, 15 bp, Homo sapiens
ggggtgtggtggagg

SEQ ID NO: 1037696 - DNA, 15 bp, Homo sapiens
gggtgtggtggagga

SEQ ID NO: 1037697 - DNA, 15 bp, Homo sapiens
ggtgtggtggaggac

SEQ ID NO: 1037698 - DNA, 15 bp, Homo sapiens
gtgtggtggaggact

SEQ ID NO: 1037699 - DNA, 15 bp, Homo sapiens
tgtggtggaggactt

SEQ ID NO: 1037700 - DNA, 15 bp, Homo sapiens
gtggtggaggacttc

SEQ ID NO: 1037701 - DNA, 15 bp, Homo sapiens
tggtggaggacttca

SEQ ID NO: 1037702 - DNA, 15 bp, Homo sapiens
ggtggaggacttcag

SEQ ID NO: 1037703 - DNA, 15 bp, Homo sapiens
gtggaggacttcagg

SEQ ID NO: 1037704 - DNA, 15 bp, Homo sapiens
tggaggacttcaggg

SEQ ID NO: 1037705 - DNA, 15 bp, Homo sapiens
ggaggacttcagggg

SEQ ID NO: 1037706 - DNA, 15 bp, Homo sapiens
gaggacttcaggggg

SEQ ID NO: 1037707 - DNA, 15 bp, Homo sapiens
aggacttcagggggg

SEQ ID NO: 1037708 - DNA, 15 bp, Homo sapiens
ggacttcaggggggc

SEQ ID NO: 1037709 - DNA, 15 bp, Homo sapiens
gacttcaggggggcg

SEQ ID NO: 1037710 - DNA, 15 bp, Homo sapiens
acttcaggggggcgt

SEQ ID NO: 1037711 - DNA, 15 bp, Homo sapiens
cttcaggggggcgtg

SEQ ID NO: 1037712 - DNA, 15 bp, Homo sapiens
ttcaggggggcgtgg

SEQ ID NO: 1037713 - DNA, 15 bp, Homo sapiens
tcaggggggcgtgga

SEQ ID NO: 1037714 - DNA, 15 bp, Homo sapiens
caggggggcgtggag

SEQ ID NO: 1037715 - DNA, 15 bp, Homo sapiens
aggggggcgtggagg

SEQ ID NO: 1037716 - DNA, 15 bp, Homo sapiens
ggggggcgtggaggg

SEQ ID NO: 1037717 - DNA, 15 bp, Homo sapiens
gggggcgtggagggc

SEQ ID NO: 1037718 - DNA, 15 bp, Homo sapiens
ggggcgtggagggct

SEQ ID NO: 1037719 - DNA, 15 bp, Homo sapiens
gggcgtggagggctt

SEQ ID NO: 1037720 - DNA, 15 bp, Homo sapiens
ggcgtggagggcttc

SEQ ID NO: 1037721 - DNA, 15 bp, Homo sapiens
gcgtggagggcttca

SEQ ID NO: 1037722 - DNA, 15 bp, Homo sapiens
cgtggagggcttcag

SEQ ID NO: 1037723 - DNA, 15 bp, Homo sapiens
gtggagggcttcagg

SEQ ID NO: 1037724 - DNA, 15 bp, Homo sapiens
tggagggcttcaggg

SEQ ID NO: 1037725 - DNA, 15 bp, Homo sapiens
ggagggcttcaggga

SEQ ID NO: 1037726 - DNA, 15 bp, Homo sapiens
gagggcttcagggat

SEQ ID NO: 1037727 - DNA, 15 bp, Homo sapiens
agggcttcagggata

SEQ ID NO: 1037728 - DNA, 15 bp, Homo sapiens
gggcttcagggatac

SEQ ID NO: 1037729 - DNA, 15 bp, Homo sapiens
ggcttcagggataca

SEQ ID NO: 1037730 - DNA, 15 bp, Homo sapiens
gcttcagggatacac

SEQ ID NO: 1037731 - DNA, 15 bp, Homo sapiens
cttcagggatacact

SEQ ID NO: 1037732 - DNA, 15 bp, Homo sapiens
ttcagggatacactc

SEQ ID NO: 1037733 - DNA, 15 bp, Homo sapiens
tcagggatacactca

SEQ ID NO: 1037734 - DNA, 15 bp, Homo sapiens
cagggatacactcac

SEQ ID NO: 1037735 - DNA, 15 bp, Homo sapiens
agggatacactcacc

SEQ ID NO: 1037736 - DNA, 15 bp, Homo sapiens
gggatacactcaccc

SEQ ID NO: 1037737 - DNA, 15 bp, Homo sapiens
ggatacactcaccca

SEQ ID NO: 1037738 - DNA, 15 bp, Homo sapiens
gatacactcacccat

SEQ ID NO: 1037739 - DNA, 15 bp, Homo sapiens
atacactcacccatc

SEQ ID NO: 1037740 - DNA, 15 bp, Homo sapiens
tacactcacccatct

SEQ ID NO: 1037741 - DNA, 15 bp, Homo sapiens
acactcacccatcta

SEQ ID NO: 1037742 - DNA, 15 bp, Homo sapiens
cactcacccatctaa

SEQ ID NO: 1037743 - DNA, 15 bp, Homo sapiens
actcacccatctaag

SEQ ID NO: 1037744 - DNA, 15 bp, Homo sapiens
ctcacccatctaagg

SEQ ID NO: 1037745 - DNA, 15 bp, Homo sapiens
tcacccatctaaggg

SEQ ID NO: 1037746 - DNA, 15 bp, Homo sapiens
cacccatctaagggc

SEQ ID NO: 1037747 - DNA, 15 bp, Homo sapiens
acccatctaagggca

SEQ ID NO: 1037748 - DNA, 15 bp, Homo sapiens
cccatctaagggcaa

SEQ ID NO: 1037749 - DNA, 15 bp, Homo sapiens
ccatctaagggcaac

SEQ ID NO: 1037750 - DNA, 15 bp, Homo sapiens
catctaagggcaact

SEQ ID NO: 1037751 - DNA, 15 bp, Homo sapiens
atctaagggcaactg

SEQ ID NO: 1037752 - DNA, 15 bp, Homo sapiens
tctaagggcaactgc

SEQ ID NO: 1037753 - DNA, 15 bp, Homo sapiens
ctaagggcaactgcc

SEQ ID NO: 1037754 - DNA, 15 bp, Homo sapiens
taagggcaactgcca

SEQ ID NO: 1037755 - DNA, 15 bp, Homo sapiens
aagggcaactgccac

SEQ ID NO: 1037756 - DNA, 15 bp, Homo sapiens
agggcaactgccact

SEQ ID NO: 1037757 - DNA, 15 bp, Homo sapiens
gggcaactgccactt

SEQ ID NO: 1037758 - DNA, 15 bp, Homo sapiens
ggcaactgccactta

SEQ ID NO: 1037759 - DNA, 15 bp, Homo sapiens
gcaactgccacttag

SEQ ID NO: 1037760 - DNA, 15 bp, Homo sapiens
caactgccacttagt

SEQ ID NO: 1037761 - DNA, 15 bp, Homo sapiens
aactgccacttagtg

SEQ ID NO: 1037762 - DNA, 15 bp, Homo sapiens
actgccacttagtgc

SEQ ID NO: 1037763 - DNA, 15 bp, Homo sapiens
ctgccacttagtgcc

SEQ ID NO: 1037764 - DNA, 15 bp, Homo sapiens
tgccacttagtgcca

SEQ ID NO: 1037765 - DNA, 15 bp, Homo sapiens
gccacttagtgccag

SEQ ID NO: 1037766 - DNA, 15 bp, Homo sapiens
ccacttagtgccagc

SEQ ID NO: 1037767 - DNA, 15 bp, Homo sapiens
cacttagtgccagcc

SEQ ID NO: 1037768 - DNA, 15 bp, Homo sapiens
acttagtgccagccc

SEQ ID NO: 1037769 - DNA, 15 bp, Homo sapiens
cttagtgccagccca

SEQ ID NO: 1037770 - DNA, 15 bp, Homo sapiens
ttagtgccagcccac

SEQ ID NO: 1037771 - DNA, 15 bp, Homo sapiens
tagtgccagcccact

SEQ ID NO: 1037772 - DNA, 15 bp, Homo sapiens
agtgccagcccactt

SEQ ID NO: 1037773 - DNA, 15 bp, Homo sapiens
gtgccagcccacttc

SEQ ID NO: 1037774 - DNA, 15 bp, Homo sapiens
tgccagcccacttct

SEQ ID NO: 1037775 - DNA, 15 bp, Homo sapiens
gccagcccacttctc

SEQ ID NO: 1037776 - DNA, 15 bp, Homo sapiens
ccagcccacttctct

SEQ ID NO: 1037777 - DNA, 15 bp, Homo sapiens
cagcccacttctctc

SEQ ID NO: 1037778 - DNA, 15 bp, Homo sapiens
agcccacttctctcc

SEQ ID NO: 1037779 - DNA, 15 bp, Homo sapiens
gcccacttctctccc

SEQ ID NO: 1037780 - DNA, 15 bp, Homo sapiens
cccacttctctccct

SEQ ID NO: 1037781 - DNA, 15 bp, Homo sapiens
ccacttctctccctt

SEQ ID NO: 1037782 - DNA, 15 bp, Homo sapiens
cacttctctcccttt

SEQ ID NO: 1037783 - DNA, 15 bp, Homo sapiens
acttctctccctttt

SEQ ID NO: 1037784 - DNA, 15 bp, Homo sapiens
cttctctcccttttt

SEQ ID NO: 1037785 - DNA, 15 bp, Homo sapiens
ttctctccctttttt

SEQ ID NO: 1037786 - DNA, 15 bp, Homo sapiens
tctctcccttttttc

SEQ ID NO: 1037787 - DNA, 15 bp, Homo sapiens
ctctcccttttttct

SEQ ID NO: 1037788 - DNA, 15 bp, Homo sapiens
tctcccttttttctt

SEQ ID NO: 1037789 - DNA, 15 bp, Homo sapiens
ctcccttttttcttt

SEQ ID NO: 1037790 - DNA, 15 bp, Homo sapiens
tcccttttttctttt

SEQ ID NO: 1037791 - DNA, 15 bp, Homo sapiens
cccttttttcttttt

SEQ ID NO: 1037792 - DNA, 15 bp, Homo sapiens
ccttttttctttttt

SEQ ID NO: 1037793 - DNA, 15 bp, Homo sapiens
cttttttcttttttc

SEQ ID NO: 1037794 - DNA, 15 bp, Homo sapiens
ttttttcttttttct

SEQ ID NO: 1037795 - DNA, 15 bp, Homo sapiens
tttttcttttttctt

SEQ ID NO: 1037796 - DNA, 15 bp, Homo sapiens
ttttcttttttcttt

SEQ ID NO: 1037797 - DNA, 15 bp, Homo sapiens
tttcttttttctttt

SEQ ID NO: 1037798 - DNA, 15 bp, Homo sapiens
ttcttttttcttttt

SEQ ID NO: 1037799 - DNA, 15 bp, Homo sapiens
tcttttttctttttc

SEQ ID NO: 1037800 - DNA, 15 bp, Homo sapiens
cttttttctttttcc

SEQ ID NO: 1037801 - DNA, 15 bp, Homo sapiens
ttttttctttttccc

SEQ ID NO: 1037802 - DNA, 15 bp, Homo sapiens
tttttctttttcccc

SEQ ID NO: 1037803 - DNA, 15 bp, Homo sapiens
ttttctttttccccc

SEQ ID NO: 1037804 - DNA, 15 bp, Homo sapiens
tttctttttccccca

SEQ ID NO: 1037805 - DNA, 15 bp, Homo sapiens
ttctttttcccccag

SEQ ID NO: 1037806 - DNA, 15 bp, Homo sapiens
tctttttcccccagg

SEQ ID NO: 1037807 - DNA, 15 bp, Homo sapiens
ctttttcccccaggg

SEQ ID NO: 1037808 - DNA, 15 bp, Homo sapiens
tttttcccccagggt

SEQ ID NO: 1037809 - DNA, 15 bp, Homo sapiens
ttttcccccagggtc

SEQ ID NO: 1037810 - DNA, 15 bp, Homo sapiens
tttcccccagggtct

SEQ ID NO: 1037811 - DNA, 15 bp, Homo sapiens
ttcccccagggtctt

SEQ ID NO: 1037812 - DNA, 15 bp, Homo sapiens
tcccccagggtcttg

SEQ ID NO: 1037813 - DNA, 15 bp, Homo sapiens
cccccagggtcttgc

SEQ ID NO: 1037814 - DNA, 15 bp, Homo sapiens
ccccagggtcttgct

SEQ ID NO: 1037815 - DNA, 15 bp, Homo sapiens
cccagggtcttgctg

SEQ ID NO: 1037816 - DNA, 15 bp, Homo sapiens
ccagggtcttgctgt

SEQ ID NO: 1037817 - DNA, 15 bp, Homo sapiens
cagggtcttgctgtc

SEQ ID NO: 1037818 - DNA, 15 bp, Homo sapiens
agggtcttgctgtca

SEQ ID NO: 1037819 - DNA, 15 bp, Homo sapiens
gggtcttgctgtcac

SEQ ID NO: 1037820 - DNA, 15 bp, Homo sapiens
ggtcttgctgtcacc

SEQ ID NO: 1037821 - DNA, 15 bp, Homo sapiens
gtcttgctgtcaccc

SEQ ID NO: 1037822 - DNA, 15 bp, Homo sapiens
tcttgctgtcaccca

SEQ ID NO: 1037823 - DNA, 15 bp, Homo sapiens
cttgctgtcacccag

SEQ ID NO: 1037824 - DNA, 15 bp, Homo sapiens
ttgctgtcacccagg

SEQ ID NO: 1037825 - DNA, 15 bp, Homo sapiens
tgctgtcacccaggc

SEQ ID NO: 1037826 - DNA, 15 bp, Homo sapiens
gctgtcacccaggct

SEQ ID NO: 1037827 - DNA, 15 bp, Homo sapiens
ctgtcacccaggctg

SEQ ID NO: 1037828 - DNA, 15 bp, Homo sapiens
tgtcacccaggctgg

SEQ ID NO: 1037829 - DNA, 15 bp, Homo sapiens
gtcacccaggctgga

SEQ ID NO: 1037830 - DNA, 15 bp, Homo sapiens
tcacccaggctggag

SEQ ID NO: 1037831 - DNA, 15 bp, Homo sapiens
cacccaggctggagt

SEQ ID NO: 1037832 - DNA, 15 bp, Homo sapiens
acccaggctggagtg

SEQ ID NO: 1037833 - DNA, 15 bp, Homo sapiens
ccaggctggagtgcg

SEQ ID NO: 1037834 - DNA, 15 bp, Homo sapiens
caggctggagtgcgg

SEQ ID NO: 1037835 - DNA, 15 bp, Homo sapiens
aggctggagtgcggt

SEQ ID NO: 1037836 - DNA, 15 bp, Homo sapiens
ggctggagtgcggtg

SEQ ID NO: 1037837 - DNA, 15 bp, Homo sapiens
gctggagtgcggtgg

SEQ ID NO: 1037838 - DNA, 15 bp, Homo sapiens
ctggagtgcggtggt

SEQ ID NO: 1037839 - DNA, 15 bp, Homo sapiens
tggagtgcggtggta

SEQ ID NO: 1037840 - DNA, 15 bp, Homo sapiens
ggagtgcggtggtaa

SEQ ID NO: 1037841 - DNA, 15 bp, Homo sapiens
gagtgcggtggtaag

SEQ ID NO: 1037842 - DNA, 15 bp, Homo sapiens
agtgcggtggtaaga

SEQ ID NO: 1037843 - DNA, 15 bp, Homo sapiens
gtgcggtggtaagat

SEQ ID NO: 1037844 - DNA, 15 bp, Homo sapiens
tgcggtggtaagatc

SEQ ID NO: 1037845 - DNA, 15 bp, Homo sapiens
gcggtggtaagatca

SEQ ID NO: 1037846 - DNA, 15 bp, Homo sapiens
cggtggtaagatcag

SEQ ID NO: 1037847 - DNA, 15 bp, Homo sapiens
ggtggtaagatcagg

SEQ ID NO: 1037848 - DNA, 15 bp, Homo sapiens
gtggtaagatcaggg

SEQ ID NO: 1037849 - DNA, 15 bp, Homo sapiens
tggtaagatcagggc

SEQ ID NO: 1037850 - DNA, 15 bp, Homo sapiens
ggtaagatcagggct

SEQ ID NO: 1037851 - DNA, 15 bp, Homo sapiens
gtaagatcagggctc

SEQ ID NO: 1037852 - DNA, 15 bp, Homo sapiens
taagatcagggctca

SEQ ID NO: 1037853 - DNA, 15 bp, Homo sapiens
aagatcagggctcac

SEQ ID NO: 1037854 - DNA, 15 bp, Homo sapiens
agatcagggctcact

SEQ ID NO: 1037855 - DNA, 15 bp, Homo sapiens
gatcagggctcactg

SEQ ID NO: 1037856 - DNA, 15 bp, Homo sapiens
atcagggctcactgc

SEQ ID NO: 1037857 - DNA, 15 bp, Homo sapiens
tcagggctcactgca

SEQ ID NO: 1037858 - DNA, 15 bp, Homo sapiens
cagggctcactgcag

SEQ ID NO: 1037859 - DNA, 15 bp, Homo sapiens
agggctcactgcagc

SEQ ID NO: 1037860 - DNA, 15 bp, Homo sapiens
gggctcactgcagcc

SEQ ID NO: 1037861 - DNA, 15 bp, Homo sapiens
ggctcactgcagcct

SEQ ID NO: 1037862 - DNA, 15 bp, Homo sapiens
gctcactgcagcctt

SEQ ID NO: 1037863 - DNA, 15 bp, Homo sapiens
ctcactgcagccttg

SEQ ID NO: 1037864 - DNA, 15 bp, Homo sapiens
tcactgcagccttga

SEQ ID NO: 1037865 - DNA, 15 bp, Homo sapiens
cactgcagccttgaa

SEQ ID NO: 1037866 - DNA, 15 bp, Homo sapiens
actgcagccttgaac

SEQ ID NO: 1037867 - DNA, 15 bp, Homo sapiens
ctgcagccttgaact

SEQ ID NO: 1037868 - DNA, 15 bp, Homo sapiens
tgcagccttgaactc

SEQ ID NO: 1037869 - DNA, 15 bp, Homo sapiens
gcagccttgaactct

SEQ ID NO: 1037870 - DNA, 15 bp, Homo sapiens
cagccttgaactctg

SEQ ID NO: 1037871 - DNA, 15 bp, Homo sapiens
agccttgaactctgg

SEQ ID NO: 1037872 - DNA, 15 bp, Homo sapiens
gccttgaactctggg

SEQ ID NO: 1037873 - DNA, 15 bp, Homo sapiens
ccttgaactctggga

SEQ ID NO: 1037874 - DNA, 15 bp, Homo sapiens
cttgaactctgggac

SEQ ID NO: 1037875 - DNA, 15 bp, Homo sapiens
ttgaactctgggact

SEQ ID NO: 1037876 - DNA, 15 bp, Homo sapiens
tgaactctgggactc

SEQ ID NO: 1037877 - DNA, 15 bp, Homo sapiens
gaactctgggactca

SEQ ID NO: 1037878 - DNA, 15 bp, Homo sapiens
aactctgggactcaa

SEQ ID NO: 1037879 - DNA, 15 bp, Homo sapiens
actctgggactcaag

SEQ ID NO: 1037880 - DNA, 15 bp, Homo sapiens
ctctgggactcaagg

SEQ ID NO: 1037881 - DNA, 15 bp, Homo sapiens
tctgggactcaaggg

SEQ ID NO: 1037882 - DNA, 15 bp, Homo sapiens
ctgggactcaaggga

SEQ ID NO: 1037883 - DNA, 15 bp, Homo sapiens
tgggactcaagggat

SEQ ID NO: 1037884 - DNA, 15 bp, Homo sapiens
gggactcaagggatc

SEQ ID NO: 1037885 - DNA, 15 bp, Homo sapiens
ggactcaagggatcc

SEQ ID NO: 1037886 - DNA, 15 bp, Homo sapiens
gactcaagggatcct

SEQ ID NO: 1037887 - DNA, 15 bp, Homo sapiens
actcaagggatcctt

SEQ ID NO: 1037888 - DNA, 15 bp, Homo sapiens
ctcaagggatccttc

SEQ ID NO: 1037889 - DNA, 15 bp, Homo sapiens
tcaagggatccttct

SEQ ID NO: 1037890 - DNA, 15 bp, Homo sapiens
caagggatccttctg

SEQ ID NO: 1037891 - DNA, 15 bp, Homo sapiens
aagggatccttctgc

SEQ ID NO: 1037892 - DNA, 15 bp, Homo sapiens
agggatccttctgcc

SEQ ID NO: 1037893 - DNA, 15 bp, Homo sapiens
gggatccttctgcct

SEQ ID NO: 1037894 - DNA, 15 bp, Homo sapiens
ggatccttctgcctc

SEQ ID NO: 1037895 - DNA, 15 bp, Homo sapiens
gatccttctgcctca

SEQ ID NO: 1037896 - DNA, 15 bp, Homo sapiens
atccttctgcctcag

SEQ ID NO: 1037897 - DNA, 15 bp, Homo sapiens
tccttctgcctcagc

SEQ ID NO: 1037898 - DNA, 15 bp, Homo sapiens
ccttctgcctcagcc

SEQ ID NO: 1037899 - DNA, 15 bp, Homo sapiens
cttctgcctcagcct

SEQ ID NO: 1037900 - DNA, 15 bp, Homo sapiens
ttctgcctcagcctc

SEQ ID NO: 1037901 - DNA, 15 bp, Homo sapiens
tctgcctcagcctcc

SEQ ID NO: 1037902 - DNA, 15 bp, Homo sapiens
ctgcctcagcctcct

SEQ ID NO: 1037903 - DNA, 15 bp, Homo sapiens
tgcctcagcctcctg

SEQ ID NO: 1037904 - DNA, 15 bp, Homo sapiens
gcctcagcctcctga

SEQ ID NO: 1037905 - DNA, 15 bp, Homo sapiens
tcagcctcctgagta

SEQ ID NO: 1037906 - DNA, 15 bp, Homo sapiens
cagcctcctgagtag

SEQ ID NO: 1037907 - DNA, 15 bp, Homo sapiens
agcctcctgagtagc

SEQ ID NO: 1037908 - DNA, 15 bp, Homo sapiens
gcctcctgagtagct

SEQ ID NO: 1037909 - DNA, 15 bp, Homo sapiens
cctcctgagtagctg

SEQ ID NO: 1037910 - DNA, 15 bp, Homo sapiens
ctcctgagtagctgg

SEQ ID NO: 1037911 - DNA, 15 bp, Homo sapiens
tcctgagtagctggg

SEQ ID NO: 1037912 - DNA, 15 bp, Homo sapiens
cctgagtagctgggg

SEQ ID NO: 1037913 - DNA, 15 bp, Homo sapiens
ctgagtagctggggc

SEQ ID NO: 1037914 - DNA, 15 bp, Homo sapiens
tgagtagctggggcg

SEQ ID NO: 1037915 - DNA, 15 bp, Homo sapiens
gagtagctggggcga

SEQ ID NO: 1037916 - DNA, 15 bp, Homo sapiens
agtagctggggcgac

SEQ ID NO: 1037917 - DNA, 15 bp, Homo sapiens
gtagctggggcgaca

SEQ ID NO: 1037918 - DNA, 15 bp, Homo sapiens
tagctggggcgacaa

SEQ ID NO: 1037919 - DNA, 15 bp, Homo sapiens
agctggggcgacaag

SEQ ID NO: 1037920 - DNA, 15 bp, Homo sapiens
gctggggcgacaagc

SEQ ID NO: 1037921 - DNA, 15 bp, Homo sapiens
ctggggcgacaagcg

SEQ ID NO: 1037922 - DNA, 15 bp, Homo sapiens
tggggcgacaagcgc

SEQ ID NO: 1037923 - DNA, 15 bp, Homo sapiens
ggggcgacaagcgca

SEQ ID NO: 1037924 - DNA, 15 bp, Homo sapiens
gggcgacaagcgcat

SEQ ID NO: 1037925 - DNA, 15 bp, Homo sapiens
ggcgacaagcgcatg

SEQ ID NO: 1037926 - DNA, 15 bp, Homo sapiens
gcgacaagcgcatgc

SEQ ID NO: 1037927 - DNA, 15 bp, Homo sapiens
cgacaagcgcatgcc

SEQ ID NO: 1037928 - DNA, 15 bp, Homo sapiens
gacaagcgcatgcca

SEQ ID NO: 1037929 - DNA, 15 bp, Homo sapiens
acaagcgcatgccac

SEQ ID NO: 1037930 - DNA, 15 bp, Homo sapiens
caagcgcatgccact

SEQ ID NO: 1037931 - DNA, 15 bp, Homo sapiens
aagcgcatgccactg

SEQ ID NO: 1037932 - DNA, 15 bp, Homo sapiens
agcgcatgccactgt

SEQ ID NO: 1037933 - DNA, 15 bp, Homo sapiens
gcgcatgccactgtg

SEQ ID NO: 1037934 - DNA, 15 bp, Homo sapiens
cgcatgccactgtgg

SEQ ID NO: 1037935 - DNA, 15 bp, Homo sapiens
gcatgccactgtggc

SEQ ID NO: 1037936 - DNA, 15 bp, Homo sapiens
catgccactgtggct

SEQ ID NO: 1037937 - DNA, 15 bp, Homo sapiens
atgccactgtggctg

SEQ ID NO: 1037938 - DNA, 15 bp, Homo sapiens
tgccactgtggctgg

SEQ ID NO: 1037939 - DNA, 15 bp, Homo sapiens
gccactgtggctggt

SEQ ID NO: 1037940 - DNA, 15 bp, Homo sapiens
ccactgtggctggtt

SEQ ID NO: 1037941 - DNA, 15 bp, Homo sapiens
cactgtggctggtta

SEQ ID NO: 1037942 - DNA, 15 bp, Homo sapiens
actgtggctggttaa

SEQ ID NO: 1037943 - DNA, 15 bp, Homo sapiens
ctgtggctggttaat

SEQ ID NO: 1037944 - DNA, 15 bp, Homo sapiens
tgtggctggttaatc

SEQ ID NO: 1037945 - DNA, 15 bp, Homo sapiens
gtggctggttaatct

SEQ ID NO: 1037946 - DNA, 15 bp, Homo sapiens
tggctggttaatctt

SEQ ID NO: 1037947 - DNA, 15 bp, Homo sapiens
ggctggttaatcttt

SEQ ID NO: 1037948 - DNA, 15 bp, Homo sapiens
gctggttaatctttt

SEQ ID NO: 1037949 - DNA, 15 bp, Homo sapiens
ctggttaatcttttc

SEQ ID NO: 1037950 - DNA, 15 bp, Homo sapiens
tggttaatcttttca

SEQ ID NO: 1037951 - DNA, 15 bp, Homo sapiens
ggttaatcttttcat

SEQ ID NO: 1037952 - DNA, 15 bp, Homo sapiens
gttaatcttttcatt

SEQ ID NO: 1037953 - DNA, 15 bp, Homo sapiens
ttaatcttttcattt

SEQ ID NO: 1037954 - DNA, 15 bp, Homo sapiens
taatcttttcatttt

SEQ ID NO: 1037955 - DNA, 15 bp, Homo sapiens
aatcttttcattttc

SEQ ID NO: 1037956 - DNA, 15 bp, Homo sapiens
atcttttcattttct

SEQ ID NO: 1037957 - DNA, 15 bp, Homo sapiens
tcttttcattttctg

SEQ ID NO: 1037958 - DNA, 15 bp, Homo sapiens
cttttcattttctgt

SEQ ID NO: 1037959 - DNA, 15 bp, Homo sapiens
ttttcattttctgta

SEQ ID NO: 1037960 - DNA, 15 bp, Homo sapiens
tttcattttctgtag

SEQ ID NO: 1037961 - DNA, 15 bp, Homo sapiens
ttcattttctgtaga

SEQ ID NO: 1037962 - DNA, 15 bp, Homo sapiens
tcattttctgtagag

SEQ ID NO: 1037963 - DNA, 15 bp, Homo sapiens
cattttctgtagaga

SEQ ID NO: 1037964 - DNA, 15 bp, Homo sapiens
attttctgtagagac

SEQ ID NO: 1037965 - DNA, 15 bp, Homo sapiens
ttttctgtagagact

SEQ ID NO: 1037966 - DNA, 15 bp, Homo sapiens
tttctgtagagactg

SEQ ID NO: 1037967 - DNA, 15 bp, Homo sapiens
ttctgtagagactgg

SEQ ID NO: 1037968 - DNA, 15 bp, Homo sapiens
tctgtagagactggt

SEQ ID NO: 1037969 - DNA, 15 bp, Homo sapiens
ctgtagagactggtc

SEQ ID NO: 1037970 - DNA, 15 bp, Homo sapiens
tgtagagactggtct

SEQ ID NO: 1037971 - DNA, 15 bp, Homo sapiens
gtagagactggtctc

SEQ ID NO: 1037972 - DNA, 15 bp, Homo sapiens
tagagactggtctca

SEQ ID NO: 1037973 - DNA, 15 bp, Homo sapiens
agagactggtctcac

SEQ ID NO: 1037974 - DNA, 15 bp, Homo sapiens
gagactggtctcact

SEQ ID NO: 1037975 - DNA, 15 bp, Homo sapiens
agactggtctcacta

SEQ ID NO: 1037976 - DNA, 15 bp, Homo sapiens
gactggtctcactat

SEQ ID NO: 1037977 - DNA, 15 bp, Homo sapiens
actggtctcactatg

SEQ ID NO: 1037978 - DNA, 15 bp, Homo sapiens
ctggtctcactatgt

SEQ ID NO: 1037979 - DNA, 15 bp, Homo sapiens
tggtctcactatgtt

SEQ ID NO: 1037980 - DNA, 15 bp, Homo sapiens
ggtctcactatgttg

SEQ ID NO: 1037981 - DNA, 15 bp, Homo sapiens
gtctcactatgttgc

SEQ ID NO: 1037982 - DNA, 15 bp, Homo sapiens
tctcactatgttgcc

SEQ ID NO: 1037983 - DNA, 15 bp, Homo sapiens
ctcactatgttgccc

SEQ ID NO: 1037984 - DNA, 15 bp, Homo sapiens
tcactatgttgccca

SEQ ID NO: 1037985 - DNA, 15 bp, Homo sapiens
cactatgttgcccag

SEQ ID NO: 1037986 - DNA, 15 bp, Homo sapiens
actatgttgcccagg

SEQ ID NO: 1037987 - DNA, 15 bp, Homo sapiens
ctatgttgcccaggc

SEQ ID NO: 1037988 - DNA, 15 bp, Homo sapiens
tatgttgcccaggct

SEQ ID NO: 1037989 - DNA, 15 bp, Homo sapiens
atgttgcccaggctg

SEQ ID NO: 1037990 - DNA, 15 bp, Homo sapiens
gttgcccaggctggt

SEQ ID NO: 1037991 - DNA, 15 bp, Homo sapiens
ttgcccaggctggtc

SEQ ID NO: 1037992 - DNA, 15 bp, Homo sapiens
tgcccaggctggtct

SEQ ID NO: 1037993 - DNA, 15 bp, Homo sapiens
gcccaggctggtctc

SEQ ID NO: 1037994 - DNA, 15 bp, Homo sapiens
cccaggctggtctcc

SEQ ID NO: 1037995 - DNA, 15 bp, Homo sapiens
ccaggctggtctcca

SEQ ID NO: 1037996 - DNA, 15 bp, Homo sapiens
caggctggtctccaa

SEQ ID NO: 1037997 - DNA, 15 bp, Homo sapiens
aggctggtctccaac

SEQ ID NO: 1037998 - DNA, 15 bp, Homo sapiens
ggctggtctccaact

SEQ ID NO: 1037999 - DNA, 15 bp, Homo sapiens
gctggtctccaacta

SEQ ID NO: 1038000 - DNA, 15 bp, Homo sapiens
ctggtctccaactag

SEQ ID NO: 1038001 - DNA, 15 bp, Homo sapiens
tggtctccaactagt

SEQ ID NO: 1038002 - DNA, 15 bp, Homo sapiens
ggtctccaactagtg

SEQ ID NO: 1038003 - DNA, 15 bp, Homo sapiens
gtctccaactagtgg

SEQ ID NO: 1038004 - DNA, 15 bp, Homo sapiens
tctccaactagtggc

SEQ ID NO: 1038005 - DNA, 15 bp, Homo sapiens
ctccaactagtggcc

SEQ ID NO: 1038006 - DNA, 15 bp, Homo sapiens
tccaactagtggcct

SEQ ID NO: 1038007 - DNA, 15 bp, Homo sapiens
ccaactagtggcctc

SEQ ID NO: 1038008 - DNA, 15 bp, Homo sapiens
caactagtggcctca

SEQ ID NO: 1038009 - DNA, 15 bp, Homo sapiens
aactagtggcctcaa

SEQ ID NO: 1038010 - DNA, 15 bp, Homo sapiens
actagtggcctcaag

SEQ ID NO: 1038011 - DNA, 15 bp, Homo sapiens
ctagtggcctcaagt

SEQ ID NO: 1038012 - DNA, 15 bp, Homo sapiens
tagtggcctcaagtg

SEQ ID NO: 1038013 - DNA, 15 bp, Homo sapiens
agtggcctcaagtga

SEQ ID NO: 1038014 - DNA, 15 bp, Homo sapiens
gtggcctcaagtgat

SEQ ID NO: 1038015 - DNA, 15 bp, Homo sapiens
tggcctcaagtgatc

SEQ ID NO: 1038016 - DNA, 15 bp, Homo sapiens
ggcctcaagtgatcc

SEQ ID NO: 1038017 - DNA, 15 bp, Homo sapiens
gcctcaagtgatccc

SEQ ID NO: 1038018 - DNA, 15 bp, Homo sapiens
cctcaagtgatccct

SEQ ID NO: 1038019 - DNA, 15 bp, Homo sapiens
ctcaagtgatccctc

SEQ ID NO: 1038020 - DNA, 15 bp, Homo sapiens
tcaagtgatccctca

SEQ ID NO: 1038021 - DNA, 15 bp, Homo sapiens
caagtgatccctcac

SEQ ID NO: 1038022 - DNA, 15 bp, Homo sapiens
aagtgatccctcacc

SEQ ID NO: 1038023 - DNA, 15 bp, Homo sapiens
agtgatccctcacct

SEQ ID NO: 1038024 - DNA, 15 bp, Homo sapiens
gtgatccctcacctg

SEQ ID NO: 1038025 - DNA, 15 bp, Homo sapiens
tgatccctcacctgg

SEQ ID NO: 1038026 - DNA, 15 bp, Homo sapiens
gatccctcacctgga

SEQ ID NO: 1038027 - DNA, 15 bp, Homo sapiens
atccctcacctggac

SEQ ID NO: 1038028 - DNA, 15 bp, Homo sapiens
tccctcacctggacc

SEQ ID NO: 1038029 - DNA, 15 bp, Homo sapiens
ccctcacctggacct

SEQ ID NO: 1038030 - DNA, 15 bp, Homo sapiens
cctcacctggacctt

SEQ ID NO: 1038031 - DNA, 15 bp, Homo sapiens
ctcacctggaccttc

SEQ ID NO: 1038032 - DNA, 15 bp, Homo sapiens
tcacctggaccttcc

SEQ ID NO: 1038033 - DNA, 15 bp, Homo sapiens
cacctggaccttcca

SEQ ID NO: 1038034 - DNA, 15 bp, Homo sapiens
acctggaccttccaa

SEQ ID NO: 1038035 - DNA, 15 bp, Homo sapiens
cctggaccttccaaa

SEQ ID NO: 1038036 - DNA, 15 bp, Homo sapiens
ctggaccttccaaag

SEQ ID NO: 1038037 - DNA, 15 bp, Homo sapiens
tggaccttccaaagt

SEQ ID NO: 1038038 - DNA, 15 bp, Homo sapiens
ggaccttccaaagtg

SEQ ID NO: 1038039 - DNA, 15 bp, Homo sapiens
gaccttccaaagtgc

SEQ ID NO: 1038040 - DNA, 15 bp, Homo sapiens
accttccaaagtgct

SEQ ID NO: 1038041 - DNA, 15 bp, Homo sapiens
ccttccaaagtgctg

SEQ ID NO: 1038042 - DNA, 15 bp, Homo sapiens
cttccaaagtgctgg

SEQ ID NO: 1038043 - DNA, 15 bp, Homo sapiens
ttccaaagtgctggg

SEQ ID NO: 1038044 - DNA, 15 bp, Homo sapiens
tccaaagtgctggga

SEQ ID NO: 1038045 - DNA, 15 bp, Homo sapiens
tgctgggattacagt

SEQ ID NO: 1038046 - DNA, 15 bp, Homo sapiens
gctgggattacagtt

SEQ ID NO: 1038047 - DNA, 15 bp, Homo sapiens
ctgggattacagttg

SEQ ID NO: 1038048 - DNA, 15 bp, Homo sapiens
tgggattacagttgt

SEQ ID NO: 1038049 - DNA, 15 bp, Homo sapiens
gggattacagttgtg

SEQ ID NO: 1038050 - DNA, 15 bp, Homo sapiens
ggattacagttgtgg

SEQ ID NO: 1038051 - DNA, 15 bp, Homo sapiens
gattacagttgtggg

SEQ ID NO: 1038052 - DNA, 15 bp, Homo sapiens
attacagttgtgggc

SEQ ID NO: 1038053 - DNA, 15 bp, Homo sapiens
ttacagttgtgggcc

SEQ ID NO: 1038054 - DNA, 15 bp, Homo sapiens
tacagttgtgggcca

SEQ ID NO: 1038055 - DNA, 15 bp, Homo sapiens
acagttgtgggccac

SEQ ID NO: 1038056 - DNA, 15 bp, Homo sapiens
cagttgtgggccacc

SEQ ID NO: 1038057 - DNA, 15 bp, Homo sapiens
agttgtgggccacca

SEQ ID NO: 1038058 - DNA, 15 bp, Homo sapiens
gttgtgggccaccat

SEQ ID NO: 1038059 - DNA, 15 bp, Homo sapiens
ttgtgggccaccatg

SEQ ID NO: 1038060 - DNA, 15 bp, Homo sapiens
tgtgggccaccatgc

SEQ ID NO: 1038061 - DNA, 15 bp, Homo sapiens
gtgggccaccatgca

SEQ ID NO: 1038062 - DNA, 15 bp, Homo sapiens
tgggccaccatgcac

SEQ ID NO: 1038063 - DNA, 15 bp, Homo sapiens
gggccaccatgcacc

SEQ ID NO: 1038064 - DNA, 15 bp, Homo sapiens
ggccaccatgcaccg

SEQ ID NO: 1038065 - DNA, 15 bp, Homo sapiens
gccaccatgcaccgg

SEQ ID NO: 1038066 - DNA, 15 bp, Homo sapiens
ccaccatgcaccggg

SEQ ID NO: 1038067 - DNA, 15 bp, Homo sapiens
caccatgcaccgggc

SEQ ID NO: 1038068 - DNA, 15 bp, Homo sapiens
accatgcaccgggcc

SEQ ID NO: 1038069 - DNA, 15 bp, Homo sapiens
ccatgcaccgggcct

SEQ ID NO: 1038070 - DNA, 15 bp, Homo sapiens
catgcaccgggcctg

SEQ ID NO: 1038071 - DNA, 15 bp, Homo sapiens
atgcaccgggcctgt

SEQ ID NO: 1038072 - DNA, 15 bp, Homo sapiens
tgcaccgggcctgtt

SEQ ID NO: 1038073 - DNA, 15 bp, Homo sapiens
gcaccgggcctgttc

SEQ ID NO: 1038074 - DNA, 15 bp, Homo sapiens
caccgggcctgttct

SEQ ID NO: 1038075 - DNA, 15 bp, Homo sapiens
accgggcctgttctg

SEQ ID NO: 1038076 - DNA, 15 bp, Homo sapiens
ccgggcctgttctgt

SEQ ID NO: 1038077 - DNA, 15 bp, Homo sapiens
cgggcctgttctgtt

SEQ ID NO: 1038078 - DNA, 15 bp, Homo sapiens
gggcctgttctgttt

SEQ ID NO: 1038079 - DNA, 15 bp, Homo sapiens
ggcctgttctgtttt

SEQ ID NO: 1038080 - DNA, 15 bp, Homo sapiens
gcctgttctgttttc

SEQ ID NO: 1038081 - DNA, 15 bp, Homo sapiens
cctgttctgttttct

SEQ ID NO: 1038082 - DNA, 15 bp, Homo sapiens
ctgttctgttttctt

SEQ ID NO: 1038083 - DNA, 15 bp, Homo sapiens
tgttctgttttcttg

SEQ ID NO: 1038084 - DNA, 15 bp, Homo sapiens
gttctgttttcttgg

SEQ ID NO: 1038085 - DNA, 15 bp, Homo sapiens
ttctgttttcttgga

SEQ ID NO: 1038086 - DNA, 15 bp, Homo sapiens
tctgttttcttggag

SEQ ID NO: 1038087 - DNA, 15 bp, Homo sapiens
ctgttttcttggagc

SEQ ID NO: 1038088 - DNA, 15 bp, Homo sapiens
tgttttcttggagca

SEQ ID NO: 1038089 - DNA, 15 bp, Homo sapiens
gttttcttggagcac

SEQ ID NO: 1038090 - DNA, 15 bp, Homo sapiens
ttttcttggagcact

SEQ ID NO: 1038091 - DNA, 15 bp, Homo sapiens
tttcttggagcactt

SEQ ID NO: 1038092 - DNA, 15 bp, Homo sapiens
ttcttggagcacttg

SEQ ID NO: 1038093 - DNA, 15 bp, Homo sapiens
tcttggagcacttgc

SEQ ID NO: 1038094 - DNA, 15 bp, Homo sapiens
cttggagcacttgcc

SEQ ID NO: 1038095 - DNA, 15 bp, Homo sapiens
ttggagcacttgcct

SEQ ID NO: 1038096 - DNA, 15 bp, Homo sapiens
tggagcacttgcctg

SEQ ID NO: 1038097 - DNA, 15 bp, Homo sapiens
ggagcacttgcctgc

SEQ ID NO: 1038098 - DNA, 15 bp, Homo sapiens
gagcacttgcctgca

SEQ ID NO: 1038099 - DNA, 15 bp, Homo sapiens
agcacttgcctgcaa

SEQ ID NO: 1038100 - DNA, 15 bp, Homo sapiens
gcacttgcctgcaat

SEQ ID NO: 1038101 - DNA, 15 bp, Homo sapiens
cacttgcctgcaatt

SEQ ID NO: 1038102 - DNA, 15 bp, Homo sapiens
acttgcctgcaatta

SEQ ID NO: 1038103 - DNA, 15 bp, Homo sapiens
cttgcctgcaattat

SEQ ID NO: 1038104 - DNA, 15 bp, Homo sapiens
ttgcctgcaattatc

SEQ ID NO: 1038105 - DNA, 15 bp, Homo sapiens
tgcctgcaattatcc

SEQ ID NO: 1038106 - DNA, 15 bp, Homo sapiens
gcctgcaattatcct

SEQ ID NO: 1038107 - DNA, 15 bp, Homo sapiens
cctgcaattatcctt

SEQ ID NO: 1038108 - DNA, 15 bp, Homo sapiens
ctgcaattatccttc

SEQ ID NO: 1038109 - DNA, 15 bp, Homo sapiens
tgcaattatccttca

SEQ ID NO: 1038110 - DNA, 15 bp, Homo sapiens
gcaattatccttcat

SEQ ID NO: 1038111 - DNA, 15 bp, Homo sapiens
caattatccttcatt

SEQ ID NO: 1038112 - DNA, 15 bp, Homo sapiens
aattatccttcattc

SEQ ID NO: 1038113 - DNA, 15 bp, Homo sapiens
attatccttcattca

SEQ ID NO: 1038114 - DNA, 15 bp, Homo sapiens
ttatccttcattcat

SEQ ID NO: 1038115 - DNA, 15 bp, Homo sapiens
tatccttcattcatt

SEQ ID NO: 1038116 - DNA, 15 bp, Homo sapiens
atccttcattcattt

SEQ ID NO: 1038117 - DNA, 15 bp, Homo sapiens
tccttcattcatttg

SEQ ID NO: 1038118 - DNA, 15 bp, Homo sapiens
ccttcattcatttgc

SEQ ID NO: 1038119 - DNA, 15 bp, Homo sapiens
cttcattcatttgct

SEQ ID NO: 1038120 - DNA, 15 bp, Homo sapiens
ttcattcatttgctc

SEQ ID NO: 1038121 - DNA, 15 bp, Homo sapiens
tcattcatttgctca

SEQ ID NO: 1038122 - DNA, 15 bp, Homo sapiens
cattcatttgctcac

SEQ ID NO: 1038123 - DNA, 15 bp, Homo sapiens
attcatttgctcacg

SEQ ID NO: 1038124 - DNA, 15 bp, Homo sapiens
ttcatttgctcacgt

SEQ ID NO: 1038125 - DNA, 15 bp, Homo sapiens
tcatttgctcacgtg

SEQ ID NO: 1038126 - DNA, 15 bp, Homo sapiens
catttgctcacgtgc

SEQ ID NO: 1038127 - DNA, 15 bp, Homo sapiens
atttgctcacgtgct

SEQ ID NO: 1038128 - DNA, 15 bp, Homo sapiens
tttgctcacgtgctc

SEQ ID NO: 1038129 - DNA, 15 bp, Homo sapiens
ttgctcacgtgctca

SEQ ID NO: 1038130 - DNA, 15 bp, Homo sapiens
tgctcacgtgctcat

SEQ ID NO: 1038131 - DNA, 15 bp, Homo sapiens
gctcacgtgctcatc

SEQ ID NO: 1038132 - DNA, 15 bp, Homo sapiens
ctcacgtgctcatca

SEQ ID NO: 1038133 - DNA, 15 bp, Homo sapiens
tcacgtgctcatcat

SEQ ID NO: 1038134 - DNA, 15 bp, Homo sapiens
cacgtgctcatcatt

SEQ ID NO: 1038135 - DNA, 15 bp, Homo sapiens
acgtgctcatcattg

SEQ ID NO: 1038136 - DNA, 15 bp, Homo sapiens
cgtgctcatcattgg

SEQ ID NO: 1038137 - DNA, 15 bp, Homo sapiens
gtgctcatcattggt

SEQ ID NO: 1038138 - DNA, 15 bp, Homo sapiens
tgctcatcattggtt

SEQ ID NO: 1038139 - DNA, 15 bp, Homo sapiens
gctcatcattggttt

SEQ ID NO: 1038140 - DNA, 15 bp, Homo sapiens
ctcatcattggtttc

SEQ ID NO: 1038141 - DNA, 15 bp, Homo sapiens
tcatcattggtttcc

SEQ ID NO: 1038142 - DNA, 15 bp, Homo sapiens
catcattggtttccc

SEQ ID NO: 1038143 - DNA, 15 bp, Homo sapiens
atcattggtttccct

SEQ ID NO: 1038144 - DNA, 15 bp, Homo sapiens
tcattggtttccctc

SEQ ID NO: 1038145 - DNA, 15 bp, Homo sapiens
cattggtttccctct

SEQ ID NO: 1038146 - DNA, 15 bp, Homo sapiens
attggtttccctctt

SEQ ID NO: 1038147 - DNA, 15 bp, Homo sapiens
ttggtttccctcttc

SEQ ID NO: 1038148 - DNA, 15 bp, Homo sapiens
tggtttccctcttca

SEQ ID NO: 1038149 - DNA, 15 bp, Homo sapiens
ggtttccctcttcat

SEQ ID NO: 1038150 - DNA, 15 bp, Homo sapiens
gtttccctcttcatt

SEQ ID NO: 1038151 - DNA, 15 bp, Homo sapiens
tttccctcttcatta

SEQ ID NO: 1038152 - DNA, 15 bp, Homo sapiens
ttccctcttcattag

SEQ ID NO: 1038153 - DNA, 15 bp, Homo sapiens
tccctcttcattaga

SEQ ID NO: 1038154 - DNA, 15 bp, Homo sapiens
ccctcttcattagaa

SEQ ID NO: 1038155 - DNA, 15 bp, Homo sapiens
cctcttcattagaaa

SEQ ID NO: 1038156 - DNA, 15 bp, Homo sapiens
ctcttcattagaaag

SEQ ID NO: 1038157 - DNA, 15 bp, Homo sapiens
tcttcattagaaagt

SEQ ID NO: 1038158 - DNA, 15 bp, Homo sapiens
cttcattagaaagtg

SEQ ID NO: 1038159 - DNA, 15 bp, Homo sapiens
ttcattagaaagtgg

SEQ ID NO: 1038160 - DNA, 15 bp, Homo sapiens
tcattagaaagtggg

SEQ ID NO: 1038161 - DNA, 15 bp, Homo sapiens
cattagaaagtgggg

SEQ ID NO: 1038162 - DNA, 15 bp, Homo sapiens
attagaaagtgggga

SEQ ID NO: 1038163 - DNA, 15 bp, Homo sapiens
ttagaaagtggggac

SEQ ID NO: 1038164 - DNA, 15 bp, Homo sapiens
tagaaagtggggact

SEQ ID NO: 1038165 - DNA, 15 bp, Homo sapiens
agaaagtggggactt

SEQ ID NO: 1038166 - DNA, 15 bp, Homo sapiens
gaaagtggggacttg

SEQ ID NO: 1038167 - DNA, 15 bp, Homo sapiens
aaagtggggacttgg

SEQ ID NO: 1038168 - DNA, 15 bp, Homo sapiens
aagtggggacttggt

SEQ ID NO: 1038169 - DNA, 15 bp, Homo sapiens
agtggggacttggtt

SEQ ID NO: 1038170 - DNA, 15 bp, Homo sapiens
gtggggacttggttt

SEQ ID NO: 1038171 - DNA, 15 bp, Homo sapiens
tggggacttggtttg

SEQ ID NO: 1038172 - DNA, 15 bp, Homo sapiens
ggggacttggtttgg

SEQ ID NO: 1038173 - DNA, 15 bp, Homo sapiens
gggacttggtttggg

SEQ ID NO: 1038174 - DNA, 15 bp, Homo sapiens
ggacttggtttgggt

SEQ ID NO: 1038175 - DNA, 15 bp, Homo sapiens
gacttggtttgggtt

SEQ ID NO: 1038176 - DNA, 15 bp, Homo sapiens
acttggtttgggtta

SEQ ID NO: 1038177 - DNA, 15 bp, Homo sapiens
cttggtttgggttaa

SEQ ID NO: 1038178 - DNA, 15 bp, Homo sapiens
ttggtttgggttaac

SEQ ID NO: 1038179 - DNA, 15 bp, Homo sapiens
tggtttgggttaact

SEQ ID NO: 1038180 - DNA, 15 bp, Homo sapiens
ggtttgggttaacta

SEQ ID NO: 1038181 - DNA, 15 bp, Homo sapiens
gtttgggttaactaa

SEQ ID NO: 1038182 - DNA, 15 bp, Homo sapiens
tttgggttaactaag

SEQ ID NO: 1038183 - DNA, 15 bp, Homo sapiens
ttgggttaactaagc

SEQ ID NO: 1038184 - DNA, 15 bp, Homo sapiens
tgggttaactaagct

SEQ ID NO: 1038185 - DNA, 15 bp, Homo sapiens
gggttaactaagctt

SEQ ID NO: 1038186 - DNA, 15 bp, Homo sapiens
ggttaactaagcttc

SEQ ID NO: 1038187 - DNA, 15 bp, Homo sapiens
gttaactaagcttcc

SEQ ID NO: 1038188 - DNA, 15 bp, Homo sapiens
ttaactaagcttccc

SEQ ID NO: 1038189 - DNA, 15 bp, Homo sapiens
taactaagcttccct

SEQ ID NO: 1038190 - DNA, 15 bp, Homo sapiens
aactaagcttccctg

SEQ ID NO: 1038191 - DNA, 15 bp, Homo sapiens
actaagcttccctgt

SEQ ID NO: 1038192 - DNA, 15 bp, Homo sapiens
ctaagcttccctgtg

SEQ ID NO: 1038193 - DNA, 15 bp, Homo sapiens
taagcttccctgtgc

SEQ ID NO: 1038194 - DNA, 15 bp, Homo sapiens
aagcttccctgtgca

SEQ ID NO: 1038195 - DNA, 15 bp, Homo sapiens
agcttccctgtgcat

SEQ ID NO: 1038196 - DNA, 15 bp, Homo sapiens
gcttccctgtgcatc

SEQ ID NO: 1038197 - DNA, 15 bp, Homo sapiens
cttccctgtgcatca

SEQ ID NO: 1038198 - DNA, 15 bp, Homo sapiens
ttccctgtgcatcag

SEQ ID NO: 1038199 - DNA, 15 bp, Homo sapiens
tccctgtgcatcagt

SEQ ID NO: 1038200 - DNA, 15 bp, Homo sapiens
ccctgtgcatcagtt

SEQ ID NO: 1038201 - DNA, 15 bp, Homo sapiens
cctgtgcatcagttt

SEQ ID NO: 1038202 - DNA, 15 bp, Homo sapiens
ctgtgcatcagtttt

SEQ ID NO: 1038203 - DNA, 15 bp, Homo sapiens
tgtgcatcagttttc

SEQ ID NO: 1038204 - DNA, 15 bp, Homo sapiens
gtgcatcagttttca

SEQ ID NO: 1038205 - DNA, 15 bp, Homo sapiens
tgcatcagttttcat

SEQ ID NO: 1038206 - DNA, 15 bp, Homo sapiens
gcatcagttttcatt

SEQ ID NO: 1038207 - DNA, 15 bp, Homo sapiens
catcagttttcattt

SEQ ID NO: 1038208 - DNA, 15 bp, Homo sapiens
atcagttttcatttc

SEQ ID NO: 1038209 - DNA, 15 bp, Homo sapiens
tcagttttcatttct

SEQ ID NO: 1038210 - DNA, 15 bp, Homo sapiens
cagttttcatttctt

SEQ ID NO: 1038211 - DNA, 15 bp, Homo sapiens
agttttcatttcttt

SEQ ID NO: 1038212 - DNA, 15 bp, Homo sapiens
gttttcatttctttc

SEQ ID NO: 1038213 - DNA, 15 bp, Homo sapiens
ttttcatttctttct

SEQ ID NO: 1038214 - DNA, 15 bp, Homo sapiens
tttcatttctttctt

SEQ ID NO: 1038215 - DNA, 15 bp, Homo sapiens
ttcatttctttcttt

SEQ ID NO: 1038216 - DNA, 15 bp, Homo sapiens
tcatttctttctttc

SEQ ID NO: 1038217 - DNA, 15 bp, Homo sapiens
catttctttctttct

SEQ ID NO: 1038218 - DNA, 15 bp, Homo sapiens
atttctttctttctt

SEQ ID NO: 1038219 - DNA, 15 bp, Homo sapiens
tttctttctttcttt

SEQ ID NO: 1038220 - DNA, 15 bp, Homo sapiens
ttctttctttctttt

SEQ ID NO: 1038221 - DNA, 15 bp, Homo sapiens
tctttctttcttttt

SEQ ID NO: 1038222 - DNA, 15 bp, Homo sapiens
ctttctttctttttc

SEQ ID NO: 1038223 - DNA, 15 bp, Homo sapiens
tttctttctttttct

SEQ ID NO: 1038224 - DNA, 15 bp, Homo sapiens
ttctttctttttctt

SEQ ID NO: 1038225 - DNA, 15 bp, Homo sapiens
tctttctttttcttt

SEQ ID NO: 1038226 - DNA, 15 bp, Homo sapiens
ctttctttttctttt

SEQ ID NO: 1038227 - DNA, 15 bp, Homo sapiens
tttctttttcttttt

SEQ ID NO: 1038228 - DNA, 15 bp, Homo sapiens
ttctttttctttttc

SEQ ID NO: 1038229 - DNA, 15 bp, Homo sapiens
tctttttctttttct

SEQ ID NO: 1038230 - DNA, 15 bp, Homo sapiens
ctttttctttttctt

SEQ ID NO: 1038231 - DNA, 15 bp, Homo sapiens
tttttctttttcttt

SEQ ID NO: 1038232 - DNA, 15 bp, Homo sapiens
ttttctttttctttt

SEQ ID NO: 1038233 - DNA, 15 bp, Homo sapiens
tttctttttcttttc

SEQ ID NO: 1038234 - DNA, 15 bp, Homo sapiens
ttctttttcttttct

SEQ ID NO: 1038235 - DNA, 15 bp, Homo sapiens
tctttttcttttctt

SEQ ID NO: 1038236 - DNA, 15 bp, Homo sapiens
ctttttcttttcttt

SEQ ID NO: 1038237 - DNA, 15 bp, Homo sapiens
tttttcttttctttt

SEQ ID NO: 1038238 - DNA, 15 bp, Homo sapiens
ttttcttttcttttt

SEQ ID NO: 1038239 - DNA, 15 bp, Homo sapiens
tttcttttctttttt

SEQ ID NO: 1038240 - DNA, 15 bp, Homo sapiens
ttcttttcttttttt

SEQ ID NO: 1038241 - DNA, 15 bp, Homo sapiens
tcttttctttttttt

SEQ ID NO: 1038242 - DNA, 15 bp, Homo sapiens
cttttcttttttttt

SEQ ID NO: 1038243 - DNA, 15 bp, Homo sapiens
ttttctttttttttt

SEQ ID NO: 1038244 - DNA, 15 bp, Homo sapiens
tttcttttttttttt

SEQ ID NO: 1038245 - DNA, 15 bp, Homo sapiens
ttctttttttttttt

SEQ ID NO: 1038246 - DNA, 15 bp, Homo sapiens
tcttttttttttttt

SEQ ID NO: 1038247 - DNA, 15 bp, Homo sapiens
ctttttttttttttt

SEQ ID NO: 1038248 - DNA, 15 bp, Homo sapiens
ttttttttttttttt

SEQ ID NO: 1038249 - DNA, 15 bp, Homo sapiens
ttttttttttttttg

SEQ ID NO: 1038250 - DNA, 15 bp, Homo sapiens
tttttttttttttga

SEQ ID NO: 1038251 - DNA, 15 bp, Homo sapiens
ttttttttttttgag

SEQ ID NO: 1038252 - DNA, 15 bp, Homo sapiens
tttttttttttgaga

SEQ ID NO: 1038253 - DNA, 15 bp, Homo sapiens
ttttttttttgagat

SEQ ID NO: 1038254 - DNA, 15 bp, Homo sapiens
tttttttttgagatg

SEQ ID NO: 1038255 - DNA, 15 bp, Homo sapiens
ttttttttgagatgg

SEQ ID NO: 1038256 - DNA, 15 bp, Homo sapiens
tttttttgagatgga

SEQ ID NO: 1038257 - DNA, 15 bp, Homo sapiens
ttttttgagatggag

SEQ ID NO: 1038258 - DNA, 15 bp, Homo sapiens
tttttgagatggagt

SEQ ID NO: 1038259 - DNA, 15 bp, Homo sapiens
ttttgagatggagtt

SEQ ID NO: 1038260 - DNA, 15 bp, Homo sapiens
tttgagatggagttt

SEQ ID NO: 1038261 - DNA, 15 bp, Homo sapiens
ttgagatggagtttc

SEQ ID NO: 1038262 - DNA, 15 bp, Homo sapiens
tgagatggagtttcg

SEQ ID NO: 1038263 - DNA, 15 bp, Homo sapiens
gagatggagtttcgc

SEQ ID NO: 1038264 - DNA, 15 bp, Homo sapiens
agatggagtttcgct

SEQ ID NO: 1038265 - DNA, 15 bp, Homo sapiens
gatggagtttcgctc

SEQ ID NO: 1038266 - DNA, 15 bp, Homo sapiens
atggagtttcgctct

SEQ ID NO: 1038267 - DNA, 15 bp, Homo sapiens
tggagtttcgctctt

SEQ ID NO: 1038268 - DNA, 15 bp, Homo sapiens
ggagtttcgctcttg

SEQ ID NO: 1038269 - DNA, 15 bp, Homo sapiens
gagtttcgctcttgt

SEQ ID NO: 1038270 - DNA, 15 bp, Homo sapiens
agtttcgctcttgtt

SEQ ID NO: 1038271 - DNA, 15 bp, Homo sapiens
gtttcgctcttgttg

SEQ ID NO: 1038272 - DNA, 15 bp, Homo sapiens
tttcgctcttgttgc

SEQ ID NO: 1038273 - DNA, 15 bp, Homo sapiens
ttcgctcttgttgcc

SEQ ID NO: 1038274 - DNA, 15 bp, Homo sapiens
tcgctcttgttgccc

SEQ ID NO: 1038275 - DNA, 15 bp, Homo sapiens
cgctcttgttgccca

SEQ ID NO: 1038276 - DNA, 15 bp, Homo sapiens
gctcttgttgcccag

SEQ ID NO: 1038277 - DNA, 15 bp, Homo sapiens
caggctggagtgcaa

SEQ ID NO: 1038278 - DNA, 15 bp, Homo sapiens
aggctggagtgcaat

SEQ ID NO: 1038279 - DNA, 15 bp, Homo sapiens
ggctggagtgcaatg

SEQ ID NO: 1038280 - DNA, 15 bp, Homo sapiens
gctggagtgcaatgg

SEQ ID NO: 1038281 - DNA, 15 bp, Homo sapiens
ctggagtgcaatggc

SEQ ID NO: 1038282 - DNA, 15 bp, Homo sapiens
tggagtgcaatggcg

SEQ ID NO: 1038283 - DNA, 15 bp, Homo sapiens
ggagtgcaatggcgc

SEQ ID NO: 1038284 - DNA, 15 bp, Homo sapiens
gagtgcaatggcgct

SEQ ID NO: 1038285 - DNA, 15 bp, Homo sapiens
agtgcaatggcgcta

SEQ ID NO: 1038286 - DNA, 15 bp, Homo sapiens
gtgcaatggcgctat

SEQ ID NO: 1038287 - DNA, 15 bp, Homo sapiens
tgcaatggcgctatc

SEQ ID NO: 1038288 - DNA, 15 bp, Homo sapiens
gcaatggcgctatct

SEQ ID NO: 1038289 - DNA, 15 bp, Homo sapiens
caatggcgctatctc

SEQ ID NO: 1038290 - DNA, 15 bp, Homo sapiens
aatggcgctatctcg

SEQ ID NO: 1038291 - DNA, 15 bp, Homo sapiens
atggcgctatctcgg

SEQ ID NO: 1038292 - DNA, 15 bp, Homo sapiens
tggcgctatctcggc

SEQ ID NO: 1038293 - DNA, 15 bp, Homo sapiens
ggcgctatctcggct

SEQ ID NO: 1038294 - DNA, 15 bp, Homo sapiens
gcgctatctcggctc

SEQ ID NO: 1038295 - DNA, 15 bp, Homo sapiens
cgctatctcggctcg

SEQ ID NO: 1038296 - DNA, 15 bp, Homo sapiens
gctatctcggctcgc

SEQ ID NO: 1038297 - DNA, 15 bp, Homo sapiens
ctatctcggctcgcc

SEQ ID NO: 1038298 - DNA, 15 bp, Homo sapiens
tatctcggctcgcca

SEQ ID NO: 1038299 - DNA, 15 bp, Homo sapiens
atctcggctcgccac

SEQ ID NO: 1038300 - DNA, 15 bp, Homo sapiens
tctcggctcgccaca

SEQ ID NO: 1038301 - DNA, 15 bp, Homo sapiens
ctcggctcgccacaa

SEQ ID NO: 1038302 - DNA, 15 bp, Homo sapiens
tcggctcgccacaac

SEQ ID NO: 1038303 - DNA, 15 bp, Homo sapiens
cggctcgccacaacc

SEQ ID NO: 1038304 - DNA, 15 bp, Homo sapiens
ggctcgccacaacct

SEQ ID NO: 1038305 - DNA, 15 bp, Homo sapiens
gctcgccacaacctc

SEQ ID NO: 1038306 - DNA, 15 bp, Homo sapiens
ctcgccacaacctcc

SEQ ID NO: 1038307 - DNA, 15 bp, Homo sapiens
tcgccacaacctccg

SEQ ID NO: 1038308 - DNA, 15 bp, Homo sapiens
cgccacaacctccgc

SEQ ID NO: 1038309 - DNA, 15 bp, Homo sapiens
gccacaacctccgcc

SEQ ID NO: 1038310 - DNA, 15 bp, Homo sapiens
ccacaacctccgcct

SEQ ID NO: 1038311 - DNA, 15 bp, Homo sapiens
cacaacctccgcctc

SEQ ID NO: 1038312 - DNA, 15 bp, Homo sapiens
acaacctccgcctcc

SEQ ID NO: 1038313 - DNA, 15 bp, Homo sapiens
caacctccgcctccc

SEQ ID NO: 1038314 - DNA, 15 bp, Homo sapiens
aacctccgcctcccg

SEQ ID NO: 1038315 - DNA, 15 bp, Homo sapiens
acctccgcctcccgg

SEQ ID NO: 1038316 - DNA, 15 bp, Homo sapiens
cctccgcctcccggg

SEQ ID NO: 1038317 - DNA, 15 bp, Homo sapiens
ctccgcctcccgggt

SEQ ID NO: 1038318 - DNA, 15 bp, Homo sapiens
tccgcctcccgggtt

SEQ ID NO: 1038319 - DNA, 15 bp, Homo sapiens
ccgcctcccgggttc

SEQ ID NO: 1038320 - DNA, 15 bp, Homo sapiens
cgcctcccgggttca

SEQ ID NO: 1038321 - DNA, 15 bp, Homo sapiens
gcctcccgggttcaa

SEQ ID NO: 1038322 - DNA, 15 bp, Homo sapiens
cctcccgggttcaag

SEQ ID NO: 1038323 - DNA, 15 bp, Homo sapiens
ctcccgggttcaagc

SEQ ID NO: 1038324 - DNA, 15 bp, Homo sapiens
tcccgggttcaagcg

SEQ ID NO: 1038325 - DNA, 15 bp, Homo sapiens
cccgggttcaagcga

SEQ ID NO: 1038326 - DNA, 15 bp, Homo sapiens
ccgggttcaagcgat

SEQ ID NO: 1038327 - DNA, 15 bp, Homo sapiens
cgggttcaagcgatt

SEQ ID NO: 1038328 - DNA, 15 bp, Homo sapiens
gggttcaagcgattc

SEQ ID NO: 1038329 - DNA, 15 bp, Homo sapiens
ggttcaagcgattct

SEQ ID NO: 1038330 - DNA, 15 bp, Homo sapiens
gttcaagcgattctc

SEQ ID NO: 1038331 - DNA, 15 bp, Homo sapiens
ttcaagcgattctcc

SEQ ID NO: 1038332 - DNA, 15 bp, Homo sapiens
tcaagcgattctcct

SEQ ID NO: 1038333 - DNA, 15 bp, Homo sapiens
caagcgattctcctg

SEQ ID NO: 1038334 - DNA, 15 bp, Homo sapiens
aagcgattctcctgc

SEQ ID NO: 1038335 - DNA, 15 bp, Homo sapiens
agcgattctcctgcc

SEQ ID NO: 1038336 - DNA, 15 bp, Homo sapiens
gcgattctcctgcct

SEQ ID NO: 1038337 - DNA, 15 bp, Homo sapiens
cgattctcctgcctc

SEQ ID NO: 1038338 - DNA, 15 bp, Homo sapiens
gattctcctgcctca

SEQ ID NO: 1038339 - DNA, 15 bp, Homo sapiens
attctcctgcctcag

SEQ ID NO: 1038340 - DNA, 15 bp, Homo sapiens
ttctcctgcctcagc

SEQ ID NO: 1038341 - DNA, 15 bp, Homo sapiens
tctcctgcctcagcc

SEQ ID NO: 1038342 - DNA, 15 bp, Homo sapiens
ctgcctcagcctccc

SEQ ID NO: 1038343 - DNA, 15 bp, Homo sapiens
tgcctcagcctcccg

SEQ ID NO: 1038344 - DNA, 15 bp, Homo sapiens
gcctcagcctcccga

SEQ ID NO: 1038345 - DNA, 15 bp, Homo sapiens
ctcccgagtagctga

SEQ ID NO: 1038346 - DNA, 15 bp, Homo sapiens
tcccgagtagctgag

SEQ ID NO: 1038347 - DNA, 15 bp, Homo sapiens
cccgagtagctgaga

SEQ ID NO: 1038348 - DNA, 15 bp, Homo sapiens
ccgagtagctgagat

SEQ ID NO: 1038349 - DNA, 15 bp, Homo sapiens
cgagtagctgagatt

SEQ ID NO: 1038350 - DNA, 15 bp, Homo sapiens
gagtagctgagatta

SEQ ID NO: 1038351 - DNA, 15 bp, Homo sapiens
agtagctgagattac

SEQ ID NO: 1038352 - DNA, 15 bp, Homo sapiens
gtagctgagattaca

SEQ ID NO: 1038353 - DNA, 15 bp, Homo sapiens
tagctgagattacag

SEQ ID NO: 1038354 - DNA, 15 bp, Homo sapiens
agctgagattacagg

SEQ ID NO: 1038355 - DNA, 15 bp, Homo sapiens
gctgagattacaggc

SEQ ID NO: 1038356 - DNA, 15 bp, Homo sapiens
ctgagattacaggca

SEQ ID NO: 1038357 - DNA, 15 bp, Homo sapiens
tgagattacaggcat

SEQ ID NO: 1038358 - DNA, 15 bp, Homo sapiens
gagattacaggcatg

SEQ ID NO: 1038359 - DNA, 15 bp, Homo sapiens
agattacaggcatgc

SEQ ID NO: 1038360 - DNA, 15 bp, Homo sapiens
gattacaggcatgcg

SEQ ID NO: 1038361 - DNA, 15 bp, Homo sapiens
attacaggcatgcgc

SEQ ID NO: 1038362 - DNA, 15 bp, Homo sapiens
ttacaggcatgcgcc

SEQ ID NO: 1038363 - DNA, 15 bp, Homo sapiens
tacaggcatgcgcca

SEQ ID NO: 1038364 - DNA, 15 bp, Homo sapiens
acaggcatgcgccac

SEQ ID NO: 1038365 - DNA, 15 bp, Homo sapiens
caggcatgcgccact

SEQ ID NO: 1038366 - DNA, 15 bp, Homo sapiens
aggcatgcgccacta

SEQ ID NO: 1038367 - DNA, 15 bp, Homo sapiens
ggcatgcgccactac

SEQ ID NO: 1038368 - DNA, 15 bp, Homo sapiens
gcatgcgccactacg

SEQ ID NO: 1038369 - DNA, 15 bp, Homo sapiens
catgcgccactacgc

SEQ ID NO: 1038370 - DNA, 15 bp, Homo sapiens
atgcgccactacgcc

SEQ ID NO: 1038371 - DNA, 15 bp, Homo sapiens
tgcgccactacgcct

SEQ ID NO: 1038372 - DNA, 15 bp, Homo sapiens
gcgccactacgcctg

SEQ ID NO: 1038373 - DNA, 15 bp, Homo sapiens
cgccactacgcctgg

SEQ ID NO: 1038374 - DNA, 15 bp, Homo sapiens
gccactacgcctggc

SEQ ID NO: 1038375 - DNA, 15 bp, Homo sapiens
ccactacgcctggct

SEQ ID NO: 1038376 - DNA, 15 bp, Homo sapiens
cactacgcctggcta

SEQ ID NO: 1038377 - DNA, 15 bp, Homo sapiens
actacgcctggctaa

SEQ ID NO: 1038378 - DNA, 15 bp, Homo sapiens
ctacgcctggctaat

SEQ ID NO: 1038379 - DNA, 15 bp, Homo sapiens
tacgcctggctaatt

SEQ ID NO: 1038380 - DNA, 15 bp, Homo sapiens
ctggctaattttgta

SEQ ID NO: 1038381 - DNA, 15 bp, Homo sapiens
tggctaattttgtat

SEQ ID NO: 1038382 - DNA, 15 bp, Homo sapiens
ggctaattttgtatt

SEQ ID NO: 1038383 - DNA, 15 bp, Homo sapiens
gctaattttgtattg

SEQ ID NO: 1038384 - DNA, 15 bp, Homo sapiens
ctaattttgtattgt

SEQ ID NO: 1038385 - DNA, 15 bp, Homo sapiens
taattttgtattgtt

SEQ ID NO: 1038386 - DNA, 15 bp, Homo sapiens
aattttgtattgtta

SEQ ID NO: 1038387 - DNA, 15 bp, Homo sapiens
attttgtattgttag

SEQ ID NO: 1038388 - DNA, 15 bp, Homo sapiens
ttttgtattgttagt

SEQ ID NO: 1038389 - DNA, 15 bp, Homo sapiens
tttgtattgttagta

SEQ ID NO: 1038390 - DNA, 15 bp, Homo sapiens
ttgtattgttagtag

SEQ ID NO: 1038391 - DNA, 15 bp, Homo sapiens
tgtattgttagtaga

SEQ ID NO: 1038392 - DNA, 15 bp, Homo sapiens
gtattgttagtagag

SEQ ID NO: 1038393 - DNA, 15 bp, Homo sapiens
tattgttagtagaga

SEQ ID NO: 1038394 - DNA, 15 bp, Homo sapiens
attgttagtagagac

SEQ ID NO: 1038395 - DNA, 15 bp, Homo sapiens
ttgttagtagagacg

SEQ ID NO: 1038396 - DNA, 15 bp, Homo sapiens
tgttagtagagacgg

SEQ ID NO: 1038397 - DNA, 15 bp, Homo sapiens
gttagtagagacggg

SEQ ID NO: 1038398 - DNA, 15 bp, Homo sapiens
ttagtagagacgggg

SEQ ID NO: 1038399 - DNA, 15 bp, Homo sapiens
tagtagagacggggt

SEQ ID NO: 1038400 - DNA, 15 bp, Homo sapiens
agtagagacggggtt

SEQ ID NO: 1038401 - DNA, 15 bp, Homo sapiens
gtagagacggggttt

SEQ ID NO: 1038402 - DNA, 15 bp, Homo sapiens
tagagacggggtttc

SEQ ID NO: 1038403 - DNA, 15 bp, Homo sapiens
agagacggggtttcg

SEQ ID NO: 1038404 - DNA, 15 bp, Homo sapiens
gagacggggtttcgc

SEQ ID NO: 1038405 - DNA, 15 bp, Homo sapiens
agacggggtttcgcc

SEQ ID NO: 1038406 - DNA, 15 bp, Homo sapiens
gacggggtttcgcca

SEQ ID NO: 1038407 - DNA, 15 bp, Homo sapiens
acggggtttcgccat

SEQ ID NO: 1038408 - DNA, 15 bp, Homo sapiens
cggggtttcgccatg

SEQ ID NO: 1038409 - DNA, 15 bp, Homo sapiens
ggggtttcgccatgt

SEQ ID NO: 1038410 - DNA, 15 bp, Homo sapiens
gggtttcgccatgtt

SEQ ID NO: 1038411 - DNA, 15 bp, Homo sapiens
ggtttcgccatgttg

SEQ ID NO: 1038412 - DNA, 15 bp, Homo sapiens
gtttcgccatgttgg

SEQ ID NO: 1038413 - DNA, 15 bp, Homo sapiens
tttcgccatgttggt

SEQ ID NO: 1038414 - DNA, 15 bp, Homo sapiens
ttcgccatgttggtc

SEQ ID NO: 1038415 - DNA, 15 bp, Homo sapiens
tcgccatgttggtca

SEQ ID NO: 1038416 - DNA, 15 bp, Homo sapiens
cgccatgttggtcag

SEQ ID NO: 1038417 - DNA, 15 bp, Homo sapiens
gccatgttggtcagg

SEQ ID NO: 1038418 - DNA, 15 bp, Homo sapiens
ccatgttggtcaggc

SEQ ID NO: 1038419 - DNA, 15 bp, Homo sapiens
catgttggtcaggct

SEQ ID NO: 1038420 - DNA, 15 bp, Homo sapiens
atgttggtcaggctg

SEQ ID NO: 1038421 - DNA, 15 bp, Homo sapiens
tgttggtcaggctgg

SEQ ID NO: 1038422 - DNA, 15 bp, Homo sapiens
gttggtcaggctggt

SEQ ID NO: 1038423 - DNA, 15 bp, Homo sapiens
ttggtcaggctggtc

SEQ ID NO: 1038424 - DNA, 15 bp, Homo sapiens
tggtcaggctggtct

SEQ ID NO: 1038425 - DNA, 15 bp, Homo sapiens
ggtcaggctggtctc

SEQ ID NO: 1038426 - DNA, 15 bp, Homo sapiens
gtcaggctggtctcc

SEQ ID NO: 1038427 - DNA, 15 bp, Homo sapiens
tcaggctggtctcca

SEQ ID NO: 1038428 - DNA, 15 bp, Homo sapiens
gctggtctccaactc

SEQ ID NO: 1038429 - DNA, 15 bp, Homo sapiens
ctggtctccaactcc

SEQ ID NO: 1038430 - DNA, 15 bp, Homo sapiens
tggtctccaactccc

SEQ ID NO: 1038431 - DNA, 15 bp, Homo sapiens
ggtctccaactcccg

SEQ ID NO: 1038432 - DNA, 15 bp, Homo sapiens
gtctccaactcccga

SEQ ID NO: 1038433 - DNA, 15 bp, Homo sapiens
tctccaactcccgac

SEQ ID NO: 1038434 - DNA, 15 bp, Homo sapiens
ctccaactcccgacc

SEQ ID NO: 1038435 - DNA, 15 bp, Homo sapiens
tccaactcccgacct

SEQ ID NO: 1038436 - DNA, 15 bp, Homo sapiens
ccaactcccgacctc

SEQ ID NO: 1038437 - DNA, 15 bp, Homo sapiens
caactcccgacctca

SEQ ID NO: 1038438 - DNA, 15 bp, Homo sapiens
aactcccgacctcag

SEQ ID NO: 1038439 - DNA, 15 bp, Homo sapiens
actcccgacctcagg

SEQ ID NO: 1038440 - DNA, 15 bp, Homo sapiens
ctcccgacctcaggt

SEQ ID NO: 1038441 - DNA, 15 bp, Homo sapiens
tcccgacctcaggtg

SEQ ID NO: 1038442 - DNA, 15 bp, Homo sapiens
cccgacctcaggtga

SEQ ID NO: 1038443 - DNA, 15 bp, Homo sapiens
ccgacctcaggtgat

SEQ ID NO: 1038444 - DNA, 15 bp, Homo sapiens
cgacctcaggtgatc

SEQ ID NO: 1038445 - DNA, 15 bp, Homo sapiens
gacctcaggtgatcc

SEQ ID NO: 1038446 - DNA, 15 bp, Homo sapiens
acctcaggtgatcca

SEQ ID NO: 1038447 - DNA, 15 bp, Homo sapiens
cctcaggtgatccat

SEQ ID NO: 1038448 - DNA, 15 bp, Homo sapiens
ctcaggtgatccatg

SEQ ID NO: 1038449 - DNA, 15 bp, Homo sapiens
tcaggtgatccatga

SEQ ID NO: 1038450 - DNA, 15 bp, Homo sapiens
caggtgatccatgaa

SEQ ID NO: 1038451 - DNA, 15 bp, Homo sapiens
aggtgatccatgaag

SEQ ID NO: 1038452 - DNA, 15 bp, Homo sapiens
ggtgatccatgaagt

SEQ ID NO: 1038453 - DNA, 15 bp, Homo sapiens
gtgatccatgaagtc

SEQ ID NO: 1038454 - DNA, 15 bp, Homo sapiens
tgatccatgaagtcc

SEQ ID NO: 1038455 - DNA, 15 bp, Homo sapiens
gatccatgaagtcca

SEQ ID NO: 1038456 - DNA, 15 bp, Homo sapiens
atccatgaagtccac

SEQ ID NO: 1038457 - DNA, 15 bp, Homo sapiens
tccatgaagtccacc

SEQ ID NO: 1038458 - DNA, 15 bp, Homo sapiens
ccatgaagtccaccc

SEQ ID NO: 1038459 - DNA, 15 bp, Homo sapiens
catgaagtccacccg

SEQ ID NO: 1038460 - DNA, 15 bp, Homo sapiens
atgaagtccacccgc

SEQ ID NO: 1038461 - DNA, 15 bp, Homo sapiens
tgaagtccacccgcc

SEQ ID NO: 1038462 - DNA, 15 bp, Homo sapiens
gaagtccacccgcct

SEQ ID NO: 1038463 - DNA, 15 bp, Homo sapiens
aagtccacccgcctc

SEQ ID NO: 1038464 - DNA, 15 bp, Homo sapiens
agtccacccgcctcg

SEQ ID NO: 1038465 - DNA, 15 bp, Homo sapiens
gtccacccgcctcgg

SEQ ID NO: 1038466 - DNA, 15 bp, Homo sapiens
tccacccgcctcggc

SEQ ID NO: 1038467 - DNA, 15 bp, Homo sapiens
ccacccgcctcggcc

SEQ ID NO: 1038468 - DNA, 15 bp, Homo sapiens
cacccgcctcggcct

SEQ ID NO: 1038469 - DNA, 15 bp, Homo sapiens
acccgcctcggcctc

SEQ ID NO: 1038470 - DNA, 15 bp, Homo sapiens
cccgcctcggcctcc

SEQ ID NO: 1038471 - DNA, 15 bp, Homo sapiens
ccgcctcggcctccc

SEQ ID NO: 1038472 - DNA, 15 bp, Homo sapiens
cgcctcggcctccca

SEQ ID NO: 1038473 - DNA, 15 bp, Homo sapiens
gcctcggcctcccaa

SEQ ID NO: 1038474 - DNA, 15 bp, Homo sapiens
cctcggcctcccaaa

SEQ ID NO: 1038475 - DNA, 15 bp, Homo sapiens
ctcggcctcccaaag

SEQ ID NO: 1038476 - DNA, 15 bp, Homo sapiens
tcggcctcccaaagt

SEQ ID NO: 1038477 - DNA, 15 bp, Homo sapiens
cggcctcccaaagtg

SEQ ID NO: 1038478 - DNA, 15 bp, Homo sapiens
ggcctcccaaagtgc

SEQ ID NO: 1038479 - DNA, 15 bp, Homo sapiens
caggcgtgagccacc

SEQ ID NO: 1038480 - DNA, 15 bp, Homo sapiens
aggcgtgagccacct

SEQ ID NO: 1038481 - DNA, 15 bp, Homo sapiens
ggcgtgagccacctc

SEQ ID NO: 1038482 - DNA, 15 bp, Homo sapiens
gcgtgagccacctcc

SEQ ID NO: 1038483 - DNA, 15 bp, Homo sapiens
cgtgagccacctccc

SEQ ID NO: 1038484 - DNA, 15 bp, Homo sapiens
gtgagccacctccca

SEQ ID NO: 1038485 - DNA, 15 bp, Homo sapiens
tgagccacctcccag

SEQ ID NO: 1038486 - DNA, 15 bp, Homo sapiens
gagccacctcccagt

SEQ ID NO: 1038487 - DNA, 15 bp, Homo sapiens
agccacctcccagtt

SEQ ID NO: 1038488 - DNA, 15 bp, Homo sapiens
gccacctcccagttt

SEQ ID NO: 1038489 - DNA, 15 bp, Homo sapiens
ccacctcccagtttt

SEQ ID NO: 1038490 - DNA, 15 bp, Homo sapiens
cacctcccagttttc

SEQ ID NO: 1038491 - DNA, 15 bp, Homo sapiens
acctcccagttttct

SEQ ID NO: 1038492 - DNA, 15 bp, Homo sapiens
cctcccagttttctt

SEQ ID NO: 1038493 - DNA, 15 bp, Homo sapiens
ctcccagttttctta

SEQ ID NO: 1038494 - DNA, 15 bp, Homo sapiens
tcccagttttcttat

SEQ ID NO: 1038495 - DNA, 15 bp, Homo sapiens
cccagttttcttatt

SEQ ID NO: 1038496 - DNA, 15 bp, Homo sapiens
ccagttttcttattg

SEQ ID NO: 1038497 - DNA, 15 bp, Homo sapiens
cagttttcttattgt

SEQ ID NO: 1038498 - DNA, 15 bp, Homo sapiens
agttttcttattgta

SEQ ID NO: 1038499 - DNA, 15 bp, Homo sapiens
gttttcttattgtaa

SEQ ID NO: 1038500 - DNA, 15 bp, Homo sapiens
ttttcttattgtaaa

SEQ ID NO: 1038501 - DNA, 15 bp, Homo sapiens
tttcttattgtaaaa

SEQ ID NO: 1038502 - DNA, 15 bp, Homo sapiens
ttcttattgtaaaat

SEQ ID NO: 1038503 - DNA, 15 bp, Homo sapiens
tcttattgtaaaatg

SEQ ID NO: 1038504 - DNA, 15 bp, Homo sapiens
cttattgtaaaatgg

SEQ ID NO: 1038505 - DNA, 15 bp, Homo sapiens
ttattgtaaaatgga

SEQ ID NO: 1038506 - DNA, 15 bp, Homo sapiens
tattgtaaaatggag

SEQ ID NO: 1038507 - DNA, 15 bp, Homo sapiens
attgtaaaatggagc

SEQ ID NO: 1038508 - DNA, 15 bp, Homo sapiens
ttgtaaaatggagcc

SEQ ID NO: 1038509 - DNA, 15 bp, Homo sapiens
tgtaaaatggagcca

SEQ ID NO: 1038510 - DNA, 15 bp, Homo sapiens
gtaaaatggagccat

SEQ ID NO: 1038511 - DNA, 15 bp, Homo sapiens
taaaatggagccatt

SEQ ID NO: 1038512 - DNA, 15 bp, Homo sapiens
aaaatggagccattg

SEQ ID NO: 1038513 - DNA, 15 bp, Homo sapiens
aaatggagccattgt

SEQ ID NO: 1038514 - DNA, 15 bp, Homo sapiens
aatggagccattgtg

SEQ ID NO: 1038515 - DNA, 15 bp, Homo sapiens
atggagccattgtgt

SEQ ID NO: 1038516 - DNA, 15 bp, Homo sapiens
tggagccattgtgtg

SEQ ID NO: 1038517 - DNA, 15 bp, Homo sapiens
ggagccattgtgtgc

SEQ ID NO: 1038518 - DNA, 15 bp, Homo sapiens
gagccattgtgtgca

SEQ ID NO: 1038519 - DNA, 15 bp, Homo sapiens
agccattgtgtgcaa

SEQ ID NO: 1038520 - DNA, 15 bp, Homo sapiens
gccattgtgtgcaaa

SEQ ID NO: 1038521 - DNA, 15 bp, Homo sapiens
ccattgtgtgcaaag

SEQ ID NO: 1038522 - DNA, 15 bp, Homo sapiens
cattgtgtgcaaagc

SEQ ID NO: 1038523 - DNA, 15 bp, Homo sapiens
attgtgtgcaaagca

SEQ ID NO: 1038524 - DNA, 15 bp, Homo sapiens
ttgtgtgcaaagcac

SEQ ID NO: 1038525 - DNA, 15 bp, Homo sapiens
tgtgtgcaaagcact

SEQ ID NO: 1038526 - DNA, 15 bp, Homo sapiens
gtgtgcaaagcactc

SEQ ID NO: 1038527 - DNA, 15 bp, Homo sapiens
tgtgcaaagcactca

SEQ ID NO: 1038528 - DNA, 15 bp, Homo sapiens
gtgcaaagcactcag

SEQ ID NO: 1038529 - DNA, 15 bp, Homo sapiens
tgcaaagcactcagg

SEQ ID NO: 1038530 - DNA, 15 bp, Homo sapiens
gcaaagcactcagga

SEQ ID NO: 1038531 - DNA, 15 bp, Homo sapiens
caaagcactcaggac

SEQ ID NO: 1038532 - DNA, 15 bp, Homo sapiens
aaagcactcaggaca

SEQ ID NO: 1038533 - DNA, 15 bp, Homo sapiens
aagcactcaggacag

SEQ ID NO: 1038534 - DNA, 15 bp, Homo sapiens
agcactcaggacagg

SEQ ID NO: 1038535 - DNA, 15 bp, Homo sapiens
gcactcaggacaggg

SEQ ID NO: 1038536 - DNA, 15 bp, Homo sapiens
cactcaggacagggg

SEQ ID NO: 1038537 - DNA, 15 bp, Homo sapiens
actcaggacaggggc

SEQ ID NO: 1038538 - DNA, 15 bp, Homo sapiens
ctcaggacaggggcc

SEQ ID NO: 1038539 - DNA, 15 bp, Homo sapiens
tcaggacaggggcca

SEQ ID NO: 1038540 - DNA, 15 bp, Homo sapiens
caggacaggggccag

SEQ ID NO: 1038541 - DNA, 15 bp, Homo sapiens
aggacaggggccagc

SEQ ID NO: 1038542 - DNA, 15 bp, Homo sapiens
ggacaggggccagca

SEQ ID NO: 1038543 - DNA, 15 bp, Homo sapiens
gacaggggccagcac

SEQ ID NO: 1038544 - DNA, 15 bp, Homo sapiens
acaggggccagcacc

SEQ ID NO: 1038545 - DNA, 15 bp, Homo sapiens
caggggccagcacct

SEQ ID NO: 1038546 - DNA, 15 bp, Homo sapiens
aggggccagcaccta

SEQ ID NO: 1038547 - DNA, 15 bp, Homo sapiens
ggggccagcacctag

SEQ ID NO: 1038548 - DNA, 15 bp, Homo sapiens
gggccagcacctaga

SEQ ID NO: 1038549 - DNA, 15 bp, Homo sapiens
ggccagcacctagaa

SEQ ID NO: 1038550 - DNA, 15 bp, Homo sapiens
gccagcacctagaag

SEQ ID NO: 1038551 - DNA, 15 bp, Homo sapiens
ccagcacctagaagg

SEQ ID NO: 1038552 - DNA, 15 bp, Homo sapiens
cagcacctagaaggc

SEQ ID NO: 1038553 - DNA, 15 bp, Homo sapiens
agcacctagaaggct

SEQ ID NO: 1038554 - DNA, 15 bp, Homo sapiens
gcacctagaaggctc

SEQ ID NO: 1038555 - DNA, 15 bp, Homo sapiens
cacctagaaggctcc

SEQ ID NO: 1038556 - DNA, 15 bp, Homo sapiens
acctagaaggctcct

SEQ ID NO: 1038557 - DNA, 15 bp, Homo sapiens
cctagaaggctcctc

SEQ ID NO: 1038558 - DNA, 15 bp, Homo sapiens
ctagaaggctcctca

SEQ ID NO: 1038559 - DNA, 15 bp, Homo sapiens
tagaaggctcctcag

SEQ ID NO: 1038560 - DNA, 15 bp, Homo sapiens
agaaggctcctcagt

SEQ ID NO: 1038561 - DNA, 15 bp, Homo sapiens
gaaggctcctcagtc

SEQ ID NO: 1038562 - DNA, 15 bp, Homo sapiens
aaggctcctcagtca

SEQ ID NO: 1038563 - DNA, 15 bp, Homo sapiens
aggctcctcagtcat

SEQ ID NO: 1038564 - DNA, 15 bp, Homo sapiens
ggctcctcagtcatt

SEQ ID NO: 1038565 - DNA, 15 bp, Homo sapiens
gctcctcagtcattc

SEQ ID NO: 1038566 - DNA, 15 bp, Homo sapiens
ctcctcagtcattca

SEQ ID NO: 1038567 - DNA, 15 bp, Homo sapiens
tcctcagtcattcat

SEQ ID NO: 1038568 - DNA, 15 bp, Homo sapiens
cctcagtcattcatt

SEQ ID NO: 1038569 - DNA, 15 bp, Homo sapiens
ctcagtcattcattc

SEQ ID NO: 1038570 - DNA, 15 bp, Homo sapiens
tcagtcattcattct

SEQ ID NO: 1038571 - DNA, 15 bp, Homo sapiens
cagtcattcattcta

SEQ ID NO: 1038572 - DNA, 15 bp, Homo sapiens
agtcattcattctag

SEQ ID NO: 1038573 - DNA, 15 bp, Homo sapiens
gtcattcattctaga

SEQ ID NO: 1038574 - DNA, 15 bp, Homo sapiens
tcattcattctagaa

SEQ ID NO: 1038575 - DNA, 15 bp, Homo sapiens
cattcattctagaat

SEQ ID NO: 1038576 - DNA, 15 bp, Homo sapiens
attcattctagaata

SEQ ID NO: 1038577 - DNA, 15 bp, Homo sapiens
ttcattctagaatat

SEQ ID NO: 1038578 - DNA, 15 bp, Homo sapiens
tcattctagaatatt

SEQ ID NO: 1038579 - DNA, 15 bp, Homo sapiens
cattctagaatattt

SEQ ID NO: 1038580 - DNA, 15 bp, Homo sapiens
attctagaatattta

SEQ ID NO: 1038581 - DNA, 15 bp, Homo sapiens
ttctagaatatttac

SEQ ID NO: 1038582 - DNA, 15 bp, Homo sapiens
tctagaatatttact

SEQ ID NO: 1038583 - DNA, 15 bp, Homo sapiens
ctagaatatttactg

SEQ ID NO: 1038584 - DNA, 15 bp, Homo sapiens
tagaatatttactgt

SEQ ID NO: 1038585 - DNA, 15 bp, Homo sapiens
agaatatttactgtg

SEQ ID NO: 1038586 - DNA, 15 bp, Homo sapiens
gaatatttactgtga

SEQ ID NO: 1038587 - DNA, 15 bp, Homo sapiens
aatatttactgtgag

SEQ ID NO: 1038588 - DNA, 15 bp, Homo sapiens
atatttactgtgagc

SEQ ID NO: 1038589 - DNA, 15 bp, Homo sapiens
tatttactgtgagca

SEQ ID NO: 1038590 - DNA, 15 bp, Homo sapiens
atttactgtgagcag

SEQ ID NO: 1038591 - DNA, 15 bp, Homo sapiens
tttactgtgagcagg

SEQ ID NO: 1038592 - DNA, 15 bp, Homo sapiens
ttactgtgagcaggc

SEQ ID NO: 1038593 - DNA, 15 bp, Homo sapiens
tactgtgagcaggca

SEQ ID NO: 1038594 - DNA, 15 bp, Homo sapiens
actgtgagcaggcat

SEQ ID NO: 1038595 - DNA, 15 bp, Homo sapiens
ctgtgagcaggcatt

SEQ ID NO: 1038596 - DNA, 15 bp, Homo sapiens
tgtgagcaggcattc

SEQ ID NO: 1038597 - DNA, 15 bp, Homo sapiens
gtgagcaggcattcc

SEQ ID NO: 1038598 - DNA, 15 bp, Homo sapiens
tgagcaggcattccc

SEQ ID NO: 1038599 - DNA, 15 bp, Homo sapiens
gagcaggcattccct

SEQ ID NO: 1038600 - DNA, 15 bp, Homo sapiens
agcaggcattccctg

SEQ ID NO: 1038601 - DNA, 15 bp, Homo sapiens
gcaggcattccctgc

SEQ ID NO: 1038602 - DNA, 15 bp, Homo sapiens
caggcattccctgcc

SEQ ID NO: 1038603 - DNA, 15 bp, Homo sapiens
aggcattccctgcca

SEQ ID NO: 1038604 - DNA, 15 bp, Homo sapiens
ggcattccctgccag

SEQ ID NO: 1038605 - DNA, 15 bp, Homo sapiens
gcattccctgccagg

SEQ ID NO: 1038606 - DNA, 15 bp, Homo sapiens
cattccctgccaggc

SEQ ID NO: 1038607 - DNA, 15 bp, Homo sapiens
attccctgccaggcc

SEQ ID NO: 1038608 - DNA, 15 bp, Homo sapiens
ttccctgccaggcca

SEQ ID NO: 1038609 - DNA, 15 bp, Homo sapiens
tccctgccaggccac

SEQ ID NO: 1038610 - DNA, 15 bp, Homo sapiens
ccctgccaggccacg

SEQ ID NO: 1038611 - DNA, 15 bp, Homo sapiens
cctgccaggccacgt

SEQ ID NO: 1038612 - DNA, 15 bp, Homo sapiens
ctgccaggccacgtt

SEQ ID NO: 1038613 - DNA, 15 bp, Homo sapiens
tgccaggccacgttc

SEQ ID NO: 1038614 - DNA, 15 bp, Homo sapiens
gccaggccacgttct

SEQ ID NO: 1038615 - DNA, 15 bp, Homo sapiens
ccaggccacgttcta

SEQ ID NO: 1038616 - DNA, 15 bp, Homo sapiens
caggccacgttctag

SEQ ID NO: 1038617 - DNA, 15 bp, Homo sapiens
aggccacgttctaga

SEQ ID NO: 1038618 - DNA, 15 bp, Homo sapiens
ggccacgttctagag

SEQ ID NO: 1038619 - DNA, 15 bp, Homo sapiens
gccacgttctagagc

SEQ ID NO: 1038620 - DNA, 15 bp, Homo sapiens
ccacgttctagagct

SEQ ID NO: 1038621 - DNA, 15 bp, Homo sapiens
cacgttctagagctc

SEQ ID NO: 1038622 - DNA, 15 bp, Homo sapiens
acgttctagagctca

SEQ ID NO: 1038623 - DNA, 15 bp, Homo sapiens
cgttctagagctcag

SEQ ID NO: 1038624 - DNA, 15 bp, Homo sapiens
gttctagagctcagg

SEQ ID NO: 1038625 - DNA, 15 bp, Homo sapiens
ttctagagctcagga

SEQ ID NO: 1038626 - DNA, 15 bp, Homo sapiens
tctagagctcaggac

SEQ ID NO: 1038627 - DNA, 15 bp, Homo sapiens
ctagagctcaggacg

SEQ ID NO: 1038628 - DNA, 15 bp, Homo sapiens
tagagctcaggacgc

SEQ ID NO: 1038629 - DNA, 15 bp, Homo sapiens
agagctcaggacgcg

SEQ ID NO: 1038630 - DNA, 15 bp, Homo sapiens
gagctcaggacgcgt

SEQ ID NO: 1038631 - DNA, 15 bp, Homo sapiens
agctcaggacgcgtg

SEQ ID NO: 1038632 - DNA, 15 bp, Homo sapiens
gctcaggacgcgtgg

SEQ ID NO: 1038633 - DNA, 15 bp, Homo sapiens
ctcaggacgcgtggg

SEQ ID NO: 1038634 - DNA, 15 bp, Homo sapiens
tcaggacgcgtgggg

SEQ ID NO: 1038635 - DNA, 15 bp, Homo sapiens
caggacgcgtggggg

SEQ ID NO: 1038636 - DNA, 15 bp, Homo sapiens
aggacgcgtgggggg

SEQ ID NO: 1038637 - DNA, 15 bp, Homo sapiens
ggacgcgtggggggg

SEQ ID NO: 1038638 - DNA, 15 bp, Homo sapiens
gacgcgtgggggggg

SEQ ID NO: 1038639 - DNA, 15 bp, Homo sapiens
acgcgtggggggggg

SEQ ID NO: 1038640 - DNA, 15 bp, Homo sapiens
cgcgtgggggggggg

SEQ ID NO: 1038641 - DNA, 15 bp, Homo sapiens
gcgtggggggggggg

SEQ ID NO: 1038642 - DNA, 15 bp, Homo sapiens
cgtgggggggggggc

SEQ ID NO: 1038643 - DNA, 15 bp, Homo sapiens
gtgggggggggggcc

SEQ ID NO: 1038644 - DNA, 15 bp, Homo sapiens
tgggggggggggccc

SEQ ID NO: 1038645 - DNA, 15 bp, Homo sapiens
gggggggggggcccg

SEQ ID NO: 1038646 - DNA, 15 bp, Homo sapiens
ggggggggggcccgc

SEQ ID NO: 1038647 - DNA, 15 bp, Homo sapiens
gggggggggcccgcc

SEQ ID NO: 1038648 - DNA, 15 bp, Homo sapiens
ggggggggcccgcct

SEQ ID NO: 1038649 - DNA, 15 bp, Homo sapiens
gggggggcccgcctc

SEQ ID NO: 1038650 - DNA, 15 bp, Homo sapiens
ggggggcccgcctca

SEQ ID NO: 1038651 - DNA, 15 bp, Homo sapiens
gggggcccgcctcac

SEQ ID NO: 1038652 - DNA, 15 bp, Homo sapiens
ggggcccgcctcacg

SEQ ID NO: 1038653 - DNA, 15 bp, Homo sapiens
gggcccgcctcacgg

SEQ ID NO: 1038654 - DNA, 15 bp, Homo sapiens
ggcccgcctcacggg

SEQ ID NO: 1038655 - DNA, 15 bp, Homo sapiens
gcccgcctcacgggt

SEQ ID NO: 1038656 - DNA, 15 bp, Homo sapiens
cccgcctcacgggtt

SEQ ID NO: 1038657 - DNA, 15 bp, Homo sapiens
ccgcctcacgggttg

SEQ ID NO: 1038658 - DNA, 15 bp, Homo sapiens
cgcctcacgggttgg

SEQ ID NO: 1038659 - DNA, 15 bp, Homo sapiens
gcctcacgggttggc

SEQ ID NO: 1038660 - DNA, 15 bp, Homo sapiens
cctcacgggttggca

SEQ ID NO: 1038661 - DNA, 15 bp, Homo sapiens
ctcacgggttggcat

SEQ ID NO: 1038662 - DNA, 15 bp, Homo sapiens
tcacgggttggcatc

SEQ ID NO: 1038663 - DNA, 15 bp, Homo sapiens
cacgggttggcatcc

SEQ ID NO: 1038664 - DNA, 15 bp, Homo sapiens
acgggttggcatccc

SEQ ID NO: 1038665 - DNA, 15 bp, Homo sapiens
cgggttggcatccca

SEQ ID NO: 1038666 - DNA, 15 bp, Homo sapiens
gggttggcatcccag

SEQ ID NO: 1038667 - DNA, 15 bp, Homo sapiens
ggttggcatcccagt

SEQ ID NO: 1038668 - DNA, 15 bp, Homo sapiens
gttggcatcccagtt

SEQ ID NO: 1038669 - DNA, 15 bp, Homo sapiens
ttggcatcccagttg

SEQ ID NO: 1038670 - DNA, 15 bp, Homo sapiens
tggcatcccagttgg

SEQ ID NO: 1038671 - DNA, 15 bp, Homo sapiens
ggcatcccagttgga

SEQ ID NO: 1038672 - DNA, 15 bp, Homo sapiens
gcatcccagttggag

SEQ ID NO: 1038673 - DNA, 15 bp, Homo sapiens
catcccagttggagc

SEQ ID NO: 1038674 - DNA, 15 bp, Homo sapiens
atcccagttggagca

SEQ ID NO: 1038675 - DNA, 15 bp, Homo sapiens
tcccagttggagcac

SEQ ID NO: 1038676 - DNA, 15 bp, Homo sapiens
cccagttggagcaca

SEQ ID NO: 1038677 - DNA, 15 bp, Homo sapiens
ccagttggagcacat

SEQ ID NO: 1038678 - DNA, 15 bp, Homo sapiens
cagttggagcacatg

SEQ ID NO: 1038679 - DNA, 15 bp, Homo sapiens
agttggagcacatgg

SEQ ID NO: 1038680 - DNA, 15 bp, Homo sapiens
gttggagcacatggt

SEQ ID NO: 1038681 - DNA, 15 bp, Homo sapiens
ttggagcacatggtc

SEQ ID NO: 1038682 - DNA, 15 bp, Homo sapiens
tggagcacatggtca

SEQ ID NO: 1038683 - DNA, 15 bp, Homo sapiens
ggagcacatggtcag

SEQ ID NO: 1038684 - DNA, 15 bp, Homo sapiens
gagcacatggtcaga

SEQ ID NO: 1038685 - DNA, 15 bp, Homo sapiens
agcacatggtcagaa

SEQ ID NO: 1038686 - DNA, 15 bp, Homo sapiens
gcacatggtcagaat

SEQ ID NO: 1038687 - DNA, 15 bp, Homo sapiens
cacatggtcagaatg

SEQ ID NO: 1038688 - DNA, 15 bp, Homo sapiens
acatggtcagaatgc

SEQ ID NO: 1038689 - DNA, 15 bp, Homo sapiens
catggtcagaatgca

SEQ ID NO: 1038690 - DNA, 15 bp, Homo sapiens
atggtcagaatgcaa

SEQ ID NO: 1038691 - DNA, 15 bp, Homo sapiens
tggtcagaatgcaag

SEQ ID NO: 1038692 - DNA, 15 bp, Homo sapiens
ggtcagaatgcaagg

SEQ ID NO: 1038693 - DNA, 15 bp, Homo sapiens
gtcagaatgcaagga

SEQ ID NO: 1038694 - DNA, 15 bp, Homo sapiens
tcagaatgcaaggac

SEQ ID NO: 1038695 - DNA, 15 bp, Homo sapiens
cagaatgcaaggacg

SEQ ID NO: 1038696 - DNA, 15 bp, Homo sapiens
agaatgcaaggacgc

SEQ ID NO: 1038697 - DNA, 15 bp, Homo sapiens
gaatgcaaggacgca

SEQ ID NO: 1038698 - DNA, 15 bp, Homo sapiens
aatgcaaggacgcaa

SEQ ID NO: 1038699 - DNA, 15 bp, Homo sapiens
atgcaaggacgcaaa

SEQ ID NO: 1038700 - DNA, 15 bp, Homo sapiens
tgcaaggacgcaaat

SEQ ID NO: 1038701 - DNA, 15 bp, Homo sapiens
gcaaggacgcaaatg

SEQ ID NO: 1038702 - DNA, 15 bp, Homo sapiens
caaggacgcaaatga

SEQ ID NO: 1038703 - DNA, 15 bp, Homo sapiens
aaggacgcaaatgaa

SEQ ID NO: 1038704 - DNA, 15 bp, Homo sapiens
aggacgcaaatgaac

SEQ ID NO: 1038705 - DNA, 15 bp, Homo sapiens
ggacgcaaatgaacg

SEQ ID NO: 1038706 - DNA, 15 bp, Homo sapiens
gacgcaaatgaacgt

SEQ ID NO: 1038707 - DNA, 15 bp, Homo sapiens
acgcaaatgaacgtg

SEQ ID NO: 1038708 - DNA, 15 bp, Homo sapiens
cgcaaatgaacgtga

SEQ ID NO: 1038709 - DNA, 15 bp, Homo sapiens
gcaaatgaacgtgaa

SEQ ID NO: 1038710 - DNA, 15 bp, Homo sapiens
caaatgaacgtgaac

SEQ ID NO: 1038711 - DNA, 15 bp, Homo sapiens
aaatgaacgtgaacc

SEQ ID NO: 1038712 - DNA, 15 bp, Homo sapiens
aatgaacgtgaacct

SEQ ID NO: 1038713 - DNA, 15 bp, Homo sapiens
atgaacgtgaacctg

SEQ ID NO: 1038714 - DNA, 15 bp, Homo sapiens
tgaacgtgaacctgc

SEQ ID NO: 1038715 - DNA, 15 bp, Homo sapiens
gaacgtgaacctgcc

SEQ ID NO: 1038716 - DNA, 15 bp, Homo sapiens
aacgtgaacctgcca

SEQ ID NO: 1038717 - DNA, 15 bp, Homo sapiens
acgtgaacctgccag

SEQ ID NO: 1038718 - DNA, 15 bp, Homo sapiens
cgtgaacctgccagg

SEQ ID NO: 1038719 - DNA, 15 bp, Homo sapiens
gtgaacctgccaggg

SEQ ID NO: 1038720 - DNA, 15 bp, Homo sapiens
tgaacctgccagggg

SEQ ID NO: 1038721 - DNA, 15 bp, Homo sapiens
gaacctgccaggggg

SEQ ID NO: 1038722 - DNA, 15 bp, Homo sapiens
aacctgccagggggt

SEQ ID NO: 1038723 - DNA, 15 bp, Homo sapiens
acctgccagggggtg

SEQ ID NO: 1038724 - DNA, 15 bp, Homo sapiens
cctgccagggggtgc

SEQ ID NO: 1038725 - DNA, 15 bp, Homo sapiens
ctgccagggggtgct

SEQ ID NO: 1038726 - DNA, 15 bp, Homo sapiens
tgccagggggtgctc

SEQ ID NO: 1038727 - DNA, 15 bp, Homo sapiens
gccagggggtgctca

SEQ ID NO: 1038728 - DNA, 15 bp, Homo sapiens
ccagggggtgctcag

SEQ ID NO: 1038729 - DNA, 15 bp, Homo sapiens
cagggggtgctcagt

SEQ ID NO: 1038730 - DNA, 15 bp, Homo sapiens
agggggtgctcagtc

SEQ ID NO: 1038731 - DNA, 15 bp, Homo sapiens
gggggtgctcagtca

SEQ ID NO: 1038732 - DNA, 15 bp, Homo sapiens
ggggtgctcagtcat

SEQ ID NO: 1038733 - DNA, 15 bp, Homo sapiens
gggtgctcagtcata

SEQ ID NO: 1038734 - DNA, 15 bp, Homo sapiens
ggtgctcagtcatag

SEQ ID NO: 1038735 - DNA, 15 bp, Homo sapiens
gtgctcagtcatagg

SEQ ID NO: 1038736 - DNA, 15 bp, Homo sapiens
tgctcagtcataggg

SEQ ID NO: 1038737 - DNA, 15 bp, Homo sapiens
gctcagtcatagggt

SEQ ID NO: 1038738 - DNA, 15 bp, Homo sapiens
ctcagtcatagggtg

SEQ ID NO: 1038739 - DNA, 15 bp, Homo sapiens
tcagtcatagggtga

SEQ ID NO: 1038740 - DNA, 15 bp, Homo sapiens
cagtcatagggtgat

SEQ ID NO: 1038741 - DNA, 15 bp, Homo sapiens
agtcatagggtgatg

SEQ ID NO: 1038742 - DNA, 15 bp, Homo sapiens
gtcatagggtgatgg

SEQ ID NO: 1038743 - DNA, 15 bp, Homo sapiens
tcatagggtgatggt

SEQ ID NO: 1038744 - DNA, 15 bp, Homo sapiens
catagggtgatggtg

SEQ ID NO: 1038745 - DNA, 15 bp, Homo sapiens
atagggtgatggtgg

SEQ ID NO: 1038746 - DNA, 15 bp, Homo sapiens
tagggtgatggtggc

SEQ ID NO: 1038747 - DNA, 15 bp, Homo sapiens
agggtgatggtggca

SEQ ID NO: 1038748 - DNA, 15 bp, Homo sapiens
gggtgatggtggcac

SEQ ID NO: 1038749 - DNA, 15 bp, Homo sapiens
ggtgatggtggcacc

SEQ ID NO: 1038750 - DNA, 15 bp, Homo sapiens
gtgatggtggcacca

SEQ ID NO: 1038751 - DNA, 15 bp, Homo sapiens
tgatggtggcaccag

SEQ ID NO: 1038752 - DNA, 15 bp, Homo sapiens
gatggtggcaccagc

SEQ ID NO: 1038753 - DNA, 15 bp, Homo sapiens
atggtggcaccagcg

SEQ ID NO: 1038754 - DNA, 15 bp, Homo sapiens
tggtggcaccagcgt

SEQ ID NO: 1038755 - DNA, 15 bp, Homo sapiens
ggtggcaccagcgtt

SEQ ID NO: 1038756 - DNA, 15 bp, Homo sapiens
gtggcaccagcgtta

SEQ ID NO: 1038757 - DNA, 15 bp, Homo sapiens
tggcaccagcgttac

SEQ ID NO: 1038758 - DNA, 15 bp, Homo sapiens
ggcaccagcgttacg

SEQ ID NO: 1038759 - DNA, 15 bp, Homo sapiens
gcaccagcgttacga

SEQ ID NO: 1038760 - DNA, 15 bp, Homo sapiens
caccagcgttacgaa

SEQ ID NO: 1038761 - DNA, 15 bp, Homo sapiens
accagcgttacgaag

SEQ ID NO: 1038762 - DNA, 15 bp, Homo sapiens
ccagcgttacgaagg

SEQ ID NO: 1038763 - DNA, 15 bp, Homo sapiens
cagcgttacgaagga

SEQ ID NO: 1038764 - DNA, 15 bp, Homo sapiens
agcgttacgaaggat

SEQ ID NO: 1038765 - DNA, 15 bp, Homo sapiens
gcgttacgaaggata

SEQ ID NO: 1038766 - DNA, 15 bp, Homo sapiens
cgttacgaaggatag

SEQ ID NO: 1038767 - DNA, 15 bp, Homo sapiens
gttacgaaggatagg

SEQ ID NO: 1038768 - DNA, 15 bp, Homo sapiens
ttacgaaggataggg

SEQ ID NO: 1038769 - DNA, 15 bp, Homo sapiens
tacgaaggatagggc

SEQ ID NO: 1038770 - DNA, 15 bp, Homo sapiens
acgaaggatagggcc

SEQ ID NO: 1038771 - DNA, 15 bp, Homo sapiens
cgaaggatagggcca

SEQ ID NO: 1038772 - DNA, 15 bp, Homo sapiens
gaaggatagggccag

SEQ ID NO: 1038773 - DNA, 15 bp, Homo sapiens
aaggatagggccagg

SEQ ID NO: 1038774 - DNA, 15 bp, Homo sapiens
aggatagggccaggc

SEQ ID NO: 1038775 - DNA, 15 bp, Homo sapiens
ggatagggccaggcg

SEQ ID NO: 1038776 - DNA, 15 bp, Homo sapiens
gatagggccaggcgg

SEQ ID NO: 1038777 - DNA, 15 bp, Homo sapiens
atagggccaggcgga

SEQ ID NO: 1038778 - DNA, 15 bp, Homo sapiens
tagggccaggcggat

SEQ ID NO: 1038779 - DNA, 15 bp, Homo sapiens
agggccaggcggata

SEQ ID NO: 1038780 - DNA, 15 bp, Homo sapiens
gggccaggcggatac

SEQ ID NO: 1038781 - DNA, 15 bp, Homo sapiens
ggccaggcggatacc

SEQ ID NO: 1038782 - DNA, 15 bp, Homo sapiens
gccaggcggatacct

SEQ ID NO: 1038783 - DNA, 15 bp, Homo sapiens
ccaggcggatacctg

SEQ ID NO: 1038784 - DNA, 15 bp, Homo sapiens
caggcggatacctgg

SEQ ID NO: 1038785 - DNA, 15 bp, Homo sapiens
aggcggatacctggg

SEQ ID NO: 1038786 - DNA, 15 bp, Homo sapiens
ggcggatacctggga

SEQ ID NO: 1038787 - DNA, 15 bp, Homo sapiens
gcggatacctgggag

SEQ ID NO: 1038788 - DNA, 15 bp, Homo sapiens
cggatacctgggaga

SEQ ID NO: 1038789 - DNA, 15 bp, Homo sapiens
ggatacctgggagaa

SEQ ID NO: 1038790 - DNA, 15 bp, Homo sapiens
gatacctgggagaac

SEQ ID NO: 1038791 - DNA, 15 bp, Homo sapiens
atacctgggagaaca

SEQ ID NO: 1038792 - DNA, 15 bp, Homo sapiens
tacctgggagaacag

SEQ ID NO: 1038793 - DNA, 15 bp, Homo sapiens
acctgggagaacaga

SEQ ID NO: 1038794 - DNA, 15 bp, Homo sapiens
cctgggagaacagaa

SEQ ID NO: 1038795 - DNA, 15 bp, Homo sapiens
ctgggagaacagaat

SEQ ID NO: 1038796 - DNA, 15 bp, Homo sapiens
tgggagaacagaatt

SEQ ID NO: 1038797 - DNA, 15 bp, Homo sapiens
gggagaacagaattg

SEQ ID NO: 1038798 - DNA, 15 bp, Homo sapiens
ggagaacagaattgc

SEQ ID NO: 1038799 - DNA, 15 bp, Homo sapiens
gagaacagaattgcc

SEQ ID NO: 1038800 - DNA, 15 bp, Homo sapiens
agaacagaattgcct

SEQ ID NO: 1038801 - DNA, 15 bp, Homo sapiens
gaacagaattgcctg

SEQ ID NO: 1038802 - DNA, 15 bp, Homo sapiens
aacagaattgcctgt

SEQ ID NO: 1038803 - DNA, 15 bp, Homo sapiens
acagaattgcctgtg

SEQ ID NO: 1038804 - DNA, 15 bp, Homo sapiens
cagaattgcctgtgc

SEQ ID NO: 1038805 - DNA, 15 bp, Homo sapiens
agaattgcctgtgca

SEQ ID NO: 1038806 - DNA, 15 bp, Homo sapiens
gaattgcctgtgcag

SEQ ID NO: 1038807 - DNA, 15 bp, Homo sapiens
aattgcctgtgcagg

SEQ ID NO: 1038808 - DNA, 15 bp, Homo sapiens
attgcctgtgcaggg

SEQ ID NO: 1038809 - DNA, 15 bp, Homo sapiens
ttgcctgtgcagggt

SEQ ID NO: 1038810 - DNA, 15 bp, Homo sapiens
tgcctgtgcagggtg

SEQ ID NO: 1038811 - DNA, 15 bp, Homo sapiens
gcctgtgcagggtgt

SEQ ID NO: 1038812 - DNA, 15 bp, Homo sapiens
cctgtgcagggtgta

SEQ ID NO: 1038813 - DNA, 15 bp, Homo sapiens
ctgtgcagggtgtat

SEQ ID NO: 1038814 - DNA, 15 bp, Homo sapiens
tgtgcagggtgtatg

SEQ ID NO: 1038815 - DNA, 15 bp, Homo sapiens
gtgcagggtgtatgg

SEQ ID NO: 1038816 - DNA, 15 bp, Homo sapiens
tgcagggtgtatgga

SEQ ID NO: 1038817 - DNA, 15 bp, Homo sapiens
gcagggtgtatggag

SEQ ID NO: 1038818 - DNA, 15 bp, Homo sapiens
cagggtgtatggagg

SEQ ID NO: 1038819 - DNA, 15 bp, Homo sapiens
agggtgtatggaggc

SEQ ID NO: 1038820 - DNA, 15 bp, Homo sapiens
gggtgtatggaggcc

SEQ ID NO: 1038821 - DNA, 15 bp, Homo sapiens
ggtgtatggaggccc

SEQ ID NO: 1038822 - DNA, 15 bp, Homo sapiens
gtgtatggaggccct

SEQ ID NO: 1038823 - DNA, 15 bp, Homo sapiens
tgtatggaggccctg

SEQ ID NO: 1038824 - DNA, 15 bp, Homo sapiens
gtatggaggccctgg

SEQ ID NO: 1038825 - DNA, 15 bp, Homo sapiens
tatggaggccctggg

SEQ ID NO: 1038826 - DNA, 15 bp, Homo sapiens
atggaggccctgggg

SEQ ID NO: 1038827 - DNA, 15 bp, Homo sapiens
tggaggccctggggc

SEQ ID NO: 1038828 - DNA, 15 bp, Homo sapiens
ggaggccctggggct

SEQ ID NO: 1038829 - DNA, 15 bp, Homo sapiens
gaggccctggggctg

SEQ ID NO: 1038830 - DNA, 15 bp, Homo sapiens
aggccctggggctgg

SEQ ID NO: 1038831 - DNA, 15 bp, Homo sapiens
ggccctggggctgga

SEQ ID NO: 1038832 - DNA, 15 bp, Homo sapiens
gccctggggctggag

SEQ ID NO: 1038833 - DNA, 15 bp, Homo sapiens
ccctggggctggagc

SEQ ID NO: 1038834 - DNA, 15 bp, Homo sapiens
cctggggctggagcc

SEQ ID NO: 1038835 - DNA, 15 bp, Homo sapiens
ctggggctggagcct

SEQ ID NO: 1038836 - DNA, 15 bp, Homo sapiens
tggggctggagcctg

SEQ ID NO: 1038837 - DNA, 15 bp, Homo sapiens
ggggctggagcctgc

SEQ ID NO: 1038838 - DNA, 15 bp, Homo sapiens
gggctggagcctgcg

SEQ ID NO: 1038839 - DNA, 15 bp, Homo sapiens
ggctggagcctgcgg

SEQ ID NO: 1038840 - DNA, 15 bp, Homo sapiens
gctggagcctgcggg

SEQ ID NO: 1038841 - DNA, 15 bp, Homo sapiens
ctggagcctgcgggg

SEQ ID NO: 1038842 - DNA, 15 bp, Homo sapiens
tggagcctgcggggc

SEQ ID NO: 1038843 - DNA, 15 bp, Homo sapiens
ggagcctgcggggct

SEQ ID NO: 1038844 - DNA, 15 bp, Homo sapiens
gagcctgcggggctt

SEQ ID NO: 1038845 - DNA, 15 bp, Homo sapiens
agcctgcggggcttc

SEQ ID NO: 1038846 - DNA, 15 bp, Homo sapiens
gcctgcggggcttct

SEQ ID NO: 1038847 - DNA, 15 bp, Homo sapiens
cctgcggggcttctt

SEQ ID NO: 1038848 - DNA, 15 bp, Homo sapiens
ctgcggggcttcttc

SEQ ID NO: 1038849 - DNA, 15 bp, Homo sapiens
tgcggggcttcttcc

SEQ ID NO: 1038850 - DNA, 15 bp, Homo sapiens
gcggggcttcttcca

SEQ ID NO: 1038851 - DNA, 15 bp, Homo sapiens
cggggcttcttccag

SEQ ID NO: 1038852 - DNA, 15 bp, Homo sapiens
ggggcttcttccagg

SEQ ID NO: 1038853 - DNA, 15 bp, Homo sapiens
gggcttcttccaggg

SEQ ID NO: 1038854 - DNA, 15 bp, Homo sapiens
ggcttcttccaggga

SEQ ID NO: 1038855 - DNA, 15 bp, Homo sapiens
gcttcttccagggac

SEQ ID NO: 1038856 - DNA, 15 bp, Homo sapiens
cttcttccagggaca

SEQ ID NO: 1038857 - DNA, 15 bp, Homo sapiens
ttcttccagggacag

SEQ ID NO: 1038858 - DNA, 15 bp, Homo sapiens
tcttccagggacagt

SEQ ID NO: 1038859 - DNA, 15 bp, Homo sapiens
cttccagggacagtg

SEQ ID NO: 1038860 - DNA, 15 bp, Homo sapiens
ttccagggacagtga

SEQ ID NO: 1038861 - DNA, 15 bp, Homo sapiens
tccagggacagtgag

SEQ ID NO: 1038862 - DNA, 15 bp, Homo sapiens
ccagggacagtgagg

SEQ ID NO: 1038863 - DNA, 15 bp, Homo sapiens
cagggacagtgaggc

SEQ ID NO: 1038864 - DNA, 15 bp, Homo sapiens
agggacagtgaggct

SEQ ID NO: 1038865 - DNA, 15 bp, Homo sapiens
gggacagtgaggctg

SEQ ID NO: 1038866 - DNA, 15 bp, Homo sapiens
ggacagtgaggctgg

SEQ ID NO: 1038867 - DNA, 15 bp, Homo sapiens
gacagtgaggctgga

SEQ ID NO: 1038868 - DNA, 15 bp, Homo sapiens
acagtgaggctggag

SEQ ID NO: 1038869 - DNA, 15 bp, Homo sapiens
cagtgaggctggaga

SEQ ID NO: 1038870 - DNA, 15 bp, Homo sapiens
agtgaggctggagat

SEQ ID NO: 1038871 - DNA, 15 bp, Homo sapiens
gtgaggctggagatg

SEQ ID NO: 1038872 - DNA, 15 bp, Homo sapiens
tgaggctggagatgg

SEQ ID NO: 1038873 - DNA, 15 bp, Homo sapiens
gaggctggagatgga

SEQ ID NO: 1038874 - DNA, 15 bp, Homo sapiens
aggctggagatggac

SEQ ID NO: 1038875 - DNA, 15 bp, Homo sapiens
ggctggagatggact

SEQ ID NO: 1038876 - DNA, 15 bp, Homo sapiens
gctggagatggactg

SEQ ID NO: 1038877 - DNA, 15 bp, Homo sapiens
ctggagatggactgc

SEQ ID NO: 1038878 - DNA, 15 bp, Homo sapiens
tggagatggactgcg

SEQ ID NO: 1038879 - DNA, 15 bp, Homo sapiens
ggagatggactgcgg

SEQ ID NO: 1038880 - DNA, 15 bp, Homo sapiens
gagatggactgcgga

SEQ ID NO: 1038881 - DNA, 15 bp, Homo sapiens
agatggactgcggag

SEQ ID NO: 1038882 - DNA, 15 bp, Homo sapiens
gatggactgcggaga

SEQ ID NO: 1038883 - DNA, 15 bp, Homo sapiens
atggactgcggagat

SEQ ID NO: 1038884 - DNA, 15 bp, Homo sapiens
tggactgcggagatg

SEQ ID NO: 1038885 - DNA, 15 bp, Homo sapiens
ggactgcggagatga

SEQ ID NO: 1038886 - DNA, 15 bp, Homo sapiens
gactgcggagatgag

SEQ ID NO: 1038887 - DNA, 15 bp, Homo sapiens
actgcggagatgagg

SEQ ID NO: 1038888 - DNA, 15 bp, Homo sapiens
ctgcggagatgaggg

SEQ ID NO: 1038889 - DNA, 15 bp, Homo sapiens
tgcggagatgagggt

SEQ ID NO: 1038890 - DNA, 15 bp, Homo sapiens
gcggagatgagggtc

SEQ ID NO: 1038891 - DNA, 15 bp, Homo sapiens
cggagatgagggtct

SEQ ID NO: 1038892 - DNA, 15 bp, Homo sapiens
ggagatgagggtcta

SEQ ID NO: 1038893 - DNA, 15 bp, Homo sapiens
gagatgagggtctag

SEQ ID NO: 1038894 - DNA, 15 bp, Homo sapiens
agatgagggtctaga

SEQ ID NO: 1038895 - DNA, 15 bp, Homo sapiens
gatgagggtctagaa

SEQ ID NO: 1038896 - DNA, 15 bp, Homo sapiens
atgagggtctagaag

SEQ ID NO: 1038897 - DNA, 15 bp, Homo sapiens
tgagggtctagaagg

SEQ ID NO: 1038898 - DNA, 15 bp, Homo sapiens
gagggtctagaaggt

SEQ ID NO: 1038899 - DNA, 15 bp, Homo sapiens
agggtctagaaggtg

SEQ ID NO: 1038900 - DNA, 15 bp, Homo sapiens
gggtctagaaggtgg

SEQ ID NO: 1038901 - DNA, 15 bp, Homo sapiens
ggtctagaaggtggt

SEQ ID NO: 1038902 - DNA, 15 bp, Homo sapiens
gtctagaaggtggtg

SEQ ID NO: 1038903 - DNA, 15 bp, Homo sapiens
tctagaaggtggtgg

SEQ ID NO: 1038904 - DNA, 15 bp, Homo sapiens
ctagaaggtggtggc

SEQ ID NO: 1038905 - DNA, 15 bp, Homo sapiens
tagaaggtggtggcg

SEQ ID NO: 1038906 - DNA, 15 bp, Homo sapiens
agaaggtggtggcgg

SEQ ID NO: 1038907 - DNA, 15 bp, Homo sapiens
gaaggtggtggcggg

SEQ ID NO: 1038908 - DNA, 15 bp, Homo sapiens
aaggtggtggcgggg

SEQ ID NO: 1038909 - DNA, 15 bp, Homo sapiens
aggtggtggcggggc

SEQ ID NO: 1038910 - DNA, 15 bp, Homo sapiens
ggtggtggcggggca

SEQ ID NO: 1038911 - DNA, 15 bp, Homo sapiens
gtggtggcggggcat

SEQ ID NO: 1038912 - DNA, 15 bp, Homo sapiens
tggtggcggggcatg

SEQ ID NO: 1038913 - DNA, 15 bp, Homo sapiens
ggtggcggggcatgt

SEQ ID NO: 1038914 - DNA, 15 bp, Homo sapiens
gtggcggggcatgtg

SEQ ID NO: 1038915 - DNA, 15 bp, Homo sapiens
tggcggggcatgtgg

SEQ ID NO: 1038916 - DNA, 15 bp, Homo sapiens
ggcggggcatgtgga

SEQ ID NO: 1038917 - DNA, 15 bp, Homo sapiens
gcggggcatgtggac

SEQ ID NO: 1038918 - DNA, 15 bp, Homo sapiens
cggggcatgtggacc

SEQ ID NO: 1038919 - DNA, 15 bp, Homo sapiens
ggggcatgtggaccg

SEQ ID NO: 1038920 - DNA, 15 bp, Homo sapiens
gggcatgtggaccgt

SEQ ID NO: 1038921 - DNA, 15 bp, Homo sapiens
ggcatgtggaccgtt

SEQ ID NO: 1038922 - DNA, 15 bp, Homo sapiens
gcatgtggaccgttg

SEQ ID NO: 1038923 - DNA, 15 bp, Homo sapiens
catgtggaccgttgt

SEQ ID NO: 1038924 - DNA, 15 bp, Homo sapiens
atgtggaccgttgta

SEQ ID NO: 1038925 - DNA, 15 bp, Homo sapiens
tgtggaccgttgtaa

SEQ ID NO: 1038926 - DNA, 15 bp, Homo sapiens
gtggaccgttgtaag

SEQ ID NO: 1038927 - DNA, 15 bp, Homo sapiens
tggaccgttgtaagg

SEQ ID NO: 1038928 - DNA, 15 bp, Homo sapiens
ggaccgttgtaaggg

SEQ ID NO: 1038929 - DNA, 15 bp, Homo sapiens
gaccgttgtaagggc

SEQ ID NO: 1038930 - DNA, 15 bp, Homo sapiens
accgttgtaagggct

SEQ ID NO: 1038931 - DNA, 15 bp, Homo sapiens
ccgttgtaagggctc

SEQ ID NO: 1038932 - DNA, 15 bp, Homo sapiens
cgttgtaagggctct

SEQ ID NO: 1038933 - DNA, 15 bp, Homo sapiens
gttgtaagggctctg

SEQ ID NO: 1038934 - DNA, 15 bp, Homo sapiens
ttgtaagggctctgg

SEQ ID NO: 1038935 - DNA, 15 bp, Homo sapiens
tgtaagggctctggg

SEQ ID NO: 1038936 - DNA, 15 bp, Homo sapiens
gtaagggctctgggg

SEQ ID NO: 1038937 - DNA, 15 bp, Homo sapiens
taagggctctggggt

SEQ ID NO: 1038938 - DNA, 15 bp, Homo sapiens
aagggctctggggtt

SEQ ID NO: 1038939 - DNA, 15 bp, Homo sapiens
agggctctggggttc

SEQ ID NO: 1038940 - DNA, 15 bp, Homo sapiens
gggctctggggttcc

SEQ ID NO: 1038941 - DNA, 15 bp, Homo sapiens
ggctctggggttcct

SEQ ID NO: 1038942 - DNA, 15 bp, Homo sapiens
gctctggggttcctg

SEQ ID NO: 1038943 - DNA, 15 bp, Homo sapiens
ctctggggttcctgg

SEQ ID NO: 1038944 - DNA, 15 bp, Homo sapiens
tctggggttcctggg

SEQ ID NO: 1038945 - DNA, 15 bp, Homo sapiens
ctggggttcctgggt

SEQ ID NO: 1038946 - DNA, 15 bp, Homo sapiens
tggggttcctgggtg

SEQ ID NO: 1038947 - DNA, 15 bp, Homo sapiens
ggggttcctgggtgg

SEQ ID NO: 1038948 - DNA, 15 bp, Homo sapiens
gggttcctgggtggg

SEQ ID NO: 1038949 - DNA, 15 bp, Homo sapiens
ggttcctgggtgggc

SEQ ID NO: 1038950 - DNA, 15 bp, Homo sapiens
gttcctgggtgggct

SEQ ID NO: 1038951 - DNA, 15 bp, Homo sapiens
ttcctgggtgggctg

SEQ ID NO: 1038952 - DNA, 15 bp, Homo sapiens
tcctgggtgggctgg

SEQ ID NO: 1038953 - DNA, 15 bp, Homo sapiens
cctgggtgggctggc

SEQ ID NO: 1038954 - DNA, 15 bp, Homo sapiens
ctgggtgggctggcg

SEQ ID NO: 1038955 - DNA, 15 bp, Homo sapiens
tgggtgggctggcga

SEQ ID NO: 1038956 - DNA, 15 bp, Homo sapiens
gggtgggctggcgaa

SEQ ID NO: 1038957 - DNA, 15 bp, Homo sapiens
ggtgggctggcgaag

SEQ ID NO: 1038958 - DNA, 15 bp, Homo sapiens
gtgggctggcgaagt

SEQ ID NO: 1038959 - DNA, 15 bp, Homo sapiens
tgggctggcgaagtc

SEQ ID NO: 1038960 - DNA, 15 bp, Homo sapiens
gggctggcgaagtcc

SEQ ID NO: 1038961 - DNA, 15 bp, Homo sapiens
ggctggcgaagtcct

SEQ ID NO: 1038962 - DNA, 15 bp, Homo sapiens
gctggcgaagtccta

SEQ ID NO: 1038963 - DNA, 15 bp, Homo sapiens
ctggcgaagtcctac

SEQ ID NO: 1038964 - DNA, 15 bp, Homo sapiens
tggcgaagtcctact

SEQ ID NO: 1038965 - DNA, 15 bp, Homo sapiens
ggcgaagtcctactc

SEQ ID NO: 1038966 - DNA, 15 bp, Homo sapiens
gcgaagtcctactca

SEQ ID NO: 1038967 - DNA, 15 bp, Homo sapiens
cgaagtcctactcac

SEQ ID NO: 1038968 - DNA, 15 bp, Homo sapiens
gaagtcctactcaca

SEQ ID NO: 1038969 - DNA, 15 bp, Homo sapiens
aagtcctactcacag

SEQ ID NO: 1038970 - DNA, 15 bp, Homo sapiens
agtcctactcacagt

SEQ ID NO: 1038971 - DNA, 15 bp, Homo sapiens
gtcctactcacagtg

SEQ ID NO: 1038972 - DNA, 15 bp, Homo sapiens
tcctactcacagtga

SEQ ID NO: 1038973 - DNA, 15 bp, Homo sapiens
cctactcacagtgac

SEQ ID NO: 1038974 - DNA, 15 bp, Homo sapiens
ctactcacagtgacc

SEQ ID NO: 1038975 - DNA, 15 bp, Homo sapiens
tactcacagtgacca

SEQ ID NO: 1038976 - DNA, 15 bp, Homo sapiens
actcacagtgaccaa

SEQ ID NO: 1038977 - DNA, 15 bp, Homo sapiens
ctcacagtgaccaac

SEQ ID NO: 1038978 - DNA, 15 bp, Homo sapiens
tcacagtgaccaacc

SEQ ID NO: 1038979 - DNA, 15 bp, Homo sapiens
cacagtgaccaacca

SEQ ID NO: 1038980 - DNA, 15 bp, Homo sapiens
acagtgaccaaccat

SEQ ID NO: 1038981 - DNA, 15 bp, Homo sapiens
cagtgaccaaccatg

SEQ ID NO: 1038982 - DNA, 15 bp, Homo sapiens
agtgaccaaccatga

SEQ ID NO: 1038983 - DNA, 15 bp, Homo sapiens
gtgaccaaccatgat

SEQ ID NO: 1038984 - DNA, 15 bp, Homo sapiens
tgaccaaccatgatg

SEQ ID NO: 1038985 - DNA, 15 bp, Homo sapiens
gaccaaccatgatga

SEQ ID NO: 1038986 - DNA, 15 bp, Homo sapiens
accaaccatgatgat

SEQ ID NO: 1038987 - DNA, 15 bp, Homo sapiens
ccaaccatgatgatg

SEQ ID NO: 1038988 - DNA, 15 bp, Homo sapiens
caaccatgatgatgg

SEQ ID NO: 1038989 - DNA, 15 bp, Homo sapiens
aaccatgatgatggt

SEQ ID NO: 1038990 - DNA, 15 bp, Homo sapiens
accatgatgatggtc

SEQ ID NO: 1038991 - DNA, 15 bp, Homo sapiens
ccatgatgatggtcc

SEQ ID NO: 1038992 - DNA, 15 bp, Homo sapiens
catgatgatggtccc

SEQ ID NO: 1038993 - DNA, 15 bp, Homo sapiens
atgatgatggtcccg

SEQ ID NO: 1038994 - DNA, 15 bp, Homo sapiens
tgatgatggtcccga

SEQ ID NO: 1038995 - DNA, 15 bp, Homo sapiens
gatgatggtcccgat

SEQ ID NO: 1038996 - DNA, 15 bp, Homo sapiens
atgatggtcccgata

SEQ ID NO: 1038997 - DNA, 15 bp, Homo sapiens
tgatggtcccgatag

SEQ ID NO: 1038998 - DNA, 15 bp, Homo sapiens
gatggtcccgataga

SEQ ID NO: 1038999 - DNA, 15 bp, Homo sapiens
atggtcccgatagag

SEQ ID NO: 1039000 - DNA, 15 bp, Homo sapiens
tggtcccgatagagg

SEQ ID NO: 1039001 - DNA, 15 bp, Homo sapiens
ggtcccgatagagga

SEQ ID NO: 1039002 - DNA, 15 bp, Homo sapiens
gtcccgatagaggag

SEQ ID NO: 1039003 - DNA, 15 bp, Homo sapiens
tcccgatagaggagg

SEQ ID NO: 1039004 - DNA, 15 bp, Homo sapiens
cccgatagaggagga

SEQ ID NO: 1039005 - DNA, 15 bp, Homo sapiens
ccgatagaggaggag

SEQ ID NO: 1039006 - DNA, 15 bp, Homo sapiens
cgatagaggaggaga

SEQ ID NO: 1039007 - DNA, 15 bp, Homo sapiens
gatagaggaggagag

SEQ ID NO: 1039008 - DNA, 15 bp, Homo sapiens
atagaggaggagagg

SEQ ID NO: 1039009 - DNA, 15 bp, Homo sapiens
tagaggaggagaggg

SEQ ID NO: 1039010 - DNA, 15 bp, Homo sapiens
agaggaggagaggga

SEQ ID NO: 1039011 - DNA, 15 bp, Homo sapiens
gaggaggagagggag

SEQ ID NO: 1039012 - DNA, 15 bp, Homo sapiens
aggaggagagggagg

SEQ ID NO: 1039013 - DNA, 15 bp, Homo sapiens
ggaggagagggagga

SEQ ID NO: 1039014 - DNA, 15 bp, Homo sapiens
gaggagagggaggag

SEQ ID NO: 1039015 - DNA, 15 bp, Homo sapiens
aggagagggaggagg

SEQ ID NO: 1039016 - DNA, 15 bp, Homo sapiens
ggagagggaggagga

SEQ ID NO: 1039017 - DNA, 15 bp, Homo sapiens
gagagggaggaggag

SEQ ID NO: 1039018 - DNA, 15 bp, Homo sapiens
agagggaggaggagg

SEQ ID NO: 1039019 - DNA, 15 bp, Homo sapiens
gagggaggaggaggg

SEQ ID NO: 1039020 - DNA, 15 bp, Homo sapiens
agggaggaggaggga

SEQ ID NO: 1039021 - DNA, 15 bp, Homo sapiens
gggaggaggagggaa

SEQ ID NO: 1039022 - DNA, 15 bp, Homo sapiens
ggaggaggagggaaa

SEQ ID NO: 1039023 - DNA, 15 bp, Homo sapiens
gaggaggagggaaaa

SEQ ID NO: 1039024 - DNA, 15 bp, Homo sapiens
aggaggagggaaaag

SEQ ID NO: 1039025 - DNA, 15 bp, Homo sapiens
ggaggagggaaaagg

SEQ ID NO: 1039026 - DNA, 15 bp, Homo sapiens
gaggagggaaaagga

SEQ ID NO: 1039027 - DNA, 15 bp, Homo sapiens
aggagggaaaaggaa

SEQ ID NO: 1039028 - DNA, 15 bp, Homo sapiens
ggagggaaaaggaag

SEQ ID NO: 1039029 - DNA, 15 bp, Homo sapiens
gagggaaaaggaagg

SEQ ID NO: 1039030 - DNA, 15 bp, Homo sapiens
agggaaaaggaaggg

SEQ ID NO: 1039031 - DNA, 15 bp, Homo sapiens
gggaaaaggaagggt

SEQ ID NO: 1039032 - DNA, 15 bp, Homo sapiens
ggaaaaggaagggtg

SEQ ID NO: 1039033 - DNA, 15 bp, Homo sapiens
gaaaaggaagggtga

SEQ ID NO: 1039034 - DNA, 15 bp, Homo sapiens
aaaaggaagggtgag

SEQ ID NO: 1039035 - DNA, 15 bp, Homo sapiens
aaaggaagggtgagg

SEQ ID NO: 1039036 - DNA, 15 bp, Homo sapiens
aaggaagggtgaggg

SEQ ID NO: 1039037 - DNA, 15 bp, Homo sapiens
aggaagggtgagggg

SEQ ID NO: 1039038 - DNA, 15 bp, Homo sapiens
ggaagggtgaggggc

SEQ ID NO: 1039039 - DNA, 15 bp, Homo sapiens
gaagggtgaggggct

SEQ ID NO: 1039040 - DNA, 15 bp, Homo sapiens
aagggtgaggggctc

SEQ ID NO: 1039041 - DNA, 15 bp, Homo sapiens
agggtgaggggctca

SEQ ID NO: 1039042 - DNA, 15 bp, Homo sapiens
gggtgaggggctcag

SEQ ID NO: 1039043 - DNA, 15 bp, Homo sapiens
ggtgaggggctcaga

SEQ ID NO: 1039044 - DNA, 15 bp, Homo sapiens
gtgaggggctcagag

SEQ ID NO: 1039045 - DNA, 15 bp, Homo sapiens
tgaggggctcagagg

SEQ ID NO: 1039046 - DNA, 15 bp, Homo sapiens
gaggggctcagaggg

SEQ ID NO: 1039047 - DNA, 15 bp, Homo sapiens
aggggctcagagggg

SEQ ID NO: 1039048 - DNA, 15 bp, Homo sapiens
ggggctcagagggga

SEQ ID NO: 1039049 - DNA, 15 bp, Homo sapiens
gggctcagaggggag

SEQ ID NO: 1039050 - DNA, 15 bp, Homo sapiens
ggctcagaggggaga

SEQ ID NO: 1039051 - DNA, 15 bp, Homo sapiens
gctcagaggggagag

SEQ ID NO: 1039052 - DNA, 15 bp, Homo sapiens
ctcagaggggagagc

SEQ ID NO: 1039053 - DNA, 15 bp, Homo sapiens
tcagaggggagagct

SEQ ID NO: 1039054 - DNA, 15 bp, Homo sapiens
cagaggggagagctg

SEQ ID NO: 1039055 - DNA, 15 bp, Homo sapiens
agaggggagagctgg

SEQ ID NO: 1039056 - DNA, 15 bp, Homo sapiens
gaggggagagctggg

SEQ ID NO: 1039057 - DNA, 15 bp, Homo sapiens
aggggagagctggga

SEQ ID NO: 1039058 - DNA, 15 bp, Homo sapiens
ggggagagctgggag

SEQ ID NO: 1039059 - DNA, 15 bp, Homo sapiens
gggagagctgggagg

SEQ ID NO: 1039060 - DNA, 15 bp, Homo sapiens
ggagagctgggagga

SEQ ID NO: 1039061 - DNA, 15 bp, Homo sapiens
gagagctgggaggag

SEQ ID NO: 1039062 - DNA, 15 bp, Homo sapiens
agagctgggaggagg

SEQ ID NO: 1039063 - DNA, 15 bp, Homo sapiens
gagctgggaggaggg

SEQ ID NO: 1039064 - DNA, 15 bp, Homo sapiens
agctgggaggagggg

SEQ ID NO: 1039065 - DNA, 15 bp, Homo sapiens
gctgggaggagggga

SEQ ID NO: 1039066 - DNA, 15 bp, Homo sapiens
ctgggaggaggggag

SEQ ID NO: 1039067 - DNA, 15 bp, Homo sapiens
tgggaggaggggaga

SEQ ID NO: 1039068 - DNA, 15 bp, Homo sapiens
gggaggaggggagac

SEQ ID NO: 1039069 - DNA, 15 bp, Homo sapiens
ggaggaggggagaca

SEQ ID NO: 1039070 - DNA, 15 bp, Homo sapiens
gaggaggggagacat

SEQ ID NO: 1039071 - DNA, 15 bp, Homo sapiens
aggaggggagacata

SEQ ID NO: 1039072 - DNA, 15 bp, Homo sapiens
ggaggggagacatag

SEQ ID NO: 1039073 - DNA, 15 bp, Homo sapiens
gaggggagacatagg

SEQ ID NO: 1039074 - DNA, 15 bp, Homo sapiens
aggggagacataggt

SEQ ID NO: 1039075 - DNA, 15 bp, Homo sapiens
ggggagacataggtg

SEQ ID NO: 1039076 - DNA, 15 bp, Homo sapiens
gggagacataggtgg

SEQ ID NO: 1039077 - DNA, 15 bp, Homo sapiens
ggagacataggtggg

SEQ ID NO: 1039078 - DNA, 15 bp, Homo sapiens
gagacataggtgggg

SEQ ID NO: 1039079 - DNA, 15 bp, Homo sapiens
agacataggtggggg

SEQ ID NO: 1039080 - DNA, 15 bp, Homo sapiens
gacataggtggggga

SEQ ID NO: 1039081 - DNA, 15 bp, Homo sapiens
acataggtgggggaa

SEQ ID NO: 1039082 - DNA, 15 bp, Homo sapiens
cataggtgggggaag

SEQ ID NO: 1039083 - DNA, 15 bp, Homo sapiens
ataggtgggggaagg

SEQ ID NO: 1039084 - DNA, 15 bp, Homo sapiens
taggtgggggaaggg

SEQ ID NO: 1039085 - DNA, 15 bp, Homo sapiens
aggtgggggaagggg

SEQ ID NO: 1039086 - DNA, 15 bp, Homo sapiens
ggtgggggaaggggt

SEQ ID NO: 1039087 - DNA, 15 bp, Homo sapiens
gtgggggaaggggta

SEQ ID NO: 1039088 - DNA, 15 bp, Homo sapiens
tgggggaaggggtag

SEQ ID NO: 1039089 - DNA, 15 bp, Homo sapiens
gggggaaggggtagg

SEQ ID NO: 1039090 - DNA, 15 bp, Homo sapiens
ggggaaggggtagga

SEQ ID NO: 1039091 - DNA, 15 bp, Homo sapiens
gggaaggggtaggag

SEQ ID NO: 1039092 - DNA, 15 bp, Homo sapiens
ggaaggggtaggaga

SEQ ID NO: 1039093 - DNA, 15 bp, Homo sapiens
gaaggggtaggagaa

SEQ ID NO: 1039094 - DNA, 15 bp, Homo sapiens
aaggggtaggagaaa

SEQ ID NO: 1039095 - DNA, 15 bp, Homo sapiens
aggggtaggagaaag

SEQ ID NO: 1039096 - DNA, 15 bp, Homo sapiens
ggggtaggagaaagg

SEQ ID NO: 1039097 - DNA, 15 bp, Homo sapiens
gggtaggagaaaggg

SEQ ID NO: 1039098 - DNA, 15 bp, Homo sapiens
ggtaggagaaagggg

SEQ ID NO: 1039099 - DNA, 15 bp, Homo sapiens
gtaggagaaagggga

SEQ ID NO: 1039100 - DNA, 15 bp, Homo sapiens
taggagaaaggggaa

SEQ ID NO: 1039101 - DNA, 15 bp, Homo sapiens
aggagaaaggggaag

SEQ ID NO: 1039102 - DNA, 15 bp, Homo sapiens
ggagaaaggggaagg

SEQ ID NO: 1039103 - DNA, 15 bp, Homo sapiens
gagaaaggggaaggg

SEQ ID NO: 1039104 - DNA, 15 bp, Homo sapiens
agaaaggggaaggga

SEQ ID NO: 1039105 - DNA, 15 bp, Homo sapiens
gaaaggggaagggag

SEQ ID NO: 1039106 - DNA, 15 bp, Homo sapiens
aaaggggaagggagc

SEQ ID NO: 1039107 - DNA, 15 bp, Homo sapiens
aaggggaagggagca

SEQ ID NO: 1039108 - DNA, 15 bp, Homo sapiens
aggggaagggagcaa

SEQ ID NO: 1039109 - DNA, 15 bp, Homo sapiens
ggggaagggagcaag

SEQ ID NO: 1039110 - DNA, 15 bp, Homo sapiens
gggaagggagcaaga

SEQ ID NO: 1039111 - DNA, 15 bp, Homo sapiens
ggaagggagcaagag

SEQ ID NO: 1039112 - DNA, 15 bp, Homo sapiens
gaagggagcaagagg

SEQ ID NO: 1039113 - DNA, 15 bp, Homo sapiens
aagggagcaagaggg

SEQ ID NO: 1039114 - DNA, 15 bp, Homo sapiens
agggagcaagagggt

SEQ ID NO: 1039115 - DNA, 15 bp, Homo sapiens
gggagcaagagggtg

SEQ ID NO: 1039116 - DNA, 15 bp, Homo sapiens
ggagcaagagggtga

SEQ ID NO: 1039117 - DNA, 15 bp, Homo sapiens
gagcaagagggtgag

SEQ ID NO: 1039118 - DNA, 15 bp, Homo sapiens
agcaagagggtgagg

SEQ ID NO: 1039119 - DNA, 15 bp, Homo sapiens
gcaagagggtgaggg

SEQ ID NO: 1039120 - DNA, 15 bp, Homo sapiens
caagagggtgagggg

SEQ ID NO: 1039121 - DNA, 15 bp, Homo sapiens
aagagggtgaggggc

SEQ ID NO: 1039122 - DNA, 15 bp, Homo sapiens
agagggtgaggggca

SEQ ID NO: 1039123 - DNA, 15 bp, Homo sapiens
gagggtgaggggcac

SEQ ID NO: 1039124 - DNA, 15 bp, Homo sapiens
agggtgaggggcacc

SEQ ID NO: 1039125 - DNA, 15 bp, Homo sapiens
gggtgaggggcacca

SEQ ID NO: 1039126 - DNA, 15 bp, Homo sapiens
ggtgaggggcaccag

SEQ ID NO: 1039127 - DNA, 15 bp, Homo sapiens
gtgaggggcaccagg

SEQ ID NO: 1039128 - DNA, 15 bp, Homo sapiens
tgaggggcaccaggc

SEQ ID NO: 1039129 - DNA, 15 bp, Homo sapiens
gaggggcaccaggcc

SEQ ID NO: 1039130 - DNA, 15 bp, Homo sapiens
aggggcaccaggccc

SEQ ID NO: 1039131 - DNA, 15 bp, Homo sapiens
ggggcaccaggcccc

SEQ ID NO: 1039132 - DNA, 15 bp, Homo sapiens
gggcaccaggcccca

SEQ ID NO: 1039133 - DNA, 15 bp, Homo sapiens
ggcaccaggccccat

SEQ ID NO: 1039134 - DNA, 15 bp, Homo sapiens
gcaccaggccccata

SEQ ID NO: 1039135 - DNA, 15 bp, Homo sapiens
caccaggccccatag

SEQ ID NO: 1039136 - DNA, 15 bp, Homo sapiens
accaggccccataga

SEQ ID NO: 1039137 - DNA, 15 bp, Homo sapiens
ccaggccccatagac

SEQ ID NO: 1039138 - DNA, 15 bp, Homo sapiens
caggccccatagacg

SEQ ID NO: 1039139 - DNA, 15 bp, Homo sapiens
aggccccatagacgt

SEQ ID NO: 1039140 - DNA, 15 bp, Homo sapiens
ggccccatagacgtt

SEQ ID NO: 1039141 - DNA, 15 bp, Homo sapiens
gccccatagacgttt

SEQ ID NO: 1039142 - DNA, 15 bp, Homo sapiens
ccccatagacgtttt

SEQ ID NO: 1039143 - DNA, 15 bp, Homo sapiens
cccatagacgttttg

SEQ ID NO: 1039144 - DNA, 15 bp, Homo sapiens
ccatagacgttttgg

SEQ ID NO: 1039145 - DNA, 15 bp, Homo sapiens
catagacgttttggc

SEQ ID NO: 1039146 - DNA, 15 bp, Homo sapiens
atagacgttttggct

SEQ ID NO: 1039147 - DNA, 15 bp, Homo sapiens
tagacgttttggctc

SEQ ID NO: 1039148 - DNA, 15 bp, Homo sapiens
agacgttttggctca

SEQ ID NO: 1039149 - DNA, 15 bp, Homo sapiens
gacgttttggctcag

SEQ ID NO: 1039150 - DNA, 15 bp, Homo sapiens
acgttttggctcagc

SEQ ID NO: 1039151 - DNA, 15 bp, Homo sapiens
cgttttggctcagcg

SEQ ID NO: 1039152 - DNA, 15 bp, Homo sapiens
gttttggctcagcgg

SEQ ID NO: 1039153 - DNA, 15 bp, Homo sapiens
ttttggctcagcggc

SEQ ID NO: 1039154 - DNA, 15 bp, Homo sapiens
tttggctcagcggcc

SEQ ID NO: 1039155 - DNA, 15 bp, Homo sapiens
ttggctcagcggcca

SEQ ID NO: 1039156 - DNA, 15 bp, Homo sapiens
tggctcagcggccac

SEQ ID NO: 1039157 - DNA, 15 bp, Homo sapiens
ggctcagcggccacg

SEQ ID NO: 1039158 - DNA, 15 bp, Homo sapiens
gctcagcggccacga

SEQ ID NO: 1039159 - DNA, 15 bp, Homo sapiens
ctcagcggccacgag

SEQ ID NO: 1039160 - DNA, 15 bp, Homo sapiens
tcagcggccacgagg

SEQ ID NO: 1039161 - DNA, 15 bp, Homo sapiens
cagcggccacgaggc

SEQ ID NO: 1039162 - DNA, 15 bp, Homo sapiens
agcggccacgaggcc

SEQ ID NO: 1039163 - DNA, 15 bp, Homo sapiens
gcggccacgaggcct

SEQ ID NO: 1039164 - DNA, 15 bp, Homo sapiens
cggccacgaggcctc

SEQ ID NO: 1039165 - DNA, 15 bp, Homo sapiens
ggccacgaggcctcc

SEQ ID NO: 1039166 - DNA, 15 bp, Homo sapiens
gccacgaggcctcct

SEQ ID NO: 1039167 - DNA, 15 bp, Homo sapiens
ccacgaggcctcctc

SEQ ID NO: 1039168 - DNA, 15 bp, Homo sapiens
cacgaggcctcctca

SEQ ID NO: 1039169 - DNA, 15 bp, Homo sapiens
acgaggcctcctcag

SEQ ID NO: 1039170 - DNA, 15 bp, Homo sapiens
cgaggcctcctcagc

SEQ ID NO: 1039171 - DNA, 15 bp, Homo sapiens
gaggcctcctcagct

SEQ ID NO: 1039172 - DNA, 15 bp, Homo sapiens
aggcctcctcagctc

SEQ ID NO: 1039173 - DNA, 15 bp, Homo sapiens
ggcctcctcagctcc

SEQ ID NO: 1039174 - DNA, 15 bp, Homo sapiens
gcctcctcagctccc

SEQ ID NO: 1039175 - DNA, 15 bp, Homo sapiens
cctcctcagctcccg

SEQ ID NO: 1039176 - DNA, 15 bp, Homo sapiens
ctcctcagctcccgc

SEQ ID NO: 1039177 - DNA, 15 bp, Homo sapiens
tcctcagctcccgcc

SEQ ID NO: 1039178 - DNA, 15 bp, Homo sapiens
cctcagctcccgccc

SEQ ID NO: 1039179 - DNA, 15 bp, Homo sapiens
ctcagctcccgcccc

SEQ ID NO: 1039180 - DNA, 15 bp, Homo sapiens
tcagctcccgcccca

SEQ ID NO: 1039181 - DNA, 15 bp, Homo sapiens
cagctcccgccccaa

SEQ ID NO: 1039182 - DNA, 15 bp, Homo sapiens
agctcccgccccaaa

SEQ ID NO: 1039183 - DNA, 15 bp, Homo sapiens
gctcccgccccaaaa

SEQ ID NO: 1039184 - DNA, 15 bp, Homo sapiens
ctcccgccccaaaac

SEQ ID NO: 1039185 - DNA, 15 bp, Homo sapiens
tcccgccccaaaacg

SEQ ID NO: 1039186 - DNA, 15 bp, Homo sapiens
cccgccccaaaacgg

SEQ ID NO: 1039187 - DNA, 15 bp, Homo sapiens
ccgccccaaaacgga

SEQ ID NO: 1039188 - DNA, 15 bp, Homo sapiens
cgccccaaaacggaa

SEQ ID NO: 1039189 - DNA, 15 bp, Homo sapiens
gccccaaaacggaag

SEQ ID NO: 1039190 - DNA, 15 bp, Homo sapiens
ccccaaaacggaagc

SEQ ID NO: 1039191 - DNA, 15 bp, Homo sapiens
cccaaaacggaagcg

SEQ ID NO: 1039192 - DNA, 15 bp, Homo sapiens
ccaaaacggaagcga

SEQ ID NO: 1039193 - DNA, 15 bp, Homo sapiens
caaaacggaagcgag

SEQ ID NO: 1039194 - DNA, 15 bp, Homo sapiens
aaaacggaagcgagg

SEQ ID NO: 1039195 - DNA, 15 bp, Homo sapiens
aaacggaagcgaggc

SEQ ID NO: 1039196 - DNA, 15 bp, Homo sapiens
aacggaagcgaggcc

SEQ ID NO: 1039197 - DNA, 15 bp, Homo sapiens
acggaagcgaggccg

SEQ ID NO: 1039198 - DNA, 15 bp, Homo sapiens
cggaagcgaggccgt

SEQ ID NO: 1039199 - DNA, 15 bp, Homo sapiens
ggaagcgaggccgtg

SEQ ID NO: 1039200 - DNA, 15 bp, Homo sapiens
gaagcgaggccgtgg

SEQ ID NO: 1039201 - DNA, 15 bp, Homo sapiens
aagcgaggccgtggg

SEQ ID NO: 1039202 - DNA, 15 bp, Homo sapiens
agcgaggccgtgggg

SEQ ID NO: 1039203 - DNA, 15 bp, Homo sapiens
gcgaggccgtggggg

SEQ ID NO: 1039204 - DNA, 15 bp, Homo sapiens
cgaggccgtgggggc

SEQ ID NO: 1039205 - DNA, 15 bp, Homo sapiens
gaggccgtgggggca

SEQ ID NO: 1039206 - DNA, 15 bp, Homo sapiens
aggccgtgggggcag

SEQ ID NO: 1039207 - DNA, 15 bp, Homo sapiens
ggccgtgggggcagc

SEQ ID NO: 1039208 - DNA, 15 bp, Homo sapiens
gccgtgggggcagcg

SEQ ID NO: 1039209 - DNA, 15 bp, Homo sapiens
ccgtgggggcagcgg

SEQ ID NO: 1039210 - DNA, 15 bp, Homo sapiens
cgtgggggcagcggc

SEQ ID NO: 1039211 - DNA, 15 bp, Homo sapiens
gtgggggcagcggca

SEQ ID NO: 1039212 - DNA, 15 bp, Homo sapiens
tgggggcagcggcag

SEQ ID NO: 1039213 - DNA, 15 bp, Homo sapiens
gggggcagcggcagc

SEQ ID NO: 1039214 - DNA, 15 bp, Homo sapiens
ggggcagcggcagca

SEQ ID NO: 1039215 - DNA, 15 bp, Homo sapiens
gggcagcggcagcat

SEQ ID NO: 1039216 - DNA, 15 bp, Homo sapiens
ggcagcggcagcatg

SEQ ID NO: 1039217 - DNA, 15 bp, Homo sapiens
gcagcggcagcatgg

SEQ ID NO: 1039218 - DNA, 15 bp, Homo sapiens
cagcggcagcatggc

SEQ ID NO: 1039219 - DNA, 15 bp, Homo sapiens
agcggcagcatggcg

SEQ ID NO: 1039220 - DNA, 15 bp, Homo sapiens
gcggcagcatggcgg

SEQ ID NO: 1039221 - DNA, 15 bp, Homo sapiens
cggcagcatggcggg

SEQ ID NO: 1039222 - DNA, 15 bp, Homo sapiens
ggcagcatggcgggg

SEQ ID NO: 1039223 - DNA, 15 bp, Homo sapiens
gcagcatggcggggc

SEQ ID NO: 1039224 - DNA, 15 bp, Homo sapiens
cagcatggcggggct

SEQ ID NO: 1039225 - DNA, 15 bp, Homo sapiens
agcatggcggggctt

SEQ ID NO: 1039226 - DNA, 15 bp, Homo sapiens
gcatggcggggcttg

SEQ ID NO: 1039227 - DNA, 15 bp, Homo sapiens
catggcggggcttgt

SEQ ID NO: 1039228 - DNA, 15 bp, Homo sapiens
atggcggggcttgtc

SEQ ID NO: 1039229 - DNA, 15 bp, Homo sapiens
tggcggggcttgtct

SEQ ID NO: 1039230 - DNA, 15 bp, Homo sapiens
ggcggggcttgtctt

SEQ ID NO: 1039231 - DNA, 15 bp, Homo sapiens
gcggggcttgtcttg

SEQ ID NO: 1039232 - DNA, 15 bp, Homo sapiens
cggggcttgtcttgg

SEQ ID NO: 1039233 - DNA, 15 bp, Homo sapiens
ggggcttgtcttggc

SEQ ID NO: 1039234 - DNA, 15 bp, Homo sapiens
gggcttgtcttggcg

SEQ ID NO: 1039235 - DNA, 15 bp, Homo sapiens
ggcttgtcttggcgg

SEQ ID NO: 1039236 - DNA, 15 bp, Homo sapiens
gcttgtcttggcggc

SEQ ID NO: 1039237 - DNA, 15 bp, Homo sapiens
cttgtcttggcggcc

SEQ ID NO: 1039238 - DNA, 15 bp, Homo sapiens
ttgtcttggcggcca

SEQ ID NO: 1039239 - DNA, 15 bp, Homo sapiens
tgtcttggcggccat

SEQ ID NO: 1039240 - DNA, 15 bp, Homo sapiens
gtcttggcggccatg

SEQ ID NO: 1039241 - DNA, 15 bp, Homo sapiens
tcttggcggccatgg

SEQ ID NO: 1039242 - DNA, 15 bp, Homo sapiens
cttggcggccatggc

SEQ ID NO: 1039243 - DNA, 15 bp, Homo sapiens
ttggcggccatggcc

SEQ ID NO: 1039244 - DNA, 15 bp, Homo sapiens
tggcggccatggccc

SEQ ID NO: 1039245 - DNA, 15 bp, Homo sapiens
ggcggccatggcccc

SEQ ID NO: 1039246 - DNA, 15 bp, Homo sapiens
gcggccatggccccg

SEQ ID NO: 1039247 - DNA, 15 bp, Homo sapiens
cggccatggccccgc

SEQ ID NO: 1039248 - DNA, 15 bp, Homo sapiens
ggccatggccccgcc

SEQ ID NO: 1039249 - DNA, 15 bp, Homo sapiens
gccatggccccgccc

SEQ ID NO: 1039250 - DNA, 15 bp, Homo sapiens
ccatggccccgcccc

SEQ ID NO: 1039251 - DNA, 15 bp, Homo sapiens
catggccccgccccc

SEQ ID NO: 1039252 - DNA, 15 bp, Homo sapiens
atggccccgccccct

SEQ ID NO: 1039253 - DNA, 15 bp, Homo sapiens
tggccccgccccctg

SEQ ID NO: 1039254 - DNA, 15 bp, Homo sapiens
ggccccgccccctgc

SEQ ID NO: 1039255 - DNA, 15 bp, Homo sapiens
gccccgccccctgcc

SEQ ID NO: 1039256 - DNA, 15 bp, Homo sapiens
ccccgccccctgccc

SEQ ID NO: 1039257 - DNA, 15 bp, Homo sapiens
cccgccccctgcccg

SEQ ID NO: 1039258 - DNA, 15 bp, Homo sapiens
ccgccccctgcccgt

SEQ ID NO: 1039259 - DNA, 15 bp, Homo sapiens
cgccccctgcccgtc

SEQ ID NO: 1039260 - DNA, 15 bp, Homo sapiens
gccccctgcccgtcc

SEQ ID NO: 1039261 - DNA, 15 bp, Homo sapiens
ccccctgcccgtccg

SEQ ID NO: 1039262 - DNA, 15 bp, Homo sapiens
cccctgcccgtccga

SEQ ID NO: 1039263 - DNA, 15 bp, Homo sapiens
ccctgcccgtccgat

SEQ ID NO: 1039264 - DNA, 15 bp, Homo sapiens
cctgcccgtccgatc

SEQ ID NO: 1039265 - DNA, 15 bp, Homo sapiens
ctgcccgtccgatca

SEQ ID NO: 1039266 - DNA, 15 bp, Homo sapiens
tgcccgtccgatcag

SEQ ID NO: 1039267 - DNA, 15 bp, Homo sapiens
gcccgtccgatcagc

SEQ ID NO: 1039268 - DNA, 15 bp, Homo sapiens
cccgtccgatcagcg

SEQ ID NO: 1039269 - DNA, 15 bp, Homo sapiens
ccgtccgatcagcgc

SEQ ID NO: 1039270 - DNA, 15 bp, Homo sapiens
cgtccgatcagcgcc

SEQ ID NO: 1039271 - DNA, 15 bp, Homo sapiens
gtccgatcagcgccc

SEQ ID NO: 1039272 - DNA, 15 bp, Homo sapiens
tccgatcagcgcccc

SEQ ID NO: 1039273 - DNA, 15 bp, Homo sapiens
ccgatcagcgccccg

SEQ ID NO: 1039274 - DNA, 15 bp, Homo sapiens
cgatcagcgccccgc

SEQ ID NO: 1039275 - DNA, 15 bp, Homo sapiens
gatcagcgccccgcc

SEQ ID NO: 1039276 - DNA, 15 bp, Homo sapiens
atcagcgccccgccc

SEQ ID NO: 1039277 - DNA, 15 bp, Homo sapiens
tcagcgccccgcccc

SEQ ID NO: 1039278 - DNA, 15 bp, Homo sapiens
cagcgccccgccccg

SEQ ID NO: 1039279 - DNA, 15 bp, Homo sapiens
agcgccccgccccgt

SEQ ID NO: 1039280 - DNA, 15 bp, Homo sapiens
gcgccccgccccgtc

SEQ ID NO: 1039281 - DNA, 15 bp, Homo sapiens
cgccccgccccgtcc

SEQ ID NO: 1039282 - DNA, 15 bp, Homo sapiens
gccccgccccgtccc

SEQ ID NO: 1039283 - DNA, 15 bp, Homo sapiens
ccccgccccgtcccc

SEQ ID NO: 1039284 - DNA, 15 bp, Homo sapiens
cccgccccgtccccg

SEQ ID NO: 1039285 - DNA, 15 bp, Homo sapiens
ccgccccgtccccgc

SEQ ID NO: 1039286 - DNA, 15 bp, Homo sapiens
cgccccgtccccgcc

SEQ ID NO: 1039287 - DNA, 15 bp, Homo sapiens
gccccgtccccgccc

SEQ ID NO: 1039288 - DNA, 15 bp, Homo sapiens
ccccgtccccgcccc

SEQ ID NO: 1039289 - DNA, 15 bp, Homo sapiens
cccgtccccgccccg

SEQ ID NO: 1039290 - DNA, 15 bp, Homo sapiens
ccgtccccgccccga

SEQ ID NO: 1039291 - DNA, 15 bp, Homo sapiens
cgtccccgccccgac

SEQ ID NO: 1039292 - DNA, 15 bp, Homo sapiens
gtccccgccccgacc

SEQ ID NO: 1039293 - DNA, 15 bp, Homo sapiens
tccccgccccgaccc

SEQ ID NO: 1039294 - DNA, 15 bp, Homo sapiens
ccccgccccgacccc

SEQ ID NO: 1039295 - DNA, 15 bp, Homo sapiens
cccgccccgaccccg

SEQ ID NO: 1039296 - DNA, 15 bp, Homo sapiens
ccgccccgaccccgc

SEQ ID NO: 1039297 - DNA, 15 bp, Homo sapiens
cgccccgaccccgcc

SEQ ID NO: 1039298 - DNA, 15 bp, Homo sapiens
gccccgaccccgccc

SEQ ID NO: 1039299 - DNA, 15 bp, Homo sapiens
ccccgaccccgcccc

SEQ ID NO: 1039300 - DNA, 15 bp, Homo sapiens
cccgaccccgccccg

SEQ ID NO: 1039301 - DNA, 15 bp, Homo sapiens
ccgaccccgccccgg

SEQ ID NO: 1039302 - DNA, 15 bp, Homo sapiens
cgaccccgccccggg

SEQ ID NO: 1039303 - DNA, 15 bp, Homo sapiens
gaccccgccccgggc

SEQ ID NO: 1039304 - DNA, 15 bp, Homo sapiens
accccgccccgggcc

SEQ ID NO: 1039305 - DNA, 15 bp, Homo sapiens
ccccgccccgggccc

SEQ ID NO: 1039306 - DNA, 15 bp, Homo sapiens
cccgccccgggcccg

SEQ ID NO: 1039307 - DNA, 15 bp, Homo sapiens
ccgccccgggcccgc

SEQ ID NO: 1039308 - DNA, 15 bp, Homo sapiens
cgccccgggcccgct

SEQ ID NO: 1039309 - DNA, 15 bp, Homo sapiens
gccccgggcccgctc

SEQ ID NO: 1039310 - DNA, 15 bp, Homo sapiens
ccccgggcccgctca

SEQ ID NO: 1039311 - DNA, 15 bp, Homo sapiens
cccgggcccgctcag

SEQ ID NO: 1039312 - DNA, 15 bp, Homo sapiens
ccgggcccgctcagg

SEQ ID NO: 1039313 - DNA, 15 bp, Homo sapiens
cgggcccgctcaggc

SEQ ID NO: 1039314 - DNA, 15 bp, Homo sapiens
gggcccgctcaggcc

SEQ ID NO: 1039315 - DNA, 15 bp, Homo sapiens
ggcccgctcaggccc

SEQ ID NO: 1039316 - DNA, 15 bp, Homo sapiens
gcccgctcaggcccc

SEQ ID NO: 1039317 - DNA, 15 bp, Homo sapiens
cccgctcaggccccg

SEQ ID NO: 1039318 - DNA, 15 bp, Homo sapiens
ccgctcaggccccgc

SEQ ID NO: 1039319 - DNA, 15 bp, Homo sapiens
cgctcaggccccgcc

SEQ ID NO: 1039320 - DNA, 15 bp, Homo sapiens
gctcaggccccgccc

SEQ ID NO: 1039321 - DNA, 15 bp, Homo sapiens
ctcaggccccgcccc

SEQ ID NO: 1039322 - DNA, 15 bp, Homo sapiens
tcaggccccgcccct

SEQ ID NO: 1039323 - DNA, 15 bp, Homo sapiens
caggccccgcccctg

SEQ ID NO: 1039324 - DNA, 15 bp, Homo sapiens
aggccccgcccctgc

SEQ ID NO: 1039325 - DNA, 15 bp, Homo sapiens
ggccccgcccctgcc

SEQ ID NO: 1039326 - DNA, 15 bp, Homo sapiens
gccccgcccctgccg

SEQ ID NO: 1039327 - DNA, 15 bp, Homo sapiens
ccccgcccctgccgc

SEQ ID NO: 1039328 - DNA, 15 bp, Homo sapiens
cccgcccctgccgcc

SEQ ID NO: 1039329 - DNA, 15 bp, Homo sapiens
ccgcccctgccgccg

SEQ ID NO: 1039330 - DNA, 15 bp, Homo sapiens
cgcccctgccgccgg

SEQ ID NO: 1039331 - DNA, 15 bp, Homo sapiens
gcccctgccgccgga

SEQ ID NO: 1039332 - DNA, 15 bp, Homo sapiens
cccctgccgccggaa

SEQ ID NO: 1039333 - DNA, 15 bp, Homo sapiens
ccctgccgccggaat

SEQ ID NO: 1039334 - DNA, 15 bp, Homo sapiens
cctgccgccggaatc

SEQ ID NO: 1039335 - DNA, 15 bp, Homo sapiens
ctgccgccggaatcc

SEQ ID NO: 1039336 - DNA, 15 bp, Homo sapiens
tgccgccggaatcct

SEQ ID NO: 1039337 - DNA, 15 bp, Homo sapiens
gccgccggaatcctg

SEQ ID NO: 1039338 - DNA, 15 bp, Homo sapiens
ccgccggaatcctga

SEQ ID NO: 1039339 - DNA, 15 bp, Homo sapiens
cgccggaatcctgaa

SEQ ID NO: 1039340 - DNA, 15 bp, Homo sapiens
gccggaatcctgaag

SEQ ID NO: 1039341 - DNA, 15 bp, Homo sapiens
ccggaatcctgaagc

SEQ ID NO: 1039342 - DNA, 15 bp, Homo sapiens
cggaatcctgaagcc

SEQ ID NO: 1039343 - DNA, 15 bp, Homo sapiens
ggaatcctgaagccc

SEQ ID NO: 1039344 - DNA, 15 bp, Homo sapiens
gaatcctgaagccca

SEQ ID NO: 1039345 - DNA, 15 bp, Homo sapiens
aatcctgaagcccaa

SEQ ID NO: 1039346 - DNA, 15 bp, Homo sapiens
atcctgaagcccaag

SEQ ID NO: 1039347 - DNA, 15 bp, Homo sapiens
tcctgaagcccaagg

SEQ ID NO: 1039348 - DNA, 15 bp, Homo sapiens
cctgaagcccaaggc

SEQ ID NO: 1039349 - DNA, 15 bp, Homo sapiens
ctgaagcccaaggct

SEQ ID NO: 1039350 - DNA, 15 bp, Homo sapiens
tgaagcccaaggctg

SEQ ID NO: 1039351 - DNA, 15 bp, Homo sapiens
gaagcccaaggctgc

SEQ ID NO: 1039352 - DNA, 15 bp, Homo sapiens
aagcccaaggctgcc

SEQ ID NO: 1039353 - DNA, 15 bp, Homo sapiens
agcccaaggctgccc

SEQ ID NO: 1039354 - DNA, 15 bp, Homo sapiens
gcccaaggctgcccg

SEQ ID NO: 1039355 - DNA, 15 bp, Homo sapiens
cccaaggctgcccgg

SEQ ID NO: 1039356 - DNA, 15 bp, Homo sapiens
ccaaggctgcccggg

SEQ ID NO: 1039357 - DNA, 15 bp, Homo sapiens
caaggctgcccgggg

SEQ ID NO: 1039358 - DNA, 15 bp, Homo sapiens
aaggctgcccggggg

SEQ ID NO: 1039359 - DNA, 15 bp, Homo sapiens
aggctgcccgggggc

SEQ ID NO: 1039360 - DNA, 15 bp, Homo sapiens
ggctgcccgggggcg

SEQ ID NO: 1039361 - DNA, 15 bp, Homo sapiens
gctgcccgggggcgg

SEQ ID NO: 1039362 - DNA, 15 bp, Homo sapiens
ctgcccgggggcggt

SEQ ID NO: 1039363 - DNA, 15 bp, Homo sapiens
tgcccgggggcggtc

SEQ ID NO: 1039364 - DNA, 15 bp, Homo sapiens
gcccgggggcggtcc

SEQ ID NO: 1039365 - DNA, 15 bp, Homo sapiens
cccgggggcggtccg

SEQ ID NO: 1039366 - DNA, 15 bp, Homo sapiens
ccgggggcggtccgg

SEQ ID NO: 1039367 - DNA, 15 bp, Homo sapiens
cgggggcggtccggc

SEQ ID NO: 1039368 - DNA, 15 bp, Homo sapiens
gggggcggtccggcg

SEQ ID NO: 1039369 - DNA, 15 bp, Homo sapiens
ggggcggtccggcgg

SEQ ID NO: 1039370 - DNA, 15 bp, Homo sapiens
gggcggtccggcggc

SEQ ID NO: 1039371 - DNA, 15 bp, Homo sapiens
ggcggtccggcggcg

SEQ ID NO: 1039372 - DNA, 15 bp, Homo sapiens
gcggtccggcggcgc

SEQ ID NO: 1039373 - DNA, 15 bp, Homo sapiens
cggtccggcggcgcc

SEQ ID NO: 1039374 - DNA, 15 bp, Homo sapiens
ggtccggcggcgccg

SEQ ID NO: 1039375 - DNA, 15 bp, Homo sapiens
gtccggcggcgccgg

SEQ ID NO: 1039376 - DNA, 15 bp, Homo sapiens
tccggcggcgccggc

SEQ ID NO: 1039377 - DNA, 15 bp, Homo sapiens
ccggcggcgccggcg

SEQ ID NO: 1039378 - DNA, 15 bp, Homo sapiens
cggcggcgccggcga

SEQ ID NO: 1039379 - DNA, 15 bp, Homo sapiens
ggcggcgccggcgat

SEQ ID NO: 1039380 - DNA, 15 bp, Homo sapiens
gcggcgccggcgatg

SEQ ID NO: 1039381 - DNA, 15 bp, Homo sapiens
cggcgccggcgatgg

SEQ ID NO: 1039382 - DNA, 15 bp, Homo sapiens
ggcgccggcgatggg

SEQ ID NO: 1039383 - DNA, 15 bp, Homo sapiens
gcgccggcgatgggg

SEQ ID NO: 1039384 - DNA, 15 bp, Homo sapiens
cgccggcgatggggc

SEQ ID NO: 1039385 - DNA, 15 bp, Homo sapiens
gccggcgatggggca

SEQ ID NO: 1039386 - DNA, 15 bp, Homo sapiens
ccggcgatggggcat

SEQ ID NO: 1039387 - DNA, 15 bp, Homo sapiens
cggcgatggggcata

SEQ ID NO: 1039388 - DNA, 15 bp, Homo sapiens
ggcgatggggcataa

SEQ ID NO: 1039389 - DNA, 15 bp, Homo sapiens
gcgatggggcataaa

SEQ ID NO: 1039390 - DNA, 15 bp, Homo sapiens
cgatggggcataaaa

SEQ ID NO: 1039391 - DNA, 15 bp, Homo sapiens
gatggggcataaaac

SEQ ID NO: 1039392 - DNA, 15 bp, Homo sapiens
atggggcataaaacc

SEQ ID NO: 1039393 - DNA, 15 bp, Homo sapiens
tggggcataaaacca

SEQ ID NO: 1039394 - DNA, 15 bp, Homo sapiens
ggggcataaaaccac

SEQ ID NO: 1039395 - DNA, 15 bp, Homo sapiens
gggcataaaaccact

SEQ ID NO: 1039396 - DNA, 15 bp, Homo sapiens
ggcataaaaccactg

SEQ ID NO: 1039397 - DNA, 15 bp, Homo sapiens
gcataaaaccactgg

SEQ ID NO: 1039398 - DNA, 15 bp, Homo sapiens
cataaaaccactggc

SEQ ID NO: 1039399 - DNA, 15 bp, Homo sapiens
ataaaaccactggcc

SEQ ID NO: 1039400 - DNA, 15 bp, Homo sapiens
taaaaccactggcca

SEQ ID NO: 1039401 - DNA, 15 bp, Homo sapiens
aaaaccactggccac

SEQ ID NO: 1039402 - DNA, 15 bp, Homo sapiens
aaaccactggccacc

SEQ ID NO: 1039403 - DNA, 15 bp, Homo sapiens
aaccactggccacct

SEQ ID NO: 1039404 - DNA, 15 bp, Homo sapiens
accactggccacctg

SEQ ID NO: 1039405 - DNA, 15 bp, Homo sapiens
ccactggccacctgc

SEQ ID NO: 1039406 - DNA, 15 bp, Homo sapiens
cactggccacctgcc

SEQ ID NO: 1039407 - DNA, 15 bp, Homo sapiens
actggccacctgccg

SEQ ID NO: 1039408 - DNA, 15 bp, Homo sapiens
ctggccacctgccgg

SEQ ID NO: 1039409 - DNA, 15 bp, Homo sapiens
tggccacctgccggg

SEQ ID NO: 1039410 - DNA, 15 bp, Homo sapiens
ggccacctgccgggc

SEQ ID NO: 1039411 - DNA, 15 bp, Homo sapiens
gccacctgccgggct

SEQ ID NO: 1039412 - DNA, 15 bp, Homo sapiens
ccacctgccgggctg

SEQ ID NO: 1039413 - DNA, 15 bp, Homo sapiens
cacctgccgggctgc

SEQ ID NO: 1039414 - DNA, 15 bp, Homo sapiens
acctgccgggctgct

SEQ ID NO: 1039415 - DNA, 15 bp, Homo sapiens
cctgccgggctgctc

SEQ ID NO: 1039416 - DNA, 15 bp, Homo sapiens
ctgccgggctgctcc

SEQ ID NO: 1039417 - DNA, 15 bp, Homo sapiens
tgccgggctgctcct

SEQ ID NO: 1039418 - DNA, 15 bp, Homo sapiens
gccgggctgctcctg

SEQ ID NO: 1039419 - DNA, 15 bp, Homo sapiens
ccgggctgctcctgc

SEQ ID NO: 1039420 - DNA, 15 bp, Homo sapiens
cgggctgctcctgcg

SEQ ID NO: 1039421 - DNA, 15 bp, Homo sapiens
gggctgctcctgcgt

SEQ ID NO: 1039422 - DNA, 15 bp, Homo sapiens
ggctgctcctgcgtg

SEQ ID NO: 1039423 - DNA, 15 bp, Homo sapiens
gctgctcctgcgtgc

SEQ ID NO: 1039424 - DNA, 15 bp, Homo sapiens
ctgctcctgcgtgcg

SEQ ID NO: 1039425 - DNA, 15 bp, Homo sapiens
tgctcctgcgtgcgc

SEQ ID NO: 1039426 - DNA, 15 bp, Homo sapiens
gctcctgcgtgcgct

SEQ ID NO: 1039427 - DNA, 15 bp, Homo sapiens
ctcctgcgtgcgctg

SEQ ID NO: 1039428 - DNA, 15 bp, Homo sapiens
tcctgcgtgcgctgc

SEQ ID NO: 1039429 - DNA, 15 bp, Homo sapiens
cctgcgtgcgctgcc

SEQ ID NO: 1039430 - DNA, 15 bp, Homo sapiens
ctgcgtgcgctgccg

SEQ ID NO: 1039431 - DNA, 15 bp, Homo sapiens
tgcgtgcgctgccgt

SEQ ID NO: 1039432 - DNA, 15 bp, Homo sapiens
gcgtgcgctgccgtc

SEQ ID NO: 1039433 - DNA, 15 bp, Homo sapiens
cgtgcgctgccgtcc

SEQ ID NO: 1039434 - DNA, 15 bp, Homo sapiens
gtgcgctgccgtccc

SEQ ID NO: 1039435 - DNA, 15 bp, Homo sapiens
tgcgctgccgtcccg

SEQ ID NO: 1039436 - DNA, 15 bp, Homo sapiens
gcgctgccgtcccgg

SEQ ID NO: 1039437 - DNA, 15 bp, Homo sapiens
cgctgccgtcccgga

SEQ ID NO: 1039438 - DNA, 15 bp, Homo sapiens
gctgccgtcccggat

SEQ ID NO: 1039439 - DNA, 15 bp, Homo sapiens
ctgccgtcccggatc

SEQ ID NO: 1039440 - DNA, 15 bp, Homo sapiens
tgccgtcccggatcc

SEQ ID NO: 1039441 - DNA, 15 bp, Homo sapiens
gccgtcccggatcca

SEQ ID NO: 1039442 - DNA, 15 bp, Homo sapiens
ccgtcccggatccac

SEQ ID NO: 1039443 - DNA, 15 bp, Homo sapiens
cgtcccggatccacc

SEQ ID NO: 1039444 - DNA, 15 bp, Homo sapiens
gtcccggatccaccg

SEQ ID NO: 1039445 - DNA, 15 bp, Homo sapiens
tcccggatccaccgt

SEQ ID NO: 1039446 - DNA, 15 bp, Homo sapiens
cccggatccaccgtg

SEQ ID NO: 1039447 - DNA, 15 bp, Homo sapiens
ccggatccaccgtgc

SEQ ID NO: 1039448 - DNA, 15 bp, Homo sapiens
cggatccaccgtgcc

SEQ ID NO: 1039449 - DNA, 15 bp, Homo sapiens
ggatccaccgtgcct

SEQ ID NO: 1039450 - DNA, 15 bp, Homo sapiens
gatccaccgtgcctc

SEQ ID NO: 1039451 - DNA, 15 bp, Homo sapiens
atccaccgtgcctct

SEQ ID NO: 1039452 - DNA, 15 bp, Homo sapiens
tccaccgtgcctctg

SEQ ID NO: 1039453 - DNA, 15 bp, Homo sapiens
ccaccgtgcctctgc

SEQ ID NO: 1039454 - DNA, 15 bp, Homo sapiens
caccgtgcctctgcg

SEQ ID NO: 1039455 - DNA, 15 bp, Homo sapiens
accgtgcctctgcgg

SEQ ID NO: 1039456 - DNA, 15 bp, Homo sapiens
ccgtgcctctgcggc

SEQ ID NO: 1039457 - DNA, 15 bp, Homo sapiens
cgtgcctctgcggcc

SEQ ID NO: 1039458 - DNA, 15 bp, Homo sapiens
gtgcctctgcggcct

SEQ ID NO: 1039459 - DNA, 15 bp, Homo sapiens
tgcctctgcggcctg

SEQ ID NO: 1039460 - DNA, 15 bp, Homo sapiens
gcctctgcggcctgc

SEQ ID NO: 1039461 - DNA, 15 bp, Homo sapiens
cctctgcggcctgcg

SEQ ID NO: 1039462 - DNA, 15 bp, Homo sapiens
ctctgcggcctgcgt

SEQ ID NO: 1039463 - DNA, 15 bp, Homo sapiens
tctgcggcctgcgtg

SEQ ID NO: 1039464 - DNA, 15 bp, Homo sapiens
ctgcggcctgcgtgc

SEQ ID NO: 1039465 - DNA, 15 bp, Homo sapiens
tgcggcctgcgtgcc

SEQ ID NO: 1039466 - DNA, 15 bp, Homo sapiens
gcggcctgcgtgccc

SEQ ID NO: 1039467 - DNA, 15 bp, Homo sapiens
cggcctgcgtgcccg

SEQ ID NO: 1039468 - DNA, 15 bp, Homo sapiens
ggcctgcgtgcccgg

SEQ ID NO: 1039469 - DNA, 15 bp, Homo sapiens
gcctgcgtgcccgga

SEQ ID NO: 1039470 - DNA, 15 bp, Homo sapiens
cctgcgtgcccggag

SEQ ID NO: 1039471 - DNA, 15 bp, Homo sapiens
ctgcgtgcccggagt

SEQ ID NO: 1039472 - DNA, 15 bp, Homo sapiens
tgcgtgcccggagtc

SEQ ID NO: 1039473 - DNA, 15 bp, Homo sapiens
gcgtgcccggagtcc

SEQ ID NO: 1039474 - DNA, 15 bp, Homo sapiens
cgtgcccggagtccc

SEQ ID NO: 1039475 - DNA, 15 bp, Homo sapiens
gtgcccggagtcccc

SEQ ID NO: 1039476 - DNA, 15 bp, Homo sapiens
tgcccggagtccccg

SEQ ID NO: 1039477 - DNA, 15 bp, Homo sapiens
gcccggagtccccgc

SEQ ID NO: 1039478 - DNA, 15 bp, Homo sapiens
cccggagtccccgcc

SEQ ID NO: 1039479 - DNA, 15 bp, Homo sapiens
ccggagtccccgcct

SEQ ID NO: 1039480 - DNA, 15 bp, Homo sapiens
cggagtccccgcctg

SEQ ID NO: 1039481 - DNA, 15 bp, Homo sapiens
ggagtccccgcctgt

SEQ ID NO: 1039482 - DNA, 15 bp, Homo sapiens
gagtccccgcctgtg

SEQ ID NO: 1039483 - DNA, 15 bp, Homo sapiens
agtccccgcctgtgt

SEQ ID NO: 1039484 - DNA, 15 bp, Homo sapiens
gtccccgcctgtgtc

SEQ ID NO: 1039485 - DNA, 15 bp, Homo sapiens
tccccgcctgtgtcg

SEQ ID NO: 1039486 - DNA, 15 bp, Homo sapiens
ccccgcctgtgtcgt

SEQ ID NO: 1039487 - DNA, 15 bp, Homo sapiens
cccgcctgtgtcgtc

SEQ ID NO: 1039488 - DNA, 15 bp, Homo sapiens
ccgcctgtgtcgtct

SEQ ID NO: 1039489 - DNA, 15 bp, Homo sapiens
cgcctgtgtcgtctc

SEQ ID NO: 1039490 - DNA, 15 bp, Homo sapiens
gcctgtgtcgtctct

SEQ ID NO: 1039491 - DNA, 15 bp, Homo sapiens
cctgtgtcgtctctg

SEQ ID NO: 1039492 - DNA, 15 bp, Homo sapiens
ctgtgtcgtctctgt

SEQ ID NO: 1039493 - DNA, 15 bp, Homo sapiens
tgtgtcgtctctgtc

SEQ ID NO: 1039494 - DNA, 15 bp, Homo sapiens
gtgtcgtctctgtcg

SEQ ID NO: 1039495 - DNA, 15 bp, Homo sapiens
tgtcgtctctgtcgc

SEQ ID NO: 1039496 - DNA, 15 bp, Homo sapiens
gtcgtctctgtcgcc

SEQ ID NO: 1039497 - DNA, 15 bp, Homo sapiens
tcgtctctgtcgccg

SEQ ID NO: 1039498 - DNA, 15 bp, Homo sapiens
cgtctctgtcgccgt

SEQ ID NO: 1039499 - DNA, 15 bp, Homo sapiens
gtctctgtcgccgtc

SEQ ID NO: 1039500 - DNA, 15 bp, Homo sapiens
tctctgtcgccgtcc

SEQ ID NO: 1039501 - DNA, 15 bp, Homo sapiens
ctctgtcgccgtccc

SEQ ID NO: 1039502 - DNA, 15 bp, Homo sapiens
tctgtcgccgtcccc

SEQ ID NO: 1039503 - DNA, 15 bp, Homo sapiens
ctgtcgccgtccccg

SEQ ID NO: 1039504 - DNA, 15 bp, Homo sapiens
tgtcgccgtccccgt

SEQ ID NO: 1039505 - DNA, 15 bp, Homo sapiens
gtcgccgtccccgtc

SEQ ID NO: 1039506 - DNA, 15 bp, Homo sapiens
tcgccgtccccgtct

SEQ ID NO: 1039507 - DNA, 15 bp, Homo sapiens
cgccgtccccgtctc

SEQ ID NO: 1039508 - DNA, 15 bp, Homo sapiens
gccgtccccgtctcc

SEQ ID NO: 1039509 - DNA, 15 bp, Homo sapiens
ccgtccccgtctcct

SEQ ID NO: 1039510 - DNA, 15 bp, Homo sapiens
cgtccccgtctcctg

SEQ ID NO: 1039511 - DNA, 15 bp, Homo sapiens
gtccccgtctcctgc

SEQ ID NO: 1039512 - DNA, 15 bp, Homo sapiens
tccccgtctcctgcc

SEQ ID NO: 1039513 - DNA, 15 bp, Homo sapiens
ccccgtctcctgcca

SEQ ID NO: 1039514 - DNA, 15 bp, Homo sapiens
cccgtctcctgccag

SEQ ID NO: 1039515 - DNA, 15 bp, Homo sapiens
ccgtctcctgccagg

SEQ ID NO: 1039516 - DNA, 15 bp, Homo sapiens
cgtctcctgccaggc

SEQ ID NO: 1039517 - DNA, 15 bp, Homo sapiens
gtctcctgccaggcg

SEQ ID NO: 1039518 - DNA, 15 bp, Homo sapiens
tctcctgccaggcgc

SEQ ID NO: 1039519 - DNA, 15 bp, Homo sapiens
ctcctgccaggcgcg

SEQ ID NO: 1039520 - DNA, 15 bp, Homo sapiens
tcctgccaggcgcgg

SEQ ID NO: 1039521 - DNA, 15 bp, Homo sapiens
cctgccaggcgcgga

SEQ ID NO: 1039522 - DNA, 15 bp, Homo sapiens
ctgccaggcgcggag

SEQ ID NO: 1039523 - DNA, 15 bp, Homo sapiens
tgccaggcgcggagc

SEQ ID NO: 1039524 - DNA, 15 bp, Homo sapiens
gccaggcgcggagcc

SEQ ID NO: 1039525 - DNA, 15 bp, Homo sapiens
ccaggcgcggagccc

SEQ ID NO: 1039526 - DNA, 15 bp, Homo sapiens
caggcgcggagccct

SEQ ID NO: 1039527 - DNA, 15 bp, Homo sapiens
aggcgcggagccctg

SEQ ID NO: 1039528 - DNA, 15 bp, Homo sapiens
ggcgcggagccctgc

SEQ ID NO: 1039529 - DNA, 15 bp, Homo sapiens
gcgcggagccctgcg

SEQ ID NO: 1039530 - DNA, 15 bp, Homo sapiens
cgcggagccctgcga

SEQ ID NO: 1039531 - DNA, 15 bp, Homo sapiens
gcggagccctgcgag

SEQ ID NO: 1039532 - DNA, 15 bp, Homo sapiens
cggagccctgcgagc

SEQ ID NO: 1039533 - DNA, 15 bp, Homo sapiens
ggagccctgcgagcc

SEQ ID NO: 1039534 - DNA, 15 bp, Homo sapiens
gagccctgcgagccg

SEQ ID NO: 1039535 - DNA, 15 bp, Homo sapiens
agccctgcgagccgc

SEQ ID NO: 1039536 - DNA, 15 bp, Homo sapiens
gccctgcgagccgcg

SEQ ID NO: 1039537 - DNA, 15 bp, Homo sapiens
ccctgcgagccgcgg

SEQ ID NO: 1039538 - DNA, 15 bp, Homo sapiens
cctgcgagccgcggg

SEQ ID NO: 1039539 - DNA, 15 bp, Homo sapiens
ctgcgagccgcgggt

SEQ ID NO: 1039540 - DNA, 15 bp, Homo sapiens
tgcgagccgcgggtg

SEQ ID NO: 1039541 - DNA, 15 bp, Homo sapiens
gcgagccgcgggtgg

SEQ ID NO: 1039542 - DNA, 15 bp, Homo sapiens
cgagccgcgggtggg

SEQ ID NO: 1039543 - DNA, 15 bp, Homo sapiens
gagccgcgggtgggc

SEQ ID NO: 1039544 - DNA, 15 bp, Homo sapiens
agccgcgggtgggcc

SEQ ID NO: 1039545 - DNA, 15 bp, Homo sapiens
gccgcgggtgggccc

SEQ ID NO: 1039546 - DNA, 15 bp, Homo sapiens
ccgcgggtgggcccc

SEQ ID NO: 1039547 - DNA, 15 bp, Homo sapiens
cgcgggtgggcccca

SEQ ID NO: 1039548 - DNA, 15 bp, Homo sapiens
gcgggtgggccccag

SEQ ID NO: 1039549 - DNA, 15 bp, Homo sapiens
cgggtgggccccagg

SEQ ID NO: 1039550 - DNA, 15 bp, Homo sapiens
gggtgggccccaggc

SEQ ID NO: 1039551 - DNA, 15 bp, Homo sapiens
ggtgggccccaggcg

SEQ ID NO: 1039552 - DNA, 15 bp, Homo sapiens
gtgggccccaggcgc

SEQ ID NO: 1039553 - DNA, 15 bp, Homo sapiens
tgggccccaggcgcg

SEQ ID NO: 1039554 - DNA, 15 bp, Homo sapiens
gggccccaggcgcgc

SEQ ID NO: 1039555 - DNA, 15 bp, Homo sapiens
ggccccaggcgcgca

SEQ ID NO: 1039556 - DNA, 15 bp, Homo sapiens
gccccaggcgcgcag

SEQ ID NO: 1039557 - DNA, 15 bp, Homo sapiens
ccccaggcgcgcaga

SEQ ID NO: 1039558 - DNA, 15 bp, Homo sapiens
cccaggcgcgcagac

SEQ ID NO: 1039559 - DNA, 15 bp, Homo sapiens
ccaggcgcgcagaca

SEQ ID NO: 1039560 - DNA, 15 bp, Homo sapiens
caggcgcgcagacat

SEQ ID NO: 1039561 - DNA, 15 bp, Homo sapiens
aggcgcgcagacatg

SEQ ID NO: 1039562 - DNA, 15 bp, Homo sapiens
ggcgcgcagacatgg

SEQ ID NO: 1039563 - DNA, 15 bp, Homo sapiens
gcgcgcagacatggg

SEQ ID NO: 1039564 - DNA, 15 bp, Homo sapiens
cgcgcagacatgggc

SEQ ID NO: 1039565 - DNA, 15 bp, Homo sapiens
gcgcagacatgggct

SEQ ID NO: 1039566 - DNA, 15 bp, Homo sapiens
cgcagacatgggctg

SEQ ID NO: 1039567 - DNA, 15 bp, Homo sapiens
gcagacatgggctgc

SEQ ID NO: 1039568 - DNA, 15 bp, Homo sapiens
cagacatgggctgct

SEQ ID NO: 1039569 - DNA, 15 bp, Homo sapiens
agacatgggctgctc

SEQ ID NO: 1039570 - DNA, 15 bp, Homo sapiens
gacatgggctgctcc

SEQ ID NO: 1039571 - DNA, 15 bp, Homo sapiens
acatgggctgctccg

SEQ ID NO: 1039572 - DNA, 15 bp, Homo sapiens
catgggctgctccgc

SEQ ID NO: 1039573 - DNA, 15 bp, Homo sapiens
atgggctgctccgcc

SEQ ID NO: 1039574 - DNA, 15 bp, Homo sapiens
tgggctgctccgcca

SEQ ID NO: 1039575 - DNA, 15 bp, Homo sapiens
gggctgctccgccaa

SEQ ID NO: 1039576 - DNA, 15 bp, Homo sapiens
ggctgctccgccaaa

SEQ ID NO: 1039577 - DNA, 15 bp, Homo sapiens
gctgctccgccaaag

SEQ ID NO: 1039578 - DNA, 15 bp, Homo sapiens
ctgctccgccaaagc

SEQ ID NO: 1039579 - DNA, 15 bp, Homo sapiens
tgctccgccaaagcg

SEQ ID NO: 1039580 - DNA, 15 bp, Homo sapiens
gctccgccaaagcgc

SEQ ID NO: 1039581 - DNA, 15 bp, Homo sapiens
ctccgccaaagcgcg

SEQ ID NO: 1039582 - DNA, 15 bp, Homo sapiens
tccgccaaagcgcgc

SEQ ID NO: 1039583 - DNA, 15 bp, Homo sapiens
ccgccaaagcgcgct

SEQ ID NO: 1039584 - DNA, 15 bp, Homo sapiens
cgccaaagcgcgctg

SEQ ID NO: 1039585 - DNA, 15 bp, Homo sapiens
gccaaagcgcgctgg

SEQ ID NO: 1039586 - DNA, 15 bp, Homo sapiens
ccaaagcgcgctggg

SEQ ID NO: 1039587 - DNA, 15 bp, Homo sapiens
caaagcgcgctgggc

SEQ ID NO: 1039588 - DNA, 15 bp, Homo sapiens
aaagcgcgctgggct

SEQ ID NO: 1039589 - DNA, 15 bp, Homo sapiens
aagcgcgctgggctg

SEQ ID NO: 1039590 - DNA, 15 bp, Homo sapiens
agcgcgctgggctgc

SEQ ID NO: 1039591 - DNA, 15 bp, Homo sapiens
gcgcgctgggctgcc

SEQ ID NO: 1039592 - DNA, 15 bp, Homo sapiens
cgcgctgggctgccg

SEQ ID NO: 1039593 - DNA, 15 bp, Homo sapiens
gcgctgggctgccgg

SEQ ID NO: 1039594 - DNA, 15 bp, Homo sapiens
cgctgggctgccggg

SEQ ID NO: 1039595 - DNA, 15 bp, Homo sapiens
gctgggctgccgggg

SEQ ID NO: 1039596 - DNA, 15 bp, Homo sapiens
ctgggctgccggggc

SEQ ID NO: 1039597 - DNA, 15 bp, Homo sapiens
tgggctgccggggcg

SEQ ID NO: 1039598 - DNA, 15 bp, Homo sapiens
gggctgccggggcgc

SEQ ID NO: 1039599 - DNA, 15 bp, Homo sapiens
ggctgccggggcgct

SEQ ID NO: 1039600 - DNA, 15 bp, Homo sapiens
gctgccggggcgctg

SEQ ID NO: 1039601 - DNA, 15 bp, Homo sapiens
ctgccggggcgctgg

SEQ ID NO: 1039602 - DNA, 15 bp, Homo sapiens
tgccggggcgctggg

SEQ ID NO: 1039603 - DNA, 15 bp, Homo sapiens
gccggggcgctgggc

SEQ ID NO: 1039604 - DNA, 15 bp, Homo sapiens
ccggggcgctgggcg

SEQ ID NO: 1039605 - DNA, 15 bp, Homo sapiens
cggggcgctgggcgt

SEQ ID NO: 1039606 - DNA, 15 bp, Homo sapiens
ggggcgctgggcgtc

SEQ ID NO: 1039607 - DNA, 15 bp, Homo sapiens
gggcgctgggcgtcg

SEQ ID NO: 1039608 - DNA, 15 bp, Homo sapiens
ggcgctgggcgtcgc

SEQ ID NO: 1039609 - DNA, 15 bp, Homo sapiens
gcgctgggcgtcgcg

SEQ ID NO: 1039610 - DNA, 15 bp, Homo sapiens
cgctgggcgtcgcgg

SEQ ID NO: 1039611 - DNA, 15 bp, Homo sapiens
gctgggcgtcgcggg

SEQ ID NO: 1039612 - DNA, 15 bp, Homo sapiens
ctgggcgtcgcgggg

SEQ ID NO: 1039613 - DNA, 15 bp, Homo sapiens
tgggcgtcgcggggc

SEQ ID NO: 1039614 - DNA, 15 bp, Homo sapiens
gggcgtcgcggggct

SEQ ID NO: 1039615 - DNA, 15 bp, Homo sapiens
ggcgtcgcggggcta

SEQ ID NO: 1039616 - DNA, 15 bp, Homo sapiens
gcgtcgcggggctac

SEQ ID NO: 1039617 - DNA, 15 bp, Homo sapiens
cgtcgcggggctact

SEQ ID NO: 1039618 - DNA, 15 bp, Homo sapiens
gtcgcggggctactg

SEQ ID NO: 1039619 - DNA, 15 bp, Homo sapiens
tcgcggggctactgt

SEQ ID NO: 1039620 - DNA, 15 bp, Homo sapiens
cgcggggctactgtg

SEQ ID NO: 1039621 - DNA, 15 bp, Homo sapiens
gcggggctactgtgc

SEQ ID NO: 1039622 - DNA, 15 bp, Homo sapiens
cggggctactgtgcg

SEQ ID NO: 1039623 - DNA, 15 bp, Homo sapiens
ggggctactgtgcgc

SEQ ID NO: 1039624 - DNA, 15 bp, Homo sapiens
gggctactgtgcgct

SEQ ID NO: 1039625 - DNA, 15 bp, Homo sapiens
ggctactgtgcgctg

SEQ ID NO: 1039626 - DNA, 15 bp, Homo sapiens
gctactgtgcgctgt

SEQ ID NO: 1039627 - DNA, 15 bp, Homo sapiens
ctactgtgcgctgtg

SEQ ID NO: 1039628 - DNA, 15 bp, Homo sapiens
tactgtgcgctgtgc

SEQ ID NO: 1039629 - DNA, 15 bp, Homo sapiens
actgtgcgctgtgct

SEQ ID NO: 1039630 - DNA, 15 bp, Homo sapiens
ctgtgcgctgtgctg

SEQ ID NO: 1039631 - DNA, 15 bp, Homo sapiens
tgtgcgctgtgctgg

SEQ ID NO: 1039632 - DNA, 15 bp, Homo sapiens
gtgcgctgtgctggg

SEQ ID NO: 1039633 - DNA, 15 bp, Homo sapiens
tgcgctgtgctgggc

SEQ ID NO: 1039634 - DNA, 15 bp, Homo sapiens
gcgctgtgctgggcg

SEQ ID NO: 1039635 - DNA, 15 bp, Homo sapiens
cgctgtgctgggcgc

SEQ ID NO: 1039636 - DNA, 15 bp, Homo sapiens
gctgtgctgggcgct

SEQ ID NO: 1039637 - DNA, 15 bp, Homo sapiens
ctgtgctgggcgctg

SEQ ID NO: 1039638 - DNA, 15 bp, Homo sapiens
tgtgctgggcgctgt

SEQ ID NO: 1039639 - DNA, 15 bp, Homo sapiens
gtgctgggcgctgtc

SEQ ID NO: 1039640 - DNA, 15 bp, Homo sapiens
tgctgggcgctgtca

SEQ ID NO: 1039641 - DNA, 15 bp, Homo sapiens
gctgggcgctgtcat

SEQ ID NO: 1039642 - DNA, 15 bp, Homo sapiens
ctgggcgctgtcatg

SEQ ID NO: 1039643 - DNA, 15 bp, Homo sapiens
tgggcgctgtcatga

SEQ ID NO: 1039644 - DNA, 15 bp, Homo sapiens
gggcgctgtcatgat

SEQ ID NO: 1039645 - DNA, 15 bp, Homo sapiens
ggcgctgtcatgatc

SEQ ID NO: 1039646 - DNA, 15 bp, Homo sapiens
gcgctgtcatgatcg

SEQ ID NO: 1039647 - DNA, 15 bp, Homo sapiens
cgctgtcatgatcgt

SEQ ID NO: 1039648 - DNA, 15 bp, Homo sapiens
gctgtcatgatcgtg

SEQ ID NO: 1039649 - DNA, 15 bp, Homo sapiens
ctgtcatgatcgtga

SEQ ID NO: 1039650 - DNA, 15 bp, Homo sapiens
tgtcatgatcgtgat

SEQ ID NO: 1039651 - DNA, 15 bp, Homo sapiens
gtcatgatcgtgatg

SEQ ID NO: 1039652 - DNA, 15 bp, Homo sapiens
tcatgatcgtgatgg

SEQ ID NO: 1039653 - DNA, 15 bp, Homo sapiens
catgatcgtgatggt

SEQ ID NO: 1039654 - DNA, 15 bp, Homo sapiens
atgatcgtgatggtg

SEQ ID NO: 1039655 - DNA, 15 bp, Homo sapiens
tgatcgtgatggtgc

SEQ ID NO: 1039656 - DNA, 15 bp, Homo sapiens
gatcgtgatggtgcc

SEQ ID NO: 1039657 - DNA, 15 bp, Homo sapiens
atcgtgatggtgccg

SEQ ID NO: 1039658 - DNA, 15 bp, Homo sapiens
tcgtgatggtgccgt

SEQ ID NO: 1039659 - DNA, 15 bp, Homo sapiens
cgtgatggtgccgtc

SEQ ID NO: 1039660 - DNA, 15 bp, Homo sapiens
gtgatggtgccgtcg

SEQ ID NO: 1039661 - DNA, 15 bp, Homo sapiens
tgatggtgccgtcgc

SEQ ID NO: 1039662 - DNA, 15 bp, Homo sapiens
gatggtgccgtcgct

SEQ ID NO: 1039663 - DNA, 15 bp, Homo sapiens
atggtgccgtcgctc

SEQ ID NO: 1039664 - DNA, 15 bp, Homo sapiens
tggtgccgtcgctca

SEQ ID NO: 1039665 - DNA, 15 bp, Homo sapiens
ggtgccgtcgctcat

SEQ ID NO: 1039666 - DNA, 15 bp, Homo sapiens
gtgccgtcgctcatc

SEQ ID NO: 1039667 - DNA, 15 bp, Homo sapiens
tgccgtcgctcatca

SEQ ID NO: 1039668 - DNA, 15 bp, Homo sapiens
gccgtcgctcatcaa

SEQ ID NO: 1039669 - DNA, 15 bp, Homo sapiens
ccgtcgctcatcaag

SEQ ID NO: 1039670 - DNA, 15 bp, Homo sapiens
cgtcgctcatcaagc

SEQ ID NO: 1039671 - DNA, 15 bp, Homo sapiens
gtcgctcatcaagca

SEQ ID NO: 1039672 - DNA, 15 bp, Homo sapiens
tcgctcatcaagcag

SEQ ID NO: 1039673 - DNA, 15 bp, Homo sapiens
cgctcatcaagcagc

SEQ ID NO: 1039674 - DNA, 15 bp, Homo sapiens
gctcatcaagcagca

SEQ ID NO: 1039675 - DNA, 15 bp, Homo sapiens
ctcatcaagcagcag

SEQ ID NO: 1039676 - DNA, 15 bp, Homo sapiens
tcatcaagcagcagg

SEQ ID NO: 1039677 - DNA, 15 bp, Homo sapiens
catcaagcagcaggt

SEQ ID NO: 1039678 - DNA, 15 bp, Homo sapiens
atcaagcagcaggtc

SEQ ID NO: 1039679 - DNA, 15 bp, Homo sapiens
tcaagcagcaggtcc

SEQ ID NO: 1039680 - DNA, 15 bp, Homo sapiens
caagcagcaggtcct

SEQ ID NO: 1039681 - DNA, 15 bp, Homo sapiens
aagcagcaggtcctt

SEQ ID NO: 1039682 - DNA, 15 bp, Homo sapiens
agcagcaggtcctta

SEQ ID NO: 1039683 - DNA, 15 bp, Homo sapiens
gcagcaggtccttaa

SEQ ID NO: 1039684 - DNA, 15 bp, Homo sapiens
cagcaggtccttaag

SEQ ID NO: 1039685 - DNA, 15 bp, Homo sapiens
agcaggtccttaagg

SEQ ID NO: 1039686 - DNA, 15 bp, Homo sapiens
gcaggtccttaaggt

SEQ ID NO: 1039687 - DNA, 15 bp, Homo sapiens
caggtccttaaggtg

SEQ ID NO: 1039688 - DNA, 15 bp, Homo sapiens
aggtccttaaggtgg

SEQ ID NO: 1039689 - DNA, 15 bp, Homo sapiens
ggtccttaaggtggg

SEQ ID NO: 1039690 - DNA, 15 bp, Homo sapiens
gtccttaaggtgggt

SEQ ID NO: 1039691 - DNA, 15 bp, Homo sapiens
tccttaaggtgggtg

SEQ ID NO: 1039692 - DNA, 15 bp, Homo sapiens
ccttaaggtgggtga

SEQ ID NO: 1039693 - DNA, 15 bp, Homo sapiens
cttaaggtgggtgag

SEQ ID NO: 1039694 - DNA, 15 bp, Homo sapiens
ttaaggtgggtgagg

SEQ ID NO: 1039695 - DNA, 15 bp, Homo sapiens
taaggtgggtgaggg

SEQ ID NO: 1039696 - DNA, 15 bp, Homo sapiens
aaggtgggtgaggga

SEQ ID NO: 1039697 - DNA, 15 bp, Homo sapiens
aggtgggtgagggag

SEQ ID NO: 1039698 - DNA, 15 bp, Homo sapiens
ggtgggtgagggaga

SEQ ID NO: 1039699 - DNA, 15 bp, Homo sapiens
gtgggtgagggagac

SEQ ID NO: 1039700 - DNA, 15 bp, Homo sapiens
tgggtgagggagacc

SEQ ID NO: 1039701 - DNA, 15 bp, Homo sapiens
gggtgagggagaccc

SEQ ID NO: 1039702 - DNA, 15 bp, Homo sapiens
ggtgagggagacccc

SEQ ID NO: 1039703 - DNA, 15 bp, Homo sapiens
gtgagggagacccca

SEQ ID NO: 1039704 - DNA, 15 bp, Homo sapiens
tgagggagaccccag

SEQ ID NO: 1039705 - DNA, 15 bp, Homo sapiens
gagggagaccccagg

SEQ ID NO: 1039706 - DNA, 15 bp, Homo sapiens
agggagaccccaggg

SEQ ID NO: 1039707 - DNA, 15 bp, Homo sapiens
gggagaccccagggg

SEQ ID NO: 1039708 - DNA, 15 bp, Homo sapiens
ggagaccccaggggg

SEQ ID NO: 1039709 - DNA, 15 bp, Homo sapiens
gagaccccagggggt

SEQ ID NO: 1039710 - DNA, 15 bp, Homo sapiens
agaccccagggggtc

SEQ ID NO: 1039711 - DNA, 15 bp, Homo sapiens
gaccccagggggtcc

SEQ ID NO: 1039712 - DNA, 15 bp, Homo sapiens
accccagggggtccg

SEQ ID NO: 1039713 - DNA, 15 bp, Homo sapiens
ccccagggggtccgc

SEQ ID NO: 1039714 - DNA, 15 bp, Homo sapiens
cccagggggtccgcg

SEQ ID NO: 1039715 - DNA, 15 bp, Homo sapiens
ccagggggtccgcgc

SEQ ID NO: 1039716 - DNA, 15 bp, Homo sapiens
cagggggtccgcgca

SEQ ID NO: 1039717 - DNA, 15 bp, Homo sapiens
agggggtccgcgcac

SEQ ID NO: 1039718 - DNA, 15 bp, Homo sapiens
gggggtccgcgcacg

SEQ ID NO: 1039719 - DNA, 15 bp, Homo sapiens
ggggtccgcgcacgg

SEQ ID NO: 1039720 - DNA, 15 bp, Homo sapiens
gggtccgcgcacgga

SEQ ID NO: 1039721 - DNA, 15 bp, Homo sapiens
ggtccgcgcacggac

SEQ ID NO: 1039722 - DNA, 15 bp, Homo sapiens
gtccgcgcacggacc

SEQ ID NO: 1039723 - DNA, 15 bp, Homo sapiens
tccgcgcacggaccc

SEQ ID NO: 1039724 - DNA, 15 bp, Homo sapiens
ccgcgcacggacccg

SEQ ID NO: 1039725 - DNA, 15 bp, Homo sapiens
cgcgcacggacccgg

SEQ ID NO: 1039726 - DNA, 15 bp, Homo sapiens
gcgcacggacccggg

SEQ ID NO: 1039727 - DNA, 15 bp, Homo sapiens
cgcacggacccgggc

SEQ ID NO: 1039728 - DNA, 15 bp, Homo sapiens
gcacggacccgggct

SEQ ID NO: 1039729 - DNA, 15 bp, Homo sapiens
cacggacccgggctg

SEQ ID NO: 1039730 - DNA, 15 bp, Homo sapiens
acggacccgggctgt

SEQ ID NO: 1039731 - DNA, 15 bp, Homo sapiens
cggacccgggctgtt

SEQ ID NO: 1039732 - DNA, 15 bp, Homo sapiens
ggacccgggctgttg

SEQ ID NO: 1039733 - DNA, 15 bp, Homo sapiens
gacccgggctgttgg

SEQ ID NO: 1039734 - DNA, 15 bp, Homo sapiens
acccgggctgttggg

SEQ ID NO: 1039735 - DNA, 15 bp, Homo sapiens
cccgggctgttgggc

SEQ ID NO: 1039736 - DNA, 15 bp, Homo sapiens
ccgggctgttgggcg

SEQ ID NO: 1039737 - DNA, 15 bp, Homo sapiens
cgggctgttgggcgc

SEQ ID NO: 1039738 - DNA, 15 bp, Homo sapiens
gggctgttgggcgct

SEQ ID NO: 1039739 - DNA, 15 bp, Homo sapiens
ggctgttgggcgctg

SEQ ID NO: 1039740 - DNA, 15 bp, Homo sapiens
gctgttgggcgctgg

SEQ ID NO: 1039741 - DNA, 15 bp, Homo sapiens
ctgttgggcgctggg

SEQ ID NO: 1039742 - DNA, 15 bp, Homo sapiens
tgttgggcgctgggc

SEQ ID NO: 1039743 - DNA, 15 bp, Homo sapiens
gttgggcgctgggcg

SEQ ID NO: 1039744 - DNA, 15 bp, Homo sapiens
ttgggcgctgggcgc

SEQ ID NO: 1039745 - DNA, 15 bp, Homo sapiens
tgggcgctgggcgcc

SEQ ID NO: 1039746 - DNA, 15 bp, Homo sapiens
gggcgctgggcgccg

SEQ ID NO: 1039747 - DNA, 15 bp, Homo sapiens
ggcgctgggcgccgg

SEQ ID NO: 1039748 - DNA, 15 bp, Homo sapiens
gcgctgggcgccggg

SEQ ID NO: 1039749 - DNA, 15 bp, Homo sapiens
cgctgggcgccggga

SEQ ID NO: 1039750 - DNA, 15 bp, Homo sapiens
gctgggcgccgggag

SEQ ID NO: 1039751 - DNA, 15 bp, Homo sapiens
ctgggcgccgggagg

SEQ ID NO: 1039752 - DNA, 15 bp, Homo sapiens
tgggcgccgggagga

SEQ ID NO: 1039753 - DNA, 15 bp, Homo sapiens
gggcgccgggaggac

SEQ ID NO: 1039754 - DNA, 15 bp, Homo sapiens
ggcgccgggaggacc

SEQ ID NO: 1039755 - DNA, 15 bp, Homo sapiens
gcgccgggaggaccc

SEQ ID NO: 1039756 - DNA, 15 bp, Homo sapiens
cgccgggaggacccg

SEQ ID NO: 1039757 - DNA, 15 bp, Homo sapiens
gccgggaggacccgc

SEQ ID NO: 1039758 - DNA, 15 bp, Homo sapiens
ccgggaggacccgcg

SEQ ID NO: 1039759 - DNA, 15 bp, Homo sapiens
cgggaggacccgcgc

SEQ ID NO: 1039760 - DNA, 15 bp, Homo sapiens
gggaggacccgcgcg

SEQ ID NO: 1039761 - DNA, 15 bp, Homo sapiens
ggaggacccgcgcgt

SEQ ID NO: 1039762 - DNA, 15 bp, Homo sapiens
gaggacccgcgcgtt

SEQ ID NO: 1039763 - DNA, 15 bp, Homo sapiens
aggacccgcgcgttg

SEQ ID NO: 1039764 - DNA, 15 bp, Homo sapiens
ggacccgcgcgttgc

SEQ ID NO: 1039765 - DNA, 15 bp, Homo sapiens
gacccgcgcgttgcg

SEQ ID NO: 1039766 - DNA, 15 bp, Homo sapiens
acccgcgcgttgcgg

SEQ ID NO: 1039767 - DNA, 15 bp, Homo sapiens
cccgcgcgttgcggt

SEQ ID NO: 1039768 - DNA, 15 bp, Homo sapiens
ccgcgcgttgcggtg

SEQ ID NO: 1039769 - DNA, 15 bp, Homo sapiens
cgcgcgttgcggtgg

SEQ ID NO: 1039770 - DNA, 15 bp, Homo sapiens
gcgcgttgcggtggg

SEQ ID NO: 1039771 - DNA, 15 bp, Homo sapiens
cgcgttgcggtgggt

SEQ ID NO: 1039772 - DNA, 15 bp, Homo sapiens
gcgttgcggtgggtg

SEQ ID NO: 1039773 - DNA, 15 bp, Homo sapiens
cgttgcggtgggtgg

SEQ ID NO: 1039774 - DNA, 15 bp, Homo sapiens
gttgcggtgggtggg

SEQ ID NO: 1039775 - DNA, 15 bp, Homo sapiens
ttgcggtgggtgggc

SEQ ID NO: 1039776 - DNA, 15 bp, Homo sapiens
tgcggtgggtgggcg

SEQ ID NO: 1039777 - DNA, 15 bp, Homo sapiens
gcggtgggtgggcga

SEQ ID NO: 1039778 - DNA, 15 bp, Homo sapiens
cggtgggtgggcgac

SEQ ID NO: 1039779 - DNA, 15 bp, Homo sapiens
ggtgggtgggcgacc

SEQ ID NO: 1039780 - DNA, 15 bp, Homo sapiens
gtgggtgggcgaccg

SEQ ID NO: 1039781 - DNA, 15 bp, Homo sapiens
tgggtgggcgaccgc

SEQ ID NO: 1039782 - DNA, 15 bp, Homo sapiens
gggtgggcgaccgca

SEQ ID NO: 1039783 - DNA, 15 bp, Homo sapiens
ggtgggcgaccgcag

SEQ ID NO: 1039784 - DNA, 15 bp, Homo sapiens
gtgggcgaccgcagc

SEQ ID NO: 1039785 - DNA, 15 bp, Homo sapiens
tgggcgaccgcagcg

SEQ ID NO: 1039786 - DNA, 15 bp, Homo sapiens
gggcgaccgcagcgg

SEQ ID NO: 1039787 - DNA, 15 bp, Homo sapiens
ggcgaccgcagcgga

SEQ ID NO: 1039788 - DNA, 15 bp, Homo sapiens
gcgaccgcagcggaa

SEQ ID NO: 1039789 - DNA, 15 bp, Homo sapiens
cgaccgcagcggaat

SEQ ID NO: 1039790 - DNA, 15 bp, Homo sapiens
gaccgcagcggaatc

SEQ ID NO: 1039791 - DNA, 15 bp, Homo sapiens
accgcagcggaatcg

SEQ ID NO: 1039792 - DNA, 15 bp, Homo sapiens
ccgcagcggaatcgg

SEQ ID NO: 1039793 - DNA, 15 bp, Homo sapiens
cgcagcggaatcggc

SEQ ID NO: 1039794 - DNA, 15 bp, Homo sapiens
gcagcggaatcggcg

SEQ ID NO: 1039795 - DNA, 15 bp, Homo sapiens
cagcggaatcggcgc

SEQ ID NO: 1039796 - DNA, 15 bp, Homo sapiens
agcggaatcggcgcc

SEQ ID NO: 1039797 - DNA, 15 bp, Homo sapiens
gcggaatcggcgccc

SEQ ID NO: 1039798 - DNA, 15 bp, Homo sapiens
cggaatcggcgcccg

SEQ ID NO: 1039799 - DNA, 15 bp, Homo sapiens
ggaatcggcgcccgg

SEQ ID NO: 1039800 - DNA, 15 bp, Homo sapiens
gaatcggcgcccggg

SEQ ID NO: 1039801 - DNA, 15 bp, Homo sapiens
aatcggcgcccgggc

SEQ ID NO: 1039802 - DNA, 15 bp, Homo sapiens
atcggcgcccgggcc

SEQ ID NO: 1039803 - DNA, 15 bp, Homo sapiens
tcggcgcccgggcct

SEQ ID NO: 1039804 - DNA, 15 bp, Homo sapiens
cggcgcccgggcctg

SEQ ID NO: 1039805 - DNA, 15 bp, Homo sapiens
ggcgcccgggcctgg

SEQ ID NO: 1039806 - DNA, 15 bp, Homo sapiens
gcgcccgggcctggc

SEQ ID NO: 1039807 - DNA, 15 bp, Homo sapiens
cgcccgggcctggcg

SEQ ID NO: 1039808 - DNA, 15 bp, Homo sapiens
gcccgggcctggcgc

SEQ ID NO: 1039809 - DNA, 15 bp, Homo sapiens
cccgggcctggcgcc

SEQ ID NO: 1039810 - DNA, 15 bp, Homo sapiens
ccgggcctggcgccg

SEQ ID NO: 1039811 - DNA, 15 bp, Homo sapiens
cgggcctggcgccgc

SEQ ID NO: 1039812 - DNA, 15 bp, Homo sapiens
gggcctggcgccgca

SEQ ID NO: 1039813 - DNA, 15 bp, Homo sapiens
ggcctggcgccgcag

SEQ ID NO: 1039814 - DNA, 15 bp, Homo sapiens
gcctggcgccgcaga

SEQ ID NO: 1039815 - DNA, 15 bp, Homo sapiens
cctggcgccgcagag

SEQ ID NO: 1039816 - DNA, 15 bp, Homo sapiens
ctggcgccgcagagc

SEQ ID NO: 1039817 - DNA, 15 bp, Homo sapiens
tggcgccgcagagca

SEQ ID NO: 1039818 - DNA, 15 bp, Homo sapiens
ggcgccgcagagcac

SEQ ID NO: 1039819 - DNA, 15 bp, Homo sapiens
gcgccgcagagcacg

SEQ ID NO: 1039820 - DNA, 15 bp, Homo sapiens
cgccgcagagcacga

SEQ ID NO: 1039821 - DNA, 15 bp, Homo sapiens
gccgcagagcacgag

SEQ ID NO: 1039822 - DNA, 15 bp, Homo sapiens
ccgcagagcacgagg

SEQ ID NO: 1039823 - DNA, 15 bp, Homo sapiens
cgcagagcacgaggg

SEQ ID NO: 1039824 - DNA, 15 bp, Homo sapiens
gcagagcacgaggga

SEQ ID NO: 1039825 - DNA, 15 bp, Homo sapiens
cagagcacgagggag

SEQ ID NO: 1039826 - DNA, 15 bp, Homo sapiens
agagcacgagggagg

SEQ ID NO: 1039827 - DNA, 15 bp, Homo sapiens
gagcacgagggaggc

SEQ ID NO: 1039828 - DNA, 15 bp, Homo sapiens
agcacgagggaggcc

SEQ ID NO: 1039829 - DNA, 15 bp, Homo sapiens
gcacgagggaggcca

SEQ ID NO: 1039830 - DNA, 15 bp, Homo sapiens
cacgagggaggccag

SEQ ID NO: 1039831 - DNA, 15 bp, Homo sapiens
acgagggaggccagg

SEQ ID NO: 1039832 - DNA, 15 bp, Homo sapiens
cgagggaggccaggc

SEQ ID NO: 1039833 - DNA, 15 bp, Homo sapiens
gagggaggccaggcg

SEQ ID NO: 1039834 - DNA, 15 bp, Homo sapiens
agggaggccaggcgc

SEQ ID NO: 1039835 - DNA, 15 bp, Homo sapiens
gggaggccaggcgct

SEQ ID NO: 1039836 - DNA, 15 bp, Homo sapiens
ggaggccaggcgctt

SEQ ID NO: 1039837 - DNA, 15 bp, Homo sapiens
gaggccaggcgcttc

SEQ ID NO: 1039838 - DNA, 15 bp, Homo sapiens
aggccaggcgcttcg

SEQ ID NO: 1039839 - DNA, 15 bp, Homo sapiens
ggccaggcgcttcgg

SEQ ID NO: 1039840 - DNA, 15 bp, Homo sapiens
gccaggcgcttcggg

SEQ ID NO: 1039841 - DNA, 15 bp, Homo sapiens
ccaggcgcttcggga

SEQ ID NO: 1039842 - DNA, 15 bp, Homo sapiens
caggcgcttcgggag

SEQ ID NO: 1039843 - DNA, 15 bp, Homo sapiens
aggcgcttcgggagg

SEQ ID NO: 1039844 - DNA, 15 bp, Homo sapiens
ggcgcttcgggaggg

SEQ ID NO: 1039845 - DNA, 15 bp, Homo sapiens
gcgcttcgggagggg

SEQ ID NO: 1039846 - DNA, 15 bp, Homo sapiens
cgcttcgggaggggc

SEQ ID NO: 1039847 - DNA, 15 bp, Homo sapiens
gcttcgggaggggct

SEQ ID NO: 1039848 - DNA, 15 bp, Homo sapiens
cttcgggaggggctg

SEQ ID NO: 1039849 - DNA, 15 bp, Homo sapiens
ttcgggaggggctgc

SEQ ID NO: 1039850 - DNA, 15 bp, Homo sapiens
tcgggaggggctgct

SEQ ID NO: 1039851 - DNA, 15 bp, Homo sapiens
cgggaggggctgctg

SEQ ID NO: 1039852 - DNA, 15 bp, Homo sapiens
gggaggggctgctgc

SEQ ID NO: 1039853 - DNA, 15 bp, Homo sapiens
ggaggggctgctgcc

SEQ ID NO: 1039854 - DNA, 15 bp, Homo sapiens
gaggggctgctgccc

SEQ ID NO: 1039855 - DNA, 15 bp, Homo sapiens
aggggctgctgcccg

SEQ ID NO: 1039856 - DNA, 15 bp, Homo sapiens
ggggctgctgcccgc

SEQ ID NO: 1039857 - DNA, 15 bp, Homo sapiens
gggctgctgcccgcc

SEQ ID NO: 1039858 - DNA, 15 bp, Homo sapiens
ggctgctgcccgcct

SEQ ID NO: 1039859 - DNA, 15 bp, Homo sapiens
gctgctgcccgcctc

SEQ ID NO: 1039860 - DNA, 15 bp, Homo sapiens
ctgctgcccgcctcc

SEQ ID NO: 1039861 - DNA, 15 bp, Homo sapiens
tgctgcccgcctccc

SEQ ID NO: 1039862 - DNA, 15 bp, Homo sapiens
gctgcccgcctcccc

SEQ ID NO: 1039863 - DNA, 15 bp, Homo sapiens
ctgcccgcctcccca

SEQ ID NO: 1039864 - DNA, 15 bp, Homo sapiens
tgcccgcctccccac

SEQ ID NO: 1039865 - DNA, 15 bp, Homo sapiens
gcccgcctccccacc

SEQ ID NO: 1039866 - DNA, 15 bp, Homo sapiens
cccgcctccccacca

SEQ ID NO: 1039867 - DNA, 15 bp, Homo sapiens
ccgcctccccaccac

SEQ ID NO: 1039868 - DNA, 15 bp, Homo sapiens
cgcctccccaccacc

SEQ ID NO: 1039869 - DNA, 15 bp, Homo sapiens
gcctccccaccaccc

SEQ ID NO: 1039870 - DNA, 15 bp, Homo sapiens
cctccccaccaccct

SEQ ID NO: 1039871 - DNA, 15 bp, Homo sapiens
ctccccaccaccctc

SEQ ID NO: 1039872 - DNA, 15 bp, Homo sapiens
tccccaccaccctca

SEQ ID NO: 1039873 - DNA, 15 bp, Homo sapiens
ccccaccaccctcac

SEQ ID NO: 1039874 - DNA, 15 bp, Homo sapiens
cccaccaccctcacc

SEQ ID NO: 1039875 - DNA, 15 bp, Homo sapiens
ccaccaccctcaccg

SEQ ID NO: 1039876 - DNA, 15 bp, Homo sapiens
caccaccctcaccgc

SEQ ID NO: 1039877 - DNA, 15 bp, Homo sapiens
accaccctcaccgcc

SEQ ID NO: 1039878 - DNA, 15 bp, Homo sapiens
ccaccctcaccgccc

SEQ ID NO: 1039879 - DNA, 15 bp, Homo sapiens
caccctcaccgcccc

SEQ ID NO: 1039880 - DNA, 15 bp, Homo sapiens
accctcaccgcccca

SEQ ID NO: 1039881 - DNA, 15 bp, Homo sapiens
ccctcaccgccccag

SEQ ID NO: 1039882 - DNA, 15 bp, Homo sapiens
cctcaccgccccaga

SEQ ID NO: 1039883 - DNA, 15 bp, Homo sapiens
ctcaccgccccagac

SEQ ID NO: 1039884 - DNA, 15 bp, Homo sapiens
tcaccgccccagact

SEQ ID NO: 1039885 - DNA, 15 bp, Homo sapiens
caccgccccagactg

SEQ ID NO: 1039886 - DNA, 15 bp, Homo sapiens
accgccccagactga

SEQ ID NO: 1039887 - DNA, 15 bp, Homo sapiens
ccgccccagactgag

SEQ ID NO: 1039888 - DNA, 15 bp, Homo sapiens
cgccccagactgagg

SEQ ID NO: 1039889 - DNA, 15 bp, Homo sapiens
gccccagactgaggc

SEQ ID NO: 1039890 - DNA, 15 bp, Homo sapiens
ccccagactgaggct

SEQ ID NO: 1039891 - DNA, 15 bp, Homo sapiens
cccagactgaggcta

SEQ ID NO: 1039892 - DNA, 15 bp, Homo sapiens
ccagactgaggctag

SEQ ID NO: 1039893 - DNA, 15 bp, Homo sapiens
cagactgaggctagg

SEQ ID NO: 1039894 - DNA, 15 bp, Homo sapiens
agactgaggctaggg

SEQ ID NO: 1039895 - DNA, 15 bp, Homo sapiens
gactgaggctagggg

SEQ ID NO: 1039896 - DNA, 15 bp, Homo sapiens
actgaggctaggggg

SEQ ID NO: 1039897 - DNA, 15 bp, Homo sapiens
ctgaggctagggggg

SEQ ID NO: 1039898 - DNA, 15 bp, Homo sapiens
tgaggctagggggga

SEQ ID NO: 1039899 - DNA, 15 bp, Homo sapiens
gaggctaggggggaa

SEQ ID NO: 1039900 - DNA, 15 bp, Homo sapiens
aggctaggggggaac

SEQ ID NO: 1039901 - DNA, 15 bp, Homo sapiens
ggctaggggggaacc

SEQ ID NO: 1039902 - DNA, 15 bp, Homo sapiens
gctaggggggaaccc

SEQ ID NO: 1039903 - DNA, 15 bp, Homo sapiens
ctaggggggaaccca

SEQ ID NO: 1039904 - DNA, 15 bp, Homo sapiens
taggggggaacccag

SEQ ID NO: 1039905 - DNA, 15 bp, Homo sapiens
aggggggaacccagg

SEQ ID NO: 1039906 - DNA, 15 bp, Homo sapiens
ggggggaacccaggg

SEQ ID NO: 1039907 - DNA, 15 bp, Homo sapiens
gggggaacccagggg

SEQ ID NO: 1039908 - DNA, 15 bp, Homo sapiens
ggggaacccaggggc

SEQ ID NO: 1039909 - DNA, 15 bp, Homo sapiens
gggaacccaggggct

SEQ ID NO: 1039910 - DNA, 15 bp, Homo sapiens
ggaacccaggggctt

SEQ ID NO: 1039911 - DNA, 15 bp, Homo sapiens
gaacccaggggcttt

SEQ ID NO: 1039912 - DNA, 15 bp, Homo sapiens
aacccaggggctttg

SEQ ID NO: 1039913 - DNA, 15 bp, Homo sapiens
acccaggggctttgc

SEQ ID NO: 1039914 - DNA, 15 bp, Homo sapiens
cccaggggctttgct

SEQ ID NO: 1039915 - DNA, 15 bp, Homo sapiens
ccaggggctttgctg

SEQ ID NO: 1039916 - DNA, 15 bp, Homo sapiens
caggggctttgctgg

SEQ ID NO: 1039917 - DNA, 15 bp, Homo sapiens
aggggctttgctgga

SEQ ID NO: 1039918 - DNA, 15 bp, Homo sapiens
ggggctttgctggag

SEQ ID NO: 1039919 - DNA, 15 bp, Homo sapiens
gggctttgctggagg

SEQ ID NO: 1039920 - DNA, 15 bp, Homo sapiens
ggctttgctggaggc

SEQ ID NO: 1039921 - DNA, 15 bp, Homo sapiens
gctttgctggaggcg

SEQ ID NO: 1039922 - DNA, 15 bp, Homo sapiens
ctttgctggaggcgc

SEQ ID NO: 1039923 - DNA, 15 bp, Homo sapiens
tttgctggaggcgca

SEQ ID NO: 1039924 - DNA, 15 bp, Homo sapiens
ttgctggaggcgcag

SEQ ID NO: 1039925 - DNA, 15 bp, Homo sapiens
tgctggaggcgcagg

SEQ ID NO: 1039926 - DNA, 15 bp, Homo sapiens
gctggaggcgcaggc

SEQ ID NO: 1039927 - DNA, 15 bp, Homo sapiens
ctggaggcgcaggcc

SEQ ID NO: 1039928 - DNA, 15 bp, Homo sapiens
tggaggcgcaggcca

SEQ ID NO: 1039929 - DNA, 15 bp, Homo sapiens
ggaggcgcaggccag

SEQ ID NO: 1039930 - DNA, 15 bp, Homo sapiens
gaggcgcaggccagg

SEQ ID NO: 1039931 - DNA, 15 bp, Homo sapiens
aggcgcaggccaggg

SEQ ID NO: 1039932 - DNA, 15 bp, Homo sapiens
ggcgcaggccagggt

SEQ ID NO: 1039933 - DNA, 15 bp, Homo sapiens
gcgcaggccagggtt

SEQ ID NO: 1039934 - DNA, 15 bp, Homo sapiens
cgcaggccagggttg

SEQ ID NO: 1039935 - DNA, 15 bp, Homo sapiens
gcaggccagggttgg

SEQ ID NO: 1039936 - DNA, 15 bp, Homo sapiens
caggccagggttggg

SEQ ID NO: 1039937 - DNA, 15 bp, Homo sapiens
aggccagggttgggg

SEQ ID NO: 1039938 - DNA, 15 bp, Homo sapiens
ggccagggttgggga

SEQ ID NO: 1039939 - DNA, 15 bp, Homo sapiens
gccagggttggggag

SEQ ID NO: 1039940 - DNA, 15 bp, Homo sapiens
ccagggttggggagg

SEQ ID NO: 1039941 - DNA, 15 bp, Homo sapiens
cagggttggggaggc

SEQ ID NO: 1039942 - DNA, 15 bp, Homo sapiens
agggttggggaggcc

SEQ ID NO: 1039943 - DNA, 15 bp, Homo sapiens
gggttggggaggcct

SEQ ID NO: 1039944 - DNA, 15 bp, Homo sapiens
ggttggggaggcctg

SEQ ID NO: 1039945 - DNA, 15 bp, Homo sapiens
gttggggaggcctgg

SEQ ID NO: 1039946 - DNA, 15 bp, Homo sapiens
ttggggaggcctgga

SEQ ID NO: 1039947 - DNA, 15 bp, Homo sapiens
tggggaggcctggac

SEQ ID NO: 1039948 - DNA, 15 bp, Homo sapiens
ggggaggcctggacg

SEQ ID NO: 1039949 - DNA, 15 bp, Homo sapiens
gggaggcctggacgg

SEQ ID NO: 1039950 - DNA, 15 bp, Homo sapiens
ggaggcctggacggg

SEQ ID NO: 1039951 - DNA, 15 bp, Homo sapiens
gaggcctggacggga

SEQ ID NO: 1039952 - DNA, 15 bp, Homo sapiens
aggcctggacgggag

SEQ ID NO: 1039953 - DNA, 15 bp, Homo sapiens
ggcctggacgggaga

SEQ ID NO: 1039954 - DNA, 15 bp, Homo sapiens
gcctggacgggagac

SEQ ID NO: 1039955 - DNA, 15 bp, Homo sapiens
cctggacgggagacc

SEQ ID NO: 1039956 - DNA, 15 bp, Homo sapiens
ctggacgggagacca

SEQ ID NO: 1039957 - DNA, 15 bp, Homo sapiens
tggacgggagaccac

SEQ ID NO: 1039958 - DNA, 15 bp, Homo sapiens
ggacgggagaccacc

SEQ ID NO: 1039959 - DNA, 15 bp, Homo sapiens
gacgggagaccaccc

SEQ ID NO: 1039960 - DNA, 15 bp, Homo sapiens
acgggagaccacccg

SEQ ID NO: 1039961 - DNA, 15 bp, Homo sapiens
cgggagaccacccgg

SEQ ID NO: 1039962 - DNA, 15 bp, Homo sapiens
gggagaccacccggg

SEQ ID NO: 1039963 - DNA, 15 bp, Homo sapiens
ggagaccacccgggc

SEQ ID NO: 1039964 - DNA, 15 bp, Homo sapiens
gagaccacccgggcg

SEQ ID NO: 1039965 - DNA, 15 bp, Homo sapiens
agaccacccgggcgc

SEQ ID NO: 1039966 - DNA, 15 bp, Homo sapiens
gaccacccgggcgcc

SEQ ID NO: 1039967 - DNA, 15 bp, Homo sapiens
accacccgggcgcct

SEQ ID NO: 1039968 - DNA, 15 bp, Homo sapiens
ccacccgggcgcctg

SEQ ID NO: 1039969 - DNA, 15 bp, Homo sapiens
cacccgggcgcctga

SEQ ID NO: 1039970 - DNA, 15 bp, Homo sapiens
acccgggcgcctgac

SEQ ID NO: 1039971 - DNA, 15 bp, Homo sapiens
cccgggcgcctgacc

SEQ ID NO: 1039972 - DNA, 15 bp, Homo sapiens
ccgggcgcctgaccc

SEQ ID NO: 1039973 - DNA, 15 bp, Homo sapiens
cgggcgcctgacccg

SEQ ID NO: 1039974 - DNA, 15 bp, Homo sapiens
gggcgcctgacccgc

SEQ ID NO: 1039975 - DNA, 15 bp, Homo sapiens
ggcgcctgacccgcc

SEQ ID NO: 1039976 - DNA, 15 bp, Homo sapiens
gcgcctgacccgccc

SEQ ID NO: 1039977 - DNA, 15 bp, Homo sapiens
cgcctgacccgccct

SEQ ID NO: 1039978 - DNA, 15 bp, Homo sapiens
gcctgacccgcccta

SEQ ID NO: 1039979 - DNA, 15 bp, Homo sapiens
cctgacccgccctaa

SEQ ID NO: 1039980 - DNA, 15 bp, Homo sapiens
ctgacccgccctaaa

SEQ ID NO: 1039981 - DNA, 15 bp, Homo sapiens
tgacccgccctaaag

SEQ ID NO: 1039982 - DNA, 15 bp, Homo sapiens
gacccgccctaaagg

SEQ ID NO: 1039983 - DNA, 15 bp, Homo sapiens
acccgccctaaaggg

SEQ ID NO: 1039984 - DNA, 15 bp, Homo sapiens
cccgccctaaagggt

SEQ ID NO: 1039985 - DNA, 15 bp, Homo sapiens
ccgccctaaagggtc

SEQ ID NO: 1039986 - DNA, 15 bp, Homo sapiens
cgccctaaagggtct

SEQ ID NO: 1039987 - DNA, 15 bp, Homo sapiens
gccctaaagggtctg

SEQ ID NO: 1039988 - DNA, 15 bp, Homo sapiens
ccctaaagggtctgg

SEQ ID NO: 1039989 - DNA, 15 bp, Homo sapiens
cctaaagggtctggg

SEQ ID NO: 1039990 - DNA, 15 bp, Homo sapiens
ctaaagggtctgggc

SEQ ID NO: 1039991 - DNA, 15 bp, Homo sapiens
taaagggtctgggcg

SEQ ID NO: 1039992 - DNA, 15 bp, Homo sapiens
aaagggtctgggcgc

SEQ ID NO: 1039993 - DNA, 15 bp, Homo sapiens
aagggtctgggcgcc

SEQ ID NO: 1039994 - DNA, 15 bp, Homo sapiens
agggtctgggcgccc

SEQ ID NO: 1039995 - DNA, 15 bp, Homo sapiens
gggtctgggcgccca

SEQ ID NO: 1039996 - DNA, 15 bp, Homo sapiens
ggtctgggcgcccac

SEQ ID NO: 1039997 - DNA, 15 bp, Homo sapiens
gtctgggcgcccacg

SEQ ID NO: 1039998 - DNA, 15 bp, Homo sapiens
tctgggcgcccacga

SEQ ID NO: 1039999 - DNA, 15 bp, Homo sapiens
ctgggcgcccacgac

SEQ ID NO: 1040000 - DNA, 15 bp, Homo sapiens
tgggcgcccacgacg

SEQ ID NO: 1040001 - DNA, 15 bp, Homo sapiens
gggcgcccacgacgg

SEQ ID NO: 1040002 - DNA, 15 bp, Homo sapiens
ggcgcccacgacgga

SEQ ID NO: 1040003 - DNA, 15 bp, Homo sapiens
gcgcccacgacggat

SEQ ID NO: 1040004 - DNA, 15 bp, Homo sapiens
cgcccacgacggatc

SEQ ID NO: 1040005 - DNA, 15 bp, Homo sapiens
gcccacgacggatca

SEQ ID NO: 1040006 - DNA, 15 bp, Homo sapiens
cccacgacggatcag

SEQ ID NO: 1040007 - DNA, 15 bp, Homo sapiens
ccacgacggatcagg

SEQ ID NO: 1040008 - DNA, 15 bp, Homo sapiens
cacgacggatcagga

SEQ ID NO: 1040009 - DNA, 15 bp, Homo sapiens
acgacggatcaggag

SEQ ID NO: 1040010 - DNA, 15 bp, Homo sapiens
cgacggatcaggagt

SEQ ID NO: 1040011 - DNA, 15 bp, Homo sapiens
gacggatcaggagtg

SEQ ID NO: 1040012 - DNA, 15 bp, Homo sapiens
acggatcaggagtgt

SEQ ID NO: 1040013 - DNA, 15 bp, Homo sapiens
cggatcaggagtgtg

SEQ ID NO: 1040014 - DNA, 15 bp, Homo sapiens
ggatcaggagtgtgg

SEQ ID NO: 1040015 - DNA, 15 bp, Homo sapiens
gatcaggagtgtgga

SEQ ID NO: 1040016 - DNA, 15 bp, Homo sapiens
atcaggagtgtggac

SEQ ID NO: 1040017 - DNA, 15 bp, Homo sapiens
tcaggagtgtggaca

SEQ ID NO: 1040018 - DNA, 15 bp, Homo sapiens
caggagtgtggacag

SEQ ID NO: 1040019 - DNA, 15 bp, Homo sapiens
aggagtgtggacagg

SEQ ID NO: 1040020 - DNA, 15 bp, Homo sapiens
ggagtgtggacaggt

SEQ ID NO: 1040021 - DNA, 15 bp, Homo sapiens
gagtgtggacaggtt

SEQ ID NO: 1040022 - DNA, 15 bp, Homo sapiens
agtgtggacaggttg

SEQ ID NO: 1040023 - DNA, 15 bp, Homo sapiens
gtgtggacaggttgc

SEQ ID NO: 1040024 - DNA, 15 bp, Homo sapiens
tgtggacaggttgct

SEQ ID NO: 1040025 - DNA, 15 bp, Homo sapiens
gtggacaggttgctt

SEQ ID NO: 1040026 - DNA, 15 bp, Homo sapiens
tggacaggttgcttc

SEQ ID NO: 1040027 - DNA, 15 bp, Homo sapiens
ggacaggttgcttcc

SEQ ID NO: 1040028 - DNA, 15 bp, Homo sapiens
gacaggttgcttccg

SEQ ID NO: 1040029 - DNA, 15 bp, Homo sapiens
acaggttgcttccgt

SEQ ID NO: 1040030 - DNA, 15 bp, Homo sapiens
caggttgcttccgtg

SEQ ID NO: 1040031 - DNA, 15 bp, Homo sapiens
aggttgcttccgtgg

SEQ ID NO: 1040032 - DNA, 15 bp, Homo sapiens
ggttgcttccgtggt

SEQ ID NO: 1040033 - DNA, 15 bp, Homo sapiens
gttgcttccgtggtg

SEQ ID NO: 1040034 - DNA, 15 bp, Homo sapiens
ttgcttccgtggtgc

SEQ ID NO: 1040035 - DNA, 15 bp, Homo sapiens
tgcttccgtggtgcc

SEQ ID NO: 1040036 - DNA, 15 bp, Homo sapiens
gcttccgtggtgccg

SEQ ID NO: 1040037 - DNA, 15 bp, Homo sapiens
cttccgtggtgccgc

SEQ ID NO: 1040038 - DNA, 15 bp, Homo sapiens
ttccgtggtgccgcc

SEQ ID NO: 1040039 - DNA, 15 bp, Homo sapiens
tccgtggtgccgccc

SEQ ID NO: 1040040 - DNA, 15 bp, Homo sapiens
ccgtggtgccgcccg

SEQ ID NO: 1040041 - DNA, 15 bp, Homo sapiens
cgtggtgccgcccga

SEQ ID NO: 1040042 - DNA, 15 bp, Homo sapiens
gtggtgccgcccgaa

SEQ ID NO: 1040043 - DNA, 15 bp, Homo sapiens
tggtgccgcccgaag

SEQ ID NO: 1040044 - DNA, 15 bp, Homo sapiens
ggtgccgcccgaagg

SEQ ID NO: 1040045 - DNA, 15 bp, Homo sapiens
gtgccgcccgaagga

SEQ ID NO: 1040046 - DNA, 15 bp, Homo sapiens
tgccgcccgaaggag

SEQ ID NO: 1040047 - DNA, 15 bp, Homo sapiens
gccgcccgaaggagc

SEQ ID NO: 1040048 - DNA, 15 bp, Homo sapiens
ccgcccgaaggagcc

SEQ ID NO: 1040049 - DNA, 15 bp, Homo sapiens
cgcccgaaggagccc

SEQ ID NO: 1040050 - DNA, 15 bp, Homo sapiens
gcccgaaggagccca

SEQ ID NO: 1040051 - DNA, 15 bp, Homo sapiens
cccgaaggagcccaa

SEQ ID NO: 1040052 - DNA, 15 bp, Homo sapiens
ccgaaggagcccaag

SEQ ID NO: 1040053 - DNA, 15 bp, Homo sapiens
cgaaggagcccaaga

SEQ ID NO: 1040054 - DNA, 15 bp, Homo sapiens
gaaggagcccaagag

SEQ ID NO: 1040055 - DNA, 15 bp, Homo sapiens
aaggagcccaagagt

SEQ ID NO: 1040056 - DNA, 15 bp, Homo sapiens
aggagcccaagagtg

SEQ ID NO: 1040057 - DNA, 15 bp, Homo sapiens
ggagcccaagagtgt

SEQ ID NO: 1040058 - DNA, 15 bp, Homo sapiens
gagcccaagagtgtg

SEQ ID NO: 1040059 - DNA, 15 bp, Homo sapiens
agcccaagagtgtgt

SEQ ID NO: 1040060 - DNA, 15 bp, Homo sapiens
gcccaagagtgtgtg

SEQ ID NO: 1040061 - DNA, 15 bp, Homo sapiens
cccaagagtgtgtga

SEQ ID NO: 1040062 - DNA, 15 bp, Homo sapiens
ccaagagtgtgtgaa

SEQ ID NO: 1040063 - DNA, 15 bp, Homo sapiens
caagagtgtgtgaac

SEQ ID NO: 1040064 - DNA, 15 bp, Homo sapiens
aagagtgtgtgaacg

SEQ ID NO: 1040065 - DNA, 15 bp, Homo sapiens
agagtgtgtgaacgt

SEQ ID NO: 1040066 - DNA, 15 bp, Homo sapiens
gagtgtgtgaacgtc

SEQ ID NO: 1040067 - DNA, 15 bp, Homo sapiens
agtgtgtgaacgtct

SEQ ID NO: 1040068 - DNA, 15 bp, Homo sapiens
gtgtgtgaacgtctg

SEQ ID NO: 1040069 - DNA, 15 bp, Homo sapiens
tgtgtgaacgtctgc

SEQ ID NO: 1040070 - DNA, 15 bp, Homo sapiens
gtgtgaacgtctgct

SEQ ID NO: 1040071 - DNA, 15 bp, Homo sapiens
tgtgaacgtctgctt

SEQ ID NO: 1040072 - DNA, 15 bp, Homo sapiens
gtgaacgtctgcttt

SEQ ID NO: 1040073 - DNA, 15 bp, Homo sapiens
tgaacgtctgctttc

SEQ ID NO: 1040074 - DNA, 15 bp, Homo sapiens
gaacgtctgctttca

SEQ ID NO: 1040075 - DNA, 15 bp, Homo sapiens
aacgtctgctttcac

SEQ ID NO: 1040076 - DNA, 15 bp, Homo sapiens
acgtctgctttcaca

SEQ ID NO: 1040077 - DNA, 15 bp, Homo sapiens
cgtctgctttcacag

SEQ ID NO: 1040078 - DNA, 15 bp, Homo sapiens
gtctgctttcacagc

SEQ ID NO: 1040079 - DNA, 15 bp, Homo sapiens
tctgctttcacagca

SEQ ID NO: 1040080 - DNA, 15 bp, Homo sapiens
ctgctttcacagcag

SEQ ID NO: 1040081 - DNA, 15 bp, Homo sapiens
tgctttcacagcagc

SEQ ID NO: 1040082 - DNA, 15 bp, Homo sapiens
gctttcacagcagcc

SEQ ID NO: 1040083 - DNA, 15 bp, Homo sapiens
ctttcacagcagccg

SEQ ID NO: 1040084 - DNA, 15 bp, Homo sapiens
tttcacagcagccgg

SEQ ID NO: 1040085 - DNA, 15 bp, Homo sapiens
ttcacagcagccggt

SEQ ID NO: 1040086 - DNA, 15 bp, Homo sapiens
tcacagcagccggta

SEQ ID NO: 1040087 - DNA, 15 bp, Homo sapiens
cacagcagccggtag

SEQ ID NO: 1040088 - DNA, 15 bp, Homo sapiens
acagcagccggtagc

SEQ ID NO: 1040089 - DNA, 15 bp, Homo sapiens
cagcagccggtagca

SEQ ID NO: 1040090 - DNA, 15 bp, Homo sapiens
agcagccggtagcag

SEQ ID NO: 1040091 - DNA, 15 bp, Homo sapiens
gcagccggtagcagg

SEQ ID NO: 1040092 - DNA, 15 bp, Homo sapiens
cagccggtagcaggg

SEQ ID NO: 1040093 - DNA, 15 bp, Homo sapiens
agccggtagcagggt

SEQ ID NO: 1040094 - DNA, 15 bp, Homo sapiens
gccggtagcagggtc

SEQ ID NO: 1040095 - DNA, 15 bp, Homo sapiens
ccggtagcagggtcc

SEQ ID NO: 1040096 - DNA, 15 bp, Homo sapiens
cggtagcagggtccg

SEQ ID NO: 1040097 - DNA, 15 bp, Homo sapiens
ggtagcagggtccgg

SEQ ID NO: 1040098 - DNA, 15 bp, Homo sapiens
gtagcagggtccggt

SEQ ID NO: 1040099 - DNA, 15 bp, Homo sapiens
tagcagggtccggta

SEQ ID NO: 1040100 - DNA, 15 bp, Homo sapiens
agcagggtccggtaa

SEQ ID NO: 1040101 - DNA, 15 bp, Homo sapiens
gcagggtccggtaaa

SEQ ID NO: 1040102 - DNA, 15 bp, Homo sapiens
cagggtccggtaaaa

SEQ ID NO: 1040103 - DNA, 15 bp, Homo sapiens
agggtccggtaaaat

SEQ ID NO: 1040104 - DNA, 15 bp, Homo sapiens
gggtccggtaaaatt

SEQ ID NO: 1040105 - DNA, 15 bp, Homo sapiens
ggtccggtaaaatta

SEQ ID NO: 1040106 - DNA, 15 bp, Homo sapiens
gtccggtaaaattag

SEQ ID NO: 1040107 - DNA, 15 bp, Homo sapiens
tccggtaaaattaga

SEQ ID NO: 1040108 - DNA, 15 bp, Homo sapiens
ccggtaaaattagag

SEQ ID NO: 1040109 - DNA, 15 bp, Homo sapiens
cggtaaaattagagc

SEQ ID NO: 1040110 - DNA, 15 bp, Homo sapiens
ggtaaaattagagct

SEQ ID NO: 1040111 - DNA, 15 bp, Homo sapiens
gtaaaattagagctg

SEQ ID NO: 1040112 - DNA, 15 bp, Homo sapiens
taaaattagagctgc

SEQ ID NO: 1040113 - DNA, 15 bp, Homo sapiens
aaaattagagctgca

SEQ ID NO: 1040114 - DNA, 15 bp, Homo sapiens
aaattagagctgcac

SEQ ID NO: 1040115 - DNA, 15 bp, Homo sapiens
aattagagctgcact

SEQ ID NO: 1040116 - DNA, 15 bp, Homo sapiens
attagagctgcactt

SEQ ID NO: 1040117 - DNA, 15 bp, Homo sapiens
ttagagctgcacttt

SEQ ID NO: 1040118 - DNA, 15 bp, Homo sapiens
tagagctgcactttg

SEQ ID NO: 1040119 - DNA, 15 bp, Homo sapiens
agagctgcactttgc

SEQ ID NO: 1040120 - DNA, 15 bp, Homo sapiens
gagctgcactttgct

SEQ ID NO: 1040121 - DNA, 15 bp, Homo sapiens
agctgcactttgctt

SEQ ID NO: 1040122 - DNA, 15 bp, Homo sapiens
gctgcactttgcttg

SEQ ID NO: 1040123 - DNA, 15 bp, Homo sapiens
ctgcactttgcttgt

SEQ ID NO: 1040124 - DNA, 15 bp, Homo sapiens
tgcactttgcttgta

SEQ ID NO: 1040125 - DNA, 15 bp, Homo sapiens
gcactttgcttgtat

SEQ ID NO: 1040126 - DNA, 15 bp, Homo sapiens
cactttgcttgtatc

SEQ ID NO: 1040127 - DNA, 15 bp, Homo sapiens
actttgcttgtatcc

SEQ ID NO: 1040128 - DNA, 15 bp, Homo sapiens
ctttgcttgtatcct

SEQ ID NO: 1040129 - DNA, 15 bp, Homo sapiens
tttgcttgtatcctg

SEQ ID NO: 1040130 - DNA, 15 bp, Homo sapiens
ttgcttgtatcctgt

SEQ ID NO: 1040131 - DNA, 15 bp, Homo sapiens
tgcttgtatcctgtg

SEQ ID NO: 1040132 - DNA, 15 bp, Homo sapiens
gcttgtatcctgtga

SEQ ID NO: 1040133 - DNA, 15 bp, Homo sapiens
cttgtatcctgtgag

SEQ ID NO: 1040134 - DNA, 15 bp, Homo sapiens
ttgtatcctgtgagc

SEQ ID NO: 1040135 - DNA, 15 bp, Homo sapiens
tgtatcctgtgagcc

SEQ ID NO: 1040136 - DNA, 15 bp, Homo sapiens
gtatcctgtgagccc

SEQ ID NO: 1040137 - DNA, 15 bp, Homo sapiens
tatcctgtgagccca

SEQ ID NO: 1040138 - DNA, 15 bp, Homo sapiens
atcctgtgagcccag

SEQ ID NO: 1040139 - DNA, 15 bp, Homo sapiens
tcctgtgagcccagg

SEQ ID NO: 1040140 - DNA, 15 bp, Homo sapiens
cctgtgagcccagga

SEQ ID NO: 1040141 - DNA, 15 bp, Homo sapiens
ctgtgagcccaggag

SEQ ID NO: 1040142 - DNA, 15 bp, Homo sapiens
tgtgagcccaggagg

SEQ ID NO: 1040143 - DNA, 15 bp, Homo sapiens
gtgagcccaggagga

SEQ ID NO: 1040144 - DNA, 15 bp, Homo sapiens
tgagcccaggaggac

SEQ ID NO: 1040145 - DNA, 15 bp, Homo sapiens
gagcccaggaggaca

SEQ ID NO: 1040146 - DNA, 15 bp, Homo sapiens
agcccaggaggacag

SEQ ID NO: 1040147 - DNA, 15 bp, Homo sapiens
gcccaggaggacagg

SEQ ID NO: 1040148 - DNA, 15 bp, Homo sapiens
cccaggaggacagga

SEQ ID NO: 1040149 - DNA, 15 bp, Homo sapiens
ccaggaggacaggaa

SEQ ID NO: 1040150 - DNA, 15 bp, Homo sapiens
caggaggacaggaac

SEQ ID NO: 1040151 - DNA, 15 bp, Homo sapiens
aggaggacaggaacc

SEQ ID NO: 1040152 - DNA, 15 bp, Homo sapiens
ggaggacaggaacct

SEQ ID NO: 1040153 - DNA, 15 bp, Homo sapiens
gaggacaggaacctt

SEQ ID NO: 1040154 - DNA, 15 bp, Homo sapiens
aggacaggaaccttc

SEQ ID NO: 1040155 - DNA, 15 bp, Homo sapiens
ggacaggaaccttct

SEQ ID NO: 1040156 - DNA, 15 bp, Homo sapiens
gacaggaaccttctg

SEQ ID NO: 1040157 - DNA, 15 bp, Homo sapiens
acaggaaccttctgt

SEQ ID NO: 1040158 - DNA, 15 bp, Homo sapiens
caggaaccttctgtg

SEQ ID NO: 1040159 - DNA, 15 bp, Homo sapiens
aggaaccttctgtga

SEQ ID NO: 1040160 - DNA, 15 bp, Homo sapiens
ggaaccttctgtgag

SEQ ID NO: 1040161 - DNA, 15 bp, Homo sapiens
gaaccttctgtgaga

SEQ ID NO: 1040162 - DNA, 15 bp, Homo sapiens
aaccttctgtgagac

SEQ ID NO: 1040163 - DNA, 15 bp, Homo sapiens
accttctgtgagacc

SEQ ID NO: 1040164 - DNA, 15 bp, Homo sapiens
ccttctgtgagaccc

SEQ ID NO: 1040165 - DNA, 15 bp, Homo sapiens
cttctgtgagaccca

SEQ ID NO: 1040166 - DNA, 15 bp, Homo sapiens
ttctgtgagacccac

SEQ ID NO: 1040167 - DNA, 15 bp, Homo sapiens
tctgtgagacccacg

SEQ ID NO: 1040168 - DNA, 15 bp, Homo sapiens
ctgtgagacccacgt

SEQ ID NO: 1040169 - DNA, 15 bp, Homo sapiens
tgtgagacccacgtg

SEQ ID NO: 1040170 - DNA, 15 bp, Homo sapiens
gtgagacccacgtgg

SEQ ID NO: 1040171 - DNA, 15 bp, Homo sapiens
tgagacccacgtggg

SEQ ID NO: 1040172 - DNA, 15 bp, Homo sapiens
gagacccacgtgggt

SEQ ID NO: 1040173 - DNA, 15 bp, Homo sapiens
agacccacgtgggtg

SEQ ID NO: 1040174 - DNA, 15 bp, Homo sapiens
gacccacgtgggtgc

SEQ ID NO: 1040175 - DNA, 15 bp, Homo sapiens
acccacgtgggtgcc

SEQ ID NO: 1040176 - DNA, 15 bp, Homo sapiens
cccacgtgggtgccc

SEQ ID NO: 1040177 - DNA, 15 bp, Homo sapiens
ccacgtgggtgccca

SEQ ID NO: 1040178 - DNA, 15 bp, Homo sapiens
cacgtgggtgcccag

SEQ ID NO: 1040179 - DNA, 15 bp, Homo sapiens
acgtgggtgcccagc

SEQ ID NO: 1040180 - DNA, 15 bp, Homo sapiens
cgtgggtgcccagct

SEQ ID NO: 1040181 - DNA, 15 bp, Homo sapiens
gtgggtgcccagctc

SEQ ID NO: 1040182 - DNA, 15 bp, Homo sapiens
tgggtgcccagctca

SEQ ID NO: 1040183 - DNA, 15 bp, Homo sapiens
gggtgcccagctcac

SEQ ID NO: 1040184 - DNA, 15 bp, Homo sapiens
ggtgcccagctcaca

SEQ ID NO: 1040185 - DNA, 15 bp, Homo sapiens
gtgcccagctcacat

SEQ ID NO: 1040186 - DNA, 15 bp, Homo sapiens
tgcccagctcacatg

SEQ ID NO: 1040187 - DNA, 15 bp, Homo sapiens
gcccagctcacatgg

SEQ ID NO: 1040188 - DNA, 15 bp, Homo sapiens
cccagctcacatggt

SEQ ID NO: 1040189 - DNA, 15 bp, Homo sapiens
ccagctcacatggta

SEQ ID NO: 1040190 - DNA, 15 bp, Homo sapiens
cagctcacatggtag

SEQ ID NO: 1040191 - DNA, 15 bp, Homo sapiens
agctcacatggtagg

SEQ ID NO: 1040192 - DNA, 15 bp, Homo sapiens
gctcacatggtaggt

SEQ ID NO: 1040193 - DNA, 15 bp, Homo sapiens
ctcacatggtaggtg

SEQ ID NO: 1040194 - DNA, 15 bp, Homo sapiens
tcacatggtaggtgc

SEQ ID NO: 1040195 - DNA, 15 bp, Homo sapiens
cacatggtaggtgct

SEQ ID NO: 1040196 - DNA, 15 bp, Homo sapiens
acatggtaggtgctc

SEQ ID NO: 1040197 - DNA, 15 bp, Homo sapiens
catggtaggtgctca

SEQ ID NO: 1040198 - DNA, 15 bp, Homo sapiens
atggtaggtgctcag

SEQ ID NO: 1040199 - DNA, 15 bp, Homo sapiens
tggtaggtgctcagc

SEQ ID NO: 1040200 - DNA, 15 bp, Homo sapiens
ggtaggtgctcagct

SEQ ID NO: 1040201 - DNA, 15 bp, Homo sapiens
gtaggtgctcagctg

SEQ ID NO: 1040202 - DNA, 15 bp, Homo sapiens
taggtgctcagctga

SEQ ID NO: 1040203 - DNA, 15 bp, Homo sapiens
aggtgctcagctgag

SEQ ID NO: 1040204 - DNA, 15 bp, Homo sapiens
ggtgctcagctgagc

SEQ ID NO: 1040205 - DNA, 15 bp, Homo sapiens
gtgctcagctgagca

SEQ ID NO: 1040206 - DNA, 15 bp, Homo sapiens
tgctcagctgagcat

SEQ ID NO: 1040207 - DNA, 15 bp, Homo sapiens
gctcagctgagcatc

SEQ ID NO: 1040208 - DNA, 15 bp, Homo sapiens
ctcagctgagcatcc

SEQ ID NO: 1040209 - DNA, 15 bp, Homo sapiens
tcagctgagcatcct

SEQ ID NO: 1040210 - DNA, 15 bp, Homo sapiens
cagctgagcatcctc

SEQ ID NO: 1040211 - DNA, 15 bp, Homo sapiens
agctgagcatcctcc

SEQ ID NO: 1040212 - DNA, 15 bp, Homo sapiens
gctgagcatcctcca

SEQ ID NO: 1040213 - DNA, 15 bp, Homo sapiens
ctgagcatcctccac

SEQ ID NO: 1040214 - DNA, 15 bp, Homo sapiens
tgagcatcctccact

SEQ ID NO: 1040215 - DNA, 15 bp, Homo sapiens
gagcatcctccactg

SEQ ID NO: 1040216 - DNA, 15 bp, Homo sapiens
agcatcctccactgc

SEQ ID NO: 1040217 - DNA, 15 bp, Homo sapiens
gcatcctccactgcc

SEQ ID NO: 1040218 - DNA, 15 bp, Homo sapiens
catcctccactgccc

SEQ ID NO: 1040219 - DNA, 15 bp, Homo sapiens
atcctccactgccca

SEQ ID NO: 1040220 - DNA, 15 bp, Homo sapiens
tcctccactgcccag

SEQ ID NO: 1040221 - DNA, 15 bp, Homo sapiens
cctccactgcccaga

SEQ ID NO: 1040222 - DNA, 15 bp, Homo sapiens
ctccactgcccagaa

SEQ ID NO: 1040223 - DNA, 15 bp, Homo sapiens
tccactgcccagaat

SEQ ID NO: 1040224 - DNA, 15 bp, Homo sapiens
ccactgcccagaatc

SEQ ID NO: 1040225 - DNA, 15 bp, Homo sapiens
cactgcccagaatct

SEQ ID NO: 1040226 - DNA, 15 bp, Homo sapiens
actgcccagaatctc

SEQ ID NO: 1040227 - DNA, 15 bp, Homo sapiens
ctgcccagaatctcc

SEQ ID NO: 1040228 - DNA, 15 bp, Homo sapiens
tgcccagaatctccc

SEQ ID NO: 1040229 - DNA, 15 bp, Homo sapiens
gcccagaatctcccc

SEQ ID NO: 1040230 - DNA, 15 bp, Homo sapiens
cccagaatctcccca

SEQ ID NO: 1040231 - DNA, 15 bp, Homo sapiens
ccagaatctccccat

SEQ ID NO: 1040232 - DNA, 15 bp, Homo sapiens
cagaatctccccata

SEQ ID NO: 1040233 - DNA, 15 bp, Homo sapiens
agaatctccccatag

SEQ ID NO: 1040234 - DNA, 15 bp, Homo sapiens
gaatctccccatagg

SEQ ID NO: 1040235 - DNA, 15 bp, Homo sapiens
aatctccccatagga

SEQ ID NO: 1040236 - DNA, 15 bp, Homo sapiens
atctccccataggaa

SEQ ID NO: 1040237 - DNA, 15 bp, Homo sapiens
tctccccataggaac

SEQ ID NO: 1040238 - DNA, 15 bp, Homo sapiens
ctccccataggaacc

SEQ ID NO: 1040239 - DNA, 15 bp, Homo sapiens
tccccataggaaccc

SEQ ID NO: 1040240 - DNA, 15 bp, Homo sapiens
ccccataggaaccct

SEQ ID NO: 1040241 - DNA, 15 bp, Homo sapiens
cccataggaaccctc

SEQ ID NO: 1040242 - DNA, 15 bp, Homo sapiens
ccataggaaccctct

SEQ ID NO: 1040243 - DNA, 15 bp, Homo sapiens
cataggaaccctctc

SEQ ID NO: 1040244 - DNA, 15 bp, Homo sapiens
ataggaaccctctcc

SEQ ID NO: 1040245 - DNA, 15 bp, Homo sapiens
taggaaccctctccc

SEQ ID NO: 1040246 - DNA, 15 bp, Homo sapiens
aggaaccctctccca

SEQ ID NO: 1040247 - DNA, 15 bp, Homo sapiens
ggaaccctctcccag

SEQ ID NO: 1040248 - DNA, 15 bp, Homo sapiens
gaaccctctcccaga

SEQ ID NO: 1040249 - DNA, 15 bp, Homo sapiens
aaccctctcccagag

SEQ ID NO: 1040250 - DNA, 15 bp, Homo sapiens
accctctcccagagg

SEQ ID NO: 1040251 - DNA, 15 bp, Homo sapiens
ccctctcccagaggc

SEQ ID NO: 1040252 - DNA, 15 bp, Homo sapiens
cctctcccagaggca

SEQ ID NO: 1040253 - DNA, 15 bp, Homo sapiens
ctctcccagaggcag

SEQ ID NO: 1040254 - DNA, 15 bp, Homo sapiens
tctcccagaggcaga

SEQ ID NO: 1040255 - DNA, 15 bp, Homo sapiens
ctcccagaggcagaa

SEQ ID NO: 1040256 - DNA, 15 bp, Homo sapiens
tcccagaggcagaat

SEQ ID NO: 1040257 - DNA, 15 bp, Homo sapiens
cccagaggcagaatg

SEQ ID NO: 1040258 - DNA, 15 bp, Homo sapiens
ccagaggcagaatgc

SEQ ID NO: 1040259 - DNA, 15 bp, Homo sapiens
cagaggcagaatgcg

SEQ ID NO: 1040260 - DNA, 15 bp, Homo sapiens
agaggcagaatgcgc

SEQ ID NO: 1040261 - DNA, 15 bp, Homo sapiens
gaggcagaatgcgcg

SEQ ID NO: 1040262 - DNA, 15 bp, Homo sapiens
aggcagaatgcgcga

SEQ ID NO: 1040263 - DNA, 15 bp, Homo sapiens
ggcagaatgcgcgac

SEQ ID NO: 1040264 - DNA, 15 bp, Homo sapiens
gcagaatgcgcgact

SEQ ID NO: 1040265 - DNA, 15 bp, Homo sapiens
cagaatgcgcgactc

SEQ ID NO: 1040266 - DNA, 15 bp, Homo sapiens
agaatgcgcgactct

SEQ ID NO: 1040267 - DNA, 15 bp, Homo sapiens
gaatgcgcgactctg

SEQ ID NO: 1040268 - DNA, 15 bp, Homo sapiens
aatgcgcgactctgt

SEQ ID NO: 1040269 - DNA, 15 bp, Homo sapiens
atgcgcgactctgtt

SEQ ID NO: 1040270 - DNA, 15 bp, Homo sapiens
tgcgcgactctgttc

SEQ ID NO: 1040271 - DNA, 15 bp, Homo sapiens
gcgcgactctgttct

SEQ ID NO: 1040272 - DNA, 15 bp, Homo sapiens
cgcgactctgttctc

SEQ ID NO: 1040273 - DNA, 15 bp, Homo sapiens
gcgactctgttctcc

SEQ ID NO: 1040274 - DNA, 15 bp, Homo sapiens
cgactctgttctccc

SEQ ID NO: 1040275 - DNA, 15 bp, Homo sapiens
gactctgttctccct

SEQ ID NO: 1040276 - DNA, 15 bp, Homo sapiens
actctgttctccctg

SEQ ID NO: 1040277 - DNA, 15 bp, Homo sapiens
ctctgttctccctgc

SEQ ID NO: 1040278 - DNA, 15 bp, Homo sapiens
tctgttctccctgct

SEQ ID NO: 1040279 - DNA, 15 bp, Homo sapiens
ctgttctccctgctc

SEQ ID NO: 1040280 - DNA, 15 bp, Homo sapiens
tgttctccctgctca

SEQ ID NO: 1040281 - DNA, 15 bp, Homo sapiens
gttctccctgctcac

SEQ ID NO: 1040282 - DNA, 15 bp, Homo sapiens
ttctccctgctcact

SEQ ID NO: 1040283 - DNA, 15 bp, Homo sapiens
tctccctgctcactg

SEQ ID NO: 1040284 - DNA, 15 bp, Homo sapiens
ctccctgctcactgc

SEQ ID NO: 1040285 - DNA, 15 bp, Homo sapiens
tccctgctcactgcc

SEQ ID NO: 1040286 - DNA, 15 bp, Homo sapiens
ccctgctcactgcct

SEQ ID NO: 1040287 - DNA, 15 bp, Homo sapiens
cctgctcactgcctc

SEQ ID NO: 1040288 - DNA, 15 bp, Homo sapiens
ctgctcactgcctcc

SEQ ID NO: 1040289 - DNA, 15 bp, Homo sapiens
tgctcactgcctcca

SEQ ID NO: 1040290 - DNA, 15 bp, Homo sapiens
gctcactgcctccat

SEQ ID NO: 1040291 - DNA, 15 bp, Homo sapiens
ctcactgcctccatg

SEQ ID NO: 1040292 - DNA, 15 bp, Homo sapiens
tcactgcctccatga

SEQ ID NO: 1040293 - DNA, 15 bp, Homo sapiens
cactgcctccatgat

SEQ ID NO: 1040294 - DNA, 15 bp, Homo sapiens
actgcctccatgatt

SEQ ID NO: 1040295 - DNA, 15 bp, Homo sapiens
ctgcctccatgattc

SEQ ID NO: 1040296 - DNA, 15 bp, Homo sapiens
tgcctccatgattca

SEQ ID NO: 1040297 - DNA, 15 bp, Homo sapiens
gcctccatgattcag

SEQ ID NO: 1040298 - DNA, 15 bp, Homo sapiens
cctccatgattcagt

SEQ ID NO: 1040299 - DNA, 15 bp, Homo sapiens
ctccatgattcagtc

SEQ ID NO: 1040300 - DNA, 15 bp, Homo sapiens
tccatgattcagtct

SEQ ID NO: 1040301 - DNA, 15 bp, Homo sapiens
ccatgattcagtctg

SEQ ID NO: 1040302 - DNA, 15 bp, Homo sapiens
catgattcagtctgg

SEQ ID NO: 1040303 - DNA, 15 bp, Homo sapiens
atgattcagtctgga

SEQ ID NO: 1040304 - DNA, 15 bp, Homo sapiens
tgattcagtctggaa

SEQ ID NO: 1040305 - DNA, 15 bp, Homo sapiens
gattcagtctggaaa

SEQ ID NO: 1040306 - DNA, 15 bp, Homo sapiens
attcagtctggaaac

SEQ ID NO: 1040307 - DNA, 15 bp, Homo sapiens
ttcagtctggaaact

SEQ ID NO: 1040308 - DNA, 15 bp, Homo sapiens
tcagtctggaaacta

SEQ ID NO: 1040309 - DNA, 15 bp, Homo sapiens
cagtctggaaactat

SEQ ID NO: 1040310 - DNA, 15 bp, Homo sapiens
agtctggaaactata

SEQ ID NO: 1040311 - DNA, 15 bp, Homo sapiens
gtctggaaactataa

SEQ ID NO: 1040312 - DNA, 15 bp, Homo sapiens
tctggaaactataag

SEQ ID NO: 1040313 - DNA, 15 bp, Homo sapiens
ctggaaactataagc

SEQ ID NO: 1040314 - DNA, 15 bp, Homo sapiens
tggaaactataagcc

SEQ ID NO: 1040315 - DNA, 15 bp, Homo sapiens
ggaaactataagccg

SEQ ID NO: 1040316 - DNA, 15 bp, Homo sapiens
gaaactataagccgc

SEQ ID NO: 1040317 - DNA, 15 bp, Homo sapiens
aaactataagccgct

SEQ ID NO: 1040318 - DNA, 15 bp, Homo sapiens
aactataagccgctt

SEQ ID NO: 1040319 - DNA, 15 bp, Homo sapiens
actataagccgcttt

SEQ ID NO: 1040320 - DNA, 15 bp, Homo sapiens
ctataagccgctttt

SEQ ID NO: 1040321 - DNA, 15 bp, Homo sapiens
tataagccgcttttc

SEQ ID NO: 1040322 - DNA, 15 bp, Homo sapiens
ataagccgcttttct

SEQ ID NO: 1040323 - DNA, 15 bp, Homo sapiens
taagccgcttttctc

SEQ ID NO: 1040324 - DNA, 15 bp, Homo sapiens
aagccgcttttctcc

SEQ ID NO: 1040325 - DNA, 15 bp, Homo sapiens
agccgcttttctccc

SEQ ID NO: 1040326 - DNA, 15 bp, Homo sapiens
gccgcttttctcccc

SEQ ID NO: 1040327 - DNA, 15 bp, Homo sapiens
ccgcttttctcccca

SEQ ID NO: 1040328 - DNA, 15 bp, Homo sapiens
cgcttttctccccag

SEQ ID NO: 1040329 - DNA, 15 bp, Homo sapiens
gcttttctccccaga

SEQ ID NO: 1040330 - DNA, 15 bp, Homo sapiens
cttttctccccagat

SEQ ID NO: 1040331 - DNA, 15 bp, Homo sapiens
ttttctccccagatt

SEQ ID NO: 1040332 - DNA, 15 bp, Homo sapiens
tttctccccagattc

SEQ ID NO: 1040333 - DNA, 15 bp, Homo sapiens
ttctccccagattca

SEQ ID NO: 1040334 - DNA, 15 bp, Homo sapiens
tctccccagattcat

SEQ ID NO: 1040335 - DNA, 15 bp, Homo sapiens
ctccccagattcatg

SEQ ID NO: 1040336 - DNA, 15 bp, Homo sapiens
tccccagattcatgc

SEQ ID NO: 1040337 - DNA, 15 bp, Homo sapiens
ccccagattcatgca

SEQ ID NO: 1040338 - DNA, 15 bp, Homo sapiens
cccagattcatgcag

SEQ ID NO: 1040339 - DNA, 15 bp, Homo sapiens
ccagattcatgcaga

SEQ ID NO: 1040340 - DNA, 15 bp, Homo sapiens
cagattcatgcagag

SEQ ID NO: 1040341 - DNA, 15 bp, Homo sapiens
agattcatgcagagg

SEQ ID NO: 1040342 - DNA, 15 bp, Homo sapiens
gattcatgcagaggc

SEQ ID NO: 1040343 - DNA, 15 bp, Homo sapiens
attcatgcagaggca

SEQ ID NO: 1040344 - DNA, 15 bp, Homo sapiens
ttcatgcagaggcag

SEQ ID NO: 1040345 - DNA, 15 bp, Homo sapiens
tcatgcagaggcagg

SEQ ID NO: 1040346 - DNA, 15 bp, Homo sapiens
catgcagaggcaggc

SEQ ID NO: 1040347 - DNA, 15 bp, Homo sapiens
atgcagaggcaggca

SEQ ID NO: 1040348 - DNA, 15 bp, Homo sapiens
tgcagaggcaggcag

SEQ ID NO: 1040349 - DNA, 15 bp, Homo sapiens
gcagaggcaggcagc

SEQ ID NO: 1040350 - DNA, 15 bp, Homo sapiens
cagaggcaggcagca

SEQ ID NO: 1040351 - DNA, 15 bp, Homo sapiens
agaggcaggcagcag

SEQ ID NO: 1040352 - DNA, 15 bp, Homo sapiens
gaggcaggcagcagc

SEQ ID NO: 1040353 - DNA, 15 bp, Homo sapiens
aggcaggcagcagcc

SEQ ID NO: 1040354 - DNA, 15 bp, Homo sapiens
ggcaggcagcagccc

SEQ ID NO: 1040355 - DNA, 15 bp, Homo sapiens
gcaggcagcagccca

SEQ ID NO: 1040356 - DNA, 15 bp, Homo sapiens
caggcagcagcccaa

SEQ ID NO: 1040357 - DNA, 15 bp, Homo sapiens
aggcagcagcccaag

SEQ ID NO: 1040358 - DNA, 15 bp, Homo sapiens
ggcagcagcccaagg

SEQ ID NO: 1040359 - DNA, 15 bp, Homo sapiens
gcagcagcccaaggt

SEQ ID NO: 1040360 - DNA, 15 bp, Homo sapiens
cagcagcccaaggtc

SEQ ID NO: 1040361 - DNA, 15 bp, Homo sapiens
agcagcccaaggtcc

SEQ ID NO: 1040362 - DNA, 15 bp, Homo sapiens
gcagcccaaggtcct

SEQ ID NO: 1040363 - DNA, 15 bp, Homo sapiens
cagcccaaggtcctc

SEQ ID NO: 1040364 - DNA, 15 bp, Homo sapiens
agcccaaggtcctct

SEQ ID NO: 1040365 - DNA, 15 bp, Homo sapiens
gcccaaggtcctctg

SEQ ID NO: 1040366 - DNA, 15 bp, Homo sapiens
cccaaggtcctctga

SEQ ID NO: 1040367 - DNA, 15 bp, Homo sapiens
ccaaggtcctctgag

SEQ ID NO: 1040368 - DNA, 15 bp, Homo sapiens
caaggtcctctgagt

SEQ ID NO: 1040369 - DNA, 15 bp, Homo sapiens
aaggtcctctgagtg

SEQ ID NO: 1040370 - DNA, 15 bp, Homo sapiens
aggtcctctgagtgc

SEQ ID NO: 1040371 - DNA, 15 bp, Homo sapiens
ggtcctctgagtgca

SEQ ID NO: 1040372 - DNA, 15 bp, Homo sapiens
gtcctctgagtgcac

SEQ ID NO: 1040373 - DNA, 15 bp, Homo sapiens
tcctctgagtgcacg

SEQ ID NO: 1040374 - DNA, 15 bp, Homo sapiens
cctctgagtgcacgc

SEQ ID NO: 1040375 - DNA, 15 bp, Homo sapiens
ctctgagtgcacgca

SEQ ID NO: 1040376 - DNA, 15 bp, Homo sapiens
tctgagtgcacgcag

SEQ ID NO: 1040377 - DNA, 15 bp, Homo sapiens
ctgagtgcacgcagc

SEQ ID NO: 1040378 - DNA, 15 bp, Homo sapiens
tgagtgcacgcagcc

SEQ ID NO: 1040379 - DNA, 15 bp, Homo sapiens
gagtgcacgcagcct

SEQ ID NO: 1040380 - DNA, 15 bp, Homo sapiens
agtgcacgcagcctt

SEQ ID NO: 1040381 - DNA, 15 bp, Homo sapiens
gtgcacgcagcctta

SEQ ID NO: 1040382 - DNA, 15 bp, Homo sapiens
tgcacgcagccttag

SEQ ID NO: 1040383 - DNA, 15 bp, Homo sapiens
gcacgcagccttagg

SEQ ID NO: 1040384 - DNA, 15 bp, Homo sapiens
cacgcagccttaggt

SEQ ID NO: 1040385 - DNA, 15 bp, Homo sapiens
acgcagccttaggtc

SEQ ID NO: 1040386 - DNA, 15 bp, Homo sapiens
cgcagccttaggtct

SEQ ID NO: 1040387 - DNA, 15 bp, Homo sapiens
gcagccttaggtctt

SEQ ID NO: 1040388 - DNA, 15 bp, Homo sapiens
cagccttaggtcttt

SEQ ID NO: 1040389 - DNA, 15 bp, Homo sapiens
agccttaggtctttc

SEQ ID NO: 1040390 - DNA, 15 bp, Homo sapiens
gccttaggtctttcc

SEQ ID NO: 1040391 - DNA, 15 bp, Homo sapiens
ccttaggtctttcct

SEQ ID NO: 1040392 - DNA, 15 bp, Homo sapiens
cttaggtctttcctc

SEQ ID NO: 1040393 - DNA, 15 bp, Homo sapiens
ttaggtctttcctct

SEQ ID NO: 1040394 - DNA, 15 bp, Homo sapiens
taggtctttcctctg

SEQ ID NO: 1040395 - DNA, 15 bp, Homo sapiens
aggtctttcctctga

SEQ ID NO: 1040396 - DNA, 15 bp, Homo sapiens
ggtctttcctctgat

SEQ ID NO: 1040397 - DNA, 15 bp, Homo sapiens
gtctttcctctgatc

SEQ ID NO: 1040398 - DNA, 15 bp, Homo sapiens
tctttcctctgatcc

SEQ ID NO: 1040399 - DNA, 15 bp, Homo sapiens
ctttcctctgatcct

SEQ ID NO: 1040400 - DNA, 15 bp, Homo sapiens
tttcctctgatccta

SEQ ID NO: 1040401 - DNA, 15 bp, Homo sapiens
ttcctctgatcctaa

SEQ ID NO: 1040402 - DNA, 15 bp, Homo sapiens
tcctctgatcctaac

SEQ ID NO: 1040403 - DNA, 15 bp, Homo sapiens
cctctgatcctaact

SEQ ID NO: 1040404 - DNA, 15 bp, Homo sapiens
ctctgatcctaactt

SEQ ID NO: 1040405 - DNA, 15 bp, Homo sapiens
tctgatcctaacttt

SEQ ID NO: 1040406 - DNA, 15 bp, Homo sapiens
ctgatcctaactttg

SEQ ID NO: 1040407 - DNA, 15 bp, Homo sapiens
tgatcctaactttgc

SEQ ID NO: 1040408 - DNA, 15 bp, Homo sapiens
gatcctaactttgca

SEQ ID NO: 1040409 - DNA, 15 bp, Homo sapiens
atcctaactttgcat

SEQ ID NO: 1040410 - DNA, 15 bp, Homo sapiens
tcctaactttgcata

SEQ ID NO: 1040411 - DNA, 15 bp, Homo sapiens
cctaactttgcatac

SEQ ID NO: 1040412 - DNA, 15 bp, Homo sapiens
ctaactttgcatacc

SEQ ID NO: 1040413 - DNA, 15 bp, Homo sapiens
taactttgcatacca

SEQ ID NO: 1040414 - DNA, 15 bp, Homo sapiens
aactttgcataccat

SEQ ID NO: 1040415 - DNA, 15 bp, Homo sapiens
actttgcataccatt

SEQ ID NO: 1040416 - DNA, 15 bp, Homo sapiens
ctttgcataccattg

SEQ ID NO: 1040417 - DNA, 15 bp, Homo sapiens
tttgcataccattgc

SEQ ID NO: 1040418 - DNA, 15 bp, Homo sapiens
ttgcataccattgcc

SEQ ID NO: 1040419 - DNA, 15 bp, Homo sapiens
tgcataccattgccc

SEQ ID NO: 1040420 - DNA, 15 bp, Homo sapiens
gcataccattgccct

SEQ ID NO: 1040421 - DNA, 15 bp, Homo sapiens
cataccattgccctt

SEQ ID NO: 1040422 - DNA, 15 bp, Homo sapiens
ataccattgcccttt

SEQ ID NO: 1040423 - DNA, 15 bp, Homo sapiens
taccattgccctttc

SEQ ID NO: 1040424 - DNA, 15 bp, Homo sapiens
accattgccctttca

SEQ ID NO: 1040425 - DNA, 15 bp, Homo sapiens
ccattgccctttcaa

SEQ ID NO: 1040426 - DNA, 15 bp, Homo sapiens
cattgccctttcaac

SEQ ID NO: 1040427 - DNA, 15 bp, Homo sapiens
attgccctttcaacc

SEQ ID NO: 1040428 - DNA, 15 bp, Homo sapiens
ttgccctttcaacca

SEQ ID NO: 1040429 - DNA, 15 bp, Homo sapiens
tgccctttcaaccag

SEQ ID NO: 1040430 - DNA, 15 bp, Homo sapiens
gccctttcaaccagg

SEQ ID NO: 1040431 - DNA, 15 bp, Homo sapiens
ccctttcaaccaggg

SEQ ID NO: 1040432 - DNA, 15 bp, Homo sapiens
cctttcaaccaggga

SEQ ID NO: 1040433 - DNA, 15 bp, Homo sapiens
ctttcaaccagggag

SEQ ID NO: 1040434 - DNA, 15 bp, Homo sapiens
tttcaaccagggaga

SEQ ID NO: 1040435 - DNA, 15 bp, Homo sapiens
ttcaaccagggagac

SEQ ID NO: 1040436 - DNA, 15 bp, Homo sapiens
tcaaccagggagaca

SEQ ID NO: 1040437 - DNA, 15 bp, Homo sapiens
caaccagggagacag

SEQ ID NO: 1040438 - DNA, 15 bp, Homo sapiens
aaccagggagacaga

SEQ ID NO: 1040439 - DNA, 15 bp, Homo sapiens
accagggagacagat

SEQ ID NO: 1040440 - DNA, 15 bp, Homo sapiens
ccagggagacagatt

SEQ ID NO: 1040441 - DNA, 15 bp, Homo sapiens
cagggagacagatta

SEQ ID NO: 1040442 - DNA, 15 bp, Homo sapiens
agggagacagattag

SEQ ID NO: 1040443 - DNA, 15 bp, Homo sapiens
gggagacagattagg

SEQ ID NO: 1040444 - DNA, 15 bp, Homo sapiens
ggagacagattaggc

SEQ ID NO: 1040445 - DNA, 15 bp, Homo sapiens
gagacagattaggcg

SEQ ID NO: 1040446 - DNA, 15 bp, Homo sapiens
agacagattaggcgg

SEQ ID NO: 1040447 - DNA, 15 bp, Homo sapiens
gacagattaggcggt

SEQ ID NO: 1040448 - DNA, 15 bp, Homo sapiens
acagattaggcggtc

SEQ ID NO: 1040449 - DNA, 15 bp, Homo sapiens
cagattaggcggtca

SEQ ID NO: 1040450 - DNA, 15 bp, Homo sapiens
agattaggcggtcag

SEQ ID NO: 1040451 - DNA, 15 bp, Homo sapiens
gattaggcggtcagc

SEQ ID NO: 1040452 - DNA, 15 bp, Homo sapiens
attaggcggtcagct

SEQ ID NO: 1040453 - DNA, 15 bp, Homo sapiens
ttaggcggtcagctg

SEQ ID NO: 1040454 - DNA, 15 bp, Homo sapiens
taggcggtcagctgg

SEQ ID NO: 1040455 - DNA, 15 bp, Homo sapiens
aggcggtcagctggt

SEQ ID NO: 1040456 - DNA, 15 bp, Homo sapiens
ggcggtcagctggtc

SEQ ID NO: 1040457 - DNA, 15 bp, Homo sapiens
gcggtcagctggtct

SEQ ID NO: 1040458 - DNA, 15 bp, Homo sapiens
cggtcagctggtctg

SEQ ID NO: 1040459 - DNA, 15 bp, Homo sapiens
ggtcagctggtctgc

SEQ ID NO: 1040460 - DNA, 15 bp, Homo sapiens
gtcagctggtctgca

SEQ ID NO: 1040461 - DNA, 15 bp, Homo sapiens
tcagctggtctgcag

SEQ ID NO: 1040462 - DNA, 15 bp, Homo sapiens
cagctggtctgcaga

SEQ ID NO: 1040463 - DNA, 15 bp, Homo sapiens
agctggtctgcagac

SEQ ID NO: 1040464 - DNA, 15 bp, Homo sapiens
gctggtctgcagacg

SEQ ID NO: 1040465 - DNA, 15 bp, Homo sapiens
ctggtctgcagacgg

SEQ ID NO: 1040466 - DNA, 15 bp, Homo sapiens
tggtctgcagacgga

SEQ ID NO: 1040467 - DNA, 15 bp, Homo sapiens
ggtctgcagacggac

SEQ ID NO: 1040468 - DNA, 15 bp, Homo sapiens
gtctgcagacggaca

SEQ ID NO: 1040469 - DNA, 15 bp, Homo sapiens
tctgcagacggacag

SEQ ID NO: 1040470 - DNA, 15 bp, Homo sapiens
ctgcagacggacaga

SEQ ID NO: 1040471 - DNA, 15 bp, Homo sapiens
tgcagacggacagac

SEQ ID NO: 1040472 - DNA, 15 bp, Homo sapiens
gcagacggacagact

SEQ ID NO: 1040473 - DNA, 15 bp, Homo sapiens
cagacggacagactc

SEQ ID NO: 1040474 - DNA, 15 bp, Homo sapiens
agacggacagactct

SEQ ID NO: 1040475 - DNA, 15 bp, Homo sapiens
gacggacagactctg

SEQ ID NO: 1040476 - DNA, 15 bp, Homo sapiens
acggacagactctgc

SEQ ID NO: 1040477 - DNA, 15 bp, Homo sapiens
cggacagactctgcc

SEQ ID NO: 1040478 - DNA, 15 bp, Homo sapiens
ggacagactctgccc

SEQ ID NO: 1040479 - DNA, 15 bp, Homo sapiens
gacagactctgccct

SEQ ID NO: 1040480 - DNA, 15 bp, Homo sapiens
acagactctgccctg

SEQ ID NO: 1040481 - DNA, 15 bp, Homo sapiens
cagactctgccctgg

SEQ ID NO: 1040482 - DNA, 15 bp, Homo sapiens
agactctgccctggg

SEQ ID NO: 1040483 - DNA, 15 bp, Homo sapiens
gactctgccctgggt

SEQ ID NO: 1040484 - DNA, 15 bp, Homo sapiens
actctgccctgggtg

SEQ ID NO: 1040485 - DNA, 15 bp, Homo sapiens
ctctgccctgggtgc

SEQ ID NO: 1040486 - DNA, 15 bp, Homo sapiens
tctgccctgggtgcc

SEQ ID NO: 1040487 - DNA, 15 bp, Homo sapiens
ctgccctgggtgcct

SEQ ID NO: 1040488 - DNA, 15 bp, Homo sapiens
tgccctgggtgcctg

SEQ ID NO: 1040489 - DNA, 15 bp, Homo sapiens
gccctgggtgcctgg

SEQ ID NO: 1040490 - DNA, 15 bp, Homo sapiens
ccctgggtgcctggg

SEQ ID NO: 1040491 - DNA, 15 bp, Homo sapiens
cctgggtgcctgggt

SEQ ID NO: 1040492 - DNA, 15 bp, Homo sapiens
ctgggtgcctgggtg

SEQ ID NO: 1040493 - DNA, 15 bp, Homo sapiens
tgggtgcctgggtgg

SEQ ID NO: 1040494 - DNA, 15 bp, Homo sapiens
gggtgcctgggtggc

SEQ ID NO: 1040495 - DNA, 15 bp, Homo sapiens
ggtgcctgggtggcc

SEQ ID NO: 1040496 - DNA, 15 bp, Homo sapiens
gtgcctgggtggcct

SEQ ID NO: 1040497 - DNA, 15 bp, Homo sapiens
tgcctgggtggcctg

SEQ ID NO: 1040498 - DNA, 15 bp, Homo sapiens
gcctgggtggcctgt

SEQ ID NO: 1040499 - DNA, 15 bp, Homo sapiens
cctgggtggcctgtt

SEQ ID NO: 1040500 - DNA, 15 bp, Homo sapiens
ctgggtggcctgttt

SEQ ID NO: 1040501 - DNA, 15 bp, Homo sapiens
tgggtggcctgtttg

SEQ ID NO: 1040502 - DNA, 15 bp, Homo sapiens
gggtggcctgtttga

SEQ ID NO: 1040503 - DNA, 15 bp, Homo sapiens
ggtggcctgtttgaa

SEQ ID NO: 1040504 - DNA, 15 bp, Homo sapiens
gtggcctgtttgaat

SEQ ID NO: 1040505 - DNA, 15 bp, Homo sapiens
tggcctgtttgaatg

SEQ ID NO: 1040506 - DNA, 15 bp, Homo sapiens
ggcctgtttgaatga

SEQ ID NO: 1040507 - DNA, 15 bp, Homo sapiens
gcctgtttgaatgag

SEQ ID NO: 1040508 - DNA, 15 bp, Homo sapiens
cctgtttgaatgagc

SEQ ID NO: 1040509 - DNA, 15 bp, Homo sapiens
ctgtttgaatgagcc

SEQ ID NO: 1040510 - DNA, 15 bp, Homo sapiens
tgtttgaatgagcct

SEQ ID NO: 1040511 - DNA, 15 bp, Homo sapiens
gtttgaatgagcctg

SEQ ID NO: 1040512 - DNA, 15 bp, Homo sapiens
tttgaatgagcctgg

SEQ ID NO: 1040513 - DNA, 15 bp, Homo sapiens
ttgaatgagcctgga

SEQ ID NO: 1040514 - DNA, 15 bp, Homo sapiens
tgaatgagcctggag

SEQ ID NO: 1040515 - DNA, 15 bp, Homo sapiens
gaatgagcctggagt

SEQ ID NO: 1040516 - DNA, 15 bp, Homo sapiens
aatgagcctggagtt

SEQ ID NO: 1040517 - DNA, 15 bp, Homo sapiens
atgagcctggagtta

SEQ ID NO: 1040518 - DNA, 15 bp, Homo sapiens
tgagcctggagttag

SEQ ID NO: 1040519 - DNA, 15 bp, Homo sapiens
gagcctggagttagg

SEQ ID NO: 1040520 - DNA, 15 bp, Homo sapiens
agcctggagttaggg

SEQ ID NO: 1040521 - DNA, 15 bp, Homo sapiens
gcctggagttaggga

SEQ ID NO: 1040522 - DNA, 15 bp, Homo sapiens
cctggagttagggaa

SEQ ID NO: 1040523 - DNA, 15 bp, Homo sapiens
ctggagttagggaag

SEQ ID NO: 1040524 - DNA, 15 bp, Homo sapiens
tggagttagggaagg

SEQ ID NO: 1040525 - DNA, 15 bp, Homo sapiens
ggagttagggaaggg

SEQ ID NO: 1040526 - DNA, 15 bp, Homo sapiens
gagttagggaagggc

SEQ ID NO: 1040527 - DNA, 15 bp, Homo sapiens
agttagggaagggct

SEQ ID NO: 1040528 - DNA, 15 bp, Homo sapiens
gttagggaagggctg

SEQ ID NO: 1040529 - DNA, 15 bp, Homo sapiens
ttagggaagggctgg

SEQ ID NO: 1040530 - DNA, 15 bp, Homo sapiens
tagggaagggctggg

SEQ ID NO: 1040531 - DNA, 15 bp, Homo sapiens
agggaagggctggga

SEQ ID NO: 1040532 - DNA, 15 bp, Homo sapiens
gggaagggctgggag

SEQ ID NO: 1040533 - DNA, 15 bp, Homo sapiens
ggaagggctgggaga

SEQ ID NO: 1040534 - DNA, 15 bp, Homo sapiens
gaagggctgggagat

SEQ ID NO: 1040535 - DNA, 15 bp, Homo sapiens
aagggctgggagatt

SEQ ID NO: 1040536 - DNA, 15 bp, Homo sapiens
agggctgggagattg

SEQ ID NO: 1040537 - DNA, 15 bp, Homo sapiens
gggctgggagattgc

SEQ ID NO: 1040538 - DNA, 15 bp, Homo sapiens
ggctgggagattgca

SEQ ID NO: 1040539 - DNA, 15 bp, Homo sapiens
gctgggagattgcag

SEQ ID NO: 1040540 - DNA, 15 bp, Homo sapiens
ctgggagattgcaga

SEQ ID NO: 1040541 - DNA, 15 bp, Homo sapiens
tgggagattgcagag

SEQ ID NO: 1040542 - DNA, 15 bp, Homo sapiens
gggagattgcagagt

SEQ ID NO: 1040543 - DNA, 15 bp, Homo sapiens
ggagattgcagagta

SEQ ID NO: 1040544 - DNA, 15 bp, Homo sapiens
gagattgcagagtat

SEQ ID NO: 1040545 - DNA, 15 bp, Homo sapiens
agattgcagagtatc

SEQ ID NO: 1040546 - DNA, 15 bp, Homo sapiens
gattgcagagtatca

SEQ ID NO: 1040547 - DNA, 15 bp, Homo sapiens
attgcagagtatcac

SEQ ID NO: 1040548 - DNA, 15 bp, Homo sapiens
ttgcagagtatcaca

SEQ ID NO: 1040549 - DNA, 15 bp, Homo sapiens
tgcagagtatcacat

SEQ ID NO: 1040550 - DNA, 15 bp, Homo sapiens
gcagagtatcacatt

SEQ ID NO: 1040551 - DNA, 15 bp, Homo sapiens
cagagtatcacattt

SEQ ID NO: 1040552 - DNA, 15 bp, Homo sapiens
agagtatcacatttg

SEQ ID NO: 1040553 - DNA, 15 bp, Homo sapiens
gagtatcacatttga

SEQ ID NO: 1040554 - DNA, 15 bp, Homo sapiens
agtatcacatttgaa

SEQ ID NO: 1040555 - DNA, 15 bp, Homo sapiens
gtatcacatttgaac

SEQ ID NO: 1040556 - DNA, 15 bp, Homo sapiens
tatcacatttgaact

SEQ ID NO: 1040557 - DNA, 15 bp, Homo sapiens
atcacatttgaacta

SEQ ID NO: 1040558 - DNA, 15 bp, Homo sapiens
tcacatttgaactaa

SEQ ID NO: 1040559 - DNA, 15 bp, Homo sapiens
cacatttgaactaaa

SEQ ID NO: 1040560 - DNA, 15 bp, Homo sapiens
acatttgaactaaaa

SEQ ID NO: 1040561 - DNA, 15 bp, Homo sapiens
catttgaactaaaag

SEQ ID NO: 1040562 - DNA, 15 bp, Homo sapiens
atttgaactaaaagc

SEQ ID NO: 1040563 - DNA, 15 bp, Homo sapiens
tttgaactaaaagcc

SEQ ID NO: 1040564 - DNA, 15 bp, Homo sapiens
ttgaactaaaagcca

SEQ ID NO: 1040565 - DNA, 15 bp, Homo sapiens
tgaactaaaagccat

SEQ ID NO: 1040566 - DNA, 15 bp, Homo sapiens
gaactaaaagccatt

SEQ ID NO: 1040567 - DNA, 15 bp, Homo sapiens
aactaaaagccattt

SEQ ID NO: 1040568 - DNA, 15 bp, Homo sapiens
actaaaagccattta

SEQ ID NO: 1040569 - DNA, 15 bp, Homo sapiens
ctaaaagccatttag

SEQ ID NO: 1040570 - DNA, 15 bp, Homo sapiens
taaaagccatttaga

SEQ ID NO: 1040571 - DNA, 15 bp, Homo sapiens
aaaagccatttagag

SEQ ID NO: 1040572 - DNA, 15 bp, Homo sapiens
aaagccatttagagt

SEQ ID NO: 1040573 - DNA, 15 bp, Homo sapiens
aagccatttagagtt

SEQ ID NO: 1040574 - DNA, 15 bp, Homo sapiens
agccatttagagttt

SEQ ID NO: 1040575 - DNA, 15 bp, Homo sapiens
gccatttagagtttt

SEQ ID NO: 1040576 - DNA, 15 bp, Homo sapiens
ccatttagagttttg

SEQ ID NO: 1040577 - DNA, 15 bp, Homo sapiens
catttagagttttga

SEQ ID NO: 1040578 - DNA, 15 bp, Homo sapiens
atttagagttttgaa

SEQ ID NO: 1040579 - DNA, 15 bp, Homo sapiens
tttagagttttgaag

SEQ ID NO: 1040580 - DNA, 15 bp, Homo sapiens
ttagagttttgaagc

SEQ ID NO: 1040581 - DNA, 15 bp, Homo sapiens
tagagttttgaagcc

SEQ ID NO: 1040582 - DNA, 15 bp, Homo sapiens
agagttttgaagccc

SEQ ID NO: 1040583 - DNA, 15 bp, Homo sapiens
gagttttgaagccct

SEQ ID NO: 1040584 - DNA, 15 bp, Homo sapiens
agttttgaagccctg

SEQ ID NO: 1040585 - DNA, 15 bp, Homo sapiens
gttttgaagccctgg

SEQ ID NO: 1040586 - DNA, 15 bp, Homo sapiens
ttttgaagccctggg

SEQ ID NO: 1040587 - DNA, 15 bp, Homo sapiens
tttgaagccctggga

SEQ ID NO: 1040588 - DNA, 15 bp, Homo sapiens
ttgaagccctgggaa

SEQ ID NO: 1040589 - DNA, 15 bp, Homo sapiens
tgaagccctgggaac

SEQ ID NO: 1040590 - DNA, 15 bp, Homo sapiens
gaagccctgggaacc

SEQ ID NO: 1040591 - DNA, 15 bp, Homo sapiens
aagccctgggaaccc

SEQ ID NO: 1040592 - DNA, 15 bp, Homo sapiens
agccctgggaaccca

SEQ ID NO: 1040593 - DNA, 15 bp, Homo sapiens
gccctgggaacccac

SEQ ID NO: 1040594 - DNA, 15 bp, Homo sapiens
ccctgggaacccaca

SEQ ID NO: 1040595 - DNA, 15 bp, Homo sapiens
cctgggaacccacac

SEQ ID NO: 1040596 - DNA, 15 bp, Homo sapiens
ctgggaacccacaca

SEQ ID NO: 1040597 - DNA, 15 bp, Homo sapiens
tgggaacccacacat

SEQ ID NO: 1040598 - DNA, 15 bp, Homo sapiens
gggaacccacacatg

SEQ ID NO: 1040599 - DNA, 15 bp, Homo sapiens
ggaacccacacatgc

SEQ ID NO: 1040600 - DNA, 15 bp, Homo sapiens
gaacccacacatgca

SEQ ID NO: 1040601 - DNA, 15 bp, Homo sapiens
aacccacacatgcag

SEQ ID NO: 1040602 - DNA, 15 bp, Homo sapiens
acccacacatgcagt

SEQ ID NO: 1040603 - DNA, 15 bp, Homo sapiens
cccacacatgcagtg

SEQ ID NO: 1040604 - DNA, 15 bp, Homo sapiens
ccacacatgcagtgg

SEQ ID NO: 1040605 - DNA, 15 bp, Homo sapiens
cacacatgcagtggc

SEQ ID NO: 1040606 - DNA, 15 bp, Homo sapiens
acacatgcagtggcg

SEQ ID NO: 1040607 - DNA, 15 bp, Homo sapiens
cacatgcagtggcgg

SEQ ID NO: 1040608 - DNA, 15 bp, Homo sapiens
acatgcagtggcggg

SEQ ID NO: 1040609 - DNA, 15 bp, Homo sapiens
catgcagtggcgggg

SEQ ID NO: 1040610 - DNA, 15 bp, Homo sapiens
atgcagtggcgggga

SEQ ID NO: 1040611 - DNA, 15 bp, Homo sapiens
tgcagtggcggggag

SEQ ID NO: 1040612 - DNA, 15 bp, Homo sapiens
gcagtggcggggagg

SEQ ID NO: 1040613 - DNA, 15 bp, Homo sapiens
cagtggcggggaggg

SEQ ID NO: 1040614 - DNA, 15 bp, Homo sapiens
agtggcggggagggg

SEQ ID NO: 1040615 - DNA, 15 bp, Homo sapiens
gtggcggggagggga

SEQ ID NO: 1040616 - DNA, 15 bp, Homo sapiens
tggcggggaggggaa

SEQ ID NO: 1040617 - DNA, 15 bp, Homo sapiens
ggcggggaggggaaa

SEQ ID NO: 1040618 - DNA, 15 bp, Homo sapiens
gcggggaggggaaac

SEQ ID NO: 1040619 - DNA, 15 bp, Homo sapiens
cggggaggggaaact

SEQ ID NO: 1040620 - DNA, 15 bp, Homo sapiens
ggggaggggaaactg

SEQ ID NO: 1040621 - DNA, 15 bp, Homo sapiens
gggaggggaaactgg

SEQ ID NO: 1040622 - DNA, 15 bp, Homo sapiens
ggaggggaaactggg

SEQ ID NO: 1040623 - DNA, 15 bp, Homo sapiens
gaggggaaactgggg

SEQ ID NO: 1040624 - DNA, 15 bp, Homo sapiens
aggggaaactggggc

SEQ ID NO: 1040625 - DNA, 15 bp, Homo sapiens
ggggaaactggggct

SEQ ID NO: 1040626 - DNA, 15 bp, Homo sapiens
gggaaactggggctc

SEQ ID NO: 1040627 - DNA, 15 bp, Homo sapiens
ggaaactggggctca

SEQ ID NO: 1040628 - DNA, 15 bp, Homo sapiens
gaaactggggctcac

SEQ ID NO: 1040629 - DNA, 15 bp, Homo sapiens
aaactggggctcact

SEQ ID NO: 1040630 - DNA, 15 bp, Homo sapiens
aactggggctcactc

SEQ ID NO: 1040631 - DNA, 15 bp, Homo sapiens
actggggctcactct

SEQ ID NO: 1040632 - DNA, 15 bp, Homo sapiens
ctggggctcactctt

SEQ ID NO: 1040633 - DNA, 15 bp, Homo sapiens
tggggctcactctta

SEQ ID NO: 1040634 - DNA, 15 bp, Homo sapiens
ggggctcactcttat

SEQ ID NO: 1040635 - DNA, 15 bp, Homo sapiens
gggctcactcttatc

SEQ ID NO: 1040636 - DNA, 15 bp, Homo sapiens
ggctcactcttatca

SEQ ID NO: 1040637 - DNA, 15 bp, Homo sapiens
gctcactcttatcaa

SEQ ID NO: 1040638 - DNA, 15 bp, Homo sapiens
ctcactcttatcaaa

SEQ ID NO: 1040639 - DNA, 15 bp, Homo sapiens
tcactcttatcaaag

SEQ ID NO: 1040640 - DNA, 15 bp, Homo sapiens
cactcttatcaaagt

SEQ ID NO: 1040641 - DNA, 15 bp, Homo sapiens
actcttatcaaagtt

SEQ ID NO: 1040642 - DNA, 15 bp, Homo sapiens
ctcttatcaaagttc

SEQ ID NO: 1040643 - DNA, 15 bp, Homo sapiens
tcttatcaaagttct

SEQ ID NO: 1040644 - DNA, 15 bp, Homo sapiens
cttatcaaagttcta

SEQ ID NO: 1040645 - DNA, 15 bp, Homo sapiens
ttatcaaagttctag

SEQ ID NO: 1040646 - DNA, 15 bp, Homo sapiens
tatcaaagttctagc

SEQ ID NO: 1040647 - DNA, 15 bp, Homo sapiens
atcaaagttctagcc

SEQ ID NO: 1040648 - DNA, 15 bp, Homo sapiens
tcaaagttctagcca

SEQ ID NO: 1040649 - DNA, 15 bp, Homo sapiens
caaagttctagccag

SEQ ID NO: 1040650 - DNA, 15 bp, Homo sapiens
aaagttctagccaga

SEQ ID NO: 1040651 - DNA, 15 bp, Homo sapiens
aagttctagccagat

SEQ ID NO: 1040652 - DNA, 15 bp, Homo sapiens
agttctagccagatg

SEQ ID NO: 1040653 - DNA, 15 bp, Homo sapiens
gttctagccagatgc

SEQ ID NO: 1040654 - DNA, 15 bp, Homo sapiens
ttctagccagatgca

SEQ ID NO: 1040655 - DNA, 15 bp, Homo sapiens
tctagccagatgcag

SEQ ID NO: 1040656 - DNA, 15 bp, Homo sapiens
ctagccagatgcaga

SEQ ID NO: 1040657 - DNA, 15 bp, Homo sapiens
tagccagatgcagag

SEQ ID NO: 1040658 - DNA, 15 bp, Homo sapiens
agccagatgcagagc

SEQ ID NO: 1040659 - DNA, 15 bp, Homo sapiens
gccagatgcagagct

SEQ ID NO: 1040660 - DNA, 15 bp, Homo sapiens
ccagatgcagagctg

SEQ ID NO: 1040661 - DNA, 15 bp, Homo sapiens
cagatgcagagctgg

SEQ ID NO: 1040662 - DNA, 15 bp, Homo sapiens
agatgcagagctggg

SEQ ID NO: 1040663 - DNA, 15 bp, Homo sapiens
gatgcagagctgggg

SEQ ID NO: 1040664 - DNA, 15 bp, Homo sapiens
atgcagagctggggt

SEQ ID NO: 1040665 - DNA, 15 bp, Homo sapiens
tgcagagctggggtg

SEQ ID NO: 1040666 - DNA, 15 bp, Homo sapiens
gcagagctggggtga

SEQ ID NO: 1040667 - DNA, 15 bp, Homo sapiens
cagagctggggtgaa

SEQ ID NO: 1040668 - DNA, 15 bp, Homo sapiens
agagctggggtgaag

SEQ ID NO: 1040669 - DNA, 15 bp, Homo sapiens
gagctggggtgaaga

SEQ ID NO: 1040670 - DNA, 15 bp, Homo sapiens
agctggggtgaagat

SEQ ID NO: 1040671 - DNA, 15 bp, Homo sapiens
gctggggtgaagatg

SEQ ID NO: 1040672 - DNA, 15 bp, Homo sapiens
ctggggtgaagatgt

SEQ ID NO: 1040673 - DNA, 15 bp, Homo sapiens
tggggtgaagatgtg

SEQ ID NO: 1040674 - DNA, 15 bp, Homo sapiens
ggggtgaagatgtgg

SEQ ID NO: 1040675 - DNA, 15 bp, Homo sapiens
gggtgaagatgtgga

SEQ ID NO: 1040676 - DNA, 15 bp, Homo sapiens
ggtgaagatgtggac

SEQ ID NO: 1040677 - DNA, 15 bp, Homo sapiens
gtgaagatgtggaca

SEQ ID NO: 1040678 - DNA, 15 bp, Homo sapiens
tgaagatgtggacat

SEQ ID NO: 1040679 - DNA, 15 bp, Homo sapiens
gaagatgtggacatt

SEQ ID NO: 1040680 - DNA, 15 bp, Homo sapiens
aagatgtggacattg

SEQ ID NO: 1040681 - DNA, 15 bp, Homo sapiens
agatgtggacattgt

SEQ ID NO: 1040682 - DNA, 15 bp, Homo sapiens
gatgtggacattgtc

SEQ ID NO: 1040683 - DNA, 15 bp, Homo sapiens
atgtggacattgtca

SEQ ID NO: 1040684 - DNA, 15 bp, Homo sapiens
tgtggacattgtcac

SEQ ID NO: 1040685 - DNA, 15 bp, Homo sapiens
gtggacattgtcact

SEQ ID NO: 1040686 - DNA, 15 bp, Homo sapiens
tggacattgtcactc

SEQ ID NO: 1040687 - DNA, 15 bp, Homo sapiens
ggacattgtcactct

SEQ ID NO: 1040688 - DNA, 15 bp, Homo sapiens
gacattgtcactcta

SEQ ID NO: 1040689 - DNA, 15 bp, Homo sapiens
acattgtcactctaa

SEQ ID NO: 1040690 - DNA, 15 bp, Homo sapiens
cattgtcactctaat

SEQ ID NO: 1040691 - DNA, 15 bp, Homo sapiens
attgtcactctaatg

SEQ ID NO: 1040692 - DNA, 15 bp, Homo sapiens
ttgtcactctaatgg

SEQ ID NO: 1040693 - DNA, 15 bp, Homo sapiens
tgtcactctaatgga

SEQ ID NO: 1040694 - DNA, 15 bp, Homo sapiens
gtcactctaatggac

SEQ ID NO: 1040695 - DNA, 15 bp, Homo sapiens
tcactctaatggacg

SEQ ID NO: 1040696 - DNA, 15 bp, Homo sapiens
cactctaatggacgt

SEQ ID NO: 1040697 - DNA, 15 bp, Homo sapiens
actctaatggacgtc

SEQ ID NO: 1040698 - DNA, 15 bp, Homo sapiens
ctctaatggacgtct

SEQ ID NO: 1040699 - DNA, 15 bp, Homo sapiens
tctaatggacgtctt

SEQ ID NO: 1040700 - DNA, 15 bp, Homo sapiens
ctaatggacgtcttt

SEQ ID NO: 1040701 - DNA, 15 bp, Homo sapiens
taatggacgtctttt

SEQ ID NO: 1040702 - DNA, 15 bp, Homo sapiens
aatggacgtcttttc

SEQ ID NO: 1040703 - DNA, 15 bp, Homo sapiens
atggacgtcttttcc

SEQ ID NO: 1040704 - DNA, 15 bp, Homo sapiens
tggacgtcttttccc

SEQ ID NO: 1040705 - DNA, 15 bp, Homo sapiens
ggacgtcttttcccc

SEQ ID NO: 1040706 - DNA, 15 bp, Homo sapiens
gacgtcttttcccct

SEQ ID NO: 1040707 - DNA, 15 bp, Homo sapiens
acgtcttttcccctt

SEQ ID NO: 1040708 - DNA, 15 bp, Homo sapiens
cgtcttttccccttg

SEQ ID NO: 1040709 - DNA, 15 bp, Homo sapiens
gtcttttccccttgg

SEQ ID NO: 1040710 - DNA, 15 bp, Homo sapiens
tcttttccccttggc

SEQ ID NO: 1040711 - DNA, 15 bp, Homo sapiens
cttttccccttggcc

SEQ ID NO: 1040712 - DNA, 15 bp, Homo sapiens
ttttccccttggcct

SEQ ID NO: 1040713 - DNA, 15 bp, Homo sapiens
tttccccttggcctg

SEQ ID NO: 1040714 - DNA, 15 bp, Homo sapiens
ttccccttggcctgc

SEQ ID NO: 1040715 - DNA, 15 bp, Homo sapiens
tccccttggcctgcc

SEQ ID NO: 1040716 - DNA, 15 bp, Homo sapiens
ccccttggcctgcct

SEQ ID NO: 1040717 - DNA, 15 bp, Homo sapiens
cccttggcctgcctc

SEQ ID NO: 1040718 - DNA, 15 bp, Homo sapiens
ccttggcctgcctct

SEQ ID NO: 1040719 - DNA, 15 bp, Homo sapiens
cttggcctgcctctt

SEQ ID NO: 1040720 - DNA, 15 bp, Homo sapiens
ttggcctgcctcttt

SEQ ID NO: 1040721 - DNA, 15 bp, Homo sapiens
tggcctgcctctttg

SEQ ID NO: 1040722 - DNA, 15 bp, Homo sapiens
ggcctgcctctttgg

SEQ ID NO: 1040723 - DNA, 15 bp, Homo sapiens
gcctgcctctttgga

SEQ ID NO: 1040724 - DNA, 15 bp, Homo sapiens
cctgcctctttggac

SEQ ID NO: 1040725 - DNA, 15 bp, Homo sapiens
ctgcctctttggact

SEQ ID NO: 1040726 - DNA, 15 bp, Homo sapiens
tgcctctttggactg

SEQ ID NO: 1040727 - DNA, 15 bp, Homo sapiens
gcctctttggactgg

SEQ ID NO: 1040728 - DNA, 15 bp, Homo sapiens
cctctttggactggg

SEQ ID NO: 1040729 - DNA, 15 bp, Homo sapiens
ctctttggactgggt

SEQ ID NO: 1040730 - DNA, 15 bp, Homo sapiens
tctttggactgggtt

SEQ ID NO: 1040731 - DNA, 15 bp, Homo sapiens
ctttggactgggttt

SEQ ID NO: 1040732 - DNA, 15 bp, Homo sapiens
tttggactgggtttc

SEQ ID NO: 1040733 - DNA, 15 bp, Homo sapiens
ttggactgggtttct

SEQ ID NO: 1040734 - DNA, 15 bp, Homo sapiens
tggactgggtttctt

SEQ ID NO: 1040735 - DNA, 15 bp, Homo sapiens
ggactgggtttctta

SEQ ID NO: 1040736 - DNA, 15 bp, Homo sapiens
gactgggtttcttaa

SEQ ID NO: 1040737 - DNA, 15 bp, Homo sapiens
actgggtttcttaag

SEQ ID NO: 1040738 - DNA, 15 bp, Homo sapiens
ctgggtttcttaaga

SEQ ID NO: 1040739 - DNA, 15 bp, Homo sapiens
tgggtttcttaagaa

SEQ ID NO: 1040740 - DNA, 15 bp, Homo sapiens
gggtttcttaagaat

SEQ ID NO: 1040741 - DNA, 15 bp, Homo sapiens
ggtttcttaagaatg

SEQ ID NO: 1040742 - DNA, 15 bp, Homo sapiens
gtttcttaagaatgg

SEQ ID NO: 1040743 - DNA, 15 bp, Homo sapiens
tttcttaagaatggt

SEQ ID NO: 1040744 - DNA, 15 bp, Homo sapiens
ttcttaagaatggtt

SEQ ID NO: 1040745 - DNA, 15 bp, Homo sapiens
tcttaagaatggttc

SEQ ID NO: 1040746 - DNA, 15 bp, Homo sapiens
cttaagaatggttcc

SEQ ID NO: 1040747 - DNA, 15 bp, Homo sapiens
ttaagaatggttcct

SEQ ID NO: 1040748 - DNA, 15 bp, Homo sapiens
taagaatggttcctt

SEQ ID NO: 1040749 - DNA, 15 bp, Homo sapiens
aagaatggttccttg

SEQ ID NO: 1040750 - DNA, 15 bp, Homo sapiens
agaatggttccttgt

SEQ ID NO: 1040751 - DNA, 15 bp, Homo sapiens
gaatggttccttgtc

SEQ ID NO: 1040752 - DNA, 15 bp, Homo sapiens
aatggttccttgtcc

SEQ ID NO: 1040753 - DNA, 15 bp, Homo sapiens
atggttccttgtcca

SEQ ID NO: 1040754 - DNA, 15 bp, Homo sapiens
tggttccttgtccac

SEQ ID NO: 1040755 - DNA, 15 bp, Homo sapiens
ggttccttgtccaca

SEQ ID NO: 1040756 - DNA, 15 bp, Homo sapiens
gttccttgtccacat

SEQ ID NO: 1040757 - DNA, 15 bp, Homo sapiens
ttccttgtccacatt

SEQ ID NO: 1040758 - DNA, 15 bp, Homo sapiens
tccttgtccacattt

SEQ ID NO: 1040759 - DNA, 15 bp, Homo sapiens
ccttgtccacatttc

SEQ ID NO: 1040760 - DNA, 15 bp, Homo sapiens
cttgtccacatttca

SEQ ID NO: 1040761 - DNA, 15 bp, Homo sapiens
ttgtccacatttcat

SEQ ID NO: 1040762 - DNA, 15 bp, Homo sapiens
tgtccacatttcatg

SEQ ID NO: 1040763 - DNA, 15 bp, Homo sapiens
gtccacatttcatgt

SEQ ID NO: 1040764 - DNA, 15 bp, Homo sapiens
tccacatttcatgtc

SEQ ID NO: 1040765 - DNA, 15 bp, Homo sapiens
ccacatttcatgtct

SEQ ID NO: 1040766 - DNA, 15 bp, Homo sapiens
cacatttcatgtctg

SEQ ID NO: 1040767 - DNA, 15 bp, Homo sapiens
acatttcatgtctgt

SEQ ID NO: 1040768 - DNA, 15 bp, Homo sapiens
catttcatgtctgtt

SEQ ID NO: 1040769 - DNA, 15 bp, Homo sapiens
atttcatgtctgttc

SEQ ID NO: 1040770 - DNA, 15 bp, Homo sapiens
tttcatgtctgttcc

SEQ ID NO: 1040771 - DNA, 15 bp, Homo sapiens
ttcatgtctgttccc

SEQ ID NO: 1040772 - DNA, 15 bp, Homo sapiens
tcatgtctgttccct

SEQ ID NO: 1040773 - DNA, 15 bp, Homo sapiens
catgtctgttccctc

SEQ ID NO: 1040774 - DNA, 15 bp, Homo sapiens
atgtctgttccctca

SEQ ID NO: 1040775 - DNA, 15 bp, Homo sapiens
tgtctgttccctcat

SEQ ID NO: 1040776 - DNA, 15 bp, Homo sapiens
gtctgttccctcatt

SEQ ID NO: 1040777 - DNA, 15 bp, Homo sapiens
tctgttccctcattc

SEQ ID NO: 1040778 - DNA, 15 bp, Homo sapiens
ctgttccctcattca

SEQ ID NO: 1040779 - DNA, 15 bp, Homo sapiens
tgttccctcattcac

SEQ ID NO: 1040780 - DNA, 15 bp, Homo sapiens
gttccctcattcaca

SEQ ID NO: 1040781 - DNA, 15 bp, Homo sapiens
ttccctcattcacag

SEQ ID NO: 1040782 - DNA, 15 bp, Homo sapiens
tccctcattcacaga

SEQ ID NO: 1040783 - DNA, 15 bp, Homo sapiens
ccctcattcacagag

SEQ ID NO: 1040784 - DNA, 15 bp, Homo sapiens
cctcattcacagagc

SEQ ID NO: 1040785 - DNA, 15 bp, Homo sapiens
ctcattcacagagcg

SEQ ID NO: 1040786 - DNA, 15 bp, Homo sapiens
tcattcacagagcga

SEQ ID NO: 1040787 - DNA, 15 bp, Homo sapiens
cattcacagagcgaa

SEQ ID NO: 1040788 - DNA, 15 bp, Homo sapiens
attcacagagcgaat

SEQ ID NO: 1040789 - DNA, 15 bp, Homo sapiens
ttcacagagcgaatg

SEQ ID NO: 1040790 - DNA, 15 bp, Homo sapiens
tcacagagcgaatga

SEQ ID NO: 1040791 - DNA, 15 bp, Homo sapiens
cacagagcgaatgaa

SEQ ID NO: 1040792 - DNA, 15 bp, Homo sapiens
acagagcgaatgaat

SEQ ID NO: 1040793 - DNA, 15 bp, Homo sapiens
cagagcgaatgaatg

SEQ ID NO: 1040794 - DNA, 15 bp, Homo sapiens
agagcgaatgaatga

SEQ ID NO: 1040795 - DNA, 15 bp, Homo sapiens
gagcgaatgaatgag

SEQ ID NO: 1040796 - DNA, 15 bp, Homo sapiens
agcgaatgaatgagt

SEQ ID NO: 1040797 - DNA, 15 bp, Homo sapiens
gcgaatgaatgagtg

SEQ ID NO: 1040798 - DNA, 15 bp, Homo sapiens
cgaatgaatgagtga

SEQ ID NO: 1040799 - DNA, 15 bp, Homo sapiens
gaatgaatgagtgaa

SEQ ID NO: 1040800 - DNA, 15 bp, Homo sapiens
aatgaatgagtgaat

SEQ ID NO: 1040801 - DNA, 15 bp, Homo sapiens
atgaatgagtgaatg

SEQ ID NO: 1040802 - DNA, 15 bp, Homo sapiens
tgaatgagtgaatga

SEQ ID NO: 1040803 - DNA, 15 bp, Homo sapiens
gaatgagtgaatgaa

SEQ ID NO: 1040804 - DNA, 15 bp, Homo sapiens
aatgagtgaatgaat

SEQ ID NO: 1040805 - DNA, 15 bp, Homo sapiens
atgagtgaatgaatg

SEQ ID NO: 1040806 - DNA, 15 bp, Homo sapiens
tgagtgaatgaatga

SEQ ID NO: 1040807 - DNA, 15 bp, Homo sapiens
gagtgaatgaatgaa

SEQ ID NO: 1040808 - DNA, 15 bp, Homo sapiens
agtgaatgaatgaag

SEQ ID NO: 1040809 - DNA, 15 bp, Homo sapiens
gtgaatgaatgaagg

SEQ ID NO: 1040810 - DNA, 15 bp, Homo sapiens
tgaatgaatgaagga

SEQ ID NO: 1040811 - DNA, 15 bp, Homo sapiens
gaatgaatgaaggat

SEQ ID NO: 1040812 - DNA, 15 bp, Homo sapiens
aatgaatgaaggatc

SEQ ID NO: 1040813 - DNA, 15 bp, Homo sapiens
atgaatgaaggatct

SEQ ID NO: 1040814 - DNA, 15 bp, Homo sapiens
tgaatgaaggatctg

SEQ ID NO: 1040815 - DNA, 15 bp, Homo sapiens
gaatgaaggatctgc

SEQ ID NO: 1040816 - DNA, 15 bp, Homo sapiens
aatgaaggatctgct

SEQ ID NO: 1040817 - DNA, 15 bp, Homo sapiens
atgaaggatctgctt

SEQ ID NO: 1040818 - DNA, 15 bp, Homo sapiens
tgaaggatctgctta

SEQ ID NO: 1040819 - DNA, 15 bp, Homo sapiens
gaaggatctgcttag

SEQ ID NO: 1040820 - DNA, 15 bp, Homo sapiens
aaggatctgcttaga

SEQ ID NO: 1040821 - DNA, 15 bp, Homo sapiens
aggatctgcttagat

SEQ ID NO: 1040822 - DNA, 15 bp, Homo sapiens
ggatctgcttagatc

SEQ ID NO: 1040823 - DNA, 15 bp, Homo sapiens
gatctgcttagatct

SEQ ID NO: 1040824 - DNA, 15 bp, Homo sapiens
atctgcttagatctg

SEQ ID NO: 1040825 - DNA, 15 bp, Homo sapiens
tctgcttagatctgg

SEQ ID NO: 1040826 - DNA, 15 bp, Homo sapiens
ctgcttagatctggc

SEQ ID NO: 1040827 - DNA, 15 bp, Homo sapiens
tgcttagatctggct

SEQ ID NO: 1040828 - DNA, 15 bp, Homo sapiens
gcttagatctggctg

SEQ ID NO: 1040829 - DNA, 15 bp, Homo sapiens
cttagatctggctgc

SEQ ID NO: 1040830 - DNA, 15 bp, Homo sapiens
ttagatctggctgcc

SEQ ID NO: 1040831 - DNA, 15 bp, Homo sapiens
tagatctggctgcca

SEQ ID NO: 1040832 - DNA, 15 bp, Homo sapiens
agatctggctgccac

SEQ ID NO: 1040833 - DNA, 15 bp, Homo sapiens
gatctggctgccaca

SEQ ID NO: 1040834 - DNA, 15 bp, Homo sapiens
atctggctgccacac

SEQ ID NO: 1040835 - DNA, 15 bp, Homo sapiens
tctggctgccacact

SEQ ID NO: 1040836 - DNA, 15 bp, Homo sapiens
ctggctgccacactt

SEQ ID NO: 1040837 - DNA, 15 bp, Homo sapiens
tggctgccacacttc

SEQ ID NO: 1040838 - DNA, 15 bp, Homo sapiens
ggctgccacacttct

SEQ ID NO: 1040839 - DNA, 15 bp, Homo sapiens
gctgccacacttctt

SEQ ID NO: 1040840 - DNA, 15 bp, Homo sapiens
ctgccacacttcttg

SEQ ID NO: 1040841 - DNA, 15 bp, Homo sapiens
tgccacacttcttgg

SEQ ID NO: 1040842 - DNA, 15 bp, Homo sapiens
gccacacttcttggg

SEQ ID NO: 1040843 - DNA, 15 bp, Homo sapiens
ccacacttcttggga

SEQ ID NO: 1040844 - DNA, 15 bp, Homo sapiens
cacacttcttgggac

SEQ ID NO: 1040845 - DNA, 15 bp, Homo sapiens
acacttcttgggacc

SEQ ID NO: 1040846 - DNA, 15 bp, Homo sapiens
cacttcttgggaccc

SEQ ID NO: 1040847 - DNA, 15 bp, Homo sapiens
acttcttgggaccca

SEQ ID NO: 1040848 - DNA, 15 bp, Homo sapiens
cttcttgggacccag

SEQ ID NO: 1040849 - DNA, 15 bp, Homo sapiens
ttcttgggacccagc

SEQ ID NO: 1040850 - DNA, 15 bp, Homo sapiens
tcttgggacccagct

SEQ ID NO: 1040851 - DNA, 15 bp, Homo sapiens
cttgggacccagcta

SEQ ID NO: 1040852 - DNA, 15 bp, Homo sapiens
ttgggacccagctag

SEQ ID NO: 1040853 - DNA, 15 bp, Homo sapiens
tgggacccagctagc

SEQ ID NO: 1040854 - DNA, 15 bp, Homo sapiens
gggacccagctagct

SEQ ID NO: 1040855 - DNA, 15 bp, Homo sapiens
ggacccagctagctg

SEQ ID NO: 1040856 - DNA, 15 bp, Homo sapiens
gacccagctagctgg

SEQ ID NO: 1040857 - DNA, 15 bp, Homo sapiens
acccagctagctggc

SEQ ID NO: 1040858 - DNA, 15 bp, Homo sapiens
cccagctagctggcc

SEQ ID NO: 1040859 - DNA, 15 bp, Homo sapiens
ccagctagctggcct

SEQ ID NO: 1040860 - DNA, 15 bp, Homo sapiens
cagctagctggcctt

SEQ ID NO: 1040861 - DNA, 15 bp, Homo sapiens
agctagctggcctta

SEQ ID NO: 1040862 - DNA, 15 bp, Homo sapiens
gctagctggccttaa

SEQ ID NO: 1040863 - DNA, 15 bp, Homo sapiens
ctagctggccttaaa

SEQ ID NO: 1040864 - DNA, 15 bp, Homo sapiens
tagctggccttaaag

SEQ ID NO: 1040865 - DNA, 15 bp, Homo sapiens
agctggccttaaaga

SEQ ID NO: 1040866 - DNA, 15 bp, Homo sapiens
gctggccttaaagat

SEQ ID NO: 1040867 - DNA, 15 bp, Homo sapiens
ctggccttaaagatg

SEQ ID NO: 1040868 - DNA, 15 bp, Homo sapiens
tggccttaaagatgg

SEQ ID NO: 1040869 - DNA, 15 bp, Homo sapiens
ggccttaaagatgga

SEQ ID NO: 1040870 - DNA, 15 bp, Homo sapiens
gccttaaagatggag

SEQ ID NO: 1040871 - DNA, 15 bp, Homo sapiens
ccttaaagatggagc

SEQ ID NO: 1040872 - DNA, 15 bp, Homo sapiens
cttaaagatggagca

SEQ ID NO: 1040873 - DNA, 15 bp, Homo sapiens
ttaaagatggagcaa

SEQ ID NO: 1040874 - DNA, 15 bp, Homo sapiens
taaagatggagcaac

SEQ ID NO: 1040875 - DNA, 15 bp, Homo sapiens
aaagatggagcaaca

SEQ ID NO: 1040876 - DNA, 15 bp, Homo sapiens
aagatggagcaacat

SEQ ID NO: 1040877 - DNA, 15 bp, Homo sapiens
agatggagcaacata

SEQ ID NO: 1040878 - DNA, 15 bp, Homo sapiens
gatggagcaacatat

SEQ ID NO: 1040879 - DNA, 15 bp, Homo sapiens
atggagcaacatatg

SEQ ID NO: 1040880 - DNA, 15 bp, Homo sapiens
tggagcaacatatgg

SEQ ID NO: 1040881 - DNA, 15 bp, Homo sapiens
ggagcaacatatggt

SEQ ID NO: 1040882 - DNA, 15 bp, Homo sapiens
gagcaacatatggtc

SEQ ID NO: 1040883 - DNA, 15 bp, Homo sapiens
agcaacatatggtct

SEQ ID NO: 1040884 - DNA, 15 bp, Homo sapiens
gcaacatatggtctc

SEQ ID NO: 1040885 - DNA, 15 bp, Homo sapiens
caacatatggtctct

SEQ ID NO: 1040886 - DNA, 15 bp, Homo sapiens
aacatatggtctctc

SEQ ID NO: 1040887 - DNA, 15 bp, Homo sapiens
acatatggtctctct

SEQ ID NO: 1040888 - DNA, 15 bp, Homo sapiens
catatggtctctctc

SEQ ID NO: 1040889 - DNA, 15 bp, Homo sapiens
atatggtctctctca

SEQ ID NO: 1040890 - DNA, 15 bp, Homo sapiens
tatggtctctctcaa

SEQ ID NO: 1040891 - DNA, 15 bp, Homo sapiens
atggtctctctcaag

SEQ ID NO: 1040892 - DNA, 15 bp, Homo sapiens
tggtctctctcaagg

SEQ ID NO: 1040893 - DNA, 15 bp, Homo sapiens
ggtctctctcaaggt

SEQ ID NO: 1040894 - DNA, 15 bp, Homo sapiens
gtctctctcaaggtc

SEQ ID NO: 1040895 - DNA, 15 bp, Homo sapiens
tctctctcaaggtct

SEQ ID NO: 1040896 - DNA, 15 bp, Homo sapiens
ctctctcaaggtctc

SEQ ID NO: 1040897 - DNA, 15 bp, Homo sapiens
tctctcaaggtctct

SEQ ID NO: 1040898 - DNA, 15 bp, Homo sapiens
ctctcaaggtctctg

SEQ ID NO: 1040899 - DNA, 15 bp, Homo sapiens
tctcaaggtctctgg

SEQ ID NO: 1040900 - DNA, 15 bp, Homo sapiens
ctcaaggtctctggg

SEQ ID NO: 1040901 - DNA, 15 bp, Homo sapiens
tcaaggtctctgggt

SEQ ID NO: 1040902 - DNA, 15 bp, Homo sapiens
caaggtctctgggtg

SEQ ID NO: 1040903 - DNA, 15 bp, Homo sapiens
aaggtctctgggtga

SEQ ID NO: 1040904 - DNA, 15 bp, Homo sapiens
aggtctctgggtgag

SEQ ID NO: 1040905 - DNA, 15 bp, Homo sapiens
ggtctctgggtgagc

SEQ ID NO: 1040906 - DNA, 15 bp, Homo sapiens
gtctctgggtgagca

SEQ ID NO: 1040907 - DNA, 15 bp, Homo sapiens
tctctgggtgagcag

SEQ ID NO: 1040908 - DNA, 15 bp, Homo sapiens
ctctgggtgagcagt

SEQ ID NO: 1040909 - DNA, 15 bp, Homo sapiens
tctgggtgagcagtt

SEQ ID NO: 1040910 - DNA, 15 bp, Homo sapiens
ctgggtgagcagttg

SEQ ID NO: 1040911 - DNA, 15 bp, Homo sapiens
tgggtgagcagttgt

SEQ ID NO: 1040912 - DNA, 15 bp, Homo sapiens
gggtgagcagttgtc

SEQ ID NO: 1040913 - DNA, 15 bp, Homo sapiens
ggtgagcagttgtct

SEQ ID NO: 1040914 - DNA, 15 bp, Homo sapiens
gtgagcagttgtcta

SEQ ID NO: 1040915 - DNA, 15 bp, Homo sapiens
tgagcagttgtctag

SEQ ID NO: 1040916 - DNA, 15 bp, Homo sapiens
gagcagttgtctagg

SEQ ID NO: 1040917 - DNA, 15 bp, Homo sapiens
agcagttgtctaggg

SEQ ID NO: 1040918 - DNA, 15 bp, Homo sapiens
gcagttgtctagggc

SEQ ID NO: 1040919 - DNA, 15 bp, Homo sapiens
cagttgtctagggca

SEQ ID NO: 1040920 - DNA, 15 bp, Homo sapiens
agttgtctagggcat

SEQ ID NO: 1040921 - DNA, 15 bp, Homo sapiens
gttgtctagggcatc

SEQ ID NO: 1040922 - DNA, 15 bp, Homo sapiens
ttgtctagggcatct

SEQ ID NO: 1040923 - DNA, 15 bp, Homo sapiens
tgtctagggcatctt

SEQ ID NO: 1040924 - DNA, 15 bp, Homo sapiens
gtctagggcatctta

SEQ ID NO: 1040925 - DNA, 15 bp, Homo sapiens
tctagggcatcttag

SEQ ID NO: 1040926 - DNA, 15 bp, Homo sapiens
ctagggcatcttagc

SEQ ID NO: 1040927 - DNA, 15 bp, Homo sapiens
tagggcatcttagcc

SEQ ID NO: 1040928 - DNA, 15 bp, Homo sapiens
agggcatcttagcca

SEQ ID NO: 1040929 - DNA, 15 bp, Homo sapiens
gggcatcttagccac

SEQ ID NO: 1040930 - DNA, 15 bp, Homo sapiens
ggcatcttagccacg

SEQ ID NO: 1040931 - DNA, 15 bp, Homo sapiens
gcatcttagccacgt

SEQ ID NO: 1040932 - DNA, 15 bp, Homo sapiens
catcttagccacgtt

SEQ ID NO: 1040933 - DNA, 15 bp, Homo sapiens
atcttagccacgttg

SEQ ID NO: 1040934 - DNA, 15 bp, Homo sapiens
tcttagccacgttgt

SEQ ID NO: 1040935 - DNA, 15 bp, Homo sapiens
cttagccacgttgtg

SEQ ID NO: 1040936 - DNA, 15 bp, Homo sapiens
ttagccacgttgtgt

SEQ ID NO: 1040937 - DNA, 15 bp, Homo sapiens
tagccacgttgtgtc

SEQ ID NO: 1040938 - DNA, 15 bp, Homo sapiens
agccacgttgtgtct

SEQ ID NO: 1040939 - DNA, 15 bp, Homo sapiens
gccacgttgtgtcta

SEQ ID NO: 1040940 - DNA, 15 bp, Homo sapiens
ccacgttgtgtctat

SEQ ID NO: 1040941 - DNA, 15 bp, Homo sapiens
cacgttgtgtctatt

SEQ ID NO: 1040942 - DNA, 15 bp, Homo sapiens
acgttgtgtctattt

SEQ ID NO: 1040943 - DNA, 15 bp, Homo sapiens
cgttgtgtctatttt

SEQ ID NO: 1040944 - DNA, 15 bp, Homo sapiens
gttgtgtctattttt

SEQ ID NO: 1040945 - DNA, 15 bp, Homo sapiens
ttgtgtctatttttg

SEQ ID NO: 1040946 - DNA, 15 bp, Homo sapiens
tgtgtctatttttga

SEQ ID NO: 1040947 - DNA, 15 bp, Homo sapiens
gtgtctatttttgat

SEQ ID NO: 1040948 - DNA, 15 bp, Homo sapiens
tgtctatttttgatt

SEQ ID NO: 1040949 - DNA, 15 bp, Homo sapiens
gtctatttttgattt

SEQ ID NO: 1040950 - DNA, 15 bp, Homo sapiens
tctatttttgatttt

SEQ ID NO: 1040951 - DNA, 15 bp, Homo sapiens
ctatttttgattttt

SEQ ID NO: 1040952 - DNA, 15 bp, Homo sapiens
tatttttgatttttc

SEQ ID NO: 1040953 - DNA, 15 bp, Homo sapiens
atttttgatttttca

SEQ ID NO: 1040954 - DNA, 15 bp, Homo sapiens
tttttgatttttcaa

SEQ ID NO: 1040955 - DNA, 15 bp, Homo sapiens
ttttgatttttcaaa

SEQ ID NO: 1040956 - DNA, 15 bp, Homo sapiens
tttgatttttcaaat

SEQ ID NO: 1040957 - DNA, 15 bp, Homo sapiens
ttgatttttcaaatc

SEQ ID NO: 1040958 - DNA, 15 bp, Homo sapiens
tgatttttcaaatct

SEQ ID NO: 1040959 - DNA, 15 bp, Homo sapiens
gatttttcaaatctt

SEQ ID NO: 1040960 - DNA, 15 bp, Homo sapiens
atttttcaaatcttg

SEQ ID NO: 1040961 - DNA, 15 bp, Homo sapiens
tttttcaaatcttgt

SEQ ID NO: 1040962 - DNA, 15 bp, Homo sapiens
ttttcaaatcttgtc

SEQ ID NO: 1040963 - DNA, 15 bp, Homo sapiens
tttcaaatcttgtcc

SEQ ID NO: 1040964 - DNA, 15 bp, Homo sapiens
ttcaaatcttgtccc

SEQ ID NO: 1040965 - DNA, 15 bp, Homo sapiens
tcaaatcttgtcccg

SEQ ID NO: 1040966 - DNA, 15 bp, Homo sapiens
caaatcttgtcccgc

SEQ ID NO: 1040967 - DNA, 15 bp, Homo sapiens
aaatcttgtcccgcc

SEQ ID NO: 1040968 - DNA, 15 bp, Homo sapiens
aatcttgtcccgcca

SEQ ID NO: 1040969 - DNA, 15 bp, Homo sapiens
atcttgtcccgccaa

SEQ ID NO: 1040970 - DNA, 15 bp, Homo sapiens
tcttgtcccgccaaa

SEQ ID NO: 1040971 - DNA, 15 bp, Homo sapiens
cttgtcccgccaaag

SEQ ID NO: 1040972 - DNA, 15 bp, Homo sapiens
ttgtcccgccaaagc

SEQ ID NO: 1040973 - DNA, 15 bp, Homo sapiens
tgtcccgccaaagcc

SEQ ID NO: 1040974 - DNA, 15 bp, Homo sapiens
gtcccgccaaagcct

SEQ ID NO: 1040975 - DNA, 15 bp, Homo sapiens
tcccgccaaagcctg

SEQ ID NO: 1040976 - DNA, 15 bp, Homo sapiens
cccgccaaagcctgt

SEQ ID NO: 1040977 - DNA, 15 bp, Homo sapiens
ccgccaaagcctgta

SEQ ID NO: 1040978 - DNA, 15 bp, Homo sapiens
cgccaaagcctgtaa

SEQ ID NO: 1040979 - DNA, 15 bp, Homo sapiens
gccaaagcctgtaat

SEQ ID NO: 1040980 - DNA, 15 bp, Homo sapiens
ccaaagcctgtaatc

SEQ ID NO: 1040981 - DNA, 15 bp, Homo sapiens
caaagcctgtaatct

SEQ ID NO: 1040982 - DNA, 15 bp, Homo sapiens
aaagcctgtaatctg

SEQ ID NO: 1040983 - DNA, 15 bp, Homo sapiens
aagcctgtaatctga

SEQ ID NO: 1040984 - DNA, 15 bp, Homo sapiens
agcctgtaatctgac

SEQ ID NO: 1040985 - DNA, 15 bp, Homo sapiens
gcctgtaatctgact

SEQ ID NO: 1040986 - DNA, 15 bp, Homo sapiens
cctgtaatctgactg

SEQ ID NO: 1040987 - DNA, 15 bp, Homo sapiens
ctgtaatctgactgc

SEQ ID NO: 1040988 - DNA, 15 bp, Homo sapiens
tgtaatctgactgca

SEQ ID NO: 1040989 - DNA, 15 bp, Homo sapiens
gtaatctgactgcaa

SEQ ID NO: 1040990 - DNA, 15 bp, Homo sapiens
taatctgactgcaaa

SEQ ID NO: 1040991 - DNA, 15 bp, Homo sapiens
aatctgactgcaaag

SEQ ID NO: 1040992 - DNA, 15 bp, Homo sapiens
atctgactgcaaaga

SEQ ID NO: 1040993 - DNA, 15 bp, Homo sapiens
tctgactgcaaagag

SEQ ID NO: 1040994 - DNA, 15 bp, Homo sapiens
ctgactgcaaagagg

SEQ ID NO: 1040995 - DNA, 15 bp, Homo sapiens
tgactgcaaagaggt

SEQ ID NO: 1040996 - DNA, 15 bp, Homo sapiens
gactgcaaagaggtc

SEQ ID NO: 1040997 - DNA, 15 bp, Homo sapiens
actgcaaagaggtcc

SEQ ID NO: 1040998 - DNA, 15 bp, Homo sapiens
tcaagtctgggggcc

SEQ ID NO: 1040999 - DNA, 15 bp, Homo sapiens
caagtctgggggccg

SEQ ID NO: 1041000 - DNA, 15 bp, Homo sapiens
aagtctgggggccga

SEQ ID NO: 1041001 - DNA, 15 bp, Homo sapiens
agtctgggggccgac

SEQ ID NO: 1041002 - DNA, 15 bp, Homo sapiens
gtctgggggccgact

SEQ ID NO: 1041003 - DNA, 15 bp, Homo sapiens
tctgggggccgactc

SEQ ID NO: 1041004 - DNA, 15 bp, Homo sapiens
ctgggggccgactcc

SEQ ID NO: 1041005 - DNA, 15 bp, Homo sapiens
tgggggccgactcca

SEQ ID NO: 1041006 - DNA, 15 bp, Homo sapiens
gggggccgactccac

SEQ ID NO: 1041007 - DNA, 15 bp, Homo sapiens
ggggccgactccaca

SEQ ID NO: 1041008 - DNA, 15 bp, Homo sapiens
gggccgactccacag

SEQ ID NO: 1041009 - DNA, 15 bp, Homo sapiens
ggccgactccacagc

SEQ ID NO: 1041010 - DNA, 15 bp, Homo sapiens
gccgactccacagct

SEQ ID NO: 1041011 - DNA, 15 bp, Homo sapiens
ccgactccacagctg

SEQ ID NO: 1041012 - DNA, 15 bp, Homo sapiens
cgactccacagctgg

SEQ ID NO: 1041013 - DNA, 15 bp, Homo sapiens
gactccacagctggt

SEQ ID NO: 1041014 - DNA, 15 bp, Homo sapiens
actccacagctggtc

SEQ ID NO: 1041015 - DNA, 15 bp, Homo sapiens
ctccacagctggtcc

SEQ ID NO: 1041016 - DNA, 15 bp, Homo sapiens
tccacagctggtccc

SEQ ID NO: 1041017 - DNA, 15 bp, Homo sapiens
ccacagctggtcccg

SEQ ID NO: 1041018 - DNA, 15 bp, Homo sapiens
cacagctggtcccgg

SEQ ID NO: 1041019 - DNA, 15 bp, Homo sapiens
acagctggtcccggt

SEQ ID NO: 1041020 - DNA, 15 bp, Homo sapiens
cagctggtcccggtg

SEQ ID NO: 1041021 - DNA, 15 bp, Homo sapiens
agctggtcccggtgg

SEQ ID NO: 1041022 - DNA, 15 bp, Homo sapiens
gctggtcccggtggc

SEQ ID NO: 1041023 - DNA, 15 bp, Homo sapiens
ctggtcccggtggcc

SEQ ID NO: 1041024 - DNA, 15 bp, Homo sapiens
tggtcccggtggcct

SEQ ID NO: 1041025 - DNA, 15 bp, Homo sapiens
ggtcccggtggcctc

SEQ ID NO: 1041026 - DNA, 15 bp, Homo sapiens
gtcccggtggcctct

SEQ ID NO: 1041027 - DNA, 15 bp, Homo sapiens
tcccggtggcctctg

SEQ ID NO: 1041028 - DNA, 15 bp, Homo sapiens
cccggtggcctctgc

SEQ ID NO: 1041029 - DNA, 15 bp, Homo sapiens
ccggtggcctctgcg

SEQ ID NO: 1041030 - DNA, 15 bp, Homo sapiens
cggtggcctctgcgc

SEQ ID NO: 1041031 - DNA, 15 bp, Homo sapiens
ggtggcctctgcgca

SEQ ID NO: 1041032 - DNA, 15 bp, Homo sapiens
gtggcctctgcgcac

SEQ ID NO: 1041033 - DNA, 15 bp, Homo sapiens
tggcctctgcgcact

SEQ ID NO: 1041034 - DNA, 15 bp, Homo sapiens
ggcctctgcgcactg

SEQ ID NO: 1041035 - DNA, 15 bp, Homo sapiens
gcctctgcgcactgc

SEQ ID NO: 1041036 - DNA, 15 bp, Homo sapiens
cctctgcgcactgcg

SEQ ID NO: 1041037 - DNA, 15 bp, Homo sapiens
ctctgcgcactgcgt

SEQ ID NO: 1041038 - DNA, 15 bp, Homo sapiens
tctgcgcactgcgtc

SEQ ID NO: 1041039 - DNA, 15 bp, Homo sapiens
ctgcgcactgcgtcc

SEQ ID NO: 1041040 - DNA, 15 bp, Homo sapiens
tgcgcactgcgtcct

SEQ ID NO: 1041041 - DNA, 15 bp, Homo sapiens
gcgcactgcgtcctc

SEQ ID NO: 1041042 - DNA, 15 bp, Homo sapiens
cgcactgcgtcctcc

SEQ ID NO: 1041043 - DNA, 15 bp, Homo sapiens
gcactgcgtcctccc

SEQ ID NO: 1041044 - DNA, 15 bp, Homo sapiens
cactgcgtcctcccg

SEQ ID NO: 1041045 - DNA, 15 bp, Homo sapiens
actgcgtcctcccgg

SEQ ID NO: 1041046 - DNA, 15 bp, Homo sapiens
ctgcgtcctcccggt

SEQ ID NO: 1041047 - DNA, 15 bp, Homo sapiens
tgcgtcctcccggtt

SEQ ID NO: 1041048 - DNA, 15 bp, Homo sapiens
gcgtcctcccggttc

SEQ ID NO: 1041049 - DNA, 15 bp, Homo sapiens
cgtcctcccggttct

SEQ ID NO: 1041050 - DNA, 15 bp, Homo sapiens
gtcctcccggttctc

SEQ ID NO: 1041051 - DNA, 15 bp, Homo sapiens
tcctcccggttctcc

SEQ ID NO: 1041052 - DNA, 15 bp, Homo sapiens
cctcccggttctccg

SEQ ID NO: 1041053 - DNA, 15 bp, Homo sapiens
ctcccggttctccgt

SEQ ID NO: 1041054 - DNA, 15 bp, Homo sapiens
tcccggttctccgtg

SEQ ID NO: 1041055 - DNA, 15 bp, Homo sapiens
cccggttctccgtgt

SEQ ID NO: 1041056 - DNA, 15 bp, Homo sapiens
ccggttctccgtgtg

SEQ ID NO: 1041057 - DNA, 15 bp, Homo sapiens
cggttctccgtgtgt

SEQ ID NO: 1041058 - DNA, 15 bp, Homo sapiens
ggttctccgtgtgtc

SEQ ID NO: 1041059 - DNA, 15 bp, Homo sapiens
gttctccgtgtgtct

SEQ ID NO: 1041060 - DNA, 15 bp, Homo sapiens
ttctccgtgtgtctg

SEQ ID NO: 1041061 - DNA, 15 bp, Homo sapiens
tctccgtgtgtctga

SEQ ID NO: 1041062 - DNA, 15 bp, Homo sapiens
ctccgtgtgtctgag

SEQ ID NO: 1041063 - DNA, 15 bp, Homo sapiens
tccgtgtgtctgagc

SEQ ID NO: 1041064 - DNA, 15 bp, Homo sapiens
ccgtgtgtctgagca

SEQ ID NO: 1041065 - DNA, 15 bp, Homo sapiens
cgtgtgtctgagcag

SEQ ID NO: 1041066 - DNA, 15 bp, Homo sapiens
gtgtgtctgagcagg

SEQ ID NO: 1041067 - DNA, 15 bp, Homo sapiens
tgtgtctgagcaggt

SEQ ID NO: 1041068 - DNA, 15 bp, Homo sapiens
gtgtctgagcaggtc

SEQ ID NO: 1041069 - DNA, 15 bp, Homo sapiens
tgtctgagcaggtcg

SEQ ID NO: 1041070 - DNA, 15 bp, Homo sapiens
gtctgagcaggtcga

SEQ ID NO: 1041071 - DNA, 15 bp, Homo sapiens
tctgagcaggtcgac

SEQ ID NO: 1041072 - DNA, 15 bp, Homo sapiens
ctgagcaggtcgact

SEQ ID NO: 1041073 - DNA, 15 bp, Homo sapiens
tgagcaggtcgactg

SEQ ID NO: 1041074 - DNA, 15 bp, Homo sapiens
gagcaggtcgactgc

SEQ ID NO: 1041075 - DNA, 15 bp, Homo sapiens
agcaggtcgactgca

SEQ ID NO: 1041076 - DNA, 15 bp, Homo sapiens
gcaggtcgactgcat

SEQ ID NO: 1041077 - DNA, 15 bp, Homo sapiens
caggtcgactgcatg

SEQ ID NO: 1041078 - DNA, 15 bp, Homo sapiens
aggtcgactgcatgc

SEQ ID NO: 1041079 - DNA, 15 bp, Homo sapiens
ggtcgactgcatgct

SEQ ID NO: 1041080 - DNA, 15 bp, Homo sapiens
gtcgactgcatgctt

SEQ ID NO: 1041081 - DNA, 15 bp, Homo sapiens
tcgactgcatgctta

SEQ ID NO: 1041082 - DNA, 15 bp, Homo sapiens
cgactgcatgcttaa

SEQ ID NO: 1041083 - DNA, 15 bp, Homo sapiens
gactgcatgcttaag

SEQ ID NO: 1041084 - DNA, 15 bp, Homo sapiens
actgcatgcttaagg

SEQ ID NO: 1041085 - DNA, 15 bp, Homo sapiens
ctgcatgcttaaggc

SEQ ID NO: 1041086 - DNA, 15 bp, Homo sapiens
tgcatgcttaaggcg

SEQ ID NO: 1041087 - DNA, 15 bp, Homo sapiens
gcatgcttaaggcgg

SEQ ID NO: 1041088 - DNA, 15 bp, Homo sapiens
catgcttaaggcggg

SEQ ID NO: 1041089 - DNA, 15 bp, Homo sapiens
atgcttaaggcgggc

SEQ ID NO: 1041090 - DNA, 15 bp, Homo sapiens
tgcttaaggcgggcg

SEQ ID NO: 1041091 - DNA, 15 bp, Homo sapiens
gcttaaggcgggcgg

SEQ ID NO: 1041092 - DNA, 15 bp, Homo sapiens
cttaaggcgggcggc

SEQ ID NO: 1041093 - DNA, 15 bp, Homo sapiens
ttaaggcgggcggcg

SEQ ID NO: 1041094 - DNA, 15 bp, Homo sapiens
taaggcgggcggcgg

SEQ ID NO: 1041095 - DNA, 15 bp, Homo sapiens
aaggcgggcggcggg

SEQ ID NO: 1041096 - DNA, 15 bp, Homo sapiens
aggcgggcggcgggg

SEQ ID NO: 1041097 - DNA, 15 bp, Homo sapiens
ggcgggcggcggggg

SEQ ID NO: 1041098 - DNA, 15 bp, Homo sapiens
gcgggcggcgggggg

SEQ ID NO: 1041099 - DNA, 15 bp, Homo sapiens
cgggcggcggggggt

SEQ ID NO: 1041100 - DNA, 15 bp, Homo sapiens
gggcggcggggggtg

SEQ ID NO: 1041101 - DNA, 15 bp, Homo sapiens
ggcggcggggggtgc

SEQ ID NO: 1041102 - DNA, 15 bp, Homo sapiens
gcggcggggggtgcc

SEQ ID NO: 1041103 - DNA, 15 bp, Homo sapiens
cggcggggggtgccc

SEQ ID NO: 1041104 - DNA, 15 bp, Homo sapiens
ggcggggggtgccct

SEQ ID NO: 1041105 - DNA, 15 bp, Homo sapiens
gcggggggtgccctt

SEQ ID NO: 1041106 - DNA, 15 bp, Homo sapiens
cggggggtgcccttc

SEQ ID NO: 1041107 - DNA, 15 bp, Homo sapiens
ggggggtgcccttct

SEQ ID NO: 1041108 - DNA, 15 bp, Homo sapiens
gggggtgcccttctt

SEQ ID NO: 1041109 - DNA, 15 bp, Homo sapiens
ggggtgcccttctta

SEQ ID NO: 1041110 - DNA, 15 bp, Homo sapiens
gggtgcccttcttat

SEQ ID NO: 1041111 - DNA, 15 bp, Homo sapiens
ggtgcccttcttata

SEQ ID NO: 1041112 - DNA, 15 bp, Homo sapiens
gtgcccttcttatat

SEQ ID NO: 1041113 - DNA, 15 bp, Homo sapiens
tgcccttcttatatt

SEQ ID NO: 1041114 - DNA, 15 bp, Homo sapiens
gcccttcttatattc

SEQ ID NO: 1041115 - DNA, 15 bp, Homo sapiens
cccttcttatattct

SEQ ID NO: 1041116 - DNA, 15 bp, Homo sapiens
ccttcttatattctc

SEQ ID NO: 1041117 - DNA, 15 bp, Homo sapiens
cttcttatattctct

SEQ ID NO: 1041118 - DNA, 15 bp, Homo sapiens
ttcttatattctctt

SEQ ID NO: 1041119 - DNA, 15 bp, Homo sapiens
tcttatattctcttc

SEQ ID NO: 1041120 - DNA, 15 bp, Homo sapiens
cttatattctcttcc

SEQ ID NO: 1041121 - DNA, 15 bp, Homo sapiens
ttatattctcttcct

SEQ ID NO: 1041122 - DNA, 15 bp, Homo sapiens
tatattctcttcctg

SEQ ID NO: 1041123 - DNA, 15 bp, Homo sapiens
atattctcttcctgg

SEQ ID NO: 1041124 - DNA, 15 bp, Homo sapiens
tattctcttcctggg

SEQ ID NO: 1041125 - DNA, 15 bp, Homo sapiens
attctcttcctgggc

SEQ ID NO: 1041126 - DNA, 15 bp, Homo sapiens
ttctcttcctgggct

SEQ ID NO: 1041127 - DNA, 15 bp, Homo sapiens
tctcttcctgggctg

SEQ ID NO: 1041128 - DNA, 15 bp, Homo sapiens
ctcttcctgggctgc

SEQ ID NO: 1041129 - DNA, 15 bp, Homo sapiens
tcttcctgggctgcc

SEQ ID NO: 1041130 - DNA, 15 bp, Homo sapiens
cttcctgggctgccc

SEQ ID NO: 1041131 - DNA, 15 bp, Homo sapiens
ttcctgggctgcccc

SEQ ID NO: 1041132 - DNA, 15 bp, Homo sapiens
tcctgggctgcccct

SEQ ID NO: 1041133 - DNA, 15 bp, Homo sapiens
cctgggctgcccctt

SEQ ID NO: 1041134 - DNA, 15 bp, Homo sapiens
ctgggctgccccttc

SEQ ID NO: 1041135 - DNA, 15 bp, Homo sapiens
tgggctgccccttcc

SEQ ID NO: 1041136 - DNA, 15 bp, Homo sapiens
gggctgccccttcct

SEQ ID NO: 1041137 - DNA, 15 bp, Homo sapiens
ggctgccccttcctt

SEQ ID NO: 1041138 - DNA, 15 bp, Homo sapiens
gctgccccttccttt

SEQ ID NO: 1041139 - DNA, 15 bp, Homo sapiens
ctgccccttcctttt

SEQ ID NO: 1041140 - DNA, 15 bp, Homo sapiens
tgccccttccttttc

SEQ ID NO: 1041141 - DNA, 15 bp, Homo sapiens
gccccttccttttct

SEQ ID NO: 1041142 - DNA, 15 bp, Homo sapiens
ccccttccttttctg

SEQ ID NO: 1041143 - DNA, 15 bp, Homo sapiens
cccttccttttctgt

SEQ ID NO: 1041144 - DNA, 15 bp, Homo sapiens
ccttccttttctgtg

SEQ ID NO: 1041145 - DNA, 15 bp, Homo sapiens
cttccttttctgtgc

SEQ ID NO: 1041146 - DNA, 15 bp, Homo sapiens
ttccttttctgtgca

SEQ ID NO: 1041147 - DNA, 15 bp, Homo sapiens
tccttttctgtgcat

SEQ ID NO: 1041148 - DNA, 15 bp, Homo sapiens
ccttttctgtgcatc

SEQ ID NO: 1041149 - DNA, 15 bp, Homo sapiens
cttttctgtgcatca

SEQ ID NO: 1041150 - DNA, 15 bp, Homo sapiens
ttttctgtgcatcac

SEQ ID NO: 1041151 - DNA, 15 bp, Homo sapiens
tttctgtgcatcacc

SEQ ID NO: 1041152 - DNA, 15 bp, Homo sapiens
ttctgtgcatcacca

SEQ ID NO: 1041153 - DNA, 15 bp, Homo sapiens
tctgtgcatcaccag

SEQ ID NO: 1041154 - DNA, 15 bp, Homo sapiens
ctgtgcatcaccagg

SEQ ID NO: 1041155 - DNA, 15 bp, Homo sapiens
tgtgcatcaccaggg

SEQ ID NO: 1041156 - DNA, 15 bp, Homo sapiens
gtgcatcaccaggga

SEQ ID NO: 1041157 - DNA, 15 bp, Homo sapiens
tgcatcaccagggaa

SEQ ID NO: 1041158 - DNA, 15 bp, Homo sapiens
gcatcaccagggaac

SEQ ID NO: 1041159 - DNA, 15 bp, Homo sapiens
catcaccagggaaca

SEQ ID NO: 1041160 - DNA, 15 bp, Homo sapiens
atcaccagggaacag

SEQ ID NO: 1041161 - DNA, 15 bp, Homo sapiens
tcaccagggaacagc

SEQ ID NO: 1041162 - DNA, 15 bp, Homo sapiens
caccagggaacagca

SEQ ID NO: 1041163 - DNA, 15 bp, Homo sapiens
accagggaacagcag

SEQ ID NO: 1041164 - DNA, 15 bp, Homo sapiens
ccagggaacagcagg

SEQ ID NO: 1041165 - DNA, 15 bp, Homo sapiens
cagggaacagcaggg

SEQ ID NO: 1041166 - DNA, 15 bp, Homo sapiens
agggaacagcagggt

SEQ ID NO: 1041167 - DNA, 15 bp, Homo sapiens
gggaacagcagggtc

SEQ ID NO: 1041168 - DNA, 15 bp, Homo sapiens
ggaacagcagggtcc

SEQ ID NO: 1041169 - DNA, 15 bp, Homo sapiens
gaacagcagggtccc

SEQ ID NO: 1041170 - DNA, 15 bp, Homo sapiens
aacagcagggtccct

SEQ ID NO: 1041171 - DNA, 15 bp, Homo sapiens
acagcagggtccctt

SEQ ID NO: 1041172 - DNA, 15 bp, Homo sapiens
cagcagggtcccttc

SEQ ID NO: 1041173 - DNA, 15 bp, Homo sapiens
agcagggtcccttcg

SEQ ID NO: 1041174 - DNA, 15 bp, Homo sapiens
gcagggtcccttcga

SEQ ID NO: 1041175 - DNA, 15 bp, Homo sapiens
cagggtcccttcgag

SEQ ID NO: 1041176 - DNA, 15 bp, Homo sapiens
agggtcccttcgagg

SEQ ID NO: 1041177 - DNA, 15 bp, Homo sapiens
gggtcccttcgaggc

SEQ ID NO: 1041178 - DNA, 15 bp, Homo sapiens
ggtcccttcgaggct

SEQ ID NO: 1041179 - DNA, 15 bp, Homo sapiens
gtcccttcgaggctt

SEQ ID NO: 1041180 - DNA, 15 bp, Homo sapiens
tcccttcgaggcttt

SEQ ID NO: 1041181 - DNA, 15 bp, Homo sapiens
cccttcgaggctttg

SEQ ID NO: 1041182 - DNA, 15 bp, Homo sapiens
ccttcgaggctttgt

SEQ ID NO: 1041183 - DNA, 15 bp, Homo sapiens
cttcgaggctttgtc

SEQ ID NO: 1041184 - DNA, 15 bp, Homo sapiens
ttcgaggctttgtcc

SEQ ID NO: 1041185 - DNA, 15 bp, Homo sapiens
tcgaggctttgtcct

SEQ ID NO: 1041186 - DNA, 15 bp, Homo sapiens
cgaggctttgtccta

SEQ ID NO: 1041187 - DNA, 15 bp, Homo sapiens
gaggctttgtcctaa

SEQ ID NO: 1041188 - DNA, 15 bp, Homo sapiens
aggctttgtcctaat

SEQ ID NO: 1041189 - DNA, 15 bp, Homo sapiens
ggctttgtcctaatc

SEQ ID NO: 1041190 - DNA, 15 bp, Homo sapiens
gctttgtcctaatca

SEQ ID NO: 1041191 - DNA, 15 bp, Homo sapiens
ctttgtcctaatcat

SEQ ID NO: 1041192 - DNA, 15 bp, Homo sapiens
tttgtcctaatcatc

SEQ ID NO: 1041193 - DNA, 15 bp, Homo sapiens
ttgtcctaatcatca

SEQ ID NO: 1041194 - DNA, 15 bp, Homo sapiens
tgtcctaatcatcac

SEQ ID NO: 1041195 - DNA, 15 bp, Homo sapiens
gtcctaatcatcacc

SEQ ID NO: 1041196 - DNA, 15 bp, Homo sapiens
tcctaatcatcaccc

SEQ ID NO: 1041197 - DNA, 15 bp, Homo sapiens
cctaatcatcacccc

SEQ ID NO: 1041198 - DNA, 15 bp, Homo sapiens
ctaatcatcaccccg

SEQ ID NO: 1041199 - DNA, 15 bp, Homo sapiens
taatcatcaccccgc

SEQ ID NO: 1041200 - DNA, 15 bp, Homo sapiens
aatcatcaccccgcc

SEQ ID NO: 1041201 - DNA, 15 bp, Homo sapiens
atcatcaccccgcca

SEQ ID NO: 1041202 - DNA, 15 bp, Homo sapiens
tcatcaccccgccaa

SEQ ID NO: 1041203 - DNA, 15 bp, Homo sapiens
catcaccccgccaaa

SEQ ID NO: 1041204 - DNA, 15 bp, Homo sapiens
atcaccccgccaaac

SEQ ID NO: 1041205 - DNA, 15 bp, Homo sapiens
tcaccccgccaaact

SEQ ID NO: 1041206 - DNA, 15 bp, Homo sapiens
caccccgccaaactt

SEQ ID NO: 1041207 - DNA, 15 bp, Homo sapiens
accccgccaaacttt

SEQ ID NO: 1041208 - DNA, 15 bp, Homo sapiens
ccccgccaaactttg

SEQ ID NO: 1041209 - DNA, 15 bp, Homo sapiens
cccgccaaactttgc

SEQ ID NO: 1041210 - DNA, 15 bp, Homo sapiens
ccgccaaactttgct

SEQ ID NO: 1041211 - DNA, 15 bp, Homo sapiens
cgccaaactttgctg

SEQ ID NO: 1041212 - DNA, 15 bp, Homo sapiens
gccaaactttgctgg

SEQ ID NO: 1041213 - DNA, 15 bp, Homo sapiens
ccaaactttgctggt

SEQ ID NO: 1041214 - DNA, 15 bp, Homo sapiens
caaactttgctggtg

SEQ ID NO: 1041215 - DNA, 15 bp, Homo sapiens
aaactttgctggtgc

SEQ ID NO: 1041216 - DNA, 15 bp, Homo sapiens
aactttgctggtgca

SEQ ID NO: 1041217 - DNA, 15 bp, Homo sapiens
actttgctggtgcag

SEQ ID NO: 1041218 - DNA, 15 bp, Homo sapiens
ctttgctggtgcaga

SEQ ID NO: 1041219 - DNA, 15 bp, Homo sapiens
tttgctggtgcagag

SEQ ID NO: 1041220 - DNA, 15 bp, Homo sapiens
ttgctggtgcagagt

SEQ ID NO: 1041221 - DNA, 15 bp, Homo sapiens
tgctggtgcagagtg

SEQ ID NO: 1041222 - DNA, 15 bp, Homo sapiens
gctggtgcagagtgc

SEQ ID NO: 1041223 - DNA, 15 bp, Homo sapiens
ctggtgcagagtgca

SEQ ID NO: 1041224 - DNA, 15 bp, Homo sapiens
tggtgcagagtgcac

SEQ ID NO: 1041225 - DNA, 15 bp, Homo sapiens
ggtgcagagtgcacc

SEQ ID NO: 1041226 - DNA, 15 bp, Homo sapiens
gtgcagagtgcaccc

SEQ ID NO: 1041227 - DNA, 15 bp, Homo sapiens
tgcagagtgcaccct

SEQ ID NO: 1041228 - DNA, 15 bp, Homo sapiens
gcagagtgcaccctg

SEQ ID NO: 1041229 - DNA, 15 bp, Homo sapiens
cagagtgcaccctgg

SEQ ID NO: 1041230 - DNA, 15 bp, Homo sapiens
agagtgcaccctggc

SEQ ID NO: 1041231 - DNA, 15 bp, Homo sapiens
gagtgcaccctggcc

SEQ ID NO: 1041232 - DNA, 15 bp, Homo sapiens
agtgcaccctggcct

SEQ ID NO: 1041233 - DNA, 15 bp, Homo sapiens
gtgcaccctggcctc

SEQ ID NO: 1041234 - DNA, 15 bp, Homo sapiens
tgcaccctggcctct

SEQ ID NO: 1041235 - DNA, 15 bp, Homo sapiens
gcaccctggcctctc

SEQ ID NO: 1041236 - DNA, 15 bp, Homo sapiens
caccctggcctctcc

SEQ ID NO: 1041237 - DNA, 15 bp, Homo sapiens
accctggcctctccc

SEQ ID NO: 1041238 - DNA, 15 bp, Homo sapiens
ccctggcctctccct

SEQ ID NO: 1041239 - DNA, 15 bp, Homo sapiens
cctggcctctccctt

SEQ ID NO: 1041240 - DNA, 15 bp, Homo sapiens
ctggcctctcccttc

SEQ ID NO: 1041241 - DNA, 15 bp, Homo sapiens
tggcctctcccttcc

SEQ ID NO: 1041242 - DNA, 15 bp, Homo sapiens
ggcctctcccttccg

SEQ ID NO: 1041243 - DNA, 15 bp, Homo sapiens
gcctctcccttccgg

SEQ ID NO: 1041244 - DNA, 15 bp, Homo sapiens
cctctcccttccggg

SEQ ID NO: 1041245 - DNA, 15 bp, Homo sapiens
ctctcccttccgggg

SEQ ID NO: 1041246 - DNA, 15 bp, Homo sapiens
tctcccttccggggg

SEQ ID NO: 1041247 - DNA, 15 bp, Homo sapiens
ctcccttccgggggt

SEQ ID NO: 1041248 - DNA, 15 bp, Homo sapiens
tcccttccgggggta

SEQ ID NO: 1041249 - DNA, 15 bp, Homo sapiens
cccttccgggggtag

SEQ ID NO: 1041250 - DNA, 15 bp, Homo sapiens
ccttccgggggtagt

SEQ ID NO: 1041251 - DNA, 15 bp, Homo sapiens
cttccgggggtagtc

SEQ ID NO: 1041252 - DNA, 15 bp, Homo sapiens
ttccgggggtagtct

SEQ ID NO: 1041253 - DNA, 15 bp, Homo sapiens
tccgggggtagtctg

SEQ ID NO: 1041254 - DNA, 15 bp, Homo sapiens
ccgggggtagtctga

SEQ ID NO: 1041255 - DNA, 15 bp, Homo sapiens
cgggggtagtctgag

SEQ ID NO: 1041256 - DNA, 15 bp, Homo sapiens
gggggtagtctgaga

SEQ ID NO: 1041257 - DNA, 15 bp, Homo sapiens
ggggtagtctgagac

SEQ ID NO: 1041258 - DNA, 15 bp, Homo sapiens
gggtagtctgagacc

SEQ ID NO: 1041259 - DNA, 15 bp, Homo sapiens
ggtagtctgagacca

SEQ ID NO: 1041260 - DNA, 15 bp, Homo sapiens
gtagtctgagaccag

SEQ ID NO: 1041261 - DNA, 15 bp, Homo sapiens
tagtctgagaccagg

SEQ ID NO: 1041262 - DNA, 15 bp, Homo sapiens
agtctgagaccaggg

SEQ ID NO: 1041263 - DNA, 15 bp, Homo sapiens
gtctgagaccaggga

SEQ ID NO: 1041264 - DNA, 15 bp, Homo sapiens
tctgagaccagggac

SEQ ID NO: 1041265 - DNA, 15 bp, Homo sapiens
ctgagaccagggaca

SEQ ID NO: 1041266 - DNA, 15 bp, Homo sapiens
tgagaccagggacat

SEQ ID NO: 1041267 - DNA, 15 bp, Homo sapiens
gagaccagggacatg

SEQ ID NO: 1041268 - DNA, 15 bp, Homo sapiens
agaccagggacatgt

SEQ ID NO: 1041269 - DNA, 15 bp, Homo sapiens
gaccagggacatgtt

SEQ ID NO: 1041270 - DNA, 15 bp, Homo sapiens
accagggacatgttc

SEQ ID NO: 1041271 - DNA, 15 bp, Homo sapiens
ccagggacatgttct

SEQ ID NO: 1041272 - DNA, 15 bp, Homo sapiens
cagggacatgttctc

SEQ ID NO: 1041273 - DNA, 15 bp, Homo sapiens
agggacatgttctcc

SEQ ID NO: 1041274 - DNA, 15 bp, Homo sapiens
gggacatgttctcca

SEQ ID NO: 1041275 - DNA, 15 bp, Homo sapiens
ggacatgttctccaa

SEQ ID NO: 1041276 - DNA, 15 bp, Homo sapiens
gacatgttctccaat

SEQ ID NO: 1041277 - DNA, 15 bp, Homo sapiens
acatgttctccaatc

SEQ ID NO: 1041278 - DNA, 15 bp, Homo sapiens
catgttctccaatca

SEQ ID NO: 1041279 - DNA, 15 bp, Homo sapiens
atgttctccaatcaa

SEQ ID NO: 1041280 - DNA, 15 bp, Homo sapiens
tgttctccaatcaaa

SEQ ID NO: 1041281 - DNA, 15 bp, Homo sapiens
gttctccaatcaaag

SEQ ID NO: 1041282 - DNA, 15 bp, Homo sapiens
ttctccaatcaaagg

SEQ ID NO: 1041283 - DNA, 15 bp, Homo sapiens
tctccaatcaaaggc

SEQ ID NO: 1041284 - DNA, 15 bp, Homo sapiens
ctccaatcaaaggca

SEQ ID NO: 1041285 - DNA, 15 bp, Homo sapiens
tccaatcaaaggcac

SEQ ID NO: 1041286 - DNA, 15 bp, Homo sapiens
ccaatcaaaggcacc

SEQ ID NO: 1041287 - DNA, 15 bp, Homo sapiens
caatcaaaggcacca

SEQ ID NO: 1041288 - DNA, 15 bp, Homo sapiens
aatcaaaggcaccaa

SEQ ID NO: 1041289 - DNA, 15 bp, Homo sapiens
atcaaaggcaccaag

SEQ ID NO: 1041290 - DNA, 15 bp, Homo sapiens
tcaaaggcaccaagt

SEQ ID NO: 1041291 - DNA, 15 bp, Homo sapiens
caaaggcaccaagtg

SEQ ID NO: 1041292 - DNA, 15 bp, Homo sapiens
aaaggcaccaagtga

SEQ ID NO: 1041293 - DNA, 15 bp, Homo sapiens
aaggcaccaagtgag

SEQ ID NO: 1041294 - DNA, 15 bp, Homo sapiens
aggcaccaagtgagg

SEQ ID NO: 1041295 - DNA, 15 bp, Homo sapiens
ggcaccaagtgaggc

SEQ ID NO: 1041296 - DNA, 15 bp, Homo sapiens
gcaccaagtgaggct

SEQ ID NO: 1041297 - DNA, 15 bp, Homo sapiens
caccaagtgaggctc

SEQ ID NO: 1041298 - DNA, 15 bp, Homo sapiens
accaagtgaggctcc

SEQ ID NO: 1041299 - DNA, 15 bp, Homo sapiens
ccaagtgaggctccc

SEQ ID NO: 1041300 - DNA, 15 bp, Homo sapiens
caagtgaggctcccg

SEQ ID NO: 1041301 - DNA, 15 bp, Homo sapiens
aagtgaggctcccgg

SEQ ID NO: 1041302 - DNA, 15 bp, Homo sapiens
agtgaggctcccggg

SEQ ID NO: 1041303 - DNA, 15 bp, Homo sapiens
gtgaggctcccgggg

SEQ ID NO: 1041304 - DNA, 15 bp, Homo sapiens
tgaggctcccgggga

SEQ ID NO: 1041305 - DNA, 15 bp, Homo sapiens
gaggctcccggggag

SEQ ID NO: 1041306 - DNA, 15 bp, Homo sapiens
aggctcccggggagg

SEQ ID NO: 1041307 - DNA, 15 bp, Homo sapiens
ggctcccggggaggc

SEQ ID NO: 1041308 - DNA, 15 bp, Homo sapiens
gctcccggggaggcc

SEQ ID NO: 1041309 - DNA, 15 bp, Homo sapiens
ctcccggggaggcca

SEQ ID NO: 1041310 - DNA, 15 bp, Homo sapiens
tcccggggaggccac

SEQ ID NO: 1041311 - DNA, 15 bp, Homo sapiens
cccggggaggccacc

SEQ ID NO: 1041312 - DNA, 15 bp, Homo sapiens
ccggggaggccacct

SEQ ID NO: 1041313 - DNA, 15 bp, Homo sapiens
cggggaggccacctg

SEQ ID NO: 1041314 - DNA, 15 bp, Homo sapiens
ggggaggccacctgt

SEQ ID NO: 1041315 - DNA, 15 bp, Homo sapiens
gggaggccacctgtt

SEQ ID NO: 1041316 - DNA, 15 bp, Homo sapiens
ggaggccacctgttc

SEQ ID NO: 1041317 - DNA, 15 bp, Homo sapiens
gaggccacctgttcc

SEQ ID NO: 1041318 - DNA, 15 bp, Homo sapiens
aggccacctgttcct

SEQ ID NO: 1041319 - DNA, 15 bp, Homo sapiens
ggccacctgttccta

SEQ ID NO: 1041320 - DNA, 15 bp, Homo sapiens
gccacctgttcctag

SEQ ID NO: 1041321 - DNA, 15 bp, Homo sapiens
ccacctgttcctagc

SEQ ID NO: 1041322 - DNA, 15 bp, Homo sapiens
cacctgttcctagcc

SEQ ID NO: 1041323 - DNA, 15 bp, Homo sapiens
acctgttcctagccc

SEQ ID NO: 1041324 - DNA, 15 bp, Homo sapiens
cctgttcctagccca

SEQ ID NO: 1041325 - DNA, 15 bp, Homo sapiens
ctgttcctagcccag

SEQ ID NO: 1041326 - DNA, 15 bp, Homo sapiens
tgttcctagcccagg

SEQ ID NO: 1041327 - DNA, 15 bp, Homo sapiens
gttcctagcccaggg

SEQ ID NO: 1041328 - DNA, 15 bp, Homo sapiens
ttcctagcccagggc

SEQ ID NO: 1041329 - DNA, 15 bp, Homo sapiens
tcctagcccagggct

SEQ ID NO: 1041330 - DNA, 15 bp, Homo sapiens
cctagcccagggctc

SEQ ID NO: 1041331 - DNA, 15 bp, Homo sapiens
ctagcccagggctcc

SEQ ID NO: 1041332 - DNA, 15 bp, Homo sapiens
tagcccagggctccc

SEQ ID NO: 1041333 - DNA, 15 bp, Homo sapiens
agcccagggctccca

SEQ ID NO: 1041334 - DNA, 15 bp, Homo sapiens
gcccagggctcccag

SEQ ID NO: 1041335 - DNA, 15 bp, Homo sapiens
cccagggctcccagt

SEQ ID NO: 1041336 - DNA, 15 bp, Homo sapiens
ccagggctcccagtg

SEQ ID NO: 1041337 - DNA, 15 bp, Homo sapiens
cagggctcccagtga

SEQ ID NO: 1041338 - DNA, 15 bp, Homo sapiens
agggctcccagtgac

SEQ ID NO: 1041339 - DNA, 15 bp, Homo sapiens
gggctcccagtgacc

SEQ ID NO: 1041340 - DNA, 15 bp, Homo sapiens
ggctcccagtgaccc

SEQ ID NO: 1041341 - DNA, 15 bp, Homo sapiens
gctcccagtgacccc

SEQ ID NO: 1041342 - DNA, 15 bp, Homo sapiens
ctcccagtgaccccg

SEQ ID NO: 1041343 - DNA, 15 bp, Homo sapiens
tcccagtgaccccgg

SEQ ID NO: 1041344 - DNA, 15 bp, Homo sapiens
cccagtgaccccggg

SEQ ID NO: 1041345 - DNA, 15 bp, Homo sapiens
ccagtgaccccgggg

SEQ ID NO: 1041346 - DNA, 15 bp, Homo sapiens
cagtgaccccggggg

SEQ ID NO: 1041347 - DNA, 15 bp, Homo sapiens
agtgaccccgggggc

SEQ ID NO: 1041348 - DNA, 15 bp, Homo sapiens
gtgaccccgggggct

SEQ ID NO: 1041349 - DNA, 15 bp, Homo sapiens
tgaccccgggggctg

SEQ ID NO: 1041350 - DNA, 15 bp, Homo sapiens
gaccccgggggctgg

SEQ ID NO: 1041351 - DNA, 15 bp, Homo sapiens
accccgggggctgga

SEQ ID NO: 1041352 - DNA, 15 bp, Homo sapiens
ccccgggggctggac

SEQ ID NO: 1041353 - DNA, 15 bp, Homo sapiens
cccgggggctggact

SEQ ID NO: 1041354 - DNA, 15 bp, Homo sapiens
ccgggggctggactc

SEQ ID NO: 1041355 - DNA, 15 bp, Homo sapiens
cgggggctggactcc

SEQ ID NO: 1041356 - DNA, 15 bp, Homo sapiens
gggggctggactccc

SEQ ID NO: 1041357 - DNA, 15 bp, Homo sapiens
ggggctggactccca

SEQ ID NO: 1041358 - DNA, 15 bp, Homo sapiens
gggctggactcccac

SEQ ID NO: 1041359 - DNA, 15 bp, Homo sapiens
ggctggactcccacc

SEQ ID NO: 1041360 - DNA, 15 bp, Homo sapiens
gctggactcccaccc

SEQ ID NO: 1041361 - DNA, 15 bp, Homo sapiens
ctggactcccaccca

SEQ ID NO: 1041362 - DNA, 15 bp, Homo sapiens
tggactcccacccat

SEQ ID NO: 1041363 - DNA, 15 bp, Homo sapiens
ggactcccacccatc

SEQ ID NO: 1041364 - DNA, 15 bp, Homo sapiens
gactcccacccatcc

SEQ ID NO: 1041365 - DNA, 15 bp, Homo sapiens
actcccacccatcct

SEQ ID NO: 1041366 - DNA, 15 bp, Homo sapiens
ctcccacccatcctg

SEQ ID NO: 1041367 - DNA, 15 bp, Homo sapiens
tcccacccatcctgc

SEQ ID NO: 1041368 - DNA, 15 bp, Homo sapiens
cccacccatcctgca

SEQ ID NO: 1041369 - DNA, 15 bp, Homo sapiens
ccacccatcctgcag

SEQ ID NO: 1041370 - DNA, 15 bp, Homo sapiens
cacccatcctgcagg

SEQ ID NO: 1041371 - DNA, 15 bp, Homo sapiens
acccatcctgcaggg

SEQ ID NO: 1041372 - DNA, 15 bp, Homo sapiens
cccatcctgcagggg

SEQ ID NO: 1041373 - DNA, 15 bp, Homo sapiens
ccatcctgcaggggc

SEQ ID NO: 1041374 - DNA, 15 bp, Homo sapiens
catcctgcaggggcc

SEQ ID NO: 1041375 - DNA, 15 bp, Homo sapiens
atcctgcaggggccg

SEQ ID NO: 1041376 - DNA, 15 bp, Homo sapiens
tcctgcaggggccgc

SEQ ID NO: 1041377 - DNA, 15 bp, Homo sapiens
cctgcaggggccgcc

SEQ ID NO: 1041378 - DNA, 15 bp, Homo sapiens
ctgcaggggccgccc

SEQ ID NO: 1041379 - DNA, 15 bp, Homo sapiens
tgcaggggccgcccg

SEQ ID NO: 1041380 - DNA, 15 bp, Homo sapiens
gcaggggccgcccgc

SEQ ID NO: 1041381 - DNA, 15 bp, Homo sapiens
caggggccgcccgct

SEQ ID NO: 1041382 - DNA, 15 bp, Homo sapiens
aggggccgcccgctc

SEQ ID NO: 1041383 - DNA, 15 bp, Homo sapiens
ggggccgcccgctct

SEQ ID NO: 1041384 - DNA, 15 bp, Homo sapiens
gggccgcccgctctg

SEQ ID NO: 1041385 - DNA, 15 bp, Homo sapiens
ggccgcccgctctgc

SEQ ID NO: 1041386 - DNA, 15 bp, Homo sapiens
gccgcccgctctgcg

SEQ ID NO: 1041387 - DNA, 15 bp, Homo sapiens
ccgcccgctctgcgc

SEQ ID NO: 1041388 - DNA, 15 bp, Homo sapiens
cgcccgctctgcgcc

SEQ ID NO: 1041389 - DNA, 15 bp, Homo sapiens
gcccgctctgcgcct

SEQ ID NO: 1041390 - DNA, 15 bp, Homo sapiens
cccgctctgcgcctt

SEQ ID NO: 1041391 - DNA, 15 bp, Homo sapiens
ccgctctgcgccttt

SEQ ID NO: 1041392 - DNA, 15 bp, Homo sapiens
cgctctgcgccttta

SEQ ID NO: 1041393 - DNA, 15 bp, Homo sapiens
gctctgcgcctttat

SEQ ID NO: 1041394 - DNA, 15 bp, Homo sapiens
ctctgcgcctttatc

SEQ ID NO: 1041395 - DNA, 15 bp, Homo sapiens
tctgcgcctttatca

SEQ ID NO: 1041396 - DNA, 15 bp, Homo sapiens
ctgcgcctttatcag

SEQ ID NO: 1041397 - DNA, 15 bp, Homo sapiens
tgcgcctttatcagc

SEQ ID NO: 1041398 - DNA, 15 bp, Homo sapiens
gcgcctttatcagcc

SEQ ID NO: 1041399 - DNA, 15 bp, Homo sapiens
cgcctttatcagccc

SEQ ID NO: 1041400 - DNA, 15 bp, Homo sapiens
gcctttatcagcccc

SEQ ID NO: 1041401 - DNA, 15 bp, Homo sapiens
cctttatcagccccc

SEQ ID NO: 1041402 - DNA, 15 bp, Homo sapiens
ctttatcagcccccc

SEQ ID NO: 1041403 - DNA, 15 bp, Homo sapiens
tttatcagcccccct

SEQ ID NO: 1041404 - DNA, 15 bp, Homo sapiens
ttatcagcccccctg

SEQ ID NO: 1041405 - DNA, 15 bp, Homo sapiens
tatcagcccccctgc

SEQ ID NO: 1041406 - DNA, 15 bp, Homo sapiens
atcagcccccctgcg

SEQ ID NO: 1041407 - DNA, 15 bp, Homo sapiens
tcagcccccctgcgg

SEQ ID NO: 1041408 - DNA, 15 bp, Homo sapiens
cagcccccctgcgga

SEQ ID NO: 1041409 - DNA, 15 bp, Homo sapiens
agcccccctgcggaa

SEQ ID NO: 1041410 - DNA, 15 bp, Homo sapiens
gcccccctgcggaac

SEQ ID NO: 1041411 - DNA, 15 bp, Homo sapiens
cccccctgcggaacc

SEQ ID NO: 1041412 - DNA, 15 bp, Homo sapiens
ccccctgcggaacct

SEQ ID NO: 1041413 - DNA, 15 bp, Homo sapiens
cccctgcggaacctg

SEQ ID NO: 1041414 - DNA, 15 bp, Homo sapiens
ccctgcggaacctgg

SEQ ID NO: 1041415 - DNA, 15 bp, Homo sapiens
cctgcggaacctggg

SEQ ID NO: 1041416 - DNA, 15 bp, Homo sapiens
ctgcggaacctgggg

SEQ ID NO: 1041417 - DNA, 15 bp, Homo sapiens
tgcggaacctggggg

SEQ ID NO: 1041418 - DNA, 15 bp, Homo sapiens
gcggaacctgggggg

SEQ ID NO: 1041419 - DNA, 15 bp, Homo sapiens
cggaacctggggggg

SEQ ID NO: 1041420 - DNA, 15 bp, Homo sapiens
ggaacctggggggga

SEQ ID NO: 1041421 - DNA, 15 bp, Homo sapiens
gaacctgggggggag

SEQ ID NO: 1041422 - DNA, 15 bp, Homo sapiens
aacctgggggggagg

SEQ ID NO: 1041423 - DNA, 15 bp, Homo sapiens
acctgggggggaggc

SEQ ID NO: 1041424 - DNA, 15 bp, Homo sapiens
cctgggggggaggcc

SEQ ID NO: 1041425 - DNA, 15 bp, Homo sapiens
ctgggggggaggccc

SEQ ID NO: 1041426 - DNA, 15 bp, Homo sapiens
tgggggggaggccca

SEQ ID NO: 1041427 - DNA, 15 bp, Homo sapiens
gggggggaggcccag

SEQ ID NO: 1041428 - DNA, 15 bp, Homo sapiens
ggggggaggcccagt

SEQ ID NO: 1041429 - DNA, 15 bp, Homo sapiens
gggggaggcccagtg

SEQ ID NO: 1041430 - DNA, 15 bp, Homo sapiens
ggggaggcccagtgt

SEQ ID NO: 1041431 - DNA, 15 bp, Homo sapiens
gggaggcccagtgtc

SEQ ID NO: 1041432 - DNA, 15 bp, Homo sapiens
ggaggcccagtgtct

SEQ ID NO: 1041433 - DNA, 15 bp, Homo sapiens
gaggcccagtgtctc

SEQ ID NO: 1041434 - DNA, 15 bp, Homo sapiens
aggcccagtgtctcc

SEQ ID NO: 1041435 - DNA, 15 bp, Homo sapiens
ggcccagtgtctcca

SEQ ID NO: 1041436 - DNA, 15 bp, Homo sapiens
gcccagtgtctccac

SEQ ID NO: 1041437 - DNA, 15 bp, Homo sapiens
cccagtgtctccacc

SEQ ID NO: 1041438 - DNA, 15 bp, Homo sapiens
ccagtgtctccacct

SEQ ID NO: 1041439 - DNA, 15 bp, Homo sapiens
cagtgtctccaccta

SEQ ID NO: 1041440 - DNA, 15 bp, Homo sapiens
agtgtctccacctac

SEQ ID NO: 1041441 - DNA, 15 bp, Homo sapiens
gtgtctccacctacc

SEQ ID NO: 1041442 - DNA, 15 bp, Homo sapiens
tgtctccacctaccg

SEQ ID NO: 1041443 - DNA, 15 bp, Homo sapiens
gtctccacctaccgg

SEQ ID NO: 1041444 - DNA, 15 bp, Homo sapiens
tctccacctaccggg

SEQ ID NO: 1041445 - DNA, 15 bp, Homo sapiens
ctccacctaccgggc

SEQ ID NO: 1041446 - DNA, 15 bp, Homo sapiens
tccacctaccgggcg

SEQ ID NO: 1041447 - DNA, 15 bp, Homo sapiens
ccacctaccgggcgt

SEQ ID NO: 1041448 - DNA, 15 bp, Homo sapiens
cacctaccgggcgtt

SEQ ID NO: 1041449 - DNA, 15 bp, Homo sapiens
acctaccgggcgttt

SEQ ID NO: 1041450 - DNA, 15 bp, Homo sapiens
cctaccgggcgtttc

SEQ ID NO: 1041451 - DNA, 15 bp, Homo sapiens
ctaccgggcgtttcc

SEQ ID NO: 1041452 - DNA, 15 bp, Homo sapiens
taccgggcgtttcct

SEQ ID NO: 1041453 - DNA, 15 bp, Homo sapiens
accgggcgtttcctg

SEQ ID NO: 1041454 - DNA, 15 bp, Homo sapiens
ccgggcgtttcctgt

SEQ ID NO: 1041455 - DNA, 15 bp, Homo sapiens
cgggcgtttcctgta

SEQ ID NO: 1041456 - DNA, 15 bp, Homo sapiens
gggcgtttcctgtag

SEQ ID NO: 1041457 - DNA, 15 bp, Homo sapiens
ggcgtttcctgtagg

SEQ ID NO: 1041458 - DNA, 15 bp, Homo sapiens
gcgtttcctgtagga

SEQ ID NO: 1041459 - DNA, 15 bp, Homo sapiens
cgtttcctgtaggac

SEQ ID NO: 1041460 - DNA, 15 bp, Homo sapiens
gtttcctgtaggacc

SEQ ID NO: 1041461 - DNA, 15 bp, Homo sapiens
tttcctgtaggaccc

SEQ ID NO: 1041462 - DNA, 15 bp, Homo sapiens
ttcctgtaggacccc

SEQ ID NO: 1041463 - DNA, 15 bp, Homo sapiens
tcctgtaggaccccc

SEQ ID NO: 1041464 - DNA, 15 bp, Homo sapiens
cctgtaggaccccct

SEQ ID NO: 1041465 - DNA, 15 bp, Homo sapiens
ctgtaggaccccctt

SEQ ID NO: 1041466 - DNA, 15 bp, Homo sapiens
tgtaggacccccttg

SEQ ID NO: 1041467 - DNA, 15 bp, Homo sapiens
gtaggacccccttgt

SEQ ID NO: 1041468 - DNA, 15 bp, Homo sapiens
taggacccccttgtt

SEQ ID NO: 1041469 - DNA, 15 bp, Homo sapiens
aggacccccttgttt

SEQ ID NO: 1041470 - DNA, 15 bp, Homo sapiens
ggacccccttgtttg

SEQ ID NO: 1041471 - DNA, 15 bp, Homo sapiens
gacccccttgtttgg

SEQ ID NO: 1041472 - DNA, 15 bp, Homo sapiens
acccccttgtttgga

SEQ ID NO: 1041473 - DNA, 15 bp, Homo sapiens
cccccttgtttggac

SEQ ID NO: 1041474 - DNA, 15 bp, Homo sapiens
ccccttgtttggaca

SEQ ID NO: 1041475 - DNA, 15 bp, Homo sapiens
cccttgtttggacat

SEQ ID NO: 1041476 - DNA, 15 bp, Homo sapiens
ccttgtttggacatg

SEQ ID NO: 1041477 - DNA, 15 bp, Homo sapiens
cttgtttggacatgt

SEQ ID NO: 1041478 - DNA, 15 bp, Homo sapiens
ttgtttggacatgtg

SEQ ID NO: 1041479 - DNA, 15 bp, Homo sapiens
tgtttggacatgtgg

SEQ ID NO: 1041480 - DNA, 15 bp, Homo sapiens
gtttggacatgtggg

SEQ ID NO: 1041481 - DNA, 15 bp, Homo sapiens
tttggacatgtgggg

SEQ ID NO: 1041482 - DNA, 15 bp, Homo sapiens
ttggacatgtggggc

SEQ ID NO: 1041483 - DNA, 15 bp, Homo sapiens
tggacatgtggggca

SEQ ID NO: 1041484 - DNA, 15 bp, Homo sapiens
ggacatgtggggcaa

SEQ ID NO: 1041485 - DNA, 15 bp, Homo sapiens
gacatgtggggcaaa

SEQ ID NO: 1041486 - DNA, 15 bp, Homo sapiens
acatgtggggcaaag

SEQ ID NO: 1041487 - DNA, 15 bp, Homo sapiens
catgtggggcaaagc

SEQ ID NO: 1041488 - DNA, 15 bp, Homo sapiens
atgtggggcaaagcc

SEQ ID NO: 1041489 - DNA, 15 bp, Homo sapiens
tgtggggcaaagccc

SEQ ID NO: 1041490 - DNA, 15 bp, Homo sapiens
gtggggcaaagccct

SEQ ID NO: 1041491 - DNA, 15 bp, Homo sapiens
tggggcaaagcccta

SEQ ID NO: 1041492 - DNA, 15 bp, Homo sapiens
ggggcaaagccctag

SEQ ID NO: 1041493 - DNA, 15 bp, Homo sapiens
gggcaaagccctaga

SEQ ID NO: 1041494 - DNA, 15 bp, Homo sapiens
ggcaaagccctagaa

SEQ ID NO: 1041495 - DNA, 15 bp, Homo sapiens
gcaaagccctagaac

SEQ ID NO: 1041496 - DNA, 15 bp, Homo sapiens
caaagccctagaact

SEQ ID NO: 1041497 - DNA, 15 bp, Homo sapiens
aaagccctagaactg

SEQ ID NO: 1041498 - DNA, 15 bp, Homo sapiens
aagccctagaactga

SEQ ID NO: 1041499 - DNA, 15 bp, Homo sapiens
agccctagaactgat

SEQ ID NO: 1041500 - DNA, 15 bp, Homo sapiens
gccctagaactgatc

SEQ ID NO: 1041501 - DNA, 15 bp, Homo sapiens
ccctagaactgatca

SEQ ID NO: 1041502 - DNA, 15 bp, Homo sapiens
cctagaactgatcac

SEQ ID NO: 1041503 - DNA, 15 bp, Homo sapiens
ctagaactgatcact

SEQ ID NO: 1041504 - DNA, 15 bp, Homo sapiens
tagaactgatcactg

SEQ ID NO: 1041505 - DNA, 15 bp, Homo sapiens
agaactgatcactgg

SEQ ID NO: 1041506 - DNA, 15 bp, Homo sapiens
gaactgatcactggg

SEQ ID NO: 1041507 - DNA, 15 bp, Homo sapiens
aactgatcactgggc

SEQ ID NO: 1041508 - DNA, 15 bp, Homo sapiens
actgatcactgggca

SEQ ID NO: 1041509 - DNA, 15 bp, Homo sapiens
ctgatcactgggcac

SEQ ID NO: 1041510 - DNA, 15 bp, Homo sapiens
tgatcactgggcaca

SEQ ID NO: 1041511 - DNA, 15 bp, Homo sapiens
gatcactgggcacag

SEQ ID NO: 1041512 - DNA, 15 bp, Homo sapiens
atcactgggcacagg

SEQ ID NO: 1041513 - DNA, 15 bp, Homo sapiens
tcactgggcacaggt

SEQ ID NO: 1041514 - DNA, 15 bp, Homo sapiens
cactgggcacaggtg

SEQ ID NO: 1041515 - DNA, 15 bp, Homo sapiens
actgggcacaggtgg

SEQ ID NO: 1041516 - DNA, 15 bp, Homo sapiens
ctgggcacaggtggg

SEQ ID NO: 1041517 - DNA, 15 bp, Homo sapiens
tgggcacaggtgggg

SEQ ID NO: 1041518 - DNA, 15 bp, Homo sapiens
gggcacaggtgggga

SEQ ID NO: 1041519 - DNA, 15 bp, Homo sapiens
ggcacaggtggggag

SEQ ID NO: 1041520 - DNA, 15 bp, Homo sapiens
gcacaggtggggagg

SEQ ID NO: 1041521 - DNA, 15 bp, Homo sapiens
cacaggtggggaggg

SEQ ID NO: 1041522 - DNA, 15 bp, Homo sapiens
acaggtggggagggg

SEQ ID NO: 1041523 - DNA, 15 bp, Homo sapiens
caggtggggaggggg

SEQ ID NO: 1041524 - DNA, 15 bp, Homo sapiens
aggtggggagggggc

SEQ ID NO: 1041525 - DNA, 15 bp, Homo sapiens
ggtggggagggggct

SEQ ID NO: 1041526 - DNA, 15 bp, Homo sapiens
gtggggagggggctc

SEQ ID NO: 1041527 - DNA, 15 bp, Homo sapiens
tggggagggggctcc

SEQ ID NO: 1041528 - DNA, 15 bp, Homo sapiens
ggggagggggctcct

SEQ ID NO: 1041529 - DNA, 15 bp, Homo sapiens
gggagggggctcctc

SEQ ID NO: 1041530 - DNA, 15 bp, Homo sapiens
ggagggggctcctcg

SEQ ID NO: 1041531 - DNA, 15 bp, Homo sapiens
gagggggctcctcga

SEQ ID NO: 1041532 - DNA, 15 bp, Homo sapiens
agggggctcctcgag

SEQ ID NO: 1041533 - DNA, 15 bp, Homo sapiens
gggggctcctcgagg

SEQ ID NO: 1041534 - DNA, 15 bp, Homo sapiens
ggggctcctcgagga

SEQ ID NO: 1041535 - DNA, 15 bp, Homo sapiens
gggctcctcgaggac

SEQ ID NO: 1041536 - DNA, 15 bp, Homo sapiens
ggctcctcgaggaca

SEQ ID NO: 1041537 - DNA, 15 bp, Homo sapiens
gctcctcgaggacag

SEQ ID NO: 1041538 - DNA, 15 bp, Homo sapiens
ctcctcgaggacagc

SEQ ID NO: 1041539 - DNA, 15 bp, Homo sapiens
tcctcgaggacagct

SEQ ID NO: 1041540 - DNA, 15 bp, Homo sapiens
cctcgaggacagctt

SEQ ID NO: 1041541 - DNA, 15 bp, Homo sapiens
ctcgaggacagcttg

SEQ ID NO: 1041542 - DNA, 15 bp, Homo sapiens
tcgaggacagcttgg

SEQ ID NO: 1041543 - DNA, 15 bp, Homo sapiens
cgaggacagcttgga

SEQ ID NO: 1041544 - DNA, 15 bp, Homo sapiens
gaggacagcttggat

SEQ ID NO: 1041545 - DNA, 15 bp, Homo sapiens
aggacagcttggatc

SEQ ID NO: 1041546 - DNA, 15 bp, Homo sapiens
ggacagcttggatca

SEQ ID NO: 1041547 - DNA, 15 bp, Homo sapiens
gacagcttggatcac

SEQ ID NO: 1041548 - DNA, 15 bp, Homo sapiens
acagcttggatcaca

SEQ ID NO: 1041549 - DNA, 15 bp, Homo sapiens
cagcttggatcacag

SEQ ID NO: 1041550 - DNA, 15 bp, Homo sapiens
agcttggatcacagg

SEQ ID NO: 1041551 - DNA, 15 bp, Homo sapiens
gcttggatcacaggt

SEQ ID NO: 1041552 - DNA, 15 bp, Homo sapiens
cttggatcacaggtg

SEQ ID NO: 1041553 - DNA, 15 bp, Homo sapiens
ttggatcacaggtgt

SEQ ID NO: 1041554 - DNA, 15 bp, Homo sapiens
tggatcacaggtgtg

SEQ ID NO: 1041555 - DNA, 15 bp, Homo sapiens
ggatcacaggtgtgt

SEQ ID NO: 1041556 - DNA, 15 bp, Homo sapiens
gatcacaggtgtgtg

SEQ ID NO: 1041557 - DNA, 15 bp, Homo sapiens
atcacaggtgtgtgc

SEQ ID NO: 1041558 - DNA, 15 bp, Homo sapiens
tcacaggtgtgtgcc

SEQ ID NO: 1041559 - DNA, 15 bp, Homo sapiens
cacaggtgtgtgcca

SEQ ID NO: 1041560 - DNA, 15 bp, Homo sapiens
acaggtgtgtgccaa

SEQ ID NO: 1041561 - DNA, 15 bp, Homo sapiens
caggtgtgtgccaat

SEQ ID NO: 1041562 - DNA, 15 bp, Homo sapiens
aggtgtgtgccaatt

SEQ ID NO: 1041563 - DNA, 15 bp, Homo sapiens
ggtgtgtgccaattc

SEQ ID NO: 1041564 - DNA, 15 bp, Homo sapiens
gtgtgtgccaattct

SEQ ID NO: 1041565 - DNA, 15 bp, Homo sapiens
tgtgtgccaattctg

SEQ ID NO: 1041566 - DNA, 15 bp, Homo sapiens
gtgtgccaattctgt

SEQ ID NO: 1041567 - DNA, 15 bp, Homo sapiens
tgtgccaattctgtt

SEQ ID NO: 1041568 - DNA, 15 bp, Homo sapiens
gtgccaattctgttt

SEQ ID NO: 1041569 - DNA, 15 bp, Homo sapiens
tgccaattctgtttt

SEQ ID NO: 1041570 - DNA, 15 bp, Homo sapiens
gccaattctgttttg

SEQ ID NO: 1041571 - DNA, 15 bp, Homo sapiens
ccaattctgttttgt

SEQ ID NO: 1041572 - DNA, 15 bp, Homo sapiens
caattctgttttgtt

SEQ ID NO: 1041573 - DNA, 15 bp, Homo sapiens
aattctgttttgttt

SEQ ID NO: 1041574 - DNA, 15 bp, Homo sapiens
attctgttttgtttt

SEQ ID NO: 1041575 - DNA, 15 bp, Homo sapiens
ttctgttttgttttt

SEQ ID NO: 1041576 - DNA, 15 bp, Homo sapiens
tctgttttgtttttc

SEQ ID NO: 1041577 - DNA, 15 bp, Homo sapiens
ctgttttgtttttct

SEQ ID NO: 1041578 - DNA, 15 bp, Homo sapiens
tgttttgtttttctt

SEQ ID NO: 1041579 - DNA, 15 bp, Homo sapiens
gttttgtttttcttc

SEQ ID NO: 1041580 - DNA, 15 bp, Homo sapiens
ttttgtttttcttcc

SEQ ID NO: 1041581 - DNA, 15 bp, Homo sapiens
tttgtttttcttcct

SEQ ID NO: 1041582 - DNA, 15 bp, Homo sapiens
ttgtttttcttcctc

SEQ ID NO: 1041583 - DNA, 15 bp, Homo sapiens
tgtttttcttcctct

SEQ ID NO: 1041584 - DNA, 15 bp, Homo sapiens
gtttttcttcctctt

SEQ ID NO: 1041585 - DNA, 15 bp, Homo sapiens
tttttcttcctcttt

SEQ ID NO: 1041586 - DNA, 15 bp, Homo sapiens
ttttcttcctctttc

SEQ ID NO: 1041587 - DNA, 15 bp, Homo sapiens
tttcttcctctttcc

SEQ ID NO: 1041588 - DNA, 15 bp, Homo sapiens
ttcttcctctttcct

SEQ ID NO: 1041589 - DNA, 15 bp, Homo sapiens
tcttcctctttcctg

SEQ ID NO: 1041590 - DNA, 15 bp, Homo sapiens
cttcctctttcctgc

SEQ ID NO: 1041591 - DNA, 15 bp, Homo sapiens
ttcctctttcctgcc

SEQ ID NO: 1041592 - DNA, 15 bp, Homo sapiens
tcctctttcctgcca

SEQ ID NO: 1041593 - DNA, 15 bp, Homo sapiens
cctctttcctgccat

SEQ ID NO: 1041594 - DNA, 15 bp, Homo sapiens
ctctttcctgccatt

SEQ ID NO: 1041595 - DNA, 15 bp, Homo sapiens
tctttcctgccattg

SEQ ID NO: 1041596 - DNA, 15 bp, Homo sapiens
ctttcctgccattga

SEQ ID NO: 1041597 - DNA, 15 bp, Homo sapiens
tttcctgccattgaa

SEQ ID NO: 1041598 - DNA, 15 bp, Homo sapiens
ttcctgccattgaac

SEQ ID NO: 1041599 - DNA, 15 bp, Homo sapiens
tcctgccattgaact

SEQ ID NO: 1041600 - DNA, 15 bp, Homo sapiens
cctgccattgaactt

SEQ ID NO: 1041601 - DNA, 15 bp, Homo sapiens
ctgccattgaacttc

SEQ ID NO: 1041602 - DNA, 15 bp, Homo sapiens
tgccattgaacttcc

SEQ ID NO: 1041603 - DNA, 15 bp, Homo sapiens
gccattgaacttcct

SEQ ID NO: 1041604 - DNA, 15 bp, Homo sapiens
ccattgaacttccta

SEQ ID NO: 1041605 - DNA, 15 bp, Homo sapiens
cattgaacttcctac

SEQ ID NO: 1041606 - DNA, 15 bp, Homo sapiens
attgaacttcctact

SEQ ID NO: 1041607 - DNA, 15 bp, Homo sapiens
ttgaacttcctactc

SEQ ID NO: 1041608 - DNA, 15 bp, Homo sapiens
tgaacttcctactcc

SEQ ID NO: 1041609 - DNA, 15 bp, Homo sapiens
gaacttcctactcct

SEQ ID NO: 1041610 - DNA, 15 bp, Homo sapiens
aacttcctactcctt

SEQ ID NO: 1041611 - DNA, 15 bp, Homo sapiens
acttcctactccttc

SEQ ID NO: 1041612 - DNA, 15 bp, Homo sapiens
cttcctactccttct

SEQ ID NO: 1041613 - DNA, 15 bp, Homo sapiens
ttcctactccttcta

SEQ ID NO: 1041614 - DNA, 15 bp, Homo sapiens
tcctactccttctag

SEQ ID NO: 1041615 - DNA, 15 bp, Homo sapiens
cctactccttctagc

SEQ ID NO: 1041616 - DNA, 15 bp, Homo sapiens
ctactccttctagca

SEQ ID NO: 1041617 - DNA, 15 bp, Homo sapiens
tactccttctagcat

SEQ ID NO: 1041618 - DNA, 15 bp, Homo sapiens
actccttctagcatg

SEQ ID NO: 1041619 - DNA, 15 bp, Homo sapiens
ctccttctagcatgt

SEQ ID NO: 1041620 - DNA, 15 bp, Homo sapiens
tccttctagcatgtg

SEQ ID NO: 1041621 - DNA, 15 bp, Homo sapiens
ccttctagcatgtga

SEQ ID NO: 1041622 - DNA, 15 bp, Homo sapiens
cttctagcatgtgag

SEQ ID NO: 1041623 - DNA, 15 bp, Homo sapiens
ttctagcatgtgaga

SEQ ID NO: 1041624 - DNA, 15 bp, Homo sapiens
tctagcatgtgagag

SEQ ID NO: 1041625 - DNA, 15 bp, Homo sapiens
ctagcatgtgagaga

SEQ ID NO: 1041626 - DNA, 15 bp, Homo sapiens
tagcatgtgagagac

SEQ ID NO: 1041627 - DNA, 15 bp, Homo sapiens
agcatgtgagagaca

SEQ ID NO: 1041628 - DNA, 15 bp, Homo sapiens
gcatgtgagagacag

SEQ ID NO: 1041629 - DNA, 15 bp, Homo sapiens
catgtgagagacagc

SEQ ID NO: 1041630 - DNA, 15 bp, Homo sapiens
atgtgagagacagct

SEQ ID NO: 1041631 - DNA, 15 bp, Homo sapiens
tgtgagagacagctt

SEQ ID NO: 1041632 - DNA, 15 bp, Homo sapiens
gtgagagacagcttc

SEQ ID NO: 1041633 - DNA, 15 bp, Homo sapiens
tgagagacagcttca

SEQ ID NO: 1041634 - DNA, 15 bp, Homo sapiens
gagagacagcttcaa

SEQ ID NO: 1041635 - DNA, 15 bp, Homo sapiens
agagacagcttcaac

SEQ ID NO: 1041636 - DNA, 15 bp, Homo sapiens
gagacagcttcaact

SEQ ID NO: 1041637 - DNA, 15 bp, Homo sapiens
agacagcttcaactt

SEQ ID NO: 1041638 - DNA, 15 bp, Homo sapiens
gacagcttcaactta

SEQ ID NO: 1041639 - DNA, 15 bp, Homo sapiens
acagcttcaacttac

SEQ ID NO: 1041640 - DNA, 15 bp, Homo sapiens
cagcttcaacttact

SEQ ID NO: 1041641 - DNA, 15 bp, Homo sapiens
agcttcaacttactc

SEQ ID NO: 1041642 - DNA, 15 bp, Homo sapiens
gcttcaacttactcc

SEQ ID NO: 1041643 - DNA, 15 bp, Homo sapiens
cttcaacttactccc

SEQ ID NO: 1041644 - DNA, 15 bp, Homo sapiens
ttcaacttactccct

SEQ ID NO: 1041645 - DNA, 15 bp, Homo sapiens
tcaacttactccctg

SEQ ID NO: 1041646 - DNA, 15 bp, Homo sapiens
caacttactccctgg

SEQ ID NO: 1041647 - DNA, 15 bp, Homo sapiens
aacttactccctggc

SEQ ID NO: 1041648 - DNA, 15 bp, Homo sapiens
acttactccctggcg

SEQ ID NO: 1041649 - DNA, 15 bp, Homo sapiens
cttactccctggcga

SEQ ID NO: 1041650 - DNA, 15 bp, Homo sapiens
ttactccctggcgac

SEQ ID NO: 1041651 - DNA, 15 bp, Homo sapiens
tactccctggcgacg

SEQ ID NO: 1041652 - DNA, 15 bp, Homo sapiens
actccctggcgacgg

SEQ ID NO: 1041653 - DNA, 15 bp, Homo sapiens
ctccctggcgacggc

SEQ ID NO: 1041654 - DNA, 15 bp, Homo sapiens
tccctggcgacggct

SEQ ID NO: 1041655 - DNA, 15 bp, Homo sapiens
ccctggcgacggctg

SEQ ID NO: 1041656 - DNA, 15 bp, Homo sapiens
cctggcgacggctga

SEQ ID NO: 1041657 - DNA, 15 bp, Homo sapiens
ctggcgacggctgaa

SEQ ID NO: 1041658 - DNA, 15 bp, Homo sapiens
tggcgacggctgaaa

SEQ ID NO: 1041659 - DNA, 15 bp, Homo sapiens
ggcgacggctgaaaa

SEQ ID NO: 1041660 - DNA, 15 bp, Homo sapiens
gcgacggctgaaaaa

SEQ ID NO: 1041661 - DNA, 15 bp, Homo sapiens
cgacggctgaaaaac

SEQ ID NO: 1041662 - DNA, 15 bp, Homo sapiens
gacggctgaaaaaca

SEQ ID NO: 1041663 - DNA, 15 bp, Homo sapiens
acggctgaaaaacat

SEQ ID NO: 1041664 - DNA, 15 bp, Homo sapiens
cggctgaaaaacatg

SEQ ID NO: 1041665 - DNA, 15 bp, Homo sapiens
ggctgaaaaacatgg

SEQ ID NO: 1041666 - DNA, 15 bp, Homo sapiens
gctgaaaaacatggg

SEQ ID NO: 1041667 - DNA, 15 bp, Homo sapiens
ctgaaaaacatgggc

SEQ ID NO: 1041668 - DNA, 15 bp, Homo sapiens
tgaaaaacatgggct

SEQ ID NO: 1041669 - DNA, 15 bp, Homo sapiens
gaaaaacatgggcta

SEQ ID NO: 1041670 - DNA, 15 bp, Homo sapiens
aaaaacatgggctat

SEQ ID NO: 1041671 - DNA, 15 bp, Homo sapiens
aaaacatgggctatt

SEQ ID NO: 1041672 - DNA, 15 bp, Homo sapiens
aaacatgggctattt

SEQ ID NO: 1041673 - DNA, 15 bp, Homo sapiens
aacatgggctatttt

SEQ ID NO: 1041674 - DNA, 15 bp, Homo sapiens
acatgggctattttt

SEQ ID NO: 1041675 - DNA, 15 bp, Homo sapiens
catgggctattttta

SEQ ID NO: 1041676 - DNA, 15 bp, Homo sapiens
atgggctatttttag

SEQ ID NO: 1041677 - DNA, 15 bp, Homo sapiens
tgggctatttttagt

SEQ ID NO: 1041678 - DNA, 15 bp, Homo sapiens
gggctatttttagtt

SEQ ID NO: 1041679 - DNA, 15 bp, Homo sapiens
ggctatttttagttt

SEQ ID NO: 1041680 - DNA, 15 bp, Homo sapiens
gctatttttagtttg

SEQ ID NO: 1041681 - DNA, 15 bp, Homo sapiens
ctatttttagtttgt

SEQ ID NO: 1041682 - DNA, 15 bp, Homo sapiens
tatttttagtttgtg

SEQ ID NO: 1041683 - DNA, 15 bp, Homo sapiens
atttttagtttgtgt

SEQ ID NO: 1041684 - DNA, 15 bp, Homo sapiens
tttttagtttgtgtg

SEQ ID NO: 1041685 - DNA, 15 bp, Homo sapiens
ttttagtttgtgtga

SEQ ID NO: 1041686 - DNA, 15 bp, Homo sapiens
tttagtttgtgtgag

SEQ ID NO: 1041687 - DNA, 15 bp, Homo sapiens
ttagtttgtgtgagt

SEQ ID NO: 1041688 - DNA, 15 bp, Homo sapiens
tagtttgtgtgagtc

SEQ ID NO: 1041689 - DNA, 15 bp, Homo sapiens
agtttgtgtgagtct

SEQ ID NO: 1041690 - DNA, 15 bp, Homo sapiens
gtttgtgtgagtcta

SEQ ID NO: 1041691 - DNA, 15 bp, Homo sapiens
tttgtgtgagtctag

SEQ ID NO: 1041692 - DNA, 15 bp, Homo sapiens
ttgtgtgagtctagt

SEQ ID NO: 1041693 - DNA, 15 bp, Homo sapiens
tgtgtgagtctagtt

SEQ ID NO: 1041694 - DNA, 15 bp, Homo sapiens
gtgtgagtctagttt

SEQ ID NO: 1041695 - DNA, 15 bp, Homo sapiens
tgtgagtctagttta

SEQ ID NO: 1041696 - DNA, 15 bp, Homo sapiens
gtgagtctagtttat

SEQ ID NO: 1041697 - DNA, 15 bp, Homo sapiens
tgagtctagtttatt

SEQ ID NO: 1041698 - DNA, 15 bp, Homo sapiens
gagtctagtttattt

SEQ ID NO: 1041699 - DNA, 15 bp, Homo sapiens
agtctagtttatttg

SEQ ID NO: 1041700 - DNA, 15 bp, Homo sapiens
gtctagtttatttgc

SEQ ID NO: 1041701 - DNA, 15 bp, Homo sapiens
tctagtttatttgct

SEQ ID NO: 1041702 - DNA, 15 bp, Homo sapiens
ctagtttatttgctc

SEQ ID NO: 1041703 - DNA, 15 bp, Homo sapiens
tagtttatttgctcc

SEQ ID NO: 1041704 - DNA, 15 bp, Homo sapiens
agtttatttgctcct

SEQ ID NO: 1041705 - DNA, 15 bp, Homo sapiens
gtttatttgctcctg

SEQ ID NO: 1041706 - DNA, 15 bp, Homo sapiens
tttatttgctcctgg

SEQ ID NO: 1041707 - DNA, 15 bp, Homo sapiens
ttatttgctcctggt

SEQ ID NO: 1041708 - DNA, 15 bp, Homo sapiens
tatttgctcctggta

SEQ ID NO: 1041709 - DNA, 15 bp, Homo sapiens
atttgctcctggtag

SEQ ID NO: 1041710 - DNA, 15 bp, Homo sapiens
tttgctcctggtaga

SEQ ID NO: 1041711 - DNA, 15 bp, Homo sapiens
ttgctcctggtagat

SEQ ID NO: 1041712 - DNA, 15 bp, Homo sapiens
tgctcctggtagatt

SEQ ID NO: 1041713 - DNA, 15 bp, Homo sapiens
gctcctggtagattt

SEQ ID NO: 1041714 - DNA, 15 bp, Homo sapiens
ctcctggtagatttg

SEQ ID NO: 1041715 - DNA, 15 bp, Homo sapiens
tcctggtagatttgc

SEQ ID NO: 1041716 - DNA, 15 bp, Homo sapiens
cctggtagatttgcc

SEQ ID NO: 1041717 - DNA, 15 bp, Homo sapiens
ctggtagatttgcct

SEQ ID NO: 1041718 - DNA, 15 bp, Homo sapiens
tggtagatttgcctc

SEQ ID NO: 1041719 - DNA, 15 bp, Homo sapiens
ggtagatttgcctct

SEQ ID NO: 1041720 - DNA, 15 bp, Homo sapiens
gtagatttgcctctc

SEQ ID NO: 1041721 - DNA, 15 bp, Homo sapiens
tagatttgcctctcc

SEQ ID NO: 1041722 - DNA, 15 bp, Homo sapiens
agatttgcctctccc

SEQ ID NO: 1041723 - DNA, 15 bp, Homo sapiens
gatttgcctctccct

SEQ ID NO: 1041724 - DNA, 15 bp, Homo sapiens
atttgcctctccctg

SEQ ID NO: 1041725 - DNA, 15 bp, Homo sapiens
tttgcctctccctgt

SEQ ID NO: 1041726 - DNA, 15 bp, Homo sapiens
ttgcctctccctgtc

SEQ ID NO: 1041727 - DNA, 15 bp, Homo sapiens
tgcctctccctgtct

SEQ ID NO: 1041728 - DNA, 15 bp, Homo sapiens
gcctctccctgtctt

SEQ ID NO: 1041729 - DNA, 15 bp, Homo sapiens
cctctccctgtcttc

SEQ ID NO: 1041730 - DNA, 15 bp, Homo sapiens
ctctccctgtcttcg

SEQ ID NO: 1041731 - DNA, 15 bp, Homo sapiens
tctccctgtcttcgt

SEQ ID NO: 1041732 - DNA, 15 bp, Homo sapiens
ctccctgtcttcgtg

SEQ ID NO: 1041733 - DNA, 15 bp, Homo sapiens
tccctgtcttcgtga

SEQ ID NO: 1041734 - DNA, 15 bp, Homo sapiens
ccctgtcttcgtgag

SEQ ID NO: 1041735 - DNA, 15 bp, Homo sapiens
cctgtcttcgtgagt

SEQ ID NO: 1041736 - DNA, 15 bp, Homo sapiens
ctgtcttcgtgagtg

SEQ ID NO: 1041737 - DNA, 15 bp, Homo sapiens
tgtcttcgtgagtgt

SEQ ID NO: 1041738 - DNA, 15 bp, Homo sapiens
gtcttcgtgagtgtg

SEQ ID NO: 1041739 - DNA, 15 bp, Homo sapiens
tcttcgtgagtgtgt

SEQ ID NO: 1041740 - DNA, 15 bp, Homo sapiens
cttcgtgagtgtgtg

SEQ ID NO: 1041741 - DNA, 15 bp, Homo sapiens
ttcgtgagtgtgtgt

SEQ ID NO: 1041742 - DNA, 15 bp, Homo sapiens
tcgtgagtgtgtgtg

SEQ ID NO: 1041743 - DNA, 15 bp, Homo sapiens
cgtgagtgtgtgtgt

SEQ ID NO: 1041744 - DNA, 15 bp, Homo sapiens
gtgagtgtgtgtgtg

SEQ ID NO: 1041745 - DNA, 15 bp, Homo sapiens
tgagtgtgtgtgtgt

SEQ ID NO: 1041746 - DNA, 15 bp, Homo sapiens
gagtgtgtgtgtgtt

SEQ ID NO: 1041747 - DNA, 15 bp, Homo sapiens
agtgtgtgtgtgttt

SEQ ID NO: 1041748 - DNA, 15 bp, Homo sapiens
gtgtgtgtgtgtttg

SEQ ID NO: 1041749 - DNA, 15 bp, Homo sapiens
tgtgtgtgtgtttgc

SEQ ID NO: 1041750 - DNA, 15 bp, Homo sapiens
gtgtgtgtgtttgca

SEQ ID NO: 1041751 - DNA, 15 bp, Homo sapiens
tgtgtgtgtttgcac

SEQ ID NO: 1041752 - DNA, 15 bp, Homo sapiens
gtgtgtgtttgcaca

SEQ ID NO: 1041753 - DNA, 15 bp, Homo sapiens
tgtgtgtttgcacac

SEQ ID NO: 1041754 - DNA, 15 bp, Homo sapiens
gtgtgtttgcacaca

SEQ ID NO: 1041755 - DNA, 15 bp, Homo sapiens
tgtgtttgcacacac

SEQ ID NO: 1041756 - DNA, 15 bp, Homo sapiens
gtgtttgcacacacg

SEQ ID NO: 1041757 - DNA, 15 bp, Homo sapiens
tgtttgcacacacgt

SEQ ID NO: 1041758 - DNA, 15 bp, Homo sapiens
gtttgcacacacgtg

SEQ ID NO: 1041759 - DNA, 15 bp, Homo sapiens
tttgcacacacgtgt

SEQ ID NO: 1041760 - DNA, 15 bp, Homo sapiens
ttgcacacacgtgtg

SEQ ID NO: 1041761 - DNA, 15 bp, Homo sapiens
tgcacacacgtgtgt

SEQ ID NO: 1041762 - DNA, 15 bp, Homo sapiens
gcacacacgtgtgtt

SEQ ID NO: 1041763 - DNA, 15 bp, Homo sapiens
cacacacgtgtgttg

SEQ ID NO: 1041764 - DNA, 15 bp, Homo sapiens
acacacgtgtgttgg

SEQ ID NO: 1041765 - DNA, 15 bp, Homo sapiens
cacacgtgtgttggt

SEQ ID NO: 1041766 - DNA, 15 bp, Homo sapiens
acacgtgtgttggtg

SEQ ID NO: 1041767 - DNA, 15 bp, Homo sapiens
cacgtgtgttggtgt

SEQ ID NO: 1041768 - DNA, 15 bp, Homo sapiens
acgtgtgttggtgtg

SEQ ID NO: 1041769 - DNA, 15 bp, Homo sapiens
cgtgtgttggtgtgt

SEQ ID NO: 1041770 - DNA, 15 bp, Homo sapiens
gtgtgttggtgtgtg

SEQ ID NO: 1041771 - DNA, 15 bp, Homo sapiens
tgtgttggtgtgtgt

SEQ ID NO: 1041772 - DNA, 15 bp, Homo sapiens
gtgttggtgtgtgta

SEQ ID NO: 1041773 - DNA, 15 bp, Homo sapiens
tgttggtgtgtgtac

SEQ ID NO: 1041774 - DNA, 15 bp, Homo sapiens
gttggtgtgtgtaca

SEQ ID NO: 1041775 - DNA, 15 bp, Homo sapiens
ttggtgtgtgtacac

SEQ ID NO: 1041776 - DNA, 15 bp, Homo sapiens
tggtgtgtgtacaca

SEQ ID NO: 1041777 - DNA, 15 bp, Homo sapiens
ggtgtgtgtacacaa

SEQ ID NO: 1041778 - DNA, 15 bp, Homo sapiens
gtgtgtgtacacaag

SEQ ID NO: 1041779 - DNA, 15 bp, Homo sapiens
tgtgtgtacacaagt

SEQ ID NO: 1041780 - DNA, 15 bp, Homo sapiens
gtgtgtacacaagtg

SEQ ID NO: 1041781 - DNA, 15 bp, Homo sapiens
tgtgtacacaagtgc

SEQ ID NO: 1041782 - DNA, 15 bp, Homo sapiens
gtgtacacaagtgct

SEQ ID NO: 1041783 - DNA, 15 bp, Homo sapiens
tgtacacaagtgctg

SEQ ID NO: 1041784 - DNA, 15 bp, Homo sapiens
gtacacaagtgctga

SEQ ID NO: 1041785 - DNA, 15 bp, Homo sapiens
tacacaagtgctgat

SEQ ID NO: 1041786 - DNA, 15 bp, Homo sapiens
acacaagtgctgatg

SEQ ID NO: 1041787 - DNA, 15 bp, Homo sapiens
cacaagtgctgatgg

SEQ ID NO: 1041788 - DNA, 15 bp, Homo sapiens
acaagtgctgatggt

SEQ ID NO: 1041789 - DNA, 15 bp, Homo sapiens
caagtgctgatggtg

SEQ ID NO: 1041790 - DNA, 15 bp, Homo sapiens
aagtgctgatggtga

SEQ ID NO: 1041791 - DNA, 15 bp, Homo sapiens
agtgctgatggtgaa

SEQ ID NO: 1041792 - DNA, 15 bp, Homo sapiens
gtgctgatggtgaaa

SEQ ID NO: 1041793 - DNA, 15 bp, Homo sapiens
tgctgatggtgaaaa

SEQ ID NO: 1041794 - DNA, 15 bp, Homo sapiens
gctgatggtgaaaac

SEQ ID NO: 1041795 - DNA, 15 bp, Homo sapiens
ctgatggtgaaaaca

SEQ ID NO: 1041796 - DNA, 15 bp, Homo sapiens
tgatggtgaaaacag

SEQ ID NO: 1041797 - DNA, 15 bp, Homo sapiens
gatggtgaaaacagt

SEQ ID NO: 1041798 - DNA, 15 bp, Homo sapiens
atggtgaaaacagtg

SEQ ID NO: 1041799 - DNA, 15 bp, Homo sapiens
tggtgaaaacagtga

SEQ ID NO: 1041800 - DNA, 15 bp, Homo sapiens
ggtgaaaacagtgac

SEQ ID NO: 1041801 - DNA, 15 bp, Homo sapiens
gtgaaaacagtgaca

SEQ ID NO: 1041802 - DNA, 15 bp, Homo sapiens
tgaaaacagtgacac

SEQ ID NO: 1041803 - DNA, 15 bp, Homo sapiens
gaaaacagtgacaca

SEQ ID NO: 1041804 - DNA, 15 bp, Homo sapiens
aaaacagtgacacac

SEQ ID NO: 1041805 - DNA, 15 bp, Homo sapiens
aaacagtgacacaca

SEQ ID NO: 1041806 - DNA, 15 bp, Homo sapiens
aacagtgacacacac

SEQ ID NO: 1041807 - DNA, 15 bp, Homo sapiens
acagtgacacacaca

SEQ ID NO: 1041808 - DNA, 15 bp, Homo sapiens
cagtgacacacacac

SEQ ID NO: 1041809 - DNA, 15 bp, Homo sapiens
agtgacacacacacc

SEQ ID NO: 1041810 - DNA, 15 bp, Homo sapiens
gtgacacacacacct

SEQ ID NO: 1041811 - DNA, 15 bp, Homo sapiens
tgacacacacacctg

SEQ ID NO: 1041812 - DNA, 15 bp, Homo sapiens
gacacacacacctgt

SEQ ID NO: 1041813 - DNA, 15 bp, Homo sapiens
acacacacacctgtg

SEQ ID NO: 1041814 - DNA, 15 bp, Homo sapiens
cacacacacctgtgt

SEQ ID NO: 1041815 - DNA, 15 bp, Homo sapiens
acacacacctgtgta

SEQ ID NO: 1041816 - DNA, 15 bp, Homo sapiens
cacacacctgtgtag

SEQ ID NO: 1041817 - DNA, 15 bp, Homo sapiens
acacacctgtgtagg

SEQ ID NO: 1041818 - DNA, 15 bp, Homo sapiens
cacacctgtgtaggc

SEQ ID NO: 1041819 - DNA, 15 bp, Homo sapiens
acacctgtgtaggca

SEQ ID NO: 1041820 - DNA, 15 bp, Homo sapiens
cacctgtgtaggcat

SEQ ID NO: 1041821 - DNA, 15 bp, Homo sapiens
acctgtgtaggcatg

SEQ ID NO: 1041822 - DNA, 15 bp, Homo sapiens
cctgtgtaggcatgc

SEQ ID NO: 1041823 - DNA, 15 bp, Homo sapiens
ctgtgtaggcatgca

SEQ ID NO: 1041824 - DNA, 15 bp, Homo sapiens
tgtgtaggcatgcac

SEQ ID NO: 1041825 - DNA, 15 bp, Homo sapiens
gtgtaggcatgcaca

SEQ ID NO: 1041826 - DNA, 15 bp, Homo sapiens
tgtaggcatgcacac

SEQ ID NO: 1041827 - DNA, 15 bp, Homo sapiens
gtaggcatgcacaca

SEQ ID NO: 1041828 - DNA, 15 bp, Homo sapiens
taggcatgcacacac

SEQ ID NO: 1041829 - DNA, 15 bp, Homo sapiens
aggcatgcacacacc

SEQ ID NO: 1041830 - DNA, 15 bp, Homo sapiens
ggcatgcacacacct

SEQ ID NO: 1041831 - DNA, 15 bp, Homo sapiens
gcatgcacacacctg

SEQ ID NO: 1041832 - DNA, 15 bp, Homo sapiens
catgcacacacctgc

SEQ ID NO: 1041833 - DNA, 15 bp, Homo sapiens
atgcacacacctgcc

SEQ ID NO: 1041834 - DNA, 15 bp, Homo sapiens
tgcacacacctgcct

SEQ ID NO: 1041835 - DNA, 15 bp, Homo sapiens
gcacacacctgcctt

SEQ ID NO: 1041836 - DNA, 15 bp, Homo sapiens
cacacacctgccttg

SEQ ID NO: 1041837 - DNA, 15 bp, Homo sapiens
acacacctgccttga

SEQ ID NO: 1041838 - DNA, 15 bp, Homo sapiens
cacacctgccttgat

SEQ ID NO: 1041839 - DNA, 15 bp, Homo sapiens
acacctgccttgatg

SEQ ID NO: 1041840 - DNA, 15 bp, Homo sapiens
cacctgccttgatgt

SEQ ID NO: 1041841 - DNA, 15 bp, Homo sapiens
acctgccttgatgtg

SEQ ID NO: 1041842 - DNA, 15 bp, Homo sapiens
cctgccttgatgtgt

SEQ ID NO: 1041843 - DNA, 15 bp, Homo sapiens
ctgccttgatgtgtg

SEQ ID NO: 1041844 - DNA, 15 bp, Homo sapiens
tgccttgatgtgtga

SEQ ID NO: 1041845 - DNA, 15 bp, Homo sapiens
gccttgatgtgtgac

SEQ ID NO: 1041846 - DNA, 15 bp, Homo sapiens
ccttgatgtgtgacg

SEQ ID NO: 1041847 - DNA, 15 bp, Homo sapiens
cttgatgtgtgacga

SEQ ID NO: 1041848 - DNA, 15 bp, Homo sapiens
ttgatgtgtgacgac

SEQ ID NO: 1041849 - DNA, 15 bp, Homo sapiens
tgatgtgtgacgacg

SEQ ID NO: 1041850 - DNA, 15 bp, Homo sapiens
gatgtgtgacgacgt

SEQ ID NO: 1041851 - DNA, 15 bp, Homo sapiens
atgtgtgacgacgtg

SEQ ID NO: 1041852 - DNA, 15 bp, Homo sapiens
tgtgtgacgacgtga

SEQ ID NO: 1041853 - DNA, 15 bp, Homo sapiens
gtgtgacgacgtgat

SEQ ID NO: 1041854 - DNA, 15 bp, Homo sapiens
tgtgacgacgtgatg

SEQ ID NO: 1041855 - DNA, 15 bp, Homo sapiens
gtgacgacgtgatga

SEQ ID NO: 1041856 - DNA, 15 bp, Homo sapiens
tgacgacgtgatgat

SEQ ID NO: 1041857 - DNA, 15 bp, Homo sapiens
gacgacgtgatgatg

SEQ ID NO: 1041858 - DNA, 15 bp, Homo sapiens
acgacgtgatgatgt

SEQ ID NO: 1041859 - DNA, 15 bp, Homo sapiens
cgacgtgatgatgtg

SEQ ID NO: 1041860 - DNA, 15 bp, Homo sapiens
gacgtgatgatgtgt

SEQ ID NO: 1041861 - DNA, 15 bp, Homo sapiens
acgtgatgatgtgta

SEQ ID NO: 1041862 - DNA, 15 bp, Homo sapiens
cgtgatgatgtgtat

SEQ ID NO: 1041863 - DNA, 15 bp, Homo sapiens
gtgatgatgtgtatg

SEQ ID NO: 1041864 - DNA, 15 bp, Homo sapiens
tgatgatgtgtatgc

SEQ ID NO: 1041865 - DNA, 15 bp, Homo sapiens
gatgatgtgtatgca

SEQ ID NO: 1041866 - DNA, 15 bp, Homo sapiens
atgatgtgtatgcag

SEQ ID NO: 1041867 - DNA, 15 bp, Homo sapiens
tgatgtgtatgcaga

SEQ ID NO: 1041868 - DNA, 15 bp, Homo sapiens
gatgtgtatgcagac

SEQ ID NO: 1041869 - DNA, 15 bp, Homo sapiens
atgtgtatgcagaca

SEQ ID NO: 1041870 - DNA, 15 bp, Homo sapiens
tgtgtatgcagacac

SEQ ID NO: 1041871 - DNA, 15 bp, Homo sapiens
gtgtatgcagacacc

SEQ ID NO: 1041872 - DNA, 15 bp, Homo sapiens
tgtatgcagacacct

SEQ ID NO: 1041873 - DNA, 15 bp, Homo sapiens
gtatgcagacacctg

SEQ ID NO: 1041874 - DNA, 15 bp, Homo sapiens
tatgcagacacctgt

SEQ ID NO: 1041875 - DNA, 15 bp, Homo sapiens
atgcagacacctgtg

SEQ ID NO: 1041876 - DNA, 15 bp, Homo sapiens
tgcagacacctgtgt

SEQ ID NO: 1041877 - DNA, 15 bp, Homo sapiens
gcagacacctgtgtt

SEQ ID NO: 1041878 - DNA, 15 bp, Homo sapiens
cagacacctgtgttg

SEQ ID NO: 1041879 - DNA, 15 bp, Homo sapiens
agacacctgtgttga

SEQ ID NO: 1041880 - DNA, 15 bp, Homo sapiens
gacacctgtgttgat

SEQ ID NO: 1041881 - DNA, 15 bp, Homo sapiens
acacctgtgttgatg

SEQ ID NO: 1041882 - DNA, 15 bp, Homo sapiens
cacctgtgttgatgt

SEQ ID NO: 1041883 - DNA, 15 bp, Homo sapiens
acctgtgttgatgtg

SEQ ID NO: 1041884 - DNA, 15 bp, Homo sapiens
cctgtgttgatgtgt

SEQ ID NO: 1041885 - DNA, 15 bp, Homo sapiens
ctgtgttgatgtgtg

SEQ ID NO: 1041886 - DNA, 15 bp, Homo sapiens
tgtgttgatgtgtgc

SEQ ID NO: 1041887 - DNA, 15 bp, Homo sapiens
gtgttgatgtgtgcc

SEQ ID NO: 1041888 - DNA, 15 bp, Homo sapiens
tgttgatgtgtgcct

SEQ ID NO: 1041889 - DNA, 15 bp, Homo sapiens
gttgatgtgtgccta

SEQ ID NO: 1041890 - DNA, 15 bp, Homo sapiens
ttgatgtgtgcctac

SEQ ID NO: 1041891 - DNA, 15 bp, Homo sapiens
tgatgtgtgcctaca

SEQ ID NO: 1041892 - DNA, 15 bp, Homo sapiens
gatgtgtgcctacat

SEQ ID NO: 1041893 - DNA, 15 bp, Homo sapiens
atgtgtgcctacata

SEQ ID NO: 1041894 - DNA, 15 bp, Homo sapiens
tgtgtgcctacatat

SEQ ID NO: 1041895 - DNA, 15 bp, Homo sapiens
gtgtgcctacatatg

SEQ ID NO: 1041896 - DNA, 15 bp, Homo sapiens
tgtgcctacatatgt

SEQ ID NO: 1041897 - DNA, 15 bp, Homo sapiens
gtgcctacatatgtt

SEQ ID NO: 1041898 - DNA, 15 bp, Homo sapiens
tgcctacatatgttg

SEQ ID NO: 1041899 - DNA, 15 bp, Homo sapiens
gcctacatatgttga

SEQ ID NO: 1041900 - DNA, 15 bp, Homo sapiens
cctacatatgttgac

SEQ ID NO: 1041901 - DNA, 15 bp, Homo sapiens
ctacatatgttgaca

SEQ ID NO: 1041902 - DNA, 15 bp, Homo sapiens
tacatatgttgacac

SEQ ID NO: 1041903 - DNA, 15 bp, Homo sapiens
acatatgttgacaca

SEQ ID NO: 1041904 - DNA, 15 bp, Homo sapiens
catatgttgacacag

SEQ ID NO: 1041905 - DNA, 15 bp, Homo sapiens
atatgttgacacagg

SEQ ID NO: 1041906 - DNA, 15 bp, Homo sapiens
tatgttgacacaggc

SEQ ID NO: 1041907 - DNA, 15 bp, Homo sapiens
atgttgacacaggca

SEQ ID NO: 1041908 - DNA, 15 bp, Homo sapiens
tgttgacacaggcac

SEQ ID NO: 1041909 - DNA, 15 bp, Homo sapiens
gttgacacaggcaca

SEQ ID NO: 1041910 - DNA, 15 bp, Homo sapiens
ttgacacaggcacac

SEQ ID NO: 1041911 - DNA, 15 bp, Homo sapiens
tgacacaggcacaca

SEQ ID NO: 1041912 - DNA, 15 bp, Homo sapiens
gacacaggcacacat

SEQ ID NO: 1041913 - DNA, 15 bp, Homo sapiens
acacaggcacacatg

SEQ ID NO: 1041914 - DNA, 15 bp, Homo sapiens
cacaggcacacatgg

SEQ ID NO: 1041915 - DNA, 15 bp, Homo sapiens
acaggcacacatggt

SEQ ID NO: 1041916 - DNA, 15 bp, Homo sapiens
caggcacacatggtg

SEQ ID NO: 1041917 - DNA, 15 bp, Homo sapiens
aggcacacatggtgt

SEQ ID NO: 1041918 - DNA, 15 bp, Homo sapiens
ggcacacatggtgtg

SEQ ID NO: 1041919 - DNA, 15 bp, Homo sapiens
gcacacatggtgtgt

SEQ ID NO: 1041920 - DNA, 15 bp, Homo sapiens
cacacatggtgtgtc

SEQ ID NO: 1041921 - DNA, 15 bp, Homo sapiens
acacatggtgtgtct

SEQ ID NO: 1041922 - DNA, 15 bp, Homo sapiens
cacatggtgtgtctg

SEQ ID NO: 1041923 - DNA, 15 bp, Homo sapiens
acatggtgtgtctgt

SEQ ID NO: 1041924 - DNA, 15 bp, Homo sapiens
catggtgtgtctgta

SEQ ID NO: 1041925 - DNA, 15 bp, Homo sapiens
atggtgtgtctgtac

SEQ ID NO: 1041926 - DNA, 15 bp, Homo sapiens
tggtgtgtctgtaca

SEQ ID NO: 1041927 - DNA, 15 bp, Homo sapiens
ggtgtgtctgtacat

SEQ ID NO: 1041928 - DNA, 15 bp, Homo sapiens
gtgtgtctgtacatg

SEQ ID NO: 1041929 - DNA, 15 bp, Homo sapiens
tgtgtctgtacatgc

SEQ ID NO: 1041930 - DNA, 15 bp, Homo sapiens
gtgtctgtacatgca

SEQ ID NO: 1041931 - DNA, 15 bp, Homo sapiens
tgtctgtacatgcaa

SEQ ID NO: 1041932 - DNA, 15 bp, Homo sapiens
gtctgtacatgcaaa

SEQ ID NO: 1041933 - DNA, 15 bp, Homo sapiens
tctgtacatgcaaat

SEQ ID NO: 1041934 - DNA, 15 bp, Homo sapiens
ctgtacatgcaaatg

SEQ ID NO: 1041935 - DNA, 15 bp, Homo sapiens
tgtacatgcaaatgg

SEQ ID NO: 1041936 - DNA, 15 bp, Homo sapiens
gtacatgcaaatgga

SEQ ID NO: 1041937 - DNA, 15 bp, Homo sapiens
tacatgcaaatggac

SEQ ID NO: 1041938 - DNA, 15 bp, Homo sapiens
acatgcaaatggaca

SEQ ID NO: 1041939 - DNA, 15 bp, Homo sapiens
catgcaaatggacac

SEQ ID NO: 1041940 - DNA, 15 bp, Homo sapiens
atgcaaatggacaca

SEQ ID NO: 1041941 - DNA, 15 bp, Homo sapiens
tgcaaatggacacac

SEQ ID NO: 1041942 - DNA, 15 bp, Homo sapiens
gcaaatggacacaca

SEQ ID NO: 1041943 - DNA, 15 bp, Homo sapiens
caaatggacacacat

SEQ ID NO: 1041944 - DNA, 15 bp, Homo sapiens
aaatggacacacatg

SEQ ID NO: 1041945 - DNA, 15 bp, Homo sapiens
aatggacacacatga

SEQ ID NO: 1041946 - DNA, 15 bp, Homo sapiens
atggacacacatgaa

SEQ ID NO: 1041947 - DNA, 15 bp, Homo sapiens
tggacacacatgaac

SEQ ID NO: 1041948 - DNA, 15 bp, Homo sapiens
ggacacacatgaaca

SEQ ID NO: 1041949 - DNA, 15 bp, Homo sapiens
gacacacatgaacac

SEQ ID NO: 1041950 - DNA, 15 bp, Homo sapiens
acacacatgaacaca

SEQ ID NO: 1041951 - DNA, 15 bp, Homo sapiens
cacacatgaacacac

SEQ ID NO: 1041952 - DNA, 15 bp, Homo sapiens
acacatgaacacacg

SEQ ID NO: 1041953 - DNA, 15 bp, Homo sapiens
cacatgaacacacgt

SEQ ID NO: 1041954 - DNA, 15 bp, Homo sapiens
acatgaacacacgtg

SEQ ID NO: 1041955 - DNA, 15 bp, Homo sapiens
catgaacacacgtgt

SEQ ID NO: 1041956 - DNA, 15 bp, Homo sapiens
atgaacacacgtgtt

SEQ ID NO: 1041957 - DNA, 15 bp, Homo sapiens
tgaacacacgtgttt

SEQ ID NO: 1041958 - DNA, 15 bp, Homo sapiens
gaacacacgtgttta

SEQ ID NO: 1041959 - DNA, 15 bp, Homo sapiens
aacacacgtgtttat

SEQ ID NO: 1041960 - DNA, 15 bp, Homo sapiens
acacacgtgtttatg

SEQ ID NO: 1041961 - DNA, 15 bp, Homo sapiens
cacacgtgtttatgc

SEQ ID NO: 1041962 - DNA, 15 bp, Homo sapiens
acacgtgtttatgca

SEQ ID NO: 1041963 - DNA, 15 bp, Homo sapiens
cacgtgtttatgcat

SEQ ID NO: 1041964 - DNA, 15 bp, Homo sapiens
acgtgtttatgcatg

SEQ ID NO: 1041965 - DNA, 15 bp, Homo sapiens
cgtgtttatgcatgt

SEQ ID NO: 1041966 - DNA, 15 bp, Homo sapiens
gtgtttatgcatgtc

SEQ ID NO: 1041967 - DNA, 15 bp, Homo sapiens
tgtttatgcatgtcc

SEQ ID NO: 1041968 - DNA, 15 bp, Homo sapiens
gtttatgcatgtcct

SEQ ID NO: 1041969 - DNA, 15 bp, Homo sapiens
tttatgcatgtcctt

SEQ ID NO: 1041970 - DNA, 15 bp, Homo sapiens
ttatgcatgtccttg

SEQ ID NO: 1041971 - DNA, 15 bp, Homo sapiens
tatgcatgtccttgt

SEQ ID NO: 1041972 - DNA, 15 bp, Homo sapiens
atgcatgtccttgtg

SEQ ID NO: 1041973 - DNA, 15 bp, Homo sapiens
tgcatgtccttgtgt

SEQ ID NO: 1041974 - DNA, 15 bp, Homo sapiens
gcatgtccttgtgtg

SEQ ID NO: 1041975 - DNA, 15 bp, Homo sapiens
catgtccttgtgtgt

SEQ ID NO: 1041976 - DNA, 15 bp, Homo sapiens
atgtccttgtgtgtt

SEQ ID NO: 1041977 - DNA, 15 bp, Homo sapiens
tgtccttgtgtgttg

SEQ ID NO: 1041978 - DNA, 15 bp, Homo sapiens
gtccttgtgtgttga

SEQ ID NO: 1041979 - DNA, 15 bp, Homo sapiens
tccttgtgtgttgat

SEQ ID NO: 1041980 - DNA, 15 bp, Homo sapiens
ccttgtgtgttgatg

SEQ ID NO: 1041981 - DNA, 15 bp, Homo sapiens
cttgtgtgttgatgt

SEQ ID NO: 1041982 - DNA, 15 bp, Homo sapiens
ttgtgtgttgatgtg

SEQ ID NO: 1041983 - DNA, 15 bp, Homo sapiens
tgtgtgttgatgtgt

SEQ ID NO: 1041984 - DNA, 15 bp, Homo sapiens
gtgtgttgatgtgtc

SEQ ID NO: 1041985 - DNA, 15 bp, Homo sapiens
tgtgttgatgtgtct

SEQ ID NO: 1041986 - DNA, 15 bp, Homo sapiens
gtgttgatgtgtctg

SEQ ID NO: 1041987 - DNA, 15 bp, Homo sapiens
tgttgatgtgtctgc

SEQ ID NO: 1041988 - DNA, 15 bp, Homo sapiens
gttgatgtgtctgca

SEQ ID NO: 1041989 - DNA, 15 bp, Homo sapiens
ttgatgtgtctgcac

SEQ ID NO: 1041990 - DNA, 15 bp, Homo sapiens
tgatgtgtctgcaca

SEQ ID NO: 1041991 - DNA, 15 bp, Homo sapiens
gatgtgtctgcacat

SEQ ID NO: 1041992 - DNA, 15 bp, Homo sapiens
atgtgtctgcacata

SEQ ID NO: 1041993 - DNA, 15 bp, Homo sapiens
tgtgtctgcacatac

SEQ ID NO: 1041994 - DNA, 15 bp, Homo sapiens
gtgtctgcacataca

SEQ ID NO: 1041995 - DNA, 15 bp, Homo sapiens
tgtctgcacatacat

SEQ ID NO: 1041996 - DNA, 15 bp, Homo sapiens
gtctgcacatacatg

SEQ ID NO: 1041997 - DNA, 15 bp, Homo sapiens
tctgcacatacatgt

SEQ ID NO: 1041998 - DNA, 15 bp, Homo sapiens
ctgcacatacatgtt

SEQ ID NO: 1041999 - DNA, 15 bp, Homo sapiens
tgcacatacatgttg

SEQ ID NO: 1042000 - DNA, 15 bp, Homo sapiens
gcacatacatgttga

SEQ ID NO: 1042001 - DNA, 15 bp, Homo sapiens
cacatacatgttgat

SEQ ID NO: 1042002 - DNA, 15 bp, Homo sapiens
acatacatgttgatg

SEQ ID NO: 1042003 - DNA, 15 bp, Homo sapiens
catacatgttgatgt

SEQ ID NO: 1042004 - DNA, 15 bp, Homo sapiens
atacatgttgatgtg

SEQ ID NO: 1042005 - DNA, 15 bp, Homo sapiens
tacatgttgatgtgt

SEQ ID NO: 1042006 - DNA, 15 bp, Homo sapiens
acatgttgatgtgtc

SEQ ID NO: 1042007 - DNA, 15 bp, Homo sapiens
catgttgatgtgtcc

SEQ ID NO: 1042008 - DNA, 15 bp, Homo sapiens
atgttgatgtgtccc

SEQ ID NO: 1042009 - DNA, 15 bp, Homo sapiens
tgttgatgtgtcccg

SEQ ID NO: 1042010 - DNA, 15 bp, Homo sapiens
gttgatgtgtcccgc

SEQ ID NO: 1042011 - DNA, 15 bp, Homo sapiens
ttgatgtgtcccgct

SEQ ID NO: 1042012 - DNA, 15 bp, Homo sapiens
tgatgtgtcccgctg

SEQ ID NO: 1042013 - DNA, 15 bp, Homo sapiens
gatgtgtcccgctgt

SEQ ID NO: 1042014 - DNA, 15 bp, Homo sapiens
atgtgtcccgctgtg

SEQ ID NO: 1042015 - DNA, 15 bp, Homo sapiens
tgtgtcccgctgtgg

SEQ ID NO: 1042016 - DNA, 15 bp, Homo sapiens
gtgtcccgctgtggt

SEQ ID NO: 1042017 - DNA, 15 bp, Homo sapiens
tgtcccgctgtggtt

SEQ ID NO: 1042018 - DNA, 15 bp, Homo sapiens
gtcccgctgtggttg

SEQ ID NO: 1042019 - DNA, 15 bp, Homo sapiens
tcccgctgtggttgg

SEQ ID NO: 1042020 - DNA, 15 bp, Homo sapiens
cccgctgtggttggc

SEQ ID NO: 1042021 - DNA, 15 bp, Homo sapiens
ccgctgtggttggcc

SEQ ID NO: 1042022 - DNA, 15 bp, Homo sapiens
cgctgtggttggcct

SEQ ID NO: 1042023 - DNA, 15 bp, Homo sapiens
gctgtggttggcctt

SEQ ID NO: 1042024 - DNA, 15 bp, Homo sapiens
ctgtggttggccttt

SEQ ID NO: 1042025 - DNA, 15 bp, Homo sapiens
tgtggttggcctttc

SEQ ID NO: 1042026 - DNA, 15 bp, Homo sapiens
gtggttggcctttct

SEQ ID NO: 1042027 - DNA, 15 bp, Homo sapiens
tggttggcctttctg

SEQ ID NO: 1042028 - DNA, 15 bp, Homo sapiens
ggttggcctttctgg

SEQ ID NO: 1042029 - DNA, 15 bp, Homo sapiens
gttggcctttctggg

SEQ ID NO: 1042030 - DNA, 15 bp, Homo sapiens
ttggcctttctgggg

SEQ ID NO: 1042031 - DNA, 15 bp, Homo sapiens
tggcctttctggggc

SEQ ID NO: 1042032 - DNA, 15 bp, Homo sapiens
ggcctttctggggcc

SEQ ID NO: 1042033 - DNA, 15 bp, Homo sapiens
gcctttctggggcca

SEQ ID NO: 1042034 - DNA, 15 bp, Homo sapiens
cctttctggggccag

SEQ ID NO: 1042035 - DNA, 15 bp, Homo sapiens
ctttctggggccagg

SEQ ID NO: 1042036 - DNA, 15 bp, Homo sapiens
tttctggggccaggc

SEQ ID NO: 1042037 - DNA, 15 bp, Homo sapiens
ttctggggccaggcc

SEQ ID NO: 1042038 - DNA, 15 bp, Homo sapiens
tctggggccaggccc

SEQ ID NO: 1042039 - DNA, 15 bp, Homo sapiens
ctggggccaggccca

SEQ ID NO: 1042040 - DNA, 15 bp, Homo sapiens
tggggccaggcccag

SEQ ID NO: 1042041 - DNA, 15 bp, Homo sapiens
ggggccaggcccagc

SEQ ID NO: 1042042 - DNA, 15 bp, Homo sapiens
gggccaggcccagca

SEQ ID NO: 1042043 - DNA, 15 bp, Homo sapiens
ggccaggcccagcac

SEQ ID NO: 1042044 - DNA, 15 bp, Homo sapiens
gccaggcccagcacc

SEQ ID NO: 1042045 - DNA, 15 bp, Homo sapiens
ccaggcccagcacct

SEQ ID NO: 1042046 - DNA, 15 bp, Homo sapiens
caggcccagcacctg

SEQ ID NO: 1042047 - DNA, 15 bp, Homo sapiens
aggcccagcacctgg

SEQ ID NO: 1042048 - DNA, 15 bp, Homo sapiens
ggcccagcacctggg

SEQ ID NO: 1042049 - DNA, 15 bp, Homo sapiens
gcccagcacctgggg

SEQ ID NO: 1042050 - DNA, 15 bp, Homo sapiens
cccagcacctggggt

SEQ ID NO: 1042051 - DNA, 15 bp, Homo sapiens
ccagcacctggggtt

SEQ ID NO: 1042052 - DNA, 15 bp, Homo sapiens
cagcacctggggttt

SEQ ID NO: 1042053 - DNA, 15 bp, Homo sapiens
agcacctggggtttc

SEQ ID NO: 1042054 - DNA, 15 bp, Homo sapiens
gcacctggggtttcc

SEQ ID NO: 1042055 - DNA, 15 bp, Homo sapiens
cacctggggtttcca

SEQ ID NO: 1042056 - DNA, 15 bp, Homo sapiens
acctggggtttccag

SEQ ID NO: 1042057 - DNA, 15 bp, Homo sapiens
cctggggtttccagg

SEQ ID NO: 1042058 - DNA, 15 bp, Homo sapiens
ctggggtttccagga

SEQ ID NO: 1042059 - DNA, 15 bp, Homo sapiens
tggggtttccaggaa

SEQ ID NO: 1042060 - DNA, 15 bp, Homo sapiens
ggggtttccaggaaa

SEQ ID NO: 1042061 - DNA, 15 bp, Homo sapiens
gggtttccaggaaac

SEQ ID NO: 1042062 - DNA, 15 bp, Homo sapiens
ggtttccaggaaaca

SEQ ID NO: 1042063 - DNA, 15 bp, Homo sapiens
gtttccaggaaacat

SEQ ID NO: 1042064 - DNA, 15 bp, Homo sapiens
tttccaggaaacatt

SEQ ID NO: 1042065 - DNA, 15 bp, Homo sapiens
ttccaggaaacattc

SEQ ID NO: 1042066 - DNA, 15 bp, Homo sapiens
tccaggaaacattcc

SEQ ID NO: 1042067 - DNA, 15 bp, Homo sapiens
ccaggaaacattccc

SEQ ID NO: 1042068 - DNA, 15 bp, Homo sapiens
caggaaacattccct

SEQ ID NO: 1042069 - DNA, 15 bp, Homo sapiens
aggaaacattccctg

SEQ ID NO: 1042070 - DNA, 15 bp, Homo sapiens
ggaaacattccctgt

SEQ ID NO: 1042071 - DNA, 15 bp, Homo sapiens
gaaacattccctgtc

SEQ ID NO: 1042072 - DNA, 15 bp, Homo sapiens
aaacattccctgtcc

SEQ ID NO: 1042073 - DNA, 15 bp, Homo sapiens
aacattccctgtccc

SEQ ID NO: 1042074 - DNA, 15 bp, Homo sapiens
acattccctgtccct

SEQ ID NO: 1042075 - DNA, 15 bp, Homo sapiens
cattccctgtccctt

SEQ ID NO: 1042076 - DNA, 15 bp, Homo sapiens
attccctgtcccttc

SEQ ID NO: 1042077 - DNA, 15 bp, Homo sapiens
ttccctgtcccttcc

SEQ ID NO: 1042078 - DNA, 15 bp, Homo sapiens
tccctgtcccttccc

SEQ ID NO: 1042079 - DNA, 15 bp, Homo sapiens
ccctgtcccttcccg

SEQ ID NO: 1042080 - DNA, 15 bp, Homo sapiens
cctgtcccttcccgg

SEQ ID NO: 1042081 - DNA, 15 bp, Homo sapiens
ctgtcccttcccgga

SEQ ID NO: 1042082 - DNA, 15 bp, Homo sapiens
tgtcccttcccggaa

SEQ ID NO: 1042083 - DNA, 15 bp, Homo sapiens
gtcccttcccggaat

SEQ ID NO: 1042084 - DNA, 15 bp, Homo sapiens
tcccttcccggaatg

SEQ ID NO: 1042085 - DNA, 15 bp, Homo sapiens
cccttcccggaatgg

SEQ ID NO: 1042086 - DNA, 15 bp, Homo sapiens
ccttcccggaatggc

SEQ ID NO: 1042087 - DNA, 15 bp, Homo sapiens
cttcccggaatggcc

SEQ ID NO: 1042088 - DNA, 15 bp, Homo sapiens
ttcccggaatggccg

SEQ ID NO: 1042089 - DNA, 15 bp, Homo sapiens
tcccggaatggccgg

SEQ ID NO: 1042090 - DNA, 15 bp, Homo sapiens
cccggaatggccggt

SEQ ID NO: 1042091 - DNA, 15 bp, Homo sapiens
ccggaatggccggta

SEQ ID NO: 1042092 - DNA, 15 bp, Homo sapiens
cggaatggccggtac

SEQ ID NO: 1042093 - DNA, 15 bp, Homo sapiens
ggaatggccggtact

SEQ ID NO: 1042094 - DNA, 15 bp, Homo sapiens
gaatggccggtactt

SEQ ID NO: 1042095 - DNA, 15 bp, Homo sapiens
aatggccggtacttg

SEQ ID NO: 1042096 - DNA, 15 bp, Homo sapiens
atggccggtacttgc

SEQ ID NO: 1042097 - DNA, 15 bp, Homo sapiens
tggccggtacttgct

SEQ ID NO: 1042098 - DNA, 15 bp, Homo sapiens
ggccggtacttgctg

SEQ ID NO: 1042099 - DNA, 15 bp, Homo sapiens
gccggtacttgctgt

SEQ ID NO: 1042100 - DNA, 15 bp, Homo sapiens
ccggtacttgctgtg

SEQ ID NO: 1042101 - DNA, 15 bp, Homo sapiens
cggtacttgctgtgc

SEQ ID NO: 1042102 - DNA, 15 bp, Homo sapiens
ggtacttgctgtgcc

SEQ ID NO: 1042103 - DNA, 15 bp, Homo sapiens
gtacttgctgtgcct

SEQ ID NO: 1042104 - DNA, 15 bp, Homo sapiens
tacttgctgtgcctc

SEQ ID NO: 1042105 - DNA, 15 bp, Homo sapiens
acttgctgtgcctcc

SEQ ID NO: 1042106 - DNA, 15 bp, Homo sapiens
cttgctgtgcctccg

SEQ ID NO: 1042107 - DNA, 15 bp, Homo sapiens
ttgctgtgcctccgc

SEQ ID NO: 1042108 - DNA, 15 bp, Homo sapiens
tgctgtgcctccgcc

SEQ ID NO: 1042109 - DNA, 15 bp, Homo sapiens
gctgtgcctccgccg

SEQ ID NO: 1042110 - DNA, 15 bp, Homo sapiens
ctgtgcctccgccgg

SEQ ID NO: 1042111 - DNA, 15 bp, Homo sapiens
tgtgcctccgccggg

SEQ ID NO: 1042112 - DNA, 15 bp, Homo sapiens
gtgcctccgccggga

SEQ ID NO: 1042113 - DNA, 15 bp, Homo sapiens
tgcctccgccgggag

SEQ ID NO: 1042114 - DNA, 15 bp, Homo sapiens
gcctccgccgggaga

SEQ ID NO: 1042115 - DNA, 15 bp, Homo sapiens
cctccgccgggagat

SEQ ID NO: 1042116 - DNA, 15 bp, Homo sapiens
ctccgccgggagatg

SEQ ID NO: 1042117 - DNA, 15 bp, Homo sapiens
tccgccgggagatgc

SEQ ID NO: 1042118 - DNA, 15 bp, Homo sapiens
ccgccgggagatgca

SEQ ID NO: 1042119 - DNA, 15 bp, Homo sapiens
cgccgggagatgcac

SEQ ID NO: 1042120 - DNA, 15 bp, Homo sapiens
gccgggagatgcacc

SEQ ID NO: 1042121 - DNA, 15 bp, Homo sapiens
ccgggagatgcaccc

SEQ ID NO: 1042122 - DNA, 15 bp, Homo sapiens
cgggagatgcaccct

SEQ ID NO: 1042123 - DNA, 15 bp, Homo sapiens
gggagatgcaccctg

SEQ ID NO: 1042124 - DNA, 15 bp, Homo sapiens
ggagatgcaccctga

SEQ ID NO: 1042125 - DNA, 15 bp, Homo sapiens
gagatgcaccctgat

SEQ ID NO: 1042126 - DNA, 15 bp, Homo sapiens
agatgcaccctgatt

SEQ ID NO: 1042127 - DNA, 15 bp, Homo sapiens
gatgcaccctgatta

SEQ ID NO: 1042128 - DNA, 15 bp, Homo sapiens
atgcaccctgattaa

SEQ ID NO: 1042129 - DNA, 15 bp, Homo sapiens
tgcaccctgattaac

SEQ ID NO: 1042130 - DNA, 15 bp, Homo sapiens
gcaccctgattaact

SEQ ID NO: 1042131 - DNA, 15 bp, Homo sapiens
caccctgattaacta

SEQ ID NO: 1042132 - DNA, 15 bp, Homo sapiens
accctgattaactag

SEQ ID NO: 1042133 - DNA, 15 bp, Homo sapiens
ccctgattaactaga

SEQ ID NO: 1042134 - DNA, 15 bp, Homo sapiens
cctgattaactagaa

SEQ ID NO: 1042135 - DNA, 15 bp, Homo sapiens
ctgattaactagaac

SEQ ID NO: 1042136 - DNA, 15 bp, Homo sapiens
tgattaactagaacg

SEQ ID NO: 1042137 - DNA, 15 bp, Homo sapiens
gattaactagaacgt

SEQ ID NO: 1042138 - DNA, 15 bp, Homo sapiens
attaactagaacgtg

SEQ ID NO: 1042139 - DNA, 15 bp, Homo sapiens
ttaactagaacgtgg

SEQ ID NO: 1042140 - DNA, 15 bp, Homo sapiens
taactagaacgtggc

SEQ ID NO: 1042141 - DNA, 15 bp, Homo sapiens
aactagaacgtggcg

SEQ ID NO: 1042142 - DNA, 15 bp, Homo sapiens
actagaacgtggcga

SEQ ID NO: 1042143 - DNA, 15 bp, Homo sapiens
ctagaacgtggcgaa

SEQ ID NO: 1042144 - DNA, 15 bp, Homo sapiens
tagaacgtggcgaag

SEQ ID NO: 1042145 - DNA, 15 bp, Homo sapiens
agaacgtggcgaagc

SEQ ID NO: 1042146 - DNA, 15 bp, Homo sapiens
gaacgtggcgaagct

SEQ ID NO: 1042147 - DNA, 15 bp, Homo sapiens
aacgtggcgaagctc

SEQ ID NO: 1042148 - DNA, 15 bp, Homo sapiens
acgtggcgaagctca

SEQ ID NO: 1042149 - DNA, 15 bp, Homo sapiens
cgtggcgaagctcag

SEQ ID NO: 1042150 - DNA, 15 bp, Homo sapiens
gtggcgaagctcagc

SEQ ID NO: 1042151 - DNA, 15 bp, Homo sapiens
tggcgaagctcagcc

SEQ ID NO: 1042152 - DNA, 15 bp, Homo sapiens
ggcgaagctcagcca

SEQ ID NO: 1042153 - DNA, 15 bp, Homo sapiens
gcgaagctcagccac

SEQ ID NO: 1042154 - DNA, 15 bp, Homo sapiens
cgaagctcagccacc

SEQ ID NO: 1042155 - DNA, 15 bp, Homo sapiens
gaagctcagccacct

SEQ ID NO: 1042156 - DNA, 15 bp, Homo sapiens
aagctcagccacctg

SEQ ID NO: 1042157 - DNA, 15 bp, Homo sapiens
agctcagccacctgg

SEQ ID NO: 1042158 - DNA, 15 bp, Homo sapiens
gctcagccacctgga

SEQ ID NO: 1042159 - DNA, 15 bp, Homo sapiens
ctcagccacctggaa

SEQ ID NO: 1042160 - DNA, 15 bp, Homo sapiens
tcagccacctggaat

SEQ ID NO: 1042161 - DNA, 15 bp, Homo sapiens
cagccacctggaatc

SEQ ID NO: 1042162 - DNA, 15 bp, Homo sapiens
agccacctggaatcg

SEQ ID NO: 1042163 - DNA, 15 bp, Homo sapiens
gccacctggaatcgc

SEQ ID NO: 1042164 - DNA, 15 bp, Homo sapiens
ccacctggaatcgcc

SEQ ID NO: 1042165 - DNA, 15 bp, Homo sapiens
cacctggaatcgcct

SEQ ID NO: 1042166 - DNA, 15 bp, Homo sapiens
acctggaatcgcctt

SEQ ID NO: 1042167 - DNA, 15 bp, Homo sapiens
cctggaatcgcctta

SEQ ID NO: 1042168 - DNA, 15 bp, Homo sapiens
ctggaatcgccttac

SEQ ID NO: 1042169 - DNA, 15 bp, Homo sapiens
tggaatcgccttacc

SEQ ID NO: 1042170 - DNA, 15 bp, Homo sapiens
ggaatcgccttaccc

SEQ ID NO: 1042171 - DNA, 15 bp, Homo sapiens
gaatcgccttaccct

SEQ ID NO: 1042172 - DNA, 15 bp, Homo sapiens
aatcgccttaccctg

SEQ ID NO: 1042173 - DNA, 15 bp, Homo sapiens
atcgccttaccctgg

SEQ ID NO: 1042174 - DNA, 15 bp, Homo sapiens
tcgccttaccctggc

SEQ ID NO: 1042175 - DNA, 15 bp, Homo sapiens
cgccttaccctggcc

SEQ ID NO: 1042176 - DNA, 15 bp, Homo sapiens
gccttaccctggcct

SEQ ID NO: 1042177 - DNA, 15 bp, Homo sapiens
ccttaccctggcctt

SEQ ID NO: 1042178 - DNA, 15 bp, Homo sapiens
cttaccctggccttt

SEQ ID NO: 1042179 - DNA, 15 bp, Homo sapiens
ttaccctggcctttg

SEQ ID NO: 1042180 - DNA, 15 bp, Homo sapiens
taccctggcctttgg

SEQ ID NO: 1042181 - DNA, 15 bp, Homo sapiens
accctggcctttggt

SEQ ID NO: 1042182 - DNA, 15 bp, Homo sapiens
ccctggcctttggtt

SEQ ID NO: 1042183 - DNA, 15 bp, Homo sapiens
cctggcctttggttt

SEQ ID NO: 1042184 - DNA, 15 bp, Homo sapiens
ctggcctttggtttc

SEQ ID NO: 1042185 - DNA, 15 bp, Homo sapiens
tggcctttggtttct

SEQ ID NO: 1042186 - DNA, 15 bp, Homo sapiens
ggcctttggtttcta

SEQ ID NO: 1042187 - DNA, 15 bp, Homo sapiens
gcctttggtttctag

SEQ ID NO: 1042188 - DNA, 15 bp, Homo sapiens
cctttggtttctagc

SEQ ID NO: 1042189 - DNA, 15 bp, Homo sapiens
ctttggtttctagca

SEQ ID NO: 1042190 - DNA, 15 bp, Homo sapiens
tttggtttctagcaa

SEQ ID NO: 1042191 - DNA, 15 bp, Homo sapiens
ttggtttctagcaaa

SEQ ID NO: 1042192 - DNA, 15 bp, Homo sapiens
tggtttctagcaaat

SEQ ID NO: 1042193 - DNA, 15 bp, Homo sapiens
ggtttctagcaaatg

SEQ ID NO: 1042194 - DNA, 15 bp, Homo sapiens
gtttctagcaaatgg

SEQ ID NO: 1042195 - DNA, 15 bp, Homo sapiens
tttctagcaaatggg

SEQ ID NO: 1042196 - DNA, 15 bp, Homo sapiens
ttctagcaaatggga

SEQ ID NO: 1042197 - DNA, 15 bp, Homo sapiens
tctagcaaatgggat

SEQ ID NO: 1042198 - DNA, 15 bp, Homo sapiens
ctagcaaatgggatg

SEQ ID NO: 1042199 - DNA, 15 bp, Homo sapiens
tagcaaatgggatgg

SEQ ID NO: 1042200 - DNA, 15 bp, Homo sapiens
agcaaatgggatgga

SEQ ID NO: 1042201 - DNA, 15 bp, Homo sapiens
gcaaatgggatggaa

SEQ ID NO: 1042202 - DNA, 15 bp, Homo sapiens
caaatgggatggaag

SEQ ID NO: 1042203 - DNA, 15 bp, Homo sapiens
aaatgggatggaagt

SEQ ID NO: 1042204 - DNA, 15 bp, Homo sapiens
aatgggatggaagtg

SEQ ID NO: 1042205 - DNA, 15 bp, Homo sapiens
atgggatggaagtga

SEQ ID NO: 1042206 - DNA, 15 bp, Homo sapiens
tgggatggaagtgag

SEQ ID NO: 1042207 - DNA, 15 bp, Homo sapiens
gggatggaagtgagt

SEQ ID NO: 1042208 - DNA, 15 bp, Homo sapiens
ggatggaagtgagtc

SEQ ID NO: 1042209 - DNA, 15 bp, Homo sapiens
gatggaagtgagtcc

SEQ ID NO: 1042210 - DNA, 15 bp, Homo sapiens
atggaagtgagtccc

SEQ ID NO: 1042211 - DNA, 15 bp, Homo sapiens
tggaagtgagtcccc

SEQ ID NO: 1042212 - DNA, 15 bp, Homo sapiens
ggaagtgagtcccca

SEQ ID NO: 1042213 - DNA, 15 bp, Homo sapiens
gaagtgagtccccat

SEQ ID NO: 1042214 - DNA, 15 bp, Homo sapiens
aagtgagtccccatg

SEQ ID NO: 1042215 - DNA, 15 bp, Homo sapiens
agtgagtccccatgg

SEQ ID NO: 1042216 - DNA, 15 bp, Homo sapiens
gtgagtccccatgga

SEQ ID NO: 1042217 - DNA, 15 bp, Homo sapiens
tgagtccccatggag

SEQ ID NO: 1042218 - DNA, 15 bp, Homo sapiens
gagtccccatggagg

SEQ ID NO: 1042219 - DNA, 15 bp, Homo sapiens
agtccccatggaggg

SEQ ID NO: 1042220 - DNA, 15 bp, Homo sapiens
gtccccatggagggc

SEQ ID NO: 1042221 - DNA, 15 bp, Homo sapiens
tccccatggagggct

SEQ ID NO: 1042222 - DNA, 15 bp, Homo sapiens
ccccatggagggctt

SEQ ID NO: 1042223 - DNA, 15 bp, Homo sapiens
cccatggagggcttg

SEQ ID NO: 1042224 - DNA, 15 bp, Homo sapiens
ccatggagggcttgc

SEQ ID NO: 1042225 - DNA, 15 bp, Homo sapiens
catggagggcttgct

SEQ ID NO: 1042226 - DNA, 15 bp, Homo sapiens
atggagggcttgctc

SEQ ID NO: 1042227 - DNA, 15 bp, Homo sapiens
tggagggcttgctcc

SEQ ID NO: 1042228 - DNA, 15 bp, Homo sapiens
ggagggcttgctcca

SEQ ID NO: 1042229 - DNA, 15 bp, Homo sapiens
gagggcttgctccat

SEQ ID NO: 1042230 - DNA, 15 bp, Homo sapiens
agggcttgctccatg

SEQ ID NO: 1042231 - DNA, 15 bp, Homo sapiens
gggcttgctccatga

SEQ ID NO: 1042232 - DNA, 15 bp, Homo sapiens
ggcttgctccatgaa

SEQ ID NO: 1042233 - DNA, 15 bp, Homo sapiens
gcttgctccatgaag

SEQ ID NO: 1042234 - DNA, 15 bp, Homo sapiens
cttgctccatgaagg

SEQ ID NO: 1042235 - DNA, 15 bp, Homo sapiens
ttgctccatgaaggt

SEQ ID NO: 1042236 - DNA, 15 bp, Homo sapiens
tgctccatgaaggtg

SEQ ID NO: 1042237 - DNA, 15 bp, Homo sapiens
gctccatgaaggtgt

SEQ ID NO: 1042238 - DNA, 15 bp, Homo sapiens
ctccatgaaggtgtt

SEQ ID NO: 1042239 - DNA, 15 bp, Homo sapiens
tccatgaaggtgttt

SEQ ID NO: 1042240 - DNA, 15 bp, Homo sapiens
ccatgaaggtgtttt

SEQ ID NO: 1042241 - DNA, 15 bp, Homo sapiens
catgaaggtgttttt

SEQ ID NO: 1042242 - DNA, 15 bp, Homo sapiens
atgaaggtgtttttc

SEQ ID NO: 1042243 - DNA, 15 bp, Homo sapiens
tgaaggtgtttttcc

SEQ ID NO: 1042244 - DNA, 15 bp, Homo sapiens
gaaggtgtttttcct

SEQ ID NO: 1042245 - DNA, 15 bp, Homo sapiens
aaggtgtttttcctg

SEQ ID NO: 1042246 - DNA, 15 bp, Homo sapiens
aggtgtttttcctgg

SEQ ID NO: 1042247 - DNA, 15 bp, Homo sapiens
ggtgtttttcctgga

SEQ ID NO: 1042248 - DNA, 15 bp, Homo sapiens
gtgtttttcctggat

SEQ ID NO: 1042249 - DNA, 15 bp, Homo sapiens
tgtttttcctggatg

SEQ ID NO: 1042250 - DNA, 15 bp, Homo sapiens
gtttttcctggatga

SEQ ID NO: 1042251 - DNA, 15 bp, Homo sapiens
tttttcctggatgag

SEQ ID NO: 1042252 - DNA, 15 bp, Homo sapiens
ttttcctggatgagt

SEQ ID NO: 1042253 - DNA, 15 bp, Homo sapiens
tttcctggatgagtc

SEQ ID NO: 1042254 - DNA, 15 bp, Homo sapiens
ttcctggatgagtct

SEQ ID NO: 1042255 - DNA, 15 bp, Homo sapiens
tcctggatgagtctt

SEQ ID NO: 1042256 - DNA, 15 bp, Homo sapiens
cctggatgagtcttg

SEQ ID NO: 1042257 - DNA, 15 bp, Homo sapiens
ctggatgagtcttgg

SEQ ID NO: 1042258 - DNA, 15 bp, Homo sapiens
tggatgagtcttggc

SEQ ID NO: 1042259 - DNA, 15 bp, Homo sapiens
ggatgagtcttggcc

SEQ ID NO: 1042260 - DNA, 15 bp, Homo sapiens
gatgagtcttggccc

SEQ ID NO: 1042261 - DNA, 15 bp, Homo sapiens
atgagtcttggcccc

SEQ ID NO: 1042262 - DNA, 15 bp, Homo sapiens
tgagtcttggcccca

SEQ ID NO: 1042263 - DNA, 15 bp, Homo sapiens
gagtcttggccccag

SEQ ID NO: 1042264 - DNA, 15 bp, Homo sapiens
agtcttggccccagt

SEQ ID NO: 1042265 - DNA, 15 bp, Homo sapiens
gtcttggccccagtg

SEQ ID NO: 1042266 - DNA, 15 bp, Homo sapiens
tcttggccccagtgg

SEQ ID NO: 1042267 - DNA, 15 bp, Homo sapiens
cttggccccagtggc

SEQ ID NO: 1042268 - DNA, 15 bp, Homo sapiens
ttggccccagtggcg

SEQ ID NO: 1042269 - DNA, 15 bp, Homo sapiens
tggccccagtggcga

SEQ ID NO: 1042270 - DNA, 15 bp, Homo sapiens
ggccccagtggcgat

SEQ ID NO: 1042271 - DNA, 15 bp, Homo sapiens
gccccagtggcgatt

SEQ ID NO: 1042272 - DNA, 15 bp, Homo sapiens
ccccagtggcgattt

SEQ ID NO: 1042273 - DNA, 15 bp, Homo sapiens
cccagtggcgatttg

SEQ ID NO: 1042274 - DNA, 15 bp, Homo sapiens
ccagtggcgatttgc

SEQ ID NO: 1042275 - DNA, 15 bp, Homo sapiens
cagtggcgatttgct

SEQ ID NO: 1042276 - DNA, 15 bp, Homo sapiens
agtggcgatttgctg

SEQ ID NO: 1042277 - DNA, 15 bp, Homo sapiens
gtggcgatttgctgc

SEQ ID NO: 1042278 - DNA, 15 bp, Homo sapiens
tggcgatttgctgca

SEQ ID NO: 1042279 - DNA, 15 bp, Homo sapiens
ggcgatttgctgcag

SEQ ID NO: 1042280 - DNA, 15 bp, Homo sapiens
gcgatttgctgcagg

SEQ ID NO: 1042281 - DNA, 15 bp, Homo sapiens
cgatttgctgcaggc

SEQ ID NO: 1042282 - DNA, 15 bp, Homo sapiens
gatttgctgcaggct

SEQ ID NO: 1042283 - DNA, 15 bp, Homo sapiens
atttgctgcaggctt

SEQ ID NO: 1042284 - DNA, 15 bp, Homo sapiens
tttgctgcaggcttg

SEQ ID NO: 1042285 - DNA, 15 bp, Homo sapiens
ttgctgcaggcttgt

SEQ ID NO: 1042286 - DNA, 15 bp, Homo sapiens
tgctgcaggcttgtt

SEQ ID NO: 1042287 - DNA, 15 bp, Homo sapiens
gctgcaggcttgttg

SEQ ID NO: 1042288 - DNA, 15 bp, Homo sapiens
ctgcaggcttgttgg

SEQ ID NO: 1042289 - DNA, 15 bp, Homo sapiens
tgcaggcttgttggc

SEQ ID NO: 1042290 - DNA, 15 bp, Homo sapiens
gcaggcttgttggca

SEQ ID NO: 1042291 - DNA, 15 bp, Homo sapiens
caggcttgttggcac

SEQ ID NO: 1042292 - DNA, 15 bp, Homo sapiens
aggcttgttggcact

SEQ ID NO: 1042293 - DNA, 15 bp, Homo sapiens
ggcttgttggcactg

SEQ ID NO: 1042294 - DNA, 15 bp, Homo sapiens
gcttgttggcactgt

SEQ ID NO: 1042295 - DNA, 15 bp, Homo sapiens
cttgttggcactgtc

SEQ ID NO: 1042296 - DNA, 15 bp, Homo sapiens
ttgttggcactgtca

SEQ ID NO: 1042297 - DNA, 15 bp, Homo sapiens
tgttggcactgtcat

SEQ ID NO: 1042298 - DNA, 15 bp, Homo sapiens
gttggcactgtcatt

SEQ ID NO: 1042299 - DNA, 15 bp, Homo sapiens
ttggcactgtcattc

SEQ ID NO: 1042300 - DNA, 15 bp, Homo sapiens
tggcactgtcattcg

SEQ ID NO: 1042301 - DNA, 15 bp, Homo sapiens
ggcactgtcattcgt

SEQ ID NO: 1042302 - DNA, 15 bp, Homo sapiens
gcactgtcattcgtg

SEQ ID NO: 1042303 - DNA, 15 bp, Homo sapiens
cactgtcattcgtgg

SEQ ID NO: 1042304 - DNA, 15 bp, Homo sapiens
actgtcattcgtggg

SEQ ID NO: 1042305 - DNA, 15 bp, Homo sapiens
ctgtcattcgtgggt

SEQ ID NO: 1042306 - DNA, 15 bp, Homo sapiens
tgtcattcgtgggtc

SEQ ID NO: 1042307 - DNA, 15 bp, Homo sapiens
gtcattcgtgggtcc

SEQ ID NO: 1042308 - DNA, 15 bp, Homo sapiens
tcattcgtgggtcct

SEQ ID NO: 1042309 - DNA, 15 bp, Homo sapiens
cattcgtgggtcctg

SEQ ID NO: 1042310 - DNA, 15 bp, Homo sapiens
attcgtgggtcctgc

SEQ ID NO: 1042311 - DNA, 15 bp, Homo sapiens
ttcgtgggtcctgca

SEQ ID NO: 1042312 - DNA, 15 bp, Homo sapiens
tcgtgggtcctgcat

SEQ ID NO: 1042313 - DNA, 15 bp, Homo sapiens
cgtgggtcctgcatg

SEQ ID NO: 1042314 - DNA, 15 bp, Homo sapiens
gtgggtcctgcatgg

SEQ ID NO: 1042315 - DNA, 15 bp, Homo sapiens
tgggtcctgcatgga

SEQ ID NO: 1042316 - DNA, 15 bp, Homo sapiens
gggtcctgcatggag

SEQ ID NO: 1042317 - DNA, 15 bp, Homo sapiens
ggtcctgcatggagg

SEQ ID NO: 1042318 - DNA, 15 bp, Homo sapiens
gtcctgcatggaggt

SEQ ID NO: 1042319 - DNA, 15 bp, Homo sapiens
tcctgcatggaggtt

SEQ ID NO: 1042320 - DNA, 15 bp, Homo sapiens
cctgcatggaggttc

SEQ ID NO: 1042321 - DNA, 15 bp, Homo sapiens
ctgcatggaggttcc

SEQ ID NO: 1042322 - DNA, 15 bp, Homo sapiens
tgcatggaggttcct

SEQ ID NO: 1042323 - DNA, 15 bp, Homo sapiens
gcatggaggttcctt

SEQ ID NO: 1042324 - DNA, 15 bp, Homo sapiens
catggaggttcctta

SEQ ID NO: 1042325 - DNA, 15 bp, Homo sapiens
atggaggttccttag

SEQ ID NO: 1042326 - DNA, 15 bp, Homo sapiens
tggaggttccttagt

SEQ ID NO: 1042327 - DNA, 15 bp, Homo sapiens
ggaggttccttagtg

SEQ ID NO: 1042328 - DNA, 15 bp, Homo sapiens
gaggttccttagtgt

SEQ ID NO: 1042329 - DNA, 15 bp, Homo sapiens
aggttccttagtgtc

SEQ ID NO: 1042330 - DNA, 15 bp, Homo sapiens
ggttccttagtgtcc

SEQ ID NO: 1042331 - DNA, 15 bp, Homo sapiens
gttccttagtgtcca

SEQ ID NO: 1042332 - DNA, 15 bp, Homo sapiens
ttccttagtgtccag

SEQ ID NO: 1042333 - DNA, 15 bp, Homo sapiens
tccttagtgtccaga

SEQ ID NO: 1042334 - DNA, 15 bp, Homo sapiens
ccttagtgtccagag

SEQ ID NO: 1042335 - DNA, 15 bp, Homo sapiens
cttagtgtccagagg

SEQ ID NO: 1042336 - DNA, 15 bp, Homo sapiens
ttagtgtccagaggg

SEQ ID NO: 1042337 - DNA, 15 bp, Homo sapiens
tagtgtccagagggt

SEQ ID NO: 1042338 - DNA, 15 bp, Homo sapiens
agtgtccagagggtg

SEQ ID NO: 1042339 - DNA, 15 bp, Homo sapiens
gtgtccagagggtga

SEQ ID NO: 1042340 - DNA, 15 bp, Homo sapiens
tgtccagagggtgat

SEQ ID NO: 1042341 - DNA, 15 bp, Homo sapiens
gtccagagggtgatt

SEQ ID NO: 1042342 - DNA, 15 bp, Homo sapiens
tccagagggtgattc

SEQ ID NO: 1042343 - DNA, 15 bp, Homo sapiens
ccagagggtgattcc

SEQ ID NO: 1042344 - DNA, 15 bp, Homo sapiens
cagagggtgattcca

SEQ ID NO: 1042345 - DNA, 15 bp, Homo sapiens
agagggtgattccat

SEQ ID NO: 1042346 - DNA, 15 bp, Homo sapiens
gagggtgattccatg

SEQ ID NO: 1042347 - DNA, 15 bp, Homo sapiens
agggtgattccatgt

SEQ ID NO: 1042348 - DNA, 15 bp, Homo sapiens
gggtgattccatgtc

SEQ ID NO: 1042349 - DNA, 15 bp, Homo sapiens
ggtgattccatgtct

SEQ ID NO: 1042350 - DNA, 15 bp, Homo sapiens
gtgattccatgtctg

SEQ ID NO: 1042351 - DNA, 15 bp, Homo sapiens
tgattccatgtctgt

SEQ ID NO: 1042352 - DNA, 15 bp, Homo sapiens
gattccatgtctgtg

SEQ ID NO: 1042353 - DNA, 15 bp, Homo sapiens
attccatgtctgtgg

SEQ ID NO: 1042354 - DNA, 15 bp, Homo sapiens
ttccatgtctgtggt

SEQ ID NO: 1042355 - DNA, 15 bp, Homo sapiens
tccatgtctgtggtc

SEQ ID NO: 1042356 - DNA, 15 bp, Homo sapiens
ccatgtctgtggtca

SEQ ID NO: 1042357 - DNA, 15 bp, Homo sapiens
catgtctgtggtcag

SEQ ID NO: 1042358 - DNA, 15 bp, Homo sapiens
atgtctgtggtcagc

SEQ ID NO: 1042359 - DNA, 15 bp, Homo sapiens
tgtctgtggtcagca

SEQ ID NO: 1042360 - DNA, 15 bp, Homo sapiens
gtctgtggtcagcaa

SEQ ID NO: 1042361 - DNA, 15 bp, Homo sapiens
tctgtggtcagcaaa

SEQ ID NO: 1042362 - DNA, 15 bp, Homo sapiens
ctgtggtcagcaaaa

SEQ ID NO: 1042363 - DNA, 15 bp, Homo sapiens
tgtggtcagcaaaag

SEQ ID NO: 1042364 - DNA, 15 bp, Homo sapiens
gtggtcagcaaaaga

SEQ ID NO: 1042365 - DNA, 15 bp, Homo sapiens
tggtcagcaaaagag

SEQ ID NO: 1042366 - DNA, 15 bp, Homo sapiens
ggtcagcaaaagaga

SEQ ID NO: 1042367 - DNA, 15 bp, Homo sapiens
gtcagcaaaagagag

SEQ ID NO: 1042368 - DNA, 15 bp, Homo sapiens
tcagcaaaagagagg

SEQ ID NO: 1042369 - DNA, 15 bp, Homo sapiens
cagcaaaagagaggc

SEQ ID NO: 1042370 - DNA, 15 bp, Homo sapiens
agcaaaagagaggcc

SEQ ID NO: 1042371 - DNA, 15 bp, Homo sapiens
gcaaaagagaggccc

SEQ ID NO: 1042372 - DNA, 15 bp, Homo sapiens
caaaagagaggcccc

SEQ ID NO: 1042373 - DNA, 15 bp, Homo sapiens
aaaagagaggcccct

SEQ ID NO: 1042374 - DNA, 15 bp, Homo sapiens
aaagagaggcccctg

SEQ ID NO: 1042375 - DNA, 15 bp, Homo sapiens
aagagaggcccctgg

SEQ ID NO: 1042376 - DNA, 15 bp, Homo sapiens
agagaggcccctggg

SEQ ID NO: 1042377 - DNA, 15 bp, Homo sapiens
gagaggcccctgggg

SEQ ID NO: 1042378 - DNA, 15 bp, Homo sapiens
agaggcccctggggc

SEQ ID NO: 1042379 - DNA, 15 bp, Homo sapiens
gaggcccctggggcc

SEQ ID NO: 1042380 - DNA, 15 bp, Homo sapiens
aggcccctggggcca

SEQ ID NO: 1042381 - DNA, 15 bp, Homo sapiens
ggcccctggggccat

SEQ ID NO: 1042382 - DNA, 15 bp, Homo sapiens
gcccctggggccata

SEQ ID NO: 1042383 - DNA, 15 bp, Homo sapiens
cccctggggccataa

SEQ ID NO: 1042384 - DNA, 15 bp, Homo sapiens
ccctggggccataag

SEQ ID NO: 1042385 - DNA, 15 bp, Homo sapiens
cctggggccataagc

SEQ ID NO: 1042386 - DNA, 15 bp, Homo sapiens
ctggggccataagcc

SEQ ID NO: 1042387 - DNA, 15 bp, Homo sapiens
tggggccataagcca

SEQ ID NO: 1042388 - DNA, 15 bp, Homo sapiens
ggggccataagccac

SEQ ID NO: 1042389 - DNA, 15 bp, Homo sapiens
gggccataagccaca

SEQ ID NO: 1042390 - DNA, 15 bp, Homo sapiens
ggccataagccacac

SEQ ID NO: 1042391 - DNA, 15 bp, Homo sapiens
gccataagccacacc

SEQ ID NO: 1042392 - DNA, 15 bp, Homo sapiens
ccataagccacaccc

SEQ ID NO: 1042393 - DNA, 15 bp, Homo sapiens
cataagccacacccc

SEQ ID NO: 1042394 - DNA, 15 bp, Homo sapiens
ataagccacaccccc

SEQ ID NO: 1042395 - DNA, 15 bp, Homo sapiens
taagccacacccccc

SEQ ID NO: 1042396 - DNA, 15 bp, Homo sapiens
aagccacacccccca

SEQ ID NO: 1042397 - DNA, 15 bp, Homo sapiens
agccacaccccccaa

SEQ ID NO: 1042398 - DNA, 15 bp, Homo sapiens
gccacaccccccaag

SEQ ID NO: 1042399 - DNA, 15 bp, Homo sapiens
ccacaccccccaagg

SEQ ID NO: 1042400 - DNA, 15 bp, Homo sapiens
cacaccccccaaggc

SEQ ID NO: 1042401 - DNA, 15 bp, Homo sapiens
acaccccccaaggct

SEQ ID NO: 1042402 - DNA, 15 bp, Homo sapiens
caccccccaaggctg

SEQ ID NO: 1042403 - DNA, 15 bp, Homo sapiens
accccccaaggctga

SEQ ID NO: 1042404 - DNA, 15 bp, Homo sapiens
ccccccaaggctgaa

SEQ ID NO: 1042405 - DNA, 15 bp, Homo sapiens
cccccaaggctgaac

SEQ ID NO: 1042406 - DNA, 15 bp, Homo sapiens
ccccaaggctgaacc

SEQ ID NO: 1042407 - DNA, 15 bp, Homo sapiens
cccaaggctgaaccc

SEQ ID NO: 1042408 - DNA, 15 bp, Homo sapiens
ccaaggctgaaccca

SEQ ID NO: 1042409 - DNA, 15 bp, Homo sapiens
caaggctgaacccag

SEQ ID NO: 1042410 - DNA, 15 bp, Homo sapiens
aaggctgaacccaga

SEQ ID NO: 1042411 - DNA, 15 bp, Homo sapiens
aggctgaacccagag

SEQ ID NO: 1042412 - DNA, 15 bp, Homo sapiens
ggctgaacccagaga

SEQ ID NO: 1042413 - DNA, 15 bp, Homo sapiens
gctgaacccagagag

SEQ ID NO: 1042414 - DNA, 15 bp, Homo sapiens
ctgaacccagagagt

SEQ ID NO: 1042415 - DNA, 15 bp, Homo sapiens
tgaacccagagagtt

SEQ ID NO: 1042416 - DNA, 15 bp, Homo sapiens
gaacccagagagttt

SEQ ID NO: 1042417 - DNA, 15 bp, Homo sapiens
aacccagagagtttg

SEQ ID NO: 1042418 - DNA, 15 bp, Homo sapiens
acccagagagtttgt

SEQ ID NO: 1042419 - DNA, 15 bp, Homo sapiens
cccagagagtttgtg

SEQ ID NO: 1042420 - DNA, 15 bp, Homo sapiens
ccagagagtttgtgg

SEQ ID NO: 1042421 - DNA, 15 bp, Homo sapiens
cagagagtttgtggt

SEQ ID NO: 1042422 - DNA, 15 bp, Homo sapiens
agagagtttgtggtt

SEQ ID NO: 1042423 - DNA, 15 bp, Homo sapiens
gagagtttgtggttt

SEQ ID NO: 1042424 - DNA, 15 bp, Homo sapiens
agagtttgtggttta

SEQ ID NO: 1042425 - DNA, 15 bp, Homo sapiens
gagtttgtggtttaa

SEQ ID NO: 1042426 - DNA, 15 bp, Homo sapiens
agtttgtggtttaaa

SEQ ID NO: 1042427 - DNA, 15 bp, Homo sapiens
gtttgtggtttaaat

SEQ ID NO: 1042428 - DNA, 15 bp, Homo sapiens
tttgtggtttaaatc

SEQ ID NO: 1042429 - DNA, 15 bp, Homo sapiens
ttgtggtttaaatct

SEQ ID NO: 1042430 - DNA, 15 bp, Homo sapiens
tgtggtttaaatctt

SEQ ID NO: 1042431 - DNA, 15 bp, Homo sapiens
gtggtttaaatcttg

SEQ ID NO: 1042432 - DNA, 15 bp, Homo sapiens
tggtttaaatcttgg

SEQ ID NO: 1042433 - DNA, 15 bp, Homo sapiens
ggtttaaatcttggg

SEQ ID NO: 1042434 - DNA, 15 bp, Homo sapiens
gtttaaatcttgggc

SEQ ID NO: 1042435 - DNA, 15 bp, Homo sapiens
tttaaatcttgggcc

SEQ ID NO: 1042436 - DNA, 15 bp, Homo sapiens
ttaaatcttgggcct

SEQ ID NO: 1042437 - DNA, 15 bp, Homo sapiens
taaatcttgggcctg

SEQ ID NO: 1042438 - DNA, 15 bp, Homo sapiens
aaatcttgggcctgg

SEQ ID NO: 1042439 - DNA, 15 bp, Homo sapiens
aatcttgggcctgga

SEQ ID NO: 1042440 - DNA, 15 bp, Homo sapiens
atcttgggcctggag

SEQ ID NO: 1042441 - DNA, 15 bp, Homo sapiens
tcttgggcctggagg

SEQ ID NO: 1042442 - DNA, 15 bp, Homo sapiens
cttgggcctggagga

SEQ ID NO: 1042443 - DNA, 15 bp, Homo sapiens
ttgggcctggaggat

SEQ ID NO: 1042444 - DNA, 15 bp, Homo sapiens
tgggcctggaggatt

SEQ ID NO: 1042445 - DNA, 15 bp, Homo sapiens
gggcctggaggattc

SEQ ID NO: 1042446 - DNA, 15 bp, Homo sapiens
ggcctggaggattct

SEQ ID NO: 1042447 - DNA, 15 bp, Homo sapiens
gcctggaggattctg

SEQ ID NO: 1042448 - DNA, 15 bp, Homo sapiens
cctggaggattctgt

SEQ ID NO: 1042449 - DNA, 15 bp, Homo sapiens
ctggaggattctgtg

SEQ ID NO: 1042450 - DNA, 15 bp, Homo sapiens
tggaggattctgtgg

SEQ ID NO: 1042451 - DNA, 15 bp, Homo sapiens
ggaggattctgtgga

SEQ ID NO: 1042452 - DNA, 15 bp, Homo sapiens
gaggattctgtggag

SEQ ID NO: 1042453 - DNA, 15 bp, Homo sapiens
aggattctgtggagg

SEQ ID NO: 1042454 - DNA, 15 bp, Homo sapiens
ggattctgtggagga

SEQ ID NO: 1042455 - DNA, 15 bp, Homo sapiens
gattctgtggaggag

SEQ ID NO: 1042456 - DNA, 15 bp, Homo sapiens
attctgtggaggaga

SEQ ID NO: 1042457 - DNA, 15 bp, Homo sapiens
ttctgtggaggagag

SEQ ID NO: 1042458 - DNA, 15 bp, Homo sapiens
tctgtggaggagagt

SEQ ID NO: 1042459 - DNA, 15 bp, Homo sapiens
ctgtggaggagagtt

SEQ ID NO: 1042460 - DNA, 15 bp, Homo sapiens
tgtggaggagagttc

SEQ ID NO: 1042461 - DNA, 15 bp, Homo sapiens
gtggaggagagttcg

SEQ ID NO: 1042462 - DNA, 15 bp, Homo sapiens
tggaggagagttcgg

SEQ ID NO: 1042463 - DNA, 15 bp, Homo sapiens
ggaggagagttcggt

SEQ ID NO: 1042464 - DNA, 15 bp, Homo sapiens
gaggagagttcggtc

SEQ ID NO: 1042465 - DNA, 15 bp, Homo sapiens
aggagagttcggtcc

SEQ ID NO: 1042466 - DNA, 15 bp, Homo sapiens
ggagagttcggtcca

SEQ ID NO: 1042467 - DNA, 15 bp, Homo sapiens
gagagttcggtccag

SEQ ID NO: 1042468 - DNA, 15 bp, Homo sapiens
agagttcggtccagg

SEQ ID NO: 1042469 - DNA, 15 bp, Homo sapiens
gagttcggtccaggc

SEQ ID NO: 1042470 - DNA, 15 bp, Homo sapiens
agttcggtccaggcc

SEQ ID NO: 1042471 - DNA, 15 bp, Homo sapiens
gttcggtccaggcct

SEQ ID NO: 1042472 - DNA, 15 bp, Homo sapiens
ttcggtccaggcctt

SEQ ID NO: 1042473 - DNA, 15 bp, Homo sapiens
tcggtccaggccttc

SEQ ID NO: 1042474 - DNA, 15 bp, Homo sapiens
cggtccaggccttct

SEQ ID NO: 1042475 - DNA, 15 bp, Homo sapiens
ggtccaggccttctg

SEQ ID NO: 1042476 - DNA, 15 bp, Homo sapiens
gtccaggccttctgc

SEQ ID NO: 1042477 - DNA, 15 bp, Homo sapiens
tccaggccttctgct

SEQ ID NO: 1042478 - DNA, 15 bp, Homo sapiens
ccaggccttctgctc

SEQ ID NO: 1042479 - DNA, 15 bp, Homo sapiens
caggccttctgctcc

SEQ ID NO: 1042480 - DNA, 15 bp, Homo sapiens
aggccttctgctcca

SEQ ID NO: 1042481 - DNA, 15 bp, Homo sapiens
ggccttctgctccag

SEQ ID NO: 1042482 - DNA, 15 bp, Homo sapiens
gccttctgctccagg

SEQ ID NO: 1042483 - DNA, 15 bp, Homo sapiens
ccttctgctccagga

SEQ ID NO: 1042484 - DNA, 15 bp, Homo sapiens
cttctgctccaggag

SEQ ID NO: 1042485 - DNA, 15 bp, Homo sapiens
ttctgctccaggagg

SEQ ID NO: 1042486 - DNA, 15 bp, Homo sapiens
tctgctccaggaggc

SEQ ID NO: 1042487 - DNA, 15 bp, Homo sapiens
ctgctccaggaggcg

SEQ ID NO: 1042488 - DNA, 15 bp, Homo sapiens
tgctccaggaggcgc

SEQ ID NO: 1042489 - DNA, 15 bp, Homo sapiens
gctccaggaggcgct

SEQ ID NO: 1042490 - DNA, 15 bp, Homo sapiens
ctccaggaggcgctg

SEQ ID NO: 1042491 - DNA, 15 bp, Homo sapiens
tccaggaggcgctgg

SEQ ID NO: 1042492 - DNA, 15 bp, Homo sapiens
ccaggaggcgctggc

SEQ ID NO: 1042493 - DNA, 15 bp, Homo sapiens
caggaggcgctggca

SEQ ID NO: 1042494 - DNA, 15 bp, Homo sapiens
aggaggcgctggcag

SEQ ID NO: 1042495 - DNA, 15 bp, Homo sapiens
ggaggcgctggcagc

SEQ ID NO: 1042496 - DNA, 15 bp, Homo sapiens
gaggcgctggcagct

SEQ ID NO: 1042497 - DNA, 15 bp, Homo sapiens
aggcgctggcagctc

SEQ ID NO: 1042498 - DNA, 15 bp, Homo sapiens
ggcgctggcagctcc

SEQ ID NO: 1042499 - DNA, 15 bp, Homo sapiens
gcgctggcagctccg

SEQ ID NO: 1042500 - DNA, 15 bp, Homo sapiens
cgctggcagctccga

SEQ ID NO: 1042501 - DNA, 15 bp, Homo sapiens
gctggcagctccgac

SEQ ID NO: 1042502 - DNA, 15 bp, Homo sapiens
ctggcagctccgaca

SEQ ID NO: 1042503 - DNA, 15 bp, Homo sapiens
tggcagctccgacac

SEQ ID NO: 1042504 - DNA, 15 bp, Homo sapiens
ggcagctccgacacc

SEQ ID NO: 1042505 - DNA, 15 bp, Homo sapiens
gcagctccgacacca

SEQ ID NO: 1042506 - DNA, 15 bp, Homo sapiens
cagctccgacaccac

SEQ ID NO: 1042507 - DNA, 15 bp, Homo sapiens
agctccgacaccaca

SEQ ID NO: 1042508 - DNA, 15 bp, Homo sapiens
gctccgacaccacag

SEQ ID NO: 1042509 - DNA, 15 bp, Homo sapiens
ctccgacaccacaga

SEQ ID NO: 1042510 - DNA, 15 bp, Homo sapiens
tccgacaccacagac

SEQ ID NO: 1042511 - DNA, 15 bp, Homo sapiens
ccgacaccacagaca

SEQ ID NO: 1042512 - DNA, 15 bp, Homo sapiens
cgacaccacagacac

SEQ ID NO: 1042513 - DNA, 15 bp, Homo sapiens
gacaccacagacaca

SEQ ID NO: 1042514 - DNA, 15 bp, Homo sapiens
acaccacagacacat

SEQ ID NO: 1042515 - DNA, 15 bp, Homo sapiens
caccacagacacatt

SEQ ID NO: 1042516 - DNA, 15 bp, Homo sapiens
accacagacacatta

SEQ ID NO: 1042517 - DNA, 15 bp, Homo sapiens
ccacagacacattaa

SEQ ID NO: 1042518 - DNA, 15 bp, Homo sapiens
cacagacacattaat

SEQ ID NO: 1042519 - DNA, 15 bp, Homo sapiens
acagacacattaatt

SEQ ID NO: 1042520 - DNA, 15 bp, Homo sapiens
cagacacattaattg

SEQ ID NO: 1042521 - DNA, 15 bp, Homo sapiens
agacacattaattgt

SEQ ID NO: 1042522 - DNA, 15 bp, Homo sapiens
gacacattaattgtg

SEQ ID NO: 1042523 - DNA, 15 bp, Homo sapiens
acacattaattgtgc

SEQ ID NO: 1042524 - DNA, 15 bp, Homo sapiens
cacattaattgtgcg

SEQ ID NO: 1042525 - DNA, 15 bp, Homo sapiens
acattaattgtgcgg

SEQ ID NO: 1042526 - DNA, 15 bp, Homo sapiens
cattaattgtgcgga

SEQ ID NO: 1042527 - DNA, 15 bp, Homo sapiens
attaattgtgcggag

SEQ ID NO: 1042528 - DNA, 15 bp, Homo sapiens
ttaattgtgcggaga

SEQ ID NO: 1042529 - DNA, 15 bp, Homo sapiens
taattgtgcggagaa

SEQ ID NO: 1042530 - DNA, 15 bp, Homo sapiens
aattgtgcggagaat

SEQ ID NO: 1042531 - DNA, 15 bp, Homo sapiens
attgtgcggagaatt

SEQ ID NO: 1042532 - DNA, 15 bp, Homo sapiens
ttgtgcggagaattc

SEQ ID NO: 1042533 - DNA, 15 bp, Homo sapiens
tgtgcggagaattca

SEQ ID NO: 1042534 - DNA, 15 bp, Homo sapiens
gtgcggagaattcaa

SEQ ID NO: 1042535 - DNA, 15 bp, Homo sapiens
tgcggagaattcaac

SEQ ID NO: 1042536 - DNA, 15 bp, Homo sapiens
gcggagaattcaacg

SEQ ID NO: 1042537 - DNA, 15 bp, Homo sapiens
cggagaattcaacgc

SEQ ID NO: 1042538 - DNA, 15 bp, Homo sapiens
ggagaattcaacgct

SEQ ID NO: 1042539 - DNA, 15 bp, Homo sapiens
gagaattcaacgcta

SEQ ID NO: 1042540 - DNA, 15 bp, Homo sapiens
agaattcaacgctag

SEQ ID NO: 1042541 - DNA, 15 bp, Homo sapiens
gaattcaacgctagg

SEQ ID NO: 1042542 - DNA, 15 bp, Homo sapiens
aattcaacgctaggg

SEQ ID NO: 1042543 - DNA, 15 bp, Homo sapiens
attcaacgctagggc

SEQ ID NO: 1042544 - DNA, 15 bp, Homo sapiens
ttcaacgctagggct

SEQ ID NO: 1042545 - DNA, 15 bp, Homo sapiens
tcaacgctagggctc

SEQ ID NO: 1042546 - DNA, 15 bp, Homo sapiens
caacgctagggctca

SEQ ID NO: 1042547 - DNA, 15 bp, Homo sapiens
aacgctagggctcag

SEQ ID NO: 1042548 - DNA, 15 bp, Homo sapiens
acgctagggctcagt

SEQ ID NO: 1042549 - DNA, 15 bp, Homo sapiens
cgctagggctcagtc

SEQ ID NO: 1042550 - DNA, 15 bp, Homo sapiens
gctagggctcagtca

SEQ ID NO: 1042551 - DNA, 15 bp, Homo sapiens
ctagggctcagtcaa

SEQ ID NO: 1042552 - DNA, 15 bp, Homo sapiens
tagggctcagtcaaa

SEQ ID NO: 1042553 - DNA, 15 bp, Homo sapiens
agggctcagtcaaaa

SEQ ID NO: 1042554 - DNA, 15 bp, Homo sapiens
gggctcagtcaaaaa

SEQ ID NO: 1042555 - DNA, 15 bp, Homo sapiens
ggctcagtcaaaaat

SEQ ID NO: 1042556 - DNA, 15 bp, Homo sapiens
gctcagtcaaaaatc

SEQ ID NO: 1042557 - DNA, 15 bp, Homo sapiens
ctcagtcaaaaatca

SEQ ID NO: 1042558 - DNA, 15 bp, Homo sapiens
tcagtcaaaaatcaa

SEQ ID NO: 1042559 - DNA, 15 bp, Homo sapiens
cagtcaaaaatcaaa

SEQ ID NO: 1042560 - DNA, 15 bp, Homo sapiens
agtcaaaaatcaaaa

SEQ ID NO: 1042561 - DNA, 15 bp, Homo sapiens
gtcaaaaatcaaaaa

SEQ ID NO: 1042562 - DNA, 15 bp, Homo sapiens
tcaaaaatcaaaaac

SEQ ID NO: 1042563 - DNA, 15 bp, Homo sapiens
caaaaatcaaaaacg

SEQ ID NO: 1042564 - DNA, 15 bp, Homo sapiens
aaaaatcaaaaacgc

SEQ ID NO: 1042565 - DNA, 15 bp, Homo sapiens
aaaatcaaaaacgca

SEQ ID NO: 1042566 - DNA, 15 bp, Homo sapiens
aaatcaaaaacgcaa

SEQ ID NO: 1042567 - DNA, 15 bp, Homo sapiens
aatcaaaaacgcaaa

SEQ ID NO: 1042568 - DNA, 15 bp, Homo sapiens
atcaaaaacgcaaaa

SEQ ID NO: 1042569 - DNA, 15 bp, Homo sapiens
tcaaaaacgcaaaac

SEQ ID NO: 1042570 - DNA, 15 bp, Homo sapiens
caaaaacgcaaaaca

SEQ ID NO: 1042571 - DNA, 15 bp, Homo sapiens
aaaaacgcaaaacaa

SEQ ID NO: 1042572 - DNA, 15 bp, Homo sapiens
aaaacgcaaaacaaa

SEQ ID NO: 1042573 - DNA, 15 bp, Homo sapiens
aaacgcaaaacaaaa

SEQ ID NO: 1042574 - DNA, 15 bp, Homo sapiens
aacgcaaaacaaaaa

SEQ ID NO: 1042575 - DNA, 15 bp, Homo sapiens
acgcaaaacaaaaag

SEQ ID NO: 1042576 - DNA, 15 bp, Homo sapiens
cgcaaaacaaaaaga

SEQ ID NO: 1042577 - DNA, 15 bp, Homo sapiens
gcaaaacaaaaagag

SEQ ID NO: 1042578 - DNA, 15 bp, Homo sapiens
caaaacaaaaagaga

SEQ ID NO: 1042579 - DNA, 15 bp, Homo sapiens
aaaacaaaaagagaa

SEQ ID NO: 1042580 - DNA, 15 bp, Homo sapiens
aaacaaaaagagaat

SEQ ID NO: 1042581 - DNA, 15 bp, Homo sapiens
aacaaaaagagaatc

SEQ ID NO: 1042582 - DNA, 15 bp, Homo sapiens
acaaaaagagaatcc

SEQ ID NO: 1042583 - DNA, 15 bp, Homo sapiens
caaaaagagaatccc

SEQ ID NO: 1042584 - DNA, 15 bp, Homo sapiens
aaaaagagaatccct

SEQ ID NO: 1042585 - DNA, 15 bp, Homo sapiens
aaaagagaatccctt

SEQ ID NO: 1042586 - DNA, 15 bp, Homo sapiens
aaagagaatcccttt

SEQ ID NO: 1042587 - DNA, 15 bp, Homo sapiens
aagagaatccctttt

SEQ ID NO: 1042588 - DNA, 15 bp, Homo sapiens
agagaatccctttta

SEQ ID NO: 1042589 - DNA, 15 bp, Homo sapiens
gagaatcccttttat

SEQ ID NO: 1042590 - DNA, 15 bp, Homo sapiens
agaatcccttttatt

SEQ ID NO: 1042591 - DNA, 15 bp, Homo sapiens
gaatcccttttattt

SEQ ID NO: 1042592 - DNA, 15 bp, Homo sapiens
aatcccttttattta

SEQ ID NO: 1042593 - DNA, 15 bp, Homo sapiens
atcccttttatttac

SEQ ID NO: 1042594 - DNA, 15 bp, Homo sapiens
tcccttttatttacc

SEQ ID NO: 1042595 - DNA, 15 bp, Homo sapiens
cccttttatttacct

SEQ ID NO: 1042596 - DNA, 15 bp, Homo sapiens
ccttttatttacctc

SEQ ID NO: 1042597 - DNA, 15 bp, Homo sapiens
cttttatttacctcg

SEQ ID NO: 1042598 - DNA, 15 bp, Homo sapiens
ttttatttacctcgt

SEQ ID NO: 1042599 - DNA, 15 bp, Homo sapiens
tttatttacctcgtc

SEQ ID NO: 1042600 - DNA, 15 bp, Homo sapiens
ttatttacctcgtct

SEQ ID NO: 1042601 - DNA, 15 bp, Homo sapiens
tatttacctcgtctc

SEQ ID NO: 1042602 - DNA, 15 bp, Homo sapiens
atttacctcgtctcc

SEQ ID NO: 1042603 - DNA, 15 bp, Homo sapiens
tttacctcgtctccc

SEQ ID NO: 1042604 - DNA, 15 bp, Homo sapiens
ttacctcgtctccct

SEQ ID NO: 1042605 - DNA, 15 bp, Homo sapiens
tacctcgtctccctc

SEQ ID NO: 1042606 - DNA, 15 bp, Homo sapiens
acctcgtctccctcc

SEQ ID NO: 1042607 - DNA, 15 bp, Homo sapiens
cctcgtctccctccc

SEQ ID NO: 1042608 - DNA, 15 bp, Homo sapiens
ctcgtctccctcccc

SEQ ID NO: 1042609 - DNA, 15 bp, Homo sapiens
tcgtctccctccccc

SEQ ID NO: 1042610 - DNA, 15 bp, Homo sapiens
cgtctccctccccct

SEQ ID NO: 1042611 - DNA, 15 bp, Homo sapiens
gtctccctccccctg

SEQ ID NO: 1042612 - DNA, 15 bp, Homo sapiens
tctccctccccctgt

SEQ ID NO: 1042613 - DNA, 15 bp, Homo sapiens
ctccctccccctgtt

SEQ ID NO: 1042614 - DNA, 15 bp, Homo sapiens
tccctccccctgttt

SEQ ID NO: 1042615 - DNA, 15 bp, Homo sapiens
ccctccccctgtttg

SEQ ID NO: 1042616 - DNA, 15 bp, Homo sapiens
cctccccctgtttgg

SEQ ID NO: 1042617 - DNA, 15 bp, Homo sapiens
ctccccctgtttgga

SEQ ID NO: 1042618 - DNA, 15 bp, Homo sapiens
tccccctgtttggac

SEQ ID NO: 1042619 - DNA, 15 bp, Homo sapiens
ccccctgtttggaca

SEQ ID NO: 1042620 - DNA, 15 bp, Homo sapiens
cccctgtttggacat

SEQ ID NO: 1042621 - DNA, 15 bp, Homo sapiens
ccctgtttggacatg

SEQ ID NO: 1042622 - DNA, 15 bp, Homo sapiens
cctgtttggacatga

SEQ ID NO: 1042623 - DNA, 15 bp, Homo sapiens
ctgtttggacatgac

SEQ ID NO: 1042624 - DNA, 15 bp, Homo sapiens
tgtttggacatgacc

SEQ ID NO: 1042625 - DNA, 15 bp, Homo sapiens
gtttggacatgacct

SEQ ID NO: 1042626 - DNA, 15 bp, Homo sapiens
tttggacatgacctt

SEQ ID NO: 1042627 - DNA, 15 bp, Homo sapiens
ttggacatgaccttg

SEQ ID NO: 1042628 - DNA, 15 bp, Homo sapiens
tggacatgaccttga

SEQ ID NO: 1042629 - DNA, 15 bp, Homo sapiens
ggacatgaccttgag

SEQ ID NO: 1042630 - DNA, 15 bp, Homo sapiens
gacatgaccttgagc

SEQ ID NO: 1042631 - DNA, 15 bp, Homo sapiens
acatgaccttgagct

SEQ ID NO: 1042632 - DNA, 15 bp, Homo sapiens
catgaccttgagctc

SEQ ID NO: 1042633 - DNA, 15 bp, Homo sapiens
atgaccttgagctct

SEQ ID NO: 1042634 - DNA, 15 bp, Homo sapiens
tgaccttgagctctg

SEQ ID NO: 1042635 - DNA, 15 bp, Homo sapiens
gaccttgagctctgc

SEQ ID NO: 1042636 - DNA, 15 bp, Homo sapiens
accttgagctctgct

SEQ ID NO: 1042637 - DNA, 15 bp, Homo sapiens
ccttgagctctgctg

SEQ ID NO: 1042638 - DNA, 15 bp, Homo sapiens
cttgagctctgctgg

SEQ ID NO: 1042639 - DNA, 15 bp, Homo sapiens
ttgagctctgctggc

SEQ ID NO: 1042640 - DNA, 15 bp, Homo sapiens
tgagctctgctggcc

SEQ ID NO: 1042641 - DNA, 15 bp, Homo sapiens
gagctctgctggccc

SEQ ID NO: 1042642 - DNA, 15 bp, Homo sapiens
agctctgctggccca

SEQ ID NO: 1042643 - DNA, 15 bp, Homo sapiens
gctctgctggcccac

SEQ ID NO: 1042644 - DNA, 15 bp, Homo sapiens
ctctgctggcccaca

SEQ ID NO: 1042645 - DNA, 15 bp, Homo sapiens
tctgctggcccacaa

SEQ ID NO: 1042646 - DNA, 15 bp, Homo sapiens
ctgctggcccacaag

SEQ ID NO: 1042647 - DNA, 15 bp, Homo sapiens
tgctggcccacaagt

SEQ ID NO: 1042648 - DNA, 15 bp, Homo sapiens
gctggcccacaagtg

SEQ ID NO: 1042649 - DNA, 15 bp, Homo sapiens
ctggcccacaagtgg

SEQ ID NO: 1042650 - DNA, 15 bp, Homo sapiens
tggcccacaagtggc

SEQ ID NO: 1042651 - DNA, 15 bp, Homo sapiens
ggcccacaagtggcc

SEQ ID NO: 1042652 - DNA, 15 bp, Homo sapiens
gcccacaagtggcca

SEQ ID NO: 1042653 - DNA, 15 bp, Homo sapiens
cccacaagtggccag

SEQ ID NO: 1042654 - DNA, 15 bp, Homo sapiens
ccacaagtggccagg

SEQ ID NO: 1042655 - DNA, 15 bp, Homo sapiens
cacaagtggccaggc

SEQ ID NO: 1042656 - DNA, 15 bp, Homo sapiens
acaagtggccaggct

SEQ ID NO: 1042657 - DNA, 15 bp, Homo sapiens
caagtggccaggctg

SEQ ID NO: 1042658 - DNA, 15 bp, Homo sapiens
aagtggccaggctgg

SEQ ID NO: 1042659 - DNA, 15 bp, Homo sapiens
agtggccaggctgga

SEQ ID NO: 1042660 - DNA, 15 bp, Homo sapiens
gtggccaggctggag

SEQ ID NO: 1042661 - DNA, 15 bp, Homo sapiens
tggccaggctggagc

SEQ ID NO: 1042662 - DNA, 15 bp, Homo sapiens
ggccaggctggagct

SEQ ID NO: 1042663 - DNA, 15 bp, Homo sapiens
gccaggctggagctg

SEQ ID NO: 1042664 - DNA, 15 bp, Homo sapiens
ccaggctggagctgt

SEQ ID NO: 1042665 - DNA, 15 bp, Homo sapiens
caggctggagctgtc

SEQ ID NO: 1042666 - DNA, 15 bp, Homo sapiens
aggctggagctgtct

SEQ ID NO: 1042667 - DNA, 15 bp, Homo sapiens
ggctggagctgtctt

SEQ ID NO: 1042668 - DNA, 15 bp, Homo sapiens
gctggagctgtcttg

SEQ ID NO: 1042669 - DNA, 15 bp, Homo sapiens
ctggagctgtcttgc

SEQ ID NO: 1042670 - DNA, 15 bp, Homo sapiens
tggagctgtcttgca

SEQ ID NO: 1042671 - DNA, 15 bp, Homo sapiens
ggagctgtcttgcaa

SEQ ID NO: 1042672 - DNA, 15 bp, Homo sapiens
gagctgtcttgcaaa

SEQ ID NO: 1042673 - DNA, 15 bp, Homo sapiens
agctgtcttgcaaag

SEQ ID NO: 1042674 - DNA, 15 bp, Homo sapiens
gctgtcttgcaaaga

SEQ ID NO: 1042675 - DNA, 15 bp, Homo sapiens
ctgtcttgcaaagag

SEQ ID NO: 1042676 - DNA, 15 bp, Homo sapiens
tgtcttgcaaagaga

SEQ ID NO: 1042677 - DNA, 15 bp, Homo sapiens
gtcttgcaaagagaa

SEQ ID NO: 1042678 - DNA, 15 bp, Homo sapiens
tcttgcaaagagaaa

SEQ ID NO: 1042679 - DNA, 15 bp, Homo sapiens
cttgcaaagagaaac

SEQ ID NO: 1042680 - DNA, 15 bp, Homo sapiens
ttgcaaagagaaaca

SEQ ID NO: 1042681 - DNA, 15 bp, Homo sapiens
tgcaaagagaaacaa

SEQ ID NO: 1042682 - DNA, 15 bp, Homo sapiens
gcaaagagaaacaaa

SEQ ID NO: 1042683 - DNA, 15 bp, Homo sapiens
caaagagaaacaaaa

SEQ ID NO: 1042684 - DNA, 15 bp, Homo sapiens
aaagagaaacaaaaa

SEQ ID NO: 1042685 - DNA, 15 bp, Homo sapiens
aagagaaacaaaaac

SEQ ID NO: 1042686 - DNA, 15 bp, Homo sapiens
gagcccctttgcccc

SEQ ID NO: 1042687 - DNA, 15 bp, Homo sapiens
agcccctttgccccc

SEQ ID NO: 1042688 - DNA, 15 bp, Homo sapiens
gcccctttgccccca

SEQ ID NO: 1042689 - DNA, 15 bp, Homo sapiens
cccctttgcccccag

SEQ ID NO: 1042690 - DNA, 15 bp, Homo sapiens
ccctttgcccccagg

SEQ ID NO: 1042691 - DNA, 15 bp, Homo sapiens
cctttgcccccaggt

SEQ ID NO: 1042692 - DNA, 15 bp, Homo sapiens
ctttgcccccaggta

SEQ ID NO: 1042693 - DNA, 15 bp, Homo sapiens
tttgcccccaggtag

SEQ ID NO: 1042694 - DNA, 15 bp, Homo sapiens
ttgcccccaggtagc

SEQ ID NO: 1042695 - DNA, 15 bp, Homo sapiens
tgcccccaggtagct

SEQ ID NO: 1042696 - DNA, 15 bp, Homo sapiens
gcccccaggtagctt

SEQ ID NO: 1042697 - DNA, 15 bp, Homo sapiens
cccccaggtagcttc

SEQ ID NO: 1042698 - DNA, 15 bp, Homo sapiens
ccccaggtagcttcc

SEQ ID NO: 1042699 - DNA, 15 bp, Homo sapiens
cccaggtagcttccc

SEQ ID NO: 1042700 - DNA, 15 bp, Homo sapiens
ccaggtagcttccca

SEQ ID NO: 1042701 - DNA, 15 bp, Homo sapiens
caggtagcttcccac

SEQ ID NO: 1042702 - DNA, 15 bp, Homo sapiens
aggtagcttcccact

SEQ ID NO: 1042703 - DNA, 15 bp, Homo sapiens
ggtagcttcccactt

SEQ ID NO: 1042704 - DNA, 15 bp, Homo sapiens
gtagcttcccacttc

SEQ ID NO: 1042705 - DNA, 15 bp, Homo sapiens
tagcttcccacttca

SEQ ID NO: 1042706 - DNA, 15 bp, Homo sapiens
agcttcccacttcat

SEQ ID NO: 1042707 - DNA, 15 bp, Homo sapiens
gcttcccacttcatc

SEQ ID NO: 1042708 - DNA, 15 bp, Homo sapiens
cttcccacttcatcc

SEQ ID NO: 1042709 - DNA, 15 bp, Homo sapiens
ttcccacttcatccc

SEQ ID NO: 1042710 - DNA, 15 bp, Homo sapiens
tcccacttcatcccc

SEQ ID NO: 1042711 - DNA, 15 bp, Homo sapiens
cccacttcatcccca

SEQ ID NO: 1042712 - DNA, 15 bp, Homo sapiens
ccacttcatccccac

SEQ ID NO: 1042713 - DNA, 15 bp, Homo sapiens
cacttcatccccaca

SEQ ID NO: 1042714 - DNA, 15 bp, Homo sapiens
acttcatccccacat

SEQ ID NO: 1042715 - DNA, 15 bp, Homo sapiens
cttcatccccacatt

SEQ ID NO: 1042716 - DNA, 15 bp, Homo sapiens
ttcatccccacattg

SEQ ID NO: 1042717 - DNA, 15 bp, Homo sapiens
tcatccccacattgc

SEQ ID NO: 1042718 - DNA, 15 bp, Homo sapiens
catccccacattgcc

SEQ ID NO: 1042719 - DNA, 15 bp, Homo sapiens
atccccacattgcct

SEQ ID NO: 1042720 - DNA, 15 bp, Homo sapiens
tccccacattgcctt

SEQ ID NO: 1042721 - DNA, 15 bp, Homo sapiens
ccccacattgccttt

SEQ ID NO: 1042722 - DNA, 15 bp, Homo sapiens
cccacattgcctttc

SEQ ID NO: 1042723 - DNA, 15 bp, Homo sapiens
ccacattgcctttca

SEQ ID NO: 1042724 - DNA, 15 bp, Homo sapiens
cacattgcctttcac

SEQ ID NO: 1042725 - DNA, 15 bp, Homo sapiens
acattgcctttcact

SEQ ID NO: 1042726 - DNA, 15 bp, Homo sapiens
cattgcctttcactg

SEQ ID NO: 1042727 - DNA, 15 bp, Homo sapiens
attgcctttcactgt

SEQ ID NO: 1042728 - DNA, 15 bp, Homo sapiens
ttgcctttcactgtc

SEQ ID NO: 1042729 - DNA, 15 bp, Homo sapiens
tgcctttcactgtct

SEQ ID NO: 1042730 - DNA, 15 bp, Homo sapiens
gcctttcactgtctc

SEQ ID NO: 1042731 - DNA, 15 bp, Homo sapiens
cctttcactgtctct

SEQ ID NO: 1042732 - DNA, 15 bp, Homo sapiens
ctttcactgtctctg

SEQ ID NO: 1042733 - DNA, 15 bp, Homo sapiens
tttcactgtctctgg

SEQ ID NO: 1042734 - DNA, 15 bp, Homo sapiens
ttcactgtctctggc

SEQ ID NO: 1042735 - DNA, 15 bp, Homo sapiens
tcactgtctctggct

SEQ ID NO: 1042736 - DNA, 15 bp, Homo sapiens
cactgtctctggctg

SEQ ID NO: 1042737 - DNA, 15 bp, Homo sapiens
actgtctctggctgt

SEQ ID NO: 1042738 - DNA, 15 bp, Homo sapiens
ctgtctctggctgtt

SEQ ID NO: 1042739 - DNA, 15 bp, Homo sapiens
tgtctctggctgtta

SEQ ID NO: 1042740 - DNA, 15 bp, Homo sapiens
gtctctggctgttac

SEQ ID NO: 1042741 - DNA, 15 bp, Homo sapiens
tctctggctgttaca

SEQ ID NO: 1042742 - DNA, 15 bp, Homo sapiens
ctctggctgttacag

SEQ ID NO: 1042743 - DNA, 15 bp, Homo sapiens
tctggctgttacagt

SEQ ID NO: 1042744 - DNA, 15 bp, Homo sapiens
ctggctgttacagta

SEQ ID NO: 1042745 - DNA, 15 bp, Homo sapiens
tggctgttacagtat

SEQ ID NO: 1042746 - DNA, 15 bp, Homo sapiens
ggctgttacagtatt

SEQ ID NO: 1042747 - DNA, 15 bp, Homo sapiens
gctgttacagtatta

SEQ ID NO: 1042748 - DNA, 15 bp, Homo sapiens
ctgttacagtattag

SEQ ID NO: 1042749 - DNA, 15 bp, Homo sapiens
tgttacagtattaga

SEQ ID NO: 1042750 - DNA, 15 bp, Homo sapiens
gttacagtattagag

SEQ ID NO: 1042751 - DNA, 15 bp, Homo sapiens
ttacagtattagaga

SEQ ID NO: 1042752 - DNA, 15 bp, Homo sapiens
tacagtattagagat

SEQ ID NO: 1042753 - DNA, 15 bp, Homo sapiens
acagtattagagatt

SEQ ID NO: 1042754 - DNA, 15 bp, Homo sapiens
cagtattagagatta

SEQ ID NO: 1042755 - DNA, 15 bp, Homo sapiens
agtattagagattat

SEQ ID NO: 1042756 - DNA, 15 bp, Homo sapiens
gtattagagattatt

SEQ ID NO: 1042757 - DNA, 15 bp, Homo sapiens
tattagagattattt

SEQ ID NO: 1042758 - DNA, 15 bp, Homo sapiens
attagagattatttt

SEQ ID NO: 1042759 - DNA, 15 bp, Homo sapiens
ttagagattattttg

SEQ ID NO: 1042760 - DNA, 15 bp, Homo sapiens
tagagattattttgt

SEQ ID NO: 1042761 - DNA, 15 bp, Homo sapiens
agagattattttgtt

SEQ ID NO: 1042762 - DNA, 15 bp, Homo sapiens
gagattattttgttt

SEQ ID NO: 1042763 - DNA, 15 bp, Homo sapiens
agattattttgtttg

SEQ ID NO: 1042764 - DNA, 15 bp, Homo sapiens
gattattttgtttgg

SEQ ID NO: 1042765 - DNA, 15 bp, Homo sapiens
attattttgtttggc

SEQ ID NO: 1042766 - DNA, 15 bp, Homo sapiens
ttattttgtttggct

SEQ ID NO: 1042767 - DNA, 15 bp, Homo sapiens
tattttgtttggctg

SEQ ID NO: 1042768 - DNA, 15 bp, Homo sapiens
attttgtttggctga

SEQ ID NO: 1042769 - DNA, 15 bp, Homo sapiens
ttttgtttggctgac

SEQ ID NO: 1042770 - DNA, 15 bp, Homo sapiens
tttgtttggctgact

SEQ ID NO: 1042771 - DNA, 15 bp, Homo sapiens
ttgtttggctgacta

SEQ ID NO: 1042772 - DNA, 15 bp, Homo sapiens
tgtttggctgactat

SEQ ID NO: 1042773 - DNA, 15 bp, Homo sapiens
gtttggctgactatt

SEQ ID NO: 1042774 - DNA, 15 bp, Homo sapiens
tttggctgactattc

SEQ ID NO: 1042775 - DNA, 15 bp, Homo sapiens
ttggctgactattct

SEQ ID NO: 1042776 - DNA, 15 bp, Homo sapiens
tggctgactattctg

SEQ ID NO: 1042777 - DNA, 15 bp, Homo sapiens
ggctgactattctgt

SEQ ID NO: 1042778 - DNA, 15 bp, Homo sapiens
gctgactattctgtt

SEQ ID NO: 1042779 - DNA, 15 bp, Homo sapiens
ctgactattctgttt

SEQ ID NO: 1042780 - DNA, 15 bp, Homo sapiens
tgactattctgttta

SEQ ID NO: 1042781 - DNA, 15 bp, Homo sapiens
gactattctgtttac

SEQ ID NO: 1042782 - DNA, 15 bp, Homo sapiens
actattctgtttacc

SEQ ID NO: 1042783 - DNA, 15 bp, Homo sapiens
ctattctgtttacca

SEQ ID NO: 1042784 - DNA, 15 bp, Homo sapiens
tattctgtttaccaa

SEQ ID NO: 1042785 - DNA, 15 bp, Homo sapiens
attctgtttaccaag

SEQ ID NO: 1042786 - DNA, 15 bp, Homo sapiens
ttctgtttaccaagg

SEQ ID NO: 1042787 - DNA, 15 bp, Homo sapiens
tctgtttaccaaggc

SEQ ID NO: 1042788 - DNA, 15 bp, Homo sapiens
ctgtttaccaaggcc

SEQ ID NO: 1042789 - DNA, 15 bp, Homo sapiens
tgtttaccaaggcct

SEQ ID NO: 1042790 - DNA, 15 bp, Homo sapiens
gtttaccaaggcctc

SEQ ID NO: 1042791 - DNA, 15 bp, Homo sapiens
tttaccaaggcctct

SEQ ID NO: 1042792 - DNA, 15 bp, Homo sapiens
ttaccaaggcctctt

SEQ ID NO: 1042793 - DNA, 15 bp, Homo sapiens
taccaaggcctcttg

SEQ ID NO: 1042794 - DNA, 15 bp, Homo sapiens
accaaggcctcttga

SEQ ID NO: 1042795 - DNA, 15 bp, Homo sapiens
ccaaggcctcttgag

SEQ ID NO: 1042796 - DNA, 15 bp, Homo sapiens
caaggcctcttgagg

SEQ ID NO: 1042797 - DNA, 15 bp, Homo sapiens
aaggcctcttgagga

SEQ ID NO: 1042798 - DNA, 15 bp, Homo sapiens
aggcctcttgaggag

SEQ ID NO: 1042799 - DNA, 15 bp, Homo sapiens
ggcctcttgaggagg

SEQ ID NO: 1042800 - DNA, 15 bp, Homo sapiens
gcctcttgaggaggt

SEQ ID NO: 1042801 - DNA, 15 bp, Homo sapiens
cctcttgaggaggta

SEQ ID NO: 1042802 - DNA, 15 bp, Homo sapiens
ctcttgaggaggtag

SEQ ID NO: 1042803 - DNA, 15 bp, Homo sapiens
tcttgaggaggtagt

SEQ ID NO: 1042804 - DNA, 15 bp, Homo sapiens
cttgaggaggtagta

SEQ ID NO: 1042805 - DNA, 15 bp, Homo sapiens
ttgaggaggtagtag

SEQ ID NO: 1042806 - DNA, 15 bp, Homo sapiens
tgaggaggtagtagc

SEQ ID NO: 1042807 - DNA, 15 bp, Homo sapiens
gaggaggtagtagct

SEQ ID NO: 1042808 - DNA, 15 bp, Homo sapiens
aggaggtagtagctt

SEQ ID NO: 1042809 - DNA, 15 bp, Homo sapiens
ggaggtagtagctta

SEQ ID NO: 1042810 - DNA, 15 bp, Homo sapiens
gaggtagtagcttac

SEQ ID NO: 1042811 - DNA, 15 bp, Homo sapiens
aggtagtagcttacc

SEQ ID NO: 1042812 - DNA, 15 bp, Homo sapiens
ggtagtagcttacca

SEQ ID NO: 1042813 - DNA, 15 bp, Homo sapiens
gtagtagcttaccag

SEQ ID NO: 1042814 - DNA, 15 bp, Homo sapiens
tagtagcttaccagc

SEQ ID NO: 1042815 - DNA, 15 bp, Homo sapiens
agtagcttaccagct

SEQ ID NO: 1042816 - DNA, 15 bp, Homo sapiens
gtagcttaccagctg

SEQ ID NO: 1042817 - DNA, 15 bp, Homo sapiens
tagcttaccagctgt

SEQ ID NO: 1042818 - DNA, 15 bp, Homo sapiens
agcttaccagctgtt

SEQ ID NO: 1042819 - DNA, 15 bp, Homo sapiens
gcttaccagctgttt

SEQ ID NO: 1042820 - DNA, 15 bp, Homo sapiens
cttaccagctgttta

SEQ ID NO: 1042821 - DNA, 15 bp, Homo sapiens
ttaccagctgtttat

SEQ ID NO: 1042822 - DNA, 15 bp, Homo sapiens
taccagctgtttatt

SEQ ID NO: 1042823 - DNA, 15 bp, Homo sapiens
accagctgtttatta

SEQ ID NO: 1042824 - DNA, 15 bp, Homo sapiens
ccagctgtttattat

SEQ ID NO: 1042825 - DNA, 15 bp, Homo sapiens
cagctgtttattatg

SEQ ID NO: 1042826 - DNA, 15 bp, Homo sapiens
agctgtttattatgt

SEQ ID NO: 1042827 - DNA, 15 bp, Homo sapiens
gctgtttattatgta

SEQ ID NO: 1042828 - DNA, 15 bp, Homo sapiens
ctgtttattatgtat

SEQ ID NO: 1042829 - DNA, 15 bp, Homo sapiens
tgtttattatgtatg

SEQ ID NO: 1042830 - DNA, 15 bp, Homo sapiens
gtttattatgtatgt

SEQ ID NO: 1042831 - DNA, 15 bp, Homo sapiens
tttattatgtatgta

SEQ ID NO: 1042832 - DNA, 15 bp, Homo sapiens
ttattatgtatgtat

SEQ ID NO: 1042833 - DNA, 15 bp, Homo sapiens
tattatgtatgtatt

SEQ ID NO: 1042834 - DNA, 15 bp, Homo sapiens
attatgtatgtattt

SEQ ID NO: 1042835 - DNA, 15 bp, Homo sapiens
ttatgtatgtattta

SEQ ID NO: 1042836 - DNA, 15 bp, Homo sapiens
tatgtatgtatttac

SEQ ID NO: 1042837 - DNA, 15 bp, Homo sapiens
atgtatgtatttact

SEQ ID NO: 1042838 - DNA, 15 bp, Homo sapiens
tgtatgtatttactt

SEQ ID NO: 1042839 - DNA, 15 bp, Homo sapiens
gtatgtatttactta

SEQ ID NO: 1042840 - DNA, 15 bp, Homo sapiens
tatgtatttacttat

SEQ ID NO: 1042841 - DNA, 15 bp, Homo sapiens
atgtatttacttata

SEQ ID NO: 1042842 - DNA, 15 bp, Homo sapiens
tgtatttacttatat

SEQ ID NO: 1042843 - DNA, 15 bp, Homo sapiens
gtatttacttatatt

SEQ ID NO: 1042844 - DNA, 15 bp, Homo sapiens
tatttacttatattt

SEQ ID NO: 1042845 - DNA, 15 bp, Homo sapiens
atttacttatattta

SEQ ID NO: 1042846 - DNA, 15 bp, Homo sapiens
tttacttatatttac

SEQ ID NO: 1042847 - DNA, 15 bp, Homo sapiens
ttacttatatttact

SEQ ID NO: 1042848 - DNA, 15 bp, Homo sapiens
tacttatatttactt

SEQ ID NO: 1042849 - DNA, 15 bp, Homo sapiens
acttatatttactta

SEQ ID NO: 1042850 - DNA, 15 bp, Homo sapiens
cttatatttacttac

SEQ ID NO: 1042851 - DNA, 15 bp, Homo sapiens
ttatatttacttacc

SEQ ID NO: 1042852 - DNA, 15 bp, Homo sapiens
tatatttacttacct

SEQ ID NO: 1042853 - DNA, 15 bp, Homo sapiens
atatttacttaccta

SEQ ID NO: 1042854 - DNA, 15 bp, Homo sapiens
tatttacttacctat

SEQ ID NO: 1042855 - DNA, 15 bp, Homo sapiens
atttacttacctatt

SEQ ID NO: 1042856 - DNA, 15 bp, Homo sapiens
tttacttacctattt

SEQ ID NO: 1042857 - DNA, 15 bp, Homo sapiens
ttacttacctattta

SEQ ID NO: 1042858 - DNA, 15 bp, Homo sapiens
tacttacctatttat

SEQ ID NO: 1042859 - DNA, 15 bp, Homo sapiens
acttacctatttatt

SEQ ID NO: 1042860 - DNA, 15 bp, Homo sapiens
cttacctatttattt

SEQ ID NO: 1042861 - DNA, 15 bp, Homo sapiens
ttacctatttatttt

SEQ ID NO: 1042862 - DNA, 15 bp, Homo sapiens
tacctatttattttg

SEQ ID NO: 1042863 - DNA, 15 bp, Homo sapiens
acctatttattttga

SEQ ID NO: 1042864 - DNA, 15 bp, Homo sapiens
cctatttattttgag

SEQ ID NO: 1042865 - DNA, 15 bp, Homo sapiens
ctatttattttgaga

SEQ ID NO: 1042866 - DNA, 15 bp, Homo sapiens
tatttattttgagac

SEQ ID NO: 1042867 - DNA, 15 bp, Homo sapiens
atttattttgagacg

SEQ ID NO: 1042868 - DNA, 15 bp, Homo sapiens
tttattttgagacgg

SEQ ID NO: 1042869 - DNA, 15 bp, Homo sapiens
ttattttgagacgga

SEQ ID NO: 1042870 - DNA, 15 bp, Homo sapiens
tattttgagacggag

SEQ ID NO: 1042871 - DNA, 15 bp, Homo sapiens
attttgagacggagt

SEQ ID NO: 1042872 - DNA, 15 bp, Homo sapiens
ttttgagacggagtt

SEQ ID NO: 1042873 - DNA, 15 bp, Homo sapiens
tttgagacggagttt

SEQ ID NO: 1042874 - DNA, 15 bp, Homo sapiens
ttgagacggagtttc

SEQ ID NO: 1042875 - DNA, 15 bp, Homo sapiens
tgagacggagtttct

SEQ ID NO: 1042876 - DNA, 15 bp, Homo sapiens
gagacggagtttctc

SEQ ID NO: 1042877 - DNA, 15 bp, Homo sapiens
agacggagtttctct

SEQ ID NO: 1042878 - DNA, 15 bp, Homo sapiens
gacggagtttctctc

SEQ ID NO: 1042879 - DNA, 15 bp, Homo sapiens
acggagtttctctct

SEQ ID NO: 1042880 - DNA, 15 bp, Homo sapiens
cggagtttctctctt

SEQ ID NO: 1042881 - DNA, 15 bp, Homo sapiens
ggagtttctctcttg

SEQ ID NO: 1042882 - DNA, 15 bp, Homo sapiens
gagtttctctcttgt

SEQ ID NO: 1042883 - DNA, 15 bp, Homo sapiens
agtttctctcttgtt

SEQ ID NO: 1042884 - DNA, 15 bp, Homo sapiens
gtttctctcttgttg

SEQ ID NO: 1042885 - DNA, 15 bp, Homo sapiens
tttctctcttgttgc

SEQ ID NO: 1042886 - DNA, 15 bp, Homo sapiens
ttctctcttgttgcc

SEQ ID NO: 1042887 - DNA, 15 bp, Homo sapiens
tctctcttgttgccc

SEQ ID NO: 1042888 - DNA, 15 bp, Homo sapiens
ctctcttgttgccca

SEQ ID NO: 1042889 - DNA, 15 bp, Homo sapiens
tctcttgttgcccag

SEQ ID NO: 1042890 - DNA, 15 bp, Homo sapiens
ctggagtgcaatggt

SEQ ID NO: 1042891 - DNA, 15 bp, Homo sapiens
tggagtgcaatggtg

SEQ ID NO: 1042892 - DNA, 15 bp, Homo sapiens
ggagtgcaatggtgt

SEQ ID NO: 1042893 - DNA, 15 bp, Homo sapiens
gagtgcaatggtgtg

SEQ ID NO: 1042894 - DNA, 15 bp, Homo sapiens
agtgcaatggtgtga

SEQ ID NO: 1042895 - DNA, 15 bp, Homo sapiens
gtgcaatggtgtgat

SEQ ID NO: 1042896 - DNA, 15 bp, Homo sapiens
tgcaatggtgtgatc

SEQ ID NO: 1042897 - DNA, 15 bp, Homo sapiens
gcaatggtgtgatct

SEQ ID NO: 1042898 - DNA, 15 bp, Homo sapiens
caatggtgtgatctc

SEQ ID NO: 1042899 - DNA, 15 bp, Homo sapiens
aatggtgtgatctcg

SEQ ID NO: 1042900 - DNA, 15 bp, Homo sapiens
atggtgtgatctcgg

SEQ ID NO: 1042901 - DNA, 15 bp, Homo sapiens
tggtgtgatctcggc

SEQ ID NO: 1042902 - DNA, 15 bp, Homo sapiens
ggtgtgatctcggct

SEQ ID NO: 1042903 - DNA, 15 bp, Homo sapiens
gtgtgatctcggctc

SEQ ID NO: 1042904 - DNA, 15 bp, Homo sapiens
tgtgatctcggctca

SEQ ID NO: 1042905 - DNA, 15 bp, Homo sapiens
gtgatctcggctcac

SEQ ID NO: 1042906 - DNA, 15 bp, Homo sapiens
tgatctcggctcacc

SEQ ID NO: 1042907 - DNA, 15 bp, Homo sapiens
gatctcggctcaccg

SEQ ID NO: 1042908 - DNA, 15 bp, Homo sapiens
atctcggctcaccgc

SEQ ID NO: 1042909 - DNA, 15 bp, Homo sapiens
tctcggctcaccgca

SEQ ID NO: 1042910 - DNA, 15 bp, Homo sapiens
ctcggctcaccgcaa

SEQ ID NO: 1042911 - DNA, 15 bp, Homo sapiens
tcggctcaccgcaac

SEQ ID NO: 1042912 - DNA, 15 bp, Homo sapiens
cggctcaccgcaacc

SEQ ID NO: 1042913 - DNA, 15 bp, Homo sapiens
ggctcaccgcaacct

SEQ ID NO: 1042914 - DNA, 15 bp, Homo sapiens
gctcaccgcaacctt

SEQ ID NO: 1042915 - DNA, 15 bp, Homo sapiens
ctcaccgcaaccttt

SEQ ID NO: 1042916 - DNA, 15 bp, Homo sapiens
tcaccgcaacctttg

SEQ ID NO: 1042917 - DNA, 15 bp, Homo sapiens
caccgcaacctttgc

SEQ ID NO: 1042918 - DNA, 15 bp, Homo sapiens
accgcaacctttgcc

SEQ ID NO: 1042919 - DNA, 15 bp, Homo sapiens
ccgcaacctttgcct

SEQ ID NO: 1042920 - DNA, 15 bp, Homo sapiens
cgcaacctttgcctc

SEQ ID NO: 1042921 - DNA, 15 bp, Homo sapiens
gcaacctttgcctcc

SEQ ID NO: 1042922 - DNA, 15 bp, Homo sapiens
caacctttgcctccc

SEQ ID NO: 1042923 - DNA, 15 bp, Homo sapiens
aacctttgcctccca

SEQ ID NO: 1042924 - DNA, 15 bp, Homo sapiens
acctttgcctcccag

SEQ ID NO: 1042925 - DNA, 15 bp, Homo sapiens
cctttgcctcccagg

SEQ ID NO: 1042926 - DNA, 15 bp, Homo sapiens
ctttgcctcccaggt

SEQ ID NO: 1042927 - DNA, 15 bp, Homo sapiens
tttgcctcccaggtt

SEQ ID NO: 1042928 - DNA, 15 bp, Homo sapiens
ttgcctcccaggttc

SEQ ID NO: 1042929 - DNA, 15 bp, Homo sapiens
tgcctcccaggttca

SEQ ID NO: 1042930 - DNA, 15 bp, Homo sapiens
gcctcccaggttcaa

SEQ ID NO: 1042931 - DNA, 15 bp, Homo sapiens
ttcaagcgattctct

SEQ ID NO: 1042932 - DNA, 15 bp, Homo sapiens
tcaagcgattctctc

SEQ ID NO: 1042933 - DNA, 15 bp, Homo sapiens
caagcgattctctca

SEQ ID NO: 1042934 - DNA, 15 bp, Homo sapiens
aagcgattctctcac

SEQ ID NO: 1042935 - DNA, 15 bp, Homo sapiens
agcgattctctcacc

SEQ ID NO: 1042936 - DNA, 15 bp, Homo sapiens
gcgattctctcacct

SEQ ID NO: 1042937 - DNA, 15 bp, Homo sapiens
cgattctctcacctc

SEQ ID NO: 1042938 - DNA, 15 bp, Homo sapiens
gattctctcacctca

SEQ ID NO: 1042939 - DNA, 15 bp, Homo sapiens
attctctcacctcag

SEQ ID NO: 1042940 - DNA, 15 bp, Homo sapiens
ttctctcacctcagc

SEQ ID NO: 1042941 - DNA, 15 bp, Homo sapiens
tctctcacctcagcc

SEQ ID NO: 1042942 - DNA, 15 bp, Homo sapiens
ctctcacctcagcct

SEQ ID NO: 1042943 - DNA, 15 bp, Homo sapiens
tctcacctcagcctc

SEQ ID NO: 1042944 - DNA, 15 bp, Homo sapiens
ctcacctcagcctcc

SEQ ID NO: 1042945 - DNA, 15 bp, Homo sapiens
tcacctcagcctccc

SEQ ID NO: 1042946 - DNA, 15 bp, Homo sapiens
cacctcagcctccca

SEQ ID NO: 1042947 - DNA, 15 bp, Homo sapiens
acctcagcctcccaa

SEQ ID NO: 1042948 - DNA, 15 bp, Homo sapiens
cctcagcctcccaag

SEQ ID NO: 1042949 - DNA, 15 bp, Homo sapiens
ctcagcctcccaagt

SEQ ID NO: 1042950 - DNA, 15 bp, Homo sapiens
tcagcctcccaagta

SEQ ID NO: 1042951 - DNA, 15 bp, Homo sapiens
cagcctcccaagtag

SEQ ID NO: 1042952 - DNA, 15 bp, Homo sapiens
agcctcccaagtagc

SEQ ID NO: 1042953 - DNA, 15 bp, Homo sapiens
gcctcccaagtagct

SEQ ID NO: 1042954 - DNA, 15 bp, Homo sapiens
cctcccaagtagctg

SEQ ID NO: 1042955 - DNA, 15 bp, Homo sapiens
ctcccaagtagctgg

SEQ ID NO: 1042956 - DNA, 15 bp, Homo sapiens
tcccaagtagctggg

SEQ ID NO: 1042957 - DNA, 15 bp, Homo sapiens
cccaagtagctggga

SEQ ID NO: 1042958 - DNA, 15 bp, Homo sapiens
ccaagtagctgggat

SEQ ID NO: 1042959 - DNA, 15 bp, Homo sapiens
caagtagctgggatt

SEQ ID NO: 1042960 - DNA, 15 bp, Homo sapiens
aagtagctgggatta

SEQ ID NO: 1042961 - DNA, 15 bp, Homo sapiens
ctgggattacaggct

SEQ ID NO: 1042962 - DNA, 15 bp, Homo sapiens
tgggattacaggctg

SEQ ID NO: 1042963 - DNA, 15 bp, Homo sapiens
gggattacaggctgc

SEQ ID NO: 1042964 - DNA, 15 bp, Homo sapiens
ggattacaggctgcg

SEQ ID NO: 1042965 - DNA, 15 bp, Homo sapiens
gattacaggctgcgc

SEQ ID NO: 1042966 - DNA, 15 bp, Homo sapiens
attacaggctgcgcc

SEQ ID NO: 1042967 - DNA, 15 bp, Homo sapiens
ttacaggctgcgcca

SEQ ID NO: 1042968 - DNA, 15 bp, Homo sapiens
tacaggctgcgccac

SEQ ID NO: 1042969 - DNA, 15 bp, Homo sapiens
acaggctgcgccact

SEQ ID NO: 1042970 - DNA, 15 bp, Homo sapiens
caggctgcgccactg

SEQ ID NO: 1042971 - DNA, 15 bp, Homo sapiens
aggctgcgccactgt

SEQ ID NO: 1042972 - DNA, 15 bp, Homo sapiens
ggctgcgccactgtg

SEQ ID NO: 1042973 - DNA, 15 bp, Homo sapiens
gctgcgccactgtgc

SEQ ID NO: 1042974 - DNA, 15 bp, Homo sapiens
ctgcgccactgtgcc

SEQ ID NO: 1042975 - DNA, 15 bp, Homo sapiens
tgcgccactgtgccc

SEQ ID NO: 1042976 - DNA, 15 bp, Homo sapiens
gcgccactgtgccca

SEQ ID NO: 1042977 - DNA, 15 bp, Homo sapiens
cgccactgtgcccag

SEQ ID NO: 1042978 - DNA, 15 bp, Homo sapiens
gccactgtgcccagc

SEQ ID NO: 1042979 - DNA, 15 bp, Homo sapiens
ccactgtgcccagct

SEQ ID NO: 1042980 - DNA, 15 bp, Homo sapiens
cactgtgcccagcta

SEQ ID NO: 1042981 - DNA, 15 bp, Homo sapiens
actgtgcccagctaa

SEQ ID NO: 1042982 - DNA, 15 bp, Homo sapiens
ctgtgcccagctaat

SEQ ID NO: 1042983 - DNA, 15 bp, Homo sapiens
tgtgcccagctaatt

SEQ ID NO: 1042984 - DNA, 15 bp, Homo sapiens
gtgcccagctaattt

SEQ ID NO: 1042985 - DNA, 15 bp, Homo sapiens
gcccagctaattttg

SEQ ID NO: 1042986 - DNA, 15 bp, Homo sapiens
cccagctaattttgt

SEQ ID NO: 1042987 - DNA, 15 bp, Homo sapiens
ccagctaattttgta

SEQ ID NO: 1042988 - DNA, 15 bp, Homo sapiens
cagctaattttgtat

SEQ ID NO: 1042989 - DNA, 15 bp, Homo sapiens
agctaattttgtatt

SEQ ID NO: 1042990 - DNA, 15 bp, Homo sapiens
gctaattttgtattt

SEQ ID NO: 1042991 - DNA, 15 bp, Homo sapiens
ctaattttgtatttt

SEQ ID NO: 1042992 - DNA, 15 bp, Homo sapiens
taattttgtattttt

SEQ ID NO: 1042993 - DNA, 15 bp, Homo sapiens
aattttgtattttta

SEQ ID NO: 1042994 - DNA, 15 bp, Homo sapiens
attttgtatttttag

SEQ ID NO: 1042995 - DNA, 15 bp, Homo sapiens
atttttagtagagac

SEQ ID NO: 1042996 - DNA, 15 bp, Homo sapiens
tttttagtagagaca

SEQ ID NO: 1042997 - DNA, 15 bp, Homo sapiens
ttttagtagagacag

SEQ ID NO: 1042998 - DNA, 15 bp, Homo sapiens
tttagtagagacagg

SEQ ID NO: 1042999 - DNA, 15 bp, Homo sapiens
ttagtagagacaggg

SEQ ID NO: 1043000 - DNA, 15 bp, Homo sapiens
tagtagagacagggt

SEQ ID NO: 1043001 - DNA, 15 bp, Homo sapiens
agtagagacagggtt

SEQ ID NO: 1043002 - DNA, 15 bp, Homo sapiens
gtagagacagggttt

SEQ ID NO: 1043003 - DNA, 15 bp, Homo sapiens
tagagacagggtttc

SEQ ID NO: 1043004 - DNA, 15 bp, Homo sapiens
agagacagggtttct

SEQ ID NO: 1043005 - DNA, 15 bp, Homo sapiens
gagacagggtttctc

SEQ ID NO: 1043006 - DNA, 15 bp, Homo sapiens
agacagggtttctcc

SEQ ID NO: 1043007 - DNA, 15 bp, Homo sapiens
gacagggtttctcca

SEQ ID NO: 1043008 - DNA, 15 bp, Homo sapiens
acagggtttctccat

SEQ ID NO: 1043009 - DNA, 15 bp, Homo sapiens
cagggtttctccatg

SEQ ID NO: 1043010 - DNA, 15 bp, Homo sapiens
agggtttctccatgt

SEQ ID NO: 1043011 - DNA, 15 bp, Homo sapiens
gggtttctccatgtt

SEQ ID NO: 1043012 - DNA, 15 bp, Homo sapiens
ggtttctccatgttg

SEQ ID NO: 1043013 - DNA, 15 bp, Homo sapiens
gtttctccatgttgg

SEQ ID NO: 1043014 - DNA, 15 bp, Homo sapiens
tttctccatgttggc

SEQ ID NO: 1043015 - DNA, 15 bp, Homo sapiens
ttctccatgttggcc

SEQ ID NO: 1043016 - DNA, 15 bp, Homo sapiens
tctccatgttggcca

SEQ ID NO: 1043017 - DNA, 15 bp, Homo sapiens
ctccatgttggccag

SEQ ID NO: 1043018 - DNA, 15 bp, Homo sapiens
tccatgttggccagg

SEQ ID NO: 1043019 - DNA, 15 bp, Homo sapiens
ccatgttggccaggc

SEQ ID NO: 1043020 - DNA, 15 bp, Homo sapiens
catgttggccaggct

SEQ ID NO: 1043021 - DNA, 15 bp, Homo sapiens
acctcaggtgatccg

SEQ ID NO: 1043022 - DNA, 15 bp, Homo sapiens
cctcaggtgatccgc

SEQ ID NO: 1043023 - DNA, 15 bp, Homo sapiens
ctcaggtgatccgcc

SEQ ID NO: 1043024 - DNA, 15 bp, Homo sapiens
tcaggtgatccgccc

SEQ ID NO: 1043025 - DNA, 15 bp, Homo sapiens
caggtgatccgccca

SEQ ID NO: 1043026 - DNA, 15 bp, Homo sapiens
aggtgatccgcccac

SEQ ID NO: 1043027 - DNA, 15 bp, Homo sapiens
ggtgatccgcccacc

SEQ ID NO: 1043028 - DNA, 15 bp, Homo sapiens
gtgatccgcccacct

SEQ ID NO: 1043029 - DNA, 15 bp, Homo sapiens
tgatccgcccacctc

SEQ ID NO: 1043030 - DNA, 15 bp, Homo sapiens
gatccgcccacctcg

SEQ ID NO: 1043031 - DNA, 15 bp, Homo sapiens
atccgcccacctcga

SEQ ID NO: 1043032 - DNA, 15 bp, Homo sapiens
tccgcccacctcgac

SEQ ID NO: 1043033 - DNA, 15 bp, Homo sapiens
ccgcccacctcgacc

SEQ ID NO: 1043034 - DNA, 15 bp, Homo sapiens
cgcccacctcgacct

SEQ ID NO: 1043035 - DNA, 15 bp, Homo sapiens
gcccacctcgacctc

SEQ ID NO: 1043036 - DNA, 15 bp, Homo sapiens
cccacctcgacctcc

SEQ ID NO: 1043037 - DNA, 15 bp, Homo sapiens
ccacctcgacctccc

SEQ ID NO: 1043038 - DNA, 15 bp, Homo sapiens
cacctcgacctccca

SEQ ID NO: 1043039 - DNA, 15 bp, Homo sapiens
acctcgacctcccaa

SEQ ID NO: 1043040 - DNA, 15 bp, Homo sapiens
cctcgacctcccaaa

SEQ ID NO: 1043041 - DNA, 15 bp, Homo sapiens
ctcgacctcccaaag

SEQ ID NO: 1043042 - DNA, 15 bp, Homo sapiens
tcgacctcccaaagt

SEQ ID NO: 1043043 - DNA, 15 bp, Homo sapiens
cgacctcccaaagtg

SEQ ID NO: 1043044 - DNA, 15 bp, Homo sapiens
gacctcccaaagtgc

SEQ ID NO: 1043045 - DNA, 15 bp, Homo sapiens
acctcccaaagtgct

SEQ ID NO: 1043046 - DNA, 15 bp, Homo sapiens
caggtgtgagccacg

SEQ ID NO: 1043047 - DNA, 15 bp, Homo sapiens
aggtgtgagccacga

SEQ ID NO: 1043048 - DNA, 15 bp, Homo sapiens
ggtgtgagccacgaa

SEQ ID NO: 1043049 - DNA, 15 bp, Homo sapiens
gtgtgagccacgaag

SEQ ID NO: 1043050 - DNA, 15 bp, Homo sapiens
tgtgagccacgaagc

SEQ ID NO: 1043051 - DNA, 15 bp, Homo sapiens
gtgagccacgaagcc

SEQ ID NO: 1043052 - DNA, 15 bp, Homo sapiens
tgagccacgaagccc

SEQ ID NO: 1043053 - DNA, 15 bp, Homo sapiens
gagccacgaagcccg

SEQ ID NO: 1043054 - DNA, 15 bp, Homo sapiens
agccacgaagcccgg

SEQ ID NO: 1043055 - DNA, 15 bp, Homo sapiens
gccacgaagcccggc

SEQ ID NO: 1043056 - DNA, 15 bp, Homo sapiens
ccacgaagcccggcc

SEQ ID NO: 1043057 - DNA, 15 bp, Homo sapiens
cacgaagcccggcct

SEQ ID NO: 1043058 - DNA, 15 bp, Homo sapiens
acgaagcccggccta

SEQ ID NO: 1043059 - DNA, 15 bp, Homo sapiens
cgaagcccggcctat

SEQ ID NO: 1043060 - DNA, 15 bp, Homo sapiens
gaagcccggcctatt

SEQ ID NO: 1043061 - DNA, 15 bp, Homo sapiens
aagcccggcctattt

SEQ ID NO: 1043062 - DNA, 15 bp, Homo sapiens
agcccggcctattta

SEQ ID NO: 1043063 - DNA, 15 bp, Homo sapiens
gcccggcctatttat

SEQ ID NO: 1043064 - DNA, 15 bp, Homo sapiens
cccggcctatttatt

SEQ ID NO: 1043065 - DNA, 15 bp, Homo sapiens
ccggcctatttattt

SEQ ID NO: 1043066 - DNA, 15 bp, Homo sapiens
cggcctatttattta

SEQ ID NO: 1043067 - DNA, 15 bp, Homo sapiens
ggcctatttatttat

SEQ ID NO: 1043068 - DNA, 15 bp, Homo sapiens
gcctatttatttatt

SEQ ID NO: 1043069 - DNA, 15 bp, Homo sapiens
cctatttatttattt

SEQ ID NO: 1043070 - DNA, 15 bp, Homo sapiens
ctatttatttatttt

SEQ ID NO: 1043071 - DNA, 15 bp, Homo sapiens
tatttatttattttt

SEQ ID NO: 1043072 - DNA, 15 bp, Homo sapiens
atttatttatttttt

SEQ ID NO: 1043073 - DNA, 15 bp, Homo sapiens
tttatttattttttt

SEQ ID NO: 1043074 - DNA, 15 bp, Homo sapiens
ttatttatttttttg

SEQ ID NO: 1043075 - DNA, 15 bp, Homo sapiens
tatttatttttttga

SEQ ID NO: 1043076 - DNA, 15 bp, Homo sapiens
atttatttttttgag

SEQ ID NO: 1043077 - DNA, 15 bp, Homo sapiens
tttatttttttgaga

SEQ ID NO: 1043078 - DNA, 15 bp, Homo sapiens
ttatttttttgagac

SEQ ID NO: 1043079 - DNA, 15 bp, Homo sapiens
tatttttttgagaca

SEQ ID NO: 1043080 - DNA, 15 bp, Homo sapiens
atttttttgagacat

SEQ ID NO: 1043081 - DNA, 15 bp, Homo sapiens
tttttttgagacatg

SEQ ID NO: 1043082 - DNA, 15 bp, Homo sapiens
ttttttgagacatgg

SEQ ID NO: 1043083 - DNA, 15 bp, Homo sapiens
tttttgagacatggt

SEQ ID NO: 1043084 - DNA, 15 bp, Homo sapiens
ttttgagacatggtc

SEQ ID NO: 1043085 - DNA, 15 bp, Homo sapiens
tttgagacatggtct

SEQ ID NO: 1043086 - DNA, 15 bp, Homo sapiens
ttgagacatggtctc

SEQ ID NO: 1043087 - DNA, 15 bp, Homo sapiens
tgagacatggtctca

SEQ ID NO: 1043088 - DNA, 15 bp, Homo sapiens
gagacatggtctcag

SEQ ID NO: 1043089 - DNA, 15 bp, Homo sapiens
agacatggtctcagt

SEQ ID NO: 1043090 - DNA, 15 bp, Homo sapiens
gacatggtctcagtc

SEQ ID NO: 1043091 - DNA, 15 bp, Homo sapiens
acatggtctcagtct

SEQ ID NO: 1043092 - DNA, 15 bp, Homo sapiens
catggtctcagtctg

SEQ ID NO: 1043093 - DNA, 15 bp, Homo sapiens
atggtctcagtctgt

SEQ ID NO: 1043094 - DNA, 15 bp, Homo sapiens
tggtctcagtctgtc

SEQ ID NO: 1043095 - DNA, 15 bp, Homo sapiens
ggtctcagtctgtcg

SEQ ID NO: 1043096 - DNA, 15 bp, Homo sapiens
gtctcagtctgtcgc

SEQ ID NO: 1043097 - DNA, 15 bp, Homo sapiens
tctcagtctgtcgcc

SEQ ID NO: 1043098 - DNA, 15 bp, Homo sapiens
ctcagtctgtcgccc

SEQ ID NO: 1043099 - DNA, 15 bp, Homo sapiens
tcagtctgtcgcccg

SEQ ID NO: 1043100 - DNA, 15 bp, Homo sapiens
cagtctgtcgcccgg

SEQ ID NO: 1043101 - DNA, 15 bp, Homo sapiens
agtctgtcgcccggg

SEQ ID NO: 1043102 - DNA, 15 bp, Homo sapiens
gtctgtcgcccgggc

SEQ ID NO: 1043103 - DNA, 15 bp, Homo sapiens
tctgtcgcccgggct

SEQ ID NO: 1043104 - DNA, 15 bp, Homo sapiens
ctgtcgcccgggctg

SEQ ID NO: 1043105 - DNA, 15 bp, Homo sapiens
tgtcgcccgggctgg

SEQ ID NO: 1043106 - DNA, 15 bp, Homo sapiens
gtcgcccgggctgga

SEQ ID NO: 1043107 - DNA, 15 bp, Homo sapiens
tcgcccgggctggag

SEQ ID NO: 1043108 - DNA, 15 bp, Homo sapiens
cgcccgggctggagt

SEQ ID NO: 1043109 - DNA, 15 bp, Homo sapiens
gcccgggctggagtg

SEQ ID NO: 1043110 - DNA, 15 bp, Homo sapiens
cccgggctggagtgc

SEQ ID NO: 1043111 - DNA, 15 bp, Homo sapiens
ccgggctggagtgca

SEQ ID NO: 1043112 - DNA, 15 bp, Homo sapiens
cgggctggagtgcag

SEQ ID NO: 1043113 - DNA, 15 bp, Homo sapiens
gggctggagtgcagt

SEQ ID NO: 1043114 - DNA, 15 bp, Homo sapiens
ggagtgcagtggcat

SEQ ID NO: 1043115 - DNA, 15 bp, Homo sapiens
gagtgcagtggcatg

SEQ ID NO: 1043116 - DNA, 15 bp, Homo sapiens
agtgcagtggcatga

SEQ ID NO: 1043117 - DNA, 15 bp, Homo sapiens
gtgcagtggcatgat

SEQ ID NO: 1043118 - DNA, 15 bp, Homo sapiens
tgcagtggcatgatc

SEQ ID NO: 1043119 - DNA, 15 bp, Homo sapiens
gcagtggcatgatct

SEQ ID NO: 1043120 - DNA, 15 bp, Homo sapiens
cagtggcatgatctt

SEQ ID NO: 1043121 - DNA, 15 bp, Homo sapiens
agtggcatgatcttg

SEQ ID NO: 1043122 - DNA, 15 bp, Homo sapiens
gtggcatgatcttgg

SEQ ID NO: 1043123 - DNA, 15 bp, Homo sapiens
tggcatgatcttggc

SEQ ID NO: 1043124 - DNA, 15 bp, Homo sapiens
ggcatgatcttggct

SEQ ID NO: 1043125 - DNA, 15 bp, Homo sapiens
gcatgatcttggctc

SEQ ID NO: 1043126 - DNA, 15 bp, Homo sapiens
catgatcttggctca

SEQ ID NO: 1043127 - DNA, 15 bp, Homo sapiens
atgatcttggctcac

SEQ ID NO: 1043128 - DNA, 15 bp, Homo sapiens
tgatcttggctcact

SEQ ID NO: 1043129 - DNA, 15 bp, Homo sapiens
gatcttggctcactg

SEQ ID NO: 1043130 - DNA, 15 bp, Homo sapiens
atcttggctcactgc

SEQ ID NO: 1043131 - DNA, 15 bp, Homo sapiens
tcttggctcactgca

SEQ ID NO: 1043132 - DNA, 15 bp, Homo sapiens
cttggctcactgcaa

SEQ ID NO: 1043133 - DNA, 15 bp, Homo sapiens
ttggctcactgcaac

SEQ ID NO: 1043134 - DNA, 15 bp, Homo sapiens
tggctcactgcaacc

SEQ ID NO: 1043135 - DNA, 15 bp, Homo sapiens
tcactgcaacctccg

SEQ ID NO: 1043136 - DNA, 15 bp, Homo sapiens
cactgcaacctccgc

SEQ ID NO: 1043137 - DNA, 15 bp, Homo sapiens
actgcaacctccgcc

SEQ ID NO: 1043138 - DNA, 15 bp, Homo sapiens
ctgcaacctccgcct

SEQ ID NO: 1043139 - DNA, 15 bp, Homo sapiens
tgcaacctccgcctc

SEQ ID NO: 1043140 - DNA, 15 bp, Homo sapiens
gcaacctccgcctcc

SEQ ID NO: 1043141 - DNA, 15 bp, Homo sapiens
ctcccgggttcaagt

SEQ ID NO: 1043142 - DNA, 15 bp, Homo sapiens
tcccgggttcaagtg

SEQ ID NO: 1043143 - DNA, 15 bp, Homo sapiens
cccgggttcaagtga

SEQ ID NO: 1043144 - DNA, 15 bp, Homo sapiens
ccgggttcaagtgat

SEQ ID NO: 1043145 - DNA, 15 bp, Homo sapiens
cgggttcaagtgatt

SEQ ID NO: 1043146 - DNA, 15 bp, Homo sapiens
gggttcaagtgattc

SEQ ID NO: 1043147 - DNA, 15 bp, Homo sapiens
ggttcaagtgattct

SEQ ID NO: 1043148 - DNA, 15 bp, Homo sapiens
gttcaagtgattctc

SEQ ID NO: 1043149 - DNA, 15 bp, Homo sapiens
ttcaagtgattctcc

SEQ ID NO: 1043150 - DNA, 15 bp, Homo sapiens
tcaagtgattctcct

SEQ ID NO: 1043151 - DNA, 15 bp, Homo sapiens
caagtgattctcctg

SEQ ID NO: 1043152 - DNA, 15 bp, Homo sapiens
aagtgattctcctgc

SEQ ID NO: 1043153 - DNA, 15 bp, Homo sapiens
agtgattctcctgcc

SEQ ID NO: 1043154 - DNA, 15 bp, Homo sapiens
gtgattctcctgcct

SEQ ID NO: 1043155 - DNA, 15 bp, Homo sapiens
tgattctcctgcctc

SEQ ID NO: 1043156 - DNA, 15 bp, Homo sapiens
agcctcctgagtagt

SEQ ID NO: 1043157 - DNA, 15 bp, Homo sapiens
gcctcctgagtagtt

SEQ ID NO: 1043158 - DNA, 15 bp, Homo sapiens
cctcctgagtagttg

SEQ ID NO: 1043159 - DNA, 15 bp, Homo sapiens
ctcctgagtagttgg

SEQ ID NO: 1043160 - DNA, 15 bp, Homo sapiens
tcctgagtagttggg

SEQ ID NO: 1043161 - DNA, 15 bp, Homo sapiens
cctgagtagttggga

SEQ ID NO: 1043162 - DNA, 15 bp, Homo sapiens
ctgagtagttgggat

SEQ ID NO: 1043163 - DNA, 15 bp, Homo sapiens
tgagtagttgggatt

SEQ ID NO: 1043164 - DNA, 15 bp, Homo sapiens
gagtagttgggatta

SEQ ID NO: 1043165 - DNA, 15 bp, Homo sapiens
agtagttgggattac

SEQ ID NO: 1043166 - DNA, 15 bp, Homo sapiens
gtagttgggattaca

SEQ ID NO: 1043167 - DNA, 15 bp, Homo sapiens
tagttgggattacag

SEQ ID NO: 1043168 - DNA, 15 bp, Homo sapiens
agttgggattacagg

SEQ ID NO: 1043169 - DNA, 15 bp, Homo sapiens
gttgggattacaggt

SEQ ID NO: 1043170 - DNA, 15 bp, Homo sapiens
ttgggattacaggtg

SEQ ID NO: 1043171 - DNA, 15 bp, Homo sapiens
tgggattacaggtgc

SEQ ID NO: 1043172 - DNA, 15 bp, Homo sapiens
gggattacaggtgcc

SEQ ID NO: 1043173 - DNA, 15 bp, Homo sapiens
ggattacaggtgccc

SEQ ID NO: 1043174 - DNA, 15 bp, Homo sapiens
gattacaggtgccca

SEQ ID NO: 1043175 - DNA, 15 bp, Homo sapiens
attacaggtgcccac

SEQ ID NO: 1043176 - DNA, 15 bp, Homo sapiens
ttacaggtgcccacc

SEQ ID NO: 1043177 - DNA, 15 bp, Homo sapiens
tacaggtgcccacca

SEQ ID NO: 1043178 - DNA, 15 bp, Homo sapiens
acaggtgcccaccac

SEQ ID NO: 1043179 - DNA, 15 bp, Homo sapiens
caggtgcccaccact

SEQ ID NO: 1043180 - DNA, 15 bp, Homo sapiens
aggtgcccaccacta

SEQ ID NO: 1043181 - DNA, 15 bp, Homo sapiens
ggtgcccaccactac

SEQ ID NO: 1043182 - DNA, 15 bp, Homo sapiens
gtgcccaccactaca

SEQ ID NO: 1043183 - DNA, 15 bp, Homo sapiens
tgcccaccactacac

SEQ ID NO: 1043184 - DNA, 15 bp, Homo sapiens
gcccaccactacacc

SEQ ID NO: 1043185 - DNA, 15 bp, Homo sapiens
cccaccactacaccc

SEQ ID NO: 1043186 - DNA, 15 bp, Homo sapiens
ccaccactacacccg

SEQ ID NO: 1043187 - DNA, 15 bp, Homo sapiens
caccactacacccgg

SEQ ID NO: 1043188 - DNA, 15 bp, Homo sapiens
accactacacccggc

SEQ ID NO: 1043189 - DNA, 15 bp, Homo sapiens
ccactacacccggct

SEQ ID NO: 1043190 - DNA, 15 bp, Homo sapiens
cactacacccggcta

SEQ ID NO: 1043191 - DNA, 15 bp, Homo sapiens
actacacccggctaa

SEQ ID NO: 1043192 - DNA, 15 bp, Homo sapiens
ctacacccggctaat

SEQ ID NO: 1043193 - DNA, 15 bp, Homo sapiens
tacacccggctaatt

SEQ ID NO: 1043194 - DNA, 15 bp, Homo sapiens
acacccggctaattt

SEQ ID NO: 1043195 - DNA, 15 bp, Homo sapiens
cacccggctaatttt

SEQ ID NO: 1043196 - DNA, 15 bp, Homo sapiens
acccggctaattttt

SEQ ID NO: 1043197 - DNA, 15 bp, Homo sapiens
cccggctaatttttg

SEQ ID NO: 1043198 - DNA, 15 bp, Homo sapiens
ccggctaatttttgt

SEQ ID NO: 1043199 - DNA, 15 bp, Homo sapiens
cggctaatttttgta

SEQ ID NO: 1043200 - DNA, 15 bp, Homo sapiens
ggctaatttttgtat

SEQ ID NO: 1043201 - DNA, 15 bp, Homo sapiens
gctaatttttgtatt

SEQ ID NO: 1043202 - DNA, 15 bp, Homo sapiens
ctaatttttgtattt

SEQ ID NO: 1043203 - DNA, 15 bp, Homo sapiens
taatttttgtatttt

SEQ ID NO: 1043204 - DNA, 15 bp, Homo sapiens
aatttttgtattttt

SEQ ID NO: 1043205 - DNA, 15 bp, Homo sapiens
atttttgtattttta

SEQ ID NO: 1043206 - DNA, 15 bp, Homo sapiens
tatttttagtagagg

SEQ ID NO: 1043207 - DNA, 15 bp, Homo sapiens
atttttagtagaggc

SEQ ID NO: 1043208 - DNA, 15 bp, Homo sapiens
tttttagtagaggcg

SEQ ID NO: 1043209 - DNA, 15 bp, Homo sapiens
ttttagtagaggcga

SEQ ID NO: 1043210 - DNA, 15 bp, Homo sapiens
tttagtagaggcgag

SEQ ID NO: 1043211 - DNA, 15 bp, Homo sapiens
ttagtagaggcgagg

SEQ ID NO: 1043212 - DNA, 15 bp, Homo sapiens
tagtagaggcgaggt

SEQ ID NO: 1043213 - DNA, 15 bp, Homo sapiens
agtagaggcgaggtt

SEQ ID NO: 1043214 - DNA, 15 bp, Homo sapiens
gtagaggcgaggttt

SEQ ID NO: 1043215 - DNA, 15 bp, Homo sapiens
tagaggcgaggtttc

SEQ ID NO: 1043216 - DNA, 15 bp, Homo sapiens
agaggcgaggtttca

SEQ ID NO: 1043217 - DNA, 15 bp, Homo sapiens
gaggcgaggtttcac

SEQ ID NO: 1043218 - DNA, 15 bp, Homo sapiens
aggcgaggtttcacc

SEQ ID NO: 1043219 - DNA, 15 bp, Homo sapiens
ggcgaggtttcacca

SEQ ID NO: 1043220 - DNA, 15 bp, Homo sapiens
gcgaggtttcaccag

SEQ ID NO: 1043221 - DNA, 15 bp, Homo sapiens
cgaggtttcaccagg

SEQ ID NO: 1043222 - DNA, 15 bp, Homo sapiens
gaggtttcaccaggt

SEQ ID NO: 1043223 - DNA, 15 bp, Homo sapiens
aggtttcaccaggtt

SEQ ID NO: 1043224 - DNA, 15 bp, Homo sapiens
ggtttcaccaggttg

SEQ ID NO: 1043225 - DNA, 15 bp, Homo sapiens
gtttcaccaggttgg

SEQ ID NO: 1043226 - DNA, 15 bp, Homo sapiens
tttcaccaggttggc

SEQ ID NO: 1043227 - DNA, 15 bp, Homo sapiens
ttcaccaggttggcc

SEQ ID NO: 1043228 - DNA, 15 bp, Homo sapiens
tcaccaggttggcca

SEQ ID NO: 1043229 - DNA, 15 bp, Homo sapiens
caccaggttggccag

SEQ ID NO: 1043230 - DNA, 15 bp, Homo sapiens
accaggttggccagg

SEQ ID NO: 1043231 - DNA, 15 bp, Homo sapiens
ccaggttggccaggc

SEQ ID NO: 1043232 - DNA, 15 bp, Homo sapiens
caggttggccaggct

SEQ ID NO: 1043233 - DNA, 15 bp, Homo sapiens
aggttggccaggctg

SEQ ID NO: 1043234 - DNA, 15 bp, Homo sapiens
ggttggccaggctgg

SEQ ID NO: 1043235 - DNA, 15 bp, Homo sapiens
ggccaggctggtctg

SEQ ID NO: 1043236 - DNA, 15 bp, Homo sapiens
gccaggctggtctgg

SEQ ID NO: 1043237 - DNA, 15 bp, Homo sapiens
ccaggctggtctgga

SEQ ID NO: 1043238 - DNA, 15 bp, Homo sapiens
caggctggtctggaa

SEQ ID NO: 1043239 - DNA, 15 bp, Homo sapiens
aggctggtctggaac

SEQ ID NO: 1043240 - DNA, 15 bp, Homo sapiens
ggctggtctggaact

SEQ ID NO: 1043241 - DNA, 15 bp, Homo sapiens
gctggtctggaactc

SEQ ID NO: 1043242 - DNA, 15 bp, Homo sapiens
ctggtctggaactcc

SEQ ID NO: 1043243 - DNA, 15 bp, Homo sapiens
tggtctggaactcct

SEQ ID NO: 1043244 - DNA, 15 bp, Homo sapiens
ggtctggaactcctg

SEQ ID NO: 1043245 - DNA, 15 bp, Homo sapiens
gtctggaactcctga

SEQ ID NO: 1043246 - DNA, 15 bp, Homo sapiens
tctggaactcctgac

SEQ ID NO: 1043247 - DNA, 15 bp, Homo sapiens
ctggaactcctgacc

SEQ ID NO: 1043248 - DNA, 15 bp, Homo sapiens
tggaactcctgacct

SEQ ID NO: 1043249 - DNA, 15 bp, Homo sapiens
ggaactcctgacctc

SEQ ID NO: 1043250 - DNA, 15 bp, Homo sapiens
aactcctgacctcaa

SEQ ID NO: 1043251 - DNA, 15 bp, Homo sapiens
actcctgacctcaaa

SEQ ID NO: 1043252 - DNA, 15 bp, Homo sapiens
ctcctgacctcaaat

SEQ ID NO: 1043253 - DNA, 15 bp, Homo sapiens
tcctgacctcaaatg

SEQ ID NO: 1043254 - DNA, 15 bp, Homo sapiens
cctgacctcaaatga

SEQ ID NO: 1043255 - DNA, 15 bp, Homo sapiens
ctgacctcaaatgat

SEQ ID NO: 1043256 - DNA, 15 bp, Homo sapiens
tgacctcaaatgatc

SEQ ID NO: 1043257 - DNA, 15 bp, Homo sapiens
gacctcaaatgatcc

SEQ ID NO: 1043258 - DNA, 15 bp, Homo sapiens
acctcaaatgatcca

SEQ ID NO: 1043259 - DNA, 15 bp, Homo sapiens
cctcaaatgatccac

SEQ ID NO: 1043260 - DNA, 15 bp, Homo sapiens
ctcaaatgatccacc

SEQ ID NO: 1043261 - DNA, 15 bp, Homo sapiens
tcaaatgatccaccc

SEQ ID NO: 1043262 - DNA, 15 bp, Homo sapiens
caaatgatccaccca

SEQ ID NO: 1043263 - DNA, 15 bp, Homo sapiens
aaatgatccacccac

SEQ ID NO: 1043264 - DNA, 15 bp, Homo sapiens
aatgatccacccacc

SEQ ID NO: 1043265 - DNA, 15 bp, Homo sapiens
atgatccacccacct

SEQ ID NO: 1043266 - DNA, 15 bp, Homo sapiens
tgatccacccacctt

SEQ ID NO: 1043267 - DNA, 15 bp, Homo sapiens
gatccacccaccttg

SEQ ID NO: 1043268 - DNA, 15 bp, Homo sapiens
atccacccaccttgg

SEQ ID NO: 1043269 - DNA, 15 bp, Homo sapiens
tccacccaccttggc

SEQ ID NO: 1043270 - DNA, 15 bp, Homo sapiens
ccacccaccttggcc

SEQ ID NO: 1043271 - DNA, 15 bp, Homo sapiens
cacccaccttggcct

SEQ ID NO: 1043272 - DNA, 15 bp, Homo sapiens
acccaccttggcctc

SEQ ID NO: 1043273 - DNA, 15 bp, Homo sapiens
cccaccttggcctcc

SEQ ID NO: 1043274 - DNA, 15 bp, Homo sapiens
ccaccttggcctccc

SEQ ID NO: 1043275 - DNA, 15 bp, Homo sapiens
caccttggcctccca

SEQ ID NO: 1043276 - DNA, 15 bp, Homo sapiens
accttggcctcccaa

SEQ ID NO: 1043277 - DNA, 15 bp, Homo sapiens
ccttggcctcccaaa

SEQ ID NO: 1043278 - DNA, 15 bp, Homo sapiens
cttggcctcccaaag

SEQ ID NO: 1043279 - DNA, 15 bp, Homo sapiens
ttggcctcccaaagt

SEQ ID NO: 1043280 - DNA, 15 bp, Homo sapiens
tggcctcccaaagtg

SEQ ID NO: 1043281 - DNA, 15 bp, Homo sapiens
aagtgctgggattat

SEQ ID NO: 1043282 - DNA, 15 bp, Homo sapiens
agtgctgggattata

SEQ ID NO: 1043283 - DNA, 15 bp, Homo sapiens
gtgctgggattataa

SEQ ID NO: 1043284 - DNA, 15 bp, Homo sapiens
tgctgggattataag

SEQ ID NO: 1043285 - DNA, 15 bp, Homo sapiens
gctgggattataagc

SEQ ID NO: 1043286 - DNA, 15 bp, Homo sapiens
ctgggattataagca

SEQ ID NO: 1043287 - DNA, 15 bp, Homo sapiens
tgggattataagcat

SEQ ID NO: 1043288 - DNA, 15 bp, Homo sapiens
gggattataagcata

SEQ ID NO: 1043289 - DNA, 15 bp, Homo sapiens
ggattataagcatat

SEQ ID NO: 1043290 - DNA, 15 bp, Homo sapiens
gattataagcatatg

SEQ ID NO: 1043291 - DNA, 15 bp, Homo sapiens
attataagcatatgc

SEQ ID NO: 1043292 - DNA, 15 bp, Homo sapiens
ttataagcatatgcc

SEQ ID NO: 1043293 - DNA, 15 bp, Homo sapiens
tataagcatatgcca

SEQ ID NO: 1043294 - DNA, 15 bp, Homo sapiens
ataagcatatgccac

SEQ ID NO: 1043295 - DNA, 15 bp, Homo sapiens
taagcatatgccaca

SEQ ID NO: 1043296 - DNA, 15 bp, Homo sapiens
aagcatatgccacag

SEQ ID NO: 1043297 - DNA, 15 bp, Homo sapiens
agcatatgccacagt

SEQ ID NO: 1043298 - DNA, 15 bp, Homo sapiens
gcatatgccacagtg

SEQ ID NO: 1043299 - DNA, 15 bp, Homo sapiens
catatgccacagtgc

SEQ ID NO: 1043300 - DNA, 15 bp, Homo sapiens
atatgccacagtgcc

SEQ ID NO: 1043301 - DNA, 15 bp, Homo sapiens
tatgccacagtgccc

SEQ ID NO: 1043302 - DNA, 15 bp, Homo sapiens
atgccacagtgccca

SEQ ID NO: 1043303 - DNA, 15 bp, Homo sapiens
tgccacagtgcccac

SEQ ID NO: 1043304 - DNA, 15 bp, Homo sapiens
gccacagtgcccacc

SEQ ID NO: 1043305 - DNA, 15 bp, Homo sapiens
ccacagtgcccaccc

SEQ ID NO: 1043306 - DNA, 15 bp, Homo sapiens
cacagtgcccaccct

SEQ ID NO: 1043307 - DNA, 15 bp, Homo sapiens
acagtgcccaccctt

SEQ ID NO: 1043308 - DNA, 15 bp, Homo sapiens
cagtgcccacccttt

SEQ ID NO: 1043309 - DNA, 15 bp, Homo sapiens
agtgcccacccttta

SEQ ID NO: 1043310 - DNA, 15 bp, Homo sapiens
gtgcccaccctttat

SEQ ID NO: 1043311 - DNA, 15 bp, Homo sapiens
tgcccaccctttatt

SEQ ID NO: 1043312 - DNA, 15 bp, Homo sapiens
gcccaccctttatta

SEQ ID NO: 1043313 - DNA, 15 bp, Homo sapiens
cccaccctttattat

SEQ ID NO: 1043314 - DNA, 15 bp, Homo sapiens
ccaccctttattatt

SEQ ID NO: 1043315 - DNA, 15 bp, Homo sapiens
caccctttattattt

SEQ ID NO: 1043316 - DNA, 15 bp, Homo sapiens
accctttattattta

SEQ ID NO: 1043317 - DNA, 15 bp, Homo sapiens
ccctttattatttat

SEQ ID NO: 1043318 - DNA, 15 bp, Homo sapiens
cctttattatttatt

SEQ ID NO: 1043319 - DNA, 15 bp, Homo sapiens
ctttattatttattt

SEQ ID NO: 1043320 - DNA, 15 bp, Homo sapiens
tttattatttattta

SEQ ID NO: 1043321 - DNA, 15 bp, Homo sapiens
ttattatttatttat

SEQ ID NO: 1043322 - DNA, 15 bp, Homo sapiens
tattatttatttatt

SEQ ID NO: 1043323 - DNA, 15 bp, Homo sapiens
attatttatttattt

SEQ ID NO: 1043324 - DNA, 15 bp, Homo sapiens
ttatttatttattta

SEQ ID NO: 1043325 - DNA, 15 bp, Homo sapiens
tatttatttatttag

SEQ ID NO: 1043326 - DNA, 15 bp, Homo sapiens
atttatttatttaga

SEQ ID NO: 1043327 - DNA, 15 bp, Homo sapiens
tttatttatttagat

SEQ ID NO: 1043328 - DNA, 15 bp, Homo sapiens
ttatttatttagatt

SEQ ID NO: 1043329 - DNA, 15 bp, Homo sapiens
tatttatttagattt

SEQ ID NO: 1043330 - DNA, 15 bp, Homo sapiens
atttatttagatttt

SEQ ID NO: 1043331 - DNA, 15 bp, Homo sapiens
tttatttagattttt

SEQ ID NO: 1043332 - DNA, 15 bp, Homo sapiens
ttatttagatttttt

SEQ ID NO: 1043333 - DNA, 15 bp, Homo sapiens
tatttagattttttg

SEQ ID NO: 1043334 - DNA, 15 bp, Homo sapiens
atttagattttttga

SEQ ID NO: 1043335 - DNA, 15 bp, Homo sapiens
tttagattttttgag

SEQ ID NO: 1043336 - DNA, 15 bp, Homo sapiens
ttagattttttgaga

SEQ ID NO: 1043337 - DNA, 15 bp, Homo sapiens
tagattttttgagac

SEQ ID NO: 1043338 - DNA, 15 bp, Homo sapiens
agattttttgagaca

SEQ ID NO: 1043339 - DNA, 15 bp, Homo sapiens
gattttttgagacag

SEQ ID NO: 1043340 - DNA, 15 bp, Homo sapiens
attttttgagacagg

SEQ ID NO: 1043341 - DNA, 15 bp, Homo sapiens
ttttttgagacaggg

SEQ ID NO: 1043342 - DNA, 15 bp, Homo sapiens
tttttgagacagggt

SEQ ID NO: 1043343 - DNA, 15 bp, Homo sapiens
ttttgagacagggtc

SEQ ID NO: 1043344 - DNA, 15 bp, Homo sapiens
tttgagacagggtct

SEQ ID NO: 1043345 - DNA, 15 bp, Homo sapiens
ttgagacagggtctc

SEQ ID NO: 1043346 - DNA, 15 bp, Homo sapiens
tgagacagggtctca

SEQ ID NO: 1043347 - DNA, 15 bp, Homo sapiens
gacagggtctcactc

SEQ ID NO: 1043348 - DNA, 15 bp, Homo sapiens
acagggtctcactct

SEQ ID NO: 1043349 - DNA, 15 bp, Homo sapiens
cagggtctcactctg

SEQ ID NO: 1043350 - DNA, 15 bp, Homo sapiens
agggtctcactctgt

SEQ ID NO: 1043351 - DNA, 15 bp, Homo sapiens
gggtctcactctgtc

SEQ ID NO: 1043352 - DNA, 15 bp, Homo sapiens
ggtctcactctgtca

SEQ ID NO: 1043353 - DNA, 15 bp, Homo sapiens
gtctcactctgtcac

SEQ ID NO: 1043354 - DNA, 15 bp, Homo sapiens
tctcactctgtcacc

SEQ ID NO: 1043355 - DNA, 15 bp, Homo sapiens
ctcactctgtcaccc

SEQ ID NO: 1043356 - DNA, 15 bp, Homo sapiens
tcactctgtcaccca

SEQ ID NO: 1043357 - DNA, 15 bp, Homo sapiens
cactctgtcacccaa

SEQ ID NO: 1043358 - DNA, 15 bp, Homo sapiens
actctgtcacccaag

SEQ ID NO: 1043359 - DNA, 15 bp, Homo sapiens
ctctgtcacccaagc

SEQ ID NO: 1043360 - DNA, 15 bp, Homo sapiens
tctgtcacccaagct

SEQ ID NO: 1043361 - DNA, 15 bp, Homo sapiens
ctgtcacccaagctg

SEQ ID NO: 1043362 - DNA, 15 bp, Homo sapiens
tgtcacccaagctgg

SEQ ID NO: 1043363 - DNA, 15 bp, Homo sapiens
gtcacccaagctgga

SEQ ID NO: 1043364 - DNA, 15 bp, Homo sapiens
tcacccaagctggag

SEQ ID NO: 1043365 - DNA, 15 bp, Homo sapiens
cacccaagctggagt

SEQ ID NO: 1043366 - DNA, 15 bp, Homo sapiens
acccaagctggagtg

SEQ ID NO: 1043367 - DNA, 15 bp, Homo sapiens
cccaagctggagtgc

SEQ ID NO: 1043368 - DNA, 15 bp, Homo sapiens
ccaagctggagtgca

SEQ ID NO: 1043369 - DNA, 15 bp, Homo sapiens
caagctggagtgcag

SEQ ID NO: 1043370 - DNA, 15 bp, Homo sapiens
aagctggagtgcagt

SEQ ID NO: 1043371 - DNA, 15 bp, Homo sapiens
agctggagtgcagtg

SEQ ID NO: 1043372 - DNA, 15 bp, Homo sapiens
tgcagtggcatgatt

SEQ ID NO: 1043373 - DNA, 15 bp, Homo sapiens
gcagtggcatgatta

SEQ ID NO: 1043374 - DNA, 15 bp, Homo sapiens
cagtggcatgattac

SEQ ID NO: 1043375 - DNA, 15 bp, Homo sapiens
agtggcatgattacg

SEQ ID NO: 1043376 - DNA, 15 bp, Homo sapiens
gtggcatgattacgg

SEQ ID NO: 1043377 - DNA, 15 bp, Homo sapiens
tggcatgattacggc

SEQ ID NO: 1043378 - DNA, 15 bp, Homo sapiens
ggcatgattacggct

SEQ ID NO: 1043379 - DNA, 15 bp, Homo sapiens
gcatgattacggctc

SEQ ID NO: 1043380 - DNA, 15 bp, Homo sapiens
catgattacggctca

SEQ ID NO: 1043381 - DNA, 15 bp, Homo sapiens
atgattacggctcac

SEQ ID NO: 1043382 - DNA, 15 bp, Homo sapiens
tgattacggctcact

SEQ ID NO: 1043383 - DNA, 15 bp, Homo sapiens
gattacggctcactg

SEQ ID NO: 1043384 - DNA, 15 bp, Homo sapiens
attacggctcactgc

SEQ ID NO: 1043385 - DNA, 15 bp, Homo sapiens
ttacggctcactgca

SEQ ID NO: 1043386 - DNA, 15 bp, Homo sapiens
tacggctcactgcag

SEQ ID NO: 1043387 - DNA, 15 bp, Homo sapiens
acggctcactgcagc

SEQ ID NO: 1043388 - DNA, 15 bp, Homo sapiens
cggctcactgcagct

SEQ ID NO: 1043389 - DNA, 15 bp, Homo sapiens
ggctcactgcagctt

SEQ ID NO: 1043390 - DNA, 15 bp, Homo sapiens
gctcactgcagcttc

SEQ ID NO: 1043391 - DNA, 15 bp, Homo sapiens
ctcactgcagcttca

SEQ ID NO: 1043392 - DNA, 15 bp, Homo sapiens
tcactgcagcttcaa

SEQ ID NO: 1043393 - DNA, 15 bp, Homo sapiens
cactgcagcttcaac

SEQ ID NO: 1043394 - DNA, 15 bp, Homo sapiens
actgcagcttcaacc

SEQ ID NO: 1043395 - DNA, 15 bp, Homo sapiens
ctgcagcttcaacca

SEQ ID NO: 1043396 - DNA, 15 bp, Homo sapiens
tgcagcttcaaccac

SEQ ID NO: 1043397 - DNA, 15 bp, Homo sapiens
gcagcttcaaccact

SEQ ID NO: 1043398 - DNA, 15 bp, Homo sapiens
cagcttcaaccactc

SEQ ID NO: 1043399 - DNA, 15 bp, Homo sapiens
agcttcaaccactca

SEQ ID NO: 1043400 - DNA, 15 bp, Homo sapiens
gcttcaaccactcag

SEQ ID NO: 1043401 - DNA, 15 bp, Homo sapiens
cttcaaccactcagg

SEQ ID NO: 1043402 - DNA, 15 bp, Homo sapiens
ttcaaccactcaggc

SEQ ID NO: 1043403 - DNA, 15 bp, Homo sapiens
tcaaccactcaggct

SEQ ID NO: 1043404 - DNA, 15 bp, Homo sapiens
caaccactcaggctc

SEQ ID NO: 1043405 - DNA, 15 bp, Homo sapiens
aaccactcaggctca

SEQ ID NO: 1043406 - DNA, 15 bp, Homo sapiens
accactcaggctcaa

SEQ ID NO: 1043407 - DNA, 15 bp, Homo sapiens
ccactcaggctcaat

SEQ ID NO: 1043408 - DNA, 15 bp, Homo sapiens
cactcaggctcaatc

SEQ ID NO: 1043409 - DNA, 15 bp, Homo sapiens
actcaggctcaatcg

SEQ ID NO: 1043410 - DNA, 15 bp, Homo sapiens
ctcaggctcaatcga

SEQ ID NO: 1043411 - DNA, 15 bp, Homo sapiens
tcaggctcaatcgat

SEQ ID NO: 1043412 - DNA, 15 bp, Homo sapiens
caggctcaatcgatc

SEQ ID NO: 1043413 - DNA, 15 bp, Homo sapiens
aggctcaatcgatcc

SEQ ID NO: 1043414 - DNA, 15 bp, Homo sapiens
ggctcaatcgatcct

SEQ ID NO: 1043415 - DNA, 15 bp, Homo sapiens
gctcaatcgatcctc

SEQ ID NO: 1043416 - DNA, 15 bp, Homo sapiens
ctcaatcgatcctcc

SEQ ID NO: 1043417 - DNA, 15 bp, Homo sapiens
tcaatcgatcctcct

SEQ ID NO: 1043418 - DNA, 15 bp, Homo sapiens
caatcgatcctccta

SEQ ID NO: 1043419 - DNA, 15 bp, Homo sapiens
aatcgatcctcctac

SEQ ID NO: 1043420 - DNA, 15 bp, Homo sapiens
atcgatcctcctacc

SEQ ID NO: 1043421 - DNA, 15 bp, Homo sapiens
tcgatcctcctacct

SEQ ID NO: 1043422 - DNA, 15 bp, Homo sapiens
cgatcctcctacctt

SEQ ID NO: 1043423 - DNA, 15 bp, Homo sapiens
gatcctcctaccttg

SEQ ID NO: 1043424 - DNA, 15 bp, Homo sapiens
atcctcctaccttgg

SEQ ID NO: 1043425 - DNA, 15 bp, Homo sapiens
tcctcctaccttggc

SEQ ID NO: 1043426 - DNA, 15 bp, Homo sapiens
cctcctaccttggcc

SEQ ID NO: 1043427 - DNA, 15 bp, Homo sapiens
ctcctaccttggcct

SEQ ID NO: 1043428 - DNA, 15 bp, Homo sapiens
tcctaccttggcctc

SEQ ID NO: 1043429 - DNA, 15 bp, Homo sapiens
cctaccttggcctcc

SEQ ID NO: 1043430 - DNA, 15 bp, Homo sapiens
ctaccttggcctcct

SEQ ID NO: 1043431 - DNA, 15 bp, Homo sapiens
taccttggcctcctg

SEQ ID NO: 1043432 - DNA, 15 bp, Homo sapiens
accttggcctcctga

SEQ ID NO: 1043433 - DNA, 15 bp, Homo sapiens
ccttggcctcctgaa

SEQ ID NO: 1043434 - DNA, 15 bp, Homo sapiens
cttggcctcctgaat

SEQ ID NO: 1043435 - DNA, 15 bp, Homo sapiens
ttggcctcctgaata

SEQ ID NO: 1043436 - DNA, 15 bp, Homo sapiens
tggcctcctgaataa

SEQ ID NO: 1043437 - DNA, 15 bp, Homo sapiens
ggcctcctgaataac

SEQ ID NO: 1043438 - DNA, 15 bp, Homo sapiens
gcctcctgaataact

SEQ ID NO: 1043439 - DNA, 15 bp, Homo sapiens
cctcctgaataactg

SEQ ID NO: 1043440 - DNA, 15 bp, Homo sapiens
ctcctgaataactgg

SEQ ID NO: 1043441 - DNA, 15 bp, Homo sapiens
tcctgaataactggg

SEQ ID NO: 1043442 - DNA, 15 bp, Homo sapiens
cctgaataactggga

SEQ ID NO: 1043443 - DNA, 15 bp, Homo sapiens
ctgaataactgggac

SEQ ID NO: 1043444 - DNA, 15 bp, Homo sapiens
tgaataactgggact

SEQ ID NO: 1043445 - DNA, 15 bp, Homo sapiens
gaataactgggacta

SEQ ID NO: 1043446 - DNA, 15 bp, Homo sapiens
aataactgggactac

SEQ ID NO: 1043447 - DNA, 15 bp, Homo sapiens
ataactgggactaca

SEQ ID NO: 1043448 - DNA, 15 bp, Homo sapiens
taactgggactacag

SEQ ID NO: 1043449 - DNA, 15 bp, Homo sapiens
aactgggactacagg

SEQ ID NO: 1043450 - DNA, 15 bp, Homo sapiens
actgggactacaggt

SEQ ID NO: 1043451 - DNA, 15 bp, Homo sapiens
ctgggactacaggtg

SEQ ID NO: 1043452 - DNA, 15 bp, Homo sapiens
tgggactacaggtgt

SEQ ID NO: 1043453 - DNA, 15 bp, Homo sapiens
gggactacaggtgtg

SEQ ID NO: 1043454 - DNA, 15 bp, Homo sapiens
ggactacaggtgtgc

SEQ ID NO: 1043455 - DNA, 15 bp, Homo sapiens
gactacaggtgtgca

SEQ ID NO: 1043456 - DNA, 15 bp, Homo sapiens
actacaggtgtgcac

SEQ ID NO: 1043457 - DNA, 15 bp, Homo sapiens
ctacaggtgtgcacc

SEQ ID NO: 1043458 - DNA, 15 bp, Homo sapiens
tacaggtgtgcacca

SEQ ID NO: 1043459 - DNA, 15 bp, Homo sapiens
acaggtgtgcaccac

SEQ ID NO: 1043460 - DNA, 15 bp, Homo sapiens
caggtgtgcaccacc

SEQ ID NO: 1043461 - DNA, 15 bp, Homo sapiens
aggtgtgcaccacca

SEQ ID NO: 1043462 - DNA, 15 bp, Homo sapiens
ggtgtgcaccaccat

SEQ ID NO: 1043463 - DNA, 15 bp, Homo sapiens
gtgtgcaccaccatg

SEQ ID NO: 1043464 - DNA, 15 bp, Homo sapiens
tgtgcaccaccatgc

SEQ ID NO: 1043465 - DNA, 15 bp, Homo sapiens
gtgcaccaccatgcc

SEQ ID NO: 1043466 - DNA, 15 bp, Homo sapiens
tgcaccaccatgccc

SEQ ID NO: 1043467 - DNA, 15 bp, Homo sapiens
gcaccaccatgccca

SEQ ID NO: 1043468 - DNA, 15 bp, Homo sapiens
caccaccatgcccag

SEQ ID NO: 1043469 - DNA, 15 bp, Homo sapiens
accaccatgcccagc

SEQ ID NO: 1043470 - DNA, 15 bp, Homo sapiens
cccagctaattttta

SEQ ID NO: 1043471 - DNA, 15 bp, Homo sapiens
ccagctaatttttag

SEQ ID NO: 1043472 - DNA, 15 bp, Homo sapiens
cagctaatttttaga

SEQ ID NO: 1043473 - DNA, 15 bp, Homo sapiens
agctaatttttagat

SEQ ID NO: 1043474 - DNA, 15 bp, Homo sapiens
gctaatttttagatt

SEQ ID NO: 1043475 - DNA, 15 bp, Homo sapiens
ctaatttttagattt

SEQ ID NO: 1043476 - DNA, 15 bp, Homo sapiens
taatttttagatttt

SEQ ID NO: 1043477 - DNA, 15 bp, Homo sapiens
aatttttagattttt

SEQ ID NO: 1043478 - DNA, 15 bp, Homo sapiens
atttttagatttttt

SEQ ID NO: 1043479 - DNA, 15 bp, Homo sapiens
tttttagattttttg

SEQ ID NO: 1043480 - DNA, 15 bp, Homo sapiens
ttttagattttttgt

SEQ ID NO: 1043481 - DNA, 15 bp, Homo sapiens
tttagattttttgta

SEQ ID NO: 1043482 - DNA, 15 bp, Homo sapiens
ttagattttttgtag

SEQ ID NO: 1043483 - DNA, 15 bp, Homo sapiens
tagattttttgtaga

SEQ ID NO: 1043484 - DNA, 15 bp, Homo sapiens
agattttttgtagag

SEQ ID NO: 1043485 - DNA, 15 bp, Homo sapiens
gattttttgtagaga

SEQ ID NO: 1043486 - DNA, 15 bp, Homo sapiens
attttttgtagagac

SEQ ID NO: 1043487 - DNA, 15 bp, Homo sapiens
ttttttgtagagaca

SEQ ID NO: 1043488 - DNA, 15 bp, Homo sapiens
tttttgtagagacag

SEQ ID NO: 1043489 - DNA, 15 bp, Homo sapiens
ttttgtagagacagg

SEQ ID NO: 1043490 - DNA, 15 bp, Homo sapiens
tttgtagagacaggg

SEQ ID NO: 1043491 - DNA, 15 bp, Homo sapiens
ttgtagagacagggg

SEQ ID NO: 1043492 - DNA, 15 bp, Homo sapiens
tgtagagacaggggt

SEQ ID NO: 1043493 - DNA, 15 bp, Homo sapiens
gtagagacaggggtc

SEQ ID NO: 1043494 - DNA, 15 bp, Homo sapiens
tagagacaggggtct

SEQ ID NO: 1043495 - DNA, 15 bp, Homo sapiens
agagacaggggtctt

SEQ ID NO: 1043496 - DNA, 15 bp, Homo sapiens
gagacaggggtcttg

SEQ ID NO: 1043497 - DNA, 15 bp, Homo sapiens
agacaggggtcttgc

SEQ ID NO: 1043498 - DNA, 15 bp, Homo sapiens
gacaggggtcttgct

SEQ ID NO: 1043499 - DNA, 15 bp, Homo sapiens
acaggggtcttgcta

SEQ ID NO: 1043500 - DNA, 15 bp, Homo sapiens
caggggtcttgctat

SEQ ID NO: 1043501 - DNA, 15 bp, Homo sapiens
aggggtcttgctatg

SEQ ID NO: 1043502 - DNA, 15 bp, Homo sapiens
ggggtcttgctatgt

SEQ ID NO: 1043503 - DNA, 15 bp, Homo sapiens
gggtcttgctatgtt

SEQ ID NO: 1043504 - DNA, 15 bp, Homo sapiens
ggtcttgctatgttg

SEQ ID NO: 1043505 - DNA, 15 bp, Homo sapiens
gtcttgctatgttgc

SEQ ID NO: 1043506 - DNA, 15 bp, Homo sapiens
tcttgctatgttgcc

SEQ ID NO: 1043507 - DNA, 15 bp, Homo sapiens
cttgctatgttgccc

SEQ ID NO: 1043508 - DNA, 15 bp, Homo sapiens
ttgctatgttgccca

SEQ ID NO: 1043509 - DNA, 15 bp, Homo sapiens
tgctatgttgcccag

SEQ ID NO: 1043510 - DNA, 15 bp, Homo sapiens
gctatgttgcccagg

SEQ ID NO: 1043511 - DNA, 15 bp, Homo sapiens
gcccaggctggtctt

SEQ ID NO: 1043512 - DNA, 15 bp, Homo sapiens
cccaggctggtcttg

SEQ ID NO: 1043513 - DNA, 15 bp, Homo sapiens
ccaggctggtcttga

SEQ ID NO: 1043514 - DNA, 15 bp, Homo sapiens
gctggtcttgaactc

SEQ ID NO: 1043515 - DNA, 15 bp, Homo sapiens
ctggtcttgaactcc

SEQ ID NO: 1043516 - DNA, 15 bp, Homo sapiens
tggtcttgaactcct

SEQ ID NO: 1043517 - DNA, 15 bp, Homo sapiens
ggtcttgaactcctg

SEQ ID NO: 1043518 - DNA, 15 bp, Homo sapiens
gtcttgaactcctgg

SEQ ID NO: 1043519 - DNA, 15 bp, Homo sapiens
tcttgaactcctggc

SEQ ID NO: 1043520 - DNA, 15 bp, Homo sapiens
cttgaactcctggcc

SEQ ID NO: 1043521 - DNA, 15 bp, Homo sapiens
ttgaactcctggcct

SEQ ID NO: 1043522 - DNA, 15 bp, Homo sapiens
tgaactcctggcctc

SEQ ID NO: 1043523 - DNA, 15 bp, Homo sapiens
ctcctggcctcaagc

SEQ ID NO: 1043524 - DNA, 15 bp, Homo sapiens
tcctggcctcaagca

SEQ ID NO: 1043525 - DNA, 15 bp, Homo sapiens
cctggcctcaagcaa

SEQ ID NO: 1043526 - DNA, 15 bp, Homo sapiens
ctggcctcaagcaat

SEQ ID NO: 1043527 - DNA, 15 bp, Homo sapiens
tggcctcaagcaatc

SEQ ID NO: 1043528 - DNA, 15 bp, Homo sapiens
ggcctcaagcaatcc

SEQ ID NO: 1043529 - DNA, 15 bp, Homo sapiens
gcctcaagcaatcct

SEQ ID NO: 1043530 - DNA, 15 bp, Homo sapiens
cctcaagcaatcctc

SEQ ID NO: 1043531 - DNA, 15 bp, Homo sapiens
ctcaagcaatcctcc

SEQ ID NO: 1043532 - DNA, 15 bp, Homo sapiens
tcaagcaatcctccc

SEQ ID NO: 1043533 - DNA, 15 bp, Homo sapiens
caagcaatcctccca

SEQ ID NO: 1043534 - DNA, 15 bp, Homo sapiens
aagcaatcctcccac

SEQ ID NO: 1043535 - DNA, 15 bp, Homo sapiens
agcaatcctcccacc

SEQ ID NO: 1043536 - DNA, 15 bp, Homo sapiens
gcaatcctcccacct

SEQ ID NO: 1043537 - DNA, 15 bp, Homo sapiens
caatcctcccacctt

SEQ ID NO: 1043538 - DNA, 15 bp, Homo sapiens
aatcctcccaccttg

SEQ ID NO: 1043539 - DNA, 15 bp, Homo sapiens
atcctcccaccttgg

SEQ ID NO: 1043540 - DNA, 15 bp, Homo sapiens
tcctcccaccttggt

SEQ ID NO: 1043541 - DNA, 15 bp, Homo sapiens
cctcccaccttggtc

SEQ ID NO: 1043542 - DNA, 15 bp, Homo sapiens
ctcccaccttggtct

SEQ ID NO: 1043543 - DNA, 15 bp, Homo sapiens
tcccaccttggtctt

SEQ ID NO: 1043544 - DNA, 15 bp, Homo sapiens
cccaccttggtcttc

SEQ ID NO: 1043545 - DNA, 15 bp, Homo sapiens
ccaccttggtcttcc

SEQ ID NO: 1043546 - DNA, 15 bp, Homo sapiens
caccttggtcttcca

SEQ ID NO: 1043547 - DNA, 15 bp, Homo sapiens
accttggtcttccaa

SEQ ID NO: 1043548 - DNA, 15 bp, Homo sapiens
ccttggtcttccaaa

SEQ ID NO: 1043549 - DNA, 15 bp, Homo sapiens
cttggtcttccaaag

SEQ ID NO: 1043550 - DNA, 15 bp, Homo sapiens
ttggtcttccaaagt

SEQ ID NO: 1043551 - DNA, 15 bp, Homo sapiens
tggtcttccaaagtg

SEQ ID NO: 1043552 - DNA, 15 bp, Homo sapiens
ggtcttccaaagtgc

SEQ ID NO: 1043553 - DNA, 15 bp, Homo sapiens
gtcttccaaagtgct

SEQ ID NO: 1043554 - DNA, 15 bp, Homo sapiens
tcttccaaagtgctg

SEQ ID NO: 1043555 - DNA, 15 bp, Homo sapiens
gtgctgggattacat

SEQ ID NO: 1043556 - DNA, 15 bp, Homo sapiens
tgctgggattacatt

SEQ ID NO: 1043557 - DNA, 15 bp, Homo sapiens
gctgggattacattc

SEQ ID NO: 1043558 - DNA, 15 bp, Homo sapiens
ctgggattacattca

SEQ ID NO: 1043559 - DNA, 15 bp, Homo sapiens
tgggattacattcat

SEQ ID NO: 1043560 - DNA, 15 bp, Homo sapiens
gggattacattcatg

SEQ ID NO: 1043561 - DNA, 15 bp, Homo sapiens
ggattacattcatga

SEQ ID NO: 1043562 - DNA, 15 bp, Homo sapiens
gattacattcatgaa

SEQ ID NO: 1043563 - DNA, 15 bp, Homo sapiens
attacattcatgaat

SEQ ID NO: 1043564 - DNA, 15 bp, Homo sapiens
ttacattcatgaatc

SEQ ID NO: 1043565 - DNA, 15 bp, Homo sapiens
tacattcatgaatca

SEQ ID NO: 1043566 - DNA, 15 bp, Homo sapiens
acattcatgaatcac

SEQ ID NO: 1043567 - DNA, 15 bp, Homo sapiens
cattcatgaatcact

SEQ ID NO: 1043568 - DNA, 15 bp, Homo sapiens
attcatgaatcactg

SEQ ID NO: 1043569 - DNA, 15 bp, Homo sapiens
ttcatgaatcactgt

SEQ ID NO: 1043570 - DNA, 15 bp, Homo sapiens
tcatgaatcactgta

SEQ ID NO: 1043571 - DNA, 15 bp, Homo sapiens
catgaatcactgtac

SEQ ID NO: 1043572 - DNA, 15 bp, Homo sapiens
atgaatcactgtacc

SEQ ID NO: 1043573 - DNA, 15 bp, Homo sapiens
tgaatcactgtacct

SEQ ID NO: 1043574 - DNA, 15 bp, Homo sapiens
gaatcactgtacctg

SEQ ID NO: 1043575 - DNA, 15 bp, Homo sapiens
aatcactgtacctgg

SEQ ID NO: 1043576 - DNA, 15 bp, Homo sapiens
atcactgtacctggc

SEQ ID NO: 1043577 - DNA, 15 bp, Homo sapiens
tcactgtacctggcc

SEQ ID NO: 1043578 - DNA, 15 bp, Homo sapiens
cactgtacctggcct

SEQ ID NO: 1043579 - DNA, 15 bp, Homo sapiens
actgtacctggccta

SEQ ID NO: 1043580 - DNA, 15 bp, Homo sapiens
ctgtacctggcctaa

SEQ ID NO: 1043581 - DNA, 15 bp, Homo sapiens
tgtacctggcctaat

SEQ ID NO: 1043582 - DNA, 15 bp, Homo sapiens
gtacctggcctaatt

SEQ ID NO: 1043583 - DNA, 15 bp, Homo sapiens
tacctggcctaattg

SEQ ID NO: 1043584 - DNA, 15 bp, Homo sapiens
acctggcctaattgc

SEQ ID NO: 1043585 - DNA, 15 bp, Homo sapiens
cctggcctaattgct

SEQ ID NO: 1043586 - DNA, 15 bp, Homo sapiens
ctggcctaattgctc

SEQ ID NO: 1043587 - DNA, 15 bp, Homo sapiens
tggcctaattgctct

SEQ ID NO: 1043588 - DNA, 15 bp, Homo sapiens
ggcctaattgctcta

SEQ ID NO: 1043589 - DNA, 15 bp, Homo sapiens
gcctaattgctctaa

SEQ ID NO: 1043590 - DNA, 15 bp, Homo sapiens
cctaattgctctaac

SEQ ID NO: 1043591 - DNA, 15 bp, Homo sapiens
ctaattgctctaacg

SEQ ID NO: 1043592 - DNA, 15 bp, Homo sapiens
taattgctctaacgg

SEQ ID NO: 1043593 - DNA, 15 bp, Homo sapiens
aattgctctaacggg

SEQ ID NO: 1043594 - DNA, 15 bp, Homo sapiens
attgctctaacgggg

SEQ ID NO: 1043595 - DNA, 15 bp, Homo sapiens
ttgctctaacgggga

SEQ ID NO: 1043596 - DNA, 15 bp, Homo sapiens
tgctctaacggggaa

SEQ ID NO: 1043597 - DNA, 15 bp, Homo sapiens
gctctaacggggaaa

SEQ ID NO: 1043598 - DNA, 15 bp, Homo sapiens
ctctaacggggaaag

SEQ ID NO: 1043599 - DNA, 15 bp, Homo sapiens
tctaacggggaaagt

SEQ ID NO: 1043600 - DNA, 15 bp, Homo sapiens
ctaacggggaaagtt

SEQ ID NO: 1043601 - DNA, 15 bp, Homo sapiens
taacggggaaagttt

SEQ ID NO: 1043602 - DNA, 15 bp, Homo sapiens
aacggggaaagtttc

SEQ ID NO: 1043603 - DNA, 15 bp, Homo sapiens
acggggaaagtttca

SEQ ID NO: 1043604 - DNA, 15 bp, Homo sapiens
cggggaaagtttcat

SEQ ID NO: 1043605 - DNA, 15 bp, Homo sapiens
ggggaaagtttcatc

SEQ ID NO: 1043606 - DNA, 15 bp, Homo sapiens
gggaaagtttcatca

SEQ ID NO: 1043607 - DNA, 15 bp, Homo sapiens
ggaaagtttcatcag

SEQ ID NO: 1043608 - DNA, 15 bp, Homo sapiens
gaaagtttcatcagc

SEQ ID NO: 1043609 - DNA, 15 bp, Homo sapiens
aaagtttcatcagct

SEQ ID NO: 1043610 - DNA, 15 bp, Homo sapiens
aagtttcatcagctg

SEQ ID NO: 1043611 - DNA, 15 bp, Homo sapiens
agtttcatcagctgt

SEQ ID NO: 1043612 - DNA, 15 bp, Homo sapiens
gtttcatcagctgtc

SEQ ID NO: 1043613 - DNA, 15 bp, Homo sapiens
tttcatcagctgtca

SEQ ID NO: 1043614 - DNA, 15 bp, Homo sapiens
ttcatcagctgtcag

SEQ ID NO: 1043615 - DNA, 15 bp, Homo sapiens
tcatcagctgtcaga

SEQ ID NO: 1043616 - DNA, 15 bp, Homo sapiens
catcagctgtcagat

SEQ ID NO: 1043617 - DNA, 15 bp, Homo sapiens
atcagctgtcagatt

SEQ ID NO: 1043618 - DNA, 15 bp, Homo sapiens
tcagctgtcagattg

SEQ ID NO: 1043619 - DNA, 15 bp, Homo sapiens
cagctgtcagattgt

SEQ ID NO: 1043620 - DNA, 15 bp, Homo sapiens
agctgtcagattgtt

SEQ ID NO: 1043621 - DNA, 15 bp, Homo sapiens
gctgtcagattgtta

SEQ ID NO: 1043622 - DNA, 15 bp, Homo sapiens
ctgtcagattgttag

SEQ ID NO: 1043623 - DNA, 15 bp, Homo sapiens
tgtcagattgttaga

SEQ ID NO: 1043624 - DNA, 15 bp, Homo sapiens
gtcagattgttagat

SEQ ID NO: 1043625 - DNA, 15 bp, Homo sapiens
tcagattgttagatc

SEQ ID NO: 1043626 - DNA, 15 bp, Homo sapiens
cagattgttagatct

SEQ ID NO: 1043627 - DNA, 15 bp, Homo sapiens
agattgttagatctg

SEQ ID NO: 1043628 - DNA, 15 bp, Homo sapiens
gattgttagatctgg

SEQ ID NO: 1043629 - DNA, 15 bp, Homo sapiens
attgttagatctgga

SEQ ID NO: 1043630 - DNA, 15 bp, Homo sapiens
ttgttagatctggac

SEQ ID NO: 1043631 - DNA, 15 bp, Homo sapiens
tgttagatctggact

SEQ ID NO: 1043632 - DNA, 15 bp, Homo sapiens
gttagatctggactg

SEQ ID NO: 1043633 - DNA, 15 bp, Homo sapiens
ttagatctggactga

SEQ ID NO: 1043634 - DNA, 15 bp, Homo sapiens
tagatctggactgac

SEQ ID NO: 1043635 - DNA, 15 bp, Homo sapiens
agatctggactgact

SEQ ID NO: 1043636 - DNA, 15 bp, Homo sapiens
gatctggactgactt

SEQ ID NO: 1043637 - DNA, 15 bp, Homo sapiens
atctggactgacttg

SEQ ID NO: 1043638 - DNA, 15 bp, Homo sapiens
tctggactgacttgg

SEQ ID NO: 1043639 - DNA, 15 bp, Homo sapiens
ctggactgacttggg

SEQ ID NO: 1043640 - DNA, 15 bp, Homo sapiens
tggactgacttgggt

SEQ ID NO: 1043641 - DNA, 15 bp, Homo sapiens
ggactgacttgggtt

SEQ ID NO: 1043642 - DNA, 15 bp, Homo sapiens
gactgacttgggttc

SEQ ID NO: 1043643 - DNA, 15 bp, Homo sapiens
actgacttgggttcc

SEQ ID NO: 1043644 - DNA, 15 bp, Homo sapiens
ctgacttgggttccg

SEQ ID NO: 1043645 - DNA, 15 bp, Homo sapiens
tgacttgggttccga

SEQ ID NO: 1043646 - DNA, 15 bp, Homo sapiens
gacttgggttccgaa

SEQ ID NO: 1043647 - DNA, 15 bp, Homo sapiens
acttgggttccgaag

SEQ ID NO: 1043648 - DNA, 15 bp, Homo sapiens
cttgggttccgaagc

SEQ ID NO: 1043649 - DNA, 15 bp, Homo sapiens
ttgggttccgaagct

SEQ ID NO: 1043650 - DNA, 15 bp, Homo sapiens
tgggttccgaagctc

SEQ ID NO: 1043651 - DNA, 15 bp, Homo sapiens
gggttccgaagctca

SEQ ID NO: 1043652 - DNA, 15 bp, Homo sapiens
ggttccgaagctcag

SEQ ID NO: 1043653 - DNA, 15 bp, Homo sapiens
gttccgaagctcagt

SEQ ID NO: 1043654 - DNA, 15 bp, Homo sapiens
ttccgaagctcagtt

SEQ ID NO: 1043655 - DNA, 15 bp, Homo sapiens
tccgaagctcagttc

SEQ ID NO: 1043656 - DNA, 15 bp, Homo sapiens
ccgaagctcagttct

SEQ ID NO: 1043657 - DNA, 15 bp, Homo sapiens
cgaagctcagttcta

SEQ ID NO: 1043658 - DNA, 15 bp, Homo sapiens
gaagctcagttctat

SEQ ID NO: 1043659 - DNA, 15 bp, Homo sapiens
aagctcagttctatc

SEQ ID NO: 1043660 - DNA, 15 bp, Homo sapiens
agctcagttctatct

SEQ ID NO: 1043661 - DNA, 15 bp, Homo sapiens
gctcagttctatctt

SEQ ID NO: 1043662 - DNA, 15 bp, Homo sapiens
ctcagttctatcttt

SEQ ID NO: 1043663 - DNA, 15 bp, Homo sapiens
tcagttctatctttt

SEQ ID NO: 1043664 - DNA, 15 bp, Homo sapiens
cagttctatctttta

SEQ ID NO: 1043665 - DNA, 15 bp, Homo sapiens
agttctatcttttat

SEQ ID NO: 1043666 - DNA, 15 bp, Homo sapiens
gttctatcttttatt

SEQ ID NO: 1043667 - DNA, 15 bp, Homo sapiens
ttctatcttttattt

SEQ ID NO: 1043668 - DNA, 15 bp, Homo sapiens
tctatcttttatttt

SEQ ID NO: 1043669 - DNA, 15 bp, Homo sapiens
ctatcttttattttt

SEQ ID NO: 1043670 - DNA, 15 bp, Homo sapiens
tatcttttatttttc

SEQ ID NO: 1043671 - DNA, 15 bp, Homo sapiens
atcttttatttttcc

SEQ ID NO: 1043672 - DNA, 15 bp, Homo sapiens
tcttttatttttcct

SEQ ID NO: 1043673 - DNA, 15 bp, Homo sapiens
cttttatttttcctt

SEQ ID NO: 1043674 - DNA, 15 bp, Homo sapiens
ttttatttttccttt

SEQ ID NO: 1043675 - DNA, 15 bp, Homo sapiens
tttatttttcctttg

SEQ ID NO: 1043676 - DNA, 15 bp, Homo sapiens
ttatttttcctttgg

SEQ ID NO: 1043677 - DNA, 15 bp, Homo sapiens
tatttttcctttgga

SEQ ID NO: 1043678 - DNA, 15 bp, Homo sapiens
atttttcctttggaa

SEQ ID NO: 1043679 - DNA, 15 bp, Homo sapiens
tttttcctttggaaa

SEQ ID NO: 1043680 - DNA, 15 bp, Homo sapiens
ttttcctttggaaac

SEQ ID NO: 1043681 - DNA, 15 bp, Homo sapiens
tttcctttggaaacc

SEQ ID NO: 1043682 - DNA, 15 bp, Homo sapiens
ttcctttggaaacca

SEQ ID NO: 1043683 - DNA, 15 bp, Homo sapiens
tcctttggaaaccaa

SEQ ID NO: 1043684 - DNA, 15 bp, Homo sapiens
cctttggaaaccaaa

SEQ ID NO: 1043685 - DNA, 15 bp, Homo sapiens
ctttggaaaccaaat

SEQ ID NO: 1043686 - DNA, 15 bp, Homo sapiens
tttggaaaccaaatt

SEQ ID NO: 1043687 - DNA, 15 bp, Homo sapiens
ttggaaaccaaattc

SEQ ID NO: 1043688 - DNA, 15 bp, Homo sapiens
tggaaaccaaattct

SEQ ID NO: 1043689 - DNA, 15 bp, Homo sapiens
ggaaaccaaattctg

SEQ ID NO: 1043690 - DNA, 15 bp, Homo sapiens
gaaaccaaattctgt

SEQ ID NO: 1043691 - DNA, 15 bp, Homo sapiens
aaaccaaattctgta

SEQ ID NO: 1043692 - DNA, 15 bp, Homo sapiens
aaccaaattctgtag

SEQ ID NO: 1043693 - DNA, 15 bp, Homo sapiens
accaaattctgtagg

SEQ ID NO: 1043694 - DNA, 15 bp, Homo sapiens
ccaaattctgtaggt

SEQ ID NO: 1043695 - DNA, 15 bp, Homo sapiens
caaattctgtaggta

SEQ ID NO: 1043696 - DNA, 15 bp, Homo sapiens
aaattctgtaggtag

SEQ ID NO: 1043697 - DNA, 15 bp, Homo sapiens
aattctgtaggtagc

SEQ ID NO: 1043698 - DNA, 15 bp, Homo sapiens
attctgtaggtagca

SEQ ID NO: 1043699 - DNA, 15 bp, Homo sapiens
ttctgtaggtagcag

SEQ ID NO: 1043700 - DNA, 15 bp, Homo sapiens
tctgtaggtagcaga

SEQ ID NO: 1043701 - DNA, 15 bp, Homo sapiens
ctgtaggtagcagag

SEQ ID NO: 1043702 - DNA, 15 bp, Homo sapiens
tgtaggtagcagagg

SEQ ID NO: 1043703 - DNA, 15 bp, Homo sapiens
gtaggtagcagaggt

SEQ ID NO: 1043704 - DNA, 15 bp, Homo sapiens
taggtagcagaggtt

SEQ ID NO: 1043705 - DNA, 15 bp, Homo sapiens
aggtagcagaggttt

SEQ ID NO: 1043706 - DNA, 15 bp, Homo sapiens
ggtagcagaggttta

SEQ ID NO: 1043707 - DNA, 15 bp, Homo sapiens
gtagcagaggtttac

SEQ ID NO: 1043708 - DNA, 15 bp, Homo sapiens
tagcagaggtttact

SEQ ID NO: 1043709 - DNA, 15 bp, Homo sapiens
agcagaggtttactc

SEQ ID NO: 1043710 - DNA, 15 bp, Homo sapiens
gcagaggtttactca

SEQ ID NO: 1043711 - DNA, 15 bp, Homo sapiens
cagaggtttactcaa

SEQ ID NO: 1043712 - DNA, 15 bp, Homo sapiens
agaggtttactcaag

SEQ ID NO: 1043713 - DNA, 15 bp, Homo sapiens
gaggtttactcaagg

SEQ ID NO: 1043714 - DNA, 15 bp, Homo sapiens
aggtttactcaaggc

SEQ ID NO: 1043715 - DNA, 15 bp, Homo sapiens
ggtttactcaaggcc

SEQ ID NO: 1043716 - DNA, 15 bp, Homo sapiens
gtttactcaaggcca

SEQ ID NO: 1043717 - DNA, 15 bp, Homo sapiens
tttactcaaggccac

SEQ ID NO: 1043718 - DNA, 15 bp, Homo sapiens
ttactcaaggccacg

SEQ ID NO: 1043719 - DNA, 15 bp, Homo sapiens
tactcaaggccacgg

SEQ ID NO: 1043720 - DNA, 15 bp, Homo sapiens
actcaaggccacgga

SEQ ID NO: 1043721 - DNA, 15 bp, Homo sapiens
ctcaaggccacggag

SEQ ID NO: 1043722 - DNA, 15 bp, Homo sapiens
tcaaggccacggaga

SEQ ID NO: 1043723 - DNA, 15 bp, Homo sapiens
caaggccacggagat

SEQ ID NO: 1043724 - DNA, 15 bp, Homo sapiens
aaggccacggagata

SEQ ID NO: 1043725 - DNA, 15 bp, Homo sapiens
aggccacggagatag

SEQ ID NO: 1043726 - DNA, 15 bp, Homo sapiens
ggccacggagatagt

SEQ ID NO: 1043727 - DNA, 15 bp, Homo sapiens
gccacggagatagtt

SEQ ID NO: 1043728 - DNA, 15 bp, Homo sapiens
ccacggagatagtta

SEQ ID NO: 1043729 - DNA, 15 bp, Homo sapiens
cacggagatagttag

SEQ ID NO: 1043730 - DNA, 15 bp, Homo sapiens
acggagatagttagc

SEQ ID NO: 1043731 - DNA, 15 bp, Homo sapiens
cggagatagttagca

SEQ ID NO: 1043732 - DNA, 15 bp, Homo sapiens
ggagatagttagcag

SEQ ID NO: 1043733 - DNA, 15 bp, Homo sapiens
gagatagttagcagc

SEQ ID NO: 1043734 - DNA, 15 bp, Homo sapiens
agatagttagcagcc

SEQ ID NO: 1043735 - DNA, 15 bp, Homo sapiens
gatagttagcagcca

SEQ ID NO: 1043736 - DNA, 15 bp, Homo sapiens
atagttagcagccag

SEQ ID NO: 1043737 - DNA, 15 bp, Homo sapiens
tagttagcagccagt

SEQ ID NO: 1043738 - DNA, 15 bp, Homo sapiens
agttagcagccagtg

SEQ ID NO: 1043739 - DNA, 15 bp, Homo sapiens
gttagcagccagtgc

SEQ ID NO: 1043740 - DNA, 15 bp, Homo sapiens
ttagcagccagtgct

SEQ ID NO: 1043741 - DNA, 15 bp, Homo sapiens
tagcagccagtgctg

SEQ ID NO: 1043742 - DNA, 15 bp, Homo sapiens
agcagccagtgctgg

SEQ ID NO: 1043743 - DNA, 15 bp, Homo sapiens
gcagccagtgctggg

SEQ ID NO: 1043744 - DNA, 15 bp, Homo sapiens
cagccagtgctgggt

SEQ ID NO: 1043745 - DNA, 15 bp, Homo sapiens
agccagtgctgggtg

SEQ ID NO: 1043746 - DNA, 15 bp, Homo sapiens
gccagtgctgggtgg

SEQ ID NO: 1043747 - DNA, 15 bp, Homo sapiens
ccagtgctgggtggg

SEQ ID NO: 1043748 - DNA, 15 bp, Homo sapiens
cagtgctgggtgggg

SEQ ID NO: 1043749 - DNA, 15 bp, Homo sapiens
agtgctgggtggggc

SEQ ID NO: 1043750 - DNA, 15 bp, Homo sapiens
gtgctgggtggggcc

SEQ ID NO: 1043751 - DNA, 15 bp, Homo sapiens
tgctgggtggggccg

SEQ ID NO: 1043752 - DNA, 15 bp, Homo sapiens
gctgggtggggccga

SEQ ID NO: 1043753 - DNA, 15 bp, Homo sapiens
ctgggtggggccgac

SEQ ID NO: 1043754 - DNA, 15 bp, Homo sapiens
tgggtggggccgact

SEQ ID NO: 1043755 - DNA, 15 bp, Homo sapiens
gggtggggccgactg

SEQ ID NO: 1043756 - DNA, 15 bp, Homo sapiens
ggtggggccgactgt

SEQ ID NO: 1043757 - DNA, 15 bp, Homo sapiens
gtggggccgactgtc

SEQ ID NO: 1043758 - DNA, 15 bp, Homo sapiens
tggggccgactgtcc

SEQ ID NO: 1043759 - DNA, 15 bp, Homo sapiens
ggggccgactgtccc

SEQ ID NO: 1043760 - DNA, 15 bp, Homo sapiens
gggccgactgtccca

SEQ ID NO: 1043761 - DNA, 15 bp, Homo sapiens
ggccgactgtcccag

SEQ ID NO: 1043762 - DNA, 15 bp, Homo sapiens
gccgactgtcccagg

SEQ ID NO: 1043763 - DNA, 15 bp, Homo sapiens
ccgactgtcccaggc

SEQ ID NO: 1043764 - DNA, 15 bp, Homo sapiens
cgactgtcccaggct

SEQ ID NO: 1043765 - DNA, 15 bp, Homo sapiens
gactgtcccaggcta

SEQ ID NO: 1043766 - DNA, 15 bp, Homo sapiens
actgtcccaggctag

SEQ ID NO: 1043767 - DNA, 15 bp, Homo sapiens
ctgtcccaggctagc

SEQ ID NO: 1043768 - DNA, 15 bp, Homo sapiens
tgtcccaggctagct

SEQ ID NO: 1043769 - DNA, 15 bp, Homo sapiens
gtcccaggctagctg

SEQ ID NO: 1043770 - DNA, 15 bp, Homo sapiens
tcccaggctagctgg

SEQ ID NO: 1043771 - DNA, 15 bp, Homo sapiens
cccaggctagctgga

SEQ ID NO: 1043772 - DNA, 15 bp, Homo sapiens
ccaggctagctggat

SEQ ID NO: 1043773 - DNA, 15 bp, Homo sapiens
caggctagctggatg

SEQ ID NO: 1043774 - DNA, 15 bp, Homo sapiens
aggctagctggatgg

SEQ ID NO: 1043775 - DNA, 15 bp, Homo sapiens
ggctagctggatgga

SEQ ID NO: 1043776 - DNA, 15 bp, Homo sapiens
gctagctggatggag

SEQ ID NO: 1043777 - DNA, 15 bp, Homo sapiens
ctagctggatggagg

SEQ ID NO: 1043778 - DNA, 15 bp, Homo sapiens
tagctggatggaggc

SEQ ID NO: 1043779 - DNA, 15 bp, Homo sapiens
agctggatggaggcc

SEQ ID NO: 1043780 - DNA, 15 bp, Homo sapiens
gctggatggaggcca

SEQ ID NO: 1043781 - DNA, 15 bp, Homo sapiens
ctggatggaggccag

SEQ ID NO: 1043782 - DNA, 15 bp, Homo sapiens
tggatggaggccagg

SEQ ID NO: 1043783 - DNA, 15 bp, Homo sapiens
ggatggaggccagga

SEQ ID NO: 1043784 - DNA, 15 bp, Homo sapiens
gatggaggccaggag

SEQ ID NO: 1043785 - DNA, 15 bp, Homo sapiens
atggaggccaggagg

SEQ ID NO: 1043786 - DNA, 15 bp, Homo sapiens
tggaggccaggaggg

SEQ ID NO: 1043787 - DNA, 15 bp, Homo sapiens
ggaggccaggagggc

SEQ ID NO: 1043788 - DNA, 15 bp, Homo sapiens
gaggccaggagggcc

SEQ ID NO: 1043789 - DNA, 15 bp, Homo sapiens
aggccaggagggccc

SEQ ID NO: 1043790 - DNA, 15 bp, Homo sapiens
ggccaggagggcccg

SEQ ID NO: 1043791 - DNA, 15 bp, Homo sapiens
gccaggagggcccgg

SEQ ID NO: 1043792 - DNA, 15 bp, Homo sapiens
ccaggagggcccggg

SEQ ID NO: 1043793 - DNA, 15 bp, Homo sapiens
caggagggcccgggc

SEQ ID NO: 1043794 - DNA, 15 bp, Homo sapiens
aggagggcccgggca

SEQ ID NO: 1043795 - DNA, 15 bp, Homo sapiens
ggagggcccgggcag

SEQ ID NO: 1043796 - DNA, 15 bp, Homo sapiens
gagggcccgggcagc

SEQ ID NO: 1043797 - DNA, 15 bp, Homo sapiens
agggcccgggcagca

SEQ ID NO: 1043798 - DNA, 15 bp, Homo sapiens
gggcccgggcagcaa

SEQ ID NO: 1043799 - DNA, 15 bp, Homo sapiens
ggcccgggcagcaag

SEQ ID NO: 1043800 - DNA, 15 bp, Homo sapiens
gcccgggcagcaagg

SEQ ID NO: 1043801 - DNA, 15 bp, Homo sapiens
cccgggcagcaaggg

SEQ ID NO: 1043802 - DNA, 15 bp, Homo sapiens
ccgggcagcaagggt

SEQ ID NO: 1043803 - DNA, 15 bp, Homo sapiens
cgggcagcaagggtg

SEQ ID NO: 1043804 - DNA, 15 bp, Homo sapiens
gggcagcaagggtgg

SEQ ID NO: 1043805 - DNA, 15 bp, Homo sapiens
ggcagcaagggtgga

SEQ ID NO: 1043806 - DNA, 15 bp, Homo sapiens
gcagcaagggtggaa

SEQ ID NO: 1043807 - DNA, 15 bp, Homo sapiens
cagcaagggtggaag

SEQ ID NO: 1043808 - DNA, 15 bp, Homo sapiens
agcaagggtggaagg

SEQ ID NO: 1043809 - DNA, 15 bp, Homo sapiens
gcaagggtggaaggg

SEQ ID NO: 1043810 - DNA, 15 bp, Homo sapiens
caagggtggaagggg

SEQ ID NO: 1043811 - DNA, 15 bp, Homo sapiens
aagggtggaaggggc

SEQ ID NO: 1043812 - DNA, 15 bp, Homo sapiens
agggtggaaggggcc

SEQ ID NO: 1043813 - DNA, 15 bp, Homo sapiens
gggtggaaggggcct

SEQ ID NO: 1043814 - DNA, 15 bp, Homo sapiens
ggtggaaggggcctg

SEQ ID NO: 1043815 - DNA, 15 bp, Homo sapiens
gtggaaggggcctgg

SEQ ID NO: 1043816 - DNA, 15 bp, Homo sapiens
tggaaggggcctggg

SEQ ID NO: 1043817 - DNA, 15 bp, Homo sapiens
ggaaggggcctgggt

SEQ ID NO: 1043818 - DNA, 15 bp, Homo sapiens
gaaggggcctgggtg

SEQ ID NO: 1043819 - DNA, 15 bp, Homo sapiens
aaggggcctgggtgg

SEQ ID NO: 1043820 - DNA, 15 bp, Homo sapiens
aggggcctgggtggg

SEQ ID NO: 1043821 - DNA, 15 bp, Homo sapiens
ggggcctgggtgggt

SEQ ID NO: 1043822 - DNA, 15 bp, Homo sapiens
gggcctgggtgggtg

SEQ ID NO: 1043823 - DNA, 15 bp, Homo sapiens
ggcctgggtgggtgc

SEQ ID NO: 1043824 - DNA, 15 bp, Homo sapiens
gcctgggtgggtgcc

SEQ ID NO: 1043825 - DNA, 15 bp, Homo sapiens
cctgggtgggtgccg

SEQ ID NO: 1043826 - DNA, 15 bp, Homo sapiens
ctgggtgggtgccgg

SEQ ID NO: 1043827 - DNA, 15 bp, Homo sapiens
tgggtgggtgccgga

SEQ ID NO: 1043828 - DNA, 15 bp, Homo sapiens
gggtgggtgccggag

SEQ ID NO: 1043829 - DNA, 15 bp, Homo sapiens
ggtgggtgccggagg

SEQ ID NO: 1043830 - DNA, 15 bp, Homo sapiens
gtgggtgccggagga

SEQ ID NO: 1043831 - DNA, 15 bp, Homo sapiens
tgggtgccggaggaa

SEQ ID NO: 1043832 - DNA, 15 bp, Homo sapiens
gggtgccggaggaag

SEQ ID NO: 1043833 - DNA, 15 bp, Homo sapiens
ggtgccggaggaagt

SEQ ID NO: 1043834 - DNA, 15 bp, Homo sapiens
gtgccggaggaagtc

SEQ ID NO: 1043835 - DNA, 15 bp, Homo sapiens
tgccggaggaagtca

SEQ ID NO: 1043836 - DNA, 15 bp, Homo sapiens
gccggaggaagtcac

SEQ ID NO: 1043837 - DNA, 15 bp, Homo sapiens
ccggaggaagtcact

SEQ ID NO: 1043838 - DNA, 15 bp, Homo sapiens
cggaggaagtcacta

SEQ ID NO: 1043839 - DNA, 15 bp, Homo sapiens
ggaggaagtcactaa

SEQ ID NO: 1043840 - DNA, 15 bp, Homo sapiens
gaggaagtcactaac

SEQ ID NO: 1043841 - DNA, 15 bp, Homo sapiens
aggaagtcactaacg

SEQ ID NO: 1043842 - DNA, 15 bp, Homo sapiens
ggaagtcactaacga

SEQ ID NO: 1043843 - DNA, 15 bp, Homo sapiens
gaagtcactaacgaa

SEQ ID NO: 1043844 - DNA, 15 bp, Homo sapiens
aagtcactaacgaat

SEQ ID NO: 1043845 - DNA, 15 bp, Homo sapiens
agtcactaacgaatg

SEQ ID NO: 1043846 - DNA, 15 bp, Homo sapiens
gtcactaacgaatgt

SEQ ID NO: 1043847 - DNA, 15 bp, Homo sapiens
tcactaacgaatgtt

SEQ ID NO: 1043848 - DNA, 15 bp, Homo sapiens
cactaacgaatgttc

SEQ ID NO: 1043849 - DNA, 15 bp, Homo sapiens
actaacgaatgttct

SEQ ID NO: 1043850 - DNA, 15 bp, Homo sapiens
ctaacgaatgttctt

SEQ ID NO: 1043851 - DNA, 15 bp, Homo sapiens
taacgaatgttcttc

SEQ ID NO: 1043852 - DNA, 15 bp, Homo sapiens
aacgaatgttcttca

SEQ ID NO: 1043853 - DNA, 15 bp, Homo sapiens
acgaatgttcttcag

SEQ ID NO: 1043854 - DNA, 15 bp, Homo sapiens
cgaatgttcttcagg

SEQ ID NO: 1043855 - DNA, 15 bp, Homo sapiens
gaatgttcttcaggc

SEQ ID NO: 1043856 - DNA, 15 bp, Homo sapiens
aatgttcttcaggca

SEQ ID NO: 1043857 - DNA, 15 bp, Homo sapiens
atgttcttcaggcag

SEQ ID NO: 1043858 - DNA, 15 bp, Homo sapiens
tgttcttcaggcaga

SEQ ID NO: 1043859 - DNA, 15 bp, Homo sapiens
gttcttcaggcagaa

SEQ ID NO: 1043860 - DNA, 15 bp, Homo sapiens
ttcttcaggcagaaa

SEQ ID NO: 1043861 - DNA, 15 bp, Homo sapiens
tcttcaggcagaaag

SEQ ID NO: 1043862 - DNA, 15 bp, Homo sapiens
cttcaggcagaaagt

SEQ ID NO: 1043863 - DNA, 15 bp, Homo sapiens
ttcaggcagaaagtt

SEQ ID NO: 1043864 - DNA, 15 bp, Homo sapiens
tcaggcagaaagttc

SEQ ID NO: 1043865 - DNA, 15 bp, Homo sapiens
caggcagaaagttcc

SEQ ID NO: 1043866 - DNA, 15 bp, Homo sapiens
aggcagaaagttccc

SEQ ID NO: 1043867 - DNA, 15 bp, Homo sapiens
ggcagaaagttccca

SEQ ID NO: 1043868 - DNA, 15 bp, Homo sapiens
gcagaaagttcccag

SEQ ID NO: 1043869 - DNA, 15 bp, Homo sapiens
cagaaagttcccagg

SEQ ID NO: 1043870 - DNA, 15 bp, Homo sapiens
agaaagttcccaggg

SEQ ID NO: 1043871 - DNA, 15 bp, Homo sapiens
gaaagttcccagggt

SEQ ID NO: 1043872 - DNA, 15 bp, Homo sapiens
aaagttcccagggtc

SEQ ID NO: 1043873 - DNA, 15 bp, Homo sapiens
aagttcccagggtcc

SEQ ID NO: 1043874 - DNA, 15 bp, Homo sapiens
agttcccagggtccc

SEQ ID NO: 1043875 - DNA, 15 bp, Homo sapiens
gttcccagggtccca

SEQ ID NO: 1043876 - DNA, 15 bp, Homo sapiens
ttcccagggtcccat

SEQ ID NO: 1043877 - DNA, 15 bp, Homo sapiens
tcccagggtcccatt

SEQ ID NO: 1043878 - DNA, 15 bp, Homo sapiens
cccagggtcccattg

SEQ ID NO: 1043879 - DNA, 15 bp, Homo sapiens
ccagggtcccattga

SEQ ID NO: 1043880 - DNA, 15 bp, Homo sapiens
cagggtcccattgat

SEQ ID NO: 1043881 - DNA, 15 bp, Homo sapiens
agggtcccattgata

SEQ ID NO: 1043882 - DNA, 15 bp, Homo sapiens
gggtcccattgatac

SEQ ID NO: 1043883 - DNA, 15 bp, Homo sapiens
ggtcccattgatacc

SEQ ID NO: 1043884 - DNA, 15 bp, Homo sapiens
gtcccattgataccc

SEQ ID NO: 1043885 - DNA, 15 bp, Homo sapiens
tcccattgatacccc

SEQ ID NO: 1043886 - DNA, 15 bp, Homo sapiens
cccattgatacccct

SEQ ID NO: 1043887 - DNA, 15 bp, Homo sapiens
ccattgatacccctg

SEQ ID NO: 1043888 - DNA, 15 bp, Homo sapiens
cattgatacccctgc

SEQ ID NO: 1043889 - DNA, 15 bp, Homo sapiens
attgatacccctgcc

SEQ ID NO: 1043890 - DNA, 15 bp, Homo sapiens
ttgatacccctgcct

SEQ ID NO: 1043891 - DNA, 15 bp, Homo sapiens
tgatacccctgcctg

SEQ ID NO: 1043892 - DNA, 15 bp, Homo sapiens
gatacccctgcctgt

SEQ ID NO: 1043893 - DNA, 15 bp, Homo sapiens
atacccctgcctgtt

SEQ ID NO: 1043894 - DNA, 15 bp, Homo sapiens
tacccctgcctgttc

SEQ ID NO: 1043895 - DNA, 15 bp, Homo sapiens
acccctgcctgttca

SEQ ID NO: 1043896 - DNA, 15 bp, Homo sapiens
cccctgcctgttcac

SEQ ID NO: 1043897 - DNA, 15 bp, Homo sapiens
ccctgcctgttcaca

SEQ ID NO: 1043898 - DNA, 15 bp, Homo sapiens
cctgcctgttcacat

SEQ ID NO: 1043899 - DNA, 15 bp, Homo sapiens
ctgcctgttcacatc

SEQ ID NO: 1043900 - DNA, 15 bp, Homo sapiens
tgcctgttcacatcc

SEQ ID NO: 1043901 - DNA, 15 bp, Homo sapiens
gcctgttcacatcct

SEQ ID NO: 1043902 - DNA, 15 bp, Homo sapiens
cctgttcacatcctg

SEQ ID NO: 1043903 - DNA, 15 bp, Homo sapiens
ctgttcacatcctgg

SEQ ID NO: 1043904 - DNA, 15 bp, Homo sapiens
tgttcacatcctggc

SEQ ID NO: 1043905 - DNA, 15 bp, Homo sapiens
gttcacatcctggcg

SEQ ID NO: 1043906 - DNA, 15 bp, Homo sapiens
ttcacatcctggcgg

SEQ ID NO: 1043907 - DNA, 15 bp, Homo sapiens
tcacatcctggcggc

SEQ ID NO: 1043908 - DNA, 15 bp, Homo sapiens
cacatcctggcggca

SEQ ID NO: 1043909 - DNA, 15 bp, Homo sapiens
acatcctggcggcag

SEQ ID NO: 1043910 - DNA, 15 bp, Homo sapiens
catcctggcggcagg

SEQ ID NO: 1043911 - DNA, 15 bp, Homo sapiens
atcctggcggcagga

SEQ ID NO: 1043912 - DNA, 15 bp, Homo sapiens
tcctggcggcaggac

SEQ ID NO: 1043913 - DNA, 15 bp, Homo sapiens
cctggcggcaggact

SEQ ID NO: 1043914 - DNA, 15 bp, Homo sapiens
ctggcggcaggactg

SEQ ID NO: 1043915 - DNA, 15 bp, Homo sapiens
tggcggcaggactgg

SEQ ID NO: 1043916 - DNA, 15 bp, Homo sapiens
ggcggcaggactggg

SEQ ID NO: 1043917 - DNA, 15 bp, Homo sapiens
gcggcaggactggga

SEQ ID NO: 1043918 - DNA, 15 bp, Homo sapiens
cggcaggactgggat

SEQ ID NO: 1043919 - DNA, 15 bp, Homo sapiens
ggcaggactgggatg

SEQ ID NO: 1043920 - DNA, 15 bp, Homo sapiens
gcaggactgggatga

SEQ ID NO: 1043921 - DNA, 15 bp, Homo sapiens
caggactgggatgag

SEQ ID NO: 1043922 - DNA, 15 bp, Homo sapiens
aggactgggatgagg

SEQ ID NO: 1043923 - DNA, 15 bp, Homo sapiens
ggactgggatgaggc

SEQ ID NO: 1043924 - DNA, 15 bp, Homo sapiens
gactgggatgaggca

SEQ ID NO: 1043925 - DNA, 15 bp, Homo sapiens
actgggatgaggcat

SEQ ID NO: 1043926 - DNA, 15 bp, Homo sapiens
ctgggatgaggcatt

SEQ ID NO: 1043927 - DNA, 15 bp, Homo sapiens
tgggatgaggcattt

SEQ ID NO: 1043928 - DNA, 15 bp, Homo sapiens
gggatgaggcatttt

SEQ ID NO: 1043929 - DNA, 15 bp, Homo sapiens
ggatgaggcattttt

SEQ ID NO: 1043930 - DNA, 15 bp, Homo sapiens
gatgaggcatttttt

SEQ ID NO: 1043931 - DNA, 15 bp, Homo sapiens
atgaggcatttttta

SEQ ID NO: 1043932 - DNA, 15 bp, Homo sapiens
tgaggcattttttaa

SEQ ID NO: 1043933 - DNA, 15 bp, Homo sapiens
gaggcattttttaaa

SEQ ID NO: 1043934 - DNA, 15 bp, Homo sapiens
aggcattttttaaaa

SEQ ID NO: 1043935 - DNA, 15 bp, Homo sapiens
ggcattttttaaaaa

SEQ ID NO: 1043936 - DNA, 15 bp, Homo sapiens
gcattttttaaaaag

SEQ ID NO: 1043937 - DNA, 15 bp, Homo sapiens
cattttttaaaaagt

SEQ ID NO: 1043938 - DNA, 15 bp, Homo sapiens
attttttaaaaagtt

SEQ ID NO: 1043939 - DNA, 15 bp, Homo sapiens
ttttttaaaaagttg

SEQ ID NO: 1043940 - DNA, 15 bp, Homo sapiens
tttttaaaaagttgg

SEQ ID NO: 1043941 - DNA, 15 bp, Homo sapiens
ttttaaaaagttggg

SEQ ID NO: 1043942 - DNA, 15 bp, Homo sapiens
tttaaaaagttgggg

SEQ ID NO: 1043943 - DNA, 15 bp, Homo sapiens
ttaaaaagttgggga

SEQ ID NO: 1043944 - DNA, 15 bp, Homo sapiens
taaaaagttggggag

SEQ ID NO: 1043945 - DNA, 15 bp, Homo sapiens
aaaaagttggggaga

SEQ ID NO: 1043946 - DNA, 15 bp, Homo sapiens
aaaagttggggagat

SEQ ID NO: 1043947 - DNA, 15 bp, Homo sapiens
aaagttggggagata

SEQ ID NO: 1043948 - DNA, 15 bp, Homo sapiens
aagttggggagatat

SEQ ID NO: 1043949 - DNA, 15 bp, Homo sapiens
agttggggagatatc

SEQ ID NO: 1043950 - DNA, 15 bp, Homo sapiens
gttggggagatatca

SEQ ID NO: 1043951 - DNA, 15 bp, Homo sapiens
ttggggagatatcag

SEQ ID NO: 1043952 - DNA, 15 bp, Homo sapiens
tggggagatatcagg

SEQ ID NO: 1043953 - DNA, 15 bp, Homo sapiens
ggggagatatcaggg

SEQ ID NO: 1043954 - DNA, 15 bp, Homo sapiens
gggagatatcagggc

SEQ ID NO: 1043955 - DNA, 15 bp, Homo sapiens
ggagatatcagggct

SEQ ID NO: 1043956 - DNA, 15 bp, Homo sapiens
gagatatcagggctg

SEQ ID NO: 1043957 - DNA, 15 bp, Homo sapiens
agatatcagggctgg

SEQ ID NO: 1043958 - DNA, 15 bp, Homo sapiens
gatatcagggctggt

SEQ ID NO: 1043959 - DNA, 15 bp, Homo sapiens
atatcagggctggtg

SEQ ID NO: 1043960 - DNA, 15 bp, Homo sapiens
tatcagggctggtgt

SEQ ID NO: 1043961 - DNA, 15 bp, Homo sapiens
atcagggctggtgtg

SEQ ID NO: 1043962 - DNA, 15 bp, Homo sapiens
tcagggctggtgtgc

SEQ ID NO: 1043963 - DNA, 15 bp, Homo sapiens
cagggctggtgtgcc

SEQ ID NO: 1043964 - DNA, 15 bp, Homo sapiens
agggctggtgtgcca

SEQ ID NO: 1043965 - DNA, 15 bp, Homo sapiens
gggctggtgtgccaa

SEQ ID NO: 1043966 - DNA, 15 bp, Homo sapiens
ggctggtgtgccaaa

SEQ ID NO: 1043967 - DNA, 15 bp, Homo sapiens
gctggtgtgccaaag

SEQ ID NO: 1043968 - DNA, 15 bp, Homo sapiens
ctggtgtgccaaagt

SEQ ID NO: 1043969 - DNA, 15 bp, Homo sapiens
tggtgtgccaaagtt

SEQ ID NO: 1043970 - DNA, 15 bp, Homo sapiens
ggtgtgccaaagttc

SEQ ID NO: 1043971 - DNA, 15 bp, Homo sapiens
gtgtgccaaagttca

SEQ ID NO: 1043972 - DNA, 15 bp, Homo sapiens
tgtgccaaagttcag

SEQ ID NO: 1043973 - DNA, 15 bp, Homo sapiens
gtgccaaagttcagg

SEQ ID NO: 1043974 - DNA, 15 bp, Homo sapiens
tgccaaagttcaggc

SEQ ID NO: 1043975 - DNA, 15 bp, Homo sapiens
gccaaagttcaggct

SEQ ID NO: 1043976 - DNA, 15 bp, Homo sapiens
ccaaagttcaggctt

SEQ ID NO: 1043977 - DNA, 15 bp, Homo sapiens
caaagttcaggcttt

SEQ ID NO: 1043978 - DNA, 15 bp, Homo sapiens
aaagttcaggctttg

SEQ ID NO: 1043979 - DNA, 15 bp, Homo sapiens
aagttcaggctttgt

SEQ ID NO: 1043980 - DNA, 15 bp, Homo sapiens
agttcaggctttgtc

SEQ ID NO: 1043981 - DNA, 15 bp, Homo sapiens
gttcaggctttgtcc

SEQ ID NO: 1043982 - DNA, 15 bp, Homo sapiens
ttcaggctttgtcca

SEQ ID NO: 1043983 - DNA, 15 bp, Homo sapiens
tcaggctttgtccac

SEQ ID NO: 1043984 - DNA, 15 bp, Homo sapiens
caggctttgtccacc

SEQ ID NO: 1043985 - DNA, 15 bp, Homo sapiens
aggctttgtccaccc

SEQ ID NO: 1043986 - DNA, 15 bp, Homo sapiens
ggctttgtccaccca

SEQ ID NO: 1043987 - DNA, 15 bp, Homo sapiens
gctttgtccacccaa

SEQ ID NO: 1043988 - DNA, 15 bp, Homo sapiens
ctttgtccacccaag

SEQ ID NO: 1043989 - DNA, 15 bp, Homo sapiens
tttgtccacccaagg

SEQ ID NO: 1043990 - DNA, 15 bp, Homo sapiens
ttgtccacccaaggt

SEQ ID NO: 1043991 - DNA, 15 bp, Homo sapiens
tgtccacccaaggtg

SEQ ID NO: 1043992 - DNA, 15 bp, Homo sapiens
gtccacccaaggtga

SEQ ID NO: 1043993 - DNA, 15 bp, Homo sapiens
tccacccaaggtgag

SEQ ID NO: 1043994 - DNA, 15 bp, Homo sapiens
ccacccaaggtgaga

SEQ ID NO: 1043995 - DNA, 15 bp, Homo sapiens
cacccaaggtgagag

SEQ ID NO: 1043996 - DNA, 15 bp, Homo sapiens
acccaaggtgagagg

SEQ ID NO: 1043997 - DNA, 15 bp, Homo sapiens
cccaaggtgagaggc

SEQ ID NO: 1043998 - DNA, 15 bp, Homo sapiens
ccaaggtgagaggct

SEQ ID NO: 1043999 - DNA, 15 bp, Homo sapiens
caaggtgagaggctg

SEQ ID NO: 1044000 - DNA, 15 bp, Homo sapiens
aaggtgagaggctgc

SEQ ID NO: 1044001 - DNA, 15 bp, Homo sapiens
aggtgagaggctgca

SEQ ID NO: 1044002 - DNA, 15 bp, Homo sapiens
ggtgagaggctgcag

SEQ ID NO: 1044003 - DNA, 15 bp, Homo sapiens
gtgagaggctgcagg

SEQ ID NO: 1044004 - DNA, 15 bp, Homo sapiens
tgagaggctgcaggg

SEQ ID NO: 1044005 - DNA, 15 bp, Homo sapiens
gagaggctgcagggg

SEQ ID NO: 1044006 - DNA, 15 bp, Homo sapiens
agaggctgcaggggt

SEQ ID NO: 1044007 - DNA, 15 bp, Homo sapiens
gaggctgcaggggtg

SEQ ID NO: 1044008 - DNA, 15 bp, Homo sapiens
aggctgcaggggtgt

SEQ ID NO: 1044009 - DNA, 15 bp, Homo sapiens
ggctgcaggggtgtg

SEQ ID NO: 1044010 - DNA, 15 bp, Homo sapiens
gctgcaggggtgtgc

SEQ ID NO: 1044011 - DNA, 15 bp, Homo sapiens
ctgcaggggtgtgcc

SEQ ID NO: 1044012 - DNA, 15 bp, Homo sapiens
tgcaggggtgtgccg

SEQ ID NO: 1044013 - DNA, 15 bp, Homo sapiens
gcaggggtgtgccgt

SEQ ID NO: 1044014 - DNA, 15 bp, Homo sapiens
caggggtgtgccgtg

SEQ ID NO: 1044015 - DNA, 15 bp, Homo sapiens
aggggtgtgccgtgg

SEQ ID NO: 1044016 - DNA, 15 bp, Homo sapiens
ggggtgtgccgtggg

SEQ ID NO: 1044017 - DNA, 15 bp, Homo sapiens
gggtgtgccgtgggc

SEQ ID NO: 1044018 - DNA, 15 bp, Homo sapiens
ggtgtgccgtgggca

SEQ ID NO: 1044019 - DNA, 15 bp, Homo sapiens
gtgtgccgtgggcag

SEQ ID NO: 1044020 - DNA, 15 bp, Homo sapiens
tgtgccgtgggcaga

SEQ ID NO: 1044021 - DNA, 15 bp, Homo sapiens
gtgccgtgggcagag

SEQ ID NO: 1044022 - DNA, 15 bp, Homo sapiens
tgccgtgggcagaga

SEQ ID NO: 1044023 - DNA, 15 bp, Homo sapiens
gccgtgggcagagag

SEQ ID NO: 1044024 - DNA, 15 bp, Homo sapiens
ccgtgggcagagagg

SEQ ID NO: 1044025 - DNA, 15 bp, Homo sapiens
cgtgggcagagaggg

SEQ ID NO: 1044026 - DNA, 15 bp, Homo sapiens
gtgggcagagagggg

SEQ ID NO: 1044027 - DNA, 15 bp, Homo sapiens
tgggcagagagggga

SEQ ID NO: 1044028 - DNA, 15 bp, Homo sapiens
gggcagagaggggat

SEQ ID NO: 1044029 - DNA, 15 bp, Homo sapiens
ggcagagaggggatg

SEQ ID NO: 1044030 - DNA, 15 bp, Homo sapiens
gcagagaggggatga

SEQ ID NO: 1044031 - DNA, 15 bp, Homo sapiens
cagagaggggatgag

SEQ ID NO: 1044032 - DNA, 15 bp, Homo sapiens
agagaggggatgagg

SEQ ID NO: 1044033 - DNA, 15 bp, Homo sapiens
gagaggggatgaggt

SEQ ID NO: 1044034 - DNA, 15 bp, Homo sapiens
agaggggatgaggta

SEQ ID NO: 1044035 - DNA, 15 bp, Homo sapiens
gaggggatgaggtag

SEQ ID NO: 1044036 - DNA, 15 bp, Homo sapiens
aggggatgaggtagg

SEQ ID NO: 1044037 - DNA, 15 bp, Homo sapiens
ggggatgaggtaggg

SEQ ID NO: 1044038 - DNA, 15 bp, Homo sapiens
gggatgaggtagggg

SEQ ID NO: 1044039 - DNA, 15 bp, Homo sapiens
ggatgaggtaggggt

SEQ ID NO: 1044040 - DNA, 15 bp, Homo sapiens
gatgaggtaggggtg

SEQ ID NO: 1044041 - DNA, 15 bp, Homo sapiens
atgaggtaggggtgg

SEQ ID NO: 1044042 - DNA, 15 bp, Homo sapiens
tgaggtaggggtggg

SEQ ID NO: 1044043 - DNA, 15 bp, Homo sapiens
gaggtaggggtggga

SEQ ID NO: 1044044 - DNA, 15 bp, Homo sapiens
aggtaggggtgggag

SEQ ID NO: 1044045 - DNA, 15 bp, Homo sapiens
ggtaggggtgggagg

SEQ ID NO: 1044046 - DNA, 15 bp, Homo sapiens
gtaggggtgggaggg

SEQ ID NO: 1044047 - DNA, 15 bp, Homo sapiens
taggggtgggaggga

SEQ ID NO: 1044048 - DNA, 15 bp, Homo sapiens
aggggtgggagggat

SEQ ID NO: 1044049 - DNA, 15 bp, Homo sapiens
ggggtgggagggatg

SEQ ID NO: 1044050 - DNA, 15 bp, Homo sapiens
gggtgggagggatga

SEQ ID NO: 1044051 - DNA, 15 bp, Homo sapiens
ggtgggagggatgag

SEQ ID NO: 1044052 - DNA, 15 bp, Homo sapiens
gtgggagggatgagc

SEQ ID NO: 1044053 - DNA, 15 bp, Homo sapiens
tgggagggatgagct

SEQ ID NO: 1044054 - DNA, 15 bp, Homo sapiens
gggagggatgagctg

SEQ ID NO: 1044055 - DNA, 15 bp, Homo sapiens
ggagggatgagctgc

SEQ ID NO: 1044056 - DNA, 15 bp, Homo sapiens
gagggatgagctgcc

SEQ ID NO: 1044057 - DNA, 15 bp, Homo sapiens
agggatgagctgccc

SEQ ID NO: 1044058 - DNA, 15 bp, Homo sapiens
gggatgagctgccca

SEQ ID NO: 1044059 - DNA, 15 bp, Homo sapiens
ggatgagctgcccag

SEQ ID NO: 1044060 - DNA, 15 bp, Homo sapiens
gatgagctgcccaga

SEQ ID NO: 1044061 - DNA, 15 bp, Homo sapiens
atgagctgcccagat

SEQ ID NO: 1044062 - DNA, 15 bp, Homo sapiens
tgagctgcccagatg

SEQ ID NO: 1044063 - DNA, 15 bp, Homo sapiens
gagctgcccagatgc

SEQ ID NO: 1044064 - DNA, 15 bp, Homo sapiens
agctgcccagatgca

SEQ ID NO: 1044065 - DNA, 15 bp, Homo sapiens
gctgcccagatgcac

SEQ ID NO: 1044066 - DNA, 15 bp, Homo sapiens
ctgcccagatgcacc

SEQ ID NO: 1044067 - DNA, 15 bp, Homo sapiens
tgcccagatgcaccc

SEQ ID NO: 1044068 - DNA, 15 bp, Homo sapiens
gcccagatgcacccg

SEQ ID NO: 1044069 - DNA, 15 bp, Homo sapiens
cccagatgcacccgt

SEQ ID NO: 1044070 - DNA, 15 bp, Homo sapiens
ccagatgcacccgtg

SEQ ID NO: 1044071 - DNA, 15 bp, Homo sapiens
cagatgcacccgtgg

SEQ ID NO: 1044072 - DNA, 15 bp, Homo sapiens
agatgcacccgtgga

SEQ ID NO: 1044073 - DNA, 15 bp, Homo sapiens
gatgcacccgtggag

SEQ ID NO: 1044074 - DNA, 15 bp, Homo sapiens
atgcacccgtggagg

SEQ ID NO: 1044075 - DNA, 15 bp, Homo sapiens
tgcacccgtggagga

SEQ ID NO: 1044076 - DNA, 15 bp, Homo sapiens
gcacccgtggaggag

SEQ ID NO: 1044077 - DNA, 15 bp, Homo sapiens
cacccgtggaggagt

SEQ ID NO: 1044078 - DNA, 15 bp, Homo sapiens
acccgtggaggagtt

SEQ ID NO: 1044079 - DNA, 15 bp, Homo sapiens
cccgtggaggagttg

SEQ ID NO: 1044080 - DNA, 15 bp, Homo sapiens
ccgtggaggagttga

SEQ ID NO: 1044081 - DNA, 15 bp, Homo sapiens
cgtggaggagttgat

SEQ ID NO: 1044082 - DNA, 15 bp, Homo sapiens
gtggaggagttgatc

SEQ ID NO: 1044083 - DNA, 15 bp, Homo sapiens
tggaggagttgatct

SEQ ID NO: 1044084 - DNA, 15 bp, Homo sapiens
ggaggagttgatctg

SEQ ID NO: 1044085 - DNA, 15 bp, Homo sapiens
gaggagttgatctgg

SEQ ID NO: 1044086 - DNA, 15 bp, Homo sapiens
aggagttgatctgga

SEQ ID NO: 1044087 - DNA, 15 bp, Homo sapiens
ggagttgatctggaa

SEQ ID NO: 1044088 - DNA, 15 bp, Homo sapiens
gagttgatctggaat

SEQ ID NO: 1044089 - DNA, 15 bp, Homo sapiens
agttgatctggaatc

SEQ ID NO: 1044090 - DNA, 15 bp, Homo sapiens
gttgatctggaatcc

SEQ ID NO: 1044091 - DNA, 15 bp, Homo sapiens
ttgatctggaatcct

SEQ ID NO: 1044092 - DNA, 15 bp, Homo sapiens
tgatctggaatccta

SEQ ID NO: 1044093 - DNA, 15 bp, Homo sapiens
gatctggaatcctag

SEQ ID NO: 1044094 - DNA, 15 bp, Homo sapiens
atctggaatcctagc

SEQ ID NO: 1044095 - DNA, 15 bp, Homo sapiens
tctggaatcctagcc

SEQ ID NO: 1044096 - DNA, 15 bp, Homo sapiens
ctggaatcctagcca

SEQ ID NO: 1044097 - DNA, 15 bp, Homo sapiens
tggaatcctagccac

SEQ ID NO: 1044098 - DNA, 15 bp, Homo sapiens
ggaatcctagccact

SEQ ID NO: 1044099 - DNA, 15 bp, Homo sapiens
gaatcctagccactg

SEQ ID NO: 1044100 - DNA, 15 bp, Homo sapiens
aatcctagccactgg

SEQ ID NO: 1044101 - DNA, 15 bp, Homo sapiens
atcctagccactggg

SEQ ID NO: 1044102 - DNA, 15 bp, Homo sapiens
tcctagccactgggt

SEQ ID NO: 1044103 - DNA, 15 bp, Homo sapiens
cctagccactgggtt

SEQ ID NO: 1044104 - DNA, 15 bp, Homo sapiens
ctagccactgggttt

SEQ ID NO: 1044105 - DNA, 15 bp, Homo sapiens
tagccactgggttta

SEQ ID NO: 1044106 - DNA, 15 bp, Homo sapiens
agccactgggtttac

SEQ ID NO: 1044107 - DNA, 15 bp, Homo sapiens
gccactgggtttacc

SEQ ID NO: 1044108 - DNA, 15 bp, Homo sapiens
ccactgggtttaccc

SEQ ID NO: 1044109 - DNA, 15 bp, Homo sapiens
cactgggtttaccct

SEQ ID NO: 1044110 - DNA, 15 bp, Homo sapiens
actgggtttaccctg

SEQ ID NO: 1044111 - DNA, 15 bp, Homo sapiens
ctgggtttaccctgc

SEQ ID NO: 1044112 - DNA, 15 bp, Homo sapiens
tgggtttaccctgca

SEQ ID NO: 1044113 - DNA, 15 bp, Homo sapiens
gggtttaccctgcag

SEQ ID NO: 1044114 - DNA, 15 bp, Homo sapiens
ggtttaccctgcagt

SEQ ID NO: 1044115 - DNA, 15 bp, Homo sapiens
gtttaccctgcagtg

SEQ ID NO: 1044116 - DNA, 15 bp, Homo sapiens
tttaccctgcagtgt

SEQ ID NO: 1044117 - DNA, 15 bp, Homo sapiens
ttaccctgcagtgtg

SEQ ID NO: 1044118 - DNA, 15 bp, Homo sapiens
taccctgcagtgtgt

SEQ ID NO: 1044119 - DNA, 15 bp, Homo sapiens
accctgcagtgtgtc

SEQ ID NO: 1044120 - DNA, 15 bp, Homo sapiens
ccctgcagtgtgtcc

SEQ ID NO: 1044121 - DNA, 15 bp, Homo sapiens
cctgcagtgtgtccc

SEQ ID NO: 1044122 - DNA, 15 bp, Homo sapiens
ctgcagtgtgtccca

SEQ ID NO: 1044123 - DNA, 15 bp, Homo sapiens
tgcagtgtgtcccag

SEQ ID NO: 1044124 - DNA, 15 bp, Homo sapiens
gcagtgtgtcccagc

SEQ ID NO: 1044125 - DNA, 15 bp, Homo sapiens
cagtgtgtcccagca

SEQ ID NO: 1044126 - DNA, 15 bp, Homo sapiens
agtgtgtcccagcag

SEQ ID NO: 1044127 - DNA, 15 bp, Homo sapiens
gtgtgtcccagcagc

SEQ ID NO: 1044128 - DNA, 15 bp, Homo sapiens
tgtgtcccagcagca

SEQ ID NO: 1044129 - DNA, 15 bp, Homo sapiens
gtgtcccagcagcat

SEQ ID NO: 1044130 - DNA, 15 bp, Homo sapiens
tgtcccagcagcatc

SEQ ID NO: 1044131 - DNA, 15 bp, Homo sapiens
gtcccagcagcatcc

SEQ ID NO: 1044132 - DNA, 15 bp, Homo sapiens
tcccagcagcatccc

SEQ ID NO: 1044133 - DNA, 15 bp, Homo sapiens
cccagcagcatccca

SEQ ID NO: 1044134 - DNA, 15 bp, Homo sapiens
ccagcagcatcccag

SEQ ID NO: 1044135 - DNA, 15 bp, Homo sapiens
cagcagcatcccagg

SEQ ID NO: 1044136 - DNA, 15 bp, Homo sapiens
agcagcatcccaggc

SEQ ID NO: 1044137 - DNA, 15 bp, Homo sapiens
gcagcatcccaggct

SEQ ID NO: 1044138 - DNA, 15 bp, Homo sapiens
cagcatcccaggctt

SEQ ID NO: 1044139 - DNA, 15 bp, Homo sapiens
agcatcccaggcttc

SEQ ID NO: 1044140 - DNA, 15 bp, Homo sapiens
gcatcccaggcttct

SEQ ID NO: 1044141 - DNA, 15 bp, Homo sapiens
catcccaggcttctc

SEQ ID NO: 1044142 - DNA, 15 bp, Homo sapiens
atcccaggcttctct

SEQ ID NO: 1044143 - DNA, 15 bp, Homo sapiens
tcccaggcttctctc

SEQ ID NO: 1044144 - DNA, 15 bp, Homo sapiens
cccaggcttctctcc

SEQ ID NO: 1044145 - DNA, 15 bp, Homo sapiens
ccaggcttctctcca

SEQ ID NO: 1044146 - DNA, 15 bp, Homo sapiens
caggcttctctccag

SEQ ID NO: 1044147 - DNA, 15 bp, Homo sapiens
aggcttctctccagc

SEQ ID NO: 1044148 - DNA, 15 bp, Homo sapiens
ggcttctctccagcc

SEQ ID NO: 1044149 - DNA, 15 bp, Homo sapiens
gcttctctccagcct

SEQ ID NO: 1044150 - DNA, 15 bp, Homo sapiens
cttctctccagcctt

SEQ ID NO: 1044151 - DNA, 15 bp, Homo sapiens
ttctctccagccttt

SEQ ID NO: 1044152 - DNA, 15 bp, Homo sapiens
tctctccagcctttg

SEQ ID NO: 1044153 - DNA, 15 bp, Homo sapiens
ctctccagcctttgg

SEQ ID NO: 1044154 - DNA, 15 bp, Homo sapiens
tctccagcctttggc

SEQ ID NO: 1044155 - DNA, 15 bp, Homo sapiens
ctccagcctttggca

SEQ ID NO: 1044156 - DNA, 15 bp, Homo sapiens
tccagcctttggcag

SEQ ID NO: 1044157 - DNA, 15 bp, Homo sapiens
ccagcctttggcagg

SEQ ID NO: 1044158 - DNA, 15 bp, Homo sapiens
cagcctttggcaggg

SEQ ID NO: 1044159 - DNA, 15 bp, Homo sapiens
agcctttggcagggc

SEQ ID NO: 1044160 - DNA, 15 bp, Homo sapiens
gcctttggcagggct

SEQ ID NO: 1044161 - DNA, 15 bp, Homo sapiens
cctttggcagggctt

SEQ ID NO: 1044162 - DNA, 15 bp, Homo sapiens
ctttggcagggcttt

SEQ ID NO: 1044163 - DNA, 15 bp, Homo sapiens
tttggcagggcttta

SEQ ID NO: 1044164 - DNA, 15 bp, Homo sapiens
ttggcagggctttag

SEQ ID NO: 1044165 - DNA, 15 bp, Homo sapiens
tggcagggctttagc

SEQ ID NO: 1044166 - DNA, 15 bp, Homo sapiens
ggcagggctttagct

SEQ ID NO: 1044167 - DNA, 15 bp, Homo sapiens
gcagggctttagctt

SEQ ID NO: 1044168 - DNA, 15 bp, Homo sapiens
cagggctttagcttc

SEQ ID NO: 1044169 - DNA, 15 bp, Homo sapiens
agggctttagcttcc

SEQ ID NO: 1044170 - DNA, 15 bp, Homo sapiens
gggctttagcttcca

SEQ ID NO: 1044171 - DNA, 15 bp, Homo sapiens
ggctttagcttccag

SEQ ID NO: 1044172 - DNA, 15 bp, Homo sapiens
gctttagcttccagc

SEQ ID NO: 1044173 - DNA, 15 bp, Homo sapiens
ctttagcttccagca

SEQ ID NO: 1044174 - DNA, 15 bp, Homo sapiens
tttagcttccagcag

SEQ ID NO: 1044175 - DNA, 15 bp, Homo sapiens
ttagcttccagcagc

SEQ ID NO: 1044176 - DNA, 15 bp, Homo sapiens
tagcttccagcagct

SEQ ID NO: 1044177 - DNA, 15 bp, Homo sapiens
agcttccagcagctc

SEQ ID NO: 1044178 - DNA, 15 bp, Homo sapiens
gcttccagcagctca

SEQ ID NO: 1044179 - DNA, 15 bp, Homo sapiens
cttccagcagctcag

SEQ ID NO: 1044180 - DNA, 15 bp, Homo sapiens
ttccagcagctcagg

SEQ ID NO: 1044181 - DNA, 15 bp, Homo sapiens
tccagcagctcaggt

SEQ ID NO: 1044182 - DNA, 15 bp, Homo sapiens
ccagcagctcaggtg

SEQ ID NO: 1044183 - DNA, 15 bp, Homo sapiens
cagcagctcaggtgg

SEQ ID NO: 1044184 - DNA, 15 bp, Homo sapiens
agcagctcaggtgga

SEQ ID NO: 1044185 - DNA, 15 bp, Homo sapiens
gcagctcaggtggac

SEQ ID NO: 1044186 - DNA, 15 bp, Homo sapiens
cagctcaggtggacc

SEQ ID NO: 1044187 - DNA, 15 bp, Homo sapiens
agctcaggtggaccc

SEQ ID NO: 1044188 - DNA, 15 bp, Homo sapiens
gctcaggtggacccc

SEQ ID NO: 1044189 - DNA, 15 bp, Homo sapiens
ctcaggtggacccca

SEQ ID NO: 1044190 - DNA, 15 bp, Homo sapiens
tcaggtggaccccag

SEQ ID NO: 1044191 - DNA, 15 bp, Homo sapiens
caggtggaccccagc

SEQ ID NO: 1044192 - DNA, 15 bp, Homo sapiens
aggtggaccccagca

SEQ ID NO: 1044193 - DNA, 15 bp, Homo sapiens
ggtggaccccagcat

SEQ ID NO: 1044194 - DNA, 15 bp, Homo sapiens
gtggaccccagcata

SEQ ID NO: 1044195 - DNA, 15 bp, Homo sapiens
tggaccccagcatat

SEQ ID NO: 1044196 - DNA, 15 bp, Homo sapiens
ggaccccagcatatg

SEQ ID NO: 1044197 - DNA, 15 bp, Homo sapiens
gaccccagcatatgg

SEQ ID NO: 1044198 - DNA, 15 bp, Homo sapiens
accccagcatatgga

SEQ ID NO: 1044199 - DNA, 15 bp, Homo sapiens
ccccagcatatggac

SEQ ID NO: 1044200 - DNA, 15 bp, Homo sapiens
cccagcatatggact

SEQ ID NO: 1044201 - DNA, 15 bp, Homo sapiens
ccagcatatggactt

SEQ ID NO: 1044202 - DNA, 15 bp, Homo sapiens
cagcatatggacttt

SEQ ID NO: 1044203 - DNA, 15 bp, Homo sapiens
agcatatggactttg

SEQ ID NO: 1044204 - DNA, 15 bp, Homo sapiens
gcatatggactttga

SEQ ID NO: 1044205 - DNA, 15 bp, Homo sapiens
catatggactttgaa

SEQ ID NO: 1044206 - DNA, 15 bp, Homo sapiens
atatggactttgaag

SEQ ID NO: 1044207 - DNA, 15 bp, Homo sapiens
tatggactttgaagg

SEQ ID NO: 1044208 - DNA, 15 bp, Homo sapiens
atggactttgaaggc

SEQ ID NO: 1044209 - DNA, 15 bp, Homo sapiens
tggactttgaaggca

SEQ ID NO: 1044210 - DNA, 15 bp, Homo sapiens
ggactttgaaggcag

SEQ ID NO: 1044211 - DNA, 15 bp, Homo sapiens
gactttgaaggcagg

SEQ ID NO: 1044212 - DNA, 15 bp, Homo sapiens
actttgaaggcaggc

SEQ ID NO: 1044213 - DNA, 15 bp, Homo sapiens
ctttgaaggcaggca

SEQ ID NO: 1044214 - DNA, 15 bp, Homo sapiens
tttgaaggcaggcag

SEQ ID NO: 1044215 - DNA, 15 bp, Homo sapiens
ttgaaggcaggcagc

SEQ ID NO: 1044216 - DNA, 15 bp, Homo sapiens
tgaaggcaggcagcc

SEQ ID NO: 1044217 - DNA, 15 bp, Homo sapiens
gaaggcaggcagccc

SEQ ID NO: 1044218 - DNA, 15 bp, Homo sapiens
aaggcaggcagccca

SEQ ID NO: 1044219 - DNA, 15 bp, Homo sapiens
aggcaggcagcccag

SEQ ID NO: 1044220 - DNA, 15 bp, Homo sapiens
ggcaggcagcccagg

SEQ ID NO: 1044221 - DNA, 15 bp, Homo sapiens
gcaggcagcccaggt

SEQ ID NO: 1044222 - DNA, 15 bp, Homo sapiens
caggcagcccaggtt

SEQ ID NO: 1044223 - DNA, 15 bp, Homo sapiens
aggcagcccaggttc

SEQ ID NO: 1044224 - DNA, 15 bp, Homo sapiens
ggcagcccaggttca

SEQ ID NO: 1044225 - DNA, 15 bp, Homo sapiens
gcagcccaggttcaa

SEQ ID NO: 1044226 - DNA, 15 bp, Homo sapiens
cagcccaggttcaaa

SEQ ID NO: 1044227 - DNA, 15 bp, Homo sapiens
agcccaggttcaaat

SEQ ID NO: 1044228 - DNA, 15 bp, Homo sapiens
gcccaggttcaaatc

SEQ ID NO: 1044229 - DNA, 15 bp, Homo sapiens
cccaggttcaaatcc

SEQ ID NO: 1044230 - DNA, 15 bp, Homo sapiens
ccaggttcaaatcct

SEQ ID NO: 1044231 - DNA, 15 bp, Homo sapiens
caggttcaaatcctg

SEQ ID NO: 1044232 - DNA, 15 bp, Homo sapiens
aggttcaaatcctgg

SEQ ID NO: 1044233 - DNA, 15 bp, Homo sapiens
ggttcaaatcctggc

SEQ ID NO: 1044234 - DNA, 15 bp, Homo sapiens
gttcaaatcctggct

SEQ ID NO: 1044235 - DNA, 15 bp, Homo sapiens
ttcaaatcctggctt

SEQ ID NO: 1044236 - DNA, 15 bp, Homo sapiens
tcaaatcctggcttg

SEQ ID NO: 1044237 - DNA, 15 bp, Homo sapiens
caaatcctggcttgg

SEQ ID NO: 1044238 - DNA, 15 bp, Homo sapiens
aaatcctggcttggc

SEQ ID NO: 1044239 - DNA, 15 bp, Homo sapiens
aatcctggcttggcc

SEQ ID NO: 1044240 - DNA, 15 bp, Homo sapiens
atcctggcttggcca

SEQ ID NO: 1044241 - DNA, 15 bp, Homo sapiens
tcctggcttggccac

SEQ ID NO: 1044242 - DNA, 15 bp, Homo sapiens
cctggcttggccact

SEQ ID NO: 1044243 - DNA, 15 bp, Homo sapiens
ctggcttggccactt

SEQ ID NO: 1044244 - DNA, 15 bp, Homo sapiens
tggcttggccacttc

SEQ ID NO: 1044245 - DNA, 15 bp, Homo sapiens
ggcttggccacttcc

SEQ ID NO: 1044246 - DNA, 15 bp, Homo sapiens
gcttggccacttccc

SEQ ID NO: 1044247 - DNA, 15 bp, Homo sapiens
cttggccacttccca

SEQ ID NO: 1044248 - DNA, 15 bp, Homo sapiens
ttggccacttcccag

SEQ ID NO: 1044249 - DNA, 15 bp, Homo sapiens
tggccacttcccagt

SEQ ID NO: 1044250 - DNA, 15 bp, Homo sapiens
ggccacttcccagtt

SEQ ID NO: 1044251 - DNA, 15 bp, Homo sapiens
gccacttcccagttg

SEQ ID NO: 1044252 - DNA, 15 bp, Homo sapiens
ccacttcccagttgg

SEQ ID NO: 1044253 - DNA, 15 bp, Homo sapiens
cacttcccagttggg

SEQ ID NO: 1044254 - DNA, 15 bp, Homo sapiens
acttcccagttgggt

SEQ ID NO: 1044255 - DNA, 15 bp, Homo sapiens
cttcccagttgggtg

SEQ ID NO: 1044256 - DNA, 15 bp, Homo sapiens
ttcccagttgggtgc

SEQ ID NO: 1044257 - DNA, 15 bp, Homo sapiens
tcccagttgggtgcc

SEQ ID NO: 1044258 - DNA, 15 bp, Homo sapiens
cccagttgggtgcct

SEQ ID NO: 1044259 - DNA, 15 bp, Homo sapiens
ccagttgggtgcctt

SEQ ID NO: 1044260 - DNA, 15 bp, Homo sapiens
cagttgggtgccttc

SEQ ID NO: 1044261 - DNA, 15 bp, Homo sapiens
agttgggtgccttca

SEQ ID NO: 1044262 - DNA, 15 bp, Homo sapiens
gttgggtgccttcag

SEQ ID NO: 1044263 - DNA, 15 bp, Homo sapiens
ttgggtgccttcagg

SEQ ID NO: 1044264 - DNA, 15 bp, Homo sapiens
tgggtgccttcaggc

SEQ ID NO: 1044265 - DNA, 15 bp, Homo sapiens
gggtgccttcaggca

SEQ ID NO: 1044266 - DNA, 15 bp, Homo sapiens
ggtgccttcaggcaa

SEQ ID NO: 1044267 - DNA, 15 bp, Homo sapiens
gtgccttcaggcaag

SEQ ID NO: 1044268 - DNA, 15 bp, Homo sapiens
tgccttcaggcaagt

SEQ ID NO: 1044269 - DNA, 15 bp, Homo sapiens
gccttcaggcaagtg

SEQ ID NO: 1044270 - DNA, 15 bp, Homo sapiens
ccttcaggcaagtga

SEQ ID NO: 1044271 - DNA, 15 bp, Homo sapiens
cttcaggcaagtgac

SEQ ID NO: 1044272 - DNA, 15 bp, Homo sapiens
ttcaggcaagtgact

SEQ ID NO: 1044273 - DNA, 15 bp, Homo sapiens
tcaggcaagtgactt

SEQ ID NO: 1044274 - DNA, 15 bp, Homo sapiens
caggcaagtgactta

SEQ ID NO: 1044275 - DNA, 15 bp, Homo sapiens
aggcaagtgacttac

SEQ ID NO: 1044276 - DNA, 15 bp, Homo sapiens
ggcaagtgacttacc

SEQ ID NO: 1044277 - DNA, 15 bp, Homo sapiens
gcaagtgacttaccc

SEQ ID NO: 1044278 - DNA, 15 bp, Homo sapiens
caagtgacttaccct

SEQ ID NO: 1044279 - DNA, 15 bp, Homo sapiens
aagtgacttaccctc

SEQ ID NO: 1044280 - DNA, 15 bp, Homo sapiens
agtgacttaccctct

SEQ ID NO: 1044281 - DNA, 15 bp, Homo sapiens
gtgacttaccctctc

SEQ ID NO: 1044282 - DNA, 15 bp, Homo sapiens
tgacttaccctctct

SEQ ID NO: 1044283 - DNA, 15 bp, Homo sapiens
gacttaccctctctg

SEQ ID NO: 1044284 - DNA, 15 bp, Homo sapiens
acttaccctctctgt

SEQ ID NO: 1044285 - DNA, 15 bp, Homo sapiens
cttaccctctctgtg

SEQ ID NO: 1044286 - DNA, 15 bp, Homo sapiens
ttaccctctctgtgc

SEQ ID NO: 1044287 - DNA, 15 bp, Homo sapiens
taccctctctgtgcc

SEQ ID NO: 1044288 - DNA, 15 bp, Homo sapiens
accctctctgtgcct

SEQ ID NO: 1044289 - DNA, 15 bp, Homo sapiens
ccctctctgtgcctt

SEQ ID NO: 1044290 - DNA, 15 bp, Homo sapiens
cctctctgtgccttt

SEQ ID NO: 1044291 - DNA, 15 bp, Homo sapiens
ctctctgtgcctttt

SEQ ID NO: 1044292 - DNA, 15 bp, Homo sapiens
tctctgtgccttttt

SEQ ID NO: 1044293 - DNA, 15 bp, Homo sapiens
ctctgtgcctttttt

SEQ ID NO: 1044294 - DNA, 15 bp, Homo sapiens
tctgtgcctttttta

SEQ ID NO: 1044295 - DNA, 15 bp, Homo sapiens
ctgtgccttttttac

SEQ ID NO: 1044296 - DNA, 15 bp, Homo sapiens
tgtgccttttttact

SEQ ID NO: 1044297 - DNA, 15 bp, Homo sapiens
gtgccttttttactt

SEQ ID NO: 1044298 - DNA, 15 bp, Homo sapiens
tgccttttttacttt

SEQ ID NO: 1044299 - DNA, 15 bp, Homo sapiens
gccttttttactttt

SEQ ID NO: 1044300 - DNA, 15 bp, Homo sapiens
ccttttttacttttc

SEQ ID NO: 1044301 - DNA, 15 bp, Homo sapiens
cttttttacttttct

SEQ ID NO: 1044302 - DNA, 15 bp, Homo sapiens
ttttttacttttctg

SEQ ID NO: 1044303 - DNA, 15 bp, Homo sapiens
tttttacttttctgt

SEQ ID NO: 1044304 - DNA, 15 bp, Homo sapiens
ttttacttttctgta

SEQ ID NO: 1044305 - DNA, 15 bp, Homo sapiens
tttacttttctgtaa

SEQ ID NO: 1044306 - DNA, 15 bp, Homo sapiens
ttacttttctgtaaa

SEQ ID NO: 1044307 - DNA, 15 bp, Homo sapiens
tacttttctgtaaaa

SEQ ID NO: 1044308 - DNA, 15 bp, Homo sapiens
acttttctgtaaaat

SEQ ID NO: 1044309 - DNA, 15 bp, Homo sapiens
cttttctgtaaaatg

SEQ ID NO: 1044310 - DNA, 15 bp, Homo sapiens
ttttctgtaaaatga

SEQ ID NO: 1044311 - DNA, 15 bp, Homo sapiens
tttctgtaaaatgaa

SEQ ID NO: 1044312 - DNA, 15 bp, Homo sapiens
ttctgtaaaatgaag

SEQ ID NO: 1044313 - DNA, 15 bp, Homo sapiens
tctgtaaaatgaagt

SEQ ID NO: 1044314 - DNA, 15 bp, Homo sapiens
ctgtaaaatgaagtt

SEQ ID NO: 1044315 - DNA, 15 bp, Homo sapiens
tgtaaaatgaagtta

SEQ ID NO: 1044316 - DNA, 15 bp, Homo sapiens
gtaaaatgaagttaa

SEQ ID NO: 1044317 - DNA, 15 bp, Homo sapiens
taaaatgaagttaat

SEQ ID NO: 1044318 - DNA, 15 bp, Homo sapiens
aaaatgaagttaata

SEQ ID NO: 1044319 - DNA, 15 bp, Homo sapiens
aaatgaagttaataa

SEQ ID NO: 1044320 - DNA, 15 bp, Homo sapiens
aatgaagttaataaa

SEQ ID NO: 1044321 - DNA, 15 bp, Homo sapiens
atgaagttaataaaa

SEQ ID NO: 1044322 - DNA, 15 bp, Homo sapiens
tgaagttaataaaag

SEQ ID NO: 1044323 - DNA, 15 bp, Homo sapiens
gaagttaataaaagt

SEQ ID NO: 1044324 - DNA, 15 bp, Homo sapiens
aagttaataaaagtg

SEQ ID NO: 1044325 - DNA, 15 bp, Homo sapiens
agttaataaaagtgt

SEQ ID NO: 1044326 - DNA, 15 bp, Homo sapiens
gttaataaaagtgtc

SEQ ID NO: 1044327 - DNA, 15 bp, Homo sapiens
ttaataaaagtgtct

SEQ ID NO: 1044328 - DNA, 15 bp, Homo sapiens
taataaaagtgtctc

SEQ ID NO: 1044329 - DNA, 15 bp, Homo sapiens
aataaaagtgtctcc

SEQ ID NO: 1044330 - DNA, 15 bp, Homo sapiens
ataaaagtgtctcct

SEQ ID NO: 1044331 - DNA, 15 bp, Homo sapiens
taaaagtgtctccta

SEQ ID NO: 1044332 - DNA, 15 bp, Homo sapiens
aaaagtgtctcctac

SEQ ID NO: 1044333 - DNA, 15 bp, Homo sapiens
aaagtgtctcctaca

SEQ ID NO: 1044334 - DNA, 15 bp, Homo sapiens
aagtgtctcctacat

SEQ ID NO: 1044335 - DNA, 15 bp, Homo sapiens
agtgtctcctacata

SEQ ID NO: 1044336 - DNA, 15 bp, Homo sapiens
gtgtctcctacatag

SEQ ID NO: 1044337 - DNA, 15 bp, Homo sapiens
tgtctcctacatagg

SEQ ID NO: 1044338 - DNA, 15 bp, Homo sapiens
gtctcctacataggg

SEQ ID NO: 1044339 - DNA, 15 bp, Homo sapiens
tctcctacatagggc

SEQ ID NO: 1044340 - DNA, 15 bp, Homo sapiens
ctcctacatagggct

SEQ ID NO: 1044341 - DNA, 15 bp, Homo sapiens
tcctacatagggctt

SEQ ID NO: 1044342 - DNA, 15 bp, Homo sapiens
cctacatagggcttt

SEQ ID NO: 1044343 - DNA, 15 bp, Homo sapiens
ctacatagggctttt

SEQ ID NO: 1044344 - DNA, 15 bp, Homo sapiens
tacatagggctttta

SEQ ID NO: 1044345 - DNA, 15 bp, Homo sapiens
acatagggcttttaa

SEQ ID NO: 1044346 - DNA, 15 bp, Homo sapiens
catagggcttttaag

SEQ ID NO: 1044347 - DNA, 15 bp, Homo sapiens
atagggcttttaagg

SEQ ID NO: 1044348 - DNA, 15 bp, Homo sapiens
tagggcttttaaggt

SEQ ID NO: 1044349 - DNA, 15 bp, Homo sapiens
agggcttttaaggtg

SEQ ID NO: 1044350 - DNA, 15 bp, Homo sapiens
gggcttttaaggtgg

SEQ ID NO: 1044351 - DNA, 15 bp, Homo sapiens
ggcttttaaggtggc

SEQ ID NO: 1044352 - DNA, 15 bp, Homo sapiens
gcttttaaggtggca

SEQ ID NO: 1044353 - DNA, 15 bp, Homo sapiens
cttttaaggtggcag

SEQ ID NO: 1044354 - DNA, 15 bp, Homo sapiens
ttttaaggtggcaga

SEQ ID NO: 1044355 - DNA, 15 bp, Homo sapiens
tttaaggtggcagaa

SEQ ID NO: 1044356 - DNA, 15 bp, Homo sapiens
ttaaggtggcagaat

SEQ ID NO: 1044357 - DNA, 15 bp, Homo sapiens
taaggtggcagaatt

SEQ ID NO: 1044358 - DNA, 15 bp, Homo sapiens
aaggtggcagaattg

SEQ ID NO: 1044359 - DNA, 15 bp, Homo sapiens
aggtggcagaattgg

SEQ ID NO: 1044360 - DNA, 15 bp, Homo sapiens
ggtggcagaattggc

SEQ ID NO: 1044361 - DNA, 15 bp, Homo sapiens
gtggcagaattggca

SEQ ID NO: 1044362 - DNA, 15 bp, Homo sapiens
tggcagaattggcac

SEQ ID NO: 1044363 - DNA, 15 bp, Homo sapiens
ggcagaattggcaca

SEQ ID NO: 1044364 - DNA, 15 bp, Homo sapiens
gcagaattggcacat

SEQ ID NO: 1044365 - DNA, 15 bp, Homo sapiens
cagaattggcacatg

SEQ ID NO: 1044366 - DNA, 15 bp, Homo sapiens
agaattggcacatgt

SEQ ID NO: 1044367 - DNA, 15 bp, Homo sapiens
gaattggcacatgtc

SEQ ID NO: 1044368 - DNA, 15 bp, Homo sapiens
aattggcacatgtca

SEQ ID NO: 1044369 - DNA, 15 bp, Homo sapiens
attggcacatgtcac

SEQ ID NO: 1044370 - DNA, 15 bp, Homo sapiens
ttggcacatgtcaca

SEQ ID NO: 1044371 - DNA, 15 bp, Homo sapiens
tggcacatgtcacac

SEQ ID NO: 1044372 - DNA, 15 bp, Homo sapiens
ggcacatgtcacact

SEQ ID NO: 1044373 - DNA, 15 bp, Homo sapiens
gcacatgtcacactt

SEQ ID NO: 1044374 - DNA, 15 bp, Homo sapiens
cacatgtcacacttc

SEQ ID NO: 1044375 - DNA, 15 bp, Homo sapiens
acatgtcacacttca

SEQ ID NO: 1044376 - DNA, 15 bp, Homo sapiens
catgtcacacttcaa

SEQ ID NO: 1044377 - DNA, 15 bp, Homo sapiens
atgtcacacttcaaa

SEQ ID NO: 1044378 - DNA, 15 bp, Homo sapiens
tgtcacacttcaaat

SEQ ID NO: 1044379 - DNA, 15 bp, Homo sapiens
gtcacacttcaaata

SEQ ID NO: 1044380 - DNA, 15 bp, Homo sapiens
tcacacttcaaatag

SEQ ID NO: 1044381 - DNA, 15 bp, Homo sapiens
cacacttcaaatagc

SEQ ID NO: 1044382 - DNA, 15 bp, Homo sapiens
acacttcaaatagca

SEQ ID NO: 1044383 - DNA, 15 bp, Homo sapiens
cacttcaaatagcag

SEQ ID NO: 1044384 - DNA, 15 bp, Homo sapiens
acttcaaatagcagc

SEQ ID NO: 1044385 - DNA, 15 bp, Homo sapiens
cttcaaatagcagct

SEQ ID NO: 1044386 - DNA, 15 bp, Homo sapiens
ttcaaatagcagctc

SEQ ID NO: 1044387 - DNA, 15 bp, Homo sapiens
tcaaatagcagctcg

SEQ ID NO: 1044388 - DNA, 15 bp, Homo sapiens
caaatagcagctcgg

SEQ ID NO: 1044389 - DNA, 15 bp, Homo sapiens
aaatagcagctcggc

SEQ ID NO: 1044390 - DNA, 15 bp, Homo sapiens
aatagcagctcggca

SEQ ID NO: 1044391 - DNA, 15 bp, Homo sapiens
atagcagctcggcaa

SEQ ID NO: 1044392 - DNA, 15 bp, Homo sapiens
tagcagctcggcaag

SEQ ID NO: 1044393 - DNA, 15 bp, Homo sapiens
agcagctcggcaagt

SEQ ID NO: 1044394 - DNA, 15 bp, Homo sapiens
gcagctcggcaagtg

SEQ ID NO: 1044395 - DNA, 15 bp, Homo sapiens
cagctcggcaagtgt

SEQ ID NO: 1044396 - DNA, 15 bp, Homo sapiens
agctcggcaagtgtc

SEQ ID NO: 1044397 - DNA, 15 bp, Homo sapiens
gctcggcaagtgtca

SEQ ID NO: 1044398 - DNA, 15 bp, Homo sapiens
ctcggcaagtgtcaa

SEQ ID NO: 1044399 - DNA, 15 bp, Homo sapiens
tcggcaagtgtcaag

SEQ ID NO: 1044400 - DNA, 15 bp, Homo sapiens
cggcaagtgtcaagt

SEQ ID NO: 1044401 - DNA, 15 bp, Homo sapiens
ggcaagtgtcaagta

SEQ ID NO: 1044402 - DNA, 15 bp, Homo sapiens
gcaagtgtcaagtaa

SEQ ID NO: 1044403 - DNA, 15 bp, Homo sapiens
caagtgtcaagtaag

SEQ ID NO: 1044404 - DNA, 15 bp, Homo sapiens
aagtgtcaagtaagg

SEQ ID NO: 1044405 - DNA, 15 bp, Homo sapiens
agtgtcaagtaaggg

SEQ ID NO: 1044406 - DNA, 15 bp, Homo sapiens
gtgtcaagtaagggc

SEQ ID NO: 1044407 - DNA, 15 bp, Homo sapiens
tgtcaagtaagggct

SEQ ID NO: 1044408 - DNA, 15 bp, Homo sapiens
gtcaagtaagggctg

SEQ ID NO: 1044409 - DNA, 15 bp, Homo sapiens
tcaagtaagggctgg

SEQ ID NO: 1044410 - DNA, 15 bp, Homo sapiens
caagtaagggctggc

SEQ ID NO: 1044411 - DNA, 15 bp, Homo sapiens
aagtaagggctggct

SEQ ID NO: 1044412 - DNA, 15 bp, Homo sapiens
agtaagggctggctg

SEQ ID NO: 1044413 - DNA, 15 bp, Homo sapiens
gtaagggctggctgt

SEQ ID NO: 1044414 - DNA, 15 bp, Homo sapiens
taagggctggctgtt

SEQ ID NO: 1044415 - DNA, 15 bp, Homo sapiens
aagggctggctgttt

SEQ ID NO: 1044416 - DNA, 15 bp, Homo sapiens
agggctggctgtttc

SEQ ID NO: 1044417 - DNA, 15 bp, Homo sapiens
gggctggctgtttcc

SEQ ID NO: 1044418 - DNA, 15 bp, Homo sapiens
ggctggctgtttcca

SEQ ID NO: 1044419 - DNA, 15 bp, Homo sapiens
gctggctgtttccaa

SEQ ID NO: 1044420 - DNA, 15 bp, Homo sapiens
ctggctgtttccaac

SEQ ID NO: 1044421 - DNA, 15 bp, Homo sapiens
tggctgtttccaaca

SEQ ID NO: 1044422 - DNA, 15 bp, Homo sapiens
ggctgtttccaacat

SEQ ID NO: 1044423 - DNA, 15 bp, Homo sapiens
gctgtttccaacatc

SEQ ID NO: 1044424 - DNA, 15 bp, Homo sapiens
ctgtttccaacatct

SEQ ID NO: 1044425 - DNA, 15 bp, Homo sapiens
tgtttccaacatctt

SEQ ID NO: 1044426 - DNA, 15 bp, Homo sapiens
gtttccaacatctta

SEQ ID NO: 1044427 - DNA, 15 bp, Homo sapiens
tttccaacatcttaa

SEQ ID NO: 1044428 - DNA, 15 bp, Homo sapiens
ttccaacatcttaac

SEQ ID NO: 1044429 - DNA, 15 bp, Homo sapiens
tccaacatcttaacc

SEQ ID NO: 1044430 - DNA, 15 bp, Homo sapiens
ccaacatcttaaccg

SEQ ID NO: 1044431 - DNA, 15 bp, Homo sapiens
caacatcttaaccgg

SEQ ID NO: 1044432 - DNA, 15 bp, Homo sapiens
aacatcttaaccgga

SEQ ID NO: 1044433 - DNA, 15 bp, Homo sapiens
acatcttaaccggat

SEQ ID NO: 1044434 - DNA, 15 bp, Homo sapiens
catcttaaccggata

SEQ ID NO: 1044435 - DNA, 15 bp, Homo sapiens
atcttaaccggatag

SEQ ID NO: 1044436 - DNA, 15 bp, Homo sapiens
tcttaaccggataga

SEQ ID NO: 1044437 - DNA, 15 bp, Homo sapiens
cttaaccggatagac

SEQ ID NO: 1044438 - DNA, 15 bp, Homo sapiens
ttaaccggatagaca

SEQ ID NO: 1044439 - DNA, 15 bp, Homo sapiens
taaccggatagacac

SEQ ID NO: 1044440 - DNA, 15 bp, Homo sapiens
aaccggatagacaca

SEQ ID NO: 1044441 - DNA, 15 bp, Homo sapiens
accggatagacacag

SEQ ID NO: 1044442 - DNA, 15 bp, Homo sapiens
ccggatagacacaga

SEQ ID NO: 1044443 - DNA, 15 bp, Homo sapiens
cggatagacacagac

SEQ ID NO: 1044444 - DNA, 15 bp, Homo sapiens
ggatagacacagaca

SEQ ID NO: 1044445 - DNA, 15 bp, Homo sapiens
gatagacacagacat

SEQ ID NO: 1044446 - DNA, 15 bp, Homo sapiens
atagacacagacata

SEQ ID NO: 1044447 - DNA, 15 bp, Homo sapiens
tagacacagacatag

SEQ ID NO: 1044448 - DNA, 15 bp, Homo sapiens
agacacagacataga

SEQ ID NO: 1044449 - DNA, 15 bp, Homo sapiens
gacacagacatagag

SEQ ID NO: 1044450 - DNA, 15 bp, Homo sapiens
acacagacatagaga

SEQ ID NO: 1044451 - DNA, 15 bp, Homo sapiens
cacagacatagagag

SEQ ID NO: 1044452 - DNA, 15 bp, Homo sapiens
acagacatagagagg

SEQ ID NO: 1044453 - DNA, 15 bp, Homo sapiens
cagacatagagaggg

SEQ ID NO: 1044454 - DNA, 15 bp, Homo sapiens
agacatagagaggga

SEQ ID NO: 1044455 - DNA, 15 bp, Homo sapiens
gacatagagagggat

SEQ ID NO: 1044456 - DNA, 15 bp, Homo sapiens
acatagagagggatc

SEQ ID NO: 1044457 - DNA, 15 bp, Homo sapiens
catagagagggatcc

SEQ ID NO: 1044458 - DNA, 15 bp, Homo sapiens
atagagagggatcca

SEQ ID NO: 1044459 - DNA, 15 bp, Homo sapiens
tagagagggatccat

SEQ ID NO: 1044460 - DNA, 15 bp, Homo sapiens
agagagggatccatc

SEQ ID NO: 1044461 - DNA, 15 bp, Homo sapiens
gagagggatccatct

SEQ ID NO: 1044462 - DNA, 15 bp, Homo sapiens
agagggatccatctg

SEQ ID NO: 1044463 - DNA, 15 bp, Homo sapiens
gagggatccatctgt

SEQ ID NO: 1044464 - DNA, 15 bp, Homo sapiens
agggatccatctgtc

SEQ ID NO: 1044465 - DNA, 15 bp, Homo sapiens
gggatccatctgtca

SEQ ID NO: 1044466 - DNA, 15 bp, Homo sapiens
ggatccatctgtcag

SEQ ID NO: 1044467 - DNA, 15 bp, Homo sapiens
gatccatctgtcagc

SEQ ID NO: 1044468 - DNA, 15 bp, Homo sapiens
atccatctgtcagca

SEQ ID NO: 1044469 - DNA, 15 bp, Homo sapiens
tccatctgtcagcag

SEQ ID NO: 1044470 - DNA, 15 bp, Homo sapiens
ccatctgtcagcagt

SEQ ID NO: 1044471 - DNA, 15 bp, Homo sapiens
catctgtcagcagtt

SEQ ID NO: 1044472 - DNA, 15 bp, Homo sapiens
atctgtcagcagttt

SEQ ID NO: 1044473 - DNA, 15 bp, Homo sapiens
tctgtcagcagtttg

SEQ ID NO: 1044474 - DNA, 15 bp, Homo sapiens
ctgtcagcagtttgc

SEQ ID NO: 1044475 - DNA, 15 bp, Homo sapiens
tgtcagcagtttgct

SEQ ID NO: 1044476 - DNA, 15 bp, Homo sapiens
gtcagcagtttgctg

SEQ ID NO: 1044477 - DNA, 15 bp, Homo sapiens
tcagcagtttgctga

SEQ ID NO: 1044478 - DNA, 15 bp, Homo sapiens
cagcagtttgctgaa

SEQ ID NO: 1044479 - DNA, 15 bp, Homo sapiens
agcagtttgctgaaa

SEQ ID NO: 1044480 - DNA, 15 bp, Homo sapiens
gcagtttgctgaaat

SEQ ID NO: 1044481 - DNA, 15 bp, Homo sapiens
cagtttgctgaaatg

SEQ ID NO: 1044482 - DNA, 15 bp, Homo sapiens
agtttgctgaaatgg

SEQ ID NO: 1044483 - DNA, 15 bp, Homo sapiens
gtttgctgaaatggg

SEQ ID NO: 1044484 - DNA, 15 bp, Homo sapiens
tttgctgaaatggga

SEQ ID NO: 1044485 - DNA, 15 bp, Homo sapiens
ttgctgaaatgggac

SEQ ID NO: 1044486 - DNA, 15 bp, Homo sapiens
tgctgaaatgggacc

SEQ ID NO: 1044487 - DNA, 15 bp, Homo sapiens
gctgaaatgggacca

SEQ ID NO: 1044488 - DNA, 15 bp, Homo sapiens
ctgaaatgggaccat

SEQ ID NO: 1044489 - DNA, 15 bp, Homo sapiens
tgaaatgggaccata

SEQ ID NO: 1044490 - DNA, 15 bp, Homo sapiens
gaaatgggaccatac

SEQ ID NO: 1044491 - DNA, 15 bp, Homo sapiens
aaatgggaccatact

SEQ ID NO: 1044492 - DNA, 15 bp, Homo sapiens
aatgggaccatacta

SEQ ID NO: 1044493 - DNA, 15 bp, Homo sapiens
atgggaccatactat

SEQ ID NO: 1044494 - DNA, 15 bp, Homo sapiens
tgggaccatactatg

SEQ ID NO: 1044495 - DNA, 15 bp, Homo sapiens
gggaccatactatgc

SEQ ID NO: 1044496 - DNA, 15 bp, Homo sapiens
ggaccatactatgca

SEQ ID NO: 1044497 - DNA, 15 bp, Homo sapiens
gaccatactatgcac

SEQ ID NO: 1044498 - DNA, 15 bp, Homo sapiens
accatactatgcacg

SEQ ID NO: 1044499 - DNA, 15 bp, Homo sapiens
ccatactatgcacgc

SEQ ID NO: 1044500 - DNA, 15 bp, Homo sapiens
catactatgcacgct

SEQ ID NO: 1044501 - DNA, 15 bp, Homo sapiens
atactatgcacgctt

SEQ ID NO: 1044502 - DNA, 15 bp, Homo sapiens
tactatgcacgcttt

SEQ ID NO: 1044503 - DNA, 15 bp, Homo sapiens
actatgcacgctttg

SEQ ID NO: 1044504 - DNA, 15 bp, Homo sapiens
ctatgcacgctttgc

SEQ ID NO: 1044505 - DNA, 15 bp, Homo sapiens
tatgcacgctttgct

SEQ ID NO: 1044506 - DNA, 15 bp, Homo sapiens
atgcacgctttgctg

SEQ ID NO: 1044507 - DNA, 15 bp, Homo sapiens
tgcacgctttgctgc

SEQ ID NO: 1044508 - DNA, 15 bp, Homo sapiens
gcacgctttgctgca

SEQ ID NO: 1044509 - DNA, 15 bp, Homo sapiens
cacgctttgctgcac

SEQ ID NO: 1044510 - DNA, 15 bp, Homo sapiens
acgctttgctgcacc

SEQ ID NO: 1044511 - DNA, 15 bp, Homo sapiens
cgctttgctgcaccg

SEQ ID NO: 1044512 - DNA, 15 bp, Homo sapiens
gctttgctgcaccgt

SEQ ID NO: 1044513 - DNA, 15 bp, Homo sapiens
ctttgctgcaccgtg

SEQ ID NO: 1044514 - DNA, 15 bp, Homo sapiens
tttgctgcaccgtgg

SEQ ID NO: 1044515 - DNA, 15 bp, Homo sapiens
ttgctgcaccgtggg

SEQ ID NO: 1044516 - DNA, 15 bp, Homo sapiens
tgctgcaccgtgggt

SEQ ID NO: 1044517 - DNA, 15 bp, Homo sapiens
gctgcaccgtgggtt

SEQ ID NO: 1044518 - DNA, 15 bp, Homo sapiens
ctgcaccgtgggttt

SEQ ID NO: 1044519 - DNA, 15 bp, Homo sapiens
tgcaccgtgggtttc

SEQ ID NO: 1044520 - DNA, 15 bp, Homo sapiens
gcaccgtgggtttct

SEQ ID NO: 1044521 - DNA, 15 bp, Homo sapiens
caccgtgggtttctc

SEQ ID NO: 1044522 - DNA, 15 bp, Homo sapiens
accgtgggtttctca

SEQ ID NO: 1044523 - DNA, 15 bp, Homo sapiens
ccgtgggtttctcac

SEQ ID NO: 1044524 - DNA, 15 bp, Homo sapiens
cgtgggtttctcacg

SEQ ID NO: 1044525 - DNA, 15 bp, Homo sapiens
gtgggtttctcacgc

SEQ ID NO: 1044526 - DNA, 15 bp, Homo sapiens
tgggtttctcacgct

SEQ ID NO: 1044527 - DNA, 15 bp, Homo sapiens
gggtttctcacgctg

SEQ ID NO: 1044528 - DNA, 15 bp, Homo sapiens
ggtttctcacgctgt

SEQ ID NO: 1044529 - DNA, 15 bp, Homo sapiens
gtttctcacgctgtc

SEQ ID NO: 1044530 - DNA, 15 bp, Homo sapiens
tttctcacgctgtca

SEQ ID NO: 1044531 - DNA, 15 bp, Homo sapiens
ttctcacgctgtcat

SEQ ID NO: 1044532 - DNA, 15 bp, Homo sapiens
tctcacgctgtcatc

SEQ ID NO: 1044533 - DNA, 15 bp, Homo sapiens
ctcacgctgtcatcg

SEQ ID NO: 1044534 - DNA, 15 bp, Homo sapiens
tcacgctgtcatcgc

SEQ ID NO: 1044535 - DNA, 15 bp, Homo sapiens
cacgctgtcatcgct

SEQ ID NO: 1044536 - DNA, 15 bp, Homo sapiens
acgctgtcatcgctt

SEQ ID NO: 1044537 - DNA, 15 bp, Homo sapiens
cgctgtcatcgcttg

SEQ ID NO: 1044538 - DNA, 15 bp, Homo sapiens
gctgtcatcgcttgt

SEQ ID NO: 1044539 - DNA, 15 bp, Homo sapiens
ctgtcatcgcttgtc

SEQ ID NO: 1044540 - DNA, 15 bp, Homo sapiens
tgtcatcgcttgtcc

SEQ ID NO: 1044541 - DNA, 15 bp, Homo sapiens
gtcatcgcttgtcca

SEQ ID NO: 1044542 - DNA, 15 bp, Homo sapiens
tcatcgcttgtccat

SEQ ID NO: 1044543 - DNA, 15 bp, Homo sapiens
catcgcttgtccatg

SEQ ID NO: 1044544 - DNA, 15 bp, Homo sapiens
atcgcttgtccatgt

SEQ ID NO: 1044545 - DNA, 15 bp, Homo sapiens
tcgcttgtccatgtc

SEQ ID NO: 1044546 - DNA, 15 bp, Homo sapiens
cgcttgtccatgtcg

SEQ ID NO: 1044547 - DNA, 15 bp, Homo sapiens
gcttgtccatgtcgt

SEQ ID NO: 1044548 - DNA, 15 bp, Homo sapiens
cttgtccatgtcgtc

SEQ ID NO: 1044549 - DNA, 15 bp, Homo sapiens
ttgtccatgtcgtcc

SEQ ID NO: 1044550 - DNA, 15 bp, Homo sapiens
tgtccatgtcgtcct

SEQ ID NO: 1044551 - DNA, 15 bp, Homo sapiens
gtccatgtcgtcctc

SEQ ID NO: 1044552 - DNA, 15 bp, Homo sapiens
tccatgtcgtcctca

SEQ ID NO: 1044553 - DNA, 15 bp, Homo sapiens
ccatgtcgtcctcag

SEQ ID NO: 1044554 - DNA, 15 bp, Homo sapiens
catgtcgtcctcagt

SEQ ID NO: 1044555 - DNA, 15 bp, Homo sapiens
atgtcgtcctcagtc

SEQ ID NO: 1044556 - DNA, 15 bp, Homo sapiens
tgtcgtcctcagtca

SEQ ID NO: 1044557 - DNA, 15 bp, Homo sapiens
gtcgtcctcagtcag

SEQ ID NO: 1044558 - DNA, 15 bp, Homo sapiens
tcgtcctcagtcagc

SEQ ID NO: 1044559 - DNA, 15 bp, Homo sapiens
cgtcctcagtcagct

SEQ ID NO: 1044560 - DNA, 15 bp, Homo sapiens
gtcctcagtcagctg

SEQ ID NO: 1044561 - DNA, 15 bp, Homo sapiens
tcctcagtcagctgg

SEQ ID NO: 1044562 - DNA, 15 bp, Homo sapiens
cctcagtcagctggg

SEQ ID NO: 1044563 - DNA, 15 bp, Homo sapiens
ctcagtcagctggga

SEQ ID NO: 1044564 - DNA, 15 bp, Homo sapiens
tcagtcagctgggat

SEQ ID NO: 1044565 - DNA, 15 bp, Homo sapiens
cagtcagctgggatt

SEQ ID NO: 1044566 - DNA, 15 bp, Homo sapiens
agtcagctgggattt

SEQ ID NO: 1044567 - DNA, 15 bp, Homo sapiens
gtcagctgggatttt

SEQ ID NO: 1044568 - DNA, 15 bp, Homo sapiens
tcagctgggattttc

SEQ ID NO: 1044569 - DNA, 15 bp, Homo sapiens
cagctgggattttct

SEQ ID NO: 1044570 - DNA, 15 bp, Homo sapiens
agctgggattttctg

SEQ ID NO: 1044571 - DNA, 15 bp, Homo sapiens
gctgggattttctgg

SEQ ID NO: 1044572 - DNA, 15 bp, Homo sapiens
ctgggattttctggt

SEQ ID NO: 1044573 - DNA, 15 bp, Homo sapiens
tgggattttctggtg

SEQ ID NO: 1044574 - DNA, 15 bp, Homo sapiens
gggattttctggtga

SEQ ID NO: 1044575 - DNA, 15 bp, Homo sapiens
ggattttctggtgat

SEQ ID NO: 1044576 - DNA, 15 bp, Homo sapiens
gattttctggtgatg

SEQ ID NO: 1044577 - DNA, 15 bp, Homo sapiens
attttctggtgatga

SEQ ID NO: 1044578 - DNA, 15 bp, Homo sapiens
ttttctggtgatgat

SEQ ID NO: 1044579 - DNA, 15 bp, Homo sapiens
tttctggtgatgatc

SEQ ID NO: 1044580 - DNA, 15 bp, Homo sapiens
ttctggtgatgatca

SEQ ID NO: 1044581 - DNA, 15 bp, Homo sapiens
tctggtgatgatcac

SEQ ID NO: 1044582 - DNA, 15 bp, Homo sapiens
ctggtgatgatcacg

SEQ ID NO: 1044583 - DNA, 15 bp, Homo sapiens
tggtgatgatcacgc

SEQ ID NO: 1044584 - DNA, 15 bp, Homo sapiens
ggtgatgatcacgct

SEQ ID NO: 1044585 - DNA, 15 bp, Homo sapiens
gtgatgatcacgctc

SEQ ID NO: 1044586 - DNA, 15 bp, Homo sapiens
tgatgatcacgctct

SEQ ID NO: 1044587 - DNA, 15 bp, Homo sapiens
gatgatcacgctctg

SEQ ID NO: 1044588 - DNA, 15 bp, Homo sapiens
atgatcacgctctga

SEQ ID NO: 1044589 - DNA, 15 bp, Homo sapiens
tgatcacgctctgat

SEQ ID NO: 1044590 - DNA, 15 bp, Homo sapiens
gatcacgctctgatt

SEQ ID NO: 1044591 - DNA, 15 bp, Homo sapiens
atcacgctctgattc

SEQ ID NO: 1044592 - DNA, 15 bp, Homo sapiens
tcacgctctgattct

SEQ ID NO: 1044593 - DNA, 15 bp, Homo sapiens
cacgctctgattctc

SEQ ID NO: 1044594 - DNA, 15 bp, Homo sapiens
acgctctgattctct

SEQ ID NO: 1044595 - DNA, 15 bp, Homo sapiens
cgctctgattctcta

SEQ ID NO: 1044596 - DNA, 15 bp, Homo sapiens
gctctgattctctag

SEQ ID NO: 1044597 - DNA, 15 bp, Homo sapiens
ctctgattctctaga

SEQ ID NO: 1044598 - DNA, 15 bp, Homo sapiens
tctgattctctagat

SEQ ID NO: 1044599 - DNA, 15 bp, Homo sapiens
ctgattctctagatg

SEQ ID NO: 1044600 - DNA, 15 bp, Homo sapiens
tgattctctagatgc

SEQ ID NO: 1044601 - DNA, 15 bp, Homo sapiens
gattctctagatgcc

SEQ ID NO: 1044602 - DNA, 15 bp, Homo sapiens
attctctagatgcct

SEQ ID NO: 1044603 - DNA, 15 bp, Homo sapiens
ttctctagatgcctg

SEQ ID NO: 1044604 - DNA, 15 bp, Homo sapiens
tctctagatgcctgg

SEQ ID NO: 1044605 - DNA, 15 bp, Homo sapiens
ctctagatgcctgga

SEQ ID NO: 1044606 - DNA, 15 bp, Homo sapiens
tctagatgcctggaa

SEQ ID NO: 1044607 - DNA, 15 bp, Homo sapiens
ctagatgcctggaaa

SEQ ID NO: 1044608 - DNA, 15 bp, Homo sapiens
tagatgcctggaaac

SEQ ID NO: 1044609 - DNA, 15 bp, Homo sapiens
agatgcctggaaacg

SEQ ID NO: 1044610 - DNA, 15 bp, Homo sapiens
gatgcctggaaacgc

SEQ ID NO: 1044611 - DNA, 15 bp, Homo sapiens
atgcctggaaacgct

SEQ ID NO: 1044612 - DNA, 15 bp, Homo sapiens
tgcctggaaacgctc

SEQ ID NO: 1044613 - DNA, 15 bp, Homo sapiens
gcctggaaacgctcc

SEQ ID NO: 1044614 - DNA, 15 bp, Homo sapiens
cctggaaacgctcca

SEQ ID NO: 1044615 - DNA, 15 bp, Homo sapiens
ctggaaacgctccac

SEQ ID NO: 1044616 - DNA, 15 bp, Homo sapiens
tggaaacgctccacg

SEQ ID NO: 1044617 - DNA, 15 bp, Homo sapiens
ggaaacgctccacgg

SEQ ID NO: 1044618 - DNA, 15 bp, Homo sapiens
gaaacgctccacggt

SEQ ID NO: 1044619 - DNA, 15 bp, Homo sapiens
aaacgctccacggtg

SEQ ID NO: 1044620 - DNA, 15 bp, Homo sapiens
aacgctccacggtgc

SEQ ID NO: 1044621 - DNA, 15 bp, Homo sapiens
acgctccacggtgcg

SEQ ID NO: 1044622 - DNA, 15 bp, Homo sapiens
cgctccacggtgcgg

SEQ ID NO: 1044623 - DNA, 15 bp, Homo sapiens
gctccacggtgcgga

SEQ ID NO: 1044624 - DNA, 15 bp, Homo sapiens
ctccacggtgcggat

SEQ ID NO: 1044625 - DNA, 15 bp, Homo sapiens
tccacggtgcggatg

SEQ ID NO: 1044626 - DNA, 15 bp, Homo sapiens
ccacggtgcggatgt

SEQ ID NO: 1044627 - DNA, 15 bp, Homo sapiens
cacggtgcggatgta

SEQ ID NO: 1044628 - DNA, 15 bp, Homo sapiens
acggtgcggatgtac

SEQ ID NO: 1044629 - DNA, 15 bp, Homo sapiens
cggtgcggatgtacc

SEQ ID NO: 1044630 - DNA, 15 bp, Homo sapiens
ggtgcggatgtacca

SEQ ID NO: 1044631 - DNA, 15 bp, Homo sapiens
gtgcggatgtaccac

SEQ ID NO: 1044632 - DNA, 15 bp, Homo sapiens
tgcggatgtaccacg

SEQ ID NO: 1044633 - DNA, 15 bp, Homo sapiens
gcggatgtaccacgg

SEQ ID NO: 1044634 - DNA, 15 bp, Homo sapiens
cggatgtaccacggc

SEQ ID NO: 1044635 - DNA, 15 bp, Homo sapiens
ggatgtaccacggct

SEQ ID NO: 1044636 - DNA, 15 bp, Homo sapiens
gatgtaccacggctc

SEQ ID NO: 1044637 - DNA, 15 bp, Homo sapiens
atgtaccacggctcg

SEQ ID NO: 1044638 - DNA, 15 bp, Homo sapiens
tgtaccacggctcgt

SEQ ID NO: 1044639 - DNA, 15 bp, Homo sapiens
gtaccacggctcgtt

SEQ ID NO: 1044640 - DNA, 15 bp, Homo sapiens
taccacggctcgttc

SEQ ID NO: 1044641 - DNA, 15 bp, Homo sapiens
accacggctcgttct

SEQ ID NO: 1044642 - DNA, 15 bp, Homo sapiens
ccacggctcgttctg

SEQ ID NO: 1044643 - DNA, 15 bp, Homo sapiens
cacggctcgttctgc

SEQ ID NO: 1044644 - DNA, 15 bp, Homo sapiens
acggctcgttctgcc

SEQ ID NO: 1044645 - DNA, 15 bp, Homo sapiens
cggctcgttctgccg

SEQ ID NO: 1044646 - DNA, 15 bp, Homo sapiens
ggctcgttctgccgt

SEQ ID NO: 1044647 - DNA, 15 bp, Homo sapiens
gctcgttctgccgtt

SEQ ID NO: 1044648 - DNA, 15 bp, Homo sapiens
ctcgttctgccgttc

SEQ ID NO: 1044649 - DNA, 15 bp, Homo sapiens
tcgttctgccgttct

SEQ ID NO: 1044650 - DNA, 15 bp, Homo sapiens
cgttctgccgttctc

SEQ ID NO: 1044651 - DNA, 15 bp, Homo sapiens
gttctgccgttctca

SEQ ID NO: 1044652 - DNA, 15 bp, Homo sapiens
ttctgccgttctcac

SEQ ID NO: 1044653 - DNA, 15 bp, Homo sapiens
tctgccgttctcacg

SEQ ID NO: 1044654 - DNA, 15 bp, Homo sapiens
ctgccgttctcacga

SEQ ID NO: 1044655 - DNA, 15 bp, Homo sapiens
tgccgttctcacgag

SEQ ID NO: 1044656 - DNA, 15 bp, Homo sapiens
gccgttctcacgagg

SEQ ID NO: 1044657 - DNA, 15 bp, Homo sapiens
ccgttctcacgaggg

SEQ ID NO: 1044658 - DNA, 15 bp, Homo sapiens
cgttctcacgaggga

SEQ ID NO: 1044659 - DNA, 15 bp, Homo sapiens
gttctcacgagggag

SEQ ID NO: 1044660 - DNA, 15 bp, Homo sapiens
ttctcacgagggagg

SEQ ID NO: 1044661 - DNA, 15 bp, Homo sapiens
tctcacgagggaggc

SEQ ID NO: 1044662 - DNA, 15 bp, Homo sapiens
ctcacgagggaggca

SEQ ID NO: 1044663 - DNA, 15 bp, Homo sapiens
tcacgagggaggcat

SEQ ID NO: 1044664 - DNA, 15 bp, Homo sapiens
cacgagggaggcatc

SEQ ID NO: 1044665 - DNA, 15 bp, Homo sapiens
acgagggaggcatcc

SEQ ID NO: 1044666 - DNA, 15 bp, Homo sapiens
cgagggaggcatcca

SEQ ID NO: 1044667 - DNA, 15 bp, Homo sapiens
gagggaggcatccag

SEQ ID NO: 1044668 - DNA, 15 bp, Homo sapiens
agggaggcatccagc

SEQ ID NO: 1044669 - DNA, 15 bp, Homo sapiens
gggaggcatccagct

SEQ ID NO: 1044670 - DNA, 15 bp, Homo sapiens
ggaggcatccagctt

SEQ ID NO: 1044671 - DNA, 15 bp, Homo sapiens
gaggcatccagcttg

SEQ ID NO: 1044672 - DNA, 15 bp, Homo sapiens
aggcatccagcttgt

SEQ ID NO: 1044673 - DNA, 15 bp, Homo sapiens
ggcatccagcttgta

SEQ ID NO: 1044674 - DNA, 15 bp, Homo sapiens
gcatccagcttgtaa

SEQ ID NO: 1044675 - DNA, 15 bp, Homo sapiens
catccagcttgtaaa

SEQ ID NO: 1044676 - DNA, 15 bp, Homo sapiens
atccagcttgtaaaa

SEQ ID NO: 1044677 - DNA, 15 bp, Homo sapiens
tccagcttgtaaaat

SEQ ID NO: 1044678 - DNA, 15 bp, Homo sapiens
ccagcttgtaaaata

SEQ ID NO: 1044679 - DNA, 15 bp, Homo sapiens
cagcttgtaaaataa

SEQ ID NO: 1044680 - DNA, 15 bp, Homo sapiens
agcttgtaaaataaa

SEQ ID NO: 1044681 - DNA, 15 bp, Homo sapiens
gcttgtaaaataaag

SEQ ID NO: 1044682 - DNA, 15 bp, Homo sapiens
cttgtaaaataaagc

SEQ ID NO: 1044683 - DNA, 15 bp, Homo sapiens
ttgtaaaataaagca

SEQ ID NO: 1044684 - DNA, 15 bp, Homo sapiens
tgtaaaataaagcag

SEQ ID NO: 1044685 - DNA, 15 bp, Homo sapiens
gtaaaataaagcagc

SEQ ID NO: 1044686 - DNA, 15 bp, Homo sapiens
taaaataaagcagcc

SEQ ID NO: 1044687 - DNA, 15 bp, Homo sapiens
aaaataaagcagccc

SEQ ID NO: 1044688 - DNA, 15 bp, Homo sapiens
aaataaagcagccca

SEQ ID NO: 1044689 - DNA, 15 bp, Homo sapiens
aataaagcagcccag

SEQ ID NO: 1044690 - DNA, 15 bp, Homo sapiens
ataaagcagcccagt

SEQ ID NO: 1044691 - DNA, 15 bp, Homo sapiens
taaagcagcccagtg

SEQ ID NO: 1044692 - DNA, 15 bp, Homo sapiens
aaagcagcccagtgt

SEQ ID NO: 1044693 - DNA, 15 bp, Homo sapiens
aagcagcccagtgtg

SEQ ID NO: 1044694 - DNA, 15 bp, Homo sapiens
agcagcccagtgtgt

SEQ ID NO: 1044695 - DNA, 15 bp, Homo sapiens
gcagcccagtgtgtt

SEQ ID NO: 1044696 - DNA, 15 bp, Homo sapiens
cagcccagtgtgttc

SEQ ID NO: 1044697 - DNA, 15 bp, Homo sapiens
agcccagtgtgttct

SEQ ID NO: 1044698 - DNA, 15 bp, Homo sapiens
gcccagtgtgttctt

SEQ ID NO: 1044699 - DNA, 15 bp, Homo sapiens
cccagtgtgttcttc

SEQ ID NO: 1044700 - DNA, 15 bp, Homo sapiens
ccagtgtgttcttcc

SEQ ID NO: 1044701 - DNA, 15 bp, Homo sapiens
cagtgtgttcttcca

SEQ ID NO: 1044702 - DNA, 15 bp, Homo sapiens
agtgtgttcttccac

SEQ ID NO: 1044703 - DNA, 15 bp, Homo sapiens
gtgtgttcttccacc

SEQ ID NO: 1044704 - DNA, 15 bp, Homo sapiens
tgtgttcttccacca

SEQ ID NO: 1044705 - DNA, 15 bp, Homo sapiens
gtgttcttccaccac

SEQ ID NO: 1044706 - DNA, 15 bp, Homo sapiens
tgttcttccaccacc

SEQ ID NO: 1044707 - DNA, 15 bp, Homo sapiens
gttcttccaccacca

SEQ ID NO: 1044708 - DNA, 15 bp, Homo sapiens
ttcttccaccaccac

SEQ ID NO: 1044709 - DNA, 15 bp, Homo sapiens
tcttccaccaccaca

SEQ ID NO: 1044710 - DNA, 15 bp, Homo sapiens
cttccaccaccacat

SEQ ID NO: 1044711 - DNA, 15 bp, Homo sapiens
ttccaccaccacatc

SEQ ID NO: 1044712 - DNA, 15 bp, Homo sapiens
tccaccaccacatca

SEQ ID NO: 1044713 - DNA, 15 bp, Homo sapiens
ccaccaccacatcac

SEQ ID NO: 1044714 - DNA, 15 bp, Homo sapiens
caccaccacatcacc

SEQ ID NO: 1044715 - DNA, 15 bp, Homo sapiens
accaccacatcaccc

SEQ ID NO: 1044716 - DNA, 15 bp, Homo sapiens
ccaccacatcaccca

SEQ ID NO: 1044717 - DNA, 15 bp, Homo sapiens
caccacatcacccaa

SEQ ID NO: 1044718 - DNA, 15 bp, Homo sapiens
accacatcacccaag

SEQ ID NO: 1044719 - DNA, 15 bp, Homo sapiens
ccacatcacccaagg

SEQ ID NO: 1044720 - DNA, 15 bp, Homo sapiens
cacatcacccaaggt

SEQ ID NO: 1044721 - DNA, 15 bp, Homo sapiens
acatcacccaaggtt

SEQ ID NO: 1044722 - DNA, 15 bp, Homo sapiens
catcacccaaggttc

SEQ ID NO: 1044723 - DNA, 15 bp, Homo sapiens
atcacccaaggttct

SEQ ID NO: 1044724 - DNA, 15 bp, Homo sapiens
tcacccaaggttcta

SEQ ID NO: 1044725 - DNA, 15 bp, Homo sapiens
cacccaaggttctat

SEQ ID NO: 1044726 - DNA, 15 bp, Homo sapiens
acccaaggttctatt

SEQ ID NO: 1044727 - DNA, 15 bp, Homo sapiens
cccaaggttctattt

SEQ ID NO: 1044728 - DNA, 15 bp, Homo sapiens
ccaaggttctatttt

SEQ ID NO: 1044729 - DNA, 15 bp, Homo sapiens
caaggttctattttc

SEQ ID NO: 1044730 - DNA, 15 bp, Homo sapiens
aaggttctattttca

SEQ ID NO: 1044731 - DNA, 15 bp, Homo sapiens
aggttctattttcaa

SEQ ID NO: 1044732 - DNA, 15 bp, Homo sapiens
ggttctattttcaaa

SEQ ID NO: 1044733 - DNA, 15 bp, Homo sapiens
gttctattttcaaag

SEQ ID NO: 1044734 - DNA, 15 bp, Homo sapiens
ttctattttcaaaga

SEQ ID NO: 1044735 - DNA, 15 bp, Homo sapiens
tctattttcaaagat

SEQ ID NO: 1044736 - DNA, 15 bp, Homo sapiens
ctattttcaaagatt

SEQ ID NO: 1044737 - DNA, 15 bp, Homo sapiens
tattttcaaagattt

SEQ ID NO: 1044738 - DNA, 15 bp, Homo sapiens
attttcaaagatttt

SEQ ID NO: 1044739 - DNA, 15 bp, Homo sapiens
ttttcaaagatttta

SEQ ID NO: 1044740 - DNA, 15 bp, Homo sapiens
tttcaaagattttat

SEQ ID NO: 1044741 - DNA, 15 bp, Homo sapiens
ttcaaagattttatt

SEQ ID NO: 1044742 - DNA, 15 bp, Homo sapiens
tcaaagattttattt

SEQ ID NO: 1044743 - DNA, 15 bp, Homo sapiens
caaagattttatttt

SEQ ID NO: 1044744 - DNA, 15 bp, Homo sapiens
aaagattttattttg

SEQ ID NO: 1044745 - DNA, 15 bp, Homo sapiens
aagattttattttgt

SEQ ID NO: 1044746 - DNA, 15 bp, Homo sapiens
agattttattttgta

SEQ ID NO: 1044747 - DNA, 15 bp, Homo sapiens
gattttattttgtaa

SEQ ID NO: 1044748 - DNA, 15 bp, Homo sapiens
attttattttgtaaa

SEQ ID NO: 1044749 - DNA, 15 bp, Homo sapiens
ttttattttgtaaaa

SEQ ID NO: 1044750 - DNA, 15 bp, Homo sapiens
tttattttgtaaaaa

SEQ ID NO: 1044751 - DNA, 15 bp, Homo sapiens
ttattttgtaaaaac

SEQ ID NO: 1044752 - DNA, 15 bp, Homo sapiens
tattttgtaaaaacg

SEQ ID NO: 1044753 - DNA, 15 bp, Homo sapiens
attttgtaaaaacgg

SEQ ID NO: 1044754 - DNA, 15 bp, Homo sapiens
ttttgtaaaaacggg

SEQ ID NO: 1044755 - DNA, 15 bp, Homo sapiens
tttgtaaaaacggga

SEQ ID NO: 1044756 - DNA, 15 bp, Homo sapiens
ttgtaaaaacgggaa

SEQ ID NO: 1044757 - DNA, 15 bp, Homo sapiens
tgtaaaaacgggaag

SEQ ID NO: 1044758 - DNA, 15 bp, Homo sapiens
gtaaaaacgggaaga

SEQ ID NO: 1044759 - DNA, 15 bp, Homo sapiens
taaaaacgggaagaa

SEQ ID NO: 1044760 - DNA, 15 bp, Homo sapiens
aaaaacgggaagaaa

SEQ ID NO: 1044761 - DNA, 15 bp, Homo sapiens
aaaacgggaagaaaa

SEQ ID NO: 1044762 - DNA, 15 bp, Homo sapiens
aaacgggaagaaaag

SEQ ID NO: 1044763 - DNA, 15 bp, Homo sapiens
aacgggaagaaaagt

SEQ ID NO: 1044764 - DNA, 15 bp, Homo sapiens
acgggaagaaaagta

SEQ ID NO: 1044765 - DNA, 15 bp, Homo sapiens
cgggaagaaaagtac

SEQ ID NO: 1044766 - DNA, 15 bp, Homo sapiens
gggaagaaaagtaca

SEQ ID NO: 1044767 - DNA, 15 bp, Homo sapiens
ggaagaaaagtacaa

SEQ ID NO: 1044768 - DNA, 15 bp, Homo sapiens
gaagaaaagtacaag

SEQ ID NO: 1044769 - DNA, 15 bp, Homo sapiens
aagaaaagtacaagt

SEQ ID NO: 1044770 - DNA, 15 bp, Homo sapiens
agaaaagtacaagtt

SEQ ID NO: 1044771 - DNA, 15 bp, Homo sapiens
gaaaagtacaagttg

SEQ ID NO: 1044772 - DNA, 15 bp, Homo sapiens
aaaagtacaagttgc

SEQ ID NO: 1044773 - DNA, 15 bp, Homo sapiens
aaagtacaagttgct

SEQ ID NO: 1044774 - DNA, 15 bp, Homo sapiens
aagtacaagttgctg

SEQ ID NO: 1044775 - DNA, 15 bp, Homo sapiens
agtacaagttgctgc

SEQ ID NO: 1044776 - DNA, 15 bp, Homo sapiens
gtacaagttgctgca

SEQ ID NO: 1044777 - DNA, 15 bp, Homo sapiens
tacaagttgctgcat

SEQ ID NO: 1044778 - DNA, 15 bp, Homo sapiens
acaagttgctgcatg

SEQ ID NO: 1044779 - DNA, 15 bp, Homo sapiens
caagttgctgcatgt

SEQ ID NO: 1044780 - DNA, 15 bp, Homo sapiens
aagttgctgcatgtg

SEQ ID NO: 1044781 - DNA, 15 bp, Homo sapiens
agttgctgcatgtgc

SEQ ID NO: 1044782 - DNA, 15 bp, Homo sapiens
gttgctgcatgtgca

SEQ ID NO: 1044783 - DNA, 15 bp, Homo sapiens
ttgctgcatgtgcat

SEQ ID NO: 1044784 - DNA, 15 bp, Homo sapiens
tgctgcatgtgcatc

SEQ ID NO: 1044785 - DNA, 15 bp, Homo sapiens
gctgcatgtgcatcc

SEQ ID NO: 1044786 - DNA, 15 bp, Homo sapiens
ctgcatgtgcatcct

SEQ ID NO: 1044787 - DNA, 15 bp, Homo sapiens
tgcatgtgcatcctc

SEQ ID NO: 1044788 - DNA, 15 bp, Homo sapiens
gcatgtgcatcctct

SEQ ID NO: 1044789 - DNA, 15 bp, Homo sapiens
catgtgcatcctctc

SEQ ID NO: 1044790 - DNA, 15 bp, Homo sapiens
atgtgcatcctctct

SEQ ID NO: 1044791 - DNA, 15 bp, Homo sapiens
tgtgcatcctctctc

SEQ ID NO: 1044792 - DNA, 15 bp, Homo sapiens
gtgcatcctctctct

SEQ ID NO: 1044793 - DNA, 15 bp, Homo sapiens
tgcatcctctctctc

SEQ ID NO: 1044794 - DNA, 15 bp, Homo sapiens
gcatcctctctctct

SEQ ID NO: 1044795 - DNA, 15 bp, Homo sapiens
catcctctctctctc

SEQ ID NO: 1044796 - DNA, 15 bp, Homo sapiens
atcctctctctctcg

SEQ ID NO: 1044797 - DNA, 15 bp, Homo sapiens
tcctctctctctcgt

SEQ ID NO: 1044798 - DNA, 15 bp, Homo sapiens
cctctctctctcgtt

SEQ ID NO: 1044799 - DNA, 15 bp, Homo sapiens
ctctctctctcgttg

SEQ ID NO: 1044800 - DNA, 15 bp, Homo sapiens
tctctctctcgttgc

SEQ ID NO: 1044801 - DNA, 15 bp, Homo sapiens
ctctctctcgttgct

SEQ ID NO: 1044802 - DNA, 15 bp, Homo sapiens
tctctctcgttgctg

SEQ ID NO: 1044803 - DNA, 15 bp, Homo sapiens
ctctctcgttgctga

SEQ ID NO: 1044804 - DNA, 15 bp, Homo sapiens
tctctcgttgctgag

SEQ ID NO: 1044805 - DNA, 15 bp, Homo sapiens
ctctcgttgctgagc

SEQ ID NO: 1044806 - DNA, 15 bp, Homo sapiens
tctcgttgctgagcc

SEQ ID NO: 1044807 - DNA, 15 bp, Homo sapiens
ctcgttgctgagcct

SEQ ID NO: 1044808 - DNA, 15 bp, Homo sapiens
tcgttgctgagcctt

SEQ ID NO: 1044809 - DNA, 15 bp, Homo sapiens
cgttgctgagccttt

SEQ ID NO: 1044810 - DNA, 15 bp, Homo sapiens
gttgctgagcctttt

SEQ ID NO: 1044811 - DNA, 15 bp, Homo sapiens
ttgctgagccttttg

SEQ ID NO: 1044812 - DNA, 15 bp, Homo sapiens
tgctgagccttttgg

SEQ ID NO: 1044813 - DNA, 15 bp, Homo sapiens
gctgagccttttggg

SEQ ID NO: 1044814 - DNA, 15 bp, Homo sapiens
ctgagccttttgggt

SEQ ID NO: 1044815 - DNA, 15 bp, Homo sapiens
tgagccttttgggtg

SEQ ID NO: 1044816 - DNA, 15 bp, Homo sapiens
gagccttttgggtgc

SEQ ID NO: 1044817 - DNA, 15 bp, Homo sapiens
agccttttgggtgca

SEQ ID NO: 1044818 - DNA, 15 bp, Homo sapiens
gccttttgggtgcat

SEQ ID NO: 1044819 - DNA, 15 bp, Homo sapiens
ccttttgggtgcatc

SEQ ID NO: 1044820 - DNA, 15 bp, Homo sapiens
cttttgggtgcatcc

SEQ ID NO: 1044821 - DNA, 15 bp, Homo sapiens
ttttgggtgcatcct

SEQ ID NO: 1044822 - DNA, 15 bp, Homo sapiens
tttgggtgcatccta

SEQ ID NO: 1044823 - DNA, 15 bp, Homo sapiens
ttgggtgcatcctaa

SEQ ID NO: 1044824 - DNA, 15 bp, Homo sapiens
tgggtgcatcctaag

SEQ ID NO: 1044825 - DNA, 15 bp, Homo sapiens
gggtgcatcctaagg

SEQ ID NO: 1044826 - DNA, 15 bp, Homo sapiens
ggtgcatcctaagga

SEQ ID NO: 1044827 - DNA, 15 bp, Homo sapiens
gtgcatcctaaggac

SEQ ID NO: 1044828 - DNA, 15 bp, Homo sapiens
tgcatcctaaggaca

SEQ ID NO: 1044829 - DNA, 15 bp, Homo sapiens
gcatcctaaggacaa

SEQ ID NO: 1044830 - DNA, 15 bp, Homo sapiens
catcctaaggacaag

SEQ ID NO: 1044831 - DNA, 15 bp, Homo sapiens
atcctaaggacaagg

SEQ ID NO: 1044832 - DNA, 15 bp, Homo sapiens
tcctaaggacaagga

SEQ ID NO: 1044833 - DNA, 15 bp, Homo sapiens
cctaaggacaaggac

SEQ ID NO: 1044834 - DNA, 15 bp, Homo sapiens
ctaaggacaaggacg

SEQ ID NO: 1044835 - DNA, 15 bp, Homo sapiens
taaggacaaggacgt

SEQ ID NO: 1044836 - DNA, 15 bp, Homo sapiens
aaggacaaggacgtc

SEQ ID NO: 1044837 - DNA, 15 bp, Homo sapiens
aggacaaggacgtcc

SEQ ID NO: 1044838 - DNA, 15 bp, Homo sapiens
ggacaaggacgtcct

SEQ ID NO: 1044839 - DNA, 15 bp, Homo sapiens
gacaaggacgtcctt

SEQ ID NO: 1044840 - DNA, 15 bp, Homo sapiens
acaaggacgtccttc

SEQ ID NO: 1044841 - DNA, 15 bp, Homo sapiens
caaggacgtccttct

SEQ ID NO: 1044842 - DNA, 15 bp, Homo sapiens
aaggacgtccttctc

SEQ ID NO: 1044843 - DNA, 15 bp, Homo sapiens
aggacgtccttctcc

SEQ ID NO: 1044844 - DNA, 15 bp, Homo sapiens
ggacgtccttctcca

SEQ ID NO: 1044845 - DNA, 15 bp, Homo sapiens
gacgtccttctccat

SEQ ID NO: 1044846 - DNA, 15 bp, Homo sapiens
acgtccttctccatg

SEQ ID NO: 1044847 - DNA, 15 bp, Homo sapiens
cgtccttctccatgg

SEQ ID NO: 1044848 - DNA, 15 bp, Homo sapiens
gtccttctccatggc

SEQ ID NO: 1044849 - DNA, 15 bp, Homo sapiens
tccttctccatggcc

SEQ ID NO: 1044850 - DNA, 15 bp, Homo sapiens
ccttctccatggccg

SEQ ID NO: 1044851 - DNA, 15 bp, Homo sapiens
cttctccatggccgt

SEQ ID NO: 1044852 - DNA, 15 bp, Homo sapiens
ttctccatggccgtg

SEQ ID NO: 1044853 - DNA, 15 bp, Homo sapiens
tctccatggccgtgg

SEQ ID NO: 1044854 - DNA, 15 bp, Homo sapiens
ctccatggccgtgga

SEQ ID NO: 1044855 - DNA, 15 bp, Homo sapiens
tccatggccgtggac

SEQ ID NO: 1044856 - DNA, 15 bp, Homo sapiens
ccatggccgtggacc

SEQ ID NO: 1044857 - DNA, 15 bp, Homo sapiens
catggccgtggacca

SEQ ID NO: 1044858 - DNA, 15 bp, Homo sapiens
atggccgtggaccac

SEQ ID NO: 1044859 - DNA, 15 bp, Homo sapiens
tggccgtggaccacg

SEQ ID NO: 1044860 - DNA, 15 bp, Homo sapiens
ggccgtggaccacgg

SEQ ID NO: 1044861 - DNA, 15 bp, Homo sapiens
gccgtggaccacggc

SEQ ID NO: 1044862 - DNA, 15 bp, Homo sapiens
ccgtggaccacggcc

SEQ ID NO: 1044863 - DNA, 15 bp, Homo sapiens
cgtggaccacggccc

SEQ ID NO: 1044864 - DNA, 15 bp, Homo sapiens
gtggaccacggcccc

SEQ ID NO: 1044865 - DNA, 15 bp, Homo sapiens
tggaccacggcccca

SEQ ID NO: 1044866 - DNA, 15 bp, Homo sapiens
ggaccacggccccac

SEQ ID NO: 1044867 - DNA, 15 bp, Homo sapiens
gaccacggccccact

SEQ ID NO: 1044868 - DNA, 15 bp, Homo sapiens
accacggccccactc

SEQ ID NO: 1044869 - DNA, 15 bp, Homo sapiens
ccacggccccactca

SEQ ID NO: 1044870 - DNA, 15 bp, Homo sapiens
cacggccccactcaa

SEQ ID NO: 1044871 - DNA, 15 bp, Homo sapiens
acggccccactcaag

SEQ ID NO: 1044872 - DNA, 15 bp, Homo sapiens
cggccccactcaaga

SEQ ID NO: 1044873 - DNA, 15 bp, Homo sapiens
ggccccactcaagaa

SEQ ID NO: 1044874 - DNA, 15 bp, Homo sapiens
gccccactcaagaag

SEQ ID NO: 1044875 - DNA, 15 bp, Homo sapiens
ccccactcaagaagg

SEQ ID NO: 1044876 - DNA, 15 bp, Homo sapiens
cccactcaagaaggc

SEQ ID NO: 1044877 - DNA, 15 bp, Homo sapiens
ccactcaagaaggcc

SEQ ID NO: 1044878 - DNA, 15 bp, Homo sapiens
cactcaagaaggcca

SEQ ID NO: 1044879 - DNA, 15 bp, Homo sapiens
actcaagaaggccac

SEQ ID NO: 1044880 - DNA, 15 bp, Homo sapiens
ctcaagaaggccacg

SEQ ID NO: 1044881 - DNA, 15 bp, Homo sapiens
tcaagaaggccacga

SEQ ID NO: 1044882 - DNA, 15 bp, Homo sapiens
caagaaggccacgag

SEQ ID NO: 1044883 - DNA, 15 bp, Homo sapiens
aagaaggccacgagg

SEQ ID NO: 1044884 - DNA, 15 bp, Homo sapiens
agaaggccacgagga

SEQ ID NO: 1044885 - DNA, 15 bp, Homo sapiens
gaaggccacgaggat

SEQ ID NO: 1044886 - DNA, 15 bp, Homo sapiens
aaggccacgaggatc

SEQ ID NO: 1044887 - DNA, 15 bp, Homo sapiens
aggccacgaggatcc

SEQ ID NO: 1044888 - DNA, 15 bp, Homo sapiens
ggccacgaggatcca

SEQ ID NO: 1044889 - DNA, 15 bp, Homo sapiens
gccacgaggatccac

SEQ ID NO: 1044890 - DNA, 15 bp, Homo sapiens
ccacgaggatccaca

SEQ ID NO: 1044891 - DNA, 15 bp, Homo sapiens
cacgaggatccacac

SEQ ID NO: 1044892 - DNA, 15 bp, Homo sapiens
acgaggatccacacc

SEQ ID NO: 1044893 - DNA, 15 bp, Homo sapiens
cgaggatccacacct

SEQ ID NO: 1044894 - DNA, 15 bp, Homo sapiens
gaggatccacacctt

SEQ ID NO: 1044895 - DNA, 15 bp, Homo sapiens
aggatccacaccttt

SEQ ID NO: 1044896 - DNA, 15 bp, Homo sapiens
ggatccacaccttta

SEQ ID NO: 1044897 - DNA, 15 bp, Homo sapiens
gatccacacctttaa

SEQ ID NO: 1044898 - DNA, 15 bp, Homo sapiens
atccacacctttaat

SEQ ID NO: 1044899 - DNA, 15 bp, Homo sapiens
tccacacctttaatc

SEQ ID NO: 1044900 - DNA, 15 bp, Homo sapiens
ccacacctttaatct

SEQ ID NO: 1044901 - DNA, 15 bp, Homo sapiens
cacacctttaatctg

SEQ ID NO: 1044902 - DNA, 15 bp, Homo sapiens
acacctttaatctga

SEQ ID NO: 1044903 - DNA, 15 bp, Homo sapiens
cacctttaatctgac

SEQ ID NO: 1044904 - DNA, 15 bp, Homo sapiens
acctttaatctgaca

SEQ ID NO: 1044905 - DNA, 15 bp, Homo sapiens
cctttaatctgacag

SEQ ID NO: 1044906 - DNA, 15 bp, Homo sapiens
ctttaatctgacagt

SEQ ID NO: 1044907 - DNA, 15 bp, Homo sapiens
tttaatctgacagtc

SEQ ID NO: 1044908 - DNA, 15 bp, Homo sapiens
ttaatctgacagtct

SEQ ID NO: 1044909 - DNA, 15 bp, Homo sapiens
taatctgacagtctg

SEQ ID NO: 1044910 - DNA, 15 bp, Homo sapiens
aatctgacagtctgt

SEQ ID NO: 1044911 - DNA, 15 bp, Homo sapiens
atctgacagtctgtg

SEQ ID NO: 1044912 - DNA, 15 bp, Homo sapiens
tctgacagtctgtgt

SEQ ID NO: 1044913 - DNA, 15 bp, Homo sapiens
ctgacagtctgtgtt

SEQ ID NO: 1044914 - DNA, 15 bp, Homo sapiens
tgacagtctgtgttc

SEQ ID NO: 1044915 - DNA, 15 bp, Homo sapiens
gacagtctgtgttca

SEQ ID NO: 1044916 - DNA, 15 bp, Homo sapiens
acagtctgtgttcag

SEQ ID NO: 1044917 - DNA, 15 bp, Homo sapiens
cagtctgtgttcaga

SEQ ID NO: 1044918 - DNA, 15 bp, Homo sapiens
agtctgtgttcagat

SEQ ID NO: 1044919 - DNA, 15 bp, Homo sapiens
gtctgtgttcagatt

SEQ ID NO: 1044920 - DNA, 15 bp, Homo sapiens
tctgtgttcagattc

SEQ ID NO: 1044921 - DNA, 15 bp, Homo sapiens
ctgtgttcagattcc

SEQ ID NO: 1044922 - DNA, 15 bp, Homo sapiens
tgtgttcagattccc

SEQ ID NO: 1044923 - DNA, 15 bp, Homo sapiens
gtgttcagattccct

SEQ ID NO: 1044924 - DNA, 15 bp, Homo sapiens
tgttcagattccctt

SEQ ID NO: 1044925 - DNA, 15 bp, Homo sapiens
gttcagattccctta

SEQ ID NO: 1044926 - DNA, 15 bp, Homo sapiens
ttcagattcccttac

SEQ ID NO: 1044927 - DNA, 15 bp, Homo sapiens
tcagattcccttacg

SEQ ID NO: 1044928 - DNA, 15 bp, Homo sapiens
cagattcccttacgg

SEQ ID NO: 1044929 - DNA, 15 bp, Homo sapiens
agattcccttacggc

SEQ ID NO: 1044930 - DNA, 15 bp, Homo sapiens
gattcccttacggcc

SEQ ID NO: 1044931 - DNA, 15 bp, Homo sapiens
attcccttacggccc

SEQ ID NO: 1044932 - DNA, 15 bp, Homo sapiens
ttcccttacggcccc

SEQ ID NO: 1044933 - DNA, 15 bp, Homo sapiens
tcccttacggcccca

SEQ ID NO: 1044934 - DNA, 15 bp, Homo sapiens
cccttacggccccaa

SEQ ID NO: 1044935 - DNA, 15 bp, Homo sapiens
ccttacggccccaat

SEQ ID NO: 1044936 - DNA, 15 bp, Homo sapiens
cttacggccccaata

SEQ ID NO: 1044937 - DNA, 15 bp, Homo sapiens
ttacggccccaataa

SEQ ID NO: 1044938 - DNA, 15 bp, Homo sapiens
tacggccccaataac

SEQ ID NO: 1044939 - DNA, 15 bp, Homo sapiens
acggccccaataaca

SEQ ID NO: 1044940 - DNA, 15 bp, Homo sapiens
cggccccaataacac

SEQ ID NO: 1044941 - DNA, 15 bp, Homo sapiens
ggccccaataacact

SEQ ID NO: 1044942 - DNA, 15 bp, Homo sapiens
gccccaataacactt

SEQ ID NO: 1044943 - DNA, 15 bp, Homo sapiens
ccccaataacacttt

SEQ ID NO: 1044944 - DNA, 15 bp, Homo sapiens
cccaataacactttt

SEQ ID NO: 1044945 - DNA, 15 bp, Homo sapiens
ccaataacacttttt

SEQ ID NO: 1044946 - DNA, 15 bp, Homo sapiens
caataacactttttg

SEQ ID NO: 1044947 - DNA, 15 bp, Homo sapiens
aataacactttttgt

SEQ ID NO: 1044948 - DNA, 15 bp, Homo sapiens
ataacactttttgtc

SEQ ID NO: 1044949 - DNA, 15 bp, Homo sapiens
taacactttttgtca

SEQ ID NO: 1044950 - DNA, 15 bp, Homo sapiens
aacactttttgtcat

SEQ ID NO: 1044951 - DNA, 15 bp, Homo sapiens
acactttttgtcata

SEQ ID NO: 1044952 - DNA, 15 bp, Homo sapiens
cactttttgtcatag

SEQ ID NO: 1044953 - DNA, 15 bp, Homo sapiens
actttttgtcatagt

SEQ ID NO: 1044954 - DNA, 15 bp, Homo sapiens
ctttttgtcatagtt

SEQ ID NO: 1044955 - DNA, 15 bp, Homo sapiens
tttttgtcatagttg

SEQ ID NO: 1044956 - DNA, 15 bp, Homo sapiens
ttttgtcatagttgt

SEQ ID NO: 1044957 - DNA, 15 bp, Homo sapiens
tttgtcatagttgtt

SEQ ID NO: 1044958 - DNA, 15 bp, Homo sapiens
ttgtcatagttgttc

SEQ ID NO: 1044959 - DNA, 15 bp, Homo sapiens
tgtcatagttgttca

SEQ ID NO: 1044960 - DNA, 15 bp, Homo sapiens
gtcatagttgttcat

SEQ ID NO: 1044961 - DNA, 15 bp, Homo sapiens
tcatagttgttcatt

SEQ ID NO: 1044962 - DNA, 15 bp, Homo sapiens
catagttgttcatta

SEQ ID NO: 1044963 - DNA, 15 bp, Homo sapiens
atagttgttcattaa

SEQ ID NO: 1044964 - DNA, 15 bp, Homo sapiens
tagttgttcattaaa

SEQ ID NO: 1044965 - DNA, 15 bp, Homo sapiens
agttgttcattaaaa

SEQ ID NO: 1044966 - DNA, 15 bp, Homo sapiens
gttgttcattaaaaa

SEQ ID NO: 1044967 - DNA, 15 bp, Homo sapiens
ttgttcattaaaaaa

SEQ ID NO: 1044968 - DNA, 15 bp, Homo sapiens
tgttcattaaaaaat

SEQ ID NO: 1044969 - DNA, 15 bp, Homo sapiens
gttcattaaaaaatt

SEQ ID NO: 1044970 - DNA, 15 bp, Homo sapiens
ttcattaaaaaattt

SEQ ID NO: 1044971 - DNA, 15 bp, Homo sapiens
tcattaaaaaatttt

SEQ ID NO: 1044972 - DNA, 15 bp, Homo sapiens
cattaaaaaattttg

SEQ ID NO: 1044973 - DNA, 15 bp, Homo sapiens
attaaaaaattttga

SEQ ID NO: 1044974 - DNA, 15 bp, Homo sapiens
ttaaaaaattttgaa

SEQ ID NO: 1044975 - DNA, 15 bp, Homo sapiens
taaaaaattttgaat

SEQ ID NO: 1044976 - DNA, 15 bp, Homo sapiens
aaaaaattttgaatt

SEQ ID NO: 1044977 - DNA, 15 bp, Homo sapiens
aaaaattttgaattg

SEQ ID NO: 1044978 - DNA, 15 bp, Homo sapiens
aaaattttgaattgg

SEQ ID NO: 1044979 - DNA, 15 bp, Homo sapiens
aaattttgaattggc

SEQ ID NO: 1044980 - DNA, 15 bp, Homo sapiens
aattttgaattggcc

SEQ ID NO: 1044981 - DNA, 15 bp, Homo sapiens
attttgaattggccg

SEQ ID NO: 1044982 - DNA, 15 bp, Homo sapiens
ttttgaattggccgg

SEQ ID NO: 1044983 - DNA, 15 bp, Homo sapiens
tttgaattggccggg

SEQ ID NO: 1044984 - DNA, 15 bp, Homo sapiens
ttgaattggccgggc

SEQ ID NO: 1044985 - DNA, 15 bp, Homo sapiens
tgaattggccgggcg

SEQ ID NO: 1044986 - DNA, 15 bp, Homo sapiens
gaattggccgggcgt

SEQ ID NO: 1044987 - DNA, 15 bp, Homo sapiens
aattggccgggcgtg

SEQ ID NO: 1044988 - DNA, 15 bp, Homo sapiens
attggccgggcgtgg

SEQ ID NO: 1044989 - DNA, 15 bp, Homo sapiens
ttggccgggcgtggt

SEQ ID NO: 1044990 - DNA, 15 bp, Homo sapiens
tggccgggcgtggtg

SEQ ID NO: 1044991 - DNA, 15 bp, Homo sapiens
ggccgggcgtggtgg

SEQ ID NO: 1044992 - DNA, 15 bp, Homo sapiens
gccgggcgtggtggc

SEQ ID NO: 1044993 - DNA, 15 bp, Homo sapiens
ccgggcgtggtggct

SEQ ID NO: 1044994 - DNA, 15 bp, Homo sapiens
cgggcgtggtggctc

SEQ ID NO: 1044995 - DNA, 15 bp, Homo sapiens
gggcgtggtggctca

SEQ ID NO: 1044996 - DNA, 15 bp, Homo sapiens
ggcgtggtggctcac

SEQ ID NO: 1044997 - DNA, 15 bp, Homo sapiens
gcgtggtggctcacg

SEQ ID NO: 1044998 - DNA, 15 bp, Homo sapiens
cgtggtggctcacgc

SEQ ID NO: 1044999 - DNA, 15 bp, Homo sapiens
gtggtggctcacgct

SEQ ID NO: 1045000 - DNA, 15 bp, Homo sapiens
tggtggctcacgctt

SEQ ID NO: 1045001 - DNA, 15 bp, Homo sapiens
ggtggctcacgcttg

SEQ ID NO: 1045002 - DNA, 15 bp, Homo sapiens
gtggctcacgcttgt

SEQ ID NO: 1045003 - DNA, 15 bp, Homo sapiens
tggctcacgcttgta

SEQ ID NO: 1045004 - DNA, 15 bp, Homo sapiens
ggctcacgcttgtaa

SEQ ID NO: 1045005 - DNA, 15 bp, Homo sapiens
gctcacgcttgtaat

SEQ ID NO: 1045006 - DNA, 15 bp, Homo sapiens
ctcacgcttgtaatc

SEQ ID NO: 1045007 - DNA, 15 bp, Homo sapiens
tcacgcttgtaatcc

SEQ ID NO: 1045008 - DNA, 15 bp, Homo sapiens
cacgcttgtaatccc

SEQ ID NO: 1045009 - DNA, 15 bp, Homo sapiens
acgcttgtaatccca

SEQ ID NO: 1045010 - DNA, 15 bp, Homo sapiens
cgcttgtaatcccag

SEQ ID NO: 1045011 - DNA, 15 bp, Homo sapiens
gcttgtaatcccagc

SEQ ID NO: 1045012 - DNA, 15 bp, Homo sapiens
cttgtaatcccagca

SEQ ID NO: 1045013 - DNA, 15 bp, Homo sapiens
ttgtaatcccagcac

SEQ ID NO: 1045014 - DNA, 15 bp, Homo sapiens
gtaatcccagcactg

SEQ ID NO: 1045015 - DNA, 15 bp, Homo sapiens
taatcccagcactgt

SEQ ID NO: 1045016 - DNA, 15 bp, Homo sapiens
aatcccagcactgtg

SEQ ID NO: 1045017 - DNA, 15 bp, Homo sapiens
atcccagcactgtgg

SEQ ID NO: 1045018 - DNA, 15 bp, Homo sapiens
tcccagcactgtggg

SEQ ID NO: 1045019 - DNA, 15 bp, Homo sapiens
cccagcactgtggga

SEQ ID NO: 1045020 - DNA, 15 bp, Homo sapiens
ccagcactgtgggag

SEQ ID NO: 1045021 - DNA, 15 bp, Homo sapiens
cagcactgtgggagg

SEQ ID NO: 1045022 - DNA, 15 bp, Homo sapiens
agcactgtgggaggc

SEQ ID NO: 1045023 - DNA, 15 bp, Homo sapiens
gcactgtgggaggcc

SEQ ID NO: 1045024 - DNA, 15 bp, Homo sapiens
cactgtgggaggccg

SEQ ID NO: 1045025 - DNA, 15 bp, Homo sapiens
actgtgggaggccga

SEQ ID NO: 1045026 - DNA, 15 bp, Homo sapiens
ctgtgggaggccgag

SEQ ID NO: 1045027 - DNA, 15 bp, Homo sapiens
tgtgggaggccgagg

SEQ ID NO: 1045028 - DNA, 15 bp, Homo sapiens
gtgggaggccgaggc

SEQ ID NO: 1045029 - DNA, 15 bp, Homo sapiens
tgggaggccgaggcg

SEQ ID NO: 1045030 - DNA, 15 bp, Homo sapiens
gggaggccgaggcgg

SEQ ID NO: 1045031 - DNA, 15 bp, Homo sapiens
gaggccgaggcgggt

SEQ ID NO: 1045032 - DNA, 15 bp, Homo sapiens
aggccgaggcgggtg

SEQ ID NO: 1045033 - DNA, 15 bp, Homo sapiens
ggccgaggcgggtgg

SEQ ID NO: 1045034 - DNA, 15 bp, Homo sapiens
gccgaggcgggtgga

SEQ ID NO: 1045035 - DNA, 15 bp, Homo sapiens
ccgaggcgggtggat

SEQ ID NO: 1045036 - DNA, 15 bp, Homo sapiens
cgaggcgggtggatc

SEQ ID NO: 1045037 - DNA, 15 bp, Homo sapiens
gaggcgggtggatca

SEQ ID NO: 1045038 - DNA, 15 bp, Homo sapiens
aggcgggtggatcac

SEQ ID NO: 1045039 - DNA, 15 bp, Homo sapiens
ggcgggtggatcaca

SEQ ID NO: 1045040 - DNA, 15 bp, Homo sapiens
gcgggtggatcacaa

SEQ ID NO: 1045041 - DNA, 15 bp, Homo sapiens
cgggtggatcacaag

SEQ ID NO: 1045042 - DNA, 15 bp, Homo sapiens
gggtggatcacaagg

SEQ ID NO: 1045043 - DNA, 15 bp, Homo sapiens
ggtggatcacaaggt

SEQ ID NO: 1045044 - DNA, 15 bp, Homo sapiens
gtggatcacaaggtc

SEQ ID NO: 1045045 - DNA, 15 bp, Homo sapiens
tggatcacaaggtca

SEQ ID NO: 1045046 - DNA, 15 bp, Homo sapiens
ggatcacaaggtcaa

SEQ ID NO: 1045047 - DNA, 15 bp, Homo sapiens
gatcacaaggtcaag

SEQ ID NO: 1045048 - DNA, 15 bp, Homo sapiens
atcacaaggtcaaga

SEQ ID NO: 1045049 - DNA, 15 bp, Homo sapiens
tcacaaggtcaagag

SEQ ID NO: 1045050 - DNA, 15 bp, Homo sapiens
cacaaggtcaagaga

SEQ ID NO: 1045051 - DNA, 15 bp, Homo sapiens
acaaggtcaagagat

SEQ ID NO: 1045052 - DNA, 15 bp, Homo sapiens
caaggtcaagagatt

SEQ ID NO: 1045053 - DNA, 15 bp, Homo sapiens
aaggtcaagagattg

SEQ ID NO: 1045054 - DNA, 15 bp, Homo sapiens
aggtcaagagattga

SEQ ID NO: 1045055 - DNA, 15 bp, Homo sapiens
ggtcaagagattgag

SEQ ID NO: 1045056 - DNA, 15 bp, Homo sapiens
gtcaagagattgaga

SEQ ID NO: 1045057 - DNA, 15 bp, Homo sapiens
tcaagagattgagac

SEQ ID NO: 1045058 - DNA, 15 bp, Homo sapiens
caagagattgagacc

SEQ ID NO: 1045059 - DNA, 15 bp, Homo sapiens
aagagattgagacca

SEQ ID NO: 1045060 - DNA, 15 bp, Homo sapiens
agagattgagaccat

SEQ ID NO: 1045061 - DNA, 15 bp, Homo sapiens
gagattgagaccatc

SEQ ID NO: 1045062 - DNA, 15 bp, Homo sapiens
agattgagaccatcc

SEQ ID NO: 1045063 - DNA, 15 bp, Homo sapiens
gattgagaccatcct

SEQ ID NO: 1045064 - DNA, 15 bp, Homo sapiens
attgagaccatcctg

SEQ ID NO: 1045065 - DNA, 15 bp, Homo sapiens
ttgagaccatcctgg

SEQ ID NO: 1045066 - DNA, 15 bp, Homo sapiens
tgagaccatcctggg

SEQ ID NO: 1045067 - DNA, 15 bp, Homo sapiens
gagaccatcctgggc

SEQ ID NO: 1045068 - DNA, 15 bp, Homo sapiens
agaccatcctgggca

SEQ ID NO: 1045069 - DNA, 15 bp, Homo sapiens
gaccatcctgggcag

SEQ ID NO: 1045070 - DNA, 15 bp, Homo sapiens
accatcctgggcagc

SEQ ID NO: 1045071 - DNA, 15 bp, Homo sapiens
ccatcctgggcagca

SEQ ID NO: 1045072 - DNA, 15 bp, Homo sapiens
catcctgggcagcat

SEQ ID NO: 1045073 - DNA, 15 bp, Homo sapiens
atcctgggcagcatg

SEQ ID NO: 1045074 - DNA, 15 bp, Homo sapiens
tcctgggcagcatgg

SEQ ID NO: 1045075 - DNA, 15 bp, Homo sapiens
cctgggcagcatggt

SEQ ID NO: 1045076 - DNA, 15 bp, Homo sapiens
ctgggcagcatggtg

SEQ ID NO: 1045077 - DNA, 15 bp, Homo sapiens
tgggcagcatggtga

SEQ ID NO: 1045078 - DNA, 15 bp, Homo sapiens
gggcagcatggtgaa

SEQ ID NO: 1045079 - DNA, 15 bp, Homo sapiens
ggcagcatggtgaaa

SEQ ID NO: 1045080 - DNA, 15 bp, Homo sapiens
gcagcatggtgaaac

SEQ ID NO: 1045081 - DNA, 15 bp, Homo sapiens
cagcatggtgaaacc

SEQ ID NO: 1045082 - DNA, 15 bp, Homo sapiens
agcatggtgaaaccc

SEQ ID NO: 1045083 - DNA, 15 bp, Homo sapiens
gcatggtgaaaccct

SEQ ID NO: 1045084 - DNA, 15 bp, Homo sapiens
catggtgaaaccctg

SEQ ID NO: 1045085 - DNA, 15 bp, Homo sapiens
atggtgaaaccctgt

SEQ ID NO: 1045086 - DNA, 15 bp, Homo sapiens
tggtgaaaccctgtc

SEQ ID NO: 1045087 - DNA, 15 bp, Homo sapiens
ggtgaaaccctgtct

SEQ ID NO: 1045088 - DNA, 15 bp, Homo sapiens
gtgaaaccctgtctc

SEQ ID NO: 1045089 - DNA, 15 bp, Homo sapiens
tgaaaccctgtctct

SEQ ID NO: 1045090 - DNA, 15 bp, Homo sapiens
gaaaccctgtctcta

SEQ ID NO: 1045091 - DNA, 15 bp, Homo sapiens
tgtctctactaaaag

SEQ ID NO: 1045092 - DNA, 15 bp, Homo sapiens
gtctctactaaaagt

SEQ ID NO: 1045093 - DNA, 15 bp, Homo sapiens
tctctactaaaagta

SEQ ID NO: 1045094 - DNA, 15 bp, Homo sapiens
ctctactaaaagtaa

SEQ ID NO: 1045095 - DNA, 15 bp, Homo sapiens
tctactaaaagtaaa

SEQ ID NO: 1045096 - DNA, 15 bp, Homo sapiens
ctactaaaagtaaaa

SEQ ID NO: 1045097 - DNA, 15 bp, Homo sapiens
tactaaaagtaaaaa

SEQ ID NO: 1045098 - DNA, 15 bp, Homo sapiens
actaaaagtaaaaaa

SEQ ID NO: 1045099 - DNA, 15 bp, Homo sapiens
ctaaaagtaaaaaaa

SEQ ID NO: 1045100 - DNA, 15 bp, Homo sapiens
taaaagtaaaaaaat

SEQ ID NO: 1045101 - DNA, 15 bp, Homo sapiens
aaaagtaaaaaaatt

SEQ ID NO: 1045102 - DNA, 15 bp, Homo sapiens
aaagtaaaaaaatta

SEQ ID NO: 1045103 - DNA, 15 bp, Homo sapiens
aagtaaaaaaattag

SEQ ID NO: 1045104 - DNA, 15 bp, Homo sapiens
agtaaaaaaattagc

SEQ ID NO: 1045105 - DNA, 15 bp, Homo sapiens
gtaaaaaaattagcc

SEQ ID NO: 1045106 - DNA, 15 bp, Homo sapiens
taaaaaaattagcca

SEQ ID NO: 1045107 - DNA, 15 bp, Homo sapiens
aaaaaattagccagg

SEQ ID NO: 1045108 - DNA, 15 bp, Homo sapiens
attagccaggcatgg

SEQ ID NO: 1045109 - DNA, 15 bp, Homo sapiens
ttagccaggcatggt

SEQ ID NO: 1045110 - DNA, 15 bp, Homo sapiens
tagccaggcatggtg

SEQ ID NO: 1045111 - DNA, 15 bp, Homo sapiens
agccaggcatggtgg

SEQ ID NO: 1045112 - DNA, 15 bp, Homo sapiens
gccaggcatggtggc

SEQ ID NO: 1045113 - DNA, 15 bp, Homo sapiens
ccaggcatggtggcg

SEQ ID NO: 1045114 - DNA, 15 bp, Homo sapiens
caggcatggtggcgc

SEQ ID NO: 1045115 - DNA, 15 bp, Homo sapiens
aggcatggtggcgca

SEQ ID NO: 1045116 - DNA, 15 bp, Homo sapiens
ggcatggtggcgcac

SEQ ID NO: 1045117 - DNA, 15 bp, Homo sapiens
gcatggtggcgcaca

SEQ ID NO: 1045118 - DNA, 15 bp, Homo sapiens
catggtggcgcacac

SEQ ID NO: 1045119 - DNA, 15 bp, Homo sapiens
atggtggcgcacacc

SEQ ID NO: 1045120 - DNA, 15 bp, Homo sapiens
tggtggcgcacacct

SEQ ID NO: 1045121 - DNA, 15 bp, Homo sapiens
ggtggcgcacacctg

SEQ ID NO: 1045122 - DNA, 15 bp, Homo sapiens
gtggcgcacacctgt

SEQ ID NO: 1045123 - DNA, 15 bp, Homo sapiens
tggcgcacacctgta

SEQ ID NO: 1045124 - DNA, 15 bp, Homo sapiens
ggcgcacacctgtag

SEQ ID NO: 1045125 - DNA, 15 bp, Homo sapiens
gcgcacacctgtagt

SEQ ID NO: 1045126 - DNA, 15 bp, Homo sapiens
cgcacacctgtagtc

SEQ ID NO: 1045127 - DNA, 15 bp, Homo sapiens
gcacacctgtagtcc

SEQ ID NO: 1045128 - DNA, 15 bp, Homo sapiens
agctactcgggaggc

SEQ ID NO: 1045129 - DNA, 15 bp, Homo sapiens
gctactcgggaggct

SEQ ID NO: 1045130 - DNA, 15 bp, Homo sapiens
ctactcgggaggctg

SEQ ID NO: 1045131 - DNA, 15 bp, Homo sapiens
tactcgggaggctga

SEQ ID NO: 1045132 - DNA, 15 bp, Homo sapiens
actcgggaggctgag

SEQ ID NO: 1045133 - DNA, 15 bp, Homo sapiens
ctcgggaggctgagg

SEQ ID NO: 1045134 - DNA, 15 bp, Homo sapiens
tcgggaggctgaggc

SEQ ID NO: 1045135 - DNA, 15 bp, Homo sapiens
cgggaggctgaggca

SEQ ID NO: 1045136 - DNA, 15 bp, Homo sapiens
cttgaacccaggagg

SEQ ID NO: 1045137 - DNA, 15 bp, Homo sapiens
ttgaacccaggaggc

SEQ ID NO: 1045138 - DNA, 15 bp, Homo sapiens
tgaacccaggaggcg

SEQ ID NO: 1045139 - DNA, 15 bp, Homo sapiens
gaacccaggaggcgg

SEQ ID NO: 1045140 - DNA, 15 bp, Homo sapiens
aacccaggaggcgga

SEQ ID NO: 1045141 - DNA, 15 bp, Homo sapiens
acccaggaggcggag

SEQ ID NO: 1045142 - DNA, 15 bp, Homo sapiens
cccaggaggcggagg

SEQ ID NO: 1045143 - DNA, 15 bp, Homo sapiens
ccaggaggcggaggt

SEQ ID NO: 1045144 - DNA, 15 bp, Homo sapiens
caggaggcggaggtt

SEQ ID NO: 1045145 - DNA, 15 bp, Homo sapiens
aggaggcggaggttg

SEQ ID NO: 1045146 - DNA, 15 bp, Homo sapiens
cagtgagccgagatc

SEQ ID NO: 1045147 - DNA, 15 bp, Homo sapiens
agtgagccgagatcg

SEQ ID NO: 1045148 - DNA, 15 bp, Homo sapiens
gtgagccgagatcgt

SEQ ID NO: 1045149 - DNA, 15 bp, Homo sapiens
tgagccgagatcgtg

SEQ ID NO: 1045150 - DNA, 15 bp, Homo sapiens
gagccgagatcgtgc

SEQ ID NO: 1045151 - DNA, 15 bp, Homo sapiens
agccgagatcgtgcc

SEQ ID NO: 1045152 - DNA, 15 bp, Homo sapiens
gccgagatcgtgcca

SEQ ID NO: 1045153 - DNA, 15 bp, Homo sapiens
ccgagatcgtgccac

SEQ ID NO: 1045154 - DNA, 15 bp, Homo sapiens
cgagatcgtgccact

SEQ ID NO: 1045155 - DNA, 15 bp, Homo sapiens
gagatcgtgccactg

SEQ ID NO: 1045156 - DNA, 15 bp, Homo sapiens
agatcgtgccactgc

SEQ ID NO: 1045157 - DNA, 15 bp, Homo sapiens
gatcgtgccactgca

SEQ ID NO: 1045158 - DNA, 15 bp, Homo sapiens
atcgtgccactgcac

SEQ ID NO: 1045159 - DNA, 15 bp, Homo sapiens
tcgtgccactgcact

SEQ ID NO: 1045160 - DNA, 15 bp, Homo sapiens
cgtgccactgcactc

SEQ ID NO: 1045161 - DNA, 15 bp, Homo sapiens
gtgccactgcactcc

SEQ ID NO: 1045162 - DNA, 15 bp, Homo sapiens
tgccactgcactcca

SEQ ID NO: 1045163 - DNA, 15 bp, Homo sapiens
gccactgcactccag

SEQ ID NO: 1045164 - DNA, 15 bp, Homo sapiens
ctgggcgacagagtg

SEQ ID NO: 1045165 - DNA, 15 bp, Homo sapiens
tgggcgacagagtga

SEQ ID NO: 1045166 - DNA, 15 bp, Homo sapiens
gggcgacagagtgag

SEQ ID NO: 1045167 - DNA, 15 bp, Homo sapiens
ggcgacagagtgagt

SEQ ID NO: 1045168 - DNA, 15 bp, Homo sapiens
gcgacagagtgagtc

SEQ ID NO: 1045169 - DNA, 15 bp, Homo sapiens
cgacagagtgagtct

SEQ ID NO: 1045170 - DNA, 15 bp, Homo sapiens
gacagagtgagtctc

SEQ ID NO: 1045171 - DNA, 15 bp, Homo sapiens
acagagtgagtctcc

SEQ ID NO: 1045172 - DNA, 15 bp, Homo sapiens
cagagtgagtctccg

SEQ ID NO: 1045173 - DNA, 15 bp, Homo sapiens
agagtgagtctccgt

SEQ ID NO: 1045174 - DNA, 15 bp, Homo sapiens
gagtgagtctccgtc

SEQ ID NO: 1045175 - DNA, 15 bp, Homo sapiens
agtgagtctccgtct

SEQ ID NO: 1045176 - DNA, 15 bp, Homo sapiens
gtgagtctccgtctc

SEQ ID NO: 1045177 - DNA, 15 bp, Homo sapiens
tgagtctccgtctca

SEQ ID NO: 1045178 - DNA, 15 bp, Homo sapiens
gagtctccgtctcag

SEQ ID NO: 1045179 - DNA, 15 bp, Homo sapiens
agtctccgtctcaga

SEQ ID NO: 1045180 - DNA, 15 bp, Homo sapiens
gtctccgtctcagaa

SEQ ID NO: 1045181 - DNA, 15 bp, Homo sapiens
tctccgtctcagaaa

SEQ ID NO: 1045182 - DNA, 15 bp, Homo sapiens
ctccgtctcagaaaa

SEQ ID NO: 1045183 - DNA, 15 bp, Homo sapiens
tccgtctcagaaaaa

SEQ ID NO: 1045184 - DNA, 15 bp, Homo sapiens
ccgtctcagaaaaag

SEQ ID NO: 1045185 - DNA, 15 bp, Homo sapiens
cgtctcagaaaaaga

SEQ ID NO: 1045186 - DNA, 15 bp, Homo sapiens
gtctcagaaaaagaa

SEQ ID NO: 1045187 - DNA, 15 bp, Homo sapiens
tctcagaaaaagaaa

SEQ ID NO: 1045188 - DNA, 15 bp, Homo sapiens
ctcagaaaaagaaaa

SEQ ID NO: 1045189 - DNA, 15 bp, Homo sapiens
tcagaaaaagaaaat

SEQ ID NO: 1045190 - DNA, 15 bp, Homo sapiens
cagaaaaagaaaatt

SEQ ID NO: 1045191 - DNA, 15 bp, Homo sapiens
agaaaaagaaaattt

SEQ ID NO: 1045192 - DNA, 15 bp, Homo sapiens
gaaaaagaaaatttt

SEQ ID NO: 1045193 - DNA, 15 bp, Homo sapiens
aaaaagaaaattttt

SEQ ID NO: 1045194 - DNA, 15 bp, Homo sapiens
aaaagaaaatttttt

SEQ ID NO: 1045195 - DNA, 15 bp, Homo sapiens
aaagaaaattttttt

SEQ ID NO: 1045196 - DNA, 15 bp, Homo sapiens
aagaaaatttttttt

SEQ ID NO: 1045197 - DNA, 15 bp, Homo sapiens
agaaaattttttttt

SEQ ID NO: 1045198 - DNA, 15 bp, Homo sapiens
gaaaatttttttttg

SEQ ID NO: 1045199 - DNA, 15 bp, Homo sapiens
aaaatttttttttga

SEQ ID NO: 1045200 - DNA, 15 bp, Homo sapiens
aaatttttttttgaa

SEQ ID NO: 1045201 - DNA, 15 bp, Homo sapiens
aatttttttttgaat

SEQ ID NO: 1045202 - DNA, 15 bp, Homo sapiens
atttttttttgaatc

SEQ ID NO: 1045203 - DNA, 15 bp, Homo sapiens
tttttttttgaatcc

SEQ ID NO: 1045204 - DNA, 15 bp, Homo sapiens
ttttttttgaatcca

SEQ ID NO: 1045205 - DNA, 15 bp, Homo sapiens
tttttttgaatccaa

SEQ ID NO: 1045206 - DNA, 15 bp, Homo sapiens
ttttttgaatccaag

SEQ ID NO: 1045207 - DNA, 15 bp, Homo sapiens
tttttgaatccaagg

SEQ ID NO: 1045208 - DNA, 15 bp, Homo sapiens
ttttgaatccaaggt

SEQ ID NO: 1045209 - DNA, 15 bp, Homo sapiens
tttgaatccaaggtt

SEQ ID NO: 1045210 - DNA, 15 bp, Homo sapiens
ttgaatccaaggttg

SEQ ID NO: 1045211 - DNA, 15 bp, Homo sapiens
tgaatccaaggttgc

SEQ ID NO: 1045212 - DNA, 15 bp, Homo sapiens
gaatccaaggttgca

SEQ ID NO: 1045213 - DNA, 15 bp, Homo sapiens
aatccaaggttgcat

SEQ ID NO: 1045214 - DNA, 15 bp, Homo sapiens
atccaaggttgcatg

SEQ ID NO: 1045215 - DNA, 15 bp, Homo sapiens
tccaaggttgcatgc

SEQ ID NO: 1045216 - DNA, 15 bp, Homo sapiens
ccaaggttgcatgct

SEQ ID NO: 1045217 - DNA, 15 bp, Homo sapiens
caaggttgcatgctg

SEQ ID NO: 1045218 - DNA, 15 bp, Homo sapiens
aaggttgcatgctgt

SEQ ID NO: 1045219 - DNA, 15 bp, Homo sapiens
aggttgcatgctgtg

SEQ ID NO: 1045220 - DNA, 15 bp, Homo sapiens
ggttgcatgctgtgt

SEQ ID NO: 1045221 - DNA, 15 bp, Homo sapiens
gttgcatgctgtgtc

SEQ ID NO: 1045222 - DNA, 15 bp, Homo sapiens
ttgcatgctgtgtct

SEQ ID NO: 1045223 - DNA, 15 bp, Homo sapiens
tgcatgctgtgtctg

SEQ ID NO: 1045224 - DNA, 15 bp, Homo sapiens
gcatgctgtgtctgg

SEQ ID NO: 1045225 - DNA, 15 bp, Homo sapiens
catgctgtgtctggt

SEQ ID NO: 1045226 - DNA, 15 bp, Homo sapiens
atgctgtgtctggtt

SEQ ID NO: 1045227 - DNA, 15 bp, Homo sapiens
tgctgtgtctggttg

SEQ ID NO: 1045228 - DNA, 15 bp, Homo sapiens
gctgtgtctggttgc

SEQ ID NO: 1045229 - DNA, 15 bp, Homo sapiens
ctgtgtctggttgcc

SEQ ID NO: 1045230 - DNA, 15 bp, Homo sapiens
tgtgtctggttgcct

SEQ ID NO: 1045231 - DNA, 15 bp, Homo sapiens
gtgtctggttgcctc

SEQ ID NO: 1045232 - DNA, 15 bp, Homo sapiens
tgtctggttgcctca

SEQ ID NO: 1045233 - DNA, 15 bp, Homo sapiens
gtctggttgcctcat

SEQ ID NO: 1045234 - DNA, 15 bp, Homo sapiens
tctggttgcctcatg

SEQ ID NO: 1045235 - DNA, 15 bp, Homo sapiens
ctggttgcctcatgt

SEQ ID NO: 1045236 - DNA, 15 bp, Homo sapiens
tggttgcctcatgtg

SEQ ID NO: 1045237 - DNA, 15 bp, Homo sapiens
ggttgcctcatgtgt

SEQ ID NO: 1045238 - DNA, 15 bp, Homo sapiens
gttgcctcatgtgtt

SEQ ID NO: 1045239 - DNA, 15 bp, Homo sapiens
ttgcctcatgtgttt

SEQ ID NO: 1045240 - DNA, 15 bp, Homo sapiens
tgcctcatgtgtttt

SEQ ID NO: 1045241 - DNA, 15 bp, Homo sapiens
gcctcatgtgttttt

SEQ ID NO: 1045242 - DNA, 15 bp, Homo sapiens
cctcatgtgtttttc

SEQ ID NO: 1045243 - DNA, 15 bp, Homo sapiens
ctcatgtgtttttcc

SEQ ID NO: 1045244 - DNA, 15 bp, Homo sapiens
tcatgtgtttttcct

SEQ ID NO: 1045245 - DNA, 15 bp, Homo sapiens
catgtgtttttcctc

SEQ ID NO: 1045246 - DNA, 15 bp, Homo sapiens
atgtgtttttcctct

SEQ ID NO: 1045247 - DNA, 15 bp, Homo sapiens
tgtgtttttcctctt

SEQ ID NO: 1045248 - DNA, 15 bp, Homo sapiens
gtgtttttcctcttt

SEQ ID NO: 1045249 - DNA, 15 bp, Homo sapiens
tgtttttcctcttta

SEQ ID NO: 1045250 - DNA, 15 bp, Homo sapiens
gtttttcctctttaa

SEQ ID NO: 1045251 - DNA, 15 bp, Homo sapiens
tttttcctctttaat

SEQ ID NO: 1045252 - DNA, 15 bp, Homo sapiens
ttttcctctttaatc

SEQ ID NO: 1045253 - DNA, 15 bp, Homo sapiens
tttcctctttaatcc

SEQ ID NO: 1045254 - DNA, 15 bp, Homo sapiens
ttcctctttaatcca

SEQ ID NO: 1045255 - DNA, 15 bp, Homo sapiens
tcctctttaatccag

SEQ ID NO: 1045256 - DNA, 15 bp, Homo sapiens
cctctttaatccaga

SEQ ID NO: 1045257 - DNA, 15 bp, Homo sapiens
ctctttaatccagac

SEQ ID NO: 1045258 - DNA, 15 bp, Homo sapiens
tctttaatccagacc

SEQ ID NO: 1045259 - DNA, 15 bp, Homo sapiens
ctttaatccagacct

SEQ ID NO: 1045260 - DNA, 15 bp, Homo sapiens
tttaatccagacctg

SEQ ID NO: 1045261 - DNA, 15 bp, Homo sapiens
ttaatccagacctgt

SEQ ID NO: 1045262 - DNA, 15 bp, Homo sapiens
taatccagacctgtt

SEQ ID NO: 1045263 - DNA, 15 bp, Homo sapiens
aatccagacctgttc

SEQ ID NO: 1045264 - DNA, 15 bp, Homo sapiens
atccagacctgttct

SEQ ID NO: 1045265 - DNA, 15 bp, Homo sapiens
tccagacctgttctc

SEQ ID NO: 1045266 - DNA, 15 bp, Homo sapiens
ccagacctgttctcc

SEQ ID NO: 1045267 - DNA, 15 bp, Homo sapiens
cagacctgttctcca

SEQ ID NO: 1045268 - DNA, 15 bp, Homo sapiens
agacctgttctccag

SEQ ID NO: 1045269 - DNA, 15 bp, Homo sapiens
gacctgttctccagc

SEQ ID NO: 1045270 - DNA, 15 bp, Homo sapiens
acctgttctccagcc

SEQ ID NO: 1045271 - DNA, 15 bp, Homo sapiens
cctgttctccagccc

SEQ ID NO: 1045272 - DNA, 15 bp, Homo sapiens
ctgttctccagccct

SEQ ID NO: 1045273 - DNA, 15 bp, Homo sapiens
tgttctccagccctt

SEQ ID NO: 1045274 - DNA, 15 bp, Homo sapiens
gttctccagcccttt

SEQ ID NO: 1045275 - DNA, 15 bp, Homo sapiens
ttctccagccctttt

SEQ ID NO: 1045276 - DNA, 15 bp, Homo sapiens
tctccagcccttttc

SEQ ID NO: 1045277 - DNA, 15 bp, Homo sapiens
ctccagcccttttct

SEQ ID NO: 1045278 - DNA, 15 bp, Homo sapiens
tccagcccttttctc

SEQ ID NO: 1045279 - DNA, 15 bp, Homo sapiens
ccagcccttttctct

SEQ ID NO: 1045280 - DNA, 15 bp, Homo sapiens
cagcccttttctctt

SEQ ID NO: 1045281 - DNA, 15 bp, Homo sapiens
agcccttttctcttt

SEQ ID NO: 1045282 - DNA, 15 bp, Homo sapiens
gcccttttctctttg

SEQ ID NO: 1045283 - DNA, 15 bp, Homo sapiens
cccttttctctttgc

SEQ ID NO: 1045284 - DNA, 15 bp, Homo sapiens
ccttttctctttgct

SEQ ID NO: 1045285 - DNA, 15 bp, Homo sapiens
cttttctctttgctg

SEQ ID NO: 1045286 - DNA, 15 bp, Homo sapiens
ttttctctttgctgg

SEQ ID NO: 1045287 - DNA, 15 bp, Homo sapiens
tttctctttgctggg

SEQ ID NO: 1045288 - DNA, 15 bp, Homo sapiens
ttctctttgctgggt

SEQ ID NO: 1045289 - DNA, 15 bp, Homo sapiens
tctctttgctgggtc

SEQ ID NO: 1045290 - DNA, 15 bp, Homo sapiens
ctctttgctgggtct

SEQ ID NO: 1045291 - DNA, 15 bp, Homo sapiens
tctttgctgggtctt

SEQ ID NO: 1045292 - DNA, 15 bp, Homo sapiens
ctttgctgggtcttt

SEQ ID NO: 1045293 - DNA, 15 bp, Homo sapiens
tttgctgggtctttc

SEQ ID NO: 1045294 - DNA, 15 bp, Homo sapiens
ttgctgggtctttca

SEQ ID NO: 1045295 - DNA, 15 bp, Homo sapiens
tgctgggtctttcag

SEQ ID NO: 1045296 - DNA, 15 bp, Homo sapiens
gctgggtctttcagg

SEQ ID NO: 1045297 - DNA, 15 bp, Homo sapiens
ctgggtctttcagga

SEQ ID NO: 1045298 - DNA, 15 bp, Homo sapiens
tgggtctttcaggac

SEQ ID NO: 1045299 - DNA, 15 bp, Homo sapiens
gggtctttcaggaca

SEQ ID NO: 1045300 - DNA, 15 bp, Homo sapiens
ggtctttcaggacac

SEQ ID NO: 1045301 - DNA, 15 bp, Homo sapiens
gtctttcaggacact

SEQ ID NO: 1045302 - DNA, 15 bp, Homo sapiens
tctttcaggacactg

SEQ ID NO: 1045303 - DNA, 15 bp, Homo sapiens
ctttcaggacactgg

SEQ ID NO: 1045304 - DNA, 15 bp, Homo sapiens
tttcaggacactggc

SEQ ID NO: 1045305 - DNA, 15 bp, Homo sapiens
ttcaggacactggca

SEQ ID NO: 1045306 - DNA, 15 bp, Homo sapiens
tcaggacactggcat

SEQ ID NO: 1045307 - DNA, 15 bp, Homo sapiens
caggacactggcatc

SEQ ID NO: 1045308 - DNA, 15 bp, Homo sapiens
aggacactggcatct

SEQ ID NO: 1045309 - DNA, 15 bp, Homo sapiens
ggacactggcatctg

SEQ ID NO: 1045310 - DNA, 15 bp, Homo sapiens
gacactggcatctgt

SEQ ID NO: 1045311 - DNA, 15 bp, Homo sapiens
acactggcatctgta

SEQ ID NO: 1045312 - DNA, 15 bp, Homo sapiens
cactggcatctgtaa

SEQ ID NO: 1045313 - DNA, 15 bp, Homo sapiens
actggcatctgtaaa

SEQ ID NO: 1045314 - DNA, 15 bp, Homo sapiens
ctggcatctgtaaag

SEQ ID NO: 1045315 - DNA, 15 bp, Homo sapiens
tggcatctgtaaagg

SEQ ID NO: 1045316 - DNA, 15 bp, Homo sapiens
ggcatctgtaaaggg

SEQ ID NO: 1045317 - DNA, 15 bp, Homo sapiens
gcatctgtaaagggg

SEQ ID NO: 1045318 - DNA, 15 bp, Homo sapiens
catctgtaaaggggc

SEQ ID NO: 1045319 - DNA, 15 bp, Homo sapiens
atctgtaaaggggcc

SEQ ID NO: 1045320 - DNA, 15 bp, Homo sapiens
tctgtaaaggggcca

SEQ ID NO: 1045321 - DNA, 15 bp, Homo sapiens
ctgtaaaggggccag

SEQ ID NO: 1045322 - DNA, 15 bp, Homo sapiens
tgtaaaggggccagg

SEQ ID NO: 1045323 - DNA, 15 bp, Homo sapiens
gtaaaggggccaggc

SEQ ID NO: 1045324 - DNA, 15 bp, Homo sapiens
taaaggggccaggcg

SEQ ID NO: 1045325 - DNA, 15 bp, Homo sapiens
aaaggggccaggcgg

SEQ ID NO: 1045326 - DNA, 15 bp, Homo sapiens
aaggggccaggcggg

SEQ ID NO: 1045327 - DNA, 15 bp, Homo sapiens
aggggccaggcgggt

SEQ ID NO: 1045328 - DNA, 15 bp, Homo sapiens
ggggccaggcgggtg

SEQ ID NO: 1045329 - DNA, 15 bp, Homo sapiens
gggccaggcgggtgc

SEQ ID NO: 1045330 - DNA, 15 bp, Homo sapiens
ggccaggcgggtgct

SEQ ID NO: 1045331 - DNA, 15 bp, Homo sapiens
gccaggcgggtgctt

SEQ ID NO: 1045332 - DNA, 15 bp, Homo sapiens
ccaggcgggtgcttt

SEQ ID NO: 1045333 - DNA, 15 bp, Homo sapiens
caggcgggtgctttt

SEQ ID NO: 1045334 - DNA, 15 bp, Homo sapiens
aggcgggtgcttttg

SEQ ID NO: 1045335 - DNA, 15 bp, Homo sapiens
ggcgggtgcttttgg

SEQ ID NO: 1045336 - DNA, 15 bp, Homo sapiens
gcgggtgcttttggc

SEQ ID NO: 1045337 - DNA, 15 bp, Homo sapiens
cgggtgcttttggca

SEQ ID NO: 1045338 - DNA, 15 bp, Homo sapiens
gggtgcttttggcag

SEQ ID NO: 1045339 - DNA, 15 bp, Homo sapiens
ggtgcttttggcagg

SEQ ID NO: 1045340 - DNA, 15 bp, Homo sapiens
gtgcttttggcagga

SEQ ID NO: 1045341 - DNA, 15 bp, Homo sapiens
tgcttttggcaggat

SEQ ID NO: 1045342 - DNA, 15 bp, Homo sapiens
gcttttggcaggatg

SEQ ID NO: 1045343 - DNA, 15 bp, Homo sapiens
cttttggcaggatgg

SEQ ID NO: 1045344 - DNA, 15 bp, Homo sapiens
ttttggcaggatggc

SEQ ID NO: 1045345 - DNA, 15 bp, Homo sapiens
tttggcaggatggcc

SEQ ID NO: 1045346 - DNA, 15 bp, Homo sapiens
ttggcaggatggccc

SEQ ID NO: 1045347 - DNA, 15 bp, Homo sapiens
tggcaggatggccct

SEQ ID NO: 1045348 - DNA, 15 bp, Homo sapiens
ggcaggatggccctt

SEQ ID NO: 1045349 - DNA, 15 bp, Homo sapiens
gcaggatggcccttg

SEQ ID NO: 1045350 - DNA, 15 bp, Homo sapiens
caggatggcccttga

SEQ ID NO: 1045351 - DNA, 15 bp, Homo sapiens
aggatggcccttgat

SEQ ID NO: 1045352 - DNA, 15 bp, Homo sapiens
ggatggcccttgatt

SEQ ID NO: 1045353 - DNA, 15 bp, Homo sapiens
gatggcccttgattt

SEQ ID NO: 1045354 - DNA, 15 bp, Homo sapiens
atggcccttgatttg

SEQ ID NO: 1045355 - DNA, 15 bp, Homo sapiens
tggcccttgatttgg

SEQ ID NO: 1045356 - DNA, 15 bp, Homo sapiens
ggcccttgatttgga

SEQ ID NO: 1045357 - DNA, 15 bp, Homo sapiens
gcccttgatttggat

SEQ ID NO: 1045358 - DNA, 15 bp, Homo sapiens
cccttgatttggatt

SEQ ID NO: 1045359 - DNA, 15 bp, Homo sapiens
ccttgatttggattt

SEQ ID NO: 1045360 - DNA, 15 bp, Homo sapiens
cttgatttggatttg

SEQ ID NO: 1045361 - DNA, 15 bp, Homo sapiens
ttgatttggatttgt

SEQ ID NO: 1045362 - DNA, 15 bp, Homo sapiens
tgatttggatttgtc

SEQ ID NO: 1045363 - DNA, 15 bp, Homo sapiens
gatttggatttgtct

SEQ ID NO: 1045364 - DNA, 15 bp, Homo sapiens
atttggatttgtctg

SEQ ID NO: 1045365 - DNA, 15 bp, Homo sapiens
tttggatttgtctga

SEQ ID NO: 1045366 - DNA, 15 bp, Homo sapiens
ttggatttgtctgat

SEQ ID NO: 1045367 - DNA, 15 bp, Homo sapiens
tggatttgtctgatt

SEQ ID NO: 1045368 - DNA, 15 bp, Homo sapiens
ggatttgtctgattg

SEQ ID NO: 1045369 - DNA, 15 bp, Homo sapiens
gatttgtctgattgc

SEQ ID NO: 1045370 - DNA, 15 bp, Homo sapiens
atttgtctgattgct

SEQ ID NO: 1045371 - DNA, 15 bp, Homo sapiens
tttgtctgattgctt

SEQ ID NO: 1045372 - DNA, 15 bp, Homo sapiens
ttgtctgattgcttt

SEQ ID NO: 1045373 - DNA, 15 bp, Homo sapiens
tgtctgattgctttc

SEQ ID NO: 1045374 - DNA, 15 bp, Homo sapiens
gtctgattgctttct

SEQ ID NO: 1045375 - DNA, 15 bp, Homo sapiens
tctgattgctttctc

SEQ ID NO: 1045376 - DNA, 15 bp, Homo sapiens
ctgattgctttctca

SEQ ID NO: 1045377 - DNA, 15 bp, Homo sapiens
tgattgctttctcag

SEQ ID NO: 1045378 - DNA, 15 bp, Homo sapiens
gattgctttctcagg

SEQ ID NO: 1045379 - DNA, 15 bp, Homo sapiens
attgctttctcagga

SEQ ID NO: 1045380 - DNA, 15 bp, Homo sapiens
ttgctttctcaggag

SEQ ID NO: 1045381 - DNA, 15 bp, Homo sapiens
tgctttctcaggagt

SEQ ID NO: 1045382 - DNA, 15 bp, Homo sapiens
gctttctcaggagtg

SEQ ID NO: 1045383 - DNA, 15 bp, Homo sapiens
ctttctcaggagtgc

SEQ ID NO: 1045384 - DNA, 15 bp, Homo sapiens
tttctcaggagtgca

SEQ ID NO: 1045385 - DNA, 15 bp, Homo sapiens
ttctcaggagtgcac

SEQ ID NO: 1045386 - DNA, 15 bp, Homo sapiens
tctcaggagtgcacg

SEQ ID NO: 1045387 - DNA, 15 bp, Homo sapiens
ctcaggagtgcacgt

SEQ ID NO: 1045388 - DNA, 15 bp, Homo sapiens
tcaggagtgcacgtg

SEQ ID NO: 1045389 - DNA, 15 bp, Homo sapiens
caggagtgcacgtgg

SEQ ID NO: 1045390 - DNA, 15 bp, Homo sapiens
aggagtgcacgtggt

SEQ ID NO: 1045391 - DNA, 15 bp, Homo sapiens
ggagtgcacgtggtc

SEQ ID NO: 1045392 - DNA, 15 bp, Homo sapiens
gagtgcacgtggtct

SEQ ID NO: 1045393 - DNA, 15 bp, Homo sapiens
agtgcacgtggtctt

SEQ ID NO: 1045394 - DNA, 15 bp, Homo sapiens
gtgcacgtggtcttc

SEQ ID NO: 1045395 - DNA, 15 bp, Homo sapiens
tgcacgtggtcttcc

SEQ ID NO: 1045396 - DNA, 15 bp, Homo sapiens
gcacgtggtcttccc

SEQ ID NO: 1045397 - DNA, 15 bp, Homo sapiens
cacgtggtcttccca

SEQ ID NO: 1045398 - DNA, 15 bp, Homo sapiens
acgtggtcttcccac

SEQ ID NO: 1045399 - DNA, 15 bp, Homo sapiens
cgtggtcttcccaca

SEQ ID NO: 1045400 - DNA, 15 bp, Homo sapiens
gtggtcttcccacag

SEQ ID NO: 1045401 - DNA, 15 bp, Homo sapiens
tggtcttcccacaga

SEQ ID NO: 1045402 - DNA, 15 bp, Homo sapiens
ggtcttcccacagac

SEQ ID NO: 1045403 - DNA, 15 bp, Homo sapiens
gtcttcccacagact

SEQ ID NO: 1045404 - DNA, 15 bp, Homo sapiens
tcttcccacagactc

SEQ ID NO: 1045405 - DNA, 15 bp, Homo sapiens
cttcccacagactcc

SEQ ID NO: 1045406 - DNA, 15 bp, Homo sapiens
ttcccacagactccc

SEQ ID NO: 1045407 - DNA, 15 bp, Homo sapiens
tcccacagactccca

SEQ ID NO: 1045408 - DNA, 15 bp, Homo sapiens
cccacagactcccac

SEQ ID NO: 1045409 - DNA, 15 bp, Homo sapiens
ccacagactcccaca

SEQ ID NO: 1045410 - DNA, 15 bp, Homo sapiens
cacagactcccacac

SEQ ID NO: 1045411 - DNA, 15 bp, Homo sapiens
acagactcccacaca

SEQ ID NO: 1045412 - DNA, 15 bp, Homo sapiens
cagactcccacacaa

SEQ ID NO: 1045413 - DNA, 15 bp, Homo sapiens
agactcccacacaaa

SEQ ID NO: 1045414 - DNA, 15 bp, Homo sapiens
gactcccacacaaaa

SEQ ID NO: 1045415 - DNA, 15 bp, Homo sapiens
actcccacacaaaag

SEQ ID NO: 1045416 - DNA, 15 bp, Homo sapiens
ctcccacacaaaagc

SEQ ID NO: 1045417 - DNA, 15 bp, Homo sapiens
tcccacacaaaagcc

SEQ ID NO: 1045418 - DNA, 15 bp, Homo sapiens
cccacacaaaagcct

SEQ ID NO: 1045419 - DNA, 15 bp, Homo sapiens
ccacacaaaagcctc

SEQ ID NO: 1045420 - DNA, 15 bp, Homo sapiens
cacacaaaagcctca

SEQ ID NO: 1045421 - DNA, 15 bp, Homo sapiens
acacaaaagcctcat

SEQ ID NO: 1045422 - DNA, 15 bp, Homo sapiens
cacaaaagcctcatt

SEQ ID NO: 1045423 - DNA, 15 bp, Homo sapiens
acaaaagcctcattg

SEQ ID NO: 1045424 - DNA, 15 bp, Homo sapiens
caaaagcctcattgt

SEQ ID NO: 1045425 - DNA, 15 bp, Homo sapiens
aaaagcctcattgtg

SEQ ID NO: 1045426 - DNA, 15 bp, Homo sapiens
aaagcctcattgtgt

SEQ ID NO: 1045427 - DNA, 15 bp, Homo sapiens
aagcctcattgtgtg

SEQ ID NO: 1045428 - DNA, 15 bp, Homo sapiens
agcctcattgtgtga

SEQ ID NO: 1045429 - DNA, 15 bp, Homo sapiens
gcctcattgtgtgaa

SEQ ID NO: 1045430 - DNA, 15 bp, Homo sapiens
cctcattgtgtgaat

SEQ ID NO: 1045431 - DNA, 15 bp, Homo sapiens
ctcattgtgtgaatc

SEQ ID NO: 1045432 - DNA, 15 bp, Homo sapiens
tcattgtgtgaatca

SEQ ID NO: 1045433 - DNA, 15 bp, Homo sapiens
cattgtgtgaatcag

SEQ ID NO: 1045434 - DNA, 15 bp, Homo sapiens
attgtgtgaatcaga

SEQ ID NO: 1045435 - DNA, 15 bp, Homo sapiens
ttgtgtgaatcagat

SEQ ID NO: 1045436 - DNA, 15 bp, Homo sapiens
tgtgtgaatcagatt

SEQ ID NO: 1045437 - DNA, 15 bp, Homo sapiens
gtgtgaatcagattg

SEQ ID NO: 1045438 - DNA, 15 bp, Homo sapiens
tgtgaatcagattgg

SEQ ID NO: 1045439 - DNA, 15 bp, Homo sapiens
gtgaatcagattgga

SEQ ID NO: 1045440 - DNA, 15 bp, Homo sapiens
tgaatcagattggag

SEQ ID NO: 1045441 - DNA, 15 bp, Homo sapiens
gaatcagattggagc

SEQ ID NO: 1045442 - DNA, 15 bp, Homo sapiens
aatcagattggagca

SEQ ID NO: 1045443 - DNA, 15 bp, Homo sapiens
atcagattggagcag

SEQ ID NO: 1045444 - DNA, 15 bp, Homo sapiens
tcagattggagcaga

SEQ ID NO: 1045445 - DNA, 15 bp, Homo sapiens
cagattggagcagag

SEQ ID NO: 1045446 - DNA, 15 bp, Homo sapiens
agattggagcagagt

SEQ ID NO: 1045447 - DNA, 15 bp, Homo sapiens
gattggagcagagtg

SEQ ID NO: 1045448 - DNA, 15 bp, Homo sapiens
attggagcagagtgt

SEQ ID NO: 1045449 - DNA, 15 bp, Homo sapiens
ttggagcagagtgtt

SEQ ID NO: 1045450 - DNA, 15 bp, Homo sapiens
tggagcagagtgttt

SEQ ID NO: 1045451 - DNA, 15 bp, Homo sapiens
ggagcagagtgtttc

SEQ ID NO: 1045452 - DNA, 15 bp, Homo sapiens
gagcagagtgtttct

SEQ ID NO: 1045453 - DNA, 15 bp, Homo sapiens
agcagagtgtttctg

SEQ ID NO: 1045454 - DNA, 15 bp, Homo sapiens
gcagagtgtttctga

SEQ ID NO: 1045455 - DNA, 15 bp, Homo sapiens
cagagtgtttctgat

SEQ ID NO: 1045456 - DNA, 15 bp, Homo sapiens
agagtgtttctgatg

SEQ ID NO: 1045457 - DNA, 15 bp, Homo sapiens
gagtgtttctgatga

SEQ ID NO: 1045458 - DNA, 15 bp, Homo sapiens
agtgtttctgatgag

SEQ ID NO: 1045459 - DNA, 15 bp, Homo sapiens
gtgtttctgatgagc

SEQ ID NO: 1045460 - DNA, 15 bp, Homo sapiens
tgtttctgatgagcc

SEQ ID NO: 1045461 - DNA, 15 bp, Homo sapiens
gtttctgatgagccg

SEQ ID NO: 1045462 - DNA, 15 bp, Homo sapiens
tttctgatgagccgg

SEQ ID NO: 1045463 - DNA, 15 bp, Homo sapiens
ttctgatgagccggg

SEQ ID NO: 1045464 - DNA, 15 bp, Homo sapiens
tctgatgagccgggg

SEQ ID NO: 1045465 - DNA, 15 bp, Homo sapiens
ctgatgagccggggt

SEQ ID NO: 1045466 - DNA, 15 bp, Homo sapiens
tgatgagccggggtt

SEQ ID NO: 1045467 - DNA, 15 bp, Homo sapiens
gatgagccggggttg

SEQ ID NO: 1045468 - DNA, 15 bp, Homo sapiens
atgagccggggttgg

SEQ ID NO: 1045469 - DNA, 15 bp, Homo sapiens
tgagccggggttggg

SEQ ID NO: 1045470 - DNA, 15 bp, Homo sapiens
gagccggggttgggt

SEQ ID NO: 1045471 - DNA, 15 bp, Homo sapiens
agccggggttgggtg

SEQ ID NO: 1045472 - DNA, 15 bp, Homo sapiens
gccggggttgggtgc

SEQ ID NO: 1045473 - DNA, 15 bp, Homo sapiens
ccggggttgggtgcc

SEQ ID NO: 1045474 - DNA, 15 bp, Homo sapiens
cggggttgggtgcct

SEQ ID NO: 1045475 - DNA, 15 bp, Homo sapiens
ggggttgggtgcctg

SEQ ID NO: 1045476 - DNA, 15 bp, Homo sapiens
gggttgggtgcctgg

SEQ ID NO: 1045477 - DNA, 15 bp, Homo sapiens
ggttgggtgcctgga

SEQ ID NO: 1045478 - DNA, 15 bp, Homo sapiens
gttgggtgcctggat

SEQ ID NO: 1045479 - DNA, 15 bp, Homo sapiens
ttgggtgcctggatc

SEQ ID NO: 1045480 - DNA, 15 bp, Homo sapiens
tgggtgcctggatcc

SEQ ID NO: 1045481 - DNA, 15 bp, Homo sapiens
gggtgcctggatcct

SEQ ID NO: 1045482 - DNA, 15 bp, Homo sapiens
ggtgcctggatcctc

SEQ ID NO: 1045483 - DNA, 15 bp, Homo sapiens
gtgcctggatcctcc

SEQ ID NO: 1045484 - DNA, 15 bp, Homo sapiens
tgcctggatcctccc

SEQ ID NO: 1045485 - DNA, 15 bp, Homo sapiens
gcctggatcctcccc

SEQ ID NO: 1045486 - DNA, 15 bp, Homo sapiens
cctggatcctccccc

SEQ ID NO: 1045487 - DNA, 15 bp, Homo sapiens
ctggatcctccccca

SEQ ID NO: 1045488 - DNA, 15 bp, Homo sapiens
tggatcctcccccag

SEQ ID NO: 1045489 - DNA, 15 bp, Homo sapiens
ggatcctcccccagc

SEQ ID NO: 1045490 - DNA, 15 bp, Homo sapiens
gatcctcccccagct

SEQ ID NO: 1045491 - DNA, 15 bp, Homo sapiens
atcctcccccagctc

SEQ ID NO: 1045492 - DNA, 15 bp, Homo sapiens
tcctcccccagctcc

SEQ ID NO: 1045493 - DNA, 15 bp, Homo sapiens
cctcccccagctccc

SEQ ID NO: 1045494 - DNA, 15 bp, Homo sapiens
ctcccccagctccca

SEQ ID NO: 1045495 - DNA, 15 bp, Homo sapiens
tcccccagctcccag

SEQ ID NO: 1045496 - DNA, 15 bp, Homo sapiens
cccccagctcccagc

SEQ ID NO: 1045497 - DNA, 15 bp, Homo sapiens
ccccagctcccagcc

SEQ ID NO: 1045498 - DNA, 15 bp, Homo sapiens
cccagctcccagcct

SEQ ID NO: 1045499 - DNA, 15 bp, Homo sapiens
ccagctcccagcctg

SEQ ID NO: 1045500 - DNA, 15 bp, Homo sapiens
cagctcccagcctgg

SEQ ID NO: 1045501 - DNA, 15 bp, Homo sapiens
agctcccagcctggc

SEQ ID NO: 1045502 - DNA, 15 bp, Homo sapiens
gctcccagcctggca

SEQ ID NO: 1045503 - DNA, 15 bp, Homo sapiens
ctcccagcctggcag

SEQ ID NO: 1045504 - DNA, 15 bp, Homo sapiens
tcccagcctggcagt

SEQ ID NO: 1045505 - DNA, 15 bp, Homo sapiens
cccagcctggcagtc

SEQ ID NO: 1045506 - DNA, 15 bp, Homo sapiens
ccagcctggcagtca

SEQ ID NO: 1045507 - DNA, 15 bp, Homo sapiens
cagcctggcagtcac

SEQ ID NO: 1045508 - DNA, 15 bp, Homo sapiens
agcctggcagtcaca

SEQ ID NO: 1045509 - DNA, 15 bp, Homo sapiens
gcctggcagtcacag

SEQ ID NO: 1045510 - DNA, 15 bp, Homo sapiens
cctggcagtcacagt

SEQ ID NO: 1045511 - DNA, 15 bp, Homo sapiens
ctggcagtcacagtg

SEQ ID NO: 1045512 - DNA, 15 bp, Homo sapiens
tggcagtcacagtgc

SEQ ID NO: 1045513 - DNA, 15 bp, Homo sapiens
ggcagtcacagtgca

SEQ ID NO: 1045514 - DNA, 15 bp, Homo sapiens
gcagtcacagtgcaa

SEQ ID NO: 1045515 - DNA, 15 bp, Homo sapiens
cagtcacagtgcaag

SEQ ID NO: 1045516 - DNA, 15 bp, Homo sapiens
agtcacagtgcaagt

SEQ ID NO: 1045517 - DNA, 15 bp, Homo sapiens
gtcacagtgcaagtc

SEQ ID NO: 1045518 - DNA, 15 bp, Homo sapiens
tcacagtgcaagtct

SEQ ID NO: 1045519 - DNA, 15 bp, Homo sapiens
cacagtgcaagtctg

SEQ ID NO: 1045520 - DNA, 15 bp, Homo sapiens
acagtgcaagtctga

SEQ ID NO: 1045521 - DNA, 15 bp, Homo sapiens
cagtgcaagtctgaa

SEQ ID NO: 1045522 - DNA, 15 bp, Homo sapiens
agtgcaagtctgaac

SEQ ID NO: 1045523 - DNA, 15 bp, Homo sapiens
gtgcaagtctgaacc

SEQ ID NO: 1045524 - DNA, 15 bp, Homo sapiens
tgcaagtctgaacct

SEQ ID NO: 1045525 - DNA, 15 bp, Homo sapiens
gcaagtctgaacctc

SEQ ID NO: 1045526 - DNA, 15 bp, Homo sapiens
caagtctgaacctct

SEQ ID NO: 1045527 - DNA, 15 bp, Homo sapiens
aagtctgaacctctt

SEQ ID NO: 1045528 - DNA, 15 bp, Homo sapiens
agtctgaacctcttg

SEQ ID NO: 1045529 - DNA, 15 bp, Homo sapiens
gtctgaacctcttgg

SEQ ID NO: 1045530 - DNA, 15 bp, Homo sapiens
tctgaacctcttggg

SEQ ID NO: 1045531 - DNA, 15 bp, Homo sapiens
ctgaacctcttgggt

SEQ ID NO: 1045532 - DNA, 15 bp, Homo sapiens
tgaacctcttgggtt

SEQ ID NO: 1045533 - DNA, 15 bp, Homo sapiens
gaacctcttgggttg

SEQ ID NO: 1045534 - DNA, 15 bp, Homo sapiens
aacctcttgggttga

SEQ ID NO: 1045535 - DNA, 15 bp, Homo sapiens
acctcttgggttgaa

SEQ ID NO: 1045536 - DNA, 15 bp, Homo sapiens
cctcttgggttgaag

SEQ ID NO: 1045537 - DNA, 15 bp, Homo sapiens
ctcttgggttgaaga

SEQ ID NO: 1045538 - DNA, 15 bp, Homo sapiens
tcttgggttgaagaa

SEQ ID NO: 1045539 - DNA, 15 bp, Homo sapiens
cttgggttgaagaag

SEQ ID NO: 1045540 - DNA, 15 bp, Homo sapiens
ttgggttgaagaagc

SEQ ID NO: 1045541 - DNA, 15 bp, Homo sapiens
tgggttgaagaagcc

SEQ ID NO: 1045542 - DNA, 15 bp, Homo sapiens
gggttgaagaagcct

SEQ ID NO: 1045543 - DNA, 15 bp, Homo sapiens
ggttgaagaagcctg

SEQ ID NO: 1045544 - DNA, 15 bp, Homo sapiens
gttgaagaagcctgc

SEQ ID NO: 1045545 - DNA, 15 bp, Homo sapiens
ttgaagaagcctgca

SEQ ID NO: 1045546 - DNA, 15 bp, Homo sapiens
tgaagaagcctgcaa

SEQ ID NO: 1045547 - DNA, 15 bp, Homo sapiens
gaagaagcctgcaat

SEQ ID NO: 1045548 - DNA, 15 bp, Homo sapiens
aagaagcctgcaatt

SEQ ID NO: 1045549 - DNA, 15 bp, Homo sapiens
agaagcctgcaattc

SEQ ID NO: 1045550 - DNA, 15 bp, Homo sapiens
gaagcctgcaattcc

SEQ ID NO: 1045551 - DNA, 15 bp, Homo sapiens
aagcctgcaattcct

SEQ ID NO: 1045552 - DNA, 15 bp, Homo sapiens
agcctgcaattcctc

SEQ ID NO: 1045553 - DNA, 15 bp, Homo sapiens
gcctgcaattcctcc

SEQ ID NO: 1045554 - DNA, 15 bp, Homo sapiens
cctgcaattcctcct

SEQ ID NO: 1045555 - DNA, 15 bp, Homo sapiens
ctgcaattcctcctg

SEQ ID NO: 1045556 - DNA, 15 bp, Homo sapiens
tgcaattcctcctgg

SEQ ID NO: 1045557 - DNA, 15 bp, Homo sapiens
gcaattcctcctggt

SEQ ID NO: 1045558 - DNA, 15 bp, Homo sapiens
caattcctcctggtc

SEQ ID NO: 1045559 - DNA, 15 bp, Homo sapiens
aattcctcctggtcc

SEQ ID NO: 1045560 - DNA, 15 bp, Homo sapiens
attcctcctggtccc

SEQ ID NO: 1045561 - DNA, 15 bp, Homo sapiens
ttcctcctggtccct

SEQ ID NO: 1045562 - DNA, 15 bp, Homo sapiens
tcctcctggtccctt

SEQ ID NO: 1045563 - DNA, 15 bp, Homo sapiens
cctcctggtcccttc

SEQ ID NO: 1045564 - DNA, 15 bp, Homo sapiens
ctcctggtcccttcc

SEQ ID NO: 1045565 - DNA, 15 bp, Homo sapiens
tcctggtcccttcct

SEQ ID NO: 1045566 - DNA, 15 bp, Homo sapiens
cctggtcccttcctc

SEQ ID NO: 1045567 - DNA, 15 bp, Homo sapiens
ctggtcccttcctcc

SEQ ID NO: 1045568 - DNA, 15 bp, Homo sapiens
tggtcccttcctcca

SEQ ID NO: 1045569 - DNA, 15 bp, Homo sapiens
ggtcccttcctccac

SEQ ID NO: 1045570 - DNA, 15 bp, Homo sapiens
gtcccttcctccacc

SEQ ID NO: 1045571 - DNA, 15 bp, Homo sapiens
tcccttcctccacct

SEQ ID NO: 1045572 - DNA, 15 bp, Homo sapiens
cccttcctccacctg

SEQ ID NO: 1045573 - DNA, 15 bp, Homo sapiens
ccttcctccacctgc

SEQ ID NO: 1045574 - DNA, 15 bp, Homo sapiens
cttcctccacctgct

SEQ ID NO: 1045575 - DNA, 15 bp, Homo sapiens
ttcctccacctgctt

SEQ ID NO: 1045576 - DNA, 15 bp, Homo sapiens
tcctccacctgcttt

SEQ ID NO: 1045577 - DNA, 15 bp, Homo sapiens
cctccacctgctttc

SEQ ID NO: 1045578 - DNA, 15 bp, Homo sapiens
ctccacctgctttct

SEQ ID NO: 1045579 - DNA, 15 bp, Homo sapiens
tccacctgctttcta

SEQ ID NO: 1045580 - DNA, 15 bp, Homo sapiens
ccacctgctttctaa

SEQ ID NO: 1045581 - DNA, 15 bp, Homo sapiens
cacctgctttctaaa

SEQ ID NO: 1045582 - DNA, 15 bp, Homo sapiens
acctgctttctaaaa

SEQ ID NO: 1045583 - DNA, 15 bp, Homo sapiens
cctgctttctaaaat

SEQ ID NO: 1045584 - DNA, 15 bp, Homo sapiens
ctgctttctaaaatt

SEQ ID NO: 1045585 - DNA, 15 bp, Homo sapiens
tgctttctaaaattt

SEQ ID NO: 1045586 - DNA, 15 bp, Homo sapiens
gctttctaaaatttc

SEQ ID NO: 1045587 - DNA, 15 bp, Homo sapiens
ctttctaaaatttct

SEQ ID NO: 1045588 - DNA, 15 bp, Homo sapiens
tttctaaaatttctg

SEQ ID NO: 1045589 - DNA, 15 bp, Homo sapiens
ttctaaaatttctgg

SEQ ID NO: 1045590 - DNA, 15 bp, Homo sapiens
tctaaaatttctggc

SEQ ID NO: 1045591 - DNA, 15 bp, Homo sapiens
ctaaaatttctggct

SEQ ID NO: 1045592 - DNA, 15 bp, Homo sapiens
taaaatttctggctc

SEQ ID NO: 1045593 - DNA, 15 bp, Homo sapiens
aaaatttctggctct

SEQ ID NO: 1045594 - DNA, 15 bp, Homo sapiens
aaatttctggctctc

SEQ ID NO: 1045595 - DNA, 15 bp, Homo sapiens
aatttctggctctca

SEQ ID NO: 1045596 - DNA, 15 bp, Homo sapiens
atttctggctctcat

SEQ ID NO: 1045597 - DNA, 15 bp, Homo sapiens
tttctggctctcatt

SEQ ID NO: 1045598 - DNA, 15 bp, Homo sapiens
ttctggctctcattc

SEQ ID NO: 1045599 - DNA, 15 bp, Homo sapiens
tctggctctcattcc

SEQ ID NO: 1045600 - DNA, 15 bp, Homo sapiens
ctggctctcattcct

SEQ ID NO: 1045601 - DNA, 15 bp, Homo sapiens
tggctctcattcctt

SEQ ID NO: 1045602 - DNA, 15 bp, Homo sapiens
ggctctcattccttg

SEQ ID NO: 1045603 - DNA, 15 bp, Homo sapiens
gctctcattccttgc

SEQ ID NO: 1045604 - DNA, 15 bp, Homo sapiens
ctctcattccttgcc

SEQ ID NO: 1045605 - DNA, 15 bp, Homo sapiens
tctcattccttgcct

SEQ ID NO: 1045606 - DNA, 15 bp, Homo sapiens
ctcattccttgcctt

SEQ ID NO: 1045607 - DNA, 15 bp, Homo sapiens
tcattccttgccttt

SEQ ID NO: 1045608 - DNA, 15 bp, Homo sapiens
cattccttgcctttg

SEQ ID NO: 1045609 - DNA, 15 bp, Homo sapiens
attccttgcctttga

SEQ ID NO: 1045610 - DNA, 15 bp, Homo sapiens
ttccttgcctttgag

SEQ ID NO: 1045611 - DNA, 15 bp, Homo sapiens
tccttgcctttgagc

SEQ ID NO: 1045612 - DNA, 15 bp, Homo sapiens
ccttgcctttgagcg

SEQ ID NO: 1045613 - DNA, 15 bp, Homo sapiens
cttgcctttgagcgg

SEQ ID NO: 1045614 - DNA, 15 bp, Homo sapiens
ttgcctttgagcggt

SEQ ID NO: 1045615 - DNA, 15 bp, Homo sapiens
tgcctttgagcggtg

SEQ ID NO: 1045616 - DNA, 15 bp, Homo sapiens
gcctttgagcggtga

SEQ ID NO: 1045617 - DNA, 15 bp, Homo sapiens
cctttgagcggtgat

SEQ ID NO: 1045618 - DNA, 15 bp, Homo sapiens
ctttgagcggtgatg

SEQ ID NO: 1045619 - DNA, 15 bp, Homo sapiens
tttgagcggtgatgt

SEQ ID NO: 1045620 - DNA, 15 bp, Homo sapiens
ttgagcggtgatgtg

SEQ ID NO: 1045621 - DNA, 15 bp, Homo sapiens
tgagcggtgatgtgt

SEQ ID NO: 1045622 - DNA, 15 bp, Homo sapiens
gagcggtgatgtgtc

SEQ ID NO: 1045623 - DNA, 15 bp, Homo sapiens
agcggtgatgtgtcc

SEQ ID NO: 1045624 - DNA, 15 bp, Homo sapiens
gcggtgatgtgtcca

SEQ ID NO: 1045625 - DNA, 15 bp, Homo sapiens
cggtgatgtgtccat

SEQ ID NO: 1045626 - DNA, 15 bp, Homo sapiens
ggtgatgtgtccatc

SEQ ID NO: 1045627 - DNA, 15 bp, Homo sapiens
gtgatgtgtccatcc

SEQ ID NO: 1045628 - DNA, 15 bp, Homo sapiens
tgatgtgtccatcct

SEQ ID NO: 1045629 - DNA, 15 bp, Homo sapiens
gatgtgtccatcctt

SEQ ID NO: 1045630 - DNA, 15 bp, Homo sapiens
atgtgtccatccttc

SEQ ID NO: 1045631 - DNA, 15 bp, Homo sapiens
tgtgtccatccttca

SEQ ID NO: 1045632 - DNA, 15 bp, Homo sapiens
gtgtccatccttcag

SEQ ID NO: 1045633 - DNA, 15 bp, Homo sapiens
tgtccatccttcagc

SEQ ID NO: 1045634 - DNA, 15 bp, Homo sapiens
gtccatccttcagcg

SEQ ID NO: 1045635 - DNA, 15 bp, Homo sapiens
tccatccttcagcgg

SEQ ID NO: 1045636 - DNA, 15 bp, Homo sapiens
ccatccttcagcggc

SEQ ID NO: 1045637 - DNA, 15 bp, Homo sapiens
catccttcagcggcc

SEQ ID NO: 1045638 - DNA, 15 bp, Homo sapiens
atccttcagcggccc

SEQ ID NO: 1045639 - DNA, 15 bp, Homo sapiens
tccttcagcggccct

SEQ ID NO: 1045640 - DNA, 15 bp, Homo sapiens
ccttcagcggccctc

SEQ ID NO: 1045641 - DNA, 15 bp, Homo sapiens
cttcagcggccctcg

SEQ ID NO: 1045642 - DNA, 15 bp, Homo sapiens
ttcagcggccctcgg

SEQ ID NO: 1045643 - DNA, 15 bp, Homo sapiens
tcagcggccctcggc

SEQ ID NO: 1045644 - DNA, 15 bp, Homo sapiens
cagcggccctcggcc

SEQ ID NO: 1045645 - DNA, 15 bp, Homo sapiens
agcggccctcggcca

SEQ ID NO: 1045646 - DNA, 15 bp, Homo sapiens
gcggccctcggccag

SEQ ID NO: 1045647 - DNA, 15 bp, Homo sapiens
cggccctcggccagc

SEQ ID NO: 1045648 - DNA, 15 bp, Homo sapiens
ggccctcggccagcc

SEQ ID NO: 1045649 - DNA, 15 bp, Homo sapiens
gccctcggccagcct

SEQ ID NO: 1045650 - DNA, 15 bp, Homo sapiens
ccctcggccagcctc

SEQ ID NO: 1045651 - DNA, 15 bp, Homo sapiens
cctcggccagcctct

SEQ ID NO: 1045652 - DNA, 15 bp, Homo sapiens
ctcggccagcctctg

SEQ ID NO: 1045653 - DNA, 15 bp, Homo sapiens
tcggccagcctctgc

SEQ ID NO: 1045654 - DNA, 15 bp, Homo sapiens
cggccagcctctgcc

SEQ ID NO: 1045655 - DNA, 15 bp, Homo sapiens
ggccagcctctgccc

SEQ ID NO: 1045656 - DNA, 15 bp, Homo sapiens
gccagcctctgccca

SEQ ID NO: 1045657 - DNA, 15 bp, Homo sapiens
ccagcctctgcccac

SEQ ID NO: 1045658 - DNA, 15 bp, Homo sapiens
cagcctctgcccacc

SEQ ID NO: 1045659 - DNA, 15 bp, Homo sapiens
agcctctgcccaccc

SEQ ID NO: 1045660 - DNA, 15 bp, Homo sapiens
gcctctgcccacccc

SEQ ID NO: 1045661 - DNA, 15 bp, Homo sapiens
cctctgcccacccca

SEQ ID NO: 1045662 - DNA, 15 bp, Homo sapiens
ctctgcccaccccag

SEQ ID NO: 1045663 - DNA, 15 bp, Homo sapiens
tctgcccaccccagt

SEQ ID NO: 1045664 - DNA, 15 bp, Homo sapiens
ctgcccaccccagtg

SEQ ID NO: 1045665 - DNA, 15 bp, Homo sapiens
tgcccaccccagtgc

SEQ ID NO: 1045666 - DNA, 15 bp, Homo sapiens
gcccaccccagtgcc

SEQ ID NO: 1045667 - DNA, 15 bp, Homo sapiens
cccaccccagtgcca

SEQ ID NO: 1045668 - DNA, 15 bp, Homo sapiens
ccaccccagtgccat

SEQ ID NO: 1045669 - DNA, 15 bp, Homo sapiens
caccccagtgccatc

SEQ ID NO: 1045670 - DNA, 15 bp, Homo sapiens
accccagtgccatca

SEQ ID NO: 1045671 - DNA, 15 bp, Homo sapiens
ccccagtgccatcac

SEQ ID NO: 1045672 - DNA, 15 bp, Homo sapiens
cccagtgccatcaca

SEQ ID NO: 1045673 - DNA, 15 bp, Homo sapiens
ccagtgccatcacat

SEQ ID NO: 1045674 - DNA, 15 bp, Homo sapiens
cagtgccatcacatg

SEQ ID NO: 1045675 - DNA, 15 bp, Homo sapiens
agtgccatcacatgg

SEQ ID NO: 1045676 - DNA, 15 bp, Homo sapiens
gtgccatcacatggg

SEQ ID NO: 1045677 - DNA, 15 bp, Homo sapiens
tgccatcacatggga

SEQ ID NO: 1045678 - DNA, 15 bp, Homo sapiens
gccatcacatgggaa

SEQ ID NO: 1045679 - DNA, 15 bp, Homo sapiens
ccatcacatgggaag

SEQ ID NO: 1045680 - DNA, 15 bp, Homo sapiens
catcacatgggaaga

SEQ ID NO: 1045681 - DNA, 15 bp, Homo sapiens
atcacatgggaagag

SEQ ID NO: 1045682 - DNA, 15 bp, Homo sapiens
tcacatgggaagaga

SEQ ID NO: 1045683 - DNA, 15 bp, Homo sapiens
cacatgggaagagat

SEQ ID NO: 1045684 - DNA, 15 bp, Homo sapiens
acatgggaagagatg

SEQ ID NO: 1045685 - DNA, 15 bp, Homo sapiens
catgggaagagatgg

SEQ ID NO: 1045686 - DNA, 15 bp, Homo sapiens
atgggaagagatggc

SEQ ID NO: 1045687 - DNA, 15 bp, Homo sapiens
tgggaagagatggcg

SEQ ID NO: 1045688 - DNA, 15 bp, Homo sapiens
gggaagagatggcgg

SEQ ID NO: 1045689 - DNA, 15 bp, Homo sapiens
ggaagagatggcgga

SEQ ID NO: 1045690 - DNA, 15 bp, Homo sapiens
gaagagatggcggat

SEQ ID NO: 1045691 - DNA, 15 bp, Homo sapiens
aagagatggcggatc

SEQ ID NO: 1045692 - DNA, 15 bp, Homo sapiens
agagatggcggatct

SEQ ID NO: 1045693 - DNA, 15 bp, Homo sapiens
gagatggcggatctg

SEQ ID NO: 1045694 - DNA, 15 bp, Homo sapiens
agatggcggatctga

SEQ ID NO: 1045695 - DNA, 15 bp, Homo sapiens
gatggcggatctgat

SEQ ID NO: 1045696 - DNA, 15 bp, Homo sapiens
atggcggatctgatc

SEQ ID NO: 1045697 - DNA, 15 bp, Homo sapiens
tggcggatctgatcc

SEQ ID NO: 1045698 - DNA, 15 bp, Homo sapiens
ggcggatctgatccc

SEQ ID NO: 1045699 - DNA, 15 bp, Homo sapiens
gcggatctgatccct

SEQ ID NO: 1045700 - DNA, 15 bp, Homo sapiens
cggatctgatccctg

SEQ ID NO: 1045701 - DNA, 15 bp, Homo sapiens
ggatctgatccctga

SEQ ID NO: 1045702 - DNA, 15 bp, Homo sapiens
gatctgatccctgac

SEQ ID NO: 1045703 - DNA, 15 bp, Homo sapiens
atctgatccctgact

SEQ ID NO: 1045704 - DNA, 15 bp, Homo sapiens
tctgatccctgactc

SEQ ID NO: 1045705 - DNA, 15 bp, Homo sapiens
ctgatccctgactca

SEQ ID NO: 1045706 - DNA, 15 bp, Homo sapiens
tgatccctgactcat

SEQ ID NO: 1045707 - DNA, 15 bp, Homo sapiens
gatccctgactcatc

SEQ ID NO: 1045708 - DNA, 15 bp, Homo sapiens
atccctgactcatcc

SEQ ID NO: 1045709 - DNA, 15 bp, Homo sapiens
tccctgactcatccc

SEQ ID NO: 1045710 - DNA, 15 bp, Homo sapiens
ccctgactcatcccc

SEQ ID NO: 1045711 - DNA, 15 bp, Homo sapiens
cctgactcatcccct

SEQ ID NO: 1045712 - DNA, 15 bp, Homo sapiens
ctgactcatcccctg

SEQ ID NO: 1045713 - DNA, 15 bp, Homo sapiens
tgactcatcccctgg

SEQ ID NO: 1045714 - DNA, 15 bp, Homo sapiens
gactcatcccctggg

SEQ ID NO: 1045715 - DNA, 15 bp, Homo sapiens
actcatcccctgggc

SEQ ID NO: 1045716 - DNA, 15 bp, Homo sapiens
ctcatcccctgggcc

SEQ ID NO: 1045717 - DNA, 15 bp, Homo sapiens
tcatcccctgggcca

SEQ ID NO: 1045718 - DNA, 15 bp, Homo sapiens
catcccctgggccag

SEQ ID NO: 1045719 - DNA, 15 bp, Homo sapiens
atcccctgggccagg

SEQ ID NO: 1045720 - DNA, 15 bp, Homo sapiens
tcccctgggccagga

SEQ ID NO: 1045721 - DNA, 15 bp, Homo sapiens
cccctgggccaggaa

SEQ ID NO: 1045722 - DNA, 15 bp, Homo sapiens
ccctgggccaggaag

SEQ ID NO: 1045723 - DNA, 15 bp, Homo sapiens
cctgggccaggaaga

SEQ ID NO: 1045724 - DNA, 15 bp, Homo sapiens
ctgggccaggaagat

SEQ ID NO: 1045725 - DNA, 15 bp, Homo sapiens
tgggccaggaagatt

SEQ ID NO: 1045726 - DNA, 15 bp, Homo sapiens
gggccaggaagattg

SEQ ID NO: 1045727 - DNA, 15 bp, Homo sapiens
ggccaggaagattgt

SEQ ID NO: 1045728 - DNA, 15 bp, Homo sapiens
gccaggaagattgtg

SEQ ID NO: 1045729 - DNA, 15 bp, Homo sapiens
ccaggaagattgtgg

SEQ ID NO: 1045730 - DNA, 15 bp, Homo sapiens
caggaagattgtgga

SEQ ID NO: 1045731 - DNA, 15 bp, Homo sapiens
aggaagattgtggaa

SEQ ID NO: 1045732 - DNA, 15 bp, Homo sapiens
ggaagattgtggaaa

SEQ ID NO: 1045733 - DNA, 15 bp, Homo sapiens
gaagattgtggaaac

SEQ ID NO: 1045734 - DNA, 15 bp, Homo sapiens
aagattgtggaaacc

SEQ ID NO: 1045735 - DNA, 15 bp, Homo sapiens
agattgtggaaaccc

SEQ ID NO: 1045736 - DNA, 15 bp, Homo sapiens
gattgtggaaaccct

SEQ ID NO: 1045737 - DNA, 15 bp, Homo sapiens
attgtggaaaccctg

SEQ ID NO: 1045738 - DNA, 15 bp, Homo sapiens
ttgtggaaaccctgg

SEQ ID NO: 1045739 - DNA, 15 bp, Homo sapiens
tgtggaaaccctggg

SEQ ID NO: 1045740 - DNA, 15 bp, Homo sapiens
gtggaaaccctgggg

SEQ ID NO: 1045741 - DNA, 15 bp, Homo sapiens
tggaaaccctggggt

SEQ ID NO: 1045742 - DNA, 15 bp, Homo sapiens
ggaaaccctggggtc

SEQ ID NO: 1045743 - DNA, 15 bp, Homo sapiens
gaaaccctggggtct

SEQ ID NO: 1045744 - DNA, 15 bp, Homo sapiens
aaaccctggggtctc

SEQ ID NO: 1045745 - DNA, 15 bp, Homo sapiens
aaccctggggtctca

SEQ ID NO: 1045746 - DNA, 15 bp, Homo sapiens
accctggggtctcag

SEQ ID NO: 1045747 - DNA, 15 bp, Homo sapiens
ccctggggtctcagg

SEQ ID NO: 1045748 - DNA, 15 bp, Homo sapiens
cctggggtctcaggg

SEQ ID NO: 1045749 - DNA, 15 bp, Homo sapiens
ctggggtctcagggc

SEQ ID NO: 1045750 - DNA, 15 bp, Homo sapiens
tggggtctcagggct

SEQ ID NO: 1045751 - DNA, 15 bp, Homo sapiens
ggggtctcagggctg

SEQ ID NO: 1045752 - DNA, 15 bp, Homo sapiens
gggtctcagggctgg

SEQ ID NO: 1045753 - DNA, 15 bp, Homo sapiens
ggtctcagggctggt

SEQ ID NO: 1045754 - DNA, 15 bp, Homo sapiens
gtctcagggctggtc

SEQ ID NO: 1045755 - DNA, 15 bp, Homo sapiens
tctcagggctggtcg

SEQ ID NO: 1045756 - DNA, 15 bp, Homo sapiens
ctcagggctggtcgg

SEQ ID NO: 1045757 - DNA, 15 bp, Homo sapiens
tcagggctggtcggg

SEQ ID NO: 1045758 - DNA, 15 bp, Homo sapiens
cagggctggtcgggt

SEQ ID NO: 1045759 - DNA, 15 bp, Homo sapiens
agggctggtcgggtg

SEQ ID NO: 1045760 - DNA, 15 bp, Homo sapiens
gggctggtcgggtgg

SEQ ID NO: 1045761 - DNA, 15 bp, Homo sapiens
ggctggtcgggtgga

SEQ ID NO: 1045762 - DNA, 15 bp, Homo sapiens
gctggtcgggtggaa

SEQ ID NO: 1045763 - DNA, 15 bp, Homo sapiens
ctggtcgggtggaaa

SEQ ID NO: 1045764 - DNA, 15 bp, Homo sapiens
tggtcgggtggaaac

SEQ ID NO: 1045765 - DNA, 15 bp, Homo sapiens
ggtcgggtggaaacg

SEQ ID NO: 1045766 - DNA, 15 bp, Homo sapiens
gtcgggtggaaacgg

SEQ ID NO: 1045767 - DNA, 15 bp, Homo sapiens
tcgggtggaaacggg

SEQ ID NO: 1045768 - DNA, 15 bp, Homo sapiens
cgggtggaaacggga

SEQ ID NO: 1045769 - DNA, 15 bp, Homo sapiens
gggtggaaacgggag

SEQ ID NO: 1045770 - DNA, 15 bp, Homo sapiens
ggtggaaacgggagg

SEQ ID NO: 1045771 - DNA, 15 bp, Homo sapiens
gtggaaacgggaggc

SEQ ID NO: 1045772 - DNA, 15 bp, Homo sapiens
tggaaacgggaggct

SEQ ID NO: 1045773 - DNA, 15 bp, Homo sapiens
ggaaacgggaggctg

SEQ ID NO: 1045774 - DNA, 15 bp, Homo sapiens
gaaacgggaggctgg

SEQ ID NO: 1045775 - DNA, 15 bp, Homo sapiens
aaacgggaggctgga

SEQ ID NO: 1045776 - DNA, 15 bp, Homo sapiens
aacgggaggctggat

SEQ ID NO: 1045777 - DNA, 15 bp, Homo sapiens
acgggaggctggatg

SEQ ID NO: 1045778 - DNA, 15 bp, Homo sapiens
cgggaggctggatgg

SEQ ID NO: 1045779 - DNA, 15 bp, Homo sapiens
gggaggctggatgga

SEQ ID NO: 1045780 - DNA, 15 bp, Homo sapiens
ggaggctggatggag

SEQ ID NO: 1045781 - DNA, 15 bp, Homo sapiens
gaggctggatggagt

SEQ ID NO: 1045782 - DNA, 15 bp, Homo sapiens
aggctggatggagtg

SEQ ID NO: 1045783 - DNA, 15 bp, Homo sapiens
ggctggatggagtgg

SEQ ID NO: 1045784 - DNA, 15 bp, Homo sapiens
gctggatggagtggc

SEQ ID NO: 1045785 - DNA, 15 bp, Homo sapiens
ctggatggagtggca

SEQ ID NO: 1045786 - DNA, 15 bp, Homo sapiens
tggatggagtggcag

SEQ ID NO: 1045787 - DNA, 15 bp, Homo sapiens
ggatggagtggcagg

SEQ ID NO: 1045788 - DNA, 15 bp, Homo sapiens
gatggagtggcaggt

SEQ ID NO: 1045789 - DNA, 15 bp, Homo sapiens
atggagtggcaggtg

SEQ ID NO: 1045790 - DNA, 15 bp, Homo sapiens
tggagtggcaggtgg

SEQ ID NO: 1045791 - DNA, 15 bp, Homo sapiens
ggagtggcaggtggg

SEQ ID NO: 1045792 - DNA, 15 bp, Homo sapiens
gagtggcaggtgggg

SEQ ID NO: 1045793 - DNA, 15 bp, Homo sapiens
agtggcaggtggggg

SEQ ID NO: 1045794 - DNA, 15 bp, Homo sapiens
gtggcaggtgggggc

SEQ ID NO: 1045795 - DNA, 15 bp, Homo sapiens
tggcaggtgggggct

SEQ ID NO: 1045796 - DNA, 15 bp, Homo sapiens
ggcaggtgggggctt

SEQ ID NO: 1045797 - DNA, 15 bp, Homo sapiens
gcaggtgggggcttt

SEQ ID NO: 1045798 - DNA, 15 bp, Homo sapiens
caggtgggggctttt

SEQ ID NO: 1045799 - DNA, 15 bp, Homo sapiens
aggtgggggcttttc

SEQ ID NO: 1045800 - DNA, 15 bp, Homo sapiens
ggtgggggcttttcc

SEQ ID NO: 1045801 - DNA, 15 bp, Homo sapiens
gtgggggcttttcct

SEQ ID NO: 1045802 - DNA, 15 bp, Homo sapiens
tgggggcttttcctg

SEQ ID NO: 1045803 - DNA, 15 bp, Homo sapiens
gggggcttttcctgt

SEQ ID NO: 1045804 - DNA, 15 bp, Homo sapiens
ggggcttttcctgtt

SEQ ID NO: 1045805 - DNA, 15 bp, Homo sapiens
gggcttttcctgttt

SEQ ID NO: 1045806 - DNA, 15 bp, Homo sapiens
ggcttttcctgtttt

SEQ ID NO: 1045807 - DNA, 15 bp, Homo sapiens
gcttttcctgttttg

SEQ ID NO: 1045808 - DNA, 15 bp, Homo sapiens
cttttcctgttttgc

SEQ ID NO: 1045809 - DNA, 15 bp, Homo sapiens
ttttcctgttttgcc

SEQ ID NO: 1045810 - DNA, 15 bp, Homo sapiens
tttcctgttttgcct

SEQ ID NO: 1045811 - DNA, 15 bp, Homo sapiens
ttcctgttttgcctc

SEQ ID NO: 1045812 - DNA, 15 bp, Homo sapiens
tcctgttttgcctct

SEQ ID NO: 1045813 - DNA, 15 bp, Homo sapiens
cctgttttgcctctc

SEQ ID NO: 1045814 - DNA, 15 bp, Homo sapiens
ctgttttgcctctcc

SEQ ID NO: 1045815 - DNA, 15 bp, Homo sapiens
tgttttgcctctccc

SEQ ID NO: 1045816 - DNA, 15 bp, Homo sapiens
gttttgcctctccct

SEQ ID NO: 1045817 - DNA, 15 bp, Homo sapiens
ttttgcctctcccta

SEQ ID NO: 1045818 - DNA, 15 bp, Homo sapiens
tttgcctctccctaa

SEQ ID NO: 1045819 - DNA, 15 bp, Homo sapiens
ttgcctctccctaac

SEQ ID NO: 1045820 - DNA, 15 bp, Homo sapiens
tgcctctccctaact

SEQ ID NO: 1045821 - DNA, 15 bp, Homo sapiens
gcctctccctaactg

SEQ ID NO: 1045822 - DNA, 15 bp, Homo sapiens
cctctccctaactgg

SEQ ID NO: 1045823 - DNA, 15 bp, Homo sapiens
ctctccctaactggg

SEQ ID NO: 1045824 - DNA, 15 bp, Homo sapiens
tctccctaactgggc

SEQ ID NO: 1045825 - DNA, 15 bp, Homo sapiens
ctccctaactgggcc

SEQ ID NO: 1045826 - DNA, 15 bp, Homo sapiens
tccctaactgggcct

SEQ ID NO: 1045827 - DNA, 15 bp, Homo sapiens
ccctaactgggcctc

SEQ ID NO: 1045828 - DNA, 15 bp, Homo sapiens
cctaactgggcctcc

SEQ ID NO: 1045829 - DNA, 15 bp, Homo sapiens
ctaactgggcctccc

SEQ ID NO: 1045830 - DNA, 15 bp, Homo sapiens
taactgggcctcccg

SEQ ID NO: 1045831 - DNA, 15 bp, Homo sapiens
gtgtgggcactgagg

SEQ ID NO: 1045832 - DNA, 15 bp, Homo sapiens
tgtgggcactgaggg

SEQ ID NO: 1045833 - DNA, 15 bp, Homo sapiens
gtgggcactgagggg

SEQ ID NO: 1045834 - DNA, 15 bp, Homo sapiens
tgggcactgaggggc

SEQ ID NO: 1045835 - DNA, 15 bp, Homo sapiens
gggcactgaggggcc

SEQ ID NO: 1045836 - DNA, 15 bp, Homo sapiens
ggcactgaggggccc

SEQ ID NO: 1045837 - DNA, 15 bp, Homo sapiens
gcactgaggggcccg

SEQ ID NO: 1045838 - DNA, 15 bp, Homo sapiens
cactgaggggcccga

SEQ ID NO: 1045839 - DNA, 15 bp, Homo sapiens
actgaggggcccgag

SEQ ID NO: 1045840 - DNA, 15 bp, Homo sapiens
ctgaggggcccgaga

SEQ ID NO: 1045841 - DNA, 15 bp, Homo sapiens
tgaggggcccgagat

SEQ ID NO: 1045842 - DNA, 15 bp, Homo sapiens
gaggggcccgagata

SEQ ID NO: 1045843 - DNA, 15 bp, Homo sapiens
aggggcccgagatat

SEQ ID NO: 1045844 - DNA, 15 bp, Homo sapiens
ggggcccgagatatg

SEQ ID NO: 1045845 - DNA, 15 bp, Homo sapiens
gggcccgagatatgt

SEQ ID NO: 1045846 - DNA, 15 bp, Homo sapiens
ggcccgagatatgtc

SEQ ID NO: 1045847 - DNA, 15 bp, Homo sapiens
gcccgagatatgtcc

SEQ ID NO: 1045848 - DNA, 15 bp, Homo sapiens
cccgagatatgtccc

SEQ ID NO: 1045849 - DNA, 15 bp, Homo sapiens
ccgagatatgtcccg

SEQ ID NO: 1045850 - DNA, 15 bp, Homo sapiens
cgagatatgtcccgg

SEQ ID NO: 1045851 - DNA, 15 bp, Homo sapiens
gagatatgtcccggc

SEQ ID NO: 1045852 - DNA, 15 bp, Homo sapiens
agatatgtcccggct

SEQ ID NO: 1045853 - DNA, 15 bp, Homo sapiens
gatatgtcccggctg

SEQ ID NO: 1045854 - DNA, 15 bp, Homo sapiens
atatgtcccggctgg

SEQ ID NO: 1045855 - DNA, 15 bp, Homo sapiens
tatgtcccggctggg

SEQ ID NO: 1045856 - DNA, 15 bp, Homo sapiens
atgtcccggctgggt

SEQ ID NO: 1045857 - DNA, 15 bp, Homo sapiens
tgtcccggctgggtt

SEQ ID NO: 1045858 - DNA, 15 bp, Homo sapiens
gtcccggctgggttg

SEQ ID NO: 1045859 - DNA, 15 bp, Homo sapiens
tcccggctgggttga

SEQ ID NO: 1045860 - DNA, 15 bp, Homo sapiens
cccggctgggttgag

SEQ ID NO: 1045861 - DNA, 15 bp, Homo sapiens
ccggctgggttgagg

SEQ ID NO: 1045862 - DNA, 15 bp, Homo sapiens
cggctgggttgaggg

SEQ ID NO: 1045863 - DNA, 15 bp, Homo sapiens
ggctgggttgagggt

SEQ ID NO: 1045864 - DNA, 15 bp, Homo sapiens
gctgggttgagggtg

SEQ ID NO: 1045865 - DNA, 15 bp, Homo sapiens
ctgggttgagggtgg

SEQ ID NO: 1045866 - DNA, 15 bp, Homo sapiens
tgggttgagggtggg

SEQ ID NO: 1045867 - DNA, 15 bp, Homo sapiens
gggttgagggtgggg

SEQ ID NO: 1045868 - DNA, 15 bp, Homo sapiens
ggttgagggtggggg

SEQ ID NO: 1045869 - DNA, 15 bp, Homo sapiens
gttgagggtgggggt

SEQ ID NO: 1045870 - DNA, 15 bp, Homo sapiens
ttgagggtgggggtc

SEQ ID NO: 1045871 - DNA, 15 bp, Homo sapiens
tgagggtgggggtca

SEQ ID NO: 1045872 - DNA, 15 bp, Homo sapiens
gagggtgggggtcag

SEQ ID NO: 1045873 - DNA, 15 bp, Homo sapiens
agggtgggggtcagg

SEQ ID NO: 1045874 - DNA, 15 bp, Homo sapiens
gggtgggggtcaggt

SEQ ID NO: 1045875 - DNA, 15 bp, Homo sapiens
ggtgggggtcaggtg

SEQ ID NO: 1045876 - DNA, 15 bp, Homo sapiens
gtgggggtcaggtgg

SEQ ID NO: 1045877 - DNA, 15 bp, Homo sapiens
tgggggtcaggtgga

SEQ ID NO: 1045878 - DNA, 15 bp, Homo sapiens
gggggtcaggtggac

SEQ ID NO: 1045879 - DNA, 15 bp, Homo sapiens
ggggtcaggtggact

SEQ ID NO: 1045880 - DNA, 15 bp, Homo sapiens
gggtcaggtggacta

SEQ ID NO: 1045881 - DNA, 15 bp, Homo sapiens
ggtcaggtggactag

SEQ ID NO: 1045882 - DNA, 15 bp, Homo sapiens
gtcaggtggactagg

SEQ ID NO: 1045883 - DNA, 15 bp, Homo sapiens
tcaggtggactaggg

SEQ ID NO: 1045884 - DNA, 15 bp, Homo sapiens
caggtggactagggg

SEQ ID NO: 1045885 - DNA, 15 bp, Homo sapiens
aggtggactaggggg

SEQ ID NO: 1045886 - DNA, 15 bp, Homo sapiens
ggtggactagggggg

SEQ ID NO: 1045887 - DNA, 15 bp, Homo sapiens
gtggactagggggga

SEQ ID NO: 1045888 - DNA, 15 bp, Homo sapiens
tggactaggggggac

SEQ ID NO: 1045889 - DNA, 15 bp, Homo sapiens
ggactaggggggacc

SEQ ID NO: 1045890 - DNA, 15 bp, Homo sapiens
gactaggggggacct

SEQ ID NO: 1045891 - DNA, 15 bp, Homo sapiens
actaggggggacctc

SEQ ID NO: 1045892 - DNA, 15 bp, Homo sapiens
ctaggggggacctcc

SEQ ID NO: 1045893 - DNA, 15 bp, Homo sapiens
taggggggacctccc

SEQ ID NO: 1045894 - DNA, 15 bp, Homo sapiens
aggggggacctccct

SEQ ID NO: 1045895 - DNA, 15 bp, Homo sapiens
ggggggacctccctg

SEQ ID NO: 1045896 - DNA, 15 bp, Homo sapiens
gggggacctccctgt

SEQ ID NO: 1045897 - DNA, 15 bp, Homo sapiens
ggggacctccctgtg

SEQ ID NO: 1045898 - DNA, 15 bp, Homo sapiens
gggacctccctgtga

SEQ ID NO: 1045899 - DNA, 15 bp, Homo sapiens
ggacctccctgtgac

SEQ ID NO: 1045900 - DNA, 15 bp, Homo sapiens
gacctccctgtgaca

SEQ ID NO: 1045901 - DNA, 15 bp, Homo sapiens
acctccctgtgacac

SEQ ID NO: 1045902 - DNA, 15 bp, Homo sapiens
cctccctgtgacact

SEQ ID NO: 1045903 - DNA, 15 bp, Homo sapiens
ctccctgtgacactg

SEQ ID NO: 1045904 - DNA, 15 bp, Homo sapiens
tccctgtgacactgg

SEQ ID NO: 1045905 - DNA, 15 bp, Homo sapiens
ccctgtgacactggg

SEQ ID NO: 1045906 - DNA, 15 bp, Homo sapiens
cctgtgacactgggg

SEQ ID NO: 1045907 - DNA, 15 bp, Homo sapiens
ctgtgacactggggc

SEQ ID NO: 1045908 - DNA, 15 bp, Homo sapiens
tgtgacactggggca

SEQ ID NO: 1045909 - DNA, 15 bp, Homo sapiens
gtgacactggggcag

SEQ ID NO: 1045910 - DNA, 15 bp, Homo sapiens
tgacactggggcagc

SEQ ID NO: 1045911 - DNA, 15 bp, Homo sapiens
gacactggggcagcg

SEQ ID NO: 1045912 - DNA, 15 bp, Homo sapiens
acactggggcagcga

SEQ ID NO: 1045913 - DNA, 15 bp, Homo sapiens
cactggggcagcgaa

SEQ ID NO: 1045914 - DNA, 15 bp, Homo sapiens
actggggcagcgaat

SEQ ID NO: 1045915 - DNA, 15 bp, Homo sapiens
ctggggcagcgaatt

SEQ ID NO: 1045916 - DNA, 15 bp, Homo sapiens
tggggcagcgaatta

SEQ ID NO: 1045917 - DNA, 15 bp, Homo sapiens
ggggcagcgaattat

SEQ ID NO: 1045918 - DNA, 15 bp, Homo sapiens
gggcagcgaattata

SEQ ID NO: 1045919 - DNA, 15 bp, Homo sapiens
ggcagcgaattatag

SEQ ID NO: 1045920 - DNA, 15 bp, Homo sapiens
gcagcgaattataga

SEQ ID NO: 1045921 - DNA, 15 bp, Homo sapiens
cagcgaattatagat

SEQ ID NO: 1045922 - DNA, 15 bp, Homo sapiens
agcgaattatagatc

SEQ ID NO: 1045923 - DNA, 15 bp, Homo sapiens
gcgaattatagatct

SEQ ID NO: 1045924 - DNA, 15 bp, Homo sapiens
cgaattatagatcta

SEQ ID NO: 1045925 - DNA, 15 bp, Homo sapiens
gaattatagatctag

SEQ ID NO: 1045926 - DNA, 15 bp, Homo sapiens
aattatagatctaga

SEQ ID NO: 1045927 - DNA, 15 bp, Homo sapiens
attatagatctagag

SEQ ID NO: 1045928 - DNA, 15 bp, Homo sapiens
ttatagatctagagg

SEQ ID NO: 1045929 - DNA, 15 bp, Homo sapiens
tatagatctagagga

SEQ ID NO: 1045930 - DNA, 15 bp, Homo sapiens
atagatctagaggag

SEQ ID NO: 1045931 - DNA, 15 bp, Homo sapiens
tagatctagaggagg

SEQ ID NO: 1045932 - DNA, 15 bp, Homo sapiens
agatctagaggagga

SEQ ID NO: 1045933 - DNA, 15 bp, Homo sapiens
gatctagaggaggaa

SEQ ID NO: 1045934 - DNA, 15 bp, Homo sapiens
atctagaggaggaaa

SEQ ID NO: 1045935 - DNA, 15 bp, Homo sapiens
tctagaggaggaaag

SEQ ID NO: 1045936 - DNA, 15 bp, Homo sapiens
ctagaggaggaaagc

SEQ ID NO: 1045937 - DNA, 15 bp, Homo sapiens
tagaggaggaaagct

SEQ ID NO: 1045938 - DNA, 15 bp, Homo sapiens
agaggaggaaagctg

SEQ ID NO: 1045939 - DNA, 15 bp, Homo sapiens
gaggaggaaagctgg

SEQ ID NO: 1045940 - DNA, 15 bp, Homo sapiens
aggaggaaagctggc

SEQ ID NO: 1045941 - DNA, 15 bp, Homo sapiens
ggaggaaagctggca

SEQ ID NO: 1045942 - DNA, 15 bp, Homo sapiens
gaggaaagctggcag

SEQ ID NO: 1045943 - DNA, 15 bp, Homo sapiens
aggaaagctggcaga

SEQ ID NO: 1045944 - DNA, 15 bp, Homo sapiens
ggaaagctggcagag

SEQ ID NO: 1045945 - DNA, 15 bp, Homo sapiens
gaaagctggcagagg

SEQ ID NO: 1045946 - DNA, 15 bp, Homo sapiens
aaagctggcagagga

SEQ ID NO: 1045947 - DNA, 15 bp, Homo sapiens
aagctggcagaggag

SEQ ID NO: 1045948 - DNA, 15 bp, Homo sapiens
agctggcagaggagt

SEQ ID NO: 1045949 - DNA, 15 bp, Homo sapiens
gctggcagaggagtc

SEQ ID NO: 1045950 - DNA, 15 bp, Homo sapiens
ctggcagaggagtcc

SEQ ID NO: 1045951 - DNA, 15 bp, Homo sapiens
tggcagaggagtcca

SEQ ID NO: 1045952 - DNA, 15 bp, Homo sapiens
ggcagaggagtccaa

SEQ ID NO: 1045953 - DNA, 15 bp, Homo sapiens
gcagaggagtccaag

SEQ ID NO: 1045954 - DNA, 15 bp, Homo sapiens
cagaggagtccaagt

SEQ ID NO: 1045955 - DNA, 15 bp, Homo sapiens
agaggagtccaagtg

SEQ ID NO: 1045956 - DNA, 15 bp, Homo sapiens
gaggagtccaagtgg

SEQ ID NO: 1045957 - DNA, 15 bp, Homo sapiens
aggagtccaagtgga

SEQ ID NO: 1045958 - DNA, 15 bp, Homo sapiens
ggagtccaagtggac

SEQ ID NO: 1045959 - DNA, 15 bp, Homo sapiens
gagtccaagtggacc

SEQ ID NO: 1045960 - DNA, 15 bp, Homo sapiens
agtccaagtggaccc

SEQ ID NO: 1045961 - DNA, 15 bp, Homo sapiens
gtccaagtggacccc

SEQ ID NO: 1045962 - DNA, 15 bp, Homo sapiens
tccaagtggacccca

SEQ ID NO: 1045963 - DNA, 15 bp, Homo sapiens
ccaagtggaccccag

SEQ ID NO: 1045964 - DNA, 15 bp, Homo sapiens
caagtggaccccagg

SEQ ID NO: 1045965 - DNA, 15 bp, Homo sapiens
aagtggaccccaggc

SEQ ID NO: 1045966 - DNA, 15 bp, Homo sapiens
agtggaccccaggcg

SEQ ID NO: 1045967 - DNA, 15 bp, Homo sapiens
gtggaccccaggcgt

SEQ ID NO: 1045968 - DNA, 15 bp, Homo sapiens
tggaccccaggcgtg

SEQ ID NO: 1045969 - DNA, 15 bp, Homo sapiens
ggaccccaggcgtgt

SEQ ID NO: 1045970 - DNA, 15 bp, Homo sapiens
gaccccaggcgtgtt

SEQ ID NO: 1045971 - DNA, 15 bp, Homo sapiens
accccaggcgtgttt

SEQ ID NO: 1045972 - DNA, 15 bp, Homo sapiens
ccccaggcgtgtttc

SEQ ID NO: 1045973 - DNA, 15 bp, Homo sapiens
cccaggcgtgtttcc

SEQ ID NO: 1045974 - DNA, 15 bp, Homo sapiens
ccaggcgtgtttcct

SEQ ID NO: 1045975 - DNA, 15 bp, Homo sapiens
caggcgtgtttccta

SEQ ID NO: 1045976 - DNA, 15 bp, Homo sapiens
aggcgtgtttcctat

SEQ ID NO: 1045977 - DNA, 15 bp, Homo sapiens
ggcgtgtttcctata

SEQ ID NO: 1045978 - DNA, 15 bp, Homo sapiens
gcgtgtttcctatag

SEQ ID NO: 1045979 - DNA, 15 bp, Homo sapiens
cgtgtttcctatagt

SEQ ID NO: 1045980 - DNA, 15 bp, Homo sapiens
gtgtttcctatagtc

SEQ ID NO: 1045981 - DNA, 15 bp, Homo sapiens
tgtttcctatagtcc

SEQ ID NO: 1045982 - DNA, 15 bp, Homo sapiens
gtttcctatagtccc

SEQ ID NO: 1045983 - DNA, 15 bp, Homo sapiens
tttcctatagtccct

SEQ ID NO: 1045984 - DNA, 15 bp, Homo sapiens
ttcctatagtccctt

SEQ ID NO: 1045985 - DNA, 15 bp, Homo sapiens
tcctatagtcccttt

SEQ ID NO: 1045986 - DNA, 15 bp, Homo sapiens
cctatagtcccttta

SEQ ID NO: 1045987 - DNA, 15 bp, Homo sapiens
ctatagtccctttaa

SEQ ID NO: 1045988 - DNA, 15 bp, Homo sapiens
tatagtccctttaag

SEQ ID NO: 1045989 - DNA, 15 bp, Homo sapiens
atagtccctttaaga

SEQ ID NO: 1045990 - DNA, 15 bp, Homo sapiens
tagtccctttaagaa

SEQ ID NO: 1045991 - DNA, 15 bp, Homo sapiens
agtccctttaagaaa

SEQ ID NO: 1045992 - DNA, 15 bp, Homo sapiens
gtccctttaagaaaa

SEQ ID NO: 1045993 - DNA, 15 bp, Homo sapiens
tccctttaagaaaac

SEQ ID NO: 1045994 - DNA, 15 bp, Homo sapiens
ccctttaagaaaacc

SEQ ID NO: 1045995 - DNA, 15 bp, Homo sapiens
cctttaagaaaacca

SEQ ID NO: 1045996 - DNA, 15 bp, Homo sapiens
ctttaagaaaaccat

SEQ ID NO: 1045997 - DNA, 15 bp, Homo sapiens
tttaagaaaaccatg

SEQ ID NO: 1045998 - DNA, 15 bp, Homo sapiens
ttaagaaaaccatgt

SEQ ID NO: 1045999 - DNA, 15 bp, Homo sapiens
taagaaaaccatgtt

SEQ ID NO: 1046000 - DNA, 15 bp, Homo sapiens
aagaaaaccatgttt

SEQ ID NO: 1046001 - DNA, 15 bp, Homo sapiens
agaaaaccatgtttt

SEQ ID NO: 1046002 - DNA, 15 bp, Homo sapiens
gaaaaccatgttttt

SEQ ID NO: 1046003 - DNA, 15 bp, Homo sapiens
aaaaccatgtttttg

SEQ ID NO: 1046004 - DNA, 15 bp, Homo sapiens
aaaccatgtttttgc

SEQ ID NO: 1046005 - DNA, 15 bp, Homo sapiens
aaccatgtttttgca

SEQ ID NO: 1046006 - DNA, 15 bp, Homo sapiens
accatgtttttgcaa

SEQ ID NO: 1046007 - DNA, 15 bp, Homo sapiens
ccatgtttttgcaac

SEQ ID NO: 1046008 - DNA, 15 bp, Homo sapiens
catgtttttgcaaca

SEQ ID NO: 1046009 - DNA, 15 bp, Homo sapiens
atgtttttgcaacat

SEQ ID NO: 1046010 - DNA, 15 bp, Homo sapiens
tgtttttgcaacatt

SEQ ID NO: 1046011 - DNA, 15 bp, Homo sapiens
gtttttgcaacattt

SEQ ID NO: 1046012 - DNA, 15 bp, Homo sapiens
tttttgcaacatttt

SEQ ID NO: 1046013 - DNA, 15 bp, Homo sapiens
ttttgcaacattttt

SEQ ID NO: 1046014 - DNA, 15 bp, Homo sapiens
tttgcaacattttta

SEQ ID NO: 1046015 - DNA, 15 bp, Homo sapiens
ttgcaacatttttaa

SEQ ID NO: 1046016 - DNA, 15 bp, Homo sapiens
tgcaacatttttaaa

SEQ ID NO: 1046017 - DNA, 15 bp, Homo sapiens
gcaacatttttaaat

SEQ ID NO: 1046018 - DNA, 15 bp, Homo sapiens
caacatttttaaatc

SEQ ID NO: 1046019 - DNA, 15 bp, Homo sapiens
aacatttttaaatca

SEQ ID NO: 1046020 - DNA, 15 bp, Homo sapiens
acatttttaaatcag

SEQ ID NO: 1046021 - DNA, 15 bp, Homo sapiens
catttttaaatcagg

SEQ ID NO: 1046022 - DNA, 15 bp, Homo sapiens
atttttaaatcagga

SEQ ID NO: 1046023 - DNA, 15 bp, Homo sapiens
tttttaaatcaggag

SEQ ID NO: 1046024 - DNA, 15 bp, Homo sapiens
ttttaaatcaggaga

SEQ ID NO: 1046025 - DNA, 15 bp, Homo sapiens
tttaaatcaggagat

SEQ ID NO: 1046026 - DNA, 15 bp, Homo sapiens
ttaaatcaggagatt

SEQ ID NO: 1046027 - DNA, 15 bp, Homo sapiens
taaatcaggagattt

SEQ ID NO: 1046028 - DNA, 15 bp, Homo sapiens
aaatcaggagatttc

SEQ ID NO: 1046029 - DNA, 15 bp, Homo sapiens
aatcaggagatttca

SEQ ID NO: 1046030 - DNA, 15 bp, Homo sapiens
atcaggagatttcat

SEQ ID NO: 1046031 - DNA, 15 bp, Homo sapiens
tcaggagatttcata

SEQ ID NO: 1046032 - DNA, 15 bp, Homo sapiens
caggagatttcatat

SEQ ID NO: 1046033 - DNA, 15 bp, Homo sapiens
aggagatttcatata

SEQ ID NO: 1046034 - DNA, 15 bp, Homo sapiens
ggagatttcatatac

SEQ ID NO: 1046035 - DNA, 15 bp, Homo sapiens
gagatttcatataca

SEQ ID NO: 1046036 - DNA, 15 bp, Homo sapiens
agatttcatatacat

SEQ ID NO: 1046037 - DNA, 15 bp, Homo sapiens
gatttcatatacatt

SEQ ID NO: 1046038 - DNA, 15 bp, Homo sapiens
atttcatatacattt

SEQ ID NO: 1046039 - DNA, 15 bp, Homo sapiens
tttcatatacatttc

SEQ ID NO: 1046040 - DNA, 15 bp, Homo sapiens
ttcatatacatttct

SEQ ID NO: 1046041 - DNA, 15 bp, Homo sapiens
tcatatacatttctt

SEQ ID NO: 1046042 - DNA, 15 bp, Homo sapiens
catatacatttcttt

SEQ ID NO: 1046043 - DNA, 15 bp, Homo sapiens
atatacatttcttta

SEQ ID NO: 1046044 - DNA, 15 bp, Homo sapiens
tatacatttctttat

SEQ ID NO: 1046045 - DNA, 15 bp, Homo sapiens
atacatttctttatt

SEQ ID NO: 1046046 - DNA, 15 bp, Homo sapiens
tacatttctttattt

SEQ ID NO: 1046047 - DNA, 15 bp, Homo sapiens
acatttctttatttc

SEQ ID NO: 1046048 - DNA, 15 bp, Homo sapiens
catttctttatttct

SEQ ID NO: 1046049 - DNA, 15 bp, Homo sapiens
atttctttatttctg

SEQ ID NO: 1046050 - DNA, 15 bp, Homo sapiens
tttctttatttctgg

SEQ ID NO: 1046051 - DNA, 15 bp, Homo sapiens
ttctttatttctggt

SEQ ID NO: 1046052 - DNA, 15 bp, Homo sapiens
tctttatttctggtt

SEQ ID NO: 1046053 - DNA, 15 bp, Homo sapiens
ctttatttctggttt

SEQ ID NO: 1046054 - DNA, 15 bp, Homo sapiens
tttatttctggtttt

SEQ ID NO: 1046055 - DNA, 15 bp, Homo sapiens
ttatttctggttttc

SEQ ID NO: 1046056 - DNA, 15 bp, Homo sapiens
tatttctggttttca

SEQ ID NO: 1046057 - DNA, 15 bp, Homo sapiens
atttctggttttcat

SEQ ID NO: 1046058 - DNA, 15 bp, Homo sapiens
tttctggttttcatg

SEQ ID NO: 1046059 - DNA, 15 bp, Homo sapiens
ttctggttttcatgg

SEQ ID NO: 1046060 - DNA, 15 bp, Homo sapiens
tctggttttcatgga

SEQ ID NO: 1046061 - DNA, 15 bp, Homo sapiens
ctggttttcatggaa

SEQ ID NO: 1046062 - DNA, 15 bp, Homo sapiens
tggttttcatggaaa

SEQ ID NO: 1046063 - DNA, 15 bp, Homo sapiens
ggttttcatggaaaa

SEQ ID NO: 1046064 - DNA, 15 bp, Homo sapiens
gttttcatggaaaac

SEQ ID NO: 1046065 - DNA, 15 bp, Homo sapiens
ttttcatggaaaact

SEQ ID NO: 1046066 - DNA, 15 bp, Homo sapiens
tttcatggaaaactt

SEQ ID NO: 1046067 - DNA, 15 bp, Homo sapiens
ttcatggaaaacttc

SEQ ID NO: 1046068 - DNA, 15 bp, Homo sapiens
tcatggaaaacttct

SEQ ID NO: 1046069 - DNA, 15 bp, Homo sapiens
catggaaaacttctg

SEQ ID NO: 1046070 - DNA, 15 bp, Homo sapiens
atggaaaacttctgt

SEQ ID NO: 1046071 - DNA, 15 bp, Homo sapiens
tggaaaacttctgtg

SEQ ID NO: 1046072 - DNA, 15 bp, Homo sapiens
ggaaaacttctgtgt

SEQ ID NO: 1046073 - DNA, 15 bp, Homo sapiens
gaaaacttctgtgtt

SEQ ID NO: 1046074 - DNA, 15 bp, Homo sapiens
aaaacttctgtgttc

SEQ ID NO: 1046075 - DNA, 15 bp, Homo sapiens
aaacttctgtgttct

SEQ ID NO: 1046076 - DNA, 15 bp, Homo sapiens
aacttctgtgttctc

SEQ ID NO: 1046077 - DNA, 15 bp, Homo sapiens
acttctgtgttctca

SEQ ID NO: 1046078 - DNA, 15 bp, Homo sapiens
cttctgtgttctcat

SEQ ID NO: 1046079 - DNA, 15 bp, Homo sapiens
ttctgtgttctcatc

SEQ ID NO: 1046080 - DNA, 15 bp, Homo sapiens
tctgtgttctcatct

SEQ ID NO: 1046081 - DNA, 15 bp, Homo sapiens
ctgtgttctcatctt

SEQ ID NO: 1046082 - DNA, 15 bp, Homo sapiens
tgtgttctcatcttc

SEQ ID NO: 1046083 - DNA, 15 bp, Homo sapiens
gtgttctcatcttcc

SEQ ID NO: 1046084 - DNA, 15 bp, Homo sapiens
tgttctcatcttccg

SEQ ID NO: 1046085 - DNA, 15 bp, Homo sapiens
gttctcatcttccga

SEQ ID NO: 1046086 - DNA, 15 bp, Homo sapiens
ttctcatcttccgac

SEQ ID NO: 1046087 - DNA, 15 bp, Homo sapiens
tctcatcttccgact

SEQ ID NO: 1046088 - DNA, 15 bp, Homo sapiens
ctcatcttccgactg

SEQ ID NO: 1046089 - DNA, 15 bp, Homo sapiens
tcatcttccgactgg

SEQ ID NO: 1046090 - DNA, 15 bp, Homo sapiens
catcttccgactggc

SEQ ID NO: 1046091 - DNA, 15 bp, Homo sapiens
atcttccgactggct

SEQ ID NO: 1046092 - DNA, 15 bp, Homo sapiens
tcttccgactggctc

SEQ ID NO: 1046093 - DNA, 15 bp, Homo sapiens
cttccgactggctca

SEQ ID NO: 1046094 - DNA, 15 bp, Homo sapiens
ttccgactggctcac

SEQ ID NO: 1046095 - DNA, 15 bp, Homo sapiens
tccgactggctcact

SEQ ID NO: 1046096 - DNA, 15 bp, Homo sapiens
ccgactggctcactc

SEQ ID NO: 1046097 - DNA, 15 bp, Homo sapiens
cgactggctcactca

SEQ ID NO: 1046098 - DNA, 15 bp, Homo sapiens
gactggctcactcag

SEQ ID NO: 1046099 - DNA, 15 bp, Homo sapiens
actggctcactcagc

SEQ ID NO: 1046100 - DNA, 15 bp, Homo sapiens
ctggctcactcagcc

SEQ ID NO: 1046101 - DNA, 15 bp, Homo sapiens
tggctcactcagcca

SEQ ID NO: 1046102 - DNA, 15 bp, Homo sapiens
ggctcactcagccac

SEQ ID NO: 1046103 - DNA, 15 bp, Homo sapiens
gctcactcagccaca

SEQ ID NO: 1046104 - DNA, 15 bp, Homo sapiens
ctcactcagccacac

SEQ ID NO: 1046105 - DNA, 15 bp, Homo sapiens
tcactcagccacaca

SEQ ID NO: 1046106 - DNA, 15 bp, Homo sapiens
cactcagccacacag

SEQ ID NO: 1046107 - DNA, 15 bp, Homo sapiens
actcagccacacagg

SEQ ID NO: 1046108 - DNA, 15 bp, Homo sapiens
ctcagccacacaggg

SEQ ID NO: 1046109 - DNA, 15 bp, Homo sapiens
tcagccacacaggga

SEQ ID NO: 1046110 - DNA, 15 bp, Homo sapiens
cagccacacagggag

SEQ ID NO: 1046111 - DNA, 15 bp, Homo sapiens
agccacacagggagg

SEQ ID NO: 1046112 - DNA, 15 bp, Homo sapiens
gccacacagggaggc

SEQ ID NO: 1046113 - DNA, 15 bp, Homo sapiens
ccacacagggaggct

SEQ ID NO: 1046114 - DNA, 15 bp, Homo sapiens
cacacagggaggctc

SEQ ID NO: 1046115 - DNA, 15 bp, Homo sapiens
acacagggaggctct

SEQ ID NO: 1046116 - DNA, 15 bp, Homo sapiens
cacagggaggctctc

SEQ ID NO: 1046117 - DNA, 15 bp, Homo sapiens
acagggaggctctct

SEQ ID NO: 1046118 - DNA, 15 bp, Homo sapiens
cagggaggctctctc

SEQ ID NO: 1046119 - DNA, 15 bp, Homo sapiens
agggaggctctctcc

SEQ ID NO: 1046120 - DNA, 15 bp, Homo sapiens
gggaggctctctccc

SEQ ID NO: 1046121 - DNA, 15 bp, Homo sapiens
ggaggctctctccca

SEQ ID NO: 1046122 - DNA, 15 bp, Homo sapiens
gaggctctctcccag

SEQ ID NO: 1046123 - DNA, 15 bp, Homo sapiens
aggctctctcccagc

SEQ ID NO: 1046124 - DNA, 15 bp, Homo sapiens
ggctctctcccagcg

SEQ ID NO: 1046125 - DNA, 15 bp, Homo sapiens
gctctctcccagcgt

SEQ ID NO: 1046126 - DNA, 15 bp, Homo sapiens
ctctctcccagcgtc

SEQ ID NO: 1046127 - DNA, 15 bp, Homo sapiens
tctctcccagcgtct

SEQ ID NO: 1046128 - DNA, 15 bp, Homo sapiens
ctctcccagcgtctc

SEQ ID NO: 1046129 - DNA, 15 bp, Homo sapiens
tctcccagcgtctcc

SEQ ID NO: 1046130 - DNA, 15 bp, Homo sapiens
ctcccagcgtctccc

SEQ ID NO: 1046131 - DNA, 15 bp, Homo sapiens
tcccagcgtctccct

SEQ ID NO: 1046132 - DNA, 15 bp, Homo sapiens
cccagcgtctcccta

SEQ ID NO: 1046133 - DNA, 15 bp, Homo sapiens
ccagcgtctccctac

SEQ ID NO: 1046134 - DNA, 15 bp, Homo sapiens
cagcgtctccctacc

SEQ ID NO: 1046135 - DNA, 15 bp, Homo sapiens
agcgtctccctacca

SEQ ID NO: 1046136 - DNA, 15 bp, Homo sapiens
gcgtctccctaccac

SEQ ID NO: 1046137 - DNA, 15 bp, Homo sapiens
cgtctccctaccaca

SEQ ID NO: 1046138 - DNA, 15 bp, Homo sapiens
gtctccctaccacag

SEQ ID NO: 1046139 - DNA, 15 bp, Homo sapiens
tctccctaccacagg

SEQ ID NO: 1046140 - DNA, 15 bp, Homo sapiens
ctccctaccacaggg

SEQ ID NO: 1046141 - DNA, 15 bp, Homo sapiens
tccctaccacagggc

SEQ ID NO: 1046142 - DNA, 15 bp, Homo sapiens
ccctaccacagggcc

SEQ ID NO: 1046143 - DNA, 15 bp, Homo sapiens
cctaccacagggcct

SEQ ID NO: 1046144 - DNA, 15 bp, Homo sapiens
ctaccacagggcctt

SEQ ID NO: 1046145 - DNA, 15 bp, Homo sapiens
taccacagggccttt

SEQ ID NO: 1046146 - DNA, 15 bp, Homo sapiens
accacagggcctttg

SEQ ID NO: 1046147 - DNA, 15 bp, Homo sapiens
ccacagggcctttgc

SEQ ID NO: 1046148 - DNA, 15 bp, Homo sapiens
cagggcctttgcaca

SEQ ID NO: 1046149 - DNA, 15 bp, Homo sapiens
agggcctttgcacag

SEQ ID NO: 1046150 - DNA, 15 bp, Homo sapiens
gggcctttgcacagg

SEQ ID NO: 1046151 - DNA, 15 bp, Homo sapiens
ggcctttgcacaggc

SEQ ID NO: 1046152 - DNA, 15 bp, Homo sapiens
ttgcacaggctgtgg

SEQ ID NO: 1046153 - DNA, 15 bp, Homo sapiens
tgcacaggctgtggt

SEQ ID NO: 1046154 - DNA, 15 bp, Homo sapiens
gcacaggctgtggtt

SEQ ID NO: 1046155 - DNA, 15 bp, Homo sapiens
cacaggctgtggttg

SEQ ID NO: 1046156 - DNA, 15 bp, Homo sapiens
acaggctgtggttgc

SEQ ID NO: 1046157 - DNA, 15 bp, Homo sapiens
caggctgtggttgct

SEQ ID NO: 1046158 - DNA, 15 bp, Homo sapiens
aggctgtggttgctg

SEQ ID NO: 1046159 - DNA, 15 bp, Homo sapiens
ggctgtggttgctgt

SEQ ID NO: 1046160 - DNA, 15 bp, Homo sapiens
gctgtggttgctgtg

SEQ ID NO: 1046161 - DNA, 15 bp, Homo sapiens
ctgtggttgctgtgg

SEQ ID NO: 1046162 - DNA, 15 bp, Homo sapiens
tgtggttgctgtgga

SEQ ID NO: 1046163 - DNA, 15 bp, Homo sapiens
gtggttgctgtggaa

SEQ ID NO: 1046164 - DNA, 15 bp, Homo sapiens
tggttgctgtggaat

SEQ ID NO: 1046165 - DNA, 15 bp, Homo sapiens
ggttgctgtggaatg

SEQ ID NO: 1046166 - DNA, 15 bp, Homo sapiens
gttgctgtggaatgt

SEQ ID NO: 1046167 - DNA, 15 bp, Homo sapiens
ttgctgtggaatgtc

SEQ ID NO: 1046168 - DNA, 15 bp, Homo sapiens
tgctgtggaatgtcc

SEQ ID NO: 1046169 - DNA, 15 bp, Homo sapiens
gctgtggaatgtccc

SEQ ID NO: 1046170 - DNA, 15 bp, Homo sapiens
ctgtggaatgtcccc

SEQ ID NO: 1046171 - DNA, 15 bp, Homo sapiens
tgtggaatgtcccct

SEQ ID NO: 1046172 - DNA, 15 bp, Homo sapiens
gtggaatgtcccctg

SEQ ID NO: 1046173 - DNA, 15 bp, Homo sapiens
tggaatgtcccctgc

SEQ ID NO: 1046174 - DNA, 15 bp, Homo sapiens
ggaatgtcccctgcg

SEQ ID NO: 1046175 - DNA, 15 bp, Homo sapiens
gaatgtcccctgcgc

SEQ ID NO: 1046176 - DNA, 15 bp, Homo sapiens
aatgtcccctgcgcc

SEQ ID NO: 1046177 - DNA, 15 bp, Homo sapiens
atgtcccctgcgcct

SEQ ID NO: 1046178 - DNA, 15 bp, Homo sapiens
tgtcccctgcgcctc

SEQ ID NO: 1046179 - DNA, 15 bp, Homo sapiens
gtcccctgcgcctca

SEQ ID NO: 1046180 - DNA, 15 bp, Homo sapiens
tcccctgcgcctcac

SEQ ID NO: 1046181 - DNA, 15 bp, Homo sapiens
cccctgcgcctcacc

SEQ ID NO: 1046182 - DNA, 15 bp, Homo sapiens
ccctgcgcctcacct

SEQ ID NO: 1046183 - DNA, 15 bp, Homo sapiens
cctgcgcctcacctt

SEQ ID NO: 1046184 - DNA, 15 bp, Homo sapiens
ctgcgcctcaccttc

SEQ ID NO: 1046185 - DNA, 15 bp, Homo sapiens
tgcgcctcaccttct

SEQ ID NO: 1046186 - DNA, 15 bp, Homo sapiens
gcgcctcaccttcta

SEQ ID NO: 1046187 - DNA, 15 bp, Homo sapiens
cgcctcaccttctag

SEQ ID NO: 1046188 - DNA, 15 bp, Homo sapiens
gcctcaccttctaga

SEQ ID NO: 1046189 - DNA, 15 bp, Homo sapiens
cctcaccttctagat

SEQ ID NO: 1046190 - DNA, 15 bp, Homo sapiens
ctcaccttctagatt

SEQ ID NO: 1046191 - DNA, 15 bp, Homo sapiens
tcaccttctagattt

SEQ ID NO: 1046192 - DNA, 15 bp, Homo sapiens
caccttctagatttg

SEQ ID NO: 1046193 - DNA, 15 bp, Homo sapiens
accttctagatttgt

SEQ ID NO: 1046194 - DNA, 15 bp, Homo sapiens
ccttctagatttgtg

SEQ ID NO: 1046195 - DNA, 15 bp, Homo sapiens
cttctagatttgtga

SEQ ID NO: 1046196 - DNA, 15 bp, Homo sapiens
ttctagatttgtgag

SEQ ID NO: 1046197 - DNA, 15 bp, Homo sapiens
tctagatttgtgagc

SEQ ID NO: 1046198 - DNA, 15 bp, Homo sapiens
ctagatttgtgagct

SEQ ID NO: 1046199 - DNA, 15 bp, Homo sapiens
tagatttgtgagctc

SEQ ID NO: 1046200 - DNA, 15 bp, Homo sapiens
agatttgtgagctcc

SEQ ID NO: 1046201 - DNA, 15 bp, Homo sapiens
gatttgtgagctccc

SEQ ID NO: 1046202 - DNA, 15 bp, Homo sapiens
atttgtgagctccct

SEQ ID NO: 1046203 - DNA, 15 bp, Homo sapiens
tttgtgagctccctt

SEQ ID NO: 1046204 - DNA, 15 bp, Homo sapiens
ttgtgagctcccttc

SEQ ID NO: 1046205 - DNA, 15 bp, Homo sapiens
tgtgagctcccttcc

SEQ ID NO: 1046206 - DNA, 15 bp, Homo sapiens
gtgagctcccttcct

SEQ ID NO: 1046207 - DNA, 15 bp, Homo sapiens
tgagctcccttcctc

SEQ ID NO: 1046208 - DNA, 15 bp, Homo sapiens
gagctcccttcctca

SEQ ID NO: 1046209 - DNA, 15 bp, Homo sapiens
agctcccttcctcac

SEQ ID NO: 1046210 - DNA, 15 bp, Homo sapiens
gctcccttcctcact

SEQ ID NO: 1046211 - DNA, 15 bp, Homo sapiens
ctcccttcctcactg

SEQ ID NO: 1046212 - DNA, 15 bp, Homo sapiens
tcccttcctcactgc

SEQ ID NO: 1046213 - DNA, 15 bp, Homo sapiens
cccttcctcactgcc

SEQ ID NO: 1046214 - DNA, 15 bp, Homo sapiens
ccttcctcactgcct

SEQ ID NO: 1046215 - DNA, 15 bp, Homo sapiens
cttcctcactgcctt

SEQ ID NO: 1046216 - DNA, 15 bp, Homo sapiens
ttcctcactgccttc

SEQ ID NO: 1046217 - DNA, 15 bp, Homo sapiens
tcctcactgccttct

SEQ ID NO: 1046218 - DNA, 15 bp, Homo sapiens
cctcactgccttctg

SEQ ID NO: 1046219 - DNA, 15 bp, Homo sapiens
ctcactgccttctgt

SEQ ID NO: 1046220 - DNA, 15 bp, Homo sapiens
tcactgccttctgtt

SEQ ID NO: 1046221 - DNA, 15 bp, Homo sapiens
cactgccttctgttt

SEQ ID NO: 1046222 - DNA, 15 bp, Homo sapiens
actgccttctgtttt

SEQ ID NO: 1046223 - DNA, 15 bp, Homo sapiens
ctgccttctgttttg

SEQ ID NO: 1046224 - DNA, 15 bp, Homo sapiens
tgccttctgttttga

SEQ ID NO: 1046225 - DNA, 15 bp, Homo sapiens
gccttctgttttgat

SEQ ID NO: 1046226 - DNA, 15 bp, Homo sapiens
ccttctgttttgatt

SEQ ID NO: 1046227 - DNA, 15 bp, Homo sapiens
cttctgttttgattt

SEQ ID NO: 1046228 - DNA, 15 bp, Homo sapiens
ttctgttttgatttt

SEQ ID NO: 1046229 - DNA, 15 bp, Homo sapiens
tctgttttgattttg

SEQ ID NO: 1046230 - DNA, 15 bp, Homo sapiens
ctgttttgattttgg

SEQ ID NO: 1046231 - DNA, 15 bp, Homo sapiens
tgttttgattttggg

SEQ ID NO: 1046232 - DNA, 15 bp, Homo sapiens
gttttgattttgggt

SEQ ID NO: 1046233 - DNA, 15 bp, Homo sapiens
ttttgattttgggtc

SEQ ID NO: 1046234 - DNA, 15 bp, Homo sapiens
tttgattttgggtct

SEQ ID NO: 1046235 - DNA, 15 bp, Homo sapiens
ttgattttgggtcta

SEQ ID NO: 1046236 - DNA, 15 bp, Homo sapiens
tgattttgggtctag

SEQ ID NO: 1046237 - DNA, 15 bp, Homo sapiens
gattttgggtctagg

SEQ ID NO: 1046238 - DNA, 15 bp, Homo sapiens
attttgggtctaggt

SEQ ID NO: 1046239 - DNA, 15 bp, Homo sapiens
ttttgggtctaggtt

SEQ ID NO: 1046240 - DNA, 15 bp, Homo sapiens
tttgggtctaggttg

SEQ ID NO: 1046241 - DNA, 15 bp, Homo sapiens
ttgggtctaggttgt

SEQ ID NO: 1046242 - DNA, 15 bp, Homo sapiens
tgggtctaggttgtg

SEQ ID NO: 1046243 - DNA, 15 bp, Homo sapiens
gggtctaggttgtgt

SEQ ID NO: 1046244 - DNA, 15 bp, Homo sapiens
ggtctaggttgtgtt

SEQ ID NO: 1046245 - DNA, 15 bp, Homo sapiens
gtctaggttgtgttt

SEQ ID NO: 1046246 - DNA, 15 bp, Homo sapiens
tctaggttgtgtttg

SEQ ID NO: 1046247 - DNA, 15 bp, Homo sapiens
ctaggttgtgtttgt

SEQ ID NO: 1046248 - DNA, 15 bp, Homo sapiens
taggttgtgtttgtg

SEQ ID NO: 1046249 - DNA, 15 bp, Homo sapiens
aggttgtgtttgtgt

SEQ ID NO: 1046250 - DNA, 15 bp, Homo sapiens
ggttgtgtttgtgtg

SEQ ID NO: 1046251 - DNA, 15 bp, Homo sapiens
gttgtgtttgtgtgt

SEQ ID NO: 1046252 - DNA, 15 bp, Homo sapiens
ttgtgtttgtgtgtg

SEQ ID NO: 1046253 - DNA, 15 bp, Homo sapiens
tgtgtttgtgtgtgt

SEQ ID NO: 1046254 - DNA, 15 bp, Homo sapiens
gtgtttgtgtgtgtt

SEQ ID NO: 1046255 - DNA, 15 bp, Homo sapiens
tgtttgtgtgtgttc

SEQ ID NO: 1046256 - DNA, 15 bp, Homo sapiens
gtttgtgtgtgttct

SEQ ID NO: 1046257 - DNA, 15 bp, Homo sapiens
tttgtgtgtgttctt

SEQ ID NO: 1046258 - DNA, 15 bp, Homo sapiens
ttgtgtgtgttcttt

SEQ ID NO: 1046259 - DNA, 15 bp, Homo sapiens
tgtgtgtgttctttt

SEQ ID NO: 1046260 - DNA, 15 bp, Homo sapiens
gtgtgtgttcttttt

SEQ ID NO: 1046261 - DNA, 15 bp, Homo sapiens
tgtgtgttctttttc

SEQ ID NO: 1046262 - DNA, 15 bp, Homo sapiens
gtgtgttctttttct

SEQ ID NO: 1046263 - DNA, 15 bp, Homo sapiens
tgtgttctttttctt

SEQ ID NO: 1046264 - DNA, 15 bp, Homo sapiens
gtgttctttttcttt

SEQ ID NO: 1046265 - DNA, 15 bp, Homo sapiens
tgttctttttctttc

SEQ ID NO: 1046266 - DNA, 15 bp, Homo sapiens
gttctttttctttct

SEQ ID NO: 1046267 - DNA, 15 bp, Homo sapiens
tctttcttttctttt

SEQ ID NO: 1046268 - DNA, 15 bp, Homo sapiens
tttttttttttttta

SEQ ID NO: 1046269 - DNA, 15 bp, Homo sapiens
tttttttttttttat

SEQ ID NO: 1046270 - DNA, 15 bp, Homo sapiens
ttttttttttttatg

SEQ ID NO: 1046271 - DNA, 15 bp, Homo sapiens
tttttttttttatga

SEQ ID NO: 1046272 - DNA, 15 bp, Homo sapiens
ttttttttttatgag

SEQ ID NO: 1046273 - DNA, 15 bp, Homo sapiens
tttttttttatgaga

SEQ ID NO: 1046274 - DNA, 15 bp, Homo sapiens
ttttttttatgagac

SEQ ID NO: 1046275 - DNA, 15 bp, Homo sapiens
tttttttatgagaca

SEQ ID NO: 1046276 - DNA, 15 bp, Homo sapiens
ttttttatgagacag

SEQ ID NO: 1046277 - DNA, 15 bp, Homo sapiens
tttttatgagacagg

SEQ ID NO: 1046278 - DNA, 15 bp, Homo sapiens
ttttatgagacaggg

SEQ ID NO: 1046279 - DNA, 15 bp, Homo sapiens
tttatgagacagggt

SEQ ID NO: 1046280 - DNA, 15 bp, Homo sapiens
ttatgagacagggtg

SEQ ID NO: 1046281 - DNA, 15 bp, Homo sapiens
tatgagacagggtgt

SEQ ID NO: 1046282 - DNA, 15 bp, Homo sapiens
atgagacagggtgtt

SEQ ID NO: 1046283 - DNA, 15 bp, Homo sapiens
tgagacagggtgttg

SEQ ID NO: 1046284 - DNA, 15 bp, Homo sapiens
gagacagggtgttgc

SEQ ID NO: 1046285 - DNA, 15 bp, Homo sapiens
agacagggtgttgct

SEQ ID NO: 1046286 - DNA, 15 bp, Homo sapiens
gacagggtgttgctt

SEQ ID NO: 1046287 - DNA, 15 bp, Homo sapiens
acagggtgttgcttg

SEQ ID NO: 1046288 - DNA, 15 bp, Homo sapiens
cagggtgttgcttgg

SEQ ID NO: 1046289 - DNA, 15 bp, Homo sapiens
agggtgttgcttgga

SEQ ID NO: 1046290 - DNA, 15 bp, Homo sapiens
gggtgttgcttggac

SEQ ID NO: 1046291 - DNA, 15 bp, Homo sapiens
ggtgttgcttggaca

SEQ ID NO: 1046292 - DNA, 15 bp, Homo sapiens
gtgttgcttggacac

SEQ ID NO: 1046293 - DNA, 15 bp, Homo sapiens
tgttgcttggacacc

SEQ ID NO: 1046294 - DNA, 15 bp, Homo sapiens
gttgcttggacaccc

SEQ ID NO: 1046295 - DNA, 15 bp, Homo sapiens
ttgcttggacaccca

SEQ ID NO: 1046296 - DNA, 15 bp, Homo sapiens
tgcttggacacccag

SEQ ID NO: 1046297 - DNA, 15 bp, Homo sapiens
gcttggacacccagg

SEQ ID NO: 1046298 - DNA, 15 bp, Homo sapiens
cttggacacccaggc

SEQ ID NO: 1046299 - DNA, 15 bp, Homo sapiens
ttggacacccaggct

SEQ ID NO: 1046300 - DNA, 15 bp, Homo sapiens
tggacacccaggctg

SEQ ID NO: 1046301 - DNA, 15 bp, Homo sapiens
ggacacccaggctgg

SEQ ID NO: 1046302 - DNA, 15 bp, Homo sapiens
gacacccaggctgga

SEQ ID NO: 1046303 - DNA, 15 bp, Homo sapiens
acacccaggctggag

SEQ ID NO: 1046304 - DNA, 15 bp, Homo sapiens
caggctggagtacaa

SEQ ID NO: 1046305 - DNA, 15 bp, Homo sapiens
aggctggagtacaaa

SEQ ID NO: 1046306 - DNA, 15 bp, Homo sapiens
ggctggagtacaaat

SEQ ID NO: 1046307 - DNA, 15 bp, Homo sapiens
gctggagtacaaatg

SEQ ID NO: 1046308 - DNA, 15 bp, Homo sapiens
ctggagtacaaatgg

SEQ ID NO: 1046309 - DNA, 15 bp, Homo sapiens
tggagtacaaatggc

SEQ ID NO: 1046310 - DNA, 15 bp, Homo sapiens
ggagtacaaatggcg

SEQ ID NO: 1046311 - DNA, 15 bp, Homo sapiens
gagtacaaatggcgc

SEQ ID NO: 1046312 - DNA, 15 bp, Homo sapiens
agtacaaatggcgcc

SEQ ID NO: 1046313 - DNA, 15 bp, Homo sapiens
gtacaaatggcgcca

SEQ ID NO: 1046314 - DNA, 15 bp, Homo sapiens
tacaaatggcgccat

SEQ ID NO: 1046315 - DNA, 15 bp, Homo sapiens
acaaatggcgccatt

SEQ ID NO: 1046316 - DNA, 15 bp, Homo sapiens
caaatggcgccatta

SEQ ID NO: 1046317 - DNA, 15 bp, Homo sapiens
aaatggcgccattac

SEQ ID NO: 1046318 - DNA, 15 bp, Homo sapiens
aatggcgccattaca

SEQ ID NO: 1046319 - DNA, 15 bp, Homo sapiens
atggcgccattacag

SEQ ID NO: 1046320 - DNA, 15 bp, Homo sapiens
tggcgccattacagc

SEQ ID NO: 1046321 - DNA, 15 bp, Homo sapiens
ggcgccattacagct

SEQ ID NO: 1046322 - DNA, 15 bp, Homo sapiens
gcgccattacagctc

SEQ ID NO: 1046323 - DNA, 15 bp, Homo sapiens
cgccattacagctca

SEQ ID NO: 1046324 - DNA, 15 bp, Homo sapiens
gccattacagctcac

SEQ ID NO: 1046325 - DNA, 15 bp, Homo sapiens
ccattacagctcact

SEQ ID NO: 1046326 - DNA, 15 bp, Homo sapiens
cattacagctcactg

SEQ ID NO: 1046327 - DNA, 15 bp, Homo sapiens
attacagctcactgc

SEQ ID NO: 1046328 - DNA, 15 bp, Homo sapiens
ttacagctcactgca

SEQ ID NO: 1046329 - DNA, 15 bp, Homo sapiens
tacagctcactgcag

SEQ ID NO: 1046330 - DNA, 15 bp, Homo sapiens
tgcagcctcgacctc

SEQ ID NO: 1046331 - DNA, 15 bp, Homo sapiens
gcagcctcgacctcc

SEQ ID NO: 1046332 - DNA, 15 bp, Homo sapiens
cagcctcgacctcct

SEQ ID NO: 1046333 - DNA, 15 bp, Homo sapiens
agcctcgacctcctt

SEQ ID NO: 1046334 - DNA, 15 bp, Homo sapiens
gcctcgacctccttg

SEQ ID NO: 1046335 - DNA, 15 bp, Homo sapiens
cctcgacctccttgg

SEQ ID NO: 1046336 - DNA, 15 bp, Homo sapiens
ctcgacctccttggc

SEQ ID NO: 1046337 - DNA, 15 bp, Homo sapiens
tcgacctccttggct

SEQ ID NO: 1046338 - DNA, 15 bp, Homo sapiens
cgacctccttggctc

SEQ ID NO: 1046339 - DNA, 15 bp, Homo sapiens
gacctccttggctca

SEQ ID NO: 1046340 - DNA, 15 bp, Homo sapiens
acctccttggctcaa

SEQ ID NO: 1046341 - DNA, 15 bp, Homo sapiens
cctccttggctcaag

SEQ ID NO: 1046342 - DNA, 15 bp, Homo sapiens
ctccttggctcaagt

SEQ ID NO: 1046343 - DNA, 15 bp, Homo sapiens
tccttggctcaagtg

SEQ ID NO: 1046344 - DNA, 15 bp, Homo sapiens
ccttggctcaagtga

SEQ ID NO: 1046345 - DNA, 15 bp, Homo sapiens
cttggctcaagtgac

SEQ ID NO: 1046346 - DNA, 15 bp, Homo sapiens
ttggctcaagtgacc

SEQ ID NO: 1046347 - DNA, 15 bp, Homo sapiens
tggctcaagtgaccc

SEQ ID NO: 1046348 - DNA, 15 bp, Homo sapiens
ggctcaagtgaccct

SEQ ID NO: 1046349 - DNA, 15 bp, Homo sapiens
gctcaagtgaccctc

SEQ ID NO: 1046350 - DNA, 15 bp, Homo sapiens
aagtgaccctcccat

SEQ ID NO: 1046351 - DNA, 15 bp, Homo sapiens
agtgaccctcccatc

SEQ ID NO: 1046352 - DNA, 15 bp, Homo sapiens
gtgaccctcccatct

SEQ ID NO: 1046353 - DNA, 15 bp, Homo sapiens
tgaccctcccatctc

SEQ ID NO: 1046354 - DNA, 15 bp, Homo sapiens
gaccctcccatctca

SEQ ID NO: 1046355 - DNA, 15 bp, Homo sapiens
accctcccatctcag

SEQ ID NO: 1046356 - DNA, 15 bp, Homo sapiens
ccctcccatctcagc

SEQ ID NO: 1046357 - DNA, 15 bp, Homo sapiens
cctcccatctcagcc

SEQ ID NO: 1046358 - DNA, 15 bp, Homo sapiens
ctcccatctcagcct

SEQ ID NO: 1046359 - DNA, 15 bp, Homo sapiens
tcccatctcagcctc

SEQ ID NO: 1046360 - DNA, 15 bp, Homo sapiens
cccatctcagcctcc

SEQ ID NO: 1046361 - DNA, 15 bp, Homo sapiens
ccatctcagcctccc

SEQ ID NO: 1046362 - DNA, 15 bp, Homo sapiens
catctcagcctccca

SEQ ID NO: 1046363 - DNA, 15 bp, Homo sapiens
atctcagcctcccaa

SEQ ID NO: 1046364 - DNA, 15 bp, Homo sapiens
tctcagcctcccaag

SEQ ID NO: 1046365 - DNA, 15 bp, Homo sapiens
actacaggtgtgcag

SEQ ID NO: 1046366 - DNA, 15 bp, Homo sapiens
ctacaggtgtgcagc

SEQ ID NO: 1046367 - DNA, 15 bp, Homo sapiens
tacaggtgtgcagca

SEQ ID NO: 1046368 - DNA, 15 bp, Homo sapiens
acaggtgtgcagcac

SEQ ID NO: 1046369 - DNA, 15 bp, Homo sapiens
caggtgtgcagcacc

SEQ ID NO: 1046370 - DNA, 15 bp, Homo sapiens
aggtgtgcagcacca

SEQ ID NO: 1046371 - DNA, 15 bp, Homo sapiens
ggtgtgcagcaccat

SEQ ID NO: 1046372 - DNA, 15 bp, Homo sapiens
gtgtgcagcaccatg

SEQ ID NO: 1046373 - DNA, 15 bp, Homo sapiens
tgtgcagcaccatgc

SEQ ID NO: 1046374 - DNA, 15 bp, Homo sapiens
gtgcagcaccatgcc

SEQ ID NO: 1046375 - DNA, 15 bp, Homo sapiens
tgcagcaccatgccc

SEQ ID NO: 1046376 - DNA, 15 bp, Homo sapiens
gcagcaccatgccca

SEQ ID NO: 1046377 - DNA, 15 bp, Homo sapiens
cagcaccatgcccag

SEQ ID NO: 1046378 - DNA, 15 bp, Homo sapiens
agcaccatgcccagc

SEQ ID NO: 1046379 - DNA, 15 bp, Homo sapiens
gcaccatgcccagct

SEQ ID NO: 1046380 - DNA, 15 bp, Homo sapiens
accatgcccagctac

SEQ ID NO: 1046381 - DNA, 15 bp, Homo sapiens
ccatgcccagctact

SEQ ID NO: 1046382 - DNA, 15 bp, Homo sapiens
catgcccagctactt

SEQ ID NO: 1046383 - DNA, 15 bp, Homo sapiens
atgcccagctacttt

SEQ ID NO: 1046384 - DNA, 15 bp, Homo sapiens
tgcccagctactttt

SEQ ID NO: 1046385 - DNA, 15 bp, Homo sapiens
gcccagctacttttt

SEQ ID NO: 1046386 - DNA, 15 bp, Homo sapiens
cccagctacttttta

SEQ ID NO: 1046387 - DNA, 15 bp, Homo sapiens
ccagctactttttaa

SEQ ID NO: 1046388 - DNA, 15 bp, Homo sapiens
cagctactttttaaa

SEQ ID NO: 1046389 - DNA, 15 bp, Homo sapiens
agctactttttaaaa

SEQ ID NO: 1046390 - DNA, 15 bp, Homo sapiens
gctactttttaaaaa

SEQ ID NO: 1046391 - DNA, 15 bp, Homo sapiens
ctactttttaaaaaa

SEQ ID NO: 1046392 - DNA, 15 bp, Homo sapiens
tactttttaaaaaat

SEQ ID NO: 1046393 - DNA, 15 bp, Homo sapiens
actttttaaaaaatt

SEQ ID NO: 1046394 - DNA, 15 bp, Homo sapiens
ctttttaaaaaatta

SEQ ID NO: 1046395 - DNA, 15 bp, Homo sapiens
tttttaaaaaattat

SEQ ID NO: 1046396 - DNA, 15 bp, Homo sapiens
ttttaaaaaattatt

SEQ ID NO: 1046397 - DNA, 15 bp, Homo sapiens
tttaaaaaattattt

SEQ ID NO: 1046398 - DNA, 15 bp, Homo sapiens
ttaaaaaattatttt

SEQ ID NO: 1046399 - DNA, 15 bp, Homo sapiens
taaaaaattattttt

SEQ ID NO: 1046400 - DNA, 15 bp, Homo sapiens
aaaaaattatttttt

SEQ ID NO: 1046401 - DNA, 15 bp, Homo sapiens
aaaaattatttttta

SEQ ID NO: 1046402 - DNA, 15 bp, Homo sapiens
aaaattattttttat

SEQ ID NO: 1046403 - DNA, 15 bp, Homo sapiens
aaattattttttata

SEQ ID NO: 1046404 - DNA, 15 bp, Homo sapiens
aattattttttatag

SEQ ID NO: 1046405 - DNA, 15 bp, Homo sapiens
attattttttatagg

SEQ ID NO: 1046406 - DNA, 15 bp, Homo sapiens
ttattttttataggc

SEQ ID NO: 1046407 - DNA, 15 bp, Homo sapiens
tattttttataggcc

SEQ ID NO: 1046408 - DNA, 15 bp, Homo sapiens
attttttataggcca

SEQ ID NO: 1046409 - DNA, 15 bp, Homo sapiens
ttttttataggccag

SEQ ID NO: 1046410 - DNA, 15 bp, Homo sapiens
tttttataggccagg

SEQ ID NO: 1046411 - DNA, 15 bp, Homo sapiens
ttttataggccaggc

SEQ ID NO: 1046412 - DNA, 15 bp, Homo sapiens
tttataggccaggca

SEQ ID NO: 1046413 - DNA, 15 bp, Homo sapiens
ttataggccaggcac

SEQ ID NO: 1046414 - DNA, 15 bp, Homo sapiens
tataggccaggcaca

SEQ ID NO: 1046415 - DNA, 15 bp, Homo sapiens
ataggccaggcacag

SEQ ID NO: 1046416 - DNA, 15 bp, Homo sapiens
taggccaggcacagt

SEQ ID NO: 1046417 - DNA, 15 bp, Homo sapiens
aggccaggcacagtg

SEQ ID NO: 1046418 - DNA, 15 bp, Homo sapiens
ggccaggcacagtgg

SEQ ID NO: 1046419 - DNA, 15 bp, Homo sapiens
gccaggcacagtggc

SEQ ID NO: 1046420 - DNA, 15 bp, Homo sapiens
ccaggcacagtggct

SEQ ID NO: 1046421 - DNA, 15 bp, Homo sapiens
caggcacagtggctc

SEQ ID NO: 1046422 - DNA, 15 bp, Homo sapiens
aggcacagtggctca

SEQ ID NO: 1046423 - DNA, 15 bp, Homo sapiens
atgcctgtaatcctg

SEQ ID NO: 1046424 - DNA, 15 bp, Homo sapiens
tgcctgtaatcctgg

SEQ ID NO: 1046425 - DNA, 15 bp, Homo sapiens
gcctgtaatcctggc

SEQ ID NO: 1046426 - DNA, 15 bp, Homo sapiens
cctgtaatcctggca

SEQ ID NO: 1046427 - DNA, 15 bp, Homo sapiens
ctgtaatcctggcac

SEQ ID NO: 1046428 - DNA, 15 bp, Homo sapiens
tgtaatcctggcact

SEQ ID NO: 1046429 - DNA, 15 bp, Homo sapiens
gtaatcctggcactt

SEQ ID NO: 1046430 - DNA, 15 bp, Homo sapiens
taatcctggcacttt

SEQ ID NO: 1046431 - DNA, 15 bp, Homo sapiens
aatcctggcactttg

SEQ ID NO: 1046432 - DNA, 15 bp, Homo sapiens
atcctggcactttgg

SEQ ID NO: 1046433 - DNA, 15 bp, Homo sapiens
tcctggcactttggg

SEQ ID NO: 1046434 - DNA, 15 bp, Homo sapiens
cctggcactttggga

SEQ ID NO: 1046435 - DNA, 15 bp, Homo sapiens
ctggcactttgggag

SEQ ID NO: 1046436 - DNA, 15 bp, Homo sapiens
tggcactttgggagg

SEQ ID NO: 1046437 - DNA, 15 bp, Homo sapiens
ggcactttgggaggc

SEQ ID NO: 1046438 - DNA, 15 bp, Homo sapiens
ttgggaggccaaggc

SEQ ID NO: 1046439 - DNA, 15 bp, Homo sapiens
tgggaggccaaggca

SEQ ID NO: 1046440 - DNA, 15 bp, Homo sapiens
gggaggccaaggcag

SEQ ID NO: 1046441 - DNA, 15 bp, Homo sapiens
ggaggccaaggcaga

SEQ ID NO: 1046442 - DNA, 15 bp, Homo sapiens
gaggccaaggcagac

SEQ ID NO: 1046443 - DNA, 15 bp, Homo sapiens
aggccaaggcagacg

SEQ ID NO: 1046444 - DNA, 15 bp, Homo sapiens
ggccaaggcagacgg

SEQ ID NO: 1046445 - DNA, 15 bp, Homo sapiens
gccaaggcagacgga

SEQ ID NO: 1046446 - DNA, 15 bp, Homo sapiens
ccaaggcagacggat

SEQ ID NO: 1046447 - DNA, 15 bp, Homo sapiens
caaggcagacggatc

SEQ ID NO: 1046448 - DNA, 15 bp, Homo sapiens
aaggcagacggatca

SEQ ID NO: 1046449 - DNA, 15 bp, Homo sapiens
aggcagacggatcac

SEQ ID NO: 1046450 - DNA, 15 bp, Homo sapiens
ggcagacggatcact

SEQ ID NO: 1046451 - DNA, 15 bp, Homo sapiens
gcagacggatcactt

SEQ ID NO: 1046452 - DNA, 15 bp, Homo sapiens
cagacggatcacttg

SEQ ID NO: 1046453 - DNA, 15 bp, Homo sapiens
agacggatcacttga

SEQ ID NO: 1046454 - DNA, 15 bp, Homo sapiens
gacggatcacttgag

SEQ ID NO: 1046455 - DNA, 15 bp, Homo sapiens
acggatcacttgagg

SEQ ID NO: 1046456 - DNA, 15 bp, Homo sapiens
cggatcacttgaggt

SEQ ID NO: 1046457 - DNA, 15 bp, Homo sapiens
ggatcacttgaggtc

SEQ ID NO: 1046458 - DNA, 15 bp, Homo sapiens
gatcacttgaggtca

SEQ ID NO: 1046459 - DNA, 15 bp, Homo sapiens
atcacttgaggtcag

SEQ ID NO: 1046460 - DNA, 15 bp, Homo sapiens
tcacttgaggtcagg

SEQ ID NO: 1046461 - DNA, 15 bp, Homo sapiens
cacttgaggtcagga

SEQ ID NO: 1046462 - DNA, 15 bp, Homo sapiens
acttgaggtcaggag

SEQ ID NO: 1046463 - DNA, 15 bp, Homo sapiens
cttgaggtcaggaga

SEQ ID NO: 1046464 - DNA, 15 bp, Homo sapiens
ttgaggtcaggagac

SEQ ID NO: 1046465 - DNA, 15 bp, Homo sapiens
tgaggtcaggagacc

SEQ ID NO: 1046466 - DNA, 15 bp, Homo sapiens
gaggtcaggagacca

SEQ ID NO: 1046467 - DNA, 15 bp, Homo sapiens
aggtcaggagaccag

SEQ ID NO: 1046468 - DNA, 15 bp, Homo sapiens
ggtcaggagaccagc

SEQ ID NO: 1046469 - DNA, 15 bp, Homo sapiens
gtcaggagaccagcc

SEQ ID NO: 1046470 - DNA, 15 bp, Homo sapiens
tcaggagaccagcct

SEQ ID NO: 1046471 - DNA, 15 bp, Homo sapiens
caggagaccagcctg

SEQ ID NO: 1046472 - DNA, 15 bp, Homo sapiens
aggagaccagcctgg

SEQ ID NO: 1046473 - DNA, 15 bp, Homo sapiens
ggagaccagcctggc

SEQ ID NO: 1046474 - DNA, 15 bp, Homo sapiens
ccagcctggccaacg

SEQ ID NO: 1046475 - DNA, 15 bp, Homo sapiens
cagcctggccaacgt

SEQ ID NO: 1046476 - DNA, 15 bp, Homo sapiens
agcctggccaacgtg

SEQ ID NO: 1046477 - DNA, 15 bp, Homo sapiens
gcctggccaacgtgg

SEQ ID NO: 1046478 - DNA, 15 bp, Homo sapiens
cctggccaacgtggt

SEQ ID NO: 1046479 - DNA, 15 bp, Homo sapiens
ctggccaacgtggtg

SEQ ID NO: 1046480 - DNA, 15 bp, Homo sapiens
tggccaacgtggtga

SEQ ID NO: 1046481 - DNA, 15 bp, Homo sapiens
ggccaacgtggtgaa

SEQ ID NO: 1046482 - DNA, 15 bp, Homo sapiens
gccaacgtggtgaaa

SEQ ID NO: 1046483 - DNA, 15 bp, Homo sapiens
ccaacgtggtgaaac

SEQ ID NO: 1046484 - DNA, 15 bp, Homo sapiens
caacgtggtgaaacc

SEQ ID NO: 1046485 - DNA, 15 bp, Homo sapiens
aacgtggtgaaaccc

SEQ ID NO: 1046486 - DNA, 15 bp, Homo sapiens
acgtggtgaaacccc

SEQ ID NO: 1046487 - DNA, 15 bp, Homo sapiens
cgtggtgaaacccca

SEQ ID NO: 1046488 - DNA, 15 bp, Homo sapiens
gtggtgaaaccccac

SEQ ID NO: 1046489 - DNA, 15 bp, Homo sapiens
tggtgaaaccccact

SEQ ID NO: 1046490 - DNA, 15 bp, Homo sapiens
ggtgaaaccccactt

SEQ ID NO: 1046491 - DNA, 15 bp, Homo sapiens
gtgaaaccccacttc

SEQ ID NO: 1046492 - DNA, 15 bp, Homo sapiens
tgaaaccccacttct

SEQ ID NO: 1046493 - DNA, 15 bp, Homo sapiens
gaaaccccacttcta

SEQ ID NO: 1046494 - DNA, 15 bp, Homo sapiens
aaaccccacttctac

SEQ ID NO: 1046495 - DNA, 15 bp, Homo sapiens
aaccccacttctact

SEQ ID NO: 1046496 - DNA, 15 bp, Homo sapiens
accccacttctacta

SEQ ID NO: 1046497 - DNA, 15 bp, Homo sapiens
ccccacttctactaa

SEQ ID NO: 1046498 - DNA, 15 bp, Homo sapiens
cccacttctactaaa

SEQ ID NO: 1046499 - DNA, 15 bp, Homo sapiens
ccacttctactaaaa

SEQ ID NO: 1046500 - DNA, 15 bp, Homo sapiens
cacttctactaaaac

SEQ ID NO: 1046501 - DNA, 15 bp, Homo sapiens
acttctactaaaaca

SEQ ID NO: 1046502 - DNA, 15 bp, Homo sapiens
cttctactaaaacaa

SEQ ID NO: 1046503 - DNA, 15 bp, Homo sapiens
ttctactaaaacaaa

SEQ ID NO: 1046504 - DNA, 15 bp, Homo sapiens
tctactaaaacaaaa

SEQ ID NO: 1046505 - DNA, 15 bp, Homo sapiens
ctactaaaacaaaaa

SEQ ID NO: 1046506 - DNA, 15 bp, Homo sapiens
tactaaaacaaaaac

SEQ ID NO: 1046507 - DNA, 15 bp, Homo sapiens
actaaaacaaaaaca

SEQ ID NO: 1046508 - DNA, 15 bp, Homo sapiens
ctaaaacaaaaacaa

SEQ ID NO: 1046509 - DNA, 15 bp, Homo sapiens
taaaacaaaaacaaa

SEQ ID NO: 1046510 - DNA, 15 bp, Homo sapiens
aaaacaaaaacaaaa

SEQ ID NO: 1046511 - DNA, 15 bp, Homo sapiens
aaacaaaaacaaaaa

SEQ ID NO: 1046512 - DNA, 15 bp, Homo sapiens
aacaaaaacaaaaac

SEQ ID NO: 1046513 - DNA, 15 bp, Homo sapiens
acaaaaacaaaaact

SEQ ID NO: 1046514 - DNA, 15 bp, Homo sapiens
caaaaacaaaaacta

SEQ ID NO: 1046515 - DNA, 15 bp, Homo sapiens
aaaaacaaaaactaa

SEQ ID NO: 1046516 - DNA, 15 bp, Homo sapiens
aaaacaaaaactaaa

SEQ ID NO: 1046517 - DNA, 15 bp, Homo sapiens
aaacaaaaactaaaa

SEQ ID NO: 1046518 - DNA, 15 bp, Homo sapiens
aacaaaaactaaaac

SEQ ID NO: 1046519 - DNA, 15 bp, Homo sapiens
acaaaaactaaaaca

SEQ ID NO: 1046520 - DNA, 15 bp, Homo sapiens
caaaaactaaaacaa

SEQ ID NO: 1046521 - DNA, 15 bp, Homo sapiens
aaaaactaaaacaaa

SEQ ID NO: 1046522 - DNA, 15 bp, Homo sapiens
aaaactaaaacaaaa

SEQ ID NO: 1046523 - DNA, 15 bp, Homo sapiens
aaactaaaacaaaaa

SEQ ID NO: 1046524 - DNA, 15 bp, Homo sapiens
aactaaaacaaaaat

SEQ ID NO: 1046525 - DNA, 15 bp, Homo sapiens
actaaaacaaaaatt

SEQ ID NO: 1046526 - DNA, 15 bp, Homo sapiens
ctaaaacaaaaatta

SEQ ID NO: 1046527 - DNA, 15 bp, Homo sapiens
taaaacaaaaattaa

SEQ ID NO: 1046528 - DNA, 15 bp, Homo sapiens
aaaacaaaaattaac

SEQ ID NO: 1046529 - DNA, 15 bp, Homo sapiens
aaacaaaaattaacc

SEQ ID NO: 1046530 - DNA, 15 bp, Homo sapiens
aacaaaaattaacca

SEQ ID NO: 1046531 - DNA, 15 bp, Homo sapiens
acaaaaattaaccag

SEQ ID NO: 1046532 - DNA, 15 bp, Homo sapiens
caaaaattaaccagg

SEQ ID NO: 1046533 - DNA, 15 bp, Homo sapiens
aaaaattaaccaggt

SEQ ID NO: 1046534 - DNA, 15 bp, Homo sapiens
aaaattaaccaggta

SEQ ID NO: 1046535 - DNA, 15 bp, Homo sapiens
aaattaaccaggtat

SEQ ID NO: 1046536 - DNA, 15 bp, Homo sapiens
aattaaccaggtatg

SEQ ID NO: 1046537 - DNA, 15 bp, Homo sapiens
attaaccaggtatgg

SEQ ID NO: 1046538 - DNA, 15 bp, Homo sapiens
ttaaccaggtatggt

SEQ ID NO: 1046539 - DNA, 15 bp, Homo sapiens
taaccaggtatggtg

SEQ ID NO: 1046540 - DNA, 15 bp, Homo sapiens
aaccaggtatggtgg

SEQ ID NO: 1046541 - DNA, 15 bp, Homo sapiens
accaggtatggtggt

SEQ ID NO: 1046542 - DNA, 15 bp, Homo sapiens
ccaggtatggtggtg

SEQ ID NO: 1046543 - DNA, 15 bp, Homo sapiens
caggtatggtggtgg

SEQ ID NO: 1046544 - DNA, 15 bp, Homo sapiens
aggtatggtggtggg

SEQ ID NO: 1046545 - DNA, 15 bp, Homo sapiens
ggtatggtggtgggt

SEQ ID NO: 1046546 - DNA, 15 bp, Homo sapiens
gtatggtggtgggtg

SEQ ID NO: 1046547 - DNA, 15 bp, Homo sapiens
tatggtggtgggtgc

SEQ ID NO: 1046548 - DNA, 15 bp, Homo sapiens
atggtggtgggtgcc

SEQ ID NO: 1046549 - DNA, 15 bp, Homo sapiens
tggtggtgggtgcct

SEQ ID NO: 1046550 - DNA, 15 bp, Homo sapiens
ggtggtgggtgcctg

SEQ ID NO: 1046551 - DNA, 15 bp, Homo sapiens
gtggtgggtgcctgt

SEQ ID NO: 1046552 - DNA, 15 bp, Homo sapiens
tggtgggtgcctgta

SEQ ID NO: 1046553 - DNA, 15 bp, Homo sapiens
ggtgggtgcctgtag

SEQ ID NO: 1046554 - DNA, 15 bp, Homo sapiens
gtgggtgcctgtagt

SEQ ID NO: 1046555 - DNA, 15 bp, Homo sapiens
tgggtgcctgtagtc

SEQ ID NO: 1046556 - DNA, 15 bp, Homo sapiens
gggtgcctgtagtcc

SEQ ID NO: 1046557 - DNA, 15 bp, Homo sapiens
ggtgcctgtagtccc

SEQ ID NO: 1046558 - DNA, 15 bp, Homo sapiens
gtgcctgtagtccca

SEQ ID NO: 1046559 - DNA, 15 bp, Homo sapiens
tcgggaggctgaggg

SEQ ID NO: 1046560 - DNA, 15 bp, Homo sapiens
cgggaggctgaggga

SEQ ID NO: 1046561 - DNA, 15 bp, Homo sapiens
gggaggctgagggag

SEQ ID NO: 1046562 - DNA, 15 bp, Homo sapiens
ggaggctgagggagg

SEQ ID NO: 1046563 - DNA, 15 bp, Homo sapiens
gaggctgagggagga

SEQ ID NO: 1046564 - DNA, 15 bp, Homo sapiens
aggctgagggaggag

SEQ ID NO: 1046565 - DNA, 15 bp, Homo sapiens
ggctgagggaggaga

SEQ ID NO: 1046566 - DNA, 15 bp, Homo sapiens
gctgagggaggagaa

SEQ ID NO: 1046567 - DNA, 15 bp, Homo sapiens
ctgagggaggagaac

SEQ ID NO: 1046568 - DNA, 15 bp, Homo sapiens
tgagggaggagaact

SEQ ID NO: 1046569 - DNA, 15 bp, Homo sapiens
gagggaggagaactg

SEQ ID NO: 1046570 - DNA, 15 bp, Homo sapiens
agggaggagaactgc

SEQ ID NO: 1046571 - DNA, 15 bp, Homo sapiens
gggaggagaactgct

SEQ ID NO: 1046572 - DNA, 15 bp, Homo sapiens
ggaggagaactgctt

SEQ ID NO: 1046573 - DNA, 15 bp, Homo sapiens
gaggagaactgcttg

SEQ ID NO: 1046574 - DNA, 15 bp, Homo sapiens
aggagaactgcttga

SEQ ID NO: 1046575 - DNA, 15 bp, Homo sapiens
ggagaactgcttgaa

SEQ ID NO: 1046576 - DNA, 15 bp, Homo sapiens
gagaactgcttgaac

SEQ ID NO: 1046577 - DNA, 15 bp, Homo sapiens
agaactgcttgaacc

SEQ ID NO: 1046578 - DNA, 15 bp, Homo sapiens
gaactgcttgaaccc

SEQ ID NO: 1046579 - DNA, 15 bp, Homo sapiens
aactgcttgaacccg

SEQ ID NO: 1046580 - DNA, 15 bp, Homo sapiens
actgcttgaacccgg

SEQ ID NO: 1046581 - DNA, 15 bp, Homo sapiens
ctgcttgaacccgga

SEQ ID NO: 1046582 - DNA, 15 bp, Homo sapiens
tgcttgaacccggaa

SEQ ID NO: 1046583 - DNA, 15 bp, Homo sapiens
gcttgaacccggaat

SEQ ID NO: 1046584 - DNA, 15 bp, Homo sapiens
cttgaacccggaata

SEQ ID NO: 1046585 - DNA, 15 bp, Homo sapiens
ttgaacccggaatat

SEQ ID NO: 1046586 - DNA, 15 bp, Homo sapiens
tgaacccggaatatg

SEQ ID NO: 1046587 - DNA, 15 bp, Homo sapiens
gaacccggaatatgg

SEQ ID NO: 1046588 - DNA, 15 bp, Homo sapiens
aacccggaatatgga

SEQ ID NO: 1046589 - DNA, 15 bp, Homo sapiens
acccggaatatggag

SEQ ID NO: 1046590 - DNA, 15 bp, Homo sapiens
cccggaatatggagg

SEQ ID NO: 1046591 - DNA, 15 bp, Homo sapiens
ccggaatatggaggt

SEQ ID NO: 1046592 - DNA, 15 bp, Homo sapiens
cggaatatggaggtt

SEQ ID NO: 1046593 - DNA, 15 bp, Homo sapiens
ggaatatggaggttt

SEQ ID NO: 1046594 - DNA, 15 bp, Homo sapiens
gaatatggaggtttc

SEQ ID NO: 1046595 - DNA, 15 bp, Homo sapiens
aatatggaggtttcg

SEQ ID NO: 1046596 - DNA, 15 bp, Homo sapiens
atatggaggtttcgg

SEQ ID NO: 1046597 - DNA, 15 bp, Homo sapiens
tatggaggtttcggt

SEQ ID NO: 1046598 - DNA, 15 bp, Homo sapiens
atggaggtttcggtg

SEQ ID NO: 1046599 - DNA, 15 bp, Homo sapiens
tggaggtttcggtga

SEQ ID NO: 1046600 - DNA, 15 bp, Homo sapiens
ggaggtttcggtgag

SEQ ID NO: 1046601 - DNA, 15 bp, Homo sapiens
gaggtttcggtgagc

SEQ ID NO: 1046602 - DNA, 15 bp, Homo sapiens
aggtttcggtgagcc

SEQ ID NO: 1046603 - DNA, 15 bp, Homo sapiens
ggtttcggtgagccg

SEQ ID NO: 1046604 - DNA, 15 bp, Homo sapiens
gtttcggtgagccga

SEQ ID NO: 1046605 - DNA, 15 bp, Homo sapiens
tttcggtgagccgag

SEQ ID NO: 1046606 - DNA, 15 bp, Homo sapiens
ttcggtgagccgaga

SEQ ID NO: 1046607 - DNA, 15 bp, Homo sapiens
tcggtgagccgagat

SEQ ID NO: 1046608 - DNA, 15 bp, Homo sapiens
cggtgagccgagatc

SEQ ID NO: 1046609 - DNA, 15 bp, Homo sapiens
ggtgagccgagatcg

SEQ ID NO: 1046610 - DNA, 15 bp, Homo sapiens
atcgcgccactgcag

SEQ ID NO: 1046611 - DNA, 15 bp, Homo sapiens
tcgcgccactgcagt

SEQ ID NO: 1046612 - DNA, 15 bp, Homo sapiens
cgcgccactgcagtc

SEQ ID NO: 1046613 - DNA, 15 bp, Homo sapiens
gcgccactgcagtcc

SEQ ID NO: 1046614 - DNA, 15 bp, Homo sapiens
cgccactgcagtcca

SEQ ID NO: 1046615 - DNA, 15 bp, Homo sapiens
gccactgcagtccaa

SEQ ID NO: 1046616 - DNA, 15 bp, Homo sapiens
ccactgcagtccaac

SEQ ID NO: 1046617 - DNA, 15 bp, Homo sapiens
cactgcagtccaacc

SEQ ID NO: 1046618 - DNA, 15 bp, Homo sapiens
actgcagtccaacct

SEQ ID NO: 1046619 - DNA, 15 bp, Homo sapiens
ctgcagtccaacctg

SEQ ID NO: 1046620 - DNA, 15 bp, Homo sapiens
tgcagtccaacctgg

SEQ ID NO: 1046621 - DNA, 15 bp, Homo sapiens
gcagtccaacctggg

SEQ ID NO: 1046622 - DNA, 15 bp, Homo sapiens
cagtccaacctgggc

SEQ ID NO: 1046623 - DNA, 15 bp, Homo sapiens
agtccaacctgggcc

SEQ ID NO: 1046624 - DNA, 15 bp, Homo sapiens
gtccaacctgggcca

SEQ ID NO: 1046625 - DNA, 15 bp, Homo sapiens
tccaacctgggccac

SEQ ID NO: 1046626 - DNA, 15 bp, Homo sapiens
ccaacctgggccaca

SEQ ID NO: 1046627 - DNA, 15 bp, Homo sapiens
caacctgggccacag

SEQ ID NO: 1046628 - DNA, 15 bp, Homo sapiens
aacctgggccacaga

SEQ ID NO: 1046629 - DNA, 15 bp, Homo sapiens
acctgggccacagag

SEQ ID NO: 1046630 - DNA, 15 bp, Homo sapiens
ctgggccacagagca

SEQ ID NO: 1046631 - DNA, 15 bp, Homo sapiens
tgggccacagagcaa

SEQ ID NO: 1046632 - DNA, 15 bp, Homo sapiens
gggccacagagcaag

SEQ ID NO: 1046633 - DNA, 15 bp, Homo sapiens
ggccacagagcaaga

SEQ ID NO: 1046634 - DNA, 15 bp, Homo sapiens
gccacagagcaagac

SEQ ID NO: 1046635 - DNA, 15 bp, Homo sapiens
ccacagagcaagact

SEQ ID NO: 1046636 - DNA, 15 bp, Homo sapiens
cacagagcaagactc

SEQ ID NO: 1046637 - DNA, 15 bp, Homo sapiens
acagagcaagactcc

SEQ ID NO: 1046638 - DNA, 15 bp, Homo sapiens
cagagcaagactccc

SEQ ID NO: 1046639 - DNA, 15 bp, Homo sapiens
agagcaagactccct

SEQ ID NO: 1046640 - DNA, 15 bp, Homo sapiens
gagcaagactccctc

SEQ ID NO: 1046641 - DNA, 15 bp, Homo sapiens
agcaagactccctct

SEQ ID NO: 1046642 - DNA, 15 bp, Homo sapiens
gcaagactccctctc

SEQ ID NO: 1046643 - DNA, 15 bp, Homo sapiens
caagactccctctca

SEQ ID NO: 1046644 - DNA, 15 bp, Homo sapiens
aagactccctctcaa

SEQ ID NO: 1046645 - DNA, 15 bp, Homo sapiens
agactccctctcaaa

SEQ ID NO: 1046646 - DNA, 15 bp, Homo sapiens
gactccctctcaaaa

SEQ ID NO: 1046647 - DNA, 15 bp, Homo sapiens
actccctctcaaaaa

SEQ ID NO: 1046648 - DNA, 15 bp, Homo sapiens
ctccctctcaaaaaa

SEQ ID NO: 1046649 - DNA, 15 bp, Homo sapiens
tccctctcaaaaaaa

SEQ ID NO: 1046650 - DNA, 15 bp, Homo sapiens
ccctctcaaaaaaat

SEQ ID NO: 1046651 - DNA, 15 bp, Homo sapiens
cctctcaaaaaaata

SEQ ID NO: 1046652 - DNA, 15 bp, Homo sapiens
ctctcaaaaaaataa

SEQ ID NO: 1046653 - DNA, 15 bp, Homo sapiens
tctcaaaaaaataaa

SEQ ID NO: 1046654 - DNA, 15 bp, Homo sapiens
ctcaaaaaaataaaa

SEQ ID NO: 1046655 - DNA, 15 bp, Homo sapiens
tcaaaaaaataaaat

SEQ ID NO: 1046656 - DNA, 15 bp, Homo sapiens
caaaaaaataaaata

SEQ ID NO: 1046657 - DNA, 15 bp, Homo sapiens
aaaaaaataaaataa

SEQ ID NO: 1046658 - DNA, 15 bp, Homo sapiens
aaaaaataaaataaa

SEQ ID NO: 1046659 - DNA, 15 bp, Homo sapiens
aaaaataaaataaaa

SEQ ID NO: 1046660 - DNA, 15 bp, Homo sapiens
aaaataaaataaaat

SEQ ID NO: 1046661 - DNA, 15 bp, Homo sapiens
aaataaaataaaata

SEQ ID NO: 1046662 - DNA, 15 bp, Homo sapiens
aataaaataaaataa

SEQ ID NO: 1046663 - DNA, 15 bp, Homo sapiens
ataaaataaaataaa

SEQ ID NO: 1046664 - DNA, 15 bp, Homo sapiens
taaaataaaataaaa

SEQ ID NO: 1046665 - DNA, 15 bp, Homo sapiens
aaaataaaataaaaa

SEQ ID NO: 1046666 - DNA, 15 bp, Homo sapiens
aaataaaataaaaat

SEQ ID NO: 1046667 - DNA, 15 bp, Homo sapiens
aataaaataaaaata

SEQ ID NO: 1046668 - DNA, 15 bp, Homo sapiens
ataaaataaaaatac

SEQ ID NO: 1046669 - DNA, 15 bp, Homo sapiens
taaaataaaaataca

SEQ ID NO: 1046670 - DNA, 15 bp, Homo sapiens
aaaataaaaatacaa

SEQ ID NO: 1046671 - DNA, 15 bp, Homo sapiens
aaataaaaatacaaa

SEQ ID NO: 1046672 - DNA, 15 bp, Homo sapiens
aataaaaatacaaaa

SEQ ID NO: 1046673 - DNA, 15 bp, Homo sapiens
ataaaaatacaaaaa

SEQ ID NO: 1046674 - DNA, 15 bp, Homo sapiens
attagccaggcgtga

SEQ ID NO: 1046675 - DNA, 15 bp, Homo sapiens
ttagccaggcgtgat

SEQ ID NO: 1046676 - DNA, 15 bp, Homo sapiens
tagccaggcgtgatg

SEQ ID NO: 1046677 - DNA, 15 bp, Homo sapiens
agccaggcgtgatgg

SEQ ID NO: 1046678 - DNA, 15 bp, Homo sapiens
gccaggcgtgatggt

SEQ ID NO: 1046679 - DNA, 15 bp, Homo sapiens
ccaggcgtgatggtg

SEQ ID NO: 1046680 - DNA, 15 bp, Homo sapiens
caggcgtgatggtgg

SEQ ID NO: 1046681 - DNA, 15 bp, Homo sapiens
aggcgtgatggtggg

SEQ ID NO: 1046682 - DNA, 15 bp, Homo sapiens
ggcgtgatggtgggg

SEQ ID NO: 1046683 - DNA, 15 bp, Homo sapiens
gcgtgatggtggggg

SEQ ID NO: 1046684 - DNA, 15 bp, Homo sapiens
cgtgatggtgggggc

SEQ ID NO: 1046685 - DNA, 15 bp, Homo sapiens
gtgatggtgggggcc

SEQ ID NO: 1046686 - DNA, 15 bp, Homo sapiens
tgatggtgggggcct

SEQ ID NO: 1046687 - DNA, 15 bp, Homo sapiens
gatggtgggggcctg

SEQ ID NO: 1046688 - DNA, 15 bp, Homo sapiens
atggtgggggcctgt

SEQ ID NO: 1046689 - DNA, 15 bp, Homo sapiens
tggtgggggcctgta

SEQ ID NO: 1046690 - DNA, 15 bp, Homo sapiens
ggtgggggcctgtag

SEQ ID NO: 1046691 - DNA, 15 bp, Homo sapiens
gtgggggcctgtagt

SEQ ID NO: 1046692 - DNA, 15 bp, Homo sapiens
tgggggcctgtagtc

SEQ ID NO: 1046693 - DNA, 15 bp, Homo sapiens
gggggcctgtagtcc

SEQ ID NO: 1046694 - DNA, 15 bp, Homo sapiens
ggggcctgtagtccc

SEQ ID NO: 1046695 - DNA, 15 bp, Homo sapiens
gggcctgtagtccca

SEQ ID NO: 1046696 - DNA, 15 bp, Homo sapiens
ggcctgtagtcccag

SEQ ID NO: 1046697 - DNA, 15 bp, Homo sapiens
ctactcaggaggcta

SEQ ID NO: 1046698 - DNA, 15 bp, Homo sapiens
tactcaggaggctaa

SEQ ID NO: 1046699 - DNA, 15 bp, Homo sapiens
actcaggaggctaag

SEQ ID NO: 1046700 - DNA, 15 bp, Homo sapiens
ctcaggaggctaagg

SEQ ID NO: 1046701 - DNA, 15 bp, Homo sapiens
tcaggaggctaaggc

SEQ ID NO: 1046702 - DNA, 15 bp, Homo sapiens
caggaggctaaggca

SEQ ID NO: 1046703 - DNA, 15 bp, Homo sapiens
aggaggctaaggcag

SEQ ID NO: 1046704 - DNA, 15 bp, Homo sapiens
ggaggctaaggcagg

SEQ ID NO: 1046705 - DNA, 15 bp, Homo sapiens
gaggctaaggcagga

SEQ ID NO: 1046706 - DNA, 15 bp, Homo sapiens
aggctaaggcaggag

SEQ ID NO: 1046707 - DNA, 15 bp, Homo sapiens
ggctaaggcaggaga

SEQ ID NO: 1046708 - DNA, 15 bp, Homo sapiens
gctaaggcaggagaa

SEQ ID NO: 1046709 - DNA, 15 bp, Homo sapiens
ctaaggcaggagaat

SEQ ID NO: 1046710 - DNA, 15 bp, Homo sapiens
taaggcaggagaatc

SEQ ID NO: 1046711 - DNA, 15 bp, Homo sapiens
aaggcaggagaatcg

SEQ ID NO: 1046712 - DNA, 15 bp, Homo sapiens
agaatcgcttgaaca

SEQ ID NO: 1046713 - DNA, 15 bp, Homo sapiens
gaatcgcttgaacac

SEQ ID NO: 1046714 - DNA, 15 bp, Homo sapiens
aatcgcttgaacaca

SEQ ID NO: 1046715 - DNA, 15 bp, Homo sapiens
atcgcttgaacacag

SEQ ID NO: 1046716 - DNA, 15 bp, Homo sapiens
tcgcttgaacacaga

SEQ ID NO: 1046717 - DNA, 15 bp, Homo sapiens
cgcttgaacacagaa

SEQ ID NO: 1046718 - DNA, 15 bp, Homo sapiens
gcttgaacacagaag

SEQ ID NO: 1046719 - DNA, 15 bp, Homo sapiens
cttgaacacagaagc

SEQ ID NO: 1046720 - DNA, 15 bp, Homo sapiens
ttgaacacagaagca

SEQ ID NO: 1046721 - DNA, 15 bp, Homo sapiens
tgaacacagaagcag

SEQ ID NO: 1046722 - DNA, 15 bp, Homo sapiens
gaacacagaagcaga

SEQ ID NO: 1046723 - DNA, 15 bp, Homo sapiens
aacacagaagcagag

SEQ ID NO: 1046724 - DNA, 15 bp, Homo sapiens
acacagaagcagagg

SEQ ID NO: 1046725 - DNA, 15 bp, Homo sapiens
cacagaagcagaggt

SEQ ID NO: 1046726 - DNA, 15 bp, Homo sapiens
acagaagcagaggtt

SEQ ID NO: 1046727 - DNA, 15 bp, Homo sapiens
cagaagcagaggttg

SEQ ID NO: 1046728 - DNA, 15 bp, Homo sapiens
agaagcagaggttgc

SEQ ID NO: 1046729 - DNA, 15 bp, Homo sapiens
gaagcagaggttgca

SEQ ID NO: 1046730 - DNA, 15 bp, Homo sapiens
aagcagaggttgcag

SEQ ID NO: 1046731 - DNA, 15 bp, Homo sapiens
agcagaggttgcagt

SEQ ID NO: 1046732 - DNA, 15 bp, Homo sapiens
gcagaggttgcagtt

SEQ ID NO: 1046733 - DNA, 15 bp, Homo sapiens
cagaggttgcagtta

SEQ ID NO: 1046734 - DNA, 15 bp, Homo sapiens
agaggttgcagttag

SEQ ID NO: 1046735 - DNA, 15 bp, Homo sapiens
gaggttgcagttagc

SEQ ID NO: 1046736 - DNA, 15 bp, Homo sapiens
aggttgcagttagcc

SEQ ID NO: 1046737 - DNA, 15 bp, Homo sapiens
ggttgcagttagcca

SEQ ID NO: 1046738 - DNA, 15 bp, Homo sapiens
gttgcagttagccaa

SEQ ID NO: 1046739 - DNA, 15 bp, Homo sapiens
ttgcagttagccaag

SEQ ID NO: 1046740 - DNA, 15 bp, Homo sapiens
tgcagttagccaaga

SEQ ID NO: 1046741 - DNA, 15 bp, Homo sapiens
gcagttagccaagat

SEQ ID NO: 1046742 - DNA, 15 bp, Homo sapiens
cagttagccaagatc

SEQ ID NO: 1046743 - DNA, 15 bp, Homo sapiens
agttagccaagatca

SEQ ID NO: 1046744 - DNA, 15 bp, Homo sapiens
gttagccaagatcat

SEQ ID NO: 1046745 - DNA, 15 bp, Homo sapiens
ttagccaagatcatg

SEQ ID NO: 1046746 - DNA, 15 bp, Homo sapiens
tagccaagatcatgc

SEQ ID NO: 1046747 - DNA, 15 bp, Homo sapiens
agccaagatcatgcc

SEQ ID NO: 1046748 - DNA, 15 bp, Homo sapiens
gccaagatcatgcca

SEQ ID NO: 1046749 - DNA, 15 bp, Homo sapiens
ccaagatcatgccac

SEQ ID NO: 1046750 - DNA, 15 bp, Homo sapiens
caagatcatgccact

SEQ ID NO: 1046751 - DNA, 15 bp, Homo sapiens
aagatcatgccactg

SEQ ID NO: 1046752 - DNA, 15 bp, Homo sapiens
agatcatgccactgc

SEQ ID NO: 1046753 - DNA, 15 bp, Homo sapiens
gatcatgccactgca

SEQ ID NO: 1046754 - DNA, 15 bp, Homo sapiens
atcatgccactgcac

SEQ ID NO: 1046755 - DNA, 15 bp, Homo sapiens
tcatgccactgcact

SEQ ID NO: 1046756 - DNA, 15 bp, Homo sapiens
catgccactgcactc

SEQ ID NO: 1046757 - DNA, 15 bp, Homo sapiens
atgccactgcactcc

SEQ ID NO: 1046758 - DNA, 15 bp, Homo sapiens
cctgggcaacagagt

SEQ ID NO: 1046759 - DNA, 15 bp, Homo sapiens
ctgggcaacagagtg

SEQ ID NO: 1046760 - DNA, 15 bp, Homo sapiens
tgggcaacagagtga

SEQ ID NO: 1046761 - DNA, 15 bp, Homo sapiens
gggcaacagagtgag

SEQ ID NO: 1046762 - DNA, 15 bp, Homo sapiens
caacagagtgagact

SEQ ID NO: 1046763 - DNA, 15 bp, Homo sapiens
aacagagtgagactc

SEQ ID NO: 1046764 - DNA, 15 bp, Homo sapiens
acagagtgagactcc

SEQ ID NO: 1046765 - DNA, 15 bp, Homo sapiens
cagagtgagactcca

SEQ ID NO: 1046766 - DNA, 15 bp, Homo sapiens
tccatctcaaaaaat

SEQ ID NO: 1046767 - DNA, 15 bp, Homo sapiens
ccatctcaaaaaata

SEQ ID NO: 1046768 - DNA, 15 bp, Homo sapiens
catctcaaaaaataa

SEQ ID NO: 1046769 - DNA, 15 bp, Homo sapiens
atctcaaaaaataaa

SEQ ID NO: 1046770 - DNA, 15 bp, Homo sapiens
tctcaaaaaataaat

SEQ ID NO: 1046771 - DNA, 15 bp, Homo sapiens
ctcaaaaaataaata

SEQ ID NO: 1046772 - DNA, 15 bp, Homo sapiens
tcaaaaaataaataa

SEQ ID NO: 1046773 - DNA, 15 bp, Homo sapiens
caaaaaataaataaa

SEQ ID NO: 1046774 - DNA, 15 bp, Homo sapiens
aaaaaataaataaat

SEQ ID NO: 1046775 - DNA, 15 bp, Homo sapiens
aaaaataaataaata

SEQ ID NO: 1046776 - DNA, 15 bp, Homo sapiens
aaataaataaataaa

SEQ ID NO: 1046777 - DNA, 15 bp, Homo sapiens
aataaataaataaat

SEQ ID NO: 1046778 - DNA, 15 bp, Homo sapiens
ataaataaataaata

SEQ ID NO: 1046779 - DNA, 15 bp, Homo sapiens
taaataaataaataa

SEQ ID NO: 1046780 - DNA, 15 bp, Homo sapiens
aataaataaataaaa

SEQ ID NO: 1046781 - DNA, 15 bp, Homo sapiens
ataaataaataaaat

SEQ ID NO: 1046782 - DNA, 15 bp, Homo sapiens
taaataaataaaatt

SEQ ID NO: 1046783 - DNA, 15 bp, Homo sapiens
aaataaataaaatta

SEQ ID NO: 1046784 - DNA, 15 bp, Homo sapiens
aataaataaaattat

SEQ ID NO: 1046785 - DNA, 15 bp, Homo sapiens
ataaataaaattatt

SEQ ID NO: 1046786 - DNA, 15 bp, Homo sapiens
taaataaaattattc

SEQ ID NO: 1046787 - DNA, 15 bp, Homo sapiens
aaataaaattattct

SEQ ID NO: 1046788 - DNA, 15 bp, Homo sapiens
aataaaattattctt

SEQ ID NO: 1046789 - DNA, 15 bp, Homo sapiens
ataaaattattcttt

SEQ ID NO: 1046790 - DNA, 15 bp, Homo sapiens
taaaattattcttta

SEQ ID NO: 1046791 - DNA, 15 bp, Homo sapiens
aaaattattctttat

SEQ ID NO: 1046792 - DNA, 15 bp, Homo sapiens
aaattattctttata

SEQ ID NO: 1046793 - DNA, 15 bp, Homo sapiens
aattattctttatag

SEQ ID NO: 1046794 - DNA, 15 bp, Homo sapiens
attattctttataga

SEQ ID NO: 1046795 - DNA, 15 bp, Homo sapiens
ttattctttatagag

SEQ ID NO: 1046796 - DNA, 15 bp, Homo sapiens
tattctttatagaga

SEQ ID NO: 1046797 - DNA, 15 bp, Homo sapiens
attctttatagagac

SEQ ID NO: 1046798 - DNA, 15 bp, Homo sapiens
ttctttatagagaca

SEQ ID NO: 1046799 - DNA, 15 bp, Homo sapiens
tctttatagagacag

SEQ ID NO: 1046800 - DNA, 15 bp, Homo sapiens
ctttatagagacagg

SEQ ID NO: 1046801 - DNA, 15 bp, Homo sapiens
tttatagagacaggg

SEQ ID NO: 1046802 - DNA, 15 bp, Homo sapiens
ttatagagacagggt

SEQ ID NO: 1046803 - DNA, 15 bp, Homo sapiens
tatagagacagggtc

SEQ ID NO: 1046804 - DNA, 15 bp, Homo sapiens
atagagacagggtct

SEQ ID NO: 1046805 - DNA, 15 bp, Homo sapiens
tagagacagggtctt

SEQ ID NO: 1046806 - DNA, 15 bp, Homo sapiens
agagacagggtcttg

SEQ ID NO: 1046807 - DNA, 15 bp, Homo sapiens
gacagggtcttgcta

SEQ ID NO: 1046808 - DNA, 15 bp, Homo sapiens
acagggtcttgctat

SEQ ID NO: 1046809 - DNA, 15 bp, Homo sapiens
cagggtcttgctatg

SEQ ID NO: 1046810 - DNA, 15 bp, Homo sapiens
agggtcttgctatgt

SEQ ID NO: 1046811 - DNA, 15 bp, Homo sapiens
cccaggctggtctca

SEQ ID NO: 1046812 - DNA, 15 bp, Homo sapiens
ctggtctcaaactct

SEQ ID NO: 1046813 - DNA, 15 bp, Homo sapiens
tggtctcaaactctt

SEQ ID NO: 1046814 - DNA, 15 bp, Homo sapiens
ggtctcaaactcttg

SEQ ID NO: 1046815 - DNA, 15 bp, Homo sapiens
gtctcaaactcttgg

SEQ ID NO: 1046816 - DNA, 15 bp, Homo sapiens
tctcaaactcttggg

SEQ ID NO: 1046817 - DNA, 15 bp, Homo sapiens
ctcaaactcttgggc

SEQ ID NO: 1046818 - DNA, 15 bp, Homo sapiens
tcaaactcttgggct

SEQ ID NO: 1046819 - DNA, 15 bp, Homo sapiens
caaactcttgggctc

SEQ ID NO: 1046820 - DNA, 15 bp, Homo sapiens
aaactcttgggctct

SEQ ID NO: 1046821 - DNA, 15 bp, Homo sapiens
aactcttgggctctg

SEQ ID NO: 1046822 - DNA, 15 bp, Homo sapiens
actcttgggctctgg

SEQ ID NO: 1046823 - DNA, 15 bp, Homo sapiens
ctcttgggctctggt

SEQ ID NO: 1046824 - DNA, 15 bp, Homo sapiens
tcttgggctctggtg

SEQ ID NO: 1046825 - DNA, 15 bp, Homo sapiens
cttgggctctggtga

SEQ ID NO: 1046826 - DNA, 15 bp, Homo sapiens
ttgggctctggtgat

SEQ ID NO: 1046827 - DNA, 15 bp, Homo sapiens
tgggctctggtgatc

SEQ ID NO: 1046828 - DNA, 15 bp, Homo sapiens
gggctctggtgatcc

SEQ ID NO: 1046829 - DNA, 15 bp, Homo sapiens
ggctctggtgatcct

SEQ ID NO: 1046830 - DNA, 15 bp, Homo sapiens
gctctggtgatcctc

SEQ ID NO: 1046831 - DNA, 15 bp, Homo sapiens
ctctggtgatcctcc

SEQ ID NO: 1046832 - DNA, 15 bp, Homo sapiens
tctggtgatcctcct

SEQ ID NO: 1046833 - DNA, 15 bp, Homo sapiens
ctggtgatcctccta

SEQ ID NO: 1046834 - DNA, 15 bp, Homo sapiens
tggtgatcctcctac

SEQ ID NO: 1046835 - DNA, 15 bp, Homo sapiens
ggtgatcctcctacc

SEQ ID NO: 1046836 - DNA, 15 bp, Homo sapiens
gtgatcctcctacct

SEQ ID NO: 1046837 - DNA, 15 bp, Homo sapiens
tgatcctcctacctc

SEQ ID NO: 1046838 - DNA, 15 bp, Homo sapiens
gatcctcctacctcg

SEQ ID NO: 1046839 - DNA, 15 bp, Homo sapiens
atcctcctacctcgg

SEQ ID NO: 1046840 - DNA, 15 bp, Homo sapiens
tcctcctacctcggc

SEQ ID NO: 1046841 - DNA, 15 bp, Homo sapiens
cctcctacctcggcc

SEQ ID NO: 1046842 - DNA, 15 bp, Homo sapiens
ctcctacctcggcct

SEQ ID NO: 1046843 - DNA, 15 bp, Homo sapiens
tcctacctcggcctc

SEQ ID NO: 1046844 - DNA, 15 bp, Homo sapiens
cctacctcggcctcc

SEQ ID NO: 1046845 - DNA, 15 bp, Homo sapiens
ctacctcggcctccc

SEQ ID NO: 1046846 - DNA, 15 bp, Homo sapiens
tacctcggcctccca

SEQ ID NO: 1046847 - DNA, 15 bp, Homo sapiens
cggcctcccaaagtt

SEQ ID NO: 1046848 - DNA, 15 bp, Homo sapiens
ggcctcccaaagttc

SEQ ID NO: 1046849 - DNA, 15 bp, Homo sapiens
gcctcccaaagttct

SEQ ID NO: 1046850 - DNA, 15 bp, Homo sapiens
cctcccaaagttctg

SEQ ID NO: 1046851 - DNA, 15 bp, Homo sapiens
ctcccaaagttctgg

SEQ ID NO: 1046852 - DNA, 15 bp, Homo sapiens
tcccaaagttctggg

SEQ ID NO: 1046853 - DNA, 15 bp, Homo sapiens
cccaaagttctggga

SEQ ID NO: 1046854 - DNA, 15 bp, Homo sapiens
ccaaagttctgggat

SEQ ID NO: 1046855 - DNA, 15 bp, Homo sapiens
caaagttctgggatt

SEQ ID NO: 1046856 - DNA, 15 bp, Homo sapiens
aaagttctgggatta

SEQ ID NO: 1046857 - DNA, 15 bp, Homo sapiens
aagttctgggattac

SEQ ID NO: 1046858 - DNA, 15 bp, Homo sapiens
agttctgggattaca

SEQ ID NO: 1046859 - DNA, 15 bp, Homo sapiens
gttctgggattacag

SEQ ID NO: 1046860 - DNA, 15 bp, Homo sapiens
ttctgggattacagg

SEQ ID NO: 1046861 - DNA, 15 bp, Homo sapiens
tctgggattacaggc

SEQ ID NO: 1046862 - DNA, 15 bp, Homo sapiens
acaggcatgagccat

SEQ ID NO: 1046863 - DNA, 15 bp, Homo sapiens
caggcatgagccatg

SEQ ID NO: 1046864 - DNA, 15 bp, Homo sapiens
aggcatgagccatgg

SEQ ID NO: 1046865 - DNA, 15 bp, Homo sapiens
ggcatgagccatggt

SEQ ID NO: 1046866 - DNA, 15 bp, Homo sapiens
gcatgagccatggtg

SEQ ID NO: 1046867 - DNA, 15 bp, Homo sapiens
catgagccatggtgc

SEQ ID NO: 1046868 - DNA, 15 bp, Homo sapiens
atgagccatggtgcc

SEQ ID NO: 1046869 - DNA, 15 bp, Homo sapiens
tgagccatggtgcct

SEQ ID NO: 1046870 - DNA, 15 bp, Homo sapiens
gagccatggtgcctg

SEQ ID NO: 1046871 - DNA, 15 bp, Homo sapiens
agccatggtgcctgg

SEQ ID NO: 1046872 - DNA, 15 bp, Homo sapiens
gccatggtgcctggc

SEQ ID NO: 1046873 - DNA, 15 bp, Homo sapiens
ccatggtgcctggcc

SEQ ID NO: 1046874 - DNA, 15 bp, Homo sapiens
catggtgcctggcct

SEQ ID NO: 1046875 - DNA, 15 bp, Homo sapiens
atggtgcctggccta

SEQ ID NO: 1046876 - DNA, 15 bp, Homo sapiens
tggtgcctggcctat

SEQ ID NO: 1046877 - DNA, 15 bp, Homo sapiens
ggtgcctggcctata

SEQ ID NO: 1046878 - DNA, 15 bp, Homo sapiens
gtgcctggcctatat

SEQ ID NO: 1046879 - DNA, 15 bp, Homo sapiens
tgcctggcctatatt

SEQ ID NO: 1046880 - DNA, 15 bp, Homo sapiens
gcctggcctatattt

SEQ ID NO: 1046881 - DNA, 15 bp, Homo sapiens
cctggcctatatttc

SEQ ID NO: 1046882 - DNA, 15 bp, Homo sapiens
ctggcctatatttca

SEQ ID NO: 1046883 - DNA, 15 bp, Homo sapiens
tggcctatatttcac

SEQ ID NO: 1046884 - DNA, 15 bp, Homo sapiens
ggcctatatttcact

SEQ ID NO: 1046885 - DNA, 15 bp, Homo sapiens
gcctatatttcactt

SEQ ID NO: 1046886 - DNA, 15 bp, Homo sapiens
cctatatttcactta

SEQ ID NO: 1046887 - DNA, 15 bp, Homo sapiens
ctatatttcacttac

SEQ ID NO: 1046888 - DNA, 15 bp, Homo sapiens
tatatttcacttacg

SEQ ID NO: 1046889 - DNA, 15 bp, Homo sapiens
atatttcacttacgt

SEQ ID NO: 1046890 - DNA, 15 bp, Homo sapiens
tatttcacttacgtg

SEQ ID NO: 1046891 - DNA, 15 bp, Homo sapiens
atttcacttacgtga

SEQ ID NO: 1046892 - DNA, 15 bp, Homo sapiens
tttcacttacgtgat

SEQ ID NO: 1046893 - DNA, 15 bp, Homo sapiens
ttcacttacgtgatg

SEQ ID NO: 1046894 - DNA, 15 bp, Homo sapiens
tcacttacgtgatga

SEQ ID NO: 1046895 - DNA, 15 bp, Homo sapiens
cacttacgtgatgac

SEQ ID NO: 1046896 - DNA, 15 bp, Homo sapiens
acttacgtgatgact

SEQ ID NO: 1046897 - DNA, 15 bp, Homo sapiens
cttacgtgatgactg

SEQ ID NO: 1046898 - DNA, 15 bp, Homo sapiens
ttacgtgatgactgt

SEQ ID NO: 1046899 - DNA, 15 bp, Homo sapiens
tacgtgatgactgtc

SEQ ID NO: 1046900 - DNA, 15 bp, Homo sapiens
acgtgatgactgtct

SEQ ID NO: 1046901 - DNA, 15 bp, Homo sapiens
cgtgatgactgtctc

SEQ ID NO: 1046902 - DNA, 15 bp, Homo sapiens
gtgatgactgtctca

SEQ ID NO: 1046903 - DNA, 15 bp, Homo sapiens
tgatgactgtctcaa

SEQ ID NO: 1046904 - DNA, 15 bp, Homo sapiens
gatgactgtctcaaa

SEQ ID NO: 1046905 - DNA, 15 bp, Homo sapiens
atgactgtctcaaat

SEQ ID NO: 1046906 - DNA, 15 bp, Homo sapiens
tgactgtctcaaatc

SEQ ID NO: 1046907 - DNA, 15 bp, Homo sapiens
gactgtctcaaatcc

SEQ ID NO: 1046908 - DNA, 15 bp, Homo sapiens
actgtctcaaatccc

SEQ ID NO: 1046909 - DNA, 15 bp, Homo sapiens
ctgtctcaaatccca

SEQ ID NO: 1046910 - DNA, 15 bp, Homo sapiens
tgtctcaaatcccag

SEQ ID NO: 1046911 - DNA, 15 bp, Homo sapiens
gtctcaaatcccagt

SEQ ID NO: 1046912 - DNA, 15 bp, Homo sapiens
tctcaaatcccagtc

SEQ ID NO: 1046913 - DNA, 15 bp, Homo sapiens
ctcaaatcccagtct

SEQ ID NO: 1046914 - DNA, 15 bp, Homo sapiens
tcaaatcccagtctc

SEQ ID NO: 1046915 - DNA, 15 bp, Homo sapiens
caaatcccagtctct

SEQ ID NO: 1046916 - DNA, 15 bp, Homo sapiens
aaatcccagtctctc

SEQ ID NO: 1046917 - DNA, 15 bp, Homo sapiens
aatcccagtctctcc

SEQ ID NO: 1046918 - DNA, 15 bp, Homo sapiens
atcccagtctctccc

SEQ ID NO: 1046919 - DNA, 15 bp, Homo sapiens
tcccagtctctcccc

SEQ ID NO: 1046920 - DNA, 15 bp, Homo sapiens
cccagtctctcccca

SEQ ID NO: 1046921 - DNA, 15 bp, Homo sapiens
ccagtctctccccaa

SEQ ID NO: 1046922 - DNA, 15 bp, Homo sapiens
cagtctctccccaat

SEQ ID NO: 1046923 - DNA, 15 bp, Homo sapiens
agtctctccccaatc

SEQ ID NO: 1046924 - DNA, 15 bp, Homo sapiens
gtctctccccaatcc

SEQ ID NO: 1046925 - DNA, 15 bp, Homo sapiens
tctctccccaatccc

SEQ ID NO: 1046926 - DNA, 15 bp, Homo sapiens
ctctccccaatccct

SEQ ID NO: 1046927 - DNA, 15 bp, Homo sapiens
tctccccaatccctg

SEQ ID NO: 1046928 - DNA, 15 bp, Homo sapiens
ctccccaatccctgc

SEQ ID NO: 1046929 - DNA, 15 bp, Homo sapiens
tccccaatccctgct

SEQ ID NO: 1046930 - DNA, 15 bp, Homo sapiens
ccccaatccctgctg

SEQ ID NO: 1046931 - DNA, 15 bp, Homo sapiens
cccaatccctgctgt

SEQ ID NO: 1046932 - DNA, 15 bp, Homo sapiens
ccaatccctgctgtg

SEQ ID NO: 1046933 - DNA, 15 bp, Homo sapiens
caatccctgctgtgt

SEQ ID NO: 1046934 - DNA, 15 bp, Homo sapiens
aatccctgctgtgtt

SEQ ID NO: 1046935 - DNA, 15 bp, Homo sapiens
atccctgctgtgttt

SEQ ID NO: 1046936 - DNA, 15 bp, Homo sapiens
tccctgctgtgtttt

SEQ ID NO: 1046937 - DNA, 15 bp, Homo sapiens
ccctgctgtgttttc

SEQ ID NO: 1046938 - DNA, 15 bp, Homo sapiens
cctgctgtgttttct

SEQ ID NO: 1046939 - DNA, 15 bp, Homo sapiens
ctgctgtgttttctc

SEQ ID NO: 1046940 - DNA, 15 bp, Homo sapiens
tgctgtgttttctct

SEQ ID NO: 1046941 - DNA, 15 bp, Homo sapiens
gctgtgttttctctg

SEQ ID NO: 1046942 - DNA, 15 bp, Homo sapiens
ctgtgttttctctgt

SEQ ID NO: 1046943 - DNA, 15 bp, Homo sapiens
tgtgttttctctgtg

SEQ ID NO: 1046944 - DNA, 15 bp, Homo sapiens
gtgttttctctgtgc

SEQ ID NO: 1046945 - DNA, 15 bp, Homo sapiens
tgttttctctgtgct

SEQ ID NO: 1046946 - DNA, 15 bp, Homo sapiens
gttttctctgtgctc

SEQ ID NO: 1046947 - DNA, 15 bp, Homo sapiens
ttttctctgtgctct

SEQ ID NO: 1046948 - DNA, 15 bp, Homo sapiens
tttctctgtgctctg

SEQ ID NO: 1046949 - DNA, 15 bp, Homo sapiens
ttctctgtgctctgt

SEQ ID NO: 1046950 - DNA, 15 bp, Homo sapiens
tctctgtgctctgtc

SEQ ID NO: 1046951 - DNA, 15 bp, Homo sapiens
ctctgtgctctgtca

SEQ ID NO: 1046952 - DNA, 15 bp, Homo sapiens
tctgtgctctgtcac

SEQ ID NO: 1046953 - DNA, 15 bp, Homo sapiens
ctgtgctctgtcacg

SEQ ID NO: 1046954 - DNA, 15 bp, Homo sapiens
tgtgctctgtcacgt

SEQ ID NO: 1046955 - DNA, 15 bp, Homo sapiens
gtgctctgtcacgtg

SEQ ID NO: 1046956 - DNA, 15 bp, Homo sapiens
tgctctgtcacgtgg

SEQ ID NO: 1046957 - DNA, 15 bp, Homo sapiens
gctctgtcacgtggc

SEQ ID NO: 1046958 - DNA, 15 bp, Homo sapiens
ctctgtcacgtggca

SEQ ID NO: 1046959 - DNA, 15 bp, Homo sapiens
tctgtcacgtggcat

SEQ ID NO: 1046960 - DNA, 15 bp, Homo sapiens
ctgtcacgtggcatg

SEQ ID NO: 1046961 - DNA, 15 bp, Homo sapiens
tgtcacgtggcatgc

SEQ ID NO: 1046962 - DNA, 15 bp, Homo sapiens
gtcacgtggcatgcg

SEQ ID NO: 1046963 - DNA, 15 bp, Homo sapiens
tcacgtggcatgcgt

SEQ ID NO: 1046964 - DNA, 15 bp, Homo sapiens
cacgtggcatgcgtt

SEQ ID NO: 1046965 - DNA, 15 bp, Homo sapiens
acgtggcatgcgttt

SEQ ID NO: 1046966 - DNA, 15 bp, Homo sapiens
cgtggcatgcgtttt

SEQ ID NO: 1046967 - DNA, 15 bp, Homo sapiens
gtggcatgcgtttta

SEQ ID NO: 1046968 - DNA, 15 bp, Homo sapiens
tggcatgcgttttac

SEQ ID NO: 1046969 - DNA, 15 bp, Homo sapiens
ggcatgcgttttacc

SEQ ID NO: 1046970 - DNA, 15 bp, Homo sapiens
gcatgcgttttacct

SEQ ID NO: 1046971 - DNA, 15 bp, Homo sapiens
catgcgttttacctg

SEQ ID NO: 1046972 - DNA, 15 bp, Homo sapiens
atgcgttttacctga

SEQ ID NO: 1046973 - DNA, 15 bp, Homo sapiens
tgcgttttacctgag

SEQ ID NO: 1046974 - DNA, 15 bp, Homo sapiens
gcgttttacctgagt

SEQ ID NO: 1046975 - DNA, 15 bp, Homo sapiens
cgttttacctgagtt

SEQ ID NO: 1046976 - DNA, 15 bp, Homo sapiens
gttttacctgagttg

SEQ ID NO: 1046977 - DNA, 15 bp, Homo sapiens
ttttacctgagttgt

SEQ ID NO: 1046978 - DNA, 15 bp, Homo sapiens
tttacctgagttgtt

SEQ ID NO: 1046979 - DNA, 15 bp, Homo sapiens
ttacctgagttgttt

SEQ ID NO: 1046980 - DNA, 15 bp, Homo sapiens
tacctgagttgtttg

SEQ ID NO: 1046981 - DNA, 15 bp, Homo sapiens
acctgagttgtttgg

SEQ ID NO: 1046982 - DNA, 15 bp, Homo sapiens
cctgagttgtttggt

SEQ ID NO: 1046983 - DNA, 15 bp, Homo sapiens
ctgagttgtttggtg

SEQ ID NO: 1046984 - DNA, 15 bp, Homo sapiens
tgagttgtttggtgc

SEQ ID NO: 1046985 - DNA, 15 bp, Homo sapiens
gagttgtttggtgcc

SEQ ID NO: 1046986 - DNA, 15 bp, Homo sapiens
agttgtttggtgcct

SEQ ID NO: 1046987 - DNA, 15 bp, Homo sapiens
gttgtttggtgcctg

SEQ ID NO: 1046988 - DNA, 15 bp, Homo sapiens
ttgtttggtgcctgc

SEQ ID NO: 1046989 - DNA, 15 bp, Homo sapiens
tgtttggtgcctgcc

SEQ ID NO: 1046990 - DNA, 15 bp, Homo sapiens
gtttggtgcctgcct

SEQ ID NO: 1046991 - DNA, 15 bp, Homo sapiens
tttggtgcctgcctt

SEQ ID NO: 1046992 - DNA, 15 bp, Homo sapiens
ttggtgcctgccttt

SEQ ID NO: 1046993 - DNA, 15 bp, Homo sapiens
tggtgcctgcctttc

SEQ ID NO: 1046994 - DNA, 15 bp, Homo sapiens
ggtgcctgcctttcc

SEQ ID NO: 1046995 - DNA, 15 bp, Homo sapiens
gtgcctgcctttcct

SEQ ID NO: 1046996 - DNA, 15 bp, Homo sapiens
tgcctgcctttcctc

SEQ ID NO: 1046997 - DNA, 15 bp, Homo sapiens
gcctgcctttcctcc

SEQ ID NO: 1046998 - DNA, 15 bp, Homo sapiens
cctgcctttcctccg

SEQ ID NO: 1046999 - DNA, 15 bp, Homo sapiens
ctgcctttcctccgc

SEQ ID NO: 1047000 - DNA, 15 bp, Homo sapiens
tgcctttcctccgct

SEQ ID NO: 1047001 - DNA, 15 bp, Homo sapiens
gcctttcctccgcta

SEQ ID NO: 1047002 - DNA, 15 bp, Homo sapiens
cctttcctccgctat

SEQ ID NO: 1047003 - DNA, 15 bp, Homo sapiens
ctttcctccgctatg

SEQ ID NO: 1047004 - DNA, 15 bp, Homo sapiens
tttcctccgctatgg

SEQ ID NO: 1047005 - DNA, 15 bp, Homo sapiens
ttcctccgctatggt

SEQ ID NO: 1047006 - DNA, 15 bp, Homo sapiens
tcctccgctatggta

SEQ ID NO: 1047007 - DNA, 15 bp, Homo sapiens
cctccgctatggtaa

SEQ ID NO: 1047008 - DNA, 15 bp, Homo sapiens
ctccgctatggtaaa

SEQ ID NO: 1047009 - DNA, 15 bp, Homo sapiens
tccgctatggtaaag

SEQ ID NO: 1047010 - DNA, 15 bp, Homo sapiens
ccgctatggtaaagc

SEQ ID NO: 1047011 - DNA, 15 bp, Homo sapiens
cgctatggtaaagcc

SEQ ID NO: 1047012 - DNA, 15 bp, Homo sapiens
gctatggtaaagccc

SEQ ID NO: 1047013 - DNA, 15 bp, Homo sapiens
ctatggtaaagcccc

SEQ ID NO: 1047014 - DNA, 15 bp, Homo sapiens
tatggtaaagcccca

SEQ ID NO: 1047015 - DNA, 15 bp, Homo sapiens
atggtaaagccccac

SEQ ID NO: 1047016 - DNA, 15 bp, Homo sapiens
tggtaaagccccaca

SEQ ID NO: 1047017 - DNA, 15 bp, Homo sapiens
ggtaaagccccacat

SEQ ID NO: 1047018 - DNA, 15 bp, Homo sapiens
gtaaagccccacata

SEQ ID NO: 1047019 - DNA, 15 bp, Homo sapiens
taaagccccacatag

SEQ ID NO: 1047020 - DNA, 15 bp, Homo sapiens
aaagccccacatagc

SEQ ID NO: 1047021 - DNA, 15 bp, Homo sapiens
aagccccacatagct

SEQ ID NO: 1047022 - DNA, 15 bp, Homo sapiens
agccccacatagctg

SEQ ID NO: 1047023 - DNA, 15 bp, Homo sapiens
gccccacatagctgg

SEQ ID NO: 1047024 - DNA, 15 bp, Homo sapiens
ccccacatagctggg

SEQ ID NO: 1047025 - DNA, 15 bp, Homo sapiens
cccacatagctgggc

SEQ ID NO: 1047026 - DNA, 15 bp, Homo sapiens
ccacatagctgggct

SEQ ID NO: 1047027 - DNA, 15 bp, Homo sapiens
cacatagctgggctt

SEQ ID NO: 1047028 - DNA, 15 bp, Homo sapiens
acatagctgggcttt

SEQ ID NO: 1047029 - DNA, 15 bp, Homo sapiens
catagctgggctttt

SEQ ID NO: 1047030 - DNA, 15 bp, Homo sapiens
atagctgggcttttg

SEQ ID NO: 1047031 - DNA, 15 bp, Homo sapiens
tagctgggcttttgg

SEQ ID NO: 1047032 - DNA, 15 bp, Homo sapiens
agctgggcttttggt

SEQ ID NO: 1047033 - DNA, 15 bp, Homo sapiens
gctgggcttttggtc

SEQ ID NO: 1047034 - DNA, 15 bp, Homo sapiens
ctgggcttttggtct

SEQ ID NO: 1047035 - DNA, 15 bp, Homo sapiens
tgggcttttggtctg

SEQ ID NO: 1047036 - DNA, 15 bp, Homo sapiens
gggcttttggtctgt

SEQ ID NO: 1047037 - DNA, 15 bp, Homo sapiens
ggcttttggtctgtc

SEQ ID NO: 1047038 - DNA, 15 bp, Homo sapiens
gcttttggtctgtcc

SEQ ID NO: 1047039 - DNA, 15 bp, Homo sapiens
cttttggtctgtcct

SEQ ID NO: 1047040 - DNA, 15 bp, Homo sapiens
ttttggtctgtcctg

SEQ ID NO: 1047041 - DNA, 15 bp, Homo sapiens
tttggtctgtcctgg

SEQ ID NO: 1047042 - DNA, 15 bp, Homo sapiens
ttggtctgtcctggt

SEQ ID NO: 1047043 - DNA, 15 bp, Homo sapiens
tggtctgtcctggtc

SEQ ID NO: 1047044 - DNA, 15 bp, Homo sapiens
ggtctgtcctggtca

SEQ ID NO: 1047045 - DNA, 15 bp, Homo sapiens
gtctgtcctggtcat

SEQ ID NO: 1047046 - DNA, 15 bp, Homo sapiens
tctgtcctggtcatt

SEQ ID NO: 1047047 - DNA, 15 bp, Homo sapiens
ctgtcctggtcattc

SEQ ID NO: 1047048 - DNA, 15 bp, Homo sapiens
tgtcctggtcattct

SEQ ID NO: 1047049 - DNA, 15 bp, Homo sapiens
gtcctggtcattctc

SEQ ID NO: 1047050 - DNA, 15 bp, Homo sapiens
tcctggtcattctcc

SEQ ID NO: 1047051 - DNA, 15 bp, Homo sapiens
cctggtcattctccc

SEQ ID NO: 1047052 - DNA, 15 bp, Homo sapiens
ctggtcattctccca

SEQ ID NO: 1047053 - DNA, 15 bp, Homo sapiens
tggtcattctcccat

SEQ ID NO: 1047054 - DNA, 15 bp, Homo sapiens
ggtcattctcccatc

SEQ ID NO: 1047055 - DNA, 15 bp, Homo sapiens
gtcattctcccatcc

SEQ ID NO: 1047056 - DNA, 15 bp, Homo sapiens
tcattctcccatccc

SEQ ID NO: 1047057 - DNA, 15 bp, Homo sapiens
cattctcccatcccc

SEQ ID NO: 1047058 - DNA, 15 bp, Homo sapiens
attctcccatcccca

SEQ ID NO: 1047059 - DNA, 15 bp, Homo sapiens
ttctcccatccccag

SEQ ID NO: 1047060 - DNA, 15 bp, Homo sapiens
tctcccatccccagc

SEQ ID NO: 1047061 - DNA, 15 bp, Homo sapiens
ctcccatccccagct

SEQ ID NO: 1047062 - DNA, 15 bp, Homo sapiens
tcccatccccagctc

SEQ ID NO: 1047063 - DNA, 15 bp, Homo sapiens
cccatccccagctct

SEQ ID NO: 1047064 - DNA, 15 bp, Homo sapiens
ccatccccagctctt

SEQ ID NO: 1047065 - DNA, 15 bp, Homo sapiens
catccccagctctta

SEQ ID NO: 1047066 - DNA, 15 bp, Homo sapiens
atccccagctcttag

SEQ ID NO: 1047067 - DNA, 15 bp, Homo sapiens
tccccagctcttaga

SEQ ID NO: 1047068 - DNA, 15 bp, Homo sapiens
ccccagctcttagaa

SEQ ID NO: 1047069 - DNA, 15 bp, Homo sapiens
cccagctcttagaac

SEQ ID NO: 1047070 - DNA, 15 bp, Homo sapiens
ccagctcttagaacc

SEQ ID NO: 1047071 - DNA, 15 bp, Homo sapiens
cagctcttagaaccc

SEQ ID NO: 1047072 - DNA, 15 bp, Homo sapiens
agctcttagaacccg

SEQ ID NO: 1047073 - DNA, 15 bp, Homo sapiens
gctcttagaacccgc

SEQ ID NO: 1047074 - DNA, 15 bp, Homo sapiens
ctcttagaacccgcc

SEQ ID NO: 1047075 - DNA, 15 bp, Homo sapiens
tcttagaacccgcct

SEQ ID NO: 1047076 - DNA, 15 bp, Homo sapiens
cttagaacccgcctg

SEQ ID NO: 1047077 - DNA, 15 bp, Homo sapiens
ttagaacccgcctgg

SEQ ID NO: 1047078 - DNA, 15 bp, Homo sapiens
tagaacccgcctggc

SEQ ID NO: 1047079 - DNA, 15 bp, Homo sapiens
agaacccgcctggca

SEQ ID NO: 1047080 - DNA, 15 bp, Homo sapiens
gaacccgcctggcag

SEQ ID NO: 1047081 - DNA, 15 bp, Homo sapiens
aacccgcctggcagg

SEQ ID NO: 1047082 - DNA, 15 bp, Homo sapiens
acccgcctggcaggt

SEQ ID NO: 1047083 - DNA, 15 bp, Homo sapiens
cccgcctggcaggtg

SEQ ID NO: 1047084 - DNA, 15 bp, Homo sapiens
ccgcctggcaggtgg

SEQ ID NO: 1047085 - DNA, 15 bp, Homo sapiens
cgcctggcaggtggt

SEQ ID NO: 1047086 - DNA, 15 bp, Homo sapiens
gcctggcaggtggta

SEQ ID NO: 1047087 - DNA, 15 bp, Homo sapiens
cctggcaggtggtag

SEQ ID NO: 1047088 - DNA, 15 bp, Homo sapiens
ctggcaggtggtagt

SEQ ID NO: 1047089 - DNA, 15 bp, Homo sapiens
tggcaggtggtagtg

SEQ ID NO: 1047090 - DNA, 15 bp, Homo sapiens
ggcaggtggtagtgc

SEQ ID NO: 1047091 - DNA, 15 bp, Homo sapiens
gcaggtggtagtgct

SEQ ID NO: 1047092 - DNA, 15 bp, Homo sapiens
caggtggtagtgctc

SEQ ID NO: 1047093 - DNA, 15 bp, Homo sapiens
aggtggtagtgctca

SEQ ID NO: 1047094 - DNA, 15 bp, Homo sapiens
ggtggtagtgctcag

SEQ ID NO: 1047095 - DNA, 15 bp, Homo sapiens
gtggtagtgctcagt

SEQ ID NO: 1047096 - DNA, 15 bp, Homo sapiens
tggtagtgctcagtg

SEQ ID NO: 1047097 - DNA, 15 bp, Homo sapiens
ggtagtgctcagtgc

SEQ ID NO: 1047098 - DNA, 15 bp, Homo sapiens
gtagtgctcagtgct

SEQ ID NO: 1047099 - DNA, 15 bp, Homo sapiens
tagtgctcagtgctt

SEQ ID NO: 1047100 - DNA, 15 bp, Homo sapiens
agtgctcagtgcttg

SEQ ID NO: 1047101 - DNA, 15 bp, Homo sapiens
gtgctcagtgcttgc

SEQ ID NO: 1047102 - DNA, 15 bp, Homo sapiens
tgctcagtgcttgct

SEQ ID NO: 1047103 - DNA, 15 bp, Homo sapiens
gctcagtgcttgctt

SEQ ID NO: 1047104 - DNA, 15 bp, Homo sapiens
ctcagtgcttgcttg

SEQ ID NO: 1047105 - DNA, 15 bp, Homo sapiens
tcagtgcttgcttgt

SEQ ID NO: 1047106 - DNA, 15 bp, Homo sapiens
cagtgcttgcttgtg

SEQ ID NO: 1047107 - DNA, 15 bp, Homo sapiens
agtgcttgcttgtgg

SEQ ID NO: 1047108 - DNA, 15 bp, Homo sapiens
gtgcttgcttgtgga

SEQ ID NO: 1047109 - DNA, 15 bp, Homo sapiens
tgcttgcttgtggaa

SEQ ID NO: 1047110 - DNA, 15 bp, Homo sapiens
gcttgcttgtggaat

SEQ ID NO: 1047111 - DNA, 15 bp, Homo sapiens
cttgcttgtggaatg

SEQ ID NO: 1047112 - DNA, 15 bp, Homo sapiens
ttgcttgtggaatga

SEQ ID NO: 1047113 - DNA, 15 bp, Homo sapiens
tgcttgtggaatgaa

SEQ ID NO: 1047114 - DNA, 15 bp, Homo sapiens
gcttgtggaatgaat

SEQ ID NO: 1047115 - DNA, 15 bp, Homo sapiens
cttgtggaatgaatg

SEQ ID NO: 1047116 - DNA, 15 bp, Homo sapiens
ttgtggaatgaatga

SEQ ID NO: 1047117 - DNA, 15 bp, Homo sapiens
tgtggaatgaatgaa

SEQ ID NO: 1047118 - DNA, 15 bp, Homo sapiens
gtggaatgaatgaat

SEQ ID NO: 1047119 - DNA, 15 bp, Homo sapiens
tggaatgaatgaatg

SEQ ID NO: 1047120 - DNA, 15 bp, Homo sapiens
ggaatgaatgaatga

SEQ ID NO: 1047121 - DNA, 15 bp, Homo sapiens
gaatgaatgaatgat

SEQ ID NO: 1047122 - DNA, 15 bp, Homo sapiens
aatgaatgaatgatc

SEQ ID NO: 1047123 - DNA, 15 bp, Homo sapiens
atgaatgaatgatcc

SEQ ID NO: 1047124 - DNA, 15 bp, Homo sapiens
tgaatgaatgatccc

SEQ ID NO: 1047125 - DNA, 15 bp, Homo sapiens
gaatgaatgatcccc

SEQ ID NO: 1047126 - DNA, 15 bp, Homo sapiens
aatgaatgatccccc

SEQ ID NO: 1047127 - DNA, 15 bp, Homo sapiens
atgaatgatccccct

SEQ ID NO: 1047128 - DNA, 15 bp, Homo sapiens
tgaatgatccccctg

SEQ ID NO: 1047129 - DNA, 15 bp, Homo sapiens
gaatgatccccctgg

SEQ ID NO: 1047130 - DNA, 15 bp, Homo sapiens
aatgatccccctggc

SEQ ID NO: 1047131 - DNA, 15 bp, Homo sapiens
atgatccccctggcc

SEQ ID NO: 1047132 - DNA, 15 bp, Homo sapiens
tgatccccctggcca

SEQ ID NO: 1047133 - DNA, 15 bp, Homo sapiens
gatccccctggccac

SEQ ID NO: 1047134 - DNA, 15 bp, Homo sapiens
atccccctggccaca

SEQ ID NO: 1047135 - DNA, 15 bp, Homo sapiens
tccccctggccacac

SEQ ID NO: 1047136 - DNA, 15 bp, Homo sapiens
ccccctggccacacg

SEQ ID NO: 1047137 - DNA, 15 bp, Homo sapiens
cccctggccacacgg

SEQ ID NO: 1047138 - DNA, 15 bp, Homo sapiens
ccctggccacacgga

SEQ ID NO: 1047139 - DNA, 15 bp, Homo sapiens
cctggccacacggag

SEQ ID NO: 1047140 - DNA, 15 bp, Homo sapiens
ctggccacacggagc

SEQ ID NO: 1047141 - DNA, 15 bp, Homo sapiens
tggccacacggagcc

SEQ ID NO: 1047142 - DNA, 15 bp, Homo sapiens
ggccacacggagccc

SEQ ID NO: 1047143 - DNA, 15 bp, Homo sapiens
gccacacggagccca

SEQ ID NO: 1047144 - DNA, 15 bp, Homo sapiens
ccacacggagcccat

SEQ ID NO: 1047145 - DNA, 15 bp, Homo sapiens
cacacggagcccatg

SEQ ID NO: 1047146 - DNA, 15 bp, Homo sapiens
acacggagcccatgt

SEQ ID NO: 1047147 - DNA, 15 bp, Homo sapiens
cacggagcccatgtt

SEQ ID NO: 1047148 - DNA, 15 bp, Homo sapiens
acggagcccatgttc

SEQ ID NO: 1047149 - DNA, 15 bp, Homo sapiens
cggagcccatgttcc

SEQ ID NO: 1047150 - DNA, 15 bp, Homo sapiens
ggagcccatgttcct

SEQ ID NO: 1047151 - DNA, 15 bp, Homo sapiens
gagcccatgttcctg

SEQ ID NO: 1047152 - DNA, 15 bp, Homo sapiens
agcccatgttcctgc

SEQ ID NO: 1047153 - DNA, 15 bp, Homo sapiens
gcccatgttcctgca

SEQ ID NO: 1047154 - DNA, 15 bp, Homo sapiens
cccatgttcctgcat

SEQ ID NO: 1047155 - DNA, 15 bp, Homo sapiens
ccatgttcctgcatg

SEQ ID NO: 1047156 - DNA, 15 bp, Homo sapiens
catgttcctgcatga

SEQ ID NO: 1047157 - DNA, 15 bp, Homo sapiens
atgttcctgcatgag

SEQ ID NO: 1047158 - DNA, 15 bp, Homo sapiens
tgttcctgcatgagg

SEQ ID NO: 1047159 - DNA, 15 bp, Homo sapiens
gttcctgcatgaggc

SEQ ID NO: 1047160 - DNA, 15 bp, Homo sapiens
ttcctgcatgaggct

SEQ ID NO: 1047161 - DNA, 15 bp, Homo sapiens
tcctgcatgaggcta

SEQ ID NO: 1047162 - DNA, 15 bp, Homo sapiens
cctgcatgaggctat

SEQ ID NO: 1047163 - DNA, 15 bp, Homo sapiens
ctgcatgaggctatc

SEQ ID NO: 1047164 - DNA, 15 bp, Homo sapiens
tgcatgaggctatcc

SEQ ID NO: 1047165 - DNA, 15 bp, Homo sapiens
gcatgaggctatccc

SEQ ID NO: 1047166 - DNA, 15 bp, Homo sapiens
catgaggctatccct

SEQ ID NO: 1047167 - DNA, 15 bp, Homo sapiens
atgaggctatccctg

SEQ ID NO: 1047168 - DNA, 15 bp, Homo sapiens
tgaggctatccctgc

SEQ ID NO: 1047169 - DNA, 15 bp, Homo sapiens
gaggctatccctgcc

SEQ ID NO: 1047170 - DNA, 15 bp, Homo sapiens
aggctatccctgccc

SEQ ID NO: 1047171 - DNA, 15 bp, Homo sapiens
ggctatccctgccct

SEQ ID NO: 1047172 - DNA, 15 bp, Homo sapiens
gctatccctgccctg

SEQ ID NO: 1047173 - DNA, 15 bp, Homo sapiens
ctatccctgccctga

SEQ ID NO: 1047174 - DNA, 15 bp, Homo sapiens
tatccctgccctgag

SEQ ID NO: 1047175 - DNA, 15 bp, Homo sapiens
atccctgccctgagc

SEQ ID NO: 1047176 - DNA, 15 bp, Homo sapiens
tccctgccctgagcc

SEQ ID NO: 1047177 - DNA, 15 bp, Homo sapiens
ccctgccctgagccc

SEQ ID NO: 1047178 - DNA, 15 bp, Homo sapiens
cctgccctgagccca

SEQ ID NO: 1047179 - DNA, 15 bp, Homo sapiens
ctgccctgagcccat

SEQ ID NO: 1047180 - DNA, 15 bp, Homo sapiens
tgccctgagcccatc

SEQ ID NO: 1047181 - DNA, 15 bp, Homo sapiens
gccctgagcccatcc

SEQ ID NO: 1047182 - DNA, 15 bp, Homo sapiens
ccctgagcccatccg

SEQ ID NO: 1047183 - DNA, 15 bp, Homo sapiens
cctgagcccatccgc

SEQ ID NO: 1047184 - DNA, 15 bp, Homo sapiens
ctgagcccatccgct

SEQ ID NO: 1047185 - DNA, 15 bp, Homo sapiens
tgagcccatccgcta

SEQ ID NO: 1047186 - DNA, 15 bp, Homo sapiens
gagcccatccgctac

SEQ ID NO: 1047187 - DNA, 15 bp, Homo sapiens
agcccatccgctacc

SEQ ID NO: 1047188 - DNA, 15 bp, Homo sapiens
gcccatccgctaccc

SEQ ID NO: 1047189 - DNA, 15 bp, Homo sapiens
cccatccgctaccct

SEQ ID NO: 1047190 - DNA, 15 bp, Homo sapiens
ccatccgctaccctg

SEQ ID NO: 1047191 - DNA, 15 bp, Homo sapiens
catccgctaccctga

SEQ ID NO: 1047192 - DNA, 15 bp, Homo sapiens
atccgctaccctgag

SEQ ID NO: 1047193 - DNA, 15 bp, Homo sapiens
tccgctaccctgagc

SEQ ID NO: 1047194 - DNA, 15 bp, Homo sapiens
ccgctaccctgagct

SEQ ID NO: 1047195 - DNA, 15 bp, Homo sapiens
cgctaccctgagctc

SEQ ID NO: 1047196 - DNA, 15 bp, Homo sapiens
gctaccctgagctcc

SEQ ID NO: 1047197 - DNA, 15 bp, Homo sapiens
ctaccctgagctccg

SEQ ID NO: 1047198 - DNA, 15 bp, Homo sapiens
taccctgagctccgg

SEQ ID NO: 1047199 - DNA, 15 bp, Homo sapiens
accctgagctccggc

SEQ ID NO: 1047200 - DNA, 15 bp, Homo sapiens
ccctgagctccggcg

SEQ ID NO: 1047201 - DNA, 15 bp, Homo sapiens
cctgagctccggcgc

SEQ ID NO: 1047202 - DNA, 15 bp, Homo sapiens
ctgagctccggcgct

SEQ ID NO: 1047203 - DNA, 15 bp, Homo sapiens
tgagctccggcgctc

SEQ ID NO: 1047204 - DNA, 15 bp, Homo sapiens
gagctccggcgctcc

SEQ ID NO: 1047205 - DNA, 15 bp, Homo sapiens
agctccggcgctccc

SEQ ID NO: 1047206 - DNA, 15 bp, Homo sapiens
gctccggcgctccct

SEQ ID NO: 1047207 - DNA, 15 bp, Homo sapiens
ctccggcgctccctt

SEQ ID NO: 1047208 - DNA, 15 bp, Homo sapiens
tccggcgctcccttt

SEQ ID NO: 1047209 - DNA, 15 bp, Homo sapiens
ccggcgctcccttta

SEQ ID NO: 1047210 - DNA, 15 bp, Homo sapiens
cggcgctccctttag

SEQ ID NO: 1047211 - DNA, 15 bp, Homo sapiens
ggcgctccctttagg

SEQ ID NO: 1047212 - DNA, 15 bp, Homo sapiens
gcgctccctttaggt

SEQ ID NO: 1047213 - DNA, 15 bp, Homo sapiens
cgctccctttaggtg

SEQ ID NO: 1047214 - DNA, 15 bp, Homo sapiens
gctccctttaggtgg

SEQ ID NO: 1047215 - DNA, 15 bp, Homo sapiens
ctccctttaggtggt

SEQ ID NO: 1047216 - DNA, 15 bp, Homo sapiens
tccctttaggtggtg

SEQ ID NO: 1047217 - DNA, 15 bp, Homo sapiens
ccctttaggtggtgc

SEQ ID NO: 1047218 - DNA, 15 bp, Homo sapiens
cctttaggtggtgca

SEQ ID NO: 1047219 - DNA, 15 bp, Homo sapiens
ctttaggtggtgcat

SEQ ID NO: 1047220 - DNA, 15 bp, Homo sapiens
tttaggtggtgcatg

SEQ ID NO: 1047221 - DNA, 15 bp, Homo sapiens
ttaggtggtgcatgg

SEQ ID NO: 1047222 - DNA, 15 bp, Homo sapiens
taggtggtgcatggg

SEQ ID NO: 1047223 - DNA, 15 bp, Homo sapiens
aggtggtgcatgggc

SEQ ID NO: 1047224 - DNA, 15 bp, Homo sapiens
ggtggtgcatgggcc

SEQ ID NO: 1047225 - DNA, 15 bp, Homo sapiens
gtggtgcatgggccc

SEQ ID NO: 1047226 - DNA, 15 bp, Homo sapiens
tggtgcatgggcccc

SEQ ID NO: 1047227 - DNA, 15 bp, Homo sapiens
ggtgcatgggcccct

SEQ ID NO: 1047228 - DNA, 15 bp, Homo sapiens
gtgcatgggcccctg

SEQ ID NO: 1047229 - DNA, 15 bp, Homo sapiens
tgcatgggcccctgt

SEQ ID NO: 1047230 - DNA, 15 bp, Homo sapiens
gcatgggcccctgtt

SEQ ID NO: 1047231 - DNA, 15 bp, Homo sapiens
catgggcccctgttt

SEQ ID NO: 1047232 - DNA, 15 bp, Homo sapiens
atgggcccctgttta

SEQ ID NO: 1047233 - DNA, 15 bp, Homo sapiens
tgggcccctgtttac

SEQ ID NO: 1047234 - DNA, 15 bp, Homo sapiens
gggcccctgtttacc

SEQ ID NO: 1047235 - DNA, 15 bp, Homo sapiens
ggcccctgtttacca

SEQ ID NO: 1047236 - DNA, 15 bp, Homo sapiens
gcccctgtttaccac

SEQ ID NO: 1047237 - DNA, 15 bp, Homo sapiens
cccctgtttaccaca

SEQ ID NO: 1047238 - DNA, 15 bp, Homo sapiens
ccctgtttaccacag

SEQ ID NO: 1047239 - DNA, 15 bp, Homo sapiens
cctgtttaccacagt

SEQ ID NO: 1047240 - DNA, 15 bp, Homo sapiens
ctgtttaccacagtc

SEQ ID NO: 1047241 - DNA, 15 bp, Homo sapiens
tgtttaccacagtcc

SEQ ID NO: 1047242 - DNA, 15 bp, Homo sapiens
gtttaccacagtccc

SEQ ID NO: 1047243 - DNA, 15 bp, Homo sapiens
tttaccacagtccct

SEQ ID NO: 1047244 - DNA, 15 bp, Homo sapiens
ttaccacagtccctt

SEQ ID NO: 1047245 - DNA, 15 bp, Homo sapiens
taccacagtcccttg

SEQ ID NO: 1047246 - DNA, 15 bp, Homo sapiens
accacagtcccttga

SEQ ID NO: 1047247 - DNA, 15 bp, Homo sapiens
ccacagtcccttgac

SEQ ID NO: 1047248 - DNA, 15 bp, Homo sapiens
cacagtcccttgact

SEQ ID NO: 1047249 - DNA, 15 bp, Homo sapiens
acagtcccttgactg

SEQ ID NO: 1047250 - DNA, 15 bp, Homo sapiens
cagtcccttgactgg

SEQ ID NO: 1047251 - DNA, 15 bp, Homo sapiens
agtcccttgactggt

SEQ ID NO: 1047252 - DNA, 15 bp, Homo sapiens
gtcccttgactggtg

SEQ ID NO: 1047253 - DNA, 15 bp, Homo sapiens
tcccttgactggtgt

SEQ ID NO: 1047254 - DNA, 15 bp, Homo sapiens
cccttgactggtgtc

SEQ ID NO: 1047255 - DNA, 15 bp, Homo sapiens
ccttgactggtgtca

SEQ ID NO: 1047256 - DNA, 15 bp, Homo sapiens
cttgactggtgtcac

SEQ ID NO: 1047257 - DNA, 15 bp, Homo sapiens
ttgactggtgtcacc

SEQ ID NO: 1047258 - DNA, 15 bp, Homo sapiens
tgactggtgtcacct

SEQ ID NO: 1047259 - DNA, 15 bp, Homo sapiens
gactggtgtcacctg

SEQ ID NO: 1047260 - DNA, 15 bp, Homo sapiens
actggtgtcacctgt

SEQ ID NO: 1047261 - DNA, 15 bp, Homo sapiens
ctggtgtcacctgtt

SEQ ID NO: 1047262 - DNA, 15 bp, Homo sapiens
tggtgtcacctgttg

SEQ ID NO: 1047263 - DNA, 15 bp, Homo sapiens
ggtgtcacctgttgc

SEQ ID NO: 1047264 - DNA, 15 bp, Homo sapiens
gtgtcacctgttgct

SEQ ID NO: 1047265 - DNA, 15 bp, Homo sapiens
tgtcacctgttgctg

SEQ ID NO: 1047266 - DNA, 15 bp, Homo sapiens
gtcacctgttgctgt

SEQ ID NO: 1047267 - DNA, 15 bp, Homo sapiens
tcacctgttgctgtt

SEQ ID NO: 1047268 - DNA, 15 bp, Homo sapiens
cacctgttgctgtta

SEQ ID NO: 1047269 - DNA, 15 bp, Homo sapiens
acctgttgctgttag

SEQ ID NO: 1047270 - DNA, 15 bp, Homo sapiens
cctgttgctgttagg

SEQ ID NO: 1047271 - DNA, 15 bp, Homo sapiens
ctgttgctgttagga

SEQ ID NO: 1047272 - DNA, 15 bp, Homo sapiens
tgttgctgttaggac

SEQ ID NO: 1047273 - DNA, 15 bp, Homo sapiens
gttgctgttaggaca

SEQ ID NO: 1047274 - DNA, 15 bp, Homo sapiens
ttgctgttaggacat

SEQ ID NO: 1047275 - DNA, 15 bp, Homo sapiens
tgctgttaggacata

SEQ ID NO: 1047276 - DNA, 15 bp, Homo sapiens
gctgttaggacatat

SEQ ID NO: 1047277 - DNA, 15 bp, Homo sapiens
ctgttaggacatatt

SEQ ID NO: 1047278 - DNA, 15 bp, Homo sapiens
tgttaggacatattt

SEQ ID NO: 1047279 - DNA, 15 bp, Homo sapiens
gttaggacatatttt

SEQ ID NO: 1047280 - DNA, 15 bp, Homo sapiens
ttaggacatatttta

SEQ ID NO: 1047281 - DNA, 15 bp, Homo sapiens
taggacatattttaa

SEQ ID NO: 1047282 - DNA, 15 bp, Homo sapiens
aggacatattttaag

SEQ ID NO: 1047283 - DNA, 15 bp, Homo sapiens
ggacatattttaaga

SEQ ID NO: 1047284 - DNA, 15 bp, Homo sapiens
gacatattttaagat

SEQ ID NO: 1047285 - DNA, 15 bp, Homo sapiens
acatattttaagatg

SEQ ID NO: 1047286 - DNA, 15 bp, Homo sapiens
catattttaagatgc

SEQ ID NO: 1047287 - DNA, 15 bp, Homo sapiens
atattttaagatgca

SEQ ID NO: 1047288 - DNA, 15 bp, Homo sapiens
tattttaagatgcat

SEQ ID NO: 1047289 - DNA, 15 bp, Homo sapiens
attttaagatgcatt

SEQ ID NO: 1047290 - DNA, 15 bp, Homo sapiens
ttttaagatgcatta

SEQ ID NO: 1047291 - DNA, 15 bp, Homo sapiens
tttaagatgcattat

SEQ ID NO: 1047292 - DNA, 15 bp, Homo sapiens
ttaagatgcattatg

SEQ ID NO: 1047293 - DNA, 15 bp, Homo sapiens
taagatgcattatga

SEQ ID NO: 1047294 - DNA, 15 bp, Homo sapiens
aagatgcattatgac

SEQ ID NO: 1047295 - DNA, 15 bp, Homo sapiens
agatgcattatgaca

SEQ ID NO: 1047296 - DNA, 15 bp, Homo sapiens
gatgcattatgacag

SEQ ID NO: 1047297 - DNA, 15 bp, Homo sapiens
atgcattatgacagc

SEQ ID NO: 1047298 - DNA, 15 bp, Homo sapiens
tgcattatgacagca

SEQ ID NO: 1047299 - DNA, 15 bp, Homo sapiens
gcattatgacagcat

SEQ ID NO: 1047300 - DNA, 15 bp, Homo sapiens
cattatgacagcatg

SEQ ID NO: 1047301 - DNA, 15 bp, Homo sapiens
attatgacagcatgg

SEQ ID NO: 1047302 - DNA, 15 bp, Homo sapiens
ttatgacagcatgga

SEQ ID NO: 1047303 - DNA, 15 bp, Homo sapiens
tatgacagcatggat

SEQ ID NO: 1047304 - DNA, 15 bp, Homo sapiens
atgacagcatggata

SEQ ID NO: 1047305 - DNA, 15 bp, Homo sapiens
tgacagcatggatag

SEQ ID NO: 1047306 - DNA, 15 bp, Homo sapiens
gacagcatggatagg

SEQ ID NO: 1047307 - DNA, 15 bp, Homo sapiens
acagcatggataggt

SEQ ID NO: 1047308 - DNA, 15 bp, Homo sapiens
cagcatggataggtt

SEQ ID NO: 1047309 - DNA, 15 bp, Homo sapiens
agcatggataggttg

SEQ ID NO: 1047310 - DNA, 15 bp, Homo sapiens
gcatggataggttgc

SEQ ID NO: 1047311 - DNA, 15 bp, Homo sapiens
catggataggttgcc

SEQ ID NO: 1047312 - DNA, 15 bp, Homo sapiens
atggataggttgcct

SEQ ID NO: 1047313 - DNA, 15 bp, Homo sapiens
tggataggttgcctg

SEQ ID NO: 1047314 - DNA, 15 bp, Homo sapiens
ggataggttgcctgt

SEQ ID NO: 1047315 - DNA, 15 bp, Homo sapiens
gataggttgcctgtt

SEQ ID NO: 1047316 - DNA, 15 bp, Homo sapiens
ataggttgcctgttt

SEQ ID NO: 1047317 - DNA, 15 bp, Homo sapiens
taggttgcctgttta

SEQ ID NO: 1047318 - DNA, 15 bp, Homo sapiens
aggttgcctgtttaa

SEQ ID NO: 1047319 - DNA, 15 bp, Homo sapiens
ggttgcctgtttaat

SEQ ID NO: 1047320 - DNA, 15 bp, Homo sapiens
gttgcctgtttaatt

SEQ ID NO: 1047321 - DNA, 15 bp, Homo sapiens
ttgcctgtttaattc

SEQ ID NO: 1047322 - DNA, 15 bp, Homo sapiens
tgcctgtttaattcc

SEQ ID NO: 1047323 - DNA, 15 bp, Homo sapiens
gcctgtttaattcca

SEQ ID NO: 1047324 - DNA, 15 bp, Homo sapiens
cctgtttaattccat

SEQ ID NO: 1047325 - DNA, 15 bp, Homo sapiens
ctgtttaattccata

SEQ ID NO: 1047326 - DNA, 15 bp, Homo sapiens
tgtttaattccataa

SEQ ID NO: 1047327 - DNA, 15 bp, Homo sapiens
gtttaattccataag

SEQ ID NO: 1047328 - DNA, 15 bp, Homo sapiens
tttaattccataagc

SEQ ID NO: 1047329 - DNA, 15 bp, Homo sapiens
ttaattccataagct

SEQ ID NO: 1047330 - DNA, 15 bp, Homo sapiens
taattccataagctc

SEQ ID NO: 1047331 - DNA, 15 bp, Homo sapiens
aattccataagctcc

SEQ ID NO: 1047332 - DNA, 15 bp, Homo sapiens
attccataagctcca

SEQ ID NO: 1047333 - DNA, 15 bp, Homo sapiens
ttccataagctccag

SEQ ID NO: 1047334 - DNA, 15 bp, Homo sapiens
tccataagctccagg

SEQ ID NO: 1047335 - DNA, 15 bp, Homo sapiens
ccataagctccaggt

SEQ ID NO: 1047336 - DNA, 15 bp, Homo sapiens
cataagctccaggtg

SEQ ID NO: 1047337 - DNA, 15 bp, Homo sapiens
ataagctccaggtgc

SEQ ID NO: 1047338 - DNA, 15 bp, Homo sapiens
taagctccaggtgcg

SEQ ID NO: 1047339 - DNA, 15 bp, Homo sapiens
aagctccaggtgcga

SEQ ID NO: 1047340 - DNA, 15 bp, Homo sapiens
agctccaggtgcgac

SEQ ID NO: 1047341 - DNA, 15 bp, Homo sapiens
gctccaggtgcgaca

SEQ ID NO: 1047342 - DNA, 15 bp, Homo sapiens
ctccaggtgcgacag

SEQ ID NO: 1047343 - DNA, 15 bp, Homo sapiens
tccaggtgcgacagc

SEQ ID NO: 1047344 - DNA, 15 bp, Homo sapiens
ccaggtgcgacagcc

SEQ ID NO: 1047345 - DNA, 15 bp, Homo sapiens
caggtgcgacagcct

SEQ ID NO: 1047346 - DNA, 15 bp, Homo sapiens
aggtgcgacagcctc

SEQ ID NO: 1047347 - DNA, 15 bp, Homo sapiens
ggtgcgacagcctca

SEQ ID NO: 1047348 - DNA, 15 bp, Homo sapiens
gtgcgacagcctcat

SEQ ID NO: 1047349 - DNA, 15 bp, Homo sapiens
tgcgacagcctcatg

SEQ ID NO: 1047350 - DNA, 15 bp, Homo sapiens
gcgacagcctcatgt

SEQ ID NO: 1047351 - DNA, 15 bp, Homo sapiens
cgacagcctcatgtg

SEQ ID NO: 1047352 - DNA, 15 bp, Homo sapiens
gacagcctcatgtgc

SEQ ID NO: 1047353 - DNA, 15 bp, Homo sapiens
acagcctcatgtgcg

SEQ ID NO: 1047354 - DNA, 15 bp, Homo sapiens
cagcctcatgtgcga

SEQ ID NO: 1047355 - DNA, 15 bp, Homo sapiens
agcctcatgtgcgaa

SEQ ID NO: 1047356 - DNA, 15 bp, Homo sapiens
gcctcatgtgcgaag

SEQ ID NO: 1047357 - DNA, 15 bp, Homo sapiens
cctcatgtgcgaagg

SEQ ID NO: 1047358 - DNA, 15 bp, Homo sapiens
ctcatgtgcgaaggg

SEQ ID NO: 1047359 - DNA, 15 bp, Homo sapiens
tcatgtgcgaagggc

SEQ ID NO: 1047360 - DNA, 15 bp, Homo sapiens
catgtgcgaagggct

SEQ ID NO: 1047361 - DNA, 15 bp, Homo sapiens
atgtgcgaagggctt

SEQ ID NO: 1047362 - DNA, 15 bp, Homo sapiens
tgtgcgaagggcttt

SEQ ID NO: 1047363 - DNA, 15 bp, Homo sapiens
gtgcgaagggctttc

SEQ ID NO: 1047364 - DNA, 15 bp, Homo sapiens
tgcgaagggctttcc

SEQ ID NO: 1047365 - DNA, 15 bp, Homo sapiens
gcgaagggctttccc

SEQ ID NO: 1047366 - DNA, 15 bp, Homo sapiens
cgaagggctttccca

SEQ ID NO: 1047367 - DNA, 15 bp, Homo sapiens
gaagggctttcccac

SEQ ID NO: 1047368 - DNA, 15 bp, Homo sapiens
aagggctttcccacc

SEQ ID NO: 1047369 - DNA, 15 bp, Homo sapiens
agggctttcccacca

SEQ ID NO: 1047370 - DNA, 15 bp, Homo sapiens
gggctttcccaccac

SEQ ID NO: 1047371 - DNA, 15 bp, Homo sapiens
ggctttcccaccacc

SEQ ID NO: 1047372 - DNA, 15 bp, Homo sapiens
gctttcccaccacct

SEQ ID NO: 1047373 - DNA, 15 bp, Homo sapiens
ctttcccaccacctc

SEQ ID NO: 1047374 - DNA, 15 bp, Homo sapiens
tttcccaccacctcc

SEQ ID NO: 1047375 - DNA, 15 bp, Homo sapiens
ttcccaccacctcct

SEQ ID NO: 1047376 - DNA, 15 bp, Homo sapiens
tcccaccacctccta

SEQ ID NO: 1047377 - DNA, 15 bp, Homo sapiens
cccaccacctcctat

SEQ ID NO: 1047378 - DNA, 15 bp, Homo sapiens
ccaccacctcctatc

SEQ ID NO: 1047379 - DNA, 15 bp, Homo sapiens
caccacctcctatcc

SEQ ID NO: 1047380 - DNA, 15 bp, Homo sapiens
accacctcctatccc

SEQ ID NO: 1047381 - DNA, 15 bp, Homo sapiens
ccacctcctatccca

SEQ ID NO: 1047382 - DNA, 15 bp, Homo sapiens
cacctcctatcccaa

SEQ ID NO: 1047383 - DNA, 15 bp, Homo sapiens
acctcctatcccaag

SEQ ID NO: 1047384 - DNA, 15 bp, Homo sapiens
cctcctatcccaagc

SEQ ID NO: 1047385 - DNA, 15 bp, Homo sapiens
ctcctatcccaagct

SEQ ID NO: 1047386 - DNA, 15 bp, Homo sapiens
tcctatcccaagctc

SEQ ID NO: 1047387 - DNA, 15 bp, Homo sapiens
cctatcccaagctcc

SEQ ID NO: 1047388 - DNA, 15 bp, Homo sapiens
ctatcccaagctccc

SEQ ID NO: 1047389 - DNA, 15 bp, Homo sapiens
tatcccaagctcccg

SEQ ID NO: 1047390 - DNA, 15 bp, Homo sapiens
atcccaagctcccgc

SEQ ID NO: 1047391 - DNA, 15 bp, Homo sapiens
tcccaagctcccgcc

SEQ ID NO: 1047392 - DNA, 15 bp, Homo sapiens
cccaagctcccgccg

SEQ ID NO: 1047393 - DNA, 15 bp, Homo sapiens
ccaagctcccgccga

SEQ ID NO: 1047394 - DNA, 15 bp, Homo sapiens
caagctcccgccgag

SEQ ID NO: 1047395 - DNA, 15 bp, Homo sapiens
aagctcccgccgagg

SEQ ID NO: 1047396 - DNA, 15 bp, Homo sapiens
agctcccgccgagga

SEQ ID NO: 1047397 - DNA, 15 bp, Homo sapiens
gctcccgccgaggag

SEQ ID NO: 1047398 - DNA, 15 bp, Homo sapiens
ctcccgccgaggagc

SEQ ID NO: 1047399 - DNA, 15 bp, Homo sapiens
tcccgccgaggagcc

SEQ ID NO: 1047400 - DNA, 15 bp, Homo sapiens
cccgccgaggagccc

SEQ ID NO: 1047401 - DNA, 15 bp, Homo sapiens
ccgccgaggagcccc

SEQ ID NO: 1047402 - DNA, 15 bp, Homo sapiens
cgccgaggagcccct

SEQ ID NO: 1047403 - DNA, 15 bp, Homo sapiens
gccgaggagcccctt

SEQ ID NO: 1047404 - DNA, 15 bp, Homo sapiens
ccgaggagccccttc

SEQ ID NO: 1047405 - DNA, 15 bp, Homo sapiens
cgaggagccccttcc

SEQ ID NO: 1047406 - DNA, 15 bp, Homo sapiens
gaggagccccttccc

SEQ ID NO: 1047407 - DNA, 15 bp, Homo sapiens
aggagccccttccct

SEQ ID NO: 1047408 - DNA, 15 bp, Homo sapiens
ggagccccttccctg

SEQ ID NO: 1047409 - DNA, 15 bp, Homo sapiens
gagccccttccctgg

SEQ ID NO: 1047410 - DNA, 15 bp, Homo sapiens
agccccttccctggc

SEQ ID NO: 1047411 - DNA, 15 bp, Homo sapiens
gccccttccctggcc

SEQ ID NO: 1047412 - DNA, 15 bp, Homo sapiens
ccccttccctggccg

SEQ ID NO: 1047413 - DNA, 15 bp, Homo sapiens
cccttccctggccgg

SEQ ID NO: 1047414 - DNA, 15 bp, Homo sapiens
ccttccctggccggg

SEQ ID NO: 1047415 - DNA, 15 bp, Homo sapiens
cttccctggccgggc

SEQ ID NO: 1047416 - DNA, 15 bp, Homo sapiens
ttccctggccgggct

SEQ ID NO: 1047417 - DNA, 15 bp, Homo sapiens
tccctggccgggctc

SEQ ID NO: 1047418 - DNA, 15 bp, Homo sapiens
ccctggccgggctcg

SEQ ID NO: 1047419 - DNA, 15 bp, Homo sapiens
cctggccgggctcgg

SEQ ID NO: 1047420 - DNA, 15 bp, Homo sapiens
ctggccgggctcggg

SEQ ID NO: 1047421 - DNA, 15 bp, Homo sapiens
tggccgggctcgggc

SEQ ID NO: 1047422 - DNA, 15 bp, Homo sapiens
ggccgggctcgggca

SEQ ID NO: 1047423 - DNA, 15 bp, Homo sapiens
gccgggctcgggcag

SEQ ID NO: 1047424 - DNA, 15 bp, Homo sapiens
ccgggctcgggcagc

SEQ ID NO: 1047425 - DNA, 15 bp, Homo sapiens
cgggctcgggcagct

SEQ ID NO: 1047426 - DNA, 15 bp, Homo sapiens
gggctcgggcagctg

SEQ ID NO: 1047427 - DNA, 15 bp, Homo sapiens
ggctcgggcagctgt

SEQ ID NO: 1047428 - DNA, 15 bp, Homo sapiens
gctcgggcagctgtt

SEQ ID NO: 1047429 - DNA, 15 bp, Homo sapiens
ctcgggcagctgttc

SEQ ID NO: 1047430 - DNA, 15 bp, Homo sapiens
tcgggcagctgttcc

SEQ ID NO: 1047431 - DNA, 15 bp, Homo sapiens
cgggcagctgttccg

SEQ ID NO: 1047432 - DNA, 15 bp, Homo sapiens
gggcagctgttccgg

SEQ ID NO: 1047433 - DNA, 15 bp, Homo sapiens
ggcagctgttccgga

SEQ ID NO: 1047434 - DNA, 15 bp, Homo sapiens
gcagctgttccggag

SEQ ID NO: 1047435 - DNA, 15 bp, Homo sapiens
cagctgttccggagc

SEQ ID NO: 1047436 - DNA, 15 bp, Homo sapiens
agctgttccggagcc

SEQ ID NO: 1047437 - DNA, 15 bp, Homo sapiens
gctgttccggagcct

SEQ ID NO: 1047438 - DNA, 15 bp, Homo sapiens
ctgttccggagcctt

SEQ ID NO: 1047439 - DNA, 15 bp, Homo sapiens
tgttccggagccttg

SEQ ID NO: 1047440 - DNA, 15 bp, Homo sapiens
gttccggagccttgt

SEQ ID NO: 1047441 - DNA, 15 bp, Homo sapiens
ttccggagccttgtg

SEQ ID NO: 1047442 - DNA, 15 bp, Homo sapiens
tccggagccttgtgg

SEQ ID NO: 1047443 - DNA, 15 bp, Homo sapiens
ccggagccttgtggt

SEQ ID NO: 1047444 - DNA, 15 bp, Homo sapiens
cggagccttgtggtg

SEQ ID NO: 1047445 - DNA, 15 bp, Homo sapiens
ggagccttgtggtgg

SEQ ID NO: 1047446 - DNA, 15 bp, Homo sapiens
gagccttgtggtggg

SEQ ID NO: 1047447 - DNA, 15 bp, Homo sapiens
agccttgtggtgggg

SEQ ID NO: 1047448 - DNA, 15 bp, Homo sapiens
gccttgtggtggggc

SEQ ID NO: 1047449 - DNA, 15 bp, Homo sapiens
ccttgtggtggggcg

SEQ ID NO: 1047450 - DNA, 15 bp, Homo sapiens
cttgtggtggggcgt

SEQ ID NO: 1047451 - DNA, 15 bp, Homo sapiens
ttgtggtggggcgtg

SEQ ID NO: 1047452 - DNA, 15 bp, Homo sapiens
tgtggtggggcgtgg

SEQ ID NO: 1047453 - DNA, 15 bp, Homo sapiens
gtggtggggcgtggg

SEQ ID NO: 1047454 - DNA, 15 bp, Homo sapiens
tggtggggcgtgggg

SEQ ID NO: 1047455 - DNA, 15 bp, Homo sapiens
ggtggggcgtggggc

SEQ ID NO: 1047456 - DNA, 15 bp, Homo sapiens
gtggggcgtggggcc

SEQ ID NO: 1047457 - DNA, 15 bp, Homo sapiens
tggggcgtggggccc

SEQ ID NO: 1047458 - DNA, 15 bp, Homo sapiens
ggggcgtggggccct

SEQ ID NO: 1047459 - DNA, 15 bp, Homo sapiens
gggcgtggggccctc

SEQ ID NO: 1047460 - DNA, 15 bp, Homo sapiens
ggcgtggggccctca

SEQ ID NO: 1047461 - DNA, 15 bp, Homo sapiens
gcgtggggccctcat

SEQ ID NO: 1047462 - DNA, 15 bp, Homo sapiens
cgtggggccctcatc

SEQ ID NO: 1047463 - DNA, 15 bp, Homo sapiens
gtggggccctcatca

SEQ ID NO: 1047464 - DNA, 15 bp, Homo sapiens
tggggccctcatcac

SEQ ID NO: 1047465 - DNA, 15 bp, Homo sapiens
ggggccctcatcact

SEQ ID NO: 1047466 - DNA, 15 bp, Homo sapiens
gggccctcatcactc

SEQ ID NO: 1047467 - DNA, 15 bp, Homo sapiens
ggccctcatcactct

SEQ ID NO: 1047468 - DNA, 15 bp, Homo sapiens
gccctcatcactctc

SEQ ID NO: 1047469 - DNA, 15 bp, Homo sapiens
ccctcatcactctcc

SEQ ID NO: 1047470 - DNA, 15 bp, Homo sapiens
cctcatcactctcct

SEQ ID NO: 1047471 - DNA, 15 bp, Homo sapiens
ctcatcactctcctc

SEQ ID NO: 1047472 - DNA, 15 bp, Homo sapiens
tcatcactctcctca

SEQ ID NO: 1047473 - DNA, 15 bp, Homo sapiens
catcactctcctcac

SEQ ID NO: 1047474 - DNA, 15 bp, Homo sapiens
atcactctcctcaca

SEQ ID NO: 1047475 - DNA, 15 bp, Homo sapiens
tcactctcctcacaa

SEQ ID NO: 1047476 - DNA, 15 bp, Homo sapiens
cactctcctcacaag

SEQ ID NO: 1047477 - DNA, 15 bp, Homo sapiens
actctcctcacaagc

SEQ ID NO: 1047478 - DNA, 15 bp, Homo sapiens
ctctcctcacaagcg

SEQ ID NO: 1047479 - DNA, 15 bp, Homo sapiens
tctcctcacaagcgt

SEQ ID NO: 1047480 - DNA, 15 bp, Homo sapiens
ctcctcacaagcgta

SEQ ID NO: 1047481 - DNA, 15 bp, Homo sapiens
tcctcacaagcgtac

SEQ ID NO: 1047482 - DNA, 15 bp, Homo sapiens
cctcacaagcgtact

SEQ ID NO: 1047483 - DNA, 15 bp, Homo sapiens
ctcacaagcgtactt

SEQ ID NO: 1047484 - DNA, 15 bp, Homo sapiens
tcacaagcgtacttg

SEQ ID NO: 1047485 - DNA, 15 bp, Homo sapiens
cacaagcgtacttgt

SEQ ID NO: 1047486 - DNA, 15 bp, Homo sapiens
acaagcgtacttgtc

SEQ ID NO: 1047487 - DNA, 15 bp, Homo sapiens
caagcgtacttgtcc

SEQ ID NO: 1047488 - DNA, 15 bp, Homo sapiens
aagcgtacttgtccc

SEQ ID NO: 1047489 - DNA, 15 bp, Homo sapiens
agcgtacttgtccct

SEQ ID NO: 1047490 - DNA, 15 bp, Homo sapiens
gcgtacttgtccctt

SEQ ID NO: 1047491 - DNA, 15 bp, Homo sapiens
cgtacttgtcccttc

SEQ ID NO: 1047492 - DNA, 15 bp, Homo sapiens
gtacttgtcccttcc

SEQ ID NO: 1047493 - DNA, 15 bp, Homo sapiens
tacttgtcccttccc

SEQ ID NO: 1047494 - DNA, 15 bp, Homo sapiens
acttgtcccttcccc

SEQ ID NO: 1047495 - DNA, 15 bp, Homo sapiens
cttgtcccttcccct

SEQ ID NO: 1047496 - DNA, 15 bp, Homo sapiens
ttgtcccttcccctg

SEQ ID NO: 1047497 - DNA, 15 bp, Homo sapiens
tgtcccttcccctgc

SEQ ID NO: 1047498 - DNA, 15 bp, Homo sapiens
gtcccttcccctgca

SEQ ID NO: 1047499 - DNA, 15 bp, Homo sapiens
tcccttcccctgcag

SEQ ID NO: 1047500 - DNA, 15 bp, Homo sapiens
cccttcccctgcaga

SEQ ID NO: 1047501 - DNA, 15 bp, Homo sapiens
ccttcccctgcagaa

SEQ ID NO: 1047502 - DNA, 15 bp, Homo sapiens
cttcccctgcagaac

SEQ ID NO: 1047503 - DNA, 15 bp, Homo sapiens
ttcccctgcagaacg

SEQ ID NO: 1047504 - DNA, 15 bp, Homo sapiens
tcccctgcagaacgt

SEQ ID NO: 1047505 - DNA, 15 bp, Homo sapiens
cccctgcagaacgtg

SEQ ID NO: 1047506 - DNA, 15 bp, Homo sapiens
ccctgcagaacgtgc

SEQ ID NO: 1047507 - DNA, 15 bp, Homo sapiens
cctgcagaacgtgcg

SEQ ID NO: 1047508 - DNA, 15 bp, Homo sapiens
ctgcagaacgtgcgc

SEQ ID NO: 1047509 - DNA, 15 bp, Homo sapiens
tgcagaacgtgcgca

SEQ ID NO: 1047510 - DNA, 15 bp, Homo sapiens
gcagaacgtgcgcat

SEQ ID NO: 1047511 - DNA, 15 bp, Homo sapiens
cagaacgtgcgcatc

SEQ ID NO: 1047512 - DNA, 15 bp, Homo sapiens
agaacgtgcgcatcg

SEQ ID NO: 1047513 - DNA, 15 bp, Homo sapiens
gaacgtgcgcatcga

SEQ ID NO: 1047514 - DNA, 15 bp, Homo sapiens
aacgtgcgcatcgac

SEQ ID NO: 1047515 - DNA, 15 bp, Homo sapiens
acgtgcgcatcgacc

SEQ ID NO: 1047516 - DNA, 15 bp, Homo sapiens
cgtgcgcatcgaccc

SEQ ID NO: 1047517 - DNA, 15 bp, Homo sapiens
gtgcgcatcgacccc

SEQ ID NO: 1047518 - DNA, 15 bp, Homo sapiens
tgcgcatcgacccca

SEQ ID NO: 1047519 - DNA, 15 bp, Homo sapiens
gcgcatcgaccccag

SEQ ID NO: 1047520 - DNA, 15 bp, Homo sapiens
cgcatcgaccccagt

SEQ ID NO: 1047521 - DNA, 15 bp, Homo sapiens
gcatcgaccccagta

SEQ ID NO: 1047522 - DNA, 15 bp, Homo sapiens
catcgaccccagtag

SEQ ID NO: 1047523 - DNA, 15 bp, Homo sapiens
atcgaccccagtagc

SEQ ID NO: 1047524 - DNA, 15 bp, Homo sapiens
tcgaccccagtagcc

SEQ ID NO: 1047525 - DNA, 15 bp, Homo sapiens
cgaccccagtagcct

SEQ ID NO: 1047526 - DNA, 15 bp, Homo sapiens
gaccccagtagcctg

SEQ ID NO: 1047527 - DNA, 15 bp, Homo sapiens
accccagtagcctgt

SEQ ID NO: 1047528 - DNA, 15 bp, Homo sapiens
ccccagtagcctgtc

SEQ ID NO: 1047529 - DNA, 15 bp, Homo sapiens
cccagtagcctgtcc

SEQ ID NO: 1047530 - DNA, 15 bp, Homo sapiens
ccagtagcctgtcct

SEQ ID NO: 1047531 - DNA, 15 bp, Homo sapiens
cagtagcctgtcctt

SEQ ID NO: 1047532 - DNA, 15 bp, Homo sapiens
agtagcctgtccttc

SEQ ID NO: 1047533 - DNA, 15 bp, Homo sapiens
gtagcctgtccttca

SEQ ID NO: 1047534 - DNA, 15 bp, Homo sapiens
tagcctgtccttcaa

SEQ ID NO: 1047535 - DNA, 15 bp, Homo sapiens
agcctgtccttcaac

SEQ ID NO: 1047536 - DNA, 15 bp, Homo sapiens
gcctgtccttcaaca

SEQ ID NO: 1047537 - DNA, 15 bp, Homo sapiens
cctgtccttcaacat

SEQ ID NO: 1047538 - DNA, 15 bp, Homo sapiens
ctgtccttcaacatg

SEQ ID NO: 1047539 - DNA, 15 bp, Homo sapiens
tgtccttcaacatgt

SEQ ID NO: 1047540 - DNA, 15 bp, Homo sapiens
gtccttcaacatgtg

SEQ ID NO: 1047541 - DNA, 15 bp, Homo sapiens
tccttcaacatgtgg

SEQ ID NO: 1047542 - DNA, 15 bp, Homo sapiens
ccttcaacatgtgga

SEQ ID NO: 1047543 - DNA, 15 bp, Homo sapiens
cttcaacatgtggaa

SEQ ID NO: 1047544 - DNA, 15 bp, Homo sapiens
ttcaacatgtggaag

SEQ ID NO: 1047545 - DNA, 15 bp, Homo sapiens
tcaacatgtggaagg

SEQ ID NO: 1047546 - DNA, 15 bp, Homo sapiens
caacatgtggaagga

SEQ ID NO: 1047547 - DNA, 15 bp, Homo sapiens
aacatgtggaaggag

SEQ ID NO: 1047548 - DNA, 15 bp, Homo sapiens
acatgtggaaggaga

SEQ ID NO: 1047549 - DNA, 15 bp, Homo sapiens
catgtggaaggagat

SEQ ID NO: 1047550 - DNA, 15 bp, Homo sapiens
atgtggaaggagatc

SEQ ID NO: 1047551 - DNA, 15 bp, Homo sapiens
tgtggaaggagatcc

SEQ ID NO: 1047552 - DNA, 15 bp, Homo sapiens
gtggaaggagatccc

SEQ ID NO: 1047553 - DNA, 15 bp, Homo sapiens
tggaaggagatccct

SEQ ID NO: 1047554 - DNA, 15 bp, Homo sapiens
ggaaggagatcccta

SEQ ID NO: 1047555 - DNA, 15 bp, Homo sapiens
gaaggagatccctat

SEQ ID NO: 1047556 - DNA, 15 bp, Homo sapiens
aaggagatccctatc

SEQ ID NO: 1047557 - DNA, 15 bp, Homo sapiens
aggagatccctatcc

SEQ ID NO: 1047558 - DNA, 15 bp, Homo sapiens
ggagatccctatccc

SEQ ID NO: 1047559 - DNA, 15 bp, Homo sapiens
gagatccctatcccc

SEQ ID NO: 1047560 - DNA, 15 bp, Homo sapiens
agatccctatcccct

SEQ ID NO: 1047561 - DNA, 15 bp, Homo sapiens
gatccctatcccctt

SEQ ID NO: 1047562 - DNA, 15 bp, Homo sapiens
atccctatccccttc

SEQ ID NO: 1047563 - DNA, 15 bp, Homo sapiens
tccctatccccttct

SEQ ID NO: 1047564 - DNA, 15 bp, Homo sapiens
ccctatccccttcta

SEQ ID NO: 1047565 - DNA, 15 bp, Homo sapiens
cctatccccttctat

SEQ ID NO: 1047566 - DNA, 15 bp, Homo sapiens
ctatccccttctatc

SEQ ID NO: 1047567 - DNA, 15 bp, Homo sapiens
tatccccttctatct

SEQ ID NO: 1047568 - DNA, 15 bp, Homo sapiens
atccccttctatctc

SEQ ID NO: 1047569 - DNA, 15 bp, Homo sapiens
tccccttctatctct

SEQ ID NO: 1047570 - DNA, 15 bp, Homo sapiens
ccccttctatctctc

SEQ ID NO: 1047571 - DNA, 15 bp, Homo sapiens
cccttctatctctcc

SEQ ID NO: 1047572 - DNA, 15 bp, Homo sapiens
ccttctatctctccg

SEQ ID NO: 1047573 - DNA, 15 bp, Homo sapiens
cttctatctctccgt

SEQ ID NO: 1047574 - DNA, 15 bp, Homo sapiens
ttctatctctccgtc

SEQ ID NO: 1047575 - DNA, 15 bp, Homo sapiens
tctatctctccgtct

SEQ ID NO: 1047576 - DNA, 15 bp, Homo sapiens
ctatctctccgtcta

SEQ ID NO: 1047577 - DNA, 15 bp, Homo sapiens
tatctctccgtctac

SEQ ID NO: 1047578 - DNA, 15 bp, Homo sapiens
atctctccgtctact

SEQ ID NO: 1047579 - DNA, 15 bp, Homo sapiens
tctctccgtctactt

SEQ ID NO: 1047580 - DNA, 15 bp, Homo sapiens
ctctccgtctacttc

SEQ ID NO: 1047581 - DNA, 15 bp, Homo sapiens
tctccgtctacttct

SEQ ID NO: 1047582 - DNA, 15 bp, Homo sapiens
ctccgtctacttctt

SEQ ID NO: 1047583 - DNA, 15 bp, Homo sapiens
tccgtctacttcttt

SEQ ID NO: 1047584 - DNA, 15 bp, Homo sapiens
ccgtctacttctttg

SEQ ID NO: 1047585 - DNA, 15 bp, Homo sapiens
cgtctacttctttga

SEQ ID NO: 1047586 - DNA, 15 bp, Homo sapiens
gtctacttctttgac

SEQ ID NO: 1047587 - DNA, 15 bp, Homo sapiens
tctacttctttgacg

SEQ ID NO: 1047588 - DNA, 15 bp, Homo sapiens
ctacttctttgacgt

SEQ ID NO: 1047589 - DNA, 15 bp, Homo sapiens
tacttctttgacgtc

SEQ ID NO: 1047590 - DNA, 15 bp, Homo sapiens
acttctttgacgtca

SEQ ID NO: 1047591 - DNA, 15 bp, Homo sapiens
cttctttgacgtcat

SEQ ID NO: 1047592 - DNA, 15 bp, Homo sapiens
ttctttgacgtcatg

SEQ ID NO: 1047593 - DNA, 15 bp, Homo sapiens
tctttgacgtcatga

SEQ ID NO: 1047594 - DNA, 15 bp, Homo sapiens
ctttgacgtcatgaa

SEQ ID NO: 1047595 - DNA, 15 bp, Homo sapiens
tttgacgtcatgaac

SEQ ID NO: 1047596 - DNA, 15 bp, Homo sapiens
ttgacgtcatgaacc

SEQ ID NO: 1047597 - DNA, 15 bp, Homo sapiens
tgacgtcatgaaccc

SEQ ID NO: 1047598 - DNA, 15 bp, Homo sapiens
gacgtcatgaacccc

SEQ ID NO: 1047599 - DNA, 15 bp, Homo sapiens
acgtcatgaacccca

SEQ ID NO: 1047600 - DNA, 15 bp, Homo sapiens
cgtcatgaaccccag

SEQ ID NO: 1047601 - DNA, 15 bp, Homo sapiens
gtcatgaaccccagc

SEQ ID NO: 1047602 - DNA, 15 bp, Homo sapiens
tcatgaaccccagcg

SEQ ID NO: 1047603 - DNA, 15 bp, Homo sapiens
catgaaccccagcga

SEQ ID NO: 1047604 - DNA, 15 bp, Homo sapiens
atgaaccccagcgag

SEQ ID NO: 1047605 - DNA, 15 bp, Homo sapiens
tgaaccccagcgaga

SEQ ID NO: 1047606 - DNA, 15 bp, Homo sapiens
gaaccccagcgagat

SEQ ID NO: 1047607 - DNA, 15 bp, Homo sapiens
aaccccagcgagatc

SEQ ID NO: 1047608 - DNA, 15 bp, Homo sapiens
accccagcgagatcc

SEQ ID NO: 1047609 - DNA, 15 bp, Homo sapiens
ccccagcgagatcct

SEQ ID NO: 1047610 - DNA, 15 bp, Homo sapiens
cccagcgagatcctg

SEQ ID NO: 1047611 - DNA, 15 bp, Homo sapiens
ccagcgagatcctga

SEQ ID NO: 1047612 - DNA, 15 bp, Homo sapiens
cagcgagatcctgaa

SEQ ID NO: 1047613 - DNA, 15 bp, Homo sapiens
agcgagatcctgaag

SEQ ID NO: 1047614 - DNA, 15 bp, Homo sapiens
gcgagatcctgaagg

SEQ ID NO: 1047615 - DNA, 15 bp, Homo sapiens
cgagatcctgaaggg

SEQ ID NO: 1047616 - DNA, 15 bp, Homo sapiens
gagatcctgaagggc

SEQ ID NO: 1047617 - DNA, 15 bp, Homo sapiens
agatcctgaagggcg

SEQ ID NO: 1047618 - DNA, 15 bp, Homo sapiens
gatcctgaagggcga

SEQ ID NO: 1047619 - DNA, 15 bp, Homo sapiens
atcctgaagggcgag

SEQ ID NO: 1047620 - DNA, 15 bp, Homo sapiens
tcctgaagggcgaga

SEQ ID NO: 1047621 - DNA, 15 bp, Homo sapiens
cctgaagggcgagaa

SEQ ID NO: 1047622 - DNA, 15 bp, Homo sapiens
ctgaagggcgagaag

SEQ ID NO: 1047623 - DNA, 15 bp, Homo sapiens
tgaagggcgagaagc

SEQ ID NO: 1047624 - DNA, 15 bp, Homo sapiens
gaagggcgagaagcc

SEQ ID NO: 1047625 - DNA, 15 bp, Homo sapiens
aagggcgagaagccg

SEQ ID NO: 1047626 - DNA, 15 bp, Homo sapiens
agggcgagaagccgc

SEQ ID NO: 1047627 - DNA, 15 bp, Homo sapiens
gggcgagaagccgca

SEQ ID NO: 1047628 - DNA, 15 bp, Homo sapiens
ggcgagaagccgcag

SEQ ID NO: 1047629 - DNA, 15 bp, Homo sapiens
gcgagaagccgcagg

SEQ ID NO: 1047630 - DNA, 15 bp, Homo sapiens
cgagaagccgcaggt

SEQ ID NO: 1047631 - DNA, 15 bp, Homo sapiens
gagaagccgcaggtg

SEQ ID NO: 1047632 - DNA, 15 bp, Homo sapiens
agaagccgcaggtgc

SEQ ID NO: 1047633 - DNA, 15 bp, Homo sapiens
gaagccgcaggtgcg

SEQ ID NO: 1047634 - DNA, 15 bp, Homo sapiens
aagccgcaggtgcgg

SEQ ID NO: 1047635 - DNA, 15 bp, Homo sapiens
agccgcaggtgcggg

SEQ ID NO: 1047636 - DNA, 15 bp, Homo sapiens
gccgcaggtgcggga

SEQ ID NO: 1047637 - DNA, 15 bp, Homo sapiens
ccgcaggtgcgggag

SEQ ID NO: 1047638 - DNA, 15 bp, Homo sapiens
cgcaggtgcgggagc

SEQ ID NO: 1047639 - DNA, 15 bp, Homo sapiens
gcaggtgcgggagcg

SEQ ID NO: 1047640 - DNA, 15 bp, Homo sapiens
caggtgcgggagcgc

SEQ ID NO: 1047641 - DNA, 15 bp, Homo sapiens
aggtgcgggagcgcg

SEQ ID NO: 1047642 - DNA, 15 bp, Homo sapiens
ggtgcgggagcgcgg

SEQ ID NO: 1047643 - DNA, 15 bp, Homo sapiens
gtgcgggagcgcggg

SEQ ID NO: 1047644 - DNA, 15 bp, Homo sapiens
tgcgggagcgcgggc

SEQ ID NO: 1047645 - DNA, 15 bp, Homo sapiens
gcgggagcgcgggcc

SEQ ID NO: 1047646 - DNA, 15 bp, Homo sapiens
cgggagcgcgggccc

SEQ ID NO: 1047647 - DNA, 15 bp, Homo sapiens
gggagcgcgggccct

SEQ ID NO: 1047648 - DNA, 15 bp, Homo sapiens
ggagcgcgggcccta

SEQ ID NO: 1047649 - DNA, 15 bp, Homo sapiens
gagcgcgggccctac

SEQ ID NO: 1047650 - DNA, 15 bp, Homo sapiens
agcgcgggccctacg

SEQ ID NO: 1047651 - DNA, 15 bp, Homo sapiens
gcgcgggccctacgt

SEQ ID NO: 1047652 - DNA, 15 bp, Homo sapiens
cgcgggccctacgtg

SEQ ID NO: 1047653 - DNA, 15 bp, Homo sapiens
gcgggccctacgtgt

SEQ ID NO: 1047654 - DNA, 15 bp, Homo sapiens
cgggccctacgtgta

SEQ ID NO: 1047655 - DNA, 15 bp, Homo sapiens
gggccctacgtgtac

SEQ ID NO: 1047656 - DNA, 15 bp, Homo sapiens
ggccctacgtgtaca

SEQ ID NO: 1047657 - DNA, 15 bp, Homo sapiens
gccctacgtgtacag

SEQ ID NO: 1047658 - DNA, 15 bp, Homo sapiens
ccctacgtgtacagg

SEQ ID NO: 1047659 - DNA, 15 bp, Homo sapiens
cctacgtgtacaggt

SEQ ID NO: 1047660 - DNA, 15 bp, Homo sapiens
ctacgtgtacaggtg

SEQ ID NO: 1047661 - DNA, 15 bp, Homo sapiens
tacgtgtacaggtga

SEQ ID NO: 1047662 - DNA, 15 bp, Homo sapiens
acgtgtacaggtgag

SEQ ID NO: 1047663 - DNA, 15 bp, Homo sapiens
cgtgtacaggtgagg

SEQ ID NO: 1047664 - DNA, 15 bp, Homo sapiens
gtgtacaggtgaggc

SEQ ID NO: 1047665 - DNA, 15 bp, Homo sapiens
tgtacaggtgaggct

SEQ ID NO: 1047666 - DNA, 15 bp, Homo sapiens
gtacaggtgaggctg

SEQ ID NO: 1047667 - DNA, 15 bp, Homo sapiens
tacaggtgaggctgt

SEQ ID NO: 1047668 - DNA, 15 bp, Homo sapiens
acaggtgaggctgtg

SEQ ID NO: 1047669 - DNA, 15 bp, Homo sapiens
caggtgaggctgtgt

SEQ ID NO: 1047670 - DNA, 15 bp, Homo sapiens
aggtgaggctgtgtc

SEQ ID NO: 1047671 - DNA, 15 bp, Homo sapiens
ggtgaggctgtgtcc

SEQ ID NO: 1047672 - DNA, 15 bp, Homo sapiens
gtgaggctgtgtcca

SEQ ID NO: 1047673 - DNA, 15 bp, Homo sapiens
tgaggctgtgtccag

SEQ ID NO: 1047674 - DNA, 15 bp, Homo sapiens
gaggctgtgtccagg

SEQ ID NO: 1047675 - DNA, 15 bp, Homo sapiens
aggctgtgtccaggt

SEQ ID NO: 1047676 - DNA, 15 bp, Homo sapiens
ggctgtgtccaggtg

SEQ ID NO: 1047677 - DNA, 15 bp, Homo sapiens
gctgtgtccaggtga

SEQ ID NO: 1047678 - DNA, 15 bp, Homo sapiens
ctgtgtccaggtgag

SEQ ID NO: 1047679 - DNA, 15 bp, Homo sapiens
tgtgtccaggtgagg

SEQ ID NO: 1047680 - DNA, 15 bp, Homo sapiens
gtgtccaggtgaggg

SEQ ID NO: 1047681 - DNA, 15 bp, Homo sapiens
tgtccaggtgagggt

SEQ ID NO: 1047682 - DNA, 15 bp, Homo sapiens
gtccaggtgagggtg

SEQ ID NO: 1047683 - DNA, 15 bp, Homo sapiens
tccaggtgagggtgg

SEQ ID NO: 1047684 - DNA, 15 bp, Homo sapiens
ccaggtgagggtgga

SEQ ID NO: 1047685 - DNA, 15 bp, Homo sapiens
caggtgagggtggag

SEQ ID NO: 1047686 - DNA, 15 bp, Homo sapiens
aggtgagggtggagg

SEQ ID NO: 1047687 - DNA, 15 bp, Homo sapiens
ggtgagggtggaggg

SEQ ID NO: 1047688 - DNA, 15 bp, Homo sapiens
gtgagggtggagggg

SEQ ID NO: 1047689 - DNA, 15 bp, Homo sapiens
tgagggtggaggggc

SEQ ID NO: 1047690 - DNA, 15 bp, Homo sapiens
gagggtggaggggcc

SEQ ID NO: 1047691 - DNA, 15 bp, Homo sapiens
agggtggaggggccg

SEQ ID NO: 1047692 - DNA, 15 bp, Homo sapiens
gggtggaggggccgg

SEQ ID NO: 1047693 - DNA, 15 bp, Homo sapiens
ggtggaggggccggc

SEQ ID NO: 1047694 - DNA, 15 bp, Homo sapiens
gtggaggggccggct

SEQ ID NO: 1047695 - DNA, 15 bp, Homo sapiens
tggaggggccggctg

SEQ ID NO: 1047696 - DNA, 15 bp, Homo sapiens
ggaggggccggctga

SEQ ID NO: 1047697 - DNA, 15 bp, Homo sapiens
gaggggccggctgag

SEQ ID NO: 1047698 - DNA, 15 bp, Homo sapiens
aggggccggctgagg

SEQ ID NO: 1047699 - DNA, 15 bp, Homo sapiens
ggggccggctgaggc

SEQ ID NO: 1047700 - DNA, 15 bp, Homo sapiens
gggccggctgaggct

SEQ ID NO: 1047701 - DNA, 15 bp, Homo sapiens
ggccggctgaggctg

SEQ ID NO: 1047702 - DNA, 15 bp, Homo sapiens
gccggctgaggctgg

SEQ ID NO: 1047703 - DNA, 15 bp, Homo sapiens
ccggctgaggctggg

SEQ ID NO: 1047704 - DNA, 15 bp, Homo sapiens
cggctgaggctgggc

SEQ ID NO: 1047705 - DNA, 15 bp, Homo sapiens
ggctgaggctgggca

SEQ ID NO: 1047706 - DNA, 15 bp, Homo sapiens
gctgaggctgggcag

SEQ ID NO: 1047707 - DNA, 15 bp, Homo sapiens
ctgaggctgggcagg

SEQ ID NO: 1047708 - DNA, 15 bp, Homo sapiens
tgaggctgggcaggg

SEQ ID NO: 1047709 - DNA, 15 bp, Homo sapiens
gaggctgggcagggg

SEQ ID NO: 1047710 - DNA, 15 bp, Homo sapiens
aggctgggcagggga

SEQ ID NO: 1047711 - DNA, 15 bp, Homo sapiens
ggctgggcaggggag

SEQ ID NO: 1047712 - DNA, 15 bp, Homo sapiens
gctgggcaggggagg

SEQ ID NO: 1047713 - DNA, 15 bp, Homo sapiens
ctgggcaggggaggg

SEQ ID NO: 1047714 - DNA, 15 bp, Homo sapiens
tgggcaggggagggg

SEQ ID NO: 1047715 - DNA, 15 bp, Homo sapiens
gggcaggggaggggt

SEQ ID NO: 1047716 - DNA, 15 bp, Homo sapiens
ggcaggggaggggtc

SEQ ID NO: 1047717 - DNA, 15 bp, Homo sapiens
gcaggggaggggtct

SEQ ID NO: 1047718 - DNA, 15 bp, Homo sapiens
caggggaggggtctc

SEQ ID NO: 1047719 - DNA, 15 bp, Homo sapiens
aggggaggggtctca

SEQ ID NO: 1047720 - DNA, 15 bp, Homo sapiens
ggggaggggtctcag

SEQ ID NO: 1047721 - DNA, 15 bp, Homo sapiens
gggaggggtctcaga

SEQ ID NO: 1047722 - DNA, 15 bp, Homo sapiens
ggaggggtctcagag

SEQ ID NO: 1047723 - DNA, 15 bp, Homo sapiens
gaggggtctcagagt

SEQ ID NO: 1047724 - DNA, 15 bp, Homo sapiens
aggggtctcagagtg

SEQ ID NO: 1047725 - DNA, 15 bp, Homo sapiens
ggggtctcagagtgg

SEQ ID NO: 1047726 - DNA, 15 bp, Homo sapiens
gggtctcagagtgga

SEQ ID NO: 1047727 - DNA, 15 bp, Homo sapiens
ggtctcagagtggac

SEQ ID NO: 1047728 - DNA, 15 bp, Homo sapiens
gtctcagagtggacg

SEQ ID NO: 1047729 - DNA, 15 bp, Homo sapiens
tctcagagtggacgg

SEQ ID NO: 1047730 - DNA, 15 bp, Homo sapiens
ctcagagtggacggg

SEQ ID NO: 1047731 - DNA, 15 bp, Homo sapiens
tcagagtggacggga

SEQ ID NO: 1047732 - DNA, 15 bp, Homo sapiens
cagagtggacgggat

SEQ ID NO: 1047733 - DNA, 15 bp, Homo sapiens
agagtggacgggatg

SEQ ID NO: 1047734 - DNA, 15 bp, Homo sapiens
gagtggacgggatgg

SEQ ID NO: 1047735 - DNA, 15 bp, Homo sapiens
agtggacgggatggg

SEQ ID NO: 1047736 - DNA, 15 bp, Homo sapiens
gtggacgggatgggg

SEQ ID NO: 1047737 - DNA, 15 bp, Homo sapiens
tggacgggatgggga

SEQ ID NO: 1047738 - DNA, 15 bp, Homo sapiens
ggacgggatggggag

SEQ ID NO: 1047739 - DNA, 15 bp, Homo sapiens
gacgggatggggagg

SEQ ID NO: 1047740 - DNA, 15 bp, Homo sapiens
acgggatggggaggc

SEQ ID NO: 1047741 - DNA, 15 bp, Homo sapiens
cgggatggggaggct

SEQ ID NO: 1047742 - DNA, 15 bp, Homo sapiens
gggatggggaggctg

SEQ ID NO: 1047743 - DNA, 15 bp, Homo sapiens
ggatggggaggctgc

SEQ ID NO: 1047744 - DNA, 15 bp, Homo sapiens
gatggggaggctgct

SEQ ID NO: 1047745 - DNA, 15 bp, Homo sapiens
atggggaggctgctg

SEQ ID NO: 1047746 - DNA, 15 bp, Homo sapiens
tggggaggctgctga

SEQ ID NO: 1047747 - DNA, 15 bp, Homo sapiens
ggggaggctgctgac

SEQ ID NO: 1047748 - DNA, 15 bp, Homo sapiens
gggaggctgctgact

SEQ ID NO: 1047749 - DNA, 15 bp, Homo sapiens
ggaggctgctgactg

SEQ ID NO: 1047750 - DNA, 15 bp, Homo sapiens
gaggctgctgactga

SEQ ID NO: 1047751 - DNA, 15 bp, Homo sapiens
aggctgctgactgag

SEQ ID NO: 1047752 - DNA, 15 bp, Homo sapiens
ggctgctgactgagc

SEQ ID NO: 1047753 - DNA, 15 bp, Homo sapiens
gctgctgactgagcc

SEQ ID NO: 1047754 - DNA, 15 bp, Homo sapiens
ctgctgactgagccc

SEQ ID NO: 1047755 - DNA, 15 bp, Homo sapiens
tgctgactgagcccc

SEQ ID NO: 1047756 - DNA, 15 bp, Homo sapiens
gctgactgagcccca

SEQ ID NO: 1047757 - DNA, 15 bp, Homo sapiens
ctgactgagccccag

SEQ ID NO: 1047758 - DNA, 15 bp, Homo sapiens
tgactgagccccaga

SEQ ID NO: 1047759 - DNA, 15 bp, Homo sapiens
gactgagccccagag

SEQ ID NO: 1047760 - DNA, 15 bp, Homo sapiens
actgagccccagaga

SEQ ID NO: 1047761 - DNA, 15 bp, Homo sapiens
ctgagccccagagat

SEQ ID NO: 1047762 - DNA, 15 bp, Homo sapiens
tgagccccagagatt

SEQ ID NO: 1047763 - DNA, 15 bp, Homo sapiens
gagccccagagattg

SEQ ID NO: 1047764 - DNA, 15 bp, Homo sapiens
agccccagagattgt

SEQ ID NO: 1047765 - DNA, 15 bp, Homo sapiens
gccccagagattgtt

SEQ ID NO: 1047766 - DNA, 15 bp, Homo sapiens
ccccagagattgttc

SEQ ID NO: 1047767 - DNA, 15 bp, Homo sapiens
cccagagattgttcc

SEQ ID NO: 1047768 - DNA, 15 bp, Homo sapiens
ccagagattgttccg

SEQ ID NO: 1047769 - DNA, 15 bp, Homo sapiens
cagagattgttccgg

SEQ ID NO: 1047770 - DNA, 15 bp, Homo sapiens
agagattgttccgga

SEQ ID NO: 1047771 - DNA, 15 bp, Homo sapiens
gagattgttccggaa

SEQ ID NO: 1047772 - DNA, 15 bp, Homo sapiens
agattgttccggaag

SEQ ID NO: 1047773 - DNA, 15 bp, Homo sapiens
gattgttccggaagc

SEQ ID NO: 1047774 - DNA, 15 bp, Homo sapiens
attgttccggaagca

SEQ ID NO: 1047775 - DNA, 15 bp, Homo sapiens
ttgttccggaagcag

SEQ ID NO: 1047776 - DNA, 15 bp, Homo sapiens
tgttccggaagcagg

SEQ ID NO: 1047777 - DNA, 15 bp, Homo sapiens
gttccggaagcaggc

SEQ ID NO: 1047778 - DNA, 15 bp, Homo sapiens
ttccggaagcaggca

SEQ ID NO: 1047779 - DNA, 15 bp, Homo sapiens
tccggaagcaggcaa

SEQ ID NO: 1047780 - DNA, 15 bp, Homo sapiens
ccggaagcaggcaag

SEQ ID NO: 1047781 - DNA, 15 bp, Homo sapiens
cggaagcaggcaagt

SEQ ID NO: 1047782 - DNA, 15 bp, Homo sapiens
ggaagcaggcaagtc

SEQ ID NO: 1047783 - DNA, 15 bp, Homo sapiens
gaagcaggcaagtca

SEQ ID NO: 1047784 - DNA, 15 bp, Homo sapiens
aagcaggcaagtcat

SEQ ID NO: 1047785 - DNA, 15 bp, Homo sapiens
agcaggcaagtcata

SEQ ID NO: 1047786 - DNA, 15 bp, Homo sapiens
gcaggcaagtcatag

SEQ ID NO: 1047787 - DNA, 15 bp, Homo sapiens
caggcaagtcatagt

SEQ ID NO: 1047788 - DNA, 15 bp, Homo sapiens
aggcaagtcatagtc

SEQ ID NO: 1047789 - DNA, 15 bp, Homo sapiens
ggcaagtcatagtcg

SEQ ID NO: 1047790 - DNA, 15 bp, Homo sapiens
gcaagtcatagtcgg

SEQ ID NO: 1047791 - DNA, 15 bp, Homo sapiens
caagtcatagtcggg

SEQ ID NO: 1047792 - DNA, 15 bp, Homo sapiens
aagtcatagtcgggg

SEQ ID NO: 1047793 - DNA, 15 bp, Homo sapiens
agtcatagtcggggt

SEQ ID NO: 1047794 - DNA, 15 bp, Homo sapiens
gtcatagtcggggta

SEQ ID NO: 1047795 - DNA, 15 bp, Homo sapiens
tcatagtcggggtaa

SEQ ID NO: 1047796 - DNA, 15 bp, Homo sapiens
catagtcggggtaag

SEQ ID NO: 1047797 - DNA, 15 bp, Homo sapiens
atagtcggggtaagt

SEQ ID NO: 1047798 - DNA, 15 bp, Homo sapiens
tagtcggggtaagtg

SEQ ID NO: 1047799 - DNA, 15 bp, Homo sapiens
agtcggggtaagtgc

SEQ ID NO: 1047800 - DNA, 15 bp, Homo sapiens
gtcggggtaagtgct

SEQ ID NO: 1047801 - DNA, 15 bp, Homo sapiens
tcggggtaagtgcta

SEQ ID NO: 1047802 - DNA, 15 bp, Homo sapiens
cggggtaagtgctag

SEQ ID NO: 1047803 - DNA, 15 bp, Homo sapiens
ggggtaagtgctagt

SEQ ID NO: 1047804 - DNA, 15 bp, Homo sapiens
gggtaagtgctagtc

SEQ ID NO: 1047805 - DNA, 15 bp, Homo sapiens
ggtaagtgctagtcc

SEQ ID NO: 1047806 - DNA, 15 bp, Homo sapiens
gtaagtgctagtccc

SEQ ID NO: 1047807 - DNA, 15 bp, Homo sapiens
taagtgctagtccca

SEQ ID NO: 1047808 - DNA, 15 bp, Homo sapiens
aagtgctagtcccag

SEQ ID NO: 1047809 - DNA, 15 bp, Homo sapiens
agtgctagtcccaga

SEQ ID NO: 1047810 - DNA, 15 bp, Homo sapiens
gtgctagtcccagag

SEQ ID NO: 1047811 - DNA, 15 bp, Homo sapiens
tgctagtcccagaga

SEQ ID NO: 1047812 - DNA, 15 bp, Homo sapiens
gctagtcccagagaa

SEQ ID NO: 1047813 - DNA, 15 bp, Homo sapiens
ctagtcccagagaag

SEQ ID NO: 1047814 - DNA, 15 bp, Homo sapiens
tagtcccagagaagt

SEQ ID NO: 1047815 - DNA, 15 bp, Homo sapiens
agtcccagagaagtt

SEQ ID NO: 1047816 - DNA, 15 bp, Homo sapiens
gtcccagagaagttt

SEQ ID NO: 1047817 - DNA, 15 bp, Homo sapiens
tcccagagaagtttt

SEQ ID NO: 1047818 - DNA, 15 bp, Homo sapiens
cccagagaagttttt

SEQ ID NO: 1047819 - DNA, 15 bp, Homo sapiens
ccagagaagtttttg

SEQ ID NO: 1047820 - DNA, 15 bp, Homo sapiens
cagagaagtttttgt

SEQ ID NO: 1047821 - DNA, 15 bp, Homo sapiens
agagaagtttttgtt

SEQ ID NO: 1047822 - DNA, 15 bp, Homo sapiens
gagaagtttttgttt

SEQ ID NO: 1047823 - DNA, 15 bp, Homo sapiens
agaagtttttgtttt

SEQ ID NO: 1047824 - DNA, 15 bp, Homo sapiens
gaagtttttgtttta

SEQ ID NO: 1047825 - DNA, 15 bp, Homo sapiens
aagtttttgttttag

SEQ ID NO: 1047826 - DNA, 15 bp, Homo sapiens
agtttttgttttagg

SEQ ID NO: 1047827 - DNA, 15 bp, Homo sapiens
gtttttgttttaggg

SEQ ID NO: 1047828 - DNA, 15 bp, Homo sapiens
tttttgttttagggt

SEQ ID NO: 1047829 - DNA, 15 bp, Homo sapiens
ttttgttttagggtt

SEQ ID NO: 1047830 - DNA, 15 bp, Homo sapiens
tttgttttagggttt

SEQ ID NO: 1047831 - DNA, 15 bp, Homo sapiens
ttgttttagggtttt

SEQ ID NO: 1047832 - DNA, 15 bp, Homo sapiens
tgttttagggttttt

SEQ ID NO: 1047833 - DNA, 15 bp, Homo sapiens
gttttagggtttttt

SEQ ID NO: 1047834 - DNA, 15 bp, Homo sapiens
ttttagggttttttt

SEQ ID NO: 1047835 - DNA, 15 bp, Homo sapiens
tttagggtttttttt

SEQ ID NO: 1047836 - DNA, 15 bp, Homo sapiens
ttagggttttttttt

SEQ ID NO: 1047837 - DNA, 15 bp, Homo sapiens
tagggtttttttttt

SEQ ID NO: 1047838 - DNA, 15 bp, Homo sapiens
agggttttttttttt

SEQ ID NO: 1047839 - DNA, 15 bp, Homo sapiens
gggtttttttttttt

SEQ ID NO: 1047840 - DNA, 15 bp, Homo sapiens
ggttttttttttttt

SEQ ID NO: 1047841 - DNA, 15 bp, Homo sapiens
gtttttttttttttt

SEQ ID NO: 1047842 - DNA, 15 bp, Homo sapiens
tttttttttttttag

SEQ ID NO: 1047843 - DNA, 15 bp, Homo sapiens
ttttttttttttaga

SEQ ID NO: 1047844 - DNA, 15 bp, Homo sapiens
tttttttttttagag

SEQ ID NO: 1047845 - DNA, 15 bp, Homo sapiens
ttttttttttagaga

SEQ ID NO: 1047846 - DNA, 15 bp, Homo sapiens
tttttttttagagat

SEQ ID NO: 1047847 - DNA, 15 bp, Homo sapiens
ttttttttagagatg

SEQ ID NO: 1047848 - DNA, 15 bp, Homo sapiens
tttttttagagatgg

SEQ ID NO: 1047849 - DNA, 15 bp, Homo sapiens
ttttttagagatggg

SEQ ID NO: 1047850 - DNA, 15 bp, Homo sapiens
tttttagagatggga

SEQ ID NO: 1047851 - DNA, 15 bp, Homo sapiens
ttttagagatgggat

SEQ ID NO: 1047852 - DNA, 15 bp, Homo sapiens
tttagagatgggatc

SEQ ID NO: 1047853 - DNA, 15 bp, Homo sapiens
ttagagatgggatct

SEQ ID NO: 1047854 - DNA, 15 bp, Homo sapiens
tagagatgggatctt

SEQ ID NO: 1047855 - DNA, 15 bp, Homo sapiens
agagatgggatcttg

SEQ ID NO: 1047856 - DNA, 15 bp, Homo sapiens
gagatgggatcttgc

SEQ ID NO: 1047857 - DNA, 15 bp, Homo sapiens
agatgggatcttgct

SEQ ID NO: 1047858 - DNA, 15 bp, Homo sapiens
gatgggatcttgcta

SEQ ID NO: 1047859 - DNA, 15 bp, Homo sapiens
atgggatcttgctat

SEQ ID NO: 1047860 - DNA, 15 bp, Homo sapiens
tgggatcttgctatg

SEQ ID NO: 1047861 - DNA, 15 bp, Homo sapiens
gggatcttgctatgt

SEQ ID NO: 1047862 - DNA, 15 bp, Homo sapiens
ggatcttgctatgtt

SEQ ID NO: 1047863 - DNA, 15 bp, Homo sapiens
ttgcccaggctggtt

SEQ ID NO: 1047864 - DNA, 15 bp, Homo sapiens
tgcccaggctggttt

SEQ ID NO: 1047865 - DNA, 15 bp, Homo sapiens
gcccaggctggtttt

SEQ ID NO: 1047866 - DNA, 15 bp, Homo sapiens
cccaggctggttttg

SEQ ID NO: 1047867 - DNA, 15 bp, Homo sapiens
ccaggctggttttga

SEQ ID NO: 1047868 - DNA, 15 bp, Homo sapiens
caggctggttttgaa

SEQ ID NO: 1047869 - DNA, 15 bp, Homo sapiens
aggctggttttgaag

SEQ ID NO: 1047870 - DNA, 15 bp, Homo sapiens
ggctggttttgaagt

SEQ ID NO: 1047871 - DNA, 15 bp, Homo sapiens
gctggttttgaagtc

SEQ ID NO: 1047872 - DNA, 15 bp, Homo sapiens
ctggttttgaagtcc

SEQ ID NO: 1047873 - DNA, 15 bp, Homo sapiens
tggttttgaagtcct

SEQ ID NO: 1047874 - DNA, 15 bp, Homo sapiens
ggttttgaagtcctg

SEQ ID NO: 1047875 - DNA, 15 bp, Homo sapiens
gttttgaagtcctgg

SEQ ID NO: 1047876 - DNA, 15 bp, Homo sapiens
ttttgaagtcctggg

SEQ ID NO: 1047877 - DNA, 15 bp, Homo sapiens
tttgaagtcctgggc

SEQ ID NO: 1047878 - DNA, 15 bp, Homo sapiens
ttgaagtcctgggct

SEQ ID NO: 1047879 - DNA, 15 bp, Homo sapiens
tgaagtcctgggctc

SEQ ID NO: 1047880 - DNA, 15 bp, Homo sapiens
gaagtcctgggctca

SEQ ID NO: 1047881 - DNA, 15 bp, Homo sapiens
aagtcctgggctcaa

SEQ ID NO: 1047882 - DNA, 15 bp, Homo sapiens
agtcctgggctcaag

SEQ ID NO: 1047883 - DNA, 15 bp, Homo sapiens
gtcctgggctcaagc

SEQ ID NO: 1047884 - DNA, 15 bp, Homo sapiens
tgggctcaagcgatc

SEQ ID NO: 1047885 - DNA, 15 bp, Homo sapiens
gggctcaagcgatcc

SEQ ID NO: 1047886 - DNA, 15 bp, Homo sapiens
ggctcaagcgatcct

SEQ ID NO: 1047887 - DNA, 15 bp, Homo sapiens
gctcaagcgatcctc

SEQ ID NO: 1047888 - DNA, 15 bp, Homo sapiens
tcaagcgatcctccg

SEQ ID NO: 1047889 - DNA, 15 bp, Homo sapiens
caagcgatcctccgc

SEQ ID NO: 1047890 - DNA, 15 bp, Homo sapiens
aagcgatcctccgcc

SEQ ID NO: 1047891 - DNA, 15 bp, Homo sapiens
agcgatcctccgcct

SEQ ID NO: 1047892 - DNA, 15 bp, Homo sapiens
gcgatcctccgcctc

SEQ ID NO: 1047893 - DNA, 15 bp, Homo sapiens
cgatcctccgcctca

SEQ ID NO: 1047894 - DNA, 15 bp, Homo sapiens
gatcctccgcctcag

SEQ ID NO: 1047895 - DNA, 15 bp, Homo sapiens
atcctccgcctcagc

SEQ ID NO: 1047896 - DNA, 15 bp, Homo sapiens
tcctccgcctcagcc

SEQ ID NO: 1047897 - DNA, 15 bp, Homo sapiens
cctccgcctcagcct

SEQ ID NO: 1047898 - DNA, 15 bp, Homo sapiens
ctccgcctcagcctc

SEQ ID NO: 1047899 - DNA, 15 bp, Homo sapiens
tccgcctcagcctct

SEQ ID NO: 1047900 - DNA, 15 bp, Homo sapiens
ccgcctcagcctctc

SEQ ID NO: 1047901 - DNA, 15 bp, Homo sapiens
cgcctcagcctctca

SEQ ID NO: 1047902 - DNA, 15 bp, Homo sapiens
gcctcagcctctcaa

SEQ ID NO: 1047903 - DNA, 15 bp, Homo sapiens
cctcagcctctcaaa

SEQ ID NO: 1047904 - DNA, 15 bp, Homo sapiens
ctcagcctctcaaag

SEQ ID NO: 1047905 - DNA, 15 bp, Homo sapiens
tcagcctctcaaagt

SEQ ID NO: 1047906 - DNA, 15 bp, Homo sapiens
cagcctctcaaagtg

SEQ ID NO: 1047907 - DNA, 15 bp, Homo sapiens
agcctctcaaagtgc

SEQ ID NO: 1047908 - DNA, 15 bp, Homo sapiens
gcctctcaaagtgct

SEQ ID NO: 1047909 - DNA, 15 bp, Homo sapiens
cctctcaaagtgctg

SEQ ID NO: 1047910 - DNA, 15 bp, Homo sapiens
ctctcaaagtgctgg

SEQ ID NO: 1047911 - DNA, 15 bp, Homo sapiens
tctcaaagtgctggg

SEQ ID NO: 1047912 - DNA, 15 bp, Homo sapiens
gggattacaggtgcg

SEQ ID NO: 1047913 - DNA, 15 bp, Homo sapiens
ggattacaggtgcga

SEQ ID NO: 1047914 - DNA, 15 bp, Homo sapiens
gattacaggtgcgaa

SEQ ID NO: 1047915 - DNA, 15 bp, Homo sapiens
attacaggtgcgaat

SEQ ID NO: 1047916 - DNA, 15 bp, Homo sapiens
ttacaggtgcgaatc

SEQ ID NO: 1047917 - DNA, 15 bp, Homo sapiens
tacaggtgcgaatca

SEQ ID NO: 1047918 - DNA, 15 bp, Homo sapiens
acaggtgcgaatcac

SEQ ID NO: 1047919 - DNA, 15 bp, Homo sapiens
caggtgcgaatcacc

SEQ ID NO: 1047920 - DNA, 15 bp, Homo sapiens
aggtgcgaatcacca

SEQ ID NO: 1047921 - DNA, 15 bp, Homo sapiens
ggtgcgaatcaccag

SEQ ID NO: 1047922 - DNA, 15 bp, Homo sapiens
gtgcgaatcaccaga

SEQ ID NO: 1047923 - DNA, 15 bp, Homo sapiens
tgcgaatcaccagac

SEQ ID NO: 1047924 - DNA, 15 bp, Homo sapiens
gcgaatcaccagacg

SEQ ID NO: 1047925 - DNA, 15 bp, Homo sapiens
cgaatcaccagacgt

SEQ ID NO: 1047926 - DNA, 15 bp, Homo sapiens
gaatcaccagacgtt

SEQ ID NO: 1047927 - DNA, 15 bp, Homo sapiens
aatcaccagacgttg

SEQ ID NO: 1047928 - DNA, 15 bp, Homo sapiens
atcaccagacgttgc

SEQ ID NO: 1047929 - DNA, 15 bp, Homo sapiens
tcaccagacgttgcc

SEQ ID NO: 1047930 - DNA, 15 bp, Homo sapiens
caccagacgttgcct

SEQ ID NO: 1047931 - DNA, 15 bp, Homo sapiens
accagacgttgccta

SEQ ID NO: 1047932 - DNA, 15 bp, Homo sapiens
ccagacgttgcctag

SEQ ID NO: 1047933 - DNA, 15 bp, Homo sapiens
cagacgttgcctaga

SEQ ID NO: 1047934 - DNA, 15 bp, Homo sapiens
agacgttgcctagag

SEQ ID NO: 1047935 - DNA, 15 bp, Homo sapiens
gacgttgcctagaga

SEQ ID NO: 1047936 - DNA, 15 bp, Homo sapiens
acgttgcctagagag

SEQ ID NO: 1047937 - DNA, 15 bp, Homo sapiens
cgttgcctagagagg

SEQ ID NO: 1047938 - DNA, 15 bp, Homo sapiens
gttgcctagagaggt

SEQ ID NO: 1047939 - DNA, 15 bp, Homo sapiens
ttgcctagagaggtt

SEQ ID NO: 1047940 - DNA, 15 bp, Homo sapiens
tgcctagagaggttc

SEQ ID NO: 1047941 - DNA, 15 bp, Homo sapiens
gcctagagaggttct

SEQ ID NO: 1047942 - DNA, 15 bp, Homo sapiens
cctagagaggttctt

SEQ ID NO: 1047943 - DNA, 15 bp, Homo sapiens
ctagagaggttcttt

SEQ ID NO: 1047944 - DNA, 15 bp, Homo sapiens
tagagaggttcttta

SEQ ID NO: 1047945 - DNA, 15 bp, Homo sapiens
agagaggttctttat

SEQ ID NO: 1047946 - DNA, 15 bp, Homo sapiens
gagaggttctttatg

SEQ ID NO: 1047947 - DNA, 15 bp, Homo sapiens
agaggttctttatgg

SEQ ID NO: 1047948 - DNA, 15 bp, Homo sapiens
gaggttctttatgga

SEQ ID NO: 1047949 - DNA, 15 bp, Homo sapiens
aggttctttatggag

SEQ ID NO: 1047950 - DNA, 15 bp, Homo sapiens
ggttctttatggagc

SEQ ID NO: 1047951 - DNA, 15 bp, Homo sapiens
gttctttatggagca

SEQ ID NO: 1047952 - DNA, 15 bp, Homo sapiens
ttctttatggagcag

SEQ ID NO: 1047953 - DNA, 15 bp, Homo sapiens
tctttatggagcagg

SEQ ID NO: 1047954 - DNA, 15 bp, Homo sapiens
ctttatggagcaggg

SEQ ID NO: 1047955 - DNA, 15 bp, Homo sapiens
tttatggagcaggga

SEQ ID NO: 1047956 - DNA, 15 bp, Homo sapiens
ttatggagcagggag

SEQ ID NO: 1047957 - DNA, 15 bp, Homo sapiens
tatggagcagggagg

SEQ ID NO: 1047958 - DNA, 15 bp, Homo sapiens
atggagcagggaggg

SEQ ID NO: 1047959 - DNA, 15 bp, Homo sapiens
tggagcagggaggga

SEQ ID NO: 1047960 - DNA, 15 bp, Homo sapiens
ggagcagggagggac

SEQ ID NO: 1047961 - DNA, 15 bp, Homo sapiens
gagcagggagggacc

SEQ ID NO: 1047962 - DNA, 15 bp, Homo sapiens
agcagggagggacca

SEQ ID NO: 1047963 - DNA, 15 bp, Homo sapiens
gcagggagggaccaa

SEQ ID NO: 1047964 - DNA, 15 bp, Homo sapiens
cagggagggaccaat

SEQ ID NO: 1047965 - DNA, 15 bp, Homo sapiens
agggagggaccaatg

SEQ ID NO: 1047966 - DNA, 15 bp, Homo sapiens
gggagggaccaatgg

SEQ ID NO: 1047967 - DNA, 15 bp, Homo sapiens
ggagggaccaatggt

SEQ ID NO: 1047968 - DNA, 15 bp, Homo sapiens
gagggaccaatggtg

SEQ ID NO: 1047969 - DNA, 15 bp, Homo sapiens
agggaccaatggtgt

SEQ ID NO: 1047970 - DNA, 15 bp, Homo sapiens
gggaccaatggtgtg

SEQ ID NO: 1047971 - DNA, 15 bp, Homo sapiens
ggaccaatggtgtgc

SEQ ID NO: 1047972 - DNA, 15 bp, Homo sapiens
gaccaatggtgtgcg

SEQ ID NO: 1047973 - DNA, 15 bp, Homo sapiens
accaatggtgtgcgt

SEQ ID NO: 1047974 - DNA, 15 bp, Homo sapiens
ccaatggtgtgcgtc

SEQ ID NO: 1047975 - DNA, 15 bp, Homo sapiens
caatggtgtgcgtct

SEQ ID NO: 1047976 - DNA, 15 bp, Homo sapiens
aatggtgtgcgtctg

SEQ ID NO: 1047977 - DNA, 15 bp, Homo sapiens
atggtgtgcgtctgg

SEQ ID NO: 1047978 - DNA, 15 bp, Homo sapiens
tggtgtgcgtctggg

SEQ ID NO: 1047979 - DNA, 15 bp, Homo sapiens
ggtgtgcgtctgggt

SEQ ID NO: 1047980 - DNA, 15 bp, Homo sapiens
gtgtgcgtctgggtg

SEQ ID NO: 1047981 - DNA, 15 bp, Homo sapiens
tgtgcgtctgggtgg

SEQ ID NO: 1047982 - DNA, 15 bp, Homo sapiens
gtgcgtctgggtgga

SEQ ID NO: 1047983 - DNA, 15 bp, Homo sapiens
tgcgtctgggtggag

SEQ ID NO: 1047984 - DNA, 15 bp, Homo sapiens
gcgtctgggtggagg

SEQ ID NO: 1047985 - DNA, 15 bp, Homo sapiens
cgtctgggtggaggg

SEQ ID NO: 1047986 - DNA, 15 bp, Homo sapiens
gtctgggtggagggt

SEQ ID NO: 1047987 - DNA, 15 bp, Homo sapiens
tctgggtggagggtg

SEQ ID NO: 1047988 - DNA, 15 bp, Homo sapiens
ctgggtggagggtgc

SEQ ID NO: 1047989 - DNA, 15 bp, Homo sapiens
tgggtggagggtgca

SEQ ID NO: 1047990 - DNA, 15 bp, Homo sapiens
gggtggagggtgcat

SEQ ID NO: 1047991 - DNA, 15 bp, Homo sapiens
ggtggagggtgcatg

SEQ ID NO: 1047992 - DNA, 15 bp, Homo sapiens
gtggagggtgcatgt

SEQ ID NO: 1047993 - DNA, 15 bp, Homo sapiens
tggagggtgcatgtg

SEQ ID NO: 1047994 - DNA, 15 bp, Homo sapiens
ggagggtgcatgtgt

SEQ ID NO: 1047995 - DNA, 15 bp, Homo sapiens
gagggtgcatgtgtg

SEQ ID NO: 1047996 - DNA, 15 bp, Homo sapiens
agggtgcatgtgtga

SEQ ID NO: 1047997 - DNA, 15 bp, Homo sapiens
gggtgcatgtgtgag

SEQ ID NO: 1047998 - DNA, 15 bp, Homo sapiens
ggtgcatgtgtgagt

SEQ ID NO: 1047999 - DNA, 15 bp, Homo sapiens
gtgcatgtgtgagtt

SEQ ID NO: 1048000 - DNA, 15 bp, Homo sapiens
tgcatgtgtgagtta

SEQ ID NO: 1048001 - DNA, 15 bp, Homo sapiens
gcatgtgtgagttac

SEQ ID NO: 1048002 - DNA, 15 bp, Homo sapiens
catgtgtgagttaca

SEQ ID NO: 1048003 - DNA, 15 bp, Homo sapiens
atgtgtgagttacac

SEQ ID NO: 1048004 - DNA, 15 bp, Homo sapiens
tgtgtgagttacaca

SEQ ID NO: 1048005 - DNA, 15 bp, Homo sapiens
gtgtgagttacacac

SEQ ID NO: 1048006 - DNA, 15 bp, Homo sapiens
tgtgagttacacaca

SEQ ID NO: 1048007 - DNA, 15 bp, Homo sapiens
gtgagttacacacat

SEQ ID NO: 1048008 - DNA, 15 bp, Homo sapiens
tgagttacacacata

SEQ ID NO: 1048009 - DNA, 15 bp, Homo sapiens
gagttacacacatac

SEQ ID NO: 1048010 - DNA, 15 bp, Homo sapiens
agttacacacataca

SEQ ID NO: 1048011 - DNA, 15 bp, Homo sapiens
gttacacacatacat

SEQ ID NO: 1048012 - DNA, 15 bp, Homo sapiens
ttacacacatacata

SEQ ID NO: 1048013 - DNA, 15 bp, Homo sapiens
tacacacatacatac

SEQ ID NO: 1048014 - DNA, 15 bp, Homo sapiens
acacacatacataca

SEQ ID NO: 1048015 - DNA, 15 bp, Homo sapiens
cacacatacatacac

SEQ ID NO: 1048016 - DNA, 15 bp, Homo sapiens
acacatacatacaca

SEQ ID NO: 1048017 - DNA, 15 bp, Homo sapiens
cacatacatacacac

SEQ ID NO: 1048018 - DNA, 15 bp, Homo sapiens
acatacatacacaca

SEQ ID NO: 1048019 - DNA, 15 bp, Homo sapiens
catacatacacacac

SEQ ID NO: 1048020 - DNA, 15 bp, Homo sapiens
atacatacacacaca

SEQ ID NO: 1048021 - DNA, 15 bp, Homo sapiens
tacatacacacacat

SEQ ID NO: 1048022 - DNA, 15 bp, Homo sapiens
acatacacacacata

SEQ ID NO: 1048023 - DNA, 15 bp, Homo sapiens
catacacacacatac

SEQ ID NO: 1048024 - DNA, 15 bp, Homo sapiens
atacacacacataca

SEQ ID NO: 1048025 - DNA, 15 bp, Homo sapiens
tacacacacatacac

SEQ ID NO: 1048026 - DNA, 15 bp, Homo sapiens
acacacacatacaca

SEQ ID NO: 1048027 - DNA, 15 bp, Homo sapiens
cacacacatacacat

SEQ ID NO: 1048028 - DNA, 15 bp, Homo sapiens
acacacatacacata

SEQ ID NO: 1048029 - DNA, 15 bp, Homo sapiens
cacacatacacatac

SEQ ID NO: 1048030 - DNA, 15 bp, Homo sapiens
acacatacacataca

SEQ ID NO: 1048031 - DNA, 15 bp, Homo sapiens
cacatacacatacac

SEQ ID NO: 1048032 - DNA, 15 bp, Homo sapiens
acatacacatacaca

SEQ ID NO: 1048033 - DNA, 15 bp, Homo sapiens
catacacatacacat

SEQ ID NO: 1048034 - DNA, 15 bp, Homo sapiens
atacacatacacata

SEQ ID NO: 1048035 - DNA, 15 bp, Homo sapiens
tacacatacacatac

SEQ ID NO: 1048036 - DNA, 15 bp, Homo sapiens
catacacatacacac

SEQ ID NO: 1048037 - DNA, 15 bp, Homo sapiens
atacacatacacaca

SEQ ID NO: 1048038 - DNA, 15 bp, Homo sapiens
tacacatacacacat

SEQ ID NO: 1048039 - DNA, 15 bp, Homo sapiens
acacatacacacata

SEQ ID NO: 1048040 - DNA, 15 bp, Homo sapiens
cacatacacacatac

SEQ ID NO: 1048041 - DNA, 15 bp, Homo sapiens
acatacacacataca

SEQ ID NO: 1048042 - DNA, 15 bp, Homo sapiens
catacacacatacat

SEQ ID NO: 1048043 - DNA, 15 bp, Homo sapiens
atacacacatacata

SEQ ID NO: 1048044 - DNA, 15 bp, Homo sapiens
cacacatacatacat

SEQ ID NO: 1048045 - DNA, 15 bp, Homo sapiens
acacatacatacata

SEQ ID NO: 1048046 - DNA, 15 bp, Homo sapiens
cacatacatacatac

SEQ ID NO: 1048047 - DNA, 15 bp, Homo sapiens
acatacatacataca

SEQ ID NO: 1048048 - DNA, 15 bp, Homo sapiens
catacatacatacac

SEQ ID NO: 1048049 - DNA, 15 bp, Homo sapiens
atacatacatacaca

SEQ ID NO: 1048050 - DNA, 15 bp, Homo sapiens
tacatacatacacac

SEQ ID NO: 1048051 - DNA, 15 bp, Homo sapiens
acatacatacacacg

SEQ ID NO: 1048052 - DNA, 15 bp, Homo sapiens
catacatacacacgt

SEQ ID NO: 1048053 - DNA, 15 bp, Homo sapiens
atacatacacacgta

SEQ ID NO: 1048054 - DNA, 15 bp, Homo sapiens
tacatacacacgtac

SEQ ID NO: 1048055 - DNA, 15 bp, Homo sapiens
acatacacacgtaca

SEQ ID NO: 1048056 - DNA, 15 bp, Homo sapiens
catacacacgtacat

SEQ ID NO: 1048057 - DNA, 15 bp, Homo sapiens
atacacacgtacata

SEQ ID NO: 1048058 - DNA, 15 bp, Homo sapiens
tacacacgtacatac

SEQ ID NO: 1048059 - DNA, 15 bp, Homo sapiens
acacacgtacataca

SEQ ID NO: 1048060 - DNA, 15 bp, Homo sapiens
cacacgtacatacac

SEQ ID NO: 1048061 - DNA, 15 bp, Homo sapiens
acacgtacatacaca

SEQ ID NO: 1048062 - DNA, 15 bp, Homo sapiens
cacgtacatacacat

SEQ ID NO: 1048063 - DNA, 15 bp, Homo sapiens
acgtacatacacata

SEQ ID NO: 1048064 - DNA, 15 bp, Homo sapiens
cgtacatacacatac

SEQ ID NO: 1048065 - DNA, 15 bp, Homo sapiens
gtacatacacataca

SEQ ID NO: 1048066 - DNA, 15 bp, Homo sapiens
tacatacacatacac

SEQ ID NO: 1048067 - DNA, 15 bp, Homo sapiens
tacacatacacacac

SEQ ID NO: 1048068 - DNA, 15 bp, Homo sapiens
acacatacacacaca

SEQ ID NO: 1048069 - DNA, 15 bp, Homo sapiens
cacatacacacacac

SEQ ID NO: 1048070 - DNA, 15 bp, Homo sapiens
acatacacacacaca

SEQ ID NO: 1048071 - DNA, 15 bp, Homo sapiens
catacacacacacat

SEQ ID NO: 1048072 - DNA, 15 bp, Homo sapiens
atacacacacacata

SEQ ID NO: 1048073 - DNA, 15 bp, Homo sapiens
tacacacacacatac

SEQ ID NO: 1048074 - DNA, 15 bp, Homo sapiens
acacacacacataca

SEQ ID NO: 1048075 - DNA, 15 bp, Homo sapiens
cacacacacatacat

SEQ ID NO: 1048076 - DNA, 15 bp, Homo sapiens
acacacacatacata

SEQ ID NO: 1048077 - DNA, 15 bp, Homo sapiens
cacacacatacatac

SEQ ID NO: 1048078 - DNA, 15 bp, Homo sapiens
acatacacacacatg

SEQ ID NO: 1048079 - DNA, 15 bp, Homo sapiens
catacacacacatgt

SEQ ID NO: 1048080 - DNA, 15 bp, Homo sapiens
atacacacacatgta

SEQ ID NO: 1048081 - DNA, 15 bp, Homo sapiens
tacacacacatgtac

SEQ ID NO: 1048082 - DNA, 15 bp, Homo sapiens
acacacacatgtacc

SEQ ID NO: 1048083 - DNA, 15 bp, Homo sapiens
cacacacatgtacct

SEQ ID NO: 1048084 - DNA, 15 bp, Homo sapiens
acacacatgtaccta

SEQ ID NO: 1048085 - DNA, 15 bp, Homo sapiens
cacacatgtacctac

SEQ ID NO: 1048086 - DNA, 15 bp, Homo sapiens
acacatgtacctaca

SEQ ID NO: 1048087 - DNA, 15 bp, Homo sapiens
cacatgtacctacac

SEQ ID NO: 1048088 - DNA, 15 bp, Homo sapiens
acatgtacctacaca

SEQ ID NO: 1048089 - DNA, 15 bp, Homo sapiens
catgtacctacacat

SEQ ID NO: 1048090 - DNA, 15 bp, Homo sapiens
atgtacctacacatg

SEQ ID NO: 1048091 - DNA, 15 bp, Homo sapiens
tgtacctacacatgc

SEQ ID NO: 1048092 - DNA, 15 bp, Homo sapiens
gtacctacacatgca

SEQ ID NO: 1048093 - DNA, 15 bp, Homo sapiens
tacctacacatgcat

SEQ ID NO: 1048094 - DNA, 15 bp, Homo sapiens
acctacacatgcata

SEQ ID NO: 1048095 - DNA, 15 bp, Homo sapiens
cctacacatgcatac

SEQ ID NO: 1048096 - DNA, 15 bp, Homo sapiens
ctacacatgcataca

SEQ ID NO: 1048097 - DNA, 15 bp, Homo sapiens
tacacatgcatacac

SEQ ID NO: 1048098 - DNA, 15 bp, Homo sapiens
acacatgcatacaca

SEQ ID NO: 1048099 - DNA, 15 bp, Homo sapiens
cacatgcatacacac

SEQ ID NO: 1048100 - DNA, 15 bp, Homo sapiens
acatgcatacacaca

SEQ ID NO: 1048101 - DNA, 15 bp, Homo sapiens
catgcatacacacat

SEQ ID NO: 1048102 - DNA, 15 bp, Homo sapiens
atgcatacacacata

SEQ ID NO: 1048103 - DNA, 15 bp, Homo sapiens
tgcatacacacatac

SEQ ID NO: 1048104 - DNA, 15 bp, Homo sapiens
gcatacacacataca

SEQ ID NO: 1048105 - DNA, 15 bp, Homo sapiens
catacacacatacac

SEQ ID NO: 1048106 - DNA, 15 bp, Homo sapiens
atacacacatacaca

SEQ ID NO: 1048107 - DNA, 15 bp, Homo sapiens
tacacacatacacac

SEQ ID NO: 1048108 - DNA, 15 bp, Homo sapiens
acacacatacacaca

SEQ ID NO: 1048109 - DNA, 15 bp, Homo sapiens
cacacatacacacac

SEQ ID NO: 1048110 - DNA, 15 bp, Homo sapiens
catacacacacacac

SEQ ID NO: 1048111 - DNA, 15 bp, Homo sapiens
atacacacacacaca

SEQ ID NO: 1048112 - DNA, 15 bp, Homo sapiens
tacacacacacacac

SEQ ID NO: 1048113 - DNA, 15 bp, Homo sapiens
acacacacacacaca

SEQ ID NO: 1048114 - DNA, 15 bp, Homo sapiens
cacacacacacacac

SEQ ID NO: 1048115 - DNA, 15 bp, Homo sapiens
cacacacacacacat

SEQ ID NO: 1048116 - DNA, 15 bp, Homo sapiens
acacacacacacatg

SEQ ID NO: 1048117 - DNA, 15 bp, Homo sapiens
cacacacacacatgc

SEQ ID NO: 1048118 - DNA, 15 bp, Homo sapiens
acacacacacatgca

SEQ ID NO: 1048119 - DNA, 15 bp, Homo sapiens
cacacacacatgcat

SEQ ID NO: 1048120 - DNA, 15 bp, Homo sapiens
acacacacatgcatg

SEQ ID NO: 1048121 - DNA, 15 bp, Homo sapiens
cacacacatgcatga

SEQ ID NO: 1048122 - DNA, 15 bp, Homo sapiens
acacacatgcatgac

SEQ ID NO: 1048123 - DNA, 15 bp, Homo sapiens
cacacatgcatgacc

SEQ ID NO: 1048124 - DNA, 15 bp, Homo sapiens
acacatgcatgacca

SEQ ID NO: 1048125 - DNA, 15 bp, Homo sapiens
cacatgcatgaccag

SEQ ID NO: 1048126 - DNA, 15 bp, Homo sapiens
acatgcatgaccagg

SEQ ID NO: 1048127 - DNA, 15 bp, Homo sapiens
catgcatgaccagga

SEQ ID NO: 1048128 - DNA, 15 bp, Homo sapiens
atgcatgaccaggag

SEQ ID NO: 1048129 - DNA, 15 bp, Homo sapiens
tgcatgaccaggagc

SEQ ID NO: 1048130 - DNA, 15 bp, Homo sapiens
gcatgaccaggagca

SEQ ID NO: 1048131 - DNA, 15 bp, Homo sapiens
catgaccaggagcag

SEQ ID NO: 1048132 - DNA, 15 bp, Homo sapiens
atgaccaggagcagg

SEQ ID NO: 1048133 - DNA, 15 bp, Homo sapiens
tgaccaggagcaggg

SEQ ID NO: 1048134 - DNA, 15 bp, Homo sapiens
gaccaggagcaggga

SEQ ID NO: 1048135 - DNA, 15 bp, Homo sapiens
accaggagcagggac

SEQ ID NO: 1048136 - DNA, 15 bp, Homo sapiens
ccaggagcagggacc

SEQ ID NO: 1048137 - DNA, 15 bp, Homo sapiens
caggagcagggaccg

SEQ ID NO: 1048138 - DNA, 15 bp, Homo sapiens
aggagcagggaccga

SEQ ID NO: 1048139 - DNA, 15 bp, Homo sapiens
ggagcagggaccgac

SEQ ID NO: 1048140 - DNA, 15 bp, Homo sapiens
gagcagggaccgacc

SEQ ID NO: 1048141 - DNA, 15 bp, Homo sapiens
agcagggaccgaccc

SEQ ID NO: 1048142 - DNA, 15 bp, Homo sapiens
gcagggaccgacccc

SEQ ID NO: 1048143 - DNA, 15 bp, Homo sapiens
cagggaccgaccccc

SEQ ID NO: 1048144 - DNA, 15 bp, Homo sapiens
agggaccgacccccc

SEQ ID NO: 1048145 - DNA, 15 bp, Homo sapiens
gggaccgacccccca

SEQ ID NO: 1048146 - DNA, 15 bp, Homo sapiens
ggaccgaccccccag

SEQ ID NO: 1048147 - DNA, 15 bp, Homo sapiens
gaccgaccccccaga

SEQ ID NO: 1048148 - DNA, 15 bp, Homo sapiens
accgaccccccagac

SEQ ID NO: 1048149 - DNA, 15 bp, Homo sapiens
ccgaccccccagacc

SEQ ID NO: 1048150 - DNA, 15 bp, Homo sapiens
cgaccccccagaccc

SEQ ID NO: 1048151 - DNA, 15 bp, Homo sapiens
gaccccccagaccct

SEQ ID NO: 1048152 - DNA, 15 bp, Homo sapiens
accccccagacccta

SEQ ID NO: 1048153 - DNA, 15 bp, Homo sapiens
ccccccagaccctat

SEQ ID NO: 1048154 - DNA, 15 bp, Homo sapiens
cccccagaccctatc

SEQ ID NO: 1048155 - DNA, 15 bp, Homo sapiens
ccccagaccctatct

SEQ ID NO: 1048156 - DNA, 15 bp, Homo sapiens
cccagaccctatctg

SEQ ID NO: 1048157 - DNA, 15 bp, Homo sapiens
ccagaccctatctgg

SEQ ID NO: 1048158 - DNA, 15 bp, Homo sapiens
cagaccctatctggg

SEQ ID NO: 1048159 - DNA, 15 bp, Homo sapiens
agaccctatctgggc

SEQ ID NO: 1048160 - DNA, 15 bp, Homo sapiens
gaccctatctgggcc

SEQ ID NO: 1048161 - DNA, 15 bp, Homo sapiens
accctatctgggcca

SEQ ID NO: 1048162 - DNA, 15 bp, Homo sapiens
ccctatctgggccag

SEQ ID NO: 1048163 - DNA, 15 bp, Homo sapiens
cctatctgggccaga

SEQ ID NO: 1048164 - DNA, 15 bp, Homo sapiens
ctatctgggccagag

SEQ ID NO: 1048165 - DNA, 15 bp, Homo sapiens
tatctgggccagagg

SEQ ID NO: 1048166 - DNA, 15 bp, Homo sapiens
atctgggccagagga

SEQ ID NO: 1048167 - DNA, 15 bp, Homo sapiens
tctgggccagaggac

SEQ ID NO: 1048168 - DNA, 15 bp, Homo sapiens
ctgggccagaggacc

SEQ ID NO: 1048169 - DNA, 15 bp, Homo sapiens
tgggccagaggaccg

SEQ ID NO: 1048170 - DNA, 15 bp, Homo sapiens
gggccagaggaccgg

SEQ ID NO: 1048171 - DNA, 15 bp, Homo sapiens
ggccagaggaccggg

SEQ ID NO: 1048172 - DNA, 15 bp, Homo sapiens
gccagaggaccgggt

SEQ ID NO: 1048173 - DNA, 15 bp, Homo sapiens
ccagaggaccgggtg

SEQ ID NO: 1048174 - DNA, 15 bp, Homo sapiens
cagaggaccgggtgg

SEQ ID NO: 1048175 - DNA, 15 bp, Homo sapiens
agaggaccgggtggg

SEQ ID NO: 1048176 - DNA, 15 bp, Homo sapiens
gaggaccgggtgggt

SEQ ID NO: 1048177 - DNA, 15 bp, Homo sapiens
aggaccgggtgggtc

SEQ ID NO: 1048178 - DNA, 15 bp, Homo sapiens
ggaccgggtgggtca

SEQ ID NO: 1048179 - DNA, 15 bp, Homo sapiens
gaccgggtgggtcag

SEQ ID NO: 1048180 - DNA, 15 bp, Homo sapiens
accgggtgggtcagc

SEQ ID NO: 1048181 - DNA, 15 bp, Homo sapiens
ccgggtgggtcagca

SEQ ID NO: 1048182 - DNA, 15 bp, Homo sapiens
cgggtgggtcagcac

SEQ ID NO: 1048183 - DNA, 15 bp, Homo sapiens
gggtgggtcagcacg

SEQ ID NO: 1048184 - DNA, 15 bp, Homo sapiens
ggtgggtcagcacgg

SEQ ID NO: 1048185 - DNA, 15 bp, Homo sapiens
gtgggtcagcacggg

SEQ ID NO: 1048186 - DNA, 15 bp, Homo sapiens
tgggtcagcacggga

SEQ ID NO: 1048187 - DNA, 15 bp, Homo sapiens
gggtcagcacgggaa

SEQ ID NO: 1048188 - DNA, 15 bp, Homo sapiens
ggtcagcacgggaag

SEQ ID NO: 1048189 - DNA, 15 bp, Homo sapiens
gtcagcacgggaagg

SEQ ID NO: 1048190 - DNA, 15 bp, Homo sapiens
tcagcacgggaaggg

SEQ ID NO: 1048191 - DNA, 15 bp, Homo sapiens
cagcacgggaagggg

SEQ ID NO: 1048192 - DNA, 15 bp, Homo sapiens
agcacgggaaggggt

SEQ ID NO: 1048193 - DNA, 15 bp, Homo sapiens
gcacgggaaggggtc

SEQ ID NO: 1048194 - DNA, 15 bp, Homo sapiens
cacgggaaggggtca

SEQ ID NO: 1048195 - DNA, 15 bp, Homo sapiens
acgggaaggggtcag

SEQ ID NO: 1048196 - DNA, 15 bp, Homo sapiens
cgggaaggggtcagc

SEQ ID NO: 1048197 - DNA, 15 bp, Homo sapiens
gggaaggggtcagct

SEQ ID NO: 1048198 - DNA, 15 bp, Homo sapiens
ggaaggggtcagctg

SEQ ID NO: 1048199 - DNA, 15 bp, Homo sapiens
gaaggggtcagctgt

SEQ ID NO: 1048200 - DNA, 15 bp, Homo sapiens
aaggggtcagctgtt

SEQ ID NO: 1048201 - DNA, 15 bp, Homo sapiens
aggggtcagctgttt

SEQ ID NO: 1048202 - DNA, 15 bp, Homo sapiens
ggggtcagctgtttg

SEQ ID NO: 1048203 - DNA, 15 bp, Homo sapiens
gggtcagctgtttgt

SEQ ID NO: 1048204 - DNA, 15 bp, Homo sapiens
ggtcagctgtttgtg

SEQ ID NO: 1048205 - DNA, 15 bp, Homo sapiens
gtcagctgtttgtgg

SEQ ID NO: 1048206 - DNA, 15 bp, Homo sapiens
tcagctgtttgtgga

SEQ ID NO: 1048207 - DNA, 15 bp, Homo sapiens
cagctgtttgtggaa

SEQ ID NO: 1048208 - DNA, 15 bp, Homo sapiens
agctgtttgtggaac

SEQ ID NO: 1048209 - DNA, 15 bp, Homo sapiens
gctgtttgtggaaca

SEQ ID NO: 1048210 - DNA, 15 bp, Homo sapiens
ctgtttgtggaacat

SEQ ID NO: 1048211 - DNA, 15 bp, Homo sapiens
tgtttgtggaacatg

SEQ ID NO: 1048212 - DNA, 15 bp, Homo sapiens
gtttgtggaacatgc

SEQ ID NO: 1048213 - DNA, 15 bp, Homo sapiens
tttgtggaacatgct

SEQ ID NO: 1048214 - DNA, 15 bp, Homo sapiens
ttgtggaacatgctg

SEQ ID NO: 1048215 - DNA, 15 bp, Homo sapiens
tgtggaacatgctgg

SEQ ID NO: 1048216 - DNA, 15 bp, Homo sapiens
gtggaacatgctggc

SEQ ID NO: 1048217 - DNA, 15 bp, Homo sapiens
tggaacatgctggcc

SEQ ID NO: 1048218 - DNA, 15 bp, Homo sapiens
ggaacatgctggccc

SEQ ID NO: 1048219 - DNA, 15 bp, Homo sapiens
gaacatgctggccca

SEQ ID NO: 1048220 - DNA, 15 bp, Homo sapiens
aacatgctggcccaa

SEQ ID NO: 1048221 - DNA, 15 bp, Homo sapiens
acatgctggcccaag

SEQ ID NO: 1048222 - DNA, 15 bp, Homo sapiens
catgctggcccaagg

SEQ ID NO: 1048223 - DNA, 15 bp, Homo sapiens
atgctggcccaagga

SEQ ID NO: 1048224 - DNA, 15 bp, Homo sapiens
tgctggcccaaggac

SEQ ID NO: 1048225 - DNA, 15 bp, Homo sapiens
gctggcccaaggacc

SEQ ID NO: 1048226 - DNA, 15 bp, Homo sapiens
ctggcccaaggacca

SEQ ID NO: 1048227 - DNA, 15 bp, Homo sapiens
tggcccaaggaccac

SEQ ID NO: 1048228 - DNA, 15 bp, Homo sapiens
ggcccaaggaccaca

SEQ ID NO: 1048229 - DNA, 15 bp, Homo sapiens
gcccaaggaccacag

SEQ ID NO: 1048230 - DNA, 15 bp, Homo sapiens
cccaaggaccacaga

SEQ ID NO: 1048231 - DNA, 15 bp, Homo sapiens
ccaaggaccacagag

SEQ ID NO: 1048232 - DNA, 15 bp, Homo sapiens
caaggaccacagagt

SEQ ID NO: 1048233 - DNA, 15 bp, Homo sapiens
aaggaccacagagtt

SEQ ID NO: 1048234 - DNA, 15 bp, Homo sapiens
aggaccacagagttg

SEQ ID NO: 1048235 - DNA, 15 bp, Homo sapiens
ggaccacagagttgt

SEQ ID NO: 1048236 - DNA, 15 bp, Homo sapiens
gaccacagagttgtg

SEQ ID NO: 1048237 - DNA, 15 bp, Homo sapiens
accacagagttgtgc

SEQ ID NO: 1048238 - DNA, 15 bp, Homo sapiens
ccacagagttgtgcc

SEQ ID NO: 1048239 - DNA, 15 bp, Homo sapiens
cacagagttgtgcct

SEQ ID NO: 1048240 - DNA, 15 bp, Homo sapiens
acagagttgtgcctt

SEQ ID NO: 1048241 - DNA, 15 bp, Homo sapiens
cagagttgtgccttt

SEQ ID NO: 1048242 - DNA, 15 bp, Homo sapiens
agagttgtgcctttg

SEQ ID NO: 1048243 - DNA, 15 bp, Homo sapiens
gagttgtgcctttgc

SEQ ID NO: 1048244 - DNA, 15 bp, Homo sapiens
agttgtgcctttgct

SEQ ID NO: 1048245 - DNA, 15 bp, Homo sapiens
gttgtgcctttgctt

SEQ ID NO: 1048246 - DNA, 15 bp, Homo sapiens
ttgtgcctttgcttt

SEQ ID NO: 1048247 - DNA, 15 bp, Homo sapiens
tgtgcctttgctttc

SEQ ID NO: 1048248 - DNA, 15 bp, Homo sapiens
gtgcctttgctttct

SEQ ID NO: 1048249 - DNA, 15 bp, Homo sapiens
tgcctttgctttctg

SEQ ID NO: 1048250 - DNA, 15 bp, Homo sapiens
gcctttgctttctgc

SEQ ID NO: 1048251 - DNA, 15 bp, Homo sapiens
cctttgctttctgct

SEQ ID NO: 1048252 - DNA, 15 bp, Homo sapiens
ctttgctttctgctt

SEQ ID NO: 1048253 - DNA, 15 bp, Homo sapiens
tttgctttctgcttg

SEQ ID NO: 1048254 - DNA, 15 bp, Homo sapiens
ttgctttctgcttgt

SEQ ID NO: 1048255 - DNA, 15 bp, Homo sapiens
tgctttctgcttgtc

SEQ ID NO: 1048256 - DNA, 15 bp, Homo sapiens
gctttctgcttgtcc

SEQ ID NO: 1048257 - DNA, 15 bp, Homo sapiens
ctttctgcttgtcct

SEQ ID NO: 1048258 - DNA, 15 bp, Homo sapiens
tttctgcttgtcctg

SEQ ID NO: 1048259 - DNA, 15 bp, Homo sapiens
ttctgcttgtcctgt

SEQ ID NO: 1048260 - DNA, 15 bp, Homo sapiens
tctgcttgtcctgta

SEQ ID NO: 1048261 - DNA, 15 bp, Homo sapiens
ctgcttgtcctgtac

SEQ ID NO: 1048262 - DNA, 15 bp, Homo sapiens
tgcttgtcctgtacc

SEQ ID NO: 1048263 - DNA, 15 bp, Homo sapiens
gcttgtcctgtacct

SEQ ID NO: 1048264 - DNA, 15 bp, Homo sapiens
cttgtcctgtacctg

SEQ ID NO: 1048265 - DNA, 15 bp, Homo sapiens
ttgtcctgtacctgg

SEQ ID NO: 1048266 - DNA, 15 bp, Homo sapiens
tgtcctgtacctggc

SEQ ID NO: 1048267 - DNA, 15 bp, Homo sapiens
gtcctgtacctggct

SEQ ID NO: 1048268 - DNA, 15 bp, Homo sapiens
tcctgtacctggctg

SEQ ID NO: 1048269 - DNA, 15 bp, Homo sapiens
cctgtacctggctgt

SEQ ID NO: 1048270 - DNA, 15 bp, Homo sapiens
ctgtacctggctgtg

SEQ ID NO: 1048271 - DNA, 15 bp, Homo sapiens
tgtacctggctgtgg

SEQ ID NO: 1048272 - DNA, 15 bp, Homo sapiens
gtacctggctgtggc

SEQ ID NO: 1048273 - DNA, 15 bp, Homo sapiens
tacctggctgtggcc

SEQ ID NO: 1048274 - DNA, 15 bp, Homo sapiens
acctggctgtggcct

SEQ ID NO: 1048275 - DNA, 15 bp, Homo sapiens
cctggctgtggccta

SEQ ID NO: 1048276 - DNA, 15 bp, Homo sapiens
ctggctgtggcctag

SEQ ID NO: 1048277 - DNA, 15 bp, Homo sapiens
tggctgtggcctagg

SEQ ID NO: 1048278 - DNA, 15 bp, Homo sapiens
ggctgtggcctaggg

SEQ ID NO: 1048279 - DNA, 15 bp, Homo sapiens
gctgtggcctagggg

SEQ ID NO: 1048280 - DNA, 15 bp, Homo sapiens
ctgtggcctagggga

SEQ ID NO: 1048281 - DNA, 15 bp, Homo sapiens
tgtggcctaggggaa

SEQ ID NO: 1048282 - DNA, 15 bp, Homo sapiens
gtggcctaggggaag

SEQ ID NO: 1048283 - DNA, 15 bp, Homo sapiens
tggcctaggggaagt

SEQ ID NO: 1048284 - DNA, 15 bp, Homo sapiens
ggcctaggggaagtg

SEQ ID NO: 1048285 - DNA, 15 bp, Homo sapiens
gcctaggggaagtga

SEQ ID NO: 1048286 - DNA, 15 bp, Homo sapiens
cctaggggaagtgac

SEQ ID NO: 1048287 - DNA, 15 bp, Homo sapiens
ctaggggaagtgact

SEQ ID NO: 1048288 - DNA, 15 bp, Homo sapiens
taggggaagtgactt

SEQ ID NO: 1048289 - DNA, 15 bp, Homo sapiens
aggggaagtgacttc

SEQ ID NO: 1048290 - DNA, 15 bp, Homo sapiens
ggggaagtgacttca

SEQ ID NO: 1048291 - DNA, 15 bp, Homo sapiens
gggaagtgacttcat

SEQ ID NO: 1048292 - DNA, 15 bp, Homo sapiens
ggaagtgacttcatt

SEQ ID NO: 1048293 - DNA, 15 bp, Homo sapiens
gaagtgacttcattc

SEQ ID NO: 1048294 - DNA, 15 bp, Homo sapiens
aagtgacttcattcc

SEQ ID NO: 1048295 - DNA, 15 bp, Homo sapiens
agtgacttcattcct

SEQ ID NO: 1048296 - DNA, 15 bp, Homo sapiens
gtgacttcattcctc

SEQ ID NO: 1048297 - DNA, 15 bp, Homo sapiens
tgacttcattcctct

SEQ ID NO: 1048298 - DNA, 15 bp, Homo sapiens
gacttcattcctctg

SEQ ID NO: 1048299 - DNA, 15 bp, Homo sapiens
acttcattcctctga

SEQ ID NO: 1048300 - DNA, 15 bp, Homo sapiens
cttcattcctctgag

SEQ ID NO: 1048301 - DNA, 15 bp, Homo sapiens
ttcattcctctgagc

SEQ ID NO: 1048302 - DNA, 15 bp, Homo sapiens
tcattcctctgagcc

SEQ ID NO: 1048303 - DNA, 15 bp, Homo sapiens
cattcctctgagcct

SEQ ID NO: 1048304 - DNA, 15 bp, Homo sapiens
attcctctgagcctc

SEQ ID NO: 1048305 - DNA, 15 bp, Homo sapiens
ttcctctgagcctca

SEQ ID NO: 1048306 - DNA, 15 bp, Homo sapiens
tcctctgagcctcag

SEQ ID NO: 1048307 - DNA, 15 bp, Homo sapiens
cctctgagcctcagt

SEQ ID NO: 1048308 - DNA, 15 bp, Homo sapiens
ctctgagcctcagtt

SEQ ID NO: 1048309 - DNA, 15 bp, Homo sapiens
tctgagcctcagttt

SEQ ID NO: 1048310 - DNA, 15 bp, Homo sapiens
ctgagcctcagtttg

SEQ ID NO: 1048311 - DNA, 15 bp, Homo sapiens
tgagcctcagtttgc

SEQ ID NO: 1048312 - DNA, 15 bp, Homo sapiens
gagcctcagtttgcc

SEQ ID NO: 1048313 - DNA, 15 bp, Homo sapiens
agcctcagtttgccc

SEQ ID NO: 1048314 - DNA, 15 bp, Homo sapiens
gcctcagtttgcccg

SEQ ID NO: 1048315 - DNA, 15 bp, Homo sapiens
cctcagtttgcccgt

SEQ ID NO: 1048316 - DNA, 15 bp, Homo sapiens
ctcagtttgcccgtc

SEQ ID NO: 1048317 - DNA, 15 bp, Homo sapiens
tcagtttgcccgtct

SEQ ID NO: 1048318 - DNA, 15 bp, Homo sapiens
cagtttgcccgtctg

SEQ ID NO: 1048319 - DNA, 15 bp, Homo sapiens
agtttgcccgtctgc

SEQ ID NO: 1048320 - DNA, 15 bp, Homo sapiens
gtttgcccgtctgca

SEQ ID NO: 1048321 - DNA, 15 bp, Homo sapiens
tttgcccgtctgcag

SEQ ID NO: 1048322 - DNA, 15 bp, Homo sapiens
ttgcccgtctgcaga

SEQ ID NO: 1048323 - DNA, 15 bp, Homo sapiens
tgcccgtctgcagac

SEQ ID NO: 1048324 - DNA, 15 bp, Homo sapiens
gcccgtctgcagact

SEQ ID NO: 1048325 - DNA, 15 bp, Homo sapiens
cccgtctgcagactg

SEQ ID NO: 1048326 - DNA, 15 bp, Homo sapiens
ccgtctgcagactgg

SEQ ID NO: 1048327 - DNA, 15 bp, Homo sapiens
cgtctgcagactgga

SEQ ID NO: 1048328 - DNA, 15 bp, Homo sapiens
gtctgcagactggag

SEQ ID NO: 1048329 - DNA, 15 bp, Homo sapiens
tctgcagactggaga

SEQ ID NO: 1048330 - DNA, 15 bp, Homo sapiens
ctgcagactggagag

SEQ ID NO: 1048331 - DNA, 15 bp, Homo sapiens
tgcagactggagaga

SEQ ID NO: 1048332 - DNA, 15 bp, Homo sapiens
gcagactggagagac

SEQ ID NO: 1048333 - DNA, 15 bp, Homo sapiens
cagactggagagaca

SEQ ID NO: 1048334 - DNA, 15 bp, Homo sapiens
agactggagagacac

SEQ ID NO: 1048335 - DNA, 15 bp, Homo sapiens
gactggagagacaca

SEQ ID NO: 1048336 - DNA, 15 bp, Homo sapiens
actggagagacacaa

SEQ ID NO: 1048337 - DNA, 15 bp, Homo sapiens
ctggagagacacaag

SEQ ID NO: 1048338 - DNA, 15 bp, Homo sapiens
tggagagacacaaga

SEQ ID NO: 1048339 - DNA, 15 bp, Homo sapiens
ggagagacacaagag

SEQ ID NO: 1048340 - DNA, 15 bp, Homo sapiens
gagagacacaagagc

SEQ ID NO: 1048341 - DNA, 15 bp, Homo sapiens
agagacacaagagcc

SEQ ID NO: 1048342 - DNA, 15 bp, Homo sapiens
gagacacaagagccc

SEQ ID NO: 1048343 - DNA, 15 bp, Homo sapiens
agacacaagagcccc

SEQ ID NO: 1048344 - DNA, 15 bp, Homo sapiens
gacacaagagcccct

SEQ ID NO: 1048345 - DNA, 15 bp, Homo sapiens
acacaagagcccctt

SEQ ID NO: 1048346 - DNA, 15 bp, Homo sapiens
cacaagagccccttc

SEQ ID NO: 1048347 - DNA, 15 bp, Homo sapiens
acaagagccccttca

SEQ ID NO: 1048348 - DNA, 15 bp, Homo sapiens
caagagccccttcat

SEQ ID NO: 1048349 - DNA, 15 bp, Homo sapiens
aagagccccttcatg

SEQ ID NO: 1048350 - DNA, 15 bp, Homo sapiens
agagccccttcatgg

SEQ ID NO: 1048351 - DNA, 15 bp, Homo sapiens
gagccccttcatggg

SEQ ID NO: 1048352 - DNA, 15 bp, Homo sapiens
agccccttcatgggg

SEQ ID NO: 1048353 - DNA, 15 bp, Homo sapiens
gccccttcatggggt

SEQ ID NO: 1048354 - DNA, 15 bp, Homo sapiens
ccccttcatggggtc

SEQ ID NO: 1048355 - DNA, 15 bp, Homo sapiens
cccttcatggggtca

SEQ ID NO: 1048356 - DNA, 15 bp, Homo sapiens
ccttcatggggtcac

SEQ ID NO: 1048357 - DNA, 15 bp, Homo sapiens
cttcatggggtcacc

SEQ ID NO: 1048358 - DNA, 15 bp, Homo sapiens
ttcatggggtcaccg

SEQ ID NO: 1048359 - DNA, 15 bp, Homo sapiens
tcatggggtcaccgg

SEQ ID NO: 1048360 - DNA, 15 bp, Homo sapiens
catggggtcaccggg

SEQ ID NO: 1048361 - DNA, 15 bp, Homo sapiens
atggggtcaccggga

SEQ ID NO: 1048362 - DNA, 15 bp, Homo sapiens
tggggtcaccgggac

SEQ ID NO: 1048363 - DNA, 15 bp, Homo sapiens
ggggtcaccgggaca

SEQ ID NO: 1048364 - DNA, 15 bp, Homo sapiens
gggtcaccgggacac

SEQ ID NO: 1048365 - DNA, 15 bp, Homo sapiens
ggtcaccgggacact

SEQ ID NO: 1048366 - DNA, 15 bp, Homo sapiens
gtcaccgggacactc

SEQ ID NO: 1048367 - DNA, 15 bp, Homo sapiens
tcaccgggacactca

SEQ ID NO: 1048368 - DNA, 15 bp, Homo sapiens
caccgggacactcag

SEQ ID NO: 1048369 - DNA, 15 bp, Homo sapiens
accgggacactcagg

SEQ ID NO: 1048370 - DNA, 15 bp, Homo sapiens
ccgggacactcagga

SEQ ID NO: 1048371 - DNA, 15 bp, Homo sapiens
cgggacactcaggat

SEQ ID NO: 1048372 - DNA, 15 bp, Homo sapiens
gggacactcaggatg

SEQ ID NO: 1048373 - DNA, 15 bp, Homo sapiens
ggacactcaggatgc

SEQ ID NO: 1048374 - DNA, 15 bp, Homo sapiens
gacactcaggatgca

SEQ ID NO: 1048375 - DNA, 15 bp, Homo sapiens
acactcaggatgcac

SEQ ID NO: 1048376 - DNA, 15 bp, Homo sapiens
cactcaggatgcact

SEQ ID NO: 1048377 - DNA, 15 bp, Homo sapiens
actcaggatgcactc

SEQ ID NO: 1048378 - DNA, 15 bp, Homo sapiens
ctcaggatgcactcg

SEQ ID NO: 1048379 - DNA, 15 bp, Homo sapiens
tcaggatgcactcgg

SEQ ID NO: 1048380 - DNA, 15 bp, Homo sapiens
caggatgcactcgga

SEQ ID NO: 1048381 - DNA, 15 bp, Homo sapiens
aggatgcactcggag

SEQ ID NO: 1048382 - DNA, 15 bp, Homo sapiens
ggatgcactcggagc

SEQ ID NO: 1048383 - DNA, 15 bp, Homo sapiens
gatgcactcggagct

SEQ ID NO: 1048384 - DNA, 15 bp, Homo sapiens
atgcactcggagctc

SEQ ID NO: 1048385 - DNA, 15 bp, Homo sapiens
tgcactcggagctct

SEQ ID NO: 1048386 - DNA, 15 bp, Homo sapiens
gcactcggagctctg

SEQ ID NO: 1048387 - DNA, 15 bp, Homo sapiens
cactcggagctctga

SEQ ID NO: 1048388 - DNA, 15 bp, Homo sapiens
actcggagctctgag

SEQ ID NO: 1048389 - DNA, 15 bp, Homo sapiens
ctcggagctctgaga

SEQ ID NO: 1048390 - DNA, 15 bp, Homo sapiens
tcggagctctgagac

SEQ ID NO: 1048391 - DNA, 15 bp, Homo sapiens
cggagctctgagacg

SEQ ID NO: 1048392 - DNA, 15 bp, Homo sapiens
ggagctctgagacgg

SEQ ID NO: 1048393 - DNA, 15 bp, Homo sapiens
gagctctgagacggc

SEQ ID NO: 1048394 - DNA, 15 bp, Homo sapiens
agctctgagacggct

SEQ ID NO: 1048395 - DNA, 15 bp, Homo sapiens
gctctgagacggctg

SEQ ID NO: 1048396 - DNA, 15 bp, Homo sapiens
ctctgagacggctgg

SEQ ID NO: 1048397 - DNA, 15 bp, Homo sapiens
tctgagacggctggc

SEQ ID NO: 1048398 - DNA, 15 bp, Homo sapiens
ctgagacggctggcg

SEQ ID NO: 1048399 - DNA, 15 bp, Homo sapiens
tgagacggctggcgg

SEQ ID NO: 1048400 - DNA, 15 bp, Homo sapiens
gagacggctggcgga

SEQ ID NO: 1048401 - DNA, 15 bp, Homo sapiens
agacggctggcggat

SEQ ID NO: 1048402 - DNA, 15 bp, Homo sapiens
gacggctggcggatg

SEQ ID NO: 1048403 - DNA, 15 bp, Homo sapiens
acggctggcggatgt

SEQ ID NO: 1048404 - DNA, 15 bp, Homo sapiens
cggctggcggatgtg

SEQ ID NO: 1048405 - DNA, 15 bp, Homo sapiens
ggctggcggatgtgc

SEQ ID NO: 1048406 - DNA, 15 bp, Homo sapiens
gctggcggatgtgcc

SEQ ID NO: 1048407 - DNA, 15 bp, Homo sapiens
ctggcggatgtgcct

SEQ ID NO: 1048408 - DNA, 15 bp, Homo sapiens
tggcggatgtgcctg

SEQ ID NO: 1048409 - DNA, 15 bp, Homo sapiens
ggcggatgtgcctgt

SEQ ID NO: 1048410 - DNA, 15 bp, Homo sapiens
gcggatgtgcctgtt

SEQ ID NO: 1048411 - DNA, 15 bp, Homo sapiens
cggatgtgcctgtta

SEQ ID NO: 1048412 - DNA, 15 bp, Homo sapiens
ggatgtgcctgttac

SEQ ID NO: 1048413 - DNA, 15 bp, Homo sapiens
gatgtgcctgttaca

SEQ ID NO: 1048414 - DNA, 15 bp, Homo sapiens
atgtgcctgttacaa

SEQ ID NO: 1048415 - DNA, 15 bp, Homo sapiens
tgtgcctgttacaac

SEQ ID NO: 1048416 - DNA, 15 bp, Homo sapiens
gtgcctgttacaact

SEQ ID NO: 1048417 - DNA, 15 bp, Homo sapiens
tgcctgttacaactc

SEQ ID NO: 1048418 - DNA, 15 bp, Homo sapiens
gcctgttacaactcc

SEQ ID NO: 1048419 - DNA, 15 bp, Homo sapiens
cctgttacaactccc

SEQ ID NO: 1048420 - DNA, 15 bp, Homo sapiens
ctgttacaactccct

SEQ ID NO: 1048421 - DNA, 15 bp, Homo sapiens
tgttacaactccctt

SEQ ID NO: 1048422 - DNA, 15 bp, Homo sapiens
gttacaactccctta

SEQ ID NO: 1048423 - DNA, 15 bp, Homo sapiens
ttacaactcccttac

SEQ ID NO: 1048424 - DNA, 15 bp, Homo sapiens
tacaactcccttacc

SEQ ID NO: 1048425 - DNA, 15 bp, Homo sapiens
acaactcccttacct

SEQ ID NO: 1048426 - DNA, 15 bp, Homo sapiens
caactcccttacctc

SEQ ID NO: 1048427 - DNA, 15 bp, Homo sapiens
aactcccttacctcc

SEQ ID NO: 1048428 - DNA, 15 bp, Homo sapiens
actcccttacctcct

SEQ ID NO: 1048429 - DNA, 15 bp, Homo sapiens
ctcccttacctcctg

SEQ ID NO: 1048430 - DNA, 15 bp, Homo sapiens
tcccttacctcctgg

SEQ ID NO: 1048431 - DNA, 15 bp, Homo sapiens
cccttacctcctggc

SEQ ID NO: 1048432 - DNA, 15 bp, Homo sapiens
ccttacctcctggcg

SEQ ID NO: 1048433 - DNA, 15 bp, Homo sapiens
cttacctcctggcgt

SEQ ID NO: 1048434 - DNA, 15 bp, Homo sapiens
ttacctcctggcgtt

SEQ ID NO: 1048435 - DNA, 15 bp, Homo sapiens
tacctcctggcgttt

SEQ ID NO: 1048436 - DNA, 15 bp, Homo sapiens
acctcctggcgtttt

SEQ ID NO: 1048437 - DNA, 15 bp, Homo sapiens
cctcctggcgttttc

SEQ ID NO: 1048438 - DNA, 15 bp, Homo sapiens
ctcctggcgttttca

SEQ ID NO: 1048439 - DNA, 15 bp, Homo sapiens
tcctggcgttttcac

SEQ ID NO: 1048440 - DNA, 15 bp, Homo sapiens
cctggcgttttcaca

SEQ ID NO: 1048441 - DNA, 15 bp, Homo sapiens
ctggcgttttcacag

SEQ ID NO: 1048442 - DNA, 15 bp, Homo sapiens
tggcgttttcacagc

SEQ ID NO: 1048443 - DNA, 15 bp, Homo sapiens
ggcgttttcacagca

SEQ ID NO: 1048444 - DNA, 15 bp, Homo sapiens
gcgttttcacagcac

SEQ ID NO: 1048445 - DNA, 15 bp, Homo sapiens
cgttttcacagcacc

SEQ ID NO: 1048446 - DNA, 15 bp, Homo sapiens
gttttcacagcacct

SEQ ID NO: 1048447 - DNA, 15 bp, Homo sapiens
ttttcacagcacctc

SEQ ID NO: 1048448 - DNA, 15 bp, Homo sapiens
tttcacagcacctcc

SEQ ID NO: 1048449 - DNA, 15 bp, Homo sapiens
ttcacagcacctccc

SEQ ID NO: 1048450 - DNA, 15 bp, Homo sapiens
tcacagcacctcccc

SEQ ID NO: 1048451 - DNA, 15 bp, Homo sapiens
cacagcacctcccct

SEQ ID NO: 1048452 - DNA, 15 bp, Homo sapiens
acagcacctcccctc

SEQ ID NO: 1048453 - DNA, 15 bp, Homo sapiens
cagcacctcccctcc

SEQ ID NO: 1048454 - DNA, 15 bp, Homo sapiens
agcacctcccctcct

SEQ ID NO: 1048455 - DNA, 15 bp, Homo sapiens
gcacctcccctcctc

SEQ ID NO: 1048456 - DNA, 15 bp, Homo sapiens
cacctcccctcctcc

SEQ ID NO: 1048457 - DNA, 15 bp, Homo sapiens
acctcccctcctcca

SEQ ID NO: 1048458 - DNA, 15 bp, Homo sapiens
cctcccctcctccac

SEQ ID NO: 1048459 - DNA, 15 bp, Homo sapiens
ctcccctcctccaca

SEQ ID NO: 1048460 - DNA, 15 bp, Homo sapiens
tcccctcctccacac

SEQ ID NO: 1048461 - DNA, 15 bp, Homo sapiens
cccctcctccacacc

SEQ ID NO: 1048462 - DNA, 15 bp, Homo sapiens
ccctcctccacaccc

SEQ ID NO: 1048463 - DNA, 15 bp, Homo sapiens
cctcctccacacccc

SEQ ID NO: 1048464 - DNA, 15 bp, Homo sapiens
ctcctccacaccccc

SEQ ID NO: 1048465 - DNA, 15 bp, Homo sapiens
tcctccacaccccca

SEQ ID NO: 1048466 - DNA, 15 bp, Homo sapiens
cctccacacccccac

SEQ ID NO: 1048467 - DNA, 15 bp, Homo sapiens
ctccacacccccact

SEQ ID NO: 1048468 - DNA, 15 bp, Homo sapiens
tccacacccccactt

SEQ ID NO: 1048469 - DNA, 15 bp, Homo sapiens
ccacacccccacttc

SEQ ID NO: 1048470 - DNA, 15 bp, Homo sapiens
cacacccccacttcc

SEQ ID NO: 1048471 - DNA, 15 bp, Homo sapiens
acacccccacttccc

SEQ ID NO: 1048472 - DNA, 15 bp, Homo sapiens
cacccccacttccca

SEQ ID NO: 1048473 - DNA, 15 bp, Homo sapiens
acccccacttcccag

SEQ ID NO: 1048474 - DNA, 15 bp, Homo sapiens
cccccacttcccagt

SEQ ID NO: 1048475 - DNA, 15 bp, Homo sapiens
ccccacttcccagtt

SEQ ID NO: 1048476 - DNA, 15 bp, Homo sapiens
cccacttcccagttc

SEQ ID NO: 1048477 - DNA, 15 bp, Homo sapiens
ccacttcccagttca

SEQ ID NO: 1048478 - DNA, 15 bp, Homo sapiens
cacttcccagttcac

SEQ ID NO: 1048479 - DNA, 15 bp, Homo sapiens
acttcccagttcaca

SEQ ID NO: 1048480 - DNA, 15 bp, Homo sapiens
cttcccagttcacag

SEQ ID NO: 1048481 - DNA, 15 bp, Homo sapiens
ttcccagttcacaga

SEQ ID NO: 1048482 - DNA, 15 bp, Homo sapiens
tcccagttcacagac

SEQ ID NO: 1048483 - DNA, 15 bp, Homo sapiens
cccagttcacagaca

SEQ ID NO: 1048484 - DNA, 15 bp, Homo sapiens
ccagttcacagacag

SEQ ID NO: 1048485 - DNA, 15 bp, Homo sapiens
cagttcacagacagg

SEQ ID NO: 1048486 - DNA, 15 bp, Homo sapiens
agttcacagacaggg

SEQ ID NO: 1048487 - DNA, 15 bp, Homo sapiens
gttcacagacagggg

SEQ ID NO: 1048488 - DNA, 15 bp, Homo sapiens
ttcacagacagggga

SEQ ID NO: 1048489 - DNA, 15 bp, Homo sapiens
tcacagacaggggag

SEQ ID NO: 1048490 - DNA, 15 bp, Homo sapiens
cacagacaggggagc

SEQ ID NO: 1048491 - DNA, 15 bp, Homo sapiens
acagacaggggagct

SEQ ID NO: 1048492 - DNA, 15 bp, Homo sapiens
cagacaggggagctg

SEQ ID NO: 1048493 - DNA, 15 bp, Homo sapiens
agacaggggagctga

SEQ ID NO: 1048494 - DNA, 15 bp, Homo sapiens
gacaggggagctgac

SEQ ID NO: 1048495 - DNA, 15 bp, Homo sapiens
acaggggagctgact

SEQ ID NO: 1048496 - DNA, 15 bp, Homo sapiens
caggggagctgactt

SEQ ID NO: 1048497 - DNA, 15 bp, Homo sapiens
aggggagctgacttg

SEQ ID NO: 1048498 - DNA, 15 bp, Homo sapiens
ggggagctgacttgc

SEQ ID NO: 1048499 - DNA, 15 bp, Homo sapiens
gggagctgacttgcc

SEQ ID NO: 1048500 - DNA, 15 bp, Homo sapiens
ggagctgacttgccc

SEQ ID NO: 1048501 - DNA, 15 bp, Homo sapiens
gagctgacttgcccc

SEQ ID NO: 1048502 - DNA, 15 bp, Homo sapiens
agctgacttgccccc

SEQ ID NO: 1048503 - DNA, 15 bp, Homo sapiens
gctgacttgcccccg

SEQ ID NO: 1048504 - DNA, 15 bp, Homo sapiens
ctgacttgcccccgg

SEQ ID NO: 1048505 - DNA, 15 bp, Homo sapiens
tgacttgcccccggc

SEQ ID NO: 1048506 - DNA, 15 bp, Homo sapiens
gacttgcccccggca

SEQ ID NO: 1048507 - DNA, 15 bp, Homo sapiens
acttgcccccggcac

SEQ ID NO: 1048508 - DNA, 15 bp, Homo sapiens
cttgcccccggcaca

SEQ ID NO: 1048509 - DNA, 15 bp, Homo sapiens
ttgcccccggcacac

SEQ ID NO: 1048510 - DNA, 15 bp, Homo sapiens
tgcccccggcacacg

SEQ ID NO: 1048511 - DNA, 15 bp, Homo sapiens
gcccccggcacacgg

SEQ ID NO: 1048512 - DNA, 15 bp, Homo sapiens
cccccggcacacggt

SEQ ID NO: 1048513 - DNA, 15 bp, Homo sapiens
ccccggcacacggtg

SEQ ID NO: 1048514 - DNA, 15 bp, Homo sapiens
cccggcacacggtgt

SEQ ID NO: 1048515 - DNA, 15 bp, Homo sapiens
ccggcacacggtgtt

SEQ ID NO: 1048516 - DNA, 15 bp, Homo sapiens
cggcacacggtgttc

SEQ ID NO: 1048517 - DNA, 15 bp, Homo sapiens
ggcacacggtgttcc

SEQ ID NO: 1048518 - DNA, 15 bp, Homo sapiens
gcacacggtgttcca

SEQ ID NO: 1048519 - DNA, 15 bp, Homo sapiens
cacacggtgttccag

SEQ ID NO: 1048520 - DNA, 15 bp, Homo sapiens
acacggtgttccagg

SEQ ID NO: 1048521 - DNA, 15 bp, Homo sapiens
cacggtgttccaggg

SEQ ID NO: 1048522 - DNA, 15 bp, Homo sapiens
acggtgttccaggga

SEQ ID NO: 1048523 - DNA, 15 bp, Homo sapiens
cggtgttccagggat

SEQ ID NO: 1048524 - DNA, 15 bp, Homo sapiens
ggtgttccagggatg

SEQ ID NO: 1048525 - DNA, 15 bp, Homo sapiens
gtgttccagggatgg

SEQ ID NO: 1048526 - DNA, 15 bp, Homo sapiens
tgttccagggatggg

SEQ ID NO: 1048527 - DNA, 15 bp, Homo sapiens
gttccagggatgggg

SEQ ID NO: 1048528 - DNA, 15 bp, Homo sapiens
ttccagggatggggc

SEQ ID NO: 1048529 - DNA, 15 bp, Homo sapiens
tccagggatggggcg

SEQ ID NO: 1048530 - DNA, 15 bp, Homo sapiens
ccagggatggggcgg

SEQ ID NO: 1048531 - DNA, 15 bp, Homo sapiens
cagggatggggcggg

SEQ ID NO: 1048532 - DNA, 15 bp, Homo sapiens
agggatggggcgggc

SEQ ID NO: 1048533 - DNA, 15 bp, Homo sapiens
gggatggggcgggca

SEQ ID NO: 1048534 - DNA, 15 bp, Homo sapiens
ggatggggcgggcag

SEQ ID NO: 1048535 - DNA, 15 bp, Homo sapiens
gatggggcgggcaga

SEQ ID NO: 1048536 - DNA, 15 bp, Homo sapiens
atggggcgggcagag

SEQ ID NO: 1048537 - DNA, 15 bp, Homo sapiens
tggggcgggcagagg

SEQ ID NO: 1048538 - DNA, 15 bp, Homo sapiens
ggggcgggcagaggg

SEQ ID NO: 1048539 - DNA, 15 bp, Homo sapiens
gggcgggcagagggt

SEQ ID NO: 1048540 - DNA, 15 bp, Homo sapiens
ggcgggcagagggtg

SEQ ID NO: 1048541 - DNA, 15 bp, Homo sapiens
gcgggcagagggtgt

SEQ ID NO: 1048542 - DNA, 15 bp, Homo sapiens
cgggcagagggtgtt

SEQ ID NO: 1048543 - DNA, 15 bp, Homo sapiens
gggcagagggtgttc

SEQ ID NO: 1048544 - DNA, 15 bp, Homo sapiens
ggcagagggtgttcc

SEQ ID NO: 1048545 - DNA, 15 bp, Homo sapiens
gcagagggtgttccc

SEQ ID NO: 1048546 - DNA, 15 bp, Homo sapiens
cagagggtgttcccg

SEQ ID NO: 1048547 - DNA, 15 bp, Homo sapiens
agagggtgttcccgc

SEQ ID NO: 1048548 - DNA, 15 bp, Homo sapiens
gagggtgttcccgct

SEQ ID NO: 1048549 - DNA, 15 bp, Homo sapiens
agggtgttcccgctg

SEQ ID NO: 1048550 - DNA, 15 bp, Homo sapiens
gggtgttcccgctgt

SEQ ID NO: 1048551 - DNA, 15 bp, Homo sapiens
ggtgttcccgctgtt

SEQ ID NO: 1048552 - DNA, 15 bp, Homo sapiens
gtgttcccgctgttg

SEQ ID NO: 1048553 - DNA, 15 bp, Homo sapiens
tgttcccgctgttgg

SEQ ID NO: 1048554 - DNA, 15 bp, Homo sapiens
gttcccgctgttgga

SEQ ID NO: 1048555 - DNA, 15 bp, Homo sapiens
ttcccgctgttggag

SEQ ID NO: 1048556 - DNA, 15 bp, Homo sapiens
tcccgctgttggaga

SEQ ID NO: 1048557 - DNA, 15 bp, Homo sapiens
cccgctgttggagac

SEQ ID NO: 1048558 - DNA, 15 bp, Homo sapiens
ccgctgttggagacc

SEQ ID NO: 1048559 - DNA, 15 bp, Homo sapiens
cgctgttggagaccc

SEQ ID NO: 1048560 - DNA, 15 bp, Homo sapiens
gctgttggagaccca

SEQ ID NO: 1048561 - DNA, 15 bp, Homo sapiens
ctgttggagacccac

SEQ ID NO: 1048562 - DNA, 15 bp, Homo sapiens
tgttggagacccaca

SEQ ID NO: 1048563 - DNA, 15 bp, Homo sapiens
gttggagacccacag

SEQ ID NO: 1048564 - DNA, 15 bp, Homo sapiens
ttggagacccacagt

SEQ ID NO: 1048565 - DNA, 15 bp, Homo sapiens
tggagacccacagtc

SEQ ID NO: 1048566 - DNA, 15 bp, Homo sapiens
ggagacccacagtct

SEQ ID NO: 1048567 - DNA, 15 bp, Homo sapiens
gagacccacagtctg

SEQ ID NO: 1048568 - DNA, 15 bp, Homo sapiens
agacccacagtctgg

SEQ ID NO: 1048569 - DNA, 15 bp, Homo sapiens
gacccacagtctggt

SEQ ID NO: 1048570 - DNA, 15 bp, Homo sapiens
acccacagtctggtt

SEQ ID NO: 1048571 - DNA, 15 bp, Homo sapiens
cccacagtctggttc

SEQ ID NO: 1048572 - DNA, 15 bp, Homo sapiens
ccacagtctggttct

SEQ ID NO: 1048573 - DNA, 15 bp, Homo sapiens
cacagtctggttctg

SEQ ID NO: 1048574 - DNA, 15 bp, Homo sapiens
acagtctggttctgg

SEQ ID NO: 1048575 - DNA, 15 bp, Homo sapiens
cagtctggttctggg

SEQ ID NO: 1048576 - DNA, 15 bp, Homo sapiens
agtctggttctggga

SEQ ID NO: 1048577 - DNA, 15 bp, Homo sapiens
gtctggttctgggaa

SEQ ID NO: 1048578 - DNA, 15 bp, Homo sapiens
tctggttctgggaaa

SEQ ID NO: 1048579 - DNA, 15 bp, Homo sapiens
ctggttctgggaaag

SEQ ID NO: 1048580 - DNA, 15 bp, Homo sapiens
tggttctgggaaagc

SEQ ID NO: 1048581 - DNA, 15 bp, Homo sapiens
ggttctgggaaagcc

SEQ ID NO: 1048582 - DNA, 15 bp, Homo sapiens
gttctgggaaagcca

SEQ ID NO: 1048583 - DNA, 15 bp, Homo sapiens
ttctgggaaagccaa

SEQ ID NO: 1048584 - DNA, 15 bp, Homo sapiens
tctgggaaagccaag

SEQ ID NO: 1048585 - DNA, 15 bp, Homo sapiens
ctgggaaagccaaga

SEQ ID NO: 1048586 - DNA, 15 bp, Homo sapiens
tgggaaagccaagat

SEQ ID NO: 1048587 - DNA, 15 bp, Homo sapiens
gggaaagccaagatg

SEQ ID NO: 1048588 - DNA, 15 bp, Homo sapiens
ggaaagccaagatga

SEQ ID NO: 1048589 - DNA, 15 bp, Homo sapiens
gaaagccaagatgaa

SEQ ID NO: 1048590 - DNA, 15 bp, Homo sapiens
aaagccaagatgaaa

SEQ ID NO: 1048591 - DNA, 15 bp, Homo sapiens
aagccaagatgaaaa

SEQ ID NO: 1048592 - DNA, 15 bp, Homo sapiens
agccaagatgaaaac

SEQ ID NO: 1048593 - DNA, 15 bp, Homo sapiens
gccaagatgaaaacc

SEQ ID NO: 1048594 - DNA, 15 bp, Homo sapiens
ccaagatgaaaaccc

SEQ ID NO: 1048595 - DNA, 15 bp, Homo sapiens
caagatgaaaaccca

SEQ ID NO: 1048596 - DNA, 15 bp, Homo sapiens
aagatgaaaacccag

SEQ ID NO: 1048597 - DNA, 15 bp, Homo sapiens
agatgaaaacccagc

SEQ ID NO: 1048598 - DNA, 15 bp, Homo sapiens
gatgaaaacccagca

SEQ ID NO: 1048599 - DNA, 15 bp, Homo sapiens
atgaaaacccagcaa

SEQ ID NO: 1048600 - DNA, 15 bp, Homo sapiens
tgaaaacccagcaaa

SEQ ID NO: 1048601 - DNA, 15 bp, Homo sapiens
gaaaacccagcaaat

SEQ ID NO: 1048602 - DNA, 15 bp, Homo sapiens
aaaacccagcaaatg

SEQ ID NO: 1048603 - DNA, 15 bp, Homo sapiens
aaacccagcaaatgt

SEQ ID NO: 1048604 - DNA, 15 bp, Homo sapiens
aacccagcaaatgtg

SEQ ID NO: 1048605 - DNA, 15 bp, Homo sapiens
acccagcaaatgtgc

SEQ ID NO: 1048606 - DNA, 15 bp, Homo sapiens
cccagcaaatgtgcc

SEQ ID NO: 1048607 - DNA, 15 bp, Homo sapiens
ccagcaaatgtgcct

SEQ ID NO: 1048608 - DNA, 15 bp, Homo sapiens
cagcaaatgtgcctg

SEQ ID NO: 1048609 - DNA, 15 bp, Homo sapiens
agcaaatgtgcctga

SEQ ID NO: 1048610 - DNA, 15 bp, Homo sapiens
gcaaatgtgcctgag

SEQ ID NO: 1048611 - DNA, 15 bp, Homo sapiens
caaatgtgcctgagg

SEQ ID NO: 1048612 - DNA, 15 bp, Homo sapiens
aaatgtgcctgaggt

SEQ ID NO: 1048613 - DNA, 15 bp, Homo sapiens
aatgtgcctgaggtt

SEQ ID NO: 1048614 - DNA, 15 bp, Homo sapiens
atgtgcctgaggttt

SEQ ID NO: 1048615 - DNA, 15 bp, Homo sapiens
tgtgcctgaggtttg

SEQ ID NO: 1048616 - DNA, 15 bp, Homo sapiens
gtgcctgaggtttgg

SEQ ID NO: 1048617 - DNA, 15 bp, Homo sapiens
tgcctgaggtttggg

SEQ ID NO: 1048618 - DNA, 15 bp, Homo sapiens
gcctgaggtttggga

SEQ ID NO: 1048619 - DNA, 15 bp, Homo sapiens
cctgaggtttgggaa

SEQ ID NO: 1048620 - DNA, 15 bp, Homo sapiens
ctgaggtttgggaat

SEQ ID NO: 1048621 - DNA, 15 bp, Homo sapiens
tgaggtttgggaatg

SEQ ID NO: 1048622 - DNA, 15 bp, Homo sapiens
gaggtttgggaatgg

SEQ ID NO: 1048623 - DNA, 15 bp, Homo sapiens
aggtttgggaatggg

SEQ ID NO: 1048624 - DNA, 15 bp, Homo sapiens
ggtttgggaatggga

SEQ ID NO: 1048625 - DNA, 15 bp, Homo sapiens
gtttgggaatgggaa

SEQ ID NO: 1048626 - DNA, 15 bp, Homo sapiens
tttgggaatgggaaa

SEQ ID NO: 1048627 - DNA, 15 bp, Homo sapiens
ttgggaatgggaaac

SEQ ID NO: 1048628 - DNA, 15 bp, Homo sapiens
tgggaatgggaaaca

SEQ ID NO: 1048629 - DNA, 15 bp, Homo sapiens
gggaatgggaaacat

SEQ ID NO: 1048630 - DNA, 15 bp, Homo sapiens
ggaatgggaaacatg

SEQ ID NO: 1048631 - DNA, 15 bp, Homo sapiens
gaatgggaaacatga

SEQ ID NO: 1048632 - DNA, 15 bp, Homo sapiens
aatgggaaacatgaa

SEQ ID NO: 1048633 - DNA, 15 bp, Homo sapiens
atgggaaacatgaat

SEQ ID NO: 1048634 - DNA, 15 bp, Homo sapiens
tgggaaacatgaatc

SEQ ID NO: 1048635 - DNA, 15 bp, Homo sapiens
gggaaacatgaatca

SEQ ID NO: 1048636 - DNA, 15 bp, Homo sapiens
ggaaacatgaatcag

SEQ ID NO: 1048637 - DNA, 15 bp, Homo sapiens
gaaacatgaatcagc

SEQ ID NO: 1048638 - DNA, 15 bp, Homo sapiens
aaacatgaatcagct

SEQ ID NO: 1048639 - DNA, 15 bp, Homo sapiens
aacatgaatcagctg

SEQ ID NO: 1048640 - DNA, 15 bp, Homo sapiens
acatgaatcagctgc

SEQ ID NO: 1048641 - DNA, 15 bp, Homo sapiens
catgaatcagctgct

SEQ ID NO: 1048642 - DNA, 15 bp, Homo sapiens
atgaatcagctgctg

SEQ ID NO: 1048643 - DNA, 15 bp, Homo sapiens
tgaatcagctgctgc

SEQ ID NO: 1048644 - DNA, 15 bp, Homo sapiens
gaatcagctgctgca

SEQ ID NO: 1048645 - DNA, 15 bp, Homo sapiens
aatcagctgctgcat

SEQ ID NO: 1048646 - DNA, 15 bp, Homo sapiens
atcagctgctgcatt

SEQ ID NO: 1048647 - DNA, 15 bp, Homo sapiens
tcagctgctgcattc

SEQ ID NO: 1048648 - DNA, 15 bp, Homo sapiens
cagctgctgcattcc

SEQ ID NO: 1048649 - DNA, 15 bp, Homo sapiens
agctgctgcattccg

SEQ ID NO: 1048650 - DNA, 15 bp, Homo sapiens
gctgctgcattccgt

SEQ ID NO: 1048651 - DNA, 15 bp, Homo sapiens
ctgctgcattccgtt

SEQ ID NO: 1048652 - DNA, 15 bp, Homo sapiens
tgctgcattccgttc

SEQ ID NO: 1048653 - DNA, 15 bp, Homo sapiens
gctgcattccgttca

SEQ ID NO: 1048654 - DNA, 15 bp, Homo sapiens
ctgcattccgttcac

SEQ ID NO: 1048655 - DNA, 15 bp, Homo sapiens
tgcattccgttcact

SEQ ID NO: 1048656 - DNA, 15 bp, Homo sapiens
gcattccgttcactc

SEQ ID NO: 1048657 - DNA, 15 bp, Homo sapiens
cattccgttcactca

SEQ ID NO: 1048658 - DNA, 15 bp, Homo sapiens
attccgttcactcat

SEQ ID NO: 1048659 - DNA, 15 bp, Homo sapiens
ttccgttcactcatt

SEQ ID NO: 1048660 - DNA, 15 bp, Homo sapiens
tccgttcactcattc

SEQ ID NO: 1048661 - DNA, 15 bp, Homo sapiens
ccgttcactcattca

SEQ ID NO: 1048662 - DNA, 15 bp, Homo sapiens
cgttcactcattcac

SEQ ID NO: 1048663 - DNA, 15 bp, Homo sapiens
gttcactcattcact

SEQ ID NO: 1048664 - DNA, 15 bp, Homo sapiens
ttcactcattcactc

SEQ ID NO: 1048665 - DNA, 15 bp, Homo sapiens
tcactcattcactca

SEQ ID NO: 1048666 - DNA, 15 bp, Homo sapiens
cactcattcactcat

SEQ ID NO: 1048667 - DNA, 15 bp, Homo sapiens
actcattcactcatt

SEQ ID NO: 1048668 - DNA, 15 bp, Homo sapiens
ctcattcactcattc

SEQ ID NO: 1048669 - DNA, 15 bp, Homo sapiens
tcattcactcattcg

SEQ ID NO: 1048670 - DNA, 15 bp, Homo sapiens
cattcactcattcgc

SEQ ID NO: 1048671 - DNA, 15 bp, Homo sapiens
attcactcattcgct

SEQ ID NO: 1048672 - DNA, 15 bp, Homo sapiens
ttcactcattcgctc

SEQ ID NO: 1048673 - DNA, 15 bp, Homo sapiens
tcactcattcgctcg

SEQ ID NO: 1048674 - DNA, 15 bp, Homo sapiens
cactcattcgctcgt

SEQ ID NO: 1048675 - DNA, 15 bp, Homo sapiens
actcattcgctcgtt

SEQ ID NO: 1048676 - DNA, 15 bp, Homo sapiens
ctcattcgctcgttc

SEQ ID NO: 1048677 - DNA, 15 bp, Homo sapiens
tcattcgctcgttca

SEQ ID NO: 1048678 - DNA, 15 bp, Homo sapiens
cattcgctcgttcat

SEQ ID NO: 1048679 - DNA, 15 bp, Homo sapiens
attcgctcgttcatt

SEQ ID NO: 1048680 - DNA, 15 bp, Homo sapiens
ttcgctcgttcattt

SEQ ID NO: 1048681 - DNA, 15 bp, Homo sapiens
tcgctcgttcattta

SEQ ID NO: 1048682 - DNA, 15 bp, Homo sapiens
cgctcgttcatttaa

SEQ ID NO: 1048683 - DNA, 15 bp, Homo sapiens
gctcgttcatttaac

SEQ ID NO: 1048684 - DNA, 15 bp, Homo sapiens
ctcgttcatttaaca

SEQ ID NO: 1048685 - DNA, 15 bp, Homo sapiens
tcgttcatttaacaa

SEQ ID NO: 1048686 - DNA, 15 bp, Homo sapiens
cgttcatttaacaaa

SEQ ID NO: 1048687 - DNA, 15 bp, Homo sapiens
gttcatttaacaaat

SEQ ID NO: 1048688 - DNA, 15 bp, Homo sapiens
ttcatttaacaaatg

SEQ ID NO: 1048689 - DNA, 15 bp, Homo sapiens
tcatttaacaaatgt

SEQ ID NO: 1048690 - DNA, 15 bp, Homo sapiens
catttaacaaatgtt

SEQ ID NO: 1048691 - DNA, 15 bp, Homo sapiens
atttaacaaatgttt

SEQ ID NO: 1048692 - DNA, 15 bp, Homo sapiens
tttaacaaatgttta

SEQ ID NO: 1048693 - DNA, 15 bp, Homo sapiens
ttaacaaatgtttac

SEQ ID NO: 1048694 - DNA, 15 bp, Homo sapiens
taacaaatgtttact

SEQ ID NO: 1048695 - DNA, 15 bp, Homo sapiens
aacaaatgtttactg

SEQ ID NO: 1048696 - DNA, 15 bp, Homo sapiens
acaaatgtttactga

SEQ ID NO: 1048697 - DNA, 15 bp, Homo sapiens
caaatgtttactgag

SEQ ID NO: 1048698 - DNA, 15 bp, Homo sapiens
aaatgtttactgagc

SEQ ID NO: 1048699 - DNA, 15 bp, Homo sapiens
aatgtttactgagca

SEQ ID NO: 1048700 - DNA, 15 bp, Homo sapiens
atgtttactgagcac

SEQ ID NO: 1048701 - DNA, 15 bp, Homo sapiens
tgtttactgagcacc

SEQ ID NO: 1048702 - DNA, 15 bp, Homo sapiens
gtttactgagcacct

SEQ ID NO: 1048703 - DNA, 15 bp, Homo sapiens
tttactgagcacctg

SEQ ID NO: 1048704 - DNA, 15 bp, Homo sapiens
ttactgagcacctgc

SEQ ID NO: 1048705 - DNA, 15 bp, Homo sapiens
tactgagcacctgct

SEQ ID NO: 1048706 - DNA, 15 bp, Homo sapiens
actgagcacctgcta

SEQ ID NO: 1048707 - DNA, 15 bp, Homo sapiens
ctgagcacctgctag

SEQ ID NO: 1048708 - DNA, 15 bp, Homo sapiens
tgagcacctgctagg

SEQ ID NO: 1048709 - DNA, 15 bp, Homo sapiens
gagcacctgctaggt

SEQ ID NO: 1048710 - DNA, 15 bp, Homo sapiens
agcacctgctaggtg

SEQ ID NO: 1048711 - DNA, 15 bp, Homo sapiens
gcacctgctaggtgt

SEQ ID NO: 1048712 - DNA, 15 bp, Homo sapiens
cacctgctaggtgtt

SEQ ID NO: 1048713 - DNA, 15 bp, Homo sapiens
acctgctaggtgttg

SEQ ID NO: 1048714 - DNA, 15 bp, Homo sapiens
cctgctaggtgttgg

SEQ ID NO: 1048715 - DNA, 15 bp, Homo sapiens
ctgctaggtgttggc

SEQ ID NO: 1048716 - DNA, 15 bp, Homo sapiens
tgctaggtgttggct

SEQ ID NO: 1048717 - DNA, 15 bp, Homo sapiens
gctaggtgttggctg

SEQ ID NO: 1048718 - DNA, 15 bp, Homo sapiens
ctaggtgttggctgc

SEQ ID NO: 1048719 - DNA, 15 bp, Homo sapiens
taggtgttggctgcc

SEQ ID NO: 1048720 - DNA, 15 bp, Homo sapiens
aggtgttggctgccg

SEQ ID NO: 1048721 - DNA, 15 bp, Homo sapiens
ggtgttggctgccgt

SEQ ID NO: 1048722 - DNA, 15 bp, Homo sapiens
gtgttggctgccgtt

SEQ ID NO: 1048723 - DNA, 15 bp, Homo sapiens
tgttggctgccgttc

SEQ ID NO: 1048724 - DNA, 15 bp, Homo sapiens
gttggctgccgttct

SEQ ID NO: 1048725 - DNA, 15 bp, Homo sapiens
ttggctgccgttcta

SEQ ID NO: 1048726 - DNA, 15 bp, Homo sapiens
tggctgccgttctaa

SEQ ID NO: 1048727 - DNA, 15 bp, Homo sapiens
ggctgccgttctaag

SEQ ID NO: 1048728 - DNA, 15 bp, Homo sapiens
gctgccgttctaagt

SEQ ID NO: 1048729 - DNA, 15 bp, Homo sapiens
ctgccgttctaagta

SEQ ID NO: 1048730 - DNA, 15 bp, Homo sapiens
tgccgttctaagtac

SEQ ID NO: 1048731 - DNA, 15 bp, Homo sapiens
gccgttctaagtaca

SEQ ID NO: 1048732 - DNA, 15 bp, Homo sapiens
ccgttctaagtacag

SEQ ID NO: 1048733 - DNA, 15 bp, Homo sapiens
cgttctaagtacagg

SEQ ID NO: 1048734 - DNA, 15 bp, Homo sapiens
gttctaagtacaggg

SEQ ID NO: 1048735 - DNA, 15 bp, Homo sapiens
ttctaagtacagggg

SEQ ID NO: 1048736 - DNA, 15 bp, Homo sapiens
tctaagtacagggga

SEQ ID NO: 1048737 - DNA, 15 bp, Homo sapiens
ctaagtacaggggac

SEQ ID NO: 1048738 - DNA, 15 bp, Homo sapiens
taagtacaggggacc

SEQ ID NO: 1048739 - DNA, 15 bp, Homo sapiens
aagtacaggggaccc

SEQ ID NO: 1048740 - DNA, 15 bp, Homo sapiens
agtacaggggaccca

SEQ ID NO: 1048741 - DNA, 15 bp, Homo sapiens
gtacaggggacccag

SEQ ID NO: 1048742 - DNA, 15 bp, Homo sapiens
tacaggggacccagc

SEQ ID NO: 1048743 - DNA, 15 bp, Homo sapiens
acaggggacccagca

SEQ ID NO: 1048744 - DNA, 15 bp, Homo sapiens
caggggacccagcag

SEQ ID NO: 1048745 - DNA, 15 bp, Homo sapiens
aggggacccagcagt

SEQ ID NO: 1048746 - DNA, 15 bp, Homo sapiens
ggggacccagcagtg

SEQ ID NO: 1048747 - DNA, 15 bp, Homo sapiens
gggacccagcagtgg

SEQ ID NO: 1048748 - DNA, 15 bp, Homo sapiens
ggacccagcagtgga

SEQ ID NO: 1048749 - DNA, 15 bp, Homo sapiens
gacccagcagtggac

SEQ ID NO: 1048750 - DNA, 15 bp, Homo sapiens
acccagcagtggaca

SEQ ID NO: 1048751 - DNA, 15 bp, Homo sapiens
cccagcagtggacag

SEQ ID NO: 1048752 - DNA, 15 bp, Homo sapiens
ccagcagtggacaga

SEQ ID NO: 1048753 - DNA, 15 bp, Homo sapiens
cagcagtggacagaa

SEQ ID NO: 1048754 - DNA, 15 bp, Homo sapiens
agcagtggacagaat

SEQ ID NO: 1048755 - DNA, 15 bp, Homo sapiens
gcagtggacagaatg

SEQ ID NO: 1048756 - DNA, 15 bp, Homo sapiens
cagtggacagaatgg

SEQ ID NO: 1048757 - DNA, 15 bp, Homo sapiens
agtggacagaatggg

SEQ ID NO: 1048758 - DNA, 15 bp, Homo sapiens
gtggacagaatgggc

SEQ ID NO: 1048759 - DNA, 15 bp, Homo sapiens
tggacagaatgggca

SEQ ID NO: 1048760 - DNA, 15 bp, Homo sapiens
ggacagaatgggcaa

SEQ ID NO: 1048761 - DNA, 15 bp, Homo sapiens
gacagaatgggcaaa

SEQ ID NO: 1048762 - DNA, 15 bp, Homo sapiens
acagaatgggcaaaa

SEQ ID NO: 1048763 - DNA, 15 bp, Homo sapiens
cagaatgggcaaaaa

SEQ ID NO: 1048764 - DNA, 15 bp, Homo sapiens
agaatgggcaaaaat

SEQ ID NO: 1048765 - DNA, 15 bp, Homo sapiens
gaatgggcaaaaatg

SEQ ID NO: 1048766 - DNA, 15 bp, Homo sapiens
aatgggcaaaaatgc

SEQ ID NO: 1048767 - DNA, 15 bp, Homo sapiens
atgggcaaaaatgcc

SEQ ID NO: 1048768 - DNA, 15 bp, Homo sapiens
tgggcaaaaatgcca

SEQ ID NO: 1048769 - DNA, 15 bp, Homo sapiens
gggcaaaaatgccaa

SEQ ID NO: 1048770 - DNA, 15 bp, Homo sapiens
ggcaaaaatgccaaa

SEQ ID NO: 1048771 - DNA, 15 bp, Homo sapiens
gcaaaaatgccaaag

SEQ ID NO: 1048772 - DNA, 15 bp, Homo sapiens
caaaaatgccaaagc

SEQ ID NO: 1048773 - DNA, 15 bp, Homo sapiens
aaaaatgccaaagct

SEQ ID NO: 1048774 - DNA, 15 bp, Homo sapiens
aaaatgccaaagctc

SEQ ID NO: 1048775 - DNA, 15 bp, Homo sapiens
aaatgccaaagctct

SEQ ID NO: 1048776 - DNA, 15 bp, Homo sapiens
aatgccaaagctctc

SEQ ID NO: 1048777 - DNA, 15 bp, Homo sapiens
atgccaaagctctct

SEQ ID NO: 1048778 - DNA, 15 bp, Homo sapiens
tgccaaagctctcta

SEQ ID NO: 1048779 - DNA, 15 bp, Homo sapiens
gccaaagctctctat

SEQ ID NO: 1048780 - DNA, 15 bp, Homo sapiens
ccaaagctctctata

SEQ ID NO: 1048781 - DNA, 15 bp, Homo sapiens
caaagctctctatac

SEQ ID NO: 1048782 - DNA, 15 bp, Homo sapiens
aaagctctctatact

SEQ ID NO: 1048783 - DNA, 15 bp, Homo sapiens
aagctctctatactc

SEQ ID NO: 1048784 - DNA, 15 bp, Homo sapiens
agctctctatactcc

SEQ ID NO: 1048785 - DNA, 15 bp, Homo sapiens
gctctctatactcct

SEQ ID NO: 1048786 - DNA, 15 bp, Homo sapiens
ctctctatactcctt

SEQ ID NO: 1048787 - DNA, 15 bp, Homo sapiens
tctctatactccttc

SEQ ID NO: 1048788 - DNA, 15 bp, Homo sapiens
ctctatactccttca

SEQ ID NO: 1048789 - DNA, 15 bp, Homo sapiens
tctatactccttcat

SEQ ID NO: 1048790 - DNA, 15 bp, Homo sapiens
ctatactccttcatt

SEQ ID NO: 1048791 - DNA, 15 bp, Homo sapiens
tatactccttcattc

SEQ ID NO: 1048792 - DNA, 15 bp, Homo sapiens
atactccttcattct

SEQ ID NO: 1048793 - DNA, 15 bp, Homo sapiens
tactccttcattctg

SEQ ID NO: 1048794 - DNA, 15 bp, Homo sapiens
actccttcattctgt

SEQ ID NO: 1048795 - DNA, 15 bp, Homo sapiens
ctccttcattctgtg

SEQ ID NO: 1048796 - DNA, 15 bp, Homo sapiens
tccttcattctgtga

SEQ ID NO: 1048797 - DNA, 15 bp, Homo sapiens
ccttcattctgtgag

SEQ ID NO: 1048798 - DNA, 15 bp, Homo sapiens
cttcattctgtgagc

SEQ ID NO: 1048799 - DNA, 15 bp, Homo sapiens
ttcattctgtgagca

SEQ ID NO: 1048800 - DNA, 15 bp, Homo sapiens
tcattctgtgagcac

SEQ ID NO: 1048801 - DNA, 15 bp, Homo sapiens
cattctgtgagcact

SEQ ID NO: 1048802 - DNA, 15 bp, Homo sapiens
attctgtgagcactg

SEQ ID NO: 1048803 - DNA, 15 bp, Homo sapiens
ttctgtgagcactga

SEQ ID NO: 1048804 - DNA, 15 bp, Homo sapiens
tctgtgagcactgac

SEQ ID NO: 1048805 - DNA, 15 bp, Homo sapiens
ctgtgagcactgact

SEQ ID NO: 1048806 - DNA, 15 bp, Homo sapiens
tgtgagcactgactg

SEQ ID NO: 1048807 - DNA, 15 bp, Homo sapiens
gtgagcactgactga

SEQ ID NO: 1048808 - DNA, 15 bp, Homo sapiens
tgagcactgactgag

SEQ ID NO: 1048809 - DNA, 15 bp, Homo sapiens
gagcactgactgagc

SEQ ID NO: 1048810 - DNA, 15 bp, Homo sapiens
agcactgactgagca

SEQ ID NO: 1048811 - DNA, 15 bp, Homo sapiens
gcactgactgagcac

SEQ ID NO: 1048812 - DNA, 15 bp, Homo sapiens
cactgactgagcacc

SEQ ID NO: 1048813 - DNA, 15 bp, Homo sapiens
actgactgagcacct

SEQ ID NO: 1048814 - DNA, 15 bp, Homo sapiens
ctgactgagcacctc

SEQ ID NO: 1048815 - DNA, 15 bp, Homo sapiens
tgactgagcacctcc

SEQ ID NO: 1048816 - DNA, 15 bp, Homo sapiens
gactgagcacctcct

SEQ ID NO: 1048817 - DNA, 15 bp, Homo sapiens
actgagcacctcctg

SEQ ID NO: 1048818 - DNA, 15 bp, Homo sapiens
ctgagcacctcctgt

SEQ ID NO: 1048819 - DNA, 15 bp, Homo sapiens
tgagcacctcctgtg

SEQ ID NO: 1048820 - DNA, 15 bp, Homo sapiens
gagcacctcctgtgt

SEQ ID NO: 1048821 - DNA, 15 bp, Homo sapiens
agcacctcctgtgtg

SEQ ID NO: 1048822 - DNA, 15 bp, Homo sapiens
gcacctcctgtgtgc

SEQ ID NO: 1048823 - DNA, 15 bp, Homo sapiens
cacctcctgtgtgct

SEQ ID NO: 1048824 - DNA, 15 bp, Homo sapiens
acctcctgtgtgctg

SEQ ID NO: 1048825 - DNA, 15 bp, Homo sapiens
cctcctgtgtgctgg

SEQ ID NO: 1048826 - DNA, 15 bp, Homo sapiens
ctcctgtgtgctggg

SEQ ID NO: 1048827 - DNA, 15 bp, Homo sapiens
tcctgtgtgctgggg

SEQ ID NO: 1048828 - DNA, 15 bp, Homo sapiens
cctgtgtgctggggg

SEQ ID NO: 1048829 - DNA, 15 bp, Homo sapiens
ctgtgtgctgggggc

SEQ ID NO: 1048830 - DNA, 15 bp, Homo sapiens
tgtgtgctgggggcg

SEQ ID NO: 1048831 - DNA, 15 bp, Homo sapiens
gtgtgctgggggcgc

SEQ ID NO: 1048832 - DNA, 15 bp, Homo sapiens
tgtgctgggggcgca

SEQ ID NO: 1048833 - DNA, 15 bp, Homo sapiens
gtgctgggggcgcag

SEQ ID NO: 1048834 - DNA, 15 bp, Homo sapiens
tgctgggggcgcagg

SEQ ID NO: 1048835 - DNA, 15 bp, Homo sapiens
gctgggggcgcaggc

SEQ ID NO: 1048836 - DNA, 15 bp, Homo sapiens
ctgggggcgcaggca

SEQ ID NO: 1048837 - DNA, 15 bp, Homo sapiens
tgggggcgcaggcag

SEQ ID NO: 1048838 - DNA, 15 bp, Homo sapiens
gggggcgcaggcaga

SEQ ID NO: 1048839 - DNA, 15 bp, Homo sapiens
ggggcgcaggcagac

SEQ ID NO: 1048840 - DNA, 15 bp, Homo sapiens
gggcgcaggcagacc

SEQ ID NO: 1048841 - DNA, 15 bp, Homo sapiens
ggcgcaggcagacca

SEQ ID NO: 1048842 - DNA, 15 bp, Homo sapiens
gcgcaggcagaccaa

SEQ ID NO: 1048843 - DNA, 15 bp, Homo sapiens
cgcaggcagaccaag

SEQ ID NO: 1048844 - DNA, 15 bp, Homo sapiens
gcaggcagaccaagg

SEQ ID NO: 1048845 - DNA, 15 bp, Homo sapiens
caggcagaccaaggc

SEQ ID NO: 1048846 - DNA, 15 bp, Homo sapiens
aggcagaccaaggcc

SEQ ID NO: 1048847 - DNA, 15 bp, Homo sapiens
ggcagaccaaggccc

SEQ ID NO: 1048848 - DNA, 15 bp, Homo sapiens
gcagaccaaggccct

SEQ ID NO: 1048849 - DNA, 15 bp, Homo sapiens
cagaccaaggccctg

SEQ ID NO: 1048850 - DNA, 15 bp, Homo sapiens
agaccaaggccctgc

SEQ ID NO: 1048851 - DNA, 15 bp, Homo sapiens
gaccaaggccctgcc

SEQ ID NO: 1048852 - DNA, 15 bp, Homo sapiens
accaaggccctgcct

SEQ ID NO: 1048853 - DNA, 15 bp, Homo sapiens
ccaaggccctgcctc

SEQ ID NO: 1048854 - DNA, 15 bp, Homo sapiens
caaggccctgcctca

SEQ ID NO: 1048855 - DNA, 15 bp, Homo sapiens
aaggccctgcctcac

SEQ ID NO: 1048856 - DNA, 15 bp, Homo sapiens
aggccctgcctcacc

SEQ ID NO: 1048857 - DNA, 15 bp, Homo sapiens
ggccctgcctcacca

SEQ ID NO: 1048858 - DNA, 15 bp, Homo sapiens
gccctgcctcaccaa

SEQ ID NO: 1048859 - DNA, 15 bp, Homo sapiens
ccctgcctcaccaag

SEQ ID NO: 1048860 - DNA, 15 bp, Homo sapiens
cctgcctcaccaagc

SEQ ID NO: 1048861 - DNA, 15 bp, Homo sapiens
ctgcctcaccaagct

SEQ ID NO: 1048862 - DNA, 15 bp, Homo sapiens
tgcctcaccaagctg

SEQ ID NO: 1048863 - DNA, 15 bp, Homo sapiens
gcctcaccaagctga

SEQ ID NO: 1048864 - DNA, 15 bp, Homo sapiens
cctcaccaagctgat

SEQ ID NO: 1048865 - DNA, 15 bp, Homo sapiens
ctcaccaagctgatg

SEQ ID NO: 1048866 - DNA, 15 bp, Homo sapiens
tcaccaagctgatgt

SEQ ID NO: 1048867 - DNA, 15 bp, Homo sapiens
caccaagctgatgtt

SEQ ID NO: 1048868 - DNA, 15 bp, Homo sapiens
accaagctgatgttc

SEQ ID NO: 1048869 - DNA, 15 bp, Homo sapiens
ccaagctgatgttct

SEQ ID NO: 1048870 - DNA, 15 bp, Homo sapiens
caagctgatgttctg

SEQ ID NO: 1048871 - DNA, 15 bp, Homo sapiens
aagctgatgttctga

SEQ ID NO: 1048872 - DNA, 15 bp, Homo sapiens
agctgatgttctgat

SEQ ID NO: 1048873 - DNA, 15 bp, Homo sapiens
gctgatgttctgatg

SEQ ID NO: 1048874 - DNA, 15 bp, Homo sapiens
ctgatgttctgatgg

SEQ ID NO: 1048875 - DNA, 15 bp, Homo sapiens
tgatgttctgatggg

SEQ ID NO: 1048876 - DNA, 15 bp, Homo sapiens
gatgttctgatgggg

SEQ ID NO: 1048877 - DNA, 15 bp, Homo sapiens
atgttctgatgggga

SEQ ID NO: 1048878 - DNA, 15 bp, Homo sapiens
tgttctgatggggag

SEQ ID NO: 1048879 - DNA, 15 bp, Homo sapiens
gttctgatggggaga

SEQ ID NO: 1048880 - DNA, 15 bp, Homo sapiens
ttctgatggggagag

SEQ ID NO: 1048881 - DNA, 15 bp, Homo sapiens
tctgatggggagaga

SEQ ID NO: 1048882 - DNA, 15 bp, Homo sapiens
ctgatggggagagag

SEQ ID NO: 1048883 - DNA, 15 bp, Homo sapiens
tgatggggagagagt

SEQ ID NO: 1048884 - DNA, 15 bp, Homo sapiens
gatggggagagagta

SEQ ID NO: 1048885 - DNA, 15 bp, Homo sapiens
atggggagagagtaa

SEQ ID NO: 1048886 - DNA, 15 bp, Homo sapiens
tggggagagagtaaa

SEQ ID NO: 1048887 - DNA, 15 bp, Homo sapiens
ggggagagagtaaag

SEQ ID NO: 1048888 - DNA, 15 bp, Homo sapiens
gggagagagtaaaga

SEQ ID NO: 1048889 - DNA, 15 bp, Homo sapiens
ggagagagtaaagaa

SEQ ID NO: 1048890 - DNA, 15 bp, Homo sapiens
gagagagtaaagaag

SEQ ID NO: 1048891 - DNA, 15 bp, Homo sapiens
agagagtaaagaagt

SEQ ID NO: 1048892 - DNA, 15 bp, Homo sapiens
gagagtaaagaagtg

SEQ ID NO: 1048893 - DNA, 15 bp, Homo sapiens
agagtaaagaagtgg

SEQ ID NO: 1048894 - DNA, 15 bp, Homo sapiens
gagtaaagaagtgga

SEQ ID NO: 1048895 - DNA, 15 bp, Homo sapiens
agtaaagaagtggac

SEQ ID NO: 1048896 - DNA, 15 bp, Homo sapiens
gtaaagaagtggaca

SEQ ID NO: 1048897 - DNA, 15 bp, Homo sapiens
taaagaagtggacaa

SEQ ID NO: 1048898 - DNA, 15 bp, Homo sapiens
aaagaagtggacaaa

SEQ ID NO: 1048899 - DNA, 15 bp, Homo sapiens
aagaagtggacaaat

SEQ ID NO: 1048900 - DNA, 15 bp, Homo sapiens
agaagtggacaaata

SEQ ID NO: 1048901 - DNA, 15 bp, Homo sapiens
gaagtggacaaataa

SEQ ID NO: 1048902 - DNA, 15 bp, Homo sapiens
aagtggacaaataag

SEQ ID NO: 1048903 - DNA, 15 bp, Homo sapiens
agtggacaaataagg

SEQ ID NO: 1048904 - DNA, 15 bp, Homo sapiens
gtggacaaataaggg

SEQ ID NO: 1048905 - DNA, 15 bp, Homo sapiens
tggacaaataagggg

SEQ ID NO: 1048906 - DNA, 15 bp, Homo sapiens
ggacaaataagggga

SEQ ID NO: 1048907 - DNA, 15 bp, Homo sapiens
gacaaataaggggaa

SEQ ID NO: 1048908 - DNA, 15 bp, Homo sapiens
acaaataaggggaaa

SEQ ID NO: 1048909 - DNA, 15 bp, Homo sapiens
caaataaggggaaat

SEQ ID NO: 1048910 - DNA, 15 bp, Homo sapiens
aaataaggggaaatc

SEQ ID NO: 1048911 - DNA, 15 bp, Homo sapiens
aataaggggaaatca

SEQ ID NO: 1048912 - DNA, 15 bp, Homo sapiens
ataaggggaaatcag

SEQ ID NO: 1048913 - DNA, 15 bp, Homo sapiens
taaggggaaatcagg

SEQ ID NO: 1048914 - DNA, 15 bp, Homo sapiens
aaggggaaatcaggc

SEQ ID NO: 1048915 - DNA, 15 bp, Homo sapiens
aggggaaatcaggca

SEQ ID NO: 1048916 - DNA, 15 bp, Homo sapiens
ggggaaatcaggcag

SEQ ID NO: 1048917 - DNA, 15 bp, Homo sapiens
gggaaatcaggcagc

SEQ ID NO: 1048918 - DNA, 15 bp, Homo sapiens
ggaaatcaggcagcc

SEQ ID NO: 1048919 - DNA, 15 bp, Homo sapiens
gaaatcaggcagcca

SEQ ID NO: 1048920 - DNA, 15 bp, Homo sapiens
aaatcaggcagccat

SEQ ID NO: 1048921 - DNA, 15 bp, Homo sapiens
aatcaggcagccatc

SEQ ID NO: 1048922 - DNA, 15 bp, Homo sapiens
atcaggcagccatca

SEQ ID NO: 1048923 - DNA, 15 bp, Homo sapiens
tcaggcagccatcag

SEQ ID NO: 1048924 - DNA, 15 bp, Homo sapiens
caggcagccatcagt

SEQ ID NO: 1048925 - DNA, 15 bp, Homo sapiens
aggcagccatcagta

SEQ ID NO: 1048926 - DNA, 15 bp, Homo sapiens
ggcagccatcagtat

SEQ ID NO: 1048927 - DNA, 15 bp, Homo sapiens
gcagccatcagtatt

SEQ ID NO: 1048928 - DNA, 15 bp, Homo sapiens
cagccatcagtattg

SEQ ID NO: 1048929 - DNA, 15 bp, Homo sapiens
agccatcagtattgt

SEQ ID NO: 1048930 - DNA, 15 bp, Homo sapiens
gccatcagtattgtg

SEQ ID NO: 1048931 - DNA, 15 bp, Homo sapiens
ccatcagtattgtgc

SEQ ID NO: 1048932 - DNA, 15 bp, Homo sapiens
catcagtattgtgca

SEQ ID NO: 1048933 - DNA, 15 bp, Homo sapiens
atcagtattgtgcag

SEQ ID NO: 1048934 - DNA, 15 bp, Homo sapiens
tcagtattgtgcaga

SEQ ID NO: 1048935 - DNA, 15 bp, Homo sapiens
cagtattgtgcagac

SEQ ID NO: 1048936 - DNA, 15 bp, Homo sapiens
agtattgtgcagaca

SEQ ID NO: 1048937 - DNA, 15 bp, Homo sapiens
gtattgtgcagacaa

SEQ ID NO: 1048938 - DNA, 15 bp, Homo sapiens
tattgtgcagacaaa

SEQ ID NO: 1048939 - DNA, 15 bp, Homo sapiens
attgtgcagacaaaa

SEQ ID NO: 1048940 - DNA, 15 bp, Homo sapiens
ttgtgcagacaaaac

SEQ ID NO: 1048941 - DNA, 15 bp, Homo sapiens
tgtgcagacaaaaca

SEQ ID NO: 1048942 - DNA, 15 bp, Homo sapiens
gtgcagacaaaacag

SEQ ID NO: 1048943 - DNA, 15 bp, Homo sapiens
tgcagacaaaacagt

SEQ ID NO: 1048944 - DNA, 15 bp, Homo sapiens
gcagacaaaacagtg

SEQ ID NO: 1048945 - DNA, 15 bp, Homo sapiens
cagacaaaacagtgt

SEQ ID NO: 1048946 - DNA, 15 bp, Homo sapiens
agacaaaacagtgtg

SEQ ID NO: 1048947 - DNA, 15 bp, Homo sapiens
gacaaaacagtgtga

SEQ ID NO: 1048948 - DNA, 15 bp, Homo sapiens
acaaaacagtgtgaa

SEQ ID NO: 1048949 - DNA, 15 bp, Homo sapiens
caaaacagtgtgaag

SEQ ID NO: 1048950 - DNA, 15 bp, Homo sapiens
aaaacagtgtgaagc

SEQ ID NO: 1048951 - DNA, 15 bp, Homo sapiens
aaacagtgtgaagcc

SEQ ID NO: 1048952 - DNA, 15 bp, Homo sapiens
aacagtgtgaagccg

SEQ ID NO: 1048953 - DNA, 15 bp, Homo sapiens
acagtgtgaagccgg

SEQ ID NO: 1048954 - DNA, 15 bp, Homo sapiens
cagtgtgaagccgga

SEQ ID NO: 1048955 - DNA, 15 bp, Homo sapiens
agtgtgaagccggag

SEQ ID NO: 1048956 - DNA, 15 bp, Homo sapiens
gtgtgaagccggagt

SEQ ID NO: 1048957 - DNA, 15 bp, Homo sapiens
tgtgaagccggagtg

SEQ ID NO: 1048958 - DNA, 15 bp, Homo sapiens
gtgaagccggagtgc

SEQ ID NO: 1048959 - DNA, 15 bp, Homo sapiens
tgaagccggagtgca

SEQ ID NO: 1048960 - DNA, 15 bp, Homo sapiens
gaagccggagtgcag

SEQ ID NO: 1048961 - DNA, 15 bp, Homo sapiens
aagccggagtgcagg

SEQ ID NO: 1048962 - DNA, 15 bp, Homo sapiens
agccggagtgcagga

SEQ ID NO: 1048963 - DNA, 15 bp, Homo sapiens
gccggagtgcaggag

SEQ ID NO: 1048964 - DNA, 15 bp, Homo sapiens
ccggagtgcaggagg

SEQ ID NO: 1048965 - DNA, 15 bp, Homo sapiens
cggagtgcaggaggg

SEQ ID NO: 1048966 - DNA, 15 bp, Homo sapiens
ggagtgcaggaggga

SEQ ID NO: 1048967 - DNA, 15 bp, Homo sapiens
gagtgcaggagggag

SEQ ID NO: 1048968 - DNA, 15 bp, Homo sapiens
agtgcaggagggagg

SEQ ID NO: 1048969 - DNA, 15 bp, Homo sapiens
gtgcaggagggaggg

SEQ ID NO: 1048970 - DNA, 15 bp, Homo sapiens
tgcaggagggagggt

SEQ ID NO: 1048971 - DNA, 15 bp, Homo sapiens
gcaggagggagggtg

SEQ ID NO: 1048972 - DNA, 15 bp, Homo sapiens
caggagggagggtgg

SEQ ID NO: 1048973 - DNA, 15 bp, Homo sapiens
aggagggagggtggc

SEQ ID NO: 1048974 - DNA, 15 bp, Homo sapiens
ggagggagggtggcc

SEQ ID NO: 1048975 - DNA, 15 bp, Homo sapiens
gagggagggtggcct

SEQ ID NO: 1048976 - DNA, 15 bp, Homo sapiens
agggagggtggcctt

SEQ ID NO: 1048977 - DNA, 15 bp, Homo sapiens
gggagggtggccttg

SEQ ID NO: 1048978 - DNA, 15 bp, Homo sapiens
ggagggtggccttgg

SEQ ID NO: 1048979 - DNA, 15 bp, Homo sapiens
gagggtggccttggg

SEQ ID NO: 1048980 - DNA, 15 bp, Homo sapiens
agggtggccttgggg

SEQ ID NO: 1048981 - DNA, 15 bp, Homo sapiens
gggtggccttggggc

SEQ ID NO: 1048982 - DNA, 15 bp, Homo sapiens
ggtggccttggggct

SEQ ID NO: 1048983 - DNA, 15 bp, Homo sapiens
gtggccttggggctc

SEQ ID NO: 1048984 - DNA, 15 bp, Homo sapiens
tggccttggggctcg

SEQ ID NO: 1048985 - DNA, 15 bp, Homo sapiens
ggccttggggctcgg

SEQ ID NO: 1048986 - DNA, 15 bp, Homo sapiens
gccttggggctcggt

SEQ ID NO: 1048987 - DNA, 15 bp, Homo sapiens
ccttggggctcggtc

SEQ ID NO: 1048988 - DNA, 15 bp, Homo sapiens
cttggggctcggtct

SEQ ID NO: 1048989 - DNA, 15 bp, Homo sapiens
ttggggctcggtctg

SEQ ID NO: 1048990 - DNA, 15 bp, Homo sapiens
tggggctcggtctga

SEQ ID NO: 1048991 - DNA, 15 bp, Homo sapiens
ggggctcggtctgac

SEQ ID NO: 1048992 - DNA, 15 bp, Homo sapiens
gggctcggtctgact

SEQ ID NO: 1048993 - DNA, 15 bp, Homo sapiens
ggctcggtctgactg

SEQ ID NO: 1048994 - DNA, 15 bp, Homo sapiens
gctcggtctgactgg

SEQ ID NO: 1048995 - DNA, 15 bp, Homo sapiens
ctcggtctgactgga

SEQ ID NO: 1048996 - DNA, 15 bp, Homo sapiens
tcggtctgactggag

SEQ ID NO: 1048997 - DNA, 15 bp, Homo sapiens
cggtctgactggagg

SEQ ID NO: 1048998 - DNA, 15 bp, Homo sapiens
ggtctgactggaggg

SEQ ID NO: 1048999 - DNA, 15 bp, Homo sapiens
gtctgactggagggt

SEQ ID NO: 1049000 - DNA, 15 bp, Homo sapiens
tctgactggagggtc

SEQ ID NO: 1049001 - DNA, 15 bp, Homo sapiens
ctgactggagggtcg

SEQ ID NO: 1049002 - DNA, 15 bp, Homo sapiens
tgactggagggtcgg

SEQ ID NO: 1049003 - DNA, 15 bp, Homo sapiens
gactggagggtcggg

SEQ ID NO: 1049004 - DNA, 15 bp, Homo sapiens
actggagggtcggga

SEQ ID NO: 1049005 - DNA, 15 bp, Homo sapiens
ctggagggtcgggag

SEQ ID NO: 1049006 - DNA, 15 bp, Homo sapiens
tggagggtcgggagc

SEQ ID NO: 1049007 - DNA, 15 bp, Homo sapiens
ggagggtcgggagca

SEQ ID NO: 1049008 - DNA, 15 bp, Homo sapiens
gagggtcgggagcac

SEQ ID NO: 1049009 - DNA, 15 bp, Homo sapiens
agggtcgggagcaca

SEQ ID NO: 1049010 - DNA, 15 bp, Homo sapiens
gggtcgggagcacat

SEQ ID NO: 1049011 - DNA, 15 bp, Homo sapiens
ggtcgggagcacatc

SEQ ID NO: 1049012 - DNA, 15 bp, Homo sapiens
gtcgggagcacatct

SEQ ID NO: 1049013 - DNA, 15 bp, Homo sapiens
tcgggagcacatctg

SEQ ID NO: 1049014 - DNA, 15 bp, Homo sapiens
cgggagcacatctgc

SEQ ID NO: 1049015 - DNA, 15 bp, Homo sapiens
gggagcacatctgca

SEQ ID NO: 1049016 - DNA, 15 bp, Homo sapiens
ggagcacatctgcaa

SEQ ID NO: 1049017 - DNA, 15 bp, Homo sapiens
gagcacatctgcaaa

SEQ ID NO: 1049018 - DNA, 15 bp, Homo sapiens
agcacatctgcaaag

SEQ ID NO: 1049019 - DNA, 15 bp, Homo sapiens
gcacatctgcaaagg

SEQ ID NO: 1049020 - DNA, 15 bp, Homo sapiens
cacatctgcaaaggg

SEQ ID NO: 1049021 - DNA, 15 bp, Homo sapiens
acatctgcaaaggga

SEQ ID NO: 1049022 - DNA, 15 bp, Homo sapiens
catctgcaaagggac

SEQ ID NO: 1049023 - DNA, 15 bp, Homo sapiens
atctgcaaagggaca

SEQ ID NO: 1049024 - DNA, 15 bp, Homo sapiens
tctgcaaagggacac

SEQ ID NO: 1049025 - DNA, 15 bp, Homo sapiens
ctgcaaagggacact

SEQ ID NO: 1049026 - DNA, 15 bp, Homo sapiens
tgcaaagggacactc

SEQ ID NO: 1049027 - DNA, 15 bp, Homo sapiens
gcaaagggacactca

SEQ ID NO: 1049028 - DNA, 15 bp, Homo sapiens
caaagggacactcac

SEQ ID NO: 1049029 - DNA, 15 bp, Homo sapiens
aaagggacactcact

SEQ ID NO: 1049030 - DNA, 15 bp, Homo sapiens
aagggacactcactg

SEQ ID NO: 1049031 - DNA, 15 bp, Homo sapiens
agggacactcactgg

SEQ ID NO: 1049032 - DNA, 15 bp, Homo sapiens
gggacactcactgga

SEQ ID NO: 1049033 - DNA, 15 bp, Homo sapiens
ggacactcactggac

SEQ ID NO: 1049034 - DNA, 15 bp, Homo sapiens
gacactcactggacc

SEQ ID NO: 1049035 - DNA, 15 bp, Homo sapiens
acactcactggaccc

SEQ ID NO: 1049036 - DNA, 15 bp, Homo sapiens
cactcactggacccg

SEQ ID NO: 1049037 - DNA, 15 bp, Homo sapiens
actcactggacccgc

SEQ ID NO: 1049038 - DNA, 15 bp, Homo sapiens
ctcactggacccgca

SEQ ID NO: 1049039 - DNA, 15 bp, Homo sapiens
tcactggacccgcat

SEQ ID NO: 1049040 - DNA, 15 bp, Homo sapiens
cactggacccgcatg

SEQ ID NO: 1049041 - DNA, 15 bp, Homo sapiens
actggacccgcatgg

SEQ ID NO: 1049042 - DNA, 15 bp, Homo sapiens
ctggacccgcatggt

SEQ ID NO: 1049043 - DNA, 15 bp, Homo sapiens
tggacccgcatggtg

SEQ ID NO: 1049044 - DNA, 15 bp, Homo sapiens
ggacccgcatggtgg

SEQ ID NO: 1049045 - DNA, 15 bp, Homo sapiens
gacccgcatggtggg

SEQ ID NO: 1049046 - DNA, 15 bp, Homo sapiens
acccgcatggtggga

SEQ ID NO: 1049047 - DNA, 15 bp, Homo sapiens
cccgcatggtgggaa

SEQ ID NO: 1049048 - DNA, 15 bp, Homo sapiens
ccgcatggtgggaag

SEQ ID NO: 1049049 - DNA, 15 bp, Homo sapiens
cgcatggtgggaaga

SEQ ID NO: 1049050 - DNA, 15 bp, Homo sapiens
gcatggtgggaagag

SEQ ID NO: 1049051 - DNA, 15 bp, Homo sapiens
catggtgggaagagg

SEQ ID NO: 1049052 - DNA, 15 bp, Homo sapiens
atggtgggaagaggc

SEQ ID NO: 1049053 - DNA, 15 bp, Homo sapiens
tggtgggaagaggcc

SEQ ID NO: 1049054 - DNA, 15 bp, Homo sapiens
ggtgggaagaggccc

SEQ ID NO: 1049055 - DNA, 15 bp, Homo sapiens
gtgggaagaggccct

SEQ ID NO: 1049056 - DNA, 15 bp, Homo sapiens
tgggaagaggccctg

SEQ ID NO: 1049057 - DNA, 15 bp, Homo sapiens
gggaagaggccctgg

SEQ ID NO: 1049058 - DNA, 15 bp, Homo sapiens
ggaagaggccctggg

SEQ ID NO: 1049059 - DNA, 15 bp, Homo sapiens
gaagaggccctgggg

SEQ ID NO: 1049060 - DNA, 15 bp, Homo sapiens
aagaggccctgggga

SEQ ID NO: 1049061 - DNA, 15 bp, Homo sapiens
agaggccctggggag

SEQ ID NO: 1049062 - DNA, 15 bp, Homo sapiens
gaggccctggggaga

SEQ ID NO: 1049063 - DNA, 15 bp, Homo sapiens
aggccctggggagac

SEQ ID NO: 1049064 - DNA, 15 bp, Homo sapiens
ggccctggggagaca

SEQ ID NO: 1049065 - DNA, 15 bp, Homo sapiens
gccctggggagacag

SEQ ID NO: 1049066 - DNA, 15 bp, Homo sapiens
ccctggggagacaga

SEQ ID NO: 1049067 - DNA, 15 bp, Homo sapiens
cctggggagacagag

SEQ ID NO: 1049068 - DNA, 15 bp, Homo sapiens
ctggggagacagagt

SEQ ID NO: 1049069 - DNA, 15 bp, Homo sapiens
tggggagacagagtc

SEQ ID NO: 1049070 - DNA, 15 bp, Homo sapiens
ggggagacagagtcc

SEQ ID NO: 1049071 - DNA, 15 bp, Homo sapiens
gggagacagagtccc

SEQ ID NO: 1049072 - DNA, 15 bp, Homo sapiens
ggagacagagtcccg

SEQ ID NO: 1049073 - DNA, 15 bp, Homo sapiens
gagacagagtcccgg

SEQ ID NO: 1049074 - DNA, 15 bp, Homo sapiens
agacagagtcccggg

SEQ ID NO: 1049075 - DNA, 15 bp, Homo sapiens
gacagagtcccgggc

SEQ ID NO: 1049076 - DNA, 15 bp, Homo sapiens
acagagtcccgggca

SEQ ID NO: 1049077 - DNA, 15 bp, Homo sapiens
cagagtcccgggcag

SEQ ID NO: 1049078 - DNA, 15 bp, Homo sapiens
agagtcccgggcaga

SEQ ID NO: 1049079 - DNA, 15 bp, Homo sapiens
gagtcccgggcagag

SEQ ID NO: 1049080 - DNA, 15 bp, Homo sapiens
agtcccgggcagagc

SEQ ID NO: 1049081 - DNA, 15 bp, Homo sapiens
gtcccgggcagagca

SEQ ID NO: 1049082 - DNA, 15 bp, Homo sapiens
tcccgggcagagcat

SEQ ID NO: 1049083 - DNA, 15 bp, Homo sapiens
cccgggcagagcatg

SEQ ID NO: 1049084 - DNA, 15 bp, Homo sapiens
ccgggcagagcatgt

SEQ ID NO: 1049085 - DNA, 15 bp, Homo sapiens
cgggcagagcatgtg

SEQ ID NO: 1049086 - DNA, 15 bp, Homo sapiens
gggcagagcatgtgc

SEQ ID NO: 1049087 - DNA, 15 bp, Homo sapiens
ggcagagcatgtgca

SEQ ID NO: 1049088 - DNA, 15 bp, Homo sapiens
gcagagcatgtgcaa

SEQ ID NO: 1049089 - DNA, 15 bp, Homo sapiens
cagagcatgtgcaaa

SEQ ID NO: 1049090 - DNA, 15 bp, Homo sapiens
agagcatgtgcaaag

SEQ ID NO: 1049091 - DNA, 15 bp, Homo sapiens
gagcatgtgcaaagg

SEQ ID NO: 1049092 - DNA, 15 bp, Homo sapiens
agcatgtgcaaaggt

SEQ ID NO: 1049093 - DNA, 15 bp, Homo sapiens
gcatgtgcaaaggtc

SEQ ID NO: 1049094 - DNA, 15 bp, Homo sapiens
catgtgcaaaggtct

SEQ ID NO: 1049095 - DNA, 15 bp, Homo sapiens
atgtgcaaaggtctg

SEQ ID NO: 1049096 - DNA, 15 bp, Homo sapiens
tgtgcaaaggtctga

SEQ ID NO: 1049097 - DNA, 15 bp, Homo sapiens
gtgcaaaggtctgaa

SEQ ID NO: 1049098 - DNA, 15 bp, Homo sapiens
tgcaaaggtctgaag

SEQ ID NO: 1049099 - DNA, 15 bp, Homo sapiens
gcaaaggtctgaagg

SEQ ID NO: 1049100 - DNA, 15 bp, Homo sapiens
caaaggtctgaaggc

SEQ ID NO: 1049101 - DNA, 15 bp, Homo sapiens
aaaggtctgaaggct

SEQ ID NO: 1049102 - DNA, 15 bp, Homo sapiens
aaggtctgaaggctg

SEQ ID NO: 1049103 - DNA, 15 bp, Homo sapiens
aggtctgaaggctgg

SEQ ID NO: 1049104 - DNA, 15 bp, Homo sapiens
ggtctgaaggctggg

SEQ ID NO: 1049105 - DNA, 15 bp, Homo sapiens
gtctgaaggctggga

SEQ ID NO: 1049106 - DNA, 15 bp, Homo sapiens
tctgaaggctgggac

SEQ ID NO: 1049107 - DNA, 15 bp, Homo sapiens
ctgaaggctgggaca

SEQ ID NO: 1049108 - DNA, 15 bp, Homo sapiens
tgaaggctgggacag

SEQ ID NO: 1049109 - DNA, 15 bp, Homo sapiens
gaaggctgggacaga

SEQ ID NO: 1049110 - DNA, 15 bp, Homo sapiens
aaggctgggacagag

SEQ ID NO: 1049111 - DNA, 15 bp, Homo sapiens
aggctgggacagagg

SEQ ID NO: 1049112 - DNA, 15 bp, Homo sapiens
ggctgggacagaggc

SEQ ID NO: 1049113 - DNA, 15 bp, Homo sapiens
gctgggacagaggcc

SEQ ID NO: 1049114 - DNA, 15 bp, Homo sapiens
ctgggacagaggcct

SEQ ID NO: 1049115 - DNA, 15 bp, Homo sapiens
tgggacagaggcctg

SEQ ID NO: 1049116 - DNA, 15 bp, Homo sapiens
gggacagaggcctgt

SEQ ID NO: 1049117 - DNA, 15 bp, Homo sapiens
ggacagaggcctgtg

SEQ ID NO: 1049118 - DNA, 15 bp, Homo sapiens
gacagaggcctgtgc

SEQ ID NO: 1049119 - DNA, 15 bp, Homo sapiens
acagaggcctgtgcg

SEQ ID NO: 1049120 - DNA, 15 bp, Homo sapiens
cagaggcctgtgcgg

SEQ ID NO: 1049121 - DNA, 15 bp, Homo sapiens
agaggcctgtgcggc

SEQ ID NO: 1049122 - DNA, 15 bp, Homo sapiens
gaggcctgtgcggct

SEQ ID NO: 1049123 - DNA, 15 bp, Homo sapiens
aggcctgtgcggctg

SEQ ID NO: 1049124 - DNA, 15 bp, Homo sapiens
ggcctgtgcggctgg

SEQ ID NO: 1049125 - DNA, 15 bp, Homo sapiens
gcctgtgcggctggg

SEQ ID NO: 1049126 - DNA, 15 bp, Homo sapiens
cctgtgcggctgggg

SEQ ID NO: 1049127 - DNA, 15 bp, Homo sapiens
ctgtgcggctggggt

SEQ ID NO: 1049128 - DNA, 15 bp, Homo sapiens
tgtgcggctggggtt

SEQ ID NO: 1049129 - DNA, 15 bp, Homo sapiens
gtgcggctggggtta

SEQ ID NO: 1049130 - DNA, 15 bp, Homo sapiens
tgcggctggggttac

SEQ ID NO: 1049131 - DNA, 15 bp, Homo sapiens
gcggctggggttacg

SEQ ID NO: 1049132 - DNA, 15 bp, Homo sapiens
cggctggggttacga

SEQ ID NO: 1049133 - DNA, 15 bp, Homo sapiens
ggctggggttacgag

SEQ ID NO: 1049134 - DNA, 15 bp, Homo sapiens
gctggggttacgagg

SEQ ID NO: 1049135 - DNA, 15 bp, Homo sapiens
ctggggttacgaggg

SEQ ID NO: 1049136 - DNA, 15 bp, Homo sapiens
tggggttacgaggga

SEQ ID NO: 1049137 - DNA, 15 bp, Homo sapiens
ggggttacgagggag

SEQ ID NO: 1049138 - DNA, 15 bp, Homo sapiens
gggttacgagggagg

SEQ ID NO: 1049139 - DNA, 15 bp, Homo sapiens
ggttacgagggaggg

SEQ ID NO: 1049140 - DNA, 15 bp, Homo sapiens
gttacgagggaggga

SEQ ID NO: 1049141 - DNA, 15 bp, Homo sapiens
ttacgagggagggag

SEQ ID NO: 1049142 - DNA, 15 bp, Homo sapiens
tacgagggagggaga

SEQ ID NO: 1049143 - DNA, 15 bp, Homo sapiens
acgagggagggagac

SEQ ID NO: 1049144 - DNA, 15 bp, Homo sapiens
cgagggagggagaca

SEQ ID NO: 1049145 - DNA, 15 bp, Homo sapiens
gagggagggagacag

SEQ ID NO: 1049146 - DNA, 15 bp, Homo sapiens
agggagggagacagt

SEQ ID NO: 1049147 - DNA, 15 bp, Homo sapiens
gggagggagacagtg

SEQ ID NO: 1049148 - DNA, 15 bp, Homo sapiens
ggagggagacagtgg

SEQ ID NO: 1049149 - DNA, 15 bp, Homo sapiens
gagggagacagtgga

SEQ ID NO: 1049150 - DNA, 15 bp, Homo sapiens
agggagacagtggag

SEQ ID NO: 1049151 - DNA, 15 bp, Homo sapiens
gggagacagtggaga

SEQ ID NO: 1049152 - DNA, 15 bp, Homo sapiens
ggagacagtggagag

SEQ ID NO: 1049153 - DNA, 15 bp, Homo sapiens
gagacagtggagaga

SEQ ID NO: 1049154 - DNA, 15 bp, Homo sapiens
agacagtggagagac

SEQ ID NO: 1049155 - DNA, 15 bp, Homo sapiens
gacagtggagagacg

SEQ ID NO: 1049156 - DNA, 15 bp, Homo sapiens
acagtggagagacga

SEQ ID NO: 1049157 - DNA, 15 bp, Homo sapiens
cagtggagagacgag

SEQ ID NO: 1049158 - DNA, 15 bp, Homo sapiens
agtggagagacgagg

SEQ ID NO: 1049159 - DNA, 15 bp, Homo sapiens
gtggagagacgaggc

SEQ ID NO: 1049160 - DNA, 15 bp, Homo sapiens
tggagagacgaggcc

SEQ ID NO: 1049161 - DNA, 15 bp, Homo sapiens
ggagagacgaggcct

SEQ ID NO: 1049162 - DNA, 15 bp, Homo sapiens
gagagacgaggcctg

SEQ ID NO: 1049163 - DNA, 15 bp, Homo sapiens
agagacgaggcctga

SEQ ID NO: 1049164 - DNA, 15 bp, Homo sapiens
gagacgaggcctgag

SEQ ID NO: 1049165 - DNA, 15 bp, Homo sapiens
agacgaggcctgagc

SEQ ID NO: 1049166 - DNA, 15 bp, Homo sapiens
gacgaggcctgagcc

SEQ ID NO: 1049167 - DNA, 15 bp, Homo sapiens
acgaggcctgagcct

SEQ ID NO: 1049168 - DNA, 15 bp, Homo sapiens
cgaggcctgagcctt

SEQ ID NO: 1049169 - DNA, 15 bp, Homo sapiens
gaggcctgagccttg

SEQ ID NO: 1049170 - DNA, 15 bp, Homo sapiens
aggcctgagccttgc

SEQ ID NO: 1049171 - DNA, 15 bp, Homo sapiens
ggcctgagccttgct

SEQ ID NO: 1049172 - DNA, 15 bp, Homo sapiens
gcctgagccttgctg

SEQ ID NO: 1049173 - DNA, 15 bp, Homo sapiens
cctgagccttgctga

SEQ ID NO: 1049174 - DNA, 15 bp, Homo sapiens
ctgagccttgctgag

SEQ ID NO: 1049175 - DNA, 15 bp, Homo sapiens
tgagccttgctgagg

SEQ ID NO: 1049176 - DNA, 15 bp, Homo sapiens
gagccttgctgaggg

SEQ ID NO: 1049177 - DNA, 15 bp, Homo sapiens
agccttgctgagggc

SEQ ID NO: 1049178 - DNA, 15 bp, Homo sapiens
gccttgctgagggcc

SEQ ID NO: 1049179 - DNA, 15 bp, Homo sapiens
ccttgctgagggcct

SEQ ID NO: 1049180 - DNA, 15 bp, Homo sapiens
cttgctgagggcctc

SEQ ID NO: 1049181 - DNA, 15 bp, Homo sapiens
ttgctgagggcctca

SEQ ID NO: 1049182 - DNA, 15 bp, Homo sapiens
tgctgagggcctcag

SEQ ID NO: 1049183 - DNA, 15 bp, Homo sapiens
gctgagggcctcaga

SEQ ID NO: 1049184 - DNA, 15 bp, Homo sapiens
ctgagggcctcagag

SEQ ID NO: 1049185 - DNA, 15 bp, Homo sapiens
tgagggcctcagagg

SEQ ID NO: 1049186 - DNA, 15 bp, Homo sapiens
gagggcctcagaggt

SEQ ID NO: 1049187 - DNA, 15 bp, Homo sapiens
agggcctcagaggtc

SEQ ID NO: 1049188 - DNA, 15 bp, Homo sapiens
gggcctcagaggtca

SEQ ID NO: 1049189 - DNA, 15 bp, Homo sapiens
ggcctcagaggtcac

SEQ ID NO: 1049190 - DNA, 15 bp, Homo sapiens
gcctcagaggtcacg

SEQ ID NO: 1049191 - DNA, 15 bp, Homo sapiens
cctcagaggtcacgt

SEQ ID NO: 1049192 - DNA, 15 bp, Homo sapiens
ctcagaggtcacgtt

SEQ ID NO: 1049193 - DNA, 15 bp, Homo sapiens
tcagaggtcacgtta

SEQ ID NO: 1049194 - DNA, 15 bp, Homo sapiens
cagaggtcacgttag

SEQ ID NO: 1049195 - DNA, 15 bp, Homo sapiens
agaggtcacgttagg

SEQ ID NO: 1049196 - DNA, 15 bp, Homo sapiens
gaggtcacgttagga

SEQ ID NO: 1049197 - DNA, 15 bp, Homo sapiens
aggtcacgttaggag

SEQ ID NO: 1049198 - DNA, 15 bp, Homo sapiens
ggtcacgttaggagc

SEQ ID NO: 1049199 - DNA, 15 bp, Homo sapiens
gtcacgttaggagcc

SEQ ID NO: 1049200 - DNA, 15 bp, Homo sapiens
tcacgttaggagcct

SEQ ID NO: 1049201 - DNA, 15 bp, Homo sapiens
cacgttaggagcctg

SEQ ID NO: 1049202 - DNA, 15 bp, Homo sapiens
acgttaggagcctga

SEQ ID NO: 1049203 - DNA, 15 bp, Homo sapiens
cgttaggagcctgat

SEQ ID NO: 1049204 - DNA, 15 bp, Homo sapiens
gttaggagcctgatt

SEQ ID NO: 1049205 - DNA, 15 bp, Homo sapiens
ttaggagcctgattt

SEQ ID NO: 1049206 - DNA, 15 bp, Homo sapiens
taggagcctgatttt

SEQ ID NO: 1049207 - DNA, 15 bp, Homo sapiens
aggagcctgatttta

SEQ ID NO: 1049208 - DNA, 15 bp, Homo sapiens
ggagcctgattttaa

SEQ ID NO: 1049209 - DNA, 15 bp, Homo sapiens
gagcctgattttaac

SEQ ID NO: 1049210 - DNA, 15 bp, Homo sapiens
agcctgattttaacc

SEQ ID NO: 1049211 - DNA, 15 bp, Homo sapiens
gcctgattttaacct

SEQ ID NO: 1049212 - DNA, 15 bp, Homo sapiens
cctgattttaacctg

SEQ ID NO: 1049213 - DNA, 15 bp, Homo sapiens
ctgattttaacctgc

SEQ ID NO: 1049214 - DNA, 15 bp, Homo sapiens
tgattttaacctgca

SEQ ID NO: 1049215 - DNA, 15 bp, Homo sapiens
gattttaacctgcat

SEQ ID NO: 1049216 - DNA, 15 bp, Homo sapiens
attttaacctgcatg

SEQ ID NO: 1049217 - DNA, 15 bp, Homo sapiens
ttttaacctgcatgc

SEQ ID NO: 1049218 - DNA, 15 bp, Homo sapiens
tttaacctgcatgca

SEQ ID NO: 1049219 - DNA, 15 bp, Homo sapiens
ttaacctgcatgcaa

SEQ ID NO: 1049220 - DNA, 15 bp, Homo sapiens
taacctgcatgcaaa

SEQ ID NO: 1049221 - DNA, 15 bp, Homo sapiens
aacctgcatgcaaag

SEQ ID NO: 1049222 - DNA, 15 bp, Homo sapiens
acctgcatgcaaagt

SEQ ID NO: 1049223 - DNA, 15 bp, Homo sapiens
cctgcatgcaaagtg

SEQ ID NO: 1049224 - DNA, 15 bp, Homo sapiens
ctgcatgcaaagtgg

SEQ ID NO: 1049225 - DNA, 15 bp, Homo sapiens
tgcatgcaaagtggg

SEQ ID NO: 1049226 - DNA, 15 bp, Homo sapiens
gcatgcaaagtgggg

SEQ ID NO: 1049227 - DNA, 15 bp, Homo sapiens
catgcaaagtggggt

SEQ ID NO: 1049228 - DNA, 15 bp, Homo sapiens
atgcaaagtggggtt

SEQ ID NO: 1049229 - DNA, 15 bp, Homo sapiens
tgcaaagtggggttg

SEQ ID NO: 1049230 - DNA, 15 bp, Homo sapiens
gcaaagtggggttgt

SEQ ID NO: 1049231 - DNA, 15 bp, Homo sapiens
caaagtggggttgtg

SEQ ID NO: 1049232 - DNA, 15 bp, Homo sapiens
aaagtggggttgtgg

SEQ ID NO: 1049233 - DNA, 15 bp, Homo sapiens
aagtggggttgtggt

SEQ ID NO: 1049234 - DNA, 15 bp, Homo sapiens
agtggggttgtggtc

SEQ ID NO: 1049235 - DNA, 15 bp, Homo sapiens
gtggggttgtggtcc

SEQ ID NO: 1049236 - DNA, 15 bp, Homo sapiens
tggggttgtggtcca

SEQ ID NO: 1049237 - DNA, 15 bp, Homo sapiens
ggggttgtggtccag

SEQ ID NO: 1049238 - DNA, 15 bp, Homo sapiens
gggttgtggtccaga

SEQ ID NO: 1049239 - DNA, 15 bp, Homo sapiens
ggttgtggtccagag

SEQ ID NO: 1049240 - DNA, 15 bp, Homo sapiens
gttgtggtccagagc

SEQ ID NO: 1049241 - DNA, 15 bp, Homo sapiens
ttgtggtccagagca

SEQ ID NO: 1049242 - DNA, 15 bp, Homo sapiens
tgtggtccagagcat

SEQ ID NO: 1049243 - DNA, 15 bp, Homo sapiens
gtggtccagagcatg

SEQ ID NO: 1049244 - DNA, 15 bp, Homo sapiens
tggtccagagcatgg

SEQ ID NO: 1049245 - DNA, 15 bp, Homo sapiens
ggtccagagcatggc

SEQ ID NO: 1049246 - DNA, 15 bp, Homo sapiens
gtccagagcatggca

SEQ ID NO: 1049247 - DNA, 15 bp, Homo sapiens
tccagagcatggcac

SEQ ID NO: 1049248 - DNA, 15 bp, Homo sapiens
ccagagcatggcacg

SEQ ID NO: 1049249 - DNA, 15 bp, Homo sapiens
cagagcatggcacga

SEQ ID NO: 1049250 - DNA, 15 bp, Homo sapiens
agagcatggcacgat

SEQ ID NO: 1049251 - DNA, 15 bp, Homo sapiens
gagcatggcacgatc

SEQ ID NO: 1049252 - DNA, 15 bp, Homo sapiens
agcatggcacgatct

SEQ ID NO: 1049253 - DNA, 15 bp, Homo sapiens
gcatggcacgatctg

SEQ ID NO: 1049254 - DNA, 15 bp, Homo sapiens
catggcacgatctga

SEQ ID NO: 1049255 - DNA, 15 bp, Homo sapiens
atggcacgatctgat

SEQ ID NO: 1049256 - DNA, 15 bp, Homo sapiens
tggcacgatctgatt

SEQ ID NO: 1049257 - DNA, 15 bp, Homo sapiens
ggcacgatctgattt

SEQ ID NO: 1049258 - DNA, 15 bp, Homo sapiens
gcacgatctgatttc

SEQ ID NO: 1049259 - DNA, 15 bp, Homo sapiens
cacgatctgatttct

SEQ ID NO: 1049260 - DNA, 15 bp, Homo sapiens
acgatctgatttcta

SEQ ID NO: 1049261 - DNA, 15 bp, Homo sapiens
cgatctgatttctac

SEQ ID NO: 1049262 - DNA, 15 bp, Homo sapiens
gatctgatttctact

SEQ ID NO: 1049263 - DNA, 15 bp, Homo sapiens
atctgatttctactt

SEQ ID NO: 1049264 - DNA, 15 bp, Homo sapiens
tctgatttctacttt

SEQ ID NO: 1049265 - DNA, 15 bp, Homo sapiens
ctgatttctactttt

SEQ ID NO: 1049266 - DNA, 15 bp, Homo sapiens
tgatttctacttttt

SEQ ID NO: 1049267 - DNA, 15 bp, Homo sapiens
gatttctactttttt

SEQ ID NO: 1049268 - DNA, 15 bp, Homo sapiens
atttctacttttttt

SEQ ID NO: 1049269 - DNA, 15 bp, Homo sapiens
tttctactttttttt

SEQ ID NO: 1049270 - DNA, 15 bp, Homo sapiens
ttctacttttttttt

SEQ ID NO: 1049271 - DNA, 15 bp, Homo sapiens
tctactttttttttt

SEQ ID NO: 1049272 - DNA, 15 bp, Homo sapiens
ctacttttttttttg

SEQ ID NO: 1049273 - DNA, 15 bp, Homo sapiens
tacttttttttttga

SEQ ID NO: 1049274 - DNA, 15 bp, Homo sapiens
acttttttttttgag

SEQ ID NO: 1049275 - DNA, 15 bp, Homo sapiens
cttttttttttgaga

SEQ ID NO: 1049276 - DNA, 15 bp, Homo sapiens
ttgagacggagtctc

SEQ ID NO: 1049277 - DNA, 15 bp, Homo sapiens
tgagacggagtctct

SEQ ID NO: 1049278 - DNA, 15 bp, Homo sapiens
gagacggagtctctc

SEQ ID NO: 1049279 - DNA, 15 bp, Homo sapiens
agacggagtctctct

SEQ ID NO: 1049280 - DNA, 15 bp, Homo sapiens
gacggagtctctctt

SEQ ID NO: 1049281 - DNA, 15 bp, Homo sapiens
acggagtctctcttt

SEQ ID NO: 1049282 - DNA, 15 bp, Homo sapiens
cggagtctctctttc

SEQ ID NO: 1049283 - DNA, 15 bp, Homo sapiens
ggagtctctctttca

SEQ ID NO: 1049284 - DNA, 15 bp, Homo sapiens
gagtctctctttcac

SEQ ID NO: 1049285 - DNA, 15 bp, Homo sapiens
agtctctctttcacc

SEQ ID NO: 1049286 - DNA, 15 bp, Homo sapiens
gtctctctttcaccc

SEQ ID NO: 1049287 - DNA, 15 bp, Homo sapiens
tctctctttcaccca

SEQ ID NO: 1049288 - DNA, 15 bp, Homo sapiens
ctctctttcacccag

SEQ ID NO: 1049289 - DNA, 15 bp, Homo sapiens
tctctttcacccagg

SEQ ID NO: 1049290 - DNA, 15 bp, Homo sapiens
ctctttcacccaggt

SEQ ID NO: 1049291 - DNA, 15 bp, Homo sapiens
tctttcacccaggtt

SEQ ID NO: 1049292 - DNA, 15 bp, Homo sapiens
ctttcacccaggttg

SEQ ID NO: 1049293 - DNA, 15 bp, Homo sapiens
tttcacccaggttgg

SEQ ID NO: 1049294 - DNA, 15 bp, Homo sapiens
ttcacccaggttgga

SEQ ID NO: 1049295 - DNA, 15 bp, Homo sapiens
ccaggttggagtgcg

SEQ ID NO: 1049296 - DNA, 15 bp, Homo sapiens
caggttggagtgcgg

SEQ ID NO: 1049297 - DNA, 15 bp, Homo sapiens
aggttggagtgcggt

SEQ ID NO: 1049298 - DNA, 15 bp, Homo sapiens
ggttggagtgcggtg

SEQ ID NO: 1049299 - DNA, 15 bp, Homo sapiens
gttggagtgcggtgg

SEQ ID NO: 1049300 - DNA, 15 bp, Homo sapiens
ttggagtgcggtggc

SEQ ID NO: 1049301 - DNA, 15 bp, Homo sapiens
tggagtgcggtggcg

SEQ ID NO: 1049302 - DNA, 15 bp, Homo sapiens
ggagtgcggtggcgc

SEQ ID NO: 1049303 - DNA, 15 bp, Homo sapiens
gagtgcggtggcgcg

SEQ ID NO: 1049304 - DNA, 15 bp, Homo sapiens
agtgcggtggcgcga

SEQ ID NO: 1049305 - DNA, 15 bp, Homo sapiens
gtgcggtggcgcgat

SEQ ID NO: 1049306 - DNA, 15 bp, Homo sapiens
tgcggtggcgcgatc

SEQ ID NO: 1049307 - DNA, 15 bp, Homo sapiens
gcggtggcgcgatct

SEQ ID NO: 1049308 - DNA, 15 bp, Homo sapiens
cggtggcgcgatctc

SEQ ID NO: 1049309 - DNA, 15 bp, Homo sapiens
ggtggcgcgatctcg

SEQ ID NO: 1049310 - DNA, 15 bp, Homo sapiens
gtggcgcgatctcgg

SEQ ID NO: 1049311 - DNA, 15 bp, Homo sapiens
tggcgcgatctcggc

SEQ ID NO: 1049312 - DNA, 15 bp, Homo sapiens
cgcgatctcggctca

SEQ ID NO: 1049313 - DNA, 15 bp, Homo sapiens
cggctcactgcaacg

SEQ ID NO: 1049314 - DNA, 15 bp, Homo sapiens
ggctcactgcaacgt

SEQ ID NO: 1049315 - DNA, 15 bp, Homo sapiens
gctcactgcaacgtc

SEQ ID NO: 1049316 - DNA, 15 bp, Homo sapiens
ctcactgcaacgtcc

SEQ ID NO: 1049317 - DNA, 15 bp, Homo sapiens
tcactgcaacgtccg

SEQ ID NO: 1049318 - DNA, 15 bp, Homo sapiens
cactgcaacgtccgc

SEQ ID NO: 1049319 - DNA, 15 bp, Homo sapiens
actgcaacgtccgcc

SEQ ID NO: 1049320 - DNA, 15 bp, Homo sapiens
ctgcaacgtccgccc

SEQ ID NO: 1049321 - DNA, 15 bp, Homo sapiens
tgcaacgtccgcccc

SEQ ID NO: 1049322 - DNA, 15 bp, Homo sapiens
gcaacgtccgccccc

SEQ ID NO: 1049323 - DNA, 15 bp, Homo sapiens
caacgtccgcccccc

SEQ ID NO: 1049324 - DNA, 15 bp, Homo sapiens
aacgtccgcccccca

SEQ ID NO: 1049325 - DNA, 15 bp, Homo sapiens
acgtccgccccccag

SEQ ID NO: 1049326 - DNA, 15 bp, Homo sapiens
cgtccgccccccagg

SEQ ID NO: 1049327 - DNA, 15 bp, Homo sapiens
gtccgccccccaggt

SEQ ID NO: 1049328 - DNA, 15 bp, Homo sapiens
tccgccccccaggtt

SEQ ID NO: 1049329 - DNA, 15 bp, Homo sapiens
ccgccccccaggttc

SEQ ID NO: 1049330 - DNA, 15 bp, Homo sapiens
cgccccccaggttca

SEQ ID NO: 1049331 - DNA, 15 bp, Homo sapiens
gccccccaggttcaa

SEQ ID NO: 1049332 - DNA, 15 bp, Homo sapiens
ccccccaggttcaag

SEQ ID NO: 1049333 - DNA, 15 bp, Homo sapiens
cccccaggttcaagc

SEQ ID NO: 1049334 - DNA, 15 bp, Homo sapiens
ccccaggttcaagcg

SEQ ID NO: 1049335 - DNA, 15 bp, Homo sapiens
ccgagtagctgggat

SEQ ID NO: 1049336 - DNA, 15 bp, Homo sapiens
cgagtagctgggatt

SEQ ID NO: 1049337 - DNA, 15 bp, Homo sapiens
gggattacaggcatc

SEQ ID NO: 1049338 - DNA, 15 bp, Homo sapiens
ggattacaggcatct

SEQ ID NO: 1049339 - DNA, 15 bp, Homo sapiens
gattacaggcatctg

SEQ ID NO: 1049340 - DNA, 15 bp, Homo sapiens
attacaggcatctgc

SEQ ID NO: 1049341 - DNA, 15 bp, Homo sapiens
ttacaggcatctgcc

SEQ ID NO: 1049342 - DNA, 15 bp, Homo sapiens
ggcatctgccaccat

SEQ ID NO: 1049343 - DNA, 15 bp, Homo sapiens
gcatctgccaccatg

SEQ ID NO: 1049344 - DNA, 15 bp, Homo sapiens
catctgccaccatgc

SEQ ID NO: 1049345 - DNA, 15 bp, Homo sapiens
atctgccaccatgcc

SEQ ID NO: 1049346 - DNA, 15 bp, Homo sapiens
tctgccaccatgccc

SEQ ID NO: 1049347 - DNA, 15 bp, Homo sapiens
ttttagtagagacgt

SEQ ID NO: 1049348 - DNA, 15 bp, Homo sapiens
tttagtagagacgtg

SEQ ID NO: 1049349 - DNA, 15 bp, Homo sapiens
ttagtagagacgtgg

SEQ ID NO: 1049350 - DNA, 15 bp, Homo sapiens
tagtagagacgtggt

SEQ ID NO: 1049351 - DNA, 15 bp, Homo sapiens
agtagagacgtggtt

SEQ ID NO: 1049352 - DNA, 15 bp, Homo sapiens
gtagagacgtggttt

SEQ ID NO: 1049353 - DNA, 15 bp, Homo sapiens
tagagacgtggtttc

SEQ ID NO: 1049354 - DNA, 15 bp, Homo sapiens
agagacgtggtttcg

SEQ ID NO: 1049355 - DNA, 15 bp, Homo sapiens
gagacgtggtttcgc

SEQ ID NO: 1049356 - DNA, 15 bp, Homo sapiens
agacgtggtttcgcc

SEQ ID NO: 1049357 - DNA, 15 bp, Homo sapiens
gacgtggtttcgcca

SEQ ID NO: 1049358 - DNA, 15 bp, Homo sapiens
acgtggtttcgccat

SEQ ID NO: 1049359 - DNA, 15 bp, Homo sapiens
cgtggtttcgccatg

SEQ ID NO: 1049360 - DNA, 15 bp, Homo sapiens
gtggtttcgccatgt

SEQ ID NO: 1049361 - DNA, 15 bp, Homo sapiens
tggtttcgccatgtt

SEQ ID NO: 1049362 - DNA, 15 bp, Homo sapiens
tttcgccatgttggg

SEQ ID NO: 1049363 - DNA, 15 bp, Homo sapiens
ttcgccatgttgggc

SEQ ID NO: 1049364 - DNA, 15 bp, Homo sapiens
tcgccatgttgggca

SEQ ID NO: 1049365 - DNA, 15 bp, Homo sapiens
cgccatgttgggcag

SEQ ID NO: 1049366 - DNA, 15 bp, Homo sapiens
gccatgttgggcagg

SEQ ID NO: 1049367 - DNA, 15 bp, Homo sapiens
ccatgttgggcagga

SEQ ID NO: 1049368 - DNA, 15 bp, Homo sapiens
catgttgggcaggat

SEQ ID NO: 1049369 - DNA, 15 bp, Homo sapiens
atgttgggcaggatg

SEQ ID NO: 1049370 - DNA, 15 bp, Homo sapiens
tgttgggcaggatgg

SEQ ID NO: 1049371 - DNA, 15 bp, Homo sapiens
gttgggcaggatggt

SEQ ID NO: 1049372 - DNA, 15 bp, Homo sapiens
ttgggcaggatggtc

SEQ ID NO: 1049373 - DNA, 15 bp, Homo sapiens
tgggcaggatggtct

SEQ ID NO: 1049374 - DNA, 15 bp, Homo sapiens
gggcaggatggtctt

SEQ ID NO: 1049375 - DNA, 15 bp, Homo sapiens
ggcaggatggtcttg

SEQ ID NO: 1049376 - DNA, 15 bp, Homo sapiens
gcaggatggtcttga

SEQ ID NO: 1049377 - DNA, 15 bp, Homo sapiens
caggatggtcttgaa

SEQ ID NO: 1049378 - DNA, 15 bp, Homo sapiens
aggatggtcttgaac

SEQ ID NO: 1049379 - DNA, 15 bp, Homo sapiens
ggatggtcttgaact

SEQ ID NO: 1049380 - DNA, 15 bp, Homo sapiens
gatggtcttgaactc

SEQ ID NO: 1049381 - DNA, 15 bp, Homo sapiens
atggtcttgaactcc

SEQ ID NO: 1049382 - DNA, 15 bp, Homo sapiens
cttgaactcctgaca

SEQ ID NO: 1049383 - DNA, 15 bp, Homo sapiens
ttgaactcctgacat

SEQ ID NO: 1049384 - DNA, 15 bp, Homo sapiens
tgaactcctgacatc

SEQ ID NO: 1049385 - DNA, 15 bp, Homo sapiens
gaactcctgacatca

SEQ ID NO: 1049386 - DNA, 15 bp, Homo sapiens
aactcctgacatcag

SEQ ID NO: 1049387 - DNA, 15 bp, Homo sapiens
actcctgacatcagg

SEQ ID NO: 1049388 - DNA, 15 bp, Homo sapiens
ctcctgacatcaggt

SEQ ID NO: 1049389 - DNA, 15 bp, Homo sapiens
tcctgacatcaggtg

SEQ ID NO: 1049390 - DNA, 15 bp, Homo sapiens
cctgacatcaggtga

SEQ ID NO: 1049391 - DNA, 15 bp, Homo sapiens
ctgacatcaggtgat

SEQ ID NO: 1049392 - DNA, 15 bp, Homo sapiens
tgacatcaggtgatc

SEQ ID NO: 1049393 - DNA, 15 bp, Homo sapiens
gacatcaggtgatct

SEQ ID NO: 1049394 - DNA, 15 bp, Homo sapiens
acatcaggtgatctg

SEQ ID NO: 1049395 - DNA, 15 bp, Homo sapiens
catcaggtgatctgc

SEQ ID NO: 1049396 - DNA, 15 bp, Homo sapiens
atcaggtgatctgcc

SEQ ID NO: 1049397 - DNA, 15 bp, Homo sapiens
tcaggtgatctgccc

SEQ ID NO: 1049398 - DNA, 15 bp, Homo sapiens
caggtgatctgccca

SEQ ID NO: 1049399 - DNA, 15 bp, Homo sapiens
aggtgatctgcccac

SEQ ID NO: 1049400 - DNA, 15 bp, Homo sapiens
ggtgatctgcccacc

SEQ ID NO: 1049401 - DNA, 15 bp, Homo sapiens
gtgatctgcccacct

SEQ ID NO: 1049402 - DNA, 15 bp, Homo sapiens
tgatctgcccacctc

SEQ ID NO: 1049403 - DNA, 15 bp, Homo sapiens
gatctgcccacctca

SEQ ID NO: 1049404 - DNA, 15 bp, Homo sapiens
atctgcccacctcag

SEQ ID NO: 1049405 - DNA, 15 bp, Homo sapiens
tctgcccacctcagc

SEQ ID NO: 1049406 - DNA, 15 bp, Homo sapiens
ctgcccacctcagcc

SEQ ID NO: 1049407 - DNA, 15 bp, Homo sapiens
tgcccacctcagcct

SEQ ID NO: 1049408 - DNA, 15 bp, Homo sapiens
gcccacctcagcctc

SEQ ID NO: 1049409 - DNA, 15 bp, Homo sapiens
cccaaagtgctgggt

SEQ ID NO: 1049410 - DNA, 15 bp, Homo sapiens
ccaaagtgctgggtt

SEQ ID NO: 1049411 - DNA, 15 bp, Homo sapiens
caaagtgctgggttt

SEQ ID NO: 1049412 - DNA, 15 bp, Homo sapiens
aaagtgctgggttta

SEQ ID NO: 1049413 - DNA, 15 bp, Homo sapiens
aagtgctgggtttac

SEQ ID NO: 1049414 - DNA, 15 bp, Homo sapiens
agtgctgggtttaca

SEQ ID NO: 1049415 - DNA, 15 bp, Homo sapiens
gtgctgggtttacag

SEQ ID NO: 1049416 - DNA, 15 bp, Homo sapiens
tgctgggtttacagg

SEQ ID NO: 1049417 - DNA, 15 bp, Homo sapiens
gctgggtttacaggc

SEQ ID NO: 1049418 - DNA, 15 bp, Homo sapiens
ctgggtttacaggca

SEQ ID NO: 1049419 - DNA, 15 bp, Homo sapiens
tgggtttacaggcat

SEQ ID NO: 1049420 - DNA, 15 bp, Homo sapiens
gggtttacaggcatg

SEQ ID NO: 1049421 - DNA, 15 bp, Homo sapiens
ggtttacaggcatga

SEQ ID NO: 1049422 - DNA, 15 bp, Homo sapiens
gtttacaggcatgag

SEQ ID NO: 1049423 - DNA, 15 bp, Homo sapiens
tttacaggcatgagc

SEQ ID NO: 1049424 - DNA, 15 bp, Homo sapiens
caggcatgagccact

SEQ ID NO: 1049425 - DNA, 15 bp, Homo sapiens
aggcatgagccactg

SEQ ID NO: 1049426 - DNA, 15 bp, Homo sapiens
ggcatgagccactgc

SEQ ID NO: 1049427 - DNA, 15 bp, Homo sapiens
gcatgagccactgct

SEQ ID NO: 1049428 - DNA, 15 bp, Homo sapiens
catgagccactgctc

SEQ ID NO: 1049429 - DNA, 15 bp, Homo sapiens
atgagccactgctcc

SEQ ID NO: 1049430 - DNA, 15 bp, Homo sapiens
tgagccactgctccc

SEQ ID NO: 1049431 - DNA, 15 bp, Homo sapiens
gagccactgctcccg

SEQ ID NO: 1049432 - DNA, 15 bp, Homo sapiens
agccactgctcccga

SEQ ID NO: 1049433 - DNA, 15 bp, Homo sapiens
gccactgctcccgac

SEQ ID NO: 1049434 - DNA, 15 bp, Homo sapiens
ccactgctcccgacc

SEQ ID NO: 1049435 - DNA, 15 bp, Homo sapiens
cactgctcccgacct

SEQ ID NO: 1049436 - DNA, 15 bp, Homo sapiens
actgctcccgacctg

SEQ ID NO: 1049437 - DNA, 15 bp, Homo sapiens
ctgctcccgacctga

SEQ ID NO: 1049438 - DNA, 15 bp, Homo sapiens
tgctcccgacctgat

SEQ ID NO: 1049439 - DNA, 15 bp, Homo sapiens
gctcccgacctgatt

SEQ ID NO: 1049440 - DNA, 15 bp, Homo sapiens
ctcccgacctgattt

SEQ ID NO: 1049441 - DNA, 15 bp, Homo sapiens
tcccgacctgatttc

SEQ ID NO: 1049442 - DNA, 15 bp, Homo sapiens
cccgacctgatttcc

SEQ ID NO: 1049443 - DNA, 15 bp, Homo sapiens
ccgacctgatttcca

SEQ ID NO: 1049444 - DNA, 15 bp, Homo sapiens
cgacctgatttccac

SEQ ID NO: 1049445 - DNA, 15 bp, Homo sapiens
gacctgatttccact

SEQ ID NO: 1049446 - DNA, 15 bp, Homo sapiens
acctgatttccactt

SEQ ID NO: 1049447 - DNA, 15 bp, Homo sapiens
cctgatttccacttt

SEQ ID NO: 1049448 - DNA, 15 bp, Homo sapiens
ctgatttccactttt

SEQ ID NO: 1049449 - DNA, 15 bp, Homo sapiens
tgatttccacttttc

SEQ ID NO: 1049450 - DNA, 15 bp, Homo sapiens
gatttccacttttca

SEQ ID NO: 1049451 - DNA, 15 bp, Homo sapiens
atttccacttttcaa

SEQ ID NO: 1049452 - DNA, 15 bp, Homo sapiens
tttccacttttcaaa

SEQ ID NO: 1049453 - DNA, 15 bp, Homo sapiens
ttccacttttcaaag

SEQ ID NO: 1049454 - DNA, 15 bp, Homo sapiens
tccacttttcaaaga

SEQ ID NO: 1049455 - DNA, 15 bp, Homo sapiens
ccacttttcaaagat

SEQ ID NO: 1049456 - DNA, 15 bp, Homo sapiens
cacttttcaaagatt

SEQ ID NO: 1049457 - DNA, 15 bp, Homo sapiens
acttttcaaagattc

SEQ ID NO: 1049458 - DNA, 15 bp, Homo sapiens
cttttcaaagattct

SEQ ID NO: 1049459 - DNA, 15 bp, Homo sapiens
ttttcaaagattctt

SEQ ID NO: 1049460 - DNA, 15 bp, Homo sapiens
tttcaaagattcttc

SEQ ID NO: 1049461 - DNA, 15 bp, Homo sapiens
ttcaaagattcttct

SEQ ID NO: 1049462 - DNA, 15 bp, Homo sapiens
tcaaagattcttctg

SEQ ID NO: 1049463 - DNA, 15 bp, Homo sapiens
caaagattcttctgg

SEQ ID NO: 1049464 - DNA, 15 bp, Homo sapiens
aaagattcttctgga

SEQ ID NO: 1049465 - DNA, 15 bp, Homo sapiens
aagattcttctggat

SEQ ID NO: 1049466 - DNA, 15 bp, Homo sapiens
agattcttctggatg

SEQ ID NO: 1049467 - DNA, 15 bp, Homo sapiens
gattcttctggatgg

SEQ ID NO: 1049468 - DNA, 15 bp, Homo sapiens
attcttctggatggt

SEQ ID NO: 1049469 - DNA, 15 bp, Homo sapiens
ttcttctggatggtg

SEQ ID NO: 1049470 - DNA, 15 bp, Homo sapiens
tcttctggatggtgg

SEQ ID NO: 1049471 - DNA, 15 bp, Homo sapiens
cttctggatggtgga

SEQ ID NO: 1049472 - DNA, 15 bp, Homo sapiens
ttctggatggtggag

SEQ ID NO: 1049473 - DNA, 15 bp, Homo sapiens
tctggatggtggaga

SEQ ID NO: 1049474 - DNA, 15 bp, Homo sapiens
ctggatggtggagag

SEQ ID NO: 1049475 - DNA, 15 bp, Homo sapiens
tggatggtggagagt

SEQ ID NO: 1049476 - DNA, 15 bp, Homo sapiens
ggatggtggagagtg

SEQ ID NO: 1049477 - DNA, 15 bp, Homo sapiens
gatggtggagagtgg

SEQ ID NO: 1049478 - DNA, 15 bp, Homo sapiens
atggtggagagtggc

SEQ ID NO: 1049479 - DNA, 15 bp, Homo sapiens
tggtggagagtggct

SEQ ID NO: 1049480 - DNA, 15 bp, Homo sapiens
ggtggagagtggctt

SEQ ID NO: 1049481 - DNA, 15 bp, Homo sapiens
gtggagagtggcttg

SEQ ID NO: 1049482 - DNA, 15 bp, Homo sapiens
tggagagtggcttgg

SEQ ID NO: 1049483 - DNA, 15 bp, Homo sapiens
ggagagtggcttgga

SEQ ID NO: 1049484 - DNA, 15 bp, Homo sapiens
gagagtggcttggag

SEQ ID NO: 1049485 - DNA, 15 bp, Homo sapiens
agagtggcttggaga

SEQ ID NO: 1049486 - DNA, 15 bp, Homo sapiens
gagtggcttggagag

SEQ ID NO: 1049487 - DNA, 15 bp, Homo sapiens
agtggcttggagaga

SEQ ID NO: 1049488 - DNA, 15 bp, Homo sapiens
gtggcttggagagat

SEQ ID NO: 1049489 - DNA, 15 bp, Homo sapiens
tggcttggagagatg

SEQ ID NO: 1049490 - DNA, 15 bp, Homo sapiens
ggcttggagagatga

SEQ ID NO: 1049491 - DNA, 15 bp, Homo sapiens
gcttggagagatgag

SEQ ID NO: 1049492 - DNA, 15 bp, Homo sapiens
cttggagagatgaga

SEQ ID NO: 1049493 - DNA, 15 bp, Homo sapiens
ttggagagatgagag

SEQ ID NO: 1049494 - DNA, 15 bp, Homo sapiens
tggagagatgagaga

SEQ ID NO: 1049495 - DNA, 15 bp, Homo sapiens
ggagagatgagagat

SEQ ID NO: 1049496 - DNA, 15 bp, Homo sapiens
gagagatgagagatc

SEQ ID NO: 1049497 - DNA, 15 bp, Homo sapiens
agagatgagagatca

SEQ ID NO: 1049498 - DNA, 15 bp, Homo sapiens
gagatgagagatcat

SEQ ID NO: 1049499 - DNA, 15 bp, Homo sapiens
agatgagagatcata

SEQ ID NO: 1049500 - DNA, 15 bp, Homo sapiens
gatgagagatcataa

SEQ ID NO: 1049501 - DNA, 15 bp, Homo sapiens
atgagagatcataag

SEQ ID NO: 1049502 - DNA, 15 bp, Homo sapiens
tgagagatcataagg

SEQ ID NO: 1049503 - DNA, 15 bp, Homo sapiens
gagagatcataagga

SEQ ID NO: 1049504 - DNA, 15 bp, Homo sapiens
agagatcataaggac

SEQ ID NO: 1049505 - DNA, 15 bp, Homo sapiens
gagatcataaggaca

SEQ ID NO: 1049506 - DNA, 15 bp, Homo sapiens
agatcataaggacag

SEQ ID NO: 1049507 - DNA, 15 bp, Homo sapiens
gatcataaggacagc

SEQ ID NO: 1049508 - DNA, 15 bp, Homo sapiens
atcataaggacagca

SEQ ID NO: 1049509 - DNA, 15 bp, Homo sapiens
tcataaggacagcag

SEQ ID NO: 1049510 - DNA, 15 bp, Homo sapiens
cataaggacagcagc

SEQ ID NO: 1049511 - DNA, 15 bp, Homo sapiens
ataaggacagcagca

SEQ ID NO: 1049512 - DNA, 15 bp, Homo sapiens
taaggacagcagcag

SEQ ID NO: 1049513 - DNA, 15 bp, Homo sapiens
aaggacagcagcagc

SEQ ID NO: 1049514 - DNA, 15 bp, Homo sapiens
aggacagcagcagca

SEQ ID NO: 1049515 - DNA, 15 bp, Homo sapiens
ggacagcagcagcaa

SEQ ID NO: 1049516 - DNA, 15 bp, Homo sapiens
gacagcagcagcaac

SEQ ID NO: 1049517 - DNA, 15 bp, Homo sapiens
acagcagcagcaaca

SEQ ID NO: 1049518 - DNA, 15 bp, Homo sapiens
cagcagcagcaacag

SEQ ID NO: 1049519 - DNA, 15 bp, Homo sapiens
agcagcagcaacagt

SEQ ID NO: 1049520 - DNA, 15 bp, Homo sapiens
gcagcagcaacagtc

SEQ ID NO: 1049521 - DNA, 15 bp, Homo sapiens
cagcagcaacagtca

SEQ ID NO: 1049522 - DNA, 15 bp, Homo sapiens
agcagcaacagtcac

SEQ ID NO: 1049523 - DNA, 15 bp, Homo sapiens
gcagcaacagtcaca

SEQ ID NO: 1049524 - DNA, 15 bp, Homo sapiens
cagcaacagtcacag

SEQ ID NO: 1049525 - DNA, 15 bp, Homo sapiens
agcaacagtcacagc

SEQ ID NO: 1049526 - DNA, 15 bp, Homo sapiens
gcaacagtcacagca

SEQ ID NO: 1049527 - DNA, 15 bp, Homo sapiens
caacagtcacagcag

SEQ ID NO: 1049528 - DNA, 15 bp, Homo sapiens
aacagtcacagcagc

SEQ ID NO: 1049529 - DNA, 15 bp, Homo sapiens
acagtcacagcagct

SEQ ID NO: 1049530 - DNA, 15 bp, Homo sapiens
cagtcacagcagctg

SEQ ID NO: 1049531 - DNA, 15 bp, Homo sapiens
agtcacagcagctga

SEQ ID NO: 1049532 - DNA, 15 bp, Homo sapiens
gtcacagcagctgat

SEQ ID NO: 1049533 - DNA, 15 bp, Homo sapiens
tcacagcagctgatg

SEQ ID NO: 1049534 - DNA, 15 bp, Homo sapiens
cacagcagctgatgt

SEQ ID NO: 1049535 - DNA, 15 bp, Homo sapiens
acagcagctgatgtt

SEQ ID NO: 1049536 - DNA, 15 bp, Homo sapiens
cagcagctgatgttt

SEQ ID NO: 1049537 - DNA, 15 bp, Homo sapiens
agcagctgatgttta

SEQ ID NO: 1049538 - DNA, 15 bp, Homo sapiens
gcagctgatgtttac

SEQ ID NO: 1049539 - DNA, 15 bp, Homo sapiens
cagctgatgtttacc

SEQ ID NO: 1049540 - DNA, 15 bp, Homo sapiens
agctgatgtttacct

SEQ ID NO: 1049541 - DNA, 15 bp, Homo sapiens
gctgatgtttacctc

SEQ ID NO: 1049542 - DNA, 15 bp, Homo sapiens
ctgatgtttacctcg

SEQ ID NO: 1049543 - DNA, 15 bp, Homo sapiens
tgatgtttacctcgt

SEQ ID NO: 1049544 - DNA, 15 bp, Homo sapiens
gatgtttacctcgtg

SEQ ID NO: 1049545 - DNA, 15 bp, Homo sapiens
atgtttacctcgtgc

SEQ ID NO: 1049546 - DNA, 15 bp, Homo sapiens
tgtttacctcgtgct

SEQ ID NO: 1049547 - DNA, 15 bp, Homo sapiens
gtttacctcgtgctt

SEQ ID NO: 1049548 - DNA, 15 bp, Homo sapiens
tttacctcgtgcttt

SEQ ID NO: 1049549 - DNA, 15 bp, Homo sapiens
ttacctcgtgctttc

SEQ ID NO: 1049550 - DNA, 15 bp, Homo sapiens
tacctcgtgctttct

SEQ ID NO: 1049551 - DNA, 15 bp, Homo sapiens
acctcgtgctttctc

SEQ ID NO: 1049552 - DNA, 15 bp, Homo sapiens
cctcgtgctttctct

SEQ ID NO: 1049553 - DNA, 15 bp, Homo sapiens
ctcgtgctttctctg

SEQ ID NO: 1049554 - DNA, 15 bp, Homo sapiens
tcgtgctttctctgc

SEQ ID NO: 1049555 - DNA, 15 bp, Homo sapiens
cgtgctttctctgca

SEQ ID NO: 1049556 - DNA, 15 bp, Homo sapiens
gtgctttctctgcac

SEQ ID NO: 1049557 - DNA, 15 bp, Homo sapiens
tgctttctctgcacc

SEQ ID NO: 1049558 - DNA, 15 bp, Homo sapiens
gctttctctgcaccc

SEQ ID NO: 1049559 - DNA, 15 bp, Homo sapiens
ctttctctgcacccg

SEQ ID NO: 1049560 - DNA, 15 bp, Homo sapiens
tttctctgcacccgg

SEQ ID NO: 1049561 - DNA, 15 bp, Homo sapiens
ttctctgcacccggc

SEQ ID NO: 1049562 - DNA, 15 bp, Homo sapiens
tctctgcacccggcg

SEQ ID NO: 1049563 - DNA, 15 bp, Homo sapiens
ctctgcacccggcgg

SEQ ID NO: 1049564 - DNA, 15 bp, Homo sapiens
tctgcacccggcggc

SEQ ID NO: 1049565 - DNA, 15 bp, Homo sapiens
ctgcacccggcggct

SEQ ID NO: 1049566 - DNA, 15 bp, Homo sapiens
tgcacccggcggctg

SEQ ID NO: 1049567 - DNA, 15 bp, Homo sapiens
gcacccggcggctgt

SEQ ID NO: 1049568 - DNA, 15 bp, Homo sapiens
cacccggcggctgtg

SEQ ID NO: 1049569 - DNA, 15 bp, Homo sapiens
acccggcggctgtgt

SEQ ID NO: 1049570 - DNA, 15 bp, Homo sapiens
cccggcggctgtgtt

SEQ ID NO: 1049571 - DNA, 15 bp, Homo sapiens
ccggcggctgtgttg

SEQ ID NO: 1049572 - DNA, 15 bp, Homo sapiens
cggcggctgtgttga

SEQ ID NO: 1049573 - DNA, 15 bp, Homo sapiens
ggcggctgtgttgat

SEQ ID NO: 1049574 - DNA, 15 bp, Homo sapiens
gcggctgtgttgatt

SEQ ID NO: 1049575 - DNA, 15 bp, Homo sapiens
cggctgtgttgattg

SEQ ID NO: 1049576 - DNA, 15 bp, Homo sapiens
ggctgtgttgattgc

SEQ ID NO: 1049577 - DNA, 15 bp, Homo sapiens
gctgtgttgattgct

SEQ ID NO: 1049578 - DNA, 15 bp, Homo sapiens
ctgtgttgattgctt

SEQ ID NO: 1049579 - DNA, 15 bp, Homo sapiens
tgtgttgattgcttt

SEQ ID NO: 1049580 - DNA, 15 bp, Homo sapiens
gtgttgattgctttc

SEQ ID NO: 1049581 - DNA, 15 bp, Homo sapiens
tgttgattgctttct

SEQ ID NO: 1049582 - DNA, 15 bp, Homo sapiens
gttgattgctttctg

SEQ ID NO: 1049583 - DNA, 15 bp, Homo sapiens
ttgattgctttctgg

SEQ ID NO: 1049584 - DNA, 15 bp, Homo sapiens
tgattgctttctggg

SEQ ID NO: 1049585 - DNA, 15 bp, Homo sapiens
gattgctttctgggt

SEQ ID NO: 1049586 - DNA, 15 bp, Homo sapiens
attgctttctgggta

SEQ ID NO: 1049587 - DNA, 15 bp, Homo sapiens
ttgctttctgggtat

SEQ ID NO: 1049588 - DNA, 15 bp, Homo sapiens
tgctttctgggtatc

SEQ ID NO: 1049589 - DNA, 15 bp, Homo sapiens
gctttctgggtatct

SEQ ID NO: 1049590 - DNA, 15 bp, Homo sapiens
ctttctgggtatctg

SEQ ID NO: 1049591 - DNA, 15 bp, Homo sapiens
tttctgggtatctga

SEQ ID NO: 1049592 - DNA, 15 bp, Homo sapiens
ttctgggtatctgat

SEQ ID NO: 1049593 - DNA, 15 bp, Homo sapiens
tctgggtatctgatt

SEQ ID NO: 1049594 - DNA, 15 bp, Homo sapiens
ctgggtatctgattg

SEQ ID NO: 1049595 - DNA, 15 bp, Homo sapiens
tgggtatctgattgc

SEQ ID NO: 1049596 - DNA, 15 bp, Homo sapiens
gggtatctgattgct

SEQ ID NO: 1049597 - DNA, 15 bp, Homo sapiens
ggtatctgattgctt

SEQ ID NO: 1049598 - DNA, 15 bp, Homo sapiens
gtatctgattgctta

SEQ ID NO: 1049599 - DNA, 15 bp, Homo sapiens
tatctgattgcttaa

SEQ ID NO: 1049600 - DNA, 15 bp, Homo sapiens
atctgattgcttaat

SEQ ID NO: 1049601 - DNA, 15 bp, Homo sapiens
tctgattgcttaatc

SEQ ID NO: 1049602 - DNA, 15 bp, Homo sapiens
ctgattgcttaatcc

SEQ ID NO: 1049603 - DNA, 15 bp, Homo sapiens
tgattgcttaatccc

SEQ ID NO: 1049604 - DNA, 15 bp, Homo sapiens
gattgcttaatcccc

SEQ ID NO: 1049605 - DNA, 15 bp, Homo sapiens
attgcttaatcccca

SEQ ID NO: 1049606 - DNA, 15 bp, Homo sapiens
ttgcttaatccccac

SEQ ID NO: 1049607 - DNA, 15 bp, Homo sapiens
tgcttaatccccaca

SEQ ID NO: 1049608 - DNA, 15 bp, Homo sapiens
gcttaatccccacag

SEQ ID NO: 1049609 - DNA, 15 bp, Homo sapiens
cttaatccccacagc

SEQ ID NO: 1049610 - DNA, 15 bp, Homo sapiens
ttaatccccacagct

SEQ ID NO: 1049611 - DNA, 15 bp, Homo sapiens
taatccccacagctg

SEQ ID NO: 1049612 - DNA, 15 bp, Homo sapiens
aatccccacagctgc

SEQ ID NO: 1049613 - DNA, 15 bp, Homo sapiens
atccccacagctgcc

SEQ ID NO: 1049614 - DNA, 15 bp, Homo sapiens
tccccacagctgccc

SEQ ID NO: 1049615 - DNA, 15 bp, Homo sapiens
ccccacagctgccct

SEQ ID NO: 1049616 - DNA, 15 bp, Homo sapiens
cccacagctgccctg

SEQ ID NO: 1049617 - DNA, 15 bp, Homo sapiens
ccacagctgccctgt

SEQ ID NO: 1049618 - DNA, 15 bp, Homo sapiens
cacagctgccctgtg

SEQ ID NO: 1049619 - DNA, 15 bp, Homo sapiens
acagctgccctgtga

SEQ ID NO: 1049620 - DNA, 15 bp, Homo sapiens
cagctgccctgtgaa

SEQ ID NO: 1049621 - DNA, 15 bp, Homo sapiens
agctgccctgtgaag

SEQ ID NO: 1049622 - DNA, 15 bp, Homo sapiens
gctgccctgtgaagt

SEQ ID NO: 1049623 - DNA, 15 bp, Homo sapiens
ctgccctgtgaagta

SEQ ID NO: 1049624 - DNA, 15 bp, Homo sapiens
tgccctgtgaagtag

SEQ ID NO: 1049625 - DNA, 15 bp, Homo sapiens
gccctgtgaagtagg

SEQ ID NO: 1049626 - DNA, 15 bp, Homo sapiens
ccctgtgaagtaggg

SEQ ID NO: 1049627 - DNA, 15 bp, Homo sapiens
cctgtgaagtagggc

SEQ ID NO: 1049628 - DNA, 15 bp, Homo sapiens
ctgtgaagtagggct

SEQ ID NO: 1049629 - DNA, 15 bp, Homo sapiens
tgtgaagtagggctt

SEQ ID NO: 1049630 - DNA, 15 bp, Homo sapiens
gtgaagtagggcttg

SEQ ID NO: 1049631 - DNA, 15 bp, Homo sapiens
tgaagtagggcttgt

SEQ ID NO: 1049632 - DNA, 15 bp, Homo sapiens
gaagtagggcttgtg

SEQ ID NO: 1049633 - DNA, 15 bp, Homo sapiens
aagtagggcttgtga

SEQ ID NO: 1049634 - DNA, 15 bp, Homo sapiens
agtagggcttgtgat

SEQ ID NO: 1049635 - DNA, 15 bp, Homo sapiens
gtagggcttgtgatt

SEQ ID NO: 1049636 - DNA, 15 bp, Homo sapiens
tagggcttgtgatta

SEQ ID NO: 1049637 - DNA, 15 bp, Homo sapiens
agggcttgtgattac

SEQ ID NO: 1049638 - DNA, 15 bp, Homo sapiens
gggcttgtgattact

SEQ ID NO: 1049639 - DNA, 15 bp, Homo sapiens
ggcttgtgattactt

SEQ ID NO: 1049640 - DNA, 15 bp, Homo sapiens
gcttgtgattacttc

SEQ ID NO: 1049641 - DNA, 15 bp, Homo sapiens
cttgtgattacttcc

SEQ ID NO: 1049642 - DNA, 15 bp, Homo sapiens
ttgtgattacttcct

SEQ ID NO: 1049643 - DNA, 15 bp, Homo sapiens
tgtgattacttcctt

SEQ ID NO: 1049644 - DNA, 15 bp, Homo sapiens
gtgattacttccttt

SEQ ID NO: 1049645 - DNA, 15 bp, Homo sapiens
tgattacttcctttt

SEQ ID NO: 1049646 - DNA, 15 bp, Homo sapiens
gattacttccttttg

SEQ ID NO: 1049647 - DNA, 15 bp, Homo sapiens
attacttccttttgt

SEQ ID NO: 1049648 - DNA, 15 bp, Homo sapiens
ttacttccttttgta

SEQ ID NO: 1049649 - DNA, 15 bp, Homo sapiens
tacttccttttgtag

SEQ ID NO: 1049650 - DNA, 15 bp, Homo sapiens
acttccttttgtaga

SEQ ID NO: 1049651 - DNA, 15 bp, Homo sapiens
cttccttttgtagat

SEQ ID NO: 1049652 - DNA, 15 bp, Homo sapiens
ttccttttgtagatg

SEQ ID NO: 1049653 - DNA, 15 bp, Homo sapiens
tccttttgtagatgg

SEQ ID NO: 1049654 - DNA, 15 bp, Homo sapiens
ccttttgtagatgga

SEQ ID NO: 1049655 - DNA, 15 bp, Homo sapiens
cttttgtagatggag

SEQ ID NO: 1049656 - DNA, 15 bp, Homo sapiens
ttttgtagatggaga

SEQ ID NO: 1049657 - DNA, 15 bp, Homo sapiens
tttgtagatggagag

SEQ ID NO: 1049658 - DNA, 15 bp, Homo sapiens
ttgtagatggagaga

SEQ ID NO: 1049659 - DNA, 15 bp, Homo sapiens
tgtagatggagagac

SEQ ID NO: 1049660 - DNA, 15 bp, Homo sapiens
gtagatggagagacg

SEQ ID NO: 1049661 - DNA, 15 bp, Homo sapiens
tagatggagagacga

SEQ ID NO: 1049662 - DNA, 15 bp, Homo sapiens
agatggagagacgat

SEQ ID NO: 1049663 - DNA, 15 bp, Homo sapiens
gatggagagacgatg

SEQ ID NO: 1049664 - DNA, 15 bp, Homo sapiens
atggagagacgatgg

SEQ ID NO: 1049665 - DNA, 15 bp, Homo sapiens
tggagagacgatggc

SEQ ID NO: 1049666 - DNA, 15 bp, Homo sapiens
ggagagacgatggcc

SEQ ID NO: 1049667 - DNA, 15 bp, Homo sapiens
gagagacgatggccg

SEQ ID NO: 1049668 - DNA, 15 bp, Homo sapiens
agagacgatggccgt

SEQ ID NO: 1049669 - DNA, 15 bp, Homo sapiens
gagacgatggccgtg

SEQ ID NO: 1049670 - DNA, 15 bp, Homo sapiens
agacgatggccgtgt

SEQ ID NO: 1049671 - DNA, 15 bp, Homo sapiens
gacgatggccgtgtt

SEQ ID NO: 1049672 - DNA, 15 bp, Homo sapiens
acgatggccgtgttg

SEQ ID NO: 1049673 - DNA, 15 bp, Homo sapiens
cgatggccgtgttgg

SEQ ID NO: 1049674 - DNA, 15 bp, Homo sapiens
gatggccgtgttggg

SEQ ID NO: 1049675 - DNA, 15 bp, Homo sapiens
atggccgtgttgggt

SEQ ID NO: 1049676 - DNA, 15 bp, Homo sapiens
tggccgtgttgggtg

SEQ ID NO: 1049677 - DNA, 15 bp, Homo sapiens
ggccgtgttgggtgg

SEQ ID NO: 1049678 - DNA, 15 bp, Homo sapiens
gccgtgttgggtggg

SEQ ID NO: 1049679 - DNA, 15 bp, Homo sapiens
ccgtgttgggtgggg

SEQ ID NO: 1049680 - DNA, 15 bp, Homo sapiens
cgtgttgggtggggg

SEQ ID NO: 1049681 - DNA, 15 bp, Homo sapiens
gtgttgggtggggga

SEQ ID NO: 1049682 - DNA, 15 bp, Homo sapiens
tgttgggtgggggag

SEQ ID NO: 1049683 - DNA, 15 bp, Homo sapiens
gttgggtgggggaga

SEQ ID NO: 1049684 - DNA, 15 bp, Homo sapiens
ttgggtgggggagag

SEQ ID NO: 1049685 - DNA, 15 bp, Homo sapiens
tgggtgggggagagc

SEQ ID NO: 1049686 - DNA, 15 bp, Homo sapiens
gggtgggggagagca

SEQ ID NO: 1049687 - DNA, 15 bp, Homo sapiens
ggtgggggagagcag

SEQ ID NO: 1049688 - DNA, 15 bp, Homo sapiens
gtgggggagagcaga

SEQ ID NO: 1049689 - DNA, 15 bp, Homo sapiens
tgggggagagcagaa

SEQ ID NO: 1049690 - DNA, 15 bp, Homo sapiens
gggggagagcagaac

SEQ ID NO: 1049691 - DNA, 15 bp, Homo sapiens
ggggagagcagaacg

SEQ ID NO: 1049692 - DNA, 15 bp, Homo sapiens
gggagagcagaacga

SEQ ID NO: 1049693 - DNA, 15 bp, Homo sapiens
ggagagcagaacgag

SEQ ID NO: 1049694 - DNA, 15 bp, Homo sapiens
gagagcagaacgagg

SEQ ID NO: 1049695 - DNA, 15 bp, Homo sapiens
agagcagaacgaggc

SEQ ID NO: 1049696 - DNA, 15 bp, Homo sapiens
gagcagaacgaggcc

SEQ ID NO: 1049697 - DNA, 15 bp, Homo sapiens
agcagaacgaggccg

SEQ ID NO: 1049698 - DNA, 15 bp, Homo sapiens
gcagaacgaggccgg

SEQ ID NO: 1049699 - DNA, 15 bp, Homo sapiens
cagaacgaggccggg

SEQ ID NO: 1049700 - DNA, 15 bp, Homo sapiens
agaacgaggccgggt

SEQ ID NO: 1049701 - DNA, 15 bp, Homo sapiens
gaacgaggccgggtg

SEQ ID NO: 1049702 - DNA, 15 bp, Homo sapiens
aacgaggccgggtgg

SEQ ID NO: 1049703 - DNA, 15 bp, Homo sapiens
acgaggccgggtggg

SEQ ID NO: 1049704 - DNA, 15 bp, Homo sapiens
cgaggccgggtgggc

SEQ ID NO: 1049705 - DNA, 15 bp, Homo sapiens
gaggccgggtgggcg

SEQ ID NO: 1049706 - DNA, 15 bp, Homo sapiens
aggccgggtgggcgg

SEQ ID NO: 1049707 - DNA, 15 bp, Homo sapiens
ggccgggtgggcggc

SEQ ID NO: 1049708 - DNA, 15 bp, Homo sapiens
gccgggtgggcggcg

SEQ ID NO: 1049709 - DNA, 15 bp, Homo sapiens
ccgggtgggcggcga

SEQ ID NO: 1049710 - DNA, 15 bp, Homo sapiens
cgggtgggcggcgac

SEQ ID NO: 1049711 - DNA, 15 bp, Homo sapiens
gggtgggcggcgaca

SEQ ID NO: 1049712 - DNA, 15 bp, Homo sapiens
ggtgggcggcgacac

SEQ ID NO: 1049713 - DNA, 15 bp, Homo sapiens
gtgggcggcgacacc

SEQ ID NO: 1049714 - DNA, 15 bp, Homo sapiens
tgggcggcgacacca

SEQ ID NO: 1049715 - DNA, 15 bp, Homo sapiens
gggcggcgacaccat

SEQ ID NO: 1049716 - DNA, 15 bp, Homo sapiens
ggcggcgacaccatg

SEQ ID NO: 1049717 - DNA, 15 bp, Homo sapiens
gcggcgacaccatgt

SEQ ID NO: 1049718 - DNA, 15 bp, Homo sapiens
cggcgacaccatgtc

SEQ ID NO: 1049719 - DNA, 15 bp, Homo sapiens
ggcgacaccatgtcc

SEQ ID NO: 1049720 - DNA, 15 bp, Homo sapiens
gcgacaccatgtcct

SEQ ID NO: 1049721 - DNA, 15 bp, Homo sapiens
cgacaccatgtcctg

SEQ ID NO: 1049722 - DNA, 15 bp, Homo sapiens
gacaccatgtcctgc

SEQ ID NO: 1049723 - DNA, 15 bp, Homo sapiens
acaccatgtcctgca

SEQ ID NO: 1049724 - DNA, 15 bp, Homo sapiens
caccatgtcctgcag

SEQ ID NO: 1049725 - DNA, 15 bp, Homo sapiens
accatgtcctgcagt

SEQ ID NO: 1049726 - DNA, 15 bp, Homo sapiens
ccatgtcctgcagtg

SEQ ID NO: 1049727 - DNA, 15 bp, Homo sapiens
catgtcctgcagtgg

SEQ ID NO: 1049728 - DNA, 15 bp, Homo sapiens
atgtcctgcagtggg

SEQ ID NO: 1049729 - DNA, 15 bp, Homo sapiens
tgtcctgcagtgggc

SEQ ID NO: 1049730 - DNA, 15 bp, Homo sapiens
gtcctgcagtgggca

SEQ ID NO: 1049731 - DNA, 15 bp, Homo sapiens
tcctgcagtgggcag

SEQ ID NO: 1049732 - DNA, 15 bp, Homo sapiens
cctgcagtgggcagg

SEQ ID NO: 1049733 - DNA, 15 bp, Homo sapiens
ctgcagtgggcaggc

SEQ ID NO: 1049734 - DNA, 15 bp, Homo sapiens
tgcagtgggcaggcg

SEQ ID NO: 1049735 - DNA, 15 bp, Homo sapiens
gcagtgggcaggcgg

SEQ ID NO: 1049736 - DNA, 15 bp, Homo sapiens
cagtgggcaggcggc

SEQ ID NO: 1049737 - DNA, 15 bp, Homo sapiens
agtgggcaggcggcg

SEQ ID NO: 1049738 - DNA, 15 bp, Homo sapiens
gtgggcaggcggcgg

SEQ ID NO: 1049739 - DNA, 15 bp, Homo sapiens
tgggcaggcggcggg

SEQ ID NO: 1049740 - DNA, 15 bp, Homo sapiens
gggcaggcggcggga

SEQ ID NO: 1049741 - DNA, 15 bp, Homo sapiens
ggcaggcggcgggag

SEQ ID NO: 1049742 - DNA, 15 bp, Homo sapiens
gcaggcggcgggagg

SEQ ID NO: 1049743 - DNA, 15 bp, Homo sapiens
caggcggcgggaggg

SEQ ID NO: 1049744 - DNA, 15 bp, Homo sapiens
aggcggcgggaggga

SEQ ID NO: 1049745 - DNA, 15 bp, Homo sapiens
ggcggcgggagggac

SEQ ID NO: 1049746 - DNA, 15 bp, Homo sapiens
gcggcgggagggaca

SEQ ID NO: 1049747 - DNA, 15 bp, Homo sapiens
cggcgggagggacag

SEQ ID NO: 1049748 - DNA, 15 bp, Homo sapiens
ggcgggagggacaga

SEQ ID NO: 1049749 - DNA, 15 bp, Homo sapiens
gcgggagggacagac

SEQ ID NO: 1049750 - DNA, 15 bp, Homo sapiens
cgggagggacagact

SEQ ID NO: 1049751 - DNA, 15 bp, Homo sapiens
gggagggacagactt

SEQ ID NO: 1049752 - DNA, 15 bp, Homo sapiens
ggagggacagacttg

SEQ ID NO: 1049753 - DNA, 15 bp, Homo sapiens
gagggacagacttgg

SEQ ID NO: 1049754 - DNA, 15 bp, Homo sapiens
agggacagacttggc

SEQ ID NO: 1049755 - DNA, 15 bp, Homo sapiens
gggacagacttggcg

SEQ ID NO: 1049756 - DNA, 15 bp, Homo sapiens
ggacagacttggcga

SEQ ID NO: 1049757 - DNA, 15 bp, Homo sapiens
gacagacttggcgaa

SEQ ID NO: 1049758 - DNA, 15 bp, Homo sapiens
acagacttggcgaag

SEQ ID NO: 1049759 - DNA, 15 bp, Homo sapiens
cagacttggcgaagg

SEQ ID NO: 1049760 - DNA, 15 bp, Homo sapiens
agacttggcgaaggg

SEQ ID NO: 1049761 - DNA, 15 bp, Homo sapiens
gacttggcgaagggg

SEQ ID NO: 1049762 - DNA, 15 bp, Homo sapiens
acttggcgaaggggc

SEQ ID NO: 1049763 - DNA, 15 bp, Homo sapiens
cttggcgaaggggcc

SEQ ID NO: 1049764 - DNA, 15 bp, Homo sapiens
ttggcgaaggggccg

SEQ ID NO: 1049765 - DNA, 15 bp, Homo sapiens
tggcgaaggggccga

SEQ ID NO: 1049766 - DNA, 15 bp, Homo sapiens
ggcgaaggggccgag

SEQ ID NO: 1049767 - DNA, 15 bp, Homo sapiens
gcgaaggggccgagc

SEQ ID NO: 1049768 - DNA, 15 bp, Homo sapiens
cgaaggggccgagct

SEQ ID NO: 1049769 - DNA, 15 bp, Homo sapiens
gaaggggccgagctc

SEQ ID NO: 1049770 - DNA, 15 bp, Homo sapiens
aaggggccgagctca

SEQ ID NO: 1049771 - DNA, 15 bp, Homo sapiens
aggggccgagctcag

SEQ ID NO: 1049772 - DNA, 15 bp, Homo sapiens
ggggccgagctcagc

SEQ ID NO: 1049773 - DNA, 15 bp, Homo sapiens
gggccgagctcagct

SEQ ID NO: 1049774 - DNA, 15 bp, Homo sapiens
ggccgagctcagctt

SEQ ID NO: 1049775 - DNA, 15 bp, Homo sapiens
gccgagctcagcttt

SEQ ID NO: 1049776 - DNA, 15 bp, Homo sapiens
ccgagctcagctttg

SEQ ID NO: 1049777 - DNA, 15 bp, Homo sapiens
cgagctcagctttgg

SEQ ID NO: 1049778 - DNA, 15 bp, Homo sapiens
gagctcagctttggc

SEQ ID NO: 1049779 - DNA, 15 bp, Homo sapiens
agctcagctttggct

SEQ ID NO: 1049780 - DNA, 15 bp, Homo sapiens
gctcagctttggctg

SEQ ID NO: 1049781 - DNA, 15 bp, Homo sapiens
ctcagctttggctgt

SEQ ID NO: 1049782 - DNA, 15 bp, Homo sapiens
tcagctttggctgtg

SEQ ID NO: 1049783 - DNA, 15 bp, Homo sapiens
cagctttggctgtgg

SEQ ID NO: 1049784 - DNA, 15 bp, Homo sapiens
agctttggctgtggg

SEQ ID NO: 1049785 - DNA, 15 bp, Homo sapiens
gctttggctgtgggg

SEQ ID NO: 1049786 - DNA, 15 bp, Homo sapiens
ctttggctgtggggc

SEQ ID NO: 1049787 - DNA, 15 bp, Homo sapiens
tttggctgtggggcc

SEQ ID NO: 1049788 - DNA, 15 bp, Homo sapiens
ttggctgtggggccg

SEQ ID NO: 1049789 - DNA, 15 bp, Homo sapiens
tggctgtggggccgg

SEQ ID NO: 1049790 - DNA, 15 bp, Homo sapiens
ggctgtggggccgga

SEQ ID NO: 1049791 - DNA, 15 bp, Homo sapiens
gctgtggggccggag

SEQ ID NO: 1049792 - DNA, 15 bp, Homo sapiens
ctgtggggccggagg

SEQ ID NO: 1049793 - DNA, 15 bp, Homo sapiens
tgtggggccggaggt

SEQ ID NO: 1049794 - DNA, 15 bp, Homo sapiens
gtggggccggaggtg

SEQ ID NO: 1049795 - DNA, 15 bp, Homo sapiens
tggggccggaggtgt

SEQ ID NO: 1049796 - DNA, 15 bp, Homo sapiens
ggggccggaggtgtg

SEQ ID NO: 1049797 - DNA, 15 bp, Homo sapiens
gggccggaggtgtgc

SEQ ID NO: 1049798 - DNA, 15 bp, Homo sapiens
ggccggaggtgtgca

SEQ ID NO: 1049799 - DNA, 15 bp, Homo sapiens
gccggaggtgtgcac

SEQ ID NO: 1049800 - DNA, 15 bp, Homo sapiens
ccggaggtgtgcaca

SEQ ID NO: 1049801 - DNA, 15 bp, Homo sapiens
cggaggtgtgcacag

SEQ ID NO: 1049802 - DNA, 15 bp, Homo sapiens
ggaggtgtgcacaga

SEQ ID NO: 1049803 - DNA, 15 bp, Homo sapiens
gaggtgtgcacagac

SEQ ID NO: 1049804 - DNA, 15 bp, Homo sapiens
aggtgtgcacagacg

SEQ ID NO: 1049805 - DNA, 15 bp, Homo sapiens
ggtgtgcacagacgt

SEQ ID NO: 1049806 - DNA, 15 bp, Homo sapiens
gtgtgcacagacgtc

SEQ ID NO: 1049807 - DNA, 15 bp, Homo sapiens
tgtgcacagacgtcc

SEQ ID NO: 1049808 - DNA, 15 bp, Homo sapiens
gtgcacagacgtcca

SEQ ID NO: 1049809 - DNA, 15 bp, Homo sapiens
tgcacagacgtccag

SEQ ID NO: 1049810 - DNA, 15 bp, Homo sapiens
gcacagacgtccagg

SEQ ID NO: 1049811 - DNA, 15 bp, Homo sapiens
cacagacgtccaggg

SEQ ID NO: 1049812 - DNA, 15 bp, Homo sapiens
acagacgtccagggc

SEQ ID NO: 1049813 - DNA, 15 bp, Homo sapiens
cagacgtccagggcc

SEQ ID NO: 1049814 - DNA, 15 bp, Homo sapiens
agacgtccagggccc

SEQ ID NO: 1049815 - DNA, 15 bp, Homo sapiens
gacgtccagggcccc

SEQ ID NO: 1049816 - DNA, 15 bp, Homo sapiens
acgtccagggcccct

SEQ ID NO: 1049817 - DNA, 15 bp, Homo sapiens
cgtccagggcccctg

SEQ ID NO: 1049818 - DNA, 15 bp, Homo sapiens
gtccagggcccctgg

SEQ ID NO: 1049819 - DNA, 15 bp, Homo sapiens
ccagggcccctggtt

SEQ ID NO: 1049820 - DNA, 15 bp, Homo sapiens
cagggcccctggttc

SEQ ID NO: 1049821 - DNA, 15 bp, Homo sapiens
agggcccctggttcc

SEQ ID NO: 1049822 - DNA, 15 bp, Homo sapiens
gggcccctggttccc

SEQ ID NO: 1049823 - DNA, 15 bp, Homo sapiens
ggcccctggttccca

SEQ ID NO: 1049824 - DNA, 15 bp, Homo sapiens
gcccctggttcccag

SEQ ID NO: 1049825 - DNA, 15 bp, Homo sapiens
cccctggttcccagg

SEQ ID NO: 1049826 - DNA, 15 bp, Homo sapiens
ccctggttcccaggc

SEQ ID NO: 1049827 - DNA, 15 bp, Homo sapiens
cctggttcccaggca

SEQ ID NO: 1049828 - DNA, 15 bp, Homo sapiens
ctggttcccaggcag

SEQ ID NO: 1049829 - DNA, 15 bp, Homo sapiens
tggttcccaggcagg

SEQ ID NO: 1049830 - DNA, 15 bp, Homo sapiens
ggttcccaggcaggc

SEQ ID NO: 1049831 - DNA, 15 bp, Homo sapiens
gttcccaggcaggca

SEQ ID NO: 1049832 - DNA, 15 bp, Homo sapiens
ttcccaggcaggcat

SEQ ID NO: 1049833 - DNA, 15 bp, Homo sapiens
tcccaggcaggcatt

SEQ ID NO: 1049834 - DNA, 15 bp, Homo sapiens
cccaggcaggcattg

SEQ ID NO: 1049835 - DNA, 15 bp, Homo sapiens
ccaggcaggcattgc

SEQ ID NO: 1049836 - DNA, 15 bp, Homo sapiens
caggcaggcattgca

SEQ ID NO: 1049837 - DNA, 15 bp, Homo sapiens
aggcaggcattgcag

SEQ ID NO: 1049838 - DNA, 15 bp, Homo sapiens
ggcaggcattgcagg

SEQ ID NO: 1049839 - DNA, 15 bp, Homo sapiens
gcaggcattgcaggc

SEQ ID NO: 1049840 - DNA, 15 bp, Homo sapiens
caggcattgcaggcg

SEQ ID NO: 1049841 - DNA, 15 bp, Homo sapiens
aggcattgcaggcga

SEQ ID NO: 1049842 - DNA, 15 bp, Homo sapiens
ggcattgcaggcgag

SEQ ID NO: 1049843 - DNA, 15 bp, Homo sapiens
gcattgcaggcgagt

SEQ ID NO: 1049844 - DNA, 15 bp, Homo sapiens
cattgcaggcgagta

SEQ ID NO: 1049845 - DNA, 15 bp, Homo sapiens
attgcaggcgagtag

SEQ ID NO: 1049846 - DNA, 15 bp, Homo sapiens
ttgcaggcgagtaga

SEQ ID NO: 1049847 - DNA, 15 bp, Homo sapiens
tgcaggcgagtagaa

SEQ ID NO: 1049848 - DNA, 15 bp, Homo sapiens
gcaggcgagtagaag

SEQ ID NO: 1049849 - DNA, 15 bp, Homo sapiens
caggcgagtagaagg

SEQ ID NO: 1049850 - DNA, 15 bp, Homo sapiens
aggcgagtagaaggg

SEQ ID NO: 1049851 - DNA, 15 bp, Homo sapiens
ggcgagtagaaggga

SEQ ID NO: 1049852 - DNA, 15 bp, Homo sapiens
gcgagtagaagggaa

SEQ ID NO: 1049853 - DNA, 15 bp, Homo sapiens
cgagtagaagggaaa

SEQ ID NO: 1049854 - DNA, 15 bp, Homo sapiens
gagtagaagggaaac

SEQ ID NO: 1049855 - DNA, 15 bp, Homo sapiens
agtagaagggaaacg

SEQ ID NO: 1049856 - DNA, 15 bp, Homo sapiens
gtagaagggaaacgt

SEQ ID NO: 1049857 - DNA, 15 bp, Homo sapiens
tagaagggaaacgtc

SEQ ID NO: 1049858 - DNA, 15 bp, Homo sapiens
agaagggaaacgtcc

SEQ ID NO: 1049859 - DNA, 15 bp, Homo sapiens
gaagggaaacgtccc

SEQ ID NO: 1049860 - DNA, 15 bp, Homo sapiens
aagggaaacgtccca

SEQ ID NO: 1049861 - DNA, 15 bp, Homo sapiens
agggaaacgtcccat

SEQ ID NO: 1049862 - DNA, 15 bp, Homo sapiens
gggaaacgtcccatg

SEQ ID NO: 1049863 - DNA, 15 bp, Homo sapiens
ggaaacgtcccatgc

SEQ ID NO: 1049864 - DNA, 15 bp, Homo sapiens
gaaacgtcccatgca

SEQ ID NO: 1049865 - DNA, 15 bp, Homo sapiens
aaacgtcccatgcag

SEQ ID NO: 1049866 - DNA, 15 bp, Homo sapiens
aacgtcccatgcagc

SEQ ID NO: 1049867 - DNA, 15 bp, Homo sapiens
acgtcccatgcagcg

SEQ ID NO: 1049868 - DNA, 15 bp, Homo sapiens
cgtcccatgcagcgg

SEQ ID NO: 1049869 - DNA, 15 bp, Homo sapiens
gtcccatgcagcggg

SEQ ID NO: 1049870 - DNA, 15 bp, Homo sapiens
tcccatgcagcgggg

SEQ ID NO: 1049871 - DNA, 15 bp, Homo sapiens
cccatgcagcggggc

SEQ ID NO: 1049872 - DNA, 15 bp, Homo sapiens
ccatgcagcggggcg

SEQ ID NO: 1049873 - DNA, 15 bp, Homo sapiens
catgcagcggggcgg

SEQ ID NO: 1049874 - DNA, 15 bp, Homo sapiens
atgcagcggggcggg

SEQ ID NO: 1049875 - DNA, 15 bp, Homo sapiens
tgcagcggggcgggg

SEQ ID NO: 1049876 - DNA, 15 bp, Homo sapiens
gcagcggggcggggc

SEQ ID NO: 1049877 - DNA, 15 bp, Homo sapiens
cagcggggcggggcg

SEQ ID NO: 1049878 - DNA, 15 bp, Homo sapiens
agcggggcggggcgt

SEQ ID NO: 1049879 - DNA, 15 bp, Homo sapiens
gcggggcggggcgtc

SEQ ID NO: 1049880 - DNA, 15 bp, Homo sapiens
cggggcggggcgtct

SEQ ID NO: 1049881 - DNA, 15 bp, Homo sapiens
ggggcggggcgtctg

SEQ ID NO: 1049882 - DNA, 15 bp, Homo sapiens
gggcggggcgtctga

SEQ ID NO: 1049883 - DNA, 15 bp, Homo sapiens
ggcggggcgtctgac

SEQ ID NO: 1049884 - DNA, 15 bp, Homo sapiens
gcggggcgtctgacc

SEQ ID NO: 1049885 - DNA, 15 bp, Homo sapiens
cggggcgtctgaccc

SEQ ID NO: 1049886 - DNA, 15 bp, Homo sapiens
ggggcgtctgaccca

SEQ ID NO: 1049887 - DNA, 15 bp, Homo sapiens
gggcgtctgacccac

SEQ ID NO: 1049888 - DNA, 15 bp, Homo sapiens
ggcgtctgacccact

SEQ ID NO: 1049889 - DNA, 15 bp, Homo sapiens
gcgtctgacccactg

SEQ ID NO: 1049890 - DNA, 15 bp, Homo sapiens
cgtctgacccactgg

SEQ ID NO: 1049891 - DNA, 15 bp, Homo sapiens
gtctgacccactggc

SEQ ID NO: 1049892 - DNA, 15 bp, Homo sapiens
tctgacccactggct

SEQ ID NO: 1049893 - DNA, 15 bp, Homo sapiens
ctgacccactggctt

SEQ ID NO: 1049894 - DNA, 15 bp, Homo sapiens
tgacccactggcttc

SEQ ID NO: 1049895 - DNA, 15 bp, Homo sapiens
gacccactggcttcc

SEQ ID NO: 1049896 - DNA, 15 bp, Homo sapiens
acccactggcttccc

SEQ ID NO: 1049897 - DNA, 15 bp, Homo sapiens
cccactggcttcccc

SEQ ID NO: 1049898 - DNA, 15 bp, Homo sapiens
ccactggcttccccc

SEQ ID NO: 1049899 - DNA, 15 bp, Homo sapiens
cactggcttccccca

SEQ ID NO: 1049900 - DNA, 15 bp, Homo sapiens
actggcttcccccac

SEQ ID NO: 1049901 - DNA, 15 bp, Homo sapiens
ctggcttcccccaca

SEQ ID NO: 1049902 - DNA, 15 bp, Homo sapiens
tggcttcccccacag

SEQ ID NO: 1049903 - DNA, 15 bp, Homo sapiens
ggcttcccccacagg

SEQ ID NO: 1049904 - DNA, 15 bp, Homo sapiens
gcttcccccacaggg

SEQ ID NO: 1049905 - DNA, 15 bp, Homo sapiens
cttcccccacaggga

SEQ ID NO: 1049906 - DNA, 15 bp, Homo sapiens
ttcccccacagggag

SEQ ID NO: 1049907 - DNA, 15 bp, Homo sapiens
tcccccacagggagt

SEQ ID NO: 1049908 - DNA, 15 bp, Homo sapiens
cccccacagggagtt

SEQ ID NO: 1049909 - DNA, 15 bp, Homo sapiens
ccccacagggagttc

SEQ ID NO: 1049910 - DNA, 15 bp, Homo sapiens
cccacagggagttca

SEQ ID NO: 1049911 - DNA, 15 bp, Homo sapiens
ccacagggagttcag

SEQ ID NO: 1049912 - DNA, 15 bp, Homo sapiens
cacagggagttcagg

SEQ ID NO: 1049913 - DNA, 15 bp, Homo sapiens
acagggagttcaggc

SEQ ID NO: 1049914 - DNA, 15 bp, Homo sapiens
cagggagttcaggca

SEQ ID NO: 1049915 - DNA, 15 bp, Homo sapiens
agggagttcaggcac

SEQ ID NO: 1049916 - DNA, 15 bp, Homo sapiens
gggagttcaggcaca

SEQ ID NO: 1049917 - DNA, 15 bp, Homo sapiens
ggagttcaggcacaa

SEQ ID NO: 1049918 - DNA, 15 bp, Homo sapiens
gagttcaggcacaaa

SEQ ID NO: 1049919 - DNA, 15 bp, Homo sapiens
agttcaggcacaaaa

SEQ ID NO: 1049920 - DNA, 15 bp, Homo sapiens
gttcaggcacaaaag

SEQ ID NO: 1049921 - DNA, 15 bp, Homo sapiens
ttcaggcacaaaagc

SEQ ID NO: 1049922 - DNA, 15 bp, Homo sapiens
tcaggcacaaaagca

SEQ ID NO: 1049923 - DNA, 15 bp, Homo sapiens
caggcacaaaagcaa

SEQ ID NO: 1049924 - DNA, 15 bp, Homo sapiens
aggcacaaaagcaac

SEQ ID NO: 1049925 - DNA, 15 bp, Homo sapiens
ggcacaaaagcaaca

SEQ ID NO: 1049926 - DNA, 15 bp, Homo sapiens
gcacaaaagcaacat

SEQ ID NO: 1049927 - DNA, 15 bp, Homo sapiens
cacaaaagcaacatc

SEQ ID NO: 1049928 - DNA, 15 bp, Homo sapiens
acaaaagcaacatca

SEQ ID NO: 1049929 - DNA, 15 bp, Homo sapiens
caaaagcaacatcac

SEQ ID NO: 1049930 - DNA, 15 bp, Homo sapiens
aaaagcaacatcacc

SEQ ID NO: 1049931 - DNA, 15 bp, Homo sapiens
aaagcaacatcacct

SEQ ID NO: 1049932 - DNA, 15 bp, Homo sapiens
aagcaacatcacctt

SEQ ID NO: 1049933 - DNA, 15 bp, Homo sapiens
agcaacatcaccttc

SEQ ID NO: 1049934 - DNA, 15 bp, Homo sapiens
gcaacatcaccttca

SEQ ID NO: 1049935 - DNA, 15 bp, Homo sapiens
caacatcaccttcaa

SEQ ID NO: 1049936 - DNA, 15 bp, Homo sapiens
aacatcaccttcaac

SEQ ID NO: 1049937 - DNA, 15 bp, Homo sapiens
acatcaccttcaaca

SEQ ID NO: 1049938 - DNA, 15 bp, Homo sapiens
catcaccttcaacaa

SEQ ID NO: 1049939 - DNA, 15 bp, Homo sapiens
atcaccttcaacaac

SEQ ID NO: 1049940 - DNA, 15 bp, Homo sapiens
tcaccttcaacaaca

SEQ ID NO: 1049941 - DNA, 15 bp, Homo sapiens
caccttcaacaacaa

SEQ ID NO: 1049942 - DNA, 15 bp, Homo sapiens
accttcaacaacaac

SEQ ID NO: 1049943 - DNA, 15 bp, Homo sapiens
ccttcaacaacaacg

SEQ ID NO: 1049944 - DNA, 15 bp, Homo sapiens
cttcaacaacaacga

SEQ ID NO: 1049945 - DNA, 15 bp, Homo sapiens
ttcaacaacaacgac

SEQ ID NO: 1049946 - DNA, 15 bp, Homo sapiens
tcaacaacaacgaca

SEQ ID NO: 1049947 - DNA, 15 bp, Homo sapiens
caacaacaacgacac

SEQ ID NO: 1049948 - DNA, 15 bp, Homo sapiens
aacaacaacgacacc

SEQ ID NO: 1049949 - DNA, 15 bp, Homo sapiens
acaacaacgacaccg

SEQ ID NO: 1049950 - DNA, 15 bp, Homo sapiens
caacaacgacaccgt

SEQ ID NO: 1049951 - DNA, 15 bp, Homo sapiens
aacaacgacaccgtg

SEQ ID NO: 1049952 - DNA, 15 bp, Homo sapiens
acaacgacaccgtgt

SEQ ID NO: 1049953 - DNA, 15 bp, Homo sapiens
caacgacaccgtgtc

SEQ ID NO: 1049954 - DNA, 15 bp, Homo sapiens
aacgacaccgtgtcc

SEQ ID NO: 1049955 - DNA, 15 bp, Homo sapiens
acgacaccgtgtcct

SEQ ID NO: 1049956 - DNA, 15 bp, Homo sapiens
cgacaccgtgtcctt

SEQ ID NO: 1049957 - DNA, 15 bp, Homo sapiens
gacaccgtgtccttc

SEQ ID NO: 1049958 - DNA, 15 bp, Homo sapiens
acaccgtgtccttcc

SEQ ID NO: 1049959 - DNA, 15 bp, Homo sapiens
caccgtgtccttcct

SEQ ID NO: 1049960 - DNA, 15 bp, Homo sapiens
accgtgtccttcctc

SEQ ID NO: 1049961 - DNA, 15 bp, Homo sapiens
ccgtgtccttcctcg

SEQ ID NO: 1049962 - DNA, 15 bp, Homo sapiens
cgtgtccttcctcga

SEQ ID NO: 1049963 - DNA, 15 bp, Homo sapiens
gtgtccttcctcgag

SEQ ID NO: 1049964 - DNA, 15 bp, Homo sapiens
tgtccttcctcgagt

SEQ ID NO: 1049965 - DNA, 15 bp, Homo sapiens
gtccttcctcgagta

SEQ ID NO: 1049966 - DNA, 15 bp, Homo sapiens
tccttcctcgagtac

SEQ ID NO: 1049967 - DNA, 15 bp, Homo sapiens
ccttcctcgagtacc

SEQ ID NO: 1049968 - DNA, 15 bp, Homo sapiens
cttcctcgagtaccg

SEQ ID NO: 1049969 - DNA, 15 bp, Homo sapiens
ttcctcgagtaccgc

SEQ ID NO: 1049970 - DNA, 15 bp, Homo sapiens
tcctcgagtaccgca

SEQ ID NO: 1049971 - DNA, 15 bp, Homo sapiens
cctcgagtaccgcac

SEQ ID NO: 1049972 - DNA, 15 bp, Homo sapiens
ctcgagtaccgcacc

SEQ ID NO: 1049973 - DNA, 15 bp, Homo sapiens
tcgagtaccgcacct

SEQ ID NO: 1049974 - DNA, 15 bp, Homo sapiens
cgagtaccgcacctt

SEQ ID NO: 1049975 - DNA, 15 bp, Homo sapiens
gagtaccgcaccttc

SEQ ID NO: 1049976 - DNA, 15 bp, Homo sapiens
agtaccgcaccttcc

SEQ ID NO: 1049977 - DNA, 15 bp, Homo sapiens
gtaccgcaccttcca

SEQ ID NO: 1049978 - DNA, 15 bp, Homo sapiens
taccgcaccttccag

SEQ ID NO: 1049979 - DNA, 15 bp, Homo sapiens
accgcaccttccagt

SEQ ID NO: 1049980 - DNA, 15 bp, Homo sapiens
ccgcaccttccagtt

SEQ ID NO: 1049981 - DNA, 15 bp, Homo sapiens
cgcaccttccagttc

SEQ ID NO: 1049982 - DNA, 15 bp, Homo sapiens
gcaccttccagttcc

SEQ ID NO: 1049983 - DNA, 15 bp, Homo sapiens
caccttccagttcca

SEQ ID NO: 1049984 - DNA, 15 bp, Homo sapiens
accttccagttccag

SEQ ID NO: 1049985 - DNA, 15 bp, Homo sapiens
ccttccagttccagc

SEQ ID NO: 1049986 - DNA, 15 bp, Homo sapiens
cttccagttccagcc

SEQ ID NO: 1049987 - DNA, 15 bp, Homo sapiens
ttccagttccagccc

SEQ ID NO: 1049988 - DNA, 15 bp, Homo sapiens
tccagttccagccct

SEQ ID NO: 1049989 - DNA, 15 bp, Homo sapiens
ccagttccagccctc

SEQ ID NO: 1049990 - DNA, 15 bp, Homo sapiens
cagttccagccctcc

SEQ ID NO: 1049991 - DNA, 15 bp, Homo sapiens
agttccagccctcca

SEQ ID NO: 1049992 - DNA, 15 bp, Homo sapiens
gttccagccctccaa

SEQ ID NO: 1049993 - DNA, 15 bp, Homo sapiens
ttccagccctccaag

SEQ ID NO: 1049994 - DNA, 15 bp, Homo sapiens
tccagccctccaagt

SEQ ID NO: 1049995 - DNA, 15 bp, Homo sapiens
ccagccctccaagtc

SEQ ID NO: 1049996 - DNA, 15 bp, Homo sapiens
cagccctccaagtcc

SEQ ID NO: 1049997 - DNA, 15 bp, Homo sapiens
agccctccaagtccc

SEQ ID NO: 1049998 - DNA, 15 bp, Homo sapiens
gccctccaagtccca

SEQ ID NO: 1049999 - DNA, 15 bp, Homo sapiens
ccctccaagtcccac

SEQ ID NO: 1050000 - DNA, 15 bp, Homo sapiens
cctccaagtcccacg

SEQ ID NO: 1050001 - DNA, 15 bp, Homo sapiens
ctccaagtcccacgg

SEQ ID NO: 1050002 - DNA, 15 bp, Homo sapiens
tccaagtcccacggc

SEQ ID NO: 1050003 - DNA, 15 bp, Homo sapiens
ccaagtcccacggct

SEQ ID NO: 1050004 - DNA, 15 bp, Homo sapiens
caagtcccacggctc

SEQ ID NO: 1050005 - DNA, 15 bp, Homo sapiens
aagtcccacggctcg

SEQ ID NO: 1050006 - DNA, 15 bp, Homo sapiens
agtcccacggctcgg

SEQ ID NO: 1050007 - DNA, 15 bp, Homo sapiens
gtcccacggctcgga

SEQ ID NO: 1050008 - DNA, 15 bp, Homo sapiens
tcccacggctcggag

SEQ ID NO: 1050009 - DNA, 15 bp, Homo sapiens
cccacggctcggaga

SEQ ID NO: 1050010 - DNA, 15 bp, Homo sapiens
ccacggctcggagag

SEQ ID NO: 1050011 - DNA, 15 bp, Homo sapiens
cacggctcggagagc

SEQ ID NO: 1050012 - DNA, 15 bp, Homo sapiens
acggctcggagagcg

SEQ ID NO: 1050013 - DNA, 15 bp, Homo sapiens
cggctcggagagcga

SEQ ID NO: 1050014 - DNA, 15 bp, Homo sapiens
ggctcggagagcgac

SEQ ID NO: 1050015 - DNA, 15 bp, Homo sapiens
gctcggagagcgact

SEQ ID NO: 1050016 - DNA, 15 bp, Homo sapiens
ctcggagagcgacta

SEQ ID NO: 1050017 - DNA, 15 bp, Homo sapiens
tcggagagcgactac

SEQ ID NO: 1050018 - DNA, 15 bp, Homo sapiens
cggagagcgactaca

SEQ ID NO: 1050019 - DNA, 15 bp, Homo sapiens
ggagagcgactacat

SEQ ID NO: 1050020 - DNA, 15 bp, Homo sapiens
gagagcgactacatc

SEQ ID NO: 1050021 - DNA, 15 bp, Homo sapiens
agagcgactacatcg

SEQ ID NO: 1050022 - DNA, 15 bp, Homo sapiens
gagcgactacatcgt

SEQ ID NO: 1050023 - DNA, 15 bp, Homo sapiens
agcgactacatcgtc

SEQ ID NO: 1050024 - DNA, 15 bp, Homo sapiens
gcgactacatcgtca

SEQ ID NO: 1050025 - DNA, 15 bp, Homo sapiens
cgactacatcgtcat

SEQ ID NO: 1050026 - DNA, 15 bp, Homo sapiens
gactacatcgtcatg

SEQ ID NO: 1050027 - DNA, 15 bp, Homo sapiens
actacatcgtcatgc

SEQ ID NO: 1050028 - DNA, 15 bp, Homo sapiens
ctacatcgtcatgcc

SEQ ID NO: 1050029 - DNA, 15 bp, Homo sapiens
tacatcgtcatgccc

SEQ ID NO: 1050030 - DNA, 15 bp, Homo sapiens
acatcgtcatgccca

SEQ ID NO: 1050031 - DNA, 15 bp, Homo sapiens
catcgtcatgcccaa

SEQ ID NO: 1050032 - DNA, 15 bp, Homo sapiens
atcgtcatgcccaac

SEQ ID NO: 1050033 - DNA, 15 bp, Homo sapiens
tcgtcatgcccaaca

SEQ ID NO: 1050034 - DNA, 15 bp, Homo sapiens
cgtcatgcccaacat

SEQ ID NO: 1050035 - DNA, 15 bp, Homo sapiens
gtcatgcccaacatc

SEQ ID NO: 1050036 - DNA, 15 bp, Homo sapiens
tcatgcccaacatcc

SEQ ID NO: 1050037 - DNA, 15 bp, Homo sapiens
catgcccaacatcct

SEQ ID NO: 1050038 - DNA, 15 bp, Homo sapiens
atgcccaacatcctg

SEQ ID NO: 1050039 - DNA, 15 bp, Homo sapiens
tgcccaacatcctgg

SEQ ID NO: 1050040 - DNA, 15 bp, Homo sapiens
gcccaacatcctggt

SEQ ID NO: 1050041 - DNA, 15 bp, Homo sapiens
cccaacatcctggtc

SEQ ID NO: 1050042 - DNA, 15 bp, Homo sapiens
ccaacatcctggtct

SEQ ID NO: 1050043 - DNA, 15 bp, Homo sapiens
caacatcctggtctt

SEQ ID NO: 1050044 - DNA, 15 bp, Homo sapiens
aacatcctggtcttg

SEQ ID NO: 1050045 - DNA, 15 bp, Homo sapiens
acatcctggtcttgg

SEQ ID NO: 1050046 - DNA, 15 bp, Homo sapiens
catcctggtcttggt

SEQ ID NO: 1050047 - DNA, 15 bp, Homo sapiens
atcctggtcttggtg

SEQ ID NO: 1050048 - DNA, 15 bp, Homo sapiens
tcctggtcttggtga

SEQ ID NO: 1050049 - DNA, 15 bp, Homo sapiens
cctggtcttggtgag

SEQ ID NO: 1050050 - DNA, 15 bp, Homo sapiens
ctggtcttggtgagg

SEQ ID NO: 1050051 - DNA, 15 bp, Homo sapiens
tggtcttggtgaggc

SEQ ID NO: 1050052 - DNA, 15 bp, Homo sapiens
ggtcttggtgaggct

SEQ ID NO: 1050053 - DNA, 15 bp, Homo sapiens
gtcttggtgaggctg

SEQ ID NO: 1050054 - DNA, 15 bp, Homo sapiens
tcttggtgaggctgc

SEQ ID NO: 1050055 - DNA, 15 bp, Homo sapiens
cttggtgaggctgcc

SEQ ID NO: 1050056 - DNA, 15 bp, Homo sapiens
ttggtgaggctgccc

SEQ ID NO: 1050057 - DNA, 15 bp, Homo sapiens
tggtgaggctgccct

SEQ ID NO: 1050058 - DNA, 15 bp, Homo sapiens
ggtgaggctgccctg

SEQ ID NO: 1050059 - DNA, 15 bp, Homo sapiens
gtgaggctgccctgt

SEQ ID NO: 1050060 - DNA, 15 bp, Homo sapiens
tgaggctgccctgtg

SEQ ID NO: 1050061 - DNA, 15 bp, Homo sapiens
gaggctgccctgtgg

SEQ ID NO: 1050062 - DNA, 15 bp, Homo sapiens
aggctgccctgtggc

SEQ ID NO: 1050063 - DNA, 15 bp, Homo sapiens
ggctgccctgtggcc

SEQ ID NO: 1050064 - DNA, 15 bp, Homo sapiens
gctgccctgtggccc

SEQ ID NO: 1050065 - DNA, 15 bp, Homo sapiens
ctgccctgtggccca

SEQ ID NO: 1050066 - DNA, 15 bp, Homo sapiens
tgccctgtggcccac

SEQ ID NO: 1050067 - DNA, 15 bp, Homo sapiens
gccctgtggcccacg

SEQ ID NO: 1050068 - DNA, 15 bp, Homo sapiens
ccctgtggcccacgc

SEQ ID NO: 1050069 - DNA, 15 bp, Homo sapiens
cctgtggcccacgcc

SEQ ID NO: 1050070 - DNA, 15 bp, Homo sapiens
ctgtggcccacgccg

SEQ ID NO: 1050071 - DNA, 15 bp, Homo sapiens
tgtggcccacgccgc

SEQ ID NO: 1050072 - DNA, 15 bp, Homo sapiens
gtggcccacgccgcc

SEQ ID NO: 1050073 - DNA, 15 bp, Homo sapiens
tggcccacgccgcct

SEQ ID NO: 1050074 - DNA, 15 bp, Homo sapiens
ggcccacgccgcctc

SEQ ID NO: 1050075 - DNA, 15 bp, Homo sapiens
gcccacgccgcctcg

SEQ ID NO: 1050076 - DNA, 15 bp, Homo sapiens
cccacgccgcctcgc

SEQ ID NO: 1050077 - DNA, 15 bp, Homo sapiens
ccacgccgcctcgca

SEQ ID NO: 1050078 - DNA, 15 bp, Homo sapiens
cacgccgcctcgcac

SEQ ID NO: 1050079 - DNA, 15 bp, Homo sapiens
acgccgcctcgcacc

SEQ ID NO: 1050080 - DNA, 15 bp, Homo sapiens
cgccgcctcgcaccc

SEQ ID NO: 1050081 - DNA, 15 bp, Homo sapiens
gccgcctcgcaccct

SEQ ID NO: 1050082 - DNA, 15 bp, Homo sapiens
ccgcctcgcaccctg

SEQ ID NO: 1050083 - DNA, 15 bp, Homo sapiens
cgcctcgcaccctga

SEQ ID NO: 1050084 - DNA, 15 bp, Homo sapiens
gcctcgcaccctgac

SEQ ID NO: 1050085 - DNA, 15 bp, Homo sapiens
cctcgcaccctgacc

SEQ ID NO: 1050086 - DNA, 15 bp, Homo sapiens
ctcgcaccctgacct

SEQ ID NO: 1050087 - DNA, 15 bp, Homo sapiens
tcgcaccctgacctc

SEQ ID NO: 1050088 - DNA, 15 bp, Homo sapiens
cgcaccctgacctcg

SEQ ID NO: 1050089 - DNA, 15 bp, Homo sapiens
gcaccctgacctcgt

SEQ ID NO: 1050090 - DNA, 15 bp, Homo sapiens
caccctgacctcgtc

SEQ ID NO: 1050091 - DNA, 15 bp, Homo sapiens
accctgacctcgtcc

SEQ ID NO: 1050092 - DNA, 15 bp, Homo sapiens
ccctgacctcgtccc

SEQ ID NO: 1050093 - DNA, 15 bp, Homo sapiens
cctgacctcgtcccc

SEQ ID NO: 1050094 - DNA, 15 bp, Homo sapiens
ctgacctcgtcccct

SEQ ID NO: 1050095 - DNA, 15 bp, Homo sapiens
tgacctcgtcccctg

SEQ ID NO: 1050096 - DNA, 15 bp, Homo sapiens
gacctcgtcccctgt

SEQ ID NO: 1050097 - DNA, 15 bp, Homo sapiens
acctcgtcccctgtc

SEQ ID NO: 1050098 - DNA, 15 bp, Homo sapiens
cctcgtcccctgtct

SEQ ID NO: 1050099 - DNA, 15 bp, Homo sapiens
ctcgtcccctgtctc

SEQ ID NO: 1050100 - DNA, 15 bp, Homo sapiens
tcgtcccctgtctct

SEQ ID NO: 1050101 - DNA, 15 bp, Homo sapiens
cgtcccctgtctctc

SEQ ID NO: 1050102 - DNA, 15 bp, Homo sapiens
gtcccctgtctctcc

SEQ ID NO: 1050103 - DNA, 15 bp, Homo sapiens
tcccctgtctctcct

SEQ ID NO: 1050104 - DNA, 15 bp, Homo sapiens
cccctgtctctcctc

SEQ ID NO: 1050105 - DNA, 15 bp, Homo sapiens
ccctgtctctcctcc

SEQ ID NO: 1050106 - DNA, 15 bp, Homo sapiens
cctgtctctcctccc

SEQ ID NO: 1050107 - DNA, 15 bp, Homo sapiens
ctgtctctcctcccg

SEQ ID NO: 1050108 - DNA, 15 bp, Homo sapiens
tgtctctcctcccgc

SEQ ID NO: 1050109 - DNA, 15 bp, Homo sapiens
gtctctcctcccgcc

SEQ ID NO: 1050110 - DNA, 15 bp, Homo sapiens
tctctcctcccgcct

SEQ ID NO: 1050111 - DNA, 15 bp, Homo sapiens
ctctcctcccgcctg

SEQ ID NO: 1050112 - DNA, 15 bp, Homo sapiens
tctcctcccgcctgc

SEQ ID NO: 1050113 - DNA, 15 bp, Homo sapiens
ctcctcccgcctgcc

SEQ ID NO: 1050114 - DNA, 15 bp, Homo sapiens
tcctcccgcctgccc

SEQ ID NO: 1050115 - DNA, 15 bp, Homo sapiens
cctcccgcctgcccc

SEQ ID NO: 1050116 - DNA, 15 bp, Homo sapiens
ctcccgcctgcccct

SEQ ID NO: 1050117 - DNA, 15 bp, Homo sapiens
tcccgcctgcccctt

SEQ ID NO: 1050118 - DNA, 15 bp, Homo sapiens
cccgcctgccccttg

SEQ ID NO: 1050119 - DNA, 15 bp, Homo sapiens
ccgcctgccccttgt

SEQ ID NO: 1050120 - DNA, 15 bp, Homo sapiens
cgcctgccccttgtg

SEQ ID NO: 1050121 - DNA, 15 bp, Homo sapiens
gcctgccccttgtgc

SEQ ID NO: 1050122 - DNA, 15 bp, Homo sapiens
cctgccccttgtgca

SEQ ID NO: 1050123 - DNA, 15 bp, Homo sapiens
ctgccccttgtgcag

SEQ ID NO: 1050124 - DNA, 15 bp, Homo sapiens
tgccccttgtgcaga

SEQ ID NO: 1050125 - DNA, 15 bp, Homo sapiens
gccccttgtgcagag

SEQ ID NO: 1050126 - DNA, 15 bp, Homo sapiens
ccccttgtgcagaga

SEQ ID NO: 1050127 - DNA, 15 bp, Homo sapiens
cccttgtgcagagag

SEQ ID NO: 1050128 - DNA, 15 bp, Homo sapiens
ccttgtgcagagagc

SEQ ID NO: 1050129 - DNA, 15 bp, Homo sapiens
cttgtgcagagagca

SEQ ID NO: 1050130 - DNA, 15 bp, Homo sapiens
ttgtgcagagagcag

SEQ ID NO: 1050131 - DNA, 15 bp, Homo sapiens
tgtgcagagagcagt

SEQ ID NO: 1050132 - DNA, 15 bp, Homo sapiens
gtgcagagagcagtc

SEQ ID NO: 1050133 - DNA, 15 bp, Homo sapiens
tgcagagagcagtcc

SEQ ID NO: 1050134 - DNA, 15 bp, Homo sapiens
gcagagagcagtccc

SEQ ID NO: 1050135 - DNA, 15 bp, Homo sapiens
cagagagcagtccct

SEQ ID NO: 1050136 - DNA, 15 bp, Homo sapiens
agagagcagtccctg

SEQ ID NO: 1050137 - DNA, 15 bp, Homo sapiens
gagagcagtccctga

SEQ ID NO: 1050138 - DNA, 15 bp, Homo sapiens
agagcagtccctgag

SEQ ID NO: 1050139 - DNA, 15 bp, Homo sapiens
gagcagtccctgagg

SEQ ID NO: 1050140 - DNA, 15 bp, Homo sapiens
agcagtccctgaggt

SEQ ID NO: 1050141 - DNA, 15 bp, Homo sapiens
gcagtccctgaggtg

SEQ ID NO: 1050142 - DNA, 15 bp, Homo sapiens
cagtccctgaggtgg

SEQ ID NO: 1050143 - DNA, 15 bp, Homo sapiens
agtccctgaggtggt

SEQ ID NO: 1050144 - DNA, 15 bp, Homo sapiens
gtccctgaggtggtc

SEQ ID NO: 1050145 - DNA, 15 bp, Homo sapiens
tccctgaggtggtcg

SEQ ID NO: 1050146 - DNA, 15 bp, Homo sapiens
ccctgaggtggtcgg

SEQ ID NO: 1050147 - DNA, 15 bp, Homo sapiens
cctgaggtggtcgga

SEQ ID NO: 1050148 - DNA, 15 bp, Homo sapiens
ctgaggtggtcggag

SEQ ID NO: 1050149 - DNA, 15 bp, Homo sapiens
tgaggtggtcggagc

SEQ ID NO: 1050150 - DNA, 15 bp, Homo sapiens
gaggtggtcggagcg

SEQ ID NO: 1050151 - DNA, 15 bp, Homo sapiens
aggtggtcggagcgt

SEQ ID NO: 1050152 - DNA, 15 bp, Homo sapiens
ggtggtcggagcgtg

SEQ ID NO: 1050153 - DNA, 15 bp, Homo sapiens
gtggtcggagcgtgg

SEQ ID NO: 1050154 - DNA, 15 bp, Homo sapiens
tggtcggagcgtggg

SEQ ID NO: 1050155 - DNA, 15 bp, Homo sapiens
ggtcggagcgtgggg

SEQ ID NO: 1050156 - DNA, 15 bp, Homo sapiens
gtcggagcgtgggga

SEQ ID NO: 1050157 - DNA, 15 bp, Homo sapiens
tcggagcgtggggac

SEQ ID NO: 1050158 - DNA, 15 bp, Homo sapiens
cggagcgtggggact

SEQ ID NO: 1050159 - DNA, 15 bp, Homo sapiens
ggagcgtggggactc

SEQ ID NO: 1050160 - DNA, 15 bp, Homo sapiens
gagcgtggggactca

SEQ ID NO: 1050161 - DNA, 15 bp, Homo sapiens
agcgtggggactcac

SEQ ID NO: 1050162 - DNA, 15 bp, Homo sapiens
gcgtggggactcacg

SEQ ID NO: 1050163 - DNA, 15 bp, Homo sapiens
cgtggggactcacgc

SEQ ID NO: 1050164 - DNA, 15 bp, Homo sapiens
gtggggactcacgcc

SEQ ID NO: 1050165 - DNA, 15 bp, Homo sapiens
tggggactcacgcct

SEQ ID NO: 1050166 - DNA, 15 bp, Homo sapiens
ggggactcacgcctg

SEQ ID NO: 1050167 - DNA, 15 bp, Homo sapiens
gggactcacgcctgg

SEQ ID NO: 1050168 - DNA, 15 bp, Homo sapiens
ggactcacgcctggt

SEQ ID NO: 1050169 - DNA, 15 bp, Homo sapiens
gactcacgcctggtg

SEQ ID NO: 1050170 - DNA, 15 bp, Homo sapiens
actcacgcctggtgg

SEQ ID NO: 1050171 - DNA, 15 bp, Homo sapiens
ctcacgcctggtggg

SEQ ID NO: 1050172 - DNA, 15 bp, Homo sapiens
tcacgcctggtgggt

SEQ ID NO: 1050173 - DNA, 15 bp, Homo sapiens
cacgcctggtgggtg

SEQ ID NO: 1050174 - DNA, 15 bp, Homo sapiens
acgcctggtgggtgg

SEQ ID NO: 1050175 - DNA, 15 bp, Homo sapiens
cgcctggtgggtggc

SEQ ID NO: 1050176 - DNA, 15 bp, Homo sapiens
gcctggtgggtggct

SEQ ID NO: 1050177 - DNA, 15 bp, Homo sapiens
cctggtgggtggctt

SEQ ID NO: 1050178 - DNA, 15 bp, Homo sapiens
ctggtgggtggcttt

SEQ ID NO: 1050179 - DNA, 15 bp, Homo sapiens
tggtgggtggctttc

SEQ ID NO: 1050180 - DNA, 15 bp, Homo sapiens
ggtgggtggctttcg

SEQ ID NO: 1050181 - DNA, 15 bp, Homo sapiens
gtgggtggctttcgg

SEQ ID NO: 1050182 - DNA, 15 bp, Homo sapiens
tgggtggctttcggc

SEQ ID NO: 1050183 - DNA, 15 bp, Homo sapiens
gggtggctttcggcc

SEQ ID NO: 1050184 - DNA, 15 bp, Homo sapiens
ggtggctttcggccc

SEQ ID NO: 1050185 - DNA, 15 bp, Homo sapiens
gtggctttcggccct

SEQ ID NO: 1050186 - DNA, 15 bp, Homo sapiens
tggctttcggccctg

SEQ ID NO: 1050187 - DNA, 15 bp, Homo sapiens
ggctttcggccctgt

SEQ ID NO: 1050188 - DNA, 15 bp, Homo sapiens
gctttcggccctgtg

SEQ ID NO: 1050189 - DNA, 15 bp, Homo sapiens
ctttcggccctgtgc

SEQ ID NO: 1050190 - DNA, 15 bp, Homo sapiens
tttcggccctgtgct

SEQ ID NO: 1050191 - DNA, 15 bp, Homo sapiens
ttcggccctgtgctg

SEQ ID NO: 1050192 - DNA, 15 bp, Homo sapiens
tcggccctgtgctgt

SEQ ID NO: 1050193 - DNA, 15 bp, Homo sapiens
cggccctgtgctgtc

SEQ ID NO: 1050194 - DNA, 15 bp, Homo sapiens
ggccctgtgctgtct

SEQ ID NO: 1050195 - DNA, 15 bp, Homo sapiens
gccctgtgctgtctc

SEQ ID NO: 1050196 - DNA, 15 bp, Homo sapiens
ccctgtgctgtctcc

SEQ ID NO: 1050197 - DNA, 15 bp, Homo sapiens
cctgtgctgtctcca

SEQ ID NO: 1050198 - DNA, 15 bp, Homo sapiens
ctgtgctgtctccac

SEQ ID NO: 1050199 - DNA, 15 bp, Homo sapiens
tgtgctgtctccacc

SEQ ID NO: 1050200 - DNA, 15 bp, Homo sapiens
gtgctgtctccacca

SEQ ID NO: 1050201 - DNA, 15 bp, Homo sapiens
tgctgtctccaccac

SEQ ID NO: 1050202 - DNA, 15 bp, Homo sapiens
gctgtctccaccacc

SEQ ID NO: 1050203 - DNA, 15 bp, Homo sapiens
ctgtctccaccaccc

SEQ ID NO: 1050204 - DNA, 15 bp, Homo sapiens
tgtctccaccacccc

SEQ ID NO: 1050205 - DNA, 15 bp, Homo sapiens
gtctccaccaccccc

SEQ ID NO: 1050206 - DNA, 15 bp, Homo sapiens
tctccaccaccccca

SEQ ID NO: 1050207 - DNA, 15 bp, Homo sapiens
ctccaccacccccag

SEQ ID NO: 1050208 - DNA, 15 bp, Homo sapiens
tccaccacccccagt

SEQ ID NO: 1050209 - DNA, 15 bp, Homo sapiens
ccaccacccccagtg

SEQ ID NO: 1050210 - DNA, 15 bp, Homo sapiens
caccacccccagtgg

SEQ ID NO: 1050211 - DNA, 15 bp, Homo sapiens
accacccccagtggg

SEQ ID NO: 1050212 - DNA, 15 bp, Homo sapiens
ccacccccagtgggt

SEQ ID NO: 1050213 - DNA, 15 bp, Homo sapiens
cacccccagtgggtt

SEQ ID NO: 1050214 - DNA, 15 bp, Homo sapiens
acccccagtgggttc

SEQ ID NO: 1050215 - DNA, 15 bp, Homo sapiens
cccccagtgggttct

SEQ ID NO: 1050216 - DNA, 15 bp, Homo sapiens
ccccagtgggttctg

SEQ ID NO: 1050217 - DNA, 15 bp, Homo sapiens
cccagtgggttctga

SEQ ID NO: 1050218 - DNA, 15 bp, Homo sapiens
ccagtgggttctgag

SEQ ID NO: 1050219 - DNA, 15 bp, Homo sapiens
cagtgggttctgagt

SEQ ID NO: 1050220 - DNA, 15 bp, Homo sapiens
agtgggttctgagtt

SEQ ID NO: 1050221 - DNA, 15 bp, Homo sapiens
gtgggttctgagttt

SEQ ID NO: 1050222 - DNA, 15 bp, Homo sapiens
tgggttctgagtttc

SEQ ID NO: 1050223 - DNA, 15 bp, Homo sapiens
gggttctgagtttcc

SEQ ID NO: 1050224 - DNA, 15 bp, Homo sapiens
ggttctgagtttccc

SEQ ID NO: 1050225 - DNA, 15 bp, Homo sapiens
gttctgagtttccca

SEQ ID NO: 1050226 - DNA, 15 bp, Homo sapiens
ttctgagtttcccag

SEQ ID NO: 1050227 - DNA, 15 bp, Homo sapiens
tctgagtttcccagg

SEQ ID NO: 1050228 - DNA, 15 bp, Homo sapiens
ctgagtttcccaggt

SEQ ID NO: 1050229 - DNA, 15 bp, Homo sapiens
tgagtttcccaggtg

SEQ ID NO: 1050230 - DNA, 15 bp, Homo sapiens
gagtttcccaggtgg

SEQ ID NO: 1050231 - DNA, 15 bp, Homo sapiens
agtttcccaggtggg

SEQ ID NO: 1050232 - DNA, 15 bp, Homo sapiens
gtttcccaggtgggt

SEQ ID NO: 1050233 - DNA, 15 bp, Homo sapiens
tttcccaggtgggtc

SEQ ID NO: 1050234 - DNA, 15 bp, Homo sapiens
ttcccaggtgggtcc

SEQ ID NO: 1050235 - DNA, 15 bp, Homo sapiens
tcccaggtgggtcca

SEQ ID NO: 1050236 - DNA, 15 bp, Homo sapiens
cccaggtgggtccac

SEQ ID NO: 1050237 - DNA, 15 bp, Homo sapiens
ccaggtgggtccacc

SEQ ID NO: 1050238 - DNA, 15 bp, Homo sapiens
caggtgggtccacct

SEQ ID NO: 1050239 - DNA, 15 bp, Homo sapiens
aggtgggtccacctg

SEQ ID NO: 1050240 - DNA, 15 bp, Homo sapiens
ggtgggtccacctgt

SEQ ID NO: 1050241 - DNA, 15 bp, Homo sapiens
gtgggtccacctgtc

SEQ ID NO: 1050242 - DNA, 15 bp, Homo sapiens
tgggtccacctgtct

SEQ ID NO: 1050243 - DNA, 15 bp, Homo sapiens
gggtccacctgtctt

SEQ ID NO: 1050244 - DNA, 15 bp, Homo sapiens
ggtccacctgtcttg

SEQ ID NO: 1050245 - DNA, 15 bp, Homo sapiens
gtccacctgtcttgg

SEQ ID NO: 1050246 - DNA, 15 bp, Homo sapiens
tccacctgtcttggt

SEQ ID NO: 1050247 - DNA, 15 bp, Homo sapiens
ccacctgtcttggtt

SEQ ID NO: 1050248 - DNA, 15 bp, Homo sapiens
cacctgtcttggttt

SEQ ID NO: 1050249 - DNA, 15 bp, Homo sapiens
acctgtcttggtttg

SEQ ID NO: 1050250 - DNA, 15 bp, Homo sapiens
cctgtcttggtttgg

SEQ ID NO: 1050251 - DNA, 15 bp, Homo sapiens
ctgtcttggtttgga

SEQ ID NO: 1050252 - DNA, 15 bp, Homo sapiens
tgtcttggtttggaa

SEQ ID NO: 1050253 - DNA, 15 bp, Homo sapiens
gtcttggtttggaag

SEQ ID NO: 1050254 - DNA, 15 bp, Homo sapiens
tcttggtttggaagt

SEQ ID NO: 1050255 - DNA, 15 bp, Homo sapiens
cttggtttggaagtc

SEQ ID NO: 1050256 - DNA, 15 bp, Homo sapiens
ttggtttggaagtcc

SEQ ID NO: 1050257 - DNA, 15 bp, Homo sapiens
tggtttggaagtcct

SEQ ID NO: 1050258 - DNA, 15 bp, Homo sapiens
ggtttggaagtcctg

SEQ ID NO: 1050259 - DNA, 15 bp, Homo sapiens
gtttggaagtcctgg

SEQ ID NO: 1050260 - DNA, 15 bp, Homo sapiens
tttggaagtcctggc

SEQ ID NO: 1050261 - DNA, 15 bp, Homo sapiens
ttggaagtcctggcc

SEQ ID NO: 1050262 - DNA, 15 bp, Homo sapiens
tggaagtcctggcca

SEQ ID NO: 1050263 - DNA, 15 bp, Homo sapiens
ggaagtcctggccaa

SEQ ID NO: 1050264 - DNA, 15 bp, Homo sapiens
gaagtcctggccaaa

SEQ ID NO: 1050265 - DNA, 15 bp, Homo sapiens
aagtcctggccaaag

SEQ ID NO: 1050266 - DNA, 15 bp, Homo sapiens
agtcctggccaaagt

SEQ ID NO: 1050267 - DNA, 15 bp, Homo sapiens
gtcctggccaaagta

SEQ ID NO: 1050268 - DNA, 15 bp, Homo sapiens
tcctggccaaagtac

SEQ ID NO: 1050269 - DNA, 15 bp, Homo sapiens
cctggccaaagtact

SEQ ID NO: 1050270 - DNA, 15 bp, Homo sapiens
ctggccaaagtactt

SEQ ID NO: 1050271 - DNA, 15 bp, Homo sapiens
tggccaaagtacttt

SEQ ID NO: 1050272 - DNA, 15 bp, Homo sapiens
ggccaaagtactttt

SEQ ID NO: 1050273 - DNA, 15 bp, Homo sapiens
gccaaagtacttttt

SEQ ID NO: 1050274 - DNA, 15 bp, Homo sapiens
ccaaagtactttttt

SEQ ID NO: 1050275 - DNA, 15 bp, Homo sapiens
caaagtacttttttt

SEQ ID NO: 1050276 - DNA, 15 bp, Homo sapiens
aaagtactttttttt

SEQ ID NO: 1050277 - DNA, 15 bp, Homo sapiens
aagtacttttttttc

SEQ ID NO: 1050278 - DNA, 15 bp, Homo sapiens
agtacttttttttcc

SEQ ID NO: 1050279 - DNA, 15 bp, Homo sapiens
gtacttttttttccc

SEQ ID NO: 1050280 - DNA, 15 bp, Homo sapiens
tacttttttttccct

SEQ ID NO: 1050281 - DNA, 15 bp, Homo sapiens
acttttttttccctt

SEQ ID NO: 1050282 - DNA, 15 bp, Homo sapiens
cttttttttcccttt

SEQ ID NO: 1050283 - DNA, 15 bp, Homo sapiens
ttttttttccctttt

SEQ ID NO: 1050284 - DNA, 15 bp, Homo sapiens
tttttttcccttttc

SEQ ID NO: 1050285 - DNA, 15 bp, Homo sapiens
ttttttcccttttca

SEQ ID NO: 1050286 - DNA, 15 bp, Homo sapiens
tttttcccttttcaa

SEQ ID NO: 1050287 - DNA, 15 bp, Homo sapiens
ttttcccttttcaat

SEQ ID NO: 1050288 - DNA, 15 bp, Homo sapiens
tttcccttttcaatt

SEQ ID NO: 1050289 - DNA, 15 bp, Homo sapiens
ttcccttttcaattt

SEQ ID NO: 1050290 - DNA, 15 bp, Homo sapiens
tcccttttcaattta

SEQ ID NO: 1050291 - DNA, 15 bp, Homo sapiens
cccttttcaatttac

SEQ ID NO: 1050292 - DNA, 15 bp, Homo sapiens
ccttttcaatttaca

SEQ ID NO: 1050293 - DNA, 15 bp, Homo sapiens
cttttcaatttacat

SEQ ID NO: 1050294 - DNA, 15 bp, Homo sapiens
ttttcaatttacatt

SEQ ID NO: 1050295 - DNA, 15 bp, Homo sapiens
tttcaatttacattt

SEQ ID NO: 1050296 - DNA, 15 bp, Homo sapiens
ttcaatttacatttc

SEQ ID NO: 1050297 - DNA, 15 bp, Homo sapiens
tcaatttacatttct

SEQ ID NO: 1050298 - DNA, 15 bp, Homo sapiens
caatttacatttctg

SEQ ID NO: 1050299 - DNA, 15 bp, Homo sapiens
aatttacatttctga

SEQ ID NO: 1050300 - DNA, 15 bp, Homo sapiens
atttacatttctgag

SEQ ID NO: 1050301 - DNA, 15 bp, Homo sapiens
tttacatttctgaga

SEQ ID NO: 1050302 - DNA, 15 bp, Homo sapiens
ttacatttctgagat

SEQ ID NO: 1050303 - DNA, 15 bp, Homo sapiens
tacatttctgagatc

SEQ ID NO: 1050304 - DNA, 15 bp, Homo sapiens
acatttctgagatct

SEQ ID NO: 1050305 - DNA, 15 bp, Homo sapiens
catttctgagatctc

SEQ ID NO: 1050306 - DNA, 15 bp, Homo sapiens
atttctgagatctcc

SEQ ID NO: 1050307 - DNA, 15 bp, Homo sapiens
tttctgagatctcca

SEQ ID NO: 1050308 - DNA, 15 bp, Homo sapiens
ttctgagatctccaa

SEQ ID NO: 1050309 - DNA, 15 bp, Homo sapiens
tctgagatctccaaa

SEQ ID NO: 1050310 - DNA, 15 bp, Homo sapiens
ctgagatctccaaaa

SEQ ID NO: 1050311 - DNA, 15 bp, Homo sapiens
tgagatctccaaaag

SEQ ID NO: 1050312 - DNA, 15 bp, Homo sapiens
gagatctccaaaagg

SEQ ID NO: 1050313 - DNA, 15 bp, Homo sapiens
agatctccaaaaggg

SEQ ID NO: 1050314 - DNA, 15 bp, Homo sapiens
gatctccaaaagggg

SEQ ID NO: 1050315 - DNA, 15 bp, Homo sapiens
atctccaaaaggggc

SEQ ID NO: 1050316 - DNA, 15 bp, Homo sapiens
tctccaaaaggggct

SEQ ID NO: 1050317 - DNA, 15 bp, Homo sapiens
ctccaaaaggggctg

SEQ ID NO: 1050318 - DNA, 15 bp, Homo sapiens
tccaaaaggggctgt

SEQ ID NO: 1050319 - DNA, 15 bp, Homo sapiens
ccaaaaggggctgtc

SEQ ID NO: 1050320 - DNA, 15 bp, Homo sapiens
caaaaggggctgtct

SEQ ID NO: 1050321 - DNA, 15 bp, Homo sapiens
aaaaggggctgtctt

SEQ ID NO: 1050322 - DNA, 15 bp, Homo sapiens
aaaggggctgtcttg

SEQ ID NO: 1050323 - DNA, 15 bp, Homo sapiens
aaggggctgtcttgt

SEQ ID NO: 1050324 - DNA, 15 bp, Homo sapiens
aggggctgtcttgtt

SEQ ID NO: 1050325 - DNA, 15 bp, Homo sapiens
ggggctgtcttgttg

SEQ ID NO: 1050326 - DNA, 15 bp, Homo sapiens
gggctgtcttgttga

SEQ ID NO: 1050327 - DNA, 15 bp, Homo sapiens
ggctgtcttgttgag

SEQ ID NO: 1050328 - DNA, 15 bp, Homo sapiens
gctgtcttgttgagg

SEQ ID NO: 1050329 - DNA, 15 bp, Homo sapiens
ctgtcttgttgaggg

SEQ ID NO: 1050330 - DNA, 15 bp, Homo sapiens
tgtcttgttgagggc

SEQ ID NO: 1050331 - DNA, 15 bp, Homo sapiens
gtcttgttgagggct

SEQ ID NO: 1050332 - DNA, 15 bp, Homo sapiens
tcttgttgagggctg

SEQ ID NO: 1050333 - DNA, 15 bp, Homo sapiens
cttgttgagggctga

SEQ ID NO: 1050334 - DNA, 15 bp, Homo sapiens
ttgttgagggctgag

SEQ ID NO: 1050335 - DNA, 15 bp, Homo sapiens
tgttgagggctgagc

SEQ ID NO: 1050336 - DNA, 15 bp, Homo sapiens
gttgagggctgagcc

SEQ ID NO: 1050337 - DNA, 15 bp, Homo sapiens
ttgagggctgagcca

SEQ ID NO: 1050338 - DNA, 15 bp, Homo sapiens
tgagggctgagccac

SEQ ID NO: 1050339 - DNA, 15 bp, Homo sapiens
gagggctgagccaca

SEQ ID NO: 1050340 - DNA, 15 bp, Homo sapiens
agggctgagccacag

SEQ ID NO: 1050341 - DNA, 15 bp, Homo sapiens
gggctgagccacagg

SEQ ID NO: 1050342 - DNA, 15 bp, Homo sapiens
ggctgagccacaggc

SEQ ID NO: 1050343 - DNA, 15 bp, Homo sapiens
gctgagccacaggcc

SEQ ID NO: 1050344 - DNA, 15 bp, Homo sapiens
ctgagccacaggccc

SEQ ID NO: 1050345 - DNA, 15 bp, Homo sapiens
tgagccacaggcccg

SEQ ID NO: 1050346 - DNA, 15 bp, Homo sapiens
gagccacaggcccgc

SEQ ID NO: 1050347 - DNA, 15 bp, Homo sapiens
agccacaggcccgcc

SEQ ID NO: 1050348 - DNA, 15 bp, Homo sapiens
gccacaggcccgcct

SEQ ID NO: 1050349 - DNA, 15 bp, Homo sapiens
ccacaggcccgcctc

SEQ ID NO: 1050350 - DNA, 15 bp, Homo sapiens
cacaggcccgcctct

SEQ ID NO: 1050351 - DNA, 15 bp, Homo sapiens
acaggcccgcctctg

SEQ ID NO: 1050352 - DNA, 15 bp, Homo sapiens
caggcccgcctctgg

SEQ ID NO: 1050353 - DNA, 15 bp, Homo sapiens
aggcccgcctctggg

SEQ ID NO: 1050354 - DNA, 15 bp, Homo sapiens
ggcccgcctctggga

SEQ ID NO: 1050355 - DNA, 15 bp, Homo sapiens
gcccgcctctgggac

SEQ ID NO: 1050356 - DNA, 15 bp, Homo sapiens
cccgcctctgggact

SEQ ID NO: 1050357 - DNA, 15 bp, Homo sapiens
ccgcctctgggactg

SEQ ID NO: 1050358 - DNA, 15 bp, Homo sapiens
cgcctctgggactgg

SEQ ID NO: 1050359 - DNA, 15 bp, Homo sapiens
gcctctgggactggg

SEQ ID NO: 1050360 - DNA, 15 bp, Homo sapiens
cctctgggactgggg

SEQ ID NO: 1050361 - DNA, 15 bp, Homo sapiens
ctctgggactggggc

SEQ ID NO: 1050362 - DNA, 15 bp, Homo sapiens
tctgggactggggct

SEQ ID NO: 1050363 - DNA, 15 bp, Homo sapiens
ctgggactggggctg

SEQ ID NO: 1050364 - DNA, 15 bp, Homo sapiens
tgggactggggctgg

SEQ ID NO: 1050365 - DNA, 15 bp, Homo sapiens
gggactggggctgga

SEQ ID NO: 1050366 - DNA, 15 bp, Homo sapiens
ggactggggctggag

SEQ ID NO: 1050367 - DNA, 15 bp, Homo sapiens
gactggggctggagt

SEQ ID NO: 1050368 - DNA, 15 bp, Homo sapiens
actggggctggagtt

SEQ ID NO: 1050369 - DNA, 15 bp, Homo sapiens
ctggggctggagttc

SEQ ID NO: 1050370 - DNA, 15 bp, Homo sapiens
tggggctggagttca

SEQ ID NO: 1050371 - DNA, 15 bp, Homo sapiens
ggggctggagttcac

SEQ ID NO: 1050372 - DNA, 15 bp, Homo sapiens
gggctggagttcact

SEQ ID NO: 1050373 - DNA, 15 bp, Homo sapiens
ggctggagttcactt

SEQ ID NO: 1050374 - DNA, 15 bp, Homo sapiens
gctggagttcactta

SEQ ID NO: 1050375 - DNA, 15 bp, Homo sapiens
ctggagttcacttag

SEQ ID NO: 1050376 - DNA, 15 bp, Homo sapiens
tggagttcacttagc

SEQ ID NO: 1050377 - DNA, 15 bp, Homo sapiens
ggagttcacttagcc

SEQ ID NO: 1050378 - DNA, 15 bp, Homo sapiens
gagttcacttagcct

SEQ ID NO: 1050379 - DNA, 15 bp, Homo sapiens
agttcacttagcctg

SEQ ID NO: 1050380 - DNA, 15 bp, Homo sapiens
gttcacttagcctga

SEQ ID NO: 1050381 - DNA, 15 bp, Homo sapiens
ttcacttagcctgag

SEQ ID NO: 1050382 - DNA, 15 bp, Homo sapiens
tcacttagcctgagt

SEQ ID NO: 1050383 - DNA, 15 bp, Homo sapiens
cacttagcctgagtc

SEQ ID NO: 1050384 - DNA, 15 bp, Homo sapiens
acttagcctgagtcc

SEQ ID NO: 1050385 - DNA, 15 bp, Homo sapiens
cttagcctgagtcca

SEQ ID NO: 1050386 - DNA, 15 bp, Homo sapiens
ttagcctgagtccag

SEQ ID NO: 1050387 - DNA, 15 bp, Homo sapiens
tagcctgagtccagt

SEQ ID NO: 1050388 - DNA, 15 bp, Homo sapiens
agcctgagtccagtg

SEQ ID NO: 1050389 - DNA, 15 bp, Homo sapiens
gcctgagtccagtgg

SEQ ID NO: 1050390 - DNA, 15 bp, Homo sapiens
cctgagtccagtggg

SEQ ID NO: 1050391 - DNA, 15 bp, Homo sapiens
ctgagtccagtgggg

SEQ ID NO: 1050392 - DNA, 15 bp, Homo sapiens
tgagtccagtggggt

SEQ ID NO: 1050393 - DNA, 15 bp, Homo sapiens
gagtccagtggggtg

SEQ ID NO: 1050394 - DNA, 15 bp, Homo sapiens
agtccagtggggtgc

SEQ ID NO: 1050395 - DNA, 15 bp, Homo sapiens
gtccagtggggtgca

SEQ ID NO: 1050396 - DNA, 15 bp, Homo sapiens
tccagtggggtgcaa

SEQ ID NO: 1050397 - DNA, 15 bp, Homo sapiens
ccagtggggtgcaag

SEQ ID NO: 1050398 - DNA, 15 bp, Homo sapiens
cagtggggtgcaagg

SEQ ID NO: 1050399 - DNA, 15 bp, Homo sapiens
agtggggtgcaaggg

SEQ ID NO: 1050400 - DNA, 15 bp, Homo sapiens
gtggggtgcaagggg

SEQ ID NO: 1050401 - DNA, 15 bp, Homo sapiens
tggggtgcaaggggg

SEQ ID NO: 1050402 - DNA, 15 bp, Homo sapiens
ggggtgcaaggggga

SEQ ID NO: 1050403 - DNA, 15 bp, Homo sapiens
gggtgcaagggggag

SEQ ID NO: 1050404 - DNA, 15 bp, Homo sapiens
ggtgcaagggggaga

SEQ ID NO: 1050405 - DNA, 15 bp, Homo sapiens
gtgcaagggggagaa

SEQ ID NO: 1050406 - DNA, 15 bp, Homo sapiens
tgcaagggggagaag

SEQ ID NO: 1050407 - DNA, 15 bp, Homo sapiens
gcaagggggagaagg

SEQ ID NO: 1050408 - DNA, 15 bp, Homo sapiens
caagggggagaaggg

SEQ ID NO: 1050409 - DNA, 15 bp, Homo sapiens
aagggggagaagggg

SEQ ID NO: 1050410 - DNA, 15 bp, Homo sapiens
agggggagaaggggt

SEQ ID NO: 1050411 - DNA, 15 bp, Homo sapiens
gggggagaaggggtt

SEQ ID NO: 1050412 - DNA, 15 bp, Homo sapiens
ggggagaaggggttc

SEQ ID NO: 1050413 - DNA, 15 bp, Homo sapiens
gggagaaggggttct

SEQ ID NO: 1050414 - DNA, 15 bp, Homo sapiens
ggagaaggggttctc

SEQ ID NO: 1050415 - DNA, 15 bp, Homo sapiens
gagaaggggttctcg

SEQ ID NO: 1050416 - DNA, 15 bp, Homo sapiens
agaaggggttctcgg

SEQ ID NO: 1050417 - DNA, 15 bp, Homo sapiens
gaaggggttctcggg

SEQ ID NO: 1050418 - DNA, 15 bp, Homo sapiens
aaggggttctcggga

SEQ ID NO: 1050419 - DNA, 15 bp, Homo sapiens
aggggttctcgggag

SEQ ID NO: 1050420 - DNA, 15 bp, Homo sapiens
ggggttctcgggagc

SEQ ID NO: 1050421 - DNA, 15 bp, Homo sapiens
gggttctcgggagca

SEQ ID NO: 1050422 - DNA, 15 bp, Homo sapiens
ggttctcgggagcac

SEQ ID NO: 1050423 - DNA, 15 bp, Homo sapiens
gttctcgggagcaca

SEQ ID NO: 1050424 - DNA, 15 bp, Homo sapiens
ttctcgggagcacat

SEQ ID NO: 1050425 - DNA, 15 bp, Homo sapiens
tctcgggagcacatg

SEQ ID NO: 1050426 - DNA, 15 bp, Homo sapiens
ctcgggagcacatgt

SEQ ID NO: 1050427 - DNA, 15 bp, Homo sapiens
tcgggagcacatgtg

SEQ ID NO: 1050428 - DNA, 15 bp, Homo sapiens
cgggagcacatgtgg

SEQ ID NO: 1050429 - DNA, 15 bp, Homo sapiens
gggagcacatgtggc

SEQ ID NO: 1050430 - DNA, 15 bp, Homo sapiens
ggagcacatgtggcc

SEQ ID NO: 1050431 - DNA, 15 bp, Homo sapiens
gagcacatgtggcct

SEQ ID NO: 1050432 - DNA, 15 bp, Homo sapiens
agcacatgtggcctt

SEQ ID NO: 1050433 - DNA, 15 bp, Homo sapiens
gcacatgtggccttg

SEQ ID NO: 1050434 - DNA, 15 bp, Homo sapiens
cacatgtggccttgg

SEQ ID NO: 1050435 - DNA, 15 bp, Homo sapiens
acatgtggccttggc

SEQ ID NO: 1050436 - DNA, 15 bp, Homo sapiens
catgtggccttggca

SEQ ID NO: 1050437 - DNA, 15 bp, Homo sapiens
atgtggccttggcac

SEQ ID NO: 1050438 - DNA, 15 bp, Homo sapiens
tgtggccttggcact

SEQ ID NO: 1050439 - DNA, 15 bp, Homo sapiens
gtggccttggcactg

SEQ ID NO: 1050440 - DNA, 15 bp, Homo sapiens
tggccttggcactgg

SEQ ID NO: 1050441 - DNA, 15 bp, Homo sapiens
ggccttggcactgga

SEQ ID NO: 1050442 - DNA, 15 bp, Homo sapiens
gccttggcactggag

SEQ ID NO: 1050443 - DNA, 15 bp, Homo sapiens
ccttggcactggagg

SEQ ID NO: 1050444 - DNA, 15 bp, Homo sapiens
cttggcactggagga

SEQ ID NO: 1050445 - DNA, 15 bp, Homo sapiens
ttggcactggaggag

SEQ ID NO: 1050446 - DNA, 15 bp, Homo sapiens
tggcactggaggagc

SEQ ID NO: 1050447 - DNA, 15 bp, Homo sapiens
ggcactggaggagca

SEQ ID NO: 1050448 - DNA, 15 bp, Homo sapiens
gcactggaggagcag

SEQ ID NO: 1050449 - DNA, 15 bp, Homo sapiens
cactggaggagcaga

SEQ ID NO: 1050450 - DNA, 15 bp, Homo sapiens
actggaggagcagag

SEQ ID NO: 1050451 - DNA, 15 bp, Homo sapiens
ctggaggagcagagg

SEQ ID NO: 1050452 - DNA, 15 bp, Homo sapiens
tggaggagcagaggg

SEQ ID NO: 1050453 - DNA, 15 bp, Homo sapiens
ggaggagcagagggt

SEQ ID NO: 1050454 - DNA, 15 bp, Homo sapiens
gaggagcagagggtg

SEQ ID NO: 1050455 - DNA, 15 bp, Homo sapiens
aggagcagagggtgg

SEQ ID NO: 1050456 - DNA, 15 bp, Homo sapiens
ggagcagagggtggt

SEQ ID NO: 1050457 - DNA, 15 bp, Homo sapiens
gagcagagggtggtt

SEQ ID NO: 1050458 - DNA, 15 bp, Homo sapiens
agcagagggtggttc

SEQ ID NO: 1050459 - DNA, 15 bp, Homo sapiens
gcagagggtggttct

SEQ ID NO: 1050460 - DNA, 15 bp, Homo sapiens
cagagggtggttctg

SEQ ID NO: 1050461 - DNA, 15 bp, Homo sapiens
agagggtggttctgg

SEQ ID NO: 1050462 - DNA, 15 bp, Homo sapiens
gagggtggttctggt

SEQ ID NO: 1050463 - DNA, 15 bp, Homo sapiens
agggtggttctggtg

SEQ ID NO: 1050464 - DNA, 15 bp, Homo sapiens
gggtggttctggtgt

SEQ ID NO: 1050465 - DNA, 15 bp, Homo sapiens
ggtggttctggtgtc

SEQ ID NO: 1050466 - DNA, 15 bp, Homo sapiens
gtggttctggtgtcc

SEQ ID NO: 1050467 - DNA, 15 bp, Homo sapiens
tggttctggtgtccc

SEQ ID NO: 1050468 - DNA, 15 bp, Homo sapiens
ggttctggtgtccca

SEQ ID NO: 1050469 - DNA, 15 bp, Homo sapiens
gttctggtgtcccag

SEQ ID NO: 1050470 - DNA, 15 bp, Homo sapiens
ttctggtgtcccaga

SEQ ID NO: 1050471 - DNA, 15 bp, Homo sapiens
tctggtgtcccagat

SEQ ID NO: 1050472 - DNA, 15 bp, Homo sapiens
ctggtgtcccagatg

SEQ ID NO: 1050473 - DNA, 15 bp, Homo sapiens
tggtgtcccagatgc

SEQ ID NO: 1050474 - DNA, 15 bp, Homo sapiens
ggtgtcccagatgcc

SEQ ID NO: 1050475 - DNA, 15 bp, Homo sapiens
gtgtcccagatgccc

SEQ ID NO: 1050476 - DNA, 15 bp, Homo sapiens
tgtcccagatgcccc

SEQ ID NO: 1050477 - DNA, 15 bp, Homo sapiens
gtcccagatgcccca

SEQ ID NO: 1050478 - DNA, 15 bp, Homo sapiens
tcccagatgccccac

SEQ ID NO: 1050479 - DNA, 15 bp, Homo sapiens
cccagatgccccacg

SEQ ID NO: 1050480 - DNA, 15 bp, Homo sapiens
ccagatgccccacgt

SEQ ID NO: 1050481 - DNA, 15 bp, Homo sapiens
cagatgccccacgtg

SEQ ID NO: 1050482 - DNA, 15 bp, Homo sapiens
agatgccccacgtgg

SEQ ID NO: 1050483 - DNA, 15 bp, Homo sapiens
gatgccccacgtggc

SEQ ID NO: 1050484 - DNA, 15 bp, Homo sapiens
atgccccacgtggcc

SEQ ID NO: 1050485 - DNA, 15 bp, Homo sapiens
tgccccacgtggcca

SEQ ID NO: 1050486 - DNA, 15 bp, Homo sapiens
gccccacgtggccac

SEQ ID NO: 1050487 - DNA, 15 bp, Homo sapiens
ccccacgtggccact

SEQ ID NO: 1050488 - DNA, 15 bp, Homo sapiens
cccacgtggccactc

SEQ ID NO: 1050489 - DNA, 15 bp, Homo sapiens
ccacgtggccactcc

SEQ ID NO: 1050490 - DNA, 15 bp, Homo sapiens
cacgtggccactcca

SEQ ID NO: 1050491 - DNA, 15 bp, Homo sapiens
acgtggccactccag

SEQ ID NO: 1050492 - DNA, 15 bp, Homo sapiens
cgtggccactccagg

SEQ ID NO: 1050493 - DNA, 15 bp, Homo sapiens
gtggccactccaggg

SEQ ID NO: 1050494 - DNA, 15 bp, Homo sapiens
tggccactccagggg

SEQ ID NO: 1050495 - DNA, 15 bp, Homo sapiens
ggccactccaggggc

SEQ ID NO: 1050496 - DNA, 15 bp, Homo sapiens
gccactccaggggcc

SEQ ID NO: 1050497 - DNA, 15 bp, Homo sapiens
ccactccaggggcct

SEQ ID NO: 1050498 - DNA, 15 bp, Homo sapiens
cactccaggggcctc

SEQ ID NO: 1050499 - DNA, 15 bp, Homo sapiens
actccaggggcctcc

SEQ ID NO: 1050500 - DNA, 15 bp, Homo sapiens
ctccaggggcctcct

SEQ ID NO: 1050501 - DNA, 15 bp, Homo sapiens
tccaggggcctcctg

SEQ ID NO: 1050502 - DNA, 15 bp, Homo sapiens
ccaggggcctcctgc

SEQ ID NO: 1050503 - DNA, 15 bp, Homo sapiens
caggggcctcctgca

SEQ ID NO: 1050504 - DNA, 15 bp, Homo sapiens
aggggcctcctgcac

SEQ ID NO: 1050505 - DNA, 15 bp, Homo sapiens
ggggcctcctgcacc

SEQ ID NO: 1050506 - DNA, 15 bp, Homo sapiens
gggcctcctgcaccc

SEQ ID NO: 1050507 - DNA, 15 bp, Homo sapiens
ggcctcctgcacccc

SEQ ID NO: 1050508 - DNA, 15 bp, Homo sapiens
gcctcctgcacccca

SEQ ID NO: 1050509 - DNA, 15 bp, Homo sapiens
cctcctgcaccccag

SEQ ID NO: 1050510 - DNA, 15 bp, Homo sapiens
ctcctgcaccccagc

SEQ ID NO: 1050511 - DNA, 15 bp, Homo sapiens
tcctgcaccccagca

SEQ ID NO: 1050512 - DNA, 15 bp, Homo sapiens
cctgcaccccagcat

SEQ ID NO: 1050513 - DNA, 15 bp, Homo sapiens
ctgcaccccagcatt

SEQ ID NO: 1050514 - DNA, 15 bp, Homo sapiens
tgcaccccagcattt

SEQ ID NO: 1050515 - DNA, 15 bp, Homo sapiens
gcaccccagcatttc

SEQ ID NO: 1050516 - DNA, 15 bp, Homo sapiens
caccccagcatttcc

SEQ ID NO: 1050517 - DNA, 15 bp, Homo sapiens
accccagcatttccc

SEQ ID NO: 1050518 - DNA, 15 bp, Homo sapiens
ccccagcatttccct

SEQ ID NO: 1050519 - DNA, 15 bp, Homo sapiens
cccagcatttccctt

SEQ ID NO: 1050520 - DNA, 15 bp, Homo sapiens
ccagcatttcccttc

SEQ ID NO: 1050521 - DNA, 15 bp, Homo sapiens
cagcatttcccttca

SEQ ID NO: 1050522 - DNA, 15 bp, Homo sapiens
agcatttcccttcat

SEQ ID NO: 1050523 - DNA, 15 bp, Homo sapiens
gcatttcccttcatg

SEQ ID NO: 1050524 - DNA, 15 bp, Homo sapiens
catttcccttcatgg

SEQ ID NO: 1050525 - DNA, 15 bp, Homo sapiens
atttcccttcatggg

SEQ ID NO: 1050526 - DNA, 15 bp, Homo sapiens
tttcccttcatgggc

SEQ ID NO: 1050527 - DNA, 15 bp, Homo sapiens
ttcccttcatgggct

SEQ ID NO: 1050528 - DNA, 15 bp, Homo sapiens
tcccttcatgggctc

SEQ ID NO: 1050529 - DNA, 15 bp, Homo sapiens
cccttcatgggctct

SEQ ID NO: 1050530 - DNA, 15 bp, Homo sapiens
ccttcatgggctctt

SEQ ID NO: 1050531 - DNA, 15 bp, Homo sapiens
cttcatgggctcttt

SEQ ID NO: 1050532 - DNA, 15 bp, Homo sapiens
ttcatgggctctttg

SEQ ID NO: 1050533 - DNA, 15 bp, Homo sapiens
tcatgggctctttgc

SEQ ID NO: 1050534 - DNA, 15 bp, Homo sapiens
catgggctctttgct

SEQ ID NO: 1050535 - DNA, 15 bp, Homo sapiens
atgggctctttgctg

SEQ ID NO: 1050536 - DNA, 15 bp, Homo sapiens
tgggctctttgctgt

SEQ ID NO: 1050537 - DNA, 15 bp, Homo sapiens
gggctctttgctgtg

SEQ ID NO: 1050538 - DNA, 15 bp, Homo sapiens
ggctctttgctgtga

SEQ ID NO: 1050539 - DNA, 15 bp, Homo sapiens
gctctttgctgtgag

SEQ ID NO: 1050540 - DNA, 15 bp, Homo sapiens
ctctttgctgtgagg

SEQ ID NO: 1050541 - DNA, 15 bp, Homo sapiens
tctttgctgtgaggc

SEQ ID NO: 1050542 - DNA, 15 bp, Homo sapiens
ctttgctgtgaggcc

SEQ ID NO: 1050543 - DNA, 15 bp, Homo sapiens
tttgctgtgaggccc

SEQ ID NO: 1050544 - DNA, 15 bp, Homo sapiens
ttgctgtgaggccca

SEQ ID NO: 1050545 - DNA, 15 bp, Homo sapiens
tgctgtgaggcccag

SEQ ID NO: 1050546 - DNA, 15 bp, Homo sapiens
gctgtgaggcccagc

SEQ ID NO: 1050547 - DNA, 15 bp, Homo sapiens
ctgtgaggcccagct

SEQ ID NO: 1050548 - DNA, 15 bp, Homo sapiens
tgtgaggcccagctg

SEQ ID NO: 1050549 - DNA, 15 bp, Homo sapiens
gtgaggcccagctgg

SEQ ID NO: 1050550 - DNA, 15 bp, Homo sapiens
tgaggcccagctggg

SEQ ID NO: 1050551 - DNA, 15 bp, Homo sapiens
gaggcccagctgggg

SEQ ID NO: 1050552 - DNA, 15 bp, Homo sapiens
aggcccagctggggc

SEQ ID NO: 1050553 - DNA, 15 bp, Homo sapiens
ggcccagctggggcc

SEQ ID NO: 1050554 - DNA, 15 bp, Homo sapiens
gcccagctggggcca

SEQ ID NO: 1050555 - DNA, 15 bp, Homo sapiens
cccagctggggccaa

SEQ ID NO: 1050556 - DNA, 15 bp, Homo sapiens
ccagctggggccaag

SEQ ID NO: 1050557 - DNA, 15 bp, Homo sapiens
cagctggggccaagg

SEQ ID NO: 1050558 - DNA, 15 bp, Homo sapiens
agctggggccaaggg

SEQ ID NO: 1050559 - DNA, 15 bp, Homo sapiens
gctggggccaaggga

SEQ ID NO: 1050560 - DNA, 15 bp, Homo sapiens
ctggggccaagggag

SEQ ID NO: 1050561 - DNA, 15 bp, Homo sapiens
tggggccaagggagg

SEQ ID NO: 1050562 - DNA, 15 bp, Homo sapiens
ggggccaagggagga

SEQ ID NO: 1050563 - DNA, 15 bp, Homo sapiens
gggccaagggaggat

SEQ ID NO: 1050564 - DNA, 15 bp, Homo sapiens
ggccaagggaggatg

SEQ ID NO: 1050565 - DNA, 15 bp, Homo sapiens
gccaagggaggatgg

SEQ ID NO: 1050566 - DNA, 15 bp, Homo sapiens
ccaagggaggatggg

SEQ ID NO: 1050567 - DNA, 15 bp, Homo sapiens
caagggaggatgggc

SEQ ID NO: 1050568 - DNA, 15 bp, Homo sapiens
aagggaggatgggcc

SEQ ID NO: 1050569 - DNA, 15 bp, Homo sapiens
agggaggatgggcca

SEQ ID NO: 1050570 - DNA, 15 bp, Homo sapiens
gggaggatgggccag

SEQ ID NO: 1050571 - DNA, 15 bp, Homo sapiens
ggaggatgggccagc

SEQ ID NO: 1050572 - DNA, 15 bp, Homo sapiens
gaggatgggccagcc

SEQ ID NO: 1050573 - DNA, 15 bp, Homo sapiens
aggatgggccagcca

SEQ ID NO: 1050574 - DNA, 15 bp, Homo sapiens
ggatgggccagccac

SEQ ID NO: 1050575 - DNA, 15 bp, Homo sapiens
gatgggccagccacg

SEQ ID NO: 1050576 - DNA, 15 bp, Homo sapiens
atgggccagccacgt

SEQ ID NO: 1050577 - DNA, 15 bp, Homo sapiens
tgggccagccacgtc

SEQ ID NO: 1050578 - DNA, 15 bp, Homo sapiens
gggccagccacgtcc

SEQ ID NO: 1050579 - DNA, 15 bp, Homo sapiens
ggccagccacgtcca

SEQ ID NO: 1050580 - DNA, 15 bp, Homo sapiens
gccagccacgtccag

SEQ ID NO: 1050581 - DNA, 15 bp, Homo sapiens
ccagccacgtccagc

SEQ ID NO: 1050582 - DNA, 15 bp, Homo sapiens
cagccacgtccagcc

SEQ ID NO: 1050583 - DNA, 15 bp, Homo sapiens
agccacgtccagcct

SEQ ID NO: 1050584 - DNA, 15 bp, Homo sapiens
gccacgtccagcctc

SEQ ID NO: 1050585 - DNA, 15 bp, Homo sapiens
ccacgtccagcctct

SEQ ID NO: 1050586 - DNA, 15 bp, Homo sapiens
cacgtccagcctctg

SEQ ID NO: 1050587 - DNA, 15 bp, Homo sapiens
acgtccagcctctga

SEQ ID NO: 1050588 - DNA, 15 bp, Homo sapiens
cgtccagcctctgac

SEQ ID NO: 1050589 - DNA, 15 bp, Homo sapiens
gtccagcctctgaca

SEQ ID NO: 1050590 - DNA, 15 bp, Homo sapiens
tccagcctctgacac

SEQ ID NO: 1050591 - DNA, 15 bp, Homo sapiens
ccagcctctgacact

SEQ ID NO: 1050592 - DNA, 15 bp, Homo sapiens
cagcctctgacacta

SEQ ID NO: 1050593 - DNA, 15 bp, Homo sapiens
agcctctgacactag

SEQ ID NO: 1050594 - DNA, 15 bp, Homo sapiens
gcctctgacactagt

SEQ ID NO: 1050595 - DNA, 15 bp, Homo sapiens
cctctgacactagtg

SEQ ID NO: 1050596 - DNA, 15 bp, Homo sapiens
ctctgacactagtgt

SEQ ID NO: 1050597 - DNA, 15 bp, Homo sapiens
tctgacactagtgtc

SEQ ID NO: 1050598 - DNA, 15 bp, Homo sapiens
ctgacactagtgtcc

SEQ ID NO: 1050599 - DNA, 15 bp, Homo sapiens
tgacactagtgtccc

SEQ ID NO: 1050600 - DNA, 15 bp, Homo sapiens
gacactagtgtccct

SEQ ID NO: 1050601 - DNA, 15 bp, Homo sapiens
acactagtgtccctt

SEQ ID NO: 1050602 - DNA, 15 bp, Homo sapiens
cactagtgtcccttc

SEQ ID NO: 1050603 - DNA, 15 bp, Homo sapiens
actagtgtcccttcg

SEQ ID NO: 1050604 - DNA, 15 bp, Homo sapiens
ctagtgtcccttcgc

SEQ ID NO: 1050605 - DNA, 15 bp, Homo sapiens
tagtgtcccttcgcc

SEQ ID NO: 1050606 - DNA, 15 bp, Homo sapiens
agtgtcccttcgcct

SEQ ID NO: 1050607 - DNA, 15 bp, Homo sapiens
gtgtcccttcgcctt

SEQ ID NO: 1050608 - DNA, 15 bp, Homo sapiens
tgtcccttcgccttg

SEQ ID NO: 1050609 - DNA, 15 bp, Homo sapiens
gtcccttcgccttgc

SEQ ID NO: 1050610 - DNA, 15 bp, Homo sapiens
tcccttcgccttgca

SEQ ID NO: 1050611 - DNA, 15 bp, Homo sapiens
cccttcgccttgcag

SEQ ID NO: 1050612 - DNA, 15 bp, Homo sapiens
ccttcgccttgcagg

SEQ ID NO: 1050613 - DNA, 15 bp, Homo sapiens
cttcgccttgcaggg

SEQ ID NO: 1050614 - DNA, 15 bp, Homo sapiens
ttcgccttgcagggt

SEQ ID NO: 1050615 - DNA, 15 bp, Homo sapiens
tcgccttgcagggtg

SEQ ID NO: 1050616 - DNA, 15 bp, Homo sapiens
cgccttgcagggtgc

SEQ ID NO: 1050617 - DNA, 15 bp, Homo sapiens
gccttgcagggtgcg

SEQ ID NO: 1050618 - DNA, 15 bp, Homo sapiens
ccttgcagggtgcgg

SEQ ID NO: 1050619 - DNA, 15 bp, Homo sapiens
cttgcagggtgcggc

SEQ ID NO: 1050620 - DNA, 15 bp, Homo sapiens
ttgcagggtgcggcg

SEQ ID NO: 1050621 - DNA, 15 bp, Homo sapiens
tgcagggtgcggcgg

SEQ ID NO: 1050622 - DNA, 15 bp, Homo sapiens
gcagggtgcggcggt

SEQ ID NO: 1050623 - DNA, 15 bp, Homo sapiens
cagggtgcggcggtg

SEQ ID NO: 1050624 - DNA, 15 bp, Homo sapiens
agggtgcggcggtga

SEQ ID NO: 1050625 - DNA, 15 bp, Homo sapiens
gggtgcggcggtgat

SEQ ID NO: 1050626 - DNA, 15 bp, Homo sapiens
ggtgcggcggtgatg

SEQ ID NO: 1050627 - DNA, 15 bp, Homo sapiens
gtgcggcggtgatga

SEQ ID NO: 1050628 - DNA, 15 bp, Homo sapiens
tgcggcggtgatgat

SEQ ID NO: 1050629 - DNA, 15 bp, Homo sapiens
gcggcggtgatgatg

SEQ ID NO: 1050630 - DNA, 15 bp, Homo sapiens
cggcggtgatgatgg

SEQ ID NO: 1050631 - DNA, 15 bp, Homo sapiens
ggcggtgatgatgga

SEQ ID NO: 1050632 - DNA, 15 bp, Homo sapiens
gcggtgatgatggag

SEQ ID NO: 1050633 - DNA, 15 bp, Homo sapiens
cggtgatgatggaga

SEQ ID NO: 1050634 - DNA, 15 bp, Homo sapiens
ggtgatgatggagaa

SEQ ID NO: 1050635 - DNA, 15 bp, Homo sapiens
gtgatgatggagaat

SEQ ID NO: 1050636 - DNA, 15 bp, Homo sapiens
tgatgatggagaata

SEQ ID NO: 1050637 - DNA, 15 bp, Homo sapiens
gatgatggagaataa

SEQ ID NO: 1050638 - DNA, 15 bp, Homo sapiens
atgatggagaataag

SEQ ID NO: 1050639 - DNA, 15 bp, Homo sapiens
tgatggagaataagc

SEQ ID NO: 1050640 - DNA, 15 bp, Homo sapiens
gatggagaataagcc

SEQ ID NO: 1050641 - DNA, 15 bp, Homo sapiens
atggagaataagccc

SEQ ID NO: 1050642 - DNA, 15 bp, Homo sapiens
tggagaataagccca

SEQ ID NO: 1050643 - DNA, 15 bp, Homo sapiens
ggagaataagcccat

SEQ ID NO: 1050644 - DNA, 15 bp, Homo sapiens
gagaataagcccatg

SEQ ID NO: 1050645 - DNA, 15 bp, Homo sapiens
agaataagcccatga

SEQ ID NO: 1050646 - DNA, 15 bp, Homo sapiens
gaataagcccatgac

SEQ ID NO: 1050647 - DNA, 15 bp, Homo sapiens
aataagcccatgacc

SEQ ID NO: 1050648 - DNA, 15 bp, Homo sapiens
ataagcccatgaccc

SEQ ID NO: 1050649 - DNA, 15 bp, Homo sapiens
taagcccatgaccct

SEQ ID NO: 1050650 - DNA, 15 bp, Homo sapiens
aagcccatgaccctg

SEQ ID NO: 1050651 - DNA, 15 bp, Homo sapiens
agcccatgaccctga

SEQ ID NO: 1050652 - DNA, 15 bp, Homo sapiens
gcccatgaccctgaa

SEQ ID NO: 1050653 - DNA, 15 bp, Homo sapiens
cccatgaccctgaag

SEQ ID NO: 1050654 - DNA, 15 bp, Homo sapiens
ccatgaccctgaagc

SEQ ID NO: 1050655 - DNA, 15 bp, Homo sapiens
catgaccctgaagct

SEQ ID NO: 1050656 - DNA, 15 bp, Homo sapiens
atgaccctgaagctc

SEQ ID NO: 1050657 - DNA, 15 bp, Homo sapiens
tgaccctgaagctca

SEQ ID NO: 1050658 - DNA, 15 bp, Homo sapiens
gaccctgaagctcat

SEQ ID NO: 1050659 - DNA, 15 bp, Homo sapiens
accctgaagctcatc

SEQ ID NO: 1050660 - DNA, 15 bp, Homo sapiens
ccctgaagctcatca

SEQ ID NO: 1050661 - DNA, 15 bp, Homo sapiens
cctgaagctcatcat

SEQ ID NO: 1050662 - DNA, 15 bp, Homo sapiens
ctgaagctcatcatg

SEQ ID NO: 1050663 - DNA, 15 bp, Homo sapiens
tgaagctcatcatga

SEQ ID NO: 1050664 - DNA, 15 bp, Homo sapiens
gaagctcatcatgac

SEQ ID NO: 1050665 - DNA, 15 bp, Homo sapiens
aagctcatcatgacc

SEQ ID NO: 1050666 - DNA, 15 bp, Homo sapiens
agctcatcatgacct

SEQ ID NO: 1050667 - DNA, 15 bp, Homo sapiens
gctcatcatgacctt

SEQ ID NO: 1050668 - DNA, 15 bp, Homo sapiens
ctcatcatgaccttg

SEQ ID NO: 1050669 - DNA, 15 bp, Homo sapiens
tcatcatgaccttgg

SEQ ID NO: 1050670 - DNA, 15 bp, Homo sapiens
catcatgaccttggc

SEQ ID NO: 1050671 - DNA, 15 bp, Homo sapiens
atcatgaccttggca

SEQ ID NO: 1050672 - DNA, 15 bp, Homo sapiens
tcatgaccttggcat

SEQ ID NO: 1050673 - DNA, 15 bp, Homo sapiens
catgaccttggcatt

SEQ ID NO: 1050674 - DNA, 15 bp, Homo sapiens
atgaccttggcattc

SEQ ID NO: 1050675 - DNA, 15 bp, Homo sapiens
tgaccttggcattca

SEQ ID NO: 1050676 - DNA, 15 bp, Homo sapiens
gaccttggcattcac

SEQ ID NO: 1050677 - DNA, 15 bp, Homo sapiens
accttggcattcacc

SEQ ID NO: 1050678 - DNA, 15 bp, Homo sapiens
ccttggcattcacca

SEQ ID NO: 1050679 - DNA, 15 bp, Homo sapiens
cttggcattcaccac

SEQ ID NO: 1050680 - DNA, 15 bp, Homo sapiens
ttggcattcaccacc

SEQ ID NO: 1050681 - DNA, 15 bp, Homo sapiens
tggcattcaccaccc

SEQ ID NO: 1050682 - DNA, 15 bp, Homo sapiens
ggcattcaccaccct

SEQ ID NO: 1050683 - DNA, 15 bp, Homo sapiens
gcattcaccaccctc

SEQ ID NO: 1050684 - DNA, 15 bp, Homo sapiens
cattcaccaccctcg

SEQ ID NO: 1050685 - DNA, 15 bp, Homo sapiens
attcaccaccctcgg

SEQ ID NO: 1050686 - DNA, 15 bp, Homo sapiens
ttcaccaccctcggc

SEQ ID NO: 1050687 - DNA, 15 bp, Homo sapiens
tcaccaccctcggcg

SEQ ID NO: 1050688 - DNA, 15 bp, Homo sapiens
caccaccctcggcga

SEQ ID NO: 1050689 - DNA, 15 bp, Homo sapiens
accaccctcggcgaa

SEQ ID NO: 1050690 - DNA, 15 bp, Homo sapiens
ccaccctcggcgaac

SEQ ID NO: 1050691 - DNA, 15 bp, Homo sapiens
caccctcggcgaacg

SEQ ID NO: 1050692 - DNA, 15 bp, Homo sapiens
accctcggcgaacgt

SEQ ID NO: 1050693 - DNA, 15 bp, Homo sapiens
ccctcggcgaacgtg

SEQ ID NO: 1050694 - DNA, 15 bp, Homo sapiens
cctcggcgaacgtgc

SEQ ID NO: 1050695 - DNA, 15 bp, Homo sapiens
ctcggcgaacgtgcc

SEQ ID NO: 1050696 - DNA, 15 bp, Homo sapiens
tcggcgaacgtgcct

SEQ ID NO: 1050697 - DNA, 15 bp, Homo sapiens
cggcgaacgtgcctt

SEQ ID NO: 1050698 - DNA, 15 bp, Homo sapiens
ggcgaacgtgccttc

SEQ ID NO: 1050699 - DNA, 15 bp, Homo sapiens
gcgaacgtgccttca

SEQ ID NO: 1050700 - DNA, 15 bp, Homo sapiens
cgaacgtgccttcat

SEQ ID NO: 1050701 - DNA, 15 bp, Homo sapiens
gaacgtgccttcatg

SEQ ID NO: 1050702 - DNA, 15 bp, Homo sapiens
aacgtgccttcatga

SEQ ID NO: 1050703 - DNA, 15 bp, Homo sapiens
acgtgccttcatgaa

SEQ ID NO: 1050704 - DNA, 15 bp, Homo sapiens
cgtgccttcatgaac

SEQ ID NO: 1050705 - DNA, 15 bp, Homo sapiens
gtgccttcatgaacc

SEQ ID NO: 1050706 - DNA, 15 bp, Homo sapiens
tgccttcatgaaccg

SEQ ID NO: 1050707 - DNA, 15 bp, Homo sapiens
gccttcatgaaccgc

SEQ ID NO: 1050708 - DNA, 15 bp, Homo sapiens
ccttcatgaaccgca

SEQ ID NO: 1050709 - DNA, 15 bp, Homo sapiens
cttcatgaaccgcac

SEQ ID NO: 1050710 - DNA, 15 bp, Homo sapiens
ttcatgaaccgcact

SEQ ID NO: 1050711 - DNA, 15 bp, Homo sapiens
tcatgaaccgcactg

SEQ ID NO: 1050712 - DNA, 15 bp, Homo sapiens
catgaaccgcactgt

SEQ ID NO: 1050713 - DNA, 15 bp, Homo sapiens
atgaaccgcactgtg

SEQ ID NO: 1050714 - DNA, 15 bp, Homo sapiens
tgaaccgcactgtgg

SEQ ID NO: 1050715 - DNA, 15 bp, Homo sapiens
gaaccgcactgtggg

SEQ ID NO: 1050716 - DNA, 15 bp, Homo sapiens
aaccgcactgtgggt

SEQ ID NO: 1050717 - DNA, 15 bp, Homo sapiens
accgcactgtgggtg

SEQ ID NO: 1050718 - DNA, 15 bp, Homo sapiens
ccgcactgtgggtga

SEQ ID NO: 1050719 - DNA, 15 bp, Homo sapiens
cgcactgtgggtgag

SEQ ID NO: 1050720 - DNA, 15 bp, Homo sapiens
gcactgtgggtgaga

SEQ ID NO: 1050721 - DNA, 15 bp, Homo sapiens
cactgtgggtgagat

SEQ ID NO: 1050722 - DNA, 15 bp, Homo sapiens
actgtgggtgagatc

SEQ ID NO: 1050723 - DNA, 15 bp, Homo sapiens
ctgtgggtgagatca

SEQ ID NO: 1050724 - DNA, 15 bp, Homo sapiens
tgtgggtgagatcat

SEQ ID NO: 1050725 - DNA, 15 bp, Homo sapiens
gtgggtgagatcatg

SEQ ID NO: 1050726 - DNA, 15 bp, Homo sapiens
tgggtgagatcatgt

SEQ ID NO: 1050727 - DNA, 15 bp, Homo sapiens
gggtgagatcatgtg

SEQ ID NO: 1050728 - DNA, 15 bp, Homo sapiens
ggtgagatcatgtgg

SEQ ID NO: 1050729 - DNA, 15 bp, Homo sapiens
gtgagatcatgtggg

SEQ ID NO: 1050730 - DNA, 15 bp, Homo sapiens
tgagatcatgtgggg

SEQ ID NO: 1050731 - DNA, 15 bp, Homo sapiens
gagatcatgtggggc

SEQ ID NO: 1050732 - DNA, 15 bp, Homo sapiens
agatcatgtggggct

SEQ ID NO: 1050733 - DNA, 15 bp, Homo sapiens
gatcatgtggggcta

SEQ ID NO: 1050734 - DNA, 15 bp, Homo sapiens
atcatgtggggctac

SEQ ID NO: 1050735 - DNA, 15 bp, Homo sapiens
tcatgtggggctaca

SEQ ID NO: 1050736 - DNA, 15 bp, Homo sapiens
catgtggggctacaa

SEQ ID NO: 1050737 - DNA, 15 bp, Homo sapiens
atgtggggctacaag

SEQ ID NO: 1050738 - DNA, 15 bp, Homo sapiens
tgtggggctacaagg

SEQ ID NO: 1050739 - DNA, 15 bp, Homo sapiens
gtggggctacaagga

SEQ ID NO: 1050740 - DNA, 15 bp, Homo sapiens
tggggctacaaggac

SEQ ID NO: 1050741 - DNA, 15 bp, Homo sapiens
ggggctacaaggacc

SEQ ID NO: 1050742 - DNA, 15 bp, Homo sapiens
gggctacaaggaccc

SEQ ID NO: 1050743 - DNA, 15 bp, Homo sapiens
ggctacaaggacccc

SEQ ID NO: 1050744 - DNA, 15 bp, Homo sapiens
gctacaaggaccccc

SEQ ID NO: 1050745 - DNA, 15 bp, Homo sapiens
ctacaaggaccccct

SEQ ID NO: 1050746 - DNA, 15 bp, Homo sapiens
tacaaggaccccctt

SEQ ID NO: 1050747 - DNA, 15 bp, Homo sapiens
acaaggacccccttg

SEQ ID NO: 1050748 - DNA, 15 bp, Homo sapiens
caaggacccccttgt

SEQ ID NO: 1050749 - DNA, 15 bp, Homo sapiens
aaggacccccttgtg

SEQ ID NO: 1050750 - DNA, 15 bp, Homo sapiens
aggacccccttgtga

SEQ ID NO: 1050751 - DNA, 15 bp, Homo sapiens
ggacccccttgtgaa

SEQ ID NO: 1050752 - DNA, 15 bp, Homo sapiens
gacccccttgtgaat

SEQ ID NO: 1050753 - DNA, 15 bp, Homo sapiens
acccccttgtgaatc

SEQ ID NO: 1050754 - DNA, 15 bp, Homo sapiens
cccccttgtgaatct

SEQ ID NO: 1050755 - DNA, 15 bp, Homo sapiens
ccccttgtgaatctc

SEQ ID NO: 1050756 - DNA, 15 bp, Homo sapiens
cccttgtgaatctca

SEQ ID NO: 1050757 - DNA, 15 bp, Homo sapiens
ccttgtgaatctcat

SEQ ID NO: 1050758 - DNA, 15 bp, Homo sapiens
cttgtgaatctcatc

SEQ ID NO: 1050759 - DNA, 15 bp, Homo sapiens
ttgtgaatctcatca

SEQ ID NO: 1050760 - DNA, 15 bp, Homo sapiens
tgtgaatctcatcaa

SEQ ID NO: 1050761 - DNA, 15 bp, Homo sapiens
gtgaatctcatcaac

SEQ ID NO: 1050762 - DNA, 15 bp, Homo sapiens
tgaatctcatcaaca

SEQ ID NO: 1050763 - DNA, 15 bp, Homo sapiens
gaatctcatcaacaa

SEQ ID NO: 1050764 - DNA, 15 bp, Homo sapiens
aatctcatcaacaag

SEQ ID NO: 1050765 - DNA, 15 bp, Homo sapiens
atctcatcaacaagt

SEQ ID NO: 1050766 - DNA, 15 bp, Homo sapiens
tctcatcaacaagta

SEQ ID NO: 1050767 - DNA, 15 bp, Homo sapiens
ctcatcaacaagtac

SEQ ID NO: 1050768 - DNA, 15 bp, Homo sapiens
tcatcaacaagtact

SEQ ID NO: 1050769 - DNA, 15 bp, Homo sapiens
catcaacaagtactt

SEQ ID NO: 1050770 - DNA, 15 bp, Homo sapiens
atcaacaagtacttt

SEQ ID NO: 1050771 - DNA, 15 bp, Homo sapiens
tcaacaagtactttc

SEQ ID NO: 1050772 - DNA, 15 bp, Homo sapiens
caacaagtactttcc

SEQ ID NO: 1050773 - DNA, 15 bp, Homo sapiens
aacaagtactttcca

SEQ ID NO: 1050774 - DNA, 15 bp, Homo sapiens
acaagtactttccag

SEQ ID NO: 1050775 - DNA, 15 bp, Homo sapiens
caagtactttccagg

SEQ ID NO: 1050776 - DNA, 15 bp, Homo sapiens
aagtactttccaggc

SEQ ID NO: 1050777 - DNA, 15 bp, Homo sapiens
agtactttccaggca

SEQ ID NO: 1050778 - DNA, 15 bp, Homo sapiens
gtactttccaggcat

SEQ ID NO: 1050779 - DNA, 15 bp, Homo sapiens
tactttccaggcatg

SEQ ID NO: 1050780 - DNA, 15 bp, Homo sapiens
actttccaggcatgt

SEQ ID NO: 1050781 - DNA, 15 bp, Homo sapiens
ctttccaggcatgtt

SEQ ID NO: 1050782 - DNA, 15 bp, Homo sapiens
tttccaggcatgttc

SEQ ID NO: 1050783 - DNA, 15 bp, Homo sapiens
ttccaggcatgttcc

SEQ ID NO: 1050784 - DNA, 15 bp, Homo sapiens
tccaggcatgttccc

SEQ ID NO: 1050785 - DNA, 15 bp, Homo sapiens
ccaggcatgttcccc

SEQ ID NO: 1050786 - DNA, 15 bp, Homo sapiens
caggcatgttcccct

SEQ ID NO: 1050787 - DNA, 15 bp, Homo sapiens
aggcatgttcccctt

SEQ ID NO: 1050788 - DNA, 15 bp, Homo sapiens
ggcatgttccccttc

SEQ ID NO: 1050789 - DNA, 15 bp, Homo sapiens
gcatgttccccttca

SEQ ID NO: 1050790 - DNA, 15 bp, Homo sapiens
catgttccccttcaa

SEQ ID NO: 1050791 - DNA, 15 bp, Homo sapiens
atgttccccttcaag

SEQ ID NO: 1050792 - DNA, 15 bp, Homo sapiens
tgttccccttcaagg

SEQ ID NO: 1050793 - DNA, 15 bp, Homo sapiens
gttccccttcaagga

SEQ ID NO: 1050794 - DNA, 15 bp, Homo sapiens
ttccccttcaaggac

SEQ ID NO: 1050795 - DNA, 15 bp, Homo sapiens
tccccttcaaggaca

SEQ ID NO: 1050796 - DNA, 15 bp, Homo sapiens
ccccttcaaggacaa

SEQ ID NO: 1050797 - DNA, 15 bp, Homo sapiens
cccttcaaggacaag

SEQ ID NO: 1050798 - DNA, 15 bp, Homo sapiens
ccttcaaggacaagt

SEQ ID NO: 1050799 - DNA, 15 bp, Homo sapiens
cttcaaggacaagtt

SEQ ID NO: 1050800 - DNA, 15 bp, Homo sapiens
ttcaaggacaagttc

SEQ ID NO: 1050801 - DNA, 15 bp, Homo sapiens
tcaaggacaagttcg

SEQ ID NO: 1050802 - DNA, 15 bp, Homo sapiens
caaggacaagttcgg

SEQ ID NO: 1050803 - DNA, 15 bp, Homo sapiens
aaggacaagttcgga

SEQ ID NO: 1050804 - DNA, 15 bp, Homo sapiens
aggacaagttcggat

SEQ ID NO: 1050805 - DNA, 15 bp, Homo sapiens
ggacaagttcggatt

SEQ ID NO: 1050806 - DNA, 15 bp, Homo sapiens
gacaagttcggatta

SEQ ID NO: 1050807 - DNA, 15 bp, Homo sapiens
acaagttcggattat

SEQ ID NO: 1050808 - DNA, 15 bp, Homo sapiens
caagttcggattatt

SEQ ID NO: 1050809 - DNA, 15 bp, Homo sapiens
aagttcggattattt

SEQ ID NO: 1050810 - DNA, 15 bp, Homo sapiens
agttcggattatttg

SEQ ID NO: 1050811 - DNA, 15 bp, Homo sapiens
gttcggattatttgc

SEQ ID NO: 1050812 - DNA, 15 bp, Homo sapiens
ttcggattatttgct

SEQ ID NO: 1050813 - DNA, 15 bp, Homo sapiens
tcggattatttgctg

SEQ ID NO: 1050814 - DNA, 15 bp, Homo sapiens
cggattatttgctga

SEQ ID NO: 1050815 - DNA, 15 bp, Homo sapiens
ggattatttgctgag

SEQ ID NO: 1050816 - DNA, 15 bp, Homo sapiens
gattatttgctgagg

SEQ ID NO: 1050817 - DNA, 15 bp, Homo sapiens
attatttgctgaggt

SEQ ID NO: 1050818 - DNA, 15 bp, Homo sapiens
ttatttgctgaggta

SEQ ID NO: 1050819 - DNA, 15 bp, Homo sapiens
tatttgctgaggtac

SEQ ID NO: 1050820 - DNA, 15 bp, Homo sapiens
atttgctgaggtacg

SEQ ID NO: 1050821 - DNA, 15 bp, Homo sapiens
tttgctgaggtacgt

SEQ ID NO: 1050822 - DNA, 15 bp, Homo sapiens
ttgctgaggtacgtg

SEQ ID NO: 1050823 - DNA, 15 bp, Homo sapiens
tgctgaggtacgtgt

SEQ ID NO: 1050824 - DNA, 15 bp, Homo sapiens
gctgaggtacgtgtg

SEQ ID NO: 1050825 - DNA, 15 bp, Homo sapiens
ctgaggtacgtgtgg

SEQ ID NO: 1050826 - DNA, 15 bp, Homo sapiens
tgaggtacgtgtggc

SEQ ID NO: 1050827 - DNA, 15 bp, Homo sapiens
gaggtacgtgtggcc

SEQ ID NO: 1050828 - DNA, 15 bp, Homo sapiens
aggtacgtgtggcct

SEQ ID NO: 1050829 - DNA, 15 bp, Homo sapiens
ggtacgtgtggcctg

SEQ ID NO: 1050830 - DNA, 15 bp, Homo sapiens
gtacgtgtggcctgg

SEQ ID NO: 1050831 - DNA, 15 bp, Homo sapiens
tacgtgtggcctggt

SEQ ID NO: 1050832 - DNA, 15 bp, Homo sapiens
acgtgtggcctggtg

SEQ ID NO: 1050833 - DNA, 15 bp, Homo sapiens
cgtgtggcctggtga

SEQ ID NO: 1050834 - DNA, 15 bp, Homo sapiens
gtgtggcctggtgag

SEQ ID NO: 1050835 - DNA, 15 bp, Homo sapiens
tgtggcctggtgaga

SEQ ID NO: 1050836 - DNA, 15 bp, Homo sapiens
gtggcctggtgagaa

SEQ ID NO: 1050837 - DNA, 15 bp, Homo sapiens
tggcctggtgagaag

SEQ ID NO: 1050838 - DNA, 15 bp, Homo sapiens
ggcctggtgagaagc

SEQ ID NO: 1050839 - DNA, 15 bp, Homo sapiens
gcctggtgagaagcc

SEQ ID NO: 1050840 - DNA, 15 bp, Homo sapiens
cctggtgagaagcca

SEQ ID NO: 1050841 - DNA, 15 bp, Homo sapiens
ctggtgagaagccaa

SEQ ID NO: 1050842 - DNA, 15 bp, Homo sapiens
tggtgagaagccaaa

SEQ ID NO: 1050843 - DNA, 15 bp, Homo sapiens
ggtgagaagccaaag

SEQ ID NO: 1050844 - DNA, 15 bp, Homo sapiens
gtgagaagccaaaga

SEQ ID NO: 1050845 - DNA, 15 bp, Homo sapiens
tgagaagccaaagat

SEQ ID NO: 1050846 - DNA, 15 bp, Homo sapiens
gagaagccaaagatt

SEQ ID NO: 1050847 - DNA, 15 bp, Homo sapiens
agaagccaaagattc

SEQ ID NO: 1050848 - DNA, 15 bp, Homo sapiens
gaagccaaagattca

SEQ ID NO: 1050849 - DNA, 15 bp, Homo sapiens
aagccaaagattcag

SEQ ID NO: 1050850 - DNA, 15 bp, Homo sapiens
agccaaagattcagg

SEQ ID NO: 1050851 - DNA, 15 bp, Homo sapiens
gccaaagattcaggc

SEQ ID NO: 1050852 - DNA, 15 bp, Homo sapiens
ccaaagattcaggcc

SEQ ID NO: 1050853 - DNA, 15 bp, Homo sapiens
caaagattcaggcct

SEQ ID NO: 1050854 - DNA, 15 bp, Homo sapiens
aaagattcaggcctg

SEQ ID NO: 1050855 - DNA, 15 bp, Homo sapiens
aagattcaggcctgt

SEQ ID NO: 1050856 - DNA, 15 bp, Homo sapiens
agattcaggcctgtg

SEQ ID NO: 1050857 - DNA, 15 bp, Homo sapiens
gattcaggcctgtgt

SEQ ID NO: 1050858 - DNA, 15 bp, Homo sapiens
attcaggcctgtgtc

SEQ ID NO: 1050859 - DNA, 15 bp, Homo sapiens
ttcaggcctgtgtcc

SEQ ID NO: 1050860 - DNA, 15 bp, Homo sapiens
tcaggcctgtgtcct

SEQ ID NO: 1050861 - DNA, 15 bp, Homo sapiens
caggcctgtgtcctg

SEQ ID NO: 1050862 - DNA, 15 bp, Homo sapiens
aggcctgtgtcctgt

SEQ ID NO: 1050863 - DNA, 15 bp, Homo sapiens
ggcctgtgtcctgtc

SEQ ID NO: 1050864 - DNA, 15 bp, Homo sapiens
gcctgtgtcctgtct

SEQ ID NO: 1050865 - DNA, 15 bp, Homo sapiens
cctgtgtcctgtctt

SEQ ID NO: 1050866 - DNA, 15 bp, Homo sapiens
ctgtgtcctgtcttc

SEQ ID NO: 1050867 - DNA, 15 bp, Homo sapiens
tgtgtcctgtcttcc

SEQ ID NO: 1050868 - DNA, 15 bp, Homo sapiens
gtgtcctgtcttccc

SEQ ID NO: 1050869 - DNA, 15 bp, Homo sapiens
tgtcctgtcttcccc

SEQ ID NO: 1050870 - DNA, 15 bp, Homo sapiens
gtcctgtcttcccct

SEQ ID NO: 1050871 - DNA, 15 bp, Homo sapiens
tcctgtcttcccctc

SEQ ID NO: 1050872 - DNA, 15 bp, Homo sapiens
cctgtcttcccctca

SEQ ID NO: 1050873 - DNA, 15 bp, Homo sapiens
ctgtcttcccctcac

SEQ ID NO: 1050874 - DNA, 15 bp, Homo sapiens
tgtcttcccctcaca

SEQ ID NO: 1050875 - DNA, 15 bp, Homo sapiens
gtcttcccctcacac

SEQ ID NO: 1050876 - DNA, 15 bp, Homo sapiens
tcttcccctcacaca

SEQ ID NO: 1050877 - DNA, 15 bp, Homo sapiens
cttcccctcacacag

SEQ ID NO: 1050878 - DNA, 15 bp, Homo sapiens
ttcccctcacacagc

SEQ ID NO: 1050879 - DNA, 15 bp, Homo sapiens
tcccctcacacagcc

SEQ ID NO: 1050880 - DNA, 15 bp, Homo sapiens
cccctcacacagcct

SEQ ID NO: 1050881 - DNA, 15 bp, Homo sapiens
ccctcacacagcctg

SEQ ID NO: 1050882 - DNA, 15 bp, Homo sapiens
cctcacacagcctgg

SEQ ID NO: 1050883 - DNA, 15 bp, Homo sapiens
ctcacacagcctgga

SEQ ID NO: 1050884 - DNA, 15 bp, Homo sapiens
tcacacagcctggac

SEQ ID NO: 1050885 - DNA, 15 bp, Homo sapiens
cacacagcctggaca

SEQ ID NO: 1050886 - DNA, 15 bp, Homo sapiens
acacagcctggacac

SEQ ID NO: 1050887 - DNA, 15 bp, Homo sapiens
cacagcctggacact

SEQ ID NO: 1050888 - DNA, 15 bp, Homo sapiens
acagcctggacactg

SEQ ID NO: 1050889 - DNA, 15 bp, Homo sapiens
cagcctggacactgg

SEQ ID NO: 1050890 - DNA, 15 bp, Homo sapiens
agcctggacactggt

SEQ ID NO: 1050891 - DNA, 15 bp, Homo sapiens
gcctggacactggtc

SEQ ID NO: 1050892 - DNA, 15 bp, Homo sapiens
cctggacactggtca

SEQ ID NO: 1050893 - DNA, 15 bp, Homo sapiens
ctggacactggtcac

SEQ ID NO: 1050894 - DNA, 15 bp, Homo sapiens
tggacactggtcacc

SEQ ID NO: 1050895 - DNA, 15 bp, Homo sapiens
ggacactggtcacca

SEQ ID NO: 1050896 - DNA, 15 bp, Homo sapiens
gacactggtcaccag

SEQ ID NO: 1050897 - DNA, 15 bp, Homo sapiens
acactggtcaccagc

SEQ ID NO: 1050898 - DNA, 15 bp, Homo sapiens
cactggtcaccagct

SEQ ID NO: 1050899 - DNA, 15 bp, Homo sapiens
actggtcaccagctt

SEQ ID NO: 1050900 - DNA, 15 bp, Homo sapiens
ctggtcaccagcttg

SEQ ID NO: 1050901 - DNA, 15 bp, Homo sapiens
tggtcaccagcttgc

SEQ ID NO: 1050902 - DNA, 15 bp, Homo sapiens
ggtcaccagcttgct

SEQ ID NO: 1050903 - DNA, 15 bp, Homo sapiens
gtcaccagcttgctt

SEQ ID NO: 1050904 - DNA, 15 bp, Homo sapiens
tcaccagcttgcttt

SEQ ID NO: 1050905 - DNA, 15 bp, Homo sapiens
caccagcttgctttg

SEQ ID NO: 1050906 - DNA, 15 bp, Homo sapiens
accagcttgctttgt

SEQ ID NO: 1050907 - DNA, 15 bp, Homo sapiens
ccagcttgctttgta

SEQ ID NO: 1050908 - DNA, 15 bp, Homo sapiens
cagcttgctttgtag

SEQ ID NO: 1050909 - DNA, 15 bp, Homo sapiens
agcttgctttgtagc

SEQ ID NO: 1050910 - DNA, 15 bp, Homo sapiens
gcttgctttgtagct

SEQ ID NO: 1050911 - DNA, 15 bp, Homo sapiens
cttgctttgtagctg

SEQ ID NO: 1050912 - DNA, 15 bp, Homo sapiens
ttgctttgtagctgg

SEQ ID NO: 1050913 - DNA, 15 bp, Homo sapiens
tgctttgtagctggc

SEQ ID NO: 1050914 - DNA, 15 bp, Homo sapiens
gctttgtagctggct

SEQ ID NO: 1050915 - DNA, 15 bp, Homo sapiens
ctttgtagctggctg

SEQ ID NO: 1050916 - DNA, 15 bp, Homo sapiens
tttgtagctggctgg

SEQ ID NO: 1050917 - DNA, 15 bp, Homo sapiens
ttgtagctggctggg

SEQ ID NO: 1050918 - DNA, 15 bp, Homo sapiens
tgtagctggctgggg

SEQ ID NO: 1050919 - DNA, 15 bp, Homo sapiens
gtagctggctgggga

SEQ ID NO: 1050920 - DNA, 15 bp, Homo sapiens
tagctggctggggat

SEQ ID NO: 1050921 - DNA, 15 bp, Homo sapiens
agctggctggggatc

SEQ ID NO: 1050922 - DNA, 15 bp, Homo sapiens
gctggctggggatct

SEQ ID NO: 1050923 - DNA, 15 bp, Homo sapiens
ctggctggggatcta

SEQ ID NO: 1050924 - DNA, 15 bp, Homo sapiens
tggctggggatctag

SEQ ID NO: 1050925 - DNA, 15 bp, Homo sapiens
ggctggggatctagt

SEQ ID NO: 1050926 - DNA, 15 bp, Homo sapiens
gctggggatctagtg

SEQ ID NO: 1050927 - DNA, 15 bp, Homo sapiens
ctggggatctagtgg

SEQ ID NO: 1050928 - DNA, 15 bp, Homo sapiens
tggggatctagtggc

SEQ ID NO: 1050929 - DNA, 15 bp, Homo sapiens
ggggatctagtggct

SEQ ID NO: 1050930 - DNA, 15 bp, Homo sapiens
gggatctagtggctg

SEQ ID NO: 1050931 - DNA, 15 bp, Homo sapiens
ggatctagtggctgt

SEQ ID NO: 1050932 - DNA, 15 bp, Homo sapiens
gatctagtggctgtg

SEQ ID NO: 1050933 - DNA, 15 bp, Homo sapiens
atctagtggctgtgg

SEQ ID NO: 1050934 - DNA, 15 bp, Homo sapiens
tctagtggctgtggg

SEQ ID NO: 1050935 - DNA, 15 bp, Homo sapiens
ctagtggctgtgggt

SEQ ID NO: 1050936 - DNA, 15 bp, Homo sapiens
tagtggctgtgggtt

SEQ ID NO: 1050937 - DNA, 15 bp, Homo sapiens
agtggctgtgggttg

SEQ ID NO: 1050938 - DNA, 15 bp, Homo sapiens
gtggctgtgggttgt

SEQ ID NO: 1050939 - DNA, 15 bp, Homo sapiens
tggctgtgggttgta

SEQ ID NO: 1050940 - DNA, 15 bp, Homo sapiens
ggctgtgggttgtaa

SEQ ID NO: 1050941 - DNA, 15 bp, Homo sapiens
gctgtgggttgtaag

SEQ ID NO: 1050942 - DNA, 15 bp, Homo sapiens
ctgtgggttgtaagt

SEQ ID NO: 1050943 - DNA, 15 bp, Homo sapiens
tgtgggttgtaagtg

SEQ ID NO: 1050944 - DNA, 15 bp, Homo sapiens
gtgggttgtaagtga

SEQ ID NO: 1050945 - DNA, 15 bp, Homo sapiens
tgggttgtaagtgac

SEQ ID NO: 1050946 - DNA, 15 bp, Homo sapiens
gggttgtaagtgact

SEQ ID NO: 1050947 - DNA, 15 bp, Homo sapiens
ggttgtaagtgactg

SEQ ID NO: 1050948 - DNA, 15 bp, Homo sapiens
gttgtaagtgactga

SEQ ID NO: 1050949 - DNA, 15 bp, Homo sapiens
ttgtaagtgactgag

SEQ ID NO: 1050950 - DNA, 15 bp, Homo sapiens
tgtaagtgactgaga

SEQ ID NO: 1050951 - DNA, 15 bp, Homo sapiens
gtaagtgactgagaa

SEQ ID NO: 1050952 - DNA, 15 bp, Homo sapiens
taagtgactgagaac

SEQ ID NO: 1050953 - DNA, 15 bp, Homo sapiens
aagtgactgagaacc

SEQ ID NO: 1050954 - DNA, 15 bp, Homo sapiens
agtgactgagaacct

SEQ ID NO: 1050955 - DNA, 15 bp, Homo sapiens
gtgactgagaacctg

SEQ ID NO: 1050956 - DNA, 15 bp, Homo sapiens
tgactgagaacctga

SEQ ID NO: 1050957 - DNA, 15 bp, Homo sapiens
gactgagaacctgac

SEQ ID NO: 1050958 - DNA, 15 bp, Homo sapiens
actgagaacctgact

SEQ ID NO: 1050959 - DNA, 15 bp, Homo sapiens
ctgagaacctgactc

SEQ ID NO: 1050960 - DNA, 15 bp, Homo sapiens
tgagaacctgactca

SEQ ID NO: 1050961 - DNA, 15 bp, Homo sapiens
gagaacctgactcaa

SEQ ID NO: 1050962 - DNA, 15 bp, Homo sapiens
agaacctgactcaaa

SEQ ID NO: 1050963 - DNA, 15 bp, Homo sapiens
gaacctgactcaaac

SEQ ID NO: 1050964 - DNA, 15 bp, Homo sapiens
aacctgactcaaacc

SEQ ID NO: 1050965 - DNA, 15 bp, Homo sapiens
acctgactcaaaccg

SEQ ID NO: 1050966 - DNA, 15 bp, Homo sapiens
cctgactcaaaccgg

SEQ ID NO: 1050967 - DNA, 15 bp, Homo sapiens
ctgactcaaaccggc

SEQ ID NO: 1050968 - DNA, 15 bp, Homo sapiens
tgactcaaaccggct

SEQ ID NO: 1050969 - DNA, 15 bp, Homo sapiens
gactcaaaccggctt

SEQ ID NO: 1050970 - DNA, 15 bp, Homo sapiens
actcaaaccggcttg

SEQ ID NO: 1050971 - DNA, 15 bp, Homo sapiens
ctcaaaccggcttga

SEQ ID NO: 1050972 - DNA, 15 bp, Homo sapiens
tcaaaccggcttgag

SEQ ID NO: 1050973 - DNA, 15 bp, Homo sapiens
caaaccggcttgagt

SEQ ID NO: 1050974 - DNA, 15 bp, Homo sapiens
aaaccggcttgagtg

SEQ ID NO: 1050975 - DNA, 15 bp, Homo sapiens
aaccggcttgagtga

SEQ ID NO: 1050976 - DNA, 15 bp, Homo sapiens
accggcttgagtgaa

SEQ ID NO: 1050977 - DNA, 15 bp, Homo sapiens
ccggcttgagtgaaa

SEQ ID NO: 1050978 - DNA, 15 bp, Homo sapiens
cggcttgagtgaaat

SEQ ID NO: 1050979 - DNA, 15 bp, Homo sapiens
ggcttgagtgaaatg

SEQ ID NO: 1050980 - DNA, 15 bp, Homo sapiens
gcttgagtgaaatgg

SEQ ID NO: 1050981 - DNA, 15 bp, Homo sapiens
cttgagtgaaatggg

SEQ ID NO: 1050982 - DNA, 15 bp, Homo sapiens
ttgagtgaaatgggg

SEQ ID NO: 1050983 - DNA, 15 bp, Homo sapiens
tgagtgaaatgggga

SEQ ID NO: 1050984 - DNA, 15 bp, Homo sapiens
gagtgaaatggggaa

SEQ ID NO: 1050985 - DNA, 15 bp, Homo sapiens
agtgaaatggggaat

SEQ ID NO: 1050986 - DNA, 15 bp, Homo sapiens
gtgaaatggggaatg

SEQ ID NO: 1050987 - DNA, 15 bp, Homo sapiens
tgaaatggggaatgt

SEQ ID NO: 1050988 - DNA, 15 bp, Homo sapiens
gaaatggggaatgtt

SEQ ID NO: 1050989 - DNA, 15 bp, Homo sapiens
aaatggggaatgttg

SEQ ID NO: 1050990 - DNA, 15 bp, Homo sapiens
aatggggaatgttgg

SEQ ID NO: 1050991 - DNA, 15 bp, Homo sapiens
atggggaatgttggg

SEQ ID NO: 1050992 - DNA, 15 bp, Homo sapiens
tggggaatgttgggg

SEQ ID NO: 1050993 - DNA, 15 bp, Homo sapiens
ggggaatgttggggc

SEQ ID NO: 1050994 - DNA, 15 bp, Homo sapiens
gggaatgttggggct

SEQ ID NO: 1050995 - DNA, 15 bp, Homo sapiens
ggaatgttggggctc

SEQ ID NO: 1050996 - DNA, 15 bp, Homo sapiens
gaatgttggggctca

SEQ ID NO: 1050997 - DNA, 15 bp, Homo sapiens
aatgttggggctcat

SEQ ID NO: 1050998 - DNA, 15 bp, Homo sapiens
atgttggggctcata

SEQ ID NO: 1050999 - DNA, 15 bp, Homo sapiens
tgttggggctcatag

SEQ ID NO: 1051000 - DNA, 15 bp, Homo sapiens
gttggggctcataga

SEQ ID NO: 1051001 - DNA, 15 bp, Homo sapiens
ttggggctcatagaa

SEQ ID NO: 1051002 - DNA, 15 bp, Homo sapiens
tggggctcatagaac

SEQ ID NO: 1051003 - DNA, 15 bp, Homo sapiens
ggggctcatagaact

SEQ ID NO: 1051004 - DNA, 15 bp, Homo sapiens
gggctcatagaactg

SEQ ID NO: 1051005 - DNA, 15 bp, Homo sapiens
ggctcatagaactga

SEQ ID NO: 1051006 - DNA, 15 bp, Homo sapiens
gctcatagaactgaa

SEQ ID NO: 1051007 - DNA, 15 bp, Homo sapiens
ctcatagaactgaaa

SEQ ID NO: 1051008 - DNA, 15 bp, Homo sapiens
tcatagaactgaaaa

SEQ ID NO: 1051009 - DNA, 15 bp, Homo sapiens
catagaactgaaaat

SEQ ID NO: 1051010 - DNA, 15 bp, Homo sapiens
atagaactgaaaatg

SEQ ID NO: 1051011 - DNA, 15 bp, Homo sapiens
tagaactgaaaatgc

SEQ ID NO: 1051012 - DNA, 15 bp, Homo sapiens
agaactgaaaatgct

SEQ ID NO: 1051013 - DNA, 15 bp, Homo sapiens
gaactgaaaatgcta

SEQ ID NO: 1051014 - DNA, 15 bp, Homo sapiens
aactgaaaatgctag

SEQ ID NO: 1051015 - DNA, 15 bp, Homo sapiens
actgaaaatgctagg

SEQ ID NO: 1051016 - DNA, 15 bp, Homo sapiens
ctgaaaatgctaggg

SEQ ID NO: 1051017 - DNA, 15 bp, Homo sapiens
tgaaaatgctagggt

SEQ ID NO: 1051018 - DNA, 15 bp, Homo sapiens
gaaaatgctagggtt

SEQ ID NO: 1051019 - DNA, 15 bp, Homo sapiens
aaaatgctagggttg

SEQ ID NO: 1051020 - DNA, 15 bp, Homo sapiens
aaatgctagggttgg

SEQ ID NO: 1051021 - DNA, 15 bp, Homo sapiens
aatgctagggttgga

SEQ ID NO: 1051022 - DNA, 15 bp, Homo sapiens
atgctagggttggat

SEQ ID NO: 1051023 - DNA, 15 bp, Homo sapiens
tgctagggttggatt

SEQ ID NO: 1051024 - DNA, 15 bp, Homo sapiens
gctagggttggattc

SEQ ID NO: 1051025 - DNA, 15 bp, Homo sapiens
ctagggttggattca

SEQ ID NO: 1051026 - DNA, 15 bp, Homo sapiens
tagggttggattcag

SEQ ID NO: 1051027 - DNA, 15 bp, Homo sapiens
agggttggattcagg

SEQ ID NO: 1051028 - DNA, 15 bp, Homo sapiens
gggttggattcaggt

SEQ ID NO: 1051029 - DNA, 15 bp, Homo sapiens
ggttggattcaggta

SEQ ID NO: 1051030 - DNA, 15 bp, Homo sapiens
gttggattcaggtac

SEQ ID NO: 1051031 - DNA, 15 bp, Homo sapiens
ttggattcaggtaca

SEQ ID NO: 1051032 - DNA, 15 bp, Homo sapiens
tggattcaggtacag

SEQ ID NO: 1051033 - DNA, 15 bp, Homo sapiens
ggattcaggtacagc

SEQ ID NO: 1051034 - DNA, 15 bp, Homo sapiens
gattcaggtacagct

SEQ ID NO: 1051035 - DNA, 15 bp, Homo sapiens
attcaggtacagctt

SEQ ID NO: 1051036 - DNA, 15 bp, Homo sapiens
ttcaggtacagcttg

SEQ ID NO: 1051037 - DNA, 15 bp, Homo sapiens
tcaggtacagcttga

SEQ ID NO: 1051038 - DNA, 15 bp, Homo sapiens
caggtacagcttgat

SEQ ID NO: 1051039 - DNA, 15 bp, Homo sapiens
aggtacagcttgatc

SEQ ID NO: 1051040 - DNA, 15 bp, Homo sapiens
ggtacagcttgatcc

SEQ ID NO: 1051041 - DNA, 15 bp, Homo sapiens
gtacagcttgatcca

SEQ ID NO: 1051042 - DNA, 15 bp, Homo sapiens
tacagcttgatccag

SEQ ID NO: 1051043 - DNA, 15 bp, Homo sapiens
acagcttgatccagg

SEQ ID NO: 1051044 - DNA, 15 bp, Homo sapiens
cagcttgatccaggc

SEQ ID NO: 1051045 - DNA, 15 bp, Homo sapiens
agcttgatccaggct

SEQ ID NO: 1051046 - DNA, 15 bp, Homo sapiens
gcttgatccaggctc

SEQ ID NO: 1051047 - DNA, 15 bp, Homo sapiens
cttgatccaggctca

SEQ ID NO: 1051048 - DNA, 15 bp, Homo sapiens
ttgatccaggctcaa

SEQ ID NO: 1051049 - DNA, 15 bp, Homo sapiens
tgatccaggctcaaa

SEQ ID NO: 1051050 - DNA, 15 bp, Homo sapiens
gatccaggctcaaat

SEQ ID NO: 1051051 - DNA, 15 bp, Homo sapiens
atccaggctcaaatg

SEQ ID NO: 1051052 - DNA, 15 bp, Homo sapiens
tccaggctcaaatga

SEQ ID NO: 1051053 - DNA, 15 bp, Homo sapiens
ccaggctcaaatgat

SEQ ID NO: 1051054 - DNA, 15 bp, Homo sapiens
caggctcaaatgatg

SEQ ID NO: 1051055 - DNA, 15 bp, Homo sapiens
aggctcaaatgatgt

SEQ ID NO: 1051056 - DNA, 15 bp, Homo sapiens
ggctcaaatgatgtg

SEQ ID NO: 1051057 - DNA, 15 bp, Homo sapiens
gctcaaatgatgtga

SEQ ID NO: 1051058 - DNA, 15 bp, Homo sapiens
ctcaaatgatgtgac

SEQ ID NO: 1051059 - DNA, 15 bp, Homo sapiens
tcaaatgatgtgact

SEQ ID NO: 1051060 - DNA, 15 bp, Homo sapiens
caaatgatgtgactg

SEQ ID NO: 1051061 - DNA, 15 bp, Homo sapiens
aaatgatgtgactgg

SEQ ID NO: 1051062 - DNA, 15 bp, Homo sapiens
aatgatgtgactggg

SEQ ID NO: 1051063 - DNA, 15 bp, Homo sapiens
atgatgtgactgggc

SEQ ID NO: 1051064 - DNA, 15 bp, Homo sapiens
tgatgtgactgggcc

SEQ ID NO: 1051065 - DNA, 15 bp, Homo sapiens
gatgtgactgggcct

SEQ ID NO: 1051066 - DNA, 15 bp, Homo sapiens
atgtgactgggcctt

SEQ ID NO: 1051067 - DNA, 15 bp, Homo sapiens
tgtgactgggcctta

SEQ ID NO: 1051068 - DNA, 15 bp, Homo sapiens
gtgactgggccttag

SEQ ID NO: 1051069 - DNA, 15 bp, Homo sapiens
tgactgggccttagc

SEQ ID NO: 1051070 - DNA, 15 bp, Homo sapiens
gactgggccttagct

SEQ ID NO: 1051071 - DNA, 15 bp, Homo sapiens
actgggccttagctt

SEQ ID NO: 1051072 - DNA, 15 bp, Homo sapiens
ctgggccttagctta

SEQ ID NO: 1051073 - DNA, 15 bp, Homo sapiens
tgggccttagcttag

SEQ ID NO: 1051074 - DNA, 15 bp, Homo sapiens
gggccttagcttagc

SEQ ID NO: 1051075 - DNA, 15 bp, Homo sapiens
ggccttagcttagca

SEQ ID NO: 1051076 - DNA, 15 bp, Homo sapiens
gccttagcttagcaa

SEQ ID NO: 1051077 - DNA, 15 bp, Homo sapiens
ccttagcttagcaaa

SEQ ID NO: 1051078 - DNA, 15 bp, Homo sapiens
cttagcttagcaaat

SEQ ID NO: 1051079 - DNA, 15 bp, Homo sapiens
ttagcttagcaaatt

SEQ ID NO: 1051080 - DNA, 15 bp, Homo sapiens
tagcttagcaaattg

SEQ ID NO: 1051081 - DNA, 15 bp, Homo sapiens
agcttagcaaattgg

SEQ ID NO: 1051082 - DNA, 15 bp, Homo sapiens
gcttagcaaattgga

SEQ ID NO: 1051083 - DNA, 15 bp, Homo sapiens
cttagcaaattggag

SEQ ID NO: 1051084 - DNA, 15 bp, Homo sapiens
ttagcaaattggagg

SEQ ID NO: 1051085 - DNA, 15 bp, Homo sapiens
tagcaaattggaggc

SEQ ID NO: 1051086 - DNA, 15 bp, Homo sapiens
agcaaattggaggct

SEQ ID NO: 1051087 - DNA, 15 bp, Homo sapiens
gcaaattggaggctt

SEQ ID NO: 1051088 - DNA, 15 bp, Homo sapiens
caaattggaggcttt

SEQ ID NO: 1051089 - DNA, 15 bp, Homo sapiens
aaattggaggctttg

SEQ ID NO: 1051090 - DNA, 15 bp, Homo sapiens
aattggaggctttgc

SEQ ID NO: 1051091 - DNA, 15 bp, Homo sapiens
attggaggctttgct

SEQ ID NO: 1051092 - DNA, 15 bp, Homo sapiens
ttggaggctttgctg

SEQ ID NO: 1051093 - DNA, 15 bp, Homo sapiens
tggaggctttgctgg

SEQ ID NO: 1051094 - DNA, 15 bp, Homo sapiens
ggaggctttgctgga

SEQ ID NO: 1051095 - DNA, 15 bp, Homo sapiens
gaggctttgctggag

SEQ ID NO: 1051096 - DNA, 15 bp, Homo sapiens
aggctttgctggagg

SEQ ID NO: 1051097 - DNA, 15 bp, Homo sapiens
ggctttgctggagga

SEQ ID NO: 1051098 - DNA, 15 bp, Homo sapiens
gctttgctggaggaa

SEQ ID NO: 1051099 - DNA, 15 bp, Homo sapiens
ctttgctggaggaag

SEQ ID NO: 1051100 - DNA, 15 bp, Homo sapiens
tttgctggaggaagg

SEQ ID NO: 1051101 - DNA, 15 bp, Homo sapiens
ttgctggaggaaggg

SEQ ID NO: 1051102 - DNA, 15 bp, Homo sapiens
tgctggaggaagggg

SEQ ID NO: 1051103 - DNA, 15 bp, Homo sapiens
gctggaggaaggggg

SEQ ID NO: 1051104 - DNA, 15 bp, Homo sapiens
ctggaggaagggggc

SEQ ID NO: 1051105 - DNA, 15 bp, Homo sapiens
tggaggaagggggca

SEQ ID NO: 1051106 - DNA, 15 bp, Homo sapiens
ggaggaagggggcat

SEQ ID NO: 1051107 - DNA, 15 bp, Homo sapiens
gaggaagggggcatg

SEQ ID NO: 1051108 - DNA, 15 bp, Homo sapiens
aggaagggggcatgg

SEQ ID NO: 1051109 - DNA, 15 bp, Homo sapiens
ggaagggggcatggc

SEQ ID NO: 1051110 - DNA, 15 bp, Homo sapiens
gaagggggcatggct

SEQ ID NO: 1051111 - DNA, 15 bp, Homo sapiens
aagggggcatggctg

SEQ ID NO: 1051112 - DNA, 15 bp, Homo sapiens
agggggcatggctgc

SEQ ID NO: 1051113 - DNA, 15 bp, Homo sapiens
gggggcatggctgct

SEQ ID NO: 1051114 - DNA, 15 bp, Homo sapiens
ggggcatggctgctg

SEQ ID NO: 1051115 - DNA, 15 bp, Homo sapiens
gggcatggctgctgg

SEQ ID NO: 1051116 - DNA, 15 bp, Homo sapiens
ggcatggctgctggg

SEQ ID NO: 1051117 - DNA, 15 bp, Homo sapiens
gcatggctgctgggg

SEQ ID NO: 1051118 - DNA, 15 bp, Homo sapiens
catggctgctgggga

SEQ ID NO: 1051119 - DNA, 15 bp, Homo sapiens
atggctgctggggag

SEQ ID NO: 1051120 - DNA, 15 bp, Homo sapiens
tggctgctggggagt

SEQ ID NO: 1051121 - DNA, 15 bp, Homo sapiens
ggctgctggggagta

SEQ ID NO: 1051122 - DNA, 15 bp, Homo sapiens
gctgctggggagtaa

SEQ ID NO: 1051123 - DNA, 15 bp, Homo sapiens
ctgctggggagtaat

SEQ ID NO: 1051124 - DNA, 15 bp, Homo sapiens
tgctggggagtaata

SEQ ID NO: 1051125 - DNA, 15 bp, Homo sapiens
gctggggagtaatat

SEQ ID NO: 1051126 - DNA, 15 bp, Homo sapiens
ctggggagtaatatc

SEQ ID NO: 1051127 - DNA, 15 bp, Homo sapiens
tggggagtaatatca

SEQ ID NO: 1051128 - DNA, 15 bp, Homo sapiens
ggggagtaatatcac

SEQ ID NO: 1051129 - DNA, 15 bp, Homo sapiens
gggagtaatatcaca

SEQ ID NO: 1051130 - DNA, 15 bp, Homo sapiens
ggagtaatatcacaa

SEQ ID NO: 1051131 - DNA, 15 bp, Homo sapiens
gagtaatatcacaag

SEQ ID NO: 1051132 - DNA, 15 bp, Homo sapiens
agtaatatcacaagc

SEQ ID NO: 1051133 - DNA, 15 bp, Homo sapiens
gtaatatcacaagct

SEQ ID NO: 1051134 - DNA, 15 bp, Homo sapiens
taatatcacaagctg

SEQ ID NO: 1051135 - DNA, 15 bp, Homo sapiens
aatatcacaagctga

SEQ ID NO: 1051136 - DNA, 15 bp, Homo sapiens
atatcacaagctgac

SEQ ID NO: 1051137 - DNA, 15 bp, Homo sapiens
tatcacaagctgact

SEQ ID NO: 1051138 - DNA, 15 bp, Homo sapiens
atcacaagctgactc

SEQ ID NO: 1051139 - DNA, 15 bp, Homo sapiens
tcacaagctgactct

SEQ ID NO: 1051140 - DNA, 15 bp, Homo sapiens
cacaagctgactctt

SEQ ID NO: 1051141 - DNA, 15 bp, Homo sapiens
acaagctgactctta

SEQ ID NO: 1051142 - DNA, 15 bp, Homo sapiens
caagctgactcttaa

SEQ ID NO: 1051143 - DNA, 15 bp, Homo sapiens
aagctgactcttaat

SEQ ID NO: 1051144 - DNA, 15 bp, Homo sapiens
agctgactcttaatc

SEQ ID NO: 1051145 - DNA, 15 bp, Homo sapiens
gctgactcttaatct

SEQ ID NO: 1051146 - DNA, 15 bp, Homo sapiens
ctgactcttaatctt

SEQ ID NO: 1051147 - DNA, 15 bp, Homo sapiens
tgactcttaatcttg

SEQ ID NO: 1051148 - DNA, 15 bp, Homo sapiens
gactcttaatcttga

SEQ ID NO: 1051149 - DNA, 15 bp, Homo sapiens
actcttaatcttgac

SEQ ID NO: 1051150 - DNA, 15 bp, Homo sapiens
ctcttaatcttgact

SEQ ID NO: 1051151 - DNA, 15 bp, Homo sapiens
tcttaatcttgactc

SEQ ID NO: 1051152 - DNA, 15 bp, Homo sapiens
cttaatcttgactct

SEQ ID NO: 1051153 - DNA, 15 bp, Homo sapiens
ttaatcttgactctt

SEQ ID NO: 1051154 - DNA, 15 bp, Homo sapiens
taatcttgactcttg

SEQ ID NO: 1051155 - DNA, 15 bp, Homo sapiens
aatcttgactcttgg

SEQ ID NO: 1051156 - DNA, 15 bp, Homo sapiens
atcttgactcttggc

SEQ ID NO: 1051157 - DNA, 15 bp, Homo sapiens
tcttgactcttggca

SEQ ID NO: 1051158 - DNA, 15 bp, Homo sapiens
cttgactcttggcaa

SEQ ID NO: 1051159 - DNA, 15 bp, Homo sapiens
ttgactcttggcaac

SEQ ID NO: 1051160 - DNA, 15 bp, Homo sapiens
tgactcttggcaacc

SEQ ID NO: 1051161 - DNA, 15 bp, Homo sapiens
gactcttggcaacct

SEQ ID NO: 1051162 - DNA, 15 bp, Homo sapiens
actcttggcaacctg

SEQ ID NO: 1051163 - DNA, 15 bp, Homo sapiens
ctcttggcaacctgg

SEQ ID NO: 1051164 - DNA, 15 bp, Homo sapiens
tcttggcaacctggt

SEQ ID NO: 1051165 - DNA, 15 bp, Homo sapiens
cttggcaacctggta

SEQ ID NO: 1051166 - DNA, 15 bp, Homo sapiens
ttggcaacctggtag

SEQ ID NO: 1051167 - DNA, 15 bp, Homo sapiens
tggcaacctggtagg

SEQ ID NO: 1051168 - DNA, 15 bp, Homo sapiens
ggcaacctggtaggg

SEQ ID NO: 1051169 - DNA, 15 bp, Homo sapiens
gcaacctggtagggt

SEQ ID NO: 1051170 - DNA, 15 bp, Homo sapiens
caacctggtagggtc

SEQ ID NO: 1051171 - DNA, 15 bp, Homo sapiens
aacctggtagggtca

SEQ ID NO: 1051172 - DNA, 15 bp, Homo sapiens
acctggtagggtcac

SEQ ID NO: 1051173 - DNA, 15 bp, Homo sapiens
cctggtagggtcact

SEQ ID NO: 1051174 - DNA, 15 bp, Homo sapiens
ctggtagggtcactg

SEQ ID NO: 1051175 - DNA, 15 bp, Homo sapiens
tggtagggtcactga

SEQ ID NO: 1051176 - DNA, 15 bp, Homo sapiens
ggtagggtcactgac

SEQ ID NO: 1051177 - DNA, 15 bp, Homo sapiens
gtagggtcactgact

SEQ ID NO: 1051178 - DNA, 15 bp, Homo sapiens
tagggtcactgactg

SEQ ID NO: 1051179 - DNA, 15 bp, Homo sapiens
agggtcactgactgg

SEQ ID NO: 1051180 - DNA, 15 bp, Homo sapiens
gggtcactgactggg

SEQ ID NO: 1051181 - DNA, 15 bp, Homo sapiens
ggtcactgactgggc

SEQ ID NO: 1051182 - DNA, 15 bp, Homo sapiens
gtcactgactgggct

SEQ ID NO: 1051183 - DNA, 15 bp, Homo sapiens
tcactgactgggctt

SEQ ID NO: 1051184 - DNA, 15 bp, Homo sapiens
cactgactgggcttc

SEQ ID NO: 1051185 - DNA, 15 bp, Homo sapiens
actgactgggcttcg

SEQ ID NO: 1051186 - DNA, 15 bp, Homo sapiens
ctgactgggcttcgg

SEQ ID NO: 1051187 - DNA, 15 bp, Homo sapiens
tgactgggcttcgga

SEQ ID NO: 1051188 - DNA, 15 bp, Homo sapiens
gactgggcttcggag

SEQ ID NO: 1051189 - DNA, 15 bp, Homo sapiens
actgggcttcggagc

SEQ ID NO: 1051190 - DNA, 15 bp, Homo sapiens
ctgggcttcggagcc

SEQ ID NO: 1051191 - DNA, 15 bp, Homo sapiens
tgggcttcggagcca

SEQ ID NO: 1051192 - DNA, 15 bp, Homo sapiens
gggcttcggagccaa

SEQ ID NO: 1051193 - DNA, 15 bp, Homo sapiens
ggcttcggagccaac

SEQ ID NO: 1051194 - DNA, 15 bp, Homo sapiens
gcttcggagccaaca

SEQ ID NO: 1051195 - DNA, 15 bp, Homo sapiens
cttcggagccaacat

SEQ ID NO: 1051196 - DNA, 15 bp, Homo sapiens
ttcggagccaacatc

SEQ ID NO: 1051197 - DNA, 15 bp, Homo sapiens
tcggagccaacatct

SEQ ID NO: 1051198 - DNA, 15 bp, Homo sapiens
cggagccaacatctc

SEQ ID NO: 1051199 - DNA, 15 bp, Homo sapiens
ggagccaacatctcg

SEQ ID NO: 1051200 - DNA, 15 bp, Homo sapiens
gagccaacatctcgt

SEQ ID NO: 1051201 - DNA, 15 bp, Homo sapiens
agccaacatctcgtc

SEQ ID NO: 1051202 - DNA, 15 bp, Homo sapiens
gccaacatctcgtcc

SEQ ID NO: 1051203 - DNA, 15 bp, Homo sapiens
ccaacatctcgtcca

SEQ ID NO: 1051204 - DNA, 15 bp, Homo sapiens
caacatctcgtccat

SEQ ID NO: 1051205 - DNA, 15 bp, Homo sapiens
aacatctcgtccatg

SEQ ID NO: 1051206 - DNA, 15 bp, Homo sapiens
acatctcgtccatgg

SEQ ID NO: 1051207 - DNA, 15 bp, Homo sapiens
catctcgtccatgga

SEQ ID NO: 1051208 - DNA, 15 bp, Homo sapiens
atctcgtccatggag

SEQ ID NO: 1051209 - DNA, 15 bp, Homo sapiens
tctcgtccatggagg

SEQ ID NO: 1051210 - DNA, 15 bp, Homo sapiens
ctcgtccatggaggg

SEQ ID NO: 1051211 - DNA, 15 bp, Homo sapiens
tcgtccatggagggt

SEQ ID NO: 1051212 - DNA, 15 bp, Homo sapiens
cgtccatggagggtc

SEQ ID NO: 1051213 - DNA, 15 bp, Homo sapiens
gtccatggagggtct

SEQ ID NO: 1051214 - DNA, 15 bp, Homo sapiens
tccatggagggtctg

SEQ ID NO: 1051215 - DNA, 15 bp, Homo sapiens
ccatggagggtctga

SEQ ID NO: 1051216 - DNA, 15 bp, Homo sapiens
catggagggtctgac

SEQ ID NO: 1051217 - DNA, 15 bp, Homo sapiens
atggagggtctgacc

SEQ ID NO: 1051218 - DNA, 15 bp, Homo sapiens
tggagggtctgaccc

SEQ ID NO: 1051219 - DNA, 15 bp, Homo sapiens
ggagggtctgaccct

SEQ ID NO: 1051220 - DNA, 15 bp, Homo sapiens
gagggtctgaccctg

SEQ ID NO: 1051221 - DNA, 15 bp, Homo sapiens
agggtctgaccctga

SEQ ID NO: 1051222 - DNA, 15 bp, Homo sapiens
gggtctgaccctgac

SEQ ID NO: 1051223 - DNA, 15 bp, Homo sapiens
ggtctgaccctgacc

SEQ ID NO: 1051224 - DNA, 15 bp, Homo sapiens
gtctgaccctgacct

SEQ ID NO: 1051225 - DNA, 15 bp, Homo sapiens
tctgaccctgacctt

SEQ ID NO: 1051226 - DNA, 15 bp, Homo sapiens
ctgaccctgaccttg

SEQ ID NO: 1051227 - DNA, 15 bp, Homo sapiens
tgaccctgaccttgg

SEQ ID NO: 1051228 - DNA, 15 bp, Homo sapiens
gaccctgaccttggc

SEQ ID NO: 1051229 - DNA, 15 bp, Homo sapiens
accctgaccttggct

SEQ ID NO: 1051230 - DNA, 15 bp, Homo sapiens
ccctgaccttggctc

SEQ ID NO: 1051231 - DNA, 15 bp, Homo sapiens
cctgaccttggctcc

SEQ ID NO: 1051232 - DNA, 15 bp, Homo sapiens
ctgaccttggctccc

SEQ ID NO: 1051233 - DNA, 15 bp, Homo sapiens
tgaccttggctccct

SEQ ID NO: 1051234 - DNA, 15 bp, Homo sapiens
gaccttggctccctc

SEQ ID NO: 1051235 - DNA, 15 bp, Homo sapiens
accttggctccctca

SEQ ID NO: 1051236 - DNA, 15 bp, Homo sapiens
ccttggctccctcac

SEQ ID NO: 1051237 - DNA, 15 bp, Homo sapiens
cttggctccctcacc

SEQ ID NO: 1051238 - DNA, 15 bp, Homo sapiens
ttggctccctcaccg

SEQ ID NO: 1051239 - DNA, 15 bp, Homo sapiens
tggctccctcaccgc

SEQ ID NO: 1051240 - DNA, 15 bp, Homo sapiens
ggctccctcaccgca

SEQ ID NO: 1051241 - DNA, 15 bp, Homo sapiens
gctccctcaccgcag

SEQ ID NO: 1051242 - DNA, 15 bp, Homo sapiens
ctccctcaccgcagg

SEQ ID NO: 1051243 - DNA, 15 bp, Homo sapiens
tccctcaccgcaggt

SEQ ID NO: 1051244 - DNA, 15 bp, Homo sapiens
ccctcaccgcaggtt

SEQ ID NO: 1051245 - DNA, 15 bp, Homo sapiens
cctcaccgcaggttt

SEQ ID NO: 1051246 - DNA, 15 bp, Homo sapiens
ctcaccgcaggtttc

SEQ ID NO: 1051247 - DNA, 15 bp, Homo sapiens
tcaccgcaggtttca

SEQ ID NO: 1051248 - DNA, 15 bp, Homo sapiens
caccgcaggtttcac

SEQ ID NO: 1051249 - DNA, 15 bp, Homo sapiens
accgcaggtttcact

SEQ ID NO: 1051250 - DNA, 15 bp, Homo sapiens
ccgcaggtttcactg

SEQ ID NO: 1051251 - DNA, 15 bp, Homo sapiens
cgcaggtttcactga

SEQ ID NO: 1051252 - DNA, 15 bp, Homo sapiens
gcaggtttcactgag

SEQ ID NO: 1051253 - DNA, 15 bp, Homo sapiens
caggtttcactgagt

SEQ ID NO: 1051254 - DNA, 15 bp, Homo sapiens
aggtttcactgagtc

SEQ ID NO: 1051255 - DNA, 15 bp, Homo sapiens
ggtttcactgagtcc

SEQ ID NO: 1051256 - DNA, 15 bp, Homo sapiens
gtttcactgagtcct

SEQ ID NO: 1051257 - DNA, 15 bp, Homo sapiens
tttcactgagtcctt

SEQ ID NO: 1051258 - DNA, 15 bp, Homo sapiens
ttcactgagtccttg

SEQ ID NO: 1051259 - DNA, 15 bp, Homo sapiens
tcactgagtccttgg

SEQ ID NO: 1051260 - DNA, 15 bp, Homo sapiens
cactgagtccttggg

SEQ ID NO: 1051261 - DNA, 15 bp, Homo sapiens
actgagtccttggga

SEQ ID NO: 1051262 - DNA, 15 bp, Homo sapiens
ctgagtccttgggac

SEQ ID NO: 1051263 - DNA, 15 bp, Homo sapiens
tgagtccttgggact

SEQ ID NO: 1051264 - DNA, 15 bp, Homo sapiens
gagtccttgggactg

SEQ ID NO: 1051265 - DNA, 15 bp, Homo sapiens
agtccttgggactgc

SEQ ID NO: 1051266 - DNA, 15 bp, Homo sapiens
gtccttgggactgct

SEQ ID NO: 1051267 - DNA, 15 bp, Homo sapiens
tccttgggactgctc

SEQ ID NO: 1051268 - DNA, 15 bp, Homo sapiens
ccttgggactgctcc

SEQ ID NO: 1051269 - DNA, 15 bp, Homo sapiens
cttgggactgctcca

SEQ ID NO: 1051270 - DNA, 15 bp, Homo sapiens
ttgggactgctccag

SEQ ID NO: 1051271 - DNA, 15 bp, Homo sapiens
tgggactgctccagc

SEQ ID NO: 1051272 - DNA, 15 bp, Homo sapiens
gggactgctccagcc

SEQ ID NO: 1051273 - DNA, 15 bp, Homo sapiens
ggactgctccagcct

SEQ ID NO: 1051274 - DNA, 15 bp, Homo sapiens
gactgctccagcctc

SEQ ID NO: 1051275 - DNA, 15 bp, Homo sapiens
actgctccagcctca

SEQ ID NO: 1051276 - DNA, 15 bp, Homo sapiens
ctgctccagcctcag

SEQ ID NO: 1051277 - DNA, 15 bp, Homo sapiens
tgctccagcctcagc

SEQ ID NO: 1051278 - DNA, 15 bp, Homo sapiens
gctccagcctcagcc

SEQ ID NO: 1051279 - DNA, 15 bp, Homo sapiens
ctccagcctcagcca

SEQ ID NO: 1051280 - DNA, 15 bp, Homo sapiens
tccagcctcagccat

SEQ ID NO: 1051281 - DNA, 15 bp, Homo sapiens
ccagcctcagccatc

SEQ ID NO: 1051282 - DNA, 15 bp, Homo sapiens
cagcctcagccatct

SEQ ID NO: 1051283 - DNA, 15 bp, Homo sapiens
agcctcagccatctc

SEQ ID NO: 1051284 - DNA, 15 bp, Homo sapiens
gcctcagccatctct

SEQ ID NO: 1051285 - DNA, 15 bp, Homo sapiens
cctcagccatctctt

SEQ ID NO: 1051286 - DNA, 15 bp, Homo sapiens
ctcagccatctcttt

SEQ ID NO: 1051287 - DNA, 15 bp, Homo sapiens
tcagccatctctttg

SEQ ID NO: 1051288 - DNA, 15 bp, Homo sapiens
cagccatctctttgg

SEQ ID NO: 1051289 - DNA, 15 bp, Homo sapiens
agccatctctttggt

SEQ ID NO: 1051290 - DNA, 15 bp, Homo sapiens
gccatctctttggtc

SEQ ID NO: 1051291 - DNA, 15 bp, Homo sapiens
ccatctctttggtct

SEQ ID NO: 1051292 - DNA, 15 bp, Homo sapiens
catctctttggtctc

SEQ ID NO: 1051293 - DNA, 15 bp, Homo sapiens
atctctttggtctct

SEQ ID NO: 1051294 - DNA, 15 bp, Homo sapiens
tctctttggtctctg

SEQ ID NO: 1051295 - DNA, 15 bp, Homo sapiens
ctctttggtctctgc

SEQ ID NO: 1051296 - DNA, 15 bp, Homo sapiens
tctttggtctctgct

SEQ ID NO: 1051297 - DNA, 15 bp, Homo sapiens
ctttggtctctgctg

SEQ ID NO: 1051298 - DNA, 15 bp, Homo sapiens
tttggtctctgctga

SEQ ID NO: 1051299 - DNA, 15 bp, Homo sapiens
ttggtctctgctgat

SEQ ID NO: 1051300 - DNA, 15 bp, Homo sapiens
tggtctctgctgatc

SEQ ID NO: 1051301 - DNA, 15 bp, Homo sapiens
ggtctctgctgatca

SEQ ID NO: 1051302 - DNA, 15 bp, Homo sapiens
gtctctgctgatcag

SEQ ID NO: 1051303 - DNA, 15 bp, Homo sapiens
tctctgctgatcagg

SEQ ID NO: 1051304 - DNA, 15 bp, Homo sapiens
ctctgctgatcaggg

SEQ ID NO: 1051305 - DNA, 15 bp, Homo sapiens
tctgctgatcagggt

SEQ ID NO: 1051306 - DNA, 15 bp, Homo sapiens
ctgctgatcagggta

SEQ ID NO: 1051307 - DNA, 15 bp, Homo sapiens
tgctgatcagggtag

SEQ ID NO: 1051308 - DNA, 15 bp, Homo sapiens
gctgatcagggtaga

SEQ ID NO: 1051309 - DNA, 15 bp, Homo sapiens
ctgatcagggtagag

SEQ ID NO: 1051310 - DNA, 15 bp, Homo sapiens
tgatcagggtagagt

SEQ ID NO: 1051311 - DNA, 15 bp, Homo sapiens
gatcagggtagagtg

SEQ ID NO: 1051312 - DNA, 15 bp, Homo sapiens
atcagggtagagtgc

SEQ ID NO: 1051313 - DNA, 15 bp, Homo sapiens
tcagggtagagtgct

SEQ ID NO: 1051314 - DNA, 15 bp, Homo sapiens
cagggtagagtgctg

SEQ ID NO: 1051315 - DNA, 15 bp, Homo sapiens
agggtagagtgctgg

SEQ ID NO: 1051316 - DNA, 15 bp, Homo sapiens
gggtagagtgctggg

SEQ ID NO: 1051317 - DNA, 15 bp, Homo sapiens
ggtagagtgctgggg

SEQ ID NO: 1051318 - DNA, 15 bp, Homo sapiens
gtagagtgctggggg

SEQ ID NO: 1051319 - DNA, 15 bp, Homo sapiens
tagagtgctgggggg

SEQ ID NO: 1051320 - DNA, 15 bp, Homo sapiens
agagtgctggggggg

SEQ ID NO: 1051321 - DNA, 15 bp, Homo sapiens
gagtgctggggggga

SEQ ID NO: 1051322 - DNA, 15 bp, Homo sapiens
agtgctgggggggat

SEQ ID NO: 1051323 - DNA, 15 bp, Homo sapiens
gtgctgggggggata

SEQ ID NO: 1051324 - DNA, 15 bp, Homo sapiens
tgctgggggggatat

SEQ ID NO: 1051325 - DNA, 15 bp, Homo sapiens
gctgggggggatatc

SEQ ID NO: 1051326 - DNA, 15 bp, Homo sapiens
ctgggggggatatcg

SEQ ID NO: 1051327 - DNA, 15 bp, Homo sapiens
tgggggggatatcgt

SEQ ID NO: 1051328 - DNA, 15 bp, Homo sapiens
gggggggatatcgtg

SEQ ID NO: 1051329 - DNA, 15 bp, Homo sapiens
ggggggatatcgtgg

SEQ ID NO: 1051330 - DNA, 15 bp, Homo sapiens
gggggatatcgtggt

SEQ ID NO: 1051331 - DNA, 15 bp, Homo sapiens
ggggatatcgtggtg

SEQ ID NO: 1051332 - DNA, 15 bp, Homo sapiens
gggatatcgtggtgc

SEQ ID NO: 1051333 - DNA, 15 bp, Homo sapiens
ggatatcgtggtgct

SEQ ID NO: 1051334 - DNA, 15 bp, Homo sapiens
gatatcgtggtgctg

SEQ ID NO: 1051335 - DNA, 15 bp, Homo sapiens
atatcgtggtgctgc

SEQ ID NO: 1051336 - DNA, 15 bp, Homo sapiens
tatcgtggtgctgcg

SEQ ID NO: 1051337 - DNA, 15 bp, Homo sapiens
atcgtggtgctgcgt

SEQ ID NO: 1051338 - DNA, 15 bp, Homo sapiens
tcgtggtgctgcgtg

SEQ ID NO: 1051339 - DNA, 15 bp, Homo sapiens
cgtggtgctgcgtgt

SEQ ID NO: 1051340 - DNA, 15 bp, Homo sapiens
gtggtgctgcgtgtg

SEQ ID NO: 1051341 - DNA, 15 bp, Homo sapiens
tggtgctgcgtgtga

SEQ ID NO: 1051342 - DNA, 15 bp, Homo sapiens
ggtgctgcgtgtgat

SEQ ID NO: 1051343 - DNA, 15 bp, Homo sapiens
gtgctgcgtgtgata

SEQ ID NO: 1051344 - DNA, 15 bp, Homo sapiens
tgctgcgtgtgatag

SEQ ID NO: 1051345 - DNA, 15 bp, Homo sapiens
gctgcgtgtgataga

SEQ ID NO: 1051346 - DNA, 15 bp, Homo sapiens
ctgcgtgtgatagat

SEQ ID NO: 1051347 - DNA, 15 bp, Homo sapiens
tgcgtgtgatagata

SEQ ID NO: 1051348 - DNA, 15 bp, Homo sapiens
gcgtgtgatagatac

SEQ ID NO: 1051349 - DNA, 15 bp, Homo sapiens
cgtgtgatagatact

SEQ ID NO: 1051350 - DNA, 15 bp, Homo sapiens
gtgtgatagatactc

SEQ ID NO: 1051351 - DNA, 15 bp, Homo sapiens
tgtgatagatactca

SEQ ID NO: 1051352 - DNA, 15 bp, Homo sapiens
gtgatagatactcag

SEQ ID NO: 1051353 - DNA, 15 bp, Homo sapiens
tgatagatactcagt

SEQ ID NO: 1051354 - DNA, 15 bp, Homo sapiens
gatagatactcagta

SEQ ID NO: 1051355 - DNA, 15 bp, Homo sapiens
atagatactcagtac

SEQ ID NO: 1051356 - DNA, 15 bp, Homo sapiens
tagatactcagtacg

SEQ ID NO: 1051357 - DNA, 15 bp, Homo sapiens
agatactcagtacgt

SEQ ID NO: 1051358 - DNA, 15 bp, Homo sapiens
gatactcagtacgtt

SEQ ID NO: 1051359 - DNA, 15 bp, Homo sapiens
atactcagtacgttt

SEQ ID NO: 1051360 - DNA, 15 bp, Homo sapiens
tactcagtacgtttt

SEQ ID NO: 1051361 - DNA, 15 bp, Homo sapiens
actcagtacgttttt

SEQ ID NO: 1051362 - DNA, 15 bp, Homo sapiens
ctcagtacgtttttg

SEQ ID NO: 1051363 - DNA, 15 bp, Homo sapiens
tcagtacgtttttgt

SEQ ID NO: 1051364 - DNA, 15 bp, Homo sapiens
cagtacgtttttgtc

SEQ ID NO: 1051365 - DNA, 15 bp, Homo sapiens
agtacgtttttgtca

SEQ ID NO: 1051366 - DNA, 15 bp, Homo sapiens
gtacgtttttgtcaa

SEQ ID NO: 1051367 - DNA, 15 bp, Homo sapiens
tacgtttttgtcaag

SEQ ID NO: 1051368 - DNA, 15 bp, Homo sapiens
acgtttttgtcaagg

SEQ ID NO: 1051369 - DNA, 15 bp, Homo sapiens
cgtttttgtcaaggg

SEQ ID NO: 1051370 - DNA, 15 bp, Homo sapiens
gtttttgtcaagggt

SEQ ID NO: 1051371 - DNA, 15 bp, Homo sapiens
tttttgtcaagggtg

SEQ ID NO: 1051372 - DNA, 15 bp, Homo sapiens
ttttgtcaagggtga

SEQ ID NO: 1051373 - DNA, 15 bp, Homo sapiens
tttgtcaagggtgac

SEQ ID NO: 1051374 - DNA, 15 bp, Homo sapiens
ttgtcaagggtgacg

SEQ ID NO: 1051375 - DNA, 15 bp, Homo sapiens
tgtcaagggtgacgg

SEQ ID NO: 1051376 - DNA, 15 bp, Homo sapiens
gtcaagggtgacggg

SEQ ID NO: 1051377 - DNA, 15 bp, Homo sapiens
tcaagggtgacgggc

SEQ ID NO: 1051378 - DNA, 15 bp, Homo sapiens
caagggtgacgggct

SEQ ID NO: 1051379 - DNA, 15 bp, Homo sapiens
aagggtgacgggctc

SEQ ID NO: 1051380 - DNA, 15 bp, Homo sapiens
agggtgacgggctcc

SEQ ID NO: 1051381 - DNA, 15 bp, Homo sapiens
gggtgacgggctcct

SEQ ID NO: 1051382 - DNA, 15 bp, Homo sapiens
ggtgacgggctcctg

SEQ ID NO: 1051383 - DNA, 15 bp, Homo sapiens
gtgacgggctcctgt

SEQ ID NO: 1051384 - DNA, 15 bp, Homo sapiens
tgacgggctcctgtc

SEQ ID NO: 1051385 - DNA, 15 bp, Homo sapiens
gacgggctcctgtcg

SEQ ID NO: 1051386 - DNA, 15 bp, Homo sapiens
acgggctcctgtcgt

SEQ ID NO: 1051387 - DNA, 15 bp, Homo sapiens
cgggctcctgtcgtg

SEQ ID NO: 1051388 - DNA, 15 bp, Homo sapiens
gggctcctgtcgtgt

SEQ ID NO: 1051389 - DNA, 15 bp, Homo sapiens
ggctcctgtcgtgtg

SEQ ID NO: 1051390 - DNA, 15 bp, Homo sapiens
gctcctgtcgtgtgg

SEQ ID NO: 1051391 - DNA, 15 bp, Homo sapiens
ctcctgtcgtgtggg

SEQ ID NO: 1051392 - DNA, 15 bp, Homo sapiens
tcctgtcgtgtgggt

SEQ ID NO: 1051393 - DNA, 15 bp, Homo sapiens
cctgtcgtgtgggta

SEQ ID NO: 1051394 - DNA, 15 bp, Homo sapiens
ctgtcgtgtgggtaa

SEQ ID NO: 1051395 - DNA, 15 bp, Homo sapiens
tgtcgtgtgggtaaa

SEQ ID NO: 1051396 - DNA, 15 bp, Homo sapiens
gtcgtgtgggtaaat

SEQ ID NO: 1051397 - DNA, 15 bp, Homo sapiens
tcgtgtgggtaaatg

SEQ ID NO: 1051398 - DNA, 15 bp, Homo sapiens
cgtgtgggtaaatga

SEQ ID NO: 1051399 - DNA, 15 bp, Homo sapiens
gtgtgggtaaatgag

SEQ ID NO: 1051400 - DNA, 15 bp, Homo sapiens
tgtgggtaaatgagc

SEQ ID NO: 1051401 - DNA, 15 bp, Homo sapiens
gtgggtaaatgagca

SEQ ID NO: 1051402 - DNA, 15 bp, Homo sapiens
tgggtaaatgagcaa

SEQ ID NO: 1051403 - DNA, 15 bp, Homo sapiens
gggtaaatgagcaag

SEQ ID NO: 1051404 - DNA, 15 bp, Homo sapiens
ggtaaatgagcaagt

SEQ ID NO: 1051405 - DNA, 15 bp, Homo sapiens
gtaaatgagcaagtt

SEQ ID NO: 1051406 - DNA, 15 bp, Homo sapiens
taaatgagcaagttt

SEQ ID NO: 1051407 - DNA, 15 bp, Homo sapiens
aaatgagcaagtttg

SEQ ID NO: 1051408 - DNA, 15 bp, Homo sapiens
aatgagcaagtttgg

SEQ ID NO: 1051409 - DNA, 15 bp, Homo sapiens
atgagcaagtttggg

SEQ ID NO: 1051410 - DNA, 15 bp, Homo sapiens
tgagcaagtttgggc

SEQ ID NO: 1051411 - DNA, 15 bp, Homo sapiens
gagcaagtttgggct

SEQ ID NO: 1051412 - DNA, 15 bp, Homo sapiens
agcaagtttgggcta

SEQ ID NO: 1051413 - DNA, 15 bp, Homo sapiens
gcaagtttgggctaa

SEQ ID NO: 1051414 - DNA, 15 bp, Homo sapiens
caagtttgggctaag

SEQ ID NO: 1051415 - DNA, 15 bp, Homo sapiens
aagtttgggctaagt

SEQ ID NO: 1051416 - DNA, 15 bp, Homo sapiens
agtttgggctaagtg

SEQ ID NO: 1051417 - DNA, 15 bp, Homo sapiens
gtttgggctaagtgg

SEQ ID NO: 1051418 - DNA, 15 bp, Homo sapiens
tttgggctaagtggc

SEQ ID NO: 1051419 - DNA, 15 bp, Homo sapiens
ttgggctaagtggca

SEQ ID NO: 1051420 - DNA, 15 bp, Homo sapiens
tgggctaagtggcat

SEQ ID NO: 1051421 - DNA, 15 bp, Homo sapiens
gggctaagtggcatg

SEQ ID NO: 1051422 - DNA, 15 bp, Homo sapiens
ggctaagtggcatga

SEQ ID NO: 1051423 - DNA, 15 bp, Homo sapiens
gctaagtggcatgat

SEQ ID NO: 1051424 - DNA, 15 bp, Homo sapiens
ctaagtggcatgatg

SEQ ID NO: 1051425 - DNA, 15 bp, Homo sapiens
taagtggcatgatgc

SEQ ID NO: 1051426 - DNA, 15 bp, Homo sapiens
aagtggcatgatgct

SEQ ID NO: 1051427 - DNA, 15 bp, Homo sapiens
agtggcatgatgctg

SEQ ID NO: 1051428 - DNA, 15 bp, Homo sapiens
gtggcatgatgctgt

SEQ ID NO: 1051429 - DNA, 15 bp, Homo sapiens
tggcatgatgctgta

SEQ ID NO: 1051430 - DNA, 15 bp, Homo sapiens
ggcatgatgctgtaa

SEQ ID NO: 1051431 - DNA, 15 bp, Homo sapiens
gcatgatgctgtaaa

SEQ ID NO: 1051432 - DNA, 15 bp, Homo sapiens
catgatgctgtaaag

SEQ ID NO: 1051433 - DNA, 15 bp, Homo sapiens
atgatgctgtaaagg

SEQ ID NO: 1051434 - DNA, 15 bp, Homo sapiens
tgatgctgtaaaggc

SEQ ID NO: 1051435 - DNA, 15 bp, Homo sapiens
gatgctgtaaaggca

SEQ ID NO: 1051436 - DNA, 15 bp, Homo sapiens
atgctgtaaaggcat

SEQ ID NO: 1051437 - DNA, 15 bp, Homo sapiens
tgctgtaaaggcatc

SEQ ID NO: 1051438 - DNA, 15 bp, Homo sapiens
gctgtaaaggcatct

SEQ ID NO: 1051439 - DNA, 15 bp, Homo sapiens
ctgtaaaggcatctt

SEQ ID NO: 1051440 - DNA, 15 bp, Homo sapiens
tgtaaaggcatcttg

SEQ ID NO: 1051441 - DNA, 15 bp, Homo sapiens
gtaaaggcatcttgt

SEQ ID NO: 1051442 - DNA, 15 bp, Homo sapiens
taaaggcatcttgta

SEQ ID NO: 1051443 - DNA, 15 bp, Homo sapiens
aaaggcatcttgtaa

SEQ ID NO: 1051444 - DNA, 15 bp, Homo sapiens
aaggcatcttgtaaa

SEQ ID NO: 1051445 - DNA, 15 bp, Homo sapiens
aggcatcttgtaaat

SEQ ID NO: 1051446 - DNA, 15 bp, Homo sapiens
ggcatcttgtaaatc

SEQ ID NO: 1051447 - DNA, 15 bp, Homo sapiens
gcatcttgtaaatcc

SEQ ID NO: 1051448 - DNA, 15 bp, Homo sapiens
catcttgtaaatcct

SEQ ID NO: 1051449 - DNA, 15 bp, Homo sapiens
atcttgtaaatcctg

SEQ ID NO: 1051450 - DNA, 15 bp, Homo sapiens
tcttgtaaatcctga

SEQ ID NO: 1051451 - DNA, 15 bp, Homo sapiens
cttgtaaatcctgaa

SEQ ID NO: 1051452 - DNA, 15 bp, Homo sapiens
ttgtaaatcctgaag

SEQ ID NO: 1051453 - DNA, 15 bp, Homo sapiens
tgtaaatcctgaagt

SEQ ID NO: 1051454 - DNA, 15 bp, Homo sapiens
gtaaatcctgaagtg

SEQ ID NO: 1051455 - DNA, 15 bp, Homo sapiens
taaatcctgaagtgc

SEQ ID NO: 1051456 - DNA, 15 bp, Homo sapiens
aaatcctgaagtgct

SEQ ID NO: 1051457 - DNA, 15 bp, Homo sapiens
aatcctgaagtgctt

SEQ ID NO: 1051458 - DNA, 15 bp, Homo sapiens
atcctgaagtgcttt

SEQ ID NO: 1051459 - DNA, 15 bp, Homo sapiens
tcctgaagtgctttg

SEQ ID NO: 1051460 - DNA, 15 bp, Homo sapiens
cctgaagtgctttgc

SEQ ID NO: 1051461 - DNA, 15 bp, Homo sapiens
ctgaagtgctttgca

SEQ ID NO: 1051462 - DNA, 15 bp, Homo sapiens
tgaagtgctttgcaa

SEQ ID NO: 1051463 - DNA, 15 bp, Homo sapiens
gaagtgctttgcaaa

SEQ ID NO: 1051464 - DNA, 15 bp, Homo sapiens
aagtgctttgcaaat

SEQ ID NO: 1051465 - DNA, 15 bp, Homo sapiens
agtgctttgcaaatg

SEQ ID NO: 1051466 - DNA, 15 bp, Homo sapiens
gtgctttgcaaatga

SEQ ID NO: 1051467 - DNA, 15 bp, Homo sapiens
tgctttgcaaatgaa

SEQ ID NO: 1051468 - DNA, 15 bp, Homo sapiens
gctttgcaaatgaaa

SEQ ID NO: 1051469 - DNA, 15 bp, Homo sapiens
ctttgcaaatgaaag

SEQ ID NO: 1051470 - DNA, 15 bp, Homo sapiens
tttgcaaatgaaagt

SEQ ID NO: 1051471 - DNA, 15 bp, Homo sapiens
ttgcaaatgaaagtt

SEQ ID NO: 1051472 - DNA, 15 bp, Homo sapiens
tgcaaatgaaagtta

SEQ ID NO: 1051473 - DNA, 15 bp, Homo sapiens
gcaaatgaaagttat

SEQ ID NO: 1051474 - DNA, 15 bp, Homo sapiens
caaatgaaagttatt

SEQ ID NO: 1051475 - DNA, 15 bp, Homo sapiens
aaatgaaagttatta

SEQ ID NO: 1051476 - DNA, 15 bp, Homo sapiens
aatgaaagttattac

SEQ ID NO: 1051477 - DNA, 15 bp, Homo sapiens
atgaaagttattaca

SEQ ID NO: 1051478 - DNA, 15 bp, Homo sapiens
tgaaagttattacaa

SEQ ID NO: 1051479 - DNA, 15 bp, Homo sapiens
gaaagttattacaaa

SEQ ID NO: 1051480 - DNA, 15 bp, Homo sapiens
aaagttattacaaag

SEQ ID NO: 1051481 - DNA, 15 bp, Homo sapiens
aagttattacaaagt

SEQ ID NO: 1051482 - DNA, 15 bp, Homo sapiens
agttattacaaagtc

SEQ ID NO: 1051483 - DNA, 15 bp, Homo sapiens
gttattacaaagtcc

SEQ ID NO: 1051484 - DNA, 15 bp, Homo sapiens
ttattacaaagtccc

SEQ ID NO: 1051485 - DNA, 15 bp, Homo sapiens
tattacaaagtccct

SEQ ID NO: 1051486 - DNA, 15 bp, Homo sapiens
attacaaagtcccta

SEQ ID NO: 1051487 - DNA, 15 bp, Homo sapiens
ttacaaagtccctag

SEQ ID NO: 1051488 - DNA, 15 bp, Homo sapiens
tacaaagtccctagt

SEQ ID NO: 1051489 - DNA, 15 bp, Homo sapiens
acaaagtccctagtt

SEQ ID NO: 1051490 - DNA, 15 bp, Homo sapiens
caaagtccctagttt

SEQ ID NO: 1051491 - DNA, 15 bp, Homo sapiens
aaagtccctagttta

SEQ ID NO: 1051492 - DNA, 15 bp, Homo sapiens
aagtccctagtttag

SEQ ID NO: 1051493 - DNA, 15 bp, Homo sapiens
agtccctagtttagt

SEQ ID NO: 1051494 - DNA, 15 bp, Homo sapiens
gtccctagtttagta

SEQ ID NO: 1051495 - DNA, 15 bp, Homo sapiens
tccctagtttagtat

SEQ ID NO: 1051496 - DNA, 15 bp, Homo sapiens
ccctagtttagtata

SEQ ID NO: 1051497 - DNA, 15 bp, Homo sapiens
cctagtttagtataa

SEQ ID NO: 1051498 - DNA, 15 bp, Homo sapiens
ctagtttagtataat

SEQ ID NO: 1051499 - DNA, 15 bp, Homo sapiens
tagtttagtataatc

SEQ ID NO: 1051500 - DNA, 15 bp, Homo sapiens
agtttagtataatct

SEQ ID NO: 1051501 - DNA, 15 bp, Homo sapiens
gtttagtataatcta

SEQ ID NO: 1051502 - DNA, 15 bp, Homo sapiens
tttagtataatctac

SEQ ID NO: 1051503 - DNA, 15 bp, Homo sapiens
ttagtataatctacg

SEQ ID NO: 1051504 - DNA, 15 bp, Homo sapiens
tagtataatctacgt

SEQ ID NO: 1051505 - DNA, 15 bp, Homo sapiens
agtataatctacgtt

SEQ ID NO: 1051506 - DNA, 15 bp, Homo sapiens
gtataatctacgttt

SEQ ID NO: 1051507 - DNA, 15 bp, Homo sapiens
tataatctacgtttg

SEQ ID NO: 1051508 - DNA, 15 bp, Homo sapiens
ataatctacgtttga

SEQ ID NO: 1051509 - DNA, 15 bp, Homo sapiens
taatctacgtttgac

SEQ ID NO: 1051510 - DNA, 15 bp, Homo sapiens
aatctacgtttgact

SEQ ID NO: 1051511 - DNA, 15 bp, Homo sapiens
atctacgtttgactg

SEQ ID NO: 1051512 - DNA, 15 bp, Homo sapiens
tctacgtttgactgc

SEQ ID NO: 1051513 - DNA, 15 bp, Homo sapiens
ctacgtttgactgca

SEQ ID NO: 1051514 - DNA, 15 bp, Homo sapiens
tacgtttgactgcat

SEQ ID NO: 1051515 - DNA, 15 bp, Homo sapiens
acgtttgactgcata

SEQ ID NO: 1051516 - DNA, 15 bp, Homo sapiens
cgtttgactgcatat

SEQ ID NO: 1051517 - DNA, 15 bp, Homo sapiens
gtttgactgcatata

SEQ ID NO: 1051518 - DNA, 15 bp, Homo sapiens
tttgactgcatataa

SEQ ID NO: 1051519 - DNA, 15 bp, Homo sapiens
ttgactgcatataat

SEQ ID NO: 1051520 - DNA, 15 bp, Homo sapiens
tgactgcatataatg

SEQ ID NO: 1051521 - DNA, 15 bp, Homo sapiens
gactgcatataatga

SEQ ID NO: 1051522 - DNA, 15 bp, Homo sapiens
actgcatataatgaa

SEQ ID NO: 1051523 - DNA, 15 bp, Homo sapiens
ctgcatataatgaaa

SEQ ID NO: 1051524 - DNA, 15 bp, Homo sapiens
tgcatataatgaaaa

SEQ ID NO: 1051525 - DNA, 15 bp, Homo sapiens
gcatataatgaaaac

SEQ ID NO: 1051526 - DNA, 15 bp, Homo sapiens
catataatgaaaacc

SEQ ID NO: 1051527 - DNA, 15 bp, Homo sapiens
atataatgaaaacct

SEQ ID NO: 1051528 - DNA, 15 bp, Homo sapiens
tataatgaaaacctc

SEQ ID NO: 1051529 - DNA, 15 bp, Homo sapiens
ataatgaaaacctca

SEQ ID NO: 1051530 - DNA, 15 bp, Homo sapiens
taatgaaaacctcac

SEQ ID NO: 1051531 - DNA, 15 bp, Homo sapiens
aatgaaaacctcaca

SEQ ID NO: 1051532 - DNA, 15 bp, Homo sapiens
atgaaaacctcacaa

SEQ ID NO: 1051533 - DNA, 15 bp, Homo sapiens
tgaaaacctcacaag

SEQ ID NO: 1051534 - DNA, 15 bp, Homo sapiens
gaaaacctcacaaga

SEQ ID NO: 1051535 - DNA, 15 bp, Homo sapiens
aaaacctcacaagaa

SEQ ID NO: 1051536 - DNA, 15 bp, Homo sapiens
aaacctcacaagaaa

SEQ ID NO: 1051537 - DNA, 15 bp, Homo sapiens
aacctcacaagaaaa

SEQ ID NO: 1051538 - DNA, 15 bp, Homo sapiens
acctcacaagaaaag

SEQ ID NO: 1051539 - DNA, 15 bp, Homo sapiens
cctcacaagaaaagt

SEQ ID NO: 1051540 - DNA, 15 bp, Homo sapiens
ctcacaagaaaagtc

SEQ ID NO: 1051541 - DNA, 15 bp, Homo sapiens
tcacaagaaaagtct

SEQ ID NO: 1051542 - DNA, 15 bp, Homo sapiens
cacaagaaaagtcta

SEQ ID NO: 1051543 - DNA, 15 bp, Homo sapiens
acaagaaaagtctag

SEQ ID NO: 1051544 - DNA, 15 bp, Homo sapiens
caagaaaagtctagc

SEQ ID NO: 1051545 - DNA, 15 bp, Homo sapiens
aagaaaagtctagcg

SEQ ID NO: 1051546 - DNA, 15 bp, Homo sapiens
agaaaagtctagcgg

SEQ ID NO: 1051547 - DNA, 15 bp, Homo sapiens
gaaaagtctagcggt

SEQ ID NO: 1051548 - DNA, 15 bp, Homo sapiens
aaaagtctagcggta

SEQ ID NO: 1051549 - DNA, 15 bp, Homo sapiens
aaagtctagcggtag

SEQ ID NO: 1051550 - DNA, 15 bp, Homo sapiens
aagtctagcggtagg

SEQ ID NO: 1051551 - DNA, 15 bp, Homo sapiens
agtctagcggtaggc

SEQ ID NO: 1051552 - DNA, 15 bp, Homo sapiens
gtctagcggtaggct

SEQ ID NO: 1051553 - DNA, 15 bp, Homo sapiens
tctagcggtaggctg

SEQ ID NO: 1051554 - DNA, 15 bp, Homo sapiens
ctagcggtaggctgt

SEQ ID NO: 1051555 - DNA, 15 bp, Homo sapiens
tagcggtaggctgtt

SEQ ID NO: 1051556 - DNA, 15 bp, Homo sapiens
agcggtaggctgttc

SEQ ID NO: 1051557 - DNA, 15 bp, Homo sapiens
gcggtaggctgttca

SEQ ID NO: 1051558 - DNA, 15 bp, Homo sapiens
cggtaggctgttcag

SEQ ID NO: 1051559 - DNA, 15 bp, Homo sapiens
ggtaggctgttcagt

SEQ ID NO: 1051560 - DNA, 15 bp, Homo sapiens
gtaggctgttcagtg

SEQ ID NO: 1051561 - DNA, 15 bp, Homo sapiens
taggctgttcagtgt

SEQ ID NO: 1051562 - DNA, 15 bp, Homo sapiens
aggctgttcagtgtt

SEQ ID NO: 1051563 - DNA, 15 bp, Homo sapiens
ggctgttcagtgttg

SEQ ID NO: 1051564 - DNA, 15 bp, Homo sapiens
gctgttcagtgttgg

SEQ ID NO: 1051565 - DNA, 15 bp, Homo sapiens
ctgttcagtgttggt

SEQ ID NO: 1051566 - DNA, 15 bp, Homo sapiens
tgttcagtgttggtg

SEQ ID NO: 1051567 - DNA, 15 bp, Homo sapiens
gttcagtgttggtgt

SEQ ID NO: 1051568 - DNA, 15 bp, Homo sapiens
ttcagtgttggtgtg

SEQ ID NO: 1051569 - DNA, 15 bp, Homo sapiens
tcagtgttggtgtgg

SEQ ID NO: 1051570 - DNA, 15 bp, Homo sapiens
cagtgttggtgtggt

SEQ ID NO: 1051571 - DNA, 15 bp, Homo sapiens
agtgttggtgtggtg

SEQ ID NO: 1051572 - DNA, 15 bp, Homo sapiens
gtgttggtgtggtgg

SEQ ID NO: 1051573 - DNA, 15 bp, Homo sapiens
tgttggtgtggtggc

SEQ ID NO: 1051574 - DNA, 15 bp, Homo sapiens
gttggtgtggtggct

SEQ ID NO: 1051575 - DNA, 15 bp, Homo sapiens
ttggtgtggtggctt

SEQ ID NO: 1051576 - DNA, 15 bp, Homo sapiens
tggtgtggtggcttc

SEQ ID NO: 1051577 - DNA, 15 bp, Homo sapiens
ggtgtggtggcttca

SEQ ID NO: 1051578 - DNA, 15 bp, Homo sapiens
gtgtggtggcttcat

SEQ ID NO: 1051579 - DNA, 15 bp, Homo sapiens
tgtggtggcttcatg

SEQ ID NO: 1051580 - DNA, 15 bp, Homo sapiens
gtggtggcttcatgg

SEQ ID NO: 1051581 - DNA, 15 bp, Homo sapiens
tggtggcttcatggt

SEQ ID NO: 1051582 - DNA, 15 bp, Homo sapiens
ggtggcttcatggtc

SEQ ID NO: 1051583 - DNA, 15 bp, Homo sapiens
gtggcttcatggtct

SEQ ID NO: 1051584 - DNA, 15 bp, Homo sapiens
tggcttcatggtctt

SEQ ID NO: 1051585 - DNA, 15 bp, Homo sapiens
ggcttcatggtctta

SEQ ID NO: 1051586 - DNA, 15 bp, Homo sapiens
gcttcatggtcttaa

SEQ ID NO: 1051587 - DNA, 15 bp, Homo sapiens
cttcatggtcttaag

SEQ ID NO: 1051588 - DNA, 15 bp, Homo sapiens
ttcatggtcttaagt

SEQ ID NO: 1051589 - DNA, 15 bp, Homo sapiens
tcatggtcttaagtg

SEQ ID NO: 1051590 - DNA, 15 bp, Homo sapiens
catggtcttaagtga

SEQ ID NO: 1051591 - DNA, 15 bp, Homo sapiens
atggtcttaagtgat

SEQ ID NO: 1051592 - DNA, 15 bp, Homo sapiens
tggtcttaagtgatc

SEQ ID NO: 1051593 - DNA, 15 bp, Homo sapiens
ggtcttaagtgatct

SEQ ID NO: 1051594 - DNA, 15 bp, Homo sapiens
gtcttaagtgatctg

SEQ ID NO: 1051595 - DNA, 15 bp, Homo sapiens
tcttaagtgatctgg

SEQ ID NO: 1051596 - DNA, 15 bp, Homo sapiens
cttaagtgatctgga

SEQ ID NO: 1051597 - DNA, 15 bp, Homo sapiens
ttaagtgatctggaa

SEQ ID NO: 1051598 - DNA, 15 bp, Homo sapiens
taagtgatctggaag

SEQ ID NO: 1051599 - DNA, 15 bp, Homo sapiens
aagtgatctggaagc

SEQ ID NO: 1051600 - DNA, 15 bp, Homo sapiens
agtgatctggaagcc

SEQ ID NO: 1051601 - DNA, 15 bp, Homo sapiens
gtgatctggaagcct

SEQ ID NO: 1051602 - DNA, 15 bp, Homo sapiens
tgatctggaagcctt

SEQ ID NO: 1051603 - DNA, 15 bp, Homo sapiens
gatctggaagccttc

SEQ ID NO: 1051604 - DNA, 15 bp, Homo sapiens
atctggaagccttct

SEQ ID NO: 1051605 - DNA, 15 bp, Homo sapiens
tctggaagccttcta

SEQ ID NO: 1051606 - DNA, 15 bp, Homo sapiens
ctggaagccttctac

SEQ ID NO: 1051607 - DNA, 15 bp, Homo sapiens
tggaagccttctact

SEQ ID NO: 1051608 - DNA, 15 bp, Homo sapiens
ggaagccttctacta

SEQ ID NO: 1051609 - DNA, 15 bp, Homo sapiens
gaagccttctactac

SEQ ID NO: 1051610 - DNA, 15 bp, Homo sapiens
aagccttctactact

SEQ ID NO: 1051611 - DNA, 15 bp, Homo sapiens
agccttctactactg

SEQ ID NO: 1051612 - DNA, 15 bp, Homo sapiens
gccttctactactgt

SEQ ID NO: 1051613 - DNA, 15 bp, Homo sapiens
ccttctactactgtg

SEQ ID NO: 1051614 - DNA, 15 bp, Homo sapiens
cttctactactgtgc

SEQ ID NO: 1051615 - DNA, 15 bp, Homo sapiens
ttctactactgtgct

SEQ ID NO: 1051616 - DNA, 15 bp, Homo sapiens
tctactactgtgctc

SEQ ID NO: 1051617 - DNA, 15 bp, Homo sapiens
ctactactgtgctct

SEQ ID NO: 1051618 - DNA, 15 bp, Homo sapiens
tactactgtgctctg

SEQ ID NO: 1051619 - DNA, 15 bp, Homo sapiens
actactgtgctctgc

SEQ ID NO: 1051620 - DNA, 15 bp, Homo sapiens
ctactgtgctctgcc

SEQ ID NO: 1051621 - DNA, 15 bp, Homo sapiens
tactgtgctctgcca

SEQ ID NO: 1051622 - DNA, 15 bp, Homo sapiens
actgtgctctgccat

SEQ ID NO: 1051623 - DNA, 15 bp, Homo sapiens
ctgtgctctgccatc

SEQ ID NO: 1051624 - DNA, 15 bp, Homo sapiens
tgtgctctgccatcc

SEQ ID NO: 1051625 - DNA, 15 bp, Homo sapiens
gtgctctgccatcct

SEQ ID NO: 1051626 - DNA, 15 bp, Homo sapiens
tgctctgccatcctt

SEQ ID NO: 1051627 - DNA, 15 bp, Homo sapiens
gctctgccatccttg

SEQ ID NO: 1051628 - DNA, 15 bp, Homo sapiens
ctctgccatccttgg

SEQ ID NO: 1051629 - DNA, 15 bp, Homo sapiens
tctgccatccttggc

SEQ ID NO: 1051630 - DNA, 15 bp, Homo sapiens
ctgccatccttggca

SEQ ID NO: 1051631 - DNA, 15 bp, Homo sapiens
tgccatccttggcat

SEQ ID NO: 1051632 - DNA, 15 bp, Homo sapiens
gccatccttggcatg

SEQ ID NO: 1051633 - DNA, 15 bp, Homo sapiens
ccatccttggcatgt

SEQ ID NO: 1051634 - DNA, 15 bp, Homo sapiens
catccttggcatgtg

SEQ ID NO: 1051635 - DNA, 15 bp, Homo sapiens
atccttggcatgtgg

SEQ ID NO: 1051636 - DNA, 15 bp, Homo sapiens
tccttggcatgtggt

SEQ ID NO: 1051637 - DNA, 15 bp, Homo sapiens
ccttggcatgtggtt

SEQ ID NO: 1051638 - DNA, 15 bp, Homo sapiens
cttggcatgtggttt

SEQ ID NO: 1051639 - DNA, 15 bp, Homo sapiens
ttggcatgtggtttt

SEQ ID NO: 1051640 - DNA, 15 bp, Homo sapiens
tggcatgtggttttc

SEQ ID NO: 1051641 - DNA, 15 bp, Homo sapiens
ggcatgtggttttca

SEQ ID NO: 1051642 - DNA, 15 bp, Homo sapiens
gcatgtggttttcat

SEQ ID NO: 1051643 - DNA, 15 bp, Homo sapiens
catgtggttttcatc

SEQ ID NO: 1051644 - DNA, 15 bp, Homo sapiens
atgtggttttcatcc

SEQ ID NO: 1051645 - DNA, 15 bp, Homo sapiens
tgtggttttcatcct

SEQ ID NO: 1051646 - DNA, 15 bp, Homo sapiens
gtggttttcatcctc

SEQ ID NO: 1051647 - DNA, 15 bp, Homo sapiens
tggttttcatcctca

SEQ ID NO: 1051648 - DNA, 15 bp, Homo sapiens
ggttttcatcctcaa

SEQ ID NO: 1051649 - DNA, 15 bp, Homo sapiens
gttttcatcctcaag

SEQ ID NO: 1051650 - DNA, 15 bp, Homo sapiens
ttttcatcctcaaga

SEQ ID NO: 1051651 - DNA, 15 bp, Homo sapiens
tttcatcctcaagat

SEQ ID NO: 1051652 - DNA, 15 bp, Homo sapiens
ttcatcctcaagata

SEQ ID NO: 1051653 - DNA, 15 bp, Homo sapiens
tcatcctcaagataa

SEQ ID NO: 1051654 - DNA, 15 bp, Homo sapiens
catcctcaagataac

SEQ ID NO: 1051655 - DNA, 15 bp, Homo sapiens
atcctcaagataacc

SEQ ID NO: 1051656 - DNA, 15 bp, Homo sapiens
tcctcaagataacct

SEQ ID NO: 1051657 - DNA, 15 bp, Homo sapiens
cctcaagataacctc

SEQ ID NO: 1051658 - DNA, 15 bp, Homo sapiens
ctcaagataacctca

SEQ ID NO: 1051659 - DNA, 15 bp, Homo sapiens
tcaagataacctcat

SEQ ID NO: 1051660 - DNA, 15 bp, Homo sapiens
caagataacctcatt

SEQ ID NO: 1051661 - DNA, 15 bp, Homo sapiens
aagataacctcattg

SEQ ID NO: 1051662 - DNA, 15 bp, Homo sapiens
agataacctcattgt

SEQ ID NO: 1051663 - DNA, 15 bp, Homo sapiens
gataacctcattgtc

SEQ ID NO: 1051664 - DNA, 15 bp, Homo sapiens
ataacctcattgtcc

SEQ ID NO: 1051665 - DNA, 15 bp, Homo sapiens
taacctcattgtcca

SEQ ID NO: 1051666 - DNA, 15 bp, Homo sapiens
aacctcattgtccaa

SEQ ID NO: 1051667 - DNA, 15 bp, Homo sapiens
acctcattgtccaag

SEQ ID NO: 1051668 - DNA, 15 bp, Homo sapiens
cctcattgtccaagt

SEQ ID NO: 1051669 - DNA, 15 bp, Homo sapiens
ctcattgtccaagtt

SEQ ID NO: 1051670 - DNA, 15 bp, Homo sapiens
tcattgtccaagttg

SEQ ID NO: 1051671 - DNA, 15 bp, Homo sapiens
cattgtccaagttgg

SEQ ID NO: 1051672 - DNA, 15 bp, Homo sapiens
attgtccaagttggc

SEQ ID NO: 1051673 - DNA, 15 bp, Homo sapiens
ttgtccaagttggct

SEQ ID NO: 1051674 - DNA, 15 bp, Homo sapiens
tgtccaagttggctg

SEQ ID NO: 1051675 - DNA, 15 bp, Homo sapiens
gtccaagttggctgc

SEQ ID NO: 1051676 - DNA, 15 bp, Homo sapiens
tccaagttggctgct

SEQ ID NO: 1051677 - DNA, 15 bp, Homo sapiens
ccaagttggctgcta

SEQ ID NO: 1051678 - DNA, 15 bp, Homo sapiens
caagttggctgctag

SEQ ID NO: 1051679 - DNA, 15 bp, Homo sapiens
aagttggctgctaga

SEQ ID NO: 1051680 - DNA, 15 bp, Homo sapiens
agttggctgctagag

SEQ ID NO: 1051681 - DNA, 15 bp, Homo sapiens
gttggctgctagagt

SEQ ID NO: 1051682 - DNA, 15 bp, Homo sapiens
ttggctgctagagtg

SEQ ID NO: 1051683 - DNA, 15 bp, Homo sapiens
tggctgctagagtgt

SEQ ID NO: 1051684 - DNA, 15 bp, Homo sapiens
ggctgctagagtgtc

SEQ ID NO: 1051685 - DNA, 15 bp, Homo sapiens
gctgctagagtgtca

SEQ ID NO: 1051686 - DNA, 15 bp, Homo sapiens
ctgctagagtgtcag

SEQ ID NO: 1051687 - DNA, 15 bp, Homo sapiens
tgctagagtgtcagc

SEQ ID NO: 1051688 - DNA, 15 bp, Homo sapiens
gctagagtgtcagca

SEQ ID NO: 1051689 - DNA, 15 bp, Homo sapiens
ctagagtgtcagcaa

SEQ ID NO: 1051690 - DNA, 15 bp, Homo sapiens
tagagtgtcagcaat

SEQ ID NO: 1051691 - DNA, 15 bp, Homo sapiens
agagtgtcagcaatc

SEQ ID NO: 1051692 - DNA, 15 bp, Homo sapiens
gagtgtcagcaatca

SEQ ID NO: 1051693 - DNA, 15 bp, Homo sapiens
agtgtcagcaatcac

SEQ ID NO: 1051694 - DNA, 15 bp, Homo sapiens
gtgtcagcaatcaca

SEQ ID NO: 1051695 - DNA, 15 bp, Homo sapiens
tgtcagcaatcacat

SEQ ID NO: 1051696 - DNA, 15 bp, Homo sapiens
gtcagcaatcacatc

SEQ ID NO: 1051697 - DNA, 15 bp, Homo sapiens
tcagcaatcacatca

SEQ ID NO: 1051698 - DNA, 15 bp, Homo sapiens
cagcaatcacatcac

SEQ ID NO: 1051699 - DNA, 15 bp, Homo sapiens
agcaatcacatcaca

SEQ ID NO: 1051700 - DNA, 15 bp, Homo sapiens
gcaatcacatcacat

SEQ ID NO: 1051701 - DNA, 15 bp, Homo sapiens
caatcacatcacatt

SEQ ID NO: 1051702 - DNA, 15 bp, Homo sapiens
aatcacatcacattc

SEQ ID NO: 1051703 - DNA, 15 bp, Homo sapiens
atcacatcacattcc

SEQ ID NO: 1051704 - DNA, 15 bp, Homo sapiens
tcacatcacattcca

SEQ ID NO: 1051705 - DNA, 15 bp, Homo sapiens
cacatcacattccag

SEQ ID NO: 1051706 - DNA, 15 bp, Homo sapiens
acatcacattccagg

SEQ ID NO: 1051707 - DNA, 15 bp, Homo sapiens
catcacattccaggc

SEQ ID NO: 1051708 - DNA, 15 bp, Homo sapiens
atcacattccaggca

SEQ ID NO: 1051709 - DNA, 15 bp, Homo sapiens
tcacattccaggcag

SEQ ID NO: 1051710 - DNA, 15 bp, Homo sapiens
cacattccaggcagc

SEQ ID NO: 1051711 - DNA, 15 bp, Homo sapiens
acattccaggcagca

SEQ ID NO: 1051712 - DNA, 15 bp, Homo sapiens
cattccaggcagcac

SEQ ID NO: 1051713 - DNA, 15 bp, Homo sapiens
attccaggcagcaca

SEQ ID NO: 1051714 - DNA, 15 bp, Homo sapiens
ttccaggcagcacag

SEQ ID NO: 1051715 - DNA, 15 bp, Homo sapiens
tccaggcagcacagc

SEQ ID NO: 1051716 - DNA, 15 bp, Homo sapiens
ccaggcagcacagca

SEQ ID NO: 1051717 - DNA, 15 bp, Homo sapiens
caggcagcacagcaa

SEQ ID NO: 1051718 - DNA, 15 bp, Homo sapiens
aggcagcacagcaag

SEQ ID NO: 1051719 - DNA, 15 bp, Homo sapiens
ggcagcacagcaaga

SEQ ID NO: 1051720 - DNA, 15 bp, Homo sapiens
gcagcacagcaagaa

SEQ ID NO: 1051721 - DNA, 15 bp, Homo sapiens
cagcacagcaagaag

SEQ ID NO: 1051722 - DNA, 15 bp, Homo sapiens
agcacagcaagaagg

SEQ ID NO: 1051723 - DNA, 15 bp, Homo sapiens
gcacagcaagaagga

SEQ ID NO: 1051724 - DNA, 15 bp, Homo sapiens
cacagcaagaaggaa

SEQ ID NO: 1051725 - DNA, 15 bp, Homo sapiens
acagcaagaaggaaa

SEQ ID NO: 1051726 - DNA, 15 bp, Homo sapiens
cagcaagaaggaaaa

SEQ ID NO: 1051727 - DNA, 15 bp, Homo sapiens
agcaagaaggaaaaa

SEQ ID NO: 1051728 - DNA, 15 bp, Homo sapiens
gcaagaaggaaaaaa

SEQ ID NO: 1051729 - DNA, 15 bp, Homo sapiens
caagaaggaaaaaat

SEQ ID NO: 1051730 - DNA, 15 bp, Homo sapiens
aagaaggaaaaaatg

SEQ ID NO: 1051731 - DNA, 15 bp, Homo sapiens
agaaggaaaaaatgg

SEQ ID NO: 1051732 - DNA, 15 bp, Homo sapiens
gaaggaaaaaatggt

SEQ ID NO: 1051733 - DNA, 15 bp, Homo sapiens
aaggaaaaaatggtg

SEQ ID NO: 1051734 - DNA, 15 bp, Homo sapiens
aggaaaaaatggtgg

SEQ ID NO: 1051735 - DNA, 15 bp, Homo sapiens
ggaaaaaatggtggg

SEQ ID NO: 1051736 - DNA, 15 bp, Homo sapiens
gaaaaaatggtgggg

SEQ ID NO: 1051737 - DNA, 15 bp, Homo sapiens
aaaaaatggtggggc

SEQ ID NO: 1051738 - DNA, 15 bp, Homo sapiens
aaaaatggtggggct

SEQ ID NO: 1051739 - DNA, 15 bp, Homo sapiens
aaaatggtggggctt

SEQ ID NO: 1051740 - DNA, 15 bp, Homo sapiens
aaatggtggggcttt

SEQ ID NO: 1051741 - DNA, 15 bp, Homo sapiens
aatggtggggctttg

SEQ ID NO: 1051742 - DNA, 15 bp, Homo sapiens
atggtggggctttgg

SEQ ID NO: 1051743 - DNA, 15 bp, Homo sapiens
tggtggggctttggg

SEQ ID NO: 1051744 - DNA, 15 bp, Homo sapiens
ggtggggctttgggg

SEQ ID NO: 1051745 - DNA, 15 bp, Homo sapiens
gtggggctttgggga

SEQ ID NO: 1051746 - DNA, 15 bp, Homo sapiens
tggggctttggggag

SEQ ID NO: 1051747 - DNA, 15 bp, Homo sapiens
ggggctttggggagc

SEQ ID NO: 1051748 - DNA, 15 bp, Homo sapiens
gggctttggggagca

SEQ ID NO: 1051749 - DNA, 15 bp, Homo sapiens
ggctttggggagcag

SEQ ID NO: 1051750 - DNA, 15 bp, Homo sapiens
gctttggggagcaga

SEQ ID NO: 1051751 - DNA, 15 bp, Homo sapiens
ctttggggagcagat

SEQ ID NO: 1051752 - DNA, 15 bp, Homo sapiens
tttggggagcagatg

SEQ ID NO: 1051753 - DNA, 15 bp, Homo sapiens
ttggggagcagatgg

SEQ ID NO: 1051754 - DNA, 15 bp, Homo sapiens
tggggagcagatgga

SEQ ID NO: 1051755 - DNA, 15 bp, Homo sapiens
ggggagcagatggag

SEQ ID NO: 1051756 - DNA, 15 bp, Homo sapiens
gggagcagatggagg

SEQ ID NO: 1051757 - DNA, 15 bp, Homo sapiens
ggagcagatggagga

SEQ ID NO: 1051758 - DNA, 15 bp, Homo sapiens
gagcagatggaggaa

SEQ ID NO: 1051759 - DNA, 15 bp, Homo sapiens
agcagatggaggaac

SEQ ID NO: 1051760 - DNA, 15 bp, Homo sapiens
gcagatggaggaact

SEQ ID NO: 1051761 - DNA, 15 bp, Homo sapiens
cagatggaggaactg

SEQ ID NO: 1051762 - DNA, 15 bp, Homo sapiens
agatggaggaactgg

SEQ ID NO: 1051763 - DNA, 15 bp, Homo sapiens
gatggaggaactggg

SEQ ID NO: 1051764 - DNA, 15 bp, Homo sapiens
atggaggaactgggg

SEQ ID NO: 1051765 - DNA, 15 bp, Homo sapiens
tggaggaactggggg

SEQ ID NO: 1051766 - DNA, 15 bp, Homo sapiens
ggaggaactgggggt

SEQ ID NO: 1051767 - DNA, 15 bp, Homo sapiens
gaggaactgggggta

SEQ ID NO: 1051768 - DNA, 15 bp, Homo sapiens
aggaactgggggtaa

SEQ ID NO: 1051769 - DNA, 15 bp, Homo sapiens
ggaactgggggtaaa

SEQ ID NO: 1051770 - DNA, 15 bp, Homo sapiens
gaactgggggtaaaa

SEQ ID NO: 1051771 - DNA, 15 bp, Homo sapiens
aactgggggtaaaac

SEQ ID NO: 1051772 - DNA, 15 bp, Homo sapiens
actgggggtaaaaca

SEQ ID NO: 1051773 - DNA, 15 bp, Homo sapiens
ctgggggtaaaacag

SEQ ID NO: 1051774 - DNA, 15 bp, Homo sapiens
tgggggtaaaacagc

SEQ ID NO: 1051775 - DNA, 15 bp, Homo sapiens
gggggtaaaacagcg

SEQ ID NO: 1051776 - DNA, 15 bp, Homo sapiens
ggggtaaaacagcgt

SEQ ID NO: 1051777 - DNA, 15 bp, Homo sapiens
gggtaaaacagcgtg

SEQ ID NO: 1051778 - DNA, 15 bp, Homo sapiens
ggtaaaacagcgtgt

SEQ ID NO: 1051779 - DNA, 15 bp, Homo sapiens
gtaaaacagcgtgtt

SEQ ID NO: 1051780 - DNA, 15 bp, Homo sapiens
taaaacagcgtgttc

SEQ ID NO: 1051781 - DNA, 15 bp, Homo sapiens
aaaacagcgtgttcc

SEQ ID NO: 1051782 - DNA, 15 bp, Homo sapiens
aaacagcgtgttcca

SEQ ID NO: 1051783 - DNA, 15 bp, Homo sapiens
aacagcgtgttccag

SEQ ID NO: 1051784 - DNA, 15 bp, Homo sapiens
acagcgtgttccagt

SEQ ID NO: 1051785 - DNA, 15 bp, Homo sapiens
cagcgtgttccagtt

SEQ ID NO: 1051786 - DNA, 15 bp, Homo sapiens
agcgtgttccagttt

SEQ ID NO: 1051787 - DNA, 15 bp, Homo sapiens
gcgtgttccagtttc

SEQ ID NO: 1051788 - DNA, 15 bp, Homo sapiens
cgtgttccagtttcc

SEQ ID NO: 1051789 - DNA, 15 bp, Homo sapiens
gtgttccagtttcct

SEQ ID NO: 1051790 - DNA, 15 bp, Homo sapiens
tgttccagtttcctc

SEQ ID NO: 1051791 - DNA, 15 bp, Homo sapiens
gttccagtttcctcc

SEQ ID NO: 1051792 - DNA, 15 bp, Homo sapiens
ttccagtttcctccc

SEQ ID NO: 1051793 - DNA, 15 bp, Homo sapiens
tccagtttcctccct

SEQ ID NO: 1051794 - DNA, 15 bp, Homo sapiens
ccagtttcctccctc

SEQ ID NO: 1051795 - DNA, 15 bp, Homo sapiens
cagtttcctccctct

SEQ ID NO: 1051796 - DNA, 15 bp, Homo sapiens
agtttcctccctctt

SEQ ID NO: 1051797 - DNA, 15 bp, Homo sapiens
gtttcctccctctta

SEQ ID NO: 1051798 - DNA, 15 bp, Homo sapiens
tttcctccctcttag

SEQ ID NO: 1051799 - DNA, 15 bp, Homo sapiens
ttcctccctcttagg

SEQ ID NO: 1051800 - DNA, 15 bp, Homo sapiens
tcctccctcttaggg

SEQ ID NO: 1051801 - DNA, 15 bp, Homo sapiens
cctccctcttaggga

SEQ ID NO: 1051802 - DNA, 15 bp, Homo sapiens
ctccctcttagggag

SEQ ID NO: 1051803 - DNA, 15 bp, Homo sapiens
tccctcttagggagg

SEQ ID NO: 1051804 - DNA, 15 bp, Homo sapiens
ccctcttagggagga

SEQ ID NO: 1051805 - DNA, 15 bp, Homo sapiens
cctcttagggaggaa

SEQ ID NO: 1051806 - DNA, 15 bp, Homo sapiens
ctcttagggaggaag

SEQ ID NO: 1051807 - DNA, 15 bp, Homo sapiens
tcttagggaggaaga

SEQ ID NO: 1051808 - DNA, 15 bp, Homo sapiens
cttagggaggaagaa

SEQ ID NO: 1051809 - DNA, 15 bp, Homo sapiens
ttagggaggaagaaa

SEQ ID NO: 1051810 - DNA, 15 bp, Homo sapiens
tagggaggaagaaaa

SEQ ID NO: 1051811 - DNA, 15 bp, Homo sapiens
agggaggaagaaaac

SEQ ID NO: 1051812 - DNA, 15 bp, Homo sapiens
gggaggaagaaaacc

SEQ ID NO: 1051813 - DNA, 15 bp, Homo sapiens
ggaggaagaaaacca

SEQ ID NO: 1051814 - DNA, 15 bp, Homo sapiens
gaggaagaaaaccaa

SEQ ID NO: 1051815 - DNA, 15 bp, Homo sapiens
aggaagaaaaccaat

SEQ ID NO: 1051816 - DNA, 15 bp, Homo sapiens
ggaagaaaaccaatg

SEQ ID NO: 1051817 - DNA, 15 bp, Homo sapiens
gaagaaaaccaatgt

SEQ ID NO: 1051818 - DNA, 15 bp, Homo sapiens
aagaaaaccaatgtc

SEQ ID NO: 1051819 - DNA, 15 bp, Homo sapiens
agaaaaccaatgtcc

SEQ ID NO: 1051820 - DNA, 15 bp, Homo sapiens
gaaaaccaatgtcca

SEQ ID NO: 1051821 - DNA, 15 bp, Homo sapiens
aaaaccaatgtccac

SEQ ID NO: 1051822 - DNA, 15 bp, Homo sapiens
aaaccaatgtccact

SEQ ID NO: 1051823 - DNA, 15 bp, Homo sapiens
aaccaatgtccactt

SEQ ID NO: 1051824 - DNA, 15 bp, Homo sapiens
accaatgtccacttc

SEQ ID NO: 1051825 - DNA, 15 bp, Homo sapiens
ccaatgtccacttcc

SEQ ID NO: 1051826 - DNA, 15 bp, Homo sapiens
caatgtccacttcct

SEQ ID NO: 1051827 - DNA, 15 bp, Homo sapiens
aatgtccacttcctt

SEQ ID NO: 1051828 - DNA, 15 bp, Homo sapiens
atgtccacttccttt

SEQ ID NO: 1051829 - DNA, 15 bp, Homo sapiens
tgtccacttcctttc

SEQ ID NO: 1051830 - DNA, 15 bp, Homo sapiens
gtccacttcctttct

SEQ ID NO: 1051831 - DNA, 15 bp, Homo sapiens
tccacttcctttcta

SEQ ID NO: 1051832 - DNA, 15 bp, Homo sapiens
ccacttcctttctat

SEQ ID NO: 1051833 - DNA, 15 bp, Homo sapiens
cacttcctttctatt

SEQ ID NO: 1051834 - DNA, 15 bp, Homo sapiens
acttcctttctattg

SEQ ID NO: 1051835 - DNA, 15 bp, Homo sapiens
cttcctttctattgg

SEQ ID NO: 1051836 - DNA, 15 bp, Homo sapiens
ttcctttctattggc

SEQ ID NO: 1051837 - DNA, 15 bp, Homo sapiens
tcctttctattggcc

SEQ ID NO: 1051838 - DNA, 15 bp, Homo sapiens
cctttctattggcca

SEQ ID NO: 1051839 - DNA, 15 bp, Homo sapiens
ctttctattggccag

SEQ ID NO: 1051840 - DNA, 15 bp, Homo sapiens
tttctattggccaga

SEQ ID NO: 1051841 - DNA, 15 bp, Homo sapiens
ttctattggccagaa

SEQ ID NO: 1051842 - DNA, 15 bp, Homo sapiens
tctattggccagaac

SEQ ID NO: 1051843 - DNA, 15 bp, Homo sapiens
ctattggccagaact

SEQ ID NO: 1051844 - DNA, 15 bp, Homo sapiens
tattggccagaactg

SEQ ID NO: 1051845 - DNA, 15 bp, Homo sapiens
attggccagaactga

SEQ ID NO: 1051846 - DNA, 15 bp, Homo sapiens
ttggccagaactgag

SEQ ID NO: 1051847 - DNA, 15 bp, Homo sapiens
tggccagaactgagt

SEQ ID NO: 1051848 - DNA, 15 bp, Homo sapiens
ggccagaactgagtc

SEQ ID NO: 1051849 - DNA, 15 bp, Homo sapiens
gccagaactgagtca

SEQ ID NO: 1051850 - DNA, 15 bp, Homo sapiens
ccagaactgagtcac

SEQ ID NO: 1051851 - DNA, 15 bp, Homo sapiens
cagaactgagtcaca

SEQ ID NO: 1051852 - DNA, 15 bp, Homo sapiens
agaactgagtcacat

SEQ ID NO: 1051853 - DNA, 15 bp, Homo sapiens
gaactgagtcacatg

SEQ ID NO: 1051854 - DNA, 15 bp, Homo sapiens
aactgagtcacatgg

SEQ ID NO: 1051855 - DNA, 15 bp, Homo sapiens
actgagtcacatggc

SEQ ID NO: 1051856 - DNA, 15 bp, Homo sapiens
ctgagtcacatggcc

SEQ ID NO: 1051857 - DNA, 15 bp, Homo sapiens
tgagtcacatggcca

SEQ ID NO: 1051858 - DNA, 15 bp, Homo sapiens
gagtcacatggccac

SEQ ID NO: 1051859 - DNA, 15 bp, Homo sapiens
agtcacatggccaca

SEQ ID NO: 1051860 - DNA, 15 bp, Homo sapiens
gtcacatggccacac

SEQ ID NO: 1051861 - DNA, 15 bp, Homo sapiens
tcacatggccacacc

SEQ ID NO: 1051862 - DNA, 15 bp, Homo sapiens
cacatggccacacct

SEQ ID NO: 1051863 - DNA, 15 bp, Homo sapiens
acatggccacaccta

SEQ ID NO: 1051864 - DNA, 15 bp, Homo sapiens
catggccacacctag

SEQ ID NO: 1051865 - DNA, 15 bp, Homo sapiens
atggccacacctagc

SEQ ID NO: 1051866 - DNA, 15 bp, Homo sapiens
tggccacacctagct

SEQ ID NO: 1051867 - DNA, 15 bp, Homo sapiens
ggccacacctagctc

SEQ ID NO: 1051868 - DNA, 15 bp, Homo sapiens
gccacacctagctcc

SEQ ID NO: 1051869 - DNA, 15 bp, Homo sapiens
ccacacctagctcca

SEQ ID NO: 1051870 - DNA, 15 bp, Homo sapiens
cacacctagctccag

SEQ ID NO: 1051871 - DNA, 15 bp, Homo sapiens
acacctagctccagg

SEQ ID NO: 1051872 - DNA, 15 bp, Homo sapiens
cacctagctccaggg

SEQ ID NO: 1051873 - DNA, 15 bp, Homo sapiens
acctagctccagggg

SEQ ID NO: 1051874 - DNA, 15 bp, Homo sapiens
cctagctccagggga

SEQ ID NO: 1051875 - DNA, 15 bp, Homo sapiens
ctagctccaggggaa

SEQ ID NO: 1051876 - DNA, 15 bp, Homo sapiens
tagctccaggggaag

SEQ ID NO: 1051877 - DNA, 15 bp, Homo sapiens
agctccaggggaagc

SEQ ID NO: 1051878 - DNA, 15 bp, Homo sapiens
gctccaggggaagct

SEQ ID NO: 1051879 - DNA, 15 bp, Homo sapiens
ctccaggggaagctg

SEQ ID NO: 1051880 - DNA, 15 bp, Homo sapiens
tccaggggaagctgg

SEQ ID NO: 1051881 - DNA, 15 bp, Homo sapiens
ccaggggaagctgga

SEQ ID NO: 1051882 - DNA, 15 bp, Homo sapiens
caggggaagctggaa

SEQ ID NO: 1051883 - DNA, 15 bp, Homo sapiens
aggggaagctggaaa

SEQ ID NO: 1051884 - DNA, 15 bp, Homo sapiens
ggggaagctggaaag

SEQ ID NO: 1051885 - DNA, 15 bp, Homo sapiens
gggaagctggaaagg

SEQ ID NO: 1051886 - DNA, 15 bp, Homo sapiens
ggaagctggaaaggt

SEQ ID NO: 1051887 - DNA, 15 bp, Homo sapiens
gaagctggaaaggta

SEQ ID NO: 1051888 - DNA, 15 bp, Homo sapiens
aagctggaaaggtag

SEQ ID NO: 1051889 - DNA, 15 bp, Homo sapiens
agctggaaaggtagc

SEQ ID NO: 1051890 - DNA, 15 bp, Homo sapiens
gctggaaaggtagcc

SEQ ID NO: 1051891 - DNA, 15 bp, Homo sapiens
ctggaaaggtagcct

SEQ ID NO: 1051892 - DNA, 15 bp, Homo sapiens
tggaaaggtagcctt

SEQ ID NO: 1051893 - DNA, 15 bp, Homo sapiens
ggaaaggtagccttt

SEQ ID NO: 1051894 - DNA, 15 bp, Homo sapiens
gaaaggtagcctttt

SEQ ID NO: 1051895 - DNA, 15 bp, Homo sapiens
aaaggtagcctttta

SEQ ID NO: 1051896 - DNA, 15 bp, Homo sapiens
aaggtagccttttag

SEQ ID NO: 1051897 - DNA, 15 bp, Homo sapiens
aggtagccttttagc

SEQ ID NO: 1051898 - DNA, 15 bp, Homo sapiens
ggtagccttttagct

SEQ ID NO: 1051899 - DNA, 15 bp, Homo sapiens
gtagccttttagctg

SEQ ID NO: 1051900 - DNA, 15 bp, Homo sapiens
tagccttttagctgg

SEQ ID NO: 1051901 - DNA, 15 bp, Homo sapiens
agccttttagctggg

SEQ ID NO: 1051902 - DNA, 15 bp, Homo sapiens
gccttttagctgggt

SEQ ID NO: 1051903 - DNA, 15 bp, Homo sapiens
ccttttagctgggtg

SEQ ID NO: 1051904 - DNA, 15 bp, Homo sapiens
cttttagctgggtgt

SEQ ID NO: 1051905 - DNA, 15 bp, Homo sapiens
ttttagctgggtgtg

SEQ ID NO: 1051906 - DNA, 15 bp, Homo sapiens
tttagctgggtgtgc

SEQ ID NO: 1051907 - DNA, 15 bp, Homo sapiens
ttagctgggtgtgct

SEQ ID NO: 1051908 - DNA, 15 bp, Homo sapiens
tagctgggtgtgctg

SEQ ID NO: 1051909 - DNA, 15 bp, Homo sapiens
agctgggtgtgctga

SEQ ID NO: 1051910 - DNA, 15 bp, Homo sapiens
gctgggtgtgctgat

SEQ ID NO: 1051911 - DNA, 15 bp, Homo sapiens
ctgggtgtgctgatg

SEQ ID NO: 1051912 - DNA, 15 bp, Homo sapiens
tgggtgtgctgatgc

SEQ ID NO: 1051913 - DNA, 15 bp, Homo sapiens
gggtgtgctgatgct

SEQ ID NO: 1051914 - DNA, 15 bp, Homo sapiens
ggtgtgctgatgctc

SEQ ID NO: 1051915 - DNA, 15 bp, Homo sapiens
gtgtgctgatgctct

SEQ ID NO: 1051916 - DNA, 15 bp, Homo sapiens
tgtgctgatgctctg

SEQ ID NO: 1051917 - DNA, 15 bp, Homo sapiens
gtgctgatgctctga

SEQ ID NO: 1051918 - DNA, 15 bp, Homo sapiens
tgctgatgctctgag

SEQ ID NO: 1051919 - DNA, 15 bp, Homo sapiens
gctgatgctctgagt

SEQ ID NO: 1051920 - DNA, 15 bp, Homo sapiens
ctgatgctctgagta

SEQ ID NO: 1051921 - DNA, 15 bp, Homo sapiens
tgatgctctgagtat

SEQ ID NO: 1051922 - DNA, 15 bp, Homo sapiens
gatgctctgagtatg

SEQ ID NO: 1051923 - DNA, 15 bp, Homo sapiens
atgctctgagtatgg

SEQ ID NO: 1051924 - DNA, 15 bp, Homo sapiens
tgctctgagtatggt

SEQ ID NO: 1051925 - DNA, 15 bp, Homo sapiens
gctctgagtatggtt

SEQ ID NO: 1051926 - DNA, 15 bp, Homo sapiens
ctctgagtatggttt

SEQ ID NO: 1051927 - DNA, 15 bp, Homo sapiens
tctgagtatggtttg

SEQ ID NO: 1051928 - DNA, 15 bp, Homo sapiens
ctgagtatggtttgg

SEQ ID NO: 1051929 - DNA, 15 bp, Homo sapiens
tgagtatggtttggg

SEQ ID NO: 1051930 - DNA, 15 bp, Homo sapiens
gagtatggtttgggt

SEQ ID NO: 1051931 - DNA, 15 bp, Homo sapiens
agtatggtttgggtt

SEQ ID NO: 1051932 - DNA, 15 bp, Homo sapiens
gtatggtttgggttt

SEQ ID NO: 1051933 - DNA, 15 bp, Homo sapiens
tatggtttgggtttt

SEQ ID NO: 1051934 - DNA, 15 bp, Homo sapiens
atggtttgggttttg

SEQ ID NO: 1051935 - DNA, 15 bp, Homo sapiens
tggtttgggttttgt

SEQ ID NO: 1051936 - DNA, 15 bp, Homo sapiens
ggtttgggttttgta

SEQ ID NO: 1051937 - DNA, 15 bp, Homo sapiens
gtttgggttttgtat

SEQ ID NO: 1051938 - DNA, 15 bp, Homo sapiens
tttgggttttgtatg

SEQ ID NO: 1051939 - DNA, 15 bp, Homo sapiens
ttgggttttgtatga

SEQ ID NO: 1051940 - DNA, 15 bp, Homo sapiens
tgggttttgtatgaa

SEQ ID NO: 1051941 - DNA, 15 bp, Homo sapiens
gggttttgtatgaaa

SEQ ID NO: 1051942 - DNA, 15 bp, Homo sapiens
ggttttgtatgaaag

SEQ ID NO: 1051943 - DNA, 15 bp, Homo sapiens
gttttgtatgaaaga

SEQ ID NO: 1051944 - DNA, 15 bp, Homo sapiens
ttttgtatgaaagag

SEQ ID NO: 1051945 - DNA, 15 bp, Homo sapiens
tttgtatgaaagagt

SEQ ID NO: 1051946 - DNA, 15 bp, Homo sapiens
ttgtatgaaagagta

SEQ ID NO: 1051947 - DNA, 15 bp, Homo sapiens
tgtatgaaagagtaa

SEQ ID NO: 1051948 - DNA, 15 bp, Homo sapiens
gtatgaaagagtaag

SEQ ID NO: 1051949 - DNA, 15 bp, Homo sapiens
tatgaaagagtaagg

SEQ ID NO: 1051950 - DNA, 15 bp, Homo sapiens
atgaaagagtaagga

SEQ ID NO: 1051951 - DNA, 15 bp, Homo sapiens
tgaaagagtaaggag

SEQ ID NO: 1051952 - DNA, 15 bp, Homo sapiens
gaaagagtaaggaga

SEQ ID NO: 1051953 - DNA, 15 bp, Homo sapiens
aaagagtaaggagag

SEQ ID NO: 1051954 - DNA, 15 bp, Homo sapiens
aagagtaaggagaga

SEQ ID NO: 1051955 - DNA, 15 bp, Homo sapiens
agagtaaggagagat

SEQ ID NO: 1051956 - DNA, 15 bp, Homo sapiens
gagtaaggagagatt

SEQ ID NO: 1051957 - DNA, 15 bp, Homo sapiens
agtaaggagagattg

SEQ ID NO: 1051958 - DNA, 15 bp, Homo sapiens
gtaaggagagattgg

SEQ ID NO: 1051959 - DNA, 15 bp, Homo sapiens
taaggagagattggg

SEQ ID NO: 1051960 - DNA, 15 bp, Homo sapiens
aaggagagattgggc

SEQ ID NO: 1051961 - DNA, 15 bp, Homo sapiens
aggagagattgggct

SEQ ID NO: 1051962 - DNA, 15 bp, Homo sapiens
ggagagattgggctt

SEQ ID NO: 1051963 - DNA, 15 bp, Homo sapiens
gagagattgggcttt

SEQ ID NO: 1051964 - DNA, 15 bp, Homo sapiens
agagattgggctttg

SEQ ID NO: 1051965 - DNA, 15 bp, Homo sapiens
gagattgggctttgg

SEQ ID NO: 1051966 - DNA, 15 bp, Homo sapiens
agattgggctttggg

SEQ ID NO: 1051967 - DNA, 15 bp, Homo sapiens
gattgggctttgggt

SEQ ID NO: 1051968 - DNA, 15 bp, Homo sapiens
attgggctttgggta

SEQ ID NO: 1051969 - DNA, 15 bp, Homo sapiens
ttgggctttgggtag

SEQ ID NO: 1051970 - DNA, 15 bp, Homo sapiens
tgggctttgggtagt

SEQ ID NO: 1051971 - DNA, 15 bp, Homo sapiens
gggctttgggtagta

SEQ ID NO: 1051972 - DNA, 15 bp, Homo sapiens
ggctttgggtagtaa

SEQ ID NO: 1051973 - DNA, 15 bp, Homo sapiens
gctttgggtagtaac

SEQ ID NO: 1051974 - DNA, 15 bp, Homo sapiens
ctttgggtagtaact

SEQ ID NO: 1051975 - DNA, 15 bp, Homo sapiens
tttgggtagtaactg

SEQ ID NO: 1051976 - DNA, 15 bp, Homo sapiens
ttgggtagtaactgg

SEQ ID NO: 1051977 - DNA, 15 bp, Homo sapiens
tgggtagtaactggc

SEQ ID NO: 1051978 - DNA, 15 bp, Homo sapiens
gggtagtaactggca

SEQ ID NO: 1051979 - DNA, 15 bp, Homo sapiens
ggtagtaactggcag

SEQ ID NO: 1051980 - DNA, 15 bp, Homo sapiens
gtagtaactggcagt

SEQ ID NO: 1051981 - DNA, 15 bp, Homo sapiens
tagtaactggcagtt

SEQ ID NO: 1051982 - DNA, 15 bp, Homo sapiens
agtaactggcagttt

SEQ ID NO: 1051983 - DNA, 15 bp, Homo sapiens
gtaactggcagtttc

SEQ ID NO: 1051984 - DNA, 15 bp, Homo sapiens
taactggcagtttct

SEQ ID NO: 1051985 - DNA, 15 bp, Homo sapiens
aactggcagtttctg

SEQ ID NO: 1051986 - DNA, 15 bp, Homo sapiens
actggcagtttctga

SEQ ID NO: 1051987 - DNA, 15 bp, Homo sapiens
ctggcagtttctgat

SEQ ID NO: 1051988 - DNA, 15 bp, Homo sapiens
tggcagtttctgatg

SEQ ID NO: 1051989 - DNA, 15 bp, Homo sapiens
ggcagtttctgatgc

SEQ ID NO: 1051990 - DNA, 15 bp, Homo sapiens
gcagtttctgatgct

SEQ ID NO: 1051991 - DNA, 15 bp, Homo sapiens
cagtttctgatgctc

SEQ ID NO: 1051992 - DNA, 15 bp, Homo sapiens
agtttctgatgctct

SEQ ID NO: 1051993 - DNA, 15 bp, Homo sapiens
gtttctgatgctctc

SEQ ID NO: 1051994 - DNA, 15 bp, Homo sapiens
tttctgatgctctcc

SEQ ID NO: 1051995 - DNA, 15 bp, Homo sapiens
ttctgatgctctccg

SEQ ID NO: 1051996 - DNA, 15 bp, Homo sapiens
tctgatgctctccgt

SEQ ID NO: 1051997 - DNA, 15 bp, Homo sapiens
ctgatgctctccgtc

SEQ ID NO: 1051998 - DNA, 15 bp, Homo sapiens
tgatgctctccgtcc

SEQ ID NO: 1051999 - DNA, 15 bp, Homo sapiens
gatgctctccgtcca

SEQ ID NO: 1052000 - DNA, 15 bp, Homo sapiens
atgctctccgtccat

SEQ ID NO: 1052001 - DNA, 15 bp, Homo sapiens
tgctctccgtccatt

SEQ ID NO: 1052002 - DNA, 15 bp, Homo sapiens
gctctccgtccatta

SEQ ID NO: 1052003 - DNA, 15 bp, Homo sapiens
ctctccgtccattat

SEQ ID NO: 1052004 - DNA, 15 bp, Homo sapiens
tctccgtccattata

SEQ ID NO: 1052005 - DNA, 15 bp, Homo sapiens
ctccgtccattataa

SEQ ID NO: 1052006 - DNA, 15 bp, Homo sapiens
tccgtccattataat

SEQ ID NO: 1052007 - DNA, 15 bp, Homo sapiens
ccgtccattataatg

SEQ ID NO: 1052008 - DNA, 15 bp, Homo sapiens
cgtccattataatga

SEQ ID NO: 1052009 - DNA, 15 bp, Homo sapiens
gtccattataatgat

SEQ ID NO: 1052010 - DNA, 15 bp, Homo sapiens
tccattataatgatc

SEQ ID NO: 1052011 - DNA, 15 bp, Homo sapiens
ccattataatgatca

SEQ ID NO: 1052012 - DNA, 15 bp, Homo sapiens
cattataatgatcat

SEQ ID NO: 1052013 - DNA, 15 bp, Homo sapiens
attataatgatcatt

SEQ ID NO: 1052014 - DNA, 15 bp, Homo sapiens
ttataatgatcattt

SEQ ID NO: 1052015 - DNA, 15 bp, Homo sapiens
tataatgatcattta

SEQ ID NO: 1052016 - DNA, 15 bp, Homo sapiens
ataatgatcatttaa

SEQ ID NO: 1052017 - DNA, 15 bp, Homo sapiens
taatgatcatttaag

SEQ ID NO: 1052018 - DNA, 15 bp, Homo sapiens
aatgatcatttaagt

SEQ ID NO: 1052019 - DNA, 15 bp, Homo sapiens
atgatcatttaagta

SEQ ID NO: 1052020 - DNA, 15 bp, Homo sapiens
tgatcatttaagtat

SEQ ID NO: 1052021 - DNA, 15 bp, Homo sapiens
gatcatttaagtatc

SEQ ID NO: 1052022 - DNA, 15 bp, Homo sapiens
atcatttaagtatcc

SEQ ID NO: 1052023 - DNA, 15 bp, Homo sapiens
tcatttaagtatcct

SEQ ID NO: 1052024 - DNA, 15 bp, Homo sapiens
catttaagtatccta

SEQ ID NO: 1052025 - DNA, 15 bp, Homo sapiens
atttaagtatcctat

SEQ ID NO: 1052026 - DNA, 15 bp, Homo sapiens
tttaagtatcctatt

SEQ ID NO: 1052027 - DNA, 15 bp, Homo sapiens
ttaagtatcctattg

SEQ ID NO: 1052028 - DNA, 15 bp, Homo sapiens
taagtatcctattgg

SEQ ID NO: 1052029 - DNA, 15 bp, Homo sapiens
aagtatcctattggg

SEQ ID NO: 1052030 - DNA, 15 bp, Homo sapiens
agtatcctattgggt

SEQ ID NO: 1052031 - DNA, 15 bp, Homo sapiens
gtatcctattgggtg

SEQ ID NO: 1052032 - DNA, 15 bp, Homo sapiens
tatcctattgggtga

SEQ ID NO: 1052033 - DNA, 15 bp, Homo sapiens
atcctattgggtgag

SEQ ID NO: 1052034 - DNA, 15 bp, Homo sapiens
tcctattgggtgagc

SEQ ID NO: 1052035 - DNA, 15 bp, Homo sapiens
cctattgggtgagca

SEQ ID NO: 1052036 - DNA, 15 bp, Homo sapiens
ctattgggtgagcat

SEQ ID NO: 1052037 - DNA, 15 bp, Homo sapiens
tattgggtgagcatt

SEQ ID NO: 1052038 - DNA, 15 bp, Homo sapiens
attgggtgagcattt

SEQ ID NO: 1052039 - DNA, 15 bp, Homo sapiens
ttgggtgagcattta

SEQ ID NO: 1052040 - DNA, 15 bp, Homo sapiens
tgggtgagcatttat

SEQ ID NO: 1052041 - DNA, 15 bp, Homo sapiens
gggtgagcatttatt

SEQ ID NO: 1052042 - DNA, 15 bp, Homo sapiens
ggtgagcatttatta

SEQ ID NO: 1052043 - DNA, 15 bp, Homo sapiens
gtgagcatttattaa

SEQ ID NO: 1052044 - DNA, 15 bp, Homo sapiens
tgagcatttattaat

SEQ ID NO: 1052045 - DNA, 15 bp, Homo sapiens
gagcatttattaata

SEQ ID NO: 1052046 - DNA, 15 bp, Homo sapiens
agcatttattaataa

SEQ ID NO: 1052047 - DNA, 15 bp, Homo sapiens
gcatttattaataat

SEQ ID NO: 1052048 - DNA, 15 bp, Homo sapiens
catttattaataata

SEQ ID NO: 1052049 - DNA, 15 bp, Homo sapiens
atttattaataataa

SEQ ID NO: 1052050 - DNA, 15 bp, Homo sapiens
tttattaataataac

SEQ ID NO: 1052051 - DNA, 15 bp, Homo sapiens
ttattaataataaca

SEQ ID NO: 1052052 - DNA, 15 bp, Homo sapiens
tattaataataacaa

SEQ ID NO: 1052053 - DNA, 15 bp, Homo sapiens
attaataataacaat

SEQ ID NO: 1052054 - DNA, 15 bp, Homo sapiens
ttaataataacaata

SEQ ID NO: 1052055 - DNA, 15 bp, Homo sapiens
taataataacaataa

SEQ ID NO: 1052056 - DNA, 15 bp, Homo sapiens
aataataacaataat

SEQ ID NO: 1052057 - DNA, 15 bp, Homo sapiens
ataataacaataata

SEQ ID NO: 1052058 - DNA, 15 bp, Homo sapiens
taataacaataataa

SEQ ID NO: 1052059 - DNA, 15 bp, Homo sapiens
aataacaataataat

SEQ ID NO: 1052060 - DNA, 15 bp, Homo sapiens
ataacaataataatg

SEQ ID NO: 1052061 - DNA, 15 bp, Homo sapiens
taacaataataatga

SEQ ID NO: 1052062 - DNA, 15 bp, Homo sapiens
aacaataataatgaa

SEQ ID NO: 1052063 - DNA, 15 bp, Homo sapiens
acaataataatgaaa

SEQ ID NO: 1052064 - DNA, 15 bp, Homo sapiens
caataataatgaaaa

SEQ ID NO: 1052065 - DNA, 15 bp, Homo sapiens
aataataatgaaaat

SEQ ID NO: 1052066 - DNA, 15 bp, Homo sapiens
ataataatgaaaata

SEQ ID NO: 1052067 - DNA, 15 bp, Homo sapiens
taataatgaaaataa

SEQ ID NO: 1052068 - DNA, 15 bp, Homo sapiens
aataatgaaaataaa

SEQ ID NO: 1052069 - DNA, 15 bp, Homo sapiens
ataatgaaaataaag

SEQ ID NO: 1052070 - DNA, 15 bp, Homo sapiens
taatgaaaataaaga

SEQ ID NO: 1052071 - DNA, 15 bp, Homo sapiens
aatgaaaataaagac

SEQ ID NO: 1052072 - DNA, 15 bp, Homo sapiens
atgaaaataaagact

SEQ ID NO: 1052073 - DNA, 15 bp, Homo sapiens
tgaaaataaagacta

SEQ ID NO: 1052074 - DNA, 15 bp, Homo sapiens
gaaaataaagactat

SEQ ID NO: 1052075 - DNA, 15 bp, Homo sapiens
aaaataaagactatc

SEQ ID NO: 1052076 - DNA, 15 bp, Homo sapiens
aaataaagactatca

SEQ ID NO: 1052077 - DNA, 15 bp, Homo sapiens
aataaagactatcat

SEQ ID NO: 1052078 - DNA, 15 bp, Homo sapiens
ataaagactatcatt

SEQ ID NO: 1052079 - DNA, 15 bp, Homo sapiens
taaagactatcattt

SEQ ID NO: 1052080 - DNA, 15 bp, Homo sapiens
aaagactatcatttt

SEQ ID NO: 1052081 - DNA, 15 bp, Homo sapiens
aagactatcattttg

SEQ ID NO: 1052082 - DNA, 15 bp, Homo sapiens
agactatcattttga

SEQ ID NO: 1052083 - DNA, 15 bp, Homo sapiens
gactatcattttgag

SEQ ID NO: 1052084 - DNA, 15 bp, Homo sapiens
actatcattttgagc

SEQ ID NO: 1052085 - DNA, 15 bp, Homo sapiens
ctatcattttgagct

SEQ ID NO: 1052086 - DNA, 15 bp, Homo sapiens
tatcattttgagctc

SEQ ID NO: 1052087 - DNA, 15 bp, Homo sapiens
atcattttgagctct

SEQ ID NO: 1052088 - DNA, 15 bp, Homo sapiens
tcattttgagctctt

SEQ ID NO: 1052089 - DNA, 15 bp, Homo sapiens
cattttgagctctta

SEQ ID NO: 1052090 - DNA, 15 bp, Homo sapiens
attttgagctcttac

SEQ ID NO: 1052091 - DNA, 15 bp, Homo sapiens
ttttgagctcttact

SEQ ID NO: 1052092 - DNA, 15 bp, Homo sapiens
tttgagctcttactg

SEQ ID NO: 1052093 - DNA, 15 bp, Homo sapiens
ttgagctcttactgt

SEQ ID NO: 1052094 - DNA, 15 bp, Homo sapiens
tgagctcttactgtg

SEQ ID NO: 1052095 - DNA, 15 bp, Homo sapiens
gagctcttactgtgt

SEQ ID NO: 1052096 - DNA, 15 bp, Homo sapiens
agctcttactgtgtc

SEQ ID NO: 1052097 - DNA, 15 bp, Homo sapiens
gctcttactgtgtcc

SEQ ID NO: 1052098 - DNA, 15 bp, Homo sapiens
ctcttactgtgtccg

SEQ ID NO: 1052099 - DNA, 15 bp, Homo sapiens
tcttactgtgtccgg

SEQ ID NO: 1052100 - DNA, 15 bp, Homo sapiens
cttactgtgtccggt

SEQ ID NO: 1052101 - DNA, 15 bp, Homo sapiens
ttactgtgtccggtg

SEQ ID NO: 1052102 - DNA, 15 bp, Homo sapiens
tactgtgtccggtgc

SEQ ID NO: 1052103 - DNA, 15 bp, Homo sapiens
actgtgtccggtgca

SEQ ID NO: 1052104 - DNA, 15 bp, Homo sapiens
ctgtgtccggtgcac

SEQ ID NO: 1052105 - DNA, 15 bp, Homo sapiens
tgtgtccggtgcact

SEQ ID NO: 1052106 - DNA, 15 bp, Homo sapiens
gtgtccggtgcactg

SEQ ID NO: 1052107 - DNA, 15 bp, Homo sapiens
tgtccggtgcactgt

SEQ ID NO: 1052108 - DNA, 15 bp, Homo sapiens
gtccggtgcactgta

SEQ ID NO: 1052109 - DNA, 15 bp, Homo sapiens
tccggtgcactgtac

SEQ ID NO: 1052110 - DNA, 15 bp, Homo sapiens
ccggtgcactgtacc

SEQ ID NO: 1052111 - DNA, 15 bp, Homo sapiens
cggtgcactgtacct

SEQ ID NO: 1052112 - DNA, 15 bp, Homo sapiens
ggtgcactgtacctg

SEQ ID NO: 1052113 - DNA, 15 bp, Homo sapiens
gtgcactgtacctgg

SEQ ID NO: 1052114 - DNA, 15 bp, Homo sapiens
tgcactgtacctggc

SEQ ID NO: 1052115 - DNA, 15 bp, Homo sapiens
gcactgtacctggcc

SEQ ID NO: 1052116 - DNA, 15 bp, Homo sapiens
cactgtacctggccg

SEQ ID NO: 1052117 - DNA, 15 bp, Homo sapiens
actgtacctggccgt

SEQ ID NO: 1052118 - DNA, 15 bp, Homo sapiens
ctgtacctggccgtt

SEQ ID NO: 1052119 - DNA, 15 bp, Homo sapiens
tgtacctggccgttt

SEQ ID NO: 1052120 - DNA, 15 bp, Homo sapiens
gtacctggccgtttt

SEQ ID NO: 1052121 - DNA, 15 bp, Homo sapiens
tacctggccgttttt

SEQ ID NO: 1052122 - DNA, 15 bp, Homo sapiens
acctggccgtttttg

SEQ ID NO: 1052123 - DNA, 15 bp, Homo sapiens
cctggccgtttttgc

SEQ ID NO: 1052124 - DNA, 15 bp, Homo sapiens
ctggccgtttttgca

SEQ ID NO: 1052125 - DNA, 15 bp, Homo sapiens
tggccgtttttgcac

SEQ ID NO: 1052126 - DNA, 15 bp, Homo sapiens
ggccgtttttgcaca

SEQ ID NO: 1052127 - DNA, 15 bp, Homo sapiens
gccgtttttgcacat

SEQ ID NO: 1052128 - DNA, 15 bp, Homo sapiens
ccgtttttgcacatg

SEQ ID NO: 1052129 - DNA, 15 bp, Homo sapiens
cgtttttgcacatga

SEQ ID NO: 1052130 - DNA, 15 bp, Homo sapiens
gtttttgcacatgag

SEQ ID NO: 1052131 - DNA, 15 bp, Homo sapiens
tttttgcacatgagt

SEQ ID NO: 1052132 - DNA, 15 bp, Homo sapiens
ttttgcacatgagtc

SEQ ID NO: 1052133 - DNA, 15 bp, Homo sapiens
tttgcacatgagtcc

SEQ ID NO: 1052134 - DNA, 15 bp, Homo sapiens
ttgcacatgagtccc

SEQ ID NO: 1052135 - DNA, 15 bp, Homo sapiens
tgcacatgagtccct

SEQ ID NO: 1052136 - DNA, 15 bp, Homo sapiens
gcacatgagtccctt

SEQ ID NO: 1052137 - DNA, 15 bp, Homo sapiens
cacatgagtcccttt

SEQ ID NO: 1052138 - DNA, 15 bp, Homo sapiens
acatgagtcccttta

SEQ ID NO: 1052139 - DNA, 15 bp, Homo sapiens
catgagtccctttaa

SEQ ID NO: 1052140 - DNA, 15 bp, Homo sapiens
atgagtccctttaat

SEQ ID NO: 1052141 - DNA, 15 bp, Homo sapiens
tgagtccctttaatg

SEQ ID NO: 1052142 - DNA, 15 bp, Homo sapiens
gagtccctttaatgc

SEQ ID NO: 1052143 - DNA, 15 bp, Homo sapiens
agtccctttaatgct

SEQ ID NO: 1052144 - DNA, 15 bp, Homo sapiens
gtccctttaatgctc

SEQ ID NO: 1052145 - DNA, 15 bp, Homo sapiens
tccctttaatgctcc

SEQ ID NO: 1052146 - DNA, 15 bp, Homo sapiens
ccctttaatgctccc

SEQ ID NO: 1052147 - DNA, 15 bp, Homo sapiens
cctttaatgctcccc

SEQ ID NO: 1052148 - DNA, 15 bp, Homo sapiens
ctttaatgctcccct

SEQ ID NO: 1052149 - DNA, 15 bp, Homo sapiens
tttaatgctcccctt

SEQ ID NO: 1052150 - DNA, 15 bp, Homo sapiens
ttaatgctccccttt

SEQ ID NO: 1052151 - DNA, 15 bp, Homo sapiens
taatgctcccctttg

SEQ ID NO: 1052152 - DNA, 15 bp, Homo sapiens
aatgctcccctttgt

SEQ ID NO: 1052153 - DNA, 15 bp, Homo sapiens
atgctcccctttgta

SEQ ID NO: 1052154 - DNA, 15 bp, Homo sapiens
tgctcccctttgtag

SEQ ID NO: 1052155 - DNA, 15 bp, Homo sapiens
gctcccctttgtagt

SEQ ID NO: 1052156 - DNA, 15 bp, Homo sapiens
ctcccctttgtagtg

SEQ ID NO: 1052157 - DNA, 15 bp, Homo sapiens
tcccctttgtagtgg

SEQ ID NO: 1052158 - DNA, 15 bp, Homo sapiens
cccctttgtagtggc

SEQ ID NO: 1052159 - DNA, 15 bp, Homo sapiens
ccctttgtagtggct

SEQ ID NO: 1052160 - DNA, 15 bp, Homo sapiens
cctttgtagtggctc

SEQ ID NO: 1052161 - DNA, 15 bp, Homo sapiens
ctttgtagtggctct

SEQ ID NO: 1052162 - DNA, 15 bp, Homo sapiens
tttgtagtggctctg

SEQ ID NO: 1052163 - DNA, 15 bp, Homo sapiens
ttgtagtggctctgg

SEQ ID NO: 1052164 - DNA, 15 bp, Homo sapiens
tgtagtggctctggt

SEQ ID NO: 1052165 - DNA, 15 bp, Homo sapiens
gtagtggctctggtt

SEQ ID NO: 1052166 - DNA, 15 bp, Homo sapiens
tagtggctctggtta

SEQ ID NO: 1052167 - DNA, 15 bp, Homo sapiens
agtggctctggttat

SEQ ID NO: 1052168 - DNA, 15 bp, Homo sapiens
gtggctctggttatt

SEQ ID NO: 1052169 - DNA, 15 bp, Homo sapiens
tggctctggttattc

SEQ ID NO: 1052170 - DNA, 15 bp, Homo sapiens
ggctctggttattct

SEQ ID NO: 1052171 - DNA, 15 bp, Homo sapiens
gctctggttattctt

SEQ ID NO: 1052172 - DNA, 15 bp, Homo sapiens
ctctggttattcttg

SEQ ID NO: 1052173 - DNA, 15 bp, Homo sapiens
tctggttattcttgg

SEQ ID NO: 1052174 - DNA, 15 bp, Homo sapiens
ctggttattcttggc

SEQ ID NO: 1052175 - DNA, 15 bp, Homo sapiens
tggttattcttggct

SEQ ID NO: 1052176 - DNA, 15 bp, Homo sapiens
ggttattcttggctc

SEQ ID NO: 1052177 - DNA, 15 bp, Homo sapiens
gttattcttggctcc

SEQ ID NO: 1052178 - DNA, 15 bp, Homo sapiens
ttattcttggctcca

SEQ ID NO: 1052179 - DNA, 15 bp, Homo sapiens
tattcttggctccac

SEQ ID NO: 1052180 - DNA, 15 bp, Homo sapiens
attcttggctccaca

SEQ ID NO: 1052181 - DNA, 15 bp, Homo sapiens
ttcttggctccacat

SEQ ID NO: 1052182 - DNA, 15 bp, Homo sapiens
tcttggctccacatg

SEQ ID NO: 1052183 - DNA, 15 bp, Homo sapiens
cttggctccacatgg

SEQ ID NO: 1052184 - DNA, 15 bp, Homo sapiens
ttggctccacatggg

SEQ ID NO: 1052185 - DNA, 15 bp, Homo sapiens
tggctccacatgggc

SEQ ID NO: 1052186 - DNA, 15 bp, Homo sapiens
ggctccacatgggca

SEQ ID NO: 1052187 - DNA, 15 bp, Homo sapiens
gctccacatgggcac

SEQ ID NO: 1052188 - DNA, 15 bp, Homo sapiens
ctccacatgggcacg

SEQ ID NO: 1052189 - DNA, 15 bp, Homo sapiens
tccacatgggcacgt

SEQ ID NO: 1052190 - DNA, 15 bp, Homo sapiens
ccacatgggcacgtg

SEQ ID NO: 1052191 - DNA, 15 bp, Homo sapiens
cacatgggcacgtga

SEQ ID NO: 1052192 - DNA, 15 bp, Homo sapiens
acatgggcacgtgac

SEQ ID NO: 1052193 - DNA, 15 bp, Homo sapiens
catgggcacgtgaca

SEQ ID NO: 1052194 - DNA, 15 bp, Homo sapiens
atgggcacgtgacag

SEQ ID NO: 1052195 - DNA, 15 bp, Homo sapiens
tgggcacgtgacaga

SEQ ID NO: 1052196 - DNA, 15 bp, Homo sapiens
gggcacgtgacagac

SEQ ID NO: 1052197 - DNA, 15 bp, Homo sapiens
ggcacgtgacagaca

SEQ ID NO: 1052198 - DNA, 15 bp, Homo sapiens
gcacgtgacagacac

SEQ ID NO: 1052199 - DNA, 15 bp, Homo sapiens
cacgtgacagacaca

SEQ ID NO: 1052200 - DNA, 15 bp, Homo sapiens
acgtgacagacacac

SEQ ID NO: 1052201 - DNA, 15 bp, Homo sapiens
cgtgacagacacacc

SEQ ID NO: 1052202 - DNA, 15 bp, Homo sapiens
gtgacagacacaccc

SEQ ID NO: 1052203 - DNA, 15 bp, Homo sapiens
tgacagacacacccg

SEQ ID NO: 1052204 - DNA, 15 bp, Homo sapiens
gacagacacacccgg

SEQ ID NO: 1052205 - DNA, 15 bp, Homo sapiens
acagacacacccggg

SEQ ID NO: 1052206 - DNA, 15 bp, Homo sapiens
cagacacacccggga

SEQ ID NO: 1052207 - DNA, 15 bp, Homo sapiens
agacacacccgggat

SEQ ID NO: 1052208 - DNA, 15 bp, Homo sapiens
gacacacccgggatg

SEQ ID NO: 1052209 - DNA, 15 bp, Homo sapiens
acacacccgggatgc

SEQ ID NO: 1052210 - DNA, 15 bp, Homo sapiens
cacacccgggatgct

SEQ ID NO: 1052211 - DNA, 15 bp, Homo sapiens
acacccgggatgctg

SEQ ID NO: 1052212 - DNA, 15 bp, Homo sapiens
cacccgggatgctgg

SEQ ID NO: 1052213 - DNA, 15 bp, Homo sapiens
acccgggatgctggg

SEQ ID NO: 1052214 - DNA, 15 bp, Homo sapiens
cccgggatgctgggc

SEQ ID NO: 1052215 - DNA, 15 bp, Homo sapiens
ccgggatgctgggct

SEQ ID NO: 1052216 - DNA, 15 bp, Homo sapiens
cgggatgctgggctg

SEQ ID NO: 1052217 - DNA, 15 bp, Homo sapiens
gggatgctgggctgg

SEQ ID NO: 1052218 - DNA, 15 bp, Homo sapiens
ggatgctgggctggg

SEQ ID NO: 1052219 - DNA, 15 bp, Homo sapiens
gatgctgggctgggg

SEQ ID NO: 1052220 - DNA, 15 bp, Homo sapiens
atgctgggctggggc

SEQ ID NO: 1052221 - DNA, 15 bp, Homo sapiens
tgctgggctggggcc

SEQ ID NO: 1052222 - DNA, 15 bp, Homo sapiens
gctgggctggggcct

SEQ ID NO: 1052223 - DNA, 15 bp, Homo sapiens
ctgggctggggcctt

SEQ ID NO: 1052224 - DNA, 15 bp, Homo sapiens
tgggctggggccttg

SEQ ID NO: 1052225 - DNA, 15 bp, Homo sapiens
gggctggggccttgt

SEQ ID NO: 1052226 - DNA, 15 bp, Homo sapiens
ggctggggccttgtg

SEQ ID NO: 1052227 - DNA, 15 bp, Homo sapiens
gctggggccttgtgc

SEQ ID NO: 1052228 - DNA, 15 bp, Homo sapiens
ctggggccttgtgct

SEQ ID NO: 1052229 - DNA, 15 bp, Homo sapiens
tggggccttgtgctg

SEQ ID NO: 1052230 - DNA, 15 bp, Homo sapiens
ggggccttgtgctgg

SEQ ID NO: 1052231 - DNA, 15 bp, Homo sapiens
gggccttgtgctggg

SEQ ID NO: 1052232 - DNA, 15 bp, Homo sapiens
ggccttgtgctgggt

SEQ ID NO: 1052233 - DNA, 15 bp, Homo sapiens
gccttgtgctgggtc

SEQ ID NO: 1052234 - DNA, 15 bp, Homo sapiens
ccttgtgctgggtcc

SEQ ID NO: 1052235 - DNA, 15 bp, Homo sapiens
cttgtgctgggtcct

SEQ ID NO: 1052236 - DNA, 15 bp, Homo sapiens
ttgtgctgggtcctg

SEQ ID NO: 1052237 - DNA, 15 bp, Homo sapiens
tgtgctgggtcctgc

SEQ ID NO: 1052238 - DNA, 15 bp, Homo sapiens
gtgctgggtcctgct

SEQ ID NO: 1052239 - DNA, 15 bp, Homo sapiens
tgctgggtcctgctc

SEQ ID NO: 1052240 - DNA, 15 bp, Homo sapiens
gctgggtcctgctct

SEQ ID NO: 1052241 - DNA, 15 bp, Homo sapiens
ctgggtcctgctctg

SEQ ID NO: 1052242 - DNA, 15 bp, Homo sapiens
tgggtcctgctctgg

SEQ ID NO: 1052243 - DNA, 15 bp, Homo sapiens
gggtcctgctctgga

SEQ ID NO: 1052244 - DNA, 15 bp, Homo sapiens
ggtcctgctctggag

SEQ ID NO: 1052245 - DNA, 15 bp, Homo sapiens
gtcctgctctggagg

SEQ ID NO: 1052246 - DNA, 15 bp, Homo sapiens
tcctgctctggaggt

SEQ ID NO: 1052247 - DNA, 15 bp, Homo sapiens
cctgctctggaggtc

SEQ ID NO: 1052248 - DNA, 15 bp, Homo sapiens
ctgctctggaggtct

SEQ ID NO: 1052249 - DNA, 15 bp, Homo sapiens
tgctctggaggtctg

SEQ ID NO: 1052250 - DNA, 15 bp, Homo sapiens
gctctggaggtctgt

SEQ ID NO: 1052251 - DNA, 15 bp, Homo sapiens
ctctggaggtctgtg

SEQ ID NO: 1052252 - DNA, 15 bp, Homo sapiens
tctggaggtctgtga

SEQ ID NO: 1052253 - DNA, 15 bp, Homo sapiens
ctggaggtctgtgat

SEQ ID NO: 1052254 - DNA, 15 bp, Homo sapiens
tggaggtctgtgatg

SEQ ID NO: 1052255 - DNA, 15 bp, Homo sapiens
ggaggtctgtgatgg

SEQ ID NO: 1052256 - DNA, 15 bp, Homo sapiens
gaggtctgtgatggg

SEQ ID NO: 1052257 - DNA, 15 bp, Homo sapiens
aggtctgtgatgggt

SEQ ID NO: 1052258 - DNA, 15 bp, Homo sapiens
ggtctgtgatgggtg

SEQ ID NO: 1052259 - DNA, 15 bp, Homo sapiens
gtctgtgatgggtgc

SEQ ID NO: 1052260 - DNA, 15 bp, Homo sapiens
tctgtgatgggtgca

SEQ ID NO: 1052261 - DNA, 15 bp, Homo sapiens
ctgtgatgggtgcag

SEQ ID NO: 1052262 - DNA, 15 bp, Homo sapiens
tgtgatgggtgcagt

SEQ ID NO: 1052263 - DNA, 15 bp, Homo sapiens
gtgatgggtgcagtc

SEQ ID NO: 1052264 - DNA, 15 bp, Homo sapiens
tgatgggtgcagtca

SEQ ID NO: 1052265 - DNA, 15 bp, Homo sapiens
gatgggtgcagtcac

SEQ ID NO: 1052266 - DNA, 15 bp, Homo sapiens
atgggtgcagtcact

SEQ ID NO: 1052267 - DNA, 15 bp, Homo sapiens
tgggtgcagtcactc

SEQ ID NO: 1052268 - DNA, 15 bp, Homo sapiens
gggtgcagtcactca

SEQ ID NO: 1052269 - DNA, 15 bp, Homo sapiens
ggtgcagtcactcag

SEQ ID NO: 1052270 - DNA, 15 bp, Homo sapiens
gtgcagtcactcagc

SEQ ID NO: 1052271 - DNA, 15 bp, Homo sapiens
tgcagtcactcagcc

SEQ ID NO: 1052272 - DNA, 15 bp, Homo sapiens
gcagtcactcagccg

SEQ ID NO: 1052273 - DNA, 15 bp, Homo sapiens
cagtcactcagccgg

SEQ ID NO: 1052274 - DNA, 15 bp, Homo sapiens
agtcactcagccggg

SEQ ID NO: 1052275 - DNA, 15 bp, Homo sapiens
gtcactcagccgggc

SEQ ID NO: 1052276 - DNA, 15 bp, Homo sapiens
tcactcagccgggca

SEQ ID NO: 1052277 - DNA, 15 bp, Homo sapiens
cactcagccgggcaa

SEQ ID NO: 1052278 - DNA, 15 bp, Homo sapiens
actcagccgggcaac

SEQ ID NO: 1052279 - DNA, 15 bp, Homo sapiens
ctcagccgggcaacc

SEQ ID NO: 1052280 - DNA, 15 bp, Homo sapiens
tcagccgggcaacct

SEQ ID NO: 1052281 - DNA, 15 bp, Homo sapiens
cagccgggcaacctt

SEQ ID NO: 1052282 - DNA, 15 bp, Homo sapiens
agccgggcaaccttg

SEQ ID NO: 1052283 - DNA, 15 bp, Homo sapiens
gccgggcaaccttgg

SEQ ID NO: 1052284 - DNA, 15 bp, Homo sapiens
ccgggcaaccttgga

SEQ ID NO: 1052285 - DNA, 15 bp, Homo sapiens
cgggcaaccttggag

SEQ ID NO: 1052286 - DNA, 15 bp, Homo sapiens
gggcaaccttggagc

SEQ ID NO: 1052287 - DNA, 15 bp, Homo sapiens
ggcaaccttggagct

SEQ ID NO: 1052288 - DNA, 15 bp, Homo sapiens
gcaaccttggagctc

SEQ ID NO: 1052289 - DNA, 15 bp, Homo sapiens
caaccttggagctcc

SEQ ID NO: 1052290 - DNA, 15 bp, Homo sapiens
aaccttggagctcct

SEQ ID NO: 1052291 - DNA, 15 bp, Homo sapiens
accttggagctcctc

SEQ ID NO: 1052292 - DNA, 15 bp, Homo sapiens
ccttggagctcctca

SEQ ID NO: 1052293 - DNA, 15 bp, Homo sapiens
cttggagctcctcag

SEQ ID NO: 1052294 - DNA, 15 bp, Homo sapiens
ttggagctcctcagt

SEQ ID NO: 1052295 - DNA, 15 bp, Homo sapiens
tggagctcctcagtg

SEQ ID NO: 1052296 - DNA, 15 bp, Homo sapiens
ggagctcctcagtgt

SEQ ID NO: 1052297 - DNA, 15 bp, Homo sapiens
gagctcctcagtgtg

SEQ ID NO: 1052298 - DNA, 15 bp, Homo sapiens
agctcctcagtgtgc

SEQ ID NO: 1052299 - DNA, 15 bp, Homo sapiens
gctcctcagtgtgct

SEQ ID NO: 1052300 - DNA, 15 bp, Homo sapiens
ctcctcagtgtgctc

SEQ ID NO: 1052301 - DNA, 15 bp, Homo sapiens
tcctcagtgtgctcc

SEQ ID NO: 1052302 - DNA, 15 bp, Homo sapiens
cctcagtgtgctcca

SEQ ID NO: 1052303 - DNA, 15 bp, Homo sapiens
ctcagtgtgctccac

SEQ ID NO: 1052304 - DNA, 15 bp, Homo sapiens
tcagtgtgctccacc

SEQ ID NO: 1052305 - DNA, 15 bp, Homo sapiens
cagtgtgctccaccc

SEQ ID NO: 1052306 - DNA, 15 bp, Homo sapiens
agtgtgctccaccct

SEQ ID NO: 1052307 - DNA, 15 bp, Homo sapiens
gtgtgctccaccctg

SEQ ID NO: 1052308 - DNA, 15 bp, Homo sapiens
tgtgctccaccctgc

SEQ ID NO: 1052309 - DNA, 15 bp, Homo sapiens
gtgctccaccctgca

SEQ ID NO: 1052310 - DNA, 15 bp, Homo sapiens
tgctccaccctgcaa

SEQ ID NO: 1052311 - DNA, 15 bp, Homo sapiens
gctccaccctgcaaa

SEQ ID NO: 1052312 - DNA, 15 bp, Homo sapiens
ctccaccctgcaaag

SEQ ID NO: 1052313 - DNA, 15 bp, Homo sapiens
tccaccctgcaaagc

SEQ ID NO: 1052314 - DNA, 15 bp, Homo sapiens
ccaccctgcaaagca

SEQ ID NO: 1052315 - DNA, 15 bp, Homo sapiens
caccctgcaaagcac

SEQ ID NO: 1052316 - DNA, 15 bp, Homo sapiens
accctgcaaagcact

SEQ ID NO: 1052317 - DNA, 15 bp, Homo sapiens
ccctgcaaagcactt

SEQ ID NO: 1052318 - DNA, 15 bp, Homo sapiens
cctgcaaagcacttc

SEQ ID NO: 1052319 - DNA, 15 bp, Homo sapiens
ctgcaaagcacttct

SEQ ID NO: 1052320 - DNA, 15 bp, Homo sapiens
tgcaaagcacttcta

SEQ ID NO: 1052321 - DNA, 15 bp, Homo sapiens
gcaaagcacttctag

SEQ ID NO: 1052322 - DNA, 15 bp, Homo sapiens
caaagcacttctaga

SEQ ID NO: 1052323 - DNA, 15 bp, Homo sapiens
aaagcacttctagat

SEQ ID NO: 1052324 - DNA, 15 bp, Homo sapiens
aagcacttctagata

SEQ ID NO: 1052325 - DNA, 15 bp, Homo sapiens
agcacttctagatat

SEQ ID NO: 1052326 - DNA, 15 bp, Homo sapiens
gcacttctagatatt

SEQ ID NO: 1052327 - DNA, 15 bp, Homo sapiens
cacttctagatattt

SEQ ID NO: 1052328 - DNA, 15 bp, Homo sapiens
acttctagatatttc

SEQ ID NO: 1052329 - DNA, 15 bp, Homo sapiens
cttctagatatttcc

SEQ ID NO: 1052330 - DNA, 15 bp, Homo sapiens
ttctagatatttcct

SEQ ID NO: 1052331 - DNA, 15 bp, Homo sapiens
tctagatatttcctt

SEQ ID NO: 1052332 - DNA, 15 bp, Homo sapiens
ctagatatttccttc

SEQ ID NO: 1052333 - DNA, 15 bp, Homo sapiens
tagatatttccttca

SEQ ID NO: 1052334 - DNA, 15 bp, Homo sapiens
agatatttccttcag

SEQ ID NO: 1052335 - DNA, 15 bp, Homo sapiens
gatatttccttcagt

SEQ ID NO: 1052336 - DNA, 15 bp, Homo sapiens
atatttccttcagtc

SEQ ID NO: 1052337 - DNA, 15 bp, Homo sapiens
tatttccttcagtca

SEQ ID NO: 1052338 - DNA, 15 bp, Homo sapiens
atttccttcagtcac

SEQ ID NO: 1052339 - DNA, 15 bp, Homo sapiens
tttccttcagtcact

SEQ ID NO: 1052340 - DNA, 15 bp, Homo sapiens
ttccttcagtcactc

SEQ ID NO: 1052341 - DNA, 15 bp, Homo sapiens
tccttcagtcactca

SEQ ID NO: 1052342 - DNA, 15 bp, Homo sapiens
ccttcagtcactcat

SEQ ID NO: 1052343 - DNA, 15 bp, Homo sapiens
cttcagtcactcata

SEQ ID NO: 1052344 - DNA, 15 bp, Homo sapiens
ttcagtcactcatac

SEQ ID NO: 1052345 - DNA, 15 bp, Homo sapiens
tcagtcactcatacc

SEQ ID NO: 1052346 - DNA, 15 bp, Homo sapiens
cagtcactcatacca

SEQ ID NO: 1052347 - DNA, 15 bp, Homo sapiens
agtcactcataccac

SEQ ID NO: 1052348 - DNA, 15 bp, Homo sapiens
gtcactcataccact

SEQ ID NO: 1052349 - DNA, 15 bp, Homo sapiens
tcactcataccactt

SEQ ID NO: 1052350 - DNA, 15 bp, Homo sapiens
cactcataccacttt

SEQ ID NO: 1052351 - DNA, 15 bp, Homo sapiens
actcataccactttg

SEQ ID NO: 1052352 - DNA, 15 bp, Homo sapiens
ctcataccactttgt

SEQ ID NO: 1052353 - DNA, 15 bp, Homo sapiens
tcataccactttgtg

SEQ ID NO: 1052354 - DNA, 15 bp, Homo sapiens
cataccactttgtgc

SEQ ID NO: 1052355 - DNA, 15 bp, Homo sapiens
ataccactttgtgct

SEQ ID NO: 1052356 - DNA, 15 bp, Homo sapiens
taccactttgtgctt

SEQ ID NO: 1052357 - DNA, 15 bp, Homo sapiens
accactttgtgcttt

SEQ ID NO: 1052358 - DNA, 15 bp, Homo sapiens
ccactttgtgctttg

SEQ ID NO: 1052359 - DNA, 15 bp, Homo sapiens
cactttgtgctttgc

SEQ ID NO: 1052360 - DNA, 15 bp, Homo sapiens
actttgtgctttgca

SEQ ID NO: 1052361 - DNA, 15 bp, Homo sapiens
ctttgtgctttgcat

SEQ ID NO: 1052362 - DNA, 15 bp, Homo sapiens
tttgtgctttgcatg

SEQ ID NO: 1052363 - DNA, 15 bp, Homo sapiens
ttgtgctttgcatgt

SEQ ID NO: 1052364 - DNA, 15 bp, Homo sapiens
tgtgctttgcatgtc

SEQ ID NO: 1052365 - DNA, 15 bp, Homo sapiens
gtgctttgcatgtct

SEQ ID NO: 1052366 - DNA, 15 bp, Homo sapiens
tgctttgcatgtctt

SEQ ID NO: 1052367 - DNA, 15 bp, Homo sapiens
gctttgcatgtcttt

SEQ ID NO: 1052368 - DNA, 15 bp, Homo sapiens
ctttgcatgtctttg

SEQ ID NO: 1052369 - DNA, 15 bp, Homo sapiens
tttgcatgtctttgg

SEQ ID NO: 1052370 - DNA, 15 bp, Homo sapiens
ttgcatgtctttggg

SEQ ID NO: 1052371 - DNA, 15 bp, Homo sapiens
tgcatgtctttggga

SEQ ID NO: 1052372 - DNA, 15 bp, Homo sapiens
gcatgtctttgggat

SEQ ID NO: 1052373 - DNA, 15 bp, Homo sapiens
catgtctttgggatt

SEQ ID NO: 1052374 - DNA, 15 bp, Homo sapiens
atgtctttgggatta

SEQ ID NO: 1052375 - DNA, 15 bp, Homo sapiens
tgtctttgggattag

SEQ ID NO: 1052376 - DNA, 15 bp, Homo sapiens
gtctttgggattaga

SEQ ID NO: 1052377 - DNA, 15 bp, Homo sapiens
tctttgggattagaa

SEQ ID NO: 1052378 - DNA, 15 bp, Homo sapiens
ctttgggattagaaa

SEQ ID NO: 1052379 - DNA, 15 bp, Homo sapiens
tttgggattagaaac

SEQ ID NO: 1052380 - DNA, 15 bp, Homo sapiens
ttgggattagaaacc

SEQ ID NO: 1052381 - DNA, 15 bp, Homo sapiens
tgggattagaaacca

SEQ ID NO: 1052382 - DNA, 15 bp, Homo sapiens
gggattagaaaccag

SEQ ID NO: 1052383 - DNA, 15 bp, Homo sapiens
ggattagaaaccagc

SEQ ID NO: 1052384 - DNA, 15 bp, Homo sapiens
gattagaaaccagct

SEQ ID NO: 1052385 - DNA, 15 bp, Homo sapiens
attagaaaccagctt

SEQ ID NO: 1052386 - DNA, 15 bp, Homo sapiens
ttagaaaccagcttc

SEQ ID NO: 1052387 - DNA, 15 bp, Homo sapiens
tagaaaccagcttct

SEQ ID NO: 1052388 - DNA, 15 bp, Homo sapiens
agaaaccagcttctg

SEQ ID NO: 1052389 - DNA, 15 bp, Homo sapiens
gaaaccagcttctgg

SEQ ID NO: 1052390 - DNA, 15 bp, Homo sapiens
aaaccagcttctggg

SEQ ID NO: 1052391 - DNA, 15 bp, Homo sapiens
aaccagcttctggga

SEQ ID NO: 1052392 - DNA, 15 bp, Homo sapiens
accagcttctgggaa

SEQ ID NO: 1052393 - DNA, 15 bp, Homo sapiens
ccagcttctgggaaa

SEQ ID NO: 1052394 - DNA, 15 bp, Homo sapiens
cagcttctgggaaat

SEQ ID NO: 1052395 - DNA, 15 bp, Homo sapiens
agcttctgggaaatg

SEQ ID NO: 1052396 - DNA, 15 bp, Homo sapiens
gcttctgggaaatgc

SEQ ID NO: 1052397 - DNA, 15 bp, Homo sapiens
cttctgggaaatgct

SEQ ID NO: 1052398 - DNA, 15 bp, Homo sapiens
ttctgggaaatgctc

SEQ ID NO: 1052399 - DNA, 15 bp, Homo sapiens
tctgggaaatgctct

SEQ ID NO: 1052400 - DNA, 15 bp, Homo sapiens
ctgggaaatgctctc

SEQ ID NO: 1052401 - DNA, 15 bp, Homo sapiens
tgggaaatgctctcg

SEQ ID NO: 1052402 - DNA, 15 bp, Homo sapiens
gggaaatgctctcgg

SEQ ID NO: 1052403 - DNA, 15 bp, Homo sapiens
ggaaatgctctcgga

SEQ ID NO: 1052404 - DNA, 15 bp, Homo sapiens
gaaatgctctcggag

SEQ ID NO: 1052405 - DNA, 15 bp, Homo sapiens
aaatgctctcggagc

SEQ ID NO: 1052406 - DNA, 15 bp, Homo sapiens
aatgctctcggagca

SEQ ID NO: 1052407 - DNA, 15 bp, Homo sapiens
atgctctcggagcac

SEQ ID NO: 1052408 - DNA, 15 bp, Homo sapiens
tgctctcggagcacc

SEQ ID NO: 1052409 - DNA, 15 bp, Homo sapiens
gctctcggagcacca

SEQ ID NO: 1052410 - DNA, 15 bp, Homo sapiens
ctctcggagcaccaa

SEQ ID NO: 1052411 - DNA, 15 bp, Homo sapiens
tctcggagcaccaaa

SEQ ID NO: 1052412 - DNA, 15 bp, Homo sapiens
ctcggagcaccaaag

SEQ ID NO: 1052413 - DNA, 15 bp, Homo sapiens
tcggagcaccaaagc

SEQ ID NO: 1052414 - DNA, 15 bp, Homo sapiens
cggagcaccaaagcc

SEQ ID NO: 1052415 - DNA, 15 bp, Homo sapiens
ggagcaccaaagcct

SEQ ID NO: 1052416 - DNA, 15 bp, Homo sapiens
gagcaccaaagcctg

SEQ ID NO: 1052417 - DNA, 15 bp, Homo sapiens
agcaccaaagcctgg

SEQ ID NO: 1052418 - DNA, 15 bp, Homo sapiens
gcaccaaagcctggg

SEQ ID NO: 1052419 - DNA, 15 bp, Homo sapiens
caccaaagcctgggc

SEQ ID NO: 1052420 - DNA, 15 bp, Homo sapiens
accaaagcctgggcc

SEQ ID NO: 1052421 - DNA, 15 bp, Homo sapiens
ccaaagcctgggccc

SEQ ID NO: 1052422 - DNA, 15 bp, Homo sapiens
caaagcctgggcccc

SEQ ID NO: 1052423 - DNA, 15 bp, Homo sapiens
aaagcctgggcccca

SEQ ID NO: 1052424 - DNA, 15 bp, Homo sapiens
aagcctgggccccac

SEQ ID NO: 1052425 - DNA, 15 bp, Homo sapiens
agcctgggccccact

SEQ ID NO: 1052426 - DNA, 15 bp, Homo sapiens
gcctgggccccacta

SEQ ID NO: 1052427 - DNA, 15 bp, Homo sapiens
cctgggccccactat

SEQ ID NO: 1052428 - DNA, 15 bp, Homo sapiens
ctgggccccactatc

SEQ ID NO: 1052429 - DNA, 15 bp, Homo sapiens
tgggccccactatca

SEQ ID NO: 1052430 - DNA, 15 bp, Homo sapiens
gggccccactatcaa

SEQ ID NO: 1052431 - DNA, 15 bp, Homo sapiens
ggccccactatcaag

SEQ ID NO: 1052432 - DNA, 15 bp, Homo sapiens
gccccactatcaaga

SEQ ID NO: 1052433 - DNA, 15 bp, Homo sapiens
ccccactatcaagaa

SEQ ID NO: 1052434 - DNA, 15 bp, Homo sapiens
cccactatcaagaac

SEQ ID NO: 1052435 - DNA, 15 bp, Homo sapiens
ccactatcaagaacc

SEQ ID NO: 1052436 - DNA, 15 bp, Homo sapiens
cactatcaagaacct

SEQ ID NO: 1052437 - DNA, 15 bp, Homo sapiens
actatcaagaacctc

SEQ ID NO: 1052438 - DNA, 15 bp, Homo sapiens
ctatcaagaacctcg

SEQ ID NO: 1052439 - DNA, 15 bp, Homo sapiens
tatcaagaacctcga

SEQ ID NO: 1052440 - DNA, 15 bp, Homo sapiens
atcaagaacctcgat

SEQ ID NO: 1052441 - DNA, 15 bp, Homo sapiens
tcaagaacctcgatg

SEQ ID NO: 1052442 - DNA, 15 bp, Homo sapiens
caagaacctcgatgg

SEQ ID NO: 1052443 - DNA, 15 bp, Homo sapiens
aagaacctcgatggg

SEQ ID NO: 1052444 - DNA, 15 bp, Homo sapiens
agaacctcgatgggt

SEQ ID NO: 1052445 - DNA, 15 bp, Homo sapiens
gaacctcgatgggtt

SEQ ID NO: 1052446 - DNA, 15 bp, Homo sapiens
aacctcgatgggtta

SEQ ID NO: 1052447 - DNA, 15 bp, Homo sapiens
acctcgatgggttag

SEQ ID NO: 1052448 - DNA, 15 bp, Homo sapiens
cctcgatgggttagg

SEQ ID NO: 1052449 - DNA, 15 bp, Homo sapiens
ctcgatgggttagga

SEQ ID NO: 1052450 - DNA, 15 bp, Homo sapiens
tcgatgggttaggac

SEQ ID NO: 1052451 - DNA, 15 bp, Homo sapiens
cgatgggttaggaca

SEQ ID NO: 1052452 - DNA, 15 bp, Homo sapiens
gatgggttaggacag

SEQ ID NO: 1052453 - DNA, 15 bp, Homo sapiens
atgggttaggacagg

SEQ ID NO: 1052454 - DNA, 15 bp, Homo sapiens
tgggttaggacaggc

SEQ ID NO: 1052455 - DNA, 15 bp, Homo sapiens
gggttaggacaggcc

SEQ ID NO: 1052456 - DNA, 15 bp, Homo sapiens
ggttaggacaggcca

SEQ ID NO: 1052457 - DNA, 15 bp, Homo sapiens
gttaggacaggccag

SEQ ID NO: 1052458 - DNA, 15 bp, Homo sapiens
ttaggacaggccagg

SEQ ID NO: 1052459 - DNA, 15 bp, Homo sapiens
taggacaggccaggt

SEQ ID NO: 1052460 - DNA, 15 bp, Homo sapiens
aggacaggccaggtt

SEQ ID NO: 1052461 - DNA, 15 bp, Homo sapiens
ggacaggccaggttt

SEQ ID NO: 1052462 - DNA, 15 bp, Homo sapiens
gacaggccaggtttt

SEQ ID NO: 1052463 - DNA, 15 bp, Homo sapiens
acaggccaggttttg

SEQ ID NO: 1052464 - DNA, 15 bp, Homo sapiens
caggccaggttttgc

SEQ ID NO: 1052465 - DNA, 15 bp, Homo sapiens
aggccaggttttgct

SEQ ID NO: 1052466 - DNA, 15 bp, Homo sapiens
ggccaggttttgctg

SEQ ID NO: 1052467 - DNA, 15 bp, Homo sapiens
gccaggttttgctgc

SEQ ID NO: 1052468 - DNA, 15 bp, Homo sapiens
ccaggttttgctgct

SEQ ID NO: 1052469 - DNA, 15 bp, Homo sapiens
caggttttgctgctg

SEQ ID NO: 1052470 - DNA, 15 bp, Homo sapiens
aggttttgctgctgt

SEQ ID NO: 1052471 - DNA, 15 bp, Homo sapiens
ggttttgctgctgtg

SEQ ID NO: 1052472 - DNA, 15 bp, Homo sapiens
gttttgctgctgtga

SEQ ID NO: 1052473 - DNA, 15 bp, Homo sapiens
ttttgctgctgtgac

SEQ ID NO: 1052474 - DNA, 15 bp, Homo sapiens
tttgctgctgtgaca

SEQ ID NO: 1052475 - DNA, 15 bp, Homo sapiens
ttgctgctgtgacaa

SEQ ID NO: 1052476 - DNA, 15 bp, Homo sapiens
tgctgctgtgacaag

SEQ ID NO: 1052477 - DNA, 15 bp, Homo sapiens
gctgctgtgacaagc

SEQ ID NO: 1052478 - DNA, 15 bp, Homo sapiens
ctgctgtgacaagca

SEQ ID NO: 1052479 - DNA, 15 bp, Homo sapiens
tgctgtgacaagcag

SEQ ID NO: 1052480 - DNA, 15 bp, Homo sapiens
gctgtgacaagcagc

SEQ ID NO: 1052481 - DNA, 15 bp, Homo sapiens
ctgtgacaagcagcc

SEQ ID NO: 1052482 - DNA, 15 bp, Homo sapiens
tgtgacaagcagccc

SEQ ID NO: 1052483 - DNA, 15 bp, Homo sapiens
gtgacaagcagcccc

SEQ ID NO: 1052484 - DNA, 15 bp, Homo sapiens
tgacaagcagccccg

SEQ ID NO: 1052485 - DNA, 15 bp, Homo sapiens
gacaagcagccccgg

SEQ ID NO: 1052486 - DNA, 15 bp, Homo sapiens
acaagcagccccgga

SEQ ID NO: 1052487 - DNA, 15 bp, Homo sapiens
caagcagccccggaa

SEQ ID NO: 1052488 - DNA, 15 bp, Homo sapiens
aagcagccccggaat

SEQ ID NO: 1052489 - DNA, 15 bp, Homo sapiens
agcagccccggaatc

SEQ ID NO: 1052490 - DNA, 15 bp, Homo sapiens
gcagccccggaatct

SEQ ID NO: 1052491 - DNA, 15 bp, Homo sapiens
cagccccggaatctc

SEQ ID NO: 1052492 - DNA, 15 bp, Homo sapiens
agccccggaatctcc

SEQ ID NO: 1052493 - DNA, 15 bp, Homo sapiens
gccccggaatctcca

SEQ ID NO: 1052494 - DNA, 15 bp, Homo sapiens
ccccggaatctccat

SEQ ID NO: 1052495 - DNA, 15 bp, Homo sapiens
cccggaatctccatg

SEQ ID NO: 1052496 - DNA, 15 bp, Homo sapiens
ccggaatctccatgg

SEQ ID NO: 1052497 - DNA, 15 bp, Homo sapiens
cggaatctccatggc

SEQ ID NO: 1052498 - DNA, 15 bp, Homo sapiens
ggaatctccatggct

SEQ ID NO: 1052499 - DNA, 15 bp, Homo sapiens
gaatctccatggctt

SEQ ID NO: 1052500 - DNA, 15 bp, Homo sapiens
aatctccatggctta

SEQ ID NO: 1052501 - DNA, 15 bp, Homo sapiens
atctccatggcttag

SEQ ID NO: 1052502 - DNA, 15 bp, Homo sapiens
tctccatggcttaga

SEQ ID NO: 1052503 - DNA, 15 bp, Homo sapiens
ctccatggcttagaa

SEQ ID NO: 1052504 - DNA, 15 bp, Homo sapiens
tccatggcttagaac

SEQ ID NO: 1052505 - DNA, 15 bp, Homo sapiens
ccatggcttagaaca

SEQ ID NO: 1052506 - DNA, 15 bp, Homo sapiens
catggcttagaacaa

SEQ ID NO: 1052507 - DNA, 15 bp, Homo sapiens
atggcttagaacaac

SEQ ID NO: 1052508 - DNA, 15 bp, Homo sapiens
tggcttagaacaacc

SEQ ID NO: 1052509 - DNA, 15 bp, Homo sapiens
ggcttagaacaacca

SEQ ID NO: 1052510 - DNA, 15 bp, Homo sapiens
gcttagaacaaccaa

SEQ ID NO: 1052511 - DNA, 15 bp, Homo sapiens
cttagaacaaccaag

SEQ ID NO: 1052512 - DNA, 15 bp, Homo sapiens
ttagaacaaccaaga

SEQ ID NO: 1052513 - DNA, 15 bp, Homo sapiens
tagaacaaccaagac

SEQ ID NO: 1052514 - DNA, 15 bp, Homo sapiens
agaacaaccaagact

SEQ ID NO: 1052515 - DNA, 15 bp, Homo sapiens
gaacaaccaagactt

SEQ ID NO: 1052516 - DNA, 15 bp, Homo sapiens
aacaaccaagactta

SEQ ID NO: 1052517 - DNA, 15 bp, Homo sapiens
acaaccaagacttat

SEQ ID NO: 1052518 - DNA, 15 bp, Homo sapiens
caaccaagacttatt

SEQ ID NO: 1052519 - DNA, 15 bp, Homo sapiens
aaccaagacttattc

SEQ ID NO: 1052520 - DNA, 15 bp, Homo sapiens
accaagacttattcc

SEQ ID NO: 1052521 - DNA, 15 bp, Homo sapiens
ccaagacttattcct

SEQ ID NO: 1052522 - DNA, 15 bp, Homo sapiens
caagacttattcctt

SEQ ID NO: 1052523 - DNA, 15 bp, Homo sapiens
aagacttattccttt

SEQ ID NO: 1052524 - DNA, 15 bp, Homo sapiens
agacttattcctttg

SEQ ID NO: 1052525 - DNA, 15 bp, Homo sapiens
gacttattcctttgc

SEQ ID NO: 1052526 - DNA, 15 bp, Homo sapiens
acttattcctttgct

SEQ ID NO: 1052527 - DNA, 15 bp, Homo sapiens
cttattcctttgctt

SEQ ID NO: 1052528 - DNA, 15 bp, Homo sapiens
ttattcctttgcttg

SEQ ID NO: 1052529 - DNA, 15 bp, Homo sapiens
tattcctttgcttgc

SEQ ID NO: 1052530 - DNA, 15 bp, Homo sapiens
attcctttgcttgca

SEQ ID NO: 1052531 - DNA, 15 bp, Homo sapiens
ttcctttgcttgcac

SEQ ID NO: 1052532 - DNA, 15 bp, Homo sapiens
tcctttgcttgcact

SEQ ID NO: 1052533 - DNA, 15 bp, Homo sapiens
cctttgcttgcactc

SEQ ID NO: 1052534 - DNA, 15 bp, Homo sapiens
ctttgcttgcactcc

SEQ ID NO: 1052535 - DNA, 15 bp, Homo sapiens
tttgcttgcactcca

SEQ ID NO: 1052536 - DNA, 15 bp, Homo sapiens
ttgcttgcactccac

SEQ ID NO: 1052537 - DNA, 15 bp, Homo sapiens
tgcttgcactccacg

SEQ ID NO: 1052538 - DNA, 15 bp, Homo sapiens
gcttgcactccacgt

SEQ ID NO: 1052539 - DNA, 15 bp, Homo sapiens
cttgcactccacgtc

SEQ ID NO: 1052540 - DNA, 15 bp, Homo sapiens
ttgcactccacgtcc

SEQ ID NO: 1052541 - DNA, 15 bp, Homo sapiens
tgcactccacgtcca

SEQ ID NO: 1052542 - DNA, 15 bp, Homo sapiens
gcactccacgtccag

SEQ ID NO: 1052543 - DNA, 15 bp, Homo sapiens
cactccacgtccagt

SEQ ID NO: 1052544 - DNA, 15 bp, Homo sapiens
actccacgtccagtg

SEQ ID NO: 1052545 - DNA, 15 bp, Homo sapiens
ctccacgtccagtgt

SEQ ID NO: 1052546 - DNA, 15 bp, Homo sapiens
tccacgtccagtgtg

SEQ ID NO: 1052547 - DNA, 15 bp, Homo sapiens
ccacgtccagtgtgg

SEQ ID NO: 1052548 - DNA, 15 bp, Homo sapiens
cacgtccagtgtggg

SEQ ID NO: 1052549 - DNA, 15 bp, Homo sapiens
acgtccagtgtgggt

SEQ ID NO: 1052550 - DNA, 15 bp, Homo sapiens
cgtccagtgtgggtg

SEQ ID NO: 1052551 - DNA, 15 bp, Homo sapiens
gtccagtgtgggtga

SEQ ID NO: 1052552 - DNA, 15 bp, Homo sapiens
tccagtgtgggtgac

SEQ ID NO: 1052553 - DNA, 15 bp, Homo sapiens
ccagtgtgggtgact

SEQ ID NO: 1052554 - DNA, 15 bp, Homo sapiens
cagtgtgggtgactg

SEQ ID NO: 1052555 - DNA, 15 bp, Homo sapiens
agtgtgggtgactgg

SEQ ID NO: 1052556 - DNA, 15 bp, Homo sapiens
gtgtgggtgactggg

SEQ ID NO: 1052557 - DNA, 15 bp, Homo sapiens
tgtgggtgactgggg

SEQ ID NO: 1052558 - DNA, 15 bp, Homo sapiens
gtgggtgactggggc

SEQ ID NO: 1052559 - DNA, 15 bp, Homo sapiens
tgggtgactggggca

SEQ ID NO: 1052560 - DNA, 15 bp, Homo sapiens
gggtgactggggcac

SEQ ID NO: 1052561 - DNA, 15 bp, Homo sapiens
ggtgactggggcacc

SEQ ID NO: 1052562 - DNA, 15 bp, Homo sapiens
gtgactggggcaccc

SEQ ID NO: 1052563 - DNA, 15 bp, Homo sapiens
tgactggggcacccg

SEQ ID NO: 1052564 - DNA, 15 bp, Homo sapiens
gactggggcacccgc

SEQ ID NO: 1052565 - DNA, 15 bp, Homo sapiens
actggggcacccgcg

SEQ ID NO: 1052566 - DNA, 15 bp, Homo sapiens
ctggggcacccgcgc

SEQ ID NO: 1052567 - DNA, 15 bp, Homo sapiens
tggggcacccgcgct

SEQ ID NO: 1052568 - DNA, 15 bp, Homo sapiens
ggggcacccgcgctt

SEQ ID NO: 1052569 - DNA, 15 bp, Homo sapiens
gggcacccgcgcttg

SEQ ID NO: 1052570 - DNA, 15 bp, Homo sapiens
ggcacccgcgcttgt

SEQ ID NO: 1052571 - DNA, 15 bp, Homo sapiens
gcacccgcgcttgtg

SEQ ID NO: 1052572 - DNA, 15 bp, Homo sapiens
cacccgcgcttgtgg

SEQ ID NO: 1052573 - DNA, 15 bp, Homo sapiens
acccgcgcttgtggt

SEQ ID NO: 1052574 - DNA, 15 bp, Homo sapiens
cccgcgcttgtggtg

SEQ ID NO: 1052575 - DNA, 15 bp, Homo sapiens
ccgcgcttgtggtgg

SEQ ID NO: 1052576 - DNA, 15 bp, Homo sapiens
cgcgcttgtggtggt

SEQ ID NO: 1052577 - DNA, 15 bp, Homo sapiens
gcgcttgtggtggtc

SEQ ID NO: 1052578 - DNA, 15 bp, Homo sapiens
cgcttgtggtggtca

SEQ ID NO: 1052579 - DNA, 15 bp, Homo sapiens
gcttgtggtggtcac

SEQ ID NO: 1052580 - DNA, 15 bp, Homo sapiens
cttgtggtggtcact

SEQ ID NO: 1052581 - DNA, 15 bp, Homo sapiens
ttgtggtggtcactt

SEQ ID NO: 1052582 - DNA, 15 bp, Homo sapiens
tgtggtggtcacttg

SEQ ID NO: 1052583 - DNA, 15 bp, Homo sapiens
gtggtggtcacttgg

SEQ ID NO: 1052584 - DNA, 15 bp, Homo sapiens
tggtggtcacttggg

SEQ ID NO: 1052585 - DNA, 15 bp, Homo sapiens
ggtggtcacttgggg

SEQ ID NO: 1052586 - DNA, 15 bp, Homo sapiens
gtggtcacttgggga

SEQ ID NO: 1052587 - DNA, 15 bp, Homo sapiens
tggtcacttggggat

SEQ ID NO: 1052588 - DNA, 15 bp, Homo sapiens
ggtcacttggggatc

SEQ ID NO: 1052589 - DNA, 15 bp, Homo sapiens
gtcacttggggatcc

SEQ ID NO: 1052590 - DNA, 15 bp, Homo sapiens
tcacttggggatcca

SEQ ID NO: 1052591 - DNA, 15 bp, Homo sapiens
cacttggggatccag

SEQ ID NO: 1052592 - DNA, 15 bp, Homo sapiens
acttggggatccagg

SEQ ID NO: 1052593 - DNA, 15 bp, Homo sapiens
cttggggatccaggc

SEQ ID NO: 1052594 - DNA, 15 bp, Homo sapiens
ttggggatccaggct

SEQ ID NO: 1052595 - DNA, 15 bp, Homo sapiens
tggggatccaggctg

SEQ ID NO: 1052596 - DNA, 15 bp, Homo sapiens
ggggatccaggctga

SEQ ID NO: 1052597 - DNA, 15 bp, Homo sapiens
gggatccaggctgag

SEQ ID NO: 1052598 - DNA, 15 bp, Homo sapiens
ggatccaggctgagg

SEQ ID NO: 1052599 - DNA, 15 bp, Homo sapiens
gatccaggctgaggg

SEQ ID NO: 1052600 - DNA, 15 bp, Homo sapiens
atccaggctgaggga

SEQ ID NO: 1052601 - DNA, 15 bp, Homo sapiens
tccaggctgagggag

SEQ ID NO: 1052602 - DNA, 15 bp, Homo sapiens
ccaggctgagggagg

SEQ ID NO: 1052603 - DNA, 15 bp, Homo sapiens
caggctgagggaggc

SEQ ID NO: 1052604 - DNA, 15 bp, Homo sapiens
aggctgagggaggct

SEQ ID NO: 1052605 - DNA, 15 bp, Homo sapiens
ggctgagggaggctc

SEQ ID NO: 1052606 - DNA, 15 bp, Homo sapiens
gctgagggaggctct

SEQ ID NO: 1052607 - DNA, 15 bp, Homo sapiens
ctgagggaggctctg

SEQ ID NO: 1052608 - DNA, 15 bp, Homo sapiens
tgagggaggctctgt

SEQ ID NO: 1052609 - DNA, 15 bp, Homo sapiens
gagggaggctctgtc

SEQ ID NO: 1052610 - DNA, 15 bp, Homo sapiens
agggaggctctgtct

SEQ ID NO: 1052611 - DNA, 15 bp, Homo sapiens
gggaggctctgtctt

SEQ ID NO: 1052612 - DNA, 15 bp, Homo sapiens
ggaggctctgtcttg

SEQ ID NO: 1052613 - DNA, 15 bp, Homo sapiens
gaggctctgtcttga

SEQ ID NO: 1052614 - DNA, 15 bp, Homo sapiens
aggctctgtcttgac

SEQ ID NO: 1052615 - DNA, 15 bp, Homo sapiens
ggctctgtcttgaca

SEQ ID NO: 1052616 - DNA, 15 bp, Homo sapiens
gctctgtcttgacac

SEQ ID NO: 1052617 - DNA, 15 bp, Homo sapiens
ctctgtcttgacaca

SEQ ID NO: 1052618 - DNA, 15 bp, Homo sapiens
tctgtcttgacacat

SEQ ID NO: 1052619 - DNA, 15 bp, Homo sapiens
ctgtcttgacacata

SEQ ID NO: 1052620 - DNA, 15 bp, Homo sapiens
tgtcttgacacatac

SEQ ID NO: 1052621 - DNA, 15 bp, Homo sapiens
gtcttgacacatacc

SEQ ID NO: 1052622 - DNA, 15 bp, Homo sapiens
tcttgacacatacct

SEQ ID NO: 1052623 - DNA, 15 bp, Homo sapiens
cttgacacatacctc

SEQ ID NO: 1052624 - DNA, 15 bp, Homo sapiens
ttgacacatacctcc

SEQ ID NO: 1052625 - DNA, 15 bp, Homo sapiens
tgacacatacctcct

SEQ ID NO: 1052626 - DNA, 15 bp, Homo sapiens
gacacatacctcctt

SEQ ID NO: 1052627 - DNA, 15 bp, Homo sapiens
acacatacctccttg

SEQ ID NO: 1052628 - DNA, 15 bp, Homo sapiens
cacatacctccttgg

SEQ ID NO: 1052629 - DNA, 15 bp, Homo sapiens
acatacctccttggc

SEQ ID NO: 1052630 - DNA, 15 bp, Homo sapiens
catacctccttggct

SEQ ID NO: 1052631 - DNA, 15 bp, Homo sapiens
atacctccttggctg

SEQ ID NO: 1052632 - DNA, 15 bp, Homo sapiens
tacctccttggctgc

SEQ ID NO: 1052633 - DNA, 15 bp, Homo sapiens
acctccttggctgct

SEQ ID NO: 1052634 - DNA, 15 bp, Homo sapiens
cctccttggctgcta

SEQ ID NO: 1052635 - DNA, 15 bp, Homo sapiens
ctccttggctgctat

SEQ ID NO: 1052636 - DNA, 15 bp, Homo sapiens
tccttggctgctata

SEQ ID NO: 1052637 - DNA, 15 bp, Homo sapiens
ccttggctgctatag

SEQ ID NO: 1052638 - DNA, 15 bp, Homo sapiens
cttggctgctatagc

SEQ ID NO: 1052639 - DNA, 15 bp, Homo sapiens
ttggctgctatagca

SEQ ID NO: 1052640 - DNA, 15 bp, Homo sapiens
tggctgctatagcag

SEQ ID NO: 1052641 - DNA, 15 bp, Homo sapiens
ggctgctatagcagc

SEQ ID NO: 1052642 - DNA, 15 bp, Homo sapiens
gctgctatagcagcg

SEQ ID NO: 1052643 - DNA, 15 bp, Homo sapiens
ctgctatagcagcgg

SEQ ID NO: 1052644 - DNA, 15 bp, Homo sapiens
tgctatagcagcggc

SEQ ID NO: 1052645 - DNA, 15 bp, Homo sapiens
gctatagcagcggca

SEQ ID NO: 1052646 - DNA, 15 bp, Homo sapiens
ctatagcagcggcag

SEQ ID NO: 1052647 - DNA, 15 bp, Homo sapiens
tatagcagcggcaga

SEQ ID NO: 1052648 - DNA, 15 bp, Homo sapiens
atagcagcggcagag

SEQ ID NO: 1052649 - DNA, 15 bp, Homo sapiens
tagcagcggcagaga

SEQ ID NO: 1052650 - DNA, 15 bp, Homo sapiens
agcagcggcagagag

SEQ ID NO: 1052651 - DNA, 15 bp, Homo sapiens
gcagcggcagagagc

SEQ ID NO: 1052652 - DNA, 15 bp, Homo sapiens
cagcggcagagagcc

SEQ ID NO: 1052653 - DNA, 15 bp, Homo sapiens
agcggcagagagccc

SEQ ID NO: 1052654 - DNA, 15 bp, Homo sapiens
gcggcagagagcccg

SEQ ID NO: 1052655 - DNA, 15 bp, Homo sapiens
cggcagagagcccgg

SEQ ID NO: 1052656 - DNA, 15 bp, Homo sapiens
ggcagagagcccggt

SEQ ID NO: 1052657 - DNA, 15 bp, Homo sapiens
gcagagagcccggtg

SEQ ID NO: 1052658 - DNA, 15 bp, Homo sapiens
cagagagcccggtga

SEQ ID NO: 1052659 - DNA, 15 bp, Homo sapiens
agagagcccggtgaa

SEQ ID NO: 1052660 - DNA, 15 bp, Homo sapiens
gagagcccggtgaaa

SEQ ID NO: 1052661 - DNA, 15 bp, Homo sapiens
agagcccggtgaaag

SEQ ID NO: 1052662 - DNA, 15 bp, Homo sapiens
gagcccggtgaaagg

SEQ ID NO: 1052663 - DNA, 15 bp, Homo sapiens
agcccggtgaaaggc

SEQ ID NO: 1052664 - DNA, 15 bp, Homo sapiens
gcccggtgaaaggcg

SEQ ID NO: 1052665 - DNA, 15 bp, Homo sapiens
cccggtgaaaggcgt

SEQ ID NO: 1052666 - DNA, 15 bp, Homo sapiens
ccggtgaaaggcgtg

SEQ ID NO: 1052667 - DNA, 15 bp, Homo sapiens
cggtgaaaggcgtgt

SEQ ID NO: 1052668 - DNA, 15 bp, Homo sapiens
ggtgaaaggcgtgtg

SEQ ID NO: 1052669 - DNA, 15 bp, Homo sapiens
gtgaaaggcgtgtgc

SEQ ID NO: 1052670 - DNA, 15 bp, Homo sapiens
tgaaaggcgtgtgca

SEQ ID NO: 1052671 - DNA, 15 bp, Homo sapiens
gaaaggcgtgtgcac

SEQ ID NO: 1052672 - DNA, 15 bp, Homo sapiens
aaaggcgtgtgcaca

SEQ ID NO: 1052673 - DNA, 15 bp, Homo sapiens
aaggcgtgtgcacag

SEQ ID NO: 1052674 - DNA, 15 bp, Homo sapiens
aggcgtgtgcacagt

SEQ ID NO: 1052675 - DNA, 15 bp, Homo sapiens
ggcgtgtgcacagtc

SEQ ID NO: 1052676 - DNA, 15 bp, Homo sapiens
gcgtgtgcacagtcc

SEQ ID NO: 1052677 - DNA, 15 bp, Homo sapiens
cgtgtgcacagtcct

SEQ ID NO: 1052678 - DNA, 15 bp, Homo sapiens
gtgtgcacagtcctt

SEQ ID NO: 1052679 - DNA, 15 bp, Homo sapiens
tgtgcacagtcctta

SEQ ID NO: 1052680 - DNA, 15 bp, Homo sapiens
gtgcacagtccttaa

SEQ ID NO: 1052681 - DNA, 15 bp, Homo sapiens
tgcacagtccttaaa

SEQ ID NO: 1052682 - DNA, 15 bp, Homo sapiens
gcacagtccttaaag

SEQ ID NO: 1052683 - DNA, 15 bp, Homo sapiens
cacagtccttaaagc

SEQ ID NO: 1052684 - DNA, 15 bp, Homo sapiens
acagtccttaaagca

SEQ ID NO: 1052685 - DNA, 15 bp, Homo sapiens
cagtccttaaagcat

SEQ ID NO: 1052686 - DNA, 15 bp, Homo sapiens
agtccttaaagcatc

SEQ ID NO: 1052687 - DNA, 15 bp, Homo sapiens
gtccttaaagcatcc

SEQ ID NO: 1052688 - DNA, 15 bp, Homo sapiens
tccttaaagcatccc

SEQ ID NO: 1052689 - DNA, 15 bp, Homo sapiens
ccttaaagcatcccc

SEQ ID NO: 1052690 - DNA, 15 bp, Homo sapiens
cttaaagcatccccc

SEQ ID NO: 1052691 - DNA, 15 bp, Homo sapiens
ttaaagcatcccccc

SEQ ID NO: 1052692 - DNA, 15 bp, Homo sapiens
taaagcatcccccca

SEQ ID NO: 1052693 - DNA, 15 bp, Homo sapiens
aaagcatccccccaa

SEQ ID NO: 1052694 - DNA, 15 bp, Homo sapiens
aagcatccccccaag

SEQ ID NO: 1052695 - DNA, 15 bp, Homo sapiens
agcatccccccaagt

SEQ ID NO: 1052696 - DNA, 15 bp, Homo sapiens
gcatccccccaagtg

SEQ ID NO: 1052697 - DNA, 15 bp, Homo sapiens
catccccccaagtga

SEQ ID NO: 1052698 - DNA, 15 bp, Homo sapiens
atccccccaagtgac

SEQ ID NO: 1052699 - DNA, 15 bp, Homo sapiens
tccccccaagtgaca

SEQ ID NO: 1052700 - DNA, 15 bp, Homo sapiens
ccccccaagtgacat

SEQ ID NO: 1052701 - DNA, 15 bp, Homo sapiens
cccccaagtgacatg

SEQ ID NO: 1052702 - DNA, 15 bp, Homo sapiens
ccccaagtgacatgc

SEQ ID NO: 1052703 - DNA, 15 bp, Homo sapiens
cccaagtgacatgcc

SEQ ID NO: 1052704 - DNA, 15 bp, Homo sapiens
ccaagtgacatgcca

SEQ ID NO: 1052705 - DNA, 15 bp, Homo sapiens
caagtgacatgccac

SEQ ID NO: 1052706 - DNA, 15 bp, Homo sapiens
aagtgacatgccact

SEQ ID NO: 1052707 - DNA, 15 bp, Homo sapiens
agtgacatgccactt

SEQ ID NO: 1052708 - DNA, 15 bp, Homo sapiens
gtgacatgccacttc

SEQ ID NO: 1052709 - DNA, 15 bp, Homo sapiens
tgacatgccacttct

SEQ ID NO: 1052710 - DNA, 15 bp, Homo sapiens
gacatgccacttctc

SEQ ID NO: 1052711 - DNA, 15 bp, Homo sapiens
acatgccacttctcc

SEQ ID NO: 1052712 - DNA, 15 bp, Homo sapiens
catgccacttctcct

SEQ ID NO: 1052713 - DNA, 15 bp, Homo sapiens
atgccacttctcctt

SEQ ID NO: 1052714 - DNA, 15 bp, Homo sapiens
tgccacttctccttt

SEQ ID NO: 1052715 - DNA, 15 bp, Homo sapiens
gccacttctcctttt

SEQ ID NO: 1052716 - DNA, 15 bp, Homo sapiens
ccacttctccttttt

SEQ ID NO: 1052717 - DNA, 15 bp, Homo sapiens
cacttctcctttttc

SEQ ID NO: 1052718 - DNA, 15 bp, Homo sapiens
acttctcctttttca

SEQ ID NO: 1052719 - DNA, 15 bp, Homo sapiens
cttctcctttttcat

SEQ ID NO: 1052720 - DNA, 15 bp, Homo sapiens
ttctcctttttcatt

SEQ ID NO: 1052721 - DNA, 15 bp, Homo sapiens
tctcctttttcattg

SEQ ID NO: 1052722 - DNA, 15 bp, Homo sapiens
ctcctttttcattgc

SEQ ID NO: 1052723 - DNA, 15 bp, Homo sapiens
tcctttttcattgct

SEQ ID NO: 1052724 - DNA, 15 bp, Homo sapiens
cctttttcattgctc

SEQ ID NO: 1052725 - DNA, 15 bp, Homo sapiens
ctttttcattgctca

SEQ ID NO: 1052726 - DNA, 15 bp, Homo sapiens
tttttcattgctcag

SEQ ID NO: 1052727 - DNA, 15 bp, Homo sapiens
ttttcattgctcagg

SEQ ID NO: 1052728 - DNA, 15 bp, Homo sapiens
tttcattgctcaggg

SEQ ID NO: 1052729 - DNA, 15 bp, Homo sapiens
ttcattgctcaggga

SEQ ID NO: 1052730 - DNA, 15 bp, Homo sapiens
tcattgctcagggag

SEQ ID NO: 1052731 - DNA, 15 bp, Homo sapiens
cattgctcagggagc

SEQ ID NO: 1052732 - DNA, 15 bp, Homo sapiens
attgctcagggagct

SEQ ID NO: 1052733 - DNA, 15 bp, Homo sapiens
ttgctcagggagctg

SEQ ID NO: 1052734 - DNA, 15 bp, Homo sapiens
tgctcagggagctga

SEQ ID NO: 1052735 - DNA, 15 bp, Homo sapiens
gctcagggagctgac

SEQ ID NO: 1052736 - DNA, 15 bp, Homo sapiens
ctcagggagctgacc

SEQ ID NO: 1052737 - DNA, 15 bp, Homo sapiens
tcagggagctgacct

SEQ ID NO: 1052738 - DNA, 15 bp, Homo sapiens
cagggagctgacctg

SEQ ID NO: 1052739 - DNA, 15 bp, Homo sapiens
agggagctgacctgg

SEQ ID NO: 1052740 - DNA, 15 bp, Homo sapiens
gggagctgacctggc

SEQ ID NO: 1052741 - DNA, 15 bp, Homo sapiens
ggagctgacctggcc

SEQ ID NO: 1052742 - DNA, 15 bp, Homo sapiens
gagctgacctggcca

SEQ ID NO: 1052743 - DNA, 15 bp, Homo sapiens
agctgacctggccat

SEQ ID NO: 1052744 - DNA, 15 bp, Homo sapiens
gctgacctggccatg

SEQ ID NO: 1052745 - DNA, 15 bp, Homo sapiens
ctgacctggccatgc

SEQ ID NO: 1052746 - DNA, 15 bp, Homo sapiens
tgacctggccatgct

SEQ ID NO: 1052747 - DNA, 15 bp, Homo sapiens
gacctggccatgctt

SEQ ID NO: 1052748 - DNA, 15 bp, Homo sapiens
acctggccatgcttt

SEQ ID NO: 1052749 - DNA, 15 bp, Homo sapiens
cctggccatgcttta

SEQ ID NO: 1052750 - DNA, 15 bp, Homo sapiens
ctggccatgctttat

SEQ ID NO: 1052751 - DNA, 15 bp, Homo sapiens
tggccatgctttatt

SEQ ID NO: 1052752 - DNA, 15 bp, Homo sapiens
ggccatgctttattt

SEQ ID NO: 1052753 - DNA, 15 bp, Homo sapiens
gccatgctttatttt

SEQ ID NO: 1052754 - DNA, 15 bp, Homo sapiens
ccatgctttatttta

SEQ ID NO: 1052755 - DNA, 15 bp, Homo sapiens
catgctttattttat

SEQ ID NO: 1052756 - DNA, 15 bp, Homo sapiens
atgctttattttatg

SEQ ID NO: 1052757 - DNA, 15 bp, Homo sapiens
tgctttattttatgc

SEQ ID NO: 1052758 - DNA, 15 bp, Homo sapiens
gctttattttatgct

SEQ ID NO: 1052759 - DNA, 15 bp, Homo sapiens
ctttattttatgctg

SEQ ID NO: 1052760 - DNA, 15 bp, Homo sapiens
tttattttatgctgg

SEQ ID NO: 1052761 - DNA, 15 bp, Homo sapiens
ttattttatgctgga

SEQ ID NO: 1052762 - DNA, 15 bp, Homo sapiens
tattttatgctggag

SEQ ID NO: 1052763 - DNA, 15 bp, Homo sapiens
attttatgctggagt

SEQ ID NO: 1052764 - DNA, 15 bp, Homo sapiens
ttttatgctggagta

SEQ ID NO: 1052765 - DNA, 15 bp, Homo sapiens
tttatgctggagtag

SEQ ID NO: 1052766 - DNA, 15 bp, Homo sapiens
ttatgctggagtagg

SEQ ID NO: 1052767 - DNA, 15 bp, Homo sapiens
tatgctggagtaggg

SEQ ID NO: 1052768 - DNA, 15 bp, Homo sapiens
atgctggagtagggt

SEQ ID NO: 1052769 - DNA, 15 bp, Homo sapiens
tgctggagtagggtg

SEQ ID NO: 1052770 - DNA, 15 bp, Homo sapiens
gctggagtagggtgt

SEQ ID NO: 1052771 - DNA, 15 bp, Homo sapiens
ctggagtagggtgtg

SEQ ID NO: 1052772 - DNA, 15 bp, Homo sapiens
tggagtagggtgtgg

SEQ ID NO: 1052773 - DNA, 15 bp, Homo sapiens
ggagtagggtgtggt

SEQ ID NO: 1052774 - DNA, 15 bp, Homo sapiens
gagtagggtgtggtg

SEQ ID NO: 1052775 - DNA, 15 bp, Homo sapiens
agtagggtgtggtgg

SEQ ID NO: 1052776 - DNA, 15 bp, Homo sapiens
gtagggtgtggtggg

SEQ ID NO: 1052777 - DNA, 15 bp, Homo sapiens
tagggtgtggtgggg

SEQ ID NO: 1052778 - DNA, 15 bp, Homo sapiens
agggtgtggtggggg

SEQ ID NO: 1052779 - DNA, 15 bp, Homo sapiens
gggtgtggtgggggt

SEQ ID NO: 1052780 - DNA, 15 bp, Homo sapiens
ggtgtggtgggggtg

SEQ ID NO: 1052781 - DNA, 15 bp, Homo sapiens
gtgtggtgggggtga

SEQ ID NO: 1052782 - DNA, 15 bp, Homo sapiens
tgtggtgggggtgat

SEQ ID NO: 1052783 - DNA, 15 bp, Homo sapiens
gtggtgggggtgatc

SEQ ID NO: 1052784 - DNA, 15 bp, Homo sapiens
tggtgggggtgatct

SEQ ID NO: 1052785 - DNA, 15 bp, Homo sapiens
ggtgggggtgatctg

SEQ ID NO: 1052786 - DNA, 15 bp, Homo sapiens
gtgggggtgatctgc

SEQ ID NO: 1052787 - DNA, 15 bp, Homo sapiens
tgggggtgatctgcc

SEQ ID NO: 1052788 - DNA, 15 bp, Homo sapiens
gggggtgatctgcca

SEQ ID NO: 1052789 - DNA, 15 bp, Homo sapiens
ggggtgatctgccat

SEQ ID NO: 1052790 - DNA, 15 bp, Homo sapiens
gggtgatctgccatt

SEQ ID NO: 1052791 - DNA, 15 bp, Homo sapiens
ggtgatctgccattt

SEQ ID NO: 1052792 - DNA, 15 bp, Homo sapiens
gtgatctgccattta

SEQ ID NO: 1052793 - DNA, 15 bp, Homo sapiens
tgatctgccatttac

SEQ ID NO: 1052794 - DNA, 15 bp, Homo sapiens
gatctgccatttacc

SEQ ID NO: 1052795 - DNA, 15 bp, Homo sapiens
atctgccatttacct

SEQ ID NO: 1052796 - DNA, 15 bp, Homo sapiens
tctgccatttacctg

SEQ ID NO: 1052797 - DNA, 15 bp, Homo sapiens
ctgccatttacctgg

SEQ ID NO: 1052798 - DNA, 15 bp, Homo sapiens
tgccatttacctggg

SEQ ID NO: 1052799 - DNA, 15 bp, Homo sapiens
gccatttacctggga

SEQ ID NO: 1052800 - DNA, 15 bp, Homo sapiens
ccatttacctgggag

SEQ ID NO: 1052801 - DNA, 15 bp, Homo sapiens
catttacctgggagg

SEQ ID NO: 1052802 - DNA, 15 bp, Homo sapiens
atttacctgggagga

SEQ ID NO: 1052803 - DNA, 15 bp, Homo sapiens
tttacctgggaggaa

SEQ ID NO: 1052804 - DNA, 15 bp, Homo sapiens
ttacctgggaggaaa

SEQ ID NO: 1052805 - DNA, 15 bp, Homo sapiens
tacctgggaggaaag

SEQ ID NO: 1052806 - DNA, 15 bp, Homo sapiens
acctgggaggaaagc

SEQ ID NO: 1052807 - DNA, 15 bp, Homo sapiens
cctgggaggaaagcc

SEQ ID NO: 1052808 - DNA, 15 bp, Homo sapiens
ctgggaggaaagcca

SEQ ID NO: 1052809 - DNA, 15 bp, Homo sapiens
tgggaggaaagccag

SEQ ID NO: 1052810 - DNA, 15 bp, Homo sapiens
gggaggaaagccaga

SEQ ID NO: 1052811 - DNA, 15 bp, Homo sapiens
ggaggaaagccagac

SEQ ID NO: 1052812 - DNA, 15 bp, Homo sapiens
gaggaaagccagact

SEQ ID NO: 1052813 - DNA, 15 bp, Homo sapiens
aggaaagccagactc

SEQ ID NO: 1052814 - DNA, 15 bp, Homo sapiens
ggaaagccagactct

SEQ ID NO: 1052815 - DNA, 15 bp, Homo sapiens
gaaagccagactctc

SEQ ID NO: 1052816 - DNA, 15 bp, Homo sapiens
aaagccagactctcc

SEQ ID NO: 1052817 - DNA, 15 bp, Homo sapiens
aagccagactctcct

SEQ ID NO: 1052818 - DNA, 15 bp, Homo sapiens
agccagactctcctg

SEQ ID NO: 1052819 - DNA, 15 bp, Homo sapiens
gccagactctcctgg

SEQ ID NO: 1052820 - DNA, 15 bp, Homo sapiens
ccagactctcctgga

SEQ ID NO: 1052821 - DNA, 15 bp, Homo sapiens
cagactctcctggag

SEQ ID NO: 1052822 - DNA, 15 bp, Homo sapiens
agactctcctggagt

SEQ ID NO: 1052823 - DNA, 15 bp, Homo sapiens
gactctcctggagtt

SEQ ID NO: 1052824 - DNA, 15 bp, Homo sapiens
actctcctggagtta

SEQ ID NO: 1052825 - DNA, 15 bp, Homo sapiens
ctctcctggagttag

SEQ ID NO: 1052826 - DNA, 15 bp, Homo sapiens
tctcctggagttagg

SEQ ID NO: 1052827 - DNA, 15 bp, Homo sapiens
ctcctggagttagga

SEQ ID NO: 1052828 - DNA, 15 bp, Homo sapiens
tcctggagttaggaa

SEQ ID NO: 1052829 - DNA, 15 bp, Homo sapiens
cctggagttaggaag

SEQ ID NO: 1052830 - DNA, 15 bp, Homo sapiens
ctggagttaggaagg

SEQ ID NO: 1052831 - DNA, 15 bp, Homo sapiens
tggagttaggaaggg

SEQ ID NO: 1052832 - DNA, 15 bp, Homo sapiens
ggagttaggaaggga

SEQ ID NO: 1052833 - DNA, 15 bp, Homo sapiens
gagttaggaagggag

SEQ ID NO: 1052834 - DNA, 15 bp, Homo sapiens
agttaggaagggagg

SEQ ID NO: 1052835 - DNA, 15 bp, Homo sapiens
gttaggaagggaggg

SEQ ID NO: 1052836 - DNA, 15 bp, Homo sapiens
ttaggaagggagggt

SEQ ID NO: 1052837 - DNA, 15 bp, Homo sapiens
taggaagggagggtg

SEQ ID NO: 1052838 - DNA, 15 bp, Homo sapiens
aggaagggagggtgg

SEQ ID NO: 1052839 - DNA, 15 bp, Homo sapiens
ggaagggagggtgga

SEQ ID NO: 1052840 - DNA, 15 bp, Homo sapiens
gaagggagggtggaa

SEQ ID NO: 1052841 - DNA, 15 bp, Homo sapiens
aagggagggtggaac

SEQ ID NO: 1052842 - DNA, 15 bp, Homo sapiens
agggagggtggaaca

SEQ ID NO: 1052843 - DNA, 15 bp, Homo sapiens
gggagggtggaacac

SEQ ID NO: 1052844 - DNA, 15 bp, Homo sapiens
ggagggtggaacact

SEQ ID NO: 1052845 - DNA, 15 bp, Homo sapiens
gagggtggaacactg

SEQ ID NO: 1052846 - DNA, 15 bp, Homo sapiens
agggtggaacactgc

SEQ ID NO: 1052847 - DNA, 15 bp, Homo sapiens
gggtggaacactgca

SEQ ID NO: 1052848 - DNA, 15 bp, Homo sapiens
ggtggaacactgcag

SEQ ID NO: 1052849 - DNA, 15 bp, Homo sapiens
gtggaacactgcagc

SEQ ID NO: 1052850 - DNA, 15 bp, Homo sapiens
tggaacactgcagcc

SEQ ID NO: 1052851 - DNA, 15 bp, Homo sapiens
ggaacactgcagcca

SEQ ID NO: 1052852 - DNA, 15 bp, Homo sapiens
gaacactgcagccac

SEQ ID NO: 1052853 - DNA, 15 bp, Homo sapiens
aacactgcagccaca

SEQ ID NO: 1052854 - DNA, 15 bp, Homo sapiens
acactgcagccacag

SEQ ID NO: 1052855 - DNA, 15 bp, Homo sapiens
cactgcagccacaga

SEQ ID NO: 1052856 - DNA, 15 bp, Homo sapiens
actgcagccacagaa

SEQ ID NO: 1052857 - DNA, 15 bp, Homo sapiens
ctgcagccacagaac

SEQ ID NO: 1052858 - DNA, 15 bp, Homo sapiens
tgcagccacagaacc

SEQ ID NO: 1052859 - DNA, 15 bp, Homo sapiens
gcagccacagaaccc

SEQ ID NO: 1052860 - DNA, 15 bp, Homo sapiens
cagccacagaacccg

SEQ ID NO: 1052861 - DNA, 15 bp, Homo sapiens
agccacagaacccgg

SEQ ID NO: 1052862 - DNA, 15 bp, Homo sapiens
gccacagaacccggg

SEQ ID NO: 1052863 - DNA, 15 bp, Homo sapiens
ccacagaacccggga

SEQ ID NO: 1052864 - DNA, 15 bp, Homo sapiens
cacagaacccgggac

SEQ ID NO: 1052865 - DNA, 15 bp, Homo sapiens
acagaacccgggacc

SEQ ID NO: 1052866 - DNA, 15 bp, Homo sapiens
cagaacccgggacca

SEQ ID NO: 1052867 - DNA, 15 bp, Homo sapiens
agaacccgggaccat

SEQ ID NO: 1052868 - DNA, 15 bp, Homo sapiens
gaacccgggaccatt

SEQ ID NO: 1052869 - DNA, 15 bp, Homo sapiens
aacccgggaccattc

SEQ ID NO: 1052870 - DNA, 15 bp, Homo sapiens
acccgggaccattcc

SEQ ID NO: 1052871 - DNA, 15 bp, Homo sapiens
cccgggaccattcct

SEQ ID NO: 1052872 - DNA, 15 bp, Homo sapiens
ccgggaccattcctc

SEQ ID NO: 1052873 - DNA, 15 bp, Homo sapiens
cgggaccattcctcc

SEQ ID NO: 1052874 - DNA, 15 bp, Homo sapiens
gggaccattcctcct

SEQ ID NO: 1052875 - DNA, 15 bp, Homo sapiens
ggaccattcctccta

SEQ ID NO: 1052876 - DNA, 15 bp, Homo sapiens
gaccattcctcctag

SEQ ID NO: 1052877 - DNA, 15 bp, Homo sapiens
accattcctcctaga

SEQ ID NO: 1052878 - DNA, 15 bp, Homo sapiens
ccattcctcctagaa

SEQ ID NO: 1052879 - DNA, 15 bp, Homo sapiens
cattcctcctagaaa

SEQ ID NO: 1052880 - DNA, 15 bp, Homo sapiens
attcctcctagaaag

SEQ ID NO: 1052881 - DNA, 15 bp, Homo sapiens
ttcctcctagaaagc

SEQ ID NO: 1052882 - DNA, 15 bp, Homo sapiens
tcctcctagaaagct

SEQ ID NO: 1052883 - DNA, 15 bp, Homo sapiens
cctcctagaaagctc

SEQ ID NO: 1052884 - DNA, 15 bp, Homo sapiens
ctcctagaaagctcc

SEQ ID NO: 1052885 - DNA, 15 bp, Homo sapiens
tcctagaaagctccc

SEQ ID NO: 1052886 - DNA, 15 bp, Homo sapiens
cctagaaagctccca

SEQ ID NO: 1052887 - DNA, 15 bp, Homo sapiens
ctagaaagctcccaa

SEQ ID NO: 1052888 - DNA, 15 bp, Homo sapiens
tagaaagctcccaag

SEQ ID NO: 1052889 - DNA, 15 bp, Homo sapiens
agaaagctcccaagc

SEQ ID NO: 1052890 - DNA, 15 bp, Homo sapiens
gaaagctcccaagcc

SEQ ID NO: 1052891 - DNA, 15 bp, Homo sapiens
aaagctcccaagcct

SEQ ID NO: 1052892 - DNA, 15 bp, Homo sapiens
aagctcccaagcctc

SEQ ID NO: 1052893 - DNA, 15 bp, Homo sapiens
agctcccaagcctcc

SEQ ID NO: 1052894 - DNA, 15 bp, Homo sapiens
gctcccaagcctcct

SEQ ID NO: 1052895 - DNA, 15 bp, Homo sapiens
ctcccaagcctcctc

SEQ ID NO: 1052896 - DNA, 15 bp, Homo sapiens
tcccaagcctcctct

SEQ ID NO: 1052897 - DNA, 15 bp, Homo sapiens
cccaagcctcctctc

SEQ ID NO: 1052898 - DNA, 15 bp, Homo sapiens
ccaagcctcctctcg

SEQ ID NO: 1052899 - DNA, 15 bp, Homo sapiens
caagcctcctctcgg

SEQ ID NO: 1052900 - DNA, 15 bp, Homo sapiens
aagcctcctctcggt

SEQ ID NO: 1052901 - DNA, 15 bp, Homo sapiens
agcctcctctcggtc

SEQ ID NO: 1052902 - DNA, 15 bp, Homo sapiens
gcctcctctcggtcc

SEQ ID NO: 1052903 - DNA, 15 bp, Homo sapiens
cctcctctcggtccc

SEQ ID NO: 1052904 - DNA, 15 bp, Homo sapiens
ctcctctcggtcccc

SEQ ID NO: 1052905 - DNA, 15 bp, Homo sapiens
tcctctcggtcccca

SEQ ID NO: 1052906 - DNA, 15 bp, Homo sapiens
cctctcggtccccag

SEQ ID NO: 1052907 - DNA, 15 bp, Homo sapiens
ctctcggtccccaga

SEQ ID NO: 1052908 - DNA, 15 bp, Homo sapiens
tctcggtccccagac

SEQ ID NO: 1052909 - DNA, 15 bp, Homo sapiens
ctcggtccccagaca

SEQ ID NO: 1052910 - DNA, 15 bp, Homo sapiens
tcggtccccagacac

SEQ ID NO: 1052911 - DNA, 15 bp, Homo sapiens
cggtccccagacact

SEQ ID NO: 1052912 - DNA, 15 bp, Homo sapiens
ggtccccagacactg

SEQ ID NO: 1052913 - DNA, 15 bp, Homo sapiens
gtccccagacactgg

SEQ ID NO: 1052914 - DNA, 15 bp, Homo sapiens
tccccagacactggg

SEQ ID NO: 1052915 - DNA, 15 bp, Homo sapiens
ccccagacactgggc

SEQ ID NO: 1052916 - DNA, 15 bp, Homo sapiens
cccagacactgggca

SEQ ID NO: 1052917 - DNA, 15 bp, Homo sapiens
ccagacactgggcat

SEQ ID NO: 1052918 - DNA, 15 bp, Homo sapiens
cagacactgggcatt

SEQ ID NO: 1052919 - DNA, 15 bp, Homo sapiens
agacactgggcattt

SEQ ID NO: 1052920 - DNA, 15 bp, Homo sapiens
gacactgggcatttg

SEQ ID NO: 1052921 - DNA, 15 bp, Homo sapiens
acactgggcatttgg

SEQ ID NO: 1052922 - DNA, 15 bp, Homo sapiens
cactgggcatttggc

SEQ ID NO: 1052923 - DNA, 15 bp, Homo sapiens
actgggcatttggca

SEQ ID NO: 1052924 - DNA, 15 bp, Homo sapiens
ctgggcatttggcag

SEQ ID NO: 1052925 - DNA, 15 bp, Homo sapiens
tgggcatttggcagt

SEQ ID NO: 1052926 - DNA, 15 bp, Homo sapiens
gggcatttggcagtg

SEQ ID NO: 1052927 - DNA, 15 bp, Homo sapiens
ggcatttggcagtga

SEQ ID NO: 1052928 - DNA, 15 bp, Homo sapiens
gcatttggcagtgaa

SEQ ID NO: 1052929 - DNA, 15 bp, Homo sapiens
catttggcagtgaac

SEQ ID NO: 1052930 - DNA, 15 bp, Homo sapiens
atttggcagtgaacc

SEQ ID NO: 1052931 - DNA, 15 bp, Homo sapiens
tttggcagtgaacca

SEQ ID NO: 1052932 - DNA, 15 bp, Homo sapiens
ttggcagtgaaccag

SEQ ID NO: 1052933 - DNA, 15 bp, Homo sapiens
tggcagtgaaccaga

SEQ ID NO: 1052934 - DNA, 15 bp, Homo sapiens
ggcagtgaaccagat

SEQ ID NO: 1052935 - DNA, 15 bp, Homo sapiens
gcagtgaaccagatg

SEQ ID NO: 1052936 - DNA, 15 bp, Homo sapiens
cagtgaaccagatgc

SEQ ID NO: 1052937 - DNA, 15 bp, Homo sapiens
agtgaaccagatgct

SEQ ID NO: 1052938 - DNA, 15 bp, Homo sapiens
gtgaaccagatgctg

SEQ ID NO: 1052939 - DNA, 15 bp, Homo sapiens
tgaaccagatgctgg

SEQ ID NO: 1052940 - DNA, 15 bp, Homo sapiens
gaaccagatgctggg

SEQ ID NO: 1052941 - DNA, 15 bp, Homo sapiens
aaccagatgctgggg

SEQ ID NO: 1052942 - DNA, 15 bp, Homo sapiens
accagatgctggggg

SEQ ID NO: 1052943 - DNA, 15 bp, Homo sapiens
ccagatgctgggggc

SEQ ID NO: 1052944 - DNA, 15 bp, Homo sapiens
cagatgctgggggcc

SEQ ID NO: 1052945 - DNA, 15 bp, Homo sapiens
agatgctgggggccc

SEQ ID NO: 1052946 - DNA, 15 bp, Homo sapiens
gatgctgggggccct

SEQ ID NO: 1052947 - DNA, 15 bp, Homo sapiens
atgctgggggccctg

SEQ ID NO: 1052948 - DNA, 15 bp, Homo sapiens
tgctgggggccctgt

SEQ ID NO: 1052949 - DNA, 15 bp, Homo sapiens
gctgggggccctgtc

SEQ ID NO: 1052950 - DNA, 15 bp, Homo sapiens
ctgggggccctgtcc

SEQ ID NO: 1052951 - DNA, 15 bp, Homo sapiens
tgggggccctgtcct

SEQ ID NO: 1052952 - DNA, 15 bp, Homo sapiens
gggggccctgtcctt

SEQ ID NO: 1052953 - DNA, 15 bp, Homo sapiens
ggggccctgtccttc

SEQ ID NO: 1052954 - DNA, 15 bp, Homo sapiens
gggccctgtccttct

SEQ ID NO: 1052955 - DNA, 15 bp, Homo sapiens
ggccctgtccttctg

SEQ ID NO: 1052956 - DNA, 15 bp, Homo sapiens
gccctgtccttctgg

SEQ ID NO: 1052957 - DNA, 15 bp, Homo sapiens
ccctgtccttctggt

SEQ ID NO: 1052958 - DNA, 15 bp, Homo sapiens
cctgtccttctggtg

SEQ ID NO: 1052959 - DNA, 15 bp, Homo sapiens
ctgtccttctggtgg

SEQ ID NO: 1052960 - DNA, 15 bp, Homo sapiens
tgtccttctggtgga

SEQ ID NO: 1052961 - DNA, 15 bp, Homo sapiens
gtccttctggtggag

SEQ ID NO: 1052962 - DNA, 15 bp, Homo sapiens
tccttctggtggagg

SEQ ID NO: 1052963 - DNA, 15 bp, Homo sapiens
ccttctggtggaggg

SEQ ID NO: 1052964 - DNA, 15 bp, Homo sapiens
cttctggtggagggg

SEQ ID NO: 1052965 - DNA, 15 bp, Homo sapiens
ttctggtggaggggg

SEQ ID NO: 1052966 - DNA, 15 bp, Homo sapiens
tctggtggaggggga

SEQ ID NO: 1052967 - DNA, 15 bp, Homo sapiens
ctggtggagggggag

SEQ ID NO: 1052968 - DNA, 15 bp, Homo sapiens
tggtggagggggagg

SEQ ID NO: 1052969 - DNA, 15 bp, Homo sapiens
ggtggagggggagga

SEQ ID NO: 1052970 - DNA, 15 bp, Homo sapiens
gtggagggggaggag

SEQ ID NO: 1052971 - DNA, 15 bp, Homo sapiens
tggagggggaggagg

SEQ ID NO: 1052972 - DNA, 15 bp, Homo sapiens
ggagggggaggaggg

SEQ ID NO: 1052973 - DNA, 15 bp, Homo sapiens
gagggggaggagggc

SEQ ID NO: 1052974 - DNA, 15 bp, Homo sapiens
agggggaggagggct

SEQ ID NO: 1052975 - DNA, 15 bp, Homo sapiens
gggggaggagggctc

SEQ ID NO: 1052976 - DNA, 15 bp, Homo sapiens
ggggaggagggctca

SEQ ID NO: 1052977 - DNA, 15 bp, Homo sapiens
gggaggagggctcag

SEQ ID NO: 1052978 - DNA, 15 bp, Homo sapiens
ggaggagggctcagc

SEQ ID NO: 1052979 - DNA, 15 bp, Homo sapiens
gaggagggctcagcc

SEQ ID NO: 1052980 - DNA, 15 bp, Homo sapiens
aggagggctcagccc

SEQ ID NO: 1052981 - DNA, 15 bp, Homo sapiens
ggagggctcagccca

SEQ ID NO: 1052982 - DNA, 15 bp, Homo sapiens
gagggctcagcccag

SEQ ID NO: 1052983 - DNA, 15 bp, Homo sapiens
agggctcagcccaga

SEQ ID NO: 1052984 - DNA, 15 bp, Homo sapiens
gggctcagcccagaa

SEQ ID NO: 1052985 - DNA, 15 bp, Homo sapiens
ggctcagcccagaat

SEQ ID NO: 1052986 - DNA, 15 bp, Homo sapiens
gctcagcccagaatg

SEQ ID NO: 1052987 - DNA, 15 bp, Homo sapiens
ctcagcccagaatgt

SEQ ID NO: 1052988 - DNA, 15 bp, Homo sapiens
tcagcccagaatgtt

SEQ ID NO: 1052989 - DNA, 15 bp, Homo sapiens
cagcccagaatgttc

SEQ ID NO: 1052990 - DNA, 15 bp, Homo sapiens
agcccagaatgttca

SEQ ID NO: 1052991 - DNA, 15 bp, Homo sapiens
gcccagaatgttcag

SEQ ID NO: 1052992 - DNA, 15 bp, Homo sapiens
cccagaatgttcaga

SEQ ID NO: 1052993 - DNA, 15 bp, Homo sapiens
ccagaatgttcagac

SEQ ID NO: 1052994 - DNA, 15 bp, Homo sapiens
cagaatgttcagacc

SEQ ID NO: 1052995 - DNA, 15 bp, Homo sapiens
agaatgttcagacca

SEQ ID NO: 1052996 - DNA, 15 bp, Homo sapiens
gaatgttcagaccag

SEQ ID NO: 1052997 - DNA, 15 bp, Homo sapiens
aatgttcagaccagg

SEQ ID NO: 1052998 - DNA, 15 bp, Homo sapiens
atgttcagaccaggc

SEQ ID NO: 1052999 - DNA, 15 bp, Homo sapiens
tgttcagaccaggcc

SEQ ID NO: 1053000 - DNA, 15 bp, Homo sapiens
gttcagaccaggccg

SEQ ID NO: 1053001 - DNA, 15 bp, Homo sapiens
ttcagaccaggccgg

SEQ ID NO: 1053002 - DNA, 15 bp, Homo sapiens
tcagaccaggccggc

SEQ ID NO: 1053003 - DNA, 15 bp, Homo sapiens
cagaccaggccggct

SEQ ID NO: 1053004 - DNA, 15 bp, Homo sapiens
agaccaggccggctc

SEQ ID NO: 1053005 - DNA, 15 bp, Homo sapiens
gaccaggccggctca

SEQ ID NO: 1053006 - DNA, 15 bp, Homo sapiens
accaggccggctcaa

SEQ ID NO: 1053007 - DNA, 15 bp, Homo sapiens
ccaggccggctcaat

SEQ ID NO: 1053008 - DNA, 15 bp, Homo sapiens
caggccggctcaatg

SEQ ID NO: 1053009 - DNA, 15 bp, Homo sapiens
aggccggctcaatgg

SEQ ID NO: 1053010 - DNA, 15 bp, Homo sapiens
ggccggctcaatggc

SEQ ID NO: 1053011 - DNA, 15 bp, Homo sapiens
gccggctcaatggca

SEQ ID NO: 1053012 - DNA, 15 bp, Homo sapiens
ccggctcaatggcag

SEQ ID NO: 1053013 - DNA, 15 bp, Homo sapiens
cggctcaatggcagg

SEQ ID NO: 1053014 - DNA, 15 bp, Homo sapiens
ggctcaatggcaggc

SEQ ID NO: 1053015 - DNA, 15 bp, Homo sapiens
gctcaatggcaggcc

SEQ ID NO: 1053016 - DNA, 15 bp, Homo sapiens
ctcaatggcaggcct

SEQ ID NO: 1053017 - DNA, 15 bp, Homo sapiens
tcaatggcaggccta

SEQ ID NO: 1053018 - DNA, 15 bp, Homo sapiens
caatggcaggcctaa

SEQ ID NO: 1053019 - DNA, 15 bp, Homo sapiens
aatggcaggcctaag

SEQ ID NO: 1053020 - DNA, 15 bp, Homo sapiens
atggcaggcctaagc

SEQ ID NO: 1053021 - DNA, 15 bp, Homo sapiens
tggcaggcctaagcc

SEQ ID NO: 1053022 - DNA, 15 bp, Homo sapiens
ggcaggcctaagcct

SEQ ID NO: 1053023 - DNA, 15 bp, Homo sapiens
gcaggcctaagcctt

SEQ ID NO: 1053024 - DNA, 15 bp, Homo sapiens
caggcctaagcctta

SEQ ID NO: 1053025 - DNA, 15 bp, Homo sapiens
aggcctaagccttac

SEQ ID NO: 1053026 - DNA, 15 bp, Homo sapiens
ggcctaagccttacg

SEQ ID NO: 1053027 - DNA, 15 bp, Homo sapiens
gcctaagccttacga

SEQ ID NO: 1053028 - DNA, 15 bp, Homo sapiens
cctaagccttacgat

SEQ ID NO: 1053029 - DNA, 15 bp, Homo sapiens
ctaagccttacgatg

SEQ ID NO: 1053030 - DNA, 15 bp, Homo sapiens
taagccttacgatgc

SEQ ID NO: 1053031 - DNA, 15 bp, Homo sapiens
aagccttacgatgct

SEQ ID NO: 1053032 - DNA, 15 bp, Homo sapiens
agccttacgatgctg

SEQ ID NO: 1053033 - DNA, 15 bp, Homo sapiens
gccttacgatgctgt

SEQ ID NO: 1053034 - DNA, 15 bp, Homo sapiens
ccttacgatgctgtt

SEQ ID NO: 1053035 - DNA, 15 bp, Homo sapiens
cttacgatgctgttc

SEQ ID NO: 1053036 - DNA, 15 bp, Homo sapiens
ttacgatgctgttcc

SEQ ID NO: 1053037 - DNA, 15 bp, Homo sapiens
tacgatgctgttccc

SEQ ID NO: 1053038 - DNA, 15 bp, Homo sapiens
acgatgctgttccct

SEQ ID NO: 1053039 - DNA, 15 bp, Homo sapiens
cgatgctgttccctg

SEQ ID NO: 1053040 - DNA, 15 bp, Homo sapiens
gatgctgttccctgc

SEQ ID NO: 1053041 - DNA, 15 bp, Homo sapiens
atgctgttccctgct

SEQ ID NO: 1053042 - DNA, 15 bp, Homo sapiens
tgctgttccctgctg

SEQ ID NO: 1053043 - DNA, 15 bp, Homo sapiens
gctgttccctgctgt

SEQ ID NO: 1053044 - DNA, 15 bp, Homo sapiens
ctgttccctgctgtg

SEQ ID NO: 1053045 - DNA, 15 bp, Homo sapiens
tgttccctgctgtgt

SEQ ID NO: 1053046 - DNA, 15 bp, Homo sapiens
gttccctgctgtgtc

SEQ ID NO: 1053047 - DNA, 15 bp, Homo sapiens
ttccctgctgtgtct

SEQ ID NO: 1053048 - DNA, 15 bp, Homo sapiens
tccctgctgtgtctg

SEQ ID NO: 1053049 - DNA, 15 bp, Homo sapiens
ccctgctgtgtctgt

SEQ ID NO: 1053050 - DNA, 15 bp, Homo sapiens
cctgctgtgtctgta

SEQ ID NO: 1053051 - DNA, 15 bp, Homo sapiens
ctgctgtgtctgtag

SEQ ID NO: 1053052 - DNA, 15 bp, Homo sapiens
tgctgtgtctgtagc

SEQ ID NO: 1053053 - DNA, 15 bp, Homo sapiens
gctgtgtctgtagct

SEQ ID NO: 1053054 - DNA, 15 bp, Homo sapiens
ctgtgtctgtagctc

SEQ ID NO: 1053055 - DNA, 15 bp, Homo sapiens
tgtgtctgtagctca

SEQ ID NO: 1053056 - DNA, 15 bp, Homo sapiens
gtgtctgtagctcaa

SEQ ID NO: 1053057 - DNA, 15 bp, Homo sapiens
tgtctgtagctcaac

SEQ ID NO: 1053058 - DNA, 15 bp, Homo sapiens
gtctgtagctcaaca

SEQ ID NO: 1053059 - DNA, 15 bp, Homo sapiens
tctgtagctcaacaa

SEQ ID NO: 1053060 - DNA, 15 bp, Homo sapiens
ctgtagctcaacaac

SEQ ID NO: 1053061 - DNA, 15 bp, Homo sapiens
tgtagctcaacaact

SEQ ID NO: 1053062 - DNA, 15 bp, Homo sapiens
gtagctcaacaactc

SEQ ID NO: 1053063 - DNA, 15 bp, Homo sapiens
tagctcaacaactcc

SEQ ID NO: 1053064 - DNA, 15 bp, Homo sapiens
agctcaacaactccg

SEQ ID NO: 1053065 - DNA, 15 bp, Homo sapiens
gctcaacaactccga

SEQ ID NO: 1053066 - DNA, 15 bp, Homo sapiens
ctcaacaactccgac

SEQ ID NO: 1053067 - DNA, 15 bp, Homo sapiens
tcaacaactccgact

SEQ ID NO: 1053068 - DNA, 15 bp, Homo sapiens
caacaactccgactc

SEQ ID NO: 1053069 - DNA, 15 bp, Homo sapiens
aacaactccgactct

SEQ ID NO: 1053070 - DNA, 15 bp, Homo sapiens
acaactccgactctg

SEQ ID NO: 1053071 - DNA, 15 bp, Homo sapiens
caactccgactctgg

SEQ ID NO: 1053072 - DNA, 15 bp, Homo sapiens
aactccgactctggg

SEQ ID NO: 1053073 - DNA, 15 bp, Homo sapiens
actccgactctgggc

SEQ ID NO: 1053074 - DNA, 15 bp, Homo sapiens
ctccgactctgggct

SEQ ID NO: 1053075 - DNA, 15 bp, Homo sapiens
tccgactctgggctc

SEQ ID NO: 1053076 - DNA, 15 bp, Homo sapiens
ccgactctgggctct

SEQ ID NO: 1053077 - DNA, 15 bp, Homo sapiens
cgactctgggctctt

SEQ ID NO: 1053078 - DNA, 15 bp, Homo sapiens
gactctgggctcttc

SEQ ID NO: 1053079 - DNA, 15 bp, Homo sapiens
actctgggctcttca

SEQ ID NO: 1053080 - DNA, 15 bp, Homo sapiens
ctctgggctcttcac

SEQ ID NO: 1053081 - DNA, 15 bp, Homo sapiens
tctgggctcttcacg

SEQ ID NO: 1053082 - DNA, 15 bp, Homo sapiens
ctgggctcttcacgg

SEQ ID NO: 1053083 - DNA, 15 bp, Homo sapiens
tgggctcttcacggt

SEQ ID NO: 1053084 - DNA, 15 bp, Homo sapiens
gggctcttcacggtg

SEQ ID NO: 1053085 - DNA, 15 bp, Homo sapiens
ggctcttcacggtgt

SEQ ID NO: 1053086 - DNA, 15 bp, Homo sapiens
gctcttcacggtgtt

SEQ ID NO: 1053087 - DNA, 15 bp, Homo sapiens
ctcttcacggtgttc

SEQ ID NO: 1053088 - DNA, 15 bp, Homo sapiens
tcttcacggtgttca

SEQ ID NO: 1053089 - DNA, 15 bp, Homo sapiens
cttcacggtgttcac

SEQ ID NO: 1053090 - DNA, 15 bp, Homo sapiens
ttcacggtgttcacg

SEQ ID NO: 1053091 - DNA, 15 bp, Homo sapiens
tcacggtgttcacgg

SEQ ID NO: 1053092 - DNA, 15 bp, Homo sapiens
cacggtgttcacggg

SEQ ID NO: 1053093 - DNA, 15 bp, Homo sapiens
acggtgttcacgggg

SEQ ID NO: 1053094 - DNA, 15 bp, Homo sapiens
cggtgttcacggggg

SEQ ID NO: 1053095 - DNA, 15 bp, Homo sapiens
ggtgttcacgggggt

SEQ ID NO: 1053096 - DNA, 15 bp, Homo sapiens
gtgttcacgggggtc

SEQ ID NO: 1053097 - DNA, 15 bp, Homo sapiens
tgttcacgggggtcc

SEQ ID NO: 1053098 - DNA, 15 bp, Homo sapiens
gttcacgggggtcca

SEQ ID NO: 1053099 - DNA, 15 bp, Homo sapiens
ttcacgggggtccag

SEQ ID NO: 1053100 - DNA, 15 bp, Homo sapiens
tcacgggggtccaga

SEQ ID NO: 1053101 - DNA, 15 bp, Homo sapiens
cacgggggtccagaa

SEQ ID NO: 1053102 - DNA, 15 bp, Homo sapiens
acgggggtccagaac

SEQ ID NO: 1053103 - DNA, 15 bp, Homo sapiens
cgggggtccagaaca

SEQ ID NO: 1053104 - DNA, 15 bp, Homo sapiens
gggggtccagaacat

SEQ ID NO: 1053105 - DNA, 15 bp, Homo sapiens
ggggtccagaacatc

SEQ ID NO: 1053106 - DNA, 15 bp, Homo sapiens
gggtccagaacatca

SEQ ID NO: 1053107 - DNA, 15 bp, Homo sapiens
ggtccagaacatcag

SEQ ID NO: 1053108 - DNA, 15 bp, Homo sapiens
gtccagaacatcagc

SEQ ID NO: 1053109 - DNA, 15 bp, Homo sapiens
tccagaacatcagca

SEQ ID NO: 1053110 - DNA, 15 bp, Homo sapiens
ccagaacatcagcag

SEQ ID NO: 1053111 - DNA, 15 bp, Homo sapiens
cagaacatcagcagg

SEQ ID NO: 1053112 - DNA, 15 bp, Homo sapiens
agaacatcagcagga

SEQ ID NO: 1053113 - DNA, 15 bp, Homo sapiens
gaacatcagcaggat

SEQ ID NO: 1053114 - DNA, 15 bp, Homo sapiens
aacatcagcaggatc

SEQ ID NO: 1053115 - DNA, 15 bp, Homo sapiens
acatcagcaggatcc

SEQ ID NO: 1053116 - DNA, 15 bp, Homo sapiens
catcagcaggatcca

SEQ ID NO: 1053117 - DNA, 15 bp, Homo sapiens
cctgttctaaagttg

SEQ ID NO: 1053118 - DNA, 15 bp, Homo sapiens
ctgttctaaagttgc

SEQ ID NO: 1053119 - DNA, 15 bp, Homo sapiens
tgttctaaagttgcc

SEQ ID NO: 1053120 - DNA, 15 bp, Homo sapiens
gttctaaagttgccc

SEQ ID NO: 1053121 - DNA, 15 bp, Homo sapiens
ttctaaagttgcccc

SEQ ID NO: 1053122 - DNA, 15 bp, Homo sapiens
tctaaagttgccccc

SEQ ID NO: 1053123 - DNA, 15 bp, Homo sapiens
ctaaagttgccccct

SEQ ID NO: 1053124 - DNA, 15 bp, Homo sapiens
taaagttgccccctc

SEQ ID NO: 1053125 - DNA, 15 bp, Homo sapiens
aaagttgccccctct

SEQ ID NO: 1053126 - DNA, 15 bp, Homo sapiens
aagttgccccctctc

SEQ ID NO: 1053127 - DNA, 15 bp, Homo sapiens
agttgccccctctcc

SEQ ID NO: 1053128 - DNA, 15 bp, Homo sapiens
gttgccccctctccc

SEQ ID NO: 1053129 - DNA, 15 bp, Homo sapiens
ttgccccctctccca

SEQ ID NO: 1053130 - DNA, 15 bp, Homo sapiens
tgccccctctcccac

SEQ ID NO: 1053131 - DNA, 15 bp, Homo sapiens
gccccctctcccacc

SEQ ID NO: 1053132 - DNA, 15 bp, Homo sapiens
ccccctctcccacct

SEQ ID NO: 1053133 - DNA, 15 bp, Homo sapiens
cccctctcccacctg

SEQ ID NO: 1053134 - DNA, 15 bp, Homo sapiens
ccctctcccacctgc

SEQ ID NO: 1053135 - DNA, 15 bp, Homo sapiens
cctctcccacctgct

SEQ ID NO: 1053136 - DNA, 15 bp, Homo sapiens
ctctcccacctgctg

SEQ ID NO: 1053137 - DNA, 15 bp, Homo sapiens
tctcccacctgctgc

SEQ ID NO: 1053138 - DNA, 15 bp, Homo sapiens
ctcccacctgctgct

SEQ ID NO: 1053139 - DNA, 15 bp, Homo sapiens
tcccacctgctgctc

SEQ ID NO: 1053140 - DNA, 15 bp, Homo sapiens
cccacctgctgctcc

SEQ ID NO: 1053141 - DNA, 15 bp, Homo sapiens
ccacctgctgctccc

SEQ ID NO: 1053142 - DNA, 15 bp, Homo sapiens
cacctgctgctccct

SEQ ID NO: 1053143 - DNA, 15 bp, Homo sapiens
acctgctgctcccta

SEQ ID NO: 1053144 - DNA, 15 bp, Homo sapiens
cctgctgctccctat

SEQ ID NO: 1053145 - DNA, 15 bp, Homo sapiens
ctgctgctccctatg

SEQ ID NO: 1053146 - DNA, 15 bp, Homo sapiens
tgctgctccctatgg

SEQ ID NO: 1053147 - DNA, 15 bp, Homo sapiens
gctgctccctatggc

SEQ ID NO: 1053148 - DNA, 15 bp, Homo sapiens
ctgctccctatggct

SEQ ID NO: 1053149 - DNA, 15 bp, Homo sapiens
tgctccctatggctt

SEQ ID NO: 1053150 - DNA, 15 bp, Homo sapiens
gctccctatggcttc

SEQ ID NO: 1053151 - DNA, 15 bp, Homo sapiens
ctccctatggcttcc

SEQ ID NO: 1053152 - DNA, 15 bp, Homo sapiens
tccctatggcttcct

SEQ ID NO: 1053153 - DNA, 15 bp, Homo sapiens
ccctatggcttcctc

SEQ ID NO: 1053154 - DNA, 15 bp, Homo sapiens
cctatggcttcctct

SEQ ID NO: 1053155 - DNA, 15 bp, Homo sapiens
ctatggcttcctctt

SEQ ID NO: 1053156 - DNA, 15 bp, Homo sapiens
tatggcttcctcttc

SEQ ID NO: 1053157 - DNA, 15 bp, Homo sapiens
atggcttcctcttct

SEQ ID NO: 1053158 - DNA, 15 bp, Homo sapiens
tggcttcctcttctt

SEQ ID NO: 1053159 - DNA, 15 bp, Homo sapiens
ggcttcctcttcttg

SEQ ID NO: 1053160 - DNA, 15 bp, Homo sapiens
gcttcctcttcttgt

SEQ ID NO: 1053161 - DNA, 15 bp, Homo sapiens
cttcctcttcttgtc

SEQ ID NO: 1053162 - DNA, 15 bp, Homo sapiens
ttcctcttcttgtct

SEQ ID NO: 1053163 - DNA, 15 bp, Homo sapiens
tcctcttcttgtctt

SEQ ID NO: 1053164 - DNA, 15 bp, Homo sapiens
cctcttcttgtcttc

SEQ ID NO: 1053165 - DNA, 15 bp, Homo sapiens
ctcttcttgtcttct

SEQ ID NO: 1053166 - DNA, 15 bp, Homo sapiens
tcttcttgtcttctt

SEQ ID NO: 1053167 - DNA, 15 bp, Homo sapiens
cttcttgtcttcttg

SEQ ID NO: 1053168 - DNA, 15 bp, Homo sapiens
ttcttgtcttcttgt

SEQ ID NO: 1053169 - DNA, 15 bp, Homo sapiens
tcttgtcttcttgtc

SEQ ID NO: 1053170 - DNA, 15 bp, Homo sapiens
cttgtcttcttgtct

SEQ ID NO: 1053171 - DNA, 15 bp, Homo sapiens
ttgtcttcttgtctt

SEQ ID NO: 1053172 - DNA, 15 bp, Homo sapiens
tgtcttcttgtcttg

SEQ ID NO: 1053173 - DNA, 15 bp, Homo sapiens
gtcttcttgtcttgg

SEQ ID NO: 1053174 - DNA, 15 bp, Homo sapiens
tcttcttgtcttggt

SEQ ID NO: 1053175 - DNA, 15 bp, Homo sapiens
cttcttgtcttggtc

SEQ ID NO: 1053176 - DNA, 15 bp, Homo sapiens
ttcttgtcttggtct

SEQ ID NO: 1053177 - DNA, 15 bp, Homo sapiens
tcttgtcttggtctt

SEQ ID NO: 1053178 - DNA, 15 bp, Homo sapiens
cttgtcttggtcttc

SEQ ID NO: 1053179 - DNA, 15 bp, Homo sapiens
ttgtcttggtcttct

SEQ ID NO: 1053180 - DNA, 15 bp, Homo sapiens
tgtcttggtcttctt

SEQ ID NO: 1053181 - DNA, 15 bp, Homo sapiens
gtcttggtcttcttg

SEQ ID NO: 1053182 - DNA, 15 bp, Homo sapiens
tcttggtcttcttgt

SEQ ID NO: 1053183 - DNA, 15 bp, Homo sapiens
cttggtcttcttgtc

SEQ ID NO: 1053184 - DNA, 15 bp, Homo sapiens
ttggtcttcttgtct

SEQ ID NO: 1053185 - DNA, 15 bp, Homo sapiens
tggtcttcttgtctt

SEQ ID NO: 1053186 - DNA, 15 bp, Homo sapiens
ggtcttcttgtcttc

SEQ ID NO: 1053187 - DNA, 15 bp, Homo sapiens
gtcttcttgtcttcc

SEQ ID NO: 1053188 - DNA, 15 bp, Homo sapiens
tcttcttgtcttcct

SEQ ID NO: 1053189 - DNA, 15 bp, Homo sapiens
cttcttgtcttcctc

SEQ ID NO: 1053190 - DNA, 15 bp, Homo sapiens
ttcttgtcttcctct

SEQ ID NO: 1053191 - DNA, 15 bp, Homo sapiens
tcttgtcttcctctt

SEQ ID NO: 1053192 - DNA, 15 bp, Homo sapiens
cttgtcttcctcttc

SEQ ID NO: 1053193 - DNA, 15 bp, Homo sapiens
ttgtcttcctcttct

SEQ ID NO: 1053194 - DNA, 15 bp, Homo sapiens
tgtcttcctcttctt

SEQ ID NO: 1053195 - DNA, 15 bp, Homo sapiens
gtcttcctcttcttg

SEQ ID NO: 1053196 - DNA, 15 bp, Homo sapiens
tcttcctcttcttgt

SEQ ID NO: 1053197 - DNA, 15 bp, Homo sapiens
cctcttcttgtcttg

SEQ ID NO: 1053198 - DNA, 15 bp, Homo sapiens
ctcttcttgtcttgg

SEQ ID NO: 1053199 - DNA, 15 bp, Homo sapiens
cttcttgtcttggtg

SEQ ID NO: 1053200 - DNA, 15 bp, Homo sapiens
ttcttgtcttggtgc

SEQ ID NO: 1053201 - DNA, 15 bp, Homo sapiens
tcttgtcttggtgct

SEQ ID NO: 1053202 - DNA, 15 bp, Homo sapiens
cttgtcttggtgctc

SEQ ID NO: 1053203 - DNA, 15 bp, Homo sapiens
ttgtcttggtgctca

SEQ ID NO: 1053204 - DNA, 15 bp, Homo sapiens
tgtcttggtgctcat

SEQ ID NO: 1053205 - DNA, 15 bp, Homo sapiens
gtcttggtgctcatt

SEQ ID NO: 1053206 - DNA, 15 bp, Homo sapiens
tcttggtgctcattg

SEQ ID NO: 1053207 - DNA, 15 bp, Homo sapiens
cttggtgctcattgc

SEQ ID NO: 1053208 - DNA, 15 bp, Homo sapiens
ttggtgctcattgct

SEQ ID NO: 1053209 - DNA, 15 bp, Homo sapiens
tggtgctcattgctc

SEQ ID NO: 1053210 - DNA, 15 bp, Homo sapiens
ggtgctcattgctcc

SEQ ID NO: 1053211 - DNA, 15 bp, Homo sapiens
gtgctcattgctccc

SEQ ID NO: 1053212 - DNA, 15 bp, Homo sapiens
tgctcattgctccct

SEQ ID NO: 1053213 - DNA, 15 bp, Homo sapiens
gctcattgctccctg

SEQ ID NO: 1053214 - DNA, 15 bp, Homo sapiens
ctcattgctccctga

SEQ ID NO: 1053215 - DNA, 15 bp, Homo sapiens
tcattgctccctgaa

SEQ ID NO: 1053216 - DNA, 15 bp, Homo sapiens
cattgctccctgaac

SEQ ID NO: 1053217 - DNA, 15 bp, Homo sapiens
attgctccctgaact

SEQ ID NO: 1053218 - DNA, 15 bp, Homo sapiens
ttgctccctgaactc

SEQ ID NO: 1053219 - DNA, 15 bp, Homo sapiens
tgctccctgaactca

SEQ ID NO: 1053220 - DNA, 15 bp, Homo sapiens
gctccctgaactcat

SEQ ID NO: 1053221 - DNA, 15 bp, Homo sapiens
ctccctgaactcatg

SEQ ID NO: 1053222 - DNA, 15 bp, Homo sapiens
tccctgaactcatgg

SEQ ID NO: 1053223 - DNA, 15 bp, Homo sapiens
ccctgaactcatgga

SEQ ID NO: 1053224 - DNA, 15 bp, Homo sapiens
cctgaactcatggac

SEQ ID NO: 1053225 - DNA, 15 bp, Homo sapiens
ctgaactcatggact

SEQ ID NO: 1053226 - DNA, 15 bp, Homo sapiens
tgaactcatggactg

SEQ ID NO: 1053227 - DNA, 15 bp, Homo sapiens
gaactcatggactgt

SEQ ID NO: 1053228 - DNA, 15 bp, Homo sapiens
aactcatggactgtg

SEQ ID NO: 1053229 - DNA, 15 bp, Homo sapiens
actcatggactgtgg

SEQ ID NO: 1053230 - DNA, 15 bp, Homo sapiens
ctcatggactgtgga

SEQ ID NO: 1053231 - DNA, 15 bp, Homo sapiens
tcatggactgtggat

SEQ ID NO: 1053232 - DNA, 15 bp, Homo sapiens
catggactgtggatt

SEQ ID NO: 1053233 - DNA, 15 bp, Homo sapiens
atggactgtggattt

SEQ ID NO: 1053234 - DNA, 15 bp, Homo sapiens
tggactgtggatttt

SEQ ID NO: 1053235 - DNA, 15 bp, Homo sapiens
ggactgtggatttta

SEQ ID NO: 1053236 - DNA, 15 bp, Homo sapiens
gactgtggattttat

SEQ ID NO: 1053237 - DNA, 15 bp, Homo sapiens
actgtggattttatt

SEQ ID NO: 1053238 - DNA, 15 bp, Homo sapiens
ctgtggattttattc

SEQ ID NO: 1053239 - DNA, 15 bp, Homo sapiens
tgtggattttattca

SEQ ID NO: 1053240 - DNA, 15 bp, Homo sapiens
gtggattttattcat

SEQ ID NO: 1053241 - DNA, 15 bp, Homo sapiens
tggattttattcatt

SEQ ID NO: 1053242 - DNA, 15 bp, Homo sapiens
ggattttattcattg

SEQ ID NO: 1053243 - DNA, 15 bp, Homo sapiens
gattttattcattgc

SEQ ID NO: 1053244 - DNA, 15 bp, Homo sapiens
attttattcattgcc

SEQ ID NO: 1053245 - DNA, 15 bp, Homo sapiens
ttttattcattgccc

SEQ ID NO: 1053246 - DNA, 15 bp, Homo sapiens
tttattcattgcccc

SEQ ID NO: 1053247 - DNA, 15 bp, Homo sapiens
ttattcattgcccct

SEQ ID NO: 1053248 - DNA, 15 bp, Homo sapiens
tattcattgcccctt

SEQ ID NO: 1053249 - DNA, 15 bp, Homo sapiens
attcattgccccttc

SEQ ID NO: 1053250 - DNA, 15 bp, Homo sapiens
ttcattgccccttcc

SEQ ID NO: 1053251 - DNA, 15 bp, Homo sapiens
tcattgccccttcca

SEQ ID NO: 1053252 - DNA, 15 bp, Homo sapiens
cattgccccttccat

SEQ ID NO: 1053253 - DNA, 15 bp, Homo sapiens
attgccccttccatt

SEQ ID NO: 1053254 - DNA, 15 bp, Homo sapiens
ttgccccttccattc

SEQ ID NO: 1053255 - DNA, 15 bp, Homo sapiens
tgccccttccattca

SEQ ID NO: 1053256 - DNA, 15 bp, Homo sapiens
gccccttccattcac

SEQ ID NO: 1053257 - DNA, 15 bp, Homo sapiens
ccccttccattcact

SEQ ID NO: 1053258 - DNA, 15 bp, Homo sapiens
cccttccattcactg

SEQ ID NO: 1053259 - DNA, 15 bp, Homo sapiens
ccttccattcactgt

SEQ ID NO: 1053260 - DNA, 15 bp, Homo sapiens
cttccattcactgtc

SEQ ID NO: 1053261 - DNA, 15 bp, Homo sapiens
ttccattcactgtca

SEQ ID NO: 1053262 - DNA, 15 bp, Homo sapiens
tccattcactgtcat

SEQ ID NO: 1053263 - DNA, 15 bp, Homo sapiens
ccattcactgtcatc

SEQ ID NO: 1053264 - DNA, 15 bp, Homo sapiens
cattcactgtcatcc

SEQ ID NO: 1053265 - DNA, 15 bp, Homo sapiens
attcactgtcatccc

SEQ ID NO: 1053266 - DNA, 15 bp, Homo sapiens
ttcactgtcatccct

SEQ ID NO: 1053267 - DNA, 15 bp, Homo sapiens
tcactgtcatccctg

SEQ ID NO: 1053268 - DNA, 15 bp, Homo sapiens
cactgtcatccctgt

SEQ ID NO: 1053269 - DNA, 15 bp, Homo sapiens
actgtcatccctgta

SEQ ID NO: 1053270 - DNA, 15 bp, Homo sapiens
ctgtcatccctgtag

SEQ ID NO: 1053271 - DNA, 15 bp, Homo sapiens
tgtcatccctgtagg

SEQ ID NO: 1053272 - DNA, 15 bp, Homo sapiens
gtcatccctgtaggc

SEQ ID NO: 1053273 - DNA, 15 bp, Homo sapiens
tcatccctgtaggca

SEQ ID NO: 1053274 - DNA, 15 bp, Homo sapiens
catccctgtaggcag

SEQ ID NO: 1053275 - DNA, 15 bp, Homo sapiens
atccctgtaggcagg

SEQ ID NO: 1053276 - DNA, 15 bp, Homo sapiens
tccctgtaggcaggg

SEQ ID NO: 1053277 - DNA, 15 bp, Homo sapiens
ccctgtaggcagggc

SEQ ID NO: 1053278 - DNA, 15 bp, Homo sapiens
cctgtaggcagggcc

SEQ ID NO: 1053279 - DNA, 15 bp, Homo sapiens
ctgtaggcagggccc

SEQ ID NO: 1053280 - DNA, 15 bp, Homo sapiens
tgtaggcagggcccc

SEQ ID NO: 1053281 - DNA, 15 bp, Homo sapiens
gtaggcagggcccca

SEQ ID NO: 1053282 - DNA, 15 bp, Homo sapiens
taggcagggccccaa

SEQ ID NO: 1053283 - DNA, 15 bp, Homo sapiens
aggcagggccccaag

SEQ ID NO: 1053284 - DNA, 15 bp, Homo sapiens
ggcagggccccaagc

SEQ ID NO: 1053285 - DNA, 15 bp, Homo sapiens
gcagggccccaagct

SEQ ID NO: 1053286 - DNA, 15 bp, Homo sapiens
cagggccccaagctc

SEQ ID NO: 1053287 - DNA, 15 bp, Homo sapiens
agggccccaagctcc

SEQ ID NO: 1053288 - DNA, 15 bp, Homo sapiens
gggccccaagctcct

SEQ ID NO: 1053289 - DNA, 15 bp, Homo sapiens
ggccccaagctcctc

SEQ ID NO: 1053290 - DNA, 15 bp, Homo sapiens
gccccaagctcctct

SEQ ID NO: 1053291 - DNA, 15 bp, Homo sapiens
ccccaagctcctctt

SEQ ID NO: 1053292 - DNA, 15 bp, Homo sapiens
cccaagctcctcttg

SEQ ID NO: 1053293 - DNA, 15 bp, Homo sapiens
ccaagctcctcttgt

SEQ ID NO: 1053294 - DNA, 15 bp, Homo sapiens
caagctcctcttgtt

SEQ ID NO: 1053295 - DNA, 15 bp, Homo sapiens
aagctcctcttgttg

SEQ ID NO: 1053296 - DNA, 15 bp, Homo sapiens
agctcctcttgttgg

SEQ ID NO: 1053297 - DNA, 15 bp, Homo sapiens
gctcctcttgttggt

SEQ ID NO: 1053298 - DNA, 15 bp, Homo sapiens
ctcctcttgttggtt

SEQ ID NO: 1053299 - DNA, 15 bp, Homo sapiens
tcctcttgttggttt

SEQ ID NO: 1053300 - DNA, 15 bp, Homo sapiens
cctcttgttggtttt

SEQ ID NO: 1053301 - DNA, 15 bp, Homo sapiens
ctcttgttggtttta

SEQ ID NO: 1053302 - DNA, 15 bp, Homo sapiens
tcttgttggttttat

SEQ ID NO: 1053303 - DNA, 15 bp, Homo sapiens
cttgttggttttatt

SEQ ID NO: 1053304 - DNA, 15 bp, Homo sapiens
ttgttggttttattc

SEQ ID NO: 1053305 - DNA, 15 bp, Homo sapiens
tgttggttttattct

SEQ ID NO: 1053306 - DNA, 15 bp, Homo sapiens
gttggttttattctt

SEQ ID NO: 1053307 - DNA, 15 bp, Homo sapiens
ttggttttattctta

SEQ ID NO: 1053308 - DNA, 15 bp, Homo sapiens
tggttttattcttag

SEQ ID NO: 1053309 - DNA, 15 bp, Homo sapiens
ggttttattcttagc

SEQ ID NO: 1053310 - DNA, 15 bp, Homo sapiens
gttttattcttagct

SEQ ID NO: 1053311 - DNA, 15 bp, Homo sapiens
ttttattcttagctt

SEQ ID NO: 1053312 - DNA, 15 bp, Homo sapiens
tttattcttagcttc

SEQ ID NO: 1053313 - DNA, 15 bp, Homo sapiens
ttattcttagcttct

SEQ ID NO: 1053314 - DNA, 15 bp, Homo sapiens
tattcttagcttcta

SEQ ID NO: 1053315 - DNA, 15 bp, Homo sapiens
attcttagcttctag

SEQ ID NO: 1053316 - DNA, 15 bp, Homo sapiens
ttcttagcttctaga

SEQ ID NO: 1053317 - DNA, 15 bp, Homo sapiens
tcttagcttctagaa

SEQ ID NO: 1053318 - DNA, 15 bp, Homo sapiens
cttagcttctagaac

SEQ ID NO: 1053319 - DNA, 15 bp, Homo sapiens
ttagcttctagaact

SEQ ID NO: 1053320 - DNA, 15 bp, Homo sapiens
tagcttctagaactg

SEQ ID NO: 1053321 - DNA, 15 bp, Homo sapiens
agcttctagaactgt

SEQ ID NO: 1053322 - DNA, 15 bp, Homo sapiens
gcttctagaactgtg

SEQ ID NO: 1053323 - DNA, 15 bp, Homo sapiens
cttctagaactgtgc

SEQ ID NO: 1053324 - DNA, 15 bp, Homo sapiens
ttctagaactgtgcc

SEQ ID NO: 1053325 - DNA, 15 bp, Homo sapiens
tctagaactgtgccc

SEQ ID NO: 1053326 - DNA, 15 bp, Homo sapiens
ctagaactgtgcccc

SEQ ID NO: 1053327 - DNA, 15 bp, Homo sapiens
tagaactgtgccccg

SEQ ID NO: 1053328 - DNA, 15 bp, Homo sapiens
agaactgtgccccgc

SEQ ID NO: 1053329 - DNA, 15 bp, Homo sapiens
gaactgtgccccgca

SEQ ID NO: 1053330 - DNA, 15 bp, Homo sapiens
aactgtgccccgcat

SEQ ID NO: 1053331 - DNA, 15 bp, Homo sapiens
actgtgccccgcatg

SEQ ID NO: 1053332 - DNA, 15 bp, Homo sapiens
ctgtgccccgcatgt

SEQ ID NO: 1053333 - DNA, 15 bp, Homo sapiens
tgtgccccgcatgta

SEQ ID NO: 1053334 - DNA, 15 bp, Homo sapiens
gtgccccgcatgtaa

SEQ ID NO: 1053335 - DNA, 15 bp, Homo sapiens
tgccccgcatgtaat

SEQ ID NO: 1053336 - DNA, 15 bp, Homo sapiens
gccccgcatgtaatg

SEQ ID NO: 1053337 - DNA, 15 bp, Homo sapiens
ccccgcatgtaatgg

SEQ ID NO: 1053338 - DNA, 15 bp, Homo sapiens
cccgcatgtaatggg

SEQ ID NO: 1053339 - DNA, 15 bp, Homo sapiens
ccgcatgtaatgggt

SEQ ID NO: 1053340 - DNA, 15 bp, Homo sapiens
cgcatgtaatgggta

SEQ ID NO: 1053341 - DNA, 15 bp, Homo sapiens
gcatgtaatgggtac

SEQ ID NO: 1053342 - DNA, 15 bp, Homo sapiens
catgtaatgggtact

SEQ ID NO: 1053343 - DNA, 15 bp, Homo sapiens
atgtaatgggtactc

SEQ ID NO: 1053344 - DNA, 15 bp, Homo sapiens
tgtaatgggtactca

SEQ ID NO: 1053345 - DNA, 15 bp, Homo sapiens
gtaatgggtactcat

SEQ ID NO: 1053346 - DNA, 15 bp, Homo sapiens
taatgggtactcata

SEQ ID NO: 1053347 - DNA, 15 bp, Homo sapiens
aatgggtactcatac

SEQ ID NO: 1053348 - DNA, 15 bp, Homo sapiens
atgggtactcataca

SEQ ID NO: 1053349 - DNA, 15 bp, Homo sapiens
tgggtactcatacag

SEQ ID NO: 1053350 - DNA, 15 bp, Homo sapiens
gggtactcatacagt

SEQ ID NO: 1053351 - DNA, 15 bp, Homo sapiens
ggtactcatacagta

SEQ ID NO: 1053352 - DNA, 15 bp, Homo sapiens
gtactcatacagtat

SEQ ID NO: 1053353 - DNA, 15 bp, Homo sapiens
tactcatacagtatt

SEQ ID NO: 1053354 - DNA, 15 bp, Homo sapiens
actcatacagtattt

SEQ ID NO: 1053355 - DNA, 15 bp, Homo sapiens
ctcatacagtatttg

SEQ ID NO: 1053356 - DNA, 15 bp, Homo sapiens
tcatacagtatttga

SEQ ID NO: 1053357 - DNA, 15 bp, Homo sapiens
catacagtatttgaa

SEQ ID NO: 1053358 - DNA, 15 bp, Homo sapiens
atacagtatttgaat

SEQ ID NO: 1053359 - DNA, 15 bp, Homo sapiens
tacagtatttgaata

SEQ ID NO: 1053360 - DNA, 15 bp, Homo sapiens
acagtatttgaatat

SEQ ID NO: 1053361 - DNA, 15 bp, Homo sapiens
cagtatttgaatata

SEQ ID NO: 1053362 - DNA, 15 bp, Homo sapiens
agtatttgaatatag

SEQ ID NO: 1053363 - DNA, 15 bp, Homo sapiens
gtatttgaatatagg

SEQ ID NO: 1053364 - DNA, 15 bp, Homo sapiens
tatttgaatataggg

SEQ ID NO: 1053365 - DNA, 15 bp, Homo sapiens
atttgaatataggga

SEQ ID NO: 1053366 - DNA, 15 bp, Homo sapiens
tttgaatatagggat

SEQ ID NO: 1053367 - DNA, 15 bp, Homo sapiens
ttgaatatagggatg

SEQ ID NO: 1053368 - DNA, 15 bp, Homo sapiens
tgaatatagggatgg

SEQ ID NO: 1053369 - DNA, 15 bp, Homo sapiens
gaatatagggatggt

SEQ ID NO: 1053370 - DNA, 15 bp, Homo sapiens
aatatagggatggtg

SEQ ID NO: 1053371 - DNA, 15 bp, Homo sapiens
atatagggatggtga

SEQ ID NO: 1053372 - DNA, 15 bp, Homo sapiens
tatagggatggtgag

SEQ ID NO: 1053373 - DNA, 15 bp, Homo sapiens
atagggatggtgagt

SEQ ID NO: 1053374 - DNA, 15 bp, Homo sapiens
tagggatggtgagtg

SEQ ID NO: 1053375 - DNA, 15 bp, Homo sapiens
agggatggtgagtgc

SEQ ID NO: 1053376 - DNA, 15 bp, Homo sapiens
gggatggtgagtgcg

SEQ ID NO: 1053377 - DNA, 15 bp, Homo sapiens
ggatggtgagtgcgt

SEQ ID NO: 1053378 - DNA, 15 bp, Homo sapiens
gatggtgagtgcgtt

SEQ ID NO: 1053379 - DNA, 15 bp, Homo sapiens
atggtgagtgcgttc

SEQ ID NO: 1053380 - DNA, 15 bp, Homo sapiens
tggtgagtgcgttct

SEQ ID NO: 1053381 - DNA, 15 bp, Homo sapiens
ggtgagtgcgttctg

SEQ ID NO: 1053382 - DNA, 15 bp, Homo sapiens
gtgagtgcgttctgt

SEQ ID NO: 1053383 - DNA, 15 bp, Homo sapiens
tgagtgcgttctgta

SEQ ID NO: 1053384 - DNA, 15 bp, Homo sapiens
gagtgcgttctgtac

SEQ ID NO: 1053385 - DNA, 15 bp, Homo sapiens
agtgcgttctgtact

SEQ ID NO: 1053386 - DNA, 15 bp, Homo sapiens
gtgcgttctgtactt

SEQ ID NO: 1053387 - DNA, 15 bp, Homo sapiens
tgcgttctgtactta

SEQ ID NO: 1053388 - DNA, 15 bp, Homo sapiens
gcgttctgtacttag

SEQ ID NO: 1053389 - DNA, 15 bp, Homo sapiens
cgttctgtacttagg

SEQ ID NO: 1053390 - DNA, 15 bp, Homo sapiens
gttctgtacttagga

SEQ ID NO: 1053391 - DNA, 15 bp, Homo sapiens
ttctgtacttaggaa

SEQ ID NO: 1053392 - DNA, 15 bp, Homo sapiens
tctgtacttaggaaa

SEQ ID NO: 1053393 - DNA, 15 bp, Homo sapiens
ctgtacttaggaaat

SEQ ID NO: 1053394 - DNA, 15 bp, Homo sapiens
tgtacttaggaaatt

SEQ ID NO: 1053395 - DNA, 15 bp, Homo sapiens
gtacttaggaaattg

SEQ ID NO: 1053396 - DNA, 15 bp, Homo sapiens
tacttaggaaattga

SEQ ID NO: 1053397 - DNA, 15 bp, Homo sapiens
acttaggaaattgag

SEQ ID NO: 1053398 - DNA, 15 bp, Homo sapiens
cttaggaaattgagg

SEQ ID NO: 1053399 - DNA, 15 bp, Homo sapiens
ttaggaaattgaggc

SEQ ID NO: 1053400 - DNA, 15 bp, Homo sapiens
taggaaattgaggcc

SEQ ID NO: 1053401 - DNA, 15 bp, Homo sapiens
aggaaattgaggcct

SEQ ID NO: 1053402 - DNA, 15 bp, Homo sapiens
ggaaattgaggcctg

SEQ ID NO: 1053403 - DNA, 15 bp, Homo sapiens
gaaattgaggcctga

SEQ ID NO: 1053404 - DNA, 15 bp, Homo sapiens
aaattgaggcctgat

SEQ ID NO: 1053405 - DNA, 15 bp, Homo sapiens
aattgaggcctgatg

SEQ ID NO: 1053406 - DNA, 15 bp, Homo sapiens
attgaggcctgatgc

SEQ ID NO: 1053407 - DNA, 15 bp, Homo sapiens
ttgaggcctgatgct

SEQ ID NO: 1053408 - DNA, 15 bp, Homo sapiens
tgaggcctgatgctg

SEQ ID NO: 1053409 - DNA, 15 bp, Homo sapiens
gaggcctgatgctgg

SEQ ID NO: 1053410 - DNA, 15 bp, Homo sapiens
aggcctgatgctgga

SEQ ID NO: 1053411 - DNA, 15 bp, Homo sapiens
ggcctgatgctggat

SEQ ID NO: 1053412 - DNA, 15 bp, Homo sapiens
gcctgatgctggatg

SEQ ID NO: 1053413 - DNA, 15 bp, Homo sapiens
cctgatgctggatgc

SEQ ID NO: 1053414 - DNA, 15 bp, Homo sapiens
ctgatgctggatgcg

SEQ ID NO: 1053415 - DNA, 15 bp, Homo sapiens
tgatgctggatgcga

SEQ ID NO: 1053416 - DNA, 15 bp, Homo sapiens
gatgctggatgcgac

SEQ ID NO: 1053417 - DNA, 15 bp, Homo sapiens
atgctggatgcgacc

SEQ ID NO: 1053418 - DNA, 15 bp, Homo sapiens
tgctggatgcgacca

SEQ ID NO: 1053419 - DNA, 15 bp, Homo sapiens
gctggatgcgaccaa

SEQ ID NO: 1053420 - DNA, 15 bp, Homo sapiens
ctggatgcgaccaag

SEQ ID NO: 1053421 - DNA, 15 bp, Homo sapiens
tggatgcgaccaagg

SEQ ID NO: 1053422 - DNA, 15 bp, Homo sapiens
ggatgcgaccaaggt

SEQ ID NO: 1053423 - DNA, 15 bp, Homo sapiens
gatgcgaccaaggtc

SEQ ID NO: 1053424 - DNA, 15 bp, Homo sapiens
atgcgaccaaggtca

SEQ ID NO: 1053425 - DNA, 15 bp, Homo sapiens
tgcgaccaaggtcac

SEQ ID NO: 1053426 - DNA, 15 bp, Homo sapiens
gcgaccaaggtcaca

SEQ ID NO: 1053427 - DNA, 15 bp, Homo sapiens
cgaccaaggtcacag

SEQ ID NO: 1053428 - DNA, 15 bp, Homo sapiens
gaccaaggtcacagg

SEQ ID NO: 1053429 - DNA, 15 bp, Homo sapiens
accaaggtcacaggg

SEQ ID NO: 1053430 - DNA, 15 bp, Homo sapiens
ccaaggtcacagggt

SEQ ID NO: 1053431 - DNA, 15 bp, Homo sapiens
caaggtcacagggtt

SEQ ID NO: 1053432 - DNA, 15 bp, Homo sapiens
aaggtcacagggttg

SEQ ID NO: 1053433 - DNA, 15 bp, Homo sapiens
aggtcacagggttgg

SEQ ID NO: 1053434 - DNA, 15 bp, Homo sapiens
ggtcacagggttggt

SEQ ID NO: 1053435 - DNA, 15 bp, Homo sapiens
gtcacagggttggta

SEQ ID NO: 1053436 - DNA, 15 bp, Homo sapiens
tcacagggttggtag

SEQ ID NO: 1053437 - DNA, 15 bp, Homo sapiens
cacagggttggtagg

SEQ ID NO: 1053438 - DNA, 15 bp, Homo sapiens
acagggttggtagga

SEQ ID NO: 1053439 - DNA, 15 bp, Homo sapiens
cagggttggtaggac

SEQ ID NO: 1053440 - DNA, 15 bp, Homo sapiens
agggttggtaggacc

SEQ ID NO: 1053441 - DNA, 15 bp, Homo sapiens
gggttggtaggaccg

SEQ ID NO: 1053442 - DNA, 15 bp, Homo sapiens
ggttggtaggaccgg

SEQ ID NO: 1053443 - DNA, 15 bp, Homo sapiens
gttggtaggaccgga

SEQ ID NO: 1053444 - DNA, 15 bp, Homo sapiens
ttggtaggaccggaa

SEQ ID NO: 1053445 - DNA, 15 bp, Homo sapiens
tggtaggaccggaag

SEQ ID NO: 1053446 - DNA, 15 bp, Homo sapiens
ggtaggaccggaagc

SEQ ID NO: 1053447 - DNA, 15 bp, Homo sapiens
gtaggaccggaagcg

SEQ ID NO: 1053448 - DNA, 15 bp, Homo sapiens
taggaccggaagcgg

SEQ ID NO: 1053449 - DNA, 15 bp, Homo sapiens
aggaccggaagcggc

SEQ ID NO: 1053450 - DNA, 15 bp, Homo sapiens
ggaccggaagcggcc

SEQ ID NO: 1053451 - DNA, 15 bp, Homo sapiens
gaccggaagcggccc

SEQ ID NO: 1053452 - DNA, 15 bp, Homo sapiens
accggaagcggccct

SEQ ID NO: 1053453 - DNA, 15 bp, Homo sapiens
ccggaagcggccctc

SEQ ID NO: 1053454 - DNA, 15 bp, Homo sapiens
cggaagcggccctct

SEQ ID NO: 1053455 - DNA, 15 bp, Homo sapiens
ggaagcggccctcta

SEQ ID NO: 1053456 - DNA, 15 bp, Homo sapiens
gaagcggccctctat

SEQ ID NO: 1053457 - DNA, 15 bp, Homo sapiens
aagcggccctctatt

SEQ ID NO: 1053458 - DNA, 15 bp, Homo sapiens
agcggccctctattt

SEQ ID NO: 1053459 - DNA, 15 bp, Homo sapiens
gcggccctctatttg

SEQ ID NO: 1053460 - DNA, 15 bp, Homo sapiens
cggccctctatttga

SEQ ID NO: 1053461 - DNA, 15 bp, Homo sapiens
ggccctctatttgac

SEQ ID NO: 1053462 - DNA, 15 bp, Homo sapiens
gccctctatttgact

SEQ ID NO: 1053463 - DNA, 15 bp, Homo sapiens
ccctctatttgactg

SEQ ID NO: 1053464 - DNA, 15 bp, Homo sapiens
cctctatttgactgt

SEQ ID NO: 1053465 - DNA, 15 bp, Homo sapiens
ctctatttgactgtg

SEQ ID NO: 1053466 - DNA, 15 bp, Homo sapiens
tctatttgactgtgt

SEQ ID NO: 1053467 - DNA, 15 bp, Homo sapiens
ctatttgactgtgtc

SEQ ID NO: 1053468 - DNA, 15 bp, Homo sapiens
tatttgactgtgtct

SEQ ID NO: 1053469 - DNA, 15 bp, Homo sapiens
atttgactgtgtctt

SEQ ID NO: 1053470 - DNA, 15 bp, Homo sapiens
tttgactgtgtcttg

SEQ ID NO: 1053471 - DNA, 15 bp, Homo sapiens
ttgactgtgtcttgc

SEQ ID NO: 1053472 - DNA, 15 bp, Homo sapiens
tgactgtgtcttgcc

SEQ ID NO: 1053473 - DNA, 15 bp, Homo sapiens
gactgtgtcttgcct

SEQ ID NO: 1053474 - DNA, 15 bp, Homo sapiens
actgtgtcttgcctt

SEQ ID NO: 1053475 - DNA, 15 bp, Homo sapiens
ctgtgtcttgccttc

SEQ ID NO: 1053476 - DNA, 15 bp, Homo sapiens
tgtgtcttgccttct

SEQ ID NO: 1053477 - DNA, 15 bp, Homo sapiens
gtgtcttgccttctg

SEQ ID NO: 1053478 - DNA, 15 bp, Homo sapiens
tgtcttgccttctgg

SEQ ID NO: 1053479 - DNA, 15 bp, Homo sapiens
gtcttgccttctggg

SEQ ID NO: 1053480 - DNA, 15 bp, Homo sapiens
tcttgccttctggga

SEQ ID NO: 1053481 - DNA, 15 bp, Homo sapiens
cttgccttctgggag

SEQ ID NO: 1053482 - DNA, 15 bp, Homo sapiens
ttgccttctgggagc

SEQ ID NO: 1053483 - DNA, 15 bp, Homo sapiens
tgccttctgggagcc

SEQ ID NO: 1053484 - DNA, 15 bp, Homo sapiens
gccttctgggagcct

SEQ ID NO: 1053485 - DNA, 15 bp, Homo sapiens
ccttctgggagcctt

SEQ ID NO: 1053486 - DNA, 15 bp, Homo sapiens
cttctgggagccttt

SEQ ID NO: 1053487 - DNA, 15 bp, Homo sapiens
ttctgggagcctttt

SEQ ID NO: 1053488 - DNA, 15 bp, Homo sapiens
tctgggagccttttt

SEQ ID NO: 1053489 - DNA, 15 bp, Homo sapiens
ctgggagcctttttg

SEQ ID NO: 1053490 - DNA, 15 bp, Homo sapiens
tgggagcctttttgg

SEQ ID NO: 1053491 - DNA, 15 bp, Homo sapiens
gggagcctttttggt

SEQ ID NO: 1053492 - DNA, 15 bp, Homo sapiens
ggagcctttttggtt

SEQ ID NO: 1053493 - DNA, 15 bp, Homo sapiens
gagcctttttggttg

SEQ ID NO: 1053494 - DNA, 15 bp, Homo sapiens
agcctttttggttga

SEQ ID NO: 1053495 - DNA, 15 bp, Homo sapiens
gcctttttggttgaa

SEQ ID NO: 1053496 - DNA, 15 bp, Homo sapiens
cctttttggttgaag

SEQ ID NO: 1053497 - DNA, 15 bp, Homo sapiens
ctttttggttgaagc

SEQ ID NO: 1053498 - DNA, 15 bp, Homo sapiens
tttttggttgaagcc

SEQ ID NO: 1053499 - DNA, 15 bp, Homo sapiens
ttttggttgaagccc

SEQ ID NO: 1053500 - DNA, 15 bp, Homo sapiens
tttggttgaagcccc

SEQ ID NO: 1053501 - DNA, 15 bp, Homo sapiens
ttggttgaagccccg

SEQ ID NO: 1053502 - DNA, 15 bp, Homo sapiens
tggttgaagccccgt

SEQ ID NO: 1053503 - DNA, 15 bp, Homo sapiens
ggttgaagccccgtc

SEQ ID NO: 1053504 - DNA, 15 bp, Homo sapiens
gttgaagccccgtcc

SEQ ID NO: 1053505 - DNA, 15 bp, Homo sapiens
ttgaagccccgtcct

SEQ ID NO: 1053506 - DNA, 15 bp, Homo sapiens
tgaagccccgtcctc

SEQ ID NO: 1053507 - DNA, 15 bp, Homo sapiens
gaagccccgtcctcc

SEQ ID NO: 1053508 - DNA, 15 bp, Homo sapiens
aagccccgtcctcca

SEQ ID NO: 1053509 - DNA, 15 bp, Homo sapiens
agccccgtcctccag

SEQ ID NO: 1053510 - DNA, 15 bp, Homo sapiens
gccccgtcctccagc

SEQ ID NO: 1053511 - DNA, 15 bp, Homo sapiens
ccccgtcctccagct

SEQ ID NO: 1053512 - DNA, 15 bp, Homo sapiens
cccgtcctccagctg

SEQ ID NO: 1053513 - DNA, 15 bp, Homo sapiens
ccgtcctccagctgg

SEQ ID NO: 1053514 - DNA, 15 bp, Homo sapiens
cgtcctccagctggc

SEQ ID NO: 1053515 - DNA, 15 bp, Homo sapiens
gtcctccagctggca

SEQ ID NO: 1053516 - DNA, 15 bp, Homo sapiens
tcctccagctggcaa

SEQ ID NO: 1053517 - DNA, 15 bp, Homo sapiens
cctccagctggcaat

SEQ ID NO: 1053518 - DNA, 15 bp, Homo sapiens
ctccagctggcaatg

SEQ ID NO: 1053519 - DNA, 15 bp, Homo sapiens
tccagctggcaatgg

SEQ ID NO: 1053520 - DNA, 15 bp, Homo sapiens
ccagctggcaatggc

SEQ ID NO: 1053521 - DNA, 15 bp, Homo sapiens
cagctggcaatggcg

SEQ ID NO: 1053522 - DNA, 15 bp, Homo sapiens
agctggcaatggcga

SEQ ID NO: 1053523 - DNA, 15 bp, Homo sapiens
gctggcaatggcgac

SEQ ID NO: 1053524 - DNA, 15 bp, Homo sapiens
ctggcaatggcgact

SEQ ID NO: 1053525 - DNA, 15 bp, Homo sapiens
tggcaatggcgactc

SEQ ID NO: 1053526 - DNA, 15 bp, Homo sapiens
ggcaatggcgactct

SEQ ID NO: 1053527 - DNA, 15 bp, Homo sapiens
gcaatggcgactcta

SEQ ID NO: 1053528 - DNA, 15 bp, Homo sapiens
caatggcgactctaa

SEQ ID NO: 1053529 - DNA, 15 bp, Homo sapiens
aatggcgactctaaa

SEQ ID NO: 1053530 - DNA, 15 bp, Homo sapiens
atggcgactctaaag

SEQ ID NO: 1053531 - DNA, 15 bp, Homo sapiens
tggcgactctaaagg

SEQ ID NO: 1053532 - DNA, 15 bp, Homo sapiens
ggcgactctaaagga

SEQ ID NO: 1053533 - DNA, 15 bp, Homo sapiens
gcgactctaaaggac

SEQ ID NO: 1053534 - DNA, 15 bp, Homo sapiens
cgactctaaaggact

SEQ ID NO: 1053535 - DNA, 15 bp, Homo sapiens
gactctaaaggactg

SEQ ID NO: 1053536 - DNA, 15 bp, Homo sapiens
actctaaaggactgg

SEQ ID NO: 1053537 - DNA, 15 bp, Homo sapiens
ctctaaaggactggt

SEQ ID NO: 1053538 - DNA, 15 bp, Homo sapiens
tctaaaggactggtc

SEQ ID NO: 1053539 - DNA, 15 bp, Homo sapiens
ctaaaggactggtct

SEQ ID NO: 1053540 - DNA, 15 bp, Homo sapiens
taaaggactggtctg

SEQ ID NO: 1053541 - DNA, 15 bp, Homo sapiens
aaaggactggtctgc

SEQ ID NO: 1053542 - DNA, 15 bp, Homo sapiens
aaggactggtctgca

SEQ ID NO: 1053543 - DNA, 15 bp, Homo sapiens
aggactggtctgcaa

SEQ ID NO: 1053544 - DNA, 15 bp, Homo sapiens
ggactggtctgcaac

SEQ ID NO: 1053545 - DNA, 15 bp, Homo sapiens
gactggtctgcaaca

SEQ ID NO: 1053546 - DNA, 15 bp, Homo sapiens
actggtctgcaacag

SEQ ID NO: 1053547 - DNA, 15 bp, Homo sapiens
ctggtctgcaacagg

SEQ ID NO: 1053548 - DNA, 15 bp, Homo sapiens
tggtctgcaacaggg

SEQ ID NO: 1053549 - DNA, 15 bp, Homo sapiens
ggtctgcaacagggg

SEQ ID NO: 1053550 - DNA, 15 bp, Homo sapiens
gtctgcaacaggggt

SEQ ID NO: 1053551 - DNA, 15 bp, Homo sapiens
tctgcaacaggggtc

SEQ ID NO: 1053552 - DNA, 15 bp, Homo sapiens
ctgcaacaggggtca

SEQ ID NO: 1053553 - DNA, 15 bp, Homo sapiens
tgcaacaggggtcag

SEQ ID NO: 1053554 - DNA, 15 bp, Homo sapiens
gcaacaggggtcagg

SEQ ID NO: 1053555 - DNA, 15 bp, Homo sapiens
caacaggggtcagga

SEQ ID NO: 1053556 - DNA, 15 bp, Homo sapiens
aacaggggtcaggag

SEQ ID NO: 1053557 - DNA, 15 bp, Homo sapiens
acaggggtcaggagg

SEQ ID NO: 1053558 - DNA, 15 bp, Homo sapiens
caggggtcaggagga

SEQ ID NO: 1053559 - DNA, 15 bp, Homo sapiens
aggggtcaggaggag

SEQ ID NO: 1053560 - DNA, 15 bp, Homo sapiens
ggggtcaggaggagg

SEQ ID NO: 1053561 - DNA, 15 bp, Homo sapiens
gggtcaggaggaggg

SEQ ID NO: 1053562 - DNA, 15 bp, Homo sapiens
ggtcaggaggagggg

SEQ ID NO: 1053563 - DNA, 15 bp, Homo sapiens
gtcaggaggaggggc

SEQ ID NO: 1053564 - DNA, 15 bp, Homo sapiens
tcaggaggaggggct

SEQ ID NO: 1053565 - DNA, 15 bp, Homo sapiens
caggaggaggggctg

SEQ ID NO: 1053566 - DNA, 15 bp, Homo sapiens
aggaggaggggctgt

SEQ ID NO: 1053567 - DNA, 15 bp, Homo sapiens
ggaggaggggctgtc

SEQ ID NO: 1053568 - DNA, 15 bp, Homo sapiens
gaggaggggctgtca

SEQ ID NO: 1053569 - DNA, 15 bp, Homo sapiens
aggaggggctgtcaa

SEQ ID NO: 1053570 - DNA, 15 bp, Homo sapiens
ggaggggctgtcaac

SEQ ID NO: 1053571 - DNA, 15 bp, Homo sapiens
gaggggctgtcaaca

SEQ ID NO: 1053572 - DNA, 15 bp, Homo sapiens
aggggctgtcaacag

SEQ ID NO: 1053573 - DNA, 15 bp, Homo sapiens
ggggctgtcaacaga

SEQ ID NO: 1053574 - DNA, 15 bp, Homo sapiens
gggctgtcaacagat

SEQ ID NO: 1053575 - DNA, 15 bp, Homo sapiens
ggctgtcaacagatt

SEQ ID NO: 1053576 - DNA, 15 bp, Homo sapiens
gctgtcaacagattg

SEQ ID NO: 1053577 - DNA, 15 bp, Homo sapiens
ctgtcaacagattgg

SEQ ID NO: 1053578 - DNA, 15 bp, Homo sapiens
tgtcaacagattgga

SEQ ID NO: 1053579 - DNA, 15 bp, Homo sapiens
gtcaacagattggat

SEQ ID NO: 1053580 - DNA, 15 bp, Homo sapiens
tcaacagattggatg

SEQ ID NO: 1053581 - DNA, 15 bp, Homo sapiens
caacagattggatgc

SEQ ID NO: 1053582 - DNA, 15 bp, Homo sapiens
aacagattggatgct

SEQ ID NO: 1053583 - DNA, 15 bp, Homo sapiens
acagattggatgctt

SEQ ID NO: 1053584 - DNA, 15 bp, Homo sapiens
cagattggatgcttt

SEQ ID NO: 1053585 - DNA, 15 bp, Homo sapiens
agattggatgctttc

SEQ ID NO: 1053586 - DNA, 15 bp, Homo sapiens
gattggatgctttcc

SEQ ID NO: 1053587 - DNA, 15 bp, Homo sapiens
attggatgctttccc

SEQ ID NO: 1053588 - DNA, 15 bp, Homo sapiens
ttggatgctttcccc

SEQ ID NO: 1053589 - DNA, 15 bp, Homo sapiens
tggatgctttcccct

SEQ ID NO: 1053590 - DNA, 15 bp, Homo sapiens
ggatgctttccccta

SEQ ID NO: 1053591 - DNA, 15 bp, Homo sapiens
gatgctttcccctat

SEQ ID NO: 1053592 - DNA, 15 bp, Homo sapiens
atgctttcccctatt

SEQ ID NO: 1053593 - DNA, 15 bp, Homo sapiens
tgctttcccctattt

SEQ ID NO: 1053594 - DNA, 15 bp, Homo sapiens
gctttcccctatttc

SEQ ID NO: 1053595 - DNA, 15 bp, Homo sapiens
ctttcccctatttca

SEQ ID NO: 1053596 - DNA, 15 bp, Homo sapiens
tttcccctatttcag

SEQ ID NO: 1053597 - DNA, 15 bp, Homo sapiens
ttcccctatttcagg

SEQ ID NO: 1053598 - DNA, 15 bp, Homo sapiens
tcccctatttcaggc

SEQ ID NO: 1053599 - DNA, 15 bp, Homo sapiens
cccctatttcaggca

SEQ ID NO: 1053600 - DNA, 15 bp, Homo sapiens
ccctatttcaggcag

SEQ ID NO: 1053601 - DNA, 15 bp, Homo sapiens
cctatttcaggcaga

SEQ ID NO: 1053602 - DNA, 15 bp, Homo sapiens
ctatttcaggcagaa

SEQ ID NO: 1053603 - DNA, 15 bp, Homo sapiens
tatttcaggcagaat

SEQ ID NO: 1053604 - DNA, 15 bp, Homo sapiens
atttcaggcagaatg

SEQ ID NO: 1053605 - DNA, 15 bp, Homo sapiens
tttcaggcagaatgg

SEQ ID NO: 1053606 - DNA, 15 bp, Homo sapiens
ttcaggcagaatgga

SEQ ID NO: 1053607 - DNA, 15 bp, Homo sapiens
tcaggcagaatggaa

SEQ ID NO: 1053608 - DNA, 15 bp, Homo sapiens
caggcagaatggaac

SEQ ID NO: 1053609 - DNA, 15 bp, Homo sapiens
aggcagaatggaaca

SEQ ID NO: 1053610 - DNA, 15 bp, Homo sapiens
ggcagaatggaacaa

SEQ ID NO: 1053611 - DNA, 15 bp, Homo sapiens
gcagaatggaacaac

SEQ ID NO: 1053612 - DNA, 15 bp, Homo sapiens
cagaatggaacaacc

SEQ ID NO: 1053613 - DNA, 15 bp, Homo sapiens
agaatggaacaacct

SEQ ID NO: 1053614 - DNA, 15 bp, Homo sapiens
gaatggaacaacctg

SEQ ID NO: 1053615 - DNA, 15 bp, Homo sapiens
aatggaacaacctgt

SEQ ID NO: 1053616 - DNA, 15 bp, Homo sapiens
atggaacaacctgtg

SEQ ID NO: 1053617 - DNA, 15 bp, Homo sapiens
tggaacaacctgtga

SEQ ID NO: 1053618 - DNA, 15 bp, Homo sapiens
ggaacaacctgtgaa

SEQ ID NO: 1053619 - DNA, 15 bp, Homo sapiens
gaacaacctgtgaat

SEQ ID NO: 1053620 - DNA, 15 bp, Homo sapiens
aacaacctgtgaatg

SEQ ID NO: 1053621 - DNA, 15 bp, Homo sapiens
acaacctgtgaatga

SEQ ID NO: 1053622 - DNA, 15 bp, Homo sapiens
caacctgtgaatgaa

SEQ ID NO: 1053623 - DNA, 15 bp, Homo sapiens
aacctgtgaatgaat

SEQ ID NO: 1053624 - DNA, 15 bp, Homo sapiens
acctgtgaatgaatg

SEQ ID NO: 1053625 - DNA, 15 bp, Homo sapiens
cctgtgaatgaatgg

SEQ ID NO: 1053626 - DNA, 15 bp, Homo sapiens
ctgtgaatgaatggt

SEQ ID NO: 1053627 - DNA, 15 bp, Homo sapiens
tgtgaatgaatggtt

SEQ ID NO: 1053628 - DNA, 15 bp, Homo sapiens
gtgaatgaatggttt

SEQ ID NO: 1053629 - DNA, 15 bp, Homo sapiens
tgaatgaatggtttg

SEQ ID NO: 1053630 - DNA, 15 bp, Homo sapiens
gaatgaatggtttgg

SEQ ID NO: 1053631 - DNA, 15 bp, Homo sapiens
aatgaatggtttgga

SEQ ID NO: 1053632 - DNA, 15 bp, Homo sapiens
atgaatggtttggag

SEQ ID NO: 1053633 - DNA, 15 bp, Homo sapiens
tgaatggtttggagc

SEQ ID NO: 1053634 - DNA, 15 bp, Homo sapiens
gaatggtttggagct

SEQ ID NO: 1053635 - DNA, 15 bp, Homo sapiens
aatggtttggagctg

SEQ ID NO: 1053636 - DNA, 15 bp, Homo sapiens
atggtttggagctgg

SEQ ID NO: 1053637 - DNA, 15 bp, Homo sapiens
tggtttggagctggg

SEQ ID NO: 1053638 - DNA, 15 bp, Homo sapiens
ggtttggagctgggg

SEQ ID NO: 1053639 - DNA, 15 bp, Homo sapiens
gtttggagctggggc

SEQ ID NO: 1053640 - DNA, 15 bp, Homo sapiens
tttggagctggggcc

SEQ ID NO: 1053641 - DNA, 15 bp, Homo sapiens
ttggagctggggcct

SEQ ID NO: 1053642 - DNA, 15 bp, Homo sapiens
tggagctggggcctg

SEQ ID NO: 1053643 - DNA, 15 bp, Homo sapiens
ggagctggggcctgg

SEQ ID NO: 1053644 - DNA, 15 bp, Homo sapiens
gagctggggcctggg

SEQ ID NO: 1053645 - DNA, 15 bp, Homo sapiens
agctggggcctggga

SEQ ID NO: 1053646 - DNA, 15 bp, Homo sapiens
gctggggcctgggac

SEQ ID NO: 1053647 - DNA, 15 bp, Homo sapiens
ctggggcctgggacg

SEQ ID NO: 1053648 - DNA, 15 bp, Homo sapiens
tggggcctgggacgc

SEQ ID NO: 1053649 - DNA, 15 bp, Homo sapiens
ggggcctgggacgcc

SEQ ID NO: 1053650 - DNA, 15 bp, Homo sapiens
gggcctgggacgccc

SEQ ID NO: 1053651 - DNA, 15 bp, Homo sapiens
ggcctgggacgcccg

SEQ ID NO: 1053652 - DNA, 15 bp, Homo sapiens
gcctgggacgcccgc

SEQ ID NO: 1053653 - DNA, 15 bp, Homo sapiens
cctgggacgcccgct

SEQ ID NO: 1053654 - DNA, 15 bp, Homo sapiens
ctgggacgcccgctg

SEQ ID NO: 1053655 - DNA, 15 bp, Homo sapiens
tgggacgcccgctgc

SEQ ID NO: 1053656 - DNA, 15 bp, Homo sapiens
gggacgcccgctgct

SEQ ID NO: 1053657 - DNA, 15 bp, Homo sapiens
ggacgcccgctgctg

SEQ ID NO: 1053658 - DNA, 15 bp, Homo sapiens
gacgcccgctgctgt

SEQ ID NO: 1053659 - DNA, 15 bp, Homo sapiens
acgcccgctgctgtc

SEQ ID NO: 1053660 - DNA, 15 bp, Homo sapiens
cgcccgctgctgtct

SEQ ID NO: 1053661 - DNA, 15 bp, Homo sapiens
gcccgctgctgtctc

SEQ ID NO: 1053662 - DNA, 15 bp, Homo sapiens
cccgctgctgtctcc

SEQ ID NO: 1053663 - DNA, 15 bp, Homo sapiens
ccgctgctgtctcct

SEQ ID NO: 1053664 - DNA, 15 bp, Homo sapiens
cgctgctgtctcctg

SEQ ID NO: 1053665 - DNA, 15 bp, Homo sapiens
gctgctgtctcctgg

SEQ ID NO: 1053666 - DNA, 15 bp, Homo sapiens
ctgctgtctcctggt

SEQ ID NO: 1053667 - DNA, 15 bp, Homo sapiens
tgctgtctcctggtc

SEQ ID NO: 1053668 - DNA, 15 bp, Homo sapiens
gctgtctcctggtcc

SEQ ID NO: 1053669 - DNA, 15 bp, Homo sapiens
ctgtctcctggtcct

SEQ ID NO: 1053670 - DNA, 15 bp, Homo sapiens
tgtctcctggtcctg

SEQ ID NO: 1053671 - DNA, 15 bp, Homo sapiens
gtctcctggtcctgt

SEQ ID NO: 1053672 - DNA, 15 bp, Homo sapiens
tctcctggtcctgtc

SEQ ID NO: 1053673 - DNA, 15 bp, Homo sapiens
ctcctggtcctgtct

SEQ ID NO: 1053674 - DNA, 15 bp, Homo sapiens
tcctggtcctgtctg

SEQ ID NO: 1053675 - DNA, 15 bp, Homo sapiens
cctggtcctgtctgg

SEQ ID NO: 1053676 - DNA, 15 bp, Homo sapiens
ctggtcctgtctggc

SEQ ID NO: 1053677 - DNA, 15 bp, Homo sapiens
tggtcctgtctggcc

SEQ ID NO: 1053678 - DNA, 15 bp, Homo sapiens
ggtcctgtctggccc

SEQ ID NO: 1053679 - DNA, 15 bp, Homo sapiens
gtcctgtctggcccg

SEQ ID NO: 1053680 - DNA, 15 bp, Homo sapiens
tcctgtctggcccgt

SEQ ID NO: 1053681 - DNA, 15 bp, Homo sapiens
cctgtctggcccgtc

SEQ ID NO: 1053682 - DNA, 15 bp, Homo sapiens
ctgtctggcccgtct

SEQ ID NO: 1053683 - DNA, 15 bp, Homo sapiens
tgtctggcccgtctg

SEQ ID NO: 1053684 - DNA, 15 bp, Homo sapiens
gtctggcccgtctgg

SEQ ID NO: 1053685 - DNA, 15 bp, Homo sapiens
tctggcccgtctggg

SEQ ID NO: 1053686 - DNA, 15 bp, Homo sapiens
ctggcccgtctgggc

SEQ ID NO: 1053687 - DNA, 15 bp, Homo sapiens
tggcccgtctgggca

SEQ ID NO: 1053688 - DNA, 15 bp, Homo sapiens
ggcccgtctgggcat

SEQ ID NO: 1053689 - DNA, 15 bp, Homo sapiens
gcccgtctgggcatt

SEQ ID NO: 1053690 - DNA, 15 bp, Homo sapiens
cccgtctgggcattg

SEQ ID NO: 1053691 - DNA, 15 bp, Homo sapiens
ccgtctgggcattgg

SEQ ID NO: 1053692 - DNA, 15 bp, Homo sapiens
cgtctgggcattggc

SEQ ID NO: 1053693 - DNA, 15 bp, Homo sapiens
gtctgggcattggcc

SEQ ID NO: 1053694 - DNA, 15 bp, Homo sapiens
tctgggcattggcct

SEQ ID NO: 1053695 - DNA, 15 bp, Homo sapiens
ctgggcattggcctc

SEQ ID NO: 1053696 - DNA, 15 bp, Homo sapiens
tgggcattggcctct

SEQ ID NO: 1053697 - DNA, 15 bp, Homo sapiens
gggcattggcctctg

SEQ ID NO: 1053698 - DNA, 15 bp, Homo sapiens
ggcattggcctctgc

SEQ ID NO: 1053699 - DNA, 15 bp, Homo sapiens
gcattggcctctgct

SEQ ID NO: 1053700 - DNA, 15 bp, Homo sapiens
cattggcctctgctt

SEQ ID NO: 1053701 - DNA, 15 bp, Homo sapiens
attggcctctgcttg

SEQ ID NO: 1053702 - DNA, 15 bp, Homo sapiens
ttggcctctgcttgc

SEQ ID NO: 1053703 - DNA, 15 bp, Homo sapiens
tggcctctgcttgct

SEQ ID NO: 1053704 - DNA, 15 bp, Homo sapiens
ggcctctgcttgctt

SEQ ID NO: 1053705 - DNA, 15 bp, Homo sapiens
gcctctgcttgcttc

SEQ ID NO: 1053706 - DNA, 15 bp, Homo sapiens
cctctgcttgcttca

SEQ ID NO: 1053707 - DNA, 15 bp, Homo sapiens
ctctgcttgcttcat

SEQ ID NO: 1053708 - DNA, 15 bp, Homo sapiens
tctgcttgcttcatt

SEQ ID NO: 1053709 - DNA, 15 bp, Homo sapiens
ctgcttgcttcattc

SEQ ID NO: 1053710 - DNA, 15 bp, Homo sapiens
tgcttgcttcattct

SEQ ID NO: 1053711 - DNA, 15 bp, Homo sapiens
gcttgcttcattctt

SEQ ID NO: 1053712 - DNA, 15 bp, Homo sapiens
cttgcttcattcttt

SEQ ID NO: 1053713 - DNA, 15 bp, Homo sapiens
ttgcttcattctttg

SEQ ID NO: 1053714 - DNA, 15 bp, Homo sapiens
tgcttcattctttgc

SEQ ID NO: 1053715 - DNA, 15 bp, Homo sapiens
gcttcattctttgct

SEQ ID NO: 1053716 - DNA, 15 bp, Homo sapiens
cttcattctttgctg

SEQ ID NO: 1053717 - DNA, 15 bp, Homo sapiens
ttcattctttgctgg

SEQ ID NO: 1053718 - DNA, 15 bp, Homo sapiens
tcattctttgctggt

SEQ ID NO: 1053719 - DNA, 15 bp, Homo sapiens
cattctttgctggta

SEQ ID NO: 1053720 - DNA, 15 bp, Homo sapiens
attctttgctggtat

SEQ ID NO: 1053721 - DNA, 15 bp, Homo sapiens
ttctttgctggtatc

SEQ ID NO: 1053722 - DNA, 15 bp, Homo sapiens
tctttgctggtatcg

SEQ ID NO: 1053723 - DNA, 15 bp, Homo sapiens
ctttgctggtatcgg

SEQ ID NO: 1053724 - DNA, 15 bp, Homo sapiens
tttgctggtatcggc

SEQ ID NO: 1053725 - DNA, 15 bp, Homo sapiens
ttgctggtatcggcg

SEQ ID NO: 1053726 - DNA, 15 bp, Homo sapiens
tgctggtatcggcgg

SEQ ID NO: 1053727 - DNA, 15 bp, Homo sapiens
gctggtatcggcggg

SEQ ID NO: 1053728 - DNA, 15 bp, Homo sapiens
ctggtatcggcgggg

SEQ ID NO: 1053729 - DNA, 15 bp, Homo sapiens
tggtatcggcgggga

SEQ ID NO: 1053730 - DNA, 15 bp, Homo sapiens
ggtatcggcggggat

SEQ ID NO: 1053731 - DNA, 15 bp, Homo sapiens
gtatcggcggggatt

SEQ ID NO: 1053732 - DNA, 15 bp, Homo sapiens
tatcggcggggattt

SEQ ID NO: 1053733 - DNA, 15 bp, Homo sapiens
atcggcggggatttc

SEQ ID NO: 1053734 - DNA, 15 bp, Homo sapiens
tcggcggggatttct

SEQ ID NO: 1053735 - DNA, 15 bp, Homo sapiens
cggcggggatttctg

SEQ ID NO: 1053736 - DNA, 15 bp, Homo sapiens
ggcggggatttctgc

SEQ ID NO: 1053737 - DNA, 15 bp, Homo sapiens
gcggggatttctgct

SEQ ID NO: 1053738 - DNA, 15 bp, Homo sapiens
cggggatttctgctc

SEQ ID NO: 1053739 - DNA, 15 bp, Homo sapiens
ggggatttctgctcc

SEQ ID NO: 1053740 - DNA, 15 bp, Homo sapiens
gggatttctgctcct

SEQ ID NO: 1053741 - DNA, 15 bp, Homo sapiens
ggatttctgctccta

SEQ ID NO: 1053742 - DNA, 15 bp, Homo sapiens
gatttctgctcctaa

SEQ ID NO: 1053743 - DNA, 15 bp, Homo sapiens
atttctgctcctaag

SEQ ID NO: 1053744 - DNA, 15 bp, Homo sapiens
tttctgctcctaagg

SEQ ID NO: 1053745 - DNA, 15 bp, Homo sapiens
ttctgctcctaaggt

SEQ ID NO: 1053746 - DNA, 15 bp, Homo sapiens
tctgctcctaaggtt

SEQ ID NO: 1053747 - DNA, 15 bp, Homo sapiens
ctgctcctaaggttg

SEQ ID NO: 1053748 - DNA, 15 bp, Homo sapiens
tgctcctaaggttga

SEQ ID NO: 1053749 - DNA, 15 bp, Homo sapiens
gctcctaaggttgag

SEQ ID NO: 1053750 - DNA, 15 bp, Homo sapiens
ctcctaaggttgagg

SEQ ID NO: 1053751 - DNA, 15 bp, Homo sapiens
tcctaaggttgagga

SEQ ID NO: 1053752 - DNA, 15 bp, Homo sapiens
cctaaggttgaggat

SEQ ID NO: 1053753 - DNA, 15 bp, Homo sapiens
ctaaggttgaggatg

SEQ ID NO: 1053754 - DNA, 15 bp, Homo sapiens
taaggttgaggatgt

SEQ ID NO: 1053755 - DNA, 15 bp, Homo sapiens
aaggttgaggatgtt

SEQ ID NO: 1053756 - DNA, 15 bp, Homo sapiens
aggttgaggatgtta

SEQ ID NO: 1053757 - DNA, 15 bp, Homo sapiens
ggttgaggatgttac

SEQ ID NO: 1053758 - DNA, 15 bp, Homo sapiens
gttgaggatgttaca

SEQ ID NO: 1053759 - DNA, 15 bp, Homo sapiens
ttgaggatgttacac

SEQ ID NO: 1053760 - DNA, 15 bp, Homo sapiens
tgaggatgttacaca

SEQ ID NO: 1053761 - DNA, 15 bp, Homo sapiens
gaggatgttacacac

SEQ ID NO: 1053762 - DNA, 15 bp, Homo sapiens
aggatgttacacacc

SEQ ID NO: 1053763 - DNA, 15 bp, Homo sapiens
ggatgttacacaccc

SEQ ID NO: 1053764 - DNA, 15 bp, Homo sapiens
gatgttacacaccca

SEQ ID NO: 1053765 - DNA, 15 bp, Homo sapiens
atgttacacacccaa

SEQ ID NO: 1053766 - DNA, 15 bp, Homo sapiens
tgttacacacccaat

SEQ ID NO: 1053767 - DNA, 15 bp, Homo sapiens
gttacacacccaata

SEQ ID NO: 1053768 - DNA, 15 bp, Homo sapiens
ttacacacccaatag

SEQ ID NO: 1053769 - DNA, 15 bp, Homo sapiens
tacacacccaatagg

SEQ ID NO: 1053770 - DNA, 15 bp, Homo sapiens
acacacccaataggt

SEQ ID NO: 1053771 - DNA, 15 bp, Homo sapiens
cacacccaataggtg

SEQ ID NO: 1053772 - DNA, 15 bp, Homo sapiens
acacccaataggtgt

SEQ ID NO: 1053773 - DNA, 15 bp, Homo sapiens
cacccaataggtgtg

SEQ ID NO: 1053774 - DNA, 15 bp, Homo sapiens
acccaataggtgtgc

SEQ ID NO: 1053775 - DNA, 15 bp, Homo sapiens
cccaataggtgtgct

SEQ ID NO: 1053776 - DNA, 15 bp, Homo sapiens
ccaataggtgtgcta

SEQ ID NO: 1053777 - DNA, 15 bp, Homo sapiens
caataggtgtgctac

SEQ ID NO: 1053778 - DNA, 15 bp, Homo sapiens
aataggtgtgctaca

SEQ ID NO: 1053779 - DNA, 15 bp, Homo sapiens
ataggtgtgctacag

SEQ ID NO: 1053780 - DNA, 15 bp, Homo sapiens
taggtgtgctacagc

SEQ ID NO: 1053781 - DNA, 15 bp, Homo sapiens
aggtgtgctacagca

SEQ ID NO: 1053782 - DNA, 15 bp, Homo sapiens
ggtgtgctacagcaa

SEQ ID NO: 1053783 - DNA, 15 bp, Homo sapiens
gtgtgctacagcaac

SEQ ID NO: 1053784 - DNA, 15 bp, Homo sapiens
tgtgctacagcaact

SEQ ID NO: 1053785 - DNA, 15 bp, Homo sapiens
gtgctacagcaactg

SEQ ID NO: 1053786 - DNA, 15 bp, Homo sapiens
tgctacagcaactgt

SEQ ID NO: 1053787 - DNA, 15 bp, Homo sapiens
gctacagcaactgtc

SEQ ID NO: 1053788 - DNA, 15 bp, Homo sapiens
ctacagcaactgtcg

SEQ ID NO: 1053789 - DNA, 15 bp, Homo sapiens
tacagcaactgtcgc

SEQ ID NO: 1053790 - DNA, 15 bp, Homo sapiens
acagcaactgtcgca

SEQ ID NO: 1053791 - DNA, 15 bp, Homo sapiens
cagcaactgtcgcaa

SEQ ID NO: 1053792 - DNA, 15 bp, Homo sapiens
agcaactgtcgcaag

SEQ ID NO: 1053793 - DNA, 15 bp, Homo sapiens
gcaactgtcgcaagt

SEQ ID NO: 1053794 - DNA, 15 bp, Homo sapiens
caactgtcgcaagtg

SEQ ID NO: 1053795 - DNA, 15 bp, Homo sapiens
aactgtcgcaagtgg

SEQ ID NO: 1053796 - DNA, 15 bp, Homo sapiens
actgtcgcaagtggc

SEQ ID NO: 1053797 - DNA, 15 bp, Homo sapiens
ctgtcgcaagtggca

SEQ ID NO: 1053798 - DNA, 15 bp, Homo sapiens
tgtcgcaagtggcag

SEQ ID NO: 1053799 - DNA, 15 bp, Homo sapiens
gtcgcaagtggcaga

SEQ ID NO: 1053800 - DNA, 15 bp, Homo sapiens
tcgcaagtggcagat

SEQ ID NO: 1053801 - DNA, 15 bp, Homo sapiens
cgcaagtggcagatg

SEQ ID NO: 1053802 - DNA, 15 bp, Homo sapiens
gcaagtggcagatgc

SEQ ID NO: 1053803 - DNA, 15 bp, Homo sapiens
caagtggcagatgct

SEQ ID NO: 1053804 - DNA, 15 bp, Homo sapiens
aagtggcagatgctg

SEQ ID NO: 1053805 - DNA, 15 bp, Homo sapiens
agtggcagatgctgg

SEQ ID NO: 1053806 - DNA, 15 bp, Homo sapiens
gtggcagatgctgga

SEQ ID NO: 1053807 - DNA, 15 bp, Homo sapiens
tggcagatgctggac

SEQ ID NO: 1053808 - DNA, 15 bp, Homo sapiens
ggcagatgctggact

SEQ ID NO: 1053809 - DNA, 15 bp, Homo sapiens
gcagatgctggactc

SEQ ID NO: 1053810 - DNA, 15 bp, Homo sapiens
cagatgctggactcc

SEQ ID NO: 1053811 - DNA, 15 bp, Homo sapiens
agatgctggactcca

SEQ ID NO: 1053812 - DNA, 15 bp, Homo sapiens
gatgctggactccac

SEQ ID NO: 1053813 - DNA, 15 bp, Homo sapiens
atgctggactccacc

SEQ ID NO: 1053814 - DNA, 15 bp, Homo sapiens
tgctggactccacct

SEQ ID NO: 1053815 - DNA, 15 bp, Homo sapiens
gctggactccacctg

SEQ ID NO: 1053816 - DNA, 15 bp, Homo sapiens
ctggactccacctga

SEQ ID NO: 1053817 - DNA, 15 bp, Homo sapiens
tggactccacctgat

SEQ ID NO: 1053818 - DNA, 15 bp, Homo sapiens
ggactccacctgatt

SEQ ID NO: 1053819 - DNA, 15 bp, Homo sapiens
gactccacctgattt

SEQ ID NO: 1053820 - DNA, 15 bp, Homo sapiens
actccacctgattta

SEQ ID NO: 1053821 - DNA, 15 bp, Homo sapiens
ctccacctgatttag

SEQ ID NO: 1053822 - DNA, 15 bp, Homo sapiens
tccacctgatttagg

SEQ ID NO: 1053823 - DNA, 15 bp, Homo sapiens
ccacctgatttaggc

SEQ ID NO: 1053824 - DNA, 15 bp, Homo sapiens
cacctgatttaggcc

SEQ ID NO: 1053825 - DNA, 15 bp, Homo sapiens
acctgatttaggcca

SEQ ID NO: 1053826 - DNA, 15 bp, Homo sapiens
cctgatttaggccaa

SEQ ID NO: 1053827 - DNA, 15 bp, Homo sapiens
ctgatttaggccaaa

SEQ ID NO: 1053828 - DNA, 15 bp, Homo sapiens
tgatttaggccaaaa

SEQ ID NO: 1053829 - DNA, 15 bp, Homo sapiens
gatttaggccaaaag

SEQ ID NO: 1053830 - DNA, 15 bp, Homo sapiens
atttaggccaaaagg

SEQ ID NO: 1053831 - DNA, 15 bp, Homo sapiens
tttaggccaaaaggg

SEQ ID NO: 1053832 - DNA, 15 bp, Homo sapiens
ttaggccaaaagggc

SEQ ID NO: 1053833 - DNA, 15 bp, Homo sapiens
taggccaaaagggca

SEQ ID NO: 1053834 - DNA, 15 bp, Homo sapiens
aggccaaaagggcac

SEQ ID NO: 1053835 - DNA, 15 bp, Homo sapiens
ggccaaaagggcact

SEQ ID NO: 1053836 - DNA, 15 bp, Homo sapiens
gccaaaagggcactt

SEQ ID NO: 1053837 - DNA, 15 bp, Homo sapiens
ccaaaagggcacttc

SEQ ID NO: 1053838 - DNA, 15 bp, Homo sapiens
caaaagggcacttct

SEQ ID NO: 1053839 - DNA, 15 bp, Homo sapiens
aaaagggcacttctt

SEQ ID NO: 1053840 - DNA, 15 bp, Homo sapiens
aaagggcacttcttg

SEQ ID NO: 1053841 - DNA, 15 bp, Homo sapiens
aagggcacttcttgg

SEQ ID NO: 1053842 - DNA, 15 bp, Homo sapiens
agggcacttcttggt

SEQ ID NO: 1053843 - DNA, 15 bp, Homo sapiens
gggcacttcttggtt

SEQ ID NO: 1053844 - DNA, 15 bp, Homo sapiens
ggcacttcttggttt

SEQ ID NO: 1053845 - DNA, 15 bp, Homo sapiens
gcacttcttggtttg

SEQ ID NO: 1053846 - DNA, 15 bp, Homo sapiens
cacttcttggtttgc

SEQ ID NO: 1053847 - DNA, 15 bp, Homo sapiens
acttcttggtttgcg

SEQ ID NO: 1053848 - DNA, 15 bp, Homo sapiens
cttcttggtttgcgt

SEQ ID NO: 1053849 - DNA, 15 bp, Homo sapiens
ttcttggtttgcgta

SEQ ID NO: 1053850 - DNA, 15 bp, Homo sapiens
tcttggtttgcgtaa

SEQ ID NO: 1053851 - DNA, 15 bp, Homo sapiens
cttggtttgcgtaat

SEQ ID NO: 1053852 - DNA, 15 bp, Homo sapiens
ttggtttgcgtaatg

SEQ ID NO: 1053853 - DNA, 15 bp, Homo sapiens
tggtttgcgtaatga

SEQ ID NO: 1053854 - DNA, 15 bp, Homo sapiens
ggtttgcgtaatgaa

SEQ ID NO: 1053855 - DNA, 15 bp, Homo sapiens
gtttgcgtaatgaaa

SEQ ID NO: 1053856 - DNA, 15 bp, Homo sapiens
tttgcgtaatgaaaa

SEQ ID NO: 1053857 - DNA, 15 bp, Homo sapiens
ttgcgtaatgaaaaa

SEQ ID NO: 1053858 - DNA, 15 bp, Homo sapiens
tgcgtaatgaaaaat

SEQ ID NO: 1053859 - DNA, 15 bp, Homo sapiens
gcgtaatgaaaaatt

SEQ ID NO: 1053860 - DNA, 15 bp, Homo sapiens
cgtaatgaaaaattc

SEQ ID NO: 1053861 - DNA, 15 bp, Homo sapiens
gtaatgaaaaattcc

SEQ ID NO: 1053862 - DNA, 15 bp, Homo sapiens
taatgaaaaattcca

SEQ ID NO: 1053863 - DNA, 15 bp, Homo sapiens
aatgaaaaattccag

SEQ ID NO: 1053864 - DNA, 15 bp, Homo sapiens
atgaaaaattccagg

SEQ ID NO: 1053865 - DNA, 15 bp, Homo sapiens
tgaaaaattccaggg

SEQ ID NO: 1053866 - DNA, 15 bp, Homo sapiens
gaaaaattccagggc

SEQ ID NO: 1053867 - DNA, 15 bp, Homo sapiens
aaaaattccagggca

SEQ ID NO: 1053868 - DNA, 15 bp, Homo sapiens
aaaattccagggcag

SEQ ID NO: 1053869 - DNA, 15 bp, Homo sapiens
aaattccagggcaga

SEQ ID NO: 1053870 - DNA, 15 bp, Homo sapiens
aattccagggcagat

SEQ ID NO: 1053871 - DNA, 15 bp, Homo sapiens
attccagggcagatc

SEQ ID NO: 1053872 - DNA, 15 bp, Homo sapiens
ttccagggcagatct

SEQ ID NO: 1053873 - DNA, 15 bp, Homo sapiens
tccagggcagatctc

SEQ ID NO: 1053874 - DNA, 15 bp, Homo sapiens
ccagggcagatctct

SEQ ID NO: 1053875 - DNA, 15 bp, Homo sapiens
cagggcagatctctg

SEQ ID NO: 1053876 - DNA, 15 bp, Homo sapiens
agggcagatctctgc

SEQ ID NO: 1053877 - DNA, 15 bp, Homo sapiens
gggcagatctctgca

SEQ ID NO: 1053878 - DNA, 15 bp, Homo sapiens
ggcagatctctgcat

SEQ ID NO: 1053879 - DNA, 15 bp, Homo sapiens
gcagatctctgcatt

SEQ ID NO: 1053880 - DNA, 15 bp, Homo sapiens
cagatctctgcatta

SEQ ID NO: 1053881 - DNA, 15 bp, Homo sapiens
agatctctgcattag

SEQ ID NO: 1053882 - DNA, 15 bp, Homo sapiens
gatctctgcattagg

SEQ ID NO: 1053883 - DNA, 15 bp, Homo sapiens
atctctgcattaggc

SEQ ID NO: 1053884 - DNA, 15 bp, Homo sapiens
tctctgcattaggca

SEQ ID NO: 1053885 - DNA, 15 bp, Homo sapiens
ctctgcattaggcac

SEQ ID NO: 1053886 - DNA, 15 bp, Homo sapiens
tctgcattaggcaca

SEQ ID NO: 1053887 - DNA, 15 bp, Homo sapiens
ctgcattaggcacaa

SEQ ID NO: 1053888 - DNA, 15 bp, Homo sapiens
tgcattaggcacaaa

SEQ ID NO: 1053889 - DNA, 15 bp, Homo sapiens
gcattaggcacaaat

SEQ ID NO: 1053890 - DNA, 15 bp, Homo sapiens
cattaggcacaaatc

SEQ ID NO: 1053891 - DNA, 15 bp, Homo sapiens
attaggcacaaatcc

SEQ ID NO: 1053892 - DNA, 15 bp, Homo sapiens
ttaggcacaaatcca

SEQ ID NO: 1053893 - DNA, 15 bp, Homo sapiens
taggcacaaatccag

SEQ ID NO: 1053894 - DNA, 15 bp, Homo sapiens
aggcacaaatccaga

SEQ ID NO: 1053895 - DNA, 15 bp, Homo sapiens
ggcacaaatccagaa

SEQ ID NO: 1053896 - DNA, 15 bp, Homo sapiens
gcacaaatccagaac

SEQ ID NO: 1053897 - DNA, 15 bp, Homo sapiens
cacaaatccagaact

SEQ ID NO: 1053898 - DNA, 15 bp, Homo sapiens
acaaatccagaactt

SEQ ID NO: 1053899 - DNA, 15 bp, Homo sapiens
caaatccagaactta

SEQ ID NO: 1053900 - DNA, 15 bp, Homo sapiens
aaatccagaacttag

SEQ ID NO: 1053901 - DNA, 15 bp, Homo sapiens
aatccagaacttaga

SEQ ID NO: 1053902 - DNA, 15 bp, Homo sapiens
atccagaacttagat

SEQ ID NO: 1053903 - DNA, 15 bp, Homo sapiens
tccagaacttagatg

SEQ ID NO: 1053904 - DNA, 15 bp, Homo sapiens
ccagaacttagatgt

SEQ ID NO: 1053905 - DNA, 15 bp, Homo sapiens
cagaacttagatgtt

SEQ ID NO: 1053906 - DNA, 15 bp, Homo sapiens
agaacttagatgttg

SEQ ID NO: 1053907 - DNA, 15 bp, Homo sapiens
gaacttagatgttgt

SEQ ID NO: 1053908 - DNA, 15 bp, Homo sapiens
aacttagatgttgtc

SEQ ID NO: 1053909 - DNA, 15 bp, Homo sapiens
acttagatgttgtct

SEQ ID NO: 1053910 - DNA, 15 bp, Homo sapiens
cttagatgttgtctg

SEQ ID NO: 1053911 - DNA, 15 bp, Homo sapiens
ttagatgttgtctgg

SEQ ID NO: 1053912 - DNA, 15 bp, Homo sapiens
tagatgttgtctgga

SEQ ID NO: 1053913 - DNA, 15 bp, Homo sapiens
agatgttgtctggaa

SEQ ID NO: 1053914 - DNA, 15 bp, Homo sapiens
gatgttgtctggaag

SEQ ID NO: 1053915 - DNA, 15 bp, Homo sapiens
atgttgtctggaagc

SEQ ID NO: 1053916 - DNA, 15 bp, Homo sapiens
tgttgtctggaagct

SEQ ID NO: 1053917 - DNA, 15 bp, Homo sapiens
gttgtctggaagctg

SEQ ID NO: 1053918 - DNA, 15 bp, Homo sapiens
ttgtctggaagctgc

SEQ ID NO: 1053919 - DNA, 15 bp, Homo sapiens
tgtctggaagctgcc

SEQ ID NO: 1053920 - DNA, 15 bp, Homo sapiens
gtctggaagctgcct

SEQ ID NO: 1053921 - DNA, 15 bp, Homo sapiens
tctggaagctgcctc

SEQ ID NO: 1053922 - DNA, 15 bp, Homo sapiens
ctggaagctgcctct

SEQ ID NO: 1053923 - DNA, 15 bp, Homo sapiens
tggaagctgcctctg

SEQ ID NO: 1053924 - DNA, 15 bp, Homo sapiens
ggaagctgcctctgc

SEQ ID NO: 1053925 - DNA, 15 bp, Homo sapiens
gaagctgcctctgcc

SEQ ID NO: 1053926 - DNA, 15 bp, Homo sapiens
aagctgcctctgcca

SEQ ID NO: 1053927 - DNA, 15 bp, Homo sapiens
agctgcctctgccaa

SEQ ID NO: 1053928 - DNA, 15 bp, Homo sapiens
gctgcctctgccaag

SEQ ID NO: 1053929 - DNA, 15 bp, Homo sapiens
ctgcctctgccaagt

SEQ ID NO: 1053930 - DNA, 15 bp, Homo sapiens
tgcctctgccaagtc

SEQ ID NO: 1053931 - DNA, 15 bp, Homo sapiens
gcctctgccaagtcc

SEQ ID NO: 1053932 - DNA, 15 bp, Homo sapiens
cctctgccaagtccc

SEQ ID NO: 1053933 - DNA, 15 bp, Homo sapiens
ctctgccaagtccca

SEQ ID NO: 1053934 - DNA, 15 bp, Homo sapiens
tctgccaagtcccag

SEQ ID NO: 1053935 - DNA, 15 bp, Homo sapiens
ctgccaagtcccagc

SEQ ID NO: 1053936 - DNA, 15 bp, Homo sapiens
tgccaagtcccagct

SEQ ID NO: 1053937 - DNA, 15 bp, Homo sapiens
gccaagtcccagctc

SEQ ID NO: 1053938 - DNA, 15 bp, Homo sapiens
ccaagtcccagctca

SEQ ID NO: 1053939 - DNA, 15 bp, Homo sapiens
caagtcccagctcag

SEQ ID NO: 1053940 - DNA, 15 bp, Homo sapiens
aagtcccagctcagt

SEQ ID NO: 1053941 - DNA, 15 bp, Homo sapiens
agtcccagctcagtt

SEQ ID NO: 1053942 - DNA, 15 bp, Homo sapiens
gtcccagctcagttt

SEQ ID NO: 1053943 - DNA, 15 bp, Homo sapiens
tcccagctcagtttt

SEQ ID NO: 1053944 - DNA, 15 bp, Homo sapiens
cccagctcagttttc

SEQ ID NO: 1053945 - DNA, 15 bp, Homo sapiens
ccagctcagttttct

SEQ ID NO: 1053946 - DNA, 15 bp, Homo sapiens
cagctcagttttctg

SEQ ID NO: 1053947 - DNA, 15 bp, Homo sapiens
agctcagttttctgc

SEQ ID NO: 1053948 - DNA, 15 bp, Homo sapiens
gctcagttttctgct

SEQ ID NO: 1053949 - DNA, 15 bp, Homo sapiens
ctcagttttctgctg

SEQ ID NO: 1053950 - DNA, 15 bp, Homo sapiens
tcagttttctgctgg

SEQ ID NO: 1053951 - DNA, 15 bp, Homo sapiens
cagttttctgctgga

SEQ ID NO: 1053952 - DNA, 15 bp, Homo sapiens
agttttctgctggac

SEQ ID NO: 1053953 - DNA, 15 bp, Homo sapiens
gttttctgctggact

SEQ ID NO: 1053954 - DNA, 15 bp, Homo sapiens
ttttctgctggactg

SEQ ID NO: 1053955 - DNA, 15 bp, Homo sapiens
tttctgctggactgg

SEQ ID NO: 1053956 - DNA, 15 bp, Homo sapiens
ttctgctggactggc

SEQ ID NO: 1053957 - DNA, 15 bp, Homo sapiens
tctgctggactggct

SEQ ID NO: 1053958 - DNA, 15 bp, Homo sapiens
ctgctggactggctt

SEQ ID NO: 1053959 - DNA, 15 bp, Homo sapiens
tgctggactggcttt

SEQ ID NO: 1053960 - DNA, 15 bp, Homo sapiens
gctggactggctttg

SEQ ID NO: 1053961 - DNA, 15 bp, Homo sapiens
ctggactggctttgc

SEQ ID NO: 1053962 - DNA, 15 bp, Homo sapiens
tggactggctttgct

SEQ ID NO: 1053963 - DNA, 15 bp, Homo sapiens
ggactggctttgctg

SEQ ID NO: 1053964 - DNA, 15 bp, Homo sapiens
gactggctttgctgc

SEQ ID NO: 1053965 - DNA, 15 bp, Homo sapiens
actggctttgctgcc

SEQ ID NO: 1053966 - DNA, 15 bp, Homo sapiens
ctggctttgctgcca

SEQ ID NO: 1053967 - DNA, 15 bp, Homo sapiens
tggctttgctgccaa

SEQ ID NO: 1053968 - DNA, 15 bp, Homo sapiens
ggctttgctgccaag

SEQ ID NO: 1053969 - DNA, 15 bp, Homo sapiens
gctttgctgccaagc

SEQ ID NO: 1053970 - DNA, 15 bp, Homo sapiens
ctttgctgccaagca

SEQ ID NO: 1053971 - DNA, 15 bp, Homo sapiens
tttgctgccaagcag

SEQ ID NO: 1053972 - DNA, 15 bp, Homo sapiens
ttgctgccaagcagg

SEQ ID NO: 1053973 - DNA, 15 bp, Homo sapiens
tgctgccaagcaggc

SEQ ID NO: 1053974 - DNA, 15 bp, Homo sapiens
gctgccaagcaggct

SEQ ID NO: 1053975 - DNA, 15 bp, Homo sapiens
ctgccaagcaggctc

SEQ ID NO: 1053976 - DNA, 15 bp, Homo sapiens
tgccaagcaggctct

SEQ ID NO: 1053977 - DNA, 15 bp, Homo sapiens
gccaagcaggctctc

SEQ ID NO: 1053978 - DNA, 15 bp, Homo sapiens
ccaagcaggctctcc

SEQ ID NO: 1053979 - DNA, 15 bp, Homo sapiens
caagcaggctctccc

SEQ ID NO: 1053980 - DNA, 15 bp, Homo sapiens
aagcaggctctccct

SEQ ID NO: 1053981 - DNA, 15 bp, Homo sapiens
agcaggctctccctc

SEQ ID NO: 1053982 - DNA, 15 bp, Homo sapiens
gcaggctctccctcc

SEQ ID NO: 1053983 - DNA, 15 bp, Homo sapiens
caggctctccctcct

SEQ ID NO: 1053984 - DNA, 15 bp, Homo sapiens
aggctctccctcctg

SEQ ID NO: 1053985 - DNA, 15 bp, Homo sapiens
ggctctccctcctgg

SEQ ID NO: 1053986 - DNA, 15 bp, Homo sapiens
gctctccctcctggc

SEQ ID NO: 1053987 - DNA, 15 bp, Homo sapiens
ctctccctcctggct

SEQ ID NO: 1053988 - DNA, 15 bp, Homo sapiens
tctccctcctggctg

SEQ ID NO: 1053989 - DNA, 15 bp, Homo sapiens
ctccctcctggctgc

SEQ ID NO: 1053990 - DNA, 15 bp, Homo sapiens
tccctcctggctgcc

SEQ ID NO: 1053991 - DNA, 15 bp, Homo sapiens
ccctcctggctgcct

SEQ ID NO: 1053992 - DNA, 15 bp, Homo sapiens
cctcctggctgcctg

SEQ ID NO: 1053993 - DNA, 15 bp, Homo sapiens
ctcctggctgcctgt

SEQ ID NO: 1053994 - DNA, 15 bp, Homo sapiens
tcctggctgcctgtg

SEQ ID NO: 1053995 - DNA, 15 bp, Homo sapiens
cctggctgcctgtgg

SEQ ID NO: 1053996 - DNA, 15 bp, Homo sapiens
ctggctgcctgtgga

SEQ ID NO: 1053997 - DNA, 15 bp, Homo sapiens
tggctgcctgtggag

SEQ ID NO: 1053998 - DNA, 15 bp, Homo sapiens
ggctgcctgtggagg

SEQ ID NO: 1053999 - DNA, 15 bp, Homo sapiens
gctgcctgtggaggc

SEQ ID NO: 1054000 - DNA, 15 bp, Homo sapiens
ctgcctgtggaggct

SEQ ID NO: 1054001 - DNA, 15 bp, Homo sapiens
tgcctgtggaggctc

SEQ ID NO: 1054002 - DNA, 15 bp, Homo sapiens
gcctgtggaggctcc

SEQ ID NO: 1054003 - DNA, 15 bp, Homo sapiens
cctgtggaggctcca

SEQ ID NO: 1054004 - DNA, 15 bp, Homo sapiens
ctgtggaggctccag

SEQ ID NO: 1054005 - DNA, 15 bp, Homo sapiens
tgtggaggctccagg

SEQ ID NO: 1054006 - DNA, 15 bp, Homo sapiens
gtggaggctccaggc

SEQ ID NO: 1054007 - DNA, 15 bp, Homo sapiens
tggaggctccaggct

SEQ ID NO: 1054008 - DNA, 15 bp, Homo sapiens
ggaggctccaggctc

SEQ ID NO: 1054009 - DNA, 15 bp, Homo sapiens
gaggctccaggctca

SEQ ID NO: 1054010 - DNA, 15 bp, Homo sapiens
aggctccaggctcac

SEQ ID NO: 1054011 - DNA, 15 bp, Homo sapiens
ggctccaggctcacc

SEQ ID NO: 1054012 - DNA, 15 bp, Homo sapiens
gctccaggctcacct

SEQ ID NO: 1054013 - DNA, 15 bp, Homo sapiens
ctccaggctcacctc

SEQ ID NO: 1054014 - DNA, 15 bp, Homo sapiens
tccaggctcacctcc

SEQ ID NO: 1054015 - DNA, 15 bp, Homo sapiens
ccaggctcacctccg

SEQ ID NO: 1054016 - DNA, 15 bp, Homo sapiens
caggctcacctccgc

SEQ ID NO: 1054017 - DNA, 15 bp, Homo sapiens
aggctcacctccgcc

SEQ ID NO: 1054018 - DNA, 15 bp, Homo sapiens
ggctcacctccgccc

SEQ ID NO: 1054019 - DNA, 15 bp, Homo sapiens
gctcacctccgccca

SEQ ID NO: 1054020 - DNA, 15 bp, Homo sapiens
ctcacctccgcccag

SEQ ID NO: 1054021 - DNA, 15 bp, Homo sapiens
tcacctccgcccagc

SEQ ID NO: 1054022 - DNA, 15 bp, Homo sapiens
cacctccgcccagct

SEQ ID NO: 1054023 - DNA, 15 bp, Homo sapiens
acctccgcccagctc

SEQ ID NO: 1054024 - DNA, 15 bp, Homo sapiens
cctccgcccagctcc

SEQ ID NO: 1054025 - DNA, 15 bp, Homo sapiens
ctccgcccagctccg

SEQ ID NO: 1054026 - DNA, 15 bp, Homo sapiens
tccgcccagctccga

SEQ ID NO: 1054027 - DNA, 15 bp, Homo sapiens
ccgcccagctccgag

SEQ ID NO: 1054028 - DNA, 15 bp, Homo sapiens
cgcccagctccgagt

SEQ ID NO: 1054029 - DNA, 15 bp, Homo sapiens
gcccagctccgagtc

SEQ ID NO: 1054030 - DNA, 15 bp, Homo sapiens
cccagctccgagtcc

SEQ ID NO: 1054031 - DNA, 15 bp, Homo sapiens
ccagctccgagtcct

SEQ ID NO: 1054032 - DNA, 15 bp, Homo sapiens
cagctccgagtcctg

SEQ ID NO: 1054033 - DNA, 15 bp, Homo sapiens
agctccgagtcctgc

SEQ ID NO: 1054034 - DNA, 15 bp, Homo sapiens
gctccgagtcctgca

SEQ ID NO: 1054035 - DNA, 15 bp, Homo sapiens
ctccgagtcctgcag

SEQ ID NO: 1054036 - DNA, 15 bp, Homo sapiens
tccgagtcctgcaga

SEQ ID NO: 1054037 - DNA, 15 bp, Homo sapiens
ccgagtcctgcagaa

SEQ ID NO: 1054038 - DNA, 15 bp, Homo sapiens
cgagtcctgcagaaa

SEQ ID NO: 1054039 - DNA, 15 bp, Homo sapiens
gagtcctgcagaaag

SEQ ID NO: 1054040 - DNA, 15 bp, Homo sapiens
agtcctgcagaaagg

SEQ ID NO: 1054041 - DNA, 15 bp, Homo sapiens
gtcctgcagaaaggg

SEQ ID NO: 1054042 - DNA, 15 bp, Homo sapiens
tcctgcagaaagggg

SEQ ID NO: 1054043 - DNA, 15 bp, Homo sapiens
cctgcagaaaggggg

SEQ ID NO: 1054044 - DNA, 15 bp, Homo sapiens
ctgcagaaagggggc

SEQ ID NO: 1054045 - DNA, 15 bp, Homo sapiens
tgcagaaagggggcc

SEQ ID NO: 1054046 - DNA, 15 bp, Homo sapiens
gcagaaagggggcca

SEQ ID NO: 1054047 - DNA, 15 bp, Homo sapiens
cagaaagggggccac

SEQ ID NO: 1054048 - DNA, 15 bp, Homo sapiens
agaaagggggccacc

SEQ ID NO: 1054049 - DNA, 15 bp, Homo sapiens
gaaagggggccacct

SEQ ID NO: 1054050 - DNA, 15 bp, Homo sapiens
aaagggggccacctg

SEQ ID NO: 1054051 - DNA, 15 bp, Homo sapiens
aagggggccacctgt

SEQ ID NO: 1054052 - DNA, 15 bp, Homo sapiens
agggggccacctgtg

SEQ ID NO: 1054053 - DNA, 15 bp, Homo sapiens
gggggccacctgtgt

SEQ ID NO: 1054054 - DNA, 15 bp, Homo sapiens
ggggccacctgtgtt

SEQ ID NO: 1054055 - DNA, 15 bp, Homo sapiens
gggccacctgtgttt

SEQ ID NO: 1054056 - DNA, 15 bp, Homo sapiens
ggccacctgtgtttc

SEQ ID NO: 1054057 - DNA, 15 bp, Homo sapiens
gccacctgtgtttcc

SEQ ID NO: 1054058 - DNA, 15 bp, Homo sapiens
ccacctgtgtttcct

SEQ ID NO: 1054059 - DNA, 15 bp, Homo sapiens
cacctgtgtttcctt

SEQ ID NO: 1054060 - DNA, 15 bp, Homo sapiens
acctgtgtttccttc

SEQ ID NO: 1054061 - DNA, 15 bp, Homo sapiens
cctgtgtttccttca

SEQ ID NO: 1054062 - DNA, 15 bp, Homo sapiens
ctgtgtttccttcac

SEQ ID NO: 1054063 - DNA, 15 bp, Homo sapiens
tgtgtttccttcact

SEQ ID NO: 1054064 - DNA, 15 bp, Homo sapiens
gtgtttccttcactc

SEQ ID NO: 1054065 - DNA, 15 bp, Homo sapiens
tgtttccttcactcc

SEQ ID NO: 1054066 - DNA, 15 bp, Homo sapiens
gtttccttcactcca

SEQ ID NO: 1054067 - DNA, 15 bp, Homo sapiens
tttccttcactccag

SEQ ID NO: 1054068 - DNA, 15 bp, Homo sapiens
ttccttcactccagc

SEQ ID NO: 1054069 - DNA, 15 bp, Homo sapiens
tccttcactccagca

SEQ ID NO: 1054070 - DNA, 15 bp, Homo sapiens
ccttcactccagcag

SEQ ID NO: 1054071 - DNA, 15 bp, Homo sapiens
cttcactccagcaga

SEQ ID NO: 1054072 - DNA, 15 bp, Homo sapiens
ttcactccagcagaa

SEQ ID NO: 1054073 - DNA, 15 bp, Homo sapiens
tcactccagcagaag

SEQ ID NO: 1054074 - DNA, 15 bp, Homo sapiens
cactccagcagaagt

SEQ ID NO: 1054075 - DNA, 15 bp, Homo sapiens
actccagcagaagtt

SEQ ID NO: 1054076 - DNA, 15 bp, Homo sapiens
ctccagcagaagttc

SEQ ID NO: 1054077 - DNA, 15 bp, Homo sapiens
tccagcagaagttcc

SEQ ID NO: 1054078 - DNA, 15 bp, Homo sapiens
ccagcagaagttcca

SEQ ID NO: 1054079 - DNA, 15 bp, Homo sapiens
cagcagaagttccag

SEQ ID NO: 1054080 - DNA, 15 bp, Homo sapiens
agcagaagttccagg

SEQ ID NO: 1054081 - DNA, 15 bp, Homo sapiens
gcagaagttccaggg

SEQ ID NO: 1054082 - DNA, 15 bp, Homo sapiens
cagaagttccagggt

SEQ ID NO: 1054083 - DNA, 15 bp, Homo sapiens
agaagttccagggtt

SEQ ID NO: 1054084 - DNA, 15 bp, Homo sapiens
gaagttccagggttt

SEQ ID NO: 1054085 - DNA, 15 bp, Homo sapiens
aagttccagggtttg

SEQ ID NO: 1054086 - DNA, 15 bp, Homo sapiens
agttccagggtttgc

SEQ ID NO: 1054087 - DNA, 15 bp, Homo sapiens
gttccagggtttgct

SEQ ID NO: 1054088 - DNA, 15 bp, Homo sapiens
ttccagggtttgctc

SEQ ID NO: 1054089 - DNA, 15 bp, Homo sapiens
tccagggtttgctct

SEQ ID NO: 1054090 - DNA, 15 bp, Homo sapiens
ccagggtttgctcta

SEQ ID NO: 1054091 - DNA, 15 bp, Homo sapiens
cagggtttgctctaa

SEQ ID NO: 1054092 - DNA, 15 bp, Homo sapiens
agggtttgctctaat

SEQ ID NO: 1054093 - DNA, 15 bp, Homo sapiens
gggtttgctctaatt

SEQ ID NO: 1054094 - DNA, 15 bp, Homo sapiens
ggtttgctctaattg

SEQ ID NO: 1054095 - DNA, 15 bp, Homo sapiens
gtttgctctaattgg

SEQ ID NO: 1054096 - DNA, 15 bp, Homo sapiens
tttgctctaattggt

SEQ ID NO: 1054097 - DNA, 15 bp, Homo sapiens
ttgctctaattggtc

SEQ ID NO: 1054098 - DNA, 15 bp, Homo sapiens
tgctctaattggtct

SEQ ID NO: 1054099 - DNA, 15 bp, Homo sapiens
gctctaattggtctg

SEQ ID NO: 1054100 - DNA, 15 bp, Homo sapiens
ctctaattggtctgc

SEQ ID NO: 1054101 - DNA, 15 bp, Homo sapiens
tctaattggtctgcc

SEQ ID NO: 1054102 - DNA, 15 bp, Homo sapiens
ctaattggtctgcct

SEQ ID NO: 1054103 - DNA, 15 bp, Homo sapiens
taattggtctgcctg

SEQ ID NO: 1054104 - DNA, 15 bp, Homo sapiens
aattggtctgcctgg

SEQ ID NO: 1054105 - DNA, 15 bp, Homo sapiens
attggtctgcctggc

SEQ ID NO: 1054106 - DNA, 15 bp, Homo sapiens
ttggtctgcctggct

SEQ ID NO: 1054107 - DNA, 15 bp, Homo sapiens
tggtctgcctggctc

SEQ ID NO: 1054108 - DNA, 15 bp, Homo sapiens
ggtctgcctggctcc

SEQ ID NO: 1054109 - DNA, 15 bp, Homo sapiens
gtctgcctggctccc

SEQ ID NO: 1054110 - DNA, 15 bp, Homo sapiens
tctgcctggctccca

SEQ ID NO: 1054111 - DNA, 15 bp, Homo sapiens
ctgcctggctcccat

SEQ ID NO: 1054112 - DNA, 15 bp, Homo sapiens
tgcctggctcccatg

SEQ ID NO: 1054113 - DNA, 15 bp, Homo sapiens
gcctggctcccatgc

SEQ ID NO: 1054114 - DNA, 15 bp, Homo sapiens
cctggctcccatgcc

SEQ ID NO: 1054115 - DNA, 15 bp, Homo sapiens
ctggctcccatgccc

SEQ ID NO: 1054116 - DNA, 15 bp, Homo sapiens
tggctcccatgccca

SEQ ID NO: 1054117 - DNA, 15 bp, Homo sapiens
ggctcccatgcccag

SEQ ID NO: 1054118 - DNA, 15 bp, Homo sapiens
gctcccatgcccagc

SEQ ID NO: 1054119 - DNA, 15 bp, Homo sapiens
ctcccatgcccagct

SEQ ID NO: 1054120 - DNA, 15 bp, Homo sapiens
tcccatgcccagctg

SEQ ID NO: 1054121 - DNA, 15 bp, Homo sapiens
cccatgcccagctgt

SEQ ID NO: 1054122 - DNA, 15 bp, Homo sapiens
ccatgcccagctgta

SEQ ID NO: 1054123 - DNA, 15 bp, Homo sapiens
catgcccagctgtaa

SEQ ID NO: 1054124 - DNA, 15 bp, Homo sapiens
atgcccagctgtaaa

SEQ ID NO: 1054125 - DNA, 15 bp, Homo sapiens
tgcccagctgtaaac

SEQ ID NO: 1054126 - DNA, 15 bp, Homo sapiens
gcccagctgtaaacc

SEQ ID NO: 1054127 - DNA, 15 bp, Homo sapiens
cccagctgtaaacca

SEQ ID NO: 1054128 - DNA, 15 bp, Homo sapiens
ccagctgtaaaccaa

SEQ ID NO: 1054129 - DNA, 15 bp, Homo sapiens
cagctgtaaaccaat

SEQ ID NO: 1054130 - DNA, 15 bp, Homo sapiens
agctgtaaaccaatc

SEQ ID NO: 1054131 - DNA, 15 bp, Homo sapiens
gctgtaaaccaatca

SEQ ID NO: 1054132 - DNA, 15 bp, Homo sapiens
ctgtaaaccaatcac

SEQ ID NO: 1054133 - DNA, 15 bp, Homo sapiens
tgtaaaccaatcaca

SEQ ID NO: 1054134 - DNA, 15 bp, Homo sapiens
gtaaaccaatcacag

SEQ ID NO: 1054135 - DNA, 15 bp, Homo sapiens
taaaccaatcacagt

SEQ ID NO: 1054136 - DNA, 15 bp, Homo sapiens
aaaccaatcacagta

SEQ ID NO: 1054137 - DNA, 15 bp, Homo sapiens
aaccaatcacagtag

SEQ ID NO: 1054138 - DNA, 15 bp, Homo sapiens
accaatcacagtagc

SEQ ID NO: 1054139 - DNA, 15 bp, Homo sapiens
ccaatcacagtagcc

SEQ ID NO: 1054140 - DNA, 15 bp, Homo sapiens
caatcacagtagccg

SEQ ID NO: 1054141 - DNA, 15 bp, Homo sapiens
aatcacagtagccga

SEQ ID NO: 1054142 - DNA, 15 bp, Homo sapiens
atcacagtagccgag

SEQ ID NO: 1054143 - DNA, 15 bp, Homo sapiens
tcacagtagccgagg

SEQ ID NO: 1054144 - DNA, 15 bp, Homo sapiens
cacagtagccgaggt

SEQ ID NO: 1054145 - DNA, 15 bp, Homo sapiens
acagtagccgaggtg

SEQ ID NO: 1054146 - DNA, 15 bp, Homo sapiens
cagtagccgaggtgg

SEQ ID NO: 1054147 - DNA, 15 bp, Homo sapiens
agtagccgaggtgga

SEQ ID NO: 1054148 - DNA, 15 bp, Homo sapiens
gtagccgaggtggac

SEQ ID NO: 1054149 - DNA, 15 bp, Homo sapiens
tagccgaggtggact

SEQ ID NO: 1054150 - DNA, 15 bp, Homo sapiens
agccgaggtggacta

SEQ ID NO: 1054151 - DNA, 15 bp, Homo sapiens
gccgaggtggactat

SEQ ID NO: 1054152 - DNA, 15 bp, Homo sapiens
ccgaggtggactatg

SEQ ID NO: 1054153 - DNA, 15 bp, Homo sapiens
cgaggtggactatgc

SEQ ID NO: 1054154 - DNA, 15 bp, Homo sapiens
gaggtggactatgct

SEQ ID NO: 1054155 - DNA, 15 bp, Homo sapiens
aggtggactatgctg

SEQ ID NO: 1054156 - DNA, 15 bp, Homo sapiens
ggtggactatgctga

SEQ ID NO: 1054157 - DNA, 15 bp, Homo sapiens
gtggactatgctgat

SEQ ID NO: 1054158 - DNA, 15 bp, Homo sapiens
tggactatgctgatt

SEQ ID NO: 1054159 - DNA, 15 bp, Homo sapiens
ggactatgctgattg

SEQ ID NO: 1054160 - DNA, 15 bp, Homo sapiens
gactatgctgattgg

SEQ ID NO: 1054161 - DNA, 15 bp, Homo sapiens
actatgctgattggc

SEQ ID NO: 1054162 - DNA, 15 bp, Homo sapiens
ctatgctgattggcc

SEQ ID NO: 1054163 - DNA, 15 bp, Homo sapiens
tatgctgattggcca

SEQ ID NO: 1054164 - DNA, 15 bp, Homo sapiens
atgctgattggccag

SEQ ID NO: 1054165 - DNA, 15 bp, Homo sapiens
tgctgattggccagg

SEQ ID NO: 1054166 - DNA, 15 bp, Homo sapiens
gctgattggccaggc

SEQ ID NO: 1054167 - DNA, 15 bp, Homo sapiens
ctgattggccaggct

SEQ ID NO: 1054168 - DNA, 15 bp, Homo sapiens
tgattggccaggctt

SEQ ID NO: 1054169 - DNA, 15 bp, Homo sapiens
gattggccaggcttg

SEQ ID NO: 1054170 - DNA, 15 bp, Homo sapiens
attggccaggcttgt

SEQ ID NO: 1054171 - DNA, 15 bp, Homo sapiens
ttggccaggcttgtg

SEQ ID NO: 1054172 - DNA, 15 bp, Homo sapiens
tggccaggcttgtgt

SEQ ID NO: 1054173 - DNA, 15 bp, Homo sapiens
ggccaggcttgtgtc

SEQ ID NO: 1054174 - DNA, 15 bp, Homo sapiens
gccaggcttgtgtca

SEQ ID NO: 1054175 - DNA, 15 bp, Homo sapiens
ccaggcttgtgtcac

SEQ ID NO: 1054176 - DNA, 15 bp, Homo sapiens
caggcttgtgtcaca

SEQ ID NO: 1054177 - DNA, 15 bp, Homo sapiens
aggcttgtgtcacat

SEQ ID NO: 1054178 - DNA, 15 bp, Homo sapiens
ggcttgtgtcacatg

SEQ ID NO: 1054179 - DNA, 15 bp, Homo sapiens
gcttgtgtcacatgc

SEQ ID NO: 1054180 - DNA, 15 bp, Homo sapiens
cttgtgtcacatgct

SEQ ID NO: 1054181 - DNA, 15 bp, Homo sapiens
ttgtgtcacatgctc

SEQ ID NO: 1054182 - DNA, 15 bp, Homo sapiens
tgtgtcacatgctca

SEQ ID NO: 1054183 - DNA, 15 bp, Homo sapiens
gtgtcacatgctcag

SEQ ID NO: 1054184 - DNA, 15 bp, Homo sapiens
tgtcacatgctcaga

SEQ ID NO: 1054185 - DNA, 15 bp, Homo sapiens
gtcacatgctcagat

SEQ ID NO: 1054186 - DNA, 15 bp, Homo sapiens
tcacatgctcagatg

SEQ ID NO: 1054187 - DNA, 15 bp, Homo sapiens
cacatgctcagatgg

SEQ ID NO: 1054188 - DNA, 15 bp, Homo sapiens
acatgctcagatggc

SEQ ID NO: 1054189 - DNA, 15 bp, Homo sapiens
catgctcagatggct

SEQ ID NO: 1054190 - DNA, 15 bp, Homo sapiens
atgctcagatggctc

SEQ ID NO: 1054191 - DNA, 15 bp, Homo sapiens
tgctcagatggctcc

SEQ ID NO: 1054192 - DNA, 15 bp, Homo sapiens
gctcagatggctcct

SEQ ID NO: 1054193 - DNA, 15 bp, Homo sapiens
ctcagatggctcctg

SEQ ID NO: 1054194 - DNA, 15 bp, Homo sapiens
tcagatggctcctgg

SEQ ID NO: 1054195 - DNA, 15 bp, Homo sapiens
cagatggctcctggg

SEQ ID NO: 1054196 - DNA, 15 bp, Homo sapiens
agatggctcctgggt

SEQ ID NO: 1054197 - DNA, 15 bp, Homo sapiens
gatggctcctgggtg

SEQ ID NO: 1054198 - DNA, 15 bp, Homo sapiens
atggctcctgggtgg

SEQ ID NO: 1054199 - DNA, 15 bp, Homo sapiens
tggctcctgggtggg

SEQ ID NO: 1054200 - DNA, 15 bp, Homo sapiens
ggctcctgggtgggc

SEQ ID NO: 1054201 - DNA, 15 bp, Homo sapiens
gctcctgggtgggcc

SEQ ID NO: 1054202 - DNA, 15 bp, Homo sapiens
ctcctgggtgggccg

SEQ ID NO: 1054203 - DNA, 15 bp, Homo sapiens
tcctgggtgggccgg

SEQ ID NO: 1054204 - DNA, 15 bp, Homo sapiens
cctgggtgggccggc

SEQ ID NO: 1054205 - DNA, 15 bp, Homo sapiens
ctgggtgggccggcc

SEQ ID NO: 1054206 - DNA, 15 bp, Homo sapiens
tgggtgggccggccc

SEQ ID NO: 1054207 - DNA, 15 bp, Homo sapiens
gggtgggccggcccc

SEQ ID NO: 1054208 - DNA, 15 bp, Homo sapiens
ggtgggccggcccca

SEQ ID NO: 1054209 - DNA, 15 bp, Homo sapiens
gtgggccggccccac

SEQ ID NO: 1054210 - DNA, 15 bp, Homo sapiens
tgggccggccccact

SEQ ID NO: 1054211 - DNA, 15 bp, Homo sapiens
gggccggccccactc

SEQ ID NO: 1054212 - DNA, 15 bp, Homo sapiens
ggccggccccactcc

SEQ ID NO: 1054213 - DNA, 15 bp, Homo sapiens
gccggccccactcca

SEQ ID NO: 1054214 - DNA, 15 bp, Homo sapiens
ccggccccactccaa

SEQ ID NO: 1054215 - DNA, 15 bp, Homo sapiens
cggccccactccaag

SEQ ID NO: 1054216 - DNA, 15 bp, Homo sapiens
ggccccactccaagc

SEQ ID NO: 1054217 - DNA, 15 bp, Homo sapiens
gccccactccaagca

SEQ ID NO: 1054218 - DNA, 15 bp, Homo sapiens
ccccactccaagcac

SEQ ID NO: 1054219 - DNA, 15 bp, Homo sapiens
cccactccaagcaca

SEQ ID NO: 1054220 - DNA, 15 bp, Homo sapiens
ccactccaagcacaa

SEQ ID NO: 1054221 - DNA, 15 bp, Homo sapiens
cactccaagcacaag

SEQ ID NO: 1054222 - DNA, 15 bp, Homo sapiens
actccaagcacaagg

SEQ ID NO: 1054223 - DNA, 15 bp, Homo sapiens
ctccaagcacaaggc

SEQ ID NO: 1054224 - DNA, 15 bp, Homo sapiens
tccaagcacaaggct

SEQ ID NO: 1054225 - DNA, 15 bp, Homo sapiens
ccaagcacaaggctg

SEQ ID NO: 1054226 - DNA, 15 bp, Homo sapiens
caagcacaaggctga

SEQ ID NO: 1054227 - DNA, 15 bp, Homo sapiens
aagcacaaggctgaa

SEQ ID NO: 1054228 - DNA, 15 bp, Homo sapiens
agcacaaggctgaaa

SEQ ID NO: 1054229 - DNA, 15 bp, Homo sapiens
gcacaaggctgaaag

SEQ ID NO: 1054230 - DNA, 15 bp, Homo sapiens
cacaaggctgaaagt

SEQ ID NO: 1054231 - DNA, 15 bp, Homo sapiens
acaaggctgaaagta

SEQ ID NO: 1054232 - DNA, 15 bp, Homo sapiens
caaggctgaaagtag

SEQ ID NO: 1054233 - DNA, 15 bp, Homo sapiens
aaggctgaaagtagg

SEQ ID NO: 1054234 - DNA, 15 bp, Homo sapiens
aggctgaaagtaggg

SEQ ID NO: 1054235 - DNA, 15 bp, Homo sapiens
ggctgaaagtaggga

SEQ ID NO: 1054236 - DNA, 15 bp, Homo sapiens
gctgaaagtagggaa

SEQ ID NO: 1054237 - DNA, 15 bp, Homo sapiens
ctgaaagtagggaag

SEQ ID NO: 1054238 - DNA, 15 bp, Homo sapiens
tgaaagtagggaagg

SEQ ID NO: 1054239 - DNA, 15 bp, Homo sapiens
gaaagtagggaaggc

SEQ ID NO: 1054240 - DNA, 15 bp, Homo sapiens
aaagtagggaaggct

SEQ ID NO: 1054241 - DNA, 15 bp, Homo sapiens
aagtagggaaggctt

SEQ ID NO: 1054242 - DNA, 15 bp, Homo sapiens
agtagggaaggctta

SEQ ID NO: 1054243 - DNA, 15 bp, Homo sapiens
gtagggaaggcttaa

SEQ ID NO: 1054244 - DNA, 15 bp, Homo sapiens
tagggaaggcttaaa

SEQ ID NO: 1054245 - DNA, 15 bp, Homo sapiens
agggaaggcttaaag

SEQ ID NO: 1054246 - DNA, 15 bp, Homo sapiens
gggaaggcttaaagt

SEQ ID NO: 1054247 - DNA, 15 bp, Homo sapiens
ggaaggcttaaagtg

SEQ ID NO: 1054248 - DNA, 15 bp, Homo sapiens
gaaggcttaaagtgg

SEQ ID NO: 1054249 - DNA, 15 bp, Homo sapiens
aaggcttaaagtggg

SEQ ID NO: 1054250 - DNA, 15 bp, Homo sapiens
aggcttaaagtgggg

SEQ ID NO: 1054251 - DNA, 15 bp, Homo sapiens
ggcttaaagtggggg

SEQ ID NO: 1054252 - DNA, 15 bp, Homo sapiens
gcttaaagtgggggt

SEQ ID NO: 1054253 - DNA, 15 bp, Homo sapiens
cttaaagtgggggtg

SEQ ID NO: 1054254 - DNA, 15 bp, Homo sapiens
ttaaagtgggggtgt

SEQ ID NO: 1054255 - DNA, 15 bp, Homo sapiens
taaagtgggggtgta

SEQ ID NO: 1054256 - DNA, 15 bp, Homo sapiens
aaagtgggggtgtag

SEQ ID NO: 1054257 - DNA, 15 bp, Homo sapiens
aagtgggggtgtagg

SEQ ID NO: 1054258 - DNA, 15 bp, Homo sapiens
agtgggggtgtaggt

SEQ ID NO: 1054259 - DNA, 15 bp, Homo sapiens
gtgggggtgtaggta

SEQ ID NO: 1054260 - DNA, 15 bp, Homo sapiens
tgggggtgtaggtac

SEQ ID NO: 1054261 - DNA, 15 bp, Homo sapiens
gggggtgtaggtacc

SEQ ID NO: 1054262 - DNA, 15 bp, Homo sapiens
ggggtgtaggtacca

SEQ ID NO: 1054263 - DNA, 15 bp, Homo sapiens
gggtgtaggtaccag

SEQ ID NO: 1054264 - DNA, 15 bp, Homo sapiens
ggtgtaggtaccagg

SEQ ID NO: 1054265 - DNA, 15 bp, Homo sapiens
gtgtaggtaccagga

SEQ ID NO: 1054266 - DNA, 15 bp, Homo sapiens
tgtaggtaccaggag

SEQ ID NO: 1054267 - DNA, 15 bp, Homo sapiens
gtaggtaccaggaga

SEQ ID NO: 1054268 - DNA, 15 bp, Homo sapiens
taggtaccaggagaa

SEQ ID NO: 1054269 - DNA, 15 bp, Homo sapiens
aggtaccaggagaag

SEQ ID NO: 1054270 - DNA, 15 bp, Homo sapiens
ggtaccaggagaagg

SEQ ID NO: 1054271 - DNA, 15 bp, Homo sapiens
gtaccaggagaaggg

SEQ ID NO: 1054272 - DNA, 15 bp, Homo sapiens
taccaggagaagggg

SEQ ID NO: 1054273 - DNA, 15 bp, Homo sapiens
accaggagaaggggg

SEQ ID NO: 1054274 - DNA, 15 bp, Homo sapiens
ccaggagaaggggga

SEQ ID NO: 1054275 - DNA, 15 bp, Homo sapiens
caggagaagggggag

SEQ ID NO: 1054276 - DNA, 15 bp, Homo sapiens
aggagaagggggaga

SEQ ID NO: 1054277 - DNA, 15 bp, Homo sapiens
ggagaagggggagaa

SEQ ID NO: 1054278 - DNA, 15 bp, Homo sapiens
gagaagggggagaaa

SEQ ID NO: 1054279 - DNA, 15 bp, Homo sapiens
agaagggggagaaac

SEQ ID NO: 1054280 - DNA, 15 bp, Homo sapiens
gaagggggagaaacg

SEQ ID NO: 1054281 - DNA, 15 bp, Homo sapiens
aagggggagaaacga

SEQ ID NO: 1054282 - DNA, 15 bp, Homo sapiens
agggggagaaacgac

SEQ ID NO: 1054283 - DNA, 15 bp, Homo sapiens
gggggagaaacgaca

SEQ ID NO: 1054284 - DNA, 15 bp, Homo sapiens
ggggagaaacgacat

SEQ ID NO: 1054285 - DNA, 15 bp, Homo sapiens
gggagaaacgacatg

SEQ ID NO: 1054286 - DNA, 15 bp, Homo sapiens
ggagaaacgacatgc

SEQ ID NO: 1054287 - DNA, 15 bp, Homo sapiens
gagaaacgacatgcc

SEQ ID NO: 1054288 - DNA, 15 bp, Homo sapiens
agaaacgacatgccc

SEQ ID NO: 1054289 - DNA, 15 bp, Homo sapiens
gaaacgacatgccca

SEQ ID NO: 1054290 - DNA, 15 bp, Homo sapiens
aaacgacatgcccat

SEQ ID NO: 1054291 - DNA, 15 bp, Homo sapiens
aacgacatgcccatc

SEQ ID NO: 1054292 - DNA, 15 bp, Homo sapiens
acgacatgcccatcc

SEQ ID NO: 1054293 - DNA, 15 bp, Homo sapiens
cgacatgcccatccc

SEQ ID NO: 1054294 - DNA, 15 bp, Homo sapiens
gacatgcccatcccc

SEQ ID NO: 1054295 - DNA, 15 bp, Homo sapiens
acatgcccatcccct

SEQ ID NO: 1054296 - DNA, 15 bp, Homo sapiens
catgcccatcccctc

SEQ ID NO: 1054297 - DNA, 15 bp, Homo sapiens
atgcccatcccctcc

SEQ ID NO: 1054298 - DNA, 15 bp, Homo sapiens
tgcccatcccctcca

SEQ ID NO: 1054299 - DNA, 15 bp, Homo sapiens
gcccatcccctccaa

SEQ ID NO: 1054300 - DNA, 15 bp, Homo sapiens
cccatcccctccaag

SEQ ID NO: 1054301 - DNA, 15 bp, Homo sapiens
ccatcccctccaagg

SEQ ID NO: 1054302 - DNA, 15 bp, Homo sapiens
catcccctccaaggg

SEQ ID NO: 1054303 - DNA, 15 bp, Homo sapiens
atcccctccaagggc

SEQ ID NO: 1054304 - DNA, 15 bp, Homo sapiens
tcccctccaagggcg

SEQ ID NO: 1054305 - DNA, 15 bp, Homo sapiens
cccctccaagggcgt

SEQ ID NO: 1054306 - DNA, 15 bp, Homo sapiens
ccctccaagggcgtg

SEQ ID NO: 1054307 - DNA, 15 bp, Homo sapiens
cctccaagggcgtgg

SEQ ID NO: 1054308 - DNA, 15 bp, Homo sapiens
ctccaagggcgtggg

SEQ ID NO: 1054309 - DNA, 15 bp, Homo sapiens
tccaagggcgtggga

SEQ ID NO: 1054310 - DNA, 15 bp, Homo sapiens
ccaagggcgtgggac

SEQ ID NO: 1054311 - DNA, 15 bp, Homo sapiens
caagggcgtgggacg

SEQ ID NO: 1054312 - DNA, 15 bp, Homo sapiens
aagggcgtgggacga

SEQ ID NO: 1054313 - DNA, 15 bp, Homo sapiens
agggcgtgggacgag

SEQ ID NO: 1054314 - DNA, 15 bp, Homo sapiens
gggcgtgggacgagg

SEQ ID NO: 1054315 - DNA, 15 bp, Homo sapiens
ggcgtgggacgaggt

SEQ ID NO: 1054316 - DNA, 15 bp, Homo sapiens
gcgtgggacgaggtg

SEQ ID NO: 1054317 - DNA, 15 bp, Homo sapiens
cgtgggacgaggtgt

SEQ ID NO: 1054318 - DNA, 15 bp, Homo sapiens
gtgggacgaggtgtg

SEQ ID NO: 1054319 - DNA, 15 bp, Homo sapiens
tgggacgaggtgtgt

SEQ ID NO: 1054320 - DNA, 15 bp, Homo sapiens
gggacgaggtgtgtc

SEQ ID NO: 1054321 - DNA, 15 bp, Homo sapiens
ggacgaggtgtgtcc

SEQ ID NO: 1054322 - DNA, 15 bp, Homo sapiens
gacgaggtgtgtccc

SEQ ID NO: 1054323 - DNA, 15 bp, Homo sapiens
acgaggtgtgtcccg

SEQ ID NO: 1054324 - DNA, 15 bp, Homo sapiens
cgaggtgtgtcccgc

SEQ ID NO: 1054325 - DNA, 15 bp, Homo sapiens
gaggtgtgtcccgcc

SEQ ID NO: 1054326 - DNA, 15 bp, Homo sapiens
aggtgtgtcccgcct

SEQ ID NO: 1054327 - DNA, 15 bp, Homo sapiens
ggtgtgtcccgcctt

SEQ ID NO: 1054328 - DNA, 15 bp, Homo sapiens
gtgtgtcccgccttc

SEQ ID NO: 1054329 - DNA, 15 bp, Homo sapiens
tgtgtcccgccttct

SEQ ID NO: 1054330 - DNA, 15 bp, Homo sapiens
gtgtcccgccttctc

SEQ ID NO: 1054331 - DNA, 15 bp, Homo sapiens
tgtcccgccttctct

SEQ ID NO: 1054332 - DNA, 15 bp, Homo sapiens
gtcccgccttctctt

SEQ ID NO: 1054333 - DNA, 15 bp, Homo sapiens
tcccgccttctctta

SEQ ID NO: 1054334 - DNA, 15 bp, Homo sapiens
cccgccttctcttag

SEQ ID NO: 1054335 - DNA, 15 bp, Homo sapiens
ccgccttctcttagc

SEQ ID NO: 1054336 - DNA, 15 bp, Homo sapiens
cgccttctcttagca

SEQ ID NO: 1054337 - DNA, 15 bp, Homo sapiens
gccttctcttagcac

SEQ ID NO: 1054338 - DNA, 15 bp, Homo sapiens
ccttctcttagcaca

SEQ ID NO: 1054339 - DNA, 15 bp, Homo sapiens
cttctcttagcacat

SEQ ID NO: 1054340 - DNA, 15 bp, Homo sapiens
ttctcttagcacatc

SEQ ID NO: 1054341 - DNA, 15 bp, Homo sapiens
tctcttagcacatct

SEQ ID NO: 1054342 - DNA, 15 bp, Homo sapiens
ctcttagcacatctg

SEQ ID NO: 1054343 - DNA, 15 bp, Homo sapiens
tcttagcacatctgc

SEQ ID NO: 1054344 - DNA, 15 bp, Homo sapiens
cttagcacatctgcc

SEQ ID NO: 1054345 - DNA, 15 bp, Homo sapiens
ttagcacatctgcca

SEQ ID NO: 1054346 - DNA, 15 bp, Homo sapiens
tagcacatctgccaa

SEQ ID NO: 1054347 - DNA, 15 bp, Homo sapiens
agcacatctgccaaa

SEQ ID NO: 1054348 - DNA, 15 bp, Homo sapiens
gcacatctgccaaaa

SEQ ID NO: 1054349 - DNA, 15 bp, Homo sapiens
cacatctgccaaaag

SEQ ID NO: 1054350 - DNA, 15 bp, Homo sapiens
acatctgccaaaaga

SEQ ID NO: 1054351 - DNA, 15 bp, Homo sapiens
catctgccaaaagaa

SEQ ID NO: 1054352 - DNA, 15 bp, Homo sapiens
atctgccaaaagaat

SEQ ID NO: 1054353 - DNA, 15 bp, Homo sapiens
tctgccaaaagaatt

SEQ ID NO: 1054354 - DNA, 15 bp, Homo sapiens
ctgccaaaagaattt

SEQ ID NO: 1054355 - DNA, 15 bp, Homo sapiens
tgccaaaagaatttc

SEQ ID NO: 1054356 - DNA, 15 bp, Homo sapiens
gccaaaagaatttca

SEQ ID NO: 1054357 - DNA, 15 bp, Homo sapiens
ccaaaagaatttcaa

SEQ ID NO: 1054358 - DNA, 15 bp, Homo sapiens
caaaagaatttcaaa

SEQ ID NO: 1054359 - DNA, 15 bp, Homo sapiens
aaaagaatttcaaaa

SEQ ID NO: 1054360 - DNA, 15 bp, Homo sapiens
aaagaatttcaaaag

SEQ ID NO: 1054361 - DNA, 15 bp, Homo sapiens
aagaatttcaaaagc

SEQ ID NO: 1054362 - DNA, 15 bp, Homo sapiens
agaatttcaaaagcg

SEQ ID NO: 1054363 - DNA, 15 bp, Homo sapiens
gaatttcaaaagcgc

SEQ ID NO: 1054364 - DNA, 15 bp, Homo sapiens
aatttcaaaagcgca

SEQ ID NO: 1054365 - DNA, 15 bp, Homo sapiens
atttcaaaagcgcaa

SEQ ID NO: 1054366 - DNA, 15 bp, Homo sapiens
tttcaaaagcgcaaa

SEQ ID NO: 1054367 - DNA, 15 bp, Homo sapiens
ttcaaaagcgcaaag

SEQ ID NO: 1054368 - DNA, 15 bp, Homo sapiens
tcaaaagcgcaaagg

SEQ ID NO: 1054369 - DNA, 15 bp, Homo sapiens
caaaagcgcaaagga

SEQ ID NO: 1054370 - DNA, 15 bp, Homo sapiens
aaaagcgcaaaggaa

SEQ ID NO: 1054371 - DNA, 15 bp, Homo sapiens
aaagcgcaaaggaat

SEQ ID NO: 1054372 - DNA, 15 bp, Homo sapiens
aagcgcaaaggaatt

SEQ ID NO: 1054373 - DNA, 15 bp, Homo sapiens
agcgcaaaggaattt

SEQ ID NO: 1054374 - DNA, 15 bp, Homo sapiens
gcgcaaaggaatttt

SEQ ID NO: 1054375 - DNA, 15 bp, Homo sapiens
cgcaaaggaatttta

SEQ ID NO: 1054376 - DNA, 15 bp, Homo sapiens
gcaaaggaattttaa

SEQ ID NO: 1054377 - DNA, 15 bp, Homo sapiens
caaaggaattttaaa

SEQ ID NO: 1054378 - DNA, 15 bp, Homo sapiens
aaaggaattttaaaa

SEQ ID NO: 1054379 - DNA, 15 bp, Homo sapiens
aaggaattttaaaat

SEQ ID NO: 1054380 - DNA, 15 bp, Homo sapiens
aggaattttaaaatc

SEQ ID NO: 1054381 - DNA, 15 bp, Homo sapiens
ggaattttaaaatct

SEQ ID NO: 1054382 - DNA, 15 bp, Homo sapiens
gaattttaaaatctt

SEQ ID NO: 1054383 - DNA, 15 bp, Homo sapiens
aattttaaaatcttt

SEQ ID NO: 1054384 - DNA, 15 bp, Homo sapiens
attttaaaatcttta

SEQ ID NO: 1054385 - DNA, 15 bp, Homo sapiens
ttttaaaatctttat

SEQ ID NO: 1054386 - DNA, 15 bp, Homo sapiens
tttaaaatctttatt

SEQ ID NO: 1054387 - DNA, 15 bp, Homo sapiens
ttaaaatctttattt

SEQ ID NO: 1054388 - DNA, 15 bp, Homo sapiens
taaaatctttattta

SEQ ID NO: 1054389 - DNA, 15 bp, Homo sapiens
aaaatctttatttaa

SEQ ID NO: 1054390 - DNA, 15 bp, Homo sapiens
aaatctttatttaaa

SEQ ID NO: 1054391 - DNA, 15 bp, Homo sapiens
aatctttatttaaat

SEQ ID NO: 1054392 - DNA, 15 bp, Homo sapiens
atctttatttaaata

SEQ ID NO: 1054393 - DNA, 15 bp, Homo sapiens
tctttatttaaatag

SEQ ID NO: 1054394 - DNA, 15 bp, Homo sapiens
ctttatttaaataga

SEQ ID NO: 1054395 - DNA, 15 bp, Homo sapiens
tttatttaaatagag

SEQ ID NO: 1054396 - DNA, 15 bp, Homo sapiens
ttatttaaatagagt

SEQ ID NO: 1054397 - DNA, 15 bp, Homo sapiens
tatttaaatagagtt

SEQ ID NO: 1054398 - DNA, 15 bp, Homo sapiens
atttaaatagagttt

SEQ ID NO: 1054399 - DNA, 15 bp, Homo sapiens
tttaaatagagtttt

SEQ ID NO: 1054400 - DNA, 15 bp, Homo sapiens
ttaaatagagttttt

SEQ ID NO: 1054401 - DNA, 15 bp, Homo sapiens
taaatagagtttttt

SEQ ID NO: 1054402 - DNA, 15 bp, Homo sapiens
aaatagagttttttc

SEQ ID NO: 1054403 - DNA, 15 bp, Homo sapiens
aatagagttttttct

SEQ ID NO: 1054404 - DNA, 15 bp, Homo sapiens
atagagttttttctt

SEQ ID NO: 1054405 - DNA, 15 bp, Homo sapiens
tagagttttttctta

SEQ ID NO: 1054406 - DNA, 15 bp, Homo sapiens
agagttttttcttat

SEQ ID NO: 1054407 - DNA, 15 bp, Homo sapiens
gagttttttcttata

SEQ ID NO: 1054408 - DNA, 15 bp, Homo sapiens
agttttttcttatat

SEQ ID NO: 1054409 - DNA, 15 bp, Homo sapiens
gttttttcttatatt

SEQ ID NO: 1054410 - DNA, 15 bp, Homo sapiens
ttttttcttatattt

SEQ ID NO: 1054411 - DNA, 15 bp, Homo sapiens
tttttcttatattta

SEQ ID NO: 1054412 - DNA, 15 bp, Homo sapiens
ttttcttatatttat

SEQ ID NO: 1054413 - DNA, 15 bp, Homo sapiens
tttcttatatttatt

SEQ ID NO: 1054414 - DNA, 15 bp, Homo sapiens
ttcttatatttattt

SEQ ID NO: 1054415 - DNA, 15 bp, Homo sapiens
tcttatatttattta

SEQ ID NO: 1054416 - DNA, 15 bp, Homo sapiens
cttatatttatttat

SEQ ID NO: 1054417 - DNA, 15 bp, Homo sapiens
ttatatttatttata

SEQ ID NO: 1054418 - DNA, 15 bp, Homo sapiens
tatatttatttatat

SEQ ID NO: 1054419 - DNA, 15 bp, Homo sapiens
atatttatttatatt

SEQ ID NO: 1054420 - DNA, 15 bp, Homo sapiens
tatttatttatattt

SEQ ID NO: 1054421 - DNA, 15 bp, Homo sapiens
atttatttatatttt

SEQ ID NO: 1054422 - DNA, 15 bp, Homo sapiens
tttatttatattttt

SEQ ID NO: 1054423 - DNA, 15 bp, Homo sapiens
ttatttatatttttg

SEQ ID NO: 1054424 - DNA, 15 bp, Homo sapiens
tatttatatttttga

SEQ ID NO: 1054425 - DNA, 15 bp, Homo sapiens
atttatatttttgag

SEQ ID NO: 1054426 - DNA, 15 bp, Homo sapiens
tttatatttttgaga

SEQ ID NO: 1054427 - DNA, 15 bp, Homo sapiens
ttatatttttgagac

SEQ ID NO: 1054428 - DNA, 15 bp, Homo sapiens
tatatttttgagaca

SEQ ID NO: 1054429 - DNA, 15 bp, Homo sapiens
atatttttgagacag

SEQ ID NO: 1054430 - DNA, 15 bp, Homo sapiens
tatttttgagacagg

SEQ ID NO: 1054431 - DNA, 15 bp, Homo sapiens
atttttgagacaggg

SEQ ID NO: 1054432 - DNA, 15 bp, Homo sapiens
ttttgagacagggtt

SEQ ID NO: 1054433 - DNA, 15 bp, Homo sapiens
tttgagacagggttt

SEQ ID NO: 1054434 - DNA, 15 bp, Homo sapiens
ttgagacagggtttc

SEQ ID NO: 1054435 - DNA, 15 bp, Homo sapiens
tgagacagggtttct

SEQ ID NO: 1054436 - DNA, 15 bp, Homo sapiens
agacagggtttctct

SEQ ID NO: 1054437 - DNA, 15 bp, Homo sapiens
gacagggtttctctg

SEQ ID NO: 1054438 - DNA, 15 bp, Homo sapiens
acagggtttctctgt

SEQ ID NO: 1054439 - DNA, 15 bp, Homo sapiens
cagggtttctctgtt

SEQ ID NO: 1054440 - DNA, 15 bp, Homo sapiens
agggtttctctgttg

SEQ ID NO: 1054441 - DNA, 15 bp, Homo sapiens
gggtttctctgttgc

SEQ ID NO: 1054442 - DNA, 15 bp, Homo sapiens
ggtttctctgttgcc

SEQ ID NO: 1054443 - DNA, 15 bp, Homo sapiens
gtttctctgttgccc

SEQ ID NO: 1054444 - DNA, 15 bp, Homo sapiens
tttctctgttgccca

SEQ ID NO: 1054445 - DNA, 15 bp, Homo sapiens
ttctctgttgcccag

SEQ ID NO: 1054446 - DNA, 15 bp, Homo sapiens
tctctgttgcccagg

SEQ ID NO: 1054447 - DNA, 15 bp, Homo sapiens
ctgttgcccaggctc

SEQ ID NO: 1054448 - DNA, 15 bp, Homo sapiens
tgttgcccaggctca

SEQ ID NO: 1054449 - DNA, 15 bp, Homo sapiens
gttgcccaggctcaa

SEQ ID NO: 1054450 - DNA, 15 bp, Homo sapiens
ttgcccaggctcaag

SEQ ID NO: 1054451 - DNA, 15 bp, Homo sapiens
tgcccaggctcaagt

SEQ ID NO: 1054452 - DNA, 15 bp, Homo sapiens
gcccaggctcaagtg

SEQ ID NO: 1054453 - DNA, 15 bp, Homo sapiens
cccaggctcaagtgc

SEQ ID NO: 1054454 - DNA, 15 bp, Homo sapiens
ccaggctcaagtgca

SEQ ID NO: 1054455 - DNA, 15 bp, Homo sapiens
caggctcaagtgcag

SEQ ID NO: 1054456 - DNA, 15 bp, Homo sapiens
aggctcaagtgcagt

SEQ ID NO: 1054457 - DNA, 15 bp, Homo sapiens
ggctcaagtgcagtg

SEQ ID NO: 1054458 - DNA, 15 bp, Homo sapiens
gctcaagtgcagtgg

SEQ ID NO: 1054459 - DNA, 15 bp, Homo sapiens
ctcaagtgcagtggt

SEQ ID NO: 1054460 - DNA, 15 bp, Homo sapiens
tcaagtgcagtggtg

SEQ ID NO: 1054461 - DNA, 15 bp, Homo sapiens
caagtgcagtggtgc

SEQ ID NO: 1054462 - DNA, 15 bp, Homo sapiens
aagtgcagtggtgca

SEQ ID NO: 1054463 - DNA, 15 bp, Homo sapiens
gcagtggtgcaatca

SEQ ID NO: 1054464 - DNA, 15 bp, Homo sapiens
cagtggtgcaatcac

SEQ ID NO: 1054465 - DNA, 15 bp, Homo sapiens
caatcacagctcaca

SEQ ID NO: 1054466 - DNA, 15 bp, Homo sapiens
aatcacagctcacag

SEQ ID NO: 1054467 - DNA, 15 bp, Homo sapiens
atcacagctcacagc

SEQ ID NO: 1054468 - DNA, 15 bp, Homo sapiens
tcacagctcacagca

SEQ ID NO: 1054469 - DNA, 15 bp, Homo sapiens
cacagctcacagcag

SEQ ID NO: 1054470 - DNA, 15 bp, Homo sapiens
acagctcacagcagc

SEQ ID NO: 1054471 - DNA, 15 bp, Homo sapiens
cagctcacagcagcc

SEQ ID NO: 1054472 - DNA, 15 bp, Homo sapiens
agctcacagcagcct

SEQ ID NO: 1054473 - DNA, 15 bp, Homo sapiens
gctcacagcagcctt

SEQ ID NO: 1054474 - DNA, 15 bp, Homo sapiens
ctcacagcagccttg

SEQ ID NO: 1054475 - DNA, 15 bp, Homo sapiens
tcacagcagccttga

SEQ ID NO: 1054476 - DNA, 15 bp, Homo sapiens
cacagcagccttgac

SEQ ID NO: 1054477 - DNA, 15 bp, Homo sapiens
acagcagccttgacc

SEQ ID NO: 1054478 - DNA, 15 bp, Homo sapiens
cagcagccttgacct

SEQ ID NO: 1054479 - DNA, 15 bp, Homo sapiens
agcagccttgacctc

SEQ ID NO: 1054480 - DNA, 15 bp, Homo sapiens
gcagccttgacctcc

SEQ ID NO: 1054481 - DNA, 15 bp, Homo sapiens
cagccttgacctcct

SEQ ID NO: 1054482 - DNA, 15 bp, Homo sapiens
agccttgacctcctg

SEQ ID NO: 1054483 - DNA, 15 bp, Homo sapiens
gccttgacctcctgg

SEQ ID NO: 1054484 - DNA, 15 bp, Homo sapiens
ccttgacctcctggg

SEQ ID NO: 1054485 - DNA, 15 bp, Homo sapiens
cttgacctcctgggc

SEQ ID NO: 1054486 - DNA, 15 bp, Homo sapiens
ttgacctcctgggca

SEQ ID NO: 1054487 - DNA, 15 bp, Homo sapiens
tgacctcctgggcac

SEQ ID NO: 1054488 - DNA, 15 bp, Homo sapiens
gacctcctgggcaca

SEQ ID NO: 1054489 - DNA, 15 bp, Homo sapiens
acctcctgggcacaa

SEQ ID NO: 1054490 - DNA, 15 bp, Homo sapiens
cctcctgggcacaaa

SEQ ID NO: 1054491 - DNA, 15 bp, Homo sapiens
ctcctgggcacaaat

SEQ ID NO: 1054492 - DNA, 15 bp, Homo sapiens
tcctgggcacaaatg

SEQ ID NO: 1054493 - DNA, 15 bp, Homo sapiens
cctgggcacaaatga

SEQ ID NO: 1054494 - DNA, 15 bp, Homo sapiens
ctgggcacaaatgat

SEQ ID NO: 1054495 - DNA, 15 bp, Homo sapiens
tgggcacaaatgatt

SEQ ID NO: 1054496 - DNA, 15 bp, Homo sapiens
gggcacaaatgattc

SEQ ID NO: 1054497 - DNA, 15 bp, Homo sapiens
ggcacaaatgattct

SEQ ID NO: 1054498 - DNA, 15 bp, Homo sapiens
gcacaaatgattctc

SEQ ID NO: 1054499 - DNA, 15 bp, Homo sapiens
cacaaatgattctcc

SEQ ID NO: 1054500 - DNA, 15 bp, Homo sapiens
acaaatgattctccc

SEQ ID NO: 1054501 - DNA, 15 bp, Homo sapiens
caaatgattctccca

SEQ ID NO: 1054502 - DNA, 15 bp, Homo sapiens
aaatgattctcccac

SEQ ID NO: 1054503 - DNA, 15 bp, Homo sapiens
aatgattctcccacc

SEQ ID NO: 1054504 - DNA, 15 bp, Homo sapiens
atgattctcccacct

SEQ ID NO: 1054505 - DNA, 15 bp, Homo sapiens
acctcagcctcccag

SEQ ID NO: 1054506 - DNA, 15 bp, Homo sapiens
cctcagcctcccagg

SEQ ID NO: 1054507 - DNA, 15 bp, Homo sapiens
ctcagcctcccaggt

SEQ ID NO: 1054508 - DNA, 15 bp, Homo sapiens
tcagcctcccaggta

SEQ ID NO: 1054509 - DNA, 15 bp, Homo sapiens
cagcctcccaggtag

SEQ ID NO: 1054510 - DNA, 15 bp, Homo sapiens
agcctcccaggtagc

SEQ ID NO: 1054511 - DNA, 15 bp, Homo sapiens
gcctcccaggtagct

SEQ ID NO: 1054512 - DNA, 15 bp, Homo sapiens
cctcccaggtagctg

SEQ ID NO: 1054513 - DNA, 15 bp, Homo sapiens
ctcccaggtagctgg

SEQ ID NO: 1054514 - DNA, 15 bp, Homo sapiens
tcccaggtagctggg

SEQ ID NO: 1054515 - DNA, 15 bp, Homo sapiens
cccaggtagctggga

SEQ ID NO: 1054516 - DNA, 15 bp, Homo sapiens
ccaggtagctgggag

SEQ ID NO: 1054517 - DNA, 15 bp, Homo sapiens
caggtagctgggagc

SEQ ID NO: 1054518 - DNA, 15 bp, Homo sapiens
aggtagctgggagca

SEQ ID NO: 1054519 - DNA, 15 bp, Homo sapiens
ggtagctgggagcac

SEQ ID NO: 1054520 - DNA, 15 bp, Homo sapiens
gtagctgggagcaca

SEQ ID NO: 1054521 - DNA, 15 bp, Homo sapiens
tagctgggagcacag

SEQ ID NO: 1054522 - DNA, 15 bp, Homo sapiens
agctgggagcacagg

SEQ ID NO: 1054523 - DNA, 15 bp, Homo sapiens
gctgggagcacaggt

SEQ ID NO: 1054524 - DNA, 15 bp, Homo sapiens
ctgggagcacaggta

SEQ ID NO: 1054525 - DNA, 15 bp, Homo sapiens
tgggagcacaggtac

SEQ ID NO: 1054526 - DNA, 15 bp, Homo sapiens
gggagcacaggtaca

SEQ ID NO: 1054527 - DNA, 15 bp, Homo sapiens
ggagcacaggtacac

SEQ ID NO: 1054528 - DNA, 15 bp, Homo sapiens
gagcacaggtacaca

SEQ ID NO: 1054529 - DNA, 15 bp, Homo sapiens
agcacaggtacacac

SEQ ID NO: 1054530 - DNA, 15 bp, Homo sapiens
gcacaggtacacacc

SEQ ID NO: 1054531 - DNA, 15 bp, Homo sapiens
cacaggtacacacca

SEQ ID NO: 1054532 - DNA, 15 bp, Homo sapiens
acaggtacacaccac

SEQ ID NO: 1054533 - DNA, 15 bp, Homo sapiens
caggtacacaccacc

SEQ ID NO: 1054534 - DNA, 15 bp, Homo sapiens
aggtacacaccacca

SEQ ID NO: 1054535 - DNA, 15 bp, Homo sapiens
ggtacacaccaccat

SEQ ID NO: 1054536 - DNA, 15 bp, Homo sapiens
gtacacaccaccata

SEQ ID NO: 1054537 - DNA, 15 bp, Homo sapiens
tacacaccaccatac

SEQ ID NO: 1054538 - DNA, 15 bp, Homo sapiens
acacaccaccatacc

SEQ ID NO: 1054539 - DNA, 15 bp, Homo sapiens
cacaccaccatacct

SEQ ID NO: 1054540 - DNA, 15 bp, Homo sapiens
acaccaccatacctg

SEQ ID NO: 1054541 - DNA, 15 bp, Homo sapiens
caccaccatacctgg

SEQ ID NO: 1054542 - DNA, 15 bp, Homo sapiens
accaccatacctggc

SEQ ID NO: 1054543 - DNA, 15 bp, Homo sapiens
ccaccatacctggct

SEQ ID NO: 1054544 - DNA, 15 bp, Homo sapiens
caccatacctggcta

SEQ ID NO: 1054545 - DNA, 15 bp, Homo sapiens
accatacctggctaa

SEQ ID NO: 1054546 - DNA, 15 bp, Homo sapiens
ccatacctggctaat

SEQ ID NO: 1054547 - DNA, 15 bp, Homo sapiens
catacctggctaatt

SEQ ID NO: 1054548 - DNA, 15 bp, Homo sapiens
atacctggctaattt

SEQ ID NO: 1054549 - DNA, 15 bp, Homo sapiens
tacctggctaattta

SEQ ID NO: 1054550 - DNA, 15 bp, Homo sapiens
acctggctaatttat

SEQ ID NO: 1054551 - DNA, 15 bp, Homo sapiens
cctggctaatttatt

SEQ ID NO: 1054552 - DNA, 15 bp, Homo sapiens
ctggctaatttattt

SEQ ID NO: 1054553 - DNA, 15 bp, Homo sapiens
tggctaatttatttt

SEQ ID NO: 1054554 - DNA, 15 bp, Homo sapiens
ggctaatttatttta

SEQ ID NO: 1054555 - DNA, 15 bp, Homo sapiens
gctaatttattttat

SEQ ID NO: 1054556 - DNA, 15 bp, Homo sapiens
ctaatttattttatc

SEQ ID NO: 1054557 - DNA, 15 bp, Homo sapiens
taatttattttatct

SEQ ID NO: 1054558 - DNA, 15 bp, Homo sapiens
aatttattttatctt

SEQ ID NO: 1054559 - DNA, 15 bp, Homo sapiens
atttattttatctta

SEQ ID NO: 1054560 - DNA, 15 bp, Homo sapiens
tttattttatcttat

SEQ ID NO: 1054561 - DNA, 15 bp, Homo sapiens
ttattttatcttatt

SEQ ID NO: 1054562 - DNA, 15 bp, Homo sapiens
tattttatcttattt

SEQ ID NO: 1054563 - DNA, 15 bp, Homo sapiens
attttatcttatttc

SEQ ID NO: 1054564 - DNA, 15 bp, Homo sapiens
ttttatcttatttca

SEQ ID NO: 1054565 - DNA, 15 bp, Homo sapiens
tttatcttatttcaa

SEQ ID NO: 1054566 - DNA, 15 bp, Homo sapiens
ttatcttatttcaat

SEQ ID NO: 1054567 - DNA, 15 bp, Homo sapiens
tatcttatttcaatt

SEQ ID NO: 1054568 - DNA, 15 bp, Homo sapiens
atcttatttcaattt

SEQ ID NO: 1054569 - DNA, 15 bp, Homo sapiens
tcttatttcaatttt

SEQ ID NO: 1054570 - DNA, 15 bp, Homo sapiens
cttatttcaattttt

SEQ ID NO: 1054571 - DNA, 15 bp, Homo sapiens
ttatttcaatttttt

SEQ ID NO: 1054572 - DNA, 15 bp, Homo sapiens
tatttcaattttttt

SEQ ID NO: 1054573 - DNA, 15 bp, Homo sapiens
atttcaatttttttt

SEQ ID NO: 1054574 - DNA, 15 bp, Homo sapiens
tttcaattttttttt

SEQ ID NO: 1054575 - DNA, 15 bp, Homo sapiens
ttcaatttttttttt

SEQ ID NO: 1054576 - DNA, 15 bp, Homo sapiens
tcaattttttttttt

SEQ ID NO: 1054577 - DNA, 15 bp, Homo sapiens
caatttttttttttt

SEQ ID NO: 1054578 - DNA, 15 bp, Homo sapiens
tttttttttttgtag

SEQ ID NO: 1054579 - DNA, 15 bp, Homo sapiens
ttttttttttgtaga

SEQ ID NO: 1054580 - DNA, 15 bp, Homo sapiens
tttttttttgtagag

SEQ ID NO: 1054581 - DNA, 15 bp, Homo sapiens
ttttttttgtagagg

SEQ ID NO: 1054582 - DNA, 15 bp, Homo sapiens
tttttttgtagaggt

SEQ ID NO: 1054583 - DNA, 15 bp, Homo sapiens
ttttttgtagaggtg

SEQ ID NO: 1054584 - DNA, 15 bp, Homo sapiens
tttttgtagaggtgg

SEQ ID NO: 1054585 - DNA, 15 bp, Homo sapiens
ttttgtagaggtggg

SEQ ID NO: 1054586 - DNA, 15 bp, Homo sapiens
tttgtagaggtgggg

SEQ ID NO: 1054587 - DNA, 15 bp, Homo sapiens
ttgtagaggtggggt

SEQ ID NO: 1054588 - DNA, 15 bp, Homo sapiens
tgtagaggtggggtt

SEQ ID NO: 1054589 - DNA, 15 bp, Homo sapiens
gtagaggtggggttg

SEQ ID NO: 1054590 - DNA, 15 bp, Homo sapiens
tagaggtggggttgt

SEQ ID NO: 1054591 - DNA, 15 bp, Homo sapiens
agaggtggggttgtg

SEQ ID NO: 1054592 - DNA, 15 bp, Homo sapiens
gaggtggggttgtgc

SEQ ID NO: 1054593 - DNA, 15 bp, Homo sapiens
aggtggggttgtgcc

SEQ ID NO: 1054594 - DNA, 15 bp, Homo sapiens
ggtggggttgtgccg

SEQ ID NO: 1054595 - DNA, 15 bp, Homo sapiens
gtggggttgtgccgt

SEQ ID NO: 1054596 - DNA, 15 bp, Homo sapiens
tggggttgtgccgtc

SEQ ID NO: 1054597 - DNA, 15 bp, Homo sapiens
ggggttgtgccgtct

SEQ ID NO: 1054598 - DNA, 15 bp, Homo sapiens
gggttgtgccgtctt

SEQ ID NO: 1054599 - DNA, 15 bp, Homo sapiens
ggttgtgccgtcttg

SEQ ID NO: 1054600 - DNA, 15 bp, Homo sapiens
gttgtgccgtcttgc

SEQ ID NO: 1054601 - DNA, 15 bp, Homo sapiens
ttgtgccgtcttgcc

SEQ ID NO: 1054602 - DNA, 15 bp, Homo sapiens
tgtgccgtcttgccc

SEQ ID NO: 1054603 - DNA, 15 bp, Homo sapiens
gtgccgtcttgcccg

SEQ ID NO: 1054604 - DNA, 15 bp, Homo sapiens
tgccgtcttgcccgg

SEQ ID NO: 1054605 - DNA, 15 bp, Homo sapiens
gccgtcttgcccggg

SEQ ID NO: 1054606 - DNA, 15 bp, Homo sapiens
ccgtcttgcccgggc

SEQ ID NO: 1054607 - DNA, 15 bp, Homo sapiens
cgtcttgcccgggct

SEQ ID NO: 1054608 - DNA, 15 bp, Homo sapiens
gtcttgcccgggctt

SEQ ID NO: 1054609 - DNA, 15 bp, Homo sapiens
tcttgcccgggctta

SEQ ID NO: 1054610 - DNA, 15 bp, Homo sapiens
cttgcccgggcttag

SEQ ID NO: 1054611 - DNA, 15 bp, Homo sapiens
ttgcccgggcttagt

SEQ ID NO: 1054612 - DNA, 15 bp, Homo sapiens
tgcccgggcttagtt

SEQ ID NO: 1054613 - DNA, 15 bp, Homo sapiens
gcccgggcttagttt

SEQ ID NO: 1054614 - DNA, 15 bp, Homo sapiens
cccgggcttagtttt

SEQ ID NO: 1054615 - DNA, 15 bp, Homo sapiens
ccgggcttagttttt

SEQ ID NO: 1054616 - DNA, 15 bp, Homo sapiens
cgggcttagtttttg

SEQ ID NO: 1054617 - DNA, 15 bp, Homo sapiens
gggcttagtttttgc

SEQ ID NO: 1054618 - DNA, 15 bp, Homo sapiens
ggcttagtttttgct

SEQ ID NO: 1054619 - DNA, 15 bp, Homo sapiens
gcttagtttttgctt

SEQ ID NO: 1054620 - DNA, 15 bp, Homo sapiens
cttagtttttgcttc

SEQ ID NO: 1054621 - DNA, 15 bp, Homo sapiens
ttagtttttgcttct

SEQ ID NO: 1054622 - DNA, 15 bp, Homo sapiens
tagtttttgcttcta

SEQ ID NO: 1054623 - DNA, 15 bp, Homo sapiens
agtttttgcttctaa

SEQ ID NO: 1054624 - DNA, 15 bp, Homo sapiens
gtttttgcttctaaa

SEQ ID NO: 1054625 - DNA, 15 bp, Homo sapiens
tttttgcttctaaat

SEQ ID NO: 1054626 - DNA, 15 bp, Homo sapiens
ttttgcttctaaata

SEQ ID NO: 1054627 - DNA, 15 bp, Homo sapiens
tttgcttctaaataa

SEQ ID NO: 1054628 - DNA, 15 bp, Homo sapiens
ttgcttctaaataaa

SEQ ID NO: 1054629 - DNA, 15 bp, Homo sapiens
tgcttctaaataaaa

SEQ ID NO: 1054630 - DNA, 15 bp, Homo sapiens
gcttctaaataaaat

SEQ ID NO: 1054631 - DNA, 15 bp, Homo sapiens
cttctaaataaaata

SEQ ID NO: 1054632 - DNA, 15 bp, Homo sapiens
ttctaaataaaatat

SEQ ID NO: 1054633 - DNA, 15 bp, Homo sapiens
tctaaataaaatata

SEQ ID NO: 1054634 - DNA, 15 bp, Homo sapiens
ctaaataaaatatac

SEQ ID NO: 1054635 - DNA, 15 bp, Homo sapiens
taaataaaatataca

SEQ ID NO: 1054636 - DNA, 15 bp, Homo sapiens
aaataaaatatacat

SEQ ID NO: 1054637 - DNA, 15 bp, Homo sapiens
aataaaatatacata

SEQ ID NO: 1054638 - DNA, 15 bp, Homo sapiens
ataaaatatacatag

SEQ ID NO: 1054639 - DNA, 15 bp, Homo sapiens
taaaatatacataga

SEQ ID NO: 1054640 - DNA, 15 bp, Homo sapiens
aaaatatacatagat

SEQ ID NO: 1054641 - DNA, 15 bp, Homo sapiens
aaatatacatagata

SEQ ID NO: 1054642 - DNA, 15 bp, Homo sapiens
aatatacatagatac

SEQ ID NO: 1054643 - DNA, 15 bp, Homo sapiens
atatacatagataca

SEQ ID NO: 1054644 - DNA, 15 bp, Homo sapiens
tatacatagatacaa

SEQ ID NO: 1054645 - DNA, 15 bp, Homo sapiens
atacatagatacaaa

SEQ ID NO: 1054646 - DNA, 15 bp, Homo sapiens
tacatagatacaaag

SEQ ID NO: 1054647 - DNA, 15 bp, Homo sapiens
acatagatacaaaga

SEQ ID NO: 1054648 - DNA, 15 bp, Homo sapiens
catagatacaaagaa

SEQ ID NO: 1054649 - DNA, 15 bp, Homo sapiens
atagatacaaagaag

SEQ ID NO: 1054650 - DNA, 15 bp, Homo sapiens
tagatacaaagaagt

SEQ ID NO: 1054651 - DNA, 15 bp, Homo sapiens
agatacaaagaagtt

SEQ ID NO: 1054652 - DNA, 15 bp, Homo sapiens
gatacaaagaagttc

SEQ ID NO: 1054653 - DNA, 15 bp, Homo sapiens
atacaaagaagttcc

SEQ ID NO: 1054654 - DNA, 15 bp, Homo sapiens
tacaaagaagttccc

SEQ ID NO: 1054655 - DNA, 15 bp, Homo sapiens
acaaagaagttccca

SEQ ID NO: 1054656 - DNA, 15 bp, Homo sapiens
caaagaagttcccag

SEQ ID NO: 1054657 - DNA, 15 bp, Homo sapiens
aaagaagttcccaga

SEQ ID NO: 1054658 - DNA, 15 bp, Homo sapiens
aagaagttcccagat

SEQ ID NO: 1054659 - DNA, 15 bp, Homo sapiens
agaagttcccagatg

SEQ ID NO: 1054660 - DNA, 15 bp, Homo sapiens
gaagttcccagatga

SEQ ID NO: 1054661 - DNA, 15 bp, Homo sapiens
aagttcccagatgac

SEQ ID NO: 1054662 - DNA, 15 bp, Homo sapiens
agttcccagatgact

SEQ ID NO: 1054663 - DNA, 15 bp, Homo sapiens
gttcccagatgactc

SEQ ID NO: 1054664 - DNA, 15 bp, Homo sapiens
ttcccagatgactca

SEQ ID NO: 1054665 - DNA, 15 bp, Homo sapiens
tcccagatgactcat

SEQ ID NO: 1054666 - DNA, 15 bp, Homo sapiens
cccagatgactcatg

SEQ ID NO: 1054667 - DNA, 15 bp, Homo sapiens
ccagatgactcatgc

SEQ ID NO: 1054668 - DNA, 15 bp, Homo sapiens
cagatgactcatgca

SEQ ID NO: 1054669 - DNA, 15 bp, Homo sapiens
agatgactcatgcag

SEQ ID NO: 1054670 - DNA, 15 bp, Homo sapiens
gatgactcatgcagt

SEQ ID NO: 1054671 - DNA, 15 bp, Homo sapiens
atgactcatgcagtt

SEQ ID NO: 1054672 - DNA, 15 bp, Homo sapiens
tgactcatgcagttt

SEQ ID NO: 1054673 - DNA, 15 bp, Homo sapiens
gactcatgcagtttt

SEQ ID NO: 1054674 - DNA, 15 bp, Homo sapiens
actcatgcagttttt

SEQ ID NO: 1054675 - DNA, 15 bp, Homo sapiens
ctcatgcagtttttg

SEQ ID NO: 1054676 - DNA, 15 bp, Homo sapiens
tcatgcagtttttgg

SEQ ID NO: 1054677 - DNA, 15 bp, Homo sapiens
catgcagtttttggg

SEQ ID NO: 1054678 - DNA, 15 bp, Homo sapiens
atgcagtttttgggg

SEQ ID NO: 1054679 - DNA, 15 bp, Homo sapiens
tgcagtttttggggt

SEQ ID NO: 1054680 - DNA, 15 bp, Homo sapiens
gcagtttttggggtt

SEQ ID NO: 1054681 - DNA, 15 bp, Homo sapiens
cagtttttggggttt

SEQ ID NO: 1054682 - DNA, 15 bp, Homo sapiens
agtttttggggtttt

SEQ ID NO: 1054683 - DNA, 15 bp, Homo sapiens
gtttttggggttttt

SEQ ID NO: 1054684 - DNA, 15 bp, Homo sapiens
tttttggggtttttt

SEQ ID NO: 1054685 - DNA, 15 bp, Homo sapiens
ttttggggttttttg

SEQ ID NO: 1054686 - DNA, 15 bp, Homo sapiens
tttggggttttttgc

SEQ ID NO: 1054687 - DNA, 15 bp, Homo sapiens
ttggggttttttgct

SEQ ID NO: 1054688 - DNA, 15 bp, Homo sapiens
tggggttttttgctt

SEQ ID NO: 1054689 - DNA, 15 bp, Homo sapiens
ggggttttttgcttt

SEQ ID NO: 1054690 - DNA, 15 bp, Homo sapiens
gggttttttgctttg

SEQ ID NO: 1054691 - DNA, 15 bp, Homo sapiens
ggttttttgctttgt

SEQ ID NO: 1054692 - DNA, 15 bp, Homo sapiens
gttttttgctttgtt

SEQ ID NO: 1054693 - DNA, 15 bp, Homo sapiens
ttttttgctttgttt

SEQ ID NO: 1054694 - DNA, 15 bp, Homo sapiens
tttttgctttgtttt

SEQ ID NO: 1054695 - DNA, 15 bp, Homo sapiens
ttttgctttgttttt

SEQ ID NO: 1054696 - DNA, 15 bp, Homo sapiens
tttgctttgtttttt

SEQ ID NO: 1054697 - DNA, 15 bp, Homo sapiens
ttgctttgttttttg

SEQ ID NO: 1054698 - DNA, 15 bp, Homo sapiens
tgctttgttttttga

SEQ ID NO: 1054699 - DNA, 15 bp, Homo sapiens
gctttgttttttgag

SEQ ID NO: 1054700 - DNA, 15 bp, Homo sapiens
ctttgttttttgaga

SEQ ID NO: 1054701 - DNA, 15 bp, Homo sapiens
gttttttgagacagg

SEQ ID NO: 1054702 - DNA, 15 bp, Homo sapiens
ttttgagacagggta

SEQ ID NO: 1054703 - DNA, 15 bp, Homo sapiens
tttgagacagggtat

SEQ ID NO: 1054704 - DNA, 15 bp, Homo sapiens
ttgagacagggtatc

SEQ ID NO: 1054705 - DNA, 15 bp, Homo sapiens
tgagacagggtatca

SEQ ID NO: 1054706 - DNA, 15 bp, Homo sapiens
gagacagggtatcac

SEQ ID NO: 1054707 - DNA, 15 bp, Homo sapiens
agacagggtatcact

SEQ ID NO: 1054708 - DNA, 15 bp, Homo sapiens
gacagggtatcactg

SEQ ID NO: 1054709 - DNA, 15 bp, Homo sapiens
acagggtatcactgt

SEQ ID NO: 1054710 - DNA, 15 bp, Homo sapiens
cagggtatcactgtc

SEQ ID NO: 1054711 - DNA, 15 bp, Homo sapiens
agggtatcactgtcg

SEQ ID NO: 1054712 - DNA, 15 bp, Homo sapiens
gggtatcactgtcgc

SEQ ID NO: 1054713 - DNA, 15 bp, Homo sapiens
ggtatcactgtcgcc

SEQ ID NO: 1054714 - DNA, 15 bp, Homo sapiens
gtatcactgtcgccc

SEQ ID NO: 1054715 - DNA, 15 bp, Homo sapiens
tatcactgtcgccca

SEQ ID NO: 1054716 - DNA, 15 bp, Homo sapiens
atcactgtcgcccag

SEQ ID NO: 1054717 - DNA, 15 bp, Homo sapiens
tcactgtcgcccagg

SEQ ID NO: 1054718 - DNA, 15 bp, Homo sapiens
cactgtcgcccaggc

SEQ ID NO: 1054719 - DNA, 15 bp, Homo sapiens
actgtcgcccaggct

SEQ ID NO: 1054720 - DNA, 15 bp, Homo sapiens
gagtgcagtggtgcc

SEQ ID NO: 1054721 - DNA, 15 bp, Homo sapiens
agtgcagtggtgcca

SEQ ID NO: 1054722 - DNA, 15 bp, Homo sapiens
gtgcagtggtgccat

SEQ ID NO: 1054723 - DNA, 15 bp, Homo sapiens
tgcagtggtgccatc

SEQ ID NO: 1054724 - DNA, 15 bp, Homo sapiens
gcagtggtgccatca

SEQ ID NO: 1054725 - DNA, 15 bp, Homo sapiens
cagtggtgccatcat

SEQ ID NO: 1054726 - DNA, 15 bp, Homo sapiens
agtggtgccatcatg

SEQ ID NO: 1054727 - DNA, 15 bp, Homo sapiens
gtggtgccatcatgg

SEQ ID NO: 1054728 - DNA, 15 bp, Homo sapiens
tggtgccatcatggc

SEQ ID NO: 1054729 - DNA, 15 bp, Homo sapiens
ggtgccatcatggct

SEQ ID NO: 1054730 - DNA, 15 bp, Homo sapiens
gtgccatcatggctc

SEQ ID NO: 1054731 - DNA, 15 bp, Homo sapiens
tgccatcatggctca

SEQ ID NO: 1054732 - DNA, 15 bp, Homo sapiens
gccatcatggctcac

SEQ ID NO: 1054733 - DNA, 15 bp, Homo sapiens
ccatcatggctcaca

SEQ ID NO: 1054734 - DNA, 15 bp, Homo sapiens
catcatggctcacag

SEQ ID NO: 1054735 - DNA, 15 bp, Homo sapiens
atcatggctcacagc

SEQ ID NO: 1054736 - DNA, 15 bp, Homo sapiens
tcatggctcacagca

SEQ ID NO: 1054737 - DNA, 15 bp, Homo sapiens
catggctcacagcag

SEQ ID NO: 1054738 - DNA, 15 bp, Homo sapiens
atggctcacagcagt

SEQ ID NO: 1054739 - DNA, 15 bp, Homo sapiens
tggctcacagcagtc

SEQ ID NO: 1054740 - DNA, 15 bp, Homo sapiens
ggctcacagcagtct

SEQ ID NO: 1054741 - DNA, 15 bp, Homo sapiens
gctcacagcagtctg

SEQ ID NO: 1054742 - DNA, 15 bp, Homo sapiens
ctcacagcagtctga

SEQ ID NO: 1054743 - DNA, 15 bp, Homo sapiens
tcacagcagtctgac

SEQ ID NO: 1054744 - DNA, 15 bp, Homo sapiens
cacagcagtctgacc

SEQ ID NO: 1054745 - DNA, 15 bp, Homo sapiens
acagcagtctgacct

SEQ ID NO: 1054746 - DNA, 15 bp, Homo sapiens
cagcagtctgacctc

SEQ ID NO: 1054747 - DNA, 15 bp, Homo sapiens
agcagtctgacctcc

SEQ ID NO: 1054748 - DNA, 15 bp, Homo sapiens
gcagtctgacctcca

SEQ ID NO: 1054749 - DNA, 15 bp, Homo sapiens
cagtctgacctccat

SEQ ID NO: 1054750 - DNA, 15 bp, Homo sapiens
agtctgacctccatc

SEQ ID NO: 1054751 - DNA, 15 bp, Homo sapiens
gtctgacctccatca

SEQ ID NO: 1054752 - DNA, 15 bp, Homo sapiens
tctgacctccatcac

SEQ ID NO: 1054753 - DNA, 15 bp, Homo sapiens
ctgacctccatcact

SEQ ID NO: 1054754 - DNA, 15 bp, Homo sapiens
tgacctccatcactc

SEQ ID NO: 1054755 - DNA, 15 bp, Homo sapiens
gacctccatcactca

SEQ ID NO: 1054756 - DNA, 15 bp, Homo sapiens
acctccatcactcaa

SEQ ID NO: 1054757 - DNA, 15 bp, Homo sapiens
cctccatcactcaat

SEQ ID NO: 1054758 - DNA, 15 bp, Homo sapiens
ctccatcactcaatt

SEQ ID NO: 1054759 - DNA, 15 bp, Homo sapiens
tccatcactcaattg

SEQ ID NO: 1054760 - DNA, 15 bp, Homo sapiens
ccatcactcaattga

SEQ ID NO: 1054761 - DNA, 15 bp, Homo sapiens
catcactcaattgat

SEQ ID NO: 1054762 - DNA, 15 bp, Homo sapiens
atcactcaattgatc

SEQ ID NO: 1054763 - DNA, 15 bp, Homo sapiens
tcactcaattgatcc

SEQ ID NO: 1054764 - DNA, 15 bp, Homo sapiens
cactcaattgatcct

SEQ ID NO: 1054765 - DNA, 15 bp, Homo sapiens
actcaattgatcctc

SEQ ID NO: 1054766 - DNA, 15 bp, Homo sapiens
ctcaattgatcctct

SEQ ID NO: 1054767 - DNA, 15 bp, Homo sapiens
tcaattgatcctctt

SEQ ID NO: 1054768 - DNA, 15 bp, Homo sapiens
caattgatcctctta

SEQ ID NO: 1054769 - DNA, 15 bp, Homo sapiens
aattgatcctcttac

SEQ ID NO: 1054770 - DNA, 15 bp, Homo sapiens
attgatcctcttacc

SEQ ID NO: 1054771 - DNA, 15 bp, Homo sapiens
ttgatcctcttaccc

SEQ ID NO: 1054772 - DNA, 15 bp, Homo sapiens
tgatcctcttacccc

SEQ ID NO: 1054773 - DNA, 15 bp, Homo sapiens
gatcctcttacccca

SEQ ID NO: 1054774 - DNA, 15 bp, Homo sapiens
atcctcttaccccag

SEQ ID NO: 1054775 - DNA, 15 bp, Homo sapiens
tcctcttaccccagc

SEQ ID NO: 1054776 - DNA, 15 bp, Homo sapiens
cctcttaccccagcc

SEQ ID NO: 1054777 - DNA, 15 bp, Homo sapiens
ctcttaccccagcct

SEQ ID NO: 1054778 - DNA, 15 bp, Homo sapiens
tcttaccccagcctc

SEQ ID NO: 1054779 - DNA, 15 bp, Homo sapiens
cttaccccagcctcc

SEQ ID NO: 1054780 - DNA, 15 bp, Homo sapiens
ttaccccagcctcct

SEQ ID NO: 1054781 - DNA, 15 bp, Homo sapiens
taccccagcctcctg

SEQ ID NO: 1054782 - DNA, 15 bp, Homo sapiens
accccagcctcctga

SEQ ID NO: 1054783 - DNA, 15 bp, Homo sapiens
ccccagcctcctgag

SEQ ID NO: 1054784 - DNA, 15 bp, Homo sapiens
cccagcctcctgagt

SEQ ID NO: 1054785 - DNA, 15 bp, Homo sapiens
ccagcctcctgagta

SEQ ID NO: 1054786 - DNA, 15 bp, Homo sapiens
gctgggactacaagc
